United States Patent Application Publication US 2005/0244851 A1 - sequence listing, part 60

SEQ ID NO: 2330807 - DNA, 25 bp, Homo sapien
tatcaagtaactgcagtgggtgcct

SEQ ID NO: 2330808 - DNA, 25 bp, Homo sapien
tgagcctgcatttccgcaagtaagc

SEQ ID NO: 2330809 - DNA, 25 bp, Homo sapien
gatttggaacgggaagacagataca

SEQ ID NO: 2330810 - DNA, 25 bp, Homo sapien
tcaaggaaatggaaaccggctcaat

SEQ ID NO: 2330811 - DNA, 25 bp, Homo sapien
tatagagacgaccagaaaagtttgc

SEQ ID NO: 2330812 - DNA, 25 bp, Homo sapien
aaacatcatgaaatatacctttggg

SEQ ID NO: 2330813 - DNA, 25 bp, Homo sapien
taaagatcacccaaataccacagcc

SEQ ID NO: 2330814 - DNA, 25 bp, Homo sapien
tgggaacatatatccatagcaataa

SEQ ID NO: 2330815 - DNA, 25 bp, Homo sapien
ccatcttttactgaaggatgtttca

SEQ ID NO: 2330816 - DNA, 25 bp, Homo sapien
aactcgggctatcaatggggtggca

SEQ ID NO: 2330817 - DNA, 25 bp, Homo sapien
tcagccaagtcaactcgggctatca

SEQ ID NO: 2330818 - DNA, 25 bp, Homo sapien
ggtaatcctctttcaccgagcacag

SEQ ID NO: 2330819 - DNA, 25 bp, Homo sapien
gggacaaccgcctagctggccagat

SEQ ID NO: 2330820 - DNA, 25 bp, Homo sapien
ctgaactcaacccaaacaactcggg

SEQ ID NO: 2330821 - DNA, 25 bp, Homo sapien
catggtcatgatcagccaatcagtt

SEQ ID NO: 2330822 - DNA, 25 bp, Homo sapien
ggctaactgcatggtcatgatcagc

SEQ ID NO: 2330823 - DNA, 25 bp, Homo sapien
tgaactcaacccaaacaactcggga

SEQ ID NO: 2330824 - DNA, 25 bp, Homo sapien
ctgaagttggcgcaggtacggactc

SEQ ID NO: 2330825 - DNA, 25 bp, Homo sapien
gttggcgcaggtacggactcgacct

SEQ ID NO: 2330826 - DNA, 25 bp, Homo sapien
agaggtccctgaagttggcgcaggt

SEQ ID NO: 2330827 - DNA, 25 bp, Homo sapien
gcaggtacggactcgacctggccat

SEQ ID NO: 2330828 - DNA, 25 bp, Homo sapien
atcctcctccacgtcgtcgtttagg

SEQ ID NO: 2330829 - DNA, 25 bp, Homo sapien
cacgtcgtcgtttaggtagtcgtcg

SEQ ID NO: 2330830 - DNA, 25 bp, Homo sapien
tgcagagctcctcggcgtcgatgaa

SEQ ID NO: 2330831 - DNA, 25 bp, Homo sapien
gatgaacacggactcttcatcctcc

SEQ ID NO: 2330832 - DNA, 25 bp, Homo sapien
gaggctgccagcctttacgccccca

SEQ ID NO: 2330833 - DNA, 25 bp, Homo sapien
cacccggggaggctgccagccttta

SEQ ID NO: 2330834 - DNA, 25 bp, Homo sapien
cgcggaggcacccggggaggctgcc

SEQ ID NO: 2330835 - DNA, 25 bp, Homo sapien
ggaggcacccggggaggctgccagc

SEQ ID NO: 2330836 - DNA, 25 bp, Homo sapien
tttagaatgacgactaagccctcca

SEQ ID NO: 2330837 - DNA, 25 bp, Homo sapien
tttctgcctaaatctgcgctgtcca

SEQ ID NO: 2330838 - DNA, 25 bp, Homo sapien
ccaaacatgctagccagttgatgat

SEQ ID NO: 2330839 - DNA, 25 bp, Homo sapien
agttctactgaacagcaccggtcgg

SEQ ID NO: 2330840 - DNA, 25 bp, Homo sapien
gcacctgttatcggaaaacgtccaa

SEQ ID NO: 2330841 - DNA, 25 bp, Homo sapien
accaagcacctgttatcggaaaacg

SEQ ID NO: 2330842 - DNA, 25 bp, Homo sapien
agcacctgttatcggaaaacgtcca

SEQ ID NO: 2330843 - DNA, 25 bp, Homo sapien
caagcacctgttatcggaaaacgtc

SEQ ID NO: 2330844 - DNA, 25 bp, Homo sapien
gatagctccttgatcccaccacagg

SEQ ID NO: 2330845 - DNA, 25 bp, Homo sapien
ctgcaaaaagtaagacggaaatcct

SEQ ID NO: 2330846 - DNA, 25 bp, Homo sapien
tcctgaccattctgtgtaggctgct

SEQ ID NO: 2330847 - DNA, 25 bp, Homo sapien
tctcattgtctaggaacaactcttc

SEQ ID NO: 2330848 - DNA, 25 bp, Homo sapien
cattatcttcggaaactgcaaagct

SEQ ID NO: 2330849 - DNA, 25 bp, Homo sapien
catctctttagaacctgaccctatg

SEQ ID NO: 2330850 - DNA, 25 bp, Homo sapien
aatccaagtttccacggatgtgtac

SEQ ID NO: 2330851 - DNA, 25 bp, Homo sapien
tccatttaaagtgtcgaggcagaag

SEQ ID NO: 2330852 - DNA, 25 bp, Homo sapien
tatccaacttgcctcacatcgcagg

SEQ ID NO: 2330853 - DNA, 25 bp, Homo sapien
catcaggtcacaaattgaaaaggcg

SEQ ID NO: 2330854 - DNA, 25 bp, Homo sapien
ggcaagcaccttttcgacatcgaca

SEQ ID NO: 2330855 - DNA, 25 bp, Homo sapien
acggctaacgattgtggtcttccca

SEQ ID NO: 2330856 - DNA, 25 bp, Homo sapien
ctacagatgaaatgtcaaaggtttt

SEQ ID NO: 2330857 - DNA, 25 bp, Homo sapien
acagatgaaatgtcaaaggttttac

SEQ ID NO: 2330858 - DNA, 25 bp, Homo sapien
tacagatgaaatgtcaaaggtttta

SEQ ID NO: 2330859 - DNA, 25 bp, Homo sapien
agcagtgcactgatttacttctacc

SEQ ID NO: 2330860 - DNA, 25 bp, Homo sapien
aaattcctactgattgctttaagaa

SEQ ID NO: 2330861 - DNA, 25 bp, Homo sapien
gaaaagcattgatctaaatgatcag

SEQ ID NO: 2330862 - DNA, 25 bp, Homo sapien
tggtaacaatttacagactgctgct

SEQ ID NO: 2330863 - DNA, 25 bp, Homo sapien
ctctaaccgaagaaaatttccatgg

SEQ ID NO: 2330864 - DNA, 25 bp, Homo sapien
gagtccatgaatagaagctataatt

SEQ ID NO: 2330865 - DNA, 25 bp, Homo sapien
ggtcatcattgtttgagtccatgaa

SEQ ID NO: 2330866 - DNA, 25 bp, Homo sapien
ccatggtttgtttgtggtcatcatt

SEQ ID NO: 2330867 - DNA, 25 bp, Homo sapien
caaactcccttcatccacaaccaga

SEQ ID NO: 2330868 - DNA, 25 bp, Homo sapien
caataaatttaagaccgatttgaag

SEQ ID NO: 2330869 - DNA, 25 bp, Homo sapien
gattcctacagataccaaactccct

SEQ ID NO: 2330870 - DNA, 25 bp, Homo sapien
gaccgatttgaagattcctacagat

SEQ ID NO: 2330871 - DNA, 25 bp, Homo sapien
cattgtccacaatgagctgagattc

SEQ ID NO: 2330872 - DNA, 25 bp, Homo sapien
gcaagttaccaggttcaatactggg

SEQ ID NO: 2330873 - DNA, 25 bp, Homo sapien
caatactgggtaactgtctaatgtc

SEQ ID NO: 2330874 - DNA, 25 bp, Homo sapien
ggtttgtctttagctcaatagcaca

SEQ ID NO: 2330875 - DNA, 25 bp, Homo sapien
tctgggagcctgacaaaaataaatg

SEQ ID NO: 2330876 - DNA, 25 bp, Homo sapien
tgactgagaactggcatcctcttct

SEQ ID NO: 2330877 - DNA, 25 bp, Homo sapien
attttggaaattggcgtcttgagat

SEQ ID NO: 2330878 - DNA, 25 bp, Homo sapien
gatgggtaatgttggattatcagag

SEQ ID NO: 2330879 - DNA, 25 bp, Homo sapien
gagcatttatgtgtcaagagcttac

SEQ ID NO: 2330880 - DNA, 25 bp, Homo sapien
tcctaaatgaacctgaattattggg

SEQ ID NO: 2330881 - DNA, 25 bp, Homo sapien
taataagaagccatgcgtttaccca

SEQ ID NO: 2330882 - DNA, 25 bp, Homo sapien
tttaccaaattctagagtattctgc

SEQ ID NO: 2330883 - DNA, 25 bp, Homo sapien
tctgggaagacaaacttagctgcct

SEQ ID NO: 2330884 - DNA, 25 bp, Homo sapien
tgtatgtttccctaatagcagatga

SEQ ID NO: 2330885 - DNA, 25 bp, Homo sapien
tgtacaggatggcactgttccatac

SEQ ID NO: 2330886 - DNA, 25 bp, Homo sapien
gaagattaccgctagaaaacagcca

SEQ ID NO: 2330887 - DNA, 25 bp, Homo sapien
tagaacttgacaatatacaggcctt

SEQ ID NO: 2330888 - DNA, 25 bp, Homo sapien
tcagagctgatattcaactggcaca

SEQ ID NO: 2330889 - DNA, 25 bp, Homo sapien
taatctgggattcctgctaagggcc

SEQ ID NO: 2330890 - DNA, 25 bp, Homo sapien
tcacttaatatgcaggacacccaca

SEQ ID NO: 2330891 - DNA, 25 bp, Homo sapien
ttgtagtaaagttttaactgcagaa

SEQ ID NO: 2330892 - DNA, 25 bp, Homo sapien
gtaaagttttaactgcagaatataa

SEQ ID NO: 2330893 - DNA, 25 bp, Homo sapien
tctaaatgcaataaattgtgatgtt

SEQ ID NO: 2330894 - DNA, 25 bp, Homo sapien
tagtaaagttttaactgcagaatat

SEQ ID NO: 2330895 - DNA, 25 bp, Homo sapien
cagtgatgaaatattggaatctccc

SEQ ID NO: 2330896 - DNA, 25 bp, Homo sapien
gagtccctatgagcttctaaatata

SEQ ID NO: 2330897 - DNA, 25 bp, Homo sapien
tatcttagcataagcttttgttcca

SEQ ID NO: 2330898 - DNA, 25 bp, Homo sapien
ttccattcagagtccctatgagctt

SEQ ID NO: 2330899 - DNA, 25 bp, Homo sapien
gtcattaattagatcacagtcttgc

SEQ ID NO: 2330900 - DNA, 25 bp, Homo sapien
tggtgaggtggcctgtgtagtgttt

SEQ ID NO: 2330901 - DNA, 25 bp, Homo sapien
ttggtgaggtggcctgtgtagtgtt

SEQ ID NO: 2330902 - DNA, 25 bp, Homo sapien
gcagcagcagtcattaattagatca

SEQ ID NO: 2330903 - DNA, 25 bp, Homo sapien
tagcaaaatcaggaagcgtaccaga

SEQ ID NO: 2330904 - DNA, 25 bp, Homo sapien
cagtcgaacgttactttcaaagtca

SEQ ID NO: 2330905 - DNA, 25 bp, Homo sapien
gcgtaccagaaaagtcttcactact

SEQ ID NO: 2330906 - DNA, 25 bp, Homo sapien
tatctctccattgcacagtcgaacg

SEQ ID NO: 2330907 - DNA, 25 bp, Homo sapien
ttccaggccagccatattattaatg

SEQ ID NO: 2330908 - DNA, 25 bp, Homo sapien
tattattaatggtcaaagatcttct

SEQ ID NO: 2330909 - DNA, 25 bp, Homo sapien
gttttatgcgacaatatttcattag

SEQ ID NO: 2330910 - DNA, 25 bp, Homo sapien
atagttcttgcccatgcatgtttta

SEQ ID NO: 2330911 - DNA, 25 bp, Homo sapien
tgtgtccattttatgggttccattt

SEQ ID NO: 2330912 - DNA, 25 bp, Homo sapien
taaaataggttcagacagtttacag

SEQ ID NO: 2330913 - DNA, 25 bp, Homo sapien
gccagactattattatgtgtccatt

SEQ ID NO: 2330914 - DNA, 25 bp, Homo sapien
cctggccagactattattatgtgtc

SEQ ID NO: 2330915 - DNA, 25 bp, Homo sapien
atgctgccagtgctggcggcccgcc

SEQ ID NO: 2330916 - DNA, 25 bp, Homo sapien
acatgctgccagtgctggcggcccg

SEQ ID NO: 2330917 - DNA, 25 bp, Homo sapien
agacatgctgccagtgctggcggcc

SEQ ID NO: 2330918 - DNA, 25 bp, Homo sapien
gctgccagtgctggcggcccgcctt

SEQ ID NO: 2330919 - DNA, 25 bp, Homo sapien
cataatggcattccggagctgagac

SEQ ID NO: 2330920 - DNA, 25 bp, Homo sapien
tctcatcaggcgaagaggcctcgct

SEQ ID NO: 2330921 - DNA, 25 bp, Homo sapien
tgcaatcacatacactcggcagcgg

SEQ ID NO: 2330922 - DNA, 25 bp, Homo sapien
atgctgacggtgtgctgggtcctcc

SEQ ID NO: 2330923 - DNA, 25 bp, Homo sapien
aaaacttgggaacatggaaacatca

SEQ ID NO: 2330924 - DNA, 25 bp, Homo sapien
ataaaacttgggaacatggaaacat

SEQ ID NO: 2330925 - DNA, 25 bp, Homo sapien
acttgggaacatggaaacatcactc

SEQ ID NO: 2330926 - DNA, 25 bp, Homo sapien
ttgggaacatggaaacatcactcct

SEQ ID NO: 2330927 - DNA, 25 bp, Homo sapien
ttaagtccaacagcacaatgcaaca

SEQ ID NO: 2330928 - DNA, 25 bp, Homo sapien
aatgaaggggaaatcagacagtgag

SEQ ID NO: 2330929 - DNA, 25 bp, Homo sapien
tttaagtccaacagcacaatgcaac

SEQ ID NO: 2330930 - DNA, 25 bp, Homo sapien
gtttttaagtccaacagcacaatgc

SEQ ID NO: 2330931 - DNA, 25 bp, Homo sapien
ttggggagttgtcttcagttagagg

SEQ ID NO: 2330932 - DNA, 25 bp, Homo sapien
caaggagatggctgaaactgtgaga

SEQ ID NO: 2330933 - DNA, 25 bp, Homo sapien
caaagatgcagattaggcagctggt

SEQ ID NO: 2330934 - DNA, 25 bp, Homo sapien
tcagtgtgagagtgagaactgtcac

SEQ ID NO: 2330935 - DNA, 25 bp, Homo sapien
acattactgatagccgactgtctcc

SEQ ID NO: 2330936 - DNA, 25 bp, Homo sapien
gaataggtctcaacagaagtttgct

SEQ ID NO: 2330937 - DNA, 25 bp, Homo sapien
tgtaccaaatgttctagcagatcaa

SEQ ID NO: 2330938 - DNA, 25 bp, Homo sapien
tgaggtattaccatgtgaacagcaa

SEQ ID NO: 2330939 - DNA, 25 bp, Homo sapien
aaagtatgactttcagtacaacctg

SEQ ID NO: 2330940 - DNA, 25 bp, Homo sapien
ctaagtttcttgattatcggtgggc

SEQ ID NO: 2330941 - DNA, 25 bp, Homo sapien
agttgcctgggaattaaattattca

SEQ ID NO: 2330942 - DNA, 25 bp, Homo sapien
tctgaagtctggaagacacttgtgg

SEQ ID NO: 2330943 - DNA, 25 bp, Homo sapien
tcttgattatcggtgggcttgaaaa

SEQ ID NO: 2330944 - DNA, 25 bp, Homo sapien
aaacatagttactcggaacaatttg

SEQ ID NO: 2330945 - DNA, 25 bp, Homo sapien
cttggtactttgacgttacgatgtt

SEQ ID NO: 2330946 - DNA, 25 bp, Homo sapien
tcattttgtctccaatagaaaaaca

SEQ ID NO: 2330947 - DNA, 25 bp, Homo sapien
ttgacgttacgatgttcattttgtc

SEQ ID NO: 2330948 - DNA, 25 bp, Homo sapien
catgatgacgtgttgaaatcattaa

SEQ ID NO: 2330949 - DNA, 25 bp, Homo sapien
taatctcttcacttatgtccagtgc

SEQ ID NO: 2330950 - DNA, 25 bp, Homo sapien
cacttatgtccagtgctaccagttc

SEQ ID NO: 2330951 - DNA, 25 bp, Homo sapien
agtgctaccagttctcatgatgacg

SEQ ID NO: 2330952 - DNA, 25 bp, Homo sapien
gcaccatcgagttggctgccagtga

SEQ ID NO: 2330953 - DNA, 25 bp, Homo sapien
tgccagtgaggctagaacacagcag

SEQ ID NO: 2330954 - DNA, 25 bp, Homo sapien
gatggctgatgaagcattgttcccc

SEQ ID NO: 2330955 - DNA, 25 bp, Homo sapien
cacagcaggtggacgaatggagata

SEQ ID NO: 2330956 - DNA, 25 bp, Homo sapien
gaaatgtagggacccataatagcca

SEQ ID NO: 2330957 - DNA, 25 bp, Homo sapien
taggtttaacacactcctgaacaaa

SEQ ID NO: 2330958 - DNA, 25 bp, Homo sapien
tatggaaatgtagggacccataata

SEQ ID NO: 2330959 - DNA, 25 bp, Homo sapien
ttcccaaatctgtaggtttaacaca

SEQ ID NO: 2330960 - DNA, 25 bp, Homo sapien
cagtagcagtaatgaaccaaaataa

SEQ ID NO: 2330961 - DNA, 25 bp, Homo sapien
caagtgcagcaaggttggaagatac

SEQ ID NO: 2330962 - DNA, 25 bp, Homo sapien
gggctctaaccagggcaattagcaa

SEQ ID NO: 2330963 - DNA, 25 bp, Homo sapien
aattaaaggcctacagatgaaaaag

SEQ ID NO: 2330964 - DNA, 25 bp, Homo sapien
ggaatattccgttacatagtattag

SEQ ID NO: 2330965 - DNA, 25 bp, Homo sapien
gaggactataccctgaaatataggc

SEQ ID NO: 2330966 - DNA, 25 bp, Homo sapien
tatttataagaactagtgctttgga

SEQ ID NO: 2330967 - DNA, 25 bp, Homo sapien
gacaatgtgaagctttacctgagga

SEQ ID NO: 2330968 - DNA, 25 bp, Homo sapien
accggtaatgggctggcgccataac

SEQ ID NO: 2330969 - DNA, 25 bp, Homo sapien
cggtaatgggctggcgccataacaa

SEQ ID NO: 2330970 - DNA, 25 bp, Homo sapien
cagaccggtaatgggctggcgccat

SEQ ID NO: 2330971 - DNA, 25 bp, Homo sapien
atgggctggcgccataacaaggttt

SEQ ID NO: 2330972 - DNA, 25 bp, Homo sapien
ggttccaatgaggtagatttcagct

SEQ ID NO: 2330973 - DNA, 25 bp, Homo sapien
gctatgccaccggaagactggcagg

SEQ ID NO: 2330974 - DNA, 25 bp, Homo sapien
gtggttttcaccaagcagtcaagac

SEQ ID NO: 2330975 - DNA, 25 bp, Homo sapien
tgttccactggtgactgatgcgtgt

SEQ ID NO: 2330976 - DNA, 25 bp, Homo sapien
tcacttctgcatcaagcatgaggct

SEQ ID NO: 2330977 - DNA, 25 bp, Homo sapien
tagcacctgagagtcatatgacccc

SEQ ID NO: 2330978 - DNA, 25 bp, Homo sapien
tatacagttgcattcagtgtgccca

SEQ ID NO: 2330979 - DNA, 25 bp, Homo sapien
ccacggttacgttctgaaaggcaga

SEQ ID NO: 2330980 - DNA, 25 bp, Homo sapien
taaagaggatatgcattattggtgt

SEQ ID NO: 2330981 - DNA, 25 bp, Homo sapien
ctctaccaaatggaataaacagtga

SEQ ID NO: 2330982 - DNA, 25 bp, Homo sapien
catggtatttatcgtctatgtatgg

SEQ ID NO: 2330983 - DNA, 25 bp, Homo sapien
tgttctagcctgagtcctacacaat

SEQ ID NO: 2330984 - DNA, 25 bp, Homo sapien
gcccacgtataggaatgattttaac

SEQ ID NO: 2330985 - DNA, 25 bp, Homo sapien
ttttaactaagatgtatgctattcc

SEQ ID NO: 2330986 - DNA, 25 bp, Homo sapien
gatgcacgtaggagaccataatagg

SEQ ID NO: 2330987 - DNA, 25 bp, Homo sapien
taggtggtggtaaatgttttgccca

SEQ ID NO: 2330988 - DNA, 25 bp, Homo sapien
taatttggagacacgagaacccact

SEQ ID NO: 2330989 - DNA, 25 bp, Homo sapien
ctatggtatatggtgggcaatgccc

SEQ ID NO: 2330990 - DNA, 25 bp, Homo sapien
gaatccgggaataagctggacctgg

SEQ ID NO: 2330991 - DNA, 25 bp, Homo sapien
tgtgcccctcatagcagaatccggg

SEQ ID NO: 2330992 - DNA, 25 bp, Homo sapien
tggtggcttaaagccctatgacagg

SEQ ID NO: 2330993 - DNA, 25 bp, Homo sapien
tggcttaaagccctatgacaggctc

SEQ ID NO: 2330994 - DNA, 25 bp, Homo sapien
cttggtggcttaaagccctatgaca

SEQ ID NO: 2330995 - DNA, 25 bp, Homo sapien
atcttggtggcttaaagccctatga

SEQ ID NO: 2330996 - DNA, 25 bp, Homo sapien
ttatatacatgagtaagtgccataa

SEQ ID NO: 2330997 - DNA, 25 bp, Homo sapien
tatatacatgagtaagtgccataaa

SEQ ID NO: 2330998 - DNA, 25 bp, Homo sapien
tttctatgcctttgctctcatttgt

SEQ ID NO: 2330999 - DNA, 25 bp, Homo sapien
tacatgttatgccaattccttttca

SEQ ID NO: 2331000 - DNA, 25 bp, Homo sapien
tgaaccaggctttttctcatgagta

SEQ ID NO: 2331001 - DNA, 25 bp, Homo sapien
tgctatcgctttgtttttctatgcc

SEQ ID NO: 2331002 - DNA, 25 bp, Homo sapien
caaggttcactcaggggcaggctgt

SEQ ID NO: 2331003 - DNA, 25 bp, Homo sapien
gaaattaggagtgcaggctctgctt

SEQ ID NO: 2331004 - DNA, 25 bp, Homo sapien
tcagcggggtgttacaatatcccac

SEQ ID NO: 2331005 - DNA, 25 bp, Homo sapien
ctgtgtgggagtataagtttcttca

SEQ ID NO: 2331006 - DNA, 25 bp, Homo sapien
caattatatttttctcacactctcc

SEQ ID NO: 2331007 - DNA, 25 bp, Homo sapien
tatatttttctcacactctcctttt

SEQ ID NO: 2331008 - DNA, 25 bp, Homo sapien
ctcctggtcttttatttcaattata

SEQ ID NO: 2331009 - DNA, 25 bp, Homo sapien
ttttctcacactctccttttctcat

SEQ ID NO: 2331010 - DNA, 25 bp, Homo sapien
gattcctgggccagcaaccacagca

SEQ ID NO: 2331011 - DNA, 25 bp, Homo sapien
aacagccctcgtaatgttccatgct

SEQ ID NO: 2331012 - DNA, 25 bp, Homo sapien
ataacacgtaccaccctgaccattg

SEQ ID NO: 2331013 - DNA, 25 bp, Homo sapien
tgaccattgcagagtaccagccctg

SEQ ID NO: 2331014 - DNA, 25 bp, Homo sapien
ttcagaggagcgacaggcaacttac

SEQ ID NO: 2331015 - DNA, 25 bp, Homo sapien
aaattcagaggagcgacaggcaact

SEQ ID NO: 2331016 - DNA, 25 bp, Homo sapien
attcagaggagcgacaggcaactta

SEQ ID NO: 2331017 - DNA, 25 bp, Homo sapien
aaaattcagaggagcgacaggcaac

SEQ ID NO: 2331018 - DNA, 25 bp, Homo sapien
ccaggaggaccttccatttgagagc

SEQ ID NO: 2331019 - DNA, 25 bp, Homo sapien
tgtggtctgctctctcgaacatcct

SEQ ID NO: 2331020 - DNA, 25 bp, Homo sapien
cgaacatcctgaacagagtaagagg

SEQ ID NO: 2331021 - DNA, 25 bp, Homo sapien
gctccagggcaacctggaaccactg

SEQ ID NO: 2331022 - DNA, 25 bp, Homo sapien
tttctttttatccacccagctgctc

SEQ ID NO: 2331023 - DNA, 25 bp, Homo sapien
atgaaataagcttgtctcccattgg

SEQ ID NO: 2331024 - DNA, 25 bp, Homo sapien
cttcatttcacgtgtttcatcttcc

SEQ ID NO: 2331025 - DNA, 25 bp, Homo sapien
gcttcatttcacgtgtttcatcttc

SEQ ID NO: 2331026 - DNA, 25 bp, Homo sapien
cttgcttcatttcacgtgtttcatc

SEQ ID NO: 2331027 - DNA, 25 bp, Homo sapien
gcccgtgacattcccatatagcata

SEQ ID NO: 2331028 - DNA, 25 bp, Homo sapien
ccattccactgggttctctcctcta

SEQ ID NO: 2331029 - DNA, 25 bp, Homo sapien
tcccatatagcatattccattccac

SEQ ID NO: 2331030 - DNA, 25 bp, Homo sapien
gacattcccatatagcatattccat

SEQ ID NO: 2331031 - DNA, 25 bp, Homo sapien
taatccagtaccatgttctagtctc

SEQ ID NO: 2331032 - DNA, 25 bp, Homo sapien
cccgtcgggtaatccagtaccatgt

SEQ ID NO: 2331033 - DNA, 25 bp, Homo sapien
catgttctagtctcaaatgtaggta

SEQ ID NO: 2331034 - DNA, 25 bp, Homo sapien
aatgtaggtagtaatgattctgcca

SEQ ID NO: 2331035 - DNA, 25 bp, Homo sapien
tgcaggcctggggatactcttggaa

SEQ ID NO: 2331036 - DNA, 25 bp, Homo sapien
agcaatttgatcattgcaggcctgg

SEQ ID NO: 2331037 - DNA, 25 bp, Homo sapien
ttccatgagcaatttgatcattgca

SEQ ID NO: 2331038 - DNA, 25 bp, Homo sapien
ttgctgatatgactggcattctgcc

SEQ ID NO: 2331039 - DNA, 25 bp, Homo sapien
cagcacctctgccatggagcttggc

SEQ ID NO: 2331040 - DNA, 25 bp, Homo sapien
gctgcatgagctactcctgagtctg

SEQ ID NO: 2331041 - DNA, 25 bp, Homo sapien
cctgagtctgagaattgaggtggca

SEQ ID NO: 2331042 - DNA, 25 bp, Homo sapien
gactctgctgcatgagctactcctg

SEQ ID NO: 2331043 - DNA, 25 bp, Homo sapien
gagggactgctccagccaggctcat

SEQ ID NO: 2331044 - DNA, 25 bp, Homo sapien
tgcaaagtgtgagggactgctccag

SEQ ID NO: 2331045 - DNA, 25 bp, Homo sapien
tgtgagggactgctccagccaggct

SEQ ID NO: 2331046 - DNA, 25 bp, Homo sapien
ctgcaaagtgtgagggactgctcca

SEQ ID NO: 2331047 - DNA, 25 bp, Homo sapien
tctgataactctgtgaaatgctggt

SEQ ID NO: 2331048 - DNA, 25 bp, Homo sapien
ccatttgtgtcgttaaggcttgtca

SEQ ID NO: 2331049 - DNA, 25 bp, Homo sapien
tgaagtataggagcttgtatcacct

SEQ ID NO: 2331050 - DNA, 25 bp, Homo sapien
ccaagcttattgttattagggagcg

SEQ ID NO: 2331051 - DNA, 25 bp, Homo sapien
gcacctgacccaaactatgtatttt

SEQ ID NO: 2331052 - DNA, 25 bp, Homo sapien
ggaccacaagcctgcatcgccacgc

SEQ ID NO: 2331053 - DNA, 25 bp, Homo sapien
gtgccagacaccattagaggtcaca

SEQ ID NO: 2331054 - DNA, 25 bp, Homo sapien
accattagaggtcacagattatttg

SEQ ID NO: 2331055 - DNA, 25 bp, Homo sapien
cactattatgccagggccccctgtt

SEQ ID NO: 2331056 - DNA, 25 bp, Homo sapien
actattatgccagggccccctgttg

SEQ ID NO: 2331057 - DNA, 25 bp, Homo sapien
ttgctacctggtctctatttgccat

SEQ ID NO: 2331058 - DNA, 25 bp, Homo sapien
cttcttgctacctggtctctatttg

SEQ ID NO: 2331059 - DNA, 25 bp, Homo sapien
ctcttcttgctacctggtctctatt

SEQ ID NO: 2331060 - DNA, 25 bp, Homo sapien
tcttgctacctggtctctatttgcc

SEQ ID NO: 2331061 - DNA, 25 bp, Homo sapien
gggccagggcctcggtagcaagaag

SEQ ID NO: 2331062 - DNA, 25 bp, Homo sapien
atcatgagcaggtctgaaggcttct

SEQ ID NO: 2331063 - DNA, 25 bp, Homo sapien
ccagggcctcggtagcaagaaggca

SEQ ID NO: 2331064 - DNA, 25 bp, Homo sapien
ctggatcatgagcaggtctgaaggc

SEQ ID NO: 2331065 - DNA, 25 bp, Homo sapien
tgtttcagtgctccaaagacttggc

SEQ ID NO: 2331066 - DNA, 25 bp, Homo sapien
caaattggcgatggaagttgcctcc

SEQ ID NO: 2331067 - DNA, 25 bp, Homo sapien
gatattcagcataggaagctcttcc

SEQ ID NO: 2331068 - DNA, 25 bp, Homo sapien
gaagaactgtacactcttcggccag

SEQ ID NO: 2331069 - DNA, 25 bp, Homo sapien
tgaaaaagcattgatagcctgggct

SEQ ID NO: 2331070 - DNA, 25 bp, Homo sapien
gcctgggctttaatccaagattgta

SEQ ID NO: 2331071 - DNA, 25 bp, Homo sapien
gattgtacagcttgactcatagatg

SEQ ID NO: 2331072 - DNA, 25 bp, Homo sapien
ttatggcacaccctttgaaaaagca

SEQ ID NO: 2331073 - DNA, 25 bp, Homo sapien
aatttgttgtattttggcccggctg

SEQ ID NO: 2331074 - DNA, 25 bp, Homo sapien
taaagatctccgggcttaaccaatc

SEQ ID NO: 2331075 - DNA, 25 bp, Homo sapien
actctgtgatatgattcagaactga

SEQ ID NO: 2331076 - DNA, 25 bp, Homo sapien
tctgtgatatgattcagaactgatc

SEQ ID NO: 2331077 - DNA, 25 bp, Homo sapien
ctgtgatatgattcagaactgatca

SEQ ID NO: 2331078 - DNA, 25 bp, Homo sapien
ctctgtgatatgattcagaactgat

SEQ ID NO: 2331079 - DNA, 25 bp, Homo sapien
gccattttgagctccgagatctgaa

SEQ ID NO: 2331080 - DNA, 25 bp, Homo sapien
tctctggtgatatgggatgtgactc

SEQ ID NO: 2331081 - DNA, 25 bp, Homo sapien
gatctgaactttcgtgctccactgg

SEQ ID NO: 2331082 - DNA, 25 bp, Homo sapien
aagctcatgtcggaaacctttgcct

SEQ ID NO: 2331083 - DNA, 25 bp, Homo sapien
tgcttcagtcttgtccaacaacgtt

SEQ ID NO: 2331084 - DNA, 25 bp, Homo sapien
tccacccatgcttcttgttccaaag

SEQ ID NO: 2331085 - DNA, 25 bp, Homo sapien
tgtccaacaacgttcaagttccacc

SEQ ID NO: 2331086 - DNA, 25 bp, Homo sapien
gattcattgagttctagcaccccac

SEQ ID NO: 2331087 - DNA, 25 bp, Homo sapien
gctatttctgtcagtttagcttgac

SEQ ID NO: 2331088 - DNA, 25 bp, Homo sapien
aattatgttctagaagctctgaacc

SEQ ID NO: 2331089 - DNA, 25 bp, Homo sapien
tatgttaatggatgctatttctgtc

SEQ ID NO: 2331090 - DNA, 25 bp, Homo sapien
catatcagaattctttgatcaccag

SEQ ID NO: 2331091 - DNA, 25 bp, Homo sapien
cggttgtgttcgtgctgaaattatg

SEQ ID NO: 2331092 - DNA, 25 bp, Homo sapien
tgaagttattgtgggaaaccgtcat

SEQ ID NO: 2331093 - DNA, 25 bp, Homo sapien
atctcggttgtgttcgtgctgaaat

SEQ ID NO: 2331094 - DNA, 25 bp, Homo sapien
gttcgtgctgaaattatgaaagcag

SEQ ID NO: 2331095 - DNA, 25 bp, Homo sapien
caccagagcagagagccttgagtac

SEQ ID NO: 2331096 - DNA, 25 bp, Homo sapien
accagagcagagagccttgagtaca

SEQ ID NO: 2331097 - DNA, 25 bp, Homo sapien
gtatgtgcgcaaggaattcatatgc

SEQ ID NO: 2331098 - DNA, 25 bp, Homo sapien
tttctcctggtatgtgcgcaaggaa

SEQ ID NO: 2331099 - DNA, 25 bp, Homo sapien
tggtagtagtagtgaatgacacaga

SEQ ID NO: 2331100 - DNA, 25 bp, Homo sapien
gatttgccagatgacatgtagcgga

SEQ ID NO: 2331101 - DNA, 25 bp, Homo sapien
ttgccagatgacatgtagcggacct

SEQ ID NO: 2331102 - DNA, 25 bp, Homo sapien
gtagtagtgaatgacacagatttgc

SEQ ID NO: 2331103 - DNA, 25 bp, Homo sapien
tcacacagtgtcgtccctgctttgt

SEQ ID NO: 2331104 - DNA, 25 bp, Homo sapien
ctgctttgtacaatttggtgctttg

SEQ ID NO: 2331105 - DNA, 25 bp, Homo sapien
gaaacggcattactttctaagccat

SEQ ID NO: 2331106 - DNA, 25 bp, Homo sapien
gctttgttgctatcgaaacggcatt

SEQ ID NO: 2331107 - DNA, 25 bp, Homo sapien
gacagctgagccaccataattaaca

SEQ ID NO: 2331108 - DNA, 25 bp, Homo sapien
gtgaccctcacagagcatgttgtaa

SEQ ID NO: 2331109 - DNA, 25 bp, Homo sapien
ttgaactgtctagacagctgagcca

SEQ ID NO: 2331110 - DNA, 25 bp, Homo sapien
ggtcccaaagacacatgcttacatt

SEQ ID NO: 2331111 - DNA, 25 bp, Homo sapien
tttccttggcactgttacgggcatc

SEQ ID NO: 2331112 - DNA, 25 bp, Homo sapien
ttggcactgttacgggcatcagagc

SEQ ID NO: 2331113 - DNA, 25 bp, Homo sapien
tctttccttggcactgttacgggca

SEQ ID NO: 2331114 - DNA, 25 bp, Homo sapien
ccttggcactgttacgggcatcaga

SEQ ID NO: 2331115 - DNA, 25 bp, Homo sapien
aggctcttaggaggatgatttctgg

SEQ ID NO: 2331116 - DNA, 25 bp, Homo sapien
ggtagatttttcctcttgtacaagc

SEQ ID NO: 2331117 - DNA, 25 bp, Homo sapien
tagatttttcctcttgtacaagcat

SEQ ID NO: 2331118 - DNA, 25 bp, Homo sapien
aggaggatgatttctggtagatttt

SEQ ID NO: 2331119 - DNA, 25 bp, Homo sapien
cgtttcttgacaactcggcctctgt

SEQ ID NO: 2331120 - DNA, 25 bp, Homo sapien
taaatttttggattactgtcaacac

SEQ ID NO: 2331121 - DNA, 25 bp, Homo sapien
ccatgtgcccctcgtttcttgacaa

SEQ ID NO: 2331122 - DNA, 25 bp, Homo sapien
tcaacacaagctttgttatactcat

SEQ ID NO: 2331123 - DNA, 25 bp, Homo sapien
catggtgggagcattgtcgaattcc

SEQ ID NO: 2331124 - DNA, 25 bp, Homo sapien
accaaactttcggaagaatgagtgg

SEQ ID NO: 2331125 - DNA, 25 bp, Homo sapien
tccaggcttgataacgtaggcaacc

SEQ ID NO: 2331126 - DNA, 25 bp, Homo sapien
taacgtaggcaaccattaagaacca

SEQ ID NO: 2331127 - DNA, 25 bp, Homo sapien
ttagcggttggtgcatttccattag

SEQ ID NO: 2331128 - DNA, 25 bp, Homo sapien
ttcctgtgagcagtgggtcttagcg

SEQ ID NO: 2331129 - DNA, 25 bp, Homo sapien
atgcttcctgtgagcagtgggtctt

SEQ ID NO: 2331130 - DNA, 25 bp, Homo sapien
tgggtcttagcggttggtgcatttc

SEQ ID NO: 2331131 - DNA, 25 bp, Homo sapien
aggtagagcctgttctaggaactcc

SEQ ID NO: 2331132 - DNA, 25 bp, Homo sapien
gcctgttctaggaactcctgttgaa

SEQ ID NO: 2331133 - DNA, 25 bp, Homo sapien
actggcagcctgatggtctttatga

SEQ ID NO: 2331134 - DNA, 25 bp, Homo sapien
gaacatctaacacatcgtactgcac

SEQ ID NO: 2331135 - DNA, 25 bp, Homo sapien
tctgctgctactacaatactctgaa

SEQ ID NO: 2331136 - DNA, 25 bp, Homo sapien
tgctactacaatactctgaatctct

SEQ ID NO: 2331137 - DNA, 25 bp, Homo sapien
tacaatactctgaatctctaatgat

SEQ ID NO: 2331138 - DNA, 25 bp, Homo sapien
tgctgctactacaatactctgaatc

SEQ ID NO: 2331139 - DNA, 25 bp, Homo sapien
tagtagatcacattcacactccagg

SEQ ID NO: 2331140 - DNA, 25 bp, Homo sapien
gccagtccctgtcaaggcaccatat

SEQ ID NO: 2331141 - DNA, 25 bp, Homo sapien
ggcaaggtcttagaaatccactact

SEQ ID NO: 2331142 - DNA, 25 bp, Homo sapien
tgctgatgcctagaaccctcatctg

SEQ ID NO: 2331143 - DNA, 25 bp, Homo sapien
ctagttgcagcgtacgtagaaaacc

SEQ ID NO: 2331144 - DNA, 25 bp, Homo sapien
gcctctcctagttgcagcgtacgta

SEQ ID NO: 2331145 - DNA, 25 bp, Homo sapien
tcctttttgcctctcctagttgcag

SEQ ID NO: 2331146 - DNA, 25 bp, Homo sapien
tagcattccgatctcaggatttaca

SEQ ID NO: 2331147 - DNA, 25 bp, Homo sapien
gatctgtatactaagaaaatgaata

SEQ ID NO: 2331148 - DNA, 25 bp, Homo sapien
aaatcattccatcatagatctgtat

SEQ ID NO: 2331149 - DNA, 25 bp, Homo sapien
tgtattttgactcttgtttccttct

SEQ ID NO: 2331150 - DNA, 25 bp, Homo sapien
ccatcatagatctgtatactaagaa

SEQ ID NO: 2331151 - DNA, 25 bp, Homo sapien
ctcctgggtgccacatctcatatgt

SEQ ID NO: 2331152 - DNA, 25 bp, Homo sapien
tgtgtctcaagatccctcttctcat

SEQ ID NO: 2331153 - DNA, 25 bp, Homo sapien
acatctcatatgtgtctcaagatcc

SEQ ID NO: 2331154 - DNA, 25 bp, Homo sapien
tcctgggtgccacatctcatatgtg

SEQ ID NO: 2331155 - DNA, 25 bp, Homo sapien
tcctgcttgaaatcctctgatggtt

SEQ ID NO: 2331156 - DNA, 25 bp, Homo sapien
ctgcttgaaatcctctgatggtttc

SEQ ID NO: 2331157 - DNA, 25 bp, Homo sapien
ttcctgcttgaaatcctctgatggt

SEQ ID NO: 2331158 - DNA, 25 bp, Homo sapien
tttcctgcttgaaatcctctgatgg

SEQ ID NO: 2331159 - DNA, 25 bp, Homo sapien
caccatacattctttgtgcaaatta

SEQ ID NO: 2331160 - DNA, 25 bp, Homo sapien
aattactttggccttctaagcctca

SEQ ID NO: 2331161 - DNA, 25 bp, Homo sapien
tgcagagtaagactgctggctccac

SEQ ID NO: 2331162 - DNA, 25 bp, Homo sapien
tggctccaccatacattctttgtgc

SEQ ID NO: 2331163 - DNA, 25 bp, Homo sapien
atctctgattgggtgttgctgaaca

SEQ ID NO: 2331164 - DNA, 25 bp, Homo sapien
gccgcttctgaccttacagactata

SEQ ID NO: 2331165 - DNA, 25 bp, Homo sapien
cagactatactctgatcactgaaca

SEQ ID NO: 2331166 - DNA, 25 bp, Homo sapien
cagtgacctggctttgccgcttctg

SEQ ID NO: 2331167 - DNA, 25 bp, Homo sapien
ctgacaactgcttcccctgctttac

SEQ ID NO: 2331168 - DNA, 25 bp, Homo sapien
tcaggtaccaagcactgacaactgc

SEQ ID NO: 2331169 - DNA, 25 bp, Homo sapien
cactgacaactgcttcccctgcttt

SEQ ID NO: 2331170 - DNA, 25 bp, Homo sapien
gtaccaagcactgacaactgcttcc

SEQ ID NO: 2331171 - DNA, 25 bp, Homo sapien
tgatctgtagagactttggcactcc

SEQ ID NO: 2331172 - DNA, 25 bp, Homo sapien
caattcatataaacagctggcaccc

SEQ ID NO: 2331173 - DNA, 25 bp, Homo sapien
gacaggtagactaaagtagccaggg

SEQ ID NO: 2331174 - DNA, 25 bp, Homo sapien
caaacctggattgaccctgttgcct

SEQ ID NO: 2331175 - DNA, 25 bp, Homo sapien
cagggaattcgctgtttctcacttc

SEQ ID NO: 2331176 - DNA, 25 bp, Homo sapien
gggaattcgctgtttctcacttctc

SEQ ID NO: 2331177 - DNA, 25 bp, Homo sapien
tctcacttctcatgttggggtctgg

SEQ ID NO: 2331178 - DNA, 25 bp, Homo sapien
cacagggaattcgctgtttctcact

SEQ ID NO: 2331179 - DNA, 25 bp, Homo sapien
tcaccttattccaaatttagtggtc

SEQ ID NO: 2331180 - DNA, 25 bp, Homo sapien
ttaacttcgttgagcttcctgtagc

SEQ ID NO: 2331181 - DNA, 25 bp, Homo sapien
aactgtaccagtcatcattttggtc

SEQ ID NO: 2331182 - DNA, 25 bp, Homo sapien
ttccccttaactctggggttcagca

SEQ ID NO: 2331183 - DNA, 25 bp, Homo sapien
tcagtctgtgggggatgacagggaa

SEQ ID NO: 2331184 - DNA, 25 bp, Homo sapien
ctgtgggggatgacagggaagagga

SEQ ID NO: 2331185 - DNA, 25 bp, Homo sapien
tctgtgggggatgacagggaagagg

SEQ ID NO: 2331186 - DNA, 25 bp, Homo sapien
agtctgtgggggatgacagggaaga

SEQ ID NO: 2331187 - DNA, 25 bp, Homo sapien
ttcagagcattttcgaagtaagcgc

SEQ ID NO: 2331188 - DNA, 25 bp, Homo sapien
gaggatgtctattattacgcttcag

SEQ ID NO: 2331189 - DNA, 25 bp, Homo sapien
tattacgcttcagagcattttcgaa

SEQ ID NO: 2331190 - DNA, 25 bp, Homo sapien
ttttcgaagtaagcgcttctctcca

SEQ ID NO: 2331191 - DNA, 25 bp, Homo sapien
cttgtgctagctgtgccgcgctgca

SEQ ID NO: 2331192 - DNA, 25 bp, Homo sapien
cctgggttttgtcaaggcgataaga

SEQ ID NO: 2331193 - DNA, 25 bp, Homo sapien
gtaagagatggaccgcttcctgggt

SEQ ID NO: 2331194 - DNA, 25 bp, Homo sapien
ccgcgctgcacggtgagtaagagat

SEQ ID NO: 2331195 - DNA, 25 bp, Homo sapien
ctttgaaaactcaataacctcagtt

SEQ ID NO: 2331196 - DNA, 25 bp, Homo sapien
tcagttatctgagccctttgaagcc

SEQ ID NO: 2331197 - DNA, 25 bp, Homo sapien
tccttataatagtcagaacggcaca

SEQ ID NO: 2331198 - DNA, 25 bp, Homo sapien
tttgcaagaagtctaaacaaccaca

SEQ ID NO: 2331199 - DNA, 25 bp, Homo sapien
caaataattgtcctccagtgggtct

SEQ ID NO: 2331200 - DNA, 25 bp, Homo sapien
caggaactgagtgcctatcagaggc

SEQ ID NO: 2331201 - DNA, 25 bp, Homo sapien
gaggccaagctctatgcaaggtacc

SEQ ID NO: 2331202 - DNA, 25 bp, Homo sapien
gatccctggatgacctcatgtaaca

SEQ ID NO: 2331203 - DNA, 25 bp, Homo sapien
aatgaaacattagggccttgtggca

SEQ ID NO: 2331204 - DNA, 25 bp, Homo sapien
aacttgaaaacttgtcagacttgta

SEQ ID NO: 2331205 - DNA, 25 bp, Homo sapien
gaaaacttgtcagacttgtacaaag

SEQ ID NO: 2331206 - DNA, 25 bp, Homo sapien
aacattagggccttgtggcagctgc

SEQ ID NO: 2331207 - DNA, 25 bp, Homo sapien
cttcaatcttgggctgacaagagtc

SEQ ID NO: 2331208 - DNA, 25 bp, Homo sapien
tcaatcttgggctgacaagagtcaa

SEQ ID NO: 2331209 - DNA, 25 bp, Homo sapien
caatcttgggctgacaagagtcaaa

SEQ ID NO: 2331210 - DNA, 25 bp, Homo sapien
atcttgggctgacaagagtcaaatc

SEQ ID NO: 2331211 - DNA, 25 bp, Homo sapien
ggctgatatcaatggtgaattcaca

SEQ ID NO: 2331212 - DNA, 25 bp, Homo sapien
ccaaaaagcctagtcatgatgggta

SEQ ID NO: 2331213 - DNA, 25 bp, Homo sapien
tatggctcatattcccaaatgtgca

SEQ ID NO: 2331214 - DNA, 25 bp, Homo sapien
cctggacagattcatagggattatg

SEQ ID NO: 2331215 - DNA, 25 bp, Homo sapien
gctccttcccttctttgcatggctg

SEQ ID NO: 2331216 - DNA, 25 bp, Homo sapien
ttgctccttcccttctttgcatggc

SEQ ID NO: 2331217 - DNA, 25 bp, Homo sapien
ctttgctccttcccttctttgcatg

SEQ ID NO: 2331218 - DNA, 25 bp, Homo sapien
ccttcccttctttgcatggctggtc

SEQ ID NO: 2331219 - DNA, 25 bp, Homo sapien
cccacaatcctagtgaggttcttgg

SEQ ID NO: 2331220 - DNA, 25 bp, Homo sapien
cacaatcctagtgaggttcttgggc

SEQ ID NO: 2331221 - DNA, 25 bp, Homo sapien
cacccacaatcctagtgaggttctt

SEQ ID NO: 2331222 - DNA, 25 bp, Homo sapien
acaatcctagtgaggttcttgggct

SEQ ID NO: 2331223 - DNA, 25 bp, Homo sapien
tgtaaagctcaatggtgcatgtgat

SEQ ID NO: 2331224 - DNA, 25 bp, Homo sapien
gctgtaaagctcaatggtgcatgtg

SEQ ID NO: 2331225 - DNA, 25 bp, Homo sapien
taaagctcaatggtgcatgtgatgg

SEQ ID NO: 2331226 - DNA, 25 bp, Homo sapien
aggctgtaaagctcaatggtgcatg

SEQ ID NO: 2331227 - DNA, 25 bp, Homo sapien
gcgggaagtgcggatctcagttccc

SEQ ID NO: 2331228 - DNA, 25 bp, Homo sapien
ttgctagcaaaagcgctaagcggtc

SEQ ID NO: 2331229 - DNA, 25 bp, Homo sapien
ccttgtggctggcaagagttctaac

SEQ ID NO: 2331230 - DNA, 25 bp, Homo sapien
gagttctaacacagcagcgggaagt

SEQ ID NO: 2331231 - DNA, 25 bp, Homo sapien
ctttcgcagaaagatagaggctttt

SEQ ID NO: 2331232 - DNA, 25 bp, Homo sapien
caaggcggcttggtgattatgcaga

SEQ ID NO: 2331233 - DNA, 25 bp, Homo sapien
ctcctgagtggcaaggcggcttggt

SEQ ID NO: 2331234 - DNA, 25 bp, Homo sapien
tcactcttctttcgcagaaagatag

SEQ ID NO: 2331235 - DNA, 25 bp, Homo sapien
gaatttctcgctatgtcccactgga

SEQ ID NO: 2331236 - DNA, 25 bp, Homo sapien
gaactggaatttctcgctatgtccc

SEQ ID NO: 2331237 - DNA, 25 bp, Homo sapien
gctgtctggtttgaactggaatttc

SEQ ID NO: 2331238 - DNA, 25 bp, Homo sapien
gctatgtcccactggaggtatgtca

SEQ ID NO: 2331239 - DNA, 25 bp, Homo sapien
gatttttactatctaagctgtattt

SEQ ID NO: 2331240 - DNA, 25 bp, Homo sapien
ttactatctaagctgtatttcctct

SEQ ID NO: 2331241 - DNA, 25 bp, Homo sapien
tttactatctaagctgtatttcctc

SEQ ID NO: 2331242 - DNA, 25 bp, Homo sapien
tttttactatctaagctgtatttcc

SEQ ID NO: 2331243 - DNA, 25 bp, Homo sapien
ctgagatgccatgagtttctttttc

SEQ ID NO: 2331244 - DNA, 25 bp, Homo sapien
cagcaagtgtgggtgctacttcccc

SEQ ID NO: 2331245 - DNA, 25 bp, Homo sapien
tgggtgctacttcccctgagatgcc

SEQ ID NO: 2331246 - DNA, 25 bp, Homo sapien
tttccttattgccaggattgccctg

SEQ ID NO: 2331247 - DNA, 25 bp, Homo sapien
gggcttagatgggtctttggctagg

SEQ ID NO: 2331248 - DNA, 25 bp, Homo sapien
atggcaaccactgaccggaggatgg

SEQ ID NO: 2331249 - DNA, 25 bp, Homo sapien
tgggtctttggctagggttctagtc

SEQ ID NO: 2331250 - DNA, 25 bp, Homo sapien
tggcaaccactgaccggaggatggc

SEQ ID NO: 2331251 - DNA, 25 bp, Homo sapien
tatgcacagttgtctagctggcaac

SEQ ID NO: 2331252 - DNA, 25 bp, Homo sapien
tatttgacttcatgcctgcctttgt

SEQ ID NO: 2331253 - DNA, 25 bp, Homo sapien
tcccctctgatataagaagtggcca

SEQ ID NO: 2331254 - DNA, 25 bp, Homo sapien
gaattctcttaggtcacccttgtag

SEQ ID NO: 2331255 - DNA, 25 bp, Homo sapien
tccctatgctccatagtgacccata

SEQ ID NO: 2331256 - DNA, 25 bp, Homo sapien
tgaagtgttgatctcccttgccatc

SEQ ID NO: 2331257 - DNA, 25 bp, Homo sapien
ctgcttccctatgctccatagtgac

SEQ ID NO: 2331258 - DNA, 25 bp, Homo sapien
ttgaagtgttgatctcccttgccat

SEQ ID NO: 2331259 - DNA, 25 bp, Homo sapien
aaattcctcagaggtaatattctca

SEQ ID NO: 2331260 - DNA, 25 bp, Homo sapien
attcctcagaggtaatattctcaca

SEQ ID NO: 2331261 - DNA, 25 bp, Homo sapien
aattcctcagaggtaatattctcac

SEQ ID NO: 2331262 - DNA, 25 bp, Homo sapien
tcagggcatccctgtgacacgggct

SEQ ID NO: 2331263 - DNA, 25 bp, Homo sapien
cagtatttcagtgctccctctgcct

SEQ ID NO: 2331264 - DNA, 25 bp, Homo sapien
tttttccttgatgagatcattggca

SEQ ID NO: 2331265 - DNA, 25 bp, Homo sapien
tcattggcattgatggttgtccctc

SEQ ID NO: 2331266 - DNA, 25 bp, Homo sapien
gataaagttgatgtcacccattcct

SEQ ID NO: 2331267 - DNA, 25 bp, Homo sapien
tctggaagacatggcattgtagaca

SEQ ID NO: 2331268 - DNA, 25 bp, Homo sapien
ggcattgtagacacatttaaatcac

SEQ ID NO: 2331269 - DNA, 25 bp, Homo sapien
ttccttggctcgagggctttggcaa

SEQ ID NO: 2331270 - DNA, 25 bp, Homo sapien
tgtcgtggttcagatctgtaatcca

SEQ ID NO: 2331271 - DNA, 25 bp, Homo sapien
gactatgcactttacgtatcaaaaa

SEQ ID NO: 2331272 - DNA, 25 bp, Homo sapien
aactttatgaaaagtagagcccagg

SEQ ID NO: 2331273 - DNA, 25 bp, Homo sapien
tccttgcttctatgtgtgactatgc

SEQ ID NO: 2331274 - DNA, 25 bp, Homo sapien
tgacgggttcgtgaagacagcagct

SEQ ID NO: 2331275 - DNA, 25 bp, Homo sapien
tcaatgtgggttcatggccataata

SEQ ID NO: 2331276 - DNA, 25 bp, Homo sapien
tgagaggtgttttgacgggttcgtg

SEQ ID NO: 2331277 - DNA, 25 bp, Homo sapien
cagcagctgtagtgctctaactttt

SEQ ID NO: 2331278 - DNA, 25 bp, Homo sapien
tttgcttctcccgggtttgttctgc

SEQ ID NO: 2331279 - DNA, 25 bp, Homo sapien
tggtcacgaaatgctgtatctctaa

SEQ ID NO: 2331280 - DNA, 25 bp, Homo sapien
tctttgctatgatcaacatcttctg

SEQ ID NO: 2331281 - DNA, 25 bp, Homo sapien
gaaatgctgtatctctaacctgaac

SEQ ID NO: 2331282 - DNA, 25 bp, Homo sapien
gaggtagtaggtgttactgaaaaca

SEQ ID NO: 2331283 - DNA, 25 bp, Homo sapien
ttgatttacagtgctgttttagggc

SEQ ID NO: 2331284 - DNA, 25 bp, Homo sapien
gattttgatttacagtgctgtttta

SEQ ID NO: 2331285 - DNA, 25 bp, Homo sapien
atgagatgtctcagaggtagtaggt

SEQ ID NO: 2331286 - DNA, 25 bp, Homo sapien
tgaaggcacagacgagacgcccccg

SEQ ID NO: 2331287 - DNA, 25 bp, Homo sapien
cccgtaattgcttagggaagaattg

SEQ ID NO: 2331288 - DNA, 25 bp, Homo sapien
ttgcttagggaagaattgtacagcc

SEQ ID NO: 2331289 - DNA, 25 bp, Homo sapien
cgagacgcccccgtaattgcttagg

SEQ ID NO: 2331290 - DNA, 25 bp, Homo sapien
tgaagataattttgccatcaggcca

SEQ ID NO: 2331291 - DNA, 25 bp, Homo sapien
caaacagatgggtcttactccaaac

SEQ ID NO: 2331292 - DNA, 25 bp, Homo sapien
ggcacaaacagatgggtcttactcc

SEQ ID NO: 2331293 - DNA, 25 bp, Homo sapien
aattttgccatcaggccacttgtat

SEQ ID NO: 2331294 - DNA, 25 bp, Homo sapien
ctctatactttcttcctgaattgac

SEQ ID NO: 2331295 - DNA, 25 bp, Homo sapien
ctatttggctctatactttcttcct

SEQ ID NO: 2331296 - DNA, 25 bp, Homo sapien
ggctctatactttcttcctgaattg

SEQ ID NO: 2331297 - DNA, 25 bp, Homo sapien
ttggctctatactttcttcctgaat

SEQ ID NO: 2331298 - DNA, 25 bp, Homo sapien
ctgaaacttaagcatgacccttttc

SEQ ID NO: 2331299 - DNA, 25 bp, Homo sapien
aacttaagcatgacccttttctcta

SEQ ID NO: 2331300 - DNA, 25 bp, Homo sapien
acttaagcatgacccttttctctat

SEQ ID NO: 2331301 - DNA, 25 bp, Homo sapien
gaaacttaagcatgacccttttctc

SEQ ID NO: 2331302 - DNA, 25 bp, Homo sapien
tcaacagtgtttgcactggttgtct

SEQ ID NO: 2331303 - DNA, 25 bp, Homo sapien
gttgaagtatcctcgtggacttgct

SEQ ID NO: 2331304 - DNA, 25 bp, Homo sapien
gctgatgttgaagtatcctaatgaa

SEQ ID NO: 2331305 - DNA, 25 bp, Homo sapien
gaagtatcctaatgaacttgctgaa

SEQ ID NO: 2331306 - DNA, 25 bp, Homo sapien
tctgggtgaacatactcttcttctt

SEQ ID NO: 2331307 - DNA, 25 bp, Homo sapien
acatctgggtgaacatactcttctt

SEQ ID NO: 2331308 - DNA, 25 bp, Homo sapien
ctgtgggtccgtggttttccaactg

SEQ ID NO: 2331309 - DNA, 25 bp, Homo sapien
tattcgtgcgtgtgtattgtgccag

SEQ ID NO: 2331310 - DNA, 25 bp, Homo sapien
ttctcctgtagacgcatattcgtgc

SEQ ID NO: 2331311 - DNA, 25 bp, Homo sapien
gaagtttgccttttgcgcctgaatg

SEQ ID NO: 2331312 - DNA, 25 bp, Homo sapien
tctgtctccaactcaaggctccttt

SEQ ID NO: 2331313 - DNA, 25 bp, Homo sapien
ctctttctccttcactttctttcat

SEQ ID NO: 2331314 - DNA, 25 bp, Homo sapien
cctctttctccttcactttctttca

SEQ ID NO: 2331315 - DNA, 25 bp, Homo sapien
aataggtccagtaaacggccaaatg

SEQ ID NO: 2331316 - DNA, 25 bp, Homo sapien
caaatggcctttaggatcagaaaac

SEQ ID NO: 2331317 - DNA, 25 bp, Homo sapien
ccaaatggcctttaggatcagaaaa

SEQ ID NO: 2331318 - DNA, 25 bp, Homo sapien
taggtccagtaaacggccaaatggc

SEQ ID NO: 2331319 - DNA, 25 bp, Homo sapien
tcttccatttatccacacttggggt

SEQ ID NO: 2331320 - DNA, 25 bp, Homo sapien
cacttggggtaaacctagctgagga

SEQ ID NO: 2331321 - DNA, 25 bp, Homo sapien
tagctgaggaccctcgccgtcatga

SEQ ID NO: 2331322 - DNA, 25 bp, Homo sapien
tcatgacccaagataccatctggtg

SEQ ID NO: 2331323 - DNA, 25 bp, Homo sapien
tggttgggcagtgtcttcctgctcc

SEQ ID NO: 2331324 - DNA, 25 bp, Homo sapien
tggctccctacttgctggttgggca

SEQ ID NO: 2331325 - DNA, 25 bp, Homo sapien
atttagttgggcaacagcagcttca

SEQ ID NO: 2331326 - DNA, 25 bp, Homo sapien
tagaggccccttcagtattagctgg

SEQ ID NO: 2331327 - DNA, 25 bp, Homo sapien
caccaatctacttcgttttcatttt

SEQ ID NO: 2331328 - DNA, 25 bp, Homo sapien
ccaccaatctacttcgttttcattt

SEQ ID NO: 2331329 - DNA, 25 bp, Homo sapien
tttttggtcaagattagaactgtgc

SEQ ID NO: 2331330 - DNA, 25 bp, Homo sapien
tgacgatcagcttcttatcgaacat

SEQ ID NO: 2331331 - DNA, 25 bp, Homo sapien
ctgtgtcttacaatgctgacgatca

SEQ ID NO: 2331332 - DNA, 25 bp, Homo sapien
tgctgacgatcagcttcttatcgaa

SEQ ID NO: 2331333 - DNA, 25 bp, Homo sapien
gtgtcttacaatgctgacgatcagc

SEQ ID NO: 2331334 - DNA, 25 bp, Homo sapien
gaaagtgctgttcaacgaccttgct

SEQ ID NO: 2331335 - DNA, 25 bp, Homo sapien
agtgtatctgacttgctgcctgaag

SEQ ID NO: 2331336 - DNA, 25 bp, Homo sapien
caacagaactgtgaattgtgccctg

SEQ ID NO: 2331337 - DNA, 25 bp, Homo sapien
tacttactttgtcatcttgcgagga

SEQ ID NO: 2331338 - DNA, 25 bp, Homo sapien
ttttctctgacactcgtttgttcat

SEQ ID NO: 2331339 - DNA, 25 bp, Homo sapien
tctgtccttttctctgacactcgtt

SEQ ID NO: 2331340 - DNA, 25 bp, Homo sapien
ccttttctctgacactcgtttgttc

SEQ ID NO: 2331341 - DNA, 25 bp, Homo sapien
gtccttttctctgacactcgtttgt

SEQ ID NO: 2331342 - DNA, 25 bp, Homo sapien
cacttgctgacatctatgacaacga

SEQ ID NO: 2331343 - DNA, 25 bp, Homo sapien
gctaccatcccacttgctgacatct

SEQ ID NO: 2331344 - DNA, 25 bp, Homo sapien
ttcagcacagacaccgctaccatcc

SEQ ID NO: 2331345 - DNA, 25 bp, Homo sapien
gacatctatgacaacgagtaaaact

SEQ ID NO: 2331346 - DNA, 25 bp, Homo sapien
tcatagcgactgaagcggtagcatg

SEQ ID NO: 2331347 - DNA, 25 bp, Homo sapien
actgaagcggtagcatgacatctga

SEQ ID NO: 2331348 - DNA, 25 bp, Homo sapien
gactcatagcgactgaagcggtagc

SEQ ID NO: 2331349 - DNA, 25 bp, Homo sapien
gcgactgaagcggtagcatgacatc

SEQ ID NO: 2331350 - DNA, 25 bp, Homo sapien
cacgtattacgactcttggacacag

SEQ ID NO: 2331351 - DNA, 25 bp, Homo sapien
aaatatgtgctccattttggccgcc

SEQ ID NO: 2331352 - DNA, 25 bp, Homo sapien
tggacacagtgacgatattggcttt

SEQ ID NO: 2331353 - DNA, 25 bp, Homo sapien
tattggctttctggcaccatgcgcc

SEQ ID NO: 2331354 - DNA, 25 bp, Homo sapien
gctcttgtgagtgatagctgtttca

SEQ ID NO: 2331355 - DNA, 25 bp, Homo sapien
gagtacatcaagtcttcattagcag

SEQ ID NO: 2331356 - DNA, 25 bp, Homo sapien
tagcagtccgtgctaattcaaacac

SEQ ID NO: 2331357 - DNA, 25 bp, Homo sapien
gatagctgtttcatgcagtatttct

SEQ ID NO: 2331358 - DNA, 25 bp, Homo sapien
tctggatttcgataatttctcataa

SEQ ID NO: 2331359 - DNA, 25 bp, Homo sapien
gcaacttccggcctgaatattctgg

SEQ ID NO: 2331360 - DNA, 25 bp, Homo sapien
tttctcataataatcccagtattcc

SEQ ID NO: 2331361 - DNA, 25 bp, Homo sapien
agtagatgctggcaacttccggcct

SEQ ID NO: 2331362 - DNA, 25 bp, Homo sapien
tttgggactggtgagtctctgacat

SEQ ID NO: 2331363 - DNA, 25 bp, Homo sapien
acgttgccgtaatccagagcaggtc

SEQ ID NO: 2331364 - DNA, 25 bp, Homo sapien
gataatgacgttgccgtaatccaga

SEQ ID NO: 2331365 - DNA, 25 bp, Homo sapien
aaccttgataatgacgttgccgtaa

SEQ ID NO: 2331366 - DNA, 25 bp, Homo sapien
gaagacttgcgccaaagacagtcat

SEQ ID NO: 2331367 - DNA, 25 bp, Homo sapien
cactgtgaagacttgcgccaaagac

SEQ ID NO: 2331368 - DNA, 25 bp, Homo sapien
cacggatcccactgtgaagacttgc

SEQ ID NO: 2331369 - DNA, 25 bp, Homo sapien
ttctgccgtgagctcacggatccca

SEQ ID NO: 2331370 - DNA, 25 bp, Homo sapien
ataacggagatttgcacagtgtaca

SEQ ID NO: 2331371 - DNA, 25 bp, Homo sapien
tgtacaatggtaaagggctcttgtt

SEQ ID NO: 2331372 - DNA, 25 bp, Homo sapien
cacagtgtacaatggtaaagggctc

SEQ ID NO: 2331373 - DNA, 25 bp, Homo sapien
aaataaataacggagatttgcacag

SEQ ID NO: 2331374 - DNA, 25 bp, Homo sapien
ggagcctggaacactctggtttaag

SEQ ID NO: 2331375 - DNA, 25 bp, Homo sapien
acagggagcctggaacactctggtt

SEQ ID NO: 2331376 - DNA, 25 bp, Homo sapien
aaatctttgtaggtgcaggttgctg

SEQ ID NO: 2331377 - DNA, 25 bp, Homo sapien
cctggaacactctggtttaagtgca

SEQ ID NO: 2331378 - DNA, 25 bp, Homo sapien
tgcttcatgtgtgcgtagttgcctg

SEQ ID NO: 2331379 - DNA, 25 bp, Homo sapien
gttcgagtaaaagatgctaagctca

SEQ ID NO: 2331380 - DNA, 25 bp, Homo sapien
taaaagatgctaagctcaatgacat

SEQ ID NO: 2331381 - DNA, 25 bp, Homo sapien
gcctgcttcgtaaaatcccagtcct

SEQ ID NO: 2331382 - DNA, 25 bp, Homo sapien
tcaggaggcattttgctaaatggct

SEQ ID NO: 2331383 - DNA, 25 bp, Homo sapien
agccttttcgtttccacctataatg

SEQ ID NO: 2331384 - DNA, 25 bp, Homo sapien
cttttcgtttccacctataatgctg

SEQ ID NO: 2331385 - DNA, 25 bp, Homo sapien
gtcctctaggtatcaggaggcattt

SEQ ID NO: 2331386 - DNA, 25 bp, Homo sapien
gagcaaagccctgagtgtgtcacaa

SEQ ID NO: 2331387 - DNA, 25 bp, Homo sapien
tgattgagtcgatgtgagcaaagcc

SEQ ID NO: 2331388 - DNA, 25 bp, Homo sapien
ccatacgggtctgggtagagttcca

SEQ ID NO: 2331389 - DNA, 25 bp, Homo sapien
ttccctgaaacaaaggtgcctaggc

SEQ ID NO: 2331390 - DNA, 25 bp, Homo sapien
gatttttattaccacgcagccattt

SEQ ID NO: 2331391 - DNA, 25 bp, Homo sapien
tcaacatcacccaggagtgctttaa

SEQ ID NO: 2331392 - DNA, 25 bp, Homo sapien
gctttaagggaatcctccaggacag

SEQ ID NO: 2331393 - DNA, 25 bp, Homo sapien
gaaaaatgacctcgaagccaagtgg

SEQ ID NO: 2331394 - DNA, 25 bp, Homo sapien
tcatggccgataatccaggatgctg

SEQ ID NO: 2331395 - DNA, 25 bp, Homo sapien
cagcatcgtgggcatgaagaccaac

SEQ ID NO: 2331396 - DNA, 25 bp, Homo sapien
gatcaagcccgagaagaggtagcag

SEQ ID NO: 2331397 - DNA, 25 bp, Homo sapien
gatgctgttgatagagctgggtcct

SEQ ID NO: 2331398 - DNA, 25 bp, Homo sapien
cagacacttccactcagggccgtct

SEQ ID NO: 2331399 - DNA, 25 bp, Homo sapien
actcgctccctagggcaaaaggcca

SEQ ID NO: 2331400 - DNA, 25 bp, Homo sapien
agggccgtctcgctcccactcgctc

SEQ ID NO: 2331401 - DNA, 25 bp, Homo sapien
ggggagccagacacttccactcagg

SEQ ID NO: 2331402 - DNA, 25 bp, Homo sapien
gcggggcgtacagaagggcctctac

SEQ ID NO: 2331403 - DNA, 25 bp, Homo sapien
ggcggggcgtacagaagggcctcta

SEQ ID NO: 2331404 - DNA, 25 bp, Homo sapien
cggcggggcgtacagaagggcctct

SEQ ID NO: 2331405 - DNA, 25 bp, Homo sapien
gcggcggggcgtacagaagggcctc

SEQ ID NO: 2331406 - DNA, 25 bp, Homo sapien
gctgttcgcgtgagaacgagctcat

SEQ ID NO: 2331407 - DNA, 25 bp, Homo sapien
cggcgctgttcgcgtgagaacgagc

SEQ ID NO: 2331408 - DNA, 25 bp, Homo sapien
gacggcgctgttcgcgtgagaacga

SEQ ID NO: 2331409 - DNA, 25 bp, Homo sapien
gcgctgttcgcgtgagaacgagctc

SEQ ID NO: 2331410 - DNA, 25 bp, Homo sapien
cgacgccgacgctgactagggaggc

SEQ ID NO: 2331411 - DNA, 25 bp, Homo sapien
tgtcccggggtaagccgaggctaca

SEQ ID NO: 2331412 - DNA, 25 bp, Homo sapien
cctccctggcgaggcgtgggcctgt

SEQ ID NO: 2331413 - DNA, 25 bp, Homo sapien
ggtcgcagcgcgacgccgacgctga

SEQ ID NO: 2331414 - DNA, 25 bp, Homo sapien
ggcctcgatcccgcctgctggcgct

SEQ ID NO: 2331415 - DNA, 25 bp, Homo sapien
ctcgatcccgcctgctggcgctgct

SEQ ID NO: 2331416 - DNA, 25 bp, Homo sapien
tgacggcctcgatcccgcctgctgg

SEQ ID NO: 2331417 - DNA, 25 bp, Homo sapien
gacggcctcgatcccgcctgctggc

SEQ ID NO: 2331418 - DNA, 25 bp, Homo sapien
aaatgtggtacgaggcgctcgccat

SEQ ID NO: 2331419 - DNA, 25 bp, Homo sapien
gaaatgtggtacgaggcgctcgcca

SEQ ID NO: 2331420 - DNA, 25 bp, Homo sapien
tggaaatgtggtacgaggcgctcgc

SEQ ID NO: 2331421 - DNA, 25 bp, Homo sapien
attggaaatgtggtacgaggcgctc

SEQ ID NO: 2331422 - DNA, 25 bp, Homo sapien
cggaccggtgggctggagacttcgg

SEQ ID NO: 2331423 - DNA, 25 bp, Homo sapien
gggtgagggtcggatctcggcctca

SEQ ID NO: 2331424 - DNA, 25 bp, Homo sapien
gcggctgcgagaaccccgaggtggg

SEQ ID NO: 2331425 - DNA, 25 bp, Homo sapien
agaagctaccggctacggccgaagg

SEQ ID NO: 2331426 - DNA, 25 bp, Homo sapien
ctgacagtgatgctggcgggaaaac

SEQ ID NO: 2331427 - DNA, 25 bp, Homo sapien
gaactatgtatcagccaagagcgca

SEQ ID NO: 2331428 - DNA, 25 bp, Homo sapien
caagagcgcaaaagttcatcattcc

SEQ ID NO: 2331429 - DNA, 25 bp, Homo sapien
aaccctatgagcgaagtttcctcca

SEQ ID NO: 2331430 - DNA, 25 bp, Homo sapien
taaatacatttaagagctgcctagg

SEQ ID NO: 2331431 - DNA, 25 bp, Homo sapien
cacacggtttggacacattttcaag

SEQ ID NO: 2331432 - DNA, 25 bp, Homo sapien
gaatgcaacaatcaccgaagcgtgc

SEQ ID NO: 2331433 - DNA, 25 bp, Homo sapien
tggaaccaacagtaccgatctcctg

SEQ ID NO: 2331434 - DNA, 25 bp, Homo sapien
caatatccatccagctacagtcagg

SEQ ID NO: 2331435 - DNA, 25 bp, Homo sapien
catagctgggtggtcaagagttcat

SEQ ID NO: 2331436 - DNA, 25 bp, Homo sapien
taaacaagcacctactgagaaccca

SEQ ID NO: 2331437 - DNA, 25 bp, Homo sapien
gagccagacaaagagaacgattccg

SEQ ID NO: 2331438 - DNA, 25 bp, Homo sapien
aggttcaagcaattctgctgcctca

SEQ ID NO: 2331439 - DNA, 25 bp, Homo sapien
tgctcacgcaacctctgcctcgcag

SEQ ID NO: 2331440 - DNA, 25 bp, Homo sapien
ggaattacagtcgtgagccaccaca

SEQ ID NO: 2331441 - DNA, 25 bp, Homo sapien
aattctgctgcctcagcctcgcgag

SEQ ID NO: 2331442 - DNA, 25 bp, Homo sapien
catttgacagctaaattctgtacct

SEQ ID NO: 2331443 - DNA, 25 bp, Homo sapien
atttgacagctaaattctgtacctc

SEQ ID NO: 2331444 - DNA, 25 bp, Homo sapien
ggagcaggaagaaagactcaaccag

SEQ ID NO: 2331445 - DNA, 25 bp, Homo sapien
gatagtacaaggctaagataattta

SEQ ID NO: 2331446 - DNA, 25 bp, Homo sapien
caggaagaaagactcaaccagtaaa

SEQ ID NO: 2331447 - DNA, 25 bp, Homo sapien
tacaaggctaagataatttactact

SEQ ID NO: 2331448 - DNA, 25 bp, Homo sapien
caagggatatgtaaaagtttaggct

SEQ ID NO: 2331449 - DNA, 25 bp, Homo sapien
gaagctcccactgcaatgtatacac

SEQ ID NO: 2331450 - DNA, 25 bp, Homo sapien
ttctatgctgacaaattagttctca

SEQ ID NO: 2331451 - DNA, 25 bp, Homo sapien
catcatgcatagcaagaagctccca

SEQ ID NO: 2331452 - DNA, 25 bp, Homo sapien
tctagaacagtactacaactctctg

SEQ ID NO: 2331453 - DNA, 25 bp, Homo sapien
caagacccagctcttagattattta

SEQ ID NO: 2331454 - DNA, 25 bp, Homo sapien
atacttaccctatgttctagaacag

SEQ ID NO: 2331455 - DNA, 25 bp, Homo sapien
tatggctgcttaataatctattggg

SEQ ID NO: 2331456 - DNA, 25 bp, Homo sapien
gatgctggtttttggaagttcttca

SEQ ID NO: 2331457 - DNA, 25 bp, Homo sapien
tcagtgtcttgacaactaaccagat

SEQ ID NO: 2331458 - DNA, 25 bp, Homo sapien
taaagcatataatactgaactgccc

SEQ ID NO: 2331459 - DNA, 25 bp, Homo sapien
gaattctgtcaagtgggataataca

SEQ ID NO: 2331460 - DNA, 25 bp, Homo sapien
caggccaaggatctgtatgggtcca

SEQ ID NO: 2331461 - DNA, 25 bp, Homo sapien
ggacaaactgttcgacctcagatca

SEQ ID NO: 2331462 - DNA, 25 bp, Homo sapien
taacaaagacagtatggcccctatc

SEQ ID NO: 2331463 - DNA, 25 bp, Homo sapien
tctggttgatgaactaaggaactcc

SEQ ID NO: 2331464 - DNA, 25 bp, Homo sapien
aatatgaaacactctggtcacaagc

SEQ ID NO: 2331465 - DNA, 25 bp, Homo sapien
gcatcactttgccaactttgaccct

SEQ ID NO: 2331466 - DNA, 25 bp, Homo sapien
taaaggacactaaacctgcatcact

SEQ ID NO: 2331467 - DNA, 25 bp, Homo sapien
aaaccctttgagtgccatggtggaa

SEQ ID NO: 2331468 - DNA, 25 bp, Homo sapien
gaccaatacttgaaatgtctcgaag

SEQ ID NO: 2331469 - DNA, 25 bp, Homo sapien
cactttactcactaaaggaccaaga

SEQ ID NO: 2331470 - DNA, 25 bp, Homo sapien
gtctcgaagttgttctttatcagaa

SEQ ID NO: 2331471 - DNA, 25 bp, Homo sapien
gcatgttagtgcagagggtatctac

SEQ ID NO: 2331472 - DNA, 25 bp, Homo sapien
ttctaaggaaaataaggcttcacgc

SEQ ID NO: 2331473 - DNA, 25 bp, Homo sapien
gactagtttacgtatgcagccttta

SEQ ID NO: 2331474 - DNA, 25 bp, Homo sapien
taggttggcataactctagtctgca

SEQ ID NO: 2331475 - DNA, 25 bp, Homo sapien
tagcaatagtttagtagtcaagacc

SEQ ID NO: 2331476 - DNA, 25 bp, Homo sapien
taagacgtccagtaatctttttaca

SEQ ID NO: 2331477 - DNA, 25 bp, Homo sapien
acatatcagccataatatccaaggc

SEQ ID NO: 2331478 - DNA, 25 bp, Homo sapien
gctattgcacttgtaagacgtccag

SEQ ID NO: 2331479 - DNA, 25 bp, Homo sapien
tatccaaggcttctagctgaacaga

SEQ ID NO: 2331480 - DNA, 25 bp, Homo sapien
tatgaccagcttgcctactaatagc

SEQ ID NO: 2331481 - DNA, 25 bp, Homo sapien
tttccacagctcataaccagatggc

SEQ ID NO: 2331482 - DNA, 25 bp, Homo sapien
cagatggccaagagcgataatggtt

SEQ ID NO: 2331483 - DNA, 25 bp, Homo sapien
cactgcaagtctagggctggtcaac

SEQ ID NO: 2331484 - DNA, 25 bp, Homo sapien
gattcaaaggcttgaatacagtact

SEQ ID NO: 2331485 - DNA, 25 bp, Homo sapien
ggcttgaatacagtactctcttaat

SEQ ID NO: 2331486 - DNA, 25 bp, Homo sapien
tcaaaggcttgaatacagtactctc

SEQ ID NO: 2331487 - DNA, 25 bp, Homo sapien
catcatctacattgcaaaattttac

SEQ ID NO: 2331488 - DNA, 25 bp, Homo sapien
ggatcataggtaagatatttaagac

SEQ ID NO: 2331489 - DNA, 25 bp, Homo sapien
acatgaggatatacttccttaggac

SEQ ID NO: 2331490 - DNA, 25 bp, Homo sapien
gtagaaacatgaggatatacttcct

SEQ ID NO: 2331491 - DNA, 25 bp, Homo sapien
tcttcatcatcgtaattataatttg

SEQ ID NO: 2331492 - DNA, 25 bp, Homo sapien
aagcacttcgcagctgcacgtctca

SEQ ID NO: 2331493 - DNA, 25 bp, Homo sapien
tctggatattagtgcaggagagacg

SEQ ID NO: 2331494 - DNA, 25 bp, Homo sapien
gcttcaaaagagaaaggtatgcgtg

SEQ ID NO: 2331495 - DNA, 25 bp, Homo sapien
tgtacaggacgagtttgcttcaaaa

SEQ ID NO: 2331496 - DNA, 25 bp, Homo sapien
ttaaaacaacactgtcgggtcttca

SEQ ID NO: 2331497 - DNA, 25 bp, Homo sapien
aaacaacactgtcgggtcttcacac

SEQ ID NO: 2331498 - DNA, 25 bp, Homo sapien
ctgtcgggtcttcacacttttttct

SEQ ID NO: 2331499 - DNA, 25 bp, Homo sapien
caacactgtcgggtcttcacacttt

SEQ ID NO: 2331500 - DNA, 25 bp, Homo sapien
aggaatgtgttgagttagggcccca

SEQ ID NO: 2331501 - DNA, 25 bp, Homo sapien
tacaagtacaggaatgtgttgagtt

SEQ ID NO: 2331502 - DNA, 25 bp, Homo sapien
ctggtacaagtacaggaatgtgttg

SEQ ID NO: 2331503 - DNA, 25 bp, Homo sapien
tacaggaatgtgttgagttagggcc

SEQ ID NO: 2331504 - DNA, 25 bp, Homo sapien
aacaaaaaatccaatcattgctgtg

SEQ ID NO: 2331505 - DNA, 25 bp, Homo sapien
gccaacaaaaaatccaatcattgct

SEQ ID NO: 2331506 - DNA, 25 bp, Homo sapien
aagccaacaaaaaatccaatcattg

SEQ ID NO: 2331507 - DNA, 25 bp, Homo sapien
caacaaaaaatccaatcattgctgt

SEQ ID NO: 2331508 - DNA, 25 bp, Homo sapien
tagacatgacaaagcatcgatcttc

SEQ ID NO: 2331509 - DNA, 25 bp, Homo sapien
cgatcttcaaattcgatgagcttga

SEQ ID NO: 2331510 - DNA, 25 bp, Homo sapien
tggttacagaggattacgtatagac

SEQ ID NO: 2331511 - DNA, 25 bp, Homo sapien
gagcttgatttatcattcagtgaga

SEQ ID NO: 2331512 - DNA, 25 bp, Homo sapien
tttgacaagctgttgagtaacaaga

SEQ ID NO: 2331513 - DNA, 25 bp, Homo sapien
ccaaagcctgaacgtgaggatggaa

SEQ ID NO: 2331514 - DNA, 25 bp, Homo sapien
actggaggaaccaaagcctgaacgt

SEQ ID NO: 2331515 - DNA, 25 bp, Homo sapien
gaagtgcttcagatgtaattttgta

SEQ ID NO: 2331516 - DNA, 25 bp, Homo sapien
gaggaaggctgatctaaaggacgaa

SEQ ID NO: 2331517 - DNA, 25 bp, Homo sapien
taaggagttgcatcaaacgaggaag

SEQ ID NO: 2331518 - DNA, 25 bp, Homo sapien
gcaaataatttgtcccatacaggaa

SEQ ID NO: 2331519 - DNA, 25 bp, Homo sapien
agtgtattaggcaagtcagaaccca

SEQ ID NO: 2331520 - DNA, 25 bp, Homo sapien
taagggcagctacacatttggcaat

SEQ ID NO: 2331521 - DNA, 25 bp, Homo sapien
tttaaggcccaccactgatgcagag

SEQ ID NO: 2331522 - DNA, 25 bp, Homo sapien
tatcaagtaccccttaagccgtgga

SEQ ID NO: 2331523 - DNA, 25 bp, Homo sapien
cagatattcaggaaggttgcccaca

SEQ ID NO: 2331524 - DNA, 25 bp, Homo sapien
taagtaagaaaatctagatacctac

SEQ ID NO: 2331525 - DNA, 25 bp, Homo sapien
ttaagtaagaaaatctagataccta

SEQ ID NO: 2331526 - DNA, 25 bp, Homo sapien
gcaatgtctaagaatgaatggctat

SEQ ID NO: 2331527 - DNA, 25 bp, Homo sapien
gtaattagtatcaacaagctcttca

SEQ ID NO: 2331528 - DNA, 25 bp, Homo sapien
tatcactccatactacgaaagacag

SEQ ID NO: 2331529 - DNA, 25 bp, Homo sapien
gatgacactggtaaatctgaaaact

SEQ ID NO: 2331530 - DNA, 25 bp, Homo sapien
cactgagcttcgggcatatgatgag

SEQ ID NO: 2331531 - DNA, 25 bp, Homo sapien
ttgtaaatttcacagccgtaaccac

SEQ ID NO: 2331532 - DNA, 25 bp, Homo sapien
taacagtggatcaataggttgtgga

SEQ ID NO: 2331533 - DNA, 25 bp, Homo sapien
tttcacagccgtaaccactgagctt

SEQ ID NO: 2331534 - DNA, 25 bp, Homo sapien
tagttcttctgggaattagctctcc

SEQ ID NO: 2331535 - DNA, 25 bp, Homo sapien
cacagaaatagagaagccctagttt

SEQ ID NO: 2331536 - DNA, 25 bp, Homo sapien
aaagctacaaagcttctttgccaaa

SEQ ID NO: 2331537 - DNA, 25 bp, Homo sapien
ttgaccttaaatatggaaatctcca

SEQ ID NO: 2331538 - DNA, 25 bp, Homo sapien
ctgaaatattacaagaaaagcaaca

SEQ ID NO: 2331539 - DNA, 25 bp, Homo sapien
ttacaagaaaagcaacagacagaca

SEQ ID NO: 2331540 - DNA, 25 bp, Homo sapien
atattacaagaaaagcaacagacag

SEQ ID NO: 2331541 - DNA, 25 bp, Homo sapien
tgaaatattacaagaaaagcaacag

SEQ ID NO: 2331542 - DNA, 25 bp, Homo sapien
cttataagctcctttctaacttttg

SEQ ID NO: 2331543 - DNA, 25 bp, Homo sapien
aattaaatgtgaccaaggctactct

SEQ ID NO: 2331544 - DNA, 25 bp, Homo sapien
tagatcccttattaatgatggcttg

SEQ ID NO: 2331545 - DNA, 25 bp, Homo sapien
tcacattcaaatctgggtcttccaa

SEQ ID NO: 2331546 - DNA, 25 bp, Homo sapien
gcctttctaatatccagaccatcat

SEQ ID NO: 2331547 - DNA, 25 bp, Homo sapien
tccagaccatcatcaaccgtatgtt

SEQ ID NO: 2331548 - DNA, 25 bp, Homo sapien
ccatcatcaaccgtatgtttaaatg

SEQ ID NO: 2331549 - DNA, 25 bp, Homo sapien
taatatccagaccatcatcaaccgt

SEQ ID NO: 2331550 - DNA, 25 bp, Homo sapien
taatatcataatggtccttcaaacc

SEQ ID NO: 2331551 - DNA, 25 bp, Homo sapien
tcaaagatatcaagtctatcaagac

SEQ ID NO: 2331552 - DNA, 25 bp, Homo sapien
caaaccatcttcaacatgatttaga

SEQ ID NO: 2331553 - DNA, 25 bp, Homo sapien
caagtctatcaagacaactgtctag

SEQ ID NO: 2331554 - DNA, 25 bp, Homo sapien
ttttaaatggagacgaacacacagg

SEQ ID NO: 2331555 - DNA, 25 bp, Homo sapien
tggatctttcttacacgtcaactgg

SEQ ID NO: 2331556 - DNA, 25 bp, Homo sapien
tttgagaggctcaggtcactaccac

SEQ ID NO: 2331557 - DNA, 25 bp, Homo sapien
cctccatgggtagcaactatggtcc

SEQ ID NO: 2331558 - DNA, 25 bp, Homo sapien
gcacttggacaaagggtagacagtc

SEQ ID NO: 2331559 - DNA, 25 bp, Homo sapien
tagttgtacatgttgcacgtaatgg

SEQ ID NO: 2331560 - DNA, 25 bp, Homo sapien
tgcacgtaatggctcaacaagtcgg

SEQ ID NO: 2331561 - DNA, 25 bp, Homo sapien
tcggtccaacctctgcagtactgca

SEQ ID NO: 2331562 - DNA, 25 bp, Homo sapien
cttctggaatggttagcagtgctgc

SEQ ID NO: 2331563 - DNA, 25 bp, Homo sapien
tctcatggcagatcgctttaattca

SEQ ID NO: 2331564 - DNA, 25 bp, Homo sapien
gactggaattcactcatcagtggac

SEQ ID NO: 2331565 - DNA, 25 bp, Homo sapien
gatagccgccagctcagggttagaa

SEQ ID NO: 2331566 - DNA, 25 bp, Homo sapien
caacctctggattatggaaatacac

SEQ ID NO: 2331567 - DNA, 25 bp, Homo sapien
gccaaacaaacagtctccatgaagg

SEQ ID NO: 2331568 - DNA, 25 bp, Homo sapien
tacagggtaaatagatactggaccc

SEQ ID NO: 2331569 - DNA, 25 bp, Homo sapien
catatgtaatggtccccatggtgaa

SEQ ID NO: 2331570 - DNA, 25 bp, Homo sapien
tgcaaaattagtgtgcgcaacaggg

SEQ ID NO: 2331571 - DNA, 25 bp, Homo sapien
taacaaacctgtgatagctggcttc

SEQ ID NO: 2331572 - DNA, 25 bp, Homo sapien
tactgttacaggagcaccacaaatt

SEQ ID NO: 2331573 - DNA, 25 bp, Homo sapien
gtaaattcgctctacaggagatggg

SEQ ID NO: 2331574 - DNA, 25 bp, Homo sapien
cattcaaaatcaagctgttaatcta

SEQ ID NO: 2331575 - DNA, 25 bp, Homo sapien
tataccacagaaatgcatagtacat

SEQ ID NO: 2331576 - DNA, 25 bp, Homo sapien
ccttactagaagtgatgtcttctgc

SEQ ID NO: 2331577 - DNA, 25 bp, Homo sapien
ttaaagcaggtagtaatacagcagg

SEQ ID NO: 2331578 - DNA, 25 bp, Homo sapien
tcacacaacatatgcatgtcagtct

SEQ ID NO: 2331579 - DNA, 25 bp, Homo sapien
aagacattcacacaacatatgcatg

SEQ ID NO: 2331580 - DNA, 25 bp, Homo sapien
ccaactaagacattcacacaacata

SEQ ID NO: 2331581 - DNA, 25 bp, Homo sapien
taactttacccaactaagacattca

SEQ ID NO: 2331582 - DNA, 25 bp, Homo sapien
gatctcctcaggaacctacatgtga

SEQ ID NO: 2331583 - DNA, 25 bp, Homo sapien
gtatctggaccacatcaccactagg

SEQ ID NO: 2331584 - DNA, 25 bp, Homo sapien
catgaaaatcagtaaacagcttggt

SEQ ID NO: 2331585 - DNA, 25 bp, Homo sapien
ggtagactatgtctggactccacat

SEQ ID NO: 2331586 - DNA, 25 bp, Homo sapien
gaactggttaattagatatgcccat

SEQ ID NO: 2331587 - DNA, 25 bp, Homo sapien
gcataatatatccagagattggcaa

SEQ ID NO: 2331588 - DNA, 25 bp, Homo sapien
tatcacaacacccactagaactggt

SEQ ID NO: 2331589 - DNA, 25 bp, Homo sapien
tgtgactaactagagcttacaggag

SEQ ID NO: 2331590 - DNA, 25 bp, Homo sapien
taacgattagcaggcatttgccgca

SEQ ID NO: 2331591 - DNA, 25 bp, Homo sapien
ttgtgaacagctggactagtcggcc

SEQ ID NO: 2331592 - DNA, 25 bp, Homo sapien
ccaacgttaacagacagacaggtgc

SEQ ID NO: 2331593 - DNA, 25 bp, Homo sapien
caccctaagcgcgtaataaattggc

SEQ ID NO: 2331594 - DNA, 25 bp, Homo sapien
ttactggtttctgacaactagtctt

SEQ ID NO: 2331595 - DNA, 25 bp, Homo sapien
tattttctaatattgagccatcaga

SEQ ID NO: 2331596 - DNA, 25 bp, Homo sapien
atagttttactacttcactaatact

SEQ ID NO: 2331597 - DNA, 25 bp, Homo sapien
tattgagccatcagaggattctcaa

SEQ ID NO: 2331598 - DNA, 25 bp, Homo sapien
tcatttgtttgtctttaaggcccat

SEQ ID NO: 2331599 - DNA, 25 bp, Homo sapien
tctgaggaactaagtaatctttttc

SEQ ID NO: 2331600 - DNA, 25 bp, Homo sapien
ggcctgtaagctatggaatccataa

SEQ ID NO: 2331601 - DNA, 25 bp, Homo sapien
cttctgaggaactaagtaatctttt

SEQ ID NO: 2331602 - DNA, 25 bp, Homo sapien
gcctgtaagctatggaatccataag

SEQ ID NO: 2331603 - DNA, 25 bp, Homo sapien
ggaggagaggaattcattctcccta

SEQ ID NO: 2331604 - DNA, 25 bp, Homo sapien
atcatacacagtgtaaacacataca

SEQ ID NO: 2331605 - DNA, 25 bp, Homo sapien
taattatttactgtccctcaaaaga

SEQ ID NO: 2331606 - DNA, 25 bp, Homo sapien
gaggtttccgcttggtctctataat

SEQ ID NO: 2331607 - DNA, 25 bp, Homo sapien
tggcagcctcacaatagacatcata

SEQ ID NO: 2331608 - DNA, 25 bp, Homo sapien
ttaactaatagaacgtgactcttgg

SEQ ID NO: 2331609 - DNA, 25 bp, Homo sapien
gaagtaagatcatgctccacatctg

SEQ ID NO: 2331610 - DNA, 25 bp, Homo sapien
tcttggtgacaacattggcagcctc

SEQ ID NO: 2331611 - DNA, 25 bp, Homo sapien
gggctggtagttagagacccatagt

SEQ ID NO: 2331612 - DNA, 25 bp, Homo sapien
tagtgtataatctggaccttcccat

SEQ ID NO: 2331613 - DNA, 25 bp, Homo sapien
agtcccacttgatggtctcagtggg

SEQ ID NO: 2331614 - DNA, 25 bp, Homo sapien
ctcaggggacttgagtggtagctcc

SEQ ID NO: 2331615 - DNA, 25 bp, Homo sapien
tgtacatcttggtgatgtcattgta

SEQ ID NO: 2331616 - DNA, 25 bp, Homo sapien
gtacatcttggtgatgtcattgtac

SEQ ID NO: 2331617 - DNA, 25 bp, Homo sapien
tgtgtacatcttggtgatgtcattg

SEQ ID NO: 2331618 - DNA, 25 bp, Homo sapien
ctgtgtgtacatcttggtgatgtca

SEQ ID NO: 2331619 - DNA, 25 bp, Homo sapien
aagctccacaatgggaggctttgag

SEQ ID NO: 2331620 - DNA, 25 bp, Homo sapien
tttgaggggcaaaaacgcatgcatt

SEQ ID NO: 2331621 - DNA, 25 bp, Homo sapien
tatttatgatgttctatcgccacct

SEQ ID NO: 2331622 - DNA, 25 bp, Homo sapien
atttatgatgttctatcgccacctc

SEQ ID NO: 2331623 - DNA, 25 bp, Homo sapien
ccaaggctcaaatcttgaatagtaa

SEQ ID NO: 2331624 - DNA, 25 bp, Homo sapien
aggctcaaatcttgaatagtaactc

SEQ ID NO: 2331625 - DNA, 25 bp, Homo sapien
gctcaaatcttgaatagtaactcac

SEQ ID NO: 2331626 - DNA, 25 bp, Homo sapien
caaggctcaaatcttgaatagtaac

SEQ ID NO: 2331627 - DNA, 25 bp, Homo sapien
catggcagtcatgttggtttacacc

SEQ ID NO: 2331628 - DNA, 25 bp, Homo sapien
tacaacagcgctagtaaatctcagt

SEQ ID NO: 2331629 - DNA, 25 bp, Homo sapien
catatgtctaggaaacagcatggca

SEQ ID NO: 2331630 - DNA, 25 bp, Homo sapien
tcagtggagttgaaagtacttctgc

SEQ ID NO: 2331631 - DNA, 25 bp, Homo sapien
cacaaggaaccaagcccttggcagt

SEQ ID NO: 2331632 - DNA, 25 bp, Homo sapien
agcacaaggaaccaagcccttggca

SEQ ID NO: 2331633 - DNA, 25 bp, Homo sapien
acaaggaaccaagcccttggcagtg

SEQ ID NO: 2331634 - DNA, 25 bp, Homo sapien
aaggaaccaagcccttggcagtgga

SEQ ID NO: 2331635 - DNA, 25 bp, Homo sapien
tgcatgtattgttgaagaggcagga

SEQ ID NO: 2331636 - DNA, 25 bp, Homo sapien
gcgtgcatgtattgttgaagaggca

SEQ ID NO: 2331637 - DNA, 25 bp, Homo sapien
catgtattgttgaagaggcaggagg

SEQ ID NO: 2331638 - DNA, 25 bp, Homo sapien
tcacagcgtgcatgtattgttgaag

SEQ ID NO: 2331639 - DNA, 25 bp, Homo sapien
ggagacggcagacctaaaggaagca

SEQ ID NO: 2331640 - DNA, 25 bp, Homo sapien
ctggagacggcagacctaaaggaag

SEQ ID NO: 2331641 - DNA, 25 bp, Homo sapien
tggagacggcagacctaaaggaagc

SEQ ID NO: 2331642 - DNA, 25 bp, Homo sapien
accccattcccctggagacggcaga

SEQ ID NO: 2331643 - DNA, 25 bp, Homo sapien
acgcagagctgccttgcacttgaaa

SEQ ID NO: 2331644 - DNA, 25 bp, Homo sapien
atcctccacgcagagctgccttgca

SEQ ID NO: 2331645 - DNA, 25 bp, Homo sapien
gctgccttgcacttgaaagatgagt

SEQ ID NO: 2331646 - DNA, 25 bp, Homo sapien
cagagctgccttgcacttgaaagat

SEQ ID NO: 2331647 - DNA, 25 bp, Homo sapien
gtttctcgtagatgtttcttatcag

SEQ ID NO: 2331648 - DNA, 25 bp, Homo sapien
tatcagcttcttggagcacaagggc

SEQ ID NO: 2331649 - DNA, 25 bp, Homo sapien
tactgtttctcgtagatgtttctta

SEQ ID NO: 2331650 - DNA, 25 bp, Homo sapien
cagcttcttggagcacaagggccat

SEQ ID NO: 2331651 - DNA, 25 bp, Homo sapien
taagtgccactgtaagaggcccatg

SEQ ID NO: 2331652 - DNA, 25 bp, Homo sapien
gcccatggctcttggactaaggaga

SEQ ID NO: 2331653 - DNA, 25 bp, Homo sapien
gtctttggtgtccacacagatctgg

SEQ ID NO: 2331654 - DNA, 25 bp, Homo sapien
ctggcaagacataagtgccactgta

SEQ ID NO: 2331655 - DNA, 25 bp, Homo sapien
gagccctgcagtctcaatgcttaca

SEQ ID NO: 2331656 - DNA, 25 bp, Homo sapien
cctgcagtctcaatgcttacactag

SEQ ID NO: 2331657 - DNA, 25 bp, Homo sapien
cagggttgagccctgcagtctcaat

SEQ ID NO: 2331658 - DNA, 25 bp, Homo sapien
tctcaatgcttacactagcaacaag

SEQ ID NO: 2331659 - DNA, 25 bp, Homo sapien
cttcagcttattaattgggtttctg

SEQ ID NO: 2331660 - DNA, 25 bp, Homo sapien
ttcagcttattaattgggtttctgt

SEQ ID NO: 2331661 - DNA, 25 bp, Homo sapien
cagcttattaattgggtttctgtta

SEQ ID NO: 2331662 - DNA, 25 bp, Homo sapien
tcagcttattaattgggtttctgtt

SEQ ID NO: 2331663 - DNA, 25 bp, Homo sapien
catgtgaggaacaagcctagagcag

SEQ ID NO: 2331664 - DNA, 25 bp, Homo sapien
tcatttattgtaacgcatgctaacg

SEQ ID NO: 2331665 - DNA, 25 bp, Homo sapien
tgcctttgcaagcagtagcatgtga

SEQ ID NO: 2331666 - DNA, 25 bp, Homo sapien
catgctaacgtcagctgcctttgca

SEQ ID NO: 2331667 - DNA, 25 bp, Homo sapien
gaagcatctctcacttgccagcaac

SEQ ID NO: 2331668 - DNA, 25 bp, Homo sapien
caactgcgagtttccaaaatagccc

SEQ ID NO: 2331669 - DNA, 25 bp, Homo sapien
ccatggctgaattcacgggatttga

SEQ ID NO: 2331670 - DNA, 25 bp, Homo sapien
tagtttccctaagttcccatggctg

SEQ ID NO: 2331671 - DNA, 25 bp, Homo sapien
ctgctactgttaattttaccttgtt

SEQ ID NO: 2331672 - DNA, 25 bp, Homo sapien
ctatttcctgctactgttaatttta

SEQ ID NO: 2331673 - DNA, 25 bp, Homo sapien
tatttcctgctactgttaattttac

SEQ ID NO: 2331674 - DNA, 25 bp, Homo sapien
tcctgctactgttaattttaccttg

SEQ ID NO: 2331675 - DNA, 25 bp, Homo sapien
tgggaggtcttgaagacccacttct

SEQ ID NO: 2331676 - DNA, 25 bp, Homo sapien
tcttgaagacccacttcttcagggc

SEQ ID NO: 2331677 - DNA, 25 bp, Homo sapien
aggtcttgaagacccacttcttcag

SEQ ID NO: 2331678 - DNA, 25 bp, Homo sapien
ggaggtcttgaagacccacttcttc

SEQ ID NO: 2331679 - DNA, 25 bp, Homo sapien
aaatccattttacatccaacagaat

SEQ ID NO: 2331680 - DNA, 25 bp, Homo sapien
aatccattttacatccaacagaatt

SEQ ID NO: 2331681 - DNA, 25 bp, Homo sapien
ccaaattggaagaacacgatctgcc

SEQ ID NO: 2331682 - DNA, 25 bp, Homo sapien
gagcttgaatccaaatatgcctgaa

SEQ ID NO: 2331683 - DNA, 25 bp, Homo sapien
tactcagggcctttctcggtgccag

SEQ ID NO: 2331684 - DNA, 25 bp, Homo sapien
gagtatggctctacccaccaaattg

SEQ ID NO: 2331685 - DNA, 25 bp, Homo sapien
ggtagaaggattaagggtgtccatc

SEQ ID NO: 2331686 - DNA, 25 bp, Homo sapien
agttctctctcagtatgtttggtag

SEQ ID NO: 2331687 - DNA, 25 bp, Homo sapien
ttggtagaaggattaagggtgtcca

SEQ ID NO: 2331688 - DNA, 25 bp, Homo sapien
tagaaggattaagggtgtccatcat

SEQ ID NO: 2331689 - DNA, 25 bp, Homo sapien
gaatgaggataaaaaggtagtggaa

SEQ ID NO: 2331690 - DNA, 25 bp, Homo sapien
tgggcagttccaccttgtggccttt

SEQ ID NO: 2331691 - DNA, 25 bp, Homo sapien
aaatgggcagttccaccttgtggcc

SEQ ID NO: 2331692 - DNA, 25 bp, Homo sapien
caccgaaatgggcagttccaccttg

SEQ ID NO: 2331693 - DNA, 25 bp, Homo sapien
gacgtcatcctatcgcagggtgcac

SEQ ID NO: 2331694 - DNA, 25 bp, Homo sapien
caaggtgggaactaactctggacag

SEQ ID NO: 2331695 - DNA, 25 bp, Homo sapien
gccattgagacaagccagttcacct

SEQ ID NO: 2331696 - DNA, 25 bp, Homo sapien
cagcttcagaatgtgtgaggcaacg

SEQ ID NO: 2331697 - DNA, 25 bp, Homo sapien
caagaagaaccgttaactgtccagg

SEQ ID NO: 2331698 - DNA, 25 bp, Homo sapien
gctggctgacaaccttgagcactgg

SEQ ID NO: 2331699 - DNA, 25 bp, Homo sapien
tccagactttgcataaggagttcat

SEQ ID NO: 2331700 - DNA, 25 bp, Homo sapien
tgacaagccaatgattcaatgcagc

SEQ ID NO: 2331701 - DNA, 25 bp, Homo sapien
ggagaacttacctcctaacccagca

SEQ ID NO: 2331702 - DNA, 25 bp, Homo sapien
aagtcgtgtttattgctggcctcca

SEQ ID NO: 2331703 - DNA, 25 bp, Homo sapien
agtttgtgacgcctgcctttctaaa

SEQ ID NO: 2331704 - DNA, 25 bp, Homo sapien
ttaagcttcacaacagcccagtggg

SEQ ID NO: 2331705 - DNA, 25 bp, Homo sapien
tagggagtacacttttactgcttcc

SEQ ID NO: 2331706 - DNA, 25 bp, Homo sapien
tgtgtgcataggtagaattccgtcc

SEQ ID NO: 2331707 - DNA, 25 bp, Homo sapien
gataatcgtctaggaaactctgcgg

SEQ ID NO: 2331708 - DNA, 25 bp, Homo sapien
tgcggttgacattcatatgcatgga

SEQ ID NO: 2331709 - DNA, 25 bp, Homo sapien
tctgtcccactgcacgacatgctgc

SEQ ID NO: 2331710 - DNA, 25 bp, Homo sapien
gatctcctgtgttccgagactccag

SEQ ID NO: 2331711 - DNA, 25 bp, Homo sapien
ggcagatggaacagccaattctgac

SEQ ID NO: 2331712 - DNA, 25 bp, Homo sapien
ggctgagatgacgatctcctgtgtt

SEQ ID NO: 2331713 - DNA, 25 bp, Homo sapien
cattgcaggcctgtgatgaaggggt

SEQ ID NO: 2331714 - DNA, 25 bp, Homo sapien
tgcacggaagacccttgttagcttc

SEQ ID NO: 2331715 - DNA, 25 bp, Homo sapien
cacggaagacccttgttagcttcct

SEQ ID NO: 2331716 - DNA, 25 bp, Homo sapien
atgaaggggtgaagacaagtgtcca

SEQ ID NO: 2331717 - DNA, 25 bp, Homo sapien
tggaagcagggcctgtacaccatca

SEQ ID NO: 2331718 - DNA, 25 bp, Homo sapien
gaagtgtgggtatctaaagcccctg

SEQ ID NO: 2331719 - DNA, 25 bp, Homo sapien
gatgaatcccaatgcaggtacagga

SEQ ID NO: 2331720 - DNA, 25 bp, Homo sapien
tgaaggtgttgtattgatttgcccc

SEQ ID NO: 2331721 - DNA, 25 bp, Homo sapien
ccctcaaattctccaaaatagccat

SEQ ID NO: 2331722 - DNA, 25 bp, Homo sapien
cagaaacagaccttccaaccctcaa

SEQ ID NO: 2331723 - DNA, 25 bp, Homo sapien
tttacaaccagaaacagaccttcca

SEQ ID NO: 2331724 - DNA, 25 bp, Homo sapien
caaccctcaaattctccaaaatagc

SEQ ID NO: 2331725 - DNA, 25 bp, Homo sapien
catatccggggaaaacatccggtct

SEQ ID NO: 2331726 - DNA, 25 bp, Homo sapien
ttctctctttatgcccaaggttgtt

SEQ ID NO: 2331727 - DNA, 25 bp, Homo sapien
ccatagttctctctttatgcccaag

SEQ ID NO: 2331728 - DNA, 25 bp, Homo sapien
cggggaaaacatccggtctatcatt

SEQ ID NO: 2331729 - DNA, 25 bp, Homo sapien
tgatgtcagccatgcaactgacatg

SEQ ID NO: 2331730 - DNA, 25 bp, Homo sapien
ctgacatggatagttcccaggagct

SEQ ID NO: 2331731 - DNA, 25 bp, Homo sapien
ccaacactaaagtagcctccttgtc

SEQ ID NO: 2331732 - DNA, 25 bp, Homo sapien
tctccaacactaaagtagcctcctt

SEQ ID NO: 2331733 - DNA, 25 bp, Homo sapien
cagccccagatggtgtagcttctcc

SEQ ID NO: 2331734 - DNA, 25 bp, Homo sapien
cttctctctgccagaccttcccaca

SEQ ID NO: 2331735 - DNA, 25 bp, Homo sapien
cctcccaagtactgtcactgtcaag

SEQ ID NO: 2331736 - DNA, 25 bp, Homo sapien
gtcactgtcaagttccttctctctg

SEQ ID NO: 2331737 - DNA, 25 bp, Homo sapien
tattgctggtaattgattgttttac

SEQ ID NO: 2331738 - DNA, 25 bp, Homo sapien
gactctttaaagtgcacgctttctg

SEQ ID NO: 2331739 - DNA, 25 bp, Homo sapien
acaatattgagcagagtttgtccag

SEQ ID NO: 2331740 - DNA, 25 bp, Homo sapien
tacctcaactaacagagaaaagtcc

SEQ ID NO: 2331741 - DNA, 25 bp, Homo sapien
tctccccgatgcacaatgcgttcaa

SEQ ID NO: 2331742 - DNA, 25 bp, Homo sapien
caatgcgttcaattactgagcacaa

SEQ ID NO: 2331743 - DNA, 25 bp, Homo sapien
attactgagcacaaaccatgcagca

SEQ ID NO: 2331744 - DNA, 25 bp, Homo sapien
aggccaatgtgccatctccccgatg

SEQ ID NO: 2331745 - DNA, 25 bp, Homo sapien
gatttcgcattggacccagcagagg

SEQ ID NO: 2331746 - DNA, 25 bp, Homo sapien
ggtttgctcatacctggaccggctt

SEQ ID NO: 2331747 - DNA, 25 bp, Homo sapien
ccttgctgtagaataaacgccctcc

SEQ ID NO: 2331748 - DNA, 25 bp, Homo sapien
tacagggccatgataagggctcaga

SEQ ID NO: 2331749 - DNA, 25 bp, Homo sapien
gaacaggagatttcctctcagggca

SEQ ID NO: 2331750 - DNA, 25 bp, Homo sapien
gatcctatgaaagatgtcctgtcct

SEQ ID NO: 2331751 - DNA, 25 bp, Homo sapien
tcctaaatgtgaccgttgctgctcc

SEQ ID NO: 2331752 - DNA, 25 bp, Homo sapien
tctcagggcagactttgtaaaggtc

SEQ ID NO: 2331753 - DNA, 25 bp, Homo sapien
gagttccaggaacgctctgtgcggc

SEQ ID NO: 2331754 - DNA, 25 bp, Homo sapien
caacagatgtgatttataaggcaag

SEQ ID NO: 2331755 - DNA, 25 bp, Homo sapien
tgcggccgtgaaggtggtcacctct

SEQ ID NO: 2331756 - DNA, 25 bp, Homo sapien
aaccctgattcttgttggtactggg

SEQ ID NO: 2331757 - DNA, 25 bp, Homo sapien
taggccttataaaaaaggagagaca

SEQ ID NO: 2331758 - DNA, 25 bp, Homo sapien
tgtggtttgcaagtaataaagcatt

SEQ ID NO: 2331759 - DNA, 25 bp, Homo sapien
tgatgttgtggtttgcaagtaataa

SEQ ID NO: 2331760 - DNA, 25 bp, Homo sapien
gagagacagatgtagatatataaca

SEQ ID NO: 2331761 - DNA, 25 bp, Homo sapien
gacagtcctcaaatgctaagttaac

SEQ ID NO: 2331762 - DNA, 25 bp, Homo sapien
taagttaacagccatctaggatcac

SEQ ID NO: 2331763 - DNA, 25 bp, Homo sapien
agctaaggaaggcttcccgccgctg

SEQ ID NO: 2331764 - DNA, 25 bp, Homo sapien
ctggtccaattgtgtctatctgaga

SEQ ID NO: 2331765 - DNA, 25 bp, Homo sapien
cagaagatcggagacagctggtcat

SEQ ID NO: 2331766 - DNA, 25 bp, Homo sapien
gtgaaaaggcacaaggcgataggca

SEQ ID NO: 2331767 - DNA, 25 bp, Homo sapien
gataggcagctgatccagcagaaga

SEQ ID NO: 2331768 - DNA, 25 bp, Homo sapien
ccagcagaagatcggagacagctgg

SEQ ID NO: 2331769 - DNA, 25 bp, Homo sapien
ccccattctccagacctgctgacac

SEQ ID NO: 2331770 - DNA, 25 bp, Homo sapien
tctgcaatatgcacccccattctcc

SEQ ID NO: 2331771 - DNA, 25 bp, Homo sapien
cattctccagacctgctgacaccat

SEQ ID NO: 2331772 - DNA, 25 bp, Homo sapien
atatgcacccccattctccagacct

SEQ ID NO: 2331773 - DNA, 25 bp, Homo sapien
gggcattgcaaaacgtctccacaca

SEQ ID NO: 2331774 - DNA, 25 bp, Homo sapien
gcctccctcgggcattgcaaaacgt

SEQ ID NO: 2331775 - DNA, 25 bp, Homo sapien
gcatcctcctcgaaaaagagacagg

SEQ ID NO: 2331776 - DNA, 25 bp, Homo sapien
agcgtccgcagcacaaacagggttc

SEQ ID NO: 2331777 - DNA, 25 bp, Homo sapien
gtctgaggtcaacctaggacgctag

SEQ ID NO: 2331778 - DNA, 25 bp, Homo sapien
gccagcaagacagaatcattctttc

SEQ ID NO: 2331779 - DNA, 25 bp, Homo sapien
cgtccgccactgaggaggcttgagc

SEQ ID NO: 2331780 - DNA, 25 bp, Homo sapien
aacctaggacgctagagtttgctgg

SEQ ID NO: 2331781 - DNA, 25 bp, Homo sapien
tatgaggctgtctgaagcctgtgcc

SEQ ID NO: 2331782 - DNA, 25 bp, Homo sapien
tgtctcttggaatgtgattgctgaa

SEQ ID NO: 2331783 - DNA, 25 bp, Homo sapien
tccgagcaggagtgcctatgaggct

SEQ ID NO: 2331784 - DNA, 25 bp, Homo sapien
gaagcctgtgccctaagggctttca

SEQ ID NO: 2331785 - DNA, 25 bp, Homo sapien
tactagctaagtatggcaatggcag

SEQ ID NO: 2331786 - DNA, 25 bp, Homo sapien
gataaagccccacagtggtagaaag

SEQ ID NO: 2331787 - DNA, 25 bp, Homo sapien
gaagtctaaagatgctacccactaa

SEQ ID NO: 2331788 - DNA, 25 bp, Homo sapien
gtgtttgccaactcgtggttccgca

SEQ ID NO: 2331789 - DNA, 25 bp, Homo sapien
gagatgtaccttcttcacgcaaagc

SEQ ID NO: 2331790 - DNA, 25 bp, Homo sapien
tacatccagtgagcaggcacgtgtc

SEQ ID NO: 2331791 - DNA, 25 bp, Homo sapien
taaagagcaggttgggcaaattccc

SEQ ID NO: 2331792 - DNA, 25 bp, Homo sapien
gagaccggaagtccaattctggcaa

SEQ ID NO: 2331793 - DNA, 25 bp, Homo sapien
tgcacattccaggtacaccagtgtg

SEQ ID NO: 2331794 - DNA, 25 bp, Homo sapien
gcagcagattttgcacattccaggt

SEQ ID NO: 2331795 - DNA, 25 bp, Homo sapien
ggtacaccagtgtgtggacagccag

SEQ ID NO: 2331796 - DNA, 25 bp, Homo sapien
cattccaggtacaccagtgtgtgga

SEQ ID NO: 2331797 - DNA, 25 bp, Homo sapien
cctatcacaaaagtgtaacaagtgt

SEQ ID NO: 2331798 - DNA, 25 bp, Homo sapien
ttctcataatgtttcatgtcccccc

SEQ ID NO: 2331799 - DNA, 25 bp, Homo sapien
caagtgtgtaacgttacccgaatat

SEQ ID NO: 2331800 - DNA, 25 bp, Homo sapien
aatgtttcatgtcccccccaaactg

SEQ ID NO: 2331801 - DNA, 25 bp, Homo sapien
tcctctggattttagatgaagtgcc

SEQ ID NO: 2331802 - DNA, 25 bp, Homo sapien
tgtgagtgccaaaccagaagatatc

SEQ ID NO: 2331803 - DNA, 25 bp, Homo sapien
cattttagtgataggttctttgctg

SEQ ID NO: 2331804 - DNA, 25 bp, Homo sapien
gccagaatgggaagcattttagtga

SEQ ID NO: 2331805 - DNA, 25 bp, Homo sapien
catggaagtaatgaagcttcagggc

SEQ ID NO: 2331806 - DNA, 25 bp, Homo sapien
gaatttcatggaagtaatgaagctt

SEQ ID NO: 2331807 - DNA, 25 bp, Homo sapien
gggcaccagaggagactttagtagc

SEQ ID NO: 2331808 - DNA, 25 bp, Homo sapien
ctttagtagctccaaagctattcat

SEQ ID NO: 2331809 - DNA, 25 bp, Homo sapien
tgggtagaagtcacagctaatgtct

SEQ ID NO: 2331810 - DNA, 25 bp, Homo sapien
aaagctatgaatttccattgaatta

SEQ ID NO: 2331811 - DNA, 25 bp, Homo sapien
gtggttggggacaaagctatgaatt

SEQ ID NO: 2331812 - DNA, 25 bp, Homo sapien
cagctaatgtctgagcatttgtgct

SEQ ID NO: 2331813 - DNA, 25 bp, Homo sapien
gtgggggtggatggaaatgaggagc

SEQ ID NO: 2331814 - DNA, 25 bp, Homo sapien
tgggggtggatggaaatgaggagcc

SEQ ID NO: 2331815 - DNA, 25 bp, Homo sapien
ctgtgggggtggatggaaatgagga

SEQ ID NO: 2331816 - DNA, 25 bp, Homo sapien
ggggtggatggaaatgaggagccat

SEQ ID NO: 2331817 - DNA, 25 bp, Homo sapien
actgaggaatatttctggtccaggt

SEQ ID NO: 2331818 - DNA, 25 bp, Homo sapien
ttttccaaaggatccccactcaagc

SEQ ID NO: 2331819 - DNA, 25 bp, Homo sapien
ctcagaaccatgctgcctcggaggg

SEQ ID NO: 2331820 - DNA, 25 bp, Homo sapien
tggaatcaacagcttgccctctagt

SEQ ID NO: 2331821 - DNA, 25 bp, Homo sapien
agtctgaagccctgcagtgtggacc

SEQ ID NO: 2331822 - DNA, 25 bp, Homo sapien
tcttgagccaagcttttccaacatc

SEQ ID NO: 2331823 - DNA, 25 bp, Homo sapien
ctcttgagccaagcttttccaacat

SEQ ID NO: 2331824 - DNA, 25 bp, Homo sapien
ttcctcttgagccaagcttttccaa

SEQ ID NO: 2331825 - DNA, 25 bp, Homo sapien
tcctcttgagccaagcttttccaac

SEQ ID NO: 2331826 - DNA, 25 bp, Homo sapien
cattttgggcacctgttttccctct

SEQ ID NO: 2331827 - DNA, 25 bp, Homo sapien
tttacaatgagtgaagaacctgaca

SEQ ID NO: 2331828 - DNA, 25 bp, Homo sapien
ggtttgtagcctaagtgcattaggc

SEQ ID NO: 2331829 - DNA, 25 bp, Homo sapien
caatgatgaaattgcataaagaggc

SEQ ID NO: 2331830 - DNA, 25 bp, Homo sapien
agtcttctcaggctagtggccacgc

SEQ ID NO: 2331831 - DNA, 25 bp, Homo sapien
cagcttataaagtaggtgccagtgg

SEQ ID NO: 2331832 - DNA, 25 bp, Homo sapien
gagtcagcctctaggagataagccc

SEQ ID NO: 2331833 - DNA, 25 bp, Homo sapien
ggccacgcaattgacacagcttata

SEQ ID NO: 2331834 - DNA, 25 bp, Homo sapien
cagaggagtggtgtccagtatatcc

SEQ ID NO: 2331835 - DNA, 25 bp, Homo sapien
gtatatccaggagcttcaaagggac

SEQ ID NO: 2331836 - DNA, 25 bp, Homo sapien
catgactaggtagggtcccagcagc

SEQ ID NO: 2331837 - DNA, 25 bp, Homo sapien
tttgatccagcaggacaaatgtcag

SEQ ID NO: 2331838 - DNA, 25 bp, Homo sapien
atgtctccatcaccaaggtccagaa

SEQ ID NO: 2331839 - DNA, 25 bp, Homo sapien
tctatgtctccatcaccaaggtcca

SEQ ID NO: 2331840 - DNA, 25 bp, Homo sapien
tatgtctccatcaccaaggtccaga

SEQ ID NO: 2331841 - DNA, 25 bp, Homo sapien
cttctatgtctccatcaccaaggtc

SEQ ID NO: 2331842 - DNA, 25 bp, Homo sapien
atccgcgcctcgtcgtgcgtggcac

SEQ ID NO: 2331843 - DNA, 25 bp, Homo sapien
gcgcctcgtcgtgcgtggcacacag

SEQ ID NO: 2331844 - DNA, 25 bp, Homo sapien
acagtgcgcctctgttcaaaggtca

SEQ ID NO: 2331845 - DNA, 25 bp, Homo sapien
gcgtggcacacagtgcgcctctgtt

SEQ ID NO: 2331846 - DNA, 25 bp, Homo sapien
tgtgggttgctaggcaaaaataaac

SEQ ID NO: 2331847 - DNA, 25 bp, Homo sapien
ctatttccttacaactccgagcctt

SEQ ID NO: 2331848 - DNA, 25 bp, Homo sapien
acatcagagacatctcctatttcct

SEQ ID NO: 2331849 - DNA, 25 bp, Homo sapien
ccctgcgcggccactgggagagaca

SEQ ID NO: 2331850 - DNA, 25 bp, Homo sapien
tgacaccaagtgaccgctcgccagt

SEQ ID NO: 2331851 - DNA, 25 bp, Homo sapien
ctccccggtttactgacaccaagtg

SEQ ID NO: 2331852 - DNA, 25 bp, Homo sapien
ctgagctcgttgaccctgagcaggg

SEQ ID NO: 2331853 - DNA, 25 bp, Homo sapien
caggggcgaaagagggggctgccct

SEQ ID NO: 2331854 - DNA, 25 bp, Homo sapien
ctcggagaggcaagtcccgggaggg

SEQ ID NO: 2331855 - DNA, 25 bp, Homo sapien
cgtctccctcacataggggcgcggg

SEQ ID NO: 2331856 - DNA, 25 bp, Homo sapien
tggaagcgctgcgaggaccgaagac

SEQ ID NO: 2331857 - DNA, 25 bp, Homo sapien
ggcccgtgcacatgcctcgccctcc

SEQ ID NO: 2331858 - DNA, 25 bp, Homo sapien
gaccgcctggctcgggagcctctcc

SEQ ID NO: 2331859 - DNA, 25 bp, Homo sapien
gccgcctcgcgtctgctacagccag

SEQ ID NO: 2331860 - DNA, 25 bp, Homo sapien
tcgccgcctcgcgtctgctacagcc

SEQ ID NO: 2331861 - DNA, 25 bp, Homo sapien
gcctcgcgtctgctacagccagaca

SEQ ID NO: 2331862 - DNA, 25 bp, Homo sapien
gtccccggcgcctcgtcgccgcctc

SEQ ID NO: 2331863 - DNA, 25 bp, Homo sapien
ctgctgctacttctggcggccgccg

SEQ ID NO: 2331864 - DNA, 25 bp, Homo sapien
ccgccgccggtcctgctgctacttc

SEQ ID NO: 2331865 - DNA, 25 bp, Homo sapien
gcatttcagggctgccgtcgccgcc

SEQ ID NO: 2331866 - DNA, 25 bp, Homo sapien
tgcatttcagggctgccgtcgccgc

SEQ ID NO: 2331867 - DNA, 25 bp, Homo sapien
tcgggtaggcggcgggagcggcggc

SEQ ID NO: 2331868 - DNA, 25 bp, Homo sapien
ggtaggcggcgggagcggcggccga

SEQ ID NO: 2331869 - DNA, 25 bp, Homo sapien
aggcggcgggagcggcggccgaagg

SEQ ID NO: 2331870 - DNA, 25 bp, Homo sapien
gtaggcggcgggagcggcggccgaa

SEQ ID NO: 2331871 - DNA, 25 bp, Homo sapien
cgggtggcccctgcaccgagccccg

SEQ ID NO: 2331872 - DNA, 25 bp, Homo sapien
tgaagctgacgaacggcgctgtccc

SEQ ID NO: 2331873 - DNA, 25 bp, Homo sapien
gcctgaagctgacgaacggcgctgt

SEQ ID NO: 2331874 - DNA, 25 bp, Homo sapien
aagcctgaagctgacgaacggcgct

SEQ ID NO: 2331875 - DNA, 25 bp, Homo sapien
cgtgtgggctgcggcggcagcgttg

SEQ ID NO: 2331876 - DNA, 25 bp, Homo sapien
ccctgtagaccggagatggcctttt

SEQ ID NO: 2331877 - DNA, 25 bp, Homo sapien
caccatccaagggtgatccctggga

SEQ ID NO: 2331878 - DNA, 25 bp, Homo sapien
tttagtcgaatccagcttgccagtc

SEQ ID NO: 2331879 - DNA, 25 bp, Homo sapien
tctccaagtctaacaggtgcaacta

SEQ ID NO: 2331880 - DNA, 25 bp, Homo sapien
gagtactgagaagcacattcgcatc

SEQ ID NO: 2331881 - DNA, 25 bp, Homo sapien
gcacattcgcatccttccttttctg

SEQ ID NO: 2331882 - DNA, 25 bp, Homo sapien
cctccagtggagacttgtcgtttca

SEQ ID NO: 2331883 - DNA, 25 bp, Homo sapien
tccttttctggtgcaccacaggctc

SEQ ID NO: 2331884 - DNA, 25 bp, Homo sapien
aaggtaaaactgataactggagtgt

SEQ ID NO: 2331885 - DNA, 25 bp, Homo sapien
caacttatacatggagatataaaac

SEQ ID NO: 2331886 - DNA, 25 bp, Homo sapien
gggcaatggtctagataaattccaa

SEQ ID NO: 2331887 - DNA, 25 bp, Homo sapien
tctattaataactaccaattaacat

SEQ ID NO: 2331888 - DNA, 25 bp, Homo sapien
tccactgtgataatagtcttgggcg

SEQ ID NO: 2331889 - DNA, 25 bp, Homo sapien
gaattgagtccaaaaagactggaat

SEQ ID NO: 2331890 - DNA, 25 bp, Homo sapien
aaacattctgacagtctgtgtggcc

SEQ ID NO: 2331891 - DNA, 25 bp, Homo sapien
ggcaaacagcagatattccactgtg

SEQ ID NO: 2331892 - DNA, 25 bp, Homo sapien
cgtggctgccgacatgcaggtgatc

SEQ ID NO: 2331893 - DNA, 25 bp, Homo sapien
gctgccgacatgcaggtgatcattc

SEQ ID NO: 2331894 - DNA, 25 bp, Homo sapien
tgccgacatgcaggtgatcattcat

SEQ ID NO: 2331895 - DNA, 25 bp, Homo sapien
tggctgccgacatgcaggtgatcat

SEQ ID NO: 2331896 - DNA, 25 bp, Homo sapien
cgttttgcccactgttgtaagccca

SEQ ID NO: 2331897 - DNA, 25 bp, Homo sapien
agcccatttggttgtgtcgtgagca

SEQ ID NO: 2331898 - DNA, 25 bp, Homo sapien
gactttgtgatcgtaggccttgacc

SEQ ID NO: 2331899 - DNA, 25 bp, Homo sapien
tggagctcccctgccgtctatgaat

SEQ ID NO: 2331900 - DNA, 25 bp, Homo sapien
ggtaacccgtcaggagctctgctaa

SEQ ID NO: 2331901 - DNA, 25 bp, Homo sapien
gcagtttctgtgagggcatgcccaa

SEQ ID NO: 2331902 - DNA, 25 bp, Homo sapien
aaggatcacttctggagcccggtaa

SEQ ID NO: 2331903 - DNA, 25 bp, Homo sapien
tatagatgtgatagcaccggtgctc

SEQ ID NO: 2331904 - DNA, 25 bp, Homo sapien
taaatgcaagcaacagacgtgtggt

SEQ ID NO: 2331905 - DNA, 25 bp, Homo sapien
catgaagtaatcagtggcctgccac

SEQ ID NO: 2331906 - DNA, 25 bp, Homo sapien
tccatagcagagagatgtacaagcc

SEQ ID NO: 2331907 - DNA, 25 bp, Homo sapien
tgagagaaccttacagtggcacctg

SEQ ID NO: 2331908 - DNA, 25 bp, Homo sapien
taaacagtcttactcctgtcatcag

SEQ ID NO: 2331909 - DNA, 25 bp, Homo sapien
catacagtatcatagaactggccac

SEQ ID NO: 2331910 - DNA, 25 bp, Homo sapien
cctgtcatcagctgtataatacata

SEQ ID NO: 2331911 - DNA, 25 bp, Homo sapien
tttaacagatattcactaaacagtc

SEQ ID NO: 2331912 - DNA, 25 bp, Homo sapien
tatcccagtattgatgcagggagcc

SEQ ID NO: 2331913 - DNA, 25 bp, Homo sapien
catgagctaattgcagttcctaggc

SEQ ID NO: 2331914 - DNA, 25 bp, Homo sapien
ttttctgagccaaccgaggcaggag

SEQ ID NO: 2331915 - DNA, 25 bp, Homo sapien
gctatgacgaggcaattgggaactc

SEQ ID NO: 2331916 - DNA, 25 bp, Homo sapien
ccttgagacacatgggaatggcaat

SEQ ID NO: 2331917 - DNA, 25 bp, Homo sapien
tgctgctccttaacgacagatgact

SEQ ID NO: 2331918 - DNA, 25 bp, Homo sapien
tgtatgtgcaacacactggcagtca

SEQ ID NO: 2331919 - DNA, 25 bp, Homo sapien
taggtgcacttagacactacgatgc

SEQ ID NO: 2331920 - DNA, 25 bp, Homo sapien
tgctttgcaaatagcatacttcatt

SEQ ID NO: 2331921 - DNA, 25 bp, Homo sapien
ttcagtaagctttacttaaatgatt

SEQ ID NO: 2331922 - DNA, 25 bp, Homo sapien
tgcttataattagttacatttctcc

SEQ ID NO: 2331923 - DNA, 25 bp, Homo sapien
tttatttgctgctggtccacataaa

SEQ ID NO: 2331924 - DNA, 25 bp, Homo sapien
gattggcaaatgcactctagacaga

SEQ ID NO: 2331925 - DNA, 25 bp, Homo sapien
tctggtctgggctgaatctcacagg

SEQ ID NO: 2331926 - DNA, 25 bp, Homo sapien
tctactcaccttgcagttagcagag

SEQ ID NO: 2331927 - DNA, 25 bp, Homo sapien
caaaaattatacacgtaggtgctca

SEQ ID NO: 2331928 - DNA, 25 bp, Homo sapien
cactatgccagagcggcctttgctg

SEQ ID NO: 2331929 - DNA, 25 bp, Homo sapien
gctgggcactgcttacaaactataa

SEQ ID NO: 2331930 - DNA, 25 bp, Homo sapien
ttatcctgcacgagctttcccctgg

SEQ ID NO: 2331931 - DNA, 25 bp, Homo sapien
tattgtacatgcatcaatggcttcc

SEQ ID NO: 2331932 - DNA, 25 bp, Homo sapien
aggctctgctaattatgccccagca

SEQ ID NO: 2331933 - DNA, 25 bp, Homo sapien
ttatatcactccacacccttgctag

SEQ ID NO: 2331934 - DNA, 25 bp, Homo sapien
ttggtacagattaccaagtgccctc

SEQ ID NO: 2331935 - DNA, 25 bp, Homo sapien
ccagcagcatcaaacgagtgcttta

SEQ ID NO: 2331936 - DNA, 25 bp, Homo sapien
tccccacattcacggccgacgttca

SEQ ID NO: 2331937 - DNA, 25 bp, Homo sapien
tccatctccccacattcacggccga

SEQ ID NO: 2331938 - DNA, 25 bp, Homo sapien
tctccccacattcacggccgacgtt

SEQ ID NO: 2331939 - DNA, 25 bp, Homo sapien
catctccccacattcacggccgacg

SEQ ID NO: 2331940 - DNA, 25 bp, Homo sapien
ccagaagtagctaccattctgatat

SEQ ID NO: 2331941 - DNA, 25 bp, Homo sapien
ttacccagaagtagctaccattctg

SEQ ID NO: 2331942 - DNA, 25 bp, Homo sapien
ctgatatcacccaaaagatcaagca

SEQ ID NO: 2331943 - DNA, 25 bp, Homo sapien
tctgatatcacccaaaagatcaagc

SEQ ID NO: 2331944 - DNA, 25 bp, Homo sapien
actcagtgttctcatagtggcaact

SEQ ID NO: 2331945 - DNA, 25 bp, Homo sapien
cagttctcactaggttacaaccaag

SEQ ID NO: 2331946 - DNA, 25 bp, Homo sapien
taaggattacattggacccacctag

SEQ ID NO: 2331947 - DNA, 25 bp, Homo sapien
caaccaaggtgtcaataggacttca

SEQ ID NO: 2331948 - DNA, 25 bp, Homo sapien
ggtctcctgcaagcctcgtaaaatg

SEQ ID NO: 2331949 - DNA, 25 bp, Homo sapien
tgggtctcctgcaagcctcgtaaaa

SEQ ID NO: 2331950 - DNA, 25 bp, Homo sapien
tcctgcaagcctcgtaaaatgcatg

SEQ ID NO: 2331951 - DNA, 25 bp, Homo sapien
caagcctcgtaaaatgcatgctctg

SEQ ID NO: 2331952 - DNA, 25 bp, Homo sapien
gagaacatggactatgactcacgca

SEQ ID NO: 2331953 - DNA, 25 bp, Homo sapien
tcattcaatgcagatagctcggcct

SEQ ID NO: 2331954 - DNA, 25 bp, Homo sapien
tgtgaaaactctatgcaatggcgac

SEQ ID NO: 2331955 - DNA, 25 bp, Homo sapien
gactcacgcagttattccacagttg

SEQ ID NO: 2331956 - DNA, 25 bp, Homo sapien
gttgactgccaagataaggatgtgg

SEQ ID NO: 2331957 - DNA, 25 bp, Homo sapien
gcaataagataccacaacatagctg

SEQ ID NO: 2331958 - DNA, 25 bp, Homo sapien
cagaatggctgatagagttgactgc

SEQ ID NO: 2331959 - DNA, 25 bp, Homo sapien
gaaatcccagcccataccaagactt

SEQ ID NO: 2331960 - DNA, 25 bp, Homo sapien
ggaggacaggaaactagaagcagct

SEQ ID NO: 2331961 - DNA, 25 bp, Homo sapien
cagtgtactgactattattaaggca

SEQ ID NO: 2331962 - DNA, 25 bp, Homo sapien
aaagccaagacttgtagagattctg

SEQ ID NO: 2331963 - DNA, 25 bp, Homo sapien
cgttggccagtgtactgactattat

SEQ ID NO: 2331964 - DNA, 25 bp, Homo sapien
aagccaagacttgtagagattctgt

SEQ ID NO: 2331965 - DNA, 25 bp, Homo sapien
gcctggatgagccttgagcatcaca

SEQ ID NO: 2331966 - DNA, 25 bp, Homo sapien
ttggcaagtaagttgaaggacacac

SEQ ID NO: 2331967 - DNA, 25 bp, Homo sapien
tgaatacactgccaatgcctggatg

SEQ ID NO: 2331968 - DNA, 25 bp, Homo sapien
gatctttggcttaaagctttgccca

SEQ ID NO: 2331969 - DNA, 25 bp, Homo sapien
gatctggtctcagtggtggcagtgg

SEQ ID NO: 2331970 - DNA, 25 bp, Homo sapien
tctcagtggtggcagtgggtggggg

SEQ ID NO: 2331971 - DNA, 25 bp, Homo sapien
cagtggtggcagtgggtggggggag

SEQ ID NO: 2331972 - DNA, 25 bp, Homo sapien
gtctcagtggtggcagtgggtgggg

SEQ ID NO: 2331973 - DNA, 25 bp, Homo sapien
acccgttttatcagatatcttttga

SEQ ID NO: 2331974 - DNA, 25 bp, Homo sapien
gagaatttccttaatacagctgatt

SEQ ID NO: 2331975 - DNA, 25 bp, Homo sapien
gagctatatttacccgttttatcag

SEQ ID NO: 2331976 - DNA, 25 bp, Homo sapien
gtcctcatcagtggagctatattta

SEQ ID NO: 2331977 - DNA, 25 bp, Homo sapien
gcctaaatttgtggatttactattg

SEQ ID NO: 2331978 - DNA, 25 bp, Homo sapien
tgtggatttactattgggcagagat

SEQ ID NO: 2331979 - DNA, 25 bp, Homo sapien
aggtttttggcgacatctccggtag

SEQ ID NO: 2331980 - DNA, 25 bp, Homo sapien
gacatctccggtagaaatgcctaaa

SEQ ID NO: 2331981 - DNA, 25 bp, Homo sapien
caaatacaatgtcagcctagcaatc

SEQ ID NO: 2331982 - DNA, 25 bp, Homo sapien
tagcaatctccagctcgtattggcc

SEQ ID NO: 2331983 - DNA, 25 bp, Homo sapien
aacagcgtcagaccttagttctcca

SEQ ID NO: 2331984 - DNA, 25 bp, Homo sapien
tccaacagtttctggactggacaaa

SEQ ID NO: 2331985 - DNA, 25 bp, Homo sapien
ctcctgaggattgagtctctctcct

SEQ ID NO: 2331986 - DNA, 25 bp, Homo sapien
aagcttcttacagttctcaggctca

SEQ ID NO: 2331987 - DNA, 25 bp, Homo sapien
aaagctctacctcctcaacttttct

SEQ ID NO: 2331988 - DNA, 25 bp, Homo sapien
ccatgcaagctctccacggaggaaa

SEQ ID NO: 2331989 - DNA, 25 bp, Homo sapien
ttcttgtaggtaagtcacataagtc

SEQ ID NO: 2331990 - DNA, 25 bp, Homo sapien
aacctctcacttataaatcacagag

SEQ ID NO: 2331991 - DNA, 25 bp, Homo sapien
gccacgtgagtctctccccttcaaa

SEQ ID NO: 2331992 - DNA, 25 bp, Homo sapien
cacttataaatcacagagggatata

SEQ ID NO: 2331993 - DNA, 25 bp, Homo sapien
ggtctgccagttgcttgtcttggga

SEQ ID NO: 2331994 - DNA, 25 bp, Homo sapien
cttattagggtctgccagttgcttg

SEQ ID NO: 2331995 - DNA, 25 bp, Homo sapien
attagggtctgccagttgcttgtct

SEQ ID NO: 2331996 - DNA, 25 bp, Homo sapien
tagggtctgccagttgcttgtcttg

SEQ ID NO: 2331997 - DNA, 25 bp, Homo sapien
aggtcatgttacacatgccacactg

SEQ ID NO: 2331998 - DNA, 25 bp, Homo sapien
acatgccacactggtagtgtaaaaa

SEQ ID NO: 2331999 - DNA, 25 bp, Homo sapien
cctgaagtgggggaacatccacagg

SEQ ID NO: 2332000 - DNA, 25 bp, Homo sapien
actggtagtgtaaaaaaatcctctg

SEQ ID NO: 2332001 - DNA, 25 bp, Homo sapien
cttttggctccttggtgctcaaatt

SEQ ID NO: 2332002 - DNA, 25 bp, Homo sapien
tttaagccttttggctccttggtgc

SEQ ID NO: 2332003 - DNA, 25 bp, Homo sapien
tttggctccttggtgctcaaattcc

SEQ ID NO: 2332004 - DNA, 25 bp, Homo sapien
tggctccttggtgctcaaattcctc

SEQ ID NO: 2332005 - DNA, 25 bp, Homo sapien
tacacgtttgtccactgttaaaata

SEQ ID NO: 2332006 - DNA, 25 bp, Homo sapien
gcaaaggtacacgtttgtccactgt

SEQ ID NO: 2332007 - DNA, 25 bp, Homo sapien
aacaacttgcaaaggtacacgtttg

SEQ ID NO: 2332008 - DNA, 25 bp, Homo sapien
cttgcaaaggtacacgtttgtccac

SEQ ID NO: 2332009 - DNA, 25 bp, Homo sapien
atcattacaacacgaggacggagcc

SEQ ID NO: 2332010 - DNA, 25 bp, Homo sapien
tccagacaagctcgtcgtccctgtg

SEQ ID NO: 2332011 - DNA, 25 bp, Homo sapien
ggcgcagtccagatctatacatcat

SEQ ID NO: 2332012 - DNA, 25 bp, Homo sapien
tccctgtgtctgagaggcgcagtcc

SEQ ID NO: 2332013 - DNA, 25 bp, Homo sapien
ggaggaacatgaccttgctttggag

SEQ ID NO: 2332014 - DNA, 25 bp, Homo sapien
actgctattggctccttagctgtga

SEQ ID NO: 2332015 - DNA, 25 bp, Homo sapien
cctggaggccctactgctattggct

SEQ ID NO: 2332016 - DNA, 25 bp, Homo sapien
aacatgaccttgctttggagaggga

SEQ ID NO: 2332017 - DNA, 25 bp, Homo sapien
tagaaactcggtgaatttagagccc

SEQ ID NO: 2332018 - DNA, 25 bp, Homo sapien
tgacctggccgttcatgcaagtctc

SEQ ID NO: 2332019 - DNA, 25 bp, Homo sapien
gaaatcctactacggatgacctggc

SEQ ID NO: 2332020 - DNA, 25 bp, Homo sapien
tcaacaaagtcagcggatgcatctc

SEQ ID NO: 2332021 - DNA, 25 bp, Homo sapien
ctgccagcgtacacactcaaaatgc

SEQ ID NO: 2332022 - DNA, 25 bp, Homo sapien
agcgtacacactcaaaatgctgctg

SEQ ID NO: 2332023 - DNA, 25 bp, Homo sapien
cagcgtacacactcaaaatgctgct

SEQ ID NO: 2332024 - DNA, 25 bp, Homo sapien
gccagcgtacacactcaaaatgctg

SEQ ID NO: 2332025 - DNA, 25 bp, Homo sapien
gtgagttctcctgttaccgccaatg

SEQ ID NO: 2332026 - DNA, 25 bp, Homo sapien
tcatcctggctccaagaggtagcct

SEQ ID NO: 2332027 - DNA, 25 bp, Homo sapien
ttaatcggtgcaacctgcaactttg

SEQ ID NO: 2332028 - DNA, 25 bp, Homo sapien
tgcacatgccccttggtgagttctc

SEQ ID NO: 2332029 - DNA, 25 bp, Homo sapien
tatgtgctgtgaacaacttgatctc

SEQ ID NO: 2332030 - DNA, 25 bp, Homo sapien
gagttcccaagtatctcatatgtgc

SEQ ID NO: 2332031 - DNA, 25 bp, Homo sapien
tctctctggtcgctgtgtgatgtga

SEQ ID NO: 2332032 - DNA, 25 bp, Homo sapien
cacagctgccagtacatgcaaatcc

SEQ ID NO: 2332033 - DNA, 25 bp, Homo sapien
ctgtaggaagtctgagagttctgtt

SEQ ID NO: 2332034 - DNA, 25 bp, Homo sapien
ggcacagtttgtgattggtccaata

SEQ ID NO: 2332035 - DNA, 25 bp, Homo sapien
tgtgctgtaggaagtctgagagttc

SEQ ID NO: 2332036 - DNA, 25 bp, Homo sapien
ttgtgattggtccaatatctgtgct

SEQ ID NO: 2332037 - DNA, 25 bp, Homo sapien
cttacttgcctgggcctgtttataa

SEQ ID NO: 2332038 - DNA, 25 bp, Homo sapien
ttataatcatgactctatgacccaa

SEQ ID NO: 2332039 - DNA, 25 bp, Homo sapien
tgcctgggcctgtttataatcatga

SEQ ID NO: 2332040 - DNA, 25 bp, Homo sapien
tataatcatgactctatgacccaaa

SEQ ID NO: 2332041 - DNA, 25 bp, Homo sapien
catatcagtgtgctaaatgcagagg

SEQ ID NO: 2332042 - DNA, 25 bp, Homo sapien
catcattgacctgggaatttcgaaa

SEQ ID NO: 2332043 - DNA, 25 bp, Homo sapien
tgaaactgcagcacactgagatcag

SEQ ID NO: 2332044 - DNA, 25 bp, Homo sapien
ctgagatcagtgtggatacagcttg

SEQ ID NO: 2332045 - DNA, 25 bp, Homo sapien
tgctacagtatatgcttcctttcca

SEQ ID NO: 2332046 - DNA, 25 bp, Homo sapien
tacagtatatgcttcctttccagag

SEQ ID NO: 2332047 - DNA, 25 bp, Homo sapien
ctctgctacagtatatgcttccttt

SEQ ID NO: 2332048 - DNA, 25 bp, Homo sapien
acagtatatgcttcctttccagagc

SEQ ID NO: 2332049 - DNA, 25 bp, Homo sapien
actttctgtgattgataggatctca

SEQ ID NO: 2332050 - DNA, 25 bp, Homo sapien
ccaactgactgccttcacagtgatg

SEQ ID NO: 2332051 - DNA, 25 bp, Homo sapien
catctttgtcaaacaaggctttctt

SEQ ID NO: 2332052 - DNA, 25 bp, Homo sapien
tgattgataggatctcaggacatct

SEQ ID NO: 2332053 - DNA, 25 bp, Homo sapien
tatgccaagccaggttcaagatcac

SEQ ID NO: 2332054 - DNA, 25 bp, Homo sapien
ctatgccaagccaggttcaagatca

SEQ ID NO: 2332055 - DNA, 25 bp, Homo sapien
taatagtgccttgctctgaaagaaa

SEQ ID NO: 2332056 - DNA, 25 bp, Homo sapien
atagtgccttgctctgaaagaaaga

SEQ ID NO: 2332057 - DNA, 25 bp, Homo sapien
ggtaatagtgccttgctctgaaaga

SEQ ID NO: 2332058 - DNA, 25 bp, Homo sapien
gtaatagtgccttgctctgaaagaa

SEQ ID NO: 2332059 - DNA, 25 bp, Homo sapien
tctctcatacattcttagcatagtc

SEQ ID NO: 2332060 - DNA, 25 bp, Homo sapien
gcactggtaccacagtgtgtgcttt

SEQ ID NO: 2332061 - DNA, 25 bp, Homo sapien
ccattagctgtagcctggtgcagct

SEQ ID NO: 2332062 - DNA, 25 bp, Homo sapien
tatgccattagctgtagcctggtgc

SEQ ID NO: 2332063 - DNA, 25 bp, Homo sapien
cttccatatgccattagctgtagcc

SEQ ID NO: 2332064 - DNA, 25 bp, Homo sapien
ctggattcctgcaatagcttctgaa

SEQ ID NO: 2332065 - DNA, 25 bp, Homo sapien
cttctgaatgggctccccttcctca

SEQ ID NO: 2332066 - DNA, 25 bp, Homo sapien
gattcctgcaatagcttctgaatgg

SEQ ID NO: 2332067 - DNA, 25 bp, Homo sapien
ttcctgcaatagcttctgaatgggc

SEQ ID NO: 2332068 - DNA, 25 bp, Homo sapien
ctggttgttgtcagactgctcggga

SEQ ID NO: 2332069 - DNA, 25 bp, Homo sapien
tcaaggactggaaacacgtagaatc

SEQ ID NO: 2332070 - DNA, 25 bp, Homo sapien
gactgctcgggagccaaacaatcca

SEQ ID NO: 2332071 - DNA, 25 bp, Homo sapien
aatccatgcacttatcgtattcttg

SEQ ID NO: 2332072 - DNA, 25 bp, Homo sapien
ctgagcctggattcggtaggtacag

SEQ ID NO: 2332073 - DNA, 25 bp, Homo sapien
gattcggtaggtacagccatagcca

SEQ ID NO: 2332074 - DNA, 25 bp, Homo sapien
cctggattcggtaggtacagccata

SEQ ID NO: 2332075 - DNA, 25 bp, Homo sapien
ttcggtaggtacagccatagccaca

SEQ ID NO: 2332076 - DNA, 25 bp, Homo sapien
tgatgggctccatcagagtaacctt

SEQ ID NO: 2332077 - DNA, 25 bp, Homo sapien
gttgcatgcttaggccaaaggaggc

SEQ ID NO: 2332078 - DNA, 25 bp, Homo sapien
cagagtaacctttgcagcagttgca

SEQ ID NO: 2332079 - DNA, 25 bp, Homo sapien
cagcagttgcatgcttaggccaaag

SEQ ID NO: 2332080 - DNA, 25 bp, Homo sapien
tcctttcaataggagaattcctgga

SEQ ID NO: 2332081 - DNA, 25 bp, Homo sapien
tggctggttacaagcaaagcagaga

SEQ ID NO: 2332082 - DNA, 25 bp, Homo sapien
gagcggagtaggttccttatttcca

SEQ ID NO: 2332083 - DNA, 25 bp, Homo sapien
cagatggaccctcctttcaatagga

SEQ ID NO: 2332084 - DNA, 25 bp, Homo sapien
atggtggatggccttcttgctcagg

SEQ ID NO: 2332085 - DNA, 25 bp, Homo sapien
ctggaacctgagcagactgaatact

SEQ ID NO: 2332086 - DNA, 25 bp, Homo sapien
gaatactaatttctcttagcaagac

SEQ ID NO: 2332087 - DNA, 25 bp, Homo sapien
cttagcaagacattacactgcatgg

SEQ ID NO: 2332088 - DNA, 25 bp, Homo sapien
gtgtgagcagaaacacaacttgcag

SEQ ID NO: 2332089 - DNA, 25 bp, Homo sapien
ggatgggaaacaccctacacatggc

SEQ ID NO: 2332090 - DNA, 25 bp, Homo sapien
tgtgacaaaggctaccagactgact

SEQ ID NO: 2332091 - DNA, 25 bp, Homo sapien
gctgtgatcaagcaataaagctctg

SEQ ID NO: 2332092 - DNA, 25 bp, Homo sapien
ctgaccagaactgtgtgcacctgat

SEQ ID NO: 2332093 - DNA, 25 bp, Homo sapien
ggacccagctcaagccagcagtgga

SEQ ID NO: 2332094 - DNA, 25 bp, Homo sapien
tgcctgctggcacaggatgccttcg

SEQ ID NO: 2332095 - DNA, 25 bp, Homo sapien
ctgataagcaggatggctacgtagg

SEQ ID NO: 2332096 - DNA, 25 bp, Homo sapien
cggaatcagatcacttcgtttcaca

SEQ ID NO: 2332097 - DNA, 25 bp, Homo sapien
tttcacagcagtattggaatactta

SEQ ID NO: 2332098 - DNA, 25 bp, Homo sapien
tcgtttcacagcagtattggaatac

SEQ ID NO: 2332099 - DNA, 25 bp, Homo sapien
ggaatcagatcacttcgtttcacag

SEQ ID NO: 2332100 - DNA, 25 bp, Homo sapien
cagatagaggtagagtcagaagacc

SEQ ID NO: 2332101 - DNA, 25 bp, Homo sapien
tatatggtctgtttcaagctcttcc

SEQ ID NO: 2332102 - DNA, 25 bp, Homo sapien
gacctggctttatatggtctgtttc

SEQ ID NO: 2332103 - DNA, 25 bp, Homo sapien
gcagatagaggtagagtcagaagac

SEQ ID NO: 2332104 - DNA, 25 bp, Homo sapien
gggtgattcctgtaactggcatagt

SEQ ID NO: 2332105 - DNA, 25 bp, Homo sapien
cataactgatactggggtgattcct

SEQ ID NO: 2332106 - DNA, 25 bp, Homo sapien
gagttgcaaggatctttactggaga

SEQ ID NO: 2332107 - DNA, 25 bp, Homo sapien
tctgaccctggttctttgacatgag

SEQ ID NO: 2332108 - DNA, 25 bp, Homo sapien
caccattgagacatgtgttttctag

SEQ ID NO: 2332109 - DNA, 25 bp, Homo sapien
ttttctagtagcaaaaacaccataa

SEQ ID NO: 2332110 - DNA, 25 bp, Homo sapien
cattctcaagtaggccccaatgttt

SEQ ID NO: 2332111 - DNA, 25 bp, Homo sapien
tatgccacttgttgatgaacctcta

SEQ ID NO: 2332112 - DNA, 25 bp, Homo sapien
tcatatgaatagagatatccaatac

SEQ ID NO: 2332113 - DNA, 25 bp, Homo sapien
catatgaatagagatatccaatact

SEQ ID NO: 2332114 - DNA, 25 bp, Homo sapien
ttcctcatatgaatagagatatcca

SEQ ID NO: 2332115 - DNA, 25 bp, Homo sapien
cctcatatgaatagagatatccaat

SEQ ID NO: 2332116 - DNA, 25 bp, Homo sapien
attgacacctggctcagtgcattca

SEQ ID NO: 2332117 - DNA, 25 bp, Homo sapien
acctggctcagtgcattcactattg

SEQ ID NO: 2332118 - DNA, 25 bp, Homo sapien
caactctctccagaaactctcctac

SEQ ID NO: 2332119 - DNA, 25 bp, Homo sapien
tcagtgcattcactattgtcaccat

SEQ ID NO: 2332120 - DNA, 25 bp, Homo sapien
tccactgtacaaaggtgcacgcacc

SEQ ID NO: 2332121 - DNA, 25 bp, Homo sapien
ctgtacaaaggtgcacgcaccctct

SEQ ID NO: 2332122 - DNA, 25 bp, Homo sapien
gtacaaaggtgcacgcaccctctct

SEQ ID NO: 2332123 - DNA, 25 bp, Homo sapien
cactgtacaaaggtgcacgcaccct

SEQ ID NO: 2332124 - DNA, 25 bp, Homo sapien
cacaggcatccagcgtttgtcaaac

SEQ ID NO: 2332125 - DNA, 25 bp, Homo sapien
acaggcatccagcgtttgtcaaacc

SEQ ID NO: 2332126 - DNA, 25 bp, Homo sapien
acacaggcatccagcgtttgtcaaa

SEQ ID NO: 2332127 - DNA, 25 bp, Homo sapien
tgctggtttttgcttgccttgtagc

SEQ ID NO: 2332128 - DNA, 25 bp, Homo sapien
tcttcaactgttaaacccagtgctt

SEQ ID NO: 2332129 - DNA, 25 bp, Homo sapien
gcttggtctgcttgtcgcatgaagg

SEQ ID NO: 2332130 - DNA, 25 bp, Homo sapien
gaagccttccaccattgatgtccac

SEQ ID NO: 2332131 - DNA, 25 bp, Homo sapien
tgttccctaaagctcatcctccatg

SEQ ID NO: 2332132 - DNA, 25 bp, Homo sapien
ttttctgggcagtgttctggacggc

SEQ ID NO: 2332133 - DNA, 25 bp, Homo sapien
tccatggtaatgcctcagactgtga

SEQ ID NO: 2332134 - DNA, 25 bp, Homo sapien
ctggtctgtctttatcccattgttc

SEQ ID NO: 2332135 - DNA, 25 bp, Homo sapien
cagcactcagcttcttccggcattc

SEQ ID NO: 2332136 - DNA, 25 bp, Homo sapien
ggtactgataatctctttcaccttc

SEQ ID NO: 2332137 - DNA, 25 bp, Homo sapien
tggctctctggtactgataatctct

SEQ ID NO: 2332138 - DNA, 25 bp, Homo sapien
catccagcactcagcttcttccggc

SEQ ID NO: 2332139 - DNA, 25 bp, Homo sapien
aaattgtatgtgaatagctggcttc

SEQ ID NO: 2332140 - DNA, 25 bp, Homo sapien
caaattgtatgtgaatagctggctt

SEQ ID NO: 2332141 - DNA, 25 bp, Homo sapien
ccattggtgagtagtaatgtaacct

SEQ ID NO: 2332142 - DNA, 25 bp, Homo sapien
gagtagtaatgtaacctctgagtgg

SEQ ID NO: 2332143 - DNA, 25 bp, Homo sapien
ggtgagtagtaatgtaacctctgag

SEQ ID NO: 2332144 - DNA, 25 bp, Homo sapien
taacctctgagtggcaactccacac

SEQ ID NO: 2332145 - DNA, 25 bp, Homo sapien
ctggtgactgatatctgtggctacg

SEQ ID NO: 2332146 - DNA, 25 bp, Homo sapien
ggaattctgagacctgaatcttcct

SEQ ID NO: 2332147 - DNA, 25 bp, Homo sapien
gctacgtaagggttggattcaggaa

SEQ ID NO: 2332148 - DNA, 25 bp, Homo sapien
accccatctgaggaattctgagacc

SEQ ID NO: 2332149 - DNA, 25 bp, Homo sapien
ggctctaggtgatacccttcgtgaa

SEQ ID NO: 2332150 - DNA, 25 bp, Homo sapien
tccacaagatcagagtggcaggtct

SEQ ID NO: 2332151 - DNA, 25 bp, Homo sapien
ccctgagcatcagaggagtctctaa

SEQ ID NO: 2332152 - DNA, 25 bp, Homo sapien
gaagcaagtgtggatctttctccct

SEQ ID NO: 2332153 - DNA, 25 bp, Homo sapien
gaaggtccctatctgaacaaattgg

SEQ ID NO: 2332154 - DNA, 25 bp, Homo sapien
cctatctgaacaaattgggattctg

SEQ ID NO: 2332155 - DNA, 25 bp, Homo sapien
tcatccctggtgaaggtccctatct

SEQ ID NO: 2332156 - DNA, 25 bp, Homo sapien
atagttcatccctggtgaaggtccc

SEQ ID NO: 2332157 - DNA, 25 bp, Homo sapien
cttgccttagtgtaaagaatccaga

SEQ ID NO: 2332158 - DNA, 25 bp, Homo sapien
tctgcttgcctcttgccttagtgta

SEQ ID NO: 2332159 - DNA, 25 bp, Homo sapien
gtgtaaagaatccagatgggctatg

SEQ ID NO: 2332160 - DNA, 25 bp, Homo sapien
cctcttgccttagtgtaaagaatcc

SEQ ID NO: 2332161 - DNA, 25 bp, Homo sapien
aacttcacccttggagtgaatcctc

SEQ ID NO: 2332162 - DNA, 25 bp, Homo sapien
gcaagtgaagcacccttaaaacttc

SEQ ID NO: 2332163 - DNA, 25 bp, Homo sapien
gaatcctcagagtaaatctacttct

SEQ ID NO: 2332164 - DNA, 25 bp, Homo sapien
tttatttatgaaaccagagcaagtg

SEQ ID NO: 2332165 - DNA, 25 bp, Homo sapien
cctggaaatttactattgtcctggg

SEQ ID NO: 2332166 - DNA, 25 bp, Homo sapien
tttgagtggcaaggtcattacattg

SEQ ID NO: 2332167 - DNA, 25 bp, Homo sapien
ccatttacaatggtctgggaggtaa

SEQ ID NO: 2332168 - DNA, 25 bp, Homo sapien
gcagcctgaacatgctatgtgaaga

SEQ ID NO: 2332169 - DNA, 25 bp, Homo sapien
tgtgctagttcgttgtatctttttc

SEQ ID NO: 2332170 - DNA, 25 bp, Homo sapien
ttattccttcccaaatgactacagt

SEQ ID NO: 2332171 - DNA, 25 bp, Homo sapien
ctctgaaggtatacttgagatctct

SEQ ID NO: 2332172 - DNA, 25 bp, Homo sapien
tttcttccaggcttattccttccca

SEQ ID NO: 2332173 - DNA, 25 bp, Homo sapien
tatccttaagattgccaccatcatc

SEQ ID NO: 2332174 - DNA, 25 bp, Homo sapien
ttctgtatccttaagattgccacca

SEQ ID NO: 2332175 - DNA, 25 bp, Homo sapien
tcatggaatatgcttatctcttctt

SEQ ID NO: 2332176 - DNA, 25 bp, Homo sapien
cttaagattgccaccatcatcagct

SEQ ID NO: 2332177 - DNA, 25 bp, Homo sapien
ataggttcacaggaatccttttcta

SEQ ID NO: 2332178 - DNA, 25 bp, Homo sapien
aataggttcacaggaatccttttct

SEQ ID NO: 2332179 - DNA, 25 bp, Homo sapien
aattggctcacaattgaccactggg

SEQ ID NO: 2332180 - DNA, 25 bp, Homo sapien
tatatattgccccactcatcgccaa

SEQ ID NO: 2332181 - DNA, 25 bp, Homo sapien
tctagaaagcaagatctaggtgctc

SEQ ID NO: 2332182 - DNA, 25 bp, Homo sapien
gaagtatatcagtatgcagtcatga

SEQ ID NO: 2332183 - DNA, 25 bp, Homo sapien
cattgtggtgtatgcggttgactcc

SEQ ID NO: 2332184 - DNA, 25 bp, Homo sapien
tggtaataagagcacctacgactcc

SEQ ID NO: 2332185 - DNA, 25 bp, Homo sapien
cagtatcaagcgatttctggccaag

SEQ ID NO: 2332186 - DNA, 25 bp, Homo sapien
tgctcgcaaggttttcagtatcaag

SEQ ID NO: 2332187 - DNA, 25 bp, Homo sapien
cacatgtaccatgttgtcttagctg

SEQ ID NO: 2332188 - DNA, 25 bp, Homo sapien
acatgtaccatgttgtcttagctgc

SEQ ID NO: 2332189 - DNA, 25 bp, Homo sapien
catgcagagacgtattttgctctga

SEQ ID NO: 2332190 - DNA, 25 bp, Homo sapien
ttttgactagggatgtactccgcaa

SEQ ID NO: 2332191 - DNA, 25 bp, Homo sapien
tgaggcatgcagagacgtattttgc

SEQ ID NO: 2332192 - DNA, 25 bp, Homo sapien
caaactggcgtctgaagaccagaaa

SEQ ID NO: 2332193 - DNA, 25 bp, Homo sapien
gtcatcatggtccagccaagggaac

SEQ ID NO: 2332194 - DNA, 25 bp, Homo sapien
tacaattaaccatcccacttagtgt

SEQ ID NO: 2332195 - DNA, 25 bp, Homo sapien
tctgtcatcatggtccagccaaggg

SEQ ID NO: 2332196 - DNA, 25 bp, Homo sapien
atatctgtcatcatggtccagccaa

SEQ ID NO: 2332197 - DNA, 25 bp, Homo sapien
acttctgatctaagccttggagcct

SEQ ID NO: 2332198 - DNA, 25 bp, Homo sapien
ttctgatctaagccttggagcctcc

SEQ ID NO: 2332199 - DNA, 25 bp, Homo sapien
cttctgatctaagccttggagcctc

SEQ ID NO: 2332200 - DNA, 25 bp, Homo sapien
tctgatctaagccttggagcctcca

SEQ ID NO: 2332201 - DNA, 25 bp, Homo sapien
gataagaaaggtgttatgcctggca

SEQ ID NO: 2332202 - DNA, 25 bp, Homo sapien
cagataagaaaggtgttatgcctgg

SEQ ID NO: 2332203 - DNA, 25 bp, Homo sapien
aaggcatgggccccacattgctcag

SEQ ID NO: 2332204 - DNA, 25 bp, Homo sapien
gacagataagaaaggtgttatgcct

SEQ ID NO: 2332205 - DNA, 25 bp, Homo sapien
taccctccagctggttgttagcagt

SEQ ID NO: 2332206 - DNA, 25 bp, Homo sapien
tggcccctccaggtctaaataattg

SEQ ID NO: 2332207 - DNA, 25 bp, Homo sapien
taggcctcggttgctttgattacac

SEQ ID NO: 2332208 - DNA, 25 bp, Homo sapien
tgttagcagttggtgggcttctagc

SEQ ID NO: 2332209 - DNA, 25 bp, Homo sapien
ttgtcttactaaagcacaggcctga

SEQ ID NO: 2332210 - DNA, 25 bp, Homo sapien
taagctttgaacactctgcccagat

SEQ ID NO: 2332211 - DNA, 25 bp, Homo sapien
tgtgacatgtgaccttcagggccct

SEQ ID NO: 2332212 - DNA, 25 bp, Homo sapien
gaacttttggccctctctctcaaga

SEQ ID NO: 2332213 - DNA, 25 bp, Homo sapien
gataggctgtactggaattatggtg

SEQ ID NO: 2332214 - DNA, 25 bp, Homo sapien
taggctgtactggaattatggtgct

SEQ ID NO: 2332215 - DNA, 25 bp, Homo sapien
agtttgataggctgtactggaatta

SEQ ID NO: 2332216 - DNA, 25 bp, Homo sapien
ttgataggctgtactggaattatgg

SEQ ID NO: 2332217 - DNA, 25 bp, Homo sapien
tgatcaacctataaccaagcaaagt

SEQ ID NO: 2332218 - DNA, 25 bp, Homo sapien
tagactctgggaacctatcgctttg

SEQ ID NO: 2332219 - DNA, 25 bp, Homo sapien
tcccaggagttggtagagcttctcc

SEQ ID NO: 2332220 - DNA, 25 bp, Homo sapien
tctgacatcacaatcaagttgggac

SEQ ID NO: 2332221 - DNA, 25 bp, Homo sapien
tcagaggctatataacatgttgtaa

SEQ ID NO: 2332222 - DNA, 25 bp, Homo sapien
tcaggtttctgattgaccaatgcca

SEQ ID NO: 2332223 - DNA, 25 bp, Homo sapien
tgtgtatcactgaaattttggcagg

SEQ ID NO: 2332224 - DNA, 25 bp, Homo sapien
tagagcacttactgactaaaccttc

SEQ ID NO: 2332225 - DNA, 25 bp, Homo sapien
cctgatagatggaaataagccttct

SEQ ID NO: 2332226 - DNA, 25 bp, Homo sapien
caaattcgccccaattcgagaagat

SEQ ID NO: 2332227 - DNA, 25 bp, Homo sapien
cagtccgtggaagttctgatgccag

SEQ ID NO: 2332228 - DNA, 25 bp, Homo sapien
ccagttggcccagtgtataggatta

SEQ ID NO: 2332229 - DNA, 25 bp, Homo sapien
agcttccacaaccatttaggctctt

SEQ ID NO: 2332230 - DNA, 25 bp, Homo sapien
ctacacagtttgtgagcatttcccc

SEQ ID NO: 2332231 - DNA, 25 bp, Homo sapien
cacagtttgtgagcatttccccatt

SEQ ID NO: 2332232 - DNA, 25 bp, Homo sapien
acacagtttgtgagcatttccccat

SEQ ID NO: 2332233 - DNA, 25 bp, Homo sapien
cagtttgtgagcatttccccattac

SEQ ID NO: 2332234 - DNA, 25 bp, Homo sapien
gacaatcccaaaagctctggagcac

SEQ ID NO: 2332235 - DNA, 25 bp, Homo sapien
cccaaaagctctggagcacttggtg

SEQ ID NO: 2332236 - DNA, 25 bp, Homo sapien
tgtgacaatcccaaaagctctggag

SEQ ID NO: 2332237 - DNA, 25 bp, Homo sapien
aatcccaaaagctctggagcacttg

SEQ ID NO: 2332238 - DNA, 25 bp, Homo sapien
actactatcacagctgccgccaaag

SEQ ID NO: 2332239 - DNA, 25 bp, Homo sapien
caaaagcaaagcgctttttcttgcc

SEQ ID NO: 2332240 - DNA, 25 bp, Homo sapien
ttctcctgagatagctctttggttg

SEQ ID NO: 2332241 - DNA, 25 bp, Homo sapien
cacgaagtcatggccatcaaaggtg

SEQ ID NO: 2332242 - DNA, 25 bp, Homo sapien
ttccgtcgttatagctgtcacagaa

SEQ ID NO: 2332243 - DNA, 25 bp, Homo sapien
gcttccgtcgttatagctgtcacag

SEQ ID NO: 2332244 - DNA, 25 bp, Homo sapien
cttccgtcgttatagctgtcacaga

SEQ ID NO: 2332245 - DNA, 25 bp, Homo sapien
ctgcttccgtcgttatagctgtcac

SEQ ID NO: 2332246 - DNA, 25 bp, Homo sapien
ttcctgccttcatgggttcaaaatc

SEQ ID NO: 2332247 - DNA, 25 bp, Homo sapien
tcaaagtttcctgccttcatgggtt

SEQ ID NO: 2332248 - DNA, 25 bp, Homo sapien
tgccttcatgggttcaaaatctgaa

SEQ ID NO: 2332249 - DNA, 25 bp, Homo sapien
ctgccttcatgggttcaaaatctga

SEQ ID NO: 2332250 - DNA, 25 bp, Homo sapien
tgctgtagctactgttgctactgga

SEQ ID NO: 2332251 - DNA, 25 bp, Homo sapien
ttgctactggaaccaccatagccac

SEQ ID NO: 2332252 - DNA, 25 bp, Homo sapien
tgttgctactggaaccaccatagcc

SEQ ID NO: 2332253 - DNA, 25 bp, Homo sapien
actgctgtagctactgttgctactg

SEQ ID NO: 2332254 - DNA, 25 bp, Homo sapien
accctttataggcatggtttacact

SEQ ID NO: 2332255 - DNA, 25 bp, Homo sapien
ttacttccacctgtgacagctcttc

SEQ ID NO: 2332256 - DNA, 25 bp, Homo sapien
gtgacagctcttctccattgtgaaa

SEQ ID NO: 2332257 - DNA, 25 bp, Homo sapien
cattgtgaaatctgcaaagaaatca

SEQ ID NO: 2332258 - DNA, 25 bp, Homo sapien
tccattgtgaaatctgcaaagaaat

SEQ ID NO: 2332259 - DNA, 25 bp, Homo sapien
taactttagttgctctcccacaagg

SEQ ID NO: 2332260 - DNA, 25 bp, Homo sapien
gtggagaggtagtgatgattaactt

SEQ ID NO: 2332261 - DNA, 25 bp, Homo sapien
tatgccagagatgtccggagctctc

SEQ ID NO: 2332262 - DNA, 25 bp, Homo sapien
tgggggataggcactgacaaccctt

SEQ ID NO: 2332263 - DNA, 25 bp, Homo sapien
tgtggcatacttcatcgaatgcatg

SEQ ID NO: 2332264 - DNA, 25 bp, Homo sapien
tttctggtggtcacatagctactga

SEQ ID NO: 2332265 - DNA, 25 bp, Homo sapien
catgaacattgagcggatttgccgg

SEQ ID NO: 2332266 - DNA, 25 bp, Homo sapien
agaggttgcccttcattcagagcca

SEQ ID NO: 2332267 - DNA, 25 bp, Homo sapien
tatgtttcctattctgctcaaagtg

SEQ ID NO: 2332268 - DNA, 25 bp, Homo sapien
gaacttggatcactatatgtttcct

SEQ ID NO: 2332269 - DNA, 25 bp, Homo sapien
gaattagttcctgaaccttccagca

SEQ ID NO: 2332270 - DNA, 25 bp, Homo sapien
agcagcatctatgagtctggaaaag

SEQ ID NO: 2332271 - DNA, 25 bp, Homo sapien
gtttgctttctacttgcataaccgc

SEQ ID NO: 2332272 - DNA, 25 bp, Homo sapien
ttctacttgcataaccgcagagccc

SEQ ID NO: 2332273 - DNA, 25 bp, Homo sapien
gcagagcccctctcaagcatatgtt

SEQ ID NO: 2332274 - DNA, 25 bp, Homo sapien
tcactgcattcgagtcttttccaaa

SEQ ID NO: 2332275 - DNA, 25 bp, Homo sapien
tgtcaggtttcactgttcctccctc

SEQ ID NO: 2332276 - DNA, 25 bp, Homo sapien
attctgagagctctcagtgtcaggt

SEQ ID NO: 2332277 - DNA, 25 bp, Homo sapien
tcagtgtcaggtttcactgttcctc

SEQ ID NO: 2332278 - DNA, 25 bp, Homo sapien
tcaactgctctctcagtattctgag

SEQ ID NO: 2332279 - DNA, 25 bp, Homo sapien
ctttttaattctttcaggtggctga

SEQ ID NO: 2332280 - DNA, 25 bp, Homo sapien
cagggatatgtcaaacaacccttct

SEQ ID NO: 2332281 - DNA, 25 bp, Homo sapien
ttaagtcatagcctaagtcagggtc

SEQ ID NO: 2332282 - DNA, 25 bp, Homo sapien
tgatctctgttcagggatatgtcaa

SEQ ID NO: 2332283 - DNA, 25 bp, Homo sapien
ttgtgcctgcccacatatccgatac

SEQ ID NO: 2332284 - DNA, 25 bp, Homo sapien
tgcctgcccacatatccgatactgg

SEQ ID NO: 2332285 - DNA, 25 bp, Homo sapien
ctgcccacatatccgatactggagg

SEQ ID NO: 2332286 - DNA, 25 bp, Homo sapien
cccacatatccgatactggaggcat

SEQ ID NO: 2332287 - DNA, 25 bp, Homo sapien
tcagggatttggtcacgaaagggca

SEQ ID NO: 2332288 - DNA, 25 bp, Homo sapien
caaatcttggagacaagggcggcaa

SEQ ID NO: 2332289 - DNA, 25 bp, Homo sapien
tctataaaagacgaggccaccactg

SEQ ID NO: 2332290 - DNA, 25 bp, Homo sapien
ttgagcaagcactgacacaagggcg

SEQ ID NO: 2332291 - DNA, 25 bp, Homo sapien
ttattatccagagtagcttcctctt

SEQ ID NO: 2332292 - DNA, 25 bp, Homo sapien
tattatccagagtagcttcctcttt

SEQ ID NO: 2332293 - DNA, 25 bp, Homo sapien
tccaggaaggataatactgtgattt

SEQ ID NO: 2332294 - DNA, 25 bp, Homo sapien
caagatgaactgtctgaatggaagc

SEQ ID NO: 2332295 - DNA, 25 bp, Homo sapien
gtgactgatgccaacaagatgaact

SEQ ID NO: 2332296 - DNA, 25 bp, Homo sapien
caataagtaattgtgggacaccaaa

SEQ ID NO: 2332297 - DNA, 25 bp, Homo sapien
gatgctagaacgctaggagacttac

SEQ ID NO: 2332298 - DNA, 25 bp, Homo sapien
tactaattgtatgggactctttttg

SEQ ID NO: 2332299 - DNA, 25 bp, Homo sapien
ttgtatgggactctttttgggatgc

SEQ ID NO: 2332300 - DNA, 25 bp, Homo sapien
ctctttttgggatgctagaacgcta

SEQ ID NO: 2332301 - DNA, 25 bp, Homo sapien
gagtgagctctattaattattattc

SEQ ID NO: 2332302 - DNA, 25 bp, Homo sapien
tctggaagctacaaacctcctgttt

SEQ ID NO: 2332303 - DNA, 25 bp, Homo sapien
gatgggcaatcttgagtgagctcta

SEQ ID NO: 2332304 - DNA, 25 bp, Homo sapien
aaacctcctgtttcttgatgggcaa

SEQ ID NO: 2332305 - DNA, 25 bp, Homo sapien
gggaccagggtcttcaagctagcat

SEQ ID NO: 2332306 - DNA, 25 bp, Homo sapien
taaatgggctcaaatgagagggacc

SEQ ID NO: 2332307 - DNA, 25 bp, Homo sapien
gctttcactattgctgggcctgcct

SEQ ID NO: 2332308 - DNA, 25 bp, Homo sapien
tctttgaataggtaccagggacacc

SEQ ID NO: 2332309 - DNA, 25 bp, Homo sapien
taataccctacaggaaggcacagta

SEQ ID NO: 2332310 - DNA, 25 bp, Homo sapien
tgccgagggtcttgcaaagcattta

SEQ ID NO: 2332311 - DNA, 25 bp, Homo sapien
tcagatgtagcggataatggaactc

SEQ ID NO: 2332312 - DNA, 25 bp, Homo sapien
taaagacaggtgagttgacaaatcc

SEQ ID NO: 2332313 - DNA, 25 bp, Homo sapien
taattttgtggtgggaactcattca

SEQ ID NO: 2332314 - DNA, 25 bp, Homo sapien
cattcagttgtgatagtcaaggagt

SEQ ID NO: 2332315 - DNA, 25 bp, Homo sapien
cggaacttcgttgctcactgggatt

SEQ ID NO: 2332316 - DNA, 25 bp, Homo sapien
tcagactctaaggtcaagattagca

SEQ ID NO: 2332317 - DNA, 25 bp, Homo sapien
tctggagcagagtggtacaaagata

SEQ ID NO: 2332318 - DNA, 25 bp, Homo sapien
attctggagcagagtggtacaaaga

SEQ ID NO: 2332319 - DNA, 25 bp, Homo sapien
gcattggaatttaccaatttgttcc

SEQ ID NO: 2332320 - DNA, 25 bp, Homo sapien
agaacaaaagcattggaatttacca

SEQ ID NO: 2332321 - DNA, 25 bp, Homo sapien
gaagcgtccctgagtgcattgagac

SEQ ID NO: 2332322 - DNA, 25 bp, Homo sapien
aagcgtccctgagtgcattgagacg

SEQ ID NO: 2332323 - DNA, 25 bp, Homo sapien
cgtccctgagtgcattgagacgctg

SEQ ID NO: 2332324 - DNA, 25 bp, Homo sapien
cagaagcgtccctgagtgcattgag

SEQ ID NO: 2332325 - DNA, 25 bp, Homo sapien
cttcaggagtgcttttcaactcttt

SEQ ID NO: 2332326 - DNA, 25 bp, Homo sapien
caggagtgcttttcaactctttgag

SEQ ID NO: 2332327 - DNA, 25 bp, Homo sapien
tgcttttcaactctttgagttttgg

SEQ ID NO: 2332328 - DNA, 25 bp, Homo sapien
gcttttcaactctttgagttttggc

SEQ ID NO: 2332329 - DNA, 25 bp, Homo sapien
tgagaactgcattcaacctgagtga

SEQ ID NO: 2332330 - DNA, 25 bp, Homo sapien
ggaaaacttcctagcttaaagcata

SEQ ID NO: 2332331 - DNA, 25 bp, Homo sapien
gataatatgatcagtacagtgacag

SEQ ID NO: 2332332 - DNA, 25 bp, Homo sapien
ggataccagttgttcatcgaatata

SEQ ID NO: 2332333 - DNA, 25 bp, Homo sapien
taacgctcagcttgttcagtcttca

SEQ ID NO: 2332334 - DNA, 25 bp, Homo sapien
gcccctcgtgcacccaaccattttc

SEQ ID NO: 2332335 - DNA, 25 bp, Homo sapien
ttaacgctcagcttgttcagtcttc

SEQ ID NO: 2332336 - DNA, 25 bp, Homo sapien
ccccaggaacacttcttcagaactg

SEQ ID NO: 2332337 - DNA, 25 bp, Homo sapien
gaactggacacctcttattagtgga

SEQ ID NO: 2332338 - DNA, 25 bp, Homo sapien
cacaacccatggaagacatgagcac

SEQ ID NO: 2332339 - DNA, 25 bp, Homo sapien
taaatgcattgattcagggcacaac

SEQ ID NO: 2332340 - DNA, 25 bp, Homo sapien
gtttgctagaagaactggacacctc

SEQ ID NO: 2332341 - DNA, 25 bp, Homo sapien
tagagtgccctcaagatggacctgc

SEQ ID NO: 2332342 - DNA, 25 bp, Homo sapien
acactggagaccctggatagcctgg

SEQ ID NO: 2332343 - DNA, 25 bp, Homo sapien
tagtcattgtcattgggtcaccctg

SEQ ID NO: 2332344 - DNA, 25 bp, Homo sapien
tatagtctcagtgatctggtgcccc

SEQ ID NO: 2332345 - DNA, 25 bp, Homo sapien
tcccatggctactccttagatctgg

SEQ ID NO: 2332346 - DNA, 25 bp, Homo sapien
cccatggctactccttagatctggc

SEQ ID NO: 2332347 - DNA, 25 bp, Homo sapien
ctcccatggctactccttagatctg

SEQ ID NO: 2332348 - DNA, 25 bp, Homo sapien
ggagccttattggccggccttccgc

SEQ ID NO: 2332349 - DNA, 25 bp, Homo sapien
gctggcgaattccaccagcaagcag

SEQ ID NO: 2332350 - DNA, 25 bp, Homo sapien
ttgctgcgcaggacccggcgaacca

SEQ ID NO: 2332351 - DNA, 25 bp, Homo sapien
caagcagacgcattgctgcgcagga

SEQ ID NO: 2332352 - DNA, 25 bp, Homo sapien
caataaactgtaatgcggctgtcgt

SEQ ID NO: 2332353 - DNA, 25 bp, Homo sapien
gttagcatgaagaacacactttgac

SEQ ID NO: 2332354 - DNA, 25 bp, Homo sapien
tgtacgaaccgatattcagcagaat

SEQ ID NO: 2332355 - DNA, 25 bp, Homo sapien
gaagcgttcggttttctcatagatg

SEQ ID NO: 2332356 - DNA, 25 bp, Homo sapien
gtttggagagatgcgtaattgacat

SEQ ID NO: 2332357 - DNA, 25 bp, Homo sapien
gcttggatatccgtgtttggagaga

SEQ ID NO: 2332358 - DNA, 25 bp, Homo sapien
tcccaaccatgtgcctggttagggc

SEQ ID NO: 2332359 - DNA, 25 bp, Homo sapien
cctggttagggcttggatatccgtg

SEQ ID NO: 2332360 - DNA, 25 bp, Homo sapien
caagtcttgtctactctgctttaag

SEQ ID NO: 2332361 - DNA, 25 bp, Homo sapien
catttaattaatcagcaagtcttgt

SEQ ID NO: 2332362 - DNA, 25 bp, Homo sapien
ctatcaataataggatcacttcttc

SEQ ID NO: 2332363 - DNA, 25 bp, Homo sapien
ctcttagccactggtaatatttgcc

SEQ ID NO: 2332364 - DNA, 25 bp, Homo sapien
gatggctatcttcatggcagcttgc

SEQ ID NO: 2332365 - DNA, 25 bp, Homo sapien
gatctttcatgttcttcacccaagg

SEQ ID NO: 2332366 - DNA, 25 bp, Homo sapien
tgtagccccaaatgaatcagatgga

SEQ ID NO: 2332367 - DNA, 25 bp, Homo sapien
cacccaaggtggataaaagatatgg

SEQ ID NO: 2332368 - DNA, 25 bp, Homo sapien
ccaatgtaggccagatctgaatgcc

SEQ ID NO: 2332369 - DNA, 25 bp, Homo sapien
ggataaatatcagcgccaatgtagg

SEQ ID NO: 2332370 - DNA, 25 bp, Homo sapien
gaaagtcactgtcagtgcgacactg

SEQ ID NO: 2332371 - DNA, 25 bp, Homo sapien
ccctccaggttgtgaacattaagaa

SEQ ID NO: 2332372 - DNA, 25 bp, Homo sapien
catatgttagtgtgaagcgttttca

SEQ ID NO: 2332373 - DNA, 25 bp, Homo sapien
taatacttacaattagccagtcagt

SEQ ID NO: 2332374 - DNA, 25 bp, Homo sapien
aaataggcactattggccgggcgca

SEQ ID NO: 2332375 - DNA, 25 bp, Homo sapien
tctcactaccatctcatgaaatagg

SEQ ID NO: 2332376 - DNA, 25 bp, Homo sapien
caccatgtcttctcatggtggaagc

SEQ ID NO: 2332377 - DNA, 25 bp, Homo sapien
gaagcgtcaatgagattctctcagg

SEQ ID NO: 2332378 - DNA, 25 bp, Homo sapien
tggttcatggatggtgctttctcac

SEQ ID NO: 2332379 - DNA, 25 bp, Homo sapien
catggtggaagcgtcaatgagattc

SEQ ID NO: 2332380 - DNA, 25 bp, Homo sapien
gcccggccggcaagtgtcttcttta

SEQ ID NO: 2332381 - DNA, 25 bp, Homo sapien
gcgcccggccggcaagtgtcttctt

SEQ ID NO: 2332382 - DNA, 25 bp, Homo sapien
cttctttaagaatatggagatattg

SEQ ID NO: 2332383 - DNA, 25 bp, Homo sapien
cggccggcaagtgtcttctttaaga

SEQ ID NO: 2332384 - DNA, 25 bp, Homo sapien
gtttgggataatctttgttgattca

SEQ ID NO: 2332385 - DNA, 25 bp, Homo sapien
ctgtgtttgggataatctttgttga

SEQ ID NO: 2332386 - DNA, 25 bp, Homo sapien
ctttcctcctgtgtttgggataatc

SEQ ID NO: 2332387 - DNA, 25 bp, Homo sapien
cctcctgtgtttgggataatctttg

SEQ ID NO: 2332388 - DNA, 25 bp, Homo sapien
caatatcctgataacccctccatga

SEQ ID NO: 2332389 - DNA, 25 bp, Homo sapien
gactgatgggttgcacagctgttat

SEQ ID NO: 2332390 - DNA, 25 bp, Homo sapien
agcatttcaacaggccatcaccgtg

SEQ ID NO: 2332391 - DNA, 25 bp, Homo sapien
cagctttggaaatggttacccagaa

SEQ ID NO: 2332392 - DNA, 25 bp, Homo sapien
atgagcaggtaaccagatcaggcac

SEQ ID NO: 2332393 - DNA, 25 bp, Homo sapien
cagaatggtcgtctcaccagcttgg

SEQ ID NO: 2332394 - DNA, 25 bp, Homo sapien
ggtaaccagatcaggcacaacacag

SEQ ID NO: 2332395 - DNA, 25 bp, Homo sapien
ggcacaacacagaatggtcgtctca

SEQ ID NO: 2332396 - DNA, 25 bp, Homo sapien
aaatcgacaatactgaggcgataga

SEQ ID NO: 2332397 - DNA, 25 bp, Homo sapien
ctgtggatgtggaaatcgacaatac

SEQ ID NO: 2332398 - DNA, 25 bp, Homo sapien
tgtggatgtggaaatcgacaatact

SEQ ID NO: 2332399 - DNA, 25 bp, Homo sapien
tcgacaatactgaggcgatagaaat

SEQ ID NO: 2332400 - DNA, 25 bp, Homo sapien
cctgggtggagccttctcggtctga

SEQ ID NO: 2332401 - DNA, 25 bp, Homo sapien
tgtccagctgaagcggaaagacccg

SEQ ID NO: 2332402 - DNA, 25 bp, Homo sapien
cgtctgttggtctgcggcgtcgcaa

SEQ ID NO: 2332403 - DNA, 25 bp, Homo sapien
caaagggcgattgcaccacgttgtt

SEQ ID NO: 2332404 - DNA, 25 bp, Homo sapien
gcccacgttgcccaattcagcaaca

SEQ ID NO: 2332405 - DNA, 25 bp, Homo sapien
tgaaccgcagcccacgttgcccaat

SEQ ID NO: 2332406 - DNA, 25 bp, Homo sapien
ccgcagcccacgttgcccaattcag

SEQ ID NO: 2332407 - DNA, 25 bp, Homo sapien
cagccccgatgtgttaggtggtgaa

SEQ ID NO: 2332408 - DNA, 25 bp, Homo sapien
gcagaagcagccctcctcagctgca

SEQ ID NO: 2332409 - DNA, 25 bp, Homo sapien
accaagaggcagaagcagccctcct

SEQ ID NO: 2332410 - DNA, 25 bp, Homo sapien
cagaagcagccctcctcagctgcac

SEQ ID NO: 2332411 - DNA, 25 bp, Homo sapien
agaggcagaagcagccctcctcagc

SEQ ID NO: 2332412 - DNA, 25 bp, Homo sapien
gagctagtttctcggtgggggtgga

SEQ ID NO: 2332413 - DNA, 25 bp, Homo sapien
gaggaaagctggttctgagctagtt

SEQ ID NO: 2332414 - DNA, 25 bp, Homo sapien
ggaggaaagctggttctgagctagt

SEQ ID NO: 2332415 - DNA, 25 bp, Homo sapien
ggaggaggaaagctggttctgagct

SEQ ID NO: 2332416 - DNA, 25 bp, Homo sapien
aagaagggctgtatgggagtgtgca

SEQ ID NO: 2332417 - DNA, 25 bp, Homo sapien
gcttcaaaggatgcatatgggctgc

SEQ ID NO: 2332418 - DNA, 25 bp, Homo sapien
ctgggcttcaaaggatgcatatggg

SEQ ID NO: 2332419 - DNA, 25 bp, Homo sapien
tgctagggaacatagaggaaagagt

SEQ ID NO: 2332420 - DNA, 25 bp, Homo sapien
catccacactctcctctactctcat

SEQ ID NO: 2332421 - DNA, 25 bp, Homo sapien
agccgcctccaaagtcatccacact

SEQ ID NO: 2332422 - DNA, 25 bp, Homo sapien
ctttgaggagccgcctccaaagtca

SEQ ID NO: 2332423 - DNA, 25 bp, Homo sapien
aagtcatccacactctcctctactc

SEQ ID NO: 2332424 - DNA, 25 bp, Homo sapien
ttggtaccaagcccccatctagcac

SEQ ID NO: 2332425 - DNA, 25 bp, Homo sapien
gtctgatatggaggctttgcaggtc

SEQ ID NO: 2332426 - DNA, 25 bp, Homo sapien
ttgtgaatttttgggtctgatatgg

SEQ ID NO: 2332427 - DNA, 25 bp, Homo sapien
gctttgcaggtcagaagcatggctt

SEQ ID NO: 2332428 - DNA, 25 bp, Homo sapien
tggaggctttgcaggtcagaagcat

SEQ ID NO: 2332429 - DNA, 25 bp, Homo sapien
tcctgtttccattcactagtgagta

SEQ ID NO: 2332430 - DNA, 25 bp, Homo sapien
tttccattcactagtgagtaacaag

SEQ ID NO: 2332431 - DNA, 25 bp, Homo sapien
cattcactagtgagtaacaaggtta

SEQ ID NO: 2332432 - DNA, 25 bp, Homo sapien
cactagtgagtaacaaggttaaaag

SEQ ID NO: 2332433 - DNA, 25 bp, Homo sapien
ttcagcgtcctccttaaagcacaca

SEQ ID NO: 2332434 - DNA, 25 bp, Homo sapien
acattttcacgtacatctattaaat

SEQ ID NO: 2332435 - DNA, 25 bp, Homo sapien
cacattttcacgtacatctattaaa

SEQ ID NO: 2332436 - DNA, 25 bp, Homo sapien
tcagcgtcctccttaaagcacacat

SEQ ID NO: 2332437 - DNA, 25 bp, Homo sapien
ctctccaagcgtgctcctttaaact

SEQ ID NO: 2332438 - DNA, 25 bp, Homo sapien
tctgtcccggctcaccatcatttca

SEQ ID NO: 2332439 - DNA, 25 bp, Homo sapien
ttctctgtcccggctcaccatcatt

SEQ ID NO: 2332440 - DNA, 25 bp, Homo sapien
tccaagcgtgctcctttaaactcca

SEQ ID NO: 2332441 - DNA, 25 bp, Homo sapien
tggagccttgcagtctgctgagaac

SEQ ID NO: 2332442 - DNA, 25 bp, Homo sapien
tgaactcctctcctgaggtggagcc

SEQ ID NO: 2332443 - DNA, 25 bp, Homo sapien
tgcaatcgtgcacttgggcagggct

SEQ ID NO: 2332444 - DNA, 25 bp, Homo sapien
ggtgcagaccacttgctacccacat

SEQ ID NO: 2332445 - DNA, 25 bp, Homo sapien
aatcttcacttccaaggtgaccgta

SEQ ID NO: 2332446 - DNA, 25 bp, Homo sapien
gaatatttatgtcctccccagattc

SEQ ID NO: 2332447 - DNA, 25 bp, Homo sapien
tcttcacttccaaggtgaccgtatt

SEQ ID NO: 2332448 - DNA, 25 bp, Homo sapien
atgtcctccccagattcacatgttg

SEQ ID NO: 2332449 - DNA, 25 bp, Homo sapien
actttaggacctggatgccagtgga

SEQ ID NO: 2332450 - DNA, 25 bp, Homo sapien
cttgcaaactttaggacctggatgc

SEQ ID NO: 2332451 - DNA, 25 bp, Homo sapien
aaactttaggacctggatgccagtg

SEQ ID NO: 2332452 - DNA, 25 bp, Homo sapien
gcaaactttaggacctggatgccag

SEQ ID NO: 2332453 - DNA, 25 bp, Homo sapien
caaaagggctatggcaattccaggc

SEQ ID NO: 2332454 - DNA, 25 bp, Homo sapien
tgacctttagtcagcaaatagcatc

SEQ ID NO: 2332455 - DNA, 25 bp, Homo sapien
tatgggttttcagcgaactcagagg

SEQ ID NO: 2332456 - DNA, 25 bp, Homo sapien
aactcagaggacttgtgtgaccttt

SEQ ID NO: 2332457 - DNA, 25 bp, Homo sapien
gtttgccacctgatttcccctgcag

SEQ ID NO: 2332458 - DNA, 25 bp, Homo sapien
ttagctggatattactacacagacc

SEQ ID NO: 2332459 - DNA, 25 bp, Homo sapien
tgggataatcatctcaatcctttct

SEQ ID NO: 2332460 - DNA, 25 bp, Homo sapien
aagtaactgcctttttagctggata

SEQ ID NO: 2332461 - DNA, 25 bp, Homo sapien
tgccatctgcttccggtcaggacaa

SEQ ID NO: 2332462 - DNA, 25 bp, Homo sapien
agagatgttgtggtatttgttcccc

SEQ ID NO: 2332463 - DNA, 25 bp, Homo sapien
tgttgtagacctagggccagcagtc

SEQ ID NO: 2332464 - DNA, 25 bp, Homo sapien
tagaccctttgagtatgccatctgc

SEQ ID NO: 2332465 - DNA, 25 bp, Homo sapien
cgaggagatagaagcttgtgtcaca

SEQ ID NO: 2332466 - DNA, 25 bp, Homo sapien
gcagcataactagggtacaactgtt

SEQ ID NO: 2332467 - DNA, 25 bp, Homo sapien
gagactaactgcgttggtacccaga

SEQ ID NO: 2332468 - DNA, 25 bp, Homo sapien
ttgaatttaaggctccagcgaggca

SEQ ID NO: 2332469 - DNA, 25 bp, Homo sapien
cttgtgcggggcctgtcttgggttg

SEQ ID NO: 2332470 - DNA, 25 bp, Homo sapien
tgcggggcctgtcttgggttggcat

SEQ ID NO: 2332471 - DNA, 25 bp, Homo sapien
tgtgcggggcctgtcttgggttggc

SEQ ID NO: 2332472 - DNA, 25 bp, Homo sapien
agcttgtgcggggcctgtcttgggt

SEQ ID NO: 2332473 - DNA, 25 bp, Homo sapien
gacttctagacttcagctcagtcat

SEQ ID NO: 2332474 - DNA, 25 bp, Homo sapien
ctacaccatgacttctagacttcag

SEQ ID NO: 2332475 - DNA, 25 bp, Homo sapien
catgacttctagacttcagctcagt

SEQ ID NO: 2332476 - DNA, 25 bp, Homo sapien
caccatgacttctagacttcagctc

SEQ ID NO: 2332477 - DNA, 25 bp, Homo sapien
atagtggttttcacggaagcagttt

SEQ ID NO: 2332478 - DNA, 25 bp, Homo sapien
aaatagtggttttcacggaagcagt

SEQ ID NO: 2332479 - DNA, 25 bp, Homo sapien
taaatagtggttttcacggaagcag

SEQ ID NO: 2332480 - DNA, 25 bp, Homo sapien
ctaaatagtggttttcacggaagca

SEQ ID NO: 2332481 - DNA, 25 bp, Homo sapien
aaagtcattaacactgagccaaagc

SEQ ID NO: 2332482 - DNA, 25 bp, Homo sapien
agtcattaacactgagccaaagcct

SEQ ID NO: 2332483 - DNA, 25 bp, Homo sapien
tacatcgcagaaatcaaatggatat

SEQ ID NO: 2332484 - DNA, 25 bp, Homo sapien
cctgctggcgtacatcgcagaaatc

SEQ ID NO: 2332485 - DNA, 25 bp, Homo sapien
tgggccccaggtagaagatatagaa

SEQ ID NO: 2332486 - DNA, 25 bp, Homo sapien
caaggcaataagaggtcctgcattc

SEQ ID NO: 2332487 - DNA, 25 bp, Homo sapien
cattgacacagatcaaatctgggcc

SEQ ID NO: 2332488 - DNA, 25 bp, Homo sapien
cccaggtagaagatatagaagcaaa

SEQ ID NO: 2332489 - DNA, 25 bp, Homo sapien
tggtgtcgccattctgcatggctaa

SEQ ID NO: 2332490 - DNA, 25 bp, Homo sapien
cgtcagaagcactgacagaaatgca

SEQ ID NO: 2332491 - DNA, 25 bp, Homo sapien
tctggaagatggaagagcgtcagaa

SEQ ID NO: 2332492 - DNA, 25 bp, Homo sapien
ggagggaggcgtcaacaggatgccg

SEQ ID NO: 2332493 - DNA, 25 bp, Homo sapien
ataattcaggggtaaggtgatgaag

SEQ ID NO: 2332494 - DNA, 25 bp, Homo sapien
gcaataattcaggggtaaggtgatg

SEQ ID NO: 2332495 - DNA, 25 bp, Homo sapien
aattcaggggtaaggtgatgaaggc

SEQ ID NO: 2332496 - DNA, 25 bp, Homo sapien
aataattcaggggtaaggtgatgaa

SEQ ID NO: 2332497 - DNA, 25 bp, Homo sapien
gatgaaggtgagaacaggagagcgg

SEQ ID NO: 2332498 - DNA, 25 bp, Homo sapien
tgagaacaggagagcgggggcagcg

SEQ ID NO: 2332499 - DNA, 25 bp, Homo sapien
gggcagcgggcagtcccgtgagcac

SEQ ID NO: 2332500 - DNA, 25 bp, Homo sapien
cgggcagtcccgtgagcaccagtga

SEQ ID NO: 2332501 - DNA, 25 bp, Homo sapien
tggacttggggacgatgggcaaggc

SEQ ID NO: 2332502 - DNA, 25 bp, Homo sapien
gaatttggacttggggacgatgggc

SEQ ID NO: 2332503 - DNA, 25 bp, Homo sapien
gaggaatttggacttggggacgatg

SEQ ID NO: 2332504 - DNA, 25 bp, Homo sapien
acttggggacgatgggcaaggcaca

SEQ ID NO: 2332505 - DNA, 25 bp, Homo sapien
tccccaccatagctgtttcggctag

SEQ ID NO: 2332506 - DNA, 25 bp, Homo sapien
ctgtccacggtaggccccttggagt

SEQ ID NO: 2332507 - DNA, 25 bp, Homo sapien
tttcggctagagttggaaacctgtc

SEQ ID NO: 2332508 - DNA, 25 bp, Homo sapien
aaagagcagtcccttgcataccatc

SEQ ID NO: 2332509 - DNA, 25 bp, Homo sapien
aaaggatgaaagcaatctgggctcc

SEQ ID NO: 2332510 - DNA, 25 bp, Homo sapien
caacactgctggacataggtagaag

SEQ ID NO: 2332511 - DNA, 25 bp, Homo sapien
gcttttatatagaagtccctgccag

SEQ ID NO: 2332512 - DNA, 25 bp, Homo sapien
caaagactcttgtgctgactgctaa

SEQ ID NO: 2332513 - DNA, 25 bp, Homo sapien
ggtgagtctacagtggaatgctctt

SEQ ID NO: 2332514 - DNA, 25 bp, Homo sapien
ctggagagggtgagtctacagtgga

SEQ ID NO: 2332515 - DNA, 25 bp, Homo sapien
agggtgagtctacagtggaatgctc

SEQ ID NO: 2332516 - DNA, 25 bp, Homo sapien
gagtctacagtggaatgctctttcc

SEQ ID NO: 2332517 - DNA, 25 bp, Homo sapien
ttagtgaaaccttcccacttctgaa

SEQ ID NO: 2332518 - DNA, 25 bp, Homo sapien
ctgcactgcccttagtgaaaccttc

SEQ ID NO: 2332519 - DNA, 25 bp, Homo sapien
tgttcccccgctcatcctatcttct

SEQ ID NO: 2332520 - DNA, 25 bp, Homo sapien
ttcaagttccagtggaagtatcact

SEQ ID NO: 2332521 - DNA, 25 bp, Homo sapien
tggccctccggtacaggaacctgac

SEQ ID NO: 2332522 - DNA, 25 bp, Homo sapien
ctccggtacaggaacctgacctgga

SEQ ID NO: 2332523 - DNA, 25 bp, Homo sapien
ccctccggtacaggaacctgacctg

SEQ ID NO: 2332524 - DNA, 25 bp, Homo sapien
gtggccctccggtacaggaacctga

SEQ ID NO: 2332525 - DNA, 25 bp, Homo sapien
gggtacggcatatgcttctctagtc

SEQ ID NO: 2332526 - DNA, 25 bp, Homo sapien
aaggtatccatgtgctcaacaaggg

SEQ ID NO: 2332527 - DNA, 25 bp, Homo sapien
tctctagtcctagcagggtcagcct

SEQ ID NO: 2332528 - DNA, 25 bp, Homo sapien
tgaacactgtttcaggaaggacctc

SEQ ID NO: 2332529 - DNA, 25 bp, Homo sapien
gcaaaactcattccagaggggaaaa

SEQ ID NO: 2332530 - DNA, 25 bp, Homo sapien
cctgtactccatgtccgagaaggca

SEQ ID NO: 2332531 - DNA, 25 bp, Homo sapien
atttcatctgttatgagagcaaaac

SEQ ID NO: 2332532 - DNA, 25 bp, Homo sapien
agtatttcatctgttatgagagcaa

SEQ ID NO: 2332533 - DNA, 25 bp, Homo sapien
gataggaagggtcagctccaacatc

SEQ ID NO: 2332534 - DNA, 25 bp, Homo sapien
cacaaaagcacccatgataggaagg

SEQ ID NO: 2332535 - DNA, 25 bp, Homo sapien
gagagcaccaatgctcgcaagagtg

SEQ ID NO: 2332536 - DNA, 25 bp, Homo sapien
cagtgggcgtacctctgtggatccc

SEQ ID NO: 2332537 - DNA, 25 bp, Homo sapien
tggaggcattattcctacccactga

SEQ ID NO: 2332538 - DNA, 25 bp, Homo sapien
tgaagcaccctacctctagagtccg

SEQ ID NO: 2332539 - DNA, 25 bp, Homo sapien
ctggtggtccgtgtaacaaacagca

SEQ ID NO: 2332540 - DNA, 25 bp, Homo sapien
gacggccgtcgatcttgtgctcaag

SEQ ID NO: 2332541 - DNA, 25 bp, Homo sapien
ctctagcttgtcagaatcagccact

SEQ ID NO: 2332542 - DNA, 25 bp, Homo sapien
gactctagcttgtcagaatcagcca

SEQ ID NO: 2332543 - DNA, 25 bp, Homo sapien
caatttagactctagcttgtcagaa

SEQ ID NO: 2332544 - DNA, 25 bp, Homo sapien
tttagactctagcttgtcagaatca

SEQ ID NO: 2332545 - DNA, 25 bp, Homo sapien
aaagcttcaacacactcttcctttg

SEQ ID NO: 2332546 - DNA, 25 bp, Homo sapien
tcaacacactcttcctttgcaactt

SEQ ID NO: 2332547 - DNA, 25 bp, Homo sapien
caaaaagcttcaacacactcttcct

SEQ ID NO: 2332548 - DNA, 25 bp, Homo sapien
gcttcaacacactcttcctttgcaa

SEQ ID NO: 2332549 - DNA, 25 bp, Homo sapien
tggtgatgtaccagatagcaagcaa

SEQ ID NO: 2332550 - DNA, 25 bp, Homo sapien
ctctttcctcctaaaacagtactgg

SEQ ID NO: 2332551 - DNA, 25 bp, Homo sapien
actggcgttcccacttgaacacagc

SEQ ID NO: 2332552 - DNA, 25 bp, Homo sapien
caagcagatgttggtttgttgcctt

SEQ ID NO: 2332553 - DNA, 25 bp, Homo sapien
gtgcttgagaagcacgacttccaca

SEQ ID NO: 2332554 - DNA, 25 bp, Homo sapien
cttgagaagcacgacttccacaggg

SEQ ID NO: 2332555 - DNA, 25 bp, Homo sapien
tcacccccagattgcagatcgcgaa

SEQ ID NO: 2332556 - DNA, 25 bp, Homo sapien
ccccagattgcagatcgcgaagggt

SEQ ID NO: 2332557 - DNA, 25 bp, Homo sapien
ctgggcacagcaacaaggaggacat

SEQ ID NO: 2332558 - DNA, 25 bp, Homo sapien
gcacagcaacaaggaggacatgatg

SEQ ID NO: 2332559 - DNA, 25 bp, Homo sapien
caaggaggacatgatgacaatgatg

SEQ ID NO: 2332560 - DNA, 25 bp, Homo sapien
cagcaacaaggaggacatgatgaca

SEQ ID NO: 2332561 - DNA, 25 bp, Homo sapien
cgatgggtctgcgtgcggtagatga

SEQ ID NO: 2332562 - DNA, 25 bp, Homo sapien
ggaggctcgcggacagccccactga

SEQ ID NO: 2332563 - DNA, 25 bp, Homo sapien
ctgaggacccgatgggtctgcgtgc

SEQ ID NO: 2332564 - DNA, 25 bp, Homo sapien
cctcttgggaggctcgcggacagcc

SEQ ID NO: 2332565 - DNA, 25 bp, Homo sapien
cacctgtatatctgtggcggcttta

SEQ ID NO: 2332566 - DNA, 25 bp, Homo sapien
tcagcacccagcataacacctgtat

SEQ ID NO: 2332567 - DNA, 25 bp, Homo sapien
gcagcaattagattccctggttctt

SEQ ID NO: 2332568 - DNA, 25 bp, Homo sapien
aggcatcagcagcaattagattccc

SEQ ID NO: 2332569 - DNA, 25 bp, Homo sapien
tgactacctggaatatccaagagaa

SEQ ID NO: 2332570 - DNA, 25 bp, Homo sapien
gactacctggaatatccaagagaat

SEQ ID NO: 2332571 - DNA, 25 bp, Homo sapien
cttgactacctggaatatccaagag

SEQ ID NO: 2332572 - DNA, 25 bp, Homo sapien
tacctggaatatccaagagaattac

SEQ ID NO: 2332573 - DNA, 25 bp, Homo sapien
aaggattctgtgtttcatgagttga

SEQ ID NO: 2332574 - DNA, 25 bp, Homo sapien
atataggggtcaaggtagtattttg

SEQ ID NO: 2332575 - DNA, 25 bp, Homo sapien
catgagttgatataggggtcaaggt

SEQ ID NO: 2332576 - DNA, 25 bp, Homo sapien
ttgagaaggattctgtgtttcatga

SEQ ID NO: 2332577 - DNA, 25 bp, Homo sapien
gtcggtaactggacaaaagtgagtc

SEQ ID NO: 2332578 - DNA, 25 bp, Homo sapien
agtcggtaactggacaaaagtgagt

SEQ ID NO: 2332579 - DNA, 25 bp, Homo sapien
aagtcggtaactggacaaaagtgag

SEQ ID NO: 2332580 - DNA, 25 bp, Homo sapien
tcggtaactggacaaaagtgagtca

SEQ ID NO: 2332581 - DNA, 25 bp, Homo sapien
cagcagtaaaatagtccaatcttag

SEQ ID NO: 2332582 - DNA, 25 bp, Homo sapien
cagattaaggctttgcttatgtaca

SEQ ID NO: 2332583 - DNA, 25 bp, Homo sapien
gtccaatcttagcttccagtactgg

SEQ ID NO: 2332584 - DNA, 25 bp, Homo sapien
ggctttgcttatgtacagcagtaaa

SEQ ID NO: 2332585 - DNA, 25 bp, Homo sapien
tctctgctatgatctcatacataac

SEQ ID NO: 2332586 - DNA, 25 bp, Homo sapien
tatgatctcatacataacagtgata

SEQ ID NO: 2332587 - DNA, 25 bp, Homo sapien
gctatgatctcatacataacagtga

SEQ ID NO: 2332588 - DNA, 25 bp, Homo sapien
agcttctctgctatgatctcataca

SEQ ID NO: 2332589 - DNA, 25 bp, Homo sapien
gagggacatctgcatcctgtagagg

SEQ ID NO: 2332590 - DNA, 25 bp, Homo sapien
gagtaaaacttgcactgacagcgtt

SEQ ID NO: 2332591 - DNA, 25 bp, Homo sapien
actgacagcgttgtccatccctggg

SEQ ID NO: 2332592 - DNA, 25 bp, Homo sapien
tgggaaggttgtgagtaaaacttgc

SEQ ID NO: 2332593 - DNA, 25 bp, Homo sapien
agtgaaatttggagctcagcataaa

SEQ ID NO: 2332594 - DNA, 25 bp, Homo sapien
gaaatttggagctcagcataaaacc

SEQ ID NO: 2332595 - DNA, 25 bp, Homo sapien
tgaaatttggagctcagcataaaac

SEQ ID NO: 2332596 - DNA, 25 bp, Homo sapien
aatttggagctcagcataaaaccat

SEQ ID NO: 2332597 - DNA, 25 bp, Homo sapien
ctgataaacagcaacatgagaaaat

SEQ ID NO: 2332598 - DNA, 25 bp, Homo sapien
tgataaacagcaacatgagaaaatg

SEQ ID NO: 2332599 - DNA, 25 bp, Homo sapien
gataaacagcaacatgagaaaatga

SEQ ID NO: 2332600 - DNA, 25 bp, Homo sapien
ataaacagcaacatgagaaaatgag

SEQ ID NO: 2332601 - DNA, 25 bp, Homo sapien
tggcctttgtccgtgatctgattgc

SEQ ID NO: 2332602 - DNA, 25 bp, Homo sapien
tgtccgtgatctgattgcaaggctg

SEQ ID NO: 2332603 - DNA, 25 bp, Homo sapien
gatctgattgcaaggctgcctggct

SEQ ID NO: 2332604 - DNA, 25 bp, Homo sapien
tttggcccagccaaccacaactcaa

SEQ ID NO: 2332605 - DNA, 25 bp, Homo sapien
catcctgcttatcctcttagttttg

SEQ ID NO: 2332606 - DNA, 25 bp, Homo sapien
tttggatctacctttggaatcaaga

SEQ ID NO: 2332607 - DNA, 25 bp, Homo sapien
cctttggaatcaagattctgtatta

SEQ ID NO: 2332608 - DNA, 25 bp, Homo sapien
gactttctttgactccagtacatgg

SEQ ID NO: 2332609 - DNA, 25 bp, Homo sapien
gctcctctgggaactccccttaata

SEQ ID NO: 2332610 - DNA, 25 bp, Homo sapien
cttaatacctggttctcagaaccct

SEQ ID NO: 2332611 - DNA, 25 bp, Homo sapien
agctcctctgggaactccccttaat

SEQ ID NO: 2332612 - DNA, 25 bp, Homo sapien
gatctgtacttctacagagatcctg

SEQ ID NO: 2332613 - DNA, 25 bp, Homo sapien
tgtacttctacagagatcctgaaga

SEQ ID NO: 2332614 - DNA, 25 bp, Homo sapien
gcctgatctgtacttctacagagat

SEQ ID NO: 2332615 - DNA, 25 bp, Homo sapien
ctgtacttctacagagatcctgaag

SEQ ID NO: 2332616 - DNA, 25 bp, Homo sapien
ctgcagaggggtccatacggcgctg

SEQ ID NO: 2332617 - DNA, 25 bp, Homo sapien
tgcagaggggtccatacggcgctgt

SEQ ID NO: 2332618 - DNA, 25 bp, Homo sapien
gcagaggggtccatacggcgctgtt

SEQ ID NO: 2332619 - DNA, 25 bp, Homo sapien
gccatttgccttgacttgcttggcc

SEQ ID NO: 2332620 - DNA, 25 bp, Homo sapien
gcagttttcctgctaaatgggagcc

SEQ ID NO: 2332621 - DNA, 25 bp, Homo sapien
tgtctgcagctatatcgcctctaga

SEQ ID NO: 2332622 - DNA, 25 bp, Homo sapien
tgctaaatgggagccttcctcttgc

SEQ ID NO: 2332623 - DNA, 25 bp, Homo sapien
tcaattgtgcatagatcatagaccc

SEQ ID NO: 2332624 - DNA, 25 bp, Homo sapien
tcagtagatgttctcaattgtgcat

SEQ ID NO: 2332625 - DNA, 25 bp, Homo sapien
gatcatagacccgaactgatgtttt

SEQ ID NO: 2332626 - DNA, 25 bp, Homo sapien
catagacccgaactgatgtttttaa

SEQ ID NO: 2332627 - DNA, 25 bp, Homo sapien
gcatcaactctagctagcagaagca

SEQ ID NO: 2332628 - DNA, 25 bp, Homo sapien
catgggaatcttggttatcactgag

SEQ ID NO: 2332629 - DNA, 25 bp, Homo sapien
tatcactgagaggacagcatcaact

SEQ ID NO: 2332630 - DNA, 25 bp, Homo sapien
caagatttaatacggcttgcagaat

SEQ ID NO: 2332631 - DNA, 25 bp, Homo sapien
gagcaacagcatcttgaggaggaac

SEQ ID NO: 2332632 - DNA, 25 bp, Homo sapien
tacactcgcagggagaccagatcaa

SEQ ID NO: 2332633 - DNA, 25 bp, Homo sapien
gaggaactccgtattttggcatgca

SEQ ID NO: 2332634 - DNA, 25 bp, Homo sapien
taccgaagtcctcaaagaacacctg

SEQ ID NO: 2332635 - DNA, 25 bp, Homo sapien
tccaatccttaacagtcaatgccag

SEQ ID NO: 2332636 - DNA, 25 bp, Homo sapien
cttgcttggatctggaaatgtaaac

SEQ ID NO: 2332637 - DNA, 25 bp, Homo sapien
tcaatgccagaggtaactccccgaa

SEQ ID NO: 2332638 - DNA, 25 bp, Homo sapien
cctactaatggaggaatcagccggt

SEQ ID NO: 2332639 - DNA, 25 bp, Homo sapien
gccaatgtgcaaccttaacgttctg

SEQ ID NO: 2332640 - DNA, 25 bp, Homo sapien
aaagatgccaatgtgcaaccttaac

SEQ ID NO: 2332641 - DNA, 25 bp, Homo sapien
tgtgcaaccttaacgttctgttact

SEQ ID NO: 2332642 - DNA, 25 bp, Homo sapien
gatgccaatgtgcaaccttaacgtt

SEQ ID NO: 2332643 - DNA, 25 bp, Homo sapien
ttggtcctggggagtaatcaaggat

SEQ ID NO: 2332644 - DNA, 25 bp, Homo sapien
taatcaaggatggaataaggataga

SEQ ID NO: 2332645 - DNA, 25 bp, Homo sapien
ttgaatgtatactgtgcggaagaca

SEQ ID NO: 2332646 - DNA, 25 bp, Homo sapien
tgcggaagacattgaaggttggtcc

SEQ ID NO: 2332647 - DNA, 25 bp, Homo sapien
aatagtaaatccctgtgctgatcat

SEQ ID NO: 2332648 - DNA, 25 bp, Homo sapien
aatctgagtaaatagtaaatccctg

SEQ ID NO: 2332649 - DNA, 25 bp, Homo sapien
gctcgaagcaaatctgagtaaatag

SEQ ID NO: 2332650 - DNA, 25 bp, Homo sapien
gagtaaatagtaaatccctgtgctg

SEQ ID NO: 2332651 - DNA, 25 bp, Homo sapien
ccatccaccttgtgacaactgacat

SEQ ID NO: 2332652 - DNA, 25 bp, Homo sapien
cctgcattacctggactttttggaa

SEQ ID NO: 2332653 - DNA, 25 bp, Homo sapien
cttccaccaaatactggttagagca

SEQ ID NO: 2332654 - DNA, 25 bp, Homo sapien
aatactggttagagcagcccagccc

SEQ ID NO: 2332655 - DNA, 25 bp, Homo sapien
ccacaagaacattggcaatagtagc

SEQ ID NO: 2332656 - DNA, 25 bp, Homo sapien
gtggccacaagaacattggcaatag

SEQ ID NO: 2332657 - DNA, 25 bp, Homo sapien
cacaagaacattggcaatagtagct

SEQ ID NO: 2332658 - DNA, 25 bp, Homo sapien
ggccacaagaacattggcaatagta

SEQ ID NO: 2332659 - DNA, 25 bp, Homo sapien
cacgcctgaatctgggcgaggtttg

SEQ ID NO: 2332660 - DNA, 25 bp, Homo sapien
cgaggtttggcgatgtcgccttgac

SEQ ID NO: 2332661 - DNA, 25 bp, Homo sapien
tggcgatgtcgccttgacgtcaggc

SEQ ID NO: 2332662 - DNA, 25 bp, Homo sapien
cggctggtttacacgcctgaatctg

SEQ ID NO: 2332663 - DNA, 25 bp, Homo sapien
tgatctaaatagtcccttccggccc

SEQ ID NO: 2332664 - DNA, 25 bp, Homo sapien
cataccaatcagaagttacagggcc

SEQ ID NO: 2332665 - DNA, 25 bp, Homo sapien
tcagaagaaaaatccggagagcccg

SEQ ID NO: 2332666 - DNA, 25 bp, Homo sapien
taggattagacacctcgagatggcg

SEQ ID NO: 2332667 - DNA, 25 bp, Homo sapien
tgtcaacgtcaaacaaggaaatgca

SEQ ID NO: 2332668 - DNA, 25 bp, Homo sapien
ttcattcaatgtgaacctcccaggt

SEQ ID NO: 2332669 - DNA, 25 bp, Homo sapien
taagactatcattcaggctctgtgt

SEQ ID NO: 2332670 - DNA, 25 bp, Homo sapien
taaggcagcttcacgatttattgtc

SEQ ID NO: 2332671 - DNA, 25 bp, Homo sapien
catggagtcctcaataatgacagga

SEQ ID NO: 2332672 - DNA, 25 bp, Homo sapien
aacccagggcatatttttagtcaca

SEQ ID NO: 2332673 - DNA, 25 bp, Homo sapien
gctaaattactcctagtgccagtca

SEQ ID NO: 2332674 - DNA, 25 bp, Homo sapien
ttccagagccatggtacagtactcc

SEQ ID NO: 2332675 - DNA, 25 bp, Homo sapien
tcaacaactctaacaacagtatgtc

SEQ ID NO: 2332676 - DNA, 25 bp, Homo sapien
tattttatggtttatgaaacattca

SEQ ID NO: 2332677 - DNA, 25 bp, Homo sapien
catgagtaatactgcatttgatcct

SEQ ID NO: 2332678 - DNA, 25 bp, Homo sapien
tcctcaacaactctaacaacagtat

SEQ ID NO: 2332679 - DNA, 25 bp, Homo sapien
taggacagtgaagtactctaacctg

SEQ ID NO: 2332680 - DNA, 25 bp, Homo sapien
gctgtccatggcctcgccagtgttt

SEQ ID NO: 2332681 - DNA, 25 bp, Homo sapien
tgtcactacaaagaaaacggcaaag

SEQ ID NO: 2332682 - DNA, 25 bp, Homo sapien
tgggattcttaagcaatgccatagg

SEQ ID NO: 2332683 - DNA, 25 bp, Homo sapien
aagacattaaacactgagagcaaag

SEQ ID NO: 2332684 - DNA, 25 bp, Homo sapien
gacacaagggaattctgtctataga

SEQ ID NO: 2332685 - DNA, 25 bp, Homo sapien
tctatagatgagcagtcaggtatac

SEQ ID NO: 2332686 - DNA, 25 bp, Homo sapien
aaggattatgttagactttggacac

SEQ ID NO: 2332687 - DNA, 25 bp, Homo sapien
cttaatgtgactatccatgttccac

SEQ ID NO: 2332688 - DNA, 25 bp, Homo sapien
caaagttctataactatgttggtgg

SEQ ID NO: 2332689 - DNA, 25 bp, Homo sapien
cagcctgaaaccgacttcttataga

SEQ ID NO: 2332690 - DNA, 25 bp, Homo sapien
tgttggtggcaaagcttaatcctaa

SEQ ID NO: 2332691 - DNA, 25 bp, Homo sapien
tatcaaatggttccatcgaggagct

SEQ ID NO: 2332692 - DNA, 25 bp, Homo sapien
ttcaatccttgtcactatcaaatgg

SEQ ID NO: 2332693 - DNA, 25 bp, Homo sapien
tgtcactatcaaatggttccatcga

SEQ ID NO: 2332694 - DNA, 25 bp, Homo sapien
ggttccatcgaggagcttttgttgt

SEQ ID NO: 2332695 - DNA, 25 bp, Homo sapien
gaaagtgggcagtcacttcctgtaa

SEQ ID NO: 2332696 - DNA, 25 bp, Homo sapien
taggccagcaagtacttaaagtagc

SEQ ID NO: 2332697 - DNA, 25 bp, Homo sapien
gcaatgagaaccaaagtctgggtgg

SEQ ID NO: 2332698 - DNA, 25 bp, Homo sapien
tacgcacgcactggcttatgcagct

SEQ ID NO: 2332699 - DNA, 25 bp, Homo sapien
cactacctccaaagggatgactgag

SEQ ID NO: 2332700 - DNA, 25 bp, Homo sapien
cagaagcccgggagacctaatcaat

SEQ ID NO: 2332701 - DNA, 25 bp, Homo sapien
cctccacaaggatgggtgaagcttt

SEQ ID NO: 2332702 - DNA, 25 bp, Homo sapien
tacatttccaatcgtggccctgtgg

SEQ ID NO: 2332703 - DNA, 25 bp, Homo sapien
caatggctactgtggtttaagtgaa

SEQ ID NO: 2332704 - DNA, 25 bp, Homo sapien
gatcaactaggactcaaagggaaag

SEQ ID NO: 2332705 - DNA, 25 bp, Homo sapien
caacacttgcactataggctagagc

SEQ ID NO: 2332706 - DNA, 25 bp, Homo sapien
tagaccttgcccattaactcacagg

SEQ ID NO: 2332707 - DNA, 25 bp, Homo sapien
ggaagactgctcaagactattctgg

SEQ ID NO: 2332708 - DNA, 25 bp, Homo sapien
tgctcaagactattctggacaacac

SEQ ID NO: 2332709 - DNA, 25 bp, Homo sapien
tgcactctatcatgggtgacgcaag

SEQ ID NO: 2332710 - DNA, 25 bp, Homo sapien
gactgctcaagactattctggacaa

SEQ ID NO: 2332711 - DNA, 25 bp, Homo sapien
actgactgtaccgagttgatggaca

SEQ ID NO: 2332712 - DNA, 25 bp, Homo sapien
gcagctgcagggtagtacttatttt

SEQ ID NO: 2332713 - DNA, 25 bp, Homo sapien
gaaatacggacaacaatactgactg

SEQ ID NO: 2332714 - DNA, 25 bp, Homo sapien
ggtgtcttaatctgtgaaatacgga

SEQ ID NO: 2332715 - DNA, 25 bp, Homo sapien
acctcagcctccctggttcaactga

SEQ ID NO: 2332716 - DNA, 25 bp, Homo sapien
ttctcctctctcagcctcccgagca

SEQ ID NO: 2332717 - DNA, 25 bp, Homo sapien
ccctggttcaactgattctcctctc

SEQ ID NO: 2332718 - DNA, 25 bp, Homo sapien
tcagcctccctggttcaactgattc

SEQ ID NO: 2332719 - DNA, 25 bp, Homo sapien
ttctggattgcctataacattcttc

SEQ ID NO: 2332720 - DNA, 25 bp, Homo sapien
gattgcctataacattcttcctaag

SEQ ID NO: 2332721 - DNA, 25 bp, Homo sapien
ttactgatccaaattatgaacaaga

SEQ ID NO: 2332722 - DNA, 25 bp, Homo sapien
caacattctggattgcctataacat

SEQ ID NO: 2332723 - DNA, 25 bp, Homo sapien
agcagactgctttaactcaggagga

SEQ ID NO: 2332724 - DNA, 25 bp, Homo sapien
cattaaccggagattattaactagt

SEQ ID NO: 2332725 - DNA, 25 bp, Homo sapien
aaacatattctacattaagttcagt

SEQ ID NO: 2332726 - DNA, 25 bp, Homo sapien
taattatttcattaaccggagatta

SEQ ID NO: 2332727 - DNA, 25 bp, Homo sapien
taactgacagcttttacacttggct

SEQ ID NO: 2332728 - DNA, 25 bp, Homo sapien
tatataatcacctaaaatttgcgtg

SEQ ID NO: 2332729 - DNA, 25 bp, Homo sapien
tgcgtgactgcaactaacctgattg

SEQ ID NO: 2332730 - DNA, 25 bp, Homo sapien
aacctgattgatgaaagtaactgac

SEQ ID NO: 2332731 - DNA, 25 bp, Homo sapien
catggctgggcgaaaacttgctcta

SEQ ID NO: 2332732 - DNA, 25 bp, Homo sapien
gaggataaatatactgcgcaggtgg

SEQ ID NO: 2332733 - DNA, 25 bp, Homo sapien
caaggccggtttggtggatgacttt

SEQ ID NO: 2332734 - DNA, 25 bp, Homo sapien
gagaatccaccggttatcgactggg

SEQ ID NO: 2332735 - DNA, 25 bp, Homo sapien
aacacttctcaaaaaggactaagag

SEQ ID NO: 2332736 - DNA, 25 bp, Homo sapien
ggactaagagatgcttaactactga

SEQ ID NO: 2332737 - DNA, 25 bp, Homo sapien
gaaacaaacaggtaagcataaaaga

SEQ ID NO: 2332738 - DNA, 25 bp, Homo sapien
gtttagccactcaactcatagagta

SEQ ID NO: 2332739 - DNA, 25 bp, Homo sapien
atgcaagcttgtcaaaacctagtac

SEQ ID NO: 2332740 - DNA, 25 bp, Homo sapien
gatgcaagcttgtcaaaacctagta

SEQ ID NO: 2332741 - DNA, 25 bp, Homo sapien
gaacgactagcttatactcacgcat

SEQ ID NO: 2332742 - DNA, 25 bp, Homo sapien
tttccaacgcctcctgagccaagaa

SEQ ID NO: 2332743 - DNA, 25 bp, Homo sapien
cctgagccaagaacgactagcttat

SEQ ID NO: 2332744 - DNA, 25 bp, Homo sapien
aagcagactttccaacgcctcctga

SEQ ID NO: 2332745 - DNA, 25 bp, Homo sapien
tcgtaggatcgtatttttctacaaa

SEQ ID NO: 2332746 - DNA, 25 bp, Homo sapien
taagaatcttctatcgtaggatcgt

SEQ ID NO: 2332747 - DNA, 25 bp, Homo sapien
cttctatcgtaggatcgtatttttc

SEQ ID NO: 2332748 - DNA, 25 bp, Homo sapien
gaatcttctatcgtaggatcgtatt

SEQ ID NO: 2332749 - DNA, 25 bp, Homo sapien
tggtggcactttctcaagaggttag

SEQ ID NO: 2332750 - DNA, 25 bp, Homo sapien
taagtagaaagcttaggaagacctg

SEQ ID NO: 2332751 - DNA, 25 bp, Homo sapien
tatgcaatgccagaaagtgtaaact

SEQ ID NO: 2332752 - DNA, 25 bp, Homo sapien
tactacttgaaatggatggtctgct

SEQ ID NO: 2332753 - DNA, 25 bp, Homo sapien
cacagggaaacctacacgaaccagt

SEQ ID NO: 2332754 - DNA, 25 bp, Homo sapien
ggaaaaatagctaagtaatcaagat

SEQ ID NO: 2332755 - DNA, 25 bp, Homo sapien
caaattgtaatcaagttcaaaagcc

SEQ ID NO: 2332756 - DNA, 25 bp, Homo sapien
caactttacaaactaatatccagca

SEQ ID NO: 2332757 - DNA, 25 bp, Homo sapien
ttcaagcatacactgttgtgcatct

SEQ ID NO: 2332758 - DNA, 25 bp, Homo sapien
aagatttcaagcatacactgttgtg

SEQ ID NO: 2332759 - DNA, 25 bp, Homo sapien
cgttcctgcagtatccaagatttca

SEQ ID NO: 2332760 - DNA, 25 bp, Homo sapien
gatttcaagcatacactgttgtgca

SEQ ID NO: 2332761 - DNA, 25 bp, Homo sapien
tacgttgaaggagaacagataccaa

SEQ ID NO: 2332762 - DNA, 25 bp, Homo sapien
gaataccatacaccgagaacaaatc

SEQ ID NO: 2332763 - DNA, 25 bp, Homo sapien
aatgctgtagttctgtagggctcca

SEQ ID NO: 2332764 - DNA, 25 bp, Homo sapien
catcagcatgatctagaccatccca

SEQ ID NO: 2332765 - DNA, 25 bp, Homo sapien
caggtcttgtaaatcgttaaatgtg

SEQ ID NO: 2332766 - DNA, 25 bp, Homo sapien
ctcaggtcttgtaaatcgttaaatg

SEQ ID NO: 2332767 - DNA, 25 bp, Homo sapien
tcaggtcttgtaaatcgttaaatgt

SEQ ID NO: 2332768 - DNA, 25 bp, Homo sapien
ggtcttgtaaatcgttaaatgtgga

SEQ ID NO: 2332769 - DNA, 25 bp, Homo sapien
aagaatgcacagttgttccattgtc

SEQ ID NO: 2332770 - DNA, 25 bp, Homo sapien
agaatgcacagttgttccattgtct

SEQ ID NO: 2332771 - DNA, 25 bp, Homo sapien
taagaatgcacagttgttccattgt

SEQ ID NO: 2332772 - DNA, 25 bp, Homo sapien
tcaatgttgtacttcaaatgaagac

SEQ ID NO: 2332773 - DNA, 25 bp, Homo sapien
aatgttgtacttcaaatgaagaccc

SEQ ID NO: 2332774 - DNA, 25 bp, Homo sapien
attcatcttcaatgttgtacttcaa

SEQ ID NO: 2332775 - DNA, 25 bp, Homo sapien
catcttcaatgttgtacttcaaatg

SEQ ID NO: 2332776 - DNA, 25 bp, Homo sapien
acatattaccctgagtacatattaa

SEQ ID NO: 2332777 - DNA, 25 bp, Homo sapien
ctgtaacatcaacatattaccctga

SEQ ID NO: 2332778 - DNA, 25 bp, Homo sapien
ttttttgcctgtaacatcaacatat

SEQ ID NO: 2332779 - DNA, 25 bp, Homo sapien
gtttatttactacatagatacattt

SEQ ID NO: 2332780 - DNA, 25 bp, Homo sapien
taatttacaggaggaacacctatcc

SEQ ID NO: 2332781 - DNA, 25 bp, Homo sapien
gaggaacacctatcccccccaatga

SEQ ID NO: 2332782 - DNA, 25 bp, Homo sapien
taatttgccgcactaggtcataaaa

SEQ ID NO: 2332783 - DNA, 25 bp, Homo sapien
ttctgttaatttgccgcactaggtc

SEQ ID NO: 2332784 - DNA, 25 bp, Homo sapien
gttaatttgccgcactaggtcataa

SEQ ID NO: 2332785 - DNA, 25 bp, Homo sapien
ctgttaatttgccgcactaggtcat

SEQ ID NO: 2332786 - DNA, 25 bp, Homo sapien
tgcagcaaaccccatggtacacctt

SEQ ID NO: 2332787 - DNA, 25 bp, Homo sapien
tcatgacagagtgcccttaataagg

SEQ ID NO: 2332788 - DNA, 25 bp, Homo sapien
tgccaggtaccgatgcaagatctgt

SEQ ID NO: 2332789 - DNA, 25 bp, Homo sapien
cagcagcagctaatagttgagtgtt

SEQ ID NO: 2332790 - DNA, 25 bp, Homo sapien
gaaagccctagatggaaggcaggaa

SEQ ID NO: 2332791 - DNA, 25 bp, Homo sapien
tattaacaaactgggtgatcctgtg

SEQ ID NO: 2332792 - DNA, 25 bp, Homo sapien
cacatgtgtgctgctaagaatgggc

SEQ ID NO: 2332793 - DNA, 25 bp, Homo sapien
cagatggaagtgtgtgagctcaagc

SEQ ID NO: 2332794 - DNA, 25 bp, Homo sapien
caggaaagtccatttaagatgttgg

SEQ ID NO: 2332795 - DNA, 25 bp, Homo sapien
taggtttaacaaagttggaatgctg

SEQ ID NO: 2332796 - DNA, 25 bp, Homo sapien
aagtccatttaagatgttggtaggt

SEQ ID NO: 2332797 - DNA, 25 bp, Homo sapien
cactgttgaattgggcaacagttct

SEQ ID NO: 2332798 - DNA, 25 bp, Homo sapien
tatataagtaaaaatctctcttgtg

SEQ ID NO: 2332799 - DNA, 25 bp, Homo sapien
gctttcatccgcctcttaaagggta

SEQ ID NO: 2332800 - DNA, 25 bp, Homo sapien
gaatgtgcaaactgatatagtagct

SEQ ID NO: 2332801 - DNA, 25 bp, Homo sapien
tctctcttgtgatactggaaagtga

SEQ ID NO: 2332802 - DNA, 25 bp, Homo sapien
tgtactctccaatacaaagtatggg

SEQ ID NO: 2332803 - DNA, 25 bp, Homo sapien
ttcatacatgtacaacattggtgga

SEQ ID NO: 2332804 - DNA, 25 bp, Homo sapien
cagtaatactggatgtagcctctgg

SEQ ID NO: 2332805 - DNA, 25 bp, Homo sapien
tgttaaagtatacagtacaccattt

SEQ ID NO: 2332806 - DNA, 25 bp, Homo sapien
tatatagctgtgttaatcaaagcgc

SEQ ID NO: 2332807 - DNA, 25 bp, Homo sapien
tcaaagcgcttattttgtacaataa

SEQ ID NO: 2332808 - DNA, 25 bp, Homo sapien
tcccaacagatattaaaggcaacgt

SEQ ID NO: 2332809 - DNA, 25 bp, Homo sapien
aaggcaacgtctttaatctaagaca

SEQ ID NO: 2332810 - DNA, 25 bp, Homo sapien
tacacacgactataaacattgttcc

SEQ ID NO: 2332811 - DNA, 25 bp, Homo sapien
tcacagtgagaatctacagctgcag

SEQ ID NO: 2332812 - DNA, 25 bp, Homo sapien
cacttatgcatgagcaagcaaggga

SEQ ID NO: 2332813 - DNA, 25 bp, Homo sapien
aatatacacttcttgttgtagaccc

SEQ ID NO: 2332814 - DNA, 25 bp, Homo sapien
catgtgaaacaatcactaacaggca

SEQ ID NO: 2332815 - DNA, 25 bp, Homo sapien
gaaacaatcactaacaggcaaaaat

SEQ ID NO: 2332816 - DNA, 25 bp, Homo sapien
acatgtgaaacaatcactaacaggc

SEQ ID NO: 2332817 - DNA, 25 bp, Homo sapien
tgtgaaacaatcactaacaggcaaa

SEQ ID NO: 2332818 - DNA, 25 bp, Homo sapien
aatttattgaactactgatgctaag

SEQ ID NO: 2332819 - DNA, 25 bp, Homo sapien
gaactactgatgctaagttatacaa

SEQ ID NO: 2332820 - DNA, 25 bp, Homo sapien
ttgaactactgatgctaagttatac

SEQ ID NO: 2332821 - DNA, 25 bp, Homo sapien
ttattgaactactgatgctaagtta

SEQ ID NO: 2332822 - DNA, 25 bp, Homo sapien
acattcaagtggcaagtaattataa

SEQ ID NO: 2332823 - DNA, 25 bp, Homo sapien
tactagcactgttaaaacattacac

SEQ ID NO: 2332824 - DNA, 25 bp, Homo sapien
tcaagtggcaagtaattataatgca

SEQ ID NO: 2332825 - DNA, 25 bp, Homo sapien
tatttactagcactgttaaaacatt

SEQ ID NO: 2332826 - DNA, 25 bp, Homo sapien
attatgaaaccatgctgtgtaaaat

SEQ ID NO: 2332827 - DNA, 25 bp, Homo sapien
catgctgtgtaaaatgcacctatta

SEQ ID NO: 2332828 - DNA, 25 bp, Homo sapien
gctgtgtaaaatgcacctattacaa

SEQ ID NO: 2332829 - DNA, 25 bp, Homo sapien
ttatgaaaccatgctgtgtaaaatg

SEQ ID NO: 2332830 - DNA, 25 bp, Homo sapien
ccaaaggcatttattcgtaagtaat

SEQ ID NO: 2332831 - DNA, 25 bp, Homo sapien
caaaaggtggttatgtggatattca

SEQ ID NO: 2332832 - DNA, 25 bp, Homo sapien
taattaatgagtctggcttgcccag

SEQ ID NO: 2332833 - DNA, 25 bp, Homo sapien
caataccagaaaactcgctacttcc

SEQ ID NO: 2332834 - DNA, 25 bp, Homo sapien
tgccctgaccatgagaatatcctgt

SEQ ID NO: 2332835 - DNA, 25 bp, Homo sapien
caaagtgagataaagcagtcgagcc

SEQ ID NO: 2332836 - DNA, 25 bp, Homo sapien
gggcctagggcaaccaagtcattaa

SEQ ID NO: 2332837 - DNA, 25 bp, Homo sapien
tcttagggagatcaacactgtgcaa

SEQ ID NO: 2332838 - DNA, 25 bp, Homo sapien
ttttctcccgctgttgtacttttgc

SEQ ID NO: 2332839 - DNA, 25 bp, Homo sapien
tactcctatatcaccatgtcaggta

SEQ ID NO: 2332840 - DNA, 25 bp, Homo sapien
tgttcactttgcacgggaatccttc

SEQ ID NO: 2332841 - DNA, 25 bp, Homo sapien
tttttccacctactcagatccttca

SEQ ID NO: 2332842 - DNA, 25 bp, Homo sapien
ttatcccctctcagacaacatggca

SEQ ID NO: 2332843 - DNA, 25 bp, Homo sapien
tattatcccctctcagacaacatgg

SEQ ID NO: 2332844 - DNA, 25 bp, Homo sapien
cttattatcccctctcagacaacat

SEQ ID NO: 2332845 - DNA, 25 bp, Homo sapien
tatcccctctcagacaacatggcat

SEQ ID NO: 2332846 - DNA, 25 bp, Homo sapien
gccttgttgagtttaacaaagctgc

SEQ ID NO: 2332847 - DNA, 25 bp, Homo sapien
gaatgaagtatgttgatagtctgga

SEQ ID NO: 2332848 - DNA, 25 bp, Homo sapien
aaagcgcctgttcttggaattcaga

SEQ ID NO: 2332849 - DNA, 25 bp, Homo sapien
ttcctggtattctctgtcagaaagc

SEQ ID NO: 2332850 - DNA, 25 bp, Homo sapien
tgcctacactcagtcctttgttctg

SEQ ID NO: 2332851 - DNA, 25 bp, Homo sapien
gcaagcccttcgacccggaagcagt

SEQ ID NO: 2332852 - DNA, 25 bp, Homo sapien
cacacaaccaaagttggctgcagtt

SEQ ID NO: 2332853 - DNA, 25 bp, Homo sapien
gcagtttagctaccgcgttttagcc

SEQ ID NO: 2332854 - DNA, 25 bp, Homo sapien
ggctgcagtttagctaccgcgtttt

SEQ ID NO: 2332855 - DNA, 25 bp, Homo sapien
cttggttgtctccattacacaacta

SEQ ID NO: 2332856 - DNA, 25 bp, Homo sapien
gaataactgatctttgttgtaggcg

SEQ ID NO: 2332857 - DNA, 25 bp, Homo sapien
tgatctttgttgtaggcggctagca

SEQ ID NO: 2332858 - DNA, 25 bp, Homo sapien
gatcttgaataactgatctttgttg

SEQ ID NO: 2332859 - DNA, 25 bp, Homo sapien
gattacaggggatgatatctctcca

SEQ ID NO: 2332860 - DNA, 25 bp, Homo sapien
ttctgagcactctgtttccgtgcag

SEQ ID NO: 2332861 - DNA, 25 bp, Homo sapien
caggggatgatatctctccaaagcc

SEQ ID NO: 2332862 - DNA, 25 bp, Homo sapien
tttccgtgcagtccgtgtcacctct

SEQ ID NO: 2332863 - DNA, 25 bp, Homo sapien
aaagttttccatgtagaaaagagat

SEQ ID NO: 2332864 - DNA, 25 bp, Homo sapien
aagttttccatgtagaaaagagatc

SEQ ID NO: 2332865 - DNA, 25 bp, Homo sapien
agttttccatgtagaaaagagatca

SEQ ID NO: 2332866 - DNA, 25 bp, Homo sapien
gtgtagtattaccaaaattttcatc

SEQ ID NO: 2332867 - DNA, 25 bp, Homo sapien
agctaggagttcgagggataacctg

SEQ ID NO: 2332868 - DNA, 25 bp, Homo sapien
tgtcgaaatgagctaggagttcgag

SEQ ID NO: 2332869 - DNA, 25 bp, Homo sapien
ataacctggtttcttggtgtagtat

SEQ ID NO: 2332870 - DNA, 25 bp, Homo sapien
aatgttagttgctattataattacc

SEQ ID NO: 2332871 - DNA, 25 bp, Homo sapien
tagttgctattataattaccgttat

SEQ ID NO: 2332872 - DNA, 25 bp, Homo sapien
tgttagttgctattataattaccgt

SEQ ID NO: 2332873 - DNA, 25 bp, Homo sapien
tataattaccgttattattaaatgc

SEQ ID NO: 2332874 - DNA, 25 bp, Homo sapien
cagttttccattatttagactctaa

SEQ ID NO: 2332875 - DNA, 25 bp, Homo sapien
ctaaagtgcgtgagcattcattatc

SEQ ID NO: 2332876 - DNA, 25 bp, Homo sapien
gcgtgagcattcattatcaaaacaa

SEQ ID NO: 2332877 - DNA, 25 bp, Homo sapien
aagtgcgtgagcattcattatcaaa

SEQ ID NO: 2332878 - DNA, 25 bp, Homo sapien
caggaaatatctggctgccttagta

SEQ ID NO: 2332879 - DNA, 25 bp, Homo sapien
aaccctgaagactgcgtaagtcggg

SEQ ID NO: 2332880 - DNA, 25 bp, Homo sapien
aagaaccctgaagactgcgtaagtc

SEQ ID NO: 2332881 - DNA, 25 bp, Homo sapien
ctcctgttccaagaatgcaggaaat

SEQ ID NO: 2332882 - DNA, 25 bp, Homo sapien
gcactgatagttacatcttctgtta

SEQ ID NO: 2332883 - DNA, 25 bp, Homo sapien
ggatcatcctcacgtaacataacag

SEQ ID NO: 2332884 - DNA, 25 bp, Homo sapien
gcccggaacgctgtgatgaaaatgc

SEQ ID NO: 2332885 - DNA, 25 bp, Homo sapien
aatgcagctgcccagttactgtcat

SEQ ID NO: 2332886 - DNA, 25 bp, Homo sapien
actgcgtccagcctctgtctattct

SEQ ID NO: 2332887 - DNA, 25 bp, Homo sapien
gttgttgagttgtagcagtttttat

SEQ ID NO: 2332888 - DNA, 25 bp, Homo sapien
tgagttgtagcagtttttatacatt

SEQ ID NO: 2332889 - DNA, 25 bp, Homo sapien
tgcgtccagcctctgtctattctat

SEQ ID NO: 2332890 - DNA, 25 bp, Homo sapien
cactaacgggtgtaaggcagtatct

SEQ ID NO: 2332891 - DNA, 25 bp, Homo sapien
tctttagaacagtgtctattctatt

SEQ ID NO: 2332892 - DNA, 25 bp, Homo sapien
ttgtttttcagtagccacactaacg

SEQ ID NO: 2332893 - DNA, 25 bp, Homo sapien
tatcttgtaactcactgtagttctg

SEQ ID NO: 2332894 - DNA, 25 bp, Homo sapien
gggtcttgctaactcctgtctcagc

SEQ ID NO: 2332895 - DNA, 25 bp, Homo sapien
ggactataggtatataccagccacc

SEQ ID NO: 2332896 - DNA, 25 bp, Homo sapien
tataggtatataccagccaccatgc

SEQ ID NO: 2332897 - DNA, 25 bp, Homo sapien
ggtcttgctaactcctgtctcagca

SEQ ID NO: 2332898 - DNA, 25 bp, Homo sapien
aaaaactgtactcgaagagtgcttc

SEQ ID NO: 2332899 - DNA, 25 bp, Homo sapien
gttttcatactcttccacaagatca

SEQ ID NO: 2332900 - DNA, 25 bp, Homo sapien
gtactcgaagagtgcttcagaaaag

SEQ ID NO: 2332901 - DNA, 25 bp, Homo sapien
cgaagagtgcttcagaaaagactgc

SEQ ID NO: 2332902 - DNA, 25 bp, Homo sapien
atattttagattttccttcagacag

SEQ ID NO: 2332903 - DNA, 25 bp, Homo sapien
caggtgttgctcgactcactatttt

SEQ ID NO: 2332904 - DNA, 25 bp, Homo sapien
gaccatctcctgttgaagaagccag

SEQ ID NO: 2332905 - DNA, 25 bp, Homo sapien
gaagccagagcatactggctgtttt

SEQ ID NO: 2332906 - DNA, 25 bp, Homo sapien
aatttttgaagtccaggtgttgctc

SEQ ID NO: 2332907 - DNA, 25 bp, Homo sapien
ctttcctcttctaatgcagactgta

SEQ ID NO: 2332908 - DNA, 25 bp, Homo sapien
taactgcgaatacactttcctcttc

SEQ ID NO: 2332909 - DNA, 25 bp, Homo sapien
agtaactgcgaatacactttcctct

SEQ ID NO: 2332910 - DNA, 25 bp, Homo sapien
actttcctcttctaatgcagactgt

SEQ ID NO: 2332911 - DNA, 25 bp, Homo sapien
gacagtcttcctacatgtgcatttg

SEQ ID NO: 2332912 - DNA, 25 bp, Homo sapien
gaatttcggctgactatacttaact

SEQ ID NO: 2332913 - DNA, 25 bp, Homo sapien
gaacccacatataaggaatttcggc

SEQ ID NO: 2332914 - DNA, 25 bp, Homo sapien
tccagaagatgaggagtaagagttc

SEQ ID NO: 2332915 - DNA, 25 bp, Homo sapien
ggtggaggcaggagtgaaggcaggc

SEQ ID NO: 2332916 - DNA, 25 bp, Homo sapien
aggcaggagtgaaggcaggcaggct

SEQ ID NO: 2332917 - DNA, 25 bp, Homo sapien
caggagtgaaggcaggcaggctgag

SEQ ID NO: 2332918 - DNA, 25 bp, Homo sapien
gtggaggcaggagtgaaggcaggca

SEQ ID NO: 2332919 - DNA, 25 bp, Homo sapien
acacatgtaggaatggctactgaag

SEQ ID NO: 2332920 - DNA, 25 bp, Homo sapien
aatggctactgaaggcccttgggcc

SEQ ID NO: 2332921 - DNA, 25 bp, Homo sapien
cccttgggccagagttggacacctt

SEQ ID NO: 2332922 - DNA, 25 bp, Homo sapien
gcccttgggccagagttggacacct

SEQ ID NO: 2332923 - DNA, 25 bp, Homo sapien
ttctgccgctgcaggggcctccact

SEQ ID NO: 2332924 - DNA, 25 bp, Homo sapien
gtcttctgccgctgcaggggcctcc

SEQ ID NO: 2332925 - DNA, 25 bp, Homo sapien
ccgtcttctgccgctgcaggggcct

SEQ ID NO: 2332926 - DNA, 25 bp, Homo sapien
gccgctgcaggggcctccacttggt

SEQ ID NO: 2332927 - DNA, 25 bp, Homo sapien
aagtttgttgatgtagctctcgaac

SEQ ID NO: 2332928 - DNA, 25 bp, Homo sapien
agaagtttgttgatgtagctctcga

SEQ ID NO: 2332929 - DNA, 25 bp, Homo sapien
ctgccagcagaagtttgttgatgta

SEQ ID NO: 2332930 - DNA, 25 bp, Homo sapien
gccagcagaagtttgttgatgtagc

SEQ ID NO: 2332931 - DNA, 25 bp, Homo sapien
tcagcttctcttggcccagagtgta

SEQ ID NO: 2332932 - DNA, 25 bp, Homo sapien
gcttctcttggcccagagtgtacag

SEQ ID NO: 2332933 - DNA, 25 bp, Homo sapien
agcttcagcttctcttggcccagag

SEQ ID NO: 2332934 - DNA, 25 bp, Homo sapien
ctgcatgttatcaagttccacctcc

SEQ ID NO: 2332935 - DNA, 25 bp, Homo sapien
tgctttttgatatcatcctcgtact

SEQ ID NO: 2332936 - DNA, 25 bp, Homo sapien
ggaagctgatctcttcagtaagccc

SEQ ID NO: 2332937 - DNA, 25 bp, Homo sapien
gaagctgatctcttcagtaagccct

SEQ ID NO: 2332938 - DNA, 25 bp, Homo sapien
ctctgtatgctttttgatatcatcc

SEQ ID NO: 2332939 - DNA, 25 bp, Homo sapien
catcctggagccgactgatgttcct

SEQ ID NO: 2332940 - DNA, 25 bp, Homo sapien
gaatccctctgaaataacgcttcca

SEQ ID NO: 2332941 - DNA, 25 bp, Homo sapien
tgaaataacgcttccacaactgttt

SEQ ID NO: 2332942 - DNA, 25 bp, Homo sapien
gtcgaacaagtgaatccctctgaaa

SEQ ID NO: 2332943 - DNA, 25 bp, Homo sapien
ctgactttgtcgaacaagtgaatcc

SEQ ID NO: 2332944 - DNA, 25 bp, Homo sapien
tagtggtactactacccttaattca

SEQ ID NO: 2332945 - DNA, 25 bp, Homo sapien
tagtgttaactaccaaatctatttg

SEQ ID NO: 2332946 - DNA, 25 bp, Homo sapien
gtgttaactaccaaatctatttgtg

SEQ ID NO: 2332947 - DNA, 25 bp, Homo sapien
aattagtgttaactaccaaatctat

SEQ ID NO: 2332948 - DNA, 25 bp, Homo sapien
caatactctctaaccaatctaccac

SEQ ID NO: 2332949 - DNA, 25 bp, Homo sapien
atattatcagaaaattctccaattt

SEQ ID NO: 2332950 - DNA, 25 bp, Homo sapien
tattatcagaaaattctccaatttc

SEQ ID NO: 2332951 - DNA, 25 bp, Homo sapien
tactctctaaccaatctaccaccag

SEQ ID NO: 2332952 - DNA, 25 bp, Homo sapien
gcaaatcagctatctaactctctta

SEQ ID NO: 2332953 - DNA, 25 bp, Homo sapien
caaagtagtgtgaacaaagtagtgt

SEQ ID NO: 2332954 - DNA, 25 bp, Homo sapien
tgaacaatatcaacattgagtgacc

SEQ ID NO: 2332955 - DNA, 25 bp, Homo sapien
acccacaaactcagagggccaactg

SEQ ID NO: 2332956 - DNA, 25 bp, Homo sapien
ccgttgttttaaggtatgcagagta

SEQ ID NO: 2332957 - DNA, 25 bp, Homo sapien
aagtcagctgccgttgttttaaggt

SEQ ID NO: 2332958 - DNA, 25 bp, Homo sapien
acttccaacgtaagaagtcagctgc

SEQ ID NO: 2332959 - DNA, 25 bp, Homo sapien
aattcagtgacaagcggacgaacac

SEQ ID NO: 2332960 - DNA, 25 bp, Homo sapien
tataaacatttcacgtgccctgtca

SEQ ID NO: 2332961 - DNA, 25 bp, Homo sapien
tcagattccaatgcaacttagttgt

SEQ ID NO: 2332962 - DNA, 25 bp, Homo sapien
tagtgtgtgcaaacctttagaagag

SEQ ID NO: 2332963 - DNA, 25 bp, Homo sapien
caaaggtcacggatatgtttcaata

SEQ ID NO: 2332964 - DNA, 25 bp, Homo sapien
gttggcccacaaagggcatgcctca

SEQ ID NO: 2332965 - DNA, 25 bp, Homo sapien
gcttccctacttaaaacatactcag

SEQ ID NO: 2332966 - DNA, 25 bp, Homo sapien
ggaatgaagctctcacaagattaca

SEQ ID NO: 2332967 - DNA, 25 bp, Homo sapien
ttacaagtgttccaaatagccacat

SEQ ID NO: 2332968 - DNA, 25 bp, Homo sapien
tctctatccagatcatcaaggggca

SEQ ID NO: 2332969 - DNA, 25 bp, Homo sapien
gagatatttgagtaatctaacttca

SEQ ID NO: 2332970 - DNA, 25 bp, Homo sapien
tttctgtcttatgggagcatcaggg

SEQ ID NO: 2332971 - DNA, 25 bp, Homo sapien
tccagcacggattagagtaaagaga

SEQ ID NO: 2332972 - DNA, 25 bp, Homo sapien
tgaccacagcgtttacagagtcgtt

SEQ ID NO: 2332973 - DNA, 25 bp, Homo sapien
tctccatgcttgaccacagcgttta

SEQ ID NO: 2332974 - DNA, 25 bp, Homo sapien
ccattaacattagggtcatggtaca

SEQ ID NO: 2332975 - DNA, 25 bp, Homo sapien
gtttccagccttcaagtgttgcagc

SEQ ID NO: 2332976 - DNA, 25 bp, Homo sapien
cctttgtcctcaactgtcagaataa

SEQ ID NO: 2332977 - DNA, 25 bp, Homo sapien
aaatgcctttgtcctcaactgtcag

SEQ ID NO: 2332978 - DNA, 25 bp, Homo sapien
gagcgaaatgcctttgtcctcaact

SEQ ID NO: 2332979 - DNA, 25 bp, Homo sapien
atgcctttgtcctcaactgtcagaa

SEQ ID NO: 2332980 - DNA, 25 bp, Homo sapien
gcaacttattttccaaatgcgtcta

SEQ ID NO: 2332981 - DNA, 25 bp, Homo sapien
ttccaaatgcgtctatatggattcc

SEQ ID NO: 2332982 - DNA, 25 bp, Homo sapien
aacttattttccaaatgcgtctata

SEQ ID NO: 2332983 - DNA, 25 bp, Homo sapien
tattttccaaatgcgtctatatgga

SEQ ID NO: 2332984 - DNA, 25 bp, Homo sapien
cctcataatgtggagtcttgcaaac

SEQ ID NO: 2332985 - DNA, 25 bp, Homo sapien
tagtatgtcaattttcctcataatg

SEQ ID NO: 2332986 - DNA, 25 bp, Homo sapien
tgaaagcagatccaactctagtgga

SEQ ID NO: 2332987 - DNA, 25 bp, Homo sapien
tagactgaacctattcacttgatag

SEQ ID NO: 2332988 - DNA, 25 bp, Homo sapien
taaagctgcataaattgctctctcg

SEQ ID NO: 2332989 - DNA, 25 bp, Homo sapien
gctgcataaattgctctctcgtatc

SEQ ID NO: 2332990 - DNA, 25 bp, Homo sapien
gcataaattgctctctcgtatctat

SEQ ID NO: 2332991 - DNA, 25 bp, Homo sapien
aaattgctctctcgtatctattaaa

SEQ ID NO: 2332992 - DNA, 25 bp, Homo sapien
gaagtaggcccaaactgtgtcttcc

SEQ ID NO: 2332993 - DNA, 25 bp, Homo sapien
cttcagtttcatccagagttgctac

SEQ ID NO: 2332994 - DNA, 25 bp, Homo sapien
ttcccaggtgtcacagacaggaagc

SEQ ID NO: 2332995 - DNA, 25 bp, Homo sapien
atcacccggaagtaggcccaaactg

SEQ ID NO: 2332996 - DNA, 25 bp, Homo sapien
gtcagtagcttgaagttcctcaaaa

SEQ ID NO: 2332997 - DNA, 25 bp, Homo sapien
tttgaactatatgataatgttcttg

SEQ ID NO: 2332998 - DNA, 25 bp, Homo sapien
taatgttcttgattctcttccagaa

SEQ ID NO: 2332999 - DNA, 25 bp, Homo sapien
tctcccaggataagaaacttttgaa

SEQ ID NO: 2333000 - DNA, 25 bp, Homo sapien
tgtctcccaggataagaaacttttg

SEQ ID NO: 2333001 - DNA, 25 bp, Homo sapien
aggtgagtcataaagcgaagcaggt

SEQ ID NO: 2333002 - DNA, 25 bp, Homo sapien
tgtagtcccagagtacggaaaaaca

SEQ ID NO: 2333003 - DNA, 25 bp, Homo sapien
cgaagcaggtgtccaggtagattgt

SEQ ID NO: 2333004 - DNA, 25 bp, Homo sapien
ggtgtccaggtagattgtttctgct

SEQ ID NO: 2333005 - DNA, 25 bp, Homo sapien
tatgtctttaaaacttcaatagaaa

SEQ ID NO: 2333006 - DNA, 25 bp, Homo sapien
tgtatgtctttaaaacttcaataga

SEQ ID NO: 2333007 - DNA, 25 bp, Homo sapien
ctgtatgtatgtctttaaaacttca

SEQ ID NO: 2333008 - DNA, 25 bp, Homo sapien
tatgtatgtctttaaaacttcaata

SEQ ID NO: 2333009 - DNA, 25 bp, Homo sapien
cagctaggtcttgaggcaaatgaca

SEQ ID NO: 2333010 - DNA, 25 bp, Homo sapien
ggtggcgctgttcaaattctgtaac

SEQ ID NO: 2333011 - DNA, 25 bp, Homo sapien
caaaaataatgcatactgggcaaca

SEQ ID NO: 2333012 - DNA, 25 bp, Homo sapien
tgcttctttagccaactccaggcaa

SEQ ID NO: 2333013 - DNA, 25 bp, Homo sapien
tctttcgaatattctcaactacagt

SEQ ID NO: 2333014 - DNA, 25 bp, Homo sapien
caggtcatgatgactaaattcacca

SEQ ID NO: 2333015 - DNA, 25 bp, Homo sapien
ctcagtagtgccagtatctagggct

SEQ ID NO: 2333016 - DNA, 25 bp, Homo sapien
ttcaccattatctttctttcgaata

SEQ ID NO: 2333017 - DNA, 25 bp, Homo sapien
ctgcgctgggtcaaataccaaccag

SEQ ID NO: 2333018 - DNA, 25 bp, Homo sapien
tctgcgctgggtcaaataccaacca

SEQ ID NO: 2333019 - DNA, 25 bp, Homo sapien
cctctgcgctgggtcaaataccaac

SEQ ID NO: 2333020 - DNA, 25 bp, Homo sapien
gaattttctcataattgcattgcct

SEQ ID NO: 2333021 - DNA, 25 bp, Homo sapien
ggtaggaagaagaatggagcccagg

SEQ ID NO: 2333022 - DNA, 25 bp, Homo sapien
ctgaggtaggaagaagaatggagcc

SEQ ID NO: 2333023 - DNA, 25 bp, Homo sapien
gtttgaagctgcataaaaatatact

SEQ ID NO: 2333024 - DNA, 25 bp, Homo sapien
gagtttgaagctgcataaaaatata

SEQ ID NO: 2333025 - DNA, 25 bp, Homo sapien
cattccttgttcctcgcactgatta

SEQ ID NO: 2333026 - DNA, 25 bp, Homo sapien
caaataagctctgatgcacaaatgt

SEQ ID NO: 2333027 - DNA, 25 bp, Homo sapien
cagcaggaagtggactttccattcc

SEQ ID NO: 2333028 - DNA, 25 bp, Homo sapien
caaatgttctcggatagcattatca

SEQ ID NO: 2333029 - DNA, 25 bp, Homo sapien
cagtaaaagttggttgaggtatcaa

SEQ ID NO: 2333030 - DNA, 25 bp, Homo sapien
gtatcaaagcaggtttttgtggaac

SEQ ID NO: 2333031 - DNA, 25 bp, Homo sapien
taaaagttggttgaggtatcaaagc

SEQ ID NO: 2333032 - DNA, 25 bp, Homo sapien
ccactcattaaaggtttcatgggct

SEQ ID NO: 2333033 - DNA, 25 bp, Homo sapien
ccatcaacaaacaacaagacgttat

SEQ ID NO: 2333034 - DNA, 25 bp, Homo sapien
tctccttcacatcagcagttagggc

SEQ ID NO: 2333035 - DNA, 25 bp, Homo sapien
cagttagggcatccaaatgcccttt

SEQ ID NO: 2333036 - DNA, 25 bp, Homo sapien
acaacaagacgttatacattttctc

SEQ ID NO: 2333037 - DNA, 25 bp, Homo sapien
tttatgagatcccaagactattttg

SEQ ID NO: 2333038 - DNA, 25 bp, Homo sapien
cgagtcaaaggagttctattacgaa

SEQ ID NO: 2333039 - DNA, 25 bp, Homo sapien
gagaatcagcatgaatcagatgaga

SEQ ID NO: 2333040 - DNA, 25 bp, Homo sapien
tattttgtggctttcactacctaat

SEQ ID NO: 2333041 - DNA, 25 bp, Homo sapien
gcaggttactttcttatctcacagg

SEQ ID NO: 2333042 - DNA, 25 bp, Homo sapien
tgccagcaactatccagggtaatgg

SEQ ID NO: 2333043 - DNA, 25 bp, Homo sapien
tgaattccgatactagcgggcgggc

SEQ ID NO: 2333044 - DNA, 25 bp, Homo sapien
tccttgttgcccgaaaagcagcagg

SEQ ID NO: 2333045 - DNA, 25 bp, Homo sapien
ccaagctagtatcgaactcttgggc

SEQ ID NO: 2333046 - DNA, 25 bp, Homo sapien
tgggattacagaaattacacactac

SEQ ID NO: 2333047 - DNA, 25 bp, Homo sapien
taaaaataggaaggaaatcaatagc

SEQ ID NO: 2333048 - DNA, 25 bp, Homo sapien
gaaatcaatagcactaatagtgtag

SEQ ID NO: 2333049 - DNA, 25 bp, Homo sapien
tactgaccagtactgtgcaatatcg

SEQ ID NO: 2333050 - DNA, 25 bp, Homo sapien
taccatatctgctaactgtaggcat

SEQ ID NO: 2333051 - DNA, 25 bp, Homo sapien
tgcaatatcgtatgaagcagaaaac

SEQ ID NO: 2333052 - DNA, 25 bp, Homo sapien
caggtacagtttgtggcgctcagag

SEQ ID NO: 2333053 - DNA, 25 bp, Homo sapien
gaacttagttacctaatcgatctga

SEQ ID NO: 2333054 - DNA, 25 bp, Homo sapien
ctttaagatttatgtagccagagcc

SEQ ID NO: 2333055 - DNA, 25 bp, Homo sapien
cagagtcagtctatatatttctaac

SEQ ID NO: 2333056 - DNA, 25 bp, Homo sapien
ttactacagagcatatcaaatcatt

SEQ ID NO: 2333057 - DNA, 25 bp, Homo sapien
ataccctaatgggtcaagtccctgg

SEQ ID NO: 2333058 - DNA, 25 bp, Homo sapien
tttcataccctaatgggtcaagtcc

SEQ ID NO: 2333059 - DNA, 25 bp, Homo sapien
tcaagtccctggtctaggagcatta

SEQ ID NO: 2333060 - DNA, 25 bp, Homo sapien
cctggtctaggagcattagagagga

SEQ ID NO: 2333061 - DNA, 25 bp, Homo sapien
gctgatatccctacatgttgaaagt

SEQ ID NO: 2333062 - DNA, 25 bp, Homo sapien
tcacgataatattctgaaaagtaca

SEQ ID NO: 2333063 - DNA, 25 bp, Homo sapien
tgttgaaagtgtcacgataatattc

SEQ ID NO: 2333064 - DNA, 25 bp, Homo sapien
agagaaacgctgatatccctacatg

SEQ ID NO: 2333065 - DNA, 25 bp, Homo sapien
tagaaaaattcttgttatagtcatc

SEQ ID NO: 2333066 - DNA, 25 bp, Homo sapien
ttttgataggaagtttgctaaatga

SEQ ID NO: 2333067 - DNA, 25 bp, Homo sapien
tcagaatgcttatgattacagaaaa

SEQ ID NO: 2333068 - DNA, 25 bp, Homo sapien
tacatgaaaaagagacaaccctgga

SEQ ID NO: 2333069 - DNA, 25 bp, Homo sapien
aattcagtgcattactcaaacccca

SEQ ID NO: 2333070 - DNA, 25 bp, Homo sapien
aagccctacactctagcctatttgg

SEQ ID NO: 2333071 - DNA, 25 bp, Homo sapien
tgagagtcttttcagctggagagag

SEQ ID NO: 2333072 - DNA, 25 bp, Homo sapien
aggactgcatgagctgtaaaaatca

SEQ ID NO: 2333073 - DNA, 25 bp, Homo sapien
tcttgatcgacagtaaggtccttca

SEQ ID NO: 2333074 - DNA, 25 bp, Homo sapien
tcatgcaatgctcaaggaaaaagtc

SEQ ID NO: 2333075 - DNA, 25 bp, Homo sapien
tcttcaagagtaggcactgaggaac

SEQ ID NO: 2333076 - DNA, 25 bp, Homo sapien
tatgcgaacctgtgataggcaacac

SEQ ID NO: 2333077 - DNA, 25 bp, Homo sapien
gggcgagtagcactcttaacagagg

SEQ ID NO: 2333078 - DNA, 25 bp, Homo sapien
gcacagatcaaccccgggcgagtag

SEQ ID NO: 2333079 - DNA, 25 bp, Homo sapien
agccagctaggacgccgcagcacgt

SEQ ID NO: 2333080 - DNA, 25 bp, Homo sapien
cctgtaagccagctaggacgccgca

SEQ ID NO: 2333081 - DNA, 25 bp, Homo sapien
gccgggcctgtctccggctgccctt

SEQ ID NO: 2333082 - DNA, 25 bp, Homo sapien
gcagacgccgacctcaccgtctgac

SEQ ID NO: 2333083 - DNA, 25 bp, Homo sapien
cggctgcccttctactccaccgccg

SEQ ID NO: 2333084 - DNA, 25 bp, Homo sapien
accgccgcgtcctcgcagacgccga

SEQ ID NO: 2333085 - DNA, 25 bp, Homo sapien
ccccgcgaagctggggccgtctagc

SEQ ID NO: 2333086 - DNA, 25 bp, Homo sapien
atccccgcgaagctggggccgtcta

SEQ ID NO: 2333087 - DNA, 25 bp, Homo sapien
tccccgcgaagctggggccgtctag

SEQ ID NO: 2333088 - DNA, 25 bp, Homo sapien
gatccccgcgaagctggggccgtct

SEQ ID NO: 2333089 - DNA, 25 bp, Homo sapien
gccttggccagctgataggtgccta

SEQ ID NO: 2333090 - DNA, 25 bp, Homo sapien
gcctatggtgttgttctgcagagaa

SEQ ID NO: 2333091 - DNA, 25 bp, Homo sapien
tctggatggctatgatcaccggcgt

SEQ ID NO: 2333092 - DNA, 25 bp, Homo sapien
gaacacaatgcagatggacaccagc

SEQ ID NO: 2333093 - DNA, 25 bp, Homo sapien
taggattacacctaaagttatagga

SEQ ID NO: 2333094 - DNA, 25 bp, Homo sapien
catcgtaataagaatttaggattac

SEQ ID NO: 2333095 - DNA, 25 bp, Homo sapien
taataagaatttaggattacaccta

SEQ ID NO: 2333096 - DNA, 25 bp, Homo sapien
tcacatcgtaataagaatttaggat

SEQ ID NO: 2333097 - DNA, 25 bp, Homo sapien
agatttctggaagtatactcactcc

SEQ ID NO: 2333098 - DNA, 25 bp, Homo sapien
cactccttcacaacaatgttaaaag

SEQ ID NO: 2333099 - DNA, 25 bp, Homo sapien
aaagccaataaacaagttgtaacag

SEQ ID NO: 2333100 - DNA, 25 bp, Homo sapien
tcagatttctggaagtatactcact

SEQ ID NO: 2333101 - DNA, 25 bp, Homo sapien
tcgccacaggactgcctggaacagc

SEQ ID NO: 2333102 - DNA, 25 bp, Homo sapien
ttcctgcgagccctctttgcagaac

SEQ ID NO: 2333103 - DNA, 25 bp, Homo sapien
atggacatgtccagactccctgtgg

SEQ ID NO: 2333104 - DNA, 25 bp, Homo sapien
tcctaagggcactatgatctccatg

SEQ ID NO: 2333105 - DNA, 25 bp, Homo sapien
ctcaaagaagggcacagcaaccagc

SEQ ID NO: 2333106 - DNA, 25 bp, Homo sapien
acatggcagatgacatcggagcctg

SEQ ID NO: 2333107 - DNA, 25 bp, Homo sapien
acatcggagcctggtagtacagcag

SEQ ID NO: 2333108 - DNA, 25 bp, Homo sapien
ggctcaaagaagggcacagcaacca

SEQ ID NO: 2333109 - DNA, 25 bp, Homo sapien
tgaagtgttcccaatgatccaataa

SEQ ID NO: 2333110 - DNA, 25 bp, Homo sapien
aagctattactccagatagcagcac

SEQ ID NO: 2333111 - DNA, 25 bp, Homo sapien
tgatccaataaattgataagttcac

SEQ ID NO: 2333112 - DNA, 25 bp, Homo sapien
gtgacaggtgaagtgttcccaatga

SEQ ID NO: 2333113 - DNA, 25 bp, Homo sapien
ggcacccggccaatgacttcatttc

SEQ ID NO: 2333114 - DNA, 25 bp, Homo sapien
gcacccggccaatgacttcatttct

SEQ ID NO: 2333115 - DNA, 25 bp, Homo sapien
atggcacccggccaatgacttcatt

SEQ ID NO: 2333116 - DNA, 25 bp, Homo sapien
tggcacccggccaatgacttcattt

SEQ ID NO: 2333117 - DNA, 25 bp, Homo sapien
cgccctactcaattcagttctgtgt

SEQ ID NO: 2333118 - DNA, 25 bp, Homo sapien
taatagtccttacataaacgcccta

SEQ ID NO: 2333119 - DNA, 25 bp, Homo sapien
ttttttacggcctcgcacctgctgt

SEQ ID NO: 2333120 - DNA, 25 bp, Homo sapien
tctgtgttacttctcagcctaccac

SEQ ID NO: 2333121 - DNA, 25 bp, Homo sapien
gagcagtctacatgtggtatttcca

SEQ ID NO: 2333122 - DNA, 25 bp, Homo sapien
tgttctggtcaaacccagtgccctc

SEQ ID NO: 2333123 - DNA, 25 bp, Homo sapien
tcagtccctcaatggtgaccagtct

SEQ ID NO: 2333124 - DNA, 25 bp, Homo sapien
tgccagcggcatctgacacagacac

SEQ ID NO: 2333125 - DNA, 25 bp, Homo sapien
tgaaagcccacgttctaatccaaaa

SEQ ID NO: 2333126 - DNA, 25 bp, Homo sapien
taacatgccccagattacagagcta

SEQ ID NO: 2333127 - DNA, 25 bp, Homo sapien
aatactgccagtaacatgccactgg

SEQ ID NO: 2333128 - DNA, 25 bp, Homo sapien
gcatcacgtttaccttcactgcagg

SEQ ID NO: 2333129 - DNA, 25 bp, Homo sapien
ggaataacaagatagatgttaatat

SEQ ID NO: 2333130 - DNA, 25 bp, Homo sapien
caaaagcagcccatcagatgtaaag

SEQ ID NO: 2333131 - DNA, 25 bp, Homo sapien
aaaaggaataacaagatagatgtta

SEQ ID NO: 2333132 - DNA, 25 bp, Homo sapien
aaggaataacaagatagatgttaat

SEQ ID NO: 2333133 - DNA, 25 bp, Homo sapien
atatcctccgaataaagtaatgcag

SEQ ID NO: 2333134 - DNA, 25 bp, Homo sapien
gaacttgaagtgtccgaacatgtta

SEQ ID NO: 2333135 - DNA, 25 bp, Homo sapien
taaagtgggtataggcgagaatgcc

SEQ ID NO: 2333136 - DNA, 25 bp, Homo sapien
aatgccaagggcctgattaatggac

SEQ ID NO: 2333137 - DNA, 25 bp, Homo sapien
ttaaggacgttgtgccagtttactc

SEQ ID NO: 2333138 - DNA, 25 bp, Homo sapien
aggacgttgtgccagtttactccta

SEQ ID NO: 2333139 - DNA, 25 bp, Homo sapien
taaggacgttgtgccagtttactcc

SEQ ID NO: 2333140 - DNA, 25 bp, Homo sapien
ggacgttgtgccagtttactcctac

SEQ ID NO: 2333141 - DNA, 25 bp, Homo sapien
cattccatcattgagtctgtcacca

SEQ ID NO: 2333142 - DNA, 25 bp, Homo sapien
caccaggctaaccattccatacatt

SEQ ID NO: 2333143 - DNA, 25 bp, Homo sapien
gcatgaaccatttcggttttagaga

SEQ ID NO: 2333144 - DNA, 25 bp, Homo sapien
gttaattccgacaaatcattccatc

SEQ ID NO: 2333145 - DNA, 25 bp, Homo sapien
cgagaacccacagcatatttgcagt

SEQ ID NO: 2333146 - DNA, 25 bp, Homo sapien
tagaagagtttgaacaccgagaacc

SEQ ID NO: 2333147 - DNA, 25 bp, Homo sapien
tcatatactttgctgggaccaacca

SEQ ID NO: 2333148 - DNA, 25 bp, Homo sapien
gcaagcagagagctactgtgtgtcc

SEQ ID NO: 2333149 - DNA, 25 bp, Homo sapien
tcttacatcaattttctactagaaa

SEQ ID NO: 2333150 - DNA, 25 bp, Homo sapien
tgacctataaatgtatgaataatgt

SEQ ID NO: 2333151 - DNA, 25 bp, Homo sapien
actgagattggctgccgttttgttt

SEQ ID NO: 2333152 - DNA, 25 bp, Homo sapien
tttaactccatatagtttctatagt

SEQ ID NO: 2333153 - DNA, 25 bp, Homo sapien
aaatttaccaatataaaatgctcaa

SEQ ID NO: 2333154 - DNA, 25 bp, Homo sapien
taccaatataaaatgctcaaacagc

SEQ ID NO: 2333155 - DNA, 25 bp, Homo sapien
ccaatataaaatgctcaaacagcta

SEQ ID NO: 2333156 - DNA, 25 bp, Homo sapien
tttaccaatataaaatgctcaaaca

SEQ ID NO: 2333157 - DNA, 25 bp, Homo sapien
aatgtacgggctaggcaatagaagc

SEQ ID NO: 2333158 - DNA, 25 bp, Homo sapien
caagtgtttcagtaccacagaaagc

SEQ ID NO: 2333159 - DNA, 25 bp, Homo sapien
gatgtagttcactccaagtttgcag

SEQ ID NO: 2333160 - DNA, 25 bp, Homo sapien
tccatggaagcctcaaatgtacggg

SEQ ID NO: 2333161 - DNA, 25 bp, Homo sapien
tgagtagatggagctacaggcacgt

SEQ ID NO: 2333162 - DNA, 25 bp, Homo sapien
gcccgggctggtctttgttctccta

SEQ ID NO: 2333163 - DNA, 25 bp, Homo sapien
ggctggtctttgttctcctaagagt

SEQ ID NO: 2333164 - DNA, 25 bp, Homo sapien
cgtgccactaggcccggctaatttt

SEQ ID NO: 2333165 - DNA, 25 bp, Homo sapien
taaatggcacaaataaactcagctg

SEQ ID NO: 2333166 - DNA, 25 bp, Homo sapien
tatctggtaaaaactaattgctctg

SEQ ID NO: 2333167 - DNA, 25 bp, Homo sapien
tagacaaacataatacccgaggctt

SEQ ID NO: 2333168 - DNA, 25 bp, Homo sapien
gcgcccagcctacagttacgaattt

SEQ ID NO: 2333169 - DNA, 25 bp, Homo sapien
gtcctagtatctggcatattttccc

SEQ ID NO: 2333170 - DNA, 25 bp, Homo sapien
gtatctggtttgtctccgtgcttgg

SEQ ID NO: 2333171 - DNA, 25 bp, Homo sapien
cactggtaacaaaggacagcaagca

SEQ ID NO: 2333172 - DNA, 25 bp, Homo sapien
tcagtgggatgattatcttcggggc

SEQ ID NO: 2333173 - DNA, 25 bp, Homo sapien
cacatctaataaatccggtctcctt

SEQ ID NO: 2333174 - DNA, 25 bp, Homo sapien
tccataatgcctaggacagtacctg

SEQ ID NO: 2333175 - DNA, 25 bp, Homo sapien
tcacaggaaatataggactgtctct

SEQ ID NO: 2333176 - DNA, 25 bp, Homo sapien
gacaaatgttccttaagatcacagg

SEQ ID NO: 2333177 - DNA, 25 bp, Homo sapien
gaaatgcatagtcttggctggttaa

SEQ ID NO: 2333178 - DNA, 25 bp, Homo sapien
ttataaaggtcaaacaggccaggcg

SEQ ID NO: 2333179 - DNA, 25 bp, Homo sapien
aagtatccatgcttgttcttgtggc

SEQ ID NO: 2333180 - DNA, 25 bp, Homo sapien
tagtttgagtgatatgctgctttcc

SEQ ID NO: 2333181 - DNA, 25 bp, Homo sapien
gacgtggttgatacagatcgttgga

SEQ ID NO: 2333182 - DNA, 25 bp, Homo sapien
ggttgatacagatcgttggatttca

SEQ ID NO: 2333183 - DNA, 25 bp, Homo sapien
aaaatgaagacgtggttgatacaga

SEQ ID NO: 2333184 - DNA, 25 bp, Homo sapien
gatacagatcgttggatttcaaaag

SEQ ID NO: 2333185 - DNA, 25 bp, Homo sapien
cctgccatagggctctaattttaaa

SEQ ID NO: 2333186 - DNA, 25 bp, Homo sapien
tggcacctgccatagggctctaatt

SEQ ID NO: 2333187 - DNA, 25 bp, Homo sapien
tgtacatggcacctgccatagggct

SEQ ID NO: 2333188 - DNA, 25 bp, Homo sapien
gcagctgtacatggcacctgccata

SEQ ID NO: 2333189 - DNA, 25 bp, Homo sapien
gacttgacgagtcggatgagtctga

SEQ ID NO: 2333190 - DNA, 25 bp, Homo sapien
ccatctcctcaacagagtaattgat

SEQ ID NO: 2333191 - DNA, 25 bp, Homo sapien
acctcctgaattaaggcccacccat

SEQ ID NO: 2333192 - DNA, 25 bp, Homo sapien
tctgatgattcctaaaggaaatcct

SEQ ID NO: 2333193 - DNA, 25 bp, Homo sapien
gtgcacaccaatatacctaattttt

SEQ ID NO: 2333194 - DNA, 25 bp, Homo sapien
cacaggtgcacaccaatatacctaa

SEQ ID NO: 2333195 - DNA, 25 bp, Homo sapien
caggtgcacaccaatatacctaatt

SEQ ID NO: 2333196 - DNA, 25 bp, Homo sapien
ccctctgttgcccagcatatagtgc

SEQ ID NO: 2333197 - DNA, 25 bp, Homo sapien
ctgctgaatcaaattgaagcagaac

SEQ ID NO: 2333198 - DNA, 25 bp, Homo sapien
cagaactgggggtactactaggaat

SEQ ID NO: 2333199 - DNA, 25 bp, Homo sapien
tactactaggaatgaggggtgacta

SEQ ID NO: 2333200 - DNA, 25 bp, Homo sapien
ttgaagcagaactgggggtactact

SEQ ID NO: 2333201 - DNA, 25 bp, Homo sapien
aattcagactgtcccacttgggttg

SEQ ID NO: 2333202 - DNA, 25 bp, Homo sapien
ttcagactgtcccacttgggttgtg

SEQ ID NO: 2333203 - DNA, 25 bp, Homo sapien
cagactgtcccacttgggttgtgcg

SEQ ID NO: 2333204 - DNA, 25 bp, Homo sapien
tcagactgtcccacttgggttgtgc

SEQ ID NO: 2333205 - DNA, 25 bp, Homo sapien
tggtactgggctagaggacttatta

SEQ ID NO: 2333206 - DNA, 25 bp, Homo sapien
ttctagataagcagcatgacttcct

SEQ ID NO: 2333207 - DNA, 25 bp, Homo sapien
gatggtcattctttgggtgaactcc

SEQ ID NO: 2333208 - DNA, 25 bp, Homo sapien
taattgcatgatctaggagtagttc

SEQ ID NO: 2333209 - DNA, 25 bp, Homo sapien
cagagtagtcatgggatctccaagc

SEQ ID NO: 2333210 - DNA, 25 bp, Homo sapien
taatttgcccagtgccagtatgaca

SEQ ID NO: 2333211 - DNA, 25 bp, Homo sapien
tctccaagctaaaatgtagaaacaa

SEQ ID NO: 2333212 - DNA, 25 bp, Homo sapien
gtacttatacaaacaaaggatcttg

SEQ ID NO: 2333213 - DNA, 25 bp, Homo sapien
gattccaacgaggtgtcagaatggc

SEQ ID NO: 2333214 - DNA, 25 bp, Homo sapien
tcaagtgatagattccaacgaggtg

SEQ ID NO: 2333215 - DNA, 25 bp, Homo sapien
gatagattccaacgaggtgtcagaa

SEQ ID NO: 2333216 - DNA, 25 bp, Homo sapien
gaggtgtcagaatggctttgatagc

SEQ ID NO: 2333217 - DNA, 25 bp, Homo sapien
ggattttagtcctctgaccttcaga

SEQ ID NO: 2333218 - DNA, 25 bp, Homo sapien
tttagagggaaaacccatgtgttgc

SEQ ID NO: 2333219 - DNA, 25 bp, Homo sapien
gcagtggctccacctaaagaccaga

SEQ ID NO: 2333220 - DNA, 25 bp, Homo sapien
ttaggaaacctgcaatagcagtggc

SEQ ID NO: 2333221 - DNA, 25 bp, Homo sapien
ctggtccatagaaggtacttagtac

SEQ ID NO: 2333222 - DNA, 25 bp, Homo sapien
tgagggattataggccgacaatttg

SEQ ID NO: 2333223 - DNA, 25 bp, Homo sapien
ccagggctttcgcatctggtccata

SEQ ID NO: 2333224 - DNA, 25 bp, Homo sapien
tataggcataatccatacagttttc

SEQ ID NO: 2333225 - DNA, 25 bp, Homo sapien
ttattttatttggatgtagagatgg

SEQ ID NO: 2333226 - DNA, 25 bp, Homo sapien
tcctggtacaaaaattatcgtgctc

SEQ ID NO: 2333227 - DNA, 25 bp, Homo sapien
cacatttatatacaggaagtattaa

SEQ ID NO: 2333228 - DNA, 25 bp, Homo sapien
agcccactccatagcacatttatat

SEQ ID NO: 2333229 - DNA, 25 bp, Homo sapien
cagtccccagtaataaagtctaatc

SEQ ID NO: 2333230 - DNA, 25 bp, Homo sapien
tctgttagcctctgatgctgcagcc

SEQ ID NO: 2333231 - DNA, 25 bp, Homo sapien
cactgcttagatttttgggctccct

SEQ ID NO: 2333232 - DNA, 25 bp, Homo sapien
tgtgagtacgttggtttcagcacct

SEQ ID NO: 2333233 - DNA, 25 bp, Homo sapien
tcagtatcctagtattttagcgggg

SEQ ID NO: 2333234 - DNA, 25 bp, Homo sapien
agtatcctagtattttagcggggag

SEQ ID NO: 2333235 - DNA, 25 bp, Homo sapien
tagcggggagggatatcctggccat

SEQ ID NO: 2333236 - DNA, 25 bp, Homo sapien
tattttagcggggagggatatcctg

SEQ ID NO: 2333237 - DNA, 25 bp, Homo sapien
gtagcactttaattttgcctataag

SEQ ID NO: 2333238 - DNA, 25 bp, Homo sapien
ggctgtacctgcagtgtaataggaa

SEQ ID NO: 2333239 - DNA, 25 bp, Homo sapien
taggcaatgtctcttaaatagaaat

SEQ ID NO: 2333240 - DNA, 25 bp, Homo sapien
ccaatattatttagatctggttgga

SEQ ID NO: 2333241 - DNA, 25 bp, Homo sapien
tgccttaccagctctaattggtcgt

SEQ ID NO: 2333242 - DNA, 25 bp, Homo sapien
taccagctctaattggtcgtgacca

SEQ ID NO: 2333243 - DNA, 25 bp, Homo sapien
ccttaccagctctaattggtcgtga

SEQ ID NO: 2333244 - DNA, 25 bp, Homo sapien
agctgccttaccagctctaattggt

SEQ ID NO: 2333245 - DNA, 25 bp, Homo sapien
gaacccaaagtcaatggcagaaagt

SEQ ID NO: 2333246 - DNA, 25 bp, Homo sapien
gcagaaagttaagccaaagaagcac

SEQ ID NO: 2333247 - DNA, 25 bp, Homo sapien
gagttttagcaacatagtacattta

SEQ ID NO: 2333248 - DNA, 25 bp, Homo sapien
aaatgacccatcttgcagtgcatgc

SEQ ID NO: 2333249 - DNA, 25 bp, Homo sapien
tatgagacaacccagaacttggcaa

SEQ ID NO: 2333250 - DNA, 25 bp, Homo sapien
gctagatctagaaggcaactgccac

SEQ ID NO: 2333251 - DNA, 25 bp, Homo sapien
cacaaaagtagtcctgccttgcagg

SEQ ID NO: 2333252 - DNA, 25 bp, Homo sapien
tgatttctgctacttaccactgagg

SEQ ID NO: 2333253 - DNA, 25 bp, Homo sapien
ttctcctccttcccactgtgattgg

SEQ ID NO: 2333254 - DNA, 25 bp, Homo sapien
ccttctcctccttcccactgtgatt

SEQ ID NO: 2333255 - DNA, 25 bp, Homo sapien
ctcctccttcccactgtgattggca

SEQ ID NO: 2333256 - DNA, 25 bp, Homo sapien
gcactgtgacctccccccttctcct

SEQ ID NO: 2333257 - DNA, 25 bp, Homo sapien
ttgcctggtgatccccgttgctccg

SEQ ID NO: 2333258 - DNA, 25 bp, Homo sapien
cgcccactgtgaccttgaatcccat

SEQ ID NO: 2333259 - DNA, 25 bp, Homo sapien
atccccgttgctccgcccactgtga

SEQ ID NO: 2333260 - DNA, 25 bp, Homo sapien
ttgctccgcccactgtgaccttgaa

SEQ ID NO: 2333261 - DNA, 25 bp, Homo sapien
ttgcactaccgtggcagacagctgg

SEQ ID NO: 2333262 - DNA, 25 bp, Homo sapien
taaatgcaggcaagaagagatggcg

SEQ ID NO: 2333263 - DNA, 25 bp, Homo sapien
ctctgggtcctgatgggtcacacgg

SEQ ID NO: 2333264 - DNA, 25 bp, Homo sapien
ggtcacacggcttcaaacagcgcag

SEQ ID NO: 2333265 - DNA, 25 bp, Homo sapien
ccatcctcgataggtcttcctctga

SEQ ID NO: 2333266 - DNA, 25 bp, Homo sapien
ggcagcgccaacccgaggagaagca

SEQ ID NO: 2333267 - DNA, 25 bp, Homo sapien
caggagaaacccatcctcgataggt

SEQ ID NO: 2333268 - DNA, 25 bp, Homo sapien
ctcgataggtcttcctctgatcttc

SEQ ID NO: 2333269 - DNA, 25 bp, Homo sapien
caagtccgctagcaggcccgccctt

SEQ ID NO: 2333270 - DNA, 25 bp, Homo sapien
agcagccccaagtccgctagcaggc

SEQ ID NO: 2333271 - DNA, 25 bp, Homo sapien
ctggcacagtgggaagccgagtaca

SEQ ID NO: 2333272 - DNA, 25 bp, Homo sapien
gcacagtgggaagccgagtacaccg

SEQ ID NO: 2333273 - DNA, 25 bp, Homo sapien
cacaggtccgcatcctcaagaggcc

SEQ ID NO: 2333274 - DNA, 25 bp, Homo sapien
ccctccacaggtccgcatcctcaag

SEQ ID NO: 2333275 - DNA, 25 bp, Homo sapien
tccacaggtccgcatcctcaagagg

SEQ ID NO: 2333276 - DNA, 25 bp, Homo sapien
acaggtccgcatcctcaagaggccc

SEQ ID NO: 2333277 - DNA, 25 bp, Homo sapien
cgcgggtcgtcgcggcgcatccggg

SEQ ID NO: 2333278 - DNA, 25 bp, Homo sapien
gcgcgggtcgtcgcggcgcatccgg

SEQ ID NO: 2333279 - DNA, 25 bp, Homo sapien
agcgcgcgggtcgtcgcggcgcatc

SEQ ID NO: 2333280 - DNA, 25 bp, Homo sapien
gggagcgcgcgggtcgtcgcggcgc

SEQ ID NO: 2333281 - DNA, 25 bp, Homo sapien
ttgctccatctttccgacacacagg

SEQ ID NO: 2333282 - DNA, 25 bp, Homo sapien
gacggtgctcctggctgcgaaagca

SEQ ID NO: 2333283 - DNA, 25 bp, Homo sapien
aagctcgccgcggtgcctcggtgcg

SEQ ID NO: 2333284 - DNA, 25 bp, Homo sapien
aagcagcaggatctcggtcagaggg

SEQ ID NO: 2333285 - DNA, 25 bp, Homo sapien
tccactctccgggccagggcactgg

SEQ ID NO: 2333286 - DNA, 25 bp, Homo sapien
ccgggccagggcactgggcgctcgt

SEQ ID NO: 2333287 - DNA, 25 bp, Homo sapien
gggccagggcactgggcgctcgtac

SEQ ID NO: 2333288 - DNA, 25 bp, Homo sapien
ctccgggccagggcactgggcgctc

SEQ ID NO: 2333289 - DNA, 25 bp, Homo sapien
gcggaagcacgacgccctgggcctc

SEQ ID NO: 2333290 - DNA, 25 bp, Homo sapien
acggggcgcgcggaagcacgacgcc

SEQ ID NO: 2333291 - DNA, 25 bp, Homo sapien
gcgcgcggaagcacgacgccctggg

SEQ ID NO: 2333292 - DNA, 25 bp, Homo sapien
gggcgcgcggaagcacgacgccctg

SEQ ID NO: 2333293 - DNA, 25 bp, Homo sapien
tgctcctcaccatccggggttttcg

SEQ ID NO: 2333294 - DNA, 25 bp, Homo sapien
caccatccggggttttcgcgcttgg

SEQ ID NO: 2333295 - DNA, 25 bp, Homo sapien
catccggggttttcgcgcttggagt

SEQ ID NO: 2333296 - DNA, 25 bp, Homo sapien
ctcaccatccggggttttcgcgctt

SEQ ID NO: 2333297 - DNA, 25 bp, Homo sapien
ggtctaccctccaatcgccactgaa

SEQ ID NO: 2333298 - DNA, 25 bp, Homo sapien
agaaaaagtggcgtgcgtccgtgcc

SEQ ID NO: 2333299 - DNA, 25 bp, Homo sapien
cagagaaaaagtggcgtgcgtccgt

SEQ ID NO: 2333300 - DNA, 25 bp, Homo sapien
tggcgtgcgtccgtgcccacaggtc

SEQ ID NO: 2333301 - DNA, 25 bp, Homo sapien
gtggttacagcaccatcagtaggta

SEQ ID NO: 2333302 - DNA, 25 bp, Homo sapien
ggttacagcaccatcagtaggtaca

SEQ ID NO: 2333303 - DNA, 25 bp, Homo sapien
ggtggttacagcaccatcagtaggt

SEQ ID NO: 2333304 - DNA, 25 bp, Homo sapien
gaggtggttacagcaccatcagtag

SEQ ID NO: 2333305 - DNA, 25 bp, Homo sapien
ttcacagaattgttctcaatgggga

SEQ ID NO: 2333306 - DNA, 25 bp, Homo sapien
acttcacagaattgttctcaatggg

SEQ ID NO: 2333307 - DNA, 25 bp, Homo sapien
tacttcacagaattgttctcaatgg

SEQ ID NO: 2333308 - DNA, 25 bp, Homo sapien
tttacttcacagaattgttctcaat

SEQ ID NO: 2333309 - DNA, 25 bp, Homo sapien
ggctaaagaatggactctctcaaaa

SEQ ID NO: 2333310 - DNA, 25 bp, Homo sapien
gtaaaaatctgtaatggaagccagg

SEQ ID NO: 2333311 - DNA, 25 bp, Homo sapien
aatctgtaatggaagccaggtgcag

SEQ ID NO: 2333312 - DNA, 25 bp, Homo sapien
ctttcaggctaaagaatggactctc

SEQ ID NO: 2333313 - DNA, 25 bp, Homo sapien
ttaataacttcaaaagcaatggctt

SEQ ID NO: 2333314 - DNA, 25 bp, Homo sapien
aataacttcaaaagcaatggctttg

SEQ ID NO: 2333315 - DNA, 25 bp, Homo sapien
taacttcaaaagcaatggctttggt

SEQ ID NO: 2333316 - DNA, 25 bp, Homo sapien
tttaataacttcaaaagcaatggct

SEQ ID NO: 2333317 - DNA, 25 bp, Homo sapien
ataagtgtctttttgtgcaccaaca

SEQ ID NO: 2333318 - DNA, 25 bp, Homo sapien
ttcatagtataagtgtctttttgtg

SEQ ID NO: 2333319 - DNA, 25 bp, Homo sapien
agtgtctttttgtgcaccaacagac

SEQ ID NO: 2333320 - DNA, 25 bp, Homo sapien
tttcatagtataagtgtctttttgt

SEQ ID NO: 2333321 - DNA, 25 bp, Homo sapien
gggatccagggatgcccaagaagtc

SEQ ID NO: 2333322 - DNA, 25 bp, Homo sapien
agaagttcttaacctgggatccagg

SEQ ID NO: 2333323 - DNA, 25 bp, Homo sapien
tagtgcagaagttcttaacctggga

SEQ ID NO: 2333324 - DNA, 25 bp, Homo sapien
tcatgtatctctagtgcagaagttc

SEQ ID NO: 2333325 - DNA, 25 bp, Homo sapien
atcccagaaagatcagtatactgta

SEQ ID NO: 2333326 - DNA, 25 bp, Homo sapien
tcccagaaagatcagtatactgtac

SEQ ID NO: 2333327 - DNA, 25 bp, Homo sapien
tatcccagaaagatcagtatactgt

SEQ ID NO: 2333328 - DNA, 25 bp, Homo sapien
ctatcccagaaagatcagtatactg

SEQ ID NO: 2333329 - DNA, 25 bp, Homo sapien
aggagttccagaccagcctgggcaa

SEQ ID NO: 2333330 - DNA, 25 bp, Homo sapien
tgggcaacatagtgaaactccatct

SEQ ID NO: 2333331 - DNA, 25 bp, Homo sapien
cgaggtaagcagatcccttgagccc

SEQ ID NO: 2333332 - DNA, 25 bp, Homo sapien
ttaggaggccgaggtaagcagatcc

SEQ ID NO: 2333333 - DNA, 25 bp, Homo sapien
tctcatcatataatcgtttagtcat

SEQ ID NO: 2333334 - DNA, 25 bp, Homo sapien
ttctcatcatataatcgtttagtca

SEQ ID NO: 2333335 - DNA, 25 bp, Homo sapien
ctcatcatataatcgtttagtcata

SEQ ID NO: 2333336 - DNA, 25 bp, Homo sapien
agagaagcttggcacgccaaacaaa

SEQ ID NO: 2333337 - DNA, 25 bp, Homo sapien
gcacgccaaacaaatctcctagaag

SEQ ID NO: 2333338 - DNA, 25 bp, Homo sapien
gcttggcacgccaaacaaatctcct

SEQ ID NO: 2333339 - DNA, 25 bp, Homo sapien
gagaagcttggcacgccaaacaaat

SEQ ID NO: 2333340 - DNA, 25 bp, Homo sapien
gttagcccagatggctttttacaat

SEQ ID NO: 2333341 - DNA, 25 bp, Homo sapien
aatgttagcccagatggctttttac

SEQ ID NO: 2333342 - DNA, 25 bp, Homo sapien
gaaatgttagcccagatggcttttt

SEQ ID NO: 2333343 - DNA, 25 bp, Homo sapien
tgttagcccagatggctttttacaa

SEQ ID NO: 2333344 - DNA, 25 bp, Homo sapien
tcaaatgtaagcctttaccacgtgg

SEQ ID NO: 2333345 - DNA, 25 bp, Homo sapien
aaatgatctccaaaataactaaggc

SEQ ID NO: 2333346 - DNA, 25 bp, Homo sapien
aataactaaggctcaaatgtaagcc

SEQ ID NO: 2333347 - DNA, 25 bp, Homo sapien
tccaaaataactaaggctcaaatgt

SEQ ID NO: 2333348 - DNA, 25 bp, Homo sapien
caaagaattccaaatgtaggccggg

SEQ ID NO: 2333349 - DNA, 25 bp, Homo sapien
ttaatgtaatgaatgctaaggctca

SEQ ID NO: 2333350 - DNA, 25 bp, Homo sapien
tcaacacggattgcctgtgctaaac

SEQ ID NO: 2333351 - DNA, 25 bp, Homo sapien
tgagcattaaatactagcagaagct

SEQ ID NO: 2333352 - DNA, 25 bp, Homo sapien
ttctaggaactaaacaagctcctga

SEQ ID NO: 2333353 - DNA, 25 bp, Homo sapien
aaatctgaatatggaatagaggaag

SEQ ID NO: 2333354 - DNA, 25 bp, Homo sapien
ggagtggtcaattcattctaggaac

SEQ ID NO: 2333355 - DNA, 25 bp, Homo sapien
ggaagtacaagggagtggtcaattc

SEQ ID NO: 2333356 - DNA, 25 bp, Homo sapien
tggattagtataaacagatgctaca

SEQ ID NO: 2333357 - DNA, 25 bp, Homo sapien
agatgtaataaaaaggaagccctag

SEQ ID NO: 2333358 - DNA, 25 bp, Homo sapien
ggagttctgaagttaattctactga

SEQ ID NO: 2333359 - DNA, 25 bp, Homo sapien
tatactatgggtaaggcattacact

SEQ ID NO: 2333360 - DNA, 25 bp, Homo sapien
tccttaatgcgatgttgcagccact

SEQ ID NO: 2333361 - DNA, 25 bp, Homo sapien
taaaggatcctgtggtctagccaaa

SEQ ID NO: 2333362 - DNA, 25 bp, Homo sapien
gagttattcaggcacataggtttca

SEQ ID NO: 2333363 - DNA, 25 bp, Homo sapien
tgttgcaggacaccacaagcagttc

SEQ ID NO: 2333364 - DNA, 25 bp, Homo sapien
cacaaacccttatgcaatttaacct

SEQ ID NO: 2333365 - DNA, 25 bp, Homo sapien
gggcgctactcagtagatatgctat

SEQ ID NO: 2333366 - DNA, 25 bp, Homo sapien
aaaaggatcagaaacttggtggtgg

SEQ ID NO: 2333367 - DNA, 25 bp, Homo sapien
tatgctatcagtctaacacaaaccc

SEQ ID NO: 2333368 - DNA, 25 bp, Homo sapien
tcacagatgtacctgagtccgatga

SEQ ID NO: 2333369 - DNA, 25 bp, Homo sapien
cacagatgtacctgagtccgatgat

SEQ ID NO: 2333370 - DNA, 25 bp, Homo sapien
acagatgtacctgagtccgatgatt

SEQ ID NO: 2333371 - DNA, 25 bp, Homo sapien
ccaccttcaaggtgacacctgttct

SEQ ID NO: 2333372 - DNA, 25 bp, Homo sapien
ctcccaccttcaaggtgacacctgt

SEQ ID NO: 2333373 - DNA, 25 bp, Homo sapien
accttcaaggtgacacctgttctca

SEQ ID NO: 2333374 - DNA, 25 bp, Homo sapien
ccttcaaggtgacacctgttctcac

SEQ ID NO: 2333375 - DNA, 25 bp, Homo sapien
taacataaccagtaagctaacttgt

SEQ ID NO: 2333376 - DNA, 25 bp, Homo sapien
taaccagtaagctaacttgttgtaa

SEQ ID NO: 2333377 - DNA, 25 bp, Homo sapien
ccagtaagctaacttgttgtaaata

SEQ ID NO: 2333378 - DNA, 25 bp, Homo sapien
cataaccagtaagctaacttgttgt

SEQ ID NO: 2333379 - DNA, 25 bp, Homo sapien
cttctagatgaggtagatggtctag

SEQ ID NO: 2333380 - DNA, 25 bp, Homo sapien
cactaattgctctccttctagatga

SEQ ID NO: 2333381 - DNA, 25 bp, Homo sapien
tgtctcactaattgctctccttcta

SEQ ID NO: 2333382 - DNA, 25 bp, Homo sapien
tagatggtctagaaaccaaatgtga

SEQ ID NO: 2333383 - DNA, 25 bp, Homo sapien
aaagcactaatttcattagagaaag

SEQ ID NO: 2333384 - DNA, 25 bp, Homo sapien
aagctgtgtgaatgcgtcaaataaa

SEQ ID NO: 2333385 - DNA, 25 bp, Homo sapien
ctgtgtgaatgcgtcaaataaatat

SEQ ID NO: 2333386 - DNA, 25 bp, Homo sapien
attaagtctaaaagcactaatttca

SEQ ID NO: 2333387 - DNA, 25 bp, Homo sapien
ggcaacagccttctcgtctactacg

SEQ ID NO: 2333388 - DNA, 25 bp, Homo sapien
tctgcccgcatgtacgagattctgg

SEQ ID NO: 2333389 - DNA, 25 bp, Homo sapien
tagttactgcgacttcctcaggcaa

SEQ ID NO: 2333390 - DNA, 25 bp, Homo sapien
tttggcataaggtacagatctaact

SEQ ID NO: 2333391 - DNA, 25 bp, Homo sapien
tttgatagatcaaaaggacaccctt

SEQ ID NO: 2333392 - DNA, 25 bp, Homo sapien
cagtttatcagtgctaatacacaag

SEQ ID NO: 2333393 - DNA, 25 bp, Homo sapien
ccaggccatctaagcttttttataa

SEQ ID NO: 2333394 - DNA, 25 bp, Homo sapien
ttattagcactgatgagtaaggatg

SEQ ID NO: 2333395 - DNA, 25 bp, Homo sapien
tacaggtgcccaccactgtgcccgg

SEQ ID NO: 2333396 - DNA, 25 bp, Homo sapien
acaggtgcccaccactgtgcccggc

SEQ ID NO: 2333397 - DNA, 25 bp, Homo sapien
tcacaatttaatctatctaataaag

SEQ ID NO: 2333398 - DNA, 25 bp, Homo sapien
catcacaatttaatctatctaataa

SEQ ID NO: 2333399 - DNA, 25 bp, Homo sapien
actcatatggtattcttaatgtttc

SEQ ID NO: 2333400 - DNA, 25 bp, Homo sapien
taatttactcatatggtattcttaa

SEQ ID NO: 2333401 - DNA, 25 bp, Homo sapien
actatcagatttgtggcgttttctt

SEQ ID NO: 2333402 - DNA, 25 bp, Homo sapien
gtggcgttttctttgtcgttcacca

SEQ ID NO: 2333403 - DNA, 25 bp, Homo sapien
tctttgtcgttcaccagataattca

SEQ ID NO: 2333404 - DNA, 25 bp, Homo sapien
gtcgttcaccagataattcatctga

SEQ ID NO: 2333405 - DNA, 25 bp, Homo sapien
caacatatctcccttattacacaca

SEQ ID NO: 2333406 - DNA, 25 bp, Homo sapien
tggcgtccctgtagattcactgcta

SEQ ID NO: 2333407 - DNA, 25 bp, Homo sapien
cttattacacacagagccaggcttt

SEQ ID NO: 2333408 - DNA, 25 bp, Homo sapien
cactgctactgcttctttcacaaca

SEQ ID NO: 2333409 - DNA, 25 bp, Homo sapien
gaacttacctgatgtctagacctat

SEQ ID NO: 2333410 - DNA, 25 bp, Homo sapien
ggactgccaggactagactttgaac

SEQ ID NO: 2333411 - DNA, 25 bp, Homo sapien
tccgtatccttattaggactgccag

SEQ ID NO: 2333412 - DNA, 25 bp, Homo sapien
gactgtactattggtgcagtggtcc

SEQ ID NO: 2333413 - DNA, 25 bp, Homo sapien
actgcatggtgtacagtctagaaca

SEQ ID NO: 2333414 - DNA, 25 bp, Homo sapien
gaacacagtcttagtttcccacaat

SEQ ID NO: 2333415 - DNA, 25 bp, Homo sapien
ccccagtcttagctaaaaatggaat

SEQ ID NO: 2333416 - DNA, 25 bp, Homo sapien
taagcatcagataggcttgctctgc

SEQ ID NO: 2333417 - DNA, 25 bp, Homo sapien
gcaccagacctaaatactatatatt

SEQ ID NO: 2333418 - DNA, 25 bp, Homo sapien
agaatcacataagcccagcggtttg

SEQ ID NO: 2333419 - DNA, 25 bp, Homo sapien
actgcaccagacctaaatactatat

SEQ ID NO: 2333420 - DNA, 25 bp, Homo sapien
ggagaatcacataagcccagcggtt

SEQ ID NO: 2333421 - DNA, 25 bp, Homo sapien
ccaaagcctcttggcatcgaaagta

SEQ ID NO: 2333422 - DNA, 25 bp, Homo sapien
tgttcaaaaccccactgcataaagg

SEQ ID NO: 2333423 - DNA, 25 bp, Homo sapien
tgatccgggacttcccgagggagat

SEQ ID NO: 2333424 - DNA, 25 bp, Homo sapien
tcgaaagtacctacagtgtgactgt

SEQ ID NO: 2333425 - DNA, 25 bp, Homo sapien
cttctgagtcgagagattcaacttc

SEQ ID NO: 2333426 - DNA, 25 bp, Homo sapien
tacactaaactgatctgaaactgaa

SEQ ID NO: 2333427 - DNA, 25 bp, Homo sapien
ggctataatcttctgagtcgagaga

SEQ ID NO: 2333428 - DNA, 25 bp, Homo sapien
tcttcactaaggctataatcttctg

SEQ ID NO: 2333429 - DNA, 25 bp, Homo sapien
tcactctcccctgcctgatacacag

SEQ ID NO: 2333430 - DNA, 25 bp, Homo sapien
agctaaggaaatttcaggatcttct

SEQ ID NO: 2333431 - DNA, 25 bp, Homo sapien
cctgatacacagtaacttgatatac

SEQ ID NO: 2333432 - DNA, 25 bp, Homo sapien
atgaatctgtatcactctcccctgc

SEQ ID NO: 2333433 - DNA, 25 bp, Homo sapien
gaagccaattctcacgaagggccca

SEQ ID NO: 2333434 - DNA, 25 bp, Homo sapien
tcttcaggaagccaattctcacgaa

SEQ ID NO: 2333435 - DNA, 25 bp, Homo sapien
gaagggggggattcatttcattgca

SEQ ID NO: 2333436 - DNA, 25 bp, Homo sapien
ccaattctcacgaagggcccaacat

SEQ ID NO: 2333437 - DNA, 25 bp, Homo sapien
attgtgaagcttgtgtaattttatc

SEQ ID NO: 2333438 - DNA, 25 bp, Homo sapien
gactctctggaatcattcactatag

SEQ ID NO: 2333439 - DNA, 25 bp, Homo sapien
tcattttcctcaacacatgactctc

SEQ ID NO: 2333440 - DNA, 25 bp, Homo sapien
ctcaacacatgactctctggaatca

SEQ ID NO: 2333441 - DNA, 25 bp, Homo sapien
tgctactagaagttgatggctgaga

SEQ ID NO: 2333442 - DNA, 25 bp, Homo sapien
ggcaaactagattccacactctctt

SEQ ID NO: 2333443 - DNA, 25 bp, Homo sapien
tcaatggcattaaggggcaaactag

SEQ ID NO: 2333444 - DNA, 25 bp, Homo sapien
ttaaggggcaaactagattccacac

SEQ ID NO: 2333445 - DNA, 25 bp, Homo sapien
ttcaatggcattaaggggcaaacta

SEQ ID NO: 2333446 - DNA, 25 bp, Homo sapien
atgcaaccatttttaggtcgacctt

SEQ ID NO: 2333447 - DNA, 25 bp, Homo sapien
ggacaatgcaaccatttttaggtcg

SEQ ID NO: 2333448 - DNA, 25 bp, Homo sapien
gcaaccatttttaggtcgaccttga

SEQ ID NO: 2333449 - DNA, 25 bp, Homo sapien
caatgcaaccatttttaggtcgacc

SEQ ID NO: 2333450 - DNA, 25 bp, Homo sapien
tcctagggttatatagttagaaata

SEQ ID NO: 2333451 - DNA, 25 bp, Homo sapien
cctagggttatatagttagaaatat

SEQ ID NO: 2333452 - DNA, 25 bp, Homo sapien
aagtgacatttaggccggacgcggt

SEQ ID NO: 2333453 - DNA, 25 bp, Homo sapien
gcggagactgctagatcatgacact

SEQ ID NO: 2333454 - DNA, 25 bp, Homo sapien
caaaagtctgaaacctaggctggga

SEQ ID NO: 2333455 - DNA, 25 bp, Homo sapien
tcaaaaatctgaggccaggtgcctc

SEQ ID NO: 2333456 - DNA, 25 bp, Homo sapien
tcagtgctgagctcggatgggcctc

SEQ ID NO: 2333457 - DNA, 25 bp, Homo sapien
agtgctgagctcggatgggcctcca

SEQ ID NO: 2333458 - DNA, 25 bp, Homo sapien
cagtgctgagctcggatgggcctcc

SEQ ID NO: 2333459 - DNA, 25 bp, Homo sapien
ttagaggttctaagtctccaaagga

SEQ ID NO: 2333460 - DNA, 25 bp, Homo sapien
tgagatttttaggaaacctctgcca

SEQ ID NO: 2333461 - DNA, 25 bp, Homo sapien
tcttgcagatatttgacaggcttgt

SEQ ID NO: 2333462 - DNA, 25 bp, Homo sapien
tgtaatcacctttcatcggagtgac

SEQ ID NO: 2333463 - DNA, 25 bp, Homo sapien
tgttctaccaggaatgacaagttag

SEQ ID NO: 2333464 - DNA, 25 bp, Homo sapien
tcaggcaaaccttattcggctctca

SEQ ID NO: 2333465 - DNA, 25 bp, Homo sapien
caaaaggcactgagataacatctgc

SEQ ID NO: 2333466 - DNA, 25 bp, Homo sapien
tgctaggctcgaaaaataaagcttg

SEQ ID NO: 2333467 - DNA, 25 bp, Homo sapien
cagtttgagagatacttatattaga

SEQ ID NO: 2333468 - DNA, 25 bp, Homo sapien
gaagttaatccacagtttgagagat

SEQ ID NO: 2333469 - DNA, 25 bp, Homo sapien
tcagtgtaattagcacacccatcag

SEQ ID NO: 2333470 - DNA, 25 bp, Homo sapien
gtatatacaattcacatatgggaga

SEQ ID NO: 2333471 - DNA, 25 bp, Homo sapien
gcaacaatgtaccattagtaaagtt

SEQ ID NO: 2333472 - DNA, 25 bp, Homo sapien
taccattagtaaagttgctgtgcag

SEQ ID NO: 2333473 - DNA, 25 bp, Homo sapien
tgctgtgcagaattacctcagtcct

SEQ ID NO: 2333474 - DNA, 25 bp, Homo sapien
gaattacctcagtcctattctaagc

SEQ ID NO: 2333475 - DNA, 25 bp, Homo sapien
tccaaaaaaaagagattctgcttgg

SEQ ID NO: 2333476 - DNA, 25 bp, Homo sapien
ctgcttggttgtagctgaagtatta

SEQ ID NO: 2333477 - DNA, 25 bp, Homo sapien
tcaactccaaataatgcttggagga

SEQ ID NO: 2333478 - DNA, 25 bp, Homo sapien
caactccaaataatgcttggaggac

SEQ ID NO: 2333479 - DNA, 25 bp, Homo sapien
tccaaattgaagctgaagtattatc

SEQ ID NO: 2333480 - DNA, 25 bp, Homo sapien
gattctactaggttctagctgaaat

SEQ ID NO: 2333481 - DNA, 25 bp, Homo sapien
atcaactccaaattgaagctgaagt

SEQ ID NO: 2333482 - DNA, 25 bp, Homo sapien
caactccaaattgaagctgaagtat

SEQ ID NO: 2333483 - DNA, 25 bp, Homo sapien
tgtcactgcctccatatatcaagtg

SEQ ID NO: 2333484 - DNA, 25 bp, Homo sapien
tcaacacgtgtactataaagaacct

SEQ ID NO: 2333485 - DNA, 25 bp, Homo sapien
taaacatgttgaatccatttgcaga

SEQ ID NO: 2333486 - DNA, 25 bp, Homo sapien
ttatgctaccgatactcctcagaaa

SEQ ID NO: 2333487 - DNA, 25 bp, Homo sapien
agaaccacttgaacacagccaggag

SEQ ID NO: 2333488 - DNA, 25 bp, Homo sapien
tataatgccaaaagctagtccccgt

SEQ ID NO: 2333489 - DNA, 25 bp, Homo sapien
acaagtggtacggtggctagcccaa

SEQ ID NO: 2333490 - DNA, 25 bp, Homo sapien
aagttgctctcattggaggctccca

SEQ ID NO: 2333491 - DNA, 25 bp, Homo sapien
gaagcctcttaagcagaagttccct

SEQ ID NO: 2333492 - DNA, 25 bp, Homo sapien
taaatgagacattgctgagtaggaa

SEQ ID NO: 2333493 - DNA, 25 bp, Homo sapien
cataggacagaggatgggctcaagc

SEQ ID NO: 2333494 - DNA, 25 bp, Homo sapien
aagaatttgcctccagtaggaactg

SEQ ID NO: 2333495 - DNA, 25 bp, Homo sapien
tgagagttaccctgtattagaccgt

SEQ ID NO: 2333496 - DNA, 25 bp, Homo sapien
tactgaaccttgaattgatcctaag

SEQ ID NO: 2333497 - DNA, 25 bp, Homo sapien
gctcactatgaacgctgacagaaga

SEQ ID NO: 2333498 - DNA, 25 bp, Homo sapien
tcttaatgcgtaggcaacctcccag

SEQ ID NO: 2333499 - DNA, 25 bp, Homo sapien
gagctgtttgtgtcccctgtatctg

SEQ ID NO: 2333500 - DNA, 25 bp, Homo sapien
gctgcaacagcttactggtcccttg

SEQ ID NO: 2333501 - DNA, 25 bp, Homo sapien
gagttgaggcctcatatctcacctg

SEQ ID NO: 2333502 - DNA, 25 bp, Homo sapien
tggttgtagttcataaacacagagc

SEQ ID NO: 2333503 - DNA, 25 bp, Homo sapien
tccattaggctgatgactccaaaga

SEQ ID NO: 2333504 - DNA, 25 bp, Homo sapien
tgccacagtcctccattaggctgat

SEQ ID NO: 2333505 - DNA, 25 bp, Homo sapien
gatgtaactctagcctcttgcctga

SEQ ID NO: 2333506 - DNA, 25 bp, Homo sapien
tcttgcctgagcttcagactcgcgt

SEQ ID NO: 2333507 - DNA, 25 bp, Homo sapien
ggagaaatgatcataggactgggaa

SEQ ID NO: 2333508 - DNA, 25 bp, Homo sapien
aacacctcaccatgagtgctacatg

SEQ ID NO: 2333509 - DNA, 25 bp, Homo sapien
caaacgttctaggagatgtgagaga

SEQ ID NO: 2333510 - DNA, 25 bp, Homo sapien
tgtaaccacatcttagtggcccaag

SEQ ID NO: 2333511 - DNA, 25 bp, Homo sapien
tgacggtgaatggaagacacttacc

SEQ ID NO: 2333512 - DNA, 25 bp, Homo sapien
gatcattttgtatacagagaaccgg

SEQ ID NO: 2333513 - DNA, 25 bp, Homo sapien
caagtactgctcatttacactcaaa

SEQ ID NO: 2333514 - DNA, 25 bp, Homo sapien
tacaagacttcaccataaggccagg

SEQ ID NO: 2333515 - DNA, 25 bp, Homo sapien
ctgccccacgaaaaggatggtggca

SEQ ID NO: 2333516 - DNA, 25 bp, Homo sapien
tcttgacttacattgccagatgagg

SEQ ID NO: 2333517 - DNA, 25 bp, Homo sapien
ttacattgccagatgaggtacccat

SEQ ID NO: 2333518 - DNA, 25 bp, Homo sapien
gaaaaggatggtggcagaaacatct

SEQ ID NO: 2333519 - DNA, 25 bp, Homo sapien
aaatgtcttgcttgtcccggtctct

SEQ ID NO: 2333520 - DNA, 25 bp, Homo sapien
acacggtgttacctgcctgctgcgg

SEQ ID NO: 2333521 - DNA, 25 bp, Homo sapien
ctgtctttcccctggactcctcaaa

SEQ ID NO: 2333522 - DNA, 25 bp, Homo sapien
cccggtctctgaggagaagcaaaga

SEQ ID NO: 2333523 - DNA, 25 bp, Homo sapien
cagtgagtggtagtctatttgacct

SEQ ID NO: 2333524 - DNA, 25 bp, Homo sapien
tgacctgatgtgcagatcttctggc

SEQ ID NO: 2333525 - DNA, 25 bp, Homo sapien
aaggacatgttctctcaaaatagcc

SEQ ID NO: 2333526 - DNA, 25 bp, Homo sapien
tctttttaacttcagtgagtggtag

SEQ ID NO: 2333527 - DNA, 25 bp, Homo sapien
agcaaaaaccagaaagcctattaga

SEQ ID NO: 2333528 - DNA, 25 bp, Homo sapien
aaaccagaaagcctattagacaaat

SEQ ID NO: 2333529 - DNA, 25 bp, Homo sapien
cagaaagcctattagacaaatttta

SEQ ID NO: 2333530 - DNA, 25 bp, Homo sapien
ccagcaaaaaccagaaagcctatta

SEQ ID NO: 2333531 - DNA, 25 bp, Homo sapien
ctttgcaagaataaaccgaggatgt

SEQ ID NO: 2333532 - DNA, 25 bp, Homo sapien
gctctctggggttgccaaggagttt

SEQ ID NO: 2333533 - DNA, 25 bp, Homo sapien
taaaccgaggatgtgccctctgcag

SEQ ID NO: 2333534 - DNA, 25 bp, Homo sapien
caagaataaaccgaggatgtgccct

SEQ ID NO: 2333535 - DNA, 25 bp, Homo sapien
taccagcagtgagtagcctgaagtc

SEQ ID NO: 2333536 - DNA, 25 bp, Homo sapien
gatatcttgttgcatactgaggtca

SEQ ID NO: 2333537 - DNA, 25 bp, Homo sapien
gaataaaggttccactaccagcagt

SEQ ID NO: 2333538 - DNA, 25 bp, Homo sapien
ttttacactgggtttccgcatggga

SEQ ID NO: 2333539 - DNA, 25 bp, Homo sapien
tgtttccataggacattctgttcgc

SEQ ID NO: 2333540 - DNA, 25 bp, Homo sapien
cataggacattctgttcgctgtcct

SEQ ID NO: 2333541 - DNA, 25 bp, Homo sapien
tttccataggacattctgttcgctg

SEQ ID NO: 2333542 - DNA, 25 bp, Homo sapien
aggacattctgttcgctgtccttgg

SEQ ID NO: 2333543 - DNA, 25 bp, Homo sapien
tcatgtgaagaaggccttttttccc

SEQ ID NO: 2333544 - DNA, 25 bp, Homo sapien
ccccaagagttaagcaggggccagg

SEQ ID NO: 2333545 - DNA, 25 bp, Homo sapien
agggatcatgtgaagaaggcctttt

SEQ ID NO: 2333546 - DNA, 25 bp, Homo sapien
caaggcaggccgattgcttaaggcc

SEQ ID NO: 2333547 - DNA, 25 bp, Homo sapien
ctttgtcaagctcaactggagggct

SEQ ID NO: 2333548 - DNA, 25 bp, Homo sapien
gtcaagctcaactggagggcttaat

SEQ ID NO: 2333549 - DNA, 25 bp, Homo sapien
agctcaactggagggcttaatctcc

SEQ ID NO: 2333550 - DNA, 25 bp, Homo sapien
caagctcaactggagggcttaatct

SEQ ID NO: 2333551 - DNA, 25 bp, Homo sapien
gcaggagtctagcaagactttttac

SEQ ID NO: 2333552 - DNA, 25 bp, Homo sapien
aaatggcaactgaaccaaaagatgc

SEQ ID NO: 2333553 - DNA, 25 bp, Homo sapien
ggttgtgtggcagcaataaatggca

SEQ ID NO: 2333554 - DNA, 25 bp, Homo sapien
ttttacttctggagcaatttcaggc

SEQ ID NO: 2333555 - DNA, 25 bp, Homo sapien
cgaatgaagatataccttagtggta

SEQ ID NO: 2333556 - DNA, 25 bp, Homo sapien
tttttcaataccctgttggcgcgca

SEQ ID NO: 2333557 - DNA, 25 bp, Homo sapien
cgcgcattgggcgaatgaagatata

SEQ ID NO: 2333558 - DNA, 25 bp, Homo sapien
ccttagtggtatatcttcttgaagc

SEQ ID NO: 2333559 - DNA, 25 bp, Homo sapien
tctggccaagtactctcaatgccag

SEQ ID NO: 2333560 - DNA, 25 bp, Homo sapien
ctctcaatgccagaacaaagtaacc

SEQ ID NO: 2333561 - DNA, 25 bp, Homo sapien
tttctctggccaagtactctcaatg

SEQ ID NO: 2333562 - DNA, 25 bp, Homo sapien
tcaatgccagaacaaagtaacctca

SEQ ID NO: 2333563 - DNA, 25 bp, Homo sapien
ctgtgaagaaactcaggcgggcatc

SEQ ID NO: 2333564 - DNA, 25 bp, Homo sapien
aagaaactcaggcgggcatcaaaga

SEQ ID NO: 2333565 - DNA, 25 bp, Homo sapien
aaactcaggcgggcatcaaagacat

SEQ ID NO: 2333566 - DNA, 25 bp, Homo sapien
tgaagaaactcaggcgggcatcaaa

SEQ ID NO: 2333567 - DNA, 25 bp, Homo sapien
caacagagctcaagcctcatgttct

SEQ ID NO: 2333568 - DNA, 25 bp, Homo sapien
tgtaacataggcaacagagctcaag

SEQ ID NO: 2333569 - DNA, 25 bp, Homo sapien
agataggccagggtgtaacataggc

SEQ ID NO: 2333570 - DNA, 25 bp, Homo sapien
cagggtgtaacataggcaacagagc

SEQ ID NO: 2333571 - DNA, 25 bp, Homo sapien
caaagacaggataaaggccgaggag

SEQ ID NO: 2333572 - DNA, 25 bp, Homo sapien
ccgaggagggtgtttgtgcccttat

SEQ ID NO: 2333573 - DNA, 25 bp, Homo sapien
ctgctgattgtctggtgatggcgtc

SEQ ID NO: 2333574 - DNA, 25 bp, Homo sapien
ccattgttcataggacttgtgagag

SEQ ID NO: 2333575 - DNA, 25 bp, Homo sapien
gtctataatatgctccacatggatc

SEQ ID NO: 2333576 - DNA, 25 bp, Homo sapien
atctctggcttcagacatcccctct

SEQ ID NO: 2333577 - DNA, 25 bp, Homo sapien
aatatgctccacatggatctctggc

SEQ ID NO: 2333578 - DNA, 25 bp, Homo sapien
ctaagtctataatatgctccacatg

SEQ ID NO: 2333579 - DNA, 25 bp, Homo sapien
caggtgatgccggatcaccttctcc

SEQ ID NO: 2333580 - DNA, 25 bp, Homo sapien
aggcttttcaggtgatgccggatca

SEQ ID NO: 2333581 - DNA, 25 bp, Homo sapien
ggccttgcagtcgtggtcaaaccca

SEQ ID NO: 2333582 - DNA, 25 bp, Homo sapien
gcagtcgtggtcaaacccatgggct

SEQ ID NO: 2333583 - DNA, 25 bp, Homo sapien
agtgcgtctgaatcatgctctgtgc

SEQ ID NO: 2333584 - DNA, 25 bp, Homo sapien
tctgtcctgcattggatcagggagg

SEQ ID NO: 2333585 - DNA, 25 bp, Homo sapien
cctttcatcatcagtacagtctgtc

SEQ ID NO: 2333586 - DNA, 25 bp, Homo sapien
ttgggtcctgactcggcagtgcgtc

SEQ ID NO: 2333587 - DNA, 25 bp, Homo sapien
gggatatgtagaaatgtggtgacat

SEQ ID NO: 2333588 - DNA, 25 bp, Homo sapien
ggtcctgttgttgtcaagttcagac

SEQ ID NO: 2333589 - DNA, 25 bp, Homo sapien
gtggtgacatgaagtcttccccttt

SEQ ID NO: 2333590 - DNA, 25 bp, Homo sapien
gaaggattctgcctccttgatggtc

SEQ ID NO: 2333591 - DNA, 25 bp, Homo sapien
gtaatgtgtaaggattgttctgtgt

SEQ ID NO: 2333592 - DNA, 25 bp, Homo sapien
aaagttggaaaatcacggtaatgtg

SEQ ID NO: 2333593 - DNA, 25 bp, Homo sapien
aaatcacggtaatgtgtaaggattg

SEQ ID NO: 2333594 - DNA, 25 bp, Homo sapien
ggaaaatcacggtaatgtgtaagga

SEQ ID NO: 2333595 - DNA, 25 bp, Homo sapien
gacatgccgacagcataccttttat

SEQ ID NO: 2333596 - DNA, 25 bp, Homo sapien
tgtgcagtgctagatgacatgccga

SEQ ID NO: 2333597 - DNA, 25 bp, Homo sapien
gaggtcactcctttgataatctggt

SEQ ID NO: 2333598 - DNA, 25 bp, Homo sapien
ctggtttgagtcagcagtgtgcagt

SEQ ID NO: 2333599 - DNA, 25 bp, Homo sapien
gcttgctcataagtgctggccatga

SEQ ID NO: 2333600 - DNA, 25 bp, Homo sapien
ccatgaagaaagtgctcggaaggca

SEQ ID NO: 2333601 - DNA, 25 bp, Homo sapien
gacgtttaccgttgatcatttcacc

SEQ ID NO: 2333602 - DNA, 25 bp, Homo sapien
agttaaacacaccaggcttgctcat

SEQ ID NO: 2333603 - DNA, 25 bp, Homo sapien
gctttacataccctgaatgtcgtcc

SEQ ID NO: 2333604 - DNA, 25 bp, Homo sapien
cagttctccagaaccgtccttttag

SEQ ID NO: 2333605 - DNA, 25 bp, Homo sapien
tcaaccccacgaaacagggcagttc

SEQ ID NO: 2333606 - DNA, 25 bp, Homo sapien
tggaccaggtctacagctttacata

SEQ ID NO: 2333607 - DNA, 25 bp, Homo sapien
gattccctcagtaaatgatgagcta

SEQ ID NO: 2333608 - DNA, 25 bp, Homo sapien
gaaagttcattatcttgtgcagtcc

SEQ ID NO: 2333609 - DNA, 25 bp, Homo sapien
ttcacgaaaatgctagagacttcag

SEQ ID NO: 2333610 - DNA, 25 bp, Homo sapien
ttatgcccatgtaaataatcaggcc

SEQ ID NO: 2333611 - DNA, 25 bp, Homo sapien
tcgtagctgaagaacgccttgtgca

SEQ ID NO: 2333612 - DNA, 25 bp, Homo sapien
ctttcgtagctgaagaacgccttgt

SEQ ID NO: 2333613 - DNA, 25 bp, Homo sapien
ccttgtgcaatgacctgtgccacag

SEQ ID NO: 2333614 - DNA, 25 bp, Homo sapien
gctgaagaacgccttgtgcaatgac

SEQ ID NO: 2333615 - DNA, 25 bp, Homo sapien
ttaaaagcgcacatccacttcagct

SEQ ID NO: 2333616 - DNA, 25 bp, Homo sapien
aaagcgcacatccacttcagctgac

SEQ ID NO: 2333617 - DNA, 25 bp, Homo sapien
taaaagcgcacatccacttcagctg

SEQ ID NO: 2333618 - DNA, 25 bp, Homo sapien
aaaagcgcacatccacttcagctga

SEQ ID NO: 2333619 - DNA, 25 bp, Homo sapien
tgtgaaggctactacctgatatttc

SEQ ID NO: 2333620 - DNA, 25 bp, Homo sapien
ttatgtttagtgtgaagaatggagg

SEQ ID NO: 2333621 - DNA, 25 bp, Homo sapien
aagatgtgaaggctactacctgata

SEQ ID NO: 2333622 - DNA, 25 bp, Homo sapien
aggctactacctgatatttcttggt

SEQ ID NO: 2333623 - DNA, 25 bp, Homo sapien
tttggcatcccaaacgacataggaa

SEQ ID NO: 2333624 - DNA, 25 bp, Homo sapien
aatatgtagaagcttgccctttggc

SEQ ID NO: 2333625 - DNA, 25 bp, Homo sapien
gagtgattgtcacaaagggcctata

SEQ ID NO: 2333626 - DNA, 25 bp, Homo sapien
aaagttctctgggtgccgcttccca

SEQ ID NO: 2333627 - DNA, 25 bp, Homo sapien
cataggcatgcaagttgagaatgca

SEQ ID NO: 2333628 - DNA, 25 bp, Homo sapien
gaagagacagatgacataggcatgc

SEQ ID NO: 2333629 - DNA, 25 bp, Homo sapien
ggaactgaatcctgaatgttgcctt

SEQ ID NO: 2333630 - DNA, 25 bp, Homo sapien
ctcatggagtgaatagaagctttct

SEQ ID NO: 2333631 - DNA, 25 bp, Homo sapien
gctgctgctggcgatgacgaacagt

SEQ ID NO: 2333632 - DNA, 25 bp, Homo sapien
tgccagctgccgtcatgtacccatt

SEQ ID NO: 2333633 - DNA, 25 bp, Homo sapien
gctgccgtcatgtacccattcaatg

SEQ ID NO: 2333634 - DNA, 25 bp, Homo sapien
ggcgatgacgaacagtaatgccagc

SEQ ID NO: 2333635 - DNA, 25 bp, Homo sapien
tcatgtccacaccagccatatccat

SEQ ID NO: 2333636 - DNA, 25 bp, Homo sapien
atcatgtccacaccagccatatcca

SEQ ID NO: 2333637 - DNA, 25 bp, Homo sapien
tggcagatgcgggttttgtttcttt

SEQ ID NO: 2333638 - DNA, 25 bp, Homo sapien
cagttgtgtttcatattattccaga

SEQ ID NO: 2333639 - DNA, 25 bp, Homo sapien
caatttgtcaatcgtttcatgtatc

SEQ ID NO: 2333640 - DNA, 25 bp, Homo sapien
acttcattgtattcaccgaccttta

SEQ ID NO: 2333641 - DNA, 25 bp, Homo sapien
tcaaaagcatgatgagctcccatgt

SEQ ID NO: 2333642 - DNA, 25 bp, Homo sapien
tttctccagtgtcgtagagagtgcc

SEQ ID NO: 2333643 - DNA, 25 bp, Homo sapien
cctttccttggtggtactcaaacat

SEQ ID NO: 2333644 - DNA, 25 bp, Homo sapien
tgtcctttccttggtggtactcaaa

SEQ ID NO: 2333645 - DNA, 25 bp, Homo sapien
gagtgccgtcagaaccctttctgtc

SEQ ID NO: 2333646 - DNA, 25 bp, Homo sapien
gcagtgaccgatagcctccgatatt

SEQ ID NO: 2333647 - DNA, 25 bp, Homo sapien
tcttatcagcagtgaccgatagcct

SEQ ID NO: 2333648 - DNA, 25 bp, Homo sapien
aataaattcttatcagcagtgaccg

SEQ ID NO: 2333649 - DNA, 25 bp, Homo sapien
gatagcctccgatatttgacccagc

SEQ ID NO: 2333650 - DNA, 25 bp, Homo sapien
tcctgggagtcggacaatgaacccg

SEQ ID NO: 2333651 - DNA, 25 bp, Homo sapien
gagtcggacaatgaacccggcacat

SEQ ID NO: 2333652 - DNA, 25 bp, Homo sapien
cacatgtcagcactagcaggtctgt

SEQ ID NO: 2333653 - DNA, 25 bp, Homo sapien
aacccggcacatgtcagcactagca

SEQ ID NO: 2333654 - DNA, 25 bp, Homo sapien
gatgttggccagctaacagtttcca

SEQ ID NO: 2333655 - DNA, 25 bp, Homo sapien
cctggtgtctggctaccctcaaata

SEQ ID NO: 2333656 - DNA, 25 bp, Homo sapien
tggctaccctcaaatattgctgaac

SEQ ID NO: 2333657 - DNA, 25 bp, Homo sapien
gacatattggaaccacttgtctgtg

SEQ ID NO: 2333658 - DNA, 25 bp, Homo sapien
catggcccaattatgtccttggctt

SEQ ID NO: 2333659 - DNA, 25 bp, Homo sapien
atggcccaattatgtccttggcttt

SEQ ID NO: 2333660 - DNA, 25 bp, Homo sapien
cagtagaggaaggagagaaaggagg

SEQ ID NO: 2333661 - DNA, 25 bp, Homo sapien
gggtcagtagaggaaggagagaaag

SEQ ID NO: 2333662 - DNA, 25 bp, Homo sapien
ctgggtcagtagaggaaggagagaa

SEQ ID NO: 2333663 - DNA, 25 bp, Homo sapien
gtcagtagaggaaggagagaaagga

SEQ ID NO: 2333664 - DNA, 25 bp, Homo sapien
cccaggaagtgccatgacaagattc

SEQ ID NO: 2333665 - DNA, 25 bp, Homo sapien
cctcacacaactctgaagcccaaac

SEQ ID NO: 2333666 - DNA, 25 bp, Homo sapien
ctccctcacacaactctgaagccca

SEQ ID NO: 2333667 - DNA, 25 bp, Homo sapien
aatcaagcttgtaggggtcccagga

SEQ ID NO: 2333668 - DNA, 25 bp, Homo sapien
gcagggagggtcatggttcacacaa

SEQ ID NO: 2333669 - DNA, 25 bp, Homo sapien
agggagggtcatggttcacacaaac

SEQ ID NO: 2333670 - DNA, 25 bp, Homo sapien
cagggagggtcatggttcacacaaa

SEQ ID NO: 2333671 - DNA, 25 bp, Homo sapien
ttgcagggagggtcatggttcacac

SEQ ID NO: 2333672 - DNA, 25 bp, Homo sapien
ctgaggtaggaccacgtgaagaagt

SEQ ID NO: 2333673 - DNA, 25 bp, Homo sapien
cccacactgaggtaggaccacgtga

SEQ ID NO: 2333674 - DNA, 25 bp, Homo sapien
gtcagccccacactgaggtaggacc

SEQ ID NO: 2333675 - DNA, 25 bp, Homo sapien
cacactgaggtaggaccacgtgaag

SEQ ID NO: 2333676 - DNA, 25 bp, Homo sapien
gtagcatccctcatgcaacatcctg

SEQ ID NO: 2333677 - DNA, 25 bp, Homo sapien
gaaccttcagtagcatccctcatgc

SEQ ID NO: 2333678 - DNA, 25 bp, Homo sapien
tccctcatgcaacatcctgcaaaat

SEQ ID NO: 2333679 - DNA, 25 bp, Homo sapien
gaaagaaccttcagtagcatccctc

SEQ ID NO: 2333680 - DNA, 25 bp, Homo sapien
tcactgcacaacagcaatattgact

SEQ ID NO: 2333681 - DNA, 25 bp, Homo sapien
gagtggactggcttcattaacctca

SEQ ID NO: 2333682 - DNA, 25 bp, Homo sapien
tacgggctgagcattggcccagcat

SEQ ID NO: 2333683 - DNA, 25 bp, Homo sapien
tgggcccaatggaagatgtctctac

SEQ ID NO: 2333684 - DNA, 25 bp, Homo sapien
tgggcgagtggactggcttcattaa

SEQ ID NO: 2333685 - DNA, 25 bp, Homo sapien
cagcacatggtggttgagtgcaaag

SEQ ID NO: 2333686 - DNA, 25 bp, Homo sapien
gactgagcagtaacggttaaagaaa

SEQ ID NO: 2333687 - DNA, 25 bp, Homo sapien
catgaggctcttgtcaggtgtgttt

SEQ ID NO: 2333688 - DNA, 25 bp, Homo sapien
tccctgggctgatgaatggactgag

SEQ ID NO: 2333689 - DNA, 25 bp, Homo sapien
ctggcttggtttcctatggcacagg

SEQ ID NO: 2333690 - DNA, 25 bp, Homo sapien
tgtggctcaccagcctgctttacca

SEQ ID NO: 2333691 - DNA, 25 bp, Homo sapien
gcacagggattactttcgttcatct

SEQ ID NO: 2333692 - DNA, 25 bp, Homo sapien
tcgttcatctccaagtgtggctcac

SEQ ID NO: 2333693 - DNA, 25 bp, Homo sapien
agagcttcccagagtgtgtccacca

SEQ ID NO: 2333694 - DNA, 25 bp, Homo sapien
cataactggatatgaaaatctgctc

SEQ ID NO: 2333695 - DNA, 25 bp, Homo sapien
tgtccaccaatgactgcattaaaac

SEQ ID NO: 2333696 - DNA, 25 bp, Homo sapien
ggcggactttatgtgctctcatagc

SEQ ID NO: 2333697 - DNA, 25 bp, Homo sapien
aactggactgaaactctttgctgca

SEQ ID NO: 2333698 - DNA, 25 bp, Homo sapien
aattggccttcacgccagtcggaca

SEQ ID NO: 2333699 - DNA, 25 bp, Homo sapien
gatctggtgtggcaggtctcaaact

SEQ ID NO: 2333700 - DNA, 25 bp, Homo sapien
ttagatgcagactcacctcacacag

SEQ ID NO: 2333701 - DNA, 25 bp, Homo sapien
acaatgtcagccatattcacaccag

SEQ ID NO: 2333702 - DNA, 25 bp, Homo sapien
atgggatgtgcaactgcgtgtcgaa

SEQ ID NO: 2333703 - DNA, 25 bp, Homo sapien
tgtcgaacgacatcctgcattccca

SEQ ID NO: 2333704 - DNA, 25 bp, Homo sapien
aatgtcagccatattcacaccagac

SEQ ID NO: 2333705 - DNA, 25 bp, Homo sapien
cagatctatcttcactattggctcc

SEQ ID NO: 2333706 - DNA, 25 bp, Homo sapien
gatctatcttcactattggctccag

SEQ ID NO: 2333707 - DNA, 25 bp, Homo sapien
tatcttcactattggctccagctgt

SEQ ID NO: 2333708 - DNA, 25 bp, Homo sapien
tctatcttcactattggctccagct

SEQ ID NO: 2333709 - DNA, 25 bp, Homo sapien
tcttgtagcacgaaacctgcagcat

SEQ ID NO: 2333710 - DNA, 25 bp, Homo sapien
tacagcccgactcactgagggcaat

SEQ ID NO: 2333711 - DNA, 25 bp, Homo sapien
gatgtggtaaacagtgtcctcaacg

SEQ ID NO: 2333712 - DNA, 25 bp, Homo sapien
atcctgtagcaaatgcaacggagct

SEQ ID NO: 2333713 - DNA, 25 bp, Homo sapien
tgatagacattgtttccactgcccc

SEQ ID NO: 2333714 - DNA, 25 bp, Homo sapien
gagcaagggtttctcaggtagagca

SEQ ID NO: 2333715 - DNA, 25 bp, Homo sapien
gatgaagctcaaggaaatgtctgct

SEQ ID NO: 2333716 - DNA, 25 bp, Homo sapien
tagggatggtcatgttcaatacagc

SEQ ID NO: 2333717 - DNA, 25 bp, Homo sapien
tgacactactcgctctccttccact

SEQ ID NO: 2333718 - DNA, 25 bp, Homo sapien
gccatcctgacactactcgctctcc

SEQ ID NO: 2333719 - DNA, 25 bp, Homo sapien
ctgacactactcgctctccttccac

SEQ ID NO: 2333720 - DNA, 25 bp, Homo sapien
caacaattcatctaatggtttagcc

SEQ ID NO: 2333721 - DNA, 25 bp, Homo sapien
cgcttgagccaaggaattggagacc

SEQ ID NO: 2333722 - DNA, 25 bp, Homo sapien
ctcagctgggtgccgtggctcccac

SEQ ID NO: 2333723 - DNA, 25 bp, Homo sapien
ctgtaatgccagcactttgggagac

SEQ ID NO: 2333724 - DNA, 25 bp, Homo sapien
gatcgcttgagccaaggaattggag

SEQ ID NO: 2333725 - DNA, 25 bp, Homo sapien
ggtcactcactgatagactgctgca

SEQ ID NO: 2333726 - DNA, 25 bp, Homo sapien
gctcttgtacatactaccagggtga

SEQ ID NO: 2333727 - DNA, 25 bp, Homo sapien
gatcatgccacagagataaactgct

SEQ ID NO: 2333728 - DNA, 25 bp, Homo sapien
gcaactttgacagctgtagccactt

SEQ ID NO: 2333729 - DNA, 25 bp, Homo sapien
ctgcaggtctgcccgccgcggcagc

SEQ ID NO: 2333730 - DNA, 25 bp, Homo sapien
tgcaggtctgcccgccgcggcagca

SEQ ID NO: 2333731 - DNA, 25 bp, Homo sapien
ctcctgcaggtctgcccgccgcggc

SEQ ID NO: 2333732 - DNA, 25 bp, Homo sapien
tcctgcaggtctgcccgccgcggca

SEQ ID NO: 2333733 - DNA, 25 bp, Homo sapien
ctggttgaactcttcgccgacatcc

SEQ ID NO: 2333734 - DNA, 25 bp, Homo sapien
gccgacatccgcgtaaatgtctatg

SEQ ID NO: 2333735 - DNA, 25 bp, Homo sapien
tcttcgccgacatccgcgtaaatgt

SEQ ID NO: 2333736 - DNA, 25 bp, Homo sapien
gaactcttcgccgacatccgcgtaa

SEQ ID NO: 2333737 - DNA, 25 bp, Homo sapien
ggcgcacactctgcagtcgcttcgg

SEQ ID NO: 2333738 - DNA, 25 bp, Homo sapien
cccagaggcggcaagggcgcacact

SEQ ID NO: 2333739 - DNA, 25 bp, Homo sapien
aggcggcaagggcgcacactctgca

SEQ ID NO: 2333740 - DNA, 25 bp, Homo sapien
aagggcgcacactctgcagtcgctt

SEQ ID NO: 2333741 - DNA, 25 bp, Homo sapien
caacgtcgttcaggaaaaccttgca

SEQ ID NO: 2333742 - DNA, 25 bp, Homo sapien
ttaaacttctcatagggacctggga

SEQ ID NO: 2333743 - DNA, 25 bp, Homo sapien
tgcaaggatgcccattaacagacat

SEQ ID NO: 2333744 - DNA, 25 bp, Homo sapien
tgcagtagatacgaacagcaggttc

SEQ ID NO: 2333745 - DNA, 25 bp, Homo sapien
gataagaatccacccagctatccgg

SEQ ID NO: 2333746 - DNA, 25 bp, Homo sapien
gctatccggataagggagatgtccc

SEQ ID NO: 2333747 - DNA, 25 bp, Homo sapien
tagaacctgtgttgcactcgaggaa

SEQ ID NO: 2333748 - DNA, 25 bp, Homo sapien
aaaggagttcctcattgggtccaca

SEQ ID NO: 2333749 - DNA, 25 bp, Homo sapien
aatagagaggtttggaagatgttca

SEQ ID NO: 2333750 - DNA, 25 bp, Homo sapien
taaggagtagccagtcccttgtgcc

SEQ ID NO: 2333751 - DNA, 25 bp, Homo sapien
gctgttctcagcttggtgacatcca

SEQ ID NO: 2333752 - DNA, 25 bp, Homo sapien
tgaagaaaggcactctattagagct

SEQ ID NO: 2333753 - DNA, 25 bp, Homo sapien
cactcgcgctaaacaattcaacttt

SEQ ID NO: 2333754 - DNA, 25 bp, Homo sapien
caattactaaatattgggctagtaa

SEQ ID NO: 2333755 - DNA, 25 bp, Homo sapien
gggctagtaattactacacttgagt

SEQ ID NO: 2333756 - DNA, 25 bp, Homo sapien
gcttagcttactgattagctgggat

SEQ ID NO: 2333757 - DNA, 25 bp, Homo sapien
gcagcagtagttccatgcacttaag

SEQ ID NO: 2333758 - DNA, 25 bp, Homo sapien
tcacaatatatggtctgagggaaag

SEQ ID NO: 2333759 - DNA, 25 bp, Homo sapien
tccggttctgaacatcaagtagaat

SEQ ID NO: 2333760 - DNA, 25 bp, Homo sapien
taaactctcttgcaatccggttctg

SEQ ID NO: 2333761 - DNA, 25 bp, Homo sapien
tggcacatatggaggagctaatggt

SEQ ID NO: 2333762 - DNA, 25 bp, Homo sapien
ttatacaaatggcacatatggagga

SEQ ID NO: 2333763 - DNA, 25 bp, Homo sapien
caaatggcacatatggaggagctaa

SEQ ID NO: 2333764 - DNA, 25 bp, Homo sapien
gcacatatggaggagctaatggttt

SEQ ID NO: 2333765 - DNA, 25 bp, Homo sapien
taagtacttgtattggtgtgaacca

SEQ ID NO: 2333766 - DNA, 25 bp, Homo sapien
tagaccataagcttgactaagcctg

SEQ ID NO: 2333767 - DNA, 25 bp, Homo sapien
tactgggtgtcacttacatgcctaa

SEQ ID NO: 2333768 - DNA, 25 bp, Homo sapien
ttatctagtcaagcaaattagcaag

SEQ ID NO: 2333769 - DNA, 25 bp, Homo sapien
taaactgacagtagaaaaatcaccc

SEQ ID NO: 2333770 - DNA, 25 bp, Homo sapien
tccaaccttgaggaagctaccagta

SEQ ID NO: 2333771 - DNA, 25 bp, Homo sapien
gcctcccaaatataggcttgagcca

SEQ ID NO: 2333772 - DNA, 25 bp, Homo sapien
ccttggaaatactcttaactagaag

SEQ ID NO: 2333773 - DNA, 25 bp, Homo sapien
ggtgctgctcctttacccacatcat

SEQ ID NO: 2333774 - DNA, 25 bp, Homo sapien
tctcggtcttctggggcatctccat

SEQ ID NO: 2333775 - DNA, 25 bp, Homo sapien
tccatgtaatctcggtcttctgggg

SEQ ID NO: 2333776 - DNA, 25 bp, Homo sapien
ttggtgctgctcctttacccacatc

SEQ ID NO: 2333777 - DNA, 25 bp, Homo sapien
cctttgactggccatttgcccgatt

SEQ ID NO: 2333778 - DNA, 25 bp, Homo sapien
ttgactggccatttgcccgattttc

SEQ ID NO: 2333779 - DNA, 25 bp, Homo sapien
gactggccatttgcccgattttcaa

SEQ ID NO: 2333780 - DNA, 25 bp, Homo sapien
aaatatcatttactcccaaagaatg

SEQ ID NO: 2333781 - DNA, 25 bp, Homo sapien
gaagctactgccaaagtttaagtga

SEQ ID NO: 2333782 - DNA, 25 bp, Homo sapien
gggcagtctatacttccagttagga

SEQ ID NO: 2333783 - DNA, 25 bp, Homo sapien
taaattacagtagcataccaggtat

SEQ ID NO: 2333784 - DNA, 25 bp, Homo sapien
tagtgagaagtattcagactctgca

SEQ ID NO: 2333785 - DNA, 25 bp, Homo sapien
gtaaaaagagatcaatattattact

SEQ ID NO: 2333786 - DNA, 25 bp, Homo sapien
ggtgaggatacaaagtaaaaagaga

SEQ ID NO: 2333787 - DNA, 25 bp, Homo sapien
taaaaagagatcaatattattactg

SEQ ID NO: 2333788 - DNA, 25 bp, Homo sapien
gaggatacaaagtaaaaagagatca

SEQ ID NO: 2333789 - DNA, 25 bp, Homo sapien
ttgcatggagttacaacaggattct

SEQ ID NO: 2333790 - DNA, 25 bp, Homo sapien
acaggattctgaccatgaagttctc

SEQ ID NO: 2333791 - DNA, 25 bp, Homo sapien
ttcagatccaacaccaacaagggca

SEQ ID NO: 2333792 - DNA, 25 bp, Homo sapien
tgcatttcaaattgactcaggaact

SEQ ID NO: 2333793 - DNA, 25 bp, Homo sapien
caggcccacagtcataaccagtgat

SEQ ID NO: 2333794 - DNA, 25 bp, Homo sapien
agtaggtttctcgtacacaggccca

SEQ ID NO: 2333795 - DNA, 25 bp, Homo sapien
tattgggtctgttacatctggagaa

SEQ ID NO: 2333796 - DNA, 25 bp, Homo sapien
gaatggcagggctatagaacttgca

SEQ ID NO: 2333797 - DNA, 25 bp, Homo sapien
agctctcctttaatctaagaattag

SEQ ID NO: 2333798 - DNA, 25 bp, Homo sapien
caagtggtgaaaggtcttgttgcca

SEQ ID NO: 2333799 - DNA, 25 bp, Homo sapien
tgaaaggtcttgttgccaagcagaa

SEQ ID NO: 2333800 - DNA, 25 bp, Homo sapien
gctctcctttaatctaagaattaga

SEQ ID NO: 2333801 - DNA, 25 bp, Homo sapien
cttttaaagactcaaaatatccagg

SEQ ID NO: 2333802 - DNA, 25 bp, Homo sapien
caaatgccttgtgcctatgcaaact

SEQ ID NO: 2333803 - DNA, 25 bp, Homo sapien
tatattttccataggtaatcgtgag

SEQ ID NO: 2333804 - DNA, 25 bp, Homo sapien
tgcagcagccaagaccgaaattctt

SEQ ID NO: 2333805 - DNA, 25 bp, Homo sapien
ccagacatttgtcctgattgtgtag

SEQ ID NO: 2333806 - DNA, 25 bp, Homo sapien
ccccagacatttgtcctgattgtgt

SEQ ID NO: 2333807 - DNA, 25 bp, Homo sapien
cccagacatttgtcctgattgtgta

SEQ ID NO: 2333808 - DNA, 25 bp, Homo sapien
tgtggaaatgctgcacgggaactgc

SEQ ID NO: 2333809 - DNA, 25 bp, Homo sapien
aatgctgcacgggaactgcctcctg

SEQ ID NO: 2333810 - DNA, 25 bp, Homo sapien
ccgtcctctaccaccttgtggaaat

SEQ ID NO: 2333811 - DNA, 25 bp, Homo sapien
gccccgtcctctaccaccttgtgga

SEQ ID NO: 2333812 - DNA, 25 bp, Homo sapien
agcataacaaggagagtaagtcaca

SEQ ID NO: 2333813 - DNA, 25 bp, Homo sapien
gtcacattaataatgcattacttga

SEQ ID NO: 2333814 - DNA, 25 bp, Homo sapien
ggtagacatgttttatccatggtaa

SEQ ID NO: 2333815 - DNA, 25 bp, Homo sapien
aagaggtattaggtagacatgtttt

SEQ ID NO: 2333816 - DNA, 25 bp, Homo sapien
catggaatcctagtttccaggaaca

SEQ ID NO: 2333817 - DNA, 25 bp, Homo sapien
ggccgagttcctttaacaagatgct

SEQ ID NO: 2333818 - DNA, 25 bp, Homo sapien
gctgtgccccatatgccatggaatc

SEQ ID NO: 2333819 - DNA, 25 bp, Homo sapien
gccaaaaatgggtatttcctctatg

SEQ ID NO: 2333820 - DNA, 25 bp, Homo sapien
tctgatgccaagctagaaagtgaaa

SEQ ID NO: 2333821 - DNA, 25 bp, Homo sapien
cgcatagagcatacaccaagtcttt

SEQ ID NO: 2333822 - DNA, 25 bp, Homo sapien
ggtaaatgttacactaccaactaca

SEQ ID NO: 2333823 - DNA, 25 bp, Homo sapien
caccttatattctactctgatgcca

SEQ ID NO: 2333824 - DNA, 25 bp, Homo sapien
ctggaggacctaagggtggacgtgg

SEQ ID NO: 2333825 - DNA, 25 bp, Homo sapien
ggctgcccaaaaggttgtccaggaa

SEQ ID NO: 2333826 - DNA, 25 bp, Homo sapien
tggtggagggcgatctcctcgatta

SEQ ID NO: 2333827 - DNA, 25 bp, Homo sapien
aggaagtggacccaatggaggctgc

SEQ ID NO: 2333828 - DNA, 25 bp, Homo sapien
cctcgattaggaggcccagctagag

SEQ ID NO: 2333829 - DNA, 25 bp, Homo sapien
aaagaaagctgggttcacatgcgga

SEQ ID NO: 2333830 - DNA, 25 bp, Homo sapien
tctgttggtggtggacctcggctat

SEQ ID NO: 2333831 - DNA, 25 bp, Homo sapien
gctatctgatgtaggcatgccactg

SEQ ID NO: 2333832 - DNA, 25 bp, Homo sapien
cctatcatatggtggaggtcgccca

SEQ ID NO: 2333833 - DNA, 25 bp, Homo sapien
tggcatcagacacagctctcgaaat

SEQ ID NO: 2333834 - DNA, 25 bp, Homo sapien
aatagcactgcttgagattgcccta

SEQ ID NO: 2333835 - DNA, 25 bp, Homo sapien
aattcagcttcactcaatggcgttc

SEQ ID NO: 2333836 - DNA, 25 bp, Homo sapien
tggcgttcttgcagtatccatttcc

SEQ ID NO: 2333837 - DNA, 25 bp, Homo sapien
gaactttgcaacgatcatcagcaga

SEQ ID NO: 2333838 - DNA, 25 bp, Homo sapien
agacttggactcaattccatgaagg

SEQ ID NO: 2333839 - DNA, 25 bp, Homo sapien
tgtctcaatagcactcccataatca

SEQ ID NO: 2333840 - DNA, 25 bp, Homo sapien
taaagaaattgcagttaccagtgtc

SEQ ID NO: 2333841 - DNA, 25 bp, Homo sapien
ttaaatggaaatgagacaggaaagt

SEQ ID NO: 2333842 - DNA, 25 bp, Homo sapien
taaatggaaatgagacaggaaagtt

SEQ ID NO: 2333843 - DNA, 25 bp, Homo sapien
ttttttaaatggaaatgagacagga

SEQ ID NO: 2333844 - DNA, 25 bp, Homo sapien
ttttaaatggaaatgagacaggaaa

SEQ ID NO: 2333845 - DNA, 25 bp, Homo sapien
tgacgtcgactcttttctcgtgatc

SEQ ID NO: 2333846 - DNA, 25 bp, Homo sapien
tgtaataatcgtcatgacggtctct

SEQ ID NO: 2333847 - DNA, 25 bp, Homo sapien
tctcgtgatctactatggtccctct

SEQ ID NO: 2333848 - DNA, 25 bp, Homo sapien
gacggtctctactacgggatttatg

SEQ ID NO: 2333849 - DNA, 25 bp, Homo sapien
gatgacgatattcgcgctctcggtc

SEQ ID NO: 2333850 - DNA, 25 bp, Homo sapien
atgacgatattcgcgctctcggtca

SEQ ID NO: 2333851 - DNA, 25 bp, Homo sapien
acacatttaacagggaacaaggaat

SEQ ID NO: 2333852 - DNA, 25 bp, Homo sapien
acacacatttaacagggaacaagga

SEQ ID NO: 2333853 - DNA, 25 bp, Homo sapien
cacacatttaacagggaacaaggaa

SEQ ID NO: 2333854 - DNA, 25 bp, Homo sapien
aacagtagccttggagttatagtta

SEQ ID NO: 2333855 - DNA, 25 bp, Homo sapien
cacaagtagttggaccatttaaaat

SEQ ID NO: 2333856 - DNA, 25 bp, Homo sapien
atgtaggtatatactgtataaacag

SEQ ID NO: 2333857 - DNA, 25 bp, Homo sapien
tccagaagattaaattcacaagtag

SEQ ID NO: 2333858 - DNA, 25 bp, Homo sapien
tgcataagccttatagtgccctccc

SEQ ID NO: 2333859 - DNA, 25 bp, Homo sapien
tgtatgtgatacaagaaccccaatt

SEQ ID NO: 2333860 - DNA, 25 bp, Homo sapien
tgttgagaaaacaccctcctgtatt

SEQ ID NO: 2333861 - DNA, 25 bp, Homo sapien
ctaaacttgggtatatggcttgaca

SEQ ID NO: 2333862 - DNA, 25 bp, Homo sapien
catgactgaattttcagtaagtttc

SEQ ID NO: 2333863 - DNA, 25 bp, Homo sapien
gaattttcagtaagtttcccatgat

SEQ ID NO: 2333864 - DNA, 25 bp, Homo sapien
gactgaattttcagtaagtttccca

SEQ ID NO: 2333865 - DNA, 25 bp, Homo sapien
ctgaattttcagtaagtttcccatg

SEQ ID NO: 2333866 - DNA, 25 bp, Homo sapien
gatgggacagacattaacagcttgc

SEQ ID NO: 2333867 - DNA, 25 bp, Homo sapien
gccaagatcattacgtttccagtta

SEQ ID NO: 2333868 - DNA, 25 bp, Homo sapien
aattggtttagaggccccttgatgg

SEQ ID NO: 2333869 - DNA, 25 bp, Homo sapien
tgatgggcacatccaattttgtaga

SEQ ID NO: 2333870 - DNA, 25 bp, Homo sapien
gctaataagctgaatacacaatgca

SEQ ID NO: 2333871 - DNA, 25 bp, Homo sapien
aatgcaaagcatcctaaatcttggg

SEQ ID NO: 2333872 - DNA, 25 bp, Homo sapien
aaagtaatcagactagactgggcgc

SEQ ID NO: 2333873 - DNA, 25 bp, Homo sapien
gctgagtagggatgttccaaagaag

SEQ ID NO: 2333874 - DNA, 25 bp, Homo sapien
cagggctgggagctataacgcagac

SEQ ID NO: 2333875 - DNA, 25 bp, Homo sapien
gataacctaagagctgcagaaacaa

SEQ ID NO: 2333876 - DNA, 25 bp, Homo sapien
gcagagcagttaggatacatgggaa

SEQ ID NO: 2333877 - DNA, 25 bp, Homo sapien
gaaagctagcatacatatccagatg

SEQ ID NO: 2333878 - DNA, 25 bp, Homo sapien
gaaaggcctatgtaaacagatgtta

SEQ ID NO: 2333879 - DNA, 25 bp, Homo sapien
gtgacaaatacattcaacgtccatg

SEQ ID NO: 2333880 - DNA, 25 bp, Homo sapien
aaagtctgtaaactaaagtgagcac

SEQ ID NO: 2333881 - DNA, 25 bp, Homo sapien
tcaaatgtctaagtaggcaactaca

SEQ ID NO: 2333882 - DNA, 25 bp, Homo sapien
tatatgcattcacactgcctagcag

SEQ ID NO: 2333883 - DNA, 25 bp, Homo sapien
taagagttacttctgccactgctat

SEQ ID NO: 2333884 - DNA, 25 bp, Homo sapien
tgacatccacgtacaaatctttaga

SEQ ID NO: 2333885 - DNA, 25 bp, Homo sapien
cctaggttgtatcttaagagcatca

SEQ ID NO: 2333886 - DNA, 25 bp, Homo sapien
ctgtaatgtgtcaaaatttgtgatg

SEQ ID NO: 2333887 - DNA, 25 bp, Homo sapien
tcctgttcattttatccatgaatcc

SEQ ID NO: 2333888 - DNA, 25 bp, Homo sapien
tccttacaggttcagttcaatcaca

SEQ ID NO: 2333889 - DNA, 25 bp, Homo sapien
tttgtcttggaaggtgatcctcttc

SEQ ID NO: 2333890 - DNA, 25 bp, Homo sapien
gaagcaaactgctggacaagcgtca

SEQ ID NO: 2333891 - DNA, 25 bp, Homo sapien
atcacacaggtttccttcaaataaa

SEQ ID NO: 2333892 - DNA, 25 bp, Homo sapien
atcaaagtgatgctgtttacagaca

SEQ ID NO: 2333893 - DNA, 25 bp, Homo sapien
ccagtaataaagttgcaaaagctat

SEQ ID NO: 2333894 - DNA, 25 bp, Homo sapien
caattgcttgcacatcataatggcc

SEQ ID NO: 2333895 - DNA, 25 bp, Homo sapien
ttaaacagtttattacaacactaca

SEQ ID NO: 2333896 - DNA, 25 bp, Homo sapien
ttattacaacactacatctattgta

SEQ ID NO: 2333897 - DNA, 25 bp, Homo sapien
aacagtttattacaacactacatct

SEQ ID NO: 2333898 - DNA, 25 bp, Homo sapien
tttattacaacactacatctattgt

SEQ ID NO: 2333899 - DNA, 25 bp, Homo sapien
tactatgtttaattcactgaacgca

SEQ ID NO: 2333900 - DNA, 25 bp, Homo sapien
ggcatatccaaaaacgctattgcaa

SEQ ID NO: 2333901 - DNA, 25 bp, Homo sapien
tgctgaacacaagactttccctgag

SEQ ID NO: 2333902 - DNA, 25 bp, Homo sapien
ctgaacgcaagattagattgaggca

SEQ ID NO: 2333903 - DNA, 25 bp, Homo sapien
tctggagggtttctacagttgcaca

SEQ ID NO: 2333904 - DNA, 25 bp, Homo sapien
taatcaagttgacaccctgcctctg

SEQ ID NO: 2333905 - DNA, 25 bp, Homo sapien
tcaagaacacatgctagtcaggtgc

SEQ ID NO: 2333906 - DNA, 25 bp, Homo sapien
gtccatacttcttcgcattagggca

SEQ ID NO: 2333907 - DNA, 25 bp, Homo sapien
cactcacactgtctgtaacgaaagt

SEQ ID NO: 2333908 - DNA, 25 bp, Homo sapien
tatacattcacgtgttatcaggtag

SEQ ID NO: 2333909 - DNA, 25 bp, Homo sapien
gcagcaaacaaatctagtacactca

SEQ ID NO: 2333910 - DNA, 25 bp, Homo sapien
taaaataacggattagcagcaaaca

SEQ ID NO: 2333911 - DNA, 25 bp, Homo sapien
gagcactccaacagaaaagtcttgt

SEQ ID NO: 2333912 - DNA, 25 bp, Homo sapien
ttacagagggctacgggatgcaaat

SEQ ID NO: 2333913 - DNA, 25 bp, Homo sapien
ttttcgctaaatgcagggtctgtcc

SEQ ID NO: 2333914 - DNA, 25 bp, Homo sapien
aaaccaaaatgtcgagagcactcca

SEQ ID NO: 2333915 - DNA, 25 bp, Homo sapien
gacacttgggatttaacagaaacta

SEQ ID NO: 2333916 - DNA, 25 bp, Homo sapien
caattaagggaggtagcagtttcca

SEQ ID NO: 2333917 - DNA, 25 bp, Homo sapien
gctgacgcagctcttaaaatagttg

SEQ ID NO: 2333918 - DNA, 25 bp, Homo sapien
tagttgctaacaagacagtgaggca

SEQ ID NO: 2333919 - DNA, 25 bp, Homo sapien
gccatttcccggaagtctatttctc

SEQ ID NO: 2333920 - DNA, 25 bp, Homo sapien
tcccggaagtctatttctcacatca

SEQ ID NO: 2333921 - DNA, 25 bp, Homo sapien
catttcccggaagtctatttctcac

SEQ ID NO: 2333922 - DNA, 25 bp, Homo sapien
tttctcacatcaaccgcggctccct

SEQ ID NO: 2333923 - DNA, 25 bp, Homo sapien
catctttatgttggctagaatcagc

SEQ ID NO: 2333924 - DNA, 25 bp, Homo sapien
agcgatgtcggtgttctcatcttta

SEQ ID NO: 2333925 - DNA, 25 bp, Homo sapien
ttggctagaatcagcattgaagttc

SEQ ID NO: 2333926 - DNA, 25 bp, Homo sapien
tctgatagaggttttcagcgatgtc

SEQ ID NO: 2333927 - DNA, 25 bp, Homo sapien
ccactcaatgtagccctgctttaca

SEQ ID NO: 2333928 - DNA, 25 bp, Homo sapien
aattgtctactatgacatacgtgtc

SEQ ID NO: 2333929 - DNA, 25 bp, Homo sapien
atgcatcaacaaatctcttcaaggc

SEQ ID NO: 2333930 - DNA, 25 bp, Homo sapien
gcttagcacatattctgctcctcca

SEQ ID NO: 2333931 - DNA, 25 bp, Homo sapien
tacagatggtcaaaaataggcaaca

SEQ ID NO: 2333932 - DNA, 25 bp, Homo sapien
gacgacgatgataaatgaggtatcc

SEQ ID NO: 2333933 - DNA, 25 bp, Homo sapien
cacgcatagttgtagaatcaacgta

SEQ ID NO: 2333934 - DNA, 25 bp, Homo sapien
tgaggtatcctaactcacgcatagt

SEQ ID NO: 2333935 - DNA, 25 bp, Homo sapien
ccccaagttgcgtgaaattctacag

SEQ ID NO: 2333936 - DNA, 25 bp, Homo sapien
agggaggatgactgttaagtcccca

SEQ ID NO: 2333937 - DNA, 25 bp, Homo sapien
tgactgttaagtccccattcgggta

SEQ ID NO: 2333938 - DNA, 25 bp, Homo sapien
acagcagtctgcttcataagggagg

SEQ ID NO: 2333939 - DNA, 25 bp, Homo sapien
ggtcatcattctgagatctgagagc

SEQ ID NO: 2333940 - DNA, 25 bp, Homo sapien
gtcatcattctgagatctgagagct

SEQ ID NO: 2333941 - DNA, 25 bp, Homo sapien
aggaagcaggctccaattgaggtca

SEQ ID NO: 2333942 - DNA, 25 bp, Homo sapien
gaatgactctggttctcgtaatctc

SEQ ID NO: 2333943 - DNA, 25 bp, Homo sapien
gtcctggaatgactctggttctcgt

SEQ ID NO: 2333944 - DNA, 25 bp, Homo sapien
tgactctggttctcgtaatctctac

SEQ ID NO: 2333945 - DNA, 25 bp, Homo sapien
cctggaatgactctggttctcgtaa

SEQ ID NO: 2333946 - DNA, 25 bp, Homo sapien
tggcctttggaggacagcttctctg

SEQ ID NO: 2333947 - DNA, 25 bp, Homo sapien
cctctggcctttggaggacagcttc

SEQ ID NO: 2333948 - DNA, 25 bp, Homo sapien
tctggcctttggaggacagcttctc

SEQ ID NO: 2333949 - DNA, 25 bp, Homo sapien
ggaggacagcttctctgctctccat

SEQ ID NO: 2333950 - DNA, 25 bp, Homo sapien
cagaatcggcaaggcaatcaggtgt

SEQ ID NO: 2333951 - DNA, 25 bp, Homo sapien
tatcagtccctgtcttaagcgggca

SEQ ID NO: 2333952 - DNA, 25 bp, Homo sapien
gcattaggagccgaaagccgtgcag

SEQ ID NO: 2333953 - DNA, 25 bp, Homo sapien
tcggcagcccggaagttcacagaaa

SEQ ID NO: 2333954 - DNA, 25 bp, Homo sapien
gtgaggactgccctcatgaggaaag

SEQ ID NO: 2333955 - DNA, 25 bp, Homo sapien
aggaagagtgaggactgccctcatg

SEQ ID NO: 2333956 - DNA, 25 bp, Homo sapien
ctaggaagagtgaggactgccctca

SEQ ID NO: 2333957 - DNA, 25 bp, Homo sapien
gagtgaggactgccctcatgaggaa

SEQ ID NO: 2333958 - DNA, 25 bp, Homo sapien
tggtggcctgtgtgaggaaacccgt

SEQ ID NO: 2333959 - DNA, 25 bp, Homo sapien
gaggaaagccgtgtgaggccagtca

SEQ ID NO: 2333960 - DNA, 25 bp, Homo sapien
tctgcagaaacagactccccgcagt

SEQ ID NO: 2333961 - DNA, 25 bp, Homo sapien
aacccgtgtgaggaaagccctgtga

SEQ ID NO: 2333962 - DNA, 25 bp, Homo sapien
cacagaggagaattcaccatttctg

SEQ ID NO: 2333963 - DNA, 25 bp, Homo sapien
cacccacagaggagaattcaccatt

SEQ ID NO: 2333964 - DNA, 25 bp, Homo sapien
cccacagaggagaattcaccatttc

SEQ ID NO: 2333965 - DNA, 25 bp, Homo sapien
ccacccacagaggagaattcaccat

SEQ ID NO: 2333966 - DNA, 25 bp, Homo sapien
gaggtgctgtgtaccagtctcgtga

SEQ ID NO: 2333967 - DNA, 25 bp, Homo sapien
ccacgggtcagaatggcttccttgt

SEQ ID NO: 2333968 - DNA, 25 bp, Homo sapien
tactctctcaactaatggaggtgct

SEQ ID NO: 2333969 - DNA, 25 bp, Homo sapien
ctcgtgaaacaggacgagcacccct

SEQ ID NO: 2333970 - DNA, 25 bp, Homo sapien
gctaggtcagagtgctaggctgacc

SEQ ID NO: 2333971 - DNA, 25 bp, Homo sapien
tgctaggtcagagtgctaggctgac

SEQ ID NO: 2333972 - DNA, 25 bp, Homo sapien
tgccctggaccgtaacagaaaggag

SEQ ID NO: 2333973 - DNA, 25 bp, Homo sapien
gaccgtaacagaaaggaggacaagc

SEQ ID NO: 2333974 - DNA, 25 bp, Homo sapien
aagaccttgccctggaccgtaacag

SEQ ID NO: 2333975 - DNA, 25 bp, Homo sapien
gtttgctaggctgattcccctgtag

SEQ ID NO: 2333976 - DNA, 25 bp, Homo sapien
tagcagatacataggctgatggaaa

SEQ ID NO: 2333977 - DNA, 25 bp, Homo sapien
caagactattccgtgatttcatccc

SEQ ID NO: 2333978 - DNA, 25 bp, Homo sapien
gggaactaggttcctactgctcttg

SEQ ID NO: 2333979 - DNA, 25 bp, Homo sapien
tgggatcctatacaaagagtgactg

SEQ ID NO: 2333980 - DNA, 25 bp, Homo sapien
cgtgtgttgtaaccactctcccatt

SEQ ID NO: 2333981 - DNA, 25 bp, Homo sapien
tgtctccagcattgtagtttgtagc

SEQ ID NO: 2333982 - DNA, 25 bp, Homo sapien
agtttgtagctcgtgtgttgtaacc

SEQ ID NO: 2333983 - DNA, 25 bp, Homo sapien
ccagcattgtagtttgtagctcgtg

SEQ ID NO: 2333984 - DNA, 25 bp, Homo sapien
atcattacaccagtagcggctattg

SEQ ID NO: 2333985 - DNA, 25 bp, Homo sapien
caccagtagcggctattgatctgaa

SEQ ID NO: 2333986 - DNA, 25 bp, Homo sapien
tcctggggttttgccatcattacac

SEQ ID NO: 2333987 - DNA, 25 bp, Homo sapien
aatgacaggcattaactgctcctgg

SEQ ID NO: 2333988 - DNA, 25 bp, Homo sapien
cagtaaattaataggtcattccaga

SEQ ID NO: 2333989 - DNA, 25 bp, Homo sapien
tcttgtaagtataaccagattggtc

SEQ ID NO: 2333990 - DNA, 25 bp, Homo sapien
gatgtagtttttctaggtccctcat

SEQ ID NO: 2333991 - DNA, 25 bp, Homo sapien
ctggacaaagcatcagtaaggccat

SEQ ID NO: 2333992 - DNA, 25 bp, Homo sapien
aaaaccgatttgtatttgctgacat

SEQ ID NO: 2333993 - DNA, 25 bp, Homo sapien
taatttttgcaaaagcacacagtat

SEQ ID NO: 2333994 - DNA, 25 bp, Homo sapien
cccatggttataaacctctgggtag

SEQ ID NO: 2333995 - DNA, 25 bp, Homo sapien
tgataagaagcaaattgtaaagccg

SEQ ID NO: 2333996 - DNA, 25 bp, Homo sapien
cagcatcagcgatgttatcttgcag

SEQ ID NO: 2333997 - DNA, 25 bp, Homo sapien
tgtggatcacggacaaccctctttg

SEQ ID NO: 2333998 - DNA, 25 bp, Homo sapien
tgctctaatgccttgtggatcacgg

SEQ ID NO: 2333999 - DNA, 25 bp, Homo sapien
tctttgcacaagctacagcatcagc

SEQ ID NO: 2334000 - DNA, 25 bp, Homo sapien
accttgaacatactgacggacatct

SEQ ID NO: 2334001 - DNA, 25 bp, Homo sapien
atactgacggacatctctgttttga

SEQ ID NO: 2334002 - DNA, 25 bp, Homo sapien
tctctgttttgacaacgatttctcc

SEQ ID NO: 2334003 - DNA, 25 bp, Homo sapien
ttgacaacgatttctccatgccacc

SEQ ID NO: 2334004 - DNA, 25 bp, Homo sapien
tagaagaaaggccatattttgctcc

SEQ ID NO: 2334005 - DNA, 25 bp, Homo sapien
aaataatggtagtgtgacctttcac

SEQ ID NO: 2334006 - DNA, 25 bp, Homo sapien
aaaagaacggaatgtactggagatg

SEQ ID NO: 2334007 - DNA, 25 bp, Homo sapien
ggagatgtatttgataaccaaggtt

SEQ ID NO: 2334008 - DNA, 25 bp, Homo sapien
tcatattgcccaacaaaaagtggtt

SEQ ID NO: 2334009 - DNA, 25 bp, Homo sapien
tttgataagaactgaatgtggccgg

SEQ ID NO: 2334010 - DNA, 25 bp, Homo sapien
caggcagtctgtttctatcatttgg

SEQ ID NO: 2334011 - DNA, 25 bp, Homo sapien
tacttgtaagctcatctgcctcaga

SEQ ID NO: 2334012 - DNA, 25 bp, Homo sapien
ggcggtgagtaaccgtcaactcctc

SEQ ID NO: 2334013 - DNA, 25 bp, Homo sapien
attcaggcccgcgcaggtggagaac

SEQ ID NO: 2334014 - DNA, 25 bp, Homo sapien
gtcaactcctcaggccgactgtgct

SEQ ID NO: 2334015 - DNA, 25 bp, Homo sapien
ctcgcgtatgcgcacgcagtgtaca

SEQ ID NO: 2334016 - DNA, 25 bp, Homo sapien
ctgtcgcgcgggcccaggcggaggg

SEQ ID NO: 2334017 - DNA, 25 bp, Homo sapien
tgtcgcgcgggcccaggcggagggt

SEQ ID NO: 2334018 - DNA, 25 bp, Homo sapien
gcggggtcgccgctcccctcagaga

SEQ ID NO: 2334019 - DNA, 25 bp, Homo sapien
cggggtcgccgctcccctcagagac

SEQ ID NO: 2334020 - DNA, 25 bp, Homo sapien
cgccgccgccagggaaagagaccgg

SEQ ID NO: 2334021 - DNA, 25 bp, Homo sapien
cagggaaagagaccggggctggcgg

SEQ ID NO: 2334022 - DNA, 25 bp, Homo sapien
actctcccgccggagtcaggcccaa

SEQ ID NO: 2334023 - DNA, 25 bp, Homo sapien
ccgccggagtcaggcccaaattcgg

SEQ ID NO: 2334024 - DNA, 25 bp, Homo sapien
cccaaattcggccattctcttgaac

SEQ ID NO: 2334025 - DNA, 25 bp, Homo sapien
ggagtcaggcccaaattcggccatt

SEQ ID NO: 2334026 - DNA, 25 bp, Homo sapien
ttccccaagccaccatttatctgtt

SEQ ID NO: 2334027 - DNA, 25 bp, Homo sapien
caatgaacgccggtttttcgctcaa

SEQ ID NO: 2334028 - DNA, 25 bp, Homo sapien
tagattggcagcgaatgtgcaccaa

SEQ ID NO: 2334029 - DNA, 25 bp, Homo sapien
gagtcgcccgtttccttggcagcca

SEQ ID NO: 2334030 - DNA, 25 bp, Homo sapien
ctcagcgactgtttgctacagttat

SEQ ID NO: 2334031 - DNA, 25 bp, Homo sapien
gaaatactgcgggtaagcgctcagc

SEQ ID NO: 2334032 - DNA, 25 bp, Homo sapien
tgcgggtaagcgctcagcgactgtt

SEQ ID NO: 2334033 - DNA, 25 bp, Homo sapien
ttggaaatactgcgggtaagcgctc

SEQ ID NO: 2334034 - DNA, 25 bp, Homo sapien
ttgcggagagccgagattgcgctag

SEQ ID NO: 2334035 - DNA, 25 bp, Homo sapien
ggagaatcgcttggaggcaggagaa

SEQ ID NO: 2334036 - DNA, 25 bp, Homo sapien
gagaatcgcttggaggcaggagaat

SEQ ID NO: 2334037 - DNA, 25 bp, Homo sapien
ggagagccgagattgcgctagtgca

SEQ ID NO: 2334038 - DNA, 25 bp, Homo sapien
cgagcaacattaccgtaaactattg

SEQ ID NO: 2334039 - DNA, 25 bp, Homo sapien
tcacatatactgtccactgatgagt

SEQ ID NO: 2334040 - DNA, 25 bp, Homo sapien
catttctatatggtttcacatatac

SEQ ID NO: 2334041 - DNA, 25 bp, Homo sapien
tccaaaataccgagcaacattaccg

SEQ ID NO: 2334042 - DNA, 25 bp, Homo sapien
tcctcccgcttgggcctcccatagt

SEQ ID NO: 2334043 - DNA, 25 bp, Homo sapien
ctcccgcttgggcctcccatagtgc

SEQ ID NO: 2334044 - DNA, 25 bp, Homo sapien
agattacaggaatgagccattttgc

SEQ ID NO: 2334045 - DNA, 25 bp, Homo sapien
tgagattacaggaatgagccatttt

SEQ ID NO: 2334046 - DNA, 25 bp, Homo sapien
ggattttcttcacatatgctgacat

SEQ ID NO: 2334047 - DNA, 25 bp, Homo sapien
gctttcatgtaatttaaactggatt

SEQ ID NO: 2334048 - DNA, 25 bp, Homo sapien
ctcttaaaggattgccatagctttc

SEQ ID NO: 2334049 - DNA, 25 bp, Homo sapien
ccatagctttcatgtaatttaaact

SEQ ID NO: 2334050 - DNA, 25 bp, Homo sapien
tatttcgaattcaccccatcctgtt

SEQ ID NO: 2334051 - DNA, 25 bp, Homo sapien
tttgatgattatttcgaattcaccc

SEQ ID NO: 2334052 - DNA, 25 bp, Homo sapien
cattagggtcaatgaaaaatatttt

SEQ ID NO: 2334053 - DNA, 25 bp, Homo sapien
cgaattcaccccatcctgtttcagt

SEQ ID NO: 2334054 - DNA, 25 bp, Homo sapien
gaaatagaaacagatgtcaaatctg

SEQ ID NO: 2334055 - DNA, 25 bp, Homo sapien
ctgtgaaatagaaacagatgtcaaa

SEQ ID NO: 2334056 - DNA, 25 bp, Homo sapien
tttttatcatcataagatactggca

SEQ ID NO: 2334057 - DNA, 25 bp, Homo sapien
gatgtcaaatctgtgcaatggtttt

SEQ ID NO: 2334058 - DNA, 25 bp, Homo sapien
ttggtgtctgattgaaacagcttta

SEQ ID NO: 2334059 - DNA, 25 bp, Homo sapien
cagctttagcaaatgatacagggtt

SEQ ID NO: 2334060 - DNA, 25 bp, Homo sapien
gattgaaacagctttagcaaatgat

SEQ ID NO: 2334061 - DNA, 25 bp, Homo sapien
ggtgtctgattgaaacagctttagc

SEQ ID NO: 2334062 - DNA, 25 bp, Homo sapien
aatgttagctgacgagatgttgtca

SEQ ID NO: 2334063 - DNA, 25 bp, Homo sapien
cgagatgttgtcaataattgttgca

SEQ ID NO: 2334064 - DNA, 25 bp, Homo sapien
cttataggctcctaatgttagctga

SEQ ID NO: 2334065 - DNA, 25 bp, Homo sapien
ttctgtttcatgcttataggctcct

SEQ ID NO: 2334066 - DNA, 25 bp, Homo sapien
ggtgagtctcgaacatcgcatgcaa

SEQ ID NO: 2334067 - DNA, 25 bp, Homo sapien
gacacagggaaagaatcatctgcct

SEQ ID NO: 2334068 - DNA, 25 bp, Homo sapien
tggtaccctgacagaactccttgtg

SEQ ID NO: 2334069 - DNA, 25 bp, Homo sapien
tgcccttaagggatggacacaagct

SEQ ID NO: 2334070 - DNA, 25 bp, Homo sapien
acctggccgccaaagctgtactctg

SEQ ID NO: 2334071 - DNA, 25 bp, Homo sapien
acctcccacctgtgtaaaaagcaat

SEQ ID NO: 2334072 - DNA, 25 bp, Homo sapien
tgacaacagctcattaaagccttgc

SEQ ID NO: 2334073 - DNA, 25 bp, Homo sapien
tagcccctctaatgtgctgcgatta

SEQ ID NO: 2334074 - DNA, 25 bp, Homo sapien
gagttaattagcaatgagatcctgg

SEQ ID NO: 2334075 - DNA, 25 bp, Homo sapien
tgacaacttgtaagactgcgaaggg

SEQ ID NO: 2334076 - DNA, 25 bp, Homo sapien
ctgcgaagggcactagatgtttgga

SEQ ID NO: 2334077 - DNA, 25 bp, Homo sapien
tggttaggagacagactatcaggct

SEQ ID NO: 2334078 - DNA, 25 bp, Homo sapien
tgtctgaattcccaagagaggatct

SEQ ID NO: 2334079 - DNA, 25 bp, Homo sapien
tggaagctcaccctataacacagag

SEQ ID NO: 2334080 - DNA, 25 bp, Homo sapien
aaaagatggtcactaattggaagcc

SEQ ID NO: 2334081 - DNA, 25 bp, Homo sapien
taaatatggcatttcctgacgacaa

SEQ ID NO: 2334082 - DNA, 25 bp, Homo sapien
tttatagtttcacgacttgctttta

SEQ ID NO: 2334083 - DNA, 25 bp, Homo sapien
tctgcaatctcaaagcttgtttttt

SEQ ID NO: 2334084 - DNA, 25 bp, Homo sapien
gctctgcaatctcaaagcttgtttt

SEQ ID NO: 2334085 - DNA, 25 bp, Homo sapien
caatttatagtttcacgacttgctt

SEQ ID NO: 2334086 - DNA, 25 bp, Homo sapien
catcacagcatttgcagtaagtcca

SEQ ID NO: 2334087 - DNA, 25 bp, Homo sapien
ggtcaacagctgtatatgaagttcc

SEQ ID NO: 2334088 - DNA, 25 bp, Homo sapien
cagtgaagcccaccttattttcagt

SEQ ID NO: 2334089 - DNA, 25 bp, Homo sapien
tattgaatacttactggacacatca

SEQ ID NO: 2334090 - DNA, 25 bp, Homo sapien
tgccaataagagatgtgatgtcaca

SEQ ID NO: 2334091 - DNA, 25 bp, Homo sapien
taactgtattgagggagttccagaa

SEQ ID NO: 2334092 - DNA, 25 bp, Homo sapien
tctacatgcgacaatgagtgccaat

SEQ ID NO: 2334093 - DNA, 25 bp, Homo sapien
taccatcaaagagcttctacatgcg

SEQ ID NO: 2334094 - DNA, 25 bp, Homo sapien
gctggtacttgtatgatctcatttt

SEQ ID NO: 2334095 - DNA, 25 bp, Homo sapien
cctagctggtacttgtatgatctca

SEQ ID NO: 2334096 - DNA, 25 bp, Homo sapien
tttcctagctggtacttgtatgatc

SEQ ID NO: 2334097 - DNA, 25 bp, Homo sapien
tagctggtacttgtatgatctcatt

SEQ ID NO: 2334098 - DNA, 25 bp, Homo sapien
tattcttcatcagttgacttcaggg

SEQ ID NO: 2334099 - DNA, 25 bp, Homo sapien
gctaaccatgcaattggaagctact

SEQ ID NO: 2334100 - DNA, 25 bp, Homo sapien
gagacagtgtgctgatccagtaaga

SEQ ID NO: 2334101 - DNA, 25 bp, Homo sapien
tcaagcacacacgagagttcagaaa

SEQ ID NO: 2334102 - DNA, 25 bp, Homo sapien
gatactctatctcaagctaggcatg

SEQ ID NO: 2334103 - DNA, 25 bp, Homo sapien
ggtctctctgttggtatcatcagtg

SEQ ID NO: 2334104 - DNA, 25 bp, Homo sapien
cattgtatgagggtagctgtttcct

SEQ ID NO: 2334105 - DNA, 25 bp, Homo sapien
caagactatggcgaaattctacaaa

SEQ ID NO: 2334106 - DNA, 25 bp, Homo sapien
atagtgcactacaggtcagaattcc

SEQ ID NO: 2334107 - DNA, 25 bp, Homo sapien
tcctagacttgagcgatccttccac

SEQ ID NO: 2334108 - DNA, 25 bp, Homo sapien
caggtcagaattcctagacttgagc

SEQ ID NO: 2334109 - DNA, 25 bp, Homo sapien
tcccggaggtcaccacattaatgcc

SEQ ID NO: 2334110 - DNA, 25 bp, Homo sapien
actcagatacttcagcggatactcc

SEQ ID NO: 2334111 - DNA, 25 bp, Homo sapien
cttcagcggatactccaaaggaagc

SEQ ID NO: 2334112 - DNA, 25 bp, Homo sapien
gatacttcagcggatactccaaagg

SEQ ID NO: 2334113 - DNA, 25 bp, Homo sapien
tcagatacttcagcggatactccaa

SEQ ID NO: 2334114 - DNA, 25 bp, Homo sapien
ccataatatagtttcacagactggg

SEQ ID NO: 2334115 - DNA, 25 bp, Homo sapien
caggtccatgtccttagcttataga

SEQ ID NO: 2334116 - DNA, 25 bp, Homo sapien
caaggtgttggttgatctacagagt

SEQ ID NO: 2334117 - DNA, 25 bp, Homo sapien
catgtccttagcttatagatggctg

SEQ ID NO: 2334118 - DNA, 25 bp, Homo sapien
tccaggtgagaaaagcagacgtttc

SEQ ID NO: 2334119 - DNA, 25 bp, Homo sapien
tacacacttgcatgcttatgcacag

SEQ ID NO: 2334120 - DNA, 25 bp, Homo sapien
tgttagcactacaatggtagggaca

SEQ ID NO: 2334121 - DNA, 25 bp, Homo sapien
aaaacagtacttggtacacacaagg

SEQ ID NO: 2334122 - DNA, 25 bp, Homo sapien
tgtagcccaagcctatgcactcgaa

SEQ ID NO: 2334123 - DNA, 25 bp, Homo sapien
ttcaggaaggcactctgtagcccaa

SEQ ID NO: 2334124 - DNA, 25 bp, Homo sapien
cacttaggatccagcaacatctggg

SEQ ID NO: 2334125 - DNA, 25 bp, Homo sapien
ggctaactcctatgaagcctcagct

SEQ ID NO: 2334126 - DNA, 25 bp, Homo sapien
acacagtcttggcttttgtagttat

SEQ ID NO: 2334127 - DNA, 25 bp, Homo sapien
tgtagttatagccaccttttcctac

SEQ ID NO: 2334128 - DNA, 25 bp, Homo sapien
ctgtccccatacacagtcttggctt

SEQ ID NO: 2334129 - DNA, 25 bp, Homo sapien
agttatagccaccttttcctacaca

SEQ ID NO: 2334130 - DNA, 25 bp, Homo sapien
tggtgtaatggctcagttctcacag

SEQ ID NO: 2334131 - DNA, 25 bp, Homo sapien
gtaggaccgcgggcctgggagatgc

SEQ ID NO: 2334132 - DNA, 25 bp, Homo sapien
gtgctgacagaatatgacaaataga

SEQ ID NO: 2334133 - DNA, 25 bp, Homo sapien
aaggctggtgtaatggctcagttct

SEQ ID NO: 2334134 - DNA, 25 bp, Homo sapien
gagaacaatggattcaccaggctga

SEQ ID NO: 2334135 - DNA, 25 bp, Homo sapien
ttgaagcagtttgcaggtgagcgat

SEQ ID NO: 2334136 - DNA, 25 bp, Homo sapien
ccaggctgaattcttagtgcctgtt

SEQ ID NO: 2334137 - DNA, 25 bp, Homo sapien
tgaagttggaatgcacagcagttcc

SEQ ID NO: 2334138 - DNA, 25 bp, Homo sapien
ccgtatgtagttgcaggactgtaaa

SEQ ID NO: 2334139 - DNA, 25 bp, Homo sapien
gggccgattgttttgcaatatgtct

SEQ ID NO: 2334140 - DNA, 25 bp, Homo sapien
aatatgtctctcaggcaaatcccag

SEQ ID NO: 2334141 - DNA, 25 bp, Homo sapien
ggcaaatcccagttccgtatgtagt

SEQ ID NO: 2334142 - DNA, 25 bp, Homo sapien
ttcgcggaggtcatggaacagcacc

SEQ ID NO: 2334143 - DNA, 25 bp, Homo sapien
caccattaggtctaaatcagggagg

SEQ ID NO: 2334144 - DNA, 25 bp, Homo sapien
gggtattggatccttctgggcttca

SEQ ID NO: 2334145 - DNA, 25 bp, Homo sapien
agattgaaaacaccttatacgggct

SEQ ID NO: 2334146 - DNA, 25 bp, Homo sapien
gaaaaatgaattccgtctgggagag

SEQ ID NO: 2334147 - DNA, 25 bp, Homo sapien
tatctctgagtgacccctgtagcag

SEQ ID NO: 2334148 - DNA, 25 bp, Homo sapien
aagagtatgcatcctgtctcctgag

SEQ ID NO: 2334149 - DNA, 25 bp, Homo sapien
tcaaagctggccatctcagagtagt

SEQ ID NO: 2334150 - DNA, 25 bp, Homo sapien
tgaagcattgggtattgcctacaac

SEQ ID NO: 2334151 - DNA, 25 bp, Homo sapien
tctaaagcaccctgaggatgagcag

SEQ ID NO: 2334152 - DNA, 25 bp, Homo sapien
ggtgctttacaaactagggctctaa

SEQ ID NO: 2334153 - DNA, 25 bp, Homo sapien
cacctggccggttgtacatttctaa

SEQ ID NO: 2334154 - DNA, 25 bp, Homo sapien
ggataagataggacataaggacacg

SEQ ID NO: 2334155 - DNA, 25 bp, Homo sapien
cttgaggcaagtgagaaagctctgg

SEQ ID NO: 2334156 - DNA, 25 bp, Homo sapien
taaggacacgtggagcattcagatc

SEQ ID NO: 2334157 - DNA, 25 bp, Homo sapien
ggacattcttaaagtggagctagca

SEQ ID NO: 2334158 - DNA, 25 bp, Homo sapien
tagtggcaatctaaataaggaactt

SEQ ID NO: 2334159 - DNA, 25 bp, Homo sapien
tactgaccaggagccttctaaatgg

SEQ ID NO: 2334160 - DNA, 25 bp, Homo sapien
taatctctacagagtgtaagaggga

SEQ ID NO: 2334161 - DNA, 25 bp, Homo sapien
taaggaacttaaaccgtatctgcca

SEQ ID NO: 2334162 - DNA, 25 bp, Homo sapien
tcttgccgttgaattaaatgaccta

SEQ ID NO: 2334163 - DNA, 25 bp, Homo sapien
aagttcttgccgttgaattaaatga

SEQ ID NO: 2334164 - DNA, 25 bp, Homo sapien
tgccgttgaattaaatgacctattg

SEQ ID NO: 2334165 - DNA, 25 bp, Homo sapien
agcaaaagttcttgccgttgaatta

SEQ ID NO: 2334166 - DNA, 25 bp, Homo sapien
gcagatcgagtctcagccgctgtgc

SEQ ID NO: 2334167 - DNA, 25 bp, Homo sapien
gagcccctacttggagcagatcgag

SEQ ID NO: 2334168 - DNA, 25 bp, Homo sapien
cccagactccgacccgcgctggagc

SEQ ID NO: 2334169 - DNA, 25 bp, Homo sapien
gcccctacttggagcagatcgagtc

SEQ ID NO: 2334170 - DNA, 25 bp, Homo sapien
acgagaacgccagctccgacgcggg

SEQ ID NO: 2334171 - DNA, 25 bp, Homo sapien
tcccagtccgtttccctagccactc

SEQ ID NO: 2334172 - DNA, 25 bp, Homo sapien
gagaagtccgcggcggtcgacaatc

SEQ ID NO: 2334173 - DNA, 25 bp, Homo sapien
tcagcccggatcccgaagcgggcag

SEQ ID NO: 2334174 - DNA, 25 bp, Homo sapien
ccaagattgagtctggtgtccagct

SEQ ID NO: 2334175 - DNA, 25 bp, Homo sapien
ggttccgagcccagtccaaatcgat

SEQ ID NO: 2334176 - DNA, 25 bp, Homo sapien
cagaataccaaactagggagcggcg

SEQ ID NO: 2334177 - DNA, 25 bp, Homo sapien
cggacaaccctgaagcaaatctgga

SEQ ID NO: 2334178 - DNA, 25 bp, Homo sapien
taatatatgcctagtcctgacctct

SEQ ID NO: 2334179 - DNA, 25 bp, Homo sapien
tctagtaagagtaccaccgtcaaca

SEQ ID NO: 2334180 - DNA, 25 bp, Homo sapien
tggacatttccagcgtttggcaagt

SEQ ID NO: 2334181 - DNA, 25 bp, Homo sapien
aagtgtaatcttcagctgggcgcag

SEQ ID NO: 2334182 - DNA, 25 bp, Homo sapien
tagtcaaatttgtagaggcagaaac

SEQ ID NO: 2334183 - DNA, 25 bp, Homo sapien
caaatttgtagaggcagaaactcaa

SEQ ID NO: 2334184 - DNA, 25 bp, Homo sapien
tcaaatttgtagaggcagaaactca

SEQ ID NO: 2334185 - DNA, 25 bp, Homo sapien
agaatagtcaaatttgtagaggcag

SEQ ID NO: 2334186 - DNA, 25 bp, Homo sapien
gctaatcagatcaaatcagacaagt

SEQ ID NO: 2334187 - DNA, 25 bp, Homo sapien
taagcagactgcttgttacaaggaa

SEQ ID NO: 2334188 - DNA, 25 bp, Homo sapien
taactatagagtagaagaaccagac

SEQ ID NO: 2334189 - DNA, 25 bp, Homo sapien
ggcaagtgggcattatgtatctcca

SEQ ID NO: 2334190 - DNA, 25 bp, Homo sapien
gattacatactacatgacttcacgc

SEQ ID NO: 2334191 - DNA, 25 bp, Homo sapien
gcagcactaaggagtgttttcatgg

SEQ ID NO: 2334192 - DNA, 25 bp, Homo sapien
ctaaatatgatggatggtgacacgg

SEQ ID NO: 2334193 - DNA, 25 bp, Homo sapien
tcaaaatgacaaaactagtggttgg

SEQ ID NO: 2334194 - DNA, 25 bp, Homo sapien
tagtaatactatccttttgagaagc

SEQ ID NO: 2334195 - DNA, 25 bp, Homo sapien
tcaaaaatcatacctgggaacctac

SEQ ID NO: 2334196 - DNA, 25 bp, Homo sapien
tctaaaaccacaacagtgaagtacc

SEQ ID NO: 2334197 - DNA, 25 bp, Homo sapien
tgaagtacctttctcgcctagtaag

SEQ ID NO: 2334198 - DNA, 25 bp, Homo sapien
ggcctatggttctggtgcataagga

SEQ ID NO: 2334199 - DNA, 25 bp, Homo sapien
agtcctagacagcatcttgcaatag

SEQ ID NO: 2334200 - DNA, 25 bp, Homo sapien
gctgcattggctaagtagagagtca

SEQ ID NO: 2334201 - DNA, 25 bp, Homo sapien
taaaatttgttgttcagggtagcca

SEQ ID NO: 2334202 - DNA, 25 bp, Homo sapien
caggaactgccttagggcatgggac

SEQ ID NO: 2334203 - DNA, 25 bp, Homo sapien
ctaggctactagaggttaccaataa

SEQ ID NO: 2334204 - DNA, 25 bp, Homo sapien
taatttaggacattctctcagatcc

SEQ ID NO: 2334205 - DNA, 25 bp, Homo sapien
taccaataaccataggtagaggact

SEQ ID NO: 2334206 - DNA, 25 bp, Homo sapien
ccctgggtggaactagtaacatatt

SEQ ID NO: 2334207 - DNA, 25 bp, Homo sapien
tcaggatcccctgggtggaactagt

SEQ ID NO: 2334208 - DNA, 25 bp, Homo sapien
gatcccctgggtggaactagtaaca

SEQ ID NO: 2334209 - DNA, 25 bp, Homo sapien
cagatatcaggatcccctgggtgga

SEQ ID NO: 2334210 - DNA, 25 bp, Homo sapien
ctagcacaaatggacgaataaattc

SEQ ID NO: 2334211 - DNA, 25 bp, Homo sapien
cgaataaattctaagcacctaccca

SEQ ID NO: 2334212 - DNA, 25 bp, Homo sapien
tcagcgtctagcacaaatggacgaa

SEQ ID NO: 2334213 - DNA, 25 bp, Homo sapien
cttattggactttgtagcctcagcg

SEQ ID NO: 2334214 - DNA, 25 bp, Homo sapien
tagtgcatgtatccatacaacaagg

SEQ ID NO: 2334215 - DNA, 25 bp, Homo sapien
cattctagagaactacccacccaaa

SEQ ID NO: 2334216 - DNA, 25 bp, Homo sapien
gcaacggcactatcagagttcacaa

SEQ ID NO: 2334217 - DNA, 25 bp, Homo sapien
tagcagctaaatgctaggcccacca

SEQ ID NO: 2334218 - DNA, 25 bp, Homo sapien
cagaaaaatctccagatgagcagtg

SEQ ID NO: 2334219 - DNA, 25 bp, Homo sapien
ccagaaaaatctccagatgagcagt

SEQ ID NO: 2334220 - DNA, 25 bp, Homo sapien
aatacagccaattcatcacctcttt

SEQ ID NO: 2334221 - DNA, 25 bp, Homo sapien
gtccacaccctccagagttcgagaa

SEQ ID NO: 2334222 - DNA, 25 bp, Homo sapien
ccagagttcgagaatcctgatatgc

SEQ ID NO: 2334223 - DNA, 25 bp, Homo sapien
tctttccacacaaccgtccacaccc

SEQ ID NO: 2334224 - DNA, 25 bp, Homo sapien
caactgattaagatggggaatttac

SEQ ID NO: 2334225 - DNA, 25 bp, Homo sapien
tcaactgattaagatggggaattta

SEQ ID NO: 2334226 - DNA, 25 bp, Homo sapien
tggataatcctgaactaacctcaaa

SEQ ID NO: 2334227 - DNA, 25 bp, Homo sapien
tcaaacgtgggtctagaagacagaa

SEQ ID NO: 2334228 - DNA, 25 bp, Homo sapien
gctccatgatgtatataccctgtaa

SEQ ID NO: 2334229 - DNA, 25 bp, Homo sapien
tctctaggactatgaatatgatggg

SEQ ID NO: 2334230 - DNA, 25 bp, Homo sapien
tctgctttcttctccaagccatcat

SEQ ID NO: 2334231 - DNA, 25 bp, Homo sapien
gctttcttctccaagccatcattcc

SEQ ID NO: 2334232 - DNA, 25 bp, Homo sapien
tcttctccaagccatcattccccat

SEQ ID NO: 2334233 - DNA, 25 bp, Homo sapien
tttcttctccaagccatcattcccc

SEQ ID NO: 2334234 - DNA, 25 bp, Homo sapien
tatttctcgtccttcaaaattggca

SEQ ID NO: 2334235 - DNA, 25 bp, Homo sapien
ctatttctcgtccttcaaaattggc

SEQ ID NO: 2334236 - DNA, 25 bp, Homo sapien
atttctcgtccttcaaaattggcag

SEQ ID NO: 2334237 - DNA, 25 bp, Homo sapien
cttactttatgacaaatggactgtt

SEQ ID NO: 2334238 - DNA, 25 bp, Homo sapien
tgggcatctacttcttaatggtcat

SEQ ID NO: 2334239 - DNA, 25 bp, Homo sapien
tatgacaaatggactgtttcatcac

SEQ ID NO: 2334240 - DNA, 25 bp, Homo sapien
gggcatctacttcttaatggtcatt

SEQ ID NO: 2334241 - DNA, 25 bp, Homo sapien
agctggttgacatgccacagctgca

SEQ ID NO: 2334242 - DNA, 25 bp, Homo sapien
gctggttgacatgccacagctgcat

SEQ ID NO: 2334243 - DNA, 25 bp, Homo sapien
aagctggttgacatgccacagctgc

SEQ ID NO: 2334244 - DNA, 25 bp, Homo sapien
caagctggttgacatgccacagctg

SEQ ID NO: 2334245 - DNA, 25 bp, Homo sapien
tgtggaattctcttctgagaaaaac

SEQ ID NO: 2334246 - DNA, 25 bp, Homo sapien
gagaaaaacagatacaattttgttc

SEQ ID NO: 2334247 - DNA, 25 bp, Homo sapien
cttgtggaattctcttctgagaaaa

SEQ ID NO: 2334248 - DNA, 25 bp, Homo sapien
tggaattctcttctgagaaaaacag

SEQ ID NO: 2334249 - DNA, 25 bp, Homo sapien
tgaaaaacacaagatcaaattgctc

SEQ ID NO: 2334250 - DNA, 25 bp, Homo sapien
taaagcagtgtctgaaccaaattaa

SEQ ID NO: 2334251 - DNA, 25 bp, Homo sapien
gtaaacaggcatgctcaaaactaga

SEQ ID NO: 2334252 - DNA, 25 bp, Homo sapien
aagccttttgggacggaagatactg

SEQ ID NO: 2334253 - DNA, 25 bp, Homo sapien
aagactgctaaacttcaaagaccca

SEQ ID NO: 2334254 - DNA, 25 bp, Homo sapien
gacccacgtctttttaatgtcatag

SEQ ID NO: 2334255 - DNA, 25 bp, Homo sapien
tgaactgtaacacctgaagccctaa

SEQ ID NO: 2334256 - DNA, 25 bp, Homo sapien
gccagctaataaggaactctaagag

SEQ ID NO: 2334257 - DNA, 25 bp, Homo sapien
cctgcttgatcttgatgatggtaga

SEQ ID NO: 2334258 - DNA, 25 bp, Homo sapien
gcctgcttgatcttgatgatggtag

SEQ ID NO: 2334259 - DNA, 25 bp, Homo sapien
tgacagcaagtaaacttgcctgctt

SEQ ID NO: 2334260 - DNA, 25 bp, Homo sapien
agaagatgacagcaagtaaacttgc

SEQ ID NO: 2334261 - DNA, 25 bp, Homo sapien
ctcctgggttcatgtcactcctctg

SEQ ID NO: 2334262 - DNA, 25 bp, Homo sapien
ggttcatgtcactcctctgcctcag

SEQ ID NO: 2334263 - DNA, 25 bp, Homo sapien
tcctgggttcatgtcactcctctgc

SEQ ID NO: 2334264 - DNA, 25 bp, Homo sapien
tgggttcatgtcactcctctgcctc

SEQ ID NO: 2334265 - DNA, 25 bp, Homo sapien
caagagtgggatgcgatctaaaatc

SEQ ID NO: 2334266 - DNA, 25 bp, Homo sapien
catgtctcttaaggatcctcttggc

SEQ ID NO: 2334267 - DNA, 25 bp, Homo sapien
tcactgttgatgttacccctgacaa

SEQ ID NO: 2334268 - DNA, 25 bp, Homo sapien
caggagcacctgtaaagtattttgt

SEQ ID NO: 2334269 - DNA, 25 bp, Homo sapien
gagccacaacatcggtctatttctg

SEQ ID NO: 2334270 - DNA, 25 bp, Homo sapien
tgtgagccacaacatcggtctattt

SEQ ID NO: 2334271 - DNA, 25 bp, Homo sapien
ccacaacatcggtctatttctgggt

SEQ ID NO: 2334272 - DNA, 25 bp, Homo sapien
gtgtgagccacaacatcggtctatt

SEQ ID NO: 2334273 - DNA, 25 bp, Homo sapien
aagaagatgttttattccgtcatac

SEQ ID NO: 2334274 - DNA, 25 bp, Homo sapien
tgttttattccgtcatactctcaaa

SEQ ID NO: 2334275 - DNA, 25 bp, Homo sapien
ccaatactggctgaaaagctgtgta

SEQ ID NO: 2334276 - DNA, 25 bp, Homo sapien
gaatattggtttcctataattatgt

SEQ ID NO: 2334277 - DNA, 25 bp, Homo sapien
cataactctatcctggagtcattgt

SEQ ID NO: 2334278 - DNA, 25 bp, Homo sapien
ttggtcataactctatcctggagtc

SEQ ID NO: 2334279 - DNA, 25 bp, Homo sapien
ctttagtagtgttggtcataactct

SEQ ID NO: 2334280 - DNA, 25 bp, Homo sapien
agtgttggtcataactctatcctgg

SEQ ID NO: 2334281 - DNA, 25 bp, Homo sapien
gaaagctggtccctatactgagtcc

SEQ ID NO: 2334282 - DNA, 25 bp, Homo sapien
tcaccaagggtcagttcgtactact

SEQ ID NO: 2334283 - DNA, 25 bp, Homo sapien
ggagaaccaggtagttccttagagc

SEQ ID NO: 2334284 - DNA, 25 bp, Homo sapien
ggtaggaaagaaggcacatggccat

SEQ ID NO: 2334285 - DNA, 25 bp, Homo sapien
caaatcacttcaatatctggtacct

SEQ ID NO: 2334286 - DNA, 25 bp, Homo sapien
gcaattatatctaatcaaaattccc

SEQ ID NO: 2334287 - DNA, 25 bp, Homo sapien
tgaactgcagtttaaaccagattcc

SEQ ID NO: 2334288 - DNA, 25 bp, Homo sapien
aacataagtaaaaccagtatgatca

SEQ ID NO: 2334289 - DNA, 25 bp, Homo sapien
gactatttttaagcatccatccatg

SEQ ID NO: 2334290 - DNA, 25 bp, Homo sapien
gggagattctcagtacagtctgcta

SEQ ID NO: 2334291 - DNA, 25 bp, Homo sapien
caaaactacaaaggtacgtgactat

SEQ ID NO: 2334292 - DNA, 25 bp, Homo sapien
agagccattatgtcaaaagcaagga

SEQ ID NO: 2334293 - DNA, 25 bp, Homo sapien
cataattcctcttgaagagctgact

SEQ ID NO: 2334294 - DNA, 25 bp, Homo sapien
cttgaagagctgactgtcttcaaaa

SEQ ID NO: 2334295 - DNA, 25 bp, Homo sapien
taattcctcttgaagagctgactgt

SEQ ID NO: 2334296 - DNA, 25 bp, Homo sapien
gaagagctgactgtcttcaaaatcc

SEQ ID NO: 2334297 - DNA, 25 bp, Homo sapien
gatctggccattaatattcttagcc

SEQ ID NO: 2334298 - DNA, 25 bp, Homo sapien
ctagatctggccattaatattctta

SEQ ID NO: 2334299 - DNA, 25 bp, Homo sapien
gcatcaggagtttaatcatatttca

SEQ ID NO: 2334300 - DNA, 25 bp, Homo sapien
cctctgctgcagcatcaggagttta

SEQ ID NO: 2334301 - DNA, 25 bp, Homo sapien
ggcttcttcagaagaccatgtgtgc

SEQ ID NO: 2334302 - DNA, 25 bp, Homo sapien
gcttcttcagaagaccatgtgtgca

SEQ ID NO: 2334303 - DNA, 25 bp, Homo sapien
tctggacagctacaacagctaccca

SEQ ID NO: 2334304 - DNA, 25 bp, Homo sapien
cttaaacttgttccgatggttatct

SEQ ID NO: 2334305 - DNA, 25 bp, Homo sapien
agtgtctttatctggacagctacaa

SEQ ID NO: 2334306 - DNA, 25 bp, Homo sapien
ccgatggttatctgggacagtgtct

SEQ ID NO: 2334307 - DNA, 25 bp, Homo sapien
gagattcgagtcatagccatagcgt

SEQ ID NO: 2334308 - DNA, 25 bp, Homo sapien
tgacaccttcgaccactttcaaaag

SEQ ID NO: 2334309 - DNA, 25 bp, Homo sapien
ccatagcgtcgcaggcagaggtagt

SEQ ID NO: 2334310 - DNA, 25 bp, Homo sapien
cattttactgagtcacgtttgcggg

SEQ ID NO: 2334311 - DNA, 25 bp, Homo sapien
tgttcgaggtgttctagggacttcc

SEQ ID NO: 2334312 - DNA, 25 bp, Homo sapien
gtgttcgaggtgttctagggacttc

SEQ ID NO: 2334313 - DNA, 25 bp, Homo sapien
taatctcttgcaacatgttaaataa

SEQ ID NO: 2334314 - DNA, 25 bp, Homo sapien
ataatctcttgcaacatgttaaata

SEQ ID NO: 2334315 - DNA, 25 bp, Homo sapien
tgtactgaggattataggaggtctt

SEQ ID NO: 2334316 - DNA, 25 bp, Homo sapien
gtactgaggattataggaggtcttt

SEQ ID NO: 2334317 - DNA, 25 bp, Homo sapien
agaatcgaatctgtactgaggatta

SEQ ID NO: 2334318 - DNA, 25 bp, Homo sapien
aaatgagtaagaatcgaatctgtac

SEQ ID NO: 2334319 - DNA, 25 bp, Homo sapien
aaaggatgtgtagattcttccccta

SEQ ID NO: 2334320 - DNA, 25 bp, Homo sapien
cacagaaggatgtctgcttgacgga

SEQ ID NO: 2334321 - DNA, 25 bp, Homo sapien
ttgttcctcagccacaagcaaagga

SEQ ID NO: 2334322 - DNA, 25 bp, Homo sapien
cttgacggatgggatgaagcatctc

SEQ ID NO: 2334323 - DNA, 25 bp, Homo sapien
taattaatacagaggttccaaccag

SEQ ID NO: 2334324 - DNA, 25 bp, Homo sapien
gctactgtaatggtaagttcccctg

SEQ ID NO: 2334325 - DNA, 25 bp, Homo sapien
gaaaactagcatactcgggaacact

SEQ ID NO: 2334326 - DNA, 25 bp, Homo sapien
tgtacctcttctgtgaacccacaag

SEQ ID NO: 2334327 - DNA, 25 bp, Homo sapien
ttggtgtacagtcccgacgccttga

SEQ ID NO: 2334328 - DNA, 25 bp, Homo sapien
tactggtggatgtcagacgacctct

SEQ ID NO: 2334329 - DNA, 25 bp, Homo sapien
ccagtttgttaacagagggtgcatc

SEQ ID NO: 2334330 - DNA, 25 bp, Homo sapien
gagggttgtcagagtcactgccacc

SEQ ID NO: 2334331 - DNA, 25 bp, Homo sapien
gagacaacacggtacaccttgaggg

SEQ ID NO: 2334332 - DNA, 25 bp, Homo sapien
gaaaacgggaatgctgctgtacaac

SEQ ID NO: 2334333 - DNA, 25 bp, Homo sapien
taaatactggacaagggcaaccctg

SEQ ID NO: 2334334 - DNA, 25 bp, Homo sapien
catgctggaggccacatactgtgaa

SEQ ID NO: 2334335 - DNA, 25 bp, Homo sapien
taacattgaacgctggagagggtca

SEQ ID NO: 2334336 - DNA, 25 bp, Homo sapien
taccttgaggcaaaaatatggcggc

SEQ ID NO: 2334337 - DNA, 25 bp, Homo sapien
taggtacatccttcgaggacacagc

SEQ ID NO: 2334338 - DNA, 25 bp, Homo sapien
tatcagtttccaaccctagcatggg

SEQ ID NO: 2334339 - DNA, 25 bp, Homo sapien
tactaatgcaaatgtggcacactgg

SEQ ID NO: 2334340 - DNA, 25 bp, Homo sapien
caatttggcaatggtagtcccactg

SEQ ID NO: 2334341 - DNA, 25 bp, Homo sapien
taactgtccaattgccatagaactg

SEQ ID NO: 2334342 - DNA, 25 bp, Homo sapien
gagtatactgtggtacgtcataaaa

SEQ ID NO: 2334343 - DNA, 25 bp, Homo sapien
acagcattaagatacaatgtatgca

SEQ ID NO: 2334344 - DNA, 25 bp, Homo sapien
taacagtggttacgttttgccaata

SEQ ID NO: 2334345 - DNA, 25 bp, Homo sapien
gggaaaattatgttgttacatatac

SEQ ID NO: 2334346 - DNA, 25 bp, Homo sapien
cactgatagggagaaatagagaaca

SEQ ID NO: 2334347 - DNA, 25 bp, Homo sapien
gtgtaaaagttatattttattgcca

SEQ ID NO: 2334348 - DNA, 25 bp, Homo sapien
cagtgtaaaagttatattttattgc

SEQ ID NO: 2334349 - DNA, 25 bp, Homo sapien
gtaaaagttatattttattgccatg

SEQ ID NO: 2334350 - DNA, 25 bp, Homo sapien
tgtaaaagttatattttattgccat

SEQ ID NO: 2334351 - DNA, 25 bp, Homo sapien
ttcctccaaaaagccacactcggcc

SEQ ID NO: 2334352 - DNA, 25 bp, Homo sapien
catatgcaaaggacaactagagggc

SEQ ID NO: 2334353 - DNA, 25 bp, Homo sapien
gagaaaacttttcatgcctgatgac

SEQ ID NO: 2334354 - DNA, 25 bp, Homo sapien
cagtgtatgatcagctcagcttcca

SEQ ID NO: 2334355 - DNA, 25 bp, Homo sapien
catgaatgcttcaggtcagtgtatg

SEQ ID NO: 2334356 - DNA, 25 bp, Homo sapien
ggttccgaggagttccgcacacaag

SEQ ID NO: 2334357 - DNA, 25 bp, Homo sapien
agtgaatcccctcacagctcgtgct

SEQ ID NO: 2334358 - DNA, 25 bp, Homo sapien
gagttccgcacacaagtgaatcccc

SEQ ID NO: 2334359 - DNA, 25 bp, Homo sapien
caagtgaatcccctcacagctcgtg

SEQ ID NO: 2334360 - DNA, 25 bp, Homo sapien
agacgctggctttgcggtccacccc

SEQ ID NO: 2334361 - DNA, 25 bp, Homo sapien
tgccgggactatgcaaagacctagg

SEQ ID NO: 2334362 - DNA, 25 bp, Homo sapien
ctgggctgccgggactatgcaaaga

SEQ ID NO: 2334363 - DNA, 25 bp, Homo sapien
aagacctaggcacaaggagacgctg

SEQ ID NO: 2334364 - DNA, 25 bp, Homo sapien
aggccatcaaggtgacgcctgccgg

SEQ ID NO: 2334365 - DNA, 25 bp, Homo sapien
gcgagactaaagacgatcttgaact

SEQ ID NO: 2334366 - DNA, 25 bp, Homo sapien
gagcgggtcccacactagaaatttc

SEQ ID NO: 2334367 - DNA, 25 bp, Homo sapien
tagaaatttcttcgctccgggtgag

SEQ ID NO: 2334368 - DNA, 25 bp, Homo sapien
ttaaagatgttaacaggtgcaaggg

SEQ ID NO: 2334369 - DNA, 25 bp, Homo sapien
taaagatgttaacaggtgcaaggga

SEQ ID NO: 2334370 - DNA, 25 bp, Homo sapien
cttaaagatgttaacaggtgcaagg

SEQ ID NO: 2334371 - DNA, 25 bp, Homo sapien
ccaatggcgatggcaccaataaaag

SEQ ID NO: 2334372 - DNA, 25 bp, Homo sapien
ctccaatggcgatggcaccaataaa

SEQ ID NO: 2334373 - DNA, 25 bp, Homo sapien
aatggcgatggcaccaataaaagaa

SEQ ID NO: 2334374 - DNA, 25 bp, Homo sapien
tggcgatggcaccaataaaagaagt

SEQ ID NO: 2334375 - DNA, 25 bp, Homo sapien
tgcctttgggtcccaaggtgctctt

SEQ ID NO: 2334376 - DNA, 25 bp, Homo sapien
tgggtcccaaggtgctctttaccaa

SEQ ID NO: 2334377 - DNA, 25 bp, Homo sapien
ttgggtcccaaggtgctctttacca

SEQ ID NO: 2334378 - DNA, 25 bp, Homo sapien
catgcctttgggtcccaaggtgctc

SEQ ID NO: 2334379 - DNA, 25 bp, Homo sapien
caatgttttttagaatagtggcacc

SEQ ID NO: 2334380 - DNA, 25 bp, Homo sapien
cattggttaccataagagaggcatc

SEQ ID NO: 2334381 - DNA, 25 bp, Homo sapien
ctttagctgctggattgtcaacacc

SEQ ID NO: 2334382 - DNA, 25 bp, Homo sapien
gcatctcgtccactgcttagaagaa

SEQ ID NO: 2334383 - DNA, 25 bp, Homo sapien
taaaacggtaacagaggtagtgcca

SEQ ID NO: 2334384 - DNA, 25 bp, Homo sapien
gtaacagaggtagtgccatcaccaa

SEQ ID NO: 2334385 - DNA, 25 bp, Homo sapien
gctgctaaaacggtaacagaggtag

SEQ ID NO: 2334386 - DNA, 25 bp, Homo sapien
aataattctgctgctaaaacggtaa

SEQ ID NO: 2334387 - DNA, 25 bp, Homo sapien
aaaagagttgcttagttgctcttac

SEQ ID NO: 2334388 - DNA, 25 bp, Homo sapien
aggaaaaaagagttgcttagttgct

SEQ ID NO: 2334389 - DNA, 25 bp, Homo sapien
gaaaaaagagttgcttagttgctct

SEQ ID NO: 2334390 - DNA, 25 bp, Homo sapien
aaaaagagttgcttagttgctctta

SEQ ID NO: 2334391 - DNA, 25 bp, Homo sapien
gcagaactcaacagcgcctctcttg

SEQ ID NO: 2334392 - DNA, 25 bp, Homo sapien
cccgctatgatggtctgtggatgaa

SEQ ID NO: 2334393 - DNA, 25 bp, Homo sapien
agcgcctctcttgcagccttcgtgg

SEQ ID NO: 2334394 - DNA, 25 bp, Homo sapien
gcttctctccaacccgctatgatgg

SEQ ID NO: 2334395 - DNA, 25 bp, Homo sapien
tctagaaacctttgggctatgtcgc

SEQ ID NO: 2334396 - DNA, 25 bp, Homo sapien
cattctgggcaactctaagagcgag

SEQ ID NO: 2334397 - DNA, 25 bp, Homo sapien
tctggaggctgatgtaggtttgact

SEQ ID NO: 2334398 - DNA, 25 bp, Homo sapien
gctatgtcgcaacgtcacaaagtta

SEQ ID NO: 2334399 - DNA, 25 bp, Homo sapien
ccctaactgatcaagtctgtaagct

SEQ ID NO: 2334400 - DNA, 25 bp, Homo sapien
caaccaaatatacatattaacccta

SEQ ID NO: 2334401 - DNA, 25 bp, Homo sapien
tctagatattcatgtcaatagataa

SEQ ID NO: 2334402 - DNA, 25 bp, Homo sapien
caatagataattttaccctaactga

SEQ ID NO: 2334403 - DNA, 25 bp, Homo sapien
ttgacggaatttaacttcatcggaa

SEQ ID NO: 2334404 - DNA, 25 bp, Homo sapien
cttgacggaatttaacttcatcgga

SEQ ID NO: 2334405 - DNA, 25 bp, Homo sapien
atgttgtgcccgcaatattcattaa

SEQ ID NO: 2334406 - DNA, 25 bp, Homo sapien
gaggataatgttgtgcccgcaatat

SEQ ID NO: 2334407 - DNA, 25 bp, Homo sapien
gttgtgcccgcaatattcattaaat

SEQ ID NO: 2334408 - DNA, 25 bp, Homo sapien
ggataatgttgtgcccgcaatattc

SEQ ID NO: 2334409 - DNA, 25 bp, Homo sapien
ttcagtctgagaactgcttctacag

SEQ ID NO: 2334410 - DNA, 25 bp, Homo sapien
tcctcctagcttcttgataatatga

SEQ ID NO: 2334411 - DNA, 25 bp, Homo sapien
gcttctacagctaactttgtaaagt

SEQ ID NO: 2334412 - DNA, 25 bp, Homo sapien
ctaaataggaatctgccaaacttcc

SEQ ID NO: 2334413 - DNA, 25 bp, Homo sapien
catcaacaatgctggaatagcgcgg

SEQ ID NO: 2334414 - DNA, 25 bp, Homo sapien
tgacaaaaatggttgcacatatgat

SEQ ID NO: 2334415 - DNA, 25 bp, Homo sapien
aatagcgcgggaagaggagtacact

SEQ ID NO: 2334416 - DNA, 25 bp, Homo sapien
aattcactcagtattcagccctcag

SEQ ID NO: 2334417 - DNA, 25 bp, Homo sapien
cacaatgatttgactgacccagacc

SEQ ID NO: 2334418 - DNA, 25 bp, Homo sapien
gaaaaaacctgcattgtgaacctac

SEQ ID NO: 2334419 - DNA, 25 bp, Homo sapien
catccacgttcggttgcacatgtgc

SEQ ID NO: 2334420 - DNA, 25 bp, Homo sapien
gcaaaccacggacacaaagggctga

SEQ ID NO: 2334421 - DNA, 25 bp, Homo sapien
agataaatctgaccctgatcatgcc

SEQ ID NO: 2334422 - DNA, 25 bp, Homo sapien
ggtataaagcatcccactagaagag

SEQ ID NO: 2334423 - DNA, 25 bp, Homo sapien
gtttcagatatacgctacacccaca

SEQ ID NO: 2334424 - DNA, 25 bp, Homo sapien
ccacatctgtatgggttgcaatata

SEQ ID NO: 2334425 - DNA, 25 bp, Homo sapien
gaacagtatcatatttaatacttca

SEQ ID NO: 2334426 - DNA, 25 bp, Homo sapien
ctacaataaatataagaacagtatc

SEQ ID NO: 2334427 - DNA, 25 bp, Homo sapien
tacaataaatataagaacagtatca

SEQ ID NO: 2334428 - DNA, 25 bp, Homo sapien
gtatcatatttaatacttcaaagca

SEQ ID NO: 2334429 - DNA, 25 bp, Homo sapien
tcaattcgttttggttgatttactc

SEQ ID NO: 2334430 - DNA, 25 bp, Homo sapien
ccagtatttgcaataagaattttag

SEQ ID NO: 2334431 - DNA, 25 bp, Homo sapien
tagcattttcaattcgttttggttg

SEQ ID NO: 2334432 - DNA, 25 bp, Homo sapien
ttgtctgtatccataccagtatttg

SEQ ID NO: 2334433 - DNA, 25 bp, Homo sapien
agccactctgcctgggcagtaattt

SEQ ID NO: 2334434 - DNA, 25 bp, Homo sapien
gccactctgcctgggcagtaatttt

SEQ ID NO: 2334435 - DNA, 25 bp, Homo sapien
ctgcctgggcagtaattttaatttt

SEQ ID NO: 2334436 - DNA, 25 bp, Homo sapien
actctgcctgggcagtaattttaat

SEQ ID NO: 2334437 - DNA, 25 bp, Homo sapien
ttgctgtagagtcaactcttacccg

SEQ ID NO: 2334438 - DNA, 25 bp, Homo sapien
tccttttccgcatgttctatttctg

SEQ ID NO: 2334439 - DNA, 25 bp, Homo sapien
gcaacctttgctgtagagtcaactc

SEQ ID NO: 2334440 - DNA, 25 bp, Homo sapien
tgtagagtcaactcttacccgggaa

SEQ ID NO: 2334441 - DNA, 25 bp, Homo sapien
taaagcaatttattccatgcttaag

SEQ ID NO: 2334442 - DNA, 25 bp, Homo sapien
agcaatttattccatgcttaagaat

SEQ ID NO: 2334443 - DNA, 25 bp, Homo sapien
caatttattccatgcttaagaatac

SEQ ID NO: 2334444 - DNA, 25 bp, Homo sapien
taataaagcaatttattccatgctt

SEQ ID NO: 2334445 - DNA, 25 bp, Homo sapien
tgacaagagctaggcgttccacacc

SEQ ID NO: 2334446 - DNA, 25 bp, Homo sapien
ctgtgacaagagctaggcgttccac

SEQ ID NO: 2334447 - DNA, 25 bp, Homo sapien
aagagctaggcgttccacacctgca

SEQ ID NO: 2334448 - DNA, 25 bp, Homo sapien
caagagctaggcgttccacacctgc

SEQ ID NO: 2334449 - DNA, 25 bp, Homo sapien
ttctgggtgatcaaaggtagaggca

SEQ ID NO: 2334450 - DNA, 25 bp, Homo sapien
gggcaaccccagaaaagtgaatgag

SEQ ID NO: 2334451 - DNA, 25 bp, Homo sapien
catgacttcctcgataagtttgcaa

SEQ ID NO: 2334452 - DNA, 25 bp, Homo sapien
tcgataagtttgcaacttccaagct

SEQ ID NO: 2334453 - DNA, 25 bp, Homo sapien
aaaatttgttgagtggcaccacgca

SEQ ID NO: 2334454 - DNA, 25 bp, Homo sapien
tcctccataaactgttctagagtcc

SEQ ID NO: 2334455 - DNA, 25 bp, Homo sapien
tctagagtcctttacagtttgcgca

SEQ ID NO: 2334456 - DNA, 25 bp, Homo sapien
cgcaaaacaatggtacaagcctcac

SEQ ID NO: 2334457 - DNA, 25 bp, Homo sapien
acagcatgagccatcaacatctcag

SEQ ID NO: 2334458 - DNA, 25 bp, Homo sapien
tgcctggtgttctattggcaagctg

SEQ ID NO: 2334459 - DNA, 25 bp, Homo sapien
tttagcataagactccattgcaaca

SEQ ID NO: 2334460 - DNA, 25 bp, Homo sapien
cataagactccattgcaacagcttc

SEQ ID NO: 2334461 - DNA, 25 bp, Homo sapien
agcagtggtattgccttcactgtga

SEQ ID NO: 2334462 - DNA, 25 bp, Homo sapien
caggtctgcactgtcatagcctgca

SEQ ID NO: 2334463 - DNA, 25 bp, Homo sapien
tggtattgccttcactgtgagcagc

SEQ ID NO: 2334464 - DNA, 25 bp, Homo sapien
ccaatccagcagtggtattgccttc

SEQ ID NO: 2334465 - DNA, 25 bp, Homo sapien
ccaacttctcttcttgtgagaatcc

SEQ ID NO: 2334466 - DNA, 25 bp, Homo sapien
aacttctcttcttgtgagaatcctg

SEQ ID NO: 2334467 - DNA, 25 bp, Homo sapien
tcctgcttcattttctcacagatta

SEQ ID NO: 2334468 - DNA, 25 bp, Homo sapien
gagaatcctgcttcattttctcaca

SEQ ID NO: 2334469 - DNA, 25 bp, Homo sapien
tactcagtaggtagataagcctaca

SEQ ID NO: 2334470 - DNA, 25 bp, Homo sapien
cccaactactttactcagtaggtag

SEQ ID NO: 2334471 - DNA, 25 bp, Homo sapien
caaaacatctctaatgatttataat

SEQ ID NO: 2334472 - DNA, 25 bp, Homo sapien
taagcctacaaatgagctcaaagaa

SEQ ID NO: 2334473 - DNA, 25 bp, Homo sapien
tgggtgccgctttgatgatgttgtc

SEQ ID NO: 2334474 - DNA, 25 bp, Homo sapien
gttgtccacacgcagaatcacctct

SEQ ID NO: 2334475 - DNA, 25 bp, Homo sapien
aactttctgttatacccaggatagc

SEQ ID NO: 2334476 - DNA, 25 bp, Homo sapien
agaacctgtcgcttcacttgaaaac

SEQ ID NO: 2334477 - DNA, 25 bp, Homo sapien
aatcctaagagctacctcagctgcc

SEQ ID NO: 2334478 - DNA, 25 bp, Homo sapien
catctactgtcctcagtacttgacc

SEQ ID NO: 2334479 - DNA, 25 bp, Homo sapien
tactgtcctcagtacttgacctttc

SEQ ID NO: 2334480 - DNA, 25 bp, Homo sapien
ttttcaatcctaagagctacctcag

SEQ ID NO: 2334481 - DNA, 25 bp, Homo sapien
taaaacagtatcagaccaaacaagg

SEQ ID NO: 2334482 - DNA, 25 bp, Homo sapien
cttgtgaagatttctgggagtaggt

SEQ ID NO: 2334483 - DNA, 25 bp, Homo sapien
ctggaaggctgagttaaaattcagt

SEQ ID NO: 2334484 - DNA, 25 bp, Homo sapien
cgttatttcaactgtgggtgagggc

SEQ ID NO: 2334485 - DNA, 25 bp, Homo sapien
attgtcaagagttatgaagcagctg

SEQ ID NO: 2334486 - DNA, 25 bp, Homo sapien
tgtcaagagttatgaagcagctgtc

SEQ ID NO: 2334487 - DNA, 25 bp, Homo sapien
cattgtcaagagttatgaagcagct

SEQ ID NO: 2334488 - DNA, 25 bp, Homo sapien
ttgtcaagagttatgaagcagctgt

SEQ ID NO: 2334489 - DNA, 25 bp, Homo sapien
tataggatgggactgctggctttag

SEQ ID NO: 2334490 - DNA, 25 bp, Homo sapien
ggtgaccaagttatgtcatggacta

SEQ ID NO: 2334491 - DNA, 25 bp, Homo sapien
taaaactgttataactctgcaatgg

SEQ ID NO: 2334492 - DNA, 25 bp, Homo sapien
agacagacctgagctagccactcag

SEQ ID NO: 2334493 - DNA, 25 bp, Homo sapien
ggggtggtgatcagggacacgtttc

SEQ ID NO: 2334494 - DNA, 25 bp, Homo sapien
aggggtggtgatcagggacacgttt

SEQ ID NO: 2334495 - DNA, 25 bp, Homo sapien
gagtatctttcaaacacaactttgc

SEQ ID NO: 2334496 - DNA, 25 bp, Homo sapien
aactggtccaaagatcgacagcacg

SEQ ID NO: 2334497 - DNA, 25 bp, Homo sapien
caaagatcgacagcacgtgggaatg

SEQ ID NO: 2334498 - DNA, 25 bp, Homo sapien
aacacaactttgctagaaactggtc

SEQ ID NO: 2334499 - DNA, 25 bp, Homo sapien
aatgacacggcaaataaattagacc

SEQ ID NO: 2334500 - DNA, 25 bp, Homo sapien
taaagcgaaggtcagctaaatatcc

SEQ ID NO: 2334501 - DNA, 25 bp, Homo sapien
caaacttaaggatataatgggcacc

SEQ ID NO: 2334502 - DNA, 25 bp, Homo sapien
aaattagacctatgttaaagcgaag

SEQ ID NO: 2334503 - DNA, 25 bp, Homo sapien
gttcaaatttttattttaatgcaca

SEQ ID NO: 2334504 - DNA, 25 bp, Homo sapien
tgggtccttcggagacaccttccaa

SEQ ID NO: 2334505 - DNA, 25 bp, Homo sapien
agatacatgccttctgttgcaacag

SEQ ID NO: 2334506 - DNA, 25 bp, Homo sapien
tttcctggaggtgctcccgtgggtc

SEQ ID NO: 2334507 - DNA, 25 bp, Homo sapien
gatgcacaaatactggccctttcct

SEQ ID NO: 2334508 - DNA, 25 bp, Homo sapien
ggaatcctgctccgactgcgtccat

SEQ ID NO: 2334509 - DNA, 25 bp, Homo sapien
tggaatcctgctccgactgcgtcca

SEQ ID NO: 2334510 - DNA, 25 bp, Homo sapien
tcttggggcacttgtctggaatcct

SEQ ID NO: 2334511 - DNA, 25 bp, Homo sapien
ggcacttgtctggaatcctgctccg

SEQ ID NO: 2334512 - DNA, 25 bp, Homo sapien
aagcatgacagagccaccaagatca

SEQ ID NO: 2334513 - DNA, 25 bp, Homo sapien
tccccatgcccgtgacaatcagaaa

SEQ ID NO: 2334514 - DNA, 25 bp, Homo sapien
ctcattggttcccaaagttgtgagg

SEQ ID NO: 2334515 - DNA, 25 bp, Homo sapien
tgaggttgctcgattccaggaggtt

SEQ ID NO: 2334516 - DNA, 25 bp, Homo sapien
aagagaaacgtccagctggtggtct

SEQ ID NO: 2334517 - DNA, 25 bp, Homo sapien
tggtggtctgtcctgaactcctcca

SEQ ID NO: 2334518 - DNA, 25 bp, Homo sapien
ctagctcaaagagaaacgtccagct

SEQ ID NO: 2334519 - DNA, 25 bp, Homo sapien
cctgctggacatgagttggatcaaa

SEQ ID NO: 2334520 - DNA, 25 bp, Homo sapien
tgagcaacagagagcactccacaga

SEQ ID NO: 2334521 - DNA, 25 bp, Homo sapien
aatgggcatggagcgctgagcaaca

SEQ ID NO: 2334522 - DNA, 25 bp, Homo sapien
aggagccatcagtcactcccaggtc

SEQ ID NO: 2334523 - DNA, 25 bp, Homo sapien
gagccatcagtcactcccaggtcag

SEQ ID NO: 2334524 - DNA, 25 bp, Homo sapien
tacaattttggtctgcagtgggaag

SEQ ID NO: 2334525 - DNA, 25 bp, Homo sapien
aaggtggctggtagtctgaatctga

SEQ ID NO: 2334526 - DNA, 25 bp, Homo sapien
tactaaagcatcaccggctccatga

SEQ ID NO: 2334527 - DNA, 25 bp, Homo sapien
tgttgcctacctggctctcataggt

SEQ ID NO: 2334528 - DNA, 25 bp, Homo sapien
tacctgtgagtggtgacgtttcccc

SEQ ID NO: 2334529 - DNA, 25 bp, Homo sapien
tctatttagagcctgggatcagcaa

SEQ ID NO: 2334530 - DNA, 25 bp, Homo sapien
tggaggcttacaccaaatggccagc

SEQ ID NO: 2334531 - DNA, 25 bp, Homo sapien
gagtaaagcctgctacttaaggagc

SEQ ID NO: 2334532 - DNA, 25 bp, Homo sapien
accccgaggttcatgcttagattcc

SEQ ID NO: 2334533 - DNA, 25 bp, Homo sapien
gagacaaccatcaaggagattaatg

SEQ ID NO: 2334534 - DNA, 25 bp, Homo sapien
tctcccttgatgatagaggatctga

SEQ ID NO: 2334535 - DNA, 25 bp, Homo sapien
gagaacagattagcccagcaacagg

SEQ ID NO: 2334536 - DNA, 25 bp, Homo sapien
tcatgtacctgatttcattgcctgc

SEQ ID NO: 2334537 - DNA, 25 bp, Homo sapien
acatgctcaatgagcccgtgtggtt

SEQ ID NO: 2334538 - DNA, 25 bp, Homo sapien
tttactcaacacagaccacggttga

SEQ ID NO: 2334539 - DNA, 25 bp, Homo sapien
tcaaaccagcaattgctcagagcag

SEQ ID NO: 2334540 - DNA, 25 bp, Homo sapien
gagccaagagaacataaccagggtg

SEQ ID NO: 2334541 - DNA, 25 bp, Homo sapien
gggtcatcagccctaaatgcagctt

SEQ ID NO: 2334542 - DNA, 25 bp, Homo sapien
ctttttgtgtcagccagcaagagcc

SEQ ID NO: 2334543 - DNA, 25 bp, Homo sapien
taccttctaggatgctctggagctt

SEQ ID NO: 2334544 - DNA, 25 bp, Homo sapien
ggtgttcgctgtagtgctgtccact

SEQ ID NO: 2334545 - DNA, 25 bp, Homo sapien
ctgtaccctggccttgtttggacag

SEQ ID NO: 2334546 - DNA, 25 bp, Homo sapien
ctccctctggtgttcgctgtagtgc

SEQ ID NO: 2334547 - DNA, 25 bp, Homo sapien
tttggacagagccattaagactccc

SEQ ID NO: 2334548 - DNA, 25 bp, Homo sapien
ccctctggtgttcgctgtagtgctg

SEQ ID NO: 2334549 - DNA, 25 bp, Homo sapien
ctccctctggtgttcgctgtagtgc

SEQ ID NO: 2334550 - DNA, 25 bp, Homo sapien
tctggtgttcgctgtagtgctgtcc

SEQ ID NO: 2334551 - DNA, 25 bp, Homo sapien
gtgttcgctgtagtgctgtccactg

SEQ ID NO: 2334552 - DNA, 25 bp, Homo sapien
ctccctctggtgttcgctgtagagc

SEQ ID NO: 2334553 - DNA, 25 bp, Homo sapien
ccctctggtgttcgctgtagagctg

SEQ ID NO: 2334554 - DNA, 25 bp, Homo sapien
tctggtgttcgctgtagagctgtcc

SEQ ID NO: 2334555 - DNA, 25 bp, Homo sapien
ctctggtgttcgctgtagagctgtc

SEQ ID NO: 2334556 - DNA, 25 bp, Homo sapien
taggccaggtaagggtttcagccat

SEQ ID NO: 2334557 - DNA, 25 bp, Homo sapien
aatgaattaggagccagtgcacaga

SEQ ID NO: 2334558 - DNA, 25 bp, Homo sapien
ctttggagagattagcctggcagct

SEQ ID NO: 2334559 - DNA, 25 bp, Homo sapien
ggattcagcagagggctcatttcag

SEQ ID NO: 2334560 - DNA, 25 bp, Homo sapien
tgcacccggcaaaaggattacctta

SEQ ID NO: 2334561 - DNA, 25 bp, Homo sapien
tgcagacttgggttgagaactcctg

SEQ ID NO: 2334562 - DNA, 25 bp, Homo sapien
aatttggcctgcatcataaggaggg

SEQ ID NO: 2334563 - DNA, 25 bp, Homo sapien
tctaaaaatgggcatacctcactcc

SEQ ID NO: 2334564 - DNA, 25 bp, Homo sapien
gcacaatttgatccatgcttctgaa

SEQ ID NO: 2334565 - DNA, 25 bp, Homo sapien
tccaataagatttaactggccaggc

SEQ ID NO: 2334566 - DNA, 25 bp, Homo sapien
tgtgagaataggctacagcaagtct

SEQ ID NO: 2334567 - DNA, 25 bp, Homo sapien
ggtcaagtgacagagattgaagcca

SEQ ID NO: 2334568 - DNA, 25 bp, Homo sapien
tgtaggcagatgcaacggcaggata

SEQ ID NO: 2334569 - DNA, 25 bp, Homo sapien
gacgtgtgcccaaagcggtcagaac

SEQ ID NO: 2334570 - DNA, 25 bp, Homo sapien
gcatgtatgccgtaagcagttccca

SEQ ID NO: 2334571 - DNA, 25 bp, Homo sapien
gaatggacttgaccaacaacctaga

SEQ ID NO: 2334572 - DNA, 25 bp, Homo sapien
tagttcctctgctaatagagcctcg

SEQ ID NO: 2334573 - DNA, 25 bp, Homo sapien
tgtcttaaagtagcagatcctgctc

SEQ ID NO: 2334574 - DNA, 25 bp, Homo sapien
taattaatcctttggctcgagggca

SEQ ID NO: 2334575 - DNA, 25 bp, Homo sapien
tagagcaactgtacagcaggcagaa

SEQ ID NO: 2334576 - DNA, 25 bp, Homo sapien
gatgagcccggaacagacagaatgt

SEQ ID NO: 2334577 - DNA, 25 bp, Homo sapien
ttttagaggctgagtaagtcacccc

SEQ ID NO: 2334578 - DNA, 25 bp, Homo sapien
taatagcatggataggcagtgtcgg

SEQ ID NO: 2334579 - DNA, 25 bp, Homo sapien
gatagtggtattcacagctgtgcca

SEQ ID NO: 2334580 - DNA, 25 bp, Homo sapien
ctacagatgtgcgccgctgtgcctg

SEQ ID NO: 2334581 - DNA, 25 bp, Homo sapien
agtagcacggtcatagcttacagta

SEQ ID NO: 2334582 - DNA, 25 bp, Homo sapien
agcacggtcatagcttacagtaacc

SEQ ID NO: 2334583 - DNA, 25 bp, Homo sapien
gcagtagcacggtcatagcttacag

SEQ ID NO: 2334584 - DNA, 25 bp, Homo sapien
tccaagggaatctcaaaatgagtcc

SEQ ID NO: 2334585 - DNA, 25 bp, Homo sapien
tagaacctaatagaacctttggatg

SEQ ID NO: 2334586 - DNA, 25 bp, Homo sapien
cctttggatgtacggcctaggaatc

SEQ ID NO: 2334587 - DNA, 25 bp, Homo sapien
aactagtctctaggagtgatccaca

SEQ ID NO: 2334588 - DNA, 25 bp, Homo sapien
caaatagattaagaattaccgtctc

SEQ ID NO: 2334589 - DNA, 25 bp, Homo sapien
taagaattaccgtctctaagaaaga

SEQ ID NO: 2334590 - DNA, 25 bp, Homo sapien
tagattaagaattaccgtctctaag

SEQ ID NO: 2334591 - DNA, 25 bp, Homo sapien
tgtctccaggaacaaatagattaag

SEQ ID NO: 2334592 - DNA, 25 bp, Homo sapien
tctaagcagggctatttcgacaagg

SEQ ID NO: 2334593 - DNA, 25 bp, Homo sapien
tcaccaccagattcagagctcaaca

SEQ ID NO: 2334594 - DNA, 25 bp, Homo sapien
caaggcctctttcagtacctgttag

SEQ ID NO: 2334595 - DNA, 25 bp, Homo sapien
gggagtttgttcattcaatctgatc

SEQ ID NO: 2334596 - DNA, 25 bp, Homo sapien
gacatggcttgacttggcttgtctt

SEQ ID NO: 2334597 - DNA, 25 bp, Homo sapien
tgtgttacaacagactgcagggagc

SEQ ID NO: 2334598 - DNA, 25 bp, Homo sapien
accacgatgcgggttctgaagaggc

SEQ ID NO: 2334599 - DNA, 25 bp, Homo sapien
aagctgctggagtgaccccggaaaa

SEQ ID NO: 2334600 - DNA, 25 bp, Homo sapien
tgtggaactcccattctagtaggga

SEQ ID NO: 2334601 - DNA, 25 bp, Homo sapien
tgtgcagggcactacgaagttttag

SEQ ID NO: 2334602 - DNA, 25 bp, Homo sapien
tcatcagtgaacaacagacagctcc

SEQ ID NO: 2334603 - DNA, 25 bp, Homo sapien
ggaactggtcctcatgacattggca

SEQ ID NO: 2334604 - DNA, 25 bp, Homo sapien
ttactttcgtcttcttataacaaga

SEQ ID NO: 2334605 - DNA, 25 bp, Homo sapien
gatgctatgctaaggaaagtagccc

SEQ ID NO: 2334606 - DNA, 25 bp, Homo sapien
agtagccctgtcagcacgcaaacag

SEQ ID NO: 2334607 - DNA, 25 bp, Homo sapien
tgtcagcacgcaaacagatcttatg

SEQ ID NO: 2334608 - DNA, 25 bp, Homo sapien
tggccggcaggggcggggcgagccc

SEQ ID NO: 2334609 - DNA, 25 bp, Homo sapien
ggtgtggccggcaggggcggggcga

SEQ ID NO: 2334610 - DNA, 25 bp, Homo sapien
ggcaggggcggggcgagcccggcat

SEQ ID NO: 2334611 - DNA, 25 bp, Homo sapien
cggcaggggcggggcgagcccggca

SEQ ID NO: 2334612 - DNA, 25 bp, Homo sapien
ccgccgagggaacgcgggactgcgc

SEQ ID NO: 2334613 - DNA, 25 bp, Homo sapien
cgcagagagcgcgtcccgaagcagc

SEQ ID NO: 2334614 - DNA, 25 bp, Homo sapien
gagccctttccgctacactccacgg

SEQ ID NO: 2334615 - DNA, 25 bp, Homo sapien
tcccgaagcagcgagaaacggagga

SEQ ID NO: 2334616 - DNA, 25 bp, Homo sapien
tttccgctacactccacggcggcgg

SEQ ID NO: 2334617 - DNA, 25 bp, Homo sapien
cgctgccggcgctcaggggcgctca

SEQ ID NO: 2334618 - DNA, 25 bp, Homo sapien
cgcggccgctgccggcgctcagggg

SEQ ID NO: 2334619 - DNA, 25 bp, Homo sapien
ggccgctgccggcgctcaggggcgc

SEQ ID NO: 2334620 - DNA, 25 bp, Homo sapien
ccgctgccggcgctcaggggcgctc

SEQ ID NO: 2334621 - DNA, 25 bp, Homo sapien
ttgtgagctgcttccgacttgttcg

SEQ ID NO: 2334622 - DNA, 25 bp, Homo sapien
tcttcatcctcttcgcgaccgcggc

SEQ ID NO: 2334623 - DNA, 25 bp, Homo sapien
gcgtccggtgttgtgagctgcttcc

SEQ ID NO: 2334624 - DNA, 25 bp, Homo sapien
cgacttgttcgggaactctctcttc

SEQ ID NO: 2334625 - DNA, 25 bp, Homo sapien
acacgaaaccaccccaggtccacag

SEQ ID NO: 2334626 - DNA, 25 bp, Homo sapien
gacacgaaaccaccccaggtccaca

SEQ ID NO: 2334627 - DNA, 25 bp, Homo sapien
cacgaaaccaccccaggtccacagc

SEQ ID NO: 2334628 - DNA, 25 bp, Homo sapien
agcacggtgcctcgcgcgtagtttc

SEQ ID NO: 2334629 - DNA, 25 bp, Homo sapien
acggagctgcctacttgggcgcgac

SEQ ID NO: 2334630 - DNA, 25 bp, Homo sapien
cgagggtgacctctacgcctcagca

SEQ ID NO: 2334631 - DNA, 25 bp, Homo sapien
ccgaacacaagtctggcggcacgga

SEQ ID NO: 2334632 - DNA, 25 bp, Homo sapien
cttctggagccagtaagctcgcgct

SEQ ID NO: 2334633 - DNA, 25 bp, Homo sapien
gagccagtaagctcgcgcttcctgg

SEQ ID NO: 2334634 - DNA, 25 bp, Homo sapien
cttcctgggcggtcggggcgagttg

SEQ ID NO: 2334635 - DNA, 25 bp, Homo sapien
tgctgcgacttccacccagcatcat

SEQ ID NO: 2334636 - DNA, 25 bp, Homo sapien
tgctttgccactccattgttccact

SEQ ID NO: 2334637 - DNA, 25 bp, Homo sapien
gttccactgttctagtgaaaatgtt

SEQ ID NO: 2334638 - DNA, 25 bp, Homo sapien
ctttgccactccattgttccactgt

SEQ ID NO: 2334639 - DNA, 25 bp, Homo sapien
actgctttgccactccattgttcca

SEQ ID NO: 2334640 - DNA, 25 bp, Homo sapien
catgaccttggttagagtaagtaga

SEQ ID NO: 2334641 - DNA, 25 bp, Homo sapien
taacgaatgcgttacctcatgccat

SEQ ID NO: 2334642 - DNA, 25 bp, Homo sapien
caatatatcgtcaggaactacagtc

SEQ ID NO: 2334643 - DNA, 25 bp, Homo sapien
tagaaaggcggtaaagacacacaca

SEQ ID NO: 2334644 - DNA, 25 bp, Homo sapien
agcaaaagcctcatcataagataac

SEQ ID NO: 2334645 - DNA, 25 bp, Homo sapien
caagaaggtccggagaagtaggtga

SEQ ID NO: 2334646 - DNA, 25 bp, Homo sapien
ccggagaagtaggtgaagcaaggtt

SEQ ID NO: 2334647 - DNA, 25 bp, Homo sapien
gcaaggtttacttcatggaagcctt

SEQ ID NO: 2334648 - DNA, 25 bp, Homo sapien
agcaaggtttacttcatggaagcct

SEQ ID NO: 2334649 - DNA, 25 bp, Homo sapien
agggtgtggccggtagatgacactt

SEQ ID NO: 2334650 - DNA, 25 bp, Homo sapien
ctggataggtacagaggataaagct

SEQ ID NO: 2334651 - DNA, 25 bp, Homo sapien
tggataggtacagaggataaagctg

SEQ ID NO: 2334652 - DNA, 25 bp, Homo sapien
gtagatgacacttggtgaggtagtc

SEQ ID NO: 2334653 - DNA, 25 bp, Homo sapien
tgaatacacgggttgtgtaggaagt

SEQ ID NO: 2334654 - DNA, 25 bp, Homo sapien
tatttccgcacaatttaaacgtctg

SEQ ID NO: 2334655 - DNA, 25 bp, Homo sapien
ctgatactagatatttccgcacaat

SEQ ID NO: 2334656 - DNA, 25 bp, Homo sapien
cacgggttgtgtaggaagttcagaa

SEQ ID NO: 2334657 - DNA, 25 bp, Homo sapien
tgtgactccagaggtagagcaaggg

SEQ ID NO: 2334658 - DNA, 25 bp, Homo sapien
gctgtgactccagaggtagagcaag

SEQ ID NO: 2334659 - DNA, 25 bp, Homo sapien
agctgtgactccagaggtagagcaa

SEQ ID NO: 2334660 - DNA, 25 bp, Homo sapien
tgactccagaggtagagcaaggggc

SEQ ID NO: 2334661 - DNA, 25 bp, Homo sapien
gactatcagtactcaacccaaaaat

SEQ ID NO: 2334662 - DNA, 25 bp, Homo sapien
cctctgagcttttgcgagttcttct

SEQ ID NO: 2334663 - DNA, 25 bp, Homo sapien
aaaacagatgggcttcgtaaacgag

SEQ ID NO: 2334664 - DNA, 25 bp, Homo sapien
tagtagcaccctgtaaaaactctct

SEQ ID NO: 2334665 - DNA, 25 bp, Homo sapien
gaaaatggcctctcttaagataaga

SEQ ID NO: 2334666 - DNA, 25 bp, Homo sapien
gaagacacagttaaccaagtaagta

SEQ ID NO: 2334667 - DNA, 25 bp, Homo sapien
caccggaaggtagagagtgataagt

SEQ ID NO: 2334668 - DNA, 25 bp, Homo sapien
tgtaaagtaatatatcaccggaagg

SEQ ID NO: 2334669 - DNA, 25 bp, Homo sapien
gcatcaccctaatatatcaggcatg

SEQ ID NO: 2334670 - DNA, 25 bp, Homo sapien
gaacttctattaggtaaagtcacga

SEQ ID NO: 2334671 - DNA, 25 bp, Homo sapien
caaacacttgtataaccgcatatac

SEQ ID NO: 2334672 - DNA, 25 bp, Homo sapien
gagaactgcctaccaactatgaaca

SEQ ID NO: 2334673 - DNA, 25 bp, Homo sapien
cactacgccctgctggattatttta

SEQ ID NO: 2334674 - DNA, 25 bp, Homo sapien
actacgccctgctggattattttaa

SEQ ID NO: 2334675 - DNA, 25 bp, Homo sapien
ccactacgccctgctggattatttt

SEQ ID NO: 2334676 - DNA, 25 bp, Homo sapien
aagtcctcagtgacctacaaagaga

SEQ ID NO: 2334677 - DNA, 25 bp, Homo sapien
cataaagcaagtcctcagtgaccta

SEQ ID NO: 2334678 - DNA, 25 bp, Homo sapien
agtcctcagtgacctacaaagagac

SEQ ID NO: 2334679 - DNA, 25 bp, Homo sapien
aagcaagtcctcagtgacctacaaa

SEQ ID NO: 2334680 - DNA, 25 bp, Homo sapien
gggagggacgcccgccattgcccag

SEQ ID NO: 2334681 - DNA, 25 bp, Homo sapien
ggcggcaacgaggctgggggaggga

SEQ ID NO: 2334682 - DNA, 25 bp, Homo sapien
agggacgcccgccattgcccaggct

SEQ ID NO: 2334683 - DNA, 25 bp, Homo sapien
cggcaacgaggctgggggagggacg

SEQ ID NO: 2334684 - DNA, 25 bp, Homo sapien
cagaccggcttaagaaacggcgcac

SEQ ID NO: 2334685 - DNA, 25 bp, Homo sapien
attgcgcttttcagaccggcttaag

SEQ ID NO: 2334686 - DNA, 25 bp, Homo sapien
cgcaccacgagactatatcccacac

SEQ ID NO: 2334687 - DNA, 25 bp, Homo sapien
ttcagaccggcttaagaaacggcgc

SEQ ID NO: 2334688 - DNA, 25 bp, Homo sapien
ctcaaatagactagctgtgagttct

SEQ ID NO: 2334689 - DNA, 25 bp, Homo sapien
tgatctcgcacttttgaaagcctct

SEQ ID NO: 2334690 - DNA, 25 bp, Homo sapien
aagttgatctcgcacttttgaaagc

SEQ ID NO: 2334691 - DNA, 25 bp, Homo sapien
cgcacttttgaaagcctctcacatt

SEQ ID NO: 2334692 - DNA, 25 bp, Homo sapien
gccacagtgtcaatgctaacagcca

SEQ ID NO: 2334693 - DNA, 25 bp, Homo sapien
tgggtgaaactaagcagggctagct

SEQ ID NO: 2334694 - DNA, 25 bp, Homo sapien
tggaaagccctacatgtctaaagac

SEQ ID NO: 2334695 - DNA, 25 bp, Homo sapien
tacaattagtgatggtgcagcaaca

SEQ ID NO: 2334696 - DNA, 25 bp, Homo sapien
gcttgatatttgcttctctcaccat

SEQ ID NO: 2334697 - DNA, 25 bp, Homo sapien
tttccttgtgcttcttttagctgtt

SEQ ID NO: 2334698 - DNA, 25 bp, Homo sapien
tgctgttgcctgcttgatatttgct

SEQ ID NO: 2334699 - DNA, 25 bp, Homo sapien
ttctgctgttgcctgcttgatattt

SEQ ID NO: 2334700 - DNA, 25 bp, Homo sapien
tcaatgcagctacttcagcttgaag

SEQ ID NO: 2334701 - DNA, 25 bp, Homo sapien
tggcaaaggctcctgcgtaggtgat

SEQ ID NO: 2334702 - DNA, 25 bp, Homo sapien
cacactgaggtcctgatgactgcca

SEQ ID NO: 2334703 - DNA, 25 bp, Homo sapien
tggagaactggacaatacaagtgtc

SEQ ID NO: 2334704 - DNA, 25 bp, Homo sapien
gaggggacagtccttgatgagttac

SEQ ID NO: 2334705 - DNA, 25 bp, Homo sapien
tcagtgatgagaactaacaagtatc

SEQ ID NO: 2334706 - DNA, 25 bp, Homo sapien
aacaagtatcaacagagtcagaggg

SEQ ID NO: 2334707 - DNA, 25 bp, Homo sapien
gagaactaacaagtatcaacagagt

SEQ ID NO: 2334708 - DNA, 25 bp, Homo sapien
ctgaaagcagccagctctagataaa

SEQ ID NO: 2334709 - DNA, 25 bp, Homo sapien
ctcccccatcttaatactgcattat

SEQ ID NO: 2334710 - DNA, 25 bp, Homo sapien
tgtactaaaaattttgctggcaaaa

SEQ ID NO: 2334711 - DNA, 25 bp, Homo sapien
tgctggcaaaaatgataactgacac

SEQ ID NO: 2334712 - DNA, 25 bp, Homo sapien
tcagccaggtagaaaatggaactga

SEQ ID NO: 2334713 - DNA, 25 bp, Homo sapien
tccaaggtcagccaggtagaaaatg

SEQ ID NO: 2334714 - DNA, 25 bp, Homo sapien
caggtagaaaatggaactgaagaat

SEQ ID NO: 2334715 - DNA, 25 bp, Homo sapien
ggtactccaaggtcagccaggtaga

SEQ ID NO: 2334716 - DNA, 25 bp, Homo sapien
taggactcccttgctgacataaaat

SEQ ID NO: 2334717 - DNA, 25 bp, Homo sapien
tctgaataacagactggctgaactg

SEQ ID NO: 2334718 - DNA, 25 bp, Homo sapien
catactttgtaagcgcactctagca

SEQ ID NO: 2334719 - DNA, 25 bp, Homo sapien
gatacatgataatggtggccttaca

SEQ ID NO: 2334720 - DNA, 25 bp, Homo sapien
ccacaatcggaattcattatacaag

SEQ ID NO: 2334721 - DNA, 25 bp, Homo sapien
tcctggtagattttgtctaagaaag

SEQ ID NO: 2334722 - DNA, 25 bp, Homo sapien
catggaaagatatcttcctggtaga

SEQ ID NO: 2334723 - DNA, 25 bp, Homo sapien
gaaaggacacgtcctgtccattgtg

SEQ ID NO: 2334724 - DNA, 25 bp, Homo sapien
aagttccactagcttggctttagca

SEQ ID NO: 2334725 - DNA, 25 bp, Homo sapien
tctggacgaggattcaaggcatcaa

SEQ ID NO: 2334726 - DNA, 25 bp, Homo sapien
tgcacaagagtgagtctacaaaaga

SEQ ID NO: 2334727 - DNA, 25 bp, Homo sapien
tgttcactccttacccacgattaat

SEQ ID NO: 2334728 - DNA, 25 bp, Homo sapien
ttagagtattgttttccacagcctc

SEQ ID NO: 2334729 - DNA, 25 bp, Homo sapien
aatcccactggttcaatgcttagag

SEQ ID NO: 2334730 - DNA, 25 bp, Homo sapien
gataggttgtaatcccactggttca

SEQ ID NO: 2334731 - DNA, 25 bp, Homo sapien
tcacaaaccggataggttgtaatcc

SEQ ID NO: 2334732 - DNA, 25 bp, Homo sapien
tccagtcagatatctctaactcctt

SEQ ID NO: 2334733 - DNA, 25 bp, Homo sapien
cagttgttatgtattgctctttatc

SEQ ID NO: 2334734 - DNA, 25 bp, Homo sapien
gctctttatccaaattacccttatg

SEQ ID NO: 2334735 - DNA, 25 bp, Homo sapien
cactgaccatcctttgaacgcactt

SEQ ID NO: 2334736 - DNA, 25 bp, Homo sapien
cacccttccacaagcggcagtgtgt

SEQ ID NO: 2334737 - DNA, 25 bp, Homo sapien
catcaccctgggtgattcaggaaga

SEQ ID NO: 2334738 - DNA, 25 bp, Homo sapien
taaatctctataactctagtcccaa

SEQ ID NO: 2334739 - DNA, 25 bp, Homo sapien
gtaaactggacacacctaatgtatt

SEQ ID NO: 2334740 - DNA, 25 bp, Homo sapien
tagcttgcagggtaatagtttccag

SEQ ID NO: 2334741 - DNA, 25 bp, Homo sapien
catttaatgtgggacctagggagaa

SEQ ID NO: 2334742 - DNA, 25 bp, Homo sapien
ttctggctgggattaggctatcaac

SEQ ID NO: 2334743 - DNA, 25 bp, Homo sapien
ggctatcaacctcttgagggcaggg

SEQ ID NO: 2334744 - DNA, 25 bp, Homo sapien
tactctggccagtgagagcacattt

SEQ ID NO: 2334745 - DNA, 25 bp, Homo sapien
ttactctggccagtgagagcacatt

SEQ ID NO: 2334746 - DNA, 25 bp, Homo sapien
actctggccagtgagagcacatttt

SEQ ID NO: 2334747 - DNA, 25 bp, Homo sapien
taataatagttgcttgagtccccta

SEQ ID NO: 2334748 - DNA, 25 bp, Homo sapien
cctaatttaattctgtgtttacagg

SEQ ID NO: 2334749 - DNA, 25 bp, Homo sapien
tgagtcccctaatttaattctgtgt

SEQ ID NO: 2334750 - DNA, 25 bp, Homo sapien
tagttgcttgagtcccctaatttaa

SEQ ID NO: 2334751 - DNA, 25 bp, Homo sapien
caaatgtcccatatcaaagcaagct

SEQ ID NO: 2334752 - DNA, 25 bp, Homo sapien
tgtcccatatcaaagcaagctttat

SEQ ID NO: 2334753 - DNA, 25 bp, Homo sapien
tgtcatgaatggtcaaatgtcccat

SEQ ID NO: 2334754 - DNA, 25 bp, Homo sapien
aatggtcaaatgtcccatatcaaag

SEQ ID NO: 2334755 - DNA, 25 bp, Homo sapien
tcacgagtccctgctgaatgtatcg

SEQ ID NO: 2334756 - DNA, 25 bp, Homo sapien
tgaatgtatcgaatgtatgtaaaaa

SEQ ID NO: 2334757 - DNA, 25 bp, Homo sapien
gaatgtatcgaatgtatgtaaaaaa

SEQ ID NO: 2334758 - DNA, 25 bp, Homo sapien
cgagtccctgctgaatgtatcgaat

SEQ ID NO: 2334759 - DNA, 25 bp, Homo sapien
agctgtcaggccatattagttttca

SEQ ID NO: 2334760 - DNA, 25 bp, Homo sapien
tctcctggatatatcacctgcacat

SEQ ID NO: 2334761 - DNA, 25 bp, Homo sapien
ccttatgagttaaaactgaccctgc

SEQ ID NO: 2334762 - DNA, 25 bp, Homo sapien
tgtgctcgagagatactgctttgga

SEQ ID NO: 2334763 - DNA, 25 bp, Homo sapien
actccagggtacgtttggcaatgaa

SEQ ID NO: 2334764 - DNA, 25 bp, Homo sapien
ttagctgccctaaatcctttgttgg

SEQ ID NO: 2334765 - DNA, 25 bp, Homo sapien
ggcacaaggcacatataataaacag

SEQ ID NO: 2334766 - DNA, 25 bp, Homo sapien
tagtaccaaggtcgagaaattctgc

SEQ ID NO: 2334767 - DNA, 25 bp, Homo sapien
tgcataacctcccaaaacatctgat

SEQ ID NO: 2334768 - DNA, 25 bp, Homo sapien
aactgcataacctcccaaaacatct

SEQ ID NO: 2334769 - DNA, 25 bp, Homo sapien
actgcataacctcccaaaacatctg

SEQ ID NO: 2334770 - DNA, 25 bp, Homo sapien
caactgcataacctcccaaaacatc

SEQ ID NO: 2334771 - DNA, 25 bp, Homo sapien
cctggaattcttcatagtgtgttca

SEQ ID NO: 2334772 - DNA, 25 bp, Homo sapien
attacattcactagtacacctggaa

SEQ ID NO: 2334773 - DNA, 25 bp, Homo sapien
aaaaaagtcttaggctcactccttg

SEQ ID NO: 2334774 - DNA, 25 bp, Homo sapien
gaaatcatggtacttcttagagcaa

SEQ ID NO: 2334775 - DNA, 25 bp, Homo sapien
gacactcaggaatacatctctggga

SEQ ID NO: 2334776 - DNA, 25 bp, Homo sapien
tctgaaagctgaaaggctactatcc

SEQ ID NO: 2334777 - DNA, 25 bp, Homo sapien
cagataaggatactcgtcacagcat

SEQ ID NO: 2334778 - DNA, 25 bp, Homo sapien
cacattcttgagctaggcatggtac

SEQ ID NO: 2334779 - DNA, 25 bp, Homo sapien
tagtttctacatcaagtcgtcatcc

SEQ ID NO: 2334780 - DNA, 25 bp, Homo sapien
ttgaaaagcattcttccccttatag

SEQ ID NO: 2334781 - DNA, 25 bp, Homo sapien
aaagagcatgcttctagtgtataag

SEQ ID NO: 2334782 - DNA, 25 bp, Homo sapien
ttctttcaaaccgtacagtatctcc

SEQ ID NO: 2334783 - DNA, 25 bp, Homo sapien
gtaggatcaggaagataatcacatt

SEQ ID NO: 2334784 - DNA, 25 bp, Homo sapien
tcttcctaaagggagtaggatcagg

SEQ ID NO: 2334785 - DNA, 25 bp, Homo sapien
gttcttcctaaagggagtaggatca

SEQ ID NO: 2334786 - DNA, 25 bp, Homo sapien
tcctaaagggagtaggatcaggaag

SEQ ID NO: 2334787 - DNA, 25 bp, Homo sapien
tatgtgagtgatcctaatgactaaa

SEQ ID NO: 2334788 - DNA, 25 bp, Homo sapien
ttgatacccccatcagcaatatgtg

SEQ ID NO: 2334789 - DNA, 25 bp, Homo sapien
cagtggatataccaattgatacccc

SEQ ID NO: 2334790 - DNA, 25 bp, Homo sapien
tcctaatgactaaaaccctctccaa

SEQ ID NO: 2334791 - DNA, 25 bp, Homo sapien
gacttactcatagatttgctcctcc

SEQ ID NO: 2334792 - DNA, 25 bp, Homo sapien
tctgagttattgtgctgcaagtagc

SEQ ID NO: 2334793 - DNA, 25 bp, Homo sapien
ggactaaaacattaccagtgactta

SEQ ID NO: 2334794 - DNA, 25 bp, Homo sapien
tgtcaatgcctaaacagctgttcag

SEQ ID NO: 2334795 - DNA, 25 bp, Homo sapien
taaggactaagacccaatgttcaga

SEQ ID NO: 2334796 - DNA, 25 bp, Homo sapien
ggtctaagtgactcccaatccagag

SEQ ID NO: 2334797 - DNA, 25 bp, Homo sapien
taaagcgcccatctgatcccatggc

SEQ ID NO: 2334798 - DNA, 25 bp, Homo sapien
ttataaagatccctgcggctgccgt

SEQ ID NO: 2334799 - DNA, 25 bp, Homo sapien
aaccctggtgccgagatctgcggaa

SEQ ID NO: 2334800 - DNA, 25 bp, Homo sapien
gagcccacaagatgcaaccctggtg

SEQ ID NO: 2334801 - DNA, 25 bp, Homo sapien
catggagtgcataccctgagcaagg

SEQ ID NO: 2334802 - DNA, 25 bp, Homo sapien
gtgtgaacttgtgctcccttgagaa

SEQ ID NO: 2334803 - DNA, 25 bp, Homo sapien
catttaatggcctgagaagctaagg

SEQ ID NO: 2334804 - DNA, 25 bp, Homo sapien
taagatgcctaaaacatgtagcctc

SEQ ID NO: 2334805 - DNA, 25 bp, Homo sapien
tcctggagaccaccggaaatgagtc

SEQ ID NO: 2334806 - DNA, 25 bp, Homo sapien
tagtaaagcctgaagcacgcgatgt

SEQ ID NO: 2334807 - DNA, 25 bp, Homo sapien
ggggtacacaatgatatttccatac

SEQ ID NO: 2334808 - DNA, 25 bp, Homo sapien
tccttccagctattagctatttgaa

SEQ ID NO: 2334809 - DNA, 25 bp, Homo sapien
cagtggtacaggatatattaaacaa

SEQ ID NO: 2334810 - DNA, 25 bp, Homo sapien
tgcctagtatggtgcgagaggagat

SEQ ID NO: 2334811 - DNA, 25 bp, Homo sapien
ctgctgcagggcctcattttcgcct

SEQ ID NO: 2334812 - DNA, 25 bp, Homo sapien
gctgcagggcctcattttcgcctac

SEQ ID NO: 2334813 - DNA, 25 bp, Homo sapien
agggcctcattttcgcctaccacat

SEQ ID NO: 2334814 - DNA, 25 bp, Homo sapien
tgcagggcctcattttcgcctacca

SEQ ID NO: 2334815 - DNA, 25 bp, Homo sapien
gataatagctatctggagaatttaa

SEQ ID NO: 2334816 - DNA, 25 bp, Homo sapien
cttttgataatagctatctggagaa

SEQ ID NO: 2334817 - DNA, 25 bp, Homo sapien
tttgataatagctatctggagaatt

SEQ ID NO: 2334818 - DNA, 25 bp, Homo sapien
tgataatagctatctggagaattta

SEQ ID NO: 2334819 - DNA, 25 bp, Homo sapien
tcctatacagcttatggacagcaga

SEQ ID NO: 2334820 - DNA, 25 bp, Homo sapien
aacatggggcacttccgtggtattc

SEQ ID NO: 2334821 - DNA, 25 bp, Homo sapien
cttccgtggtattcctatacagctt

SEQ ID NO: 2334822 - DNA, 25 bp, Homo sapien
ttttcctgaacatggggcacttccg

SEQ ID NO: 2334823 - DNA, 25 bp, Homo sapien
ttccccaacagtgataaggccctct

SEQ ID NO: 2334824 - DNA, 25 bp, Homo sapien
caacagtgataaggccctcttcttg

SEQ ID NO: 2334825 - DNA, 25 bp, Homo sapien
cacctgccagtcctatataaagatc

SEQ ID NO: 2334826 - DNA, 25 bp, Homo sapien
cctgccagtcctatataaagatctt

SEQ ID NO: 2334827 - DNA, 25 bp, Homo sapien
tccaatgggttagagcacaggagca

SEQ ID NO: 2334828 - DNA, 25 bp, Homo sapien
ggaacacttttctatgcggatgcct

SEQ ID NO: 2334829 - DNA, 25 bp, Homo sapien
cagccctaggaggtgtccatcaata

SEQ ID NO: 2334830 - DNA, 25 bp, Homo sapien
tacttctgcagttacccagggatgc

SEQ ID NO: 2334831 - DNA, 25 bp, Homo sapien
ggttctccagagtaccattggctcc

SEQ ID NO: 2334832 - DNA, 25 bp, Homo sapien
ctccagagtaccattggctccctga

SEQ ID NO: 2334833 - DNA, 25 bp, Homo sapien
aattcctccaacagacttgtgtcca

SEQ ID NO: 2334834 - DNA, 25 bp, Homo sapien
aagtcattgcccagaaattcctcca

SEQ ID NO: 2334835 - DNA, 25 bp, Homo sapien
cgccgggcagagacacaaccaaaaa

SEQ ID NO: 2334836 - DNA, 25 bp, Homo sapien
caacgccgggcagagacacaaccaa

SEQ ID NO: 2334837 - DNA, 25 bp, Homo sapien
accaacgccgggcagagacacaacc

SEQ ID NO: 2334838 - DNA, 25 bp, Homo sapien
atcctgataccaacgccgggcagag

SEQ ID NO: 2334839 - DNA, 25 bp, Homo sapien
tgagtcggatgcagaatagggcggg

SEQ ID NO: 2334840 - DNA, 25 bp, Homo sapien
ggagagcatgagtcggatgcagaat

SEQ ID NO: 2334841 - DNA, 25 bp, Homo sapien
tgcggaggagagcatgagtcggatg

SEQ ID NO: 2334842 - DNA, 25 bp, Homo sapien
gagcatgagtcggatgcagaatagg

SEQ ID NO: 2334843 - DNA, 25 bp, Homo sapien
atgtgctgaaggtggatcgcactca

SEQ ID NO: 2334844 - DNA, 25 bp, Homo sapien
gatgtgctgaaggtggatcgcactc

SEQ ID NO: 2334845 - DNA, 25 bp, Homo sapien
tgtgctgaaggtggatcgcactcac

SEQ ID NO: 2334846 - DNA, 25 bp, Homo sapien
gagtcgcccattccagaggtgctct

SEQ ID NO: 2334847 - DNA, 25 bp, Homo sapien
caagatgactggcgtttgagtggca

SEQ ID NO: 2334848 - DNA, 25 bp, Homo sapien
taagaacaacctatccccagatggg

SEQ ID NO: 2334849 - DNA, 25 bp, Homo sapien
gaaagcctccgtggatttggcagga

SEQ ID NO: 2334850 - DNA, 25 bp, Homo sapien
cttcttggttggaggcaatgaggct

SEQ ID NO: 2334851 - DNA, 25 bp, Homo sapien
agtggcaggcccacactcggcattc

SEQ ID NO: 2334852 - DNA, 25 bp, Homo sapien
tccccggagtcctccagtgcctgcg

SEQ ID NO: 2334853 - DNA, 25 bp, Homo sapien
ttctcttcttggttggaggcaatga

SEQ ID NO: 2334854 - DNA, 25 bp, Homo sapien
tgaaattgaaagattggcacttcac

SEQ ID NO: 2334855 - DNA, 25 bp, Homo sapien
aaattgaaagattggcacttcaccc

SEQ ID NO: 2334856 - DNA, 25 bp, Homo sapien
gaaattgaaagattggcacttcacc

SEQ ID NO: 2334857 - DNA, 25 bp, Homo sapien
cctgaaattgaaagattggcacttc

SEQ ID NO: 2334858 - DNA, 25 bp, Homo sapien
agctgacgccaaaggtccctcagag

SEQ ID NO: 2334859 - DNA, 25 bp, Homo sapien
cccacgctggagctgacgccaaagg

SEQ ID NO: 2334860 - DNA, 25 bp, Homo sapien
cctcagagaatcagctcttaccatg

SEQ ID NO: 2334861 - DNA, 25 bp, Homo sapien
tcagagaatcagctcttaccatggg

SEQ ID NO: 2334862 - DNA, 25 bp, Homo sapien
ggcagcagaaaaccatcgcaggatg

SEQ ID NO: 2334863 - DNA, 25 bp, Homo sapien
tagtcagcttttcagtgacctgtga

SEQ ID NO: 2334864 - DNA, 25 bp, Homo sapien
gcagcaatctggtttgatgagggaa

SEQ ID NO: 2334865 - DNA, 25 bp, Homo sapien
gatggagcttaactctgggatggcc

SEQ ID NO: 2334866 - DNA, 25 bp, Homo sapien
tgaggatctcttgagaaaatctaac

SEQ ID NO: 2334867 - DNA, 25 bp, Homo sapien
tcttcgcttcatgctagattgagga

SEQ ID NO: 2334868 - DNA, 25 bp, Homo sapien
gcctaagtccagaccttttggagaa

SEQ ID NO: 2334869 - DNA, 25 bp, Homo sapien
tctaaagtggttatgaggtaaggat

SEQ ID NO: 2334870 - DNA, 25 bp, Homo sapien
tcttatgaatgtcttttggtgggca

SEQ ID NO: 2334871 - DNA, 25 bp, Homo sapien
cacaatttatcttgccgttgatggc

SEQ ID NO: 2334872 - DNA, 25 bp, Homo sapien
ccggcctcttttgcccaacagtatg

SEQ ID NO: 2334873 - DNA, 25 bp, Homo sapien
cattgccatattgtactccattgta

SEQ ID NO: 2334874 - DNA, 25 bp, Homo sapien
gggtaggaggtgtgttgctgacctc

SEQ ID NO: 2334875 - DNA, 25 bp, Homo sapien
ccatgtgtaaggcagagtgactagg

SEQ ID NO: 2334876 - DNA, 25 bp, Homo sapien
gtaggaggtgtgttgctgacctcat

SEQ ID NO: 2334877 - DNA, 25 bp, Homo sapien
atgagtgggccatgtgtaaggcaga

SEQ ID NO: 2334878 - DNA, 25 bp, Homo sapien
cttcactgctgcgactcctacttgt

SEQ ID NO: 2334879 - DNA, 25 bp, Homo sapien
gacttcactgctgcgactcctactt

SEQ ID NO: 2334880 - DNA, 25 bp, Homo sapien
tcactgctgcgactcctacttgtca

SEQ ID NO: 2334881 - DNA, 25 bp, Homo sapien
ctggacttcactgctgcgactccta

SEQ ID NO: 2334882 - DNA, 25 bp, Homo sapien
caggagagcactggtctgtaggcat

SEQ ID NO: 2334883 - DNA, 25 bp, Homo sapien
ggtctgtaggcattctgttctgtcc

SEQ ID NO: 2334884 - DNA, 25 bp, Homo sapien
caaggaacactatggcatggttgcc

SEQ ID NO: 2334885 - DNA, 25 bp, Homo sapien
tgtttaataagctgtgccaaggaac

SEQ ID NO: 2334886 - DNA, 25 bp, Homo sapien
gaaaacttgatcaacttgatgcata

SEQ ID NO: 2334887 - DNA, 25 bp, Homo sapien
ttgaaaacttgatcaacttgatgca

SEQ ID NO: 2334888 - DNA, 25 bp, Homo sapien
cttgaaaacttgatcaacttgatgc

SEQ ID NO: 2334889 - DNA, 25 bp, Homo sapien
tgaaaacttgatcaacttgatgcat

SEQ ID NO: 2334890 - DNA, 25 bp, Homo sapien
tacaactcgatagcccacatcaggt

SEQ ID NO: 2334891 - DNA, 25 bp, Homo sapien
tccccaaacttggatgtgaatggtt

SEQ ID NO: 2334892 - DNA, 25 bp, Homo sapien
ggctttaggcccatctcggtttcaa

SEQ ID NO: 2334893 - DNA, 25 bp, Homo sapien
tcatctgctggtgaaaaattaaatc

SEQ ID NO: 2334894 - DNA, 25 bp, Homo sapien
gctcctatctgcttgggactgttca

SEQ ID NO: 2334895 - DNA, 25 bp, Homo sapien
aatctttttgctcctatctgcttgg

SEQ ID NO: 2334896 - DNA, 25 bp, Homo sapien
tatctgcttgggactgttcaatagc

SEQ ID NO: 2334897 - DNA, 25 bp, Homo sapien
gcttgggactgttcaatagcaatta

SEQ ID NO: 2334898 - DNA, 25 bp, Homo sapien
tgttactttggtgacctggtcagcc

SEQ ID NO: 2334899 - DNA, 25 bp, Homo sapien
gctgtggtttcgctgaagtgtaatc

SEQ ID NO: 2334900 - DNA, 25 bp, Homo sapien
tgaagtgtaatcgtcccagtgttac

SEQ ID NO: 2334901 - DNA, 25 bp, Homo sapien
tattatttgctgtggtttcgctgaa

SEQ ID NO: 2334902 - DNA, 25 bp, Homo sapien
gatagaactggtcttggttagcagc

SEQ ID NO: 2334903 - DNA, 25 bp, Homo sapien
tgggcagacaacagatagaactggt

SEQ ID NO: 2334904 - DNA, 25 bp, Homo sapien
gacaacagatagaactggtcttggt

SEQ ID NO: 2334905 - DNA, 25 bp, Homo sapien
agagatgtgggcagacaacagatag

SEQ ID NO: 2334906 - DNA, 25 bp, Homo sapien
cagaatgctagagagtggagctccc

SEQ ID NO: 2334907 - DNA, 25 bp, Homo sapien
catgttgctgttgtgtggacttgta

SEQ ID NO: 2334908 - DNA, 25 bp, Homo sapien
gaggaggtgccaattaacagagagt

SEQ ID NO: 2334909 - DNA, 25 bp, Homo sapien
gaatcatggaactttcgacttctca

SEQ ID NO: 2334910 - DNA, 25 bp, Homo sapien
tcgaccgtgacagacaatagattct

SEQ ID NO: 2334911 - DNA, 25 bp, Homo sapien
gattctggaacttgtcctcgctgcc

SEQ ID NO: 2334912 - DNA, 25 bp, Homo sapien
tgtgttgattcctactcgaccgtga

SEQ ID NO: 2334913 - DNA, 25 bp, Homo sapien
tttgcccggctgtcagagggatgca

SEQ ID NO: 2334914 - DNA, 25 bp, Homo sapien
ccagtagagttggtgccagggactc

SEQ ID NO: 2334915 - DNA, 25 bp, Homo sapien
ggaactcttggcgatgaactgacca

SEQ ID NO: 2334916 - DNA, 25 bp, Homo sapien
gacatccaagagaaatatgatcagg

SEQ ID NO: 2334917 - DNA, 25 bp, Homo sapien
tctcaagagttcctagagaaagacg

SEQ ID NO: 2334918 - DNA, 25 bp, Homo sapien
tccctcatctctgtaataaacagtg

SEQ ID NO: 2334919 - DNA, 25 bp, Homo sapien
cctcatctctgtaataaacagtgga

SEQ ID NO: 2334920 - DNA, 25 bp, Homo sapien
atcatctccctcatctctgtaataa

SEQ ID NO: 2334921 - DNA, 25 bp, Homo sapien
tctccctcatctctgtaataaacag

SEQ ID NO: 2334922 - DNA, 25 bp, Homo sapien
tctgtcatcagcatcatcaacatta

SEQ ID NO: 2334923 - DNA, 25 bp, Homo sapien
atctgtcatcagcatcatcaacatt

SEQ ID NO: 2334924 - DNA, 25 bp, Homo sapien
ctgtcatcagcatcatcaacattac

SEQ ID NO: 2334925 - DNA, 25 bp, Homo sapien
cagaggtttcggtcatatctgcgtc

SEQ ID NO: 2334926 - DNA, 25 bp, Homo sapien
ggtcatatctgcgtcatcttctcca

SEQ ID NO: 2334927 - DNA, 25 bp, Homo sapien
ggactttgtagataatcatgttctt

SEQ ID NO: 2334928 - DNA, 25 bp, Homo sapien
ctcagttgcagaggtttcggtcata

SEQ ID NO: 2334929 - DNA, 25 bp, Homo sapien
ttgggctattcttttcagctgttca

SEQ ID NO: 2334930 - DNA, 25 bp, Homo sapien
ttttcagctgttcattcgtgtcaac

SEQ ID NO: 2334931 - DNA, 25 bp, Homo sapien
attcttttcagctgttcattcgtgt

SEQ ID NO: 2334932 - DNA, 25 bp, Homo sapien
tcttttcagctgttcattcgtgtca

SEQ ID NO: 2334933 - DNA, 25 bp, Homo sapien
atgggcagtgtttattcccattgca

SEQ ID NO: 2334934 - DNA, 25 bp, Homo sapien
acctctcttactgctctgggcagga

SEQ ID NO: 2334935 - DNA, 25 bp, Homo sapien
caacctctcttactgctctgggcag

SEQ ID NO: 2334936 - DNA, 25 bp, Homo sapien
tccgtttccgcaggtgacatcacca

SEQ ID NO: 2334937 - DNA, 25 bp, Homo sapien
tccaaggtctctccgtttccgcagg

SEQ ID NO: 2334938 - DNA, 25 bp, Homo sapien
ccctagactgatagcttatagcagc

SEQ ID NO: 2334939 - DNA, 25 bp, Homo sapien
tgctatcacagaagggggtttatcc

SEQ ID NO: 2334940 - DNA, 25 bp, Homo sapien
tgatagcttatagcagctgatatct

SEQ ID NO: 2334941 - DNA, 25 bp, Homo sapien
gggtttatccctagactgatagctt

SEQ ID NO: 2334942 - DNA, 25 bp, Homo sapien
actcggcagaacacagcttggaagc

SEQ ID NO: 2334943 - DNA, 25 bp, Homo sapien
cctggactcggcagaacacagcttg

SEQ ID NO: 2334944 - DNA, 25 bp, Homo sapien
caggaaatccctggactcggcagaa

SEQ ID NO: 2334945 - DNA, 25 bp, Homo sapien
cacttcaggaaatccctggactcgg

SEQ ID NO: 2334946 - DNA, 25 bp, Homo sapien
tgagccgctttagccgggccagctt

SEQ ID NO: 2334947 - DNA, 25 bp, Homo sapien
ttcactggctgatgacttccaacta

SEQ ID NO: 2334948 - DNA, 25 bp, Homo sapien
gggccagctttctgttccatatttc

SEQ ID NO: 2334949 - DNA, 25 bp, Homo sapien
caaggttgttagttagtttgcacag

SEQ ID NO: 2334950 - DNA, 25 bp, Homo sapien
tggagaagatgcactaacggctctg

SEQ ID NO: 2334951 - DNA, 25 bp, Homo sapien
ttcttggagaagatgcactaacggc

SEQ ID NO: 2334952 - DNA, 25 bp, Homo sapien
tgcactaacggctctgctagatttg

SEQ ID NO: 2334953 - DNA, 25 bp, Homo sapien
gaagatgcactaacggctctgctag

SEQ ID NO: 2334954 - DNA, 25 bp, Homo sapien
cctttgccagcaagtgaatacctat

SEQ ID NO: 2334955 - DNA, 25 bp, Homo sapien
gcacaaggccatctgtatgacgagg

SEQ ID NO: 2334956 - DNA, 25 bp, Homo sapien
tccctttgggatctcctaaagccaa

SEQ ID NO: 2334957 - DNA, 25 bp, Homo sapien
tgtacatagatctggcagcacaagg

SEQ ID NO: 2334958 - DNA, 25 bp, Homo sapien
tatgagaaacggggacctgagatga

SEQ ID NO: 2334959 - DNA, 25 bp, Homo sapien
gatgagatgttgtcagaccacagat

SEQ ID NO: 2334960 - DNA, 25 bp, Homo sapien
ctgagatgagatgttgtcagaccac

SEQ ID NO: 2334961 - DNA, 25 bp, Homo sapien
ccacagatgatgtgcatctctttga

SEQ ID NO: 2334962 - DNA, 25 bp, Homo sapien
tctggaaaacccaattaggacacgc

SEQ ID NO: 2334963 - DNA, 25 bp, Homo sapien
ccaattaggacacgcctgtcttttt

SEQ ID NO: 2334964 - DNA, 25 bp, Homo sapien
cacagcaatcagagttataaccaag

SEQ ID NO: 2334965 - DNA, 25 bp, Homo sapien
cagagttataaccaaggtctggaaa

SEQ ID NO: 2334966 - DNA, 25 bp, Homo sapien
cagagatgtactctcacaggccaca

SEQ ID NO: 2334967 - DNA, 25 bp, Homo sapien
agagatgtactctcacaggccacac

SEQ ID NO: 2334968 - DNA, 25 bp, Homo sapien
ggccagagatgtactctcacaggcc

SEQ ID NO: 2334969 - DNA, 25 bp, Homo sapien
gccagagatgtactctcacaggcca

SEQ ID NO: 2334970 - DNA, 25 bp, Homo sapien
atatagagggcaactatcgtcaaag

SEQ ID NO: 2334971 - DNA, 25 bp, Homo sapien
atagagggcaactatcgtcaaagca

SEQ ID NO: 2334972 - DNA, 25 bp, Homo sapien
tatagagggcaactatcgtcaaagc

SEQ ID NO: 2334973 - DNA, 25 bp, Homo sapien
gggacacgtcggtcttgatctttta

SEQ ID NO: 2334974 - DNA, 25 bp, Homo sapien
gacacgtcggtcttgatcttttaag

SEQ ID NO: 2334975 - DNA, 25 bp, Homo sapien
gagatttgggacacgtcggtcttga

SEQ ID NO: 2334976 - DNA, 25 bp, Homo sapien
tttgggacacgtcggtcttgatctt

SEQ ID NO: 2334977 - DNA, 25 bp, Homo sapien
ggcagcagagctggctcctgtgagc

SEQ ID NO: 2334978 - DNA, 25 bp, Homo sapien
tggctcctgtgagcttgtgatattg

SEQ ID NO: 2334979 - DNA, 25 bp, Homo sapien
agagctggctcctgtgagcttgtga

SEQ ID NO: 2334980 - DNA, 25 bp, Homo sapien
agctggctcctgtgagcttgtgata

SEQ ID NO: 2334981 - DNA, 25 bp, Homo sapien
agtaatttcaggtacttgtaaggag

SEQ ID NO: 2334982 - DNA, 25 bp, Homo sapien
gccggtgtggttaccagggatgtat

SEQ ID NO: 2334983 - DNA, 25 bp, Homo sapien
caggatttcacagaaagtaatttca

SEQ ID NO: 2334984 - DNA, 25 bp, Homo sapien
acggcaggatttcacagaaagtaat

SEQ ID NO: 2334985 - DNA, 25 bp, Homo sapien
atggggcagcaataagtctcctgac

SEQ ID NO: 2334986 - DNA, 25 bp, Homo sapien
tttcattccccggatggggcagcaa

SEQ ID NO: 2334987 - DNA, 25 bp, Homo sapien
tctcctcagattgtctttgcacagg

SEQ ID NO: 2334988 - DNA, 25 bp, Homo sapien
acaggacttgaagagacttctttca

SEQ ID NO: 2334989 - DNA, 25 bp, Homo sapien
gaaaagaacatcaagtgtctccagc

SEQ ID NO: 2334990 - DNA, 25 bp, Homo sapien
tacacattagcctggcctgtacaag

SEQ ID NO: 2334991 - DNA, 25 bp, Homo sapien
tgaagagtggaccagtctacgacct

SEQ ID NO: 2334992 - DNA, 25 bp, Homo sapien
ttgttcagaggtcaagaaacccttg

SEQ ID NO: 2334993 - DNA, 25 bp, Homo sapien
ttccttctcacttcatttcattcat

SEQ ID NO: 2334994 - DNA, 25 bp, Homo sapien
ttcattcatttcatccatttcatct

SEQ ID NO: 2334995 - DNA, 25 bp, Homo sapien
tgtcctcccgtagctcagagtaatt

SEQ ID NO: 2334996 - DNA, 25 bp, Homo sapien
tcttccattgctgataccctttctt

SEQ ID NO: 2334997 - DNA, 25 bp, Homo sapien
agtgcatttcttgccaaaactgatt

SEQ ID NO: 2334998 - DNA, 25 bp, Homo sapien
cgctgagtgcatttcttgccaaaac

SEQ ID NO: 2334999 - DNA, 25 bp, Homo sapien
tgagtgcatttcttgccaaaactga

SEQ ID NO: 2335000 - DNA, 25 bp, Homo sapien
gctgagtgcatttcttgccaaaact

SEQ ID NO: 2335001 - DNA, 25 bp, Homo sapien
tactgatgatctattatttgctgga

SEQ ID NO: 2335002 - DNA, 25 bp, Homo sapien
gcaatactgatgatctattatttgc

SEQ ID NO: 2335003 - DNA, 25 bp, Homo sapien
tgaatgcaatactgatgatctatta

SEQ ID NO: 2335004 - DNA, 25 bp, Homo sapien
atagaactgatggttgtatcaatcc

SEQ ID NO: 2335005 - DNA, 25 bp, Homo sapien
tcagagagtcagcaacagagctgct

SEQ ID NO: 2335006 - DNA, 25 bp, Homo sapien
taacttggagccatgagcaacaatg

SEQ ID NO: 2335007 - DNA, 25 bp, Homo sapien
gagctgctccctaggctttctgctt

SEQ ID NO: 2335008 - DNA, 25 bp, Homo sapien
ctcacttgtaacttggagccatgag

SEQ ID NO: 2335009 - DNA, 25 bp, Homo sapien
taacaggaatattgtaattataatt

SEQ ID NO: 2335010 - DNA, 25 bp, Homo sapien
tattaacaggaatattgtaattata

SEQ ID NO: 2335011 - DNA, 25 bp, Homo sapien
aacttgacattggtgggtgtgtgtt

SEQ ID NO: 2335012 - DNA, 25 bp, Homo sapien
cttgacattggtgggtgtgtgttta

SEQ ID NO: 2335013 - DNA, 25 bp, Homo sapien
gaagactatcaatggctctgttgtg

SEQ ID NO: 2335014 - DNA, 25 bp, Homo sapien
tttccaagggtgaatttgcactgga

SEQ ID NO: 2335015 - DNA, 25 bp, Homo sapien
gaatttgcactggaagactatcaat

SEQ ID NO: 2335016 - DNA, 25 bp, Homo sapien
tccccttttactatggaaacatata

SEQ ID NO: 2335017 - DNA, 25 bp, Homo sapien
catgctgtcagaaaatggggctaca

SEQ ID NO: 2335018 - DNA, 25 bp, Homo sapien
ctacagggaggctccaaatgtgctg

SEQ ID NO: 2335019 - DNA, 25 bp, Homo sapien
tacagggaggctccaaatgtgctga

SEQ ID NO: 2335020 - DNA, 25 bp, Homo sapien
tggaacatgctgtcagaaaatgggg

SEQ ID NO: 2335021 - DNA, 25 bp, Homo sapien
ggtgaagaatatcccagcaaaataa

SEQ ID NO: 2335022 - DNA, 25 bp, Homo sapien
taaaagaagtaatcggtgaagaata

SEQ ID NO: 2335023 - DNA, 25 bp, Homo sapien
cacagcgtcgatagaagtaaaagaa

SEQ ID NO: 2335024 - DNA, 25 bp, Homo sapien
ttaggcacagcgtcgatagaagtaa

SEQ ID NO: 2335025 - DNA, 25 bp, Homo sapien
caagaggatgttcgtttctgttaaa

SEQ ID NO: 2335026 - DNA, 25 bp, Homo sapien
tattctcctcattaatgtctcaaaa

SEQ ID NO: 2335027 - DNA, 25 bp, Homo sapien
tgtctcaaaactgttggaagctaaa

SEQ ID NO: 2335028 - DNA, 25 bp, Homo sapien
gtccttcagcaataaacgtaaatgt

SEQ ID NO: 2335029 - DNA, 25 bp, Homo sapien
atggttgcaagcaaatgagcaagca

SEQ ID NO: 2335030 - DNA, 25 bp, Homo sapien
caaatgagcaagcagaacaggtggt

SEQ ID NO: 2335031 - DNA, 25 bp, Homo sapien
gatggttgcaagcaaatgagcaagc

SEQ ID NO: 2335032 - DNA, 25 bp, Homo sapien
cagctgcttaaaccccacatggata

SEQ ID NO: 2335033 - DNA, 25 bp, Homo sapien
caagactacattttagggtggccat

SEQ ID NO: 2335034 - DNA, 25 bp, Homo sapien
tactgagtcatttagccctggagaa

SEQ ID NO: 2335035 - DNA, 25 bp, Homo sapien
catggatagctgagcaaggttaaac

SEQ ID NO: 2335036 - DNA, 25 bp, Homo sapien
tggaaaacctgtcagaaagtgtccc

SEQ ID NO: 2335037 - DNA, 25 bp, Homo sapien
taaagtagagcatatgtgtcctggg

SEQ ID NO: 2335038 - DNA, 25 bp, Homo sapien
gacatagcattacctgggacgaccc

SEQ ID NO: 2335039 - DNA, 25 bp, Homo sapien
ttccaagcccagaaacacaggagct

SEQ ID NO: 2335040 - DNA, 25 bp, Homo sapien
aatagagccgcaaaatgagcaggag

SEQ ID NO: 2335041 - DNA, 25 bp, Homo sapien
catggcccagggtaaccaaattcct

SEQ ID NO: 2335042 - DNA, 25 bp, Homo sapien
tgccaataacgcgaagttcagccag

SEQ ID NO: 2335043 - DNA, 25 bp, Homo sapien
agcacaaaagcttagagccggagag

SEQ ID NO: 2335044 - DNA, 25 bp, Homo sapien
aaagaagatactccttaacttgcca

SEQ ID NO: 2335045 - DNA, 25 bp, Homo sapien
cttgccagcagtcaccgtaaattta

SEQ ID NO: 2335046 - DNA, 25 bp, Homo sapien
ccagcagtcaccgtaaatttatgtt

SEQ ID NO: 2335047 - DNA, 25 bp, Homo sapien
agaagatactccttaacttgccagc

SEQ ID NO: 2335048 - DNA, 25 bp, Homo sapien
catcaattgccttaaaaaacacttc

SEQ ID NO: 2335049 - DNA, 25 bp, Homo sapien
ggtgtcatcaattgccttaaaaaac

SEQ ID NO: 2335050 - DNA, 25 bp, Homo sapien
ctgtggtgtcatcaattgccttaaa

SEQ ID NO: 2335051 - DNA, 25 bp, Homo sapien
gtcatcaattgccttaaaaaacact

SEQ ID NO: 2335052 - DNA, 25 bp, Homo sapien
gcatcacatgtaggacaatcggtca

SEQ ID NO: 2335053 - DNA, 25 bp, Homo sapien
tgttctgagcatcacatgtaggaca

SEQ ID NO: 2335054 - DNA, 25 bp, Homo sapien
tggcccctgaactatttgtgtttta

SEQ ID NO: 2335055 - DNA, 25 bp, Homo sapien
acctggcccctgaactatttgtgtt

SEQ ID NO: 2335056 - DNA, 25 bp, Homo sapien
ggaactcagagttctcaagcaactg

SEQ ID NO: 2335057 - DNA, 25 bp, Homo sapien
tgagccagcctaatgacaccgcttg

SEQ ID NO: 2335058 - DNA, 25 bp, Homo sapien
caggagtagtaccagctgagccagc

SEQ ID NO: 2335059 - DNA, 25 bp, Homo sapien
agcagacactgggaactcagagttc

SEQ ID NO: 2335060 - DNA, 25 bp, Homo sapien
agaaattagcactgggaagtcactg

SEQ ID NO: 2335061 - DNA, 25 bp, Homo sapien
tccttcaccagaaattagcactggg

SEQ ID NO: 2335062 - DNA, 25 bp, Homo sapien
tgacgttgtgggcacaggcagtctt

SEQ ID NO: 2335063 - DNA, 25 bp, Homo sapien
cttctgaaggatgacgttgtgggca

SEQ ID NO: 2335064 - DNA, 25 bp, Homo sapien
ctgagggaatgaggcctctgatgtc

SEQ ID NO: 2335065 - DNA, 25 bp, Homo sapien
tgtacagcagctgcgtgtgtctctg

SEQ ID NO: 2335066 - DNA, 25 bp, Homo sapien
tgtgggcatgcaatgagtctgttgg

SEQ ID NO: 2335067 - DNA, 25 bp, Homo sapien
tgatgtctgtgcctcagagacggac

SEQ ID NO: 2335068 - DNA, 25 bp, Homo sapien
tctcattaggcagatcagttgccag

SEQ ID NO: 2335069 - DNA, 25 bp, Homo sapien
tcactgttattcatgagggaacttg

SEQ ID NO: 2335070 - DNA, 25 bp, Homo sapien
taaactcctgtatggaacttggcct

SEQ ID NO: 2335071 - DNA, 25 bp, Homo sapien
ttgccagagggtggcctagcacatg

SEQ ID NO: 2335072 - DNA, 25 bp, Homo sapien
tttgcctgaaacagcacactcagaa

SEQ ID NO: 2335073 - DNA, 25 bp, Homo sapien
tgcctgaaacagcacactcagaacc

SEQ ID NO: 2335074 - DNA, 25 bp, Homo sapien
cactcagaaccttgttggaagcttt

SEQ ID NO: 2335075 - DNA, 25 bp, Homo sapien
gcacactcagaaccttgttggaagc

SEQ ID NO: 2335076 - DNA, 25 bp, Homo sapien
ggggactggagacctggctgctcag

SEQ ID NO: 2335077 - DNA, 25 bp, Homo sapien
gacctggctgctcagtgcaccactt

SEQ ID NO: 2335078 - DNA, 25 bp, Homo sapien
agggatggggactggagacctggct

SEQ ID NO: 2335079 - DNA, 25 bp, Homo sapien
ttattgctctggttgatgcagggat

SEQ ID NO: 2335080 - DNA, 25 bp, Homo sapien
agcaagtcctctggtatgatgagga

SEQ ID NO: 2335081 - DNA, 25 bp, Homo sapien
tgccatctcagcattcccggtctgg

SEQ ID NO: 2335082 - DNA, 25 bp, Homo sapien
tcagcattcccggtctgggcttcct

SEQ ID NO: 2335083 - DNA, 25 bp, Homo sapien
tcctctggtatgatgaggacctggg

SEQ ID NO: 2335084 - DNA, 25 bp, Homo sapien
gcatacaatggcacagagtgccatt

SEQ ID NO: 2335085 - DNA, 25 bp, Homo sapien
cctccggtgtggtttcatctgggta

SEQ ID NO: 2335086 - DNA, 25 bp, Homo sapien
tctgggtaaagatcattgaactgca

SEQ ID NO: 2335087 - DNA, 25 bp, Homo sapien
gcaggagttgtaacctcctccggtg

SEQ ID NO: 2335088 - DNA, 25 bp, Homo sapien
aaagtcaaccagcaggttcaaccag

SEQ ID NO: 2335089 - DNA, 25 bp, Homo sapien
caagaaagtcaaccagcaggttcaa

SEQ ID NO: 2335090 - DNA, 25 bp, Homo sapien
agtcaaccagcaggttcaaccagtt

SEQ ID NO: 2335091 - DNA, 25 bp, Homo sapien
gaaagtcaaccagcaggttcaacca

SEQ ID NO: 2335092 - DNA, 25 bp, Homo sapien
gcacgtttagaagcatccagagagg

SEQ ID NO: 2335093 - DNA, 25 bp, Homo sapien
aggaagcacgtttagaagcatccag

SEQ ID NO: 2335094 - DNA, 25 bp, Homo sapien
catcagggctaatggtcagcttccc

SEQ ID NO: 2335095 - DNA, 25 bp, Homo sapien
acatcagggctaatggtcagcttcc

SEQ ID NO: 2335096 - DNA, 25 bp, Homo sapien
cctcgtagcggatgctagtaaacct

SEQ ID NO: 2335097 - DNA, 25 bp, Homo sapien
tagcggatgctagtaaacctctgca

SEQ ID NO: 2335098 - DNA, 25 bp, Homo sapien
tcgtagcggatgctagtaaacctct

SEQ ID NO: 2335099 - DNA, 25 bp, Homo sapien
gtagcggatgctagtaaacctctgc

SEQ ID NO: 2335100 - DNA, 25 bp, Homo sapien
ggatatctgcctaggcatgccaagg

SEQ ID NO: 2335101 - DNA, 25 bp, Homo sapien
gccaaggctgttcagttatttaata

SEQ ID NO: 2335102 - DNA, 25 bp, Homo sapien
caaataggtcagcagaaggtagaga

SEQ ID NO: 2335103 - DNA, 25 bp, Homo sapien
ttctttaatgttgggcagaaatgtc

SEQ ID NO: 2335104 - DNA, 25 bp, Homo sapien
ggcagtgctacacaccatgggagta

SEQ ID NO: 2335105 - DNA, 25 bp, Homo sapien
tattccagagctaatgcctcagagc

SEQ ID NO: 2335106 - DNA, 25 bp, Homo sapien
tagaggcccatatagagtcatcact

SEQ ID NO: 2335107 - DNA, 25 bp, Homo sapien
gcctcagagcgcagtactacagaaa

SEQ ID NO: 2335108 - DNA, 25 bp, Homo sapien
ggggtcccacacagatgggacgcgg

SEQ ID NO: 2335109 - DNA, 25 bp, Homo sapien
tcccacacagatgggacgcggctta

SEQ ID NO: 2335110 - DNA, 25 bp, Homo sapien
ggtcccacacagatgggacgcggct

SEQ ID NO: 2335111 - DNA, 25 bp, Homo sapien
cccacacagatgggacgcggcttag

SEQ ID NO: 2335112 - DNA, 25 bp, Homo sapien
tcttcaacagattatatgcaagagg

SEQ ID NO: 2335113 - DNA, 25 bp, Homo sapien
cagattcctcttcaacagattatat

SEQ ID NO: 2335114 - DNA, 25 bp, Homo sapien
tcctcttcaacagattatatgcaag

SEQ ID NO: 2335115 - DNA, 25 bp, Homo sapien
caacagattatatgcaagaggtaaa

SEQ ID NO: 2335116 - DNA, 25 bp, Homo sapien
gcaagttggtctatgttctctttac

SEQ ID NO: 2335117 - DNA, 25 bp, Homo sapien
cagcaagttggtctatgttctcttt

SEQ ID NO: 2335118 - DNA, 25 bp, Homo sapien
tgcagcaagttggtctatgttctct

SEQ ID NO: 2335119 - DNA, 25 bp, Homo sapien
tcatgcagcaagttggtctatgttc

SEQ ID NO: 2335120 - DNA, 25 bp, Homo sapien
ggctaagcatcctgtactcattggg

SEQ ID NO: 2335121 - DNA, 25 bp, Homo sapien
ggtctgtcagaatgccctcattttg

SEQ ID NO: 2335122 - DNA, 25 bp, Homo sapien
gggtatttgccaaccatatgctaga

SEQ ID NO: 2335123 - DNA, 25 bp, Homo sapien
catctgtggtatctgaattatctgg

SEQ ID NO: 2335124 - DNA, 25 bp, Homo sapien
aacttgcctgtgtccagcctctgct

SEQ ID NO: 2335125 - DNA, 25 bp, Homo sapien
ccaacttgcctgtgtccagcctctg

SEQ ID NO: 2335126 - DNA, 25 bp, Homo sapien
ttccaacttgcctgtgtccagcctc

SEQ ID NO: 2335127 - DNA, 25 bp, Homo sapien
acttgcctgtgtccagcctctgctg

SEQ ID NO: 2335128 - DNA, 25 bp, Homo sapien
ccataagactacttatatagcttga

SEQ ID NO: 2335129 - DNA, 25 bp, Homo sapien
aaccatggttgaagggcattagtgg

SEQ ID NO: 2335130 - DNA, 25 bp, Homo sapien
ctggcactcaattccggtgacaggg

SEQ ID NO: 2335131 - DNA, 25 bp, Homo sapien
caaatggattgggtaagctggcact

SEQ ID NO: 2335132 - DNA, 25 bp, Homo sapien
ttaagtgcataaaaaggccaggagc

SEQ ID NO: 2335133 - DNA, 25 bp, Homo sapien
ccagaggatatgataatccagatgc

SEQ ID NO: 2335134 - DNA, 25 bp, Homo sapien
caagagagtttattgctagcagacc

SEQ ID NO: 2335135 - DNA, 25 bp, Homo sapien
caccaagatacaacagagggcacat

SEQ ID NO: 2335136 - DNA, 25 bp, Homo sapien
ttcaatagaccgatctattatgcac

SEQ ID NO: 2335137 - DNA, 25 bp, Homo sapien
attgacagtctttcaccttgcattc

SEQ ID NO: 2335138 - DNA, 25 bp, Homo sapien
caatagaccgatctattatgcacat

SEQ ID NO: 2335139 - DNA, 25 bp, Homo sapien
tctttcaccttgcattcaatagacc

SEQ ID NO: 2335140 - DNA, 25 bp, Homo sapien
tcacatccatctgtttatagggcat

SEQ ID NO: 2335141 - DNA, 25 bp, Homo sapien
attcacatccatctgtttatagggc

SEQ ID NO: 2335142 - DNA, 25 bp, Homo sapien
ttcacatccatctgtttatagggca

SEQ ID NO: 2335143 - DNA, 25 bp, Homo sapien
ccagggaaagtaggtgagcttcagc

SEQ ID NO: 2335144 - DNA, 25 bp, Homo sapien
gaataacggagattcccatggatgg

SEQ ID NO: 2335145 - DNA, 25 bp, Homo sapien
tcagtatgcgcgctgacctcagcaa

SEQ ID NO: 2335146 - DNA, 25 bp, Homo sapien
caagaaagtggtcttcatgcccatc

SEQ ID NO: 2335147 - DNA, 25 bp, Homo sapien
agtacactagttccataagatactg

SEQ ID NO: 2335148 - DNA, 25 bp, Homo sapien
gtacactagttccataagatactgg

SEQ ID NO: 2335149 - DNA, 25 bp, Homo sapien
cagtacactagttccataagatact

SEQ ID NO: 2335150 - DNA, 25 bp, Homo sapien
tcagtacactagttccataagatac

SEQ ID NO: 2335151 - DNA, 25 bp, Homo sapien
tgttaaaggcttgtatagtaagaat

SEQ ID NO: 2335152 - DNA, 25 bp, Homo sapien
ttaatgagctagcatttgttaaagg

SEQ ID NO: 2335153 - DNA, 25 bp, Homo sapien
ctaccttagagggtactctaggtat

SEQ ID NO: 2335154 - DNA, 25 bp, Homo sapien
aagagttcttaccaatagatggtat

SEQ ID NO: 2335155 - DNA, 25 bp, Homo sapien
gtcgtgtgaacttgctctagccaaa

SEQ ID NO: 2335156 - DNA, 25 bp, Homo sapien
agagcaagtttttaaagcacggtcg

SEQ ID NO: 2335157 - DNA, 25 bp, Homo sapien
tctagccaaattaggtttatagcac

SEQ ID NO: 2335158 - DNA, 25 bp, Homo sapien
gggtcatccgcaagaccgtttgaaa

SEQ ID NO: 2335159 - DNA, 25 bp, Homo sapien
cgtcaccgtcacctcctgagtagtg

SEQ ID NO: 2335160 - DNA, 25 bp, Homo sapien
gtacttcagggaccggcaccacgtc

SEQ ID NO: 2335161 - DNA, 25 bp, Homo sapien
aacctccggagcttgtgcgcgtact

SEQ ID NO: 2335162 - DNA, 25 bp, Homo sapien
gagcgaatctgatcgtgtccctgtt

SEQ ID NO: 2335163 - DNA, 25 bp, Homo sapien
gtgaggtggcttcagtccgccctcc

SEQ ID NO: 2335164 - DNA, 25 bp, Homo sapien
ggcgatgaatggtgaggtggcttca

SEQ ID NO: 2335165 - DNA, 25 bp, Homo sapien
ctgcggggtccaggggcgatgaatg

SEQ ID NO: 2335166 - DNA, 25 bp, Homo sapien
aggggcgatgaatggtgaggtggct

SEQ ID NO: 2335167 - DNA, 25 bp, Homo sapien
ctccgcggccgttacagagagcggg

SEQ ID NO: 2335168 - DNA, 25 bp, Homo sapien
gctaggttgcttcgcagaaggctct

SEQ ID NO: 2335169 - DNA, 25 bp, Homo sapien
ttccctggggctaggttgcttcgca

SEQ ID NO: 2335170 - DNA, 25 bp, Homo sapien
gggcttctgcggccgctaccgtttc

SEQ ID NO: 2335171 - DNA, 25 bp, Homo sapien
taccgccgctccgtcttgtctccca

SEQ ID NO: 2335172 - DNA, 25 bp, Homo sapien
cgcccttaccgccgctccgtcttgt

SEQ ID NO: 2335173 - DNA, 25 bp, Homo sapien
tccgtcttgtctcccaccgactcac

SEQ ID NO: 2335174 - DNA, 25 bp, Homo sapien
aaggtggagagaggcgcttcacttc

SEQ ID NO: 2335175 - DNA, 25 bp, Homo sapien
gggtgggtaggcaggccgctttcag

SEQ ID NO: 2335176 - DNA, 25 bp, Homo sapien
caaaacggcagcgatggggtgggta

SEQ ID NO: 2335177 - DNA, 25 bp, Homo sapien
aacggcagcgatggggtgggtaggc

SEQ ID NO: 2335178 - DNA, 25 bp, Homo sapien
taggcaggccgctttcagcgcgctt

SEQ ID NO: 2335179 - DNA, 25 bp, Homo sapien
gcgacgtatccaccgcggaggctgc

SEQ ID NO: 2335180 - DNA, 25 bp, Homo sapien
cggatccaagatggcgacgtatcca

SEQ ID NO: 2335181 - DNA, 25 bp, Homo sapien
tttaccctctgaccgccgccgtgac

SEQ ID NO: 2335182 - DNA, 25 bp, Homo sapien
gaattttcttgtcccgcggatccaa

SEQ ID NO: 2335183 - DNA, 25 bp, Homo sapien
ccactcgcggatgggaccgggccta

SEQ ID NO: 2335184 - DNA, 25 bp, Homo sapien
accgggcctaggatctggagctgct

SEQ ID NO: 2335185 - DNA, 25 bp, Homo sapien
tgggaccgggcctaggatctggagc

SEQ ID NO: 2335186 - DNA, 25 bp, Homo sapien
gggaagccccaccactcgcggatgg

SEQ ID NO: 2335187 - DNA, 25 bp, Homo sapien
aaagcgggctcgagctcgtcggcca

SEQ ID NO: 2335188 - DNA, 25 bp, Homo sapien
cggcagagccgtctaaagcgggctc

SEQ ID NO: 2335189 - DNA, 25 bp, Homo sapien
cgggaaggcggcagagccgtctaaa

SEQ ID NO: 2335190 - DNA, 25 bp, Homo sapien
gagccgtctaaagcgggctcgagct

SEQ ID NO: 2335191 - DNA, 25 bp, Homo sapien
gtgtattgagagaaggtaagaagcc

SEQ ID NO: 2335192 - DNA, 25 bp, Homo sapien
gagagaaggtaagaagccacagaca

SEQ ID NO: 2335193 - DNA, 25 bp, Homo sapien
gaaggtaagaagccacagacagcac

SEQ ID NO: 2335194 - DNA, 25 bp, Homo sapien
gagaaggtaagaagccacagacagc

SEQ ID NO: 2335195 - DNA, 25 bp, Homo sapien
aggatcctgacacccgttagccagt

SEQ ID NO: 2335196 - DNA, 25 bp, Homo sapien
gtctcccatctgacacttgcaaaca

SEQ ID NO: 2335197 - DNA, 25 bp, Homo sapien
gcggcatcgcagttgcattccttct

SEQ ID NO: 2335198 - DNA, 25 bp, Homo sapien
gcagaggcggcatcgcagttgcatt

SEQ ID NO: 2335199 - DNA, 25 bp, Homo sapien
cctgcggaagtagaaacccaggact

SEQ ID NO: 2335200 - DNA, 25 bp, Homo sapien
gccccaggatcatccggactcagtc

SEQ ID NO: 2335201 - DNA, 25 bp, Homo sapien
tcacagacagaagcgtctgtggttc

SEQ ID NO: 2335202 - DNA, 25 bp, Homo sapien
caggacttgcaacttcacagacaga

SEQ ID NO: 2335203 - DNA, 25 bp, Homo sapien
gaccacagttaccaagagttatcag

SEQ ID NO: 2335204 - DNA, 25 bp, Homo sapien
tagtaataccgtacctacaggcctg

SEQ ID NO: 2335205 - DNA, 25 bp, Homo sapien
catttcgccaagaactaagggttca

SEQ ID NO: 2335206 - DNA, 25 bp, Homo sapien
gagttatcagctttcacccggacag

SEQ ID NO: 2335207 - DNA, 25 bp, Homo sapien
ctttaaaatttctatctcatccctc

SEQ ID NO: 2335208 - DNA, 25 bp, Homo sapien
tactttaaaatttctatctcatccc

SEQ ID NO: 2335209 - DNA, 25 bp, Homo sapien
tttaaaatttctatctcatccctca

SEQ ID NO: 2335210 - DNA, 25 bp, Homo sapien
ttaaaatttctatctcatccctcac

SEQ ID NO: 2335211 - DNA, 25 bp, Homo sapien
tatgccaagcattcccaaactcaac

SEQ ID NO: 2335212 - DNA, 25 bp, Homo sapien
cagagcttactaattatcttggtcc

SEQ ID NO: 2335213 - DNA, 25 bp, Homo sapien
tccctgagatcagattaggttacag

SEQ ID NO: 2335214 - DNA, 25 bp, Homo sapien
gaactgggatgtgaatatagacact

SEQ ID NO: 2335215 - DNA, 25 bp, Homo sapien
caattaacagataatgctagcaacc

SEQ ID NO: 2335216 - DNA, 25 bp, Homo sapien
gataatactcaaactttgcctgccc

SEQ ID NO: 2335217 - DNA, 25 bp, Homo sapien
ttgcctgccccaaaacgtatacaaa

SEQ ID NO: 2335218 - DNA, 25 bp, Homo sapien
taaatatcagcacctatgtagggat

SEQ ID NO: 2335219 - DNA, 25 bp, Homo sapien
ggagaataagtcacctagccaattg

SEQ ID NO: 2335220 - DNA, 25 bp, Homo sapien
caatcaggctacgtgggcagctcta

SEQ ID NO: 2335221 - DNA, 25 bp, Homo sapien
gccaattgaaaacagtacaacggtg

SEQ ID NO: 2335222 - DNA, 25 bp, Homo sapien
catttcaggctggttagttccaggc

SEQ ID NO: 2335223 - DNA, 25 bp, Homo sapien
ggtataaattatcaaacagctgagg

SEQ ID NO: 2335224 - DNA, 25 bp, Homo sapien
cttcattaaagatgagcacgtactc

SEQ ID NO: 2335225 - DNA, 25 bp, Homo sapien
catataaggttcagtgctatctgta

SEQ ID NO: 2335226 - DNA, 25 bp, Homo sapien
tagtaagtttatagagcccagactg

SEQ ID NO: 2335227 - DNA, 25 bp, Homo sapien
gggaataccccaaagattatcatga

SEQ ID NO: 2335228 - DNA, 25 bp, Homo sapien
ggacctcagcatgcaaaaatactca

SEQ ID NO: 2335229 - DNA, 25 bp, Homo sapien
catctcggattagagacacgtgcca

SEQ ID NO: 2335230 - DNA, 25 bp, Homo sapien
tactcaattaactggcctgctccga

SEQ ID NO: 2335231 - DNA, 25 bp, Homo sapien
gagttaactgagtatctgatgcctg

SEQ ID NO: 2335232 - DNA, 25 bp, Homo sapien
tccaaggctggaatatacaattaga

SEQ ID NO: 2335233 - DNA, 25 bp, Homo sapien
cagaattccaagttgaagttcccaa

SEQ ID NO: 2335234 - DNA, 25 bp, Homo sapien
ttttctgggccaattgataaatctg

SEQ ID NO: 2335235 - DNA, 25 bp, Homo sapien
caagtgcaacaaggttgcagggtac

SEQ ID NO: 2335236 - DNA, 25 bp, Homo sapien
tctgaagcatccaagagaataaaac

SEQ ID NO: 2335237 - DNA, 25 bp, Homo sapien
actagatacaagataagtcaacagg

SEQ ID NO: 2335238 - DNA, 25 bp, Homo sapien
gttgggagacttttaatactccatg

SEQ ID NO: 2335239 - DNA, 25 bp, Homo sapien
aatgcccaaaccttttagaagctga

SEQ ID NO: 2335240 - DNA, 25 bp, Homo sapien
ttcactggagctcaataaaacatgc

SEQ ID NO: 2335241 - DNA, 25 bp, Homo sapien
caagatgtgaccgatttcactggag

SEQ ID NO: 2335242 - DNA, 25 bp, Homo sapien
ttaggttaagacagctgaaccagct

SEQ ID NO: 2335243 - DNA, 25 bp, Homo sapien
tagaactgtcactcaagggtcgtgt

SEQ ID NO: 2335244 - DNA, 25 bp, Homo sapien
tcctttcctcacagtaccggaggca

SEQ ID NO: 2335245 - DNA, 25 bp, Homo sapien
ctcaagggtcgtgtcacaggaagga

SEQ ID NO: 2335246 - DNA, 25 bp, Homo sapien
ccggaggcaatcaaatagaactgtc

SEQ ID NO: 2335247 - DNA, 25 bp, Homo sapien
tctcagataatgtatgtccatcagt

SEQ ID NO: 2335248 - DNA, 25 bp, Homo sapien
taatgtatgtccatcagtcctcacc

SEQ ID NO: 2335249 - DNA, 25 bp, Homo sapien
tcagataatgtatgtccatcagtcc

SEQ ID NO: 2335250 - DNA, 25 bp, Homo sapien
gataatgtatgtccatcagtcctca

SEQ ID NO: 2335251 - DNA, 25 bp, Homo sapien
caaattgaggtgtaaccaatttgct

SEQ ID NO: 2335252 - DNA, 25 bp, Homo sapien
aatgtagctataagaccaatagaga

SEQ ID NO: 2335253 - DNA, 25 bp, Homo sapien
tcaaattgaggtgtaaccaatttgc

SEQ ID NO: 2335254 - DNA, 25 bp, Homo sapien
tataagaccaatagagaaaaaagaa

SEQ ID NO: 2335255 - DNA, 25 bp, Homo sapien
gaatgggaaacggaaatagctccat

SEQ ID NO: 2335256 - DNA, 25 bp, Homo sapien
tctatcaatcgactgactgagggtc

SEQ ID NO: 2335257 - DNA, 25 bp, Homo sapien
catcagctgtaagatgcatcctgac

SEQ ID NO: 2335258 - DNA, 25 bp, Homo sapien
tgggcaccagatctgacaacttttc

SEQ ID NO: 2335259 - DNA, 25 bp, Homo sapien
tacattgggtgcctccactctcagg

SEQ ID NO: 2335260 - DNA, 25 bp, Homo sapien
tgactacattgggtgcctccactct

SEQ ID NO: 2335261 - DNA, 25 bp, Homo sapien
gaatacctgttgactacattgggtg

SEQ ID NO: 2335262 - DNA, 25 bp, Homo sapien
tacctgttgactacattgggtgcct

SEQ ID NO: 2335263 - DNA, 25 bp, Homo sapien
gaaaaaggttgacagacagacatga

SEQ ID NO: 2335264 - DNA, 25 bp, Homo sapien
ggaaactgtacttctaacaccatgt

SEQ ID NO: 2335265 - DNA, 25 bp, Homo sapien
gaaaacatgatattggtataggcac

SEQ ID NO: 2335266 - DNA, 25 bp, Homo sapien
cacatcaaggtaacagagacataag

SEQ ID NO: 2335267 - DNA, 25 bp, Homo sapien
tgggaggatcacttgacaagcctgg

SEQ ID NO: 2335268 - DNA, 25 bp, Homo sapien
ggaggatcacttgacaagcctgggc

SEQ ID NO: 2335269 - DNA, 25 bp, Homo sapien
gtgggaggatcacttgacaagcctg

SEQ ID NO: 2335270 - DNA, 25 bp, Homo sapien
aggatcacttgacaagcctgggcaa

SEQ ID NO: 2335271 - DNA, 25 bp, Homo sapien
aatgaccactgtatctatgggccta

SEQ ID NO: 2335272 - DNA, 25 bp, Homo sapien
cactgtatctatgggcctactggat

SEQ ID NO: 2335273 - DNA, 25 bp, Homo sapien
tgaccactgtatctatgggcctact

SEQ ID NO: 2335274 - DNA, 25 bp, Homo sapien
gaccactgtatctatgggcctactg

SEQ ID NO: 2335275 - DNA, 25 bp, Homo sapien
aggagctcccctgagatattacagc

SEQ ID NO: 2335276 - DNA, 25 bp, Homo sapien
cagcagggttgacgccatagctctg

SEQ ID NO: 2335277 - DNA, 25 bp, Homo sapien
atgataaacgatgggattcttccgc

SEQ ID NO: 2335278 - DNA, 25 bp, Homo sapien
gaagttcaactccagcaaacagtaa

SEQ ID NO: 2335279 - DNA, 25 bp, Homo sapien
aacatttgctactctggggattgga

SEQ ID NO: 2335280 - DNA, 25 bp, Homo sapien
tttcaacatttgctactctggggat

SEQ ID NO: 2335281 - DNA, 25 bp, Homo sapien
tcaacatttgctactctggggattg

SEQ ID NO: 2335282 - DNA, 25 bp, Homo sapien
acatttgctactctggggattggaa

SEQ ID NO: 2335283 - DNA, 25 bp, Homo sapien
gaaccaacgaagtaagaggcaggcc

SEQ ID NO: 2335284 - DNA, 25 bp, Homo sapien
tcatgaaggcgggtatttcctgtgc

SEQ ID NO: 2335285 - DNA, 25 bp, Homo sapien
caggatgaatggcaattagggaacc

SEQ ID NO: 2335286 - DNA, 25 bp, Homo sapien
aatccccacgtgtcgcagaaggaac

SEQ ID NO: 2335287 - DNA, 25 bp, Homo sapien
gatagataatgatggcctaataggg

SEQ ID NO: 2335288 - DNA, 25 bp, Homo sapien
tatactctgaggcagaactagtagg

SEQ ID NO: 2335289 - DNA, 25 bp, Homo sapien
taataaacgacagtcatgtgcagca

SEQ ID NO: 2335290 - DNA, 25 bp, Homo sapien
caggaaaatgcattaggaggccagt

SEQ ID NO: 2335291 - DNA, 25 bp, Homo sapien
cattagcaattttgagctcacacca

SEQ ID NO: 2335292 - DNA, 25 bp, Homo sapien
ttgttgtcacttgctatctgtgaag

SEQ ID NO: 2335293 - DNA, 25 bp, Homo sapien
ctttgtaacatccaacattagcaat

SEQ ID NO: 2335294 - DNA, 25 bp, Homo sapien
tgtgaagaaatggttctaggacctc

SEQ ID NO: 2335295 - DNA, 25 bp, Homo sapien
tacatgttttcgtcatggtagtcac

SEQ ID NO: 2335296 - DNA, 25 bp, Homo sapien
tagaagactggctgtagtacatgtt

SEQ ID NO: 2335297 - DNA, 25 bp, Homo sapien
tggtagtcactgtcgaccccctcta

SEQ ID NO: 2335298 - DNA, 25 bp, Homo sapien
caaacttctttcttgaagcaccaaa

SEQ ID NO: 2335299 - DNA, 25 bp, Homo sapien
gagtggtaacatttaggtacataca

SEQ ID NO: 2335300 - DNA, 25 bp, Homo sapien
gcatatttgcgtatttcctgtctta

SEQ ID NO: 2335301 - DNA, 25 bp, Homo sapien
ggtcttccctcaagaatatgcagtg

SEQ ID NO: 2335302 - DNA, 25 bp, Homo sapien
taaaggaaacatgaaacatcactgg

SEQ ID NO: 2335303 - DNA, 25 bp, Homo sapien
ctgatgtagatggtgatgccagcat

SEQ ID NO: 2335304 - DNA, 25 bp, Homo sapien
ttgttgcccgtataaacttgcccca

SEQ ID NO: 2335305 - DNA, 25 bp, Homo sapien
ccgtataaacttgccccaaactgag

SEQ ID NO: 2335306 - DNA, 25 bp, Homo sapien
tgttgcccgtataaacttgccccaa

SEQ ID NO: 2335307 - DNA, 25 bp, Homo sapien
gtataaacttgccccaaactgagac

SEQ ID NO: 2335308 - DNA, 25 bp, Homo sapien
tgctgtgataaacggtggtcttcca

SEQ ID NO: 2335309 - DNA, 25 bp, Homo sapien
tgtgataaacggtggtcttccaaaa

SEQ ID NO: 2335310 - DNA, 25 bp, Homo sapien
tttctgctgtgataaacggtggtct

SEQ ID NO: 2335311 - DNA, 25 bp, Homo sapien
gtaaagtaagttctttgcagttgct

SEQ ID NO: 2335312 - DNA, 25 bp, Homo sapien
tgtcctgaagtcaactatagctgca

SEQ ID NO: 2335313 - DNA, 25 bp, Homo sapien
cagttactgaccaccaagataatgt

SEQ ID NO: 2335314 - DNA, 25 bp, Homo sapien
gatcacctagttcaatgttcccatt

SEQ ID NO: 2335315 - DNA, 25 bp, Homo sapien
ccctaaacatgctgtcctgaagtca

SEQ ID NO: 2335316 - DNA, 25 bp, Homo sapien
tcaacatacttttcacatcattcat

SEQ ID NO: 2335317 - DNA, 25 bp, Homo sapien
gctttctaggtgtgctcctaacaaa

SEQ ID NO: 2335318 - DNA, 25 bp, Homo sapien
taacacgcattgtgctagctgctgg

SEQ ID NO: 2335319 - DNA, 25 bp, Homo sapien
gctcctaacaaaccatcaacatact

SEQ ID NO: 2335320 - DNA, 25 bp, Homo sapien
tcaccttctaacctagggataggag

SEQ ID NO: 2335321 - DNA, 25 bp, Homo sapien
gatcgttatcttaaatttggcagcc

SEQ ID NO: 2335322 - DNA, 25 bp, Homo sapien
ggcagcctgtatctcagcttgtaga

SEQ ID NO: 2335323 - DNA, 25 bp, Homo sapien
taggagtggttagcgagtatctcac

SEQ ID NO: 2335324 - DNA, 25 bp, Homo sapien
gacgtcaaaatataatgcccctgta

SEQ ID NO: 2335325 - DNA, 25 bp, Homo sapien
gggatggactatacattctaatagg

SEQ ID NO: 2335326 - DNA, 25 bp, Homo sapien
catttaaccccgctttgctgaagta

SEQ ID NO: 2335327 - DNA, 25 bp, Homo sapien
tatttatctagtacccctggagcca

SEQ ID NO: 2335328 - DNA, 25 bp, Homo sapien
cccctcattggaaggcctagtgcac

SEQ ID NO: 2335329 - DNA, 25 bp, Homo sapien
ccccctcattggaaggcctagtgca

SEQ ID NO: 2335330 - DNA, 25 bp, Homo sapien
tgacgtggctcggtaactgagtgcc

SEQ ID NO: 2335331 - DNA, 25 bp, Homo sapien
tacccctgttgttggcgtgacgtgg

SEQ ID NO: 2335332 - DNA, 25 bp, Homo sapien
tgataagctgcgatttaactgaggg

SEQ ID NO: 2335333 - DNA, 25 bp, Homo sapien
gaagtgacattgttggtacccctgt

SEQ ID NO: 2335334 - DNA, 25 bp, Homo sapien
taaaaggctgtcgagaaggctgctg

SEQ ID NO: 2335335 - DNA, 25 bp, Homo sapien
tgtcctgctaggaattccaatgccc

SEQ ID NO: 2335336 - DNA, 25 bp, Homo sapien
aaccctgaactgctcatgctatttg

SEQ ID NO: 2335337 - DNA, 25 bp, Homo sapien
catacatattatgcttggcgagctt

SEQ ID NO: 2335338 - DNA, 25 bp, Homo sapien
ttagtgtatcaatgctgtaagcggg

SEQ ID NO: 2335339 - DNA, 25 bp, Homo sapien
taaggcagaacttagagcaaggcca

SEQ ID NO: 2335340 - DNA, 25 bp, Homo sapien
taaatagttacagttgcctccctcc

SEQ ID NO: 2335341 - DNA, 25 bp, Homo sapien
ggtggcgaatccaagaacaatcctt

SEQ ID NO: 2335342 - DNA, 25 bp, Homo sapien
gtgtgtatttttggtctccatataa

SEQ ID NO: 2335343 - DNA, 25 bp, Homo sapien
tatgtttcaaaaccaacactaatat

SEQ ID NO: 2335344 - DNA, 25 bp, Homo sapien
tggatacctgaattacctaacctca

SEQ ID NO: 2335345 - DNA, 25 bp, Homo sapien
tgaagagccaacttcctggatacct

SEQ ID NO: 2335346 - DNA, 25 bp, Homo sapien
gttattcattccaaatgcctgattc

SEQ ID NO: 2335347 - DNA, 25 bp, Homo sapien
ggagttattcattccaaatgcctga

SEQ ID NO: 2335348 - DNA, 25 bp, Homo sapien
gttacttgataaggagttattcatt

SEQ ID NO: 2335349 - DNA, 25 bp, Homo sapien
ttacttgataaggagttattcattc

SEQ ID NO: 2335350 - DNA, 25 bp, Homo sapien
gctgttcatttttgctcctatgatc

SEQ ID NO: 2335351 - DNA, 25 bp, Homo sapien
tttgctcctatgatcataacatcct

SEQ ID NO: 2335352 - DNA, 25 bp, Homo sapien
ttaatcctctccaataatgctgttc

SEQ ID NO: 2335353 - DNA, 25 bp, Homo sapien
ataatgctgttcatttttgctccta

SEQ ID NO: 2335354 - DNA, 25 bp, Homo sapien
gcacaggcagtgaagcagaagccct

SEQ ID NO: 2335355 - DNA, 25 bp, Homo sapien
tcatatacaaacgtgtgtgcgtgcg

SEQ ID NO: 2335356 - DNA, 25 bp, Homo sapien
aacagggtggcagtagggttcccat

SEQ ID NO: 2335357 - DNA, 25 bp, Homo sapien
tgaagcttcggttacacacaaatgg

SEQ ID NO: 2335358 - DNA, 25 bp, Homo sapien
atctgaaaggtccaatcctgtcaca

SEQ ID NO: 2335359 - DNA, 25 bp, Homo sapien
gaaatctgaaaggtccaatcctgtc

SEQ ID NO: 2335360 - DNA, 25 bp, Homo sapien
ggaaatctgaaaggtccaatcctgt

SEQ ID NO: 2335361 - DNA, 25 bp, Homo sapien
aaatctgaaaggtccaatcctgtca

SEQ ID NO: 2335362 - DNA, 25 bp, Homo sapien
ccagccaaggggtttattaatggag

SEQ ID NO: 2335363 - DNA, 25 bp, Homo sapien
tccctcctgtttcggtctgctaatg

SEQ ID NO: 2335364 - DNA, 25 bp, Homo sapien
cttccctcctgtttcggtctgctaa

SEQ ID NO: 2335365 - DNA, 25 bp, Homo sapien
cataaggagctcttccagccaaggg

SEQ ID NO: 2335366 - DNA, 25 bp, Homo sapien
ggccaaggccaggaatattgcttaa

SEQ ID NO: 2335367 - DNA, 25 bp, Homo sapien
tattaacggagaccaagagtctgca

SEQ ID NO: 2335368 - DNA, 25 bp, Homo sapien
tagtcgggcccttattggagaacaa

SEQ ID NO: 2335369 - DNA, 25 bp, Homo sapien
ccatgtcatgcgtaggtgcttaaaa

SEQ ID NO: 2335370 - DNA, 25 bp, Homo sapien
ttcattgtgtattgagaagtcctgg

SEQ ID NO: 2335371 - DNA, 25 bp, Homo sapien
cattgtgtattgagaagtcctggga

SEQ ID NO: 2335372 - DNA, 25 bp, Homo sapien
aaatcttcattgtgtattgagaagt

SEQ ID NO: 2335373 - DNA, 25 bp, Homo sapien
gaaaatcttcattgtgtattgagaa

SEQ ID NO: 2335374 - DNA, 25 bp, Homo sapien
tctttatagctggagcctggtaatg

SEQ ID NO: 2335375 - DNA, 25 bp, Homo sapien
actgtcatcattacttgatgttgga

SEQ ID NO: 2335376 - DNA, 25 bp, Homo sapien
tatcaaacttcatgggatccagctg

SEQ ID NO: 2335377 - DNA, 25 bp, Homo sapien
tctgaagggaaaaactacatcactc

SEQ ID NO: 2335378 - DNA, 25 bp, Homo sapien
gaagttacactcctcaatgctttca

SEQ ID NO: 2335379 - DNA, 25 bp, Homo sapien
ccagctgacagggactacaataaaa

SEQ ID NO: 2335380 - DNA, 25 bp, Homo sapien
agttgtcttgccagatgtattcaaa

SEQ ID NO: 2335381 - DNA, 25 bp, Homo sapien
gttgttgaacttttatctccaggga

SEQ ID NO: 2335382 - DNA, 25 bp, Homo sapien
aatttgggtccatctgtacttgaag

SEQ ID NO: 2335383 - DNA, 25 bp, Homo sapien
tgaagttgtcttgccagatgtattc

SEQ ID NO: 2335384 - DNA, 25 bp, Homo sapien
taatgcaagatgtaccattcctggg

SEQ ID NO: 2335385 - DNA, 25 bp, Homo sapien
tgttaagtcacttcctaatgcaaga

SEQ ID NO: 2335386 - DNA, 25 bp, Homo sapien
catcccttgaggaatgttagtaacc

SEQ ID NO: 2335387 - DNA, 25 bp, Homo sapien
caggagagttcagattgaggcctaa

SEQ ID NO: 2335388 - DNA, 25 bp, Homo sapien
cttgaggtcgacaaggtgaagatgc

SEQ ID NO: 2335389 - DNA, 25 bp, Homo sapien
gatgcccagggtgacgcaaatttgg

SEQ ID NO: 2335390 - DNA, 25 bp, Homo sapien
gtgaagatgcccagggtgacgcaaa

SEQ ID NO: 2335391 - DNA, 25 bp, Homo sapien
tgtcttgaggtcgacaaggtgaaga

SEQ ID NO: 2335392 - DNA, 25 bp, Homo sapien
aggtctaaacacaaatagattctcc

SEQ ID NO: 2335393 - DNA, 25 bp, Homo sapien
tctaaacacaaatagattctcctac

SEQ ID NO: 2335394 - DNA, 25 bp, Homo sapien
ggtctaaacacaaatagattctcct

SEQ ID NO: 2335395 - DNA, 25 bp, Homo sapien
aaaggtctaaacacaaatagattct

SEQ ID NO: 2335396 - DNA, 25 bp, Homo sapien
cctaatgtgaatgttcgttaagtac

SEQ ID NO: 2335397 - DNA, 25 bp, Homo sapien
gtgaatgttcgttaagtactcagat

SEQ ID NO: 2335398 - DNA, 25 bp, Homo sapien
atccctaatgtgaatgttcgttaag

SEQ ID NO: 2335399 - DNA, 25 bp, Homo sapien
aatgtgaatgttcgttaagtactca

SEQ ID NO: 2335400 - DNA, 25 bp, Homo sapien
gactgagtagaataataaactacac

SEQ ID NO: 2335401 - DNA, 25 bp, Homo sapien
gataaattcatgctgactgagtaga

SEQ ID NO: 2335402 - DNA, 25 bp, Homo sapien
ttcatgctgactgagtagaataata

SEQ ID NO: 2335403 - DNA, 25 bp, Homo sapien
atagataaattcatgctgactgagt

SEQ ID NO: 2335404 - DNA, 25 bp, Homo sapien
tgtagagtgccaaatatatagacgg

SEQ ID NO: 2335405 - DNA, 25 bp, Homo sapien
tgtggacaatgacacctatgagggt

SEQ ID NO: 2335406 - DNA, 25 bp, Homo sapien
gaaactccccactttgtagtagata

SEQ ID NO: 2335407 - DNA, 25 bp, Homo sapien
cttccaagcaagatccactaaaagg

SEQ ID NO: 2335408 - DNA, 25 bp, Homo sapien
ttgtaatacgtctcctccattcatg

SEQ ID NO: 2335409 - DNA, 25 bp, Homo sapien
tccattcatgtaatagagatagaag

SEQ ID NO: 2335410 - DNA, 25 bp, Homo sapien
cactgcagctaaaagttgtaatacg

SEQ ID NO: 2335411 - DNA, 25 bp, Homo sapien
accatatcggccaagttttattgca

SEQ ID NO: 2335412 - DNA, 25 bp, Homo sapien
tacaaaagtgattaaaatactttga

SEQ ID NO: 2335413 - DNA, 25 bp, Homo sapien
tataatacaaaagtgattaaaatac

SEQ ID NO: 2335414 - DNA, 25 bp, Homo sapien
aagtgattaaaatactttgaacata

SEQ ID NO: 2335415 - DNA, 25 bp, Homo sapien
agtgattaaaatactttgaacatac

SEQ ID NO: 2335416 - DNA, 25 bp, Homo sapien
tttaaactggccaatagactgctga

SEQ ID NO: 2335417 - DNA, 25 bp, Homo sapien
tcttaatttgtccagaaggcacact

SEQ ID NO: 2335418 - DNA, 25 bp, Homo sapien
tgctttcctaccaacgtcatgaggt

SEQ ID NO: 2335419 - DNA, 25 bp, Homo sapien
taacatccagaggaggtaatgtccc

SEQ ID NO: 2335420 - DNA, 25 bp, Homo sapien
tgtggtatctccaatcacggttaaa

SEQ ID NO: 2335421 - DNA, 25 bp, Homo sapien
tcaaagaagtaatatgttcccctct

SEQ ID NO: 2335422 - DNA, 25 bp, Homo sapien
tggtgccctggtaatccatactcgt

SEQ ID NO: 2335423 - DNA, 25 bp, Homo sapien
cctctcataggtattggttttcatt

SEQ ID NO: 2335424 - DNA, 25 bp, Homo sapien
taaacacaacgtactaaatgcaggt

SEQ ID NO: 2335425 - DNA, 25 bp, Homo sapien
gaaatagtcatagttaacgcctgta

SEQ ID NO: 2335426 - DNA, 25 bp, Homo sapien
ttgcacatgggacggttagaaaggc

SEQ ID NO: 2335427 - DNA, 25 bp, Homo sapien
gatgtatttcctgcaactagtccaa

SEQ ID NO: 2335428 - DNA, 25 bp, Homo sapien
caaaggctatagctttctactgtat

SEQ ID NO: 2335429 - DNA, 25 bp, Homo sapien
tacagtatgtggacttggtctgaga

SEQ ID NO: 2335430 - DNA, 25 bp, Homo sapien
taacatatacaatagctcaggcact

SEQ ID NO: 2335431 - DNA, 25 bp, Homo sapien
gaagtaaagacatttaccactgaga

SEQ ID NO: 2335432 - DNA, 25 bp, Homo sapien
tctgtgtgtaagtcaagagactact

SEQ ID NO: 2335433 - DNA, 25 bp, Homo sapien
tatatatgaatcaacatcaacacag

SEQ ID NO: 2335434 - DNA, 25 bp, Homo sapien
aacacagatataccaactgtttttc

SEQ ID NO: 2335435 - DNA, 25 bp, Homo sapien
caaattcaagaatttagatatcttc

SEQ ID NO: 2335436 - DNA, 25 bp, Homo sapien
gaggccgttcttctaatttgtcata

SEQ ID NO: 2335437 - DNA, 25 bp, Homo sapien
gtgaggccgttcttctaatttgtca

SEQ ID NO: 2335438 - DNA, 25 bp, Homo sapien
gccgttcttctaatttgtcatattc

SEQ ID NO: 2335439 - DNA, 25 bp, Homo sapien
aggtgaggccgttcttctaatttgt

SEQ ID NO: 2335440 - DNA, 25 bp, Homo sapien
tgttgagtattgtgctgagacagcc

SEQ ID NO: 2335441 - DNA, 25 bp, Homo sapien
ggaaaaccatccagagattgtggca

SEQ ID NO: 2335442 - DNA, 25 bp, Homo sapien
gaccttttgcgtaagccaattgcca

SEQ ID NO: 2335443 - DNA, 25 bp, Homo sapien
cagggtgcctgagccacatcagttc

SEQ ID NO: 2335444 - DNA, 25 bp, Homo sapien
ctaaaaatgaggtacagcagggcaa

SEQ ID NO: 2335445 - DNA, 25 bp, Homo sapien
aaaaatgaggtacagcagggcaaac

SEQ ID NO: 2335446 - DNA, 25 bp, Homo sapien
taaaaatgaggtacagcagggcaaa

SEQ ID NO: 2335447 - DNA, 25 bp, Homo sapien
tgtcccattttcatatattgcatcc

SEQ ID NO: 2335448 - DNA, 25 bp, Homo sapien
ttttagtgcacagggcgacaaagtc

SEQ ID NO: 2335449 - DNA, 25 bp, Homo sapien
acagggcgacaaagtcccctgacca

SEQ ID NO: 2335450 - DNA, 25 bp, Homo sapien
catatattgcatccatgcacacctc

SEQ ID NO: 2335451 - DNA, 25 bp, Homo sapien
ccatcacattcacttgggtatggat

SEQ ID NO: 2335452 - DNA, 25 bp, Homo sapien
ttgggtatggatgtccttggctgct

SEQ ID NO: 2335453 - DNA, 25 bp, Homo sapien
cagagtgaattgtctcagttcactt

SEQ ID NO: 2335454 - DNA, 25 bp, Homo sapien
ttcacttgggtatggatgtccttgg

SEQ ID NO: 2335455 - DNA, 25 bp, Homo sapien
ttctcttcctatgaaacgctgctgt

SEQ ID NO: 2335456 - DNA, 25 bp, Homo sapien
tttctcttcctatgaaacgctgctg

SEQ ID NO: 2335457 - DNA, 25 bp, Homo sapien
ctttattacaaagagaagaagcctt

SEQ ID NO: 2335458 - DNA, 25 bp, Homo sapien
agagaagaagcctttatgtggtcag

SEQ ID NO: 2335459 - DNA, 25 bp, Homo sapien
actttattacaaagagaagaagcct

SEQ ID NO: 2335460 - DNA, 25 bp, Homo sapien
gaagaagcctttatgtggtcagaaa

SEQ ID NO: 2335461 - DNA, 25 bp, Homo sapien
gggagcgcacggaccgctccagctt

SEQ ID NO: 2335462 - DNA, 25 bp, Homo sapien
tgccccaaggctaggagtgtctgag

SEQ ID NO: 2335463 - DNA, 25 bp, Homo sapien
tctcgtcgggtgtctctctgtctcc

SEQ ID NO: 2335464 - DNA, 25 bp, Homo sapien
gctggccgctactccgctgactcgc

SEQ ID NO: 2335465 - DNA, 25 bp, Homo sapien
cccactctcggcggctggcgtgctc

SEQ ID NO: 2335466 - DNA, 25 bp, Homo sapien
actctcggcggctggcgtgctcccc

SEQ ID NO: 2335467 - DNA, 25 bp, Homo sapien
agcccgactgcctcgggcgggagga

SEQ ID NO: 2335468 - DNA, 25 bp, Homo sapien
ggcgccgagcccgactgcctcgggc

SEQ ID NO: 2335469 - DNA, 25 bp, Homo sapien
tgatgagaaacaagccgagccggat

SEQ ID NO: 2335470 - DNA, 25 bp, Homo sapien
ccacaggtgaaggtgcactcgaaca

SEQ ID NO: 2335471 - DNA, 25 bp, Homo sapien
gacacgacgccggagatgatgagaa

SEQ ID NO: 2335472 - DNA, 25 bp, Homo sapien
gaagccgaagatgaagagcgacacg

SEQ ID NO: 2335473 - DNA, 25 bp, Homo sapien
agctggtgctcgtcgctgtgcagca

SEQ ID NO: 2335474 - DNA, 25 bp, Homo sapien
caggagctggtgctcgtcgctgtgc

SEQ ID NO: 2335475 - DNA, 25 bp, Homo sapien
gcagcgccctagagttggactcaga

SEQ ID NO: 2335476 - DNA, 25 bp, Homo sapien
ctgtgcagcagcgccctagagttgg

SEQ ID NO: 2335477 - DNA, 25 bp, Homo sapien
gacccggactgggtcgaggcctcaa

SEQ ID NO: 2335478 - DNA, 25 bp, Homo sapien
taaccactggctttaaatggaggaa

SEQ ID NO: 2335479 - DNA, 25 bp, Homo sapien
ctaaccactggctttaaatggagga

SEQ ID NO: 2335480 - DNA, 25 bp, Homo sapien
caaacccagtccggtaggcgcagga

SEQ ID NO: 2335481 - DNA, 25 bp, Homo sapien
cacattgttgaaccccaacacggaa

SEQ ID NO: 2335482 - DNA, 25 bp, Homo sapien
tattacattgattggttttagcacg

SEQ ID NO: 2335483 - DNA, 25 bp, Homo sapien
accaagttggaggaataaggagtga

SEQ ID NO: 2335484 - DNA, 25 bp, Homo sapien
tgagagctaatacgtataggacccc

SEQ ID NO: 2335485 - DNA, 25 bp, Homo sapien
tttgtcttcctggtacatcctcaga

SEQ ID NO: 2335486 - DNA, 25 bp, Homo sapien
gtaagtctttgcttgttccctcctg

SEQ ID NO: 2335487 - DNA, 25 bp, Homo sapien
tcctgagagctgatgggttgaggca

SEQ ID NO: 2335488 - DNA, 25 bp, Homo sapien
tctgttgcagtcctttgtcttcctg

SEQ ID NO: 2335489 - DNA, 25 bp, Homo sapien
tagcaagtaaatggctgggaaccaa

SEQ ID NO: 2335490 - DNA, 25 bp, Homo sapien
cagtactgttgccaattcatgacac

SEQ ID NO: 2335491 - DNA, 25 bp, Homo sapien
tgggaaccaatctcatctttccagt

SEQ ID NO: 2335492 - DNA, 25 bp, Homo sapien
ttctctcttacagggagggatatag

SEQ ID NO: 2335493 - DNA, 25 bp, Homo sapien
ggccgctgcagactcaacactggaa

SEQ ID NO: 2335494 - DNA, 25 bp, Homo sapien
caacaggacttaaccagtggaaagc

SEQ ID NO: 2335495 - DNA, 25 bp, Homo sapien
cagtgacgcctctgcagaatccttc

SEQ ID NO: 2335496 - DNA, 25 bp, Homo sapien
tcttttcaagagcatctgggagtcc

SEQ ID NO: 2335497 - DNA, 25 bp, Homo sapien
gctgacagactagttgaggatgcct

SEQ ID NO: 2335498 - DNA, 25 bp, Homo sapien
cacatgactgctgcccttaaggaat

SEQ ID NO: 2335499 - DNA, 25 bp, Homo sapien
cagactataggctccatgaaggcaa

SEQ ID NO: 2335500 - DNA, 25 bp, Homo sapien
tctgcttaaaaccaacgactggctg

SEQ ID NO: 2335501 - DNA, 25 bp, Homo sapien
gataagctattctgtggcggcagga

SEQ ID NO: 2335502 - DNA, 25 bp, Homo sapien
gagtaacaaccatgataccagagtg

SEQ ID NO: 2335503 - DNA, 25 bp, Homo sapien
cctgaaatgggcttgcttcacggag

SEQ ID NO: 2335504 - DNA, 25 bp, Homo sapien
cactgttcccagcttgagatggtag

SEQ ID NO: 2335505 - DNA, 25 bp, Homo sapien
ccctgtttaggtgctttgtcctcct

SEQ ID NO: 2335506 - DNA, 25 bp, Homo sapien
ctgccccatccctgtttaggtgctt

SEQ ID NO: 2335507 - DNA, 25 bp, Homo sapien
ctccaatgctgctgctcctatacat

SEQ ID NO: 2335508 - DNA, 25 bp, Homo sapien
tcctccttgaggagcctccaatgct

SEQ ID NO: 2335509 - DNA, 25 bp, Homo sapien
cattgggtatctataaggctggcaa

SEQ ID NO: 2335510 - DNA, 25 bp, Homo sapien
agtatgcatatgagcagggattcca

SEQ ID NO: 2335511 - DNA, 25 bp, Homo sapien
gagcaaaaatcaccgatgaacccaa

SEQ ID NO: 2335512 - DNA, 25 bp, Homo sapien
ggcaagagctttagaatttggttct

SEQ ID NO: 2335513 - DNA, 25 bp, Homo sapien
ttttatccatctgtcggttttccca

SEQ ID NO: 2335514 - DNA, 25 bp, Homo sapien
acccctgccggagatgcttcctgag

SEQ ID NO: 2335515 - DNA, 25 bp, Homo sapien
gtcggttttcccaatgtgattctta

SEQ ID NO: 2335516 - DNA, 25 bp, Homo sapien
ctattaaggataacccctgccggag

SEQ ID NO: 2335517 - DNA, 25 bp, Homo sapien
tagattcctaacatggaggtggcac

SEQ ID NO: 2335518 - DNA, 25 bp, Homo sapien
gagggtgtcccatcaggttagattc

SEQ ID NO: 2335519 - DNA, 25 bp, Homo sapien
gccacaagtgaaagaggtgcctatg

SEQ ID NO: 2335520 - DNA, 25 bp, Homo sapien
caatggctgaagagcaaatcgttca

SEQ ID NO: 2335521 - DNA, 25 bp, Homo sapien
caaggtttgccctgctacactagag

SEQ ID NO: 2335522 - DNA, 25 bp, Homo sapien
taatgagtccaactgcccttaagaa

SEQ ID NO: 2335523 - DNA, 25 bp, Homo sapien
tagagtagctatgtttcctccagga

SEQ ID NO: 2335524 - DNA, 25 bp, Homo sapien
ttttcccaggtacagtgctcatagc

SEQ ID NO: 2335525 - DNA, 25 bp, Homo sapien
gacaatctcatcatgagtgcgatgc

SEQ ID NO: 2335526 - DNA, 25 bp, Homo sapien
catcatgagtgcgatgcagaagcac

SEQ ID NO: 2335527 - DNA, 25 bp, Homo sapien
aatgagaacgcccaccacaaatgtc

SEQ ID NO: 2335528 - DNA, 25 bp, Homo sapien
gtgcgatgcagaagcacatcatctg

SEQ ID NO: 2335529 - DNA, 25 bp, Homo sapien
tcttcatggcttccgccttgaccgc

SEQ ID NO: 2335530 - DNA, 25 bp, Homo sapien
tggcttccgccttgaccgccaagct

SEQ ID NO: 2335531 - DNA, 25 bp, Homo sapien
ttcttcatggcttccgccttgaccg

SEQ ID NO: 2335532 - DNA, 25 bp, Homo sapien
catggcttccgccttgaccgccaag

SEQ ID NO: 2335533 - DNA, 25 bp, Homo sapien
cgtgccgatgagtacagcttctgta

SEQ ID NO: 2335534 - DNA, 25 bp, Homo sapien
tggacgcgtgccgatgagtacagct

SEQ ID NO: 2335535 - DNA, 25 bp, Homo sapien
agagccctgtcgtggccctgtccat

SEQ ID NO: 2335536 - DNA, 25 bp, Homo sapien
acacaggttccgcaggtggacgcgt

SEQ ID NO: 2335537 - DNA, 25 bp, Homo sapien
acacagaccactctattttaatatt

SEQ ID NO: 2335538 - DNA, 25 bp, Homo sapien
aatggtttgtatactacactgtaca

SEQ ID NO: 2335539 - DNA, 25 bp, Homo sapien
tactccatacagctaagatcttgac

SEQ ID NO: 2335540 - DNA, 25 bp, Homo sapien
ggttttctgaaatagttactccata

SEQ ID NO: 2335541 - DNA, 25 bp, Homo sapien
caggaatccttgttgtcaagtaaaa

SEQ ID NO: 2335542 - DNA, 25 bp, Homo sapien
gcaaatgagacccagatgtcctcac

SEQ ID NO: 2335543 - DNA, 25 bp, Homo sapien
cctagcagaagcaaatgagacccag

SEQ ID NO: 2335544 - DNA, 25 bp, Homo sapien
taaaccctggtgttctaagcataaa

SEQ ID NO: 2335545 - DNA, 25 bp, Homo sapien
gatactctttaatagtggaaactga

SEQ ID NO: 2335546 - DNA, 25 bp, Homo sapien
gaggtgactggagactgagttacca

SEQ ID NO: 2335547 - DNA, 25 bp, Homo sapien
taatggttaggcaaaggcaggtgtt

SEQ ID NO: 2335548 - DNA, 25 bp, Homo sapien
cacctccctctcttaagaagtaatc

SEQ ID NO: 2335549 - DNA, 25 bp, Homo sapien
gcaggtgttggaggatatgttttcc

SEQ ID NO: 2335550 - DNA, 25 bp, Homo sapien
caaaagctgcgatgtccctcaaaag

SEQ ID NO: 2335551 - DNA, 25 bp, Homo sapien
tcagcagattatcacggcatgggcc

SEQ ID NO: 2335552 - DNA, 25 bp, Homo sapien
tctagttagagacacgtcccaggct

SEQ ID NO: 2335553 - DNA, 25 bp, Homo sapien
taaaagtctgcaccagcaagcaggg

SEQ ID NO: 2335554 - DNA, 25 bp, Homo sapien
ttgcccagatgtgcagcataaggga

SEQ ID NO: 2335555 - DNA, 25 bp, Homo sapien
tatccgtcttagagtgtgaggctgg

SEQ ID NO: 2335556 - DNA, 25 bp, Homo sapien
caggagggtcgagaaacggcttaat

SEQ ID NO: 2335557 - DNA, 25 bp, Homo sapien
catgccagggcttgcgtgatttgaa

SEQ ID NO: 2335558 - DNA, 25 bp, Homo sapien
caacagaaaatggtggggcctcagg

SEQ ID NO: 2335559 - DNA, 25 bp, Homo sapien
ttcaaggtaatactcaacagaaaat

SEQ ID NO: 2335560 - DNA, 25 bp, Homo sapien
ctcaacagaaaatggtggggcctca

SEQ ID NO: 2335561 - DNA, 25 bp, Homo sapien
cttcaaggtaatactcaacagaaaa

SEQ ID NO: 2335562 - DNA, 25 bp, Homo sapien
taaaagttttggtttcagctgccga

SEQ ID NO: 2335563 - DNA, 25 bp, Homo sapien
tacccttttgatatgccagactgtg

SEQ ID NO: 2335564 - DNA, 25 bp, Homo sapien
gaccacctggagttggttacactct

SEQ ID NO: 2335565 - DNA, 25 bp, Homo sapien
gtacagtcatttagccatgcagcaa

SEQ ID NO: 2335566 - DNA, 25 bp, Homo sapien
aacattgctgtagtggattttggga

SEQ ID NO: 2335567 - DNA, 25 bp, Homo sapien
aacaacatgggaaaccttctgaggc

SEQ ID NO: 2335568 - DNA, 25 bp, Homo sapien
tgaggcatccctcttcctaaactac

SEQ ID NO: 2335569 - DNA, 25 bp, Homo sapien
taacccagagttggcatttaagata

SEQ ID NO: 2335570 - DNA, 25 bp, Homo sapien
tacagtgacatgatgattgcagctc

SEQ ID NO: 2335571 - DNA, 25 bp, Homo sapien
ctggggtacagtgacatgatgattg

SEQ ID NO: 2335572 - DNA, 25 bp, Homo sapien
gggtacagtgacatgatgattgcag

SEQ ID NO: 2335573 - DNA, 25 bp, Homo sapien
ggtacagtgacatgatgattgcagc

SEQ ID NO: 2335574 - DNA, 25 bp, Homo sapien
aatttaggctcacagacgactcaaa

SEQ ID NO: 2335575 - DNA, 25 bp, Homo sapien
cacttccggagcccccagggtgtgt

SEQ ID NO: 2335576 - DNA, 25 bp, Homo sapien
cgactcaaagggaagtaaagcaggg

SEQ ID NO: 2335577 - DNA, 25 bp, Homo sapien
agatggggttcttgtccttcccaca

SEQ ID NO: 2335578 - DNA, 25 bp, Homo sapien
tcaaacctctggagttagaggaaca

SEQ ID NO: 2335579 - DNA, 25 bp, Homo sapien
gaggaggtcactgtgagtcctgtcc

SEQ ID NO: 2335580 - DNA, 25 bp, Homo sapien
ggaacatgttaggttcatgctgata

SEQ ID NO: 2335581 - DNA, 25 bp, Homo sapien
ctgagagggaacaccaggtggtaag

SEQ ID NO: 2335582 - DNA, 25 bp, Homo sapien
tagaagtcctctgcagacctccttg

SEQ ID NO: 2335583 - DNA, 25 bp, Homo sapien
gacctccttgtctaactgtgacccc

SEQ ID NO: 2335584 - DNA, 25 bp, Homo sapien
taactgtgaccccaaacctcttgtc

SEQ ID NO: 2335585 - DNA, 25 bp, Homo sapien
gcagagaaagtagaagtcctctgca

SEQ ID NO: 2335586 - DNA, 25 bp, Homo sapien
tattgaacattggaattaaaataca

SEQ ID NO: 2335587 - DNA, 25 bp, Homo sapien
gttagataaagtatagctgaaggtt

SEQ ID NO: 2335588 - DNA, 25 bp, Homo sapien
ctcagagcactgatctctttcacaa

SEQ ID NO: 2335589 - DNA, 25 bp, Homo sapien
ttctctcagagcactgatctctttc

SEQ ID NO: 2335590 - DNA, 25 bp, Homo sapien
gatactatctcacatgagtctgaat

SEQ ID NO: 2335591 - DNA, 25 bp, Homo sapien
taacaaaatccaggccaataccata

SEQ ID NO: 2335592 - DNA, 25 bp, Homo sapien
ttaacaaaatccaggccaataccat

SEQ ID NO: 2335593 - DNA, 25 bp, Homo sapien
tcttaacaaaatccaggccaatacc

SEQ ID NO: 2335594 - DNA, 25 bp, Homo sapien
tgtcttaacaaaatccaggccaata

SEQ ID NO: 2335595 - DNA, 25 bp, Homo sapien
tgaggtatcattctccgagccaaca

SEQ ID NO: 2335596 - DNA, 25 bp, Homo sapien
aggtatcattctccgagccaacata

SEQ ID NO: 2335597 - DNA, 25 bp, Homo sapien
ttgaggtatcattctccgagccaac

SEQ ID NO: 2335598 - DNA, 25 bp, Homo sapien
tatcattctccgagccaacataatc

SEQ ID NO: 2335599 - DNA, 25 bp, Homo sapien
tggagcagcactctgtctagatgtg

SEQ ID NO: 2335600 - DNA, 25 bp, Homo sapien
cagcactctgtctagatgtggtgat

SEQ ID NO: 2335601 - DNA, 25 bp, Homo sapien
tggtgatgactcctagtatcttttc

SEQ ID NO: 2335602 - DNA, 25 bp, Homo sapien
gtgatgactcctagtatcttttctc

SEQ ID NO: 2335603 - DNA, 25 bp, Homo sapien
tcattcccattgtaggagtgaaaag

SEQ ID NO: 2335604 - DNA, 25 bp, Homo sapien
ttactacatgtcaggttttattctg

SEQ ID NO: 2335605 - DNA, 25 bp, Homo sapien
taaggtggagattatcattcccatt

SEQ ID NO: 2335606 - DNA, 25 bp, Homo sapien
ctacatgtcaggttttattctgaac

SEQ ID NO: 2335607 - DNA, 25 bp, Homo sapien
gggaccagaagttcaacctctagga

SEQ ID NO: 2335608 - DNA, 25 bp, Homo sapien
ctcttgtaatagcagaggattttca

SEQ ID NO: 2335609 - DNA, 25 bp, Homo sapien
taggatggtcattaaaagctgtaac

SEQ ID NO: 2335610 - DNA, 25 bp, Homo sapien
gctattaggagtcttagacctcttg

SEQ ID NO: 2335611 - DNA, 25 bp, Homo sapien
ttcaggctttagtggaggactatga

SEQ ID NO: 2335612 - DNA, 25 bp, Homo sapien
gtggaggactatgaggagaagacaa

SEQ ID NO: 2335613 - DNA, 25 bp, Homo sapien
tgttcaggctttagtggaggactat

SEQ ID NO: 2335614 - DNA, 25 bp, Homo sapien
tgttgttcaggctttagtggaggac

SEQ ID NO: 2335615 - DNA, 25 bp, Homo sapien
cacatcagcaataaagaaagatgag

SEQ ID NO: 2335616 - DNA, 25 bp, Homo sapien
catcagcaataaagaaagatgagcc

SEQ ID NO: 2335617 - DNA, 25 bp, Homo sapien
acatcagcaataaagaaagatgagc

SEQ ID NO: 2335618 - DNA, 25 bp, Homo sapien
tcacccaagttgacgtttctccctg

SEQ ID NO: 2335619 - DNA, 25 bp, Homo sapien
tccctgactcagaacagatagcagg

SEQ ID NO: 2335620 - DNA, 25 bp, Homo sapien
tagtcgtcacccaagttgacgtttc

SEQ ID NO: 2335621 - DNA, 25 bp, Homo sapien
agttgacgtttctccctgactcaga

SEQ ID NO: 2335622 - DNA, 25 bp, Homo sapien
ctctcggaagaaagcccaaaatgac

SEQ ID NO: 2335623 - DNA, 25 bp, Homo sapien
taaagctaccagatctgcacaacag

SEQ ID NO: 2335624 - DNA, 25 bp, Homo sapien
cagcagtggtagtatctgagcccaa

SEQ ID NO: 2335625 - DNA, 25 bp, Homo sapien
agcccaaactctgagacgctctaga

SEQ ID NO: 2335626 - DNA, 25 bp, Homo sapien
tcaaggtccagttccgacagcattc

SEQ ID NO: 2335627 - DNA, 25 bp, Homo sapien
cttccagggattcaagccaaagtgg

SEQ ID NO: 2335628 - DNA, 25 bp, Homo sapien
gaactagatgcttgtgtctgaacta

SEQ ID NO: 2335629 - DNA, 25 bp, Homo sapien
gtaacttgcagtgcaagcccaggat

SEQ ID NO: 2335630 - DNA, 25 bp, Homo sapien
gccaaagtggtcagctcagggatca

SEQ ID NO: 2335631 - DNA, 25 bp, Homo sapien
ttattaatctggagaatgtttaaaa

SEQ ID NO: 2335632 - DNA, 25 bp, Homo sapien
cagctatttctgttgatactatgta

SEQ ID NO: 2335633 - DNA, 25 bp, Homo sapien
cagaggtgccagctatttctgttga

SEQ ID NO: 2335634 - DNA, 25 bp, Homo sapien
tcatgccctacagaggtgccagcta

SEQ ID NO: 2335635 - DNA, 25 bp, Homo sapien
tgggccatcgtgaagacctaagtta

SEQ ID NO: 2335636 - DNA, 25 bp, Homo sapien
tgcgtcgtcttactctgggccatcg

SEQ ID NO: 2335637 - DNA, 25 bp, Homo sapien
cacagttctggtcaagcaataatta

SEQ ID NO: 2335638 - DNA, 25 bp, Homo sapien
taattaaatgactagaagggtcctc

SEQ ID NO: 2335639 - DNA, 25 bp, Homo sapien
ggccaagctaggttccaatcaggga

SEQ ID NO: 2335640 - DNA, 25 bp, Homo sapien
tattgattataccagacctacctta

SEQ ID NO: 2335641 - DNA, 25 bp, Homo sapien
tatagtcccatggatagctggccaa

SEQ ID NO: 2335642 - DNA, 25 bp, Homo sapien
gacagtatctagtgccaacccataa

SEQ ID NO: 2335643 - DNA, 25 bp, Homo sapien
gtcttcacaagtttccaaacagcaa

SEQ ID NO: 2335644 - DNA, 25 bp, Homo sapien
cttcacaagtttccaaacagcaagc

SEQ ID NO: 2335645 - DNA, 25 bp, Homo sapien
tcttcacaagtttccaaacagcaag

SEQ ID NO: 2335646 - DNA, 25 bp, Homo sapien
ggtcttcacaagtttccaaacagca

SEQ ID NO: 2335647 - DNA, 25 bp, Homo sapien
gagctggccactccatcaggcaaat

SEQ ID NO: 2335648 - DNA, 25 bp, Homo sapien
tgatgccacgcgagtgaagctctcc

SEQ ID NO: 2335649 - DNA, 25 bp, Homo sapien
ccctccagagggataatagccagtt

SEQ ID NO: 2335650 - DNA, 25 bp, Homo sapien
tacatccctgtaagtgacccactag

SEQ ID NO: 2335651 - DNA, 25 bp, Homo sapien
caaactcatatttgacctaacagga

SEQ ID NO: 2335652 - DNA, 25 bp, Homo sapien
tgtaatactgtcttcctctagccat

SEQ ID NO: 2335653 - DNA, 25 bp, Homo sapien
cattgcactcttgccggagaataga

SEQ ID NO: 2335654 - DNA, 25 bp, Homo sapien
gacgtgggccgaaaccagtcatgtg

SEQ ID NO: 2335655 - DNA, 25 bp, Homo sapien
gaatacgaggtacaactcaggcaga

SEQ ID NO: 2335656 - DNA, 25 bp, Homo sapien
ggcatttcatgaagctacaggctga

SEQ ID NO: 2335657 - DNA, 25 bp, Homo sapien
tctgagcattcgtagggatcgacca

SEQ ID NO: 2335658 - DNA, 25 bp, Homo sapien
tcagccatggtcgagaaagaccctc

SEQ ID NO: 2335659 - DNA, 25 bp, Homo sapien
tcttcacaatgctttggaagccaag

SEQ ID NO: 2335660 - DNA, 25 bp, Homo sapien
agttcaccatgaaccagacccacag

SEQ ID NO: 2335661 - DNA, 25 bp, Homo sapien
tgttgtccaacctggatgaatgaaa

SEQ ID NO: 2335662 - DNA, 25 bp, Homo sapien
aagtatgatgtcagcagagagtggc

SEQ ID NO: 2335663 - DNA, 25 bp, Homo sapien
taaggatctaacattgcgcaacagg

SEQ ID NO: 2335664 - DNA, 25 bp, Homo sapien
caggccgccaatacaaaattcttgt

SEQ ID NO: 2335665 - DNA, 25 bp, Homo sapien
tgtacagcagtcagccttcattgag

SEQ ID NO: 2335666 - DNA, 25 bp, Homo sapien
tcaccttgtaaataccgcaaccgag

SEQ ID NO: 2335667 - DNA, 25 bp, Homo sapien
gatccgtttaatcactccacatagt

SEQ ID NO: 2335668 - DNA, 25 bp, Homo sapien
tccacatagtgtaacaatctttccc

SEQ ID NO: 2335669 - DNA, 25 bp, Homo sapien
ggcaaacagcaggcttagaatgagt

SEQ ID NO: 2335670 - DNA, 25 bp, Homo sapien
tcttatacatgacactttgtgcagg

SEQ ID NO: 2335671 - DNA, 25 bp, Homo sapien
tgtccccgccgcctctcgcgtccgc

SEQ ID NO: 2335672 - DNA, 25 bp, Homo sapien
ccgcagtggcccctgcgcgtcgcca

SEQ ID NO: 2335673 - DNA, 25 bp, Homo sapien
gcagtggcccctgcgcgtcgccagc

SEQ ID NO: 2335674 - DNA, 25 bp, Homo sapien
ctgcgcgtcgccagccccgagggaa

SEQ ID NO: 2335675 - DNA, 25 bp, Homo sapien
tgtgagcaaccttcttctaccagag

SEQ ID NO: 2335676 - DNA, 25 bp, Homo sapien
agagctgtgagcaaccttcttctac

SEQ ID NO: 2335677 - DNA, 25 bp, Homo sapien
gcaaccttcttctaccagagaccag

SEQ ID NO: 2335678 - DNA, 25 bp, Homo sapien
tgagcaaccttcttctaccagagac

SEQ ID NO: 2335679 - DNA, 25 bp, Homo sapien
tgctctaggaactgtgtcatcattt

SEQ ID NO: 2335680 - DNA, 25 bp, Homo sapien
tcatcatagggctccacaatggagt

SEQ ID NO: 2335681 - DNA, 25 bp, Homo sapien
cttgctgaagttgatcggttccgtg

SEQ ID NO: 2335682 - DNA, 25 bp, Homo sapien
gttccgtgggcacgggcacattctg

SEQ ID NO: 2335683 - DNA, 25 bp, Homo sapien
ttccaatgaccacagctgctccact

SEQ ID NO: 2335684 - DNA, 25 bp, Homo sapien
tttccaatgaccacagctgctccac

SEQ ID NO: 2335685 - DNA, 25 bp, Homo sapien
ccaatgaccacagctgctccacttc

SEQ ID NO: 2335686 - DNA, 25 bp, Homo sapien
ctttccaatgaccacagctgctcca

SEQ ID NO: 2335687 - DNA, 25 bp, Homo sapien
ctgtggccttgatgtgcttgccttt

SEQ ID NO: 2335688 - DNA, 25 bp, Homo sapien
acgttatgagccgcagtgaagccag

SEQ ID NO: 2335689 - DNA, 25 bp, Homo sapien
cacgttatgagccgcagtgaagcca

SEQ ID NO: 2335690 - DNA, 25 bp, Homo sapien
gttatgagccgcagtgaagccagcc

SEQ ID NO: 2335691 - DNA, 25 bp, Homo sapien
cgttatgagccgcagtgaagccagc

SEQ ID NO: 2335692 - DNA, 25 bp, Homo sapien
catgtctcatttgccagtcatgagc

SEQ ID NO: 2335693 - DNA, 25 bp, Homo sapien
cccatcatgtctcatttgccagtca

SEQ ID NO: 2335694 - DNA, 25 bp, Homo sapien
ctgtttcccatcatgtctcatttgc

SEQ ID NO: 2335695 - DNA, 25 bp, Homo sapien
catcatgtctcatttgccagtcatg

SEQ ID NO: 2335696 - DNA, 25 bp, Homo sapien
taagatgtgtgcatctgctacactg

SEQ ID NO: 2335697 - DNA, 25 bp, Homo sapien
tatccgctcctctgtcttgaccacc

SEQ ID NO: 2335698 - DNA, 25 bp, Homo sapien
ttcacttggcagcaggtctttaaga

SEQ ID NO: 2335699 - DNA, 25 bp, Homo sapien
ccacgctatccgctcctctgtcttg

SEQ ID NO: 2335700 - DNA, 25 bp, Homo sapien
aacacctggggaggtcccagtcagg

SEQ ID NO: 2335701 - DNA, 25 bp, Homo sapien
tttcctgaatacaccaacacctggg

SEQ ID NO: 2335702 - DNA, 25 bp, Homo sapien
cttgagaaagacagaaggtttcctg

SEQ ID NO: 2335703 - DNA, 25 bp, Homo sapien
gacatcccctgggtaaaaggtgaca

SEQ ID NO: 2335704 - DNA, 25 bp, Homo sapien
tgctgatgatgacacctagttcttc

SEQ ID NO: 2335705 - DNA, 25 bp, Homo sapien
gatgacacctagttcttcaatttca

SEQ ID NO: 2335706 - DNA, 25 bp, Homo sapien
ccaccttgctgatgatgacacctag

SEQ ID NO: 2335707 - DNA, 25 bp, Homo sapien
gttcttcaatttcacactggacttc

SEQ ID NO: 2335708 - DNA, 25 bp, Homo sapien
ccttctacctagaagaggaggctta

SEQ ID NO: 2335709 - DNA, 25 bp, Homo sapien
tgcccacacctggcattcgacattt

SEQ ID NO: 2335710 - DNA, 25 bp, Homo sapien
ctggcattcgacatttccctgggct

SEQ ID NO: 2335711 - DNA, 25 bp, Homo sapien
cttctacctagaagaggaggcttac

SEQ ID NO: 2335712 - DNA, 25 bp, Homo sapien
ctctgagttggcaagccaagcccca

SEQ ID NO: 2335713 - DNA, 25 bp, Homo sapien
gcagtcagcatgctcaccagcgaat

SEQ ID NO: 2335714 - DNA, 25 bp, Homo sapien
cactcaacagttgggtgcactactt

SEQ ID NO: 2335715 - DNA, 25 bp, Homo sapien
tgcatgtccctggtgcactcaacag

SEQ ID NO: 2335716 - DNA, 25 bp, Homo sapien
gaatgcaccattccaaagcgagtcc

SEQ ID NO: 2335717 - DNA, 25 bp, Homo sapien
tgtggtctcgtgatttcaccctgcc

SEQ ID NO: 2335718 - DNA, 25 bp, Homo sapien
tagaccccagtcttgcatagcgctc

SEQ ID NO: 2335719 - DNA, 25 bp, Homo sapien
catctgttatggtctgtagactgta

SEQ ID NO: 2335720 - DNA, 25 bp, Homo sapien
ctgttatggtctgtagactgtaggg

SEQ ID NO: 2335721 - DNA, 25 bp, Homo sapien
taatgtgggtttctgagtgggaccc

SEQ ID NO: 2335722 - DNA, 25 bp, Homo sapien
taacacatacccatatcttagtggc

SEQ ID NO: 2335723 - DNA, 25 bp, Homo sapien
taatgcagttttagggtgaccctgg

SEQ ID NO: 2335724 - DNA, 25 bp, Homo sapien
gaaatagagcactcatgagcctcac

SEQ ID NO: 2335725 - DNA, 25 bp, Homo sapien
tctgcctgaccctgattccagtcat

SEQ ID NO: 2335726 - DNA, 25 bp, Homo sapien
tttgatagggctggatgtagaaacc

SEQ ID NO: 2335727 - DNA, 25 bp, Homo sapien
tcagaaaagctccatgaatgaagag

SEQ ID NO: 2335728 - DNA, 25 bp, Homo sapien
cagacatttgcctgagtgttgagct

SEQ ID NO: 2335729 - DNA, 25 bp, Homo sapien
gtttctctttgataccatatcgcat

SEQ ID NO: 2335730 - DNA, 25 bp, Homo sapien
cctgtttctctttgataccatatcg

SEQ ID NO: 2335731 - DNA, 25 bp, Homo sapien
tgtttctctttgataccatatcgca

SEQ ID NO: 2335732 - DNA, 25 bp, Homo sapien
ctgtttctctttgataccatatcgc

SEQ ID NO: 2335733 - DNA, 25 bp, Homo sapien
agacacatctgtaattggttggttg

SEQ ID NO: 2335734 - DNA, 25 bp, Homo sapien
taatgctctagtttctccctgttcc

SEQ ID NO: 2335735 - DNA, 25 bp, Homo sapien
aattggttggttggtcaactcagac

SEQ ID NO: 2335736 - DNA, 25 bp, Homo sapien
tgttccctcctgaagacacatctgt

SEQ ID NO: 2335737 - DNA, 25 bp, Homo sapien
cctaactctctcagacaaggacctg

SEQ ID NO: 2335738 - DNA, 25 bp, Homo sapien
ttcctgcctctgaatcctccgtgtg

SEQ ID NO: 2335739 - DNA, 25 bp, Homo sapien
cctccctaagcaaggtcagcccttt

SEQ ID NO: 2335740 - DNA, 25 bp, Homo sapien
tctcttccagagaactaggccatct

SEQ ID NO: 2335741 - DNA, 25 bp, Homo sapien
ccctttctatctagttcggccctca

SEQ ID NO: 2335742 - DNA, 25 bp, Homo sapien
cctttctatctagttcggccctcac

SEQ ID NO: 2335743 - DNA, 25 bp, Homo sapien
cagcccctttctatctagttcggcc

SEQ ID NO: 2335744 - DNA, 25 bp, Homo sapien
tctctagcactggaaggataaggaa

SEQ ID NO: 2335745 - DNA, 25 bp, Homo sapien
aaggaaagcaacacgaaccagcagc

SEQ ID NO: 2335746 - DNA, 25 bp, Homo sapien
tagccaaatatttgctctctagcac

SEQ ID NO: 2335747 - DNA, 25 bp, Homo sapien
gaaagcaacacgaaccagcagctga

SEQ ID NO: 2335748 - DNA, 25 bp, Homo sapien
aagagagggctacttagatgtaatc

SEQ ID NO: 2335749 - DNA, 25 bp, Homo sapien
cccaagagagggctacttagatgta

SEQ ID NO: 2335750 - DNA, 25 bp, Homo sapien
ttgcaggagttagtataactatatg

SEQ ID NO: 2335751 - DNA, 25 bp, Homo sapien
tataactatatgtggactgaagaat

SEQ ID NO: 2335752 - DNA, 25 bp, Homo sapien
catgcatagagaactcagagccctg

SEQ ID NO: 2335753 - DNA, 25 bp, Homo sapien
ttgattcaacaatttcaggcaggtc

SEQ ID NO: 2335754 - DNA, 25 bp, Homo sapien
gagatcatatccctgcccaaagata

SEQ ID NO: 2335755 - DNA, 25 bp, Homo sapien
caggtgactgtgtttccgatgcaga

SEQ ID NO: 2335756 - DNA, 25 bp, Homo sapien
ctacgttcagggctccacatttcct

SEQ ID NO: 2335757 - DNA, 25 bp, Homo sapien
cagggctccacatttcctctgggcc

SEQ ID NO: 2335758 - DNA, 25 bp, Homo sapien
acgttcagggctccacatttcctct

SEQ ID NO: 2335759 - DNA, 25 bp, Homo sapien
gggctccacatttcctctgggccat

SEQ ID NO: 2335760 - DNA, 25 bp, Homo sapien
tgtgctccatttgacctgaactact

SEQ ID NO: 2335761 - DNA, 25 bp, Homo sapien
tgaactactggcatagaagtcacca

SEQ ID NO: 2335762 - DNA, 25 bp, Homo sapien
ttgacctgaactactggcatagaag

SEQ ID NO: 2335763 - DNA, 25 bp, Homo sapien
catttgacctgaactactggcatag

SEQ ID NO: 2335764 - DNA, 25 bp, Homo sapien
tttgtgaaagcgaagacctgtgagc

SEQ ID NO: 2335765 - DNA, 25 bp, Homo sapien
tgtggattttgtgaaagcgaagacc

SEQ ID NO: 2335766 - DNA, 25 bp, Homo sapien
tccttttgccagaaagtatcccagt

SEQ ID NO: 2335767 - DNA, 25 bp, Homo sapien
agaaagtatcccagtgtggattttg

SEQ ID NO: 2335768 - DNA, 25 bp, Homo sapien
gctagtcaattgaaggagtaggagt

SEQ ID NO: 2335769 - DNA, 25 bp, Homo sapien
agaaatccgcaactggttgtgatca

SEQ ID NO: 2335770 - DNA, 25 bp, Homo sapien
ggagaaggaacaaagaaatccgcaa

SEQ ID NO: 2335771 - DNA, 25 bp, Homo sapien
aaggctagtcaattgaaggagtagg

SEQ ID NO: 2335772 - DNA, 25 bp, Homo sapien
tttcatcagagcccttcaaattcag

SEQ ID NO: 2335773 - DNA, 25 bp, Homo sapien
catcagagcccttcaaattcagtac

SEQ ID NO: 2335774 - DNA, 25 bp, Homo sapien
tcatcagagcccttcaaattcagta

SEQ ID NO: 2335775 - DNA, 25 bp, Homo sapien
atcagagcccttcaaattcagtaca

SEQ ID NO: 2335776 - DNA, 25 bp, Homo sapien
cttgaggaaaattgaaaacgtacat

SEQ ID NO: 2335777 - DNA, 25 bp, Homo sapien
aaacgtacatttcagcaatcgcaga

SEQ ID NO: 2335778 - DNA, 25 bp, Homo sapien
gccattgtagccattaccaaaaaac

SEQ ID NO: 2335779 - DNA, 25 bp, Homo sapien
ctagtgattagcaaacatcttgcca

SEQ ID NO: 2335780 - DNA, 25 bp, Homo sapien
actcctggacatttgggcttctctc

SEQ ID NO: 2335781 - DNA, 25 bp, Homo sapien
ttgactcctggacatttgggcttct

SEQ ID NO: 2335782 - DNA, 25 bp, Homo sapien
ttgaccttgatttcacttctacatt

SEQ ID NO: 2335783 - DNA, 25 bp, Homo sapien
tgactcctggacatttgggcttctc

SEQ ID NO: 2335784 - DNA, 25 bp, Homo sapien
ggtgctcctctcaagagcgaatggt

SEQ ID NO: 2335785 - DNA, 25 bp, Homo sapien
aaccagatggagaaagggggtgctc

SEQ ID NO: 2335786 - DNA, 25 bp, Homo sapien
ctctcaagagcgaatggttccctct

SEQ ID NO: 2335787 - DNA, 25 bp, Homo sapien
aagagcgaatggttccctctcagtt

SEQ ID NO: 2335788 - DNA, 25 bp, Homo sapien
gtcccagtgtggaagacgatagagt

SEQ ID NO: 2335789 - DNA, 25 bp, Homo sapien
ccagtgtggaagacgatagagtaca

SEQ ID NO: 2335790 - DNA, 25 bp, Homo sapien
tgtggaagacgatagagtacatttg

SEQ ID NO: 2335791 - DNA, 25 bp, Homo sapien
gggtcccagtgtggaagacgataga

SEQ ID NO: 2335792 - DNA, 25 bp, Homo sapien
cccattgagatgctttgctaggcag

SEQ ID NO: 2335793 - DNA, 25 bp, Homo sapien
tgagatgctttgctaggcagttttc

SEQ ID NO: 2335794 - DNA, 25 bp, Homo sapien
gctttgctaggcagttttctagacc

SEQ ID NO: 2335795 - DNA, 25 bp, Homo sapien
gctaggcagttttctagaccattgt

SEQ ID NO: 2335796 - DNA, 25 bp, Homo sapien
gaattttatcccaatgttgtcagag

SEQ ID NO: 2335797 - DNA, 25 bp, Homo sapien
caaattatgtagataggcatggaca

SEQ ID NO: 2335798 - DNA, 25 bp, Homo sapien
tattaacagctctagtagcagtagc

SEQ ID NO: 2335799 - DNA, 25 bp, Homo sapien
caagagtgccagatatcattttcca

SEQ ID NO: 2335800 - DNA, 25 bp, Homo sapien
tcggctagctagaccacagatatct

SEQ ID NO: 2335801 - DNA, 25 bp, Homo sapien
caggagcagctgtctttttaaaatg

SEQ ID NO: 2335802 - DNA, 25 bp, Homo sapien
gcatcaacctatcgtcagtcaaacc

SEQ ID NO: 2335803 - DNA, 25 bp, Homo sapien
tttgagggatataagggaaaatgat

SEQ ID NO: 2335804 - DNA, 25 bp, Homo sapien
tctctttctgctctgaagccgtgga

SEQ ID NO: 2335805 - DNA, 25 bp, Homo sapien
gcaggcaagttgctccagagcatat

SEQ ID NO: 2335806 - DNA, 25 bp, Homo sapien
tctgaagccgtggatacagaaatct

SEQ ID NO: 2335807 - DNA, 25 bp, Homo sapien
gaaatctctgcaggcaagttgctcc

SEQ ID NO: 2335808 - DNA, 25 bp, Homo sapien
taaggtgaatctttcccaagaagca

SEQ ID NO: 2335809 - DNA, 25 bp, Homo sapien
agcttcagggctgccaagccaagga

SEQ ID NO: 2335810 - DNA, 25 bp, Homo sapien
gcagatcacccctggaaaagctggc

SEQ ID NO: 2335811 - DNA, 25 bp, Homo sapien
aaaagctggcaaagtggagcttcag

SEQ ID NO: 2335812 - DNA, 25 bp, Homo sapien
gagttaacggcttttgacactgaag

SEQ ID NO: 2335813 - DNA, 25 bp, Homo sapien
tggcagtgtgtattagagttaacgg

SEQ ID NO: 2335814 - DNA, 25 bp, Homo sapien
tgtattagagttaacggcttttgac

SEQ ID NO: 2335815 - DNA, 25 bp, Homo sapien
gcagtgtgtattagagttaacggct

SEQ ID NO: 2335816 - DNA, 25 bp, Homo sapien
gatcaagggtgtcatgtatatatag

SEQ ID NO: 2335817 - DNA, 25 bp, Homo sapien
ctctgatcaagggtgtcatgtatat

SEQ ID NO: 2335818 - DNA, 25 bp, Homo sapien
ggtgtcatgtatatatagtttgcta

SEQ ID NO: 2335819 - DNA, 25 bp, Homo sapien
caagggtgtcatgtatatatagttt

SEQ ID NO: 2335820 - DNA, 25 bp, Homo sapien
tattcatactggacaatctggctca

SEQ ID NO: 2335821 - DNA, 25 bp, Homo sapien
tcactcatctgatatcaaccaggag

SEQ ID NO: 2335822 - DNA, 25 bp, Homo sapien
gatgtaggcacttgttttcccagga

SEQ ID NO: 2335823 - DNA, 25 bp, Homo sapien
acatttgcctgtgatcctgacaagc

SEQ ID NO: 2335824 - DNA, 25 bp, Homo sapien
tacctgctgttcccgtttgctccaa

SEQ ID NO: 2335825 - DNA, 25 bp, Homo sapien
cgtttgctccaagcaccaagtaaaa

SEQ ID NO: 2335826 - DNA, 25 bp, Homo sapien
tcctccctgaatgacggatcacctt

SEQ ID NO: 2335827 - DNA, 25 bp, Homo sapien
tgaatgacggatcaccttccacctc

SEQ ID NO: 2335828 - DNA, 25 bp, Homo sapien
cagtgtcacaacttgtatatcttct

SEQ ID NO: 2335829 - DNA, 25 bp, Homo sapien
gctgccatcgtggcttggcctttcc

SEQ ID NO: 2335830 - DNA, 25 bp, Homo sapien
gataatgtctcatataggttttctc

SEQ ID NO: 2335831 - DNA, 25 bp, Homo sapien
tgttcatgggctttcctagcctcag

SEQ ID NO: 2335832 - DNA, 25 bp, Homo sapien
aagcaaggagccatcactaacaaac

SEQ ID NO: 2335833 - DNA, 25 bp, Homo sapien
tggaaagcaaggagccatcactaac

SEQ ID NO: 2335834 - DNA, 25 bp, Homo sapien
gcaaggagccatcactaacaaacaa

SEQ ID NO: 2335835 - DNA, 25 bp, Homo sapien
gagccatcactaacaaacaaatccc

SEQ ID NO: 2335836 - DNA, 25 bp, Homo sapien
cttgggttgcttcttcaaagggttg

SEQ ID NO: 2335837 - DNA, 25 bp, Homo sapien
gtcctcatgtagctatcacaggaat

SEQ ID NO: 2335838 - DNA, 25 bp, Homo sapien
atgtcggggtggatattcctgttga

SEQ ID NO: 2335839 - DNA, 25 bp, Homo sapien
aagggttgtggatggggatgtcggg

SEQ ID NO: 2335840 - DNA, 25 bp, Homo sapien
tggaagaaaagtctgtgccttttta

SEQ ID NO: 2335841 - DNA, 25 bp, Homo sapien
tattcacgtagcttgagtgctgtgc

SEQ ID NO: 2335842 - DNA, 25 bp, Homo sapien
ttcacgtagcttgagtgctgtgcag

SEQ ID NO: 2335843 - DNA, 25 bp, Homo sapien
ttattcacgtagcttgagtgctgtg

SEQ ID NO: 2335844 - DNA, 25 bp, Homo sapien
tcacgtagcttgagtgctgtgcagc

SEQ ID NO: 2335845 - DNA, 25 bp, Homo sapien
tgctaagtctagctgaacttcagcc

SEQ ID NO: 2335846 - DNA, 25 bp, Homo sapien
ttctgctaagtctagctgaacttca

SEQ ID NO: 2335847 - DNA, 25 bp, Homo sapien
ccaatcccccttctgctaagtctag

SEQ ID NO: 2335848 - DNA, 25 bp, Homo sapien
caatcccccttctgctaagtctagc

SEQ ID NO: 2335849 - DNA, 25 bp, Homo sapien
tggcatggcttcaggggcactatac

SEQ ID NO: 2335850 - DNA, 25 bp, Homo sapien
caccatctcttgtaaggacaaaaca

SEQ ID NO: 2335851 - DNA, 25 bp, Homo sapien
caggggcactatacttctatttcca

SEQ ID NO: 2335852 - DNA, 25 bp, Homo sapien
tccaattgtggctagaatatctgca

SEQ ID NO: 2335853 - DNA, 25 bp, Homo sapien
cctcgggaggtctgagctcataatc

SEQ ID NO: 2335854 - DNA, 25 bp, Homo sapien
ttagcttggtttgctcggttggcag

SEQ ID NO: 2335855 - DNA, 25 bp, Homo sapien
tcataatcagacttgctttggccgc

SEQ ID NO: 2335856 - DNA, 25 bp, Homo sapien
tacataagcctctcgcctcgggagg

SEQ ID NO: 2335857 - DNA, 25 bp, Homo sapien
aagagcacttcgtgaatggccacac

SEQ ID NO: 2335858 - DNA, 25 bp, Homo sapien
ttaagagcacttcgtgaatggccac

SEQ ID NO: 2335859 - DNA, 25 bp, Homo sapien
taagagcacttcgtgaatggccaca

SEQ ID NO: 2335860 - DNA, 25 bp, Homo sapien
ggtcttgccaattcttgtgctttac

SEQ ID NO: 2335861 - DNA, 25 bp, Homo sapien
ccaattcttgtgctttacttatacc

SEQ ID NO: 2335862 - DNA, 25 bp, Homo sapien
tcaaataacaggtcttgccaattct

SEQ ID NO: 2335863 - DNA, 25 bp, Homo sapien
aaataacaggtcttgccaattcttg

SEQ ID NO: 2335864 - DNA, 25 bp, Homo sapien
caatggattcataggtaggctggtt

SEQ ID NO: 2335865 - DNA, 25 bp, Homo sapien
tggattcataggtaggctggttcat

SEQ ID NO: 2335866 - DNA, 25 bp, Homo sapien
gaagcaggatttgcaccttcaatgg

SEQ ID NO: 2335867 - DNA, 25 bp, Homo sapien
ggatttgcaccttcaatggattcat

SEQ ID NO: 2335868 - DNA, 25 bp, Homo sapien
tttctctaaagcgtcagattccctg

SEQ ID NO: 2335869 - DNA, 25 bp, Homo sapien
ccctggtatggtaggctgctttgtc

SEQ ID NO: 2335870 - DNA, 25 bp, Homo sapien
taaagcgtcagattccctggtatgg

SEQ ID NO: 2335871 - DNA, 25 bp, Homo sapien
tcaggggaatccagactgattttcc

SEQ ID NO: 2335872 - DNA, 25 bp, Homo sapien
gctgagcacaaatcagtacgtaatg

SEQ ID NO: 2335873 - DNA, 25 bp, Homo sapien
gaattggtcacacgcaaatccacaa

SEQ ID NO: 2335874 - DNA, 25 bp, Homo sapien
caaaactgtcagtacgcgtagatga

SEQ ID NO: 2335875 - DNA, 25 bp, Homo sapien
tgtgatactgacactaaaaatgcca

SEQ ID NO: 2335876 - DNA, 25 bp, Homo sapien
ccacgagccggacgcgggcggagag

SEQ ID NO: 2335877 - DNA, 25 bp, Homo sapien
cgttcctgaccccacggcgtgggcg

SEQ ID NO: 2335878 - DNA, 25 bp, Homo sapien
tcagcgggcgtctgcagcgccagac

SEQ ID NO: 2335879 - DNA, 25 bp, Homo sapien
gcggagagcagcaccggactgctac

SEQ ID NO: 2335880 - DNA, 25 bp, Homo sapien
tgagcaacatcctgccgtcgggctc

SEQ ID NO: 2335881 - DNA, 25 bp, Homo sapien
gcacaccgagccgggaggtgtccat

SEQ ID NO: 2335882 - DNA, 25 bp, Homo sapien
tccgagagccccaggtcggagcagt

SEQ ID NO: 2335883 - DNA, 25 bp, Homo sapien
cgtcgggctcgcaatgacagtgtgt

SEQ ID NO: 2335884 - DNA, 25 bp, Homo sapien
ggtattagggcttcataaattgtgt

SEQ ID NO: 2335885 - DNA, 25 bp, Homo sapien
tggtattagggcttcataaattgtg

SEQ ID NO: 2335886 - DNA, 25 bp, Homo sapien
tctggtattagggcttcataaattg

SEQ ID NO: 2335887 - DNA, 25 bp, Homo sapien
gtattagggcttcataaattgtgtt

SEQ ID NO: 2335888 - DNA, 25 bp, Homo sapien
caccatgtggtgttttgtgcatcga

SEQ ID NO: 2335889 - DNA, 25 bp, Homo sapien
tgtgcatcgaaccaataaactcatt

SEQ ID NO: 2335890 - DNA, 25 bp, Homo sapien
ttttgtgcggatagatttaaagacc

SEQ ID NO: 2335891 - DNA, 25 bp, Homo sapien
ggaagttctaacacagcccacatta

SEQ ID NO: 2335892 - DNA, 25 bp, Homo sapien
cgaaggattgtactctacccatggg

SEQ ID NO: 2335893 - DNA, 25 bp, Homo sapien
tctgcagagacaataatacaggctc

SEQ ID NO: 2335894 - DNA, 25 bp, Homo sapien
tcagtaggcactcgggaattccaga

SEQ ID NO: 2335895 - DNA, 25 bp, Homo sapien
ttcatcagttatgggaaaagccagc

SEQ ID NO: 2335896 - DNA, 25 bp, Homo sapien
aaacaaggccagagcgtgctgctcc

SEQ ID NO: 2335897 - DNA, 25 bp, Homo sapien
ttctcagtttctccgctttgacctc

SEQ ID NO: 2335898 - DNA, 25 bp, Homo sapien
agcgcccacgcggaggcaggcaatt

SEQ ID NO: 2335899 - DNA, 25 bp, Homo sapien
tcagtgtcgctttctgtcagatcac

SEQ ID NO: 2335900 - DNA, 25 bp, Homo sapien
gatgtgctgggaatgtaagatcctg

SEQ ID NO: 2335901 - DNA, 25 bp, Homo sapien
taagatcctgtaagacatggccacc

SEQ ID NO: 2335902 - DNA, 25 bp, Homo sapien
catggccaccgttaaaatctttcag

SEQ ID NO: 2335903 - DNA, 25 bp, Homo sapien
tgtgtgccagatccatgatgtgctg

SEQ ID NO: 2335904 - DNA, 25 bp, Homo sapien
gatgtgaaagagatcccagggctca

SEQ ID NO: 2335905 - DNA, 25 bp, Homo sapien
acttggtaggatggtaaactgactc

SEQ ID NO: 2335906 - DNA, 25 bp, Homo sapien
tgtacagtaatattcgacactcagc

SEQ ID NO: 2335907 - DNA, 25 bp, Homo sapien
aagcgaggtgttgttacttagctac

SEQ ID NO: 2335908 - DNA, 25 bp, Homo sapien
ctgaatcgccagcttttaacagcat

SEQ ID NO: 2335909 - DNA, 25 bp, Homo sapien
ttcttgaatgccataagggcaaggg

SEQ ID NO: 2335910 - DNA, 25 bp, Homo sapien
gtgctgaatcgccagcttttaacag

SEQ ID NO: 2335911 - DNA, 25 bp, Homo sapien
aagggggtgctgaatcgccagcttt

SEQ ID NO: 2335912 - DNA, 25 bp, Homo sapien
ttagtggacttcttcgcctcagtct

SEQ ID NO: 2335913 - DNA, 25 bp, Homo sapien
gcagtgggatcttagtggacttctt

SEQ ID NO: 2335914 - DNA, 25 bp, Homo sapien
agtggacttcttcgcctcagtcttt

SEQ ID NO: 2335915 - DNA, 25 bp, Homo sapien
acgcaatagcagtgggatcttagtg

SEQ ID NO: 2335916 - DNA, 25 bp, Homo sapien
cagattccacaactccagttggaat

SEQ ID NO: 2335917 - DNA, 25 bp, Homo sapien
ttcttgactccaccggttcatctct

SEQ ID NO: 2335918 - DNA, 25 bp, Homo sapien
cccagattccacaactccagttgga

SEQ ID NO: 2335919 - DNA, 25 bp, Homo sapien
cagccccagattccacaactccagt

SEQ ID NO: 2335920 - DNA, 25 bp, Homo sapien
ttccaaattaccactcccccatatc

SEQ ID NO: 2335921 - DNA, 25 bp, Homo sapien
tccctggaatgcattatcctctcca

SEQ ID NO: 2335922 - DNA, 25 bp, Homo sapien
tggaatgcattatcctctccatttc

SEQ ID NO: 2335923 - DNA, 25 bp, Homo sapien
cttccctggaatgcattatcctctc

SEQ ID NO: 2335924 - DNA, 25 bp, Homo sapien
gaaaagtcgccctgagaagtctgtc

SEQ ID NO: 2335925 - DNA, 25 bp, Homo sapien
tcttctacaccacggccagaaaagt

SEQ ID NO: 2335926 - DNA, 25 bp, Homo sapien
accacggccagaaaagtcgccctga

SEQ ID NO: 2335927 - DNA, 25 bp, Homo sapien
gtcgccctgagaagtctgtctggtc

SEQ ID NO: 2335928 - DNA, 25 bp, Homo sapien
agttcgcttccggatctggcccctt

SEQ ID NO: 2335929 - DNA, 25 bp, Homo sapien
taattgtactacagagttcgcttcc

SEQ ID NO: 2335930 - DNA, 25 bp, Homo sapien
cctatgtccataagccccctggtgt

SEQ ID NO: 2335931 - DNA, 25 bp, Homo sapien
caggttttattctaggaacacagtg

SEQ ID NO: 2335932 - DNA, 25 bp, Homo sapien
aaggccaggcctagaaccgaggtct

SEQ ID NO: 2335933 - DNA, 25 bp, Homo sapien
gaggtggcctctaagtttcagtgca

SEQ ID NO: 2335934 - DNA, 25 bp, Homo sapien
gactgaaactcaccagggtgagaat

SEQ ID NO: 2335935 - DNA, 25 bp, Homo sapien
tttggctgttagagaggactgaaac

SEQ ID NO: 2335936 - DNA, 25 bp, Homo sapien
agtgaaatgaaccataaaacgaggg

SEQ ID NO: 2335937 - DNA, 25 bp, Homo sapien
ggtgatcctgctctgtagcacactt

SEQ ID NO: 2335938 - DNA, 25 bp, Homo sapien
cataaaacgagggtgtaaggtgatc

SEQ ID NO: 2335939 - DNA, 25 bp, Homo sapien
cgagggtgtaaggtgatcctgctct

SEQ ID NO: 2335940 - DNA, 25 bp, Homo sapien
aaaatgatttagaccattcatgggc

SEQ ID NO: 2335941 - DNA, 25 bp, Homo sapien
aaatgatttagaccattcatgggca

SEQ ID NO: 2335942 - DNA, 25 bp, Homo sapien
caaaatgatttagaccattcatggg

SEQ ID NO: 2335943 - DNA, 25 bp, Homo sapien
aatgatttagaccattcatgggcat

SEQ ID NO: 2335944 - DNA, 25 bp, Homo sapien
tgggcaggggattcgggagcagctg

SEQ ID NO: 2335945 - DNA, 25 bp, Homo sapien
gattcgggagcagctgactgatgtt

SEQ ID NO: 2335946 - DNA, 25 bp, Homo sapien
actgatgttgttcatactgaggtct

SEQ ID NO: 2335947 - DNA, 25 bp, Homo sapien
tcctccaggaagcggagactgggca

SEQ ID NO: 2335948 - DNA, 25 bp, Homo sapien
gagagacaaacacaagaatgtgccc

SEQ ID NO: 2335949 - DNA, 25 bp, Homo sapien
tcatgttctgaaattgttggtgctg

SEQ ID NO: 2335950 - DNA, 25 bp, Homo sapien
tatctggttcccacagtaagtatga

SEQ ID NO: 2335951 - DNA, 25 bp, Homo sapien
gactggatgcatcaagactacagtg

SEQ ID NO: 2335952 - DNA, 25 bp, Homo sapien
aactatttccaaagagctatccagc

SEQ ID NO: 2335953 - DNA, 25 bp, Homo sapien
gattatagctttacttgcgatttta

SEQ ID NO: 2335954 - DNA, 25 bp, Homo sapien
taagccgaaccaagcagcagttttt

SEQ ID NO: 2335955 - DNA, 25 bp, Homo sapien
catttttctactgaagccttgaggg

SEQ ID NO: 2335956 - DNA, 25 bp, Homo sapien
gatgaaccatggctatctacacagt

SEQ ID NO: 2335957 - DNA, 25 bp, Homo sapien
taagtcagtgtatatctctagcgct

SEQ ID NO: 2335958 - DNA, 25 bp, Homo sapien
tatatccggtaattagagctaaggg

SEQ ID NO: 2335959 - DNA, 25 bp, Homo sapien
taaggcttagccatggatgagagat

SEQ ID NO: 2335960 - DNA, 25 bp, Homo sapien
gaatgctcccttgggaatgtatgtc

SEQ ID NO: 2335961 - DNA, 25 bp, Homo sapien
agtgaatgctcccttgggaatgtat

SEQ ID NO: 2335962 - DNA, 25 bp, Homo sapien
atgctcccttgggaatgtatgtcag

SEQ ID NO: 2335963 - DNA, 25 bp, Homo sapien
gctcccttgggaatgtatgtcagag

SEQ ID NO: 2335964 - DNA, 25 bp, Homo sapien
tacgtgtcttagctgattattctgc

SEQ ID NO: 2335965 - DNA, 25 bp, Homo sapien
gcttcgcaaattctgcagagcttct

SEQ ID NO: 2335966 - DNA, 25 bp, Homo sapien
agggattgaaggcttcgcaaattct

SEQ ID NO: 2335967 - DNA, 25 bp, Homo sapien
gagcttctgtgggtacgtgtcttag

SEQ ID NO: 2335968 - DNA, 25 bp, Homo sapien
ctcctgctcagcacagtgagcccca

SEQ ID NO: 2335969 - DNA, 25 bp, Homo sapien
tcctgctcagcacagtgagccccat

SEQ ID NO: 2335970 - DNA, 25 bp, Homo sapien
tacagaggtaagagtttggagccag

SEQ ID NO: 2335971 - DNA, 25 bp, Homo sapien
taaaatctctgcaggaaccactggg

SEQ ID NO: 2335972 - DNA, 25 bp, Homo sapien
tctctggcgtctttgaggagtgcaa

SEQ ID NO: 2335973 - DNA, 25 bp, Homo sapien
taatcagctgtcttgactagcagcc

SEQ ID NO: 2335974 - DNA, 25 bp, Homo sapien
gatcattggagctaaatttgtcaca

SEQ ID NO: 2335975 - DNA, 25 bp, Homo sapien
tgaacaagtcaggaaagccaaaaaa

SEQ ID NO: 2335976 - DNA, 25 bp, Homo sapien
tgaaattttattgccctggaatcag

SEQ ID NO: 2335977 - DNA, 25 bp, Homo sapien
tgtactcttacagcttgaatccata

SEQ ID NO: 2335978 - DNA, 25 bp, Homo sapien
gccattaactataagaagtaaagtg

SEQ ID NO: 2335979 - DNA, 25 bp, Homo sapien
tctgtatctttgtttaagaatgtct

SEQ ID NO: 2335980 - DNA, 25 bp, Homo sapien
taaagtgttagtcaaaagataagcc

SEQ ID NO: 2335981 - DNA, 25 bp, Homo sapien
ctttgtttaagaatgtctttgatga

SEQ ID NO: 2335982 - DNA, 25 bp, Homo sapien
gtttctgggctacctgcctacaaga

SEQ ID NO: 2335983 - DNA, 25 bp, Homo sapien
tgtgctgtagaaaggtcactctaat

SEQ ID NO: 2335984 - DNA, 25 bp, Homo sapien
tcaaggtttgcatgaaagtgtttct

SEQ ID NO: 2335985 - DNA, 25 bp, Homo sapien
gaggccctcataatacatgtgctgt

SEQ ID NO: 2335986 - DNA, 25 bp, Homo sapien
cctgaggggcctcaataactttgag

SEQ ID NO: 2335987 - DNA, 25 bp, Homo sapien
ataactttgagtatccaaagtaagt

SEQ ID NO: 2335988 - DNA, 25 bp, Homo sapien
tcaagttcaccctgaggggcctcaa

SEQ ID NO: 2335989 - DNA, 25 bp, Homo sapien
aaccatcaagttcaccctgaggggc

SEQ ID NO: 2335990 - DNA, 25 bp, Homo sapien
tcatggtatgactttcgggtgtgtg

SEQ ID NO: 2335991 - DNA, 25 bp, Homo sapien
aaatcactccttctctggagggagg

SEQ ID NO: 2335992 - DNA, 25 bp, Homo sapien
gggcttgaggttgaagactccgcaa

SEQ ID NO: 2335993 - DNA, 25 bp, Homo sapien
cttagagggctacaactgatgagga

SEQ ID NO: 2335994 - DNA, 25 bp, Homo sapien
caggtggttcttccacaacaaggtt

SEQ ID NO: 2335995 - DNA, 25 bp, Homo sapien
tggttcttccacaacaaggttaaga

SEQ ID NO: 2335996 - DNA, 25 bp, Homo sapien
acaggtggttcttccacaacaaggt

SEQ ID NO: 2335997 - DNA, 25 bp, Homo sapien
gagccctgacatctggagcattttc

SEQ ID NO: 2335998 - DNA, 25 bp, Homo sapien
tttcctctccagatgatctctcctt

SEQ ID NO: 2335999 - DNA, 25 bp, Homo sapien
gggtccccgagagccctgacatctg

SEQ ID NO: 2336000 - DNA, 25 bp, Homo sapien
ccgagagccctgacatctggagcat

SEQ ID NO: 2336001 - DNA, 25 bp, Homo sapien
gctggagaggtttccaaaggcatag

SEQ ID NO: 2336002 - DNA, 25 bp, Homo sapien
ccaaggtcatggcttgcaatgccga

SEQ ID NO: 2336003 - DNA, 25 bp, Homo sapien
tgttaacgcattgtcatccagccac

SEQ ID NO: 2336004 - DNA, 25 bp, Homo sapien
gctgatgtggttagcatccagacgc

SEQ ID NO: 2336005 - DNA, 25 bp, Homo sapien
gcccatcaaagcatttctttcccag

SEQ ID NO: 2336006 - DNA, 25 bp, Homo sapien
ctgtggagcccatcaaagcatttct

SEQ ID NO: 2336007 - DNA, 25 bp, Homo sapien
ggagtggattctattgttatggaga

SEQ ID NO: 2336008 - DNA, 25 bp, Homo sapien
tctttcccagggagtggattctatt

SEQ ID NO: 2336009 - DNA, 25 bp, Homo sapien
ttggagagtgtcctaattgcagtgg

SEQ ID NO: 2336010 - DNA, 25 bp, Homo sapien
tgcagtggggaattcatcaaggtta

SEQ ID NO: 2336011 - DNA, 25 bp, Homo sapien
ttctttaaggttggagagtgtccta

SEQ ID NO: 2336012 - DNA, 25 bp, Homo sapien
taaggttggagagtgtcctaattgc

SEQ ID NO: 2336013 - DNA, 25 bp, Homo sapien
tgacttgaagaaaggtgccctggct

SEQ ID NO: 2336014 - DNA, 25 bp, Homo sapien
gagaaaattgacttaagctgcagtg

SEQ ID NO: 2336015 - DNA, 25 bp, Homo sapien
gaagcaggttcaatgatctttggag

SEQ ID NO: 2336016 - DNA, 25 bp, Homo sapien
gattatgatcactcctactgacccc

SEQ ID NO: 2336017 - DNA, 25 bp, Homo sapien
ttgtaataagagaagggttgcctac

SEQ ID NO: 2336018 - DNA, 25 bp, Homo sapien
gctttctcaggtatcgacctgatat

SEQ ID NO: 2336019 - DNA, 25 bp, Homo sapien
agggttgcctacaaatgctttctca

SEQ ID NO: 2336020 - DNA, 25 bp, Homo sapien
cctgatattgttgctatgaaatcct

SEQ ID NO: 2336021 - DNA, 25 bp, Homo sapien
tgttcttagttcaggtaaatgttga

SEQ ID NO: 2336022 - DNA, 25 bp, Homo sapien
gttcttagttcaggtaaatgttgaa

SEQ ID NO: 2336023 - DNA, 25 bp, Homo sapien
ccagttaaatcaggaaattcagtta

SEQ ID NO: 2336024 - DNA, 25 bp, Homo sapien
tccaggtttgcagttccagttaaat

SEQ ID NO: 2336025 - DNA, 25 bp, Homo sapien
tatttgtgaggcaccattcagagtc

SEQ ID NO: 2336026 - DNA, 25 bp, Homo sapien
aattcagttatttgtgaggcaccat

SEQ ID NO: 2336027 - DNA, 25 bp, Homo sapien
gcacttggagattaggtaactgatt

SEQ ID NO: 2336028 - DNA, 25 bp, Homo sapien
tgagatctgtgctccagttaaagtc

SEQ ID NO: 2336029 - DNA, 25 bp, Homo sapien
aactgattgcagacggtttgaggaa

SEQ ID NO: 2336030 - DNA, 25 bp, Homo sapien
ttgaggaagagatgagatctgtgct

SEQ ID NO: 2336031 - DNA, 25 bp, Homo sapien
gagattattgaaatcatgtctgcca

SEQ ID NO: 2336032 - DNA, 25 bp, Homo sapien
ggaggcttgacctcctgcagacctg

SEQ ID NO: 2336033 - DNA, 25 bp, Homo sapien
ttcacccctaaatggaagttgcctg

SEQ ID NO: 2336034 - DNA, 25 bp, Homo sapien
gttaccaggatcatgtcagagagcc

SEQ ID NO: 2336035 - DNA, 25 bp, Homo sapien
catgtgccaactgaaagtctagtgg

SEQ ID NO: 2336036 - DNA, 25 bp, Homo sapien
tctgaaagaaaacatgtgccaactg

SEQ ID NO: 2336037 - DNA, 25 bp, Homo sapien
tgattttggcctcttcatatctttt

SEQ ID NO: 2336038 - DNA, 25 bp, Homo sapien
tgaaagtctagtgggagcttgtttg

SEQ ID NO: 2336039 - DNA, 25 bp, Homo sapien
tttggcatccatattgggtggttga

SEQ ID NO: 2336040 - DNA, 25 bp, Homo sapien
ttttggcatccatattgggtggttg

SEQ ID NO: 2336041 - DNA, 25 bp, Homo sapien
gggtggttgatccattatgttattt

SEQ ID NO: 2336042 - DNA, 25 bp, Homo sapien
tattgggtggttgatccattatgtt

SEQ ID NO: 2336043 - DNA, 25 bp, Homo sapien
ttatcaaggattgtgtggatctgag

SEQ ID NO: 2336044 - DNA, 25 bp, Homo sapien
ctttatcaaggattgtgtggatctg

SEQ ID NO: 2336045 - DNA, 25 bp, Homo sapien
atcaaggattgtgtggatctgagat

SEQ ID NO: 2336046 - DNA, 25 bp, Homo sapien
tatcaaggattgtgtggatctgaga

SEQ ID NO: 2336047 - DNA, 25 bp, Homo sapien
tattaagtcccaacatgcttgagag

SEQ ID NO: 2336048 - DNA, 25 bp, Homo sapien
aacatggcattgacaactatactgg

SEQ ID NO: 2336049 - DNA, 25 bp, Homo sapien
tacaggaaacattagaacatggcat

SEQ ID NO: 2336050 - DNA, 25 bp, Homo sapien
aatggaaggtcaaaacaagtctcct

SEQ ID NO: 2336051 - DNA, 25 bp, Homo sapien
ctccaagatgttatatctcccaaag

SEQ ID NO: 2336052 - DNA, 25 bp, Homo sapien
gaacattttcatagccctgacatgg

SEQ ID NO: 2336053 - DNA, 25 bp, Homo sapien
cattattggattaaccagtagattc

SEQ ID NO: 2336054 - DNA, 25 bp, Homo sapien
gcaggtagtcacagccattattgga

SEQ ID NO: 2336055 - DNA, 25 bp, Homo sapien
ctgggtaaatcttctaataggttgt

SEQ ID NO: 2336056 - DNA, 25 bp, Homo sapien
tgggtaaatcttctaataggttgta

SEQ ID NO: 2336057 - DNA, 25 bp, Homo sapien
gaaatgacagggttccaaagattga

SEQ ID NO: 2336058 - DNA, 25 bp, Homo sapien
cactggaggactcttctagtgctgc

SEQ ID NO: 2336059 - DNA, 25 bp, Homo sapien
tgcttgggaggacgtaaaaccatat

SEQ ID NO: 2336060 - DNA, 25 bp, Homo sapien
taacttttatagagggactacctgc

SEQ ID NO: 2336061 - DNA, 25 bp, Homo sapien
agcgatcggaggctaagcaactgct

SEQ ID NO: 2336062 - DNA, 25 bp, Homo sapien
cgatcggaggctaagcaactgctgg

SEQ ID NO: 2336063 - DNA, 25 bp, Homo sapien
cgtagatttcattatgtcttaggtc

SEQ ID NO: 2336064 - DNA, 25 bp, Homo sapien
taatttcgtagatttcattatgtct

SEQ ID NO: 2336065 - DNA, 25 bp, Homo sapien
atgctctgtgctggggaacgcactg

SEQ ID NO: 2336066 - DNA, 25 bp, Homo sapien
tggggaacgcactgggaggtgatac

SEQ ID NO: 2336067 - DNA, 25 bp, Homo sapien
gaaagaaaatgctctgtgctgggga

SEQ ID NO: 2336068 - DNA, 25 bp, Homo sapien
tgtgctggggaacgcactgggaggt

SEQ ID NO: 2336069 - DNA, 25 bp, Homo sapien
tacaaatcttagttgcctgagcaac

SEQ ID NO: 2336070 - DNA, 25 bp, Homo sapien
gaacaagatgttattctggtaaact

SEQ ID NO: 2336071 - DNA, 25 bp, Homo sapien
caaccaaaagtgagagaagggcaac

SEQ ID NO: 2336072 - DNA, 25 bp, Homo sapien
caacagaagtgattctagaacagct

SEQ ID NO: 2336073 - DNA, 25 bp, Homo sapien
aaaatgcattggggtgaataatagc

SEQ ID NO: 2336074 - DNA, 25 bp, Homo sapien
ggtgaataatagcaattttgttcca

SEQ ID NO: 2336075 - DNA, 25 bp, Homo sapien
agctttattagggatggcaaagtgg

SEQ ID NO: 2336076 - DNA, 25 bp, Homo sapien
ctttattagggatggcaaagtggaa

SEQ ID NO: 2336077 - DNA, 25 bp, Homo sapien
taagtgagttaaaccatgtaaccca

SEQ ID NO: 2336078 - DNA, 25 bp, Homo sapien
aaagacgacaggaggttggacgata

SEQ ID NO: 2336079 - DNA, 25 bp, Homo sapien
gctctgtaaggcatgatttcctgtt

SEQ ID NO: 2336080 - DNA, 25 bp, Homo sapien
ccatgtaacccagttataggaaaag

SEQ ID NO: 2336081 - DNA, 25 bp, Homo sapien
tgattagaaatcttataggcattct

SEQ ID NO: 2336082 - DNA, 25 bp, Homo sapien
ttccattgattagaaatcttatagg

SEQ ID NO: 2336083 - DNA, 25 bp, Homo sapien
gcatctttcttatgaaggtcgtcca

SEQ ID NO: 2336084 - DNA, 25 bp, Homo sapien
catactgctgttgtcacctttattc

SEQ ID NO: 2336085 - DNA, 25 bp, Homo sapien
acactgcactgaatgaagggctttc

SEQ ID NO: 2336086 - DNA, 25 bp, Homo sapien
cactgcactgaatgaagggctttca

SEQ ID NO: 2336087 - DNA, 25 bp, Homo sapien
ctgcactgaatgaagggctttcagg

SEQ ID NO: 2336088 - DNA, 25 bp, Homo sapien
actgcactgaatgaagggctttcag

SEQ ID NO: 2336089 - DNA, 25 bp, Homo sapien
gagactcccgtgagcatgttcactg

SEQ ID NO: 2336090 - DNA, 25 bp, Homo sapien
caccatgtcgtgcaaagctgccaaa

SEQ ID NO: 2336091 - DNA, 25 bp, Homo sapien
taagtgccagaactgctatggtcca

SEQ ID NO: 2336092 - DNA, 25 bp, Homo sapien
tcagccagccatcaagcaggtgttc

SEQ ID NO: 2336093 - DNA, 25 bp, Homo sapien
caagatgagagcgaccatgtagccc

SEQ ID NO: 2336094 - DNA, 25 bp, Homo sapien
ggaactgcggccatggtcaaggcca

SEQ ID NO: 2336095 - DNA, 25 bp, Homo sapien
tgtgttttaccatagagcagtccca

SEQ ID NO: 2336096 - DNA, 25 bp, Homo sapien
ttcaggctagaaaatggagctttcg

SEQ ID NO: 2336097 - DNA, 25 bp, Homo sapien
tgcaggaagtgggactaccaccaga

SEQ ID NO: 2336098 - DNA, 25 bp, Homo sapien
tgggactaccaccagaaggataaac

SEQ ID NO: 2336099 - DNA, 25 bp, Homo sapien
gaagtgggactaccaccagaaggat

SEQ ID NO: 2336100 - DNA, 25 bp, Homo sapien
ctaccaccagaaggataaacttaat

SEQ ID NO: 2336101 - DNA, 25 bp, Homo sapien
ccaaggcttgagttgagtcacagga

SEQ ID NO: 2336102 - DNA, 25 bp, Homo sapien
cactggataagctggtgatggcacg

SEQ ID NO: 2336103 - DNA, 25 bp, Homo sapien
gatcttgtccagacgtaggtttgct

SEQ ID NO: 2336104 - DNA, 25 bp, Homo sapien
ggactgtttttcgacatcatcagag

SEQ ID NO: 2336105 - DNA, 25 bp, Homo sapien
catgagggtggaaccatctagtgct

SEQ ID NO: 2336106 - DNA, 25 bp, Homo sapien
tctagtgctgatacataaaacctgg

SEQ ID NO: 2336107 - DNA, 25 bp, Homo sapien
cagatattgggtttgccagagctac

SEQ ID NO: 2336108 - DNA, 25 bp, Homo sapien
tctcttgagtccaaagtggtgtcag

SEQ ID NO: 2336109 - DNA, 25 bp, Homo sapien
tacactaacaactctagggatggcc

SEQ ID NO: 2336110 - DNA, 25 bp, Homo sapien
agggatggccattcacatgttccgc

SEQ ID NO: 2336111 - DNA, 25 bp, Homo sapien
gaactgcagtcccttgtattcgcca

SEQ ID NO: 2336112 - DNA, 25 bp, Homo sapien
tccgtccatggaggctgtacactaa

SEQ ID NO: 2336113 - DNA, 25 bp, Homo sapien
tggccacaagtctgctagttgcact

SEQ ID NO: 2336114 - DNA, 25 bp, Homo sapien
ccttgccgagactgtttaacttgaa

SEQ ID NO: 2336115 - DNA, 25 bp, Homo sapien
tgccagtgcatcagaacctaagagt

SEQ ID NO: 2336116 - DNA, 25 bp, Homo sapien
cgtaagtatagttcctcaaagtgac

SEQ ID NO: 2336117 - DNA, 25 bp, Homo sapien
gaagttttgtactcagattcccaca

SEQ ID NO: 2336118 - DNA, 25 bp, Homo sapien
cacagtcagtattctgccagtggtg

SEQ ID NO: 2336119 - DNA, 25 bp, Homo sapien
caaagagaggtaagccatggttgaa

SEQ ID NO: 2336120 - DNA, 25 bp, Homo sapien
tgctgagattgttctaaagggacaa

SEQ ID NO: 2336121 - DNA, 25 bp, Homo sapien
tcatggggcagaacactgagcatag

SEQ ID NO: 2336122 - DNA, 25 bp, Homo sapien
ctaataacacaaatgtgacacagca

SEQ ID NO: 2336123 - DNA, 25 bp, Homo sapien
tctctctgccacctaataacacaaa

SEQ ID NO: 2336124 - DNA, 25 bp, Homo sapien
ctgagcatagacatagcctctcttc

SEQ ID NO: 2336125 - DNA, 25 bp, Homo sapien
ttattatcgcgtgaactgggagcct

SEQ ID NO: 2336126 - DNA, 25 bp, Homo sapien
gaccgtttccgctttcgaggcaggc

SEQ ID NO: 2336127 - DNA, 25 bp, Homo sapien
tgtacggatgccttcgagctcactg

SEQ ID NO: 2336128 - DNA, 25 bp, Homo sapien
tgtccgagtagggtaagaccgcacc

SEQ ID NO: 2336129 - DNA, 25 bp, Homo sapien
ctgatgttaatgtgcttgttgtagg

SEQ ID NO: 2336130 - DNA, 25 bp, Homo sapien
gttgtaggtagtggcacagcccgcc

SEQ ID NO: 2336131 - DNA, 25 bp, Homo sapien
ccgccgcagcgcaattggtcggcat

SEQ ID NO: 2336132 - DNA, 25 bp, Homo sapien
ctgtggaagctgatgttaatgtgct

SEQ ID NO: 2336133 - DNA, 25 bp, Homo sapien
taaagcttccccgaaagcagagaac

SEQ ID NO: 2336134 - DNA, 25 bp, Homo sapien
caaaggacatacgatgcttccctgc

SEQ ID NO: 2336135 - DNA, 25 bp, Homo sapien
caagcgatagccacaataggaactc

SEQ ID NO: 2336136 - DNA, 25 bp, Homo sapien
cctgctaccagctgggaaagttatt

SEQ ID NO: 2336137 - DNA, 25 bp, Homo sapien
cacagcaggcttttacggtgattgc

SEQ ID NO: 2336138 - DNA, 25 bp, Homo sapien
tacggcgtcattcatgtcaaggccc

SEQ ID NO: 2336139 - DNA, 25 bp, Homo sapien
aaagatgactcaattcctccgcaga

SEQ ID NO: 2336140 - DNA, 25 bp, Homo sapien
taattttaacgggaacacagcaggc

SEQ ID NO: 2336141 - DNA, 25 bp, Homo sapien
gcaaacagtagggattcaacaaaat

SEQ ID NO: 2336142 - DNA, 25 bp, Homo sapien
caattagcccttaatctgggcagta

SEQ ID NO: 2336143 - DNA, 25 bp, Homo sapien
ttttgtcaaggaaagcctaggcaga

SEQ ID NO: 2336144 - DNA, 25 bp, Homo sapien
tataagcgggagtaatttcaccacg

SEQ ID NO: 2336145 - DNA, 25 bp, Homo sapien
taaactaacaatatccagacactgg

SEQ ID NO: 2336146 - DNA, 25 bp, Homo sapien
aactaacaatatccagacactggaa

SEQ ID NO: 2336147 - DNA, 25 bp, Homo sapien
taacaatatccagacactggaacag

SEQ ID NO: 2336148 - DNA, 25 bp, Homo sapien
ttttaaactaacaatatccagacac

SEQ ID NO: 2336149 - DNA, 25 bp, Homo sapien
gaacagcatccattttaagtcgtcg

SEQ ID NO: 2336150 - DNA, 25 bp, Homo sapien
taggtcaaaacaggaggcttcaaag

SEQ ID NO: 2336151 - DNA, 25 bp, Homo sapien
cacaaaatttttgcgcctaaccagg

SEQ ID NO: 2336152 - DNA, 25 bp, Homo sapien
aagtcgtcgagtttgtcctgttagg

SEQ ID NO: 2336153 - DNA, 25 bp, Homo sapien
tgggcccgtatcatatctgttctga

SEQ ID NO: 2336154 - DNA, 25 bp, Homo sapien
gggcccgtatcatatctgttctgac

SEQ ID NO: 2336155 - DNA, 25 bp, Homo sapien
gcccgtatcatatctgttctgacta

SEQ ID NO: 2336156 - DNA, 25 bp, Homo sapien
actgggcccgtatcatatctgttct

SEQ ID NO: 2336157 - DNA, 25 bp, Homo sapien
tcaaaagattccttgacttgagttt

SEQ ID NO: 2336158 - DNA, 25 bp, Homo sapien
gatggtccagctggagaacaactgt

SEQ ID NO: 2336159 - DNA, 25 bp, Homo sapien
ttcaaaagattccttgacttgagtt

SEQ ID NO: 2336160 - DNA, 25 bp, Homo sapien
aattagatggtccagctggagaaca

SEQ ID NO: 2336161 - DNA, 25 bp, Homo sapien
tctttttccagtttaatgatcctct

SEQ ID NO: 2336162 - DNA, 25 bp, Homo sapien
tgcctccataggattcctaaaggca

SEQ ID NO: 2336163 - DNA, 25 bp, Homo sapien
tcttcttaagcttgctatttctttt

SEQ ID NO: 2336164 - DNA, 25 bp, Homo sapien
tcctaaaggcatagctgtgttcaag

SEQ ID NO: 2336165 - DNA, 25 bp, Homo sapien
gagttgctctgcgttccttttgtag

SEQ ID NO: 2336166 - DNA, 25 bp, Homo sapien
tctgcgttccttttgtaggcaagtt

SEQ ID NO: 2336167 - DNA, 25 bp, Homo sapien
catcttcgagttgctctgcgttcct

SEQ ID NO: 2336168 - DNA, 25 bp, Homo sapien
tggctttgatccatcttcgagttgc

SEQ ID NO: 2336169 - DNA, 25 bp, Homo sapien
ctttaggtaatacactatttgcttc

SEQ ID NO: 2336170 - DNA, 25 bp, Homo sapien
cactatttgcttctaaattctttac

SEQ ID NO: 2336171 - DNA, 25 bp, Homo sapien
aatacactatttgcttctaaattct

SEQ ID NO: 2336172 - DNA, 25 bp, Homo sapien
tttaggtaatacactatttgcttct

SEQ ID NO: 2336173 - DNA, 25 bp, Homo sapien
tactcttggtctgttttagatttag

SEQ ID NO: 2336174 - DNA, 25 bp, Homo sapien
cttccaaaggaagactgcttaaggc

SEQ ID NO: 2336175 - DNA, 25 bp, Homo sapien
gatttagacttagcagtgttttatc

SEQ ID NO: 2336176 - DNA, 25 bp, Homo sapien
tgcttaaggcagttggtaacatgtg

SEQ ID NO: 2336177 - DNA, 25 bp, Homo sapien
agaatgaaggataggcatcaagctc

SEQ ID NO: 2336178 - DNA, 25 bp, Homo sapien
ggcataagtgccataattatcttta

SEQ ID NO: 2336179 - DNA, 25 bp, Homo sapien
atgaattttggcataagtgccataa

SEQ ID NO: 2336180 - DNA, 25 bp, Homo sapien
ggataggcatcaagctctgtgcaag

SEQ ID NO: 2336181 - DNA, 25 bp, Homo sapien
tattcttttgtaatcaagtcttcac

SEQ ID NO: 2336182 - DNA, 25 bp, Homo sapien
ttattcttttgtaatcaagtcttca

SEQ ID NO: 2336183 - DNA, 25 bp, Homo sapien
attcttttgtaatcaagtcttcaca

SEQ ID NO: 2336184 - DNA, 25 bp, Homo sapien
tcttttgtaatcaagtcttcacaaa

SEQ ID NO: 2336185 - DNA, 25 bp, Homo sapien
tatcaagtacctagcctttggctgg

SEQ ID NO: 2336186 - DNA, 25 bp, Homo sapien
gaacacaggcatgctagttgctcta

SEQ ID NO: 2336187 - DNA, 25 bp, Homo sapien
cagaagatctgtgttgtgaccggga

SEQ ID NO: 2336188 - DNA, 25 bp, Homo sapien
gttggtgcccagtagacagagaaca

SEQ ID NO: 2336189 - DNA, 25 bp, Homo sapien
cattgttgcgctgatctttaaattt

SEQ ID NO: 2336190 - DNA, 25 bp, Homo sapien
actgaaagttcattgttgcgctgat

SEQ ID NO: 2336191 - DNA, 25 bp, Homo sapien
tgttgcgctgatctttaaatttcac

SEQ ID NO: 2336192 - DNA, 25 bp, Homo sapien
gaaagttcattgttgcgctgatctt

SEQ ID NO: 2336193 - DNA, 25 bp, Homo sapien
tggcatcctggccggctgcgtttgc

SEQ ID NO: 2336194 - DNA, 25 bp, Homo sapien
catcctggccggctgcgtttgcact

SEQ ID NO: 2336195 - DNA, 25 bp, Homo sapien
ctggccggctgcgtttgcactgctt

SEQ ID NO: 2336196 - DNA, 25 bp, Homo sapien
gctggcatcctggccggctgcgttt

SEQ ID NO: 2336197 - DNA, 25 bp, Homo sapien
gaccccaggagcaaagcccgcgcct

SEQ ID NO: 2336198 - DNA, 25 bp, Homo sapien
aggccgagaccccaggagcaaagcc

SEQ ID NO: 2336199 - DNA, 25 bp, Homo sapien
aaggccgagaccccaggagcaaagc

SEQ ID NO: 2336200 - DNA, 25 bp, Homo sapien
cgagaccccaggagcaaagcccgcg

SEQ ID NO: 2336201 - DNA, 25 bp, Homo sapien
tgaacgcagtcacgtcccgacagct

SEQ ID NO: 2336202 - DNA, 25 bp, Homo sapien
gccgggtaggccagcggctgcaaag

SEQ ID NO: 2336203 - DNA, 25 bp, Homo sapien
acttgggcaagtctgggaagcacgc

SEQ ID NO: 2336204 - DNA, 25 bp, Homo sapien
ggaagcacgcccgacgcggctgaac

SEQ ID NO: 2336205 - DNA, 25 bp, Homo sapien
aaagccgaggcagccaatccgcggt

SEQ ID NO: 2336206 - DNA, 25 bp, Homo sapien
aaaagcagagcgcaacccggcggac

SEQ ID NO: 2336207 - DNA, 25 bp, Homo sapien
ggaaaagagaaagccgaggcagcca

SEQ ID NO: 2336208 - DNA, 25 bp, Homo sapien
gcggtcccggcgctggcgagttcca

SEQ ID NO: 2336209 - DNA, 25 bp, Homo sapien
tccggaaactcctactggcggagag

SEQ ID NO: 2336210 - DNA, 25 bp, Homo sapien
tcatatgggcgtggtcaacgcctca

SEQ ID NO: 2336211 - DNA, 25 bp, Homo sapien
ggcggagagctccaattcatatggg

SEQ ID NO: 2336212 - DNA, 25 bp, Homo sapien
gcaagacacttgttcagaggcaaac

SEQ ID NO: 2336213 - DNA, 25 bp, Homo sapien
tcaggctcagtataactatattagt

SEQ ID NO: 2336214 - DNA, 25 bp, Homo sapien
cagtcattgatataatccagaaagc

SEQ ID NO: 2336215 - DNA, 25 bp, Homo sapien
tccagaaagctaacgaaatgcaaat

SEQ ID NO: 2336216 - DNA, 25 bp, Homo sapien
cataataggtgcttgcagtcattga

SEQ ID NO: 2336217 - DNA, 25 bp, Homo sapien
cattagagacgatcagaacaggaac

SEQ ID NO: 2336218 - DNA, 25 bp, Homo sapien
aaggccattagagacgatcagaaca

SEQ ID NO: 2336219 - DNA, 25 bp, Homo sapien
cagaaaacagccaacgccacggaga

SEQ ID NO: 2336220 - DNA, 25 bp, Homo sapien
cgccacggagaaataggtcgtaagt

SEQ ID NO: 2336221 - DNA, 25 bp, Homo sapien
aggcccaggcaggtgatcacttgag

SEQ ID NO: 2336222 - DNA, 25 bp, Homo sapien
accaggagctcgagaccggcctggt

SEQ ID NO: 2336223 - DNA, 25 bp, Homo sapien
ccaggcaggtgatcacttgagacca

SEQ ID NO: 2336224 - DNA, 25 bp, Homo sapien
cccaggcaggtgatcacttgagacc

SEQ ID NO: 2336225 - DNA, 25 bp, Homo sapien
tattctgaatctagacgcttcttca

SEQ ID NO: 2336226 - DNA, 25 bp, Homo sapien
aaagctgaaatttgcaatggttagg

SEQ ID NO: 2336227 - DNA, 25 bp, Homo sapien
ccttccatttagtgagtttcgaaga

SEQ ID NO: 2336228 - DNA, 25 bp, Homo sapien
gttaggataaatccaacgactagcc

SEQ ID NO: 2336229 - DNA, 25 bp, Homo sapien
cacatccaggaagcggagtactgct

SEQ ID NO: 2336230 - DNA, 25 bp, Homo sapien
agccaagagagacaaacacatccag

SEQ ID NO: 2336231 - DNA, 25 bp, Homo sapien
ccccggggccattttctatcatgta

SEQ ID NO: 2336232 - DNA, 25 bp, Homo sapien
tactgcttggaaaaatcgactggga

SEQ ID NO: 2336233 - DNA, 25 bp, Homo sapien
actgtgtctaccaatgggtcaaaaa

SEQ ID NO: 2336234 - DNA, 25 bp, Homo sapien
gtctaccaatgggtcaaaaagaaga

SEQ ID NO: 2336235 - DNA, 25 bp, Homo sapien
tgtgtctaccaatgggtcaaaaaga

SEQ ID NO: 2336236 - DNA, 25 bp, Homo sapien
aactgtgtctaccaatgggtcaaaa

SEQ ID NO: 2336237 - DNA, 25 bp, Homo sapien
ctgtgtgaggaagtatgcaatgccc

SEQ ID NO: 2336238 - DNA, 25 bp, Homo sapien
tatgcaatgcccacaaaggtaccac

SEQ ID NO: 2336239 - DNA, 25 bp, Homo sapien
aatgcccacaaaggtaccaccaagg

SEQ ID NO: 2336240 - DNA, 25 bp, Homo sapien
aaggtaccaccaaggagactggaga

SEQ ID NO: 2336241 - DNA, 25 bp, Homo sapien
gtaatccagctaaaccaccaaatgc

SEQ ID NO: 2336242 - DNA, 25 bp, Homo sapien
caccaaatgcaataattggccactg

SEQ ID NO: 2336243 - DNA, 25 bp, Homo sapien
cagtatactgcattgtagcccctaa

SEQ ID NO: 2336244 - DNA, 25 bp, Homo sapien
tatgagtccacaattgatcctagta

SEQ ID NO: 2336245 - DNA, 25 bp, Homo sapien
gcttctaatcattgctgcgcgggac

SEQ ID NO: 2336246 - DNA, 25 bp, Homo sapien
aaagtaggtcgtgtgtatagtcaga

SEQ ID NO: 2336247 - DNA, 25 bp, Homo sapien
tagcaagcatgataccacagtaaga

SEQ ID NO: 2336248 - DNA, 25 bp, Homo sapien
ccgtgcccagacatcgaccatatat

SEQ ID NO: 2336249 - DNA, 25 bp, Homo sapien
gactgatctatgacgtccttgggag

SEQ ID NO: 2336250 - DNA, 25 bp, Homo sapien
gccacagtactgtaaacgcagggtt

SEQ ID NO: 2336251 - DNA, 25 bp, Homo sapien
tgggacccttgattacaaatggcct

SEQ ID NO: 2336252 - DNA, 25 bp, Homo sapien
catgaaactggcaggttgggcctgc

SEQ ID NO: 2336253 - DNA, 25 bp, Homo sapien
gttgggctgttgaccaccatgccag

SEQ ID NO: 2336254 - DNA, 25 bp, Homo sapien
tttgttgggctgttgaccaccatgc

SEQ ID NO: 2336255 - DNA, 25 bp, Homo sapien
tgttgggctgttgaccaccatgcca

SEQ ID NO: 2336256 - DNA, 25 bp, Homo sapien
ttatttgttgggctgttgaccacca

SEQ ID NO: 2336257 - DNA, 25 bp, Homo sapien
agaaaacagattcactgcgttgtta

SEQ ID NO: 2336258 - DNA, 25 bp, Homo sapien
gcagcagttgggagcaagagggcaa

SEQ ID NO: 2336259 - DNA, 25 bp, Homo sapien
gaatgggtttccctgctatgtgcct

SEQ ID NO: 2336260 - DNA, 25 bp, Homo sapien
cactgcgttgttatcaagaatgggt

SEQ ID NO: 2336261 - DNA, 25 bp, Homo sapien
cagtttcaacctgtggaaatgaaat

SEQ ID NO: 2336262 - DNA, 25 bp, Homo sapien
catttgggcaactagcacagtggca

SEQ ID NO: 2336263 - DNA, 25 bp, Homo sapien
gatgccagtgctaaaccaggttgcc

SEQ ID NO: 2336264 - DNA, 25 bp, Homo sapien
tctagatcatcaccatagtagggcc

SEQ ID NO: 2336265 - DNA, 25 bp, Homo sapien
tagtagggccaccaataaagaattc

SEQ ID NO: 2336266 - DNA, 25 bp, Homo sapien
gggcctcattgtccaacattctgac

SEQ ID NO: 2336267 - DNA, 25 bp, Homo sapien
gaattttgcagtgtgaaacccagac

SEQ ID NO: 2336268 - DNA, 25 bp, Homo sapien
cggcccaggatattcttattcagtg

SEQ ID NO: 2336269 - DNA, 25 bp, Homo sapien
aaaagtctcaatatccaggctgtac

SEQ ID NO: 2336270 - DNA, 25 bp, Homo sapien
agatggagtctagatggagtctccc

SEQ ID NO: 2336271 - DNA, 25 bp, Homo sapien
ttgagatggagtctagatggagtct

SEQ ID NO: 2336272 - DNA, 25 bp, Homo sapien
caccaccacacctaattttttgtat

SEQ ID NO: 2336273 - DNA, 25 bp, Homo sapien
gcaccaccacacctaattttttgta

SEQ ID NO: 2336274 - DNA, 25 bp, Homo sapien
ctgaccaaacttgatctgaggctct

SEQ ID NO: 2336275 - DNA, 25 bp, Homo sapien
gcatgtcagaacgatgtgcaggctg

SEQ ID NO: 2336276 - DNA, 25 bp, Homo sapien
taagacactgtgtcattaccagaag

SEQ ID NO: 2336277 - DNA, 25 bp, Homo sapien
taaatgatgtagctgtaagacactg

SEQ ID NO: 2336278 - DNA, 25 bp, Homo sapien
attatgctgttacatagagctcttt

SEQ ID NO: 2336279 - DNA, 25 bp, Homo sapien
tgttacatagagctctttccatgaa

SEQ ID NO: 2336280 - DNA, 25 bp, Homo sapien
gtgattttaacatgaactgcccatt

SEQ ID NO: 2336281 - DNA, 25 bp, Homo sapien
tatgctgttacatagagctctttcc

SEQ ID NO: 2336282 - DNA, 25 bp, Homo sapien
cacatctggcctaatgttgtaattt

SEQ ID NO: 2336283 - DNA, 25 bp, Homo sapien
ccacatctggcctaatgttgtaatt

SEQ ID NO: 2336284 - DNA, 25 bp, Homo sapien
taggtccaattgatctaccgtgttg

SEQ ID NO: 2336285 - DNA, 25 bp, Homo sapien
gagaccattttatgcgccctagaaa

SEQ ID NO: 2336286 - DNA, 25 bp, Homo sapien
gacctattggtcaaaagtagtatgt

SEQ ID NO: 2336287 - DNA, 25 bp, Homo sapien
ctaacacatggtttatctggagacc

SEQ ID NO: 2336288 - DNA, 25 bp, Homo sapien
ggcattaattgtaccatctcttctt

SEQ ID NO: 2336289 - DNA, 25 bp, Homo sapien
ctctttttatctcttcggcattaat

SEQ ID NO: 2336290 - DNA, 25 bp, Homo sapien
aatcagctaagggttgtcaatttta

SEQ ID NO: 2336291 - DNA, 25 bp, Homo sapien
ttaagttaatcagctaagggttgtc

SEQ ID NO: 2336292 - DNA, 25 bp, Homo sapien
gaaatgattgtgtggcttttgctct

SEQ ID NO: 2336293 - DNA, 25 bp, Homo sapien
gctgtagactttgcataaatcgcct

SEQ ID NO: 2336294 - DNA, 25 bp, Homo sapien
tgttaactgccaacagaggtagttt

SEQ ID NO: 2336295 - DNA, 25 bp, Homo sapien
taatggctgtggctagaaattctaa

SEQ ID NO: 2336296 - DNA, 25 bp, Homo sapien
tacattctcacagacgccagtgaac

SEQ ID NO: 2336297 - DNA, 25 bp, Homo sapien
attctaaatgcagaagtacatatac

SEQ ID NO: 2336298 - DNA, 25 bp, Homo sapien
gccagtgaactttctgccagtacaa

SEQ ID NO: 2336299 - DNA, 25 bp, Homo sapien
ttctgccagtacaaaaccaagagcc

SEQ ID NO: 2336300 - DNA, 25 bp, Homo sapien
gggattaaaagcacatgccacagtg

SEQ ID NO: 2336301 - DNA, 25 bp, Homo sapien
tgggattaaaagcacatgccacagt

SEQ ID NO: 2336302 - DNA, 25 bp, Homo sapien
gattaaaagcacatgccacagtgcc

SEQ ID NO: 2336303 - DNA, 25 bp, Homo sapien
ttaaaagcacatgccacagtgcctg

SEQ ID NO: 2336304 - DNA, 25 bp, Homo sapien
aagtccgagaatgaagggccccagc

SEQ ID NO: 2336305 - DNA, 25 bp, Homo sapien
gcccaccacgtcaggcaccggagga

SEQ ID NO: 2336306 - DNA, 25 bp, Homo sapien
aaagcgaagaacgatccctctctgc

SEQ ID NO: 2336307 - DNA, 25 bp, Homo sapien
ggctgagggaaagtccgagaatgaa

SEQ ID NO: 2336308 - DNA, 25 bp, Homo sapien
tgttctcgcagtagcgcagcaccag

SEQ ID NO: 2336309 - DNA, 25 bp, Homo sapien
gcttgtcgttaaacttgttctcgca

SEQ ID NO: 2336310 - DNA, 25 bp, Homo sapien
agagtggtgatgtgcttgtcgttaa

SEQ ID NO: 2336311 - DNA, 25 bp, Homo sapien
taaacttgttctcgcagtagcgcag

SEQ ID NO: 2336312 - DNA, 25 bp, Homo sapien
tgagatttgccagcctacatccagg

SEQ ID NO: 2336313 - DNA, 25 bp, Homo sapien
aaaccgaaggcggagatgacaggcc

SEQ ID NO: 2336314 - DNA, 25 bp, Homo sapien
acggagaccacaacgtgcgcagcca

SEQ ID NO: 2336315 - DNA, 25 bp, Homo sapien
tggtgattccccagggcgaattcgg

SEQ ID NO: 2336316 - DNA, 25 bp, Homo sapien
taacatttggagactgcaacactga

SEQ ID NO: 2336317 - DNA, 25 bp, Homo sapien
aacatttggagactgcaacactgac

SEQ ID NO: 2336318 - DNA, 25 bp, Homo sapien
ctaacatttggagactgcaacactg

SEQ ID NO: 2336319 - DNA, 25 bp, Homo sapien
catttggagactgcaacactgacac

SEQ ID NO: 2336320 - DNA, 25 bp, Homo sapien
cagtaagcgctgaagttacaaatca

SEQ ID NO: 2336321 - DNA, 25 bp, Homo sapien
tcgcaaaatcaaatacgcagctaag

SEQ ID NO: 2336322 - DNA, 25 bp, Homo sapien
taaacacttagtcatcagtaagcgc

SEQ ID NO: 2336323 - DNA, 25 bp, Homo sapien
gcagctaagttcctaattctgaaag

SEQ ID NO: 2336324 - DNA, 25 bp, Homo sapien
taggatactacctgcctagccaacc

SEQ ID NO: 2336325 - DNA, 25 bp, Homo sapien
cttcaggaggcaagcagaattctat

SEQ ID NO: 2336326 - DNA, 25 bp, Homo sapien
cagacacctatcctagacttcagga

SEQ ID NO: 2336327 - DNA, 25 bp, Homo sapien
gaattctatagttgggactctaaaa

SEQ ID NO: 2336328 - DNA, 25 bp, Homo sapien
ttgtctgaatgagtcaaagaaggct

SEQ ID NO: 2336329 - DNA, 25 bp, Homo sapien
ggagggtcttgccaaatacactgta

SEQ ID NO: 2336330 - DNA, 25 bp, Homo sapien
gatgctaccttatcacagaaagaaa

SEQ ID NO: 2336331 - DNA, 25 bp, Homo sapien
gagaaatgaagggacacggttctac

SEQ ID NO: 2336332 - DNA, 25 bp, Homo sapien
catatggcaaggtttactcttttcc

SEQ ID NO: 2336333 - DNA, 25 bp, Homo sapien
tatggcaaggtttactcttttccca

SEQ ID NO: 2336334 - DNA, 25 bp, Homo sapien
ccatatggcaaggtttactcttttc

SEQ ID NO: 2336335 - DNA, 25 bp, Homo sapien
aagcaacaaatgcttattagatcag

SEQ ID NO: 2336336 - DNA, 25 bp, Homo sapien
aaagcaacaaatgcttattagatca

SEQ ID NO: 2336337 - DNA, 25 bp, Homo sapien
gaaagcaacaaatgcttattagatc

SEQ ID NO: 2336338 - DNA, 25 bp, Homo sapien
aagaaagcaacaaatgcttattaga

SEQ ID NO: 2336339 - DNA, 25 bp, Homo sapien
actaaaatcgctccatttgaatctc

SEQ ID NO: 2336340 - DNA, 25 bp, Homo sapien
ctgttatgtcataaactaaaatcgc

SEQ ID NO: 2336341 - DNA, 25 bp, Homo sapien
caatgcatggaatctctcttgacct

SEQ ID NO: 2336342 - DNA, 25 bp, Homo sapien
aaattggacccaatgcatggaatct

SEQ ID NO: 2336343 - DNA, 25 bp, Homo sapien
agagagtactggatgataacacacc

SEQ ID NO: 2336344 - DNA, 25 bp, Homo sapien
cacaccagatatagtgagaggccag

SEQ ID NO: 2336345 - DNA, 25 bp, Homo sapien
gaagtaatgctgtgccaatctcaga

SEQ ID NO: 2336346 - DNA, 25 bp, Homo sapien
agttcagtgcagctctatgagtgac

SEQ ID NO: 2336347 - DNA, 25 bp, Homo sapien
gaattactactatcacaacacccaa

SEQ ID NO: 2336348 - DNA, 25 bp, Homo sapien
gttggaattactactatcacaacac

SEQ ID NO: 2336349 - DNA, 25 bp, Homo sapien
actcaacactgtcaaaatacctcag

SEQ ID NO: 2336350 - DNA, 25 bp, Homo sapien
ctcaacactgtcaaaatacctcaga

SEQ ID NO: 2336351 - DNA, 25 bp, Homo sapien
cattttccgtaattctttgacccag

SEQ ID NO: 2336352 - DNA, 25 bp, Homo sapien
ctatacataaacagatttcatttcc

SEQ ID NO: 2336353 - DNA, 25 bp, Homo sapien
caactatacataaacagatttcatt

SEQ ID NO: 2336354 - DNA, 25 bp, Homo sapien
agatttcatttcccaacattttccg

SEQ ID NO: 2336355 - DNA, 25 bp, Homo sapien
actgcaccaggctaaatcctaaatt

SEQ ID NO: 2336356 - DNA, 25 bp, Homo sapien
gcaccaggctaaatcctaaattatt

SEQ ID NO: 2336357 - DNA, 25 bp, Homo sapien
ccactgcaccaggctaaatcctaaa

SEQ ID NO: 2336358 - DNA, 25 bp, Homo sapien
atttatattaatatgccattcttcc

SEQ ID NO: 2336359 - DNA, 25 bp, Homo sapien
atttccccagatactacccttgtct

SEQ ID NO: 2336360 - DNA, 25 bp, Homo sapien
ccagatactacccttgtcttccact

SEQ ID NO: 2336361 - DNA, 25 bp, Homo sapien
tccccagatactacccttgtcttcc

SEQ ID NO: 2336362 - DNA, 25 bp, Homo sapien
ttcatttccccagatactacccttg

SEQ ID NO: 2336363 - DNA, 25 bp, Homo sapien
tctagcatctagaccaaaacgcagg

SEQ ID NO: 2336364 - DNA, 25 bp, Homo sapien
tctgaaatattcctgcctagcctaa

SEQ ID NO: 2336365 - DNA, 25 bp, Homo sapien
gacttgcccctgatctggtactata

SEQ ID NO: 2336366 - DNA, 25 bp, Homo sapien
taaagctaccaatgtaatggtggca

SEQ ID NO: 2336367 - DNA, 25 bp, Homo sapien
ccatgtcacacttgtcaacagaaga

SEQ ID NO: 2336368 - DNA, 25 bp, Homo sapien
gggtatttgaccctacctgaggcaa

SEQ ID NO: 2336369 - DNA, 25 bp, Homo sapien
tcagtccctaagttctcagaattct

SEQ ID NO: 2336370 - DNA, 25 bp, Homo sapien
ggctaccagatccaatattcctaaa

SEQ ID NO: 2336371 - DNA, 25 bp, Homo sapien
tagtctcactgtacgcatgtgtcgc

SEQ ID NO: 2336372 - DNA, 25 bp, Homo sapien
cacgcctggccataactgtaatatt

SEQ ID NO: 2336373 - DNA, 25 bp, Homo sapien
gctcggattaaaggccagagtcacc

SEQ ID NO: 2336374 - DNA, 25 bp, Homo sapien
catgtgtcgctaacaaaccttgcag

SEQ ID NO: 2336375 - DNA, 25 bp, Homo sapien
gctcagtggataccaacaaattcag

SEQ ID NO: 2336376 - DNA, 25 bp, Homo sapien
taatctgagaacctagttgctggca

SEQ ID NO: 2336377 - DNA, 25 bp, Homo sapien
tactgaggacctcgaataatctgag

SEQ ID NO: 2336378 - DNA, 25 bp, Homo sapien
tgccaccatagcctaagaatcagag

SEQ ID NO: 2336379 - DNA, 25 bp, Homo sapien
ctctccttttccaagtctattttat

SEQ ID NO: 2336380 - DNA, 25 bp, Homo sapien
tctctccttttccaagtctatttta

SEQ ID NO: 2336381 - DNA, 25 bp, Homo sapien
gactctgcttcttgaatggaaacat

SEQ ID NO: 2336382 - DNA, 25 bp, Homo sapien
atccaacacctcaatccatgctaag

SEQ ID NO: 2336383 - DNA, 25 bp, Homo sapien
cagaaattaccatgtaaacatgctt

SEQ ID NO: 2336384 - DNA, 25 bp, Homo sapien
gcttcactgaatccaacacctcaat

SEQ ID NO: 2336385 - DNA, 25 bp, Homo sapien
actgaatccaacacctcaatccatg

SEQ ID NO: 2336386 - DNA, 25 bp, Homo sapien
agtaacatcggtgattgatgtaaaa

SEQ ID NO: 2336387 - DNA, 25 bp, Homo sapien
aaaaaagtaacatcggtgattgatg

SEQ ID NO: 2336388 - DNA, 25 bp, Homo sapien
cagttttagtgacatattaatttac

SEQ ID NO: 2336389 - DNA, 25 bp, Homo sapien
tagtgacatattaatttactcaagt

SEQ ID NO: 2336390 - DNA, 25 bp, Homo sapien
gaagtatgataatgttttgctccca

SEQ ID NO: 2336391 - DNA, 25 bp, Homo sapien
agaaagagttcctcaattcctttgt

SEQ ID NO: 2336392 - DNA, 25 bp, Homo sapien
caagaaagagttcctcaattccttt

SEQ ID NO: 2336393 - DNA, 25 bp, Homo sapien
tttgttctgtttggctgaagtatga

SEQ ID NO: 2336394 - DNA, 25 bp, Homo sapien
agttcccggctgactagagccattg

SEQ ID NO: 2336395 - DNA, 25 bp, Homo sapien
taatctgtacacctcgccttgcagt

SEQ ID NO: 2336396 - DNA, 25 bp, Homo sapien
tgctctctcatccacttgtgctgtt

SEQ ID NO: 2336397 - DNA, 25 bp, Homo sapien
caccactggtctgggcttgaggttc

SEQ ID NO: 2336398 - DNA, 25 bp, Homo sapien
tcttttaatttcttaggcgtgaaca

SEQ ID NO: 2336399 - DNA, 25 bp, Homo sapien
cttttaatttcttaggcgtgaacag

SEQ ID NO: 2336400 - DNA, 25 bp, Homo sapien
tcaaagtagtagacagttacgggcc

SEQ ID NO: 2336401 - DNA, 25 bp, Homo sapien
tttgttaacatttgtaggccgggca

SEQ ID NO: 2336402 - DNA, 25 bp, Homo sapien
tattttaccagctcagcatacagga

SEQ ID NO: 2336403 - DNA, 25 bp, Homo sapien
tcatgttgagggcaatgatccacag

SEQ ID NO: 2336404 - DNA, 25 bp, Homo sapien
tgctgcctcaggaacataaactacg

SEQ ID NO: 2336405 - DNA, 25 bp, Homo sapien
tgttccttctgcgagcagtgcctga

SEQ ID NO: 2336406 - DNA, 25 bp, Homo sapien
aacacgccatgttcaagttaagaca

SEQ ID NO: 2336407 - DNA, 25 bp, Homo sapien
gaatgagtcttggttaactggctac

SEQ ID NO: 2336408 - DNA, 25 bp, Homo sapien
taagaagtaaatccaggggccattc

SEQ ID NO: 2336409 - DNA, 25 bp, Homo sapien
tagctggccctacaaatgcatgcct

SEQ ID NO: 2336410 - DNA, 25 bp, Homo sapien
tatatactgaagttgactggtcctc

SEQ ID NO: 2336411 - DNA, 25 bp, Homo sapien
gctttagggtattcttaggcaacac

SEQ ID NO: 2336412 - DNA, 25 bp, Homo sapien
cttactggctgaaaaaatactggca

SEQ ID NO: 2336413 - DNA, 25 bp, Homo sapien
ccatcagacatatgtgtagcacgaa

SEQ ID NO: 2336414 - DNA, 25 bp, Homo sapien
tgaaaactctacagtggcaaacaag

SEQ ID NO: 2336415 - DNA, 25 bp, Homo sapien
tagacattattgtgaggctcctgcg

SEQ ID NO: 2336416 - DNA, 25 bp, Homo sapien
ggctcctgcgggtcactactactat

SEQ ID NO: 2336417 - DNA, 25 bp, Homo sapien
aggttaatgcgccaaagcagttttc

SEQ ID NO: 2336418 - DNA, 25 bp, Homo sapien
ataaatcctagatagcacaagaact

SEQ ID NO: 2336419 - DNA, 25 bp, Homo sapien
taaatcctagatagcacaagaactg

SEQ ID NO: 2336420 - DNA, 25 bp, Homo sapien
cagtagaaaggttaatgcgccaaag

SEQ ID NO: 2336421 - DNA, 25 bp, Homo sapien
tcaagactgagaactggtatagtgg

SEQ ID NO: 2336422 - DNA, 25 bp, Homo sapien
gaagagatgatacagttgccagaaa

SEQ ID NO: 2336423 - DNA, 25 bp, Homo sapien
gccactgaagtaggcaactccacct

SEQ ID NO: 2336424 - DNA, 25 bp, Homo sapien
taagagacctaactgggtatgctgt

SEQ ID NO: 2336425 - DNA, 25 bp, Homo sapien
ccatttgggagcactaccaaagggc

SEQ ID NO: 2336426 - DNA, 25 bp, Homo sapien
tactagagaccaatagttactacca

SEQ ID NO: 2336427 - DNA, 25 bp, Homo sapien
caaaatgaggaactttcatatttct

SEQ ID NO: 2336428 - DNA, 25 bp, Homo sapien
caaagggcactttgacaatatatgt

SEQ ID NO: 2336429 - DNA, 25 bp, Homo sapien
tagtctgtgcggcaaagcaagaccc

SEQ ID NO: 2336430 - DNA, 25 bp, Homo sapien
taagtagttaacttctagttccaga

SEQ ID NO: 2336431 - DNA, 25 bp, Homo sapien
aaagagtatgattctagggtgggca

SEQ ID NO: 2336432 - DNA, 25 bp, Homo sapien
taagcttgatgtatggtaaacttac

SEQ ID NO: 2336433 - DNA, 25 bp, Homo sapien
gcacaggtgaccttatatccccaga

SEQ ID NO: 2336434 - DNA, 25 bp, Homo sapien
ggcactttggctatctggttctccc

SEQ ID NO: 2336435 - DNA, 25 bp, Homo sapien
gcaacaggtatcagctcatctctag

SEQ ID NO: 2336436 - DNA, 25 bp, Homo sapien
aaagcaatttgggttagaggatcac

SEQ ID NO: 2336437 - DNA, 25 bp, Homo sapien
taaattattagcctagaacctagaa

SEQ ID NO: 2336438 - DNA, 25 bp, Homo sapien
gcctcaaggcaacataccaaagtag

SEQ ID NO: 2336439 - DNA, 25 bp, Homo sapien
tagtaaattattagcctagaaccta

SEQ ID NO: 2336440 - DNA, 25 bp, Homo sapien
caaatgtcagcctcaaggcaacata

SEQ ID NO: 2336441 - DNA, 25 bp, Homo sapien
tagaaggcattattacgctagggac

SEQ ID NO: 2336442 - DNA, 25 bp, Homo sapien
tcttccctaatgatgtttaagctga

SEQ ID NO: 2336443 - DNA, 25 bp, Homo sapien
gactttaaatgtcagtagaaggcat

SEQ ID NO: 2336444 - DNA, 25 bp, Homo sapien
gaggtcatagaaacagtcatagtct

SEQ ID NO: 2336445 - DNA, 25 bp, Homo sapien
ttaagtagatccaaaccaatcactg

SEQ ID NO: 2336446 - DNA, 25 bp, Homo sapien
taaagctcttagtcaacaggtttga

SEQ ID NO: 2336447 - DNA, 25 bp, Homo sapien
cgaaacaggctttttagcttacaag

SEQ ID NO: 2336448 - DNA, 25 bp, Homo sapien
cacacttattaggtacaacatgagg

SEQ ID NO: 2336449 - DNA, 25 bp, Homo sapien
cagcctctgcaacttgaagagtaca

SEQ ID NO: 2336450 - DNA, 25 bp, Homo sapien
tattgttatatgttgggcatggtgc

SEQ ID NO: 2336451 - DNA, 25 bp, Homo sapien
cagaattcactgtcatccttagcgg

SEQ ID NO: 2336452 - DNA, 25 bp, Homo sapien
cagtttacccctctatcagcaaaaa

SEQ ID NO: 2336453 - DNA, 25 bp, Homo sapien
aagttgagcctatgggaatgaatcc

SEQ ID NO: 2336454 - DNA, 25 bp, Homo sapien
ggaactacaacctctggtcaccatg

SEQ ID NO: 2336455 - DNA, 25 bp, Homo sapien
gctgttgcccaattgccctccagat

SEQ ID NO: 2336456 - DNA, 25 bp, Homo sapien
gaagatgtaacaccacaatctaggg

SEQ ID NO: 2336457 - DNA, 25 bp, Homo sapien
ggtggtttcacagatcgaacttgta

SEQ ID NO: 2336458 - DNA, 25 bp, Homo sapien
gaaccttaatacagtcgtgcagaat

SEQ ID NO: 2336459 - DNA, 25 bp, Homo sapien
aatccctacaaaggaatattacttg

SEQ ID NO: 2336460 - DNA, 25 bp, Homo sapien
cgaacttgtatacttcatgtgcaat

SEQ ID NO: 2336461 - DNA, 25 bp, Homo sapien
ttttaggtagattacctgctggtca

SEQ ID NO: 2336462 - DNA, 25 bp, Homo sapien
caaccatggcccttaactttttgct

SEQ ID NO: 2336463 - DNA, 25 bp, Homo sapien
ccagattcagtattccacagcaatg

SEQ ID NO: 2336464 - DNA, 25 bp, Homo sapien
ggtatatggacacagcaaccatggc

SEQ ID NO: 2336465 - DNA, 25 bp, Homo sapien
cctatgggagcctcgtgggtttcct

SEQ ID NO: 2336466 - DNA, 25 bp, Homo sapien
gcatataaaccatcacatttgaaga

SEQ ID NO: 2336467 - DNA, 25 bp, Homo sapien
taagaatgtaagttcaggagcatat

SEQ ID NO: 2336468 - DNA, 25 bp, Homo sapien
ctggcctcctgactcataagaatgt

SEQ ID NO: 2336469 - DNA, 25 bp, Homo sapien
tacttccgtcttcacacagtggaga

SEQ ID NO: 2336470 - DNA, 25 bp, Homo sapien
gttagaggcttttgagtttggttga

SEQ ID NO: 2336471 - DNA, 25 bp, Homo sapien
aaaacacttgtgtccattgaggtac

SEQ ID NO: 2336472 - DNA, 25 bp, Homo sapien
gatctgggatttccctagctccggg

SEQ ID NO: 2336473 - DNA, 25 bp, Homo sapien
gtttcctgcgcgtgcctggtaatga

SEQ ID NO: 2336474 - DNA, 25 bp, Homo sapien
ggtaatgacgtagcagaacctcacg

SEQ ID NO: 2336475 - DNA, 25 bp, Homo sapien
gaacctcacgtgtctctcggacata

SEQ ID NO: 2336476 - DNA, 25 bp, Homo sapien
ggacatacaacaacatccggcaaaa

SEQ ID NO: 2336477 - DNA, 25 bp, Homo sapien
tcccgctcacaacacccgccgccgc

SEQ ID NO: 2336478 - DNA, 25 bp, Homo sapien
ttcccgctcacaacacccgccgccg

SEQ ID NO: 2336479 - DNA, 25 bp, Homo sapien
tggacgccttcctagacaagcacag

SEQ ID NO: 2336480 - DNA, 25 bp, Homo sapien
aatacactcgtttcttctaagcgca

SEQ ID NO: 2336481 - DNA, 25 bp, Homo sapien
gaaattaggcgtgtcactgaccacc

SEQ ID NO: 2336482 - DNA, 25 bp, Homo sapien
gaggcaagtcgggttaacgcttcaa

SEQ ID NO: 2336483 - DNA, 25 bp, Homo sapien
tgaaagagggagatgtttaaacgga

SEQ ID NO: 2336484 - DNA, 25 bp, Homo sapien
ctgaaagagggagatgtttaaacgg

SEQ ID NO: 2336485 - DNA, 25 bp, Homo sapien
caaaagagctattaatggacccatt

SEQ ID NO: 2336486 - DNA, 25 bp, Homo sapien
gagtgaatgaagtgtactacaatag

SEQ ID NO: 2336487 - DNA, 25 bp, Homo sapien
taggattttacaactctgaaacaaa

SEQ ID NO: 2336488 - DNA, 25 bp, Homo sapien
tatgtgccagaatctatgttagggg

SEQ ID NO: 2336489 - DNA, 25 bp, Homo sapien
taaggaagtttcacaatacagtagt

SEQ ID NO: 2336490 - DNA, 25 bp, Homo sapien
gaacttacaggctaatataacaacc

SEQ ID NO: 2336491 - DNA, 25 bp, Homo sapien
tgcacaatccaactcaagaacatcc

SEQ ID NO: 2336492 - DNA, 25 bp, Homo sapien
gacagaatgaacttttgcacaatcc

SEQ ID NO: 2336493 - DNA, 25 bp, Homo sapien
tgttaccacagggaattacgtccaa

SEQ ID NO: 2336494 - DNA, 25 bp, Homo sapien
gcctaggagcttgacaaacccatag

SEQ ID NO: 2336495 - DNA, 25 bp, Homo sapien
caagaaaagtataatttcaggctga

SEQ ID NO: 2336496 - DNA, 25 bp, Homo sapien
gaagccatagttctttgttaccaca

SEQ ID NO: 2336497 - DNA, 25 bp, Homo sapien
gtctcagacctgatgcacttggatc

SEQ ID NO: 2336498 - DNA, 25 bp, Homo sapien
ggacaacagctagaagctccattgc

SEQ ID NO: 2336499 - DNA, 25 bp, Homo sapien
ctggcagatagaagcgtggaacaaa

SEQ ID NO: 2336500 - DNA, 25 bp, Homo sapien
tatgatagcctccttacctaaaaag

SEQ ID NO: 2336501 - DNA, 25 bp, Homo sapien
ggacagccactgtaacgtgataatg

SEQ ID NO: 2336502 - DNA, 25 bp, Homo sapien
tacagctgaccataagaaccttctc

SEQ ID NO: 2336503 - DNA, 25 bp, Homo sapien
tattttcatcaatctggacagccac

SEQ ID NO: 2336504 - DNA, 25 bp, Homo sapien
cccatggagtgttttgactgattac

SEQ ID NO: 2336505 - DNA, 25 bp, Homo sapien
tatgtaatgagtatcacagccagaa

SEQ ID NO: 2336506 - DNA, 25 bp, Homo sapien
acagcgatggctgttccgggaactc

SEQ ID NO: 2336507 - DNA, 25 bp, Homo sapien
tatagaagcactcctgcaatactgg

SEQ ID NO: 2336508 - DNA, 25 bp, Homo sapien
ggaactctcttcacaattgtctgga

SEQ ID NO: 2336509 - DNA, 25 bp, Homo sapien
cacaagatgagtgaatatatactcc

SEQ ID NO: 2336510 - DNA, 25 bp, Homo sapien
ctttccacaagatgagtgaatatat

SEQ ID NO: 2336511 - DNA, 25 bp, Homo sapien
tgaaatcaagccgtcttggtcattg

SEQ ID NO: 2336512 - DNA, 25 bp, Homo sapien
tcttggtcattggtctttccacaag

SEQ ID NO: 2336513 - DNA, 25 bp, Homo sapien
tccagtccactattacttcggcatc

SEQ ID NO: 2336514 - DNA, 25 bp, Homo sapien
aggaatctaatgcatcatccaatgg

SEQ ID NO: 2336515 - DNA, 25 bp, Homo sapien
tctccagtccactattacttcggca

SEQ ID NO: 2336516 - DNA, 25 bp, Homo sapien
tagaggaatctaatgcatcatccaa

SEQ ID NO: 2336517 - DNA, 25 bp, Homo sapien
atattcacaggtatagttctataga

SEQ ID NO: 2336518 - DNA, 25 bp, Homo sapien
ggcaatcaaaattagctaaaagcaa

SEQ ID NO: 2336519 - DNA, 25 bp, Homo sapien
aggcaatcaaaattagctaaaagca

SEQ ID NO: 2336520 - DNA, 25 bp, Homo sapien
tctatagaattttccatctttaaag

SEQ ID NO: 2336521 - DNA, 25 bp, Homo sapien
gatgttctgatcctcgatgacctct

SEQ ID NO: 2336522 - DNA, 25 bp, Homo sapien
cattctgcttcgtaactgttcagat

SEQ ID NO: 2336523 - DNA, 25 bp, Homo sapien
ttttggggcctgagtccattctaca

SEQ ID NO: 2336524 - DNA, 25 bp, Homo sapien
gatgacctctttcttttggggcctg

SEQ ID NO: 2336525 - DNA, 25 bp, Homo sapien
cagatgcccaggctatatctccaga

SEQ ID NO: 2336526 - DNA, 25 bp, Homo sapien
taaagtctgtggtcaagccataagc

SEQ ID NO: 2336527 - DNA, 25 bp, Homo sapien
tctgaagaccttctaaaatgcacag

SEQ ID NO: 2336528 - DNA, 25 bp, Homo sapien
cgttttttgctaagctacacagcta

SEQ ID NO: 2336529 - DNA, 25 bp, Homo sapien
cgtcatcctttagacagaataccaa

SEQ ID NO: 2336530 - DNA, 25 bp, Homo sapien
gaataccaaataggaccagcccata

SEQ ID NO: 2336531 - DNA, 25 bp, Homo sapien
tccttgatgaaagtgtagagcaggg

SEQ ID NO: 2336532 - DNA, 25 bp, Homo sapien
tagagcagggagaacgacgtcatcc

SEQ ID NO: 2336533 - DNA, 25 bp, Homo sapien
ttttcaagagattcaatcagtagtt

SEQ ID NO: 2336534 - DNA, 25 bp, Homo sapien
cagtgttgggatgtaacagataccc

SEQ ID NO: 2336535 - DNA, 25 bp, Homo sapien
tcatgtcctcatatgcaaataggtc

SEQ ID NO: 2336536 - DNA, 25 bp, Homo sapien
tggaaagtggtaaggccctgtcttc

SEQ ID NO: 2336537 - DNA, 25 bp, Homo sapien
tgcctgacttaaagctgcaacatca

SEQ ID NO: 2336538 - DNA, 25 bp, Homo sapien
ttttcaagagattcaatcagtagtt

SEQ ID NO: 2336539 - DNA, 25 bp, Homo sapien
cctatgttgcactgactagatcggg

SEQ ID NO: 2336540 - DNA, 25 bp, Homo sapien
gaactacacatgactagcctagcag

SEQ ID NO: 2336541 - DNA, 25 bp, Homo sapien
taagcgtcaagatggcctatgttgc

SEQ ID NO: 2336542 - DNA, 25 bp, Homo sapien
agagcctcttcctggcgcttgtgag

SEQ ID NO: 2336543 - DNA, 25 bp, Homo sapien
aaaagtacatcagtcaaaggacaag

SEQ ID NO: 2336544 - DNA, 25 bp, Homo sapien
gtagtatactgttacaccgctaggt

SEQ ID NO: 2336545 - DNA, 25 bp, Homo sapien
gtaattgcagagctcaccataagga

SEQ ID NO: 2336546 - DNA, 25 bp, Homo sapien
aaattaaagacctgactgctccaaa

SEQ ID NO: 2336547 - DNA, 25 bp, Homo sapien
agactcttattctgacaattcacaa

SEQ ID NO: 2336548 - DNA, 25 bp, Homo sapien
tgacaattcacaagaagtgttcttt

SEQ ID NO: 2336549 - DNA, 25 bp, Homo sapien
tatgctggctcatcaagaagatttt

SEQ ID NO: 2336550 - DNA, 25 bp, Homo sapien
gctggctcatcaagaagattttcaa

SEQ ID NO: 2336551 - DNA, 25 bp, Homo sapien
gtgaatggcccacaacagctttctt

SEQ ID NO: 2336552 - DNA, 25 bp, Homo sapien
ccagtggtgaatggcccacaacagc

SEQ ID NO: 2336553 - DNA, 25 bp, Homo sapien
tggtgaatggcccacaacagctttc

SEQ ID NO: 2336554 - DNA, 25 bp, Homo sapien
ttccagtggtgaatggcccacaaca

SEQ ID NO: 2336555 - DNA, 25 bp, Homo sapien
ggaaaatcctatcatagttgccgta

SEQ ID NO: 2336556 - DNA, 25 bp, Homo sapien
ttgatgtgtagagggatcgctgcct

SEQ ID NO: 2336557 - DNA, 25 bp, Homo sapien
tatctttagacctggaatagcatca

SEQ ID NO: 2336558 - DNA, 25 bp, Homo sapien
catagttgccgtataagggtccttt

SEQ ID NO: 2336559 - DNA, 25 bp, Homo sapien
tgactagctgtctctgatgcctatg

SEQ ID NO: 2336560 - DNA, 25 bp, Homo sapien
tatgtacaagcctagaattgtagca

SEQ ID NO: 2336561 - DNA, 25 bp, Homo sapien
aaagatctgccataattcaggccaa

SEQ ID NO: 2336562 - DNA, 25 bp, Homo sapien
ttcatgacccactagcttcactcgg

SEQ ID NO: 2336563 - DNA, 25 bp, Homo sapien
cagtgataccggttctctcctttga

SEQ ID NO: 2336564 - DNA, 25 bp, Homo sapien
tctcctttgaacaacagggcgttcc

SEQ ID NO: 2336565 - DNA, 25 bp, Homo sapien
caatgttcttagtccattcttccag

SEQ ID NO: 2336566 - DNA, 25 bp, Homo sapien
caacagggcgttcccccaaatcaat

SEQ ID NO: 2336567 - DNA, 25 bp, Homo sapien
gactggtgagtctaagcccaatctt

SEQ ID NO: 2336568 - DNA, 25 bp, Homo sapien
aggcaaatgccactggaatgcaggc

SEQ ID NO: 2336569 - DNA, 25 bp, Homo sapien
taaacagtgcacagaatacagtaga

SEQ ID NO: 2336570 - DNA, 25 bp, Homo sapien
tacagaatacagtagactacagcag

SEQ ID NO: 2336571 - DNA, 25 bp, Homo sapien
aataacccagaagaaatttccatgc

SEQ ID NO: 2336572 - DNA, 25 bp, Homo sapien
ctttcctccttggtactgtcccagg

SEQ ID NO: 2336573 - DNA, 25 bp, Homo sapien
gctttctcaatgcatgactaagtcc

SEQ ID NO: 2336574 - DNA, 25 bp, Homo sapien
ccagaagaaatttccatgcttgctt

SEQ ID NO: 2336575 - DNA, 25 bp, Homo sapien
aaaggtgcttctagtaagtttctga

SEQ ID NO: 2336576 - DNA, 25 bp, Homo sapien
tctttcaagtatgcaaaaggcttgt

SEQ ID NO: 2336577 - DNA, 25 bp, Homo sapien
tgtatgagtgggttacttgaatctc

SEQ ID NO: 2336578 - DNA, 25 bp, Homo sapien
gcttgtacaaggcttatataaggga

SEQ ID NO: 2336579 - DNA, 25 bp, Homo sapien
caaaggctagactgacaactgagaa

SEQ ID NO: 2336580 - DNA, 25 bp, Homo sapien
ggctagactgacaactgagaacaag

SEQ ID NO: 2336581 - DNA, 25 bp, Homo sapien
aaatcaaaggctagactgacaactg

SEQ ID NO: 2336582 - DNA, 25 bp, Homo sapien
aaggctagactgacaactgagaaca

SEQ ID NO: 2336583 - DNA, 25 bp, Homo sapien
gacattatagttccatttccaagca

SEQ ID NO: 2336584 - DNA, 25 bp, Homo sapien
aatcatgtctaaaagtattctagtc

SEQ ID NO: 2336585 - DNA, 25 bp, Homo sapien
tattgcagaaactagttaatgtaaa

SEQ ID NO: 2336586 - DNA, 25 bp, Homo sapien
tatctcatccttaaaatcatgtcta

SEQ ID NO: 2336587 - DNA, 25 bp, Homo sapien
caatagcaaaacgtttaaagttatg

SEQ ID NO: 2336588 - DNA, 25 bp, Homo sapien
gatgctagtggaatgtaagtttata

SEQ ID NO: 2336589 - DNA, 25 bp, Homo sapien
tatcaaagcatttatgatgctagtg

SEQ ID NO: 2336590 - DNA, 25 bp, Homo sapien
caatttgacatcaaagaaagctatt

SEQ ID NO: 2336591 - DNA, 25 bp, Homo sapien
cgataagacttctataatctcttaa

SEQ ID NO: 2336592 - DNA, 25 bp, Homo sapien
aagacttctataatctcttaacctc

SEQ ID NO: 2336593 - DNA, 25 bp, Homo sapien
ttgttcctggctgatggatttccac

SEQ ID NO: 2336594 - DNA, 25 bp, Homo sapien
cagtttcattctgaagtattcatca

SEQ ID NO: 2336595 - DNA, 25 bp, Homo sapien
cacacactgcaatgtactttcctat

SEQ ID NO: 2336596 - DNA, 25 bp, Homo sapien
tatgcctattggaagaggaacaaca

SEQ ID NO: 2336597 - DNA, 25 bp, Homo sapien
gaattaatatgcctattggaagagg

SEQ ID NO: 2336598 - DNA, 25 bp, Homo sapien
gagccctagtgctattaccatgtat

SEQ ID NO: 2336599 - DNA, 25 bp, Homo sapien
tttctacaataaacagactttcata

SEQ ID NO: 2336600 - DNA, 25 bp, Homo sapien
tggcaacattgcacacaaacatcct

SEQ ID NO: 2336601 - DNA, 25 bp, Homo sapien
tgtgatggtgcgtgcatgcagcccc

SEQ ID NO: 2336602 - DNA, 25 bp, Homo sapien
ctttcctactaaaagctgtctctgc

SEQ ID NO: 2336603 - DNA, 25 bp, Homo sapien
aaaaacccagcaatatccatatgcc

SEQ ID NO: 2336604 - DNA, 25 bp, Homo sapien
taaaacttgtttgttcgatctgttc

SEQ ID NO: 2336605 - DNA, 25 bp, Homo sapien
tgtttgttcgatctgttctgttaac

SEQ ID NO: 2336606 - DNA, 25 bp, Homo sapien
aaatgtcatgaagtaaaatcaaccc

SEQ ID NO: 2336607 - DNA, 25 bp, Homo sapien
atcaaccctggattatcttggcctt

SEQ ID NO: 2336608 - DNA, 25 bp, Homo sapien
aaatatcccatggtgctcctgttag

SEQ ID NO: 2336609 - DNA, 25 bp, Homo sapien
aagctattacccatgtctaactgga

SEQ ID NO: 2336610 - DNA, 25 bp, Homo sapien
ggttatcatccttagtatcccagca

SEQ ID NO: 2336611 - DNA, 25 bp, Homo sapien
cacagtacttatcacagcaaggcca

SEQ ID NO: 2336612 - DNA, 25 bp, Homo sapien
cagccccggcatcagttcttacaac

SEQ ID NO: 2336613 - DNA, 25 bp, Homo sapien
gccccggcatcagttcttacaacaa

SEQ ID NO: 2336614 - DNA, 25 bp, Homo sapien
cccagccccggcatcagttcttaca

SEQ ID NO: 2336615 - DNA, 25 bp, Homo sapien
gcacccagccccggcatcagttctt

SEQ ID NO: 2336616 - DNA, 25 bp, Homo sapien
agtcctgttaacctcactctgtcta

SEQ ID NO: 2336617 - DNA, 25 bp, Homo sapien
tagcttccagtacgtgtctcagtgc

SEQ ID NO: 2336618 - DNA, 25 bp, Homo sapien
cccagagtggttagcaatgccaaac

SEQ ID NO: 2336619 - DNA, 25 bp, Homo sapien
tcttgaaccaatgaagggacacgaa

SEQ ID NO: 2336620 - DNA, 25 bp, Homo sapien
caagaaagttgcaagcccagagtgg

SEQ ID NO: 2336621 - DNA, 25 bp, Homo sapien
agcaccaaaaggcatccacttcatt

SEQ ID NO: 2336622 - DNA, 25 bp, Homo sapien
tttggtccatgtaagaggcaaagca

SEQ ID NO: 2336623 - DNA, 25 bp, Homo sapien
gaggggaaagtaaatcactcattcc

SEQ ID NO: 2336624 - DNA, 25 bp, Homo sapien
caaagcaccaaaaggcatccacttc

SEQ ID NO: 2336625 - DNA, 25 bp, Homo sapien
taccaccagtatttctaagcccttg

SEQ ID NO: 2336626 - DNA, 25 bp, Homo sapien
atattctgtaatgacacatggctct

SEQ ID NO: 2336627 - DNA, 25 bp, Homo sapien
tatactacaggcacaaactatttcc

SEQ ID NO: 2336628 - DNA, 25 bp, Homo sapien
aatcagtttaatggaaggaatctct

SEQ ID NO: 2336629 - DNA, 25 bp, Homo sapien
gaacaacctcatgtcaggcattagg

SEQ ID NO: 2336630 - DNA, 25 bp, Homo sapien
aaaggcccagcatccagtatgttag

SEQ ID NO: 2336631 - DNA, 25 bp, Homo sapien
caggtttctagagcacttgggagta

SEQ ID NO: 2336632 - DNA, 25 bp, Homo sapien
ggaacatactagctctggtgaaaag

SEQ ID NO: 2336633 - DNA, 25 bp, Homo sapien
tagctgggtcttcatgccttgcatt

SEQ ID NO: 2336634 - DNA, 25 bp, Homo sapien
taaggtactcagctgaattagctgg

SEQ ID NO: 2336635 - DNA, 25 bp, Homo sapien
tccactgtctaacaatcgaagtaag

SEQ ID NO: 2336636 - DNA, 25 bp, Homo sapien
taagtaactgcaaaatccactgtct

SEQ ID NO: 2336637 - DNA, 25 bp, Homo sapien
aatctgattaaaagccacctgaagc

SEQ ID NO: 2336638 - DNA, 25 bp, Homo sapien
tcccttttgaatctgattaaaagcc

SEQ ID NO: 2336639 - DNA, 25 bp, Homo sapien
ctcccataatcgaagaatatctaga

SEQ ID NO: 2336640 - DNA, 25 bp, Homo sapien
cataatcgaagaatatctagaaaac

SEQ ID NO: 2336641 - DNA, 25 bp, Homo sapien
aatgacttctatgcaaagtagatgt

SEQ ID NO: 2336642 - DNA, 25 bp, Homo sapien
tagatgttgcctgtttagggtagcc

SEQ ID NO: 2336643 - DNA, 25 bp, Homo sapien
tgttgcctgtttagggtagcccaag

SEQ ID NO: 2336644 - DNA, 25 bp, Homo sapien
tgcaaagtagatgttgcctgtttag

SEQ ID NO: 2336645 - DNA, 25 bp, Homo sapien
gtatttcattgaagccataatgctt

SEQ ID NO: 2336646 - DNA, 25 bp, Homo sapien
aagtatttcattgaagccataatgc

SEQ ID NO: 2336647 - DNA, 25 bp, Homo sapien
atttgtacatggtagttcggtccac

SEQ ID NO: 2336648 - DNA, 25 bp, Homo sapien
tacatggtagttcggtccacattac

SEQ ID NO: 2336649 - DNA, 25 bp, Homo sapien
ttgcagagtatatcttccacatcaa

SEQ ID NO: 2336650 - DNA, 25 bp, Homo sapien
cttctgccttgcagagtatatcttc

SEQ ID NO: 2336651 - DNA, 25 bp, Homo sapien
tgccttgcagagtatatcttccaca

SEQ ID NO: 2336652 - DNA, 25 bp, Homo sapien
gccttgcagagtatatcttccacat

SEQ ID NO: 2336653 - DNA, 25 bp, Homo sapien
tgctaaccacctttcgccctaagtg

SEQ ID NO: 2336654 - DNA, 25 bp, Homo sapien
tgtttaagactacattgattccaga

SEQ ID NO: 2336655 - DNA, 25 bp, Homo sapien
gtaaatgtcatgtacccttctcaca

SEQ ID NO: 2336656 - DNA, 25 bp, Homo sapien
tccacattcccacaaacatagcatg

SEQ ID NO: 2336657 - DNA, 25 bp, Homo sapien
ggtgttaatctgcagacatctgagg

SEQ ID NO: 2336658 - DNA, 25 bp, Homo sapien
taacttcactgccttgaagcccaag

SEQ ID NO: 2336659 - DNA, 25 bp, Homo sapien
cagatgtaggacaaggagtcatgac

SEQ ID NO: 2336660 - DNA, 25 bp, Homo sapien
gcagagagtgtaggcaaggcattac

SEQ ID NO: 2336661 - DNA, 25 bp, Homo sapien
aaagcatgatcaataccaagatttc

SEQ ID NO: 2336662 - DNA, 25 bp, Homo sapien
ttctttacataaaccttaaagcatg

SEQ ID NO: 2336663 - DNA, 25 bp, Homo sapien
agctttaatgtaagaacatcagtac

SEQ ID NO: 2336664 - DNA, 25 bp, Homo sapien
tgtaagaacatcagtacactttctt

SEQ ID NO: 2336665 - DNA, 25 bp, Homo sapien
caggtacagggttgaacataatctc

SEQ ID NO: 2336666 - DNA, 25 bp, Homo sapien
gaaaaagatctcatactgaagccat

SEQ ID NO: 2336667 - DNA, 25 bp, Homo sapien
taagctgagtactgtcgtaaacaat

SEQ ID NO: 2336668 - DNA, 25 bp, Homo sapien
cttagaatgctatagaaagcctcca

SEQ ID NO: 2336669 - DNA, 25 bp, Homo sapien
tatttgctaactggactctgtggac

SEQ ID NO: 2336670 - DNA, 25 bp, Homo sapien
tattcagtgcactgctttaaagcca

SEQ ID NO: 2336671 - DNA, 25 bp, Homo sapien
aactctaacggttctactgtcgtga

SEQ ID NO: 2336672 - DNA, 25 bp, Homo sapien
tgggtatcacattacgcagcaggaa

SEQ ID NO: 2336673 - DNA, 25 bp, Homo sapien
taaagacgcccaagctaaaatgatg

SEQ ID NO: 2336674 - DNA, 25 bp, Homo sapien
tctgcacgtaagtcagttgaagctg

SEQ ID NO: 2336675 - DNA, 25 bp, Homo sapien
aaagattcccataggttcatgccag

SEQ ID NO: 2336676 - DNA, 25 bp, Homo sapien
tgttctcctggtacatatctgcacg

SEQ ID NO: 2336677 - DNA, 25 bp, Homo sapien
tgagaaatctacatataacaggctg

SEQ ID NO: 2336678 - DNA, 25 bp, Homo sapien
tgtttcgtgctcagaagtgacacag

SEQ ID NO: 2336679 - DNA, 25 bp, Homo sapien
gcctgaagtagcacctagacatgta

SEQ ID NO: 2336680 - DNA, 25 bp, Homo sapien
taaaaatggcgaccggaactagagc

SEQ ID NO: 2336681 - DNA, 25 bp, Homo sapien
ctgaagagcaatgcgaatcctccca

SEQ ID NO: 2336682 - DNA, 25 bp, Homo sapien
gggcgtgcgatcagctgcctgcttg

SEQ ID NO: 2336683 - DNA, 25 bp, Homo sapien
tggtgctgaagagcaatgcgaatcc

SEQ ID NO: 2336684 - DNA, 25 bp, Homo sapien
cagtagcagcgctggcggagattga

SEQ ID NO: 2336685 - DNA, 25 bp, Homo sapien
ggaaaacatcatcattgctggctgc

SEQ ID NO: 2336686 - DNA, 25 bp, Homo sapien
gaaaacatcatcattgctggctgca

SEQ ID NO: 2336687 - DNA, 25 bp, Homo sapien
tggaaaacatcatcattgctggctg

SEQ ID NO: 2336688 - DNA, 25 bp, Homo sapien
ctgctgaatccagggaaaaccctct

SEQ ID NO: 2336689 - DNA, 25 bp, Homo sapien
gcactgctgaatccagggaaaaccc

SEQ ID NO: 2336690 - DNA, 25 bp, Homo sapien
gctgatgctcttcgggcactgctga

SEQ ID NO: 2336691 - DNA, 25 bp, Homo sapien
tgttgagctgccaagtagctgatgc

SEQ ID NO: 2336692 - DNA, 25 bp, Homo sapien
gtcattcataagctggaagctccac

SEQ ID NO: 2336693 - DNA, 25 bp, Homo sapien
ctggaagctccaccaatcatacaaa

SEQ ID NO: 2336694 - DNA, 25 bp, Homo sapien
tcattcataagctggaagctccacc

SEQ ID NO: 2336695 - DNA, 25 bp, Homo sapien
caggaatgtcgaagcataataaaac

SEQ ID NO: 2336696 - DNA, 25 bp, Homo sapien
ttccagaatcctccgtaattagatt

SEQ ID NO: 2336697 - DNA, 25 bp, Homo sapien
cttcaggaatgtcgaagcataataa

SEQ ID NO: 2336698 - DNA, 25 bp, Homo sapien
gttccagaatcctccgtaattagat

SEQ ID NO: 2336699 - DNA, 25 bp, Homo sapien
ccttgttgcctttgtcgtcattttt

SEQ ID NO: 2336700 - DNA, 25 bp, Homo sapien
cacgtttgctgcttcccttgttgcc

SEQ ID NO: 2336701 - DNA, 25 bp, Homo sapien
tgccactttcggtagcagcttcacg

SEQ ID NO: 2336702 - DNA, 25 bp, Homo sapien
catttttgccagagttaggtttatt

SEQ ID NO: 2336703 - DNA, 25 bp, Homo sapien
agtgcttttaccaatccaccaactt

SEQ ID NO: 2336704 - DNA, 25 bp, Homo sapien
cagtgcttttaccaatccaccaact

SEQ ID NO: 2336705 - DNA, 25 bp, Homo sapien
tctctggaggattcagcgtcacaat

SEQ ID NO: 2336706 - DNA, 25 bp, Homo sapien
cactcacagtccacaaagatttcaa

SEQ ID NO: 2336707 - DNA, 25 bp, Homo sapien
aacttcttcgccgagatttcctgga

SEQ ID NO: 2336708 - DNA, 25 bp, Homo sapien
tatgaaccatgttgacacgtttttc

SEQ ID NO: 2336709 - DNA, 25 bp, Homo sapien
gagcatttgtctaactcagagatct

SEQ ID NO: 2336710 - DNA, 25 bp, Homo sapien
actcagagatcttccgagggaacca

SEQ ID NO: 2336711 - DNA, 25 bp, Homo sapien
gagatcttccgagggaaccagggca

SEQ ID NO: 2336712 - DNA, 25 bp, Homo sapien
agagcatttgtctaactcagagatc

SEQ ID NO: 2336713 - DNA, 25 bp, Homo sapien
aggtttagcgtctcctcctctatcc

SEQ ID NO: 2336714 - DNA, 25 bp, Homo sapien
gcaggtatatttcaggctgtctaat

SEQ ID NO: 2336715 - DNA, 25 bp, Homo sapien
atatttcaggctgtctaattccaca

SEQ ID NO: 2336716 - DNA, 25 bp, Homo sapien
ccaaggtttagcgtctcctcctcta

SEQ ID NO: 2336717 - DNA, 25 bp, Homo sapien
cagttcatcgtttttccaaggatca

SEQ ID NO: 2336718 - DNA, 25 bp, Homo sapien
tcagttcatcgtttttccaaggatc

SEQ ID NO: 2336719 - DNA, 25 bp, Homo sapien
agttcatcgtttttccaaggatcac

SEQ ID NO: 2336720 - DNA, 25 bp, Homo sapien
ctcctttctccaggttgagtaattt

SEQ ID NO: 2336721 - DNA, 25 bp, Homo sapien
ctttctccaggttgagtaattttca

SEQ ID NO: 2336722 - DNA, 25 bp, Homo sapien
gcttgctaagaatggagtccaggca

SEQ ID NO: 2336723 - DNA, 25 bp, Homo sapien
gagacaagccactgggatcatggca

SEQ ID NO: 2336724 - DNA, 25 bp, Homo sapien
aagcaatggcttgctaagaatggag

SEQ ID NO: 2336725 - DNA, 25 bp, Homo sapien
agtccaggcaaggagacaagccact

SEQ ID NO: 2336726 - DNA, 25 bp, Homo sapien
tcagaaggagttattgcaatttgac

SEQ ID NO: 2336727 - DNA, 25 bp, Homo sapien
tgtttcttctagctgttggaagctc

SEQ ID NO: 2336728 - DNA, 25 bp, Homo sapien
ggaagctcagaaggagttattgcaa

SEQ ID NO: 2336729 - DNA, 25 bp, Homo sapien
gctgttggaagctcagaaggagtta

SEQ ID NO: 2336730 - DNA, 25 bp, Homo sapien
tactttcttctctgtcgatagacat

SEQ ID NO: 2336731 - DNA, 25 bp, Homo sapien
ttctctgtcgatagacattgtcctt

SEQ ID NO: 2336732 - DNA, 25 bp, Homo sapien
tcttctctgtcgatagacattgtcc

SEQ ID NO: 2336733 - DNA, 25 bp, Homo sapien
ctttcttctctgtcgatagacattg

SEQ ID NO: 2336734 - DNA, 25 bp, Homo sapien
gacagaggaaagagagcattgtgat

SEQ ID NO: 2336735 - DNA, 25 bp, Homo sapien
accagacagaggaaagagagcattg

SEQ ID NO: 2336736 - DNA, 25 bp, Homo sapien
ccagacagaggaaagagagcattgt

SEQ ID NO: 2336737 - DNA, 25 bp, Homo sapien
agaggaaagagagcattgtgatgat

SEQ ID NO: 2336738 - DNA, 25 bp, Homo sapien
cccttacgagatggatttgcatttt

SEQ ID NO: 2336739 - DNA, 25 bp, Homo sapien
aagtttcctgtagcttgatcaatca

SEQ ID NO: 2336740 - DNA, 25 bp, Homo sapien
tcaattggggtaggacgaatctttc

SEQ ID NO: 2336741 - DNA, 25 bp, Homo sapien
ttctgatgacaagtttcctgtagct

SEQ ID NO: 2336742 - DNA, 25 bp, Homo sapien
gaccaggggaagccaatcataaggc

SEQ ID NO: 2336743 - DNA, 25 bp, Homo sapien
ccaggggaagccaatcataaggctc

SEQ ID NO: 2336744 - DNA, 25 bp, Homo sapien
caggggaagccaatcataaggctca

SEQ ID NO: 2336745 - DNA, 25 bp, Homo sapien
ggggaagccaatcataaggctcaca

SEQ ID NO: 2336746 - DNA, 25 bp, Homo sapien
gtcatgacctgattccgcagaagga

SEQ ID NO: 2336747 - DNA, 25 bp, Homo sapien
tacagtcatgacctgattccgcaga

SEQ ID NO: 2336748 - DNA, 25 bp, Homo sapien
cagtcatgacctgattccgcagaag

SEQ ID NO: 2336749 - DNA, 25 bp, Homo sapien
catgacctgattccgcagaaggagc

SEQ ID NO: 2336750 - DNA, 25 bp, Homo sapien
tgtgtatgaaaccacctatgtcaag

SEQ ID NO: 2336751 - DNA, 25 bp, Homo sapien
tgccaagtcacttagttctgtcact

SEQ ID NO: 2336752 - DNA, 25 bp, Homo sapien
ctgtcactgttattcccaacttgtg

SEQ ID NO: 2336753 - DNA, 25 bp, Homo sapien
caaatatgctgagaattctgtaagg

SEQ ID NO: 2336754 - DNA, 25 bp, Homo sapien
ccctgtgaaatacattagaatttgg

SEQ ID NO: 2336755 - DNA, 25 bp, Homo sapien
ctctttccctgtgaaatacattaga

SEQ ID NO: 2336756 - DNA, 25 bp, Homo sapien
atttggtgcaactgttgtccttgtc

SEQ ID NO: 2336757 - DNA, 25 bp, Homo sapien
aatacattagaatttggtgcaactg

SEQ ID NO: 2336758 - DNA, 25 bp, Homo sapien
gacttgtggaagtaattcgaatcct

SEQ ID NO: 2336759 - DNA, 25 bp, Homo sapien
aagcaggacttgtggaagtaattcg

SEQ ID NO: 2336760 - DNA, 25 bp, Homo sapien
tgtggaagtaattcgaatccttcat

SEQ ID NO: 2336761 - DNA, 25 bp, Homo sapien
caggacttgtggaagtaattcgaat

SEQ ID NO: 2336762 - DNA, 25 bp, Homo sapien
caatagcagctaacagtcttgggcc

SEQ ID NO: 2336763 - DNA, 25 bp, Homo sapien
caaggagcttgagctcaaagaactt

SEQ ID NO: 2336764 - DNA, 25 bp, Homo sapien
gtgcacgctcaacatacacaaggag

SEQ ID NO: 2336765 - DNA, 25 bp, Homo sapien
gaaattcccagtcgccaatagcagc

SEQ ID NO: 2336766 - DNA, 25 bp, Homo sapien
gtcctcttcatattctagagaagtg

SEQ ID NO: 2336767 - DNA, 25 bp, Homo sapien
cttcatattctagagaagtgatttt

SEQ ID NO: 2336768 - DNA, 25 bp, Homo sapien
gaaagtcctcttcatattctagaga

SEQ ID NO: 2336769 - DNA, 25 bp, Homo sapien
cttgcagaaagtcctcttcatattc

SEQ ID NO: 2336770 - DNA, 25 bp, Homo sapien
aataaactactgcacctaaggagcc

SEQ ID NO: 2336771 - DNA, 25 bp, Homo sapien
tattggtgctgcctttacaagagac

SEQ ID NO: 2336772 - DNA, 25 bp, Homo sapien
tcatctgacatacgtggcttgacgg

SEQ ID NO: 2336773 - DNA, 25 bp, Homo sapien
taaatgagtctacgggccttaagga

SEQ ID NO: 2336774 - DNA, 25 bp, Homo sapien
gaagatggcttatgcctctgagact

SEQ ID NO: 2336775 - DNA, 25 bp, Homo sapien
tatcatcaagacacatgcatgcgga

SEQ ID NO: 2336776 - DNA, 25 bp, Homo sapien
gcatccaggtgtctacaatatacag

SEQ ID NO: 2336777 - DNA, 25 bp, Homo sapien
tctcacaactgaggtgtcacaccag

SEQ ID NO: 2336778 - DNA, 25 bp, Homo sapien
gagcaggggaccgacagtccctggg

SEQ ID NO: 2336779 - DNA, 25 bp, Homo sapien
cttcagagcaggggaccgacagtcc

SEQ ID NO: 2336780 - DNA, 25 bp, Homo sapien
ttcagagcaggggaccgacagtccc

SEQ ID NO: 2336781 - DNA, 25 bp, Homo sapien
cagagcaggggaccgacagtccctg

SEQ ID NO: 2336782 - DNA, 25 bp, Homo sapien
ggatccaggcctccaggtgctgcca

SEQ ID NO: 2336783 - DNA, 25 bp, Homo sapien
tccaggcctccaggtgctgccacca

SEQ ID NO: 2336784 - DNA, 25 bp, Homo sapien
tgggcagcaggatccaggcctccag

SEQ ID NO: 2336785 - DNA, 25 bp, Homo sapien
gggcagcaggatccaggcctccagg

SEQ ID NO: 2336786 - DNA, 25 bp, Homo sapien
ctgcgagaagtggagtagggcactt

SEQ ID NO: 2336787 - DNA, 25 bp, Homo sapien
gcgagaagtggagtagggcactttc

SEQ ID NO: 2336788 - DNA, 25 bp, Homo sapien
tgcgagaagtggagtagggcacttt

SEQ ID NO: 2336789 - DNA, 25 bp, Homo sapien
gaggcagcacaaatggccctatcac

SEQ ID NO: 2336790 - DNA, 25 bp, Homo sapien
cattgtgaggaggtcagtgtttgag

SEQ ID NO: 2336791 - DNA, 25 bp, Homo sapien
tcatccaccagcctactagggaatc

SEQ ID NO: 2336792 - DNA, 25 bp, Homo sapien
aatcagagatgctcagcattgtgag

SEQ ID NO: 2336793 - DNA, 25 bp, Homo sapien
cacagtatttagtcagcagagggaa

SEQ ID NO: 2336794 - DNA, 25 bp, Homo sapien
aatactctcggcaagcatgagtggg

SEQ ID NO: 2336795 - DNA, 25 bp, Homo sapien
tcttcgagttgaggcacattgtcct

SEQ ID NO: 2336796 - DNA, 25 bp, Homo sapien
cagaaacatggagacatcttcgagt

SEQ ID NO: 2336797 - DNA, 25 bp, Homo sapien
gggatctgagccatgccggatgtac

SEQ ID NO: 2336798 - DNA, 25 bp, Homo sapien
ggcctcaccgtgaagccagaccttt

SEQ ID NO: 2336799 - DNA, 25 bp, Homo sapien
tgtactgggtacagtggaacactct

SEQ ID NO: 2336800 - DNA, 25 bp, Homo sapien
ccagaaagtctcgtgggctcaggta

SEQ ID NO: 2336801 - DNA, 25 bp, Homo sapien
tcagattcctgaacaaagtgtggac

SEQ ID NO: 2336802 - DNA, 25 bp, Homo sapien
ttcctgaacaaagtgtggacatagc

SEQ ID NO: 2336803 - DNA, 25 bp, Homo sapien
gattcctgaacaaagtgtggacata

SEQ ID NO: 2336804 - DNA, 25 bp, Homo sapien
cagattcctgaacaaagtgtggaca

SEQ ID NO: 2336805 - DNA, 25 bp, Homo sapien
aatctgaaaacctccattgtggctc

SEQ ID NO: 2336806 - DNA, 25 bp, Homo sapien
aaaatctgaaaacctccattgtggc

SEQ ID NO: 2336807 - DNA, 25 bp, Homo sapien
gaaaaatctgaaaacctccattgtg

SEQ ID NO: 2336808 - DNA, 25 bp, Homo sapien
tctgaaaacctccattgtggctcat

SEQ ID NO: 2336809 - DNA, 25 bp, Homo sapien
cagagacgccagacctatttcttgt

SEQ ID NO: 2336810 - DNA, 25 bp, Homo sapien
gatgctcccagagacgccagaccta

SEQ ID NO: 2336811 - DNA, 25 bp, Homo sapien
tggaacatgtcccaagagttcatgg

SEQ ID NO: 2336812 - DNA, 25 bp, Homo sapien
gaaaactgagcaaacttaggatccg

SEQ ID NO: 2336813 - DNA, 25 bp, Homo sapien
tcaggaacaatctcccttagcctcc

SEQ ID NO: 2336814 - DNA, 25 bp, Homo sapien
tgtgaggttatcctcctccatactc

SEQ ID NO: 2336815 - DNA, 25 bp, Homo sapien
ccttagcctcctcacactgtgtgag

SEQ ID NO: 2336816 - DNA, 25 bp, Homo sapien
acactgtgtgaggttatcctcctcc

SEQ ID NO: 2336817 - DNA, 25 bp, Homo sapien
ttttccagtattacagactttgtaa

SEQ ID NO: 2336818 - DNA, 25 bp, Homo sapien
ctgaagaaaaacgaacacatattca

SEQ ID NO: 2336819 - DNA, 25 bp, Homo sapien
gaaaaacgaacacatattcagtgaa

SEQ ID NO: 2336820 - DNA, 25 bp, Homo sapien
agaaaaacgaacacatattcagtga

SEQ ID NO: 2336821 - DNA, 25 bp, Homo sapien
gaagaaaaacgaacacatattcagt

SEQ ID NO: 2336822 - DNA, 25 bp, Homo sapien
gcttgcaaaggccaaactcgattgt

SEQ ID NO: 2336823 - DNA, 25 bp, Homo sapien
tatgcccgcagttgcccttcttgct

SEQ ID NO: 2336824 - DNA, 25 bp, Homo sapien
ggaaaggagtcctgctccatatgcc

SEQ ID NO: 2336825 - DNA, 25 bp, Homo sapien
ttgcaaaggccaaactcgattgtga

SEQ ID NO: 2336826 - DNA, 25 bp, Homo sapien
tcaccaatttgaataagctgcaggg

SEQ ID NO: 2336827 - DNA, 25 bp, Homo sapien
gacagagtttccagctcccaacgtc

SEQ ID NO: 2336828 - DNA, 25 bp, Homo sapien
aacagggtaaacgtgagagctcagc

SEQ ID NO: 2336829 - DNA, 25 bp, Homo sapien
gggactcgaaagtcatctgaacagg

SEQ ID NO: 2336830 - DNA, 25 bp, Homo sapien
tacagtgtgtcccaaggggtataaa

SEQ ID NO: 2336831 - DNA, 25 bp, Homo sapien
ctatctctgaatactacagtgtgtc

SEQ ID NO: 2336832 - DNA, 25 bp, Homo sapien
gcagcccatgaagtctcctatctct

SEQ ID NO: 2336833 - DNA, 25 bp, Homo sapien
ccatgcagcccatgaagtctcctat

SEQ ID NO: 2336834 - DNA, 25 bp, Homo sapien
gactgtgtgctgagttccaggaaca

SEQ ID NO: 2336835 - DNA, 25 bp, Homo sapien
catgagctgactgtgtgctgagttc

SEQ ID NO: 2336836 - DNA, 25 bp, Homo sapien
gagctgactgtgtgctgagttccag

SEQ ID NO: 2336837 - DNA, 25 bp, Homo sapien
actgtgtgctgagttccaggaacat

SEQ ID NO: 2336838 - DNA, 25 bp, Homo sapien
ggtgataaggcattcctgtaagcaa

SEQ ID NO: 2336839 - DNA, 25 bp, Homo sapien
ctggaaggtggtgataaggcattcc

SEQ ID NO: 2336840 - DNA, 25 bp, Homo sapien
cctgtaagcaagttgtctttgggtc

SEQ ID NO: 2336841 - DNA, 25 bp, Homo sapien
ggctttcacacatgccttgtcagaa

SEQ ID NO: 2336842 - DNA, 25 bp, Homo sapien
gaatttcaatactctgtgtgtaggg

SEQ ID NO: 2336843 - DNA, 25 bp, Homo sapien
tgcaccacattttcaatacttctgg

SEQ ID NO: 2336844 - DNA, 25 bp, Homo sapien
tattcaagtcgctgcgaaggtcctg

SEQ ID NO: 2336845 - DNA, 25 bp, Homo sapien
tagggattgaagtatactgagaagg

SEQ ID NO: 2336846 - DNA, 25 bp, Homo sapien
tcaaatccccagatattggttcatt

SEQ ID NO: 2336847 - DNA, 25 bp, Homo sapien
tcattttgtttaaagcatcacacac

SEQ ID NO: 2336848 - DNA, 25 bp, Homo sapien
aatccccagatattggttcattttg

SEQ ID NO: 2336849 - DNA, 25 bp, Homo sapien
gttcattttgtttaaagcatcacac

SEQ ID NO: 2336850 - DNA, 25 bp, Homo sapien
tatatgacattgactgaactgctgc

SEQ ID NO: 2336851 - DNA, 25 bp, Homo sapien
ttcatacaatgagtggttatctgcc

SEQ ID NO: 2336852 - DNA, 25 bp, Homo sapien
gcttattagccaagccatgacacag

SEQ ID NO: 2336853 - DNA, 25 bp, Homo sapien
taagccccaaaaagatcatgctggc

SEQ ID NO: 2336854 - DNA, 25 bp, Homo sapien
taactcaggttctacaaggtcaacg

SEQ ID NO: 2336855 - DNA, 25 bp, Homo sapien
tagtcccaagattgattgtccactg

SEQ ID NO: 2336856 - DNA, 25 bp, Homo sapien
tgcaagcactgggacgaatttatca

SEQ ID NO: 2336857 - DNA, 25 bp, Homo sapien
agtttcccatctcggatgacacaga

SEQ ID NO: 2336858 - DNA, 25 bp, Homo sapien
tactgataaacattagtttggatag

SEQ ID NO: 2336859 - DNA, 25 bp, Homo sapien
cattagtttggataggcattatttc

SEQ ID NO: 2336860 - DNA, 25 bp, Homo sapien
tggataggcattatttcctatctcc

SEQ ID NO: 2336861 - DNA, 25 bp, Homo sapien
taaacattagtttggataggcatta

SEQ ID NO: 2336862 - DNA, 25 bp, Homo sapien
taaagtcaccatattccatcatgca

SEQ ID NO: 2336863 - DNA, 25 bp, Homo sapien
ccatcatgcatatgggtaagtagaa

SEQ ID NO: 2336864 - DNA, 25 bp, Homo sapien
catcatgcatatgggtaagtagaaa

SEQ ID NO: 2336865 - DNA, 25 bp, Homo sapien
aaagtcaccatattccatcatgcat

SEQ ID NO: 2336866 - DNA, 25 bp, Homo sapien
tacgggccatattgccaatctgtac

SEQ ID NO: 2336867 - DNA, 25 bp, Homo sapien
cacccctaggagacatcagttgtgt

SEQ ID NO: 2336868 - DNA, 25 bp, Homo sapien
ccaaacagtgcttgtacgggccata

SEQ ID NO: 2336869 - DNA, 25 bp, Homo sapien
tgtaacaacagcaccccaaacagtg

SEQ ID NO: 2336870 - DNA, 25 bp, Homo sapien
tacaactgaggtcatttttgctgaa

SEQ ID NO: 2336871 - DNA, 25 bp, Homo sapien
tttctacaactgaggtcatttttgc

SEQ ID NO: 2336872 - DNA, 25 bp, Homo sapien
caactgaggtcatttttgctgaaat

SEQ ID NO: 2336873 - DNA, 25 bp, Homo sapien
ttatttctacaactgaggtcatttt

SEQ ID NO: 2336874 - DNA, 25 bp, Homo sapien
ttggacatgggagaaacagatgata

SEQ ID NO: 2336875 - DNA, 25 bp, Homo sapien
acagatgataaagtctcttgactgt

SEQ ID NO: 2336876 - DNA, 25 bp, Homo sapien
aagtggtctgtctccaacaggcctg

SEQ ID NO: 2336877 - DNA, 25 bp, Homo sapien
tggaggcacccagttcattccacag

SEQ ID NO: 2336878 - DNA, 25 bp, Homo sapien
ggcttaattacttcctgcaggtcct

SEQ ID NO: 2336879 - DNA, 25 bp, Homo sapien
cagacttatcggattagcgccctac

SEQ ID NO: 2336880 - DNA, 25 bp, Homo sapien
tgtaatcaacaccaacaagcctcgc

SEQ ID NO: 2336881 - DNA, 25 bp, Homo sapien
acactctagccttcagttgcttaaa

SEQ ID NO: 2336882 - DNA, 25 bp, Homo sapien
ctcccttggacaaagtccaaaatga

SEQ ID NO: 2336883 - DNA, 25 bp, Homo sapien
tcctggagactctgtaacactctag

SEQ ID NO: 2336884 - DNA, 25 bp, Homo sapien
cagtcaaactcccttggacaaagtc

SEQ ID NO: 2336885 - DNA, 25 bp, Homo sapien
cactggcaggtttcgtaaaatggga

SEQ ID NO: 2336886 - DNA, 25 bp, Homo sapien
tgagtgcacgtcatagaaatgtctg

SEQ ID NO: 2336887 - DNA, 25 bp, Homo sapien
catagagctttcaacccaaagtagc

SEQ ID NO: 2336888 - DNA, 25 bp, Homo sapien
tgggatttcaggcagcatagagctt

SEQ ID NO: 2336889 - DNA, 25 bp, Homo sapien
gagtcagactgccacctattagctg

SEQ ID NO: 2336890 - DNA, 25 bp, Homo sapien
tcagactgccacctattagctgtat

SEQ ID NO: 2336891 - DNA, 25 bp, Homo sapien
tcttgaccacataacacttgtgcct

SEQ ID NO: 2336892 - DNA, 25 bp, Homo sapien
atcttgaccacataacacttgtgcc

SEQ ID NO: 2336893 - DNA, 25 bp, Homo sapien
taccatgggtttaatagcagttctg

SEQ ID NO: 2336894 - DNA, 25 bp, Homo sapien
ctgaactgcaccagaacaccaggtt

SEQ ID NO: 2336895 - DNA, 25 bp, Homo sapien
ggcgaaaatgctaattaccatgggt

SEQ ID NO: 2336896 - DNA, 25 bp, Homo sapien
gtctaagaccattcgtgtgtttgtg

SEQ ID NO: 2336897 - DNA, 25 bp, Homo sapien
tattcctctctgcaatcattatgag

SEQ ID NO: 2336898 - DNA, 25 bp, Homo sapien
gttggaagggcattagtggttctct

SEQ ID NO: 2336899 - DNA, 25 bp, Homo sapien
ggacaagtaaaatggccagaaccac

SEQ ID NO: 2336900 - DNA, 25 bp, Homo sapien
cattagtggttctctctaaaggaca

SEQ ID NO: 2336901 - DNA, 25 bp, Homo sapien
tgttatgcagatgaaggcttcagag

SEQ ID NO: 2336902 - DNA, 25 bp, Homo sapien
caagggagtgtctgagttgaaatag

SEQ ID NO: 2336903 - DNA, 25 bp, Homo sapien
tctgatttgtaattgattgaaagag

SEQ ID NO: 2336904 - DNA, 25 bp, Homo sapien
aaagagtttatctatagacctagag

SEQ ID NO: 2336905 - DNA, 25 bp, Homo sapien
tggcttttcgagtttgagactgagg

SEQ ID NO: 2336906 - DNA, 25 bp, Homo sapien
taagtgccaaacaaggaatatcagt

SEQ ID NO: 2336907 - DNA, 25 bp, Homo sapien
taccatgaccttcaatgatgagaga

SEQ ID NO: 2336908 - DNA, 25 bp, Homo sapien
ggagactacatcatacaaccaaatc

SEQ ID NO: 2336909 - DNA, 25 bp, Homo sapien
cagctttttcgagaacagttgtaga

SEQ ID NO: 2336910 - DNA, 25 bp, Homo sapien
gtagaaattccttgattctcagaca

SEQ ID NO: 2336911 - DNA, 25 bp, Homo sapien
caaaagatgacagctttttcgagaa

SEQ ID NO: 2336912 - DNA, 25 bp, Homo sapien
tctaaattagtcttgaggctacaaa

SEQ ID NO: 2336913 - DNA, 25 bp, Homo sapien
tgtctttatttccagcctatagaaa

SEQ ID NO: 2336914 - DNA, 25 bp, Homo sapien
tttccagcctatagaaaacagccat

SEQ ID NO: 2336915 - DNA, 25 bp, Homo sapien
tatttccagcctatagaaaacagcc

SEQ ID NO: 2336916 - DNA, 25 bp, Homo sapien
gtctgtctttatttccagcctatag

SEQ ID NO: 2336917 - DNA, 25 bp, Homo sapien
tccccattaaagttgtgataccatt

SEQ ID NO: 2336918 - DNA, 25 bp, Homo sapien
ctatcgaggtaactctgctcaggct

SEQ ID NO: 2336919 - DNA, 25 bp, Homo sapien
aggctttctgatgtggttgtcgcca

SEQ ID NO: 2336920 - DNA, 25 bp, Homo sapien
ggttgtcgccagagttggccttcat

SEQ ID NO: 2336921 - DNA, 25 bp, Homo sapien
tccatcattgtatacagcaactgct

SEQ ID NO: 2336922 - DNA, 25 bp, Homo sapien
gaagtcccttaagcatcaacctgat

SEQ ID NO: 2336923 - DNA, 25 bp, Homo sapien
tggattggtattaccagtgaagtcc

SEQ ID NO: 2336924 - DNA, 25 bp, Homo sapien
tcttcagtaggccattccatcattg

SEQ ID NO: 2336925 - DNA, 25 bp, Homo sapien
aactccaagtgttgtcatgaacttc

SEQ ID NO: 2336926 - DNA, 25 bp, Homo sapien
cctgagctttctggttacaagctgc

SEQ ID NO: 2336927 - DNA, 25 bp, Homo sapien
caataggtgacatttgcatgattcc

SEQ ID NO: 2336928 - DNA, 25 bp, Homo sapien
gatatatcctgcaacaactccaagt

SEQ ID NO: 2336929 - DNA, 25 bp, Homo sapien
ctcccaacgggacaaatctataaca

SEQ ID NO: 2336930 - DNA, 25 bp, Homo sapien
tatttctctcccaacgggacaaatc

SEQ ID NO: 2336931 - DNA, 25 bp, Homo sapien
ctctcccaacgggacaaatctataa

SEQ ID NO: 2336932 - DNA, 25 bp, Homo sapien
gagatatttctctcccaacgggaca

SEQ ID NO: 2336933 - DNA, 25 bp, Homo sapien
tggcgcgtctggagtctgccccttc

SEQ ID NO: 2336934 - DNA, 25 bp, Homo sapien
atcttcgcggcaagtgttacagttc

SEQ ID NO: 2336935 - DNA, 25 bp, Homo sapien
cagatcttcgcggcaagtgttacag

SEQ ID NO: 2336936 - DNA, 25 bp, Homo sapien
gctgcagatcttcgcggcaagtgtt

SEQ ID NO: 2336937 - DNA, 25 bp, Homo sapien
tagctttcttggtactccagcttgc

SEQ ID NO: 2336938 - DNA, 25 bp, Homo sapien
gaattacaccattagctttcttggt

SEQ ID NO: 2336939 - DNA, 25 bp, Homo sapien
tacaccattagctttcttggtactc

SEQ ID NO: 2336940 - DNA, 25 bp, Homo sapien
cattagctttcttggtactccagct

SEQ ID NO: 2336941 - DNA, 25 bp, Homo sapien
tattttacattctacgaagtgttgc

SEQ ID NO: 2336942 - DNA, 25 bp, Homo sapien
cgtttcagcattcagaatgcagtgc

SEQ ID NO: 2336943 - DNA, 25 bp, Homo sapien
ttatcctggaatagggtcaaagaga

SEQ ID NO: 2336944 - DNA, 25 bp, Homo sapien
tcctggaatagggtcaaagagaact

SEQ ID NO: 2336945 - DNA, 25 bp, Homo sapien
cagtggacagaagtgttcagactcc

SEQ ID NO: 2336946 - DNA, 25 bp, Homo sapien
taacttgcttcatgtaacgtgttgc

SEQ ID NO: 2336947 - DNA, 25 bp, Homo sapien
actgcagctgaggacgcagtggaca

SEQ ID NO: 2336948 - DNA, 25 bp, Homo sapien
cacagagtggaagtcctctcttggg

SEQ ID NO: 2336949 - DNA, 25 bp, Homo sapien
gcgcgcgctacttctcggacgagca

SEQ ID NO: 2336950 - DNA, 25 bp, Homo sapien
gcccagcgcgcgctacttctcggac

SEQ ID NO: 2336951 - DNA, 25 bp, Homo sapien
cttgcccagcgcgcgctacttctcg

SEQ ID NO: 2336952 - DNA, 25 bp, Homo sapien
gctacttctcggacgagcacccggc

SEQ ID NO: 2336953 - DNA, 25 bp, Homo sapien
gctgcgaagggtgagctgctcttct

SEQ ID NO: 2336954 - DNA, 25 bp, Homo sapien
cctcttgctcccccagctcgccgtc

SEQ ID NO: 2336955 - DNA, 25 bp, Homo sapien
tccccgtggagcacataggagctgc

SEQ ID NO: 2336956 - DNA, 25 bp, Homo sapien
catcagattgtagtgcagcggcttc

SEQ ID NO: 2336957 - DNA, 25 bp, Homo sapien
gattgtaattcctctgcgcgtccag

SEQ ID NO: 2336958 - DNA, 25 bp, Homo sapien
cagcgagcattgtgaccgcgagcaa

SEQ ID NO: 2336959 - DNA, 25 bp, Homo sapien
caccggtgagtcagtttgcgaagtt

SEQ ID NO: 2336960 - DNA, 25 bp, Homo sapien
gcattcatcttttggcaccggtgag

SEQ ID NO: 2336961 - DNA, 25 bp, Homo sapien
aggcatctgggagaccccggagttc

SEQ ID NO: 2336962 - DNA, 25 bp, Homo sapien
ggagttctgactgccctactccgct

SEQ ID NO: 2336963 - DNA, 25 bp, Homo sapien
cagccaaagggatgtccacggtgac

SEQ ID NO: 2336964 - DNA, 25 bp, Homo sapien
cttttgaactctgcttaggtggtaa

SEQ ID NO: 2336965 - DNA, 25 bp, Homo sapien
agccaaagggatgtccacggtgacc

SEQ ID NO: 2336966 - DNA, 25 bp, Homo sapien
gcagccaaagggatgtccacggtga

SEQ ID NO: 2336967 - DNA, 25 bp, Homo sapien
catgtgtaggcgaaaactgagtaac

SEQ ID NO: 2336968 - DNA, 25 bp, Homo sapien
tgtgaaaagtgatccgtaacccatc

SEQ ID NO: 2336969 - DNA, 25 bp, Homo sapien
tgaaagtagccttgtagattggctc

SEQ ID NO: 2336970 - DNA, 25 bp, Homo sapien
caaacacggaagtttccactggcat

SEQ ID NO: 2336971 - DNA, 25 bp, Homo sapien
gttccagagatgtacaatagtgcag

SEQ ID NO: 2336972 - DNA, 25 bp, Homo sapien
ggatggttacacagagagcttcaac

SEQ ID NO: 2336973 - DNA, 25 bp, Homo sapien
ttccaaaagagacaacagtagctgt

SEQ ID NO: 2336974 - DNA, 25 bp, Homo sapien
caggacagtgttgatctctaaggga

SEQ ID NO: 2336975 - DNA, 25 bp, Homo sapien
agcaacactgaatacaaaggttact

SEQ ID NO: 2336976 - DNA, 25 bp, Homo sapien
aagcaacactgaatacaaaggttac

SEQ ID NO: 2336977 - DNA, 25 bp, Homo sapien
gtctgtgtatggtccaatgagtaca

SEQ ID NO: 2336978 - DNA, 25 bp, Homo sapien
gaaatgagatgtcttcgtgttccgt

SEQ ID NO: 2336979 - DNA, 25 bp, Homo sapien
ctgtgtatggtccaatgagtacagc

SEQ ID NO: 2336980 - DNA, 25 bp, Homo sapien
ttcgtgttccgtgtctgtgtatggt

SEQ ID NO: 2336981 - DNA, 25 bp, Homo sapien
tggtcacccagagattcttctctgt

SEQ ID NO: 2336982 - DNA, 25 bp, Homo sapien
gatatcaaatcctataagaaccatt

SEQ ID NO: 2336983 - DNA, 25 bp, Homo sapien
tctgagtgacatcaacctttagaat

SEQ ID NO: 2336984 - DNA, 25 bp, Homo sapien
ttcttctgtatcatggtcacccaga

SEQ ID NO: 2336985 - DNA, 25 bp, Homo sapien
cacgcctacttccactatgtcgatt

SEQ ID NO: 2336986 - DNA, 25 bp, Homo sapien
tccactatgtcgattcgggagagaa

SEQ ID NO: 2336987 - DNA, 25 bp, Homo sapien
actgtgccctctctccacgcctact

SEQ ID NO: 2336988 - DNA, 25 bp, Homo sapien
atgtcgattcgggagagaatctcct

SEQ ID NO: 2336989 - DNA, 25 bp, Homo sapien
actgtgtctgagtgtcaactgccat

SEQ ID NO: 2336990 - DNA, 25 bp, Homo sapien
acaggctctcccatcgccgtgagag

SEQ ID NO: 2336991 - DNA, 25 bp, Homo sapien
ctttccaggcagagcgctgctcgct

SEQ ID NO: 2336992 - DNA, 25 bp, Homo sapien
gctgctcgctcggctccagttctga

SEQ ID NO: 2336993 - DNA, 25 bp, Homo sapien
gccgtgagagtagctttccaggcag

SEQ ID NO: 2336994 - DNA, 25 bp, Homo sapien
taatctctttgttatatggagagca

SEQ ID NO: 2336995 - DNA, 25 bp, Homo sapien
tatggagagcatagtccccggatcc

SEQ ID NO: 2336996 - DNA, 25 bp, Homo sapien
caaggaatagggcactttaaagtag

SEQ ID NO: 2336997 - DNA, 25 bp, Homo sapien
cccggatcctcttctgatagcatca

SEQ ID NO: 2336998 - DNA, 25 bp, Homo sapien
gctgtacttgcaatataagcacttg

SEQ ID NO: 2336999 - DNA, 25 bp, Homo sapien
acattagggtcaagctgggaagttc

SEQ ID NO: 2337000 - DNA, 25 bp, Homo sapien
tatacctggagtagataacagtgcc

SEQ ID NO: 2337001 - DNA, 25 bp, Homo sapien
aagttcccagccagttatacctgga

SEQ ID NO: 2337002 - DNA, 25 bp, Homo sapien
gaaaatagctgcaactatagttaag

SEQ ID NO: 2337003 - DNA, 25 bp, Homo sapien
gcaactatagttaagtcatccttca

SEQ ID NO: 2337004 - DNA, 25 bp, Homo sapien
ccttaatgagaaaatagctgcaact

SEQ ID NO: 2337005 - DNA, 25 bp, Homo sapien
tcctttacggggatccttaatgaga

SEQ ID NO: 2337006 - DNA, 25 bp, Homo sapien
caaatgcttgatactgggagaagga

SEQ ID NO: 2337007 - DNA, 25 bp, Homo sapien
tattccagtgcaaatgttgacccaa

SEQ ID NO: 2337008 - DNA, 25 bp, Homo sapien
cctctgagggtgactactggacaaa

SEQ ID NO: 2337009 - DNA, 25 bp, Homo sapien
taagcatcaaggtcatgttcgtagc

SEQ ID NO: 2337010 - DNA, 25 bp, Homo sapien
tcttattaacagcaactaaatggtg

SEQ ID NO: 2337011 - DNA, 25 bp, Homo sapien
caatgtcagcatttggcttgttttt

SEQ ID NO: 2337012 - DNA, 25 bp, Homo sapien
tggtgtttgtggcattttttatcat

SEQ ID NO: 2337013 - DNA, 25 bp, Homo sapien
ttcacaatgtcagcatttggcttgt

SEQ ID NO: 2337014 - DNA, 25 bp, Homo sapien
tgaaccctctatgggaggaagaaag

SEQ ID NO: 2337015 - DNA, 25 bp, Homo sapien
cgatggtaaagaacctaggaagcaa

SEQ ID NO: 2337016 - DNA, 25 bp, Homo sapien
tgacctttttgaggacatcaacctg

SEQ ID NO: 2337017 - DNA, 25 bp, Homo sapien
gctttgcaggaagtgagacctatct

SEQ ID NO: 2337018 - DNA, 25 bp, Homo sapien
attttttgttgtgcgtctagtactt

SEQ ID NO: 2337019 - DNA, 25 bp, Homo sapien
tgttgtgcgtctagtacttacaaaa

SEQ ID NO: 2337020 - DNA, 25 bp, Homo sapien
ttttgttgtgcgtctagtacttaca

SEQ ID NO: 2337021 - DNA, 25 bp, Homo sapien
ttgtgcgtctagtacttacaaaatc

SEQ ID NO: 2337022 - DNA, 25 bp, Homo sapien
taggccataataggcagccagtgtt

SEQ ID NO: 2337023 - DNA, 25 bp, Homo sapien
tctagcattctcctgaattagcatt

SEQ ID NO: 2337024 - DNA, 25 bp, Homo sapien
cgaacttctagcattctcctgaatt

SEQ ID NO: 2337025 - DNA, 25 bp, Homo sapien
cctgaattagcattaggccataata

SEQ ID NO: 2337026 - DNA, 25 bp, Homo sapien
agcagcatacggatgcttaggcaca

SEQ ID NO: 2337027 - DNA, 25 bp, Homo sapien
tatctcatgaacaatgaccatggtg

SEQ ID NO: 2337028 - DNA, 25 bp, Homo sapien
cagttctccatagcagcatacggat

SEQ ID NO: 2337029 - DNA, 25 bp, Homo sapien
tggtgacatatctcatgaacaatga

SEQ ID NO: 2337030 - DNA, 25 bp, Homo sapien
caaattcaaagtagtgagcaaaccc

SEQ ID NO: 2337031 - DNA, 25 bp, Homo sapien
agaggtagtctgtaccaacaaattc

SEQ ID NO: 2337032 - DNA, 25 bp, Homo sapien
caggcgtcacaaggtcaccaaacca

SEQ ID NO: 2337033 - DNA, 25 bp, Homo sapien
gccaggatagaggtagtctgtacca

SEQ ID NO: 2337034 - DNA, 25 bp, Homo sapien
ctcatgaatgagatgtcaagtcctc

SEQ ID NO: 2337035 - DNA, 25 bp, Homo sapien
cataatcgcctacgctatgtcacaa

SEQ ID NO: 2337036 - DNA, 25 bp, Homo sapien
tggcatagactgtggtgaccatttg

SEQ ID NO: 2337037 - DNA, 25 bp, Homo sapien
taggatgccctataacagcacagct

SEQ ID NO: 2337038 - DNA, 25 bp, Homo sapien
tataggcacattatccaccaatgcc

SEQ ID NO: 2337039 - DNA, 25 bp, Homo sapien
attatccaccaatgccaaaatcttc

SEQ ID NO: 2337040 - DNA, 25 bp, Homo sapien
gcacattatccaccaatgccaaaat

SEQ ID NO: 2337041 - DNA, 25 bp, Homo sapien
ctttgctataggcacattatccacc

SEQ ID NO: 2337042 - DNA, 25 bp, Homo sapien
tttctcatcgtgtcttcttggtggc

SEQ ID NO: 2337043 - DNA, 25 bp, Homo sapien
gacatatggaaatctagctttctca

SEQ ID NO: 2337044 - DNA, 25 bp, Homo sapien
ctatggatggtgtaagacaagagtc

SEQ ID NO: 2337045 - DNA, 25 bp, Homo sapien
ggtgcatcacaccaagatatcgttg

SEQ ID NO: 2337046 - DNA, 25 bp, Homo sapien
tatctttacaagacggtgattccat

SEQ ID NO: 2337047 - DNA, 25 bp, Homo sapien
acttagcataatttgtcccagacat

SEQ ID NO: 2337048 - DNA, 25 bp, Homo sapien
ccatggtatgacaaatggcaagatt

SEQ ID NO: 2337049 - DNA, 25 bp, Homo sapien
tcctcatcgacaaacacttaggctg

SEQ ID NO: 2337050 - DNA, 25 bp, Homo sapien
cagcacttcctgtgatactggatgg

SEQ ID NO: 2337051 - DNA, 25 bp, Homo sapien
aatatctgttgcctgcagcacttcc

SEQ ID NO: 2337052 - DNA, 25 bp, Homo sapien
tgggaactggccaaaccgtccagca

SEQ ID NO: 2337053 - DNA, 25 bp, Homo sapien
catgcagaacatcggtcagaaacct

SEQ ID NO: 2337054 - DNA, 25 bp, Homo sapien
caaagctgtagctcataaaatgaca

SEQ ID NO: 2337055 - DNA, 25 bp, Homo sapien
gctcataaaatgacacgaacctagt

SEQ ID NO: 2337056 - DNA, 25 bp, Homo sapien
taaaatgacacgaacctagtgactc

SEQ ID NO: 2337057 - DNA, 25 bp, Homo sapien
gacacgaacctagtgactctgtttt

SEQ ID NO: 2337058 - DNA, 25 bp, Homo sapien
tctgaatccaatggaagactaaaat

SEQ ID NO: 2337059 - DNA, 25 bp, Homo sapien
gaatatattataatcatcgttaaag

SEQ ID NO: 2337060 - DNA, 25 bp, Homo sapien
ccaatggaagactaaaatgccccaa

SEQ ID NO: 2337061 - DNA, 25 bp, Homo sapien
tatttctgaatccaatggaagacta

SEQ ID NO: 2337062 - DNA, 25 bp, Homo sapien
taaaattagccagcattcttattaa

SEQ ID NO: 2337063 - DNA, 25 bp, Homo sapien
cccctctggaaaactgaatggccca

SEQ ID NO: 2337064 - DNA, 25 bp, Homo sapien
gcaaacccctctggaaaactgaatg

SEQ ID NO: 2337065 - DNA, 25 bp, Homo sapien
tctggaaaactgaatggcccataaa

SEQ ID NO: 2337066 - DNA, 25 bp, Homo sapien
gctgctaggctaattcagcaaagtg

SEQ ID NO: 2337067 - DNA, 25 bp, Homo sapien
caagtttccacttcaagcaggctga

SEQ ID NO: 2337068 - DNA, 25 bp, Homo sapien
caggattccattatgtggcccatgc

SEQ ID NO: 2337069 - DNA, 25 bp, Homo sapien
tcctcagtttagagaaaggttcaag

SEQ ID NO: 2337070 - DNA, 25 bp, Homo sapien
gcattaccatacttatgaatggtta

SEQ ID NO: 2337071 - DNA, 25 bp, Homo sapien
taccatacttatgaatggttaaata

SEQ ID NO: 2337072 - DNA, 25 bp, Homo sapien
ttaccatacttatgaatggttaaat

SEQ ID NO: 2337073 - DNA, 25 bp, Homo sapien
cattaccatacttatgaatggttaa

SEQ ID NO: 2337074 - DNA, 25 bp, Homo sapien
tacttcttgtatatttacatatttc

SEQ ID NO: 2337075 - DNA, 25 bp, Homo sapien
tcttgtatatttacatatttcccat

SEQ ID NO: 2337076 - DNA, 25 bp, Homo sapien
tatatttacatatttcccatttctt

SEQ ID NO: 2337077 - DNA, 25 bp, Homo sapien
tgtatatttacatatttcccatttc

SEQ ID NO: 2337078 - DNA, 25 bp, Homo sapien
aaatgctgttgggtaattattattc

SEQ ID NO: 2337079 - DNA, 25 bp, Homo sapien
caagatggtgataacaggataaccc

SEQ ID NO: 2337080 - DNA, 25 bp, Homo sapien
gctttagttttagcactgatatcat

SEQ ID NO: 2337081 - DNA, 25 bp, Homo sapien
tgttattctgaagtttaagtgcttt

SEQ ID NO: 2337082 - DNA, 25 bp, Homo sapien
gatttgttagacacccaaataattg

SEQ ID NO: 2337083 - DNA, 25 bp, Homo sapien
tttcctaccacaatagttaatggaa

SEQ ID NO: 2337084 - DNA, 25 bp, Homo sapien
tatttcctaccacaatagttaatgg

SEQ ID NO: 2337085 - DNA, 25 bp, Homo sapien
tttgttagacacccaaataattgct

SEQ ID NO: 2337086 - DNA, 25 bp, Homo sapien
tccagttccttaggtcatagttgac

SEQ ID NO: 2337087 - DNA, 25 bp, Homo sapien
ctcatgattccggattaattgatca

SEQ ID NO: 2337088 - DNA, 25 bp, Homo sapien
agtttgattgatgttccccagcagc

SEQ ID NO: 2337089 - DNA, 25 bp, Homo sapien
ctaaaatagccagtttgattgatgt

SEQ ID NO: 2337090 - DNA, 25 bp, Homo sapien
ctaggctgaaggcatcatcgatcaa

SEQ ID NO: 2337091 - DNA, 25 bp, Homo sapien
gatcaagcccgctcggttactgaca

SEQ ID NO: 2337092 - DNA, 25 bp, Homo sapien
catcatcgatcaagcccgctcggtt

SEQ ID NO: 2337093 - DNA, 25 bp, Homo sapien
gcccgctcggttactgacagaaaga

SEQ ID NO: 2337094 - DNA, 25 bp, Homo sapien
tttctcaccatcatttcaaacccgt

SEQ ID NO: 2337095 - DNA, 25 bp, Homo sapien
tcacatgaacgactgcctcgaaacc

SEQ ID NO: 2337096 - DNA, 25 bp, Homo sapien
aaacccgtaacgattcacatgaacg

SEQ ID NO: 2337097 - DNA, 25 bp, Homo sapien
tcaccatcatttcaaacccgtaacg

SEQ ID NO: 2337098 - DNA, 25 bp, Homo sapien
gtagcaaacattagggtagacagca

SEQ ID NO: 2337099 - DNA, 25 bp, Homo sapien
taacaaatatacacgggcacaatcc

SEQ ID NO: 2337100 - DNA, 25 bp, Homo sapien
gtaataaacggatgacacaaaggct

SEQ ID NO: 2337101 - DNA, 25 bp, Homo sapien
tagacagcagtaataaacggatgac

SEQ ID NO: 2337102 - DNA, 25 bp, Homo sapien
aagccatgccgaaaaatgtcccaaa

SEQ ID NO: 2337103 - DNA, 25 bp, Homo sapien
gaattcccaggcttctaatatatct

SEQ ID NO: 2337104 - DNA, 25 bp, Homo sapien
ttcagtggctattatgctgaattcc

SEQ ID NO: 2337105 - DNA, 25 bp, Homo sapien
cagtttgcaaatgttgttaaggtta

SEQ ID NO: 2337106 - DNA, 25 bp, Homo sapien
tccttttgcacacatattctggtgg

SEQ ID NO: 2337107 - DNA, 25 bp, Homo sapien
cattaggcaggatattagagggatc

SEQ ID NO: 2337108 - DNA, 25 bp, Homo sapien
gaagtgatgtagtcctgttatctcc

SEQ ID NO: 2337109 - DNA, 25 bp, Homo sapien
catggacgccactctcaaatgaatc

SEQ ID NO: 2337110 - DNA, 25 bp, Homo sapien
tgggaaaagatcgtaatgagacaac

SEQ ID NO: 2337111 - DNA, 25 bp, Homo sapien
agtaattacccaaacataaagcctg

SEQ ID NO: 2337112 - DNA, 25 bp, Homo sapien
agaaggctcctctgactctttgttc

SEQ ID NO: 2337113 - DNA, 25 bp, Homo sapien
gatagcattgctaccttgcctacag

SEQ ID NO: 2337114 - DNA, 25 bp, Homo sapien
tggttagcatgaccacctggtgtcc

SEQ ID NO: 2337115 - DNA, 25 bp, Homo sapien
ccgttagaggcgtgaatcaactgca

SEQ ID NO: 2337116 - DNA, 25 bp, Homo sapien
atgaagcagctgagcaacaggaaac

SEQ ID NO: 2337117 - DNA, 25 bp, Homo sapien
tcctcaccctaattagatgaagcag

SEQ ID NO: 2337118 - DNA, 25 bp, Homo sapien
caaccagacttcatgtacccaatta

SEQ ID NO: 2337119 - DNA, 25 bp, Homo sapien
cattgatgttgggaaatcagggaaa

SEQ ID NO: 2337120 - DNA, 25 bp, Homo sapien
ttttaatcctaagaacacaaccaga

SEQ ID NO: 2337121 - DNA, 25 bp, Homo sapien
caaaaaacggtccttcagaaggatg

SEQ ID NO: 2337122 - DNA, 25 bp, Homo sapien
caaaactcatgtcactgaactttgc

SEQ ID NO: 2337123 - DNA, 25 bp, Homo sapien
ccactgagggtctggtgtgtgctct

SEQ ID NO: 2337124 - DNA, 25 bp, Homo sapien
caaagccactgagggtctggtgtgt

SEQ ID NO: 2337125 - DNA, 25 bp, Homo sapien
agcacagacaggacaaaactcatgt

SEQ ID NO: 2337126 - DNA, 25 bp, Homo sapien
cctctggtgcttctctttaatggta

SEQ ID NO: 2337127 - DNA, 25 bp, Homo sapien
atggtattctctttaaatgggttat

SEQ ID NO: 2337128 - DNA, 25 bp, Homo sapien
tctctttaatggtattctctttaaa

SEQ ID NO: 2337129 - DNA, 25 bp, Homo sapien
ctttaatggtattctctttaaatgg

SEQ ID NO: 2337130 - DNA, 25 bp, Homo sapien
ctagaggataaagagctcggctggc

SEQ ID NO: 2337131 - DNA, 25 bp, Homo sapien
aatattctgaggcaaatagccagcc

SEQ ID NO: 2337132 - DNA, 25 bp, Homo sapien
gttgtagttttccatgcggtccagt

SEQ ID NO: 2337133 - DNA, 25 bp, Homo sapien
gacaggtatctgataatctccagag

SEQ ID NO: 2337134 - DNA, 25 bp, Homo sapien
cttgatatatgttgttgcaacttgc

SEQ ID NO: 2337135 - DNA, 25 bp, Homo sapien
gatatatgttgttgcaacttgcttt

SEQ ID NO: 2337136 - DNA, 25 bp, Homo sapien
tgatatatgttgttgcaacttgctt

SEQ ID NO: 2337137 - DNA, 25 bp, Homo sapien
ttgatatatgttgttgcaacttgct

SEQ ID NO: 2337138 - DNA, 25 bp, Homo sapien
tcatgttggtaggatgcttgaacaa

SEQ ID NO: 2337139 - DNA, 25 bp, Homo sapien
gttggtaggatgcttgaacaagaga

SEQ ID NO: 2337140 - DNA, 25 bp, Homo sapien
catgttggtaggatgcttgaacaag

SEQ ID NO: 2337141 - DNA, 25 bp, Homo sapien
gtaggatgcttgaacaagagatcca

SEQ ID NO: 2337142 - DNA, 25 bp, Homo sapien
tctcatgcagctaaagtcacaatgg

SEQ ID NO: 2337143 - DNA, 25 bp, Homo sapien
aagtcacaatggcactagtagtaca

SEQ ID NO: 2337144 - DNA, 25 bp, Homo sapien
tagtagtacattattatacagctct

SEQ ID NO: 2337145 - DNA, 25 bp, Homo sapien
tgaaaggaagattgtctcatgcagc

SEQ ID NO: 2337146 - DNA, 25 bp, Homo sapien
tgttggtgacagtgcttgttgccaa

SEQ ID NO: 2337147 - DNA, 25 bp, Homo sapien
ggtgacagtgcttgttgccaaaact

SEQ ID NO: 2337148 - DNA, 25 bp, Homo sapien
gacagtgcttgttgccaaaactgca

SEQ ID NO: 2337149 - DNA, 25 bp, Homo sapien
gtgcttgttgccaaaactgcaggcc

SEQ ID NO: 2337150 - DNA, 25 bp, Homo sapien
caggtctgagtgtctatgaaagccc

SEQ ID NO: 2337151 - DNA, 25 bp, Homo sapien
tcattcaaatcacgacccaggtctg

SEQ ID NO: 2337152 - DNA, 25 bp, Homo sapien
gaaagccccactggattatattagg

SEQ ID NO: 2337153 - DNA, 25 bp, Homo sapien
tagggacactcatcaccagatttag

SEQ ID NO: 2337154 - DNA, 25 bp, Homo sapien
tcatccatatgaattcccagacatc

SEQ ID NO: 2337155 - DNA, 25 bp, Homo sapien
tcagaaactgctgtggtggaatgga

SEQ ID NO: 2337156 - DNA, 25 bp, Homo sapien
tcctgtcatcactgcaagttaaggc

SEQ ID NO: 2337157 - DNA, 25 bp, Homo sapien
cagtagtgacactcctgtacagtat

SEQ ID NO: 2337158 - DNA, 25 bp, Homo sapien
ttccaggcaaggtctcgaccatgtg

SEQ ID NO: 2337159 - DNA, 25 bp, Homo sapien
agaattcagtgacagatttagaagc

SEQ ID NO: 2337160 - DNA, 25 bp, Homo sapien
gctacatggattatgacatcaattg

SEQ ID NO: 2337161 - DNA, 25 bp, Homo sapien
catgtggatttcgagctacatggat

SEQ ID NO: 2337162 - DNA, 25 bp, Homo sapien
gaaaatgattccataaaaggcaaga

SEQ ID NO: 2337163 - DNA, 25 bp, Homo sapien
cactgtcagatcctttgatatgatt

SEQ ID NO: 2337164 - DNA, 25 bp, Homo sapien
actgtcagatcctttgatatgatta

SEQ ID NO: 2337165 - DNA, 25 bp, Homo sapien
ggaaaatgattccataaaaggcaag

SEQ ID NO: 2337166 - DNA, 25 bp, Homo sapien
ccactgatgagtttggaattcataa

SEQ ID NO: 2337167 - DNA, 25 bp, Homo sapien
ggaattcataaacaatgcttctcca

SEQ ID NO: 2337168 - DNA, 25 bp, Homo sapien
taagaaattctgtgacaccactgat

SEQ ID NO: 2337169 - DNA, 25 bp, Homo sapien
ttgagttcaccttcagtattaagaa

SEQ ID NO: 2337170 - DNA, 25 bp, Homo sapien
cgcacattggcttcgacagtttcca

SEQ ID NO: 2337171 - DNA, 25 bp, Homo sapien
ggaaaagctcgtcttggtaaagcat

SEQ ID NO: 2337172 - DNA, 25 bp, Homo sapien
taaagcattttccagcgcacattgg

SEQ ID NO: 2337173 - DNA, 25 bp, Homo sapien
tccacagctcgtgagaaagaagcag

SEQ ID NO: 2337174 - DNA, 25 bp, Homo sapien
cataatgcccatcctaggtgtaaca

SEQ ID NO: 2337175 - DNA, 25 bp, Homo sapien
gaagcatctaagcaacgtttggaga

SEQ ID NO: 2337176 - DNA, 25 bp, Homo sapien
cttaagggatggcacaactggcaca

SEQ ID NO: 2337177 - DNA, 25 bp, Homo sapien
cattggtaccactatactgttgagc

SEQ ID NO: 2337178 - DNA, 25 bp, Homo sapien
tgtggtccactcgtaaaacctttgc

SEQ ID NO: 2337179 - DNA, 25 bp, Homo sapien
gaaataagttgacctctgcagaggc

SEQ ID NO: 2337180 - DNA, 25 bp, Homo sapien
tcctccacatgcaaagacagaagtt

SEQ ID NO: 2337181 - DNA, 25 bp, Homo sapien
catacgctatgtaaaggtgggaaca

SEQ ID NO: 2337182 - DNA, 25 bp, Homo sapien
gtctgctaaagtccaccactgtcat

SEQ ID NO: 2337183 - DNA, 25 bp, Homo sapien
catcaatatggtaagcctattttcc

SEQ ID NO: 2337184 - DNA, 25 bp, Homo sapien
tatggtaagcctattttccaatccc

SEQ ID NO: 2337185 - DNA, 25 bp, Homo sapien
gcatattctctgtctgctaaagtcc

SEQ ID NO: 2337186 - DNA, 25 bp, Homo sapien
ctaaccactggatctacacaaataa

SEQ ID NO: 2337187 - DNA, 25 bp, Homo sapien
ccactggatctacacaaataaccaa

SEQ ID NO: 2337188 - DNA, 25 bp, Homo sapien
accaatggcaggtatcagatctact

SEQ ID NO: 2337189 - DNA, 25 bp, Homo sapien
caactgaggaaccaatggcaggtat

SEQ ID NO: 2337190 - DNA, 25 bp, Homo sapien
gcttctcttgagtaacaaaggcaga

SEQ ID NO: 2337191 - DNA, 25 bp, Homo sapien
gacttgtttgggtaataatgcttcc

SEQ ID NO: 2337192 - DNA, 25 bp, Homo sapien
actggtgacttaactcgatgtgtac

SEQ ID NO: 2337193 - DNA, 25 bp, Homo sapien
tgttcccctaagctgtaactggtga

SEQ ID NO: 2337194 - DNA, 25 bp, Homo sapien
gaagatacgcatccagaaacagtag

SEQ ID NO: 2337195 - DNA, 25 bp, Homo sapien
ccagaaacagtagcttggactgtgt

SEQ ID NO: 2337196 - DNA, 25 bp, Homo sapien
tggcaaaatgccactgcaacaaatg

SEQ ID NO: 2337197 - DNA, 25 bp, Homo sapien
gaagatgatctttaactcaatgaag

SEQ ID NO: 2337198 - DNA, 25 bp, Homo sapien
tagagggcatttgaagtccacgtcc

SEQ ID NO: 2337199 - DNA, 25 bp, Homo sapien
cacgtcccccctgagctttgagggt

SEQ ID NO: 2337200 - DNA, 25 bp, Homo sapien
gagggcatttgaagtccacgtcccc

SEQ ID NO: 2337201 - DNA, 25 bp, Homo sapien
aaggtagagggcatttgaagtccac

SEQ ID NO: 2337202 - DNA, 25 bp, Homo sapien
ctgggtacatgaagcagcatagtgt

SEQ ID NO: 2337203 - DNA, 25 bp, Homo sapien
ctcagaggcttagggtacaattgtt

SEQ ID NO: 2337204 - DNA, 25 bp, Homo sapien
caattgttagtgaaagctgtggtga

SEQ ID NO: 2337205 - DNA, 25 bp, Homo sapien
tatgatctctatctactcagtacat

SEQ ID NO: 2337206 - DNA, 25 bp, Homo sapien
cttctgatgccagatatccagggag

SEQ ID NO: 2337207 - DNA, 25 bp, Homo sapien
aagaacagcatggtctatgtccctg

SEQ ID NO: 2337208 - DNA, 25 bp, Homo sapien
ctgcaagaacagcatggtctatgtc

SEQ ID NO: 2337209 - DNA, 25 bp, Homo sapien
gatgccagatatccagggagctgat

SEQ ID NO: 2337210 - DNA, 25 bp, Homo sapien
tcttctgcattggttacacatctct

SEQ ID NO: 2337211 - DNA, 25 bp, Homo sapien
cattggttacacatctcttttacca

SEQ ID NO: 2337212 - DNA, 25 bp, Homo sapien
ctcttctgcattggttacacatctc

SEQ ID NO: 2337213 - DNA, 25 bp, Homo sapien
ctgcattggttacacatctctttta

SEQ ID NO: 2337214 - DNA, 25 bp, Homo sapien
acatcctcctttagatctcttccaa

SEQ ID NO: 2337215 - DNA, 25 bp, Homo sapien
catttcacttttagatagcgagtgc

SEQ ID NO: 2337216 - DNA, 25 bp, Homo sapien
ccaatctccaccgttgtaacaccaa

SEQ ID NO: 2337217 - DNA, 25 bp, Homo sapien
tcctttttcgctcaagacatttcac

SEQ ID NO: 2337218 - DNA, 25 bp, Homo sapien
taattaatcgtaggtcatgaagcac

SEQ ID NO: 2337219 - DNA, 25 bp, Homo sapien
tgttatatccgagagtgctgcccaa

SEQ ID NO: 2337220 - DNA, 25 bp, Homo sapien
gaaacttatcctcctcagtactcag

SEQ ID NO: 2337221 - DNA, 25 bp, Homo sapien
tgctgcccaatatctccaacaagag

SEQ ID NO: 2337222 - DNA, 25 bp, Homo sapien
gggaggtctggaaccgatctcaaac

SEQ ID NO: 2337223 - DNA, 25 bp, Homo sapien
gcttgtttatccgtgttcttctgaa

SEQ ID NO: 2337224 - DNA, 25 bp, Homo sapien
gaacatttagatggttcctggaatt

SEQ ID NO: 2337225 - DNA, 25 bp, Homo sapien
ggaaccgatctcaaacaacaaatag

SEQ ID NO: 2337226 - DNA, 25 bp, Homo sapien
ccggatcaaaccgacaattacccag

SEQ ID NO: 2337227 - DNA, 25 bp, Homo sapien
gatcaaaccgacaattacccagcag

SEQ ID NO: 2337228 - DNA, 25 bp, Homo sapien
tcaaaccgacaattacccagcaggt

SEQ ID NO: 2337229 - DNA, 25 bp, Homo sapien
aaaccgacaattacccagcaggtgt

SEQ ID NO: 2337230 - DNA, 25 bp, Homo sapien
ctcctccattttcaccttcgtggat

SEQ ID NO: 2337231 - DNA, 25 bp, Homo sapien
cagctcttccctgttcttaagccct

SEQ ID NO: 2337232 - DNA, 25 bp, Homo sapien
cccagctcttccctgttcttaagcc

SEQ ID NO: 2337233 - DNA, 25 bp, Homo sapien
ccctgttcttaagccctcctccatt

SEQ ID NO: 2337234 - DNA, 25 bp, Homo sapien
tctcttgttgcctctgaacattcca

SEQ ID NO: 2337235 - DNA, 25 bp, Homo sapien
tatctcttgttgcctctgaacattc

SEQ ID NO: 2337236 - DNA, 25 bp, Homo sapien
tcttgttgcctctgaacattccatt

SEQ ID NO: 2337237 - DNA, 25 bp, Homo sapien
ctaatacgttatctcttgttgcctc

SEQ ID NO: 2337238 - DNA, 25 bp, Homo sapien
taattgaagcacgacatgtcacagg

SEQ ID NO: 2337239 - DNA, 25 bp, Homo sapien
catgaagtttcaagccttcactgag

SEQ ID NO: 2337240 - DNA, 25 bp, Homo sapien
catgtcacaggaaatgattgttgcc

SEQ ID NO: 2337241 - DNA, 25 bp, Homo sapien
cacactccatggcttcccttttgta

SEQ ID NO: 2337242 - DNA, 25 bp, Homo sapien
gctaggaaagcctgggattgtaatt

SEQ ID NO: 2337243 - DNA, 25 bp, Homo sapien
tcatttaactgactcccataactct

SEQ ID NO: 2337244 - DNA, 25 bp, Homo sapien
gcctgggattgtaatttcacttcct

SEQ ID NO: 2337245 - DNA, 25 bp, Homo sapien
taactgactcccataactctgactc

SEQ ID NO: 2337246 - DNA, 25 bp, Homo sapien
agccggaggcatattcagtggagaa

SEQ ID NO: 2337247 - DNA, 25 bp, Homo sapien
tagctgaagaggtattgggtacagt

SEQ ID NO: 2337248 - DNA, 25 bp, Homo sapien
tcagccggaggcatattcagtggag

SEQ ID NO: 2337249 - DNA, 25 bp, Homo sapien
ctgcctctttttagctgaagaggta

SEQ ID NO: 2337250 - DNA, 25 bp, Homo sapien
cagaagtttttacctattcacagat

SEQ ID NO: 2337251 - DNA, 25 bp, Homo sapien
catgtgttatgggttctattgaagt

SEQ ID NO: 2337252 - DNA, 25 bp, Homo sapien
ctccccttgccatcaaaagtcatca

SEQ ID NO: 2337253 - DNA, 25 bp, Homo sapien
tctattgaagtttccactctaggaa

SEQ ID NO: 2337254 - DNA, 25 bp, Homo sapien
gttttacatacttgccacattcatg

SEQ ID NO: 2337255 - DNA, 25 bp, Homo sapien
tagatctggtatgttccagaaaaac

SEQ ID NO: 2337256 - DNA, 25 bp, Homo sapien
gccacattcatgtagatctggtatg

SEQ ID NO: 2337257 - DNA, 25 bp, Homo sapien
ctgatcgttttacatacttgccaca

SEQ ID NO: 2337258 - DNA, 25 bp, Homo sapien
ttgtatacttcgcacctgatatggc

SEQ ID NO: 2337259 - DNA, 25 bp, Homo sapien
taatttccagaagttgaggccggga

SEQ ID NO: 2337260 - DNA, 25 bp, Homo sapien
cagtgctcaggaacttacagctcca

SEQ ID NO: 2337261 - DNA, 25 bp, Homo sapien
gcctggagcccacctcatttcaatg

SEQ ID NO: 2337262 - DNA, 25 bp, Homo sapien
tattccaagcagaactaagagtcac

SEQ ID NO: 2337263 - DNA, 25 bp, Homo sapien
ccccatgcaaatgtagtattccaag

SEQ ID NO: 2337264 - DNA, 25 bp, Homo sapien
gagtcactacaatactgcctagtaa

SEQ ID NO: 2337265 - DNA, 25 bp, Homo sapien
tacttctaaaaagctatcataatgc

SEQ ID NO: 2337266 - DNA, 25 bp, Homo sapien
tgaaatattcacgttttaaggaatc

SEQ ID NO: 2337267 - DNA, 25 bp, Homo sapien
gacacattcaaaccctaagcttttg

SEQ ID NO: 2337268 - DNA, 25 bp, Homo sapien
aaatgagaacccttgctgatcctgg

SEQ ID NO: 2337269 - DNA, 25 bp, Homo sapien
gaaaaggatggaatctctgatgcat

SEQ ID NO: 2337270 - DNA, 25 bp, Homo sapien
tgcaagccccccagaaatagtaatc

SEQ ID NO: 2337271 - DNA, 25 bp, Homo sapien
tctatacccgtgaaatagatgcaag

SEQ ID NO: 2337272 - DNA, 25 bp, Homo sapien
ggactatggcatgctttatacacag

SEQ ID NO: 2337273 - DNA, 25 bp, Homo sapien
catatagaatgtaaggtgaagcttc

SEQ ID NO: 2337274 - DNA, 25 bp, Homo sapien
gaagactgtgactgtataacattgc

SEQ ID NO: 2337275 - DNA, 25 bp, Homo sapien
gactgtgactgtataacattgctca

SEQ ID NO: 2337276 - DNA, 25 bp, Homo sapien
ttaaagaagactgtgactgtataac

SEQ ID NO: 2337277 - DNA, 25 bp, Homo sapien
cttaatgatcaggttaaactcctct

SEQ ID NO: 2337278 - DNA, 25 bp, Homo sapien
ggcttctttcagtcttttgtgctga

SEQ ID NO: 2337279 - DNA, 25 bp, Homo sapien
cagtcttttgtgctgagcacgtttt

SEQ ID NO: 2337280 - DNA, 25 bp, Homo sapien
tttcagtcttttgtgctgagcacgt

SEQ ID NO: 2337281 - DNA, 25 bp, Homo sapien
ttctttcagtcttttgtgctgagca

SEQ ID NO: 2337282 - DNA, 25 bp, Homo sapien
tgttttaatccacattctggagcct

SEQ ID NO: 2337283 - DNA, 25 bp, Homo sapien
ccttacactgggttacaatgtgctc

SEQ ID NO: 2337284 - DNA, 25 bp, Homo sapien
aactgtcaggtcgattatgttcctc

SEQ ID NO: 2337285 - DNA, 25 bp, Homo sapien
tgtattgtgaagtcctcgtagtgaa

SEQ ID NO: 2337286 - DNA, 25 bp, Homo sapien
cagagaatcaaggatcttattacta

SEQ ID NO: 2337287 - DNA, 25 bp, Homo sapien
caaggatcttattactatgaatctg

SEQ ID NO: 2337288 - DNA, 25 bp, Homo sapien
gaatcaaggatcttattactatgaa

SEQ ID NO: 2337289 - DNA, 25 bp, Homo sapien
ttccagagaatcaaggatcttatta

SEQ ID NO: 2337290 - DNA, 25 bp, Homo sapien
agtcagcattaatgatatgatcaag

SEQ ID NO: 2337291 - DNA, 25 bp, Homo sapien
gtctggaaggtggatatggatgcaa

SEQ ID NO: 2337292 - DNA, 25 bp, Homo sapien
gcattaatgatatgatcaagaacag

SEQ ID NO: 2337293 - DNA, 25 bp, Homo sapien
ggatatggatgcaagtcagcattaa

SEQ ID NO: 2337294 - DNA, 25 bp, Homo sapien
ttacgtggcacagggaatatcttcc

SEQ ID NO: 2337295 - DNA, 25 bp, Homo sapien
tccagttggatttgtgtgttggtaa

SEQ ID NO: 2337296 - DNA, 25 bp, Homo sapien
tgcctgagaaatattcacagttggt

SEQ ID NO: 2337297 - DNA, 25 bp, Homo sapien
tggtaaagtggctaaatgaacaatt

SEQ ID NO: 2337298 - DNA, 25 bp, Homo sapien
atgtgaggaaattgcaggtttgtta

SEQ ID NO: 2337299 - DNA, 25 bp, Homo sapien
tgtgaggaaattgcaggtttgttac

SEQ ID NO: 2337300 - DNA, 25 bp, Homo sapien
catgtgaggaaattgcaggtttgtt

SEQ ID NO: 2337301 - DNA, 25 bp, Homo sapien
atcgttttcttcactacactacgtg

SEQ ID NO: 2337302 - DNA, 25 bp, Homo sapien
gaagcctgaatagggaatgttgttt

SEQ ID NO: 2337303 - DNA, 25 bp, Homo sapien
tcttcactacactacgtggaggtag

SEQ ID NO: 2337304 - DNA, 25 bp, Homo sapien
cactacactacgtggaggtagaaat

SEQ ID NO: 2337305 - DNA, 25 bp, Homo sapien
aactttaaccataggttgtgatgac

SEQ ID NO: 2337306 - DNA, 25 bp, Homo sapien
gatttgcctattctctgttcccttc

SEQ ID NO: 2337307 - DNA, 25 bp, Homo sapien
tgaaaactttaaccataggttgtga

SEQ ID NO: 2337308 - DNA, 25 bp, Homo sapien
ttaacatctgtacatcccagtattc

SEQ ID NO: 2337309 - DNA, 25 bp, Homo sapien
actatttctgctgcacagttgcaaa

SEQ ID NO: 2337310 - DNA, 25 bp, Homo sapien
gactggtgtcaggtcttactgacat

SEQ ID NO: 2337311 - DNA, 25 bp, Homo sapien
tgcaaacactatttatacaggggac

SEQ ID NO: 2337312 - DNA, 25 bp, Homo sapien
ttactatttctgctgcacagttgca

SEQ ID NO: 2337313 - DNA, 25 bp, Homo sapien
tgagagtgaagatgagtactcattg

SEQ ID NO: 2337314 - DNA, 25 bp, Homo sapien
gagagtgaagatgagtactcattgt

SEQ ID NO: 2337315 - DNA, 25 bp, Homo sapien
tcctgagctgtaataaccttacatc

SEQ ID NO: 2337316 - DNA, 25 bp, Homo sapien
ctttcctgagctgtaataaccttac

SEQ ID NO: 2337317 - DNA, 25 bp, Homo sapien
gctgtaataaccttacatctccagc

SEQ ID NO: 2337318 - DNA, 25 bp, Homo sapien
tgagctgtaataaccttacatctcc

SEQ ID NO: 2337319 - DNA, 25 bp, Homo sapien
gaagttttgcattgaaaaacagact

SEQ ID NO: 2337320 - DNA, 25 bp, Homo sapien
ttgattcgaagttttgcattgaaaa

SEQ ID NO: 2337321 - DNA, 25 bp, Homo sapien
gaaaagaaacttgggccgacagtga

SEQ ID NO: 2337322 - DNA, 25 bp, Homo sapien
acttgggccgacagtgaactttttg

SEQ ID NO: 2337323 - DNA, 25 bp, Homo sapien
ctcttccgctgccagaacatctttt

SEQ ID NO: 2337324 - DNA, 25 bp, Homo sapien
cgctgccagaacatcttttcggatg

SEQ ID NO: 2337325 - DNA, 25 bp, Homo sapien
ttccgctgccagaacatcttttcgg

SEQ ID NO: 2337326 - DNA, 25 bp, Homo sapien
ccagaacatcttttcggatgctgtg

SEQ ID NO: 2337327 - DNA, 25 bp, Homo sapien
catgtaagagatatattaaacacca

SEQ ID NO: 2337328 - DNA, 25 bp, Homo sapien
tgtaagagatatattaaacaccact

SEQ ID NO: 2337329 - DNA, 25 bp, Homo sapien
caacctgaaggtgcatgtaagagat

SEQ ID NO: 2337330 - DNA, 25 bp, Homo sapien
ctcttgcaacctgaaggtgcatgta

SEQ ID NO: 2337331 - DNA, 25 bp, Homo sapien
tgcattgaggtacactgatattcac

SEQ ID NO: 2337332 - DNA, 25 bp, Homo sapien
tcagctgttacaagtcaaatcatca

SEQ ID NO: 2337333 - DNA, 25 bp, Homo sapien
gtttgcattgaggtacactgatatt

SEQ ID NO: 2337334 - DNA, 25 bp, Homo sapien
gcattgaggtacactgatattcaca

SEQ ID NO: 2337335 - DNA, 25 bp, Homo sapien
ttactctcatctccagctgtacttg

SEQ ID NO: 2337336 - DNA, 25 bp, Homo sapien
catctccagctgtacttgttcactc

SEQ ID NO: 2337337 - DNA, 25 bp, Homo sapien
ctcatctccagctgtacttgttcac

SEQ ID NO: 2337338 - DNA, 25 bp, Homo sapien
ccagctgtacttgttcactctccat

SEQ ID NO: 2337339 - DNA, 25 bp, Homo sapien
tttaagggcgctgtcttccgaaatc

SEQ ID NO: 2337340 - DNA, 25 bp, Homo sapien
aaatcctcatcaattcagaatgtgt

SEQ ID NO: 2337341 - DNA, 25 bp, Homo sapien
tacatcgaatatcattgcactctct

SEQ ID NO: 2337342 - DNA, 25 bp, Homo sapien
gaatatcattgcactctctgctaca

SEQ ID NO: 2337343 - DNA, 25 bp, Homo sapien
tcctctatacatgattgtttgtaca

SEQ ID NO: 2337344 - DNA, 25 bp, Homo sapien
tgcttcatgttgctctgcttcccat

SEQ ID NO: 2337345 - DNA, 25 bp, Homo sapien
atgttgctctgcttcccataggaat

SEQ ID NO: 2337346 - DNA, 25 bp, Homo sapien
ccataggaattgctgctggctgcca

SEQ ID NO: 2337347 - DNA, 25 bp, Homo sapien
ctgcttcccataggaattgctgctg

SEQ ID NO: 2337348 - DNA, 25 bp, Homo sapien
agataatttttaatcctggtatcct

SEQ ID NO: 2337349 - DNA, 25 bp, Homo sapien
gaggaaaataggaggagaaaagata

SEQ ID NO: 2337350 - DNA, 25 bp, Homo sapien
tttttaatcctggtatccttcttca

SEQ ID NO: 2337351 - DNA, 25 bp, Homo sapien
ctgtgaggaaaataggaggagaaaa

SEQ ID NO: 2337352 - DNA, 25 bp, Homo sapien
ttatgactgacatcctcataaattg

SEQ ID NO: 2337353 - DNA, 25 bp, Homo sapien
cgtttcaacacatgctatatttggt

SEQ ID NO: 2337354 - DNA, 25 bp, Homo sapien
ctctggctttctttacacgtttcaa

SEQ ID NO: 2337355 - DNA, 25 bp, Homo sapien
ggctttctttacacgtttcaacaca

SEQ ID NO: 2337356 - DNA, 25 bp, Homo sapien
gctatatttggtccatgctggaaaa

SEQ ID NO: 2337357 - DNA, 25 bp, Homo sapien
cagtccacagcttttcttcacatac

SEQ ID NO: 2337358 - DNA, 25 bp, Homo sapien
cctttgattcctcagtccacagctt

SEQ ID NO: 2337359 - DNA, 25 bp, Homo sapien
tcagtccacagcttttcttcacata

SEQ ID NO: 2337360 - DNA, 25 bp, Homo sapien
ttgattcctcagtccacagcttttc

SEQ ID NO: 2337361 - DNA, 25 bp, Homo sapien
tccattgtcatagagtatgcccagg

SEQ ID NO: 2337362 - DNA, 25 bp, Homo sapien
attgtcatagagtatgcccaggtgc

SEQ ID NO: 2337363 - DNA, 25 bp, Homo sapien
aagggttttgacacaactgattaag

SEQ ID NO: 2337364 - DNA, 25 bp, Homo sapien
tactgcatacctcacagaaagggtt

SEQ ID NO: 2337365 - DNA, 25 bp, Homo sapien
gagtcaccacctcaatgatccagaa

SEQ ID NO: 2337366 - DNA, 25 bp, Homo sapien
cacagatggattctgtttgtgacat

SEQ ID NO: 2337367 - DNA, 25 bp, Homo sapien
aacacagatggattctgtttgtgac

SEQ ID NO: 2337368 - DNA, 25 bp, Homo sapien
cttgagtcaccacctcaatgatcca

SEQ ID NO: 2337369 - DNA, 25 bp, Homo sapien
gaggtaatatgtccaacagtagcaa

SEQ ID NO: 2337370 - DNA, 25 bp, Homo sapien
tagaggtaatatgtccaacagtagc

SEQ ID NO: 2337371 - DNA, 25 bp, Homo sapien
gtaatatgtccaacagtagcaaatg

SEQ ID NO: 2337372 - DNA, 25 bp, Homo sapien
ggtaatatgtccaacagtagcaaat

SEQ ID NO: 2337373 - DNA, 25 bp, Homo sapien
caagtgaggttatgggacaaactgc

SEQ ID NO: 2337374 - DNA, 25 bp, Homo sapien
ccccaaactggagagaacaataggc

SEQ ID NO: 2337375 - DNA, 25 bp, Homo sapien
cagagattcacaacctatcagggca

SEQ ID NO: 2337376 - DNA, 25 bp, Homo sapien
tctggaaacctgctcagtttgtggg

SEQ ID NO: 2337377 - DNA, 25 bp, Homo sapien
tctcttggtgacttggcacctccaa

SEQ ID NO: 2337378 - DNA, 25 bp, Homo sapien
atgatgcccagttgatgcaagagag

SEQ ID NO: 2337379 - DNA, 25 bp, Homo sapien
tgatgcccagttgatgcaagagaga

SEQ ID NO: 2337380 - DNA, 25 bp, Homo sapien
tctgtgcacctaagtcttcctggtt

SEQ ID NO: 2337381 - DNA, 25 bp, Homo sapien
ggtctgtgcacctaagtcttcctgg

SEQ ID NO: 2337382 - DNA, 25 bp, Homo sapien
tgcacctaagtcttcctggttgtga

SEQ ID NO: 2337383 - DNA, 25 bp, Homo sapien
tccagggtctgtgcacctaagtctt

SEQ ID NO: 2337384 - DNA, 25 bp, Homo sapien
tatcaaatttcttagtagctgatta

SEQ ID NO: 2337385 - DNA, 25 bp, Homo sapien
ctatcaaatttcttagtagctgatt

SEQ ID NO: 2337386 - DNA, 25 bp, Homo sapien
ttcttagtagctgattatgaagaag

SEQ ID NO: 2337387 - DNA, 25 bp, Homo sapien
cttagtagctgattatgaagaagta

SEQ ID NO: 2337388 - DNA, 25 bp, Homo sapien
attgcttacaccagctttcattatc

SEQ ID NO: 2337389 - DNA, 25 bp, Homo sapien
ttttgattgcttacaccagctttca

SEQ ID NO: 2337390 - DNA, 25 bp, Homo sapien
tgattgcttacaccagctttcatta

SEQ ID NO: 2337391 - DNA, 25 bp, Homo sapien
tttgattgcttacaccagctttcat

SEQ ID NO: 2337392 - DNA, 25 bp, Homo sapien
cctgttctgggtcttaatggagtga

SEQ ID NO: 2337393 - DNA, 25 bp, Homo sapien
tccaggaggcagtttaaacttccaa

SEQ ID NO: 2337394 - DNA, 25 bp, Homo sapien
gccagtagcctaacctccctatgtg

SEQ ID NO: 2337395 - DNA, 25 bp, Homo sapien
tagcagcaagcccagtattcttttg

SEQ ID NO: 2337396 - DNA, 25 bp, Homo sapien
cattttctgggtccctatgtgcttc

SEQ ID NO: 2337397 - DNA, 25 bp, Homo sapien
attttctgggtccctatgtgcttcc

SEQ ID NO: 2337398 - DNA, 25 bp, Homo sapien
ccattttctgggtccctatgtgctt

SEQ ID NO: 2337399 - DNA, 25 bp, Homo sapien
gaagtgagaaatacattccagcttc

SEQ ID NO: 2337400 - DNA, 25 bp, Homo sapien
cttccactgatttggggcttgctca

SEQ ID NO: 2337401 - DNA, 25 bp, Homo sapien
agtgagaaatacattccagcttcca

SEQ ID NO: 2337402 - DNA, 25 bp, Homo sapien
aggaagtgagaaatacattccagct

SEQ ID NO: 2337403 - DNA, 25 bp, Homo sapien
aggaaggcttcaaacttcacatttc

SEQ ID NO: 2337404 - DNA, 25 bp, Homo sapien
aaaaggaaggcttcaaacttcacat

SEQ ID NO: 2337405 - DNA, 25 bp, Homo sapien
tgagcaaaaaaaggaaggcttcaaa

SEQ ID NO: 2337406 - DNA, 25 bp, Homo sapien
ctgagcaaaaaaaggaaggcttcaa

SEQ ID NO: 2337407 - DNA, 25 bp, Homo sapien
ttcttcactgcccaacagactctga

SEQ ID NO: 2337408 - DNA, 25 bp, Homo sapien
ctgcccaacagactctgacagcttg

SEQ ID NO: 2337409 - DNA, 25 bp, Homo sapien
tgttgagggttcttacaccaactaa

SEQ ID NO: 2337410 - DNA, 25 bp, Homo sapien
caggtgttgagggttcttacaccaa

SEQ ID NO: 2337411 - DNA, 25 bp, Homo sapien
cattaactcatgatagacctttgaa

SEQ ID NO: 2337412 - DNA, 25 bp, Homo sapien
caaagatgtggatgatttaacactg

SEQ ID NO: 2337413 - DNA, 25 bp, Homo sapien
attacctataattgcagatttccac

SEQ ID NO: 2337414 - DNA, 25 bp, Homo sapien
tccaatctgtaaggcaggttacaaa

SEQ ID NO: 2337415 - DNA, 25 bp, Homo sapien
ccaagatggtcgataactcctggcc

SEQ ID NO: 2337416 - DNA, 25 bp, Homo sapien
gaagtcttcatgtcagtcgccaaag

SEQ ID NO: 2337417 - DNA, 25 bp, Homo sapien
catattactgaaagccgaagtcttc

SEQ ID NO: 2337418 - DNA, 25 bp, Homo sapien
gacatgagatactgcagtttgccca

SEQ ID NO: 2337419 - DNA, 25 bp, Homo sapien
ttgagtacttatttccacatatctc

SEQ ID NO: 2337420 - DNA, 25 bp, Homo sapien
gagtacttatttccacatatctctc

SEQ ID NO: 2337421 - DNA, 25 bp, Homo sapien
agtacttatttccacatatctctcc

SEQ ID NO: 2337422 - DNA, 25 bp, Homo sapien
tgagtacttatttccacatatctct

SEQ ID NO: 2337423 - DNA, 25 bp, Homo sapien
gagggactgattgctaaggtcataa

SEQ ID NO: 2337424 - DNA, 25 bp, Homo sapien
gattggttcagccagtagtcttcag

SEQ ID NO: 2337425 - DNA, 25 bp, Homo sapien
tctgccaatttgaccagtacttgct

SEQ ID NO: 2337426 - DNA, 25 bp, Homo sapien
cacaaaactgatttggagggactga

SEQ ID NO: 2337427 - DNA, 25 bp, Homo sapien
gacctctccatgttacaacagtcat

SEQ ID NO: 2337428 - DNA, 25 bp, Homo sapien
tctccatgttacaacagtcataaag

SEQ ID NO: 2337429 - DNA, 25 bp, Homo sapien
tagacctctccatgttacaacagtc

SEQ ID NO: 2337430 - DNA, 25 bp, Homo sapien
ccatgttacaacagtcataaaggag

SEQ ID NO: 2337431 - DNA, 25 bp, Homo sapien
taaggaatcatagctcaaccgaagt

SEQ ID NO: 2337432 - DNA, 25 bp, Homo sapien
taagcaggtaaatgagcagacaaga

SEQ ID NO: 2337433 - DNA, 25 bp, Homo sapien
gcagacaagacagggccagtgaaat

SEQ ID NO: 2337434 - DNA, 25 bp, Homo sapien
agtgcctcctaatgggaatttgtgg

SEQ ID NO: 2337435 - DNA, 25 bp, Homo sapien
tgacttccttaggaaagtctcttaa

SEQ ID NO: 2337436 - DNA, 25 bp, Homo sapien
tctcttaagttctcctaaaagtgtg

SEQ ID NO: 2337437 - DNA, 25 bp, Homo sapien
ctcttaagttctcctaaaagtgtgg

SEQ ID NO: 2337438 - DNA, 25 bp, Homo sapien
tatatagattaaatatctctcttct

SEQ ID NO: 2337439 - DNA, 25 bp, Homo sapien
tctcttctttatttgatcctttcca

SEQ ID NO: 2337440 - DNA, 25 bp, Homo sapien
taaatatatagattaaatatctctc

SEQ ID NO: 2337441 - DNA, 25 bp, Homo sapien
tgatcatcttctctcctcaggtaat

SEQ ID NO: 2337442 - DNA, 25 bp, Homo sapien
ctgtgttcatcatccattgtcacca

SEQ ID NO: 2337443 - DNA, 25 bp, Homo sapien
tgtgttcatcatccattgtcaccat

SEQ ID NO: 2337444 - DNA, 25 bp, Homo sapien
tctgtgttcatcatccattgtcacc

SEQ ID NO: 2337445 - DNA, 25 bp, Homo sapien
ctctgtgttcatcatccattgtcac

SEQ ID NO: 2337446 - DNA, 25 bp, Homo sapien
cagtggcgaagatcacactcacact

SEQ ID NO: 2337447 - DNA, 25 bp, Homo sapien
catgcctgggcgatcactctcactt

SEQ ID NO: 2337448 - DNA, 25 bp, Homo sapien
aacatcattaattaatgttatcagc

SEQ ID NO: 2337449 - DNA, 25 bp, Homo sapien
gggcgatcactctcacttctaacat

SEQ ID NO: 2337450 - DNA, 25 bp, Homo sapien
tcaggttggtgatggaatcatcagg

SEQ ID NO: 2337451 - DNA, 25 bp, Homo sapien
tgaattcggagatcagagtttttaa

SEQ ID NO: 2337452 - DNA, 25 bp, Homo sapien
cctgaattcggagatcagagttttt

SEQ ID NO: 2337453 - DNA, 25 bp, Homo sapien
ctccctgaattcggagatcagagtt

SEQ ID NO: 2337454 - DNA, 25 bp, Homo sapien
gctgggccacatcccgttagccttt

SEQ ID NO: 2337455 - DNA, 25 bp, Homo sapien
cacatcccgttagcctttgagctaa

SEQ ID NO: 2337456 - DNA, 25 bp, Homo sapien
ctttgagctaatctccggccaacac

SEQ ID NO: 2337457 - DNA, 25 bp, Homo sapien
ttgagctaatctccggccaacaccg

SEQ ID NO: 2337458 - DNA, 25 bp, Homo sapien
agatccaaactttcattcctcaagg

SEQ ID NO: 2337459 - DNA, 25 bp, Homo sapien
ctgttggagagatccaaactttcat

SEQ ID NO: 2337460 - DNA, 25 bp, Homo sapien
tccaaactttcattcctcaagggtc

SEQ ID NO: 2337461 - DNA, 25 bp, Homo sapien
ttcctgttggagagatccaaacttt

SEQ ID NO: 2337462 - DNA, 25 bp, Homo sapien
ctctcagttggcggcatcagcagca

SEQ ID NO: 2337463 - DNA, 25 bp, Homo sapien
aacctctcagttggcggcatcagca

SEQ ID NO: 2337464 - DNA, 25 bp, Homo sapien
ttcaacctctcagttggcggcatca

SEQ ID NO: 2337465 - DNA, 25 bp, Homo sapien
tcaacctctcagttggcggcatcag

SEQ ID NO: 2337466 - DNA, 25 bp, Homo sapien
aaaaccatttggtgacttccacata

SEQ ID NO: 2337467 - DNA, 25 bp, Homo sapien
tagtaaaaccatttggtgacttcca

SEQ ID NO: 2337468 - DNA, 25 bp, Homo sapien
gtaaaaccatttggtgacttccaca

SEQ ID NO: 2337469 - DNA, 25 bp, Homo sapien
aaccatttggtgacttccacataaa

SEQ ID NO: 2337470 - DNA, 25 bp, Homo sapien
tcttagttataggaaagaattgttc

SEQ ID NO: 2337471 - DNA, 25 bp, Homo sapien
tatcaaaacatgaaaattggctgct

SEQ ID NO: 2337472 - DNA, 25 bp, Homo sapien
acagctgttatcttgctttgccaaa

SEQ ID NO: 2337473 - DNA, 25 bp, Homo sapien
attaagcttttcttacaccacagct

SEQ ID NO: 2337474 - DNA, 25 bp, Homo sapien
tgttggttttcaaatatcagtcctg

SEQ ID NO: 2337475 - DNA, 25 bp, Homo sapien
tatcagtcctgaaataatagtctct

SEQ ID NO: 2337476 - DNA, 25 bp, Homo sapien
catgtttctcagaaagactttattc

SEQ ID NO: 2337477 - DNA, 25 bp, Homo sapien
ttcatgtttctcagaaagactttat

SEQ ID NO: 2337478 - DNA, 25 bp, Homo sapien
tcataatccacatactattaatagc

SEQ ID NO: 2337479 - DNA, 25 bp, Homo sapien
tccaaatcccttctgggtagccata

SEQ ID NO: 2337480 - DNA, 25 bp, Homo sapien
gccatataagctattcagcgatttc

SEQ ID NO: 2337481 - DNA, 25 bp, Homo sapien
gaattgtcataatccacatactatt

SEQ ID NO: 2337482 - DNA, 25 bp, Homo sapien
tcagatgtaatggttcagtgttgta

SEQ ID NO: 2337483 - DNA, 25 bp, Homo sapien
tggttcagtgttgtatacatcattc

SEQ ID NO: 2337484 - DNA, 25 bp, Homo sapien
ttcagtgttgtatacatcattccac

SEQ ID NO: 2337485 - DNA, 25 bp, Homo sapien
gtaatggttcagtgttgtatacatc

SEQ ID NO: 2337486 - DNA, 25 bp, Homo sapien
tttcttggtgtaccagtatctcctt

SEQ ID NO: 2337487 - DNA, 25 bp, Homo sapien
ttggtgtaccagtatctcctttcat

SEQ ID NO: 2337488 - DNA, 25 bp, Homo sapien
ttttcttggtgtaccagtatctcct

SEQ ID NO: 2337489 - DNA, 25 bp, Homo sapien
tcttggtgtaccagtatctcctttc

SEQ ID NO: 2337490 - DNA, 25 bp, Homo sapien
agagaaattctctgctattcttatc

SEQ ID NO: 2337491 - DNA, 25 bp, Homo sapien
tagtagagaaattctctgctattct

SEQ ID NO: 2337492 - DNA, 25 bp, Homo sapien
ctgtagtagagaaattctctgctat

SEQ ID NO: 2337493 - DNA, 25 bp, Homo sapien
gtagagaaattctctgctattctta

SEQ ID NO: 2337494 - DNA, 25 bp, Homo sapien
ttgagaggctgcctgcgacttctgt

SEQ ID NO: 2337495 - DNA, 25 bp, Homo sapien
atcctctgggagtgaaactttttga

SEQ ID NO: 2337496 - DNA, 25 bp, Homo sapien
gcaaggttcttgacctcttcatcct

SEQ ID NO: 2337497 - DNA, 25 bp, Homo sapien
tggccaacttccctgcaaggttctt

SEQ ID NO: 2337498 - DNA, 25 bp, Homo sapien
tggtttccacctccggatgccagtc

SEQ ID NO: 2337499 - DNA, 25 bp, Homo sapien
cgatggtttccacctccggatgcca

SEQ ID NO: 2337500 - DNA, 25 bp, Homo sapien
ctccggatgccagtctactacgaac

SEQ ID NO: 2337501 - DNA, 25 bp, Homo sapien
acctccggatgccagtctactacga

SEQ ID NO: 2337502 - DNA, 25 bp, Homo sapien
cagctcagcaggtgggagttctgcc

SEQ ID NO: 2337503 - DNA, 25 bp, Homo sapien
tgccgaggctggcttccctggagcg

SEQ ID NO: 2337504 - DNA, 25 bp, Homo sapien
gagttctgccttattctcttctggc

SEQ ID NO: 2337505 - DNA, 25 bp, Homo sapien
cttgcggtcctgaactgacagaggc

SEQ ID NO: 2337506 - DNA, 25 bp, Homo sapien
ttctgggcgtccgacagctccgtga

SEQ ID NO: 2337507 - DNA, 25 bp, Homo sapien
cgacagctccgtgacgcccactaga

SEQ ID NO: 2337508 - DNA, 25 bp, Homo sapien
tgggcgtccgacagctccgtgacgc

SEQ ID NO: 2337509 - DNA, 25 bp, Homo sapien
tgcttctgggcgtccgacagctccg

SEQ ID NO: 2337510 - DNA, 25 bp, Homo sapien
atctccatgcgccgcagctggtgct

SEQ ID NO: 2337511 - DNA, 25 bp, Homo sapien
tgtcagctgcttggcccatttcctg

SEQ ID NO: 2337512 - DNA, 25 bp, Homo sapien
tggcccatttcctggtcttgtccat

SEQ ID NO: 2337513 - DNA, 25 bp, Homo sapien
tggtcttgtccatctccatgcgccg

SEQ ID NO: 2337514 - DNA, 25 bp, Homo sapien
gaacttctccagctcgtcgggaggc

SEQ ID NO: 2337515 - DNA, 25 bp, Homo sapien
catcttcttgcggaaggcctcgtac

SEQ ID NO: 2337516 - DNA, 25 bp, Homo sapien
tgctgaagccggcaccttccactgt

SEQ ID NO: 2337517 - DNA, 25 bp, Homo sapien
tcggccagccggtcaatgctgaagc

SEQ ID NO: 2337518 - DNA, 25 bp, Homo sapien
tccttggagaactcggccagccggt

SEQ ID NO: 2337519 - DNA, 25 bp, Homo sapien
aaaagatgcttgtgtcttctgcaga

SEQ ID NO: 2337520 - DNA, 25 bp, Homo sapien
gcaaaagatgcttgtgtcttctgca

SEQ ID NO: 2337521 - DNA, 25 bp, Homo sapien
tggcaaaagatgcttgtgtcttctg

SEQ ID NO: 2337522 - DNA, 25 bp, Homo sapien
cgtggggaaccacatgggtttgcac

SEQ ID NO: 2337523 - DNA, 25 bp, Homo sapien
tctgagaatgggagcataggcttgc

SEQ ID NO: 2337524 - DNA, 25 bp, Homo sapien
taacagtatgcaaggctgtaatgct

SEQ ID NO: 2337525 - DNA, 25 bp, Homo sapien
ggcctagctctccaagacaactaag

SEQ ID NO: 2337526 - DNA, 25 bp, Homo sapien
cccactaccaggttggtaacagtat

SEQ ID NO: 2337527 - DNA, 25 bp, Homo sapien
ataatgtaactaaccatcagaggcc

SEQ ID NO: 2337528 - DNA, 25 bp, Homo sapien
tctgttctacccataccctcaatga

SEQ ID NO: 2337529 - DNA, 25 bp, Homo sapien
tatgttatctgtaagttggaaaacc

SEQ ID NO: 2337530 - DNA, 25 bp, Homo sapien
ggtgtaaatcttgcagtctgaaggc

SEQ ID NO: 2337531 - DNA, 25 bp, Homo sapien
gctatggtgaacatctttaaacaca

SEQ ID NO: 2337532 - DNA, 25 bp, Homo sapien
tgtagaataaaccactagaagtgga

SEQ ID NO: 2337533 - DNA, 25 bp, Homo sapien
cagtgaatgattcccagtattttta

SEQ ID NO: 2337534 - DNA, 25 bp, Homo sapien
tattaaatgctaaaataccatggct

SEQ ID NO: 2337535 - DNA, 25 bp, Homo sapien
gcaagcttgattcttgactgccgga

SEQ ID NO: 2337536 - DNA, 25 bp, Homo sapien
agtctcccttgggtaagtatgtgtc

SEQ ID NO: 2337537 - DNA, 25 bp, Homo sapien
cttgggtaagtatgtgtcacagatc

SEQ ID NO: 2337538 - DNA, 25 bp, Homo sapien
cccttgggtaagtatgtgtcacaga

SEQ ID NO: 2337539 - DNA, 25 bp, Homo sapien
ggtaagtatgtgtcacagatcgacc

SEQ ID NO: 2337540 - DNA, 25 bp, Homo sapien
ggtgccggatatctgacacaggcca

SEQ ID NO: 2337541 - DNA, 25 bp, Homo sapien
gcctggaggtgtgagtcggctctga

SEQ ID NO: 2337542 - DNA, 25 bp, Homo sapien
tactcaacccaaccacggtcctctc

SEQ ID NO: 2337543 - DNA, 25 bp, Homo sapien
gccggatatctgacacaggccaggg

SEQ ID NO: 2337544 - DNA, 25 bp, Homo sapien
ctctgccaaaatggtaggcgattct

SEQ ID NO: 2337545 - DNA, 25 bp, Homo sapien
ctgccaaaatggtaggcgattcttt

SEQ ID NO: 2337546 - DNA, 25 bp, Homo sapien
tctgccaaaatggtaggcgattctt

SEQ ID NO: 2337547 - DNA, 25 bp, Homo sapien
tgccaaaatggtaggcgattcttta

SEQ ID NO: 2337548 - DNA, 25 bp, Homo sapien
cctgcactgtgtgggcataatttaa

SEQ ID NO: 2337549 - DNA, 25 bp, Homo sapien
tgtagtcatcaacaattgcagaagc

SEQ ID NO: 2337550 - DNA, 25 bp, Homo sapien
cagaagcatttaagttgtgactgca

SEQ ID NO: 2337551 - DNA, 25 bp, Homo sapien
caaatttgtgcaattgtggcctcca

SEQ ID NO: 2337552 - DNA, 25 bp, Homo sapien
taattcactggataggtggacctca

SEQ ID NO: 2337553 - DNA, 25 bp, Homo sapien
gccaggcatggtataacactagcca

SEQ ID NO: 2337554 - DNA, 25 bp, Homo sapien
tgatgcctcttaacattgtcatagg

SEQ ID NO: 2337555 - DNA, 25 bp, Homo sapien
tcttagattgctattgggttaccca

SEQ ID NO: 2337556 - DNA, 25 bp, Homo sapien
tgttgtggcaatagcctttggtttg

SEQ ID NO: 2337557 - DNA, 25 bp, Homo sapien
tattcacggttgaggaaatgaaagc

SEQ ID NO: 2337558 - DNA, 25 bp, Homo sapien
ttttcctttctgatgctcccttctt

SEQ ID NO: 2337559 - DNA, 25 bp, Homo sapien
tttcatagtttgctgtattcacggt

SEQ ID NO: 2337560 - DNA, 25 bp, Homo sapien
gccagattggtagcaatgacaactt

SEQ ID NO: 2337561 - DNA, 25 bp, Homo sapien
gcctgtatggtcacagccagattgg

SEQ ID NO: 2337562 - DNA, 25 bp, Homo sapien
catctggccgtgaattaaatccttg

SEQ ID NO: 2337563 - DNA, 25 bp, Homo sapien
ggtagcaatgacaacttgttgctga

SEQ ID NO: 2337564 - DNA, 25 bp, Homo sapien
ctatttggcaaacattgtgtagtag

SEQ ID NO: 2337565 - DNA, 25 bp, Homo sapien
ggcagagagaaaagctcatagccat

SEQ ID NO: 2337566 - DNA, 25 bp, Homo sapien
ctgagctagcacagtgtgaaggaga

SEQ ID NO: 2337567 - DNA, 25 bp, Homo sapien
ccaggcagagagaaaagctcatagc

SEQ ID NO: 2337568 - DNA, 25 bp, Homo sapien
gtgtgaaggagagggatttccaggc

SEQ ID NO: 2337569 - DNA, 25 bp, Homo sapien
tcacatgagtggaaagacaacttga

SEQ ID NO: 2337570 - DNA, 25 bp, Homo sapien
ccctgattgactccctttgaagcta

SEQ ID NO: 2337571 - DNA, 25 bp, Homo sapien
tccgttgtcgttgaggatgttggta

SEQ ID NO: 2337572 - DNA, 25 bp, Homo sapien
gtggaaagacaacttgatgttctgt

SEQ ID NO: 2337573 - DNA, 25 bp, Homo sapien
accacactggctggaccaccaaaat

SEQ ID NO: 2337574 - DNA, 25 bp, Homo sapien
ctttgtgatcacactttgcaagcac

SEQ ID NO: 2337575 - DNA, 25 bp, Homo sapien
cactttgcaagcacaattatctttg

SEQ ID NO: 2337576 - DNA, 25 bp, Homo sapien
ttttcaccatctgagttgataatgg

SEQ ID NO: 2337577 - DNA, 25 bp, Homo sapien
gaagaaagtccaatgggccaatgga

SEQ ID NO: 2337578 - DNA, 25 bp, Homo sapien
tgctctacgttctctataaggaaga

SEQ ID NO: 2337579 - DNA, 25 bp, Homo sapien
gccaatggagaaaaggccttctgaa

SEQ ID NO: 2337580 - DNA, 25 bp, Homo sapien
tctaacatctctgctctacgttctc

SEQ ID NO: 2337581 - DNA, 25 bp, Homo sapien
tgctgacatgacaacagagacacag

SEQ ID NO: 2337582 - DNA, 25 bp, Homo sapien
cagctttcttccacataattatgaa

SEQ ID NO: 2337583 - DNA, 25 bp, Homo sapien
ccttctttgctgacatgacaacaga

SEQ ID NO: 2337584 - DNA, 25 bp, Homo sapien
cacagctttcttccacataattatg

SEQ ID NO: 2337585 - DNA, 25 bp, Homo sapien
taaatcccacatgatcataatgacc

SEQ ID NO: 2337586 - DNA, 25 bp, Homo sapien
catgaagcaattgagttccagaatt

SEQ ID NO: 2337587 - DNA, 25 bp, Homo sapien
gactttatttcagctttggtctcac

SEQ ID NO: 2337588 - DNA, 25 bp, Homo sapien
ggcttgctagtatccttttgaggac

SEQ ID NO: 2337589 - DNA, 25 bp, Homo sapien
tcctctgaagctgcctgcaagcaca

SEQ ID NO: 2337590 - DNA, 25 bp, Homo sapien
ttctcctttatcctcttcctctgaa

SEQ ID NO: 2337591 - DNA, 25 bp, Homo sapien
ctttcttctcctttatcctcttcct

SEQ ID NO: 2337592 - DNA, 25 bp, Homo sapien
ttatcctcttcctctgaagctgcct

SEQ ID NO: 2337593 - DNA, 25 bp, Homo sapien
gaactctggttgctggattcagagt

SEQ ID NO: 2337594 - DNA, 25 bp, Homo sapien
actgtccaatatatggcatagtgag

SEQ ID NO: 2337595 - DNA, 25 bp, Homo sapien
atatatggcatagtgagtgagtgtg

SEQ ID NO: 2337596 - DNA, 25 bp, Homo sapien
acaggaacataatcaggagagtcaa

SEQ ID NO: 2337597 - DNA, 25 bp, Homo sapien
ggaacataatcaggagagtcaaaac

SEQ ID NO: 2337598 - DNA, 25 bp, Homo sapien
ccaatttgaaaaagcagggctctgt

SEQ ID NO: 2337599 - DNA, 25 bp, Homo sapien
tgaatttcccactccaatttgaaaa

SEQ ID NO: 2337600 - DNA, 25 bp, Homo sapien
ttcccactccaatttgaaaaagcag

SEQ ID NO: 2337601 - DNA, 25 bp, Homo sapien
cactccaatttgaaaaagcagggct

SEQ ID NO: 2337602 - DNA, 25 bp, Homo sapien
accaatggcaagggacagctgaata

SEQ ID NO: 2337603 - DNA, 25 bp, Homo sapien
agagaagttcatggcattttttcat

SEQ ID NO: 2337604 - DNA, 25 bp, Homo sapien
atacaggaccctgagagaagttcat

SEQ ID NO: 2337605 - DNA, 25 bp, Homo sapien
caatggcaagggacagctgaataca

SEQ ID NO: 2337606 - DNA, 25 bp, Homo sapien
cctaggcctagaggcctttcagtgc

SEQ ID NO: 2337607 - DNA, 25 bp, Homo sapien
ggcagcaacacgtctggctccgcgg

SEQ ID NO: 2337608 - DNA, 25 bp, Homo sapien
ggttgcgggcctttcagctgcgcct

SEQ ID NO: 2337609 - DNA, 25 bp, Homo sapien
gactgctccggaatcccaagtcctt

SEQ ID NO: 2337610 - DNA, 25 bp, Homo sapien
taatttgtaaacgagtgcggagagg

SEQ ID NO: 2337611 - DNA, 25 bp, Homo sapien
tttaatttgtaaacgagtgcggaga

SEQ ID NO: 2337612 - DNA, 25 bp, Homo sapien
tttgtaaacgagtgcggagagggcg

SEQ ID NO: 2337613 - DNA, 25 bp, Homo sapien
atttgtaaacgagtgcggagagggc

SEQ ID NO: 2337614 - DNA, 25 bp, Homo sapien
tctgcgaactccaggtagaagtagc

SEQ ID NO: 2337615 - DNA, 25 bp, Homo sapien
tgccaaaatccttcacgctaccagt

SEQ ID NO: 2337616 - DNA, 25 bp, Homo sapien
tagcttgttagtatccaggttggcc

SEQ ID NO: 2337617 - DNA, 25 bp, Homo sapien
ggtctacgtaaatctcctgagcgat

SEQ ID NO: 2337618 - DNA, 25 bp, Homo sapien
tatccctttcgagcggcagacagaa

SEQ ID NO: 2337619 - DNA, 25 bp, Homo sapien
caagagggcacactagcaaagcagt

SEQ ID NO: 2337620 - DNA, 25 bp, Homo sapien
gatcacggcctgacgaactgtaacg

SEQ ID NO: 2337621 - DNA, 25 bp, Homo sapien
gatcaggacaactctaggacaaggc

SEQ ID NO: 2337622 - DNA, 25 bp, Homo sapien
cctgggcatgcgatggtgggaacta

SEQ ID NO: 2337623 - DNA, 25 bp, Homo sapien
tggtccctgggcatgcgatggtggg

SEQ ID NO: 2337624 - DNA, 25 bp, Homo sapien
ggtgggaactaatgtatggaagaaa

SEQ ID NO: 2337625 - DNA, 25 bp, Homo sapien
gcatgcgatggtgggaactaatgta

SEQ ID NO: 2337626 - DNA, 25 bp, Homo sapien
gggaatacagttaatcagctatctg

SEQ ID NO: 2337627 - DNA, 25 bp, Homo sapien
tcccagcatgcgataatgccaggca

SEQ ID NO: 2337628 - DNA, 25 bp, Homo sapien
tctgtataggatggactacttatgc

SEQ ID NO: 2337629 - DNA, 25 bp, Homo sapien
caaaacaaaggacagtggtgagctt

SEQ ID NO: 2337630 - DNA, 25 bp, Homo sapien
gaaccatcgtctgctgtgaatcact

SEQ ID NO: 2337631 - DNA, 25 bp, Homo sapien
aatggaactatctgtcacagtgggc

SEQ ID NO: 2337632 - DNA, 25 bp, Homo sapien
cacagtgggcttttagtgacaggac

SEQ ID NO: 2337633 - DNA, 25 bp, Homo sapien
cagtgacaagtacatcgagtgctcc

SEQ ID NO: 2337634 - DNA, 25 bp, Homo sapien
ggtagttaaaaggtatgcaatgtgt

SEQ ID NO: 2337635 - DNA, 25 bp, Homo sapien
aacattggtagttaaaaggtatgca

SEQ ID NO: 2337636 - DNA, 25 bp, Homo sapien
ctaaatctaggaggttaaacattgg

SEQ ID NO: 2337637 - DNA, 25 bp, Homo sapien
gatcatactagtcagaaaacataag

SEQ ID NO: 2337638 - DNA, 25 bp, Homo sapien
catcaagcaatcatttatcagattc

SEQ ID NO: 2337639 - DNA, 25 bp, Homo sapien
tcaagcaatcatttatcagattctt

SEQ ID NO: 2337640 - DNA, 25 bp, Homo sapien
caagcaatcatttatcagattcttg

SEQ ID NO: 2337641 - DNA, 25 bp, Homo sapien
aagcaatcatttatcagattcttga

SEQ ID NO: 2337642 - DNA, 25 bp, Homo sapien
cctaggagtcacaacagcagcattc

SEQ ID NO: 2337643 - DNA, 25 bp, Homo sapien
tctctggctgacttgaaaactggca

SEQ ID NO: 2337644 - DNA, 25 bp, Homo sapien
caacaaagaccgctgacctaggagt

SEQ ID NO: 2337645 - DNA, 25 bp, Homo sapien
gagagctcgtaatccttcacagcag

SEQ ID NO: 2337646 - DNA, 25 bp, Homo sapien
aaatctttaatccatataggaatta

SEQ ID NO: 2337647 - DNA, 25 bp, Homo sapien
ttatggataatctgttccacaatac

SEQ ID NO: 2337648 - DNA, 25 bp, Homo sapien
acaatactggtttatattccactga

SEQ ID NO: 2337649 - DNA, 25 bp, Homo sapien
taatctgttccacaatactggttta

SEQ ID NO: 2337650 - DNA, 25 bp, Homo sapien
tgctgcaacaggtggaaatattggg

SEQ ID NO: 2337651 - DNA, 25 bp, Homo sapien
ttaattgctccatatgcctttcaga

SEQ ID NO: 2337652 - DNA, 25 bp, Homo sapien
caacatacagcattgatttgcctat

SEQ ID NO: 2337653 - DNA, 25 bp, Homo sapien
ttaccaatttacagcctactagcag

SEQ ID NO: 2337654 - DNA, 25 bp, Homo sapien
aaagaggaaggagcatccttcctgc

SEQ ID NO: 2337655 - DNA, 25 bp, Homo sapien
gaggaaggagcatccttcctgcgtt

SEQ ID NO: 2337656 - DNA, 25 bp, Homo sapien
gaaggagcatccttcctgcgttttt

SEQ ID NO: 2337657 - DNA, 25 bp, Homo sapien
ggagcatccttcctgcgtttttgga

SEQ ID NO: 2337658 - DNA, 25 bp, Homo sapien
tgaggttctagatgctttggaggct

SEQ ID NO: 2337659 - DNA, 25 bp, Homo sapien
cactgatgaagtcctccgtttttaa

SEQ ID NO: 2337660 - DNA, 25 bp, Homo sapien
acttgcaactatccgtgaggttcta

SEQ ID NO: 2337661 - DNA, 25 bp, Homo sapien
gtacagaatgccaacatagccatct

SEQ ID NO: 2337662 - DNA, 25 bp, Homo sapien
tgaatactcagtctccaatgggagc

SEQ ID NO: 2337663 - DNA, 25 bp, Homo sapien
cagctgcattaaggtgggaattgtc

SEQ ID NO: 2337664 - DNA, 25 bp, Homo sapien
tcaacgtataacagacagagtcgag

SEQ ID NO: 2337665 - DNA, 25 bp, Homo sapien
aattggcagacactaggatggaagc

SEQ ID NO: 2337666 - DNA, 25 bp, Homo sapien
tatattctattccaaagtggtctcc

SEQ ID NO: 2337667 - DNA, 25 bp, Homo sapien
ccccatatttgaggatagggagaaa

SEQ ID NO: 2337668 - DNA, 25 bp, Homo sapien
tctccgtgtagattgcaaactcatt

SEQ ID NO: 2337669 - DNA, 25 bp, Homo sapien
caagatggagaatacaagaagcttc

SEQ ID NO: 2337670 - DNA, 25 bp, Homo sapien
ctaactattcaagagtagagagcta

SEQ ID NO: 2337671 - DNA, 25 bp, Homo sapien
gagagctatattgctgatactaatg

SEQ ID NO: 2337672 - DNA, 25 bp, Homo sapien
ctacatacagctaagtaagacactc

SEQ ID NO: 2337673 - DNA, 25 bp, Homo sapien
taagacactcttacattcactaagg

SEQ ID NO: 2337674 - DNA, 25 bp, Homo sapien
aatgcttaaagatcgttcctggaag

SEQ ID NO: 2337675 - DNA, 25 bp, Homo sapien
gagaaaagcctcttgctgaaggttt

SEQ ID NO: 2337676 - DNA, 25 bp, Homo sapien
gaagaaccaaacttcctgcttcagc

SEQ ID NO: 2337677 - DNA, 25 bp, Homo sapien
gaaggtttctgttatttgaggctcc

SEQ ID NO: 2337678 - DNA, 25 bp, Homo sapien
cctcatcagtgaactaatctgatac

SEQ ID NO: 2337679 - DNA, 25 bp, Homo sapien
cagccctcatcagtgaactaatctg

SEQ ID NO: 2337680 - DNA, 25 bp, Homo sapien
gccctcatcagtgaactaatctgat

SEQ ID NO: 2337681 - DNA, 25 bp, Homo sapien
ctcagccctcatcagtgaactaatc

SEQ ID NO: 2337682 - DNA, 25 bp, Homo sapien
agaaatatcccatacatctagtttt

SEQ ID NO: 2337683 - DNA, 25 bp, Homo sapien
gaaatatcccatacatctagtttta

SEQ ID NO: 2337684 - DNA, 25 bp, Homo sapien
tgaagtatagttcatttgaagcata

SEQ ID NO: 2337685 - DNA, 25 bp, Homo sapien
taattgaagtatagttcatttgaag

SEQ ID NO: 2337686 - DNA, 25 bp, Homo sapien
tctaaaatctaccaatacatctgaa

SEQ ID NO: 2337687 - DNA, 25 bp, Homo sapien
tataacatctaaaatctaccaatac

SEQ ID NO: 2337688 - DNA, 25 bp, Homo sapien
actagagattagtattagatattaa

SEQ ID NO: 2337689 - DNA, 25 bp, Homo sapien
tgtatctacatttgtgatactagag

SEQ ID NO: 2337690 - DNA, 25 bp, Homo sapien
gacaacaggccaagggatgatactg

SEQ ID NO: 2337691 - DNA, 25 bp, Homo sapien
gctgctagcctgtccaagaaattat

SEQ ID NO: 2337692 - DNA, 25 bp, Homo sapien
caaactgggtggttggttatcatct

SEQ ID NO: 2337693 - DNA, 25 bp, Homo sapien
ttacctagattttcacagagggtcc

SEQ ID NO: 2337694 - DNA, 25 bp, Homo sapien
ttatccctgatgtttcaggcttggg

SEQ ID NO: 2337695 - DNA, 25 bp, Homo sapien
cagactttatccctgatgtttcagg

SEQ ID NO: 2337696 - DNA, 25 bp, Homo sapien
cctgatgtttcaggcttgggagcca

SEQ ID NO: 2337697 - DNA, 25 bp, Homo sapien
gactttatccctgatgtttcaggct

SEQ ID NO: 2337698 - DNA, 25 bp, Homo sapien
tcgaggtagccccagagtttggcat

SEQ ID NO: 2337699 - DNA, 25 bp, Homo sapien
cattcgaggtagccccagagtttgg

SEQ ID NO: 2337700 - DNA, 25 bp, Homo sapien
gaggtagccccagagtttggcatta

SEQ ID NO: 2337701 - DNA, 25 bp, Homo sapien
tagccccagagtttggcattaggaa

SEQ ID NO: 2337702 - DNA, 25 bp, Homo sapien
tcctttttccaatcgcagtgccaag

SEQ ID NO: 2337703 - DNA, 25 bp, Homo sapien
caaggattccacgaaagcaaagaga

SEQ ID NO: 2337704 - DNA, 25 bp, Homo sapien
aaagagaagagtattgttaagccta

SEQ ID NO: 2337705 - DNA, 25 bp, Homo sapien
ctaatatctaatatagaccatttga

SEQ ID NO: 2337706 - DNA, 25 bp, Homo sapien
agtctgagttccaaaactgaagaag

SEQ ID NO: 2337707 - DNA, 25 bp, Homo sapien
ttccaaaactgaagaagttggactc

SEQ ID NO: 2337708 - DNA, 25 bp, Homo sapien
ggagtaaggagagccagtctgagtt

SEQ ID NO: 2337709 - DNA, 25 bp, Homo sapien
ctgagttccaaaactgaagaagttg

SEQ ID NO: 2337710 - DNA, 25 bp, Homo sapien
gttaagccatgattgccattgtact

SEQ ID NO: 2337711 - DNA, 25 bp, Homo sapien
ttaagccatgattgccattgtactc

SEQ ID NO: 2337712 - DNA, 25 bp, Homo sapien
agttaagccatgattgccattgtac

SEQ ID NO: 2337713 - DNA, 25 bp, Homo sapien
gagttaagccatgattgccattgta

SEQ ID NO: 2337714 - DNA, 25 bp, Homo sapien
ccaaagccagaaattcgcattcatc

SEQ ID NO: 2337715 - DNA, 25 bp, Homo sapien
gcaatgaccgagttagttcccaaag

SEQ ID NO: 2337716 - DNA, 25 bp, Homo sapien
ttcccaaagccagaaattcgcattc

SEQ ID NO: 2337717 - DNA, 25 bp, Homo sapien
tcaacagcaatgaccgagttagttc

SEQ ID NO: 2337718 - DNA, 25 bp, Homo sapien
taaaaagatgccgttaggcctgctc

SEQ ID NO: 2337719 - DNA, 25 bp, Homo sapien
tttgaaacagttcagtcccctcttg

SEQ ID NO: 2337720 - DNA, 25 bp, Homo sapien
gatgactaaatttacaggaagctgc

SEQ ID NO: 2337721 - DNA, 25 bp, Homo sapien
taaactaagttgctgtcattcatcc

SEQ ID NO: 2337722 - DNA, 25 bp, Homo sapien
gagatcctcgcgtcttcatgaggca

SEQ ID NO: 2337723 - DNA, 25 bp, Homo sapien
gctgaatgtgccctgatgtgaccag

SEQ ID NO: 2337724 - DNA, 25 bp, Homo sapien
gcttataaaagaactgcggctggaa

SEQ ID NO: 2337725 - DNA, 25 bp, Homo sapien
gagtgctctgcttgtagactggcca

SEQ ID NO: 2337726 - DNA, 25 bp, Homo sapien
aagggacagtggaatttagccatac

SEQ ID NO: 2337727 - DNA, 25 bp, Homo sapien
aaaagaattaatatgctgtctggtg

SEQ ID NO: 2337728 - DNA, 25 bp, Homo sapien
cagtgttgtacagaatttatcatgg

SEQ ID NO: 2337729 - DNA, 25 bp, Homo sapien
gctgttattgactacagtgttgtac

SEQ ID NO: 2337730 - DNA, 25 bp, Homo sapien
cacagataactgcaaagaggttgtc

SEQ ID NO: 2337731 - DNA, 25 bp, Homo sapien
gccgaggccagatctcttacttaat

SEQ ID NO: 2337732 - DNA, 25 bp, Homo sapien
ctctggttgtttgcacacagataac

SEQ ID NO: 2337733 - DNA, 25 bp, Homo sapien
ttactggttacacgcaagccgaggc

SEQ ID NO: 2337734 - DNA, 25 bp, Homo sapien
taagaaagcaactagtctgctgaag

SEQ ID NO: 2337735 - DNA, 25 bp, Homo sapien
tctgctgaaggttaatgtgtgtgca

SEQ ID NO: 2337736 - DNA, 25 bp, Homo sapien
tcataagagagctttaccccgtaag

SEQ ID NO: 2337737 - DNA, 25 bp, Homo sapien
ttaattagcagagactatgtgctag

SEQ ID NO: 2337738 - DNA, 25 bp, Homo sapien
ggtgaaaacagtgtagctggggcat

SEQ ID NO: 2337739 - DNA, 25 bp, Homo sapien
ctccctagcataggaaaggtgaaaa

SEQ ID NO: 2337740 - DNA, 25 bp, Homo sapien
gggtctccctagcataggaaaggtg

SEQ ID NO: 2337741 - DNA, 25 bp, Homo sapien
ggtctccctagcataggaaaggtga

SEQ ID NO: 2337742 - DNA, 25 bp, Homo sapien
tgtcagatcgaaggccttttaagat

SEQ ID NO: 2337743 - DNA, 25 bp, Homo sapien
aaatcatgtcagatcgaaggccttt

SEQ ID NO: 2337744 - DNA, 25 bp, Homo sapien
gatcgaaggccttttaagatcttta

SEQ ID NO: 2337745 - DNA, 25 bp, Homo sapien
atcatgtcagatcgaaggcctttta

SEQ ID NO: 2337746 - DNA, 25 bp, Homo sapien
aaactttcatctgataatgcaacac

SEQ ID NO: 2337747 - DNA, 25 bp, Homo sapien
aatgcaacacatcttgctgtttcat

SEQ ID NO: 2337748 - DNA, 25 bp, Homo sapien
tcaagcgcagaggtgagcaaacatc

SEQ ID NO: 2337749 - DNA, 25 bp, Homo sapien
gaggtgagcaaacatcccgtgtttc

SEQ ID NO: 2337750 - DNA, 25 bp, Homo sapien
gactgccatcaagcgcagaggtgag

SEQ ID NO: 2337751 - DNA, 25 bp, Homo sapien
tttctggactgccatcaagcgcaga

SEQ ID NO: 2337752 - DNA, 25 bp, Homo sapien
taaagtggcacctcctatattttaa

SEQ ID NO: 2337753 - DNA, 25 bp, Homo sapien
aagtggcacctcctatattttaaag

SEQ ID NO: 2337754 - DNA, 25 bp, Homo sapien
caaaagtaaggtgtaggcatcatac

SEQ ID NO: 2337755 - DNA, 25 bp, Homo sapien
tgatcaaaagtaaggtgtaggcatc

SEQ ID NO: 2337756 - DNA, 25 bp, Homo sapien
ggagttgatcaaaagtaaggtgtag

SEQ ID NO: 2337757 - DNA, 25 bp, Homo sapien
tctccttttccagtgtagtttcctc

SEQ ID NO: 2337758 - DNA, 25 bp, Homo sapien
gaggattcctatcactcacacttga

SEQ ID NO: 2337759 - DNA, 25 bp, Homo sapien
tgttcaagaagctgataaccaagag

SEQ ID NO: 2337760 - DNA, 25 bp, Homo sapien
ctaggtcactgtatggtctaatagg

SEQ ID NO: 2337761 - DNA, 25 bp, Homo sapien
gcagagatctttgggaaaactcagt

SEQ ID NO: 2337762 - DNA, 25 bp, Homo sapien
tcatacatctgcgagggatatccag

SEQ ID NO: 2337763 - DNA, 25 bp, Homo sapien
ggcttatttctgcagaatcatacat

SEQ ID NO: 2337764 - DNA, 25 bp, Homo sapien
tctgcgagggatatccagagcccat

SEQ ID NO: 2337765 - DNA, 25 bp, Homo sapien
tgcagaatcatacatctgcgaggga

SEQ ID NO: 2337766 - DNA, 25 bp, Homo sapien
cattgcatctgattagcatgtgaga

SEQ ID NO: 2337767 - DNA, 25 bp, Homo sapien
catgtgagaggctaattgcatcttc

SEQ ID NO: 2337768 - DNA, 25 bp, Homo sapien
catctgattagcatgtgagaggcta

SEQ ID NO: 2337769 - DNA, 25 bp, Homo sapien
aagccattgcatctgattagcatgt

SEQ ID NO: 2337770 - DNA, 25 bp, Homo sapien
caggcttgtctgcacgaggagagac

SEQ ID NO: 2337771 - DNA, 25 bp, Homo sapien
atggtcaggcttgtctgcacgagga

SEQ ID NO: 2337772 - DNA, 25 bp, Homo sapien
tgcagatccacttctacggtcaacc

SEQ ID NO: 2337773 - DNA, 25 bp, Homo sapien
caaataggtctgcttagtgggggca

SEQ ID NO: 2337774 - DNA, 25 bp, Homo sapien
ggcttccaactccattaatgtcagg

SEQ ID NO: 2337775 - DNA, 25 bp, Homo sapien
tatgtagatggaagcctgaaacagg

SEQ ID NO: 2337776 - DNA, 25 bp, Homo sapien
taatgtcaggatgccaaataataca

SEQ ID NO: 2337777 - DNA, 25 bp, Homo sapien
tgagtaccacaaattatgtatgagc

SEQ ID NO: 2337778 - DNA, 25 bp, Homo sapien
tctgtcaattaagttaatgacttcc

SEQ ID NO: 2337779 - DNA, 25 bp, Homo sapien
gtcaattaagttaatgacttccagg

SEQ ID NO: 2337780 - DNA, 25 bp, Homo sapien
aattaagttaatgacttccaggaag

SEQ ID NO: 2337781 - DNA, 25 bp, Homo sapien
cagctctgtcaattaagttaatgac

SEQ ID NO: 2337782 - DNA, 25 bp, Homo sapien
acgctgggtttctttatcactatag

SEQ ID NO: 2337783 - DNA, 25 bp, Homo sapien
gattggatgataaagtagcatgttg

SEQ ID NO: 2337784 - DNA, 25 bp, Homo sapien
gcatgttgttgtcaggatttgtaca

SEQ ID NO: 2337785 - DNA, 25 bp, Homo sapien
ctctactttgtccacactgattgga

SEQ ID NO: 2337786 - DNA, 25 bp, Homo sapien
gggacagtcttattctcttgaggac

SEQ ID NO: 2337787 - DNA, 25 bp, Homo sapien
taggtctaagattcagtgcaggtgt

SEQ ID NO: 2337788 - DNA, 25 bp, Homo sapien
ccacctgcaagggtaaccgattaga

SEQ ID NO: 2337789 - DNA, 25 bp, Homo sapien
tagaaaatagtgtgctgtctagcac

SEQ ID NO: 2337790 - DNA, 25 bp, Homo sapien
aggctgggcatcgaggacgcggcgg

SEQ ID NO: 2337791 - DNA, 25 bp, Homo sapien
tcattggcggcgaccccggcgacga

SEQ ID NO: 2337792 - DNA, 25 bp, Homo sapien
gacgacgaggacctggcggccaaga

SEQ ID NO: 2337793 - DNA, 25 bp, Homo sapien
ccgacggcaaatctggccgctggag

SEQ ID NO: 2337794 - DNA, 25 bp, Homo sapien
ggtggcggccgcgagttcttcttcg

SEQ ID NO: 2337795 - DNA, 25 bp, Homo sapien
gcgatggtgactctgggcgcggagg

SEQ ID NO: 2337796 - DNA, 25 bp, Homo sapien
aatccgcagatcacagaatgaaggc

SEQ ID NO: 2337797 - DNA, 25 bp, Homo sapien
actctgggcgcggaggttggcgact

SEQ ID NO: 2337798 - DNA, 25 bp, Homo sapien
gaggttggcgactggcaaatccgca

SEQ ID NO: 2337799 - DNA, 25 bp, Homo sapien
ggaggggtcgggcagtgccggctgg

SEQ ID NO: 2337800 - DNA, 25 bp, Homo sapien
gggtcgggcagtgccggctggaccc

SEQ ID NO: 2337801 - DNA, 25 bp, Homo sapien
gctcccggaggggtcgggcagtgcc

SEQ ID NO: 2337802 - DNA, 25 bp, Homo sapien
gatctgcccgctcccggaggggtcg

SEQ ID NO: 2337803 - DNA, 25 bp, Homo sapien
tgcggccagtctccactccattcac

SEQ ID NO: 2337804 - DNA, 25 bp, Homo sapien
ctgcggccagtctccactccattca

SEQ ID NO: 2337805 - DNA, 25 bp, Homo sapien
gaggttgatggcgagtggtgctgaa

SEQ ID NO: 2337806 - DNA, 25 bp, Homo sapien
tgagccctgtgcttcggatggcggc

SEQ ID NO: 2337807 - DNA, 25 bp, Homo sapien
tggcggcgggaggttgatggcgagt

SEQ ID NO: 2337808 - DNA, 25 bp, Homo sapien
tgtgcttcggatggcggcgggaggt

SEQ ID NO: 2337809 - DNA, 25 bp, Homo sapien
ctcctgtcttatataatggagcctg

SEQ ID NO: 2337810 - DNA, 25 bp, Homo sapien
gtcttatataatggagcctggatat

SEQ ID NO: 2337811 - DNA, 25 bp, Homo sapien
tgtcttatataatggagcctggata

SEQ ID NO: 2337812 - DNA, 25 bp, Homo sapien
tcctgtcttatataatggagcctgg

SEQ ID NO: 2337813 - DNA, 25 bp, Homo sapien
aagtgtcatagttatcatccatgat

SEQ ID NO: 2337814 - DNA, 25 bp, Homo sapien
tcaagtgtcatagttatcatccatg

SEQ ID NO: 2337815 - DNA, 25 bp, Homo sapien
caagtgtcatagttatcatccatga

SEQ ID NO: 2337816 - DNA, 25 bp, Homo sapien
cattaatattccctcaagctgctcc

SEQ ID NO: 2337817 - DNA, 25 bp, Homo sapien
cattattttataattgccgctggct

SEQ ID NO: 2337818 - DNA, 25 bp, Homo sapien
gatctggctttcaactcctggttag

SEQ ID NO: 2337819 - DNA, 25 bp, Homo sapien
tgtaggataacgcaaaatagttcag

SEQ ID NO: 2337820 - DNA, 25 bp, Homo sapien
catgtacagcactcaagtgaaaagc

SEQ ID NO: 2337821 - DNA, 25 bp, Homo sapien
aagatttgatgcttcagggattcca

SEQ ID NO: 2337822 - DNA, 25 bp, Homo sapien
caagatttgatgcttcagggattcc

SEQ ID NO: 2337823 - DNA, 25 bp, Homo sapien
ctaagatgggagcaaacaactctgc

SEQ ID NO: 2337824 - DNA, 25 bp, Homo sapien
aaagtttctaagatgggagcaaaca

SEQ ID NO: 2337825 - DNA, 25 bp, Homo sapien
gcaaacaactctgctttgctatcct

SEQ ID NO: 2337826 - DNA, 25 bp, Homo sapien
tttaaaagtttctaagatgggagca

SEQ ID NO: 2337827 - DNA, 25 bp, Homo sapien
tagagtactggtggtggcaattgca

SEQ ID NO: 2337828 - DNA, 25 bp, Homo sapien
gattggaagtgtgatgccatcgaca

SEQ ID NO: 2337829 - DNA, 25 bp, Homo sapien
cagtcacatgtaggaggatgaaggc

SEQ ID NO: 2337830 - DNA, 25 bp, Homo sapien
tagcttgaaggagttgcagtcacat

SEQ ID NO: 2337831 - DNA, 25 bp, Homo sapien
ttgtaggtcttagcagtctggaatg

SEQ ID NO: 2337832 - DNA, 25 bp, Homo sapien
tttggggttgtaggtcttagcagtc

SEQ ID NO: 2337833 - DNA, 25 bp, Homo sapien
gaatgggtccagttatctgaactgt

SEQ ID NO: 2337834 - DNA, 25 bp, Homo sapien
ctggaatgggtccagttatctgaac

SEQ ID NO: 2337835 - DNA, 25 bp, Homo sapien
tggtatttcacatgttcccggaaca

SEQ ID NO: 2337836 - DNA, 25 bp, Homo sapien
aagtggtatttcacatgttcccgga

SEQ ID NO: 2337837 - DNA, 25 bp, Homo sapien
catgttcccggaacatattctacca

SEQ ID NO: 2337838 - DNA, 25 bp, Homo sapien
ctatgaaaaaagcattagtctcact

SEQ ID NO: 2337839 - DNA, 25 bp, Homo sapien
gtaatgctgttacatgaattttata

SEQ ID NO: 2337840 - DNA, 25 bp, Homo sapien
ttggatttgcctgactgcctgcatt

SEQ ID NO: 2337841 - DNA, 25 bp, Homo sapien
ttttggatttgcctgactgcctgca

SEQ ID NO: 2337842 - DNA, 25 bp, Homo sapien
atgttgtaatgctgttacatgaatt

SEQ ID NO: 2337843 - DNA, 25 bp, Homo sapien
gttacacaggcgggtcttcacctct

SEQ ID NO: 2337844 - DNA, 25 bp, Homo sapien
tctcgctgttacacaggcgggtctt

SEQ ID NO: 2337845 - DNA, 25 bp, Homo sapien
cgctgttacacaggcgggtcttcac

SEQ ID NO: 2337846 - DNA, 25 bp, Homo sapien
cttcacctctcataacttgtccaca

SEQ ID NO: 2337847 - DNA, 25 bp, Homo sapien
gagtggctatctcaatattacccaa

SEQ ID NO: 2337848 - DNA, 25 bp, Homo sapien
tcttcaaagctgtgtcattgggtga

SEQ ID NO: 2337849 - DNA, 25 bp, Homo sapien
tatcctccgaggatggacagtttcc

SEQ ID NO: 2337850 - DNA, 25 bp, Homo sapien
caacatgggttgtctccagatgaag

SEQ ID NO: 2337851 - DNA, 25 bp, Homo sapien
ttgacccgcatgtaccacacgagct

SEQ ID NO: 2337852 - DNA, 25 bp, Homo sapien
tgctgctgagccttccggtcgctcg

SEQ ID NO: 2337853 - DNA, 25 bp, Homo sapien
tgtaccacacgagctcgtcgtgcgc

SEQ ID NO: 2337854 - DNA, 25 bp, Homo sapien
ctgctgagccttccggtcgctcggg

SEQ ID NO: 2337855 - DNA, 25 bp, Homo sapien
tcgcggcaggcaaggattgaatcca

SEQ ID NO: 2337856 - DNA, 25 bp, Homo sapien
gaccagatagggctacacagctaat

SEQ ID NO: 2337857 - DNA, 25 bp, Homo sapien
tccaggcagtctagttgcagagtct

SEQ ID NO: 2337858 - DNA, 25 bp, Homo sapien
ggcccagagccaaatgaccagatag

SEQ ID NO: 2337859 - DNA, 25 bp, Homo sapien
tgctgaacctctgcttcttatctcg

SEQ ID NO: 2337860 - DNA, 25 bp, Homo sapien
ctcactgcaagcgccttactcattt

SEQ ID NO: 2337861 - DNA, 25 bp, Homo sapien
ctgaacctctgcttcttatctcgct

SEQ ID NO: 2337862 - DNA, 25 bp, Homo sapien
actgcaagcgccttactcatttttt

SEQ ID NO: 2337863 - DNA, 25 bp, Homo sapien
cagctggctcggtttgaagatcaga

SEQ ID NO: 2337864 - DNA, 25 bp, Homo sapien
tccatagatccgaaagtgttccatg

SEQ ID NO: 2337865 - DNA, 25 bp, Homo sapien
tggcaaacatttagcgaagtacagt

SEQ ID NO: 2337866 - DNA, 25 bp, Homo sapien
gcctgactgctctaattccatagat

SEQ ID NO: 2337867 - DNA, 25 bp, Homo sapien
tagtactgaaaagagatctgaaacc

SEQ ID NO: 2337868 - DNA, 25 bp, Homo sapien
tactgaaaagagatctgaaacccac

SEQ ID NO: 2337869 - DNA, 25 bp, Homo sapien
gtagtactgaaaagagatctgaaac

SEQ ID NO: 2337870 - DNA, 25 bp, Homo sapien
gtactgaaaagagatctgaaaccca

SEQ ID NO: 2337871 - DNA, 25 bp, Homo sapien
tgcggcgcctgttgccgggcaacct

SEQ ID NO: 2337872 - DNA, 25 bp, Homo sapien
cagacgcgggcctggactgtctaga

SEQ ID NO: 2337873 - DNA, 25 bp, Homo sapien
ctgttgccgggcaacctgcagacgc

SEQ ID NO: 2337874 - DNA, 25 bp, Homo sapien
gggcctggactgtctagactgtcct

SEQ ID NO: 2337875 - DNA, 25 bp, Homo sapien
ctgaggaggcagattggcgggggcg

SEQ ID NO: 2337876 - DNA, 25 bp, Homo sapien
tggcgtagaacgaacaagggacttg

SEQ ID NO: 2337877 - DNA, 25 bp, Homo sapien
ggcgggaggtggcgtagaacgaaca

SEQ ID NO: 2337878 - DNA, 25 bp, Homo sapien
gaggtggcgtagaacgaacaaggga

SEQ ID NO: 2337879 - DNA, 25 bp, Homo sapien
gggtctccggccacaagctcagttc

SEQ ID NO: 2337880 - DNA, 25 bp, Homo sapien
ttacacaacaaccgccgtggatccg

SEQ ID NO: 2337881 - DNA, 25 bp, Homo sapien
ttccagccagcaagtacttctgaga

SEQ ID NO: 2337882 - DNA, 25 bp, Homo sapien
ttccctgctcaggagaagcgcgggt

SEQ ID NO: 2337883 - DNA, 25 bp, Homo sapien
tgactgcgcggaccagtaacggctg

SEQ ID NO: 2337884 - DNA, 25 bp, Homo sapien
agcccagcgcggctggatcaacttg

SEQ ID NO: 2337885 - DNA, 25 bp, Homo sapien
gaggatgccctgactgcgcggacca

SEQ ID NO: 2337886 - DNA, 25 bp, Homo sapien
cggctggatcaacttgtcagtgtcg

SEQ ID NO: 2337887 - DNA, 25 bp, Homo sapien
agtggctaccaaacacagacccaag

SEQ ID NO: 2337888 - DNA, 25 bp, Homo sapien
gacccaagatccataaacaactgaa

SEQ ID NO: 2337889 - DNA, 25 bp, Homo sapien
gattttggaagatgtagtggctacc

SEQ ID NO: 2337890 - DNA, 25 bp, Homo sapien
ggttgactttgccacgccattcgtt

SEQ ID NO: 2337891 - DNA, 25 bp, Homo sapien
gatgagtcagggatttaagagccca

SEQ ID NO: 2337892 - DNA, 25 bp, Homo sapien
agggatttaagagcccagccctggt

SEQ ID NO: 2337893 - DNA, 25 bp, Homo sapien
tcaggatgagtcagggatttaagag

SEQ ID NO: 2337894 - DNA, 25 bp, Homo sapien
gagtcagggatttaagagcccagcc

SEQ ID NO: 2337895 - DNA, 25 bp, Homo sapien
cactggtttgcccatgctttagcca

SEQ ID NO: 2337896 - DNA, 25 bp, Homo sapien
ccgtaatggcatgtcttggtgtgaa

SEQ ID NO: 2337897 - DNA, 25 bp, Homo sapien
gactttattccacctaaccagatat

SEQ ID NO: 2337898 - DNA, 25 bp, Homo sapien
tgggtttcattataccaagccgtaa

SEQ ID NO: 2337899 - DNA, 25 bp, Homo sapien
ggagagtgtctagacttagaacaac

SEQ ID NO: 2337900 - DNA, 25 bp, Homo sapien
tggagagtgtctagacttagaacaa

SEQ ID NO: 2337901 - DNA, 25 bp, Homo sapien
tttcccttagtatccaaaccatata

SEQ ID NO: 2337902 - DNA, 25 bp, Homo sapien
catatactttaccaacatttttcct

SEQ ID NO: 2337903 - DNA, 25 bp, Homo sapien
tacaaatattgcagttgaagctccc

SEQ ID NO: 2337904 - DNA, 25 bp, Homo sapien
cataaaatgaattggcccaaactaa

SEQ ID NO: 2337905 - DNA, 25 bp, Homo sapien
gcaggtccgtagttgcatacaaata

SEQ ID NO: 2337906 - DNA, 25 bp, Homo sapien
gcaactgcacaaccgacataaaatg

SEQ ID NO: 2337907 - DNA, 25 bp, Homo sapien
cctcttacgtaaggaggcatatttg

SEQ ID NO: 2337908 - DNA, 25 bp, Homo sapien
agcaagattctcctcttacgtaagg

SEQ ID NO: 2337909 - DNA, 25 bp, Homo sapien
agagagcaagattctcctcttacgt

SEQ ID NO: 2337910 - DNA, 25 bp, Homo sapien
cttacgtaaggaggcatatttgcaa

SEQ ID NO: 2337911 - DNA, 25 bp, Homo sapien
tctattgatcgtaagcctttagaca

SEQ ID NO: 2337912 - DNA, 25 bp, Homo sapien
ttgtaggctgaccaccttggacaca

SEQ ID NO: 2337913 - DNA, 25 bp, Homo sapien
cagaagcctgatatcttgaggtttc

SEQ ID NO: 2337914 - DNA, 25 bp, Homo sapien
gacttgcaagccctacttccagttg

SEQ ID NO: 2337915 - DNA, 25 bp, Homo sapien
attttgttactgcaagctgcaagct

SEQ ID NO: 2337916 - DNA, 25 bp, Homo sapien
gcatatagagctgttcacttggcat

SEQ ID NO: 2337917 - DNA, 25 bp, Homo sapien
ttgacatgcagtggccctacaggga

SEQ ID NO: 2337918 - DNA, 25 bp, Homo sapien
cctctcagaggtgatagacctctga

SEQ ID NO: 2337919 - DNA, 25 bp, Homo sapien
gcatttttgtgagaaacttaaactg

SEQ ID NO: 2337920 - DNA, 25 bp, Homo sapien
aatctcagttggcttgtctgtgcat

SEQ ID NO: 2337921 - DNA, 25 bp, Homo sapien
tggaggtgtattctaaagtgtcttc

SEQ ID NO: 2337922 - DNA, 25 bp, Homo sapien
agtgtcttctccattacgttttctc

SEQ ID NO: 2337923 - DNA, 25 bp, Homo sapien
gttaggtataataagttgtggagtc

SEQ ID NO: 2337924 - DNA, 25 bp, Homo sapien
ttaggtataataagttgtggagtcc

SEQ ID NO: 2337925 - DNA, 25 bp, Homo sapien
ggtgctctccccgttggcttcagaa

SEQ ID NO: 2337926 - DNA, 25 bp, Homo sapien
aacctaagctgaatggattaaaggc

SEQ ID NO: 2337927 - DNA, 25 bp, Homo sapien
tgctgaggtgctctccccgttggct

SEQ ID NO: 2337928 - DNA, 25 bp, Homo sapien
gctctccccgttggcttcagaaatg

SEQ ID NO: 2337929 - DNA, 25 bp, Homo sapien
agaatttcttttgtatataaatgac

SEQ ID NO: 2337930 - DNA, 25 bp, Homo sapien
catttgagaatttcttttgtatata

SEQ ID NO: 2337931 - DNA, 25 bp, Homo sapien
aacatttgagaatttcttttgtata

SEQ ID NO: 2337932 - DNA, 25 bp, Homo sapien
ttaacatttgagaatttcttttgta

SEQ ID NO: 2337933 - DNA, 25 bp, Homo sapien
ttcagtaaagaagcaaagtgatgat

SEQ ID NO: 2337934 - DNA, 25 bp, Homo sapien
tcaggcaagagtgtagaagattcag

SEQ ID NO: 2337935 - DNA, 25 bp, Homo sapien
taaatttaggtatcaggcaagagtg

SEQ ID NO: 2337936 - DNA, 25 bp, Homo sapien
cagtaaagaagcaaagtgatgataa

SEQ ID NO: 2337937 - DNA, 25 bp, Homo sapien
cggccgctgacaggccagtgcgcac

SEQ ID NO: 2337938 - DNA, 25 bp, Homo sapien
ctggccgtcccagtgacctgccaat

SEQ ID NO: 2337939 - DNA, 25 bp, Homo sapien
gtccaccggccgctgacaggccagt

SEQ ID NO: 2337940 - DNA, 25 bp, Homo sapien
cagtgcgcacgcgctggccgtccca

SEQ ID NO: 2337941 - DNA, 25 bp, Homo sapien
tcacagagccgcagcttcaaaacgc

SEQ ID NO: 2337942 - DNA, 25 bp, Homo sapien
aactagaacccagtagcagtagcca

SEQ ID NO: 2337943 - DNA, 25 bp, Homo sapien
catgaagcgcaagttagaccctcgg

SEQ ID NO: 2337944 - DNA, 25 bp, Homo sapien
gttgataaagtctacgtcctcctcg

SEQ ID NO: 2337945 - DNA, 25 bp, Homo sapien
gaggcgttgtggcaacggtagtgga

SEQ ID NO: 2337946 - DNA, 25 bp, Homo sapien
tacccgagatccagggaggcgttgt

SEQ ID NO: 2337947 - DNA, 25 bp, Homo sapien
ctaaaagtgcggttctccgcgatcc

SEQ ID NO: 2337948 - DNA, 25 bp, Homo sapien
gcaacggtagtggaagggtcggcaa

SEQ ID NO: 2337949 - DNA, 25 bp, Homo sapien
tatggagtctcagttcaggaagacg

SEQ ID NO: 2337950 - DNA, 25 bp, Homo sapien
gaacaaaagtactacacggcaatag

SEQ ID NO: 2337951 - DNA, 25 bp, Homo sapien
attaatatttgggtggagtttacag

SEQ ID NO: 2337952 - DNA, 25 bp, Homo sapien
cagaatttgtgttctaagatcttat

SEQ ID NO: 2337953 - DNA, 25 bp, Homo sapien
gaacctctgagttcagctaacaaaa

SEQ ID NO: 2337954 - DNA, 25 bp, Homo sapien
cagaagatagtgctgagagagaaca

SEQ ID NO: 2337955 - DNA, 25 bp, Homo sapien
tccagaaagtggtagtgcaatacaa

SEQ ID NO: 2337956 - DNA, 25 bp, Homo sapien
tctgggataggtcctgagaacttta

SEQ ID NO: 2337957 - DNA, 25 bp, Homo sapien
ggacaatatgggactctttcacaca

SEQ ID NO: 2337958 - DNA, 25 bp, Homo sapien
gaaaggtaatactcaggtgccagaa

SEQ ID NO: 2337959 - DNA, 25 bp, Homo sapien
gaactcatgtgcctaatcggaggag

SEQ ID NO: 2337960 - DNA, 25 bp, Homo sapien
tatttgcggaaaaatcaggatgccg

SEQ ID NO: 2337961 - DNA, 25 bp, Homo sapien
caatgatgaatctgctaccatcgga

SEQ ID NO: 2337962 - DNA, 25 bp, Homo sapien
atggatccccaatcaatcattcagg

SEQ ID NO: 2337963 - DNA, 25 bp, Homo sapien
taccatcggagtcacagcagtacca

SEQ ID NO: 2337964 - DNA, 25 bp, Homo sapien
ttcaaaggggtgcacttggagtcct

SEQ ID NO: 2337965 - DNA, 25 bp, Homo sapien
gatatgtaatctcacagacactgtg

SEQ ID NO: 2337966 - DNA, 25 bp, Homo sapien
tccaaagcctatctgggtagatcaa

SEQ ID NO: 2337967 - DNA, 25 bp, Homo sapien
gaaggtggacatatcaagggaactg

SEQ ID NO: 2337968 - DNA, 25 bp, Homo sapien
tctaaggcaattttagtagacctcc

SEQ ID NO: 2337969 - DNA, 25 bp, Homo sapien
tctagcagtccgtgataaagctaca

SEQ ID NO: 2337970 - DNA, 25 bp, Homo sapien
tccgtgataaagctacatcccaagt

SEQ ID NO: 2337971 - DNA, 25 bp, Homo sapien
ttccccatgctctagcagtccgtga

SEQ ID NO: 2337972 - DNA, 25 bp, Homo sapien
catgctctagcagtccgtgataaag

SEQ ID NO: 2337973 - DNA, 25 bp, Homo sapien
tgtaaataaatattatgcgtaaaca

SEQ ID NO: 2337974 - DNA, 25 bp, Homo sapien
ttgtaaataaatattatgcgtaaac

SEQ ID NO: 2337975 - DNA, 25 bp, Homo sapien
caataccataaaatttaggatggac

SEQ ID NO: 2337976 - DNA, 25 bp, Homo sapien
taccataaaatttaggatggaccat

SEQ ID NO: 2337977 - DNA, 25 bp, Homo sapien
ttcaccaataccataaaatttagga

SEQ ID NO: 2337978 - DNA, 25 bp, Homo sapien
accaataccataaaatttaggatgg

SEQ ID NO: 2337979 - DNA, 25 bp, Homo sapien
ttctgatagcaatacttgcagtaaa

SEQ ID NO: 2337980 - DNA, 25 bp, Homo sapien
ttagaacagtctccagagcaactgc

SEQ ID NO: 2337981 - DNA, 25 bp, Homo sapien
ctctgcatgccaacttctgatagca

SEQ ID NO: 2337982 - DNA, 25 bp, Homo sapien
aacagtctccagagcaactgccatt

SEQ ID NO: 2337983 - DNA, 25 bp, Homo sapien
cctggcgcatagttgcatatgaaaa

SEQ ID NO: 2337984 - DNA, 25 bp, Homo sapien
gctgcatgtataatatgtccaattt

SEQ ID NO: 2337985 - DNA, 25 bp, Homo sapien
ctgcatgtataatatgtccaatttt

SEQ ID NO: 2337986 - DNA, 25 bp, Homo sapien
cataaggtcttctcgtcagtgttcc

SEQ ID NO: 2337987 - DNA, 25 bp, Homo sapien
ataaggtcttctcgtcagtgttcct

SEQ ID NO: 2337988 - DNA, 25 bp, Homo sapien
tcataaggtcttctcgtcagtgttc

SEQ ID NO: 2337989 - DNA, 25 bp, Homo sapien
cacatcgagtacaaaatattcctgg

SEQ ID NO: 2337990 - DNA, 25 bp, Homo sapien
tgccacatcgagtacaaaatattcc

SEQ ID NO: 2337991 - DNA, 25 bp, Homo sapien
gtcacgtctgccacatcgagtacaa

SEQ ID NO: 2337992 - DNA, 25 bp, Homo sapien
cgtctgccacatcgagtacaaaata

SEQ ID NO: 2337993 - DNA, 25 bp, Homo sapien
aaaaaactagtgttcaatcgcttat

SEQ ID NO: 2337994 - DNA, 25 bp, Homo sapien
gttcaatcgcttatttttcttgtcc

SEQ ID NO: 2337995 - DNA, 25 bp, Homo sapien
tcttgtccaatccattatgcatttt

SEQ ID NO: 2337996 - DNA, 25 bp, Homo sapien
tttttcttgtccaatccattatgca

SEQ ID NO: 2337997 - DNA, 25 bp, Homo sapien
ctgtttgggcataaactgtgaagct

SEQ ID NO: 2337998 - DNA, 25 bp, Homo sapien
tgatactgtgtcaaccatcctttga

SEQ ID NO: 2337999 - DNA, 25 bp, Homo sapien
ggaatatactatcctttaaagcagt

SEQ ID NO: 2338000 - DNA, 25 bp, Homo sapien
ggagtatattctctcatgtttggaa

SEQ ID NO: 2338001 - DNA, 25 bp, Homo sapien
gagccacagcttaagctggaatggc

SEQ ID NO: 2338002 - DNA, 25 bp, Homo sapien
catctatgcacctgcaagcctaaca

SEQ ID NO: 2338003 - DNA, 25 bp, Homo sapien
ctttgagccacagcttaagctggaa

SEQ ID NO: 2338004 - DNA, 25 bp, Homo sapien
ctcttgtcatctatgcacctgcaag

SEQ ID NO: 2338005 - DNA, 25 bp, Homo sapien
ggtaaagttagctctatagcctggc

SEQ ID NO: 2338006 - DNA, 25 bp, Homo sapien
aaatcagcctggtctgctacagaaa

SEQ ID NO: 2338007 - DNA, 25 bp, Homo sapien
gctccaacattctaggattctacaa

SEQ ID NO: 2338008 - DNA, 25 bp, Homo sapien
tttgggctgagagatgtatcagtcc

SEQ ID NO: 2338009 - DNA, 25 bp, Homo sapien
atgtggcttggtcacgatctgcatt

SEQ ID NO: 2338010 - DNA, 25 bp, Homo sapien
gtggcttggtcacgatctgcattac

SEQ ID NO: 2338011 - DNA, 25 bp, Homo sapien
tgtggcttggtcacgatctgcatta

SEQ ID NO: 2338012 - DNA, 25 bp, Homo sapien
tatcaaaacagttatgacacacagg

SEQ ID NO: 2338013 - DNA, 25 bp, Homo sapien
agtggatcacacacaactggccggg

SEQ ID NO: 2338014 - DNA, 25 bp, Homo sapien
gccggggcatttcccattttggata

SEQ ID NO: 2338015 - DNA, 25 bp, Homo sapien
tatttggaaactgagactgtactat

SEQ ID NO: 2338016 - DNA, 25 bp, Homo sapien
tacacttttggtttatattggtgat

SEQ ID NO: 2338017 - DNA, 25 bp, Homo sapien
tttatattggtgatacatctttttc

SEQ ID NO: 2338018 - DNA, 25 bp, Homo sapien
tgtattacacttttggtttatattg

SEQ ID NO: 2338019 - DNA, 25 bp, Homo sapien
tttggtttatattggtgatacatct

SEQ ID NO: 2338020 - DNA, 25 bp, Homo sapien
tcatgtctttatctgttcttagtgt

SEQ ID NO: 2338021 - DNA, 25 bp, Homo sapien
tgttcttagtgtcaaagagcccacc

SEQ ID NO: 2338022 - DNA, 25 bp, Homo sapien
aattgattgaataagtataggagag

SEQ ID NO: 2338023 - DNA, 25 bp, Homo sapien
tcttaagattaattagactggtcaa

SEQ ID NO: 2338024 - DNA, 25 bp, Homo sapien
ttatgaacttggaatgatcttaagc

SEQ ID NO: 2338025 - DNA, 25 bp, Homo sapien
gcaccttactatttaaaacacagag

SEQ ID NO: 2338026 - DNA, 25 bp, Homo sapien
caggatgtacaggtaccacttaaac

SEQ ID NO: 2338027 - DNA, 25 bp, Homo sapien
taagtttgcatcctagcaggatgta

SEQ ID NO: 2338028 - DNA, 25 bp, Homo sapien
tcttagtggtcatctagtgctatcc

SEQ ID NO: 2338029 - DNA, 25 bp, Homo sapien
taagacagctgagtatggaatggca

SEQ ID NO: 2338030 - DNA, 25 bp, Homo sapien
tcatcttgccctacttcgaacaggt

SEQ ID NO: 2338031 - DNA, 25 bp, Homo sapien
gaataagttccctaagtccctgtca

SEQ ID NO: 2338032 - DNA, 25 bp, Homo sapien
taaagtatagtgttcctgtgtctgg

SEQ ID NO: 2338033 - DNA, 25 bp, Homo sapien
aaaatagatacgtgagaaagtcctc

SEQ ID NO: 2338034 - DNA, 25 bp, Homo sapien
gttattcacgaagcgaggtcaggac

SEQ ID NO: 2338035 - DNA, 25 bp, Homo sapien
gaacgttttgctatccacctgctct

SEQ ID NO: 2338036 - DNA, 25 bp, Homo sapien
ccagttcactgtgtcccgtgaccat

SEQ ID NO: 2338037 - DNA, 25 bp, Homo sapien
gagtagctatcttctgccagttcac

SEQ ID NO: 2338038 - DNA, 25 bp, Homo sapien
agagagtagctatcttctgccagtt

SEQ ID NO: 2338039 - DNA, 25 bp, Homo sapien
ctgccagttcactgtgtcccgtgac

SEQ ID NO: 2338040 - DNA, 25 bp, Homo sapien
tttgcaaacctagccgacttcagct

SEQ ID NO: 2338041 - DNA, 25 bp, Homo sapien
gcatgagttcatcactagttttaag

SEQ ID NO: 2338042 - DNA, 25 bp, Homo sapien
gaacagagcatgagttcatcactag

SEQ ID NO: 2338043 - DNA, 25 bp, Homo sapien
agtttctgagagtgtgattgcctga

SEQ ID NO: 2338044 - DNA, 25 bp, Homo sapien
ggctattgtagcaagtgtgacacgc

SEQ ID NO: 2338045 - DNA, 25 bp, Homo sapien
ctattgtagcaagtgtgacacgcat

SEQ ID NO: 2338046 - DNA, 25 bp, Homo sapien
caggctattgtagcaagtgtgacac

SEQ ID NO: 2338047 - DNA, 25 bp, Homo sapien
ccaggctattgtagcaagtgtgaca

SEQ ID NO: 2338048 - DNA, 25 bp, Homo sapien
gaataattggagacaaaagaaacca

SEQ ID NO: 2338049 - DNA, 25 bp, Homo sapien
ctgtgtgtgaataattggagacaaa

SEQ ID NO: 2338050 - DNA, 25 bp, Homo sapien
gtgtgaataattggagacaaaagaa

SEQ ID NO: 2338051 - DNA, 25 bp, Homo sapien
tgaataattggagacaaaagaaacc

SEQ ID NO: 2338052 - DNA, 25 bp, Homo sapien
cactggctgttggtttcacctctga

SEQ ID NO: 2338053 - DNA, 25 bp, Homo sapien
aaatcttcattttcgatatctggca

SEQ ID NO: 2338054 - DNA, 25 bp, Homo sapien
gattcgaacgcagtctttgatgaaa

SEQ ID NO: 2338055 - DNA, 25 bp, Homo sapien
cacctctgatcggaacttgttatgg

SEQ ID NO: 2338056 - DNA, 25 bp, Homo sapien
gtgtccaaagagaagtaaaatgtgc

SEQ ID NO: 2338057 - DNA, 25 bp, Homo sapien
gtccaaagagaagtaaaatgtgctg

SEQ ID NO: 2338058 - DNA, 25 bp, Homo sapien
aatgtgctgtggcacttgcttataa

SEQ ID NO: 2338059 - DNA, 25 bp, Homo sapien
gtgctgtggcacttgcttataacaa

SEQ ID NO: 2338060 - DNA, 25 bp, Homo sapien
caattgctggcccatgcttttgcaa

SEQ ID NO: 2338061 - DNA, 25 bp, Homo sapien
tatccgagtcttgaagtcatagtcc

SEQ ID NO: 2338062 - DNA, 25 bp, Homo sapien
cataccagtttgtgatggcggaaga

SEQ ID NO: 2338063 - DNA, 25 bp, Homo sapien
catagtcctggatttcgtcatacca

SEQ ID NO: 2338064 - DNA, 25 bp, Homo sapien
gacaggaaggcagcgtctgaagaca

SEQ ID NO: 2338065 - DNA, 25 bp, Homo sapien
tgaagacaattatgacagatgctcc

SEQ ID NO: 2338066 - DNA, 25 bp, Homo sapien
gctccctagagagttgtttccatca

SEQ ID NO: 2338067 - DNA, 25 bp, Homo sapien
atgctccctagagagttgtttccat

SEQ ID NO: 2338068 - DNA, 25 bp, Homo sapien
aactttagggcaaaattgaactgcg

SEQ ID NO: 2338069 - DNA, 25 bp, Homo sapien
gaactgcgcagccaactttgtaact

SEQ ID NO: 2338070 - DNA, 25 bp, Homo sapien
tccattggaaagagcgtcaaagcca

SEQ ID NO: 2338071 - DNA, 25 bp, Homo sapien
cctggtccgtagttgcatataaaat

SEQ ID NO: 2338072 - DNA, 25 bp, Homo sapien
ttaataagcacagtattaagtggtt

SEQ ID NO: 2338073 - DNA, 25 bp, Homo sapien
ttaagtggtttaagttctagaatga

SEQ ID NO: 2338074 - DNA, 25 bp, Homo sapien
agtcatttatgatacttagttgtgc

SEQ ID NO: 2338075 - DNA, 25 bp, Homo sapien
tatgatacttagttgtgcattccaa

SEQ ID NO: 2338076 - DNA, 25 bp, Homo sapien
gctaatatgatggtggagtgttgtc

SEQ ID NO: 2338077 - DNA, 25 bp, Homo sapien
caaagatgatactgctaagtcagag

SEQ ID NO: 2338078 - DNA, 25 bp, Homo sapien
aatatgatggtggagtgttgtcttc

SEQ ID NO: 2338079 - DNA, 25 bp, Homo sapien
gctaagtcagagtcacgtttattgc

SEQ ID NO: 2338080 - DNA, 25 bp, Homo sapien
ggtggctcctctcttatatggccaa

SEQ ID NO: 2338081 - DNA, 25 bp, Homo sapien
cagagattgtccaaacacttgtcat

SEQ ID NO: 2338082 - DNA, 25 bp, Homo sapien
cacttgtcattattggggcaggcac

SEQ ID NO: 2338083 - DNA, 25 bp, Homo sapien
tatatggccaagttgggtaattccc

SEQ ID NO: 2338084 - DNA, 25 bp, Homo sapien
ttattctattggtgtattgttcctt

SEQ ID NO: 2338085 - DNA, 25 bp, Homo sapien
tattagatgctcgtggtagaaccca

SEQ ID NO: 2338086 - DNA, 25 bp, Homo sapien
gttctgcagcagtcgctattagatg

SEQ ID NO: 2338087 - DNA, 25 bp, Homo sapien
atctggtcctctgggtactggtgag

SEQ ID NO: 2338088 - DNA, 25 bp, Homo sapien
ggtagaacccatcaatcatctggtc

SEQ ID NO: 2338089 - DNA, 25 bp, Homo sapien
ttgacttggtctcgctgtcggttaa

SEQ ID NO: 2338090 - DNA, 25 bp, Homo sapien
gtttgacttggtctcgctgtcggtt

SEQ ID NO: 2338091 - DNA, 25 bp, Homo sapien
tttgacttggtctcgctgtcggtta

SEQ ID NO: 2338092 - DNA, 25 bp, Homo sapien
gagagaagtgtatctgttacgtgga

SEQ ID NO: 2338093 - DNA, 25 bp, Homo sapien
tacttgtgctgtaccaaaatggtaa

SEQ ID NO: 2338094 - DNA, 25 bp, Homo sapien
tggtaattataacagacagtattag

SEQ ID NO: 2338095 - DNA, 25 bp, Homo sapien
gttacgtggatatatgggccagcct

SEQ ID NO: 2338096 - DNA, 25 bp, Homo sapien
gaaactaaaattgatgtggccagca

SEQ ID NO: 2338097 - DNA, 25 bp, Homo sapien
tatttagagtcgaagcagcatgcaa

SEQ ID NO: 2338098 - DNA, 25 bp, Homo sapien
tccacacggtggaggctttaacact

SEQ ID NO: 2338099 - DNA, 25 bp, Homo sapien
gaaactgggagctcttacagctgaa

SEQ ID NO: 2338100 - DNA, 25 bp, Homo sapien
gcaagaagatccctgagctctgctg

SEQ ID NO: 2338101 - DNA, 25 bp, Homo sapien
aagtaaccctccaaagtgaacagtg

SEQ ID NO: 2338102 - DNA, 25 bp, Homo sapien
gagagggctcaccagcaatattgta

SEQ ID NO: 2338103 - DNA, 25 bp, Homo sapien
tgtgaaagatacaaacccagggcag

SEQ ID NO: 2338104 - DNA, 25 bp, Homo sapien
tgtaggctaaacaagcagaagccat

SEQ ID NO: 2338105 - DNA, 25 bp, Homo sapien
caaagcatttattccacctaaggaa

SEQ ID NO: 2338106 - DNA, 25 bp, Homo sapien
tttattaatgtaggctaaacaagca

SEQ ID NO: 2338107 - DNA, 25 bp, Homo sapien
gccatcagtaagagacaagaggaaa

SEQ ID NO: 2338108 - DNA, 25 bp, Homo sapien
aatagcaaagttcatagatacttga

SEQ ID NO: 2338109 - DNA, 25 bp, Homo sapien
ttatgtctggctcacatgaatagca

SEQ ID NO: 2338110 - DNA, 25 bp, Homo sapien
ctggctcacatgaatagcaaagttc

SEQ ID NO: 2338111 - DNA, 25 bp, Homo sapien
gcaaagttcatagatacttgaatta

SEQ ID NO: 2338112 - DNA, 25 bp, Homo sapien
accatggttggagtctttcagggaa

SEQ ID NO: 2338113 - DNA, 25 bp, Homo sapien
tctgctcagcatgtgaactcattgc

SEQ ID NO: 2338114 - DNA, 25 bp, Homo sapien
tcccttccttggctatatcctaaag

SEQ ID NO: 2338115 - DNA, 25 bp, Homo sapien
tctctcacgtatgggttttcttcca

SEQ ID NO: 2338116 - DNA, 25 bp, Homo sapien
ggtttgtgaccctgtagccactgta

SEQ ID NO: 2338117 - DNA, 25 bp, Homo sapien
tcttccttgcaacgtggctaccaaa

SEQ ID NO: 2338118 - DNA, 25 bp, Homo sapien
tataaactgcatccaggaggtttgt

SEQ ID NO: 2338119 - DNA, 25 bp, Homo sapien
gcaacattattgtgactgtgtgctc

SEQ ID NO: 2338120 - DNA, 25 bp, Homo sapien
agttgtcatgtatctgtcccagtct

SEQ ID NO: 2338121 - DNA, 25 bp, Homo sapien
tgctgatgctatgcccctagataac

SEQ ID NO: 2338122 - DNA, 25 bp, Homo sapien
tattttaggagcttcacaactgtct

SEQ ID NO: 2338123 - DNA, 25 bp, Homo sapien
gaagtcccaatttcagtatgcctgc

SEQ ID NO: 2338124 - DNA, 25 bp, Homo sapien
taagtaactagttgcagtgactcac

SEQ ID NO: 2338125 - DNA, 25 bp, Homo sapien
tttaaattggatagggacttcgtca

SEQ ID NO: 2338126 - DNA, 25 bp, Homo sapien
ggacttcgtcaggtaaacattgtaa

SEQ ID NO: 2338127 - DNA, 25 bp, Homo sapien
cattgtaagtaactagttgcagtga

SEQ ID NO: 2338128 - DNA, 25 bp, Homo sapien
tctctttgcaagagtgtgggtatcc

SEQ ID NO: 2338129 - DNA, 25 bp, Homo sapien
caagagtgtgggtatccccaagcat

SEQ ID NO: 2338130 - DNA, 25 bp, Homo sapien
ttgcaagagtgtgggtatccccaag

SEQ ID NO: 2338131 - DNA, 25 bp, Homo sapien
tctttgcaagagtgtgggtatcccc

SEQ ID NO: 2338132 - DNA, 25 bp, Homo sapien
tgatgccaccccagatatcagtcaa

SEQ ID NO: 2338133 - DNA, 25 bp, Homo sapien
gcctagtgctgattcttgattcaaa

SEQ ID NO: 2338134 - DNA, 25 bp, Homo sapien
tcacagagttgcttcgcaggctgcc

SEQ ID NO: 2338135 - DNA, 25 bp, Homo sapien
caggctgcccatccgtatttttcac

SEQ ID NO: 2338136 - DNA, 25 bp, Homo sapien
catcctgtcggagagatagcatgag

SEQ ID NO: 2338137 - DNA, 25 bp, Homo sapien
gagggatttgtgcacacggagtcat

SEQ ID NO: 2338138 - DNA, 25 bp, Homo sapien
gatagcatgagggatttgtgcacac

SEQ ID NO: 2338139 - DNA, 25 bp, Homo sapien
cagatcacatcctgtcggagagata

SEQ ID NO: 2338140 - DNA, 25 bp, Homo sapien
cattactgcctgtccctgacctgtg

SEQ ID NO: 2338141 - DNA, 25 bp, Homo sapien
taggagattgagcataaccaagcgc

SEQ ID NO: 2338142 - DNA, 25 bp, Homo sapien
tgtccctccataaaacaggccagtt

SEQ ID NO: 2338143 - DNA, 25 bp, Homo sapien
tttctgcaagacaacaatggctgat

SEQ ID NO: 2338144 - DNA, 25 bp, Homo sapien
agcttttctattaccgagtgtatcc

SEQ ID NO: 2338145 - DNA, 25 bp, Homo sapien
ttctccactagacggtaagcttttc

SEQ ID NO: 2338146 - DNA, 25 bp, Homo sapien
ctattaccgagtgtatccatatatc

SEQ ID NO: 2338147 - DNA, 25 bp, Homo sapien
gggtatcggggcatcttctccacta

SEQ ID NO: 2338148 - DNA, 25 bp, Homo sapien
aaaaggtgtgcgtgtgtcgaaagac

SEQ ID NO: 2338149 - DNA, 25 bp, Homo sapien
ccatctggtgccattggcctccgaa

SEQ ID NO: 2338150 - DNA, 25 bp, Homo sapien
cattggcctccgaaatcttttaggc

SEQ ID NO: 2338151 - DNA, 25 bp, Homo sapien
agtctgtgctaaaaggtgtgcgtgt

SEQ ID NO: 2338152 - DNA, 25 bp, Homo sapien
gctctgaccatgagatgttgttttc

SEQ ID NO: 2338153 - DNA, 25 bp, Homo sapien
agatgttgttttcaagcgagtgatc

SEQ ID NO: 2338154 - DNA, 25 bp, Homo sapien
gggattgccgctctgaccatgagat

SEQ ID NO: 2338155 - DNA, 25 bp, Homo sapien
ccatttcaggggattgccgctctga

SEQ ID NO: 2338156 - DNA, 25 bp, Homo sapien
caagtgaaggatataccagctgcca

SEQ ID NO: 2338157 - DNA, 25 bp, Homo sapien
caggcaagtgaaggatataccagct

SEQ ID NO: 2338158 - DNA, 25 bp, Homo sapien
tcacaggcaagtgaaggatatacca

SEQ ID NO: 2338159 - DNA, 25 bp, Homo sapien
gaaggatataccagctgccagaatt

SEQ ID NO: 2338160 - DNA, 25 bp, Homo sapien
ggtggaagcatcggacagagtagaa

SEQ ID NO: 2338161 - DNA, 25 bp, Homo sapien
gtactattaaaagcacaggccatga

SEQ ID NO: 2338162 - DNA, 25 bp, Homo sapien
aatcagtgcaatgccagcttgggcc

SEQ ID NO: 2338163 - DNA, 25 bp, Homo sapien
gagactgtactattaaaagcacagg

SEQ ID NO: 2338164 - DNA, 25 bp, Homo sapien
tggcccatgacagccagtccaatca

SEQ ID NO: 2338165 - DNA, 25 bp, Homo sapien
tgaacatcaacatctttggttccct

SEQ ID NO: 2338166 - DNA, 25 bp, Homo sapien
ccctttgccttgttgccaagaaatc

SEQ ID NO: 2338167 - DNA, 25 bp, Homo sapien
tcaaggactgaacatcaacatcttt

SEQ ID NO: 2338168 - DNA, 25 bp, Homo sapien
ttgccttgttgccaagaaatcatca

SEQ ID NO: 2338169 - DNA, 25 bp, Homo sapien
atgacatcaccagtgtgcaacaatg

SEQ ID NO: 2338170 - DNA, 25 bp, Homo sapien
atcgtcttgtgtcatccctatattc

SEQ ID NO: 2338171 - DNA, 25 bp, Homo sapien
acatcaccagtgtgcaacaatggta

SEQ ID NO: 2338172 - DNA, 25 bp, Homo sapien
caccagtgtgcaacaatggtactaa

SEQ ID NO: 2338173 - DNA, 25 bp, Homo sapien
tttgctctccactgataaaattttc

SEQ ID NO: 2338174 - DNA, 25 bp, Homo sapien
attttcttggccttgtggtatctac

SEQ ID NO: 2338175 - DNA, 25 bp, Homo sapien
ccactgataaaattttcttggcctt

SEQ ID NO: 2338176 - DNA, 25 bp, Homo sapien
tgataaaattttcttggccttgtgg

SEQ ID NO: 2338177 - DNA, 25 bp, Homo sapien
ctttggcagcaggtatttgctatca

SEQ ID NO: 2338178 - DNA, 25 bp, Homo sapien
ggcagcaggtatttgctatcagtat

SEQ ID NO: 2338179 - DNA, 25 bp, Homo sapien
tggcagcaggtatttgctatcagta

SEQ ID NO: 2338180 - DNA, 25 bp, Homo sapien
tttggcagcaggtatttgctatcag

SEQ ID NO: 2338181 - DNA, 25 bp, Homo sapien
gtggtccactttctggtgcccttct

SEQ ID NO: 2338182 - DNA, 25 bp, Homo sapien
tggtccactttctggtgcccttctg

SEQ ID NO: 2338183 - DNA, 25 bp, Homo sapien
taagccttcataagtgtgagccccg

SEQ ID NO: 2338184 - DNA, 25 bp, Homo sapien
tctgggcgttgatgaaatgcatcct

SEQ ID NO: 2338185 - DNA, 25 bp, Homo sapien
taataataggttctcaagttctggg

SEQ ID NO: 2338186 - DNA, 25 bp, Homo sapien
gagcatctcgtgtctatatccatca

SEQ ID NO: 2338187 - DNA, 25 bp, Homo sapien
ccagagttgactcatcgaagaatgg

SEQ ID NO: 2338188 - DNA, 25 bp, Homo sapien
actccttgaccagagttgactcatc

SEQ ID NO: 2338189 - DNA, 25 bp, Homo sapien
agaatggacaactgatgaaaatagc

SEQ ID NO: 2338190 - DNA, 25 bp, Homo sapien
gactcatcgaagaatggacaactga

SEQ ID NO: 2338191 - DNA, 25 bp, Homo sapien
ctgaacttgtaaattgacaggagat

SEQ ID NO: 2338192 - DNA, 25 bp, Homo sapien
gctgctgaacttgtaaattgacagg

SEQ ID NO: 2338193 - DNA, 25 bp, Homo sapien
tgctgaacttgtaaattgacaggag

SEQ ID NO: 2338194 - DNA, 25 bp, Homo sapien
gctgaacttgtaaattgacaggaga

SEQ ID NO: 2338195 - DNA, 25 bp, Homo sapien
gtgttctacacaggccagtcatggg

SEQ ID NO: 2338196 - DNA, 25 bp, Homo sapien
gttgcgtgcgctacagatctggtga

SEQ ID NO: 2338197 - DNA, 25 bp, Homo sapien
caggtgggcccttcacagtgttcta

SEQ ID NO: 2338198 - DNA, 25 bp, Homo sapien
aatgctcttaggatcagcgcctcag

SEQ ID NO: 2338199 - DNA, 25 bp, Homo sapien
gtcagcaaacttcacaagggcaaag

SEQ ID NO: 2338200 - DNA, 25 bp, Homo sapien
aacctgggaacgctgcacacaagtt

SEQ ID NO: 2338201 - DNA, 25 bp, Homo sapien
gttccttcacccaataacattagag

SEQ ID NO: 2338202 - DNA, 25 bp, Homo sapien
gagaaggcttactcacactcagcag

SEQ ID NO: 2338203 - DNA, 25 bp, Homo sapien
gcaaacaggtgttcaatcggcaccc

SEQ ID NO: 2338204 - DNA, 25 bp, Homo sapien
cttcagacattccagttgtgcaaac

SEQ ID NO: 2338205 - DNA, 25 bp, Homo sapien
tgttcaatcggcacccattccaatt

SEQ ID NO: 2338206 - DNA, 25 bp, Homo sapien
ttcagacattccagttgtgcaaaca

SEQ ID NO: 2338207 - DNA, 25 bp, Homo sapien
cattccattgacagggctcagtgtc

SEQ ID NO: 2338208 - DNA, 25 bp, Homo sapien
tgggacattccattgacagggctca

SEQ ID NO: 2338209 - DNA, 25 bp, Homo sapien
ttagtgggacattccattgacaggg

SEQ ID NO: 2338210 - DNA, 25 bp, Homo sapien
aagaagtattcataagcttggtatt

SEQ ID NO: 2338211 - DNA, 25 bp, Homo sapien
gagttgctgtaatgataagacaaaa

SEQ ID NO: 2338212 - DNA, 25 bp, Homo sapien
ttaagttgtgcagtaaatcacttcc

SEQ ID NO: 2338213 - DNA, 25 bp, Homo sapien
tttaagttgtgcagtaaatcacttc

SEQ ID NO: 2338214 - DNA, 25 bp, Homo sapien
cttatagagttgctgtaatgataag

SEQ ID NO: 2338215 - DNA, 25 bp, Homo sapien
agtctgacttcatctagtgtctgac

SEQ ID NO: 2338216 - DNA, 25 bp, Homo sapien
ggctgtcaggttttgggcccacaaa

SEQ ID NO: 2338217 - DNA, 25 bp, Homo sapien
ctccatgagattgtaataataacac

SEQ ID NO: 2338218 - DNA, 25 bp, Homo sapien
tgggcccacaaatgaagtctgactt

SEQ ID NO: 2338219 - DNA, 25 bp, Homo sapien
catgtctgattaaggagcagacacc

SEQ ID NO: 2338220 - DNA, 25 bp, Homo sapien
agctgatgcaatgggtagagctgct

SEQ ID NO: 2338221 - DNA, 25 bp, Homo sapien
agacaccaggcgagcacagcaagct

SEQ ID NO: 2338222 - DNA, 25 bp, Homo sapien
gcacagcaagctgatgcaatgggta

SEQ ID NO: 2338223 - DNA, 25 bp, Homo sapien
cccagttgtggccctctagagaagt

SEQ ID NO: 2338224 - DNA, 25 bp, Homo sapien
agtaccttcccagttgtggccctct

SEQ ID NO: 2338225 - DNA, 25 bp, Homo sapien
cagttgtggccctctagagaagtgg

SEQ ID NO: 2338226 - DNA, 25 bp, Homo sapien
gtaccttcccagttgtggccctcta

SEQ ID NO: 2338227 - DNA, 25 bp, Homo sapien
aattggtttggctaattctcattga

SEQ ID NO: 2338228 - DNA, 25 bp, Homo sapien
catggaattggtttggctaattctc

SEQ ID NO: 2338229 - DNA, 25 bp, Homo sapien
tcatggaattggtttggctaattct

SEQ ID NO: 2338230 - DNA, 25 bp, Homo sapien
tggaattggtttggctaattctcat

SEQ ID NO: 2338231 - DNA, 25 bp, Homo sapien
taactgagaaaacagtacacagatg

SEQ ID NO: 2338232 - DNA, 25 bp, Homo sapien
aactgagaaaacagtacacagatgg

SEQ ID NO: 2338233 - DNA, 25 bp, Homo sapien
aataactgagaaaacagtacacaga

SEQ ID NO: 2338234 - DNA, 25 bp, Homo sapien
cgaataactgagaaaacagtacaca

SEQ ID NO: 2338235 - DNA, 25 bp, Homo sapien
tccaaccctgccactgcggtgcaat

SEQ ID NO: 2338236 - DNA, 25 bp, Homo sapien
tgaggtagtgcaccagccttaaatc

SEQ ID NO: 2338237 - DNA, 25 bp, Homo sapien
ccagccttaaatcatcactctggac

SEQ ID NO: 2338238 - DNA, 25 bp, Homo sapien
tggaccgcctctcctagtccatcaa

SEQ ID NO: 2338239 - DNA, 25 bp, Homo sapien
cctgcctgtgaccaacagggtgagt

SEQ ID NO: 2338240 - DNA, 25 bp, Homo sapien
catagggcataagcttggaccttgt

SEQ ID NO: 2338241 - DNA, 25 bp, Homo sapien
cttgtgctgtcttagtgggtcctgc

SEQ ID NO: 2338242 - DNA, 25 bp, Homo sapien
tggcagcaataacaagtgtgctgac

SEQ ID NO: 2338243 - DNA, 25 bp, Homo sapien
tgatggggcgaacttcagtttccac

SEQ ID NO: 2338244 - DNA, 25 bp, Homo sapien
cattaaaacaacagactatggtcct

SEQ ID NO: 2338245 - DNA, 25 bp, Homo sapien
cagactatggtcctgactggttcca

SEQ ID NO: 2338246 - DNA, 25 bp, Homo sapien
gctctagtggttggcttgattcaat

SEQ ID NO: 2338247 - DNA, 25 bp, Homo sapien
gcaaatgcaggctcagaccaaaatg

SEQ ID NO: 2338248 - DNA, 25 bp, Homo sapien
ggagcctctggtgaacaacagtcat

SEQ ID NO: 2338249 - DNA, 25 bp, Homo sapien
tcttctggtcaatgttcgacgtgct

SEQ ID NO: 2338250 - DNA, 25 bp, Homo sapien
caacagtcatccctttggacttctt

SEQ ID NO: 2338251 - DNA, 25 bp, Homo sapien
ttatccaccctgaggtaaattaacc

SEQ ID NO: 2338252 - DNA, 25 bp, Homo sapien
ggttaatttacctcagggtggataa

SEQ ID NO: 2338253 - DNA, 25 bp, Homo sapien
acaatgtagccctctgaattgacaa

SEQ ID NO: 2338254 - DNA, 25 bp, Homo sapien
cagttacaatgtagccctctgaatt

SEQ ID NO: 2338255 - DNA, 25 bp, Homo sapien
gttacaatgtagccctctgaattga

SEQ ID NO: 2338256 - DNA, 25 bp, Homo sapien
tacaatgtagccctctgaattgaca

SEQ ID NO: 2338257 - DNA, 25 bp, Homo sapien
caccatttgccgttttgctgacttc

SEQ ID NO: 2338258 - DNA, 25 bp, Homo sapien
cttttcatctgagtccttactaact

SEQ ID NO: 2338259 - DNA, 25 bp, Homo sapien
tagaagttctttgggccatcctgcc

SEQ ID NO: 2338260 - DNA, 25 bp, Homo sapien
tactaactcctagtttgccagggct

SEQ ID NO: 2338261 - DNA, 25 bp, Homo sapien
cccaggagtagcattgtggttcaaa

SEQ ID NO: 2338262 - DNA, 25 bp, Homo sapien
gccattttgcctgccttctagtgca

SEQ ID NO: 2338263 - DNA, 25 bp, Homo sapien
gccatattgatacatagagagcttc

SEQ ID NO: 2338264 - DNA, 25 bp, Homo sapien
gatacaccatagttcttttgaccag

SEQ ID NO: 2338265 - DNA, 25 bp, Homo sapien
ttgataacagttcacgtctccaaaa

SEQ ID NO: 2338266 - DNA, 25 bp, Homo sapien
cagagtgatcagtccctcataacag

SEQ ID NO: 2338267 - DNA, 25 bp, Homo sapien
gactccaagttagccagagtgatca

SEQ ID NO: 2338268 - DNA, 25 bp, Homo sapien
tgccacacgactccaagttagccag

SEQ ID NO: 2338269 - DNA, 25 bp, Homo sapien
gatcagtccctcataacagccatct

SEQ ID NO: 2338270 - DNA, 25 bp, Homo sapien
ctttctgccatgaagcaagttgctg

SEQ ID NO: 2338271 - DNA, 25 bp, Homo sapien
ttcgcttcgatcaacaatacgtgtg

SEQ ID NO: 2338272 - DNA, 25 bp, Homo sapien
gcaacgtggagatacacccttcagt

SEQ ID NO: 2338273 - DNA, 25 bp, Homo sapien
gacagcgagtgatgccagtgattag

SEQ ID NO: 2338274 - DNA, 25 bp, Homo sapien
ttctcctcacgtcttatactgtgtt

SEQ ID NO: 2338275 - DNA, 25 bp, Homo sapien
tcttctcctcacgtcttatactgtg

SEQ ID NO: 2338276 - DNA, 25 bp, Homo sapien
cttcttctcctcacgtcttatactg

SEQ ID NO: 2338277 - DNA, 25 bp, Homo sapien
ctcctcacgtcttatactgtgtttc

SEQ ID NO: 2338278 - DNA, 25 bp, Homo sapien
cacctgtgggccctgttgatgccat

SEQ ID NO: 2338279 - DNA, 25 bp, Homo sapien
acctgtgggccctgttgatgccatc

SEQ ID NO: 2338280 - DNA, 25 bp, Homo sapien
tcctgcaccagttccctagaggaac

SEQ ID NO: 2338281 - DNA, 25 bp, Homo sapien
ctgacaagttagccagaaacaaagc

SEQ ID NO: 2338282 - DNA, 25 bp, Homo sapien
gacaagttagccagaaacaaagcat

SEQ ID NO: 2338283 - DNA, 25 bp, Homo sapien
tgacaagttagccagaaacaaagca

SEQ ID NO: 2338284 - DNA, 25 bp, Homo sapien
taacacatttgtattgacgaccatg

SEQ ID NO: 2338285 - DNA, 25 bp, Homo sapien
gctgcttgtacagaggcgtttttta

SEQ ID NO: 2338286 - DNA, 25 bp, Homo sapien
gcgtcttgaatgagacagctgcttg

SEQ ID NO: 2338287 - DNA, 25 bp, Homo sapien
ccatgaaaggattcagcgtcttgaa

SEQ ID NO: 2338288 - DNA, 25 bp, Homo sapien
aactggcgtggactggtcctcattg

SEQ ID NO: 2338289 - DNA, 25 bp, Homo sapien
tggactggtcctcattggcagccat

SEQ ID NO: 2338290 - DNA, 25 bp, Homo sapien
cgtggactggtcctcattggcagcc

SEQ ID NO: 2338291 - DNA, 25 bp, Homo sapien
tggcgtggactggtcctcattggca

SEQ ID NO: 2338292 - DNA, 25 bp, Homo sapien
ctggctaggcgtggtagatcacacc

SEQ ID NO: 2338293 - DNA, 25 bp, Homo sapien
aaatttgagtaagagctggctaggc

SEQ ID NO: 2338294 - DNA, 25 bp, Homo sapien
cccacagaatatggcagtgttgcta

SEQ ID NO: 2338295 - DNA, 25 bp, Homo sapien
gattgccctggctaggactatgagg

SEQ ID NO: 2338296 - DNA, 25 bp, Homo sapien
agcgttctgtgcaatcagcctcaac

SEQ ID NO: 2338297 - DNA, 25 bp, Homo sapien
agtcctgcttacgttgttcttctga

SEQ ID NO: 2338298 - DNA, 25 bp, Homo sapien
tgaaaaagaagtaagctggcttcag

SEQ ID NO: 2338299 - DNA, 25 bp, Homo sapien
tcagcaaagtccccgtaaaagcaag

SEQ ID NO: 2338300 - DNA, 25 bp, Homo sapien
tcatggcttgatgtagccaaactgg

SEQ ID NO: 2338301 - DNA, 25 bp, Homo sapien
cctttggctcacaagtcactggctg

SEQ ID NO: 2338302 - DNA, 25 bp, Homo sapien
ggaaatgaaccccacaggatgttct

SEQ ID NO: 2338303 - DNA, 25 bp, Homo sapien
tggcagacagcactaacaactatca

SEQ ID NO: 2338304 - DNA, 25 bp, Homo sapien
ggctgtaactagtcatgtggttcca

SEQ ID NO: 2338305 - DNA, 25 bp, Homo sapien
gcagcactctgcgattctctcccag

SEQ ID NO: 2338306 - DNA, 25 bp, Homo sapien
ttcgggttgagcccggccatcgcca

SEQ ID NO: 2338307 - DNA, 25 bp, Homo sapien
ctcccagggctgcaagaaaaagcag

SEQ ID NO: 2338308 - DNA, 25 bp, Homo sapien
tcccttcgggttgagcccggccatc

SEQ ID NO: 2338309 - DNA, 25 bp, Homo sapien
ggcaattggactcccggacatccct

SEQ ID NO: 2338310 - DNA, 25 bp, Homo sapien
gtaagagcttggcaattggactccc

SEQ ID NO: 2338311 - DNA, 25 bp, Homo sapien
ttctccatcgcactgtgtaagagct

SEQ ID NO: 2338312 - DNA, 25 bp, Homo sapien
ttttccactgtaggaatctcttccc

SEQ ID NO: 2338313 - DNA, 25 bp, Homo sapien
aatgcttcaccgtaatctttctgta

SEQ ID NO: 2338314 - DNA, 25 bp, Homo sapien
atgcttcaccgtaatctttctgtat

SEQ ID NO: 2338315 - DNA, 25 bp, Homo sapien
gcttgaatttgtccctggttaatac

SEQ ID NO: 2338316 - DNA, 25 bp, Homo sapien
ttttcgctttcacatcaaggcttct

SEQ ID NO: 2338317 - DNA, 25 bp, Homo sapien
tgtactctgtaccaatgcagctttt

SEQ ID NO: 2338318 - DNA, 25 bp, Homo sapien
ctgtggtcatatcctttaagatctg

SEQ ID NO: 2338319 - DNA, 25 bp, Homo sapien
gccgaaggaatgtcacacttcaaag

SEQ ID NO: 2338320 - DNA, 25 bp, Homo sapien
cacacttcaaagaaacctcactgca

SEQ ID NO: 2338321 - DNA, 25 bp, Homo sapien
ctttgaagtgccgaaggaatgtcac

SEQ ID NO: 2338322 - DNA, 25 bp, Homo sapien
ctgggtcctttgaagtgccgaagga

SEQ ID NO: 2338323 - DNA, 25 bp, Homo sapien
ggaagcacagctgatatgctgccat

SEQ ID NO: 2338324 - DNA, 25 bp, Homo sapien
gatgggaagcacagctgatatgctg

SEQ ID NO: 2338325 - DNA, 25 bp, Homo sapien
ctctggatgggaagcacagctgata

SEQ ID NO: 2338326 - DNA, 25 bp, Homo sapien
tctggatgggaagcacagctgatat

SEQ ID NO: 2338327 - DNA, 25 bp, Homo sapien
tgtgtgtaggagatggatagagaaa

SEQ ID NO: 2338328 - DNA, 25 bp, Homo sapien
gtgtgtaggagatggatagagaaac

SEQ ID NO: 2338329 - DNA, 25 bp, Homo sapien
taagccagaggttccaatttggtcc

SEQ ID NO: 2338330 - DNA, 25 bp, Homo sapien
gtctgtcgctgtctgccgaatatga

SEQ ID NO: 2338331 - DNA, 25 bp, Homo sapien
gaaacatgattactcttaagccaga

SEQ ID NO: 2338332 - DNA, 25 bp, Homo sapien
atttggtccgcagctccgtctgtcg

SEQ ID NO: 2338333 - DNA, 25 bp, Homo sapien
aatttctccagcgtatagacctgat

SEQ ID NO: 2338334 - DNA, 25 bp, Homo sapien
tctccagcgtatagacctgatctcc

SEQ ID NO: 2338335 - DNA, 25 bp, Homo sapien
tttctccagcgtatagacctgatct

SEQ ID NO: 2338336 - DNA, 25 bp, Homo sapien
ttctccagcgtatagacctgatctc

SEQ ID NO: 2338337 - DNA, 25 bp, Homo sapien
gagcaggatgggctaagcaggtctg

SEQ ID NO: 2338338 - DNA, 25 bp, Homo sapien
taaacgtttcttgatggtgattcgg

SEQ ID NO: 2338339 - DNA, 25 bp, Homo sapien
ggtgtcgggaatatttgtcatctgg

SEQ ID NO: 2338340 - DNA, 25 bp, Homo sapien
gatgggctaagcaggtctgttgtcc

SEQ ID NO: 2338341 - DNA, 25 bp, Homo sapien
cagggcgcggttgctgggtcatgag

SEQ ID NO: 2338342 - DNA, 25 bp, Homo sapien
acagggcgcggttgctgggtcatga

SEQ ID NO: 2338343 - DNA, 25 bp, Homo sapien
tgcctcgcacaagcatgatcaatca

SEQ ID NO: 2338344 - DNA, 25 bp, Homo sapien
gcacaagcatgatcaatcaccatga

SEQ ID NO: 2338345 - DNA, 25 bp, Homo sapien
agggctcacagattgaagagtttgg

SEQ ID NO: 2338346 - DNA, 25 bp, Homo sapien
tgatcaatcaccatgatgagactgg

SEQ ID NO: 2338347 - DNA, 25 bp, Homo sapien
cacatagagtgttgttagtccatac

SEQ ID NO: 2338348 - DNA, 25 bp, Homo sapien
tctgccttgatagaaacttgatttg

SEQ ID NO: 2338349 - DNA, 25 bp, Homo sapien
aatcaaggctagctctcacagtaga

SEQ ID NO: 2338350 - DNA, 25 bp, Homo sapien
tggttggtttttaggccacatagag

SEQ ID NO: 2338351 - DNA, 25 bp, Homo sapien
tttgaaataggttaaacatttctga

SEQ ID NO: 2338352 - DNA, 25 bp, Homo sapien
tgtaatgaggaatagtgtgcgcaga

SEQ ID NO: 2338353 - DNA, 25 bp, Homo sapien
tcgagacttcctggattaccaaatc

SEQ ID NO: 2338354 - DNA, 25 bp, Homo sapien
aggagcatacagaagtttattgagc

SEQ ID NO: 2338355 - DNA, 25 bp, Homo sapien
gatgggagatgaccaataatttgac

SEQ ID NO: 2338356 - DNA, 25 bp, Homo sapien
gggagatgaccaataatttgaccat

SEQ ID NO: 2338357 - DNA, 25 bp, Homo sapien
gagatgaccaataatttgaccattt

SEQ ID NO: 2338358 - DNA, 25 bp, Homo sapien
gctggctttgacaaagtagcttttc

SEQ ID NO: 2338359 - DNA, 25 bp, Homo sapien
cttctttttgagtagtcagcctctc

SEQ ID NO: 2338360 - DNA, 25 bp, Homo sapien
tgaactacttctttttgagtagtca

SEQ ID NO: 2338361 - DNA, 25 bp, Homo sapien
acttgaactacttctttttgagtag

SEQ ID NO: 2338362 - DNA, 25 bp, Homo sapien
ttctttttgagtagtcagcctctcc

SEQ ID NO: 2338363 - DNA, 25 bp, Homo sapien
catttcacatactaggagactgaca

SEQ ID NO: 2338364 - DNA, 25 bp, Homo sapien
tgacatgagttacccaggtgtgatg

SEQ ID NO: 2338365 - DNA, 25 bp, Homo sapien
gactgacatgagttacccaggtgtg

SEQ ID NO: 2338366 - DNA, 25 bp, Homo sapien
cacatactaggagactgacatgagt

SEQ ID NO: 2338367 - DNA, 25 bp, Homo sapien
cctcctcttcttcttccagaataaa

SEQ ID NO: 2338368 - DNA, 25 bp, Homo sapien
cctcttcttcttccagaataaaaat

SEQ ID NO: 2338369 - DNA, 25 bp, Homo sapien
tcctcttcttcttccagaataaaaa

SEQ ID NO: 2338370 - DNA, 25 bp, Homo sapien
ctcctcttcttcttccagaataaaa

SEQ ID NO: 2338371 - DNA, 25 bp, Homo sapien
ttgcatctgatgactctgatttgcg

SEQ ID NO: 2338372 - DNA, 25 bp, Homo sapien
tctgatttgcgaatgctgcgtaccc

SEQ ID NO: 2338373 - DNA, 25 bp, Homo sapien
tgaggctctgctatgccctgaattg

SEQ ID NO: 2338374 - DNA, 25 bp, Homo sapien
tatgccctgaattggaggaggaact

SEQ ID NO: 2338375 - DNA, 25 bp, Homo sapien
gtttatcctgtatttgcaacccctg

SEQ ID NO: 2338376 - DNA, 25 bp, Homo sapien
cttaaaacaacaggtcagtgggcac

SEQ ID NO: 2338377 - DNA, 25 bp, Homo sapien
tgtgctttgtttgactgccctgact

SEQ ID NO: 2338378 - DNA, 25 bp, Homo sapien
tgccctgactccagttctgctgaga

SEQ ID NO: 2338379 - DNA, 25 bp, Homo sapien
aggcgctttcgcattttcccacggt

SEQ ID NO: 2338380 - DNA, 25 bp, Homo sapien
tcaaggcgctttcgcattttcccac

SEQ ID NO: 2338381 - DNA, 25 bp, Homo sapien
aaggcgctttcgcattttcccacgg

SEQ ID NO: 2338382 - DNA, 25 bp, Homo sapien
caaggcgctttcgcattttcccacg

SEQ ID NO: 2338383 - DNA, 25 bp, Homo sapien
catcatccttggatctccaagaata

SEQ ID NO: 2338384 - DNA, 25 bp, Homo sapien
atcatccttggatctccaagaataa

SEQ ID NO: 2338385 - DNA, 25 bp, Homo sapien
tcatcatccttggatctccaagaat

SEQ ID NO: 2338386 - DNA, 25 bp, Homo sapien
gggaggagagcggagaattcctgtt

SEQ ID NO: 2338387 - DNA, 25 bp, Homo sapien
aggagccctgccgtagactgacctg

SEQ ID NO: 2338388 - DNA, 25 bp, Homo sapien
ctgccgtactcctgccagtgaaggg

SEQ ID NO: 2338389 - DNA, 25 bp, Homo sapien
ggagccctgccgtactcctgccagt

SEQ ID NO: 2338390 - DNA, 25 bp, Homo sapien
tcttccagcgatgagtttggagcca

SEQ ID NO: 2338391 - DNA, 25 bp, Homo sapien
gctgtgatcttccagcgatgagttt

SEQ ID NO: 2338392 - DNA, 25 bp, Homo sapien
agccataggccggctcaggcggcat

SEQ ID NO: 2338393 - DNA, 25 bp, Homo sapien
ccagcgatgagtttggagccatagg

SEQ ID NO: 2338394 - DNA, 25 bp, Homo sapien
atttacaaaagcatctggttttact

SEQ ID NO: 2338395 - DNA, 25 bp, Homo sapien
gtaacgcggacagcctctctctctg

SEQ ID NO: 2338396 - DNA, 25 bp, Homo sapien
caagtgatgactgggagggctgata

SEQ ID NO: 2338397 - DNA, 25 bp, Homo sapien
tctctctgacagcagattgtcagca

SEQ ID NO: 2338398 - DNA, 25 bp, Homo sapien
tgcttgtcacaaggcagtggattgc

SEQ ID NO: 2338399 - DNA, 25 bp, Homo sapien
tgccaggtccctttgtaacttcctg

SEQ ID NO: 2338400 - DNA, 25 bp, Homo sapien
cctatgacaaagcagtggtctgtgg

SEQ ID NO: 2338401 - DNA, 25 bp, Homo sapien
tatcctgcccgaacacctatgacaa

SEQ ID NO: 2338402 - DNA, 25 bp, Homo sapien
ctgttgccacatttcaacaccaccg

SEQ ID NO: 2338403 - DNA, 25 bp, Homo sapien
taacaacagggagtccttccaggtc

SEQ ID NO: 2338404 - DNA, 25 bp, Homo sapien
cagggcatttgctaagtggagtaca

SEQ ID NO: 2338405 - DNA, 25 bp, Homo sapien
gcttattgacttgcacggttgggca

SEQ ID NO: 2338406 - DNA, 25 bp, Homo sapien
tgttacattccgaggtcagccttct

SEQ ID NO: 2338407 - DNA, 25 bp, Homo sapien
tatatctgacagtaaagtttgctgc

SEQ ID NO: 2338408 - DNA, 25 bp, Homo sapien
gaacctggagcaattttatagcaca

SEQ ID NO: 2338409 - DNA, 25 bp, Homo sapien
tgctgcaagtgtatgagttcaaaca

SEQ ID NO: 2338410 - DNA, 25 bp, Homo sapien
ctacgaagataggactgtgaacatt

SEQ ID NO: 2338411 - DNA, 25 bp, Homo sapien
ggcagatccaatagaagacccgctc

SEQ ID NO: 2338412 - DNA, 25 bp, Homo sapien
gcccttgttccttagtctgctgtga

SEQ ID NO: 2338413 - DNA, 25 bp, Homo sapien
tttttcaaccgaaagggcagatcca

SEQ ID NO: 2338414 - DNA, 25 bp, Homo sapien
ccacctaagatattttgaagcctga

SEQ ID NO: 2338415 - DNA, 25 bp, Homo sapien
gaaacggtcagtattagaccactgc

SEQ ID NO: 2338416 - DNA, 25 bp, Homo sapien
gaaaatcacttcctatttgcatggc

SEQ ID NO: 2338417 - DNA, 25 bp, Homo sapien
catagatgatacaaagtcctcttgg

SEQ ID NO: 2338418 - DNA, 25 bp, Homo sapien
agaccactgctaggttatgtagtca

SEQ ID NO: 2338419 - DNA, 25 bp, Homo sapien
tagtttggacatcaccctactgaaa

SEQ ID NO: 2338420 - DNA, 25 bp, Homo sapien
acttgaggaagtgggacgagcacat

SEQ ID NO: 2338421 - DNA, 25 bp, Homo sapien
tcatcacgatgcaggaaacgatttc

SEQ ID NO: 2338422 - DNA, 25 bp, Homo sapien
gccccgcaccagatcaagtagtttg

SEQ ID NO: 2338423 - DNA, 25 bp, Homo sapien
gagcgcaagggcaagtacatgtact

SEQ ID NO: 2338424 - DNA, 25 bp, Homo sapien
tggcggtcaaatccacgcggcagaa

SEQ ID NO: 2338425 - DNA, 25 bp, Homo sapien
gcaaggagatcgactttcggtgccc

SEQ ID NO: 2338426 - DNA, 25 bp, Homo sapien
ggtgcagtacaagaatcgtcaggcc

SEQ ID NO: 2338427 - DNA, 25 bp, Homo sapien
ggctaattcccaagaaccgagaggc

SEQ ID NO: 2338428 - DNA, 25 bp, Homo sapien
tgaattcttcgtatccccgtgaggg

SEQ ID NO: 2338429 - DNA, 25 bp, Homo sapien
tgcgaggccgaccagacgtttggaa

SEQ ID NO: 2338430 - DNA, 25 bp, Homo sapien
cagtgtgggatctcagcaccggata

SEQ ID NO: 2338431 - DNA, 25 bp, Homo sapien
aaagctggccaagcataatccggtg

SEQ ID NO: 2338432 - DNA, 25 bp, Homo sapien
tctatctgttccaacgtgggcacag

SEQ ID NO: 2338433 - DNA, 25 bp, Homo sapien
gatgaatattcaggacgccctcgtg

SEQ ID NO: 2338434 - DNA, 25 bp, Homo sapien
caatgtgaaggctagaaagctggcc

SEQ ID NO: 2338435 - DNA, 25 bp, Homo sapien
ctacacctgcccttggagactgtga

SEQ ID NO: 2338436 - DNA, 25 bp, Homo sapien
gacattgtagacttaacctctgagc

SEQ ID NO: 2338437 - DNA, 25 bp, Homo sapien
gcaaagttatcaccaatctacggga

SEQ ID NO: 2338438 - DNA, 25 bp, Homo sapien
aatacgtaactgcaaattctgggct

SEQ ID NO: 2338439 - DNA, 25 bp, Homo sapien
tgtttttgggaggaattgtctacac

SEQ ID NO: 2338440 - DNA, 25 bp, Homo sapien
tctgagtctggctaccccacagaat

SEQ ID NO: 2338441 - DNA, 25 bp, Homo sapien
gtttagtggcaacatacaagcttgc

SEQ ID NO: 2338442 - DNA, 25 bp, Homo sapien
tctgtaatgaaacttaccctctctg

SEQ ID NO: 2338443 - DNA, 25 bp, Homo sapien
catcatgtccaggttcaaggtacag

SEQ ID NO: 2338444 - DNA, 25 bp, Homo sapien
aaggaggctaaaggctactggcatc

SEQ ID NO: 2338445 - DNA, 25 bp, Homo sapien
ggcatccaacctctcctgtaaaaag

SEQ ID NO: 2338446 - DNA, 25 bp, Homo sapien
tatgctcacagtgctaaaagtagga

SEQ ID NO: 2338447 - DNA, 25 bp, Homo sapien
tggaactggcttgtagagtggtact

SEQ ID NO: 2338448 - DNA, 25 bp, Homo sapien
aataccttaattgtgtggaactggc

SEQ ID NO: 2338449 - DNA, 25 bp, Homo sapien
gctttatggtcactcaagtagggta

SEQ ID NO: 2338450 - DNA, 25 bp, Homo sapien
taggttaatgatatggtaaggcccc

SEQ ID NO: 2338451 - DNA, 25 bp, Homo sapien
taaccatagttcatcgaaatgcagc

SEQ ID NO: 2338452 - DNA, 25 bp, Homo sapien
cacaaggtccaagatttgttttcag

SEQ ID NO: 2338453 - DNA, 25 bp, Homo sapien
gaagtatgtaacctgaaatccttaa

SEQ ID NO: 2338454 - DNA, 25 bp, Homo sapien
tttgtagtgctatccattcctctcc

SEQ ID NO: 2338455 - DNA, 25 bp, Homo sapien
gataacctgcactgtaatagcctaa

SEQ ID NO: 2338456 - DNA, 25 bp, Homo sapien
tgtttacctaactacctcatggatg

SEQ ID NO: 2338457 - DNA, 25 bp, Homo sapien
tagttactggtaccacagtgaggtg

SEQ ID NO: 2338458 - DNA, 25 bp, Homo sapien
gcctatttgtaatgccagtgtgaca

SEQ ID NO: 2338459 - DNA, 25 bp, Homo sapien
gaatcggaaacgtcagcagccattt

SEQ ID NO: 2338460 - DNA, 25 bp, Homo sapien
tgttgccagctgagccgacaaatgc

SEQ ID NO: 2338461 - DNA, 25 bp, Homo sapien
gactcaaagtaggtaatcagcatct

SEQ ID NO: 2338462 - DNA, 25 bp, Homo sapien
tgcagtcagccctattggaatcgga

SEQ ID NO: 2338463 - DNA, 25 bp, Homo sapien
taatatttggcagggcaggttgcat

SEQ ID NO: 2338464 - DNA, 25 bp, Homo sapien
gtttaccagggttgtcaacaagcaa

SEQ ID NO: 2338465 - DNA, 25 bp, Homo sapien
cacccgtgtttgtctttgagcagca

SEQ ID NO: 2338466 - DNA, 25 bp, Homo sapien
gcatatcaagttgtaaacacccgtg

SEQ ID NO: 2338467 - DNA, 25 bp, Homo sapien
tgaaccaggcgcaggatgtcctcaa

SEQ ID NO: 2338468 - DNA, 25 bp, Homo sapien
catctttggaaacgagtatctgggt

SEQ ID NO: 2338469 - DNA, 25 bp, Homo sapien
tacatttgaagatatcccactgctg

SEQ ID NO: 2338470 - DNA, 25 bp, Homo sapien
gtcaatgaaccctactgccctaaag

SEQ ID NO: 2338471 - DNA, 25 bp, Homo sapien
tcgtcctgtgaggtcggacaggacc

SEQ ID NO: 2338472 - DNA, 25 bp, Homo sapien
gaccagcgcttttatcggggacggc

SEQ ID NO: 2338473 - DNA, 25 bp, Homo sapien
gagtccggaccccggagcctgagag

SEQ ID NO: 2338474 - DNA, 25 bp, Homo sapien
catactagtcgccggtaacggatgg

SEQ ID NO: 2338475 - DNA, 25 bp, Homo sapien
cgagcggcgggctcttgggtctttt

SEQ ID NO: 2338476 - DNA, 25 bp, Homo sapien
gggtcttttttagcgccatctgctc

SEQ ID NO: 2338477 - DNA, 25 bp, Homo sapien
tgctgacgctaattgtatatgagcg

SEQ ID NO: 2338478 - DNA, 25 bp, Homo sapien
taattgtatatgagcgcgagcggcg

SEQ ID NO: 2338479 - DNA, 25 bp, Homo sapien
gaggacggttcagttgctaggcaac

SEQ ID NO: 2338480 - DNA, 25 bp, Homo sapien
ctggacccgcctctcgctcgcgttg

SEQ ID NO: 2338481 - DNA, 25 bp, Homo sapien
cgcgttgctgggagactacaaggcc

SEQ ID NO: 2338482 - DNA, 25 bp, Homo sapien
agaggagcccaagcgcggcgcctgg

SEQ ID NO: 2338483 - DNA, 25 bp, Homo sapien
attaggccttgacagggagcgtccg

SEQ ID NO: 2338484 - DNA, 25 bp, Homo sapien
gccgccgaagtggtctagaggaaaa

SEQ ID NO: 2338485 - DNA, 25 bp, Homo sapien
aaaagaactgaagccgaactgacgg

SEQ ID NO: 2338486 - DNA, 25 bp, Homo sapien
gagtgtcctcattataacgcatcca

SEQ ID NO: 2338487 - DNA, 25 bp, Homo sapien
ttaccttttattgagcggtcactat

SEQ ID NO: 2338488 - DNA, 25 bp, Homo sapien
tattgagcggtcactatatatgtca

SEQ ID NO: 2338489 - DNA, 25 bp, Homo sapien
ttttattgagcggtcactatatatg

SEQ ID NO: 2338490 - DNA, 25 bp, Homo sapien
ttgagcggtcactatatatgtcagg

SEQ ID NO: 2338491 - DNA, 25 bp, Homo sapien
aaccacagtacacgcatttcttcta

SEQ ID NO: 2338492 - DNA, 25 bp, Homo sapien
tccttctaatggaaggcctttggac

SEQ ID NO: 2338493 - DNA, 25 bp, Homo sapien
ctccagaagcaaaccacagtacacg

SEQ ID NO: 2338494 - DNA, 25 bp, Homo sapien
atccttctaatggaaggcctttgga

SEQ ID NO: 2338495 - DNA, 25 bp, Homo sapien
acactggcagggtgaacttttacag

SEQ ID NO: 2338496 - DNA, 25 bp, Homo sapien
cactggcagggtgaacttttacagt

SEQ ID NO: 2338497 - DNA, 25 bp, Homo sapien
ttccagagacatcccgaatcagagt

SEQ ID NO: 2338498 - DNA, 25 bp, Homo sapien
cattccagagacatcccgaatcaga

SEQ ID NO: 2338499 - DNA, 25 bp, Homo sapien
tccagagacatcccgaatcagagtc

SEQ ID NO: 2338500 - DNA, 25 bp, Homo sapien
accattccagagacatcccgaatca

SEQ ID NO: 2338501 - DNA, 25 bp, Homo sapien
agtgccttgtttccaaggaggaact

SEQ ID NO: 2338502 - DNA, 25 bp, Homo sapien
ttccaaggaggaactgcagcccaga

SEQ ID NO: 2338503 - DNA, 25 bp, Homo sapien
gagtgccttgtttccaaggaggaac

SEQ ID NO: 2338504 - DNA, 25 bp, Homo sapien
tgtttccaaggaggaactgcagccc

SEQ ID NO: 2338505 - DNA, 25 bp, Homo sapien
tgtatagcaaaactaccaactccgc

SEQ ID NO: 2338506 - DNA, 25 bp, Homo sapien
gattagaacatgtcttcctgtgcaa

SEQ ID NO: 2338507 - DNA, 25 bp, Homo sapien
cgcttgaagcgcctaagattagaac

SEQ ID NO: 2338508 - DNA, 25 bp, Homo sapien
cttgtcattcaggtcaccaactttg

SEQ ID NO: 2338509 - DNA, 25 bp, Homo sapien
tcttgagcgcaaattgctgtcacac

SEQ ID NO: 2338510 - DNA, 25 bp, Homo sapien
cttctttataagctcactggcatct

SEQ ID NO: 2338511 - DNA, 25 bp, Homo sapien
ctggcatcttgagcgcaaattgctg

SEQ ID NO: 2338512 - DNA, 25 bp, Homo sapien
cgcaaattgctgtcacacgagcatc

SEQ ID NO: 2338513 - DNA, 25 bp, Homo sapien
atgctttaatgccttcgagactatg

SEQ ID NO: 2338514 - DNA, 25 bp, Homo sapien
taatgccttcgagactatggtgact

SEQ ID NO: 2338515 - DNA, 25 bp, Homo sapien
ccttcgagactatggtgactcctgc

SEQ ID NO: 2338516 - DNA, 25 bp, Homo sapien
tttaatgccttcgagactatggtga

SEQ ID NO: 2338517 - DNA, 25 bp, Homo sapien
ctaaacgtggaccactggccacgaa

SEQ ID NO: 2338518 - DNA, 25 bp, Homo sapien
cgtggaccactggccacgaaaaacg

SEQ ID NO: 2338519 - DNA, 25 bp, Homo sapien
accactggccacgaaaaacgcccag

SEQ ID NO: 2338520 - DNA, 25 bp, Homo sapien
taaacgtggaccactggccacgaaa

SEQ ID NO: 2338521 - DNA, 25 bp, Homo sapien
taactggcccaatttttcccacatc

SEQ ID NO: 2338522 - DNA, 25 bp, Homo sapien
ataactggcccaatttttcccacat

SEQ ID NO: 2338523 - DNA, 25 bp, Homo sapien
tcaataactggcccaatttttccca

SEQ ID NO: 2338524 - DNA, 25 bp, Homo sapien
ttttagtatgtatattaccaaaatg

SEQ ID NO: 2338525 - DNA, 25 bp, Homo sapien
tctttccacagtactggagttgcat

SEQ ID NO: 2338526 - DNA, 25 bp, Homo sapien
ctttctctgttcttcgactgtgatt

SEQ ID NO: 2338527 - DNA, 25 bp, Homo sapien
tccaaaagaggaattctttccacag

SEQ ID NO: 2338528 - DNA, 25 bp, Homo sapien
ttcgactgtgattcctgtaaattcc

SEQ ID NO: 2338529 - DNA, 25 bp, Homo sapien
gctccctgttattgtctggccagtg

SEQ ID NO: 2338530 - DNA, 25 bp, Homo sapien
ctgcttctagaaagtttctggctga

SEQ ID NO: 2338531 - DNA, 25 bp, Homo sapien
gagggactctaacagattgatgagc

SEQ ID NO: 2338532 - DNA, 25 bp, Homo sapien
tggccagtgtgcctcatcgtgccaa

SEQ ID NO: 2338533 - DNA, 25 bp, Homo sapien
gaagcacgtcaatggtttctgcatt

SEQ ID NO: 2338534 - DNA, 25 bp, Homo sapien
ttattgctgacacagaagcacgtca

SEQ ID NO: 2338535 - DNA, 25 bp, Homo sapien
attgatatgtagcaacagagaagcc

SEQ ID NO: 2338536 - DNA, 25 bp, Homo sapien
agaagcctctttaggaaagggatgg

SEQ ID NO: 2338537 - DNA, 25 bp, Homo sapien
cactgggatttgatgcatagagcac

SEQ ID NO: 2338538 - DNA, 25 bp, Homo sapien
aagtagctgaggctaagggagccca

SEQ ID NO: 2338539 - DNA, 25 bp, Homo sapien
taagggagcccaccagtctggctaa

SEQ ID NO: 2338540 - DNA, 25 bp, Homo sapien
gaggcccactgacataatagaggga

SEQ ID NO: 2338541 - DNA, 25 bp, Homo sapien
cttggtaatggttgaagtgggaatc

SEQ ID NO: 2338542 - DNA, 25 bp, Homo sapien
gaagtgggaatccttggatgagaac

SEQ ID NO: 2338543 - DNA, 25 bp, Homo sapien
atgagaacaagagagggtagcagtt

SEQ ID NO: 2338544 - DNA, 25 bp, Homo sapien
cttggctgaacttggtaatggttga

SEQ ID NO: 2338545 - DNA, 25 bp, Homo sapien
tggtgacggtcaataatgcccgaag

SEQ ID NO: 2338546 - DNA, 25 bp, Homo sapien
gggctactggtgacggtcaataatg

SEQ ID NO: 2338547 - DNA, 25 bp, Homo sapien
acggtcaataatgcccgaagatctc

SEQ ID NO: 2338548 - DNA, 25 bp, Homo sapien
cattggggctactggtgacggtcaa

SEQ ID NO: 2338549 - DNA, 25 bp, Homo sapien
ctgttgtggacctaaaagtagcaaa

SEQ ID NO: 2338550 - DNA, 25 bp, Homo sapien
tgtggacctaaaagtagcaaaacga

SEQ ID NO: 2338551 - DNA, 25 bp, Homo sapien
gctgttgtggacctaaaagtagcaa

SEQ ID NO: 2338552 - DNA, 25 bp, Homo sapien
tgttgtggacctaaaagtagcaaaa

SEQ ID NO: 2338553 - DNA, 25 bp, Homo sapien
catccccaaacaggaccatagttgt

SEQ ID NO: 2338554 - DNA, 25 bp, Homo sapien
caggaccatagttgtacccttatgc

SEQ ID NO: 2338555 - DNA, 25 bp, Homo sapien
tgtacccttatgctccacagtagtg

SEQ ID NO: 2338556 - DNA, 25 bp, Homo sapien
atagttgtacccttatgctccacag

SEQ ID NO: 2338557 - DNA, 25 bp, Homo sapien
ttcttagagctctggatatttctct

SEQ ID NO: 2338558 - DNA, 25 bp, Homo sapien
gagctctggatatttctcttgtaag

SEQ ID NO: 2338559 - DNA, 25 bp, Homo sapien
gctctggatatttctcttgtaagag

SEQ ID NO: 2338560 - DNA, 25 bp, Homo sapien
tagagctctggatatttctcttgta

SEQ ID NO: 2338561 - DNA, 25 bp, Homo sapien
caattcagtccatatcatccgcaga

SEQ ID NO: 2338562 - DNA, 25 bp, Homo sapien
ccattacaggagttgagggcttcaa

SEQ ID NO: 2338563 - DNA, 25 bp, Homo sapien
tgaggcctccccatattgacaaggg

SEQ ID NO: 2338564 - DNA, 25 bp, Homo sapien
cttttattctaaggagagtgcgggc

SEQ ID NO: 2338565 - DNA, 25 bp, Homo sapien
cattgagaaggtgccactttgggag

SEQ ID NO: 2338566 - DNA, 25 bp, Homo sapien
tcgtcagacttgctcctattgtcct

SEQ ID NO: 2338567 - DNA, 25 bp, Homo sapien
tcattgagaaggtgccactttggga

SEQ ID NO: 2338568 - DNA, 25 bp, Homo sapien
ctttgggaggatcgtcagacttgct

SEQ ID NO: 2338569 - DNA, 25 bp, Homo sapien
tgagggcaaggacagcggactggtc

SEQ ID NO: 2338570 - DNA, 25 bp, Homo sapien
aggacagcggactggtcccccaaag

SEQ ID NO: 2338571 - DNA, 25 bp, Homo sapien
gcaaggacagcggactggtccccca

SEQ ID NO: 2338572 - DNA, 25 bp, Homo sapien
cagcggactggtcccccaaaggagt

SEQ ID NO: 2338573 - DNA, 25 bp, Homo sapien
ttcccaggcaatcaagcagtgtcag

SEQ ID NO: 2338574 - DNA, 25 bp, Homo sapien
tcccaggcaatcaagcagtgtcagt

SEQ ID NO: 2338575 - DNA, 25 bp, Homo sapien
caaaggggtttgctctcttatgggc

SEQ ID NO: 2338576 - DNA, 25 bp, Homo sapien
aaggggtttgctctcttatgggcag

SEQ ID NO: 2338577 - DNA, 25 bp, Homo sapien
gggtttgctctcttatgggcagggg

SEQ ID NO: 2338578 - DNA, 25 bp, Homo sapien
gtcaaaggggtttgctctcttatgg

SEQ ID NO: 2338579 - DNA, 25 bp, Homo sapien
aggagagagcgtccataggggaaac

SEQ ID NO: 2338580 - DNA, 25 bp, Homo sapien
gcaggagagagcgtccataggggaa

SEQ ID NO: 2338581 - DNA, 25 bp, Homo sapien
caggagagagcgtccataggggaaa

SEQ ID NO: 2338582 - DNA, 25 bp, Homo sapien
tggcaggagagagcgtccatagggg

SEQ ID NO: 2338583 - DNA, 25 bp, Homo sapien
tcactgtcggtctccctctatggga

SEQ ID NO: 2338584 - DNA, 25 bp, Homo sapien
tgttaggataaaggcaaaactgcca

SEQ ID NO: 2338585 - DNA, 25 bp, Homo sapien
taggtaggtagccataggcccagct

SEQ ID NO: 2338586 - DNA, 25 bp, Homo sapien
gccacaagggtgactaagaggtgca

SEQ ID NO: 2338587 - DNA, 25 bp, Homo sapien
aggggagcgcagttactcttggcct

SEQ ID NO: 2338588 - DNA, 25 bp, Homo sapien
caggggagcgcagttactcttggcc

SEQ ID NO: 2338589 - DNA, 25 bp, Homo sapien
cagactgccagatcagccaattcaa

SEQ ID NO: 2338590 - DNA, 25 bp, Homo sapien
aaggggacacccacccagactgcca

SEQ ID NO: 2338591 - DNA, 25 bp, Homo sapien
tacctgcagtgtaagtacagcacac

SEQ ID NO: 2338592 - DNA, 25 bp, Homo sapien
aaatgtacagatagttataggccac

SEQ ID NO: 2338593 - DNA, 25 bp, Homo sapien
cataaattcaagcactaccactggt

SEQ ID NO: 2338594 - DNA, 25 bp, Homo sapien
gctaacttctacaagtaggcttcta

SEQ ID NO: 2338595 - DNA, 25 bp, Homo sapien
tttgactaagtggaaagagattctt

SEQ ID NO: 2338596 - DNA, 25 bp, Homo sapien
ttagaagagccacgtgaaacccatg

SEQ ID NO: 2338597 - DNA, 25 bp, Homo sapien
tgaaacatttgaactgatgagccac

SEQ ID NO: 2338598 - DNA, 25 bp, Homo sapien
tgttgaaattgtataggaccagtgt

SEQ ID NO: 2338599 - DNA, 25 bp, Homo sapien
ccttcacacatggaccgtaaacggt

SEQ ID NO: 2338600 - DNA, 25 bp, Homo sapien
gagcaaatgttatgggttcttaccc

SEQ ID NO: 2338601 - DNA, 25 bp, Homo sapien
aaacggttcccagttgtctgagagc

SEQ ID NO: 2338602 - DNA, 25 bp, Homo sapien
ggtacagtgtactctttgtcacagc

SEQ ID NO: 2338603 - DNA, 25 bp, Homo sapien
tgaaagcaatttttgccaaggtagt

SEQ ID NO: 2338604 - DNA, 25 bp, Homo sapien
tcctattgttcaggctaaggcaaat

SEQ ID NO: 2338605 - DNA, 25 bp, Homo sapien
gagagaataattgccctgaccacat

SEQ ID NO: 2338606 - DNA, 25 bp, Homo sapien
ctgaccacatttgcctttcagtagg

SEQ ID NO: 2338607 - DNA, 25 bp, Homo sapien
gccattcctagggagtagtgactgt

SEQ ID NO: 2338608 - DNA, 25 bp, Homo sapien
caaatatcagggaaacttaaactgg

SEQ ID NO: 2338609 - DNA, 25 bp, Homo sapien
taacatataacgctatgaggtgagt

SEQ ID NO: 2338610 - DNA, 25 bp, Homo sapien
cataagcttcatcttaatagcagat

SEQ ID NO: 2338611 - DNA, 25 bp, Homo sapien
gatgttttgtatactctttctgaat

SEQ ID NO: 2338612 - DNA, 25 bp, Homo sapien
taaatagagcactcttcagatgttt

SEQ ID NO: 2338613 - DNA, 25 bp, Homo sapien
caacttgatcaactttattgggtga

SEQ ID NO: 2338614 - DNA, 25 bp, Homo sapien
gcagtaggattgcttctgtagcaac

SEQ ID NO: 2338615 - DNA, 25 bp, Homo sapien
ttaaagtgggttcccaggactctga

SEQ ID NO: 2338616 - DNA, 25 bp, Homo sapien
gcctcattggagaaagcgttagctt

SEQ ID NO: 2338617 - DNA, 25 bp, Homo sapien
gaaataaccagtggcatacagaatg

SEQ ID NO: 2338618 - DNA, 25 bp, Homo sapien
tttccagagaccacataaaacatga

SEQ ID NO: 2338619 - DNA, 25 bp, Homo sapien
actaatatgggtagctggcagcggc

SEQ ID NO: 2338620 - DNA, 25 bp, Homo sapien
tggcagcggcgtacttggtgatcac

SEQ ID NO: 2338621 - DNA, 25 bp, Homo sapien
ctgcctgttggtactaatatgggta

SEQ ID NO: 2338622 - DNA, 25 bp, Homo sapien
ggcagcggcgtacttggtgatcact

SEQ ID NO: 2338623 - DNA, 25 bp, Homo sapien
tcctaaagttgtacacagtgggata

SEQ ID NO: 2338624 - DNA, 25 bp, Homo sapien
tgtacacagtgggatagcttgcacg

SEQ ID NO: 2338625 - DNA, 25 bp, Homo sapien
tagcttgcacggcacacctctaatc

SEQ ID NO: 2338626 - DNA, 25 bp, Homo sapien
gtgggatagcttgcacggcacacct

SEQ ID NO: 2338627 - DNA, 25 bp, Homo sapien
tttgtttacaatgataaagcctttg

SEQ ID NO: 2338628 - DNA, 25 bp, Homo sapien
gataaagcctttgaactatacttaa

SEQ ID NO: 2338629 - DNA, 25 bp, Homo sapien
actatacttaaagggcttgctctca

SEQ ID NO: 2338630 - DNA, 25 bp, Homo sapien
gaactatacttaaagggcttgctct

SEQ ID NO: 2338631 - DNA, 25 bp, Homo sapien
cattctttgagggatcgtgctatct

SEQ ID NO: 2338632 - DNA, 25 bp, Homo sapien
ggcctgctcagcattctttgaggga

SEQ ID NO: 2338633 - DNA, 25 bp, Homo sapien
cttgtataagtgtcttagaaaagcc

SEQ ID NO: 2338634 - DNA, 25 bp, Homo sapien
cgtgctatcttcttgtataagtgtc

SEQ ID NO: 2338635 - DNA, 25 bp, Homo sapien
tgagatagagggagagctagtgaaa

SEQ ID NO: 2338636 - DNA, 25 bp, Homo sapien
gctagtgaaagagtcaaaggattgg

SEQ ID NO: 2338637 - DNA, 25 bp, Homo sapien
gtcaaaggattggttaaagagacag

SEQ ID NO: 2338638 - DNA, 25 bp, Homo sapien
gacagaagaactaaaagtactggag

SEQ ID NO: 2338639 - DNA, 25 bp, Homo sapien
tgcactgaaggtggtagtggagagt

SEQ ID NO: 2338640 - DNA, 25 bp, Homo sapien
tggtagtggagagtgtgatgaagag

SEQ ID NO: 2338641 - DNA, 25 bp, Homo sapien
gtggagagtgtgatgaagagaagca

SEQ ID NO: 2338642 - DNA, 25 bp, Homo sapien
ctgcactgaaggtggtagtggagag

SEQ ID NO: 2338643 - DNA, 25 bp, Homo sapien
ttttgtaattggagtcgtaattctc

SEQ ID NO: 2338644 - DNA, 25 bp, Homo sapien
gtgtgtcttttgtaattggagtcgt

SEQ ID NO: 2338645 - DNA, 25 bp, Homo sapien
gtgtcttttgtaattggagtcgtaa

SEQ ID NO: 2338646 - DNA, 25 bp, Homo sapien
tcttttgtaattggagtcgtaattc

SEQ ID NO: 2338647 - DNA, 25 bp, Homo sapien
caagttaggagatcctctggatact

SEQ ID NO: 2338648 - DNA, 25 bp, Homo sapien
gggccaagttaggagatcctctgga

SEQ ID NO: 2338649 - DNA, 25 bp, Homo sapien
ggatactgttccaacatattcatca

SEQ ID NO: 2338650 - DNA, 25 bp, Homo sapien
gagatcctctggatactgttccaac

SEQ ID NO: 2338651 - DNA, 25 bp, Homo sapien
ggaatttcagagaatttcggagtaa

SEQ ID NO: 2338652 - DNA, 25 bp, Homo sapien
gggaatttcagagaatttcggagta

SEQ ID NO: 2338653 - DNA, 25 bp, Homo sapien
tgggtctttaattatggacatcaag

SEQ ID NO: 2338654 - DNA, 25 bp, Homo sapien
catcaagttattgcggtcacattcc

SEQ ID NO: 2338655 - DNA, 25 bp, Homo sapien
ggacatcaagttattgcggtcacat

SEQ ID NO: 2338656 - DNA, 25 bp, Homo sapien
cttttgggtctttaattatggacat

SEQ ID NO: 2338657 - DNA, 25 bp, Homo sapien
gaatcaggttccaaggagcttcaca

SEQ ID NO: 2338658 - DNA, 25 bp, Homo sapien
tgtaacgtaggaggaaagccaagcc

SEQ ID NO: 2338659 - DNA, 25 bp, Homo sapien
cctctctcaagagtggaatcaggtt

SEQ ID NO: 2338660 - DNA, 25 bp, Homo sapien
tttgcagagccaagcgacacggtgt

SEQ ID NO: 2338661 - DNA, 25 bp, Homo sapien
tgcggttaaggcgaggctccttctt

SEQ ID NO: 2338662 - DNA, 25 bp, Homo sapien
ggctgttggagcatttcgaccgccc

SEQ ID NO: 2338663 - DNA, 25 bp, Homo sapien
gcgctttgtcgctcggtgcggttaa

SEQ ID NO: 2338664 - DNA, 25 bp, Homo sapien
gtccctcctgaagtttgataggttg

SEQ ID NO: 2338665 - DNA, 25 bp, Homo sapien
ctcagggcgactgcgcacccttatt

SEQ ID NO: 2338666 - DNA, 25 bp, Homo sapien
ccgcacgggtgagtgttgctccatt

SEQ ID NO: 2338667 - DNA, 25 bp, Homo sapien
tattgccacgttctgagctcgggct

SEQ ID NO: 2338668 - DNA, 25 bp, Homo sapien
cccgccgaggagttctttggctcct

SEQ ID NO: 2338669 - DNA, 25 bp, Homo sapien
gacgccgcagtagccgctgccggta

SEQ ID NO: 2338670 - DNA, 25 bp, Homo sapien
cgctgccggtagcaagccgactgag

SEQ ID NO: 2338671 - DNA, 25 bp, Homo sapien
ccaggcggcggctgtagtgttagct

SEQ ID NO: 2338672 - DNA, 25 bp, Homo sapien
gttagctttggacgccgcagtagcc

SEQ ID NO: 2338673 - DNA, 25 bp, Homo sapien
ggcgtggccgaagcccgtgatccgg

SEQ ID NO: 2338674 - DNA, 25 bp, Homo sapien
gaatgtgaaggatcttcgcggttct

SEQ ID NO: 2338675 - DNA, 25 bp, Homo sapien
tcttcgcggttctgggtgcccagaa

SEQ ID NO: 2338676 - DNA, 25 bp, Homo sapien
gtgacgggaagagggcgtggccgaa

SEQ ID NO: 2338677 - DNA, 25 bp, Homo sapien
tcaggttaggaagggcccagtatga

SEQ ID NO: 2338678 - DNA, 25 bp, Homo sapien
cccagaaggcctggccgatcaacag

SEQ ID NO: 2338679 - DNA, 25 bp, Homo sapien
ggcccagtatgaccggcccagaagg

SEQ ID NO: 2338680 - DNA, 25 bp, Homo sapien
gaaggcctggccgatcaacaggcgc

SEQ ID NO: 2338681 - DNA, 25 bp, Homo sapien
ttgcaatatcttcactttcaattac

SEQ ID NO: 2338682 - DNA, 25 bp, Homo sapien
gcctgtcatcatatcatcaattcag

SEQ ID NO: 2338683 - DNA, 25 bp, Homo sapien
catagtttacaatggagggatgagc

SEQ ID NO: 2338684 - DNA, 25 bp, Homo sapien
ctgtcatcatatcatcaattcagct

SEQ ID NO: 2338685 - DNA, 25 bp, Homo sapien
atagtttacaatggagggatgagcc

SEQ ID NO: 2338686 - DNA, 25 bp, Homo sapien
tatctgggctcagcggaaaatagtg

SEQ ID NO: 2338687 - DNA, 25 bp, Homo sapien
ggaatgtaccagtctcatgttgatg

SEQ ID NO: 2338688 - DNA, 25 bp, Homo sapien
tcttcgaagaagtaaccagctggac

SEQ ID NO: 2338689 - DNA, 25 bp, Homo sapien
aagttgccaattggtaagggctgcc

SEQ ID NO: 2338690 - DNA, 25 bp, Homo sapien
gcccagttagcatggcatatctctt

SEQ ID NO: 2338691 - DNA, 25 bp, Homo sapien
ctttcagtgcagtttatgtgtgtcc

SEQ ID NO: 2338692 - DNA, 25 bp, Homo sapien
tatgtgtgtccttaagttaaagtga

SEQ ID NO: 2338693 - DNA, 25 bp, Homo sapien
ctgtgcccagttagcatggcatatc

SEQ ID NO: 2338694 - DNA, 25 bp, Homo sapien
attttgataggaattcagtgagtct

SEQ ID NO: 2338695 - DNA, 25 bp, Homo sapien
ggaattcagtgagtctgcagatcat

SEQ ID NO: 2338696 - DNA, 25 bp, Homo sapien
ttcagtgagtctgcagatcatttca

SEQ ID NO: 2338697 - DNA, 25 bp, Homo sapien
tctttcatctccttagtaggtttgt

SEQ ID NO: 2338698 - DNA, 25 bp, Homo sapien
agaccacatttggagtttactctgt

SEQ ID NO: 2338699 - DNA, 25 bp, Homo sapien
gaccacatttggagtttactctgtg

SEQ ID NO: 2338700 - DNA, 25 bp, Homo sapien
ccacatttggagtttactctgtgga

SEQ ID NO: 2338701 - DNA, 25 bp, Homo sapien
cacatttggagtttactctgtggat

SEQ ID NO: 2338702 - DNA, 25 bp, Homo sapien
cctgtgtcggactcccaagatactg

SEQ ID NO: 2338703 - DNA, 25 bp, Homo sapien
ttcagacccaattgataggaagcca

SEQ ID NO: 2338704 - DNA, 25 bp, Homo sapien
taacatggtgctacaaccaaggctc

SEQ ID NO: 2338705 - DNA, 25 bp, Homo sapien
tcccttattgttagactggcaagat

SEQ ID NO: 2338706 - DNA, 25 bp, Homo sapien
cagtctcaaagtcgtaggagatcta

SEQ ID NO: 2338707 - DNA, 25 bp, Homo sapien
taggagatctatatggtgaaatagc

SEQ ID NO: 2338708 - DNA, 25 bp, Homo sapien
tgatgaggcccgtccatattatgga

SEQ ID NO: 2338709 - DNA, 25 bp, Homo sapien
tttgatttatgaaggccttcaaccg

SEQ ID NO: 2338710 - DNA, 25 bp, Homo sapien
tcttcacgacagcaggggttggggc

SEQ ID NO: 2338711 - DNA, 25 bp, Homo sapien
tcacgacagcaggggttggggccac

SEQ ID NO: 2338712 - DNA, 25 bp, Homo sapien
cttcttcacgacagcaggggttggg

SEQ ID NO: 2338713 - DNA, 25 bp, Homo sapien
acagcaggggttggggccaccttct

SEQ ID NO: 2338714 - DNA, 25 bp, Homo sapien
ctccagtgccaaaattcttaggccg

SEQ ID NO: 2338715 - DNA, 25 bp, Homo sapien
cagtgccaaaattcttaggccgttt

SEQ ID NO: 2338716 - DNA, 25 bp, Homo sapien
ttttggggctggatgtcctctccag

SEQ ID NO: 2338717 - DNA, 25 bp, Homo sapien
tcctctccagtgccaaaattcttag

SEQ ID NO: 2338718 - DNA, 25 bp, Homo sapien
ctgatatagtgggggcatttgacaa

SEQ ID NO: 2338719 - DNA, 25 bp, Homo sapien
gggcatttgacaaagcaggtgaggc

SEQ ID NO: 2338720 - DNA, 25 bp, Homo sapien
gcatttgacaaagcaggtgaggcac

SEQ ID NO: 2338721 - DNA, 25 bp, Homo sapien
atagtgggggcatttgacaaagcag

SEQ ID NO: 2338722 - DNA, 25 bp, Homo sapien
ctatgtggcgatccaaggcctgggt

SEQ ID NO: 2338723 - DNA, 25 bp, Homo sapien
tatgtggcgatccaaggcctgggtg

SEQ ID NO: 2338724 - DNA, 25 bp, Homo sapien
tgtgggcccgcttaagcagccgagt

SEQ ID NO: 2338725 - DNA, 25 bp, Homo sapien
tgggcccgcttaagcagccgagtag

SEQ ID NO: 2338726 - DNA, 25 bp, Homo sapien
ttgtgggcccgcttaagcagccgag

SEQ ID NO: 2338727 - DNA, 25 bp, Homo sapien
gtgggcccgcttaagcagccgagta

SEQ ID NO: 2338728 - DNA, 25 bp, Homo sapien
tgcttctcttgctttgtttctggtc

SEQ ID NO: 2338729 - DNA, 25 bp, Homo sapien
tgggccaacagtctctgcttctctt

SEQ ID NO: 2338730 - DNA, 25 bp, Homo sapien
ctgggccaacagtctctgcttctct

SEQ ID NO: 2338731 - DNA, 25 bp, Homo sapien
ctcttgctttgtttctggtctgtac

SEQ ID NO: 2338732 - DNA, 25 bp, Homo sapien
ctttgctggcagctttcttctcagc

SEQ ID NO: 2338733 - DNA, 25 bp, Homo sapien
tcccctttgctggcagctttcttct

SEQ ID NO: 2338734 - DNA, 25 bp, Homo sapien
atcccctttgctggcagctttcttc

SEQ ID NO: 2338735 - DNA, 25 bp, Homo sapien
ccctttgctggcagctttcttctca

SEQ ID NO: 2338736 - DNA, 25 bp, Homo sapien
ccatcttgcactccaccaaggtggt

SEQ ID NO: 2338737 - DNA, 25 bp, Homo sapien
agccatcttgcactccaccaaggtg

SEQ ID NO: 2338738 - DNA, 25 bp, Homo sapien
gcagtgggggaaccccattttatga

SEQ ID NO: 2338739 - DNA, 25 bp, Homo sapien
cttgataatgcagtgggggaacccc

SEQ ID NO: 2338740 - DNA, 25 bp, Homo sapien
tgcagaggtacaatcagggatcaat

SEQ ID NO: 2338741 - DNA, 25 bp, Homo sapien
tacaatcagggatcaatggaacctc

SEQ ID NO: 2338742 - DNA, 25 bp, Homo sapien
cagaggtacaatcagggatcaatgg

SEQ ID NO: 2338743 - DNA, 25 bp, Homo sapien
ggtacaatcagggatcaatggaacc

SEQ ID NO: 2338744 - DNA, 25 bp, Homo sapien
ttaatcgacccatggttccacaggc

SEQ ID NO: 2338745 - DNA, 25 bp, Homo sapien
tttaatcgacccatggttccacagg

SEQ ID NO: 2338746 - DNA, 25 bp, Homo sapien
gagtcttcaacgcactgaggccatg

SEQ ID NO: 2338747 - DNA, 25 bp, Homo sapien
gatccgttgagcattaaagttgagg

SEQ ID NO: 2338748 - DNA, 25 bp, Homo sapien
gcacctcagtgggatcaagcttttc

SEQ ID NO: 2338749 - DNA, 25 bp, Homo sapien
ggtggtctccactgcagatccgttg

SEQ ID NO: 2338750 - DNA, 25 bp, Homo sapien
caggagggaaagaggaaaaaggatg

SEQ ID NO: 2338751 - DNA, 25 bp, Homo sapien
gtttcaaagcaggagggaaagagga

SEQ ID NO: 2338752 - DNA, 25 bp, Homo sapien
tgtttcaaagcaggagggaaagagg

SEQ ID NO: 2338753 - DNA, 25 bp, Homo sapien
ggagagcaggctctgtttagagccc

SEQ ID NO: 2338754 - DNA, 25 bp, Homo sapien
ggctctgtttagagccctttgtctg

SEQ ID NO: 2338755 - DNA, 25 bp, Homo sapien
aggctctgtttagagccctttgtct

SEQ ID NO: 2338756 - DNA, 25 bp, Homo sapien
gagagcaggctctgtttagagccct

SEQ ID NO: 2338757 - DNA, 25 bp, Homo sapien
ttggcgaattactggaagatggcgg

SEQ ID NO: 2338758 - DNA, 25 bp, Homo sapien
tggcgaattactggaagatggcggt

SEQ ID NO: 2338759 - DNA, 25 bp, Homo sapien
tttggcgaattactggaagatggcg

SEQ ID NO: 2338760 - DNA, 25 bp, Homo sapien
aggcctagagaacatatatggggtg

SEQ ID NO: 2338761 - DNA, 25 bp, Homo sapien
gcctagagaacatatatggggtgcc

SEQ ID NO: 2338762 - DNA, 25 bp, Homo sapien
atatgtggccaaacaaacaactcca

SEQ ID NO: 2338763 - DNA, 25 bp, Homo sapien
ctagagaacatatatggggtgcctc

SEQ ID NO: 2338764 - DNA, 25 bp, Homo sapien
tatcacctttcttatagattcgcat

SEQ ID NO: 2338765 - DNA, 25 bp, Homo sapien
aatatcacctttcttatagattcgc

SEQ ID NO: 2338766 - DNA, 25 bp, Homo sapien
acaatatcacctttcttatagattc

SEQ ID NO: 2338767 - DNA, 25 bp, Homo sapien
agttttgccatggtaacacttgtgg

SEQ ID NO: 2338768 - DNA, 25 bp, Homo sapien
ttgtttacaacaatgccaacagtat

SEQ ID NO: 2338769 - DNA, 25 bp, Homo sapien
gtttgtttacaacaatgccaacagt

SEQ ID NO: 2338770 - DNA, 25 bp, Homo sapien
tttgtttacaacaatgccaacagta

SEQ ID NO: 2338771 - DNA, 25 bp, Homo sapien
agtgcttaatgtgctcaatacgcac

SEQ ID NO: 2338772 - DNA, 25 bp, Homo sapien
agagtgcttaatgtgctcaatacgc

SEQ ID NO: 2338773 - DNA, 25 bp, Homo sapien
ctatctcagctcttagagtgcttaa

SEQ ID NO: 2338774 - DNA, 25 bp, Homo sapien
ttagagtgcttaatgtgctcaatac

SEQ ID NO: 2338775 - DNA, 25 bp, Homo sapien
tggcgctttagttgaacccaggtac

SEQ ID NO: 2338776 - DNA, 25 bp, Homo sapien
ttatgccatgaattcacagggaata

SEQ ID NO: 2338777 - DNA, 25 bp, Homo sapien
ctggcgctttagttgaacccaggta

SEQ ID NO: 2338778 - DNA, 25 bp, Homo sapien
tgccatgaattcacagggaataggt

SEQ ID NO: 2338779 - DNA, 25 bp, Homo sapien
tatagcccagaggtcctttatttat

SEQ ID NO: 2338780 - DNA, 25 bp, Homo sapien
ttatagcccagaggtcctttattta

SEQ ID NO: 2338781 - DNA, 25 bp, Homo sapien
atagcccagaggtcctttatttatt

SEQ ID NO: 2338782 - DNA, 25 bp, Homo sapien
tgtggttccaccagaaggtccaata

SEQ ID NO: 2338783 - DNA, 25 bp, Homo sapien
ggtccaatataacctggccatggtg

SEQ ID NO: 2338784 - DNA, 25 bp, Homo sapien
tcatccaccaagtcacattctatgt

SEQ ID NO: 2338785 - DNA, 25 bp, Homo sapien
caattctgagactcctgctcatcca

SEQ ID NO: 2338786 - DNA, 25 bp, Homo sapien
caccaccactgtcttacgatagaaa

SEQ ID NO: 2338787 - DNA, 25 bp, Homo sapien
tcttacgatagaaagagttgctcac

SEQ ID NO: 2338788 - DNA, 25 bp, Homo sapien
tgtctcccatattacaactgcttcc

SEQ ID NO: 2338789 - DNA, 25 bp, Homo sapien
tttgtctcccatattacaactgctt

SEQ ID NO: 2338790 - DNA, 25 bp, Homo sapien
gggcatattccctggttatccgatt

SEQ ID NO: 2338791 - DNA, 25 bp, Homo sapien
tggttatccgatttaaaatagtaca

SEQ ID NO: 2338792 - DNA, 25 bp, Homo sapien
catattccctggttatccgatttaa

SEQ ID NO: 2338793 - DNA, 25 bp, Homo sapien
ttctgaggggcatattccctggtta

SEQ ID NO: 2338794 - DNA, 25 bp, Homo sapien
gacagttatcgcagaaagggaaaat

SEQ ID NO: 2338795 - DNA, 25 bp, Homo sapien
agatggatgacagttatcgcagaaa

SEQ ID NO: 2338796 - DNA, 25 bp, Homo sapien
aattgtgactatttctccagcactg

SEQ ID NO: 2338797 - DNA, 25 bp, Homo sapien
gggttagcaattgtgactatttctc

SEQ ID NO: 2338798 - DNA, 25 bp, Homo sapien
taagatagagccaccaagacctcct

SEQ ID NO: 2338799 - DNA, 25 bp, Homo sapien
taggagcagctactatccccaaggc

SEQ ID NO: 2338800 - DNA, 25 bp, Homo sapien
gaggtctctcacacaactgcctaag

SEQ ID NO: 2338801 - DNA, 25 bp, Homo sapien
gagcccgtgctggagaaaccttata

SEQ ID NO: 2338802 - DNA, 25 bp, Homo sapien
cagcgtgtaggatgagacttttaaa

SEQ ID NO: 2338803 - DNA, 25 bp, Homo sapien
aaatgttgtttggacctctgggtgg

SEQ ID NO: 2338804 - DNA, 25 bp, Homo sapien
gagccctgctctttatgtttaacac

SEQ ID NO: 2338805 - DNA, 25 bp, Homo sapien
aacatggtatcagcgggcacacaga

SEQ ID NO: 2338806 - DNA, 25 bp, Homo sapien
cattttggagtgaacttcaggatta

SEQ ID NO: 2338807 - DNA, 25 bp, Homo sapien
gaggctatctatatcttcagctttg

SEQ ID NO: 2338808 - DNA, 25 bp, Homo sapien
ttcaggattacatttcctgaggcta

SEQ ID NO: 2338809 - DNA, 25 bp, Homo sapien
catttcctgaggctatctatatctt

SEQ ID NO: 2338810 - DNA, 25 bp, Homo sapien
tggagggctggcagtaagtatttcc

SEQ ID NO: 2338811 - DNA, 25 bp, Homo sapien
ggaaatcgtttgtctccgtactgct

SEQ ID NO: 2338812 - DNA, 25 bp, Homo sapien
cgtactgctccttttgacatggaaa

SEQ ID NO: 2338813 - DNA, 25 bp, Homo sapien
tcagagcagctttgtggtaagctca

SEQ ID NO: 2338814 - DNA, 25 bp, Homo sapien
tcttggacaggcaaatgcttaagca

SEQ ID NO: 2338815 - DNA, 25 bp, Homo sapien
tttgtgggtcaggacatccctctct

SEQ ID NO: 2338816 - DNA, 25 bp, Homo sapien
tcaggacatccctctcttggacagg

SEQ ID NO: 2338817 - DNA, 25 bp, Homo sapien
tgccccacgggcaggcagttgtgtt

SEQ ID NO: 2338818 - DNA, 25 bp, Homo sapien
ggtaattttgagagcattgcgtata

SEQ ID NO: 2338819 - DNA, 25 bp, Homo sapien
cacgactgtctcgataatatccagg

SEQ ID NO: 2338820 - DNA, 25 bp, Homo sapien
atggttttagaatcaggctgagtgg

SEQ ID NO: 2338821 - DNA, 25 bp, Homo sapien
tgcaggttgggaagcagcgggacga

SEQ ID NO: 2338822 - DNA, 25 bp, Homo sapien
aggctcgcttgtccccagaaggttg

SEQ ID NO: 2338823 - DNA, 25 bp, Homo sapien
ccccaataagaggtaggccagcact

SEQ ID NO: 2338824 - DNA, 25 bp, Homo sapien
atttcactacaccatggagactcac

SEQ ID NO: 2338825 - DNA, 25 bp, Homo sapien
agggagctacaacacagcacagcat

SEQ ID NO: 2338826 - DNA, 25 bp, Homo sapien
tccaagatccactcattagaaacta

SEQ ID NO: 2338827 - DNA, 25 bp, Homo sapien
ccaacaccaggcaaagatgtattta

SEQ ID NO: 2338828 - DNA, 25 bp, Homo sapien
tttatttccaagatccactcattag

SEQ ID NO: 2338829 - DNA, 25 bp, Homo sapien
ggggtctgaatctcatcatctgaca

SEQ ID NO: 2338830 - DNA, 25 bp, Homo sapien
gccaaagcacgcgttcctgatgtag

SEQ ID NO: 2338831 - DNA, 25 bp, Homo sapien
actgccaaagcacgcgttcctgatg

SEQ ID NO: 2338832 - DNA, 25 bp, Homo sapien
aaagcacgcgttcctgatgtaggtg

SEQ ID NO: 2338833 - DNA, 25 bp, Homo sapien
tcaactgccaaagcacgcgttcctg

SEQ ID NO: 2338834 - DNA, 25 bp, Homo sapien
ccagatacattgaagctccttcata

SEQ ID NO: 2338835 - DNA, 25 bp, Homo sapien
tctacaaccttcttgtactgaatat

SEQ ID NO: 2338836 - DNA, 25 bp, Homo sapien
gttaaatgtcttcagttagtcttat

SEQ ID NO: 2338837 - DNA, 25 bp, Homo sapien
tcttagatttgccctgttgagggca

SEQ ID NO: 2338838 - DNA, 25 bp, Homo sapien
ttgaggggattctaacacagcagga

SEQ ID NO: 2338839 - DNA, 25 bp, Homo sapien
ggccagtatctccaccttctatgaa

SEQ ID NO: 2338840 - DNA, 25 bp, Homo sapien
tataataaacttgttggtctggtct

SEQ ID NO: 2338841 - DNA, 25 bp, Homo sapien
ggtctttttcgtcattccagctcat

SEQ ID NO: 2338842 - DNA, 25 bp, Homo sapien
taaacttgttggtctggtcttctct

SEQ ID NO: 2338843 - DNA, 25 bp, Homo sapien
gccaacacgcctggtcatcttagat

SEQ ID NO: 2338844 - DNA, 25 bp, Homo sapien
aatggcttgcatagtattctcctgg

SEQ ID NO: 2338845 - DNA, 25 bp, Homo sapien
tcttagatatctttgcacggcagca

SEQ ID NO: 2338846 - DNA, 25 bp, Homo sapien
ctcctgggtccttttatctcactca

SEQ ID NO: 2338847 - DNA, 25 bp, Homo sapien
ttgctgctgcccatggatcacccag

SEQ ID NO: 2338848 - DNA, 25 bp, Homo sapien
tgctgctgcccatggatcacccaga

SEQ ID NO: 2338849 - DNA, 25 bp, Homo sapien
ctgcccatggatcacccagacacct

SEQ ID NO: 2338850 - DNA, 25 bp, Homo sapien
ctgctgcccatggatcacccagaca

SEQ ID NO: 2338851 - DNA, 25 bp, Homo sapien
tttatgataatactatgaaggagtt

SEQ ID NO: 2338852 - DNA, 25 bp, Homo sapien
cattgctcctcgtcatggtctgtca

SEQ ID NO: 2338853 - DNA, 25 bp, Homo sapien
agctcttgcattgctcctcgtcatg

SEQ ID NO: 2338854 - DNA, 25 bp, Homo sapien
actatgaaggagttagggtagatgg

SEQ ID NO: 2338855 - DNA, 25 bp, Homo sapien
aaaatgtctgagacatcattatctt

SEQ ID NO: 2338856 - DNA, 25 bp, Homo sapien
ttctctattgtaattggagtgccat

SEQ ID NO: 2338857 - DNA, 25 bp, Homo sapien
aggaggattgtagtctggatcatcc

SEQ ID NO: 2338858 - DNA, 25 bp, Homo sapien
gtctgggtcaggaggattgtagtct

SEQ ID NO: 2338859 - DNA, 25 bp, Homo sapien
tgagacagtcgcttgggaaacctag

SEQ ID NO: 2338860 - DNA, 25 bp, Homo sapien
aaacctagcagctgctcaggagcga

SEQ ID NO: 2338861 - DNA, 25 bp, Homo sapien
tttgggcccgtcaggcttgagtcga

SEQ ID NO: 2338862 - DNA, 25 bp, Homo sapien
gagtcgagacctgcatcattcctga

SEQ ID NO: 2338863 - DNA, 25 bp, Homo sapien
gctgggagaaagcgtttcaccctcc

SEQ ID NO: 2338864 - DNA, 25 bp, Homo sapien
gtgttaaatccctcctcccgctgca

SEQ ID NO: 2338865 - DNA, 25 bp, Homo sapien
tggtgttaaatccctcctcccgctg

SEQ ID NO: 2338866 - DNA, 25 bp, Homo sapien
tgttaaatccctcctcccgctgcat

SEQ ID NO: 2338867 - DNA, 25 bp, Homo sapien
ggtgttaaatccctcctcccgctgc

SEQ ID NO: 2338868 - DNA, 25 bp, Homo sapien
gtatcgtactcatccgggccgtccg

SEQ ID NO: 2338869 - DNA, 25 bp, Homo sapien
gcttcggtatcgtactcatccgggc

SEQ ID NO: 2338870 - DNA, 25 bp, Homo sapien
gcacacagcccgcttcggtatcgta

SEQ ID NO: 2338871 - DNA, 25 bp, Homo sapien
aaggggcacacagcccgcttcggta

SEQ ID NO: 2338872 - DNA, 25 bp, Homo sapien
ttctgattacaactgaagcttaaag

SEQ ID NO: 2338873 - DNA, 25 bp, Homo sapien
gtcacttagctagttaccgaatttc

SEQ ID NO: 2338874 - DNA, 25 bp, Homo sapien
attttctgattacaactgaagctta

SEQ ID NO: 2338875 - DNA, 25 bp, Homo sapien
taccgaatttccagaattagaatcc

SEQ ID NO: 2338876 - DNA, 25 bp, Homo sapien
caacaactgataaaaatgcaagcca

SEQ ID NO: 2338877 - DNA, 25 bp, Homo sapien
cctaacagtatcaccgataatcaga

SEQ ID NO: 2338878 - DNA, 25 bp, Homo sapien
caagggtagggtatactaacatctc

SEQ ID NO: 2338879 - DNA, 25 bp, Homo sapien
caccagttttgttcatacctcatta

SEQ ID NO: 2338880 - DNA, 25 bp, Homo sapien
aattagcagctgaaatgtatacccc

SEQ ID NO: 2338881 - DNA, 25 bp, Homo sapien
caacaaagtgactagtgcctaagat

SEQ ID NO: 2338882 - DNA, 25 bp, Homo sapien
taacccctgtacctcagaacagact

SEQ ID NO: 2338883 - DNA, 25 bp, Homo sapien
cactttcttgcctatcaccatgtaa

SEQ ID NO: 2338884 - DNA, 25 bp, Homo sapien
gataaaaatgcccacttgattgggc

SEQ ID NO: 2338885 - DNA, 25 bp, Homo sapien
catcctgtaaagattatgaccagta

SEQ ID NO: 2338886 - DNA, 25 bp, Homo sapien
tccagggaatgcataacactgtata

SEQ ID NO: 2338887 - DNA, 25 bp, Homo sapien
ggagattctcgatttcatcctgtaa

SEQ ID NO: 2338888 - DNA, 25 bp, Homo sapien
tttaagagccaacatgcaattcccc

SEQ ID NO: 2338889 - DNA, 25 bp, Homo sapien
gccctttgaaagataagtgtgtcca

SEQ ID NO: 2338890 - DNA, 25 bp, Homo sapien
gaactgtacacccttggccctttga

SEQ ID NO: 2338891 - DNA, 25 bp, Homo sapien
gcaaaacatagcttatccggactaa

SEQ ID NO: 2338892 - DNA, 25 bp, Homo sapien
gagcaaaggacaactcacgaatctg

SEQ ID NO: 2338893 - DNA, 25 bp, Homo sapien
catgatccagtaaaaggtcccaagt

SEQ ID NO: 2338894 - DNA, 25 bp, Homo sapien
gagcagagggtttcaacaggctgaa

SEQ ID NO: 2338895 - DNA, 25 bp, Homo sapien
cttgatcagccatagctagctaggc

SEQ ID NO: 2338896 - DNA, 25 bp, Homo sapien
caatatgagttttccgtccaagagg

SEQ ID NO: 2338897 - DNA, 25 bp, Homo sapien
tatccatggttataatggctttggg

SEQ ID NO: 2338898 - DNA, 25 bp, Homo sapien
catgtgctgtaatcatcaatatgag

SEQ ID NO: 2338899 - DNA, 25 bp, Homo sapien
tgtgtagccttgactatgtcccatg

SEQ ID NO: 2338900 - DNA, 25 bp, Homo sapien
gagaatattggatgcacactgatgg

SEQ ID NO: 2338901 - DNA, 25 bp, Homo sapien
gaaagatcagcaagtaccaaaagca

SEQ ID NO: 2338902 - DNA, 25 bp, Homo sapien
taagtaaccttaatattctcagggc

SEQ ID NO: 2338903 - DNA, 25 bp, Homo sapien
taatctgtgtacctggttgcgggcg

SEQ ID NO: 2338904 - DNA, 25 bp, Homo sapien
agcctcgaattctcaggcacaagcg

SEQ ID NO: 2338905 - DNA, 25 bp, Homo sapien
ctcgaattctcaggcacaagcggtc

SEQ ID NO: 2338906 - DNA, 25 bp, Homo sapien
aagggggtggatccttaatgaatgc

SEQ ID NO: 2338907 - DNA, 25 bp, Homo sapien
aattctcaggcacaagcggtcctcc

SEQ ID NO: 2338908 - DNA, 25 bp, Homo sapien
taacaggctgacatatccaaagcgc

SEQ ID NO: 2338909 - DNA, 25 bp, Homo sapien
aaaagaacggctgtatgggtcatac

SEQ ID NO: 2338910 - DNA, 25 bp, Homo sapien
caaatcaatgtaagctcgtagcacc

SEQ ID NO: 2338911 - DNA, 25 bp, Homo sapien
gagaggcaactggtcacatacaagg

SEQ ID NO: 2338912 - DNA, 25 bp, Homo sapien
tctgttattgatggcagcccaatgg

SEQ ID NO: 2338913 - DNA, 25 bp, Homo sapien
caatggaggagggtaacattttctt

SEQ ID NO: 2338914 - DNA, 25 bp, Homo sapien
tccggttgccgtacatcataacctg

SEQ ID NO: 2338915 - DNA, 25 bp, Homo sapien
tctcgacagcgttcatatattccat

SEQ ID NO: 2338916 - DNA, 25 bp, Homo sapien
aggtcccctccaagttgatccacaa

SEQ ID NO: 2338917 - DNA, 25 bp, Homo sapien
ccagtgcaatggagttgaattcagg

SEQ ID NO: 2338918 - DNA, 25 bp, Homo sapien
caatagcacctttcgaaatatagta

SEQ ID NO: 2338919 - DNA, 25 bp, Homo sapien
ttgtggcccagtgcaatggagttga

SEQ ID NO: 2338920 - DNA, 25 bp, Homo sapien
catcaattaatgaaggatctgcacc

SEQ ID NO: 2338921 - DNA, 25 bp, Homo sapien
aggtatgtccgaactgagcagccag

SEQ ID NO: 2338922 - DNA, 25 bp, Homo sapien
gcacaaccatggatagatggccttg

SEQ ID NO: 2338923 - DNA, 25 bp, Homo sapien
gataagcaacaattgaggtatgtcc

SEQ ID NO: 2338924 - DNA, 25 bp, Homo sapien
aaaggcgtcattccattctgatcca

SEQ ID NO: 2338925 - DNA, 25 bp, Homo sapien
tgcccacattaaaggcgtcattcca

SEQ ID NO: 2338926 - DNA, 25 bp, Homo sapien
tatatgctgcccacattaaaggcgt

SEQ ID NO: 2338927 - DNA, 25 bp, Homo sapien
cattaaaggcgtcattccattctga

SEQ ID NO: 2338928 - DNA, 25 bp, Homo sapien
gttaaaagcaatctagttggatcca

SEQ ID NO: 2338929 - DNA, 25 bp, Homo sapien
ggctaatgactgtggtattccctgc

SEQ ID NO: 2338930 - DNA, 25 bp, Homo sapien
tccagaagaaggctaatgactgtgg

SEQ ID NO: 2338931 - DNA, 25 bp, Homo sapien
ggtattccctgctagcactgcccaa

SEQ ID NO: 2338932 - DNA, 25 bp, Homo sapien
cctgctagcactgcccaatgcagag

SEQ ID NO: 2338933 - DNA, 25 bp, Homo sapien
tgtttcttggcaccaaataattctt

SEQ ID NO: 2338934 - DNA, 25 bp, Homo sapien
tccccgggaatatcctgcagttgcc

SEQ ID NO: 2338935 - DNA, 25 bp, Homo sapien
ctgaataaaagcaatcccttgggta

SEQ ID NO: 2338936 - DNA, 25 bp, Homo sapien
gcagttgcctcggtccagctgagca

SEQ ID NO: 2338937 - DNA, 25 bp, Homo sapien
cttccactagagggccatgtgacac

SEQ ID NO: 2338938 - DNA, 25 bp, Homo sapien
gcctcttgtaagtggttgatcatcc

SEQ ID NO: 2338939 - DNA, 25 bp, Homo sapien
gttttgccaaatcaagcgctgattc

SEQ ID NO: 2338940 - DNA, 25 bp, Homo sapien
gctttcagctttctaaggaaggacg

SEQ ID NO: 2338941 - DNA, 25 bp, Homo sapien
ttgatcatccacacattttttctct

SEQ ID NO: 2338942 - DNA, 25 bp, Homo sapien
taggtctgctataaacccaaccagc

SEQ ID NO: 2338943 - DNA, 25 bp, Homo sapien
tttgaaagaaactgtactgtagccc

SEQ ID NO: 2338944 - DNA, 25 bp, Homo sapien
gagttcctaacattactttctgccg

SEQ ID NO: 2338945 - DNA, 25 bp, Homo sapien
tagccctttaatgagccaagaatca

SEQ ID NO: 2338946 - DNA, 25 bp, Homo sapien
tatagaaaggcgagctcaagtattg

SEQ ID NO: 2338947 - DNA, 25 bp, Homo sapien
atagaaaggcgagctcaagtattgt

SEQ ID NO: 2338948 - DNA, 25 bp, Homo sapien
ctatagaaaggcgagctcaagtatt

SEQ ID NO: 2338949 - DNA, 25 bp, Homo sapien
tatcccaaggggcaatgcactatgc

SEQ ID NO: 2338950 - DNA, 25 bp, Homo sapien
tatgcattgaatgatcgaaaaagga

SEQ ID NO: 2338951 - DNA, 25 bp, Homo sapien
gggcaatgcactatgcattgaatga

SEQ ID NO: 2338952 - DNA, 25 bp, Homo sapien
ccaaatatatcccaaggggcaatgc

SEQ ID NO: 2338953 - DNA, 25 bp, Homo sapien
aaaccagaagaaccacgtcacatac

SEQ ID NO: 2338954 - DNA, 25 bp, Homo sapien
tccaaaaccagaagaaccacgtcac

SEQ ID NO: 2338955 - DNA, 25 bp, Homo sapien
ccaaaaccagaagaaccacgtcaca

SEQ ID NO: 2338956 - DNA, 25 bp, Homo sapien
caaaaccagaagaaccacgtcacat

SEQ ID NO: 2338957 - DNA, 25 bp, Homo sapien
gaaccagatgaaaagcgtgattcta

SEQ ID NO: 2338958 - DNA, 25 bp, Homo sapien
aaagagtagagacaaaagtatgaac

SEQ ID NO: 2338959 - DNA, 25 bp, Homo sapien
acacatggatagttttatcccagaa

SEQ ID NO: 2338960 - DNA, 25 bp, Homo sapien
ggcaaattaaccaaagatgcttcat

SEQ ID NO: 2338961 - DNA, 25 bp, Homo sapien
tatgacctatgctattcggcctcgc

SEQ ID NO: 2338962 - DNA, 25 bp, Homo sapien
gaagcagaagctacactgtccaaga

SEQ ID NO: 2338963 - DNA, 25 bp, Homo sapien
tataaccccactaacaacacgactg

SEQ ID NO: 2338964 - DNA, 25 bp, Homo sapien
ggcacactctatgaatatatggctg

SEQ ID NO: 2338965 - DNA, 25 bp, Homo sapien
attttaactgaaataggctggacgc

SEQ ID NO: 2338966 - DNA, 25 bp, Homo sapien
ttttaactgaaataggctggacgca

SEQ ID NO: 2338967 - DNA, 25 bp, Homo sapien
tttaactgaaataggctggacgcag

SEQ ID NO: 2338968 - DNA, 25 bp, Homo sapien
tggaagatggataaataaaaagttg

SEQ ID NO: 2338969 - DNA, 25 bp, Homo sapien
ctattggcaaggaatggaagatgga

SEQ ID NO: 2338970 - DNA, 25 bp, Homo sapien
ggaatggaagatggataaataaaaa

SEQ ID NO: 2338971 - DNA, 25 bp, Homo sapien
gcaaggaatggaagatggataaata

SEQ ID NO: 2338972 - DNA, 25 bp, Homo sapien
cctggatctgatttccaagattttc

SEQ ID NO: 2338973 - DNA, 25 bp, Homo sapien
tccaaaattgtagaaaagtgcaaca

SEQ ID NO: 2338974 - DNA, 25 bp, Homo sapien
ttccaaaattgtagaaaagtgcaac

SEQ ID NO: 2338975 - DNA, 25 bp, Homo sapien
tctgttgctttaataatccctggat

SEQ ID NO: 2338976 - DNA, 25 bp, Homo sapien
tagctactgggatggtgtacctgca

SEQ ID NO: 2338977 - DNA, 25 bp, Homo sapien
cctgcattataagaaagggatgccc

SEQ ID NO: 2338978 - DNA, 25 bp, Homo sapien
catggaagtgttatggacaggcatc

SEQ ID NO: 2338979 - DNA, 25 bp, Homo sapien
ggatgccctggatggtatatacaaa

SEQ ID NO: 2338980 - DNA, 25 bp, Homo sapien
tactgaggtccagacttcctgtctc

SEQ ID NO: 2338981 - DNA, 25 bp, Homo sapien
cctgtctctgcaagttcaactattg

SEQ ID NO: 2338982 - DNA, 25 bp, Homo sapien
ttcctgtctctgcaagttcaactat

SEQ ID NO: 2338983 - DNA, 25 bp, Homo sapien
gtactgcagaatatactgaggtcca

SEQ ID NO: 2338984 - DNA, 25 bp, Homo sapien
tacagtcaaggcctaccatcgagga

SEQ ID NO: 2338985 - DNA, 25 bp, Homo sapien
taagcgccttgggaagcagacatcc

SEQ ID NO: 2338986 - DNA, 25 bp, Homo sapien
tgaatacaaataaacggcacctccg

SEQ ID NO: 2338987 - DNA, 25 bp, Homo sapien
tatctttacctatgacctggatgag

SEQ ID NO: 2338988 - DNA, 25 bp, Homo sapien
aaagttgctaccaaacatgaagctg

SEQ ID NO: 2338989 - DNA, 25 bp, Homo sapien
tgacaactacctctgctgatctgca

SEQ ID NO: 2338990 - DNA, 25 bp, Homo sapien
tctggtcggtatcctaaagttgcta

SEQ ID NO: 2338991 - DNA, 25 bp, Homo sapien
tacttaccaaagtgaagcataccca

SEQ ID NO: 2338992 - DNA, 25 bp, Homo sapien
tacacactattttgaggtaccaagg

SEQ ID NO: 2338993 - DNA, 25 bp, Homo sapien
ttcagcgtttcaacaaaagcactgc

SEQ ID NO: 2338994 - DNA, 25 bp, Homo sapien
tccttactaggaaggtcaggctaaa

SEQ ID NO: 2338995 - DNA, 25 bp, Homo sapien
ggcagtcctaatgctagacatatga

SEQ ID NO: 2338996 - DNA, 25 bp, Homo sapien
cccacccatgggcaatgatgatcaa

SEQ ID NO: 2338997 - DNA, 25 bp, Homo sapien
ccacaatgtttggacctcaccggtt

SEQ ID NO: 2338998 - DNA, 25 bp, Homo sapien
gatcaaattttgctatacagcggtt

SEQ ID NO: 2338999 - DNA, 25 bp, Homo sapien
gcggttgcacacaccacaatgtttg

SEQ ID NO: 2339000 - DNA, 25 bp, Homo sapien
tgaagaacgacacagaagcaaggtt

SEQ ID NO: 2339001 - DNA, 25 bp, Homo sapien
aacaacgggtaatgcacctttgagg

SEQ ID NO: 2339002 - DNA, 25 bp, Homo sapien
tatgccatgaaaggtgtgctacagt

SEQ ID NO: 2339003 - DNA, 25 bp, Homo sapien
gaatgcttgcaattacacacaaaga

SEQ ID NO: 2339004 - DNA, 25 bp, Homo sapien
gatatacaaccataaatcatccagc

SEQ ID NO: 2339005 - DNA, 25 bp, Homo sapien
aaaagcaagaagaataggtagccca

SEQ ID NO: 2339006 - DNA, 25 bp, Homo sapien
ccataaaatatctatggttgcctgc

SEQ ID NO: 2339007 - DNA, 25 bp, Homo sapien
aagatatacaaccataaatcatcca

SEQ ID NO: 2339008 - DNA, 25 bp, Homo sapien
taaacgacctttgtcattatagtaa

SEQ ID NO: 2339009 - DNA, 25 bp, Homo sapien
tgcttcataaggtgtccaaaccata

SEQ ID NO: 2339010 - DNA, 25 bp, Homo sapien
tgtggtaagtataatctaagtatgc

SEQ ID NO: 2339011 - DNA, 25 bp, Homo sapien
tgcttacactgtatattggacataa

SEQ ID NO: 2339012 - DNA, 25 bp, Homo sapien
gaggcatcgtaagtgacgtatccac

SEQ ID NO: 2339013 - DNA, 25 bp, Homo sapien
cctgctgtaggagagttgctataaa

SEQ ID NO: 2339014 - DNA, 25 bp, Homo sapien
gctgggccagaaattaggtcaagtt

SEQ ID NO: 2339015 - DNA, 25 bp, Homo sapien
tgttgttggcaagaaagtattctcc

SEQ ID NO: 2339016 - DNA, 25 bp, Homo sapien
caaggtgaacacgtggcaatctgag

SEQ ID NO: 2339017 - DNA, 25 bp, Homo sapien
caaaatccatccttggtgtaagtgg

SEQ ID NO: 2339018 - DNA, 25 bp, Homo sapien
gtaagtggtctcacagtggagtccc

SEQ ID NO: 2339019 - DNA, 25 bp, Homo sapien
ggaacatccaaaacatccaaggtga

SEQ ID NO: 2339020 - DNA, 25 bp, Homo sapien
caggttacttgacactgtgcatgga

SEQ ID NO: 2339021 - DNA, 25 bp, Homo sapien
tggacaggcgctattcctgcacaga

SEQ ID NO: 2339022 - DNA, 25 bp, Homo sapien
ggttttccatcaggagatcatcaga

SEQ ID NO: 2339023 - DNA, 25 bp, Homo sapien
gatcatcagaactagtttacgtggt

SEQ ID NO: 2339024 - DNA, 25 bp, Homo sapien
caatagacgttgttgtgactttaaa

SEQ ID NO: 2339025 - DNA, 25 bp, Homo sapien
gcttgtatctcctggcattcattct

SEQ ID NO: 2339026 - DNA, 25 bp, Homo sapien
ttgaatgggctttcaatagacgttg

SEQ ID NO: 2339027 - DNA, 25 bp, Homo sapien
tgactttaaagtgcttgtatctcct

SEQ ID NO: 2339028 - DNA, 25 bp, Homo sapien
ggtgaactgatgctatttctacaga

SEQ ID NO: 2339029 - DNA, 25 bp, Homo sapien
tattatatacagttaatgtgatgaa

SEQ ID NO: 2339030 - DNA, 25 bp, Homo sapien
aaggagatatcacaactttattata

SEQ ID NO: 2339031 - DNA, 25 bp, Homo sapien
tcactaagtaaaagagtctggttag

SEQ ID NO: 2339032 - DNA, 25 bp, Homo sapien
tctggcagtgaacctaaggataaca

SEQ ID NO: 2339033 - DNA, 25 bp, Homo sapien
tcacgtcggtaagtaatcctagcac

SEQ ID NO: 2339034 - DNA, 25 bp, Homo sapien
gctctttggcaggagacaaactatc

SEQ ID NO: 2339035 - DNA, 25 bp, Homo sapien
tataaatagcatgaatctggcagtg

SEQ ID NO: 2339036 - DNA, 25 bp, Homo sapien
atatactttctgtgttatatgcatt

SEQ ID NO: 2339037 - DNA, 25 bp, Homo sapien
tattctattgtatactgcctggtcc

SEQ ID NO: 2339038 - DNA, 25 bp, Homo sapien
gataacaggacgaaagaggccacag

SEQ ID NO: 2339039 - DNA, 25 bp, Homo sapien
gctggtacccagatcctgatatttg

SEQ ID NO: 2339040 - DNA, 25 bp, Homo sapien
gaggccacagcatcgaaattcaaag

SEQ ID NO: 2339041 - DNA, 25 bp, Homo sapien
tgcaagtgcttcattatcagaccgt

SEQ ID NO: 2339042 - DNA, 25 bp, Homo sapien
gctcctggaattagatgcaatactc

SEQ ID NO: 2339043 - DNA, 25 bp, Homo sapien
gacacggacagacacaattttcagg

SEQ ID NO: 2339044 - DNA, 25 bp, Homo sapien
tcagaccgtaaaacctcagagtaag

SEQ ID NO: 2339045 - DNA, 25 bp, Homo sapien
aatcttttcatatcataggtaccac

SEQ ID NO: 2339046 - DNA, 25 bp, Homo sapien
gccacttgactcctagttaaccagg

SEQ ID NO: 2339047 - DNA, 25 bp, Homo sapien
catgcatacacacaggattggaaat

SEQ ID NO: 2339048 - DNA, 25 bp, Homo sapien
tccaaattcctacagtcttatgcca

SEQ ID NO: 2339049 - DNA, 25 bp, Homo sapien
gccaccgtgcagcattagcatatgt

SEQ ID NO: 2339050 - DNA, 25 bp, Homo sapien
tttggacaagaccataaaccatgcc

SEQ ID NO: 2339051 - DNA, 25 bp, Homo sapien
caaaccttatgacctgaatgaaacg

SEQ ID NO: 2339052 - DNA, 25 bp, Homo sapien
gtagagcctggaacttaacctagtc

SEQ ID NO: 2339053 - DNA, 25 bp, Homo sapien
aggcttctggatgttatattctgat

SEQ ID NO: 2339054 - DNA, 25 bp, Homo sapien
tgaggcttctggatgttatattctg

SEQ ID NO: 2339055 - DNA, 25 bp, Homo sapien
gaggcttctggatgttatattctga

SEQ ID NO: 2339056 - DNA, 25 bp, Homo sapien
tgccagattgtgctaccagtgagtt

SEQ ID NO: 2339057 - DNA, 25 bp, Homo sapien
cgattttcaggcagactcatcactg

SEQ ID NO: 2339058 - DNA, 25 bp, Homo sapien
taatgtctggatgaaactcgatgac

SEQ ID NO: 2339059 - DNA, 25 bp, Homo sapien
gaaagtgtgatacttcccagtctag

SEQ ID NO: 2339060 - DNA, 25 bp, Homo sapien
tccaacgtggcatcctcgtttgctg

SEQ ID NO: 2339061 - DNA, 25 bp, Homo sapien
acactccaacgtggcatcctcgttt

SEQ ID NO: 2339062 - DNA, 25 bp, Homo sapien
cacaacacacactccaacgtggcat

SEQ ID NO: 2339063 - DNA, 25 bp, Homo sapien
cgtggcatcctcgtttgctgttcat

SEQ ID NO: 2339064 - DNA, 25 bp, Homo sapien
tattgttgtttgaatccattggcag

SEQ ID NO: 2339065 - DNA, 25 bp, Homo sapien
tcctcttatccggttaatacaggaa

SEQ ID NO: 2339066 - DNA, 25 bp, Homo sapien
agacacatagaacaagaactaaaaa

SEQ ID NO: 2339067 - DNA, 25 bp, Homo sapien
catatcctcttatccggttaataca

SEQ ID NO: 2339068 - DNA, 25 bp, Homo sapien
agtaaggtagcgtgacacgagatga

SEQ ID NO: 2339069 - DNA, 25 bp, Homo sapien
aggacgctgatcctgaaggaaggca

SEQ ID NO: 2339070 - DNA, 25 bp, Homo sapien
caggacgctgatcctgaaggaaggc

SEQ ID NO: 2339071 - DNA, 25 bp, Homo sapien
gctgtgtgttcggagtaaggtagcg

SEQ ID NO: 2339072 - DNA, 25 bp, Homo sapien
caccaaatgtgtgcgggatttttcc

SEQ ID NO: 2339073 - DNA, 25 bp, Homo sapien
gaacagcccggtggacaagatgcat

SEQ ID NO: 2339074 - DNA, 25 bp, Homo sapien
catcaactgggtgttctaggataca

SEQ ID NO: 2339075 - DNA, 25 bp, Homo sapien
agcattagttcagaccccagagtaa

SEQ ID NO: 2339076 - DNA, 25 bp, Homo sapien
tgtcttttacactccataagtttct

SEQ ID NO: 2339077 - DNA, 25 bp, Homo sapien
ttgtcttttacactccataagtttc

SEQ ID NO: 2339078 - DNA, 25 bp, Homo sapien
tcttttacactccataagtttcttg

SEQ ID NO: 2339079 - DNA, 25 bp, Homo sapien
ctgtagaacagatggagaactggaa

SEQ ID NO: 2339080 - DNA, 25 bp, Homo sapien
tcaggctgtagaacagatggagaac

SEQ ID NO: 2339081 - DNA, 25 bp, Homo sapien
aggctgtagaacagatggagaactg

SEQ ID NO: 2339082 - DNA, 25 bp, Homo sapien
gctgtagaacagatggagaactgga

SEQ ID NO: 2339083 - DNA, 25 bp, Homo sapien
taggagctgccaaaaacctcacggg

SEQ ID NO: 2339084 - DNA, 25 bp, Homo sapien
gtggtaggagctgccaaaaacctca

SEQ ID NO: 2339085 - DNA, 25 bp, Homo sapien
ggagctgccaaaaacctcacgggac

SEQ ID NO: 2339086 - DNA, 25 bp, Homo sapien
gatgagtggtaggagctgccaaaaa

SEQ ID NO: 2339087 - DNA, 25 bp, Homo sapien
ccagtgtaatactgctggctctcca

SEQ ID NO: 2339088 - DNA, 25 bp, Homo sapien
tcatcacaggagtgaacacagtcac

SEQ ID NO: 2339089 - DNA, 25 bp, Homo sapien
caaatgacgtgctggctgcagactg

SEQ ID NO: 2339090 - DNA, 25 bp, Homo sapien
tgttgagaaaagcactaccagtgta

SEQ ID NO: 2339091 - DNA, 25 bp, Homo sapien
tacagagtcggctttgatgagcggt

SEQ ID NO: 2339092 - DNA, 25 bp, Homo sapien
gactcctgcaatcaaaactctggca

SEQ ID NO: 2339093 - DNA, 25 bp, Homo sapien
gagtggtgtctagcttctgtacggc

SEQ ID NO: 2339094 - DNA, 25 bp, Homo sapien
ggtagacaaccagcacatcaaagac

SEQ ID NO: 2339095 - DNA, 25 bp, Homo sapien
aaaggcatccttgccggaagtcaac

SEQ ID NO: 2339096 - DNA, 25 bp, Homo sapien
aggaggacctgtttatccttgtact

SEQ ID NO: 2339097 - DNA, 25 bp, Homo sapien
tcaaaggcatccttgccggaagtca

SEQ ID NO: 2339098 - DNA, 25 bp, Homo sapien
gacctgtttatccttgtacttcaaa

SEQ ID NO: 2339099 - DNA, 25 bp, Homo sapien
agcagaatttctcacccctgtacca

SEQ ID NO: 2339100 - DNA, 25 bp, Homo sapien
tgtaccacccagacatgcaagtcct

SEQ ID NO: 2339101 - DNA, 25 bp, Homo sapien
ctgttgtagcagaatttctcacccc

SEQ ID NO: 2339102 - DNA, 25 bp, Homo sapien
cagacatgcaagtcctggcaaagct

SEQ ID NO: 2339103 - DNA, 25 bp, Homo sapien
agcaggatcaggcaaaaacgatcat

SEQ ID NO: 2339104 - DNA, 25 bp, Homo sapien
aagcaggatcaggcaaaaacgatca

SEQ ID NO: 2339105 - DNA, 25 bp, Homo sapien
tttgctttacaccaaaatccaagct

SEQ ID NO: 2339106 - DNA, 25 bp, Homo sapien
tttacaccaaaatccaagctacagt

SEQ ID NO: 2339107 - DNA, 25 bp, Homo sapien
aaatccaagctacagtccctgaacg

SEQ ID NO: 2339108 - DNA, 25 bp, Homo sapien
gtccctgaacgcttccaacttatgt

SEQ ID NO: 2339109 - DNA, 25 bp, Homo sapien
gagaatgtccctggatcttgaagac

SEQ ID NO: 2339110 - DNA, 25 bp, Homo sapien
tgctgccatgaggagaatgtccctg

SEQ ID NO: 2339111 - DNA, 25 bp, Homo sapien
tctcctaaattccactttttgctag

SEQ ID NO: 2339112 - DNA, 25 bp, Homo sapien
tgctagactcttggggtaccatagt

SEQ ID NO: 2339113 - DNA, 25 bp, Homo sapien
caaattgtcatcagctaagatgtac

SEQ ID NO: 2339114 - DNA, 25 bp, Homo sapien
ctgttcaaattgtcatcagctaaga

SEQ ID NO: 2339115 - DNA, 25 bp, Homo sapien
tcaaattgtcatcagctaagatgta

SEQ ID NO: 2339116 - DNA, 25 bp, Homo sapien
gttcaaattgtcatcagctaagatg

SEQ ID NO: 2339117 - DNA, 25 bp, Homo sapien
ggaggaggagggtaacacttgacca

SEQ ID NO: 2339118 - DNA, 25 bp, Homo sapien
gaggaggagggtaacacttgaccaa

SEQ ID NO: 2339119 - DNA, 25 bp, Homo sapien
cctggaactgaagcacacgggctcc

SEQ ID NO: 2339120 - DNA, 25 bp, Homo sapien
tggaactgaagcacacgggctcctg

SEQ ID NO: 2339121 - DNA, 25 bp, Homo sapien
gaactgaagcacacgggctcctgga

SEQ ID NO: 2339122 - DNA, 25 bp, Homo sapien
aactgaagcacacgggctcctggaa

SEQ ID NO: 2339123 - DNA, 25 bp, Homo sapien
tatatctgtattcaccatacccacc

SEQ ID NO: 2339124 - DNA, 25 bp, Homo sapien
gtattcaccatacccaccacaaaat

SEQ ID NO: 2339125 - DNA, 25 bp, Homo sapien
ggcagagcccctaggtgatttatat

SEQ ID NO: 2339126 - DNA, 25 bp, Homo sapien
aaacagtactagcttcttaacggca

SEQ ID NO: 2339127 - DNA, 25 bp, Homo sapien
gttgcactgttgtcggactcccctg

SEQ ID NO: 2339128 - DNA, 25 bp, Homo sapien
tcacgtggagaattcttcgaaggcc

SEQ ID NO: 2339129 - DNA, 25 bp, Homo sapien
gcctcatcttgggagcatttgcccg

SEQ ID NO: 2339130 - DNA, 25 bp, Homo sapien
cacttggagatgtttgagctgattc

SEQ ID NO: 2339131 - DNA, 25 bp, Homo sapien
gcatggttaaatgaccctgaactaa

SEQ ID NO: 2339132 - DNA, 25 bp, Homo sapien
cccattggtgaggatattatgactt

SEQ ID NO: 2339133 - DNA, 25 bp, Homo sapien
tgaactaaaactgatgggttcccta

SEQ ID NO: 2339134 - DNA, 25 bp, Homo sapien
gaggtctgcatttagacggaaacag

SEQ ID NO: 2339135 - DNA, 25 bp, Homo sapien
ttcctcttatactaggaccgaatgt

SEQ ID NO: 2339136 - DNA, 25 bp, Homo sapien
tcttatactaggaccgaatgttgcc

SEQ ID NO: 2339137 - DNA, 25 bp, Homo sapien
cctcttatactaggaccgaatgttg

SEQ ID NO: 2339138 - DNA, 25 bp, Homo sapien
cttatactaggaccgaatgttgcca

SEQ ID NO: 2339139 - DNA, 25 bp, Homo sapien
aacataaaggagtttccaacttcat

SEQ ID NO: 2339140 - DNA, 25 bp, Homo sapien
cagtcatggagaaacttttctttaa

SEQ ID NO: 2339141 - DNA, 25 bp, Homo sapien
ccggctggcgagggctcgaggtgtt

SEQ ID NO: 2339142 - DNA, 25 bp, Homo sapien
cccggctggcgagggctcgaggtgt

SEQ ID NO: 2339143 - DNA, 25 bp, Homo sapien
tcaaggcgccagaggaggtgtttta

SEQ ID NO: 2339144 - DNA, 25 bp, Homo sapien
tttagcggggactacgatccaggct

SEQ ID NO: 2339145 - DNA, 25 bp, Homo sapien
ccctcatcggcttgggtccgtggag

SEQ ID NO: 2339146 - DNA, 25 bp, Homo sapien
ctggagttgcgctcggccggtctga

SEQ ID NO: 2339147 - DNA, 25 bp, Homo sapien
taaatgagcaggcaaaaaaccatct

SEQ ID NO: 2339148 - DNA, 25 bp, Homo sapien
tgtgcccttttgaggtttctcttaa

SEQ ID NO: 2339149 - DNA, 25 bp, Homo sapien
attttttagagcctccattctctaa

SEQ ID NO: 2339150 - DNA, 25 bp, Homo sapien
tctctaaaagctctccttctctatc

SEQ ID NO: 2339151 - DNA, 25 bp, Homo sapien
agaggggacttctccaaagctccag

SEQ ID NO: 2339152 - DNA, 25 bp, Homo sapien
gctccagcaattttgtctaatgttt

SEQ ID NO: 2339153 - DNA, 25 bp, Homo sapien
atatcaaatgcttcctgacacagag

SEQ ID NO: 2339154 - DNA, 25 bp, Homo sapien
gacacagagactgatctggaagagg

SEQ ID NO: 2339155 - DNA, 25 bp, Homo sapien
tccccaatgatgcatttagaattgt

SEQ ID NO: 2339156 - DNA, 25 bp, Homo sapien
ccaatgatgcatttagaattgttta

SEQ ID NO: 2339157 - DNA, 25 bp, Homo sapien
tttttttccccaatgatgcatttag

SEQ ID NO: 2339158 - DNA, 25 bp, Homo sapien
tttccccaatgatgcatttagaatt

SEQ ID NO: 2339159 - DNA, 25 bp, Homo sapien
catctatcaaagtccagatactgat

SEQ ID NO: 2339160 - DNA, 25 bp, Homo sapien
aggccccgtttctctttgcaacttg

SEQ ID NO: 2339161 - DNA, 25 bp, Homo sapien
atacacattttgactccgttccttt

SEQ ID NO: 2339162 - DNA, 25 bp, Homo sapien
cacattttgactccgttcctttgtt

SEQ ID NO: 2339163 - DNA, 25 bp, Homo sapien
tcaccaaggtaaaaggcctgggatc

SEQ ID NO: 2339164 - DNA, 25 bp, Homo sapien
gctacaggtgaattcaccaaggtaa

SEQ ID NO: 2339165 - DNA, 25 bp, Homo sapien
tttccaattgctacaggtgaattca

SEQ ID NO: 2339166 - DNA, 25 bp, Homo sapien
accaaggtaaaaggcctgggatcag

SEQ ID NO: 2339167 - DNA, 25 bp, Homo sapien
ttccactgatgccttccctagaaga

SEQ ID NO: 2339168 - DNA, 25 bp, Homo sapien
gagacaatagaatgcccaataaagc

SEQ ID NO: 2339169 - DNA, 25 bp, Homo sapien
gcatgtctaagcagtgcaggtatta

SEQ ID NO: 2339170 - DNA, 25 bp, Homo sapien
tatattttactagtttgggccagct

SEQ ID NO: 2339171 - DNA, 25 bp, Homo sapien
tctcttctctagattacaggacacg

SEQ ID NO: 2339172 - DNA, 25 bp, Homo sapien
gacactgaggcctatgaaggtgact

SEQ ID NO: 2339173 - DNA, 25 bp, Homo sapien
gtcacatagctggtgcatggcccag

SEQ ID NO: 2339174 - DNA, 25 bp, Homo sapien
catggcccagctgggatactgtaga

SEQ ID NO: 2339175 - DNA, 25 bp, Homo sapien
gcttgtgtaataaatgacctctctg

SEQ ID NO: 2339176 - DNA, 25 bp, Homo sapien
ttaaagcttgtgtaataaatgacct

SEQ ID NO: 2339177 - DNA, 25 bp, Homo sapien
gtaataaatgacctctctgctcttc

SEQ ID NO: 2339178 - DNA, 25 bp, Homo sapien
agagagctcattaaagcttgtgtaa

SEQ ID NO: 2339179 - DNA, 25 bp, Homo sapien
atcatcacattaagttcataaatgt

SEQ ID NO: 2339180 - DNA, 25 bp, Homo sapien
tatcatcacattaagttcataaatg

SEQ ID NO: 2339181 - DNA, 25 bp, Homo sapien
tctatcatcacattaagttcataaa

SEQ ID NO: 2339182 - DNA, 25 bp, Homo sapien
ctatcatcacattaagttcataaat

SEQ ID NO: 2339183 - DNA, 25 bp, Homo sapien
gatcaggttactatggaaatcgtct

SEQ ID NO: 2339184 - DNA, 25 bp, Homo sapien
gcgattttgagccacttgatcaggt

SEQ ID NO: 2339185 - DNA, 25 bp, Homo sapien
gaaatcgtcttaaggagatggagaa

SEQ ID NO: 2339186 - DNA, 25 bp, Homo sapien
cgggccgcggaaatcctcaggtttg

SEQ ID NO: 2339187 - DNA, 25 bp, Homo sapien
actttgcaaggagcgcagcggtttg

SEQ ID NO: 2339188 - DNA, 25 bp, Homo sapien
aatgaacacgctgttgcaaataccc

SEQ ID NO: 2339189 - DNA, 25 bp, Homo sapien
cgcacccccatcagtagtgtcaggg

SEQ ID NO: 2339190 - DNA, 25 bp, Homo sapien
aaaagccgagaagagtgcagcgaag

SEQ ID NO: 2339191 - DNA, 25 bp, Homo sapien
cgcagccagcccatccgaacccgcc

SEQ ID NO: 2339192 - DNA, 25 bp, Homo sapien
gcagccagcccatccgaacccgcca

SEQ ID NO: 2339193 - DNA, 25 bp, Homo sapien
gccactcccaggaccgcgctggcca

SEQ ID NO: 2339194 - DNA, 25 bp, Homo sapien
cgaacccgccactcccaggaccgcg

SEQ ID NO: 2339195 - DNA, 25 bp, Homo sapien
actcgtctggagacctcgggttccg

SEQ ID NO: 2339196 - DNA, 25 bp, Homo sapien
gcatccctccctcactcgtctggag

SEQ ID NO: 2339197 - DNA, 25 bp, Homo sapien
ggttccgccgccctggcgctgacag

SEQ ID NO: 2339198 - DNA, 25 bp, Homo sapien
ggccacgccgagatgcccaaagtgg

SEQ ID NO: 2339199 - DNA, 25 bp, Homo sapien
catgtcatacttggagcacggaagc

SEQ ID NO: 2339200 - DNA, 25 bp, Homo sapien
gcacggaagctacctgcagaactga

SEQ ID NO: 2339201 - DNA, 25 bp, Homo sapien
gtctgaaaacgaccaggctgaggtg

SEQ ID NO: 2339202 - DNA, 25 bp, Homo sapien
tacaggcgcctagcttagaatgcat

SEQ ID NO: 2339203 - DNA, 25 bp, Homo sapien
gaaaaggaggagacgagatcacagt

SEQ ID NO: 2339204 - DNA, 25 bp, Homo sapien
gggaaaaggaggagacgagatcaca

SEQ ID NO: 2339205 - DNA, 25 bp, Homo sapien
ggcacctggtcattgttttcagctt

SEQ ID NO: 2339206 - DNA, 25 bp, Homo sapien
ttcttatctcttaggcacctggtca

SEQ ID NO: 2339207 - DNA, 25 bp, Homo sapien
cagagccttatttgggtcatatatt

SEQ ID NO: 2339208 - DNA, 25 bp, Homo sapien
gaagaaaagcttctacgacaataaa

SEQ ID NO: 2339209 - DNA, 25 bp, Homo sapien
tcttacatagttcactggaaaacag

SEQ ID NO: 2339210 - DNA, 25 bp, Homo sapien
gcccatgcggcaaaggcctttttgt

SEQ ID NO: 2339211 - DNA, 25 bp, Homo sapien
tcatttggctgctgttgcctgcatg

SEQ ID NO: 2339212 - DNA, 25 bp, Homo sapien
atttggctgctgttgcctgcatgca

SEQ ID NO: 2339213 - DNA, 25 bp, Homo sapien
tgcctgcatgcatcttccctgggga

SEQ ID NO: 2339214 - DNA, 25 bp, Homo sapien
cctgcatgcatcttccctggggact

SEQ ID NO: 2339215 - DNA, 25 bp, Homo sapien
gtcattctactgtgaatatactgcc

SEQ ID NO: 2339216 - DNA, 25 bp, Homo sapien
cgaaaattctgcgagtatgaaacat

SEQ ID NO: 2339217 - DNA, 25 bp, Homo sapien
caagtgcgaaaattctgcgagtatg

SEQ ID NO: 2339218 - DNA, 25 bp, Homo sapien
gcattttgtagacaagtgcgaaaat

SEQ ID NO: 2339219 - DNA, 25 bp, Homo sapien
gttattgattctgccatctaattcc

SEQ ID NO: 2339220 - DNA, 25 bp, Homo sapien
attgattctgccatctaattccctg

SEQ ID NO: 2339221 - DNA, 25 bp, Homo sapien
catctaattccctggccttgacagg

SEQ ID NO: 2339222 - DNA, 25 bp, Homo sapien
tattgattctgccatctaattccct

SEQ ID NO: 2339223 - DNA, 25 bp, Homo sapien
tactgccttgcaagcttatcatgct

SEQ ID NO: 2339224 - DNA, 25 bp, Homo sapien
gcttatcatgctcataagcaccgtg

SEQ ID NO: 2339225 - DNA, 25 bp, Homo sapien
aatttgcgtattagcaagtcccaca

SEQ ID NO: 2339226 - DNA, 25 bp, Homo sapien
cataagcaccgtgtactaatttgcg

SEQ ID NO: 2339227 - DNA, 25 bp, Homo sapien
ttctgggtaataagtagaatcctga

SEQ ID NO: 2339228 - DNA, 25 bp, Homo sapien
aaggtgcagcaatgtgagtgttctg

SEQ ID NO: 2339229 - DNA, 25 bp, Homo sapien
tgtgagtgttctgggtaataagtag

SEQ ID NO: 2339230 - DNA, 25 bp, Homo sapien
cagcaatgtgagtgttctgggtaat

SEQ ID NO: 2339231 - DNA, 25 bp, Homo sapien
tgactcctataatactccttctggc

SEQ ID NO: 2339232 - DNA, 25 bp, Homo sapien
agttgctctcagcaaacacggatgg

SEQ ID NO: 2339233 - DNA, 25 bp, Homo sapien
taataacatgactcctataatactc

SEQ ID NO: 2339234 - DNA, 25 bp, Homo sapien
ggatggcaatactgttccctcttgg

SEQ ID NO: 2339235 - DNA, 25 bp, Homo sapien
aaatgaatgtgagatttcagagtgg

SEQ ID NO: 2339236 - DNA, 25 bp, Homo sapien
gatgcagacacttctgctatagcag

SEQ ID NO: 2339237 - DNA, 25 bp, Homo sapien
taggcaacaattgaagcataaccaa

SEQ ID NO: 2339238 - DNA, 25 bp, Homo sapien
cataaccaaatttcgcacttgctca

SEQ ID NO: 2339239 - DNA, 25 bp, Homo sapien
ccaatgcaattgttacattaggcaa

SEQ ID NO: 2339240 - DNA, 25 bp, Homo sapien
tgccactccctatctcccttgttac

SEQ ID NO: 2339241 - DNA, 25 bp, Homo sapien
atgtgaatggaagccctagcctgga

SEQ ID NO: 2339242 - DNA, 25 bp, Homo sapien
agatgtgaatggaagccctagcctg

SEQ ID NO: 2339243 - DNA, 25 bp, Homo sapien
gaatggaagccctagcctggaactc

SEQ ID NO: 2339244 - DNA, 25 bp, Homo sapien
tatcccagacctccaatcacacaga

SEQ ID NO: 2339245 - DNA, 25 bp, Homo sapien
agttctcatatcccagacctccaat

SEQ ID NO: 2339246 - DNA, 25 bp, Homo sapien
ggtttaggacatccttgacaggaaa

SEQ ID NO: 2339247 - DNA, 25 bp, Homo sapien
tccattcagctctagagaaaatagg

SEQ ID NO: 2339248 - DNA, 25 bp, Homo sapien
tagatagcaatcaatggcatccagc

SEQ ID NO: 2339249 - DNA, 25 bp, Homo sapien
tctgtatgggctcaagcagcaataa

SEQ ID NO: 2339250 - DNA, 25 bp, Homo sapien
gccattttcctatgatgctgtaggt

SEQ ID NO: 2339251 - DNA, 25 bp, Homo sapien
ctccaaggccctatttctgtatggg

SEQ ID NO: 2339252 - DNA, 25 bp, Homo sapien
tgccagattccacagtacccagtgt

SEQ ID NO: 2339253 - DNA, 25 bp, Homo sapien
gatctatttcgatgtttaatagctg

SEQ ID NO: 2339254 - DNA, 25 bp, Homo sapien
agctgccagattccacagtacccag

SEQ ID NO: 2339255 - DNA, 25 bp, Homo sapien
ccaagtttgtgatctatttcgatgt

SEQ ID NO: 2339256 - DNA, 25 bp, Homo sapien
tgaggattgccacagcttaagtgct

SEQ ID NO: 2339257 - DNA, 25 bp, Homo sapien
tcctaagacccatagcactttgtgg

SEQ ID NO: 2339258 - DNA, 25 bp, Homo sapien
tcagatctgccaagctaagccacaa

SEQ ID NO: 2339259 - DNA, 25 bp, Homo sapien
taagccacaagagtgtaggatgagg

SEQ ID NO: 2339260 - DNA, 25 bp, Homo sapien
gaagggtattctagatggcattgaa

SEQ ID NO: 2339261 - DNA, 25 bp, Homo sapien
gggatacttgctttgaagggtattc

SEQ ID NO: 2339262 - DNA, 25 bp, Homo sapien
gctttgaagggtattctagatggca

SEQ ID NO: 2339263 - DNA, 25 bp, Homo sapien
tactgtgtatggagaggagccaggg

SEQ ID NO: 2339264 - DNA, 25 bp, Homo sapien
tgggcccacagaacctacagtggtt

SEQ ID NO: 2339265 - DNA, 25 bp, Homo sapien
agtgattaccccactatgcaatggg

SEQ ID NO: 2339266 - DNA, 25 bp, Homo sapien
ggcaggtccagtctttaggcagata

SEQ ID NO: 2339267 - DNA, 25 bp, Homo sapien
gctcgaagaacatacaaaggcctgg

SEQ ID NO: 2339268 - DNA, 25 bp, Homo sapien
tacccataagagaatgcatcagccc

SEQ ID NO: 2339269 - DNA, 25 bp, Homo sapien
ggcttccagcggctcagtctctgaa

SEQ ID NO: 2339270 - DNA, 25 bp, Homo sapien
catgaggacccttgtattgttgaca

SEQ ID NO: 2339271 - DNA, 25 bp, Homo sapien
tctgtaagagccatggcctctaccc

SEQ ID NO: 2339272 - DNA, 25 bp, Homo sapien
tgaatgccagctcctcgtgggggag

SEQ ID NO: 2339273 - DNA, 25 bp, Homo sapien
tgggggaggattacaacttcctcac

SEQ ID NO: 2339274 - DNA, 25 bp, Homo sapien
ttatttgtctcccataccttgaatg

SEQ ID NO: 2339275 - DNA, 25 bp, Homo sapien
atttgtctcccataccttgaatgcc

SEQ ID NO: 2339276 - DNA, 25 bp, Homo sapien
ctgaaatatcaggaaatgcctgcaa

SEQ ID NO: 2339277 - DNA, 25 bp, Homo sapien
tgaaatatcaggaaatgcctgcaat

SEQ ID NO: 2339278 - DNA, 25 bp, Homo sapien
ctctgaaatatcaggaaatgcctgc

SEQ ID NO: 2339279 - DNA, 25 bp, Homo sapien
tctgaaatatcaggaaatgcctgca

SEQ ID NO: 2339280 - DNA, 25 bp, Homo sapien
accatgcaggcctcttagatttttg

SEQ ID NO: 2339281 - DNA, 25 bp, Homo sapien
taccatgcaggcctcttagattttt

SEQ ID NO: 2339282 - DNA, 25 bp, Homo sapien
ctaccatgcaggcctcttagatttt

SEQ ID NO: 2339283 - DNA, 25 bp, Homo sapien
taacttggaattgttgatgagttgt

SEQ ID NO: 2339284 - DNA, 25 bp, Homo sapien
gaggctatttgatgtctaaagcagc

SEQ ID NO: 2339285 - DNA, 25 bp, Homo sapien
gagttgtaaagttaggccaatctcc

SEQ ID NO: 2339286 - DNA, 25 bp, Homo sapien
gcagctaactgataacttggaattg

SEQ ID NO: 2339287 - DNA, 25 bp, Homo sapien
gcctacaaggtttcattcagtatct

SEQ ID NO: 2339288 - DNA, 25 bp, Homo sapien
aaacctcaatggcttcgttaatgca

SEQ ID NO: 2339289 - DNA, 25 bp, Homo sapien
tagatagacatctctggcctacttc

SEQ ID NO: 2339290 - DNA, 25 bp, Homo sapien
cagcgctattgacgctttgggccag

SEQ ID NO: 2339291 - DNA, 25 bp, Homo sapien
ggccctcaagacagtttacagctat

SEQ ID NO: 2339292 - DNA, 25 bp, Homo sapien
cttagagcaaatggtagcctgtccc

SEQ ID NO: 2339293 - DNA, 25 bp, Homo sapien
cacatgagaatgtcttacagaggaa

SEQ ID NO: 2339294 - DNA, 25 bp, Homo sapien
cctgggatagagtacaccatcaaat

SEQ ID NO: 2339295 - DNA, 25 bp, Homo sapien
taaagaatctaagaatcagagtttc

SEQ ID NO: 2339296 - DNA, 25 bp, Homo sapien
gaatctaagaatcagagtttcagta

SEQ ID NO: 2339297 - DNA, 25 bp, Homo sapien
ttccagttaaagaatctaagaatca

SEQ ID NO: 2339298 - DNA, 25 bp, Homo sapien
ctaagaatcagagtttcagtaattt

SEQ ID NO: 2339299 - DNA, 25 bp, Homo sapien
catatttcttggaaggtttcttcat

SEQ ID NO: 2339300 - DNA, 25 bp, Homo sapien
cttgctaaattggggaagttctgga

SEQ ID NO: 2339301 - DNA, 25 bp, Homo sapien
agttctggataatatccggaagagt

SEQ ID NO: 2339302 - DNA, 25 bp, Homo sapien
ccatatttcttggaaggtttcttca

SEQ ID NO: 2339303 - DNA, 25 bp, Homo sapien
tgaaagcccttgactgaaccaaatt

SEQ ID NO: 2339304 - DNA, 25 bp, Homo sapien
tggagtcaccactatagggcactac

SEQ ID NO: 2339305 - DNA, 25 bp, Homo sapien
tcaacactgagaactgagagacttc

SEQ ID NO: 2339306 - DNA, 25 bp, Homo sapien
tggagatcacaggtaaacacttttg

SEQ ID NO: 2339307 - DNA, 25 bp, Homo sapien
ttctatttggatgccaagtgatttc

SEQ ID NO: 2339308 - DNA, 25 bp, Homo sapien
cccatttgccatatttattctcaga

SEQ ID NO: 2339309 - DNA, 25 bp, Homo sapien
tttagaaatctagccaagcataggc

SEQ ID NO: 2339310 - DNA, 25 bp, Homo sapien
tcctcctaaatacttctagcacatg

SEQ ID NO: 2339311 - DNA, 25 bp, Homo sapien
gtcaactttgcatcgtccaccacta

SEQ ID NO: 2339312 - DNA, 25 bp, Homo sapien
caaccgcaattgctccttgccttgt

SEQ ID NO: 2339313 - DNA, 25 bp, Homo sapien
tttgcatcgtccaccactatctgct

SEQ ID NO: 2339314 - DNA, 25 bp, Homo sapien
ctaaaacaaccgcaattgctccttg

SEQ ID NO: 2339315 - DNA, 25 bp, Homo sapien
tctctccagctccacaaaagctgcc

SEQ ID NO: 2339316 - DNA, 25 bp, Homo sapien
acaaaagctgcctggctggatgtct

SEQ ID NO: 2339317 - DNA, 25 bp, Homo sapien
gcctggctggatgtcttgctgtcag

SEQ ID NO: 2339318 - DNA, 25 bp, Homo sapien
tcttgaatttctgggtatattcttt

SEQ ID NO: 2339319 - DNA, 25 bp, Homo sapien
ggcaccaaactggaccacacgttca

SEQ ID NO: 2339320 - DNA, 25 bp, Homo sapien
tgttctctactttcattaacaccct

SEQ ID NO: 2339321 - DNA, 25 bp, Homo sapien
caccttgcgtgcaggcaccaaactg

SEQ ID NO: 2339322 - DNA, 25 bp, Homo sapien
tcacccctcactcctagccccttgt

SEQ ID NO: 2339323 - DNA, 25 bp, Homo sapien
gtccagtcctcagtacagattctgt

SEQ ID NO: 2339324 - DNA, 25 bp, Homo sapien
ctcagtacagattctgttgtcattc

SEQ ID NO: 2339325 - DNA, 25 bp, Homo sapien
cagtcctcagtacagattctgttgt

SEQ ID NO: 2339326 - DNA, 25 bp, Homo sapien
taacgtccagtcctcagtacagatt

SEQ ID NO: 2339327 - DNA, 25 bp, Homo sapien
ctcccactgtctgcacattcaacag

SEQ ID NO: 2339328 - DNA, 25 bp, Homo sapien
ccactgtctgcacattcaacagtgt

SEQ ID NO: 2339329 - DNA, 25 bp, Homo sapien
cccactgtctgcacattcaacagtg

SEQ ID NO: 2339330 - DNA, 25 bp, Homo sapien
tcccactgtctgcacattcaacagt

SEQ ID NO: 2339331 - DNA, 25 bp, Homo sapien
cacatcttcggaccttctgtagatg

SEQ ID NO: 2339332 - DNA, 25 bp, Homo sapien
tagatgtcaaataatgaacctgcac

SEQ ID NO: 2339333 - DNA, 25 bp, Homo sapien
tcattgtccagaatccaaatagcag

SEQ ID NO: 2339334 - DNA, 25 bp, Homo sapien
agaccacatcttcggaccttctgta

SEQ ID NO: 2339335 - DNA, 25 bp, Homo sapien
cagcaaaattcccaacatgacctcg

SEQ ID NO: 2339336 - DNA, 25 bp, Homo sapien
aaattcccaacatgacctcgtattg

SEQ ID NO: 2339337 - DNA, 25 bp, Homo sapien
tattggtccatttcaagggctatat

SEQ ID NO: 2339338 - DNA, 25 bp, Homo sapien
gaggctccttgatgtaaaatcagca

SEQ ID NO: 2339339 - DNA, 25 bp, Homo sapien
tcaccactttcctggaattgaactt

SEQ ID NO: 2339340 - DNA, 25 bp, Homo sapien
tcctggaattgaacttagatgggcc

SEQ ID NO: 2339341 - DNA, 25 bp, Homo sapien
ccactttcctggaattgaacttaga

SEQ ID NO: 2339342 - DNA, 25 bp, Homo sapien
ttgaacttagatgggccactcttct

SEQ ID NO: 2339343 - DNA, 25 bp, Homo sapien
taaatttagatcatttatgacattt

SEQ ID NO: 2339344 - DNA, 25 bp, Homo sapien
gaaaatttgcaaactccaatatgaa

SEQ ID NO: 2339345 - DNA, 25 bp, Homo sapien
aatttgcaaactccaatatgaatta

SEQ ID NO: 2339346 - DNA, 25 bp, Homo sapien
ccttctccatactttctggtcaatt

SEQ ID NO: 2339347 - DNA, 25 bp, Homo sapien
ctttgagtgggcatgctattcctgt

SEQ ID NO: 2339348 - DNA, 25 bp, Homo sapien
taagcagaactcgaacgctgtgctg

SEQ ID NO: 2339349 - DNA, 25 bp, Homo sapien
gccaagtttgagagtcccaggtcaa

SEQ ID NO: 2339350 - DNA, 25 bp, Homo sapien
cagaatagcaaggattgctgcctaa

SEQ ID NO: 2339351 - DNA, 25 bp, Homo sapien
tctcctgaatgaacagagcaactga

SEQ ID NO: 2339352 - DNA, 25 bp, Homo sapien
gaacagagcaactgatgagtcttga

SEQ ID NO: 2339353 - DNA, 25 bp, Homo sapien
tttacttgggtcatttagctcattt

SEQ ID NO: 2339354 - DNA, 25 bp, Homo sapien
tgggtctcctgaatgaacagagcaa

SEQ ID NO: 2339355 - DNA, 25 bp, Homo sapien
tcaaacaggatttgtctctcacagt

SEQ ID NO: 2339356 - DNA, 25 bp, Homo sapien
tctctcacagtgggggaggacatgc

SEQ ID NO: 2339357 - DNA, 25 bp, Homo sapien
tgtctctcacagtgggggaggacat

SEQ ID NO: 2339358 - DNA, 25 bp, Homo sapien
cctcaaacaggatttgtctctcaca

SEQ ID NO: 2339359 - DNA, 25 bp, Homo sapien
tactcattgttggtctgtccaggac

SEQ ID NO: 2339360 - DNA, 25 bp, Homo sapien
gactgttaccagatctactgtgtac

SEQ ID NO: 2339361 - DNA, 25 bp, Homo sapien
ggtcgttaaattagccagcagtctg

SEQ ID NO: 2339362 - DNA, 25 bp, Homo sapien
tactgtgtacatctggtaaaattca

SEQ ID NO: 2339363 - DNA, 25 bp, Homo sapien
catttggtgggcaaagtgaatactt

SEQ ID NO: 2339364 - DNA, 25 bp, Homo sapien
caggcacatacatttggtgggcaaa

SEQ ID NO: 2339365 - DNA, 25 bp, Homo sapien
ccgatcagcagaagtatgaagttgc

SEQ ID NO: 2339366 - DNA, 25 bp, Homo sapien
caaagtgaatacttgtagccgatca

SEQ ID NO: 2339367 - DNA, 25 bp, Homo sapien
gatgcagtcagtgtaatgccaatca

SEQ ID NO: 2339368 - DNA, 25 bp, Homo sapien
acaacctcttctccataatcaacac

SEQ ID NO: 2339369 - DNA, 25 bp, Homo sapien
caacactctttacctgaaggcaggc

SEQ ID NO: 2339370 - DNA, 25 bp, Homo sapien
ttgatgcagtcagtgtaatgccaat

SEQ ID NO: 2339371 - DNA, 25 bp, Homo sapien
taaagtttgcagtttactcccagga

SEQ ID NO: 2339372 - DNA, 25 bp, Homo sapien
aatttctaggaacacactggcccgc

SEQ ID NO: 2339373 - DNA, 25 bp, Homo sapien
aatccatcacattaggttcttgccc

SEQ ID NO: 2339374 - DNA, 25 bp, Homo sapien
gaacttcatcgactccaaggaatga

SEQ ID NO: 2339375 - DNA, 25 bp, Homo sapien
cttgtgactcactggattcttccca

SEQ ID NO: 2339376 - DNA, 25 bp, Homo sapien
tcttctgatcttctagcttgtgact

SEQ ID NO: 2339377 - DNA, 25 bp, Homo sapien
ggattcttcccatgtctgttcattt

SEQ ID NO: 2339378 - DNA, 25 bp, Homo sapien
tgatcttctagcttgtgactcactg

SEQ ID NO: 2339379 - DNA, 25 bp, Homo sapien
gattggctgataataaatgatacga

SEQ ID NO: 2339380 - DNA, 25 bp, Homo sapien
gctgataataaatgatacgatgttg

SEQ ID NO: 2339381 - DNA, 25 bp, Homo sapien
tagagccgtgcttcaggattggctg

SEQ ID NO: 2339382 - DNA, 25 bp, Homo sapien
tgatacgatgttgtttcagaaacct

SEQ ID NO: 2339383 - DNA, 25 bp, Homo sapien
ttctttgggaacttgatgttcatgt

SEQ ID NO: 2339384 - DNA, 25 bp, Homo sapien
taatctgcatccgagtatgctacaa

SEQ ID NO: 2339385 - DNA, 25 bp, Homo sapien
cacagcacgagtttctttgggaact

SEQ ID NO: 2339386 - DNA, 25 bp, Homo sapien
gagtatgctacaatcacagcacgag

SEQ ID NO: 2339387 - DNA, 25 bp, Homo sapien
tcattagtctgggtatgcacttagg

SEQ ID NO: 2339388 - DNA, 25 bp, Homo sapien
caggtactggcagctctgtcggcag

SEQ ID NO: 2339389 - DNA, 25 bp, Homo sapien
tcggcagctgcttgggacaatgtca

SEQ ID NO: 2339390 - DNA, 25 bp, Homo sapien
tgaccaaccatactgaacaagtgtt

SEQ ID NO: 2339391 - DNA, 25 bp, Homo sapien
caaggtggctcacatacatgcgtgt

SEQ ID NO: 2339392 - DNA, 25 bp, Homo sapien
tgcttcactacaggagagcaaggtg

SEQ ID NO: 2339393 - DNA, 25 bp, Homo sapien
caaataccaaatgtgaacttggtcc

SEQ ID NO: 2339394 - DNA, 25 bp, Homo sapien
aacttggtccaatagaacatcctgc

SEQ ID NO: 2339395 - DNA, 25 bp, Homo sapien
tgacaggccccggttcccattcatt

SEQ ID NO: 2339396 - DNA, 25 bp, Homo sapien
gtgacaggccccggttcccattcat

SEQ ID NO: 2339397 - DNA, 25 bp, Homo sapien
cctgagtacgtatcatatgcaaggc

SEQ ID NO: 2339398 - DNA, 25 bp, Homo sapien
gaatgagacaagcaatgtccctgac

SEQ ID NO: 2339399 - DNA, 25 bp, Homo sapien
cctgacctggtagaggctgactgca

SEQ ID NO: 2339400 - DNA, 25 bp, Homo sapien
tatgcaaggcatcaatacgaggatg

SEQ ID NO: 2339401 - DNA, 25 bp, Homo sapien
gacgtttaggagtgaagaccctgga

SEQ ID NO: 2339402 - DNA, 25 bp, Homo sapien
tagaaggctgctacccaggtaaaag

SEQ ID NO: 2339403 - DNA, 25 bp, Homo sapien
gaaacaggtctaatgcaggatctct

SEQ ID NO: 2339404 - DNA, 25 bp, Homo sapien
gagatagaatcaaacacgctgtgtt

SEQ ID NO: 2339405 - DNA, 25 bp, Homo sapien
cagccccatgttgactttcactaag

SEQ ID NO: 2339406 - DNA, 25 bp, Homo sapien
cttagcaaagccctctctaggtggc

SEQ ID NO: 2339407 - DNA, 25 bp, Homo sapien
gtgcagacagtgcactttcagcccc

SEQ ID NO: 2339408 - DNA, 25 bp, Homo sapien
tctaggtggctctttagccagagtg

SEQ ID NO: 2339409 - DNA, 25 bp, Homo sapien
atttagaagctcagttttcaccacc

SEQ ID NO: 2339410 - DNA, 25 bp, Homo sapien
catgccatttagaagctcagttttc

SEQ ID NO: 2339411 - DNA, 25 bp, Homo sapien
gccatttagaagctcagttttcacc

SEQ ID NO: 2339412 - DNA, 25 bp, Homo sapien
catttagaagctcagttttcaccac

SEQ ID NO: 2339413 - DNA, 25 bp, Homo sapien
ggtatgattgatggtttctgactcc

SEQ ID NO: 2339414 - DNA, 25 bp, Homo sapien
aaaaaagtatccagtctgtcctgaa

SEQ ID NO: 2339415 - DNA, 25 bp, Homo sapien
gaaaattgtctatgcagattggtgg

SEQ ID NO: 2339416 - DNA, 25 bp, Homo sapien
tctgactccatctgggtcttggcac

SEQ ID NO: 2339417 - DNA, 25 bp, Homo sapien
tcctgtccccttggtattgaatcct

SEQ ID NO: 2339418 - DNA, 25 bp, Homo sapien
tgaatcctcagtccatccttcataa

SEQ ID NO: 2339419 - DNA, 25 bp, Homo sapien
tagaattgctgtagctaagggacat

SEQ ID NO: 2339420 - DNA, 25 bp, Homo sapien
tcatgaatcaagatatagccccttt

SEQ ID NO: 2339421 - DNA, 25 bp, Homo sapien
gaaggcagacttcaaggacagagga

SEQ ID NO: 2339422 - DNA, 25 bp, Homo sapien
tactggctgccttgaataccaagaa

SEQ ID NO: 2339423 - DNA, 25 bp, Homo sapien
aatttcccttcgctgtactctgtaa

SEQ ID NO: 2339424 - DNA, 25 bp, Homo sapien
cagaggacaccctgagtctttgaaa

SEQ ID NO: 2339425 - DNA, 25 bp, Homo sapien
aagctgcttctatgggttaccacag

SEQ ID NO: 2339426 - DNA, 25 bp, Homo sapien
cacagagttcccacgtgtttggcac

SEQ ID NO: 2339427 - DNA, 25 bp, Homo sapien
tgtttggcacttgggctacctctcc

SEQ ID NO: 2339428 - DNA, 25 bp, Homo sapien
gcctgattcctagagcagtgcatga

SEQ ID NO: 2339429 - DNA, 25 bp, Homo sapien
gaggtctcatgtttcactgcttttt

SEQ ID NO: 2339430 - DNA, 25 bp, Homo sapien
tgtgttctcctgtatctcattagtt

SEQ ID NO: 2339431 - DNA, 25 bp, Homo sapien
tataagcacttgctgtaacagttgc

SEQ ID NO: 2339432 - DNA, 25 bp, Homo sapien
cattgtgttccttttgaggtctcat

SEQ ID NO: 2339433 - DNA, 25 bp, Homo sapien
tcacatcagaggatttaagatatcc

SEQ ID NO: 2339434 - DNA, 25 bp, Homo sapien
tttagagttcggagaaaccttcaca

SEQ ID NO: 2339435 - DNA, 25 bp, Homo sapien
tgatattttcgtttctgctcttggc

SEQ ID NO: 2339436 - DNA, 25 bp, Homo sapien
ccagcctttggtagccattattcca

SEQ ID NO: 2339437 - DNA, 25 bp, Homo sapien
ttccttcacgtctttaatgcatttc

SEQ ID NO: 2339438 - DNA, 25 bp, Homo sapien
cacacagccagttatacttaaaaga

SEQ ID NO: 2339439 - DNA, 25 bp, Homo sapien
ttaaaagacatgtacgggcaaggta

SEQ ID NO: 2339440 - DNA, 25 bp, Homo sapien
ttcacgtctttaatgcatttcacac

SEQ ID NO: 2339441 - DNA, 25 bp, Homo sapien
gttccctggagtagctacttgccaa

SEQ ID NO: 2339442 - DNA, 25 bp, Homo sapien
ggtaaacttgacatgcttacatctg

SEQ ID NO: 2339443 - DNA, 25 bp, Homo sapien
tgcaaactcttaaatcaccctgttg

SEQ ID NO: 2339444 - DNA, 25 bp, Homo sapien
tcaccaatagttatgtccagaacct

SEQ ID NO: 2339445 - DNA, 25 bp, Homo sapien
gatgctacaaaaggaagaatgtctc

SEQ ID NO: 2339446 - DNA, 25 bp, Homo sapien
gattaacctgcagttggtcccttgt

SEQ ID NO: 2339447 - DNA, 25 bp, Homo sapien
tgcttacaactgactgtggtcccaa

SEQ ID NO: 2339448 - DNA, 25 bp, Homo sapien
gaaataggcgacacctgttctaaaa

SEQ ID NO: 2339449 - DNA, 25 bp, Homo sapien
ttatgaagacttaagacatctgaaa

SEQ ID NO: 2339450 - DNA, 25 bp, Homo sapien
catcttacataaaacattcccttct

SEQ ID NO: 2339451 - DNA, 25 bp, Homo sapien
gttccaagtaaagctcattgttatg

SEQ ID NO: 2339452 - DNA, 25 bp, Homo sapien
tcatatattgctgttgacacaaaac

SEQ ID NO: 2339453 - DNA, 25 bp, Homo sapien
tggatttactttacttattaaagca

SEQ ID NO: 2339454 - DNA, 25 bp, Homo sapien
tataatatgtttgctggtcgcataa

SEQ ID NO: 2339455 - DNA, 25 bp, Homo sapien
tttataatatgtttgctggtcgcat

SEQ ID NO: 2339456 - DNA, 25 bp, Homo sapien
ttataatatgtttgctggtcgcata

SEQ ID NO: 2339457 - DNA, 25 bp, Homo sapien
ttggtctgaagggcccaaaatgtaa

SEQ ID NO: 2339458 - DNA, 25 bp, Homo sapien
tccttggtctgaagggcccaaaatg

SEQ ID NO: 2339459 - DNA, 25 bp, Homo sapien
ggcccaaaatgtaatattattgaat

SEQ ID NO: 2339460 - DNA, 25 bp, Homo sapien
tttttgaactgctgccaggttcttc

SEQ ID NO: 2339461 - DNA, 25 bp, Homo sapien
taaaagaaatactgctggctgggag

SEQ ID NO: 2339462 - DNA, 25 bp, Homo sapien
catatattggctcactcatgctcac

SEQ ID NO: 2339463 - DNA, 25 bp, Homo sapien
tacagacacatatattggctcactc

SEQ ID NO: 2339464 - DNA, 25 bp, Homo sapien
tcactcatgctcacttaaaagaaat

SEQ ID NO: 2339465 - DNA, 25 bp, Homo sapien
gggaacaaacaatccaggcgaaatc

SEQ ID NO: 2339466 - DNA, 25 bp, Homo sapien
gccaaaaaatggagagacagtatcc

SEQ ID NO: 2339467 - DNA, 25 bp, Homo sapien
ttctcgaaagtgtgcctgatgtagc

SEQ ID NO: 2339468 - DNA, 25 bp, Homo sapien
taattaccagccgttagaaagctca

SEQ ID NO: 2339469 - DNA, 25 bp, Homo sapien
cttagaataattgggtagagcctga

SEQ ID NO: 2339470 - DNA, 25 bp, Homo sapien
taccaataggtaagtctcctgcctt

SEQ ID NO: 2339471 - DNA, 25 bp, Homo sapien
tcctgcctagagagctaaatcttgg

SEQ ID NO: 2339472 - DNA, 25 bp, Homo sapien
aattccctgggatacttagcaatct

SEQ ID NO: 2339473 - DNA, 25 bp, Homo sapien
tgcactgaatcctccaatttctgaa

SEQ ID NO: 2339474 - DNA, 25 bp, Homo sapien
ccacaagttgtatgagtggaagaat

SEQ ID NO: 2339475 - DNA, 25 bp, Homo sapien
tattcccttagtttgatgaaccaca

SEQ ID NO: 2339476 - DNA, 25 bp, Homo sapien
ggactggtattcaggtgttatccct

SEQ ID NO: 2339477 - DNA, 25 bp, Homo sapien
tgatccaaacccacataaccatctg

SEQ ID NO: 2339478 - DNA, 25 bp, Homo sapien
tcttcaagttagaaggaggccaaag

SEQ ID NO: 2339479 - DNA, 25 bp, Homo sapien
gcctcaaagactaatgacccctcag

SEQ ID NO: 2339480 - DNA, 25 bp, Homo sapien
ttacggcactactgttgaattgatc

SEQ ID NO: 2339481 - DNA, 25 bp, Homo sapien
gcccagaacctgtagtcttaaccac

SEQ ID NO: 2339482 - DNA, 25 bp, Homo sapien
tgtgtgctttacatctagtgtctcc

SEQ ID NO: 2339483 - DNA, 25 bp, Homo sapien
tagaaagcataaattgtgagtacac

SEQ ID NO: 2339484 - DNA, 25 bp, Homo sapien
tagtgtctcctataaccctgtgaag

SEQ ID NO: 2339485 - DNA, 25 bp, Homo sapien
tatccatcagaaagttgctcaagag

SEQ ID NO: 2339486 - DNA, 25 bp, Homo sapien
ttgggaactcacttctttgcacggc

SEQ ID NO: 2339487 - DNA, 25 bp, Homo sapien
tagtccctggtatggagccacctct

SEQ ID NO: 2339488 - DNA, 25 bp, Homo sapien
taccctcttagaaagtggctccaag

SEQ ID NO: 2339489 - DNA, 25 bp, Homo sapien
tatgcattctgggagtaatagtctc

SEQ ID NO: 2339490 - DNA, 25 bp, Homo sapien
agccttgaaaaactagaactacaca

SEQ ID NO: 2339491 - DNA, 25 bp, Homo sapien
caacaattttccatcgggtagatac

SEQ ID NO: 2339492 - DNA, 25 bp, Homo sapien
tgtgggtctacttccgcattctctg

SEQ ID NO: 2339493 - DNA, 25 bp, Homo sapien
ttttctcttagcaagtttcaaacac

SEQ ID NO: 2339494 - DNA, 25 bp, Homo sapien
tatcactgactagagtcaccatgct

SEQ ID NO: 2339495 - DNA, 25 bp, Homo sapien
aagttggactcttgtagaccccaca

SEQ ID NO: 2339496 - DNA, 25 bp, Homo sapien
agttagacatcacctcacctagttg

SEQ ID NO: 2339497 - DNA, 25 bp, Homo sapien
tgccatgcagctacatacccagatg

SEQ ID NO: 2339498 - DNA, 25 bp, Homo sapien
tcagatctggtagcaaaactaagtc

SEQ ID NO: 2339499 - DNA, 25 bp, Homo sapien
caatgacctagacttgctgtcgcaa

SEQ ID NO: 2339500 - DNA, 25 bp, Homo sapien
tgttacacgaactgggatagtttcc

SEQ ID NO: 2339501 - DNA, 25 bp, Homo sapien
aaggcacctcattgaaactgatcat

SEQ ID NO: 2339502 - DNA, 25 bp, Homo sapien
cttttgtaacggacttctcttccag

SEQ ID NO: 2339503 - DNA, 25 bp, Homo sapien
tctcttccagtagcatgtgtgcttc

SEQ ID NO: 2339504 - DNA, 25 bp, Homo sapien
gcatgtgtgcttcaaaggcacctca

SEQ ID NO: 2339505 - DNA, 25 bp, Homo sapien
ctgagtggctcggatagtcatctgc

SEQ ID NO: 2339506 - DNA, 25 bp, Homo sapien
agtggctcggatagtcatctgctgc

SEQ ID NO: 2339507 - DNA, 25 bp, Homo sapien
ttaactgagtggctcggatagtcat

SEQ ID NO: 2339508 - DNA, 25 bp, Homo sapien
taactgagtggctcggatagtcatc

SEQ ID NO: 2339509 - DNA, 25 bp, Homo sapien
gaactctaggctctagtcatagttg

SEQ ID NO: 2339510 - DNA, 25 bp, Homo sapien
cagtctgcatgcctaacttgagtga

SEQ ID NO: 2339511 - DNA, 25 bp, Homo sapien
tggcttcctgataaatagcttaaaa

SEQ ID NO: 2339512 - DNA, 25 bp, Homo sapien
gcttgtccctcttctctaattttaa

SEQ ID NO: 2339513 - DNA, 25 bp, Homo sapien
tgtgataaacgtgagctaagtttat

SEQ ID NO: 2339514 - DNA, 25 bp, Homo sapien
tgataaacgtgagctaagtttattt

SEQ ID NO: 2339515 - DNA, 25 bp, Homo sapien
ctagtgtgataaacgtgagctaagt

SEQ ID NO: 2339516 - DNA, 25 bp, Homo sapien
agtgtgataaacgtgagctaagttt

SEQ ID NO: 2339517 - DNA, 25 bp, Homo sapien
tttcctgtttcctcactgtcttcct

SEQ ID NO: 2339518 - DNA, 25 bp, Homo sapien
tcctgtttcctcactgtcttccttt

SEQ ID NO: 2339519 - DNA, 25 bp, Homo sapien
ttctatttcctgtttcctcactgtc

SEQ ID NO: 2339520 - DNA, 25 bp, Homo sapien
tatttcctgtttcctcactgtcttc

SEQ ID NO: 2339521 - DNA, 25 bp, Homo sapien
tctaaaccgcagtaaaaattcaaca

SEQ ID NO: 2339522 - DNA, 25 bp, Homo sapien
ctgctcgagccatcaaggaatttct

SEQ ID NO: 2339523 - DNA, 25 bp, Homo sapien
cagattccaactgctcgagccatca

SEQ ID NO: 2339524 - DNA, 25 bp, Homo sapien
acattttggccattgacggtcattc

SEQ ID NO: 2339525 - DNA, 25 bp, Homo sapien
gaacaatggtcccatttagatctca

SEQ ID NO: 2339526 - DNA, 25 bp, Homo sapien
ctttatcacactcaagaaagtgaac

SEQ ID NO: 2339527 - DNA, 25 bp, Homo sapien
aagaaagtgaacaatggtcccattt

SEQ ID NO: 2339528 - DNA, 25 bp, Homo sapien
actcaagaaagtgaacaatggtccc

SEQ ID NO: 2339529 - DNA, 25 bp, Homo sapien
tagatgttagttccttggaggttcc

SEQ ID NO: 2339530 - DNA, 25 bp, Homo sapien
gaggccaccaaatctgcacttgatc

SEQ ID NO: 2339531 - DNA, 25 bp, Homo sapien
tgcaccacacccttccatggtaggt

SEQ ID NO: 2339532 - DNA, 25 bp, Homo sapien
cagatactggcaatcagaggccacc

SEQ ID NO: 2339533 - DNA, 25 bp, Homo sapien
catgagaaagaccatgaagcaggca

SEQ ID NO: 2339534 - DNA, 25 bp, Homo sapien
tactggaaagacttcatgggctccc

SEQ ID NO: 2339535 - DNA, 25 bp, Homo sapien
ggctccccacagcttaggtgagaga

SEQ ID NO: 2339536 - DNA, 25 bp, Homo sapien
tattgaaattaatacggtagcccac

SEQ ID NO: 2339537 - DNA, 25 bp, Homo sapien
tttcagtgttccagtaagacagcag

SEQ ID NO: 2339538 - DNA, 25 bp, Homo sapien
tgacatgcatttactaccctacagg

SEQ ID NO: 2339539 - DNA, 25 bp, Homo sapien
ttccaggatatcagctccccgagtg

SEQ ID NO: 2339540 - DNA, 25 bp, Homo sapien
catgaagtttattatccaggcctgg

SEQ ID NO: 2339541 - DNA, 25 bp, Homo sapien
aaatgttctctcatgcctaccgtag

SEQ ID NO: 2339542 - DNA, 25 bp, Homo sapien
acagcttttcgccagggtttcgcca

SEQ ID NO: 2339543 - DNA, 25 bp, Homo sapien
tctcatggacaaataactcaaaggg

SEQ ID NO: 2339544 - DNA, 25 bp, Homo sapien
gaaataattcaatgtggccagtacc

SEQ ID NO: 2339545 - DNA, 25 bp, Homo sapien
gcagccaaaagaccacaacagtgga

SEQ ID NO: 2339546 - DNA, 25 bp, Homo sapien
ggaaaagcccttcagtccaactgtc

SEQ ID NO: 2339547 - DNA, 25 bp, Homo sapien
taacctcagtctggtagactccaac

SEQ ID NO: 2339548 - DNA, 25 bp, Homo sapien
ttcaaggtaactgctacaaagctcc

SEQ ID NO: 2339549 - DNA, 25 bp, Homo sapien
ttttaacgcaagctgacaagaaagc

SEQ ID NO: 2339550 - DNA, 25 bp, Homo sapien
cacaggctttgacccaacagctggc

SEQ ID NO: 2339551 - DNA, 25 bp, Homo sapien
ttgaggcaaccccaagaacaggcat

SEQ ID NO: 2339552 - DNA, 25 bp, Homo sapien
tcggaagagcagtatgcacaggctt

SEQ ID NO: 2339553 - DNA, 25 bp, Homo sapien
aagacatctgggatgtagcagctag

SEQ ID NO: 2339554 - DNA, 25 bp, Homo sapien
gacatctgggatgtagcagctagat

SEQ ID NO: 2339555 - DNA, 25 bp, Homo sapien
catctgggatgtagcagctagatgg

SEQ ID NO: 2339556 - DNA, 25 bp, Homo sapien
atctgggatgtagcagctagatgga

SEQ ID NO: 2339557 - DNA, 25 bp, Homo sapien
cagacctggaagtggtaactgaaag

SEQ ID NO: 2339558 - DNA, 25 bp, Homo sapien
agacctggaagtggtaactgaaagg

SEQ ID NO: 2339559 - DNA, 25 bp, Homo sapien
tatatgggaactttcctctgaaggc

SEQ ID NO: 2339560 - DNA, 25 bp, Homo sapien
tcgtgatagagtgctatatatggga

SEQ ID NO: 2339561 - DNA, 25 bp, Homo sapien
tgttcatacaggtcaacatcgtgat

SEQ ID NO: 2339562 - DNA, 25 bp, Homo sapien
ccagctggatgttcatacaggtcaa

SEQ ID NO: 2339563 - DNA, 25 bp, Homo sapien
ggcagtagctaggtcgtctttctca

SEQ ID NO: 2339564 - DNA, 25 bp, Homo sapien
cgtgaactttataatgagcaggcca

SEQ ID NO: 2339565 - DNA, 25 bp, Homo sapien
taaagcacctctaacggcatctggc

SEQ ID NO: 2339566 - DNA, 25 bp, Homo sapien
tattaaccacaatgcatagggtgca

SEQ ID NO: 2339567 - DNA, 25 bp, Homo sapien
aaaatgctaaggacctgtggcctca

SEQ ID NO: 2339568 - DNA, 25 bp, Homo sapien
tatctaccattaaggaaagaggctc

SEQ ID NO: 2339569 - DNA, 25 bp, Homo sapien
tagggatctacccaacagacatcgc

SEQ ID NO: 2339570 - DNA, 25 bp, Homo sapien
taacaatggtgataccagagggcag

SEQ ID NO: 2339571 - DNA, 25 bp, Homo sapien
tggatgcttatgtagcaagattttc

SEQ ID NO: 2339572 - DNA, 25 bp, Homo sapien
ggagaggctcccctagttctggaag

SEQ ID NO: 2339573 - DNA, 25 bp, Homo sapien
gcttttggtagaacagttattgtta

SEQ ID NO: 2339574 - DNA, 25 bp, Homo sapien
caaacttgatttgtgaacctttgcc

SEQ ID NO: 2339575 - DNA, 25 bp, Homo sapien
gtttccagggccttacaatatagta

SEQ ID NO: 2339576 - DNA, 25 bp, Homo sapien
caatatagtatctaaggtggcaact

SEQ ID NO: 2339577 - DNA, 25 bp, Homo sapien
ggtggcaacttaggaattaactgaa

SEQ ID NO: 2339578 - DNA, 25 bp, Homo sapien
tctgaaacacgtttacagtagtagt

SEQ ID NO: 2339579 - DNA, 25 bp, Homo sapien
tgtggagatacttctgggtcagctc

SEQ ID NO: 2339580 - DNA, 25 bp, Homo sapien
gtggagatacttctgggtcagctca

SEQ ID NO: 2339581 - DNA, 25 bp, Homo sapien
ctttgtggagatacttctgggtcag

SEQ ID NO: 2339582 - DNA, 25 bp, Homo sapien
tttgtggagatacttctgggtcagc

SEQ ID NO: 2339583 - DNA, 25 bp, Homo sapien
tatattatgcgcaattatagtgggc

SEQ ID NO: 2339584 - DNA, 25 bp, Homo sapien
gaagagaacagacatgtcatgttcc

SEQ ID NO: 2339585 - DNA, 25 bp, Homo sapien
tccaaatagttgacatgagtagggt

SEQ ID NO: 2339586 - DNA, 25 bp, Homo sapien
tgagtagggtcatatgcattaagac

SEQ ID NO: 2339587 - DNA, 25 bp, Homo sapien
gtgtggtagattctcatccacacat

SEQ ID NO: 2339588 - DNA, 25 bp, Homo sapien
tcttcccaattctccttgaacatgt

SEQ ID NO: 2339589 - DNA, 25 bp, Homo sapien
cagtgtgtggtagattctcatccac

SEQ ID NO: 2339590 - DNA, 25 bp, Homo sapien
ccccagtgtgtggtagattctcatc

SEQ ID NO: 2339591 - DNA, 25 bp, Homo sapien
agattcttctagtcagatttcccac

SEQ ID NO: 2339592 - DNA, 25 bp, Homo sapien
tagattcttctagtcagatttccca

SEQ ID NO: 2339593 - DNA, 25 bp, Homo sapien
ttagattcttctagtcagatttccc

SEQ ID NO: 2339594 - DNA, 25 bp, Homo sapien
tatttagatagtccacttttttgct

SEQ ID NO: 2339595 - DNA, 25 bp, Homo sapien
ttagatagtccacttttttgctcca

SEQ ID NO: 2339596 - DNA, 25 bp, Homo sapien
taatgggaaacttgacaccagccag

SEQ ID NO: 2339597 - DNA, 25 bp, Homo sapien
ttatttcctaatgggaaacttgaca

SEQ ID NO: 2339598 - DNA, 25 bp, Homo sapien
caattctcacaatgctttgggtagc

SEQ ID NO: 2339599 - DNA, 25 bp, Homo sapien
tcttgaggcttctttagtgtggtag

SEQ ID NO: 2339600 - DNA, 25 bp, Homo sapien
gccaatgaataaagacatattacag

SEQ ID NO: 2339601 - DNA, 25 bp, Homo sapien
tctttagtgtggtagcaattctcac

SEQ ID NO: 2339602 - DNA, 25 bp, Homo sapien
atgacaaattctaaatccagatcag

SEQ ID NO: 2339603 - DNA, 25 bp, Homo sapien
tgacaaattctaaatccagatcaga

SEQ ID NO: 2339604 - DNA, 25 bp, Homo sapien
ctgttccttttagttgaagggtatg

SEQ ID NO: 2339605 - DNA, 25 bp, Homo sapien
tctcttgataggattaatcattcct

SEQ ID NO: 2339606 - DNA, 25 bp, Homo sapien
gaaataaatattggagcagttgtcc

SEQ ID NO: 2339607 - DNA, 25 bp, Homo sapien
catgtagtacaaccaaaaagagact

SEQ ID NO: 2339608 - DNA, 25 bp, Homo sapien
cttggctaatccttgttcttgaaca

SEQ ID NO: 2339609 - DNA, 25 bp, Homo sapien
ttggctaatccttgttcttgaacat

SEQ ID NO: 2339610 - DNA, 25 bp, Homo sapien
tggctaatccttgttcttgaacatt

SEQ ID NO: 2339611 - DNA, 25 bp, Homo sapien
ggctaatccttgttcttgaacattt

SEQ ID NO: 2339612 - DNA, 25 bp, Homo sapien
ccgcaaagcgatgctgctcaaataa

SEQ ID NO: 2339613 - DNA, 25 bp, Homo sapien
gcgatgctgctcaaataatgagcca

SEQ ID NO: 2339614 - DNA, 25 bp, Homo sapien
ctgctgctgcgtagccttgtcaaac

SEQ ID NO: 2339615 - DNA, 25 bp, Homo sapien
tagccttgtcaaaccgcaaagcgat

SEQ ID NO: 2339616 - DNA, 25 bp, Homo sapien
gttggtgtctctccagtgacatgct

SEQ ID NO: 2339617 - DNA, 25 bp, Homo sapien
tagctccacatcaccacgggtagga

SEQ ID NO: 2339618 - DNA, 25 bp, Homo sapien
ttctgcagttggtgtctctccagtg

SEQ ID NO: 2339619 - DNA, 25 bp, Homo sapien
ctgtagctccacatcaccacgggta

SEQ ID NO: 2339620 - DNA, 25 bp, Homo sapien
caagctgtgtcacccctggtgccat

SEQ ID NO: 2339621 - DNA, 25 bp, Homo sapien
ggtagcaatggcaatgaacaagctg

SEQ ID NO: 2339622 - DNA, 25 bp, Homo sapien
acagcagccttggtgggtagcaatg

SEQ ID NO: 2339623 - DNA, 25 bp, Homo sapien
ttcgggcactcatcagacagcagcc

SEQ ID NO: 2339624 - DNA, 25 bp, Homo sapien
ttgttgcaagtccttgatcagccgc

SEQ ID NO: 2339625 - DNA, 25 bp, Homo sapien
tagtggttggcccagtcagtgtaaa

SEQ ID NO: 2339626 - DNA, 25 bp, Homo sapien
gatgatttctgctaggagtactcca

SEQ ID NO: 2339627 - DNA, 25 bp, Homo sapien
gagtactccatctgcaatgtcttgt

SEQ ID NO: 2339628 - DNA, 25 bp, Homo sapien
gactgacttctaggacatccattga

SEQ ID NO: 2339629 - DNA, 25 bp, Homo sapien
gacttctaggacatccattgatatc

SEQ ID NO: 2339630 - DNA, 25 bp, Homo sapien
taggacatccattgatatcttcaac

SEQ ID NO: 2339631 - DNA, 25 bp, Homo sapien
ttctaggacatccattgatatcttc

SEQ ID NO: 2339632 - DNA, 25 bp, Homo sapien
gcatgccttgagaactatttccaga

SEQ ID NO: 2339633 - DNA, 25 bp, Homo sapien
tgttgatgtgcctaaattgaaccca

SEQ ID NO: 2339634 - DNA, 25 bp, Homo sapien
tgaagagtccatgtgtttacactgg

SEQ ID NO: 2339635 - DNA, 25 bp, Homo sapien
tctggaagagactacgaatcatatc

SEQ ID NO: 2339636 - DNA, 25 bp, Homo sapien
tttttatctctatagtttattactc

SEQ ID NO: 2339637 - DNA, 25 bp, Homo sapien
atctctatagtttattactctttga

SEQ ID NO: 2339638 - DNA, 25 bp, Homo sapien
ttatctctatagtttattactcttt

SEQ ID NO: 2339639 - DNA, 25 bp, Homo sapien
ttttatctctatagtttattactct

SEQ ID NO: 2339640 - DNA, 25 bp, Homo sapien
ttccaagtttctgacaactaagaac

SEQ ID NO: 2339641 - DNA, 25 bp, Homo sapien
tcttccaagtttctgacaactaaga

SEQ ID NO: 2339642 - DNA, 25 bp, Homo sapien
tccaagtttctgacaactaagaact

SEQ ID NO: 2339643 - DNA, 25 bp, Homo sapien
acaactaagaactcattaaattcat

SEQ ID NO: 2339644 - DNA, 25 bp, Homo sapien
ttaaacctttaagagcattccagta

SEQ ID NO: 2339645 - DNA, 25 bp, Homo sapien
attaaacctttaagagcattccagt

SEQ ID NO: 2339646 - DNA, 25 bp, Homo sapien
tgccatatataagattttattaaac

SEQ ID NO: 2339647 - DNA, 25 bp, Homo sapien
tgtcttggcaatgcaggcccttttt

SEQ ID NO: 2339648 - DNA, 25 bp, Homo sapien
tcttggcaatgcaggcccttttttg

SEQ ID NO: 2339649 - DNA, 25 bp, Homo sapien
attgtcttggcaatgcaggcccttt

SEQ ID NO: 2339650 - DNA, 25 bp, Homo sapien
ggattgtcttggcaatgcaggccct

SEQ ID NO: 2339651 - DNA, 25 bp, Homo sapien
gttccagatccttgagcaaccgccg

SEQ ID NO: 2339652 - DNA, 25 bp, Homo sapien
ctagttccagatccttgagcaaccg

SEQ ID NO: 2339653 - DNA, 25 bp, Homo sapien
gcaccgtcttccacaattgttgaac

SEQ ID NO: 2339654 - DNA, 25 bp, Homo sapien
tgagcaaccgccgcaccgtcttcca

SEQ ID NO: 2339655 - DNA, 25 bp, Homo sapien
cccagtttcacgagagtttatatcc

SEQ ID NO: 2339656 - DNA, 25 bp, Homo sapien
ttcaacaaatagtgcgagacgagct

SEQ ID NO: 2339657 - DNA, 25 bp, Homo sapien
gaagagtcaaaagacctaaattgcc

SEQ ID NO: 2339658 - DNA, 25 bp, Homo sapien
caacacagctttatgacctacatga

SEQ ID NO: 2339659 - DNA, 25 bp, Homo sapien
tacacttaagaattaaccgaggatc

SEQ ID NO: 2339660 - DNA, 25 bp, Homo sapien
taccatgtcgttgctggaattgcac

SEQ ID NO: 2339661 - DNA, 25 bp, Homo sapien
cgaggatcttttaaacccatagagc

SEQ ID NO: 2339662 - DNA, 25 bp, Homo sapien
catagtagggattcaataactcaca

SEQ ID NO: 2339663 - DNA, 25 bp, Homo sapien
cttcagcagatagaccttgaacatt

SEQ ID NO: 2339664 - DNA, 25 bp, Homo sapien
gcagatagaccttgaacatttaccc

SEQ ID NO: 2339665 - DNA, 25 bp, Homo sapien
gaccttgaacatttacccctctggc

SEQ ID NO: 2339666 - DNA, 25 bp, Homo sapien
gatagaccttgaacatttacccctc

SEQ ID NO: 2339667 - DNA, 25 bp, Homo sapien
gctgcttgtagcgagataaactgaa

SEQ ID NO: 2339668 - DNA, 25 bp, Homo sapien
gctgctgaagttccaccaaggactg

SEQ ID NO: 2339669 - DNA, 25 bp, Homo sapien
gaagcgtgagtaactcgctgctgaa

SEQ ID NO: 2339670 - DNA, 25 bp, Homo sapien
ggactgcatatcttgctgggttttg

SEQ ID NO: 2339671 - DNA, 25 bp, Homo sapien
gaaaccatgtctccacaaaaattac

SEQ ID NO: 2339672 - DNA, 25 bp, Homo sapien
aaaataataataaacagctggccgt

SEQ ID NO: 2339673 - DNA, 25 bp, Homo sapien
aataataataaacagctggccgtgg

SEQ ID NO: 2339674 - DNA, 25 bp, Homo sapien
taataataaacagctggccgtggtg

SEQ ID NO: 2339675 - DNA, 25 bp, Homo sapien
tgagttgaagccaccttactggtcc

SEQ ID NO: 2339676 - DNA, 25 bp, Homo sapien
tggctcgacatgaatccggttgctg

SEQ ID NO: 2339677 - DNA, 25 bp, Homo sapien
tgatgcctaagtggagaatcgcttc

SEQ ID NO: 2339678 - DNA, 25 bp, Homo sapien
tacactgagcaccaaaacaactggc

SEQ ID NO: 2339679 - DNA, 25 bp, Homo sapien
tccactgtgattagactgagttgca

SEQ ID NO: 2339680 - DNA, 25 bp, Homo sapien
tttgactggttgcaattccactgtg

SEQ ID NO: 2339681 - DNA, 25 bp, Homo sapien
actggttgcaattccactgtgatta

SEQ ID NO: 2339682 - DNA, 25 bp, Homo sapien
ctgtgattagactgagttgcatatc

SEQ ID NO: 2339683 - DNA, 25 bp, Homo sapien
cagacgcagtctttgtggtcaaaca

SEQ ID NO: 2339684 - DNA, 25 bp, Homo sapien
gatgctaggaatttacaggaccagt

SEQ ID NO: 2339685 - DNA, 25 bp, Homo sapien
gtgtctggccaagaactaatactga

SEQ ID NO: 2339686 - DNA, 25 bp, Homo sapien
gattgcactctgttgaaggaaccca

SEQ ID NO: 2339687 - DNA, 25 bp, Homo sapien
taaattagaggctccctggaccttg

SEQ ID NO: 2339688 - DNA, 25 bp, Homo sapien
tcctatttaaattagaggctccctg

SEQ ID NO: 2339689 - DNA, 25 bp, Homo sapien
tcaatgctgttaaagctctgacttc

SEQ ID NO: 2339690 - DNA, 25 bp, Homo sapien
tcctgcagcaggcaccctagagggc

SEQ ID NO: 2339691 - DNA, 25 bp, Homo sapien
taattctgtgttgtgtgtaaataaa

SEQ ID NO: 2339692 - DNA, 25 bp, Homo sapien
tatcttattaattctgtgttgtgtg

SEQ ID NO: 2339693 - DNA, 25 bp, Homo sapien
aatgttgctaaatccttggcatcta

SEQ ID NO: 2339694 - DNA, 25 bp, Homo sapien
aaagcttccacaccagaagacacct

SEQ ID NO: 2339695 - DNA, 25 bp, Homo sapien
tgaagacgattgaggtcctttggag

SEQ ID NO: 2339696 - DNA, 25 bp, Homo sapien
aagacgattgaggtcctttggagga

SEQ ID NO: 2339697 - DNA, 25 bp, Homo sapien
ctgaagacgattgaggtcctttgga

SEQ ID NO: 2339698 - DNA, 25 bp, Homo sapien
gacgattgaggtcctttggaggaat

SEQ ID NO: 2339699 - DNA, 25 bp, Homo sapien
taccactggaagacggaattaagct

SEQ ID NO: 2339700 - DNA, 25 bp, Homo sapien
gacattcatggacttgctgcgccag

SEQ ID NO: 2339701 - DNA, 25 bp, Homo sapien
aatggtgccactgtcgcggtattcg

SEQ ID NO: 2339702 - DNA, 25 bp, Homo sapien
tgctttacagtcaacatggtggagg

SEQ ID NO: 2339703 - DNA, 25 bp, Homo sapien
gaactcatcaggttcacacagcgga

SEQ ID NO: 2339704 - DNA, 25 bp, Homo sapien
tcttagctacttggctacactgcct

SEQ ID NO: 2339705 - DNA, 25 bp, Homo sapien
gttaaagaggtcaaacagaaactca

SEQ ID NO: 2339706 - DNA, 25 bp, Homo sapien
taaaagcttgttgctacttatagaa

SEQ ID NO: 2339707 - DNA, 25 bp, Homo sapien
agcatttattgaagtctcagaagga

SEQ ID NO: 2339708 - DNA, 25 bp, Homo sapien
ttgaagtctcagaaggaataagtac

SEQ ID NO: 2339709 - DNA, 25 bp, Homo sapien
caaagagtactatgaagcatttatt

SEQ ID NO: 2339710 - DNA, 25 bp, Homo sapien
tgtgacaaagagtactatgaagcat

SEQ ID NO: 2339711 - DNA, 25 bp, Homo sapien
gtaaagcggtaccttcattttctga

SEQ ID NO: 2339712 - DNA, 25 bp, Homo sapien
gtacaggagtcagccgatggtaaag

SEQ ID NO: 2339713 - DNA, 25 bp, Homo sapien
tccatctttgtaggactggtacagg

SEQ ID NO: 2339714 - DNA, 25 bp, Homo sapien
actgcttagcagtcttactatatga

SEQ ID NO: 2339715 - DNA, 25 bp, Homo sapien
tagtcatgtctaatgcttgccaaat

SEQ ID NO: 2339716 - DNA, 25 bp, Homo sapien
cagtatccactgcaggatgctgtag

SEQ ID NO: 2339717 - DNA, 25 bp, Homo sapien
cactgcaggatgctgtagtcatgtc

SEQ ID NO: 2339718 - DNA, 25 bp, Homo sapien
gctgtagtcatgtctaatgcttgcc

SEQ ID NO: 2339719 - DNA, 25 bp, Homo sapien
agtgcagaggccaaataatcgctaa

SEQ ID NO: 2339720 - DNA, 25 bp, Homo sapien
ggtttcactagcatccagaactcag

SEQ ID NO: 2339721 - DNA, 25 bp, Homo sapien
gagctaggacctggcaataaattca

SEQ ID NO: 2339722 - DNA, 25 bp, Homo sapien
gaaccagggagcaattcacagtgca

SEQ ID NO: 2339723 - DNA, 25 bp, Homo sapien
ggcagatctcccttctgaatgttgg

SEQ ID NO: 2339724 - DNA, 25 bp, Homo sapien
tgaagcaggcagatctcccttctga

SEQ ID NO: 2339725 - DNA, 25 bp, Homo sapien
ctcccttctgaatgttgggatttgt

SEQ ID NO: 2339726 - DNA, 25 bp, Homo sapien
taattctctgtagctgcaggcagct

SEQ ID NO: 2339727 - DNA, 25 bp, Homo sapien
agccctgcacaagcctcttacattt

SEQ ID NO: 2339728 - DNA, 25 bp, Homo sapien
cagccctgcacaagcctcttacatt

SEQ ID NO: 2339729 - DNA, 25 bp, Homo sapien
gccctgcacaagcctcttacatttt

SEQ ID NO: 2339730 - DNA, 25 bp, Homo sapien
gtgagggaaagattggtcagagact

SEQ ID NO: 2339731 - DNA, 25 bp, Homo sapien
tttgtttctgaaggcaagctccctt

SEQ ID NO: 2339732 - DNA, 25 bp, Homo sapien
tctttgctccggaacacagagagtt

SEQ ID NO: 2339733 - DNA, 25 bp, Homo sapien
tctccttacttctttgctccggaac

SEQ ID NO: 2339734 - DNA, 25 bp, Homo sapien
aaaccagttggaaatgcgcaccgtg

SEQ ID NO: 2339735 - DNA, 25 bp, Homo sapien
gagaaacttggacagtgagcgccgc

SEQ ID NO: 2339736 - DNA, 25 bp, Homo sapien
tgctggtgtgatacagggactgcac

SEQ ID NO: 2339737 - DNA, 25 bp, Homo sapien
gcttggcttggaggacacgttttca

SEQ ID NO: 2339738 - DNA, 25 bp, Homo sapien
tgcctgttctagatcacccagcatg

SEQ ID NO: 2339739 - DNA, 25 bp, Homo sapien
agtgcctgttctagatcacccagca

SEQ ID NO: 2339740 - DNA, 25 bp, Homo sapien
ctaataagtcagtgtaaagtgcctg

SEQ ID NO: 2339741 - DNA, 25 bp, Homo sapien
agtcagtgtaaagtgcctgttctag

SEQ ID NO: 2339742 - DNA, 25 bp, Homo sapien
taagatcccatacacgtttttagga

SEQ ID NO: 2339743 - DNA, 25 bp, Homo sapien
gatcccatacacgtttttaggagca

SEQ ID NO: 2339744 - DNA, 25 bp, Homo sapien
cccatacacgtttttaggagcaaat

SEQ ID NO: 2339745 - DNA, 25 bp, Homo sapien
cacgtttttaggagcaaattggact

SEQ ID NO: 2339746 - DNA, 25 bp, Homo sapien
tcatcccttatctgtgatgaggtca

SEQ ID NO: 2339747 - DNA, 25 bp, Homo sapien
catcccttatctgtgatgaggtcac

SEQ ID NO: 2339748 - DNA, 25 bp, Homo sapien
gtctgctatgtttttaactgttctc

SEQ ID NO: 2339749 - DNA, 25 bp, Homo sapien
aaattctgcctcaagtctgctatgt

SEQ ID NO: 2339750 - DNA, 25 bp, Homo sapien
atagtctcttctaaattctgcctca

SEQ ID NO: 2339751 - DNA, 25 bp, Homo sapien
tctcattcttcttgtttcagggtct

SEQ ID NO: 2339752 - DNA, 25 bp, Homo sapien
gcttatctgagtcccacgaagactg

SEQ ID NO: 2339753 - DNA, 25 bp, Homo sapien
tggcttatctgagtcccacgaagac

SEQ ID NO: 2339754 - DNA, 25 bp, Homo sapien
ctgtggcttatctgagtcccacgaa

SEQ ID NO: 2339755 - DNA, 25 bp, Homo sapien
tatctgagtcccacgaagactggac

SEQ ID NO: 2339756 - DNA, 25 bp, Homo sapien
tatactctggttcacttagggccat

SEQ ID NO: 2339757 - DNA, 25 bp, Homo sapien
ggagaaataactatactctggttca

SEQ ID NO: 2339758 - DNA, 25 bp, Homo sapien
actatactctggttcacttagggcc

SEQ ID NO: 2339759 - DNA, 25 bp, Homo sapien
atggagaaataactatactctggtt

SEQ ID NO: 2339760 - DNA, 25 bp, Homo sapien
acttgtcaagttgggtatggtcctt

SEQ ID NO: 2339761 - DNA, 25 bp, Homo sapien
cagtgctgtcaaatgttgtctccag

SEQ ID NO: 2339762 - DNA, 25 bp, Homo sapien
cacagtgctgtcaaatgttgtctcc

SEQ ID NO: 2339763 - DNA, 25 bp, Homo sapien
tgggtcgacttgtcaagttgggtat

SEQ ID NO: 2339764 - DNA, 25 bp, Homo sapien
acggagaggcgtggtatacatgaac

SEQ ID NO: 2339765 - DNA, 25 bp, Homo sapien
ggtaccactgcgaggatagccagca

SEQ ID NO: 2339766 - DNA, 25 bp, Homo sapien
tttcccagcctagagacagcagctc

SEQ ID NO: 2339767 - DNA, 25 bp, Homo sapien
agcatctcccgcctgaagtcgcgga

SEQ ID NO: 2339768 - DNA, 25 bp, Homo sapien
gctgtgtctggtattcggttcagac

SEQ ID NO: 2339769 - DNA, 25 bp, Homo sapien
tagtatataggttaagtcctccatc

SEQ ID NO: 2339770 - DNA, 25 bp, Homo sapien
gatgtcccgggaagttgctgtgtct

SEQ ID NO: 2339771 - DNA, 25 bp, Homo sapien
tgtcacatcgtgaacccctctctgg

SEQ ID NO: 2339772 - DNA, 25 bp, Homo sapien
ggaattttcactctgcacaggtggt

SEQ ID NO: 2339773 - DNA, 25 bp, Homo sapien
gaattttcactctgcacaggtggta

SEQ ID NO: 2339774 - DNA, 25 bp, Homo sapien
tatctcggtgagaaacttcaaggaa

SEQ ID NO: 2339775 - DNA, 25 bp, Homo sapien
tcatcaccagctctatctcggtgag

SEQ ID NO: 2339776 - DNA, 25 bp, Homo sapien
tcaatccacttgactcttgggaacc

SEQ ID NO: 2339777 - DNA, 25 bp, Homo sapien
cacttgactcttgggaaccttgcag

SEQ ID NO: 2339778 - DNA, 25 bp, Homo sapien
tccacttgactcttgggaaccttgc

SEQ ID NO: 2339779 - DNA, 25 bp, Homo sapien
ctgttcaatccacttgactcttggg

SEQ ID NO: 2339780 - DNA, 25 bp, Homo sapien
ggtactgaactaccaggttcattag

SEQ ID NO: 2339781 - DNA, 25 bp, Homo sapien
tccatgagctttacggtactgaact

SEQ ID NO: 2339782 - DNA, 25 bp, Homo sapien
ctctccatgagctttacggtactga

SEQ ID NO: 2339783 - DNA, 25 bp, Homo sapien
agctttacggtactgaactaccagg

SEQ ID NO: 2339784 - DNA, 25 bp, Homo sapien
catgggtaaatagatccaggtcaga

SEQ ID NO: 2339785 - DNA, 25 bp, Homo sapien
ggacagctgactcaagctcggagga

SEQ ID NO: 2339786 - DNA, 25 bp, Homo sapien
gtgacagcctgcaagagactgccag

SEQ ID NO: 2339787 - DNA, 25 bp, Homo sapien
tcacgtgctataaagggttgcaatc

SEQ ID NO: 2339788 - DNA, 25 bp, Homo sapien
caacttgcatttcatgaaccactat

SEQ ID NO: 2339789 - DNA, 25 bp, Homo sapien
acttgcatttcatgaaccactattt

SEQ ID NO: 2339790 - DNA, 25 bp, Homo sapien
ttcacaacttgcatttcatgaacca

SEQ ID NO: 2339791 - DNA, 25 bp, Homo sapien
cacaacttgcatttcatgaaccact

SEQ ID NO: 2339792 - DNA, 25 bp, Homo sapien
ttagtcgcacattataagtagagtc

SEQ ID NO: 2339793 - DNA, 25 bp, Homo sapien
tagctaggttagcaatcaggtctat

SEQ ID NO: 2339794 - DNA, 25 bp, Homo sapien
taagtagagtctgcattagttagct

SEQ ID NO: 2339795 - DNA, 25 bp, Homo sapien
tatgatcttgaacccttagtcgcac

SEQ ID NO: 2339796 - DNA, 25 bp, Homo sapien
tttagtccacagattgttgttgcta

SEQ ID NO: 2339797 - DNA, 25 bp, Homo sapien
gattgttgttgctaatctggaccat

SEQ ID NO: 2339798 - DNA, 25 bp, Homo sapien
ttttagtccacagattgttgttgct

SEQ ID NO: 2339799 - DNA, 25 bp, Homo sapien
tattcttcctagaggggacggtgat

SEQ ID NO: 2339800 - DNA, 25 bp, Homo sapien
ggacggtgatgttggagtaagagct

SEQ ID NO: 2339801 - DNA, 25 bp, Homo sapien
tggagtaagagctgacagaggatgt

SEQ ID NO: 2339802 - DNA, 25 bp, Homo sapien
gtgtcactgagaccactgctcactg

SEQ ID NO: 2339803 - DNA, 25 bp, Homo sapien
tatcccaggtctcgtctgtggtgga

SEQ ID NO: 2339804 - DNA, 25 bp, Homo sapien
tcagttcctcaggactatcccaggt

SEQ ID NO: 2339805 - DNA, 25 bp, Homo sapien
tcaggaagtccagaggacacagtct

SEQ ID NO: 2339806 - DNA, 25 bp, Homo sapien
agctttctgcctagatggcgcccct

SEQ ID NO: 2339807 - DNA, 25 bp, Homo sapien
tgattctgtgaaccgtccaaactgg

SEQ ID NO: 2339808 - DNA, 25 bp, Homo sapien
tctcagtttcgaggtggtggcccca

SEQ ID NO: 2339809 - DNA, 25 bp, Homo sapien
tcgagcgccctgacccaattttagt

SEQ ID NO: 2339810 - DNA, 25 bp, Homo sapien
gagctggtggcagtcgatcttccaa

SEQ ID NO: 2339811 - DNA, 25 bp, Homo sapien
tggtactagggctgggcattactga

SEQ ID NO: 2339812 - DNA, 25 bp, Homo sapien
gccttgccgcgctaatgtggtacta

SEQ ID NO: 2339813 - DNA, 25 bp, Homo sapien
gaagatttcacaccctcagtattag

SEQ ID NO: 2339814 - DNA, 25 bp, Homo sapien
acggtgactccagactgccttgccg

SEQ ID NO: 2339815 - DNA, 25 bp, Homo sapien
taacatctgtagttaagtctgaggg

SEQ ID NO: 2339816 - DNA, 25 bp, Homo sapien
gagtgacttaagcttataacatctg

SEQ ID NO: 2339817 - DNA, 25 bp, Homo sapien
ggctggaggccaacgagtgacttaa

SEQ ID NO: 2339818 - DNA, 25 bp, Homo sapien
aaagagtgaaccgatgctgggctgg

SEQ ID NO: 2339819 - DNA, 25 bp, Homo sapien
tgtggtcagtccagacaaggagcca

SEQ ID NO: 2339820 - DNA, 25 bp, Homo sapien
catggactggtagctcggagtatcc

SEQ ID NO: 2339821 - DNA, 25 bp, Homo sapien
tcagagctcgtgtggaggctagtca

SEQ ID NO: 2339822 - DNA, 25 bp, Homo sapien
cacactacccgttctcatgagcagg

SEQ ID NO: 2339823 - DNA, 25 bp, Homo sapien
gggaagatgttatcaatgcctccag

SEQ ID NO: 2339824 - DNA, 25 bp, Homo sapien
tcatcataaggagctagtgttgttc

SEQ ID NO: 2339825 - DNA, 25 bp, Homo sapien
gaaaggcccggtttcatcagtctta

SEQ ID NO: 2339826 - DNA, 25 bp, Homo sapien
aattttattcacattgcctactggg

SEQ ID NO: 2339827 - DNA, 25 bp, Homo sapien
ttccaaattacacatccaacaaaaa

SEQ ID NO: 2339828 - DNA, 25 bp, Homo sapien
cttccaaattacacatccaacaaaa

SEQ ID NO: 2339829 - DNA, 25 bp, Homo sapien
tttttgggtagtgtatttctgtcaa

SEQ ID NO: 2339830 - DNA, 25 bp, Homo sapien
gggtagtgtatttctgtcaagctgc

SEQ ID NO: 2339831 - DNA, 25 bp, Homo sapien
tgggtagtgtatttctgtcaagctg

SEQ ID NO: 2339832 - DNA, 25 bp, Homo sapien
tttgggtagtgtatttctgtcaagc

SEQ ID NO: 2339833 - DNA, 25 bp, Homo sapien
tgagaacgcaaccactctttgccct

SEQ ID NO: 2339834 - DNA, 25 bp, Homo sapien
aagccctccagtagaatgagaacgc

SEQ ID NO: 2339835 - DNA, 25 bp, Homo sapien
ccagctgcagaagatgacatggcag

SEQ ID NO: 2339836 - DNA, 25 bp, Homo sapien
tcttggttggcctgccgagatgatg

SEQ ID NO: 2339837 - DNA, 25 bp, Homo sapien
aactgagacaaatttgttgggctca

SEQ ID NO: 2339838 - DNA, 25 bp, Homo sapien
aaactgagacaaatttgttgggctc

SEQ ID NO: 2339839 - DNA, 25 bp, Homo sapien
aggttaaactgagacaaatttgttg

SEQ ID NO: 2339840 - DNA, 25 bp, Homo sapien
ttaaactgagacaaatttgttgggc

SEQ ID NO: 2339841 - DNA, 25 bp, Homo sapien
aagctgggagtcatcatagagatcg

SEQ ID NO: 2339842 - DNA, 25 bp, Homo sapien
ggcacgaggtctttcctccagagaa

SEQ ID NO: 2339843 - DNA, 25 bp, Homo sapien
gaatgagcccgaatgactgatggca

SEQ ID NO: 2339844 - DNA, 25 bp, Homo sapien
catcatagagatcgaaggaagagtc

SEQ ID NO: 2339845 - DNA, 25 bp, Homo sapien
tgtagagtaaagagaagaagtgctg

SEQ ID NO: 2339846 - DNA, 25 bp, Homo sapien
gaagaagtgctggacaccagtgata

SEQ ID NO: 2339847 - DNA, 25 bp, Homo sapien
gctggacaccagtgataatgaagag

SEQ ID NO: 2339848 - DNA, 25 bp, Homo sapien
caccagtgataatgaagagccatga

SEQ ID NO: 2339849 - DNA, 25 bp, Homo sapien
aagactaatttcatcatgaatgcaa

SEQ ID NO: 2339850 - DNA, 25 bp, Homo sapien
gagccctctagtggtcacaagacta

SEQ ID NO: 2339851 - DNA, 25 bp, Homo sapien
tattgtatcacagagccctctagtg

SEQ ID NO: 2339852 - DNA, 25 bp, Homo sapien
gtggagttctgctattgtatcacag

SEQ ID NO: 2339853 - DNA, 25 bp, Homo sapien
ctgagatgtgagggtagcaactttt

SEQ ID NO: 2339854 - DNA, 25 bp, Homo sapien
gctctctccgcagtttatggatttg

SEQ ID NO: 2339855 - DNA, 25 bp, Homo sapien
ttcttgtgatgcaaccagctctctc

SEQ ID NO: 2339856 - DNA, 25 bp, Homo sapien
aaccagctctctccgcagtttatgg

SEQ ID NO: 2339857 - DNA, 25 bp, Homo sapien
cacatcatgtagagatttgacactc

SEQ ID NO: 2339858 - DNA, 25 bp, Homo sapien
taatgatacgctccatcaagtgtca

SEQ ID NO: 2339859 - DNA, 25 bp, Homo sapien
tctgctgacagctagaacattatct

SEQ ID NO: 2339860 - DNA, 25 bp, Homo sapien
ggtcactgaaatggtcaatggacaa

SEQ ID NO: 2339861 - DNA, 25 bp, Homo sapien
cggccagtcatattccctaagctct

SEQ ID NO: 2339862 - DNA, 25 bp, Homo sapien
catagttagactttgcaatcggcca

SEQ ID NO: 2339863 - DNA, 25 bp, Homo sapien
cttttgttccgctgtcatagttaga

SEQ ID NO: 2339864 - DNA, 25 bp, Homo sapien
tttgcaatcggccagtcatattccc

SEQ ID NO: 2339865 - DNA, 25 bp, Homo sapien
tctccagtggcaatttctgaacata

SEQ ID NO: 2339866 - DNA, 25 bp, Homo sapien
ctccagtggcaatttctgaacatac

SEQ ID NO: 2339867 - DNA, 25 bp, Homo sapien
aaatttctcactaacaaagactttg

SEQ ID NO: 2339868 - DNA, 25 bp, Homo sapien
aagcttgggacaatctcatcaagtg

SEQ ID NO: 2339869 - DNA, 25 bp, Homo sapien
caaagcttgggacaatctcatcaag

SEQ ID NO: 2339870 - DNA, 25 bp, Homo sapien
cttgggacaatctcatcaagtgtca

SEQ ID NO: 2339871 - DNA, 25 bp, Homo sapien
ctccacacttgtgaaacctgttttc

SEQ ID NO: 2339872 - DNA, 25 bp, Homo sapien
tgtctccacacttgtgaaacctgtt

SEQ ID NO: 2339873 - DNA, 25 bp, Homo sapien
taaaatgtctccacacttgtgaaac

SEQ ID NO: 2339874 - DNA, 25 bp, Homo sapien
aatgtctccacacttgtgaaacctg

SEQ ID NO: 2339875 - DNA, 25 bp, Homo sapien
ttgtcactcaagccacacccatctc

SEQ ID NO: 2339876 - DNA, 25 bp, Homo sapien
cttgtcactcaagccacacccatct

SEQ ID NO: 2339877 - DNA, 25 bp, Homo sapien
ctttgggaggatggtctggaccatt

SEQ ID NO: 2339878 - DNA, 25 bp, Homo sapien
tggtctggaccattcagtgctccct

SEQ ID NO: 2339879 - DNA, 25 bp, Homo sapien
cagcatttcaatggtttctcttagt

SEQ ID NO: 2339880 - DNA, 25 bp, Homo sapien
agtgctccctgaatagccgcctggg

SEQ ID NO: 2339881 - DNA, 25 bp, Homo sapien
gagtcggcatcattaccactgccaa

SEQ ID NO: 2339882 - DNA, 25 bp, Homo sapien
ccaatactggaatggcttgtggcac

SEQ ID NO: 2339883 - DNA, 25 bp, Homo sapien
tcttcttggagtcggcatcattacc

SEQ ID NO: 2339884 - DNA, 25 bp, Homo sapien
gtggcactgttgatactagaaacac

SEQ ID NO: 2339885 - DNA, 25 bp, Homo sapien
caagtcatgtcctgctgacagtaca

SEQ ID NO: 2339886 - DNA, 25 bp, Homo sapien
gccactttagcgctacaatcaagtc

SEQ ID NO: 2339887 - DNA, 25 bp, Homo sapien
ttaaatggccactttagcgctacaa

SEQ ID NO: 2339888 - DNA, 25 bp, Homo sapien
tttagcgctacaatcaagtcatgtc

SEQ ID NO: 2339889 - DNA, 25 bp, Homo sapien
gaagggatgaatcagtaagctcttc

SEQ ID NO: 2339890 - DNA, 25 bp, Homo sapien
gaatgtgatgaaggaggcttggtgg

SEQ ID NO: 2339891 - DNA, 25 bp, Homo sapien
tgaaggaggcttggtggactttttc

SEQ ID NO: 2339892 - DNA, 25 bp, Homo sapien
tcttcccaaaggcttgtttgaaaga

SEQ ID NO: 2339893 - DNA, 25 bp, Homo sapien
cagggccattttgtcgtttctttgg

SEQ ID NO: 2339894 - DNA, 25 bp, Homo sapien
tatgcttgtagatcacagggccatt

SEQ ID NO: 2339895 - DNA, 25 bp, Homo sapien
cgagatctatgcttgtagatcacag

SEQ ID NO: 2339896 - DNA, 25 bp, Homo sapien
atcacagggccattttgtcgtttct

SEQ ID NO: 2339897 - DNA, 25 bp, Homo sapien
cggatctgatcaagatgatgagcag

SEQ ID NO: 2339898 - DNA, 25 bp, Homo sapien
ggcttcccggatctgatcaagatga

SEQ ID NO: 2339899 - DNA, 25 bp, Homo sapien
gctcttcagctgcagaattatctct

SEQ ID NO: 2339900 - DNA, 25 bp, Homo sapien
gggcctccagccgaatatccgttaa

SEQ ID NO: 2339901 - DNA, 25 bp, Homo sapien
caagagaacagaataagcagcattt

SEQ ID NO: 2339902 - DNA, 25 bp, Homo sapien
ccattttattccttgaaagtgcttc

SEQ ID NO: 2339903 - DNA, 25 bp, Homo sapien
ttattccttgaaagtgcttcagtac

SEQ ID NO: 2339904 - DNA, 25 bp, Homo sapien
tccttgaaagtgcttcagtaccaac

SEQ ID NO: 2339905 - DNA, 25 bp, Homo sapien
cttcaaccggtcattttcagctttc

SEQ ID NO: 2339906 - DNA, 25 bp, Homo sapien
ggccgagtaggcttagctgtgttac

SEQ ID NO: 2339907 - DNA, 25 bp, Homo sapien
tttctgccttcaaccggtcattttc

SEQ ID NO: 2339908 - DNA, 25 bp, Homo sapien
cttgaggattctgacggtggccgag

SEQ ID NO: 2339909 - DNA, 25 bp, Homo sapien
ctttgctcgaccatagcccttgctt

SEQ ID NO: 2339910 - DNA, 25 bp, Homo sapien
gcccttgcttatggagactataatt

SEQ ID NO: 2339911 - DNA, 25 bp, Homo sapien
ttatgtccagttgcatcaccagcat

SEQ ID NO: 2339912 - DNA, 25 bp, Homo sapien
gaccatagcccttgcttatggagac

SEQ ID NO: 2339913 - DNA, 25 bp, Homo sapien
ccatctaagacatcccacttggttt

SEQ ID NO: 2339914 - DNA, 25 bp, Homo sapien
tttccactaacaccaatggatccta

SEQ ID NO: 2339915 - DNA, 25 bp, Homo sapien
cactaacaccaatggatcctatcaa

SEQ ID NO: 2339916 - DNA, 25 bp, Homo sapien
cttaaagagacgtcttattacacca

SEQ ID NO: 2339917 - DNA, 25 bp, Homo sapien
tcctatacagtagctagcaatgcag

SEQ ID NO: 2339918 - DNA, 25 bp, Homo sapien
tcagagctcagaccaaggctagtgg

SEQ ID NO: 2339919 - DNA, 25 bp, Homo sapien
ccaacaaggtatccacaaggcagca

SEQ ID NO: 2339920 - DNA, 25 bp, Homo sapien
ggcagcaattcaggcacttctaggt

SEQ ID NO: 2339921 - DNA, 25 bp, Homo sapien
taattggtttaggaatcagcgtatc

SEQ ID NO: 2339922 - DNA, 25 bp, Homo sapien
tgctccatcaacaagttaaagtacc

SEQ ID NO: 2339923 - DNA, 25 bp, Homo sapien
actcggtcctgagagtataattctg

SEQ ID NO: 2339924 - DNA, 25 bp, Homo sapien
tttccttccagatttggttattaca

SEQ ID NO: 2339925 - DNA, 25 bp, Homo sapien
ttcttcctatgactgtttcctagca

SEQ ID NO: 2339926 - DNA, 25 bp, Homo sapien
gcatcattagctctgccaatgcttg

SEQ ID NO: 2339927 - DNA, 25 bp, Homo sapien
gactgtttcctagcatcattagctc

SEQ ID NO: 2339928 - DNA, 25 bp, Homo sapien
atcattagctctgccaatgcttggc

SEQ ID NO: 2339929 - DNA, 25 bp, Homo sapien
tacactgttggtatccctaacacaa

SEQ ID NO: 2339930 - DNA, 25 bp, Homo sapien
tcccaggaaaatagtgggtattctc

SEQ ID NO: 2339931 - DNA, 25 bp, Homo sapien
tctggcaacgagtttgtattcagca

SEQ ID NO: 2339932 - DNA, 25 bp, Homo sapien
ggcacagcataaaatgcgtcagcat

SEQ ID NO: 2339933 - DNA, 25 bp, Homo sapien
gtaagtgctttttggatttgtctct

SEQ ID NO: 2339934 - DNA, 25 bp, Homo sapien
tttggatttgtctcttcagtgctat

SEQ ID NO: 2339935 - DNA, 25 bp, Homo sapien
tctgaatcagtaagtgctttttgga

SEQ ID NO: 2339936 - DNA, 25 bp, Homo sapien
tttctgaatcagtaagtgctttttg

SEQ ID NO: 2339937 - DNA, 25 bp, Homo sapien
ctggcagcttgagggagggcttgaa

SEQ ID NO: 2339938 - DNA, 25 bp, Homo sapien
gaacagaatgtaaagtgcagaggta

SEQ ID NO: 2339939 - DNA, 25 bp, Homo sapien
gtgtactgctctcaatcaaaatatt

SEQ ID NO: 2339940 - DNA, 25 bp, Homo sapien
aagtgtaattgtttatgtgtactgc

SEQ ID NO: 2339941 - DNA, 25 bp, Homo sapien
gaaaaccattgaagatatcactcag

SEQ ID NO: 2339942 - DNA, 25 bp, Homo sapien
gaattattacaactgggagctccac

SEQ ID NO: 2339943 - DNA, 25 bp, Homo sapien
ccaggttagctagatattgttgcaa

SEQ ID NO: 2339944 - DNA, 25 bp, Homo sapien
tattatcagcactgcactgttcagc

SEQ ID NO: 2339945 - DNA, 25 bp, Homo sapien
gaaattgtgatgcagctctagattt

SEQ ID NO: 2339946 - DNA, 25 bp, Homo sapien
gatgcagctctagatttggtgatga

SEQ ID NO: 2339947 - DNA, 25 bp, Homo sapien
tgtgatgcagctctagatttggtga

SEQ ID NO: 2339948 - DNA, 25 bp, Homo sapien
aattgtgatgcagctctagatttgg

SEQ ID NO: 2339949 - DNA, 25 bp, Homo sapien
caatggtaacgtcagaagaactgtg

SEQ ID NO: 2339950 - DNA, 25 bp, Homo sapien
tgatgccacgtcttcggaatccaat

SEQ ID NO: 2339951 - DNA, 25 bp, Homo sapien
caaaaaactgttgagatgatgccac

SEQ ID NO: 2339952 - DNA, 25 bp, Homo sapien
ttcgaagatatctgcctaaaaagcc

SEQ ID NO: 2339953 - DNA, 25 bp, Homo sapien
tagggcacaatatactagagtcagg

SEQ ID NO: 2339954 - DNA, 25 bp, Homo sapien
taaaagtcataatgcagttatcctg

SEQ ID NO: 2339955 - DNA, 25 bp, Homo sapien
gagtgttctggtcccagtgtagaat

SEQ ID NO: 2339956 - DNA, 25 bp, Homo sapien
tcttcctaatctaaactgtgttgac

SEQ ID NO: 2339957 - DNA, 25 bp, Homo sapien
tgcctccagaatataaggtactaaa

SEQ ID NO: 2339958 - DNA, 25 bp, Homo sapien
ttccagagatccatgaaccatactc

SEQ ID NO: 2339959 - DNA, 25 bp, Homo sapien
ccagaatataaggtactaaagaata

SEQ ID NO: 2339960 - DNA, 25 bp, Homo sapien
ctctagaaccttctacatccatggg

SEQ ID NO: 2339961 - DNA, 25 bp, Homo sapien
atagcaatgaaaattgagtactata

SEQ ID NO: 2339962 - DNA, 25 bp, Homo sapien
tagcaatgaaaattgagtactatac

SEQ ID NO: 2339963 - DNA, 25 bp, Homo sapien
tgagctccatggatatgtgtcaagc

SEQ ID NO: 2339964 - DNA, 25 bp, Homo sapien
aatgtgctttgaggttgtggcttcc

SEQ ID NO: 2339965 - DNA, 25 bp, Homo sapien
gtgtcaagcacccactttgaaggat

SEQ ID NO: 2339966 - DNA, 25 bp, Homo sapien
tctgtgtcagtttgcggaatgtgct

SEQ ID NO: 2339967 - DNA, 25 bp, Homo sapien
tgctgtttaggagctgacctcggga

SEQ ID NO: 2339968 - DNA, 25 bp, Homo sapien
caatagtggctgtctcaagtttccc

SEQ ID NO: 2339969 - DNA, 25 bp, Homo sapien
gaatgaagcagaccatgagtgtttg

SEQ ID NO: 2339970 - DNA, 25 bp, Homo sapien
ggacatatgcatgaaagcacctggg

SEQ ID NO: 2339971 - DNA, 25 bp, Homo sapien
ctagagggtagattcaagagatgaa

SEQ ID NO: 2339972 - DNA, 25 bp, Homo sapien
tggtgctttcgctgtcgcagctttg

SEQ ID NO: 2339973 - DNA, 25 bp, Homo sapien
ctttgtgtgctcgagtaattggctg

SEQ ID NO: 2339974 - DNA, 25 bp, Homo sapien
gcttcttggagtttcattagcatat

SEQ ID NO: 2339975 - DNA, 25 bp, Homo sapien
ggcaaagcgatctattcacaaggct

SEQ ID NO: 2339976 - DNA, 25 bp, Homo sapien
caatttagcatcttggcggttcaga

SEQ ID NO: 2339977 - DNA, 25 bp, Homo sapien
gaaagtccagtttggctatcccatg

SEQ ID NO: 2339978 - DNA, 25 bp, Homo sapien
tactaaaaagttggtggagcacatc

SEQ ID NO: 2339979 - DNA, 25 bp, Homo sapien
ttcccttagggcaatagcaccgtgt

SEQ ID NO: 2339980 - DNA, 25 bp, Homo sapien
tctatagcaactgacccattggtgg

SEQ ID NO: 2339981 - DNA, 25 bp, Homo sapien
gaagaagtctataccatggcctagc

SEQ ID NO: 2339982 - DNA, 25 bp, Homo sapien
gacagatacagggtgcacatttgca

SEQ ID NO: 2339983 - DNA, 25 bp, Homo sapien
tagaaatttgcatacagtcctattg

SEQ ID NO: 2339984 - DNA, 25 bp, Homo sapien
taaagcttgacacttcttgatgcaa

SEQ ID NO: 2339985 - DNA, 25 bp, Homo sapien
gctatttaggaaaactattcagagt

SEQ ID NO: 2339986 - DNA, 25 bp, Homo sapien
tattcttactttatcatcggctatt

SEQ ID NO: 2339987 - DNA, 25 bp, Homo sapien
tagttctcttgaggtcttgcatatc

SEQ ID NO: 2339988 - DNA, 25 bp, Homo sapien
catctgtttgcacatgatctatttt

SEQ ID NO: 2339989 - DNA, 25 bp, Homo sapien
tctagttctcttgaggtcttgcata

SEQ ID NO: 2339990 - DNA, 25 bp, Homo sapien
tgtttgcacatgatctattttctag

SEQ ID NO: 2339991 - DNA, 25 bp, Homo sapien
cttcaatttttataaaccccagcat

SEQ ID NO: 2339992 - DNA, 25 bp, Homo sapien
ggctcccacagtctagcccacaaca

SEQ ID NO: 2339993 - DNA, 25 bp, Homo sapien
tcccacagtctagcccacaacaatc

SEQ ID NO: 2339994 - DNA, 25 bp, Homo sapien
cacagtctagcccacaacaatcttt

SEQ ID NO: 2339995 - DNA, 25 bp, Homo sapien
aggctcccacagtctagcccacaac

SEQ ID NO: 2339996 - DNA, 25 bp, Homo sapien
aatttggcaacggaactgttgtcct

SEQ ID NO: 2339997 - DNA, 25 bp, Homo sapien
gagcccaaagcaccaatgaccataa

SEQ ID NO: 2339998 - DNA, 25 bp, Homo sapien
cacaacctttcatggcagttagaga

SEQ ID NO: 2339999 - DNA, 25 bp, Homo sapien
tgctactccagacataggtgactgg

SEQ ID NO: 2340000 - DNA, 25 bp, Homo sapien
gaaatttcctccaacaagatctttc

SEQ ID NO: 2340001 - DNA, 25 bp, Homo sapien
tacaagtctgttaactgaaggtgaa

SEQ ID NO: 2340002 - DNA, 25 bp, Homo sapien
aactcgacttcctttgtaggcctga

SEQ ID NO: 2340003 - DNA, 25 bp, Homo sapien
catccgtgtgtcaatgtgaaagaaa

SEQ ID NO: 2340004 - DNA, 25 bp, Homo sapien
tggtgatgactattgtgtctgatgt

SEQ ID NO: 2340005 - DNA, 25 bp, Homo sapien
aagccttggcttgtatcccacactg

SEQ ID NO: 2340006 - DNA, 25 bp, Homo sapien
ctgccactgacaagaaccgttaatg

SEQ ID NO: 2340007 - DNA, 25 bp, Homo sapien
actgggaacacgatgagcttgctca

SEQ ID NO: 2340008 - DNA, 25 bp, Homo sapien
cacactgctccgtggcacgggagac

SEQ ID NO: 2340009 - DNA, 25 bp, Homo sapien
gatcagttattgattttgtgccatc

SEQ ID NO: 2340010 - DNA, 25 bp, Homo sapien
cacaggataagatgccaagtgctat

SEQ ID NO: 2340011 - DNA, 25 bp, Homo sapien
ccacccacaggataagatgccaagt

SEQ ID NO: 2340012 - DNA, 25 bp, Homo sapien
cccacaggataagatgccaagtgct

SEQ ID NO: 2340013 - DNA, 25 bp, Homo sapien
gtaactaccatcgtggcctacccag

SEQ ID NO: 2340014 - DNA, 25 bp, Homo sapien
ctgggcaacatgagcttagcgtgaa

SEQ ID NO: 2340015 - DNA, 25 bp, Homo sapien
cagatctaggcaagctgcaaaggga

SEQ ID NO: 2340016 - DNA, 25 bp, Homo sapien
caaagggatgaagtggcaccagtgc

SEQ ID NO: 2340017 - DNA, 25 bp, Homo sapien
tcccaattgcaaccaacaacgttgt

SEQ ID NO: 2340018 - DNA, 25 bp, Homo sapien
gcaaccaacaacgttgtcatgttcc

SEQ ID NO: 2340019 - DNA, 25 bp, Homo sapien
tagcttccgtctttagggatcttcc

SEQ ID NO: 2340020 - DNA, 25 bp, Homo sapien
atatagggtcccaattgcaaccaac

SEQ ID NO: 2340021 - DNA, 25 bp, Homo sapien
agcaagtctacttcaccagctctga

SEQ ID NO: 2340022 - DNA, 25 bp, Homo sapien
aagtctacttcaccagctctgactg

SEQ ID NO: 2340023 - DNA, 25 bp, Homo sapien
ctacagcaagtctacttcaccagct

SEQ ID NO: 2340024 - DNA, 25 bp, Homo sapien
tctacttcaccagctctgactgact

SEQ ID NO: 2340025 - DNA, 25 bp, Homo sapien
agggaggactgggccttcacacctt

SEQ ID NO: 2340026 - DNA, 25 bp, Homo sapien
aatcaatgccatccatttggtgtct

SEQ ID NO: 2340027 - DNA, 25 bp, Homo sapien
catgcacacgacctttcaagggtgg

SEQ ID NO: 2340028 - DNA, 25 bp, Homo sapien
ctttcatgggtgaacagacatgcac

SEQ ID NO: 2340029 - DNA, 25 bp, Homo sapien
gcagtgcagctgcagatcttggctg

SEQ ID NO: 2340030 - DNA, 25 bp, Homo sapien
tcaaggtgtctccagaaaactttga

SEQ ID NO: 2340031 - DNA, 25 bp, Homo sapien
ggtgtctccagaaaactttgatgta

SEQ ID NO: 2340032 - DNA, 25 bp, Homo sapien
tgcaggatactgccacagcagggcc

SEQ ID NO: 2340033 - DNA, 25 bp, Homo sapien
gcaggatactgccacagcagggcct

SEQ ID NO: 2340034 - DNA, 25 bp, Homo sapien
ttatattaacttttgttcaccatta

SEQ ID NO: 2340035 - DNA, 25 bp, Homo sapien
tatattaacttttgttcaccattac

SEQ ID NO: 2340036 - DNA, 25 bp, Homo sapien
cccctatagtatgggatggacacaa

SEQ ID NO: 2340037 - DNA, 25 bp, Homo sapien
tcacatctctcagctggaagggtag

SEQ ID NO: 2340038 - DNA, 25 bp, Homo sapien
cctgagccactgagcgactgctgtt

SEQ ID NO: 2340039 - DNA, 25 bp, Homo sapien
gcccatatgacttcagcctgttcca

SEQ ID NO: 2340040 - DNA, 25 bp, Homo sapien
gcatggcatgaaagttcctaaggaa

SEQ ID NO: 2340041 - DNA, 25 bp, Homo sapien
tcttacaacttgcaagacacctaca

SEQ ID NO: 2340042 - DNA, 25 bp, Homo sapien
gatttcacagactattatgacaagt

SEQ ID NO: 2340043 - DNA, 25 bp, Homo sapien
cctgcagaaattagccccagtacaa

SEQ ID NO: 2340044 - DNA, 25 bp, Homo sapien
gagaagatatgaaggcaagaaaatc

SEQ ID NO: 2340045 - DNA, 25 bp, Homo sapien
cattcgctgagtcagactgctaaga

SEQ ID NO: 2340046 - DNA, 25 bp, Homo sapien
ttgcctgaggcattcgctgagtcag

SEQ ID NO: 2340047 - DNA, 25 bp, Homo sapien
gagtcagactgctaagaagtgtcat

SEQ ID NO: 2340048 - DNA, 25 bp, Homo sapien
tgcccagcacgcaacactgctctct

SEQ ID NO: 2340049 - DNA, 25 bp, Homo sapien
acaacaggatgggtccctgtggaga

SEQ ID NO: 2340050 - DNA, 25 bp, Homo sapien
tgctgaacaacaggatgggtccctg

SEQ ID NO: 2340051 - DNA, 25 bp, Homo sapien
gaacaacaggatgggtccctgtgga

SEQ ID NO: 2340052 - DNA, 25 bp, Homo sapien
tgtgatgagccgacatggtttttaa

SEQ ID NO: 2340053 - DNA, 25 bp, Homo sapien
tactggtgtgacagtaagaatggaa

SEQ ID NO: 2340054 - DNA, 25 bp, Homo sapien
tgatgagccgacatggtttttaaca

SEQ ID NO: 2340055 - DNA, 25 bp, Homo sapien
gatgagccgacatggtttttaacag

SEQ ID NO: 2340056 - DNA, 25 bp, Homo sapien
cagcagaagtgggtaaccagagatg

SEQ ID NO: 2340057 - DNA, 25 bp, Homo sapien
atgaaaaggctcatttcctaagttt

SEQ ID NO: 2340058 - DNA, 25 bp, Homo sapien
aatggggtctcttttggctttagca

SEQ ID NO: 2340059 - DNA, 25 bp, Homo sapien
gtgggtaaccagagatgaaaaggct

SEQ ID NO: 2340060 - DNA, 25 bp, Homo sapien
ctgtggacttcaatggcttgcctac

SEQ ID NO: 2340061 - DNA, 25 bp, Homo sapien
tacagtgcactgtggacttcaatgg

SEQ ID NO: 2340062 - DNA, 25 bp, Homo sapien
gtgcactgtggacttcaatggcttg

SEQ ID NO: 2340063 - DNA, 25 bp, Homo sapien
cactgtggacttcaatggcttgcct

SEQ ID NO: 2340064 - DNA, 25 bp, Homo sapien
tcaatttccacagcatagctgaggc

SEQ ID NO: 2340065 - DNA, 25 bp, Homo sapien
aagataattggagctacctagtgcc

SEQ ID NO: 2340066 - DNA, 25 bp, Homo sapien
tctaaaccctgctgacgttgtgcac

SEQ ID NO: 2340067 - DNA, 25 bp, Homo sapien
tcgttatccccacttaacaggtgga

SEQ ID NO: 2340068 - DNA, 25 bp, Homo sapien
aaattaagagtcatcctttgtgttc

SEQ ID NO: 2340069 - DNA, 25 bp, Homo sapien
gaaactgtcccagtggcttgtcaaa

SEQ ID NO: 2340070 - DNA, 25 bp, Homo sapien
ggttttacctgaaggagatgcccat

SEQ ID NO: 2340071 - DNA, 25 bp, Homo sapien
cagaccttatatctctttcattgaa

SEQ ID NO: 2340072 - DNA, 25 bp, Homo sapien
gggacgaacattacaagtagacgaa

SEQ ID NO: 2340073 - DNA, 25 bp, Homo sapien
ggcgcattggactcccctgggatat

SEQ ID NO: 2340074 - DNA, 25 bp, Homo sapien
tcaattaacgctctagaacactcat

SEQ ID NO: 2340075 - DNA, 25 bp, Homo sapien
ttgaaactgtaacatgcttcagctg

SEQ ID NO: 2340076 - DNA, 25 bp, Homo sapien
tatagaaagcatcgttgtggaggcc

SEQ ID NO: 2340077 - DNA, 25 bp, Homo sapien
gctctatagaaagcatcgttgtgga

SEQ ID NO: 2340078 - DNA, 25 bp, Homo sapien
tagaaagcatcgttgtggaggcctc

SEQ ID NO: 2340079 - DNA, 25 bp, Homo sapien
aaagcatcgttgtggaggcctcagg

SEQ ID NO: 2340080 - DNA, 25 bp, Homo sapien
tgactgaagaaaggtgatagaggaa

SEQ ID NO: 2340081 - DNA, 25 bp, Homo sapien
tgatagaggaaagtagcttgaaagt

SEQ ID NO: 2340082 - DNA, 25 bp, Homo sapien
gaaagtaatcaagatcagggtaaga

SEQ ID NO: 2340083 - DNA, 25 bp, Homo sapien
gcttgaaagtaatcaagatcagggt

SEQ ID NO: 2340084 - DNA, 25 bp, Homo sapien
gaagtatgcctattatctccccaga

SEQ ID NO: 2340085 - DNA, 25 bp, Homo sapien
agcagatttaatggttagatctttg

SEQ ID NO: 2340086 - DNA, 25 bp, Homo sapien
gaaataatggccataacgtcttgct

SEQ ID NO: 2340087 - DNA, 25 bp, Homo sapien
tatcagcaggataagatttcagttc

SEQ ID NO: 2340088 - DNA, 25 bp, Homo sapien
tagtagacactgtcatccaatattc

SEQ ID NO: 2340089 - DNA, 25 bp, Homo sapien
catccagaagcctctttgaatctct

SEQ ID NO: 2340090 - DNA, 25 bp, Homo sapien
gataactctgaggtaactcatccag

SEQ ID NO: 2340091 - DNA, 25 bp, Homo sapien
caagtttgccacttgatgacttgtg

SEQ ID NO: 2340092 - DNA, 25 bp, Homo sapien
tgtctgttggatacagacattgcat

SEQ ID NO: 2340093 - DNA, 25 bp, Homo sapien
ggatacagacattgcatccacttta

SEQ ID NO: 2340094 - DNA, 25 bp, Homo sapien
cttctaggttataattacagtgcct

SEQ ID NO: 2340095 - DNA, 25 bp, Homo sapien
tgattttcccatgaagactcttaca

SEQ ID NO: 2340096 - DNA, 25 bp, Homo sapien
cagcagttgtgacctctgacatccc

SEQ ID NO: 2340097 - DNA, 25 bp, Homo sapien
gcagttgtgacctctgacatcccat

SEQ ID NO: 2340098 - DNA, 25 bp, Homo sapien
tgttccacagcagttgtgacctctg

SEQ ID NO: 2340099 - DNA, 25 bp, Homo sapien
tccacagcagttgtgacctctgaca

SEQ ID NO: 2340100 - DNA, 25 bp, Homo sapien
tcctgaagtgttattgctctggcct

SEQ ID NO: 2340101 - DNA, 25 bp, Homo sapien
cctgaagtgttattgctctggcctc

SEQ ID NO: 2340102 - DNA, 25 bp, Homo sapien
ctgaagtgttattgctctggcctct

SEQ ID NO: 2340103 - DNA, 25 bp, Homo sapien
tgaagtgttattgctctggcctctg

SEQ ID NO: 2340104 - DNA, 25 bp, Homo sapien
aatgcacaagagtaagattccaagc

SEQ ID NO: 2340105 - DNA, 25 bp, Homo sapien
gattccaagcacattctcttattcg

SEQ ID NO: 2340106 - DNA, 25 bp, Homo sapien
ttcttatccttcttcaatgcacaag

SEQ ID NO: 2340107 - DNA, 25 bp, Homo sapien
gcaatgctttccaaaagtcctaaac

SEQ ID NO: 2340108 - DNA, 25 bp, Homo sapien
atttattcatcacaatgggtaggtc

SEQ ID NO: 2340109 - DNA, 25 bp, Homo sapien
ctgcagtgttgatagacaaaacttt

SEQ ID NO: 2340110 - DNA, 25 bp, Homo sapien
tattcatcacaatgggtaggtcttg

SEQ ID NO: 2340111 - DNA, 25 bp, Homo sapien
tgttgatagacaaaactttttctcc

SEQ ID NO: 2340112 - DNA, 25 bp, Homo sapien
tggaggtggcaacactttgactcgg

SEQ ID NO: 2340113 - DNA, 25 bp, Homo sapien
gatgaggacatgaactccagggctg

SEQ ID NO: 2340114 - DNA, 25 bp, Homo sapien
tcgggtataatgagtccatcctttc

SEQ ID NO: 2340115 - DNA, 25 bp, Homo sapien
tgatgaggacatgaactccagggct

SEQ ID NO: 2340116 - DNA, 25 bp, Homo sapien
ccttggaggccattaagaggactga

SEQ ID NO: 2340117 - DNA, 25 bp, Homo sapien
taaattgtagagacataggctcagc

SEQ ID NO: 2340118 - DNA, 25 bp, Homo sapien
tgtatgatttcacgactgcacccaa

SEQ ID NO: 2340119 - DNA, 25 bp, Homo sapien
taggctcagcaggattaaacaccaa

SEQ ID NO: 2340120 - DNA, 25 bp, Homo sapien
aaacctctggatgtgaagggagaac

SEQ ID NO: 2340121 - DNA, 25 bp, Homo sapien
caaatatggtgaggacgacttaagg

SEQ ID NO: 2340122 - DNA, 25 bp, Homo sapien
taatattctaatagctgacccaggg

SEQ ID NO: 2340123 - DNA, 25 bp, Homo sapien
tcacctggtgactcaaaacttaacg

SEQ ID NO: 2340124 - DNA, 25 bp, Homo sapien
gaatctttcctagccatccctcaag

SEQ ID NO: 2340125 - DNA, 25 bp, Homo sapien
cacaggagtgagtaggcaagccctc

SEQ ID NO: 2340126 - DNA, 25 bp, Homo sapien
tattacatgctaaccgttccaactg

SEQ ID NO: 2340127 - DNA, 25 bp, Homo sapien
catcttatgtggtcctgactccaac

SEQ ID NO: 2340128 - DNA, 25 bp, Homo sapien
ctttgcctgtggtttgaatttcctc

SEQ ID NO: 2340129 - DNA, 25 bp, Homo sapien
cctgtagctcagagtagtttgatca

SEQ ID NO: 2340130 - DNA, 25 bp, Homo sapien
ttgcctgtggtttgaatttcctcct

SEQ ID NO: 2340131 - DNA, 25 bp, Homo sapien
tgtagctcagagtagtttgatcatc

SEQ ID NO: 2340132 - DNA, 25 bp, Homo sapien
taattgacattcaccgctccaggca

SEQ ID NO: 2340133 - DNA, 25 bp, Homo sapien
gcagagttaccgacaggaaaggcat

SEQ ID NO: 2340134 - DNA, 25 bp, Homo sapien
tgtcaggagccttttgaacacttgt

SEQ ID NO: 2340135 - DNA, 25 bp, Homo sapien
ggcatgaagtccactttgaaggcga

SEQ ID NO: 2340136 - DNA, 25 bp, Homo sapien
aaagcaattggaaatcctcattcag

SEQ ID NO: 2340137 - DNA, 25 bp, Homo sapien
taaagcaattggaaatcctcattca

SEQ ID NO: 2340138 - DNA, 25 bp, Homo sapien
gcaattggaaatcctcattcagaaa

SEQ ID NO: 2340139 - DNA, 25 bp, Homo sapien
ttggaaatcctcattcagaaataat

SEQ ID NO: 2340140 - DNA, 25 bp, Homo sapien
tcttttcgtctccttgggtgagtgt

SEQ ID NO: 2340141 - DNA, 25 bp, Homo sapien
cgtttcatgagctttgagggttcct

SEQ ID NO: 2340142 - DNA, 25 bp, Homo sapien
tgtaaaattagacgccaaagggatg

SEQ ID NO: 2340143 - DNA, 25 bp, Homo sapien
tgagtgtgatgggttccttgtgtcc

SEQ ID NO: 2340144 - DNA, 25 bp, Homo sapien
tcagtttaacatgtgagacaggcaa

SEQ ID NO: 2340145 - DNA, 25 bp, Homo sapien
cagtttaacatgtgagacaggcaaa

SEQ ID NO: 2340146 - DNA, 25 bp, Homo sapien
agtttaacatgtgagacaggcaaac

SEQ ID NO: 2340147 - DNA, 25 bp, Homo sapien
tgggacctacccttgattgaatcaa

SEQ ID NO: 2340148 - DNA, 25 bp, Homo sapien
tacagcttgctatatacaggaatgc

SEQ ID NO: 2340149 - DNA, 25 bp, Homo sapien
ccaatggcactcttgaatgctgttg

SEQ ID NO: 2340150 - DNA, 25 bp, Homo sapien
tcatgtctgcgctctaagttacccc

SEQ ID NO: 2340151 - DNA, 25 bp, Homo sapien
gattccttgcatcagtttctccagc

SEQ ID NO: 2340152 - DNA, 25 bp, Homo sapien
cagagattattgctctttggtgatc

SEQ ID NO: 2340153 - DNA, 25 bp, Homo sapien
tgttagctctttgatatagacctca

SEQ ID NO: 2340154 - DNA, 25 bp, Homo sapien
tgcatatcaagacagagattattgc

SEQ ID NO: 2340155 - DNA, 25 bp, Homo sapien
ttagactgctcgaaaatgaacacta

SEQ ID NO: 2340156 - DNA, 25 bp, Homo sapien
tcgaaaatgaacactactcctgatt

SEQ ID NO: 2340157 - DNA, 25 bp, Homo sapien
gaacactactcctgatttgctttga

SEQ ID NO: 2340158 - DNA, 25 bp, Homo sapien
tactcctgatttgctttgagttagg

SEQ ID NO: 2340159 - DNA, 25 bp, Homo sapien
ggcaaccaaccactcttagcaaaat

SEQ ID NO: 2340160 - DNA, 25 bp, Homo sapien
ctcttagcaaaatcctcgatatcag

SEQ ID NO: 2340161 - DNA, 25 bp, Homo sapien
caaaatcctcgatatcaggttctcc

SEQ ID NO: 2340162 - DNA, 25 bp, Homo sapien
tttctgtataatccaacatatgttt

SEQ ID NO: 2340163 - DNA, 25 bp, Homo sapien
ataatgggtgcctgttcctcaaact

SEQ ID NO: 2340164 - DNA, 25 bp, Homo sapien
ttgggctttcacagtaaatataaga

SEQ ID NO: 2340165 - DNA, 25 bp, Homo sapien
ttctgctttgggctttcacagtaaa

SEQ ID NO: 2340166 - DNA, 25 bp, Homo sapien
aatgggtgcctgttcctcaaacttt

SEQ ID NO: 2340167 - DNA, 25 bp, Homo sapien
tcctttggccatcaagtcttatttt

SEQ ID NO: 2340168 - DNA, 25 bp, Homo sapien
taaagaactgatggttataagtgat

SEQ ID NO: 2340169 - DNA, 25 bp, Homo sapien
ttattttgcagatcaaagcggacat

SEQ ID NO: 2340170 - DNA, 25 bp, Homo sapien
agtgatacattttgaccagcaatcc

SEQ ID NO: 2340171 - DNA, 25 bp, Homo sapien
aggtgacttcataacattctcctga

SEQ ID NO: 2340172 - DNA, 25 bp, Homo sapien
gccatgtgtcctgtttggtgcaaga

SEQ ID NO: 2340173 - DNA, 25 bp, Homo sapien
agagattccaagaatccacgttgtt

SEQ ID NO: 2340174 - DNA, 25 bp, Homo sapien
ccaagaatccacgttgtttagctgt

SEQ ID NO: 2340175 - DNA, 25 bp, Homo sapien
ccatgaaaggctgtctgtcatacat

SEQ ID NO: 2340176 - DNA, 25 bp, Homo sapien
aggcaatgaattaccatgaaaggct

SEQ ID NO: 2340177 - DNA, 25 bp, Homo sapien
accatgaaaggctgtctgtcataca

SEQ ID NO: 2340178 - DNA, 25 bp, Homo sapien
ggcaatgaattaccatgaaaggctg

SEQ ID NO: 2340179 - DNA, 25 bp, Homo sapien
acctctgaatggatttttaactgct

SEQ ID NO: 2340180 - DNA, 25 bp, Homo sapien
acaatcaaatgaactctgcttaaaa

SEQ ID NO: 2340181 - DNA, 25 bp, Homo sapien
ctgcttaaaacctctgaatggattt

SEQ ID NO: 2340182 - DNA, 25 bp, Homo sapien
gctgtgggatgaggggaaacacgtt

SEQ ID NO: 2340183 - DNA, 25 bp, Homo sapien
tttgggcataaggagcacattcaag

SEQ ID NO: 2340184 - DNA, 25 bp, Homo sapien
ctttgggcataaggagcacattcaa

SEQ ID NO: 2340185 - DNA, 25 bp, Homo sapien
ttgggcataaggagcacattcaagg

SEQ ID NO: 2340186 - DNA, 25 bp, Homo sapien
aatttgctttactgttgtccatttt

SEQ ID NO: 2340187 - DNA, 25 bp, Homo sapien
ccttgaatcccctgtgacatcactt

SEQ ID NO: 2340188 - DNA, 25 bp, Homo sapien
gaagatggttccttgaatcccctgt

SEQ ID NO: 2340189 - DNA, 25 bp, Homo sapien
gacatcactttcaaagtagaggccc

SEQ ID NO: 2340190 - DNA, 25 bp, Homo sapien
taaacactgagtaagctggacattc

SEQ ID NO: 2340191 - DNA, 25 bp, Homo sapien
cctctgtcacacttacgacaagtaa

SEQ ID NO: 2340192 - DNA, 25 bp, Homo sapien
gtcacacttacgacaagtaataact

SEQ ID NO: 2340193 - DNA, 25 bp, Homo sapien
cacttacgacaagtaataactatta

SEQ ID NO: 2340194 - DNA, 25 bp, Homo sapien
ctttcctctgtcacacttacgacaa

SEQ ID NO: 2340195 - DNA, 25 bp, Homo sapien
tgctgaacagggaccagtgccctga

SEQ ID NO: 2340196 - DNA, 25 bp, Homo sapien
ggtaatcatctgttcaggtcctatg

SEQ ID NO: 2340197 - DNA, 25 bp, Homo sapien
tcacttgtgcctgaaggtaattccc

SEQ ID NO: 2340198 - DNA, 25 bp, Homo sapien
cattattttgacttaaggtttcttg

SEQ ID NO: 2340199 - DNA, 25 bp, Homo sapien
ggcctgcaccttcttcagttgctac

SEQ ID NO: 2340200 - DNA, 25 bp, Homo sapien
tttgaagcaacaattgacttccttt

SEQ ID NO: 2340201 - DNA, 25 bp, Homo sapien
ttgaagcaacaattgacttcctttt

SEQ ID NO: 2340202 - DNA, 25 bp, Homo sapien
gacatgcagtgcacggatatctatg

SEQ ID NO: 2340203 - DNA, 25 bp, Homo sapien
acccggacatgcagtgcatggatac

SEQ ID NO: 2340204 - DNA, 25 bp, Homo sapien
taacccggacatgcagtgcatggat

SEQ ID NO: 2340205 - DNA, 25 bp, Homo sapien
ctggacatgcagtgcacggatatct

SEQ ID NO: 2340206 - DNA, 25 bp, Homo sapien
ttggatatctatgggtaacctggcc

SEQ ID NO: 2340207 - DNA, 25 bp, Homo sapien
cttggatatctatgggtaacctggc

SEQ ID NO: 2340208 - DNA, 25 bp, Homo sapien
tggatatctatgggtaacctggcca

SEQ ID NO: 2340209 - DNA, 25 bp, Homo sapien
atcggtgcgtggatatctatgggtc

SEQ ID NO: 2340210 - DNA, 25 bp, Homo sapien
atctatgggtaacccggacgtgcta

SEQ ID NO: 2340211 - DNA, 25 bp, Homo sapien
cctgaacgtgcggtgcgtggatatc

SEQ ID NO: 2340212 - DNA, 25 bp, Homo sapien
cggacgtgctatgggtaacccggat

SEQ ID NO: 2340213 - DNA, 25 bp, Homo sapien
tgcttggacatctacgggtaacccg

SEQ ID NO: 2340214 - DNA, 25 bp, Homo sapien
atctatgggtaacccggacgtgcga

SEQ ID NO: 2340215 - DNA, 25 bp, Homo sapien
cgggcgtgcggtgcgtgggtatcta

SEQ ID NO: 2340216 - DNA, 25 bp, Homo sapien
ccgggcgtgcggtgcttggacatct

SEQ ID NO: 2340217 - DNA, 25 bp, Homo sapien
tagtcactttgttcgtaaatgcatt

SEQ ID NO: 2340218 - DNA, 25 bp, Homo sapien
caaatgtattcactttgagcagtgt

SEQ ID NO: 2340219 - DNA, 25 bp, Homo sapien
tccaggatccatctatgtattttag

SEQ ID NO: 2340220 - DNA, 25 bp, Homo sapien
cacagtgatgatggattgaatcaag

SEQ ID NO: 2340221 - DNA, 25 bp, Homo sapien
cctgggtagaattcttgagtggaag

SEQ ID NO: 2340222 - DNA, 25 bp, Homo sapien
taaattgagagacaaggatctggca

SEQ ID NO: 2340223 - DNA, 25 bp, Homo sapien
tacccaacaataggaatctctacat

SEQ ID NO: 2340224 - DNA, 25 bp, Homo sapien
gccatctctaatcctcctgggtaga

SEQ ID NO: 2340225 - DNA, 25 bp, Homo sapien
cattgcccagtcttaaatccctcat

SEQ ID NO: 2340226 - DNA, 25 bp, Homo sapien
gcttgacttagagttgccacaaacc

SEQ ID NO: 2340227 - DNA, 25 bp, Homo sapien
caaatattgctgatcacagatgacc

SEQ ID NO: 2340228 - DNA, 25 bp, Homo sapien
caaaaagtgagcacacgttgttgga

SEQ ID NO: 2340229 - DNA, 25 bp, Homo sapien
ccataacgaggtataataacaatga

SEQ ID NO: 2340230 - DNA, 25 bp, Homo sapien
gataagctgagctttgctggaagcc

SEQ ID NO: 2340231 - DNA, 25 bp, Homo sapien
tggaagcctggggacttcccgcgaa

SEQ ID NO: 2340232 - DNA, 25 bp, Homo sapien
aagcgggggcgggataagctgagct

SEQ ID NO: 2340233 - DNA, 25 bp, Homo sapien
ctggggacttcccgcgaagggtgcg

SEQ ID NO: 2340234 - DNA, 25 bp, Homo sapien
taacccggcggagttgtgaaagctg

SEQ ID NO: 2340235 - DNA, 25 bp, Homo sapien
ggatgtgaaagggttccgcacaagt

SEQ ID NO: 2340236 - DNA, 25 bp, Homo sapien
caagtgtcctcaaactgagccgcgg

SEQ ID NO: 2340237 - DNA, 25 bp, Homo sapien
aagggttccgcacaagtgtcctcaa

SEQ ID NO: 2340238 - DNA, 25 bp, Homo sapien
ggacaggagaggtagaagtttgtct

SEQ ID NO: 2340239 - DNA, 25 bp, Homo sapien
gacaggagaggtagaagtttgtctt

SEQ ID NO: 2340240 - DNA, 25 bp, Homo sapien
caacagcgacctaggagtttcgatg

SEQ ID NO: 2340241 - DNA, 25 bp, Homo sapien
gcccagactgcaacagcgacctagg

SEQ ID NO: 2340242 - DNA, 25 bp, Homo sapien
agtttcgatgtgtgtgggttcgcca

SEQ ID NO: 2340243 - DNA, 25 bp, Homo sapien
ttcgatgtgtgtgggttcgccagct

SEQ ID NO: 2340244 - DNA, 25 bp, Homo sapien
caatccccgcgcactaataataggt

SEQ ID NO: 2340245 - DNA, 25 bp, Homo sapien
gattggctccacctcgggtacgctg

SEQ ID NO: 2340246 - DNA, 25 bp, Homo sapien
ggtacgctgcgccaaggagccaatc

SEQ ID NO: 2340247 - DNA, 25 bp, Homo sapien
ggtggatccgttcagccaacatcgc

SEQ ID NO: 2340248 - DNA, 25 bp, Homo sapien
tcaagttgccgctgctaactgctgc

SEQ ID NO: 2340249 - DNA, 25 bp, Homo sapien
aagcccccctctcggctgagcacca

SEQ ID NO: 2340250 - DNA, 25 bp, Homo sapien
ccctggggacttgcccggggtgcag

SEQ ID NO: 2340251 - DNA, 25 bp, Homo sapien
gcagcctcaagttgccgctgctaac

SEQ ID NO: 2340252 - DNA, 25 bp, Homo sapien
ccgggtctcggtccccagtgctctc

SEQ ID NO: 2340253 - DNA, 25 bp, Homo sapien
ggcgcgaggcacacgcgtactctcg

SEQ ID NO: 2340254 - DNA, 25 bp, Homo sapien
tgctctccccgcgtggaccggcgcg

SEQ ID NO: 2340255 - DNA, 25 bp, Homo sapien
actctcgctgcctccgctcttggag

SEQ ID NO: 2340256 - DNA, 25 bp, Homo sapien
cccaagtgtatcgagaagaaaatct

SEQ ID NO: 2340257 - DNA, 25 bp, Homo sapien
aaaatctttgggatggattcgagca

SEQ ID NO: 2340258 - DNA, 25 bp, Homo sapien
ctaaaacccaagtgtatcgagaaga

SEQ ID NO: 2340259 - DNA, 25 bp, Homo sapien
ttcgagcagataggcaccgccgagg

SEQ ID NO: 2340260 - DNA, 25 bp, Homo sapien
ccatttgaacgaatcaagtgagaga

SEQ ID NO: 2340261 - DNA, 25 bp, Homo sapien
taccaaattgttagccccacaggac

SEQ ID NO: 2340262 - DNA, 25 bp, Homo sapien
caaacttgacgcttcctctctctga

SEQ ID NO: 2340263 - DNA, 25 bp, Homo sapien
gacatagactcttgcaaggaggaaa

SEQ ID NO: 2340264 - DNA, 25 bp, Homo sapien
atgtgaggtaattaagtgattgtcc

SEQ ID NO: 2340265 - DNA, 25 bp, Homo sapien
tgaggtaattaagtgattgtccctt

SEQ ID NO: 2340266 - DNA, 25 bp, Homo sapien
agtgattgtccctttgtccttgtaa

SEQ ID NO: 2340267 - DNA, 25 bp, Homo sapien
gtgattgtccctttgtccttgtaac

SEQ ID NO: 2340268 - DNA, 25 bp, Homo sapien
ggaggccacatcatgagaactttca

SEQ ID NO: 2340269 - DNA, 25 bp, Homo sapien
gatggcccagcggaaatgagcctca

SEQ ID NO: 2340270 - DNA, 25 bp, Homo sapien
tgtttcctacccacagtaggcatgg

SEQ ID NO: 2340271 - DNA, 25 bp, Homo sapien
cagagttttcaggtggtttgtctgc

SEQ ID NO: 2340272 - DNA, 25 bp, Homo sapien
cacattaaagtattacacttattca

SEQ ID NO: 2340273 - DNA, 25 bp, Homo sapien
tatcagttcatgaaggcttattacc

SEQ ID NO: 2340274 - DNA, 25 bp, Homo sapien
ttggaagagaagacttgactacatc

SEQ ID NO: 2340275 - DNA, 25 bp, Homo sapien
ggcttattaccaaaaccacacatta

SEQ ID NO: 2340276 - DNA, 25 bp, Homo sapien
tatctgtgctcctgttctctaaaac

SEQ ID NO: 2340277 - DNA, 25 bp, Homo sapien
tcttgtctgaggttgcaatgcagtc

SEQ ID NO: 2340278 - DNA, 25 bp, Homo sapien
ctgtaaattatgcttgaattggcct

SEQ ID NO: 2340279 - DNA, 25 bp, Homo sapien
gtctgccattcttgtctgaggttgc

SEQ ID NO: 2340280 - DNA, 25 bp, Homo sapien
tcacatgactactgtgaaggccaag

SEQ ID NO: 2340281 - DNA, 25 bp, Homo sapien
agcactcaacaacaaccagttggtg

SEQ ID NO: 2340282 - DNA, 25 bp, Homo sapien
taaaatctcgaactcagtaaccaac

SEQ ID NO: 2340283 - DNA, 25 bp, Homo sapien
ggtctatgatcaccattttgccaac

SEQ ID NO: 2340284 - DNA, 25 bp, Homo sapien
gaactgccatactactttcacatga

SEQ ID NO: 2340285 - DNA, 25 bp, Homo sapien
taaaattgtagccaaatccagctga

SEQ ID NO: 2340286 - DNA, 25 bp, Homo sapien
gactttcagaaaatggtgcatccag

SEQ ID NO: 2340287 - DNA, 25 bp, Homo sapien
cacagcacgctacaaatttcatgag

SEQ ID NO: 2340288 - DNA, 25 bp, Homo sapien
gatgtcctaccaacacatgatgccc

SEQ ID NO: 2340289 - DNA, 25 bp, Homo sapien
catgcccctgttgattactgagtct

SEQ ID NO: 2340290 - DNA, 25 bp, Homo sapien
ttgaggtgagttacagggcaacccc

SEQ ID NO: 2340291 - DNA, 25 bp, Homo sapien
gctagttactaagtgggtattccca

SEQ ID NO: 2340292 - DNA, 25 bp, Homo sapien
gcagaggccatagactgttatcaga

SEQ ID NO: 2340293 - DNA, 25 bp, Homo sapien
tgagggcatttaagtggaaacatct

SEQ ID NO: 2340294 - DNA, 25 bp, Homo sapien
ttaatgcattaaactgcttggtggc

SEQ ID NO: 2340295 - DNA, 25 bp, Homo sapien
gcttggtggctaatccatatgaaaa

SEQ ID NO: 2340296 - DNA, 25 bp, Homo sapien
tgtgatgttcagactaaaactgggt

SEQ ID NO: 2340297 - DNA, 25 bp, Homo sapien
gtgatgttcagactaaaactgggtc

SEQ ID NO: 2340298 - DNA, 25 bp, Homo sapien
caactttgggtatggaaactaattg

SEQ ID NO: 2340299 - DNA, 25 bp, Homo sapien
ttgggatacattcagaagacaggat

SEQ ID NO: 2340300 - DNA, 25 bp, Homo sapien
gtcaactctgccctggtatggctct

SEQ ID NO: 2340301 - DNA, 25 bp, Homo sapien
cctggtatggctctccagaaaaagc

SEQ ID NO: 2340302 - DNA, 25 bp, Homo sapien
tgctgcatgaactgatgctggcagt

SEQ ID NO: 2340303 - DNA, 25 bp, Homo sapien
caaattacacatgaatgctgcatga

SEQ ID NO: 2340304 - DNA, 25 bp, Homo sapien
ttttacaatttgatcttgatatgtc

SEQ ID NO: 2340305 - DNA, 25 bp, Homo sapien
caatttgatcttgatatgtcatctc

SEQ ID NO: 2340306 - DNA, 25 bp, Homo sapien
tttacaatttgatcttgatatgtca

SEQ ID NO: 2340307 - DNA, 25 bp, Homo sapien
tacaatttgatcttgatatgtcatc

SEQ ID NO: 2340308 - DNA, 25 bp, Homo sapien
gggttcaatgtgtggttggatttca

SEQ ID NO: 2340309 - DNA, 25 bp, Homo sapien
tgatgtttggcagtttcacttcccc

SEQ ID NO: 2340310 - DNA, 25 bp, Homo sapien
cagagatgggcataaaaaagttgta

SEQ ID NO: 2340311 - DNA, 25 bp, Homo sapien
tgcacatcctggtgatgatgtttgg

SEQ ID NO: 2340312 - DNA, 25 bp, Homo sapien
ttactaacgaagtcagccaagaagg

SEQ ID NO: 2340313 - DNA, 25 bp, Homo sapien
gagaaataccgaaaaacacagtgtg

SEQ ID NO: 2340314 - DNA, 25 bp, Homo sapien
gacggttagctaggagaaagcaatg

SEQ ID NO: 2340315 - DNA, 25 bp, Homo sapien
tagtattatgctatagacggttagc

SEQ ID NO: 2340316 - DNA, 25 bp, Homo sapien
taacaatcttaagtttcatctgtaa

SEQ ID NO: 2340317 - DNA, 25 bp, Homo sapien
tctgtaagaagattcgcacagttca

SEQ ID NO: 2340318 - DNA, 25 bp, Homo sapien
caggctgatgagctggagtacactg

SEQ ID NO: 2340319 - DNA, 25 bp, Homo sapien
cacccaggctgatgagctggagtac

SEQ ID NO: 2340320 - DNA, 25 bp, Homo sapien
agccatgcacagactcagatgtgct

SEQ ID NO: 2340321 - DNA, 25 bp, Homo sapien
gtggctgtccaaacagactgcactg

SEQ ID NO: 2340322 - DNA, 25 bp, Homo sapien
gactgcactgatacaccagccatgc

SEQ ID NO: 2340323 - DNA, 25 bp, Homo sapien
catgcacagactcagatgtgctcat

SEQ ID NO: 2340324 - DNA, 25 bp, Homo sapien
gatggctgtttgcaggtagatgttc

SEQ ID NO: 2340325 - DNA, 25 bp, Homo sapien
tcgctgatggctgtttgcaggtaga

SEQ ID NO: 2340326 - DNA, 25 bp, Homo sapien
cgctgatggctgtttgcaggtagat

SEQ ID NO: 2340327 - DNA, 25 bp, Homo sapien
ctgatggctgtttgcaggtagatgt

SEQ ID NO: 2340328 - DNA, 25 bp, Homo sapien
tgaatactggcatgatctggactta

SEQ ID NO: 2340329 - DNA, 25 bp, Homo sapien
gaatactggcatgatctggacttac

SEQ ID NO: 2340330 - DNA, 25 bp, Homo sapien
gaggcagatgtttatacataagaca

SEQ ID NO: 2340331 - DNA, 25 bp, Homo sapien
tgaagaggcagatgtttatacataa

SEQ ID NO: 2340332 - DNA, 25 bp, Homo sapien
gtttatacataagacactcattcca

SEQ ID NO: 2340333 - DNA, 25 bp, Homo sapien
cagatgtttatacataagacactca

SEQ ID NO: 2340334 - DNA, 25 bp, Homo sapien
agtacccctctgtcatgttatttgg

SEQ ID NO: 2340335 - DNA, 25 bp, Homo sapien
acccctctgtcatgttatttggtgg

SEQ ID NO: 2340336 - DNA, 25 bp, Homo sapien
ttaatctgcagtaggaacttgggca

SEQ ID NO: 2340337 - DNA, 25 bp, Homo sapien
tgcagtaggaacttgggcaatacca

SEQ ID NO: 2340338 - DNA, 25 bp, Homo sapien
gcatgaaactgctgagagctctgat

SEQ ID NO: 2340339 - DNA, 25 bp, Homo sapien
cactggttaccaagccacatttgca

SEQ ID NO: 2340340 - DNA, 25 bp, Homo sapien
tgcagaaagtgaatctagagtccca

SEQ ID NO: 2340341 - DNA, 25 bp, Homo sapien
ctcctggagacaagggactggatta

SEQ ID NO: 2340342 - DNA, 25 bp, Homo sapien
gtgccgctctgaacttggtcctctt

SEQ ID NO: 2340343 - DNA, 25 bp, Homo sapien
gagcctgggatgtcccagagcagga

SEQ ID NO: 2340344 - DNA, 25 bp, Homo sapien
gctctgaacttggtcctcttcaaga

SEQ ID NO: 2340345 - DNA, 25 bp, Homo sapien
ggaagcacgcgagaacatttgtttg

SEQ ID NO: 2340346 - DNA, 25 bp, Homo sapien
ttcctccaaaatgagtgagcatgtg

SEQ ID NO: 2340347 - DNA, 25 bp, Homo sapien
gggaaagtgttataggaggatgatt

SEQ ID NO: 2340348 - DNA, 25 bp, Homo sapien
ccaaaatgagtgagcatgtgccggg

SEQ ID NO: 2340349 - DNA, 25 bp, Homo sapien
gccagcctttgtgttgagatctaaa

SEQ ID NO: 2340350 - DNA, 25 bp, Homo sapien
tatacatgtcagcttttgccgtcag

SEQ ID NO: 2340351 - DNA, 25 bp, Homo sapien
cagattattaattcctcaagggcac

SEQ ID NO: 2340352 - DNA, 25 bp, Homo sapien
tctctcaatactagccgagcagttt

SEQ ID NO: 2340353 - DNA, 25 bp, Homo sapien
taatatcctgccacttcaatccaag

SEQ ID NO: 2340354 - DNA, 25 bp, Homo sapien
tcataaaaatactaagagtggatgt

SEQ ID NO: 2340355 - DNA, 25 bp, Homo sapien
aaacagtaattatttgaggtaatgc

SEQ ID NO: 2340356 - DNA, 25 bp, Homo sapien
catgttgtgcatgtaaatacatatc

SEQ ID NO: 2340357 - DNA, 25 bp, Homo sapien
gctagtgttagtcatttcacaatgt

SEQ ID NO: 2340358 - DNA, 25 bp, Homo sapien
ctaggacctagaacatcacttggca

SEQ ID NO: 2340359 - DNA, 25 bp, Homo sapien
catataacagtggtagctcagtaaa

SEQ ID NO: 2340360 - DNA, 25 bp, Homo sapien
caacctgtgtagtaagttggagcac

SEQ ID NO: 2340361 - DNA, 25 bp, Homo sapien
tacttttatgcaaggtcaacctgtg

SEQ ID NO: 2340362 - DNA, 25 bp, Homo sapien
cttaatcagacagttccagtgcaat

SEQ ID NO: 2340363 - DNA, 25 bp, Homo sapien
gacaaatgagcagtcttccaatctg

SEQ ID NO: 2340364 - DNA, 25 bp, Homo sapien
tgagtccaggcgtttgttcaagctc

SEQ ID NO: 2340365 - DNA, 25 bp, Homo sapien
ctagttcttgctagctcttgctagt

SEQ ID NO: 2340366 - DNA, 25 bp, Homo sapien
gaatgttgccaaaactcatcctttg

SEQ ID NO: 2340367 - DNA, 25 bp, Homo sapien
cctaagacacttcttggaatgttgc

SEQ ID NO: 2340368 - DNA, 25 bp, Homo sapien
aaatagagattcaggtaactcaaca

SEQ ID NO: 2340369 - DNA, 25 bp, Homo sapien
gtaactcaacacaggcattgaccat

SEQ ID NO: 2340370 - DNA, 25 bp, Homo sapien
gctatacggatcaaatttctccggc

SEQ ID NO: 2340371 - DNA, 25 bp, Homo sapien
ggatcaaatttctccggcaattcat

SEQ ID NO: 2340372 - DNA, 25 bp, Homo sapien
tacggatcaaatttctccggcaatt

SEQ ID NO: 2340373 - DNA, 25 bp, Homo sapien
tctggctatacggatcaaatttctc

SEQ ID NO: 2340374 - DNA, 25 bp, Homo sapien
ggtcaaagacacaaggctatgcctg

SEQ ID NO: 2340375 - DNA, 25 bp, Homo sapien
caaagtttgggcctggtttcaatga

SEQ ID NO: 2340376 - DNA, 25 bp, Homo sapien
cagaaactctgcagcattgggtata

SEQ ID NO: 2340377 - DNA, 25 bp, Homo sapien
gaaggtggagaatcgctggcttcca

SEQ ID NO: 2340378 - DNA, 25 bp, Homo sapien
taagggcatcaagttcctgcagtac

SEQ ID NO: 2340379 - DNA, 25 bp, Homo sapien
ccaagtgcttcctaaaaccagtgcc

SEQ ID NO: 2340380 - DNA, 25 bp, Homo sapien
tggtcaggactgatccaggcaataa

SEQ ID NO: 2340381 - DNA, 25 bp, Homo sapien
tgacatagaggtccttaagggcatc

SEQ ID NO: 2340382 - DNA, 25 bp, Homo sapien
ttgtaagttcttagaggtcagggac

SEQ ID NO: 2340383 - DNA, 25 bp, Homo sapien
ccttcttgactagatggaatgccct

SEQ ID NO: 2340384 - DNA, 25 bp, Homo sapien
catatagattcctgtgttgtaagtt

SEQ ID NO: 2340385 - DNA, 25 bp, Homo sapien
taagagcaaaattggcagctattgt

SEQ ID NO: 2340386 - DNA, 25 bp, Homo sapien
gaatagtacctgctcaattatgctt

SEQ ID NO: 2340387 - DNA, 25 bp, Homo sapien
gccttttgtataccagaatagtacc

SEQ ID NO: 2340388 - DNA, 25 bp, Homo sapien
taaatcagtgtctagtccacagttg

SEQ ID NO: 2340389 - DNA, 25 bp, Homo sapien
gattggatccaatctgcctctaaaa

SEQ ID NO: 2340390 - DNA, 25 bp, Homo sapien
tatttatagactgcgaaatcacatt

SEQ ID NO: 2340391 - DNA, 25 bp, Homo sapien
tcaaactagttatctcatgagtaac

SEQ ID NO: 2340392 - DNA, 25 bp, Homo sapien
ctctctccattagattgtcagacca

SEQ ID NO: 2340393 - DNA, 25 bp, Homo sapien
tgtcagaccatagccagcaaatctg

SEQ ID NO: 2340394 - DNA, 25 bp, Homo sapien
gagtcacattcgcaacatgctgctg

SEQ ID NO: 2340395 - DNA, 25 bp, Homo sapien
tcctgggcatcctgttaattgaaat

SEQ ID NO: 2340396 - DNA, 25 bp, Homo sapien
tcaaggtcacaaaagctgttaatac

SEQ ID NO: 2340397 - DNA, 25 bp, Homo sapien
tgtcaggtggacttgttgcagcaac

SEQ ID NO: 2340398 - DNA, 25 bp, Homo sapien
ccacccattaggtagccttgcttag

SEQ ID NO: 2340399 - DNA, 25 bp, Homo sapien
ttaggtagccttgcttagcaatggt

SEQ ID NO: 2340400 - DNA, 25 bp, Homo sapien
ctttaccacccattaggtagccttg

SEQ ID NO: 2340401 - DNA, 25 bp, Homo sapien
acccattaggtagccttgcttagca

SEQ ID NO: 2340402 - DNA, 25 bp, Homo sapien
gagaggtcgtttctgtgttgtacat

SEQ ID NO: 2340403 - DNA, 25 bp, Homo sapien
ggtcgtttctgtgttgtacattgtt

SEQ ID NO: 2340404 - DNA, 25 bp, Homo sapien
ctgagaggtcgtttctgtgttgtac

SEQ ID NO: 2340405 - DNA, 25 bp, Homo sapien
gaggtcgtttctgtgttgtacattg

SEQ ID NO: 2340406 - DNA, 25 bp, Homo sapien
tttaggtgctttgctatattctgag

SEQ ID NO: 2340407 - DNA, 25 bp, Homo sapien
tgatgacaatggtgggaaggtgcca

SEQ ID NO: 2340408 - DNA, 25 bp, Homo sapien
tgagtttagttcagtaccataccct

SEQ ID NO: 2340409 - DNA, 25 bp, Homo sapien
gactagcggctcatctttaggtgct

SEQ ID NO: 2340410 - DNA, 25 bp, Homo sapien
gttctcatcattttcagtcttcaaa

SEQ ID NO: 2340411 - DNA, 25 bp, Homo sapien
agttctcatcattttcagtcttcaa

SEQ ID NO: 2340412 - DNA, 25 bp, Homo sapien
tctcatcattttcagtcttcaaaaa

SEQ ID NO: 2340413 - DNA, 25 bp, Homo sapien
catcattttcagtcttcaaaaaatt

SEQ ID NO: 2340414 - DNA, 25 bp, Homo sapien
ttaggaattctggagtatgtttttc

SEQ ID NO: 2340415 - DNA, 25 bp, Homo sapien
taggaattctggagtatgtttttct

SEQ ID NO: 2340416 - DNA, 25 bp, Homo sapien
gttctattaggaattctggagtatg

SEQ ID NO: 2340417 - DNA, 25 bp, Homo sapien
ctattaggaattctggagtatgttt

SEQ ID NO: 2340418 - DNA, 25 bp, Homo sapien
aattgttgatgccagcccacaacaa

SEQ ID NO: 2340419 - DNA, 25 bp, Homo sapien
gccagcccacaacaagtacagcatt

SEQ ID NO: 2340420 - DNA, 25 bp, Homo sapien
caagccactttcataattgttgatg

SEQ ID NO: 2340421 - DNA, 25 bp, Homo sapien
agccactttcataattgttgatgcc

SEQ ID NO: 2340422 - DNA, 25 bp, Homo sapien
ggagaaaccaatctcgcctaggagg

SEQ ID NO: 2340423 - DNA, 25 bp, Homo sapien
cattctctgagtgtagcacacagca

SEQ ID NO: 2340424 - DNA, 25 bp, Homo sapien
tactgaagcagaggcatgtcctagg

SEQ ID NO: 2340425 - DNA, 25 bp, Homo sapien
caagtgatggactgttctccggaat

SEQ ID NO: 2340426 - DNA, 25 bp, Homo sapien
tgagtacaatggactctccatgaag

SEQ ID NO: 2340427 - DNA, 25 bp, Homo sapien
tccatgaagtcacaccatacatcat

SEQ ID NO: 2340428 - DNA, 25 bp, Homo sapien
attgagtacaatggactctccatga

SEQ ID NO: 2340429 - DNA, 25 bp, Homo sapien
ctccatgaagtcacaccatacatca

SEQ ID NO: 2340430 - DNA, 25 bp, Homo sapien
ggctgagtagtaagcagcaggttat

SEQ ID NO: 2340431 - DNA, 25 bp, Homo sapien
gatataacatatagctcttccaaga

SEQ ID NO: 2340432 - DNA, 25 bp, Homo sapien
atgcacaggcacacaatagcttttg

SEQ ID NO: 2340433 - DNA, 25 bp, Homo sapien
gcaggttatgtgtgcaaggtgcaca

SEQ ID NO: 2340434 - DNA, 25 bp, Homo sapien
aaacgttcataggtatatggcctac

SEQ ID NO: 2340435 - DNA, 25 bp, Homo sapien
ttatacatgagcgttaaaacgttca

SEQ ID NO: 2340436 - DNA, 25 bp, Homo sapien
ttaaaacgttcataggtatatggcc

SEQ ID NO: 2340437 - DNA, 25 bp, Homo sapien
gagcgttaaaacgttcataggtata

SEQ ID NO: 2340438 - DNA, 25 bp, Homo sapien
ggcatttgaggtccagcttactaca

SEQ ID NO: 2340439 - DNA, 25 bp, Homo sapien
tcaatggtaaagcagtcacttgtgc

SEQ ID NO: 2340440 - DNA, 25 bp, Homo sapien
gacagagaatatgctccatcagaga

SEQ ID NO: 2340441 - DNA, 25 bp, Homo sapien
gactagatacagaataggcctcaca

SEQ ID NO: 2340442 - DNA, 25 bp, Homo sapien
aagacgtgttcacctggcaaggacc

SEQ ID NO: 2340443 - DNA, 25 bp, Homo sapien
ggtttagctcatatacccctcaggc

SEQ ID NO: 2340444 - DNA, 25 bp, Homo sapien
tcagatacagcaagcagcaagggtt

SEQ ID NO: 2340445 - DNA, 25 bp, Homo sapien
caagggttcagggatatattcaagc

SEQ ID NO: 2340446 - DNA, 25 bp, Homo sapien
tcaaattctataatacacatcaaaa

SEQ ID NO: 2340447 - DNA, 25 bp, Homo sapien
tatacatctgattaactactttatc

SEQ ID NO: 2340448 - DNA, 25 bp, Homo sapien
gatatccctttatgtatatcaaata

SEQ ID NO: 2340449 - DNA, 25 bp, Homo sapien
cttcaggtcatgtgtataagtactc

SEQ ID NO: 2340450 - DNA, 25 bp, Homo sapien
tcttgaagccatagtaacatctttc

SEQ ID NO: 2340451 - DNA, 25 bp, Homo sapien
ggatcttgaagccatagtaacatct

SEQ ID NO: 2340452 - DNA, 25 bp, Homo sapien
cttggatcttgaagccatagtaaca

SEQ ID NO: 2340453 - DNA, 25 bp, Homo sapien
gatcttgaagccatagtaacatctt

SEQ ID NO: 2340454 - DNA, 25 bp, Homo sapien
tactgagtggcaagcatgtaccagg

SEQ ID NO: 2340455 - DNA, 25 bp, Homo sapien
tataatgtggtgaatgctaagagac

SEQ ID NO: 2340456 - DNA, 25 bp, Homo sapien
ttacagtttggtgggatagcaaaac

SEQ ID NO: 2340457 - DNA, 25 bp, Homo sapien
taactgttgccaagctactagtaaa

SEQ ID NO: 2340458 - DNA, 25 bp, Homo sapien
cacacacccgaaatgggctcttgtt

SEQ ID NO: 2340459 - DNA, 25 bp, Homo sapien
ctaaagaaggcgaagaaactaagct

SEQ ID NO: 2340460 - DNA, 25 bp, Homo sapien
cactaaagaaggcgaagaaactaag

SEQ ID NO: 2340461 - DNA, 25 bp, Homo sapien
gggctcttgtttcacactaaagaag

SEQ ID NO: 2340462 - DNA, 25 bp, Homo sapien
aaggcattagcttgggaatcattgc

SEQ ID NO: 2340463 - DNA, 25 bp, Homo sapien
taaaagaatatacctactatctgcc

SEQ ID NO: 2340464 - DNA, 25 bp, Homo sapien
taagttgtctatgcaaagcccaaag

SEQ ID NO: 2340465 - DNA, 25 bp, Homo sapien
tctgtgtttagggaaagccacagtc

SEQ ID NO: 2340466 - DNA, 25 bp, Homo sapien
gacatgtagaatatgatccctgttc

SEQ ID NO: 2340467 - DNA, 25 bp, Homo sapien
gctttcctttgaccatgtggatcac

SEQ ID NO: 2340468 - DNA, 25 bp, Homo sapien
tattatgggtctgaatatttcacac

SEQ ID NO: 2340469 - DNA, 25 bp, Homo sapien
aagttccctatgagagttttgtaag

SEQ ID NO: 2340470 - DNA, 25 bp, Homo sapien
catgaaaatagaatgaggtattata

SEQ ID NO: 2340471 - DNA, 25 bp, Homo sapien
tgcgttgcaaactgtgagatacttt

SEQ ID NO: 2340472 - DNA, 25 bp, Homo sapien
tctgtgggaggcatcgtgatagttt

SEQ ID NO: 2340473 - DNA, 25 bp, Homo sapien
aaaactcatggtccttgcttgaaag

SEQ ID NO: 2340474 - DNA, 25 bp, Homo sapien
ctgccattaagttctgtggtttttc

SEQ ID NO: 2340475 - DNA, 25 bp, Homo sapien
ccatattgtcttttatacatatctc

SEQ ID NO: 2340476 - DNA, 25 bp, Homo sapien
ttttcattctggttggtttctccca

SEQ ID NO: 2340477 - DNA, 25 bp, Homo sapien
gtttctcccaagtttaggtctgtca

SEQ ID NO: 2340478 - DNA, 25 bp, Homo sapien
tcaaccacacttaagggcaccagaa

SEQ ID NO: 2340479 - DNA, 25 bp, Homo sapien
taagggcaccagaatctttcaatcc

SEQ ID NO: 2340480 - DNA, 25 bp, Homo sapien
tcaatcctcctacttctgtcaagag

SEQ ID NO: 2340481 - DNA, 25 bp, Homo sapien
aaaaagcacgcattcaccatcattg

SEQ ID NO: 2340482 - DNA, 25 bp, Homo sapien
tgagctgtgagtccccaggtataac

SEQ ID NO: 2340483 - DNA, 25 bp, Homo sapien
gcacaggtgtgctgtaatatgagtg

SEQ ID NO: 2340484 - DNA, 25 bp, Homo sapien
cacagggatccctcgctttggaatt

SEQ ID NO: 2340485 - DNA, 25 bp, Homo sapien
tgtgctgtaatatgagtgagctgtg

SEQ ID NO: 2340486 - DNA, 25 bp, Homo sapien
ctgcaccttggcatgactatcatct

SEQ ID NO: 2340487 - DNA, 25 bp, Homo sapien
ccttggcatgactatcatcttgttt

SEQ ID NO: 2340488 - DNA, 25 bp, Homo sapien
caccttggcatgactatcatcttgt

SEQ ID NO: 2340489 - DNA, 25 bp, Homo sapien
gcaccttggcatgactatcatcttg

SEQ ID NO: 2340490 - DNA, 25 bp, Homo sapien
ccagggcatagtaaggttaaagctc

SEQ ID NO: 2340491 - DNA, 25 bp, Homo sapien
aaagaagtctctaaatagcgacggg

SEQ ID NO: 2340492 - DNA, 25 bp, Homo sapien
tgaacagtaccatcaaaccaacatg

SEQ ID NO: 2340493 - DNA, 25 bp, Homo sapien
tcactggcagtgacaatatcctgtt

SEQ ID NO: 2340494 - DNA, 25 bp, Homo sapien
gaagagtcttcacagtaaaccatca

SEQ ID NO: 2340495 - DNA, 25 bp, Homo sapien
cacagggattccagtataagattcc

SEQ ID NO: 2340496 - DNA, 25 bp, Homo sapien
gataaatttctaaggcgtctgcttg

SEQ ID NO: 2340497 - DNA, 25 bp, Homo sapien
tcagcaaccataccgtccttaaaga

SEQ ID NO: 2340498 - DNA, 25 bp, Homo sapien
cactgaggcctcgttaaattagaaa

SEQ ID NO: 2340499 - DNA, 25 bp, Homo sapien
gaaaattgctgctcaagtgttccag

SEQ ID NO: 2340500 - DNA, 25 bp, Homo sapien
cattcaactggtgattgctgcaaac

SEQ ID NO: 2340501 - DNA, 25 bp, Homo sapien
taaacaatgtctggttgtgacctca

SEQ ID NO: 2340502 - DNA, 25 bp, Homo sapien
tactcttcatattccaaccgagtga

SEQ ID NO: 2340503 - DNA, 25 bp, Homo sapien
cttcatattccaaccgagtgatggg

SEQ ID NO: 2340504 - DNA, 25 bp, Homo sapien
ctcttcatattccaaccgagtgatg

SEQ ID NO: 2340505 - DNA, 25 bp, Homo sapien
ttactcttcatattccaaccgagtg

SEQ ID NO: 2340506 - DNA, 25 bp, Homo sapien
tttcttctttgaattgaaattcatg

SEQ ID NO: 2340507 - DNA, 25 bp, Homo sapien
tcatgttgtctcttttaggatggga

SEQ ID NO: 2340508 - DNA, 25 bp, Homo sapien
ttcatgttgtctcttttaggatggg

SEQ ID NO: 2340509 - DNA, 25 bp, Homo sapien
tatgtttatgcctactgatagaggg

SEQ ID NO: 2340510 - DNA, 25 bp, Homo sapien
tcatggttccacatgggtaaactct

SEQ ID NO: 2340511 - DNA, 25 bp, Homo sapien
cagtttaaggaccaatagtgtgaaa

SEQ ID NO: 2340512 - DNA, 25 bp, Homo sapien
gaagggtccttgctaatggcagcta

SEQ ID NO: 2340513 - DNA, 25 bp, Homo sapien
ttccccgagtaatgagcatctgagc

SEQ ID NO: 2340514 - DNA, 25 bp, Homo sapien
gtttcatcctcatcagtattccccg

SEQ ID NO: 2340515 - DNA, 25 bp, Homo sapien
gaccctcagtagatgatgcacttct

SEQ ID NO: 2340516 - DNA, 25 bp, Homo sapien
gatagtaaacttccagaccctcagt

SEQ ID NO: 2340517 - DNA, 25 bp, Homo sapien
gaatcacttgattgtagagaatcca

SEQ ID NO: 2340518 - DNA, 25 bp, Homo sapien
tactcaactctcatactgtgaggtc

SEQ ID NO: 2340519 - DNA, 25 bp, Homo sapien
gaggccagtgagtcttaaaatttga

SEQ ID NO: 2340520 - DNA, 25 bp, Homo sapien
gtccacagtattgaaaggaatcact

SEQ ID NO: 2340521 - DNA, 25 bp, Homo sapien
gtttgaggcacaatacccagctttg

SEQ ID NO: 2340522 - DNA, 25 bp, Homo sapien
taaattattgggttacacacctgaa

SEQ ID NO: 2340523 - DNA, 25 bp, Homo sapien
tgaactgctgggcatgaacgattct

SEQ ID NO: 2340524 - DNA, 25 bp, Homo sapien
taatgataagccaggaaatgaaagt

SEQ ID NO: 2340525 - DNA, 25 bp, Homo sapien
tgttttatttgctttccatgtttct

SEQ ID NO: 2340526 - DNA, 25 bp, Homo sapien
tttatttgctttccatgtttcttag

SEQ ID NO: 2340527 - DNA, 25 bp, Homo sapien
atgttttatttgctttccatgtttc

SEQ ID NO: 2340528 - DNA, 25 bp, Homo sapien
ttttatttgctttccatgtttctta

SEQ ID NO: 2340529 - DNA, 25 bp, Homo sapien
cactgtggttgttatgggttacttc

SEQ ID NO: 2340530 - DNA, 25 bp, Homo sapien
aaaacgccaaagataaggagctgag

SEQ ID NO: 2340531 - DNA, 25 bp, Homo sapien
ccagagagagttcatgctgcttcaa

SEQ ID NO: 2340532 - DNA, 25 bp, Homo sapien
tgaaattccaaaaccgtccagagag

SEQ ID NO: 2340533 - DNA, 25 bp, Homo sapien
ataatctccatgtgtttcttagtga

SEQ ID NO: 2340534 - DNA, 25 bp, Homo sapien
ctgtttcttcaacaagtcacgcttt

SEQ ID NO: 2340535 - DNA, 25 bp, Homo sapien
caacaagtcacgctttaataaagtt

SEQ ID NO: 2340536 - DNA, 25 bp, Homo sapien
tctccatgtgtttcttagtgagttc

SEQ ID NO: 2340537 - DNA, 25 bp, Homo sapien
tagtaggaatggcaggttcataatc

SEQ ID NO: 2340538 - DNA, 25 bp, Homo sapien
ttctggctctaaaaagcctcccaag

SEQ ID NO: 2340539 - DNA, 25 bp, Homo sapien
aaaacttcaggtgtattttacagtg

SEQ ID NO: 2340540 - DNA, 25 bp, Homo sapien
tttgctgataatccacttattacgc

SEQ ID NO: 2340541 - DNA, 25 bp, Homo sapien
ccaggcccagttgttatttgctcaa

SEQ ID NO: 2340542 - DNA, 25 bp, Homo sapien
tcctaactgcacatggaagactgtt

SEQ ID NO: 2340543 - DNA, 25 bp, Homo sapien
gagcattgagtgatgtgggatccca

SEQ ID NO: 2340544 - DNA, 25 bp, Homo sapien
acttaaagaagggatctgcatctgg

SEQ ID NO: 2340545 - DNA, 25 bp, Homo sapien
aatggcagctcattggactgaggcc

SEQ ID NO: 2340546 - DNA, 25 bp, Homo sapien
gaatgtgtacctgattcaatggcag

SEQ ID NO: 2340547 - DNA, 25 bp, Homo sapien
taaaggtgggaaagagctcatgcac

SEQ ID NO: 2340548 - DNA, 25 bp, Homo sapien
aaaattgttctcatggctctaaagg

SEQ ID NO: 2340549 - DNA, 25 bp, Homo sapien
gctctgtggcgttgcttggcagaac

SEQ ID NO: 2340550 - DNA, 25 bp, Homo sapien
agggcctcatggtgactctcgctca

SEQ ID NO: 2340551 - DNA, 25 bp, Homo sapien
tgccagggcctcatggtgactctcg

SEQ ID NO: 2340552 - DNA, 25 bp, Homo sapien
cagaacagtcgcgacagtggtgaca

SEQ ID NO: 2340553 - DNA, 25 bp, Homo sapien
agatagccaagatttagttcagaga

SEQ ID NO: 2340554 - DNA, 25 bp, Homo sapien
ccagatagccaagatttagttcaga

SEQ ID NO: 2340555 - DNA, 25 bp, Homo sapien
gccagatagccaagatttagttcag

SEQ ID NO: 2340556 - DNA, 25 bp, Homo sapien
ctgccagatagccaagatttagttc

SEQ ID NO: 2340557 - DNA, 25 bp, Homo sapien
aagtgacagagtaaagctgtttgct

SEQ ID NO: 2340558 - DNA, 25 bp, Homo sapien
tgacagagtaaagctgtttgctatc

SEQ ID NO: 2340559 - DNA, 25 bp, Homo sapien
cagagtaaagctgtttgctatcaat

SEQ ID NO: 2340560 - DNA, 25 bp, Homo sapien
gagtaaagctgtttgctatcaattt

SEQ ID NO: 2340561 - DNA, 25 bp, Homo sapien
tttcatgctggactgtgcagattac

SEQ ID NO: 2340562 - DNA, 25 bp, Homo sapien
ggcaatttggtttgaatatgtttca

SEQ ID NO: 2340563 - DNA, 25 bp, Homo sapien
aatatgtttcatgctggactgtgca

SEQ ID NO: 2340564 - DNA, 25 bp, Homo sapien
caggcaatttggtttgaatatgttt

SEQ ID NO: 2340565 - DNA, 25 bp, Homo sapien
caaagccagtatgcagtggagctag

SEQ ID NO: 2340566 - DNA, 25 bp, Homo sapien
aaaggtgcactctacttcaagaagc

SEQ ID NO: 2340567 - DNA, 25 bp, Homo sapien
gacttcacatgcattgacaccttta

SEQ ID NO: 2340568 - DNA, 25 bp, Homo sapien
catgagttcatgctttacagaccaa

SEQ ID NO: 2340569 - DNA, 25 bp, Homo sapien
tgccttgggaaatgagggaacctct

SEQ ID NO: 2340570 - DNA, 25 bp, Homo sapien
tgtaagaaaatggtcctgcctttgg

SEQ ID NO: 2340571 - DNA, 25 bp, Homo sapien
gaatatgtggtgaaatcgctcaagg

SEQ ID NO: 2340572 - DNA, 25 bp, Homo sapien
gagacgttcaaggtagttcacataa

SEQ ID NO: 2340573 - DNA, 25 bp, Homo sapien
ccgagaagagatctggatttgatta

SEQ ID NO: 2340574 - DNA, 25 bp, Homo sapien
tcccaacacagtgccgagaagagat

SEQ ID NO: 2340575 - DNA, 25 bp, Homo sapien
caacacagtgccgagaagagatctg

SEQ ID NO: 2340576 - DNA, 25 bp, Homo sapien
cagtgccgagaagagatctggattt

SEQ ID NO: 2340577 - DNA, 25 bp, Homo sapien
gctaggtggacattagaatacaaac

SEQ ID NO: 2340578 - DNA, 25 bp, Homo sapien
tagaaagggtttccatctacatgta

SEQ ID NO: 2340579 - DNA, 25 bp, Homo sapien
tattcatatatgagagccatgcaaa

SEQ ID NO: 2340580 - DNA, 25 bp, Homo sapien
gaccatgccctctaaatgccaggag

SEQ ID NO: 2340581 - DNA, 25 bp, Homo sapien
tgaaaagaggaactgctgtgctttg

SEQ ID NO: 2340582 - DNA, 25 bp, Homo sapien
agaggaactgctgtgctttgtgtgc

SEQ ID NO: 2340583 - DNA, 25 bp, Homo sapien
ctgaaaagaggaactgctgtgcttt

SEQ ID NO: 2340584 - DNA, 25 bp, Homo sapien
aaaagaggaactgctgtgctttgtg

SEQ ID NO: 2340585 - DNA, 25 bp, Homo sapien
tagagccacattagcagatccggaa

SEQ ID NO: 2340586 - DNA, 25 bp, Homo sapien
ccaggtaaatcgcattagagccaca

SEQ ID NO: 2340587 - DNA, 25 bp, Homo sapien
gaacagttccaatcactgtgggcag

SEQ ID NO: 2340588 - DNA, 25 bp, Homo sapien
tccacggttgtggtgatatcgacaa

SEQ ID NO: 2340589 - DNA, 25 bp, Homo sapien
taaatgtttagagatccacggccaa

SEQ ID NO: 2340590 - DNA, 25 bp, Homo sapien
taggtgcatactcagccaatggtgg

SEQ ID NO: 2340591 - DNA, 25 bp, Homo sapien
gcagcattcgttcacaaggacccag

SEQ ID NO: 2340592 - DNA, 25 bp, Homo sapien
tcagagtcattccttcggccagaaa

SEQ ID NO: 2340593 - DNA, 25 bp, Homo sapien
aagatctttattgaccttcattttc

SEQ ID NO: 2340594 - DNA, 25 bp, Homo sapien
ataagatctttattgaccttcattt

SEQ ID NO: 2340595 - DNA, 25 bp, Homo sapien
tcagcagccaagatggctcttatta

SEQ ID NO: 2340596 - DNA, 25 bp, Homo sapien
tagcactaacttctggctcaaaatg

SEQ ID NO: 2340597 - DNA, 25 bp, Homo sapien
gcaggtacttagcactaacttctgg

SEQ ID NO: 2340598 - DNA, 25 bp, Homo sapien
acttctggctcaaaatgctttgatg

SEQ ID NO: 2340599 - DNA, 25 bp, Homo sapien
tctacatccttcctgcaggtactta

SEQ ID NO: 2340600 - DNA, 25 bp, Homo sapien
cctgcatgatcatgttacagatagt

SEQ ID NO: 2340601 - DNA, 25 bp, Homo sapien
tcttttgccgtttctctcattgtcc

SEQ ID NO: 2340602 - DNA, 25 bp, Homo sapien
ggcattgcaaatattagtagagaaa

SEQ ID NO: 2340603 - DNA, 25 bp, Homo sapien
aattggcattgcaaatattagtaga

SEQ ID NO: 2340604 - DNA, 25 bp, Homo sapien
tgaacatggcccctgttgatagctt

SEQ ID NO: 2340605 - DNA, 25 bp, Homo sapien
aataggcagctcttggattctgacc

SEQ ID NO: 2340606 - DNA, 25 bp, Homo sapien
taatttaaggccaacagctataagc

SEQ ID NO: 2340607 - DNA, 25 bp, Homo sapien
gttagaagacttcacaataggcagc

SEQ ID NO: 2340608 - DNA, 25 bp, Homo sapien
ccaactggttggtaagctttgccat

SEQ ID NO: 2340609 - DNA, 25 bp, Homo sapien
tactcccaaatccaactggttggta

SEQ ID NO: 2340610 - DNA, 25 bp, Homo sapien
aatacatactcccaaatccaactgg

SEQ ID NO: 2340611 - DNA, 25 bp, Homo sapien
tcccaaatccaactggttggtaagc

SEQ ID NO: 2340612 - DNA, 25 bp, Homo sapien
gtcccagctctgatagaggcggctg

SEQ ID NO: 2340613 - DNA, 25 bp, Homo sapien
ctatgaggccagcacaaaagtgacc

SEQ ID NO: 2340614 - DNA, 25 bp, Homo sapien
tcagatcagataggcacctcggtcc

SEQ ID NO: 2340615 - DNA, 25 bp, Homo sapien
ggagctcccagcgaaatacattgaa

SEQ ID NO: 2340616 - DNA, 25 bp, Homo sapien
gctttccatgtcaaagactctgtat

SEQ ID NO: 2340617 - DNA, 25 bp, Homo sapien
tgatggagctttgaggttgtgacta

SEQ ID NO: 2340618 - DNA, 25 bp, Homo sapien
gtttatgattgactagctttggctc

SEQ ID NO: 2340619 - DNA, 25 bp, Homo sapien
gtcattgcgccccactaattctgtt

SEQ ID NO: 2340620 - DNA, 25 bp, Homo sapien
tacatctttcatgttaatggcattc

SEQ ID NO: 2340621 - DNA, 25 bp, Homo sapien
actaaaaggactgcgactatggcta

SEQ ID NO: 2340622 - DNA, 25 bp, Homo sapien
ggtcaggactaaaaggactgcgact

SEQ ID NO: 2340623 - DNA, 25 bp, Homo sapien
gcaggtcaggactaaaaggactgcg

SEQ ID NO: 2340624 - DNA, 25 bp, Homo sapien
gcttgtaaacctagcagtactgagg

SEQ ID NO: 2340625 - DNA, 25 bp, Homo sapien
gaacttcaggcagtggaatcccttt

SEQ ID NO: 2340626 - DNA, 25 bp, Homo sapien
tgaatagaaggcaggaccatctctg

SEQ ID NO: 2340627 - DNA, 25 bp, Homo sapien
taataaggcgcactagaaaagtagc

SEQ ID NO: 2340628 - DNA, 25 bp, Homo sapien
tagctacaaaccacttaatttggaa

SEQ ID NO: 2340629 - DNA, 25 bp, Homo sapien
tgttgacttactaatagctaaaggc

SEQ ID NO: 2340630 - DNA, 25 bp, Homo sapien
cattatcaaatttggttagctacaa

SEQ ID NO: 2340631 - DNA, 25 bp, Homo sapien
ggaaagtttaatctatgcttcattg

SEQ ID NO: 2340632 - DNA, 25 bp, Homo sapien
gcttcaaaatggcaccctcagtcct

SEQ ID NO: 2340633 - DNA, 25 bp, Homo sapien
ttactcagggatcttcagtggtgct

SEQ ID NO: 2340634 - DNA, 25 bp, Homo sapien
tagaactcattcaggtgggaaggtc

SEQ ID NO: 2340635 - DNA, 25 bp, Homo sapien
gaattgagctgttgtcagtgatgcc

SEQ ID NO: 2340636 - DNA, 25 bp, Homo sapien
ggaaatcataatccagtgaatactg

SEQ ID NO: 2340637 - DNA, 25 bp, Homo sapien
ttggaaatcataatccagtgaatac

SEQ ID NO: 2340638 - DNA, 25 bp, Homo sapien
tattttggaaatcataatccagtga

SEQ ID NO: 2340639 - DNA, 25 bp, Homo sapien
tcataatccagtgaatactgaagtt

SEQ ID NO: 2340640 - DNA, 25 bp, Homo sapien
agttcggcagcctgaatgatcccta

SEQ ID NO: 2340641 - DNA, 25 bp, Homo sapien
gtccaaggcgggcagttcggcagcc

SEQ ID NO: 2340642 - DNA, 25 bp, Homo sapien
ggcagcctgaatgatccctaccagc

SEQ ID NO: 2340643 - DNA, 25 bp, Homo sapien
cagcctgaatgatccctaccagcag

SEQ ID NO: 2340644 - DNA, 25 bp, Homo sapien
ttcacgtaaggatcagatgtgcccc

SEQ ID NO: 2340645 - DNA, 25 bp, Homo sapien
aagtaaattgctcattgaagacagg

SEQ ID NO: 2340646 - DNA, 25 bp, Homo sapien
ttcttcttcttatcaggtagcagaa

SEQ ID NO: 2340647 - DNA, 25 bp, Homo sapien
agcagaaacactttcacgtaaggat

SEQ ID NO: 2340648 - DNA, 25 bp, Homo sapien
cactgtgttcatagggactttaaat

SEQ ID NO: 2340649 - DNA, 25 bp, Homo sapien
cagcactttgcaggtcacgccattc

SEQ ID NO: 2340650 - DNA, 25 bp, Homo sapien
ggtcacgccattcctcagttacatg

SEQ ID NO: 2340651 - DNA, 25 bp, Homo sapien
tcactagggttttgccacccaattc

SEQ ID NO: 2340652 - DNA, 25 bp, Homo sapien
ggctgtcagtgggtttgatttaacc

SEQ ID NO: 2340653 - DNA, 25 bp, Homo sapien
gaggctcttacactatccatgttcc

SEQ ID NO: 2340654 - DNA, 25 bp, Homo sapien
tggtcgctaaaatagtacataatcc

SEQ ID NO: 2340655 - DNA, 25 bp, Homo sapien
taacatcacagagttggctgtcagt

SEQ ID NO: 2340656 - DNA, 25 bp, Homo sapien
ctggggatagaatcgaatagtggga

SEQ ID NO: 2340657 - DNA, 25 bp, Homo sapien
tggggatagaatcgaatagtgggaa

SEQ ID NO: 2340658 - DNA, 25 bp, Homo sapien
gcggaacacgatcaagccaaatgga

SEQ ID NO: 2340659 - DNA, 25 bp, Homo sapien
gcaagtgaacggaaaccagtgaggt

SEQ ID NO: 2340660 - DNA, 25 bp, Homo sapien
caaatggaaacctcaccagtgatgt

SEQ ID NO: 2340661 - DNA, 25 bp, Homo sapien
gaggaagaaagtagtcgaccgtgca

SEQ ID NO: 2340662 - DNA, 25 bp, Homo sapien
ctgtctccaaggtcaaattccacct

SEQ ID NO: 2340663 - DNA, 25 bp, Homo sapien
tagctgttgcttgtaatgtttgaaa

SEQ ID NO: 2340664 - DNA, 25 bp, Homo sapien
aatactttgatgatatacctgatcc

SEQ ID NO: 2340665 - DNA, 25 bp, Homo sapien
gattttgaagccatatactgagaaa

SEQ ID NO: 2340666 - DNA, 25 bp, Homo sapien
tacatattggtagccttttgcacac

SEQ ID NO: 2340667 - DNA, 25 bp, Homo sapien
gagcttgcagcatatcagggcggaa

SEQ ID NO: 2340668 - DNA, 25 bp, Homo sapien
caatcagggcattgatcgttgggtg

SEQ ID NO: 2340669 - DNA, 25 bp, Homo sapien
gattcttggagagcatagttgccgt

SEQ ID NO: 2340670 - DNA, 25 bp, Homo sapien
tacacaaagccgaggtgatagactt

SEQ ID NO: 2340671 - DNA, 25 bp, Homo sapien
ccatgtgcattatggaaacaggatg

SEQ ID NO: 2340672 - DNA, 25 bp, Homo sapien
gagggagacactaaataagccttta

SEQ ID NO: 2340673 - DNA, 25 bp, Homo sapien
aattaaggtaatctatgagctccat

SEQ ID NO: 2340674 - DNA, 25 bp, Homo sapien
aagttgttgagacaaaatctattat

SEQ ID NO: 2340675 - DNA, 25 bp, Homo sapien
tcgcaaaggcttcgttcgggctcct

SEQ ID NO: 2340676 - DNA, 25 bp, Homo sapien
cgcaaaggcttcgttcgggctcctc

SEQ ID NO: 2340677 - DNA, 25 bp, Homo sapien
ctgtaatcgcaaaggcttcgttcgg

SEQ ID NO: 2340678 - DNA, 25 bp, Homo sapien
taatcgcaaaggcttcgttcgggct

SEQ ID NO: 2340679 - DNA, 25 bp, Homo sapien
atttactttcccactgaaggccgca

SEQ ID NO: 2340680 - DNA, 25 bp, Homo sapien
gaaggccgcatttgccagcaagaca

SEQ ID NO: 2340681 - DNA, 25 bp, Homo sapien
atgaggtgaggccagttcagcttta

SEQ ID NO: 2340682 - DNA, 25 bp, Homo sapien
gctttagagagatcatgcaagtcat

SEQ ID NO: 2340683 - DNA, 25 bp, Homo sapien
cccaacaggcatcaattttgccatc

SEQ ID NO: 2340684 - DNA, 25 bp, Homo sapien
ccaacaggcatcaattttgccatct

SEQ ID NO: 2340685 - DNA, 25 bp, Homo sapien
gagttccaaacgtctcagcccatga

SEQ ID NO: 2340686 - DNA, 25 bp, Homo sapien
gctgagttccaaacgtctcagccca

SEQ ID NO: 2340687 - DNA, 25 bp, Homo sapien
ccaaacgtctcagcccatgaggttc

SEQ ID NO: 2340688 - DNA, 25 bp, Homo sapien
gttccaaacgtctcagcccatgagg

SEQ ID NO: 2340689 - DNA, 25 bp, Homo sapien
atctctggagcagctgatgcttcaa

SEQ ID NO: 2340690 - DNA, 25 bp, Homo sapien
gatgtgatgcacaaactgttcttca

SEQ ID NO: 2340691 - DNA, 25 bp, Homo sapien
tgatgtgatgcacaaactgttcttc

SEQ ID NO: 2340692 - DNA, 25 bp, Homo sapien
tgtgatgcacaaactgttcttcaga

SEQ ID NO: 2340693 - DNA, 25 bp, Homo sapien
gatgcacaaactgttcttcagattc

SEQ ID NO: 2340694 - DNA, 25 bp, Homo sapien
ccatatcgattggtattgtagccac

SEQ ID NO: 2340695 - DNA, 25 bp, Homo sapien
ggtcacagcgaatacagaccttgga

SEQ ID NO: 2340696 - DNA, 25 bp, Homo sapien
attggtattgtagccacagtggtca

SEQ ID NO: 2340697 - DNA, 25 bp, Homo sapien
tatagggaccatatcgattggtatt

SEQ ID NO: 2340698 - DNA, 25 bp, Homo sapien
gtggtactgagcatcatcgtggagg

SEQ ID NO: 2340699 - DNA, 25 bp, Homo sapien
caagaatcaaggtggtactgagcat

SEQ ID NO: 2340700 - DNA, 25 bp, Homo sapien
aaggtggtactgagcatcatcgtgg

SEQ ID NO: 2340701 - DNA, 25 bp, Homo sapien
tcaagaatcaaggtggtactgagca

SEQ ID NO: 2340702 - DNA, 25 bp, Homo sapien
attctactttgccttcgggcacttg

SEQ ID NO: 2340703 - DNA, 25 bp, Homo sapien
tcattctactttgccttcgggcact

SEQ ID NO: 2340704 - DNA, 25 bp, Homo sapien
tctactttgccttcgggcacttgaa

SEQ ID NO: 2340705 - DNA, 25 bp, Homo sapien
ctactttgccttcgggcacttgaaa

SEQ ID NO: 2340706 - DNA, 25 bp, Homo sapien
gccttgccacttggctccttctcag

SEQ ID NO: 2340707 - DNA, 25 bp, Homo sapien
tgctctgctctaatgaccgcatctc

SEQ ID NO: 2340708 - DNA, 25 bp, Homo sapien
gcctgcactgacaaatgcttgcagc

SEQ ID NO: 2340709 - DNA, 25 bp, Homo sapien
aatgaccgcatctcattctgccttg

SEQ ID NO: 2340710 - DNA, 25 bp, Homo sapien
cataaaggtagtaactattgtctaa

SEQ ID NO: 2340711 - DNA, 25 bp, Homo sapien
gtttgtagatgtccaggaaatctgc

SEQ ID NO: 2340712 - DNA, 25 bp, Homo sapien
tttgtagatgtccaggaaatctgct

SEQ ID NO: 2340713 - DNA, 25 bp, Homo sapien
tctgcttcataaaggtagtaactat

SEQ ID NO: 2340714 - DNA, 25 bp, Homo sapien
aattagtgtatttcccatgtaggcc

SEQ ID NO: 2340715 - DNA, 25 bp, Homo sapien
gggaatacctcccacaatatctaca

SEQ ID NO: 2340716 - DNA, 25 bp, Homo sapien
gagttactgacttttattcctttga

SEQ ID NO: 2340717 - DNA, 25 bp, Homo sapien
gatggtgatcttctgttctcattca

SEQ ID NO: 2340718 - DNA, 25 bp, Homo sapien
taaagactttgagactgagagggtg

SEQ ID NO: 2340719 - DNA, 25 bp, Homo sapien
agagtcttgttctagcatgtgaagc

SEQ ID NO: 2340720 - DNA, 25 bp, Homo sapien
gaaaagcacttctgtccctagagtc

SEQ ID NO: 2340721 - DNA, 25 bp, Homo sapien
tctagaatagccctgtgaacgaggt

SEQ ID NO: 2340722 - DNA, 25 bp, Homo sapien
gggaggatgagggacttgaagttta

SEQ ID NO: 2340723 - DNA, 25 bp, Homo sapien
cttgaagtttatgtgaaacaagagc

SEQ ID NO: 2340724 - DNA, 25 bp, Homo sapien
gagggacttgaagtttatgtgaaac

SEQ ID NO: 2340725 - DNA, 25 bp, Homo sapien
gtgaaacaagagcaagaatatgcat

SEQ ID NO: 2340726 - DNA, 25 bp, Homo sapien
aaagcatgctcggaagcaggagaaa

SEQ ID NO: 2340727 - DNA, 25 bp, Homo sapien
gggaactgattgtgttgcaggatca

SEQ ID NO: 2340728 - DNA, 25 bp, Homo sapien
ttatgggccataatctaattccacg

SEQ ID NO: 2340729 - DNA, 25 bp, Homo sapien
taattaggaatttcagacatgactg

SEQ ID NO: 2340730 - DNA, 25 bp, Homo sapien
agggagaagcagatatcacccaatt

SEQ ID NO: 2340731 - DNA, 25 bp, Homo sapien
gaagcagatatcacccaatttctct

SEQ ID NO: 2340732 - DNA, 25 bp, Homo sapien
cagtaggtacgtagcgaagggagaa

SEQ ID NO: 2340733 - DNA, 25 bp, Homo sapien
cagcttaccagcagtaggtacgtag

SEQ ID NO: 2340734 - DNA, 25 bp, Homo sapien
acatgttctacagcaccaacttgct

SEQ ID NO: 2340735 - DNA, 25 bp, Homo sapien
tctacagcaccaacttgctcctgaa

SEQ ID NO: 2340736 - DNA, 25 bp, Homo sapien
catgttctacagcaccaacttgctc

SEQ ID NO: 2340737 - DNA, 25 bp, Homo sapien
tgttctacagcaccaacttgctcct

SEQ ID NO: 2340738 - DNA, 25 bp, Homo sapien
gaattaggtgctagcttcagggaat

SEQ ID NO: 2340739 - DNA, 25 bp, Homo sapien
tattgggccaggcaagaagaggaat

SEQ ID NO: 2340740 - DNA, 25 bp, Homo sapien
gccatggctactagcagtacaaaca

SEQ ID NO: 2340741 - DNA, 25 bp, Homo sapien
tgtctgtgagatcacattctgtttc

SEQ ID NO: 2340742 - DNA, 25 bp, Homo sapien
catgttcggcaacctctcttctgta

SEQ ID NO: 2340743 - DNA, 25 bp, Homo sapien
gttcggcaacctctcttctgtacca

SEQ ID NO: 2340744 - DNA, 25 bp, Homo sapien
taccatgttcggcaacctctcttct

SEQ ID NO: 2340745 - DNA, 25 bp, Homo sapien
accatgttcggcaacctctcttctg

SEQ ID NO: 2340746 - DNA, 25 bp, Homo sapien
gagatgtctccttgtaagcctataa

SEQ ID NO: 2340747 - DNA, 25 bp, Homo sapien
tagaagtggccaactgaaggatgca

SEQ ID NO: 2340748 - DNA, 25 bp, Homo sapien
attagtgagatatgcagctgtgggc

SEQ ID NO: 2340749 - DNA, 25 bp, Homo sapien
tagagcaacacgtatttacaaccca

SEQ ID NO: 2340750 - DNA, 25 bp, Homo sapien
tcttacctaggttcttagtatatgt

SEQ ID NO: 2340751 - DNA, 25 bp, Homo sapien
gctgtaggactaataagcaatattt

SEQ ID NO: 2340752 - DNA, 25 bp, Homo sapien
catttcttacctaggttcttagtat

SEQ ID NO: 2340753 - DNA, 25 bp, Homo sapien
ggtatcatctctgctgtaggactaa

SEQ ID NO: 2340754 - DNA, 25 bp, Homo sapien
ggatagcgttactttgtcaaaataa

SEQ ID NO: 2340755 - DNA, 25 bp, Homo sapien
ggcatttgcaggcacagttggatag

SEQ ID NO: 2340756 - DNA, 25 bp, Homo sapien
ttatgaagtcgcagggatttgcatg

SEQ ID NO: 2340757 - DNA, 25 bp, Homo sapien
aagtcgcagggatttgcatgtgttg

SEQ ID NO: 2340758 - DNA, 25 bp, Homo sapien
gttgccatagctcaaggaaccccag

SEQ ID NO: 2340759 - DNA, 25 bp, Homo sapien
taggacacaggttacactcctctgt

SEQ ID NO: 2340760 - DNA, 25 bp, Homo sapien
tagtaggccattcgttgccaatgtt

SEQ ID NO: 2340761 - DNA, 25 bp, Homo sapien
cctgggcttgcacactaggacacag

SEQ ID NO: 2340762 - DNA, 25 bp, Homo sapien
gacctttaccatacttgtaggatgg

SEQ ID NO: 2340763 - DNA, 25 bp, Homo sapien
agacctttaccatacttgtaggatg

SEQ ID NO: 2340764 - DNA, 25 bp, Homo sapien
ctttaccatacttgtaggatggcat

SEQ ID NO: 2340765 - DNA, 25 bp, Homo sapien
cctttaccatacttgtaggatggca

SEQ ID NO: 2340766 - DNA, 25 bp, Homo sapien
gattatggtcttgtcatgcacccca

SEQ ID NO: 2340767 - DNA, 25 bp, Homo sapien
tcaaaatgtgtagcagaaacccact

SEQ ID NO: 2340768 - DNA, 25 bp, Homo sapien
gaaactcgctggaactcatacaaaa

SEQ ID NO: 2340769 - DNA, 25 bp, Homo sapien
gggaatgtctatgccttcaagccaa

SEQ ID NO: 2340770 - DNA, 25 bp, Homo sapien
gaatggctttatgaccctgagagaa

SEQ ID NO: 2340771 - DNA, 25 bp, Homo sapien
caatagatggataggcaagtaaggt

SEQ ID NO: 2340772 - DNA, 25 bp, Homo sapien
gaactccaacacaatcaatagatgg

SEQ ID NO: 2340773 - DNA, 25 bp, Homo sapien
ccatgactgaattctcgcccttgaa

SEQ ID NO: 2340774 - DNA, 25 bp, Homo sapien
ctccatctgtataggtgttcggcat

SEQ ID NO: 2340775 - DNA, 25 bp, Homo sapien
gcttgcctccatctgtataggtgtt

SEQ ID NO: 2340776 - DNA, 25 bp, Homo sapien
ctgcttgcctccatctgtataggtg

SEQ ID NO: 2340777 - DNA, 25 bp, Homo sapien
tgcctccatctgtataggtgttcgg

SEQ ID NO: 2340778 - DNA, 25 bp, Homo sapien
tatacagtttcataagacatacatt

SEQ ID NO: 2340779 - DNA, 25 bp, Homo sapien
tcataagacatacattcagtgatat

SEQ ID NO: 2340780 - DNA, 25 bp, Homo sapien
cttccacctctacatagagatatac

SEQ ID NO: 2340781 - DNA, 25 bp, Homo sapien
cattcagtgatatttggatagtggt

SEQ ID NO: 2340782 - DNA, 25 bp, Homo sapien
cccttcctctgccccaagatgttca

SEQ ID NO: 2340783 - DNA, 25 bp, Homo sapien
cttcctctgccccaagatgttcaag

SEQ ID NO: 2340784 - DNA, 25 bp, Homo sapien
tcctctgccccaagatgttcaaggg

SEQ ID NO: 2340785 - DNA, 25 bp, Homo sapien
cctctgccccaagatgttcaagggc

SEQ ID NO: 2340786 - DNA, 25 bp, Homo sapien
ctttgctggcgtttccacagtaccc

SEQ ID NO: 2340787 - DNA, 25 bp, Homo sapien
tgctggcgtttccacagtacccttc

SEQ ID NO: 2340788 - DNA, 25 bp, Homo sapien
acccttcctgcgaaactctcctttg

SEQ ID NO: 2340789 - DNA, 25 bp, Homo sapien
agtacccttcctgcgaaactctcct

SEQ ID NO: 2340790 - DNA, 25 bp, Homo sapien
cctcttaccattctgcatcagatga

SEQ ID NO: 2340791 - DNA, 25 bp, Homo sapien
gactcattgtagtaggggttaagtg

SEQ ID NO: 2340792 - DNA, 25 bp, Homo sapien
ttaccattctgcatcagatgaatct

SEQ ID NO: 2340793 - DNA, 25 bp, Homo sapien
tctgcatcagatgaatcttcacata

SEQ ID NO: 2340794 - DNA, 25 bp, Homo sapien
gagataaggcccgactataaagcgt

SEQ ID NO: 2340795 - DNA, 25 bp, Homo sapien
gaatatgaatcatctagctctagag

SEQ ID NO: 2340796 - DNA, 25 bp, Homo sapien
cccgactataaagcgtccttgagcg

SEQ ID NO: 2340797 - DNA, 25 bp, Homo sapien
tagctctagagataaggcccgacta

SEQ ID NO: 2340798 - DNA, 25 bp, Homo sapien
ccggtgctgttgtagcccacaaaga

SEQ ID NO: 2340799 - DNA, 25 bp, Homo sapien
catgtctgaccagtgtcgcagctcc

SEQ ID NO: 2340800 - DNA, 25 bp, Homo sapien
tgtgccactgggcaataggtcgcct

SEQ ID NO: 2340801 - DNA, 25 bp, Homo sapien
cacaaagactttgccgatggcatcg

SEQ ID NO: 2340802 - DNA, 25 bp, Homo sapien
tataaagcgtttgctatgtctggcc

SEQ ID NO: 2340803 - DNA, 25 bp, Homo sapien
ttttaagaagtacggaccatcggca

SEQ ID NO: 2340804 - DNA, 25 bp, Homo sapien
aataggctgcccttccacgaaatgg

SEQ ID NO: 2340805 - DNA, 25 bp, Homo sapien
gaaactacgggtctaagcacacacg

SEQ ID NO: 2340806 - DNA, 25 bp, Homo sapien
tgaaaatcgcaaggcaatttgccgt

SEQ ID NO: 2340807 - DNA, 25 bp, Homo sapien
tgccgtaactgcaaagcaactcatc

SEQ ID NO: 2340808 - DNA, 25 bp, Homo sapien
gcaactcatcttcaatagaacttgg

SEQ ID NO: 2340809 - DNA, 25 bp, Homo sapien
ggattattgcctttccattcttgtg

SEQ ID NO: 2340810 - DNA, 25 bp, Homo sapien
gattgcttttgcacgcaaagctaag

SEQ ID NO: 2340811 - DNA, 25 bp, Homo sapien
tgcatgcaaatttcaagaattgggc

SEQ ID NO: 2340812 - DNA, 25 bp, Homo sapien
tctcagtgataacaaataataggca

SEQ ID NO: 2340813 - DNA, 25 bp, Homo sapien
aaggcttttaagtgacagcctcagc

SEQ ID NO: 2340814 - DNA, 25 bp, Homo sapien
tcaggattaagttccagtgcccact

SEQ ID NO: 2340815 - DNA, 25 bp, Homo sapien
agttccagtgcccacttattcttcc

SEQ ID NO: 2340816 - DNA, 25 bp, Homo sapien
ggattaagttccagtgcccacttat

SEQ ID NO: 2340817 - DNA, 25 bp, Homo sapien
ctagaaacaactaaaaggtcaggat

SEQ ID NO: 2340818 - DNA, 25 bp, Homo sapien
ccaggttcttgtgtggagcctttcc

SEQ ID NO: 2340819 - DNA, 25 bp, Homo sapien
agcccaggttcttgtgtggagcctt

SEQ ID NO: 2340820 - DNA, 25 bp, Homo sapien
ggcctcaattccctggtcagagttt

SEQ ID NO: 2340821 - DNA, 25 bp, Homo sapien
aattccctggtcagagttttcatta

SEQ ID NO: 2340822 - DNA, 25 bp, Homo sapien
acatactataattcagagctctgat

SEQ ID NO: 2340823 - DNA, 25 bp, Homo sapien
gagctctgattcctgttcgtttcct

SEQ ID NO: 2340824 - DNA, 25 bp, Homo sapien
agagctctgattcctgttcgtttcc

SEQ ID NO: 2340825 - DNA, 25 bp, Homo sapien
ctcagtgggggtgctttttgagcca

SEQ ID NO: 2340826 - DNA, 25 bp, Homo sapien
ggtgctcagtgggggtgctttttga

SEQ ID NO: 2340827 - DNA, 25 bp, Homo sapien
gtgggggtgctttttgagccaggat

SEQ ID NO: 2340828 - DNA, 25 bp, Homo sapien
aaggtgctcagtgggggtgcttttt

SEQ ID NO: 2340829 - DNA, 25 bp, Homo sapien
ttcaactgttgcatccacttcacgg

SEQ ID NO: 2340830 - DNA, 25 bp, Homo sapien
gcatccacttcacgggactgtcctt

SEQ ID NO: 2340831 - DNA, 25 bp, Homo sapien
aactgttgcatccacttcacgggac

SEQ ID NO: 2340832 - DNA, 25 bp, Homo sapien
tgttgcatccacttcacgggactgt

SEQ ID NO: 2340833 - DNA, 25 bp, Homo sapien
cagtgcctaaaacattgggtactca

SEQ ID NO: 2340834 - DNA, 25 bp, Homo sapien
ggaaaagatattctggctgccagtc

SEQ ID NO: 2340835 - DNA, 25 bp, Homo sapien
caaaatgggtgagaagacctacagc

SEQ ID NO: 2340836 - DNA, 25 bp, Homo sapien
ccatgctaatgggtatgacgttaca

SEQ ID NO: 2340837 - DNA, 25 bp, Homo sapien
caatggtcttgagtatgtacctagc

SEQ ID NO: 2340838 - DNA, 25 bp, Homo sapien
cattgacagccactccgtgtttccc

SEQ ID NO: 2340839 - DNA, 25 bp, Homo sapien
acaaggttatgcaatcactatataa

SEQ ID NO: 2340840 - DNA, 25 bp, Homo sapien
taaaagaacccacatacacacccat

SEQ ID NO: 2340841 - DNA, 25 bp, Homo sapien
caaaaacattgtgaacgtttgtcac

SEQ ID NO: 2340842 - DNA, 25 bp, Homo sapien
tgaggaccaaaaacattgtgaacgt

SEQ ID NO: 2340843 - DNA, 25 bp, Homo sapien
gtgattttgaggaccaaaaacattg

SEQ ID NO: 2340844 - DNA, 25 bp, Homo sapien
ctgggcttctttatggaacattttc

SEQ ID NO: 2340845 - DNA, 25 bp, Homo sapien
ggtaaatgcagaactattgctatta

SEQ ID NO: 2340846 - DNA, 25 bp, Homo sapien
agccgcagaacctcgtggtgttaca

SEQ ID NO: 2340847 - DNA, 25 bp, Homo sapien
tgctattatttccacatacgctttt

SEQ ID NO: 2340848 - DNA, 25 bp, Homo sapien
gcatagcccaatataaatcacatgg

SEQ ID NO: 2340849 - DNA, 25 bp, Homo sapien
tgtatcaggagaagcctcagcatgg

SEQ ID NO: 2340850 - DNA, 25 bp, Homo sapien
gaaactcaaatggattctcaagtcc

SEQ ID NO: 2340851 - DNA, 25 bp, Homo sapien
gacattggcatcctgacataacccc

SEQ ID NO: 2340852 - DNA, 25 bp, Homo sapien
ggtaacaataatgcgctttcatcaa

SEQ ID NO: 2340853 - DNA, 25 bp, Homo sapien
aacacattagtattgtgttagacag

SEQ ID NO: 2340854 - DNA, 25 bp, Homo sapien
tgaacacattagtattgtgttagac

SEQ ID NO: 2340855 - DNA, 25 bp, Homo sapien
ttgtggaatagtcaacttaatatag

SEQ ID NO: 2340856 - DNA, 25 bp, Homo sapien
cacattagtattgtgttagacagct

SEQ ID NO: 2340857 - DNA, 25 bp, Homo sapien
caactttccatctagtagtgtacga

SEQ ID NO: 2340858 - DNA, 25 bp, Homo sapien
gatctatatagtgcatgtcagtagc

SEQ ID NO: 2340859 - DNA, 25 bp, Homo sapien
gcagtcttagcattagcctgtctaa

SEQ ID NO: 2340860 - DNA, 25 bp, Homo sapien
tgaaaaaactgatgcatactgggaa

SEQ ID NO: 2340861 - DNA, 25 bp, Homo sapien
caacagttaccattagagaaggagg

SEQ ID NO: 2340862 - DNA, 25 bp, Homo sapien
tatagtagattagcactgtcacact

SEQ ID NO: 2340863 - DNA, 25 bp, Homo sapien
catgacttgcctccttgatttctga

SEQ ID NO: 2340864 - DNA, 25 bp, Homo sapien
caggtatgtggagcaatgtagtttt

SEQ ID NO: 2340865 - DNA, 25 bp, Homo sapien
cagaattactgcataagggcttccc

SEQ ID NO: 2340866 - DNA, 25 bp, Homo sapien
ttggagactcttacccagcatggga

SEQ ID NO: 2340867 - DNA, 25 bp, Homo sapien
tacccttagttatgtggcacacatg

SEQ ID NO: 2340868 - DNA, 25 bp, Homo sapien
cacatgacagggtggtatgccaggc

SEQ ID NO: 2340869 - DNA, 25 bp, Homo sapien
tacatattcatgttaagaaccccgt

SEQ ID NO: 2340870 - DNA, 25 bp, Homo sapien
ctaagttgaagaataacactgggac

SEQ ID NO: 2340871 - DNA, 25 bp, Homo sapien
gatgactcactcataaaggtttttg

SEQ ID NO: 2340872 - DNA, 25 bp, Homo sapien
ttttcatatgagagaatattccgct

SEQ ID NO: 2340873 - DNA, 25 bp, Homo sapien
ctgaagaagatgtctcaagtagata

SEQ ID NO: 2340874 - DNA, 25 bp, Homo sapien
tctcgaacagatagaagtgggttcc

SEQ ID NO: 2340875 - DNA, 25 bp, Homo sapien
caagtagatattctcgaacagatag

SEQ ID NO: 2340876 - DNA, 25 bp, Homo sapien
cctagatataacagggatgcaaatg

SEQ ID NO: 2340877 - DNA, 25 bp, Homo sapien
taaccaaaagctctatgaagggcag

SEQ ID NO: 2340878 - DNA, 25 bp, Homo sapien
tccatcactgaccttattttactga

SEQ ID NO: 2340879 - DNA, 25 bp, Homo sapien
gcagagtccatgtttgtgtttgctg

SEQ ID NO: 2340880 - DNA, 25 bp, Homo sapien
aagataatctgggagatctgtccta

SEQ ID NO: 2340881 - DNA, 25 bp, Homo sapien
taaaaatgaatgtccgagcttgttg

SEQ ID NO: 2340882 - DNA, 25 bp, Homo sapien
cagtcatgtgagtgagcctagaagc

SEQ ID NO: 2340883 - DNA, 25 bp, Homo sapien
ccagctgccatgtggtgaacaggcc

SEQ ID NO: 2340884 - DNA, 25 bp, Homo sapien
tgcgttatgaccgacactgcagctt

SEQ ID NO: 2340885 - DNA, 25 bp, Homo sapien
taagataatctgctagggtgcagga

SEQ ID NO: 2340886 - DNA, 25 bp, Homo sapien
tcagatggtcatttggtactaaagg

SEQ ID NO: 2340887 - DNA, 25 bp, Homo sapien
tactaaaggtgtcctgagggaagca

SEQ ID NO: 2340888 - DNA, 25 bp, Homo sapien
tgtctccgtttagctcatctcccaa

SEQ ID NO: 2340889 - DNA, 25 bp, Homo sapien
aacataatacatattgggaatgaag

SEQ ID NO: 2340890 - DNA, 25 bp, Homo sapien
atacatattgggaatgaagcactga

SEQ ID NO: 2340891 - DNA, 25 bp, Homo sapien
attatgacagtattccctaaaacat

SEQ ID NO: 2340892 - DNA, 25 bp, Homo sapien
gacagtattccctaaaacataatac

SEQ ID NO: 2340893 - DNA, 25 bp, Homo sapien
tccaggcagttcctatctgctacag

SEQ ID NO: 2340894 - DNA, 25 bp, Homo sapien
caggcagttcctatctgctacaggt

SEQ ID NO: 2340895 - DNA, 25 bp, Homo sapien
tagatccaggcagttcctatctgct

SEQ ID NO: 2340896 - DNA, 25 bp, Homo sapien
gatccaggcagttcctatctgctac

SEQ ID NO: 2340897 - DNA, 25 bp, Homo sapien
agtgcttagatgagtacgaagatga

SEQ ID NO: 2340898 - DNA, 25 bp, Homo sapien
gaaacgagaagatgcaattacacaa

SEQ ID NO: 2340899 - DNA, 25 bp, Homo sapien
tagatgagtacgaagatgatgaagc

SEQ ID NO: 2340900 - DNA, 25 bp, Homo sapien
cgagaagatgcaattacacaacaga

SEQ ID NO: 2340901 - DNA, 25 bp, Homo sapien
gagaataggctcttcggacagaatg

SEQ ID NO: 2340902 - DNA, 25 bp, Homo sapien
tatctgctgtattggagagcttgtt

SEQ ID NO: 2340903 - DNA, 25 bp, Homo sapien
gtaaatgtggtctcatagttaagag

SEQ ID NO: 2340904 - DNA, 25 bp, Homo sapien
gaatgtcttgagttcatatcacagc

SEQ ID NO: 2340905 - DNA, 25 bp, Homo sapien
gcaaatttatagagcagcatgacac

SEQ ID NO: 2340906 - DNA, 25 bp, Homo sapien
tgacacatagcagaccaaaatccat

SEQ ID NO: 2340907 - DNA, 25 bp, Homo sapien
gagcagcatgacacatagcagacca

SEQ ID NO: 2340908 - DNA, 25 bp, Homo sapien
catacgaacttgtgcaaatttatag

SEQ ID NO: 2340909 - DNA, 25 bp, Homo sapien
cctgaaagtttagacattcacatac

SEQ ID NO: 2340910 - DNA, 25 bp, Homo sapien
ctgaaagtttagacattcacatact

SEQ ID NO: 2340911 - DNA, 25 bp, Homo sapien
gcctgaaagtttagacattcacata

SEQ ID NO: 2340912 - DNA, 25 bp, Homo sapien
ttgattcctatcttgggaaaatttc

SEQ ID NO: 2340913 - DNA, 25 bp, Homo sapien
gttgcttgcaatgtctcttaacttg

SEQ ID NO: 2340914 - DNA, 25 bp, Homo sapien
gattactccattccactattacatg

SEQ ID NO: 2340915 - DNA, 25 bp, Homo sapien
taatatcaaatgtccaatcagtgcc

SEQ ID NO: 2340916 - DNA, 25 bp, Homo sapien
gatctatacattatagttgcttgca

SEQ ID NO: 2340917 - DNA, 25 bp, Homo sapien
cagacatacttcttgagcgcctcct

SEQ ID NO: 2340918 - DNA, 25 bp, Homo sapien
cattgttcatctgacagcggtctta

SEQ ID NO: 2340919 - DNA, 25 bp, Homo sapien
tacccctgctttgagtaagagaaca

SEQ ID NO: 2340920 - DNA, 25 bp, Homo sapien
tgtctctgtccgtttcaagctgcag

SEQ ID NO: 2340921 - DNA, 25 bp, Homo sapien
cagagaagggcaagagctcgggccc

SEQ ID NO: 2340922 - DNA, 25 bp, Homo sapien
gtcggctccgccatgctgacgcggg

SEQ ID NO: 2340923 - DNA, 25 bp, Homo sapien
gagccggacggcgtcccagagaagg

SEQ ID NO: 2340924 - DNA, 25 bp, Homo sapien
ggcagatcgagaagaggaagctgcg

SEQ ID NO: 2340925 - DNA, 25 bp, Homo sapien
gtggctaccggaccagcagcggcct

SEQ ID NO: 2340926 - DNA, 25 bp, Homo sapien
aggtcgtctcctggcatcctcgggg

SEQ ID NO: 2340927 - DNA, 25 bp, Homo sapien
cctttgggaatatggcgaccggtgg

SEQ ID NO: 2340928 - DNA, 25 bp, Homo sapien
gcctgaggtgagagcccgaccggcc

SEQ ID NO: 2340929 - DNA, 25 bp, Homo sapien
tacagccctaggagacagtgagctt

SEQ ID NO: 2340930 - DNA, 25 bp, Homo sapien
gagcttgtttctggggccgcctcag

SEQ ID NO: 2340931 - DNA, 25 bp, Homo sapien
atcccaagtacagccctaggagaca

SEQ ID NO: 2340932 - DNA, 25 bp, Homo sapien
gccctaggagacagtgagcttgttt

SEQ ID NO: 2340933 - DNA, 25 bp, Homo sapien
tctggccctgaagaatttagactca

SEQ ID NO: 2340934 - DNA, 25 bp, Homo sapien
cactttacatctttgtgggcttgca

SEQ ID NO: 2340935 - DNA, 25 bp, Homo sapien
tagactcatccttatgcccgtgtct

SEQ ID NO: 2340936 - DNA, 25 bp, Homo sapien
tgtaggcactttacatctttgtggg

SEQ ID NO: 2340937 - DNA, 25 bp, Homo sapien
taacccttgaggaagtacatttcag

SEQ ID NO: 2340938 - DNA, 25 bp, Homo sapien
caccgtggaggatcaaaatgaaagc

SEQ ID NO: 2340939 - DNA, 25 bp, Homo sapien
tcaggtcacttggatctcgtagtgc

SEQ ID NO: 2340940 - DNA, 25 bp, Homo sapien
tttggtccttgataagcaccccacg

SEQ ID NO: 2340941 - DNA, 25 bp, Homo sapien
ggctcacatcaaatgactagctaaa

SEQ ID NO: 2340942 - DNA, 25 bp, Homo sapien
taaaatagcagaggacagagtaaat

SEQ ID NO: 2340943 - DNA, 25 bp, Homo sapien
cggctctttattcgcaccactgcaa

SEQ ID NO: 2340944 - DNA, 25 bp, Homo sapien
tagttttgtcctatcacatgtagag

SEQ ID NO: 2340945 - DNA, 25 bp, Homo sapien
aatgctgatccccaggatagccagg

SEQ ID NO: 2340946 - DNA, 25 bp, Homo sapien
gctgatccccaggatagccaggaat

SEQ ID NO: 2340947 - DNA, 25 bp, Homo sapien
ctgataaatgctgatccccaggata

SEQ ID NO: 2340948 - DNA, 25 bp, Homo sapien
gataaatgctgatccccaggatagc

SEQ ID NO: 2340949 - DNA, 25 bp, Homo sapien
tccatgcaagagcagtgggctttac

SEQ ID NO: 2340950 - DNA, 25 bp, Homo sapien
agggaccaccgtagccacagagggt

SEQ ID NO: 2340951 - DNA, 25 bp, Homo sapien
gatcagggcgccatagtactctgga

SEQ ID NO: 2340952 - DNA, 25 bp, Homo sapien
catagtactctggattccatgcaag

SEQ ID NO: 2340953 - DNA, 25 bp, Homo sapien
ttttctgatttttgacaacaatatt

SEQ ID NO: 2340954 - DNA, 25 bp, Homo sapien
ttggaattttctgatttttgacaac

SEQ ID NO: 2340955 - DNA, 25 bp, Homo sapien
ggaattttctgatttttgacaacaa

SEQ ID NO: 2340956 - DNA, 25 bp, Homo sapien
gaattttctgatttttgacaacaat

SEQ ID NO: 2340957 - DNA, 25 bp, Homo sapien
taagggtaagtcagctggcaacaag

SEQ ID NO: 2340958 - DNA, 25 bp, Homo sapien
cctggtaatgctgggtaaagtgtca

SEQ ID NO: 2340959 - DNA, 25 bp, Homo sapien
tggcaacaagttctcttgatattcc

SEQ ID NO: 2340960 - DNA, 25 bp, Homo sapien
ggttgctctaggtatcacactacat

SEQ ID NO: 2340961 - DNA, 25 bp, Homo sapien
ggatggttgaatcttgctaattaac

SEQ ID NO: 2340962 - DNA, 25 bp, Homo sapien
tactatatcatcactaactgtagtc

SEQ ID NO: 2340963 - DNA, 25 bp, Homo sapien
gtgagagcacataatatctactctc

SEQ ID NO: 2340964 - DNA, 25 bp, Homo sapien
tacgttttcaagagtatactatatc

SEQ ID NO: 2340965 - DNA, 25 bp, Homo sapien
tatccccacttcttatgcttcttcc

SEQ ID NO: 2340966 - DNA, 25 bp, Homo sapien
atccccacttcttatgcttcttccc

SEQ ID NO: 2340967 - DNA, 25 bp, Homo sapien
ctatccccacttcttatgcttcttc

SEQ ID NO: 2340968 - DNA, 25 bp, Homo sapien
tcagggactccttgcacaggccagt

SEQ ID NO: 2340969 - DNA, 25 bp, Homo sapien
agggactccttgcacaggccagtgg

SEQ ID NO: 2340970 - DNA, 25 bp, Homo sapien
cagggactccttgcacaggccagtg

SEQ ID NO: 2340971 - DNA, 25 bp, Homo sapien
ttcagggactccttgcacaggccag

SEQ ID NO: 2340972 - DNA, 25 bp, Homo sapien
ggataccaatttgaataatttctga

SEQ ID NO: 2340973 - DNA, 25 bp, Homo sapien
tctgtgtaccaatttggacaaatgt

SEQ ID NO: 2340974 - DNA, 25 bp, Homo sapien
atattgtgataatttgcacagcatt

SEQ ID NO: 2340975 - DNA, 25 bp, Homo sapien
tttatgcaatctgtgtaccaatttg

SEQ ID NO: 2340976 - DNA, 25 bp, Homo sapien
gaactgtatgaatggtaggtctgaa

SEQ ID NO: 2340977 - DNA, 25 bp, Homo sapien
tatgctcttactaccaagctcagga

SEQ ID NO: 2340978 - DNA, 25 bp, Homo sapien
aaaccaagtacatagtgacgatggc

SEQ ID NO: 2340979 - DNA, 25 bp, Homo sapien
tgcacaacagttaggcatgctatgg

SEQ ID NO: 2340980 - DNA, 25 bp, Homo sapien
tttgatttttagaccaccacatggc

SEQ ID NO: 2340981 - DNA, 25 bp, Homo sapien
tttttagaccaccacatggcatgct

SEQ ID NO: 2340982 - DNA, 25 bp, Homo sapien
tagaccaccacatggcatgcttgac

SEQ ID NO: 2340983 - DNA, 25 bp, Homo sapien
caccacatggcatgcttgactattt

SEQ ID NO: 2340984 - DNA, 25 bp, Homo sapien
agtgttcaaggccagatatgcctca

SEQ ID NO: 2340985 - DNA, 25 bp, Homo sapien
cacattcattttagcaggtactgag

SEQ ID NO: 2340986 - DNA, 25 bp, Homo sapien
cctggaactgaattgcttggtggaa

SEQ ID NO: 2340987 - DNA, 25 bp, Homo sapien
gatgtgccacagtttcgagtttttc

SEQ ID NO: 2340988 - DNA, 25 bp, Homo sapien
tccaggttttagtgagccagaagag

SEQ ID NO: 2340989 - DNA, 25 bp, Homo sapien
tgtctatatctggtgcttctctttc

SEQ ID NO: 2340990 - DNA, 25 bp, Homo sapien
tgagccagaagagggtctaaaaccc

SEQ ID NO: 2340991 - DNA, 25 bp, Homo sapien
ctctttcttcctgaatccaggtttt

SEQ ID NO: 2340992 - DNA, 25 bp, Homo sapien
gctcaaaggtctaggagtagtcata

SEQ ID NO: 2340993 - DNA, 25 bp, Homo sapien
aaactgtcttgccttgattctgaaa

SEQ ID NO: 2340994 - DNA, 25 bp, Homo sapien
tctcttatggcctgtacctaaaacg

SEQ ID NO: 2340995 - DNA, 25 bp, Homo sapien
tgtacaagtttagcctcatcagttg

SEQ ID NO: 2340996 - DNA, 25 bp, Homo sapien
cagctttgagctggtcagatagtac

SEQ ID NO: 2340997 - DNA, 25 bp, Homo sapien
ccagtacaggatacaacaggtaggc

SEQ ID NO: 2340998 - DNA, 25 bp, Homo sapien
taaactgtgcctgtgcttaatgtcc

SEQ ID NO: 2340999 - DNA, 25 bp, Homo sapien
gcaaattgaccaggaattccaaggg

SEQ ID NO: 2341000 - DNA, 25 bp, Homo sapien
agccacgatcgtgccagtgcactcc

SEQ ID NO: 2341001 - DNA, 25 bp, Homo sapien
tgagccacgatcgtgccagtgcact

SEQ ID NO: 2341002 - DNA, 25 bp, Homo sapien
cacgatcgtgccagtgcactccaac

SEQ ID NO: 2341003 - DNA, 25 bp, Homo sapien
ccacgatcgtgccagtgcactccaa

SEQ ID NO: 2341004 - DNA, 25 bp, Homo sapien
tactttgaagatattcttcataggg

SEQ ID NO: 2341005 - DNA, 25 bp, Homo sapien
tttgaagatattcttcatagggctg

SEQ ID NO: 2341006 - DNA, 25 bp, Homo sapien
agatattcttcatagggctgggcac

SEQ ID NO: 2341007 - DNA, 25 bp, Homo sapien
tgaagatattcttcatagggctggg

SEQ ID NO: 2341008 - DNA, 25 bp, Homo sapien
gctatttctgctattaatggacaca

SEQ ID NO: 2341009 - DNA, 25 bp, Homo sapien
tgggcaaataccatgcacgcagact

SEQ ID NO: 2341010 - DNA, 25 bp, Homo sapien
caaaatgacacactagtagagacct

SEQ ID NO: 2341011 - DNA, 25 bp, Homo sapien
tagagacctagattgtattcccact

SEQ ID NO: 2341012 - DNA, 25 bp, Homo sapien
ggcctatagacttgtggagtaaggc

SEQ ID NO: 2341013 - DNA, 25 bp, Homo sapien
ggacttaagtagttctcctgactca

SEQ ID NO: 2341014 - DNA, 25 bp, Homo sapien
tatcaggtattctaccagacagtgg

SEQ ID NO: 2341015 - DNA, 25 bp, Homo sapien
taaggcagattgtaaatgcattgcg

SEQ ID NO: 2341016 - DNA, 25 bp, Homo sapien
tagtagagggacaccatagcaagac

SEQ ID NO: 2341017 - DNA, 25 bp, Homo sapien
gaggagctagggatctcaggaccca

SEQ ID NO: 2341018 - DNA, 25 bp, Homo sapien
caccaagctgttatgaggcacccta

SEQ ID NO: 2341019 - DNA, 25 bp, Homo sapien
tcatagctgcaaaggccaagtaggg

SEQ ID NO: 2341020 - DNA, 25 bp, Homo sapien
tcataactgatagtagcattgggca

SEQ ID NO: 2341021 - DNA, 25 bp, Homo sapien
cattcatatgttgttatgtgggcca

SEQ ID NO: 2341022 - DNA, 25 bp, Homo sapien
tagggcaaacttatctagaagagag

SEQ ID NO: 2341023 - DNA, 25 bp, Homo sapien
gaagtgcttaattctgtctaggcca

SEQ ID NO: 2341024 - DNA, 25 bp, Homo sapien
gctgccttccagcatgacatttggc

SEQ ID NO: 2341025 - DNA, 25 bp, Homo sapien
cacttatgttattggcaggccttgc

SEQ ID NO: 2341026 - DNA, 25 bp, Homo sapien
tatcccaggttgtgagtgatccagg

SEQ ID NO: 2341027 - DNA, 25 bp, Homo sapien
cacaagtgtgtgactaccatgaggt

SEQ ID NO: 2341028 - DNA, 25 bp, Homo sapien
aaaagttgtcagatagttttaagag

SEQ ID NO: 2341029 - DNA, 25 bp, Homo sapien
tgttttagctgcgtaagctattggt

SEQ ID NO: 2341030 - DNA, 25 bp, Homo sapien
gagttgcagattagtatggaagata

SEQ ID NO: 2341031 - DNA, 25 bp, Homo sapien
gaaaggcggacaacctgctaaaagc

SEQ ID NO: 2341032 - DNA, 25 bp, Homo sapien
caacgactcggcgtagctgagacag

SEQ ID NO: 2341033 - DNA, 25 bp, Homo sapien
agatctgccctgtagagccttgcgg

SEQ ID NO: 2341034 - DNA, 25 bp, Homo sapien
tccattcaaataacgcggccaatag

SEQ ID NO: 2341035 - DNA, 25 bp, Homo sapien
ataggaaaatcctccgccctgagcc

SEQ ID NO: 2341036 - DNA, 25 bp, Homo sapien
gcatcttgacccttagagccacgaa

SEQ ID NO: 2341037 - DNA, 25 bp, Homo sapien
tacaaatcctatgtgtgtgcgcgtg

SEQ ID NO: 2341038 - DNA, 25 bp, Homo sapien
taccacataggccataacgttcttg

SEQ ID NO: 2341039 - DNA, 25 bp, Homo sapien
catgggtagtacgagacaggcttaa

SEQ ID NO: 2341040 - DNA, 25 bp, Homo sapien
ggaatgtcagtagtgtgattaaact

SEQ ID NO: 2341041 - DNA, 25 bp, Homo sapien
caaatctaagctgtgcatgtcagca

SEQ ID NO: 2341042 - DNA, 25 bp, Homo sapien
tagctaagcctggtggtgcacgcgc

SEQ ID NO: 2341043 - DNA, 25 bp, Homo sapien
gatctcattctgacaatcttgtgca

SEQ ID NO: 2341044 - DNA, 25 bp, Homo sapien
tgctatcagcttaaataagggaagg

SEQ ID NO: 2341045 - DNA, 25 bp, Homo sapien
ttccttgccacaaacctgtcctgag

SEQ ID NO: 2341046 - DNA, 25 bp, Homo sapien
gaagttgatattcccacctgtcaaa

SEQ ID NO: 2341047 - DNA, 25 bp, Homo sapien
taattccaatcagatcactagccct

SEQ ID NO: 2341048 - DNA, 25 bp, Homo sapien
aagaaaccaggccagtgccctagag

SEQ ID NO: 2341049 - DNA, 25 bp, Homo sapien
taaggatacattcctacataatcac

SEQ ID NO: 2341050 - DNA, 25 bp, Homo sapien
caaagtttacaagcttaattagtca

SEQ ID NO: 2341051 - DNA, 25 bp, Homo sapien
tcacattattacatcttagaacaga

SEQ ID NO: 2341052 - DNA, 25 bp, Homo sapien
gaaatttgagtctgccttaaaggat

SEQ ID NO: 2341053 - DNA, 25 bp, Homo sapien
tgatgcttcacaattcaagaggaca

SEQ ID NO: 2341054 - DNA, 25 bp, Homo sapien
catgtatgcagcacatttggaaaga

SEQ ID NO: 2341055 - DNA, 25 bp, Homo sapien
tgctagggtcccacttgcaaactac

SEQ ID NO: 2341056 - DNA, 25 bp, Homo sapien
tattttgagatgctgactatcacgg

SEQ ID NO: 2341057 - DNA, 25 bp, Homo sapien
ccgacctgctttgttgggatagccc

SEQ ID NO: 2341058 - DNA, 25 bp, Homo sapien
tccagtgccagttgtataattagaa

SEQ ID NO: 2341059 - DNA, 25 bp, Homo sapien
gcagtgactagctgctattttgaga

SEQ ID NO: 2341060 - DNA, 25 bp, Homo sapien
gccatccgagccattcgaatttcaa

SEQ ID NO: 2341061 - DNA, 25 bp, Homo sapien
taatgcttcgctttttcgtaaataa

SEQ ID NO: 2341062 - DNA, 25 bp, Homo sapien
ccgagccattcgaatttcaattctg

SEQ ID NO: 2341063 - DNA, 25 bp, Homo sapien
tgtattccttatgataatgcttcgc

SEQ ID NO: 2341064 - DNA, 25 bp, Homo sapien
gccattgatacctctgaccctgatg

SEQ ID NO: 2341065 - DNA, 25 bp, Homo sapien
cacgccattgatacctctgaccctg

SEQ ID NO: 2341066 - DNA, 25 bp, Homo sapien
ggctcacgccattgatacctctgac

SEQ ID NO: 2341067 - DNA, 25 bp, Homo sapien
tgggctcacgccattgatacctctg

SEQ ID NO: 2341068 - DNA, 25 bp, Homo sapien
catgttaaatgaagctttgttgatc

SEQ ID NO: 2341069 - DNA, 25 bp, Homo sapien
aagctttgttgatcttcacaagggt

SEQ ID NO: 2341070 - DNA, 25 bp, Homo sapien
tttgttgatcttcacaagggttcca

SEQ ID NO: 2341071 - DNA, 25 bp, Homo sapien
gcatgttaaatgaagctttgttgat

SEQ ID NO: 2341072 - DNA, 25 bp, Homo sapien
gccataatcacgcttgtagacgagt

SEQ ID NO: 2341073 - DNA, 25 bp, Homo sapien
ccataatcacgcttgtagacgagtt

SEQ ID NO: 2341074 - DNA, 25 bp, Homo sapien
taatcacgcttgtagacgagttcat

SEQ ID NO: 2341075 - DNA, 25 bp, Homo sapien
cataatcacgcttgtagacgagttc

SEQ ID NO: 2341076 - DNA, 25 bp, Homo sapien
tcatgaagcagatccaccatgcaaa

SEQ ID NO: 2341077 - DNA, 25 bp, Homo sapien
ctcatgaagcagatccaccatgcaa

SEQ ID NO: 2341078 - DNA, 25 bp, Homo sapien
aagcagatccaccatgcaaatgatg

SEQ ID NO: 2341079 - DNA, 25 bp, Homo sapien
tgaagcagatccaccatgcaaatga

SEQ ID NO: 2341080 - DNA, 25 bp, Homo sapien
tctcctccacacatcgagcatggaa

SEQ ID NO: 2341081 - DNA, 25 bp, Homo sapien
ttaagccacttgtttagagaagtcc

SEQ ID NO: 2341082 - DNA, 25 bp, Homo sapien
tcatcttcacattaagccacttgtt

SEQ ID NO: 2341083 - DNA, 25 bp, Homo sapien
cacacatcgagcatggaatttccaa

SEQ ID NO: 2341084 - DNA, 25 bp, Homo sapien
aatcttgtactctgcaaccttgctg

SEQ ID NO: 2341085 - DNA, 25 bp, Homo sapien
tgaatgtttattgctggagtataga

SEQ ID NO: 2341086 - DNA, 25 bp, Homo sapien
tgaatcttgtactctgcaaccttgc

SEQ ID NO: 2341087 - DNA, 25 bp, Homo sapien
gaatgtttattgctggagtatagaa

SEQ ID NO: 2341088 - DNA, 25 bp, Homo sapien
gcaggtagttgctgaggcaattctt

SEQ ID NO: 2341089 - DNA, 25 bp, Homo sapien
caggtagttgctgaggcaattcttc

SEQ ID NO: 2341090 - DNA, 25 bp, Homo sapien
cagcaggtagttgctgaggcaattc

SEQ ID NO: 2341091 - DNA, 25 bp, Homo sapien
acagcaggtagttgctgaggcaatt

SEQ ID NO: 2341092 - DNA, 25 bp, Homo sapien
ccagtaggctttcccaacagcacag

SEQ ID NO: 2341093 - DNA, 25 bp, Homo sapien
atgggctccagtaggctttcccaac

SEQ ID NO: 2341094 - DNA, 25 bp, Homo sapien
gctttcccaacagcacagacttcat

SEQ ID NO: 2341095 - DNA, 25 bp, Homo sapien
agtaggctttcccaacagcacagac

SEQ ID NO: 2341096 - DNA, 25 bp, Homo sapien
tcttgagccattatccaattgagac

SEQ ID NO: 2341097 - DNA, 25 bp, Homo sapien
atccaattgagacagttgaatcttc

SEQ ID NO: 2341098 - DNA, 25 bp, Homo sapien
atgacacccctgatactccaggccc

SEQ ID NO: 2341099 - DNA, 25 bp, Homo sapien
catttgtctcttgagccattatcca

SEQ ID NO: 2341100 - DNA, 25 bp, Homo sapien
gggattccatgaatccttcctgtaa

SEQ ID NO: 2341101 - DNA, 25 bp, Homo sapien
tccatgaatccttcctgtaacctct

SEQ ID NO: 2341102 - DNA, 25 bp, Homo sapien
gttccgactgtctcaaccctgatct

SEQ ID NO: 2341103 - DNA, 25 bp, Homo sapien
ccagagcttccttggttccgactgt

SEQ ID NO: 2341104 - DNA, 25 bp, Homo sapien
aattgtatggtacctagcacacagt

SEQ ID NO: 2341105 - DNA, 25 bp, Homo sapien
caatgagtttcatgcataggttata

SEQ ID NO: 2341106 - DNA, 25 bp, Homo sapien
gttactaaacttctctagccaatag

SEQ ID NO: 2341107 - DNA, 25 bp, Homo sapien
gccaatagtactcatatctgcaaga

SEQ ID NO: 2341108 - DNA, 25 bp, Homo sapien
acccgccatgatcaaggagctgcca

SEQ ID NO: 2341109 - DNA, 25 bp, Homo sapien
tcacccgccatgatcaaggagctgc

SEQ ID NO: 2341110 - DNA, 25 bp, Homo sapien
ctgccatctccaaggtcagccttta

SEQ ID NO: 2341111 - DNA, 25 bp, Homo sapien
ccatctccaaggtcagcctttatgc

SEQ ID NO: 2341112 - DNA, 25 bp, Homo sapien
gttttctttgctccactaacaaggc

SEQ ID NO: 2341113 - DNA, 25 bp, Homo sapien
ccatgattggtccatcgctcactgc

SEQ ID NO: 2341114 - DNA, 25 bp, Homo sapien
cactaacaaggctgcaggtcttccc

SEQ ID NO: 2341115 - DNA, 25 bp, Homo sapien
tttgctccactaacaaggctgcagg

SEQ ID NO: 2341116 - DNA, 25 bp, Homo sapien
taagacacttggcattgaggttcat

SEQ ID NO: 2341117 - DNA, 25 bp, Homo sapien
gataagacacttggcattgaggttc

SEQ ID NO: 2341118 - DNA, 25 bp, Homo sapien
aagataagacacttggcattgaggt

SEQ ID NO: 2341119 - DNA, 25 bp, Homo sapien
agataagacacttggcattgaggtt

SEQ ID NO: 2341120 - DNA, 25 bp, Homo sapien
tagacaagagctacttctaagtgaa

SEQ ID NO: 2341121 - DNA, 25 bp, Homo sapien
caggcaggatgccagtaaccttgat

SEQ ID NO: 2341122 - DNA, 25 bp, Homo sapien
tctaagtgaatcaggcaggatgcca

SEQ ID NO: 2341123 - DNA, 25 bp, Homo sapien
caaccttcatattggtatagacaag

SEQ ID NO: 2341124 - DNA, 25 bp, Homo sapien
tctgtcctcctccaagaggtgtggg

SEQ ID NO: 2341125 - DNA, 25 bp, Homo sapien
tgtcctcctccaagaggtgtgggca

SEQ ID NO: 2341126 - DNA, 25 bp, Homo sapien
ctttctgtcctcctccaagaggtgt

SEQ ID NO: 2341127 - DNA, 25 bp, Homo sapien
ttctgtcctcctccaagaggtgtgg

SEQ ID NO: 2341128 - DNA, 25 bp, Homo sapien
gcagcagagaccaacatgcctccgg

SEQ ID NO: 2341129 - DNA, 25 bp, Homo sapien
catgcctccggggaacgatgtccag

SEQ ID NO: 2341130 - DNA, 25 bp, Homo sapien
gaacgatgtccaggtggaagaacca

SEQ ID NO: 2341131 - DNA, 25 bp, Homo sapien
cagcagagaccaacatgcctccggg

SEQ ID NO: 2341132 - DNA, 25 bp, Homo sapien
ccagtaagagctgatatagagccct

SEQ ID NO: 2341133 - DNA, 25 bp, Homo sapien
atatagagccctaaatcatcagaga

SEQ ID NO: 2341134 - DNA, 25 bp, Homo sapien
taagagctgatatagagccctaaat

SEQ ID NO: 2341135 - DNA, 25 bp, Homo sapien
gagctgatatagagccctaaatcat

SEQ ID NO: 2341136 - DNA, 25 bp, Homo sapien
attatccttttggtgtaggcgtcct

SEQ ID NO: 2341137 - DNA, 25 bp, Homo sapien
aacattatccttttggtgtaggcgt

SEQ ID NO: 2341138 - DNA, 25 bp, Homo sapien
cagagcaaagctatttcttgcttct

SEQ ID NO: 2341139 - DNA, 25 bp, Homo sapien
ccagagcaaagctatttcttgcttc

SEQ ID NO: 2341140 - DNA, 25 bp, Homo sapien
ctgcagtgaaaatatactagttccc

SEQ ID NO: 2341141 - DNA, 25 bp, Homo sapien
tgaaaatatactagttcccttggaa

SEQ ID NO: 2341142 - DNA, 25 bp, Homo sapien
gttacatgcaaaattgttatcatta

SEQ ID NO: 2341143 - DNA, 25 bp, Homo sapien
tatcattatctcccaaaagctgcag

SEQ ID NO: 2341144 - DNA, 25 bp, Homo sapien
cagccctgaaaactttcccttcaca

SEQ ID NO: 2341145 - DNA, 25 bp, Homo sapien
ctgaaaactttcccttcacaccctg

SEQ ID NO: 2341146 - DNA, 25 bp, Homo sapien
tgtgctgctaaaagagctcttttct

SEQ ID NO: 2341147 - DNA, 25 bp, Homo sapien
tgctgctaaaagagctcttttctgt

SEQ ID NO: 2341148 - DNA, 25 bp, Homo sapien
tcttttctgtcgattttcattaaac

SEQ ID NO: 2341149 - DNA, 25 bp, Homo sapien
gctaaaagagctcttttctgtcgat

SEQ ID NO: 2341150 - DNA, 25 bp, Homo sapien
tgaaagcctgcaacttcagcactag

SEQ ID NO: 2341151 - DNA, 25 bp, Homo sapien
caacttcagcactagcttctttctg

SEQ ID NO: 2341152 - DNA, 25 bp, Homo sapien
gaattcatctggatttctgtgcaca

SEQ ID NO: 2341153 - DNA, 25 bp, Homo sapien
tgtgcacactgaaagcctgcaactt

SEQ ID NO: 2341154 - DNA, 25 bp, Homo sapien
agtatctcggagaagtagcttcaaa

SEQ ID NO: 2341155 - DNA, 25 bp, Homo sapien
atcatggaaaaagtatctcggagaa

SEQ ID NO: 2341156 - DNA, 25 bp, Homo sapien
attttgctctcaccccaattaatag

SEQ ID NO: 2341157 - DNA, 25 bp, Homo sapien
gaaaaagtatctcggagaagtagct

SEQ ID NO: 2341158 - DNA, 25 bp, Homo sapien
ggccctggttattctcagaaacaat

SEQ ID NO: 2341159 - DNA, 25 bp, Homo sapien
ttccctggtcatgcagttatcaggt

SEQ ID NO: 2341160 - DNA, 25 bp, Homo sapien
ttgtctaaatgtttggccctggtta

SEQ ID NO: 2341161 - DNA, 25 bp, Homo sapien
tccctggtcatgcagttatcaggtt

SEQ ID NO: 2341162 - DNA, 25 bp, Homo sapien
ctccattaaggcattcataaggaca

SEQ ID NO: 2341163 - DNA, 25 bp, Homo sapien
tagaacagaaagctccattaaggca

SEQ ID NO: 2341164 - DNA, 25 bp, Homo sapien
agaacagaaagctccattaaggcat

SEQ ID NO: 2341165 - DNA, 25 bp, Homo sapien
tccattaaggcattcataaggacaa

SEQ ID NO: 2341166 - DNA, 25 bp, Homo sapien
ccatacagtgtaccgaggctccaaa

SEQ ID NO: 2341167 - DNA, 25 bp, Homo sapien
caaatcaccacagtcctttgcaaaa

SEQ ID NO: 2341168 - DNA, 25 bp, Homo sapien
ggaagtaatagtagatgccatcgaa

SEQ ID NO: 2341169 - DNA, 25 bp, Homo sapien
catctctgccgttgcccatgtttgg

SEQ ID NO: 2341170 - DNA, 25 bp, Homo sapien
catgaccataaattcgaatttcctc

SEQ ID NO: 2341171 - DNA, 25 bp, Homo sapien
ccaaggcatttagggctgttatgaa

SEQ ID NO: 2341172 - DNA, 25 bp, Homo sapien
aagaacaagctgattgaccgataac

SEQ ID NO: 2341173 - DNA, 25 bp, Homo sapien
taacaagaatacaccgaaccaaggc

SEQ ID NO: 2341174 - DNA, 25 bp, Homo sapien
atacagtattgcatagaggtgatac

SEQ ID NO: 2341175 - DNA, 25 bp, Homo sapien
catacagtattgcatagaggtgata

SEQ ID NO: 2341176 - DNA, 25 bp, Homo sapien
tacagtattgcatagaggtgatact

SEQ ID NO: 2341177 - DNA, 25 bp, Homo sapien
tcatacagtattgcatagaggtgat

SEQ ID NO: 2341178 - DNA, 25 bp, Homo sapien
cagaacaaaagctatctaagaatga

SEQ ID NO: 2341179 - DNA, 25 bp, Homo sapien
ctaagaatgatgataaagtctcaat

SEQ ID NO: 2341180 - DNA, 25 bp, Homo sapien
tatttttaagtgactgagatacaat

SEQ ID NO: 2341181 - DNA, 25 bp, Homo sapien
tgataaagtctcaattacagatgac

SEQ ID NO: 2341182 - DNA, 25 bp, Homo sapien
cacaagaatgtagtcagctagtttc

SEQ ID NO: 2341183 - DNA, 25 bp, Homo sapien
cctcagacagcttgaggtagatccc

SEQ ID NO: 2341184 - DNA, 25 bp, Homo sapien
cagatatcccgtcccaagccaatga

SEQ ID NO: 2341185 - DNA, 25 bp, Homo sapien
ggccacatgatttccccttatggtc

SEQ ID NO: 2341186 - DNA, 25 bp, Homo sapien
gacaagtcttctgggtacaaacaac

SEQ ID NO: 2341187 - DNA, 25 bp, Homo sapien
ccaggttcctaaagcagtggataca

SEQ ID NO: 2341188 - DNA, 25 bp, Homo sapien
catagacatatctgacccaaatggg

SEQ ID NO: 2341189 - DNA, 25 bp, Homo sapien
gatacagaggtatcccgaccttctg

SEQ ID NO: 2341190 - DNA, 25 bp, Homo sapien
cgtgaagctttgatacagaagaaaa

SEQ ID NO: 2341191 - DNA, 25 bp, Homo sapien
ccacagagaactggactaaggatta

SEQ ID NO: 2341192 - DNA, 25 bp, Homo sapien
taaatcagcaattaccatctgactc

SEQ ID NO: 2341193 - DNA, 25 bp, Homo sapien
taactctaccacagagaactggact

SEQ ID NO: 2341194 - DNA, 25 bp, Homo sapien
ttcctctggcagactgacacccttg

SEQ ID NO: 2341195 - DNA, 25 bp, Homo sapien
gctgccccagttggctcactatgaa

SEQ ID NO: 2341196 - DNA, 25 bp, Homo sapien
tatactttccggaatccttcttgcc

SEQ ID NO: 2341197 - DNA, 25 bp, Homo sapien
gccagttcagctataattccgttca

SEQ ID NO: 2341198 - DNA, 25 bp, Homo sapien
ctatttgcaaacatagcgatgtctt

SEQ ID NO: 2341199 - DNA, 25 bp, Homo sapien
caaacatagcgatgtcttctgtata

SEQ ID NO: 2341200 - DNA, 25 bp, Homo sapien
catagcgatgtcttctgtatagtcc

SEQ ID NO: 2341201 - DNA, 25 bp, Homo sapien
tttgcaaacatagcgatgtcttctg

SEQ ID NO: 2341202 - DNA, 25 bp, Homo sapien
ctgagggtgtgagtacacatttggt

SEQ ID NO: 2341203 - DNA, 25 bp, Homo sapien
ggaaaatctgagggtgtgagtacac

SEQ ID NO: 2341204 - DNA, 25 bp, Homo sapien
atctgagggtgtgagtacacatttg

SEQ ID NO: 2341205 - DNA, 25 bp, Homo sapien
aaatctgagggtgtgagtacacatt

SEQ ID NO: 2341206 - DNA, 25 bp, Homo sapien
tttttacagatctatttgcaagatt

SEQ ID NO: 2341207 - DNA, 25 bp, Homo sapien
ctagactatgtttcatggtatgtgt

SEQ ID NO: 2341208 - DNA, 25 bp, Homo sapien
tttgcaagattttcagttctcacaa

SEQ ID NO: 2341209 - DNA, 25 bp, Homo sapien
tgtgcaaaaaaagatggcagtcact

SEQ ID NO: 2341210 - DNA, 25 bp, Homo sapien
gctggcaatatataagtatggatcg

SEQ ID NO: 2341211 - DNA, 25 bp, Homo sapien
actgcaacagtatctgacacttgaa

SEQ ID NO: 2341212 - DNA, 25 bp, Homo sapien
gcaaagatcattaacacagctggca

SEQ ID NO: 2341213 - DNA, 25 bp, Homo sapien
atggatcgatatactcatggcagct

SEQ ID NO: 2341214 - DNA, 25 bp, Homo sapien
gagcaggctctagcatactcagtgg

SEQ ID NO: 2341215 - DNA, 25 bp, Homo sapien
gctcggcaataggtttcatcatcat

SEQ ID NO: 2341216 - DNA, 25 bp, Homo sapien
tactcagtggctgctcggcaatagg

SEQ ID NO: 2341217 - DNA, 25 bp, Homo sapien
ccagtcttgaatagggtagccagca

SEQ ID NO: 2341218 - DNA, 25 bp, Homo sapien
gatggacaaagctatcatcacattt

SEQ ID NO: 2341219 - DNA, 25 bp, Homo sapien
agacattgcttctcaaatgtgcagg

SEQ ID NO: 2341220 - DNA, 25 bp, Homo sapien
tggtggacaacaactgatacagtcc

SEQ ID NO: 2341221 - DNA, 25 bp, Homo sapien
caagacaatggagattgctcccaag

SEQ ID NO: 2341222 - DNA, 25 bp, Homo sapien
caagtcccattgtccattacgaggc

SEQ ID NO: 2341223 - DNA, 25 bp, Homo sapien
tgaataagctaatccatgaaaaccg

SEQ ID NO: 2341224 - DNA, 25 bp, Homo sapien
gttcaatttttgaaccaactgaata

SEQ ID NO: 2341225 - DNA, 25 bp, Homo sapien
catgaaaaccgcatgggcaattttc

SEQ ID NO: 2341226 - DNA, 25 bp, Homo sapien
acagtcttgctcagtgcagttccaa

SEQ ID NO: 2341227 - DNA, 25 bp, Homo sapien
gctcacagggagctttctgtaaagt

SEQ ID NO: 2341228 - DNA, 25 bp, Homo sapien
taatgtcgaccatcaaaagttgtaa

SEQ ID NO: 2341229 - DNA, 25 bp, Homo sapien
gtaatcgtgaatttatcttttccag

SEQ ID NO: 2341230 - DNA, 25 bp, Homo sapien
ttcacgaggatgtattggcacatgc

SEQ ID NO: 2341231 - DNA, 25 bp, Homo sapien
tgagaatttgtcctcccctaccaag

SEQ ID NO: 2341232 - DNA, 25 bp, Homo sapien
cattcaggttgaagccttggttagg

SEQ ID NO: 2341233 - DNA, 25 bp, Homo sapien
taggactagtgagaatttgtcctcc

SEQ ID NO: 2341234 - DNA, 25 bp, Homo sapien
gaagccttggttaggactagtgaga

SEQ ID NO: 2341235 - DNA, 25 bp, Homo sapien
tttgacattcatagacggtgttctg

SEQ ID NO: 2341236 - DNA, 25 bp, Homo sapien
cggtgttctgaaatgctagggtaca

SEQ ID NO: 2341237 - DNA, 25 bp, Homo sapien
gaacatacgtaaatcagctttgaca

SEQ ID NO: 2341238 - DNA, 25 bp, Homo sapien
tgctagggtacaccaccaggactct

SEQ ID NO: 2341239 - DNA, 25 bp, Homo sapien
tcttcttttccatgcgctagtaagc

SEQ ID NO: 2341240 - DNA, 25 bp, Homo sapien
aaagtgccacacagacctaatgttc

SEQ ID NO: 2341241 - DNA, 25 bp, Homo sapien
taaggatgacagagtttgaatttca

SEQ ID NO: 2341242 - DNA, 25 bp, Homo sapien
tttccccatctatagcaaacagaat

SEQ ID NO: 2341243 - DNA, 25 bp, Homo sapien
ctttccccttccttctctcttcact

SEQ ID NO: 2341244 - DNA, 25 bp, Homo sapien
cattctttccccttccttctctctt

SEQ ID NO: 2341245 - DNA, 25 bp, Homo sapien
tccccttccttctctcttcactcct

SEQ ID NO: 2341246 - DNA, 25 bp, Homo sapien
tcattctttccccttccttctctct

SEQ ID NO: 2341247 - DNA, 25 bp, Homo sapien
caccactgggacatgaacaggtgca

SEQ ID NO: 2341248 - DNA, 25 bp, Homo sapien
tgaacaggtgcaaaacaggtagaag

SEQ ID NO: 2341249 - DNA, 25 bp, Homo sapien
catttgcgtgaagttgtggtgtacc

SEQ ID NO: 2341250 - DNA, 25 bp, Homo sapien
gaagaaactctccacgcatttgcgt

SEQ ID NO: 2341251 - DNA, 25 bp, Homo sapien
ccagggctaatatagatgtggcaag

SEQ ID NO: 2341252 - DNA, 25 bp, Homo sapien
gagcaaagagctcctggtggatgac

SEQ ID NO: 2341253 - DNA, 25 bp, Homo sapien
gagctcctggtggatgacatcacag

SEQ ID NO: 2341254 - DNA, 25 bp, Homo sapien
acatcacagtgtgctgcatacccaa

SEQ ID NO: 2341255 - DNA, 25 bp, Homo sapien
aggcatagtgggcaagagcattgca

SEQ ID NO: 2341256 - DNA, 25 bp, Homo sapien
catagtgggcaagagcattgcacag

SEQ ID NO: 2341257 - DNA, 25 bp, Homo sapien
aaatcaatgggaacaccgtgctggc

SEQ ID NO: 2341258 - DNA, 25 bp, Homo sapien
atgggaacaccgtgctggccgcaga

SEQ ID NO: 2341259 - DNA, 25 bp, Homo sapien
gagagagaaatgcaggaatggaggc

SEQ ID NO: 2341260 - DNA, 25 bp, Homo sapien
gtgatggtacagcatgcccttctgg

SEQ ID NO: 2341261 - DNA, 25 bp, Homo sapien
aaatgcaggaatggaggcagaacga

SEQ ID NO: 2341262 - DNA, 25 bp, Homo sapien
aggcagaacgaggaacagtgatggt

SEQ ID NO: 2341263 - DNA, 25 bp, Homo sapien
gccttccggacaattacagccttca

SEQ ID NO: 2341264 - DNA, 25 bp, Homo sapien
tagaatttgccttccggacaattac

SEQ ID NO: 2341265 - DNA, 25 bp, Homo sapien
ccggacaattacagccttcagcaca

SEQ ID NO: 2341266 - DNA, 25 bp, Homo sapien
acacaaaagttaagagtgtcttcat

SEQ ID NO: 2341267 - DNA, 25 bp, Homo sapien
tccaggttgataaacactgccccta

SEQ ID NO: 2341268 - DNA, 25 bp, Homo sapien
ctccaggttgataaacactgcccct

SEQ ID NO: 2341269 - DNA, 25 bp, Homo sapien
gttgataaacactgcccctataatg

SEQ ID NO: 2341270 - DNA, 25 bp, Homo sapien
caggttgataaacactgcccctata

SEQ ID NO: 2341271 - DNA, 25 bp, Homo sapien
gagggcgttgctaattcatcacatt

SEQ ID NO: 2341272 - DNA, 25 bp, Homo sapien
atttcacagtcccatttgaacactg

SEQ ID NO: 2341273 - DNA, 25 bp, Homo sapien
cagcagagggcgttgctaattcatc

SEQ ID NO: 2341274 - DNA, 25 bp, Homo sapien
cagagggcgttgctaattcatcaca

SEQ ID NO: 2341275 - DNA, 25 bp, Homo sapien
gtcatggcatgggagatatgaacac

SEQ ID NO: 2341276 - DNA, 25 bp, Homo sapien
catggcatgggagatatgaacacca

SEQ ID NO: 2341277 - DNA, 25 bp, Homo sapien
catgggagatatgaacaccaaaatt

SEQ ID NO: 2341278 - DNA, 25 bp, Homo sapien
tggcatgggagatatgaacaccaaa

SEQ ID NO: 2341279 - DNA, 25 bp, Homo sapien
ataagcacagacaaaatgtccttaa

SEQ ID NO: 2341280 - DNA, 25 bp, Homo sapien
cagatataagcacagacaaaatgtc

SEQ ID NO: 2341281 - DNA, 25 bp, Homo sapien
cttcagatataagcacagacaaaat

SEQ ID NO: 2341282 - DNA, 25 bp, Homo sapien
tataagcacagacaaaatgtcctta

SEQ ID NO: 2341283 - DNA, 25 bp, Homo sapien
tgcaggtgaagttcatggctaggtt

SEQ ID NO: 2341284 - DNA, 25 bp, Homo sapien
caccagctggtaattcagggtcagg

SEQ ID NO: 2341285 - DNA, 25 bp, Homo sapien
cacatgtagtctcacaattaacacc

SEQ ID NO: 2341286 - DNA, 25 bp, Homo sapien
cagccacttatacagggtgaggatg

SEQ ID NO: 2341287 - DNA, 25 bp, Homo sapien
aatacatgggcagctttcaggaaca

SEQ ID NO: 2341288 - DNA, 25 bp, Homo sapien
ggaacataacactttcctctgtgct

SEQ ID NO: 2341289 - DNA, 25 bp, Homo sapien
aacacggtgtagcaatcacttctcc

SEQ ID NO: 2341290 - DNA, 25 bp, Homo sapien
aggtgtaacacggtgtagcaatcac

SEQ ID NO: 2341291 - DNA, 25 bp, Homo sapien
tgcaattgaacattcctcgtcgaca

SEQ ID NO: 2341292 - DNA, 25 bp, Homo sapien
tgtgcaattgaacattcctcgtcga

SEQ ID NO: 2341293 - DNA, 25 bp, Homo sapien
attgaacattcctcgtcgacaaacg

SEQ ID NO: 2341294 - DNA, 25 bp, Homo sapien
caattgaacattcctcgtcgacaaa

SEQ ID NO: 2341295 - DNA, 25 bp, Homo sapien
cggtccccgtatattgtgcacactg

SEQ ID NO: 2341296 - DNA, 25 bp, Homo sapien
atatagtcatattctagtccatcaa

SEQ ID NO: 2341297 - DNA, 25 bp, Homo sapien
ctgatatagtcatattctagtccat

SEQ ID NO: 2341298 - DNA, 25 bp, Homo sapien
agaataataatgtcggtccccgtat

SEQ ID NO: 2341299 - DNA, 25 bp, Homo sapien
ctgggcaatgacagatatatctgaa

SEQ ID NO: 2341300 - DNA, 25 bp, Homo sapien
caatgacagatatatctgaatcatc

SEQ ID NO: 2341301 - DNA, 25 bp, Homo sapien
ggcaatgacagatatatctgaatca

SEQ ID NO: 2341302 - DNA, 25 bp, Homo sapien
cagatatatctgaatcatctgcact

SEQ ID NO: 2341303 - DNA, 25 bp, Homo sapien
tgtttgtaaggagtatcattcaggt

SEQ ID NO: 2341304 - DNA, 25 bp, Homo sapien
gaacaaacaatatcgttgtcaaagc

SEQ ID NO: 2341305 - DNA, 25 bp, Homo sapien
tcattcaggtaaatttcagtgtccc

SEQ ID NO: 2341306 - DNA, 25 bp, Homo sapien
tgtccccaactgaaatcaaaacact

SEQ ID NO: 2341307 - DNA, 25 bp, Homo sapien
tgcaatcaccacttcaaagatgtgt

SEQ ID NO: 2341308 - DNA, 25 bp, Homo sapien
gaatatctggttggtgcttatgaca

SEQ ID NO: 2341309 - DNA, 25 bp, Homo sapien
catacaagtgaaaattggaagtcga

SEQ ID NO: 2341310 - DNA, 25 bp, Homo sapien
cgaaagttatgtggagttgcaatca

SEQ ID NO: 2341311 - DNA, 25 bp, Homo sapien
ccttccaaagctggtaggtagattt

SEQ ID NO: 2341312 - DNA, 25 bp, Homo sapien
ctttctctggaaagtatactactat

SEQ ID NO: 2341313 - DNA, 25 bp, Homo sapien
caaagaatagtgatatctttctctg

SEQ ID NO: 2341314 - DNA, 25 bp, Homo sapien
gaatagttgtcttcctatcccaaag

SEQ ID NO: 2341315 - DNA, 25 bp, Homo sapien
tatctccaaatacccgagcatttct

SEQ ID NO: 2341316 - DNA, 25 bp, Homo sapien
aatacccgagcatttctcacttcca

SEQ ID NO: 2341317 - DNA, 25 bp, Homo sapien
caactatctccaaatacccgagcat

SEQ ID NO: 2341318 - DNA, 25 bp, Homo sapien
tccaaatacccgagcatttctcact

SEQ ID NO: 2341319 - DNA, 25 bp, Homo sapien
cagggtttaattgtttcatctggac

SEQ ID NO: 2341320 - DNA, 25 bp, Homo sapien
aaatatcactgtacaaaatggagca

SEQ ID NO: 2341321 - DNA, 25 bp, Homo sapien
tctttcttggcataaggaaatttgt

SEQ ID NO: 2341322 - DNA, 25 bp, Homo sapien
gaaatttgttttgatgtgcctcaca

SEQ ID NO: 2341323 - DNA, 25 bp, Homo sapien
gaaactcgagagttcattaaagtat

SEQ ID NO: 2341324 - DNA, 25 bp, Homo sapien
tgtcgtgttcacctcagtattatag

SEQ ID NO: 2341325 - DNA, 25 bp, Homo sapien
ctcagtattatagacacagtagaac

SEQ ID NO: 2341326 - DNA, 25 bp, Homo sapien
acagtagaacatattgaaactcgag

SEQ ID NO: 2341327 - DNA, 25 bp, Homo sapien
caccaagattgcagttacatgtatc

SEQ ID NO: 2341328 - DNA, 25 bp, Homo sapien
gccaccaagattgcagttacatgta

SEQ ID NO: 2341329 - DNA, 25 bp, Homo sapien
gattgcagttacatgtatcttcatg

SEQ ID NO: 2341330 - DNA, 25 bp, Homo sapien
agtcgccaccaagattgcagttaca

SEQ ID NO: 2341331 - DNA, 25 bp, Homo sapien
tccaatgaattgatattccttcctg

SEQ ID NO: 2341332 - DNA, 25 bp, Homo sapien
gctatactagtgcacaaacactcac

SEQ ID NO: 2341333 - DNA, 25 bp, Homo sapien
acttgtatgcatatgcagctatact

SEQ ID NO: 2341334 - DNA, 25 bp, Homo sapien
gaattgatattccttcctgacaaca

SEQ ID NO: 2341335 - DNA, 25 bp, Homo sapien
tcattgtagtattcacaatcaagtg

SEQ ID NO: 2341336 - DNA, 25 bp, Homo sapien
ttcattgtagtattcacaatcaagt

SEQ ID NO: 2341337 - DNA, 25 bp, Homo sapien
cttcattgtagtattcacaatcaag

SEQ ID NO: 2341338 - DNA, 25 bp, Homo sapien
aaaagagcttcactagggactttgg

SEQ ID NO: 2341339 - DNA, 25 bp, Homo sapien
gctggggacccttataaactatgag

SEQ ID NO: 2341340 - DNA, 25 bp, Homo sapien
agagcttcactagggactttggtac

SEQ ID NO: 2341341 - DNA, 25 bp, Homo sapien
agaaaaagagcttcactagggactt

SEQ ID NO: 2341342 - DNA, 25 bp, Homo sapien
agcatatatggtccttctccaagtc

SEQ ID NO: 2341343 - DNA, 25 bp, Homo sapien
aataaactggtatgaacactgcttc

SEQ ID NO: 2341344 - DNA, 25 bp, Homo sapien
tgctggtcatattggcccccagaac

SEQ ID NO: 2341345 - DNA, 25 bp, Homo sapien
ttctcggcaaacagaaaacgcttct

SEQ ID NO: 2341346 - DNA, 25 bp, Homo sapien
gaaaggctgaattcgcctcccacag

SEQ ID NO: 2341347 - DNA, 25 bp, Homo sapien
tgtaaccaggaatccagaggccctg

SEQ ID NO: 2341348 - DNA, 25 bp, Homo sapien
tgatggtggaaaaatgttgctctcc

SEQ ID NO: 2341349 - DNA, 25 bp, Homo sapien
gctgtataactcaaatgcactgtaa

SEQ ID NO: 2341350 - DNA, 25 bp, Homo sapien
gtccttttgtagcagttcaaagcta

SEQ ID NO: 2341351 - DNA, 25 bp, Homo sapien
tccttttgtagcagttcaaagctat

SEQ ID NO: 2341352 - DNA, 25 bp, Homo sapien
agtccttttgtagcagttcaaagct

SEQ ID NO: 2341353 - DNA, 25 bp, Homo sapien
ttcagggtcactacatgttttaaaa

SEQ ID NO: 2341354 - DNA, 25 bp, Homo sapien
caaggttcatatctccattcacaca

SEQ ID NO: 2341355 - DNA, 25 bp, Homo sapien
taaaacagggtgtagcacaaggttc

SEQ ID NO: 2341356 - DNA, 25 bp, Homo sapien
cctgtaaggcactgctgcctggatt

SEQ ID NO: 2341357 - DNA, 25 bp, Homo sapien
tatttttagggcagtagggcaagca

SEQ ID NO: 2341358 - DNA, 25 bp, Homo sapien
atatttttagggcagtagggcaagc

SEQ ID NO: 2341359 - DNA, 25 bp, Homo sapien
tttttagggcagtagggcaagcatc

SEQ ID NO: 2341360 - DNA, 25 bp, Homo sapien
atttttagggcagtagggcaagcat

SEQ ID NO: 2341361 - DNA, 25 bp, Homo sapien
agtctcgtggataaacacacttgag

SEQ ID NO: 2341362 - DNA, 25 bp, Homo sapien
tcgtggataaacacacttgagggtg

SEQ ID NO: 2341363 - DNA, 25 bp, Homo sapien
tctcgtggataaacacacttgaggg

SEQ ID NO: 2341364 - DNA, 25 bp, Homo sapien
gtggataaacacacttgagggtgac

SEQ ID NO: 2341365 - DNA, 25 bp, Homo sapien
catgggcacagttggcttagctggt

SEQ ID NO: 2341366 - DNA, 25 bp, Homo sapien
tgtaaacatgggcacagttggctta

SEQ ID NO: 2341367 - DNA, 25 bp, Homo sapien
gctggtggcattaatgttggttctg

SEQ ID NO: 2341368 - DNA, 25 bp, Homo sapien
cagttggcttagctggtggcattaa

SEQ ID NO: 2341369 - DNA, 25 bp, Homo sapien
tgtagttggtgttagcatatcaaac

SEQ ID NO: 2341370 - DNA, 25 bp, Homo sapien
ctgtagttggtgttagcatatcaaa

SEQ ID NO: 2341371 - DNA, 25 bp, Homo sapien
gttggtgttagcatatcaaacacag

SEQ ID NO: 2341372 - DNA, 25 bp, Homo sapien
tagttggtgttagcatatcaaacac

SEQ ID NO: 2341373 - DNA, 25 bp, Homo sapien
gttcacttgaactggccttcctcgg

SEQ ID NO: 2341374 - DNA, 25 bp, Homo sapien
ggcatttccacgtcctttgggcaat

SEQ ID NO: 2341375 - DNA, 25 bp, Homo sapien
gaccagttgtataactgccattcca

SEQ ID NO: 2341376 - DNA, 25 bp, Homo sapien
ggctacaatcataaacaggatcaaa

SEQ ID NO: 2341377 - DNA, 25 bp, Homo sapien
gatatgagcaactataatttcacca

SEQ ID NO: 2341378 - DNA, 25 bp, Homo sapien
tcagttctgacaacatggaacaccg

SEQ ID NO: 2341379 - DNA, 25 bp, Homo sapien
catggaacatttttcgatatgagca

SEQ ID NO: 2341380 - DNA, 25 bp, Homo sapien
gaagccatgctatataatgctgcgt

SEQ ID NO: 2341381 - DNA, 25 bp, Homo sapien
tgccaaccgattgacaattatttta

SEQ ID NO: 2341382 - DNA, 25 bp, Homo sapien
cttgccaaccgattgacaattattt

SEQ ID NO: 2341383 - DNA, 25 bp, Homo sapien
ttcttgccaaccgattgacaattat

SEQ ID NO: 2341384 - DNA, 25 bp, Homo sapien
ctttcttgccaaccgattgacaatt

SEQ ID NO: 2341385 - DNA, 25 bp, Homo sapien
tcctctatggacagttcctgacttg

SEQ ID NO: 2341386 - DNA, 25 bp, Homo sapien
tacatacattgaaccagaatcctct

SEQ ID NO: 2341387 - DNA, 25 bp, Homo sapien
ggatgacaagttaaatcggaagcca

SEQ ID NO: 2341388 - DNA, 25 bp, Homo sapien
cactttatgattagtccagctggag

SEQ ID NO: 2341389 - DNA, 25 bp, Homo sapien
tttaataaatcaatgcactggctgc

SEQ ID NO: 2341390 - DNA, 25 bp, Homo sapien
catcatccggatcttcattgcaaat

SEQ ID NO: 2341391 - DNA, 25 bp, Homo sapien
tttgcatccttagatcatcatccgg

SEQ ID NO: 2341392 - DNA, 25 bp, Homo sapien
gctcagtacaattcctaacaggtct

SEQ ID NO: 2341393 - DNA, 25 bp, Homo sapien
ggtataattgatccacatcttttca

SEQ ID NO: 2341394 - DNA, 25 bp, Homo sapien
cacatatgcagaaagtgcatcacat

SEQ ID NO: 2341395 - DNA, 25 bp, Homo sapien
cttgttgcacagagccacatatgca

SEQ ID NO: 2341396 - DNA, 25 bp, Homo sapien
cattcatagttccaaaaataggtat

SEQ ID NO: 2341397 - DNA, 25 bp, Homo sapien
tctctggaatgcactgggctgaatg

SEQ ID NO: 2341398 - DNA, 25 bp, Homo sapien
aatgtggcctgtgaagaatagttcc

SEQ ID NO: 2341399 - DNA, 25 bp, Homo sapien
gaagtgtgtccatagaaccattggt

SEQ ID NO: 2341400 - DNA, 25 bp, Homo sapien
ggcatgttcttgcttcacaaggtcg

SEQ ID NO: 2341401 - DNA, 25 bp, Homo sapien
cacagtcaggttctatagggataat

SEQ ID NO: 2341402 - DNA, 25 bp, Homo sapien
aatgatgcccatgacaacttcagct

SEQ ID NO: 2341403 - DNA, 25 bp, Homo sapien
ggttggtcttcactatcagtgcatg

SEQ ID NO: 2341404 - DNA, 25 bp, Homo sapien
tctcgttcacaaactggcgtgggct

SEQ ID NO: 2341405 - DNA, 25 bp, Homo sapien
aaatattagtgaacacaactaaaat

SEQ ID NO: 2341406 - DNA, 25 bp, Homo sapien
aatattagtgaacacaactaaaatc

SEQ ID NO: 2341407 - DNA, 25 bp, Homo sapien
gtgaacacaactaaaatctgccaac

SEQ ID NO: 2341408 - DNA, 25 bp, Homo sapien
tagtgaacacaactaaaatctgcca

SEQ ID NO: 2341409 - DNA, 25 bp, Homo sapien
cacatttgtactgtggacagcaaga

SEQ ID NO: 2341410 - DNA, 25 bp, Homo sapien
aaagaggactgtggccaacaatcaa

SEQ ID NO: 2341411 - DNA, 25 bp, Homo sapien
gactatttgtacatgttggaatgct

SEQ ID NO: 2341412 - DNA, 25 bp, Homo sapien
gtttcacacaaagtcgtgtcacatc

SEQ ID NO: 2341413 - DNA, 25 bp, Homo sapien
ctggggcatttcaatgggtcacatt

SEQ ID NO: 2341414 - DNA, 25 bp, Homo sapien
caaggttcttcctgtcgaacttgaa

SEQ ID NO: 2341415 - DNA, 25 bp, Homo sapien
acaacaaggttcttcctgtcgaact

SEQ ID NO: 2341416 - DNA, 25 bp, Homo sapien
ggttcttcctgtcgaacttgaatca

SEQ ID NO: 2341417 - DNA, 25 bp, Homo sapien
aacaaggttcttcctgtcgaacttg

SEQ ID NO: 2341418 - DNA, 25 bp, Homo sapien
tgtgtgctattaagatctactgtga

SEQ ID NO: 2341419 - DNA, 25 bp, Homo sapien
acagaagtgtgtgctattaagatct

SEQ ID NO: 2341420 - DNA, 25 bp, Homo sapien
tagtggaacaggtttggtgcaagat

SEQ ID NO: 2341421 - DNA, 25 bp, Homo sapien
atcatgacatagtggaacaggtttg

SEQ ID NO: 2341422 - DNA, 25 bp, Homo sapien
gcataggacaaaggtttggttcaca

SEQ ID NO: 2341423 - DNA, 25 bp, Homo sapien
cacaagattcatatcttctgcacag

SEQ ID NO: 2341424 - DNA, 25 bp, Homo sapien
cacagttgagtaatggcataggaca

SEQ ID NO: 2341425 - DNA, 25 bp, Homo sapien
catgttgggcaacattgaccagata

SEQ ID NO: 2341426 - DNA, 25 bp, Homo sapien
acaagttggcataataaggttttca

SEQ ID NO: 2341427 - DNA, 25 bp, Homo sapien
ttcacaagttggcataataaggttt

SEQ ID NO: 2341428 - DNA, 25 bp, Homo sapien
acttcacaagttggcataataaggt

SEQ ID NO: 2341429 - DNA, 25 bp, Homo sapien
cacaagttggcataataaggttttc

SEQ ID NO: 2341430 - DNA, 25 bp, Homo sapien
tatggtctattgcagtaaattctcc

SEQ ID NO: 2341431 - DNA, 25 bp, Homo sapien
cactctggaagttatggtctattgc

SEQ ID NO: 2341432 - DNA, 25 bp, Homo sapien
gatactgtatgcatccacaatcact

SEQ ID NO: 2341433 - DNA, 25 bp, Homo sapien
cacagagatactgtatgcatccaca

SEQ ID NO: 2341434 - DNA, 25 bp, Homo sapien
tccagacactctatagcataacaaa

SEQ ID NO: 2341435 - DNA, 25 bp, Homo sapien
tactttatcatggattgtccaggat

SEQ ID NO: 2341436 - DNA, 25 bp, Homo sapien
cagtgtaaaattcagagtgtgaaag

SEQ ID NO: 2341437 - DNA, 25 bp, Homo sapien
cagagtgtgaaagcccgtatggtta

SEQ ID NO: 2341438 - DNA, 25 bp, Homo sapien
catcacatttttttgaacaattcac

SEQ ID NO: 2341439 - DNA, 25 bp, Homo sapien
acatcacatttttttgaacaattca

SEQ ID NO: 2341440 - DNA, 25 bp, Homo sapien
aacatcacatttttttgaacaattc

SEQ ID NO: 2341441 - DNA, 25 bp, Homo sapien
accacaacaaccataatcacttggg

SEQ ID NO: 2341442 - DNA, 25 bp, Homo sapien
catttttgcaggtaccacaacaacc

SEQ ID NO: 2341443 - DNA, 25 bp, Homo sapien
cttggggatggagtatatacctggt

SEQ ID NO: 2341444 - DNA, 25 bp, Homo sapien
tacaactgatgttccattttccatg

SEQ ID NO: 2341445 - DNA, 25 bp, Homo sapien
cacattcatatgtggtgcaattgta

SEQ ID NO: 2341446 - DNA, 25 bp, Homo sapien
cattcatatgtggtgcaattgtagt

SEQ ID NO: 2341447 - DNA, 25 bp, Homo sapien
acattcatatgtggtgcaattgtag

SEQ ID NO: 2341448 - DNA, 25 bp, Homo sapien
attcatatgtggtgcaattgtagtg

SEQ ID NO: 2341449 - DNA, 25 bp, Homo sapien
cattttgcattcagtctcattaaaa

SEQ ID NO: 2341450 - DNA, 25 bp, Homo sapien
tttgcattcagtctcattaaaaggg

SEQ ID NO: 2341451 - DNA, 25 bp, Homo sapien
ttcagtctcattaaaagggggacag

SEQ ID NO: 2341452 - DNA, 25 bp, Homo sapien
tcagtctcattaaaagggggacaga

SEQ ID NO: 2341453 - DNA, 25 bp, Homo sapien
cattatgtataagccacaatgaaag

SEQ ID NO: 2341454 - DNA, 25 bp, Homo sapien
catgaaaataacacattcgccatta

SEQ ID NO: 2341455 - DNA, 25 bp, Homo sapien
ccattatgtataagccacaatgaaa

SEQ ID NO: 2341456 - DNA, 25 bp, Homo sapien
taacacattcgccattatgtataag

SEQ ID NO: 2341457 - DNA, 25 bp, Homo sapien
tataaagcttcacaatcccttcatt

SEQ ID NO: 2341458 - DNA, 25 bp, Homo sapien
cttcattataaagcttcacaatccc

SEQ ID NO: 2341459 - DNA, 25 bp, Homo sapien
tcattataaagcttcacaatccctt

SEQ ID NO: 2341460 - DNA, 25 bp, Homo sapien
cattataaagcttcacaatcccttc

SEQ ID NO: 2341461 - DNA, 25 bp, Homo sapien
gaccgatttaatgatcactttctgg

SEQ ID NO: 2341462 - DNA, 25 bp, Homo sapien
ttccttatgaccgatttaatgatca

SEQ ID NO: 2341463 - DNA, 25 bp, Homo sapien
cgatttaatgatcactttctggcat

SEQ ID NO: 2341464 - DNA, 25 bp, Homo sapien
tatgaccgatttaatgatcactttc

SEQ ID NO: 2341465 - DNA, 25 bp, Homo sapien
caacacttgcagaatcttaggtgac

SEQ ID NO: 2341466 - DNA, 25 bp, Homo sapien
cagaggcacagacaagtttcgtact

SEQ ID NO: 2341467 - DNA, 25 bp, Homo sapien
gggcatttgccgtcacaagatgcaa

SEQ ID NO: 2341468 - DNA, 25 bp, Homo sapien
catttcctgagcaatacagaggcac

SEQ ID NO: 2341469 - DNA, 25 bp, Homo sapien
gggcattcactcctttatactgagg

SEQ ID NO: 2341470 - DNA, 25 bp, Homo sapien
tgtatagagctcttggaacccaagg

SEQ ID NO: 2341471 - DNA, 25 bp, Homo sapien
tatctgttacacctgcaaaatgagg

SEQ ID NO: 2341472 - DNA, 25 bp, Homo sapien
caattacactaagtagggcattcac

SEQ ID NO: 2341473 - DNA, 25 bp, Homo sapien
tacaggaggattagactgtgtcact

SEQ ID NO: 2341474 - DNA, 25 bp, Homo sapien
ttttattagctagaagtgtgctcag

SEQ ID NO: 2341475 - DNA, 25 bp, Homo sapien
tgtgagagtgcttatcttcccagag

SEQ ID NO: 2341476 - DNA, 25 bp, Homo sapien
tacaggcgtttgtacggcatatata

SEQ ID NO: 2341477 - DNA, 25 bp, Homo sapien
gcagaagcaggtccagcaccaccag

SEQ ID NO: 2341478 - DNA, 25 bp, Homo sapien
gcaagcagaagcaggtccagcacca

SEQ ID NO: 2341479 - DNA, 25 bp, Homo sapien
gaaggtgcaagcagaagcaggtcca

SEQ ID NO: 2341480 - DNA, 25 bp, Homo sapien
aagcagaagcaggtccagcaccacc

SEQ ID NO: 2341481 - DNA, 25 bp, Homo sapien
ggtggaagctacagctcccatggca

SEQ ID NO: 2341482 - DNA, 25 bp, Homo sapien
atagcctggtaggaagaatccacca

SEQ ID NO: 2341483 - DNA, 25 bp, Homo sapien
gcgcatgcgcggtgcttttccagtg

SEQ ID NO: 2341484 - DNA, 25 bp, Homo sapien
tcctccacagaagcagactgagcag

SEQ ID NO: 2341485 - DNA, 25 bp, Homo sapien
cttcatcctcagatccttttctcac

SEQ ID NO: 2341486 - DNA, 25 bp, Homo sapien
tcttcatcctcagatccttttctca

SEQ ID NO: 2341487 - DNA, 25 bp, Homo sapien
ctcttcatcctcagatccttttctc

SEQ ID NO: 2341488 - DNA, 25 bp, Homo sapien
tcatttgggccagcgatgccctctc

SEQ ID NO: 2341489 - DNA, 25 bp, Homo sapien
attaagcgaatgtttccatggagac

SEQ ID NO: 2341490 - DNA, 25 bp, Homo sapien
ctgctctggcggctttcatttgggc

SEQ ID NO: 2341491 - DNA, 25 bp, Homo sapien
tctccctgcgttgggttaattaagc

SEQ ID NO: 2341492 - DNA, 25 bp, Homo sapien
atatctttggaagagggcacactcc

SEQ ID NO: 2341493 - DNA, 25 bp, Homo sapien
taattattgaaagatattgacactg

SEQ ID NO: 2341494 - DNA, 25 bp, Homo sapien
atctttggaagagggcacactccag

SEQ ID NO: 2341495 - DNA, 25 bp, Homo sapien
ttaatattgctagttgagattccac

SEQ ID NO: 2341496 - DNA, 25 bp, Homo sapien
tgctgggctatattccatggcttac

SEQ ID NO: 2341497 - DNA, 25 bp, Homo sapien
ggctatattccatggcttactgtca

SEQ ID NO: 2341498 - DNA, 25 bp, Homo sapien
aatgttgctgggctatattccatgg

SEQ ID NO: 2341499 - DNA, 25 bp, Homo sapien
attccatggcttactgtcattgtta

SEQ ID NO: 2341500 - DNA, 25 bp, Homo sapien
agtagtttttgcctcccattcattt

SEQ ID NO: 2341501 - DNA, 25 bp, Homo sapien
tttattgcgaagagtaaaaatctat

SEQ ID NO: 2341502 - DNA, 25 bp, Homo sapien
agtgaatattggacttaaagtagtt

SEQ ID NO: 2341503 - DNA, 25 bp, Homo sapien
ccaggaaacagttgggtaattgctt

SEQ ID NO: 2341504 - DNA, 25 bp, Homo sapien
aacaagcacctcttctgatgtattg

SEQ ID NO: 2341505 - DNA, 25 bp, Homo sapien
gctacactgaatagatataccagat

SEQ ID NO: 2341506 - DNA, 25 bp, Homo sapien
taactctgaaattttgggctgacaa

SEQ ID NO: 2341507 - DNA, 25 bp, Homo sapien
gactgaaagtggtttctccaagcaa

SEQ ID NO: 2341508 - DNA, 25 bp, Homo sapien
catcttgtgaaggttcccactgaag

SEQ ID NO: 2341509 - DNA, 25 bp, Homo sapien
tgaaggttcccactgaagaattata

SEQ ID NO: 2341510 - DNA, 25 bp, Homo sapien
tggatttaatctgaatgtagatctc

SEQ ID NO: 2341511 - DNA, 25 bp, Homo sapien
gaattatatggtcttctcccacatc

SEQ ID NO: 2341512 - DNA, 25 bp, Homo sapien
ttccagggattaaattatcaatctt

SEQ ID NO: 2341513 - DNA, 25 bp, Homo sapien
cagggattaaattatcaatcttgaa

SEQ ID NO: 2341514 - DNA, 25 bp, Homo sapien
ccagggattaaattatcaatcttga

SEQ ID NO: 2341515 - DNA, 25 bp, Homo sapien
ggattaaattatcaatcttgaatct

SEQ ID NO: 2341516 - DNA, 25 bp, Homo sapien
gcaagcagcccatcttggacttcct

SEQ ID NO: 2341517 - DNA, 25 bp, Homo sapien
aagcagcccatcttggacttcctac

SEQ ID NO: 2341518 - DNA, 25 bp, Homo sapien
tcgcaagcagcccatcttggacttc

SEQ ID NO: 2341519 - DNA, 25 bp, Homo sapien
tcatcgcaagcagcccatcttggac

SEQ ID NO: 2341520 - DNA, 25 bp, Homo sapien
tacaatatgtagtccatcaaacact

SEQ ID NO: 2341521 - DNA, 25 bp, Homo sapien
tgaacaaataagattacagaggtac

SEQ ID NO: 2341522 - DNA, 25 bp, Homo sapien
ggataacaatccagactggtttggg

SEQ ID NO: 2341523 - DNA, 25 bp, Homo sapien
caaacacttcaacattgggcatttg

SEQ ID NO: 2341524 - DNA, 25 bp, Homo sapien
caactcgattccagagaatgtctat

SEQ ID NO: 2341525 - DNA, 25 bp, Homo sapien
tgccttcatggatattcagtggtgc

SEQ ID NO: 2341526 - DNA, 25 bp, Homo sapien
gctggaaattcccatcaactcgatt

SEQ ID NO: 2341527 - DNA, 25 bp, Homo sapien
tatagaagaatctgtaactttgcct

SEQ ID NO: 2341528 - DNA, 25 bp, Homo sapien
atccaggttagagaatattgctgtt

SEQ ID NO: 2341529 - DNA, 25 bp, Homo sapien
ttcagcccgaatagaaaaggtgtac

SEQ ID NO: 2341530 - DNA, 25 bp, Homo sapien
acataggcggtaacctgtctgtatt

SEQ ID NO: 2341531 - DNA, 25 bp, Homo sapien
aaagaaactcctaaggtgcctacat

SEQ ID NO: 2341532 - DNA, 25 bp, Homo sapien
ctttgcctgaacaaaaatgccagag

SEQ ID NO: 2341533 - DNA, 25 bp, Homo sapien
ctgtctggatggcatgcagtatgat

SEQ ID NO: 2341534 - DNA, 25 bp, Homo sapien
ataaacaatcactttaatcagcttt

SEQ ID NO: 2341535 - DNA, 25 bp, Homo sapien
tgtctggatggcatgcagtatgata

SEQ ID NO: 2341536 - DNA, 25 bp, Homo sapien
gtctggatggcatgcagtatgatat

SEQ ID NO: 2341537 - DNA, 25 bp, Homo sapien
tcacaaaggagaatctctcagccca

SEQ ID NO: 2341538 - DNA, 25 bp, Homo sapien
gctgagaaacgctgccacagactaa

SEQ ID NO: 2341539 - DNA, 25 bp, Homo sapien
gattggctcaattggaaagatccta

SEQ ID NO: 2341540 - DNA, 25 bp, Homo sapien
cacagactaaaacctctagaatggg

SEQ ID NO: 2341541 - DNA, 25 bp, Homo sapien
tattggacagtacagctttaactac

SEQ ID NO: 2341542 - DNA, 25 bp, Homo sapien
aatttacagtacctctgaatttgga

SEQ ID NO: 2341543 - DNA, 25 bp, Homo sapien
gccacatgctgccaaacactacata

SEQ ID NO: 2341544 - DNA, 25 bp, Homo sapien
tgaatttggactggccatattccaa

SEQ ID NO: 2341545 - DNA, 25 bp, Homo sapien
gccactgtcaggaacaagatccact

SEQ ID NO: 2341546 - DNA, 25 bp, Homo sapien
tctctgatagtaacaaagccactgt

SEQ ID NO: 2341547 - DNA, 25 bp, Homo sapien
atattgaaggctctaagtttctcag

SEQ ID NO: 2341548 - DNA, 25 bp, Homo sapien
tgaccagagggtaggctccagtgca

SEQ ID NO: 2341549 - DNA, 25 bp, Homo sapien
taatgagcccatattactcaatagc

SEQ ID NO: 2341550 - DNA, 25 bp, Homo sapien
agatccttctggcaagtacacaatt

SEQ ID NO: 2341551 - DNA, 25 bp, Homo sapien
tctggcaagtacacaattaatgagc

SEQ ID NO: 2341552 - DNA, 25 bp, Homo sapien
gttaaactattcatgaacccttgga

SEQ ID NO: 2341553 - DNA, 25 bp, Homo sapien
cagccagtagaatcacattgatggc

SEQ ID NO: 2341554 - DNA, 25 bp, Homo sapien
tcagccagtagaatcacattgatgg

SEQ ID NO: 2341555 - DNA, 25 bp, Homo sapien
tctctgaagtcccaataaaaagtaa

SEQ ID NO: 2341556 - DNA, 25 bp, Homo sapien
aaaatgataagaaaatccatcttta

SEQ ID NO: 2341557 - DNA, 25 bp, Homo sapien
ctgtgtctctgaagtcccaataaaa

SEQ ID NO: 2341558 - DNA, 25 bp, Homo sapien
gataagaaaatccatctttattaca

SEQ ID NO: 2341559 - DNA, 25 bp, Homo sapien
caggaacgacattggaaacatcaac

SEQ ID NO: 2341560 - DNA, 25 bp, Homo sapien
gaagagatggttatatcgtacctag

SEQ ID NO: 2341561 - DNA, 25 bp, Homo sapien
caggtgaggtgtatgttgtagaaat

SEQ ID NO: 2341562 - DNA, 25 bp, Homo sapien
tgtcactattctagtaacaggtgag

SEQ ID NO: 2341563 - DNA, 25 bp, Homo sapien
gactgtctggctttgatctgacttg

SEQ ID NO: 2341564 - DNA, 25 bp, Homo sapien
ctctttccccggctaggaagactgg

SEQ ID NO: 2341565 - DNA, 25 bp, Homo sapien
tatactgtttgcatccacggacaaa

SEQ ID NO: 2341566 - DNA, 25 bp, Homo sapien
gattaggtggtgtattccaagacag

SEQ ID NO: 2341567 - DNA, 25 bp, Homo sapien
gactgtgaacgttgtcagtcactga

SEQ ID NO: 2341568 - DNA, 25 bp, Homo sapien
cagtcactgactgtattcagctgta

SEQ ID NO: 2341569 - DNA, 25 bp, Homo sapien
tgaacactaagtagtcatacacaaa

SEQ ID NO: 2341570 - DNA, 25 bp, Homo sapien
gctgtaaaggcttgacaaggtgaga

SEQ ID NO: 2341571 - DNA, 25 bp, Homo sapien
cttcaacgaagactttctttccagt

SEQ ID NO: 2341572 - DNA, 25 bp, Homo sapien
cagtcctgcagctattaatccttca

SEQ ID NO: 2341573 - DNA, 25 bp, Homo sapien
atggaaagaagtttacaaaatccag

SEQ ID NO: 2341574 - DNA, 25 bp, Homo sapien
gaagtttacaaaatccagtcctgca

SEQ ID NO: 2341575 - DNA, 25 bp, Homo sapien
taaagaacacgatcagaactggaaa

SEQ ID NO: 2341576 - DNA, 25 bp, Homo sapien
catagcttaaagaataggcaacctt

SEQ ID NO: 2341577 - DNA, 25 bp, Homo sapien
tgagatgttcttcctagaggataag

SEQ ID NO: 2341578 - DNA, 25 bp, Homo sapien
ggtgatttagtcaacctagttctgc

SEQ ID NO: 2341579 - DNA, 25 bp, Homo sapien
gcctgttacgcagttttgtggtggt

SEQ ID NO: 2341580 - DNA, 25 bp, Homo sapien
gatggtccatataattcaactctat

SEQ ID NO: 2341581 - DNA, 25 bp, Homo sapien
ctgtgatgttgcctgttacgcagtt

SEQ ID NO: 2341582 - DNA, 25 bp, Homo sapien
gttactatagttggtgggtcccata

SEQ ID NO: 2341583 - DNA, 25 bp, Homo sapien
tcttttgtgctgttatccaaaatgc

SEQ ID NO: 2341584 - DNA, 25 bp, Homo sapien
gtaaatggtgttaggttagtgaatg

SEQ ID NO: 2341585 - DNA, 25 bp, Homo sapien
aatggtgttaggttagtgaatgcaa

SEQ ID NO: 2341586 - DNA, 25 bp, Homo sapien
tttgtgctgttatccaaaatgcgac

SEQ ID NO: 2341587 - DNA, 25 bp, Homo sapien
cctgcactggtttcagccgcaatat

SEQ ID NO: 2341588 - DNA, 25 bp, Homo sapien
tggtggagtgaatactgaaatattt

SEQ ID NO: 2341589 - DNA, 25 bp, Homo sapien
tcagccgcaatatagacatcataca

SEQ ID NO: 2341590 - DNA, 25 bp, Homo sapien
aatatttgacttgggcccagtccct

SEQ ID NO: 2341591 - DNA, 25 bp, Homo sapien
tgcaagttgtaaatcaaacactgcc

SEQ ID NO: 2341592 - DNA, 25 bp, Homo sapien
gcaagttgtaaatcaaacactgccc

SEQ ID NO: 2341593 - DNA, 25 bp, Homo sapien
ctgcaagttgtaaatcaaacactgc

SEQ ID NO: 2341594 - DNA, 25 bp, Homo sapien
cactcggtattggttaataattcca

SEQ ID NO: 2341595 - DNA, 25 bp, Homo sapien
aagtaattcttacttgcgtggattc

SEQ ID NO: 2341596 - DNA, 25 bp, Homo sapien
attcttacttgcgtggattctacct

SEQ ID NO: 2341597 - DNA, 25 bp, Homo sapien
gtctctggaactagcactttcactc

SEQ ID NO: 2341598 - DNA, 25 bp, Homo sapien
ttggctctactatgttcacaatttc

SEQ ID NO: 2341599 - DNA, 25 bp, Homo sapien
tggctctactatgttcacaatttct

SEQ ID NO: 2341600 - DNA, 25 bp, Homo sapien
cattggctctactatgttcacaatt

SEQ ID NO: 2341601 - DNA, 25 bp, Homo sapien
attggctctactatgttcacaattt

SEQ ID NO: 2341602 - DNA, 25 bp, Homo sapien
ataaatgtagcaagtgagtgaaggt

SEQ ID NO: 2341603 - DNA, 25 bp, Homo sapien
gagtgaaggtcagacgacatctctg

SEQ ID NO: 2341604 - DNA, 25 bp, Homo sapien
tctgctgaaccctcatataatccta

SEQ ID NO: 2341605 - DNA, 25 bp, Homo sapien
caactggtgaagtctggtcttcagc

SEQ ID NO: 2341606 - DNA, 25 bp, Homo sapien
tgcagcttggccagagactctaggg

SEQ ID NO: 2341607 - DNA, 25 bp, Homo sapien
ccagagactctagggtgctactttc

SEQ ID NO: 2341608 - DNA, 25 bp, Homo sapien
gattgtctatgcagcttggccagag

SEQ ID NO: 2341609 - DNA, 25 bp, Homo sapien
tgtaataactgattgtctatgcagc

SEQ ID NO: 2341610 - DNA, 25 bp, Homo sapien
acactgagaactgttggtggtcctt

SEQ ID NO: 2341611 - DNA, 25 bp, Homo sapien
catgatggtgaaagcagatacacta

SEQ ID NO: 2341612 - DNA, 25 bp, Homo sapien
cttgctgacgtgtcctaacactgag

SEQ ID NO: 2341613 - DNA, 25 bp, Homo sapien
cagctgcaatgtcagtaatatactg

SEQ ID NO: 2341614 - DNA, 25 bp, Homo sapien
tttataattttaatggagcttggca

SEQ ID NO: 2341615 - DNA, 25 bp, Homo sapien
agtttataattttaatggagcttgg

SEQ ID NO: 2341616 - DNA, 25 bp, Homo sapien
gtttataattttaatggagcttggc

SEQ ID NO: 2341617 - DNA, 25 bp, Homo sapien
ctggaggatcccaatataacaaaat

SEQ ID NO: 2341618 - DNA, 25 bp, Homo sapien
tggaggatcccaatataacaaaata

SEQ ID NO: 2341619 - DNA, 25 bp, Homo sapien
ggaggatcccaatataacaaaatag

SEQ ID NO: 2341620 - DNA, 25 bp, Homo sapien
atggtagttatctggaatgctctgt

SEQ ID NO: 2341621 - DNA, 25 bp, Homo sapien
tccattgcataaatcgtatagtgag

SEQ ID NO: 2341622 - DNA, 25 bp, Homo sapien
cattgcataaatcgtatagtgagtt

SEQ ID NO: 2341623 - DNA, 25 bp, Homo sapien
gaatgctctgtttgtatccaattcc

SEQ ID NO: 2341624 - DNA, 25 bp, Homo sapien
tcttctgaagttctcacaaagatgt

SEQ ID NO: 2341625 - DNA, 25 bp, Homo sapien
actttctccaacgtgggttgaggct

SEQ ID NO: 2341626 - DNA, 25 bp, Homo sapien
agaactttctccaacgtgggttgag

SEQ ID NO: 2341627 - DNA, 25 bp, Homo sapien
cattgggcttttcgggtggtgacca

SEQ ID NO: 2341628 - DNA, 25 bp, Homo sapien
gacatcttgaggtgatgattccggt

SEQ ID NO: 2341629 - DNA, 25 bp, Homo sapien
ccatgaccaaatctggtgtaagacc

SEQ ID NO: 2341630 - DNA, 25 bp, Homo sapien
gaagatacctgattgccatgaccaa

SEQ ID NO: 2341631 - DNA, 25 bp, Homo sapien
ggtattgcccacgacatagctgtaa

SEQ ID NO: 2341632 - DNA, 25 bp, Homo sapien
taccaaagatgtggtgaggctccaa

SEQ ID NO: 2341633 - DNA, 25 bp, Homo sapien
gctgtaagcttcttaacgtctcccc

SEQ ID NO: 2341634 - DNA, 25 bp, Homo sapien
cataatggcacttggatatttcaaa

SEQ ID NO: 2341635 - DNA, 25 bp, Homo sapien
tgggactacttgggggaaggaatga

SEQ ID NO: 2341636 - DNA, 25 bp, Homo sapien
ttttgtaagtgatattttctggtgc

SEQ ID NO: 2341637 - DNA, 25 bp, Homo sapien
ggaaggaatgatagctcaatctctc

SEQ ID NO: 2341638 - DNA, 25 bp, Homo sapien
gattccattgggactacttggggga

SEQ ID NO: 2341639 - DNA, 25 bp, Homo sapien
gcagacacctcaatgatatattggg

SEQ ID NO: 2341640 - DNA, 25 bp, Homo sapien
tatgggagcactccgaactccttca

SEQ ID NO: 2341641 - DNA, 25 bp, Homo sapien
tcacctttgagtgtactagcagaca

SEQ ID NO: 2341642 - DNA, 25 bp, Homo sapien
tcttcctccgtcagtatacttatgg

SEQ ID NO: 2341643 - DNA, 25 bp, Homo sapien
gacaacttcaccgtgacaccagaca

SEQ ID NO: 2341644 - DNA, 25 bp, Homo sapien
aactgtgtaataaaggataattcca

SEQ ID NO: 2341645 - DNA, 25 bp, Homo sapien
tgacaccagacaactgttttacaga

SEQ ID NO: 2341646 - DNA, 25 bp, Homo sapien
caccgtgacaccagacaactgtttt

SEQ ID NO: 2341647 - DNA, 25 bp, Homo sapien
caccaaatctggtgctagctgttac

SEQ ID NO: 2341648 - DNA, 25 bp, Homo sapien
cagtgacattaatagtttttaatga

SEQ ID NO: 2341649 - DNA, 25 bp, Homo sapien
gttacataagcactgtattcaacat

SEQ ID NO: 2341650 - DNA, 25 bp, Homo sapien
tccaaatctgataactccaatgatg

SEQ ID NO: 2341651 - DNA, 25 bp, Homo sapien
tggtgtttgaaagctaatgatattg

SEQ ID NO: 2341652 - DNA, 25 bp, Homo sapien
gtgtttgaaagctaatgatattgct

SEQ ID NO: 2341653 - DNA, 25 bp, Homo sapien
ggtgtttgaaagctaatgatattgc

SEQ ID NO: 2341654 - DNA, 25 bp, Homo sapien
gtttgaaagctaatgatattgcttc

SEQ ID NO: 2341655 - DNA, 25 bp, Homo sapien
aaagaattattgatgaagaactgag

SEQ ID NO: 2341656 - DNA, 25 bp, Homo sapien
taataaacatctttgggaggatcgc

SEQ ID NO: 2341657 - DNA, 25 bp, Homo sapien
ctgaggtttgcataataaacatctt

SEQ ID NO: 2341658 - DNA, 25 bp, Homo sapien
gaaaagaattattgatgaagaactg

SEQ ID NO: 2341659 - DNA, 25 bp, Homo sapien
aatgatgtcactgcttttattccca

SEQ ID NO: 2341660 - DNA, 25 bp, Homo sapien
catattgtcaaagtcattggttact

SEQ ID NO: 2341661 - DNA, 25 bp, Homo sapien
ttgtcagtttatctataattgtgga

SEQ ID NO: 2341662 - DNA, 25 bp, Homo sapien
taattgtggatacagtcatattgtc

SEQ ID NO: 2341663 - DNA, 25 bp, Homo sapien
catggcgaggagtctgctgtaagat

SEQ ID NO: 2341664 - DNA, 25 bp, Homo sapien
taacaagaggtggtctcacatggcg

SEQ ID NO: 2341665 - DNA, 25 bp, Homo sapien
aagactagaccgtttggttgagccg

SEQ ID NO: 2341666 - DNA, 25 bp, Homo sapien
ttgagccggtgggacccagcttaca

SEQ ID NO: 2341667 - DNA, 25 bp, Homo sapien
cagtcttgatgtatagctgggcagt

SEQ ID NO: 2341668 - DNA, 25 bp, Homo sapien
cttcttcagtcttgatgtatagctg

SEQ ID NO: 2341669 - DNA, 25 bp, Homo sapien
cagtataggtatcagagaatccctt

SEQ ID NO: 2341670 - DNA, 25 bp, Homo sapien
tatagctgggcagtataggtatcag

SEQ ID NO: 2341671 - DNA, 25 bp, Homo sapien
agtgttgattattggtgaagtttct

SEQ ID NO: 2341672 - DNA, 25 bp, Homo sapien
gttgattattggtgaagtttctggg

SEQ ID NO: 2341673 - DNA, 25 bp, Homo sapien
ttgattattggtgaagtttctggga

SEQ ID NO: 2341674 - DNA, 25 bp, Homo sapien
taaaagtgttgattattggtgaagt

SEQ ID NO: 2341675 - DNA, 25 bp, Homo sapien
gtaaatggtgaaagctcttccaata

SEQ ID NO: 2341676 - DNA, 25 bp, Homo sapien
aagaatactggaaggaccaagtcct

SEQ ID NO: 2341677 - DNA, 25 bp, Homo sapien
atttggctttactgggggatcccat

SEQ ID NO: 2341678 - DNA, 25 bp, Homo sapien
tccttttctagttcttgcggcagca

SEQ ID NO: 2341679 - DNA, 25 bp, Homo sapien
ctttaacaataccacctggaagagg

SEQ ID NO: 2341680 - DNA, 25 bp, Homo sapien
ctccatttcagccatacaaagtctg

SEQ ID NO: 2341681 - DNA, 25 bp, Homo sapien
caaattttgtggaggtgctaacggc

SEQ ID NO: 2341682 - DNA, 25 bp, Homo sapien
ccatacaaagtctgaagtacagttg

SEQ ID NO: 2341683 - DNA, 25 bp, Homo sapien
gattcttgggttgtgaattttacta

SEQ ID NO: 2341684 - DNA, 25 bp, Homo sapien
gactggttccagtccaacaagtttg

SEQ ID NO: 2341685 - DNA, 25 bp, Homo sapien
acacggatagagtaggtgctgactg

SEQ ID NO: 2341686 - DNA, 25 bp, Homo sapien
tccaactttggtgaacgcagataca

SEQ ID NO: 2341687 - DNA, 25 bp, Homo sapien
tctagaaggctattttgttcccaaa

SEQ ID NO: 2341688 - DNA, 25 bp, Homo sapien
tgcaatttccctttgagtagactct

SEQ ID NO: 2341689 - DNA, 25 bp, Homo sapien
taaatcagcccgttaaaagtgactg

SEQ ID NO: 2341690 - DNA, 25 bp, Homo sapien
gaccaagactaaacgtaaagcactg

SEQ ID NO: 2341691 - DNA, 25 bp, Homo sapien
caccagctgaggttgaagctcttac

SEQ ID NO: 2341692 - DNA, 25 bp, Homo sapien
tgactgccagctagttgccatgcac

SEQ ID NO: 2341693 - DNA, 25 bp, Homo sapien
gacatatgaggtattggcaagaagc

SEQ ID NO: 2341694 - DNA, 25 bp, Homo sapien
caggtagtgtgctgacatggcatgt

SEQ ID NO: 2341695 - DNA, 25 bp, Homo sapien
ccaaggttgaggaacagaaagtagc

SEQ ID NO: 2341696 - DNA, 25 bp, Homo sapien
cccaaggttgaggaacagaaagtag

SEQ ID NO: 2341697 - DNA, 25 bp, Homo sapien
atgtggctgcttgaatcttgttttg

SEQ ID NO: 2341698 - DNA, 25 bp, Homo sapien
gggccaactgtagtgttttggatga

SEQ ID NO: 2341699 - DNA, 25 bp, Homo sapien
gatgatcagagttgcggagaaaaag

SEQ ID NO: 2341700 - DNA, 25 bp, Homo sapien
gaacacatggatttggagggccaac

SEQ ID NO: 2341701 - DNA, 25 bp, Homo sapien
tactgtttagagattaatgccaaga

SEQ ID NO: 2341702 - DNA, 25 bp, Homo sapien
taacatgtagtcctgcttggagtca

SEQ ID NO: 2341703 - DNA, 25 bp, Homo sapien
gggattcaggatacaataaagctca

SEQ ID NO: 2341704 - DNA, 25 bp, Homo sapien
caacggcctttgttaagaagatgga

SEQ ID NO: 2341705 - DNA, 25 bp, Homo sapien
ctctgagcctggtgttagggattca

SEQ ID NO: 2341706 - DNA, 25 bp, Homo sapien
tagtgtcaggtcttatccatgtcaa

SEQ ID NO: 2341707 - DNA, 25 bp, Homo sapien
caggcagagtttttgtagaaatcca

SEQ ID NO: 2341708 - DNA, 25 bp, Homo sapien
agcaatatttgtgggaacactggga

SEQ ID NO: 2341709 - DNA, 25 bp, Homo sapien
gaagcattgccatagccagcattgg

SEQ ID NO: 2341710 - DNA, 25 bp, Homo sapien
taggaccttggcacaactttgggag

SEQ ID NO: 2341711 - DNA, 25 bp, Homo sapien
caatcagggttattgtggtcacacg

SEQ ID NO: 2341712 - DNA, 25 bp, Homo sapien
gcactgttgcaatatgagactctag

SEQ ID NO: 2341713 - DNA, 25 bp, Homo sapien
ggtagcgcatcagagtagcttccca

SEQ ID NO: 2341714 - DNA, 25 bp, Homo sapien
taacaggagacacaattggtggcct

SEQ ID NO: 2341715 - DNA, 25 bp, Homo sapien
gaatcccctttaaagagtctcagtc

SEQ ID NO: 2341716 - DNA, 25 bp, Homo sapien
taaagccctctagatcaaagtgtat

SEQ ID NO: 2341717 - DNA, 25 bp, Homo sapien
tggtggcctagaaaataaagccctc

SEQ ID NO: 2341718 - DNA, 25 bp, Homo sapien
ggtccagtaatgacagcaggttcac

SEQ ID NO: 2341719 - DNA, 25 bp, Homo sapien
tcaatcagataacatgttggtccag

SEQ ID NO: 2341720 - DNA, 25 bp, Homo sapien
gcaggttcactccagcttatgctga

SEQ ID NO: 2341721 - DNA, 25 bp, Homo sapien
gctaaaaggtgatgttgctactaca

SEQ ID NO: 2341722 - DNA, 25 bp, Homo sapien
aatcatttcagcacttgacttccct

SEQ ID NO: 2341723 - DNA, 25 bp, Homo sapien
tgttcccagtaaatgcagtgatcac

SEQ ID NO: 2341724 - DNA, 25 bp, Homo sapien
cactacagaataccttgtgaatatt

SEQ ID NO: 2341725 - DNA, 25 bp, Homo sapien
tcttcatttgacttgatgaaggata

SEQ ID NO: 2341726 - DNA, 25 bp, Homo sapien
tcagtcaatttttagcaaggttgag

SEQ ID NO: 2341727 - DNA, 25 bp, Homo sapien
tttagcaaggttgagaaattctcct

SEQ ID NO: 2341728 - DNA, 25 bp, Homo sapien
ttttagcaaggttgagaaattctcc

SEQ ID NO: 2341729 - DNA, 25 bp, Homo sapien
caatttttagcaaggttgagaaatt

SEQ ID NO: 2341730 - DNA, 25 bp, Homo sapien
ataaactatagcaacatatcccttc

SEQ ID NO: 2341731 - DNA, 25 bp, Homo sapien
tcatctgctttttccaatgatatat

SEQ ID NO: 2341732 - DNA, 25 bp, Homo sapien
agcaacatatcccttcatctgcttt

SEQ ID NO: 2341733 - DNA, 25 bp, Homo sapien
ttacagatagcaacaaataaactat

SEQ ID NO: 2341734 - DNA, 25 bp, Homo sapien
ggtaaaccagagcttgatatacttg

SEQ ID NO: 2341735 - DNA, 25 bp, Homo sapien
taggatcatcttctcggtaaaccag

SEQ ID NO: 2341736 - DNA, 25 bp, Homo sapien
tagtccttctagcattgcaatgacg

SEQ ID NO: 2341737 - DNA, 25 bp, Homo sapien
gtatgtatgtccaccttttagtcct

SEQ ID NO: 2341738 - DNA, 25 bp, Homo sapien
atcggaacctttggacctgcaccag

SEQ ID NO: 2341739 - DNA, 25 bp, Homo sapien
tggttattctcatcggaacctttgg

SEQ ID NO: 2341740 - DNA, 25 bp, Homo sapien
tgatatccatggttattctcatcgg

SEQ ID NO: 2341741 - DNA, 25 bp, Homo sapien
ttctcatcggaacctttggacctgc

SEQ ID NO: 2341742 - DNA, 25 bp, Homo sapien
ggcattctgattgtaattgttgttg

SEQ ID NO: 2341743 - DNA, 25 bp, Homo sapien
gatcatcactgtagtaacatattgg

SEQ ID NO: 2341744 - DNA, 25 bp, Homo sapien
ttgttgaagtcacaagcagttttcc

SEQ ID NO: 2341745 - DNA, 25 bp, Homo sapien
tgtttctgtcacaagcacttgtaca

SEQ ID NO: 2341746 - DNA, 25 bp, Homo sapien
aatatgcatcataccactttgttac

SEQ ID NO: 2341747 - DNA, 25 bp, Homo sapien
catcataccactttgttacatttcc

SEQ ID NO: 2341748 - DNA, 25 bp, Homo sapien
ctgtacatggagggttaggaaagcc

SEQ ID NO: 2341749 - DNA, 25 bp, Homo sapien
tttgtaaaatatggccttgctttat

SEQ ID NO: 2341750 - DNA, 25 bp, Homo sapien
tgccaggaatcatgcatgcattatc

SEQ ID NO: 2341751 - DNA, 25 bp, Homo sapien
gcattatcagcacctatgatgtaga

SEQ ID NO: 2341752 - DNA, 25 bp, Homo sapien
tcttcattgccactaaactttgtct

SEQ ID NO: 2341753 - DNA, 25 bp, Homo sapien
cagtggtccattgcaaattttgtct

SEQ ID NO: 2341754 - DNA, 25 bp, Homo sapien
taaagtcttaacagggtcagaataa

SEQ ID NO: 2341755 - DNA, 25 bp, Homo sapien
aatcagagtcagtaaattgtcccat

SEQ ID NO: 2341756 - DNA, 25 bp, Homo sapien
ctaaagtcttaacagggtcagaata

SEQ ID NO: 2341757 - DNA, 25 bp, Homo sapien
gtcccataatatttgtagctctaaa

SEQ ID NO: 2341758 - DNA, 25 bp, Homo sapien
gcaacagctcgccaggatctgggca

SEQ ID NO: 2341759 - DNA, 25 bp, Homo sapien
caattctttaagacgaataaactgg

SEQ ID NO: 2341760 - DNA, 25 bp, Homo sapien
gccccagaaataccctgttcatgca

SEQ ID NO: 2341761 - DNA, 25 bp, Homo sapien
tctgggcaacacatgaagtcttaca

SEQ ID NO: 2341762 - DNA, 25 bp, Homo sapien
caaatgcaccaggatcactacttag

SEQ ID NO: 2341763 - DNA, 25 bp, Homo sapien
tccattggcaaatgcaccaggatca

SEQ ID NO: 2341764 - DNA, 25 bp, Homo sapien
gctgaagtaatggcttatgaatgct

SEQ ID NO: 2341765 - DNA, 25 bp, Homo sapien
ggagaattattgaaaggatacacaa

SEQ ID NO: 2341766 - DNA, 25 bp, Homo sapien
gacggaaagaatgatctctacggtt

SEQ ID NO: 2341767 - DNA, 25 bp, Homo sapien
gatctctacggttctttctgaaagt

SEQ ID NO: 2341768 - DNA, 25 bp, Homo sapien
gatacacaaagtgacggaaagaatg

SEQ ID NO: 2341769 - DNA, 25 bp, Homo sapien
ttaatctctcgtccttcagttccag

SEQ ID NO: 2341770 - DNA, 25 bp, Homo sapien
cgcgttaatctctcgtccttcagtt

SEQ ID NO: 2341771 - DNA, 25 bp, Homo sapien
cactgtgatgagctgatccagcttc

SEQ ID NO: 2341772 - DNA, 25 bp, Homo sapien
gagctgatccagcttcaatttagtg

SEQ ID NO: 2341773 - DNA, 25 bp, Homo sapien
tctgaaacttttctgtagctgccat

SEQ ID NO: 2341774 - DNA, 25 bp, Homo sapien
gaaacttttctgtagctgccatgac

SEQ ID NO: 2341775 - DNA, 25 bp, Homo sapien
aacttttctgtagctgccatgacag

SEQ ID NO: 2341776 - DNA, 25 bp, Homo sapien
cttttctgtagctgccatgacagtc

SEQ ID NO: 2341777 - DNA, 25 bp, Homo sapien
aatctccttgcgtctaaagaaaaat

SEQ ID NO: 2341778 - DNA, 25 bp, Homo sapien
acaaaaatctccttgcgtctaaaga

SEQ ID NO: 2341779 - DNA, 25 bp, Homo sapien
gacaaaaatctccttgcgtctaaag

SEQ ID NO: 2341780 - DNA, 25 bp, Homo sapien
caaaaatctccttgcgtctaaagaa

SEQ ID NO: 2341781 - DNA, 25 bp, Homo sapien
tgatggattttctataactaagtaa

SEQ ID NO: 2341782 - DNA, 25 bp, Homo sapien
ttgatggattttctataactaagta

SEQ ID NO: 2341783 - DNA, 25 bp, Homo sapien
gatggattttctataactaagtaac

SEQ ID NO: 2341784 - DNA, 25 bp, Homo sapien
taggttgttgtttgtgcaaagctct

SEQ ID NO: 2341785 - DNA, 25 bp, Homo sapien
gaaactttaggttgttgtttgtgca

SEQ ID NO: 2341786 - DNA, 25 bp, Homo sapien
catgttgcaggaaggatttcttgct

SEQ ID NO: 2341787 - DNA, 25 bp, Homo sapien
tgttgtttgtgcaaagctcttcaac

SEQ ID NO: 2341788 - DNA, 25 bp, Homo sapien
tttttgctctattccaaggcagatc

SEQ ID NO: 2341789 - DNA, 25 bp, Homo sapien
gttttttgctctattccaaggcaga

SEQ ID NO: 2341790 - DNA, 25 bp, Homo sapien
gctctattccaaggcagatcagcat

SEQ ID NO: 2341791 - DNA, 25 bp, Homo sapien
tttgctctattccaaggcagatcag

SEQ ID NO: 2341792 - DNA, 25 bp, Homo sapien
aatactgggcaaagcgatttacatg

SEQ ID NO: 2341793 - DNA, 25 bp, Homo sapien
gacactccttggaagtaagttagac

SEQ ID NO: 2341794 - DNA, 25 bp, Homo sapien
taaagggaacccagataataatgca

SEQ ID NO: 2341795 - DNA, 25 bp, Homo sapien
cactgaataaaatgtccagagtcac

SEQ ID NO: 2341796 - DNA, 25 bp, Homo sapien
ggaacactagcgtcagctatcagct

SEQ ID NO: 2341797 - DNA, 25 bp, Homo sapien
gcgtcagctatcagctttactctgt

SEQ ID NO: 2341798 - DNA, 25 bp, Homo sapien
ggcattaatataatccgaacctgga

SEQ ID NO: 2341799 - DNA, 25 bp, Homo sapien
tataatccgaacctggaacactagc

SEQ ID NO: 2341800 - DNA, 25 bp, Homo sapien
taaattcatttggacataaataacc

SEQ ID NO: 2341801 - DNA, 25 bp, Homo sapien
tccaaaaatctccaactgttcctgg

SEQ ID NO: 2341802 - DNA, 25 bp, Homo sapien
tcctggtagtggaccttgagtagca

SEQ ID NO: 2341803 - DNA, 25 bp, Homo sapien
caaaacactgtgttagcattactaa

SEQ ID NO: 2341804 - DNA, 25 bp, Homo sapien
tgaacatcctccattagctttgtaa

SEQ ID NO: 2341805 - DNA, 25 bp, Homo sapien
caattttcagatccctgatagtcca

SEQ ID NO: 2341806 - DNA, 25 bp, Homo sapien
gcttgttgtcctctggccaatactg

SEQ ID NO: 2341807 - DNA, 25 bp, Homo sapien
gtaatcactatatctccaaagacag

SEQ ID NO: 2341808 - DNA, 25 bp, Homo sapien
tctggccaggcagtaaagttacact

SEQ ID NO: 2341809 - DNA, 25 bp, Homo sapien
gcagtgaacaatcataggtgtggtg

SEQ ID NO: 2341810 - DNA, 25 bp, Homo sapien
gtcgaacagtcatgcaatccccatg

SEQ ID NO: 2341811 - DNA, 25 bp, Homo sapien
gtgccctgcttgctcgaaccaactt

SEQ ID NO: 2341812 - DNA, 25 bp, Homo sapien
tatatccacaaaatcatggtcattt

SEQ ID NO: 2341813 - DNA, 25 bp, Homo sapien
tatgttgtgttaaatggtccagagc

SEQ ID NO: 2341814 - DNA, 25 bp, Homo sapien
acttctcagttcagctactagtcca

SEQ ID NO: 2341815 - DNA, 25 bp, Homo sapien
tatatgttgtgttaaatggtccaga

SEQ ID NO: 2341816 - DNA, 25 bp, Homo sapien
gccactaagatctcccatgtggaaa

SEQ ID NO: 2341817 - DNA, 25 bp, Homo sapien
cagattgctgccactaagatctccc

SEQ ID NO: 2341818 - DNA, 25 bp, Homo sapien
caaaaggcttataatgtaggaaaag

SEQ ID NO: 2341819 - DNA, 25 bp, Homo sapien
aggcttataatgtaggaaaagaagg

SEQ ID NO: 2341820 - DNA, 25 bp, Homo sapien
ccttttagtggcagtatattgctga

SEQ ID NO: 2341821 - DNA, 25 bp, Homo sapien
gtgccttttagtggcagtatattgc

SEQ ID NO: 2341822 - DNA, 25 bp, Homo sapien
gtagtatgtgctaagacaggaatat

SEQ ID NO: 2341823 - DNA, 25 bp, Homo sapien
tattcctcatagaaactgcaatcac

SEQ ID NO: 2341824 - DNA, 25 bp, Homo sapien
cccttatttgataagagatccagaa

SEQ ID NO: 2341825 - DNA, 25 bp, Homo sapien
cttcccttatttgataagagatcca

SEQ ID NO: 2341826 - DNA, 25 bp, Homo sapien
aagagtccatcttctgaagtgctga

SEQ ID NO: 2341827 - DNA, 25 bp, Homo sapien
catggcgtccaaagagtccatcttc

SEQ ID NO: 2341828 - DNA, 25 bp, Homo sapien
aactagtaagctgggcatatactgt

SEQ ID NO: 2341829 - DNA, 25 bp, Homo sapien
aaactagtaagctgggcatatactg

SEQ ID NO: 2341830 - DNA, 25 bp, Homo sapien
ctagtaagctgggcatatactgttg

SEQ ID NO: 2341831 - DNA, 25 bp, Homo sapien
agtaagctgggcatatactgttgtt

SEQ ID NO: 2341832 - DNA, 25 bp, Homo sapien
tcttcccattcaagctcaacatcac

SEQ ID NO: 2341833 - DNA, 25 bp, Homo sapien
ttcttcccattcaagctcaacatca

SEQ ID NO: 2341834 - DNA, 25 bp, Homo sapien
aaaaatctcttccaattgtatcctt

SEQ ID NO: 2341835 - DNA, 25 bp, Homo sapien
ctcttccaattgtatcctttggtct

SEQ ID NO: 2341836 - DNA, 25 bp, Homo sapien
ccaattgtatcctttggtctgaata

SEQ ID NO: 2341837 - DNA, 25 bp, Homo sapien
cacatttcaattcggaagaatgagg

SEQ ID NO: 2341838 - DNA, 25 bp, Homo sapien
acagatcattatgacagtcctggaa

SEQ ID NO: 2341839 - DNA, 25 bp, Homo sapien
tacagatcattatgacagtcctgga

SEQ ID NO: 2341840 - DNA, 25 bp, Homo sapien
agtacagatcattatgacagtcctg

SEQ ID NO: 2341841 - DNA, 25 bp, Homo sapien
ggaagtacagatcattatgacagtc

SEQ ID NO: 2341842 - DNA, 25 bp, Homo sapien
cctaagtgtccctgaagagctactg

SEQ ID NO: 2341843 - DNA, 25 bp, Homo sapien
tcagctgttcgggatcatgagatga

SEQ ID NO: 2341844 - DNA, 25 bp, Homo sapien
atcaaccttgggaaatgaaatgacg

SEQ ID NO: 2341845 - DNA, 25 bp, Homo sapien
tacaagcttgaaacacgcacagtgt

SEQ ID NO: 2341846 - DNA, 25 bp, Homo sapien
tgtgcccagagattcccaaacgctg

SEQ ID NO: 2341847 - DNA, 25 bp, Homo sapien
aatagttttgcacttagacctacag

SEQ ID NO: 2341848 - DNA, 25 bp, Homo sapien
taatcggcagacagtttgtgcccag

SEQ ID NO: 2341849 - DNA, 25 bp, Homo sapien
cagaacatctgagtcacttcagaga

SEQ ID NO: 2341850 - DNA, 25 bp, Homo sapien
cctgaaactcaatccaacttttagc

SEQ ID NO: 2341851 - DNA, 25 bp, Homo sapien
tatatatagtagctcctgaaactca

SEQ ID NO: 2341852 - DNA, 25 bp, Homo sapien
gggtgatggactcaaaaacccagag

SEQ ID NO: 2341853 - DNA, 25 bp, Homo sapien
cagtgacataagtcgacccagcttt

SEQ ID NO: 2341854 - DNA, 25 bp, Homo sapien
gcttcagtgcctcgaaggcctcgtt

SEQ ID NO: 2341855 - DNA, 25 bp, Homo sapien
ggacaaggtaccatcactccctgga

SEQ ID NO: 2341856 - DNA, 25 bp, Homo sapien
tccctggatacaaaggagagccttc

SEQ ID NO: 2341857 - DNA, 25 bp, Homo sapien
gggttggccacagttcgccgcttca

SEQ ID NO: 2341858 - DNA, 25 bp, Homo sapien
tcctgctgatccagccggtgcagca

SEQ ID NO: 2341859 - DNA, 25 bp, Homo sapien
tagctgatggcgctccgcagaatct

SEQ ID NO: 2341860 - DNA, 25 bp, Homo sapien
gtcctgcagccgctcaatatagctg

SEQ ID NO: 2341861 - DNA, 25 bp, Homo sapien
attttcttgtttgggtctgtagctg

SEQ ID NO: 2341862 - DNA, 25 bp, Homo sapien
cccctggaatgatcggaaacacttg

SEQ ID NO: 2341863 - DNA, 25 bp, Homo sapien
gctgcaggtgcgcaggaaatccgca

SEQ ID NO: 2341864 - DNA, 25 bp, Homo sapien
ttccttagccgttatcacgagcccc

SEQ ID NO: 2341865 - DNA, 25 bp, Homo sapien
gatcggaaacacttggccactggga

SEQ ID NO: 2341866 - DNA, 25 bp, Homo sapien
cccggattttctctggtgcggccca

SEQ ID NO: 2341867 - DNA, 25 bp, Homo sapien
cggattttctctggtgcggcccaga

SEQ ID NO: 2341868 - DNA, 25 bp, Homo sapien
tctctggtgcggcccagagcccttt

SEQ ID NO: 2341869 - DNA, 25 bp, Homo sapien
ctcccggattttctctggtgcggcc

SEQ ID NO: 2341870 - DNA, 25 bp, Homo sapien
cgcgcgaggccgctttggcagcgag

SEQ ID NO: 2341871 - DNA, 25 bp, Homo sapien
caaagagcgcccttttcgcagggcg

SEQ ID NO: 2341872 - DNA, 25 bp, Homo sapien
cacccaaagaaggaacacgaagcag

SEQ ID NO: 2341873 - DNA, 25 bp, Homo sapien
acaaacatagcacccaaagaaggaa

SEQ ID NO: 2341874 - DNA, 25 bp, Homo sapien
gagtttgcgttcctccgaggaaata

SEQ ID NO: 2341875 - DNA, 25 bp, Homo sapien
gaggaaatactgtccacgatggaag

SEQ ID NO: 2341876 - DNA, 25 bp, Homo sapien
cgaggctgacgaatcaatacttgct

SEQ ID NO: 2341877 - DNA, 25 bp, Homo sapien
aagaaaggcatcgaaggctactcga

SEQ ID NO: 2341878 - DNA, 25 bp, Homo sapien
tcagcaacttttcggtctgggttcc

SEQ ID NO: 2341879 - DNA, 25 bp, Homo sapien
tttgagcatgcacaacagatttcgc

SEQ ID NO: 2341880 - DNA, 25 bp, Homo sapien
ggctagacctaagccactcgcagtt

SEQ ID NO: 2341881 - DNA, 25 bp, Homo sapien
gaacatggcacaaaaggatcaccgt

SEQ ID NO: 2341882 - DNA, 25 bp, Homo sapien
ctggcacacgttgtaaaatccgcat

SEQ ID NO: 2341883 - DNA, 25 bp, Homo sapien
cattgctgtctcctctcttctgtcc

SEQ ID NO: 2341884 - DNA, 25 bp, Homo sapien
ttgctgtctcctctcttctgtcctg

SEQ ID NO: 2341885 - DNA, 25 bp, Homo sapien
gctgtctcctctcttctgtcctgtc

SEQ ID NO: 2341886 - DNA, 25 bp, Homo sapien
tgtctcctctcttctgtcctgtcat

SEQ ID NO: 2341887 - DNA, 25 bp, Homo sapien
gcaattggattgaataacggttact

SEQ ID NO: 2341888 - DNA, 25 bp, Homo sapien
caattggattgaataacggttacta

SEQ ID NO: 2341889 - DNA, 25 bp, Homo sapien
cagcaattggattgaataacggtta

SEQ ID NO: 2341890 - DNA, 25 bp, Homo sapien
tccagcaattggattgaataacggt

SEQ ID NO: 2341891 - DNA, 25 bp, Homo sapien
ctcccaatcctgggcgtgaggaatc

SEQ ID NO: 2341892 - DNA, 25 bp, Homo sapien
cctcccaatcctgggcgtgaggaat

SEQ ID NO: 2341893 - DNA, 25 bp, Homo sapien
cccaatcctgggcgtgaggaatcac

SEQ ID NO: 2341894 - DNA, 25 bp, Homo sapien
tcccaatcctgggcgtgaggaatca

SEQ ID NO: 2341895 - DNA, 25 bp, Homo sapien
ctgggtagacaagctggggttgggg

SEQ ID NO: 2341896 - DNA, 25 bp, Homo sapien
tcccgggcggagctccctagtctgt

SEQ ID NO: 2341897 - DNA, 25 bp, Homo sapien
agaaacgggagcctggcgcctccgc

SEQ ID NO: 2341898 - DNA, 25 bp, Homo sapien
tccgccgatgggcaaatcccgggcg

SEQ ID NO: 2341899 - DNA, 25 bp, Homo sapien
cctagtctgtcgctccggtaattaa

SEQ ID NO: 2341900 - DNA, 25 bp, Homo sapien
gctttgcaggcccacatgaggcagt

SEQ ID NO: 2341901 - DNA, 25 bp, Homo sapien
tatgcaggagccgtcgtagaagtac

SEQ ID NO: 2341902 - DNA, 25 bp, Homo sapien
tgccttccgccgatccatggtggtg

SEQ ID NO: 2341903 - DNA, 25 bp, Homo sapien
tgtcccggcaggctatagtagttct

SEQ ID NO: 2341904 - DNA, 25 bp, Homo sapien
catttgatacatcaggacagtagat

SEQ ID NO: 2341905 - DNA, 25 bp, Homo sapien
tttctggaccagacaggactgttac

SEQ ID NO: 2341906 - DNA, 25 bp, Homo sapien
tttgatacatcaggacagtagatgc

SEQ ID NO: 2341907 - DNA, 25 bp, Homo sapien
gtactgctctttctggaccagacag

SEQ ID NO: 2341908 - DNA, 25 bp, Homo sapien
ctctgaggaggtgatccggtccact

SEQ ID NO: 2341909 - DNA, 25 bp, Homo sapien
ccggtccactatgttggataagcaa

SEQ ID NO: 2341910 - DNA, 25 bp, Homo sapien
gataagcctggaactagaagcccct

SEQ ID NO: 2341911 - DNA, 25 bp, Homo sapien
gaagccagatcctggagaggcaacc

SEQ ID NO: 2341912 - DNA, 25 bp, Homo sapien
tgtattaggccctcctggaagaagt

SEQ ID NO: 2341913 - DNA, 25 bp, Homo sapien
caccagagacattttgatgagcaat

SEQ ID NO: 2341914 - DNA, 25 bp, Homo sapien
taagttaagcattgcaacaagctac

SEQ ID NO: 2341915 - DNA, 25 bp, Homo sapien
aacaagctaccctcaatcaatggcc

SEQ ID NO: 2341916 - DNA, 25 bp, Homo sapien
caaacgacttgatagtatatggtac

SEQ ID NO: 2341917 - DNA, 25 bp, Homo sapien
tatcaagatattttcaggcaggtag

SEQ ID NO: 2341918 - DNA, 25 bp, Homo sapien
cctaaactgggtacatgagaatggt

SEQ ID NO: 2341919 - DNA, 25 bp, Homo sapien
gaaaagtttcatttagcaggttcac

SEQ ID NO: 2341920 - DNA, 25 bp, Homo sapien
gtattgccaacctgattaaccattc

SEQ ID NO: 2341921 - DNA, 25 bp, Homo sapien
tcagtattgccaacctgattaacca

SEQ ID NO: 2341922 - DNA, 25 bp, Homo sapien
tattgccaacctgattaaccattcc

SEQ ID NO: 2341923 - DNA, 25 bp, Homo sapien
ctcatcagtattgccaacctgatta

SEQ ID NO: 2341924 - DNA, 25 bp, Homo sapien
cttggaggtagaacttttcttgtgt

SEQ ID NO: 2341925 - DNA, 25 bp, Homo sapien
tctgctactacctgaacatcacaaa

SEQ ID NO: 2341926 - DNA, 25 bp, Homo sapien
cacatttatattctacttggaggta

SEQ ID NO: 2341927 - DNA, 25 bp, Homo sapien
aataaaatatacaggcgtaatttat

SEQ ID NO: 2341928 - DNA, 25 bp, Homo sapien
cccgttgcctccagcctactaccat

SEQ ID NO: 2341929 - DNA, 25 bp, Homo sapien
gtgctttgtccgtatgttcttacat

SEQ ID NO: 2341930 - DNA, 25 bp, Homo sapien
ttcttacatgtacccgttgcctcca

SEQ ID NO: 2341931 - DNA, 25 bp, Homo sapien
atgttcttacatgtacccgttgcct

SEQ ID NO: 2341932 - DNA, 25 bp, Homo sapien
tgagacagaaaaattgattcgttct

SEQ ID NO: 2341933 - DNA, 25 bp, Homo sapien
tggcattgcaagtgagacagaaaaa

SEQ ID NO: 2341934 - DNA, 25 bp, Homo sapien
cttggcattgcaagtgagacagaaa

SEQ ID NO: 2341935 - DNA, 25 bp, Homo sapien
agtgagacagaaaaattgattcgtt

SEQ ID NO: 2341936 - DNA, 25 bp, Homo sapien
taatgccataatggccttggcagat

SEQ ID NO: 2341937 - DNA, 25 bp, Homo sapien
ttctatctcagcaaaaatggcccat

SEQ ID NO: 2341938 - DNA, 25 bp, Homo sapien
ggcagatgtcggctgcttgggttct

SEQ ID NO: 2341939 - DNA, 25 bp, Homo sapien
aatgcaagctgctgtagcttgactg

SEQ ID NO: 2341940 - DNA, 25 bp, Homo sapien
gccaaggtcttcatcaagggtagga

SEQ ID NO: 2341941 - DNA, 25 bp, Homo sapien
gaatccttcaaggtttggcctcaac

SEQ ID NO: 2341942 - DNA, 25 bp, Homo sapien
cacatggcgatttgcaacagctcta

SEQ ID NO: 2341943 - DNA, 25 bp, Homo sapien
cactctcaaggatgcagggagtcaa

SEQ ID NO: 2341944 - DNA, 25 bp, Homo sapien
cctggagtgccatatatatatgctt

SEQ ID NO: 2341945 - DNA, 25 bp, Homo sapien
tggagtgccatatatatatgcttgc

SEQ ID NO: 2341946 - DNA, 25 bp, Homo sapien
agtgccatatatatatgcttgctcc

SEQ ID NO: 2341947 - DNA, 25 bp, Homo sapien
ccatatatatatgcttgctcctctc

SEQ ID NO: 2341948 - DNA, 25 bp, Homo sapien
cactccagcacattttctcttgcat

SEQ ID NO: 2341949 - DNA, 25 bp, Homo sapien
tcagacagcagtggcttgcttatct

SEQ ID NO: 2341950 - DNA, 25 bp, Homo sapien
agacagcagtggcttgcttatcttt

SEQ ID NO: 2341951 - DNA, 25 bp, Homo sapien
taggaatcagacagcagtggcttgc

SEQ ID NO: 2341952 - DNA, 25 bp, Homo sapien
tgtaggaatcagacagcagtggctt

SEQ ID NO: 2341953 - DNA, 25 bp, Homo sapien
tcttctctggcaggtacacgatgga

SEQ ID NO: 2341954 - DNA, 25 bp, Homo sapien
gattgataaacccacactgttaggt

SEQ ID NO: 2341955 - DNA, 25 bp, Homo sapien
cctagggcaaaatacactgggctgt

SEQ ID NO: 2341956 - DNA, 25 bp, Homo sapien
ccttgatatcttgggatctagcaga

SEQ ID NO: 2341957 - DNA, 25 bp, Homo sapien
cctagtctcgattccattcttatag

SEQ ID NO: 2341958 - DNA, 25 bp, Homo sapien
ctcgattccattcttatagctcttc

SEQ ID NO: 2341959 - DNA, 25 bp, Homo sapien
tagtctcgattccattcttatagct

SEQ ID NO: 2341960 - DNA, 25 bp, Homo sapien
ctctcctagtctcgattccattctt

SEQ ID NO: 2341961 - DNA, 25 bp, Homo sapien
tttgatcgtagctcttgttctctcc

SEQ ID NO: 2341962 - DNA, 25 bp, Homo sapien
tcctctttttgatcgtagctcttgt

SEQ ID NO: 2341963 - DNA, 25 bp, Homo sapien
tctctcctctttttgatcgtagctc

SEQ ID NO: 2341964 - DNA, 25 bp, Homo sapien
ctttttgatcgtagctcttgttctc

SEQ ID NO: 2341965 - DNA, 25 bp, Homo sapien
cagctttgaagatccagcttttctg

SEQ ID NO: 2341966 - DNA, 25 bp, Homo sapien
gctttgaagatccagcttttctgat

SEQ ID NO: 2341967 - DNA, 25 bp, Homo sapien
tttgaagatccagcttttctgattt

SEQ ID NO: 2341968 - DNA, 25 bp, Homo sapien
tcagctttgaagatccagcttttct

SEQ ID NO: 2341969 - DNA, 25 bp, Homo sapien
cttataattgggcaggtggaaacca

SEQ ID NO: 2341970 - DNA, 25 bp, Homo sapien
tagaatggaccaattttagctcaac

SEQ ID NO: 2341971 - DNA, 25 bp, Homo sapien
cacactgatgtgctgtcatagaagc

SEQ ID NO: 2341972 - DNA, 25 bp, Homo sapien
gcaaaggacctagccctgtgaacag

SEQ ID NO: 2341973 - DNA, 25 bp, Homo sapien
cccctgctattactgaagtcaacgt

SEQ ID NO: 2341974 - DNA, 25 bp, Homo sapien
tcaaaagaggagaccagctgctatc

SEQ ID NO: 2341975 - DNA, 25 bp, Homo sapien
gattttctccttaagcacattcttt

SEQ ID NO: 2341976 - DNA, 25 bp, Homo sapien
tattcattttatgtctaaccagctt

SEQ ID NO: 2341977 - DNA, 25 bp, Homo sapien
tgttaatggctgtcccgaattccgt

SEQ ID NO: 2341978 - DNA, 25 bp, Homo sapien
catgaaacgataactgttaatggct

SEQ ID NO: 2341979 - DNA, 25 bp, Homo sapien
gtgtatcaatatatgcatgaaacga

SEQ ID NO: 2341980 - DNA, 25 bp, Homo sapien
aattccgtgcgagggcaacagcaaa

SEQ ID NO: 2341981 - DNA, 25 bp, Homo sapien
tctactgttcaagtgctcctggtcc

SEQ ID NO: 2341982 - DNA, 25 bp, Homo sapien
cctggtccccagtgagaattatttt

SEQ ID NO: 2341983 - DNA, 25 bp, Homo sapien
aggtcaccgtgagacattctgtcag

SEQ ID NO: 2341984 - DNA, 25 bp, Homo sapien
taagtacctatagccattagacggt

SEQ ID NO: 2341985 - DNA, 25 bp, Homo sapien
gctacaatccctcaaaaaagtgctt

SEQ ID NO: 2341986 - DNA, 25 bp, Homo sapien
gttgcaagagcaattgaattactgg

SEQ ID NO: 2341987 - DNA, 25 bp, Homo sapien
gaatctggagaagtaccagtgcaca

SEQ ID NO: 2341988 - DNA, 25 bp, Homo sapien
gagttttgtacagctattcgagagg

SEQ ID NO: 2341989 - DNA, 25 bp, Homo sapien
tagaggattaaactgaacgatgggc

SEQ ID NO: 2341990 - DNA, 25 bp, Homo sapien
atgaaggcgctcgagtcctacggct

SEQ ID NO: 2341991 - DNA, 25 bp, Homo sapien
gctccagcgtccagtgatgaaggcg

SEQ ID NO: 2341992 - DNA, 25 bp, Homo sapien
aattcccaacgggacatgggacgcg

SEQ ID NO: 2341993 - DNA, 25 bp, Homo sapien
cacggcagacatggcgacattgaca

SEQ ID NO: 2341994 - DNA, 25 bp, Homo sapien
gacattgacagtggtccagccgctc

SEQ ID NO: 2341995 - DNA, 25 bp, Homo sapien
actacgagcggttgctgatgctgaa

SEQ ID NO: 2341996 - DNA, 25 bp, Homo sapien
gatgctgaagccgagcgtcacttcg

SEQ ID NO: 2341997 - DNA, 25 bp, Homo sapien
tacaggctacaggaagtcggagact

SEQ ID NO: 2341998 - DNA, 25 bp, Homo sapien
ctaaatcaaggcgtggcacaaggca

SEQ ID NO: 2341999 - DNA, 25 bp, Homo sapien
ttctccaggcaatatactcaggtcc

SEQ ID NO: 2342000 - DNA, 25 bp, Homo sapien
tatgccgttataggtcaacattccg

SEQ ID NO: 2342001 - DNA, 25 bp, Homo sapien
gtgaacaatttccaggggatccgga

SEQ ID NO: 2342002 - DNA, 25 bp, Homo sapien
atcacatctgttgaagcccaagaca

SEQ ID NO: 2342003 - DNA, 25 bp, Homo sapien
caaagcatcacatctgttgaagccc

SEQ ID NO: 2342004 - DNA, 25 bp, Homo sapien
gaggagctgcaaagcatcacatctg

SEQ ID NO: 2342005 - DNA, 25 bp, Homo sapien
tgaaacctcaaagggcttaggtcca

SEQ ID NO: 2342006 - DNA, 25 bp, Homo sapien
cctcttttcctcttagagttctgga

SEQ ID NO: 2342007 - DNA, 25 bp, Homo sapien
ccagctccaattaggtgttcgtatc

SEQ ID NO: 2342008 - DNA, 25 bp, Homo sapien
caaagggcttaggtccaggctttct

SEQ ID NO: 2342009 - DNA, 25 bp, Homo sapien
gctcttcgactagcatgaatttcca

SEQ ID NO: 2342010 - DNA, 25 bp, Homo sapien
tatgctctatgtctagagctcttcg

SEQ ID NO: 2342011 - DNA, 25 bp, Homo sapien
tctagagctcttcgactagcatgaa

SEQ ID NO: 2342012 - DNA, 25 bp, Homo sapien
tctatgtctagagctcttcgactag

SEQ ID NO: 2342013 - DNA, 25 bp, Homo sapien
aaataggaggtttaatgagtttcat

SEQ ID NO: 2342014 - DNA, 25 bp, Homo sapien
ttattcatgcctgagtggagtgtcg

SEQ ID NO: 2342015 - DNA, 25 bp, Homo sapien
tattcatgcctgagtggagtgtcgg

SEQ ID NO: 2342016 - DNA, 25 bp, Homo sapien
tcatgcctgagtggagtgtcggctg

SEQ ID NO: 2342017 - DNA, 25 bp, Homo sapien
ctctgcacagataggcacaaatctc

SEQ ID NO: 2342018 - DNA, 25 bp, Homo sapien
tgcacagataggcacaaatctccat

SEQ ID NO: 2342019 - DNA, 25 bp, Homo sapien
ctgcacagataggcacaaatctcca

SEQ ID NO: 2342020 - DNA, 25 bp, Homo sapien
tctgcacagataggcacaaatctcc

SEQ ID NO: 2342021 - DNA, 25 bp, Homo sapien
tgctccaataaactacaactctgtg

SEQ ID NO: 2342022 - DNA, 25 bp, Homo sapien
taggtacctgtgttatgttcttcca

SEQ ID NO: 2342023 - DNA, 25 bp, Homo sapien
ggtgcaccacacctatattcataca

SEQ ID NO: 2342024 - DNA, 25 bp, Homo sapien
cacatatatacgagatttcactacc

SEQ ID NO: 2342025 - DNA, 25 bp, Homo sapien
ctgcaggaaaagaataatgtggaga

SEQ ID NO: 2342026 - DNA, 25 bp, Homo sapien
gaaaagaataatgtggagataaagg

SEQ ID NO: 2342027 - DNA, 25 bp, Homo sapien
caggaaaagaataatgtggagataa

SEQ ID NO: 2342028 - DNA, 25 bp, Homo sapien
tgcaggaaaagaataatgtggagat

SEQ ID NO: 2342029 - DNA, 25 bp, Homo sapien
taacttgagaatccgtaaacaaatg

SEQ ID NO: 2342030 - DNA, 25 bp, Homo sapien
atcataacttgagaatccgtaaaca

SEQ ID NO: 2342031 - DNA, 25 bp, Homo sapien
cttgagaatccgtaaacaaatgatt

SEQ ID NO: 2342032 - DNA, 25 bp, Homo sapien
cataacttgagaatccgtaaacaaa

SEQ ID NO: 2342033 - DNA, 25 bp, Homo sapien
ctgctgaccagactccgcatgtgat

SEQ ID NO: 2342034 - DNA, 25 bp, Homo sapien
gacaaatggtactcttgcaacttcc

SEQ ID NO: 2342035 - DNA, 25 bp, Homo sapien
ccagaagtttggaagccacactaga

SEQ ID NO: 2342036 - DNA, 25 bp, Homo sapien
agccacactagagtcgccgggaaaa

SEQ ID NO: 2342037 - DNA, 25 bp, Homo sapien
gcggtccccgagtgtgcgacaaatg

SEQ ID NO: 2342038 - DNA, 25 bp, Homo sapien
actaaagccctgagggccgcaccgg

SEQ ID NO: 2342039 - DNA, 25 bp, Homo sapien
ggtgactttacgacactgcagccaa

SEQ ID NO: 2342040 - DNA, 25 bp, Homo sapien
ccggcgctggtgactttacgacact

SEQ ID NO: 2342041 - DNA, 25 bp, Homo sapien
tacgacactgcagccaagacggttt

SEQ ID NO: 2342042 - DNA, 25 bp, Homo sapien
tcaccgaggctgcgaagtgggtctt

SEQ ID NO: 2342043 - DNA, 25 bp, Homo sapien
gtagagggcgagtgtttgttctcca

SEQ ID NO: 2342044 - DNA, 25 bp, Homo sapien
agggcttgtaccagctgatctgctc

SEQ ID NO: 2342045 - DNA, 25 bp, Homo sapien
tctccagcgttttggtccagggctt

SEQ ID NO: 2342046 - DNA, 25 bp, Homo sapien
tctttcgtgatagaatgccagattc

SEQ ID NO: 2342047 - DNA, 25 bp, Homo sapien
caattttctttcgtgatagaatgcc

SEQ ID NO: 2342048 - DNA, 25 bp, Homo sapien
aacacgaattgaggggtctgaacac

SEQ ID NO: 2342049 - DNA, 25 bp, Homo sapien
ggatcagggttggcacagaagtcac

SEQ ID NO: 2342050 - DNA, 25 bp, Homo sapien
ttatagccaaaagtctgcaggacat

SEQ ID NO: 2342051 - DNA, 25 bp, Homo sapien
aacaggactgtcatagatgatagca

SEQ ID NO: 2342052 - DNA, 25 bp, Homo sapien
gatgatagcaatcttatccccttta

SEQ ID NO: 2342053 - DNA, 25 bp, Homo sapien
ccctttaccattttcaatatgacga

SEQ ID NO: 2342054 - DNA, 25 bp, Homo sapien
tgctttagtgtttgtaacaggactg

SEQ ID NO: 2342055 - DNA, 25 bp, Homo sapien
tcaggactggaaaggcgatccttta

SEQ ID NO: 2342056 - DNA, 25 bp, Homo sapien
aaggcgatcctttagtctgagttgc

SEQ ID NO: 2342057 - DNA, 25 bp, Homo sapien
actggaaaggcgatcctttagtctg

SEQ ID NO: 2342058 - DNA, 25 bp, Homo sapien
ctttagtctgagttgcctttcttga

SEQ ID NO: 2342059 - DNA, 25 bp, Homo sapien
tttgttctcagggtgcacattttca

SEQ ID NO: 2342060 - DNA, 25 bp, Homo sapien
tgtcaaatccacctcttggataaat

SEQ ID NO: 2342061 - DNA, 25 bp, Homo sapien
gaacttaagccaacaaaagcagttg

SEQ ID NO: 2342062 - DNA, 25 bp, Homo sapien
taactatgtcaaatccacctcttgg

SEQ ID NO: 2342063 - DNA, 25 bp, Homo sapien
gagttgctgccaatatctctaatca

SEQ ID NO: 2342064 - DNA, 25 bp, Homo sapien
tggagagttgctgccaatatctcta

SEQ ID NO: 2342065 - DNA, 25 bp, Homo sapien
gagagttgctgccaatatctctaat

SEQ ID NO: 2342066 - DNA, 25 bp, Homo sapien
agttgctgccaatatctctaatcat

SEQ ID NO: 2342067 - DNA, 25 bp, Homo sapien
tgatgccatgcttgaccaagacacc

SEQ ID NO: 2342068 - DNA, 25 bp, Homo sapien
gatgccatgcttgaccaagacacca

SEQ ID NO: 2342069 - DNA, 25 bp, Homo sapien
cttgatgccatgcttgaccaagaca

SEQ ID NO: 2342070 - DNA, 25 bp, Homo sapien
tgccatgcttgaccaagacaccagc

SEQ ID NO: 2342071 - DNA, 25 bp, Homo sapien
ccttgcacatgccaacatggtatac

SEQ ID NO: 2342072 - DNA, 25 bp, Homo sapien
tacatcgcctgtgggatcataggca

SEQ ID NO: 2342073 - DNA, 25 bp, Homo sapien
tatgagactgtggatggcacctatc

SEQ ID NO: 2342074 - DNA, 25 bp, Homo sapien
tacatgatcaatgcgactacttagt

SEQ ID NO: 2342075 - DNA, 25 bp, Homo sapien
tacaagtggtacgtactctaccctc

SEQ ID NO: 2342076 - DNA, 25 bp, Homo sapien
atgatgctgtaacaaccaccttggg

SEQ ID NO: 2342077 - DNA, 25 bp, Homo sapien
catatttggacgattataaatgaga

SEQ ID NO: 2342078 - DNA, 25 bp, Homo sapien
gtttgtgttgtcctatttttagcgc

SEQ ID NO: 2342079 - DNA, 25 bp, Homo sapien
taggtaaccccgttgtgccagatgt

SEQ ID NO: 2342080 - DNA, 25 bp, Homo sapien
tcccaatcaaggtcacgaccgggag

SEQ ID NO: 2342081 - DNA, 25 bp, Homo sapien
ttgtgccagatgtgtaaagaatata

SEQ ID NO: 2342082 - DNA, 25 bp, Homo sapien
gttctgaaagaacaggaacacagtc

SEQ ID NO: 2342083 - DNA, 25 bp, Homo sapien
taactgtgtcaggtgagatcacgcc

SEQ ID NO: 2342084 - DNA, 25 bp, Homo sapien
gcaaatgaagtaactctctaaactt

SEQ ID NO: 2342085 - DNA, 25 bp, Homo sapien
gcaaacatttccagtcagtgatcaa

SEQ ID NO: 2342086 - DNA, 25 bp, Homo sapien
ttcttggtgcaaagtaaatctactg

SEQ ID NO: 2342087 - DNA, 25 bp, Homo sapien
gtgtgtatcaattcagcctgacaag

SEQ ID NO: 2342088 - DNA, 25 bp, Homo sapien
gcttagagtacatgacaaaacttcc

SEQ ID NO: 2342089 - DNA, 25 bp, Homo sapien
ccagatgatggcaggcgtcagagaa

SEQ ID NO: 2342090 - DNA, 25 bp, Homo sapien
tttcctacattaagtccctctatca

SEQ ID NO: 2342091 - DNA, 25 bp, Homo sapien
tgtctgcggaacttgaaaaatatcc

SEQ ID NO: 2342092 - DNA, 25 bp, Homo sapien
tccagatgggactagcactctgtgc

SEQ ID NO: 2342093 - DNA, 25 bp, Homo sapien
tatctcagacatagcaatggaagca

SEQ ID NO: 2342094 - DNA, 25 bp, Homo sapien
tgtaacctgccaatatgctgttccg

SEQ ID NO: 2342095 - DNA, 25 bp, Homo sapien
tagtgaatacttaaacccatctgac

SEQ ID NO: 2342096 - DNA, 25 bp, Homo sapien
tgtgctcctatcagtcaaaaggcat

SEQ ID NO: 2342097 - DNA, 25 bp, Homo sapien
tcaaaataattagaggttgccgtca

SEQ ID NO: 2342098 - DNA, 25 bp, Homo sapien
cagatgagtacttcttcaaacgaca

SEQ ID NO: 2342099 - DNA, 25 bp, Homo sapien
tatgacatggttagcatgcagctgg

SEQ ID NO: 2342100 - DNA, 25 bp, Homo sapien
tcaggtgccactaataaaacatagg

SEQ ID NO: 2342101 - DNA, 25 bp, Homo sapien
tgaaagggcaaacatggatctaatc

SEQ ID NO: 2342102 - DNA, 25 bp, Homo sapien
ggctttacacgtgcaccttcccatg

SEQ ID NO: 2342103 - DNA, 25 bp, Homo sapien
actctctatcttcatagcatccact

SEQ ID NO: 2342104 - DNA, 25 bp, Homo sapien
ataaacaatgtgtaaaaacactctc

SEQ ID NO: 2342105 - DNA, 25 bp, Homo sapien
tttgggtccttcaatagtcaacaca

SEQ ID NO: 2342106 - DNA, 25 bp, Homo sapien
aagtccgtatatggaagacattgac

SEQ ID NO: 2342107 - DNA, 25 bp, Homo sapien
tctccgggttgaagtccgtatatgg

SEQ ID NO: 2342108 - DNA, 25 bp, Homo sapien
cagtgtagcatgacagcgtatcccc

SEQ ID NO: 2342109 - DNA, 25 bp, Homo sapien
ggaagacattgaccagtgtagcatg

SEQ ID NO: 2342110 - DNA, 25 bp, Homo sapien
ccagcctaagtcagaagctgcccac

SEQ ID NO: 2342111 - DNA, 25 bp, Homo sapien
ggtccatagcagatataggaatgtc

SEQ ID NO: 2342112 - DNA, 25 bp, Homo sapien
tataggaatgtccaacaacccagcc

SEQ ID NO: 2342113 - DNA, 25 bp, Homo sapien
gaagaagaggtccatagcagatata

SEQ ID NO: 2342114 - DNA, 25 bp, Homo sapien
ggaaataagcgccagcatctggtgt

SEQ ID NO: 2342115 - DNA, 25 bp, Homo sapien
gggtcctgttgacggattgctctaa

SEQ ID NO: 2342116 - DNA, 25 bp, Homo sapien
tgcaagcacacggaaataagcgcca

SEQ ID NO: 2342117 - DNA, 25 bp, Homo sapien
aggcagctactccatgctctgcaag

SEQ ID NO: 2342118 - DNA, 25 bp, Homo sapien
tatacatgcattcaaatattgcccc

SEQ ID NO: 2342119 - DNA, 25 bp, Homo sapien
catctgtatccatctatctgtgcat

SEQ ID NO: 2342120 - DNA, 25 bp, Homo sapien
tattgccccttcatttaacccattc

SEQ ID NO: 2342121 - DNA, 25 bp, Homo sapien
aaatctctaagcagagttaaaattc

SEQ ID NO: 2342122 - DNA, 25 bp, Homo sapien
gtaacgagcatagtacctgagaagt

SEQ ID NO: 2342123 - DNA, 25 bp, Homo sapien
ttatcaagtaatccaggtaacgagc

SEQ ID NO: 2342124 - DNA, 25 bp, Homo sapien
tacctagactattcaaagcacatta

SEQ ID NO: 2342125 - DNA, 25 bp, Homo sapien
tttgatcctgatcctccacactcta

SEQ ID NO: 2342126 - DNA, 25 bp, Homo sapien
aactttcacctgacgacaggctgga

SEQ ID NO: 2342127 - DNA, 25 bp, Homo sapien
taatgcttgcgcatcttctggtaca

SEQ ID NO: 2342128 - DNA, 25 bp, Homo sapien
gatattggttctgacatggttcaca

SEQ ID NO: 2342129 - DNA, 25 bp, Homo sapien
gactgcagatgccttagtgacctgg

SEQ ID NO: 2342130 - DNA, 25 bp, Homo sapien
tgaatgggcatgagacctatgcacc

SEQ ID NO: 2342131 - DNA, 25 bp, Homo sapien
cacatgtgcctatcatattgtagag

SEQ ID NO: 2342132 - DNA, 25 bp, Homo sapien
tgtagagtaatttgggccctctgga

SEQ ID NO: 2342133 - DNA, 25 bp, Homo sapien
caaaggaataaatgcctaccgtaga

SEQ ID NO: 2342134 - DNA, 25 bp, Homo sapien
cacatcgttctccagccacaaataa

SEQ ID NO: 2342135 - DNA, 25 bp, Homo sapien
cagtttgccaccaatggtctaagac

SEQ ID NO: 2342136 - DNA, 25 bp, Homo sapien
ctaagacaggtactctgaagacatt

SEQ ID NO: 2342137 - DNA, 25 bp, Homo sapien
ggaccattccagggtctctacatca

SEQ ID NO: 2342138 - DNA, 25 bp, Homo sapien
agaaacaaagaagagaagataaaga

SEQ ID NO: 2342139 - DNA, 25 bp, Homo sapien
cagatataagaaacaaagaagagaa

SEQ ID NO: 2342140 - DNA, 25 bp, Homo sapien
caaagaagagaagataaagaggtct

SEQ ID NO: 2342141 - DNA, 25 bp, Homo sapien
aacaaagaagagaagataaagaggt

SEQ ID NO: 2342142 - DNA, 25 bp, Homo sapien
tatagccatccctcaaaagaagcag

SEQ ID NO: 2342143 - DNA, 25 bp, Homo sapien
tagggctcccatggctcatagctgc

SEQ ID NO: 2342144 - DNA, 25 bp, Homo sapien
tattatagaacacaagaaggtggcc

SEQ ID NO: 2342145 - DNA, 25 bp, Homo sapien
tacatataaaggttgtagggctccc

SEQ ID NO: 2342146 - DNA, 25 bp, Homo sapien
tccagtccctgacattctgtgcttg

SEQ ID NO: 2342147 - DNA, 25 bp, Homo sapien
tgcttgggaaatgtttgctgactag

SEQ ID NO: 2342148 - DNA, 25 bp, Homo sapien
aaacattctcctagcctgcagctga

SEQ ID NO: 2342149 - DNA, 25 bp, Homo sapien
gagagtcatttgtatcagcaggacc

SEQ ID NO: 2342150 - DNA, 25 bp, Homo sapien
tccacgtgcagaataggcttctgat

SEQ ID NO: 2342151 - DNA, 25 bp, Homo sapien
taggacccaaggactgacgcatctt

SEQ ID NO: 2342152 - DNA, 25 bp, Homo sapien
taggcttctgattagtgacaacccc

SEQ ID NO: 2342153 - DNA, 25 bp, Homo sapien
agcatgctgcaatccttaactgaaa

SEQ ID NO: 2342154 - DNA, 25 bp, Homo sapien
gaattgcctaatccaacacatgacg

SEQ ID NO: 2342155 - DNA, 25 bp, Homo sapien
tcctgggacgctttttcctgcttgc

SEQ ID NO: 2342156 - DNA, 25 bp, Homo sapien
ggtggaggtgttttagaattgccta

SEQ ID NO: 2342157 - DNA, 25 bp, Homo sapien
tgacgcagtaattggagatccagtc

SEQ ID NO: 2342158 - DNA, 25 bp, Homo sapien
gatccacgtttttgtaactagccat

SEQ ID NO: 2342159 - DNA, 25 bp, Homo sapien
tgatccacgtttttgtaactagcca

SEQ ID NO: 2342160 - DNA, 25 bp, Homo sapien
atccacgtttttgtaactagccatt

SEQ ID NO: 2342161 - DNA, 25 bp, Homo sapien
atgatccacgtttttgtaactagcc

SEQ ID NO: 2342162 - DNA, 25 bp, Homo sapien
gtttaacctgtactgtctgcaagcc

SEQ ID NO: 2342163 - DNA, 25 bp, Homo sapien
tacaactagatataaaaatggcact

SEQ ID NO: 2342164 - DNA, 25 bp, Homo sapien
tactgaagttacatgagggaagaaa

SEQ ID NO: 2342165 - DNA, 25 bp, Homo sapien
tctgcaagccagttgagaaacttct

SEQ ID NO: 2342166 - DNA, 25 bp, Homo sapien
cacggaggccatggctaatttatct

SEQ ID NO: 2342167 - DNA, 25 bp, Homo sapien
actagattgtgagttcacggaggcc

SEQ ID NO: 2342168 - DNA, 25 bp, Homo sapien
tctgtgctgtcctgatagaatccta

SEQ ID NO: 2342169 - DNA, 25 bp, Homo sapien
caggcacattctgtaacccgttcag

SEQ ID NO: 2342170 - DNA, 25 bp, Homo sapien
taaacaccgagccttcagtttttgc

SEQ ID NO: 2342171 - DNA, 25 bp, Homo sapien
aaacaccgagccttcagtttttgca

SEQ ID NO: 2342172 - DNA, 25 bp, Homo sapien
ctaaacaccgagccttcagtttttg

SEQ ID NO: 2342173 - DNA, 25 bp, Homo sapien
tttcaaagtataaatgcttgaatgc

SEQ ID NO: 2342174 - DNA, 25 bp, Homo sapien
ttccagagtcctgaaaaagccccag

SEQ ID NO: 2342175 - DNA, 25 bp, Homo sapien
gaaaaagccccaggtggcaatggta

SEQ ID NO: 2342176 - DNA, 25 bp, Homo sapien
tcctgattcttccagagtcctgaaa

SEQ ID NO: 2342177 - DNA, 25 bp, Homo sapien
tcaatggcgcctgcagaaattctgt

SEQ ID NO: 2342178 - DNA, 25 bp, Homo sapien
tattacatcatccactcgagacata

SEQ ID NO: 2342179 - DNA, 25 bp, Homo sapien
cataacatacaaatagccttcttca

SEQ ID NO: 2342180 - DNA, 25 bp, Homo sapien
catgtaaccagcatccatggtatca

SEQ ID NO: 2342181 - DNA, 25 bp, Homo sapien
gaaacctctacaggaacaagtgcca

SEQ ID NO: 2342182 - DNA, 25 bp, Homo sapien
cgagctgtatgacaaaacactgtgt

SEQ ID NO: 2342183 - DNA, 25 bp, Homo sapien
tcattacccataagaacagcaaagg

SEQ ID NO: 2342184 - DNA, 25 bp, Homo sapien
tgccaaggttgtaaaacccgagctg

SEQ ID NO: 2342185 - DNA, 25 bp, Homo sapien
tctccccagaggcactgttcctgta

SEQ ID NO: 2342186 - DNA, 25 bp, Homo sapien
gcatgtgttaggcaactgccagcaa

SEQ ID NO: 2342187 - DNA, 25 bp, Homo sapien
cactgttcctgtagacgttgcagga

SEQ ID NO: 2342188 - DNA, 25 bp, Homo sapien
gcaaagagacaagaccccttcctct

SEQ ID NO: 2342189 - DNA, 25 bp, Homo sapien
aaaggatcagtgccacttgctctct

SEQ ID NO: 2342190 - DNA, 25 bp, Homo sapien
gaaaggatcagtgccacttgctctc

SEQ ID NO: 2342191 - DNA, 25 bp, Homo sapien
gctcctgagagtgggtcgctgttga

SEQ ID NO: 2342192 - DNA, 25 bp, Homo sapien
ggcaaccatggatctttatattgtc

SEQ ID NO: 2342193 - DNA, 25 bp, Homo sapien
tgtaactgatgaaccaaaattggca

SEQ ID NO: 2342194 - DNA, 25 bp, Homo sapien
caaatgtataagacaggtatccacc

SEQ ID NO: 2342195 - DNA, 25 bp, Homo sapien
ggcatacaattatcatcctagttca

SEQ ID NO: 2342196 - DNA, 25 bp, Homo sapien
cacagagtgctaaggggacatgacc

SEQ ID NO: 2342197 - DNA, 25 bp, Homo sapien
gacatgaccttttaagggatcttcc

SEQ ID NO: 2342198 - DNA, 25 bp, Homo sapien
ccacggtaccatgggaaaggattga

SEQ ID NO: 2342199 - DNA, 25 bp, Homo sapien
tcttccttgccaacaacagcacagt

SEQ ID NO: 2342200 - DNA, 25 bp, Homo sapien
ggcttgccattgacaatggcagata

SEQ ID NO: 2342201 - DNA, 25 bp, Homo sapien
tctggttttgggtagctgtttgaca

SEQ ID NO: 2342202 - DNA, 25 bp, Homo sapien
aacactgcatttcgaaaagcagcca

SEQ ID NO: 2342203 - DNA, 25 bp, Homo sapien
gccacagggccaatgttctgtctaa

SEQ ID NO: 2342204 - DNA, 25 bp, Homo sapien
catctgtagctttccagagtaaaaa

SEQ ID NO: 2342205 - DNA, 25 bp, Homo sapien
attagggtcaggtgaatactcttcc

SEQ ID NO: 2342206 - DNA, 25 bp, Homo sapien
tattggacctagatggtattttctc

SEQ ID NO: 2342207 - DNA, 25 bp, Homo sapien
gagttggagttcctcttaagagtct

SEQ ID NO: 2342208 - DNA, 25 bp, Homo sapien
tcagcatttcttctacgtggccaaa

SEQ ID NO: 2342209 - DNA, 25 bp, Homo sapien
gcatttcttctacgtggccaaaaat

SEQ ID NO: 2342210 - DNA, 25 bp, Homo sapien
tttcttctacgtggccaaaaatgct

SEQ ID NO: 2342211 - DNA, 25 bp, Homo sapien
aatgctggggtcttcaattgtagaa

SEQ ID NO: 2342212 - DNA, 25 bp, Homo sapien
tctgagaaacaactcaaataattta

SEQ ID NO: 2342213 - DNA, 25 bp, Homo sapien
atcaactcaaaataggaataagaca

SEQ ID NO: 2342214 - DNA, 25 bp, Homo sapien
caactcaaaataggaataagacaaa

SEQ ID NO: 2342215 - DNA, 25 bp, Homo sapien
ttcaattaagaaattaaatcaactc

SEQ ID NO: 2342216 - DNA, 25 bp, Homo sapien
tgaaggtatagctataaccccggtg

SEQ ID NO: 2342217 - DNA, 25 bp, Homo sapien
taacaatgctaacagggtcaaacca

SEQ ID NO: 2342218 - DNA, 25 bp, Homo sapien
tagaaaagccctcctacctagataa

SEQ ID NO: 2342219 - DNA, 25 bp, Homo sapien
ggccatattctgctgggtccgctgc

SEQ ID NO: 2342220 - DNA, 25 bp, Homo sapien
atttttccaggtgtaacaatcaaga

SEQ ID NO: 2342221 - DNA, 25 bp, Homo sapien
tatttttccaggtgtaacaatcaag

SEQ ID NO: 2342222 - DNA, 25 bp, Homo sapien
tctttgatcttgcaattccccagtg

SEQ ID NO: 2342223 - DNA, 25 bp, Homo sapien
acaggaaatagccacttccccagtc

SEQ ID NO: 2342224 - DNA, 25 bp, Homo sapien
cccaaattttaagcagtctgatgat

SEQ ID NO: 2342225 - DNA, 25 bp, Homo sapien
gaaaataccaaacgaagacctcaca

SEQ ID NO: 2342226 - DNA, 25 bp, Homo sapien
tgttttctagtcacataaggctcga

SEQ ID NO: 2342227 - DNA, 25 bp, Homo sapien
caaaattgagtctgccacaagaggg

SEQ ID NO: 2342228 - DNA, 25 bp, Homo sapien
ctttctaagctcatctaaacatggg

SEQ ID NO: 2342229 - DNA, 25 bp, Homo sapien
tctaaacttgcttatgggagtgatc

SEQ ID NO: 2342230 - DNA, 25 bp, Homo sapien
taatttggcacctaattagacatga

SEQ ID NO: 2342231 - DNA, 25 bp, Homo sapien
tgtgtgcacagggttaagagaaaac

SEQ ID NO: 2342232 - DNA, 25 bp, Homo sapien
aatgaaaagcatcccgataagagat

SEQ ID NO: 2342233 - DNA, 25 bp, Homo sapien
gttatagacagaggaacaactcacc

SEQ ID NO: 2342234 - DNA, 25 bp, Homo sapien
ggtcctcagaaacattaccagctgg

SEQ ID NO: 2342235 - DNA, 25 bp, Homo sapien
caagaacttcagacgtggatcaacc

SEQ ID NO: 2342236 - DNA, 25 bp, Homo sapien
ggatcaacctggagaaggcagtttc

SEQ ID NO: 2342237 - DNA, 25 bp, Homo sapien
tacatggaatcagcatgatgcctgg

SEQ ID NO: 2342238 - DNA, 25 bp, Homo sapien
aagtagcagacgttttcagttcata

SEQ ID NO: 2342239 - DNA, 25 bp, Homo sapien
aatgtgttgtctcacacttttacac

SEQ ID NO: 2342240 - DNA, 25 bp, Homo sapien
gctgtatcaaagtaccacagattgt

SEQ ID NO: 2342241 - DNA, 25 bp, Homo sapien
caccccatgtattagtttgtcaggg

SEQ ID NO: 2342242 - DNA, 25 bp, Homo sapien
caagatcaaggaatcagcaggtctg

SEQ ID NO: 2342243 - DNA, 25 bp, Homo sapien
tgggcttgctgatggtcacctcttg

SEQ ID NO: 2342244 - DNA, 25 bp, Homo sapien
ctcctgggcttgctgatggtcacct

SEQ ID NO: 2342245 - DNA, 25 bp, Homo sapien
aggaatcagcaggtctggtttcttc

SEQ ID NO: 2342246 - DNA, 25 bp, Homo sapien
atttaatcaggaagcattcaagttg

SEQ ID NO: 2342247 - DNA, 25 bp, Homo sapien
aaattcctctgaaatcactcctgta

SEQ ID NO: 2342248 - DNA, 25 bp, Homo sapien
tttgggtgactcatgaagaaatgga

SEQ ID NO: 2342249 - DNA, 25 bp, Homo sapien
aaatggaaaatcttgcagctccagc

SEQ ID NO: 2342250 - DNA, 25 bp, Homo sapien
cactagccttcaggcaacgtttggg

SEQ ID NO: 2342251 - DNA, 25 bp, Homo sapien
cagcaaaaacggttagtcttaatgg

SEQ ID NO: 2342252 - DNA, 25 bp, Homo sapien
caaacctgtgttgttcaagagccac

SEQ ID NO: 2342253 - DNA, 25 bp, Homo sapien
ctgtgtataagtggaatgatgcagt

SEQ ID NO: 2342254 - DNA, 25 bp, Homo sapien
tcaaacctgtgttgttcaagagcca

SEQ ID NO: 2342255 - DNA, 25 bp, Homo sapien
aagtggaatgatgcagttcaaacct

SEQ ID NO: 2342256 - DNA, 25 bp, Homo sapien
gggagagattggtcatgttgtctca

SEQ ID NO: 2342257 - DNA, 25 bp, Homo sapien
gagattggtcatgttgtctcaggag

SEQ ID NO: 2342258 - DNA, 25 bp, Homo sapien
gagagattggtcatgttgtctcagg

SEQ ID NO: 2342259 - DNA, 25 bp, Homo sapien
agattggtcatgttgtctcaggagt

SEQ ID NO: 2342260 - DNA, 25 bp, Homo sapien
taaatgcctttatcctcgtcgtctt

SEQ ID NO: 2342261 - DNA, 25 bp, Homo sapien
tatgtggaagtagttcatcataaat

SEQ ID NO: 2342262 - DNA, 25 bp, Homo sapien
catcataaatgcctttatcctcgtc

SEQ ID NO: 2342263 - DNA, 25 bp, Homo sapien
tcgtcgtctttatgttgaaagtacg

SEQ ID NO: 2342264 - DNA, 25 bp, Homo sapien
cactatacctggattatgactcaag

SEQ ID NO: 2342265 - DNA, 25 bp, Homo sapien
aatttagaatacaatagccccttga

SEQ ID NO: 2342266 - DNA, 25 bp, Homo sapien
gctccattcgtacaataaagtaagc

SEQ ID NO: 2342267 - DNA, 25 bp, Homo sapien
gccccttgaataagataggagttaa

SEQ ID NO: 2342268 - DNA, 25 bp, Homo sapien
tggaaaggaattagggctcaggtct

SEQ ID NO: 2342269 - DNA, 25 bp, Homo sapien
tctgatttgtggtccagagctcttg

SEQ ID NO: 2342270 - DNA, 25 bp, Homo sapien
tagggctcaggtcttctgatttgtg

SEQ ID NO: 2342271 - DNA, 25 bp, Homo sapien
cagagctcttggcactgtattttgc

SEQ ID NO: 2342272 - DNA, 25 bp, Homo sapien
gctattttggcaagcgacgaacaaa

SEQ ID NO: 2342273 - DNA, 25 bp, Homo sapien
cagtttgacagagagttcgctgcta

SEQ ID NO: 2342274 - DNA, 25 bp, Homo sapien
tgctccgataaaatgagttgcagtt

SEQ ID NO: 2342275 - DNA, 25 bp, Homo sapien
agtttttgctccgataaaatgagtt

SEQ ID NO: 2342276 - DNA, 25 bp, Homo sapien
tcagatattagcgatcagctgcttc

SEQ ID NO: 2342277 - DNA, 25 bp, Homo sapien
gacagggaaatttagcatattagcc

SEQ ID NO: 2342278 - DNA, 25 bp, Homo sapien
gcatattagccatcagatattagcg

SEQ ID NO: 2342279 - DNA, 25 bp, Homo sapien
tagccatcagatattagcgatcagc

SEQ ID NO: 2342280 - DNA, 25 bp, Homo sapien
tgactatgcttttcgacgcagtgag

SEQ ID NO: 2342281 - DNA, 25 bp, Homo sapien
gaacatgtttattttcagcgccatc

SEQ ID NO: 2342282 - DNA, 25 bp, Homo sapien
gcacatctgggtaagttgaatcaca

SEQ ID NO: 2342283 - DNA, 25 bp, Homo sapien
gttgtaacacaagctgcactgcctc

SEQ ID NO: 2342284 - DNA, 25 bp, Homo sapien
ggtatcagcagggttcagtttttgg

SEQ ID NO: 2342285 - DNA, 25 bp, Homo sapien
ggaaggtccaagatgaaggtatcag

SEQ ID NO: 2342286 - DNA, 25 bp, Homo sapien
tatcagcagggttcagtttttggta

SEQ ID NO: 2342287 - DNA, 25 bp, Homo sapien
atcagcagggttcagtttttggtaa

SEQ ID NO: 2342288 - DNA, 25 bp, Homo sapien
gacaacacacattcactctgaggag

SEQ ID NO: 2342289 - DNA, 25 bp, Homo sapien
ggattgtgtcccctgtgatagctga

SEQ ID NO: 2342290 - DNA, 25 bp, Homo sapien
gtgtcgctgaagcaaagggctcaag

SEQ ID NO: 2342291 - DNA, 25 bp, Homo sapien
gatcatcaaattcctcagttctgtg

SEQ ID NO: 2342292 - DNA, 25 bp, Homo sapien
aaccatgcacggctgaagaggtcaa

SEQ ID NO: 2342293 - DNA, 25 bp, Homo sapien
tgttaaccatgcacggctgaagagg

SEQ ID NO: 2342294 - DNA, 25 bp, Homo sapien
gttaaccatgcacggctgaagaggt

SEQ ID NO: 2342295 - DNA, 25 bp, Homo sapien
agtgttaaccatgcacggctgaaga

SEQ ID NO: 2342296 - DNA, 25 bp, Homo sapien
ggtgtagttactatgtcacctggcc

SEQ ID NO: 2342297 - DNA, 25 bp, Homo sapien
cagtaaggactgtaacaataccccg

SEQ ID NO: 2342298 - DNA, 25 bp, Homo sapien
tggatgagacaatatacagggaagc

SEQ ID NO: 2342299 - DNA, 25 bp, Homo sapien
tcactagtcgacaggaatccaaatc

SEQ ID NO: 2342300 - DNA, 25 bp, Homo sapien
ttgcactcacgattcttcaaggcag

SEQ ID NO: 2342301 - DNA, 25 bp, Homo sapien
tggtttgcactcacgattcttcaag

SEQ ID NO: 2342302 - DNA, 25 bp, Homo sapien
actggtttgcactcacgattcttca

SEQ ID NO: 2342303 - DNA, 25 bp, Homo sapien
ggtttgcactcacgattcttcaagg

SEQ ID NO: 2342304 - DNA, 25 bp, Homo sapien
tagaggatgcagtaagttgtgagtt

SEQ ID NO: 2342305 - DNA, 25 bp, Homo sapien
tgaagtggaaggattccccttgagc

SEQ ID NO: 2342306 - DNA, 25 bp, Homo sapien
ttgagtagtggagtgtatctatggt

SEQ ID NO: 2342307 - DNA, 25 bp, Homo sapien
agtagtggagtgtatctatggtccc

SEQ ID NO: 2342308 - DNA, 25 bp, Homo sapien
gaagtcccctaggaacaggagagaa

SEQ ID NO: 2342309 - DNA, 25 bp, Homo sapien
gatactcatagcaagggaagtcccc

SEQ ID NO: 2342310 - DNA, 25 bp, Homo sapien
taagtgtccacaagcatactggtta

SEQ ID NO: 2342311 - DNA, 25 bp, Homo sapien
cagagtctggcccttagtctggcaa

SEQ ID NO: 2342312 - DNA, 25 bp, Homo sapien
ccagatttcatattcagtcaaacta

SEQ ID NO: 2342313 - DNA, 25 bp, Homo sapien
cccagatttcatattcagtcaaact

SEQ ID NO: 2342314 - DNA, 25 bp, Homo sapien
agtccatcagactaaccacggatct

SEQ ID NO: 2342315 - DNA, 25 bp, Homo sapien
agggaagtccatcagactaaccacg

SEQ ID NO: 2342316 - DNA, 25 bp, Homo sapien
gaaagagtgcgtacttcctgaaggc

SEQ ID NO: 2342317 - DNA, 25 bp, Homo sapien
atttgggaaagagtgcgtacttcct

SEQ ID NO: 2342318 - DNA, 25 bp, Homo sapien
tcctgaaggcattgcttctaaccat

SEQ ID NO: 2342319 - DNA, 25 bp, Homo sapien
ctccatgatgagaattaatttggga

SEQ ID NO: 2342320 - DNA, 25 bp, Homo sapien
caaagcgttgttatgcctgggatct

SEQ ID NO: 2342321 - DNA, 25 bp, Homo sapien
tctactaggtatcaatggaggaact

SEQ ID NO: 2342322 - DNA, 25 bp, Homo sapien
tctatttacaaagagaagctgctgc

SEQ ID NO: 2342323 - DNA, 25 bp, Homo sapien
tacaagtcacatagcgggtcaggat

SEQ ID NO: 2342324 - DNA, 25 bp, Homo sapien
tcttgttcaagctagattcccagaa

SEQ ID NO: 2342325 - DNA, 25 bp, Homo sapien
tcctttcttgttcaagctagattcc

SEQ ID NO: 2342326 - DNA, 25 bp, Homo sapien
tgttcaagctagattcccagaattc

SEQ ID NO: 2342327 - DNA, 25 bp, Homo sapien
tttcttgttcaagctagattcccag

SEQ ID NO: 2342328 - DNA, 25 bp, Homo sapien
tagccgaggtctcggcacctcgtca

SEQ ID NO: 2342329 - DNA, 25 bp, Homo sapien
gcatgtggagtgtttcttggcagca

SEQ ID NO: 2342330 - DNA, 25 bp, Homo sapien
ttcttggcagcattagccgaggtct

SEQ ID NO: 2342331 - DNA, 25 bp, Homo sapien
ttggcagcattagccgaggtctcgg

SEQ ID NO: 2342332 - DNA, 25 bp, Homo sapien
gatagccgtatttcagtcgctcctg

SEQ ID NO: 2342333 - DNA, 25 bp, Homo sapien
tcagtcaatcttaacctttctcaga

SEQ ID NO: 2342334 - DNA, 25 bp, Homo sapien
ccgtatttcagtcgctcctgttcta

SEQ ID NO: 2342335 - DNA, 25 bp, Homo sapien
cctttctcagatagccgtatttcag

SEQ ID NO: 2342336 - DNA, 25 bp, Homo sapien
cttgcaactagtgttctcaatgtga

SEQ ID NO: 2342337 - DNA, 25 bp, Homo sapien
ctagtgttctcaatgtgatggaggt

SEQ ID NO: 2342338 - DNA, 25 bp, Homo sapien
caactagtgttctcaatgtgatgga

SEQ ID NO: 2342339 - DNA, 25 bp, Homo sapien
ttgcaactagtgttctcaatgtgat

SEQ ID NO: 2342340 - DNA, 25 bp, Homo sapien
tgtcacctgagagtagcagcctcaa

SEQ ID NO: 2342341 - DNA, 25 bp, Homo sapien
caaggaaaggtagcaggcagtgtca

SEQ ID NO: 2342342 - DNA, 25 bp, Homo sapien
gagtatagtggcttggtgctcaaca

SEQ ID NO: 2342343 - DNA, 25 bp, Homo sapien
tagtaagaattcctaaagtcgaggc

SEQ ID NO: 2342344 - DNA, 25 bp, Homo sapien
caaattcagtgtctagtaaggactc

SEQ ID NO: 2342345 - DNA, 25 bp, Homo sapien
gaaggatttgccctcatcagctcat

SEQ ID NO: 2342346 - DNA, 25 bp, Homo sapien
aaatttttgtccagttgtgaaccag

SEQ ID NO: 2342347 - DNA, 25 bp, Homo sapien
aagatcaaggcaccctcaaattcag

SEQ ID NO: 2342348 - DNA, 25 bp, Homo sapien
cattataatccaagaagatctttgc

SEQ ID NO: 2342349 - DNA, 25 bp, Homo sapien
gatctttgctataacaataagttca

SEQ ID NO: 2342350 - DNA, 25 bp, Homo sapien
aatccaagaagatctttgctataac

SEQ ID NO: 2342351 - DNA, 25 bp, Homo sapien
caagaagatctttgctataacaata

SEQ ID NO: 2342352 - DNA, 25 bp, Homo sapien
aaaatttcaactacacatttcatac

SEQ ID NO: 2342353 - DNA, 25 bp, Homo sapien
tcaactacacatttcatactccaag

SEQ ID NO: 2342354 - DNA, 25 bp, Homo sapien
atttcaactacacatttcatactcc

SEQ ID NO: 2342355 - DNA, 25 bp, Homo sapien
cttaaaatttcaactacacatttca

SEQ ID NO: 2342356 - DNA, 25 bp, Homo sapien
agaacttcttgtgcatgctctgctg

SEQ ID NO: 2342357 - DNA, 25 bp, Homo sapien
tcagaacttcttgtgcatgctctgc

SEQ ID NO: 2342358 - DNA, 25 bp, Homo sapien
gaacttcttgtgcatgctctgctgt

SEQ ID NO: 2342359 - DNA, 25 bp, Homo sapien
tctcagaacttcttgtgcatgctct

SEQ ID NO: 2342360 - DNA, 25 bp, Homo sapien
ctatagatctggcctttgccaataa

SEQ ID NO: 2342361 - DNA, 25 bp, Homo sapien
taaccaggatatttagcataatcac

SEQ ID NO: 2342362 - DNA, 25 bp, Homo sapien
gagggaggtgattatcactgagaac

SEQ ID NO: 2342363 - DNA, 25 bp, Homo sapien
tcactctgctagactgtggtggagg

SEQ ID NO: 2342364 - DNA, 25 bp, Homo sapien
gcataatcactctgctagactgtgg

SEQ ID NO: 2342365 - DNA, 25 bp, Homo sapien
ctggtgactgtagagggctccccac

SEQ ID NO: 2342366 - DNA, 25 bp, Homo sapien
agagcagacatggtgagcgagccat

SEQ ID NO: 2342367 - DNA, 25 bp, Homo sapien
aaccgaggcacagcgctggtgactg

SEQ ID NO: 2342368 - DNA, 25 bp, Homo sapien
aaggcccgagagcagacatggtgag

SEQ ID NO: 2342369 - DNA, 25 bp, Homo sapien
atataaccagcgatgtgatagctat

SEQ ID NO: 2342370 - DNA, 25 bp, Homo sapien
catcatttctatttgcctgagtgag

SEQ ID NO: 2342371 - DNA, 25 bp, Homo sapien
cgatgtgatagctatattcatgtaa

SEQ ID NO: 2342372 - DNA, 25 bp, Homo sapien
cagacaatagaatatagtaatgcat

SEQ ID NO: 2342373 - DNA, 25 bp, Homo sapien
tggaaggaaaataacttgttctagc

SEQ ID NO: 2342374 - DNA, 25 bp, Homo sapien
ctggaaggaaaataacttgttctag

SEQ ID NO: 2342375 - DNA, 25 bp, Homo sapien
cgtgtacaggtccaaggtagcttct

SEQ ID NO: 2342376 - DNA, 25 bp, Homo sapien
gatagcccgaggcaacaggacgtgt

SEQ ID NO: 2342377 - DNA, 25 bp, Homo sapien
gattggcggcagcattaaccttccc

SEQ ID NO: 2342378 - DNA, 25 bp, Homo sapien
tctgaaggccaatctccaggatagc

SEQ ID NO: 2342379 - DNA, 25 bp, Homo sapien
tggagctttgcattggggcactgat

SEQ ID NO: 2342380 - DNA, 25 bp, Homo sapien
cattggggcactgataaggtaccat

SEQ ID NO: 2342381 - DNA, 25 bp, Homo sapien
gcattggggcactgataaggtacca

SEQ ID NO: 2342382 - DNA, 25 bp, Homo sapien
gagctttgcattggggcactgataa

SEQ ID NO: 2342383 - DNA, 25 bp, Homo sapien
cacagcacctatcactttcaccaca

SEQ ID NO: 2342384 - DNA, 25 bp, Homo sapien
attctcagatttgggcacaatatgc

SEQ ID NO: 2342385 - DNA, 25 bp, Homo sapien
gcacctatcactttcaccacagcat

SEQ ID NO: 2342386 - DNA, 25 bp, Homo sapien
ctcagatttgggcacaatatgcacc

SEQ ID NO: 2342387 - DNA, 25 bp, Homo sapien
aatatgccatttttccgatggacgc

SEQ ID NO: 2342388 - DNA, 25 bp, Homo sapien
ttccgatggacgcttctccttttgg

SEQ ID NO: 2342389 - DNA, 25 bp, Homo sapien
gagccacgggaagatgccgagctcc

SEQ ID NO: 2342390 - DNA, 25 bp, Homo sapien
ccacgggaagatgccgagctcctgc

SEQ ID NO: 2342391 - DNA, 25 bp, Homo sapien
cagtacttggtgataaaggggcttc

SEQ ID NO: 2342392 - DNA, 25 bp, Homo sapien
tcaaacagtacttggtgataaaggg

SEQ ID NO: 2342393 - DNA, 25 bp, Homo sapien
agtacttggtgataaaggggcttct

SEQ ID NO: 2342394 - DNA, 25 bp, Homo sapien
aacagtacttggtgataaaggggct

SEQ ID NO: 2342395 - DNA, 25 bp, Homo sapien
aaaatatgatatgatgtggttgagg

SEQ ID NO: 2342396 - DNA, 25 bp, Homo sapien
atatgatatgatgtggttgaggctc

SEQ ID NO: 2342397 - DNA, 25 bp, Homo sapien
tgatatgatgtggttgaggctcttc

SEQ ID NO: 2342398 - DNA, 25 bp, Homo sapien
tatgatatgatgtggttgaggctct

SEQ ID NO: 2342399 - DNA, 25 bp, Homo sapien
ttgtcttgtttcactcatgcctgtg

SEQ ID NO: 2342400 - DNA, 25 bp, Homo sapien
gattctgaacaatcatctcgttcat

SEQ ID NO: 2342401 - DNA, 25 bp, Homo sapien
caatcatctcgttcatctagttcca

SEQ ID NO: 2342402 - DNA, 25 bp, Homo sapien
caacttcagtttgaacatcagcttc

SEQ ID NO: 2342403 - DNA, 25 bp, Homo sapien
caaattctcattgaagtgagactgg

SEQ ID NO: 2342404 - DNA, 25 bp, Homo sapien
cattgaagtgagactggtacttctc

SEQ ID NO: 2342405 - DNA, 25 bp, Homo sapien
cttctcagcgtccatcatagaggta

SEQ ID NO: 2342406 - DNA, 25 bp, Homo sapien
agttggtgtaacaagtcaaattctc

SEQ ID NO: 2342407 - DNA, 25 bp, Homo sapien
tctgtactcaggaatggccatttgg

SEQ ID NO: 2342408 - DNA, 25 bp, Homo sapien
ggctatttgacttatagcaatttcc

SEQ ID NO: 2342409 - DNA, 25 bp, Homo sapien
tttggaccataggatgctgacttct

SEQ ID NO: 2342410 - DNA, 25 bp, Homo sapien
tcaggaatggccatttggaccatag

SEQ ID NO: 2342411 - DNA, 25 bp, Homo sapien
ctaaaaggtgccgatatttcttgat

SEQ ID NO: 2342412 - DNA, 25 bp, Homo sapien
cctgatccaaatgggcaatcagttt

SEQ ID NO: 2342413 - DNA, 25 bp, Homo sapien
taacagaggatcctaaaaggtgccg

SEQ ID NO: 2342414 - DNA, 25 bp, Homo sapien
tgcttgtgccccaagaacttaacag

SEQ ID NO: 2342415 - DNA, 25 bp, Homo sapien
ctttaagtcccttgatgactcatgg

SEQ ID NO: 2342416 - DNA, 25 bp, Homo sapien
tgaaattggcctgactgcagagaga

SEQ ID NO: 2342417 - DNA, 25 bp, Homo sapien
tgtgaagcacttatgaaccagagaa

SEQ ID NO: 2342418 - DNA, 25 bp, Homo sapien
ggacctaatttactagcccattatg

SEQ ID NO: 2342419 - DNA, 25 bp, Homo sapien
tccaataggtaagagtgcaaaaggc

SEQ ID NO: 2342420 - DNA, 25 bp, Homo sapien
tccaggtgacaagtagagtagttac

SEQ ID NO: 2342421 - DNA, 25 bp, Homo sapien
tctagtaagtcttcccgagagagga

SEQ ID NO: 2342422 - DNA, 25 bp, Homo sapien
catgacagcctgcacaatggaaaca

SEQ ID NO: 2342423 - DNA, 25 bp, Homo sapien
gacatgtctccatatctaagaattg

SEQ ID NO: 2342424 - DNA, 25 bp, Homo sapien
ttgcttagcaacaatctggtcattt

SEQ ID NO: 2342425 - DNA, 25 bp, Homo sapien
gtctccatatctaagaattgtttta

SEQ ID NO: 2342426 - DNA, 25 bp, Homo sapien
catgtctccatatctaagaattgtt

SEQ ID NO: 2342427 - DNA, 25 bp, Homo sapien
tctgcagaaagtagcttagcacagt

SEQ ID NO: 2342428 - DNA, 25 bp, Homo sapien
caatagctgaggtttacgttcccaa

SEQ ID NO: 2342429 - DNA, 25 bp, Homo sapien
aacagcgttttcataggcagggaca

SEQ ID NO: 2342430 - DNA, 25 bp, Homo sapien
tacctctgcaaaagtagaacagcgt

SEQ ID NO: 2342431 - DNA, 25 bp, Homo sapien
ccttagggcaagtaaagtacatgtc

SEQ ID NO: 2342432 - DNA, 25 bp, Homo sapien
tgtgaggcacagtgggacaatctcc

SEQ ID NO: 2342433 - DNA, 25 bp, Homo sapien
ggaacaccagtaagagggatacacc

SEQ ID NO: 2342434 - DNA, 25 bp, Homo sapien
gaaacaccagaagatatgctcacat

SEQ ID NO: 2342435 - DNA, 25 bp, Homo sapien
ggataatgaggactgagagtgccaa

SEQ ID NO: 2342436 - DNA, 25 bp, Homo sapien
gataatgaggactgagagtgccaaa

SEQ ID NO: 2342437 - DNA, 25 bp, Homo sapien
atgaggactgagagtgccaaaatct

SEQ ID NO: 2342438 - DNA, 25 bp, Homo sapien
taatgaggactgagagtgccaaaat

SEQ ID NO: 2342439 - DNA, 25 bp, Homo sapien
tgctttaccaaggtggtgagtggcc

SEQ ID NO: 2342440 - DNA, 25 bp, Homo sapien
tatgaatctcagtggtgctttacca

SEQ ID NO: 2342441 - DNA, 25 bp, Homo sapien
attctagatatgaatctcagtggtg

SEQ ID NO: 2342442 - DNA, 25 bp, Homo sapien
cagtggtgctttaccaaggtggtga

SEQ ID NO: 2342443 - DNA, 25 bp, Homo sapien
tgtacatattgcaggaagaatgcta

SEQ ID NO: 2342444 - DNA, 25 bp, Homo sapien
tctgtacttccaaacacaagatcca

SEQ ID NO: 2342445 - DNA, 25 bp, Homo sapien
catagtaattgaattcttggcattg

SEQ ID NO: 2342446 - DNA, 25 bp, Homo sapien
gtacttgtattcttcatagtaattg

SEQ ID NO: 2342447 - DNA, 25 bp, Homo sapien
cttttcccattgccaagagtccctg

SEQ ID NO: 2342448 - DNA, 25 bp, Homo sapien
gtccctggtttctattagctcccca

SEQ ID NO: 2342449 - DNA, 25 bp, Homo sapien
tggtttctattagctccccatggtt

SEQ ID NO: 2342450 - DNA, 25 bp, Homo sapien
tttctattagctccccatggtttca

SEQ ID NO: 2342451 - DNA, 25 bp, Homo sapien
cagaggatggtggtactgtatccaa

SEQ ID NO: 2342452 - DNA, 25 bp, Homo sapien
actgtatccaattcttggtggagac

SEQ ID NO: 2342453 - DNA, 25 bp, Homo sapien
agtaaattgcaaggaagaccctaca

SEQ ID NO: 2342454 - DNA, 25 bp, Homo sapien
caatatcatcgtaggataacatttc

SEQ ID NO: 2342455 - DNA, 25 bp, Homo sapien
ttatcacaacgctaaagggtagagg

SEQ ID NO: 2342456 - DNA, 25 bp, Homo sapien
gaggtctgagaccaaagtgatggca

SEQ ID NO: 2342457 - DNA, 25 bp, Homo sapien
ccttgtattagttagctagggctgc

SEQ ID NO: 2342458 - DNA, 25 bp, Homo sapien
aataatggagatcttcccaggaatc

SEQ ID NO: 2342459 - DNA, 25 bp, Homo sapien
tcttcaatgtatcgccatgattcaa

SEQ ID NO: 2342460 - DNA, 25 bp, Homo sapien
ttcttcaatgtatcgccatgattca

SEQ ID NO: 2342461 - DNA, 25 bp, Homo sapien
cttcaatgtatcgccatgattcaac

SEQ ID NO: 2342462 - DNA, 25 bp, Homo sapien
tttcttcaatgtatcgccatgattc

SEQ ID NO: 2342463 - DNA, 25 bp, Homo sapien
tatttccagctacccacaaagatgg

SEQ ID NO: 2342464 - DNA, 25 bp, Homo sapien
catatgactggattaggatggcagc

SEQ ID NO: 2342465 - DNA, 25 bp, Homo sapien
tgaatgtcctctccagaggatgtca

SEQ ID NO: 2342466 - DNA, 25 bp, Homo sapien
gcagctgtcagcatgatcttctgaa

SEQ ID NO: 2342467 - DNA, 25 bp, Homo sapien
ctataaaaacaaagtccacagttat

SEQ ID NO: 2342468 - DNA, 25 bp, Homo sapien
caaagtccacagttatttggaaaat

SEQ ID NO: 2342469 - DNA, 25 bp, Homo sapien
aagtccacagttatttggaaaatag

SEQ ID NO: 2342470 - DNA, 25 bp, Homo sapien
tctataaaaacaaagtccacagtta

SEQ ID NO: 2342471 - DNA, 25 bp, Homo sapien
taagaaccacgaagaatgtgttttc

SEQ ID NO: 2342472 - DNA, 25 bp, Homo sapien
ctcataagaaccacgaagaatgtgt

SEQ ID NO: 2342473 - DNA, 25 bp, Homo sapien
atttgcctgaagactacatgacttg

SEQ ID NO: 2342474 - DNA, 25 bp, Homo sapien
tttctatttgcctgaagactacatg

SEQ ID NO: 2342475 - DNA, 25 bp, Homo sapien
gatggctcccatacagtcaagtaac

SEQ ID NO: 2342476 - DNA, 25 bp, Homo sapien
ttgatcctaaggtaaatgtttattc

SEQ ID NO: 2342477 - DNA, 25 bp, Homo sapien
tgccaaacatgatggctcccataca

SEQ ID NO: 2342478 - DNA, 25 bp, Homo sapien
tgtgtagttttgatcctaaggtaaa

SEQ ID NO: 2342479 - DNA, 25 bp, Homo sapien
tcaagtaactggaaggctttaagct

SEQ ID NO: 2342480 - DNA, 25 bp, Homo sapien
tccctagtcttctcaaaaggtggta

SEQ ID NO: 2342481 - DNA, 25 bp, Homo sapien
gcttcactgatacttcagaggcaca

SEQ ID NO: 2342482 - DNA, 25 bp, Homo sapien
ctaccttcatgggttagtggttcac

SEQ ID NO: 2342483 - DNA, 25 bp, Homo sapien
tttctcattgcccttgcttgaattt

SEQ ID NO: 2342484 - DNA, 25 bp, Homo sapien
cgtttctcattgcccttgcttgaat

SEQ ID NO: 2342485 - DNA, 25 bp, Homo sapien
acgtttctcattgcccttgcttgaa

SEQ ID NO: 2342486 - DNA, 25 bp, Homo sapien
ttaagtttcgtattgcaatctacaa

SEQ ID NO: 2342487 - DNA, 25 bp, Homo sapien
tgatcacacagctgttctacatggg

SEQ ID NO: 2342488 - DNA, 25 bp, Homo sapien
cagagttggcttcattcccaaaagg

SEQ ID NO: 2342489 - DNA, 25 bp, Homo sapien
tctgttagattatcacctggtgtgc

SEQ ID NO: 2342490 - DNA, 25 bp, Homo sapien
ttaatactattctcctcacacaggc

SEQ ID NO: 2342491 - DNA, 25 bp, Homo sapien
cagctttctaactggttatctgtct

SEQ ID NO: 2342492 - DNA, 25 bp, Homo sapien
agctttctaactggttatctgtctt

SEQ ID NO: 2342493 - DNA, 25 bp, Homo sapien
cagggtagttcctttttccaggcat

SEQ ID NO: 2342494 - DNA, 25 bp, Homo sapien
tcagggtagttcctttttccaggca

SEQ ID NO: 2342495 - DNA, 25 bp, Homo sapien
tctgtggcttgaaatctccctgtgg

SEQ ID NO: 2342496 - DNA, 25 bp, Homo sapien
gaaatctccctgtggttgcatagca

SEQ ID NO: 2342497 - DNA, 25 bp, Homo sapien
gttgcatagcaacctccgcaagttg

SEQ ID NO: 2342498 - DNA, 25 bp, Homo sapien
tccgcaagttgcgaacagcaaaatg

SEQ ID NO: 2342499 - DNA, 25 bp, Homo sapien
cagagtcggcacacaaggatgagta

SEQ ID NO: 2342500 - DNA, 25 bp, Homo sapien
cacaaacagctctatgcagaagtct

SEQ ID NO: 2342501 - DNA, 25 bp, Homo sapien
tacaggtgggctaatcagtctaccc

SEQ ID NO: 2342502 - DNA, 25 bp, Homo sapien
ccagatgccgttttgtaaggtcaca

SEQ ID NO: 2342503 - DNA, 25 bp, Homo sapien
aactcccctggatagcccaaataat

SEQ ID NO: 2342504 - DNA, 25 bp, Homo sapien
tgtgtatttgggaagctttagcata

SEQ ID NO: 2342505 - DNA, 25 bp, Homo sapien
tattgcatggttctgaaagacagtg

SEQ ID NO: 2342506 - DNA, 25 bp, Homo sapien
aaaagttccaacaatttccatgact

SEQ ID NO: 2342507 - DNA, 25 bp, Homo sapien
tcgcgagggtatgtaagaaggcaac

SEQ ID NO: 2342508 - DNA, 25 bp, Homo sapien
gagccggattccttctgagcgattg

SEQ ID NO: 2342509 - DNA, 25 bp, Homo sapien
tattttgtgggcgtccgtcgtggtc

SEQ ID NO: 2342510 - DNA, 25 bp, Homo sapien
gacagaagacatggcggcctaacca

SEQ ID NO: 2342511 - DNA, 25 bp, Homo sapien
tgtgtagaaatccacggtatgtgca

SEQ ID NO: 2342512 - DNA, 25 bp, Homo sapien
ctgcaacttggcacgcagcgtgggc

SEQ ID NO: 2342513 - DNA, 25 bp, Homo sapien
agccagcactgtctccggtggcaag

SEQ ID NO: 2342514 - DNA, 25 bp, Homo sapien
aatggacagggcatccctcaggaac

SEQ ID NO: 2342515 - DNA, 25 bp, Homo sapien
agggggcgcgtctctgagggcaggg

SEQ ID NO: 2342516 - DNA, 25 bp, Homo sapien
actagggggcgcgtctctgagggca

SEQ ID NO: 2342517 - DNA, 25 bp, Homo sapien
gcttccactagggggcgcgtctctg

SEQ ID NO: 2342518 - DNA, 25 bp, Homo sapien
ttccactagggggcgcgtctctgag

SEQ ID NO: 2342519 - DNA, 25 bp, Homo sapien
tccaccagggggctcgcttcgtctg

SEQ ID NO: 2342520 - DNA, 25 bp, Homo sapien
gggctcgcttcgtctgccgggacct

SEQ ID NO: 2342521 - DNA, 25 bp, Homo sapien
ttccaccagggggctcgcttcgtct

SEQ ID NO: 2342522 - DNA, 25 bp, Homo sapien
cagggggctcgcttcgtctgccggg

SEQ ID NO: 2342523 - DNA, 25 bp, Homo sapien
ggacacatctgaaggaagaaactcc

SEQ ID NO: 2342524 - DNA, 25 bp, Homo sapien
aaactctggacacatctgaaggaag

SEQ ID NO: 2342525 - DNA, 25 bp, Homo sapien
agcaggaccatgaacccaccagaag

SEQ ID NO: 2342526 - DNA, 25 bp, Homo sapien
tctggacacatctgaaggaagaaac

SEQ ID NO: 2342527 - DNA, 25 bp, Homo sapien
tcttaaagagtgtaatactcaccgc

SEQ ID NO: 2342528 - DNA, 25 bp, Homo sapien
agagtgtaatactcaccgcaaaggt

SEQ ID NO: 2342529 - DNA, 25 bp, Homo sapien
caccatcttaaagagtgtaatactc

SEQ ID NO: 2342530 - DNA, 25 bp, Homo sapien
cagacacaccatcttaaagagtgta

SEQ ID NO: 2342531 - DNA, 25 bp, Homo sapien
tctggtatagtaagcaagatccaag

SEQ ID NO: 2342532 - DNA, 25 bp, Homo sapien
tgaactctcatcaccctctgagtct

SEQ ID NO: 2342533 - DNA, 25 bp, Homo sapien
taaagcacttatcaccatctggtat

SEQ ID NO: 2342534 - DNA, 25 bp, Homo sapien
catttcggtgaaaacttctctgaca

SEQ ID NO: 2342535 - DNA, 25 bp, Homo sapien
cagcaaggacagcattactatcaaa

SEQ ID NO: 2342536 - DNA, 25 bp, Homo sapien
gagtgtcagaagattcagtactctt

SEQ ID NO: 2342537 - DNA, 25 bp, Homo sapien
gaatcctttagtgactacagcaagg

SEQ ID NO: 2342538 - DNA, 25 bp, Homo sapien
tgtgtcaagacggaacattcctcag

SEQ ID NO: 2342539 - DNA, 25 bp, Homo sapien
tagtatttcgcagccagagcaaagg

SEQ ID NO: 2342540 - DNA, 25 bp, Homo sapien
gatttcctcgaagggctacaagcaa

SEQ ID NO: 2342541 - DNA, 25 bp, Homo sapien
tgttcaaaaggagtacatattccca

SEQ ID NO: 2342542 - DNA, 25 bp, Homo sapien
cactcaccaacttctgagaagtttc

SEQ ID NO: 2342543 - DNA, 25 bp, Homo sapien
tgacattgcctgaacttcatgagat

SEQ ID NO: 2342544 - DNA, 25 bp, Homo sapien
tccatagtagtcagcaatactgctg

SEQ ID NO: 2342545 - DNA, 25 bp, Homo sapien
tcttcatattcataaactcaactgc

SEQ ID NO: 2342546 - DNA, 25 bp, Homo sapien
ctgctttattccatagtagtcagca

SEQ ID NO: 2342547 - DNA, 25 bp, Homo sapien
cctcagctccatgagtattggtatt

SEQ ID NO: 2342548 - DNA, 25 bp, Homo sapien
gagtattggtatttgaagaatcaat

SEQ ID NO: 2342549 - DNA, 25 bp, Homo sapien
tgaagaatcaattccataaactttt

SEQ ID NO: 2342550 - DNA, 25 bp, Homo sapien
caaggacaaaaaagagcttaggtag

SEQ ID NO: 2342551 - DNA, 25 bp, Homo sapien
ggcaaaatagctgaggtaggcatct

SEQ ID NO: 2342552 - DNA, 25 bp, Homo sapien
tttgctgtgaagaagtaggctctac

SEQ ID NO: 2342553 - DNA, 25 bp, Homo sapien
attgacatctaatcttgactgagca

SEQ ID NO: 2342554 - DNA, 25 bp, Homo sapien
gccatttttaatgctagtccattga

SEQ ID NO: 2342555 - DNA, 25 bp, Homo sapien
aataatgtcatggagttctgaatca

SEQ ID NO: 2342556 - DNA, 25 bp, Homo sapien
tgtcatggagttctgaatcagcagt

SEQ ID NO: 2342557 - DNA, 25 bp, Homo sapien
ctccaaatctttaataatgtcatgg

SEQ ID NO: 2342558 - DNA, 25 bp, Homo sapien
catggagttctgaatcagcagtgat

SEQ ID NO: 2342559 - DNA, 25 bp, Homo sapien
actgcaaactcccttgatttcagag

SEQ ID NO: 2342560 - DNA, 25 bp, Homo sapien
tggagccagatcaccacaagtgtgg

SEQ ID NO: 2342561 - DNA, 25 bp, Homo sapien
gttggaggtaaatattcgcaaagta

SEQ ID NO: 2342562 - DNA, 25 bp, Homo sapien
aatattcgcaaagtatttggagcca

SEQ ID NO: 2342563 - DNA, 25 bp, Homo sapien
cttcagataagaggtggtagcaaca

SEQ ID NO: 2342564 - DNA, 25 bp, Homo sapien
aattcttcagataagaggtggtagc

SEQ ID NO: 2342565 - DNA, 25 bp, Homo sapien
tttcaaattcttcagataagaggtg

SEQ ID NO: 2342566 - DNA, 25 bp, Homo sapien
gataagaggtggtagcaacaaccca

SEQ ID NO: 2342567 - DNA, 25 bp, Homo sapien
caaagtgtctacacctgtccccaaa

SEQ ID NO: 2342568 - DNA, 25 bp, Homo sapien
tagcatgacaatcgtatactctcca

SEQ ID NO: 2342569 - DNA, 25 bp, Homo sapien
tttcattgtacctacagaacaggaa

SEQ ID NO: 2342570 - DNA, 25 bp, Homo sapien
tcttaccctactgccaattaaggaa

SEQ ID NO: 2342571 - DNA, 25 bp, Homo sapien
catttcatcatatcactcagtcctg

SEQ ID NO: 2342572 - DNA, 25 bp, Homo sapien
tactattagctttccccactgaagc

SEQ ID NO: 2342573 - DNA, 25 bp, Homo sapien
agcattgtttgcctgatcatatcaa

SEQ ID NO: 2342574 - DNA, 25 bp, Homo sapien
gcaaaactcccaatcgtctattcat

SEQ ID NO: 2342575 - DNA, 25 bp, Homo sapien
aaacatgaagttaagcctgcaggct

SEQ ID NO: 2342576 - DNA, 25 bp, Homo sapien
gactgtgcaaatgtggagtgcacta

SEQ ID NO: 2342577 - DNA, 25 bp, Homo sapien
taacaatactagaagatgccctggg

SEQ ID NO: 2342578 - DNA, 25 bp, Homo sapien
tgcaggctttcgagggttacaccac

SEQ ID NO: 2342579 - DNA, 25 bp, Homo sapien
aacattgtgttggtttggcaaacac

SEQ ID NO: 2342580 - DNA, 25 bp, Homo sapien
tcagtccagatacaactgtcctggt

SEQ ID NO: 2342581 - DNA, 25 bp, Homo sapien
tgtgtatgacaggttccctctgctg

SEQ ID NO: 2342582 - DNA, 25 bp, Homo sapien
tgcatgactatacaatggcaaaacc

SEQ ID NO: 2342583 - DNA, 25 bp, Homo sapien
caactgtctgctcaacgtcatctta

SEQ ID NO: 2342584 - DNA, 25 bp, Homo sapien
tgcactatcgccaccttccatatgg

SEQ ID NO: 2342585 - DNA, 25 bp, Homo sapien
ggattccagcaatagttccctaaga

SEQ ID NO: 2342586 - DNA, 25 bp, Homo sapien
tctgtctggaagaccgtctgtctcc

SEQ ID NO: 2342587 - DNA, 25 bp, Homo sapien
gccaatttgtaacctttgcactacc

SEQ ID NO: 2342588 - DNA, 25 bp, Homo sapien
tctatctgcctatgaaatgttcctg

SEQ ID NO: 2342589 - DNA, 25 bp, Homo sapien
tggtaaccaagtatcacatctgctg

SEQ ID NO: 2342590 - DNA, 25 bp, Homo sapien
gcaccctctgtcagtgatagccaat

SEQ ID NO: 2342591 - DNA, 25 bp, Homo sapien
tggaaatccccacttttcctgagta

SEQ ID NO: 2342592 - DNA, 25 bp, Homo sapien
tgacattctggcattacgaccacag

SEQ ID NO: 2342593 - DNA, 25 bp, Homo sapien
cattctggcattacgaccacagcac

SEQ ID NO: 2342594 - DNA, 25 bp, Homo sapien
atgctgacattctggcattacgacc

SEQ ID NO: 2342595 - DNA, 25 bp, Homo sapien
tggcattacgaccacagcaccatct

SEQ ID NO: 2342596 - DNA, 25 bp, Homo sapien
ggccagctgcaacccgctccaatgc

SEQ ID NO: 2342597 - DNA, 25 bp, Homo sapien
cttggccagctgcaacccgctccaa

SEQ ID NO: 2342598 - DNA, 25 bp, Homo sapien
ttggccagctgcaacccgctccaat

SEQ ID NO: 2342599 - DNA, 25 bp, Homo sapien
cccttggccagctgcaacccgctcc

SEQ ID NO: 2342600 - DNA, 25 bp, Homo sapien
cctctgaagtcgctagtgaacacag

SEQ ID NO: 2342601 - DNA, 25 bp, Homo sapien
tcttagagcattgtgaaagaataca

SEQ ID NO: 2342602 - DNA, 25 bp, Homo sapien
ggcactgccctctgaagtcgctagt

SEQ ID NO: 2342603 - DNA, 25 bp, Homo sapien
tgaacacagacttgtagactcttag

SEQ ID NO: 2342604 - DNA, 25 bp, Homo sapien
tacgagcgaaagtgttaccctgagg

SEQ ID NO: 2342605 - DNA, 25 bp, Homo sapien
tggaaccacacgtgactgtcagaaa

SEQ ID NO: 2342606 - DNA, 25 bp, Homo sapien
ttgttgctaaacacagaggatgact

SEQ ID NO: 2342607 - DNA, 25 bp, Homo sapien
taaataccagaatgttggaaccaca

SEQ ID NO: 2342608 - DNA, 25 bp, Homo sapien
cgatagaagagtgattcagtaggca

SEQ ID NO: 2342609 - DNA, 25 bp, Homo sapien
acagcacgatagaagagtgattcag

SEQ ID NO: 2342610 - DNA, 25 bp, Homo sapien
cataacaatctttaataatatcctg

SEQ ID NO: 2342611 - DNA, 25 bp, Homo sapien
tgccataacaatctttaataatatc

SEQ ID NO: 2342612 - DNA, 25 bp, Homo sapien
cctgcataaattcacctgaagacta

SEQ ID NO: 2342613 - DNA, 25 bp, Homo sapien
tcaaagttgcttctactaataacag

SEQ ID NO: 2342614 - DNA, 25 bp, Homo sapien
gacaagaaggaatcattagagcccc

SEQ ID NO: 2342615 - DNA, 25 bp, Homo sapien
tgataattaacctaagatacagttg

SEQ ID NO: 2342616 - DNA, 25 bp, Homo sapien
ggtgaagcagaggtatactaaataa

SEQ ID NO: 2342617 - DNA, 25 bp, Homo sapien
ttaagggagctccaaaaaatcttca

SEQ ID NO: 2342618 - DNA, 25 bp, Homo sapien
tactcaagtgaatccaacaacaccc

SEQ ID NO: 2342619 - DNA, 25 bp, Homo sapien
taagaacatggtttacttgtaacac

SEQ ID NO: 2342620 - DNA, 25 bp, Homo sapien
cgtctgacataatccagaaaagaag

SEQ ID NO: 2342621 - DNA, 25 bp, Homo sapien
taatccaagcttctttagagaccgt

SEQ ID NO: 2342622 - DNA, 25 bp, Homo sapien
ttagagaccgtctgacataatccag

SEQ ID NO: 2342623 - DNA, 25 bp, Homo sapien
tggactcatctaatccaagcttctt

SEQ ID NO: 2342624 - DNA, 25 bp, Homo sapien
tagacagcctggattagaattcttc

SEQ ID NO: 2342625 - DNA, 25 bp, Homo sapien
tagattttgggctaaagaaatccac

SEQ ID NO: 2342626 - DNA, 25 bp, Homo sapien
aaggccatccttagtattcaatgag

SEQ ID NO: 2342627 - DNA, 25 bp, Homo sapien
gcatgagttctagagttagacagcc

SEQ ID NO: 2342628 - DNA, 25 bp, Homo sapien
cagtatctgccacaagtaggatgag

SEQ ID NO: 2342629 - DNA, 25 bp, Homo sapien
taaaaaaactacagtatctgccaca

SEQ ID NO: 2342630 - DNA, 25 bp, Homo sapien
agtatctgccacaagtaggatgagg

SEQ ID NO: 2342631 - DNA, 25 bp, Homo sapien
atttccagagccatgagaaaacaaa

SEQ ID NO: 2342632 - DNA, 25 bp, Homo sapien
tccagagccatgagaaaacaaatac

SEQ ID NO: 2342633 - DNA, 25 bp, Homo sapien
ttccagagccatgagaaaacaaata

SEQ ID NO: 2342634 - DNA, 25 bp, Homo sapien
cagagccatgagaaaacaaatacac

SEQ ID NO: 2342635 - DNA, 25 bp, Homo sapien
ttcttttgactggtaaaatagctac

SEQ ID NO: 2342636 - DNA, 25 bp, Homo sapien
actggtaaaatagctaccctgatcc

SEQ ID NO: 2342637 - DNA, 25 bp, Homo sapien
gctaccctgatccagggatcaagta

SEQ ID NO: 2342638 - DNA, 25 bp, Homo sapien
tttgactggtaaaatagctaccctg

SEQ ID NO: 2342639 - DNA, 25 bp, Homo sapien
ctattagtttcttagacctctgcag

SEQ ID NO: 2342640 - DNA, 25 bp, Homo sapien
aaatgttcactttgaaagcaagcat

SEQ ID NO: 2342641 - DNA, 25 bp, Homo sapien
caaaggatctattagtttcttagac

SEQ ID NO: 2342642 - DNA, 25 bp, Homo sapien
cttcattcaaaggatctattagttt

SEQ ID NO: 2342643 - DNA, 25 bp, Homo sapien
taactgcaggttctgtacccacaga

SEQ ID NO: 2342644 - DNA, 25 bp, Homo sapien
tacccacagacttaatcatctgcag

SEQ ID NO: 2342645 - DNA, 25 bp, Homo sapien
atacagctggccttctctaactgca

SEQ ID NO: 2342646 - DNA, 25 bp, Homo sapien
aagcgcataagaagtatacagctgg

SEQ ID NO: 2342647 - DNA, 25 bp, Homo sapien
tacactgatataggttatgcagcac

SEQ ID NO: 2342648 - DNA, 25 bp, Homo sapien
tcatgaagcaagtcaagataactct

SEQ ID NO: 2342649 - DNA, 25 bp, Homo sapien
gaactcgctctaaggatattcatga

SEQ ID NO: 2342650 - DNA, 25 bp, Homo sapien
cacacaggaggagatcaaacatttt

SEQ ID NO: 2342651 - DNA, 25 bp, Homo sapien
ggcttatacttctcgtagtagttca

SEQ ID NO: 2342652 - DNA, 25 bp, Homo sapien
tcattcattcgaggcttatacttct

SEQ ID NO: 2342653 - DNA, 25 bp, Homo sapien
cattcgaggcttatacttctcgtag

SEQ ID NO: 2342654 - DNA, 25 bp, Homo sapien
tccagctcattcattcgaggcttat

SEQ ID NO: 2342655 - DNA, 25 bp, Homo sapien
aatcaaagtctctatacagggagcc

SEQ ID NO: 2342656 - DNA, 25 bp, Homo sapien
tctctatacagggagccagtacaac

SEQ ID NO: 2342657 - DNA, 25 bp, Homo sapien
ctctttcaggtaacaaagtcgatcc

SEQ ID NO: 2342658 - DNA, 25 bp, Homo sapien
taacaaagtcgatccagaagaatca

SEQ ID NO: 2342659 - DNA, 25 bp, Homo sapien
gtggccaatcacaaatgagtattag

SEQ ID NO: 2342660 - DNA, 25 bp, Homo sapien
tttgctacggttgtgaaaaactgga

SEQ ID NO: 2342661 - DNA, 25 bp, Homo sapien
gattttatcacccactaacttagga

SEQ ID NO: 2342662 - DNA, 25 bp, Homo sapien
tacctcttgtacataggtcaatgga

SEQ ID NO: 2342663 - DNA, 25 bp, Homo sapien
aacatctgggagatttcacgggatc

SEQ ID NO: 2342664 - DNA, 25 bp, Homo sapien
tgggagatttcacgggatcaaacaa

SEQ ID NO: 2342665 - DNA, 25 bp, Homo sapien
gatttcacgggatcaaacaacttca

SEQ ID NO: 2342666 - DNA, 25 bp, Homo sapien
catctgggagatttcacgggatcaa

SEQ ID NO: 2342667 - DNA, 25 bp, Homo sapien
actgctgcttcttcagggcaataac

SEQ ID NO: 2342668 - DNA, 25 bp, Homo sapien
tcactgctgcttcttcagggcaata

SEQ ID NO: 2342669 - DNA, 25 bp, Homo sapien
cactgctgcttcttcagggcaataa

SEQ ID NO: 2342670 - DNA, 25 bp, Homo sapien
tgtataacaggacatatatgtttag

SEQ ID NO: 2342671 - DNA, 25 bp, Homo sapien
aagcaatctcagcaacaggtctcat

SEQ ID NO: 2342672 - DNA, 25 bp, Homo sapien
gcaacaggtctcatagagaaataca

SEQ ID NO: 2342673 - DNA, 25 bp, Homo sapien
gagaaatacatctaataatttgctt

SEQ ID NO: 2342674 - DNA, 25 bp, Homo sapien
attaatgtatgctttgacaatggaa

SEQ ID NO: 2342675 - DNA, 25 bp, Homo sapien
ttaatgtatgctttgacaatggaaa

SEQ ID NO: 2342676 - DNA, 25 bp, Homo sapien
tattaatgtatgctttgacaatgga

SEQ ID NO: 2342677 - DNA, 25 bp, Homo sapien
catctggataagcaggactcgaact

SEQ ID NO: 2342678 - DNA, 25 bp, Homo sapien
tggccatgccccttggaaagagaat

SEQ ID NO: 2342679 - DNA, 25 bp, Homo sapien
gcaactcaggtatcaggtgttccct

SEQ ID NO: 2342680 - DNA, 25 bp, Homo sapien
gggagcggcaatattcaccaggcat

SEQ ID NO: 2342681 - DNA, 25 bp, Homo sapien
aattcccgcatgtttctttgtagac

SEQ ID NO: 2342682 - DNA, 25 bp, Homo sapien
attcctcttgagtaaatatctatga

SEQ ID NO: 2342683 - DNA, 25 bp, Homo sapien
catgtagtctattgtgcctggctta

SEQ ID NO: 2342684 - DNA, 25 bp, Homo sapien
gccacttagtataatgagattttga

SEQ ID NO: 2342685 - DNA, 25 bp, Homo sapien
caaattaggaggtgacatgagcaac

SEQ ID NO: 2342686 - DNA, 25 bp, Homo sapien
caaatatcttcagggcccattagga

SEQ ID NO: 2342687 - DNA, 25 bp, Homo sapien
tgatctctaaggtcgcagtcctgaa

SEQ ID NO: 2342688 - DNA, 25 bp, Homo sapien
cactggtagggatcacacgcatgtt

SEQ ID NO: 2342689 - DNA, 25 bp, Homo sapien
aatttaactgataggcttgtcagca

SEQ ID NO: 2342690 - DNA, 25 bp, Homo sapien
catgttgctgctgcaatgattcagc

SEQ ID NO: 2342691 - DNA, 25 bp, Homo sapien
ctagagtcaatgtgttcaggatcca

SEQ ID NO: 2342692 - DNA, 25 bp, Homo sapien
cagctccagggatccaagaagttga

SEQ ID NO: 2342693 - DNA, 25 bp, Homo sapien
attcagcttgatctccattaagaga

SEQ ID NO: 2342694 - DNA, 25 bp, Homo sapien
cagcttgatctccattaagagatca

SEQ ID NO: 2342695 - DNA, 25 bp, Homo sapien
tcagcttgatctccattaagagatc

SEQ ID NO: 2342696 - DNA, 25 bp, Homo sapien
gattcagcttgatctccattaagag

SEQ ID NO: 2342697 - DNA, 25 bp, Homo sapien
ctggcagcagagttacaatctcctt

SEQ ID NO: 2342698 - DNA, 25 bp, Homo sapien
tctgttctgctcttatatccaggag

SEQ ID NO: 2342699 - DNA, 25 bp, Homo sapien
ttctgctcttatatccaggagatac

SEQ ID NO: 2342700 - DNA, 25 bp, Homo sapien
gatacaaaacctgaaggctggcctt

SEQ ID NO: 2342701 - DNA, 25 bp, Homo sapien
cttctgagactagagttattttcat

SEQ ID NO: 2342702 - DNA, 25 bp, Homo sapien
tttcatctgattctcgaagatccat

SEQ ID NO: 2342703 - DNA, 25 bp, Homo sapien
ttttcatctgattctcgaagatcca

SEQ ID NO: 2342704 - DNA, 25 bp, Homo sapien
gacgcttctcggactgctgcccttc

SEQ ID NO: 2342705 - DNA, 25 bp, Homo sapien
ctgacgcttctcggactgctgccct

SEQ ID NO: 2342706 - DNA, 25 bp, Homo sapien
ctgctgcccttcacattggatgaga

SEQ ID NO: 2342707 - DNA, 25 bp, Homo sapien
tgacgcttctcggactgctgccctt

SEQ ID NO: 2342708 - DNA, 25 bp, Homo sapien
gatacttgccactgtcacatgtgtg

SEQ ID NO: 2342709 - DNA, 25 bp, Homo sapien
gaaaaccgcggttgtcttgctgaca

SEQ ID NO: 2342710 - DNA, 25 bp, Homo sapien
acatgtgtgaaaaccgcggttgtct

SEQ ID NO: 2342711 - DNA, 25 bp, Homo sapien
cttgtgataatccctcagaactaac

SEQ ID NO: 2342712 - DNA, 25 bp, Homo sapien
cacctgatgtctgtaggatgtgtgc

SEQ ID NO: 2342713 - DNA, 25 bp, Homo sapien
aatcagatcgccctggaacctgaag

SEQ ID NO: 2342714 - DNA, 25 bp, Homo sapien
actcctttgtgagtgggttgccaca

SEQ ID NO: 2342715 - DNA, 25 bp, Homo sapien
ggttgccacaggaacaaggacacct

SEQ ID NO: 2342716 - DNA, 25 bp, Homo sapien
aagctcccgcgtggggttctcgacg

SEQ ID NO: 2342717 - DNA, 25 bp, Homo sapien
agaagctcccgcgtggggttctcga

SEQ ID NO: 2342718 - DNA, 25 bp, Homo sapien
agtgaagtgagaagcggtggctgga

SEQ ID NO: 2342719 - DNA, 25 bp, Homo sapien
ccagtgaagtgagaagcggtggctg

SEQ ID NO: 2342720 - DNA, 25 bp, Homo sapien
actgctccggtgtcgctcgggcgga

SEQ ID NO: 2342721 - DNA, 25 bp, Homo sapien
tgggagggacaaggcgaaccgcctc

SEQ ID NO: 2342722 - DNA, 25 bp, Homo sapien
tgagcggcgtttgggctccgcgtcc

SEQ ID NO: 2342723 - DNA, 25 bp, Homo sapien
gcagggctggtctttcgcgcgggtc

SEQ ID NO: 2342724 - DNA, 25 bp, Homo sapien
gagcgctgctcaccaactctgcaat

SEQ ID NO: 2342725 - DNA, 25 bp, Homo sapien
aaatccgcactcagggtgttgagat

SEQ ID NO: 2342726 - DNA, 25 bp, Homo sapien
gtgttgagatacaaggcgagcccca

SEQ ID NO: 2342727 - DNA, 25 bp, Homo sapien
aaggcgagccccagagcgctgctca

SEQ ID NO: 2342728 - DNA, 25 bp, Homo sapien
gtgtcgcctaaaccatcaggtgctg

SEQ ID NO: 2342729 - DNA, 25 bp, Homo sapien
ttacgtgtcgcctaaaccatcaggt

SEQ ID NO: 2342730 - DNA, 25 bp, Homo sapien
cagttcctccaagacgcactttgag

SEQ ID NO: 2342731 - DNA, 25 bp, Homo sapien
ccatcaggtgctgaaccagttcctc

SEQ ID NO: 2342732 - DNA, 25 bp, Homo sapien
gaaaagaagctaacagactcccaat

SEQ ID NO: 2342733 - DNA, 25 bp, Homo sapien
catccaagaaaaacgactgtcctga

SEQ ID NO: 2342734 - DNA, 25 bp, Homo sapien
taactgtcttgaaaatacggccaaa

SEQ ID NO: 2342735 - DNA, 25 bp, Homo sapien
gaatccctatgacaagttgaggcaa

SEQ ID NO: 2342736 - DNA, 25 bp, Homo sapien
tgcaacatcacaaaatgccccggca

SEQ ID NO: 2342737 - DNA, 25 bp, Homo sapien
gtacttctaaaacggatacagtggc

SEQ ID NO: 2342738 - DNA, 25 bp, Homo sapien
ggcactgccctcaagcaatgtggta

SEQ ID NO: 2342739 - DNA, 25 bp, Homo sapien
caatgtggtacaggaataaccttca

SEQ ID NO: 2342740 - DNA, 25 bp, Homo sapien
cagtggccactcttcagcaaataac

SEQ ID NO: 2342741 - DNA, 25 bp, Homo sapien
ctaggctggtacagtcaaaattttc

SEQ ID NO: 2342742 - DNA, 25 bp, Homo sapien
caatcaattccgttaccgcaaggca

SEQ ID NO: 2342743 - DNA, 25 bp, Homo sapien
tgtcaagagccatattgcgtcccag

SEQ ID NO: 2342744 - DNA, 25 bp, Homo sapien
tcttaacacagatctatgacctaac

SEQ ID NO: 2342745 - DNA, 25 bp, Homo sapien
ctgagcagacatgctttcattgtgg

SEQ ID NO: 2342746 - DNA, 25 bp, Homo sapien
ccaagagacacaactaacagaaaag

SEQ ID NO: 2342747 - DNA, 25 bp, Homo sapien
tatctacctctctcaaagaccagtt

SEQ ID NO: 2342748 - DNA, 25 bp, Homo sapien
tagttaattatttggggcaggagag

SEQ ID NO: 2342749 - DNA, 25 bp, Homo sapien
acagttgtatagttaattatttggg

SEQ ID NO: 2342750 - DNA, 25 bp, Homo sapien
gggagaacagttgtatagttaatta

SEQ ID NO: 2342751 - DNA, 25 bp, Homo sapien
cattgctttgggagaacagttgtat

SEQ ID NO: 2342752 - DNA, 25 bp, Homo sapien
tttctttcactagaataacaagaat

SEQ ID NO: 2342753 - DNA, 25 bp, Homo sapien
atgaagtttaccaaacgaattcagg

SEQ ID NO: 2342754 - DNA, 25 bp, Homo sapien
taattgcctccctctaaagggccta

SEQ ID NO: 2342755 - DNA, 25 bp, Homo sapien
caggtataccagtttttcctatcag

SEQ ID NO: 2342756 - DNA, 25 bp, Homo sapien
gaatttgaactgcacttaaaaagac

SEQ ID NO: 2342757 - DNA, 25 bp, Homo sapien
gccatctcagcatccctttagggag

SEQ ID NO: 2342758 - DNA, 25 bp, Homo sapien
gatgcttctagctccaaaaaactgg

SEQ ID NO: 2342759 - DNA, 25 bp, Homo sapien
taacaagtccatatgtgtttcccac

SEQ ID NO: 2342760 - DNA, 25 bp, Homo sapien
gacctctgattccaaaattctgtga

SEQ ID NO: 2342761 - DNA, 25 bp, Homo sapien
tgttacccaaaatgtaccaccaggc

SEQ ID NO: 2342762 - DNA, 25 bp, Homo sapien
agggctggctataatagttctggga

SEQ ID NO: 2342763 - DNA, 25 bp, Homo sapien
gctaatttattacacgttgccaccc

SEQ ID NO: 2342764 - DNA, 25 bp, Homo sapien
gattttgaaagagactaccattcca

SEQ ID NO: 2342765 - DNA, 25 bp, Homo sapien
tcttcaaatgcagtaggtaagctac

SEQ ID NO: 2342766 - DNA, 25 bp, Homo sapien
tttcaatacaactaccactgcagag

SEQ ID NO: 2342767 - DNA, 25 bp, Homo sapien
tttacatactcgtggtttagctccc

SEQ ID NO: 2342768 - DNA, 25 bp, Homo sapien
cttccattacttctggtaacaatgg

SEQ ID NO: 2342769 - DNA, 25 bp, Homo sapien
tcctttccttccattacttctggta

SEQ ID NO: 2342770 - DNA, 25 bp, Homo sapien
tccattacttctggtaacaatggcc

SEQ ID NO: 2342771 - DNA, 25 bp, Homo sapien
cattacttctggtaacaatggccat

SEQ ID NO: 2342772 - DNA, 25 bp, Homo sapien
gtcaggtgcccctcttatgtactca

SEQ ID NO: 2342773 - DNA, 25 bp, Homo sapien
tcaagcataagcatctcacaagtgc

SEQ ID NO: 2342774 - DNA, 25 bp, Homo sapien
agattatgtcgcacaatctcttcag

SEQ ID NO: 2342775 - DNA, 25 bp, Homo sapien
tcttcaggagtcagttcaagcataa

SEQ ID NO: 2342776 - DNA, 25 bp, Homo sapien
ttaaaatactaatcaccactggcaa

SEQ ID NO: 2342777 - DNA, 25 bp, Homo sapien
tccaatataatcctatacagcctat

SEQ ID NO: 2342778 - DNA, 25 bp, Homo sapien
ataatagctacctgtttttctgtgt

SEQ ID NO: 2342779 - DNA, 25 bp, Homo sapien
taaatgttatcagagaaccccaggc

SEQ ID NO: 2342780 - DNA, 25 bp, Homo sapien
ccatttctactatatccaaatttat

SEQ ID NO: 2342781 - DNA, 25 bp, Homo sapien
tttccatttctactatatccaaatt

SEQ ID NO: 2342782 - DNA, 25 bp, Homo sapien
cacctttccatttctactatatcca

SEQ ID NO: 2342783 - DNA, 25 bp, Homo sapien
agtcaagttttctccacctttccat

SEQ ID NO: 2342784 - DNA, 25 bp, Homo sapien
tacaggcaccatatctgctagcacc

SEQ ID NO: 2342785 - DNA, 25 bp, Homo sapien
caaaaataaaggtgcaatgacgaag

SEQ ID NO: 2342786 - DNA, 25 bp, Homo sapien
caaatacaggcgtgccaaactctga

SEQ ID NO: 2342787 - DNA, 25 bp, Homo sapien
cgaagttttagcaccaattgaaagt

SEQ ID NO: 2342788 - DNA, 25 bp, Homo sapien
ctcagataggattagttgggacaaa

SEQ ID NO: 2342789 - DNA, 25 bp, Homo sapien
gcatgaaaatcgctgctcgccagca

SEQ ID NO: 2342790 - DNA, 25 bp, Homo sapien
gctcgccagcacactcagataggat

SEQ ID NO: 2342791 - DNA, 25 bp, Homo sapien
acaaagacttacagttgcatgaaaa

SEQ ID NO: 2342792 - DNA, 25 bp, Homo sapien
cagcaactcgagcatcgtagaagca

SEQ ID NO: 2342793 - DNA, 25 bp, Homo sapien
tcgtagaagcagccattctgagatg

SEQ ID NO: 2342794 - DNA, 25 bp, Homo sapien
gcatcgtagaagcagccattctgag

SEQ ID NO: 2342795 - DNA, 25 bp, Homo sapien
catcgtagaagcagccattctgaga

SEQ ID NO: 2342796 - DNA, 25 bp, Homo sapien
aatgtctccacttgaaaatcggctt

SEQ ID NO: 2342797 - DNA, 25 bp, Homo sapien
attcactagctccaggtcaaaatgt

SEQ ID NO: 2342798 - DNA, 25 bp, Homo sapien
ttactacctggtttctgatttaaga

SEQ ID NO: 2342799 - DNA, 25 bp, Homo sapien
tagactcttactgaaaatcaaatga

SEQ ID NO: 2342800 - DNA, 25 bp, Homo sapien
tctcaattgatcgagtagcaccaag

SEQ ID NO: 2342801 - DNA, 25 bp, Homo sapien
gaccttcacgtaagtatccaacagg

SEQ ID NO: 2342802 - DNA, 25 bp, Homo sapien
taacagccctatgagaccagaaatt

SEQ ID NO: 2342803 - DNA, 25 bp, Homo sapien
tagagcacagccaacaagatgtctg

SEQ ID NO: 2342804 - DNA, 25 bp, Homo sapien
caaggtggctcttcttaaacctcgg

SEQ ID NO: 2342805 - DNA, 25 bp, Homo sapien
tgattctagctctaaagtgaaggca

SEQ ID NO: 2342806 - DNA, 25 bp, Homo sapien
ctgtcttttcgatatgagctgtcaa

SEQ ID NO: 2342807 - DNA, 25 bp, Homo sapien
cggtttagtgtcacctacagatgaa

SEQ ID NO: 2342808 - DNA, 25 bp, Homo sapien
cattcaagggtttgccagagctttc

SEQ ID NO: 2342809 - DNA, 25 bp, Homo sapien
catcgccaagttctaaagagtcaac

SEQ ID NO: 2342810 - DNA, 25 bp, Homo sapien
gagtcaacctctttagtcccttgaa

SEQ ID NO: 2342811 - DNA, 25 bp, Homo sapien
tcctgacttggtgcgaaagattccc

SEQ ID NO: 2342812 - DNA, 25 bp, Homo sapien
gaaattaggctactttgttggcgac

SEQ ID NO: 2342813 - DNA, 25 bp, Homo sapien
ggatataagaccactgttgccaact

SEQ ID NO: 2342814 - DNA, 25 bp, Homo sapien
gaaagctggaaatatgagtcaggga

SEQ ID NO: 2342815 - DNA, 25 bp, Homo sapien
taaaattcctgacccattctcagtg

SEQ ID NO: 2342816 - DNA, 25 bp, Homo sapien
tagacagtatattcgtggttgcaga

SEQ ID NO: 2342817 - DNA, 25 bp, Homo sapien
tattcatccacaatcaccaacaggt

SEQ ID NO: 2342818 - DNA, 25 bp, Homo sapien
ctaatcattgtagagacagtcacag

SEQ ID NO: 2342819 - DNA, 25 bp, Homo sapien
tgttcaaggcagtactattcatcca

SEQ ID NO: 2342820 - DNA, 25 bp, Homo sapien
cagcctacagtgatcagcctacaat

SEQ ID NO: 2342821 - DNA, 25 bp, Homo sapien
ggataattaataggacaagctctca

SEQ ID NO: 2342822 - DNA, 25 bp, Homo sapien
tgtcaccaaggtcatgaagtcacac

SEQ ID NO: 2342823 - DNA, 25 bp, Homo sapien
tctcctactgctagaaaagaatgct

SEQ ID NO: 2342824 - DNA, 25 bp, Homo sapien
tttacctattacctggatgccccac

SEQ ID NO: 2342825 - DNA, 25 bp, Homo sapien
aaacatttgtcacctctaagggcag

SEQ ID NO: 2342826 - DNA, 25 bp, Homo sapien
tcatctggtaggtatgcttcatgca

SEQ ID NO: 2342827 - DNA, 25 bp, Homo sapien
ggaaaatccctatcatctccaagct

SEQ ID NO: 2342828 - DNA, 25 bp, Homo sapien
ttggaattcgaaaggacaggagccc

SEQ ID NO: 2342829 - DNA, 25 bp, Homo sapien
aaggttattgatgtacggccacaac

SEQ ID NO: 2342830 - DNA, 25 bp, Homo sapien
ttcagatatgttcggagcttcctcc

SEQ ID NO: 2342831 - DNA, 25 bp, Homo sapien
tggagggcacatactgataactagc

SEQ ID NO: 2342832 - DNA, 25 bp, Homo sapien
tattacgcagcaggagtcaacttga

SEQ ID NO: 2342833 - DNA, 25 bp, Homo sapien
tcaacttgaaattggtaaagaaagc

SEQ ID NO: 2342834 - DNA, 25 bp, Homo sapien
gccagagtaaaataagccccactga

SEQ ID NO: 2342835 - DNA, 25 bp, Homo sapien
taagcatcatccctcgttaacagga

SEQ ID NO: 2342836 - DNA, 25 bp, Homo sapien
tgctgctgggataacaaacaaaacc

SEQ ID NO: 2342837 - DNA, 25 bp, Homo sapien
cttacttctcttcactccaattgtc

SEQ ID NO: 2342838 - DNA, 25 bp, Homo sapien
cttctcttcactccaattgtcctgt

SEQ ID NO: 2342839 - DNA, 25 bp, Homo sapien
tacttctcttcactccaattgtcct

SEQ ID NO: 2342840 - DNA, 25 bp, Homo sapien
aaagaggtctgatcaagtagctgaa

SEQ ID NO: 2342841 - DNA, 25 bp, Homo sapien
tattccaagtgattcagaggagaac

SEQ ID NO: 2342842 - DNA, 25 bp, Homo sapien
gaacacgtgagccaaccttatttgt

SEQ ID NO: 2342843 - DNA, 25 bp, Homo sapien
gaaatgtcctaataagctaactaga

SEQ ID NO: 2342844 - DNA, 25 bp, Homo sapien
ttgaaaagtatgtgtaactacatac

SEQ ID NO: 2342845 - DNA, 25 bp, Homo sapien
aataagagtttaggcttaggcctca

SEQ ID NO: 2342846 - DNA, 25 bp, Homo sapien
gcttaggcctcaggagatgagtgtc

SEQ ID NO: 2342847 - DNA, 25 bp, Homo sapien
tcaggaaagcactcttgggatgaaa

SEQ ID NO: 2342848 - DNA, 25 bp, Homo sapien
gaacaaataagaatcccaaggactc

SEQ ID NO: 2342849 - DNA, 25 bp, Homo sapien
taataccagtaataccagccacagg

SEQ ID NO: 2342850 - DNA, 25 bp, Homo sapien
acataggtctaaggaccattcttcc

SEQ ID NO: 2342851 - DNA, 25 bp, Homo sapien
cactgtaataccagtaataccagcc

SEQ ID NO: 2342852 - DNA, 25 bp, Homo sapien
cagttatgtcttggcacatagctag

SEQ ID NO: 2342853 - DNA, 25 bp, Homo sapien
tctgcttcagcccctcagttatgtc

SEQ ID NO: 2342854 - DNA, 25 bp, Homo sapien
tatgtcttggcacatagctaggaca

SEQ ID NO: 2342855 - DNA, 25 bp, Homo sapien
ccctcagttatgtcttggcacatag

SEQ ID NO: 2342856 - DNA, 25 bp, Homo sapien
ctcccatgaaccagcaacattacca

SEQ ID NO: 2342857 - DNA, 25 bp, Homo sapien
cccatgaaccagcaacattaccatt

SEQ ID NO: 2342858 - DNA, 25 bp, Homo sapien
ccatgaaccagcaacattaccatta

SEQ ID NO: 2342859 - DNA, 25 bp, Homo sapien
tcccatgaaccagcaacattaccat

SEQ ID NO: 2342860 - DNA, 25 bp, Homo sapien
taaggcttccagtaatcagaattta

SEQ ID NO: 2342861 - DNA, 25 bp, Homo sapien
aggcttccagtaatcagaatttaaa

SEQ ID NO: 2342862 - DNA, 25 bp, Homo sapien
gtaataaggcttccagtaatcagaa

SEQ ID NO: 2342863 - DNA, 25 bp, Homo sapien
tgtaataaggcttccagtaatcaga

SEQ ID NO: 2342864 - DNA, 25 bp, Homo sapien
tgtgaccaaatctggaagcagtaat

SEQ ID NO: 2342865 - DNA, 25 bp, Homo sapien
caggaaggaggtctgtatattcctt

SEQ ID NO: 2342866 - DNA, 25 bp, Homo sapien
ggtctgtatattcctttgtcccatg

SEQ ID NO: 2342867 - DNA, 25 bp, Homo sapien
cccatgctgtgaccaaatctggaag

SEQ ID NO: 2342868 - DNA, 25 bp, Homo sapien
catatacatttgtgtacacgtgtac

SEQ ID NO: 2342869 - DNA, 25 bp, Homo sapien
gagtattcttcctaaccattggcag

SEQ ID NO: 2342870 - DNA, 25 bp, Homo sapien
tatataacagcatcaacctgtaaac

SEQ ID NO: 2342871 - DNA, 25 bp, Homo sapien
cactgttattttggcaccatatata

SEQ ID NO: 2342872 - DNA, 25 bp, Homo sapien
tacccttcgcctacaaatagaggtg

SEQ ID NO: 2342873 - DNA, 25 bp, Homo sapien
tggcagtaaagcaggaaaccagtcc

SEQ ID NO: 2342874 - DNA, 25 bp, Homo sapien
gaaacaccgatgtatcaggccgtgc

SEQ ID NO: 2342875 - DNA, 25 bp, Homo sapien
caggccgtgcgatcatagtaattac

SEQ ID NO: 2342876 - DNA, 25 bp, Homo sapien
agagggaagatgaaccaaatgtcca

SEQ ID NO: 2342877 - DNA, 25 bp, Homo sapien
tgagggcataaagcaaactcttagt

SEQ ID NO: 2342878 - DNA, 25 bp, Homo sapien
gattcaaggttacattcaaagaggg

SEQ ID NO: 2342879 - DNA, 25 bp, Homo sapien
gcaaggaacctgtgagctcaattca

SEQ ID NO: 2342880 - DNA, 25 bp, Homo sapien
cgccaggccaattttctcaacttcg

SEQ ID NO: 2342881 - DNA, 25 bp, Homo sapien
caggccaattttctcaacttcggat

SEQ ID NO: 2342882 - DNA, 25 bp, Homo sapien
gccaggccaattttctcaacttcgg

SEQ ID NO: 2342883 - DNA, 25 bp, Homo sapien
cacgccaggccaattttctcaactt

SEQ ID NO: 2342884 - DNA, 25 bp, Homo sapien
ggtactcccctatttgctttgtcag

SEQ ID NO: 2342885 - DNA, 25 bp, Homo sapien
ttgacaacatcgcaagactcttcct

SEQ ID NO: 2342886 - DNA, 25 bp, Homo sapien
cctagctactccagaagtggaggca

SEQ ID NO: 2342887 - DNA, 25 bp, Homo sapien
ggacttttgtgagatgcttatggca

SEQ ID NO: 2342888 - DNA, 25 bp, Homo sapien
ttatgaacataattgaggctctcca

SEQ ID NO: 2342889 - DNA, 25 bp, Homo sapien
tatgaacataattgaggctctccat

SEQ ID NO: 2342890 - DNA, 25 bp, Homo sapien
taaagctgagctaaaaaatcttgaa

SEQ ID NO: 2342891 - DNA, 25 bp, Homo sapien
gacagagctctggtcagcattatag

SEQ ID NO: 2342892 - DNA, 25 bp, Homo sapien
ggctatatttgcctcacgttttgga

SEQ ID NO: 2342893 - DNA, 25 bp, Homo sapien
taatggataacagccttgagtgtca

SEQ ID NO: 2342894 - DNA, 25 bp, Homo sapien
gaatgtccagtatccatcaccaagg

SEQ ID NO: 2342895 - DNA, 25 bp, Homo sapien
tggttcaggcgaaaagaaagagtgc

SEQ ID NO: 2342896 - DNA, 25 bp, Homo sapien
tgagtagcctcttgtagaacagtgt

SEQ ID NO: 2342897 - DNA, 25 bp, Homo sapien
gggattcaaccctccaatggcatgg

SEQ ID NO: 2342898 - DNA, 25 bp, Homo sapien
tcgaacagcatttgcctcaatttgt

SEQ ID NO: 2342899 - DNA, 25 bp, Homo sapien
agcccttaatactctaagtgaaaag

SEQ ID NO: 2342900 - DNA, 25 bp, Homo sapien
aaaaattgatgtttcgaacagcatt

SEQ ID NO: 2342901 - DNA, 25 bp, Homo sapien
cacaaaagaacttcattaagccctt

SEQ ID NO: 2342902 - DNA, 25 bp, Homo sapien
cagcactaagcctgcatcctcaaat

SEQ ID NO: 2342903 - DNA, 25 bp, Homo sapien
ggcgactaatgcaaggtcctgaaac

SEQ ID NO: 2342904 - DNA, 25 bp, Homo sapien
tcacaggcgactaatgcaaggtcct

SEQ ID NO: 2342905 - DNA, 25 bp, Homo sapien
actaatgcaaggtcctgaaacagcc

SEQ ID NO: 2342906 - DNA, 25 bp, Homo sapien
gcaatttggtcctgaagcatcctca

SEQ ID NO: 2342907 - DNA, 25 bp, Homo sapien
tacacaactaggtagtggcaaaacc

SEQ ID NO: 2342908 - DNA, 25 bp, Homo sapien
tgggattgactcataaaaggctcca

SEQ ID NO: 2342909 - DNA, 25 bp, Homo sapien
caggcctcctgattagaactgcagg

SEQ ID NO: 2342910 - DNA, 25 bp, Homo sapien
gtacgagaggacacattgatttcaa

SEQ ID NO: 2342911 - DNA, 25 bp, Homo sapien
tgacactctatagcgtttgtagtat

SEQ ID NO: 2342912 - DNA, 25 bp, Homo sapien
ggtttttgtctgacactctatagcg

SEQ ID NO: 2342913 - DNA, 25 bp, Homo sapien
tgtattgtacgagaggacacattga

SEQ ID NO: 2342914 - DNA, 25 bp, Homo sapien
caaactaatgcttaggaaaagcgac

SEQ ID NO: 2342915 - DNA, 25 bp, Homo sapien
aaactaatgcttaggaaaagcgaca

SEQ ID NO: 2342916 - DNA, 25 bp, Homo sapien
acaaactaatgcttaggaaaagcga

SEQ ID NO: 2342917 - DNA, 25 bp, Homo sapien
actaatgcttaggaaaagcgacaag

SEQ ID NO: 2342918 - DNA, 25 bp, Homo sapien
attgcattctctgtctacgctcggg

SEQ ID NO: 2342919 - DNA, 25 bp, Homo sapien
gaggaaccgcttttggactttgaca

SEQ ID NO: 2342920 - DNA, 25 bp, Homo sapien
actgagggtatctggacatagcaac

SEQ ID NO: 2342921 - DNA, 25 bp, Homo sapien
ttgagcagaggcacagcatccattg

SEQ ID NO: 2342922 - DNA, 25 bp, Homo sapien
gctctttaacaatatcagcaattgt

SEQ ID NO: 2342923 - DNA, 25 bp, Homo sapien
cagtgcgtgataaggctaaaactaa

SEQ ID NO: 2342924 - DNA, 25 bp, Homo sapien
ccagaaataggcaccagtgcgtgat

SEQ ID NO: 2342925 - DNA, 25 bp, Homo sapien
ccatgatcaccagaaataggcacca

SEQ ID NO: 2342926 - DNA, 25 bp, Homo sapien
aatcgcattgccaaccaaatccagg

SEQ ID NO: 2342927 - DNA, 25 bp, Homo sapien
tatgctcatgctactgagaatcgca

SEQ ID NO: 2342928 - DNA, 25 bp, Homo sapien
tgtgatcaatccagtagctagtgtt

SEQ ID NO: 2342929 - DNA, 25 bp, Homo sapien
tcaaatatagtacatcagggagaat

SEQ ID NO: 2342930 - DNA, 25 bp, Homo sapien
taatacactgcacagtcactaaatg

SEQ ID NO: 2342931 - DNA, 25 bp, Homo sapien
cttgagttctatgtaagaatctgcc

SEQ ID NO: 2342932 - DNA, 25 bp, Homo sapien
aggactctcattcttgtttcgtgct

SEQ ID NO: 2342933 - DNA, 25 bp, Homo sapien
aaattttgcttccaccaacgctgag

SEQ ID NO: 2342934 - DNA, 25 bp, Homo sapien
catctcaagggcctgcattgcagca

SEQ ID NO: 2342935 - DNA, 25 bp, Homo sapien
ctactgctccatctcaagggcctgc

SEQ ID NO: 2342936 - DNA, 25 bp, Homo sapien
tctcaagggcctgcattgcagcact

SEQ ID NO: 2342937 - DNA, 25 bp, Homo sapien
agggcctgcattgcagcactgtgac

SEQ ID NO: 2342938 - DNA, 25 bp, Homo sapien
tgggcatagtcacaatgttaacatc

SEQ ID NO: 2342939 - DNA, 25 bp, Homo sapien
cagcttggtttatgcagttgccaca

SEQ ID NO: 2342940 - DNA, 25 bp, Homo sapien
ttggaaaaacggcactgaccagctt

SEQ ID NO: 2342941 - DNA, 25 bp, Homo sapien
gtatgcctgtcgctatacctagaat

SEQ ID NO: 2342942 - DNA, 25 bp, Homo sapien
ttataaagcatgtcagccatgttgc

SEQ ID NO: 2342943 - DNA, 25 bp, Homo sapien
tctataggcgctttcagcttcagaa

SEQ ID NO: 2342944 - DNA, 25 bp, Homo sapien
cagaaattttgctctgactcttcag

SEQ ID NO: 2342945 - DNA, 25 bp, Homo sapien
gctgcggtagtacaaagcatttcta

SEQ ID NO: 2342946 - DNA, 25 bp, Homo sapien
aaagacataatcagtcttgactgaa

SEQ ID NO: 2342947 - DNA, 25 bp, Homo sapien
ccttgagagctaaactgtaaaatca

SEQ ID NO: 2342948 - DNA, 25 bp, Homo sapien
aattgaggattttgagtggcaggaa

SEQ ID NO: 2342949 - DNA, 25 bp, Homo sapien
ggaagataaatttcaccttgagagc

SEQ ID NO: 2342950 - DNA, 25 bp, Homo sapien
caagagaacaggtgaggtgaagttc

SEQ ID NO: 2342951 - DNA, 25 bp, Homo sapien
ccaagagaacaggtgaggtgaagtt

SEQ ID NO: 2342952 - DNA, 25 bp, Homo sapien
tgtctctttgtagtaagactgccct

SEQ ID NO: 2342953 - DNA, 25 bp, Homo sapien
caagaagatatactacagaaaagca

SEQ ID NO: 2342954 - DNA, 25 bp, Homo sapien
tcacacacaccaactatacaagaag

SEQ ID NO: 2342955 - DNA, 25 bp, Homo sapien
tacttctgacaatacatctgaccaa

SEQ ID NO: 2342956 - DNA, 25 bp, Homo sapien
ggtccagtgttgaatctaagtccag

SEQ ID NO: 2342957 - DNA, 25 bp, Homo sapien
tattccaagagtggtccaagagtgt

SEQ ID NO: 2342958 - DNA, 25 bp, Homo sapien
tagatatctatcagtccagttggtc

SEQ ID NO: 2342959 - DNA, 25 bp, Homo sapien
ggtgatgttccatgtacagatgaga

SEQ ID NO: 2342960 - DNA, 25 bp, Homo sapien
accttggcttgccaatgtattgaga

SEQ ID NO: 2342961 - DNA, 25 bp, Homo sapien
ggatagttttagcagaattagtacc

SEQ ID NO: 2342962 - DNA, 25 bp, Homo sapien
ttgaacaactgagggcaagtgatcc

SEQ ID NO: 2342963 - DNA, 25 bp, Homo sapien
tcagggaggggtccgacctccttga

SEQ ID NO: 2342964 - DNA, 25 bp, Homo sapien
cactagaattactaaccacctggtt

SEQ ID NO: 2342965 - DNA, 25 bp, Homo sapien
tatgtggaaacatgagatgcctctc

SEQ ID NO: 2342966 - DNA, 25 bp, Homo sapien
tgaagcttgcctaaggcagtgagat

SEQ ID NO: 2342967 - DNA, 25 bp, Homo sapien
ttttcccatcacttcggaaatgaag

SEQ ID NO: 2342968 - DNA, 25 bp, Homo sapien
tggccaatttataataatgtagtgc

SEQ ID NO: 2342969 - DNA, 25 bp, Homo sapien
tcccaatggccaatttataataatg

SEQ ID NO: 2342970 - DNA, 25 bp, Homo sapien
gctcccaatggccaatttataataa

SEQ ID NO: 2342971 - DNA, 25 bp, Homo sapien
caatggccaatttataataatgtag

SEQ ID NO: 2342972 - DNA, 25 bp, Homo sapien
aactggtaacagagctcttgtgtgc

SEQ ID NO: 2342973 - DNA, 25 bp, Homo sapien
tagtgtccctgctcatgatacagct

SEQ ID NO: 2342974 - DNA, 25 bp, Homo sapien
tcttgtgtgcatgagggtcctttag

SEQ ID NO: 2342975 - DNA, 25 bp, Homo sapien
cagctttcctaggttgtacaaacaa

SEQ ID NO: 2342976 - DNA, 25 bp, Homo sapien
ggacaatagtttaacgtgtatacat

SEQ ID NO: 2342977 - DNA, 25 bp, Homo sapien
aaaaggacagagaggcattggccag

SEQ ID NO: 2342978 - DNA, 25 bp, Homo sapien
cactgagactggatcagaacaaggg

SEQ ID NO: 2342979 - DNA, 25 bp, Homo sapien
tgttcaaaggacataggctcaaagg

SEQ ID NO: 2342980 - DNA, 25 bp, Homo sapien
tgcttccttgtatacactaagggct

SEQ ID NO: 2342981 - DNA, 25 bp, Homo sapien
cttccttgtatacactaagggcttc

SEQ ID NO: 2342982 - DNA, 25 bp, Homo sapien
gaattgcttccttgtatacactaag

SEQ ID NO: 2342983 - DNA, 25 bp, Homo sapien
tttctgaattgcttccttgtataca

SEQ ID NO: 2342984 - DNA, 25 bp, Homo sapien
tctgtggggcaaactgccttggcat

SEQ ID NO: 2342985 - DNA, 25 bp, Homo sapien
aatgtcaagagtaagtcattattta

SEQ ID NO: 2342986 - DNA, 25 bp, Homo sapien
aagaagaccacaaaatgaccagcaa

SEQ ID NO: 2342987 - DNA, 25 bp, Homo sapien
gaagaccacaaaatgaccagcaaac

SEQ ID NO: 2342988 - DNA, 25 bp, Homo sapien
agaccacaaaatgaccagcaaacaa

SEQ ID NO: 2342989 - DNA, 25 bp, Homo sapien
cagtcttggatctcagtgattccat

SEQ ID NO: 2342990 - DNA, 25 bp, Homo sapien
ttgcttaaacgcatatatgcttcac

SEQ ID NO: 2342991 - DNA, 25 bp, Homo sapien
ccatataccaatgctctgcttcggg

SEQ ID NO: 2342992 - DNA, 25 bp, Homo sapien
gggagtttgcttaaacgcatatatg

SEQ ID NO: 2342993 - DNA, 25 bp, Homo sapien
aaacccatctatcccggtctgcatg

SEQ ID NO: 2342994 - DNA, 25 bp, Homo sapien
tcaaacccatctatcccggtctgca

SEQ ID NO: 2342995 - DNA, 25 bp, Homo sapien
cccatctatcccggtctgcatggag

SEQ ID NO: 2342996 - DNA, 25 bp, Homo sapien
catctatcccggtctgcatggagaa

SEQ ID NO: 2342997 - DNA, 25 bp, Homo sapien
tatattttctgtacagggttcaaag

SEQ ID NO: 2342998 - DNA, 25 bp, Homo sapien
cctaatagcttagataactggctgt

SEQ ID NO: 2342999 - DNA, 25 bp, Homo sapien
catctcacatcttatctagaccaaa

SEQ ID NO: 2343000 - DNA, 25 bp, Homo sapien
cctcataggcaaagtaacacatttt

SEQ ID NO: 2343001 - DNA, 25 bp, Homo sapien
taaataatcccagatgagctgcagg

SEQ ID NO: 2343002 - DNA, 25 bp, Homo sapien
tattggcttcggaattccagggtca

SEQ ID NO: 2343003 - DNA, 25 bp, Homo sapien
tccattggcccaaagcgttgtttcc

SEQ ID NO: 2343004 - DNA, 25 bp, Homo sapien
tgagataggcaaatattcacgctgc

SEQ ID NO: 2343005 - DNA, 25 bp, Homo sapien
gtttgggagccagtcatttacaggg

SEQ ID NO: 2343006 - DNA, 25 bp, Homo sapien
tcgaattcctaaggcacagacaggc

SEQ ID NO: 2343007 - DNA, 25 bp, Homo sapien
gatgatccttggttacccattgatg

SEQ ID NO: 2343008 - DNA, 25 bp, Homo sapien
gatctgagtactccatgggaagacc

SEQ ID NO: 2343009 - DNA, 25 bp, Homo sapien
catggtttctatatcgagtgccatg

SEQ ID NO: 2343010 - DNA, 25 bp, Homo sapien
atggtttctatatcgagtgccatgg

SEQ ID NO: 2343011 - DNA, 25 bp, Homo sapien
tggtttctatatcgagtgccatggt

SEQ ID NO: 2343012 - DNA, 25 bp, Homo sapien
ctgtatcaagaattactgtcagagt

SEQ ID NO: 2343013 - DNA, 25 bp, Homo sapien
ggctcagtgctctcatgccgtagcc

SEQ ID NO: 2343014 - DNA, 25 bp, Homo sapien
atcaagaattactgtcagagtctcc

SEQ ID NO: 2343015 - DNA, 25 bp, Homo sapien
tctcatgccgtagccaaaataaagg

SEQ ID NO: 2343016 - DNA, 25 bp, Homo sapien
tgaggtcttctaccacaggtactgt

SEQ ID NO: 2343017 - DNA, 25 bp, Homo sapien
ctaccacaggtactgttattgccat

SEQ ID NO: 2343018 - DNA, 25 bp, Homo sapien
cattctgcatattgaggtcttctac

SEQ ID NO: 2343019 - DNA, 25 bp, Homo sapien
acatgagtcattctgcatattgagg

SEQ ID NO: 2343020 - DNA, 25 bp, Homo sapien
aagaggaaacgttacaactgatagc

SEQ ID NO: 2343021 - DNA, 25 bp, Homo sapien
tcagcaaattcttaaccagactaag

SEQ ID NO: 2343022 - DNA, 25 bp, Homo sapien
ataaaaagtatcctaagaagaggag

SEQ ID NO: 2343023 - DNA, 25 bp, Homo sapien
agaagattcgaataacaaaaatcag

SEQ ID NO: 2343024 - DNA, 25 bp, Homo sapien
ggtgacctatttactctcatgagag

SEQ ID NO: 2343025 - DNA, 25 bp, Homo sapien
gaattgggccaatccttgctttaga

SEQ ID NO: 2343026 - DNA, 25 bp, Homo sapien
taagaccaagctgatacactagact

SEQ ID NO: 2343027 - DNA, 25 bp, Homo sapien
tgttacggcctgactgaaagcttca

SEQ ID NO: 2343028 - DNA, 25 bp, Homo sapien
cactgtctcttcgaaatactgacat

SEQ ID NO: 2343029 - DNA, 25 bp, Homo sapien
ggtccactgtctcttcgaaatactg

SEQ ID NO: 2343030 - DNA, 25 bp, Homo sapien
gtccactgtctcttcgaaatactga

SEQ ID NO: 2343031 - DNA, 25 bp, Homo sapien
aaaggtccactgtctcttcgaaata

SEQ ID NO: 2343032 - DNA, 25 bp, Homo sapien
ctgtcaacatcaaagacactcttga

SEQ ID NO: 2343033 - DNA, 25 bp, Homo sapien
cactgtcaacatcaaagacactctt

SEQ ID NO: 2343034 - DNA, 25 bp, Homo sapien
tgtcaacatcaaagacactcttgac

SEQ ID NO: 2343035 - DNA, 25 bp, Homo sapien
actgtcaacatcaaagacactcttg

SEQ ID NO: 2343036 - DNA, 25 bp, Homo sapien
caccataaaaggtagcggatgatgg

SEQ ID NO: 2343037 - DNA, 25 bp, Homo sapien
gctagaaatcccttgacaccataaa

SEQ ID NO: 2343038 - DNA, 25 bp, Homo sapien
gggtcacaaaggagagctagaaatc

SEQ ID NO: 2343039 - DNA, 25 bp, Homo sapien
ggcaggagcctaaacaacagctgtt

SEQ ID NO: 2343040 - DNA, 25 bp, Homo sapien
tgtatatgctgctgtattgagccct

SEQ ID NO: 2343041 - DNA, 25 bp, Homo sapien
gacgtccttgtacaagagccatcaa

SEQ ID NO: 2343042 - DNA, 25 bp, Homo sapien
atgaatttatgtgacgtccttgtac

SEQ ID NO: 2343043 - DNA, 25 bp, Homo sapien
agtgtatatgctgctgtattgagcc

SEQ ID NO: 2343044 - DNA, 25 bp, Homo sapien
atgattccatggtattatgcccagg

SEQ ID NO: 2343045 - DNA, 25 bp, Homo sapien
ccatggtattatgcccaggacaagg

SEQ ID NO: 2343046 - DNA, 25 bp, Homo sapien
gaggaatgattccatggtattatgc

SEQ ID NO: 2343047 - DNA, 25 bp, Homo sapien
aagggaggaatgattccatggtatt

SEQ ID NO: 2343048 - DNA, 25 bp, Homo sapien
gggatccagctcaatagccttcaag

SEQ ID NO: 2343049 - DNA, 25 bp, Homo sapien
tttggtgggatccagctcaatagcc

SEQ ID NO: 2343050 - DNA, 25 bp, Homo sapien
tggtgggatccagctcaatagcctt

SEQ ID NO: 2343051 - DNA, 25 bp, Homo sapien
ggtgggatccagctcaatagccttc

SEQ ID NO: 2343052 - DNA, 25 bp, Homo sapien
cattcatggacagttgaggtaccca

SEQ ID NO: 2343053 - DNA, 25 bp, Homo sapien
ggcagccttttagcactcagggaaa

SEQ ID NO: 2343054 - DNA, 25 bp, Homo sapien
tctagactgattaaggccaaggcta

SEQ ID NO: 2343055 - DNA, 25 bp, Homo sapien
gctgggaagataatgcactgcaacc

SEQ ID NO: 2343056 - DNA, 25 bp, Homo sapien
tctatgagacgagcttcttccagaa

SEQ ID NO: 2343057 - DNA, 25 bp, Homo sapien
ccatctcagctgcttctatgagacg

SEQ ID NO: 2343058 - DNA, 25 bp, Homo sapien
tgagcatgtgggcagcattgaagac

SEQ ID NO: 2343059 - DNA, 25 bp, Homo sapien
aactctgtgctgtctagttcagctg

SEQ ID NO: 2343060 - DNA, 25 bp, Homo sapien
agcctggctgccagatcataatact

SEQ ID NO: 2343061 - DNA, 25 bp, Homo sapien
gcctggctgccagatcataatactt

SEQ ID NO: 2343062 - DNA, 25 bp, Homo sapien
ccaatagatccacgactaggctagc

SEQ ID NO: 2343063 - DNA, 25 bp, Homo sapien
tagatccacgactaggctagctgca

SEQ ID NO: 2343064 - DNA, 25 bp, Homo sapien
aatagatccacgactaggctagctg

SEQ ID NO: 2343065 - DNA, 25 bp, Homo sapien
caatagatccacgactaggctagct

SEQ ID NO: 2343066 - DNA, 25 bp, Homo sapien
tgagatatgaccagctgcacaagcc

SEQ ID NO: 2343067 - DNA, 25 bp, Homo sapien
gtgtgtatatacctgctcaacccgg

SEQ ID NO: 2343068 - DNA, 25 bp, Homo sapien
aaaacagcctattgcctggcaaggg

SEQ ID NO: 2343069 - DNA, 25 bp, Homo sapien
tagtacaaacgaacggatgctccaa

SEQ ID NO: 2343070 - DNA, 25 bp, Homo sapien
cgactcaagttggagcccataagct

SEQ ID NO: 2343071 - DNA, 25 bp, Homo sapien
tatctgctgtaacgactcaagttgg

SEQ ID NO: 2343072 - DNA, 25 bp, Homo sapien
gagcccataagctcctgcaaaatgc

SEQ ID NO: 2343073 - DNA, 25 bp, Homo sapien
gcaattataggatatatgcactgaa

SEQ ID NO: 2343074 - DNA, 25 bp, Homo sapien
cattcactggtagcttcatatttct

SEQ ID NO: 2343075 - DNA, 25 bp, Homo sapien
catatattttggtgtatgattatgg

SEQ ID NO: 2343076 - DNA, 25 bp, Homo sapien
atatattttggtgtatgattatggc

SEQ ID NO: 2343077 - DNA, 25 bp, Homo sapien
tatattttggtgtatgattatggca

SEQ ID NO: 2343078 - DNA, 25 bp, Homo sapien
aactgtccactcgcagaatgaatat

SEQ ID NO: 2343079 - DNA, 25 bp, Homo sapien
tgtccactcgcagaatgaatatgaa

SEQ ID NO: 2343080 - DNA, 25 bp, Homo sapien
ctgtccactcgcagaatgaatatga

SEQ ID NO: 2343081 - DNA, 25 bp, Homo sapien
actgtccactcgcagaatgaatatg

SEQ ID NO: 2343082 - DNA, 25 bp, Homo sapien
gttgggctctcttgtatcccattgg

SEQ ID NO: 2343083 - DNA, 25 bp, Homo sapien
gctctcttgtatcccattggtctct

SEQ ID NO: 2343084 - DNA, 25 bp, Homo sapien
gcagtagttgggctctcttgtatcc

SEQ ID NO: 2343085 - DNA, 25 bp, Homo sapien
tgtatcccattggtctctgtggcca

SEQ ID NO: 2343086 - DNA, 25 bp, Homo sapien
taactggctgttggattacatactg

SEQ ID NO: 2343087 - DNA, 25 bp, Homo sapien
tcagatctttccctatacacatggt

SEQ ID NO: 2343088 - DNA, 25 bp, Homo sapien
tacatactggtgtccttgctctctg

SEQ ID NO: 2343089 - DNA, 25 bp, Homo sapien
taaccaaagcagtcagtagcttgca

SEQ ID NO: 2343090 - DNA, 25 bp, Homo sapien
tgttccacagtttgcggagattgga

SEQ ID NO: 2343091 - DNA, 25 bp, Homo sapien
caggtcttagaagtctttaagcctt

SEQ ID NO: 2343092 - DNA, 25 bp, Homo sapien
tctggagtctgccattgaggtgcag

SEQ ID NO: 2343093 - DNA, 25 bp, Homo sapien
catcgtctggcttgagctgcagggc

SEQ ID NO: 2343094 - DNA, 25 bp, Homo sapien
taagcaggctgtcccaaacagggaa

SEQ ID NO: 2343095 - DNA, 25 bp, Homo sapien
ggaagttctgtctgctaaggaagcc

SEQ ID NO: 2343096 - DNA, 25 bp, Homo sapien
gattcttccagaagcggtagtgacc

SEQ ID NO: 2343097 - DNA, 25 bp, Homo sapien
tattaacgctacttgggaactggtg

SEQ ID NO: 2343098 - DNA, 25 bp, Homo sapien
tttgatcatgttctaacgcccaccc

SEQ ID NO: 2343099 - DNA, 25 bp, Homo sapien
tatttttagcactgtctgcaataat

SEQ ID NO: 2343100 - DNA, 25 bp, Homo sapien
caccataaatccctgagcggagaca

SEQ ID NO: 2343101 - DNA, 25 bp, Homo sapien
cttgtcttgtgctctatatttttag

SEQ ID NO: 2343102 - DNA, 25 bp, Homo sapien
tgggcacatgacagatagagttttc

SEQ ID NO: 2343103 - DNA, 25 bp, Homo sapien
caacaatgtgctgagctggagaata

SEQ ID NO: 2343104 - DNA, 25 bp, Homo sapien
ccaagtacagtgacagtgctccaat

SEQ ID NO: 2343105 - DNA, 25 bp, Homo sapien
aaaaataatatctcatgggcacatg

SEQ ID NO: 2343106 - DNA, 25 bp, Homo sapien
gaaggatcgcatccgacttgttacg

SEQ ID NO: 2343107 - DNA, 25 bp, Homo sapien
ggtgggatcttgcacattgcaccag

SEQ ID NO: 2343108 - DNA, 25 bp, Homo sapien
gccccactgcgctgaaattccaagg

SEQ ID NO: 2343109 - DNA, 25 bp, Homo sapien
caaatgaaacttagaccactgatgc

SEQ ID NO: 2343110 - DNA, 25 bp, Homo sapien
tctggcttctcaaccttttcacccg

SEQ ID NO: 2343111 - DNA, 25 bp, Homo sapien
tcagccttcttggctctgagttttt

SEQ ID NO: 2343112 - DNA, 25 bp, Homo sapien
tggcttctcaaccttttcacccgcc

SEQ ID NO: 2343113 - DNA, 25 bp, Homo sapien
ccttcttggctctgagttttttctc

SEQ ID NO: 2343114 - DNA, 25 bp, Homo sapien
ttagccttgaggttatcctttttca

SEQ ID NO: 2343115 - DNA, 25 bp, Homo sapien
tagccttgaggttatcctttttcac

SEQ ID NO: 2343116 - DNA, 25 bp, Homo sapien
caatggggctttcttttctgaggtt

SEQ ID NO: 2343117 - DNA, 25 bp, Homo sapien
ctgcaatggggctttcttttctgag

SEQ ID NO: 2343118 - DNA, 25 bp, Homo sapien
attcctctgacaaggacaggattgc

SEQ ID NO: 2343119 - DNA, 25 bp, Homo sapien
ttcctctgacaaggacaggattgcg

SEQ ID NO: 2343120 - DNA, 25 bp, Homo sapien
caattcctctgacaaggacaggatt

SEQ ID NO: 2343121 - DNA, 25 bp, Homo sapien
gccaattcctctgacaaggacagga

SEQ ID NO: 2343122 - DNA, 25 bp, Homo sapien
tctggaatacatagcagatccggaa

SEQ ID NO: 2343123 - DNA, 25 bp, Homo sapien
ggaatacatagcagatccggaatac

SEQ ID NO: 2343124 - DNA, 25 bp, Homo sapien
ctggaatacatagcagatccggaat

SEQ ID NO: 2343125 - DNA, 25 bp, Homo sapien
tttctggaatacatagcagatccgg

SEQ ID NO: 2343126 - DNA, 25 bp, Homo sapien
accttggatttgtggttgagttctt

SEQ ID NO: 2343127 - DNA, 25 bp, Homo sapien
aaccttggatttgtggttgagttct

SEQ ID NO: 2343128 - DNA, 25 bp, Homo sapien
ttggatttgtggttgagttcttcct

SEQ ID NO: 2343129 - DNA, 25 bp, Homo sapien
taaccttggatttgtggttgagttc

SEQ ID NO: 2343130 - DNA, 25 bp, Homo sapien
ctaggcattttgtgaagtttaacca

SEQ ID NO: 2343131 - DNA, 25 bp, Homo sapien
taggcattttgtgaagtttaaccac

SEQ ID NO: 2343132 - DNA, 25 bp, Homo sapien
cacccgggtactgcagttcttttca

SEQ ID NO: 2343133 - DNA, 25 bp, Homo sapien
gtactgcagttcttttcaccaccaa

SEQ ID NO: 2343134 - DNA, 25 bp, Homo sapien
ccgtggctcaacagctttccagaca

SEQ ID NO: 2343135 - DNA, 25 bp, Homo sapien
gccgtggctcaacagctttccagac

SEQ ID NO: 2343136 - DNA, 25 bp, Homo sapien
gagggttttttgccgtggctcaaca

SEQ ID NO: 2343137 - DNA, 25 bp, Homo sapien
tggctcaacagctttccagacacat

SEQ ID NO: 2343138 - DNA, 25 bp, Homo sapien
ctctttgcccctgtggcatccagtg

SEQ ID NO: 2343139 - DNA, 25 bp, Homo sapien
ggtgatgctggctcgcagttttcta

SEQ ID NO: 2343140 - DNA, 25 bp, Homo sapien
gatgatcagaatggtccctggggtg

SEQ ID NO: 2343141 - DNA, 25 bp, Homo sapien
tcagaatggtccctggggtgatgct

SEQ ID NO: 2343142 - DNA, 25 bp, Homo sapien
gtcacaagtaacaagccactagcca

SEQ ID NO: 2343143 - DNA, 25 bp, Homo sapien
ccagtcacaagtaacaagccactag

SEQ ID NO: 2343144 - DNA, 25 bp, Homo sapien
aagtaacaagccactagccagctgc

SEQ ID NO: 2343145 - DNA, 25 bp, Homo sapien
cacaagtaacaagccactagccagc

SEQ ID NO: 2343146 - DNA, 25 bp, Homo sapien
tatcaattttggttgaggtggcaat

SEQ ID NO: 2343147 - DNA, 25 bp, Homo sapien
ctgatatcaattttggttgaggtgg

SEQ ID NO: 2343148 - DNA, 25 bp, Homo sapien
gatatcaattttggttgaggtggca

SEQ ID NO: 2343149 - DNA, 25 bp, Homo sapien
tcaattttggttgaggtggcaatga

SEQ ID NO: 2343150 - DNA, 25 bp, Homo sapien
gtaagcattagtaagatgttttggg

SEQ ID NO: 2343151 - DNA, 25 bp, Homo sapien
ttgaagtaagcattagtaagatgtt

SEQ ID NO: 2343152 - DNA, 25 bp, Homo sapien
cttgaagtaagcattagtaagatgt

SEQ ID NO: 2343153 - DNA, 25 bp, Homo sapien
gaagtaagcattagtaagatgtttt

SEQ ID NO: 2343154 - DNA, 25 bp, Homo sapien
tcttgtgatgctctataatctcata

SEQ ID NO: 2343155 - DNA, 25 bp, Homo sapien
aatcttgtgatgctctataatctca

SEQ ID NO: 2343156 - DNA, 25 bp, Homo sapien
tgtgatgctctataatctcatattt

SEQ ID NO: 2343157 - DNA, 25 bp, Homo sapien
cttgtgatgctctataatctcatat

SEQ ID NO: 2343158 - DNA, 25 bp, Homo sapien
tgatttttggtaaaatttgtgagtc

SEQ ID NO: 2343159 - DNA, 25 bp, Homo sapien
cacagatcgcagacagccccggagc

SEQ ID NO: 2343160 - DNA, 25 bp, Homo sapien
agcacagatcgcagacagccccgga

SEQ ID NO: 2343161 - DNA, 25 bp, Homo sapien
gcacagatcgcagacagccccggag

SEQ ID NO: 2343162 - DNA, 25 bp, Homo sapien
acagatcgcagacagccccggagct

SEQ ID NO: 2343163 - DNA, 25 bp, Homo sapien
cagttatatccccaagagtttccat

SEQ ID NO: 2343164 - DNA, 25 bp, Homo sapien
agttatatccccaagagtttccata

SEQ ID NO: 2343165 - DNA, 25 bp, Homo sapien
gatcctaaatcactgaactgactga

SEQ ID NO: 2343166 - DNA, 25 bp, Homo sapien
ggttatttactctccctgatcctaa

SEQ ID NO: 2343167 - DNA, 25 bp, Homo sapien
actatttcatggtcagaatatcgtt

SEQ ID NO: 2343168 - DNA, 25 bp, Homo sapien
gaactcccacatttcagctagttgt

SEQ ID NO: 2343169 - DNA, 25 bp, Homo sapien
tctgcatgaaatgcagtaaagtaca

SEQ ID NO: 2343170 - DNA, 25 bp, Homo sapien
catgaaatgcagtaaagtacaaagc

SEQ ID NO: 2343171 - DNA, 25 bp, Homo sapien
tgcatgaaatgcagtaaagtacaaa

SEQ ID NO: 2343172 - DNA, 25 bp, Homo sapien
aatctgcatgaaatgcagtaaagta

SEQ ID NO: 2343173 - DNA, 25 bp, Homo sapien
atgtactagtgtgcctaacgcatgc

SEQ ID NO: 2343174 - DNA, 25 bp, Homo sapien
ttaatgtactagtgtgcctaacgca

SEQ ID NO: 2343175 - DNA, 25 bp, Homo sapien
actttttaatgtactagtgtgccta

SEQ ID NO: 2343176 - DNA, 25 bp, Homo sapien
ttttaatgtactagtgtgcctaacg

SEQ ID NO: 2343177 - DNA, 25 bp, Homo sapien
tggagtacccacaggagacactgta

SEQ ID NO: 2343178 - DNA, 25 bp, Homo sapien
gctagcactgcgagataatatttcc

SEQ ID NO: 2343179 - DNA, 25 bp, Homo sapien
ttgtgattccacaaagagctagcac

SEQ ID NO: 2343180 - DNA, 25 bp, Homo sapien
taaagtgatgtgaaccagctaactc

SEQ ID NO: 2343181 - DNA, 25 bp, Homo sapien
tggaagaaagagtcagcatgcccct

SEQ ID NO: 2343182 - DNA, 25 bp, Homo sapien
cagtgcaggaacacgcttctgatac

SEQ ID NO: 2343183 - DNA, 25 bp, Homo sapien
ggaacacgcttctgatacatcttca

SEQ ID NO: 2343184 - DNA, 25 bp, Homo sapien
agccagtgcaggaacacgcttctga

SEQ ID NO: 2343185 - DNA, 25 bp, Homo sapien
gcaggaacacgcttctgatacatct

SEQ ID NO: 2343186 - DNA, 25 bp, Homo sapien
cagattaatacgctgaagcttttca

SEQ ID NO: 2343187 - DNA, 25 bp, Homo sapien
agattaatacgctgaagcttttcaa

SEQ ID NO: 2343188 - DNA, 25 bp, Homo sapien
gattaatacgctgaagcttttcaaa

SEQ ID NO: 2343189 - DNA, 25 bp, Homo sapien
attaatacgctgaagcttttcaaaa

SEQ ID NO: 2343190 - DNA, 25 bp, Homo sapien
cagaacagatgtcatcactaagtga

SEQ ID NO: 2343191 - DNA, 25 bp, Homo sapien
tgaagttcttgagttctacacacaa

SEQ ID NO: 2343192 - DNA, 25 bp, Homo sapien
gaacagatgtcatcactaagtgaag

SEQ ID NO: 2343193 - DNA, 25 bp, Homo sapien
cactaagtgaagttcttgagttcta

SEQ ID NO: 2343194 - DNA, 25 bp, Homo sapien
tccttccgacattgaaagcagtttc

SEQ ID NO: 2343195 - DNA, 25 bp, Homo sapien
gctccttccgacattgaaagcagtt

SEQ ID NO: 2343196 - DNA, 25 bp, Homo sapien
agctccttccgacattgaaagcagt

SEQ ID NO: 2343197 - DNA, 25 bp, Homo sapien
ctccttccgacattgaaagcagttt

SEQ ID NO: 2343198 - DNA, 25 bp, Homo sapien
ttctctgtctcaaatgcaagatggt

SEQ ID NO: 2343199 - DNA, 25 bp, Homo sapien
gtataatcagcaataagaactggaa

SEQ ID NO: 2343200 - DNA, 25 bp, Homo sapien
gaagtaccttgtggctgtctcttga

SEQ ID NO: 2343201 - DNA, 25 bp, Homo sapien
tcccattcaataagagtgcttccac

SEQ ID NO: 2343202 - DNA, 25 bp, Homo sapien
ctaggatgcgatgtttcttgataaa

SEQ ID NO: 2343203 - DNA, 25 bp, Homo sapien
cttctaggatgcgatgtttcttgat

SEQ ID NO: 2343204 - DNA, 25 bp, Homo sapien
ttctaggatgcgatgtttcttgata

SEQ ID NO: 2343205 - DNA, 25 bp, Homo sapien
tctaggatgcgatgtttcttgataa

SEQ ID NO: 2343206 - DNA, 25 bp, Homo sapien
gcaaaatgtcagcacctcccatgga

SEQ ID NO: 2343207 - DNA, 25 bp, Homo sapien
cagcaggagttctctttttgtaagg

SEQ ID NO: 2343208 - DNA, 25 bp, Homo sapien
cacctcccatggagatagatgtcag

SEQ ID NO: 2343209 - DNA, 25 bp, Homo sapien
caatggaatagcatttcctatccac

SEQ ID NO: 2343210 - DNA, 25 bp, Homo sapien
ataaccacagagtaatagtgaagct

SEQ ID NO: 2343211 - DNA, 25 bp, Homo sapien
tcaataaccacagagtaatagtgaa

SEQ ID NO: 2343212 - DNA, 25 bp, Homo sapien
gtaatagtgaagctgataagaactt

SEQ ID NO: 2343213 - DNA, 25 bp, Homo sapien
taatagtgaagctgataagaacttc

SEQ ID NO: 2343214 - DNA, 25 bp, Homo sapien
tcttgaattgtctgcccaagtagat

SEQ ID NO: 2343215 - DNA, 25 bp, Homo sapien
tttagcaactgtggcaaaaacactc

SEQ ID NO: 2343216 - DNA, 25 bp, Homo sapien
tttcttacagcttgtatatgttttc

SEQ ID NO: 2343217 - DNA, 25 bp, Homo sapien
tagcaactgtggcaaaaacactcat

SEQ ID NO: 2343218 - DNA, 25 bp, Homo sapien
tagctttatgtctactggatgaccc

SEQ ID NO: 2343219 - DNA, 25 bp, Homo sapien
tctatatttactttgaagttggact

SEQ ID NO: 2343220 - DNA, 25 bp, Homo sapien
tgtctactggatgacccttcttcct

SEQ ID NO: 2343221 - DNA, 25 bp, Homo sapien
gactaaccccttagctttatgtcta

SEQ ID NO: 2343222 - DNA, 25 bp, Homo sapien
taaaccttgtaaacatcaccatcat

SEQ ID NO: 2343223 - DNA, 25 bp, Homo sapien
tgctcaattgtccaatacccaattc

SEQ ID NO: 2343224 - DNA, 25 bp, Homo sapien
tctctcggtgtccttataaaccttg

SEQ ID NO: 2343225 - DNA, 25 bp, Homo sapien
gtctttcaaaattagtctctcggtg

SEQ ID NO: 2343226 - DNA, 25 bp, Homo sapien
tcaaagtctgagatctacacaaaat

SEQ ID NO: 2343227 - DNA, 25 bp, Homo sapien
aagtctgagatctacacaaaatatt

SEQ ID NO: 2343228 - DNA, 25 bp, Homo sapien
ttcagcttctattaatttccattcc

SEQ ID NO: 2343229 - DNA, 25 bp, Homo sapien
acacaaaatatttcagcttctatta

SEQ ID NO: 2343230 - DNA, 25 bp, Homo sapien
tgactgcttgctgcagcttttcctc

SEQ ID NO: 2343231 - DNA, 25 bp, Homo sapien
gtaagtttgaggactttgaggtcat

SEQ ID NO: 2343232 - DNA, 25 bp, Homo sapien
tgtcctcgcagtccttgactgcttg

SEQ ID NO: 2343233 - DNA, 25 bp, Homo sapien
cttttcctccaaatcaatgtgggtg

SEQ ID NO: 2343234 - DNA, 25 bp, Homo sapien
cttcagagttcccataagccccaaa

SEQ ID NO: 2343235 - DNA, 25 bp, Homo sapien
tcagagttcccataagccccaaagc

SEQ ID NO: 2343236 - DNA, 25 bp, Homo sapien
gttgccttcagagttcccataagcc

SEQ ID NO: 2343237 - DNA, 25 bp, Homo sapien
gccttcagagttcccataagcccca

SEQ ID NO: 2343238 - DNA, 25 bp, Homo sapien
ccactggacttggatggaaataaac

SEQ ID NO: 2343239 - DNA, 25 bp, Homo sapien
gttccagagtcctcatgccccagga

SEQ ID NO: 2343240 - DNA, 25 bp, Homo sapien
taaacagagccagttccagagtcct

SEQ ID NO: 2343241 - DNA, 25 bp, Homo sapien
cataggccactggacttggatggaa

SEQ ID NO: 2343242 - DNA, 25 bp, Homo sapien
catgggagtcttagaataagtgtca

SEQ ID NO: 2343243 - DNA, 25 bp, Homo sapien
cagttgatgtcggaatatccaggag

SEQ ID NO: 2343244 - DNA, 25 bp, Homo sapien
gtcggaatatccaggagatggaaag

SEQ ID NO: 2343245 - DNA, 25 bp, Homo sapien
aatattggtcatgggagtcttagaa

SEQ ID NO: 2343246 - DNA, 25 bp, Homo sapien
aaggctggttagtaatcgagtcaga

SEQ ID NO: 2343247 - DNA, 25 bp, Homo sapien
caatgatgctctgcaaagtaactct

SEQ ID NO: 2343248 - DNA, 25 bp, Homo sapien
tcccgtgtaagaaggctggttagta

SEQ ID NO: 2343249 - DNA, 25 bp, Homo sapien
gcaaagtaactctcccgtgtaagaa

SEQ ID NO: 2343250 - DNA, 25 bp, Homo sapien
aataatttagtttgtgcaatatgga

SEQ ID NO: 2343251 - DNA, 25 bp, Homo sapien
atttagtttgtgcaatatggaacat

SEQ ID NO: 2343252 - DNA, 25 bp, Homo sapien
taatttagtttgtgcaatatggaac

SEQ ID NO: 2343253 - DNA, 25 bp, Homo sapien
tcccactgtagccatttgatgtaaa

SEQ ID NO: 2343254 - DNA, 25 bp, Homo sapien
cttttgcaactggtgttagacatta

SEQ ID NO: 2343255 - DNA, 25 bp, Homo sapien
cattactcccttgtactgatcttgt

SEQ ID NO: 2343256 - DNA, 25 bp, Homo sapien
attctgctcccttgaaccacacgtg

SEQ ID NO: 2343257 - DNA, 25 bp, Homo sapien
tgactcattctgctcccttgaacca

SEQ ID NO: 2343258 - DNA, 25 bp, Homo sapien
ttctgtaaacgtttctaatcacagc

SEQ ID NO: 2343259 - DNA, 25 bp, Homo sapien
ttagagcaaaacataggcaattggg

SEQ ID NO: 2343260 - DNA, 25 bp, Homo sapien
gtagttggtctacacacatactcac

SEQ ID NO: 2343261 - DNA, 25 bp, Homo sapien
gagaaaaacattaaccatttagcca

SEQ ID NO: 2343262 - DNA, 25 bp, Homo sapien
taaacaatggctactattaagacaa

SEQ ID NO: 2343263 - DNA, 25 bp, Homo sapien
tctgcaactggcaaggaatagtcag

SEQ ID NO: 2343264 - DNA, 25 bp, Homo sapien
acctctcactgtacggcctcttaat

SEQ ID NO: 2343265 - DNA, 25 bp, Homo sapien
tcactgtacggcctcttaataaatc

SEQ ID NO: 2343266 - DNA, 25 bp, Homo sapien
gatggttgagtgtggcacctctcac

SEQ ID NO: 2343267 - DNA, 25 bp, Homo sapien
ggtctcagtgcagtcgttaagatcc

SEQ ID NO: 2343268 - DNA, 25 bp, Homo sapien
tctcagtgcagtcgttaagatccat

SEQ ID NO: 2343269 - DNA, 25 bp, Homo sapien
gtctcagtgcagtcgttaagatcca

SEQ ID NO: 2343270 - DNA, 25 bp, Homo sapien
tcacgttctgctcaaaaacaataaa

SEQ ID NO: 2343271 - DNA, 25 bp, Homo sapien
cactaaattcttgatcacatatgtt

SEQ ID NO: 2343272 - DNA, 25 bp, Homo sapien
tccttgtcctcactaaattcttgat

SEQ ID NO: 2343273 - DNA, 25 bp, Homo sapien
tttttgagaatattccctggcattg

SEQ ID NO: 2343274 - DNA, 25 bp, Homo sapien
cacagatgtcagaaatggcaacttg

SEQ ID NO: 2343275 - DNA, 25 bp, Homo sapien
acagaagtaccgtgaagagatgaac

SEQ ID NO: 2343276 - DNA, 25 bp, Homo sapien
tattcaggcatgcaatactttccac

SEQ ID NO: 2343277 - DNA, 25 bp, Homo sapien
gaacaatgtctcaggtattcaggca

SEQ ID NO: 2343278 - DNA, 25 bp, Homo sapien
taaaggcagctatgtttacaaatgt

SEQ ID NO: 2343279 - DNA, 25 bp, Homo sapien
caaatccagcagcacttatacacca

SEQ ID NO: 2343280 - DNA, 25 bp, Homo sapien
aaatccagcagcacttatacaccat

SEQ ID NO: 2343281 - DNA, 25 bp, Homo sapien
cttctgcttttttccagacaatctt

SEQ ID NO: 2343282 - DNA, 25 bp, Homo sapien
tttttccagacaatcttgctatcat

SEQ ID NO: 2343283 - DNA, 25 bp, Homo sapien
cttttttccagacaatcttgctatc

SEQ ID NO: 2343284 - DNA, 25 bp, Homo sapien
tctgcttttttccagacaatcttgc

SEQ ID NO: 2343285 - DNA, 25 bp, Homo sapien
cagaaaactgattccggagaataac

SEQ ID NO: 2343286 - DNA, 25 bp, Homo sapien
gataccttcatagagcctacataca

SEQ ID NO: 2343287 - DNA, 25 bp, Homo sapien
ttccaatgcggcttcctagaataat

SEQ ID NO: 2343288 - DNA, 25 bp, Homo sapien
tagaataattagctctaagacatgt

SEQ ID NO: 2343289 - DNA, 25 bp, Homo sapien
cgtagcagtatggtaagtcttgata

SEQ ID NO: 2343290 - DNA, 25 bp, Homo sapien
cagtatggtaagtcttgatatgtag

SEQ ID NO: 2343291 - DNA, 25 bp, Homo sapien
gcaggcaccgtcacaacgtagcagt

SEQ ID NO: 2343292 - DNA, 25 bp, Homo sapien
ccgtcacaacgtagcagtatggtaa

SEQ ID NO: 2343293 - DNA, 25 bp, Homo sapien
aatttgatccctagggttgaaggca

SEQ ID NO: 2343294 - DNA, 25 bp, Homo sapien
tagagtttggatgtctggcctttcc

SEQ ID NO: 2343295 - DNA, 25 bp, Homo sapien
tacagttgtatgaaggccgtagcca

SEQ ID NO: 2343296 - DNA, 25 bp, Homo sapien
cacatttggctatgggctacttgaa

SEQ ID NO: 2343297 - DNA, 25 bp, Homo sapien
aatcctattatgtatacgtaacacc

SEQ ID NO: 2343298 - DNA, 25 bp, Homo sapien
agttcttagatattatggtccatta

SEQ ID NO: 2343299 - DNA, 25 bp, Homo sapien
tatttctattacagtgttgtgtttt

SEQ ID NO: 2343300 - DNA, 25 bp, Homo sapien
tacattctctagtggggttcaggct

SEQ ID NO: 2343301 - DNA, 25 bp, Homo sapien
tattcactttgaagcatcctgcata

SEQ ID NO: 2343302 - DNA, 25 bp, Homo sapien
caaaagaccagtgacaagttacatg

SEQ ID NO: 2343303 - DNA, 25 bp, Homo sapien
cacatctatggattcctgggtgcct

SEQ ID NO: 2343304 - DNA, 25 bp, Homo sapien
gggtgcctttgctccatatatttca

SEQ ID NO: 2343305 - DNA, 25 bp, Homo sapien
caggtcatttttggcctgaaggtca

SEQ ID NO: 2343306 - DNA, 25 bp, Homo sapien
tctttatcccgtaccagcagcttgg

SEQ ID NO: 2343307 - DNA, 25 bp, Homo sapien
catccgtgagcctgggaaaagaacc

SEQ ID NO: 2343308 - DNA, 25 bp, Homo sapien
ggtcaggttcaagcaaaaaggccaa

SEQ ID NO: 2343309 - DNA, 25 bp, Homo sapien
tgctcccttaagtgccagtttctgg

SEQ ID NO: 2343310 - DNA, 25 bp, Homo sapien
tttactctaaaaagatgcaggatat

SEQ ID NO: 2343311 - DNA, 25 bp, Homo sapien
tgcaggatattttcggtgccacttt

SEQ ID NO: 2343312 - DNA, 25 bp, Homo sapien
aagtcagaagctagtattttcctcc

SEQ ID NO: 2343313 - DNA, 25 bp, Homo sapien
tctagtgggaaggagttgacatctc

SEQ ID NO: 2343314 - DNA, 25 bp, Homo sapien
ggcacatatcaagcccctctaactt

SEQ ID NO: 2343315 - DNA, 25 bp, Homo sapien
ttatagctttcgatttccaccaggc

SEQ ID NO: 2343316 - DNA, 25 bp, Homo sapien
tctaacttggctaatcctaactcca

SEQ ID NO: 2343317 - DNA, 25 bp, Homo sapien
ctaatcatgtttgtctgcgttcatg

SEQ ID NO: 2343318 - DNA, 25 bp, Homo sapien
taatcatgtttgtctgcgttcatgg

SEQ ID NO: 2343319 - DNA, 25 bp, Homo sapien
tggaggtaggaatcagatagtaatc

SEQ ID NO: 2343320 - DNA, 25 bp, Homo sapien
ggaatcagatagtaatcttccatca

SEQ ID NO: 2343321 - DNA, 25 bp, Homo sapien
ttaattacataacttcacacaattt

SEQ ID NO: 2343322 - DNA, 25 bp, Homo sapien
atttcatatggaggtaggaatcaga

SEQ ID NO: 2343323 - DNA, 25 bp, Homo sapien
cctcttctgtttggttttctggtca

SEQ ID NO: 2343324 - DNA, 25 bp, Homo sapien
ctcttctgtttggttttctggtcat

SEQ ID NO: 2343325 - DNA, 25 bp, Homo sapien
tcctcttctgtttggttttctggtc

SEQ ID NO: 2343326 - DNA, 25 bp, Homo sapien
ttcaactgaactatattcagtctct

SEQ ID NO: 2343327 - DNA, 25 bp, Homo sapien
ggcttcaactgaactatattcagtc

SEQ ID NO: 2343328 - DNA, 25 bp, Homo sapien
tcttcaatcactggcttcaactgaa

SEQ ID NO: 2343329 - DNA, 25 bp, Homo sapien
atcttcaatcactggcttcaactga

SEQ ID NO: 2343330 - DNA, 25 bp, Homo sapien
tcaagctttgtagtttgacaaattg

SEQ ID NO: 2343331 - DNA, 25 bp, Homo sapien
caagctttgtagtttgacaaattgt

SEQ ID NO: 2343332 - DNA, 25 bp, Homo sapien
aagctttgtagtttgacaaattgtc

SEQ ID NO: 2343333 - DNA, 25 bp, Homo sapien
cttctagacttgagatagaaggcag

SEQ ID NO: 2343334 - DNA, 25 bp, Homo sapien
cttgagatagaaggcagagtctggc

SEQ ID NO: 2343335 - DNA, 25 bp, Homo sapien
tagacttgagatagaaggcagagtc

SEQ ID NO: 2343336 - DNA, 25 bp, Homo sapien
agatagaaggcagagtctggctgcc

SEQ ID NO: 2343337 - DNA, 25 bp, Homo sapien
ctggagactcccacatgcatgaaaa

SEQ ID NO: 2343338 - DNA, 25 bp, Homo sapien
aatgctggagactcccacatgcatg

SEQ ID NO: 2343339 - DNA, 25 bp, Homo sapien
atgtaaatgctggagactcccacat

SEQ ID NO: 2343340 - DNA, 25 bp, Homo sapien
taaatgctggagactcccacatgca

SEQ ID NO: 2343341 - DNA, 25 bp, Homo sapien
caagtgatatcttttacgttgtatt

SEQ ID NO: 2343342 - DNA, 25 bp, Homo sapien
tttgctgctacaagtgatatctttt

SEQ ID NO: 2343343 - DNA, 25 bp, Homo sapien
cagttttgctgctacaagtgatatc

SEQ ID NO: 2343344 - DNA, 25 bp, Homo sapien
gctacaagtgatatcttttacgttg

SEQ ID NO: 2343345 - DNA, 25 bp, Homo sapien
ttaaccaagcaaccaattttctcat

SEQ ID NO: 2343346 - DNA, 25 bp, Homo sapien
ttgtataaaccagtttaaccaagca

SEQ ID NO: 2343347 - DNA, 25 bp, Homo sapien
cactgtttgctttagaatatttgta

SEQ ID NO: 2343348 - DNA, 25 bp, Homo sapien
tctcatctaggcaaacagctttctt

SEQ ID NO: 2343349 - DNA, 25 bp, Homo sapien
ttcagcccttgctagtgctcagtgt

SEQ ID NO: 2343350 - DNA, 25 bp, Homo sapien
gcatttcccaacgtcatatttagtg

SEQ ID NO: 2343351 - DNA, 25 bp, Homo sapien
tatttagtgaaatgcaaagccagac

SEQ ID NO: 2343352 - DNA, 25 bp, Homo sapien
aaagccagacctaatgcatcctcag

SEQ ID NO: 2343353 - DNA, 25 bp, Homo sapien
gatccccaggcaagttgattggtgc

SEQ ID NO: 2343354 - DNA, 25 bp, Homo sapien
cataatgctgtcaatcaaggatcca

SEQ ID NO: 2343355 - DNA, 25 bp, Homo sapien
cttaagtaaggagtatctggccagt

SEQ ID NO: 2343356 - DNA, 25 bp, Homo sapien
tggccagtaactttccataatgctg

SEQ ID NO: 2343357 - DNA, 25 bp, Homo sapien
tgacagggctatcaaaggaatttgg

SEQ ID NO: 2343358 - DNA, 25 bp, Homo sapien
ctgggaaggatctcctgaagtcccc

SEQ ID NO: 2343359 - DNA, 25 bp, Homo sapien
tcttgacaatgacagggctatcaaa

SEQ ID NO: 2343360 - DNA, 25 bp, Homo sapien
caatgacagggctatcaaaggaatt

SEQ ID NO: 2343361 - DNA, 25 bp, Homo sapien
tcctcaaaagtcagcttagctctgt

SEQ ID NO: 2343362 - DNA, 25 bp, Homo sapien
tcttttgcttagaactccccttcca

SEQ ID NO: 2343363 - DNA, 25 bp, Homo sapien
tcagaaccactgcatagctctctct

SEQ ID NO: 2343364 - DNA, 25 bp, Homo sapien
atctttttagatacgatagcactgc

SEQ ID NO: 2343365 - DNA, 25 bp, Homo sapien
cacacccttctaactgtactttatt

SEQ ID NO: 2343366 - DNA, 25 bp, Homo sapien
tactacttatttcacatggcagtca

SEQ ID NO: 2343367 - DNA, 25 bp, Homo sapien
gttccttttccgatggtagcaatga

SEQ ID NO: 2343368 - DNA, 25 bp, Homo sapien
taagcaggcaggtcccaaactgact

SEQ ID NO: 2343369 - DNA, 25 bp, Homo sapien
aaatttatgagacttatgtgcggcc

SEQ ID NO: 2343370 - DNA, 25 bp, Homo sapien
tctcttggtgttccccagttttcat

SEQ ID NO: 2343371 - DNA, 25 bp, Homo sapien
tccaccaccatgacttctaaagacc

SEQ ID NO: 2343372 - DNA, 25 bp, Homo sapien
ccaagacagttaaccaacaccaggg

SEQ ID NO: 2343373 - DNA, 25 bp, Homo sapien
aacaccaggggaattgtagaatgcc

SEQ ID NO: 2343374 - DNA, 25 bp, Homo sapien
ttgtgccaagacagttaaccaacac

SEQ ID NO: 2343375 - DNA, 25 bp, Homo sapien
tgccaagacagttaaccaacaccag

SEQ ID NO: 2343376 - DNA, 25 bp, Homo sapien
cagtcctgtaggagtggtcttcagc

SEQ ID NO: 2343377 - DNA, 25 bp, Homo sapien
tgagttactccaaaaccagtcctgt

SEQ ID NO: 2343378 - DNA, 25 bp, Homo sapien
cctggcaaatcccttgtgtgaagaa

SEQ ID NO: 2343379 - DNA, 25 bp, Homo sapien
tcagccctgttgcaagagattctcc

SEQ ID NO: 2343380 - DNA, 25 bp, Homo sapien
tgtgaacctgtgagccatttctccc

SEQ ID NO: 2343381 - DNA, 25 bp, Homo sapien
tttttggacttagatgagccactac

SEQ ID NO: 2343382 - DNA, 25 bp, Homo sapien
tcatgggacttggtcttgtgaacct

SEQ ID NO: 2343383 - DNA, 25 bp, Homo sapien
tcttcagcctttggattgttggact

SEQ ID NO: 2343384 - DNA, 25 bp, Homo sapien
tctgcaaggatgataggctttgagg

SEQ ID NO: 2343385 - DNA, 25 bp, Homo sapien
gatcaaggatgtgttgctgaagaat

SEQ ID NO: 2343386 - DNA, 25 bp, Homo sapien
tctaggaacaattgatcttgactgt

SEQ ID NO: 2343387 - DNA, 25 bp, Homo sapien
tatgacattgagtaggtctgcaagg

SEQ ID NO: 2343388 - DNA, 25 bp, Homo sapien
tagtgaaacttgcaataggagagca

SEQ ID NO: 2343389 - DNA, 25 bp, Homo sapien
caataggagagcaaaggtatcacga

SEQ ID NO: 2343390 - DNA, 25 bp, Homo sapien
ggtatcacgattcccagcacagctg

SEQ ID NO: 2343391 - DNA, 25 bp, Homo sapien
ggaaatagtgaaacttgcaatagga

SEQ ID NO: 2343392 - DNA, 25 bp, Homo sapien
tatttgatgctagaagtagttgcag

SEQ ID NO: 2343393 - DNA, 25 bp, Homo sapien
tagaatggaatcataactggtgtaa

SEQ ID NO: 2343394 - DNA, 25 bp, Homo sapien
cacaggcactcagagatatagtagc

SEQ ID NO: 2343395 - DNA, 25 bp, Homo sapien
tgagtttgaagtcactggtgtgtac

SEQ ID NO: 2343396 - DNA, 25 bp, Homo sapien
tcaggagcctgaaattttctgaatg

SEQ ID NO: 2343397 - DNA, 25 bp, Homo sapien
aatcagcacctttttggagtactgc

SEQ ID NO: 2343398 - DNA, 25 bp, Homo sapien
gaatgtaatacgtttccgatacctg

SEQ ID NO: 2343399 - DNA, 25 bp, Homo sapien
tctctggattagacaaatcagcacc

SEQ ID NO: 2343400 - DNA, 25 bp, Homo sapien
ctcttgtagtatagccaaacttatg

SEQ ID NO: 2343401 - DNA, 25 bp, Homo sapien
gtttagagaattgcttattcactgc

SEQ ID NO: 2343402 - DNA, 25 bp, Homo sapien
ttttccatgtcagcatctcttgtag

SEQ ID NO: 2343403 - DNA, 25 bp, Homo sapien
gttcacattttcactaaggtttcta

SEQ ID NO: 2343404 - DNA, 25 bp, Homo sapien
tagctactttatagggatcttttcc

SEQ ID NO: 2343405 - DNA, 25 bp, Homo sapien
ttagctactttatagggatcttttc

SEQ ID NO: 2343406 - DNA, 25 bp, Homo sapien
gcccttagctactttatagggatct

SEQ ID NO: 2343407 - DNA, 25 bp, Homo sapien
ccttagctactttatagggatcttt

SEQ ID NO: 2343408 - DNA, 25 bp, Homo sapien
tatctgagctgttgttctgttgtaa

SEQ ID NO: 2343409 - DNA, 25 bp, Homo sapien
tgtatctgagctgttgttctgttgt

SEQ ID NO: 2343410 - DNA, 25 bp, Homo sapien
ctcttgtatctgagctgttgttctg

SEQ ID NO: 2343411 - DNA, 25 bp, Homo sapien
tctgagctgttgttctgttgtaaat

SEQ ID NO: 2343412 - DNA, 25 bp, Homo sapien
gttgtttttcgtaaatgagccttca

SEQ ID NO: 2343413 - DNA, 25 bp, Homo sapien
ttttcatctgaattgattgttccct

SEQ ID NO: 2343414 - DNA, 25 bp, Homo sapien
tgttgtttttcgtaaatgagccttc

SEQ ID NO: 2343415 - DNA, 25 bp, Homo sapien
gttaacctttcaagagatgaaagag

SEQ ID NO: 2343416 - DNA, 25 bp, Homo sapien
tccacaaggaatatctagccatgat

SEQ ID NO: 2343417 - DNA, 25 bp, Homo sapien
tccaaagttaacctttcaagagatg

SEQ ID NO: 2343418 - DNA, 25 bp, Homo sapien
caaggaatatctagccatgattcca

SEQ ID NO: 2343419 - DNA, 25 bp, Homo sapien
aactctttgtgctcatgaaatgttt

SEQ ID NO: 2343420 - DNA, 25 bp, Homo sapien
ttgactttttggcaatacttgaata

SEQ ID NO: 2343421 - DNA, 25 bp, Homo sapien
caaccattgactttttggcaatact

SEQ ID NO: 2343422 - DNA, 25 bp, Homo sapien
aaccattgactttttggcaatactt

SEQ ID NO: 2343423 - DNA, 25 bp, Homo sapien
gactttttggcaatacttgaatagc

SEQ ID NO: 2343424 - DNA, 25 bp, Homo sapien
aactgtccgaaatcttcctccaaca

SEQ ID NO: 2343425 - DNA, 25 bp, Homo sapien
actgtccgaaatcttcctccaacac

SEQ ID NO: 2343426 - DNA, 25 bp, Homo sapien
gaaactgtccgaaatcttcctccaa

SEQ ID NO: 2343427 - DNA, 25 bp, Homo sapien
cttgttgcagtatgtcacggagcga

SEQ ID NO: 2343428 - DNA, 25 bp, Homo sapien
caatctctaggatgagaactgcact

SEQ ID NO: 2343429 - DNA, 25 bp, Homo sapien
cacggagcgagcatcgaacttctca

SEQ ID NO: 2343430 - DNA, 25 bp, Homo sapien
catttatttcgtgaaacccatggga

SEQ ID NO: 2343431 - DNA, 25 bp, Homo sapien
ttccaaatcaccacaagttatcctc

SEQ ID NO: 2343432 - DNA, 25 bp, Homo sapien
ccactttccaaatcaccacaagtta

SEQ ID NO: 2343433 - DNA, 25 bp, Homo sapien
aatcaccacaagttatcctcctttc

SEQ ID NO: 2343434 - DNA, 25 bp, Homo sapien
ttagaactccactttccaaatcacc

SEQ ID NO: 2343435 - DNA, 25 bp, Homo sapien
aacgtaagtggatgaggttgaccca

SEQ ID NO: 2343436 - DNA, 25 bp, Homo sapien
tctcaacacttagcaacgtaagtgg

SEQ ID NO: 2343437 - DNA, 25 bp, Homo sapien
ggatgaggttgacccatatttaatt

SEQ ID NO: 2343438 - DNA, 25 bp, Homo sapien
taattaccatctcaacacttagcaa

SEQ ID NO: 2343439 - DNA, 25 bp, Homo sapien
cacacacttatgtgtacttttaaaa

SEQ ID NO: 2343440 - DNA, 25 bp, Homo sapien
tgcacaggctgtaggctttgctctc

SEQ ID NO: 2343441 - DNA, 25 bp, Homo sapien
tatatgaaggcatccatccaaattc

SEQ ID NO: 2343442 - DNA, 25 bp, Homo sapien
ccaaattctctttttgcacaggctg

SEQ ID NO: 2343443 - DNA, 25 bp, Homo sapien
ggcttacggtagttgttatccgata

SEQ ID NO: 2343444 - DNA, 25 bp, Homo sapien
tacggtagttgttatccgataatat

SEQ ID NO: 2343445 - DNA, 25 bp, Homo sapien
ggtagttgttatccgataatataca

SEQ ID NO: 2343446 - DNA, 25 bp, Homo sapien
gttgttatccgataatatacaataa

SEQ ID NO: 2343447 - DNA, 25 bp, Homo sapien
tctggaagggtgacatttactcttg

SEQ ID NO: 2343448 - DNA, 25 bp, Homo sapien
gaaactctggaagggtgacatttac

SEQ ID NO: 2343449 - DNA, 25 bp, Homo sapien
tggaagggtgacatttactcttgag

SEQ ID NO: 2343450 - DNA, 25 bp, Homo sapien
aactctggaagggtgacatttactc

SEQ ID NO: 2343451 - DNA, 25 bp, Homo sapien
aaatggtattacctcagtttctaat

SEQ ID NO: 2343452 - DNA, 25 bp, Homo sapien
tattgattttggtagcattgacacc

SEQ ID NO: 2343453 - DNA, 25 bp, Homo sapien
tatattatgtagataggctgtattg

SEQ ID NO: 2343454 - DNA, 25 bp, Homo sapien
atttctgggtttagtagtgttgaca

SEQ ID NO: 2343455 - DNA, 25 bp, Homo sapien
tcgcaagagatgtaaatggccggct

SEQ ID NO: 2343456 - DNA, 25 bp, Homo sapien
tcagttgcatcctgcatcgggcggg

SEQ ID NO: 2343457 - DNA, 25 bp, Homo sapien
catcttgtaatgagaccccttggaa

SEQ ID NO: 2343458 - DNA, 25 bp, Homo sapien
cataacctggcgagaatcactgagc

SEQ ID NO: 2343459 - DNA, 25 bp, Homo sapien
taaagtaaagttgggggcatcacga

SEQ ID NO: 2343460 - DNA, 25 bp, Homo sapien
gttgggggcatcacgaaatcttttc

SEQ ID NO: 2343461 - DNA, 25 bp, Homo sapien
taaagttgggggcatcacgaaatct

SEQ ID NO: 2343462 - DNA, 25 bp, Homo sapien
gcatcacgaaatcttttccagtgtt

SEQ ID NO: 2343463 - DNA, 25 bp, Homo sapien
ccttgccatgagcaatatttgagac

SEQ ID NO: 2343464 - DNA, 25 bp, Homo sapien
aagctctagaaagatagattagacc

SEQ ID NO: 2343465 - DNA, 25 bp, Homo sapien
gaattcagtccaagcactatgggca

SEQ ID NO: 2343466 - DNA, 25 bp, Homo sapien
tagacctttctaacatgatatactg

SEQ ID NO: 2343467 - DNA, 25 bp, Homo sapien
ctttgaaaagctgagttcattggat

SEQ ID NO: 2343468 - DNA, 25 bp, Homo sapien
ggtctgtcaacaattcgaatgcaaa

SEQ ID NO: 2343469 - DNA, 25 bp, Homo sapien
gaaaataggtgaaaccacagggaca

SEQ ID NO: 2343470 - DNA, 25 bp, Homo sapien
aaaaatcacctctagtagattccac

SEQ ID NO: 2343471 - DNA, 25 bp, Homo sapien
tcattttgcttaaatccttctacac

SEQ ID NO: 2343472 - DNA, 25 bp, Homo sapien
cctttccagtcgtcattatcattgc

SEQ ID NO: 2343473 - DNA, 25 bp, Homo sapien
tccagtcgtcattatcattgcaata

SEQ ID NO: 2343474 - DNA, 25 bp, Homo sapien
ttcctttccagtcgtcattatcatt

SEQ ID NO: 2343475 - DNA, 25 bp, Homo sapien
taccatggcaacatgtcagctgctg

SEQ ID NO: 2343476 - DNA, 25 bp, Homo sapien
aaattacactgcctaatcacatgga

SEQ ID NO: 2343477 - DNA, 25 bp, Homo sapien
tcaatcatctattcaaaagcaatta

SEQ ID NO: 2343478 - DNA, 25 bp, Homo sapien
tcacatggaaaattagctacatttt

SEQ ID NO: 2343479 - DNA, 25 bp, Homo sapien
catagagttgatcttccttaccctg

SEQ ID NO: 2343480 - DNA, 25 bp, Homo sapien
catcctaaagataaatcagtctgtc

SEQ ID NO: 2343481 - DNA, 25 bp, Homo sapien
tgccaatatgcaggaaggagagtat

SEQ ID NO: 2343482 - DNA, 25 bp, Homo sapien
ccttattgcaaggaacacagaagaa

SEQ ID NO: 2343483 - DNA, 25 bp, Homo sapien
tgtgtatctttgtgttggcacgtca

SEQ ID NO: 2343484 - DNA, 25 bp, Homo sapien
gtgtatctttgtgttggcacgtcat

SEQ ID NO: 2343485 - DNA, 25 bp, Homo sapien
cagattgagtatgttggtttgccta

SEQ ID NO: 2343486 - DNA, 25 bp, Homo sapien
tcctagaaacggtaacttcagattg

SEQ ID NO: 2343487 - DNA, 25 bp, Homo sapien
ccatgtagtatttagcagaagtcca

SEQ ID NO: 2343488 - DNA, 25 bp, Homo sapien
gatagatctcctatattgtcatgcg

SEQ ID NO: 2343489 - DNA, 25 bp, Homo sapien
cctcagcagcgagattccttggctt

SEQ ID NO: 2343490 - DNA, 25 bp, Homo sapien
tacacaaagcgtatccatggcaaca

SEQ ID NO: 2343491 - DNA, 25 bp, Homo sapien
ttgttgtaagacagcgcccatagcc

SEQ ID NO: 2343492 - DNA, 25 bp, Homo sapien
atcacaaggaagagacaccggtttt

SEQ ID NO: 2343493 - DNA, 25 bp, Homo sapien
gagttctcgaaatctccagggtgga

SEQ ID NO: 2343494 - DNA, 25 bp, Homo sapien
tgagtgagtaaccatcgaatgatcc

SEQ ID NO: 2343495 - DNA, 25 bp, Homo sapien
aagggagcctcgagcttcgcagagt

SEQ ID NO: 2343496 - DNA, 25 bp, Homo sapien
catagccaagacatctctttaagtt

SEQ ID NO: 2343497 - DNA, 25 bp, Homo sapien
cacttggagttcactaaagctgtca

SEQ ID NO: 2343498 - DNA, 25 bp, Homo sapien
caagtcctcagtagccacctgcagt

SEQ ID NO: 2343499 - DNA, 25 bp, Homo sapien
gacgtgcagtcatggatgggtctca

SEQ ID NO: 2343500 - DNA, 25 bp, Homo sapien
tgcagcacatctcagttaggattag

SEQ ID NO: 2343501 - DNA, 25 bp, Homo sapien
tccaaggaggaaatgctgagtttat

SEQ ID NO: 2343502 - DNA, 25 bp, Homo sapien
ttctgattttgcatcactctcaatg

SEQ ID NO: 2343503 - DNA, 25 bp, Homo sapien
ctgattttgcatcactctcaatgtc

SEQ ID NO: 2343504 - DNA, 25 bp, Homo sapien
gagtttatccaattcagcttctatt

SEQ ID NO: 2343505 - DNA, 25 bp, Homo sapien
agctttactcctgttctttatgatg

SEQ ID NO: 2343506 - DNA, 25 bp, Homo sapien
gctttactcctgttctttatgatgt

SEQ ID NO: 2343507 - DNA, 25 bp, Homo sapien
cttaattaattgctctgaactttct

SEQ ID NO: 2343508 - DNA, 25 bp, Homo sapien
cctgttcttaaatgcatatgattat

SEQ ID NO: 2343509 - DNA, 25 bp, Homo sapien
tcttcatattcagttgatagtcctg

SEQ ID NO: 2343510 - DNA, 25 bp, Homo sapien
gattattagaaactgctccataact

SEQ ID NO: 2343511 - DNA, 25 bp, Homo sapien
ggcacaatcggttttacttctcata

SEQ ID NO: 2343512 - DNA, 25 bp, Homo sapien
ggagtggcacaatcggttttacttc

SEQ ID NO: 2343513 - DNA, 25 bp, Homo sapien
catgaggactaggctcaggaacaaa

SEQ ID NO: 2343514 - DNA, 25 bp, Homo sapien
tcatccataggcaagtcatgaggac

SEQ ID NO: 2343515 - DNA, 25 bp, Homo sapien
atcatttgtaagatcaaaactgtca

SEQ ID NO: 2343516 - DNA, 25 bp, Homo sapien
atcatcatttgtaagatcaaaactg

SEQ ID NO: 2343517 - DNA, 25 bp, Homo sapien
tttctcttgccaagcctcaaaagac

SEQ ID NO: 2343518 - DNA, 25 bp, Homo sapien
tttcttccacttcacagtatccaaa

SEQ ID NO: 2343519 - DNA, 25 bp, Homo sapien
cttccacttcacagtatccaaaatt

SEQ ID NO: 2343520 - DNA, 25 bp, Homo sapien
gccaagcctcaaaagactgtctaca

SEQ ID NO: 2343521 - DNA, 25 bp, Homo sapien
tacatgaaaaacaaaagcaaaatac

SEQ ID NO: 2343522 - DNA, 25 bp, Homo sapien
cagaggtagctactgattttaaaaa

SEQ ID NO: 2343523 - DNA, 25 bp, Homo sapien
taaaaatacatgaaaaacaaaagca

SEQ ID NO: 2343524 - DNA, 25 bp, Homo sapien
tcagaggtagctactgattttaaaa

SEQ ID NO: 2343525 - DNA, 25 bp, Homo sapien
aatttcaggctatccatgatgaccc

SEQ ID NO: 2343526 - DNA, 25 bp, Homo sapien
caccaaaaagttgccagttcaagga

SEQ ID NO: 2343527 - DNA, 25 bp, Homo sapien
catgacctgcaagtggtgtcctaaa

SEQ ID NO: 2343528 - DNA, 25 bp, Homo sapien
gggcgcagactgactctaaatggtt

SEQ ID NO: 2343529 - DNA, 25 bp, Homo sapien
gttcatcattcatcttgtcctgttc

SEQ ID NO: 2343530 - DNA, 25 bp, Homo sapien
ttctcttctttatagagttcatcat

SEQ ID NO: 2343531 - DNA, 25 bp, Homo sapien
catgctgtttaaatttctctttcca

SEQ ID NO: 2343532 - DNA, 25 bp, Homo sapien
ctcatgctgtttaaatttctctttc

SEQ ID NO: 2343533 - DNA, 25 bp, Homo sapien
tccatttgtaaatgcaagtttctaa

SEQ ID NO: 2343534 - DNA, 25 bp, Homo sapien
tcttgttggtctttaaatcttgttc

SEQ ID NO: 2343535 - DNA, 25 bp, Homo sapien
catttgtaaatgcaagtttctaata

SEQ ID NO: 2343536 - DNA, 25 bp, Homo sapien
gtaaatgcaagtttctaatatactc

SEQ ID NO: 2343537 - DNA, 25 bp, Homo sapien
atatttttgataggcaacaaatgct

SEQ ID NO: 2343538 - DNA, 25 bp, Homo sapien
ggcaacaaatgctttatatttagct

SEQ ID NO: 2343539 - DNA, 25 bp, Homo sapien
ttgctctttaataattgggccatat

SEQ ID NO: 2343540 - DNA, 25 bp, Homo sapien
tgctctttaataattgggccatatt

SEQ ID NO: 2343541 - DNA, 25 bp, Homo sapien
ttccttttccttccactcttgtgct

SEQ ID NO: 2343542 - DNA, 25 bp, Homo sapien
tccttttccttccactcttgtgctt

SEQ ID NO: 2343543 - DNA, 25 bp, Homo sapien
tgttcctcctctaatctttttcgat

SEQ ID NO: 2343544 - DNA, 25 bp, Homo sapien
tctctcttcttttatcctttgttcc

SEQ ID NO: 2343545 - DNA, 25 bp, Homo sapien
ccttgcttattagttgctctctttc

SEQ ID NO: 2343546 - DNA, 25 bp, Homo sapien
tccttgcttattagttgctctcttt

SEQ ID NO: 2343547 - DNA, 25 bp, Homo sapien
ttccttgcttattagttgctctctt

SEQ ID NO: 2343548 - DNA, 25 bp, Homo sapien
tttccttgcttattagttgctctct

SEQ ID NO: 2343549 - DNA, 25 bp, Homo sapien
ttgttattatatccgctcttcttta

SEQ ID NO: 2343550 - DNA, 25 bp, Homo sapien
tattatatccgctcttctttaatgc

SEQ ID NO: 2343551 - DNA, 25 bp, Homo sapien
ttatatccgctcttctttaatgcac

SEQ ID NO: 2343552 - DNA, 25 bp, Homo sapien
atgtttgttattatatccgctcttc

SEQ ID NO: 2343553 - DNA, 25 bp, Homo sapien
tatagttactcaagccctcacaagg

SEQ ID NO: 2343554 - DNA, 25 bp, Homo sapien
tgattcctcaactagccaaaggaga

SEQ ID NO: 2343555 - DNA, 25 bp, Homo sapien
gacttctttagataccatggagctt

SEQ ID NO: 2343556 - DNA, 25 bp, Homo sapien
gcaggtcatgctatcaggttcaggt

SEQ ID NO: 2343557 - DNA, 25 bp, Homo sapien
ttccagtttatccaaagcgggtgtc

SEQ ID NO: 2343558 - DNA, 25 bp, Homo sapien
tgctgtaaagtatcccaagggccac

SEQ ID NO: 2343559 - DNA, 25 bp, Homo sapien
ttaaatgattttatccaggctagtc

SEQ ID NO: 2343560 - DNA, 25 bp, Homo sapien
caagggccacatcgaagaatttcca

SEQ ID NO: 2343561 - DNA, 25 bp, Homo sapien
gagctaattgtaattaaatgtgaaa

SEQ ID NO: 2343562 - DNA, 25 bp, Homo sapien
gctaattgtaattaaatgtgaaaaa

SEQ ID NO: 2343563 - DNA, 25 bp, Homo sapien
ctaattgtaattaaatgtgaaaaat

SEQ ID NO: 2343564 - DNA, 25 bp, Homo sapien
aagagctaattgtaattaaatgtga

SEQ ID NO: 2343565 - DNA, 25 bp, Homo sapien
ccacagcgtcgaagggatagaaact

SEQ ID NO: 2343566 - DNA, 25 bp, Homo sapien
ttttttacaattactcaggctgtgc

SEQ ID NO: 2343567 - DNA, 25 bp, Homo sapien
tcaggctgtgcaaagaagttaatcc

SEQ ID NO: 2343568 - DNA, 25 bp, Homo sapien
gatttgtacactctgccagtgtgga

SEQ ID NO: 2343569 - DNA, 25 bp, Homo sapien
tcatcttgaatgagaacggctattg

SEQ ID NO: 2343570 - DNA, 25 bp, Homo sapien
tttaacttctaagataaccctgcaa

SEQ ID NO: 2343571 - DNA, 25 bp, Homo sapien
gaaagaaagatgagataggatctcc

SEQ ID NO: 2343572 - DNA, 25 bp, Homo sapien
cctgcaaactgttatactatttgga

SEQ ID NO: 2343573 - DNA, 25 bp, Homo sapien
actcaatagcctcaatatggttttc

SEQ ID NO: 2343574 - DNA, 25 bp, Homo sapien
cactgaatattagtacagccatcca

SEQ ID NO: 2343575 - DNA, 25 bp, Homo sapien
aattttcacactcaatagcctcaat

SEQ ID NO: 2343576 - DNA, 25 bp, Homo sapien
atgaagagaagtcagttgattttta

SEQ ID NO: 2343577 - DNA, 25 bp, Homo sapien
tgtagtctcagtactcgggaaactg

SEQ ID NO: 2343578 - DNA, 25 bp, Homo sapien
cagaaggctgatgtaaaataatgga

SEQ ID NO: 2343579 - DNA, 25 bp, Homo sapien
caatagaaacactttgacagaaggc

SEQ ID NO: 2343580 - DNA, 25 bp, Homo sapien
taatggagtaaggtcctgacgggct

SEQ ID NO: 2343581 - DNA, 25 bp, Homo sapien
ggcaataatgcagaagtaacctgag

SEQ ID NO: 2343582 - DNA, 25 bp, Homo sapien
taacctgagtcgcatttcagtgggt

SEQ ID NO: 2343583 - DNA, 25 bp, Homo sapien
tttcagcatcatcacgctggcaata

SEQ ID NO: 2343584 - DNA, 25 bp, Homo sapien
agttgggtgataagaggtaaaagca

SEQ ID NO: 2343585 - DNA, 25 bp, Homo sapien
ggaatccagacttgtgccagggata

SEQ ID NO: 2343586 - DNA, 25 bp, Homo sapien
caggaccaacataatccagttggaa

SEQ ID NO: 2343587 - DNA, 25 bp, Homo sapien
gaggtaataggtatccaggaccaac

SEQ ID NO: 2343588 - DNA, 25 bp, Homo sapien
gataagtaagaagtggaggtgccca

SEQ ID NO: 2343589 - DNA, 25 bp, Homo sapien
tcataagtaactccattcacaactg

SEQ ID NO: 2343590 - DNA, 25 bp, Homo sapien
agagagccaaatcataagtaactcc

SEQ ID NO: 2343591 - DNA, 25 bp, Homo sapien
ccaaatcataagtaactccattcac

SEQ ID NO: 2343592 - DNA, 25 bp, Homo sapien
agagccaaatcataagtaactccat

SEQ ID NO: 2343593 - DNA, 25 bp, Homo sapien
catcagtaagatgattatgggagca

SEQ ID NO: 2343594 - DNA, 25 bp, Homo sapien
tttcaacgccctctacatcagtaag

SEQ ID NO: 2343595 - DNA, 25 bp, Homo sapien
tgggagcaatctaggtatacaatgg

SEQ ID NO: 2343596 - DNA, 25 bp, Homo sapien
caatggtaggtgtatcacaaagacc

SEQ ID NO: 2343597 - DNA, 25 bp, Homo sapien
aaatgcttccacagttgaaatgctg

SEQ ID NO: 2343598 - DNA, 25 bp, Homo sapien
gctgttatcatccaagtgcaattct

SEQ ID NO: 2343599 - DNA, 25 bp, Homo sapien
attctcttagtaaaacaagattctc

SEQ ID NO: 2343600 - DNA, 25 bp, Homo sapien
taaaggcagccagtatgaagaaaat

SEQ ID NO: 2343601 - DNA, 25 bp, Homo sapien
gaaagacaattgtggctgacatcta

SEQ ID NO: 2343602 - DNA, 25 bp, Homo sapien
tgaaaaagtggtacgattttagtca

SEQ ID NO: 2343603 - DNA, 25 bp, Homo sapien
cagaaagacaattgtggctgacatc

SEQ ID NO: 2343604 - DNA, 25 bp, Homo sapien
agaaagacaattgtggctgacatct

SEQ ID NO: 2343605 - DNA, 25 bp, Homo sapien
caaaccattttatggcacttttaag

SEQ ID NO: 2343606 - DNA, 25 bp, Homo sapien
tagcatgcatcaaaccattttatgg

SEQ ID NO: 2343607 - DNA, 25 bp, Homo sapien
agaagtgggtttccagtaagagaca

SEQ ID NO: 2343608 - DNA, 25 bp, Homo sapien
ttccagtaagagacaattcatggag

SEQ ID NO: 2343609 - DNA, 25 bp, Homo sapien
agaaatagaggtatattctgtttct

SEQ ID NO: 2343610 - DNA, 25 bp, Homo sapien
aaatagaggtatattctgtttctct

SEQ ID NO: 2343611 - DNA, 25 bp, Homo sapien
gaaatagaggtatattctgtttctc

SEQ ID NO: 2343612 - DNA, 25 bp, Homo sapien
cctgctgatcccagttgattgtgtt

SEQ ID NO: 2343613 - DNA, 25 bp, Homo sapien
tgaggattctcagagcaggcaacac

SEQ ID NO: 2343614 - DNA, 25 bp, Homo sapien
cgaatctgagactgacaaagtgcca

SEQ ID NO: 2343615 - DNA, 25 bp, Homo sapien
gattgtgttcttcagtgcggctttc

SEQ ID NO: 2343616 - DNA, 25 bp, Homo sapien
cgaacttttacataggacaagcata

SEQ ID NO: 2343617 - DNA, 25 bp, Homo sapien
gtatcaatagcaaaaccttaagaat

SEQ ID NO: 2343618 - DNA, 25 bp, Homo sapien
tttccaattgcaatgaagagtcatt

SEQ ID NO: 2343619 - DNA, 25 bp, Homo sapien
tttagacatttggaagtgcatgtta

SEQ ID NO: 2343620 - DNA, 25 bp, Homo sapien
tgaacaatgattggatttctagctt

SEQ ID NO: 2343621 - DNA, 25 bp, Homo sapien
gctggatttgaagttctcagtaaga

SEQ ID NO: 2343622 - DNA, 25 bp, Homo sapien
agaaatgtaaaggacttttcacttg

SEQ ID NO: 2343623 - DNA, 25 bp, Homo sapien
tattcttggctacattttgtcttcc

SEQ ID NO: 2343624 - DNA, 25 bp, Homo sapien
tgagtctggctcaccttcacgtgca

SEQ ID NO: 2343625 - DNA, 25 bp, Homo sapien
cagagattttctgcagtatccaagg

SEQ ID NO: 2343626 - DNA, 25 bp, Homo sapien
tcacgtgcacaagagtagaagactc

SEQ ID NO: 2343627 - DNA, 25 bp, Homo sapien
tgatagttacatcccctcgttcgtg

SEQ ID NO: 2343628 - DNA, 25 bp, Homo sapien
ttcagcaaattactaggtaccattg

SEQ ID NO: 2343629 - DNA, 25 bp, Homo sapien
tgtgcacctcatgaaaacataatgc

SEQ ID NO: 2343630 - DNA, 25 bp, Homo sapien
tatcatccatcaaaaggagtaaaca

SEQ ID NO: 2343631 - DNA, 25 bp, Homo sapien
tgcacctcacgaaaacataatggaa

SEQ ID NO: 2343632 - DNA, 25 bp, Homo sapien
tgtctgcgcatgaggtaaccacgcc

SEQ ID NO: 2343633 - DNA, 25 bp, Homo sapien
tctgttgcagcagtatgtagccttg

SEQ ID NO: 2343634 - DNA, 25 bp, Homo sapien
cacgccagtatgactggattaccac

SEQ ID NO: 2343635 - DNA, 25 bp, Homo sapien
aagaatttggcaggccttctgttgc

SEQ ID NO: 2343636 - DNA, 25 bp, Homo sapien
tactcgggtccgtgctgacgttatc

SEQ ID NO: 2343637 - DNA, 25 bp, Homo sapien
ggataccttgattagcaactcagca

SEQ ID NO: 2343638 - DNA, 25 bp, Homo sapien
tgtgatattcttaccacctccgctg

SEQ ID NO: 2343639 - DNA, 25 bp, Homo sapien
gaatctgatgttcctttgcctcgaa

SEQ ID NO: 2343640 - DNA, 25 bp, Homo sapien
tcattcttaatagcctctagagctg

SEQ ID NO: 2343641 - DNA, 25 bp, Homo sapien
gtcagtttctttcgcaaaataaagc

SEQ ID NO: 2343642 - DNA, 25 bp, Homo sapien
tataaaatcctctaaatctatttct

SEQ ID NO: 2343643 - DNA, 25 bp, Homo sapien
gagctgttgtcagtttctttcgcaa

SEQ ID NO: 2343644 - DNA, 25 bp, Homo sapien
ctaatgctagccattcttcttctaa

SEQ ID NO: 2343645 - DNA, 25 bp, Homo sapien
gaagcgggtggaatctaatgctagc

SEQ ID NO: 2343646 - DNA, 25 bp, Homo sapien
ggccaatgcagctggtttgaaagaa

SEQ ID NO: 2343647 - DNA, 25 bp, Homo sapien
aaagaagcagtgtttgtgaagggaa

SEQ ID NO: 2343648 - DNA, 25 bp, Homo sapien
aaattaaatgaagtatcatcccatt

SEQ ID NO: 2343649 - DNA, 25 bp, Homo sapien
ctggattacttggtaaattaaatga

SEQ ID NO: 2343650 - DNA, 25 bp, Homo sapien
gaagtatcatcccattttaagtttc

SEQ ID NO: 2343651 - DNA, 25 bp, Homo sapien
aaatgaagtatcatcccattttaag

SEQ ID NO: 2343652 - DNA, 25 bp, Homo sapien
ttgtcattacataaccatgcttgag

SEQ ID NO: 2343653 - DNA, 25 bp, Homo sapien
tggtctttgattcaggtgtccagga

SEQ ID NO: 2343654 - DNA, 25 bp, Homo sapien
ggtctttgattcaggtgtccaggaa

SEQ ID NO: 2343655 - DNA, 25 bp, Homo sapien
actggtctttgattcaggtgtccag

SEQ ID NO: 2343656 - DNA, 25 bp, Homo sapien
aaactctttctactggtctttgatt

SEQ ID NO: 2343657 - DNA, 25 bp, Homo sapien
tcttcaacatttgctgagcagtaga

SEQ ID NO: 2343658 - DNA, 25 bp, Homo sapien
gccctcttcaacatttgctgagcag

SEQ ID NO: 2343659 - DNA, 25 bp, Homo sapien
tgtgccctcttcaacatttgctgag

SEQ ID NO: 2343660 - DNA, 25 bp, Homo sapien
ttctgtgccctcttcaacatttgct

SEQ ID NO: 2343661 - DNA, 25 bp, Homo sapien
ttgctatagcccatgagttgtttac

SEQ ID NO: 2343662 - DNA, 25 bp, Homo sapien
tagtaggtctgagatgtcaagagtg

SEQ ID NO: 2343663 - DNA, 25 bp, Homo sapien
caagagtgtttcagccctcaaggat

SEQ ID NO: 2343664 - DNA, 25 bp, Homo sapien
tgagagcataacacagtaacatctg

SEQ ID NO: 2343665 - DNA, 25 bp, Homo sapien
ttttgaataaggctagacgcacagt

SEQ ID NO: 2343666 - DNA, 25 bp, Homo sapien
aataaggctagacgcacagtggaat

SEQ ID NO: 2343667 - DNA, 25 bp, Homo sapien
ttgaataaggctagacgcacagtgg

SEQ ID NO: 2343668 - DNA, 25 bp, Homo sapien
gaataaggctagacgcacagtggaa

SEQ ID NO: 2343669 - DNA, 25 bp, Homo sapien
tgttgcctgcatatgccctgtggca

SEQ ID NO: 2343670 - DNA, 25 bp, Homo sapien
aattatgagcatctcttcttacggg

SEQ ID NO: 2343671 - DNA, 25 bp, Homo sapien
tacatggagctcaaaacttagtagg

SEQ ID NO: 2343672 - DNA, 25 bp, Homo sapien
taaacagctagggaaatgcaagacc

SEQ ID NO: 2343673 - DNA, 25 bp, Homo sapien
gttaggtctccaatgacttcactga

SEQ ID NO: 2343674 - DNA, 25 bp, Homo sapien
caaaaagtacacaggctacatatgg

SEQ ID NO: 2343675 - DNA, 25 bp, Homo sapien
tctatttccagttgacctaggcaag

SEQ ID NO: 2343676 - DNA, 25 bp, Homo sapien
tcaggtaagaggctagtgaaaaatc

SEQ ID NO: 2343677 - DNA, 25 bp, Homo sapien
ataatgatgtctcatctctttccat

SEQ ID NO: 2343678 - DNA, 25 bp, Homo sapien
ttgtttctcttgttcaataatgatg

SEQ ID NO: 2343679 - DNA, 25 bp, Homo sapien
tgtttctcttgttcaataatgatgt

SEQ ID NO: 2343680 - DNA, 25 bp, Homo sapien
gtttctcttgttcaataatgatgtc

SEQ ID NO: 2343681 - DNA, 25 bp, Homo sapien
taaaatctccattatctaaagtctc

SEQ ID NO: 2343682 - DNA, 25 bp, Homo sapien
cttccgtatcctcaaagatattatg

SEQ ID NO: 2343683 - DNA, 25 bp, Homo sapien
tcctcaaagatattatgtacattta

SEQ ID NO: 2343684 - DNA, 25 bp, Homo sapien
tcttcttccgtatcctcaaagatat

SEQ ID NO: 2343685 - DNA, 25 bp, Homo sapien
gaagctttggctcaggaacccaggt

SEQ ID NO: 2343686 - DNA, 25 bp, Homo sapien
tgaagctttggctcaggaacccagg

SEQ ID NO: 2343687 - DNA, 25 bp, Homo sapien
tcccgaacctttgacatagagacag

SEQ ID NO: 2343688 - DNA, 25 bp, Homo sapien
taaaaagttctattgctgttgcccc

SEQ ID NO: 2343689 - DNA, 25 bp, Homo sapien
catttttatccagaagcccttagat

SEQ ID NO: 2343690 - DNA, 25 bp, Homo sapien
tcatctcatatcaagagggcctaat

SEQ ID NO: 2343691 - DNA, 25 bp, Homo sapien
tgacttttttgggaacatgttcaaa

SEQ ID NO: 2343692 - DNA, 25 bp, Homo sapien
cattgacttttttgggaacatgttc

SEQ ID NO: 2343693 - DNA, 25 bp, Homo sapien
caaactcagagatgatcggatgacc

SEQ ID NO: 2343694 - DNA, 25 bp, Homo sapien
tcggatgacctttttgaacatgact

SEQ ID NO: 2343695 - DNA, 25 bp, Homo sapien
caaagctggagtgcgtgcactggaa

SEQ ID NO: 2343696 - DNA, 25 bp, Homo sapien
cagatcaacactgcctcgggccttt

SEQ ID NO: 2343697 - DNA, 25 bp, Homo sapien
caacttttcagaggccgcggttgtg

SEQ ID NO: 2343698 - DNA, 25 bp, Homo sapien
tggagagcactccttcagatcaaca

SEQ ID NO: 2343699 - DNA, 25 bp, Homo sapien
tacgatcaagttttgtgcctgtact

SEQ ID NO: 2343700 - DNA, 25 bp, Homo sapien
tgagattctccaccttgtgcagtct

SEQ ID NO: 2343701 - DNA, 25 bp, Homo sapien
cttaatcttacgatcaagttttgtg

SEQ ID NO: 2343702 - DNA, 25 bp, Homo sapien
atttgagattctccaccttgtgcag

SEQ ID NO: 2343703 - DNA, 25 bp, Homo sapien
tgcttcctttaggagctcttgtaag

SEQ ID NO: 2343704 - DNA, 25 bp, Homo sapien
cttcctttaggagctcttgtaaggc

SEQ ID NO: 2343705 - DNA, 25 bp, Homo sapien
agtgcttcctttaggagctcttgta

SEQ ID NO: 2343706 - DNA, 25 bp, Homo sapien
ctttaggagctcttgtaaggcaggt

SEQ ID NO: 2343707 - DNA, 25 bp, Homo sapien
taagccatcatgatcaacaagtagg

SEQ ID NO: 2343708 - DNA, 25 bp, Homo sapien
aaactgtaacaaggcaagcatgtcc

SEQ ID NO: 2343709 - DNA, 25 bp, Homo sapien
tagaatctcgcccaaaagctccttg

SEQ ID NO: 2343710 - DNA, 25 bp, Homo sapien
taatgcaatcctactcacaatgggc

SEQ ID NO: 2343711 - DNA, 25 bp, Homo sapien
ttgttgataggctgtttatggtttc

SEQ ID NO: 2343712 - DNA, 25 bp, Homo sapien
tccaatctgttgttggaaagttgac

SEQ ID NO: 2343713 - DNA, 25 bp, Homo sapien
taaccaatccaatctgttgttggaa

SEQ ID NO: 2343714 - DNA, 25 bp, Homo sapien
tatggtttcttccttaaccaatcca

SEQ ID NO: 2343715 - DNA, 25 bp, Homo sapien
tatgtcggcaatactaaaattttga

SEQ ID NO: 2343716 - DNA, 25 bp, Homo sapien
gattctatgtatcttatgtcggcaa

SEQ ID NO: 2343717 - DNA, 25 bp, Homo sapien
tggctgattctatgtatcttatgtc

SEQ ID NO: 2343718 - DNA, 25 bp, Homo sapien
tgtatcttatgtcggcaatactaaa

SEQ ID NO: 2343719 - DNA, 25 bp, Homo sapien
gaggggattggccattgaatccatg

SEQ ID NO: 2343720 - DNA, 25 bp, Homo sapien
ggggattggccattgaatccatgag

SEQ ID NO: 2343721 - DNA, 25 bp, Homo sapien
gattggccattgaatccatgagcag

SEQ ID NO: 2343722 - DNA, 25 bp, Homo sapien
ggattggccattgaatccatgagca

SEQ ID NO: 2343723 - DNA, 25 bp, Homo sapien
gaaccccaacctgtgtgtgaagcca

SEQ ID NO: 2343724 - DNA, 25 bp, Homo sapien
tgtatattctctattccgttctaat

SEQ ID NO: 2343725 - DNA, 25 bp, Homo sapien
cagtggtatctttgtggatagggtc

SEQ ID NO: 2343726 - DNA, 25 bp, Homo sapien
tatttctggaactagtcgtttcatg

SEQ ID NO: 2343727 - DNA, 25 bp, Homo sapien
agtacatctggatctaactcaggca

SEQ ID NO: 2343728 - DNA, 25 bp, Homo sapien
catctggatctaactcaggcaaaaa

SEQ ID NO: 2343729 - DNA, 25 bp, Homo sapien
ttaagtacatctggatctaactcag

SEQ ID NO: 2343730 - DNA, 25 bp, Homo sapien
ggatctaactcaggcaaaaagtgat

SEQ ID NO: 2343731 - DNA, 25 bp, Homo sapien
aatagatacagttgtgatattttca

SEQ ID NO: 2343732 - DNA, 25 bp, Homo sapien
cttaaagtgccatttatttgagcac

SEQ ID NO: 2343733 - DNA, 25 bp, Homo sapien
ttacaagtcaagaaaacatgttatt

SEQ ID NO: 2343734 - DNA, 25 bp, Homo sapien
agttgtaggatgctaatatttttac

SEQ ID NO: 2343735 - DNA, 25 bp, Homo sapien
aaatccgtgtcttctctgcttacaa

SEQ ID NO: 2343736 - DNA, 25 bp, Homo sapien
cattggtcatggaaaaaaggtctaa

SEQ ID NO: 2343737 - DNA, 25 bp, Homo sapien
cttccattggtcatggaaaaaaggt

SEQ ID NO: 2343738 - DNA, 25 bp, Homo sapien
aatccgtgtcttctctgcttacaag

SEQ ID NO: 2343739 - DNA, 25 bp, Homo sapien
ttgtttatatcaaaagaggatattt

SEQ ID NO: 2343740 - DNA, 25 bp, Homo sapien
ccatcaattcgtttgtgatttctaa

SEQ ID NO: 2343741 - DNA, 25 bp, Homo sapien
gcatcctaccccctatctgaaaaag

SEQ ID NO: 2343742 - DNA, 25 bp, Homo sapien
tgcttgttggcattaggttccatca

SEQ ID NO: 2343743 - DNA, 25 bp, Homo sapien
gtgtgacaggtttatgaattaagag

SEQ ID NO: 2343744 - DNA, 25 bp, Homo sapien
taagagtcatcattaatagacataa

SEQ ID NO: 2343745 - DNA, 25 bp, Homo sapien
tagacataatcaaactcttacatat

SEQ ID NO: 2343746 - DNA, 25 bp, Homo sapien
tcaaactcttacatatgcaatggaa

SEQ ID NO: 2343747 - DNA, 25 bp, Homo sapien
caaaccccaactaactgtgaaaatg

SEQ ID NO: 2343748 - DNA, 25 bp, Homo sapien
aatacacaacatgctaccttcttga

SEQ ID NO: 2343749 - DNA, 25 bp, Homo sapien
caatattaggcatgaactcctagca

SEQ ID NO: 2343750 - DNA, 25 bp, Homo sapien
ccttagacttctacctgtaaacaat

SEQ ID NO: 2343751 - DNA, 25 bp, Homo sapien
tggaatctacttttgctttaggtac

SEQ ID NO: 2343752 - DNA, 25 bp, Homo sapien
gcttcatataggctaggtctgtgga

SEQ ID NO: 2343753 - DNA, 25 bp, Homo sapien
gattggcttcatataggctaggtct

SEQ ID NO: 2343754 - DNA, 25 bp, Homo sapien
ataggctaggtctgtggaaatctgc

SEQ ID NO: 2343755 - DNA, 25 bp, Homo sapien
ttacaggattggcttcatataggct

SEQ ID NO: 2343756 - DNA, 25 bp, Homo sapien
tgtctcggaatgatatacgttcttt

SEQ ID NO: 2343757 - DNA, 25 bp, Homo sapien
tattggtattcccttaactgaacaa

SEQ ID NO: 2343758 - DNA, 25 bp, Homo sapien
attattggcgatattggtattccct

SEQ ID NO: 2343759 - DNA, 25 bp, Homo sapien
ccactgagttgtacaggattgtctc

SEQ ID NO: 2343760 - DNA, 25 bp, Homo sapien
ggtttgcaatgcaatagggatccaa

SEQ ID NO: 2343761 - DNA, 25 bp, Homo sapien
tccagactcgggagagtaacagctc

SEQ ID NO: 2343762 - DNA, 25 bp, Homo sapien
tgtagttccaactatacatggagtg

SEQ ID NO: 2343763 - DNA, 25 bp, Homo sapien
ggaaattctaggacaccacatatga

SEQ ID NO: 2343764 - DNA, 25 bp, Homo sapien
ctacaaatttaggagcatcagcacc

SEQ ID NO: 2343765 - DNA, 25 bp, Homo sapien
ttttggaggcaaattggtgcacccc

SEQ ID NO: 2343766 - DNA, 25 bp, Homo sapien
cttggtgcgcacctcggtgaaggac

SEQ ID NO: 2343767 - DNA, 25 bp, Homo sapien
tgaacaggttgtgtgcgcagcaaat

SEQ ID NO: 2343768 - DNA, 25 bp, Homo sapien
cagctgtagacagacatctcgttag

SEQ ID NO: 2343769 - DNA, 25 bp, Homo sapien
gggtatttggttgccaacagctgca

SEQ ID NO: 2343770 - DNA, 25 bp, Homo sapien
cagaatcccgtgtgttttgtgacat

SEQ ID NO: 2343771 - DNA, 25 bp, Homo sapien
gtaaccacatgtgcccataacagag

SEQ ID NO: 2343772 - DNA, 25 bp, Homo sapien
gaggaaacagctaatggcaaactcc

SEQ ID NO: 2343773 - DNA, 25 bp, Homo sapien
caagtctggcaattatggtgaggcc

SEQ ID NO: 2343774 - DNA, 25 bp, Homo sapien
gagaccttcttcgagacctgaccag

SEQ ID NO: 2343775 - DNA, 25 bp, Homo sapien
tgacccacgcctctttggtgagacc

SEQ ID NO: 2343776 - DNA, 25 bp, Homo sapien
taacaatcagggagggctgtgcacc

SEQ ID NO: 2343777 - DNA, 25 bp, Homo sapien
gacagcactgctaggttgaaagccc

SEQ ID NO: 2343778 - DNA, 25 bp, Homo sapien
ggcacgactcttggcttcctaggag

SEQ ID NO: 2343779 - DNA, 25 bp, Homo sapien
tgccctgggcacaaaatcgcatttg

SEQ ID NO: 2343780 - DNA, 25 bp, Homo sapien
gagttactccgaaaagcgctctggg

SEQ ID NO: 2343781 - DNA, 25 bp, Homo sapien
caaggaaccagatgcattggcaact

SEQ ID NO: 2343782 - DNA, 25 bp, Homo sapien
ggaagattcacattaatccgaagcc

SEQ ID NO: 2343783 - DNA, 25 bp, Homo sapien
ttcggcttctaaccgggaggagctc

SEQ ID NO: 2343784 - DNA, 25 bp, Homo sapien
gcaactgttaatcgcagccgccgta

SEQ ID NO: 2343785 - DNA, 25 bp, Homo sapien
tcattgccgccgtgacagtggactg

SEQ ID NO: 2343786 - DNA, 25 bp, Homo sapien
tggactggcatttcggaagatcttg

SEQ ID NO: 2343787 - DNA, 25 bp, Homo sapien
gagcccctgacacccagattcattg

SEQ ID NO: 2343788 - DNA, 25 bp, Homo sapien
aatgccaggagagacgagcccctga

SEQ ID NO: 2343789 - DNA, 25 bp, Homo sapien
aatatgaaaataggcgggcgactaa

SEQ ID NO: 2343790 - DNA, 25 bp, Homo sapien
ctggaaaaggagcacccgaagttgc

SEQ ID NO: 2343791 - DNA, 25 bp, Homo sapien
gagggaagggaaagcgagcgctgcg

SEQ ID NO: 2343792 - DNA, 25 bp, Homo sapien
gcctcccagttctaatgaatatgaa

SEQ ID NO: 2343793 - DNA, 25 bp, Homo sapien
gagggcaaacttctcgctcagaaac

SEQ ID NO: 2343794 - DNA, 25 bp, Homo sapien
tcctgcgcccatgtaaaagtcactg

SEQ ID NO: 2343795 - DNA, 25 bp, Homo sapien
ataacgtgctccagaggacctcctg

SEQ ID NO: 2343796 - DNA, 25 bp, Homo sapien
tactcggagggctcttgagggcaaa

SEQ ID NO: 2343797 - DNA, 25 bp, Homo sapien
gcattttcgattgcggaagggctgc

SEQ ID NO: 2343798 - DNA, 25 bp, Homo sapien
ctgcctgatcagaccgatcctgcat

SEQ ID NO: 2343799 - DNA, 25 bp, Homo sapien
gatcagaccgatcctgcattttcga

SEQ ID NO: 2343800 - DNA, 25 bp, Homo sapien
gatcctgcattttcgattgcggaag

SEQ ID NO: 2343801 - DNA, 25 bp, Homo sapien
cctccaccttccaggtccctcgctc

SEQ ID NO: 2343802 - DNA, 25 bp, Homo sapien
ttccactaccttcctccaccttcca

SEQ ID NO: 2343803 - DNA, 25 bp, Homo sapien
caccttccaggtccctcgctcccac

SEQ ID NO: 2343804 - DNA, 25 bp, Homo sapien
tccaccttccaggtccctcgctccc

SEQ ID NO: 2343805 - DNA, 25 bp, Homo sapien
tccacgtaaaacgtactgatgatag

SEQ ID NO: 2343806 - DNA, 25 bp, Homo sapien
caatggatgcacatagtgaaatggg

SEQ ID NO: 2343807 - DNA, 25 bp, Homo sapien
aaacattacagagcatgacatctgg

SEQ ID NO: 2343808 - DNA, 25 bp, Homo sapien
gaatacgctttctatcggaaattag

SEQ ID NO: 2343809 - DNA, 25 bp, Homo sapien
tctgtcctcagagcaagctgttctc

SEQ ID NO: 2343810 - DNA, 25 bp, Homo sapien
catagctctattcagttcggtgtga

SEQ ID NO: 2343811 - DNA, 25 bp, Homo sapien
gctcctctagctgcaaactggtgaa

SEQ ID NO: 2343812 - DNA, 25 bp, Homo sapien
cctttcacgggagacattcggagac

SEQ ID NO: 2343813 - DNA, 25 bp, Homo sapien
tcactattttattcattcccccatt

SEQ ID NO: 2343814 - DNA, 25 bp, Homo sapien
tttcactattttattcattccccca

SEQ ID NO: 2343815 - DNA, 25 bp, Homo sapien
tttattcattcccccattttagcag

SEQ ID NO: 2343816 - DNA, 25 bp, Homo sapien
attcccccattttagcagtttatgg

SEQ ID NO: 2343817 - DNA, 25 bp, Homo sapien
aactcaagtaaaaatctgctgcttg

SEQ ID NO: 2343818 - DNA, 25 bp, Homo sapien
atgttgtctctaatgatgtaagagc

SEQ ID NO: 2343819 - DNA, 25 bp, Homo sapien
gctgcttgttatccgtgtgccacca

SEQ ID NO: 2343820 - DNA, 25 bp, Homo sapien
tccgtgtgccaccagatgttgtctc

SEQ ID NO: 2343821 - DNA, 25 bp, Homo sapien
cacagcgggtgttaatactcgacaa

SEQ ID NO: 2343822 - DNA, 25 bp, Homo sapien
aagagaacgacctgagtaaattaag

SEQ ID NO: 2343823 - DNA, 25 bp, Homo sapien
taagttcaagttggctctctgtgca

SEQ ID NO: 2343824 - DNA, 25 bp, Homo sapien
cactcttatgtgcaaagcaggaaag

SEQ ID NO: 2343825 - DNA, 25 bp, Homo sapien
tattatccattatgccaaggctcaa

SEQ ID NO: 2343826 - DNA, 25 bp, Homo sapien
tagtacactgctgataaatgcatat

SEQ ID NO: 2343827 - DNA, 25 bp, Homo sapien
caaatttaagatggcactttgcaga

SEQ ID NO: 2343828 - DNA, 25 bp, Homo sapien
gagccccaggaacacactaagggaa

SEQ ID NO: 2343829 - DNA, 25 bp, Homo sapien
taatattaaagggagatgcagaaga

SEQ ID NO: 2343830 - DNA, 25 bp, Homo sapien
tagtcttcttcacacaattatgttc

SEQ ID NO: 2343831 - DNA, 25 bp, Homo sapien
ttataagaaccatcttcctcagcag

SEQ ID NO: 2343832 - DNA, 25 bp, Homo sapien
tataggagtagcttttgggaatcta

SEQ ID NO: 2343833 - DNA, 25 bp, Homo sapien
gaaagtctatcagttactgtggcag

SEQ ID NO: 2343834 - DNA, 25 bp, Homo sapien
taatataagaaatagggcagataga

SEQ ID NO: 2343835 - DNA, 25 bp, Homo sapien
ggtcactaagctatcttccacaatt

SEQ ID NO: 2343836 - DNA, 25 bp, Homo sapien
gggcagatagaaccaagtgtcaaga

SEQ ID NO: 2343837 - DNA, 25 bp, Homo sapien
cacctaaatatatggcagcagcagg

SEQ ID NO: 2343838 - DNA, 25 bp, Homo sapien
catcaaacaagaaaggtaaaccagg

SEQ ID NO: 2343839 - DNA, 25 bp, Homo sapien
aatacatctgatacgtctgagcctc

SEQ ID NO: 2343840 - DNA, 25 bp, Homo sapien
tctggaagatgtatatgccgtaacg

SEQ ID NO: 2343841 - DNA, 25 bp, Homo sapien
cagcaaaatggcttttcgcttgttg

SEQ ID NO: 2343842 - DNA, 25 bp, Homo sapien
tggcaaaactgatatatcataggtg

SEQ ID NO: 2343843 - DNA, 25 bp, Homo sapien
cgcttgttgtatttggccataacgt

SEQ ID NO: 2343844 - DNA, 25 bp, Homo sapien
tatatcataggtggcagcaaaatgg

SEQ ID NO: 2343845 - DNA, 25 bp, Homo sapien
gaagcttagattttcattcttggct

SEQ ID NO: 2343846 - DNA, 25 bp, Homo sapien
aagcctatgctaaccattttaagaa

SEQ ID NO: 2343847 - DNA, 25 bp, Homo sapien
cattcttggctattatcttacatat

SEQ ID NO: 2343848 - DNA, 25 bp, Homo sapien
gatcagtattctgtgtagtttagca

SEQ ID NO: 2343849 - DNA, 25 bp, Homo sapien
caagaaagtactatggacttcatgg

SEQ ID NO: 2343850 - DNA, 25 bp, Homo sapien
ggctttatccagtatctacagtggg

SEQ ID NO: 2343851 - DNA, 25 bp, Homo sapien
catttaggctaactcttgagagaca

SEQ ID NO: 2343852 - DNA, 25 bp, Homo sapien
tcatgattggcactgttgaagtaat

SEQ ID NO: 2343853 - DNA, 25 bp, Homo sapien
ttctgttttgtactaggcaatgccc

SEQ ID NO: 2343854 - DNA, 25 bp, Homo sapien
caagcaatttagctacctggagagg

SEQ ID NO: 2343855 - DNA, 25 bp, Homo sapien
ctggagaggcaggtactttagaaca

SEQ ID NO: 2343856 - DNA, 25 bp, Homo sapien
taacattcacaagcatcgtatgagc

SEQ ID NO: 2343857 - DNA, 25 bp, Homo sapien
caggaggaagtgtcacgtggtaaca

SEQ ID NO: 2343858 - DNA, 25 bp, Homo sapien
gtgtcatacaggaggaagtgtcacg

SEQ ID NO: 2343859 - DNA, 25 bp, Homo sapien
tccgaggcgagtgagaataaggtgt

SEQ ID NO: 2343860 - DNA, 25 bp, Homo sapien
gtgtcacgtggtaacatgcatgaag

SEQ ID NO: 2343861 - DNA, 25 bp, Homo sapien
gagtcagtgaaaaaattgttgaggg

SEQ ID NO: 2343862 - DNA, 25 bp, Homo sapien
gatactggaagacctcctttcaaac

SEQ ID NO: 2343863 - DNA, 25 bp, Homo sapien
aaatattggcggtgtgctccttggc

SEQ ID NO: 2343864 - DNA, 25 bp, Homo sapien
cttggctttcattcgaagaactgcg

SEQ ID NO: 2343865 - DNA, 25 bp, Homo sapien
tcttgacctttagcaattccacaca

SEQ ID NO: 2343866 - DNA, 25 bp, Homo sapien
cacacagcagcttattgtggtatcc

SEQ ID NO: 2343867 - DNA, 25 bp, Homo sapien
gctggtctcactgaatatcttgacc

SEQ ID NO: 2343868 - DNA, 25 bp, Homo sapien
caactattcatttaagctggtctca

SEQ ID NO: 2343869 - DNA, 25 bp, Homo sapien
caagcatattcctaaagtctgcagg

SEQ ID NO: 2343870 - DNA, 25 bp, Homo sapien
tacctgacgactttggcatcttgac

SEQ ID NO: 2343871 - DNA, 25 bp, Homo sapien
gacatttataaagtccgctcccatg

SEQ ID NO: 2343872 - DNA, 25 bp, Homo sapien
taatctgagccatggaagtcatctt

SEQ ID NO: 2343873 - DNA, 25 bp, Homo sapien
caaactgcaaggcggaagacaggct

SEQ ID NO: 2343874 - DNA, 25 bp, Homo sapien
atcaaactgcaaggcggaagacagg

SEQ ID NO: 2343875 - DNA, 25 bp, Homo sapien
gcaaggcggaagacaggctggggga

SEQ ID NO: 2343876 - DNA, 25 bp, Homo sapien
gctgggggaggggcgcccgccattg

SEQ ID NO: 2343877 - DNA, 25 bp, Homo sapien
tgcaatgtcaaaatgagtgctcttg

SEQ ID NO: 2343878 - DNA, 25 bp, Homo sapien
tgacagaagaagagtgtggctaatc

SEQ ID NO: 2343879 - DNA, 25 bp, Homo sapien
tgttgattcaggaacccagggtcct

SEQ ID NO: 2343880 - DNA, 25 bp, Homo sapien
gctaatcacctatgagaagcttcca

SEQ ID NO: 2343881 - DNA, 25 bp, Homo sapien
tgcataggttagtatgaaagccaag

SEQ ID NO: 2343882 - DNA, 25 bp, Homo sapien
agatttgtttgctgtcatagagacc

SEQ ID NO: 2343883 - DNA, 25 bp, Homo sapien
tgacagcatgttttatgcactggct

SEQ ID NO: 2343884 - DNA, 25 bp, Homo sapien
gaacacatacagagagtactcagtc

SEQ ID NO: 2343885 - DNA, 25 bp, Homo sapien
cactggggaacatattgcttttcac

SEQ ID NO: 2343886 - DNA, 25 bp, Homo sapien
agctccactggggaacatattgctt

SEQ ID NO: 2343887 - DNA, 25 bp, Homo sapien
ctgctttctgcaccagactttaagc

SEQ ID NO: 2343888 - DNA, 25 bp, Homo sapien
tttctgcaccagactttaagctcca

SEQ ID NO: 2343889 - DNA, 25 bp, Homo sapien
gtgcgtaaataaggcacaaaggtca

SEQ ID NO: 2343890 - DNA, 25 bp, Homo sapien
ggtcattggaatattttcaatggtg

SEQ ID NO: 2343891 - DNA, 25 bp, Homo sapien
caaaggtcattggaatattttcaat

SEQ ID NO: 2343892 - DNA, 25 bp, Homo sapien
ctactctgtgcgtaaataaggcaca

SEQ ID NO: 2343893 - DNA, 25 bp, Homo sapien
caggcacttattaccagttgaggag

SEQ ID NO: 2343894 - DNA, 25 bp, Homo sapien
cacttagtccatggagtcagagaag

SEQ ID NO: 2343895 - DNA, 25 bp, Homo sapien
gatagtaagactcttggagtgtgac

SEQ ID NO: 2343896 - DNA, 25 bp, Homo sapien
caggatttcgcacagtaaatattca

SEQ ID NO: 2343897 - DNA, 25 bp, Homo sapien
ccttgatattatgccaggactcagc

SEQ ID NO: 2343898 - DNA, 25 bp, Homo sapien
tatagcatgatagcctgttaggagc

SEQ ID NO: 2343899 - DNA, 25 bp, Homo sapien
ccactatggctccaggtatcgttca

SEQ ID NO: 2343900 - DNA, 25 bp, Homo sapien
ctagaatgattcagagtgatgggcc

SEQ ID NO: 2343901 - DNA, 25 bp, Homo sapien
gcttaagttaagaagttatcactgg

SEQ ID NO: 2343902 - DNA, 25 bp, Homo sapien
tatttccaatgacctaagatatcag

SEQ ID NO: 2343903 - DNA, 25 bp, Homo sapien
aagtatcactggatgtgcttaagtt

SEQ ID NO: 2343904 - DNA, 25 bp, Homo sapien
tatatctctatgtgagacaaatcat

SEQ ID NO: 2343905 - DNA, 25 bp, Homo sapien
ccacagcatatggtttgactccgat

SEQ ID NO: 2343906 - DNA, 25 bp, Homo sapien
ctgtaacttcattaagtaggaataa

SEQ ID NO: 2343907 - DNA, 25 bp, Homo sapien
taattattcttgcagtatagttgag

SEQ ID NO: 2343908 - DNA, 25 bp, Homo sapien
atatggtttgactccgatcagtccc

SEQ ID NO: 2343909 - DNA, 25 bp, Homo sapien
aattgaaccaccctggagaaactgc

SEQ ID NO: 2343910 - DNA, 25 bp, Homo sapien
caatcatttcatggccgctacacag

SEQ ID NO: 2343911 - DNA, 25 bp, Homo sapien
gagaaactgcaagggccgtcaatca

SEQ ID NO: 2343912 - DNA, 25 bp, Homo sapien
aaattcagcactaccttcaacttga

SEQ ID NO: 2343913 - DNA, 25 bp, Homo sapien
gtttctgtggtatggcctctcccca

SEQ ID NO: 2343914 - DNA, 25 bp, Homo sapien
tcaccttgtccagtggtactccagc

SEQ ID NO: 2343915 - DNA, 25 bp, Homo sapien
aagctcccctcaccttgtccagtgg

SEQ ID NO: 2343916 - DNA, 25 bp, Homo sapien
agagtcacggctcaggcagattgag

SEQ ID NO: 2343917 - DNA, 25 bp, Homo sapien
tgatgaccacagtgcaagatagagc

SEQ ID NO: 2343918 - DNA, 25 bp, Homo sapien
ccttagtgaggtctgaactctgcag

SEQ ID NO: 2343919 - DNA, 25 bp, Homo sapien
cagttgcggtcaaacgttgtaagcc

SEQ ID NO: 2343920 - DNA, 25 bp, Homo sapien
ctctgcagccgggtgactggatctc

SEQ ID NO: 2343921 - DNA, 25 bp, Homo sapien
tgccttaccaaaagaggattgctaa

SEQ ID NO: 2343922 - DNA, 25 bp, Homo sapien
taagggtttttgatccacacagcaa

SEQ ID NO: 2343923 - DNA, 25 bp, Homo sapien
tagaaaagaaggtacctggtctggc

SEQ ID NO: 2343924 - DNA, 25 bp, Homo sapien
taaggttgaaagtgcatccggagca

SEQ ID NO: 2343925 - DNA, 25 bp, Homo sapien
cccagaacgatattgatattgagct

SEQ ID NO: 2343926 - DNA, 25 bp, Homo sapien
tgattcagttatttcacacttcata

SEQ ID NO: 2343927 - DNA, 25 bp, Homo sapien
gattgcagagtcatcaaaatagcat

SEQ ID NO: 2343928 - DNA, 25 bp, Homo sapien
aaattatgcataggtatatgaccaa

SEQ ID NO: 2343929 - DNA, 25 bp, Homo sapien
ttttggcaagaatagtctaactagg

SEQ ID NO: 2343930 - DNA, 25 bp, Homo sapien
tattttgtaccataataagaagcat

SEQ ID NO: 2343931 - DNA, 25 bp, Homo sapien
tctaactaggtggtgttgtatacct

SEQ ID NO: 2343932 - DNA, 25 bp, Homo sapien
taagaagcatataatgcctggaaac

SEQ ID NO: 2343933 - DNA, 25 bp, Homo sapien
gctttccaaataattgatcctggga

SEQ ID NO: 2343934 - DNA, 25 bp, Homo sapien
catacttagccttctttggataatc

SEQ ID NO: 2343935 - DNA, 25 bp, Homo sapien
caaaacagtgctacttgtgcattcc

SEQ ID NO: 2343936 - DNA, 25 bp, Homo sapien
ggagactcagttccaggttgagctg

SEQ ID NO: 2343937 - DNA, 25 bp, Homo sapien
aagccaggccacgtgttactaggtc

SEQ ID NO: 2343938 - DNA, 25 bp, Homo sapien
cagccctgaatttgaaaagtctgct

SEQ ID NO: 2343939 - DNA, 25 bp, Homo sapien
caggtaactttggtagagttaggca

SEQ ID NO: 2343940 - DNA, 25 bp, Homo sapien
ttcactaccagtgttactgcaggta

SEQ ID NO: 2343941 - DNA, 25 bp, Homo sapien
actaccagtgttactgcaggtaact

SEQ ID NO: 2343942 - DNA, 25 bp, Homo sapien
gcaggtaactttggtagagttaggc

SEQ ID NO: 2343943 - DNA, 25 bp, Homo sapien
tacttcaatatcaagtacagcagag

SEQ ID NO: 2343944 - DNA, 25 bp, Homo sapien
tatcaagtacagcagagggtagaat

SEQ ID NO: 2343945 - DNA, 25 bp, Homo sapien
gtctccacactctgtaaatcgtaaa

SEQ ID NO: 2343946 - DNA, 25 bp, Homo sapien
atctatagtaatggtctccacactc

SEQ ID NO: 2343947 - DNA, 25 bp, Homo sapien
ccactgacacataaagcctagtgct

SEQ ID NO: 2343948 - DNA, 25 bp, Homo sapien
gcttcatctttcataggtcttatca

SEQ ID NO: 2343949 - DNA, 25 bp, Homo sapien
agaatccacattacaatgacagctt

SEQ ID NO: 2343950 - DNA, 25 bp, Homo sapien
gacacataaagcctagtgctcagaa

SEQ ID NO: 2343951 - DNA, 25 bp, Homo sapien
ctgctgatccatactccaggaatgt

SEQ ID NO: 2343952 - DNA, 25 bp, Homo sapien
tcctgtctgctgatccatactccag

SEQ ID NO: 2343953 - DNA, 25 bp, Homo sapien
tgtctgctgatccatactccaggaa

SEQ ID NO: 2343954 - DNA, 25 bp, Homo sapien
catctcctgtctgctgatccatact

SEQ ID NO: 2343955 - DNA, 25 bp, Homo sapien
accatccagcagcattgaatttctt

SEQ ID NO: 2343956 - DNA, 25 bp, Homo sapien
ctgtctcatcatcgccacctggtat

SEQ ID NO: 2343957 - DNA, 25 bp, Homo sapien
tcatcatcgccacctggtatcactt

SEQ ID NO: 2343958 - DNA, 25 bp, Homo sapien
cagcagcattgaatttcttaaagtc

SEQ ID NO: 2343959 - DNA, 25 bp, Homo sapien
ctccacctcgaacaggtaccacaga

SEQ ID NO: 2343960 - DNA, 25 bp, Homo sapien
ggctgagaccattctgcagggctct

SEQ ID NO: 2343961 - DNA, 25 bp, Homo sapien
tcgaacaggtaccacagaacttgct

SEQ ID NO: 2343962 - DNA, 25 bp, Homo sapien
tcctcaacaagctcctccacctcga

SEQ ID NO: 2343963 - DNA, 25 bp, Homo sapien
tccttcacctgagggtgaggcatct

SEQ ID NO: 2343964 - DNA, 25 bp, Homo sapien
ctgagggtgaggcatcttgacaaac

SEQ ID NO: 2343965 - DNA, 25 bp, Homo sapien
ctatttatccagatgatcctgattt

SEQ ID NO: 2343966 - DNA, 25 bp, Homo sapien
tatccagatgatcctgatttttctt

SEQ ID NO: 2343967 - DNA, 25 bp, Homo sapien
ttcaagttaaaactctttggctctg

SEQ ID NO: 2343968 - DNA, 25 bp, Homo sapien
tcaagttaaaactctttggctctgg

SEQ ID NO: 2343969 - DNA, 25 bp, Homo sapien
ctgttctacttgaggtcacatggca

SEQ ID NO: 2343970 - DNA, 25 bp, Homo sapien
ttatcagagtagaaagaccatcatc

SEQ ID NO: 2343971 - DNA, 25 bp, Homo sapien
tatcccaacttgtaggcacttgccc

SEQ ID NO: 2343972 - DNA, 25 bp, Homo sapien
taaatccagcatagcttggcttcgg

SEQ ID NO: 2343973 - DNA, 25 bp, Homo sapien
caaaggagtgaggacttcaatatat

SEQ ID NO: 2343974 - DNA, 25 bp, Homo sapien
tgataacctctataaagactctaag

SEQ ID NO: 2343975 - DNA, 25 bp, Homo sapien
aagactctaagtaccattgtgaggt

SEQ ID NO: 2343976 - DNA, 25 bp, Homo sapien
tgtattaggggacaccttaatgacc

SEQ ID NO: 2343977 - DNA, 25 bp, Homo sapien
cctgattcaggatgtggactaggag

SEQ ID NO: 2343978 - DNA, 25 bp, Homo sapien
ccaggtcacggtgacagcaaccaag

SEQ ID NO: 2343979 - DNA, 25 bp, Homo sapien
agggtccaggtcacggtgacagcaa

SEQ ID NO: 2343980 - DNA, 25 bp, Homo sapien
cactgtgggtgacgtccaagatcct

SEQ ID NO: 2343981 - DNA, 25 bp, Homo sapien
aggcatgtctttgccctcaggaaaa

SEQ ID NO: 2343982 - DNA, 25 bp, Homo sapien
ttaaagtgatgaataaggcatgtct

SEQ ID NO: 2343983 - DNA, 25 bp, Homo sapien
gatgaataaggcatgtctttgccct

SEQ ID NO: 2343984 - DNA, 25 bp, Homo sapien
taaggcatgtctttgccctcaggaa

SEQ ID NO: 2343985 - DNA, 25 bp, Homo sapien
ctatttgttaaatgtaatgacagag

SEQ ID NO: 2343986 - DNA, 25 bp, Homo sapien
tatttgttaaatgtaatgacagagt

SEQ ID NO: 2343987 - DNA, 25 bp, Homo sapien
atttgttaaatgtaatgacagagta

SEQ ID NO: 2343988 - DNA, 25 bp, Homo sapien
gggggactgatcgtggcggttggac

SEQ ID NO: 2343989 - DNA, 25 bp, Homo sapien
ggtgggggactgatcgtggcggttg

SEQ ID NO: 2343990 - DNA, 25 bp, Homo sapien
actgatcgtggcggttggactgcat

SEQ ID NO: 2343991 - DNA, 25 bp, Homo sapien
gggactgatcgtggcggttggactg

SEQ ID NO: 2343992 - DNA, 25 bp, Homo sapien
tactccactctggatttgtgtgtca

SEQ ID NO: 2343993 - DNA, 25 bp, Homo sapien
aattatactccactctggatttgtg

SEQ ID NO: 2343994 - DNA, 25 bp, Homo sapien
tcaattatactccactctggatttg

SEQ ID NO: 2343995 - DNA, 25 bp, Homo sapien
tatactccactctggatttgtgtgt

SEQ ID NO: 2343996 - DNA, 25 bp, Homo sapien
ctgctcccctcaccagctgagaatc

SEQ ID NO: 2343997 - DNA, 25 bp, Homo sapien
atctgctcccctcaccagctgagaa

SEQ ID NO: 2343998 - DNA, 25 bp, Homo sapien
tcaaggtcttattgatctgctcccc

SEQ ID NO: 2343999 - DNA, 25 bp, Homo sapien
aaggtcttattgatctgctcccctc

SEQ ID NO: 2344000 - DNA, 25 bp, Homo sapien
ctagagtgtgaagagctgcatatcg

SEQ ID NO: 2344001 - DNA, 25 bp, Homo sapien
gagtgtgaagagctgcatatcggtt

SEQ ID NO: 2344002 - DNA, 25 bp, Homo sapien
tgtgaagagctgcatatcggttgtt

SEQ ID NO: 2344003 - DNA, 25 bp, Homo sapien
aagagctgcatatcggttgttgaac

SEQ ID NO: 2344004 - DNA, 25 bp, Homo sapien
ttcttagagagcattctaactaaga

SEQ ID NO: 2344005 - DNA, 25 bp, Homo sapien
taactaagatactaatgtcctcttc

SEQ ID NO: 2344006 - DNA, 25 bp, Homo sapien
aataattcacgcatatcattcttct

SEQ ID NO: 2344007 - DNA, 25 bp, Homo sapien
tctctcccttaaataattcacgcat

SEQ ID NO: 2344008 - DNA, 25 bp, Homo sapien
gtagagtccttctggaaagtagtag

SEQ ID NO: 2344009 - DNA, 25 bp, Homo sapien
aacattcaactactaggtagagtcc

SEQ ID NO: 2344010 - DNA, 25 bp, Homo sapien
tcctgtatcccgctcagaagctgca

SEQ ID NO: 2344011 - DNA, 25 bp, Homo sapien
tactaggtagagtccttctggaaag

SEQ ID NO: 2344012 - DNA, 25 bp, Homo sapien
ctggtaacatgcattgccactactt

SEQ ID NO: 2344013 - DNA, 25 bp, Homo sapien
aacatgcattgccactacttctacc

SEQ ID NO: 2344014 - DNA, 25 bp, Homo sapien
ccactacttctacctctgatctttg

SEQ ID NO: 2344015 - DNA, 25 bp, Homo sapien
gcattgccactacttctacctctga

SEQ ID NO: 2344016 - DNA, 25 bp, Homo sapien
gataactatacctgccgtaatgaag

SEQ ID NO: 2344017 - DNA, 25 bp, Homo sapien
tgttgagtctccttcccaaaaaagc

SEQ ID NO: 2344018 - DNA, 25 bp, Homo sapien
gagcttatcttagggcttctcagcc

SEQ ID NO: 2344019 - DNA, 25 bp, Homo sapien
gcaggaacatgcaacacaggaaaca

SEQ ID NO: 2344020 - DNA, 25 bp, Homo sapien
aatatgtaatctcaaaaatgtacac

SEQ ID NO: 2344021 - DNA, 25 bp, Homo sapien
cacacacagagtatttagaaggggt

SEQ ID NO: 2344022 - DNA, 25 bp, Homo sapien
gtacacacacagagtatttagaagg

SEQ ID NO: 2344023 - DNA, 25 bp, Homo sapien
cacacagagtatttagaaggggtgg

SEQ ID NO: 2344024 - DNA, 25 bp, Homo sapien
tacaatgtgatcctctctgttggaa

SEQ ID NO: 2344025 - DNA, 25 bp, Homo sapien
caagttgtttaaaggagactggcac

SEQ ID NO: 2344026 - DNA, 25 bp, Homo sapien
gcaaatccctcacgaacagtttggt

SEQ ID NO: 2344027 - DNA, 25 bp, Homo sapien
cgtttgtgtcatgggagcaaatccc

SEQ ID NO: 2344028 - DNA, 25 bp, Homo sapien
cagctttggacggtgacttttaagt

SEQ ID NO: 2344029 - DNA, 25 bp, Homo sapien
gttcattaacaaatttccctctgga

SEQ ID NO: 2344030 - DNA, 25 bp, Homo sapien
tattctactaggttgatgcaaacgt

SEQ ID NO: 2344031 - DNA, 25 bp, Homo sapien
cagctatgattttctggtgcaaatg

SEQ ID NO: 2344032 - DNA, 25 bp, Homo sapien
cagagggcagtagatcctcagggga

SEQ ID NO: 2344033 - DNA, 25 bp, Homo sapien
caggtggggtgtggtacacaggagg

SEQ ID NO: 2344034 - DNA, 25 bp, Homo sapien
ctattgtgtaatctcggggaaggga

SEQ ID NO: 2344035 - DNA, 25 bp, Homo sapien
aatctcggggaagggagtgtgccag

SEQ ID NO: 2344036 - DNA, 25 bp, Homo sapien
acaatcaaccatatgatcttggtga

SEQ ID NO: 2344037 - DNA, 25 bp, Homo sapien
aatcaaccatatgatcttggtgatg

SEQ ID NO: 2344038 - DNA, 25 bp, Homo sapien
caatcaaccatatgatcttggtgat

SEQ ID NO: 2344039 - DNA, 25 bp, Homo sapien
cacaatcaaccatatgatcttggtg

SEQ ID NO: 2344040 - DNA, 25 bp, Homo sapien
gaagtaagtttgctgtgcatatgat

SEQ ID NO: 2344041 - DNA, 25 bp, Homo sapien
ggtgattgtgaagtaagtttgctgt

SEQ ID NO: 2344042 - DNA, 25 bp, Homo sapien
gtgaagtaagtttgctgtgcatatg

SEQ ID NO: 2344043 - DNA, 25 bp, Homo sapien
tagggtgattgtgaagtaagtttgc

SEQ ID NO: 2344044 - DNA, 25 bp, Homo sapien
caccgtgcccgaccaatgaattctt

SEQ ID NO: 2344045 - DNA, 25 bp, Homo sapien
tccctttttgaattgagtggctaaa

SEQ ID NO: 2344046 - DNA, 25 bp, Homo sapien
tatagatggtaaatgatgcttgtac

SEQ ID NO: 2344047 - DNA, 25 bp, Homo sapien
cagtaattgaccttatacattttgg

SEQ ID NO: 2344048 - DNA, 25 bp, Homo sapien
tgcctcttacatatcagctttctaa

SEQ ID NO: 2344049 - DNA, 25 bp, Homo sapien
tccttgacaaggaatctctttgcct

SEQ ID NO: 2344050 - DNA, 25 bp, Homo sapien
ctcttgcaggtgtatatgaatacca

SEQ ID NO: 2344051 - DNA, 25 bp, Homo sapien
tatgaataccagtccttgacaagga

SEQ ID NO: 2344052 - DNA, 25 bp, Homo sapien
ttctgcatgctattctctgcctctc

SEQ ID NO: 2344053 - DNA, 25 bp, Homo sapien
tttttctgcatgctattctctgcct

SEQ ID NO: 2344054 - DNA, 25 bp, Homo sapien
agaatttttctgcatgctattctct

SEQ ID NO: 2344055 - DNA, 25 bp, Homo sapien
gaatttttctgcatgctattctctg

SEQ ID NO: 2344056 - DNA, 25 bp, Homo sapien
aagccaggaacatccgaggagaaga

SEQ ID NO: 2344057 - DNA, 25 bp, Homo sapien
aaacgccttcttcgaggctgaagct

SEQ ID NO: 2344058 - DNA, 25 bp, Homo sapien
agccacaacaatcccgcagttcaaa

SEQ ID NO: 2344059 - DNA, 25 bp, Homo sapien
tttctcagccggctactaatgagct

SEQ ID NO: 2344060 - DNA, 25 bp, Homo sapien
ggtcaacataaacgccttgggagtc

SEQ ID NO: 2344061 - DNA, 25 bp, Homo sapien
ctctaaaggcccagtgaatgtcaaa

SEQ ID NO: 2344062 - DNA, 25 bp, Homo sapien
gctggttcctagaccaaactgtgat

SEQ ID NO: 2344063 - DNA, 25 bp, Homo sapien
ggtccttcgacttttgcaagatgaa

SEQ ID NO: 2344064 - DNA, 25 bp, Homo sapien
aagggggctctctctagcacttcct

SEQ ID NO: 2344065 - DNA, 25 bp, Homo sapien
caagtccgtaaaagtcagaagcaca

SEQ ID NO: 2344066 - DNA, 25 bp, Homo sapien
taacaagccaagtccgtaaaagtca

SEQ ID NO: 2344067 - DNA, 25 bp, Homo sapien
cactgaagggggctctctctagcac

SEQ ID NO: 2344068 - DNA, 25 bp, Homo sapien
gctgaaagccaggagtagcatgcat

SEQ ID NO: 2344069 - DNA, 25 bp, Homo sapien
ctgaaagccaggagtagcatgcata

SEQ ID NO: 2344070 - DNA, 25 bp, Homo sapien
tgaaagccaggagtagcatgcatac

SEQ ID NO: 2344071 - DNA, 25 bp, Homo sapien
tgtatgcatattggtcaagaaatct

SEQ ID NO: 2344072 - DNA, 25 bp, Homo sapien
gatgtatgcatattggtcaagaaat

SEQ ID NO: 2344073 - DNA, 25 bp, Homo sapien
ctttgatgtatgcatattggtcaag

SEQ ID NO: 2344074 - DNA, 25 bp, Homo sapien
ttgatgtatgcatattggtcaagaa

SEQ ID NO: 2344075 - DNA, 25 bp, Homo sapien
taaagccatctaaagcagtaggaag

SEQ ID NO: 2344076 - DNA, 25 bp, Homo sapien
ctaaagccatctaaagcagtaggaa

SEQ ID NO: 2344077 - DNA, 25 bp, Homo sapien
aaagccctgctgtgacagattttgt

SEQ ID NO: 2344078 - DNA, 25 bp, Homo sapien
gtggagctggtatattgtcaacatt

SEQ ID NO: 2344079 - DNA, 25 bp, Homo sapien
ggagctggtatattgtcaacattgc

SEQ ID NO: 2344080 - DNA, 25 bp, Homo sapien
gagctggtatattgtcaacattgct

SEQ ID NO: 2344081 - DNA, 25 bp, Homo sapien
gagtatgtagggtcttctgggttta

SEQ ID NO: 2344082 - DNA, 25 bp, Homo sapien
cagctgccgtttcagaatataagga

SEQ ID NO: 2344083 - DNA, 25 bp, Homo sapien
ggtttattctcatacagctgccgtt

SEQ ID NO: 2344084 - DNA, 25 bp, Homo sapien
tgtcatttccagtatcaagaatatc

SEQ ID NO: 2344085 - DNA, 25 bp, Homo sapien
gtgtgtttgtcacattttcacacaa

SEQ ID NO: 2344086 - DNA, 25 bp, Homo sapien
gatgatgaatcacaatcacatgtaa

SEQ ID NO: 2344087 - DNA, 25 bp, Homo sapien
tattagtgcagaaaaatcacattca

SEQ ID NO: 2344088 - DNA, 25 bp, Homo sapien
accacaattgtagaagagacagata

SEQ ID NO: 2344089 - DNA, 25 bp, Homo sapien
cattaatcaatctttcagctgttcc

SEQ ID NO: 2344090 - DNA, 25 bp, Homo sapien
tgcaggctaggctttgctgtagtac

SEQ ID NO: 2344091 - DNA, 25 bp, Homo sapien
tgtagtactttgagctcataagctg

SEQ ID NO: 2344092 - DNA, 25 bp, Homo sapien
tgttttgggtgaatgatatgcaggc

SEQ ID NO: 2344093 - DNA, 25 bp, Homo sapien
gcttgatatcctgtttggggggcat

SEQ ID NO: 2344094 - DNA, 25 bp, Homo sapien
ctgcttgatatcctgtttggggggc

SEQ ID NO: 2344095 - DNA, 25 bp, Homo sapien
gactgcttgatatcctgtttggggg

SEQ ID NO: 2344096 - DNA, 25 bp, Homo sapien
cagactgcttgatatcctgtttggg

SEQ ID NO: 2344097 - DNA, 25 bp, Homo sapien
tctggcagtgttgtaactttgcctg

SEQ ID NO: 2344098 - DNA, 25 bp, Homo sapien
cagacttactgcctcataaaattca

SEQ ID NO: 2344099 - DNA, 25 bp, Homo sapien
tcagaacttgtactgggcaagtata

SEQ ID NO: 2344100 - DNA, 25 bp, Homo sapien
tccccagggcatccattaagtagca

SEQ ID NO: 2344101 - DNA, 25 bp, Homo sapien
ctgtatataaggccaaaatgagatt

SEQ ID NO: 2344102 - DNA, 25 bp, Homo sapien
cctgagcttataagcaaactctgtg

SEQ ID NO: 2344103 - DNA, 25 bp, Homo sapien
tggcaaacccaagcataatctttag

SEQ ID NO: 2344104 - DNA, 25 bp, Homo sapien
tctgtgccattaaacaaccttgagc

SEQ ID NO: 2344105 - DNA, 25 bp, Homo sapien
tacaacaagacttcatcagccctgg

SEQ ID NO: 2344106 - DNA, 25 bp, Homo sapien
gactggcatgagacatgaatggctg

SEQ ID NO: 2344107 - DNA, 25 bp, Homo sapien
tagtaatcttgtctcagaggcatag

SEQ ID NO: 2344108 - DNA, 25 bp, Homo sapien
tagcatggcccaatgttctatttcc

SEQ ID NO: 2344109 - DNA, 25 bp, Homo sapien
tacagtatgcaccttaaataatgcc

SEQ ID NO: 2344110 - DNA, 25 bp, Homo sapien
ggctggctgacgttcacactaacac

SEQ ID NO: 2344111 - DNA, 25 bp, Homo sapien
tcacactaacacgcgatgttgccat

SEQ ID NO: 2344112 - DNA, 25 bp, Homo sapien
agggctggctgacgttcacactaac

SEQ ID NO: 2344113 - DNA, 25 bp, Homo sapien
gttcacactaacacgcgatgttgcc

SEQ ID NO: 2344114 - DNA, 25 bp, Homo sapien
agtgcattcacagctggtcctccag

SEQ ID NO: 2344115 - DNA, 25 bp, Homo sapien
tcttcaaagcccagctgattggcat

SEQ ID NO: 2344116 - DNA, 25 bp, Homo sapien
ggtcctccagttcctcttcaaagcc

SEQ ID NO: 2344117 - DNA, 25 bp, Homo sapien
cctccagttcctcttcaaagcccag

SEQ ID NO: 2344118 - DNA, 25 bp, Homo sapien
tcatcagaaagtaccgaatactgcc

SEQ ID NO: 2344119 - DNA, 25 bp, Homo sapien
ctgaagattttgctatgtcagcaac

SEQ ID NO: 2344120 - DNA, 25 bp, Homo sapien
tgtacccaatgtaattataatgatg

SEQ ID NO: 2344121 - DNA, 25 bp, Homo sapien
tgagacttttgtacccaatgtaatt

SEQ ID NO: 2344122 - DNA, 25 bp, Homo sapien
aaatttcggtgttagcaagaacatg

SEQ ID NO: 2344123 - DNA, 25 bp, Homo sapien
aaaatttcggtgttagcaagaacat

SEQ ID NO: 2344124 - DNA, 25 bp, Homo sapien
tgtaacaggaacaatctcttgaatg

SEQ ID NO: 2344125 - DNA, 25 bp, Homo sapien
cacctttttggtgaagtgaagttca

SEQ ID NO: 2344126 - DNA, 25 bp, Homo sapien
tgtgtaacagactagcctgtgcacc

SEQ ID NO: 2344127 - DNA, 25 bp, Homo sapien
tctggcagacattcaatagcaaact

SEQ ID NO: 2344128 - DNA, 25 bp, Homo sapien
tgaagaattgtcagtttaacccatt

SEQ ID NO: 2344129 - DNA, 25 bp, Homo sapien
tttttctgtaagattcccatcaaga

SEQ ID NO: 2344130 - DNA, 25 bp, Homo sapien
tatccctgaccataggtttctcttg

SEQ ID NO: 2344131 - DNA, 25 bp, Homo sapien
gaattatatatatccctgaccatag

SEQ ID NO: 2344132 - DNA, 25 bp, Homo sapien
tgcatcttgggagcaaaattcacta

SEQ ID NO: 2344133 - DNA, 25 bp, Homo sapien
tatagtgtgccaggatgcatcttgg

SEQ ID NO: 2344134 - DNA, 25 bp, Homo sapien
catctatagtgtgccaggatgcatc

SEQ ID NO: 2344135 - DNA, 25 bp, Homo sapien
caggaactgttcaagtgtctttttt

SEQ ID NO: 2344136 - DNA, 25 bp, Homo sapien
tagatgaacactagctcttgaatat

SEQ ID NO: 2344137 - DNA, 25 bp, Homo sapien
tgaatattccagagtggattcatgg

SEQ ID NO: 2344138 - DNA, 25 bp, Homo sapien
gaacactagctcttgaatattccag

SEQ ID NO: 2344139 - DNA, 25 bp, Homo sapien
ctagctcttgaatattccagagtgg

SEQ ID NO: 2344140 - DNA, 25 bp, Homo sapien
tcctggacaggtgttgaatattcct

SEQ ID NO: 2344141 - DNA, 25 bp, Homo sapien
tctctcaattattcttggaagacat

SEQ ID NO: 2344142 - DNA, 25 bp, Homo sapien
tagattctagagattcatattgctc

SEQ ID NO: 2344143 - DNA, 25 bp, Homo sapien
gcaacttgccaaccttagattctag

SEQ ID NO: 2344144 - DNA, 25 bp, Homo sapien
aaactgtatccctaagccaagcgag

SEQ ID NO: 2344145 - DNA, 25 bp, Homo sapien
taatcagtgtcacaggaaagcatgt

SEQ ID NO: 2344146 - DNA, 25 bp, Homo sapien
tctaagggacagattctaatcagtg

SEQ ID NO: 2344147 - DNA, 25 bp, Homo sapien
gccaagcgagtcacaatgaattaat

SEQ ID NO: 2344148 - DNA, 25 bp, Homo sapien
cccatctgtcaagtgacacagcggg

SEQ ID NO: 2344149 - DNA, 25 bp, Homo sapien
ggagttccagcaacaagtcgttgta

SEQ ID NO: 2344150 - DNA, 25 bp, Homo sapien
ggcagctcaggaaggcactctcagg

SEQ ID NO: 2344151 - DNA, 25 bp, Homo sapien
tcgttgtaccaacaggattgctgaa

SEQ ID NO: 2344152 - DNA, 25 bp, Homo sapien
aattccaaataccaagcaggctaaa

SEQ ID NO: 2344153 - DNA, 25 bp, Homo sapien
tgtgagttctaagcttaccgaagaa

SEQ ID NO: 2344154 - DNA, 25 bp, Homo sapien
tagaaatttatgctatacatggcaa

SEQ ID NO: 2344155 - DNA, 25 bp, Homo sapien
tacgagtgagtaccaaataatgcat

SEQ ID NO: 2344156 - DNA, 25 bp, Homo sapien
acactgctgcttctatccctgagga

SEQ ID NO: 2344157 - DNA, 25 bp, Homo sapien
tgcctctgccataagccttcatact

SEQ ID NO: 2344158 - DNA, 25 bp, Homo sapien
acacactgctgcttctatccctgag

SEQ ID NO: 2344159 - DNA, 25 bp, Homo sapien
tgccataagccttcatactccagct

SEQ ID NO: 2344160 - DNA, 25 bp, Homo sapien
cctggatccttcctttttgtctctg

SEQ ID NO: 2344161 - DNA, 25 bp, Homo sapien
ccttcctttttgtctctgcctccac

SEQ ID NO: 2344162 - DNA, 25 bp, Homo sapien
ctggatccttcctttttgtctctgc

SEQ ID NO: 2344163 - DNA, 25 bp, Homo sapien
tcctttttgtctctgcctccactca

SEQ ID NO: 2344164 - DNA, 25 bp, Homo sapien
aactgtcccttaacattgtcatctc

SEQ ID NO: 2344165 - DNA, 25 bp, Homo sapien
taaactgtcccttaacattgtcatc

SEQ ID NO: 2344166 - DNA, 25 bp, Homo sapien
cctaaactgtcccttaacattgtca

SEQ ID NO: 2344167 - DNA, 25 bp, Homo sapien
aaactgtcccttaacattgtcatct

SEQ ID NO: 2344168 - DNA, 25 bp, Homo sapien
tatggtcttcaactgtgaatacctc

SEQ ID NO: 2344169 - DNA, 25 bp, Homo sapien
gatatgccgatatgaaactgaaaat

SEQ ID NO: 2344170 - DNA, 25 bp, Homo sapien
tgaatatgggatatgccgatatgaa

SEQ ID NO: 2344171 - DNA, 25 bp, Homo sapien
gaatacctcatacctttcacataat

SEQ ID NO: 2344172 - DNA, 25 bp, Homo sapien
tacagattcccaggtactcaatttc

SEQ ID NO: 2344173 - DNA, 25 bp, Homo sapien
acagattcccaggtactcaatttca

SEQ ID NO: 2344174 - DNA, 25 bp, Homo sapien
aatacagattcccaggtactcaatt

SEQ ID NO: 2344175 - DNA, 25 bp, Homo sapien
atacagattcccaggtactcaattt

SEQ ID NO: 2344176 - DNA, 25 bp, Homo sapien
tatcaaaggctgcaccttcggagtc

SEQ ID NO: 2344177 - DNA, 25 bp, Homo sapien
tcacctatcaaaggctgcaccttcg

SEQ ID NO: 2344178 - DNA, 25 bp, Homo sapien
ccttcggagtccttgtaataaagat

SEQ ID NO: 2344179 - DNA, 25 bp, Homo sapien
caccttcggagtccttgtaataaag

SEQ ID NO: 2344180 - DNA, 25 bp, Homo sapien
ggacttatgcttgcatacactgttt

SEQ ID NO: 2344181 - DNA, 25 bp, Homo sapien
cactgtttaccagacacagattggt

SEQ ID NO: 2344182 - DNA, 25 bp, Homo sapien
tgcatttagaatgatactcaaacca

SEQ ID NO: 2344183 - DNA, 25 bp, Homo sapien
gtcagtgcaaaccaggacttatgct

SEQ ID NO: 2344184 - DNA, 25 bp, Homo sapien
catgcctggagggtagtcagcaaat

SEQ ID NO: 2344185 - DNA, 25 bp, Homo sapien
aaaacatgcctggagggtagtcagc

SEQ ID NO: 2344186 - DNA, 25 bp, Homo sapien
gtcagcaaatgaccgcccagcatca

SEQ ID NO: 2344187 - DNA, 25 bp, Homo sapien
tagtcagcaaatgaccgcccagcat

SEQ ID NO: 2344188 - DNA, 25 bp, Homo sapien
cctcgagctgctgtggcagtcacca

SEQ ID NO: 2344189 - DNA, 25 bp, Homo sapien
gtttctgacacagccctcgagctgc

SEQ ID NO: 2344190 - DNA, 25 bp, Homo sapien
tgacacagccctcgagctgctgtgg

SEQ ID NO: 2344191 - DNA, 25 bp, Homo sapien
atcctgagagtttctgacacagccc

SEQ ID NO: 2344192 - DNA, 25 bp, Homo sapien
gagttgtagaaccttggtggatttc

SEQ ID NO: 2344193 - DNA, 25 bp, Homo sapien
ggatttctacccataggatgagttg

SEQ ID NO: 2344194 - DNA, 25 bp, Homo sapien
gtttttggcaagagaactcgagggc

SEQ ID NO: 2344195 - DNA, 25 bp, Homo sapien
ctcgagggctggacggagtgtctga

SEQ ID NO: 2344196 - DNA, 25 bp, Homo sapien
ttcttgcataagagcgtgcaagtga

SEQ ID NO: 2344197 - DNA, 25 bp, Homo sapien
gagcgtgcaagtgataactttggca

SEQ ID NO: 2344198 - DNA, 25 bp, Homo sapien
caagtgataactttggcatgagaaa

SEQ ID NO: 2344199 - DNA, 25 bp, Homo sapien
ttaactctcagagcattcttgcata

SEQ ID NO: 2344200 - DNA, 25 bp, Homo sapien
cacccagttgatgtttgtgacatca

SEQ ID NO: 2344201 - DNA, 25 bp, Homo sapien
cagtttagggttaagatatgattcc

SEQ ID NO: 2344202 - DNA, 25 bp, Homo sapien
atatgattccaggtaacagaagcca

SEQ ID NO: 2344203 - DNA, 25 bp, Homo sapien
agaagccaatgagagtacacccagt

SEQ ID NO: 2344204 - DNA, 25 bp, Homo sapien
acagctttcaaagggcttgccctgg

SEQ ID NO: 2344205 - DNA, 25 bp, Homo sapien
tgtactgttcgcatgctgagctgca

SEQ ID NO: 2344206 - DNA, 25 bp, Homo sapien
aggtgcttgtactgttcgcatgctg

SEQ ID NO: 2344207 - DNA, 25 bp, Homo sapien
aaagggcttgccctgggatatggct

SEQ ID NO: 2344208 - DNA, 25 bp, Homo sapien
tctattctgtcatacacaaaattga

SEQ ID NO: 2344209 - DNA, 25 bp, Homo sapien
aacagcatggtcctaacataaaaaa

SEQ ID NO: 2344210 - DNA, 25 bp, Homo sapien
gaagaatgaaactaccccactctat

SEQ ID NO: 2344211 - DNA, 25 bp, Homo sapien
gaaagaaatccatgaatctacagtg

SEQ ID NO: 2344212 - DNA, 25 bp, Homo sapien
caagaccatgtcatgaactgcagcc

SEQ ID NO: 2344213 - DNA, 25 bp, Homo sapien
agaccatgtcatgaactgcagcctg

SEQ ID NO: 2344214 - DNA, 25 bp, Homo sapien
ccaagaccatgtcatgaactgcagc

SEQ ID NO: 2344215 - DNA, 25 bp, Homo sapien
gaccatgtcatgaactgcagcctgg

SEQ ID NO: 2344216 - DNA, 25 bp, Homo sapien
ctatgttaggtccacatgtagtagc

SEQ ID NO: 2344217 - DNA, 25 bp, Homo sapien
ctgatacctatgttaggtccacatg

SEQ ID NO: 2344218 - DNA, 25 bp, Homo sapien
tacctatgttaggtccacatgtagt

SEQ ID NO: 2344219 - DNA, 25 bp, Homo sapien
gtagtagcatattcatgctttgtaa

SEQ ID NO: 2344220 - DNA, 25 bp, Homo sapien
aatcattggtcgactggcagtctca

SEQ ID NO: 2344221 - DNA, 25 bp, Homo sapien
tcaactgttgaaatcattggtcgac

SEQ ID NO: 2344222 - DNA, 25 bp, Homo sapien
gtcgactggcagtctcagattctgt

SEQ ID NO: 2344223 - DNA, 25 bp, Homo sapien
ctaacagaagtatgtcaactgttga

SEQ ID NO: 2344224 - DNA, 25 bp, Homo sapien
ggataagagaagcaagccctaaact

SEQ ID NO: 2344225 - DNA, 25 bp, Homo sapien
agaagcaagccctaaactttgagtt

SEQ ID NO: 2344226 - DNA, 25 bp, Homo sapien
tatccaagatacaagggcaataatc

SEQ ID NO: 2344227 - DNA, 25 bp, Homo sapien
tcatttttccttgggacgtttgcta

SEQ ID NO: 2344228 - DNA, 25 bp, Homo sapien
tgggacgtttgctataccaggcagc

SEQ ID NO: 2344229 - DNA, 25 bp, Homo sapien
cagcaatggtatagagcttgagaaa

SEQ ID NO: 2344230 - DNA, 25 bp, Homo sapien
cattactatctctaaaactggagtc

SEQ ID NO: 2344231 - DNA, 25 bp, Homo sapien
tcaccctttcttgcattactatctc

SEQ ID NO: 2344232 - DNA, 25 bp, Homo sapien
caaatgtgattaacctggcattggt

SEQ ID NO: 2344233 - DNA, 25 bp, Homo sapien
ctctaaaactggagtcaaatgtgat

SEQ ID NO: 2344234 - DNA, 25 bp, Homo sapien
ctctaggaagcgagtgtagtgatga

SEQ ID NO: 2344235 - DNA, 25 bp, Homo sapien
tcaaaatgccttctcattagacttc

SEQ ID NO: 2344236 - DNA, 25 bp, Homo sapien
tcattagacttcttctctaggaagc

SEQ ID NO: 2344237 - DNA, 25 bp, Homo sapien
gacttcttctctaggaagcgagtgt

SEQ ID NO: 2344238 - DNA, 25 bp, Homo sapien
catttcggatttcttggtgattgct

SEQ ID NO: 2344239 - DNA, 25 bp, Homo sapien
tcatttcggatttcttggtgattgc

SEQ ID NO: 2344240 - DNA, 25 bp, Homo sapien
atcctcctaagactgctttatgcag

SEQ ID NO: 2344241 - DNA, 25 bp, Homo sapien
tcttatgacaggtccaagatctttt

SEQ ID NO: 2344242 - DNA, 25 bp, Homo sapien
tcatcctcctaagactgctttatgc

SEQ ID NO: 2344243 - DNA, 25 bp, Homo sapien
tggtgtctcttttcttatgacaggt

SEQ ID NO: 2344244 - DNA, 25 bp, Homo sapien
agatcctctggactgtagtgcctgg

SEQ ID NO: 2344245 - DNA, 25 bp, Homo sapien
gaaagatccaatccctccatgtaaa

SEQ ID NO: 2344246 - DNA, 25 bp, Homo sapien
caggtatgtttaaactcatcaggca

SEQ ID NO: 2344247 - DNA, 25 bp, Homo sapien
actcatcaggcattactgaaagatc

SEQ ID NO: 2344248 - DNA, 25 bp, Homo sapien
ctatatttctgatgtcaccacatgt

SEQ ID NO: 2344249 - DNA, 25 bp, Homo sapien
tatatttctgatgtcaccacatgtc

SEQ ID NO: 2344250 - DNA, 25 bp, Homo sapien
atttctgatgtcaccacatgtcctt

SEQ ID NO: 2344251 - DNA, 25 bp, Homo sapien
tatttctgatgtcaccacatgtcct

SEQ ID NO: 2344252 - DNA, 25 bp, Homo sapien
tccccgttgatttcttcacatcaga

SEQ ID NO: 2344253 - DNA, 25 bp, Homo sapien
tgatttcttcacatcagagttagaa

SEQ ID NO: 2344254 - DNA, 25 bp, Homo sapien
cccgttgatttcttcacatcagagt

SEQ ID NO: 2344255 - DNA, 25 bp, Homo sapien
gttgatttcttcacatcagagttag

SEQ ID NO: 2344256 - DNA, 25 bp, Homo sapien
gacaatgcaaaaaccggagaatcac

SEQ ID NO: 2344257 - DNA, 25 bp, Homo sapien
acaatgcaaaaaccggagaatcaca

SEQ ID NO: 2344258 - DNA, 25 bp, Homo sapien
cactaacttggcagtttagatgcat

SEQ ID NO: 2344259 - DNA, 25 bp, Homo sapien
aatcacatcactaacttggcagttt

SEQ ID NO: 2344260 - DNA, 25 bp, Homo sapien
cagcaaccaaagaatctgactggtt

SEQ ID NO: 2344261 - DNA, 25 bp, Homo sapien
ccaaagaatctgactggttcttcac

SEQ ID NO: 2344262 - DNA, 25 bp, Homo sapien
gcaaccaaagaatctgactggttct

SEQ ID NO: 2344263 - DNA, 25 bp, Homo sapien
gaatctgactggttcttcaccttca

SEQ ID NO: 2344264 - DNA, 25 bp, Homo sapien
ggctatgactccagaaaaatttgga

SEQ ID NO: 2344265 - DNA, 25 bp, Homo sapien
tcagtcagtggctatgactccagaa

SEQ ID NO: 2344266 - DNA, 25 bp, Homo sapien
ctctaaaggtgatgtataatcctcc

SEQ ID NO: 2344267 - DNA, 25 bp, Homo sapien
aatttggaatataagctctaaaggt

SEQ ID NO: 2344268 - DNA, 25 bp, Homo sapien
gaagacgtggttgctgatcgtgcat

SEQ ID NO: 2344269 - DNA, 25 bp, Homo sapien
gaggtaattctggttggatattgtc

SEQ ID NO: 2344270 - DNA, 25 bp, Homo sapien
ccgaaaatccacatagaaaatttga

SEQ ID NO: 2344271 - DNA, 25 bp, Homo sapien
aagaagacgtggttgctgatcgtgc

SEQ ID NO: 2344272 - DNA, 25 bp, Homo sapien
aaccctcctcgtgtgagcttttctg

SEQ ID NO: 2344273 - DNA, 25 bp, Homo sapien
caactcgtgagcatcagacccagaa

SEQ ID NO: 2344274 - DNA, 25 bp, Homo sapien
gataaacttatcaggcaaactcaac

SEQ ID NO: 2344275 - DNA, 25 bp, Homo sapien
tacttcagtggcagcatgcttgagg

SEQ ID NO: 2344276 - DNA, 25 bp, Homo sapien
cttttggctctttctctattcccat

SEQ ID NO: 2344277 - DNA, 25 bp, Homo sapien
ccttttggctctttctctattccca

SEQ ID NO: 2344278 - DNA, 25 bp, Homo sapien
ttccacctggtttcttgacatacat

SEQ ID NO: 2344279 - DNA, 25 bp, Homo sapien
gcatctgttgaggtttctgtatttc

SEQ ID NO: 2344280 - DNA, 25 bp, Homo sapien
acattggcatctgttgaggtttctg

SEQ ID NO: 2344281 - DNA, 25 bp, Homo sapien
tttccacctggtttcttgacataca

SEQ ID NO: 2344282 - DNA, 25 bp, Homo sapien
tgagagactagcctcttgatctcca

SEQ ID NO: 2344283 - DNA, 25 bp, Homo sapien
aattgaccacgacatttttcttgag

SEQ ID NO: 2344284 - DNA, 25 bp, Homo sapien
tagctgtcggcagtattttacagaa

SEQ ID NO: 2344285 - DNA, 25 bp, Homo sapien
tgatctccacatgtagtggatacat

SEQ ID NO: 2344286 - DNA, 25 bp, Homo sapien
tcctttctgatgtggagtgtttaca

SEQ ID NO: 2344287 - DNA, 25 bp, Homo sapien
gatttcatcaactgaaatcatcacc

SEQ ID NO: 2344288 - DNA, 25 bp, Homo sapien
tgtggagtgtttacaaattttccag

SEQ ID NO: 2344289 - DNA, 25 bp, Homo sapien
accttaacagctaccatcatcacaa

SEQ ID NO: 2344290 - DNA, 25 bp, Homo sapien
catcagatttgaactgcctggcttc

SEQ ID NO: 2344291 - DNA, 25 bp, Homo sapien
gatttgaactgcctggcttccgtgt

SEQ ID NO: 2344292 - DNA, 25 bp, Homo sapien
tgaactgcctggcttccgtgtctac

SEQ ID NO: 2344293 - DNA, 25 bp, Homo sapien
tcagatttgaactgcctggcttccg

SEQ ID NO: 2344294 - DNA, 25 bp, Homo sapien
ttgtaaactttatgaagtaatacat

SEQ ID NO: 2344295 - DNA, 25 bp, Homo sapien
cacatatgtgatcagtttttgtttt

SEQ ID NO: 2344296 - DNA, 25 bp, Homo sapien
ctttttcacatatgtgatcagtttt

SEQ ID NO: 2344297 - DNA, 25 bp, Homo sapien
ttctggttcaattgtaaactttatg

SEQ ID NO: 2344298 - DNA, 25 bp, Homo sapien
gtcacaaacccgtccagaagcaaag

SEQ ID NO: 2344299 - DNA, 25 bp, Homo sapien
cacaaacccgtccagaagcaaagat

SEQ ID NO: 2344300 - DNA, 25 bp, Homo sapien
tcacaaacccgtccagaagcaaaga

SEQ ID NO: 2344301 - DNA, 25 bp, Homo sapien
tgctaaggacacagaatgcttgaaa

SEQ ID NO: 2344302 - DNA, 25 bp, Homo sapien
ttgctaaggacacagaatgcttgaa

SEQ ID NO: 2344303 - DNA, 25 bp, Homo sapien
tgtaggcctaatacagtactatgta

SEQ ID NO: 2344304 - DNA, 25 bp, Homo sapien
attttcaaactgtaggcctaataca

SEQ ID NO: 2344305 - DNA, 25 bp, Homo sapien
agtctaatgagctagggatccaaac

SEQ ID NO: 2344306 - DNA, 25 bp, Homo sapien
taatagtctaatgagctagggatcc

SEQ ID NO: 2344307 - DNA, 25 bp, Homo sapien
caggtaatagtctaatgagctaggg

SEQ ID NO: 2344308 - DNA, 25 bp, Homo sapien
ctttatcaggtaatagtctaatgag

SEQ ID NO: 2344309 - DNA, 25 bp, Homo sapien
tccatcaagtcatggctttgcgggc

SEQ ID NO: 2344310 - DNA, 25 bp, Homo sapien
caacccgggatctagagagctgtca

SEQ ID NO: 2344311 - DNA, 25 bp, Homo sapien
tgagcccagggaatgaaactctcca

SEQ ID NO: 2344312 - DNA, 25 bp, Homo sapien
ctttgcgggcaatagatcagaggat

SEQ ID NO: 2344313 - DNA, 25 bp, Homo sapien
gaggcatcttgctgtggcgtttcgt

SEQ ID NO: 2344314 - DNA, 25 bp, Homo sapien
tgtacctccttgagtgaagtggtca

SEQ ID NO: 2344315 - DNA, 25 bp, Homo sapien
gtagaaggattggaggcatcttgct

SEQ ID NO: 2344316 - DNA, 25 bp, Homo sapien
ttttcctctgtacctccttgagtga

SEQ ID NO: 2344317 - DNA, 25 bp, Homo sapien
tcatcgttgtcaatctgtccattct

SEQ ID NO: 2344318 - DNA, 25 bp, Homo sapien
tcatcatcgttgtcaatctgtccat

SEQ ID NO: 2344319 - DNA, 25 bp, Homo sapien
tacattttggttctcagtcaagttt

SEQ ID NO: 2344320 - DNA, 25 bp, Homo sapien
tggttctcagtcaagtttgtgtatt

SEQ ID NO: 2344321 - DNA, 25 bp, Homo sapien
atataaatatttgtaccgatcactg

SEQ ID NO: 2344322 - DNA, 25 bp, Homo sapien
aggctttcatagcaatgctggatca

SEQ ID NO: 2344323 - DNA, 25 bp, Homo sapien
ggctttcatagcaatgctggatcat

SEQ ID NO: 2344324 - DNA, 25 bp, Homo sapien
gtaccgatcactgttttcttttgaa

SEQ ID NO: 2344325 - DNA, 25 bp, Homo sapien
agcagctaatgagcggtaaatgagg

SEQ ID NO: 2344326 - DNA, 25 bp, Homo sapien
ttacttttgctctgatcctggaggg

SEQ ID NO: 2344327 - DNA, 25 bp, Homo sapien
aacagcagctaatgagcggtaaatg

SEQ ID NO: 2344328 - DNA, 25 bp, Homo sapien
tctgatcctggaggggttggaaaca

SEQ ID NO: 2344329 - DNA, 25 bp, Homo sapien
caattaggattcaccaatgcataaa

SEQ ID NO: 2344330 - DNA, 25 bp, Homo sapien
caaggcaagggtaaacatctaaact

SEQ ID NO: 2344331 - DNA, 25 bp, Homo sapien
tcctaaggaacctaccaaatatgag

SEQ ID NO: 2344332 - DNA, 25 bp, Homo sapien
tcctagacaatgcaatgagagagac

SEQ ID NO: 2344333 - DNA, 25 bp, Homo sapien
ccacaggaaccatggagtagctgct

SEQ ID NO: 2344334 - DNA, 25 bp, Homo sapien
tcccacaggaaccatggagtagctg

SEQ ID NO: 2344335 - DNA, 25 bp, Homo sapien
cccacaggaaccatggagtagctgc

SEQ ID NO: 2344336 - DNA, 25 bp, Homo sapien
ttctcttggtgtgagtattggtggt

SEQ ID NO: 2344337 - DNA, 25 bp, Homo sapien
cggagattctcttggtgtgagtatt

SEQ ID NO: 2344338 - DNA, 25 bp, Homo sapien
gagtattggtggttgatttctctca

SEQ ID NO: 2344339 - DNA, 25 bp, Homo sapien
tgtgagtattggtggttgatttctc

SEQ ID NO: 2344340 - DNA, 25 bp, Homo sapien
tttggaggaataatccagcaaaact

SEQ ID NO: 2344341 - DNA, 25 bp, Homo sapien
tatctggacataggtacatttcttt

SEQ ID NO: 2344342 - DNA, 25 bp, Homo sapien
atctggacataggtacatttctttg

SEQ ID NO: 2344343 - DNA, 25 bp, Homo sapien
ttctttggaggaataatccagcaaa

SEQ ID NO: 2344344 - DNA, 25 bp, Homo sapien
gttttccctcattcaaacattggga

SEQ ID NO: 2344345 - DNA, 25 bp, Homo sapien
cttggagaaacaccatttcggggat

SEQ ID NO: 2344346 - DNA, 25 bp, Homo sapien
ttcggggatggccatccatggaaaa

SEQ ID NO: 2344347 - DNA, 25 bp, Homo sapien
ttgttttccctcattcaaacattgg

SEQ ID NO: 2344348 - DNA, 25 bp, Homo sapien
tttccttgtatcacttcatttgcac

SEQ ID NO: 2344349 - DNA, 25 bp, Homo sapien
tcacttcatttgcacctatcaccat

SEQ ID NO: 2344350 - DNA, 25 bp, Homo sapien
ttgtatcacttcatttgcacctatc

SEQ ID NO: 2344351 - DNA, 25 bp, Homo sapien
ccttgtatcacttcatttgcaccta

SEQ ID NO: 2344352 - DNA, 25 bp, Homo sapien
tattttttcttaacagcttcacctc

SEQ ID NO: 2344353 - DNA, 25 bp, Homo sapien
ttttttcttaacagcttcacctcca

SEQ ID NO: 2344354 - DNA, 25 bp, Homo sapien
tttttcttaacagcttcacctccat

SEQ ID NO: 2344355 - DNA, 25 bp, Homo sapien
ttcatcagcaggcttgcatagttat

SEQ ID NO: 2344356 - DNA, 25 bp, Homo sapien
tcagcaggcttgcatagttatttgc

SEQ ID NO: 2344357 - DNA, 25 bp, Homo sapien
gcaggcttgcatagttatttgcttt

SEQ ID NO: 2344358 - DNA, 25 bp, Homo sapien
ttagttcatcagcaggcttgcatag

SEQ ID NO: 2344359 - DNA, 25 bp, Homo sapien
acagacttttagatggaaattgatc

SEQ ID NO: 2344360 - DNA, 25 bp, Homo sapien
tgctctttgtaatttcccacagctt

SEQ ID NO: 2344361 - DNA, 25 bp, Homo sapien
tattgggctcccataaaccactagc

SEQ ID NO: 2344362 - DNA, 25 bp, Homo sapien
gaaattgatctaggctttttctgct

SEQ ID NO: 2344363 - DNA, 25 bp, Homo sapien
tgaaatatcaaaatggtgtaaaact

SEQ ID NO: 2344364 - DNA, 25 bp, Homo sapien
ctgaaatatcaaaatggtgtaaaac

SEQ ID NO: 2344365 - DNA, 25 bp, Homo sapien
ctgactggctgactttcggaaggga

SEQ ID NO: 2344366 - DNA, 25 bp, Homo sapien
ggataggttgacactcacagatgta

SEQ ID NO: 2344367 - DNA, 25 bp, Homo sapien
tctaatactgactggttggttgcaa

SEQ ID NO: 2344368 - DNA, 25 bp, Homo sapien
tagagggtgctttcctgactggctg

SEQ ID NO: 2344369 - DNA, 25 bp, Homo sapien
cttgaccactatgtcattatcaagt

SEQ ID NO: 2344370 - DNA, 25 bp, Homo sapien
tggaagattacccccaagagaaaga

SEQ ID NO: 2344371 - DNA, 25 bp, Homo sapien
gaaagaaacttgaccactatgtcat

SEQ ID NO: 2344372 - DNA, 25 bp, Homo sapien
gtcattatcaagttgttgctgacca

SEQ ID NO: 2344373 - DNA, 25 bp, Homo sapien
gataagagagctttaggtgtctggt

SEQ ID NO: 2344374 - DNA, 25 bp, Homo sapien
catctcttcactgatagtctcacac

SEQ ID NO: 2344375 - DNA, 25 bp, Homo sapien
tatgtatgcttgtgatgggataaca

SEQ ID NO: 2344376 - DNA, 25 bp, Homo sapien
ggtgtctggtagtgtggtgctgcca

SEQ ID NO: 2344377 - DNA, 25 bp, Homo sapien
gagactgcctcagactggactttat

SEQ ID NO: 2344378 - DNA, 25 bp, Homo sapien
gactgcctcagactggactttattg

SEQ ID NO: 2344379 - DNA, 25 bp, Homo sapien
agactgcctcagactggactttatt

SEQ ID NO: 2344380 - DNA, 25 bp, Homo sapien
actgcctcagactggactttattgt

SEQ ID NO: 2344381 - DNA, 25 bp, Homo sapien
ctgtctgggtcagtgcttcttggtc

SEQ ID NO: 2344382 - DNA, 25 bp, Homo sapien
tcctgtctgggtcagtgcttcttgg

SEQ ID NO: 2344383 - DNA, 25 bp, Homo sapien
cctgtctgggtcagtgcttcttggt

SEQ ID NO: 2344384 - DNA, 25 bp, Homo sapien
ttgagctttgccagagtataattgg

SEQ ID NO: 2344385 - DNA, 25 bp, Homo sapien
gagctttgccagagtataattggaa

SEQ ID NO: 2344386 - DNA, 25 bp, Homo sapien
gctttgccagagtataattggaaac

SEQ ID NO: 2344387 - DNA, 25 bp, Homo sapien
tgagctttgccagagtataattgga

SEQ ID NO: 2344388 - DNA, 25 bp, Homo sapien
tccactgggtccgtaagaaccatgt

SEQ ID NO: 2344389 - DNA, 25 bp, Homo sapien
gagagatgcaacagtggatttcagc

SEQ ID NO: 2344390 - DNA, 25 bp, Homo sapien
aacagtggatttcagcacgtgatac

SEQ ID NO: 2344391 - DNA, 25 bp, Homo sapien
taagaaccatgtagagagatgcaac

SEQ ID NO: 2344392 - DNA, 25 bp, Homo sapien
cacaaccacagaaaccgagatgact

SEQ ID NO: 2344393 - DNA, 25 bp, Homo sapien
taataaacacaaccacagaaaccga

SEQ ID NO: 2344394 - DNA, 25 bp, Homo sapien
ccacagaaaccgagatgactacatt

SEQ ID NO: 2344395 - DNA, 25 bp, Homo sapien
gaaaccgagatgactacattcttcc

SEQ ID NO: 2344396 - DNA, 25 bp, Homo sapien
tgtattcctgcagtactccatacat

SEQ ID NO: 2344397 - DNA, 25 bp, Homo sapien
tttgtattcctgcagtactccatac

SEQ ID NO: 2344398 - DNA, 25 bp, Homo sapien
ttgtattcctgcagtactccataca

SEQ ID NO: 2344399 - DNA, 25 bp, Homo sapien
ctttgtattcctgcagtactccata

SEQ ID NO: 2344400 - DNA, 25 bp, Homo sapien
ctatatagtcgagtgttaagaaatg

SEQ ID NO: 2344401 - DNA, 25 bp, Homo sapien
tagtcgagtgttaagaaatgggaag

SEQ ID NO: 2344402 - DNA, 25 bp, Homo sapien
gtcgagtgttaagaaatgggaagaa

SEQ ID NO: 2344403 - DNA, 25 bp, Homo sapien
tatagtcgagtgttaagaaatggga

SEQ ID NO: 2344404 - DNA, 25 bp, Homo sapien
ggttttctctattgtctccggatga

SEQ ID NO: 2344405 - DNA, 25 bp, Homo sapien
cggatgaccactgattcctactata

SEQ ID NO: 2344406 - DNA, 25 bp, Homo sapien
ccatcccatgacagatattctggag

SEQ ID NO: 2344407 - DNA, 25 bp, Homo sapien
tactatatgctggacattaccatcc

SEQ ID NO: 2344408 - DNA, 25 bp, Homo sapien
catcccctaaaagatagagtccagg

SEQ ID NO: 2344409 - DNA, 25 bp, Homo sapien
gctcacatcccctaaaagatagagt

SEQ ID NO: 2344410 - DNA, 25 bp, Homo sapien
gatatttctttatatggctaccaga

SEQ ID NO: 2344411 - DNA, 25 bp, Homo sapien
cctaaaagatagagtccaggataat

SEQ ID NO: 2344412 - DNA, 25 bp, Homo sapien
ttcaaacaacccgtccattgcacaa

SEQ ID NO: 2344413 - DNA, 25 bp, Homo sapien
ttattcaaacaacccgtccattgca

SEQ ID NO: 2344414 - DNA, 25 bp, Homo sapien
acaacccgtccattgcacaagtatc

SEQ ID NO: 2344415 - DNA, 25 bp, Homo sapien
gtccattgcacaagtatccctcagt

SEQ ID NO: 2344416 - DNA, 25 bp, Homo sapien
aacttctgtttgtgaccccttcatg

SEQ ID NO: 2344417 - DNA, 25 bp, Homo sapien
acttctgtttgtgaccccttcatgt

SEQ ID NO: 2344418 - DNA, 25 bp, Homo sapien
ctaacttctgtttgtgaccccttca

SEQ ID NO: 2344419 - DNA, 25 bp, Homo sapien
taacttctgtttgtgaccccttcat

SEQ ID NO: 2344420 - DNA, 25 bp, Homo sapien
agatttatgagtttggtggctatta

SEQ ID NO: 2344421 - DNA, 25 bp, Homo sapien
gaaagatttatgagtttggtggcta

SEQ ID NO: 2344422 - DNA, 25 bp, Homo sapien
aataaacaggtctttcacagatagg

SEQ ID NO: 2344423 - DNA, 25 bp, Homo sapien
ctgaaagatttatgagtttggtggc

SEQ ID NO: 2344424 - DNA, 25 bp, Homo sapien
tagaaacacaaaggcctgcagtcat

SEQ ID NO: 2344425 - DNA, 25 bp, Homo sapien
actcacttatctgctctattgtatg

SEQ ID NO: 2344426 - DNA, 25 bp, Homo sapien
taattctccctattttagaaacaca

SEQ ID NO: 2344427 - DNA, 25 bp, Homo sapien
tgtatgatatttaattctccctatt

SEQ ID NO: 2344428 - DNA, 25 bp, Homo sapien
tctatcctgattgatcttacagacc

SEQ ID NO: 2344429 - DNA, 25 bp, Homo sapien
caggtctatcctgattgatcttaca

SEQ ID NO: 2344430 - DNA, 25 bp, Homo sapien
ggtctatcctgattgatcttacaga

SEQ ID NO: 2344431 - DNA, 25 bp, Homo sapien
gtccaggtctatcctgattgatctt

SEQ ID NO: 2344432 - DNA, 25 bp, Homo sapien
tgcgagtgctttttacctggagttg

SEQ ID NO: 2344433 - DNA, 25 bp, Homo sapien
ttttgcgagtgctttttacctggag

SEQ ID NO: 2344434 - DNA, 25 bp, Homo sapien
agtgctttttacctggagttgtgtg

SEQ ID NO: 2344435 - DNA, 25 bp, Homo sapien
gcgagtgctttttacctggagttgt

SEQ ID NO: 2344436 - DNA, 25 bp, Homo sapien
cacacagctaccagaagcttccatc

SEQ ID NO: 2344437 - DNA, 25 bp, Homo sapien
cacagctaccagaagcttccatctc

SEQ ID NO: 2344438 - DNA, 25 bp, Homo sapien
acacagctaccagaagcttccatct

SEQ ID NO: 2344439 - DNA, 25 bp, Homo sapien
tcacacagctaccagaagcttccat

SEQ ID NO: 2344440 - DNA, 25 bp, Homo sapien
aggccaggagctgttaataggtcag

SEQ ID NO: 2344441 - DNA, 25 bp, Homo sapien
gactgacaaaggactatggtttgtt

SEQ ID NO: 2344442 - DNA, 25 bp, Homo sapien
caggcgcctgacactgtgtccggaa

SEQ ID NO: 2344443 - DNA, 25 bp, Homo sapien
ggtcagaagtagtagactaaagact

SEQ ID NO: 2344444 - DNA, 25 bp, Homo sapien
aaggtgttccagtatgtccttctgg

SEQ ID NO: 2344445 - DNA, 25 bp, Homo sapien
ctgcaaggtgttccagtatgtcctt

SEQ ID NO: 2344446 - DNA, 25 bp, Homo sapien
gttccagtatgtccttctgggataa

SEQ ID NO: 2344447 - DNA, 25 bp, Homo sapien
ggtgttccagtatgtccttctggga

SEQ ID NO: 2344448 - DNA, 25 bp, Homo sapien
tgggcttttggactgatgccttcag

SEQ ID NO: 2344449 - DNA, 25 bp, Homo sapien
gaatagctcgtgaacatatgtatcc

SEQ ID NO: 2344450 - DNA, 25 bp, Homo sapien
gcagttagtgccatcaaagtgtgta

SEQ ID NO: 2344451 - DNA, 25 bp, Homo sapien
gccacacaattctaacatgcagtta

SEQ ID NO: 2344452 - DNA, 25 bp, Homo sapien
gatgagagtatggtcatttccccag

SEQ ID NO: 2344453 - DNA, 25 bp, Homo sapien
gagatgagagtatggtcatttcccc

SEQ ID NO: 2344454 - DNA, 25 bp, Homo sapien
gtggagatgagagtatggtcatttc

SEQ ID NO: 2344455 - DNA, 25 bp, Homo sapien
gagagtatggtcatttccccagctg

SEQ ID NO: 2344456 - DNA, 25 bp, Homo sapien
aggagcctatacattgcaaaagggc

SEQ ID NO: 2344457 - DNA, 25 bp, Homo sapien
taggagcctatacattgcaaaaggg

SEQ ID NO: 2344458 - DNA, 25 bp, Homo sapien
ggagcctatacattgcaaaagggca

SEQ ID NO: 2344459 - DNA, 25 bp, Homo sapien
ctaggagcctatacattgcaaaagg

SEQ ID NO: 2344460 - DNA, 25 bp, Homo sapien
gcctctcttgaaatgcggtatgacc

SEQ ID NO: 2344461 - DNA, 25 bp, Homo sapien
caccagtgcaactacttaagctaaa

SEQ ID NO: 2344462 - DNA, 25 bp, Homo sapien
tcccctaatgaagtaatgcctcctg

SEQ ID NO: 2344463 - DNA, 25 bp, Homo sapien
tcttagtaaaagattcccaccacca

SEQ ID NO: 2344464 - DNA, 25 bp, Homo sapien
caacctgtgacactccggtgaagtc

SEQ ID NO: 2344465 - DNA, 25 bp, Homo sapien
ttccacagtctcaactaagtcttcc

SEQ ID NO: 2344466 - DNA, 25 bp, Homo sapien
aagtcatggaattgatttgctctca

SEQ ID NO: 2344467 - DNA, 25 bp, Homo sapien
taagtcttccattggtaaatccaac

SEQ ID NO: 2344468 - DNA, 25 bp, Homo sapien
aggtatattttcagtagcaccccac

SEQ ID NO: 2344469 - DNA, 25 bp, Homo sapien
cattttcaggtatattttcagtagc

SEQ ID NO: 2344470 - DNA, 25 bp, Homo sapien
tcaggtatattttcagtagcacccc

SEQ ID NO: 2344471 - DNA, 25 bp, Homo sapien
tattttcagtagcaccccactctac

SEQ ID NO: 2344472 - DNA, 25 bp, Homo sapien
caatagaatactttttaggggtcat

SEQ ID NO: 2344473 - DNA, 25 bp, Homo sapien
taatgttcagaagtacatctttaat

SEQ ID NO: 2344474 - DNA, 25 bp, Homo sapien
gttcagaagtacatctttaattcca

SEQ ID NO: 2344475 - DNA, 25 bp, Homo sapien
agaagtacatctttaattccaatag

SEQ ID NO: 2344476 - DNA, 25 bp, Homo sapien
aactgatggtaatatcttagatgag

SEQ ID NO: 2344477 - DNA, 25 bp, Homo sapien
gaaacaagagcataaggacccttta

SEQ ID NO: 2344478 - DNA, 25 bp, Homo sapien
acaagagcataaggaccctttagtg

SEQ ID NO: 2344479 - DNA, 25 bp, Homo sapien
cttagatgagaaccgggagtaggaa

SEQ ID NO: 2344480 - DNA, 25 bp, Homo sapien
cagtgtggcaatgtgctctcaccag

SEQ ID NO: 2344481 - DNA, 25 bp, Homo sapien
tgtcactatcagtgtggcaatgtgc

SEQ ID NO: 2344482 - DNA, 25 bp, Homo sapien
tgtggcaatgtgctctcaccagttc

SEQ ID NO: 2344483 - DNA, 25 bp, Homo sapien
tatcagtgtggcaatgtgctctcac

SEQ ID NO: 2344484 - DNA, 25 bp, Homo sapien
tttatccatgaagttaaaggtgaac

SEQ ID NO: 2344485 - DNA, 25 bp, Homo sapien
ctttatccatgaagttaaaggtgaa

SEQ ID NO: 2344486 - DNA, 25 bp, Homo sapien
ttatccatgaagttaaaggtgaaca

SEQ ID NO: 2344487 - DNA, 25 bp, Homo sapien
tatccatgaagttaaaggtgaacat

SEQ ID NO: 2344488 - DNA, 25 bp, Homo sapien
tgagcaatcacagtaactgctgtga

SEQ ID NO: 2344489 - DNA, 25 bp, Homo sapien
cagtaactgctgtgactggaaacat

SEQ ID NO: 2344490 - DNA, 25 bp, Homo sapien
aggtgcaggcttttgcatgagcaat

SEQ ID NO: 2344491 - DNA, 25 bp, Homo sapien
caggcttttgcatgagcaatcacag

SEQ ID NO: 2344492 - DNA, 25 bp, Homo sapien
ctgttccacacatactgataggcat

SEQ ID NO: 2344493 - DNA, 25 bp, Homo sapien
aatcctgttccacacatactgatag

SEQ ID NO: 2344494 - DNA, 25 bp, Homo sapien
ggccgttttctgaaatcctgttcca

SEQ ID NO: 2344495 - DNA, 25 bp, Homo sapien
taattgtgaaatcggccgttttctg

SEQ ID NO: 2344496 - DNA, 25 bp, Homo sapien
tattgcacaattattgcatctattt

SEQ ID NO: 2344497 - DNA, 25 bp, Homo sapien
tctgctattgcacaattattgcatc

SEQ ID NO: 2344498 - DNA, 25 bp, Homo sapien
cttctgctattgcacaattattgca

SEQ ID NO: 2344499 - DNA, 25 bp, Homo sapien
tgctattgcacaattattgcatcta

SEQ ID NO: 2344500 - DNA, 25 bp, Homo sapien
catatccttctctataggtgatgtc

SEQ ID NO: 2344501 - DNA, 25 bp, Homo sapien
taggtgatgtcttccccagtgtgag

SEQ ID NO: 2344502 - DNA, 25 bp, Homo sapien
ccaaacgtttgcatatccttctcta

SEQ ID NO: 2344503 - DNA, 25 bp, Homo sapien
tcaagctgcccaaacgtttgcatat

SEQ ID NO: 2344504 - DNA, 25 bp, Homo sapien
ctgccacaatgcctgctccatcctc

SEQ ID NO: 2344505 - DNA, 25 bp, Homo sapien
ccacaatgcctgctccatcctccac

SEQ ID NO: 2344506 - DNA, 25 bp, Homo sapien
actgccacaatgcctgctccatcct

SEQ ID NO: 2344507 - DNA, 25 bp, Homo sapien
caatgcctgctccatcctccaccct

SEQ ID NO: 2344508 - DNA, 25 bp, Homo sapien
gcaggaggtggtcatatttgtttga

SEQ ID NO: 2344509 - DNA, 25 bp, Homo sapien
cctcctgataccattaatctgagca

SEQ ID NO: 2344510 - DNA, 25 bp, Homo sapien
tctgagcagaagagtatgggtccat

SEQ ID NO: 2344511 - DNA, 25 bp, Homo sapien
tgtataggggagcagcctttcagaa

SEQ ID NO: 2344512 - DNA, 25 bp, Homo sapien
tttgttgtgaaggatttgtgtggag

SEQ ID NO: 2344513 - DNA, 25 bp, Homo sapien
ttgttgtgaaggatttgtgtggaga

SEQ ID NO: 2344514 - DNA, 25 bp, Homo sapien
ttgctttgttcatgttctgcagtac

SEQ ID NO: 2344515 - DNA, 25 bp, Homo sapien
catgttctgcagtacagctgtgctc

SEQ ID NO: 2344516 - DNA, 25 bp, Homo sapien
tgtgctcaactataagtcccttttc

SEQ ID NO: 2344517 - DNA, 25 bp, Homo sapien
tacagctgtgctcaactataagtcc

SEQ ID NO: 2344518 - DNA, 25 bp, Homo sapien
tgaggaccgtgacaggtttgcagat

SEQ ID NO: 2344519 - DNA, 25 bp, Homo sapien
gtgctctgaggaccgtgacaggttt

SEQ ID NO: 2344520 - DNA, 25 bp, Homo sapien
gactcatcatggagagatgtccaat

SEQ ID NO: 2344521 - DNA, 25 bp, Homo sapien
tgggcctttgactcatcatggagag

SEQ ID NO: 2344522 - DNA, 25 bp, Homo sapien
tagaagggccagtttgagcacaagt

SEQ ID NO: 2344523 - DNA, 25 bp, Homo sapien
gcaggagtagaagggccagtttgag

SEQ ID NO: 2344524 - DNA, 25 bp, Homo sapien
gagtagaagggccagtttgagcaca

SEQ ID NO: 2344525 - DNA, 25 bp, Homo sapien
agggccagtttgagcacaagtccca

SEQ ID NO: 2344526 - DNA, 25 bp, Homo sapien
ctggagtggaacaccctgctcagca

SEQ ID NO: 2344527 - DNA, 25 bp, Homo sapien
tcaaacctctagttgaaggatttcc

SEQ ID NO: 2344528 - DNA, 25 bp, Homo sapien
attcaaacctctagttgaaggattt

SEQ ID NO: 2344529 - DNA, 25 bp, Homo sapien
ttcaaacctctagttgaaggatttc

SEQ ID NO: 2344530 - DNA, 25 bp, Homo sapien
cattcaaacctctagttgaaggatt

SEQ ID NO: 2344531 - DNA, 25 bp, Homo sapien
cactttttttgctggtgccaacaga

SEQ ID NO: 2344532 - DNA, 25 bp, Homo sapien
gccaggatgcttgtgcttaattaag

SEQ ID NO: 2344533 - DNA, 25 bp, Homo sapien
tgtcaaagttatccaactgcataac

SEQ ID NO: 2344534 - DNA, 25 bp, Homo sapien
cttccatatcagtattcaaaggcac

SEQ ID NO: 2344535 - DNA, 25 bp, Homo sapien
cactggtacttttgacaagggggct

SEQ ID NO: 2344536 - DNA, 25 bp, Homo sapien
ttctgcactcctcctcttctgtcca

SEQ ID NO: 2344537 - DNA, 25 bp, Homo sapien
caattttctgcactcctcctcttct

SEQ ID NO: 2344538 - DNA, 25 bp, Homo sapien
attttctgcactcctcctcttctgt

SEQ ID NO: 2344539 - DNA, 25 bp, Homo sapien
tctgcactcctcctcttctgtccat

SEQ ID NO: 2344540 - DNA, 25 bp, Homo sapien
aagctatcaagtctatcgtctctgt

SEQ ID NO: 2344541 - DNA, 25 bp, Homo sapien
agaggtcatttttgctccagggatg

SEQ ID NO: 2344542 - DNA, 25 bp, Homo sapien
gaggtcatttttgctccagggatgt

SEQ ID NO: 2344543 - DNA, 25 bp, Homo sapien
aagtctatcgtctctgtcttcttaa

SEQ ID NO: 2344544 - DNA, 25 bp, Homo sapien
ctgctgaatacctgatcccttcctg

SEQ ID NO: 2344545 - DNA, 25 bp, Homo sapien
tgaatacctgatcccttcctgatgt

SEQ ID NO: 2344546 - DNA, 25 bp, Homo sapien
ttcattgccgtattctatgaaatgg

SEQ ID NO: 2344547 - DNA, 25 bp, Homo sapien
ccccaatgataattcattgccgtat

SEQ ID NO: 2344548 - DNA, 25 bp, Homo sapien
ttcaaagctgcttttagtaaacttc

SEQ ID NO: 2344549 - DNA, 25 bp, Homo sapien
ctgttgtcaccacaacgtttccttc

SEQ ID NO: 2344550 - DNA, 25 bp, Homo sapien
gtcaccacaacgtttccttctctag

SEQ ID NO: 2344551 - DNA, 25 bp, Homo sapien
cacaggcttgttatctctcttcgtc

SEQ ID NO: 2344552 - DNA, 25 bp, Homo sapien
cggaactatgtgatcccggaagttc

SEQ ID NO: 2344553 - DNA, 25 bp, Homo sapien
ataaacagtaatggcggaggctgca

SEQ ID NO: 2344554 - DNA, 25 bp, Homo sapien
gggataaacagtaatggcggaggct

SEQ ID NO: 2344555 - DNA, 25 bp, Homo sapien
gaactatgtgatcccggaagttccg

SEQ ID NO: 2344556 - DNA, 25 bp, Homo sapien
aggatagactggaatgggataacga

SEQ ID NO: 2344557 - DNA, 25 bp, Homo sapien
tgggataacgacaacatatattggt

SEQ ID NO: 2344558 - DNA, 25 bp, Homo sapien
cgacaacatatattggttccaaatg

SEQ ID NO: 2344559 - DNA, 25 bp, Homo sapien
aatgacttgagtgtttcaaacaatt

SEQ ID NO: 2344560 - DNA, 25 bp, Homo sapien
caagactgagttctgttagagagca

SEQ ID NO: 2344561 - DNA, 25 bp, Homo sapien
caatgacattaaacgctagctgcaa

SEQ ID NO: 2344562 - DNA, 25 bp, Homo sapien
catgtgaactggagaggctgcaact

SEQ ID NO: 2344563 - DNA, 25 bp, Homo sapien
tggagcagacagcaggcgttcatga

SEQ ID NO: 2344564 - DNA, 25 bp, Homo sapien
tctgtgaagtcttgtcccgtggatt

SEQ ID NO: 2344565 - DNA, 25 bp, Homo sapien
tatttctggtccagtgatgccagaa

SEQ ID NO: 2344566 - DNA, 25 bp, Homo sapien
attatttctggtccagtgatgccag

SEQ ID NO: 2344567 - DNA, 25 bp, Homo sapien
gattatttctggtccagtgatgcca

SEQ ID NO: 2344568 - DNA, 25 bp, Homo sapien
tttctggtccagtgatgccagaaac

SEQ ID NO: 2344569 - DNA, 25 bp, Homo sapien
tttgagacttagctgctgaggagct

SEQ ID NO: 2344570 - DNA, 25 bp, Homo sapien
aagccaagcccctacggggagctgc

SEQ ID NO: 2344571 - DNA, 25 bp, Homo sapien
ccaagcccctacggggagctgctgt

SEQ ID NO: 2344572 - DNA, 25 bp, Homo sapien
ttgacttgtatttctgtttcaatac

SEQ ID NO: 2344573 - DNA, 25 bp, Homo sapien
ctagttttccttcctgcatgattct

SEQ ID NO: 2344574 - DNA, 25 bp, Homo sapien
gacttgtatttctgtttcaatacag

SEQ ID NO: 2344575 - DNA, 25 bp, Homo sapien
gttttccttcctgcatgattctttg

SEQ ID NO: 2344576 - DNA, 25 bp, Homo sapien
aatcctatttcgcaagctaggagca

SEQ ID NO: 2344577 - DNA, 25 bp, Homo sapien
gagtggactagcactactgtgtcaa

SEQ ID NO: 2344578 - DNA, 25 bp, Homo sapien
gggtcaccttgatccacagaattag

SEQ ID NO: 2344579 - DNA, 25 bp, Homo sapien
tcctcccagagcaatgagacccttg

SEQ ID NO: 2344580 - DNA, 25 bp, Homo sapien
aacctctgaaatctcctacaccctt

SEQ ID NO: 2344581 - DNA, 25 bp, Homo sapien
gcaacctctgaaatctcctacaccc

SEQ ID NO: 2344582 - DNA, 25 bp, Homo sapien
tgcaacctctgaaatctcctacacc

SEQ ID NO: 2344583 - DNA, 25 bp, Homo sapien
ctctgaaatctcctacacccttcat

SEQ ID NO: 2344584 - DNA, 25 bp, Homo sapien
ctcctagtttctctgttcgtatgta

SEQ ID NO: 2344585 - DNA, 25 bp, Homo sapien
tctgttcgtatgtagtgcatgacac

SEQ ID NO: 2344586 - DNA, 25 bp, Homo sapien
tagtttctctgttcgtatgtagtgc

SEQ ID NO: 2344587 - DNA, 25 bp, Homo sapien
tcgtatgtagtgcatgacacatctt

SEQ ID NO: 2344588 - DNA, 25 bp, Homo sapien
aataagaatagtttgcatcatattg

SEQ ID NO: 2344589 - DNA, 25 bp, Homo sapien
aattgttagtccatatataataaga

SEQ ID NO: 2344590 - DNA, 25 bp, Homo sapien
ataagaatagtttgcatcatattgc

SEQ ID NO: 2344591 - DNA, 25 bp, Homo sapien
ctttttggaattgttagtccatata

SEQ ID NO: 2344592 - DNA, 25 bp, Homo sapien
tctgcggaaactaccaccactacat

SEQ ID NO: 2344593 - DNA, 25 bp, Homo sapien
aaccactgttactggagtctcttct

SEQ ID NO: 2344594 - DNA, 25 bp, Homo sapien
cgatatttagcttgttactagcgca

SEQ ID NO: 2344595 - DNA, 25 bp, Homo sapien
gcgcataacttgacaccaccaaact

SEQ ID NO: 2344596 - DNA, 25 bp, Homo sapien
ctttttgctaggcatgcttccactg

SEQ ID NO: 2344597 - DNA, 25 bp, Homo sapien
ttgctgctttttgctaggcatgctt

SEQ ID NO: 2344598 - DNA, 25 bp, Homo sapien
tgctttttgctaggcatgcttccac

SEQ ID NO: 2344599 - DNA, 25 bp, Homo sapien
gctgctttttgctaggcatgcttcc

SEQ ID NO: 2344600 - DNA, 25 bp, Homo sapien
ctgggtcatagaagactgttgagca

SEQ ID NO: 2344601 - DNA, 25 bp, Homo sapien
ttctggcctgctatgcctactgggt

SEQ ID NO: 2344602 - DNA, 25 bp, Homo sapien
agtacttctggcctgctatgcctac

SEQ ID NO: 2344603 - DNA, 25 bp, Homo sapien
tatgcctactgggtcatagaagact

SEQ ID NO: 2344604 - DNA, 25 bp, Homo sapien
cttgctctatctctgcagcgaaggt

SEQ ID NO: 2344605 - DNA, 25 bp, Homo sapien
gcagcgaaggtttcatgggtgctcc

SEQ ID NO: 2344606 - DNA, 25 bp, Homo sapien
cataaggcctgttgctacaggattc

SEQ ID NO: 2344607 - DNA, 25 bp, Homo sapien
agacaatagttgatgctttgcattt

SEQ ID NO: 2344608 - DNA, 25 bp, Homo sapien
cacaacatgtgggaattcaagatga

SEQ ID NO: 2344609 - DNA, 25 bp, Homo sapien
ccacaacatgtgggaattcaagatg

SEQ ID NO: 2344610 - DNA, 25 bp, Homo sapien
aacatgtgggaattcaagatgagat

SEQ ID NO: 2344611 - DNA, 25 bp, Homo sapien
acaggaaagacttgcccccatgttt

SEQ ID NO: 2344612 - DNA, 25 bp, Homo sapien
tagcttcagtcttatgacctgtgaa

SEQ ID NO: 2344613 - DNA, 25 bp, Homo sapien
cttcagtcttatgacctgtgaacac

SEQ ID NO: 2344614 - DNA, 25 bp, Homo sapien
ttcagtcttatgacctgtgaacacc

SEQ ID NO: 2344615 - DNA, 25 bp, Homo sapien
gcttcagtcttatgacctgtgaaca

SEQ ID NO: 2344616 - DNA, 25 bp, Homo sapien
caaggagcccttaatcgttttgcca

SEQ ID NO: 2344617 - DNA, 25 bp, Homo sapien
caactgggaagtatagactgtgctc

SEQ ID NO: 2344618 - DNA, 25 bp, Homo sapien
tgtattaggaacaccgacggcattt

SEQ ID NO: 2344619 - DNA, 25 bp, Homo sapien
tcggctttataagggctcattgaca

SEQ ID NO: 2344620 - DNA, 25 bp, Homo sapien
cctggaacaatagatcttttctata

SEQ ID NO: 2344621 - DNA, 25 bp, Homo sapien
ctggaacaatagatcttttctataa

SEQ ID NO: 2344622 - DNA, 25 bp, Homo sapien
tctataatagtttcctgtttccctc

SEQ ID NO: 2344623 - DNA, 25 bp, Homo sapien
gaacaatagatcttttctataatag

SEQ ID NO: 2344624 - DNA, 25 bp, Homo sapien
tagacttcattgagattaggaggta

SEQ ID NO: 2344625 - DNA, 25 bp, Homo sapien
tcagttctaccagtaagtgttcttt

SEQ ID NO: 2344626 - DNA, 25 bp, Homo sapien
tttccacagatatgaataaagagac

SEQ ID NO: 2344627 - DNA, 25 bp, Homo sapien
ccacagatatgaataaagagaccat

SEQ ID NO: 2344628 - DNA, 25 bp, Homo sapien
gctctgacgggtagcagccatcaac

SEQ ID NO: 2344629 - DNA, 25 bp, Homo sapien
tgctctgacgggtagcagccatcaa

SEQ ID NO: 2344630 - DNA, 25 bp, Homo sapien
gcattctaaaaagcggcgtgtttca

SEQ ID NO: 2344631 - DNA, 25 bp, Homo sapien
tcagaggcattctaaaaagcggcgt

SEQ ID NO: 2344632 - DNA, 25 bp, Homo sapien
gaggcattctaaaaagcggcgtgtt

SEQ ID NO: 2344633 - DNA, 25 bp, Homo sapien
ctaaaaagcggcgtgtttcacgaat

SEQ ID NO: 2344634 - DNA, 25 bp, Homo sapien
ggctgcgccccaactaccaagccca

SEQ ID NO: 2344635 - DNA, 25 bp, Homo sapien
ccgcggctgcgccccaactaccaag

SEQ ID NO: 2344636 - DNA, 25 bp, Homo sapien
gctgcgccccaactaccaagcccag

SEQ ID NO: 2344637 - DNA, 25 bp, Homo sapien
gcggctgcgccccaactaccaagcc

SEQ ID NO: 2344638 - DNA, 25 bp, Homo sapien
ccggtccagtcgcggagaagccctg

SEQ ID NO: 2344639 - DNA, 25 bp, Homo sapien
gcgtgctttcgagcggcgcccggtc

SEQ ID NO: 2344640 - DNA, 25 bp, Homo sapien
gatgagcccaacaagcagtgcgaat

SEQ ID NO: 2344641 - DNA, 25 bp, Homo sapien
cagtgcgaatggagggcgtgctttc

SEQ ID NO: 2344642 - DNA, 25 bp, Homo sapien
ggcattttccgctgcacggagccca

SEQ ID NO: 2344643 - DNA, 25 bp, Homo sapien
acggcattttccgctgcacggagcc

SEQ ID NO: 2344644 - DNA, 25 bp, Homo sapien
attttccgctgcacggagcccaagc

SEQ ID NO: 2344645 - DNA, 25 bp, Homo sapien
ttttccgctgcacggagcccaagcg

SEQ ID NO: 2344646 - DNA, 25 bp, Homo sapien
gggccgccaagcctgcccggcgctc

SEQ ID NO: 2344647 - DNA, 25 bp, Homo sapien
agggcagttctaaagcgcccagccg

SEQ ID NO: 2344648 - DNA, 25 bp, Homo sapien
tcgccgggttcgcactgagccagcg

SEQ ID NO: 2344649 - DNA, 25 bp, Homo sapien
cgccctcgccgggttcgcactgagc

SEQ ID NO: 2344650 - DNA, 25 bp, Homo sapien
gcgaggacaagtttgaatctcctga

SEQ ID NO: 2344651 - DNA, 25 bp, Homo sapien
gaaaagtacaagaacctggagctca

SEQ ID NO: 2344652 - DNA, 25 bp, Homo sapien
acctggagctcagggcgtacggaac

SEQ ID NO: 2344653 - DNA, 25 bp, Homo sapien
gacatgctgtggatgtgagttatcc

SEQ ID NO: 2344654 - DNA, 25 bp, Homo sapien
tctgcatctaatgccttgtgactta

SEQ ID NO: 2344655 - DNA, 25 bp, Homo sapien
ttctatctagtcgagcccaaaggta

SEQ ID NO: 2344656 - DNA, 25 bp, Homo sapien
tgggttttctatctagtcgagccca

SEQ ID NO: 2344657 - DNA, 25 bp, Homo sapien
ttttctatctagtcgagcccaaagg

SEQ ID NO: 2344658 - DNA, 25 bp, Homo sapien
ctatctagtcgagcccaaaggtatg

SEQ ID NO: 2344659 - DNA, 25 bp, Homo sapien
tggtatccagcactccggagctggt

SEQ ID NO: 2344660 - DNA, 25 bp, Homo sapien
tccagcactccggagctggtttgaa

SEQ ID NO: 2344661 - DNA, 25 bp, Homo sapien
cagcactccggagctggtttgaagt

SEQ ID NO: 2344662 - DNA, 25 bp, Homo sapien
cactccggagctggtttgaagtcct

SEQ ID NO: 2344663 - DNA, 25 bp, Homo sapien
tctcaagcttcagggacaatggaca

SEQ ID NO: 2344664 - DNA, 25 bp, Homo sapien
gtgtttcccacattagtctcccgag

SEQ ID NO: 2344665 - DNA, 25 bp, Homo sapien
taatgggcactcaagacatgccggt

SEQ ID NO: 2344666 - DNA, 25 bp, Homo sapien
taaaagggcctttccgatctgagcc

SEQ ID NO: 2344667 - DNA, 25 bp, Homo sapien
cagaggaatgccagcaatactgttt

SEQ ID NO: 2344668 - DNA, 25 bp, Homo sapien
ctacagaggaatgccagcaatactg

SEQ ID NO: 2344669 - DNA, 25 bp, Homo sapien
acagaggaatgccagcaatactgtt

SEQ ID NO: 2344670 - DNA, 25 bp, Homo sapien
agaggaatgccagcaatactgtttg

SEQ ID NO: 2344671 - DNA, 25 bp, Homo sapien
cagtgtttgttctaagagatctgaa

SEQ ID NO: 2344672 - DNA, 25 bp, Homo sapien
gatatttgttcctatgagttccagt

SEQ ID NO: 2344673 - DNA, 25 bp, Homo sapien
tgaaagtggcactgcactaatttcc

SEQ ID NO: 2344674 - DNA, 25 bp, Homo sapien
tccaaaagtccagaatcatcaggat

SEQ ID NO: 2344675 - DNA, 25 bp, Homo sapien
tcttcaaaccaggacacgagatcat

SEQ ID NO: 2344676 - DNA, 25 bp, Homo sapien
atcttcaaaccaggacacgagatca

SEQ ID NO: 2344677 - DNA, 25 bp, Homo sapien
aatcttcaaaccaggacacgagatc

SEQ ID NO: 2344678 - DNA, 25 bp, Homo sapien
ccatcactgcaatgccacactattc

SEQ ID NO: 2344679 - DNA, 25 bp, Homo sapien
tcactgcaatgccacactattcctt

SEQ ID NO: 2344680 - DNA, 25 bp, Homo sapien
gcaatgccacactattccttcaatt

SEQ ID NO: 2344681 - DNA, 25 bp, Homo sapien
tgccacactattccttcaattttac

SEQ ID NO: 2344682 - DNA, 25 bp, Homo sapien
tagctggtcttctcctgacatatta

SEQ ID NO: 2344683 - DNA, 25 bp, Homo sapien
aaaaggtattagctttagcatacag

SEQ ID NO: 2344684 - DNA, 25 bp, Homo sapien
ggtaagactccactttatcttactg

SEQ ID NO: 2344685 - DNA, 25 bp, Homo sapien
ggtcttctcctgacatattacatat

SEQ ID NO: 2344686 - DNA, 25 bp, Homo sapien
tattatatctttgagtctaacaaat

SEQ ID NO: 2344687 - DNA, 25 bp, Homo sapien
tctggaattggccagcataagccaa

SEQ ID NO: 2344688 - DNA, 25 bp, Homo sapien
gagtctaacaaatttctgattatct

SEQ ID NO: 2344689 - DNA, 25 bp, Homo sapien
gcataagccaagatgatggcgatgg

SEQ ID NO: 2344690 - DNA, 25 bp, Homo sapien
gagttgaattaactagccctgttgc

SEQ ID NO: 2344691 - DNA, 25 bp, Homo sapien
catataggttatgaggttgagccgt

SEQ ID NO: 2344692 - DNA, 25 bp, Homo sapien
cagcctttgtccaagcttaggagct

SEQ ID NO: 2344693 - DNA, 25 bp, Homo sapien
tatacttggaaataagcagttctcc

SEQ ID NO: 2344694 - DNA, 25 bp, Homo sapien
aattatgttcatctgactattccta

SEQ ID NO: 2344695 - DNA, 25 bp, Homo sapien
tcctaacatattagagttaacaaaa

SEQ ID NO: 2344696 - DNA, 25 bp, Homo sapien
catctgactattcctaacatattag

SEQ ID NO: 2344697 - DNA, 25 bp, Homo sapien
aagttaattatgttcatctgactat

SEQ ID NO: 2344698 - DNA, 25 bp, Homo sapien
gagatcaggtgcatgtgcattaagg

SEQ ID NO: 2344699 - DNA, 25 bp, Homo sapien
catgtgcattaagggtcatatggcc

SEQ ID NO: 2344700 - DNA, 25 bp, Homo sapien
atgtgcattaagggtcatatggcca

SEQ ID NO: 2344701 - DNA, 25 bp, Homo sapien
tgtgcattaagggtcatatggccat

SEQ ID NO: 2344702 - DNA, 25 bp, Homo sapien
ctgcaataatttccaagctggtatc

SEQ ID NO: 2344703 - DNA, 25 bp, Homo sapien
tatctcagcttccactcttggatta

SEQ ID NO: 2344704 - DNA, 25 bp, Homo sapien
ataactgcaataatttccaagctgg

SEQ ID NO: 2344705 - DNA, 25 bp, Homo sapien
tggtatctcagcttccactcttgga

SEQ ID NO: 2344706 - DNA, 25 bp, Homo sapien
gaagtcattgaccagtgggatcctg

SEQ ID NO: 2344707 - DNA, 25 bp, Homo sapien
tcttattggaccctagcagtggctc

SEQ ID NO: 2344708 - DNA, 25 bp, Homo sapien
ggagtcttagtaccgtgaggctaca

SEQ ID NO: 2344709 - DNA, 25 bp, Homo sapien
tattaaaggacagcccagatggaca

SEQ ID NO: 2344710 - DNA, 25 bp, Homo sapien
tataactaaagatgaggacaagggc

SEQ ID NO: 2344711 - DNA, 25 bp, Homo sapien
gggaagattacagtcctgccttagg

SEQ ID NO: 2344712 - DNA, 25 bp, Homo sapien
gactcttttctgaggtgtgctcgga

SEQ ID NO: 2344713 - DNA, 25 bp, Homo sapien
gctcggaaggcctaacacactcaat

SEQ ID NO: 2344714 - DNA, 25 bp, Homo sapien
tataccttttactgaggacagaaca

SEQ ID NO: 2344715 - DNA, 25 bp, Homo sapien
gaatatggaccagaccctttgtagt

SEQ ID NO: 2344716 - DNA, 25 bp, Homo sapien
gaacaaactattctcccatggtccc

SEQ ID NO: 2344717 - DNA, 25 bp, Homo sapien
tattgtaatcaaaggagggaagcac

SEQ ID NO: 2344718 - DNA, 25 bp, Homo sapien
attatctatttatagtggctgaatg

SEQ ID NO: 2344719 - DNA, 25 bp, Homo sapien
ttatctatttatagtggctgaatga

SEQ ID NO: 2344720 - DNA, 25 bp, Homo sapien
tattatctatttatagtggctgaat

SEQ ID NO: 2344721 - DNA, 25 bp, Homo sapien
tggtctacctcgttcaggccaccag

SEQ ID NO: 2344722 - DNA, 25 bp, Homo sapien
gggatggcttaggaaaacctcagga

SEQ ID NO: 2344723 - DNA, 25 bp, Homo sapien
ggccaccagtttgcaggcgcctgag

SEQ ID NO: 2344724 - DNA, 25 bp, Homo sapien
gcgagtgacgccactgaaaccacag

SEQ ID NO: 2344725 - DNA, 25 bp, Homo sapien
ttctataagcacttctggacaaaaa

SEQ ID NO: 2344726 - DNA, 25 bp, Homo sapien
ttttctataagcacttctggacaaa

SEQ ID NO: 2344727 - DNA, 25 bp, Homo sapien
tttctataagcacttctggacaaaa

SEQ ID NO: 2344728 - DNA, 25 bp, Homo sapien
cttttctataagcacttctggacaa

SEQ ID NO: 2344729 - DNA, 25 bp, Homo sapien
aagtctttgttatccagtattgctg

SEQ ID NO: 2344730 - DNA, 25 bp, Homo sapien
gcagtaaccacacctactattaagg

SEQ ID NO: 2344731 - DNA, 25 bp, Homo sapien
ttaaaggtgtagatggatgcaagtc

SEQ ID NO: 2344732 - DNA, 25 bp, Homo sapien
gttccccagaagtcattttgaaata

SEQ ID NO: 2344733 - DNA, 25 bp, Homo sapien
attttcaatctgcaaagctgagaaa

SEQ ID NO: 2344734 - DNA, 25 bp, Homo sapien
cttggtccaacagggtacaaaagct

SEQ ID NO: 2344735 - DNA, 25 bp, Homo sapien
ttggtccaacagggtacaaaagctc

SEQ ID NO: 2344736 - DNA, 25 bp, Homo sapien
ggtccaacagggtacaaaagctcat

SEQ ID NO: 2344737 - DNA, 25 bp, Homo sapien
tggtccaacagggtacaaaagctca

SEQ ID NO: 2344738 - DNA, 25 bp, Homo sapien
aaatgtcaatactgttaagggacgg

SEQ ID NO: 2344739 - DNA, 25 bp, Homo sapien
tgggtgcactgcaaaaagtaaagaa

SEQ ID NO: 2344740 - DNA, 25 bp, Homo sapien
gaaatatcacactaaccacagcatg

SEQ ID NO: 2344741 - DNA, 25 bp, Homo sapien
taaagaagcaatcacactactcttg

SEQ ID NO: 2344742 - DNA, 25 bp, Homo sapien
ccttttgatctggtatatgacaaaa

SEQ ID NO: 2344743 - DNA, 25 bp, Homo sapien
agatagatgacaaaagttctgctct

SEQ ID NO: 2344744 - DNA, 25 bp, Homo sapien
gtccttttgatctggtatatgacaa

SEQ ID NO: 2344745 - DNA, 25 bp, Homo sapien
aaaaagatagatgacaaaagttctg

SEQ ID NO: 2344746 - DNA, 25 bp, Homo sapien
gcaccaagtacaagtatttggaaca

SEQ ID NO: 2344747 - DNA, 25 bp, Homo sapien
aaagctatttcagttagaacaggga

SEQ ID NO: 2344748 - DNA, 25 bp, Homo sapien
aaatacttaagctgaggcctgataa

SEQ ID NO: 2344749 - DNA, 25 bp, Homo sapien
attcttccgggtaggtgggactgca

SEQ ID NO: 2344750 - DNA, 25 bp, Homo sapien
tcatcaactttaagtaagtgtctac

SEQ ID NO: 2344751 - DNA, 25 bp, Homo sapien
tctggtagtatgactgtgtgatctc

SEQ ID NO: 2344752 - DNA, 25 bp, Homo sapien
tgaaagtggttaacaataggcactt

SEQ ID NO: 2344753 - DNA, 25 bp, Homo sapien
acttgtgagtttgggcagcttttcc

SEQ ID NO: 2344754 - DNA, 25 bp, Homo sapien
agtgctatttctcattaattagtag

SEQ ID NO: 2344755 - DNA, 25 bp, Homo sapien
caaaggtagggtggtgaatttggag

SEQ ID NO: 2344756 - DNA, 25 bp, Homo sapien
gaaatttacaggtttgtgtgtcata

SEQ ID NO: 2344757 - DNA, 25 bp, Homo sapien
taaactttgtgattccatatccata

SEQ ID NO: 2344758 - DNA, 25 bp, Homo sapien
cactgtcaaggcaattggagtccat

SEQ ID NO: 2344759 - DNA, 25 bp, Homo sapien
taatgttgcaacagccactaaaaac

SEQ ID NO: 2344760 - DNA, 25 bp, Homo sapien
gcaaattcctacaactgttattcct

SEQ ID NO: 2344761 - DNA, 25 bp, Homo sapien
ttcatacacacagcaaattcctaca

SEQ ID NO: 2344762 - DNA, 25 bp, Homo sapien
gaagttgggattgaataacctggac

SEQ ID NO: 2344763 - DNA, 25 bp, Homo sapien
taacctggactctaatcacaacaag

SEQ ID NO: 2344764 - DNA, 25 bp, Homo sapien
aaaatggaatgctaccctttccacg

SEQ ID NO: 2344765 - DNA, 25 bp, Homo sapien
aactgtccagcagtagtacatagta

SEQ ID NO: 2344766 - DNA, 25 bp, Homo sapien
gaatatctagtaatgactctataag

SEQ ID NO: 2344767 - DNA, 25 bp, Homo sapien
tgatactgaatactcccaacatccc

SEQ ID NO: 2344768 - DNA, 25 bp, Homo sapien
taaatgtggccagatttcgaatatc

SEQ ID NO: 2344769 - DNA, 25 bp, Homo sapien
ggtattgttcccatggtccaatcac

SEQ ID NO: 2344770 - DNA, 25 bp, Homo sapien
aaaaggttcgatgcaggaataaatg

SEQ ID NO: 2344771 - DNA, 25 bp, Homo sapien
tactcgctcggcaacaacaaatcca

SEQ ID NO: 2344772 - DNA, 25 bp, Homo sapien
gaaccccatgctgggaacatataat

SEQ ID NO: 2344773 - DNA, 25 bp, Homo sapien
aatacagaaccccatgctgggaaca

SEQ ID NO: 2344774 - DNA, 25 bp, Homo sapien
ttttaaggaatgagtgagtatcacc

SEQ ID NO: 2344775 - DNA, 25 bp, Homo sapien
cttcaaggctgacataaacaatgta

SEQ ID NO: 2344776 - DNA, 25 bp, Homo sapien
agacaaatccaggatagctttttaa

SEQ ID NO: 2344777 - DNA, 25 bp, Homo sapien
caatgtatattcagactcccaatcc

SEQ ID NO: 2344778 - DNA, 25 bp, Homo sapien
gagcatgacccacattattccaaag

SEQ ID NO: 2344779 - DNA, 25 bp, Homo sapien
gctgaacatgggtagcctgtaagaa

SEQ ID NO: 2344780 - DNA, 25 bp, Homo sapien
cttttcattttccagagcatgaccc

SEQ ID NO: 2344781 - DNA, 25 bp, Homo sapien
taagaagtatttcaaagctctctca

SEQ ID NO: 2344782 - DNA, 25 bp, Homo sapien
tcctacattcatatgggcaccaata

SEQ ID NO: 2344783 - DNA, 25 bp, Homo sapien
tataagttcttcctacattcatatg

SEQ ID NO: 2344784 - DNA, 25 bp, Homo sapien
gaggcatcagtgatttagccatcat

SEQ ID NO: 2344785 - DNA, 25 bp, Homo sapien
tagccatcatgtaagattcttcagc

SEQ ID NO: 2344786 - DNA, 25 bp, Homo sapien
tgcttgacggtacagctgatctgct

SEQ ID NO: 2344787 - DNA, 25 bp, Homo sapien
caggttagccagattgatataaaca

SEQ ID NO: 2344788 - DNA, 25 bp, Homo sapien
tccagtcgggactcatttgctcgga

SEQ ID NO: 2344789 - DNA, 25 bp, Homo sapien
ggctgcatattttttaccaggaata

SEQ ID NO: 2344790 - DNA, 25 bp, Homo sapien
tctgtccagctctagtgctttaaga

SEQ ID NO: 2344791 - DNA, 25 bp, Homo sapien
ggatttagttccagagcacgattaa

SEQ ID NO: 2344792 - DNA, 25 bp, Homo sapien
tgattcttgcattactatagcagag

SEQ ID NO: 2344793 - DNA, 25 bp, Homo sapien
gccaagttgtaccaaagatctgcat

SEQ ID NO: 2344794 - DNA, 25 bp, Homo sapien
tacaggagagccagattaaacaaag

SEQ ID NO: 2344795 - DNA, 25 bp, Homo sapien
taaacaaagcacttcggaagtcggc

SEQ ID NO: 2344796 - DNA, 25 bp, Homo sapien
tgtcatccatggcaagcattcccaa

SEQ ID NO: 2344797 - DNA, 25 bp, Homo sapien
aaatgaggcccttgatatgatcagg

SEQ ID NO: 2344798 - DNA, 25 bp, Homo sapien
ggtgtctcttcgtctccattttttc

SEQ ID NO: 2344799 - DNA, 25 bp, Homo sapien
tctataaaactagatgaggaaatct

SEQ ID NO: 2344800 - DNA, 25 bp, Homo sapien
tccacacttgaaatcttactggttg

SEQ ID NO: 2344801 - DNA, 25 bp, Homo sapien
ctatttgtgtttgtctggattcacc

SEQ ID NO: 2344802 - DNA, 25 bp, Homo sapien
taaagattacattgccagaaacacc

SEQ ID NO: 2344803 - DNA, 25 bp, Homo sapien
tatacatcctgggataatacaggtc

SEQ ID NO: 2344804 - DNA, 25 bp, Homo sapien
gctcatgattgaccattaggaaccc

SEQ ID NO: 2344805 - DNA, 25 bp, Homo sapien
tattttgatcctacttcaaggcagc

SEQ ID NO: 2344806 - DNA, 25 bp, Homo sapien
cagcacatgttggatttgtcctcaa

SEQ ID NO: 2344807 - DNA, 25 bp, Homo sapien
taaaatccaggttaagactacagag

SEQ ID NO: 2344808 - DNA, 25 bp, Homo sapien
ggagtcacaagccataacctaagaa

SEQ ID NO: 2344809 - DNA, 25 bp, Homo sapien
tctatggcagatccttagggaacct

SEQ ID NO: 2344810 - DNA, 25 bp, Homo sapien
tgaaggagtaaggtaacactgcccc

SEQ ID NO: 2344811 - DNA, 25 bp, Homo sapien
tagtgaactgaccttaaatgtgccc

SEQ ID NO: 2344812 - DNA, 25 bp, Homo sapien
tacacaagggctagtttgatggaac

SEQ ID NO: 2344813 - DNA, 25 bp, Homo sapien
aacatgtaggtgcaattccagaaac

SEQ ID NO: 2344814 - DNA, 25 bp, Homo sapien
gaatacttagaaatatggtacacag

SEQ ID NO: 2344815 - DNA, 25 bp, Homo sapien
ttctgtaacatgaagttgagagttc

SEQ ID NO: 2344816 - DNA, 25 bp, Homo sapien
ctctacatgaatggctggcggcttc

SEQ ID NO: 2344817 - DNA, 25 bp, Homo sapien
ccatctagttatccaattaggaggt

SEQ ID NO: 2344818 - DNA, 25 bp, Homo sapien
gaggcaataccaggcacatatagaa

SEQ ID NO: 2344819 - DNA, 25 bp, Homo sapien
ccctgatggcagtgaacagcacaag

SEQ ID NO: 2344820 - DNA, 25 bp, Homo sapien
ggcagaaacatgaaagcatcacgtt

SEQ ID NO: 2344821 - DNA, 25 bp, Homo sapien
cattttatgctacctccctgatggc

SEQ ID NO: 2344822 - DNA, 25 bp, Homo sapien
tgaacatggttgatccactggagac

SEQ ID NO: 2344823 - DNA, 25 bp, Homo sapien
gaattttcacttgggacactgctta

SEQ ID NO: 2344824 - DNA, 25 bp, Homo sapien
cagacacttgactccaacccatgag

SEQ ID NO: 2344825 - DNA, 25 bp, Homo sapien
aagctccattgggtagaggtgccca

SEQ ID NO: 2344826 - DNA, 25 bp, Homo sapien
tgacacctccaactaatatcctgat

SEQ ID NO: 2344827 - DNA, 25 bp, Homo sapien
ctaatatcctgatttatagcctgaa

SEQ ID NO: 2344828 - DNA, 25 bp, Homo sapien
tcatttgacacctccaactaatatc

SEQ ID NO: 2344829 - DNA, 25 bp, Homo sapien
aatatcctgatttatagcctgaaaa

SEQ ID NO: 2344830 - DNA, 25 bp, Homo sapien
gagtctgaagaaagctaaattgctc

SEQ ID NO: 2344831 - DNA, 25 bp, Homo sapien
gagtgttgaattgagaagagtctga

SEQ ID NO: 2344832 - DNA, 25 bp, Homo sapien
caaaatattggttgtagagtgttga

SEQ ID NO: 2344833 - DNA, 25 bp, Homo sapien
aaatccataagggatataggataca

SEQ ID NO: 2344834 - DNA, 25 bp, Homo sapien
ctctccctgatgacggtatgaaagt

SEQ ID NO: 2344835 - DNA, 25 bp, Homo sapien
taggaaatcgaaagtgtttgagaaa

SEQ ID NO: 2344836 - DNA, 25 bp, Homo sapien
tgaaagtaataggaaatcgaaagtg

SEQ ID NO: 2344837 - DNA, 25 bp, Homo sapien
ccctgatgacggtatgaaagtaata

SEQ ID NO: 2344838 - DNA, 25 bp, Homo sapien
cacctccttgtgcactgaatgacgc

SEQ ID NO: 2344839 - DNA, 25 bp, Homo sapien
gatatcgtggtcttttgtgaatggc

SEQ ID NO: 2344840 - DNA, 25 bp, Homo sapien
tgagtgagctttaaataatctggcc

SEQ ID NO: 2344841 - DNA, 25 bp, Homo sapien
tggctatgtgttacagaaatctgag

SEQ ID NO: 2344842 - DNA, 25 bp, Homo sapien
gtttgatctgtaattgactgaataa

SEQ ID NO: 2344843 - DNA, 25 bp, Homo sapien
tagtgaaaatggggaaagagtagga

SEQ ID NO: 2344844 - DNA, 25 bp, Homo sapien
tgaaaatggggaaagagtaggacaa

SEQ ID NO: 2344845 - DNA, 25 bp, Homo sapien
tgatctgtaattgactgaataatca

SEQ ID NO: 2344846 - DNA, 25 bp, Homo sapien
catccccattaaagtcgctctgttg

SEQ ID NO: 2344847 - DNA, 25 bp, Homo sapien
ccattaaagtcgctctgttggttta

SEQ ID NO: 2344848 - DNA, 25 bp, Homo sapien
ttcttttgcactcatgggtaaactc

SEQ ID NO: 2344849 - DNA, 25 bp, Homo sapien
ttggtttattcttttgcactcatgg

SEQ ID NO: 2344850 - DNA, 25 bp, Homo sapien
taggcttcttgttgataccatgacc

SEQ ID NO: 2344851 - DNA, 25 bp, Homo sapien
ttcaagtccacgtctctaggcttct

SEQ ID NO: 2344852 - DNA, 25 bp, Homo sapien
tcttgttgataccatgaccttctga

SEQ ID NO: 2344853 - DNA, 25 bp, Homo sapien
tccacgtctctaggcttcttgttga

SEQ ID NO: 2344854 - DNA, 25 bp, Homo sapien
acagttccttattgcttagagggcc

SEQ ID NO: 2344855 - DNA, 25 bp, Homo sapien
cttagagggcctcaggaaaacttgc

SEQ ID NO: 2344856 - DNA, 25 bp, Homo sapien
ccttctgcatagggcagcaggatgg

SEQ ID NO: 2344857 - DNA, 25 bp, Homo sapien
taccttctgcatagggcagcaggat

SEQ ID NO: 2344858 - DNA, 25 bp, Homo sapien
aatttagatggatgcgcagatatac

SEQ ID NO: 2344859 - DNA, 25 bp, Homo sapien
gatataccctcagttcagtcataga

SEQ ID NO: 2344860 - DNA, 25 bp, Homo sapien
tatgtgattatagtgtccacttgcc

SEQ ID NO: 2344861 - DNA, 25 bp, Homo sapien
tgtatgtcgacactattctaaatag

SEQ ID NO: 2344862 - DNA, 25 bp, Homo sapien
cttgattaacatgtccgtagcatga

SEQ ID NO: 2344863 - DNA, 25 bp, Homo sapien
catactcttgattaacatgtccgta

SEQ ID NO: 2344864 - DNA, 25 bp, Homo sapien
taacatgtccgtagcatgaatagca

SEQ ID NO: 2344865 - DNA, 25 bp, Homo sapien
tgtccgtagcatgaatagcaccctc

SEQ ID NO: 2344866 - DNA, 25 bp, Homo sapien
cacggaacataaacgcatggcagac

SEQ ID NO: 2344867 - DNA, 25 bp, Homo sapien
ggatgcacggaacataaacgcatgg

SEQ ID NO: 2344868 - DNA, 25 bp, Homo sapien
aaaggagagtaagatgtggctagaa

SEQ ID NO: 2344869 - DNA, 25 bp, Homo sapien
tggtatcattatctcctgtcccgtc

SEQ ID NO: 2344870 - DNA, 25 bp, Homo sapien
agacaactaccacagaaactaaagg

SEQ ID NO: 2344871 - DNA, 25 bp, Homo sapien
gatcctaggcaagcatactcataaa

SEQ ID NO: 2344872 - DNA, 25 bp, Homo sapien
cggaatgaattggtgaaagctactc

SEQ ID NO: 2344873 - DNA, 25 bp, Homo sapien
gttcttacttgccagagatcctagg

SEQ ID NO: 2344874 - DNA, 25 bp, Homo sapien
gacattccagtcaaaactagtttcc

SEQ ID NO: 2344875 - DNA, 25 bp, Homo sapien
tctccttgcaaatcattgacgatat

SEQ ID NO: 2344876 - DNA, 25 bp, Homo sapien
ttcctctcttacaagcaggcagatc

SEQ ID NO: 2344877 - DNA, 25 bp, Homo sapien
taatcgtggaggaattgaaaaacag

SEQ ID NO: 2344878 - DNA, 25 bp, Homo sapien
tatcgttatcgttaccagttccttg

SEQ ID NO: 2344879 - DNA, 25 bp, Homo sapien
ctttttcagtcctttatcgttatcg

SEQ ID NO: 2344880 - DNA, 25 bp, Homo sapien
cagtcctttatcgttatcgttacca

SEQ ID NO: 2344881 - DNA, 25 bp, Homo sapien
cgttaccagttccttgctgccacat

SEQ ID NO: 2344882 - DNA, 25 bp, Homo sapien
gccaccaccatgggcaagaaaaaca

SEQ ID NO: 2344883 - DNA, 25 bp, Homo sapien
cagaaccaggggtctcaccctttgt

SEQ ID NO: 2344884 - DNA, 25 bp, Homo sapien
ggccacgtttagagcattggacaga

SEQ ID NO: 2344885 - DNA, 25 bp, Homo sapien
gaaaaacaaggccacgtttagagca

SEQ ID NO: 2344886 - DNA, 25 bp, Homo sapien
ggcaactgccctcattaaggtcagc

SEQ ID NO: 2344887 - DNA, 25 bp, Homo sapien
ctgtagtccatccactgtgattgac

SEQ ID NO: 2344888 - DNA, 25 bp, Homo sapien
tgtagtaatatacccttgaaattcc

SEQ ID NO: 2344889 - DNA, 25 bp, Homo sapien
gacttttagttccatcaactcaatg

SEQ ID NO: 2344890 - DNA, 25 bp, Homo sapien
tttctatcatgtgcccaagatcgcg

SEQ ID NO: 2344891 - DNA, 25 bp, Homo sapien
ggattcagagctcgcattcccaagc

SEQ ID NO: 2344892 - DNA, 25 bp, Homo sapien
tatgaaacagattcggattcagagc

SEQ ID NO: 2344893 - DNA, 25 bp, Homo sapien
caagatcgcggcaccaatatgtggt

SEQ ID NO: 2344894 - DNA, 25 bp, Homo sapien
aactcatcggtgctcacttgaaaaa

SEQ ID NO: 2344895 - DNA, 25 bp, Homo sapien
tgaccatgtaaaaggacatgaaagg

SEQ ID NO: 2344896 - DNA, 25 bp, Homo sapien
ggcatccccactgcataattgcatc

SEQ ID NO: 2344897 - DNA, 25 bp, Homo sapien
tcacctttgcagaaagggcatcccc

SEQ ID NO: 2344898 - DNA, 25 bp, Homo sapien
aaacaaagtttagaattgaggcaat

SEQ ID NO: 2344899 - DNA, 25 bp, Homo sapien
tgcccactgagctatccactaaaac

SEQ ID NO: 2344900 - DNA, 25 bp, Homo sapien
cagctggaccctcctcaagctagga

SEQ ID NO: 2344901 - DNA, 25 bp, Homo sapien
cagggccacaaccatgaagataatg

SEQ ID NO: 2344902 - DNA, 25 bp, Homo sapien
agggccgccacggtgcccctatcca

SEQ ID NO: 2344903 - DNA, 25 bp, Homo sapien
ccctatccacagttctcttcaccat

SEQ ID NO: 2344904 - DNA, 25 bp, Homo sapien
ccacggtgcccctatccacagttct

SEQ ID NO: 2344905 - DNA, 25 bp, Homo sapien
gtgcccctatccacagttctcttca

SEQ ID NO: 2344906 - DNA, 25 bp, Homo sapien
tagtgattgagataattcccagtgc

SEQ ID NO: 2344907 - DNA, 25 bp, Homo sapien
gctaaattctgcattatacataaag

SEQ ID NO: 2344908 - DNA, 25 bp, Homo sapien
taaaataggcacctctgaatgatag

SEQ ID NO: 2344909 - DNA, 25 bp, Homo sapien
cataaagcactgtgggtaaagcgct

SEQ ID NO: 2344910 - DNA, 25 bp, Homo sapien
cactgtttgtgctggatcgcagcgc

SEQ ID NO: 2344911 - DNA, 25 bp, Homo sapien
tccagaacagctaaacggagtcgcc

SEQ ID NO: 2344912 - DNA, 25 bp, Homo sapien
gttcgtgcaatatgctggagctcca

SEQ ID NO: 2344913 - DNA, 25 bp, Homo sapien
tacccaatgcgtggactatctgccg

SEQ ID NO: 2344914 - DNA, 25 bp, Homo sapien
ctcccgattcttccctccgcgccct

SEQ ID NO: 2344915 - DNA, 25 bp, Homo sapien
tggccgccctcccgattcttccctc

SEQ ID NO: 2344916 - DNA, 25 bp, Homo sapien
cccgattcttccctccgcgcccttg

SEQ ID NO: 2344917 - DNA, 25 bp, Homo sapien
cgccctcccgattcttccctccgcg

SEQ ID NO: 2344918 - DNA, 25 bp, Homo sapien
tgaattctttgctccgaacctcccg

SEQ ID NO: 2344919 - DNA, 25 bp, Homo sapien
tagctgcagggtaccaagcttcgcc

SEQ ID NO: 2344920 - DNA, 25 bp, Homo sapien
tctctggcgcgcgaggtatttcgtc

SEQ ID NO: 2344921 - DNA, 25 bp, Homo sapien
ccgactttgtataacagagggagct

SEQ ID NO: 2344922 - DNA, 25 bp, Homo sapien
gtgaaataaacaagcttcgccctga

SEQ ID NO: 2344923 - DNA, 25 bp, Homo sapien
ggagtgaaataaacaagcttcgccc

SEQ ID NO: 2344924 - DNA, 25 bp, Homo sapien
gagtgaaataaacaagcttcgccct

SEQ ID NO: 2344925 - DNA, 25 bp, Homo sapien
agtgaaataaacaagcttcgccctg

SEQ ID NO: 2344926 - DNA, 25 bp, Homo sapien
cttgtgagactgaggcgggataatc

SEQ ID NO: 2344927 - DNA, 25 bp, Homo sapien
gctacttgtgagactgaggcgggat

SEQ ID NO: 2344928 - DNA, 25 bp, Homo sapien
ttgtgagactgaggcgggataatcg

SEQ ID NO: 2344929 - DNA, 25 bp, Homo sapien
tacttgtgagactgaggcgggataa

SEQ ID NO: 2344930 - DNA, 25 bp, Homo sapien
ttctagttaacaccattggaaacca

SEQ ID NO: 2344931 - DNA, 25 bp, Homo sapien
tctttgttcgcaatgtcctacagtg

SEQ ID NO: 2344932 - DNA, 25 bp, Homo sapien
taatccagattttagccaactctct

SEQ ID NO: 2344933 - DNA, 25 bp, Homo sapien
taagtggacagtttcagtgcaagga

SEQ ID NO: 2344934 - DNA, 25 bp, Homo sapien
caattaagaatagtatattagtccg

SEQ ID NO: 2344935 - DNA, 25 bp, Homo sapien
tgtgcgggcatatcaattaagaata

SEQ ID NO: 2344936 - DNA, 25 bp, Homo sapien
gtatatatgttgctatgtgtctcta

SEQ ID NO: 2344937 - DNA, 25 bp, Homo sapien
tgtctctatatttgtgcgggcatat

SEQ ID NO: 2344938 - DNA, 25 bp, Homo sapien
cagttagacgttgactaaggctgga

SEQ ID NO: 2344939 - DNA, 25 bp, Homo sapien
ggttgaaagtctctcacgtggttgc

SEQ ID NO: 2344940 - DNA, 25 bp, Homo sapien
gctccactgcatagttctggttgaa

SEQ ID NO: 2344941 - DNA, 25 bp, Homo sapien
ggcccttggcctaggaagactcaaa

SEQ ID NO: 2344942 - DNA, 25 bp, Homo sapien
caaggaaacaatgtaagtcactgac

SEQ ID NO: 2344943 - DNA, 25 bp, Homo sapien
cacatgccatttgttcttgtcctag

SEQ ID NO: 2344944 - DNA, 25 bp, Homo sapien
tgattgtagctctgtccgggcagcc

SEQ ID NO: 2344945 - DNA, 25 bp, Homo sapien
ccagcatcttcgtctaagtatagac

SEQ ID NO: 2344946 - DNA, 25 bp, Homo sapien
ctttctttgttgctggccaactcat

SEQ ID NO: 2344947 - DNA, 25 bp, Homo sapien
tcttgaaaacatgctgctactgcct

SEQ ID NO: 2344948 - DNA, 25 bp, Homo sapien
tggccaactcatagaattcaagtac

SEQ ID NO: 2344949 - DNA, 25 bp, Homo sapien
aagtactggtggcatctcttgaaaa

SEQ ID NO: 2344950 - DNA, 25 bp, Homo sapien
ctggagaatgcttttatattccact

SEQ ID NO: 2344951 - DNA, 25 bp, Homo sapien
ttctcagcctgactcccattgattt

SEQ ID NO: 2344952 - DNA, 25 bp, Homo sapien
tttctcagcctgactcccattgatt

SEQ ID NO: 2344953 - DNA, 25 bp, Homo sapien
ctttctcagcctgactcccattgat

SEQ ID NO: 2344954 - DNA, 25 bp, Homo sapien
tctcagcctgactcccattgatttt

SEQ ID NO: 2344955 - DNA, 25 bp, Homo sapien
gagcaagtggctgccagatgctaaa

SEQ ID NO: 2344956 - DNA, 25 bp, Homo sapien
ctaaaagcattttgggactccaagc

SEQ ID NO: 2344957 - DNA, 25 bp, Homo sapien
gatgctaaaagcattttgggactcc

SEQ ID NO: 2344958 - DNA, 25 bp, Homo sapien
agcagcaacatcatatcagcagttg

SEQ ID NO: 2344959 - DNA, 25 bp, Homo sapien
gattggaatactggttatatagctg

SEQ ID NO: 2344960 - DNA, 25 bp, Homo sapien
tatagctgtatacattcatcaatga

SEQ ID NO: 2344961 - DNA, 25 bp, Homo sapien
caaagtgtacctcaatatagttggt

SEQ ID NO: 2344962 - DNA, 25 bp, Homo sapien
tggcctgacacaatcctcatcttgg

SEQ ID NO: 2344963 - DNA, 25 bp, Homo sapien
tgctcttggtcgagtggccttccta

SEQ ID NO: 2344964 - DNA, 25 bp, Homo sapien
tccctgctcttggtcgagtggcctt

SEQ ID NO: 2344965 - DNA, 25 bp, Homo sapien
gagtggccttcctactacacgctat

SEQ ID NO: 2344966 - DNA, 25 bp, Homo sapien
cctactacacgctatttcttcttga

SEQ ID NO: 2344967 - DNA, 25 bp, Homo sapien
actgccatcaatctctccaacaaga

SEQ ID NO: 2344968 - DNA, 25 bp, Homo sapien
caatctctccaacaagagaagtaat

SEQ ID NO: 2344969 - DNA, 25 bp, Homo sapien
caggccttatgtttctccactgcct

SEQ ID NO: 2344970 - DNA, 25 bp, Homo sapien
gtaagtaagtgtccctttagtgaca

SEQ ID NO: 2344971 - DNA, 25 bp, Homo sapien
ccaaggtcatcaggatccccaggtt

SEQ ID NO: 2344972 - DNA, 25 bp, Homo sapien
tccaaggtcatcaggatccccaggt

SEQ ID NO: 2344973 - DNA, 25 bp, Homo sapien
ctccaaggtcatcaggatccccagg

SEQ ID NO: 2344974 - DNA, 25 bp, Homo sapien
acggtgagatacactgtcagaggca

SEQ ID NO: 2344975 - DNA, 25 bp, Homo sapien
attcaacacggtgagatacactgtc

SEQ ID NO: 2344976 - DNA, 25 bp, Homo sapien
tcaaacactagaagcattcaacacg

SEQ ID NO: 2344977 - DNA, 25 bp, Homo sapien
caaacactagaagcattcaacacgg

SEQ ID NO: 2344978 - DNA, 25 bp, Homo sapien
cagttggtgaactaatgtttagcat

SEQ ID NO: 2344979 - DNA, 25 bp, Homo sapien
ggtgaactaatgtttagcatattta

SEQ ID NO: 2344980 - DNA, 25 bp, Homo sapien
ttttcttctctaatgaagtaagaaa

SEQ ID NO: 2344981 - DNA, 25 bp, Homo sapien
aagcagttggtgaactaatgtttag

SEQ ID NO: 2344982 - DNA, 25 bp, Homo sapien
gacctccatgagtgcataatacttg

SEQ ID NO: 2344983 - DNA, 25 bp, Homo sapien
gatagacctccatgagtgcataata

SEQ ID NO: 2344984 - DNA, 25 bp, Homo sapien
tccatgagtgcataatacttgccat

SEQ ID NO: 2344985 - DNA, 25 bp, Homo sapien
cctccatgagtgcataatacttgcc

SEQ ID NO: 2344986 - DNA, 25 bp, Homo sapien
gcagctgtagctccttaccttcaaa

SEQ ID NO: 2344987 - DNA, 25 bp, Homo sapien
tcaagccgatgagccagaaaccatg

SEQ ID NO: 2344988 - DNA, 25 bp, Homo sapien
caaaagcagaaatgagctagtgcct

SEQ ID NO: 2344989 - DNA, 25 bp, Homo sapien
catagccttgccctaatcttgcagg

SEQ ID NO: 2344990 - DNA, 25 bp, Homo sapien
ctattcaacagcagttgctaaagga

SEQ ID NO: 2344991 - DNA, 25 bp, Homo sapien
tattcaacagcagttgctaaaggat

SEQ ID NO: 2344992 - DNA, 25 bp, Homo sapien
ttgcagaaccaacacccacagaaaa

SEQ ID NO: 2344993 - DNA, 25 bp, Homo sapien
gttttttgcagaaccaacacccaca

SEQ ID NO: 2344994 - DNA, 25 bp, Homo sapien
caacatttcttatggtaatctaaac

SEQ ID NO: 2344995 - DNA, 25 bp, Homo sapien
tgcaggaataactgcctctgtgtca

SEQ ID NO: 2344996 - DNA, 25 bp, Homo sapien
tcggtttatccttcccatggaccat

SEQ ID NO: 2344997 - DNA, 25 bp, Homo sapien
ttcggtttatccttcccatggacca

SEQ ID NO: 2344998 - DNA, 25 bp, Homo sapien
ctccttcggtttatccttcccatgg

SEQ ID NO: 2344999 - DNA, 25 bp, Homo sapien
tccttcggtttatccttcccatgga

SEQ ID NO: 2345000 - DNA, 25 bp, Homo sapien
aactgcgccatgaagattttaactg

SEQ ID NO: 2345001 - DNA, 25 bp, Homo sapien
ctgattcagggtaaagtgtataact

SEQ ID NO: 2345002 - DNA, 25 bp, Homo sapien
aatgtccttcagaaaccttgtggca

SEQ ID NO: 2345003 - DNA, 25 bp, Homo sapien
taactggcgtcaaaggcatgtaatc

SEQ ID NO: 2345004 - DNA, 25 bp, Homo sapien
aagaagccgtggcagatttttatgc

SEQ ID NO: 2345005 - DNA, 25 bp, Homo sapien
gaagccgtggcagatttttatgcca

SEQ ID NO: 2345006 - DNA, 25 bp, Homo sapien
agaagccgtggcagatttttatgcc

SEQ ID NO: 2345007 - DNA, 25 bp, Homo sapien
aagccgtggcagatttttatgccaa

SEQ ID NO: 2345008 - DNA, 25 bp, Homo sapien
tatctttgcatagttatcaccaagc

SEQ ID NO: 2345009 - DNA, 25 bp, Homo sapien
tcatatctttgcatagttatcacca

SEQ ID NO: 2345010 - DNA, 25 bp, Homo sapien
tttgcatagttatcaccaagctgtg

SEQ ID NO: 2345011 - DNA, 25 bp, Homo sapien
tgcatagttatcaccaagctgtgtt

SEQ ID NO: 2345012 - DNA, 25 bp, Homo sapien
ggaacttgtgatacatggtcataca

SEQ ID NO: 2345013 - DNA, 25 bp, Homo sapien
gcctttcttgcctggtcaccttggt

SEQ ID NO: 2345014 - DNA, 25 bp, Homo sapien
actggcctggctgtttaccatcagc

SEQ ID NO: 2345015 - DNA, 25 bp, Homo sapien
cacggccaatgctggaaattgagtc

SEQ ID NO: 2345016 - DNA, 25 bp, Homo sapien
tcattagctaatgtcctcttaaaag

SEQ ID NO: 2345017 - DNA, 25 bp, Homo sapien
ttagctaatgtcctcttaaaagagg

SEQ ID NO: 2345018 - DNA, 25 bp, Homo sapien
ggtttataggtggtataaaatagca

SEQ ID NO: 2345019 - DNA, 25 bp, Homo sapien
cagtccttgggtgtgatattctctg

SEQ ID NO: 2345020 - DNA, 25 bp, Homo sapien
aaatgtaaacagtgcactgaatggg

SEQ ID NO: 2345021 - DNA, 25 bp, Homo sapien
caaactggtgtacttaatgtgattt

SEQ ID NO: 2345022 - DNA, 25 bp, Homo sapien
ttcaaactggtgtacttaatgtgat

SEQ ID NO: 2345023 - DNA, 25 bp, Homo sapien
taaacagtgcactgaatgggtgttc

SEQ ID NO: 2345024 - DNA, 25 bp, Homo sapien
gctcgaatgtaatgccttacataaa

SEQ ID NO: 2345025 - DNA, 25 bp, Homo sapien
ctcgaatgtaatgccttacataaac

SEQ ID NO: 2345026 - DNA, 25 bp, Homo sapien
aagctcgaatgtaatgccttacata

SEQ ID NO: 2345027 - DNA, 25 bp, Homo sapien
ttaagctcgaatgtaatgccttaca

SEQ ID NO: 2345028 - DNA, 25 bp, Homo sapien
gcctctacttgctggaattttactt

SEQ ID NO: 2345029 - DNA, 25 bp, Homo sapien
gaaatgcctgggcatataccagaat

SEQ ID NO: 2345030 - DNA, 25 bp, Homo sapien
tgtctgacagtgtgatgcaacctaa

SEQ ID NO: 2345031 - DNA, 25 bp, Homo sapien
tagggattgtttgatctgagtcaat

SEQ ID NO: 2345032 - DNA, 25 bp, Homo sapien
tagagtcagatcctgaaggaagccc

SEQ ID NO: 2345033 - DNA, 25 bp, Homo sapien
taaggctagagcttagagtctgcgg

SEQ ID NO: 2345034 - DNA, 25 bp, Homo sapien
gactctatgggaaaagctacaggga

SEQ ID NO: 2345035 - DNA, 25 bp, Homo sapien
gtcacaggaaacataggctagagtc

SEQ ID NO: 2345036 - DNA, 25 bp, Homo sapien
gaagaatttgcaaagccctcaggag

SEQ ID NO: 2345037 - DNA, 25 bp, Homo sapien
agtgctgggatgtattctccagaaa

SEQ ID NO: 2345038 - DNA, 25 bp, Homo sapien
tctccagaaatctgcgtccatgaag

SEQ ID NO: 2345039 - DNA, 25 bp, Homo sapien
caaagccctcaggagttaatccatc

SEQ ID NO: 2345040 - DNA, 25 bp, Homo sapien
gatgacttcagtacactagatcctt

SEQ ID NO: 2345041 - DNA, 25 bp, Homo sapien
tgctagatgacttcagtacactaga

SEQ ID NO: 2345042 - DNA, 25 bp, Homo sapien
tcagtacactagatcctttaacatc

SEQ ID NO: 2345043 - DNA, 25 bp, Homo sapien
tatttgctagatgacttcagtacac

SEQ ID NO: 2345044 - DNA, 25 bp, Homo sapien
cgtagcaagatactctcacttaggc

SEQ ID NO: 2345045 - DNA, 25 bp, Homo sapien
cagattcacgttgttcatttcatgt

SEQ ID NO: 2345046 - DNA, 25 bp, Homo sapien
ctcacttaggcagaagttagataac

SEQ ID NO: 2345047 - DNA, 25 bp, Homo sapien
taaattcatcccgaggacagaggac

SEQ ID NO: 2345048 - DNA, 25 bp, Homo sapien
gggccttagcgatgataaagtcctc

SEQ ID NO: 2345049 - DNA, 25 bp, Homo sapien
ggcttctgttactgctatctcttgc

SEQ ID NO: 2345050 - DNA, 25 bp, Homo sapien
agtcctactaataactgcttcagtg

SEQ ID NO: 2345051 - DNA, 25 bp, Homo sapien
ctctgatggtaagcttttgggttcc

SEQ ID NO: 2345052 - DNA, 25 bp, Homo sapien
gggcaatcagaattgcaatcctagg

SEQ ID NO: 2345053 - DNA, 25 bp, Homo sapien
tgcaatatggtatcccaggttaccc

SEQ ID NO: 2345054 - DNA, 25 bp, Homo sapien
gctgtctttagcagagtaggctacc

SEQ ID NO: 2345055 - DNA, 25 bp, Homo sapien
cataagaaattatacggctccctgg

SEQ ID NO: 2345056 - DNA, 25 bp, Homo sapien
ctgggataaacaagaggttgcctta

SEQ ID NO: 2345057 - DNA, 25 bp, Homo sapien
gccttatgtctttgcgatttgagat

SEQ ID NO: 2345058 - DNA, 25 bp, Homo sapien
gaggttgccttatgtctttgcgatt

SEQ ID NO: 2345059 - DNA, 25 bp, Homo sapien
tgcgatttgagataagtgccaccaa

SEQ ID NO: 2345060 - DNA, 25 bp, Homo sapien
ctggctctccacaatcacttttgaa

SEQ ID NO: 2345061 - DNA, 25 bp, Homo sapien
caatcacttttgaatcgccaacagt

SEQ ID NO: 2345062 - DNA, 25 bp, Homo sapien
tttgaatcgccaacagttatgctgg

SEQ ID NO: 2345063 - DNA, 25 bp, Homo sapien
aaatatagacggctggctctccaca

SEQ ID NO: 2345064 - DNA, 25 bp, Homo sapien
cttcagaggcaaccactctaatgag

SEQ ID NO: 2345065 - DNA, 25 bp, Homo sapien
tccgatttttgtcgctcttcagagg

SEQ ID NO: 2345066 - DNA, 25 bp, Homo sapien
tttgctcctcggcacaaggaatatg

SEQ ID NO: 2345067 - DNA, 25 bp, Homo sapien
caaccactctaatgagtttgctgtg

SEQ ID NO: 2345068 - DNA, 25 bp, Homo sapien
gcagcagaggagactttatccctga

SEQ ID NO: 2345069 - DNA, 25 bp, Homo sapien
cagcagaggagactttatccctgaa

SEQ ID NO: 2345070 - DNA, 25 bp, Homo sapien
agcagaggagactttatccctgaat

SEQ ID NO: 2345071 - DNA, 25 bp, Homo sapien
aactgtttgcctgctgtaaaagggc

SEQ ID NO: 2345072 - DNA, 25 bp, Homo sapien
caactgtttgcctgctgtaaaaggg

SEQ ID NO: 2345073 - DNA, 25 bp, Homo sapien
ctgtttgcctgctgtaaaagggcaa

SEQ ID NO: 2345074 - DNA, 25 bp, Homo sapien
tcaactgtttgcctgctgtaaaagg

SEQ ID NO: 2345075 - DNA, 25 bp, Homo sapien
gcagaactttcatctacccacagtt

SEQ ID NO: 2345076 - DNA, 25 bp, Homo sapien
cagtaaccaagcttctctctttgca

SEQ ID NO: 2345077 - DNA, 25 bp, Homo sapien
gaactttcatctacccacagtttcc

SEQ ID NO: 2345078 - DNA, 25 bp, Homo sapien
taggcagaactttcatctacccaca

SEQ ID NO: 2345079 - DNA, 25 bp, Homo sapien
tacacgattgtgttgatttcctcct

SEQ ID NO: 2345080 - DNA, 25 bp, Homo sapien
tttattgtgtaagagggctcctggc

SEQ ID NO: 2345081 - DNA, 25 bp, Homo sapien
gccttgggcataatcattaggtgga

SEQ ID NO: 2345082 - DNA, 25 bp, Homo sapien
tagccacaaggagtccagtcatttc

SEQ ID NO: 2345083 - DNA, 25 bp, Homo sapien
caggattttggctggctgtccgcag

SEQ ID NO: 2345084 - DNA, 25 bp, Homo sapien
tggctgtccgcagcattttagaggt

SEQ ID NO: 2345085 - DNA, 25 bp, Homo sapien
ttggctggctgtccgcagcatttta

SEQ ID NO: 2345086 - DNA, 25 bp, Homo sapien
gtccgcagcattttagaggtcttta

SEQ ID NO: 2345087 - DNA, 25 bp, Homo sapien
ggttgccataattttctaactggct

SEQ ID NO: 2345088 - DNA, 25 bp, Homo sapien
tgtgccaaatgtgggaagggccttt

SEQ ID NO: 2345089 - DNA, 25 bp, Homo sapien
cactggttgccataattttctaact

SEQ ID NO: 2345090 - DNA, 25 bp, Homo sapien
aaaatgtgccaaatgtgggaagggc

SEQ ID NO: 2345091 - DNA, 25 bp, Homo sapien
ttagccctgggtcccgacgtcttga

SEQ ID NO: 2345092 - DNA, 25 bp, Homo sapien
gctccagaatcaggtgcaaactcat

SEQ ID NO: 2345093 - DNA, 25 bp, Homo sapien
gacgtcttgatgtaaaagctctgca

SEQ ID NO: 2345094 - DNA, 25 bp, Homo sapien
acttggcacgaaagatcctccttct

SEQ ID NO: 2345095 - DNA, 25 bp, Homo sapien
tataaatgatccttcataacctggc

SEQ ID NO: 2345096 - DNA, 25 bp, Homo sapien
aatggccatggatcctaggtaggca

SEQ ID NO: 2345097 - DNA, 25 bp, Homo sapien
tttacttgaggatgcaagtgtccac

SEQ ID NO: 2345098 - DNA, 25 bp, Homo sapien
ggagctttcatttggatccacctga

SEQ ID NO: 2345099 - DNA, 25 bp, Homo sapien
acctttctgggcataagggcaggag

SEQ ID NO: 2345100 - DNA, 25 bp, Homo sapien
aattgtggggccttgaaaatgcact

SEQ ID NO: 2345101 - DNA, 25 bp, Homo sapien
cttcttttagcaaaagcaactgctc

SEQ ID NO: 2345102 - DNA, 25 bp, Homo sapien
ttagcaaaagcaactgctcagcagg

SEQ ID NO: 2345103 - DNA, 25 bp, Homo sapien
ggtgacatcttaatcaaattgtggg

SEQ ID NO: 2345104 - DNA, 25 bp, Homo sapien
tgtaggctccatgactcgtttccag

SEQ ID NO: 2345105 - DNA, 25 bp, Homo sapien
cagatgccagggctacgggattcca

SEQ ID NO: 2345106 - DNA, 25 bp, Homo sapien
tagacttcacgtagcttgcgtcgct

SEQ ID NO: 2345107 - DNA, 25 bp, Homo sapien
tactggtttaccgagagggcaacag

SEQ ID NO: 2345108 - DNA, 25 bp, Homo sapien
tgttccttgacacaccagagtctgc

SEQ ID NO: 2345109 - DNA, 25 bp, Homo sapien
ggcagtctggtcaagatctacccca

SEQ ID NO: 2345110 - DNA, 25 bp, Homo sapien
ggattccttgacagaatgaagggca

SEQ ID NO: 2345111 - DNA, 25 bp, Homo sapien
gctgaagtaatctgcaccctgactg

SEQ ID NO: 2345112 - DNA, 25 bp, Homo sapien
tgctacgatttgacaccaactccaa

SEQ ID NO: 2345113 - DNA, 25 bp, Homo sapien
tcttttctactggtctgtgatctgc

SEQ ID NO: 2345114 - DNA, 25 bp, Homo sapien
tggacatttcgtaaggagccctctt

SEQ ID NO: 2345115 - DNA, 25 bp, Homo sapien
tgtttgctcaaacttggtatagccc

SEQ ID NO: 2345116 - DNA, 25 bp, Homo sapien
tggtgccttattagcaacaacaccc

SEQ ID NO: 2345117 - DNA, 25 bp, Homo sapien
gtgccttattagcaacaacaccctt

SEQ ID NO: 2345118 - DNA, 25 bp, Homo sapien
tttcattggtgccttattagcaaca

SEQ ID NO: 2345119 - DNA, 25 bp, Homo sapien
cattggtgccttattagcaacaaca

SEQ ID NO: 2345120 - DNA, 25 bp, Homo sapien
gcaggtacgtcccacacattgcaaa

SEQ ID NO: 2345121 - DNA, 25 bp, Homo sapien
ggtccagactcaagcttaacctgct

SEQ ID NO: 2345122 - DNA, 25 bp, Homo sapien
taacctgctcaggatgacatgcact

SEQ ID NO: 2345123 - DNA, 25 bp, Homo sapien
ttggagggcgctgaaaagcaatcgc

SEQ ID NO: 2345124 - DNA, 25 bp, Homo sapien
aatgcctcaattgctgcctgatatg

SEQ ID NO: 2345125 - DNA, 25 bp, Homo sapien
gctcggaatgcctcaattgctgcct

SEQ ID NO: 2345126 - DNA, 25 bp, Homo sapien
ctaggcaaaagctcggaatgcctca

SEQ ID NO: 2345127 - DNA, 25 bp, Homo sapien
gcaaaagctcggaatgcctcaattg

SEQ ID NO: 2345128 - DNA, 25 bp, Homo sapien
ttctctttcttccagtatctcttcc

SEQ ID NO: 2345129 - DNA, 25 bp, Homo sapien
ctctttcttccagtatctcttccat

SEQ ID NO: 2345130 - DNA, 25 bp, Homo sapien
ctgtcttctctttcttccagtatct

SEQ ID NO: 2345131 - DNA, 25 bp, Homo sapien
tcttctctttcttccagtatctctt

SEQ ID NO: 2345132 - DNA, 25 bp, Homo sapien
taccagaacagacttgattggtgca

SEQ ID NO: 2345133 - DNA, 25 bp, Homo sapien
ttaccagaacagacttgattggtgc

SEQ ID NO: 2345134 - DNA, 25 bp, Homo sapien
accagaacagacttgattggtgcag

SEQ ID NO: 2345135 - DNA, 25 bp, Homo sapien
ttgatattcttagggcttggagcct

SEQ ID NO: 2345136 - DNA, 25 bp, Homo sapien
gatatggttgttttgaaaggctttc

SEQ ID NO: 2345137 - DNA, 25 bp, Homo sapien
ttttataaataaccagtagatatgg

SEQ ID NO: 2345138 - DNA, 25 bp, Homo sapien
tgtgtcagtgcatacttgatattct

SEQ ID NO: 2345139 - DNA, 25 bp, Homo sapien
catgtatcgaggtcttgaggcatgc

SEQ ID NO: 2345140 - DNA, 25 bp, Homo sapien
ctgtactgctacattaaagctgaac

SEQ ID NO: 2345141 - DNA, 25 bp, Homo sapien
catctgcagtaattgctttcatgta

SEQ ID NO: 2345142 - DNA, 25 bp, Homo sapien
caggtggaaggcataactttctgta

SEQ ID NO: 2345143 - DNA, 25 bp, Homo sapien
ctaagctgttaaaatagagactcat

SEQ ID NO: 2345144 - DNA, 25 bp, Homo sapien
tgccattgggcaaaacatctaagct

SEQ ID NO: 2345145 - DNA, 25 bp, Homo sapien
tgtgccattgggcaaaacatctaag

SEQ ID NO: 2345146 - DNA, 25 bp, Homo sapien
tataactgtgccattgggcaaaaca

SEQ ID NO: 2345147 - DNA, 25 bp, Homo sapien
ctttgagtggcagttggttggctat

SEQ ID NO: 2345148 - DNA, 25 bp, Homo sapien
tgagtggcagttggttggctatttt

SEQ ID NO: 2345149 - DNA, 25 bp, Homo sapien
gagtggcagttggttggctattttt

SEQ ID NO: 2345150 - DNA, 25 bp, Homo sapien
ttcctttgagtggcagttggttggc

SEQ ID NO: 2345151 - DNA, 25 bp, Homo sapien
tatataagcactccctttttaccac

SEQ ID NO: 2345152 - DNA, 25 bp, Homo sapien
ttgaataatggccattcttgtggga

SEQ ID NO: 2345153 - DNA, 25 bp, Homo sapien
tgtgaaggacaactcccatttttta

SEQ ID NO: 2345154 - DNA, 25 bp, Homo sapien
tcttgtgggagtaaggtggaatctt

SEQ ID NO: 2345155 - DNA, 25 bp, Homo sapien
ctttccatgacattccgttttacat

SEQ ID NO: 2345156 - DNA, 25 bp, Homo sapien
tttccatgacattccgttttacatt

SEQ ID NO: 2345157 - DNA, 25 bp, Homo sapien
ttccatgacattccgttttacattt

SEQ ID NO: 2345158 - DNA, 25 bp, Homo sapien
aacttctagagctgtgaacttcgca

SEQ ID NO: 2345159 - DNA, 25 bp, Homo sapien
gcaacttctagagctgtgaacttcg

SEQ ID NO: 2345160 - DNA, 25 bp, Homo sapien
tctagagctgtgaacttcgcaattc

SEQ ID NO: 2345161 - DNA, 25 bp, Homo sapien
gaaagcaacttctagagctgtgaac

SEQ ID NO: 2345162 - DNA, 25 bp, Homo sapien
tctatggactctggtgtaagacccc

SEQ ID NO: 2345163 - DNA, 25 bp, Homo sapien
tggactctggtgtaagaccccaatc

SEQ ID NO: 2345164 - DNA, 25 bp, Homo sapien
tatggactctggtgtaagaccccaa

SEQ ID NO: 2345165 - DNA, 25 bp, Homo sapien
ggactctggtgtaagaccccaatct

SEQ ID NO: 2345166 - DNA, 25 bp, Homo sapien
tactttcaggtactcgatgacctcc

SEQ ID NO: 2345167 - DNA, 25 bp, Homo sapien
tttcaggtactcgatgacctcctct

SEQ ID NO: 2345168 - DNA, 25 bp, Homo sapien
acatactttcaggtactcgatgacc

SEQ ID NO: 2345169 - DNA, 25 bp, Homo sapien
gtactcgatgacctcctctgaagcc

SEQ ID NO: 2345170 - DNA, 25 bp, Homo sapien
tcattctctgcgtgtaggaggtgtt

SEQ ID NO: 2345171 - DNA, 25 bp, Homo sapien
tgcgtgtaggaggtgttgaaacttc

SEQ ID NO: 2345172 - DNA, 25 bp, Homo sapien
ctctgcgtgtaggaggtgttgaaac

SEQ ID NO: 2345173 - DNA, 25 bp, Homo sapien
cattctctgcgtgtaggaggtgttg

SEQ ID NO: 2345174 - DNA, 25 bp, Homo sapien
gcggtacatatatggagggtttgga

SEQ ID NO: 2345175 - DNA, 25 bp, Homo sapien
ctgcggtacatatatggagggtttg

SEQ ID NO: 2345176 - DNA, 25 bp, Homo sapien
tgcggtacatatatggagggtttgg

SEQ ID NO: 2345177 - DNA, 25 bp, Homo sapien
ggtacatatatggagggtttggagg

SEQ ID NO: 2345178 - DNA, 25 bp, Homo sapien
gatgcttcactctgaggttctgagc

SEQ ID NO: 2345179 - DNA, 25 bp, Homo sapien
tcatggccttgaccacctagaatgc

SEQ ID NO: 2345180 - DNA, 25 bp, Homo sapien
gatggagcttccaggatagagcttc

SEQ ID NO: 2345181 - DNA, 25 bp, Homo sapien
ggttctgagcctgttcctaaggaga

SEQ ID NO: 2345182 - DNA, 25 bp, Homo sapien
tctgcttcaagccaatgagccacat

SEQ ID NO: 2345183 - DNA, 25 bp, Homo sapien
agtcaacaacaaatagccaagccag

SEQ ID NO: 2345184 - DNA, 25 bp, Homo sapien
gctttttggatacggcatgggacac

SEQ ID NO: 2345185 - DNA, 25 bp, Homo sapien
catgggctacatcattctgcttcaa

SEQ ID NO: 2345186 - DNA, 25 bp, Homo sapien
taaagaagttgcctcagagccggcc

SEQ ID NO: 2345187 - DNA, 25 bp, Homo sapien
gtatgtaacctgtcacctaaaggaa

SEQ ID NO: 2345188 - DNA, 25 bp, Homo sapien
caaatgagatgttttcaatagggat

SEQ ID NO: 2345189 - DNA, 25 bp, Homo sapien
ggtccaccctggtgtttcacttgta

SEQ ID NO: 2345190 - DNA, 25 bp, Homo sapien
agcctttgagggcagaccttgcttc

SEQ ID NO: 2345191 - DNA, 25 bp, Homo sapien
tcagtctccaaggagcctttgaggg

SEQ ID NO: 2345192 - DNA, 25 bp, Homo sapien
agtctccaaggagcctttgagggca

SEQ ID NO: 2345193 - DNA, 25 bp, Homo sapien
ccaaggagcctttgagggcagacct

SEQ ID NO: 2345194 - DNA, 25 bp, Homo sapien
gtgtatgtccggctattctctggtt

SEQ ID NO: 2345195 - DNA, 25 bp, Homo sapien
ttttcatactgcgtgtatgtccggc

SEQ ID NO: 2345196 - DNA, 25 bp, Homo sapien
gggaaggtgctcttgtaaagccatt

SEQ ID NO: 2345197 - DNA, 25 bp, Homo sapien
ccctttactctgattcaaagtcaca

SEQ ID NO: 2345198 - DNA, 25 bp, Homo sapien
cttctttgcttggtccttgtagtaa

SEQ ID NO: 2345199 - DNA, 25 bp, Homo sapien
ttcaacttctttgcttggtccttgt

SEQ ID NO: 2345200 - DNA, 25 bp, Homo sapien
caacttctttgcttggtccttgtag

SEQ ID NO: 2345201 - DNA, 25 bp, Homo sapien
acttctttgcttggtccttgtagta

SEQ ID NO: 2345202 - DNA, 25 bp, Homo sapien
ttcacctgagtctgtcaagaattgt

SEQ ID NO: 2345203 - DNA, 25 bp, Homo sapien
acaggaacatcaccactgggtcaga

SEQ ID NO: 2345204 - DNA, 25 bp, Homo sapien
tcacaggaacatcaccactgggtca

SEQ ID NO: 2345205 - DNA, 25 bp, Homo sapien
cctgagtctgtcaagaattgtttga

SEQ ID NO: 2345206 - DNA, 25 bp, Homo sapien
cagtaaaaacaattcagggttgcca

SEQ ID NO: 2345207 - DNA, 25 bp, Homo sapien
aacaattcagggttgccaaactggt

SEQ ID NO: 2345208 - DNA, 25 bp, Homo sapien
tgcagtaaaaacaattcagggttgc

SEQ ID NO: 2345209 - DNA, 25 bp, Homo sapien
aaaacaattcagggttgccaaactg

SEQ ID NO: 2345210 - DNA, 25 bp, Homo sapien
tgttaatattccaaggccggaggct

SEQ ID NO: 2345211 - DNA, 25 bp, Homo sapien
taaataagttcctcctgatgggctc

SEQ ID NO: 2345212 - DNA, 25 bp, Homo sapien
tcatttgaaaccacaggtagtccac

SEQ ID NO: 2345213 - DNA, 25 bp, Homo sapien
tgccatttatgccacaggtgaagta

SEQ ID NO: 2345214 - DNA, 25 bp, Homo sapien
gcagttttcagatcgttgaaccaga

SEQ ID NO: 2345215 - DNA, 25 bp, Homo sapien
agtaaattctcgggcttggtgcatc

SEQ ID NO: 2345216 - DNA, 25 bp, Homo sapien
agatcgttgaaccagaattgagaag

SEQ ID NO: 2345217 - DNA, 25 bp, Homo sapien
agctgtagcagttttcagatcgttg

SEQ ID NO: 2345218 - DNA, 25 bp, Homo sapien
tctgtttttgacttcaacttccact

SEQ ID NO: 2345219 - DNA, 25 bp, Homo sapien
tttgtctcctttggctttctcagcc

SEQ ID NO: 2345220 - DNA, 25 bp, Homo sapien
tatttagcgagattctgtacatctc

SEQ ID NO: 2345221 - DNA, 25 bp, Homo sapien
tcctttggctttctcagcctcattt

SEQ ID NO: 2345222 - DNA, 25 bp, Homo sapien
tctctttccttcgggggatgaggtg

SEQ ID NO: 2345223 - DNA, 25 bp, Homo sapien
tccttcgggggatgaggtgtactaa

SEQ ID NO: 2345224 - DNA, 25 bp, Homo sapien
gggatgaggtgtactaagtgtgagc

SEQ ID NO: 2345225 - DNA, 25 bp, Homo sapien
gatgaggtgtactaagtgtgagcat

SEQ ID NO: 2345226 - DNA, 25 bp, Homo sapien
cactgaggtttaaaggtgtccagta

SEQ ID NO: 2345227 - DNA, 25 bp, Homo sapien
ttagtacatgttgttaccctcatct

SEQ ID NO: 2345228 - DNA, 25 bp, Homo sapien
gcctctggcacagcagatcctgtgt

SEQ ID NO: 2345229 - DNA, 25 bp, Homo sapien
aatgggagccattgcaggcttacac

SEQ ID NO: 2345230 - DNA, 25 bp, Homo sapien
tggtccttcttcactaccgtgttta

SEQ ID NO: 2345231 - DNA, 25 bp, Homo sapien
tcttgctctggcagattgtcaaaat

SEQ ID NO: 2345232 - DNA, 25 bp, Homo sapien
agaagtgtagccctgaatgcaacgt

SEQ ID NO: 2345233 - DNA, 25 bp, Homo sapien
gaattggcacaaatctccagaagaa

SEQ ID NO: 2345234 - DNA, 25 bp, Homo sapien
gcctgtcgatttctggctcatcctt

SEQ ID NO: 2345235 - DNA, 25 bp, Homo sapien
cctgatagaaagcaatgaaggttca

SEQ ID NO: 2345236 - DNA, 25 bp, Homo sapien
tgatgctaaagggagttgtaatcct

SEQ ID NO: 2345237 - DNA, 25 bp, Homo sapien
tctggctcatccttaaggtgtcatc

SEQ ID NO: 2345238 - DNA, 25 bp, Homo sapien
atgagctattgcgcccggccgacct

SEQ ID NO: 2345239 - DNA, 25 bp, Homo sapien
gagctattgcgcccggccgaccttt

SEQ ID NO: 2345240 - DNA, 25 bp, Homo sapien
agctattgcgcccggccgacctttt

SEQ ID NO: 2345241 - DNA, 25 bp, Homo sapien
tagttcctacattcttgatgaagca

SEQ ID NO: 2345242 - DNA, 25 bp, Homo sapien
gaggatttgctcttgtccatattta

SEQ ID NO: 2345243 - DNA, 25 bp, Homo sapien
tatttatgtttcttactgcctccga

SEQ ID NO: 2345244 - DNA, 25 bp, Homo sapien
tgagcccttctgatctaatattagg

SEQ ID NO: 2345245 - DNA, 25 bp, Homo sapien
atattcaggcagtttttcagctgtt

SEQ ID NO: 2345246 - DNA, 25 bp, Homo sapien
gtttttcagctgttcagtgaagtaa

SEQ ID NO: 2345247 - DNA, 25 bp, Homo sapien
tgaagtaattaaactgagttattct

SEQ ID NO: 2345248 - DNA, 25 bp, Homo sapien
actcgctgatgatgccagtggtgca

SEQ ID NO: 2345249 - DNA, 25 bp, Homo sapien
cctagctgttttggcatcaaccaca

SEQ ID NO: 2345250 - DNA, 25 bp, Homo sapien
tccaggggtcgtactcagcttctgt

SEQ ID NO: 2345251 - DNA, 25 bp, Homo sapien
caggcaatgctactaatgtggcccc

SEQ ID NO: 2345252 - DNA, 25 bp, Homo sapien
cagcttctgttgtggagtccttatg

SEQ ID NO: 2345253 - DNA, 25 bp, Homo sapien
ttctttgttactgacaccaataagg

SEQ ID NO: 2345254 - DNA, 25 bp, Homo sapien
ctctcttctttgttactgacaccaa

SEQ ID NO: 2345255 - DNA, 25 bp, Homo sapien
ttactgacaccaataaggtggcatt

SEQ ID NO: 2345256 - DNA, 25 bp, Homo sapien
ttcacaccaatttcagaagatctgg

SEQ ID NO: 2345257 - DNA, 25 bp, Homo sapien
ccagttatggtgaacgaattttcaa

SEQ ID NO: 2345258 - DNA, 25 bp, Homo sapien
tatggtgaacgaattttcaaacttc

SEQ ID NO: 2345259 - DNA, 25 bp, Homo sapien
cctgaatcagtccagttatggtgaa

SEQ ID NO: 2345260 - DNA, 25 bp, Homo sapien
tcagtccagttatggtgaacgaatt

SEQ ID NO: 2345261 - DNA, 25 bp, Homo sapien
aggttatcagcaggtttcctgggag

SEQ ID NO: 2345262 - DNA, 25 bp, Homo sapien
agaaagcgctacctttcctggcctt

SEQ ID NO: 2345263 - DNA, 25 bp, Homo sapien
gagaaagcgctacctttcctggcct

SEQ ID NO: 2345264 - DNA, 25 bp, Homo sapien
gcacggttactagggcaacctttgc

SEQ ID NO: 2345265 - DNA, 25 bp, Homo sapien
ggagcccgcacggttactagggcaa

SEQ ID NO: 2345266 - DNA, 25 bp, Homo sapien
ctgaatggagcccgcacggttacta

SEQ ID NO: 2345267 - DNA, 25 bp, Homo sapien
cgcacggttactagggcaacctttg

SEQ ID NO: 2345268 - DNA, 25 bp, Homo sapien
cctttgtgcttgcagtagccgcgtg

SEQ ID NO: 2345269 - DNA, 25 bp, Homo sapien
gtagccgcgtgaaggcgatcatttt

SEQ ID NO: 2345270 - DNA, 25 bp, Homo sapien
cgtgaaggcgatcattttgcatctt

SEQ ID NO: 2345271 - DNA, 25 bp, Homo sapien
ttgtgcttgcagtagccgcgtgaag

SEQ ID NO: 2345272 - DNA, 25 bp, Homo sapien
gtttttacggttcacataggccaga

SEQ ID NO: 2345273 - DNA, 25 bp, Homo sapien
aaggttgtaactgacagcatgggcc

SEQ ID NO: 2345274 - DNA, 25 bp, Homo sapien
aaaggactcatgttaaatgggtggt

SEQ ID NO: 2345275 - DNA, 25 bp, Homo sapien
cataggccagaagattcaaagagct

SEQ ID NO: 2345276 - DNA, 25 bp, Homo sapien
tcagggagtgtcacctcaaatgcaa

SEQ ID NO: 2345277 - DNA, 25 bp, Homo sapien
tgggattcgaggacttccaggcgca

SEQ ID NO: 2345278 - DNA, 25 bp, Homo sapien
tccaggcgcatagggtagaaccaaa

SEQ ID NO: 2345279 - DNA, 25 bp, Homo sapien
tgtgtggccccaggtgtcaaaatga

SEQ ID NO: 2345280 - DNA, 25 bp, Homo sapien
aaatggcgatcagcaagacggtggc

SEQ ID NO: 2345281 - DNA, 25 bp, Homo sapien
gaatgtatccattgagacgctcgct

SEQ ID NO: 2345282 - DNA, 25 bp, Homo sapien
ccattggtgcgcaaaagttccgacg

SEQ ID NO: 2345283 - DNA, 25 bp, Homo sapien
tcattgacactaagagccagcggct

SEQ ID NO: 2345284 - DNA, 25 bp, Homo sapien
tcgcggtgttcacggtaggcgcaaa

SEQ ID NO: 2345285 - DNA, 25 bp, Homo sapien
ttccgcctctcaggcagcggtggga

SEQ ID NO: 2345286 - DNA, 25 bp, Homo sapien
aggcgcaaagcgcagcaagggacac

SEQ ID NO: 2345287 - DNA, 25 bp, Homo sapien
cggtgggacaaagcgcggcctcttt

SEQ ID NO: 2345288 - DNA, 25 bp, Homo sapien
aagtgaggcccagactactactgag

SEQ ID NO: 2345289 - DNA, 25 bp, Homo sapien
gaacctaggcttatgtgctgtgctg

SEQ ID NO: 2345290 - DNA, 25 bp, Homo sapien
gtgctgacgcactagataaccaatg

SEQ ID NO: 2345291 - DNA, 25 bp, Homo sapien
aaaccactggtgtgtaaaaggagca

SEQ ID NO: 2345292 - DNA, 25 bp, Homo sapien
tctgaataccgactttgtgccctac

SEQ ID NO: 2345293 - DNA, 25 bp, Homo sapien
gagcttttcctcagtgcctcacagg

SEQ ID NO: 2345294 - DNA, 25 bp, Homo sapien
ggaatggcaatatcaccaccaacag

SEQ ID NO: 2345295 - DNA, 25 bp, Homo sapien
tatgaatgatatcctctgaagggca

SEQ ID NO: 2345296 - DNA, 25 bp, Homo sapien
tacaaggtggcttctagcacaggct

SEQ ID NO: 2345297 - DNA, 25 bp, Homo sapien
tgcccggccaggtttacactttgga

SEQ ID NO: 2345298 - DNA, 25 bp, Homo sapien
gaagagtggctctcatgctcagctc

SEQ ID NO: 2345299 - DNA, 25 bp, Homo sapien
ttccttccagtcacagaagagtggc

SEQ ID NO: 2345300 - DNA, 25 bp, Homo sapien
tttctggattggttgcttctgccca

SEQ ID NO: 2345301 - DNA, 25 bp, Homo sapien
tatatacctgagataaagccagttc

SEQ ID NO: 2345302 - DNA, 25 bp, Homo sapien
cccagtttgatatggtagcttttcc

SEQ ID NO: 2345303 - DNA, 25 bp, Homo sapien
tgtatcacttaatcagctgctaaag

SEQ ID NO: 2345304 - DNA, 25 bp, Homo sapien
tcagtggctacagacatgggtctca

SEQ ID NO: 2345305 - DNA, 25 bp, Homo sapien
tgtacctcataccttaatggctgct

SEQ ID NO: 2345306 - DNA, 25 bp, Homo sapien
tcacctgatgggactctgtacctca

SEQ ID NO: 2345307 - DNA, 25 bp, Homo sapien
gacatgggtctcacctgatgggact

SEQ ID NO: 2345308 - DNA, 25 bp, Homo sapien
tcttcctgaatggacatccgtgggc

SEQ ID NO: 2345309 - DNA, 25 bp, Homo sapien
taagcataaggtcagtccagaaatg

SEQ ID NO: 2345310 - DNA, 25 bp, Homo sapien
catggatttgctaaaagacttgaaa

SEQ ID NO: 2345311 - DNA, 25 bp, Homo sapien
taatgaacactcgttaaaaatcagc

SEQ ID NO: 2345312 - DNA, 25 bp, Homo sapien
aatgatgcactaacctcccaatctg

SEQ ID NO: 2345313 - DNA, 25 bp, Homo sapien
gaaggagggcattctctgtcaatga

SEQ ID NO: 2345314 - DNA, 25 bp, Homo sapien
gtcaatgatgcactaacctcccaat

SEQ ID NO: 2345315 - DNA, 25 bp, Homo sapien
gatgcactaacctcccaatctgatt

SEQ ID NO: 2345316 - DNA, 25 bp, Homo sapien
atgaatcatttgcaggaaacggggg

SEQ ID NO: 2345317 - DNA, 25 bp, Homo sapien
tgtggttggaatggcagatggctga

SEQ ID NO: 2345318 - DNA, 25 bp, Homo sapien
gggctgtgcccactttcaggtacta

SEQ ID NO: 2345319 - DNA, 25 bp, Homo sapien
tcaggtactaacacgtaaatccaca

SEQ ID NO: 2345320 - DNA, 25 bp, Homo sapien
gaactctgtctgatctacttagcaa

SEQ ID NO: 2345321 - DNA, 25 bp, Homo sapien
ggataaggatgcgatcagactttgc

SEQ ID NO: 2345322 - DNA, 25 bp, Homo sapien
cctcaagggatatagtggctgttaa

SEQ ID NO: 2345323 - DNA, 25 bp, Homo sapien
tcttcataacccaagatatgagtgc

SEQ ID NO: 2345324 - DNA, 25 bp, Homo sapien
agactgagctgcaggtgactctctg

SEQ ID NO: 2345325 - DNA, 25 bp, Homo sapien
tgagctgcaggtgactctctgtggc

SEQ ID NO: 2345326 - DNA, 25 bp, Homo sapien
ctctaagagcagacttgggcccagc

SEQ ID NO: 2345327 - DNA, 25 bp, Homo sapien
agctgcaggtgactctctgtggccc

SEQ ID NO: 2345328 - DNA, 25 bp, Homo sapien
cgtggttgtcatcagtctgtgttcc

SEQ ID NO: 2345329 - DNA, 25 bp, Homo sapien
gcagtaacaggggatctcagcacgt

SEQ ID NO: 2345330 - DNA, 25 bp, Homo sapien
gggatctcagcacgtggttgtcatc

SEQ ID NO: 2345331 - DNA, 25 bp, Homo sapien
tctcagcacgtggttgtcatcagtc

SEQ ID NO: 2345332 - DNA, 25 bp, Homo sapien
tctagctcaggaagcagggtcactg

SEQ ID NO: 2345333 - DNA, 25 bp, Homo sapien
ttgagcagttctagctcaggaagca

SEQ ID NO: 2345334 - DNA, 25 bp, Homo sapien
gactcagaaggtgcgttgctgctga

SEQ ID NO: 2345335 - DNA, 25 bp, Homo sapien
tctctctgccccttcaggagcaccc

SEQ ID NO: 2345336 - DNA, 25 bp, Homo sapien
ctgggtgaggcctggcgtcattcag

SEQ ID NO: 2345337 - DNA, 25 bp, Homo sapien
cttggaggtgcttggtttgaatgga

SEQ ID NO: 2345338 - DNA, 25 bp, Homo sapien
agagagcaatcctttgccaagcttg

SEQ ID NO: 2345339 - DNA, 25 bp, Homo sapien
ctggcgtcattcagagagcaatcct

SEQ ID NO: 2345340 - DNA, 25 bp, Homo sapien
taagaacaataatgaaagtgtggcc

SEQ ID NO: 2345341 - DNA, 25 bp, Homo sapien
taacggtgccactgttgtggtagta

SEQ ID NO: 2345342 - DNA, 25 bp, Homo sapien
aaatgacggattgcttaacggtgcc

SEQ ID NO: 2345343 - DNA, 25 bp, Homo sapien
tgtggccatttaactcgaatgctcg

SEQ ID NO: 2345344 - DNA, 25 bp, Homo sapien
gggaccacctcagtaaaagtatcca

SEQ ID NO: 2345345 - DNA, 25 bp, Homo sapien
aatatgaggccggaaacaaagcaca

SEQ ID NO: 2345346 - DNA, 25 bp, Homo sapien
ggagttctatttacctagaggccaa

SEQ ID NO: 2345347 - DNA, 25 bp, Homo sapien
tccaagactcatgaggtgcactaag

SEQ ID NO: 2345348 - DNA, 25 bp, Homo sapien
actggctcggtgctttttttctgtc

SEQ ID NO: 2345349 - DNA, 25 bp, Homo sapien
tttggagcaacggagcctgtgaaac

SEQ ID NO: 2345350 - DNA, 25 bp, Homo sapien
aaatgatggctttggagcaacggag

SEQ ID NO: 2345351 - DNA, 25 bp, Homo sapien
tcagtttaccctgttgttctacctc

SEQ ID NO: 2345352 - DNA, 25 bp, Homo sapien
ccactgatctacttcattggtgatg

SEQ ID NO: 2345353 - DNA, 25 bp, Homo sapien
atgggttgccactgatctacttcat

SEQ ID NO: 2345354 - DNA, 25 bp, Homo sapien
gccactgatctacttcattggtgat

SEQ ID NO: 2345355 - DNA, 25 bp, Homo sapien
cactgatctacttcattggtgatgc

SEQ ID NO: 2345356 - DNA, 25 bp, Homo sapien
actgaagcctttccaagcctagagg

SEQ ID NO: 2345357 - DNA, 25 bp, Homo sapien
tagcagaacaaagacgaagtcaggg

SEQ ID NO: 2345358 - DNA, 25 bp, Homo sapien
cctagaggatagaacccgaggtcta

SEQ ID NO: 2345359 - DNA, 25 bp, Homo sapien
gtgcctgggccttttgctatagaat

SEQ ID NO: 2345360 - DNA, 25 bp, Homo sapien
tatgggatgaagcacctctcccttc

SEQ ID NO: 2345361 - DNA, 25 bp, Homo sapien
tcagccctgctgaacttttcaccat

SEQ ID NO: 2345362 - DNA, 25 bp, Homo sapien
ttcgaggttattttccgagcatgcc

SEQ ID NO: 2345363 - DNA, 25 bp, Homo sapien
ggttattttccgagcatgcctcctt

SEQ ID NO: 2345364 - DNA, 25 bp, Homo sapien
catgggctaaggaatgtggacagcc

SEQ ID NO: 2345365 - DNA, 25 bp, Homo sapien
ccttatacggaaagagggattcatg

SEQ ID NO: 2345366 - DNA, 25 bp, Homo sapien
gaccgggccccatataatcacaagg

SEQ ID NO: 2345367 - DNA, 25 bp, Homo sapien
tgcccggccaagttaaggctcttga

SEQ ID NO: 2345368 - DNA, 25 bp, Homo sapien
ggttattaaggcccagtgctggtcc

SEQ ID NO: 2345369 - DNA, 25 bp, Homo sapien
gctggtcccggcctagttctttcca

SEQ ID NO: 2345370 - DNA, 25 bp, Homo sapien
cagtgctggtcccggcctagttctt

SEQ ID NO: 2345371 - DNA, 25 bp, Homo sapien
gtgaactggttattaaggcccagtg

SEQ ID NO: 2345372 - DNA, 25 bp, Homo sapien
ggaagagaaacatcctctgagatga

SEQ ID NO: 2345373 - DNA, 25 bp, Homo sapien
gtggaagagaaacatcctctgagat

SEQ ID NO: 2345374 - DNA, 25 bp, Homo sapien
cctctgagatgagaagaaatgcacc

SEQ ID NO: 2345375 - DNA, 25 bp, Homo sapien
gaaacatcctctgagatgagaagaa

SEQ ID NO: 2345376 - DNA, 25 bp, Homo sapien
agctgagaccgaggcatgctgaaaa

SEQ ID NO: 2345377 - DNA, 25 bp, Homo sapien
agcccacacatccagtaacaactgg

SEQ ID NO: 2345378 - DNA, 25 bp, Homo sapien
tgaaaatgcccgacagctctcagcc

SEQ ID NO: 2345379 - DNA, 25 bp, Homo sapien
agttcccacagctgagaccgaggca

SEQ ID NO: 2345380 - DNA, 25 bp, Homo sapien
tgagcagcaatgcacggtagccgca

SEQ ID NO: 2345381 - DNA, 25 bp, Homo sapien
caatgcacggtagccgcattcactg

SEQ ID NO: 2345382 - DNA, 25 bp, Homo sapien
tgcttttagagttaggtattttgag

SEQ ID NO: 2345383 - DNA, 25 bp, Homo sapien
cacggtagccgcattcactgttcat

SEQ ID NO: 2345384 - DNA, 25 bp, Homo sapien
caaagtgctggattttcccagcact

SEQ ID NO: 2345385 - DNA, 25 bp, Homo sapien
cccaccatggcttctcctcctccat

SEQ ID NO: 2345386 - DNA, 25 bp, Homo sapien
tcccaccatggcttctcctcctcca

SEQ ID NO: 2345387 - DNA, 25 bp, Homo sapien
ctcccaccatggcttctcctcctcc

SEQ ID NO: 2345388 - DNA, 25 bp, Homo sapien
atctagagtagtttcccatcgcagg

SEQ ID NO: 2345389 - DNA, 25 bp, Homo sapien
tcttaaaccagatcatgagattgcc

SEQ ID NO: 2345390 - DNA, 25 bp, Homo sapien
ccttattgtcaaagtggcagtgttc

SEQ ID NO: 2345391 - DNA, 25 bp, Homo sapien
tattgtacctactgttcagctctca

SEQ ID NO: 2345392 - DNA, 25 bp, Homo sapien
aggcggcggccaagcaacaccctta

SEQ ID NO: 2345393 - DNA, 25 bp, Homo sapien
cgatggccgccgcaagagctgcgat

SEQ ID NO: 2345394 - DNA, 25 bp, Homo sapien
ccttaagtcgaaggcgatggccgcc

SEQ ID NO: 2345395 - DNA, 25 bp, Homo sapien
aatgaatcgccggactaccaggcgg

SEQ ID NO: 2345396 - DNA, 25 bp, Homo sapien
tgtgatgatcatttatgtttctact

SEQ ID NO: 2345397 - DNA, 25 bp, Homo sapien
ctgtgatgatcatttatgtttctac

SEQ ID NO: 2345398 - DNA, 25 bp, Homo sapien
cttttgggcactagatggaataaca

SEQ ID NO: 2345399 - DNA, 25 bp, Homo sapien
attctgagatgatcctgatggtttt

SEQ ID NO: 2345400 - DNA, 25 bp, Homo sapien
tattctgagatgatcctgatggttt

SEQ ID NO: 2345401 - DNA, 25 bp, Homo sapien
acaattcctccatgcctaacaatgg

SEQ ID NO: 2345402 - DNA, 25 bp, Homo sapien
acgaatgaggtggaacaattcctcc

SEQ ID NO: 2345403 - DNA, 25 bp, Homo sapien
cacgaatgaggtggaacaattcctc

SEQ ID NO: 2345404 - DNA, 25 bp, Homo sapien
aacaattcctccatgcctaacaatg

SEQ ID NO: 2345405 - DNA, 25 bp, Homo sapien
ttggtatagtaatcccaagatctac

SEQ ID NO: 2345406 - DNA, 25 bp, Homo sapien
cttggtatagtaatcccaagatcta

SEQ ID NO: 2345407 - DNA, 25 bp, Homo sapien
gatatggtgcgttgtttcagaggcc

SEQ ID NO: 2345408 - DNA, 25 bp, Homo sapien
tatggtgcgttgtttcagaggcccc

SEQ ID NO: 2345409 - DNA, 25 bp, Homo sapien
cagtgctctcagccggggatatggt

SEQ ID NO: 2345410 - DNA, 25 bp, Homo sapien
tgcgttgtttcagaggccccgcctt

SEQ ID NO: 2345411 - DNA, 25 bp, Homo sapien
tcaaagcataacttgtatccagtac

SEQ ID NO: 2345412 - DNA, 25 bp, Homo sapien
tccagtactgttttatcagagggct

SEQ ID NO: 2345413 - DNA, 25 bp, Homo sapien
ggtgaggtttatgggaatgtttgtc

SEQ ID NO: 2345414 - DNA, 25 bp, Homo sapien
tgtatccagtactgttttatcagag

SEQ ID NO: 2345415 - DNA, 25 bp, Homo sapien
tttctagtgctacttttcttgcttc

SEQ ID NO: 2345416 - DNA, 25 bp, Homo sapien
agctgttcttcagctggtttagcca

SEQ ID NO: 2345417 - DNA, 25 bp, Homo sapien
gctgttcttcagctggtttagccat

SEQ ID NO: 2345418 - DNA, 25 bp, Homo sapien
taccacccaccaattagacggatgc

SEQ ID NO: 2345419 - DNA, 25 bp, Homo sapien
ccaccaattagacggatgcctggaa

SEQ ID NO: 2345420 - DNA, 25 bp, Homo sapien
cacccaccaattagacggatgcctg

SEQ ID NO: 2345421 - DNA, 25 bp, Homo sapien
caattagacggatgcctggaaattc

SEQ ID NO: 2345422 - DNA, 25 bp, Homo sapien
caggaaacaactggaaatttcatca

SEQ ID NO: 2345423 - DNA, 25 bp, Homo sapien
tcaggaaacaactggaaatttcatc

SEQ ID NO: 2345424 - DNA, 25 bp, Homo sapien
actttagttcgttttgagtcatctg

SEQ ID NO: 2345425 - DNA, 25 bp, Homo sapien
ctggagatagtattccactaatcac

SEQ ID NO: 2345426 - DNA, 25 bp, Homo sapien
cttgccttccttttagacgatattt

SEQ ID NO: 2345427 - DNA, 25 bp, Homo sapien
tctcttgccttccttttagacgata

SEQ ID NO: 2345428 - DNA, 25 bp, Homo sapien
gccttccttttagacgatattttgc

SEQ ID NO: 2345429 - DNA, 25 bp, Homo sapien
tgccttccttttagacgatattttg

SEQ ID NO: 2345430 - DNA, 25 bp, Homo sapien
atttaccattaagctagtctttctt

SEQ ID NO: 2345431 - DNA, 25 bp, Homo sapien
gatttaccattaagctagtctttct

SEQ ID NO: 2345432 - DNA, 25 bp, Homo sapien
ggtcctttaccattgctggctgcaa

SEQ ID NO: 2345433 - DNA, 25 bp, Homo sapien
agatttaccattaagctagtctttc

SEQ ID NO: 2345434 - DNA, 25 bp, Homo sapien
cctttctggctttgatcccactttc

SEQ ID NO: 2345435 - DNA, 25 bp, Homo sapien
gccttgggggtcgtaatatgttata

SEQ ID NO: 2345436 - DNA, 25 bp, Homo sapien
gggtttcgagacgttgcccagctgg

SEQ ID NO: 2345437 - DNA, 25 bp, Homo sapien
ttctggctttgatcccactttcttg

SEQ ID NO: 2345438 - DNA, 25 bp, Homo sapien
ttcctgcatattcattataagatgg

SEQ ID NO: 2345439 - DNA, 25 bp, Homo sapien
tagtcttagttggtttagggtctca

SEQ ID NO: 2345440 - DNA, 25 bp, Homo sapien
aaatcaaacttttctaggatgaaga

SEQ ID NO: 2345441 - DNA, 25 bp, Homo sapien
tctaggatgaagacagcttattttt

SEQ ID NO: 2345442 - DNA, 25 bp, Homo sapien
ggctatagacaattaagagttgacc

SEQ ID NO: 2345443 - DNA, 25 bp, Homo sapien
cctgttatatgggagaacgaaaatt

SEQ ID NO: 2345444 - DNA, 25 bp, Homo sapien
ggctgttcattcctcataatagagt

SEQ ID NO: 2345445 - DNA, 25 bp, Homo sapien
cctaaattgctaggtgtgacccagc

SEQ ID NO: 2345446 - DNA, 25 bp, Homo sapien
tctgggaagcgcgaacagagcgttt

SEQ ID NO: 2345447 - DNA, 25 bp, Homo sapien
taatgagactaaactccatgggccg

SEQ ID NO: 2345448 - DNA, 25 bp, Homo sapien
gcagggtccctaggagaacggctaa

SEQ ID NO: 2345449 - DNA, 25 bp, Homo sapien
aattcgaggtctgcggcggctttca

SEQ ID NO: 2345450 - DNA, 25 bp, Homo sapien
gagatggaggcaggtgtccgtagcc

SEQ ID NO: 2345451 - DNA, 25 bp, Homo sapien
gggcggacggagtgcggaacccaga

SEQ ID NO: 2345452 - DNA, 25 bp, Homo sapien
actctctgccatcggggcggacgga

SEQ ID NO: 2345453 - DNA, 25 bp, Homo sapien
ggggcgtccgtatctcactctctgc

SEQ ID NO: 2345454 - DNA, 25 bp, Homo sapien
ccccagccctagtaacctctattct

SEQ ID NO: 2345455 - DNA, 25 bp, Homo sapien
tccttatgaattcacctattctagg

SEQ ID NO: 2345456 - DNA, 25 bp, Homo sapien
ctttctgtccttatgaattcaccta

SEQ ID NO: 2345457 - DNA, 25 bp, Homo sapien
tattggggtgaaatacctgtaatga

SEQ ID NO: 2345458 - DNA, 25 bp, Homo sapien
tacaattctacatgacagttgggtg

SEQ ID NO: 2345459 - DNA, 25 bp, Homo sapien
gaagagagcatggctgctccatggc

SEQ ID NO: 2345460 - DNA, 25 bp, Homo sapien
ggaagagagcatggctgctccatgg

SEQ ID NO: 2345461 - DNA, 25 bp, Homo sapien
cagtacagtcctgtaaggaaccagg

SEQ ID NO: 2345462 - DNA, 25 bp, Homo sapien
tactgctgctactccaataatgcca

SEQ ID NO: 2345463 - DNA, 25 bp, Homo sapien
caggtactgctggttcaggaccaag

SEQ ID NO: 2345464 - DNA, 25 bp, Homo sapien
tatagtggtctaggacagggattcc

SEQ ID NO: 2345465 - DNA, 25 bp, Homo sapien
taagtaggtccaatgcaactcatgc

SEQ ID NO: 2345466 - DNA, 25 bp, Homo sapien
gcaattcagttaaagcaccctatat

SEQ ID NO: 2345467 - DNA, 25 bp, Homo sapien
cttgggcttagaaggtaagtgagct

SEQ ID NO: 2345468 - DNA, 25 bp, Homo sapien
cagttttgttatccacttgggctta

SEQ ID NO: 2345469 - DNA, 25 bp, Homo sapien
ttagagaggcaagtgatttattctc

SEQ ID NO: 2345470 - DNA, 25 bp, Homo sapien
cttttggctttccttgtcctccgtg

SEQ ID NO: 2345471 - DNA, 25 bp, Homo sapien
ttccaagactaacaatcctggcttc

SEQ ID NO: 2345472 - DNA, 25 bp, Homo sapien
ccggctcatgtttctatatggaggc

SEQ ID NO: 2345473 - DNA, 25 bp, Homo sapien
gctttgtggcccatgattctcccat

SEQ ID NO: 2345474 - DNA, 25 bp, Homo sapien
caaagggtagatttccaattccagg

SEQ ID NO: 2345475 - DNA, 25 bp, Homo sapien
cccctagaggatggcggtgctccta

SEQ ID NO: 2345476 - DNA, 25 bp, Homo sapien
gatcttttgatgcaccgcctttggg

SEQ ID NO: 2345477 - DNA, 25 bp, Homo sapien
tcaaaaccttccatgacgtcccagg

SEQ ID NO: 2345478 - DNA, 25 bp, Homo sapien
cctgcaaagctgattgggatgtgcc

SEQ ID NO: 2345479 - DNA, 25 bp, Homo sapien
actgggatagttggtcaccttaatc

SEQ ID NO: 2345480 - DNA, 25 bp, Homo sapien
gctcctgctgtagggacattctagg

SEQ ID NO: 2345481 - DNA, 25 bp, Homo sapien
cattctaggcaaaaggacactgttc

SEQ ID NO: 2345482 - DNA, 25 bp, Homo sapien
tccctcaaaccgtacctctggtctc

SEQ ID NO: 2345483 - DNA, 25 bp, Homo sapien
tcagatctattctcagcacttctct

SEQ ID NO: 2345484 - DNA, 25 bp, Homo sapien
tggtctccccgggtattccctatga

SEQ ID NO: 2345485 - DNA, 25 bp, Homo sapien
ctctgcaaaagctgatgagtcagac

SEQ ID NO: 2345486 - DNA, 25 bp, Homo sapien
taagtgcacagcttgttgtaatttc

SEQ ID NO: 2345487 - DNA, 25 bp, Homo sapien
taactcaggtaaccaatacccacag

SEQ ID NO: 2345488 - DNA, 25 bp, Homo sapien
agtacaactttcataagtgcacagc

SEQ ID NO: 2345489 - DNA, 25 bp, Homo sapien
ggaggaaacacaacattaccagccc

SEQ ID NO: 2345490 - DNA, 25 bp, Homo sapien
tcccgataagctagtttttctccaa

SEQ ID NO: 2345491 - DNA, 25 bp, Homo sapien
aaataagctcccatcctgttactgg

SEQ ID NO: 2345492 - DNA, 25 bp, Homo sapien
tactggtgtagtcagaaacaccatt

SEQ ID NO: 2345493 - DNA, 25 bp, Homo sapien
cctgaattaggagtctcccgataag

SEQ ID NO: 2345494 - DNA, 25 bp, Homo sapien
ccagctattggtttcattgactttt

SEQ ID NO: 2345495 - DNA, 25 bp, Homo sapien
atatgtgtatgtattctggttcttt

SEQ ID NO: 2345496 - DNA, 25 bp, Homo sapien
aatatacatactttaaagaaccagc

SEQ ID NO: 2345497 - DNA, 25 bp, Homo sapien
tacatactttaaagaaccagctatt

SEQ ID NO: 2345498 - DNA, 25 bp, Homo sapien
acctgcctctgctatccctgtggcc

SEQ ID NO: 2345499 - DNA, 25 bp, Homo sapien
cagtctacacctgcctctgctatcc

SEQ ID NO: 2345500 - DNA, 25 bp, Homo sapien
tctacacctgcctctgctatccctg

SEQ ID NO: 2345501 - DNA, 25 bp, Homo sapien
tacacctgcctctgctatccctgtg

SEQ ID NO: 2345502 - DNA, 25 bp, Homo sapien
cttgatgtagaattctggccagtcc

SEQ ID NO: 2345503 - DNA, 25 bp, Homo sapien
tctggccagtcctggatcatgtatc

SEQ ID NO: 2345504 - DNA, 25 bp, Homo sapien
tcctgaaccagatatagtgaacagt

SEQ ID NO: 2345505 - DNA, 25 bp, Homo sapien
ccactcctggagaaaggagttggga

SEQ ID NO: 2345506 - DNA, 25 bp, Homo sapien
ggatcatttgagttcaggagtttga

SEQ ID NO: 2345507 - DNA, 25 bp, Homo sapien
agcaatttggaagactgaggcagga

SEQ ID NO: 2345508 - DNA, 25 bp, Homo sapien
tcaggagtttgagaccagctggtca

SEQ ID NO: 2345509 - DNA, 25 bp, Homo sapien
agttcaggagtttgagaccagctgg

SEQ ID NO: 2345510 - DNA, 25 bp, Homo sapien
tgaagaatgagctcagagacagtct

SEQ ID NO: 2345511 - DNA, 25 bp, Homo sapien
gcatgtttgctttatcgcttcgaca

SEQ ID NO: 2345512 - DNA, 25 bp, Homo sapien
gcttcgacactgaaccatctaaagg

SEQ ID NO: 2345513 - DNA, 25 bp, Homo sapien
ggaatcactccttggctggtcagaa

SEQ ID NO: 2345514 - DNA, 25 bp, Homo sapien
ttccagccagaggtcacccaccaaa

SEQ ID NO: 2345515 - DNA, 25 bp, Homo sapien
cagaggtcacccaccaaatttagac

SEQ ID NO: 2345516 - DNA, 25 bp, Homo sapien
ccagccagaggtcacccaccaaatt

SEQ ID NO: 2345517 - DNA, 25 bp, Homo sapien
agccagaggtcacccaccaaattta

SEQ ID NO: 2345518 - DNA, 25 bp, Homo sapien
tgtgtctgtatccctctgcaacctg

SEQ ID NO: 2345519 - DNA, 25 bp, Homo sapien
tctgcaacctggcaactgttacttt

SEQ ID NO: 2345520 - DNA, 25 bp, Homo sapien
atgttgacattgttccttccccgcg

SEQ ID NO: 2345521 - DNA, 25 bp, Homo sapien
cttccccgcgcctttaagattgtgt

SEQ ID NO: 2345522 - DNA, 25 bp, Homo sapien
aagattgtgtcttattgcagctgcc

SEQ ID NO: 2345523 - DNA, 25 bp, Homo sapien
taaagactgtttcatgtggtcagga

SEQ ID NO: 2345524 - DNA, 25 bp, Homo sapien
ggcaatggctttctacaccaactct

SEQ ID NO: 2345525 - DNA, 25 bp, Homo sapien
aacgggtcttatgacatctatgaag

SEQ ID NO: 2345526 - DNA, 25 bp, Homo sapien
aagtgcatgtgctttggaggatttg

SEQ ID NO: 2345527 - DNA, 25 bp, Homo sapien
tctatgaagtagtagcaagacatgc

SEQ ID NO: 2345528 - DNA, 25 bp, Homo sapien
tgaccacaattggaatacatttcaa

SEQ ID NO: 2345529 - DNA, 25 bp, Homo sapien
gaccacaattggaatacatttcaag

SEQ ID NO: 2345530 - DNA, 25 bp, Homo sapien
ctctttgaccacaattggaatacat

SEQ ID NO: 2345531 - DNA, 25 bp, Homo sapien
tcctgttcatagatgggaagcttcc

SEQ ID NO: 2345532 - DNA, 25 bp, Homo sapien
caaagagccctggatcgttgaattg

SEQ ID NO: 2345533 - DNA, 25 bp, Homo sapien
gatcatcagtagtacccaagcatgg

SEQ ID NO: 2345534 - DNA, 25 bp, Homo sapien
aaacagtaactcagcgtaagtgacc

SEQ ID NO: 2345535 - DNA, 25 bp, Homo sapien
tatcaaataagcaacatcttcaggg

SEQ ID NO: 2345536 - DNA, 25 bp, Homo sapien
ttgtattctcctccgtgcctacggg

SEQ ID NO: 2345537 - DNA, 25 bp, Homo sapien
tctcatcacccatcaagtttgctgg

SEQ ID NO: 2345538 - DNA, 25 bp, Homo sapien
gcagcaccagcaaccttatcaaata

SEQ ID NO: 2345539 - DNA, 25 bp, Homo sapien
tgtcatgccttagatcaagagtgct

SEQ ID NO: 2345540 - DNA, 25 bp, Homo sapien
gggtataagtatgctccacagagta

SEQ ID NO: 2345541 - DNA, 25 bp, Homo sapien
tatttttgacacaggaattactgaa

SEQ ID NO: 2345542 - DNA, 25 bp, Homo sapien
tcctacctaaagtattgtgcacaaa

SEQ ID NO: 2345543 - DNA, 25 bp, Homo sapien
tacgactaataagcagaggccgcat

SEQ ID NO: 2345544 - DNA, 25 bp, Homo sapien
ttagccttgaagtagacagagacct

SEQ ID NO: 2345545 - DNA, 25 bp, Homo sapien
caaagtgttccaagtgactcgctaa

SEQ ID NO: 2345546 - DNA, 25 bp, Homo sapien
catttggtctccagccagcgaagga

SEQ ID NO: 2345547 - DNA, 25 bp, Homo sapien
tcttgtgaattgacaggatagaagc

SEQ ID NO: 2345548 - DNA, 25 bp, Homo sapien
ctcttaagaactgagtaggccgaca

SEQ ID NO: 2345549 - DNA, 25 bp, Homo sapien
ttttcagtgacataatgagcatcct

SEQ ID NO: 2345550 - DNA, 25 bp, Homo sapien
gcatcctgtttccttaagcatgtaa

SEQ ID NO: 2345551 - DNA, 25 bp, Homo sapien
gcatagtgctctctatatagtaagc

SEQ ID NO: 2345552 - DNA, 25 bp, Homo sapien
gcacagtaaaccaaaaacgctgttg

SEQ ID NO: 2345553 - DNA, 25 bp, Homo sapien
aaccacactgactgggtgtgaatcc

SEQ ID NO: 2345554 - DNA, 25 bp, Homo sapien
caaatagatgattgtctcagagagg

SEQ ID NO: 2345555 - DNA, 25 bp, Homo sapien
aactctcgtggtccatcacatttca

SEQ ID NO: 2345556 - DNA, 25 bp, Homo sapien
taccaactctcgtggtccatcacat

SEQ ID NO: 2345557 - DNA, 25 bp, Homo sapien
gacaattaccaactctcgtggtcca

SEQ ID NO: 2345558 - DNA, 25 bp, Homo sapien
cagttttgacaattaccaactctcg

SEQ ID NO: 2345559 - DNA, 25 bp, Homo sapien
tctgtaggaggaccgcgttccagtg

SEQ ID NO: 2345560 - DNA, 25 bp, Homo sapien
tcctgcgggagaatcctgtggctaa

SEQ ID NO: 2345561 - DNA, 25 bp, Homo sapien
tcaccagttttctgcgggactcgca

SEQ ID NO: 2345562 - DNA, 25 bp, Homo sapien
gctaagctggttagcgacccctggt

SEQ ID NO: 2345563 - DNA, 25 bp, Homo sapien
ggtctacacccgcaggtcttcggct

SEQ ID NO: 2345564 - DNA, 25 bp, Homo sapien
tggtgaccttgagggcaccgtgccc

SEQ ID NO: 2345565 - DNA, 25 bp, Homo sapien
ctcgcaggttgcctcttgccgggag

SEQ ID NO: 2345566 - DNA, 25 bp, Homo sapien
gagggtcacccctctaatccttggc

SEQ ID NO: 2345567 - DNA, 25 bp, Homo sapien
ctccgcgtggcgccccgagccctgc

SEQ ID NO: 2345568 - DNA, 25 bp, Homo sapien
gcgtggcgccccgagccctgcgagc

SEQ ID NO: 2345569 - DNA, 25 bp, Homo sapien
ccgcgtggcgccccgagccctgcga

SEQ ID NO: 2345570 - DNA, 25 bp, Homo sapien
gtggcgccccgagccctgcgagccg

SEQ ID NO: 2345571 - DNA, 25 bp, Homo sapien
atcttgcaggccacccggtgcagac

SEQ ID NO: 2345572 - DNA, 25 bp, Homo sapien
ccagaccggaacgggtgagcgttct

SEQ ID NO: 2345573 - DNA, 25 bp, Homo sapien
gtggagaaaagggagcgccagaccg

SEQ ID NO: 2345574 - DNA, 25 bp, Homo sapien
ctgctgttgcggacggcggcgtgag

SEQ ID NO: 2345575 - DNA, 25 bp, Homo sapien
ccgcgctcagccaaggcggcagcgg

SEQ ID NO: 2345576 - DNA, 25 bp, Homo sapien
tcagccaatcgcaggctgcggcagg

SEQ ID NO: 2345577 - DNA, 25 bp, Homo sapien
tgtgactgacggagtcacctccccg

SEQ ID NO: 2345578 - DNA, 25 bp, Homo sapien
tggaaacacggacgtcagagcctct

SEQ ID NO: 2345579 - DNA, 25 bp, Homo sapien
ggcaagttctaatcgccaggcgcgc

SEQ ID NO: 2345580 - DNA, 25 bp, Homo sapien
ggttcgccttaatctgtcctcgcca

SEQ ID NO: 2345581 - DNA, 25 bp, Homo sapien
gccgctcaaatgtccgctgactggg

SEQ ID NO: 2345582 - DNA, 25 bp, Homo sapien
gacaggcgtcgagtccggtttggag

SEQ ID NO: 2345583 - DNA, 25 bp, Homo sapien
agacgcggcgaggagccgctcaaat

SEQ ID NO: 2345584 - DNA, 25 bp, Homo sapien
ccagtggcgacggtgagttcaaata

SEQ ID NO: 2345585 - DNA, 25 bp, Homo sapien
caggaagggctatttattgtaccac

SEQ ID NO: 2345586 - DNA, 25 bp, Homo sapien
ttttaagcgcggatcctgcgaggcc

SEQ ID NO: 2345587 - DNA, 25 bp, Homo sapien
cgccggttacctttgagcatcgaaa

SEQ ID NO: 2345588 - DNA, 25 bp, Homo sapien
taggattctgtaatgatcaggactg

SEQ ID NO: 2345589 - DNA, 25 bp, Homo sapien
cctattgctagatgcatgtgacaga

SEQ ID NO: 2345590 - DNA, 25 bp, Homo sapien
ggactgatgcattcacatatgtaaa

SEQ ID NO: 2345591 - DNA, 25 bp, Homo sapien
tctgtgggtttcagctaagtaatct

SEQ ID NO: 2345592 - DNA, 25 bp, Homo sapien
tttatcctttgctcgtccttcagtt

SEQ ID NO: 2345593 - DNA, 25 bp, Homo sapien
ctttatcctttgctcgtccttcagt

SEQ ID NO: 2345594 - DNA, 25 bp, Homo sapien
ttatcctttgctcgtccttcagttt

SEQ ID NO: 2345595 - DNA, 25 bp, Homo sapien
tgagacgagactggtcaggttcagg

SEQ ID NO: 2345596 - DNA, 25 bp, Homo sapien
atgagacgagactggtcaggttcag

SEQ ID NO: 2345597 - DNA, 25 bp, Homo sapien
gatgagacgagactggtcaggttca

SEQ ID NO: 2345598 - DNA, 25 bp, Homo sapien
tctttaagatatattgttaggttgc

SEQ ID NO: 2345599 - DNA, 25 bp, Homo sapien
tcctttgaatgtctgtggtactggt

SEQ ID NO: 2345600 - DNA, 25 bp, Homo sapien
aatgtctgtggtactggttgtaatg

SEQ ID NO: 2345601 - DNA, 25 bp, Homo sapien
aatctgtgtaggttgtgtgtgtcta

SEQ ID NO: 2345602 - DNA, 25 bp, Homo sapien
gaagtggcaacggtcgggggtgcca

SEQ ID NO: 2345603 - DNA, 25 bp, Homo sapien
cgggacagaagtggcaacggtcggg

SEQ ID NO: 2345604 - DNA, 25 bp, Homo sapien
ctcgggacagaagtggcaacggtcg

SEQ ID NO: 2345605 - DNA, 25 bp, Homo sapien
tgggaggcagggaacagactcggga

SEQ ID NO: 2345606 - DNA, 25 bp, Homo sapien
cagcaaccagagctatgtctgctga

SEQ ID NO: 2345607 - DNA, 25 bp, Homo sapien
cccagcaaccagagctatgtctgct

SEQ ID NO: 2345608 - DNA, 25 bp, Homo sapien
agcaaccagagctatgtctgctgac

SEQ ID NO: 2345609 - DNA, 25 bp, Homo sapien
ccccagcaaccagagctatgtctgc

SEQ ID NO: 2345610 - DNA, 25 bp, Homo sapien
ccaagtggatgtgcatccccttcct

SEQ ID NO: 2345611 - DNA, 25 bp, Homo sapien
ttgttgatgagggttcccacaggca

SEQ ID NO: 2345612 - DNA, 25 bp, Homo sapien
aagtggatgtgcatccccttcctga

SEQ ID NO: 2345613 - DNA, 25 bp, Homo sapien
gtggatgtgcatccccttcctgagc

SEQ ID NO: 2345614 - DNA, 25 bp, Homo sapien
taacggttgtgccattcaccttcca

SEQ ID NO: 2345615 - DNA, 25 bp, Homo sapien
ggcagctggataacggttgtgccat

SEQ ID NO: 2345616 - DNA, 25 bp, Homo sapien
gcatctgcctcttagagggcagctg

SEQ ID NO: 2345617 - DNA, 25 bp, Homo sapien
tcttagagggcagctggataacggt

SEQ ID NO: 2345618 - DNA, 25 bp, Homo sapien
agcctactgttgctatgcatgtttc

SEQ ID NO: 2345619 - DNA, 25 bp, Homo sapien
tcagcctactgttgctatgcatgtt

SEQ ID NO: 2345620 - DNA, 25 bp, Homo sapien
cagcctactgttgctatgcatgttt

SEQ ID NO: 2345621 - DNA, 25 bp, Homo sapien
gtttgttatgatcagtgttggatac

SEQ ID NO: 2345622 - DNA, 25 bp, Homo sapien
ctgtttgttatgatcagtgttggat

SEQ ID NO: 2345623 - DNA, 25 bp, Homo sapien
tgtttgttatgatcagtgttggata

SEQ ID NO: 2345624 - DNA, 25 bp, Homo sapien
tcatgaagggtagtggccaaatctt

SEQ ID NO: 2345625 - DNA, 25 bp, Homo sapien
ccagcaccccttgtggtgctgtagc

SEQ ID NO: 2345626 - DNA, 25 bp, Homo sapien
tgctgtagcccactggaaggcctct

SEQ ID NO: 2345627 - DNA, 25 bp, Homo sapien
gcttcacataactcttcatgaaggg

SEQ ID NO: 2345628 - DNA, 25 bp, Homo sapien
actgcatggtggtatccacagtgga

SEQ ID NO: 2345629 - DNA, 25 bp, Homo sapien
gcatggtggtatccacagtggagca

SEQ ID NO: 2345630 - DNA, 25 bp, Homo sapien
tgcatggtggtatccacagtggagc

SEQ ID NO: 2345631 - DNA, 25 bp, Homo sapien
ctgcatggtggtatccacagtggag

SEQ ID NO: 2345632 - DNA, 25 bp, Homo sapien
gggatgtccagaactatttaagagg

SEQ ID NO: 2345633 - DNA, 25 bp, Homo sapien
tccctcggttggtttagctcaggaa

SEQ ID NO: 2345634 - DNA, 25 bp, Homo sapien
tgagaccacgttctagggatgtcca

SEQ ID NO: 2345635 - DNA, 25 bp, Homo sapien
gaaaagtgccactaggacaccagaa

SEQ ID NO: 2345636 - DNA, 25 bp, Homo sapien
gttacttatccacattgaccaacag

SEQ ID NO: 2345637 - DNA, 25 bp, Homo sapien
cattgtcactgtaggtaactttagc

SEQ ID NO: 2345638 - DNA, 25 bp, Homo sapien
taagccccatgagtcctgtatactg

SEQ ID NO: 2345639 - DNA, 25 bp, Homo sapien
tgggtcaaatcgaaaaagaagaagc

SEQ ID NO: 2345640 - DNA, 25 bp, Homo sapien
taaaggctaataagtctgtccctgg

SEQ ID NO: 2345641 - DNA, 25 bp, Homo sapien
tgtggctgtgctataataaaactgc

SEQ ID NO: 2345642 - DNA, 25 bp, Homo sapien
tagctacctaggtcagaggttggaa

SEQ ID NO: 2345643 - DNA, 25 bp, Homo sapien
taaggtacctcattccaagattaga

SEQ ID NO: 2345644 - DNA, 25 bp, Homo sapien
cttcacaaggtatctgagttttacc

SEQ ID NO: 2345645 - DNA, 25 bp, Homo sapien
tgagttttaccatgccacctagctt

SEQ ID NO: 2345646 - DNA, 25 bp, Homo sapien
tctgagttttaccatgccacctagc

SEQ ID NO: 2345647 - DNA, 25 bp, Homo sapien
gttttaccatgccacctagcttcat

SEQ ID NO: 2345648 - DNA, 25 bp, Homo sapien
tttccatgaactaaggatttctgac

SEQ ID NO: 2345649 - DNA, 25 bp, Homo sapien
caaagtcaggacttagtttccatga

SEQ ID NO: 2345650 - DNA, 25 bp, Homo sapien
ttagtttccatgaactaaggatttc

SEQ ID NO: 2345651 - DNA, 25 bp, Homo sapien
ctcaaagtcaggacttagtttccat

SEQ ID NO: 2345652 - DNA, 25 bp, Homo sapien
tggttgtttctgttgccctaagtag

SEQ ID NO: 2345653 - DNA, 25 bp, Homo sapien
tgttgccctaagtagtcacttttga

SEQ ID NO: 2345654 - DNA, 25 bp, Homo sapien
gccagatactgatttttgtgttcct

SEQ ID NO: 2345655 - DNA, 25 bp, Homo sapien
tctctgatggaagtgatatgtaagc

SEQ ID NO: 2345656 - DNA, 25 bp, Homo sapien
tctttcttcggagaatgagactttc

SEQ ID NO: 2345657 - DNA, 25 bp, Homo sapien
ctttcttcggagaatgagactttca

SEQ ID NO: 2345658 - DNA, 25 bp, Homo sapien
acaaaaagtaaacgtgcacgtgcat

SEQ ID NO: 2345659 - DNA, 25 bp, Homo sapien
ttctttcttcggagaatgagacttt

SEQ ID NO: 2345660 - DNA, 25 bp, Homo sapien
ggcacttatcgaaccagaggctcag

SEQ ID NO: 2345661 - DNA, 25 bp, Homo sapien
gagaccaagcctcagatgatgtagg

SEQ ID NO: 2345662 - DNA, 25 bp, Homo sapien
gaattccaaagaaaacgactgccta

SEQ ID NO: 2345663 - DNA, 25 bp, Homo sapien
tgcatttcacctgattgagaccaag

SEQ ID NO: 2345664 - DNA, 25 bp, Homo sapien
tcactccgctgatctgtttacatgg

SEQ ID NO: 2345665 - DNA, 25 bp, Homo sapien
caatatatgtgactacaggacggaa

SEQ ID NO: 2345666 - DNA, 25 bp, Homo sapien
tcagcactgctgacgttttaaacca

SEQ ID NO: 2345667 - DNA, 25 bp, Homo sapien
gattatcctgcagaagtcactccgc

SEQ ID NO: 2345668 - DNA, 25 bp, Homo sapien
ggacctagatgttgtatatatttga

SEQ ID NO: 2345669 - DNA, 25 bp, Homo sapien
aagatcccctccataggacattttg

SEQ ID NO: 2345670 - DNA, 25 bp, Homo sapien
catcttccattaattggacctagat

SEQ ID NO: 2345671 - DNA, 25 bp, Homo sapien
cacgtcactgtaacagacatccata

SEQ ID NO: 2345672 - DNA, 25 bp, Homo sapien
aaagcctcaggatagagaccaaggc

SEQ ID NO: 2345673 - DNA, 25 bp, Homo sapien
gaaagcctcaggatagagaccaagg

SEQ ID NO: 2345674 - DNA, 25 bp, Homo sapien
attgctgttttgtgttgtgaagcac

SEQ ID NO: 2345675 - DNA, 25 bp, Homo sapien
gagccagtgagcaagagtcactaac

SEQ ID NO: 2345676 - DNA, 25 bp, Homo sapien
gttttgtgttgtgaagcaccaggac

SEQ ID NO: 2345677 - DNA, 25 bp, Homo sapien
gtgtactggctaacctgaggatttg

SEQ ID NO: 2345678 - DNA, 25 bp, Homo sapien
tactggcccatcaaactggtgagca

SEQ ID NO: 2345679 - DNA, 25 bp, Homo sapien
aatgagagcttgtcaggccttatgc

SEQ ID NO: 2345680 - DNA, 25 bp, Homo sapien
gagtgaggtggcattcacaaatatg

SEQ ID NO: 2345681 - DNA, 25 bp, Homo sapien
ctgacccaggctattggcaaatgca

SEQ ID NO: 2345682 - DNA, 25 bp, Homo sapien
ttcatcagctgtaatgtcctaagca

SEQ ID NO: 2345683 - DNA, 25 bp, Homo sapien
cctaagcatgttcacactaaggtgt

SEQ ID NO: 2345684 - DNA, 25 bp, Homo sapien
aatgacttggtgtcaaagaaatctc

SEQ ID NO: 2345685 - DNA, 25 bp, Homo sapien
cacactaaggtgtgctcctgaaagt

SEQ ID NO: 2345686 - DNA, 25 bp, Homo sapien
tataattttttatgctccctaaata

SEQ ID NO: 2345687 - DNA, 25 bp, Homo sapien
aatattctacaataagagcttattt

SEQ ID NO: 2345688 - DNA, 25 bp, Homo sapien
tatgctccctaaatattctacaata

SEQ ID NO: 2345689 - DNA, 25 bp, Homo sapien
tttttatgctccctaaatattctac

SEQ ID NO: 2345690 - DNA, 25 bp, Homo sapien
cagggttaattgcaagttttgaaag

SEQ ID NO: 2345691 - DNA, 25 bp, Homo sapien
tactctacgcagtttgctctgaatc

SEQ ID NO: 2345692 - DNA, 25 bp, Homo sapien
tcagccccaggattcagtgtttccc

SEQ ID NO: 2345693 - DNA, 25 bp, Homo sapien
cagtgtttccctgtatcttgcatac

SEQ ID NO: 2345694 - DNA, 25 bp, Homo sapien
tggtaaacagccaggatgtaaactg

SEQ ID NO: 2345695 - DNA, 25 bp, Homo sapien
atagcatataaacaggactgaaaat

SEQ ID NO: 2345696 - DNA, 25 bp, Homo sapien
tatagacctgctcaatagtgggcat

SEQ ID NO: 2345697 - DNA, 25 bp, Homo sapien
gtgtttgacgatcattgtaaatagc

SEQ ID NO: 2345698 - DNA, 25 bp, Homo sapien
gcatagatacagtgaaagatactga

SEQ ID NO: 2345699 - DNA, 25 bp, Homo sapien
tgtgttgttgcaggacagcagtcaa

SEQ ID NO: 2345700 - DNA, 25 bp, Homo sapien
gttgttgcaggacagcagtcaaaga

SEQ ID NO: 2345701 - DNA, 25 bp, Homo sapien
tctgtgttgttgcaggacagcagtc

SEQ ID NO: 2345702 - DNA, 25 bp, Homo sapien
tgtctgtgttgttgcaggacagcag

SEQ ID NO: 2345703 - DNA, 25 bp, Homo sapien
tcaggcttacaaaacacccagccac

SEQ ID NO: 2345704 - DNA, 25 bp, Homo sapien
caggcttacaaaacacccagccaca

SEQ ID NO: 2345705 - DNA, 25 bp, Homo sapien
gtcttggcccgtgaagtctgtgtgt

SEQ ID NO: 2345706 - DNA, 25 bp, Homo sapien
ctgtcttggcccgtgaagtctgtgt

SEQ ID NO: 2345707 - DNA, 25 bp, Homo sapien
atacgacaccaggagagtcatttgc

SEQ ID NO: 2345708 - DNA, 25 bp, Homo sapien
tacgacaccaggagagtcatttgcc

SEQ ID NO: 2345709 - DNA, 25 bp, Homo sapien
tacccggaggtgcagcacaactgct

SEQ ID NO: 2345710 - DNA, 25 bp, Homo sapien
tctttggagcaaatgaagcttgcag

SEQ ID NO: 2345711 - DNA, 25 bp, Homo sapien
gaacttcagcctccgtgtcagtggc

SEQ ID NO: 2345712 - DNA, 25 bp, Homo sapien
gtccaacccggtttgcagcaagcag

SEQ ID NO: 2345713 - DNA, 25 bp, Homo sapien
tgtgcttcaagaggaaacggatctc

SEQ ID NO: 2345714 - DNA, 25 bp, Homo sapien
tgttatttgcaacgagaagattccc

SEQ ID NO: 2345715 - DNA, 25 bp, Homo sapien
tagagcctccagaagaattgacagc

SEQ ID NO: 2345716 - DNA, 25 bp, Homo sapien
gggactggtacccaatgcagagcaa

SEQ ID NO: 2345717 - DNA, 25 bp, Homo sapien
taactgataaaagagatccaaccag

SEQ ID NO: 2345718 - DNA, 25 bp, Homo sapien
ctagtaactgataaaagagatccaa

SEQ ID NO: 2345719 - DNA, 25 bp, Homo sapien
ctgataaaagagatccaaccagagc

SEQ ID NO: 2345720 - DNA, 25 bp, Homo sapien
gcctttaggaagctagctttggcaa

SEQ ID NO: 2345721 - DNA, 25 bp, Homo sapien
tacaccaatcctaaaggatatgatg

SEQ ID NO: 2345722 - DNA, 25 bp, Homo sapien
acagggtgaccttgcagactgaggc

SEQ ID NO: 2345723 - DNA, 25 bp, Homo sapien
aagtacaccaatcctaaaggatatg

SEQ ID NO: 2345724 - DNA, 25 bp, Homo sapien
cataaagtacaccaatcctaaagga

SEQ ID NO: 2345725 - DNA, 25 bp, Homo sapien
agacacaacgtccaccaaaatgtgg

SEQ ID NO: 2345726 - DNA, 25 bp, Homo sapien
gaagcagatcctgtaattgcccaaa

SEQ ID NO: 2345727 - DNA, 25 bp, Homo sapien
gaggttcagaactgccagcaatggt

SEQ ID NO: 2345728 - DNA, 25 bp, Homo sapien
taattgcccaaactgggtagcttct

SEQ ID NO: 2345729 - DNA, 25 bp, Homo sapien
gaatctcactgggttcaactcaagt

SEQ ID NO: 2345730 - DNA, 25 bp, Homo sapien
tgtagatatctatgggacatgggtg

SEQ ID NO: 2345731 - DNA, 25 bp, Homo sapien
taattctgcctaacacagcagcctg

SEQ ID NO: 2345732 - DNA, 25 bp, Homo sapien
ctgaatacattgagcccactggaat

SEQ ID NO: 2345733 - DNA, 25 bp, Homo sapien
gacataagtttaaggttctgcttaa

SEQ ID NO: 2345734 - DNA, 25 bp, Homo sapien
aattctgacataagtttaaggttct

SEQ ID NO: 2345735 - DNA, 25 bp, Homo sapien
ttctgacataagtttaaggttctgc

SEQ ID NO: 2345736 - DNA, 25 bp, Homo sapien
gctgatctctggtgattaaaaattc

SEQ ID NO: 2345737 - DNA, 25 bp, Homo sapien
ccagacatcccatgtcctttcacat

SEQ ID NO: 2345738 - DNA, 25 bp, Homo sapien
agacatcccatgtcctttcacatca

SEQ ID NO: 2345739 - DNA, 25 bp, Homo sapien
gcttcccagacatcccatgtccttt

SEQ ID NO: 2345740 - DNA, 25 bp, Homo sapien
tcccagacatcccatgtcctttcac

SEQ ID NO: 2345741 - DNA, 25 bp, Homo sapien
cctttggagacaagcctgactctgc

SEQ ID NO: 2345742 - DNA, 25 bp, Homo sapien
ctttcaccctcatatccacctttgg

SEQ ID NO: 2345743 - DNA, 25 bp, Homo sapien
aagacttttgtgatgcagaatgaaa

SEQ ID NO: 2345744 - DNA, 25 bp, Homo sapien
tgactctgccagacagtcttaagac

SEQ ID NO: 2345745 - DNA, 25 bp, Homo sapien
tccactggcattgctcttatccact

SEQ ID NO: 2345746 - DNA, 25 bp, Homo sapien
caaggagtcagaacatgctcctcct

SEQ ID NO: 2345747 - DNA, 25 bp, Homo sapien
gaaactctccatccactggcattgc

SEQ ID NO: 2345748 - DNA, 25 bp, Homo sapien
aaggagtcagaacatgctcctcctg

SEQ ID NO: 2345749 - DNA, 25 bp, Homo sapien
ctgcttgtgacatgccaggtagact

SEQ ID NO: 2345750 - DNA, 25 bp, Homo sapien
tgtgacatgccaggtagactccatg

SEQ ID NO: 2345751 - DNA, 25 bp, Homo sapien
cttgtgacatgccaggtagactcca

SEQ ID NO: 2345752 - DNA, 25 bp, Homo sapien
catgccaggtagactccatgtgata

SEQ ID NO: 2345753 - DNA, 25 bp, Homo sapien
aggataacagcattcagtagtggct

SEQ ID NO: 2345754 - DNA, 25 bp, Homo sapien
taacagcattcagtagtggctttct

SEQ ID NO: 2345755 - DNA, 25 bp, Homo sapien
cgcagaaagcgggaatgaacaattt

SEQ ID NO: 2345756 - DNA, 25 bp, Homo sapien
aaagagattgttaaaacgcagaaag

SEQ ID NO: 2345757 - DNA, 25 bp, Homo sapien
aatacaacacagtgatataattaga

SEQ ID NO: 2345758 - DNA, 25 bp, Homo sapien
ttaaatacaacacagtgatataatt

SEQ ID NO: 2345759 - DNA, 25 bp, Homo sapien
ctattaaatacaacacagtgatata

SEQ ID NO: 2345760 - DNA, 25 bp, Homo sapien
tattaaatacaacacagtgatataa

SEQ ID NO: 2345761 - DNA, 25 bp, Homo sapien
tattcttgggaggagtaattccctg

SEQ ID NO: 2345762 - DNA, 25 bp, Homo sapien
tcttgggaggagtaattccctgttc

SEQ ID NO: 2345763 - DNA, 25 bp, Homo sapien
gaatattcttgggaggagtaattcc

SEQ ID NO: 2345764 - DNA, 25 bp, Homo sapien
ggaggagtaattccctgttcgaatg

SEQ ID NO: 2345765 - DNA, 25 bp, Homo sapien
aatcttgtctttcagtgatcttaat

SEQ ID NO: 2345766 - DNA, 25 bp, Homo sapien
tccacctcctatttgaataatggaa

SEQ ID NO: 2345767 - DNA, 25 bp, Homo sapien
cctatttgaataatggaaaatcctt

SEQ ID NO: 2345768 - DNA, 25 bp, Homo sapien
tctttcagtgatcttaatccagtaa

SEQ ID NO: 2345769 - DNA, 25 bp, Homo sapien
tagtaggaaagccacctacaaatcc

SEQ ID NO: 2345770 - DNA, 25 bp, Homo sapien
aagccacctacaaatccttgtaaga

SEQ ID NO: 2345771 - DNA, 25 bp, Homo sapien
cacctacaaatccttgtaagaaaca

SEQ ID NO: 2345772 - DNA, 25 bp, Homo sapien
gtccagaaatttagtaggaaagcca

SEQ ID NO: 2345773 - DNA, 25 bp, Homo sapien
tctccttgggaacaattgtgtgaat

SEQ ID NO: 2345774 - DNA, 25 bp, Homo sapien
gaagggcacaatctggagccagtca

SEQ ID NO: 2345775 - DNA, 25 bp, Homo sapien
gatctcctccctatgaaatgctact

SEQ ID NO: 2345776 - DNA, 25 bp, Homo sapien
catttacaatcaactgacctgaggt

SEQ ID NO: 2345777 - DNA, 25 bp, Homo sapien
tcacaggtatctgaataattcattt

SEQ ID NO: 2345778 - DNA, 25 bp, Homo sapien
ggtatctgaataattcattttgagt

SEQ ID NO: 2345779 - DNA, 25 bp, Homo sapien
caggtatctgaataattcattttga

SEQ ID NO: 2345780 - DNA, 25 bp, Homo sapien
tatctgaataattcattttgagtct

SEQ ID NO: 2345781 - DNA, 25 bp, Homo sapien
tattatgaaagctcactgtgcctta

SEQ ID NO: 2345782 - DNA, 25 bp, Homo sapien
tattgaatatatagtgcgtacctac

SEQ ID NO: 2345783 - DNA, 25 bp, Homo sapien
tgttgggaactgaccctgctatacc

SEQ ID NO: 2345784 - DNA, 25 bp, Homo sapien
aatgtgggtaatccatagtgtgatc

SEQ ID NO: 2345785 - DNA, 25 bp, Homo sapien
acagtccttaagagtataatagatc

SEQ ID NO: 2345786 - DNA, 25 bp, Homo sapien
cagtccttaagagtataatagatct

SEQ ID NO: 2345787 - DNA, 25 bp, Homo sapien
gtccttaagagtataatagatctga

SEQ ID NO: 2345788 - DNA, 25 bp, Homo sapien
ccttaagagtataatagatctgaat

SEQ ID NO: 2345789 - DNA, 25 bp, Homo sapien
aaataaccgttcctaagcactggct

SEQ ID NO: 2345790 - DNA, 25 bp, Homo sapien
tcttctaagaagtatccatgcagcg

SEQ ID NO: 2345791 - DNA, 25 bp, Homo sapien
ccatgcagcgatgtcgacaggaaaa

SEQ ID NO: 2345792 - DNA, 25 bp, Homo sapien
tttgaagacgactgccattggaggg

SEQ ID NO: 2345793 - DNA, 25 bp, Homo sapien
gactgatcttctgttaaactggcaa

SEQ ID NO: 2345794 - DNA, 25 bp, Homo sapien
tgtctccagcactaacaagttggca

SEQ ID NO: 2345795 - DNA, 25 bp, Homo sapien
caggatattgtttccccacacaggt

SEQ ID NO: 2345796 - DNA, 25 bp, Homo sapien
tgcgaaccttcagtatgatccagga

SEQ ID NO: 2345797 - DNA, 25 bp, Homo sapien
caattaaacatcatagcttgggcaa

SEQ ID NO: 2345798 - DNA, 25 bp, Homo sapien
tccaccatgatgacaacagtagcaa

SEQ ID NO: 2345799 - DNA, 25 bp, Homo sapien
gagtattcaggttcagttgtgggct

SEQ ID NO: 2345800 - DNA, 25 bp, Homo sapien
gcttgggcaaacctgtacttaacat

SEQ ID NO: 2345801 - DNA, 25 bp, Homo sapien
tacctcccacattgcacatgttgta

SEQ ID NO: 2345802 - DNA, 25 bp, Homo sapien
ggcttggcacttctgtactgagtag

SEQ ID NO: 2345803 - DNA, 25 bp, Homo sapien
tatgtggcccatctgttaaggagtt

SEQ ID NO: 2345804 - DNA, 25 bp, Homo sapien
tgtttcttgcccagagccatactac

SEQ ID NO: 2345805 - DNA, 25 bp, Homo sapien
accagacaaaatactcagagagtga

SEQ ID NO: 2345806 - DNA, 25 bp, Homo sapien
taccagacaaaatactcagagagtg

SEQ ID NO: 2345807 - DNA, 25 bp, Homo sapien
cagacaaaatactcagagagtgaac

SEQ ID NO: 2345808 - DNA, 25 bp, Homo sapien
agacaaaatactcagagagtgaaca

SEQ ID NO: 2345809 - DNA, 25 bp, Homo sapien
cccttgaaggcaactacagttccga

SEQ ID NO: 2345810 - DNA, 25 bp, Homo sapien
ggcagcacaagtggatttgtcagct

SEQ ID NO: 2345811 - DNA, 25 bp, Homo sapien
aagtgccacattcggcattctctgc

SEQ ID NO: 2345812 - DNA, 25 bp, Homo sapien
gtggatttgtcagctccagcaagtg

SEQ ID NO: 2345813 - DNA, 25 bp, Homo sapien
ttaatatcctaagccagtctttaaa

SEQ ID NO: 2345814 - DNA, 25 bp, Homo sapien
tttaaaggcttcttcgcttgcctgt

SEQ ID NO: 2345815 - DNA, 25 bp, Homo sapien
gcttcttcgcttgcctgtcagctgc

SEQ ID NO: 2345816 - DNA, 25 bp, Homo sapien
aaggcttcttcgcttgcctgtcagc

SEQ ID NO: 2345817 - DNA, 25 bp, Homo sapien
caagcaagtgatgtattgaaaagat

SEQ ID NO: 2345818 - DNA, 25 bp, Homo sapien
ttggagaagatccttgagtcttaga

SEQ ID NO: 2345819 - DNA, 25 bp, Homo sapien
ttgaatgctgtgttaatcaggacaa

SEQ ID NO: 2345820 - DNA, 25 bp, Homo sapien
agatccttgagtcttagatttgcct

SEQ ID NO: 2345821 - DNA, 25 bp, Homo sapien
cgttacgtcatctgggctatgaaga

SEQ ID NO: 2345822 - DNA, 25 bp, Homo sapien
acagctcaaatcatgtggcgttacg

SEQ ID NO: 2345823 - DNA, 25 bp, Homo sapien
gctatgaagaatccaaatggtgatg

SEQ ID NO: 2345824 - DNA, 25 bp, Homo sapien
gatgggtgccgttttcctgttgtcc

SEQ ID NO: 2345825 - DNA, 25 bp, Homo sapien
accctcgtgcatatagaatttcagg

SEQ ID NO: 2345826 - DNA, 25 bp, Homo sapien
ctgcccttaaactgaaagtttggct

SEQ ID NO: 2345827 - DNA, 25 bp, Homo sapien
ttggcttttctgaggcaaacttcat

SEQ ID NO: 2345828 - DNA, 25 bp, Homo sapien
tttggcttttctgaggcaaacttca

SEQ ID NO: 2345829 - DNA, 25 bp, Homo sapien
ctggctgcccttaaactgaaagttt

SEQ ID NO: 2345830 - DNA, 25 bp, Homo sapien
tcaaggcttctgctagtctatatgg

SEQ ID NO: 2345831 - DNA, 25 bp, Homo sapien
aagaagtaccttctgggtggcccag

SEQ ID NO: 2345832 - DNA, 25 bp, Homo sapien
aaggtgtatccagtgggcggtaaca

SEQ ID NO: 2345833 - DNA, 25 bp, Homo sapien
tttggtgtgatttgcaagaagtacc

SEQ ID NO: 2345834 - DNA, 25 bp, Homo sapien
tctggaactgacagttgtagaggtg

SEQ ID NO: 2345835 - DNA, 25 bp, Homo sapien
gctccctttgtgatacagttcggta

SEQ ID NO: 2345836 - DNA, 25 bp, Homo sapien
gagccttcctgaactagcaatggca

SEQ ID NO: 2345837 - DNA, 25 bp, Homo sapien
ggtggctccttaattccacaagcag

SEQ ID NO: 2345838 - DNA, 25 bp, Homo sapien
ttccttctgaggtatatcctgggtt

SEQ ID NO: 2345839 - DNA, 25 bp, Homo sapien
ctgaggtatatcctgggtttgcaaa

SEQ ID NO: 2345840 - DNA, 25 bp, Homo sapien
aaattgtgactgattaatatcaccc

SEQ ID NO: 2345841 - DNA, 25 bp, Homo sapien
cctgtaccattcacgttcattttcc

SEQ ID NO: 2345842 - DNA, 25 bp, Homo sapien
gcaagctgatctataggccttatca

SEQ ID NO: 2345843 - DNA, 25 bp, Homo sapien
tatgctggcaagctgatctataggc

SEQ ID NO: 2345844 - DNA, 25 bp, Homo sapien
cctgctgtctatgctggcaagctga

SEQ ID NO: 2345845 - DNA, 25 bp, Homo sapien
gatctataggccttatcaccaagca

SEQ ID NO: 2345846 - DNA, 25 bp, Homo sapien
tgactgaggtcttccggtggtttga

SEQ ID NO: 2345847 - DNA, 25 bp, Homo sapien
ccggaaaacccacatgactgaggtc

SEQ ID NO: 2345848 - DNA, 25 bp, Homo sapien
gtgaaccggaaaacccacatgactg

SEQ ID NO: 2345849 - DNA, 25 bp, Homo sapien
gactgaggtcttccggtggtttgac

SEQ ID NO: 2345850 - DNA, 25 bp, Homo sapien
tcaaaatctggctggtaatgagccc

SEQ ID NO: 2345851 - DNA, 25 bp, Homo sapien
cagtagtgaatgaagccgtggtcaa

SEQ ID NO: 2345852 - DNA, 25 bp, Homo sapien
agggaattctccgacagttcaagga

SEQ ID NO: 2345853 - DNA, 25 bp, Homo sapien
gagaactgaagcatcatcagggccc

SEQ ID NO: 2345854 - DNA, 25 bp, Homo sapien
ggctaagcttcactgatttaaggag

SEQ ID NO: 2345855 - DNA, 25 bp, Homo sapien
gatttcagacacagcttaagagggt

SEQ ID NO: 2345856 - DNA, 25 bp, Homo sapien
taggttagacctatgcaggataatc

SEQ ID NO: 2345857 - DNA, 25 bp, Homo sapien
tacacagggctaaattaaggctaag

SEQ ID NO: 2345858 - DNA, 25 bp, Homo sapien
tggggtgaagcactccagcaaccat

SEQ ID NO: 2345859 - DNA, 25 bp, Homo sapien
cttgccagaaatacagatctatggg

SEQ ID NO: 2345860 - DNA, 25 bp, Homo sapien
tcatgtaataccagatatatccttt

SEQ ID NO: 2345861 - DNA, 25 bp, Homo sapien
aataccagatatatcctttttgccc

SEQ ID NO: 2345862 - DNA, 25 bp, Homo sapien
ctcacaccgcagttgggtcttagca

SEQ ID NO: 2345863 - DNA, 25 bp, Homo sapien
cagttgggtcttagcagtttgtttc

SEQ ID NO: 2345864 - DNA, 25 bp, Homo sapien
ccgcagttgggtcttagcagtttgt

SEQ ID NO: 2345865 - DNA, 25 bp, Homo sapien
gtcttagcagtttgtttccacttca

SEQ ID NO: 2345866 - DNA, 25 bp, Homo sapien
acattttgccaagtactctgacatc

SEQ ID NO: 2345867 - DNA, 25 bp, Homo sapien
tgttggaagtaaaagccaacctaca

SEQ ID NO: 2345868 - DNA, 25 bp, Homo sapien
tacagaatatgtttggttgtgatat

SEQ ID NO: 2345869 - DNA, 25 bp, Homo sapien
tttgccaagtactctgacatctcta

SEQ ID NO: 2345870 - DNA, 25 bp, Homo sapien
cagctgcttctgattacaactctgg

SEQ ID NO: 2345871 - DNA, 25 bp, Homo sapien
tgattacaactctggatttggactc

SEQ ID NO: 2345872 - DNA, 25 bp, Homo sapien
gctgcttctgattacaactctggat

SEQ ID NO: 2345873 - DNA, 25 bp, Homo sapien
gcttctgattacaactctggatttg

SEQ ID NO: 2345874 - DNA, 25 bp, Homo sapien
acttccagattagcacccatgagga

SEQ ID NO: 2345875 - DNA, 25 bp, Homo sapien
aaggattcccggttgggtgagtcat

SEQ ID NO: 2345876 - DNA, 25 bp, Homo sapien
tccttgtgtcaggaaaaataacttc

SEQ ID NO: 2345877 - DNA, 25 bp, Homo sapien
tgccaagaggagtttgtatagccct

SEQ ID NO: 2345878 - DNA, 25 bp, Homo sapien
accctgcaagtgtggaacattatca

SEQ ID NO: 2345879 - DNA, 25 bp, Homo sapien
aaccctgcaagtgtggaacattatc

SEQ ID NO: 2345880 - DNA, 25 bp, Homo sapien
gaaccctgcaagtgtggaacattat

SEQ ID NO: 2345881 - DNA, 25 bp, Homo sapien
tttaattgaggaagtttatcactgg

SEQ ID NO: 2345882 - DNA, 25 bp, Homo sapien
taattgaggaagtttatcactggtg

SEQ ID NO: 2345883 - DNA, 25 bp, Homo sapien
ctttaattgaggaagtttatcactg

SEQ ID NO: 2345884 - DNA, 25 bp, Homo sapien
ttaattgaggaagtttatcactggt

SEQ ID NO: 2345885 - DNA, 25 bp, Homo sapien
cattcttagatgttcagttcccttg

SEQ ID NO: 2345886 - DNA, 25 bp, Homo sapien
ttcttagatgttcagttcccttggc

SEQ ID NO: 2345887 - DNA, 25 bp, Homo sapien
ctgggctcacagcaattgtgagaag

SEQ ID NO: 2345888 - DNA, 25 bp, Homo sapien
taggcagtcatcagtatctgggctc

SEQ ID NO: 2345889 - DNA, 25 bp, Homo sapien
tattttcaagcaatgattccccccc

SEQ ID NO: 2345890 - DNA, 25 bp, Homo sapien
gattacaggcgtattaaactcttca

SEQ ID NO: 2345891 - DNA, 25 bp, Homo sapien
cactaatagttgtagaataatagta

SEQ ID NO: 2345892 - DNA, 25 bp, Homo sapien
aatgacactaaatttgtaacttcac

SEQ ID NO: 2345893 - DNA, 25 bp, Homo sapien
gggcactctttggaagttagctgat

SEQ ID NO: 2345894 - DNA, 25 bp, Homo sapien
ggcactctttggaagttagctgatt

SEQ ID NO: 2345895 - DNA, 25 bp, Homo sapien
tttggaagttagctgatttgtccaa

SEQ ID NO: 2345896 - DNA, 25 bp, Homo sapien
cactctttggaagttagctgatttg

SEQ ID NO: 2345897 - DNA, 25 bp, Homo sapien
aaactatggagaaaactgccacgat

SEQ ID NO: 2345898 - DNA, 25 bp, Homo sapien
gaaactatggagaaaactgccacga

SEQ ID NO: 2345899 - DNA, 25 bp, Homo sapien
ggaaactatggagaaaactgccacg

SEQ ID NO: 2345900 - DNA, 25 bp, Homo sapien
tggaaactatggagaaaactgccac

SEQ ID NO: 2345901 - DNA, 25 bp, Homo sapien
ttatgacgtttctccaaagcaatgg

SEQ ID NO: 2345902 - DNA, 25 bp, Homo sapien
aagcaatggtgaggctaaattctcc

SEQ ID NO: 2345903 - DNA, 25 bp, Homo sapien
tctccaaagcaatggtgaggctaaa

SEQ ID NO: 2345904 - DNA, 25 bp, Homo sapien
tgtgtcattatgacgtttctccaaa

SEQ ID NO: 2345905 - DNA, 25 bp, Homo sapien
tttattttttcgattgcaaaggcat

SEQ ID NO: 2345906 - DNA, 25 bp, Homo sapien
ttttttcgattgcaaaggcatgaag

SEQ ID NO: 2345907 - DNA, 25 bp, Homo sapien
ttttcgattgcaaaggcatgaagca

SEQ ID NO: 2345908 - DNA, 25 bp, Homo sapien
ttcgattgcaaaggcatgaagcaac

SEQ ID NO: 2345909 - DNA, 25 bp, Homo sapien
cactgaaatgatttagctcttggat

SEQ ID NO: 2345910 - DNA, 25 bp, Homo sapien
catcactgaaatgatttagctcttg

SEQ ID NO: 2345911 - DNA, 25 bp, Homo sapien
tcactgaaatgatttagctcttgga

SEQ ID NO: 2345912 - DNA, 25 bp, Homo sapien
caacatcactgaaatgatttagctc

SEQ ID NO: 2345913 - DNA, 25 bp, Homo sapien
tcctgtccttcccaaagtgtcgtcc

SEQ ID NO: 2345914 - DNA, 25 bp, Homo sapien
tcagccccatgtaatatcagaatgt

SEQ ID NO: 2345915 - DNA, 25 bp, Homo sapien
caaagtgtcgtcctcctggatcagc

SEQ ID NO: 2345916 - DNA, 25 bp, Homo sapien
tcagaatgttagagttgatatgaaa

SEQ ID NO: 2345917 - DNA, 25 bp, Homo sapien
tttcttaattctgtgaaggcgtgcc

SEQ ID NO: 2345918 - DNA, 25 bp, Homo sapien
gacaaaaataattgctcacttgtat

SEQ ID NO: 2345919 - DNA, 25 bp, Homo sapien
tacaccttaccattcctaaagacaa

SEQ ID NO: 2345920 - DNA, 25 bp, Homo sapien
caaaaggatatctgaagcatgattc

SEQ ID NO: 2345921 - DNA, 25 bp, Homo sapien
caaatctaggaagttgatcttcttt

SEQ ID NO: 2345922 - DNA, 25 bp, Homo sapien
tctttaagcaaacctttcagaggaa

SEQ ID NO: 2345923 - DNA, 25 bp, Homo sapien
ttaagcaaacctttcagaggaagca

SEQ ID NO: 2345924 - DNA, 25 bp, Homo sapien
cttctttaagcaaacctttcagagg

SEQ ID NO: 2345925 - DNA, 25 bp, Homo sapien
cacttagcagtgtgacactggtcat

SEQ ID NO: 2345926 - DNA, 25 bp, Homo sapien
ttctagatggcatcagtacagaatg

SEQ ID NO: 2345927 - DNA, 25 bp, Homo sapien
attctagatggcatcagtacagaat

SEQ ID NO: 2345928 - DNA, 25 bp, Homo sapien
gcagtgtgacactggtcatttacaa

SEQ ID NO: 2345929 - DNA, 25 bp, Homo sapien
tgtggaacactgaagtctctgaatc

SEQ ID NO: 2345930 - DNA, 25 bp, Homo sapien
agcagaggccactgttgattccact

SEQ ID NO: 2345931 - DNA, 25 bp, Homo sapien
agtgttgccttccagccatatttgc

SEQ ID NO: 2345932 - DNA, 25 bp, Homo sapien
ccactgttgattccactggagagaa

SEQ ID NO: 2345933 - DNA, 25 bp, Homo sapien
cagtgactgcccatgggtgattcta

SEQ ID NO: 2345934 - DNA, 25 bp, Homo sapien
taattctcaggtggttggttggtgc

SEQ ID NO: 2345935 - DNA, 25 bp, Homo sapien
tgctgctggtaaccagtgactgccc

SEQ ID NO: 2345936 - DNA, 25 bp, Homo sapien
tacaacaggtgactgttcactgact

SEQ ID NO: 2345937 - DNA, 25 bp, Homo sapien
caacaggatgggaaagccgatgtgc

SEQ ID NO: 2345938 - DNA, 25 bp, Homo sapien
gaaagccgatgtgcaaattcagaat

SEQ ID NO: 2345939 - DNA, 25 bp, Homo sapien
gatgggaaagccgatgtgcaaattc

SEQ ID NO: 2345940 - DNA, 25 bp, Homo sapien
gagcaacaggatgggaaagccgatg

SEQ ID NO: 2345941 - DNA, 25 bp, Homo sapien
gaaagcttctcataagacactgatc

SEQ ID NO: 2345942 - DNA, 25 bp, Homo sapien
taacgaggtttctaatactgagcat

SEQ ID NO: 2345943 - DNA, 25 bp, Homo sapien
tgtttagcagatgttagaaagcttc

SEQ ID NO: 2345944 - DNA, 25 bp, Homo sapien
tactgagcatcaggccttgtccagg

SEQ ID NO: 2345945 - DNA, 25 bp, Homo sapien
aaacatgtatagcatcaagggatgt

SEQ ID NO: 2345946 - DNA, 25 bp, Homo sapien
catgtatagcatcaagggatgtcat

SEQ ID NO: 2345947 - DNA, 25 bp, Homo sapien
acatgtatagcatcaagggatgtca

SEQ ID NO: 2345948 - DNA, 25 bp, Homo sapien
gtatagcatcaagggatgtcatcat

SEQ ID NO: 2345949 - DNA, 25 bp, Homo sapien
ccataagctggtaacttgatcaaac

SEQ ID NO: 2345950 - DNA, 25 bp, Homo sapien
aagaccataagctggtaacttgatc

SEQ ID NO: 2345951 - DNA, 25 bp, Homo sapien
tcaaagaccataagctggtaacttg

SEQ ID NO: 2345952 - DNA, 25 bp, Homo sapien
gctggtaacttgatcaaactgtcca

SEQ ID NO: 2345953 - DNA, 25 bp, Homo sapien
gcccaacttcaaatgaagtagtgct

SEQ ID NO: 2345954 - DNA, 25 bp, Homo sapien
tagtctggtatttattagcatgaac

SEQ ID NO: 2345955 - DNA, 25 bp, Homo sapien
tttgtccaaagccaacccaggcatt

SEQ ID NO: 2345956 - DNA, 25 bp, Homo sapien
tatacaactaagtagaactctttct

SEQ ID NO: 2345957 - DNA, 25 bp, Homo sapien
agatttgtctgtggctccgctgtag

SEQ ID NO: 2345958 - DNA, 25 bp, Homo sapien
gactaaaggtctgcttcacttgaaa

SEQ ID NO: 2345959 - DNA, 25 bp, Homo sapien
ccgctgtaggtctatgggttgacta

SEQ ID NO: 2345960 - DNA, 25 bp, Homo sapien
catgtatgaagcctgagatttgtct

SEQ ID NO: 2345961 - DNA, 25 bp, Homo sapien
atcaggtcccacttctagttctagt

SEQ ID NO: 2345962 - DNA, 25 bp, Homo sapien
ctaatcaggtcccacttctagttct

SEQ ID NO: 2345963 - DNA, 25 bp, Homo sapien
aatcaggtcccacttctagttctag

SEQ ID NO: 2345964 - DNA, 25 bp, Homo sapien
caggtcccacttctagttctagttc

SEQ ID NO: 2345965 - DNA, 25 bp, Homo sapien
tcagtggacattgtagattagacag

SEQ ID NO: 2345966 - DNA, 25 bp, Homo sapien
tccaggtgctttgctttgctcgagc

SEQ ID NO: 2345967 - DNA, 25 bp, Homo sapien
tgctttgctcgagcaaggccagaaa

SEQ ID NO: 2345968 - DNA, 25 bp, Homo sapien
attctgaactagctctgatctccag

SEQ ID NO: 2345969 - DNA, 25 bp, Homo sapien
ggtgataccatttaggatgtagaca

SEQ ID NO: 2345970 - DNA, 25 bp, Homo sapien
gtgataccatttaggatgtagacac

SEQ ID NO: 2345971 - DNA, 25 bp, Homo sapien
ctaggtgataccatttaggatgtag

SEQ ID NO: 2345972 - DNA, 25 bp, Homo sapien
taggtgataccatttaggatgtaga

SEQ ID NO: 2345973 - DNA, 25 bp, Homo sapien
ttcacgtgatgataaggcagtcctc

SEQ ID NO: 2345974 - DNA, 25 bp, Homo sapien
tcttcattgcctgatacctgctgta

SEQ ID NO: 2345975 - DNA, 25 bp, Homo sapien
ggcagtcctctaatgagaactttgc

SEQ ID NO: 2345976 - DNA, 25 bp, Homo sapien
agtttgacatccctattcacgtgat

SEQ ID NO: 2345977 - DNA, 25 bp, Homo sapien
tgtcatgggcctttgaccgcagccc

SEQ ID NO: 2345978 - DNA, 25 bp, Homo sapien
caatctctgtcatgggcctttgacc

SEQ ID NO: 2345979 - DNA, 25 bp, Homo sapien
tgccatcctccagctatgttgaaaa

SEQ ID NO: 2345980 - DNA, 25 bp, Homo sapien
tgaaaatccatgcaacaatctctgt

SEQ ID NO: 2345981 - DNA, 25 bp, Homo sapien
ggagcgtgcattgcttcttctctca

SEQ ID NO: 2345982 - DNA, 25 bp, Homo sapien
gcttcttctctcatgctcatgggaa

SEQ ID NO: 2345983 - DNA, 25 bp, Homo sapien
aggaatctgccggagcgtgcattgc

SEQ ID NO: 2345984 - DNA, 25 bp, Homo sapien
tgccggagcgtgcattgcttcttct

SEQ ID NO: 2345985 - DNA, 25 bp, Homo sapien
gaaatctggtgctcctcagaggtat

SEQ ID NO: 2345986 - DNA, 25 bp, Homo sapien
ggtgctcctcagaggtatttggttc

SEQ ID NO: 2345987 - DNA, 25 bp, Homo sapien
tgaaatctggtgctcctcagaggta

SEQ ID NO: 2345988 - DNA, 25 bp, Homo sapien
tctggtgctcctcagaggtatttgg

SEQ ID NO: 2345989 - DNA, 25 bp, Homo sapien
aggctggcagtgatgacgcatgact

SEQ ID NO: 2345990 - DNA, 25 bp, Homo sapien
agagcaatcaaagcatcccataagc

SEQ ID NO: 2345991 - DNA, 25 bp, Homo sapien
tgatgacgcatgactgcagcttcct

SEQ ID NO: 2345992 - DNA, 25 bp, Homo sapien
actgtcaagagatgtgaggctggca

SEQ ID NO: 2345993 - DNA, 25 bp, Homo sapien
tctgctttggaacatcacctcttgc

SEQ ID NO: 2345994 - DNA, 25 bp, Homo sapien
atataaacttagccttcctctgctt

SEQ ID NO: 2345995 - DNA, 25 bp, Homo sapien
tataaacttagccttcctctgcttt

SEQ ID NO: 2345996 - DNA, 25 bp, Homo sapien
tgctttggaacatcacctcttgctt

SEQ ID NO: 2345997 - DNA, 25 bp, Homo sapien
ttttgtttttgaccacagattccac

SEQ ID NO: 2345998 - DNA, 25 bp, Homo sapien
tgtttttgaccacagattccaccaa

SEQ ID NO: 2345999 - DNA, 25 bp, Homo sapien
tgctggcgcaagtggtcttgcgtct

SEQ ID NO: 2346000 - DNA, 25 bp, Homo sapien
caggtagatgtcttccgggcagctc

SEQ ID NO: 2346001 - DNA, 25 bp, Homo sapien
catgactgctacgtagtacacgatg

SEQ ID NO: 2346002 - DNA, 25 bp, Homo sapien
cccagtctgacatgactgctacgta

SEQ ID NO: 2346003 - DNA, 25 bp, Homo sapien
tgttttaacgaacgcctggctgcag

SEQ ID NO: 2346004 - DNA, 25 bp, Homo sapien
aattgtttcgagacccaagtcctca

SEQ ID NO: 2346005 - DNA, 25 bp, Homo sapien
tgggaccaacaaacaatacaaggcg

SEQ ID NO: 2346006 - DNA, 25 bp, Homo sapien
gcttgtattggttcgagcccagaga

SEQ ID NO: 2346007 - DNA, 25 bp, Homo sapien
gcctggaaatttattagccccacaa

SEQ ID NO: 2346008 - DNA, 25 bp, Homo sapien
gctgtatggtcagtgaagggacaaa

SEQ ID NO: 2346009 - DNA, 25 bp, Homo sapien
ggcttcccgtgtatatgctgtatgg

SEQ ID NO: 2346010 - DNA, 25 bp, Homo sapien
gggtttggtagaacacatagcaatg

SEQ ID NO: 2346011 - DNA, 25 bp, Homo sapien
aagcctagaaacttggattcaggca

SEQ ID NO: 2346012 - DNA, 25 bp, Homo sapien
caccccacgtggaccttgcttctaa

SEQ ID NO: 2346013 - DNA, 25 bp, Homo sapien
agcctagaaacttggattcaggcat

SEQ ID NO: 2346014 - DNA, 25 bp, Homo sapien
tgatgacgtcatgacccacacactt

SEQ ID NO: 2346015 - DNA, 25 bp, Homo sapien
tactgggccccacttcttaacacat

SEQ ID NO: 2346016 - DNA, 25 bp, Homo sapien
taagcagacctttactggctcacag

SEQ ID NO: 2346017 - DNA, 25 bp, Homo sapien
taattccttcaagagggtgatgacg

SEQ ID NO: 2346018 - DNA, 25 bp, Homo sapien
ggcaatcgcatctcagaaaccagtc

SEQ ID NO: 2346019 - DNA, 25 bp, Homo sapien
gaatgtctacgtgttgctaacgaag

SEQ ID NO: 2346020 - DNA, 25 bp, Homo sapien
catttgcgtttggatggcaatcgca

SEQ ID NO: 2346021 - DNA, 25 bp, Homo sapien
ccaccggatatgtatgaatgtctac

SEQ ID NO: 2346022 - DNA, 25 bp, Homo sapien
caatcggctgaaagaggatgctgtt

SEQ ID NO: 2346023 - DNA, 25 bp, Homo sapien
aatcactcgaataccttgacttgag

SEQ ID NO: 2346024 - DNA, 25 bp, Homo sapien
ggaggatctgcagcttactcataac

SEQ ID NO: 2346025 - DNA, 25 bp, Homo sapien
gagcttcaatcagatagccagactg

SEQ ID NO: 2346026 - DNA, 25 bp, Homo sapien
gtaactgccctgaaagctacccaag

SEQ ID NO: 2346027 - DNA, 25 bp, Homo sapien
cattgattggtggtaccagtggcca

SEQ ID NO: 2346028 - DNA, 25 bp, Homo sapien
tgaaaagtgtaccaatggtgcctcc

SEQ ID NO: 2346029 - DNA, 25 bp, Homo sapien
ccagtggccagtactatgattatga

SEQ ID NO: 2346030 - DNA, 25 bp, Homo sapien
tctgagtctgttcatttgcgttttc

SEQ ID NO: 2346031 - DNA, 25 bp, Homo sapien
cctctgagtctgttcatttgcgttt

SEQ ID NO: 2346032 - DNA, 25 bp, Homo sapien
ctctgagtctgttcatttgcgtttt

SEQ ID NO: 2346033 - DNA, 25 bp, Homo sapien
tgagtcttttcagcaacccggtcca

SEQ ID NO: 2346034 - DNA, 25 bp, Homo sapien
gtccagtactgggagatacagccat

SEQ ID NO: 2346035 - DNA, 25 bp, Homo sapien
tatctctgtagttggatcaagtgac

SEQ ID NO: 2346036 - DNA, 25 bp, Homo sapien
agatgtgtctacgtgcgctctgcca

SEQ ID NO: 2346037 - DNA, 25 bp, Homo sapien
catctttggatcaagtgtcaccagg

SEQ ID NO: 2346038 - DNA, 25 bp, Homo sapien
gaacttgttgcaacttaccttgtaa

SEQ ID NO: 2346039 - DNA, 25 bp, Homo sapien
agacagcttcccttacttaggtact

SEQ ID NO: 2346040 - DNA, 25 bp, Homo sapien
ggaaccacaattttatgagacccat

SEQ ID NO: 2346041 - DNA, 25 bp, Homo sapien
agttcctgatgaccgcgacttcgag

SEQ ID NO: 2346042 - DNA, 25 bp, Homo sapien
gctggaccgtttcaacagagaggct

SEQ ID NO: 2346043 - DNA, 25 bp, Homo sapien
gactttatgctagaagatgaggctt

SEQ ID NO: 2346044 - DNA, 25 bp, Homo sapien
agtgtgccccttccgctgtcaatgc

SEQ ID NO: 2346045 - DNA, 25 bp, Homo sapien
gaggttttcaacctagtcacagagc

SEQ ID NO: 2346046 - DNA, 25 bp, Homo sapien
tttaactgtgctatggagtagaagc

SEQ ID NO: 2346047 - DNA, 25 bp, Homo sapien
ctgaatatttagtgtaattacatct

SEQ ID NO: 2346048 - DNA, 25 bp, Homo sapien
tcctgtggcaaattcccggattaaa

SEQ ID NO: 2346049 - DNA, 25 bp, Homo sapien
cccagttttctcttcttgcccccat

SEQ ID NO: 2346050 - DNA, 25 bp, Homo sapien
tgtcgtagacgatgagtaatgctag

SEQ ID NO: 2346051 - DNA, 25 bp, Homo sapien
tgatgaagaaagctccaaagagatt

SEQ ID NO: 2346052 - DNA, 25 bp, Homo sapien
tagttggatttgaattgtcgtagac

SEQ ID NO: 2346053 - DNA, 25 bp, Homo sapien
aagttattgaaaatcgcctccagga

SEQ ID NO: 2346054 - DNA, 25 bp, Homo sapien
agagcagtactcttctaagggatgc

SEQ ID NO: 2346055 - DNA, 25 bp, Homo sapien
accctcagagcagtactcttctaag

SEQ ID NO: 2346056 - DNA, 25 bp, Homo sapien
tcagagcagtactcttctaagggat

SEQ ID NO: 2346057 - DNA, 25 bp, Homo sapien
cagtactcttctaagggatgctcct

SEQ ID NO: 2346058 - DNA, 25 bp, Homo sapien
caccacaaaggcaaaattataacca

SEQ ID NO: 2346059 - DNA, 25 bp, Homo sapien
gcaccacaaaggcaaaattataacc

SEQ ID NO: 2346060 - DNA, 25 bp, Homo sapien
ctgcaccacaaaggcaaaattataa

SEQ ID NO: 2346061 - DNA, 25 bp, Homo sapien
tgcaccacaaaggcaaaattataac

SEQ ID NO: 2346062 - DNA, 25 bp, Homo sapien
cagtgacctttctcttggtgcaggt

SEQ ID NO: 2346063 - DNA, 25 bp, Homo sapien
ttctcttggtgcaggtataatctat

SEQ ID NO: 2346064 - DNA, 25 bp, Homo sapien
tagtccagtgaatgcactctgcatc

SEQ ID NO: 2346065 - DNA, 25 bp, Homo sapien
tatattttcggtcagtgtagtccag

SEQ ID NO: 2346066 - DNA, 25 bp, Homo sapien
tactagcgccaatgtagagtcttcc

SEQ ID NO: 2346067 - DNA, 25 bp, Homo sapien
gcttcctgagcaaagagacgtttga

SEQ ID NO: 2346068 - DNA, 25 bp, Homo sapien
agacgtttgatagggctgagaatac

SEQ ID NO: 2346069 - DNA, 25 bp, Homo sapien
gctgcccaaaagttttttcaatggc

SEQ ID NO: 2346070 - DNA, 25 bp, Homo sapien
aacctcaaacttagtgctctctttt

SEQ ID NO: 2346071 - DNA, 25 bp, Homo sapien
aaacctcaaacttagtgctctcttt

SEQ ID NO: 2346072 - DNA, 25 bp, Homo sapien
aaaacctcaaacttagtgctctctt

SEQ ID NO: 2346073 - DNA, 25 bp, Homo sapien
tcaaacttagtgctctctttttgga

SEQ ID NO: 2346074 - DNA, 25 bp, Homo sapien
ttgctacataatccacaagtgagaa

SEQ ID NO: 2346075 - DNA, 25 bp, Homo sapien
tacataatccacaagtgagaatgca

SEQ ID NO: 2346076 - DNA, 25 bp, Homo sapien
gctacataatccacaagtgagaatg

SEQ ID NO: 2346077 - DNA, 25 bp, Homo sapien
acataatccacaagtgagaatgcac

SEQ ID NO: 2346078 - DNA, 25 bp, Homo sapien
tggtctggcactagaatcatcaaaa

SEQ ID NO: 2346079 - DNA, 25 bp, Homo sapien
gtggtctggcactagaatcatcaaa

SEQ ID NO: 2346080 - DNA, 25 bp, Homo sapien
tttgctgagtccaaatagctcctgg

SEQ ID NO: 2346081 - DNA, 25 bp, Homo sapien
ctcaggagagtggccatctcccagc

SEQ ID NO: 2346082 - DNA, 25 bp, Homo sapien
tgctcaggagagtggccatctccca

SEQ ID NO: 2346083 - DNA, 25 bp, Homo sapien
gctcaggagagtggccatctcccag

SEQ ID NO: 2346084 - DNA, 25 bp, Homo sapien
tcaggagagtggccatctcccagcc

SEQ ID NO: 2346085 - DNA, 25 bp, Homo sapien
ccatagcaatgttcgaggttttttg

SEQ ID NO: 2346086 - DNA, 25 bp, Homo sapien
tgctttgtggtaggggtactcctga

SEQ ID NO: 2346087 - DNA, 25 bp, Homo sapien
agagaccatagcaatgttcgaggtt

SEQ ID NO: 2346088 - DNA, 25 bp, Homo sapien
tggtaggggtactcctgacacttga

SEQ ID NO: 2346089 - DNA, 25 bp, Homo sapien
atagaaacttccaatagtgtggcca

SEQ ID NO: 2346090 - DNA, 25 bp, Homo sapien
tagaaacttccaatagtgtggccat

SEQ ID NO: 2346091 - DNA, 25 bp, Homo sapien
gaaatctgcatttctgcaatggcag

SEQ ID NO: 2346092 - DNA, 25 bp, Homo sapien
aatggcagtttctttatgctcaaag

SEQ ID NO: 2346093 - DNA, 25 bp, Homo sapien
ttcttcaacaaactcaaggtggcca

SEQ ID NO: 2346094 - DNA, 25 bp, Homo sapien
caaggtggccacatcagaaatctgc

SEQ ID NO: 2346095 - DNA, 25 bp, Homo sapien
gtaggtaacatcagttgccatttgt

SEQ ID NO: 2346096 - DNA, 25 bp, Homo sapien
gacgtattcggttgtaggtaacatc

SEQ ID NO: 2346097 - DNA, 25 bp, Homo sapien
ttcggttgtaggtaacatcagttgc

SEQ ID NO: 2346098 - DNA, 25 bp, Homo sapien
tcttgacgtattcggttgtaggtaa

SEQ ID NO: 2346099 - DNA, 25 bp, Homo sapien
acagaggaccccagaaacataagat

SEQ ID NO: 2346100 - DNA, 25 bp, Homo sapien
ggacagaggaccccagaaacataag

SEQ ID NO: 2346101 - DNA, 25 bp, Homo sapien
gaaacataagatttctgccttttat

SEQ ID NO: 2346102 - DNA, 25 bp, Homo sapien
cagaaacataagatttctgcctttt

SEQ ID NO: 2346103 - DNA, 25 bp, Homo sapien
tcagcagctcccatagcatgggaat

SEQ ID NO: 2346104 - DNA, 25 bp, Homo sapien
aatttttgactttcgctgtgcgtag

SEQ ID NO: 2346105 - DNA, 25 bp, Homo sapien
gaaatatcttctttgacagagttgt

SEQ ID NO: 2346106 - DNA, 25 bp, Homo sapien
gagttgtcctcagtgttgtgttttg

SEQ ID NO: 2346107 - DNA, 25 bp, Homo sapien
gaagggctaatgaatatttcttctt

SEQ ID NO: 2346108 - DNA, 25 bp, Homo sapien
taaaggggctgaatggcctttgagc

SEQ ID NO: 2346109 - DNA, 25 bp, Homo sapien
ctgaatggcctttgagcagtcattt

SEQ ID NO: 2346110 - DNA, 25 bp, Homo sapien
gggctgaatggcctttgagcagtca

SEQ ID NO: 2346111 - DNA, 25 bp, Homo sapien
gccacagtgataaaggggctgaatg

SEQ ID NO: 2346112 - DNA, 25 bp, Homo sapien
tggacattcaggagacgacgggatg

SEQ ID NO: 2346113 - DNA, 25 bp, Homo sapien
acgggatgggacaggtgtaattcct

SEQ ID NO: 2346114 - DNA, 25 bp, Homo sapien
gacaggtgtaattcctggcagaagg

SEQ ID NO: 2346115 - DNA, 25 bp, Homo sapien
gtggcagaacgcatgggcaaagctc

SEQ ID NO: 2346116 - DNA, 25 bp, Homo sapien
tctgtcccacaccatgaggaatctc

SEQ ID NO: 2346117 - DNA, 25 bp, Homo sapien
tgtcccacaccatgaggaatctcct

SEQ ID NO: 2346118 - DNA, 25 bp, Homo sapien
tcccacaccatgaggaatctcctgc

SEQ ID NO: 2346119 - DNA, 25 bp, Homo sapien
ccacaccatgaggaatctcctgctt

SEQ ID NO: 2346120 - DNA, 25 bp, Homo sapien
tctgagcacgtagaaaagtcagccc

SEQ ID NO: 2346121 - DNA, 25 bp, Homo sapien
tataagagcgctatgaccgggtatg

SEQ ID NO: 2346122 - DNA, 25 bp, Homo sapien
gcttcctccgctatctaaaaccaga

SEQ ID NO: 2346123 - DNA, 25 bp, Homo sapien
gggatgaacttcaactcctggtaac

SEQ ID NO: 2346124 - DNA, 25 bp, Homo sapien
atttcttgtctatccataccgtcac

SEQ ID NO: 2346125 - DNA, 25 bp, Homo sapien
tagctgtgctactcaggattcttga

SEQ ID NO: 2346126 - DNA, 25 bp, Homo sapien
tccataccgtcacaattatagactt

SEQ ID NO: 2346127 - DNA, 25 bp, Homo sapien
catttccagttctagctgtgctact

SEQ ID NO: 2346128 - DNA, 25 bp, Homo sapien
tgtttgtacagggtcttgtgacaac

SEQ ID NO: 2346129 - DNA, 25 bp, Homo sapien
tgtacagggtcttgtgacaacagtt

SEQ ID NO: 2346130 - DNA, 25 bp, Homo sapien
tttgtacagggtcttgtgacaacag

SEQ ID NO: 2346131 - DNA, 25 bp, Homo sapien
ttgtgtttgtacagggtcttgtgac

SEQ ID NO: 2346132 - DNA, 25 bp, Homo sapien
ggtgatatgtagatcccctctccgt

SEQ ID NO: 2346133 - DNA, 25 bp, Homo sapien
gaaatgctgaaggatcgtctctggg

SEQ ID NO: 2346134 - DNA, 25 bp, Homo sapien
actcagctgagtagtggcttcccca

SEQ ID NO: 2346135 - DNA, 25 bp, Homo sapien
gactaatgacaaaagcactcagctg

SEQ ID NO: 2346136 - DNA, 25 bp, Homo sapien
tccatatgtctactagcagctctgc

SEQ ID NO: 2346137 - DNA, 25 bp, Homo sapien
gctccatatgtctactagcagctct

SEQ ID NO: 2346138 - DNA, 25 bp, Homo sapien
tcttcagctccatatgtctactagc

SEQ ID NO: 2346139 - DNA, 25 bp, Homo sapien
tcagctccatatgtctactagcagc

SEQ ID NO: 2346140 - DNA, 25 bp, Homo sapien
aaagtacatatgagaggcttttgag

SEQ ID NO: 2346141 - DNA, 25 bp, Homo sapien
cttttgagaaagtctctgagcaata

SEQ ID NO: 2346142 - DNA, 25 bp, Homo sapien
gaaaagtacatatgagaggcttttg

SEQ ID NO: 2346143 - DNA, 25 bp, Homo sapien
gcaatagtcttatcttctgttatct

SEQ ID NO: 2346144 - DNA, 25 bp, Homo sapien
cagttctgtgtgaaatttaccatac

SEQ ID NO: 2346145 - DNA, 25 bp, Homo sapien
ttaccatacttgatgatctctccca

SEQ ID NO: 2346146 - DNA, 25 bp, Homo sapien
tagaaccatctctctgagactggac

SEQ ID NO: 2346147 - DNA, 25 bp, Homo sapien
ctccaaaacgtagtgaagtttctat

SEQ ID NO: 2346148 - DNA, 25 bp, Homo sapien
caattccttccctggtgctgaccat

SEQ ID NO: 2346149 - DNA, 25 bp, Homo sapien
agctttgcctagcagttctgaagca

SEQ ID NO: 2346150 - DNA, 25 bp, Homo sapien
gaagtctgtgtcagctttgcctagc

SEQ ID NO: 2346151 - DNA, 25 bp, Homo sapien
aggacactgaagaatgaagtctgtg

SEQ ID NO: 2346152 - DNA, 25 bp, Homo sapien
aatttgttcctctcttcagagtgag

SEQ ID NO: 2346153 - DNA, 25 bp, Homo sapien
ttaatttgttcctctcttcagagtg

SEQ ID NO: 2346154 - DNA, 25 bp, Homo sapien
aatcacatgaatccttaagttttaa

SEQ ID NO: 2346155 - DNA, 25 bp, Homo sapien
ctgatcggggaaacacacacataat

SEQ ID NO: 2346156 - DNA, 25 bp, Homo sapien
tccttggacgcaaatccttcaagaa

SEQ ID NO: 2346157 - DNA, 25 bp, Homo sapien
tcaatcctcctccttggacgcaaat

SEQ ID NO: 2346158 - DNA, 25 bp, Homo sapien
cctccttggacgcaaatccttcaag

SEQ ID NO: 2346159 - DNA, 25 bp, Homo sapien
cttggacgcaaatccttcaagaaac

SEQ ID NO: 2346160 - DNA, 25 bp, Homo sapien
gggaactacggcagcaatatgcaca

SEQ ID NO: 2346161 - DNA, 25 bp, Homo sapien
cagcaatatgcacaagggtagaagg

SEQ ID NO: 2346162 - DNA, 25 bp, Homo sapien
agggaactacggcagcaatatgcac

SEQ ID NO: 2346163 - DNA, 25 bp, Homo sapien
ctagggaactacggcagcaatatgc

SEQ ID NO: 2346164 - DNA, 25 bp, Homo sapien
tatgccaactgtatgacaccactct

SEQ ID NO: 2346165 - DNA, 25 bp, Homo sapien
tctgcaacaaagttccaggcaagga

SEQ ID NO: 2346166 - DNA, 25 bp, Homo sapien
aaactgagctcatgaaagggccaac

SEQ ID NO: 2346167 - DNA, 25 bp, Homo sapien
catgagctatcagctgcgagaggaa

SEQ ID NO: 2346168 - DNA, 25 bp, Homo sapien
gggcctgcggcctagttaaagcatt

SEQ ID NO: 2346169 - DNA, 25 bp, Homo sapien
aaggaatgaagttgagccagattgg

SEQ ID NO: 2346170 - DNA, 25 bp, Homo sapien
acactgctcttgtttgtaagggcca

SEQ ID NO: 2346171 - DNA, 25 bp, Homo sapien
gggccagataaatagacactgctct

SEQ ID NO: 2346172 - DNA, 25 bp, Homo sapien
ctacccttaggatcttgatttactg

SEQ ID NO: 2346173 - DNA, 25 bp, Homo sapien
gaactacccttaggatcttgattta

SEQ ID NO: 2346174 - DNA, 25 bp, Homo sapien
aatcttctccagcctactgaactac

SEQ ID NO: 2346175 - DNA, 25 bp, Homo sapien
cttctccagcctactgaactaccct

SEQ ID NO: 2346176 - DNA, 25 bp, Homo sapien
tcatggtcttctttctgctttgaat

SEQ ID NO: 2346177 - DNA, 25 bp, Homo sapien
catggtcttctttctgctttgaatg

SEQ ID NO: 2346178 - DNA, 25 bp, Homo sapien
gtcttctttctgctttgaatgcttt

SEQ ID NO: 2346179 - DNA, 25 bp, Homo sapien
tggtcttctttctgctttgaatgct

SEQ ID NO: 2346180 - DNA, 25 bp, Homo sapien
gaagacagtgagctagcataagctg

SEQ ID NO: 2346181 - DNA, 25 bp, Homo sapien
gagaaggatgctgcacgctgtagac

SEQ ID NO: 2346182 - DNA, 25 bp, Homo sapien
ttggaactggtgcttttggaaagtg

SEQ ID NO: 2346183 - DNA, 25 bp, Homo sapien
gaaggatgctgcacgctgtagacag

SEQ ID NO: 2346184 - DNA, 25 bp, Homo sapien
caaaagccctggtgcttacccgttg

SEQ ID NO: 2346185 - DNA, 25 bp, Homo sapien
cgttggtatacatgcaagcccacat

SEQ ID NO: 2346186 - DNA, 25 bp, Homo sapien
tgtacatgaccacatgtcagggttt

SEQ ID NO: 2346187 - DNA, 25 bp, Homo sapien
atcttgaatatgtacatgaccacat

SEQ ID NO: 2346188 - DNA, 25 bp, Homo sapien
ctgctgaactgttgcgaccttctcc

SEQ ID NO: 2346189 - DNA, 25 bp, Homo sapien
gctgaactgttgcgaccttctccat

SEQ ID NO: 2346190 - DNA, 25 bp, Homo sapien
tgctgaactgttgcgaccttctcca

SEQ ID NO: 2346191 - DNA, 25 bp, Homo sapien
tcagcctgcgagctcttcactcagg

SEQ ID NO: 2346192 - DNA, 25 bp, Homo sapien
gatttgtgcccaagtcaggctcttc

SEQ ID NO: 2346193 - DNA, 25 bp, Homo sapien
tcaacaggtggtaaaggataagtgc

SEQ ID NO: 2346194 - DNA, 25 bp, Homo sapien
catgaatctgttgcctagaagctcg

SEQ ID NO: 2346195 - DNA, 25 bp, Homo sapien
tagaagctcgttagacatcctctct

SEQ ID NO: 2346196 - DNA, 25 bp, Homo sapien
tgtagactttcgtgatgagaccttc

SEQ ID NO: 2346197 - DNA, 25 bp, Homo sapien
ctttcgtgatgagaccttcactgcc

SEQ ID NO: 2346198 - DNA, 25 bp, Homo sapien
caggagtgaaattgtagactttcgt

SEQ ID NO: 2346199 - DNA, 25 bp, Homo sapien
gaaattgtagactttcgtgatgaga

SEQ ID NO: 2346200 - DNA, 25 bp, Homo sapien
tgtaactcagataaacaccgttcct

SEQ ID NO: 2346201 - DNA, 25 bp, Homo sapien
gataaacaccgttcctccagtctac

SEQ ID NO: 2346202 - DNA, 25 bp, Homo sapien
tctccactgagacatcgtttcaaag

SEQ ID NO: 2346203 - DNA, 25 bp, Homo sapien
gacatcgtttcaaagtgtaactcag

SEQ ID NO: 2346204 - DNA, 25 bp, Homo sapien
tcctgagaagagtaatatggccata

SEQ ID NO: 2346205 - DNA, 25 bp, Homo sapien
tttgtttgttcgctgttgttgtcaa

SEQ ID NO: 2346206 - DNA, 25 bp, Homo sapien
tgttgttgtcaattaaatatggaga

SEQ ID NO: 2346207 - DNA, 25 bp, Homo sapien
ttaaatatggagataagacaattcc

SEQ ID NO: 2346208 - DNA, 25 bp, Homo sapien
tccatttcgccttttatggaaatcc

SEQ ID NO: 2346209 - DNA, 25 bp, Homo sapien
acgacagcctgtgtgcaaagacttc

SEQ ID NO: 2346210 - DNA, 25 bp, Homo sapien
aaatgatccacgaccgggtaaagtg

SEQ ID NO: 2346211 - DNA, 25 bp, Homo sapien
aaggagaatatatttgcttcagtca

SEQ ID NO: 2346212 - DNA, 25 bp, Homo sapien
tttcttacttttcctgtccttcagc

SEQ ID NO: 2346213 - DNA, 25 bp, Homo sapien
tgaaacttcttcctttgatttctta

SEQ ID NO: 2346214 - DNA, 25 bp, Homo sapien
tctgaaacttcttcctttgatttct

SEQ ID NO: 2346215 - DNA, 25 bp, Homo sapien
tgatttcttacttttcctgtccttc

SEQ ID NO: 2346216 - DNA, 25 bp, Homo sapien
ttgtaagacgaaggcgggcggttca

SEQ ID NO: 2346217 - DNA, 25 bp, Homo sapien
catgggcaaagtcgaatattcaaaa

SEQ ID NO: 2346218 - DNA, 25 bp, Homo sapien
gaaagggaaattcatgggcaaagtc

SEQ ID NO: 2346219 - DNA, 25 bp, Homo sapien
ggaatggaggttcattatcttgtcg

SEQ ID NO: 2346220 - DNA, 25 bp, Homo sapien
atggaggttcattatcttgtcgcac

SEQ ID NO: 2346221 - DNA, 25 bp, Homo sapien
caaagtgtgctcttcgtctctggga

SEQ ID NO: 2346222 - DNA, 25 bp, Homo sapien
tctctgggaattgtgcatctcagac

SEQ ID NO: 2346223 - DNA, 25 bp, Homo sapien
ctcagactatttgctttaatactgg

SEQ ID NO: 2346224 - DNA, 25 bp, Homo sapien
tgtgtctgtcaaagtgtgctcttcg

SEQ ID NO: 2346225 - DNA, 25 bp, Homo sapien
ccacgtgggtatgtttgtgaatatt

SEQ ID NO: 2346226 - DNA, 25 bp, Homo sapien
tccgttatccacgtgggtatgtttg

SEQ ID NO: 2346227 - DNA, 25 bp, Homo sapien
cccagctgcgggtatctttggtttc

SEQ ID NO: 2346228 - DNA, 25 bp, Homo sapien
tctaagtgcgtaatggttgatggca

SEQ ID NO: 2346229 - DNA, 25 bp, Homo sapien
ctgcttcacatatagccttgaaagc

SEQ ID NO: 2346230 - DNA, 25 bp, Homo sapien
gtttaattgcttcttgtgcccttct

SEQ ID NO: 2346231 - DNA, 25 bp, Homo sapien
gcttcacatatagccttgaaagcag

SEQ ID NO: 2346232 - DNA, 25 bp, Homo sapien
tctgcttcacatatagccttgaaag

SEQ ID NO: 2346233 - DNA, 25 bp, Homo sapien
ttaaggattctgttcacttcttgtt

SEQ ID NO: 2346234 - DNA, 25 bp, Homo sapien
ggattctgttcacttcttgttctac

SEQ ID NO: 2346235 - DNA, 25 bp, Homo sapien
taaggattctgttcacttcttgttc

SEQ ID NO: 2346236 - DNA, 25 bp, Homo sapien
aggattctgttcacttcttgttcta

SEQ ID NO: 2346237 - DNA, 25 bp, Homo sapien
taagcgcagtatccaaaaaatgatg

SEQ ID NO: 2346238 - DNA, 25 bp, Homo sapien
tcttaggaagtaagcgcagtatcca

SEQ ID NO: 2346239 - DNA, 25 bp, Homo sapien
gaagtaagcgcagtatccaaaaaat

SEQ ID NO: 2346240 - DNA, 25 bp, Homo sapien
gatcttaggaagtaagcgcagtatc

SEQ ID NO: 2346241 - DNA, 25 bp, Homo sapien
gaggtcatctgaataaatcacgact

SEQ ID NO: 2346242 - DNA, 25 bp, Homo sapien
ggctggtgctgtatgcttttggata

SEQ ID NO: 2346243 - DNA, 25 bp, Homo sapien
tcacgactcattaagcaccaccatt

SEQ ID NO: 2346244 - DNA, 25 bp, Homo sapien
cattgattgaactgtagaatcttgg

SEQ ID NO: 2346245 - DNA, 25 bp, Homo sapien
ccaaagtcagtaccatctaccagat

SEQ ID NO: 2346246 - DNA, 25 bp, Homo sapien
tcagtactaataaatccaaagtcag

SEQ ID NO: 2346247 - DNA, 25 bp, Homo sapien
ccttcagtactaataaatccaaagt

SEQ ID NO: 2346248 - DNA, 25 bp, Homo sapien
tttccttcagtactaataaatccaa

SEQ ID NO: 2346249 - DNA, 25 bp, Homo sapien
cctaacttggttctggagggctcca

SEQ ID NO: 2346250 - DNA, 25 bp, Homo sapien
ctttgcttttcagaacctaacttgg

SEQ ID NO: 2346251 - DNA, 25 bp, Homo sapien
gttgtggtatttccatgtcggcaca

SEQ ID NO: 2346252 - DNA, 25 bp, Homo sapien
tgtctcctgctgactctgtttgctg

SEQ ID NO: 2346253 - DNA, 25 bp, Homo sapien
accacactgagataagattgttcat

SEQ ID NO: 2346254 - DNA, 25 bp, Homo sapien
tatatattgatattgggtgactcca

SEQ ID NO: 2346255 - DNA, 25 bp, Homo sapien
cctctcaggaatctaactgaagata

SEQ ID NO: 2346256 - DNA, 25 bp, Homo sapien
tgtctatccatagtgaactggttca

SEQ ID NO: 2346257 - DNA, 25 bp, Homo sapien
tttgagtgcttggggtagttgccat

SEQ ID NO: 2346258 - DNA, 25 bp, Homo sapien
tatctgcgttaatcatcctttggct

SEQ ID NO: 2346259 - DNA, 25 bp, Homo sapien
ccttagttagtaaaatggcacactc

SEQ ID NO: 2346260 - DNA, 25 bp, Homo sapien
tgcaaagcgctagagatagtgttag

SEQ ID NO: 2346261 - DNA, 25 bp, Homo sapien
taagatagtctggacacttcacagc

SEQ ID NO: 2346262 - DNA, 25 bp, Homo sapien
aagtcctttctgttgacctggaagc

SEQ ID NO: 2346263 - DNA, 25 bp, Homo sapien
gtcctttctgttgacctggaagcca

SEQ ID NO: 2346264 - DNA, 25 bp, Homo sapien
tcctttctgttgacctggaagccat

SEQ ID NO: 2346265 - DNA, 25 bp, Homo sapien
aaagtcctttctgttgacctggaag

SEQ ID NO: 2346266 - DNA, 25 bp, Homo sapien
ctaccactgtggcactattgtggat

SEQ ID NO: 2346267 - DNA, 25 bp, Homo sapien
tctaccactgtggcactattgtgga

SEQ ID NO: 2346268 - DNA, 25 bp, Homo sapien
taccactgtggcactattgtggata

SEQ ID NO: 2346269 - DNA, 25 bp, Homo sapien
atctaccactgtggcactattgtgg

SEQ ID NO: 2346270 - DNA, 25 bp, Homo sapien
agaatgtagatctgaagtttaggag

SEQ ID NO: 2346271 - DNA, 25 bp, Homo sapien
tccaaggagagagtccataaaaagc

SEQ ID NO: 2346272 - DNA, 25 bp, Homo sapien
gtcatccaaggagagagtccataaa

SEQ ID NO: 2346273 - DNA, 25 bp, Homo sapien
ggagagagtccataaaaagctgaga

SEQ ID NO: 2346274 - DNA, 25 bp, Homo sapien
tctctaaatctccttggattatcac

SEQ ID NO: 2346275 - DNA, 25 bp, Homo sapien
ctctctaaatctccttggattatca

SEQ ID NO: 2346276 - DNA, 25 bp, Homo sapien
tcactctctaaatctccttggatta

SEQ ID NO: 2346277 - DNA, 25 bp, Homo sapien
cactctctaaatctccttggattat

SEQ ID NO: 2346278 - DNA, 25 bp, Homo sapien
cattgtgggtgaacacctgtgccag

SEQ ID NO: 2346279 - DNA, 25 bp, Homo sapien
ggacatgtctatccctgccttgaaa

SEQ ID NO: 2346280 - DNA, 25 bp, Homo sapien
tcctgctcaacatcgggaacagcgg

SEQ ID NO: 2346281 - DNA, 25 bp, Homo sapien
aaagcttttgttccaaagggacatg

SEQ ID NO: 2346282 - DNA, 25 bp, Homo sapien
tagagggcttctctcggagccagat

SEQ ID NO: 2346283 - DNA, 25 bp, Homo sapien
cagctctgcggtgccacagaaaaat

SEQ ID NO: 2346284 - DNA, 25 bp, Homo sapien
cattcagtgtccaatcgctcctcag

SEQ ID NO: 2346285 - DNA, 25 bp, Homo sapien
ggagccagattcactatacccctca

SEQ ID NO: 2346286 - DNA, 25 bp, Homo sapien
catttggtggacttctgcagaactc

SEQ ID NO: 2346287 - DNA, 25 bp, Homo sapien
tgcagaactcatacacacatctcct

SEQ ID NO: 2346288 - DNA, 25 bp, Homo sapien
tctgcagaactcatacacacatctc

SEQ ID NO: 2346289 - DNA, 25 bp, Homo sapien
atttggtggacttctgcagaactca

SEQ ID NO: 2346290 - DNA, 25 bp, Homo sapien
tctaggtcctcagatccaggtgggc

SEQ ID NO: 2346291 - DNA, 25 bp, Homo sapien
tgggcctctgtgagctttctcagga

SEQ ID NO: 2346292 - DNA, 25 bp, Homo sapien
tgcataatgatgtgagctaattccc

SEQ ID NO: 2346293 - DNA, 25 bp, Homo sapien
gctgagggaagacccagattatggt

SEQ ID NO: 2346294 - DNA, 25 bp, Homo sapien
tagagagctgataagtcaaagggtc

SEQ ID NO: 2346295 - DNA, 25 bp, Homo sapien
tgtaatttcagatgggccaggagcc

SEQ ID NO: 2346296 - DNA, 25 bp, Homo sapien
aggccgagccatcaaccaatctggt

SEQ ID NO: 2346297 - DNA, 25 bp, Homo sapien
ccatggtatgcagacatttggtcaa

SEQ ID NO: 2346298 - DNA, 25 bp, Homo sapien
caaggcagcatgtcttacatgacag

SEQ ID NO: 2346299 - DNA, 25 bp, Homo sapien
gaagcaaggcagcatgtcttacatg

SEQ ID NO: 2346300 - DNA, 25 bp, Homo sapien
aaggggaagcaaggcagcatgtctt

SEQ ID NO: 2346301 - DNA, 25 bp, Homo sapien
ggggaagcaaggcagcatgtcttac

SEQ ID NO: 2346302 - DNA, 25 bp, Homo sapien
gaccaagagtagagagattacccac

SEQ ID NO: 2346303 - DNA, 25 bp, Homo sapien
catgagtcacgtttgccatgtgcaa

SEQ ID NO: 2346304 - DNA, 25 bp, Homo sapien
ggtggacttttaagcgaaccaatca

SEQ ID NO: 2346305 - DNA, 25 bp, Homo sapien
gtaacaacttttaggcatctgccca

SEQ ID NO: 2346306 - DNA, 25 bp, Homo sapien
tggagagcggtgagagccatctgct

SEQ ID NO: 2346307 - DNA, 25 bp, Homo sapien
tatttgagtccataaggtaataggt

SEQ ID NO: 2346308 - DNA, 25 bp, Homo sapien
cataaggtaataggttggcagagaa

SEQ ID NO: 2346309 - DNA, 25 bp, Homo sapien
gtccataaggtaataggttggcaga

SEQ ID NO: 2346310 - DNA, 25 bp, Homo sapien
cgagcagccacatgattatgggaac

SEQ ID NO: 2346311 - DNA, 25 bp, Homo sapien
ttctggactctgtctcatctccaaa

SEQ ID NO: 2346312 - DNA, 25 bp, Homo sapien
catctccaaattgtaagtggttttt

SEQ ID NO: 2346313 - DNA, 25 bp, Homo sapien
ttgctgttctcattcgagcagccac

SEQ ID NO: 2346314 - DNA, 25 bp, Homo sapien
tctgttggatgtatatcctcttgca

SEQ ID NO: 2346315 - DNA, 25 bp, Homo sapien
caccattgcacagtctgttggatgt

SEQ ID NO: 2346316 - DNA, 25 bp, Homo sapien
agtctgttggatgtatatcctcttg

SEQ ID NO: 2346317 - DNA, 25 bp, Homo sapien
catacaccattgcacagtctgttgg

SEQ ID NO: 2346318 - DNA, 25 bp, Homo sapien
ctgttgcaggtactggtgtactctg

SEQ ID NO: 2346319 - DNA, 25 bp, Homo sapien
cctgttgcaggtactggtgtactct

SEQ ID NO: 2346320 - DNA, 25 bp, Homo sapien
tttagagttgactggtttgcgagtg

SEQ ID NO: 2346321 - DNA, 25 bp, Homo sapien
ctgctgttaaaagcctccctcaaag

SEQ ID NO: 2346322 - DNA, 25 bp, Homo sapien
gatggtttagagttgactggtttgc

SEQ ID NO: 2346323 - DNA, 25 bp, Homo sapien
ctcaaagctaaaacatcaggatggt

SEQ ID NO: 2346324 - DNA, 25 bp, Homo sapien
aatcaacattacgtcagctgggatg

SEQ ID NO: 2346325 - DNA, 25 bp, Homo sapien
cgtcagctgggatgaaacttttccc

SEQ ID NO: 2346326 - DNA, 25 bp, Homo sapien
ctggttaatcaacattacgtcagct

SEQ ID NO: 2346327 - DNA, 25 bp, Homo sapien
ttaatcaacattacgtcagctggga

SEQ ID NO: 2346328 - DNA, 25 bp, Homo sapien
aaatataggttgttagcactgcttc

SEQ ID NO: 2346329 - DNA, 25 bp, Homo sapien
gaattagtgatgtgccattaactat

SEQ ID NO: 2346330 - DNA, 25 bp, Homo sapien
tacaaattgaattagtgatgtgcca

SEQ ID NO: 2346331 - DNA, 25 bp, Homo sapien
ttcatcaagtcatgacaaatatagg

SEQ ID NO: 2346332 - DNA, 25 bp, Homo sapien
tataaaaacataacagcccttgttc

SEQ ID NO: 2346333 - DNA, 25 bp, Homo sapien
aaaacataacagcccttgttcttca

SEQ ID NO: 2346334 - DNA, 25 bp, Homo sapien
ataaaaacataacagcccttgttct

SEQ ID NO: 2346335 - DNA, 25 bp, Homo sapien
agtataaaaacataacagcccttgt

SEQ ID NO: 2346336 - DNA, 25 bp, Homo sapien
acaggggtgtatggcagaaaagggc

SEQ ID NO: 2346337 - DNA, 25 bp, Homo sapien
ctaggagagtagaaggtgacagggg

SEQ ID NO: 2346338 - DNA, 25 bp, Homo sapien
tagaaggtgacaggggtgtatggca

SEQ ID NO: 2346339 - DNA, 25 bp, Homo sapien
gggtagatagatgtagacgatggtc

SEQ ID NO: 2346340 - DNA, 25 bp, Homo sapien
tagatcacatgcttgctttccttaa

SEQ ID NO: 2346341 - DNA, 25 bp, Homo sapien
tccttaaatttcaagagtgtgacag

SEQ ID NO: 2346342 - DNA, 25 bp, Homo sapien
ccttaaatttcaagagtgtgacagg

SEQ ID NO: 2346343 - DNA, 25 bp, Homo sapien
gcctgtgatagtgtttgatagcatt

SEQ ID NO: 2346344 - DNA, 25 bp, Homo sapien
atcacttttttcactcatatatgag

SEQ ID NO: 2346345 - DNA, 25 bp, Homo sapien
tgcattgattcactcttgctttcac

SEQ ID NO: 2346346 - DNA, 25 bp, Homo sapien
ctctgtagcctgtgatagtgtttga

SEQ ID NO: 2346347 - DNA, 25 bp, Homo sapien
tgtcaatgacaaatggcatcttaga

SEQ ID NO: 2346348 - DNA, 25 bp, Homo sapien
cacactgagtgtgcagatttacatc

SEQ ID NO: 2346349 - DNA, 25 bp, Homo sapien
aacattatttcccatgtcaatgaca

SEQ ID NO: 2346350 - DNA, 25 bp, Homo sapien
gcatcttagagttcagctgcttccc

SEQ ID NO: 2346351 - DNA, 25 bp, Homo sapien
attttccatccccacattcagcttc

SEQ ID NO: 2346352 - DNA, 25 bp, Homo sapien
tttccatccccacattcagcttctt

SEQ ID NO: 2346353 - DNA, 25 bp, Homo sapien
tccatccccacattcagcttctttc

SEQ ID NO: 2346354 - DNA, 25 bp, Homo sapien
gcttctttcctgctcctgggtccat

SEQ ID NO: 2346355 - DNA, 25 bp, Homo sapien
tatcctttccctgagaaccaaggag

SEQ ID NO: 2346356 - DNA, 25 bp, Homo sapien
tgagaaccaaggagactgccttctt

SEQ ID NO: 2346357 - DNA, 25 bp, Homo sapien
agaaccaaggagactgccttcttcc

SEQ ID NO: 2346358 - DNA, 25 bp, Homo sapien
caaaatatcctttccctgagaacca

SEQ ID NO: 2346359 - DNA, 25 bp, Homo sapien
gcaaacttctgaatatcctggtcag

SEQ ID NO: 2346360 - DNA, 25 bp, Homo sapien
gctttactgcccacgtactgaaaca

SEQ ID NO: 2346361 - DNA, 25 bp, Homo sapien
tctctgctttactgcccacgtactg

SEQ ID NO: 2346362 - DNA, 25 bp, Homo sapien
agtcttgaagtacacttcttccctt

SEQ ID NO: 2346363 - DNA, 25 bp, Homo sapien
ccaggatcctgtcctcggctttctt

SEQ ID NO: 2346364 - DNA, 25 bp, Homo sapien
ttgatctgagctggcatatagctgt

SEQ ID NO: 2346365 - DNA, 25 bp, Homo sapien
gattcttgtataatctcctgagctg

SEQ ID NO: 2346366 - DNA, 25 bp, Homo sapien
tcctcctcggcctgactttggaata

SEQ ID NO: 2346367 - DNA, 25 bp, Homo sapien
gctgacccctggactcttgatctga

SEQ ID NO: 2346368 - DNA, 25 bp, Homo sapien
gtttctttgagaaggcacttgccat

SEQ ID NO: 2346369 - DNA, 25 bp, Homo sapien
tactcccggtttctttgagaaggca

SEQ ID NO: 2346370 - DNA, 25 bp, Homo sapien
cggtttctttgagaaggcacttgcc

SEQ ID NO: 2346371 - DNA, 25 bp, Homo sapien
cccggtttctttgagaaggcacttg

SEQ ID NO: 2346372 - DNA, 25 bp, Homo sapien
tgtcccacgctttcctttccagtgt

SEQ ID NO: 2346373 - DNA, 25 bp, Homo sapien
atatctcattgcctctgtcccacgc

SEQ ID NO: 2346374 - DNA, 25 bp, Homo sapien
atttctttaagagctggcttgggct

SEQ ID NO: 2346375 - DNA, 25 bp, Homo sapien
gcttgttggcaaagggccaatctga

SEQ ID NO: 2346376 - DNA, 25 bp, Homo sapien
tcagaaataactggctctgtagtca

SEQ ID NO: 2346377 - DNA, 25 bp, Homo sapien
tgctcagaaataactggctctgtag

SEQ ID NO: 2346378 - DNA, 25 bp, Homo sapien
catgctcagaaataactggctctgt

SEQ ID NO: 2346379 - DNA, 25 bp, Homo sapien
tcatgctcagaaataactggctctg

SEQ ID NO: 2346380 - DNA, 25 bp, Homo sapien
attgtgtttgggcttgtagatataa

SEQ ID NO: 2346381 - DNA, 25 bp, Homo sapien
ctctgtcaggttttcggttttgttg

SEQ ID NO: 2346382 - DNA, 25 bp, Homo sapien
gttttgttgtactcagcagggcttt

SEQ ID NO: 2346383 - DNA, 25 bp, Homo sapien
catcctgcagggacaattgtgtttg

SEQ ID NO: 2346384 - DNA, 25 bp, Homo sapien
tcaaaatatggtgaggaatttctca

SEQ ID NO: 2346385 - DNA, 25 bp, Homo sapien
ttcaaaatatggtgaggaatttctc

SEQ ID NO: 2346386 - DNA, 25 bp, Homo sapien
aaatatggtgaggaatttctcagga

SEQ ID NO: 2346387 - DNA, 25 bp, Homo sapien
gtgatagaacagtgggacacaactg

SEQ ID NO: 2346388 - DNA, 25 bp, Homo sapien
tcatttcagcagaggtactttgtaa

SEQ ID NO: 2346389 - DNA, 25 bp, Homo sapien
aggtactttgtaatgcaaagccatc

SEQ ID NO: 2346390 - DNA, 25 bp, Homo sapien
aacagtgggacacaactgacactct

SEQ ID NO: 2346391 - DNA, 25 bp, Homo sapien
tccttctacttcttgtaacaccaag

SEQ ID NO: 2346392 - DNA, 25 bp, Homo sapien
tgttgctgggtgtagagttaaagtc

SEQ ID NO: 2346393 - DNA, 25 bp, Homo sapien
taaagtctgcacaatggatatacta

SEQ ID NO: 2346394 - DNA, 25 bp, Homo sapien
ttcttgtaacaccaagatgtccctc

SEQ ID NO: 2346395 - DNA, 25 bp, Homo sapien
tcatcccacatgaaatcttctattc

SEQ ID NO: 2346396 - DNA, 25 bp, Homo sapien
tttctaatgttgattgagcaaagat

SEQ ID NO: 2346397 - DNA, 25 bp, Homo sapien
ccttgcctgcttataacacctttca

SEQ ID NO: 2346398 - DNA, 25 bp, Homo sapien
tcaatccccactgttccttgcctgc

SEQ ID NO: 2346399 - DNA, 25 bp, Homo sapien
cacttgctacttggcgaactgcttc

SEQ ID NO: 2346400 - DNA, 25 bp, Homo sapien
ccagcaggtctgaatgtgaactctt

SEQ ID NO: 2346401 - DNA, 25 bp, Homo sapien
gtccctgtgagttctccccataatg

SEQ ID NO: 2346402 - DNA, 25 bp, Homo sapien
agcaggtctgaatgtgaactcttcc

SEQ ID NO: 2346403 - DNA, 25 bp, Homo sapien
gtgagttctccccataatgtgtttc

SEQ ID NO: 2346404 - DNA, 25 bp, Homo sapien
gcagcaagagcccactgcctgtggc

SEQ ID NO: 2346405 - DNA, 25 bp, Homo sapien
ctagataacagtggaagccctcttt

SEQ ID NO: 2346406 - DNA, 25 bp, Homo sapien
accagcagggccgccgcagcaagag

SEQ ID NO: 2346407 - DNA, 25 bp, Homo sapien
gtggaagccctctttaccagcaggg

SEQ ID NO: 2346408 - DNA, 25 bp, Homo sapien
tgaggtgcctatgaggactgtgctg

SEQ ID NO: 2346409 - DNA, 25 bp, Homo sapien
ttcagagcctttcagacaagctttc

SEQ ID NO: 2346410 - DNA, 25 bp, Homo sapien
aggtgcctatgaggactgtgctgtg

SEQ ID NO: 2346411 - DNA, 25 bp, Homo sapien
cagagcctttcagacaagctttcct

SEQ ID NO: 2346412 - DNA, 25 bp, Homo sapien
tctacttcgctgtttgatgagagtt

SEQ ID NO: 2346413 - DNA, 25 bp, Homo sapien
tcacaaggagcttgtagagtctact

SEQ ID NO: 2346414 - DNA, 25 bp, Homo sapien
aattcctggatgaaattcacaagga

SEQ ID NO: 2346415 - DNA, 25 bp, Homo sapien
ggagcttgtagagtctacttcgctg

SEQ ID NO: 2346416 - DNA, 25 bp, Homo sapien
gcttagtgagtgaatgcatgccata

SEQ ID NO: 2346417 - DNA, 25 bp, Homo sapien
tctggtccatggtaggcagttacct

SEQ ID NO: 2346418 - DNA, 25 bp, Homo sapien
gcatgccataacaagagtaatatac

SEQ ID NO: 2346419 - DNA, 25 bp, Homo sapien
gcctgcctccactcttagattttga

SEQ ID NO: 2346420 - DNA, 25 bp, Homo sapien
gaaagtgctttgcaacatagaggaa

SEQ ID NO: 2346421 - DNA, 25 bp, Homo sapien
gaagggtaaggactctaagttctgc

SEQ ID NO: 2346422 - DNA, 25 bp, Homo sapien
gagcagtactttgcccagtggaaat

SEQ ID NO: 2346423 - DNA, 25 bp, Homo sapien
tggacattataggaagcactgatgc

SEQ ID NO: 2346424 - DNA, 25 bp, Homo sapien
aggtgtcaccaccatgccccagcta

SEQ ID NO: 2346425 - DNA, 25 bp, Homo sapien
gagacagttgcccaggctgtccttg

SEQ ID NO: 2346426 - DNA, 25 bp, Homo sapien
ttttggtagagacagttgcccaggc

SEQ ID NO: 2346427 - DNA, 25 bp, Homo sapien
tgcggtggcacgattttcactcact

SEQ ID NO: 2346428 - DNA, 25 bp, Homo sapien
catctggtaactccattgaaactaa

SEQ ID NO: 2346429 - DNA, 25 bp, Homo sapien
agctcctcggtatttcaaacttgaa

SEQ ID NO: 2346430 - DNA, 25 bp, Homo sapien
ttgaaaaaggcttgcacacatcact

SEQ ID NO: 2346431 - DNA, 25 bp, Homo sapien
tttagaattcaggtgatgtctggct

SEQ ID NO: 2346432 - DNA, 25 bp, Homo sapien
taccccatataatagaaggacttgc

SEQ ID NO: 2346433 - DNA, 25 bp, Homo sapien
ggataacagcgtttttcagtggaaa

SEQ ID NO: 2346434 - DNA, 25 bp, Homo sapien
taagtgaaccttgataatgctgtag

SEQ ID NO: 2346435 - DNA, 25 bp, Homo sapien
tttgtagacaacacaggaataggcc

SEQ ID NO: 2346436 - DNA, 25 bp, Homo sapien
gaaagtagcaagtgaccagaatctg

SEQ ID NO: 2346437 - DNA, 25 bp, Homo sapien
cacagcggattggactgagcagtca

SEQ ID NO: 2346438 - DNA, 25 bp, Homo sapien
gacaaactagtaagcatgacctggg

SEQ ID NO: 2346439 - DNA, 25 bp, Homo sapien
cagaaaagccatgcaagggatcggg

SEQ ID NO: 2346440 - DNA, 25 bp, Homo sapien
gccgccgtgtccttcatctccaagt

SEQ ID NO: 2346441 - DNA, 25 bp, Homo sapien
gctcacgagcgagcgacagctgcag

SEQ ID NO: 2346442 - DNA, 25 bp, Homo sapien
atctccaagtttctccgcaccaagg

SEQ ID NO: 2346443 - DNA, 25 bp, Homo sapien
ccatgataggcgagatcgccgccgc

SEQ ID NO: 2346444 - DNA, 25 bp, Homo sapien
gacaaaagtagtcgtccgcccctca

SEQ ID NO: 2346445 - DNA, 25 bp, Homo sapien
caaaagtagtcgtccgcccctcacg

SEQ ID NO: 2346446 - DNA, 25 bp, Homo sapien
gatcttcgaatgctgcggagctgga

SEQ ID NO: 2346447 - DNA, 25 bp, Homo sapien
gtccgagcgatgtgaccaggccgcc

SEQ ID NO: 2346448 - DNA, 25 bp, Homo sapien
catctcttcgcctctcggagctgga

SEQ ID NO: 2346449 - DNA, 25 bp, Homo sapien
ggaaatgcagctattgagatcttcg

SEQ ID NO: 2346450 - DNA, 25 bp, Homo sapien
caggcagcgcactcttggagaagga

SEQ ID NO: 2346451 - DNA, 25 bp, Homo sapien
ggggcggagctttcacacgcgcacc

SEQ ID NO: 2346452 - DNA, 25 bp, Homo sapien
actccagggcaagcgggcccaggca

SEQ ID NO: 2346453 - DNA, 25 bp, Homo sapien
gcccaggcagcgcactcttggagaa

SEQ ID NO: 2346454 - DNA, 25 bp, Homo sapien
gcggttcttatttacccagcactta

SEQ ID NO: 2346455 - DNA, 25 bp, Homo sapien
cagcctgcgccaggcggttcttatt

SEQ ID NO: 2346456 - DNA, 25 bp, Homo sapien
cgtgaagagtagacacagcctgcgc

SEQ ID NO: 2346457 - DNA, 25 bp, Homo sapien
gcagcccgatctgagaaggcggcgt

SEQ ID NO: 2346458 - DNA, 25 bp, Homo sapien
cgcaccacacgcgtctccggcttga

SEQ ID NO: 2346459 - DNA, 25 bp, Homo sapien
gacccggagcgggaacgagatgtaa

SEQ ID NO: 2346460 - DNA, 25 bp, Homo sapien
cgggaacgagatgtaaacacggagt

SEQ ID NO: 2346461 - DNA, 25 bp, Homo sapien
tcaccgagacccggagcgggaacga

SEQ ID NO: 2346462 - DNA, 25 bp, Homo sapien
cgaggctgcagtcctttttcttgga

SEQ ID NO: 2346463 - DNA, 25 bp, Homo sapien
gaacagaaatggctccgcggcgttg

SEQ ID NO: 2346464 - DNA, 25 bp, Homo sapien
cccgcactaaggcagcgcaccgcca

SEQ ID NO: 2346465 - DNA, 25 bp, Homo sapien
ttcttggacagaacgccccgcagga

SEQ ID NO: 2346466 - DNA, 25 bp, Homo sapien
cacaaatggccttactaacctactt

SEQ ID NO: 2346467 - DNA, 25 bp, Homo sapien
ccacaaatggccttactaacctact

SEQ ID NO: 2346468 - DNA, 25 bp, Homo sapien
tcttctctccgttgactgctgaagt

SEQ ID NO: 2346469 - DNA, 25 bp, Homo sapien
ggatccgcgttatatctgctttcag

SEQ ID NO: 2346470 - DNA, 25 bp, Homo sapien
cactctttacaggatccgcgttata

SEQ ID NO: 2346471 - DNA, 25 bp, Homo sapien
tgtccgcatccagtaaggtttccac

SEQ ID NO: 2346472 - DNA, 25 bp, Homo sapien
aagaaaatcttcagttttgtgcaca

SEQ ID NO: 2346473 - DNA, 25 bp, Homo sapien
cagttttgtgcacacaagttttaaa

SEQ ID NO: 2346474 - DNA, 25 bp, Homo sapien
taggacggcatttggactaggtaaa

SEQ ID NO: 2346475 - DNA, 25 bp, Homo sapien
gcaggactcaggctaggacggcatt

SEQ ID NO: 2346476 - DNA, 25 bp, Homo sapien
aataaacttgaatgtctacacttaa

SEQ ID NO: 2346477 - DNA, 25 bp, Homo sapien
ataaacttgaatgtctacacttaat

SEQ ID NO: 2346478 - DNA, 25 bp, Homo sapien
gagccttggtaaacttagcacaaca

SEQ ID NO: 2346479 - DNA, 25 bp, Homo sapien
caaaagctgtccagaaatacctgct

SEQ ID NO: 2346480 - DNA, 25 bp, Homo sapien
agtactctgtagattcccaagttaa

SEQ ID NO: 2346481 - DNA, 25 bp, Homo sapien
tgaacattatgtaccatctaaggct

SEQ ID NO: 2346482 - DNA, 25 bp, Homo sapien
tgttgttaagcgatgcttcactcct

SEQ ID NO: 2346483 - DNA, 25 bp, Homo sapien
cagggaggcaactaaaagtggtctt

SEQ ID NO: 2346484 - DNA, 25 bp, Homo sapien
ttatgtgtcaccctctgactgaaag

SEQ ID NO: 2346485 - DNA, 25 bp, Homo sapien
tgtgaatcgcagtagatctaaaccc

SEQ ID NO: 2346486 - DNA, 25 bp, Homo sapien
gaacaggagactaggtatgcaaact

SEQ ID NO: 2346487 - DNA, 25 bp, Homo sapien
tcactgaaaatttggcaacaggtag

SEQ ID NO: 2346488 - DNA, 25 bp, Homo sapien
gctcttaagccaacacaataacaat

SEQ ID NO: 2346489 - DNA, 25 bp, Homo sapien
taattgccctaatacccagtgtggt

SEQ ID NO: 2346490 - DNA, 25 bp, Homo sapien
tcgcagctgaagaaatccccaaggt

SEQ ID NO: 2346491 - DNA, 25 bp, Homo sapien
taagtgccaccttcaatcaatcagc

SEQ ID NO: 2346492 - DNA, 25 bp, Homo sapien
tcttgttctgaatagtggtcccaca

SEQ ID NO: 2346493 - DNA, 25 bp, Homo sapien
taaccaatttactactcgcagctga

SEQ ID NO: 2346494 - DNA, 25 bp, Homo sapien
ctaaaaatcacatatggggtgcctc

SEQ ID NO: 2346495 - DNA, 25 bp, Homo sapien
aaaatcacatatggggtgcctctca

SEQ ID NO: 2346496 - DNA, 25 bp, Homo sapien
atcacatatggggtgcctctcatct

SEQ ID NO: 2346497 - DNA, 25 bp, Homo sapien
tcacatatggggtgcctctcatctt

SEQ ID NO: 2346498 - DNA, 25 bp, Homo sapien
ggggaacaaggtagactctttcagc

SEQ ID NO: 2346499 - DNA, 25 bp, Homo sapien
cccactcctttgatgtctatgatat

SEQ ID NO: 2346500 - DNA, 25 bp, Homo sapien
ccactcctttgatgtctatgatatc

SEQ ID NO: 2346501 - DNA, 25 bp, Homo sapien
ggaacaaggtagactctttcagctt

SEQ ID NO: 2346502 - DNA, 25 bp, Homo sapien
ccattctctttggcttctttctttt

SEQ ID NO: 2346503 - DNA, 25 bp, Homo sapien
agttgaacccaggtaccattctctt

SEQ ID NO: 2346504 - DNA, 25 bp, Homo sapien
cttcagttgaacccaggtaccattc

SEQ ID NO: 2346505 - DNA, 25 bp, Homo sapien
gcttctttctttttctgatcatttt

SEQ ID NO: 2346506 - DNA, 25 bp, Homo sapien
gaagagggtctagcagctcaggctt

SEQ ID NO: 2346507 - DNA, 25 bp, Homo sapien
tcataaggaagagggtctagcagct

SEQ ID NO: 2346508 - DNA, 25 bp, Homo sapien
aagagggtctagcagctcaggcttt

SEQ ID NO: 2346509 - DNA, 25 bp, Homo sapien
tgaattcataaggaagagggtctag

SEQ ID NO: 2346510 - DNA, 25 bp, Homo sapien
caaaagtgtatgagccctgagggtt

SEQ ID NO: 2346511 - DNA, 25 bp, Homo sapien
tgactgcaaactcgtggaagactct

SEQ ID NO: 2346512 - DNA, 25 bp, Homo sapien
gacatttgaggccaactgaagcttc

SEQ ID NO: 2346513 - DNA, 25 bp, Homo sapien
gaggctgacctctaaacgaatctgt

SEQ ID NO: 2346514 - DNA, 25 bp, Homo sapien
gtaaaacatgtgatgtaaccaagaa

SEQ ID NO: 2346515 - DNA, 25 bp, Homo sapien
tctgccaagtagttgaacactacgg

SEQ ID NO: 2346516 - DNA, 25 bp, Homo sapien
acactacggatgtttaccaaaatca

SEQ ID NO: 2346517 - DNA, 25 bp, Homo sapien
gaaggattgatgaccaacataatca

SEQ ID NO: 2346518 - DNA, 25 bp, Homo sapien
cactgggagggttaaacaccgatat

SEQ ID NO: 2346519 - DNA, 25 bp, Homo sapien
gtcctgaagagccttgtgaatttaa

SEQ ID NO: 2346520 - DNA, 25 bp, Homo sapien
gaatttaatttgagcatcttgatgc

SEQ ID NO: 2346521 - DNA, 25 bp, Homo sapien
acaccgatataattggtcctgaaga

SEQ ID NO: 2346522 - DNA, 25 bp, Homo sapien
ggctccttactttatacccatatat

SEQ ID NO: 2346523 - DNA, 25 bp, Homo sapien
tactttatacccatatattcccctc

SEQ ID NO: 2346524 - DNA, 25 bp, Homo sapien
gggctccttactttatacccatata

SEQ ID NO: 2346525 - DNA, 25 bp, Homo sapien
tattaagcagacatatggtgaattg

SEQ ID NO: 2346526 - DNA, 25 bp, Homo sapien
gacaaattgtactctgagtccatgc

SEQ ID NO: 2346527 - DNA, 25 bp, Homo sapien
tcatcatatgtattaagacttgggt

SEQ ID NO: 2346528 - DNA, 25 bp, Homo sapien
gaagaaatctagtaacacagagagt

SEQ ID NO: 2346529 - DNA, 25 bp, Homo sapien
cattagtatggggatggttgagaag

SEQ ID NO: 2346530 - DNA, 25 bp, Homo sapien
tcctccatttcaacattagtatggg

SEQ ID NO: 2346531 - DNA, 25 bp, Homo sapien
gccttcctccatttcaacattagta

SEQ ID NO: 2346532 - DNA, 25 bp, Homo sapien
ttattcactgccttcctccatttca

SEQ ID NO: 2346533 - DNA, 25 bp, Homo sapien
gccagagaaatgcagagcagcaagg

SEQ ID NO: 2346534 - DNA, 25 bp, Homo sapien
gagccagagaaatgcagagcagcaa

SEQ ID NO: 2346535 - DNA, 25 bp, Homo sapien
agagcagcaaggcccagcagccctt

SEQ ID NO: 2346536 - DNA, 25 bp, Homo sapien
ctggagccagagaaatgcagagcag

SEQ ID NO: 2346537 - DNA, 25 bp, Homo sapien
aaagtctaaaactggagtcctgcgg

SEQ ID NO: 2346538 - DNA, 25 bp, Homo sapien
agtaagtaatatgtccactcagagg

SEQ ID NO: 2346539 - DNA, 25 bp, Homo sapien
aacaaatttaggcatagggctggtt

SEQ ID NO: 2346540 - DNA, 25 bp, Homo sapien
gcagttctgagcatgaagtaagtaa

SEQ ID NO: 2346541 - DNA, 25 bp, Homo sapien
ttgtattcaaatattggacttgcaa

SEQ ID NO: 2346542 - DNA, 25 bp, Homo sapien
gaagcaaactcgctgcattgtacag

SEQ ID NO: 2346543 - DNA, 25 bp, Homo sapien
aactcgctgcattgtacagcttcat

SEQ ID NO: 2346544 - DNA, 25 bp, Homo sapien
ttcaaatattggacttgcaacatca

SEQ ID NO: 2346545 - DNA, 25 bp, Homo sapien
tgtttctaactatggatttttctga

SEQ ID NO: 2346546 - DNA, 25 bp, Homo sapien
ttcttgcttgcccatagaaccactc

SEQ ID NO: 2346547 - DNA, 25 bp, Homo sapien
gcttgcccatagaaccactccttga

SEQ ID NO: 2346548 - DNA, 25 bp, Homo sapien
gattttccaatgtttctaactatgg

SEQ ID NO: 2346549 - DNA, 25 bp, Homo sapien
tgtctgattatgagccctgtgcctt

SEQ ID NO: 2346550 - DNA, 25 bp, Homo sapien
ttctagcatttctggatctgatggc

SEQ ID NO: 2346551 - DNA, 25 bp, Homo sapien
gagtttctaacttgatgactcagac

SEQ ID NO: 2346552 - DNA, 25 bp, Homo sapien
tactctttcgtcaacatggcatgtc

SEQ ID NO: 2346553 - DNA, 25 bp, Homo sapien
ccactgaagtatcctgagcagcagg

SEQ ID NO: 2346554 - DNA, 25 bp, Homo sapien
gatgctctagggacacatgctgtgt

SEQ ID NO: 2346555 - DNA, 25 bp, Homo sapien
ttagacagcaaacaggaccattagt

SEQ ID NO: 2346556 - DNA, 25 bp, Homo sapien
tgcaaagcaggccatcttggatgat

SEQ ID NO: 2346557 - DNA, 25 bp, Homo sapien
cctgatttcccataagggtgaaact

SEQ ID NO: 2346558 - DNA, 25 bp, Homo sapien
atcctgatttcccataagggtgaaa

SEQ ID NO: 2346559 - DNA, 25 bp, Homo sapien
tgatttcccataagggtgaaactta

SEQ ID NO: 2346560 - DNA, 25 bp, Homo sapien
tcccataagggtgaaacttatcctg

SEQ ID NO: 2346561 - DNA, 25 bp, Homo sapien
agtatccccagggatatgatatgtc

SEQ ID NO: 2346562 - DNA, 25 bp, Homo sapien
aaagtatccccagggatatgatatg

SEQ ID NO: 2346563 - DNA, 25 bp, Homo sapien
tgaaagtatccccagggatatgata

SEQ ID NO: 2346564 - DNA, 25 bp, Homo sapien
atccccagggatatgatatgtcaca

SEQ ID NO: 2346565 - DNA, 25 bp, Homo sapien
tgccaaggagctttcataatgagga

SEQ ID NO: 2346566 - DNA, 25 bp, Homo sapien
gcagaaagccttgtgtaagaatatt

SEQ ID NO: 2346567 - DNA, 25 bp, Homo sapien
tcagcaacagctgtgtgattattgc

SEQ ID NO: 2346568 - DNA, 25 bp, Homo sapien
gctgtgtgattattgctgaagcctg

SEQ ID NO: 2346569 - DNA, 25 bp, Homo sapien
gacaggattccattagctgctgtgt

SEQ ID NO: 2346570 - DNA, 25 bp, Homo sapien
cacagagctgctttatttgactgaa

SEQ ID NO: 2346571 - DNA, 25 bp, Homo sapien
gactgaacagcaagattagtcacat

SEQ ID NO: 2346572 - DNA, 25 bp, Homo sapien
gactggtaacctagtatcagcgttc

SEQ ID NO: 2346573 - DNA, 25 bp, Homo sapien
actgacctcttggaaaagtgacttg

SEQ ID NO: 2346574 - DNA, 25 bp, Homo sapien
gaaaagtgacttgtagaccaggtgt

SEQ ID NO: 2346575 - DNA, 25 bp, Homo sapien
agtgacttgtagaccaggtgtcttc

SEQ ID NO: 2346576 - DNA, 25 bp, Homo sapien
accactgacctcttggaaaagtgac

SEQ ID NO: 2346577 - DNA, 25 bp, Homo sapien
tcagacacttgaattgagggcaata

SEQ ID NO: 2346578 - DNA, 25 bp, Homo sapien
aattgagggcaataatgactccaag

SEQ ID NO: 2346579 - DNA, 25 bp, Homo sapien
gctttcagacacttgaattgagggc

SEQ ID NO: 2346580 - DNA, 25 bp, Homo sapien
cacttgaattgagggcaataatgac

SEQ ID NO: 2346581 - DNA, 25 bp, Homo sapien
cttcattaccagcgtggtgataggg

SEQ ID NO: 2346582 - DNA, 25 bp, Homo sapien
caccaggaaatagtggaggtgccat

SEQ ID NO: 2346583 - DNA, 25 bp, Homo sapien
ccaggaaatagtggaggtgccattc

SEQ ID NO: 2346584 - DNA, 25 bp, Homo sapien
gatgagtgctatttacaaccagcat

SEQ ID NO: 2346585 - DNA, 25 bp, Homo sapien
tggaacatctttggcaggtgtacct

SEQ ID NO: 2346586 - DNA, 25 bp, Homo sapien
acgacttgttgacagtggccctggg

SEQ ID NO: 2346587 - DNA, 25 bp, Homo sapien
ctttggcaggtgtacctgtgtcttc

SEQ ID NO: 2346588 - DNA, 25 bp, Homo sapien
ggcttgtccaatttgtcacgacttg

SEQ ID NO: 2346589 - DNA, 25 bp, Homo sapien
taaaacagagcattggaaatcaagc

SEQ ID NO: 2346590 - DNA, 25 bp, Homo sapien
taaatcaaaagttttggactctgaa

SEQ ID NO: 2346591 - DNA, 25 bp, Homo sapien
ttcaataaaatcaccggctggtaaa

SEQ ID NO: 2346592 - DNA, 25 bp, Homo sapien
ctacacaggaatacggatttcactt

SEQ ID NO: 2346593 - DNA, 25 bp, Homo sapien
agagccttgcttggtctgatctaga

SEQ ID NO: 2346594 - DNA, 25 bp, Homo sapien
ggcgtggcactaatgcttatcacca

SEQ ID NO: 2346595 - DNA, 25 bp, Homo sapien
tcctcacaatgtgtggactgctagg

SEQ ID NO: 2346596 - DNA, 25 bp, Homo sapien
gtggactgctaggaccttgaaccca

SEQ ID NO: 2346597 - DNA, 25 bp, Homo sapien
cgatgctccaagtaaataacaaggg

SEQ ID NO: 2346598 - DNA, 25 bp, Homo sapien
gaaatagccgtgttggaataagccc

SEQ ID NO: 2346599 - DNA, 25 bp, Homo sapien
gcctcatcgacctgggaaagggaaa

SEQ ID NO: 2346600 - DNA, 25 bp, Homo sapien
gcaagcctcagtccctatgtcagga

SEQ ID NO: 2346601 - DNA, 25 bp, Homo sapien
cacttcttggacttgggaccacaac

SEQ ID NO: 2346602 - DNA, 25 bp, Homo sapien
cctgacctgagcataagagactgtt

SEQ ID NO: 2346603 - DNA, 25 bp, Homo sapien
ggctgccctcaatggacctgtttgg

SEQ ID NO: 2346604 - DNA, 25 bp, Homo sapien
ccttgagaagagagacgcagttaca

SEQ ID NO: 2346605 - DNA, 25 bp, Homo sapien
aggtaatgtctcataagccctttga

SEQ ID NO: 2346606 - DNA, 25 bp, Homo sapien
ggtgtcagctcaaagatcaaactca

SEQ ID NO: 2346607 - DNA, 25 bp, Homo sapien
attcttgtctaatggagtattcccc

SEQ ID NO: 2346608 - DNA, 25 bp, Homo sapien
tcctctaaggatctaagcatatgct

SEQ ID NO: 2346609 - DNA, 25 bp, Homo sapien
tccacactgcataccaaaaagaggc

SEQ ID NO: 2346610 - DNA, 25 bp, Homo sapien
gaagaatcccttggatgcaaaggca

SEQ ID NO: 2346611 - DNA, 25 bp, Homo sapien
acaagtagccgtgcaatagggtcca

SEQ ID NO: 2346612 - DNA, 25 bp, Homo sapien
tccaagttggtattgggcacctacc

SEQ ID NO: 2346613 - DNA, 25 bp, Homo sapien
tcctggaatagttcgtgcagtcaca

SEQ ID NO: 2346614 - DNA, 25 bp, Homo sapien
ttttcctggaatagttcgtgcagtc

SEQ ID NO: 2346615 - DNA, 25 bp, Homo sapien
tggaatagttcgtgcagtcacagcc

SEQ ID NO: 2346616 - DNA, 25 bp, Homo sapien
aatagttcgtgcagtcacagccttg

SEQ ID NO: 2346617 - DNA, 25 bp, Homo sapien
tgtcccaaaggcttggttgatatgt

SEQ ID NO: 2346618 - DNA, 25 bp, Homo sapien
ctgtcccaaaggcttggttgatatg

SEQ ID NO: 2346619 - DNA, 25 bp, Homo sapien
aatgtgataacttgggtagaacctc

SEQ ID NO: 2346620 - DNA, 25 bp, Homo sapien
ttttataggcaagctaccatctggt

SEQ ID NO: 2346621 - DNA, 25 bp, Homo sapien
tctcttgataagctggaggctgcca

SEQ ID NO: 2346622 - DNA, 25 bp, Homo sapien
gaagatgcttcctaaattgacaacg

SEQ ID NO: 2346623 - DNA, 25 bp, Homo sapien
tgctggaacctgacaatgccgtgtg

SEQ ID NO: 2346624 - DNA, 25 bp, Homo sapien
cagttcagcgtggatactcatgccg

SEQ ID NO: 2346625 - DNA, 25 bp, Homo sapien
gccgatgagcctaagaatgtttgcc

SEQ ID NO: 2346626 - DNA, 25 bp, Homo sapien
tgccgtgtgcgagtaataagccatc

SEQ ID NO: 2346627 - DNA, 25 bp, Homo sapien
aagacagtttcagatgggcagatgg

SEQ ID NO: 2346628 - DNA, 25 bp, Homo sapien
aaagacagtttcagatgggcagatg

SEQ ID NO: 2346629 - DNA, 25 bp, Homo sapien
cacaaccatgcagccaaagacagtt

SEQ ID NO: 2346630 - DNA, 25 bp, Homo sapien
caaagacagtttcagatgggcagat

SEQ ID NO: 2346631 - DNA, 25 bp, Homo sapien
tcagagaaaacatgcagggacaatc

SEQ ID NO: 2346632 - DNA, 25 bp, Homo sapien
agagaaaacatgcagggacaatcac

SEQ ID NO: 2346633 - DNA, 25 bp, Homo sapien
cagagaaaacatgcagggacaatca

SEQ ID NO: 2346634 - DNA, 25 bp, Homo sapien
gctctgactcccagatgaattgaaa

SEQ ID NO: 2346635 - DNA, 25 bp, Homo sapien
gaattgaaattcaacttcacagtca

SEQ ID NO: 2346636 - DNA, 25 bp, Homo sapien
aaattcaacttcacagtcaaatgag

SEQ ID NO: 2346637 - DNA, 25 bp, Homo sapien
caggaaatatcagagtgttgttatt

SEQ ID NO: 2346638 - DNA, 25 bp, Homo sapien
ctgtacaagtacaaggagaagacac

SEQ ID NO: 2346639 - DNA, 25 bp, Homo sapien
tgtacaagtacaaggagaagacact

SEQ ID NO: 2346640 - DNA, 25 bp, Homo sapien
caagtacaaggagaagacacttctc

SEQ ID NO: 2346641 - DNA, 25 bp, Homo sapien
tacaagtacaaggagaagacacttc

SEQ ID NO: 2346642 - DNA, 25 bp, Homo sapien
gtttcaggtccggttagcaaatcat

SEQ ID NO: 2346643 - DNA, 25 bp, Homo sapien
tgaggacacttgagtcactggaatg

SEQ ID NO: 2346644 - DNA, 25 bp, Homo sapien
cacttgagtcactggaatggaggga

SEQ ID NO: 2346645 - DNA, 25 bp, Homo sapien
agggagataggacagtttcaggtcc

SEQ ID NO: 2346646 - DNA, 25 bp, Homo sapien
aaggcacctctcaacatggcagctg

SEQ ID NO: 2346647 - DNA, 25 bp, Homo sapien
ccttctaaggcagtgatttggtcca

SEQ ID NO: 2346648 - DNA, 25 bp, Homo sapien
caagaaactctgacactgccggtaa

SEQ ID NO: 2346649 - DNA, 25 bp, Homo sapien
cctcactggttgttggatagaagcc

SEQ ID NO: 2346650 - DNA, 25 bp, Homo sapien
tccttctagtcatgggtggagtagc

SEQ ID NO: 2346651 - DNA, 25 bp, Homo sapien
acatcagggctaatgcaagtacaca

SEQ ID NO: 2346652 - DNA, 25 bp, Homo sapien
gtacacagttcaggctaatgctcag

SEQ ID NO: 2346653 - DNA, 25 bp, Homo sapien
caaatgtggagaactttccccaggt

SEQ ID NO: 2346654 - DNA, 25 bp, Homo sapien
tggaaatgcaactcaagcctttctg

SEQ ID NO: 2346655 - DNA, 25 bp, Homo sapien
taagaactcccagctaatgatcctg

SEQ ID NO: 2346656 - DNA, 25 bp, Homo sapien
tgattaaggttatgagaactcccac

SEQ ID NO: 2346657 - DNA, 25 bp, Homo sapien
taaaaactcatggtctctagagaca

SEQ ID NO: 2346658 - DNA, 25 bp, Homo sapien
taccattttattgaccactgagggc

SEQ ID NO: 2346659 - DNA, 25 bp, Homo sapien
gagggcagagtttaagcacttccag

SEQ ID NO: 2346660 - DNA, 25 bp, Homo sapien
gaagtgagtctccaaggctcgaaac

SEQ ID NO: 2346661 - DNA, 25 bp, Homo sapien
gaaaagatatagctagcctctggct

SEQ ID NO: 2346662 - DNA, 25 bp, Homo sapien
tgaggctttcatgagtatctacacc

SEQ ID NO: 2346663 - DNA, 25 bp, Homo sapien
gtatagggcttaatctcacacacag

SEQ ID NO: 2346664 - DNA, 25 bp, Homo sapien
gaaattcctgtgctgagtatagggc

SEQ ID NO: 2346665 - DNA, 25 bp, Homo sapien
cccacatttgatcctgaataggctg

SEQ ID NO: 2346666 - DNA, 25 bp, Homo sapien
tgttatgtgtcgtcaaagggagtct

SEQ ID NO: 2346667 - DNA, 25 bp, Homo sapien
tctagggcacattcctactggttgg

SEQ ID NO: 2346668 - DNA, 25 bp, Homo sapien
ggaatacctcctaccacaacgcttg

SEQ ID NO: 2346669 - DNA, 25 bp, Homo sapien
ttctcaaaagagtgctggacacagg

SEQ ID NO: 2346670 - DNA, 25 bp, Homo sapien
tgcagagttgcttagaggattcccc

SEQ ID NO: 2346671 - DNA, 25 bp, Homo sapien
gacatattggtgttccttacccaag

SEQ ID NO: 2346672 - DNA, 25 bp, Homo sapien
cacactcctgcagtatttaacccaa

SEQ ID NO: 2346673 - DNA, 25 bp, Homo sapien
ttcaaagacagaacggaagggaatc

SEQ ID NO: 2346674 - DNA, 25 bp, Homo sapien
gaggggtttctgctgatgattctta

SEQ ID NO: 2346675 - DNA, 25 bp, Homo sapien
tccttgaggggtttctgctgatgat

SEQ ID NO: 2346676 - DNA, 25 bp, Homo sapien
tttctgctgatgattcttagaaacc

SEQ ID NO: 2346677 - DNA, 25 bp, Homo sapien
gggtttctgctgatgattcttagaa

SEQ ID NO: 2346678 - DNA, 25 bp, Homo sapien
gtgtgacaccacatacaagacattg

SEQ ID NO: 2346679 - DNA, 25 bp, Homo sapien
tgcccactctgtgaccaagaagact

SEQ ID NO: 2346680 - DNA, 25 bp, Homo sapien
gaagcattcctgtgaacggagcaga

SEQ ID NO: 2346681 - DNA, 25 bp, Homo sapien
tttactaaatgaattggaggtcgcc

SEQ ID NO: 2346682 - DNA, 25 bp, Homo sapien
tgaaaccaaatcgccctgtctccat

SEQ ID NO: 2346683 - DNA, 25 bp, Homo sapien
cagctgctgagcaacaatagctcct

SEQ ID NO: 2346684 - DNA, 25 bp, Homo sapien
taacggagccaatacacagacaagg

SEQ ID NO: 2346685 - DNA, 25 bp, Homo sapien
cagggcttcctaagaagcaagagga

SEQ ID NO: 2346686 - DNA, 25 bp, Homo sapien
gacaaggcctaatgttcctgcactt

SEQ ID NO: 2346687 - DNA, 25 bp, Homo sapien
cccatctttctcatggtgaaaaaat

SEQ ID NO: 2346688 - DNA, 25 bp, Homo sapien
tgaaaaaatattcgatgttcctccc

SEQ ID NO: 2346689 - DNA, 25 bp, Homo sapien
ctttctcatggtgaaaaaatattcg

SEQ ID NO: 2346690 - DNA, 25 bp, Homo sapien
catggtgaaaaaatattcgatgttc

SEQ ID NO: 2346691 - DNA, 25 bp, Homo sapien
caattccagactgtggtatgcgtcc

SEQ ID NO: 2346692 - DNA, 25 bp, Homo sapien
cctgaacaggttctgcgtctttaac

SEQ ID NO: 2346693 - DNA, 25 bp, Homo sapien
tttcaattgtcagggcatctgtcag

SEQ ID NO: 2346694 - DNA, 25 bp, Homo sapien
catgttacccttgggaaatccctgc

SEQ ID NO: 2346695 - DNA, 25 bp, Homo sapien
ttttctaggaaggagatctgtacag

SEQ ID NO: 2346696 - DNA, 25 bp, Homo sapien
tctgggtaatacatcttgaactggt

SEQ ID NO: 2346697 - DNA, 25 bp, Homo sapien
tctctaatgatcgtaacagatgggc

SEQ ID NO: 2346698 - DNA, 25 bp, Homo sapien
caattgtagttgctccattaccaga

SEQ ID NO: 2346699 - DNA, 25 bp, Homo sapien
atctggtgccgatatgaaatgatga

SEQ ID NO: 2346700 - DNA, 25 bp, Homo sapien
tgttcatctggtgccgatatgaaat

SEQ ID NO: 2346701 - DNA, 25 bp, Homo sapien
tcgactgcccttactccatcaatga

SEQ ID NO: 2346702 - DNA, 25 bp, Homo sapien
tttttatgacactccccctcgactg

SEQ ID NO: 2346703 - DNA, 25 bp, Homo sapien
aatgcatccgccctcggactgggtg

SEQ ID NO: 2346704 - DNA, 25 bp, Homo sapien
cacaggtgcaaggtttttatggccg

SEQ ID NO: 2346705 - DNA, 25 bp, Homo sapien
gatatggtacacatcacgtttgccc

SEQ ID NO: 2346706 - DNA, 25 bp, Homo sapien
ggaagcaggactttcaacaatggcc

SEQ ID NO: 2346707 - DNA, 25 bp, Homo sapien
taacttctgctgaaggaactaatgg

SEQ ID NO: 2346708 - DNA, 25 bp, Homo sapien
tgaatccaagcatcacgagaatgtg

SEQ ID NO: 2346709 - DNA, 25 bp, Homo sapien
gaataagggctggttgatttctcct

SEQ ID NO: 2346710 - DNA, 25 bp, Homo sapien
caatatttaaactggaaggaggctg

SEQ ID NO: 2346711 - DNA, 25 bp, Homo sapien
catcacactcctgggaatgctgtaa

SEQ ID NO: 2346712 - DNA, 25 bp, Homo sapien
taagcctgtgaaaaacccatacctc

SEQ ID NO: 2346713 - DNA, 25 bp, Homo sapien
gtttgaaggcctcccgaacacagtc

SEQ ID NO: 2346714 - DNA, 25 bp, Homo sapien
gaagaggcttatatcccgcatgagc

SEQ ID NO: 2346715 - DNA, 25 bp, Homo sapien
gccaatgaattgtaccacaggtctc

SEQ ID NO: 2346716 - DNA, 25 bp, Homo sapien
caatgaattgtaccacaggtctcag

SEQ ID NO: 2346717 - DNA, 25 bp, Homo sapien
ccaatgaattgtaccacaggtctca

SEQ ID NO: 2346718 - DNA, 25 bp, Homo sapien
aatgaattgtaccacaggtctcaga

SEQ ID NO: 2346719 - DNA, 25 bp, Homo sapien
aaaccctaggatgccctctttctga

SEQ ID NO: 2346720 - DNA, 25 bp, Homo sapien
gcaaaaatcttgtgacagcttgaga

SEQ ID NO: 2346721 - DNA, 25 bp, Homo sapien
agatggtcatgaagtcacaaagtcc

SEQ ID NO: 2346722 - DNA, 25 bp, Homo sapien
gctacacagccgcaaagaaatgatg

SEQ ID NO: 2346723 - DNA, 25 bp, Homo sapien
tgtcagatggtctgatgagaatagc

SEQ ID NO: 2346724 - DNA, 25 bp, Homo sapien
actcccttgggtagtttgtcagatg

SEQ ID NO: 2346725 - DNA, 25 bp, Homo sapien
atggtctgatgagaatagcaggagc

SEQ ID NO: 2346726 - DNA, 25 bp, Homo sapien
cccttgggtagtttgtcagatggtc

SEQ ID NO: 2346727 - DNA, 25 bp, Homo sapien
tctgagctgttcgaatctgatttcc

SEQ ID NO: 2346728 - DNA, 25 bp, Homo sapien
gggatgcatgcatcccgccctttgc

SEQ ID NO: 2346729 - DNA, 25 bp, Homo sapien
cagggcaattgcagtttggcggctc

SEQ ID NO: 2346730 - DNA, 25 bp, Homo sapien
ccctttgccctcatgtctgagctgt

SEQ ID NO: 2346731 - DNA, 25 bp, Homo sapien
gccagcgtgtgccgactgctgctgt

SEQ ID NO: 2346732 - DNA, 25 bp, Homo sapien
cctgagccaggcggttgctgactgc

SEQ ID NO: 2346733 - DNA, 25 bp, Homo sapien
actgccagggccagcgtgtgccgac

SEQ ID NO: 2346734 - DNA, 25 bp, Homo sapien
tgagccaggcggttgctgactgcca

SEQ ID NO: 2346735 - DNA, 25 bp, Homo sapien
gatacggatgacatgttctctgtgc

SEQ ID NO: 2346736 - DNA, 25 bp, Homo sapien
gagcacttggaagttctaatctgag

SEQ ID NO: 2346737 - DNA, 25 bp, Homo sapien
gcctttgaatatctagtttctcatc

SEQ ID NO: 2346738 - DNA, 25 bp, Homo sapien
ctacatatcatgagtgagcacttgg

SEQ ID NO: 2346739 - DNA, 25 bp, Homo sapien
tggtgaaatgtgctacctcagcctt

SEQ ID NO: 2346740 - DNA, 25 bp, Homo sapien
tactgctgtgtatccttcactggtg

SEQ ID NO: 2346741 - DNA, 25 bp, Homo sapien
taaggcctccatagtagacctggct

SEQ ID NO: 2346742 - DNA, 25 bp, Homo sapien
ttttccacacaggagttaaggcctc

SEQ ID NO: 2346743 - DNA, 25 bp, Homo sapien
gaagtccagaccagcacgtacaata

SEQ ID NO: 2346744 - DNA, 25 bp, Homo sapien
cacaggacacgtaggggtcaggcag

SEQ ID NO: 2346745 - DNA, 25 bp, Homo sapien
gaccagcacgtacaatatgcctctg

SEQ ID NO: 2346746 - DNA, 25 bp, Homo sapien
ggcaggaagtccagaccagcacgta

SEQ ID NO: 2346747 - DNA, 25 bp, Homo sapien
tacggctgctaacataatgagtttc

SEQ ID NO: 2346748 - DNA, 25 bp, Homo sapien
tttaaccagccctgaaagcttgggc

SEQ ID NO: 2346749 - DNA, 25 bp, Homo sapien
tcttgatctctggtgctacggctgc

SEQ ID NO: 2346750 - DNA, 25 bp, Homo sapien
tcgcctggtgccaagggatgcatct

SEQ ID NO: 2346751 - DNA, 25 bp, Homo sapien
taccattgtgcagccttgctttcgt

SEQ ID NO: 2346752 - DNA, 25 bp, Homo sapien
cctttagtagttaccattgtgcagc

SEQ ID NO: 2346753 - DNA, 25 bp, Homo sapien
ttgctttcgttttggcttggcacat

SEQ ID NO: 2346754 - DNA, 25 bp, Homo sapien
tcgttttggcttggcacatgcattt

SEQ ID NO: 2346755 - DNA, 25 bp, Homo sapien
tgacaaatggctggatcaagatggc

SEQ ID NO: 2346756 - DNA, 25 bp, Homo sapien
gagcaattgaagcttgacctccaag

SEQ ID NO: 2346757 - DNA, 25 bp, Homo sapien
gatcagtcaggaacaatagtgtggg

SEQ ID NO: 2346758 - DNA, 25 bp, Homo sapien
caatgaatgaattaaggatcaggcc

SEQ ID NO: 2346759 - DNA, 25 bp, Homo sapien
ctgaggcaagtgcatgaagtttcag

SEQ ID NO: 2346760 - DNA, 25 bp, Homo sapien
tgaggcaagtgcatgaagtttcagt

SEQ ID NO: 2346761 - DNA, 25 bp, Homo sapien
tgtagcacacttcacctgggctaca

SEQ ID NO: 2346762 - DNA, 25 bp, Homo sapien
tagcacacttcacctgggctacatc

SEQ ID NO: 2346763 - DNA, 25 bp, Homo sapien
gtagcacacttcacctgggctacat

SEQ ID NO: 2346764 - DNA, 25 bp, Homo sapien
tctttgacacattccttaaagcttt

SEQ ID NO: 2346765 - DNA, 25 bp, Homo sapien
ttcaaaaatgcagtgggtgctaagt

SEQ ID NO: 2346766 - DNA, 25 bp, Homo sapien
gacacattccttaaagctttaacca

SEQ ID NO: 2346767 - DNA, 25 bp, Homo sapien
cagtgggtgctaagtatctttgaca

SEQ ID NO: 2346768 - DNA, 25 bp, Homo sapien
ttcaccgggcacattcccaggtatg

SEQ ID NO: 2346769 - DNA, 25 bp, Homo sapien
cttatagttcaccgggcacattccc

SEQ ID NO: 2346770 - DNA, 25 bp, Homo sapien
gggcacattcccaggtatgatacat

SEQ ID NO: 2346771 - DNA, 25 bp, Homo sapien
cattcccaggtatgatacatcattt

SEQ ID NO: 2346772 - DNA, 25 bp, Homo sapien
tctcttgcacaatcctgcactggga

SEQ ID NO: 2346773 - DNA, 25 bp, Homo sapien
gtggccacggtaggcagccctctgt

SEQ ID NO: 2346774 - DNA, 25 bp, Homo sapien
ctcaaaggtggccacggtaggcagc

SEQ ID NO: 2346775 - DNA, 25 bp, Homo sapien
cactgggactggcaaatcaacattt

SEQ ID NO: 2346776 - DNA, 25 bp, Homo sapien
ggtcttggtacgtatcccctgtgag

SEQ ID NO: 2346777 - DNA, 25 bp, Homo sapien
taacatctatagctgcgcctggcag

SEQ ID NO: 2346778 - DNA, 25 bp, Homo sapien
gatttgacataaggtccctggagag

SEQ ID NO: 2346779 - DNA, 25 bp, Homo sapien
ctgataactccttcacagggtggct

SEQ ID NO: 2346780 - DNA, 25 bp, Homo sapien
ccatggctccttgagcacgttggca

SEQ ID NO: 2346781 - DNA, 25 bp, Homo sapien
ctttgaagggacagcacttattttc

SEQ ID NO: 2346782 - DNA, 25 bp, Homo sapien
catggctccttgagcacgttggcag

SEQ ID NO: 2346783 - DNA, 25 bp, Homo sapien
agtggcctcatagaagcagctatac

SEQ ID NO: 2346784 - DNA, 25 bp, Homo sapien
gcccatgccggcagtccacaaagtg

SEQ ID NO: 2346785 - DNA, 25 bp, Homo sapien
caagagagtggtgattgcctgggcc

SEQ ID NO: 2346786 - DNA, 25 bp, Homo sapien
ggtcattaatgagagcaatcaggtt

SEQ ID NO: 2346787 - DNA, 25 bp, Homo sapien
ctagagacgccagcaaggcagtggg

SEQ ID NO: 2346788 - DNA, 25 bp, Homo sapien
tagagacgccagcaaggcagtgggg

SEQ ID NO: 2346789 - DNA, 25 bp, Homo sapien
tccatcaggccaaattgactcccct

SEQ ID NO: 2346790 - DNA, 25 bp, Homo sapien
ctctgggatcgtggtgtctccatca

SEQ ID NO: 2346791 - DNA, 25 bp, Homo sapien
acttacaatgcattcttggggacca

SEQ ID NO: 2346792 - DNA, 25 bp, Homo sapien
ttgactcccctttgcacttacaatg

SEQ ID NO: 2346793 - DNA, 25 bp, Homo sapien
ctttccttagcctggagaagtagga

SEQ ID NO: 2346794 - DNA, 25 bp, Homo sapien
cagtcaaagaatatgggcacatgtg

SEQ ID NO: 2346795 - DNA, 25 bp, Homo sapien
aaagaatatgggcacatgtgagata

SEQ ID NO: 2346796 - DNA, 25 bp, Homo sapien
tcacagtcaaagaatatgggcacat

SEQ ID NO: 2346797 - DNA, 25 bp, Homo sapien
agcttcacagtcaaagaatatgggc

SEQ ID NO: 2346798 - DNA, 25 bp, Homo sapien
gaagcagctacaaagatcattttat

SEQ ID NO: 2346799 - DNA, 25 bp, Homo sapien
aagcagctacaaagatcattttatc

SEQ ID NO: 2346800 - DNA, 25 bp, Homo sapien
agaagcagctacaaagatcatttta

SEQ ID NO: 2346801 - DNA, 25 bp, Homo sapien
aaagaagcagctacaaagatcattt

SEQ ID NO: 2346802 - DNA, 25 bp, Homo sapien
gctgtatagctcagtcgcgctgcca

SEQ ID NO: 2346803 - DNA, 25 bp, Homo sapien
cagcacattctctagggccctgagg

SEQ ID NO: 2346804 - DNA, 25 bp, Homo sapien
ggccctgaggtgtccaagttcactt

SEQ ID NO: 2346805 - DNA, 25 bp, Homo sapien
cagaattgcaggctgtatagctcag

SEQ ID NO: 2346806 - DNA, 25 bp, Homo sapien
agtgtttcccatctgcgaatcagag

SEQ ID NO: 2346807 - DNA, 25 bp, Homo sapien
cagtgtttcccatctgcgaatcaga

SEQ ID NO: 2346808 - DNA, 25 bp, Homo sapien
gccacagtgtttcccatctgcgaat

SEQ ID NO: 2346809 - DNA, 25 bp, Homo sapien
cacagtgtttcccatctgcgaatca

SEQ ID NO: 2346810 - DNA, 25 bp, Homo sapien
ggatgcctaaagattcttcagttga

SEQ ID NO: 2346811 - DNA, 25 bp, Homo sapien
ttgagggcgggaaaagccagcagac

SEQ ID NO: 2346812 - DNA, 25 bp, Homo sapien
gatgcctaaagattcttcagttgag

SEQ ID NO: 2346813 - DNA, 25 bp, Homo sapien
gattcttcagttgagggcgggaaaa

SEQ ID NO: 2346814 - DNA, 25 bp, Homo sapien
agagattcccctgatggctttaaaa

SEQ ID NO: 2346815 - DNA, 25 bp, Homo sapien
gcagagattcccctgatggctttaa

SEQ ID NO: 2346816 - DNA, 25 bp, Homo sapien
cagagattcccctgatggctttaaa

SEQ ID NO: 2346817 - DNA, 25 bp, Homo sapien
gggcagagattcccctgatggcttt

SEQ ID NO: 2346818 - DNA, 25 bp, Homo sapien
aatgaatgataatgccgatcaggca

SEQ ID NO: 2346819 - DNA, 25 bp, Homo sapien
gagtgttactgaatgaatgataatg

SEQ ID NO: 2346820 - DNA, 25 bp, Homo sapien
tactgaatgaatgataatgccgatc

SEQ ID NO: 2346821 - DNA, 25 bp, Homo sapien
tgttactgaatgaatgataatgccg

SEQ ID NO: 2346822 - DNA, 25 bp, Homo sapien
tctgctcgtaccagaattagcctgt

SEQ ID NO: 2346823 - DNA, 25 bp, Homo sapien
gatttcctgcctctacgaaagggat

SEQ ID NO: 2346824 - DNA, 25 bp, Homo sapien
tgtctccagggaagataacagctaa

SEQ ID NO: 2346825 - DNA, 25 bp, Homo sapien
tctcttgtccctagcagtgtaccac

SEQ ID NO: 2346826 - DNA, 25 bp, Homo sapien
tcagaacccgcagatccagagtgag

SEQ ID NO: 2346827 - DNA, 25 bp, Homo sapien
gaaagcaaccttgctaccagctgca

SEQ ID NO: 2346828 - DNA, 25 bp, Homo sapien
cacctgtaacaatgcgtcctcctgg

SEQ ID NO: 2346829 - DNA, 25 bp, Homo sapien
tgcaatgaggaactggtctctcccc

SEQ ID NO: 2346830 - DNA, 25 bp, Homo sapien
ctttgaccttccaagctttgagaat

SEQ ID NO: 2346831 - DNA, 25 bp, Homo sapien
gaccttccaagctttgagaatccag

SEQ ID NO: 2346832 - DNA, 25 bp, Homo sapien
ttgaccttccaagctttgagaatcc

SEQ ID NO: 2346833 - DNA, 25 bp, Homo sapien
ccttccaagctttgagaatccagca

SEQ ID NO: 2346834 - DNA, 25 bp, Homo sapien
atacaatcagggccgttctattatt

SEQ ID NO: 2346835 - DNA, 25 bp, Homo sapien
acaatcagggccgttctattatttt

SEQ ID NO: 2346836 - DNA, 25 bp, Homo sapien
tacaatcagggccgttctattattt

SEQ ID NO: 2346837 - DNA, 25 bp, Homo sapien
caatcagggccgttctattattttt

SEQ ID NO: 2346838 - DNA, 25 bp, Homo sapien
gaagggacccttcattgacaggctg

SEQ ID NO: 2346839 - DNA, 25 bp, Homo sapien
tcttgctgccgaagagaggcctggt

SEQ ID NO: 2346840 - DNA, 25 bp, Homo sapien
tcgaaaggtaacatgggaagcccac

SEQ ID NO: 2346841 - DNA, 25 bp, Homo sapien
ggagactcccctggttctttggcag

SEQ ID NO: 2346842 - DNA, 25 bp, Homo sapien
gaaaagctgttgcatatctctggcc

SEQ ID NO: 2346843 - DNA, 25 bp, Homo sapien
ggatgttaattaagccacagggcca

SEQ ID NO: 2346844 - DNA, 25 bp, Homo sapien
taaatgcatacacacctggatgggt

SEQ ID NO: 2346845 - DNA, 25 bp, Homo sapien
tagtgtgcatttgcaagagggcccc

SEQ ID NO: 2346846 - DNA, 25 bp, Homo sapien
ggcagatccattgctacaaccaggg

SEQ ID NO: 2346847 - DNA, 25 bp, Homo sapien
tcttcatccctgtcagagatggcag

SEQ ID NO: 2346848 - DNA, 25 bp, Homo sapien
taaaattgggcatggatctttccct

SEQ ID NO: 2346849 - DNA, 25 bp, Homo sapien
tgccaatcccacaagtcaggaagat

SEQ ID NO: 2346850 - DNA, 25 bp, Homo sapien
gattaacatatcagtcagtgggcgg

SEQ ID NO: 2346851 - DNA, 25 bp, Homo sapien
tatgaccatgcagcctggcaagcag

SEQ ID NO: 2346852 - DNA, 25 bp, Homo sapien
caagcagctgttcaaggaagtgggc

SEQ ID NO: 2346853 - DNA, 25 bp, Homo sapien
cccttgctcttagatagacagtggg

SEQ ID NO: 2346854 - DNA, 25 bp, Homo sapien
tgtgtcagcactcaacaatgaggca

SEQ ID NO: 2346855 - DNA, 25 bp, Homo sapien
ctaaccctgagttgcgttgccccaa

SEQ ID NO: 2346856 - DNA, 25 bp, Homo sapien
agctgtcacgtgctggtgccagaaa

SEQ ID NO: 2346857 - DNA, 25 bp, Homo sapien
caagctggtcagatccgaagggact

SEQ ID NO: 2346858 - DNA, 25 bp, Homo sapien
ggaggactaagctggtgaataaact

SEQ ID NO: 2346859 - DNA, 25 bp, Homo sapien
tgtggctggcaacccattgtcaccg

SEQ ID NO: 2346860 - DNA, 25 bp, Homo sapien
ccctcccctaagcaaagtggtgtct

SEQ ID NO: 2346861 - DNA, 25 bp, Homo sapien
gattggatttcctcacaggaggact

SEQ ID NO: 2346862 - DNA, 25 bp, Homo sapien
cactcctcttttggagaaaggccat

SEQ ID NO: 2346863 - DNA, 25 bp, Homo sapien
cttaagaccgtagaagtcatagccc

SEQ ID NO: 2346864 - DNA, 25 bp, Homo sapien
gctcgaagatggttagaaacaggat

SEQ ID NO: 2346865 - DNA, 25 bp, Homo sapien
tcatagcccctgaagctggtaattt

SEQ ID NO: 2346866 - DNA, 25 bp, Homo sapien
ccctgctcgaagatggttagaaaca

SEQ ID NO: 2346867 - DNA, 25 bp, Homo sapien
ccaagacttcatcccaggtcttatc

SEQ ID NO: 2346868 - DNA, 25 bp, Homo sapien
tgctttttcaggtctaattgatcgg

SEQ ID NO: 2346869 - DNA, 25 bp, Homo sapien
tcacttgtgaaaagttcccacacgg

SEQ ID NO: 2346870 - DNA, 25 bp, Homo sapien
taattgatcggtcgggagtttgtga

SEQ ID NO: 2346871 - DNA, 25 bp, Homo sapien
tccataaatccacatctaggagata

SEQ ID NO: 2346872 - DNA, 25 bp, Homo sapien
gcagatatcttagtgtattcataaa

SEQ ID NO: 2346873 - DNA, 25 bp, Homo sapien
tcctccaggtttgcaaaaagtctcc

SEQ ID NO: 2346874 - DNA, 25 bp, Homo sapien
gatattcatgagtttgcagatatct

SEQ ID NO: 2346875 - DNA, 25 bp, Homo sapien
tacatagtccttgatgatgccaaag

SEQ ID NO: 2346876 - DNA, 25 bp, Homo sapien
tttgtgagcacggaaataaaatcca

SEQ ID NO: 2346877 - DNA, 25 bp, Homo sapien
ggaaatctcagaagcgtctacatag

SEQ ID NO: 2346878 - DNA, 25 bp, Homo sapien
ccagtgatgaggaaatctcagaagc

SEQ ID NO: 2346879 - DNA, 25 bp, Homo sapien
agataaaagatagcagctgaatagt

SEQ ID NO: 2346880 - DNA, 25 bp, Homo sapien
ctgaatagttcaggcagtaggtctg

SEQ ID NO: 2346881 - DNA, 25 bp, Homo sapien
gatagcagctgaatagttcaggcag

SEQ ID NO: 2346882 - DNA, 25 bp, Homo sapien
cagctgaatagttcaggcagtaggt

SEQ ID NO: 2346883 - DNA, 25 bp, Homo sapien
tctctggatgatccaaaagggctct

SEQ ID NO: 2346884 - DNA, 25 bp, Homo sapien
ttctctggatgatccaaaagggctc

SEQ ID NO: 2346885 - DNA, 25 bp, Homo sapien
ctggcaggggcttctcgcagctgca

SEQ ID NO: 2346886 - DNA, 25 bp, Homo sapien
attttctctggatgatccaaaaggg

SEQ ID NO: 2346887 - DNA, 25 bp, Homo sapien
cagctgagtcattgggaaccatggg

SEQ ID NO: 2346888 - DNA, 25 bp, Homo sapien
gctgagtcattgggaaccatgggag

SEQ ID NO: 2346889 - DNA, 25 bp, Homo sapien
agctgagtcattgggaaccatggga

SEQ ID NO: 2346890 - DNA, 25 bp, Homo sapien
gtcttagccctaaaatatttgtgta

SEQ ID NO: 2346891 - DNA, 25 bp, Homo sapien
tgcagattgcctctttactctgttg

SEQ ID NO: 2346892 - DNA, 25 bp, Homo sapien
tctgcatcgagatattcagttttcc

SEQ ID NO: 2346893 - DNA, 25 bp, Homo sapien
ttctgctgtgcaggagccgtttagt

SEQ ID NO: 2346894 - DNA, 25 bp, Homo sapien
aagagacttggtacgaagttcccag

SEQ ID NO: 2346895 - DNA, 25 bp, Homo sapien
tcttagccattgttagttgtgccac

SEQ ID NO: 2346896 - DNA, 25 bp, Homo sapien
tgttagttgtgccacacgaagagac

SEQ ID NO: 2346897 - DNA, 25 bp, Homo sapien
ggcagctagagttcttagccattgt

SEQ ID NO: 2346898 - DNA, 25 bp, Homo sapien
tcaagcccacgtgtcagtccttgca

SEQ ID NO: 2346899 - DNA, 25 bp, Homo sapien
ttcaagcccacgtgtcagtccttgc

SEQ ID NO: 2346900 - DNA, 25 bp, Homo sapien
cttcaagcccacgtgtcagtccttg

SEQ ID NO: 2346901 - DNA, 25 bp, Homo sapien
caagcccacgtgtcagtccttgcat

SEQ ID NO: 2346902 - DNA, 25 bp, Homo sapien
tgggccaggcacactgcaggagact

SEQ ID NO: 2346903 - DNA, 25 bp, Homo sapien
caggcacactgcaggagactcctgc

SEQ ID NO: 2346904 - DNA, 25 bp, Homo sapien
ggcacactgcaggagactcctgctg

SEQ ID NO: 2346905 - DNA, 25 bp, Homo sapien
cacactgcaggagactcctgctgca

SEQ ID NO: 2346906 - DNA, 25 bp, Homo sapien
tccaggttaaatcctttgccttgtg

SEQ ID NO: 2346907 - DNA, 25 bp, Homo sapien
gttaaatcctttgccttgtgaccca

SEQ ID NO: 2346908 - DNA, 25 bp, Homo sapien
caggttaaatcctttgccttgtgac

SEQ ID NO: 2346909 - DNA, 25 bp, Homo sapien
ttaaatcctttgccttgtgacccag

SEQ ID NO: 2346910 - DNA, 25 bp, Homo sapien
ttgaatgtgagcttccttgaacgta

SEQ ID NO: 2346911 - DNA, 25 bp, Homo sapien
gaatgtgagcttccttgaacgtaag

SEQ ID NO: 2346912 - DNA, 25 bp, Homo sapien
atgtgagcttccttgaacgtaaggg

SEQ ID NO: 2346913 - DNA, 25 bp, Homo sapien
ttccttgaacgtaaggggctctggc

SEQ ID NO: 2346914 - DNA, 25 bp, Homo sapien
gagtaaacatgagaatagcttttac

SEQ ID NO: 2346915 - DNA, 25 bp, Homo sapien
ctgagtaaacatgagaatagctttt

SEQ ID NO: 2346916 - DNA, 25 bp, Homo sapien
tgagtaaacatgagaatagctttta

SEQ ID NO: 2346917 - DNA, 25 bp, Homo sapien
ttttccttgatggagtagatcatga

SEQ ID NO: 2346918 - DNA, 25 bp, Homo sapien
ttcttcagcaacaacggatatcgag

SEQ ID NO: 2346919 - DNA, 25 bp, Homo sapien
cactagcagctctggcacgtggagc

SEQ ID NO: 2346920 - DNA, 25 bp, Homo sapien
cacgtggagccgtctgcattgttca

SEQ ID NO: 2346921 - DNA, 25 bp, Homo sapien
taaagggaggccacacaaatctctt

SEQ ID NO: 2346922 - DNA, 25 bp, Homo sapien
gataaacttaattccagctcttcag

SEQ ID NO: 2346923 - DNA, 25 bp, Homo sapien
tgagaaatctccagaggtgctgctt

SEQ ID NO: 2346924 - DNA, 25 bp, Homo sapien
caatgagaatccatctttcactgag

SEQ ID NO: 2346925 - DNA, 25 bp, Homo sapien
tcatttagaaacactggctgcccct

SEQ ID NO: 2346926 - DNA, 25 bp, Homo sapien
ccctggagccagacaatatataaag

SEQ ID NO: 2346927 - DNA, 25 bp, Homo sapien
tttttaggtgcatatgacattgcag

SEQ ID NO: 2346928 - DNA, 25 bp, Homo sapien
gcttgctgttcatgcgtcttagaaa

SEQ ID NO: 2346929 - DNA, 25 bp, Homo sapien
tcccaaagcggtggccacactataa

SEQ ID NO: 2346930 - DNA, 25 bp, Homo sapien
tctctatcccaaagcggtggccaca

SEQ ID NO: 2346931 - DNA, 25 bp, Homo sapien
cggtggccacactataatctcctgt

SEQ ID NO: 2346932 - DNA, 25 bp, Homo sapien
cttttatctctatcccaaagcggtg

SEQ ID NO: 2346933 - DNA, 25 bp, Homo sapien
ttggtgacaagatgttttctgccat

SEQ ID NO: 2346934 - DNA, 25 bp, Homo sapien
ccttcatagagaaggtgtctgctgg

SEQ ID NO: 2346935 - DNA, 25 bp, Homo sapien
tggttggtgacaagatgttttctgc

SEQ ID NO: 2346936 - DNA, 25 bp, Homo sapien
tgctggttggtgacaagatgttttc

SEQ ID NO: 2346937 - DNA, 25 bp, Homo sapien
gtctggtaataaggcagagcttccc

SEQ ID NO: 2346938 - DNA, 25 bp, Homo sapien
tctgaacttatcctgaaggtctggt

SEQ ID NO: 2346939 - DNA, 25 bp, Homo sapien
acttatcctgaaggtctggtaataa

SEQ ID NO: 2346940 - DNA, 25 bp, Homo sapien
cttttctgaacttatcctgaaggtc

SEQ ID NO: 2346941 - DNA, 25 bp, Homo sapien
tgtcgatcataaaatcctcctggtt

SEQ ID NO: 2346942 - DNA, 25 bp, Homo sapien
tgcctttgcaatgtctcccatatcc

SEQ ID NO: 2346943 - DNA, 25 bp, Homo sapien
tcatccactttgtcgatcataaaat

SEQ ID NO: 2346944 - DNA, 25 bp, Homo sapien
gcctttgcaatgtctcccatatcct

SEQ ID NO: 2346945 - DNA, 25 bp, Homo sapien
ttattgaggccctagttttccacca

SEQ ID NO: 2346946 - DNA, 25 bp, Homo sapien
tatgcgtcagctcaatgatcattgt

SEQ ID NO: 2346947 - DNA, 25 bp, Homo sapien
cagggagcacaccttctacgtattc

SEQ ID NO: 2346948 - DNA, 25 bp, Homo sapien
tacgtattccagatgttattctaga

SEQ ID NO: 2346949 - DNA, 25 bp, Homo sapien
tagtagaagagaaaccaagtatcag

SEQ ID NO: 2346950 - DNA, 25 bp, Homo sapien
gtagtagaagagaaaccaagtatca

SEQ ID NO: 2346951 - DNA, 25 bp, Homo sapien
agtagaagagaaaccaagtatcaga

SEQ ID NO: 2346952 - DNA, 25 bp, Homo sapien
agtagtagaagagaaaccaagtatc

SEQ ID NO: 2346953 - DNA, 25 bp, Homo sapien
gataaacatctaggaatctcgtgct

SEQ ID NO: 2346954 - DNA, 25 bp, Homo sapien
aacagataaacatctaggaatctcg

SEQ ID NO: 2346955 - DNA, 25 bp, Homo sapien
taagaggaaatcattgaagagaaac

SEQ ID NO: 2346956 - DNA, 25 bp, Homo sapien
ttgttgcacttagttttcgtaacta

SEQ ID NO: 2346957 - DNA, 25 bp, Homo sapien
gaaggacacattaaaccagggtctg

SEQ ID NO: 2346958 - DNA, 25 bp, Homo sapien
ggaataggctgatcgagtactgtac

SEQ ID NO: 2346959 - DNA, 25 bp, Homo sapien
ctgacacatggagtggttcaatact

SEQ ID NO: 2346960 - DNA, 25 bp, Homo sapien
caactcaggagtaagagaaggacac

SEQ ID NO: 2346961 - DNA, 25 bp, Homo sapien
gttatgtagcataactatgtaagta

SEQ ID NO: 2346962 - DNA, 25 bp, Homo sapien
cataactatgtaagtatttggtact

SEQ ID NO: 2346963 - DNA, 25 bp, Homo sapien
tagttatgtagcataactatgtaag

SEQ ID NO: 2346964 - DNA, 25 bp, Homo sapien
tgtagcataactatgtaagtatttg

SEQ ID NO: 2346965 - DNA, 25 bp, Homo sapien
ataagaaaagcatttctcagcccaa

SEQ ID NO: 2346966 - DNA, 25 bp, Homo sapien
ccgtttgggcttgtaataagaatgc

SEQ ID NO: 2346967 - DNA, 25 bp, Homo sapien
gatatctgttttcgtgttgtataag

SEQ ID NO: 2346968 - DNA, 25 bp, Homo sapien
taagaatgctgctatacactgtcga

SEQ ID NO: 2346969 - DNA, 25 bp, Homo sapien
aggattctgcgggcaatgtgaataa

SEQ ID NO: 2346970 - DNA, 25 bp, Homo sapien
ttgcagttgttatttgtgccatcca

SEQ ID NO: 2346971 - DNA, 25 bp, Homo sapien
tgcagttgttatttgtgccatccat

SEQ ID NO: 2346972 - DNA, 25 bp, Homo sapien
tttcagaggattctgcgggcaatgt

SEQ ID NO: 2346973 - DNA, 25 bp, Homo sapien
tcatattggacataagcagtggaca

SEQ ID NO: 2346974 - DNA, 25 bp, Homo sapien
tcctcaaggaattactgggcacatg

SEQ ID NO: 2346975 - DNA, 25 bp, Homo sapien
tcctgggagccacggttctagaatg

SEQ ID NO: 2346976 - DNA, 25 bp, Homo sapien
gcggttaagactgattgacaggcca

SEQ ID NO: 2346977 - DNA, 25 bp, Homo sapien
tattgtgtcttaattgcccttagcc

SEQ ID NO: 2346978 - DNA, 25 bp, Homo sapien
cctgacagtaatgttaaatagtaac

SEQ ID NO: 2346979 - DNA, 25 bp, Homo sapien
ttgttcaactacctcttaatgtgga

SEQ ID NO: 2346980 - DNA, 25 bp, Homo sapien
tctgtaattataacgtgccacacat

SEQ ID NO: 2346981 - DNA, 25 bp, Homo sapien
cagtcagttaaagctggcatgtaca

SEQ ID NO: 2346982 - DNA, 25 bp, Homo sapien
ccgagtaatttacctaccataggct

SEQ ID NO: 2346983 - DNA, 25 bp, Homo sapien
cattttttgctactaactctcccca

SEQ ID NO: 2346984 - DNA, 25 bp, Homo sapien
gtctcctaattgaacaccactccag

SEQ ID NO: 2346985 - DNA, 25 bp, Homo sapien
tattctcggtttcttgtaagtggga

SEQ ID NO: 2346986 - DNA, 25 bp, Homo sapien
gaaagcttcttaccctcgctgtcag

SEQ ID NO: 2346987 - DNA, 25 bp, Homo sapien
tgagatcagccttcatatcataccc

SEQ ID NO: 2346988 - DNA, 25 bp, Homo sapien
ctgtggtcttattggtgaaaacaaa

SEQ ID NO: 2346989 - DNA, 25 bp, Homo sapien
ggaatagctttcatgccaagtttag

SEQ ID NO: 2346990 - DNA, 25 bp, Homo sapien
aactgtaacactttcctctgccttt

SEQ ID NO: 2346991 - DNA, 25 bp, Homo sapien
ggatgatattatcacttgttgctgt

SEQ ID NO: 2346992 - DNA, 25 bp, Homo sapien
tttctcttatatgtgggttcatggt

SEQ ID NO: 2346993 - DNA, 25 bp, Homo sapien
taatagcttcacgaagcattttctg

SEQ ID NO: 2346994 - DNA, 25 bp, Homo sapien
gcattttctgttagtcaacagcagc

SEQ ID NO: 2346995 - DNA, 25 bp, Homo sapien
aagcattttctgttagtcaacagca

SEQ ID NO: 2346996 - DNA, 25 bp, Homo sapien
gtttaatagcttcacgaagcatttt

SEQ ID NO: 2346997 - DNA, 25 bp, Homo sapien
taagcttgtatgctaagacaatggt

SEQ ID NO: 2346998 - DNA, 25 bp, Homo sapien
gagttgtagaatcagggcataaccc

SEQ ID NO: 2346999 - DNA, 25 bp, Homo sapien
gtagaatcagggcataacccaggca

SEQ ID NO: 2347000 - DNA, 25 bp, Homo sapien
ctgccagtttggctttaagcttgta

SEQ ID NO: 2347001 - DNA, 25 bp, Homo sapien
aacagatataacaattgtgtggact

SEQ ID NO: 2347002 - DNA, 25 bp, Homo sapien
caaggtattttgcaggcacaatggc

SEQ ID NO: 2347003 - DNA, 25 bp, Homo sapien
acaagaaccgttctgcacagacctc

SEQ ID NO: 2347004 - DNA, 25 bp, Homo sapien
gaacaagaaccgttctgcacagacc

SEQ ID NO: 2347005 - DNA, 25 bp, Homo sapien
ctgaacaagaaccgttctgcacaga

SEQ ID NO: 2347006 - DNA, 25 bp, Homo sapien
aacaagaaccgttctgcacagacct

SEQ ID NO: 2347007 - DNA, 25 bp, Homo sapien
cctagggtggagatcaaaattcttc

SEQ ID NO: 2347008 - DNA, 25 bp, Homo sapien
gaggtactataatggaaaacagaga

SEQ ID NO: 2347009 - DNA, 25 bp, Homo sapien
tataatctctagtagctccctctca

SEQ ID NO: 2347010 - DNA, 25 bp, Homo sapien
gacaatgaccctagggtggagatca

SEQ ID NO: 2347011 - DNA, 25 bp, Homo sapien
taagctttttgggcacttcccatgg

SEQ ID NO: 2347012 - DNA, 25 bp, Homo sapien
aagctttttgggcacttcccatggg

SEQ ID NO: 2347013 - DNA, 25 bp, Homo sapien
ttaagctttttgggcacttcccatg

SEQ ID NO: 2347014 - DNA, 25 bp, Homo sapien
gtgctcagtaaattcattacaatgg

SEQ ID NO: 2347015 - DNA, 25 bp, Homo sapien
gctcagtaaattcattacaatggta

SEQ ID NO: 2347016 - DNA, 25 bp, Homo sapien
cagtaaattcattacaatggtaaac

SEQ ID NO: 2347017 - DNA, 25 bp, Homo sapien
ctgtgctcagtaaattcattacaat

SEQ ID NO: 2347018 - DNA, 25 bp, Homo sapien
tgagaaccagacatatataatgaac

SEQ ID NO: 2347019 - DNA, 25 bp, Homo sapien
catatataatgaacctccaaaaata

SEQ ID NO: 2347020 - DNA, 25 bp, Homo sapien
atatataatgaacctccaaaaatag

SEQ ID NO: 2347021 - DNA, 25 bp, Homo sapien
tgcttacggaagttactgcatgcgt

SEQ ID NO: 2347022 - DNA, 25 bp, Homo sapien
tcaaaagtccacatgactcaggtgg

SEQ ID NO: 2347023 - DNA, 25 bp, Homo sapien
taacactgtggatgacatgtgacta

SEQ ID NO: 2347024 - DNA, 25 bp, Homo sapien
gagcaggctatgtcttttagatcaa

SEQ ID NO: 2347025 - DNA, 25 bp, Homo sapien
catgtgtgatgaacccaaagcccct

SEQ ID NO: 2347026 - DNA, 25 bp, Homo sapien
cctccacagtggcatgtgtgatgaa

SEQ ID NO: 2347027 - DNA, 25 bp, Homo sapien
gcatgtgtgatgaacccaaagcccc

SEQ ID NO: 2347028 - DNA, 25 bp, Homo sapien
cagtggcatgtgtgatgaacccaaa

SEQ ID NO: 2347029 - DNA, 25 bp, Homo sapien
ataaagccctagccatctcttgctt

SEQ ID NO: 2347030 - DNA, 25 bp, Homo sapien
gtcttatccacggagtcatggtcgt

SEQ ID NO: 2347031 - DNA, 25 bp, Homo sapien
agcctctttggctggataaagccct

SEQ ID NO: 2347032 - DNA, 25 bp, Homo sapien
ttcagcctctttggctggataaagc

SEQ ID NO: 2347033 - DNA, 25 bp, Homo sapien
tccactaccagtgttgtcattcctg

SEQ ID NO: 2347034 - DNA, 25 bp, Homo sapien
tggctgagttcacaatctgttgtaa

SEQ ID NO: 2347035 - DNA, 25 bp, Homo sapien
ttcacaatctgttgtaacctgtagc

SEQ ID NO: 2347036 - DNA, 25 bp, Homo sapien
aaactaaaatgacttgttatacaat

SEQ ID NO: 2347037 - DNA, 25 bp, Homo sapien
taaaatgacttgttatacaattagt

SEQ ID NO: 2347038 - DNA, 25 bp, Homo sapien
ctgtgtattgtgcatacgtttctgg

SEQ ID NO: 2347039 - DNA, 25 bp, Homo sapien
gagtctgtgtattgtgcatacgttt

SEQ ID NO: 2347040 - DNA, 25 bp, Homo sapien
cctcttggttgatgagtctgtgtat

SEQ ID NO: 2347041 - DNA, 25 bp, Homo sapien
tgtgcatacgtttctggatatgtcc

SEQ ID NO: 2347042 - DNA, 25 bp, Homo sapien
tctgatttagattcatcagcaactc

SEQ ID NO: 2347043 - DNA, 25 bp, Homo sapien
aaggttctgatttagattcatcagc

SEQ ID NO: 2347044 - DNA, 25 bp, Homo sapien
gttctgatttagattcatcagcaac

SEQ ID NO: 2347045 - DNA, 25 bp, Homo sapien
ggttctgatttagattcatcagcaa

SEQ ID NO: 2347046 - DNA, 25 bp, Homo sapien
tgtctcctggtatcgacaaccaaat

SEQ ID NO: 2347047 - DNA, 25 bp, Homo sapien
tcatttcgggtagtgggtactgtct

SEQ ID NO: 2347048 - DNA, 25 bp, Homo sapien
accaaatggagacccctcatatcca

SEQ ID NO: 2347049 - DNA, 25 bp, Homo sapien
aatttcatcatttcgggtagtgggt

SEQ ID NO: 2347050 - DNA, 25 bp, Homo sapien
tctgacttctctgaggatgaaagcc

SEQ ID NO: 2347051 - DNA, 25 bp, Homo sapien
tgacttctctgaggatgaaagcctt

SEQ ID NO: 2347052 - DNA, 25 bp, Homo sapien
cttctctgacttctctgaggatgaa

SEQ ID NO: 2347053 - DNA, 25 bp, Homo sapien
acttctctgaggatgaaagccttac

SEQ ID NO: 2347054 - DNA, 25 bp, Homo sapien
gaggtagtgctcaggctccaagacc

SEQ ID NO: 2347055 - DNA, 25 bp, Homo sapien
gacatccttggcatcactgctttga

SEQ ID NO: 2347056 - DNA, 25 bp, Homo sapien
caagacctggcaataaagtgcagcc

SEQ ID NO: 2347057 - DNA, 25 bp, Homo sapien
tagaaagtggaaacctcccagaaga

SEQ ID NO: 2347058 - DNA, 25 bp, Homo sapien
gtcactaaagacttgaacgttcatc

SEQ ID NO: 2347059 - DNA, 25 bp, Homo sapien
tactcaagatgtggaagataaattc

SEQ ID NO: 2347060 - DNA, 25 bp, Homo sapien
cagtctcccaaacatgtcactaaag

SEQ ID NO: 2347061 - DNA, 25 bp, Homo sapien
cacccaagggagaatggaagttcac

SEQ ID NO: 2347062 - DNA, 25 bp, Homo sapien
cggctcagtcaaggaaaaccttggt

SEQ ID NO: 2347063 - DNA, 25 bp, Homo sapien
ttacttcggctcagtcaaggaaaac

SEQ ID NO: 2347064 - DNA, 25 bp, Homo sapien
cttcggctcagtcaaggaaaacctt

SEQ ID NO: 2347065 - DNA, 25 bp, Homo sapien
tacttcggctcagtcaaggaaaacc

SEQ ID NO: 2347066 - DNA, 25 bp, Homo sapien
tctgactagctgaactgcccattat

SEQ ID NO: 2347067 - DNA, 25 bp, Homo sapien
tgagatcaacctcggcaatatagag

SEQ ID NO: 2347068 - DNA, 25 bp, Homo sapien
gatacaaagaacatggtacagccaa

SEQ ID NO: 2347069 - DNA, 25 bp, Homo sapien
gcccagtcagggacaattgtttaaa

SEQ ID NO: 2347070 - DNA, 25 bp, Homo sapien
taagtaagaagcttagacggtgcta

SEQ ID NO: 2347071 - DNA, 25 bp, Homo sapien
tcattactttttacctcacaggatt

SEQ ID NO: 2347072 - DNA, 25 bp, Homo sapien
aaataagtaagaagcttagacggtg

SEQ ID NO: 2347073 - DNA, 25 bp, Homo sapien
acacctcattactttttacctcaca

SEQ ID NO: 2347074 - DNA, 25 bp, Homo sapien
attttggaacgcttcacgaatttgc

SEQ ID NO: 2347075 - DNA, 25 bp, Homo sapien
ctaatcttctctgtatcgttccaat

SEQ ID NO: 2347076 - DNA, 25 bp, Homo sapien
tttggtatatgtgctgctgacgcaa

SEQ ID NO: 2347077 - DNA, 25 bp, Homo sapien
atgtcatccttgagcaggggccatg

SEQ ID NO: 2347078 - DNA, 25 bp, Homo sapien
tcagaacatgcgagaacatgtgccc

SEQ ID NO: 2347079 - DNA, 25 bp, Homo sapien
tagaggttagtcctcaccaaaagca

SEQ ID NO: 2347080 - DNA, 25 bp, Homo sapien
ggatagcgcttatgaactagccaaa

SEQ ID NO: 2347081 - DNA, 25 bp, Homo sapien
cattttcgggttgacgtcaaatcct

SEQ ID NO: 2347082 - DNA, 25 bp, Homo sapien
gctctctagaggtctttcataagca

SEQ ID NO: 2347083 - DNA, 25 bp, Homo sapien
ttttcctaggagctgagctgaactt

SEQ ID NO: 2347084 - DNA, 25 bp, Homo sapien
caactagattccaaattactgatgc

SEQ ID NO: 2347085 - DNA, 25 bp, Homo sapien
tatctatctacctgcaagtccttga

SEQ ID NO: 2347086 - DNA, 25 bp, Homo sapien
tgtggctgaaggcccgagagtctct

SEQ ID NO: 2347087 - DNA, 25 bp, Homo sapien
agggcatttaattaaggagtattga

SEQ ID NO: 2347088 - DNA, 25 bp, Homo sapien
ttgacttacatcatcacaaggtgaa

SEQ ID NO: 2347089 - DNA, 25 bp, Homo sapien
gctgacagtgctgccctcactctgt

SEQ ID NO: 2347090 - DNA, 25 bp, Homo sapien
ttctttggttgcatatggcttttag

SEQ ID NO: 2347091 - DNA, 25 bp, Homo sapien
cttctttggttgcatatggctttta

SEQ ID NO: 2347092 - DNA, 25 bp, Homo sapien
tctttggttgcatatggcttttaga

SEQ ID NO: 2347093 - DNA, 25 bp, Homo sapien
ctttggttgcatatggcttttagaa

SEQ ID NO: 2347094 - DNA, 25 bp, Homo sapien
gctgtaatgatgccgcagcattcca

SEQ ID NO: 2347095 - DNA, 25 bp, Homo sapien
agctgtaatgatgccgcagcattcc

SEQ ID NO: 2347096 - DNA, 25 bp, Homo sapien
ctgtaatgatgccgcagcattccag

SEQ ID NO: 2347097 - DNA, 25 bp, Homo sapien
gaaacggtaatttcagaaagcattg

SEQ ID NO: 2347098 - DNA, 25 bp, Homo sapien
taatttcagaaagcattggccaggt

SEQ ID NO: 2347099 - DNA, 25 bp, Homo sapien
cggtaatttcagaaagcattggcca

SEQ ID NO: 2347100 - DNA, 25 bp, Homo sapien
tattgaaacggtaatttcagaaagc

SEQ ID NO: 2347101 - DNA, 25 bp, Homo sapien
ggccctgcagtatcgcttgcatgca

SEQ ID NO: 2347102 - DNA, 25 bp, Homo sapien
taacagaactactgggagacgtaag

SEQ ID NO: 2347103 - DNA, 25 bp, Homo sapien
tccaatcagttgctacgtgctgatg

SEQ ID NO: 2347104 - DNA, 25 bp, Homo sapien
tagaatgctcttagcgtaacatcca

SEQ ID NO: 2347105 - DNA, 25 bp, Homo sapien
gcctgctccacacatcatgttagag

SEQ ID NO: 2347106 - DNA, 25 bp, Homo sapien
catcatgttagagttcctggttcct

SEQ ID NO: 2347107 - DNA, 25 bp, Homo sapien
agaggtacccctctttgcatagcct

SEQ ID NO: 2347108 - DNA, 25 bp, Homo sapien
gaggtacccctctttgcatagcctg

SEQ ID NO: 2347109 - DNA, 25 bp, Homo sapien
gatcgatgcagtgaatgagtccata

SEQ ID NO: 2347110 - DNA, 25 bp, Homo sapien
ttaggaaatcctcagcaatttggga

SEQ ID NO: 2347111 - DNA, 25 bp, Homo sapien
gagctctggaaagtgatggttctta

SEQ ID NO: 2347112 - DNA, 25 bp, Homo sapien
ctgggcagtgcccaagatcgatgca

SEQ ID NO: 2347113 - DNA, 25 bp, Homo sapien
tcacctacatgcatagaagaactct

SEQ ID NO: 2347114 - DNA, 25 bp, Homo sapien
ggagcctagtgttcctcccggagga

SEQ ID NO: 2347115 - DNA, 25 bp, Homo sapien
caaatgactggcaaggcgtggatgt

SEQ ID NO: 2347116 - DNA, 25 bp, Homo sapien
ctcagcatggctctgcactgtctgc

SEQ ID NO: 2347117 - DNA, 25 bp, Homo sapien
aagtacggtaatgagaagggaagag

SEQ ID NO: 2347118 - DNA, 25 bp, Homo sapien
aattaagatatctcactaccttgag

SEQ ID NO: 2347119 - DNA, 25 bp, Homo sapien
gaataattcgatctgcagctgactg

SEQ ID NO: 2347120 - DNA, 25 bp, Homo sapien
agggaagagtaggacgaataattcg

SEQ ID NO: 2347121 - DNA, 25 bp, Homo sapien
atggaaggagttctttcaacggtgg

SEQ ID NO: 2347122 - DNA, 25 bp, Homo sapien
gccctctagttgctcatactgctgc

SEQ ID NO: 2347123 - DNA, 25 bp, Homo sapien
gcagccctctagttgctcatactgc

SEQ ID NO: 2347124 - DNA, 25 bp, Homo sapien
ttcaacggtgggatttctgcagccc

SEQ ID NO: 2347125 - DNA, 25 bp, Homo sapien
gtggaagtgtggagcagcctagcct

SEQ ID NO: 2347126 - DNA, 25 bp, Homo sapien
tggaagtgtggagcagcctagcctc

SEQ ID NO: 2347127 - DNA, 25 bp, Homo sapien
gtgtggagcagcctagcctccctgg

SEQ ID NO: 2347128 - DNA, 25 bp, Homo sapien
gaagtgtggagcagcctagcctccc

SEQ ID NO: 2347129 - DNA, 25 bp, Homo sapien
tctaccatcagcgaatgtttcttga

SEQ ID NO: 2347130 - DNA, 25 bp, Homo sapien
caaagtctaccatcagcgaatgttt

SEQ ID NO: 2347131 - DNA, 25 bp, Homo sapien
gaacaaagtctaccatcagcgaatg

SEQ ID NO: 2347132 - DNA, 25 bp, Homo sapien
taccatcagcgaatgtttcttgact

SEQ ID NO: 2347133 - DNA, 25 bp, Homo sapien
ttggattgtcgcagcaacactcagc

SEQ ID NO: 2347134 - DNA, 25 bp, Homo sapien
ggattgtcgcagcaacactcagcat

SEQ ID NO: 2347135 - DNA, 25 bp, Homo sapien
tcttcttggattgtcgcagcaacac

SEQ ID NO: 2347136 - DNA, 25 bp, Homo sapien
cagatttgggagcaagttggggcag

SEQ ID NO: 2347137 - DNA, 25 bp, Homo sapien
gaaggatcccatctgttaaacaagc

SEQ ID NO: 2347138 - DNA, 25 bp, Homo sapien
gattcgttactagcattgacagtca

SEQ ID NO: 2347139 - DNA, 25 bp, Homo sapien
catggagtgaacattccggtagagg

SEQ ID NO: 2347140 - DNA, 25 bp, Homo sapien
tggtgtcaaaattccctattctagc

SEQ ID NO: 2347141 - DNA, 25 bp, Homo sapien
gtctaaatgctctgtagtcactggg

SEQ ID NO: 2347142 - DNA, 25 bp, Homo sapien
tgattgagatgaactaaaaccaact

SEQ ID NO: 2347143 - DNA, 25 bp, Homo sapien
gcatcagtggcctcaacagcaaact

SEQ ID NO: 2347144 - DNA, 25 bp, Homo sapien
tatctggtaacatgcaaaggtctaa

SEQ ID NO: 2347145 - DNA, 25 bp, Homo sapien
acctgtggtctgatggtggagcctt

SEQ ID NO: 2347146 - DNA, 25 bp, Homo sapien
gatgggatcttcgttataaggagac

SEQ ID NO: 2347147 - DNA, 25 bp, Homo sapien
cttcgttataaggagacctgtggtc

SEQ ID NO: 2347148 - DNA, 25 bp, Homo sapien
tgatggtggagccttcataagagct

SEQ ID NO: 2347149 - DNA, 25 bp, Homo sapien
ctgcttcttgggctagggccagctt

SEQ ID NO: 2347150 - DNA, 25 bp, Homo sapien
gggctagggccagcttttcctgttg

SEQ ID NO: 2347151 - DNA, 25 bp, Homo sapien
aaaaatagagatctggttttcatct

SEQ ID NO: 2347152 - DNA, 25 bp, Homo sapien
gaatttgaaataaggagccgaagaa

SEQ ID NO: 2347153 - DNA, 25 bp, Homo sapien
tgcttgcgagcatctgggaaactgg

SEQ ID NO: 2347154 - DNA, 25 bp, Homo sapien
gagcacagccaattcccttaaggag

SEQ ID NO: 2347155 - DNA, 25 bp, Homo sapien
tgtggccgagtctcatcaagagggc

SEQ ID NO: 2347156 - DNA, 25 bp, Homo sapien
tcgataactagcagacacacaggcg

SEQ ID NO: 2347157 - DNA, 25 bp, Homo sapien
caacagtccgcacatgtctgacttg

SEQ ID NO: 2347158 - DNA, 25 bp, Homo sapien
tgtcttcgccaaaatcactgaattc

SEQ ID NO: 2347159 - DNA, 25 bp, Homo sapien
cagtccgcacatgtctgacttgtct

SEQ ID NO: 2347160 - DNA, 25 bp, Homo sapien
gtctgacttgtcttcgccaaaatca

SEQ ID NO: 2347161 - DNA, 25 bp, Homo sapien
tgtaacaaccatataataaatcacc

SEQ ID NO: 2347162 - DNA, 25 bp, Homo sapien
ccgagtgtaacaaccatataataaa

SEQ ID NO: 2347163 - DNA, 25 bp, Homo sapien
tggccgagtgtaacaaccatataat

SEQ ID NO: 2347164 - DNA, 25 bp, Homo sapien
gagtgtaacaaccatataataaatc

SEQ ID NO: 2347165 - DNA, 25 bp, Homo sapien
tcgccctctgatcgccgatcacctc

SEQ ID NO: 2347166 - DNA, 25 bp, Homo sapien
catcgccctctgatcgccgatcacc

SEQ ID NO: 2347167 - DNA, 25 bp, Homo sapien
cctctgatcgccgatcacctctgag

SEQ ID NO: 2347168 - DNA, 25 bp, Homo sapien
cttcatcgccctctgatcgccgatc

SEQ ID NO: 2347169 - DNA, 25 bp, Homo sapien
aggaagaagcgaatgcgcaggctga

SEQ ID NO: 2347170 - DNA, 25 bp, Homo sapien
agcgaatgcgcaggctgaagcgcaa

SEQ ID NO: 2347171 - DNA, 25 bp, Homo sapien
agtggaggaagaagcgaatgcgcag

SEQ ID NO: 2347172 - DNA, 25 bp, Homo sapien
ctctgtgccatgagagccaagtgga

SEQ ID NO: 2347173 - DNA, 25 bp, Homo sapien
tcagatgatcctgagtactgtgact

SEQ ID NO: 2347174 - DNA, 25 bp, Homo sapien
cagatgatcctgagtactgtgactc

SEQ ID NO: 2347175 - DNA, 25 bp, Homo sapien
gcatctccatattgtaacactggag

SEQ ID NO: 2347176 - DNA, 25 bp, Homo sapien
caaaatgatggtgaacaattcgttc

SEQ ID NO: 2347177 - DNA, 25 bp, Homo sapien
tctgtgtaagtaagacgtaggcatc

SEQ ID NO: 2347178 - DNA, 25 bp, Homo sapien
aaaaccaaagccaacatagagccct

SEQ ID NO: 2347179 - DNA, 25 bp, Homo sapien
ttcaaaaccatcaattaccctcagc

SEQ ID NO: 2347180 - DNA, 25 bp, Homo sapien
cattgacggctgctattaaagagct

SEQ ID NO: 2347181 - DNA, 25 bp, Homo sapien
ccttgatacattgacggctgctatt

SEQ ID NO: 2347182 - DNA, 25 bp, Homo sapien
tgaaagaaattaagccttgatacat

SEQ ID NO: 2347183 - DNA, 25 bp, Homo sapien
taggatggatgataacataagttcc

SEQ ID NO: 2347184 - DNA, 25 bp, Homo sapien
cctaggatggatgataacataagtt

SEQ ID NO: 2347185 - DNA, 25 bp, Homo sapien
ggatggatgataacataagttcctc

SEQ ID NO: 2347186 - DNA, 25 bp, Homo sapien
atggatgataacataagttcctcac

SEQ ID NO: 2347187 - DNA, 25 bp, Homo sapien
agtgatatatccaggccatcccata

SEQ ID NO: 2347188 - DNA, 25 bp, Homo sapien
tatatccaggccatcccataataga

SEQ ID NO: 2347189 - DNA, 25 bp, Homo sapien
caggccatcccataatagatttccc

SEQ ID NO: 2347190 - DNA, 25 bp, Homo sapien
gccatcccataatagatttccctgg

SEQ ID NO: 2347191 - DNA, 25 bp, Homo sapien
gagactagcatccagactctgaggt

SEQ ID NO: 2347192 - DNA, 25 bp, Homo sapien
taaggtgactgctctatccagcaga

SEQ ID NO: 2347193 - DNA, 25 bp, Homo sapien
actgtgtgattctcggctgtgtgac

SEQ ID NO: 2347194 - DNA, 25 bp, Homo sapien
tcacaagcattttcagtaacggagg

SEQ ID NO: 2347195 - DNA, 25 bp, Homo sapien
catctgtggaagtggtgacagctga

SEQ ID NO: 2347196 - DNA, 25 bp, Homo sapien
gggtatgggtatccccatacatcca

SEQ ID NO: 2347197 - DNA, 25 bp, Homo sapien
aatgatgaagattctctagtgttca

SEQ ID NO: 2347198 - DNA, 25 bp, Homo sapien
aaccatcggccatttcttgcatctg

SEQ ID NO: 2347199 - DNA, 25 bp, Homo sapien
caaacttaagtagctataatcactg

SEQ ID NO: 2347200 - DNA, 25 bp, Homo sapien
taatcactgtggaatccaaaactgt

SEQ ID NO: 2347201 - DNA, 25 bp, Homo sapien
tctgtttgagacagtatttggtaag

SEQ ID NO: 2347202 - DNA, 25 bp, Homo sapien
tggtaagtcaaacttaagtagctat

SEQ ID NO: 2347203 - DNA, 25 bp, Homo sapien
tcacagattggcactaatttagtag

SEQ ID NO: 2347204 - DNA, 25 bp, Homo sapien
catcagcttcaagttctgataattg

SEQ ID NO: 2347205 - DNA, 25 bp, Homo sapien
aatttagtagtaatggtgctgacag

SEQ ID NO: 2347206 - DNA, 25 bp, Homo sapien
tctgataattgctcatcacagattg

SEQ ID NO: 2347207 - DNA, 25 bp, Homo sapien
tgcttcagacacgcagagaacaagc

SEQ ID NO: 2347208 - DNA, 25 bp, Homo sapien
cttcagacacgcagagaacaagctc

SEQ ID NO: 2347209 - DNA, 25 bp, Homo sapien
aagatgaagcaactttggaatgaga

SEQ ID NO: 2347210 - DNA, 25 bp, Homo sapien
ttcagacacgcagagaacaagctca

SEQ ID NO: 2347211 - DNA, 25 bp, Homo sapien
attcaggaatgatgtaaaacctaac

SEQ ID NO: 2347212 - DNA, 25 bp, Homo sapien
tgatgtaaaacctaactcctttagc

SEQ ID NO: 2347213 - DNA, 25 bp, Homo sapien
gttagcaagtcgactgctttgagtg

SEQ ID NO: 2347214 - DNA, 25 bp, Homo sapien
caagtcgactgctttgagtgtccac

SEQ ID NO: 2347215 - DNA, 25 bp, Homo sapien
cccagggagctgaacacgcagtact

SEQ ID NO: 2347216 - DNA, 25 bp, Homo sapien
ctttgtaccccaatagccctgggca

SEQ ID NO: 2347217 - DNA, 25 bp, Homo sapien
ggttataaatggctccttatttcca

SEQ ID NO: 2347218 - DNA, 25 bp, Homo sapien
tggcagtctcattttgggttataaa

SEQ ID NO: 2347219 - DNA, 25 bp, Homo sapien
ttccctatagggtgcctcagggcgg

SEQ ID NO: 2347220 - DNA, 25 bp, Homo sapien
agcctcctgtgtactggtgccagag

SEQ ID NO: 2347221 - DNA, 25 bp, Homo sapien
gtatctcaccagcaggtgctgacag

SEQ ID NO: 2347222 - DNA, 25 bp, Homo sapien
agagaaagatcaacccgtggcactt

SEQ ID NO: 2347223 - DNA, 25 bp, Homo sapien
atagggagagcaacagtggtctgta

SEQ ID NO: 2347224 - DNA, 25 bp, Homo sapien
cagatagggagagcaacagtggtct

SEQ ID NO: 2347225 - DNA, 25 bp, Homo sapien
atatggacgtggtagccgcagatag

SEQ ID NO: 2347226 - DNA, 25 bp, Homo sapien
aaaacaaatatggacgtggtagccg

SEQ ID NO: 2347227 - DNA, 25 bp, Homo sapien
ttcctttgagaatatcaaagctctt

SEQ ID NO: 2347228 - DNA, 25 bp, Homo sapien
gctcttacagggacaaatttctaaa

SEQ ID NO: 2347229 - DNA, 25 bp, Homo sapien
caaagctcttacagggacaaatttc

SEQ ID NO: 2347230 - DNA, 25 bp, Homo sapien
tctaaataagcaataatgctcatat

SEQ ID NO: 2347231 - DNA, 25 bp, Homo sapien
caaatctcctttctctcacgtgcat

SEQ ID NO: 2347232 - DNA, 25 bp, Homo sapien
ctgatccaaatctcctttctctcac

SEQ ID NO: 2347233 - DNA, 25 bp, Homo sapien
atccaaatctcctttctctcacgtg

SEQ ID NO: 2347234 - DNA, 25 bp, Homo sapien
gatccaaatctcctttctctcacgt

SEQ ID NO: 2347235 - DNA, 25 bp, Homo sapien
cgttgggatgtgcaatttcagatct

SEQ ID NO: 2347236 - DNA, 25 bp, Homo sapien
catcagtcacatacgctgctagggc

SEQ ID NO: 2347237 - DNA, 25 bp, Homo sapien
gagagtccctctttcagaggcacca

SEQ ID NO: 2347238 - DNA, 25 bp, Homo sapien
tgctagggctaatgtcagcttccag

SEQ ID NO: 2347239 - DNA, 25 bp, Homo sapien
catttacccaagtcaaaaactggag

SEQ ID NO: 2347240 - DNA, 25 bp, Homo sapien
tcttgcctgggcactcacgatggct

SEQ ID NO: 2347241 - DNA, 25 bp, Homo sapien
tctgaggcacccagtgaatcggtgc

SEQ ID NO: 2347242 - DNA, 25 bp, Homo sapien
cttctaatcactcggctgggctgct

SEQ ID NO: 2347243 - DNA, 25 bp, Homo sapien
gccctttggcacttatctattctca

SEQ ID NO: 2347244 - DNA, 25 bp, Homo sapien
aatgttgacatacccagactgtgcc

SEQ ID NO: 2347245 - DNA, 25 bp, Homo sapien
caattaccgtctctactactggcag

SEQ ID NO: 2347246 - DNA, 25 bp, Homo sapien
tcacagctgtaccaaggccacttct

SEQ ID NO: 2347247 - DNA, 25 bp, Homo sapien
aaggtgggccgtcagcacagataag

SEQ ID NO: 2347248 - DNA, 25 bp, Homo sapien
tctgtcacatgactcccagctggag

SEQ ID NO: 2347249 - DNA, 25 bp, Homo sapien
tacatgtgcgctgtgacaggcttct

SEQ ID NO: 2347250 - DNA, 25 bp, Homo sapien
gggagagcccaagctacaccaataa

SEQ ID NO: 2347251 - DNA, 25 bp, Homo sapien
gggtgcaacattgcggccagaaaaa

SEQ ID NO: 2347252 - DNA, 25 bp, Homo sapien
aatcgtagcggttgtttggactcag

SEQ ID NO: 2347253 - DNA, 25 bp, Homo sapien
gctgtgaagtctgtcatatgaagga

SEQ ID NO: 2347254 - DNA, 25 bp, Homo sapien
tgggtggcggattcatgcttgttct

SEQ ID NO: 2347255 - DNA, 25 bp, Homo sapien
tctcgctgtcctttccaggctggtt

SEQ ID NO: 2347256 - DNA, 25 bp, Homo sapien
tctttttggttcatgggagttcagc

SEQ ID NO: 2347257 - DNA, 25 bp, Homo sapien
tggtcagccttggttctggcttttc

SEQ ID NO: 2347258 - DNA, 25 bp, Homo sapien
catgggagttcagcaacccaataac

SEQ ID NO: 2347259 - DNA, 25 bp, Homo sapien
gaggccctgccgaagctggcacgct

SEQ ID NO: 2347260 - DNA, 25 bp, Homo sapien
ataggaggccctgccgaagctggca

SEQ ID NO: 2347261 - DNA, 25 bp, Homo sapien
ccctgccgaagctggcacgctgcat

SEQ ID NO: 2347262 - DNA, 25 bp, Homo sapien
cataggaggccctgccgaagctggc

SEQ ID NO: 2347263 - DNA, 25 bp, Homo sapien
ggagactgaggctcctgctccagat

SEQ ID NO: 2347264 - DNA, 25 bp, Homo sapien
ggttcttctccttttgataggagac

SEQ ID NO: 2347265 - DNA, 25 bp, Homo sapien
aggaagagaagtgttttcttcaggt

SEQ ID NO: 2347266 - DNA, 25 bp, Homo sapien
gaagagaagtgttttcttcaggttc

SEQ ID NO: 2347267 - DNA, 25 bp, Homo sapien
tgatggtggttgaatccaaggtcac

SEQ ID NO: 2347268 - DNA, 25 bp, Homo sapien
ccctctggtgtctggaagggatgat

SEQ ID NO: 2347269 - DNA, 25 bp, Homo sapien
ggcaccttctgccttgtgggactcc

SEQ ID NO: 2347270 - DNA, 25 bp, Homo sapien
cagctcaactttatggcttcctgag

SEQ ID NO: 2347271 - DNA, 25 bp, Homo sapien
tagctgttcagtgagctcctaggac

SEQ ID NO: 2347272 - DNA, 25 bp, Homo sapien
ttcatgaacctgtcagcagagcctg

SEQ ID NO: 2347273 - DNA, 25 bp, Homo sapien
gacttaatacgttgcatgttccaca

SEQ ID NO: 2347274 - DNA, 25 bp, Homo sapien
cattgatttctagtctgggtaccgt

SEQ ID NO: 2347275 - DNA, 25 bp, Homo sapien
cacccatatggactcttcatccttc

SEQ ID NO: 2347276 - DNA, 25 bp, Homo sapien
caacaccccacccatatggactctt

SEQ ID NO: 2347277 - DNA, 25 bp, Homo sapien
aaggatatccacatttggtcctagc

SEQ ID NO: 2347278 - DNA, 25 bp, Homo sapien
catttggtcctagcacccttccggt

SEQ ID NO: 2347279 - DNA, 25 bp, Homo sapien
gaacatttcctctctacagctgcag

SEQ ID NO: 2347280 - DNA, 25 bp, Homo sapien
aacaaatagagacagtgtgtgcgtt

SEQ ID NO: 2347281 - DNA, 25 bp, Homo sapien
ttcttcctgtgagtggtatgttggc

SEQ ID NO: 2347282 - DNA, 25 bp, Homo sapien
gttctttctgaatgccggaggacca

SEQ ID NO: 2347283 - DNA, 25 bp, Homo sapien
tgaaaacttcatcaggtgtcgcctc

SEQ ID NO: 2347284 - DNA, 25 bp, Homo sapien
aattccagtccagtgtttgtgtact

SEQ ID NO: 2347285 - DNA, 25 bp, Homo sapien
tcaggtgtcgcctctatgcagaggg

SEQ ID NO: 2347286 - DNA, 25 bp, Homo sapien
cctggacacacaaccagtctgtgta

SEQ ID NO: 2347287 - DNA, 25 bp, Homo sapien
tatcagaggccctcggaaggtgact

SEQ ID NO: 2347288 - DNA, 25 bp, Homo sapien
cgagttctgctatcagaggccctcg

SEQ ID NO: 2347289 - DNA, 25 bp, Homo sapien
tctgctatcagaggccctcggaagg

SEQ ID NO: 2347290 - DNA, 25 bp, Homo sapien
agaggccctcggaaggtgactgtca

SEQ ID NO: 2347291 - DNA, 25 bp, Homo sapien
aagacctgccattgccaagataaag

SEQ ID NO: 2347292 - DNA, 25 bp, Homo sapien
tgtcatctggggacatatcagcaag

SEQ ID NO: 2347293 - DNA, 25 bp, Homo sapien
tcatctggggacatatcagcaagaa

SEQ ID NO: 2347294 - DNA, 25 bp, Homo sapien
tctggggacatatcagcaagaatga

SEQ ID NO: 2347295 - DNA, 25 bp, Homo sapien
tggggacatatcagcaagaatgatg

SEQ ID NO: 2347296 - DNA, 25 bp, Homo sapien
ttggacaacttctgcctggtgttca

SEQ ID NO: 2347297 - DNA, 25 bp, Homo sapien
cctttgagcaaagatcagcaacttg

SEQ ID NO: 2347298 - DNA, 25 bp, Homo sapien
actcctggcagtatattgaaagacc

SEQ ID NO: 2347299 - DNA, 25 bp, Homo sapien
acttggaccatttggacaacttctg

SEQ ID NO: 2347300 - DNA, 25 bp, Homo sapien
gcagaacattgaacagaaaggcact

SEQ ID NO: 2347301 - DNA, 25 bp, Homo sapien
gcactgagaatctctggatctgaaa

SEQ ID NO: 2347302 - DNA, 25 bp, Homo sapien
cagcagggtaaaggatggccaagga

SEQ ID NO: 2347303 - DNA, 25 bp, Homo sapien
cagggtaaaggatggccaaggacag

SEQ ID NO: 2347304 - DNA, 25 bp, Homo sapien
catcataacactccttgggacaaac

SEQ ID NO: 2347305 - DNA, 25 bp, Homo sapien
cgagcttgctgttcaaggcccacag

SEQ ID NO: 2347306 - DNA, 25 bp, Homo sapien
tgctccatacggacacagtgccaat

SEQ ID NO: 2347307 - DNA, 25 bp, Homo sapien
gcatagtcatactgtggccaaacct

SEQ ID NO: 2347308 - DNA, 25 bp, Homo sapien
gaagaagagtctgatgcaagagccc

SEQ ID NO: 2347309 - DNA, 25 bp, Homo sapien
taaatacatgttccctgagtgcagt

SEQ ID NO: 2347310 - DNA, 25 bp, Homo sapien
tcatgggcccagcaaggtggtaaag

SEQ ID NO: 2347311 - DNA, 25 bp, Homo sapien
taaaggccctagtcaagttgagtgg

SEQ ID NO: 2347312 - DNA, 25 bp, Homo sapien
ctgaagttttcttgagctgattttc

SEQ ID NO: 2347313 - DNA, 25 bp, Homo sapien
gaagttttcttgagctgattttccc

SEQ ID NO: 2347314 - DNA, 25 bp, Homo sapien
ctggaggaatcctcctgaagttttc

SEQ ID NO: 2347315 - DNA, 25 bp, Homo sapien
agttttcttgagctgattttcccat

SEQ ID NO: 2347316 - DNA, 25 bp, Homo sapien
ttagatctgccagtgtccccccatg

SEQ ID NO: 2347317 - DNA, 25 bp, Homo sapien
agcatttctaaagttccaccggtag

SEQ ID NO: 2347318 - DNA, 25 bp, Homo sapien
gtgtccccccatgagcatttctaaa

SEQ ID NO: 2347319 - DNA, 25 bp, Homo sapien
tgagcatttctaaagttccaccggt

SEQ ID NO: 2347320 - DNA, 25 bp, Homo sapien
tgtgtgccatttagaatcatctttc

SEQ ID NO: 2347321 - DNA, 25 bp, Homo sapien
actctcttttggaaaatcccctgtg

SEQ ID NO: 2347322 - DNA, 25 bp, Homo sapien
tcagaccacttggggttaaactctc

SEQ ID NO: 2347323 - DNA, 25 bp, Homo sapien
tggaaaatcccctgtgaggaccctc

SEQ ID NO: 2347324 - DNA, 25 bp, Homo sapien
cctgggcatagacagtgtgtgtttt

SEQ ID NO: 2347325 - DNA, 25 bp, Homo sapien
tagatgaataagcttccggaacatc

SEQ ID NO: 2347326 - DNA, 25 bp, Homo sapien
ctcttgagagcctgggcatagacag

SEQ ID NO: 2347327 - DNA, 25 bp, Homo sapien
ccctttgtagatgaataagcttccg

SEQ ID NO: 2347328 - DNA, 25 bp, Homo sapien
ctgttagcaattgagaaaactccta

SEQ ID NO: 2347329 - DNA, 25 bp, Homo sapien
tgactgttagcaattgagaaaactc

SEQ ID NO: 2347330 - DNA, 25 bp, Homo sapien
gcaattgagaaaactcctacgatct

SEQ ID NO: 2347331 - DNA, 25 bp, Homo sapien
tagcaattgagaaaactcctacgat

SEQ ID NO: 2347332 - DNA, 25 bp, Homo sapien
ggaatttattggaagtaccagaaga

SEQ ID NO: 2347333 - DNA, 25 bp, Homo sapien
gaatttattggaagtaccagaagag

SEQ ID NO: 2347334 - DNA, 25 bp, Homo sapien
caggaaggcagacaactgggaccat

SEQ ID NO: 2347335 - DNA, 25 bp, Homo sapien
gaccatgtacaaaggattaggtggg

SEQ ID NO: 2347336 - DNA, 25 bp, Homo sapien
gaccagttgaagcagtgtacatttg

SEQ ID NO: 2347337 - DNA, 25 bp, Homo sapien
tgtacatttgtacactgtattgcca

SEQ ID NO: 2347338 - DNA, 25 bp, Homo sapien
tgccaattgccagtacaagagtggg

SEQ ID NO: 2347339 - DNA, 25 bp, Homo sapien
ccttgtggggatgcatcggttccca

SEQ ID NO: 2347340 - DNA, 25 bp, Homo sapien
ggacggttgccacggatcatgcgca

SEQ ID NO: 2347341 - DNA, 25 bp, Homo sapien
ggcttttccagtgggcaaaggtcaa

SEQ ID NO: 2347342 - DNA, 25 bp, Homo sapien
atggcctcggctgtgggcttccgcc

SEQ ID NO: 2347343 - DNA, 25 bp, Homo sapien
gtgggcttccgcctgtttgcctttc

SEQ ID NO: 2347344 - DNA, 25 bp, Homo sapien
taagttcccggatgcaggaggtagt

SEQ ID NO: 2347345 - DNA, 25 bp, Homo sapien
tgttgctatgccaaccacaaggccc

SEQ ID NO: 2347346 - DNA, 25 bp, Homo sapien
agggctccgaccagcattgggtgct

SEQ ID NO: 2347347 - DNA, 25 bp, Homo sapien
ggccccggcagtacactttgaattc

SEQ ID NO: 2347348 - DNA, 25 bp, Homo sapien
tcttctgagaagagatgggacacaa

SEQ ID NO: 2347349 - DNA, 25 bp, Homo sapien
ggagtcgtaaaaacgtcaggcatct

SEQ ID NO: 2347350 - DNA, 25 bp, Homo sapien
ggcacctggaattcacaaaacatgg

SEQ ID NO: 2347351 - DNA, 25 bp, Homo sapien
cacaaacatgaaagaggagtcgtaa

SEQ ID NO: 2347352 - DNA, 25 bp, Homo sapien
tctaattggtctcaggtggccgtct

SEQ ID NO: 2347353 - DNA, 25 bp, Homo sapien
ttctaattggtctcaggtggccgtc

SEQ ID NO: 2347354 - DNA, 25 bp, Homo sapien
ctggtgtggatattctaattggtct

SEQ ID NO: 2347355 - DNA, 25 bp, Homo sapien
ttccactggtgtggatattctaatt

SEQ ID NO: 2347356 - DNA, 25 bp, Homo sapien
tctgttcgtagggttttctctccta

SEQ ID NO: 2347357 - DNA, 25 bp, Homo sapien
caatgaagtacttatgaaagcatac

SEQ ID NO: 2347358 - DNA, 25 bp, Homo sapien
cagatataatattaacgacaagatg

SEQ ID NO: 2347359 - DNA, 25 bp, Homo sapien
gatacgaatcatgacttttgtcctg

SEQ ID NO: 2347360 - DNA, 25 bp, Homo sapien
tgatgactcgaggaaaacacgctcc

SEQ ID NO: 2347361 - DNA, 25 bp, Homo sapien
gacccacggcggtcattggactgta

SEQ ID NO: 2347362 - DNA, 25 bp, Homo sapien
cacaggtttaaccttctgatggagc

SEQ ID NO: 2347363 - DNA, 25 bp, Homo sapien
ctgtctcagagctctagatggatta

SEQ ID NO: 2347364 - DNA, 25 bp, Homo sapien
agcagctgccagagagagttccttt

SEQ ID NO: 2347365 - DNA, 25 bp, Homo sapien
agataatgaatagatctccagcccc

SEQ ID NO: 2347366 - DNA, 25 bp, Homo sapien
caatgactaacgcagcagacaggct

SEQ ID NO: 2347367 - DNA, 25 bp, Homo sapien
cctctagagaaagaagattgaagca

SEQ ID NO: 2347368 - DNA, 25 bp, Homo sapien
gtctcgccccatcgctaggctggag

SEQ ID NO: 2347369 - DNA, 25 bp, Homo sapien
ggttgccagccgttaggtgtaatta

SEQ ID NO: 2347370 - DNA, 25 bp, Homo sapien
tcaaccctagaatgtggataacaca

SEQ ID NO: 2347371 - DNA, 25 bp, Homo sapien
cagcccagatggtcttaaactatgg

SEQ ID NO: 2347372 - DNA, 25 bp, Homo sapien
tggtggtacgtttcacacatgcgtg

SEQ ID NO: 2347373 - DNA, 25 bp, Homo sapien
ccaacgttgtaataagatttgtggt

SEQ ID NO: 2347374 - DNA, 25 bp, Homo sapien
ataagatttgtggtggtacgtttca

SEQ ID NO: 2347375 - DNA, 25 bp, Homo sapien
gtaatgtaccaacgttgtaataaga

SEQ ID NO: 2347376 - DNA, 25 bp, Homo sapien
tgaagctttttactctggacctgag

SEQ ID NO: 2347377 - DNA, 25 bp, Homo sapien
ttgaagctttttactctggacctga

SEQ ID NO: 2347378 - DNA, 25 bp, Homo sapien
agttgtccgccgctctccatggagc

SEQ ID NO: 2347379 - DNA, 25 bp, Homo sapien
gacgctagcgcgggtcactggaacc

SEQ ID NO: 2347380 - DNA, 25 bp, Homo sapien
ggagacagttgcgaagacccgctcc

SEQ ID NO: 2347381 - DNA, 25 bp, Homo sapien
aaccagggtgccgagatgaaagctc

SEQ ID NO: 2347382 - DNA, 25 bp, Homo sapien
gagggcgagtcgggcgcaggagcgc

SEQ ID NO: 2347383 - DNA, 25 bp, Homo sapien
tagtcggtgcgggaggtgcggcgag

SEQ ID NO: 2347384 - DNA, 25 bp, Homo sapien
gcgctagtcggtgcgggaggtgcgg

SEQ ID NO: 2347385 - DNA, 25 bp, Homo sapien
gggagcgctagtcggtgcgggaggt

SEQ ID NO: 2347386 - DNA, 25 bp, Homo sapien
ctgctccggccgccgccgtgggggc

SEQ ID NO: 2347387 - DNA, 25 bp, Homo sapien
tgctccggccgccgccgtgggggcc

SEQ ID NO: 2347388 - DNA, 25 bp, Homo sapien
ctgctgctccggccgccgccgtggg

SEQ ID NO: 2347389 - DNA, 25 bp, Homo sapien
ctgctgctgctccggccgccgccgt

SEQ ID NO: 2347390 - DNA, 25 bp, Homo sapien
tcgctccggaagcacaggcacgccg

SEQ ID NO: 2347391 - DNA, 25 bp, Homo sapien
acaggcacgccgcccgcttcttgaa

SEQ ID NO: 2347392 - DNA, 25 bp, Homo sapien
cgctccggaagcacaggcacgccgc

SEQ ID NO: 2347393 - DNA, 25 bp, Homo sapien
ctcctctcgctgagcactcgaggtt

SEQ ID NO: 2347394 - DNA, 25 bp, Homo sapien
gctgagcactcgaggtttatccggc

SEQ ID NO: 2347395 - DNA, 25 bp, Homo sapien
ctctcgctgagcactcgaggtttat

SEQ ID NO: 2347396 - DNA, 25 bp, Homo sapien
cactcgaggtttatccggctttcaa

SEQ ID NO: 2347397 - DNA, 25 bp, Homo sapien
aatgaggcataattatgccaacagc

SEQ ID NO: 2347398 - DNA, 25 bp, Homo sapien
gttcatggacccacaagaattgcca

SEQ ID NO: 2347399 - DNA, 25 bp, Homo sapien
attgccaagactagactcaattcca

SEQ ID NO: 2347400 - DNA, 25 bp, Homo sapien
tatgccaacagcttgcgggttcatg

SEQ ID NO: 2347401 - DNA, 25 bp, Homo sapien
tggctgtgcatttcacttaaggaga

SEQ ID NO: 2347402 - DNA, 25 bp, Homo sapien
gaaaattctgaagagctaaaccaga

SEQ ID NO: 2347403 - DNA, 25 bp, Homo sapien
tagataaagcctcaactacacacaa

SEQ ID NO: 2347404 - DNA, 25 bp, Homo sapien
tggcaatgcaatttcaacagagtga

SEQ ID NO: 2347405 - DNA, 25 bp, Homo sapien
tctaaccaggatctaggtgtttttc

SEQ ID NO: 2347406 - DNA, 25 bp, Homo sapien
ttttcatccagtagagggaaacatt

SEQ ID NO: 2347407 - DNA, 25 bp, Homo sapien
tttggggtcaaattgcaattactct

SEQ ID NO: 2347408 - DNA, 25 bp, Homo sapien
catttgtactctatataaacatttc

SEQ ID NO: 2347409 - DNA, 25 bp, Homo sapien
gaacttcagtacaggaacagccaga

SEQ ID NO: 2347410 - DNA, 25 bp, Homo sapien
aacttcagtacaggaacagccagat

SEQ ID NO: 2347411 - DNA, 25 bp, Homo sapien
acagccagatgggagcgccacgtag

SEQ ID NO: 2347412 - DNA, 25 bp, Homo sapien
tgagaacttcagtacaggaacagcc

SEQ ID NO: 2347413 - DNA, 25 bp, Homo sapien
tatataaagccaccttaaaagaata

SEQ ID NO: 2347414 - DNA, 25 bp, Homo sapien
taatatataaagccaccttaaaaga

SEQ ID NO: 2347415 - DNA, 25 bp, Homo sapien
tctttcctagaacaatctgttttaa

SEQ ID NO: 2347416 - DNA, 25 bp, Homo sapien
atatataaagccaccttaaaagaat

SEQ ID NO: 2347417 - DNA, 25 bp, Homo sapien
cttgctctatttgggacgcctggtc

SEQ ID NO: 2347418 - DNA, 25 bp, Homo sapien
tctacagggcaattagctgtgggcc

SEQ ID NO: 2347419 - DNA, 25 bp, Homo sapien
cccagcggccaaaactgagggtgct

SEQ ID NO: 2347420 - DNA, 25 bp, Homo sapien
caaaactttgttcttgcgtagcaac

SEQ ID NO: 2347421 - DNA, 25 bp, Homo sapien
tttatcacctgacgggtcctcctcg

SEQ ID NO: 2347422 - DNA, 25 bp, Homo sapien
tcaagggctatgtaatgcatttatg

SEQ ID NO: 2347423 - DNA, 25 bp, Homo sapien
tataaaagggtgctgttcaagggct

SEQ ID NO: 2347424 - DNA, 25 bp, Homo sapien
tatgccttcagaggctgtaggtcct

SEQ ID NO: 2347425 - DNA, 25 bp, Homo sapien
aggtacacaccaccatgctcggctc

SEQ ID NO: 2347426 - DNA, 25 bp, Homo sapien
agcaattctcgtgcgtaagcctcct

SEQ ID NO: 2347427 - DNA, 25 bp, Homo sapien
aattctcgtgcgtaagcctcctgag

SEQ ID NO: 2347428 - DNA, 25 bp, Homo sapien
tacacaccaccatgctcggctcatt

SEQ ID NO: 2347429 - DNA, 25 bp, Homo sapien
cctgcatctacaagacatcagcatg

SEQ ID NO: 2347430 - DNA, 25 bp, Homo sapien
taatatggaacccttgtgtctcaac

SEQ ID NO: 2347431 - DNA, 25 bp, Homo sapien
accgcgcccggtctatgcttcagat

SEQ ID NO: 2347432 - DNA, 25 bp, Homo sapien
tcagcatgactaaacttttcttcca

SEQ ID NO: 2347433 - DNA, 25 bp, Homo sapien
tggctagccgcctgaaaagtacatc

SEQ ID NO: 2347434 - DNA, 25 bp, Homo sapien
taatgggacataacgcaggtggcta

SEQ ID NO: 2347435 - DNA, 25 bp, Homo sapien
tccggactgcagagttacaggcctc

SEQ ID NO: 2347436 - DNA, 25 bp, Homo sapien
taaacagcaactactggtccggact

SEQ ID NO: 2347437 - DNA, 25 bp, Homo sapien
tatctatttaggcatagaacctcct

SEQ ID NO: 2347438 - DNA, 25 bp, Homo sapien
ctctcatttgactaagttaccagga

SEQ ID NO: 2347439 - DNA, 25 bp, Homo sapien
ggaaagtttcaagctgacaattcag

SEQ ID NO: 2347440 - DNA, 25 bp, Homo sapien
cctctctcatttgactaagttacca

SEQ ID NO: 2347441 - DNA, 25 bp, Homo sapien
acaggcacctcccaccaagaccagc

SEQ ID NO: 2347442 - DNA, 25 bp, Homo sapien
cgccacgttggccagactgatctca

SEQ ID NO: 2347443 - DNA, 25 bp, Homo sapien
attacaggcacctcccaccaagacc

SEQ ID NO: 2347444 - DNA, 25 bp, Homo sapien
aaactcctgacttcaagtgatctgc

SEQ ID NO: 2347445 - DNA, 25 bp, Homo sapien
cctgcatacataggcaaaagtcact

SEQ ID NO: 2347446 - DNA, 25 bp, Homo sapien
tagccagagttgtatgcactgaggt

SEQ ID NO: 2347447 - DNA, 25 bp, Homo sapien
gacgattcttgatacagagtgcttg

SEQ ID NO: 2347448 - DNA, 25 bp, Homo sapien
gcactgaggtctatggtcacataag

SEQ ID NO: 2347449 - DNA, 25 bp, Homo sapien
tcctcctgggacaatccactggtct

SEQ ID NO: 2347450 - DNA, 25 bp, Homo sapien
ccactggtctgggtaccggctgcta

SEQ ID NO: 2347451 - DNA, 25 bp, Homo sapien
aatccactggtctgggtaccggctg

SEQ ID NO: 2347452 - DNA, 25 bp, Homo sapien
gggacaatccactggtctgggtacc

SEQ ID NO: 2347453 - DNA, 25 bp, Homo sapien
ctcataaacttccctcacggcagca

SEQ ID NO: 2347454 - DNA, 25 bp, Homo sapien
cctcataaacttccctcacggcagc

SEQ ID NO: 2347455 - DNA, 25 bp, Homo sapien
tcataaacttccctcacggcagcac

SEQ ID NO: 2347456 - DNA, 25 bp, Homo sapien
atgcccagaagtctgcctagttttc

SEQ ID NO: 2347457 - DNA, 25 bp, Homo sapien
gcccagaagtctgcctagttttcct

SEQ ID NO: 2347458 - DNA, 25 bp, Homo sapien
gaagtctgcctagttttcctttgac

SEQ ID NO: 2347459 - DNA, 25 bp, Homo sapien
aaatatgcccagaagtctgcctagt

SEQ ID NO: 2347460 - DNA, 25 bp, Homo sapien
aaaaatcactgggatgaatgggcag

SEQ ID NO: 2347461 - DNA, 25 bp, Homo sapien
caacaataaattagaggcaactgtc

SEQ ID NO: 2347462 - DNA, 25 bp, Homo sapien
gattgacgtgtgctgttaaacagta

SEQ ID NO: 2347463 - DNA, 25 bp, Homo sapien
gaatgggcagggcaatccaattttc

SEQ ID NO: 2347464 - DNA, 25 bp, Homo sapien
gtgatctcagctcccccacaatctc

SEQ ID NO: 2347465 - DNA, 25 bp, Homo sapien
tgcctcccaggttcaagtgattctc

SEQ ID NO: 2347466 - DNA, 25 bp, Homo sapien
gcgtgatctcagctcccccacaatc

SEQ ID NO: 2347467 - DNA, 25 bp, Homo sapien
atctcagctcccccacaatctctgc

SEQ ID NO: 2347468 - DNA, 25 bp, Homo sapien
aaacatatgttctgtgctttcggtc

SEQ ID NO: 2347469 - DNA, 25 bp, Homo sapien
tcccaatcttctaatatttcagtga

SEQ ID NO: 2347470 - DNA, 25 bp, Homo sapien
cagtgactgttagaacataaacata

SEQ ID NO: 2347471 - DNA, 25 bp, Homo sapien
tatgttctgtgctttcggtcttggt

SEQ ID NO: 2347472 - DNA, 25 bp, Homo sapien
ctatattaacagaatcttcccaatc

SEQ ID NO: 2347473 - DNA, 25 bp, Homo sapien
tatattaacagaatcttcccaatct

SEQ ID NO: 2347474 - DNA, 25 bp, Homo sapien
atattaacagaatcttcccaatctt

SEQ ID NO: 2347475 - DNA, 25 bp, Homo sapien
tactccccgataaatgacttagaca

SEQ ID NO: 2347476 - DNA, 25 bp, Homo sapien
atgacttagacaacaatatgttggg

SEQ ID NO: 2347477 - DNA, 25 bp, Homo sapien
gccatataagtaatgtccacttact

SEQ ID NO: 2347478 - DNA, 25 bp, Homo sapien
atgacattggttacaagacagtcca

SEQ ID NO: 2347479 - DNA, 25 bp, Homo sapien
ggactgtagaatttccattggctgg

SEQ ID NO: 2347480 - DNA, 25 bp, Homo sapien
gcagcggttacaaacaaggcattat

SEQ ID NO: 2347481 - DNA, 25 bp, Homo sapien
tatcttacactagatggcaacccag

SEQ ID NO: 2347482 - DNA, 25 bp, Homo sapien
cccagaggtctgtgcagcggttaca

SEQ ID NO: 2347483 - DNA, 25 bp, Homo sapien
tgtttgacgaggaaacgaaagaagc

SEQ ID NO: 2347484 - DNA, 25 bp, Homo sapien
tcagatgtttgacgaggaaacgaaa

SEQ ID NO: 2347485 - DNA, 25 bp, Homo sapien
gtgggagaggcctacccagttctct

SEQ ID NO: 2347486 - DNA, 25 bp, Homo sapien
gatgtttgacgaggaaacgaaagaa

SEQ ID NO: 2347487 - DNA, 25 bp, Homo sapien
tgaaagcatctgaaaaacatgcaaa

SEQ ID NO: 2347488 - DNA, 25 bp, Homo sapien
aaattcagacagtttgcaagcgtca

SEQ ID NO: 2347489 - DNA, 25 bp, Homo sapien
aagatttgaaagcatctgaaaaaca

SEQ ID NO: 2347490 - DNA, 25 bp, Homo sapien
aattcagacagtttgcaagcgtcaa

SEQ ID NO: 2347491 - DNA, 25 bp, Homo sapien
gctgaatatgctaatgctgtgaatg

SEQ ID NO: 2347492 - DNA, 25 bp, Homo sapien
ggtgtggcacagttaaggcatctaa

SEQ ID NO: 2347493 - DNA, 25 bp, Homo sapien
tatgctgtgagaaatagacaaccaa

SEQ ID NO: 2347494 - DNA, 25 bp, Homo sapien
taaaccacagactgatgtcaaatgg

SEQ ID NO: 2347495 - DNA, 25 bp, Homo sapien
tatcatgtacaagatgggcactccc

SEQ ID NO: 2347496 - DNA, 25 bp, Homo sapien
gatgagacattctaaggtgccctaa

SEQ ID NO: 2347497 - DNA, 25 bp, Homo sapien
agatttcaagactccactcctgtgg

SEQ ID NO: 2347498 - DNA, 25 bp, Homo sapien
ggagaatcgtgaagaacccctcatg

SEQ ID NO: 2347499 - DNA, 25 bp, Homo sapien
tactttgtctgcaagtcaattcaca

SEQ ID NO: 2347500 - DNA, 25 bp, Homo sapien
acaaaataacatcatgcagcacagt

SEQ ID NO: 2347501 - DNA, 25 bp, Homo sapien
gacagaaaattggatggcatgtgcc

SEQ ID NO: 2347502 - DNA, 25 bp, Homo sapien
tgagaccatgcaaagcaattcagtg

SEQ ID NO: 2347503 - DNA, 25 bp, Homo sapien
tactcagtagctctccgacaggctg

SEQ ID NO: 2347504 - DNA, 25 bp, Homo sapien
tccctggctagaagacgttgaacct

SEQ ID NO: 2347505 - DNA, 25 bp, Homo sapien
tgttggccgtacaaacaggcagtgg

SEQ ID NO: 2347506 - DNA, 25 bp, Homo sapien
catacaaatgtaccgctaggaagag

SEQ ID NO: 2347507 - DNA, 25 bp, Homo sapien
taacttgccattagctgccatgctg

SEQ ID NO: 2347508 - DNA, 25 bp, Homo sapien
tggcatgccacccatcttagggaat

SEQ ID NO: 2347509 - DNA, 25 bp, Homo sapien
tccaatattaagagttcgggtctcc

SEQ ID NO: 2347510 - DNA, 25 bp, Homo sapien
caaccttatctagaaaagctggcca

SEQ ID NO: 2347511 - DNA, 25 bp, Homo sapien
gaagatctggcaacagtagacctga

SEQ ID NO: 2347512 - DNA, 25 bp, Homo sapien
caaccagtgggatgaaacgagtgcc

SEQ ID NO: 2347513 - DNA, 25 bp, Homo sapien
gagtagcagacaccctaagagcatg

SEQ ID NO: 2347514 - DNA, 25 bp, Homo sapien
tgtgcacgggacttaactgagagga

SEQ ID NO: 2347515 - DNA, 25 bp, Homo sapien
gacaagcttgattgttggaaccaaa

SEQ ID NO: 2347516 - DNA, 25 bp, Homo sapien
tggtcttcaccatctgacaaattga

SEQ ID NO: 2347517 - DNA, 25 bp, Homo sapien
gaatatgctctagccaagtctaact

SEQ ID NO: 2347518 - DNA, 25 bp, Homo sapien
ctggccctgagcatgcataaagcat

SEQ ID NO: 2347519 - DNA, 25 bp, Homo sapien
tgatacgatcatcaagtgtgcatca

SEQ ID NO: 2347520 - DNA, 25 bp, Homo sapien
gcagaggctagaagtatcatctgga

SEQ ID NO: 2347521 - DNA, 25 bp, Homo sapien
taaaaaagcccagacatcttcagtc

SEQ ID NO: 2347522 - DNA, 25 bp, Homo sapien
tgtgaaacgtttaaaagcagtggcc

SEQ ID NO: 2347523 - DNA, 25 bp, Homo sapien
tatttgtgccaaaagatagataagg

SEQ ID NO: 2347524 - DNA, 25 bp, Homo sapien
agccaggtgctcacttggacccagg

SEQ ID NO: 2347525 - DNA, 25 bp, Homo sapien
tgccaaaagatagataaggccgggc

SEQ ID NO: 2347526 - DNA, 25 bp, Homo sapien
ggtgtgaaccatggcatcccacctg

SEQ ID NO: 2347527 - DNA, 25 bp, Homo sapien
tgctctcgtcggctcagctgggcag

SEQ ID NO: 2347528 - DNA, 25 bp, Homo sapien
aggatcatcaaggtaaccgcccagg

SEQ ID NO: 2347529 - DNA, 25 bp, Homo sapien
ggacttccactcgtgcgtgaggcga

SEQ ID NO: 2347530 - DNA, 25 bp, Homo sapien
cgcgcccgagcagggactacatttc

SEQ ID NO: 2347531 - DNA, 25 bp, Homo sapien
gaacccgccatcttgtttcaatcct

SEQ ID NO: 2347532 - DNA, 25 bp, Homo sapien
ttgacggcttctcaccacgaacccg

SEQ ID NO: 2347533 - DNA, 25 bp, Homo sapien
ttcaatcctggtcccacgaaacagc

SEQ ID NO: 2347534 - DNA, 25 bp, Homo sapien
cacgaacccgccatcttgtttcaat

SEQ ID NO: 2347535 - DNA, 25 bp, Homo sapien
tagaatctgcttctaagcataccaa

SEQ ID NO: 2347536 - DNA, 25 bp, Homo sapien
ttagaatctgcttctaagcatacca

SEQ ID NO: 2347537 - DNA, 25 bp, Homo sapien
gaatctgcttctaagcataccaatt

SEQ ID NO: 2347538 - DNA, 25 bp, Homo sapien
tttagaatctgcttctaagcatacc

SEQ ID NO: 2347539 - DNA, 25 bp, Homo sapien
aatgtttcaagatagttctctttga

SEQ ID NO: 2347540 - DNA, 25 bp, Homo sapien
gtttcaagatagttctctttgacat

SEQ ID NO: 2347541 - DNA, 25 bp, Homo sapien
taaatgtttcaagatagttctcttt

SEQ ID NO: 2347542 - DNA, 25 bp, Homo sapien
ggactggaaataaatgtttcaagat

SEQ ID NO: 2347543 - DNA, 25 bp, Homo sapien
gcacacatgcatatgatggatcatc

SEQ ID NO: 2347544 - DNA, 25 bp, Homo sapien
caagagaaagttacccttgaccagt

SEQ ID NO: 2347545 - DNA, 25 bp, Homo sapien
ggctacacagataaccactgtttgg

SEQ ID NO: 2347546 - DNA, 25 bp, Homo sapien
caaatcccaagagtgggctacacag

SEQ ID NO: 2347547 - DNA, 25 bp, Homo sapien
agtaggatctggcaaacttttgagc

SEQ ID NO: 2347548 - DNA, 25 bp, Homo sapien
gcaaactttcaattacaaatggtgg

SEQ ID NO: 2347549 - DNA, 25 bp, Homo sapien
taaaatattttcctcgtctcaagca

SEQ ID NO: 2347550 - DNA, 25 bp, Homo sapien
gcataccatggattattacacagac

SEQ ID NO: 2347551 - DNA, 25 bp, Homo sapien
taagggtctttctcccaattctcaa

SEQ ID NO: 2347552 - DNA, 25 bp, Homo sapien
gtctcttaagcaatgtcctgttcta

SEQ ID NO: 2347553 - DNA, 25 bp, Homo sapien
ggaaagcttcctataagagcaggat

SEQ ID NO: 2347554 - DNA, 25 bp, Homo sapien
caacaaaaatgctcctagataatca

SEQ ID NO: 2347555 - DNA, 25 bp, Homo sapien
cgaagctgcagtgggccaagactgc

SEQ ID NO: 2347556 - DNA, 25 bp, Homo sapien
gtcgaagctgcagtgggccaagact

SEQ ID NO: 2347557 - DNA, 25 bp, Homo sapien
ttgggagactgagatagcaggatca

SEQ ID NO: 2347558 - DNA, 25 bp, Homo sapien
gagactgagatagcaggatcacctg

SEQ ID NO: 2347559 - DNA, 25 bp, Homo sapien
catgtcctcagtatggaattccagc

SEQ ID NO: 2347560 - DNA, 25 bp, Homo sapien
tcctcagtatggaattccagcccca

SEQ ID NO: 2347561 - DNA, 25 bp, Homo sapien
tgtcctcagtatggaattccagccc

SEQ ID NO: 2347562 - DNA, 25 bp, Homo sapien
cctcagtatggaattccagccccat

SEQ ID NO: 2347563 - DNA, 25 bp, Homo sapien
tttatgacaaacacaatataaagct

SEQ ID NO: 2347564 - DNA, 25 bp, Homo sapien
tagaggagaatacgtagatttatga

SEQ ID NO: 2347565 - DNA, 25 bp, Homo sapien
tagtcatctggtagaggagaatacg

SEQ ID NO: 2347566 - DNA, 25 bp, Homo sapien
tgacaaacacaatataaagctccat

SEQ ID NO: 2347567 - DNA, 25 bp, Homo sapien
gtcctgccatcagaagtcagagcaa

SEQ ID NO: 2347568 - DNA, 25 bp, Homo sapien
gggtggtagcatactattgtcctgc

SEQ ID NO: 2347569 - DNA, 25 bp, Homo sapien
tgtcctgccatcagaagtcagagca

SEQ ID NO: 2347570 - DNA, 25 bp, Homo sapien
tgaggataccaacggtgcttagtag

SEQ ID NO: 2347571 - DNA, 25 bp, Homo sapien
tatcataggtccttcctcaaggtgt

SEQ ID NO: 2347572 - DNA, 25 bp, Homo sapien
caacggtgcttagtagtaaagaaca

SEQ ID NO: 2347573 - DNA, 25 bp, Homo sapien
cgtccatgaggataccaacggtgct

SEQ ID NO: 2347574 - DNA, 25 bp, Homo sapien
aatttaaaagtacagtggcagtggc

SEQ ID NO: 2347575 - DNA, 25 bp, Homo sapien
gtggcagtggctcattcttacaatc

SEQ ID NO: 2347576 - DNA, 25 bp, Homo sapien
tcattcttacaatcccagctgaggg

SEQ ID NO: 2347577 - DNA, 25 bp, Homo sapien
aaagaagtactatttcattttagct

SEQ ID NO: 2347578 - DNA, 25 bp, Homo sapien
tagcagtcaaaagctgattagcagt

SEQ ID NO: 2347579 - DNA, 25 bp, Homo sapien
aaacaggtactgaaagccattacag

SEQ ID NO: 2347580 - DNA, 25 bp, Homo sapien
aagacaacatgctcggttttaagac

SEQ ID NO: 2347581 - DNA, 25 bp, Homo sapien
ttgtagcaatatggaacatgcagga

SEQ ID NO: 2347582 - DNA, 25 bp, Homo sapien
gcagaaagcctgcttgatcatggtg

SEQ ID NO: 2347583 - DNA, 25 bp, Homo sapien
gttgaggattttagcatccatgttt

SEQ ID NO: 2347584 - DNA, 25 bp, Homo sapien
cagaaagcctgcttgatcatggtga

SEQ ID NO: 2347585 - DNA, 25 bp, Homo sapien
ttcataagctcaataatagtgtact

SEQ ID NO: 2347586 - DNA, 25 bp, Homo sapien
cacattctcccattgtgaaaatttg

SEQ ID NO: 2347587 - DNA, 25 bp, Homo sapien
acattctcccattgtgaaaatttgt

SEQ ID NO: 2347588 - DNA, 25 bp, Homo sapien
aagctcaataatagtgtactacagc

SEQ ID NO: 2347589 - DNA, 25 bp, Homo sapien
tcatctgtcttttggaggattcaga

SEQ ID NO: 2347590 - DNA, 25 bp, Homo sapien
tggaggattcagattcttacgacat

SEQ ID NO: 2347591 - DNA, 25 bp, Homo sapien
tcttttggaggattcagattcttac

SEQ ID NO: 2347592 - DNA, 25 bp, Homo sapien
tttggaggattcagattcttacgac

SEQ ID NO: 2347593 - DNA, 25 bp, Homo sapien
acatttctctttgattcccccagga

SEQ ID NO: 2347594 - DNA, 25 bp, Homo sapien
aatacaccagactgcattttctcaa

SEQ ID NO: 2347595 - DNA, 25 bp, Homo sapien
gaatacaccagactgcattttctca

SEQ ID NO: 2347596 - DNA, 25 bp, Homo sapien
gctttggcactatggaaaagtccta

SEQ ID NO: 2347597 - DNA, 25 bp, Homo sapien
aagtcctaaattggagaccgcacat

SEQ ID NO: 2347598 - DNA, 25 bp, Homo sapien
tactgaatatgtatggctttggcac

SEQ ID NO: 2347599 - DNA, 25 bp, Homo sapien
tggagaccgcacataaatgaaacac

SEQ ID NO: 2347600 - DNA, 25 bp, Homo sapien
ggaaagccatgcacatttttattaa

SEQ ID NO: 2347601 - DNA, 25 bp, Homo sapien
cagtagcctactgtttagcaaaatt

SEQ ID NO: 2347602 - DNA, 25 bp, Homo sapien
aaatgctagcctgtcttaaatatgc

SEQ ID NO: 2347603 - DNA, 25 bp, Homo sapien
gatgtttctcaacttatcatagggt

SEQ ID NO: 2347604 - DNA, 25 bp, Homo sapien
tattctcaaaggcaattaaaaaatc

SEQ ID NO: 2347605 - DNA, 25 bp, Homo sapien
accttatgagtttattctcaaaggc

SEQ ID NO: 2347606 - DNA, 25 bp, Homo sapien
tctcaaaggcaattaaaaaatctcc

SEQ ID NO: 2347607 - DNA, 25 bp, Homo sapien
gagtttattctcaaaggcaattaaa

SEQ ID NO: 2347608 - DNA, 25 bp, Homo sapien
tcactaatttaattatttcctagaa

SEQ ID NO: 2347609 - DNA, 25 bp, Homo sapien
cactaatttaattatttcctagaag

SEQ ID NO: 2347610 - DNA, 25 bp, Homo sapien
tatcactaatttaattatttcctag

SEQ ID NO: 2347611 - DNA, 25 bp, Homo sapien
taatttaattatttcctagaagcca

SEQ ID NO: 2347612 - DNA, 25 bp, Homo sapien
tcatacataagctaatagaggcagc

SEQ ID NO: 2347613 - DNA, 25 bp, Homo sapien
tttgggtaaggttcgagtcactgta

SEQ ID NO: 2347614 - DNA, 25 bp, Homo sapien
caggaaagcacattcttgggtgaaa

SEQ ID NO: 2347615 - DNA, 25 bp, Homo sapien
gaaaaccacccctttgtcattgtga

SEQ ID NO: 2347616 - DNA, 25 bp, Homo sapien
ccacttaacagagggtcaccattat

SEQ ID NO: 2347617 - DNA, 25 bp, Homo sapien
ccatcgacaaagctggtaaatattt

SEQ ID NO: 2347618 - DNA, 25 bp, Homo sapien
tttttcaagaatacaccatcgacaa

SEQ ID NO: 2347619 - DNA, 25 bp, Homo sapien
tctctattcctcacacttcactggc

SEQ ID NO: 2347620 - DNA, 25 bp, Homo sapien
gagctttgtactcggaagagaagaa

SEQ ID NO: 2347621 - DNA, 25 bp, Homo sapien
tggtgatcacggactatgtgcttat

SEQ ID NO: 2347622 - DNA, 25 bp, Homo sapien
cataagtatgtggatgtgggcatct

SEQ ID NO: 2347623 - DNA, 25 bp, Homo sapien
tgggcatcttgggtaaatccttatt

SEQ ID NO: 2347624 - DNA, 25 bp, Homo sapien
tgaacaagaactgtgtagtgagttt

SEQ ID NO: 2347625 - DNA, 25 bp, Homo sapien
gaagcatcccactttacgaatttta

SEQ ID NO: 2347626 - DNA, 25 bp, Homo sapien
ggtttcccaataatgcttgaacaag

SEQ ID NO: 2347627 - DNA, 25 bp, Homo sapien
tactgatggtggataacaggttctt

SEQ ID NO: 2347628 - DNA, 25 bp, Homo sapien
tactcagaatattccagcacttaat

SEQ ID NO: 2347629 - DNA, 25 bp, Homo sapien
acatgtgtagtctcagcaattcggg

SEQ ID NO: 2347630 - DNA, 25 bp, Homo sapien
cagtttttgctattggtctactcag

SEQ ID NO: 2347631 - DNA, 25 bp, Homo sapien
caggatattgaggttgcagtgcaat

SEQ ID NO: 2347632 - DNA, 25 bp, Homo sapien
aattcctattaagtgaaaaaagcat

SEQ ID NO: 2347633 - DNA, 25 bp, Homo sapien
taagtgaaaaaagcattacaaaaca

SEQ ID NO: 2347634 - DNA, 25 bp, Homo sapien
ctattaagtgaaaaaagcattacaa

SEQ ID NO: 2347635 - DNA, 25 bp, Homo sapien
agtgaaaaaagcattacaaaacagc

SEQ ID NO: 2347636 - DNA, 25 bp, Homo sapien
tgtacataaacatggatgccggaca

SEQ ID NO: 2347637 - DNA, 25 bp, Homo sapien
gaaactacatactctatccccagga

SEQ ID NO: 2347638 - DNA, 25 bp, Homo sapien
tgtggaaaccacacgtgctatcttg

SEQ ID NO: 2347639 - DNA, 25 bp, Homo sapien
ttaggagtatgcagtttaggccagg

SEQ ID NO: 2347640 - DNA, 25 bp, Homo sapien
cattcttgctgaattgaagactcag

SEQ ID NO: 2347641 - DNA, 25 bp, Homo sapien
gacattcttgctgaattgaagactc

SEQ ID NO: 2347642 - DNA, 25 bp, Homo sapien
aaagagacattcttgctgaattgaa

SEQ ID NO: 2347643 - DNA, 25 bp, Homo sapien
gagacattcttgctgaattgaagac

SEQ ID NO: 2347644 - DNA, 25 bp, Homo sapien
gctcacacctgtaatcccagcactt

SEQ ID NO: 2347645 - DNA, 25 bp, Homo sapien
tttttgtagaagaccaggcgtggtg

SEQ ID NO: 2347646 - DNA, 25 bp, Homo sapien
ggcatgcagcaccaccccaccctcc

SEQ ID NO: 2347647 - DNA, 25 bp, Homo sapien
agatcacctgaggtggggaattcaa

SEQ ID NO: 2347648 - DNA, 25 bp, Homo sapien
taactagtgtgtgtgaaaaagagac

SEQ ID NO: 2347649 - DNA, 25 bp, Homo sapien
acggaatctcgttttatcacccaga

SEQ ID NO: 2347650 - DNA, 25 bp, Homo sapien
gagtgcccaacaagtacctgaatca

SEQ ID NO: 2347651 - DNA, 25 bp, Homo sapien
tttcaccaaagatatgagtgcccaa

SEQ ID NO: 2347652 - DNA, 25 bp, Homo sapien
cacttctgacgctccttaggcaact

SEQ ID NO: 2347653 - DNA, 25 bp, Homo sapien
tccacttctgacgctccttaggcaa

SEQ ID NO: 2347654 - DNA, 25 bp, Homo sapien
ctgacgctccttaggcaactctggg

SEQ ID NO: 2347655 - DNA, 25 bp, Homo sapien
aactctgggtcccagtgacccagga

SEQ ID NO: 2347656 - DNA, 25 bp, Homo sapien
tgttgtacacccagacaatggagta

SEQ ID NO: 2347657 - DNA, 25 bp, Homo sapien
gccagtgaagttattttgccatcca

SEQ ID NO: 2347658 - DNA, 25 bp, Homo sapien
catcgattgcattccctgcctgaaa

SEQ ID NO: 2347659 - DNA, 25 bp, Homo sapien
cagggatgttgagcaataggaaccc

SEQ ID NO: 2347660 - DNA, 25 bp, Homo sapien
gaccaaactggcttcttgcagcaat

SEQ ID NO: 2347661 - DNA, 25 bp, Homo sapien
ttgatttacattctagggcaagctc

SEQ ID NO: 2347662 - DNA, 25 bp, Homo sapien
tttatggctaaaaaactgaactcag

SEQ ID NO: 2347663 - DNA, 25 bp, Homo sapien
gaatgttctcttaccactgctgcta

SEQ ID NO: 2347664 - DNA, 25 bp, Homo sapien
taaaaaacaagttgcattcctgcct

SEQ ID NO: 2347665 - DNA, 25 bp, Homo sapien
cctgccttgtatgaaagaattctga

SEQ ID NO: 2347666 - DNA, 25 bp, Homo sapien
ccttcattagttgccagttagaaca

SEQ ID NO: 2347667 - DNA, 25 bp, Homo sapien
tgcaatatcaagacaatcaccaact

SEQ ID NO: 2347668 - DNA, 25 bp, Homo sapien
tattttctggatggcaccatgaccc

SEQ ID NO: 2347669 - DNA, 25 bp, Homo sapien
tcattgcagcaaagaagaacacaca

SEQ ID NO: 2347670 - DNA, 25 bp, Homo sapien
ctatagggaaggcagactagagctg

SEQ ID NO: 2347671 - DNA, 25 bp, Homo sapien
gaacacacaacatagggaaccatgg

SEQ ID NO: 2347672 - DNA, 25 bp, Homo sapien
tcacttcgatttgcactctttttgc

SEQ ID NO: 2347673 - DNA, 25 bp, Homo sapien
tcatctgtaggatcacttcgatttg

SEQ ID NO: 2347674 - DNA, 25 bp, Homo sapien
catctgtaggatcacttcgatttgc

SEQ ID NO: 2347675 - DNA, 25 bp, Homo sapien
acttcgatttgcactctttttgcaa

SEQ ID NO: 2347676 - DNA, 25 bp, Homo sapien
tatggatgcgtagaaattcagacac

SEQ ID NO: 2347677 - DNA, 25 bp, Homo sapien
cactctggcagtcaccgtgtggaaa

SEQ ID NO: 2347678 - DNA, 25 bp, Homo sapien
ccagatagatagacccagttgctga

SEQ ID NO: 2347679 - DNA, 25 bp, Homo sapien
aatagttttgcccatgagagagaca

SEQ ID NO: 2347680 - DNA, 25 bp, Homo sapien
cagactctggtgtgctaccaagaag

SEQ ID NO: 2347681 - DNA, 25 bp, Homo sapien
cttgaagttcctgcttaatctccat

SEQ ID NO: 2347682 - DNA, 25 bp, Homo sapien
ccttcagactctggtgtgctaccaa

SEQ ID NO: 2347683 - DNA, 25 bp, Homo sapien
tctggtgtgctaccaagaagagctt

SEQ ID NO: 2347684 - DNA, 25 bp, Homo sapien
tgagccaatgggaatgactcgagct

SEQ ID NO: 2347685 - DNA, 25 bp, Homo sapien
gtccagtagaaccaaccagattatt

SEQ ID NO: 2347686 - DNA, 25 bp, Homo sapien
gactcgagctcttggacatagaggt

SEQ ID NO: 2347687 - DNA, 25 bp, Homo sapien
ttgtccagtatcacaagtccagtag

SEQ ID NO: 2347688 - DNA, 25 bp, Homo sapien
ctgaggagttgccaaggcttgaaaa

SEQ ID NO: 2347689 - DNA, 25 bp, Homo sapien
gcaatgcagacgttctagtactgga

SEQ ID NO: 2347690 - DNA, 25 bp, Homo sapien
ctgtgtgccaaaccagaactggaca

SEQ ID NO: 2347691 - DNA, 25 bp, Homo sapien
cactgagctactgccaaattgccag

SEQ ID NO: 2347692 - DNA, 25 bp, Homo sapien
gacctacttgaaatgtgacctactt

SEQ ID NO: 2347693 - DNA, 25 bp, Homo sapien
gattcggaaggatctcggcacctct

SEQ ID NO: 2347694 - DNA, 25 bp, Homo sapien
ccggatccaaaatttcgataagcat

SEQ ID NO: 2347695 - DNA, 25 bp, Homo sapien
cactgctcgaaagcttgaaaggtca

SEQ ID NO: 2347696 - DNA, 25 bp, Homo sapien
ccggaaggggcttggtgactggcct

SEQ ID NO: 2347697 - DNA, 25 bp, Homo sapien
tccctcagtccggagagtgtctctg

SEQ ID NO: 2347698 - DNA, 25 bp, Homo sapien
ggtgactggcctcggttccctcagt

SEQ ID NO: 2347699 - DNA, 25 bp, Homo sapien
ctcagtccggagagtgtctctgcca

SEQ ID NO: 2347700 - DNA, 25 bp, Homo sapien
tgtgggtcctcggaaaccagactct

SEQ ID NO: 2347701 - DNA, 25 bp, Homo sapien
aggatagcgatccttggcccttggc

SEQ ID NO: 2347702 - DNA, 25 bp, Homo sapien
cagactctccggctctaagacacat

SEQ ID NO: 2347703 - DNA, 25 bp, Homo sapien
ctctaagacacatcgatggcgtggg

SEQ ID NO: 2347704 - DNA, 25 bp, Homo sapien
gaactttccaggaatcggcctcacg

SEQ ID NO: 2347705 - DNA, 25 bp, Homo sapien
tgcggaggcggctttccaggaactt

SEQ ID NO: 2347706 - DNA, 25 bp, Homo sapien
gcgggccccgctactgctttaaaga

SEQ ID NO: 2347707 - DNA, 25 bp, Homo sapien
taaagaggctcggtcgcaatacaca

SEQ ID NO: 2347708 - DNA, 25 bp, Homo sapien
cgggcgcccgagctgcgggcacggg

SEQ ID NO: 2347709 - DNA, 25 bp, Homo sapien
gtggctgcgggcgagagggctcatg

SEQ ID NO: 2347710 - DNA, 25 bp, Homo sapien
tgtccgcgggccacgcggtgagggt

SEQ ID NO: 2347711 - DNA, 25 bp, Homo sapien
cgggcacggggtatcctgaggctgt

SEQ ID NO: 2347712 - DNA, 25 bp, Homo sapien
gcagcaacgctaggccgcggggcag

SEQ ID NO: 2347713 - DNA, 25 bp, Homo sapien
agcaggcagcaacgctaggccgcgg

SEQ ID NO: 2347714 - DNA, 25 bp, Homo sapien
agagccgcggttcggactctctctt

SEQ ID NO: 2347715 - DNA, 25 bp, Homo sapien
gcagagccgcggttcggactctctc

SEQ ID NO: 2347716 - DNA, 25 bp, Homo sapien
ggaggcggcggtcggagttccgtgc

SEQ ID NO: 2347717 - DNA, 25 bp, Homo sapien
agttccgtgcgcagagggcacacaa

SEQ ID NO: 2347718 - DNA, 25 bp, Homo sapien
ctccggctgcgaccctggaggtggg

SEQ ID NO: 2347719 - DNA, 25 bp, Homo sapien
caaaagcctcgaggatcattgcctc

SEQ ID NO: 2347720 - DNA, 25 bp, Homo sapien
gtcgcgagcgctgcggaaaatgcaa

SEQ ID NO: 2347721 - DNA, 25 bp, Homo sapien
ggcgctgtcgaggaatcggcccgag

SEQ ID NO: 2347722 - DNA, 25 bp, Homo sapien
gatggctgcggtggttctcgccgcc

SEQ ID NO: 2347723 - DNA, 25 bp, Homo sapien
gaaaatgcaaaccaccaacgccgcg

SEQ ID NO: 2347724 - DNA, 25 bp, Homo sapien
ttggttctccgccctaaagcgctgc

SEQ ID NO: 2347725 - DNA, 25 bp, Homo sapien
ggcccttgtcaaggacaagtagaaa

SEQ ID NO: 2347726 - DNA, 25 bp, Homo sapien
ctgcagatccagtgggaataggccc

SEQ ID NO: 2347727 - DNA, 25 bp, Homo sapien
ttggcattccggtctcacacctggc

SEQ ID NO: 2347728 - DNA, 25 bp, Homo sapien
ttaaccccaagcttccagttagcgc

SEQ ID NO: 2347729 - DNA, 25 bp, Homo sapien
gaaagcgggaggttgggtcagtcca

SEQ ID NO: 2347730 - DNA, 25 bp, Homo sapien
gcctctacgttcctgcaccatttaa

SEQ ID NO: 2347731 - DNA, 25 bp, Homo sapien
cagagatccaagataaagttggctg

SEQ ID NO: 2347732 - DNA, 25 bp, Homo sapien
tcgcagccgcggtcacccactgatc

SEQ ID NO: 2347733 - DNA, 25 bp, Homo sapien
gcagccgcggtcacccactgatcgc

SEQ ID NO: 2347734 - DNA, 25 bp, Homo sapien
ctggaggacggatgacaaagtccct

SEQ ID NO: 2347735 - DNA, 25 bp, Homo sapien
ctcgcagccgcggtcacccactgat

SEQ ID NO: 2347736 - DNA, 25 bp, Homo sapien
ggttcgcgtccttccttgaagtcag

SEQ ID NO: 2347737 - DNA, 25 bp, Homo sapien
tgaagtcagtgcgaatcccaaaacg

SEQ ID NO: 2347738 - DNA, 25 bp, Homo sapien
gtcagtgcgaatcccaaaacgagtc

SEQ ID NO: 2347739 - DNA, 25 bp, Homo sapien
ggtcagagaagggttcgcgtccttc

SEQ ID NO: 2347740 - DNA, 25 bp, Homo sapien
cgcggcaaagacaggtggccgcccg

SEQ ID NO: 2347741 - DNA, 25 bp, Homo sapien
cggcaaagacaggtggccgcccgag

SEQ ID NO: 2347742 - DNA, 25 bp, Homo sapien
gcggcaaagacaggtggccgcccga

SEQ ID NO: 2347743 - DNA, 25 bp, Homo sapien
ccgccattcccggagggctcaaggc

SEQ ID NO: 2347744 - DNA, 25 bp, Homo sapien
tcccgcagggccttcgccagacgcg

SEQ ID NO: 2347745 - DNA, 25 bp, Homo sapien
ctgcggggatggctcctccgccgac

SEQ ID NO: 2347746 - DNA, 25 bp, Homo sapien
gccattcccggagggctcaaggcac

SEQ ID NO: 2347747 - DNA, 25 bp, Homo sapien
gcgcgaattgcctgactgtacttga

SEQ ID NO: 2347748 - DNA, 25 bp, Homo sapien
acttgaaagcggcagtaccctgggc

SEQ ID NO: 2347749 - DNA, 25 bp, Homo sapien
gacttgctgattgcaccccgtgcaa

SEQ ID NO: 2347750 - DNA, 25 bp, Homo sapien
tgagtccctggagaaccactttcct

SEQ ID NO: 2347751 - DNA, 25 bp, Homo sapien
ccttaccagtcactaagaaatggga

SEQ ID NO: 2347752 - DNA, 25 bp, Homo sapien
ccttctatgtagaaagcactgctat

SEQ ID NO: 2347753 - DNA, 25 bp, Homo sapien
gctatgtacttgttgtaaaagcaca

SEQ ID NO: 2347754 - DNA, 25 bp, Homo sapien
gctgctttatgactaccttaccagt

SEQ ID NO: 2347755 - DNA, 25 bp, Homo sapien
gatagagtccaatctgaattttccg

SEQ ID NO: 2347756 - DNA, 25 bp, Homo sapien
ggacctgtccgcttatccttgcaca

SEQ ID NO: 2347757 - DNA, 25 bp, Homo sapien
aacatagtagtcgatcagatgaacc

SEQ ID NO: 2347758 - DNA, 25 bp, Homo sapien
tcagataaaggtgaacagtgccgtt

SEQ ID NO: 2347759 - DNA, 25 bp, Homo sapien
gtcttgttggtaaaggcagtcccca

SEQ ID NO: 2347760 - DNA, 25 bp, Homo sapien
tggtaaaggcagtccccagatggca

SEQ ID NO: 2347761 - DNA, 25 bp, Homo sapien
tccaagtaatcttttagtcttgttg

SEQ ID NO: 2347762 - DNA, 25 bp, Homo sapien
tattcttccaagtaatcttttagtc

SEQ ID NO: 2347763 - DNA, 25 bp, Homo sapien
tacatagctgcattcggagatactc

SEQ ID NO: 2347764 - DNA, 25 bp, Homo sapien
taaacacctagctacctcttcaagc

SEQ ID NO: 2347765 - DNA, 25 bp, Homo sapien
tactctatgtgagacatgtttaaaa

SEQ ID NO: 2347766 - DNA, 25 bp, Homo sapien
catcactcaggtaaaagtatctgga

SEQ ID NO: 2347767 - DNA, 25 bp, Homo sapien
tcagcctttacatgcgacattttat

SEQ ID NO: 2347768 - DNA, 25 bp, Homo sapien
agcctttacatgcgacattttattt

SEQ ID NO: 2347769 - DNA, 25 bp, Homo sapien
cagcctttacatgcgacattttatt

SEQ ID NO: 2347770 - DNA, 25 bp, Homo sapien
ttcagcctttacatgcgacatttta

SEQ ID NO: 2347771 - DNA, 25 bp, Homo sapien
gaaggcaaggcattctgataaaacg

SEQ ID NO: 2347772 - DNA, 25 bp, Homo sapien
aggcaaggcattctgataaaacgcg

SEQ ID NO: 2347773 - DNA, 25 bp, Homo sapien
ctaagaaggcaaggcattctgataa

SEQ ID NO: 2347774 - DNA, 25 bp, Homo sapien
gcaaggcattctgataaaacgcgac

SEQ ID NO: 2347775 - DNA, 25 bp, Homo sapien
gttgggacacagctatttcaaaggg

SEQ ID NO: 2347776 - DNA, 25 bp, Homo sapien
aatcaatggcaacaggttgggacac

SEQ ID NO: 2347777 - DNA, 25 bp, Homo sapien
caggcatatcaaattgcagtgaggc

SEQ ID NO: 2347778 - DNA, 25 bp, Homo sapien
ctgaaataaggctcccatagaatgg

SEQ ID NO: 2347779 - DNA, 25 bp, Homo sapien
gaaagtgtacgttctctagaactca

SEQ ID NO: 2347780 - DNA, 25 bp, Homo sapien
cgttctctagaactcaataagtgca

SEQ ID NO: 2347781 - DNA, 25 bp, Homo sapien
aatcctctattaccatgaaagtgta

SEQ ID NO: 2347782 - DNA, 25 bp, Homo sapien
tattaccatgaaagtgtacgttctc

SEQ ID NO: 2347783 - DNA, 25 bp, Homo sapien
gcaggtacagcccataactttacag

SEQ ID NO: 2347784 - DNA, 25 bp, Homo sapien
acaccacaggattgtagctatgcag

SEQ ID NO: 2347785 - DNA, 25 bp, Homo sapien
cacagggtccacctttatggtgaca

SEQ ID NO: 2347786 - DNA, 25 bp, Homo sapien
tactcaacttgtaaaagactggcca

SEQ ID NO: 2347787 - DNA, 25 bp, Homo sapien
tcacttgcgagcagtaactcagaac

SEQ ID NO: 2347788 - DNA, 25 bp, Homo sapien
gccttctcataattagtcacttgcg

SEQ ID NO: 2347789 - DNA, 25 bp, Homo sapien
taggtttcatggcacactccagaga

SEQ ID NO: 2347790 - DNA, 25 bp, Homo sapien
tcaacctacttgcaatatggaagat

SEQ ID NO: 2347791 - DNA, 25 bp, Homo sapien
ccctacattgggagaaaacactgga

SEQ ID NO: 2347792 - DNA, 25 bp, Homo sapien
taattggtaactggcattgatcagc

SEQ ID NO: 2347793 - DNA, 25 bp, Homo sapien
gattacttgacgaagatgacgtctc

SEQ ID NO: 2347794 - DNA, 25 bp, Homo sapien
cactgctcactgtaatggtcatgaa

SEQ ID NO: 2347795 - DNA, 25 bp, Homo sapien
tcatggtctgtaagagctccctcaa

SEQ ID NO: 2347796 - DNA, 25 bp, Homo sapien
catttttccaaaggacctccagagg

SEQ ID NO: 2347797 - DNA, 25 bp, Homo sapien
tagtaattgactctcaggagcctcc

SEQ ID NO: 2347798 - DNA, 25 bp, Homo sapien
aattcctagttcagggttgtgcccg

SEQ ID NO: 2347799 - DNA, 25 bp, Homo sapien
gcagagcgaagacagccttccagat

SEQ ID NO: 2347800 - DNA, 25 bp, Homo sapien
tcaaaactcttcgatcatagggtaa

SEQ ID NO: 2347801 - DNA, 25 bp, Homo sapien
tgacttgcaaaaacacaccctatgc

SEQ ID NO: 2347802 - DNA, 25 bp, Homo sapien
tgatggctggcatacaccagattcc

SEQ ID NO: 2347803 - DNA, 25 bp, Homo sapien
gacgtaataaaacccatggcctgcc

SEQ ID NO: 2347804 - DNA, 25 bp, Homo sapien
gagatgtgccccactttaagagaga

SEQ ID NO: 2347805 - DNA, 25 bp, Homo sapien
gaatggttgcctgtcacgccttgga

SEQ ID NO: 2347806 - DNA, 25 bp, Homo sapien
tttgaaaggaccaatccactctggg

SEQ ID NO: 2347807 - DNA, 25 bp, Homo sapien
ggcctcatcctagaaagaggttgca

SEQ ID NO: 2347808 - DNA, 25 bp, Homo sapien
tcaatctgggttagagtagaaaaac

SEQ ID NO: 2347809 - DNA, 25 bp, Homo sapien
gagcataactgtccattaaaaccca

SEQ ID NO: 2347810 - DNA, 25 bp, Homo sapien
gattaggtacccaatttatcacaca

SEQ ID NO: 2347811 - DNA, 25 bp, Homo sapien
gctgccgacgctgggttacataagg

SEQ ID NO: 2347812 - DNA, 25 bp, Homo sapien
gcttccaaagtgaaacgccttgacg

SEQ ID NO: 2347813 - DNA, 25 bp, Homo sapien
tctgagattcctcttgccgcagaca

SEQ ID NO: 2347814 - DNA, 25 bp, Homo sapien
cagtgtgtgcacatcgtagacgcta

SEQ ID NO: 2347815 - DNA, 25 bp, Homo sapien
tacggtctagtgagacccttaagac

SEQ ID NO: 2347816 - DNA, 25 bp, Homo sapien
tgagacccttaagactacgtgaaaa

SEQ ID NO: 2347817 - DNA, 25 bp, Homo sapien
taacccatgagatatgcggcaaaaa

SEQ ID NO: 2347818 - DNA, 25 bp, Homo sapien
ggccacattctcatatacggtctag

SEQ ID NO: 2347819 - DNA, 25 bp, Homo sapien
tcaaggctgggacgaagttgttgag

SEQ ID NO: 2347820 - DNA, 25 bp, Homo sapien
tgttgaggcctttccactaggtttc

SEQ ID NO: 2347821 - DNA, 25 bp, Homo sapien
gctgggacgaagttgttgaggcctt

SEQ ID NO: 2347822 - DNA, 25 bp, Homo sapien
tccactaggtttctcagacatcttt

SEQ ID NO: 2347823 - DNA, 25 bp, Homo sapien
ggtcctgtccaagtgtatctttcac

SEQ ID NO: 2347824 - DNA, 25 bp, Homo sapien
ttcctgccttgtttcatggcagtga

SEQ ID NO: 2347825 - DNA, 25 bp, Homo sapien
cctcataccaatataggatcagctc

SEQ ID NO: 2347826 - DNA, 25 bp, Homo sapien
catctgagcataactgtactaaatc

SEQ ID NO: 2347827 - DNA, 25 bp, Homo sapien
cgatggagcccgaccatcctttcta

SEQ ID NO: 2347828 - DNA, 25 bp, Homo sapien
cagtaaggatcgtaggtatgcagac

SEQ ID NO: 2347829 - DNA, 25 bp, Homo sapien
agcaacatcagtaaggatcgtaggt

SEQ ID NO: 2347830 - DNA, 25 bp, Homo sapien
tggagcccgaccatcctttctacag

SEQ ID NO: 2347831 - DNA, 25 bp, Homo sapien
tgggcattcccaccaaaatgaaagg

SEQ ID NO: 2347832 - DNA, 25 bp, Homo sapien
taattctgatctggcttgggcattc

SEQ ID NO: 2347833 - DNA, 25 bp, Homo sapien
gctccagtgaaatcttttcggtccc

SEQ ID NO: 2347834 - DNA, 25 bp, Homo sapien
tgaaaggttgagctccagtgaaatc

SEQ ID NO: 2347835 - DNA, 25 bp, Homo sapien
actgtagtgtgcctcgtccatgttc

SEQ ID NO: 2347836 - DNA, 25 bp, Homo sapien
cagcgggtttagatcttacagtatc

SEQ ID NO: 2347837 - DNA, 25 bp, Homo sapien
ggaggaatcaaaagatatgtaaaag

SEQ ID NO: 2347838 - DNA, 25 bp, Homo sapien
tcaatcagttaatacggactgtagt

SEQ ID NO: 2347839 - DNA, 25 bp, Homo sapien
ttcccatctgttcatagacaaatgt

SEQ ID NO: 2347840 - DNA, 25 bp, Homo sapien
ttgtcctttcctcagcaagatttcc

SEQ ID NO: 2347841 - DNA, 25 bp, Homo sapien
tttcctcagcaagatttcccatctg

SEQ ID NO: 2347842 - DNA, 25 bp, Homo sapien
tcccatctgttcatagacaaatgtt

SEQ ID NO: 2347843 - DNA, 25 bp, Homo sapien
tggtgagaccaatctgacatgcaga

SEQ ID NO: 2347844 - DNA, 25 bp, Homo sapien
gagcatgtagttggtagctttccag

SEQ ID NO: 2347845 - DNA, 25 bp, Homo sapien
gcaaatcttgctttgctgcgtgcca

SEQ ID NO: 2347846 - DNA, 25 bp, Homo sapien
gcagcaaggatgtctagagcatgta

SEQ ID NO: 2347847 - DNA, 25 bp, Homo sapien
tttgttgagggcaagtacaggaagt

SEQ ID NO: 2347848 - DNA, 25 bp, Homo sapien
catctttgttaatggcgaaaaccct

SEQ ID NO: 2347849 - DNA, 25 bp, Homo sapien
caaccggaatcctgactgttaggga

SEQ ID NO: 2347850 - DNA, 25 bp, Homo sapien
atcctgactgttagggaacctgccc

SEQ ID NO: 2347851 - DNA, 25 bp, Homo sapien
gagaaaaactgcaaccggaatcctg

SEQ ID NO: 2347852 - DNA, 25 bp, Homo sapien
gaaaaactgcaaccggaatcctgac

SEQ ID NO: 2347853 - DNA, 25 bp, Homo sapien
atcaaacaggaagactacgggcggt

SEQ ID NO: 2347854 - DNA, 25 bp, Homo sapien
ctgggaatgaactaaagagcggacc

SEQ ID NO: 2347855 - DNA, 25 bp, Homo sapien
cagacgctacaatgcaggactttca

SEQ ID NO: 2347856 - DNA, 25 bp, Homo sapien
ccttggcccggatcggaaatgcgga

SEQ ID NO: 2347857 - DNA, 25 bp, Homo sapien
taggcgacacccgatcccacactcc

SEQ ID NO: 2347858 - DNA, 25 bp, Homo sapien
gcagtacgaccacggctaggcgaca

SEQ ID NO: 2347859 - DNA, 25 bp, Homo sapien
ccgggcagtacgaccacggctaggc

SEQ ID NO: 2347860 - DNA, 25 bp, Homo sapien
ggctaggcgacacccgatcccacac

SEQ ID NO: 2347861 - DNA, 25 bp, Homo sapien
caggcacgatttgaaggtgcagttc

SEQ ID NO: 2347862 - DNA, 25 bp, Homo sapien
cccagcactggtcagtagccaggca

SEQ ID NO: 2347863 - DNA, 25 bp, Homo sapien
tgaaggttaagtgaccgggaaggca

SEQ ID NO: 2347864 - DNA, 25 bp, Homo sapien
ttgtgtgtaaggcagtgaaggttaa

SEQ ID NO: 2347865 - DNA, 25 bp, Homo sapien
ctgtcgtggccgcacatgcatggga

SEQ ID NO: 2347866 - DNA, 25 bp, Homo sapien
ccgcacatgcatgggacattttatg

SEQ ID NO: 2347867 - DNA, 25 bp, Homo sapien
gaatctccagcacaacactgtcgtg

SEQ ID NO: 2347868 - DNA, 25 bp, Homo sapien
aagaattccgaatctccagcacaac

SEQ ID NO: 2347869 - DNA, 25 bp, Homo sapien
gaatatggttttccgtcaagattcc

SEQ ID NO: 2347870 - DNA, 25 bp, Homo sapien
ctccaggcgaagtgagcggagtact

SEQ ID NO: 2347871 - DNA, 25 bp, Homo sapien
ccctggaaggtaggatatccagcag

SEQ ID NO: 2347872 - DNA, 25 bp, Homo sapien
gcaggagcattgttttccggaggcc

SEQ ID NO: 2347873 - DNA, 25 bp, Homo sapien
tcaaagtgatctttctgaggcctac

SEQ ID NO: 2347874 - DNA, 25 bp, Homo sapien
catagttacaacattttggagctgg

SEQ ID NO: 2347875 - DNA, 25 bp, Homo sapien
gcaaagagcatagttacaacatttt

SEQ ID NO: 2347876 - DNA, 25 bp, Homo sapien
caaaaaagcaaagagcatagttaca

SEQ ID NO: 2347877 - DNA, 25 bp, Homo sapien
tccaaatggctcctgatgccaacgg

SEQ ID NO: 2347878 - DNA, 25 bp, Homo sapien
tcagttgtcagtaggccgaatgcct

SEQ ID NO: 2347879 - DNA, 25 bp, Homo sapien
tcagtaggccgaatgcctgctttcc

SEQ ID NO: 2347880 - DNA, 25 bp, Homo sapien
cactttccaaatggctcctgatgcc

SEQ ID NO: 2347881 - DNA, 25 bp, Homo sapien
tacagaattaacaaatcttgagaaa

SEQ ID NO: 2347882 - DNA, 25 bp, Homo sapien
taagatgactgtacgaatttgttcc

SEQ ID NO: 2347883 - DNA, 25 bp, Homo sapien
gcagtgttactcagtaaaaagtaaa

SEQ ID NO: 2347884 - DNA, 25 bp, Homo sapien
tgttccagagccaaccttctacaga

SEQ ID NO: 2347885 - DNA, 25 bp, Homo sapien
aattcagggcttttcactgcgtggg

SEQ ID NO: 2347886 - DNA, 25 bp, Homo sapien
gaacttacggtatacaggattttca

SEQ ID NO: 2347887 - DNA, 25 bp, Homo sapien
caagagaaggtgttaactatcaagt

SEQ ID NO: 2347888 - DNA, 25 bp, Homo sapien
tgatactcttcccaggatttacaaa

SEQ ID NO: 2347889 - DNA, 25 bp, Homo sapien
tcaagagttgagacatccaatgctg

SEQ ID NO: 2347890 - DNA, 25 bp, Homo sapien
gccggaggcaccgagctgtgttccc

SEQ ID NO: 2347891 - DNA, 25 bp, Homo sapien
tgatgccggaggcaccgagctgtgt

SEQ ID NO: 2347892 - DNA, 25 bp, Homo sapien
aagagttgagacatccaatgctgat

SEQ ID NO: 2347893 - DNA, 25 bp, Homo sapien
ctggcgccacaaggggcaggcagag

SEQ ID NO: 2347894 - DNA, 25 bp, Homo sapien
tgcgcactgctgttgtaagagcagc

SEQ ID NO: 2347895 - DNA, 25 bp, Homo sapien
tagaggggaaatggactagccagtc

SEQ ID NO: 2347896 - DNA, 25 bp, Homo sapien
aaatggactagccagtcctgcgcac

SEQ ID NO: 2347897 - DNA, 25 bp, Homo sapien
cataccggtccgtggcctattagga

SEQ ID NO: 2347898 - DNA, 25 bp, Homo sapien
tgcacatgccagagatcgaggtcgc

SEQ ID NO: 2347899 - DNA, 25 bp, Homo sapien
attaggaaccggatcgcagagcagg

SEQ ID NO: 2347900 - DNA, 25 bp, Homo sapien
cctcctattggatcagcagtggcat

SEQ ID NO: 2347901 - DNA, 25 bp, Homo sapien
gcaagttgacttaatctccctaggc

SEQ ID NO: 2347902 - DNA, 25 bp, Homo sapien
tgctttaactatgccagccaggtga

SEQ ID NO: 2347903 - DNA, 25 bp, Homo sapien
aattagatgacctgtgagtcccacc

SEQ ID NO: 2347904 - DNA, 25 bp, Homo sapien
tatactagaactggagccttcctgc

SEQ ID NO: 2347905 - DNA, 25 bp, Homo sapien
taaatactcgatgaaagtcttccgc

SEQ ID NO: 2347906 - DNA, 25 bp, Homo sapien
tcattccagcatacctctaaaggcc

SEQ ID NO: 2347907 - DNA, 25 bp, Homo sapien
tttcctttatgtcagccttgcagag

SEQ ID NO: 2347908 - DNA, 25 bp, Homo sapien
cttgtgacaaaatgcagtactgaac

SEQ ID NO: 2347909 - DNA, 25 bp, Homo sapien
gacataacctgatctacagagcaca

SEQ ID NO: 2347910 - DNA, 25 bp, Homo sapien
gagcacaaggtactgcatgtagttt

SEQ ID NO: 2347911 - DNA, 25 bp, Homo sapien
tttttaactgagaggagcatccaac

SEQ ID NO: 2347912 - DNA, 25 bp, Homo sapien
agcatccaactcgttcttcagcagg

SEQ ID NO: 2347913 - DNA, 25 bp, Homo sapien
tcagccttaggacaagaggcaagaa

SEQ ID NO: 2347914 - DNA, 25 bp, Homo sapien
gataccaaccaggaatcagccttag

SEQ ID NO: 2347915 - DNA, 25 bp, Homo sapien
gagagatacgagagagataccaacc

SEQ ID NO: 2347916 - DNA, 25 bp, Homo sapien
caaaggacttagaatatagctggca

SEQ ID NO: 2347917 - DNA, 25 bp, Homo sapien
aaatgccggctatgtgtgagacctg

SEQ ID NO: 2347918 - DNA, 25 bp, Homo sapien
caggtcaggtcatctaagccatgtg

SEQ ID NO: 2347919 - DNA, 25 bp, Homo sapien
ccagactgtcagtgtttgaacctca

SEQ ID NO: 2347920 - DNA, 25 bp, Homo sapien
gacaggaccctagtgattagaagca

SEQ ID NO: 2347921 - DNA, 25 bp, Homo sapien
ccaggtaggctgctcttacagacca

SEQ ID NO: 2347922 - DNA, 25 bp, Homo sapien
tacagaccagctagtgtgacagtca

SEQ ID NO: 2347923 - DNA, 25 bp, Homo sapien
tagagactttgaccttcctgtacct

SEQ ID NO: 2347924 - DNA, 25 bp, Homo sapien
tcttgaagttagctaccaggtaggc

SEQ ID NO: 2347925 - DNA, 25 bp, Homo sapien
ttgaatccatagatacaaagggcca

SEQ ID NO: 2347926 - DNA, 25 bp, Homo sapien
cagtgaacatgaaagtgtagctatc

SEQ ID NO: 2347927 - DNA, 25 bp, Homo sapien
aactaacctttgcattctgtgacca

SEQ ID NO: 2347928 - DNA, 25 bp, Homo sapien
gatatactgactccacttcttctgg

SEQ ID NO: 2347929 - DNA, 25 bp, Homo sapien
acagcactctacgagcacttaaaat

SEQ ID NO: 2347930 - DNA, 25 bp, Homo sapien
cactctacgagcacttaaaatgtta

SEQ ID NO: 2347931 - DNA, 25 bp, Homo sapien
ttatattccttaggggattgagaac

SEQ ID NO: 2347932 - DNA, 25 bp, Homo sapien
gataccttttagagcccacagcact

SEQ ID NO: 2347933 - DNA, 25 bp, Homo sapien
tgctaaaaggctggcaactacatcc

SEQ ID NO: 2347934 - DNA, 25 bp, Homo sapien
gattctgtccaatttaaccaaggcc

SEQ ID NO: 2347935 - DNA, 25 bp, Homo sapien
cctgtatggtgcacttgcctgaaaa

SEQ ID NO: 2347936 - DNA, 25 bp, Homo sapien
aactacatcctcagttacgggacca

SEQ ID NO: 2347937 - DNA, 25 bp, Homo sapien
cttcaggccctgtgaataagtggct

SEQ ID NO: 2347938 - DNA, 25 bp, Homo sapien
ccttcaagacatatttggctctcca

SEQ ID NO: 2347939 - DNA, 25 bp, Homo sapien
gcacactcatttcatgttgctcctc

SEQ ID NO: 2347940 - DNA, 25 bp, Homo sapien
cagggagaagagtaaaggtaacaca

SEQ ID NO: 2347941 - DNA, 25 bp, Homo sapien
ggagtcacattttcacgctcaatgg

SEQ ID NO: 2347942 - DNA, 25 bp, Homo sapien
tatccccaggttctgtatatgcaga

SEQ ID NO: 2347943 - DNA, 25 bp, Homo sapien
aatgtgtatgatatagtcagccctc

SEQ ID NO: 2347944 - DNA, 25 bp, Homo sapien
aaccaatacccctcggacactgagg

SEQ ID NO: 2347945 - DNA, 25 bp, Homo sapien
taagaacgtcatcaatacagtgctg

SEQ ID NO: 2347946 - DNA, 25 bp, Homo sapien
gcatatagtaacacgcaagttctgt

SEQ ID NO: 2347947 - DNA, 25 bp, Homo sapien
tggtgatgaggaggcacatccagaa

SEQ ID NO: 2347948 - DNA, 25 bp, Homo sapien
agaaaaacacagtctacctccagga

SEQ ID NO: 2347949 - DNA, 25 bp, Homo sapien
ttgactcgtttcaccaatgaacatg

SEQ ID NO: 2347950 - DNA, 25 bp, Homo sapien
tcataaaggtcttgcccaatttctg

SEQ ID NO: 2347951 - DNA, 25 bp, Homo sapien
caaaaagtgatattgacgtatttac

SEQ ID NO: 2347952 - DNA, 25 bp, Homo sapien
tatgtgccttagttaagtttggaag

SEQ ID NO: 2347953 - DNA, 25 bp, Homo sapien
cagtcattgaaatagaagcctggca

SEQ ID NO: 2347954 - DNA, 25 bp, Homo sapien
tggcaattcttggactaacatgtgg

SEQ ID NO: 2347955 - DNA, 25 bp, Homo sapien
tactgattgggcaaagaggacttcc

SEQ ID NO: 2347956 - DNA, 25 bp, Homo sapien
gaggacttccttgtatctatggaga

SEQ ID NO: 2347957 - DNA, 25 bp, Homo sapien
aaacgactaagtggtagagcctgga

SEQ ID NO: 2347958 - DNA, 25 bp, Homo sapien
aatggcctttagaacgatctgcaac

SEQ ID NO: 2347959 - DNA, 25 bp, Homo sapien
caaatggagctcataactctgcgcc

SEQ ID NO: 2347960 - DNA, 25 bp, Homo sapien
tcttaactgctacacaagagttcca

SEQ ID NO: 2347961 - DNA, 25 bp, Homo sapien
cccaggaactcaatgtcacagcatc

SEQ ID NO: 2347962 - DNA, 25 bp, Homo sapien
cttcttcttcctcatacactagtct

SEQ ID NO: 2347963 - DNA, 25 bp, Homo sapien
actcaatgtcacagcatcaccaatg

SEQ ID NO: 2347964 - DNA, 25 bp, Homo sapien
cagcagctattccagacggctgggt

SEQ ID NO: 2347965 - DNA, 25 bp, Homo sapien
taacctaggtgtctctggttctaga

SEQ ID NO: 2347966 - DNA, 25 bp, Homo sapien
agatgtgcctggtgcttgctatgca

SEQ ID NO: 2347967 - DNA, 25 bp, Homo sapien
cacaaccagcttgctatgcacttta

SEQ ID NO: 2347968 - DNA, 25 bp, Homo sapien
ggcctcctactagatggaaatacag

SEQ ID NO: 2347969 - DNA, 25 bp, Homo sapien
tgtcaacaggcttcaaaaaggcaga

SEQ ID NO: 2347970 - DNA, 25 bp, Homo sapien
tcatggaagaattccacaaagggtt

SEQ ID NO: 2347971 - DNA, 25 bp, Homo sapien
cattcttcggccagtccttcctttt

SEQ ID NO: 2347972 - DNA, 25 bp, Homo sapien
cacagtctgacacttttggcccttc

SEQ ID NO: 2347973 - DNA, 25 bp, Homo sapien
gggtagacttcataacagagtgggc

SEQ ID NO: 2347974 - DNA, 25 bp, Homo sapien
agtttttattaagggctggcgtgtg

SEQ ID NO: 2347975 - DNA, 25 bp, Homo sapien
tccaagagaaggatttgctttggtc

SEQ ID NO: 2347976 - DNA, 25 bp, Homo sapien
tcagtgttgctgcagtcccagtgaa

SEQ ID NO: 2347977 - DNA, 25 bp, Homo sapien
ttcagcacagagtgtattccacttt

SEQ ID NO: 2347978 - DNA, 25 bp, Homo sapien
tcttcagcacagagtgtattccact

SEQ ID NO: 2347979 - DNA, 25 bp, Homo sapien
cacagagtgtattccactttcctgt

SEQ ID NO: 2347980 - DNA, 25 bp, Homo sapien
cagcacagagtgtattccactttcc

SEQ ID NO: 2347981 - DNA, 25 bp, Homo sapien
aatggtatagactgcttcgaaaagc

SEQ ID NO: 2347982 - DNA, 25 bp, Homo sapien
taattacggctctccagcaatggta

SEQ ID NO: 2347983 - DNA, 25 bp, Homo sapien
tgaactgagttggacccactgcact

SEQ ID NO: 2347984 - DNA, 25 bp, Homo sapien
tagaatcccatagaaaaattggcct

SEQ ID NO: 2347985 - DNA, 25 bp, Homo sapien
tccacgtcccattcccacataatct

SEQ ID NO: 2347986 - DNA, 25 bp, Homo sapien
gaatggccaatcttcttggaccact

SEQ ID NO: 2347987 - DNA, 25 bp, Homo sapien
caatcttcttggaccactctgtgtg

SEQ ID NO: 2347988 - DNA, 25 bp, Homo sapien
gaaagaatggccaatcttcttggac

SEQ ID NO: 2347989 - DNA, 25 bp, Homo sapien
aatgaggtcccagcgggaatgaagt

SEQ ID NO: 2347990 - DNA, 25 bp, Homo sapien
aaagccatgctttaccctccactgg

SEQ ID NO: 2347991 - DNA, 25 bp, Homo sapien
aagtcccaggaatgggaatggtcat

SEQ ID NO: 2347992 - DNA, 25 bp, Homo sapien
accgtcagcaaaagccatgctttac

SEQ ID NO: 2347993 - DNA, 25 bp, Homo sapien
gggatcctgagctctcatagcttaa

SEQ ID NO: 2347994 - DNA, 25 bp, Homo sapien
aatatgtgtccaagtgcctcataac

SEQ ID NO: 2347995 - DNA, 25 bp, Homo sapien
gcctcataactgctaaccacaggga

SEQ ID NO: 2347996 - DNA, 25 bp, Homo sapien
taaaagggcctatagcctcagtagt

SEQ ID NO: 2347997 - DNA, 25 bp, Homo sapien
gacatttccttaacggatagacttc

SEQ ID NO: 2347998 - DNA, 25 bp, Homo sapien
ggagcaaatccaaccatgataacag

SEQ ID NO: 2347999 - DNA, 25 bp, Homo sapien
caatgaggattaactgacatttcct

SEQ ID NO: 2348000 - DNA, 25 bp, Homo sapien
aacagcagcaatgaggattaactga

SEQ ID NO: 2348001 - DNA, 25 bp, Homo sapien
tgtggtggggaggcttcacaatcat

SEQ ID NO: 2348002 - DNA, 25 bp, Homo sapien
tccatgtggtggggaggcttcacaa

SEQ ID NO: 2348003 - DNA, 25 bp, Homo sapien
gtggtggggaggcttcacaatcatg

SEQ ID NO: 2348004 - DNA, 25 bp, Homo sapien
catgtggtggggaggcttcacaatc

SEQ ID NO: 2348005 - DNA, 25 bp, Homo sapien
gttgtcattcaactcgtgcgcatgt

SEQ ID NO: 2348006 - DNA, 25 bp, Homo sapien
tttccctcgcgctctgaatcatcaa

SEQ ID NO: 2348007 - DNA, 25 bp, Homo sapien
tatgtcctaatcacgcacaaagact

SEQ ID NO: 2348008 - DNA, 25 bp, Homo sapien
tgcgcatgtgccagaatcccttgct

SEQ ID NO: 2348009 - DNA, 25 bp, Homo sapien
ttaaaactcacaataccaccaactc

SEQ ID NO: 2348010 - DNA, 25 bp, Homo sapien
taagtgcttctaaatagataaggac

SEQ ID NO: 2348011 - DNA, 25 bp, Homo sapien
ccttagtaacatgtaataaacagag

SEQ ID NO: 2348012 - DNA, 25 bp, Homo sapien
tccaaacaagattcatacctgcatt

SEQ ID NO: 2348013 - DNA, 25 bp, Homo sapien
tggtacatttgctaaggaggtgctc

SEQ ID NO: 2348014 - DNA, 25 bp, Homo sapien
gagcgtacacacattccaatggtca

SEQ ID NO: 2348015 - DNA, 25 bp, Homo sapien
tataagaggtttctcccttcgctgg

SEQ ID NO: 2348016 - DNA, 25 bp, Homo sapien
ttctaacaagggtccagtggtacat

SEQ ID NO: 2348017 - DNA, 25 bp, Homo sapien
ggaggcaagctacacacattctgaa

SEQ ID NO: 2348018 - DNA, 25 bp, Homo sapien
cagaggcagtacgaacacacagttt

SEQ ID NO: 2348019 - DNA, 25 bp, Homo sapien
cctgttcaggaaaagtggatggacc

SEQ ID NO: 2348020 - DNA, 25 bp, Homo sapien
tctttctgcggctataggttccaca

SEQ ID NO: 2348021 - DNA, 25 bp, Homo sapien
ctgaagaactgttctggtttttcaa

SEQ ID NO: 2348022 - DNA, 25 bp, Homo sapien
tttcaaatttattataatcctccat

SEQ ID NO: 2348023 - DNA, 25 bp, Homo sapien
ttttcaaatttattataatcctcca

SEQ ID NO: 2348024 - DNA, 25 bp, Homo sapien
tgaagaactgttctggtttttcaaa

SEQ ID NO: 2348025 - DNA, 25 bp, Homo sapien
gttcataaagaatgatcctgacaaa

SEQ ID NO: 2348026 - DNA, 25 bp, Homo sapien
atggtagttcataaagaatgatcct

SEQ ID NO: 2348027 - DNA, 25 bp, Homo sapien
cataaagaatgatcctgacaaaaga

SEQ ID NO: 2348028 - DNA, 25 bp, Homo sapien
gtagttcataaagaatgatcctgac

SEQ ID NO: 2348029 - DNA, 25 bp, Homo sapien
tgtgaatgaacgcatctccaagttc

SEQ ID NO: 2348030 - DNA, 25 bp, Homo sapien
tgatgtgaatgaacgcatctccaag

SEQ ID NO: 2348031 - DNA, 25 bp, Homo sapien
actgtgatgtgaatgaacgcatctc

SEQ ID NO: 2348032 - DNA, 25 bp, Homo sapien
gaatgaacgcatctccaagttcacc

SEQ ID NO: 2348033 - DNA, 25 bp, Homo sapien
gactgacaggctttatgtacctcct

SEQ ID NO: 2348034 - DNA, 25 bp, Homo sapien
ggtatggttgaaagtctacagcacc

SEQ ID NO: 2348035 - DNA, 25 bp, Homo sapien
catatcacttgccaatgtaggtggg

SEQ ID NO: 2348036 - DNA, 25 bp, Homo sapien
tagattcaacgactagcttacagga

SEQ ID NO: 2348037 - DNA, 25 bp, Homo sapien
ggaagtagccatgaccagttggcca

SEQ ID NO: 2348038 - DNA, 25 bp, Homo sapien
gaacagtggaatattgtcccatccc

SEQ ID NO: 2348039 - DNA, 25 bp, Homo sapien
cctcttgagcttgcactagatgaga

SEQ ID NO: 2348040 - DNA, 25 bp, Homo sapien
cattgggatatgcagcttgtggcct

SEQ ID NO: 2348041 - DNA, 25 bp, Homo sapien
gaaaggctggctattggaagacatc

SEQ ID NO: 2348042 - DNA, 25 bp, Homo sapien
gctgcacccacaaaagtaccttggt

SEQ ID NO: 2348043 - DNA, 25 bp, Homo sapien
tccagagaaaccttttacacagagg

SEQ ID NO: 2348044 - DNA, 25 bp, Homo sapien
cccagtaactgagatgctgcaccca

SEQ ID NO: 2348045 - DNA, 25 bp, Homo sapien
taagatggcctcaactacagtagat

SEQ ID NO: 2348046 - DNA, 25 bp, Homo sapien
cagcaacagtgggtcaaatcatcac

SEQ ID NO: 2348047 - DNA, 25 bp, Homo sapien
taaggactcaggcatgaacatctcg

SEQ ID NO: 2348048 - DNA, 25 bp, Homo sapien
catctcggtgggagggacattagtc

SEQ ID NO: 2348049 - DNA, 25 bp, Homo sapien
gatgagtacaccatgactccggcag

SEQ ID NO: 2348050 - DNA, 25 bp, Homo sapien
agccacatttcaacagtagaggagg

SEQ ID NO: 2348051 - DNA, 25 bp, Homo sapien
taatggtgtcactagccaagggcct

SEQ ID NO: 2348052 - DNA, 25 bp, Homo sapien
tatttaagctaccaaggaacatcct

SEQ ID NO: 2348053 - DNA, 25 bp, Homo sapien
ttctcggtgtaaggctgaaatctgt

SEQ ID NO: 2348054 - DNA, 25 bp, Homo sapien
tcagtacacaaagataagtggtgcc

SEQ ID NO: 2348055 - DNA, 25 bp, Homo sapien
ggcaacatgatttggtcttcagaat

SEQ ID NO: 2348056 - DNA, 25 bp, Homo sapien
taaccccagcaaggaagtaactgtg

SEQ ID NO: 2348057 - DNA, 25 bp, Homo sapien
ttatttatttatacacacaaaacac

SEQ ID NO: 2348058 - DNA, 25 bp, Homo sapien
tttatttatacacacaaaacactgt

SEQ ID NO: 2348059 - DNA, 25 bp, Homo sapien
ttatacacacaaaacactgttcttt

SEQ ID NO: 2348060 - DNA, 25 bp, Homo sapien
tatttatacacacaaaacactgttc

SEQ ID NO: 2348061 - DNA, 25 bp, Homo sapien
ttttttgagactgatttgcgctctt

SEQ ID NO: 2348062 - DNA, 25 bp, Homo sapien
gtacaatcttggctcaccggaacct

SEQ ID NO: 2348063 - DNA, 25 bp, Homo sapien
tatatttttagtagagatggggctt

SEQ ID NO: 2348064 - DNA, 25 bp, Homo sapien
gaacctctgcctccagggttcaagc

SEQ ID NO: 2348065 - DNA, 25 bp, Homo sapien
cagtataccgccttttggactggct

SEQ ID NO: 2348066 - DNA, 25 bp, Homo sapien
ttccccgaaggcctggcaatcactg

SEQ ID NO: 2348067 - DNA, 25 bp, Homo sapien
gccagttagtcagttagtttataca

SEQ ID NO: 2348068 - DNA, 25 bp, Homo sapien
gggttccttcttcgtgtacaacaca

SEQ ID NO: 2348069 - DNA, 25 bp, Homo sapien
ggccctggactcttaactattctca

SEQ ID NO: 2348070 - DNA, 25 bp, Homo sapien
gtctacagcccacaccaaagcatgg

SEQ ID NO: 2348071 - DNA, 25 bp, Homo sapien
tactttatggctggcattgtcccag

SEQ ID NO: 2348072 - DNA, 25 bp, Homo sapien
ggactcggacaaccatctctactgc

SEQ ID NO: 2348073 - DNA, 25 bp, Homo sapien
caagttaaattacaatcgggctgga

SEQ ID NO: 2348074 - DNA, 25 bp, Homo sapien
tactttcagaccctcggcctttgct

SEQ ID NO: 2348075 - DNA, 25 bp, Homo sapien
ccacttgaaccttgtgtactctggg

SEQ ID NO: 2348076 - DNA, 25 bp, Homo sapien
gattctaggattcgtgatgaaggca

SEQ ID NO: 2348077 - DNA, 25 bp, Homo sapien
tatatagaaaacatagtcggattcc

SEQ ID NO: 2348078 - DNA, 25 bp, Homo sapien
tatagaaaacatagtcggattcctt

SEQ ID NO: 2348079 - DNA, 25 bp, Homo sapien
atagaaaacatagtcggattccttg

SEQ ID NO: 2348080 - DNA, 25 bp, Homo sapien
atatagaaaacatagtcggattcct

SEQ ID NO: 2348081 - DNA, 25 bp, Homo sapien
ttcagtatgtggatactctgcttga

SEQ ID NO: 2348082 - DNA, 25 bp, Homo sapien
tgtgtatttcagtatgtggatactc

SEQ ID NO: 2348083 - DNA, 25 bp, Homo sapien
gtatttcagtatgtggatactctgc

SEQ ID NO: 2348084 - DNA, 25 bp, Homo sapien
tatgtggatactctgcttgattgca

SEQ ID NO: 2348085 - DNA, 25 bp, Homo sapien
tagatagccctactctagaatcagc

SEQ ID NO: 2348086 - DNA, 25 bp, Homo sapien
cacatatgtggctccaattggtggc

SEQ ID NO: 2348087 - DNA, 25 bp, Homo sapien
tgacaccagggcaagctaactagct

SEQ ID NO: 2348088 - DNA, 25 bp, Homo sapien
ttcacaggagtgagcagtgacacca

SEQ ID NO: 2348089 - DNA, 25 bp, Homo sapien
tactggccttgtagctagaaatgtc

SEQ ID NO: 2348090 - DNA, 25 bp, Homo sapien
ttttatctgtcacaaccttaattaa

SEQ ID NO: 2348091 - DNA, 25 bp, Homo sapien
gaattggctaattgttctttcttgc

SEQ ID NO: 2348092 - DNA, 25 bp, Homo sapien
tgctgctgatcttcgccagtgcggt

SEQ ID NO: 2348093 - DNA, 25 bp, Homo sapien
tttctatatcaaggtgccctgcagg

SEQ ID NO: 2348094 - DNA, 25 bp, Homo sapien
tctaccttgaatgactgggtggctg

SEQ ID NO: 2348095 - DNA, 25 bp, Homo sapien
ccaagatggcaagctagaaagttcc

SEQ ID NO: 2348096 - DNA, 25 bp, Homo sapien
tgaacatgtgaagcatgagatgcct

SEQ ID NO: 2348097 - DNA, 25 bp, Homo sapien
tgttccccaaggcaaatgacaaatt

SEQ ID NO: 2348098 - DNA, 25 bp, Homo sapien
tctggctgtccacagtaattctaag

SEQ ID NO: 2348099 - DNA, 25 bp, Homo sapien
tgtccacagtaattctaagggagtg

SEQ ID NO: 2348100 - DNA, 25 bp, Homo sapien
acagtaattctaagggagtggcagg

SEQ ID NO: 2348101 - DNA, 25 bp, Homo sapien
tgattttgcctcttgattggtgaaa

SEQ ID NO: 2348102 - DNA, 25 bp, Homo sapien
ttgcctcttgattggtgaaagccat

SEQ ID NO: 2348103 - DNA, 25 bp, Homo sapien
caggctctgagactgtggttgattt

SEQ ID NO: 2348104 - DNA, 25 bp, Homo sapien
attttgcctcttgattggtgaaagc

SEQ ID NO: 2348105 - DNA, 25 bp, Homo sapien
tctaaagacaacaggaagatttttc

SEQ ID NO: 2348106 - DNA, 25 bp, Homo sapien
cctctaaagacaacaggaagatttt

SEQ ID NO: 2348107 - DNA, 25 bp, Homo sapien
cctcctctaaagacaacaggaagat

SEQ ID NO: 2348108 - DNA, 25 bp, Homo sapien
aagacaacaggaagatttttccatc

SEQ ID NO: 2348109 - DNA, 25 bp, Homo sapien
gcaatggattcacacttcaagtaaa

SEQ ID NO: 2348110 - DNA, 25 bp, Homo sapien
ctttggctggaagaacttagtggca

SEQ ID NO: 2348111 - DNA, 25 bp, Homo sapien
taaataaatgcctgaactgaagagg

SEQ ID NO: 2348112 - DNA, 25 bp, Homo sapien
gttagacacgatgagaacagcaatg

SEQ ID NO: 2348113 - DNA, 25 bp, Homo sapien
tctccacttctgcgtgaaccacagg

SEQ ID NO: 2348114 - DNA, 25 bp, Homo sapien
tatctccacttctgcgtgaaccaca

SEQ ID NO: 2348115 - DNA, 25 bp, Homo sapien
acttctgcgtgaaccacaggcaagg

SEQ ID NO: 2348116 - DNA, 25 bp, Homo sapien
ttatctccacttctgcgtgaaccac

SEQ ID NO: 2348117 - DNA, 25 bp, Homo sapien
gttgccgatatgcctgtcttcctct

SEQ ID NO: 2348118 - DNA, 25 bp, Homo sapien
gggaagacaaaaccatcagggagat

SEQ ID NO: 2348119 - DNA, 25 bp, Homo sapien
ggaagacaaaaccatcagggagatg

SEQ ID NO: 2348120 - DNA, 25 bp, Homo sapien
tgttgccgatatgcctgtcttcctc

SEQ ID NO: 2348121 - DNA, 25 bp, Homo sapien
ctggttcagcgatgtttgctgtgtg

SEQ ID NO: 2348122 - DNA, 25 bp, Homo sapien
gtgtgaagatggtgatactctgaaa

SEQ ID NO: 2348123 - DNA, 25 bp, Homo sapien
cagcgatgtttgctgtgtgaagatg

SEQ ID NO: 2348124 - DNA, 25 bp, Homo sapien
tgtgaagatggtgatactctgaaag

SEQ ID NO: 2348125 - DNA, 25 bp, Homo sapien
caggcacaggttaatgtgcctggca

SEQ ID NO: 2348126 - DNA, 25 bp, Homo sapien
tatcgagtccatggaaggtcaacaa

SEQ ID NO: 2348127 - DNA, 25 bp, Homo sapien
tactacctagccgtatagcttggga

SEQ ID NO: 2348128 - DNA, 25 bp, Homo sapien
gcttgggataagtcatttggcctct

SEQ ID NO: 2348129 - DNA, 25 bp, Homo sapien
taaagatcacacatggaaaccgccc

SEQ ID NO: 2348130 - DNA, 25 bp, Homo sapien
tctccactagctgtctgtttgactt

SEQ ID NO: 2348131 - DNA, 25 bp, Homo sapien
tccactagctgtctgtttgacttca

SEQ ID NO: 2348132 - DNA, 25 bp, Homo sapien
catctccactagctgtctgtttgac

SEQ ID NO: 2348133 - DNA, 25 bp, Homo sapien
ccactagctgtctgtttgacttcat

SEQ ID NO: 2348134 - DNA, 25 bp, Homo sapien
tcccatattgatctgtattaggagg

SEQ ID NO: 2348135 - DNA, 25 bp, Homo sapien
cttcccatattgatctgtattagga

SEQ ID NO: 2348136 - DNA, 25 bp, Homo sapien
ttcccatattgatctgtattaggag

SEQ ID NO: 2348137 - DNA, 25 bp, Homo sapien
ctaagaggccatagggtagcaggaa

SEQ ID NO: 2348138 - DNA, 25 bp, Homo sapien
ggtttgttcatagcagaggccacaa

SEQ ID NO: 2348139 - DNA, 25 bp, Homo sapien
tggagttaccgttctggcagagccc

SEQ ID NO: 2348140 - DNA, 25 bp, Homo sapien
gacggggcaacgaggaaatctgacc

SEQ ID NO: 2348141 - DNA, 25 bp, Homo sapien
aaacagctaccctcgccgatgaggt

SEQ ID NO: 2348142 - DNA, 25 bp, Homo sapien
caggaaaggcacgtgctagaggaca

SEQ ID NO: 2348143 - DNA, 25 bp, Homo sapien
gttgaacttgaaatattaccgagaa

SEQ ID NO: 2348144 - DNA, 25 bp, Homo sapien
gaaaacgtgtagctgctaacagaag

SEQ ID NO: 2348145 - DNA, 25 bp, Homo sapien
tcacttctatcccttttactcaagg

SEQ ID NO: 2348146 - DNA, 25 bp, Homo sapien
tcgtacatgctgctttgtaacaggc

SEQ ID NO: 2348147 - DNA, 25 bp, Homo sapien
ggaattcaagaatggctgcacagac

SEQ ID NO: 2348148 - DNA, 25 bp, Homo sapien
ctgggggaattcaagaatggctgca

SEQ ID NO: 2348149 - DNA, 25 bp, Homo sapien
acctcctgggttgaagtgattctcc

SEQ ID NO: 2348150 - DNA, 25 bp, Homo sapien
gcatgatgttggctcactacaaact

SEQ ID NO: 2348151 - DNA, 25 bp, Homo sapien
gtgattctcctgtttcagcctccca

SEQ ID NO: 2348152 - DNA, 25 bp, Homo sapien
gcaactgccaccatgcccagctaat

SEQ ID NO: 2348153 - DNA, 25 bp, Homo sapien
aagcgctgccgccaacggatgaagg

SEQ ID NO: 2348154 - DNA, 25 bp, Homo sapien
caccacctgcgactgcacgttgtgg

SEQ ID NO: 2348155 - DNA, 25 bp, Homo sapien
tctgggccagctggttaatctgccg

SEQ ID NO: 2348156 - DNA, 25 bp, Homo sapien
tagatatccgtctgggacagtccca

SEQ ID NO: 2348157 - DNA, 25 bp, Homo sapien
aatagtaaagtccacagttcagtcc

SEQ ID NO: 2348158 - DNA, 25 bp, Homo sapien
gttttacatatgagacacctgcctg

SEQ ID NO: 2348159 - DNA, 25 bp, Homo sapien
gttcagtcctcagacaacattcagg

SEQ ID NO: 2348160 - DNA, 25 bp, Homo sapien
tgttgagccaacatgggagatctgc

SEQ ID NO: 2348161 - DNA, 25 bp, Homo sapien
cacattaaggcctcccaaagagacc

SEQ ID NO: 2348162 - DNA, 25 bp, Homo sapien
ggccaacttaattgctccctctgtg

SEQ ID NO: 2348163 - DNA, 25 bp, Homo sapien
aacttgaagcctgatcttgatccca

SEQ ID NO: 2348164 - DNA, 25 bp, Homo sapien
ggcaggacttacaaaagctcagttg

SEQ ID NO: 2348165 - DNA, 25 bp, Homo sapien
taaatgccaacaagatagacatccc

SEQ ID NO: 2348166 - DNA, 25 bp, Homo sapien
gaatatgtgggagttttagaggaaa

SEQ ID NO: 2348167 - DNA, 25 bp, Homo sapien
catccctgttcttctaagctttgtt

SEQ ID NO: 2348168 - DNA, 25 bp, Homo sapien
tgcataagtttaatagacaaggctt

SEQ ID NO: 2348169 - DNA, 25 bp, Homo sapien
actctgaagtaagacccacctccgt

SEQ ID NO: 2348170 - DNA, 25 bp, Homo sapien
caatagataacagacagccaaaggg

SEQ ID NO: 2348171 - DNA, 25 bp, Homo sapien
cgtccttcgtcatgctcccataaga

SEQ ID NO: 2348172 - DNA, 25 bp, Homo sapien
tactaatgaatgtcctcctatggca

SEQ ID NO: 2348173 - DNA, 25 bp, Homo sapien
cagggacagtcatgtggaaatgtga

SEQ ID NO: 2348174 - DNA, 25 bp, Homo sapien
tatagcaaacaggtaactgggtgtg

SEQ ID NO: 2348175 - DNA, 25 bp, Homo sapien
tgccccactgtgcatgtaaagacag

SEQ ID NO: 2348176 - DNA, 25 bp, Homo sapien
acaatcaggcatttatggaagcata

SEQ ID NO: 2348177 - DNA, 25 bp, Homo sapien
gcagaaagtccctggtgagaggtca

SEQ ID NO: 2348178 - DNA, 25 bp, Homo sapien
tataaggtgctcatggaagcaagac

SEQ ID NO: 2348179 - DNA, 25 bp, Homo sapien
tctctagttagaagttagctggcag

SEQ ID NO: 2348180 - DNA, 25 bp, Homo sapien
tagcaaccaaaggtgctgaaggtga

SEQ ID NO: 2348181 - DNA, 25 bp, Homo sapien
tacagcgaactttctttctactgtg

SEQ ID NO: 2348182 - DNA, 25 bp, Homo sapien
atgttgccttggaattatcctcggg

SEQ ID NO: 2348183 - DNA, 25 bp, Homo sapien
gtggtgtcatgtcgctttgattact

SEQ ID NO: 2348184 - DNA, 25 bp, Homo sapien
ttaactcctattccctacagcgaac

SEQ ID NO: 2348185 - DNA, 25 bp, Homo sapien
gagacagtcctttcgaagcatggta

SEQ ID NO: 2348186 - DNA, 25 bp, Homo sapien
gcttgggagcaaccgaaaggcagaa

SEQ ID NO: 2348187 - DNA, 25 bp, Homo sapien
tatcagaggttgacagtgtagctac

SEQ ID NO: 2348188 - DNA, 25 bp, Homo sapien
cctaagggtggctaaacaagctgcc

SEQ ID NO: 2348189 - DNA, 25 bp, Homo sapien
ttgtaactgcatatgtggagtgagg

SEQ ID NO: 2348190 - DNA, 25 bp, Homo sapien
cttctcttctgcacatgcttgtaac

SEQ ID NO: 2348191 - DNA, 25 bp, Homo sapien
gagtgagggagccaattcttttgaa

SEQ ID NO: 2348192 - DNA, 25 bp, Homo sapien
acatgcttgtaactgcatatgtgga

SEQ ID NO: 2348193 - DNA, 25 bp, Homo sapien
gtacagtggcacagactcagctcac

SEQ ID NO: 2348194 - DNA, 25 bp, Homo sapien
tacagtggcacagactcagctcact

SEQ ID NO: 2348195 - DNA, 25 bp, Homo sapien
ggagtaattataggacccaacatgc

SEQ ID NO: 2348196 - DNA, 25 bp, Homo sapien
tgaagtactgtggtaggatcctagc

SEQ ID NO: 2348197 - DNA, 25 bp, Homo sapien
gcctaggacttctgggcttaacaga

SEQ ID NO: 2348198 - DNA, 25 bp, Homo sapien
tagacactacaggttgctgaataag

SEQ ID NO: 2348199 - DNA, 25 bp, Homo sapien
aaccctcgcttggccaagtgtccag

SEQ ID NO: 2348200 - DNA, 25 bp, Homo sapien
ctcgcttggccaagtgtccagagac

SEQ ID NO: 2348201 - DNA, 25 bp, Homo sapien
ggcccttcctctgagacccgctggg

SEQ ID NO: 2348202 - DNA, 25 bp, Homo sapien
atggagccacggcccttcctctgag

SEQ ID NO: 2348203 - DNA, 25 bp, Homo sapien
catggcaccatgatttccggggtca

SEQ ID NO: 2348204 - DNA, 25 bp, Homo sapien
atggcaccatgatttccggggtcag

SEQ ID NO: 2348205 - DNA, 25 bp, Homo sapien
ccatggcaccatgatttccggggtc

SEQ ID NO: 2348206 - DNA, 25 bp, Homo sapien
agaagagcaggggtctttgtgcaca

SEQ ID NO: 2348207 - DNA, 25 bp, Homo sapien
agcaggggtctttgtgcacaacgta

SEQ ID NO: 2348208 - DNA, 25 bp, Homo sapien
agagcaggggtctttgtgcacaacg

SEQ ID NO: 2348209 - DNA, 25 bp, Homo sapien
gacagaagagcaggggtctttgtgc

SEQ ID NO: 2348210 - DNA, 25 bp, Homo sapien
gtaaagcagcgtgagcaaagaagcc

SEQ ID NO: 2348211 - DNA, 25 bp, Homo sapien
ggcctccttgaaggagctcggtaaa

SEQ ID NO: 2348212 - DNA, 25 bp, Homo sapien
tcagcacacacttgactttggcttt

SEQ ID NO: 2348213 - DNA, 25 bp, Homo sapien
gagctcggtaaagcagcgtgagcaa

SEQ ID NO: 2348214 - DNA, 25 bp, Homo sapien
aaaaaggaagagccgagtcctggag

SEQ ID NO: 2348215 - DNA, 25 bp, Homo sapien
ggaggacagggctacatgtgtccct

SEQ ID NO: 2348216 - DNA, 25 bp, Homo sapien
gcacagcctgtgttctttcggaaga

SEQ ID NO: 2348217 - DNA, 25 bp, Homo sapien
ggaccttgtcaagcaccaggcggct

SEQ ID NO: 2348218 - DNA, 25 bp, Homo sapien
acacaaaggaaactggtaacctgag

SEQ ID NO: 2348219 - DNA, 25 bp, Homo sapien
tctcctgttcacactggcagaaaaa

SEQ ID NO: 2348220 - DNA, 25 bp, Homo sapien
caaaggaaactggtaacctgagctc

SEQ ID NO: 2348221 - DNA, 25 bp, Homo sapien
taatatttctcctgttcacactggc

SEQ ID NO: 2348222 - DNA, 25 bp, Homo sapien
tcaacaccctaggaattgtgtccgt

SEQ ID NO: 2348223 - DNA, 25 bp, Homo sapien
tggtaaggaaccaccacagccctat

SEQ ID NO: 2348224 - DNA, 25 bp, Homo sapien
tgtgtccgtccaatgaacaaacaga

SEQ ID NO: 2348225 - DNA, 25 bp, Homo sapien
ccgtgtctgcctgaggttaatgtac

SEQ ID NO: 2348226 - DNA, 25 bp, Homo sapien
tgcaattgctctggactgctgagct

SEQ ID NO: 2348227 - DNA, 25 bp, Homo sapien
tgctaaatgaagacaggcgccctgt

SEQ ID NO: 2348228 - DNA, 25 bp, Homo sapien
tgggcctctgtggaacttgcttcct

SEQ ID NO: 2348229 - DNA, 25 bp, Homo sapien
cagtggctttaactcttgtggcagc

SEQ ID NO: 2348230 - DNA, 25 bp, Homo sapien
ggaggaccgccatccttattgaatg

SEQ ID NO: 2348231 - DNA, 25 bp, Homo sapien
tctggaaatgttcaataggccatct

SEQ ID NO: 2348232 - DNA, 25 bp, Homo sapien
tgggaagtcccatgagaaccgctcc

SEQ ID NO: 2348233 - DNA, 25 bp, Homo sapien
tttccaagaaagcagttgacgggct

SEQ ID NO: 2348234 - DNA, 25 bp, Homo sapien
caaagagtggcctgaaaagttgagc

SEQ ID NO: 2348235 - DNA, 25 bp, Homo sapien
tgtgcatttcaccatggaaccggaa

SEQ ID NO: 2348236 - DNA, 25 bp, Homo sapien
cagtttgagcacatgtcaggtagca

SEQ ID NO: 2348237 - DNA, 25 bp, Homo sapien
gggtagccatcttcttcgcacgtta

SEQ ID NO: 2348238 - DNA, 25 bp, Homo sapien
agaattgtggcagccaaatccattt

SEQ ID NO: 2348239 - DNA, 25 bp, Homo sapien
gatcccaatttttcgaaaatcctca

SEQ ID NO: 2348240 - DNA, 25 bp, Homo sapien
ttcaaagaattgtggcagccaaatc

SEQ ID NO: 2348241 - DNA, 25 bp, Homo sapien
aatcctcaatccatgaatgacagca

SEQ ID NO: 2348242 - DNA, 25 bp, Homo sapien
gctggtggtcatacaatcatctaga

SEQ ID NO: 2348243 - DNA, 25 bp, Homo sapien
aatccactcagtcaacccaagaggg

SEQ ID NO: 2348244 - DNA, 25 bp, Homo sapien
tcaaggatgcctgggaaatgtaatc

SEQ ID NO: 2348245 - DNA, 25 bp, Homo sapien
tcgaccagccaaactagtcacatgg

SEQ ID NO: 2348246 - DNA, 25 bp, Homo sapien
tcacattcttatactgttggatgat

SEQ ID NO: 2348247 - DNA, 25 bp, Homo sapien
tccacccatctctttacccaacgtg

SEQ ID NO: 2348248 - DNA, 25 bp, Homo sapien
atctctttacccaacgtgcaccctg

SEQ ID NO: 2348249 - DNA, 25 bp, Homo sapien
acccatctctttacccaacgtgcac

SEQ ID NO: 2348250 - DNA, 25 bp, Homo sapien
tttacccaacgtgcaccctgctttc

SEQ ID NO: 2348251 - DNA, 25 bp, Homo sapien
tgtctccactgaggcccccgcaggg

SEQ ID NO: 2348252 - DNA, 25 bp, Homo sapien
cacatatttccattgtctccactga

SEQ ID NO: 2348253 - DNA, 25 bp, Homo sapien
catatttccattgtctccactgagg

SEQ ID NO: 2348254 - DNA, 25 bp, Homo sapien
tctccactgaggcccccgcagggac

SEQ ID NO: 2348255 - DNA, 25 bp, Homo sapien
aggcagttacttcggatgaacaggg

SEQ ID NO: 2348256 - DNA, 25 bp, Homo sapien
cacctctcaaaaggcagttacttcg

SEQ ID NO: 2348257 - DNA, 25 bp, Homo sapien
aaaaggcagttacttcggatgaaca

SEQ ID NO: 2348258 - DNA, 25 bp, Homo sapien
tctcaaaaggcagttacttcggatg

SEQ ID NO: 2348259 - DNA, 25 bp, Homo sapien
gggcaaagtctagatccagggaagt

SEQ ID NO: 2348260 - DNA, 25 bp, Homo sapien
tagagggcaaagtctagatccaggg

SEQ ID NO: 2348261 - DNA, 25 bp, Homo sapien
ctttagagggcaaagtctagatcca

SEQ ID NO: 2348262 - DNA, 25 bp, Homo sapien
agtctagatccagggaagtgcctgt

SEQ ID NO: 2348263 - DNA, 25 bp, Homo sapien
ttctctctagattattgcgctcaag

SEQ ID NO: 2348264 - DNA, 25 bp, Homo sapien
gattattgcgctcaagggctttcct

SEQ ID NO: 2348265 - DNA, 25 bp, Homo sapien
catggatggacacctttgttctggg

SEQ ID NO: 2348266 - DNA, 25 bp, Homo sapien
cccacagtgagggtgagagataaga

SEQ ID NO: 2348267 - DNA, 25 bp, Homo sapien
ctgcatttccaactcgaggaaataa

SEQ ID NO: 2348268 - DNA, 25 bp, Homo sapien
ggtctgcatttccaactcgaggaaa

SEQ ID NO: 2348269 - DNA, 25 bp, Homo sapien
tctggtctgcatttccaactcgagg

SEQ ID NO: 2348270 - DNA, 25 bp, Homo sapien
ctctggtctgcatttccaactcgag

SEQ ID NO: 2348271 - DNA, 25 bp, Homo sapien
agcagggcacttcggatatttggga

SEQ ID NO: 2348272 - DNA, 25 bp, Homo sapien
caagagcgatcaaattcacgaagac

SEQ ID NO: 2348273 - DNA, 25 bp, Homo sapien
gatggctctccattaacaagggtga

SEQ ID NO: 2348274 - DNA, 25 bp, Homo sapien
catgggactcttgcacaatgcatga

SEQ ID NO: 2348275 - DNA, 25 bp, Homo sapien
ctactgctacagtccaactgccact

SEQ ID NO: 2348276 - DNA, 25 bp, Homo sapien
gtgtcctcttggttcagttgatatg

SEQ ID NO: 2348277 - DNA, 25 bp, Homo sapien
tactgctacagtccaactgccactg

SEQ ID NO: 2348278 - DNA, 25 bp, Homo sapien
tcctcttggttcagttgatatggtc

SEQ ID NO: 2348279 - DNA, 25 bp, Homo sapien
gattacccaagcctaaccaggagcc

SEQ ID NO: 2348280 - DNA, 25 bp, Homo sapien
tgaccagatatagacgagcacagcc

SEQ ID NO: 2348281 - DNA, 25 bp, Homo sapien
catgcttctgattacccaagcctaa

SEQ ID NO: 2348282 - DNA, 25 bp, Homo sapien
aggagcctgggtatcatagtctgca

SEQ ID NO: 2348283 - DNA, 25 bp, Homo sapien
catataattaacacccttggagtcc

SEQ ID NO: 2348284 - DNA, 25 bp, Homo sapien
gattgtaactacatgatgctgctgg

SEQ ID NO: 2348285 - DNA, 25 bp, Homo sapien
tgatactctttctcatgaagcccag

SEQ ID NO: 2348286 - DNA, 25 bp, Homo sapien
tttttcaatacagcccactgagcag

SEQ ID NO: 2348287 - DNA, 25 bp, Homo sapien
tatcagtgtgaagtatctcccagca

SEQ ID NO: 2348288 - DNA, 25 bp, Homo sapien
tgccatactgtggtgtgaaattccc

SEQ ID NO: 2348289 - DNA, 25 bp, Homo sapien
agatgagacacccttacgatggaga

SEQ ID NO: 2348290 - DNA, 25 bp, Homo sapien
gggtacacattctggccacctacag

SEQ ID NO: 2348291 - DNA, 25 bp, Homo sapien
ctagcagacaggaacagtgccccaa

SEQ ID NO: 2348292 - DNA, 25 bp, Homo sapien
gctggccctatcactgctgctttaa

SEQ ID NO: 2348293 - DNA, 25 bp, Homo sapien
tgagctcttggttggaatggactgc

SEQ ID NO: 2348294 - DNA, 25 bp, Homo sapien
tggactctgtgcaccatcactagtg

SEQ ID NO: 2348295 - DNA, 25 bp, Homo sapien
caatggaaattgacatgccatgaag

SEQ ID NO: 2348296 - DNA, 25 bp, Homo sapien
tctgtgttcatcacggaaatttagt

SEQ ID NO: 2348297 - DNA, 25 bp, Homo sapien
tgatcagagcattctgagcaatgga

SEQ ID NO: 2348298 - DNA, 25 bp, Homo sapien
tagtgacttgctcctaatacataca

SEQ ID NO: 2348299 - DNA, 25 bp, Homo sapien
gcaaacagcaatagtttcacctcct

SEQ ID NO: 2348300 - DNA, 25 bp, Homo sapien
caaacagcaatagtttcacctcctc

SEQ ID NO: 2348301 - DNA, 25 bp, Homo sapien
tgcaaacagcaatagtttcacctcc

SEQ ID NO: 2348302 - DNA, 25 bp, Homo sapien
tgagttctttgtttgactctcagct

SEQ ID NO: 2348303 - DNA, 25 bp, Homo sapien
gtgacgttgacaattttttcatata

SEQ ID NO: 2348304 - DNA, 25 bp, Homo sapien
gaatggtaggtctacatttagctct

SEQ ID NO: 2348305 - DNA, 25 bp, Homo sapien
ccctttgagtaggtacctagtagtg

SEQ ID NO: 2348306 - DNA, 25 bp, Homo sapien
aatgaccattcttgcaagggtaagg

SEQ ID NO: 2348307 - DNA, 25 bp, Homo sapien
ttccttcagcacgtaccaggcgtca

SEQ ID NO: 2348308 - DNA, 25 bp, Homo sapien
tgtaagcccgctgaaagaagattgt

SEQ ID NO: 2348309 - DNA, 25 bp, Homo sapien
acactgtgcgggtgtttgctctgca

SEQ ID NO: 2348310 - DNA, 25 bp, Homo sapien
tagacgttggtgtagtagacttccc

SEQ ID NO: 2348311 - DNA, 25 bp, Homo sapien
tatttagcctgaagacctgaagcct

SEQ ID NO: 2348312 - DNA, 25 bp, Homo sapien
gaaggcaagaaccaaatccgggctg

SEQ ID NO: 2348313 - DNA, 25 bp, Homo sapien
tacaagtctagagtgcatggcaagg

SEQ ID NO: 2348314 - DNA, 25 bp, Homo sapien
cgtattagaagaaagagccgggcgc

SEQ ID NO: 2348315 - DNA, 25 bp, Homo sapien
tgcggcaaatcttcttcagctcagc

SEQ ID NO: 2348316 - DNA, 25 bp, Homo sapien
tgggtgcggcaaatcttcttcagct

SEQ ID NO: 2348317 - DNA, 25 bp, Homo sapien
gcatgggtgcggcaaatcttcttca

SEQ ID NO: 2348318 - DNA, 25 bp, Homo sapien
ggcagcatgggtgcggcaaatcttc

SEQ ID NO: 2348319 - DNA, 25 bp, Homo sapien
tagatccccagttcatgtgcctgct

SEQ ID NO: 2348320 - DNA, 25 bp, Homo sapien
tctttctggtcaaggccaaaagtgt

SEQ ID NO: 2348321 - DNA, 25 bp, Homo sapien
agggagggagcccatagatccccag

SEQ ID NO: 2348322 - DNA, 25 bp, Homo sapien
tctggtcaaggccaaaagtgtaggg

SEQ ID NO: 2348323 - DNA, 25 bp, Homo sapien
cgcactttgagagcgagaactgtcc

SEQ ID NO: 2348324 - DNA, 25 bp, Homo sapien
cctttttaccatggcgacacgacac

SEQ ID NO: 2348325 - DNA, 25 bp, Homo sapien
gtgaaaacgaggcatggtgcagctc

SEQ ID NO: 2348326 - DNA, 25 bp, Homo sapien
ggtgcagctcggatcaagcgtttgc

SEQ ID NO: 2348327 - DNA, 25 bp, Homo sapien
ctgttgggaccgcttgtgttctccg

SEQ ID NO: 2348328 - DNA, 25 bp, Homo sapien
ggaccgcttgtgttctccgagaaaa

SEQ ID NO: 2348329 - DNA, 25 bp, Homo sapien
cttgtgttctccgagaaaactccct

SEQ ID NO: 2348330 - DNA, 25 bp, Homo sapien
tgtgttctccgagaaaactccctgg

SEQ ID NO: 2348331 - DNA, 25 bp, Homo sapien
gcaacacttgttgtagcataaacta

SEQ ID NO: 2348332 - DNA, 25 bp, Homo sapien
cagcaagtcagcatctggaagcaag

SEQ ID NO: 2348333 - DNA, 25 bp, Homo sapien
ggaagcaagtctacaggcagatctt

SEQ ID NO: 2348334 - DNA, 25 bp, Homo sapien
ttggggatttaatgtttctatagca

SEQ ID NO: 2348335 - DNA, 25 bp, Homo sapien
tgtgcttgttgatcatgttgtgaag

SEQ ID NO: 2348336 - DNA, 25 bp, Homo sapien
tgttgatcatgttgtgaagaatcag

SEQ ID NO: 2348337 - DNA, 25 bp, Homo sapien
tcatgttgtgaagaatcagtgtttc

SEQ ID NO: 2348338 - DNA, 25 bp, Homo sapien
tgtgaagaatcagtgtttctgtcat

SEQ ID NO: 2348339 - DNA, 25 bp, Homo sapien
ggtaggctaacaggaagcctcagtt

SEQ ID NO: 2348340 - DNA, 25 bp, Homo sapien
gacagctctcagaactaccaagaac

SEQ ID NO: 2348341 - DNA, 25 bp, Homo sapien
ttaccatatacggtaggctaacagg

SEQ ID NO: 2348342 - DNA, 25 bp, Homo sapien
tcagaactaccaagaacggctgaaa

SEQ ID NO: 2348343 - DNA, 25 bp, Homo sapien
gggccacttctcaaagtctgtgtta

SEQ ID NO: 2348344 - DNA, 25 bp, Homo sapien
tgttaaagttggctctgtcaagtgc

SEQ ID NO: 2348345 - DNA, 25 bp, Homo sapien
ctgtgttaaagttggctctgtcaag

SEQ ID NO: 2348346 - DNA, 25 bp, Homo sapien
tgacagctgcttggcgcctcttcca

SEQ ID NO: 2348347 - DNA, 25 bp, Homo sapien
tgactgcagtttctcggcaagccac

SEQ ID NO: 2348348 - DNA, 25 bp, Homo sapien
ccaccactgtgccacatcatttgaa

SEQ ID NO: 2348349 - DNA, 25 bp, Homo sapien
agagttggtgttgctccgtgtcatc

SEQ ID NO: 2348350 - DNA, 25 bp, Homo sapien
gcagtttctcggcaagccaccactg

SEQ ID NO: 2348351 - DNA, 25 bp, Homo sapien
cctttctcaggccagcacagttcat

SEQ ID NO: 2348352 - DNA, 25 bp, Homo sapien
gatggtagatagcactcgcctgtcc

SEQ ID NO: 2348353 - DNA, 25 bp, Homo sapien
ggcatattccagtcccctcttagag

SEQ ID NO: 2348354 - DNA, 25 bp, Homo sapien
cttagagatccctgacttcttgtca

SEQ ID NO: 2348355 - DNA, 25 bp, Homo sapien
gagaaccagaatgaagaccaagcat

SEQ ID NO: 2348356 - DNA, 25 bp, Homo sapien
caggataggttcaacgcagctttcg

SEQ ID NO: 2348357 - DNA, 25 bp, Homo sapien
tcaacgcagctttcgttggctggtc

SEQ ID NO: 2348358 - DNA, 25 bp, Homo sapien
cgttggctggtctaggacttgatac

SEQ ID NO: 2348359 - DNA, 25 bp, Homo sapien
acttgatacagtgggctgcacactg

SEQ ID NO: 2348360 - DNA, 25 bp, Homo sapien
ggctgcttttctacctggttagtta

SEQ ID NO: 2348361 - DNA, 25 bp, Homo sapien
gatggctgcttttctacctggttag

SEQ ID NO: 2348362 - DNA, 25 bp, Homo sapien
agatggctgcttttctacctggtta

SEQ ID NO: 2348363 - DNA, 25 bp, Homo sapien
tggctgcttttctacctggttagtt

SEQ ID NO: 2348364 - DNA, 25 bp, Homo sapien
acaagccgaatcttgcctgccttct

SEQ ID NO: 2348365 - DNA, 25 bp, Homo sapien
aaagctgagcacaagccgaatcttg

SEQ ID NO: 2348366 - DNA, 25 bp, Homo sapien
tgagcacaagccgaatcttgcctgc

SEQ ID NO: 2348367 - DNA, 25 bp, Homo sapien
aagccgaatcttgcctgccttcttg

SEQ ID NO: 2348368 - DNA, 25 bp, Homo sapien
caaataacaggctgtagggtgttct

SEQ ID NO: 2348369 - DNA, 25 bp, Homo sapien
cactggaacatgacagatggagata

SEQ ID NO: 2348370 - DNA, 25 bp, Homo sapien
ttgctggtgcccgtagaaacatgca

SEQ ID NO: 2348371 - DNA, 25 bp, Homo sapien
tgccttttcagttccgtcacttggg

SEQ ID NO: 2348372 - DNA, 25 bp, Homo sapien
tctttgtaccagatgaatgatgttc

SEQ ID NO: 2348373 - DNA, 25 bp, Homo sapien
tctcggagaatgttgtgggttgaat

SEQ ID NO: 2348374 - DNA, 25 bp, Homo sapien
tccaattagtcaaatgatgtctggg

SEQ ID NO: 2348375 - DNA, 25 bp, Homo sapien
cattcgagaaagattaacgagtgct

SEQ ID NO: 2348376 - DNA, 25 bp, Homo sapien
cagctttcatgggaactaatagggc

SEQ ID NO: 2348377 - DNA, 25 bp, Homo sapien
ccattcaagagggatctgccccaaa

SEQ ID NO: 2348378 - DNA, 25 bp, Homo sapien
tgcaaggtcacgtggtcagaggaaa

SEQ ID NO: 2348379 - DNA, 25 bp, Homo sapien
cttactcattagctcaaggatggca

SEQ ID NO: 2348380 - DNA, 25 bp, Homo sapien
actgtcttctggctagtgtggtctt

SEQ ID NO: 2348381 - DNA, 25 bp, Homo sapien
gcctttgagtgactcctctacagac

SEQ ID NO: 2348382 - DNA, 25 bp, Homo sapien
gtcttctggctagtgtggtcttcat

SEQ ID NO: 2348383 - DNA, 25 bp, Homo sapien
tgtttcttgtaaagcctttgagtga

SEQ ID NO: 2348384 - DNA, 25 bp, Homo sapien
tcaagcaccaacaatggagggagta

SEQ ID NO: 2348385 - DNA, 25 bp, Homo sapien
ccttcgcggacaagtctgggtctaa

SEQ ID NO: 2348386 - DNA, 25 bp, Homo sapien
tttagccgagaaccatgggcaggcc

SEQ ID NO: 2348387 - DNA, 25 bp, Homo sapien
agaatcgcggatgcttcgaaagccg

SEQ ID NO: 2348388 - DNA, 25 bp, Homo sapien
gatgggccactaggtgtcactcaag

SEQ ID NO: 2348389 - DNA, 25 bp, Homo sapien
catgtgcacagactttttccatttg

SEQ ID NO: 2348390 - DNA, 25 bp, Homo sapien
ggcatgtgcacagactttttccatt

SEQ ID NO: 2348391 - DNA, 25 bp, Homo sapien
attgatctgctggtgactaggtgtc

SEQ ID NO: 2348392 - DNA, 25 bp, Homo sapien
tctgctggtgactaggtgtcaggca

SEQ ID NO: 2348393 - DNA, 25 bp, Homo sapien
cctgtggtgtagtctatgcttttgg

SEQ ID NO: 2348394 - DNA, 25 bp, Homo sapien
ttgttgcctgtggtgtagtctatgc

SEQ ID NO: 2348395 - DNA, 25 bp, Homo sapien
aattgatcagatattggtgttaatg

SEQ ID NO: 2348396 - DNA, 25 bp, Homo sapien
cagatattggtgttaatgatgctcc

SEQ ID NO: 2348397 - DNA, 25 bp, Homo sapien
ggcatttggctccagagcaaggctg

SEQ ID NO: 2348398 - DNA, 25 bp, Homo sapien
ggccaggaggcaagacgatgaactt

SEQ ID NO: 2348399 - DNA, 25 bp, Homo sapien
tttggctccagagcaaggctggcag

SEQ ID NO: 2348400 - DNA, 25 bp, Homo sapien
aacttggtttcatcaggaggcccag

SEQ ID NO: 2348401 - DNA, 25 bp, Homo sapien
tacatcctaaaagagtcacagttct

SEQ ID NO: 2348402 - DNA, 25 bp, Homo sapien
tgtccggtacgtaaagaatgcttgt

SEQ ID NO: 2348403 - DNA, 25 bp, Homo sapien
gcctaaatccaacccatgctttggg

SEQ ID NO: 2348404 - DNA, 25 bp, Homo sapien
cagatacacaactaggttctcttag

SEQ ID NO: 2348405 - DNA, 25 bp, Homo sapien
ttataccatggcttcattgggcccc

SEQ ID NO: 2348406 - DNA, 25 bp, Homo sapien
gctgatgggattacttcctgttaaa

SEQ ID NO: 2348407 - DNA, 25 bp, Homo sapien
gcaataccttcctacaccaaacaag

SEQ ID NO: 2348408 - DNA, 25 bp, Homo sapien
tcttccgatatggaaagctgatggg

SEQ ID NO: 2348409 - DNA, 25 bp, Homo sapien
gctgtcgtgcgagtgctcctcctcg

SEQ ID NO: 2348410 - DNA, 25 bp, Homo sapien
ctcctcgctgctgtcatcctcagag

SEQ ID NO: 2348411 - DNA, 25 bp, Homo sapien
gtcgtgcgagtgctcctcctcgctg

SEQ ID NO: 2348412 - DNA, 25 bp, Homo sapien
tcgctgctgtcatcctcagagtggg

SEQ ID NO: 2348413 - DNA, 25 bp, Homo sapien
aattatggcctggtaattggttcca

SEQ ID NO: 2348414 - DNA, 25 bp, Homo sapien
tccggaattatggcctggtaattgg

SEQ ID NO: 2348415 - DNA, 25 bp, Homo sapien
tggtaattggttccaacgcggacca

SEQ ID NO: 2348416 - DNA, 25 bp, Homo sapien
cggaattatggcctggtaattggtt

SEQ ID NO: 2348417 - DNA, 25 bp, Homo sapien
cgtggccatcacaatatacttgtca

SEQ ID NO: 2348418 - DNA, 25 bp, Homo sapien
ttctccgtggccatcacaatatact

SEQ ID NO: 2348419 - DNA, 25 bp, Homo sapien
tccgtggccatcacaatatacttgt

SEQ ID NO: 2348420 - DNA, 25 bp, Homo sapien
ctccgtggccatcacaatatacttg

SEQ ID NO: 2348421 - DNA, 25 bp, Homo sapien
ccacatggtgcttattccagagcat

SEQ ID NO: 2348422 - DNA, 25 bp, Homo sapien
ttgtcgtggaagccaaaggcctgtt

SEQ ID NO: 2348423 - DNA, 25 bp, Homo sapien
agccaaaggcctgttccaacagcac

SEQ ID NO: 2348424 - DNA, 25 bp, Homo sapien
gtcgtggaagccaaaggcctgttcc

SEQ ID NO: 2348425 - DNA, 25 bp, Homo sapien
gaagccaaaggcctgttccaacagc

SEQ ID NO: 2348426 - DNA, 25 bp, Homo sapien
tggaaatcaacttgtcgggcagcgt

SEQ ID NO: 2348427 - DNA, 25 bp, Homo sapien
ctggaaatcaacttgtcgggcagcg

SEQ ID NO: 2348428 - DNA, 25 bp, Homo sapien
tctctcttcgggtgtccagcatcgg

SEQ ID NO: 2348429 - DNA, 25 bp, Homo sapien
gctagttcggctgtgggttttcttc

SEQ ID NO: 2348430 - DNA, 25 bp, Homo sapien
cgactctcttcgaactcatcactgt

SEQ ID NO: 2348431 - DNA, 25 bp, Homo sapien
gcctgtctgtccgtcatgctagttc

SEQ ID NO: 2348432 - DNA, 25 bp, Homo sapien
ctccagagcgcggagtggatcaatg

SEQ ID NO: 2348433 - DNA, 25 bp, Homo sapien
gagtggatcaatggcgccctccagg

SEQ ID NO: 2348434 - DNA, 25 bp, Homo sapien
cggagtggatcaatggcgccctcca

SEQ ID NO: 2348435 - DNA, 25 bp, Homo sapien
cgcggagtggatcaatggcgccctc

SEQ ID NO: 2348436 - DNA, 25 bp, Homo sapien
cctccggatggcttaggcagccaaa

SEQ ID NO: 2348437 - DNA, 25 bp, Homo sapien
gccatacctccggatggcttaggca

SEQ ID NO: 2348438 - DNA, 25 bp, Homo sapien
atacctccggatggcttaggcagcc

SEQ ID NO: 2348439 - DNA, 25 bp, Homo sapien
ccggatggcttaggcagccaaaagc

SEQ ID NO: 2348440 - DNA, 25 bp, Homo sapien
tcagagtcttgttcccaatcacctc

SEQ ID NO: 2348441 - DNA, 25 bp, Homo sapien
ggtcagagtcttgttcccaatcacc

SEQ ID NO: 2348442 - DNA, 25 bp, Homo sapien
tgggtcagagtcttgttcccaatca

SEQ ID NO: 2348443 - DNA, 25 bp, Homo sapien
cacctgggtcagagtcttgttccca

SEQ ID NO: 2348444 - DNA, 25 bp, Homo sapien
tgggctggggctagcaagggagccc

SEQ ID NO: 2348445 - DNA, 25 bp, Homo sapien
caccgatcgggacacagacatggag

SEQ ID NO: 2348446 - DNA, 25 bp, Homo sapien
ggcaccgatcgggacacagacatgg

SEQ ID NO: 2348447 - DNA, 25 bp, Homo sapien
acacagacatggagatcgatgtaat

SEQ ID NO: 2348448 - DNA, 25 bp, Homo sapien
agacatggagatcgatgtaatctgg

SEQ ID NO: 2348449 - DNA, 25 bp, Homo sapien
gcaaccaatatcagctctgagcatg

SEQ ID NO: 2348450 - DNA, 25 bp, Homo sapien
caaggtcgggaggaagcaaccaata

SEQ ID NO: 2348451 - DNA, 25 bp, Homo sapien
gtacttccgcttccttgagattctg

SEQ ID NO: 2348452 - DNA, 25 bp, Homo sapien
gcagtgagccctctagtgctctcca

SEQ ID NO: 2348453 - DNA, 25 bp, Homo sapien
gctcaggcgcgcggcaacggagacg

SEQ ID NO: 2348454 - DNA, 25 bp, Homo sapien
aggcgcgcggcaacggagacgcggg

SEQ ID NO: 2348455 - DNA, 25 bp, Homo sapien
cgcggcaacggagacgcgggcggcg

SEQ ID NO: 2348456 - DNA, 25 bp, Homo sapien
ggcggcgcgcggcaggctcgctccg

SEQ ID NO: 2348457 - DNA, 25 bp, Homo sapien
gcgcggcggcgccttcctccgggag

SEQ ID NO: 2348458 - DNA, 25 bp, Homo sapien
gcgccttcctccgggagacctccat

SEQ ID NO: 2348459 - DNA, 25 bp, Homo sapien
gcggcggcgccttcctccgggagac

SEQ ID NO: 2348460 - DNA, 25 bp, Homo sapien
gcggcgccttcctccgggagacctc

SEQ ID NO: 2348461 - DNA, 25 bp, Homo sapien
ttggtcccggtacaggcgcgagagg

SEQ ID NO: 2348462 - DNA, 25 bp, Homo sapien
gatggctccgatggcttgctccgac

SEQ ID NO: 2348463 - DNA, 25 bp, Homo sapien
ccagtgccagcagataggcgagcag

SEQ ID NO: 2348464 - DNA, 25 bp, Homo sapien
gctctgtgcagttgcccgcttggtc

SEQ ID NO: 2348465 - DNA, 25 bp, Homo sapien
gggccgcgcggggggcgccagcgag

SEQ ID NO: 2348466 - DNA, 25 bp, Homo sapien
gccgcgcggggggcgccagcgagac

SEQ ID NO: 2348467 - DNA, 25 bp, Homo sapien
ggccgcgcggggggcgccagcgaga

SEQ ID NO: 2348468 - DNA, 25 bp, Homo sapien
cggggccgcgcggggggcgccagcg

SEQ ID NO: 2348469 - DNA, 25 bp, Homo sapien
cctcggtgccgttgcgcagggagtt

SEQ ID NO: 2348470 - DNA, 25 bp, Homo sapien
gggtggcacgacaccacctcggtgc

SEQ ID NO: 2348471 - DNA, 25 bp, Homo sapien
agggagttgcggctcaggttgccca

SEQ ID NO: 2348472 - DNA, 25 bp, Homo sapien
ccggtcgaaggtccagccggtgagc

SEQ ID NO: 2348473 - DNA, 25 bp, Homo sapien
tggatctcactcattctgaagaggc

SEQ ID NO: 2348474 - DNA, 25 bp, Homo sapien
gaagtagatgctgccgttccagaga

SEQ ID NO: 2348475 - DNA, 25 bp, Homo sapien
tggcagcgccgctcgtgtagttgta

SEQ ID NO: 2348476 - DNA, 25 bp, Homo sapien
gaaaggcgtccacgaagtgcaggct

SEQ ID NO: 2348477 - DNA, 25 bp, Homo sapien
gccgcccgcggtgtgaacctgagac

SEQ ID NO: 2348478 - DNA, 25 bp, Homo sapien
tggtaaatgtcacccggctgtaccc

SEQ ID NO: 2348479 - DNA, 25 bp, Homo sapien
gaccgtccgagaggagccttcggac

SEQ ID NO: 2348480 - DNA, 25 bp, Homo sapien
tttggggacctcaggccgtgctcca

SEQ ID NO: 2348481 - DNA, 25 bp, Homo sapien
catctcgtaaatcactgcttagcag

SEQ ID NO: 2348482 - DNA, 25 bp, Homo sapien
tggattcaaagttggtggcaaggca

SEQ ID NO: 2348483 - DNA, 25 bp, Homo sapien
agtaatggtccagtgtgtaaacagc

SEQ ID NO: 2348484 - DNA, 25 bp, Homo sapien
cacactcattacacaagcatctcgt

SEQ ID NO: 2348485 - DNA, 25 bp, Homo sapien
aggagtaaaggacaccatgtaacct

SEQ ID NO: 2348486 - DNA, 25 bp, Homo sapien
ggagtaaaggacaccatgtaaccta

SEQ ID NO: 2348487 - DNA, 25 bp, Homo sapien
aaccaactgtacatgactaggatag

SEQ ID NO: 2348488 - DNA, 25 bp, Homo sapien
tacagcacaatagacgactctagac

SEQ ID NO: 2348489 - DNA, 25 bp, Homo sapien
gatgttgtaaagaatggacccttgg

SEQ ID NO: 2348490 - DNA, 25 bp, Homo sapien
ggaattggttctggcgtacagcaca

SEQ ID NO: 2348491 - DNA, 25 bp, Homo sapien
cacactgttcccaagtcgactttgg

SEQ ID NO: 2348492 - DNA, 25 bp, Homo sapien
cactttgatgaacaggttagaccca

SEQ ID NO: 2348493 - DNA, 25 bp, Homo sapien
atggccccactttgatgaacaggtt

SEQ ID NO: 2348494 - DNA, 25 bp, Homo sapien
tgaacaggttagacccatgctggcc

SEQ ID NO: 2348495 - DNA, 25 bp, Homo sapien
cacagtcaggattttgcagcctatt

SEQ ID NO: 2348496 - DNA, 25 bp, Homo sapien
cagtcaggattttgcagcctattac

SEQ ID NO: 2348497 - DNA, 25 bp, Homo sapien
ggattttgcagcctattacaacagc

SEQ ID NO: 2348498 - DNA, 25 bp, Homo sapien
tttgcagcctattacaacagcgagc

SEQ ID NO: 2348499 - DNA, 25 bp, Homo sapien
gatccaagaaaacagaggcagctca

SEQ ID NO: 2348500 - DNA, 25 bp, Homo sapien
ctggatccaagaaaacagaggcagc

SEQ ID NO: 2348501 - DNA, 25 bp, Homo sapien
tccaagaaaacagaggcagctcaaa

SEQ ID NO: 2348502 - DNA, 25 bp, Homo sapien
caagaaaacagaggcagctcaaaag

SEQ ID NO: 2348503 - DNA, 25 bp, Homo sapien
caagaaccatgggtagcctttcctg

SEQ ID NO: 2348504 - DNA, 25 bp, Homo sapien
gaaccatgggtagcctttcctgagg

SEQ ID NO: 2348505 - DNA, 25 bp, Homo sapien
attcaccaagaaccatgggtagcct

SEQ ID NO: 2348506 - DNA, 25 bp, Homo sapien
ccatgggtagcctttcctgaggtgg

SEQ ID NO: 2348507 - DNA, 25 bp, Homo sapien
taccacggtgccataaacggatgtc

SEQ ID NO: 2348508 - DNA, 25 bp, Homo sapien
gatgcgattggttggactctttcag

SEQ ID NO: 2348509 - DNA, 25 bp, Homo sapien
acggatgtcaggtcggaatggatca

SEQ ID NO: 2348510 - DNA, 25 bp, Homo sapien
aacagtcctgttcattaccacggtg

SEQ ID NO: 2348511 - DNA, 25 bp, Homo sapien
tcatgtataacccagaagcattaaa

SEQ ID NO: 2348512 - DNA, 25 bp, Homo sapien
catgtataacccagaagcattaaaa

SEQ ID NO: 2348513 - DNA, 25 bp, Homo sapien
gctcggctttggggaaacagtgttc

SEQ ID NO: 2348514 - DNA, 25 bp, Homo sapien
ctcggctttggggaaacagtgttct

SEQ ID NO: 2348515 - DNA, 25 bp, Homo sapien
catgtagcggtttggttggctcggc

SEQ ID NO: 2348516 - DNA, 25 bp, Homo sapien
ggagagcgagacttcggtcggctgc

SEQ ID NO: 2348517 - DNA, 25 bp, Homo sapien
tccctggttgccacaacatcgctaa

SEQ ID NO: 2348518 - DNA, 25 bp, Homo sapien
tcgctaaaagctggccagcggcatg

SEQ ID NO: 2348519 - DNA, 25 bp, Homo sapien
cgagacttcggtcggctgcggcctc

SEQ ID NO: 2348520 - DNA, 25 bp, Homo sapien
aaaaaacaacgaggccacacaggtg

SEQ ID NO: 2348521 - DNA, 25 bp, Homo sapien
tgaaaaaaacaacgaggccacacag

SEQ ID NO: 2348522 - DNA, 25 bp, Homo sapien
aaacaacgaggccacacaggtggct

SEQ ID NO: 2348523 - DNA, 25 bp, Homo sapien
ttgaaaaaaacaacgaggccacaca

SEQ ID NO: 2348524 - DNA, 25 bp, Homo sapien
taaattcaggggctacatccaagaa

SEQ ID NO: 2348525 - DNA, 25 bp, Homo sapien
gtaaattcaggggctacatccaaga

SEQ ID NO: 2348526 - DNA, 25 bp, Homo sapien
aaattcaggggctacatccaagaat

SEQ ID NO: 2348527 - DNA, 25 bp, Homo sapien
ggtaaattcaggggctacatccaag

SEQ ID NO: 2348528 - DNA, 25 bp, Homo sapien
gaggtaatgccgtcttccttggaaa

SEQ ID NO: 2348529 - DNA, 25 bp, Homo sapien
ggaggtaatgccgtcttccttggaa

SEQ ID NO: 2348530 - DNA, 25 bp, Homo sapien
tttggaggtaatgccgtcttccttg

SEQ ID NO: 2348531 - DNA, 25 bp, Homo sapien
tggaggtaatgccgtcttccttgga

SEQ ID NO: 2348532 - DNA, 25 bp, Homo sapien
tcctacaaaggagcccactggggta

SEQ ID NO: 2348533 - DNA, 25 bp, Homo sapien
ctttcctacaaaggagcccactggg

SEQ ID NO: 2348534 - DNA, 25 bp, Homo sapien
taagagaagcatacagtctgaacca

SEQ ID NO: 2348535 - DNA, 25 bp, Homo sapien
taaacagccaaccaatgaacccact

SEQ ID NO: 2348536 - DNA, 25 bp, Homo sapien
aatttcctatgcctcactctgtggg

SEQ ID NO: 2348537 - DNA, 25 bp, Homo sapien
gctgggaaggagacttaaaccacac

SEQ ID NO: 2348538 - DNA, 25 bp, Homo sapien
taaaagtcaatctcactaaccaaac

SEQ ID NO: 2348539 - DNA, 25 bp, Homo sapien
gtaaaagtcaatctcactaaccaaa

SEQ ID NO: 2348540 - DNA, 25 bp, Homo sapien
ttccggcctctattcaacactttga

SEQ ID NO: 2348541 - DNA, 25 bp, Homo sapien
tgcctaaggtaccatgctccttaat

SEQ ID NO: 2348542 - DNA, 25 bp, Homo sapien
gcttaatcataaagctacatccttt

SEQ ID NO: 2348543 - DNA, 25 bp, Homo sapien
gggtggcaaaaattgtagcttaatc

SEQ ID NO: 2348544 - DNA, 25 bp, Homo sapien
gtagatattcttcacaggatcagga

SEQ ID NO: 2348545 - DNA, 25 bp, Homo sapien
taaatgtagatattcttcacaggat

SEQ ID NO: 2348546 - DNA, 25 bp, Homo sapien
tcaggaacgagtttgtagaaaacag

SEQ ID NO: 2348547 - DNA, 25 bp, Homo sapien
taatttcatagataacctctggaca

SEQ ID NO: 2348548 - DNA, 25 bp, Homo sapien
tcttgcttacttactgacagtcagt

SEQ ID NO: 2348549 - DNA, 25 bp, Homo sapien
agttaccttgctgattatgcgccca

SEQ ID NO: 2348550 - DNA, 25 bp, Homo sapien
ttaattccgtgcctgtgaaccactg

SEQ ID NO: 2348551 - DNA, 25 bp, Homo sapien
cataaatgcatctaaccgttcagtg

SEQ ID NO: 2348552 - DNA, 25 bp, Homo sapien
gagggtctgtggctgttaaacactc

SEQ ID NO: 2348553 - DNA, 25 bp, Homo sapien
tattgcagtttgcaacacgaattct

SEQ ID NO: 2348554 - DNA, 25 bp, Homo sapien
gtagcgaatggcaccaaccgcagtg

SEQ ID NO: 2348555 - DNA, 25 bp, Homo sapien
taaacactccgaacaggatttatgt

SEQ ID NO: 2348556 - DNA, 25 bp, Homo sapien
agtgattgcatagcacggacgccgc

SEQ ID NO: 2348557 - DNA, 25 bp, Homo sapien
gccgctggaaacaccttcgagaatt

SEQ ID NO: 2348558 - DNA, 25 bp, Homo sapien
gcaacaagtgttctgccgcatgaca

SEQ ID NO: 2348559 - DNA, 25 bp, Homo sapien
ggagctcccgggtccagtgattgca

SEQ ID NO: 2348560 - DNA, 25 bp, Homo sapien
gatcccagcaggttaatgataggcc

SEQ ID NO: 2348561 - DNA, 25 bp, Homo sapien
ggtcaagtttcagggcaatcacagt

SEQ ID NO: 2348562 - DNA, 25 bp, Homo sapien
gatctcatgcgtggaacagcctaac

SEQ ID NO: 2348563 - DNA, 25 bp, Homo sapien
gacaaaacatctaagccctatcggg

SEQ ID NO: 2348564 - DNA, 25 bp, Homo sapien
cataaatttatctgacccttgatgg

SEQ ID NO: 2348565 - DNA, 25 bp, Homo sapien
tataaccatggggattttcatcggc

SEQ ID NO: 2348566 - DNA, 25 bp, Homo sapien
tggctagctcatccgtcaaagacat

SEQ ID NO: 2348567 - DNA, 25 bp, Homo sapien
tcatcggcaattctccaaagccata

SEQ ID NO: 2348568 - DNA, 25 bp, Homo sapien
aggaatggatgggcccaaacagtgt

SEQ ID NO: 2348569 - DNA, 25 bp, Homo sapien
gaatggatgggcccaaacagtgtat

SEQ ID NO: 2348570 - DNA, 25 bp, Homo sapien
aaacagtgtatttggcttcctaaag

SEQ ID NO: 2348571 - DNA, 25 bp, Homo sapien
cccaaacagtgtatttggcttccta

SEQ ID NO: 2348572 - DNA, 25 bp, Homo sapien
gcatcaaggaaagaacgaaatattt

SEQ ID NO: 2348573 - DNA, 25 bp, Homo sapien
aatgatgaccacattcagctacggg

SEQ ID NO: 2348574 - DNA, 25 bp, Homo sapien
gaatcatgagattgaaaagcaacca

SEQ ID NO: 2348575 - DNA, 25 bp, Homo sapien
ctagtactacacctcctcaaggctg

SEQ ID NO: 2348576 - DNA, 25 bp, Homo sapien
ggtgttggactccacagatattcca

SEQ ID NO: 2348577 - DNA, 25 bp, Homo sapien
cacgttatcgccaaagggtgttgga

SEQ ID NO: 2348578 - DNA, 25 bp, Homo sapien
cgccaaagggtgttggactccacag

SEQ ID NO: 2348579 - DNA, 25 bp, Homo sapien
aataccaacagcacgttatcgccaa

SEQ ID NO: 2348580 - DNA, 25 bp, Homo sapien
gttaaaacagcgaccccatacgtgc

SEQ ID NO: 2348581 - DNA, 25 bp, Homo sapien
gataagtcttaagctgtggccaggg

SEQ ID NO: 2348582 - DNA, 25 bp, Homo sapien
gtcacactaacttgggaacccttgc

SEQ ID NO: 2348583 - DNA, 25 bp, Homo sapien
catggtgaacttcgactcctgagcc

SEQ ID NO: 2348584 - DNA, 25 bp, Homo sapien
tactgcttcgaattatctgaatttt

SEQ ID NO: 2348585 - DNA, 25 bp, Homo sapien
tttgctccagacgaaatatccagcc

SEQ ID NO: 2348586 - DNA, 25 bp, Homo sapien
ttctttactgcttcgaattatctga

SEQ ID NO: 2348587 - DNA, 25 bp, Homo sapien
tatccagccagttttctaagttctc

SEQ ID NO: 2348588 - DNA, 25 bp, Homo sapien
catgatgtgacttggttaccgctgt

SEQ ID NO: 2348589 - DNA, 25 bp, Homo sapien
tctccatcgctaccaagactgttgg

SEQ ID NO: 2348590 - DNA, 25 bp, Homo sapien
tagcatccgctgtgcaaaatgagac

SEQ ID NO: 2348591 - DNA, 25 bp, Homo sapien
cacattaggataagggaccattaca

SEQ ID NO: 2348592 - DNA, 25 bp, Homo sapien
caagagccgtcattagggagaaaat

SEQ ID NO: 2348593 - DNA, 25 bp, Homo sapien
tgagctcaacagacaggtcagctgg

SEQ ID NO: 2348594 - DNA, 25 bp, Homo sapien
aatgcctccttatagcaccactgag

SEQ ID NO: 2348595 - DNA, 25 bp, Homo sapien
cacggttggcgtgtgcatttgaaaa

SEQ ID NO: 2348596 - DNA, 25 bp, Homo sapien
caagaaaaagcaaacgaccccatca

SEQ ID NO: 2348597 - DNA, 25 bp, Homo sapien
caacagacataagcaaaaatgctca

SEQ ID NO: 2348598 - DNA, 25 bp, Homo sapien
tgcagccaacagacataagcaaaaa

SEQ ID NO: 2348599 - DNA, 25 bp, Homo sapien
agcaaacgaccccatcaaaaagtag

SEQ ID NO: 2348600 - DNA, 25 bp, Homo sapien
cactttgagtgtcttggagagaagc

SEQ ID NO: 2348601 - DNA, 25 bp, Homo sapien
ttgagtgtcttggagagaagcttcc

SEQ ID NO: 2348602 - DNA, 25 bp, Homo sapien
gcactttgagtgtcttggagagaag

SEQ ID NO: 2348603 - DNA, 25 bp, Homo sapien
ctttgagtgtcttggagagaagctt

SEQ ID NO: 2348604 - DNA, 25 bp, Homo sapien
tctggttgggatgctacaggtgcag

SEQ ID NO: 2348605 - DNA, 25 bp, Homo sapien
gctccctgctagagtccacattctt

SEQ ID NO: 2348606 - DNA, 25 bp, Homo sapien
ccggttgggctgacttttattctgg

SEQ ID NO: 2348607 - DNA, 25 bp, Homo sapien
cagagctccctgctagagtccacat

SEQ ID NO: 2348608 - DNA, 25 bp, Homo sapien
ccaagaaccgaaggagaacatcacg

SEQ ID NO: 2348609 - DNA, 25 bp, Homo sapien
tgataaattccaagaaccgaaggag

SEQ ID NO: 2348610 - DNA, 25 bp, Homo sapien
accgaaggagaacatcacgttgaca

SEQ ID NO: 2348611 - DNA, 25 bp, Homo sapien
tcttttaatgatgagcagttggtaa

SEQ ID NO: 2348612 - DNA, 25 bp, Homo sapien
ctctcggtcctgggaagacatattt

SEQ ID NO: 2348613 - DNA, 25 bp, Homo sapien
tctcggtcctgggaagacatatttc

SEQ ID NO: 2348614 - DNA, 25 bp, Homo sapien
ctcggtcctgggaagacatatttcc

SEQ ID NO: 2348615 - DNA, 25 bp, Homo sapien
tctctccccgcctctacccactctg

SEQ ID NO: 2348616 - DNA, 25 bp, Homo sapien
tcaggtaagtccctctggagatgga

SEQ ID NO: 2348617 - DNA, 25 bp, Homo sapien
aggtaagtccctctggagatggatc

SEQ ID NO: 2348618 - DNA, 25 bp, Homo sapien
cctcaggtaagtccctctggagatg

SEQ ID NO: 2348619 - DNA, 25 bp, Homo sapien
taggacaatgttcacatcctagaat

SEQ ID NO: 2348620 - DNA, 25 bp, Homo sapien
gcgttttaggacaatgttcacatcc

SEQ ID NO: 2348621 - DNA, 25 bp, Homo sapien
taattcctgcgttttaggacaatgt

SEQ ID NO: 2348622 - DNA, 25 bp, Homo sapien
aactgacttaattcctgcgttttag

SEQ ID NO: 2348623 - DNA, 25 bp, Homo sapien
taatcagaagggtcgcaagctgtga

SEQ ID NO: 2348624 - DNA, 25 bp, Homo sapien
gtttctctcataatcagaagggtcg

SEQ ID NO: 2348625 - DNA, 25 bp, Homo sapien
agccagtttctacgcatgctgggca

SEQ ID NO: 2348626 - DNA, 25 bp, Homo sapien
gggtggatacaccttcttgcacttt

SEQ ID NO: 2348627 - DNA, 25 bp, Homo sapien
tcctgatgtcttctcgacagccact

SEQ ID NO: 2348628 - DNA, 25 bp, Homo sapien
gatgtcttctcgacagccactggac

SEQ ID NO: 2348629 - DNA, 25 bp, Homo sapien
gtcttctcgacagccactggacact

SEQ ID NO: 2348630 - DNA, 25 bp, Homo sapien
tcctcctgatgtcttctcgacagcc

SEQ ID NO: 2348631 - DNA, 25 bp, Homo sapien
aaggaacccaaagtagtatgagttg

SEQ ID NO: 2348632 - DNA, 25 bp, Homo sapien
gttgtggtcatggtcattcaaagac

SEQ ID NO: 2348633 - DNA, 25 bp, Homo sapien
tatgtgagtgtccagccattgatgt

SEQ ID NO: 2348634 - DNA, 25 bp, Homo sapien
tgtattgcgctaattaagtgaaact

SEQ ID NO: 2348635 - DNA, 25 bp, Homo sapien
gagagggttctcttggccatctagg

SEQ ID NO: 2348636 - DNA, 25 bp, Homo sapien
catggctgccctgtatggttgcaac

SEQ ID NO: 2348637 - DNA, 25 bp, Homo sapien
caaaatgtagagtcagctccatggc

SEQ ID NO: 2348638 - DNA, 25 bp, Homo sapien
taaagagctaccaagaggaccctcc

SEQ ID NO: 2348639 - DNA, 25 bp, Homo sapien
gacagcatgaggtcaaaccaattag

SEQ ID NO: 2348640 - DNA, 25 bp, Homo sapien
gaagagggctgcagattcatgtctc

SEQ ID NO: 2348641 - DNA, 25 bp, Homo sapien
ttttgcgaacacaagcagacagtgt

SEQ ID NO: 2348642 - DNA, 25 bp, Homo sapien
cacaagacagttgaaaatacagttg

SEQ ID NO: 2348643 - DNA, 25 bp, Homo sapien
tcgatgcccgggtaaagtttgctcc

SEQ ID NO: 2348644 - DNA, 25 bp, Homo sapien
catccttatcacaggtactggttcc

SEQ ID NO: 2348645 - DNA, 25 bp, Homo sapien
aatgtcgatactttctgtggctcaa

SEQ ID NO: 2348646 - DNA, 25 bp, Homo sapien
tgtggctcaatggacttaatgtaga

SEQ ID NO: 2348647 - DNA, 25 bp, Homo sapien
taagggaacaatgtggcagagcaat

SEQ ID NO: 2348648 - DNA, 25 bp, Homo sapien
ctttccggcttgatggaagagagaa

SEQ ID NO: 2348649 - DNA, 25 bp, Homo sapien
tttcatgtgggtgtcatttagcaca

SEQ ID NO: 2348650 - DNA, 25 bp, Homo sapien
catttagcacatggctaacctgtat

SEQ ID NO: 2348651 - DNA, 25 bp, Homo sapien
tgattaagttgtcaattacatcaaa

SEQ ID NO: 2348652 - DNA, 25 bp, Homo sapien
gaaatgattaagttgtcaattacat

SEQ ID NO: 2348653 - DNA, 25 bp, Homo sapien
attcatgtgaaatgattaagttgtc

SEQ ID NO: 2348654 - DNA, 25 bp, Homo sapien
tcatgtgaaatgattaagttgtcaa

SEQ ID NO: 2348655 - DNA, 25 bp, Homo sapien
acaaactcgcgccatgcgatttact

SEQ ID NO: 2348656 - DNA, 25 bp, Homo sapien
ggtttctgagcaccttctcggccac

SEQ ID NO: 2348657 - DNA, 25 bp, Homo sapien
tcgtgacaaactcgcgccatgcgat

SEQ ID NO: 2348658 - DNA, 25 bp, Homo sapien
aactcgcgccatgcgatttactctt

SEQ ID NO: 2348659 - DNA, 25 bp, Homo sapien
gggttccacaatccaagtaggtgtc

SEQ ID NO: 2348660 - DNA, 25 bp, Homo sapien
gctaaaaacccgcagtaagtcgcca

SEQ ID NO: 2348661 - DNA, 25 bp, Homo sapien
gggtcctcccgatactgcagggttc

SEQ ID NO: 2348662 - DNA, 25 bp, Homo sapien
gcttcacagtgacattcgtgcgcac

SEQ ID NO: 2348663 - DNA, 25 bp, Homo sapien
tgacatcccacccagaaagaaaaga

SEQ ID NO: 2348664 - DNA, 25 bp, Homo sapien
cagtcaaggggtcggggtgacatcc

SEQ ID NO: 2348665 - DNA, 25 bp, Homo sapien
ggtcggggtgacatcccacccagaa

SEQ ID NO: 2348666 - DNA, 25 bp, Homo sapien
ggggtgacatcccacccagaaagaa

SEQ ID NO: 2348667 - DNA, 25 bp, Homo sapien
cagtcttgatgcctttaattttgca

SEQ ID NO: 2348668 - DNA, 25 bp, Homo sapien
gagttggcaatggtgcttgcagtct

SEQ ID NO: 2348669 - DNA, 25 bp, Homo sapien
caaaggatggtggtaagatcttgat

SEQ ID NO: 2348670 - DNA, 25 bp, Homo sapien
taattttgcaaaggatggtggtaag

SEQ ID NO: 2348671 - DNA, 25 bp, Homo sapien
tgacaatcactagcaagacagggag

SEQ ID NO: 2348672 - DNA, 25 bp, Homo sapien
aatgacaatcactagcaagacaggg

SEQ ID NO: 2348673 - DNA, 25 bp, Homo sapien
ggaactgactcctgctcgacgtaga

SEQ ID NO: 2348674 - DNA, 25 bp, Homo sapien
tcctgctcgacgtagagctccaggt

SEQ ID NO: 2348675 - DNA, 25 bp, Homo sapien
tccttcgatttgtgcctggtcaccc

SEQ ID NO: 2348676 - DNA, 25 bp, Homo sapien
ttgactctgtttgcgactcagctcc

SEQ ID NO: 2348677 - DNA, 25 bp, Homo sapien
ccagcaattctagttgttgactctg

SEQ ID NO: 2348678 - DNA, 25 bp, Homo sapien
gtcacgtatctctttccggagctcg

SEQ ID NO: 2348679 - DNA, 25 bp, Homo sapien
agttctcagagcaaaatgtttgtag

SEQ ID NO: 2348680 - DNA, 25 bp, Homo sapien
ctatcaaccacatccaatttatcca

SEQ ID NO: 2348681 - DNA, 25 bp, Homo sapien
ttctcagagcaaaatgtttgtagtc

SEQ ID NO: 2348682 - DNA, 25 bp, Homo sapien
cagttccaaaactatcaaccacatc

SEQ ID NO: 2348683 - DNA, 25 bp, Homo sapien
catctacgtctactaaatgaggaca

SEQ ID NO: 2348684 - DNA, 25 bp, Homo sapien
agaactctacatggctaaaaatgcc

SEQ ID NO: 2348685 - DNA, 25 bp, Homo sapien
tctagtcactgcaatgtaagtcatg

SEQ ID NO: 2348686 - DNA, 25 bp, Homo sapien
gaggacaatacaaactgaccagcta

SEQ ID NO: 2348687 - DNA, 25 bp, Homo sapien
gatttataacactaaggcttggacc

SEQ ID NO: 2348688 - DNA, 25 bp, Homo sapien
cagaaataggactcgtgatgcaacc

SEQ ID NO: 2348689 - DNA, 25 bp, Homo sapien
caaatggtagatctcggtgcctcgg

SEQ ID NO: 2348690 - DNA, 25 bp, Homo sapien
tctggccaattgttccggagaagct

SEQ ID NO: 2348691 - DNA, 25 bp, Homo sapien
ttattcagcactcaagggcaatcat

SEQ ID NO: 2348692 - DNA, 25 bp, Homo sapien
tgattaccaaatttagaagataaga

SEQ ID NO: 2348693 - DNA, 25 bp, Homo sapien
cattaactgtaaaagcccacacagc

SEQ ID NO: 2348694 - DNA, 25 bp, Homo sapien
caaatttagaagataagaacatttc

SEQ ID NO: 2348695 - DNA, 25 bp, Homo sapien
gacctgaaactattttggccatatc

SEQ ID NO: 2348696 - DNA, 25 bp, Homo sapien
tcgtaaatacggaagtgccgccctg

SEQ ID NO: 2348697 - DNA, 25 bp, Homo sapien
catatcctcccctagtaaaaagcaa

SEQ ID NO: 2348698 - DNA, 25 bp, Homo sapien
catgtaaatagacaggagaaacagg

SEQ ID NO: 2348699 - DNA, 25 bp, Homo sapien
taaaatgggtgcagagtaagtgccc

SEQ ID NO: 2348700 - DNA, 25 bp, Homo sapien
catgacgtgggatgtgttacctaac

SEQ ID NO: 2348701 - DNA, 25 bp, Homo sapien
gaaacgccactgaattccgaaagcc

SEQ ID NO: 2348702 - DNA, 25 bp, Homo sapien
ggtatcatcccacgttttagaagaa

SEQ ID NO: 2348703 - DNA, 25 bp, Homo sapien
ttcagtgaagatgtgggtgaagcca

SEQ ID NO: 2348704 - DNA, 25 bp, Homo sapien
tgaagatgtgggtgaagccacctga

SEQ ID NO: 2348705 - DNA, 25 bp, Homo sapien
tatcttcagtgaagatgtgggtgaa

SEQ ID NO: 2348706 - DNA, 25 bp, Homo sapien
tgcatatcttcagtgaagatgtggg

SEQ ID NO: 2348707 - DNA, 25 bp, Homo sapien
ggcatccaaagctgtgagactttca

SEQ ID NO: 2348708 - DNA, 25 bp, Homo sapien
gcttttattacagattagggcatcc

SEQ ID NO: 2348709 - DNA, 25 bp, Homo sapien
tctgcttttcaagggtgtggatgac

SEQ ID NO: 2348710 - DNA, 25 bp, Homo sapien
tgtggatgacagtaacaagaaagct

SEQ ID NO: 2348711 - DNA, 25 bp, Homo sapien
tgagtcttccaaagtttcgggatgt

SEQ ID NO: 2348712 - DNA, 25 bp, Homo sapien
aagatgtgagtcttccaaagtttcg

SEQ ID NO: 2348713 - DNA, 25 bp, Homo sapien
tgacctatgatcacacacttcagcc

SEQ ID NO: 2348714 - DNA, 25 bp, Homo sapien
ttaggagtctaaagcaggcagatca

SEQ ID NO: 2348715 - DNA, 25 bp, Homo sapien
tgtgaggagtttttcgacgacggac

SEQ ID NO: 2348716 - DNA, 25 bp, Homo sapien
gaccagcttggtttgcagtgcaatg

SEQ ID NO: 2348717 - DNA, 25 bp, Homo sapien
cagaaaggcagacggacatccagtt

SEQ ID NO: 2348718 - DNA, 25 bp, Homo sapien
gagtttcggctgcatgttactacac

SEQ ID NO: 2348719 - DNA, 25 bp, Homo sapien
acattgctgagggatgtgacactta

SEQ ID NO: 2348720 - DNA, 25 bp, Homo sapien
ctgacattgctgagggatgtgacac

SEQ ID NO: 2348721 - DNA, 25 bp, Homo sapien
cattgctgagggatgtgacacttac

SEQ ID NO: 2348722 - DNA, 25 bp, Homo sapien
ctctgacattgctgagggatgtgac

SEQ ID NO: 2348723 - DNA, 25 bp, Homo sapien
ctggtggagggacatcagacccctg

SEQ ID NO: 2348724 - DNA, 25 bp, Homo sapien
acccctgcaccagcgggaattattc

SEQ ID NO: 2348725 - DNA, 25 bp, Homo sapien
atcagacccctgcaccagcgggaat

SEQ ID NO: 2348726 - DNA, 25 bp, Homo sapien
ggtggagggacatcagacccctgca

SEQ ID NO: 2348727 - DNA, 25 bp, Homo sapien
ggacaggaggactagggctgtcggt

SEQ ID NO: 2348728 - DNA, 25 bp, Homo sapien
cactaaacgtctgtggggtaggaca

SEQ ID NO: 2348729 - DNA, 25 bp, Homo sapien
tgtcggtgtcccagacccccttgag

SEQ ID NO: 2348730 - DNA, 25 bp, Homo sapien
ctgtcacccactaaacgtctgtggg

SEQ ID NO: 2348731 - DNA, 25 bp, Homo sapien
cttccgtaatcaatggacattaggc

SEQ ID NO: 2348732 - DNA, 25 bp, Homo sapien
ttccgtaatcaatggacattaggcc

SEQ ID NO: 2348733 - DNA, 25 bp, Homo sapien
tccgtaatcaatggacattaggcct

SEQ ID NO: 2348734 - DNA, 25 bp, Homo sapien
tggacatgttttccggtgctgggcc

SEQ ID NO: 2348735 - DNA, 25 bp, Homo sapien
ttctccaaacactcggcccatcccg

SEQ ID NO: 2348736 - DNA, 25 bp, Homo sapien
aacactcggcccatcccgattggct

SEQ ID NO: 2348737 - DNA, 25 bp, Homo sapien
catgttttccggtgctgggccagag

SEQ ID NO: 2348738 - DNA, 25 bp, Homo sapien
tactgaattccggaacctgccacaa

SEQ ID NO: 2348739 - DNA, 25 bp, Homo sapien
gtgattacatccacgggacccttgt

SEQ ID NO: 2348740 - DNA, 25 bp, Homo sapien
aatagaagggctctccgacagtctc

SEQ ID NO: 2348741 - DNA, 25 bp, Homo sapien
gagtcgtcaccagcaaatagaaggg

SEQ ID NO: 2348742 - DNA, 25 bp, Homo sapien
tgacgacactgaaagttataagcaa

SEQ ID NO: 2348743 - DNA, 25 bp, Homo sapien
tgagaaattctgattgcaattataa

SEQ ID NO: 2348744 - DNA, 25 bp, Homo sapien
ttgcatttcctttgacgacactgaa

SEQ ID NO: 2348745 - DNA, 25 bp, Homo sapien
gttataagcaatcctgatattaaaa

SEQ ID NO: 2348746 - DNA, 25 bp, Homo sapien
tattgatacaattcagaacgctgag

SEQ ID NO: 2348747 - DNA, 25 bp, Homo sapien
agatgtggatgggtgtattgataca

SEQ ID NO: 2348748 - DNA, 25 bp, Homo sapien
ctctcggatggcagctgtgcatggt

SEQ ID NO: 2348749 - DNA, 25 bp, Homo sapien
gaagtgttgactttcagctcagctt

SEQ ID NO: 2348750 - DNA, 25 bp, Homo sapien
cacaagcatagaacggatcatgtgc

SEQ ID NO: 2348751 - DNA, 25 bp, Homo sapien
cacacaagcatagaacggatcatgt

SEQ ID NO: 2348752 - DNA, 25 bp, Homo sapien
acaagcatagaacggatcatgtgcc

SEQ ID NO: 2348753 - DNA, 25 bp, Homo sapien
tcacacaagcatagaacggatcatg

SEQ ID NO: 2348754 - DNA, 25 bp, Homo sapien
tgacttaatcgggacagtgggttgt

SEQ ID NO: 2348755 - DNA, 25 bp, Homo sapien
ggctaatggatcttctgcaaggaca

SEQ ID NO: 2348756 - DNA, 25 bp, Homo sapien
taaaaacaagattgctgaagtgcaa

SEQ ID NO: 2348757 - DNA, 25 bp, Homo sapien
tccacaaatggtaggagtattaaaa

SEQ ID NO: 2348758 - DNA, 25 bp, Homo sapien
gcaagtctgagggaaacttctgatc

SEQ ID NO: 2348759 - DNA, 25 bp, Homo sapien
tttgagctgcgcttgcccatccagc

SEQ ID NO: 2348760 - DNA, 25 bp, Homo sapien
gacattctgcctgacgttccccttt

SEQ ID NO: 2348761 - DNA, 25 bp, Homo sapien
aagatccataaatcacagcttcctg

SEQ ID NO: 2348762 - DNA, 25 bp, Homo sapien
tccttaaaagatggctggtgaccat

SEQ ID NO: 2348763 - DNA, 25 bp, Homo sapien
tggcacttccttaaaagatggctgg

SEQ ID NO: 2348764 - DNA, 25 bp, Homo sapien
cccagaatgccaccagggagagaac

SEQ ID NO: 2348765 - DNA, 25 bp, Homo sapien
cagaatgccaccagggagagaactc

SEQ ID NO: 2348766 - DNA, 25 bp, Homo sapien
ggtgccacccaaggacatttttaca

SEQ ID NO: 2348767 - DNA, 25 bp, Homo sapien
agtcttcgatccgaacaaaagggag

SEQ ID NO: 2348768 - DNA, 25 bp, Homo sapien
gccagtatgctccagattcagtggg

SEQ ID NO: 2348769 - DNA, 25 bp, Homo sapien
gcccagtgggaagtcttcgatccga

SEQ ID NO: 2348770 - DNA, 25 bp, Homo sapien
ccgagaccagagagatttagaagca

SEQ ID NO: 2348771 - DNA, 25 bp, Homo sapien
aagcatgtccaaaatcatggagccg

SEQ ID NO: 2348772 - DNA, 25 bp, Homo sapien
agtgcttatcacgtactgggaatgc

SEQ ID NO: 2348773 - DNA, 25 bp, Homo sapien
ccggtgggagtcataactaggacgt

SEQ ID NO: 2348774 - DNA, 25 bp, Homo sapien
tgtagggaccggcttggagctcctt

SEQ ID NO: 2348775 - DNA, 25 bp, Homo sapien
tctgacaccacggaatgtagggacc

SEQ ID NO: 2348776 - DNA, 25 bp, Homo sapien
tctgctctaagaggcaagtcatgct

SEQ ID NO: 2348777 - DNA, 25 bp, Homo sapien
tcttgtgactaggatggcagggcca

SEQ ID NO: 2348778 - DNA, 25 bp, Homo sapien
ccatcgggggagacacctcgatgga

SEQ ID NO: 2348779 - DNA, 25 bp, Homo sapien
atggaagcgccatctctccggctcc

SEQ ID NO: 2348780 - DNA, 25 bp, Homo sapien
gggagacacctcgatggaagcgcca

SEQ ID NO: 2348781 - DNA, 25 bp, Homo sapien
gagacacctcgatggaagcgccatc

SEQ ID NO: 2348782 - DNA, 25 bp, Homo sapien
tacaaacaggtttccaagtctatta

SEQ ID NO: 2348783 - DNA, 25 bp, Homo sapien
tcattaagctgaagtccataaggag

SEQ ID NO: 2348784 - DNA, 25 bp, Homo sapien
gacatctgcactctcgttttccggg

SEQ ID NO: 2348785 - DNA, 25 bp, Homo sapien
tgaaatattccgacagacatctgca

SEQ ID NO: 2348786 - DNA, 25 bp, Homo sapien
ttggcttggccaatggtgtcacagt

SEQ ID NO: 2348787 - DNA, 25 bp, Homo sapien
acaacctggctgtgtaagtgtcact

SEQ ID NO: 2348788 - DNA, 25 bp, Homo sapien
tcaggatgcccatgagagaccaaag

SEQ ID NO: 2348789 - DNA, 25 bp, Homo sapien
gcttccttcgaagaatcaggatgcc

SEQ ID NO: 2348790 - DNA, 25 bp, Homo sapien
aggtgattccgtgcagtctcagggc

SEQ ID NO: 2348791 - DNA, 25 bp, Homo sapien
tataaaatcccacgacagtctcctg

SEQ ID NO: 2348792 - DNA, 25 bp, Homo sapien
tatgctctcctttgcagtataccag

SEQ ID NO: 2348793 - DNA, 25 bp, Homo sapien
gactgcacggagctcaactttaaaa

SEQ ID NO: 2348794 - DNA, 25 bp, Homo sapien
gtataccagtagagcccgaaaatga

SEQ ID NO: 2348795 - DNA, 25 bp, Homo sapien
aactgtcgatgtccagaagttcttt

SEQ ID NO: 2348796 - DNA, 25 bp, Homo sapien
tcacggaggaactgtcgatgtccag

SEQ ID NO: 2348797 - DNA, 25 bp, Homo sapien
attccatcttcaagaatcacggagg

SEQ ID NO: 2348798 - DNA, 25 bp, Homo sapien
tggccaatggtgtttagcttggtga

SEQ ID NO: 2348799 - DNA, 25 bp, Homo sapien
cacccagtgaaggctaaaggataac

SEQ ID NO: 2348800 - DNA, 25 bp, Homo sapien
tcacccagtgaaggctaaaggataa

SEQ ID NO: 2348801 - DNA, 25 bp, Homo sapien
acccagtgaaggctaaaggataact

SEQ ID NO: 2348802 - DNA, 25 bp, Homo sapien
tatccaggtccgaatctggccctgc

SEQ ID NO: 2348803 - DNA, 25 bp, Homo sapien
gagcctcatcgtacccatctataaa

SEQ ID NO: 2348804 - DNA, 25 bp, Homo sapien
cactgttataagacggtgaagcaga

SEQ ID NO: 2348805 - DNA, 25 bp, Homo sapien
gactagctgttaccagacctcccag

SEQ ID NO: 2348806 - DNA, 25 bp, Homo sapien
aagatgccccttattcctgagccca

SEQ ID NO: 2348807 - DNA, 25 bp, Homo sapien
agaatctggcagagtcctaggtcct

SEQ ID NO: 2348808 - DNA, 25 bp, Homo sapien
tgtccctggccattgtctaagaagc

SEQ ID NO: 2348809 - DNA, 25 bp, Homo sapien
taagaacgactgctcttggcaagat

SEQ ID NO: 2348810 - DNA, 25 bp, Homo sapien
taagcagataggtgtctagcacggc

SEQ ID NO: 2348811 - DNA, 25 bp, Homo sapien
tgatgttctatctctcccgacaggc

SEQ ID NO: 2348812 - DNA, 25 bp, Homo sapien
tagcacggccgatgtctgcagtgaa

SEQ ID NO: 2348813 - DNA, 25 bp, Homo sapien
tcatttggacgggaagtgactacag

SEQ ID NO: 2348814 - DNA, 25 bp, Homo sapien
attacaaatttgttagcagtgacca

SEQ ID NO: 2348815 - DNA, 25 bp, Homo sapien
tacaaatttgttagcagtgaccact

SEQ ID NO: 2348816 - DNA, 25 bp, Homo sapien
acaaatttgttagcagtgaccactt

SEQ ID NO: 2348817 - DNA, 25 bp, Homo sapien
agcagtgaccacttctgcattagta

SEQ ID NO: 2348818 - DNA, 25 bp, Homo sapien
ctttagcgattgtccagtccctttt

SEQ ID NO: 2348819 - DNA, 25 bp, Homo sapien
gtccagtcccttttagtgtcacaga

SEQ ID NO: 2348820 - DNA, 25 bp, Homo sapien
ccagtcccttttagtgtcacagatg

SEQ ID NO: 2348821 - DNA, 25 bp, Homo sapien
tccagtcccttttagtgtcacagat

SEQ ID NO: 2348822 - DNA, 25 bp, Homo sapien
gaaactgcgaagacctgaacactta

SEQ ID NO: 2348823 - DNA, 25 bp, Homo sapien
tgggttggagttgtcagagcccaga

SEQ ID NO: 2348824 - DNA, 25 bp, Homo sapien
ttaagactcaagagtgatcctgttg

SEQ ID NO: 2348825 - DNA, 25 bp, Homo sapien
gaatgtgtgggaaactgcgaagacc

SEQ ID NO: 2348826 - DNA, 25 bp, Homo sapien
cagggttctaggattcgatgtgaca

SEQ ID NO: 2348827 - DNA, 25 bp, Homo sapien
attaatcgtcccctagtcctgtgag

SEQ ID NO: 2348828 - DNA, 25 bp, Homo sapien
gatgtgacaacaagcgattcccctc

SEQ ID NO: 2348829 - DNA, 25 bp, Homo sapien
gcagaactggtacgcacggcaattt

SEQ ID NO: 2348830 - DNA, 25 bp, Homo sapien
tcccattgagtgttgagccagtact

SEQ ID NO: 2348831 - DNA, 25 bp, Homo sapien
tctgataaggaacgctgccaaaagt

SEQ ID NO: 2348832 - DNA, 25 bp, Homo sapien
gttttgccaaaagcgagcaccctta

SEQ ID NO: 2348833 - DNA, 25 bp, Homo sapien
tataatcacaaatacctcggatggg

SEQ ID NO: 2348834 - DNA, 25 bp, Homo sapien
tcttaaagacttttatagtggatcc

SEQ ID NO: 2348835 - DNA, 25 bp, Homo sapien
tttgctatcttcttaaagactttta

SEQ ID NO: 2348836 - DNA, 25 bp, Homo sapien
aaatttgctatcttcttaaagactt

SEQ ID NO: 2348837 - DNA, 25 bp, Homo sapien
atcttcttaaagacttttatagtgg

SEQ ID NO: 2348838 - DNA, 25 bp, Homo sapien
gatctctgatctcttgctggtagga

SEQ ID NO: 2348839 - DNA, 25 bp, Homo sapien
ggccccatttgtgctgtatactgaa

SEQ ID NO: 2348840 - DNA, 25 bp, Homo sapien
caagagaccaaatctagtccaggag

SEQ ID NO: 2348841 - DNA, 25 bp, Homo sapien
ggactactgggcatatagcaatgaa

SEQ ID NO: 2348842 - DNA, 25 bp, Homo sapien
caaatggcagtggtcatccgagtac

SEQ ID NO: 2348843 - DNA, 25 bp, Homo sapien
tggcagtggtcatccgagtactcca

SEQ ID NO: 2348844 - DNA, 25 bp, Homo sapien
aatggcagtggtcatccgagtactc

SEQ ID NO: 2348845 - DNA, 25 bp, Homo sapien
cagtggtcatccgagtactccacat

SEQ ID NO: 2348846 - DNA, 25 bp, Homo sapien
tcttttactttgaacttgtgcttcc

SEQ ID NO: 2348847 - DNA, 25 bp, Homo sapien
gcttccctcgatgtctctttccttg

SEQ ID NO: 2348848 - DNA, 25 bp, Homo sapien
tccttgcacatcttggaatgcttcc

SEQ ID NO: 2348849 - DNA, 25 bp, Homo sapien
acatcttggaatgcttccgaatctg

SEQ ID NO: 2348850 - DNA, 25 bp, Homo sapien
ttttccaaatatgtacgacgtcagg

SEQ ID NO: 2348851 - DNA, 25 bp, Homo sapien
tgtacgacgtcaggatctgtgattt

SEQ ID NO: 2348852 - DNA, 25 bp, Homo sapien
gttgggtaaactccaaatgcttcta

SEQ ID NO: 2348853 - DNA, 25 bp, Homo sapien
cagcctgggcgtccaaaaagtcaaa

SEQ ID NO: 2348854 - DNA, 25 bp, Homo sapien
gacagaagcgtcacttggagagaag

SEQ ID NO: 2348855 - DNA, 25 bp, Homo sapien
atgtggtgtcttcttaatgtcaaag

SEQ ID NO: 2348856 - DNA, 25 bp, Homo sapien
caaacagccgtctatatgtggtgtc

SEQ ID NO: 2348857 - DNA, 25 bp, Homo sapien
tcaggatgtttacccagaagcgaag

SEQ ID NO: 2348858 - DNA, 25 bp, Homo sapien
gaatgcctgggcaatcactgacaaa

SEQ ID NO: 2348859 - DNA, 25 bp, Homo sapien
gcaaatccctgattgctttgtaata

SEQ ID NO: 2348860 - DNA, 25 bp, Homo sapien
tgtaggttgggatatccttggcata

SEQ ID NO: 2348861 - DNA, 25 bp, Homo sapien
catagagaagcttattagttggtgc

SEQ ID NO: 2348862 - DNA, 25 bp, Homo sapien
gaggcaaatccctgattgctttgta

SEQ ID NO: 2348863 - DNA, 25 bp, Homo sapien
atttgtaaatttctgtcaaggccac

SEQ ID NO: 2348864 - DNA, 25 bp, Homo sapien
catcaaaatattttacgatgtattt

SEQ ID NO: 2348865 - DNA, 25 bp, Homo sapien
gtaaatttctgtcaaggccacttct

SEQ ID NO: 2348866 - DNA, 25 bp, Homo sapien
tgtatttgtaaatttctgtcaaggc

SEQ ID NO: 2348867 - DNA, 25 bp, Homo sapien
agaatgctataaccacatccttgtg

SEQ ID NO: 2348868 - DNA, 25 bp, Homo sapien
tgggcagcatgataaaactgtaagg

SEQ ID NO: 2348869 - DNA, 25 bp, Homo sapien
gctgtaggccccatgaactcaaatg

SEQ ID NO: 2348870 - DNA, 25 bp, Homo sapien
taatagggccactacttactcatca

SEQ ID NO: 2348871 - DNA, 25 bp, Homo sapien
tcttccagccctcgttctctttcta

SEQ ID NO: 2348872 - DNA, 25 bp, Homo sapien
taagacttttacatgcaagagttgt

SEQ ID NO: 2348873 - DNA, 25 bp, Homo sapien
caaataagacttttacatgcaagag

SEQ ID NO: 2348874 - DNA, 25 bp, Homo sapien
tccagccctcgttctctttctagtt

SEQ ID NO: 2348875 - DNA, 25 bp, Homo sapien
gacacagagtagctcaagcagccat

SEQ ID NO: 2348876 - DNA, 25 bp, Homo sapien
gaactttgccagattaagccaggcc

SEQ ID NO: 2348877 - DNA, 25 bp, Homo sapien
gacagtgcccaaagtggaacctatg

SEQ ID NO: 2348878 - DNA, 25 bp, Homo sapien
gaagggttcccacggtatacacaca

SEQ ID NO: 2348879 - DNA, 25 bp, Homo sapien
ttcactggaggattgacaaacacgc

SEQ ID NO: 2348880 - DNA, 25 bp, Homo sapien
tgatgaccactgaaaaacacgagcc

SEQ ID NO: 2348881 - DNA, 25 bp, Homo sapien
caaggaggctgtttgcaacaaccac

SEQ ID NO: 2348882 - DNA, 25 bp, Homo sapien
tactgacattcgcttactggccttg

SEQ ID NO: 2348883 - DNA, 25 bp, Homo sapien
cagtggacaggaccttttgaccagg

SEQ ID NO: 2348884 - DNA, 25 bp, Homo sapien
cacctgcaccagtgttttttggcta

SEQ ID NO: 2348885 - DNA, 25 bp, Homo sapien
ctggaacagagctcccaaagagagg

SEQ ID NO: 2348886 - DNA, 25 bp, Homo sapien
acagtttcaaacctccctggaacag

SEQ ID NO: 2348887 - DNA, 25 bp, Homo sapien
caaagttcttgttagcaaactcaag

SEQ ID NO: 2348888 - DNA, 25 bp, Homo sapien
tgctgggaacatatgttgaagccaa

SEQ ID NO: 2348889 - DNA, 25 bp, Homo sapien
aaaaagtctagagtcgaggctgggc

SEQ ID NO: 2348890 - DNA, 25 bp, Homo sapien
tattatctctctcgtttgtctgctg

SEQ ID NO: 2348891 - DNA, 25 bp, Homo sapien
tagcgcactacagcatctacagcac

SEQ ID NO: 2348892 - DNA, 25 bp, Homo sapien
cctgatgcgaaacttaatgtgaatg

SEQ ID NO: 2348893 - DNA, 25 bp, Homo sapien
tactcttgggaggtcattatcctga

SEQ ID NO: 2348894 - DNA, 25 bp, Homo sapien
tgaatgcccaattgcagtagcgcac

SEQ ID NO: 2348895 - DNA, 25 bp, Homo sapien
taccacctctagaatggaagttgca

SEQ ID NO: 2348896 - DNA, 25 bp, Homo sapien
tgcatgagaggaggaacctttacct

SEQ ID NO: 2348897 - DNA, 25 bp, Homo sapien
caggataagactgcagataacaagt

SEQ ID NO: 2348898 - DNA, 25 bp, Homo sapien
gagactagtctcctttggtgaagtg

SEQ ID NO: 2348899 - DNA, 25 bp, Homo sapien
caacagaaccaagtggcagtggaca

SEQ ID NO: 2348900 - DNA, 25 bp, Homo sapien
cagtgtttcagtcgaggagagcagc

SEQ ID NO: 2348901 - DNA, 25 bp, Homo sapien
cacaggcatgtatatgctgacggct

SEQ ID NO: 2348902 - DNA, 25 bp, Homo sapien
ccgtcggccctgctaaggactaaca

SEQ ID NO: 2348903 - DNA, 25 bp, Homo sapien
tgggatttcaccatgttagccagga

SEQ ID NO: 2348904 - DNA, 25 bp, Homo sapien
atgggatttcaccatgttagccagg

SEQ ID NO: 2348905 - DNA, 25 bp, Homo sapien
tacaggtgcacgccactgtgcctgg

SEQ ID NO: 2348906 - DNA, 25 bp, Homo sapien
acaggtgcacgccactgtgcctggc

SEQ ID NO: 2348907 - DNA, 25 bp, Homo sapien
tttgttgggctgtttagatgtgtca

SEQ ID NO: 2348908 - DNA, 25 bp, Homo sapien
cccactgcatatttcgtgtacagta

SEQ ID NO: 2348909 - DNA, 25 bp, Homo sapien
tctctctttactgaccttctagaac

SEQ ID NO: 2348910 - DNA, 25 bp, Homo sapien
tgttgttgccctgtatgtgaagtca

SEQ ID NO: 2348911 - DNA, 25 bp, Homo sapien
tttctataaggttcaactccaccat

SEQ ID NO: 2348912 - DNA, 25 bp, Homo sapien
ttttctataaggttcaactccacca

SEQ ID NO: 2348913 - DNA, 25 bp, Homo sapien
ttcaagtgtatgttctttatggaaa

SEQ ID NO: 2348914 - DNA, 25 bp, Homo sapien
tttatcctttccatattagtctgca

SEQ ID NO: 2348915 - DNA, 25 bp, Homo sapien
ctaaacctgctctgtactttatcct

SEQ ID NO: 2348916 - DNA, 25 bp, Homo sapien
tttatggaaaaggtgtctctgccca

SEQ ID NO: 2348917 - DNA, 25 bp, Homo sapien
tagtcccaatgcctccgtaagcgga

SEQ ID NO: 2348918 - DNA, 25 bp, Homo sapien
gcgcggccagaactgcggtcactta

SEQ ID NO: 2348919 - DNA, 25 bp, Homo sapien
cacaaactgcccttgaatccttttt

SEQ ID NO: 2348920 - DNA, 25 bp, Homo sapien
cgtgcgtgcgtctggtatgtaacct

SEQ ID NO: 2348921 - DNA, 25 bp, Homo sapien
aaaacccctggagacgctgtgtcgg

SEQ ID NO: 2348922 - DNA, 25 bp, Homo sapien
gaggttccctcgtggcaagctgagc

SEQ ID NO: 2348923 - DNA, 25 bp, Homo sapien
gcaggactaccatttgaggctctca

SEQ ID NO: 2348924 - DNA, 25 bp, Homo sapien
ttctgggccatacgtcagcacgtgg

SEQ ID NO: 2348925 - DNA, 25 bp, Homo sapien
ggcatgattatgcttgcctcataaa

SEQ ID NO: 2348926 - DNA, 25 bp, Homo sapien
tggtgtaggattggtactttgtccc

SEQ ID NO: 2348927 - DNA, 25 bp, Homo sapien
gcaagttcaatctgctaatacttaa

SEQ ID NO: 2348928 - DNA, 25 bp, Homo sapien
ttcactggtgcagtcatctgcccgg

SEQ ID NO: 2348929 - DNA, 25 bp, Homo sapien
tccatagagaagtgagcatctcttg

SEQ ID NO: 2348930 - DNA, 25 bp, Homo sapien
atagagaagtgagcatctcttggcc

SEQ ID NO: 2348931 - DNA, 25 bp, Homo sapien
ccatagagaagtgagcatctcttgg

SEQ ID NO: 2348932 - DNA, 25 bp, Homo sapien
catagagaagtgagcatctcttggc

SEQ ID NO: 2348933 - DNA, 25 bp, Homo sapien
tcactatatcgatgccaaagttaat

SEQ ID NO: 2348934 - DNA, 25 bp, Homo sapien
taatgcagacaccagatcggcacag

SEQ ID NO: 2348935 - DNA, 25 bp, Homo sapien
atgcagacaccagatcggcacagcg

SEQ ID NO: 2348936 - DNA, 25 bp, Homo sapien
accagatcggcacagcgcactactg

SEQ ID NO: 2348937 - DNA, 25 bp, Homo sapien
gatgcaaggaggcaaagttatttgg

SEQ ID NO: 2348938 - DNA, 25 bp, Homo sapien
tggtgtaaagaagagccccttgtcc

SEQ ID NO: 2348939 - DNA, 25 bp, Homo sapien
atgtaacacatcctgaaatgaaagc

SEQ ID NO: 2348940 - DNA, 25 bp, Homo sapien
aagtaaatatgagcgaattgggcct

SEQ ID NO: 2348941 - DNA, 25 bp, Homo sapien
aaatggaatagcacacttaggactc

SEQ ID NO: 2348942 - DNA, 25 bp, Homo sapien
tgaaggtacgtattaaaagagacta

SEQ ID NO: 2348943 - DNA, 25 bp, Homo sapien
tccatatgagaatagtgaacctgaa

SEQ ID NO: 2348944 - DNA, 25 bp, Homo sapien
acaacatgaggttataagggaagga

SEQ ID NO: 2348945 - DNA, 25 bp, Homo sapien
tttctagcaacagaatcgacccggg

SEQ ID NO: 2348946 - DNA, 25 bp, Homo sapien
acaaagagtctttgctctcccagtt

SEQ ID NO: 2348947 - DNA, 25 bp, Homo sapien
cccagtttgctttctagcaacagaa

SEQ ID NO: 2348948 - DNA, 25 bp, Homo sapien
tggacacaaagagtctttgctctcc

SEQ ID NO: 2348949 - DNA, 25 bp, Homo sapien
gagagtgttcacatggcccacactg

SEQ ID NO: 2348950 - DNA, 25 bp, Homo sapien
gagtgttcacatggcccacactggc

SEQ ID NO: 2348951 - DNA, 25 bp, Homo sapien
cactggccaatgtggcccttggagg

SEQ ID NO: 2348952 - DNA, 25 bp, Homo sapien
gcccacactggccaatgtggccctt

SEQ ID NO: 2348953 - DNA, 25 bp, Homo sapien
acctagtgggcgctgtccctcagag

SEQ ID NO: 2348954 - DNA, 25 bp, Homo sapien
tgaagacctagtgggcgctgtccct

SEQ ID NO: 2348955 - DNA, 25 bp, Homo sapien
tagtgggcgctgtccctcagagccc

SEQ ID NO: 2348956 - DNA, 25 bp, Homo sapien
cttgaagacctagtgggcgctgtcc

SEQ ID NO: 2348957 - DNA, 25 bp, Homo sapien
tttccccactgaacggtcaggaaga

SEQ ID NO: 2348958 - DNA, 25 bp, Homo sapien
cacttttccccactgaacggtcagg

SEQ ID NO: 2348959 - DNA, 25 bp, Homo sapien
cccactgaacggtcaggaagagagg

SEQ ID NO: 2348960 - DNA, 25 bp, Homo sapien
tccccactgaacggtcaggaagaga

SEQ ID NO: 2348961 - DNA, 25 bp, Homo sapien
ggaagtttctagtgtctgatgctgg

SEQ ID NO: 2348962 - DNA, 25 bp, Homo sapien
aagatgtggtcgtctggttggaatc

SEQ ID NO: 2348963 - DNA, 25 bp, Homo sapien
gttggaatcagggaccaggagactt

SEQ ID NO: 2348964 - DNA, 25 bp, Homo sapien
gcctgtgagaaacgtggttgcccca

SEQ ID NO: 2348965 - DNA, 25 bp, Homo sapien
cagcaaataggcctccgccaagtgt

SEQ ID NO: 2348966 - DNA, 25 bp, Homo sapien
ggcctccgccaagtgtatggcctca

SEQ ID NO: 2348967 - DNA, 25 bp, Homo sapien
tccgccaagtgtatggcctcacctg

SEQ ID NO: 2348968 - DNA, 25 bp, Homo sapien
aagtgtatggcctcacctggagcaa

SEQ ID NO: 2348969 - DNA, 25 bp, Homo sapien
catcttctggaggttaattgaactg

SEQ ID NO: 2348970 - DNA, 25 bp, Homo sapien
ccatcttctggaggttaattgaact

SEQ ID NO: 2348971 - DNA, 25 bp, Homo sapien
atcttctggaggttaattgaactgc

SEQ ID NO: 2348972 - DNA, 25 bp, Homo sapien
tttagtctcttagcggcctcaagag

SEQ ID NO: 2348973 - DNA, 25 bp, Homo sapien
atttagtctcttagcggcctcaaga

SEQ ID NO: 2348974 - DNA, 25 bp, Homo sapien
cttagcggcctcaagagcttcattc

SEQ ID NO: 2348975 - DNA, 25 bp, Homo sapien
ggcctcaagagcttcattcgcagtg

SEQ ID NO: 2348976 - DNA, 25 bp, Homo sapien
caacattagggtcttttgttaaatg

SEQ ID NO: 2348977 - DNA, 25 bp, Homo sapien
tctgctgttgagtatttcctgggcc

SEQ ID NO: 2348978 - DNA, 25 bp, Homo sapien
tggttccttcaagccaaaccacaag

SEQ ID NO: 2348979 - DNA, 25 bp, Homo sapien
ctgggcaggcttacagtgacagaaa

SEQ ID NO: 2348980 - DNA, 25 bp, Homo sapien
aagtctgcaaaacactgcctactgg

SEQ ID NO: 2348981 - DNA, 25 bp, Homo sapien
tgcctactgggcaggcttacagtga

SEQ ID NO: 2348982 - DNA, 25 bp, Homo sapien
aaaatcagatttaggctgtctagat

SEQ ID NO: 2348983 - DNA, 25 bp, Homo sapien
caacaaaattggacatcatggaaaa

SEQ ID NO: 2348984 - DNA, 25 bp, Homo sapien
cacaacaaaattggacatcatggaa

SEQ ID NO: 2348985 - DNA, 25 bp, Homo sapien
cccacaacaaaattggacatcatgg

SEQ ID NO: 2348986 - DNA, 25 bp, Homo sapien
tcccacaacaaaattggacatcatg

SEQ ID NO: 2348987 - DNA, 25 bp, Homo sapien
tggaacggagacacgatgcaaaatc

SEQ ID NO: 2348988 - DNA, 25 bp, Homo sapien
tgatggaacggagacacgatgcaaa

SEQ ID NO: 2348989 - DNA, 25 bp, Homo sapien
cggagacacgatgcaaaatcagatt

SEQ ID NO: 2348990 - DNA, 25 bp, Homo sapien
cgatgcaaaatcagattcaggcttt

SEQ ID NO: 2348991 - DNA, 25 bp, Homo sapien
gatatgaaacagaactaacctatag

SEQ ID NO: 2348992 - DNA, 25 bp, Homo sapien
catgcacaaaggaacgagttggttt

SEQ ID NO: 2348993 - DNA, 25 bp, Homo sapien
aattcagggcttatatgaagaggtg

SEQ ID NO: 2348994 - DNA, 25 bp, Homo sapien
gaaatggcaccacttaaaattcagg

SEQ ID NO: 2348995 - DNA, 25 bp, Homo sapien
cactcctgagtggttgaagatgctg

SEQ ID NO: 2348996 - DNA, 25 bp, Homo sapien
tggacattggattctagcactgggt

SEQ ID NO: 2348997 - DNA, 25 bp, Homo sapien
tctggtgacatagtctcctgtgggt

SEQ ID NO: 2348998 - DNA, 25 bp, Homo sapien
gggcaaacccaaagatggaaagtgc

SEQ ID NO: 2348999 - DNA, 25 bp, Homo sapien
catgaattcctttgaaataattcat

SEQ ID NO: 2349000 - DNA, 25 bp, Homo sapien
gatcatgaattcctttgaaataatt

SEQ ID NO: 2349001 - DNA, 25 bp, Homo sapien
ggatcatgaattcctttgaaataat

SEQ ID NO: 2349002 - DNA, 25 bp, Homo sapien
ctggatcatgaattcctttgaaata

SEQ ID NO: 2349003 - DNA, 25 bp, Homo sapien
taccgcgttgatgtgtatacactga

SEQ ID NO: 2349004 - DNA, 25 bp, Homo sapien
gatgtgtatacactgatctttcaag

SEQ ID NO: 2349005 - DNA, 25 bp, Homo sapien
ctggtctaccgcgttgatgtgtata

SEQ ID NO: 2349006 - DNA, 25 bp, Homo sapien
tccccctggtctaccgcgttgatgt

SEQ ID NO: 2349007 - DNA, 25 bp, Homo sapien
taggtcccgtcatgtactcagtgtc

SEQ ID NO: 2349008 - DNA, 25 bp, Homo sapien
gtaacgtggaaatcttatcacacac

SEQ ID NO: 2349009 - DNA, 25 bp, Homo sapien
cacagcagtcagtcgtgtatgaccc

SEQ ID NO: 2349010 - DNA, 25 bp, Homo sapien
tatggtccccgtgtgatccaccctg

SEQ ID NO: 2349011 - DNA, 25 bp, Homo sapien
ccttgagactaagcaggccgttgtc

SEQ ID NO: 2349012 - DNA, 25 bp, Homo sapien
taaaagccttcaggtattgaacgtg

SEQ ID NO: 2349013 - DNA, 25 bp, Homo sapien
attgaacgtgcaggtccttgtggac

SEQ ID NO: 2349014 - DNA, 25 bp, Homo sapien
tgccagcccatttgaaggatctgac

SEQ ID NO: 2349015 - DNA, 25 bp, Homo sapien
tagtagtcgcggtttcttcctcatc

SEQ ID NO: 2349016 - DNA, 25 bp, Homo sapien
ccttgtacatttagaaaggctactg

SEQ ID NO: 2349017 - DNA, 25 bp, Homo sapien
ccagctgtcaatggaggggcaacca

SEQ ID NO: 2349018 - DNA, 25 bp, Homo sapien
acgaagtctcgtattttccatacag

SEQ ID NO: 2349019 - DNA, 25 bp, Homo sapien
gaggttttactgacagacactgcca

SEQ ID NO: 2349020 - DNA, 25 bp, Homo sapien
ctctgctctctgactaagggcctca

SEQ ID NO: 2349021 - DNA, 25 bp, Homo sapien
gagtaaactcgatattcccacatcc

SEQ ID NO: 2349022 - DNA, 25 bp, Homo sapien
gcctcagagactcgtttttcctggg

SEQ ID NO: 2349023 - DNA, 25 bp, Homo sapien
gaaatggagagtgcgtctgaactgg

SEQ ID NO: 2349024 - DNA, 25 bp, Homo sapien
gagtgcgtctgaactgggcctcctc

SEQ ID NO: 2349025 - DNA, 25 bp, Homo sapien
gagagtgcgtctgaactgggcctcc

SEQ ID NO: 2349026 - DNA, 25 bp, Homo sapien
tggagagtgcgtctgaactgggcct

SEQ ID NO: 2349027 - DNA, 25 bp, Homo sapien
tgtgcccagtccactgctggcattt

SEQ ID NO: 2349028 - DNA, 25 bp, Homo sapien
ttcatcacattggtgtttactgtgc

SEQ ID NO: 2349029 - DNA, 25 bp, Homo sapien
tggcatttgctctgcctaacaaggt

SEQ ID NO: 2349030 - DNA, 25 bp, Homo sapien
acaaggtttgttgagccgagcccat

SEQ ID NO: 2349031 - DNA, 25 bp, Homo sapien
taggtgagaccagagtcccaaaaag

SEQ ID NO: 2349032 - DNA, 25 bp, Homo sapien
tcctcagagagttgcctaaggcgct

SEQ ID NO: 2349033 - DNA, 25 bp, Homo sapien
gccccaggtcgtatagctgctaaga

SEQ ID NO: 2349034 - DNA, 25 bp, Homo sapien
ctaaggcgctgtcaccaatgggctc

SEQ ID NO: 2349035 - DNA, 25 bp, Homo sapien
tagggcctgggcatcaatcttgctt

SEQ ID NO: 2349036 - DNA, 25 bp, Homo sapien
taaacacgcatgtttagcacaaggg

SEQ ID NO: 2349037 - DNA, 25 bp, Homo sapien
gataacacagcgttttctaagcatg

SEQ ID NO: 2349038 - DNA, 25 bp, Homo sapien
ctttaggtgtgcacgaggcaatgcc

SEQ ID NO: 2349039 - DNA, 25 bp, Homo sapien
agcctggtgggtttgcttacccgca

SEQ ID NO: 2349040 - DNA, 25 bp, Homo sapien
tgggtttgcttacccgcagtgttaa

SEQ ID NO: 2349041 - DNA, 25 bp, Homo sapien
agagcctggtgggtttgcttacccg

SEQ ID NO: 2349042 - DNA, 25 bp, Homo sapien
tggtgggtttgcttacccgcagtgt

SEQ ID NO: 2349043 - DNA, 25 bp, Homo sapien
aaaggctcttccacatactggtcct

SEQ ID NO: 2349044 - DNA, 25 bp, Homo sapien
gtccctgagattgcctgaagctgta

SEQ ID NO: 2349045 - DNA, 25 bp, Homo sapien
tccctgagattgcctgaagctgtag

SEQ ID NO: 2349046 - DNA, 25 bp, Homo sapien
cacatactggtcctcacttcctcga

SEQ ID NO: 2349047 - DNA, 25 bp, Homo sapien
ccaagaaatggtgtgatccgaaaac

SEQ ID NO: 2349048 - DNA, 25 bp, Homo sapien
gaaagaattccgagggcaggttgac

SEQ ID NO: 2349049 - DNA, 25 bp, Homo sapien
gaagtcatagtaacaggctccgtgt

SEQ ID NO: 2349050 - DNA, 25 bp, Homo sapien
tcattaaggtcatagggatcagtgc

SEQ ID NO: 2349051 - DNA, 25 bp, Homo sapien
gcccctgtgccggtaaagatggaca

SEQ ID NO: 2349052 - DNA, 25 bp, Homo sapien
taatgggtgcctagcccacacgtgt

SEQ ID NO: 2349053 - DNA, 25 bp, Homo sapien
tagccagggcatttattcgggattc

SEQ ID NO: 2349054 - DNA, 25 bp, Homo sapien
gacaccgtgctctctttacagccaa

SEQ ID NO: 2349055 - DNA, 25 bp, Homo sapien
atggatatgtgacatttggtggaca

SEQ ID NO: 2349056 - DNA, 25 bp, Homo sapien
gatatgtgacatttggtggacattt

SEQ ID NO: 2349057 - DNA, 25 bp, Homo sapien
tatgtgacatttggtggacatttgg

SEQ ID NO: 2349058 - DNA, 25 bp, Homo sapien
tggatatgtgacatttggtggacat

SEQ ID NO: 2349059 - DNA, 25 bp, Homo sapien
gcagggatgtctcttgttgtttgta

SEQ ID NO: 2349060 - DNA, 25 bp, Homo sapien
agggatgtctcttgttgtttgtagg

SEQ ID NO: 2349061 - DNA, 25 bp, Homo sapien
cctgcagggatgtctcttgttgttt

SEQ ID NO: 2349062 - DNA, 25 bp, Homo sapien
ctgcagggatgtctcttgttgtttg

SEQ ID NO: 2349063 - DNA, 25 bp, Homo sapien
ttcgaaatttgaatgatcagccttt

SEQ ID NO: 2349064 - DNA, 25 bp, Homo sapien
tcgaaatttgaatgatcagcctttg

SEQ ID NO: 2349065 - DNA, 25 bp, Homo sapien
tattcgaaatttgaatgatcagcct

SEQ ID NO: 2349066 - DNA, 25 bp, Homo sapien
ttattcgaaatttgaatgatcagcc

SEQ ID NO: 2349067 - DNA, 25 bp, Homo sapien
ttcaaaataaagacggaggccgcag

SEQ ID NO: 2349068 - DNA, 25 bp, Homo sapien
tccccagggctgattgaagtgccat

SEQ ID NO: 2349069 - DNA, 25 bp, Homo sapien
ctgcagagacgagccctgtagggct

SEQ ID NO: 2349070 - DNA, 25 bp, Homo sapien
cccgggctgttgaatcgtcgaggct

SEQ ID NO: 2349071 - DNA, 25 bp, Homo sapien
gatcctccgagctaaaagggtgggc

SEQ ID NO: 2349072 - DNA, 25 bp, Homo sapien
ccggagtttcgagccgagccgagca

SEQ ID NO: 2349073 - DNA, 25 bp, Homo sapien
gccctcgccattgtttgcagtgtaa

SEQ ID NO: 2349074 - DNA, 25 bp, Homo sapien
aagtcagaatctttgcgctgcctct

SEQ ID NO: 2349075 - DNA, 25 bp, Homo sapien
caaaaccctaggcattggcattgcg

SEQ ID NO: 2349076 - DNA, 25 bp, Homo sapien
taattttgtatgagtgcccagcaga

SEQ ID NO: 2349077 - DNA, 25 bp, Homo sapien
tacattgacaggaggaatttgcacc

SEQ ID NO: 2349078 - DNA, 25 bp, Homo sapien
tctcattgagggtcagcattccagg

SEQ ID NO: 2349079 - DNA, 25 bp, Homo sapien
catttgtataaagcgtttttactgg

SEQ ID NO: 2349080 - DNA, 25 bp, Homo sapien
caattatgatagatattgggaatac

SEQ ID NO: 2349081 - DNA, 25 bp, Homo sapien
cttgcatttgtataaagcgttttta

SEQ ID NO: 2349082 - DNA, 25 bp, Homo sapien
agatattgggaataccttgcatttg

SEQ ID NO: 2349083 - DNA, 25 bp, Homo sapien
tgttatccaaattaggacacaatgg

SEQ ID NO: 2349084 - DNA, 25 bp, Homo sapien
ccttgactttgtgaggccattttag

SEQ ID NO: 2349085 - DNA, 25 bp, Homo sapien
cacaatggtgcccatatcctgtggg

SEQ ID NO: 2349086 - DNA, 25 bp, Homo sapien
tcctgggtcttggatccttgacttt

SEQ ID NO: 2349087 - DNA, 25 bp, Homo sapien
aattgttgatctctatattcactgc

SEQ ID NO: 2349088 - DNA, 25 bp, Homo sapien
ctttatgttcagaattgttgatctc

SEQ ID NO: 2349089 - DNA, 25 bp, Homo sapien
tgttcagaattgttgatctctatat

SEQ ID NO: 2349090 - DNA, 25 bp, Homo sapien
cattctttatgttcagaattgttga

SEQ ID NO: 2349091 - DNA, 25 bp, Homo sapien
tatgatgtcagcctctcttatgctg

SEQ ID NO: 2349092 - DNA, 25 bp, Homo sapien
gatgtcagcctctcttatgctgaca

SEQ ID NO: 2349093 - DNA, 25 bp, Homo sapien
ttatgctgacattcccttcttgttc

SEQ ID NO: 2349094 - DNA, 25 bp, Homo sapien
gcctctcttatgctgacattccctt

SEQ ID NO: 2349095 - DNA, 25 bp, Homo sapien
atgtccagagtaatgtatgtgtctc

SEQ ID NO: 2349096 - DNA, 25 bp, Homo sapien
tcaagctctccactgcgcttatgtg

SEQ ID NO: 2349097 - DNA, 25 bp, Homo sapien
tcttcttctctccaattctaatgtc

SEQ ID NO: 2349098 - DNA, 25 bp, Homo sapien
ccactgcgcttatgtgatatcatca

SEQ ID NO: 2349099 - DNA, 25 bp, Homo sapien
attctgttcgcagctgcccagactg

SEQ ID NO: 2349100 - DNA, 25 bp, Homo sapien
gattctgttcgcagctgcccagact

SEQ ID NO: 2349101 - DNA, 25 bp, Homo sapien
cagattctgttcgcagctgcccaga

SEQ ID NO: 2349102 - DNA, 25 bp, Homo sapien
ttaaagcaatctctggacagatggg

SEQ ID NO: 2349103 - DNA, 25 bp, Homo sapien
gagtactctgtattcaccccttcct

SEQ ID NO: 2349104 - DNA, 25 bp, Homo sapien
tgtgccttgcactggttactggaca

SEQ ID NO: 2349105 - DNA, 25 bp, Homo sapien
cttccttccagtgtgccttgcactg

SEQ ID NO: 2349106 - DNA, 25 bp, Homo sapien
tggagcctgccagagtactctgtat

SEQ ID NO: 2349107 - DNA, 25 bp, Homo sapien
ccctcacttggacagtgtttgtcct

SEQ ID NO: 2349108 - DNA, 25 bp, Homo sapien
cctcacttggacagtgtttgtcctc

SEQ ID NO: 2349109 - DNA, 25 bp, Homo sapien
gcccctcacttggacagtgtttgtc

SEQ ID NO: 2349110 - DNA, 25 bp, Homo sapien
tgcccctcacttggacagtgtttgt

SEQ ID NO: 2349111 - DNA, 25 bp, Homo sapien
taagaagcagattagtcctttgcga

SEQ ID NO: 2349112 - DNA, 25 bp, Homo sapien
caggtgtctccaatatgatagcgtc

SEQ ID NO: 2349113 - DNA, 25 bp, Homo sapien
taatcccctttaggccgcacagtgg

SEQ ID NO: 2349114 - DNA, 25 bp, Homo sapien
gataaaagcgacttgacagctggta

SEQ ID NO: 2349115 - DNA, 25 bp, Homo sapien
agagacacagattcgcccctttggg

SEQ ID NO: 2349116 - DNA, 25 bp, Homo sapien
gagacacagattcgcccctttggga

SEQ ID NO: 2349117 - DNA, 25 bp, Homo sapien
tcagagacacagattcgcccctttg

SEQ ID NO: 2349118 - DNA, 25 bp, Homo sapien
cagagacacagattcgcccctttgg

SEQ ID NO: 2349119 - DNA, 25 bp, Homo sapien
tattcattgtggtggaacactgagc

SEQ ID NO: 2349120 - DNA, 25 bp, Homo sapien
cactggggaccagggatttggcagc

SEQ ID NO: 2349121 - DNA, 25 bp, Homo sapien
gctggctcggtggcttattcattgt

SEQ ID NO: 2349122 - DNA, 25 bp, Homo sapien
ggctcggtggcttattcattgtggt

SEQ ID NO: 2349123 - DNA, 25 bp, Homo sapien
atatgcactgagtaacttttcatcc

SEQ ID NO: 2349124 - DNA, 25 bp, Homo sapien
tgcactgagtaacttttcatcctct

SEQ ID NO: 2349125 - DNA, 25 bp, Homo sapien
catatgcactgagtaacttttcatc

SEQ ID NO: 2349126 - DNA, 25 bp, Homo sapien
tatgcactgagtaacttttcatcct

SEQ ID NO: 2349127 - DNA, 25 bp, Homo sapien
tgccttctgccctccctgcgggtca

SEQ ID NO: 2349128 - DNA, 25 bp, Homo sapien
ctggatttgccaggattcctgcctt

SEQ ID NO: 2349129 - DNA, 25 bp, Homo sapien
tccctgcgggtcagccccgttcagc

SEQ ID NO: 2349130 - DNA, 25 bp, Homo sapien
cctggatttgccaggattcctgcct

SEQ ID NO: 2349131 - DNA, 25 bp, Homo sapien
catgcttgagccagcagggatcagt

SEQ ID NO: 2349132 - DNA, 25 bp, Homo sapien
cagggatcagttgtgtctgcgtgtc

SEQ ID NO: 2349133 - DNA, 25 bp, Homo sapien
gagagcccagccgctctgactctcc

SEQ ID NO: 2349134 - DNA, 25 bp, Homo sapien
tgtccattactgactgggtcatctt

SEQ ID NO: 2349135 - DNA, 25 bp, Homo sapien
tctcctcttctaagggatctggaga

SEQ ID NO: 2349136 - DNA, 25 bp, Homo sapien
cgtgtgaggaccgtcacagcttgca

SEQ ID NO: 2349137 - DNA, 25 bp, Homo sapien
tgcatcccgtttctcctcttctaag

SEQ ID NO: 2349138 - DNA, 25 bp, Homo sapien
gagagttgctggcttccatcatctt

SEQ ID NO: 2349139 - DNA, 25 bp, Homo sapien
cctttctctgcagtgtcccgtatct

SEQ ID NO: 2349140 - DNA, 25 bp, Homo sapien
acttcaagttgaaacaccttctctc

SEQ ID NO: 2349141 - DNA, 25 bp, Homo sapien
cccttcacttcaagttgaaacacct

SEQ ID NO: 2349142 - DNA, 25 bp, Homo sapien
tcccgtatctttgaacaccatcctt

SEQ ID NO: 2349143 - DNA, 25 bp, Homo sapien
tgctggcgttgctgaattctcacac

SEQ ID NO: 2349144 - DNA, 25 bp, Homo sapien
ttgcatgaaaggctctcctgtggcc

SEQ ID NO: 2349145 - DNA, 25 bp, Homo sapien
taactttacttagagtcacgcaggc

SEQ ID NO: 2349146 - DNA, 25 bp, Homo sapien
gaatcctccataacgtaagactgga

SEQ ID NO: 2349147 - DNA, 25 bp, Homo sapien
acatgcatgaccaagcaggcacaca

SEQ ID NO: 2349148 - DNA, 25 bp, Homo sapien
agctttcagccgcttagacaaacac

SEQ ID NO: 2349149 - DNA, 25 bp, Homo sapien
caaaccaatcctgctacggggacaa

SEQ ID NO: 2349150 - DNA, 25 bp, Homo sapien
ctgtgctgtaaactgcgctggagag

SEQ ID NO: 2349151 - DNA, 25 bp, Homo sapien
cagcagtcaagagtggggattttgc

SEQ ID NO: 2349152 - DNA, 25 bp, Homo sapien
ctcaccttccctgaatgtagcattc

SEQ ID NO: 2349153 - DNA, 25 bp, Homo sapien
tcaagagtggggattttgcattatt

SEQ ID NO: 2349154 - DNA, 25 bp, Homo sapien
ttctcaccttccctgaatgtagcat

SEQ ID NO: 2349155 - DNA, 25 bp, Homo sapien
gcaccaccccagtaccctgccctca

SEQ ID NO: 2349156 - DNA, 25 bp, Homo sapien
gacattcactattccgcctttctcg

SEQ ID NO: 2349157 - DNA, 25 bp, Homo sapien
tctgtgacattcactattccgcctt

SEQ ID NO: 2349158 - DNA, 25 bp, Homo sapien
tattccgcctttctcggatgttaag

SEQ ID NO: 2349159 - DNA, 25 bp, Homo sapien
cctttctcggatgttaagcttcctt

SEQ ID NO: 2349160 - DNA, 25 bp, Homo sapien
gagtgatgaggtccctcccctttcc

SEQ ID NO: 2349161 - DNA, 25 bp, Homo sapien
tgagtgatgaggtccctcccctttc

SEQ ID NO: 2349162 - DNA, 25 bp, Homo sapien
aaatgctgctgggattcgggaaaca

SEQ ID NO: 2349163 - DNA, 25 bp, Homo sapien
tgctgctgggattcgggaaacagca

SEQ ID NO: 2349164 - DNA, 25 bp, Homo sapien
gctgggattcgggaaacagcagctc

SEQ ID NO: 2349165 - DNA, 25 bp, Homo sapien
gggattcgggaaacagcagctctct

SEQ ID NO: 2349166 - DNA, 25 bp, Homo sapien
ttcttaaaggcccaagaactgtgct

SEQ ID NO: 2349167 - DNA, 25 bp, Homo sapien
tgctgctggaaacaacctcagcctt

SEQ ID NO: 2349168 - DNA, 25 bp, Homo sapien
cttgctggtcatgagcttgtgttgc

SEQ ID NO: 2349169 - DNA, 25 bp, Homo sapien
ttaaaggcccaagaactgtgctgct

SEQ ID NO: 2349170 - DNA, 25 bp, Homo sapien
ggcatttggccatgtaatatgggaa

SEQ ID NO: 2349171 - DNA, 25 bp, Homo sapien
ctggaaaatgggtatgagggaccac

SEQ ID NO: 2349172 - DNA, 25 bp, Homo sapien
cagtgtgtttcaggtaccttcttat

SEQ ID NO: 2349173 - DNA, 25 bp, Homo sapien
gagggaccacagcagtcatctaatc

SEQ ID NO: 2349174 - DNA, 25 bp, Homo sapien
tctgactgcagggttctgaccaagc

SEQ ID NO: 2349175 - DNA, 25 bp, Homo sapien
tgtttggctggcaaggtattcagga

SEQ ID NO: 2349176 - DNA, 25 bp, Homo sapien
gggatgctacaggaccagatctgga

SEQ ID NO: 2349177 - DNA, 25 bp, Homo sapien
ggagcatcagggagtatttccctga

SEQ ID NO: 2349178 - DNA, 25 bp, Homo sapien
aaaggagacctaaggttgaggactg

SEQ ID NO: 2349179 - DNA, 25 bp, Homo sapien
ctaaggttgaggactggtcctacct

SEQ ID NO: 2349180 - DNA, 25 bp, Homo sapien
gagacctaaggttgaggactggtcc

SEQ ID NO: 2349181 - DNA, 25 bp, Homo sapien
aggactggtcctacctttgtctttg

SEQ ID NO: 2349182 - DNA, 25 bp, Homo sapien
cattttcttcaccaggttgtggggt

SEQ ID NO: 2349183 - DNA, 25 bp, Homo sapien
ctggcacattttcttcaccaggttg

SEQ ID NO: 2349184 - DNA, 25 bp, Homo sapien
ggcacattttcttcaccaggttgtg

SEQ ID NO: 2349185 - DNA, 25 bp, Homo sapien
cacattttcttcaccaggttgtggg

SEQ ID NO: 2349186 - DNA, 25 bp, Homo sapien
tgccttttgggccgctcactcaggg

SEQ ID NO: 2349187 - DNA, 25 bp, Homo sapien
gccttttgggccgctcactcagggc

SEQ ID NO: 2349188 - DNA, 25 bp, Homo sapien
gagaagaaattagggagtttgtcat

SEQ ID NO: 2349189 - DNA, 25 bp, Homo sapien
gaagaaattagggagtttgtcattg

SEQ ID NO: 2349190 - DNA, 25 bp, Homo sapien
ggagaagaaattagggagtttgtca

SEQ ID NO: 2349191 - DNA, 25 bp, Homo sapien
tggagaagaaattagggagtttgtc

SEQ ID NO: 2349192 - DNA, 25 bp, Homo sapien
cttgtggatgtcatatcatcaaaat

SEQ ID NO: 2349193 - DNA, 25 bp, Homo sapien
tggatgtcatatcatcaaaatagcc

SEQ ID NO: 2349194 - DNA, 25 bp, Homo sapien
ggatgtcatatcatcaaaatagcct

SEQ ID NO: 2349195 - DNA, 25 bp, Homo sapien
tgtggatgtcatatcatcaaaatag

SEQ ID NO: 2349196 - DNA, 25 bp, Homo sapien
aaacagtcagctttgtagccaatta

SEQ ID NO: 2349197 - DNA, 25 bp, Homo sapien
gcatcaggtgatacagagaagggaa

SEQ ID NO: 2349198 - DNA, 25 bp, Homo sapien
ctggtgcatcaggtgatacagagaa

SEQ ID NO: 2349199 - DNA, 25 bp, Homo sapien
ctctgcactgcttactggtgcatca

SEQ ID NO: 2349200 - DNA, 25 bp, Homo sapien
ttaaagttactcctttgcttcatca

SEQ ID NO: 2349201 - DNA, 25 bp, Homo sapien
gttaaagttactcctttgcttcatc

SEQ ID NO: 2349202 - DNA, 25 bp, Homo sapien
taaagttactcctttgcttcatcat

SEQ ID NO: 2349203 - DNA, 25 bp, Homo sapien
ctgttaaagttactcctttgcttca

SEQ ID NO: 2349204 - DNA, 25 bp, Homo sapien
gggtcccagctggatcagacataaa

SEQ ID NO: 2349205 - DNA, 25 bp, Homo sapien
cagcagcactatcccgtggaagggc

SEQ ID NO: 2349206 - DNA, 25 bp, Homo sapien
tggtacccagcagcactatcccgtg

SEQ ID NO: 2349207 - DNA, 25 bp, Homo sapien
tggatcagacataaatccaagcaga

SEQ ID NO: 2349208 - DNA, 25 bp, Homo sapien
ggaaagacacccttcacttgcttgc

SEQ ID NO: 2349209 - DNA, 25 bp, Homo sapien
tgctaccgctgacaaagtggacact

SEQ ID NO: 2349210 - DNA, 25 bp, Homo sapien
tagtaagaggaaagacacccttcac

SEQ ID NO: 2349211 - DNA, 25 bp, Homo sapien
cattgcacattttcgttttaaacag

SEQ ID NO: 2349212 - DNA, 25 bp, Homo sapien
aatcattttcaaaccctggtgtgga

SEQ ID NO: 2349213 - DNA, 25 bp, Homo sapien
tccagttgccgtcattaagccacac

SEQ ID NO: 2349214 - DNA, 25 bp, Homo sapien
ctttcaatccagttgccgtcattaa

SEQ ID NO: 2349215 - DNA, 25 bp, Homo sapien
tgccgtcattaagccacacttgcat

SEQ ID NO: 2349216 - DNA, 25 bp, Homo sapien
aatccagttgccgtcattaagccac

SEQ ID NO: 2349217 - DNA, 25 bp, Homo sapien
ctgccattcagttctctctggtgct

SEQ ID NO: 2349218 - DNA, 25 bp, Homo sapien
tcagttctctctggtgcttggaggc

SEQ ID NO: 2349219 - DNA, 25 bp, Homo sapien
tgccattcagttctctctggtgctt

SEQ ID NO: 2349220 - DNA, 25 bp, Homo sapien
cattcagttctctctggtgcttgga

SEQ ID NO: 2349221 - DNA, 25 bp, Homo sapien
cttggttcattggacaaatggtctt

SEQ ID NO: 2349222 - DNA, 25 bp, Homo sapien
cattggacaaatggtcttcttcaag

SEQ ID NO: 2349223 - DNA, 25 bp, Homo sapien
ggttcattggacaaatggtcttctt

SEQ ID NO: 2349224 - DNA, 25 bp, Homo sapien
tcattggacaaatggtcttcttcaa

SEQ ID NO: 2349225 - DNA, 25 bp, Homo sapien
cttggccgcaacacctttgtgtggc

SEQ ID NO: 2349226 - DNA, 25 bp, Homo sapien
cttacttggccgcaacacctttgtg

SEQ ID NO: 2349227 - DNA, 25 bp, Homo sapien
tacttggccgcaacacctttgtgtg

SEQ ID NO: 2349228 - DNA, 25 bp, Homo sapien
ggccgcaacacctttgtgtggctga

SEQ ID NO: 2349229 - DNA, 25 bp, Homo sapien
cctggcaattgtgttcctgtgccag

SEQ ID NO: 2349230 - DNA, 25 bp, Homo sapien
gattctcgggtgcaaggcctggcaa

SEQ ID NO: 2349231 - DNA, 25 bp, Homo sapien
actctgcaggtgttggtgattctcg

SEQ ID NO: 2349232 - DNA, 25 bp, Homo sapien
gtggcccgttgctttactctgcagg

SEQ ID NO: 2349233 - DNA, 25 bp, Homo sapien
gaggacaaggacacgccgcggctgc

SEQ ID NO: 2349234 - DNA, 25 bp, Homo sapien
ggaggacaaggacacgccgcggctg

SEQ ID NO: 2349235 - DNA, 25 bp, Homo sapien
gacaaggacacgccgcggctgctgg

SEQ ID NO: 2349236 - DNA, 25 bp, Homo sapien
aggacaaggacacgccgcggctgct

SEQ ID NO: 2349237 - DNA, 25 bp, Homo sapien
tctcgttgcccgcaagcaatccgtt

SEQ ID NO: 2349238 - DNA, 25 bp, Homo sapien
cgcaagcaatccgttggacccagac

SEQ ID NO: 2349239 - DNA, 25 bp, Homo sapien
ggcagttgttgaggttatgcatggt

SEQ ID NO: 2349240 - DNA, 25 bp, Homo sapien
tccgttggacccagacaggatgccg

SEQ ID NO: 2349241 - DNA, 25 bp, Homo sapien
tggcaccaagaatcttgtcccgcag

SEQ ID NO: 2349242 - DNA, 25 bp, Homo sapien
ggtcctcgatggtcctgtagtagtg

SEQ ID NO: 2349243 - DNA, 25 bp, Homo sapien
ctgtagttgtgggagggcctgtgcc

SEQ ID NO: 2349244 - DNA, 25 bp, Homo sapien
aatcctggcgttctcaatggtggca

SEQ ID NO: 2349245 - DNA, 25 bp, Homo sapien
agccagttgagcattgttgatctgc

SEQ ID NO: 2349246 - DNA, 25 bp, Homo sapien
cagccagttgagcattgttgatctg

SEQ ID NO: 2349247 - DNA, 25 bp, Homo sapien
tcatctgcagccagttgagcattgt

SEQ ID NO: 2349248 - DNA, 25 bp, Homo sapien
tcagaagtcatctgcagccagttga

SEQ ID NO: 2349249 - DNA, 25 bp, Homo sapien
ctcatccagcacccaaacactcaaa

SEQ ID NO: 2349250 - DNA, 25 bp, Homo sapien
cctcatccagcacccaaacactcaa

SEQ ID NO: 2349251 - DNA, 25 bp, Homo sapien
acctcatccagcacccaaacactca

SEQ ID NO: 2349252 - DNA, 25 bp, Homo sapien
ttccttcaggcctttgatctgtgcc

SEQ ID NO: 2349253 - DNA, 25 bp, Homo sapien
cacttggcccctcagggcattgatt

SEQ ID NO: 2349254 - DNA, 25 bp, Homo sapien
tcaggcctttgatctgtgcctccag

SEQ ID NO: 2349255 - DNA, 25 bp, Homo sapien
ggcccctcagggcattgatttcctc

SEQ ID NO: 2349256 - DNA, 25 bp, Homo sapien
gatctcatattggctttgcctgtca

SEQ ID NO: 2349257 - DNA, 25 bp, Homo sapien
tattggctttgcctgtcactcagga

SEQ ID NO: 2349258 - DNA, 25 bp, Homo sapien
tctcatattggctttgcctgtcact

SEQ ID NO: 2349259 - DNA, 25 bp, Homo sapien
catattggctttgcctgtcactcag

SEQ ID NO: 2349260 - DNA, 25 bp, Homo sapien
agggtgcactgcaggtcagtgacct

SEQ ID NO: 2349261 - DNA, 25 bp, Homo sapien
gccagtgacctcctggttcagttcc

SEQ ID NO: 2349262 - DNA, 25 bp, Homo sapien
tggagctgctctatgtggccagtga

SEQ ID NO: 2349263 - DNA, 25 bp, Homo sapien
ttctaagggagctttcacgctgagc

SEQ ID NO: 2349264 - DNA, 25 bp, Homo sapien
tggacaggttgttgtaatgatcttc

SEQ ID NO: 2349265 - DNA, 25 bp, Homo sapien
tgttttccttgataacccctgtggc

SEQ ID NO: 2349266 - DNA, 25 bp, Homo sapien
taaatcacatctgcacggcggagct

SEQ ID NO: 2349267 - DNA, 25 bp, Homo sapien
tgtagtaagcaagatagtccctctg

SEQ ID NO: 2349268 - DNA, 25 bp, Homo sapien
tcaagccaggaagctaataccttgg

SEQ ID NO: 2349269 - DNA, 25 bp, Homo sapien
ttgacattgggaaaatttatgcata

SEQ ID NO: 2349270 - DNA, 25 bp, Homo sapien
cttgacattgggaaaatttatgcat

SEQ ID NO: 2349271 - DNA, 25 bp, Homo sapien
tgacattgggaaaatttatgcatac

SEQ ID NO: 2349272 - DNA, 25 bp, Homo sapien
aagacacagcggtggccttccattg

SEQ ID NO: 2349273 - DNA, 25 bp, Homo sapien
gcagatctaatcatgttgtcggtca

SEQ ID NO: 2349274 - DNA, 25 bp, Homo sapien
ccattgcccacaagatcaagtccag

SEQ ID NO: 2349275 - DNA, 25 bp, Homo sapien
ccacgtttccgacatgcagatctaa

SEQ ID NO: 2349276 - DNA, 25 bp, Homo sapien
tgcgtcagcttcttaaagggctgag

SEQ ID NO: 2349277 - DNA, 25 bp, Homo sapien
tcttcctgcgtcagcttcttaaagg

SEQ ID NO: 2349278 - DNA, 25 bp, Homo sapien
ttgtagagttgggagtcttcttttg

SEQ ID NO: 2349279 - DNA, 25 bp, Homo sapien
tgtagagttgggagtcttcttttgt

SEQ ID NO: 2349280 - DNA, 25 bp, Homo sapien
tcttacaattgcactctttattctg

SEQ ID NO: 2349281 - DNA, 25 bp, Homo sapien
cagcacgttttcctttatcttacaa

SEQ ID NO: 2349282 - DNA, 25 bp, Homo sapien
cagacagtcctctcttgctttattc

SEQ ID NO: 2349283 - DNA, 25 bp, Homo sapien
gctttattcactgatagtttattgt

SEQ ID NO: 2349284 - DNA, 25 bp, Homo sapien
gctgagttatggactagggctgcca

SEQ ID NO: 2349285 - DNA, 25 bp, Homo sapien
tcttttctcctcaagcatgatctag

SEQ ID NO: 2349286 - DNA, 25 bp, Homo sapien
caggacatggcatctgaacacattc

SEQ ID NO: 2349287 - DNA, 25 bp, Homo sapien
ggctgccaaaacacatggcccctga

SEQ ID NO: 2349288 - DNA, 25 bp, Homo sapien
ccatgcaagccaggagttacagagg

SEQ ID NO: 2349289 - DNA, 25 bp, Homo sapien
ctatgggatttgattgtagcagccc

SEQ ID NO: 2349290 - DNA, 25 bp, Homo sapien
ttccatgatgtgagaagacactatc

SEQ ID NO: 2349291 - DNA, 25 bp, Homo sapien
gaacaccagagaaccccatggttgg

SEQ ID NO: 2349292 - DNA, 25 bp, Homo sapien
gaatccccaaatagtcaacagtcgt

SEQ ID NO: 2349293 - DNA, 25 bp, Homo sapien
acttggtgagaagatatccctgcaa

SEQ ID NO: 2349294 - DNA, 25 bp, Homo sapien
tgcaaactcccagatccacaaagac

SEQ ID NO: 2349295 - DNA, 25 bp, Homo sapien
gacctgcatggtactaacatctgtg

SEQ ID NO: 2349296 - DNA, 25 bp, Homo sapien
cagcatgggctttgaccaatcagcc

SEQ ID NO: 2349297 - DNA, 25 bp, Homo sapien
tgaccaatcagccattgagctggag

SEQ ID NO: 2349298 - DNA, 25 bp, Homo sapien
tagcttctacttcagtcagggggac

SEQ ID NO: 2349299 - DNA, 25 bp, Homo sapien
ccccttgtgatagacattgactctt

SEQ ID NO: 2349300 - DNA, 25 bp, Homo sapien
gcgcagtggccaagcttcttctcct

SEQ ID NO: 2349301 - DNA, 25 bp, Homo sapien
catgccagttattcatggaatggcc

SEQ ID NO: 2349302 - DNA, 25 bp, Homo sapien
tctcctgatacttttgaccatagaa

SEQ ID NO: 2349303 - DNA, 25 bp, Homo sapien
tggaatggccattgacaaatgcgca

SEQ ID NO: 2349304 - DNA, 25 bp, Homo sapien
cagcacccttatcctgaggacagct

SEQ ID NO: 2349305 - DNA, 25 bp, Homo sapien
ctcagatccatgtgcccctagcagg

SEQ ID NO: 2349306 - DNA, 25 bp, Homo sapien
tcagatccatgtgcccctagcaggc

SEQ ID NO: 2349307 - DNA, 25 bp, Homo sapien
tgcagacaccagcacccttatcctg

SEQ ID NO: 2349308 - DNA, 25 bp, Homo sapien
gcagcacggcggcagtggtgatggt

SEQ ID NO: 2349309 - DNA, 25 bp, Homo sapien
tggtgatggtggccactaatgaggg

SEQ ID NO: 2349310 - DNA, 25 bp, Homo sapien
agtcgtctctaacagggctgcagca

SEQ ID NO: 2349311 - DNA, 25 bp, Homo sapien
gaagaggagggaagtcgtctctaac

SEQ ID NO: 2349312 - DNA, 25 bp, Homo sapien
ccgtgaatgggacctctgtgtttct

SEQ ID NO: 2349313 - DNA, 25 bp, Homo sapien
aatgggacctctgtgtttctagact

SEQ ID NO: 2349314 - DNA, 25 bp, Homo sapien
agtgtcagaaaattcccatccaatt

SEQ ID NO: 2349315 - DNA, 25 bp, Homo sapien
ccctttagaattacagccaactcaa

SEQ ID NO: 2349316 - DNA, 25 bp, Homo sapien
ttcaccctttagaattacagccaac

SEQ ID NO: 2349317 - DNA, 25 bp, Homo sapien
cattcaccctttagaattacagcca

SEQ ID NO: 2349318 - DNA, 25 bp, Homo sapien
gactggcaccccagaacaatatgta

SEQ ID NO: 2349319 - DNA, 25 bp, Homo sapien
aatatgtaccttattctaccactag

SEQ ID NO: 2349320 - DNA, 25 bp, Homo sapien
tactgctcgtaaattcatttggacg

SEQ ID NO: 2349321 - DNA, 25 bp, Homo sapien
catttggacgaaccataaattcaac

SEQ ID NO: 2349322 - DNA, 25 bp, Homo sapien
gaatctaccagccaccagtaaaggc

SEQ ID NO: 2349323 - DNA, 25 bp, Homo sapien
cagttgagctacacgtgccttgaaa

SEQ ID NO: 2349324 - DNA, 25 bp, Homo sapien
taaaggctgctaagtccaccagtac

SEQ ID NO: 2349325 - DNA, 25 bp, Homo sapien
taagaaacggattgcctagaaccta

SEQ ID NO: 2349326 - DNA, 25 bp, Homo sapien
gatgtggatggaagcatggtgcctc

SEQ ID NO: 2349327 - DNA, 25 bp, Homo sapien
actactgaaatgaatggcaaaaaca

SEQ ID NO: 2349328 - DNA, 25 bp, Homo sapien
ggcaaaaacacattctgggatgtgg

SEQ ID NO: 2349329 - DNA, 25 bp, Homo sapien
cgatgggttgtatatactactgaaa

SEQ ID NO: 2349330 - DNA, 25 bp, Homo sapien
tggaaacaaatactatgaagacaac

SEQ ID NO: 2349331 - DNA, 25 bp, Homo sapien
tatggaaacaaatactatgaagaca

SEQ ID NO: 2349332 - DNA, 25 bp, Homo sapien
atatggaaacaaatactatgaagac

SEQ ID NO: 2349333 - DNA, 25 bp, Homo sapien
aatatggaaacaaatactatgaaga

SEQ ID NO: 2349334 - DNA, 25 bp, Homo sapien
gactgcagtgctgtaaacttaactg

SEQ ID NO: 2349335 - DNA, 25 bp, Homo sapien
ggagcctgcagattataactctcaa

SEQ ID NO: 2349336 - DNA, 25 bp, Homo sapien
gaatttttgaagtgactgggcaggc

SEQ ID NO: 2349337 - DNA, 25 bp, Homo sapien
gaagatgatacctgaagctgtcacc

SEQ ID NO: 2349338 - DNA, 25 bp, Homo sapien
ccagagctcagtagcgggcatggaa

SEQ ID NO: 2349339 - DNA, 25 bp, Homo sapien
gaagtgtacacctaatcactggaga

SEQ ID NO: 2349340 - DNA, 25 bp, Homo sapien
gatgtcttcatacagggcatttgac

SEQ ID NO: 2349341 - DNA, 25 bp, Homo sapien
tgcggtgtttggtcaagctcatagc

SEQ ID NO: 2349342 - DNA, 25 bp, Homo sapien
cccgctcttcactagtattcttcat

SEQ ID NO: 2349343 - DNA, 25 bp, Homo sapien
acaacccaggcatagcagtgcacac

SEQ ID NO: 2349344 - DNA, 25 bp, Homo sapien
gcaaaagttggcatcctaggaagtc

SEQ ID NO: 2349345 - DNA, 25 bp, Homo sapien
ccagaaatttaaggatgcagtgatc

SEQ ID NO: 2349346 - DNA, 25 bp, Homo sapien
taattcttccaactcgggcagatac

SEQ ID NO: 2349347 - DNA, 25 bp, Homo sapien
cagtacgaatgttgccaggttgtcc

SEQ ID NO: 2349348 - DNA, 25 bp, Homo sapien
tcagaagaaatggaacggccccagg

SEQ ID NO: 2349349 - DNA, 25 bp, Homo sapien
gcatgtccaagcttccgatagatag

SEQ ID NO: 2349350 - DNA, 25 bp, Homo sapien
gccagcggagccgttcagtttggga

SEQ ID NO: 2349351 - DNA, 25 bp, Homo sapien
gccgttcagtttgggagcgccgctt

SEQ ID NO: 2349352 - DNA, 25 bp, Homo sapien
cgcttggggctgctcgacttcggct

SEQ ID NO: 2349353 - DNA, 25 bp, Homo sapien
gctcgacttcggctgggagcgcgga

SEQ ID NO: 2349354 - DNA, 25 bp, Homo sapien
cgtgaatctcgatcccacatcccgt

SEQ ID NO: 2349355 - DNA, 25 bp, Homo sapien
caaaagcgccggtaagaaacgctgg

SEQ ID NO: 2349356 - DNA, 25 bp, Homo sapien
acacagaaagctctctccgccgtga

SEQ ID NO: 2349357 - DNA, 25 bp, Homo sapien
atccacgagtggcagccgcgggact

SEQ ID NO: 2349358 - DNA, 25 bp, Homo sapien
tagcgcgccgccgagccgagaaaga

SEQ ID NO: 2349359 - DNA, 25 bp, Homo sapien
cgccgccgagccgagaaagaggtca

SEQ ID NO: 2349360 - DNA, 25 bp, Homo sapien
cgggatagcgcgccgccgagccgag

SEQ ID NO: 2349361 - DNA, 25 bp, Homo sapien
cgagaaagaggtcacgaactctgac

SEQ ID NO: 2349362 - DNA, 25 bp, Homo sapien
tcacgacctcctctcgccgcttctc

SEQ ID NO: 2349363 - DNA, 25 bp, Homo sapien
tctccccgttgctaatgcgcaggcg

SEQ ID NO: 2349364 - DNA, 25 bp, Homo sapien
ctcgccgcttctccccgttgctaat

SEQ ID NO: 2349365 - DNA, 25 bp, Homo sapien
gcttctccccgttgctaatgcgcag

SEQ ID NO: 2349366 - DNA, 25 bp, Homo sapien
aacgcgtagctctggcggggcactc

SEQ ID NO: 2349367 - DNA, 25 bp, Homo sapien
gcagtggactcacagagccgctgct

SEQ ID NO: 2349368 - DNA, 25 bp, Homo sapien
ctgctcggccctccgatccctccac

SEQ ID NO: 2349369 - DNA, 25 bp, Homo sapien
ggctgggaacgcgtagctctggcgg

SEQ ID NO: 2349370 - DNA, 25 bp, Homo sapien
gctgaatcatgagccagttctaaat

SEQ ID NO: 2349371 - DNA, 25 bp, Homo sapien
gacctggctgaatcatgagccagtt

SEQ ID NO: 2349372 - DNA, 25 bp, Homo sapien
tggctgaatcatgagccagttctaa

SEQ ID NO: 2349373 - DNA, 25 bp, Homo sapien
ctaagacctggctgaatcatgagcc

SEQ ID NO: 2349374 - DNA, 25 bp, Homo sapien
taattcagtgtgatccttaacagca

SEQ ID NO: 2349375 - DNA, 25 bp, Homo sapien
gaatgctgtttggtacagcaccaga

SEQ ID NO: 2349376 - DNA, 25 bp, Homo sapien
ggagtcatttgaacctcatacacaa

SEQ ID NO: 2349377 - DNA, 25 bp, Homo sapien
gcaccagagtccctactagatctag

SEQ ID NO: 2349378 - DNA, 25 bp, Homo sapien
gcagtgtgactctctacagcaaggg

SEQ ID NO: 2349379 - DNA, 25 bp, Homo sapien
tagagtgtctcctaacaagacaggg

SEQ ID NO: 2349380 - DNA, 25 bp, Homo sapien
tagcttgatcatgggagtgacatcc

SEQ ID NO: 2349381 - DNA, 25 bp, Homo sapien
tagaagcaagtcgtaggtcctgtcc

SEQ ID NO: 2349382 - DNA, 25 bp, Homo sapien
ccactgccgggcctgtggaaaggtt

SEQ ID NO: 2349383 - DNA, 25 bp, Homo sapien
cctgtggaaaggttggcgatgataa

SEQ ID NO: 2349384 - DNA, 25 bp, Homo sapien
ttggcgatgataacacccatctcca

SEQ ID NO: 2349385 - DNA, 25 bp, Homo sapien
ggaaaggttggcgatgataacaccc

SEQ ID NO: 2349386 - DNA, 25 bp, Homo sapien
ctgccttccacaggtgttacctcca

SEQ ID NO: 2349387 - DNA, 25 bp, Homo sapien
tgccttccacaggtgttacctccac

SEQ ID NO: 2349388 - DNA, 25 bp, Homo sapien
gatctgcgtgtgactccatgcatgc

SEQ ID NO: 2349389 - DNA, 25 bp, Homo sapien
catgctccatcagcacggatctgcg

SEQ ID NO: 2349390 - DNA, 25 bp, Homo sapien
cagcacggatctgcgtgtgactcca

SEQ ID NO: 2349391 - DNA, 25 bp, Homo sapien
ccatcagcacggatctgcgtgtgac

SEQ ID NO: 2349392 - DNA, 25 bp, Homo sapien
gataagcagtgataactgagagcaa

SEQ ID NO: 2349393 - DNA, 25 bp, Homo sapien
gtgataagcagtgataactgagagc

SEQ ID NO: 2349394 - DNA, 25 bp, Homo sapien
tgataagcagtgataactgagagca

SEQ ID NO: 2349395 - DNA, 25 bp, Homo sapien
tgcacactggtttagagtcccaagg

SEQ ID NO: 2349396 - DNA, 25 bp, Homo sapien
tgccaagctccatagtgcacactgg

SEQ ID NO: 2349397 - DNA, 25 bp, Homo sapien
cctagaaagtcgtgggaacagatac

SEQ ID NO: 2349398 - DNA, 25 bp, Homo sapien
ccaacagtgcgattagcctccgagt

SEQ ID NO: 2349399 - DNA, 25 bp, Homo sapien
acctctcttccgctgtcagctggag

SEQ ID NO: 2349400 - DNA, 25 bp, Homo sapien
agctggagagagataactaccccgt

SEQ ID NO: 2349401 - DNA, 25 bp, Homo sapien
gagagagataactaccccgtgaatc

SEQ ID NO: 2349402 - DNA, 25 bp, Homo sapien
taactaccccgtgaatctcatccaa

SEQ ID NO: 2349403 - DNA, 25 bp, Homo sapien
ggcggcagtcggtgagaaggaattc

SEQ ID NO: 2349404 - DNA, 25 bp, Homo sapien
attggcggcagtcggtgagaaggaa

SEQ ID NO: 2349405 - DNA, 25 bp, Homo sapien
gcggcagtcggtgagaaggaattca

SEQ ID NO: 2349406 - DNA, 25 bp, Homo sapien
tggcggcagtcggtgagaaggaatt

SEQ ID NO: 2349407 - DNA, 25 bp, Homo sapien
caataacatctatgatcacaatgaa

SEQ ID NO: 2349408 - DNA, 25 bp, Homo sapien
agccaacctccatgaagtgcctgaa

SEQ ID NO: 2349409 - DNA, 25 bp, Homo sapien
gatcaataacatctatgatcacaat

SEQ ID NO: 2349410 - DNA, 25 bp, Homo sapien
gtccaaaggcgacgtaggttgccca

SEQ ID NO: 2349411 - DNA, 25 bp, Homo sapien
cttctgccaggcttgtgggacatac

SEQ ID NO: 2349412 - DNA, 25 bp, Homo sapien
tcttcctggcccattgtgtggctgc

SEQ ID NO: 2349413 - DNA, 25 bp, Homo sapien
aactttaaaatgatcagaatctgtc

SEQ ID NO: 2349414 - DNA, 25 bp, Homo sapien
tcttgattattctgtccctcatttt

SEQ ID NO: 2349415 - DNA, 25 bp, Homo sapien
gcttttttgagagaagctttcagga

SEQ ID NO: 2349416 - DNA, 25 bp, Homo sapien
tttatagttgcctcatatgctttct

SEQ ID NO: 2349417 - DNA, 25 bp, Homo sapien
ttttatagttgcctcatatgctttc

SEQ ID NO: 2349418 - DNA, 25 bp, Homo sapien
ctcgactccccaggctcaaggagtc

SEQ ID NO: 2349419 - DNA, 25 bp, Homo sapien
tcaagcactgctcctgcctttgcct

SEQ ID NO: 2349420 - DNA, 25 bp, Homo sapien
gggctcaagcactgctcctgccttt

SEQ ID NO: 2349421 - DNA, 25 bp, Homo sapien
cctcgactccccaggctcaaggagt

SEQ ID NO: 2349422 - DNA, 25 bp, Homo sapien
aaatgaaggcgggagtacaggcggc

SEQ ID NO: 2349423 - DNA, 25 bp, Homo sapien
cacccgcctcagcacgatgggaaat

SEQ ID NO: 2349424 - DNA, 25 bp, Homo sapien
gtacaggcggcacggagctccagct

SEQ ID NO: 2349425 - DNA, 25 bp, Homo sapien
gcctcagcacgatgggaaatgaagg

SEQ ID NO: 2349426 - DNA, 25 bp, Homo sapien
cctcttcgtcaaactccggtgtcat

SEQ ID NO: 2349427 - DNA, 25 bp, Homo sapien
accacctcttcgtcaaactccggtg

SEQ ID NO: 2349428 - DNA, 25 bp, Homo sapien
acctcttcgtcaaactccggtgtca

SEQ ID NO: 2349429 - DNA, 25 bp, Homo sapien
cacctcttcgtcaaactccggtgtc

SEQ ID NO: 2349430 - DNA, 25 bp, Homo sapien
tgggcgggcccgagatagaggccgg

SEQ ID NO: 2349431 - DNA, 25 bp, Homo sapien
aaccgggcaccgtctgggaattctg

SEQ ID NO: 2349432 - DNA, 25 bp, Homo sapien
ggctaagttgtgactatctaaaagg

SEQ ID NO: 2349433 - DNA, 25 bp, Homo sapien
aaaatcgcggatggaaaaggaggag

SEQ ID NO: 2349434 - DNA, 25 bp, Homo sapien
tgcagaggccacatatagcccaagg

SEQ ID NO: 2349435 - DNA, 25 bp, Homo sapien
gagccacggttggtccaatctgcag

SEQ ID NO: 2349436 - DNA, 25 bp, Homo sapien
tctcagctaaggagggccaactgca

SEQ ID NO: 2349437 - DNA, 25 bp, Homo sapien
gaattggtcacaggactagggcaaa

SEQ ID NO: 2349438 - DNA, 25 bp, Homo sapien
tgtcgagtacactgagctttgggcc

SEQ ID NO: 2349439 - DNA, 25 bp, Homo sapien
ccttaaggcatgatttgcttctagg

SEQ ID NO: 2349440 - DNA, 25 bp, Homo sapien
tttctaacactgtgcccctgtcgag

SEQ ID NO: 2349441 - DNA, 25 bp, Homo sapien
ccacatctggtcgaagttagtacac

SEQ ID NO: 2349442 - DNA, 25 bp, Homo sapien
cagtgtagttcctatctggttggtt

SEQ ID NO: 2349443 - DNA, 25 bp, Homo sapien
gtgtagttcctatctggttggttga

SEQ ID NO: 2349444 - DNA, 25 bp, Homo sapien
gtagttcctatctggttggttgatt

SEQ ID NO: 2349445 - DNA, 25 bp, Homo sapien
agttcctatctggttggttgatttc

SEQ ID NO: 2349446 - DNA, 25 bp, Homo sapien
gcaagtttaacctctggtttggtga

SEQ ID NO: 2349447 - DNA, 25 bp, Homo sapien
tgcttgatactacccagatgcacaa

SEQ ID NO: 2349448 - DNA, 25 bp, Homo sapien
tacagcaagtttaacctctggtttg

SEQ ID NO: 2349449 - DNA, 25 bp, Homo sapien
tatcagtggaggctgataattctgc

SEQ ID NO: 2349450 - DNA, 25 bp, Homo sapien
taaggttcaaaatgctcaaccctgc

SEQ ID NO: 2349451 - DNA, 25 bp, Homo sapien
tactaggcattgagttaagcacgtt

SEQ ID NO: 2349452 - DNA, 25 bp, Homo sapien
taaagtcacccatcagaatataaac

SEQ ID NO: 2349453 - DNA, 25 bp, Homo sapien
tgtaaaagaaacaacctctctcaag

SEQ ID NO: 2349454 - DNA, 25 bp, Homo sapien
taacagcattccagggtaaagatca

SEQ ID NO: 2349455 - DNA, 25 bp, Homo sapien
ttctgatccctcacactatctattc

SEQ ID NO: 2349456 - DNA, 25 bp, Homo sapien
tggcaatgactgagtgctaacagca

SEQ ID NO: 2349457 - DNA, 25 bp, Homo sapien
ctaactagtggccaaattctgattc

SEQ ID NO: 2349458 - DNA, 25 bp, Homo sapien
ttatctggcccaaagcatcaatagt

SEQ ID NO: 2349459 - DNA, 25 bp, Homo sapien
tgtgagcagcgctactggtatctag

SEQ ID NO: 2349460 - DNA, 25 bp, Homo sapien
gacttgcaatgctcaacagcctgtt

SEQ ID NO: 2349461 - DNA, 25 bp, Homo sapien
tgtagagatcgggatgctgctcaac

SEQ ID NO: 2349462 - DNA, 25 bp, Homo sapien
tagtggtacttccatagtagtggta

SEQ ID NO: 2349463 - DNA, 25 bp, Homo sapien
ccatctagtagtggtacttccatag

SEQ ID NO: 2349464 - DNA, 25 bp, Homo sapien
cttccatagtagtggtagttttaat

SEQ ID NO: 2349465 - DNA, 25 bp, Homo sapien
ccaggtcaaacttccatctagtagt

SEQ ID NO: 2349466 - DNA, 25 bp, Homo sapien
gagcatgccactggcttctagcaag

SEQ ID NO: 2349467 - DNA, 25 bp, Homo sapien
aagagcatgccactggcttctagca

SEQ ID NO: 2349468 - DNA, 25 bp, Homo sapien
agagcatgccactggcttctagcaa

SEQ ID NO: 2349469 - DNA, 25 bp, Homo sapien
taagctgagggcatatatacacatt

SEQ ID NO: 2349470 - DNA, 25 bp, Homo sapien
tatacacattcagttcggatcacca

SEQ ID NO: 2349471 - DNA, 25 bp, Homo sapien
gatcatatccaacagtatcatgtga

SEQ ID NO: 2349472 - DNA, 25 bp, Homo sapien
taatctggaacacttgctatttcac

SEQ ID NO: 2349473 - DNA, 25 bp, Homo sapien
taggactcttgtaggaggcttttgt

SEQ ID NO: 2349474 - DNA, 25 bp, Homo sapien
ttttggtaggactcttgtaggaggc

SEQ ID NO: 2349475 - DNA, 25 bp, Homo sapien
tggtaggactcttgtaggaggcttt

SEQ ID NO: 2349476 - DNA, 25 bp, Homo sapien
actcttgtaggaggcttttgttgtc

SEQ ID NO: 2349477 - DNA, 25 bp, Homo sapien
aagtgcaaaagattcggccagaaag

SEQ ID NO: 2349478 - DNA, 25 bp, Homo sapien
taaatagtcttaccagtgtgaggga

SEQ ID NO: 2349479 - DNA, 25 bp, Homo sapien
gaagtatctgaatagccagtaaggt

SEQ ID NO: 2349480 - DNA, 25 bp, Homo sapien
ccagaaagaatgagcatgcgttctt

SEQ ID NO: 2349481 - DNA, 25 bp, Homo sapien
cctggagaatggacataagtggcaa

SEQ ID NO: 2349482 - DNA, 25 bp, Homo sapien
gatatcaagccaacgagaagcctgc

SEQ ID NO: 2349483 - DNA, 25 bp, Homo sapien
gctgctaaaactctatggaatgaat

SEQ ID NO: 2349484 - DNA, 25 bp, Homo sapien
tatcagggcagactacttaacaact

SEQ ID NO: 2349485 - DNA, 25 bp, Homo sapien
tattcattgagtgattactatatcc

SEQ ID NO: 2349486 - DNA, 25 bp, Homo sapien
ttgagtgattactatatcccaggta

SEQ ID NO: 2349487 - DNA, 25 bp, Homo sapien
ttcattgagtgattactatatccca

SEQ ID NO: 2349488 - DNA, 25 bp, Homo sapien
cattgagtgattactatatcccagg

SEQ ID NO: 2349489 - DNA, 25 bp, Homo sapien
caacttgtgaagtaagtcatctttc

SEQ ID NO: 2349490 - DNA, 25 bp, Homo sapien
cctaacgagttgaaggctaaagctg

SEQ ID NO: 2349491 - DNA, 25 bp, Homo sapien
ggttccccaattagacacagccata

SEQ ID NO: 2349492 - DNA, 25 bp, Homo sapien
ccctggcatcagacttatgtgtaaa

SEQ ID NO: 2349493 - DNA, 25 bp, Homo sapien
caaaaccaacgtgcttagaggaagt

SEQ ID NO: 2349494 - DNA, 25 bp, Homo sapien
tatcttctataagccaggcatcagg

SEQ ID NO: 2349495 - DNA, 25 bp, Homo sapien
tatacaagtctctattcttaaagag

SEQ ID NO: 2349496 - DNA, 25 bp, Homo sapien
tgccttcacatatacgagctcattt

SEQ ID NO: 2349497 - DNA, 25 bp, Homo sapien
taacatgcaaaggagtgtgatgaaa

SEQ ID NO: 2349498 - DNA, 25 bp, Homo sapien
ctgttgcaggatggtatgtaatgag

SEQ ID NO: 2349499 - DNA, 25 bp, Homo sapien
tgttgcaggatggtatgtaatgagt

SEQ ID NO: 2349500 - DNA, 25 bp, Homo sapien
actgggatcaagtagctcaatcagc

SEQ ID NO: 2349501 - DNA, 25 bp, Homo sapien
cagacaggatactgggatcaagtag

SEQ ID NO: 2349502 - DNA, 25 bp, Homo sapien
atactgggatcaagtagctcaatca

SEQ ID NO: 2349503 - DNA, 25 bp, Homo sapien
gacaggatactgggatcaagtagct

SEQ ID NO: 2349504 - DNA, 25 bp, Homo sapien
cttggtgtctctacaatatagttac

SEQ ID NO: 2349505 - DNA, 25 bp, Homo sapien
ctctacaatatagttacgataaaac

SEQ ID NO: 2349506 - DNA, 25 bp, Homo sapien
tccatgtcccatcctattcttggtg

SEQ ID NO: 2349507 - DNA, 25 bp, Homo sapien
catcctattcttggtgtctctacaa

SEQ ID NO: 2349508 - DNA, 25 bp, Homo sapien
tactggcaataccataaagcaaaat

SEQ ID NO: 2349509 - DNA, 25 bp, Homo sapien
catttataggtctcatagttgcttg

SEQ ID NO: 2349510 - DNA, 25 bp, Homo sapien
aaacctatggttccttctatcagct

SEQ ID NO: 2349511 - DNA, 25 bp, Homo sapien
gggatgtgtctgagaatagctgaaa

SEQ ID NO: 2349512 - DNA, 25 bp, Homo sapien
gccatatcttccaaatgaacgctgt

SEQ ID NO: 2349513 - DNA, 25 bp, Homo sapien
gcataacgagcaagctaatgaaggc

SEQ ID NO: 2349514 - DNA, 25 bp, Homo sapien
aaaagctcggctgtttgtggccata

SEQ ID NO: 2349515 - DNA, 25 bp, Homo sapien
cgtaaagcttttctcacgaggttag

SEQ ID NO: 2349516 - DNA, 25 bp, Homo sapien
gctagactggtgaatatttaatttc

SEQ ID NO: 2349517 - DNA, 25 bp, Homo sapien
agctagactggtgaatatttaattt

SEQ ID NO: 2349518 - DNA, 25 bp, Homo sapien
tggcacttcccataagattaatggg

SEQ ID NO: 2349519 - DNA, 25 bp, Homo sapien
gtagcatagctactctcaaagctgt

SEQ ID NO: 2349520 - DNA, 25 bp, Homo sapien
tcaaagctgttcaagaggaagcaca

SEQ ID NO: 2349521 - DNA, 25 bp, Homo sapien
ggaaagataacaggaccagtggcca

SEQ ID NO: 2349522 - DNA, 25 bp, Homo sapien
ttctgtacattcataaaagtagggt

SEQ ID NO: 2349523 - DNA, 25 bp, Homo sapien
tgtacattcataaaagtagggtaaa

SEQ ID NO: 2349524 - DNA, 25 bp, Homo sapien
tctgtacattcataaaagtagggta

SEQ ID NO: 2349525 - DNA, 25 bp, Homo sapien
ctgtacattcataaaagtagggtaa

SEQ ID NO: 2349526 - DNA, 25 bp, Homo sapien
ttatacatatgtcaactcaggtctc

SEQ ID NO: 2349527 - DNA, 25 bp, Homo sapien
tgtgatacaactgtacaggtgtcct

SEQ ID NO: 2349528 - DNA, 25 bp, Homo sapien
catgatcttcactagaaaatgatta

SEQ ID NO: 2349529 - DNA, 25 bp, Homo sapien
aaaatagtcatttctgtgactagat

SEQ ID NO: 2349530 - DNA, 25 bp, Homo sapien
ctagccttgctgcttggaagttggc

SEQ ID NO: 2349531 - DNA, 25 bp, Homo sapien
gcatatatagggtagctagccttgc

SEQ ID NO: 2349532 - DNA, 25 bp, Homo sapien
tccgaagaccgatgagatgctgact

SEQ ID NO: 2349533 - DNA, 25 bp, Homo sapien
cttagagttcggtagacagctttcc

SEQ ID NO: 2349534 - DNA, 25 bp, Homo sapien
ttcaggactccagaaacattgctta

SEQ ID NO: 2349535 - DNA, 25 bp, Homo sapien
caactataatatctatattcaggac

SEQ ID NO: 2349536 - DNA, 25 bp, Homo sapien
ggactccagaaacattgcttagttt

SEQ ID NO: 2349537 - DNA, 25 bp, Homo sapien
taatatctatattcaggactccaga

SEQ ID NO: 2349538 - DNA, 25 bp, Homo sapien
tacgtctagtgattagcatattgcc

SEQ ID NO: 2349539 - DNA, 25 bp, Homo sapien
tacaagctccataaggcagggatca

SEQ ID NO: 2349540 - DNA, 25 bp, Homo sapien
ggtaagctccacgagaataaggatc

SEQ ID NO: 2349541 - DNA, 25 bp, Homo sapien
tacagtctgtagtctttgataggct

SEQ ID NO: 2349542 - DNA, 25 bp, Homo sapien
ggatacttgtggatacaatttttaa

SEQ ID NO: 2349543 - DNA, 25 bp, Homo sapien
ctttaaaaggcaccacacagatgta

SEQ ID NO: 2349544 - DNA, 25 bp, Homo sapien
acagatgtagttggttacattgtca

SEQ ID NO: 2349545 - DNA, 25 bp, Homo sapien
ccacacagatgtagttggttacatt

SEQ ID NO: 2349546 - DNA, 25 bp, Homo sapien
cacacagatgtagttggttacattg

SEQ ID NO: 2349547 - DNA, 25 bp, Homo sapien
atctgtaaagttatgtgcttcctct

SEQ ID NO: 2349548 - DNA, 25 bp, Homo sapien
catctgtaaagttatgtgcttcctc

SEQ ID NO: 2349549 - DNA, 25 bp, Homo sapien
tcgttgtaaaatacaacctcactgg

SEQ ID NO: 2349550 - DNA, 25 bp, Homo sapien
caattcgttgtaaaatacaacctca

SEQ ID NO: 2349551 - DNA, 25 bp, Homo sapien
tgtaaaatacaacctcactgggact

SEQ ID NO: 2349552 - DNA, 25 bp, Homo sapien
gttgtaaaatacaacctcactggga

SEQ ID NO: 2349553 - DNA, 25 bp, Homo sapien
cccttttgcagtaatgattgtcgag

SEQ ID NO: 2349554 - DNA, 25 bp, Homo sapien
tatctagggattcttgacttgcaag

SEQ ID NO: 2349555 - DNA, 25 bp, Homo sapien
gagcaaaaatgaagagtccccactc

SEQ ID NO: 2349556 - DNA, 25 bp, Homo sapien
gtccccactctgatggagcttatat

SEQ ID NO: 2349557 - DNA, 25 bp, Homo sapien
taggcccgttcctgagatacatcct

SEQ ID NO: 2349558 - DNA, 25 bp, Homo sapien
gaatatgttcataggcccgttcctg

SEQ ID NO: 2349559 - DNA, 25 bp, Homo sapien
tctgaatatgttcataggcccgttc

SEQ ID NO: 2349560 - DNA, 25 bp, Homo sapien
gttcataggcccgttcctgagatac

SEQ ID NO: 2349561 - DNA, 25 bp, Homo sapien
cgtctgaagaactctgaactctgtg

SEQ ID NO: 2349562 - DNA, 25 bp, Homo sapien
ctgtgccacccagagttggaacaaa

SEQ ID NO: 2349563 - DNA, 25 bp, Homo sapien
gtgccacccagagttggaacaaaac

SEQ ID NO: 2349564 - DNA, 25 bp, Homo sapien
gaagaactctgaactctgtgccacc

SEQ ID NO: 2349565 - DNA, 25 bp, Homo sapien
ctggagtaagtaagggcccaggagg

SEQ ID NO: 2349566 - DNA, 25 bp, Homo sapien
gaggtgaattggctgtagaaagtaa

SEQ ID NO: 2349567 - DNA, 25 bp, Homo sapien
cccaggaggtgaattggctgtagaa

SEQ ID NO: 2349568 - DNA, 25 bp, Homo sapien
ggctgtagaaagtaatagggctaac

SEQ ID NO: 2349569 - DNA, 25 bp, Homo sapien
catcagataagatacgatgaggcag

SEQ ID NO: 2349570 - DNA, 25 bp, Homo sapien
tcaaagtaccgatagaactcatagc

SEQ ID NO: 2349571 - DNA, 25 bp, Homo sapien
catagctgcgcttaagctcttccaa

SEQ ID NO: 2349572 - DNA, 25 bp, Homo sapien
ggagctgcaagctacgcactgctgt

SEQ ID NO: 2349573 - DNA, 25 bp, Homo sapien
taatctggccatacacaccctggag

SEQ ID NO: 2349574 - DNA, 25 bp, Homo sapien
tagtttgagctgctatgactccgaa

SEQ ID NO: 2349575 - DNA, 25 bp, Homo sapien
tgagagtgggaacagcaaagaacac

SEQ ID NO: 2349576 - DNA, 25 bp, Homo sapien
gcaccaacttatagaaggaccatgg

SEQ ID NO: 2349577 - DNA, 25 bp, Homo sapien
aatgtactagatagacacgcaggga

SEQ ID NO: 2349578 - DNA, 25 bp, Homo sapien
gaggcagtgaataatagctcttcag

SEQ ID NO: 2349579 - DNA, 25 bp, Homo sapien
tttcctgaaggaatttacagatgct

SEQ ID NO: 2349580 - DNA, 25 bp, Homo sapien
aaccacattgcaaaacatgggaaag

SEQ ID NO: 2349581 - DNA, 25 bp, Homo sapien
tgaacgtggggctgaatcaacttta

SEQ ID NO: 2349582 - DNA, 25 bp, Homo sapien
aagcctctgacactagttcttgtgt

SEQ ID NO: 2349583 - DNA, 25 bp, Homo sapien
aacaagcttttcaagttcatcttca

SEQ ID NO: 2349584 - DNA, 25 bp, Homo sapien
caattgttgcttgcttgaacgtggg

SEQ ID NO: 2349585 - DNA, 25 bp, Homo sapien
atttcaatacatgtgccgccaaagc

SEQ ID NO: 2349586 - DNA, 25 bp, Homo sapien
tctaatttcaatacatgtgccgcca

SEQ ID NO: 2349587 - DNA, 25 bp, Homo sapien
taatttcaatacatgtgccgccaaa

SEQ ID NO: 2349588 - DNA, 25 bp, Homo sapien
aatttcaatacatgtgccgccaaag

SEQ ID NO: 2349589 - DNA, 25 bp, Homo sapien
actactgtacaatgtgggttttcac

SEQ ID NO: 2349590 - DNA, 25 bp, Homo sapien
tgggattggatctttgtctgcaatg

SEQ ID NO: 2349591 - DNA, 25 bp, Homo sapien
tgtacaatgtgggttttcacatgct

SEQ ID NO: 2349592 - DNA, 25 bp, Homo sapien
aaaggtactactgtacaatgtgggt

SEQ ID NO: 2349593 - DNA, 25 bp, Homo sapien
tctatatcatctacataagcttcta

SEQ ID NO: 2349594 - DNA, 25 bp, Homo sapien
atctatatcatctacataagcttct

SEQ ID NO: 2349595 - DNA, 25 bp, Homo sapien
taatgatgtggctcactggtctagg

SEQ ID NO: 2349596 - DNA, 25 bp, Homo sapien
cagggcagttgatttcgagggtcca

SEQ ID NO: 2349597 - DNA, 25 bp, Homo sapien
aggataatctactgaggacctgggc

SEQ ID NO: 2349598 - DNA, 25 bp, Homo sapien
tactatgcatactggtggaccctta

SEQ ID NO: 2349599 - DNA, 25 bp, Homo sapien
tggatagatgaattcttatgatgaa

SEQ ID NO: 2349600 - DNA, 25 bp, Homo sapien
aacataagaagatatctatagtaaa

SEQ ID NO: 2349601 - DNA, 25 bp, Homo sapien
gaactgtagtttaattcgataaaca

SEQ ID NO: 2349602 - DNA, 25 bp, Homo sapien
attggatagatgaattcttatgatg

SEQ ID NO: 2349603 - DNA, 25 bp, Homo sapien
aatgctgtgggataataaggcccct

SEQ ID NO: 2349604 - DNA, 25 bp, Homo sapien
gatctttgcgctagggatacagcag

SEQ ID NO: 2349605 - DNA, 25 bp, Homo sapien
taatctctgatgtatgtaggcccag

SEQ ID NO: 2349606 - DNA, 25 bp, Homo sapien
ccttgaggcaggtaggaggctttac

SEQ ID NO: 2349607 - DNA, 25 bp, Homo sapien
gagacacatttctctcattgataaa

SEQ ID NO: 2349608 - DNA, 25 bp, Homo sapien
ttcccataatgtcaatagcataatt

SEQ ID NO: 2349609 - DNA, 25 bp, Homo sapien
tctttcccataatgtcaatagcata

SEQ ID NO: 2349610 - DNA, 25 bp, Homo sapien
gacacatttctctcattgataaatc

SEQ ID NO: 2349611 - DNA, 25 bp, Homo sapien
aacagctctggaagatgtactgaaa

SEQ ID NO: 2349612 - DNA, 25 bp, Homo sapien
actaaaacagcattatgaccctttc

SEQ ID NO: 2349613 - DNA, 25 bp, Homo sapien
gcattatgaccctttccaatgtaaa

SEQ ID NO: 2349614 - DNA, 25 bp, Homo sapien
ttttcatgggaaaagcattctatgg

SEQ ID NO: 2349615 - DNA, 25 bp, Homo sapien
gggttgcttgctaggcagtcgctca

SEQ ID NO: 2349616 - DNA, 25 bp, Homo sapien
caggaaccatccctaagctgcagta

SEQ ID NO: 2349617 - DNA, 25 bp, Homo sapien
aaaagtgcttctcgaagagctggcg

SEQ ID NO: 2349618 - DNA, 25 bp, Homo sapien
gaaactctgggagtagggaccagct

SEQ ID NO: 2349619 - DNA, 25 bp, Homo sapien
tgaattacttatgggttccactggg

SEQ ID NO: 2349620 - DNA, 25 bp, Homo sapien
tatttcattgtctgttgtggcggat

SEQ ID NO: 2349621 - DNA, 25 bp, Homo sapien
tgtggcggatttattactttcctct

SEQ ID NO: 2349622 - DNA, 25 bp, Homo sapien
tcacataaatactcagtcctactta

SEQ ID NO: 2349623 - DNA, 25 bp, Homo sapien
aaggccagcagtgaaggtaaaatct

SEQ ID NO: 2349624 - DNA, 25 bp, Homo sapien
acttccatctgcttgtggttcatct

SEQ ID NO: 2349625 - DNA, 25 bp, Homo sapien
gggcagtggtcagaccacttccatc

SEQ ID NO: 2349626 - DNA, 25 bp, Homo sapien
tctggtgacagctgtagccgtgcca

SEQ ID NO: 2349627 - DNA, 25 bp, Homo sapien
ccaagattgatcagttgtgccacaa

SEQ ID NO: 2349628 - DNA, 25 bp, Homo sapien
tcaccttaaggtagcaaattctggc

SEQ ID NO: 2349629 - DNA, 25 bp, Homo sapien
ccagtcttgaagctaaacacttttg

SEQ ID NO: 2349630 - DNA, 25 bp, Homo sapien
ttcagatcagttattcaaaccaggg

SEQ ID NO: 2349631 - DNA, 25 bp, Homo sapien
caacctaaggtattgctccgaagag

SEQ ID NO: 2349632 - DNA, 25 bp, Homo sapien
gacctgtttgtgttaatggcaccca

SEQ ID NO: 2349633 - DNA, 25 bp, Homo sapien
tgaatctcattatggtggacagggc

SEQ ID NO: 2349634 - DNA, 25 bp, Homo sapien
agaaatgtcataacccacgcactgt

SEQ ID NO: 2349635 - DNA, 25 bp, Homo sapien
ggacataaacattacctatggctca

SEQ ID NO: 2349636 - DNA, 25 bp, Homo sapien
gcaaagttccagacagaggttccta

SEQ ID NO: 2349637 - DNA, 25 bp, Homo sapien
tatggctcattccaaaaagaccaac

SEQ ID NO: 2349638 - DNA, 25 bp, Homo sapien
aatacttcctaaggtattcatggca

SEQ ID NO: 2349639 - DNA, 25 bp, Homo sapien
aaaccaacctttatgccttgtctgg

SEQ ID NO: 2349640 - DNA, 25 bp, Homo sapien
tcttcaagagtgacctaaatagact

SEQ ID NO: 2349641 - DNA, 25 bp, Homo sapien
aatggactttcctacctggaggtag

SEQ ID NO: 2349642 - DNA, 25 bp, Homo sapien
gagggcttcttctgtatatagggta

SEQ ID NO: 2349643 - DNA, 25 bp, Homo sapien
taaaacgagtacagcagaatggagc

SEQ ID NO: 2349644 - DNA, 25 bp, Homo sapien
caagacggcggcaaaagtgacagct

SEQ ID NO: 2349645 - DNA, 25 bp, Homo sapien
cagtcaagcaggtatcacaaagtcc

SEQ ID NO: 2349646 - DNA, 25 bp, Homo sapien
gagaagggctactgctacaggcaca

SEQ ID NO: 2349647 - DNA, 25 bp, Homo sapien
accacagatcccttccattagcatg

SEQ ID NO: 2349648 - DNA, 25 bp, Homo sapien
agcatggataactgaatgccgacta

SEQ ID NO: 2349649 - DNA, 25 bp, Homo sapien
cagcctggaccacttatcttttatg

SEQ ID NO: 2349650 - DNA, 25 bp, Homo sapien
ccgactatgaggcatggtcataaaa

SEQ ID NO: 2349651 - DNA, 25 bp, Homo sapien
ggcatgaaccaccatatccggctaa

SEQ ID NO: 2349652 - DNA, 25 bp, Homo sapien
gcatgaaccaccatatccggctaat

SEQ ID NO: 2349653 - DNA, 25 bp, Homo sapien
ttggtcaggcggttcttgaactccc

SEQ ID NO: 2349654 - DNA, 25 bp, Homo sapien
gtcaggcggttcttgaactcccgac

SEQ ID NO: 2349655 - DNA, 25 bp, Homo sapien
tctgggcttttcacccatatggacc

SEQ ID NO: 2349656 - DNA, 25 bp, Homo sapien
gggatccctgggaccatacctagaa

SEQ ID NO: 2349657 - DNA, 25 bp, Homo sapien
tgctttcagctcaggtagacttctg

SEQ ID NO: 2349658 - DNA, 25 bp, Homo sapien
tatggacctccacgactgtaccagg

SEQ ID NO: 2349659 - DNA, 25 bp, Homo sapien
tagtacagaactaactccacggctg

SEQ ID NO: 2349660 - DNA, 25 bp, Homo sapien
gagatggaggcaacccaaacgtcca

SEQ ID NO: 2349661 - DNA, 25 bp, Homo sapien
ggtctacacctactgcagaagccag

SEQ ID NO: 2349662 - DNA, 25 bp, Homo sapien
gcaacagttgtgatatgagaccatg

SEQ ID NO: 2349663 - DNA, 25 bp, Homo sapien
tgacttttaggtgtcatgtctaagt

SEQ ID NO: 2349664 - DNA, 25 bp, Homo sapien
tctgacttttaggtgtcatgtctaa

SEQ ID NO: 2349665 - DNA, 25 bp, Homo sapien
ctgacttttaggtgtcatgtctaag

SEQ ID NO: 2349666 - DNA, 25 bp, Homo sapien
ggcgaaagtgatcaggaccggacat

SEQ ID NO: 2349667 - DNA, 25 bp, Homo sapien
gttactctaccgaagacatctttgc

SEQ ID NO: 2349668 - DNA, 25 bp, Homo sapien
tttgctttggtagctgtaggaaccc

SEQ ID NO: 2349669 - DNA, 25 bp, Homo sapien
aaatgtggcttgcaagggcgaaagt

SEQ ID NO: 2349670 - DNA, 25 bp, Homo sapien
tggtaccatggagaccagtacaaat

SEQ ID NO: 2349671 - DNA, 25 bp, Homo sapien
taagtatgtgagtctggtaccatgg

SEQ ID NO: 2349672 - DNA, 25 bp, Homo sapien
cagtacaaatatctagaagcaggtg

SEQ ID NO: 2349673 - DNA, 25 bp, Homo sapien
gaactcttcaaagttcactctaagt

SEQ ID NO: 2349674 - DNA, 25 bp, Homo sapien
agaaagacacctttaaactgacaag

SEQ ID NO: 2349675 - DNA, 25 bp, Homo sapien
tgccctccttagcaaacaatctgag

SEQ ID NO: 2349676 - DNA, 25 bp, Homo sapien
ggaaccattacaacaaatctttcta

SEQ ID NO: 2349677 - DNA, 25 bp, Homo sapien
caaccatcttgttgacttggaacca

SEQ ID NO: 2349678 - DNA, 25 bp, Homo sapien
agccaaggaccatcaaagccagagg

SEQ ID NO: 2349679 - DNA, 25 bp, Homo sapien
atcacggagccaaggaccatcaaag

SEQ ID NO: 2349680 - DNA, 25 bp, Homo sapien
tcttcagacacttcaaagccttttc

SEQ ID NO: 2349681 - DNA, 25 bp, Homo sapien
ctgagcatcacggagccaaggacca

SEQ ID NO: 2349682 - DNA, 25 bp, Homo sapien
ccacttcctcggacatgctcgtaag

SEQ ID NO: 2349683 - DNA, 25 bp, Homo sapien
tcccagatgaatgctttcagcttgt

SEQ ID NO: 2349684 - DNA, 25 bp, Homo sapien
gctcgtaagaagtgtaaagtgttcc

SEQ ID NO: 2349685 - DNA, 25 bp, Homo sapien
gttcccagatgaatgctttcagctt

SEQ ID NO: 2349686 - DNA, 25 bp, Homo sapien
gtggcttgcattctattttgactgg

SEQ ID NO: 2349687 - DNA, 25 bp, Homo sapien
cgaaatgcacggtggatgggtaagg

SEQ ID NO: 2349688 - DNA, 25 bp, Homo sapien
aacagctgaaggctagaccgctcag

SEQ ID NO: 2349689 - DNA, 25 bp, Homo sapien
atgggtaaggtctttcctgaggctt

SEQ ID NO: 2349690 - DNA, 25 bp, Homo sapien
ttctggcaggaacgagaacagctga

SEQ ID NO: 2349691 - DNA, 25 bp, Homo sapien
catagcccatttcttggcagagagt

SEQ ID NO: 2349692 - DNA, 25 bp, Homo sapien
tcttggcagagagtaatgtctactt

SEQ ID NO: 2349693 - DNA, 25 bp, Homo sapien
taatgttatccgagcctcatagccc

SEQ ID NO: 2349694 - DNA, 25 bp, Homo sapien
cctgcccctgtgtaatgttatccga

SEQ ID NO: 2349695 - DNA, 25 bp, Homo sapien
aacagcttttcacttgctgtcccat

SEQ ID NO: 2349696 - DNA, 25 bp, Homo sapien
tctccacagtcaggtgttttgcagc

SEQ ID NO: 2349697 - DNA, 25 bp, Homo sapien
tccacagtcaggtgttttgcagctg

SEQ ID NO: 2349698 - DNA, 25 bp, Homo sapien
ttttctccacagtcaggtgttttgc

SEQ ID NO: 2349699 - DNA, 25 bp, Homo sapien
catccttggcacaagagaaacactt

SEQ ID NO: 2349700 - DNA, 25 bp, Homo sapien
cttgagttatgttgggcctgaggtc

SEQ ID NO: 2349701 - DNA, 25 bp, Homo sapien
aatggagactgtcttgcacacaacc

SEQ ID NO: 2349702 - DNA, 25 bp, Homo sapien
tccaaatggtctgcagtgattggtc

SEQ ID NO: 2349703 - DNA, 25 bp, Homo sapien
aagcaaatcggcaagcgcagggtga

SEQ ID NO: 2349704 - DNA, 25 bp, Homo sapien
cggcgtctctgctggaacggaaata

SEQ ID NO: 2349705 - DNA, 25 bp, Homo sapien
aagttgagctctagagtcagccgga

SEQ ID NO: 2349706 - DNA, 25 bp, Homo sapien
tcagccggagatacctgtggagacg

SEQ ID NO: 2349707 - DNA, 25 bp, Homo sapien
agccacgccggaagctgctctcgat

SEQ ID NO: 2349708 - DNA, 25 bp, Homo sapien
tagggacgcagggaatgctgggacg

SEQ ID NO: 2349709 - DNA, 25 bp, Homo sapien
cgcagggaatgctgggacggcggag

SEQ ID NO: 2349710 - DNA, 25 bp, Homo sapien
aagctgctctcgatggtagggacgc

SEQ ID NO: 2349711 - DNA, 25 bp, Homo sapien
tgagacagagcggcgagggccccga

SEQ ID NO: 2349712 - DNA, 25 bp, Homo sapien
gaatgagacagagcggcgagggccc

SEQ ID NO: 2349713 - DNA, 25 bp, Homo sapien
agacagagcggcgagggccccgatc

SEQ ID NO: 2349714 - DNA, 25 bp, Homo sapien
acagagcggcgagggccccgatcct

SEQ ID NO: 2349715 - DNA, 25 bp, Homo sapien
ccattcaggtggctcccggaggccg

SEQ ID NO: 2349716 - DNA, 25 bp, Homo sapien
cttcttccctgtcgtctggatccag

SEQ ID NO: 2349717 - DNA, 25 bp, Homo sapien
caggtcgccattcaggtggctcccg

SEQ ID NO: 2349718 - DNA, 25 bp, Homo sapien
tgtcgtctggatccaggtcgccatt

SEQ ID NO: 2349719 - DNA, 25 bp, Homo sapien
caatgctgatctttccaactgtctt

SEQ ID NO: 2349720 - DNA, 25 bp, Homo sapien
tccaactgtcttgctacttcatcca

SEQ ID NO: 2349721 - DNA, 25 bp, Homo sapien
gctcctgattctttatcaggttcct

SEQ ID NO: 2349722 - DNA, 25 bp, Homo sapien
ctgattctttatcaggttcctgttc

SEQ ID NO: 2349723 - DNA, 25 bp, Homo sapien
ttcttctttccagttgctccatctc

SEQ ID NO: 2349724 - DNA, 25 bp, Homo sapien
gttgctccatctccatcgccatctc

SEQ ID NO: 2349725 - DNA, 25 bp, Homo sapien
tcttcttctttccagttgctccatc

SEQ ID NO: 2349726 - DNA, 25 bp, Homo sapien
tgctccatctccatcgccatctcca

SEQ ID NO: 2349727 - DNA, 25 bp, Homo sapien
ccacacccgacagaataaacacttc

SEQ ID NO: 2349728 - DNA, 25 bp, Homo sapien
cacacccgacagaataaacacttct

SEQ ID NO: 2349729 - DNA, 25 bp, Homo sapien
acacccgacagaataaacacttcta

SEQ ID NO: 2349730 - DNA, 25 bp, Homo sapien
tgggccctcacaggctacgagaata

SEQ ID NO: 2349731 - DNA, 25 bp, Homo sapien
gatggacgcctaaatgcaaagaagg

SEQ ID NO: 2349732 - DNA, 25 bp, Homo sapien
gtggtctacaacagcccaaatggca

SEQ ID NO: 2349733 - DNA, 25 bp, Homo sapien
tcaaatacagactcatgggccctca

SEQ ID NO: 2349734 - DNA, 25 bp, Homo sapien
tatttgcacaggtcacaatggttct

SEQ ID NO: 2349735 - DNA, 25 bp, Homo sapien
ggctaaatagtaccaatcctcagtt

SEQ ID NO: 2349736 - DNA, 25 bp, Homo sapien
gaaatgattcaagaagtctaccagg

SEQ ID NO: 2349737 - DNA, 25 bp, Homo sapien
tgaacgatcagatgaaatcctggat

SEQ ID NO: 2349738 - DNA, 25 bp, Homo sapien
taaagcattaacttctgtagttaaa

SEQ ID NO: 2349739 - DNA, 25 bp, Homo sapien
gagatacaaataaagcattaacttc

SEQ ID NO: 2349740 - DNA, 25 bp, Homo sapien
gatacaaataaagcattaacttctg

SEQ ID NO: 2349741 - DNA, 25 bp, Homo sapien
caaataaagcattaacttctgtagt

SEQ ID NO: 2349742 - DNA, 25 bp, Homo sapien
cattaggatacaggtcacatattgg

SEQ ID NO: 2349743 - DNA, 25 bp, Homo sapien
ggtattcgcattcttgtcctttggg

SEQ ID NO: 2349744 - DNA, 25 bp, Homo sapien
catcttgtgtgggtgggtattcgca

SEQ ID NO: 2349745 - DNA, 25 bp, Homo sapien
gggaaatacaccattaggatacagg

SEQ ID NO: 2349746 - DNA, 25 bp, Homo sapien
gaaaacaagagctacagtagaagct

SEQ ID NO: 2349747 - DNA, 25 bp, Homo sapien
cagaacaccttgaagaatcaggtga

SEQ ID NO: 2349748 - DNA, 25 bp, Homo sapien
tcaaatgcagatagtttggccccag

SEQ ID NO: 2349749 - DNA, 25 bp, Homo sapien
gaagctttcttaaccaacgactgca

SEQ ID NO: 2349750 - DNA, 25 bp, Homo sapien
taaagcctacgatcaaaagatgctc

SEQ ID NO: 2349751 - DNA, 25 bp, Homo sapien
cctaaggaggtttattgcagaatgg

SEQ ID NO: 2349752 - DNA, 25 bp, Homo sapien
gcctggccggaactcagaagtatta

SEQ ID NO: 2349753 - DNA, 25 bp, Homo sapien
ccagctacctatttacctaaggagg

SEQ ID NO: 2349754 - DNA, 25 bp, Homo sapien
gaattgctatttgcctcccctgttt

SEQ ID NO: 2349755 - DNA, 25 bp, Homo sapien
tattgcaacatgtgcccactcattt

SEQ ID NO: 2349756 - DNA, 25 bp, Homo sapien
agtttgcaacttagtgaccactgag

SEQ ID NO: 2349757 - DNA, 25 bp, Homo sapien
gctaagtaacactcaaggcctaaaa

SEQ ID NO: 2349758 - DNA, 25 bp, Homo sapien
cttgatccagctcattacgtatttt

SEQ ID NO: 2349759 - DNA, 25 bp, Homo sapien
tttctaacttgtcgatgtgcttctg

SEQ ID NO: 2349760 - DNA, 25 bp, Homo sapien
gatttctatcattgtcatcccaggc

SEQ ID NO: 2349761 - DNA, 25 bp, Homo sapien
tgcagcttctcgaaaatcattccaa

SEQ ID NO: 2349762 - DNA, 25 bp, Homo sapien
tactgtaatactgttgtgtcaccgg

SEQ ID NO: 2349763 - DNA, 25 bp, Homo sapien
ttattgagagaacatccagtaggaa

SEQ ID NO: 2349764 - DNA, 25 bp, Homo sapien
gtgtcaccggcattgggagtataat

SEQ ID NO: 2349765 - DNA, 25 bp, Homo sapien
tattaacttgcgtgaacagtcttcc

SEQ ID NO: 2349766 - DNA, 25 bp, Homo sapien
ttacagcttttaataacgtatcata

SEQ ID NO: 2349767 - DNA, 25 bp, Homo sapien
catatttgggattaaaagtgacagt

SEQ ID NO: 2349768 - DNA, 25 bp, Homo sapien
ctttattccagtgttagtagcatct

SEQ ID NO: 2349769 - DNA, 25 bp, Homo sapien
taaaagtgacagtaaaagcacagtc

SEQ ID NO: 2349770 - DNA, 25 bp, Homo sapien
ggccttaaaagtgcttaaatgctgt

SEQ ID NO: 2349771 - DNA, 25 bp, Homo sapien
aacaggccttaaaagtgcttaaatg

SEQ ID NO: 2349772 - DNA, 25 bp, Homo sapien
aaaacaacctttggtacacaatcat

SEQ ID NO: 2349773 - DNA, 25 bp, Homo sapien
caatcatacacttacccgcttaaaa

SEQ ID NO: 2349774 - DNA, 25 bp, Homo sapien
ttgaagaggtatctatacacccgta

SEQ ID NO: 2349775 - DNA, 25 bp, Homo sapien
gaattgaaaacagaccttgaagagg

SEQ ID NO: 2349776 - DNA, 25 bp, Homo sapien
ggagcaatccaagtgtctatcagtg

SEQ ID NO: 2349777 - DNA, 25 bp, Homo sapien
caatagattatttagccttaaggaa

SEQ ID NO: 2349778 - DNA, 25 bp, Homo sapien
gcgtaatcttgtctcactgaggcct

SEQ ID NO: 2349779 - DNA, 25 bp, Homo sapien
gtaatcttgtctcactgaggcctca

SEQ ID NO: 2349780 - DNA, 25 bp, Homo sapien
gtggcgtaatcttgtctcactgagg

SEQ ID NO: 2349781 - DNA, 25 bp, Homo sapien
tggcgtaatcttgtctcactgaggc

SEQ ID NO: 2349782 - DNA, 25 bp, Homo sapien
aacttcataggactccataacttct

SEQ ID NO: 2349783 - DNA, 25 bp, Homo sapien
cacagacgaacatcaattccagcac

SEQ ID NO: 2349784 - DNA, 25 bp, Homo sapien
taacttcttggatggcctcaccaac

SEQ ID NO: 2349785 - DNA, 25 bp, Homo sapien
tcaccaacatcacacagacgaacat

SEQ ID NO: 2349786 - DNA, 25 bp, Homo sapien
ctgtctatatagaaggcacggtcag

SEQ ID NO: 2349787 - DNA, 25 bp, Homo sapien
gttggtggtaactgtctatatagaa

SEQ ID NO: 2349788 - DNA, 25 bp, Homo sapien
gtctatatagaaggcacggtcaggt

SEQ ID NO: 2349789 - DNA, 25 bp, Homo sapien
tatatagaaggcacggtcaggttcc

SEQ ID NO: 2349790 - DNA, 25 bp, Homo sapien
tcacaatcggcactgtttttccagc

SEQ ID NO: 2349791 - DNA, 25 bp, Homo sapien
tttcacaatcggcactgtttttcca

SEQ ID NO: 2349792 - DNA, 25 bp, Homo sapien
tcctttcacaatcggcactgttttt

SEQ ID NO: 2349793 - DNA, 25 bp, Homo sapien
tcccctcctttcacaatcggcactg

SEQ ID NO: 2349794 - DNA, 25 bp, Homo sapien
tgtactaccaaaggtttcaattgca

SEQ ID NO: 2349795 - DNA, 25 bp, Homo sapien
ctaccaaaggtttcaattgcatata

SEQ ID NO: 2349796 - DNA, 25 bp, Homo sapien
cttattggcacatgtccaacatcaa

SEQ ID NO: 2349797 - DNA, 25 bp, Homo sapien
cctgtactaccaaaggtttcaattg

SEQ ID NO: 2349798 - DNA, 25 bp, Homo sapien
tgtgtgcagcaagctcaaagacctg

SEQ ID NO: 2349799 - DNA, 25 bp, Homo sapien
taagaaaagcccagaccttagctgt

SEQ ID NO: 2349800 - DNA, 25 bp, Homo sapien
tatagatggcagctgaataggacac

SEQ ID NO: 2349801 - DNA, 25 bp, Homo sapien
tgtttacgtgtctacgtgcgcgcgc

SEQ ID NO: 2349802 - DNA, 25 bp, Homo sapien
gggttccaaagttttcattgatgac

SEQ ID NO: 2349803 - DNA, 25 bp, Homo sapien
aagggttccaaagttttcattgatg

SEQ ID NO: 2349804 - DNA, 25 bp, Homo sapien
agggttccaaagttttcattgatga

SEQ ID NO: 2349805 - DNA, 25 bp, Homo sapien
gatggtatgttcaaattgcgctgta

SEQ ID NO: 2349806 - DNA, 25 bp, Homo sapien
ttcaaattgcgctgtatatgatcct

SEQ ID NO: 2349807 - DNA, 25 bp, Homo sapien
ctttacatgttggacgcaacaggat

SEQ ID NO: 2349808 - DNA, 25 bp, Homo sapien
gacgcaacaggatggtatgttcaaa

SEQ ID NO: 2349809 - DNA, 25 bp, Homo sapien
cattagacggtttgcctttgtccaa

SEQ ID NO: 2349810 - DNA, 25 bp, Homo sapien
aaagcaacaccagagggtataggtg

SEQ ID NO: 2349811 - DNA, 25 bp, Homo sapien
tataggtgcagaactggatgtagtc

SEQ ID NO: 2349812 - DNA, 25 bp, Homo sapien
tatagcattttcctagacaggaagg

SEQ ID NO: 2349813 - DNA, 25 bp, Homo sapien
caccactggacaaaggatctaaaca

SEQ ID NO: 2349814 - DNA, 25 bp, Homo sapien
gaaaagtctcagtgtagaggtctac

SEQ ID NO: 2349815 - DNA, 25 bp, Homo sapien
tttagccactatgccagaaaagtct

SEQ ID NO: 2349816 - DNA, 25 bp, Homo sapien
tctgagcaagctgaatacattccct

SEQ ID NO: 2349817 - DNA, 25 bp, Homo sapien
ggaaggtattacagcatttgcctca

SEQ ID NO: 2349818 - DNA, 25 bp, Homo sapien
tcaaagaatcagtagtgggcctcag

SEQ ID NO: 2349819 - DNA, 25 bp, Homo sapien
aacagatgatctaggtacacaagtc

SEQ ID NO: 2349820 - DNA, 25 bp, Homo sapien
gtaactgtaacgtcacttcctgaaa

SEQ ID NO: 2349821 - DNA, 25 bp, Homo sapien
caggcatgaactggcgagctctgct

SEQ ID NO: 2349822 - DNA, 25 bp, Homo sapien
taattggtttgagatcatgactgcc

SEQ ID NO: 2349823 - DNA, 25 bp, Homo sapien
agatacggactcaaccccaaaggag

SEQ ID NO: 2349824 - DNA, 25 bp, Homo sapien
cagtgatgccattgctcccaacagt

SEQ ID NO: 2349825 - DNA, 25 bp, Homo sapien
taatacctatgcaagttgttacctc

SEQ ID NO: 2349826 - DNA, 25 bp, Homo sapien
tgaggtgcagtgagacttttatcac

SEQ ID NO: 2349827 - DNA, 25 bp, Homo sapien
tacatggtcaagataaccagagtct

SEQ ID NO: 2349828 - DNA, 25 bp, Homo sapien
catttgtgccgaaaatacatctgga

SEQ ID NO: 2349829 - DNA, 25 bp, Homo sapien
tctgttaagtacaaacttgaaagag

SEQ ID NO: 2349830 - DNA, 25 bp, Homo sapien
ctgttaagtacaaacttgaaagagg

SEQ ID NO: 2349831 - DNA, 25 bp, Homo sapien
gactactaggtaggagcctcttaaa

SEQ ID NO: 2349832 - DNA, 25 bp, Homo sapien
tatctaagctctgttaaccacagga

SEQ ID NO: 2349833 - DNA, 25 bp, Homo sapien
tcttaaaacactggccctgagcatt

SEQ ID NO: 2349834 - DNA, 25 bp, Homo sapien
gaatcaactaatctctgtagaccag

SEQ ID NO: 2349835 - DNA, 25 bp, Homo sapien
tgaagtgacatgtcaaggtatcacc

SEQ ID NO: 2349836 - DNA, 25 bp, Homo sapien
gccccttggagttattgaagtgaca

SEQ ID NO: 2349837 - DNA, 25 bp, Homo sapien
cggatgatgaacttgtgcaatcttc

SEQ ID NO: 2349838 - DNA, 25 bp, Homo sapien
tatgtcttaattggctcggatgatg

SEQ ID NO: 2349839 - DNA, 25 bp, Homo sapien
caggagcaaactgtagctgatggcc

SEQ ID NO: 2349840 - DNA, 25 bp, Homo sapien
cttcatggtggactgagcctgcttc

SEQ ID NO: 2349841 - DNA, 25 bp, Homo sapien
cagcgaaggtggcttagagctcagc

SEQ ID NO: 2349842 - DNA, 25 bp, Homo sapien
tgtacaagttgaaggatagctcctg

SEQ ID NO: 2349843 - DNA, 25 bp, Homo sapien
tccagggcttacagctgtatcgtcc

SEQ ID NO: 2349844 - DNA, 25 bp, Homo sapien
ctcttgtaagaacctccagggctta

SEQ ID NO: 2349845 - DNA, 25 bp, Homo sapien
ttacagctgtatcgtccctttccat

SEQ ID NO: 2349846 - DNA, 25 bp, Homo sapien
ctgatatcctcttgtaagaacctcc

SEQ ID NO: 2349847 - DNA, 25 bp, Homo sapien
ttctctccatcgatcggtccccgcg

SEQ ID NO: 2349848 - DNA, 25 bp, Homo sapien
ggaggaatgcgcttcccggcgtctt

SEQ ID NO: 2349849 - DNA, 25 bp, Homo sapien
gcgaggtgatgctcgaagccccggg

SEQ ID NO: 2349850 - DNA, 25 bp, Homo sapien
gagggcggttgtggcactcggttga

SEQ ID NO: 2349851 - DNA, 25 bp, Homo sapien
tgttgttcgcgcagacccacttgcg

SEQ ID NO: 2349852 - DNA, 25 bp, Homo sapien
gtgtcccgacggcactacaggtgcg

SEQ ID NO: 2349853 - DNA, 25 bp, Homo sapien
aggcagtgcttgttgttcgcgcaga

SEQ ID NO: 2349854 - DNA, 25 bp, Homo sapien
caggttctcggtgcccgcgaagagc

SEQ ID NO: 2349855 - DNA, 25 bp, Homo sapien
tgtgcccgttctggaacctctctcg

SEQ ID NO: 2349856 - DNA, 25 bp, Homo sapien
tagatagcggttcccttcctgtgcc

SEQ ID NO: 2349857 - DNA, 25 bp, Homo sapien
ttaggcagttctagatagcggttcc

SEQ ID NO: 2349858 - DNA, 25 bp, Homo sapien
ttcctgtgcccgttctggaacctct

SEQ ID NO: 2349859 - DNA, 25 bp, Homo sapien
gcagtgtttttggccggtactagga

SEQ ID NO: 2349860 - DNA, 25 bp, Homo sapien
agaagactgttcaatcttggggata

SEQ ID NO: 2349861 - DNA, 25 bp, Homo sapien
catttcatcccagccaacagtcatt

SEQ ID NO: 2349862 - DNA, 25 bp, Homo sapien
agactgttcaatcttggggataatt

SEQ ID NO: 2349863 - DNA, 25 bp, Homo sapien
ttcaatcttggggataattgtttaa

SEQ ID NO: 2349864 - DNA, 25 bp, Homo sapien
gtttcttccaagacgactgacctgg

SEQ ID NO: 2349865 - DNA, 25 bp, Homo sapien
tgacctgggaattaccactgccatg

SEQ ID NO: 2349866 - DNA, 25 bp, Homo sapien
tcttagcgcctagagaaccaggtcc

SEQ ID NO: 2349867 - DNA, 25 bp, Homo sapien
tgtctgctaagtaaagccctcccag

SEQ ID NO: 2349868 - DNA, 25 bp, Homo sapien
tcctcccttttgccacacctttgta

SEQ ID NO: 2349869 - DNA, 25 bp, Homo sapien
caggctcctctagtgactgactcat

SEQ ID NO: 2349870 - DNA, 25 bp, Homo sapien
cgtcctcccttttgccacacctttg

SEQ ID NO: 2349871 - DNA, 25 bp, Homo sapien
aacaggctcctctagtgactgactc

SEQ ID NO: 2349872 - DNA, 25 bp, Homo sapien
cactgctctgaccataggaggaggc

SEQ ID NO: 2349873 - DNA, 25 bp, Homo sapien
actgctctgaccataggaggaggca

SEQ ID NO: 2349874 - DNA, 25 bp, Homo sapien
ctcccactgctctgaccataggagg

SEQ ID NO: 2349875 - DNA, 25 bp, Homo sapien
cccactgctctgaccataggaggag

SEQ ID NO: 2349876 - DNA, 25 bp, Homo sapien
taatggcagctattccacgtgaaca

SEQ ID NO: 2349877 - DNA, 25 bp, Homo sapien
cacccatattaatggcagctattcc

SEQ ID NO: 2349878 - DNA, 25 bp, Homo sapien
acaatgtgtcgaggacaaaaaggtc

SEQ ID NO: 2349879 - DNA, 25 bp, Homo sapien
tcttacttcgagcaaacaatgtgtc

SEQ ID NO: 2349880 - DNA, 25 bp, Homo sapien
tctcttccagtcctagaattatctg

SEQ ID NO: 2349881 - DNA, 25 bp, Homo sapien
aacggaccatatgatctgaggcttc

SEQ ID NO: 2349882 - DNA, 25 bp, Homo sapien
taatatgggtataaagggctgtcat

SEQ ID NO: 2349883 - DNA, 25 bp, Homo sapien
gggctgtcatggaaacggaccatat

SEQ ID NO: 2349884 - DNA, 25 bp, Homo sapien
tcaaagggtagctcatagccgtttc

SEQ ID NO: 2349885 - DNA, 25 bp, Homo sapien
tcgtcaaagggtagctcatagccgt

SEQ ID NO: 2349886 - DNA, 25 bp, Homo sapien
cgtcaaagggtagctcatagccgtt

SEQ ID NO: 2349887 - DNA, 25 bp, Homo sapien
caaagggtagctcatagccgtttct

SEQ ID NO: 2349888 - DNA, 25 bp, Homo sapien
aacagatctacagcaggatgaacag

SEQ ID NO: 2349889 - DNA, 25 bp, Homo sapien
aaatccacacggactccacactttt

SEQ ID NO: 2349890 - DNA, 25 bp, Homo sapien
ccttcccattcctgtgaaagagaaa

SEQ ID NO: 2349891 - DNA, 25 bp, Homo sapien
tccacacggactccacacttttcct

SEQ ID NO: 2349892 - DNA, 25 bp, Homo sapien
cttcccattcctgtgaaagagaaat

SEQ ID NO: 2349893 - DNA, 25 bp, Homo sapien
cgattttggcagaaggtccactttt

SEQ ID NO: 2349894 - DNA, 25 bp, Homo sapien
tgcccttttcctcttggtctgattt

SEQ ID NO: 2349895 - DNA, 25 bp, Homo sapien
ccacttttgcatgtatcagtaatga

SEQ ID NO: 2349896 - DNA, 25 bp, Homo sapien
tctgattttctgaggtcgattttgg

SEQ ID NO: 2349897 - DNA, 25 bp, Homo sapien
aagaagttgtgctatttaactctga

SEQ ID NO: 2349898 - DNA, 25 bp, Homo sapien
cagcactgccactacatgtggacaa

SEQ ID NO: 2349899 - DNA, 25 bp, Homo sapien
ggtgtgtgagaaagcctactgaagc

SEQ ID NO: 2349900 - DNA, 25 bp, Homo sapien
caaaagtgaccatataaaagaagtt

SEQ ID NO: 2349901 - DNA, 25 bp, Homo sapien
cacttgtgttgtgaacgtttggtga

SEQ ID NO: 2349902 - DNA, 25 bp, Homo sapien
ttgtgttgtgaacgtttggtgactg

SEQ ID NO: 2349903 - DNA, 25 bp, Homo sapien
acttgtgttgtgaacgtttggtgac

SEQ ID NO: 2349904 - DNA, 25 bp, Homo sapien
cttgtgttgtgaacgtttggtgact

SEQ ID NO: 2349905 - DNA, 25 bp, Homo sapien
tccagcttcagcgatgttacttacg

SEQ ID NO: 2349906 - DNA, 25 bp, Homo sapien
cgcatgaactttggtctgtaggtgt

SEQ ID NO: 2349907 - DNA, 25 bp, Homo sapien
tgaatgacgttttaaggaatcccta

SEQ ID NO: 2349908 - DNA, 25 bp, Homo sapien
taagggcagtacctctaacaaggac

SEQ ID NO: 2349909 - DNA, 25 bp, Homo sapien
cctgccctgaacctggaataagccg

SEQ ID NO: 2349910 - DNA, 25 bp, Homo sapien
aataagccgttttccaagaggcctg

SEQ ID NO: 2349911 - DNA, 25 bp, Homo sapien
gctgggcaactaggttatcatgaaa

SEQ ID NO: 2349912 - DNA, 25 bp, Homo sapien
cattcttccgtaagagggctttctc

SEQ ID NO: 2349913 - DNA, 25 bp, Homo sapien
gctgcttgtcttacatcctctgaag

SEQ ID NO: 2349914 - DNA, 25 bp, Homo sapien
gctgatttgctgcttgtcttacatc

SEQ ID NO: 2349915 - DNA, 25 bp, Homo sapien
gaagcacaacataaacaaactcagc

SEQ ID NO: 2349916 - DNA, 25 bp, Homo sapien
aaactcagcaagaacatctctccct

SEQ ID NO: 2349917 - DNA, 25 bp, Homo sapien
tcaagggactgcccaatcagtttat

SEQ ID NO: 2349918 - DNA, 25 bp, Homo sapien
cttcaagggactgcccaatcagttt

SEQ ID NO: 2349919 - DNA, 25 bp, Homo sapien
caagggactgcccaatcagtttatt

SEQ ID NO: 2349920 - DNA, 25 bp, Homo sapien
ttcaagggactgcccaatcagttta

SEQ ID NO: 2349921 - DNA, 25 bp, Homo sapien
agcttgagtgacagaatgagactcc

SEQ ID NO: 2349922 - DNA, 25 bp, Homo sapien
ctccagcttgagtgacagaatgaga

SEQ ID NO: 2349923 - DNA, 25 bp, Homo sapien
ccagcttgagtgacagaatgagact

SEQ ID NO: 2349924 - DNA, 25 bp, Homo sapien
actccagcttgagtgacagaatgag

SEQ ID NO: 2349925 - DNA, 25 bp, Homo sapien
cggcgggcttgggaggcagtgccag

SEQ ID NO: 2349926 - DNA, 25 bp, Homo sapien
ggcggcgggcttgggaggcagtgcc

SEQ ID NO: 2349927 - DNA, 25 bp, Homo sapien
gcggcgggcttgggaggcagtgcca

SEQ ID NO: 2349928 - DNA, 25 bp, Homo sapien
tccatgcactctccatgctggatca

SEQ ID NO: 2349929 - DNA, 25 bp, Homo sapien
actctccatgctggatcagcaccag

SEQ ID NO: 2349930 - DNA, 25 bp, Homo sapien
caggttccatgcactctccatgctg

SEQ ID NO: 2349931 - DNA, 25 bp, Homo sapien
tgcactctccatgctggatcagcac

SEQ ID NO: 2349932 - DNA, 25 bp, Homo sapien
tgccgggctcaggtcggagtcgtac

SEQ ID NO: 2349933 - DNA, 25 bp, Homo sapien
tggcctgccgggctcaggtcggagt

SEQ ID NO: 2349934 - DNA, 25 bp, Homo sapien
tcctggtggcctgccgggctcaggt

SEQ ID NO: 2349935 - DNA, 25 bp, Homo sapien
gcctgccgggctcaggtcggagtcg

SEQ ID NO: 2349936 - DNA, 25 bp, Homo sapien
catctagcagcgcctgcccgcctgc

SEQ ID NO: 2349937 - DNA, 25 bp, Homo sapien
atagccaacatctagcagcgcctgc

SEQ ID NO: 2349938 - DNA, 25 bp, Homo sapien
actcatagccaacatctagcagcgc

SEQ ID NO: 2349939 - DNA, 25 bp, Homo sapien
tcatagccaacatctagcagcgcct

SEQ ID NO: 2349940 - DNA, 25 bp, Homo sapien
cagagggtccgggtcgctctcttct

SEQ ID NO: 2349941 - DNA, 25 bp, Homo sapien
ctgtccagagggtccgggtcgctct

SEQ ID NO: 2349942 - DNA, 25 bp, Homo sapien
gtccagagggtccgggtcgctctct

SEQ ID NO: 2349943 - DNA, 25 bp, Homo sapien
tagcactgtccagagggtccgggtc

SEQ ID NO: 2349944 - DNA, 25 bp, Homo sapien
cgagatcggtcagacccccatagtg

SEQ ID NO: 2349945 - DNA, 25 bp, Homo sapien
gcagtttctgctttaccgagatcgg

SEQ ID NO: 2349946 - DNA, 25 bp, Homo sapien
ccaagtcctcattacaggtgggcca

SEQ ID NO: 2349947 - DNA, 25 bp, Homo sapien
ggcgccaagtcctcattacaggtgg

SEQ ID NO: 2349948 - DNA, 25 bp, Homo sapien
agggtggtgggacatcataggagca

SEQ ID NO: 2349949 - DNA, 25 bp, Homo sapien
ctccagcagggtggtgggacatcat

SEQ ID NO: 2349950 - DNA, 25 bp, Homo sapien
agcagggtggtgggacatcatagga

SEQ ID NO: 2349951 - DNA, 25 bp, Homo sapien
ccagcagggtggtgggacatcatag

SEQ ID NO: 2349952 - DNA, 25 bp, Homo sapien
catggctttacacagggtcccttca

SEQ ID NO: 2349953 - DNA, 25 bp, Homo sapien
ctgatgggcttcgagctcttgtcca

SEQ ID NO: 2349954 - DNA, 25 bp, Homo sapien
cccaggaactccatgcacctgatgg

SEQ ID NO: 2349955 - DNA, 25 bp, Homo sapien
cacctgatgggcttcgagctcttgt

SEQ ID NO: 2349956 - DNA, 25 bp, Homo sapien
gttcttagtaaacaaagcggtcgca

SEQ ID NO: 2349957 - DNA, 25 bp, Homo sapien
gccacaagagatccgagaaggatta

SEQ ID NO: 2349958 - DNA, 25 bp, Homo sapien
gaacccatgccctagaagtgctatt

SEQ ID NO: 2349959 - DNA, 25 bp, Homo sapien
ttagtacagtgatgctcaaatgagc

SEQ ID NO: 2349960 - DNA, 25 bp, Homo sapien
gtatttttattcatacgttgctgaa

SEQ ID NO: 2349961 - DNA, 25 bp, Homo sapien
gctgaatttgatctgctagggtttt

SEQ ID NO: 2349962 - DNA, 25 bp, Homo sapien
cccacacccctaataggccccagtg

SEQ ID NO: 2349963 - DNA, 25 bp, Homo sapien
gaatggcaattattatcaagctatt

SEQ ID NO: 2349964 - DNA, 25 bp, Homo sapien
ctacaccctggacagtaaagcaaga

SEQ ID NO: 2349965 - DNA, 25 bp, Homo sapien
ttacatggaatgtctcaaacagatt

SEQ ID NO: 2349966 - DNA, 25 bp, Homo sapien
ctgcactacaccctggacagtaaag

SEQ ID NO: 2349967 - DNA, 25 bp, Homo sapien
cactacaccctggacagtaaagcaa

SEQ ID NO: 2349968 - DNA, 25 bp, Homo sapien
tggaagacaggcagactcctagagt

SEQ ID NO: 2349969 - DNA, 25 bp, Homo sapien
gatgaaccggcagcaattacctcct

SEQ ID NO: 2349970 - DNA, 25 bp, Homo sapien
tcacagatcactccctcagtggaag

SEQ ID NO: 2349971 - DNA, 25 bp, Homo sapien
gaggccagtttcagagcggtaagat

SEQ ID NO: 2349972 - DNA, 25 bp, Homo sapien
attacaggctggagccactacaccc

SEQ ID NO: 2349973 - DNA, 25 bp, Homo sapien
aggctggagccactacacccagcca

SEQ ID NO: 2349974 - DNA, 25 bp, Homo sapien
ggattacaggctggagccactacac

SEQ ID NO: 2349975 - DNA, 25 bp, Homo sapien
tacaggctggagccactacacccag

SEQ ID NO: 2349976 - DNA, 25 bp, Homo sapien
taattgtgtactggcttttgcggca

SEQ ID NO: 2349977 - DNA, 25 bp, Homo sapien
cctttaaaaagcatcgttggtgact

SEQ ID NO: 2349978 - DNA, 25 bp, Homo sapien
aatcagaatctccaacagggcgtcc

SEQ ID NO: 2349979 - DNA, 25 bp, Homo sapien
gggagggaaccctgacctgattcac

SEQ ID NO: 2349980 - DNA, 25 bp, Homo sapien
tggtaacctataacacaggtagatt

SEQ ID NO: 2349981 - DNA, 25 bp, Homo sapien
tcacctatgtgactttggtaaccta

SEQ ID NO: 2349982 - DNA, 25 bp, Homo sapien
tgtactgaggtactttgaggaatct

SEQ ID NO: 2349983 - DNA, 25 bp, Homo sapien
tctgttcaaaaagtggatagtctct

SEQ ID NO: 2349984 - DNA, 25 bp, Homo sapien
gagtctactgttggacccagcacaa

SEQ ID NO: 2349985 - DNA, 25 bp, Homo sapien
gaaaggacagtgcatttaaggtctg

SEQ ID NO: 2349986 - DNA, 25 bp, Homo sapien
gaatctctccagctgaacctagggc

SEQ ID NO: 2349987 - DNA, 25 bp, Homo sapien
tggaggctcaaagtgactcgttgct

SEQ ID NO: 2349988 - DNA, 25 bp, Homo sapien
gacagtattgccagaggtgcaagcc

SEQ ID NO: 2349989 - DNA, 25 bp, Homo sapien
gactgtcagcacaacacagaaggac

SEQ ID NO: 2349990 - DNA, 25 bp, Homo sapien
ttctatcgtgacctgcggagaccct

SEQ ID NO: 2349991 - DNA, 25 bp, Homo sapien
acttcgacgttaatgtgtgggaggc

SEQ ID NO: 2349992 - DNA, 25 bp, Homo sapien
cgcatctgtggactccttgttgtct

SEQ ID NO: 2349993 - DNA, 25 bp, Homo sapien
caagcccacgatactcaaaagcttt

SEQ ID NO: 2349994 - DNA, 25 bp, Homo sapien
ctttgtaaagtcaacgcatctgtgg

SEQ ID NO: 2349995 - DNA, 25 bp, Homo sapien
gcccacgatactcaaaagctttctt

SEQ ID NO: 2349996 - DNA, 25 bp, Homo sapien
ccacacagatgggatgcggcttagg

SEQ ID NO: 2349997 - DNA, 25 bp, Homo sapien
tcccacacagatgggatgcggctta

SEQ ID NO: 2349998 - DNA, 25 bp, Homo sapien
ggtcccacacagatgggatgcggct

SEQ ID NO: 2349999 - DNA, 25 bp, Homo sapien
cacacagatgggatgcggcttagga

SEQ ID NO: 2350000 - DNA, 25 bp, Homo sapien
ttatcgttttcctagtgtgaccagg

SEQ ID NO: 2350001 - DNA, 25 bp, Homo sapien
gacaacctaggtgactcttctaatg

SEQ ID NO: 2350002 - DNA, 25 bp, Homo sapien
gccaccatggataagttcactagca

SEQ ID NO: 2350003 - DNA, 25 bp, Homo sapien
cactagcatttggtctcattacagc

SEQ ID NO: 2350004 - DNA, 25 bp, Homo sapien
ttttggaataagtgcgatgtggtgc

SEQ ID NO: 2350005 - DNA, 25 bp, Homo sapien
gctgaggagtacttccagctatgtg

SEQ ID NO: 2350006 - DNA, 25 bp, Homo sapien
gtcaattttggaataagtgcgatgt

SEQ ID NO: 2350007 - DNA, 25 bp, Homo sapien
ttgctgaggagtacttccagctatg

SEQ ID NO: 2350008 - DNA, 25 bp, Homo sapien
cccgcagcccagaggtctcggctcc

SEQ ID NO: 2350009 - DNA, 25 bp, Homo sapien
cagcccagaggtctcggctccctcc

SEQ ID NO: 2350010 - DNA, 25 bp, Homo sapien
tcttggcaaaggaattgctgtgtca

SEQ ID NO: 2350011 - DNA, 25 bp, Homo sapien
gactcagaagtctggaatacctgcc

SEQ ID NO: 2350012 - DNA, 25 bp, Homo sapien
tgtcagttgcaagatggcatttttc

SEQ ID NO: 2350013 - DNA, 25 bp, Homo sapien
ctcaacataagaaactaaggatatg

SEQ ID NO: 2350014 - DNA, 25 bp, Homo sapien
tctgtttgcttaatgatgaaatctg

SEQ ID NO: 2350015 - DNA, 25 bp, Homo sapien
gaactaatggggttgcatgagaact

SEQ ID NO: 2350016 - DNA, 25 bp, Homo sapien
cccatgctgttacagtgagatcact

SEQ ID NO: 2350017 - DNA, 25 bp, Homo sapien
gatcactttttgtagcactagttct

SEQ ID NO: 2350018 - DNA, 25 bp, Homo sapien
gacacccctgcattagactattaat

SEQ ID NO: 2350019 - DNA, 25 bp, Homo sapien
gaacatttgtagattagctggttcc

SEQ ID NO: 2350020 - DNA, 25 bp, Homo sapien
tttggcctgatctactgtaggtgaa

SEQ ID NO: 2350021 - DNA, 25 bp, Homo sapien
cctttttttggcctgatctactgta

SEQ ID NO: 2350022 - DNA, 25 bp, Homo sapien
acttcagagttgagactctactgct

SEQ ID NO: 2350023 - DNA, 25 bp, Homo sapien
tagagagattacagaatttcttcga

SEQ ID NO: 2350024 - DNA, 25 bp, Homo sapien
gattacagaatttcttcgaggttac

SEQ ID NO: 2350025 - DNA, 25 bp, Homo sapien
gaatttcttcgaggttacatagctt

SEQ ID NO: 2350026 - DNA, 25 bp, Homo sapien
atctcagcgttggatgagcaggaga

SEQ ID NO: 2350027 - DNA, 25 bp, Homo sapien
tcagatctcagcgttggatgagcag

SEQ ID NO: 2350028 - DNA, 25 bp, Homo sapien
cagcttccggatcagatctcagcgt

SEQ ID NO: 2350029 - DNA, 25 bp, Homo sapien
tccggatcagatctcagcgttggat

SEQ ID NO: 2350030 - DNA, 25 bp, Homo sapien
gcggaccttgggaaaccggctctga

SEQ ID NO: 2350031 - DNA, 25 bp, Homo sapien
cctgcctctgtgattggacgcaaag

SEQ ID NO: 2350032 - DNA, 25 bp, Homo sapien
ggctggcccagtatctcctagcaac

SEQ ID NO: 2350033 - DNA, 25 bp, Homo sapien
cagcggcttgggtttgcgccttgca

SEQ ID NO: 2350034 - DNA, 25 bp, Homo sapien
ccacggccgaatgttgcaggctact

SEQ ID NO: 2350035 - DNA, 25 bp, Homo sapien
gtcccgagccgcagtttcaagagaa

SEQ ID NO: 2350036 - DNA, 25 bp, Homo sapien
gtgactacagcaggtaccgcaggtc

SEQ ID NO: 2350037 - DNA, 25 bp, Homo sapien
gcccgtccctcgtgactacagcagg

SEQ ID NO: 2350038 - DNA, 25 bp, Homo sapien
tcctgttagtccattgaggaaaggt

SEQ ID NO: 2350039 - DNA, 25 bp, Homo sapien
actggctttcctgttagtccattga

SEQ ID NO: 2350040 - DNA, 25 bp, Homo sapien
ccattgaggaaaggtttgggattga

SEQ ID NO: 2350041 - DNA, 25 bp, Homo sapien
tagtccattgaggaaaggtttggga

SEQ ID NO: 2350042 - DNA, 25 bp, Homo sapien
gatagcccttgtactccattcccca

SEQ ID NO: 2350043 - DNA, 25 bp, Homo sapien
tctacagataccagatagcccttgt

SEQ ID NO: 2350044 - DNA, 25 bp, Homo sapien
agccatctacagataccagatagcc

SEQ ID NO: 2350045 - DNA, 25 bp, Homo sapien
tactccattccccacttaagtttca

SEQ ID NO: 2350046 - DNA, 25 bp, Homo sapien
tagtatatcacagtatccctcctgg

SEQ ID NO: 2350047 - DNA, 25 bp, Homo sapien
tccagaaatggacaacggtgatggc

SEQ ID NO: 2350048 - DNA, 25 bp, Homo sapien
gaatcaagtgtctgagctcttccta

SEQ ID NO: 2350049 - DNA, 25 bp, Homo sapien
ttactacagtccaaagagggaagca

SEQ ID NO: 2350050 - DNA, 25 bp, Homo sapien
ttattaaaacttcacccagatgtcc

SEQ ID NO: 2350051 - DNA, 25 bp, Homo sapien
cccagatgtccagacaaagctccat

SEQ ID NO: 2350052 - DNA, 25 bp, Homo sapien
gacaaagctccatctatgtattctt

SEQ ID NO: 2350053 - DNA, 25 bp, Homo sapien
aaagctccatctatgtattcttctg

SEQ ID NO: 2350054 - DNA, 25 bp, Homo sapien
ctaagttcccgcaacaaaggccact

SEQ ID NO: 2350055 - DNA, 25 bp, Homo sapien
ggagctttgaagctagtacagaaaa

SEQ ID NO: 2350056 - DNA, 25 bp, Homo sapien
ggttgccactgcaaaagattatagc

SEQ ID NO: 2350057 - DNA, 25 bp, Homo sapien
acagccagacccaactaaaattcaa

SEQ ID NO: 2350058 - DNA, 25 bp, Homo sapien
tcctcttcttccacacctctgatat

SEQ ID NO: 2350059 - DNA, 25 bp, Homo sapien
tccacacctctgatataaaggacat

SEQ ID NO: 2350060 - DNA, 25 bp, Homo sapien
acacctctgatataaaggacattat

SEQ ID NO: 2350061 - DNA, 25 bp, Homo sapien
ttcttccacacctctgatataaagg

SEQ ID NO: 2350062 - DNA, 25 bp, Homo sapien
aacaaatctttattgtctagaaata

SEQ ID NO: 2350063 - DNA, 25 bp, Homo sapien
aatctttattgtctagaaatatata

SEQ ID NO: 2350064 - DNA, 25 bp, Homo sapien
caaatctttattgtctagaaatata

SEQ ID NO: 2350065 - DNA, 25 bp, Homo sapien
aaacaaatctttattgtctagaaat

SEQ ID NO: 2350066 - DNA, 25 bp, Homo sapien
gtaatctttcccaattggttcatca

SEQ ID NO: 2350067 - DNA, 25 bp, Homo sapien
cattagttcagtgagtaatctttcc

SEQ ID NO: 2350068 - DNA, 25 bp, Homo sapien
taaaaggtctcagctaatagataat

SEQ ID NO: 2350069 - DNA, 25 bp, Homo sapien
aaaggtctcagctaatagataattt

SEQ ID NO: 2350070 - DNA, 25 bp, Homo sapien
caacctcgaggttatgtctcagaac

SEQ ID NO: 2350071 - DNA, 25 bp, Homo sapien
catctgtagggaagttcatagcata

SEQ ID NO: 2350072 - DNA, 25 bp, Homo sapien
tgtattttctcaacccatctgtagg

SEQ ID NO: 2350073 - DNA, 25 bp, Homo sapien
gaacaaaccgtatgccttcagcctg

SEQ ID NO: 2350074 - DNA, 25 bp, Homo sapien
tcaatattcccaagatgtagatgaa

SEQ ID NO: 2350075 - DNA, 25 bp, Homo sapien
caatattcccaagatgtagatgaaa

SEQ ID NO: 2350076 - DNA, 25 bp, Homo sapien
tacttcaagtcctcagagagctgga

SEQ ID NO: 2350077 - DNA, 25 bp, Homo sapien
gaaataggcgagtttcccatacaag

SEQ ID NO: 2350078 - DNA, 25 bp, Homo sapien
tctagataagtcacatgtgcatagg

SEQ ID NO: 2350079 - DNA, 25 bp, Homo sapien
caaggaaccagaggagttacttcaa

SEQ ID NO: 2350080 - DNA, 25 bp, Homo sapien
tagtatgtgtatactacattgactt

SEQ ID NO: 2350081 - DNA, 25 bp, Homo sapien
tccatagtatgtgtatactacattg

SEQ ID NO: 2350082 - DNA, 25 bp, Homo sapien
ctacattgacttaatccatttatcc

SEQ ID NO: 2350083 - DNA, 25 bp, Homo sapien
catagtatgtgtatactacattgac

SEQ ID NO: 2350084 - DNA, 25 bp, Homo sapien
aggtgcccacctccacgcttggctc

SEQ ID NO: 2350085 - DNA, 25 bp, Homo sapien
tgcccacctccacgcttggctcatt

SEQ ID NO: 2350086 - DNA, 25 bp, Homo sapien
caccacgttagccaagctagtctca

SEQ ID NO: 2350087 - DNA, 25 bp, Homo sapien
tcaccacgttagccaagctagtctc

SEQ ID NO: 2350088 - DNA, 25 bp, Homo sapien
actagaaacttatcactaacattac

SEQ ID NO: 2350089 - DNA, 25 bp, Homo sapien
cattcttgatggagactctcagcaa

SEQ ID NO: 2350090 - DNA, 25 bp, Homo sapien
cccatatgattatcccaattgatgc

SEQ ID NO: 2350091 - DNA, 25 bp, Homo sapien
cagaaaaaccactcaacaatatcca

SEQ ID NO: 2350092 - DNA, 25 bp, Homo sapien
aaagccgcagcctgcgctgtccggg

SEQ ID NO: 2350093 - DNA, 25 bp, Homo sapien
tggaggacgaaaagccgcagcctgc

SEQ ID NO: 2350094 - DNA, 25 bp, Homo sapien
ctcgcgccgagggtcgccgggaggc

SEQ ID NO: 2350095 - DNA, 25 bp, Homo sapien
caccggcaggactcagtggaggacg

SEQ ID NO: 2350096 - DNA, 25 bp, Homo sapien
gcaggaggctgtggccgcttgccat

SEQ ID NO: 2350097 - DNA, 25 bp, Homo sapien
ctgcgcgttctccagcaggaggctg

SEQ ID NO: 2350098 - DNA, 25 bp, Homo sapien
tgcgcgttctccagcaggaggctgt

SEQ ID NO: 2350099 - DNA, 25 bp, Homo sapien
ccagcaggaggctgtggccgcttgc

SEQ ID NO: 2350100 - DNA, 25 bp, Homo sapien
cccaccaccaggctggcgccttcca

SEQ ID NO: 2350101 - DNA, 25 bp, Homo sapien
tgcgcagcgcatcccgcgccaggaa

SEQ ID NO: 2350102 - DNA, 25 bp, Homo sapien
ctgcgcagcgcatcccgcgccagga

SEQ ID NO: 2350103 - DNA, 25 bp, Homo sapien
cgcagcgcatcccgcgccaggaagc

SEQ ID NO: 2350104 - DNA, 25 bp, Homo sapien
cagcaggaccaatagcttttataaa

SEQ ID NO: 2350105 - DNA, 25 bp, Homo sapien
aaaactgtctttgaataacatcagc

SEQ ID NO: 2350106 - DNA, 25 bp, Homo sapien
gaaaacccatcagttagaagctctg

SEQ ID NO: 2350107 - DNA, 25 bp, Homo sapien
ggagaccgagatcagcagatcgctt

SEQ ID NO: 2350108 - DNA, 25 bp, Homo sapien
tcaagaatcataaggaaggccgggc

SEQ ID NO: 2350109 - DNA, 25 bp, Homo sapien
cattattggctctgattggactaaa

SEQ ID NO: 2350110 - DNA, 25 bp, Homo sapien
cttcattgcaaattcgtgaactctt

SEQ ID NO: 2350111 - DNA, 25 bp, Homo sapien
ttcaccagcccatactggatgtgtg

SEQ ID NO: 2350112 - DNA, 25 bp, Homo sapien
tcattgcaaattcgtgaactctttc

SEQ ID NO: 2350113 - DNA, 25 bp, Homo sapien
tgaactctttcaccagcccatactg

SEQ ID NO: 2350114 - DNA, 25 bp, Homo sapien
ggtcgaggccatatccactcttgca

SEQ ID NO: 2350115 - DNA, 25 bp, Homo sapien
cgcgtgcgctccacggtaaagtgga

SEQ ID NO: 2350116 - DNA, 25 bp, Homo sapien
gttgctgcaaggagcggaacagctc

SEQ ID NO: 2350117 - DNA, 25 bp, Homo sapien
tcatgcactggagccgttgctgcaa

SEQ ID NO: 2350118 - DNA, 25 bp, Homo sapien
taggtagccgagatgccgatgtcca

SEQ ID NO: 2350119 - DNA, 25 bp, Homo sapien
gaatgagccccgcagtaggtagccg

SEQ ID NO: 2350120 - DNA, 25 bp, Homo sapien
cagtaggtagccgagatgccgatgt

SEQ ID NO: 2350121 - DNA, 25 bp, Homo sapien
ttaggcactgaatgagccccgcagt

SEQ ID NO: 2350122 - DNA, 25 bp, Homo sapien
tccagctatcaccctgcctttttct

SEQ ID NO: 2350123 - DNA, 25 bp, Homo sapien
ccagctatcaccctgcctttttctt

SEQ ID NO: 2350124 - DNA, 25 bp, Homo sapien
gagtccagctatcaccctgcctttt

SEQ ID NO: 2350125 - DNA, 25 bp, Homo sapien
tgagtccagctatcaccctgccttt

SEQ ID NO: 2350126 - DNA, 25 bp, Homo sapien
cttcatcgggtggagttcatcccca

SEQ ID NO: 2350127 - DNA, 25 bp, Homo sapien
catccccatggaagttaatctgtaa

SEQ ID NO: 2350128 - DNA, 25 bp, Homo sapien
tggaatcgagatcaaagacaccttt

SEQ ID NO: 2350129 - DNA, 25 bp, Homo sapien
tatattgtccacgtgtatttcccca

SEQ ID NO: 2350130 - DNA, 25 bp, Homo sapien
ggcaacgatgccttcatcactcact

SEQ ID NO: 2350131 - DNA, 25 bp, Homo sapien
gttgccatggcaacgatgccttcat

SEQ ID NO: 2350132 - DNA, 25 bp, Homo sapien
cttccaggtggctgattgcctgcgc

SEQ ID NO: 2350133 - DNA, 25 bp, Homo sapien
caggtggctgattgcctgcgctccc

SEQ ID NO: 2350134 - DNA, 25 bp, Homo sapien
gatttgtaagggcaatgaaataatg

SEQ ID NO: 2350135 - DNA, 25 bp, Homo sapien
ctgcatttttaagggatttgtaagg

SEQ ID NO: 2350136 - DNA, 25 bp, Homo sapien
attcgtttacgaacatcagtccagg

SEQ ID NO: 2350137 - DNA, 25 bp, Homo sapien
taatgtctgggcactttggacgtct

SEQ ID NO: 2350138 - DNA, 25 bp, Homo sapien
cttcctggctcgaggttgtttcagt

SEQ ID NO: 2350139 - DNA, 25 bp, Homo sapien
gagcaactattactccttcatctaa

SEQ ID NO: 2350140 - DNA, 25 bp, Homo sapien
ttcatctaacatcttcctggctcga

SEQ ID NO: 2350141 - DNA, 25 bp, Homo sapien
tccttcatctaacatcttcctggct

SEQ ID NO: 2350142 - DNA, 25 bp, Homo sapien
caacttttcaagaccacttactgca

SEQ ID NO: 2350143 - DNA, 25 bp, Homo sapien
tgcctgcaggcatttatgtgggaca

SEQ ID NO: 2350144 - DNA, 25 bp, Homo sapien
tgtaaaactacaatactcaaagctg

SEQ ID NO: 2350145 - DNA, 25 bp, Homo sapien
tatgcttggtagatactctgctcag

SEQ ID NO: 2350146 - DNA, 25 bp, Homo sapien
gtttacacaggccagatgcatgacc

SEQ ID NO: 2350147 - DNA, 25 bp, Homo sapien
tttacacaggccagatgcatgacca

SEQ ID NO: 2350148 - DNA, 25 bp, Homo sapien
cacaggccagatgcatgaccattgg

SEQ ID NO: 2350149 - DNA, 25 bp, Homo sapien
tacacaggccagatgcatgaccatt

SEQ ID NO: 2350150 - DNA, 25 bp, Homo sapien
cgggatgaattgatgataatgagat

SEQ ID NO: 2350151 - DNA, 25 bp, Homo sapien
aggcctcaggcatggacattctcat

SEQ ID NO: 2350152 - DNA, 25 bp, Homo sapien
aatgagatctccctgtttgccaact

SEQ ID NO: 2350153 - DNA, 25 bp, Homo sapien
tccaacgatccgtgtgtgtgagact

SEQ ID NO: 2350154 - DNA, 25 bp, Homo sapien
tagccataggatttacaacttgtag

SEQ ID NO: 2350155 - DNA, 25 bp, Homo sapien
aggacttgaggtccaagggctgcaa

SEQ ID NO: 2350156 - DNA, 25 bp, Homo sapien
ccaatacagggagtggtttctgatc

SEQ ID NO: 2350157 - DNA, 25 bp, Homo sapien
aatgggctcgtaagagtcaagtagc

SEQ ID NO: 2350158 - DNA, 25 bp, Homo sapien
ggcctccgaactggtaaatcaaatg

SEQ ID NO: 2350159 - DNA, 25 bp, Homo sapien
attcatgatggcctccgaactggta

SEQ ID NO: 2350160 - DNA, 25 bp, Homo sapien
caattaattcatgatggcctccgaa

SEQ ID NO: 2350161 - DNA, 25 bp, Homo sapien
ttcctttagctataacatattcaat

SEQ ID NO: 2350162 - DNA, 25 bp, Homo sapien
caaaggcatttttgtgataccccac

SEQ ID NO: 2350163 - DNA, 25 bp, Homo sapien
tataaatgatgtgtcttgaacgctg

SEQ ID NO: 2350164 - DNA, 25 bp, Homo sapien
gcccctgtgcctgtgtataaatgat

SEQ ID NO: 2350165 - DNA, 25 bp, Homo sapien
gctgctgggaagctctattgctgag

SEQ ID NO: 2350166 - DNA, 25 bp, Homo sapien
gctgatctacttccaggctgaaagg

SEQ ID NO: 2350167 - DNA, 25 bp, Homo sapien
taaataattatcgactctttacaaa

SEQ ID NO: 2350168 - DNA, 25 bp, Homo sapien
aaactctaatagacaacgctgctga

SEQ ID NO: 2350169 - DNA, 25 bp, Homo sapien
gacaacgctgctgatctacttccag

SEQ ID NO: 2350170 - DNA, 25 bp, Homo sapien
tattgataaaggtcagatggagccc

SEQ ID NO: 2350171 - DNA, 25 bp, Homo sapien
caagtggtctgaaaccgtggctcta

SEQ ID NO: 2350172 - DNA, 25 bp, Homo sapien
caaggagtttcatgtgcaaaggaga

SEQ ID NO: 2350173 - DNA, 25 bp, Homo sapien
gatggagccctagagtgtattactg

SEQ ID NO: 2350174 - DNA, 25 bp, Homo sapien
caatactaggctgaaggagagacct

SEQ ID NO: 2350175 - DNA, 25 bp, Homo sapien
gagggcagtcagtttagcacaaagc

SEQ ID NO: 2350176 - DNA, 25 bp, Homo sapien
tcttaagggtgagaagaataaccac

SEQ ID NO: 2350177 - DNA, 25 bp, Homo sapien
tcctgttgtcgtggttcaagaccca

SEQ ID NO: 2350178 - DNA, 25 bp, Homo sapien
taatagcatgtggaaacaatgtcgt

SEQ ID NO: 2350179 - DNA, 25 bp, Homo sapien
cacaggtcatgtgtcaaatggctta

SEQ ID NO: 2350180 - DNA, 25 bp, Homo sapien
ccaaagactaattgacacaggtcat

SEQ ID NO: 2350181 - DNA, 25 bp, Homo sapien
cacataggtactgttaagaccctgg

SEQ ID NO: 2350182 - DNA, 25 bp, Homo sapien
ggctgactaaatggagaccctcttt

SEQ ID NO: 2350183 - DNA, 25 bp, Homo sapien
ggcacatttcaatataggctgacta

SEQ ID NO: 2350184 - DNA, 25 bp, Homo sapien
tggtgaatacccagccaaagtaagc

SEQ ID NO: 2350185 - DNA, 25 bp, Homo sapien
ttgccaataggggagagacagtttc

SEQ ID NO: 2350186 - DNA, 25 bp, Homo sapien
tgcaggaagacttgtctctttccct

SEQ ID NO: 2350187 - DNA, 25 bp, Homo sapien
gcttttgtgcccctttatatctctt

SEQ ID NO: 2350188 - DNA, 25 bp, Homo sapien
tgtacatgatccacctttaaggctt

SEQ ID NO: 2350189 - DNA, 25 bp, Homo sapien
cacatttgtacacagactgccacct

SEQ ID NO: 2350190 - DNA, 25 bp, Homo sapien
tatgtgagcacctacctgatctttc

SEQ ID NO: 2350191 - DNA, 25 bp, Homo sapien
tatatgatctttttcaagaaccagc

SEQ ID NO: 2350192 - DNA, 25 bp, Homo sapien
aggtatgtgagcacctacctgatcc

SEQ ID NO: 2350193 - DNA, 25 bp, Homo sapien
tgaaggattccgtggtaaataggct

SEQ ID NO: 2350194 - DNA, 25 bp, Homo sapien
tctatagattagttgacatgcatac

SEQ ID NO: 2350195 - DNA, 25 bp, Homo sapien
tatagattctaggagtcatatcagc

SEQ ID NO: 2350196 - DNA, 25 bp, Homo sapien
gaaatttctatacctcgaatggtac

SEQ ID NO: 2350197 - DNA, 25 bp, Homo sapien
tcaggattatttaagtaactcaggc

SEQ ID NO: 2350198 - DNA, 25 bp, Homo sapien
cttcgaggtgggagctgtgttgacc

SEQ ID NO: 2350199 - DNA, 25 bp, Homo sapien
ctgcttcgaggtgggagctgtgttg

SEQ ID NO: 2350200 - DNA, 25 bp, Homo sapien
gcttcgaggtgggagctgtgttgac

SEQ ID NO: 2350201 - DNA, 25 bp, Homo sapien
tcgaggtgggagctgtgttgacctt

SEQ ID NO: 2350202 - DNA, 25 bp, Homo sapien
cataagtagggtcctttcccaggct

SEQ ID NO: 2350203 - DNA, 25 bp, Homo sapien
cagtgtattctgatcagtcaaggac

SEQ ID NO: 2350204 - DNA, 25 bp, Homo sapien
cactaataaggaagtttcaggacac

SEQ ID NO: 2350205 - DNA, 25 bp, Homo sapien
tcaggacacgaagaaacagaccagc

SEQ ID NO: 2350206 - DNA, 25 bp, Homo sapien
aggattacagcaacatttctcaggc

SEQ ID NO: 2350207 - DNA, 25 bp, Homo sapien
gtcaggattacagcaacatttctca

SEQ ID NO: 2350208 - DNA, 25 bp, Homo sapien
gctgcaagattgaagtgtcaggatt

SEQ ID NO: 2350209 - DNA, 25 bp, Homo sapien
gtgtcaggattacagcaacatttct

SEQ ID NO: 2350210 - DNA, 25 bp, Homo sapien
cccacaggctggcaattaggtagga

SEQ ID NO: 2350211 - DNA, 25 bp, Homo sapien
ggaaaactgagaggagacttaccca

SEQ ID NO: 2350212 - DNA, 25 bp, Homo sapien
gatgtggcatacctagagcttactg

SEQ ID NO: 2350213 - DNA, 25 bp, Homo sapien
tgcaaagtacgtgacacacaacggg

SEQ ID NO: 2350214 - DNA, 25 bp, Homo sapien
tcccgcgtgacaggcggggatactc

SEQ ID NO: 2350215 - DNA, 25 bp, Homo sapien
tcgaaccccggtctcccgcgtgaca

SEQ ID NO: 2350216 - DNA, 25 bp, Homo sapien
tactcaccactatactaacgaggaa

SEQ ID NO: 2350217 - DNA, 25 bp, Homo sapien
gggatactcaccactatactaacga

SEQ ID NO: 2350218 - DNA, 25 bp, Homo sapien
ttggtcttgacccaaagctgtcacc

SEQ ID NO: 2350219 - DNA, 25 bp, Homo sapien
gttggtcttgacccaaagctgtcac

SEQ ID NO: 2350220 - DNA, 25 bp, Homo sapien
tggtcttgacccaaagctgtcacca

SEQ ID NO: 2350221 - DNA, 25 bp, Homo sapien
ggtcttgacccaaagctgtcaccat

SEQ ID NO: 2350222 - DNA, 25 bp, Homo sapien
gaatagatctgaatctgtgcttggc

SEQ ID NO: 2350223 - DNA, 25 bp, Homo sapien
gagaatagatctgaatctgtgcttg

SEQ ID NO: 2350224 - DNA, 25 bp, Homo sapien
agaatagatctgaatctgtgcttgg

SEQ ID NO: 2350225 - DNA, 25 bp, Homo sapien
aatagatctgaatctgtgcttggca

SEQ ID NO: 2350226 - DNA, 25 bp, Homo sapien
tgaggagcatgtatcatctgataat

SEQ ID NO: 2350227 - DNA, 25 bp, Homo sapien
ctctgaggagcatgtatcatctgat

SEQ ID NO: 2350228 - DNA, 25 bp, Homo sapien
ctgaagttcaagagagtgaaggctc

SEQ ID NO: 2350229 - DNA, 25 bp, Homo sapien
tgaaggctctgaggagcatgtatca

SEQ ID NO: 2350230 - DNA, 25 bp, Homo sapien
tagccatgttataaggaaggctgtg

SEQ ID NO: 2350231 - DNA, 25 bp, Homo sapien
cagccacagggttcaagatgtgagc

SEQ ID NO: 2350232 - DNA, 25 bp, Homo sapien
aaggtcgttaacctgctgtgcagtg

SEQ ID NO: 2350233 - DNA, 25 bp, Homo sapien
gcaaaagttgcaatagcaaaccggg

SEQ ID NO: 2350234 - DNA, 25 bp, Homo sapien
tggtgtaaattgcaggggctaccgc

SEQ ID NO: 2350235 - DNA, 25 bp, Homo sapien
caccagcagggtatcagcaaataaa

SEQ ID NO: 2350236 - DNA, 25 bp, Homo sapien
gtgtaaattgcaggggctaccgctg

SEQ ID NO: 2350237 - DNA, 25 bp, Homo sapien
gccaccagcagggtatcagcaaata

SEQ ID NO: 2350238 - DNA, 25 bp, Homo sapien
agggctgcttccgggccagcgtcca

SEQ ID NO: 2350239 - DNA, 25 bp, Homo sapien
cgaggagctgtccacggacgggcca

SEQ ID NO: 2350240 - DNA, 25 bp, Homo sapien
agctgtccacggacgggccagggct

SEQ ID NO: 2350241 - DNA, 25 bp, Homo sapien
tggtgttggagttggccgactctcc

SEQ ID NO: 2350242 - DNA, 25 bp, Homo sapien
gaagaaggatatgctgctccatgca

SEQ ID NO: 2350243 - DNA, 25 bp, Homo sapien
tgagaagaaggatatgctgctccat

SEQ ID NO: 2350244 - DNA, 25 bp, Homo sapien
gagaagaaggatatgctgctccatg

SEQ ID NO: 2350245 - DNA, 25 bp, Homo sapien
agaagaaggatatgctgctccatgc

SEQ ID NO: 2350246 - DNA, 25 bp, Homo sapien
aagtgcctgcataggccttctttct

SEQ ID NO: 2350247 - DNA, 25 bp, Homo sapien
ccaagtgcctgcataggccttcttt

SEQ ID NO: 2350248 - DNA, 25 bp, Homo sapien
atcccaagtgcctgcataggccttc

SEQ ID NO: 2350249 - DNA, 25 bp, Homo sapien
tcccaagtgcctgcataggccttct

SEQ ID NO: 2350250 - DNA, 25 bp, Homo sapien
tcctgctctccgtgaccttaaactg

SEQ ID NO: 2350251 - DNA, 25 bp, Homo sapien
ccaatgatactctgtttcagggaga

SEQ ID NO: 2350252 - DNA, 25 bp, Homo sapien
ggatgactgtaaacactccagaagc

SEQ ID NO: 2350253 - DNA, 25 bp, Homo sapien
tgtctgctgcgctgacagttcctgg

SEQ ID NO: 2350254 - DNA, 25 bp, Homo sapien
tcagaaatgttctcgggtcgagtgc

SEQ ID NO: 2350255 - DNA, 25 bp, Homo sapien
gttatcgaggaactgcagtgctact

SEQ ID NO: 2350256 - DNA, 25 bp, Homo sapien
taagtaatgggaaacgagtgtctct

SEQ ID NO: 2350257 - DNA, 25 bp, Homo sapien
gttcctcttaggaaggatcctggtc

SEQ ID NO: 2350258 - DNA, 25 bp, Homo sapien
cattttggatgtcaaaggggatttt

SEQ ID NO: 2350259 - DNA, 25 bp, Homo sapien
atggaccggacactgctctaggcaa

SEQ ID NO: 2350260 - DNA, 25 bp, Homo sapien
tgcccactgtgctatccacggctac

SEQ ID NO: 2350261 - DNA, 25 bp, Homo sapien
ttcattttggatgtcaaaggggatt

SEQ ID NO: 2350262 - DNA, 25 bp, Homo sapien
tcccccacacaaatggatgtctggt

SEQ ID NO: 2350263 - DNA, 25 bp, Homo sapien
ctttctggaccaggaaacgcttttg

SEQ ID NO: 2350264 - DNA, 25 bp, Homo sapien
tgctgccttccaacaatattacttg

SEQ ID NO: 2350265 - DNA, 25 bp, Homo sapien
cagtcggatcaagttcaatggttta

SEQ ID NO: 2350266 - DNA, 25 bp, Homo sapien
gcacaaggattagtgattcatctcc

SEQ ID NO: 2350267 - DNA, 25 bp, Homo sapien
atgtgcagttacttcctaacggtaa

SEQ ID NO: 2350268 - DNA, 25 bp, Homo sapien
taatgaaagtgaatgtggtgtttcc

SEQ ID NO: 2350269 - DNA, 25 bp, Homo sapien
gaatcagttgatgcacaggtccggg

SEQ ID NO: 2350270 - DNA, 25 bp, Homo sapien
cagcggagccaaccaatgcctccat

SEQ ID NO: 2350271 - DNA, 25 bp, Homo sapien
aactgccttctcacctaacacttgg

SEQ ID NO: 2350272 - DNA, 25 bp, Homo sapien
acttggtcaccaagcacagcggagc

SEQ ID NO: 2350273 - DNA, 25 bp, Homo sapien
tctcacctaacacttggtcaccaag

SEQ ID NO: 2350274 - DNA, 25 bp, Homo sapien
aagatgtcgtattcggatggaaagg

SEQ ID NO: 2350275 - DNA, 25 bp, Homo sapien
tggaatcgttgtggggcccagtcaa

SEQ ID NO: 2350276 - DNA, 25 bp, Homo sapien
gatggaaaggtggaatcgttgtggg

SEQ ID NO: 2350277 - DNA, 25 bp, Homo sapien
tgagagaatctgaagatgtcgtatt

SEQ ID NO: 2350278 - DNA, 25 bp, Homo sapien
tctgggtgagcttatgcccatgagg

SEQ ID NO: 2350279 - DNA, 25 bp, Homo sapien
atcctctgggtgagcttatgcccat

SEQ ID NO: 2350280 - DNA, 25 bp, Homo sapien
cacattcacggagaacctgcctttc

SEQ ID NO: 2350281 - DNA, 25 bp, Homo sapien
tcagctcctcacattcacggagaac

SEQ ID NO: 2350282 - DNA, 25 bp, Homo sapien
tctgcaacccctcggtgtagggcag

SEQ ID NO: 2350283 - DNA, 25 bp, Homo sapien
ggtctgcaacccctcggtgtagggc

SEQ ID NO: 2350284 - DNA, 25 bp, Homo sapien
gtgcaggtctgcaacccctcggtgt

SEQ ID NO: 2350285 - DNA, 25 bp, Homo sapien
gcaggtctgcaacccctcggtgtag

SEQ ID NO: 2350286 - DNA, 25 bp, Homo sapien
tctcacacccctcatcataaaccat

SEQ ID NO: 2350287 - DNA, 25 bp, Homo sapien
accctgatcttgggtacttgcttgg

SEQ ID NO: 2350288 - DNA, 25 bp, Homo sapien
tggttctcacacccctcatcataaa

SEQ ID NO: 2350289 - DNA, 25 bp, Homo sapien
cctgatcttgggtacttgcttggtt

SEQ ID NO: 2350290 - DNA, 25 bp, Homo sapien
gcctgtgcaccaccggtgcatcggg

SEQ ID NO: 2350291 - DNA, 25 bp, Homo sapien
gggctgcactggttgtcttgtcctt

SEQ ID NO: 2350292 - DNA, 25 bp, Homo sapien
catccagtgaggacttcctaggagg

SEQ ID NO: 2350293 - DNA, 25 bp, Homo sapien
gtcttgtcctttggcatccagtgag

SEQ ID NO: 2350294 - DNA, 25 bp, Homo sapien
cctccttcctgcagggatatccttt

SEQ ID NO: 2350295 - DNA, 25 bp, Homo sapien
cttcctccttcctgcagggatatcc

SEQ ID NO: 2350296 - DNA, 25 bp, Homo sapien
ctccttcctgcagggatatcctttc

SEQ ID NO: 2350297 - DNA, 25 bp, Homo sapien
tcctccttcctgcagggatatcctt

SEQ ID NO: 2350298 - DNA, 25 bp, Homo sapien
cctggacaatgcagtcccagccctg

SEQ ID NO: 2350299 - DNA, 25 bp, Homo sapien
cttcctgtgtccctacaaaagcctg

SEQ ID NO: 2350300 - DNA, 25 bp, Homo sapien
tgtccctacaaaagcctggacaatg

SEQ ID NO: 2350301 - DNA, 25 bp, Homo sapien
ccctacaaaagcctggacaatgcag

SEQ ID NO: 2350302 - DNA, 25 bp, Homo sapien
taaccctaaaaccagagctgtgcgg

SEQ ID NO: 2350303 - DNA, 25 bp, Homo sapien
cagaggcagaaaggaacgacttggt

SEQ ID NO: 2350304 - DNA, 25 bp, Homo sapien
gcataaggtggcgtgagtccccaaa

SEQ ID NO: 2350305 - DNA, 25 bp, Homo sapien
gaattctccctgttagagccgtggt

SEQ ID NO: 2350306 - DNA, 25 bp, Homo sapien
ctattttagagaccccctgctcaga

SEQ ID NO: 2350307 - DNA, 25 bp, Homo sapien
ctgctggtcttggagtgtggcaggc

SEQ ID NO: 2350308 - DNA, 25 bp, Homo sapien
gctgggctattttagagaccccctg

SEQ ID NO: 2350309 - DNA, 25 bp, Homo sapien
catcaaagtggaagcttggaactga

SEQ ID NO: 2350310 - DNA, 25 bp, Homo sapien
tgctaaagcacactgtttgttatag

SEQ ID NO: 2350311 - DNA, 25 bp, Homo sapien
cctctgtctttacttattctcggaa

SEQ ID NO: 2350312 - DNA, 25 bp, Homo sapien
acactgtttgttatagttgttgttg

SEQ ID NO: 2350313 - DNA, 25 bp, Homo sapien
ttctcggaagatctctgaatgctaa

SEQ ID NO: 2350314 - DNA, 25 bp, Homo sapien
gactttccatgctgacaggcgtctg

SEQ ID NO: 2350315 - DNA, 25 bp, Homo sapien
caggcggtgtgcagtctgtgtaaac

SEQ ID NO: 2350316 - DNA, 25 bp, Homo sapien
ccggctcacttcctttactgcatta

SEQ ID NO: 2350317 - DNA, 25 bp, Homo sapien
gcagacggtctgtggctcttgtaat

SEQ ID NO: 2350318 - DNA, 25 bp, Homo sapien
tttgcccactcgaggggagcctgac

SEQ ID NO: 2350319 - DNA, 25 bp, Homo sapien
cctggatccgagcaccagtgcactt

SEQ ID NO: 2350320 - DNA, 25 bp, Homo sapien
tcctgccacggttcttcccagggac

SEQ ID NO: 2350321 - DNA, 25 bp, Homo sapien
cagctggaaggtcggcggtggtcca

SEQ ID NO: 2350322 - DNA, 25 bp, Homo sapien
aagcgagagtggacgcagcccccag

SEQ ID NO: 2350323 - DNA, 25 bp, Homo sapien
agcgagagtggacgcagcccccagc

SEQ ID NO: 2350324 - DNA, 25 bp, Homo sapien
agtgttttgggttgtcatcaggtca

SEQ ID NO: 2350325 - DNA, 25 bp, Homo sapien
gtgaaaaaagactctactccaggaa

SEQ ID NO: 2350326 - DNA, 25 bp, Homo sapien
cctcagtgaaaaaagactctactcc

SEQ ID NO: 2350327 - DNA, 25 bp, Homo sapien
gttttgcaacatttcacagcaccat

SEQ ID NO: 2350328 - DNA, 25 bp, Homo sapien
taacgattagtaagcagcaactcac

SEQ ID NO: 2350329 - DNA, 25 bp, Homo sapien
aactttaatgagacagctggtacag

SEQ ID NO: 2350330 - DNA, 25 bp, Homo sapien
cgtatttatgtacagaaccttagga

SEQ ID NO: 2350331 - DNA, 25 bp, Homo sapien
ggaaagggtcagaagacagtcatct

SEQ ID NO: 2350332 - DNA, 25 bp, Homo sapien
cagcctccacttcaactactttacc

SEQ ID NO: 2350333 - DNA, 25 bp, Homo sapien
ctactttaccatcaggctaaagaaa

SEQ ID NO: 2350334 - DNA, 25 bp, Homo sapien
gaagatttactaatatcctctcatc

SEQ ID NO: 2350335 - DNA, 25 bp, Homo sapien
ctgggaagatttactaatatcctct

SEQ ID NO: 2350336 - DNA, 25 bp, Homo sapien
caaagagctgccttacagaggtggt

SEQ ID NO: 2350337 - DNA, 25 bp, Homo sapien
tattcatgaccgagggatcaccatc

SEQ ID NO: 2350338 - DNA, 25 bp, Homo sapien
tatcatcacctgctcatgtggtgga

SEQ ID NO: 2350339 - DNA, 25 bp, Homo sapien
gaagtcacaaaggtagtcactagcc

SEQ ID NO: 2350340 - DNA, 25 bp, Homo sapien
cttctttgagtcctgtatcccgcca

SEQ ID NO: 2350341 - DNA, 25 bp, Homo sapien
acagagtgtgcactatgcagtcttc

SEQ ID NO: 2350342 - DNA, 25 bp, Homo sapien
tggctcaccggtagccacacagagt

SEQ ID NO: 2350343 - DNA, 25 bp, Homo sapien
ttgagtcctgtatcccgccacgtgg

SEQ ID NO: 2350344 - DNA, 25 bp, Homo sapien
gctgtgatcacatcactgcacccca

SEQ ID NO: 2350345 - DNA, 25 bp, Homo sapien
ccagcctgggcaacagagcatgaac

SEQ ID NO: 2350346 - DNA, 25 bp, Homo sapien
ccccagcctgggcaacagagcatga

SEQ ID NO: 2350347 - DNA, 25 bp, Homo sapien
tgtgatcacatcactgcaccccagc

SEQ ID NO: 2350348 - DNA, 25 bp, Homo sapien
attaggcaatgagccccacacaggc

SEQ ID NO: 2350349 - DNA, 25 bp, Homo sapien
ttgtccattaggcaatgagccccac

SEQ ID NO: 2350350 - DNA, 25 bp, Homo sapien
tgtccattaggcaatgagccccaca

SEQ ID NO: 2350351 - DNA, 25 bp, Homo sapien
tccattaggcaatgagccccacaca

SEQ ID NO: 2350352 - DNA, 25 bp, Homo sapien
atttctaccagcactgaccaggacc

SEQ ID NO: 2350353 - DNA, 25 bp, Homo sapien
catttctaccagcactgaccaggac

SEQ ID NO: 2350354 - DNA, 25 bp, Homo sapien
tttctaccagcactgaccaggacca

SEQ ID NO: 2350355 - DNA, 25 bp, Homo sapien
ttctaccagcactgaccaggaccat

SEQ ID NO: 2350356 - DNA, 25 bp, Homo sapien
catgatgaaaatgcgtggttgtctg

SEQ ID NO: 2350357 - DNA, 25 bp, Homo sapien
ctccatattgttttcgttccactcg

SEQ ID NO: 2350358 - DNA, 25 bp, Homo sapien
cagagccatctgcatgatgaaaatg

SEQ ID NO: 2350359 - DNA, 25 bp, Homo sapien
attgttttcgttccactcgacgtag

SEQ ID NO: 2350360 - DNA, 25 bp, Homo sapien
agatgggaaaagcaatttctcccat

SEQ ID NO: 2350361 - DNA, 25 bp, Homo sapien
ccaccatcacagatgcacagatggg

SEQ ID NO: 2350362 - DNA, 25 bp, Homo sapien
gtcaaagcccaccatcacagatgca

SEQ ID NO: 2350363 - DNA, 25 bp, Homo sapien
caggtcaaagcccaccatcacagat

SEQ ID NO: 2350364 - DNA, 25 bp, Homo sapien
ctgctttgaggagcttgaattcacc

SEQ ID NO: 2350365 - DNA, 25 bp, Homo sapien
gaattcaccatcgttcgaggtccag

SEQ ID NO: 2350366 - DNA, 25 bp, Homo sapien
cgaggtccagcagatcaaatgctca

SEQ ID NO: 2350367 - DNA, 25 bp, Homo sapien
tcataatagtatcgcagggctctgc

SEQ ID NO: 2350368 - DNA, 25 bp, Homo sapien
cgaggatactgaggcactgaattgt

SEQ ID NO: 2350369 - DNA, 25 bp, Homo sapien
cagactttccggattttaacacgca

SEQ ID NO: 2350370 - DNA, 25 bp, Homo sapien
taattgaaccacaaaccagacagga

SEQ ID NO: 2350371 - DNA, 25 bp, Homo sapien
tgtgaccctcagtaatatccaaagg

SEQ ID NO: 2350372 - DNA, 25 bp, Homo sapien
ggccttctgcaagtttgcacacatt

SEQ ID NO: 2350373 - DNA, 25 bp, Homo sapien
ggggccttctgcaagtttgcacaca

SEQ ID NO: 2350374 - DNA, 25 bp, Homo sapien
gggccttctgcaagtttgcacacat

SEQ ID NO: 2350375 - DNA, 25 bp, Homo sapien
gccttctgcaagtttgcacacattt

SEQ ID NO: 2350376 - DNA, 25 bp, Homo sapien
ctgaccgcatgggcacagagatgac

SEQ ID NO: 2350377 - DNA, 25 bp, Homo sapien
caaacccagacgatctaggctggag

SEQ ID NO: 2350378 - DNA, 25 bp, Homo sapien
acagtcatggagctggattcaaacc

SEQ ID NO: 2350379 - DNA, 25 bp, Homo sapien
ggagctcactctgtaactacctcgt

SEQ ID NO: 2350380 - DNA, 25 bp, Homo sapien
gagagattaggcaacacggccacag

SEQ ID NO: 2350381 - DNA, 25 bp, Homo sapien
gaatcgaaccatcacttatagaggg

SEQ ID NO: 2350382 - DNA, 25 bp, Homo sapien
ctagtgtttatacctgctgcagaat

SEQ ID NO: 2350383 - DNA, 25 bp, Homo sapien
gattctagtgtcacacctgtcacgg

SEQ ID NO: 2350384 - DNA, 25 bp, Homo sapien
tgcagaatctaggtgctgtgcctgt

SEQ ID NO: 2350385 - DNA, 25 bp, Homo sapien
ccagcactgccaatccgggattggc

SEQ ID NO: 2350386 - DNA, 25 bp, Homo sapien
gtcacgtgcactccgcacaactgta

SEQ ID NO: 2350387 - DNA, 25 bp, Homo sapien
gcacaactgtagatgcaggaaggag

SEQ ID NO: 2350388 - DNA, 25 bp, Homo sapien
gcacagtgatcagagcctccgatcc

SEQ ID NO: 2350389 - DNA, 25 bp, Homo sapien
tggatggggcatcactcctttcttg

SEQ ID NO: 2350390 - DNA, 25 bp, Homo sapien
tataattgggtttgccccgcagcct

SEQ ID NO: 2350391 - DNA, 25 bp, Homo sapien
tcttggaattataattgggtttgcc

SEQ ID NO: 2350392 - DNA, 25 bp, Homo sapien
gccccgcagcctctacaaaagctta

SEQ ID NO: 2350393 - DNA, 25 bp, Homo sapien
ctattttgggggaacactgagtgcc

SEQ ID NO: 2350394 - DNA, 25 bp, Homo sapien
cactgagtgccacagggaagctggc

SEQ ID NO: 2350395 - DNA, 25 bp, Homo sapien
acactgagtgccacagggaagctgg

SEQ ID NO: 2350396 - DNA, 25 bp, Homo sapien
ttttgggggaacactgagtgccaca

SEQ ID NO: 2350397 - DNA, 25 bp, Homo sapien
gcaacagcctgacgtaagtggatct

SEQ ID NO: 2350398 - DNA, 25 bp, Homo sapien
caaacgcagactcggtgtgggcttg

SEQ ID NO: 2350399 - DNA, 25 bp, Homo sapien
tcaacacagtgttgacggcgctccc

SEQ ID NO: 2350400 - DNA, 25 bp, Homo sapien
tggatctggcaaggccgcaagagct

SEQ ID NO: 2350401 - DNA, 25 bp, Homo sapien
tgttgagcggccacctccagcgctg

SEQ ID NO: 2350402 - DNA, 25 bp, Homo sapien
ttcctgtgttgagcggccacctcca

SEQ ID NO: 2350403 - DNA, 25 bp, Homo sapien
ctgtgttgagcggccacctccagcg

SEQ ID NO: 2350404 - DNA, 25 bp, Homo sapien
ccttcctgtgttgagcggccacctc

SEQ ID NO: 2350405 - DNA, 25 bp, Homo sapien
cagcctgaagttgaggcgctcttca

SEQ ID NO: 2350406 - DNA, 25 bp, Homo sapien
caccggtaaactgcagcgtgaacta

SEQ ID NO: 2350407 - DNA, 25 bp, Homo sapien
caacaaaggctggaactctgtctct

SEQ ID NO: 2350408 - DNA, 25 bp, Homo sapien
taagaatgacgtgctgccaacaaag

SEQ ID NO: 2350409 - DNA, 25 bp, Homo sapien
tgagttcacaacacccacaagtagc

SEQ ID NO: 2350410 - DNA, 25 bp, Homo sapien
ttcacagatgtgagacccgaggctc

SEQ ID NO: 2350411 - DNA, 25 bp, Homo sapien
gagggacaccctaacatgaggcacg

SEQ ID NO: 2350412 - DNA, 25 bp, Homo sapien
catgccatccaagggacgagggtga

SEQ ID NO: 2350413 - DNA, 25 bp, Homo sapien
ccacttgaccctatcacaaagactg

SEQ ID NO: 2350414 - DNA, 25 bp, Homo sapien
taagcaagcaggatcggttgtgctg

SEQ ID NO: 2350415 - DNA, 25 bp, Homo sapien
cttcttaacccctgcactgggtaag

SEQ ID NO: 2350416 - DNA, 25 bp, Homo sapien
atgtcagcagctcagtaagcaagca

SEQ ID NO: 2350417 - DNA, 25 bp, Homo sapien
aggattccgggcagacctgtgcaga

SEQ ID NO: 2350418 - DNA, 25 bp, Homo sapien
attttgagaatgcagtagtagccta

SEQ ID NO: 2350419 - DNA, 25 bp, Homo sapien
gagaatgcagtagtagcctaaaggg

SEQ ID NO: 2350420 - DNA, 25 bp, Homo sapien
cctttgggacaggattccgggcaga

SEQ ID NO: 2350421 - DNA, 25 bp, Homo sapien
cagctgcactgacagccccttcttc

SEQ ID NO: 2350422 - DNA, 25 bp, Homo sapien
agccccttcttccttatcttccagg

SEQ ID NO: 2350423 - DNA, 25 bp, Homo sapien
tcttccttatcttccagggctgccc

SEQ ID NO: 2350424 - DNA, 25 bp, Homo sapien
gtgtgtccctgcagctgcactgaca

SEQ ID NO: 2350425 - DNA, 25 bp, Homo sapien
acatctgctagacgaggggagctgg

SEQ ID NO: 2350426 - DNA, 25 bp, Homo sapien
tgactcagcaccggggacatctgct

SEQ ID NO: 2350427 - DNA, 25 bp, Homo sapien
ctgccagggtcgaaggctaaagagt

SEQ ID NO: 2350428 - DNA, 25 bp, Homo sapien
agctggtaaggaaagccccccacag

SEQ ID NO: 2350429 - DNA, 25 bp, Homo sapien
gaactctatactcagagccactgaa

SEQ ID NO: 2350430 - DNA, 25 bp, Homo sapien
aatgttctaaagtgggtcacggtga

SEQ ID NO: 2350431 - DNA, 25 bp, Homo sapien
gaaagtagagcatggttacctaggg

SEQ ID NO: 2350432 - DNA, 25 bp, Homo sapien
tcacggtgatgggtgcagaactcta

SEQ ID NO: 2350433 - DNA, 25 bp, Homo sapien
aaatctgagtgcacccgagaaacca

SEQ ID NO: 2350434 - DNA, 25 bp, Homo sapien
tacaaaagtagacgttgaaaatctg

SEQ ID NO: 2350435 - DNA, 25 bp, Homo sapien
tagacgttgaaaatctgagtgcacc

SEQ ID NO: 2350436 - DNA, 25 bp, Homo sapien
gtgcacccgagaaaccatgtaagag

SEQ ID NO: 2350437 - DNA, 25 bp, Homo sapien
tcttcaggatctccgggaaagagac

SEQ ID NO: 2350438 - DNA, 25 bp, Homo sapien
taatggtgaaggacgagtacaggcc

SEQ ID NO: 2350439 - DNA, 25 bp, Homo sapien
gaaatactggcagcgtttggcaaca

SEQ ID NO: 2350440 - DNA, 25 bp, Homo sapien
tcttggagcccgatgacaggttcaa

SEQ ID NO: 2350441 - DNA, 25 bp, Homo sapien
cacaagtggctccttattaagcgcc

SEQ ID NO: 2350442 - DNA, 25 bp, Homo sapien
aagcccaagcgcctcccgaaatgta

SEQ ID NO: 2350443 - DNA, 25 bp, Homo sapien
cttggaaatcgctggtgagatctgc

SEQ ID NO: 2350444 - DNA, 25 bp, Homo sapien
gatctgctttgtcggccagtgtgcg

SEQ ID NO: 2350445 - DNA, 25 bp, Homo sapien
tgcacggaggaacaggcattctaac

SEQ ID NO: 2350446 - DNA, 25 bp, Homo sapien
aggaacaggcattctaacccaacag

SEQ ID NO: 2350447 - DNA, 25 bp, Homo sapien
tcctcatatgcacggaggaacaggc

SEQ ID NO: 2350448 - DNA, 25 bp, Homo sapien
agctttcctcatatgcacggaggaa

SEQ ID NO: 2350449 - DNA, 25 bp, Homo sapien
tggaggagtcccacaactcagtctc

SEQ ID NO: 2350450 - DNA, 25 bp, Homo sapien
gcaaaatgccttccgataactgcaa

SEQ ID NO: 2350451 - DNA, 25 bp, Homo sapien
aactcagtctcctgtttatccctca

SEQ ID NO: 2350452 - DNA, 25 bp, Homo sapien
gcaagctccggacatagcctctgga

SEQ ID NO: 2350453 - DNA, 25 bp, Homo sapien
gtgcaaactatgtttcaggtgccac

SEQ ID NO: 2350454 - DNA, 25 bp, Homo sapien
cgagagtgcaaactatgtttcaggt

SEQ ID NO: 2350455 - DNA, 25 bp, Homo sapien
gataaaacaagacataaaccctgca

SEQ ID NO: 2350456 - DNA, 25 bp, Homo sapien
gagtgcaaactatgtttcaggtgcc

SEQ ID NO: 2350457 - DNA, 25 bp, Homo sapien
tctgggttatctccgggacagtgtg

SEQ ID NO: 2350458 - DNA, 25 bp, Homo sapien
ctgctctgggttatctccgggacag

SEQ ID NO: 2350459 - DNA, 25 bp, Homo sapien
ttatctccgggacagtgtgagactt

SEQ ID NO: 2350460 - DNA, 25 bp, Homo sapien
ggttatctccgggacagtgtgagac

SEQ ID NO: 2350461 - DNA, 25 bp, Homo sapien
caaacaaaataggatcccataaagg

SEQ ID NO: 2350462 - DNA, 25 bp, Homo sapien
tttgtatcaactttcgtccgaatgg

SEQ ID NO: 2350463 - DNA, 25 bp, Homo sapien
tatcaactttcgtccgaatggtttg

SEQ ID NO: 2350464 - DNA, 25 bp, Homo sapien
tacaaacaaaataggatcccataaa

SEQ ID NO: 2350465 - DNA, 25 bp, Homo sapien
tggaacagcgtgcttggcccttgca

SEQ ID NO: 2350466 - DNA, 25 bp, Homo sapien
ggactcggagtcagaagcaatccat

SEQ ID NO: 2350467 - DNA, 25 bp, Homo sapien
ctggcaggactcagcggagcaactg

SEQ ID NO: 2350468 - DNA, 25 bp, Homo sapien
gagcaactggactaaggctgctcca

SEQ ID NO: 2350469 - DNA, 25 bp, Homo sapien
aaaactcaccgttacctctgcagga

SEQ ID NO: 2350470 - DNA, 25 bp, Homo sapien
cacgtatgggtgtctggcatgagtc

SEQ ID NO: 2350471 - DNA, 25 bp, Homo sapien
tcacactggcctaaagaataattct

SEQ ID NO: 2350472 - DNA, 25 bp, Homo sapien
catccctcagaagcttaatgttcaa

SEQ ID NO: 2350473 - DNA, 25 bp, Homo sapien
tcaaggaggaaatactgatttctcc

SEQ ID NO: 2350474 - DNA, 25 bp, Homo sapien
cctgcaagattctggtgtgtgaatg

SEQ ID NO: 2350475 - DNA, 25 bp, Homo sapien
taatgaaggtgctcgcctagtatgg

SEQ ID NO: 2350476 - DNA, 25 bp, Homo sapien
tgatttctccatgatagcaagtgac

SEQ ID NO: 2350477 - DNA, 25 bp, Homo sapien
aaacagtaacaccttaatcagtgag

SEQ ID NO: 2350478 - DNA, 25 bp, Homo sapien
ttcaaacagtaacaccttaatcagt

SEQ ID NO: 2350479 - DNA, 25 bp, Homo sapien
taacaccttaatcagtgagtaatga

SEQ ID NO: 2350480 - DNA, 25 bp, Homo sapien
cagtaacaccttaatcagtgagtaa

SEQ ID NO: 2350481 - DNA, 25 bp, Homo sapien
tggatccagccacaaaaagagagcc

SEQ ID NO: 2350482 - DNA, 25 bp, Homo sapien
gaggcactgctgatagtaatctgaa

SEQ ID NO: 2350483 - DNA, 25 bp, Homo sapien
ctgaagtggaggactacttgaaccc

SEQ ID NO: 2350484 - DNA, 25 bp, Homo sapien
catacaacctgtcagccatccggaa

SEQ ID NO: 2350485 - DNA, 25 bp, Homo sapien
tccagactggggattggcactggca

SEQ ID NO: 2350486 - DNA, 25 bp, Homo sapien
gcatgtggccattaagcagtgtggg

SEQ ID NO: 2350487 - DNA, 25 bp, Homo sapien
gagagtttgaagaaagcagtactgg

SEQ ID NO: 2350488 - DNA, 25 bp, Homo sapien
ctctgtccagactggggattggcac

SEQ ID NO: 2350489 - DNA, 25 bp, Homo sapien
ggaaggcacaactggttatagtcta

SEQ ID NO: 2350490 - DNA, 25 bp, Homo sapien
tacattaaatgcgaaggaaggcaca

SEQ ID NO: 2350491 - DNA, 25 bp, Homo sapien
agtccttaattgtggccagacgtca

SEQ ID NO: 2350492 - DNA, 25 bp, Homo sapien
cgacacaggtaaactagcccgtggg

SEQ ID NO: 2350493 - DNA, 25 bp, Homo sapien
tgtaaacagctaaggaggctagcct

SEQ ID NO: 2350494 - DNA, 25 bp, Homo sapien
acaggtggcgggaagcattctcaaa

SEQ ID NO: 2350495 - DNA, 25 bp, Homo sapien
taattacttaacagctaggcatggg

SEQ ID NO: 2350496 - DNA, 25 bp, Homo sapien
tgtgcacctgtcttgagctggaaac

SEQ ID NO: 2350497 - DNA, 25 bp, Homo sapien
taaagtgaagatttgcagtcataga

SEQ ID NO: 2350498 - DNA, 25 bp, Homo sapien
catagcagtttaacactgattaagc

SEQ ID NO: 2350499 - DNA, 25 bp, Homo sapien
cagtcatagaaaagatgtgtacaaa

SEQ ID NO: 2350500 - DNA, 25 bp, Homo sapien
gagaccaacattcaggttatatagt

SEQ ID NO: 2350501 - DNA, 25 bp, Homo sapien
gaaacagattcatgtgtaatggtga

SEQ ID NO: 2350502 - DNA, 25 bp, Homo sapien
ggtgaatattggaccactactgctt

SEQ ID NO: 2350503 - DNA, 25 bp, Homo sapien
aaccttgtagcctaacaaactgctg

SEQ ID NO: 2350504 - DNA, 25 bp, Homo sapien
tctttctaactgacagacatgtatt

SEQ ID NO: 2350505 - DNA, 25 bp, Homo sapien
gcaagtgaatccctgacattttgag

SEQ ID NO: 2350506 - DNA, 25 bp, Homo sapien
taaccgtagaagtctgttcaaacgc

SEQ ID NO: 2350507 - DNA, 25 bp, Homo sapien
gagtagctaagagattgacaagcac

SEQ ID NO: 2350508 - DNA, 25 bp, Homo sapien
gaaacgtctactgcatattactgga

SEQ ID NO: 2350509 - DNA, 25 bp, Homo sapien
cttttgctcgtttaatactttgcca

SEQ ID NO: 2350510 - DNA, 25 bp, Homo sapien
gagtgtttcaagtattactcttcac

SEQ ID NO: 2350511 - DNA, 25 bp, Homo sapien
ctgtcattaaatggtgagtttattc

SEQ ID NO: 2350512 - DNA, 25 bp, Homo sapien
cctggctttgattatggtagtttta

SEQ ID NO: 2350513 - DNA, 25 bp, Homo sapien
gcttggagaggtaagtaaatatctc

SEQ ID NO: 2350514 - DNA, 25 bp, Homo sapien
cattcaaactctgttactccacggt

SEQ ID NO: 2350515 - DNA, 25 bp, Homo sapien
ttttcagtcagaaattggctttgga

SEQ ID NO: 2350516 - DNA, 25 bp, Homo sapien
cctacatcaaattggaaaagcttgg

SEQ ID NO: 2350517 - DNA, 25 bp, Homo sapien
cacatttctttcgttaacagtaact

SEQ ID NO: 2350518 - DNA, 25 bp, Homo sapien
taacagtaactcggtaattcccaca

SEQ ID NO: 2350519 - DNA, 25 bp, Homo sapien
caccaagtctaagggataaaacaca

SEQ ID NO: 2350520 - DNA, 25 bp, Homo sapien
tttgtaagacaaagtgactgagtag

SEQ ID NO: 2350521 - DNA, 25 bp, Homo sapien
ttttttggttgtgtctctgcccagc

SEQ ID NO: 2350522 - DNA, 25 bp, Homo sapien
ctctgcccagctttggtatcagaat

SEQ ID NO: 2350523 - DNA, 25 bp, Homo sapien
gagtgtatgtgttgaggaatgtatc

SEQ ID NO: 2350524 - DNA, 25 bp, Homo sapien
ggagagtgtatgtgttgaggaatgt

SEQ ID NO: 2350525 - DNA, 25 bp, Homo sapien
tacttcaagacgtcataagagacat

SEQ ID NO: 2350526 - DNA, 25 bp, Homo sapien
gagatacgttattaggccatttcat

SEQ ID NO: 2350527 - DNA, 25 bp, Homo sapien
cacagagattctacacctttttggt

SEQ ID NO: 2350528 - DNA, 25 bp, Homo sapien
cagtgcctgatagctgattccaaca

SEQ ID NO: 2350529 - DNA, 25 bp, Homo sapien
ttccttaattgtatagcagataatc

SEQ ID NO: 2350530 - DNA, 25 bp, Homo sapien
taatccaagaacaagtttagcccaa

SEQ ID NO: 2350531 - DNA, 25 bp, Homo sapien
gcccaaggcgaagtaagataattca

SEQ ID NO: 2350532 - DNA, 25 bp, Homo sapien
caagtttagcccaaggcgaagtaag

SEQ ID NO: 2350533 - DNA, 25 bp, Homo sapien
tcttgtaaaactgttccagggaaga

SEQ ID NO: 2350534 - DNA, 25 bp, Homo sapien
gtagtgtttctcatcttgaggccag

SEQ ID NO: 2350535 - DNA, 25 bp, Homo sapien
tactgagcctctgcaatgtgcagag

SEQ ID NO: 2350536 - DNA, 25 bp, Homo sapien
gctgcctgggtatacgtcattatca

SEQ ID NO: 2350537 - DNA, 25 bp, Homo sapien
gcctttccctgttcttggtatcctg

SEQ ID NO: 2350538 - DNA, 25 bp, Homo sapien
ggcagaccagtgttttttgatgtat

SEQ ID NO: 2350539 - DNA, 25 bp, Homo sapien
tggcagaccagtgttttttgatgta

SEQ ID NO: 2350540 - DNA, 25 bp, Homo sapien
acattgatctggtcatgattgcttt

SEQ ID NO: 2350541 - DNA, 25 bp, Homo sapien
tgatctggtcatgattgctttcatc

SEQ ID NO: 2350542 - DNA, 25 bp, Homo sapien
attgatctggtcatgattgctttca

SEQ ID NO: 2350543 - DNA, 25 bp, Homo sapien
cattgatctggtcatgattgctttc

SEQ ID NO: 2350544 - DNA, 25 bp, Homo sapien
ttttaggaggcacggtgcccagaga

SEQ ID NO: 2350545 - DNA, 25 bp, Homo sapien
aattttaggaggcacggtgcccaga

SEQ ID NO: 2350546 - DNA, 25 bp, Homo sapien
tcaaattttaggaggcacggtgccc

SEQ ID NO: 2350547 - DNA, 25 bp, Homo sapien
caaattttaggaggcacggtgccca

SEQ ID NO: 2350548 - DNA, 25 bp, Homo sapien
gtatcgcccttgaaatgttatctat

SEQ ID NO: 2350549 - DNA, 25 bp, Homo sapien
caaggtatcgcccttgaaatgttat

SEQ ID NO: 2350550 - DNA, 25 bp, Homo sapien
ataagggttagttgtatcactcatc

SEQ ID NO: 2350551 - DNA, 25 bp, Homo sapien
tgtatcactcatctctttgaaaagt

SEQ ID NO: 2350552 - DNA, 25 bp, Homo sapien
tggtaaaccatctcataggccagaa

SEQ ID NO: 2350553 - DNA, 25 bp, Homo sapien
tactttcttaactcttgggcagaag

SEQ ID NO: 2350554 - DNA, 25 bp, Homo sapien
taccttgggtagacaaagcttgcct

SEQ ID NO: 2350555 - DNA, 25 bp, Homo sapien
gcgttcgtgtgagaagatcacagca

SEQ ID NO: 2350556 - DNA, 25 bp, Homo sapien
tgagtgtctgcgagctgcttcccag

SEQ ID NO: 2350557 - DNA, 25 bp, Homo sapien
tccggtccagcgaggaccttgggtc

SEQ ID NO: 2350558 - DNA, 25 bp, Homo sapien
aggaggcgccgacagatatagacgc

SEQ ID NO: 2350559 - DNA, 25 bp, Homo sapien
ctccggtgctcgctgccgctttggt

SEQ ID NO: 2350560 - DNA, 25 bp, Homo sapien
cgcgctttcccctggtgtcgggtcg

SEQ ID NO: 2350561 - DNA, 25 bp, Homo sapien
tccccgctcttgctggtgagttggc

SEQ ID NO: 2350562 - DNA, 25 bp, Homo sapien
acttgcatccggtcgccgcgggcgt

SEQ ID NO: 2350563 - DNA, 25 bp, Homo sapien
tgccggccgctgagacccggacttg

SEQ ID NO: 2350564 - DNA, 25 bp, Homo sapien
cggaggcctgcgctcggaagcgcct

SEQ ID NO: 2350565 - DNA, 25 bp, Homo sapien
gaggcctgcgctcggaagcgcctca

SEQ ID NO: 2350566 - DNA, 25 bp, Homo sapien
ggcggcggaggcctgcgctcggaag

SEQ ID NO: 2350567 - DNA, 25 bp, Homo sapien
cggcggaggcctgcgctcggaagcg

SEQ ID NO: 2350568 - DNA, 25 bp, Homo sapien
attagtgggccgtccgcgcggctcg

SEQ ID NO: 2350569 - DNA, 25 bp, Homo sapien
cggccagacagtctcagcccgccgt

SEQ ID NO: 2350570 - DNA, 25 bp, Homo sapien
agggacttggcaacgcgtgagacac

SEQ ID NO: 2350571 - DNA, 25 bp, Homo sapien
tcgtcggcgcgggagccatgttgac

SEQ ID NO: 2350572 - DNA, 25 bp, Homo sapien
ccccgacgcccgcatttcggagcgg

SEQ ID NO: 2350573 - DNA, 25 bp, Homo sapien
taatttctcccccagtcgctgcgga

SEQ ID NO: 2350574 - DNA, 25 bp, Homo sapien
tgcggacaggcactcattccggtgg

SEQ ID NO: 2350575 - DNA, 25 bp, Homo sapien
ccgcatttcggagcgggcagtttcc

SEQ ID NO: 2350576 - DNA, 25 bp, Homo sapien
caaagcgcacttgttctaacggaaa

SEQ ID NO: 2350577 - DNA, 25 bp, Homo sapien
aacaagtgttaaatacgcgtagagc

SEQ ID NO: 2350578 - DNA, 25 bp, Homo sapien
tgttgctaatttacgggtcctggta

SEQ ID NO: 2350579 - DNA, 25 bp, Homo sapien
gaaaagcctgattgacacgtacgat

SEQ ID NO: 2350580 - DNA, 25 bp, Homo sapien
aggttggcacatagacagaagccca

SEQ ID NO: 2350581 - DNA, 25 bp, Homo sapien
tcctgaatctggctagtgataaagc

SEQ ID NO: 2350582 - DNA, 25 bp, Homo sapien
tgaatctggctagtgataaagccca

SEQ ID NO: 2350583 - DNA, 25 bp, Homo sapien
gaatgaggttggcacatagacagaa

SEQ ID NO: 2350584 - DNA, 25 bp, Homo sapien
tgtagtctggtgggacccttctgat

SEQ ID NO: 2350585 - DNA, 25 bp, Homo sapien
ctttggacaactgcgtcttccccat

SEQ ID NO: 2350586 - DNA, 25 bp, Homo sapien
tccccttggattaggaactgtgaag

SEQ ID NO: 2350587 - DNA, 25 bp, Homo sapien
gattagtatgatgcaggccaatcag

SEQ ID NO: 2350588 - DNA, 25 bp, Homo sapien
cccagttacaaatccaatagcagat

SEQ ID NO: 2350589 - DNA, 25 bp, Homo sapien
tcccagttacaaatccaatagcaga

SEQ ID NO: 2350590 - DNA, 25 bp, Homo sapien
tgtccaaacctgtgctaactgccag

SEQ ID NO: 2350591 - DNA, 25 bp, Homo sapien
tccaaacctgtgctaactgccagct

SEQ ID NO: 2350592 - DNA, 25 bp, Homo sapien
caaacctgtgctaactgccagctgc

SEQ ID NO: 2350593 - DNA, 25 bp, Homo sapien
ctgtccaaacctgtgctaactgcca

SEQ ID NO: 2350594 - DNA, 25 bp, Homo sapien
tgagcaccttgattctggctcatgg

SEQ ID NO: 2350595 - DNA, 25 bp, Homo sapien
cttggttcttggagcaccgggatcg

SEQ ID NO: 2350596 - DNA, 25 bp, Homo sapien
ctccaatagtgctccaaggcaaact

SEQ ID NO: 2350597 - DNA, 25 bp, Homo sapien
tcgtctccaatagtgctccaaggca

SEQ ID NO: 2350598 - DNA, 25 bp, Homo sapien
gagcaccgggatcgtctccaatagt

SEQ ID NO: 2350599 - DNA, 25 bp, Homo sapien
gatagaagaaggagttcctgtgtag

SEQ ID NO: 2350600 - DNA, 25 bp, Homo sapien
tcagtcacttgacaagtttccacaa

SEQ ID NO: 2350601 - DNA, 25 bp, Homo sapien
gtttccacaatcattgtgatagaag

SEQ ID NO: 2350602 - DNA, 25 bp, Homo sapien
cccaaacctcagtcacttgacaagt

SEQ ID NO: 2350603 - DNA, 25 bp, Homo sapien
ttgtgctgttttattatgcggtagt

SEQ ID NO: 2350604 - DNA, 25 bp, Homo sapien
cttgtgctgttttattatgcggtag

SEQ ID NO: 2350605 - DNA, 25 bp, Homo sapien
tgtgctgttttattatgcggtagtg

SEQ ID NO: 2350606 - DNA, 25 bp, Homo sapien
gtgctgttttattatgcggtagtga

SEQ ID NO: 2350607 - DNA, 25 bp, Homo sapien
gactgatagcagaacgaagaggatg

SEQ ID NO: 2350608 - DNA, 25 bp, Homo sapien
tgatagcagaacgaagaggatgtga

SEQ ID NO: 2350609 - DNA, 25 bp, Homo sapien
tgttatggtgctggggtttgattct

SEQ ID NO: 2350610 - DNA, 25 bp, Homo sapien
catctgactgatagcagaacgaaga

SEQ ID NO: 2350611 - DNA, 25 bp, Homo sapien
ctgcagaggaaactagtcaggtcag

SEQ ID NO: 2350612 - DNA, 25 bp, Homo sapien
gaggaaactagtcaggtcagagcag

SEQ ID NO: 2350613 - DNA, 25 bp, Homo sapien
ctagtcaggtcagagcagaaaggaa

SEQ ID NO: 2350614 - DNA, 25 bp, Homo sapien
gaaactagtcaggtcagagcagaaa

SEQ ID NO: 2350615 - DNA, 25 bp, Homo sapien
tcctttacaataagcttggagcaag

SEQ ID NO: 2350616 - DNA, 25 bp, Homo sapien
ttttcctttacaataagcttggagc

SEQ ID NO: 2350617 - DNA, 25 bp, Homo sapien
tttcctttacaataagcttggagca

SEQ ID NO: 2350618 - DNA, 25 bp, Homo sapien
ttaatccaactggaggaaattgact

SEQ ID NO: 2350619 - DNA, 25 bp, Homo sapien
ctttatcttgcctatgatgtaaagc

SEQ ID NO: 2350620 - DNA, 25 bp, Homo sapien
tcttgcctatgatgtaaagctgagc

SEQ ID NO: 2350621 - DNA, 25 bp, Homo sapien
tatcttgcctatgatgtaaagctga

SEQ ID NO: 2350622 - DNA, 25 bp, Homo sapien
cttgcctatgatgtaaagctgagct

SEQ ID NO: 2350623 - DNA, 25 bp, Homo sapien
tgtgctgtttagattgacagctgct

SEQ ID NO: 2350624 - DNA, 25 bp, Homo sapien
gtgctgtttagattgacagctgctg

SEQ ID NO: 2350625 - DNA, 25 bp, Homo sapien
ttgtgctgtttagattgacagctgc

SEQ ID NO: 2350626 - DNA, 25 bp, Homo sapien
cttgtgctgtttagattgacagctg

SEQ ID NO: 2350627 - DNA, 25 bp, Homo sapien
aaattgggatgagaaacagttgtat

SEQ ID NO: 2350628 - DNA, 25 bp, Homo sapien
aattgggatgagaaacagttgtatc

SEQ ID NO: 2350629 - DNA, 25 bp, Homo sapien
tgtgtacacgcggttgcctggcgac

SEQ ID NO: 2350630 - DNA, 25 bp, Homo sapien
gcgcgcattccgagaaacacagcgg

SEQ ID NO: 2350631 - DNA, 25 bp, Homo sapien
cccggcccgcctggagtatgtgtac

SEQ ID NO: 2350632 - DNA, 25 bp, Homo sapien
acggtctcgtggcaaccgggcatcc

SEQ ID NO: 2350633 - DNA, 25 bp, Homo sapien
gccaggagcgggtttttcgcgtcca

SEQ ID NO: 2350634 - DNA, 25 bp, Homo sapien
accccgaggtggtagagtcgtctga

SEQ ID NO: 2350635 - DNA, 25 bp, Homo sapien
gcttctcttcctccgtggtggctaa

SEQ ID NO: 2350636 - DNA, 25 bp, Homo sapien
cagcggcccataaaacacggctagg

SEQ ID NO: 2350637 - DNA, 25 bp, Homo sapien
ctgggggcgtatttagtccagatat

SEQ ID NO: 2350638 - DNA, 25 bp, Homo sapien
gggggcgtatttagtccagatatta

SEQ ID NO: 2350639 - DNA, 25 bp, Homo sapien
ggcgtatttagtccagatattaaac

SEQ ID NO: 2350640 - DNA, 25 bp, Homo sapien
gggcgtatttagtccagatattaaa

SEQ ID NO: 2350641 - DNA, 25 bp, Homo sapien
tttcgttgtaatagtctgctggcag

SEQ ID NO: 2350642 - DNA, 25 bp, Homo sapien
tttcatttgacaaaggctatctcca

SEQ ID NO: 2350643 - DNA, 25 bp, Homo sapien
ttcgttgtaatagtctgctggcagc

SEQ ID NO: 2350644 - DNA, 25 bp, Homo sapien
gggtatcagactaaatactgtaata

SEQ ID NO: 2350645 - DNA, 25 bp, Homo sapien
tgttcaggaatgtctcacctctggg

SEQ ID NO: 2350646 - DNA, 25 bp, Homo sapien
aaataggaagggtatcagactaaat

SEQ ID NO: 2350647 - DNA, 25 bp, Homo sapien
gctgttcaggaatgtctcacctctg

SEQ ID NO: 2350648 - DNA, 25 bp, Homo sapien
taccagcttcttatactgaaaagtg

SEQ ID NO: 2350649 - DNA, 25 bp, Homo sapien
tatctaggcctttctatctaaaaca

SEQ ID NO: 2350650 - DNA, 25 bp, Homo sapien
cattcccttcagtgaaaagtagata

SEQ ID NO: 2350651 - DNA, 25 bp, Homo sapien
tctgaatccttagctaccagccatc

SEQ ID NO: 2350652 - DNA, 25 bp, Homo sapien
tttcaaaatgagtcacttgcaaccc

SEQ ID NO: 2350653 - DNA, 25 bp, Homo sapien
aatgagtcacttgcaacccttcctc

SEQ ID NO: 2350654 - DNA, 25 bp, Homo sapien
tcaaaatgagtcacttgcaaccctt

SEQ ID NO: 2350655 - DNA, 25 bp, Homo sapien
aaaatgagtcacttgcaacccttcc

SEQ ID NO: 2350656 - DNA, 25 bp, Homo sapien
tagctttgaattgagttacatccac

SEQ ID NO: 2350657 - DNA, 25 bp, Homo sapien
tccatagcattgtaaaagggccagt

SEQ ID NO: 2350658 - DNA, 25 bp, Homo sapien
catccactttattctcatcaaaatt

SEQ ID NO: 2350659 - DNA, 25 bp, Homo sapien
tcatcaaaattggtattgaactgct

SEQ ID NO: 2350660 - DNA, 25 bp, Homo sapien
gcatgatgagccttaaggaggacaa

SEQ ID NO: 2350661 - DNA, 25 bp, Homo sapien
gagccacttgcatgatgagccttaa

SEQ ID NO: 2350662 - DNA, 25 bp, Homo sapien
tgaagataatccagcaaagatgctc

SEQ ID NO: 2350663 - DNA, 25 bp, Homo sapien
caggttttcatcactgtcgcagacc

SEQ ID NO: 2350664 - DNA, 25 bp, Homo sapien
gttttctgcaaatggtgtaaatata

SEQ ID NO: 2350665 - DNA, 25 bp, Homo sapien
gaagactgacctatgaccatcagtt

SEQ ID NO: 2350666 - DNA, 25 bp, Homo sapien
tggaagactgacctatgaccatcag

SEQ ID NO: 2350667 - DNA, 25 bp, Homo sapien
cttggaagactgacctatgaccatc

SEQ ID NO: 2350668 - DNA, 25 bp, Homo sapien
ctggttagttttggttttcaggatg

SEQ ID NO: 2350669 - DNA, 25 bp, Homo sapien
tccatacacatgctggcccacagga

SEQ ID NO: 2350670 - DNA, 25 bp, Homo sapien
tgacaggagcgggaccaaggactcc

SEQ ID NO: 2350671 - DNA, 25 bp, Homo sapien
ggaccaaggactccatacacatgct

SEQ ID NO: 2350672 - DNA, 25 bp, Homo sapien
aggactccatacacatgctggccca

SEQ ID NO: 2350673 - DNA, 25 bp, Homo sapien
tagagagtagcgcgccatgtcaagt

SEQ ID NO: 2350674 - DNA, 25 bp, Homo sapien
gagagtagcgcgccatgtcaagtac

SEQ ID NO: 2350675 - DNA, 25 bp, Homo sapien
gtgtagagagtagcgcgccatgtca

SEQ ID NO: 2350676 - DNA, 25 bp, Homo sapien
ctgtgtagagagtagcgcgccatgt

SEQ ID NO: 2350677 - DNA, 25 bp, Homo sapien
ggcagtcatagcagcactggcaaac

SEQ ID NO: 2350678 - DNA, 25 bp, Homo sapien
gaatcccggcatggcagtcatagca

SEQ ID NO: 2350679 - DNA, 25 bp, Homo sapien
cgtgaatcccggcatggcagtcata

SEQ ID NO: 2350680 - DNA, 25 bp, Homo sapien
ccggcatggcagtcatagcagcact

SEQ ID NO: 2350681 - DNA, 25 bp, Homo sapien
cttcattgtggcctctcgaaaatat

SEQ ID NO: 2350682 - DNA, 25 bp, Homo sapien
gtggcctctcgaaaatatcttcgcg

SEQ ID NO: 2350683 - DNA, 25 bp, Homo sapien
tatcttcgcgattcttcctgggatt

SEQ ID NO: 2350684 - DNA, 25 bp, Homo sapien
tcaattttagccaaagcacgccgag

SEQ ID NO: 2350685 - DNA, 25 bp, Homo sapien
cttctagattcaaagactcctcttt

SEQ ID NO: 2350686 - DNA, 25 bp, Homo sapien
ctcttttgaagatcatcactgccat

SEQ ID NO: 2350687 - DNA, 25 bp, Homo sapien
tcaatctctacatggaagctcgcag

SEQ ID NO: 2350688 - DNA, 25 bp, Homo sapien
ccatctagaacagtcagggagagct

SEQ ID NO: 2350689 - DNA, 25 bp, Homo sapien
cttcaaaacgatatagaactgggcc

SEQ ID NO: 2350690 - DNA, 25 bp, Homo sapien
aagctcgcagaagagggtgtatatc

SEQ ID NO: 2350691 - DNA, 25 bp, Homo sapien
tcaaacatctcatccagtagccgct

SEQ ID NO: 2350692 - DNA, 25 bp, Homo sapien
gcagtattcgcctatttgaatcaga

SEQ ID NO: 2350693 - DNA, 25 bp, Homo sapien
gaaactgggatgcagtgctatcaaa

SEQ ID NO: 2350694 - DNA, 25 bp, Homo sapien
ttcatctgtaacaatgggtccagtt

SEQ ID NO: 2350695 - DNA, 25 bp, Homo sapien
cactcctcataggtaaaagctaatt

SEQ ID NO: 2350696 - DNA, 25 bp, Homo sapien
aaactccactcctcataggtaaaag

SEQ ID NO: 2350697 - DNA, 25 bp, Homo sapien
ctatcataagttccagaagagatgt

SEQ ID NO: 2350698 - DNA, 25 bp, Homo sapien
cttcctatcataagttccagaagag

SEQ ID NO: 2350699 - DNA, 25 bp, Homo sapien
tgtttctcttcacgttgattagtgg

SEQ ID NO: 2350700 - DNA, 25 bp, Homo sapien
tgcaatcagaagagttaaatccttc

SEQ ID NO: 2350701 - DNA, 25 bp, Homo sapien
gattagtggttccattgcaatcaga

SEQ ID NO: 2350702 - DNA, 25 bp, Homo sapien
cacgttgattagtggttccattgca

SEQ ID NO: 2350703 - DNA, 25 bp, Homo sapien
tttaaataaatttgagttgactgtc

SEQ ID NO: 2350704 - DNA, 25 bp, Homo sapien
ataaatttgagttgactgtccttct

SEQ ID NO: 2350705 - DNA, 25 bp, Homo sapien
gagttgactgtccttctttatagtt

SEQ ID NO: 2350706 - DNA, 25 bp, Homo sapien
tgagttgactgtccttctttatagt

SEQ ID NO: 2350707 - DNA, 25 bp, Homo sapien
gacacagacatacaaggttgctgcc

SEQ ID NO: 2350708 - DNA, 25 bp, Homo sapien
catacaaggttgctgccaaatggaa

SEQ ID NO: 2350709 - DNA, 25 bp, Homo sapien
gacatacaaggttgctgccaaatgg

SEQ ID NO: 2350710 - DNA, 25 bp, Homo sapien
atatcctctgaatatccacaagtct

SEQ ID NO: 2350711 - DNA, 25 bp, Homo sapien
tttgcaaaagaaaattattattcat

SEQ ID NO: 2350712 - DNA, 25 bp, Homo sapien
tgcaaaagaaaattattattcatta

SEQ ID NO: 2350713 - DNA, 25 bp, Homo sapien
gcaaaagaaaattattattcattat

SEQ ID NO: 2350714 - DNA, 25 bp, Homo sapien
tgcctttgcaaaagaaaattattat

SEQ ID NO: 2350715 - DNA, 25 bp, Homo sapien
ggtgaattttgcatagtcatttctg

SEQ ID NO: 2350716 - DNA, 25 bp, Homo sapien
gagccgctgaattcctaatttgcat

SEQ ID NO: 2350717 - DNA, 25 bp, Homo sapien
gccataggaacattatcgtgtccac

SEQ ID NO: 2350718 - DNA, 25 bp, Homo sapien
tttctggatatattgagccgctgaa

SEQ ID NO: 2350719 - DNA, 25 bp, Homo sapien
ggggattgcagtgggccaggatcgt

SEQ ID NO: 2350720 - DNA, 25 bp, Homo sapien
caggatcgtgcctctgcactccagc

SEQ ID NO: 2350721 - DNA, 25 bp, Homo sapien
ggaggtggggattgcagtgggccag

SEQ ID NO: 2350722 - DNA, 25 bp, Homo sapien
aggatcgtgcctctgcactccagcc

SEQ ID NO: 2350723 - DNA, 25 bp, Homo sapien
ttatctgccacagaagataaatcca

SEQ ID NO: 2350724 - DNA, 25 bp, Homo sapien
tttatctgccacagaagataaatcc

SEQ ID NO: 2350725 - DNA, 25 bp, Homo sapien
catttatctgccacagaagataaat

SEQ ID NO: 2350726 - DNA, 25 bp, Homo sapien
tcatttatctgccacagaagataaa

SEQ ID NO: 2350727 - DNA, 25 bp, Homo sapien
ctgggcttcctaaagattccaatat

SEQ ID NO: 2350728 - DNA, 25 bp, Homo sapien
tctgccactaccacaatgtcaatgt

SEQ ID NO: 2350729 - DNA, 25 bp, Homo sapien
tcacttaaccgtaatgtgacttctg

SEQ ID NO: 2350730 - DNA, 25 bp, Homo sapien
ctaccacaatgtcaatgtcttccat

SEQ ID NO: 2350731 - DNA, 25 bp, Homo sapien
tgtgatcccttttggagctccaggg

SEQ ID NO: 2350732 - DNA, 25 bp, Homo sapien
gaagaatttctgtgatcccttttgg

SEQ ID NO: 2350733 - DNA, 25 bp, Homo sapien
cagggaatttgttagtcccttctct

SEQ ID NO: 2350734 - DNA, 25 bp, Homo sapien
atattggaagaatttctgtgatccc

SEQ ID NO: 2350735 - DNA, 25 bp, Homo sapien
tagtctatctaacactaacaatgtt

SEQ ID NO: 2350736 - DNA, 25 bp, Homo sapien
ggtttgcataattctgattgtacta

SEQ ID NO: 2350737 - DNA, 25 bp, Homo sapien
ttatctgtgactaaatgtggagtgc

SEQ ID NO: 2350738 - DNA, 25 bp, Homo sapien
tgtggagtgctatcaatatgggtga

SEQ ID NO: 2350739 - DNA, 25 bp, Homo sapien
caaatttattccaccgattgctctg

SEQ ID NO: 2350740 - DNA, 25 bp, Homo sapien
caattactgatgatccatttggcaa

SEQ ID NO: 2350741 - DNA, 25 bp, Homo sapien
tggcaaagaggttaacatgcaattc

SEQ ID NO: 2350742 - DNA, 25 bp, Homo sapien
cttggcatagcagtggtcaattact

SEQ ID NO: 2350743 - DNA, 25 bp, Homo sapien
cacaagtcatgctttacttacctac

SEQ ID NO: 2350744 - DNA, 25 bp, Homo sapien
acaaattcaaagactcctcattctc

SEQ ID NO: 2350745 - DNA, 25 bp, Homo sapien
gaaatatatttctggcctatgagag

SEQ ID NO: 2350746 - DNA, 25 bp, Homo sapien
gagaggtaagccaacacaagtcatg

SEQ ID NO: 2350747 - DNA, 25 bp, Homo sapien
ttgaggcaagtggtttgtaagtatc

SEQ ID NO: 2350748 - DNA, 25 bp, Homo sapien
gcaagtggtttgtaagtatctccat

SEQ ID NO: 2350749 - DNA, 25 bp, Homo sapien
ctatttgaggcaagtggtttgtaag

SEQ ID NO: 2350750 - DNA, 25 bp, Homo sapien
aactatttgaggcaagtggtttgta

SEQ ID NO: 2350751 - DNA, 25 bp, Homo sapien
tgagcttgaattagttcaagatgca

SEQ ID NO: 2350752 - DNA, 25 bp, Homo sapien
tccagaagcacaacagctattcgat

SEQ ID NO: 2350753 - DNA, 25 bp, Homo sapien
cacaacagctattcgatgctgagct

SEQ ID NO: 2350754 - DNA, 25 bp, Homo sapien
tcgatgctgagcttgaattagttca

SEQ ID NO: 2350755 - DNA, 25 bp, Homo sapien
ggttacttgctttagtgactactac

SEQ ID NO: 2350756 - DNA, 25 bp, Homo sapien
ttattgatattaattagggaagtag

SEQ ID NO: 2350757 - DNA, 25 bp, Homo sapien
taaattgattctgtactggagtctg

SEQ ID NO: 2350758 - DNA, 25 bp, Homo sapien
ctggcttaaaattgattcagaatgg

SEQ ID NO: 2350759 - DNA, 25 bp, Homo sapien
gctagaattctcagtataaatattt

SEQ ID NO: 2350760 - DNA, 25 bp, Homo sapien
ggctagaattctcagtataaatatt

SEQ ID NO: 2350761 - DNA, 25 bp, Homo sapien
ttttgtatatgctgatagattcttt

SEQ ID NO: 2350762 - DNA, 25 bp, Homo sapien
gtatatgctgatagattcttttgca

SEQ ID NO: 2350763 - DNA, 25 bp, Homo sapien
ttgctaacagttggagtctgcaaaa

SEQ ID NO: 2350764 - DNA, 25 bp, Homo sapien
gacccttggtagaaatatctttgct

SEQ ID NO: 2350765 - DNA, 25 bp, Homo sapien
cggacccttggtagaaatatctttg

SEQ ID NO: 2350766 - DNA, 25 bp, Homo sapien
aaatatctttgctaacagttggagt

SEQ ID NO: 2350767 - DNA, 25 bp, Homo sapien
gaagttgcatctttctcgaatatta

SEQ ID NO: 2350768 - DNA, 25 bp, Homo sapien
aagatgtagaagttgcatctttctc

SEQ ID NO: 2350769 - DNA, 25 bp, Homo sapien
aattgctttggataatgtattcttc

SEQ ID NO: 2350770 - DNA, 25 bp, Homo sapien
catctttctcgaatattaaaagagc

SEQ ID NO: 2350771 - DNA, 25 bp, Homo sapien
ggtaaagtgtcactccaattctata

SEQ ID NO: 2350772 - DNA, 25 bp, Homo sapien
cccctggtcaggatgaattatatat

SEQ ID NO: 2350773 - DNA, 25 bp, Homo sapien
cagaattcagaactggaggtacgaa

SEQ ID NO: 2350774 - DNA, 25 bp, Homo sapien
tgcatgaagttctgataaaaagaga

SEQ ID NO: 2350775 - DNA, 25 bp, Homo sapien
gccttggtagttcctgattcagtga

SEQ ID NO: 2350776 - DNA, 25 bp, Homo sapien
tgaaccaattgaacactagcacctt

SEQ ID NO: 2350777 - DNA, 25 bp, Homo sapien
cacatcaatgaatccaactgaggta

SEQ ID NO: 2350778 - DNA, 25 bp, Homo sapien
tctgacttaattcttgcatcttctt

SEQ ID NO: 2350779 - DNA, 25 bp, Homo sapien
aaaaggagataaaacgctattatat

SEQ ID NO: 2350780 - DNA, 25 bp, Homo sapien
aatgtatcttcattcgcatcacagg

SEQ ID NO: 2350781 - DNA, 25 bp, Homo sapien
gataaaacgctattatattttgaac

SEQ ID NO: 2350782 - DNA, 25 bp, Homo sapien
ggagataaaacgctattatattttg

SEQ ID NO: 2350783 - DNA, 25 bp, Homo sapien
ggagcaggtttgagtgtcacagaac

SEQ ID NO: 2350784 - DNA, 25 bp, Homo sapien
tcagcttcaatcctctgaattaagg

SEQ ID NO: 2350785 - DNA, 25 bp, Homo sapien
caatgagttcgagacagcaggatag

SEQ ID NO: 2350786 - DNA, 25 bp, Homo sapien
tatagggcattttgttcagcttcaa

SEQ ID NO: 2350787 - DNA, 25 bp, Homo sapien
aacccaaaatgcagtaccaggagac

SEQ ID NO: 2350788 - DNA, 25 bp, Homo sapien
ttccttctgctttgcaacccaaaat

SEQ ID NO: 2350789 - DNA, 25 bp, Homo sapien
caacccaaaatgcagtaccaggaga

SEQ ID NO: 2350790 - DNA, 25 bp, Homo sapien
ccttctgctttgcaacccaaaatgc

SEQ ID NO: 2350791 - DNA, 25 bp, Homo sapien
cgcttctcctgaatttgggagatga

SEQ ID NO: 2350792 - DNA, 25 bp, Homo sapien
ttgggagatgattattgtttagccg

SEQ ID NO: 2350793 - DNA, 25 bp, Homo sapien
atttgggagatgattattgtttagc

SEQ ID NO: 2350794 - DNA, 25 bp, Homo sapien
ggagatgattattgtttagccgtac

SEQ ID NO: 2350795 - DNA, 25 bp, Homo sapien
aaggcttcagtaagatttcctgatg

SEQ ID NO: 2350796 - DNA, 25 bp, Homo sapien
tatcattaaaggcttcagtaagatt

SEQ ID NO: 2350797 - DNA, 25 bp, Homo sapien
tcattaaaggcttcagtaagatttc

SEQ ID NO: 2350798 - DNA, 25 bp, Homo sapien
cagtaagatttcctgatgtttaatt

SEQ ID NO: 2350799 - DNA, 25 bp, Homo sapien
ggtttagttgtctccccaatagcac

SEQ ID NO: 2350800 - DNA, 25 bp, Homo sapien
ctttccgttgttagaataggcagca

SEQ ID NO: 2350801 - DNA, 25 bp, Homo sapien
caaaaacacttttaccgtcagctgg

SEQ ID NO: 2350802 - DNA, 25 bp, Homo sapien
caggaacatccgagcagtaatagta

SEQ ID NO: 2350803 - DNA, 25 bp, Homo sapien
ctttcttagccaattcatagttacc

SEQ ID NO: 2350804 - DNA, 25 bp, Homo sapien
cagattgttcatcctgaagtggcga

SEQ ID NO: 2350805 - DNA, 25 bp, Homo sapien
tcatagttaccaacttgataggcaa

SEQ ID NO: 2350806 - DNA, 25 bp, Homo sapien
cctgaagtggcgaagcaacaaaata

SEQ ID NO: 2350807 - DNA, 25 bp, Homo sapien
tacaagaggattgaagaagtctctg

SEQ ID NO: 2350808 - DNA, 25 bp, Homo sapien
aaaaggtacaagaggattgaagaag

SEQ ID NO: 2350809 - DNA, 25 bp, Homo sapien
agaaaaaggtacaagaggattgaag

SEQ ID NO: 2350810 - DNA, 25 bp, Homo sapien
ggtacaagaggattgaagaagtctc

SEQ ID NO: 2350811 - DNA, 25 bp, Homo sapien
aattttgatgtcacttgttacaaaa

SEQ ID NO: 2350812 - DNA, 25 bp, Homo sapien
ttaattttgatgtcacttgttacaa

SEQ ID NO: 2350813 - DNA, 25 bp, Homo sapien
tgagatgggaaaatctcattgcctt

SEQ ID NO: 2350814 - DNA, 25 bp, Homo sapien
ttgagatgggaaaatctcattgcct

SEQ ID NO: 2350815 - DNA, 25 bp, Homo sapien
caacaggtaccaaaacaatattgtg

SEQ ID NO: 2350816 - DNA, 25 bp, Homo sapien
agcttgaagggcatagctggaatca

SEQ ID NO: 2350817 - DNA, 25 bp, Homo sapien
taaattatgggagcaagaagtccat

SEQ ID NO: 2350818 - DNA, 25 bp, Homo sapien
taggaagttgctaagttccaatgcc

SEQ ID NO: 2350819 - DNA, 25 bp, Homo sapien
tcatgatgctgacaatgacagtgac

SEQ ID NO: 2350820 - DNA, 25 bp, Homo sapien
atcatgatgctgacaatgacagtga

SEQ ID NO: 2350821 - DNA, 25 bp, Homo sapien
cagtgacaatgacggcgataacttt

SEQ ID NO: 2350822 - DNA, 25 bp, Homo sapien
gatcatgatgctgacaatgacagtg

SEQ ID NO: 2350823 - DNA, 25 bp, Homo sapien
ctaaaaatgtttggactttgtgtga

SEQ ID NO: 2350824 - DNA, 25 bp, Homo sapien
aatgtttggactttgtgtgagttca

SEQ ID NO: 2350825 - DNA, 25 bp, Homo sapien
atgtttggactttgtgtgagttcac

SEQ ID NO: 2350826 - DNA, 25 bp, Homo sapien
aaaatgtttggactttgtgtgagtt

SEQ ID NO: 2350827 - DNA, 25 bp, Homo sapien
cgcagtatgtttcttcgagcagaca

SEQ ID NO: 2350828 - DNA, 25 bp, Homo sapien
tccttgcaaaaccactatacacttt

SEQ ID NO: 2350829 - DNA, 25 bp, Homo sapien
tcgagcagacaatacttggtagtcc

SEQ ID NO: 2350830 - DNA, 25 bp, Homo sapien
tttcaaagctcgcagtatgtttctt

SEQ ID NO: 2350831 - DNA, 25 bp, Homo sapien
tagaaaatacaacaagctatcatgt

SEQ ID NO: 2350832 - DNA, 25 bp, Homo sapien
agaaaatacaacaagctatcatgtg

SEQ ID NO: 2350833 - DNA, 25 bp, Homo sapien
aaatacaacaagctatcatgtgttg

SEQ ID NO: 2350834 - DNA, 25 bp, Homo sapien
gaaaatacaacaagctatcatgtgt

SEQ ID NO: 2350835 - DNA, 25 bp, Homo sapien
ttgataccttctaagccccactgtc

SEQ ID NO: 2350836 - DNA, 25 bp, Homo sapien
agctgtttggtttcttgataccttc

SEQ ID NO: 2350837 - DNA, 25 bp, Homo sapien
aatggctgggttaagatacttaaag

SEQ ID NO: 2350838 - DNA, 25 bp, Homo sapien
tgggttaagatacttaaagtctgcc

SEQ ID NO: 2350839 - DNA, 25 bp, Homo sapien
cagatctctggtcaaactgcaaagg

SEQ ID NO: 2350840 - DNA, 25 bp, Homo sapien
ttccagatctctggtcaaactgcaa

SEQ ID NO: 2350841 - DNA, 25 bp, Homo sapien
tccagatctctggtcaaactgcaaa

SEQ ID NO: 2350842 - DNA, 25 bp, Homo sapien
ccagatctctggtcaaactgcaaag

SEQ ID NO: 2350843 - DNA, 25 bp, Homo sapien
tcttgagttcttgtttgattgctct

SEQ ID NO: 2350844 - DNA, 25 bp, Homo sapien
agtgagtttttaatcttgagttctt

SEQ ID NO: 2350845 - DNA, 25 bp, Homo sapien
ttttaatcttgagttcttgtttgat

SEQ ID NO: 2350846 - DNA, 25 bp, Homo sapien
tgtttgattgctctgtggtctcaga

SEQ ID NO: 2350847 - DNA, 25 bp, Homo sapien
tcatattccctccatgaacgaagaa

SEQ ID NO: 2350848 - DNA, 25 bp, Homo sapien
gtcatattccctccatgaacgaaga

SEQ ID NO: 2350849 - DNA, 25 bp, Homo sapien
catattccctccatgaacgaagaat

SEQ ID NO: 2350850 - DNA, 25 bp, Homo sapien
tgttcattactaccatcaaacagag

SEQ ID NO: 2350851 - DNA, 25 bp, Homo sapien
catcaaacagagacttgcatcctgg

SEQ ID NO: 2350852 - DNA, 25 bp, Homo sapien
acttgcatcctggtgtgatgtccaa

SEQ ID NO: 2350853 - DNA, 25 bp, Homo sapien
tgcatcctggtgtgatgtccaacat

SEQ ID NO: 2350854 - DNA, 25 bp, Homo sapien
tggcttcttagtctttaaagacttc

SEQ ID NO: 2350855 - DNA, 25 bp, Homo sapien
ctgtggcttcttagtctttaaagac

SEQ ID NO: 2350856 - DNA, 25 bp, Homo sapien
tgtggcttcttagtctttaaagact

SEQ ID NO: 2350857 - DNA, 25 bp, Homo sapien
tgtgtctccaacaaggccagctgtt

SEQ ID NO: 2350858 - DNA, 25 bp, Homo sapien
tgagtaggtgtgtctccaacaaggc

SEQ ID NO: 2350859 - DNA, 25 bp, Homo sapien
taggtgtgtctccaacaaggccagc

SEQ ID NO: 2350860 - DNA, 25 bp, Homo sapien
tgtcagtttgagtaggtgtgtctcc

SEQ ID NO: 2350861 - DNA, 25 bp, Homo sapien
ctgtttagtaacgcaaaatacaaat

SEQ ID NO: 2350862 - DNA, 25 bp, Homo sapien
taaagaaatatagggtcctctcctc

SEQ ID NO: 2350863 - DNA, 25 bp, Homo sapien
gataaagaaatatagggtcctctcc

SEQ ID NO: 2350864 - DNA, 25 bp, Homo sapien
ggataaagaaatatagggtcctctc

SEQ ID NO: 2350865 - DNA, 25 bp, Homo sapien
acaggataaagaaatatagggtcct

SEQ ID NO: 2350866 - DNA, 25 bp, Homo sapien
tcacggcacctttgaccgaccaatt

SEQ ID NO: 2350867 - DNA, 25 bp, Homo sapien
tttcacggcacctttgaccgaccaa

SEQ ID NO: 2350868 - DNA, 25 bp, Homo sapien
gcacctttgaccgaccaattcaaaa

SEQ ID NO: 2350869 - DNA, 25 bp, Homo sapien
cttctttcacggcacctttgaccga

SEQ ID NO: 2350870 - DNA, 25 bp, Homo sapien
catgcattttagcataacttgtgta

SEQ ID NO: 2350871 - DNA, 25 bp, Homo sapien
caggagttgttacctctaccataag

SEQ ID NO: 2350872 - DNA, 25 bp, Homo sapien
gttacctctaccataagatgaaatt

SEQ ID NO: 2350873 - DNA, 25 bp, Homo sapien
taacttgtgtaaagaattccagaaa

SEQ ID NO: 2350874 - DNA, 25 bp, Homo sapien
gaatcacccagttagttgacattcg

SEQ ID NO: 2350875 - DNA, 25 bp, Homo sapien
gggtaagcctggatagctagttcca

SEQ ID NO: 2350876 - DNA, 25 bp, Homo sapien
ggtcccttcgctccagttttgatga

SEQ ID NO: 2350877 - DNA, 25 bp, Homo sapien
gatcaatgaccataagggacttggg

SEQ ID NO: 2350878 - DNA, 25 bp, Homo sapien
gcttttttattcaaagcactatcct

SEQ ID NO: 2350879 - DNA, 25 bp, Homo sapien
aagcactatccttatatttcacttt

SEQ ID NO: 2350880 - DNA, 25 bp, Homo sapien
caccatttcagaaatagccggattt

SEQ ID NO: 2350881 - DNA, 25 bp, Homo sapien
ccatttcagaaatagccggattttt

SEQ ID NO: 2350882 - DNA, 25 bp, Homo sapien
ccaccatttcagaaatagccggatt

SEQ ID NO: 2350883 - DNA, 25 bp, Homo sapien
catttcagaaatagccggattttta

SEQ ID NO: 2350884 - DNA, 25 bp, Homo sapien
aatccatcaggtatcgttgtgctgc

SEQ ID NO: 2350885 - DNA, 25 bp, Homo sapien
tgctttcctaacactggttctccta

SEQ ID NO: 2350886 - DNA, 25 bp, Homo sapien
tcttcaagtgatagacgatggaacc

SEQ ID NO: 2350887 - DNA, 25 bp, Homo sapien
gattcaagtaatccatcaggtatcg

SEQ ID NO: 2350888 - DNA, 25 bp, Homo sapien
tgtgatgtgccaaatttcatcttcg

SEQ ID NO: 2350889 - DNA, 25 bp, Homo sapien
tcttcgtacactcccatagcttttg

SEQ ID NO: 2350890 - DNA, 25 bp, Homo sapien
agatacaggttcatctgagctctcc

SEQ ID NO: 2350891 - DNA, 25 bp, Homo sapien
ccaggttaaagtgtgcacctgctag

SEQ ID NO: 2350892 - DNA, 25 bp, Homo sapien
tagccaaagacactcagtaagtgct

SEQ ID NO: 2350893 - DNA, 25 bp, Homo sapien
tttacatacagtcccaccaaccgtg

SEQ ID NO: 2350894 - DNA, 25 bp, Homo sapien
acatacagtcccaccaaccgtgtaa

SEQ ID NO: 2350895 - DNA, 25 bp, Homo sapien
acttagccaaagacactcagtaagt

SEQ ID NO: 2350896 - DNA, 25 bp, Homo sapien
agtgaaaacatgttaggatcacatg

SEQ ID NO: 2350897 - DNA, 25 bp, Homo sapien
catgttaggatcacatgatcggaaa

SEQ ID NO: 2350898 - DNA, 25 bp, Homo sapien
aaaacatgttaggatcacatgatcg

SEQ ID NO: 2350899 - DNA, 25 bp, Homo sapien
gttggtaatactgttcctgaattat

SEQ ID NO: 2350900 - DNA, 25 bp, Homo sapien
attaataaatgtagaaaattcttca

SEQ ID NO: 2350901 - DNA, 25 bp, Homo sapien
tatggaattaataaatgtagaaaat

SEQ ID NO: 2350902 - DNA, 25 bp, Homo sapien
tggaattaataaatgtagaaaattc

SEQ ID NO: 2350903 - DNA, 25 bp, Homo sapien
aataaatgtagaaaattcttcagca

SEQ ID NO: 2350904 - DNA, 25 bp, Homo sapien
tctttagcactagaacctgattgag

SEQ ID NO: 2350905 - DNA, 25 bp, Homo sapien
gctcctcggtccttttctttagcac

SEQ ID NO: 2350906 - DNA, 25 bp, Homo sapien
tgatccattacacacaaatttgctc

SEQ ID NO: 2350907 - DNA, 25 bp, Homo sapien
gattgagagtctgagtcataaactg

SEQ ID NO: 2350908 - DNA, 25 bp, Homo sapien
agcagagtccaatagccaccacgat

SEQ ID NO: 2350909 - DNA, 25 bp, Homo sapien
aatagccaccacgatgagcaagaac

SEQ ID NO: 2350910 - DNA, 25 bp, Homo sapien
tctgaagcagagtccaatagccacc

SEQ ID NO: 2350911 - DNA, 25 bp, Homo sapien
agtccaatagccaccacgatgagca

SEQ ID NO: 2350912 - DNA, 25 bp, Homo sapien
tgttttatcaagatccactgcctgt

SEQ ID NO: 2350913 - DNA, 25 bp, Homo sapien
tagaatggtaaaacagaggtgcaga

SEQ ID NO: 2350914 - DNA, 25 bp, Homo sapien
aagtatttgtagttcctgagtaaag

SEQ ID NO: 2350915 - DNA, 25 bp, Homo sapien
ccatcttggctaataggaaatgttt

SEQ ID NO: 2350916 - DNA, 25 bp, Homo sapien
taatattcccataacagcttggaac

SEQ ID NO: 2350917 - DNA, 25 bp, Homo sapien
ggcaagagatactagtgtttcccat

SEQ ID NO: 2350918 - DNA, 25 bp, Homo sapien
ggtaagactagaaccaccgttgtca

SEQ ID NO: 2350919 - DNA, 25 bp, Homo sapien
taatacaaagtcgtggatccatttc

SEQ ID NO: 2350920 - DNA, 25 bp, Homo sapien
tattcagcctcataccttgcacaag

SEQ ID NO: 2350921 - DNA, 25 bp, Homo sapien
tggtgtcacttgttctgtatacctc

SEQ ID NO: 2350922 - DNA, 25 bp, Homo sapien
caaggttgttgggtaatatctgggc

SEQ ID NO: 2350923 - DNA, 25 bp, Homo sapien
caccagaagtggtgtcacttgttct

SEQ ID NO: 2350924 - DNA, 25 bp, Homo sapien
ggttgaagaattaatcttaagctgc

SEQ ID NO: 2350925 - DNA, 25 bp, Homo sapien
gaattaatcttaagctgcttcccaa

SEQ ID NO: 2350926 - DNA, 25 bp, Homo sapien
cttgttgcttcaatggttgaagaat

SEQ ID NO: 2350927 - DNA, 25 bp, Homo sapien
gaagaattaatcttaagctgcttcc

SEQ ID NO: 2350928 - DNA, 25 bp, Homo sapien
atgtattctcatccttcaattccca

SEQ ID NO: 2350929 - DNA, 25 bp, Homo sapien
tactggtcatgtatctttttttatt

SEQ ID NO: 2350930 - DNA, 25 bp, Homo sapien
tccatgtattctcatccttcaattc

SEQ ID NO: 2350931 - DNA, 25 bp, Homo sapien
actggtcatgtatctttttttatta

SEQ ID NO: 2350932 - DNA, 25 bp, Homo sapien
cctgtctgctctgccctgtccccac

SEQ ID NO: 2350933 - DNA, 25 bp, Homo sapien
gtctgctctgccctgtccccaccat

SEQ ID NO: 2350934 - DNA, 25 bp, Homo sapien
agtttcagtctcctgtctgctctgc

SEQ ID NO: 2350935 - DNA, 25 bp, Homo sapien
cagtttcagtctcctgtctgctctg

SEQ ID NO: 2350936 - DNA, 25 bp, Homo sapien
cggattgatctgttatggtatttgg

SEQ ID NO: 2350937 - DNA, 25 bp, Homo sapien
tgtctctctaaaacacctcaaggtg

SEQ ID NO: 2350938 - DNA, 25 bp, Homo sapien
acgggcacgcagacaagcgctttgg

SEQ ID NO: 2350939 - DNA, 25 bp, Homo sapien
ataatgaaagcaactttctgctgtg

SEQ ID NO: 2350940 - DNA, 25 bp, Homo sapien
ccagaagtacattttgaatcattta

SEQ ID NO: 2350941 - DNA, 25 bp, Homo sapien
acattttgaatcatttatttctcct

SEQ ID NO: 2350942 - DNA, 25 bp, Homo sapien
ctttccagaagtacattttgaatca

SEQ ID NO: 2350943 - DNA, 25 bp, Homo sapien
aagtacattttgaatcatttatttc

SEQ ID NO: 2350944 - DNA, 25 bp, Homo sapien
gggtattgacatatgcatctcctct

SEQ ID NO: 2350945 - DNA, 25 bp, Homo sapien
gaagaaattacaagtccaagttgtg

SEQ ID NO: 2350946 - DNA, 25 bp, Homo sapien
taaaaactctgaagtgctcctgaga

SEQ ID NO: 2350947 - DNA, 25 bp, Homo sapien
tacaagtccaagttgtgaatatgga

SEQ ID NO: 2350948 - DNA, 25 bp, Homo sapien
aagtgaatgcaacgcctgaacttta

SEQ ID NO: 2350949 - DNA, 25 bp, Homo sapien
cttccaagtgaatgcaacgcctgaa

SEQ ID NO: 2350950 - DNA, 25 bp, Homo sapien
cttttctgcgaagatgagaagactt

SEQ ID NO: 2350951 - DNA, 25 bp, Homo sapien
tctgcgaagatgagaagacttccaa

SEQ ID NO: 2350952 - DNA, 25 bp, Homo sapien
ccaaattctttccacgtgtgtagca

SEQ ID NO: 2350953 - DNA, 25 bp, Homo sapien
gaggtgaatgactgttggtgacatt

SEQ ID NO: 2350954 - DNA, 25 bp, Homo sapien
tgtgtagcacgtctggttttctgaa

SEQ ID NO: 2350955 - DNA, 25 bp, Homo sapien
ctgaatatgtcatcaagagcttgac

SEQ ID NO: 2350956 - DNA, 25 bp, Homo sapien
cagatgccaactcttgacagaaact

SEQ ID NO: 2350957 - DNA, 25 bp, Homo sapien
agatgccaactcttgacagaaactc

SEQ ID NO: 2350958 - DNA, 25 bp, Homo sapien
ccagatgccaactcttgacagaaac

SEQ ID NO: 2350959 - DNA, 25 bp, Homo sapien
ttcaacattcaatgacttaataaat

SEQ ID NO: 2350960 - DNA, 25 bp, Homo sapien
ctgaaagagtaacgcagacaaaatg

SEQ ID NO: 2350961 - DNA, 25 bp, Homo sapien
cttttcaacattcaatgacttaata

SEQ ID NO: 2350962 - DNA, 25 bp, Homo sapien
aagagtaacgcagacaaaatgcaac

SEQ ID NO: 2350963 - DNA, 25 bp, Homo sapien
catattgagcatagcaacgttcagc

SEQ ID NO: 2350964 - DNA, 25 bp, Homo sapien
tttgcctaacaaagtgcagttcacg

SEQ ID NO: 2350965 - DNA, 25 bp, Homo sapien
tatctgagaagagttcaatgcctgg

SEQ ID NO: 2350966 - DNA, 25 bp, Homo sapien
gtggaagtgttgttctaagcaaacc

SEQ ID NO: 2350967 - DNA, 25 bp, Homo sapien
tattgatacaatgcaaggagaggca

SEQ ID NO: 2350968 - DNA, 25 bp, Homo sapien
caaaatattgatacaatgcaaggag

SEQ ID NO: 2350969 - DNA, 25 bp, Homo sapien
cttgttatgtcttgacaaattccag

SEQ ID NO: 2350970 - DNA, 25 bp, Homo sapien
ggattcttgcttctagatttcttgt

SEQ ID NO: 2350971 - DNA, 25 bp, Homo sapien
ttttccatagaaaatttgggatatc

SEQ ID NO: 2350972 - DNA, 25 bp, Homo sapien
atctcaaatctataaggacttctat

SEQ ID NO: 2350973 - DNA, 25 bp, Homo sapien
tgggatatctcataaaaggcttcag

SEQ ID NO: 2350974 - DNA, 25 bp, Homo sapien
gaaaagaatctcaaatctataagga

SEQ ID NO: 2350975 - DNA, 25 bp, Homo sapien
tatagcctgcaggtattggacaagg

SEQ ID NO: 2350976 - DNA, 25 bp, Homo sapien
tttatagcctgcaggtattggacaa

SEQ ID NO: 2350977 - DNA, 25 bp, Homo sapien
agcctgcaggtattggacaaggcat

SEQ ID NO: 2350978 - DNA, 25 bp, Homo sapien
tagcctgcaggtattggacaaggca

SEQ ID NO: 2350979 - DNA, 25 bp, Homo sapien
ttcctgagtcaaatgattgaaagat

SEQ ID NO: 2350980 - DNA, 25 bp, Homo sapien
ctgtatattttctttactggtaaga

SEQ ID NO: 2350981 - DNA, 25 bp, Homo sapien
ttttcctgagtcaaatgattgaaag

SEQ ID NO: 2350982 - DNA, 25 bp, Homo sapien
tactggtaagaagttttcctgagtc

SEQ ID NO: 2350983 - DNA, 25 bp, Homo sapien
gatgtggttggccaattgtaaccag

SEQ ID NO: 2350984 - DNA, 25 bp, Homo sapien
tttattgtcgcagccacacttagga

SEQ ID NO: 2350985 - DNA, 25 bp, Homo sapien
tttgctcttgttggtaattactgtc

SEQ ID NO: 2350986 - DNA, 25 bp, Homo sapien
tctgggacacaatttattgtcgcag

SEQ ID NO: 2350987 - DNA, 25 bp, Homo sapien
gcatgctaagagtgatctcatcttt

SEQ ID NO: 2350988 - DNA, 25 bp, Homo sapien
cttccatcatcctttgaatatatct

SEQ ID NO: 2350989 - DNA, 25 bp, Homo sapien
agcatgctaagagtgatctcatctt

SEQ ID NO: 2350990 - DNA, 25 bp, Homo sapien
tagcatgctaagagtgatctcatct

SEQ ID NO: 2350991 - DNA, 25 bp, Homo sapien
gaaggaagtttagcctgtcctcagc

SEQ ID NO: 2350992 - DNA, 25 bp, Homo sapien
ctcgccagcggagcactgagacagg

SEQ ID NO: 2350993 - DNA, 25 bp, Homo sapien
tgtatgccgcccggtgcctctgcag

SEQ ID NO: 2350994 - DNA, 25 bp, Homo sapien
cacaatctccagctcgccagcggag

SEQ ID NO: 2350995 - DNA, 25 bp, Homo sapien
tcctggagaagtgtaagtgtagaaa

SEQ ID NO: 2350996 - DNA, 25 bp, Homo sapien
cctggagaagtgtaagtgtagaaaa

SEQ ID NO: 2350997 - DNA, 25 bp, Homo sapien
catcctgtactaccttcttttcaaa

SEQ ID NO: 2350998 - DNA, 25 bp, Homo sapien
gtcatcctgtactaccttcttttca

SEQ ID NO: 2350999 - DNA, 25 bp, Homo sapien
ctaagcggcacctcaaccacagatg

SEQ ID NO: 2351000 - DNA, 25 bp, Homo sapien
caaatgcagtcaccaatgctaagcg

SEQ ID NO: 2351001 - DNA, 25 bp, Homo sapien
ccaatgccatgaatctgtgcaacaa

SEQ ID NO: 2351002 - DNA, 25 bp, Homo sapien
tctcgggcatttagggaaataggat

SEQ ID NO: 2351003 - DNA, 25 bp, Homo sapien
tcattgatgaggctcaggcaatctg

SEQ ID NO: 2351004 - DNA, 25 bp, Homo sapien
tacagcttgcgtcaagaattcagcc

SEQ ID NO: 2351005 - DNA, 25 bp, Homo sapien
gcagttccgtgtcccctgcgctttt

SEQ ID NO: 2351006 - DNA, 25 bp, Homo sapien
cttgtaggccaagaattacagcttg

SEQ ID NO: 2351007 - DNA, 25 bp, Homo sapien
gctatgagcccgagttaacaaattt

SEQ ID NO: 2351008 - DNA, 25 bp, Homo sapien
gctttggttaagtcatccagcaaaa

SEQ ID NO: 2351009 - DNA, 25 bp, Homo sapien
cctgtttttgaagagggagattcct

SEQ ID NO: 2351010 - DNA, 25 bp, Homo sapien
tcttgccagggttagccgtgattga

SEQ ID NO: 2351011 - DNA, 25 bp, Homo sapien
ttagtgtttgatgaacgaaattcaa

SEQ ID NO: 2351012 - DNA, 25 bp, Homo sapien
catgacatggggaagatagatattt

SEQ ID NO: 2351013 - DNA, 25 bp, Homo sapien
ggccaataacatgacatggggaaga

SEQ ID NO: 2351014 - DNA, 25 bp, Homo sapien
gtgtttgatgaacgaaattcaattg

SEQ ID NO: 2351015 - DNA, 25 bp, Homo sapien
gagcaggtaaccacttcgaggggtc

SEQ ID NO: 2351016 - DNA, 25 bp, Homo sapien
tccactgctgttgttctacagagct

SEQ ID NO: 2351017 - DNA, 25 bp, Homo sapien
aatatacttgcttggccactgtatg

SEQ ID NO: 2351018 - DNA, 25 bp, Homo sapien
tacagagcttcagtgccacatcaaa

SEQ ID NO: 2351019 - DNA, 25 bp, Homo sapien
attagtatttgacgttctattttgc

SEQ ID NO: 2351020 - DNA, 25 bp, Homo sapien
cattagtatttgacgttctattttg

SEQ ID NO: 2351021 - DNA, 25 bp, Homo sapien
ccattagtatttgacgttctatttt

SEQ ID NO: 2351022 - DNA, 25 bp, Homo sapien
catgctataactgccaggaagcctg

SEQ ID NO: 2351023 - DNA, 25 bp, Homo sapien
ggaagagagcttagcactctgcctt

SEQ ID NO: 2351024 - DNA, 25 bp, Homo sapien
tgtggtggcaacactccatgctata

SEQ ID NO: 2351025 - DNA, 25 bp, Homo sapien
gaagcctggcatcaagaccattctg

SEQ ID NO: 2351026 - DNA, 25 bp, Homo sapien
ttctaggtaggagtctcttatcaat

SEQ ID NO: 2351027 - DNA, 25 bp, Homo sapien
agagccatttctaggtaggagtctc

SEQ ID NO: 2351028 - DNA, 25 bp, Homo sapien
gagccatttctaggtaggagtctct

SEQ ID NO: 2351029 - DNA, 25 bp, Homo sapien
tgtggaatgcatgtagattggaagt

SEQ ID NO: 2351030 - DNA, 25 bp, Homo sapien
aaagaatatggtgggcgttttccag

SEQ ID NO: 2351031 - DNA, 25 bp, Homo sapien
caggagattctaggttatgtaaaca

SEQ ID NO: 2351032 - DNA, 25 bp, Homo sapien
gggagatgttcgacattgcacagga

SEQ ID NO: 2351033 - DNA, 25 bp, Homo sapien
acagaactacttcttctgagaggag

SEQ ID NO: 2351034 - DNA, 25 bp, Homo sapien
gatgtttctttaacagaactacttc

SEQ ID NO: 2351035 - DNA, 25 bp, Homo sapien
ctgatgtttctttaacagaactact

SEQ ID NO: 2351036 - DNA, 25 bp, Homo sapien
ctttaacagaactacttcttctgag

SEQ ID NO: 2351037 - DNA, 25 bp, Homo sapien
caatccaggctaatgaactgtacat

SEQ ID NO: 2351038 - DNA, 25 bp, Homo sapien
tgcaatccaggctaatgaactgtac

SEQ ID NO: 2351039 - DNA, 25 bp, Homo sapien
tattgcaatccaggctaatgaactg

SEQ ID NO: 2351040 - DNA, 25 bp, Homo sapien
tcttattgcaatccaggctaatgaa

SEQ ID NO: 2351041 - DNA, 25 bp, Homo sapien
caagcaaataatctgtatacgaaga

SEQ ID NO: 2351042 - DNA, 25 bp, Homo sapien
taatgccacttggttaactttatgc

SEQ ID NO: 2351043 - DNA, 25 bp, Homo sapien
tgcattctagtattcttctttccaa

SEQ ID NO: 2351044 - DNA, 25 bp, Homo sapien
atctgtatacgaagacaaaagatcc

SEQ ID NO: 2351045 - DNA, 25 bp, Homo sapien
tttgcataatatgtagacatccaaa

SEQ ID NO: 2351046 - DNA, 25 bp, Homo sapien
gggctgccgaactgccctgtgtagg

SEQ ID NO: 2351047 - DNA, 25 bp, Homo sapien
gccgaactgccctgtgtagggtcaa

SEQ ID NO: 2351048 - DNA, 25 bp, Homo sapien
tgccgaactgccctgtgtagggtca

SEQ ID NO: 2351049 - DNA, 25 bp, Homo sapien
gctgccgaactgccctgtgtagggt

SEQ ID NO: 2351050 - DNA, 25 bp, Homo sapien
ccttgttgagagaagtaatatttgc

SEQ ID NO: 2351051 - DNA, 25 bp, Homo sapien
aattcgcttcttatttggaccatga

SEQ ID NO: 2351052 - DNA, 25 bp, Homo sapien
tggaccatgaattcgtaaagaatat

SEQ ID NO: 2351053 - DNA, 25 bp, Homo sapien
taccgtattcctagtatcatctagc

SEQ ID NO: 2351054 - DNA, 25 bp, Homo sapien
gcacaaaggtcaaatggattgtttt

SEQ ID NO: 2351055 - DNA, 25 bp, Homo sapien
cacaaaggtcaaatggattgttttt

SEQ ID NO: 2351056 - DNA, 25 bp, Homo sapien
tcacacacatcatcattttggtaca

SEQ ID NO: 2351057 - DNA, 25 bp, Homo sapien
cacacatcatcattttggtacaaaa

SEQ ID NO: 2351058 - DNA, 25 bp, Homo sapien
tgtcacacacatcatcattttggta

SEQ ID NO: 2351059 - DNA, 25 bp, Homo sapien
cacacacatcatcattttggtacaa

SEQ ID NO: 2351060 - DNA, 25 bp, Homo sapien
gaaggtgaatatagtagcgcagtag

SEQ ID NO: 2351061 - DNA, 25 bp, Homo sapien
ggtgaatatagtagcgcagtagaag

SEQ ID NO: 2351062 - DNA, 25 bp, Homo sapien
gtttgctcagattattaatcctctg

SEQ ID NO: 2351063 - DNA, 25 bp, Homo sapien
atatagtagcgcagtagaaggatcc

SEQ ID NO: 2351064 - DNA, 25 bp, Homo sapien
tgagaagtgtatcatctggcaaaga

SEQ ID NO: 2351065 - DNA, 25 bp, Homo sapien
tctttctggcgcaaaatcaactcag

SEQ ID NO: 2351066 - DNA, 25 bp, Homo sapien
caactcagagttgtaaagggatgtg

SEQ ID NO: 2351067 - DNA, 25 bp, Homo sapien
cttggcagatgattcacgtaagtct

SEQ ID NO: 2351068 - DNA, 25 bp, Homo sapien
gattgtacagaactatcgcgataca

SEQ ID NO: 2351069 - DNA, 25 bp, Homo sapien
aaatggattgtacagaactatcgcg

SEQ ID NO: 2351070 - DNA, 25 bp, Homo sapien
tggattgtacagaactatcgcgata

SEQ ID NO: 2351071 - DNA, 25 bp, Homo sapien
gataaaatggattgtacagaactat

SEQ ID NO: 2351072 - DNA, 25 bp, Homo sapien
tattggcgttatgtccacacaagat

SEQ ID NO: 2351073 - DNA, 25 bp, Homo sapien
ttctattggcgttatgtccacacaa

SEQ ID NO: 2351074 - DNA, 25 bp, Homo sapien
attggcgttatgtccacacaagatg

SEQ ID NO: 2351075 - DNA, 25 bp, Homo sapien
tctattggcgttatgtccacacaag

SEQ ID NO: 2351076 - DNA, 25 bp, Homo sapien
agttctttgtttgaagcttgcgtta

SEQ ID NO: 2351077 - DNA, 25 bp, Homo sapien
ttctttgtttgaagcttgcgttacc

SEQ ID NO: 2351078 - DNA, 25 bp, Homo sapien
caaagttctttgtttgaagcttgcg

SEQ ID NO: 2351079 - DNA, 25 bp, Homo sapien
ctttgtttgaagcttgcgttaccat

SEQ ID NO: 2351080 - DNA, 25 bp, Homo sapien
ttctgtctccttgggaggtctatcc

SEQ ID NO: 2351081 - DNA, 25 bp, Homo sapien
ctgtctccttgggaggtctatccag

SEQ ID NO: 2351082 - DNA, 25 bp, Homo sapien
gtctccttgggaggtctatccaggg

SEQ ID NO: 2351083 - DNA, 25 bp, Homo sapien
aggttctgtctccttgggaggtcta

SEQ ID NO: 2351084 - DNA, 25 bp, Homo sapien
tctaatttactgactcctaggcact

SEQ ID NO: 2351085 - DNA, 25 bp, Homo sapien
gccgctgctctaatttactgactcc

SEQ ID NO: 2351086 - DNA, 25 bp, Homo sapien
gctgctctaatttactgactcctag

SEQ ID NO: 2351087 - DNA, 25 bp, Homo sapien
ccacagccgctgctctaatttactg

SEQ ID NO: 2351088 - DNA, 25 bp, Homo sapien
ttgaagaaggcaaacagccacctgc

SEQ ID NO: 2351089 - DNA, 25 bp, Homo sapien
agttgaagaaggcaaacagccacct

SEQ ID NO: 2351090 - DNA, 25 bp, Homo sapien
gttgaagaaggcaaacagccacctg

SEQ ID NO: 2351091 - DNA, 25 bp, Homo sapien
gaagaaggcaaacagccacctgcat

SEQ ID NO: 2351092 - DNA, 25 bp, Homo sapien
catttgaggtaatttcaggagctgc

SEQ ID NO: 2351093 - DNA, 25 bp, Homo sapien
tatcaactgattcctcttccacttc

SEQ ID NO: 2351094 - DNA, 25 bp, Homo sapien
gctatttgagcaagattagataatt

SEQ ID NO: 2351095 - DNA, 25 bp, Homo sapien
gagctgctggcaatgatagttcagc

SEQ ID NO: 2351096 - DNA, 25 bp, Homo sapien
agttgagtcatgtctcgtactctga

SEQ ID NO: 2351097 - DNA, 25 bp, Homo sapien
agtcatgtctcgtactctgaataaa

SEQ ID NO: 2351098 - DNA, 25 bp, Homo sapien
tcaaaaagttgagtcatgtctcgta

SEQ ID NO: 2351099 - DNA, 25 bp, Homo sapien
aaaagttgagtcatgtctcgtactc

SEQ ID NO: 2351100 - DNA, 25 bp, Homo sapien
tgaggtaaaccgcatacacatgttc

SEQ ID NO: 2351101 - DNA, 25 bp, Homo sapien
cctgtcccagccagaaagcggttgg

SEQ ID NO: 2351102 - DNA, 25 bp, Homo sapien
tgcacgcatgctgcagctagcgagg

SEQ ID NO: 2351103 - DNA, 25 bp, Homo sapien
aaggcagggagctcgcctgtcccag

SEQ ID NO: 2351104 - DNA, 25 bp, Homo sapien
ctcagatagtggtgttggctcttta

SEQ ID NO: 2351105 - DNA, 25 bp, Homo sapien
gatagtggtgttggctctttatcat

SEQ ID NO: 2351106 - DNA, 25 bp, Homo sapien
cagatagtggtgttggctctttatc

SEQ ID NO: 2351107 - DNA, 25 bp, Homo sapien
tagtggtgttggctctttatcattc

SEQ ID NO: 2351108 - DNA, 25 bp, Homo sapien
acggcagtgagatatcaaatgggac

SEQ ID NO: 2351109 - DNA, 25 bp, Homo sapien
agattgaatatagacggcagtgaga

SEQ ID NO: 2351110 - DNA, 25 bp, Homo sapien
tagacggcagtgagatatcaaatgg

SEQ ID NO: 2351111 - DNA, 25 bp, Homo sapien
gaatatagacggcagtgagatatca

SEQ ID NO: 2351112 - DNA, 25 bp, Homo sapien
aggatattcagggaataattgacac

SEQ ID NO: 2351113 - DNA, 25 bp, Homo sapien
tataggatattcagggaataattga

SEQ ID NO: 2351114 - DNA, 25 bp, Homo sapien
gatattcagggaataattgacacta

SEQ ID NO: 2351115 - DNA, 25 bp, Homo sapien
cgtgtataggatattcagggaataa

SEQ ID NO: 2351116 - DNA, 25 bp, Homo sapien
cacagaaagttacagctttaaccag

SEQ ID NO: 2351117 - DNA, 25 bp, Homo sapien
cagctttaaccagtgagtgttgctc

SEQ ID NO: 2351118 - DNA, 25 bp, Homo sapien
gaaagttacagctttaaccagtgag

SEQ ID NO: 2351119 - DNA, 25 bp, Homo sapien
tacagctttaaccagtgagtgttgc

SEQ ID NO: 2351120 - DNA, 25 bp, Homo sapien
gaagtactctaggagtcctcggagg

SEQ ID NO: 2351121 - DNA, 25 bp, Homo sapien
tactctaggagtcctcggaggcaga

SEQ ID NO: 2351122 - DNA, 25 bp, Homo sapien
aggagtcctcggaggcagacaccct

SEQ ID NO: 2351123 - DNA, 25 bp, Homo sapien
ctggaagtactctaggagtcctcgg

SEQ ID NO: 2351124 - DNA, 25 bp, Homo sapien
tcaatcaccaatccagaaatatata

SEQ ID NO: 2351125 - DNA, 25 bp, Homo sapien
tacaaaaattataattccaactcaa

SEQ ID NO: 2351126 - DNA, 25 bp, Homo sapien
caaaaattataattccaactcaact

SEQ ID NO: 2351127 - DNA, 25 bp, Homo sapien
gaaatatatacatcaaatagtattc

SEQ ID NO: 2351128 - DNA, 25 bp, Homo sapien
taagctggacaaatgagagcgagct

SEQ ID NO: 2351129 - DNA, 25 bp, Homo sapien
aggagttaaactgccctactgggag

SEQ ID NO: 2351130 - DNA, 25 bp, Homo sapien
cttttcaaaacgcaggagagagtgg

SEQ ID NO: 2351131 - DNA, 25 bp, Homo sapien
tgcagcaggccagttgatcaacagc

SEQ ID NO: 2351132 - DNA, 25 bp, Homo sapien
tcctttcaggagacatgcccacgtc

SEQ ID NO: 2351133 - DNA, 25 bp, Homo sapien
ggctctcccaggaccattggttggg

SEQ ID NO: 2351134 - DNA, 25 bp, Homo sapien
ggatggacccaaagattctccctgg

SEQ ID NO: 2351135 - DNA, 25 bp, Homo sapien
tcccagcatagttccggatggaccc

SEQ ID NO: 2351136 - DNA, 25 bp, Homo sapien
tcttggacaatcctcctctgggtcg

SEQ ID NO: 2351137 - DNA, 25 bp, Homo sapien
gctgttatggtaataagctggaaga

SEQ ID NO: 2351138 - DNA, 25 bp, Homo sapien
gaaaagattgattgctgttatggta

SEQ ID NO: 2351139 - DNA, 25 bp, Homo sapien
ccatgtgtgttgagaagttcttgga

SEQ ID NO: 2351140 - DNA, 25 bp, Homo sapien
tatacactgggtatgaagcaaccaa

SEQ ID NO: 2351141 - DNA, 25 bp, Homo sapien
catggtgctcttgcttatacactgg

SEQ ID NO: 2351142 - DNA, 25 bp, Homo sapien
aatgggcagaccgatgatcatggtg

SEQ ID NO: 2351143 - DNA, 25 bp, Homo sapien
gaagcaaccaattgttggtgtttac

SEQ ID NO: 2351144 - DNA, 25 bp, Homo sapien
tacagagggtctggtcagggcggcg

SEQ ID NO: 2351145 - DNA, 25 bp, Homo sapien
acagaagtcggggtacagagggtct

SEQ ID NO: 2351146 - DNA, 25 bp, Homo sapien
ctggccggacagaagtcggggtaca

SEQ ID NO: 2351147 - DNA, 25 bp, Homo sapien
gggtacagagggtctggtcagggcg

SEQ ID NO: 2351148 - DNA, 25 bp, Homo sapien
ccggctccgcgctgggcttccggct

SEQ ID NO: 2351149 - DNA, 25 bp, Homo sapien
agtcccgccccgagtgacgtcacgg

SEQ ID NO: 2351150 - DNA, 25 bp, Homo sapien
ctggactgttaaacttcggcggccg

SEQ ID NO: 2351151 - DNA, 25 bp, Homo sapien
ctctccgcagcaacacaacaggggg

SEQ ID NO: 2351152 - DNA, 25 bp, Homo sapien
tacttgaggttgacaaaaaaggaga

SEQ ID NO: 2351153 - DNA, 25 bp, Homo sapien
agacagacttgtggagacgaggcaa

SEQ ID NO: 2351154 - DNA, 25 bp, Homo sapien
gaggttgacaaaaaaggagacagac

SEQ ID NO: 2351155 - DNA, 25 bp, Homo sapien
gcaaacttttcggaggcagcacacc

SEQ ID NO: 2351156 - DNA, 25 bp, Homo sapien
ggtcccgtcgaaagctagcagtcag

SEQ ID NO: 2351157 - DNA, 25 bp, Homo sapien
tacatgagtccctcaaagacggtcc

SEQ ID NO: 2351158 - DNA, 25 bp, Homo sapien
cagtcaggacacaaggcggtaacgt

SEQ ID NO: 2351159 - DNA, 25 bp, Homo sapien
tgcaggacaacagctcaagtgaggc

SEQ ID NO: 2351160 - DNA, 25 bp, Homo sapien
gtgcccagccactatctgaaatttt

SEQ ID NO: 2351161 - DNA, 25 bp, Homo sapien
accagagtcttgaaacattcctggc

SEQ ID NO: 2351162 - DNA, 25 bp, Homo sapien
acaccagagtcttgaaacattcctg

SEQ ID NO: 2351163 - DNA, 25 bp, Homo sapien
cacagcagtttcacaacaaataact

SEQ ID NO: 2351164 - DNA, 25 bp, Homo sapien
tgaagcatcccatattttaatatca

SEQ ID NO: 2351165 - DNA, 25 bp, Homo sapien
gagctgattccatgtggtgatgtgt

SEQ ID NO: 2351166 - DNA, 25 bp, Homo sapien
atctcctgatgaagcaaatctgagg

SEQ ID NO: 2351167 - DNA, 25 bp, Homo sapien
ctcctgatgaagcaaatctgaggtt

SEQ ID NO: 2351168 - DNA, 25 bp, Homo sapien
ttttacgttatctatccttggtagc

SEQ ID NO: 2351169 - DNA, 25 bp, Homo sapien
catgcaaaagtttcattgacagtgg

SEQ ID NO: 2351170 - DNA, 25 bp, Homo sapien
aacacattactcagtatgaggcaca

SEQ ID NO: 2351171 - DNA, 25 bp, Homo sapien
tggtagcaatgcaaaacacattact

SEQ ID NO: 2351172 - DNA, 25 bp, Homo sapien
ggagcatcaaacaatccatgaacat

SEQ ID NO: 2351173 - DNA, 25 bp, Homo sapien
taaatgaggagttatggagcatcaa

SEQ ID NO: 2351174 - DNA, 25 bp, Homo sapien
catgaacatctatagcactagacta

SEQ ID NO: 2351175 - DNA, 25 bp, Homo sapien
caatgagtatagcttacagagtagc

SEQ ID NO: 2351176 - DNA, 25 bp, Homo sapien
caactattttgtcgccactggaaga

SEQ ID NO: 2351177 - DNA, 25 bp, Homo sapien
gctctaaaagtggaacaggtttaca

SEQ ID NO: 2351178 - DNA, 25 bp, Homo sapien
catttgcaacttgagacaactattt

SEQ ID NO: 2351179 - DNA, 25 bp, Homo sapien
gcaagctctaaaagtggaacaggtt

SEQ ID NO: 2351180 - DNA, 25 bp, Homo sapien
tattaacagtgttatttaggcctcc

SEQ ID NO: 2351181 - DNA, 25 bp, Homo sapien
taagagatcgatgaactctttttga

SEQ ID NO: 2351182 - DNA, 25 bp, Homo sapien
tgttatttaggcctccgcttaccaa

SEQ ID NO: 2351183 - DNA, 25 bp, Homo sapien
taacagtgttatttaggcctccgct

SEQ ID NO: 2351184 - DNA, 25 bp, Homo sapien
tagataaattagtggttacactgtg

SEQ ID NO: 2351185 - DNA, 25 bp, Homo sapien
attgtatgttacacaagttacttga

SEQ ID NO: 2351186 - DNA, 25 bp, Homo sapien
gagatccagaagcaatgtagcaatc

SEQ ID NO: 2351187 - DNA, 25 bp, Homo sapien
ctggttactaccatggccaaaagga

SEQ ID NO: 2351188 - DNA, 25 bp, Homo sapien
aaaaacataccactcactaaaggtg

SEQ ID NO: 2351189 - DNA, 25 bp, Homo sapien
gcagcacttaagtcattaactccct

SEQ ID NO: 2351190 - DNA, 25 bp, Homo sapien
tcccggcagtataagcagcaatgct

SEQ ID NO: 2351191 - DNA, 25 bp, Homo sapien
tccctatcttgttccagactaaatt

SEQ ID NO: 2351192 - DNA, 25 bp, Homo sapien
caacaaaaaatgtctaggaaataca

SEQ ID NO: 2351193 - DNA, 25 bp, Homo sapien
gtcacctggcacctaagttaagaca

SEQ ID NO: 2351194 - DNA, 25 bp, Homo sapien
tgtcatttactaggcggaaaattaa

SEQ ID NO: 2351195 - DNA, 25 bp, Homo sapien
cctggcacctaagttaagacaatta

SEQ ID NO: 2351196 - DNA, 25 bp, Homo sapien
aaacagatgcctgacgctggagctt

SEQ ID NO: 2351197 - DNA, 25 bp, Homo sapien
tatccaagcctatggttacaaagag

SEQ ID NO: 2351198 - DNA, 25 bp, Homo sapien
cattatccgaaacactgcccagtag

SEQ ID NO: 2351199 - DNA, 25 bp, Homo sapien
caaagttatggtatggactctgact

SEQ ID NO: 2351200 - DNA, 25 bp, Homo sapien
tgcattttatcatattgtggaaaag

SEQ ID NO: 2351201 - DNA, 25 bp, Homo sapien
gaagtaccctaaatactacctgcaa

SEQ ID NO: 2351202 - DNA, 25 bp, Homo sapien
tcgtttctaaaccttcctctagata

SEQ ID NO: 2351203 - DNA, 25 bp, Homo sapien
gtgaaatcattaagatgtcatctct

SEQ ID NO: 2351204 - DNA, 25 bp, Homo sapien
gcatgaaatctaccgcagttagagg

SEQ ID NO: 2351205 - DNA, 25 bp, Homo sapien
ccgggaagatccaatagccaaagtg

SEQ ID NO: 2351206 - DNA, 25 bp, Homo sapien
gaacagtggagtactgaaatgctat

SEQ ID NO: 2351207 - DNA, 25 bp, Homo sapien
aagtggctccatcaggcatgaaatc

SEQ ID NO: 2351208 - DNA, 25 bp, Homo sapien
cactgttgtgggcttatttgaacag

SEQ ID NO: 2351209 - DNA, 25 bp, Homo sapien
tcctccactagcagcattcacatta

SEQ ID NO: 2351210 - DNA, 25 bp, Homo sapien
cattaacacttcgtttgttcactgt

SEQ ID NO: 2351211 - DNA, 25 bp, Homo sapien
gtgggcttatttgaacagcctttat

SEQ ID NO: 2351212 - DNA, 25 bp, Homo sapien
gttcctttccccatagctgatgtca

SEQ ID NO: 2351213 - DNA, 25 bp, Homo sapien
aactgtggcaatggacgtggcaggt

SEQ ID NO: 2351214 - DNA, 25 bp, Homo sapien
cataggttgtggtagaactgtggca

SEQ ID NO: 2351215 - DNA, 25 bp, Homo sapien
ctgatgtcataggttgtggtagaac

SEQ ID NO: 2351216 - DNA, 25 bp, Homo sapien
ctcagcctctgaaactttaggaaac

SEQ ID NO: 2351217 - DNA, 25 bp, Homo sapien
gaagagtgtctatagcaagagttca

SEQ ID NO: 2351218 - DNA, 25 bp, Homo sapien
gccatcaggattggtagcacattac

SEQ ID NO: 2351219 - DNA, 25 bp, Homo sapien
caaaaatgcccaagactggcgaata

SEQ ID NO: 2351220 - DNA, 25 bp, Homo sapien
taggtgagaacatgtcacctaaact

SEQ ID NO: 2351221 - DNA, 25 bp, Homo sapien
caaagctggagaaatcctgattttt

SEQ ID NO: 2351222 - DNA, 25 bp, Homo sapien
ggtgagaacatgtcacctaaactac

SEQ ID NO: 2351223 - DNA, 25 bp, Homo sapien
tgagaacatgtcacctaaactactt

SEQ ID NO: 2351224 - DNA, 25 bp, Homo sapien
tctcctttgcctatggactcatcac

SEQ ID NO: 2351225 - DNA, 25 bp, Homo sapien
tatggactcatcacttcccttgtta

SEQ ID NO: 2351226 - DNA, 25 bp, Homo sapien
atggactcatcacttcccttgttaa

SEQ ID NO: 2351227 - DNA, 25 bp, Homo sapien
ttcaactgcggtagaaagtcaaagc

SEQ ID NO: 2351228 - DNA, 25 bp, Homo sapien
ggactagaatgcaatactgaagtac

SEQ ID NO: 2351229 - DNA, 25 bp, Homo sapien
ttagactcagctgttagatcacggt

SEQ ID NO: 2351230 - DNA, 25 bp, Homo sapien
tttccctggagatcccataaaaaca

SEQ ID NO: 2351231 - DNA, 25 bp, Homo sapien
tccaaagcgagatttcaaagtattc

SEQ ID NO: 2351232 - DNA, 25 bp, Homo sapien
tgctaataattaggatacatgcact

SEQ ID NO: 2351233 - DNA, 25 bp, Homo sapien
gcagccacccactttctactgataa

SEQ ID NO: 2351234 - DNA, 25 bp, Homo sapien
tgataaacacatacagtgagttcag

SEQ ID NO: 2351235 - DNA, 25 bp, Homo sapien
gagaggtatttagatttccactttc

SEQ ID NO: 2351236 - DNA, 25 bp, Homo sapien
tatcaactgggcttcaatttcattc

SEQ ID NO: 2351237 - DNA, 25 bp, Homo sapien
gatccattgattgggggttcacata

SEQ ID NO: 2351238 - DNA, 25 bp, Homo sapien
cagaatttcttgtttggttagatga

SEQ ID NO: 2351239 - DNA, 25 bp, Homo sapien
tgagagtgaactggcaactccagca

SEQ ID NO: 2351240 - DNA, 25 bp, Homo sapien
gtcatccaacgtttcctgtatcatg

SEQ ID NO: 2351241 - DNA, 25 bp, Homo sapien
cagtgacagaagatgctatctttgg

SEQ ID NO: 2351242 - DNA, 25 bp, Homo sapien
aatgctgtcggctattttttctgag

SEQ ID NO: 2351243 - DNA, 25 bp, Homo sapien
cacaattcgaaggatgagacagaca

SEQ ID NO: 2351244 - DNA, 25 bp, Homo sapien
aaagttcacaatggcagtctacctg

SEQ ID NO: 2351245 - DNA, 25 bp, Homo sapien
aataattgccctaggtaaatgtgcc

SEQ ID NO: 2351246 - DNA, 25 bp, Homo sapien
gactgccctgctgagttacctaata

SEQ ID NO: 2351247 - DNA, 25 bp, Homo sapien
tgcattcagctgtgttcaggtgtac

SEQ ID NO: 2351248 - DNA, 25 bp, Homo sapien
cacaaggcctttgtggcagatcatt

SEQ ID NO: 2351249 - DNA, 25 bp, Homo sapien
ggaagcatgcaccaacaaaaactgc

SEQ ID NO: 2351250 - DNA, 25 bp, Homo sapien
tgcttacggtaatccaaatctgagc

SEQ ID NO: 2351251 - DNA, 25 bp, Homo sapien
cactcctaggtgcagacatgcagca

SEQ ID NO: 2351252 - DNA, 25 bp, Homo sapien
ttcaccaaacgtgctgcagcagctc

SEQ ID NO: 2351253 - DNA, 25 bp, Homo sapien
tgactgtacgtcttcaccaaacgtg

SEQ ID NO: 2351254 - DNA, 25 bp, Homo sapien
aagaggcactgactgtacgtcttca

SEQ ID NO: 2351255 - DNA, 25 bp, Homo sapien
gccaatgataggtgtagatgaacac

SEQ ID NO: 2351256 - DNA, 25 bp, Homo sapien
gatgaacacctagtctgatgaacac

SEQ ID NO: 2351257 - DNA, 25 bp, Homo sapien
taggtgtagatgaacacctagtctg

SEQ ID NO: 2351258 - DNA, 25 bp, Homo sapien
cctctctgtcctgccaatgataggt

SEQ ID NO: 2351259 - DNA, 25 bp, Homo sapien
tctggaagtcttgtgatgctggcaa

SEQ ID NO: 2351260 - DNA, 25 bp, Homo sapien
gaaaagagacccatgactaggagaa

SEQ ID NO: 2351261 - DNA, 25 bp, Homo sapien
gtggaatttcccctcaagacatctg

SEQ ID NO: 2351262 - DNA, 25 bp, Homo sapien
ttttaaattcaaccgagagctgaga

SEQ ID NO: 2351263 - DNA, 25 bp, Homo sapien
gctgtaagagccaaggtcttgaaga

SEQ ID NO: 2351264 - DNA, 25 bp, Homo sapien
tgtaagagccaaggtcttgaagaga

SEQ ID NO: 2351265 - DNA, 25 bp, Homo sapien
aagagccaaggtcttgaagagagga

SEQ ID NO: 2351266 - DNA, 25 bp, Homo sapien
aaggctgtaagagccaaggtcttga

SEQ ID NO: 2351267 - DNA, 25 bp, Homo sapien
gagtatgtgctgattccacagtgtg

SEQ ID NO: 2351268 - DNA, 25 bp, Homo sapien
tccacagtgtggagaagaaaccgag

SEQ ID NO: 2351269 - DNA, 25 bp, Homo sapien
ttccacagtgtggagaagaaaccga

SEQ ID NO: 2351270 - DNA, 25 bp, Homo sapien
tgtttttccttctagagtatgtgct

SEQ ID NO: 2351271 - DNA, 25 bp, Homo sapien
aaagactactaggtaagctcttcat

SEQ ID NO: 2351272 - DNA, 25 bp, Homo sapien
tgagcattacaaaaaagggtaccat

SEQ ID NO: 2351273 - DNA, 25 bp, Homo sapien
caacttatgaactagaacattacca

SEQ ID NO: 2351274 - DNA, 25 bp, Homo sapien
caatttgggtggatatagcatggct

SEQ ID NO: 2351275 - DNA, 25 bp, Homo sapien
tatcacttaactcttgggaaaaagc

SEQ ID NO: 2351276 - DNA, 25 bp, Homo sapien
tgcaaattcacaatgtccctatggc

SEQ ID NO: 2351277 - DNA, 25 bp, Homo sapien
cagttgcatatgaaactgtttaatc

SEQ ID NO: 2351278 - DNA, 25 bp, Homo sapien
aaattcacaatgtccctatggcatg

SEQ ID NO: 2351279 - DNA, 25 bp, Homo sapien
agttgcatatgaaactgtttaatca

SEQ ID NO: 2351280 - DNA, 25 bp, Homo sapien
atttcagccactaaaccttcattca

SEQ ID NO: 2351281 - DNA, 25 bp, Homo sapien
ttctcgtagtctttcaatttcagcc

SEQ ID NO: 2351282 - DNA, 25 bp, Homo sapien
tgttttcttctcgtagtctttcaat

SEQ ID NO: 2351283 - DNA, 25 bp, Homo sapien
cactgagtatctttccagcaaagaa

SEQ ID NO: 2351284 - DNA, 25 bp, Homo sapien
tacagaacattaaggtattcactga

SEQ ID NO: 2351285 - DNA, 25 bp, Homo sapien
gtagttctgtgttgccagaaacttc

SEQ ID NO: 2351286 - DNA, 25 bp, Homo sapien
tgaaaacaatactgattctatgtag

SEQ ID NO: 2351287 - DNA, 25 bp, Homo sapien
tgttggtataaaatcccatcatcct

SEQ ID NO: 2351288 - DNA, 25 bp, Homo sapien
caacgttgcatgttactaatgagaa

SEQ ID NO: 2351289 - DNA, 25 bp, Homo sapien
tagctcttgtcgagtcctatgaacc

SEQ ID NO: 2351290 - DNA, 25 bp, Homo sapien
gagctatacaaaggtacacagttta

SEQ ID NO: 2351291 - DNA, 25 bp, Homo sapien
gaaaaagggcacttagtggatggct

SEQ ID NO: 2351292 - DNA, 25 bp, Homo sapien
gaaacccataaagttagtgagctaa

SEQ ID NO: 2351293 - DNA, 25 bp, Homo sapien
aagtttatgcttattaaatatatcc

SEQ ID NO: 2351294 - DNA, 25 bp, Homo sapien
acttcagaaacccataaagttagtg

SEQ ID NO: 2351295 - DNA, 25 bp, Homo sapien
ccataaagttagtgagctaaaggtt

SEQ ID NO: 2351296 - DNA, 25 bp, Homo sapien
ctaaacctgttagtgatatacaagg

SEQ ID NO: 2351297 - DNA, 25 bp, Homo sapien
tcataatctgtcaggaaaagatcac

SEQ ID NO: 2351298 - DNA, 25 bp, Homo sapien
ccctatatgcttcagtacaaatgta

SEQ ID NO: 2351299 - DNA, 25 bp, Homo sapien
taaatacaccatgtaggcaaaacac

SEQ ID NO: 2351300 - DNA, 25 bp, Homo sapien
cctgttagtccgtttaatatggcga

SEQ ID NO: 2351301 - DNA, 25 bp, Homo sapien
gaattcatcagtgtagccatttagg

SEQ ID NO: 2351302 - DNA, 25 bp, Homo sapien
ccatcactggattcaaactgctaaa

SEQ ID NO: 2351303 - DNA, 25 bp, Homo sapien
caaacattgagctggaaattatccc

SEQ ID NO: 2351304 - DNA, 25 bp, Homo sapien
aactgatgctgaacaatattgagcc

SEQ ID NO: 2351305 - DNA, 25 bp, Homo sapien
gggattttgccgaatctacagatca

SEQ ID NO: 2351306 - DNA, 25 bp, Homo sapien
tctcagcactgtttcgtagaattca

SEQ ID NO: 2351307 - DNA, 25 bp, Homo sapien
cagtgctgtaatttctagacctcta

SEQ ID NO: 2351308 - DNA, 25 bp, Homo sapien
tgactgggagtaagagccaacgctg

SEQ ID NO: 2351309 - DNA, 25 bp, Homo sapien
gagtaagagccaacgctggagctca

SEQ ID NO: 2351310 - DNA, 25 bp, Homo sapien
caggcctgtgcttgactgggagtaa

SEQ ID NO: 2351311 - DNA, 25 bp, Homo sapien
ccttggcaccctctagcctctcgtt

SEQ ID NO: 2351312 - DNA, 25 bp, Homo sapien
tgcgcgtctgctcgcggggccgctg

SEQ ID NO: 2351313 - DNA, 25 bp, Homo sapien
gggtgcccggtagagccagggagat

SEQ ID NO: 2351314 - DNA, 25 bp, Homo sapien
cgcgctgctgtgggcttaggttcca

SEQ ID NO: 2351315 - DNA, 25 bp, Homo sapien
tccaaccgagcgccgacagagggcg

SEQ ID NO: 2351316 - DNA, 25 bp, Homo sapien
tgccccgcaccccagcgcgggtccg

SEQ ID NO: 2351317 - DNA, 25 bp, Homo sapien
cgcaccccagcgcgggtccgctcac

SEQ ID NO: 2351318 - DNA, 25 bp, Homo sapien
ccccgcaccccagcgcgggtccgct

SEQ ID NO: 2351319 - DNA, 25 bp, Homo sapien
ccgcaccccagcgcgggtccgctca

SEQ ID NO: 2351320 - DNA, 25 bp, Homo sapien
gaagtcagcccatgagtacattggg

SEQ ID NO: 2351321 - DNA, 25 bp, Homo sapien
gcccatgagtacattgggctaaaat

SEQ ID NO: 2351322 - DNA, 25 bp, Homo sapien
gcaggtaccgtcctggctttcaggt

SEQ ID NO: 2351323 - DNA, 25 bp, Homo sapien
attaaacacgcaggtaccgtcctgg

SEQ ID NO: 2351324 - DNA, 25 bp, Homo sapien
tgaattcgggaacttgtcaactctg

SEQ ID NO: 2351325 - DNA, 25 bp, Homo sapien
aattgaattcgggaacttgtcaact

SEQ ID NO: 2351326 - DNA, 25 bp, Homo sapien
tgaaaattgaattcgggaacttgtc

SEQ ID NO: 2351327 - DNA, 25 bp, Homo sapien
aattcgggaacttgtcaactctgac

SEQ ID NO: 2351328 - DNA, 25 bp, Homo sapien
gctgcaactgatgggtgatacctag

SEQ ID NO: 2351329 - DNA, 25 bp, Homo sapien
taagtggactacactcctgtctgac

SEQ ID NO: 2351330 - DNA, 25 bp, Homo sapien
tcttaccgaccccagttgattgaca

SEQ ID NO: 2351331 - DNA, 25 bp, Homo sapien
gacactgactgcctagatccctgtg

SEQ ID NO: 2351332 - DNA, 25 bp, Homo sapien
gctttgtattttgttgcctaacatt

SEQ ID NO: 2351333 - DNA, 25 bp, Homo sapien
ttggcagctcctcaagtaactgctt

SEQ ID NO: 2351334 - DNA, 25 bp, Homo sapien
ttgtattttgttgcctaacattcat

SEQ ID NO: 2351335 - DNA, 25 bp, Homo sapien
ctctgaaaatagttttggcagctcc

SEQ ID NO: 2351336 - DNA, 25 bp, Homo sapien
tgtccttctccttgactattgagga

SEQ ID NO: 2351337 - DNA, 25 bp, Homo sapien
tccttctccttgactattgaggaag

SEQ ID NO: 2351338 - DNA, 25 bp, Homo sapien
ccttctccttgactattgaggaagg

SEQ ID NO: 2351339 - DNA, 25 bp, Homo sapien
gtccttctccttgactattgaggaa

SEQ ID NO: 2351340 - DNA, 25 bp, Homo sapien
ggttttgaagtatggtaatgctgtc

SEQ ID NO: 2351341 - DNA, 25 bp, Homo sapien
tgaagtatggtaatgctgtccttta

SEQ ID NO: 2351342 - DNA, 25 bp, Homo sapien
ctttaatcccacagcaggacatggg

SEQ ID NO: 2351343 - DNA, 25 bp, Homo sapien
gtcctttaatcccacagcaggacat

SEQ ID NO: 2351344 - DNA, 25 bp, Homo sapien
ggtagaatgtctgatagatatccct

SEQ ID NO: 2351345 - DNA, 25 bp, Homo sapien
agcagacgccaggtagaatgtctga

SEQ ID NO: 2351346 - DNA, 25 bp, Homo sapien
gtgatgatggagcagcagacgccag

SEQ ID NO: 2351347 - DNA, 25 bp, Homo sapien
agactcctctggtgatgatggatgc

SEQ ID NO: 2351348 - DNA, 25 bp, Homo sapien
gggccccatggggtacacgatagca

SEQ ID NO: 2351349 - DNA, 25 bp, Homo sapien
gggtacacgatagcaccagtggaag

SEQ ID NO: 2351350 - DNA, 25 bp, Homo sapien
catggggtacacgatagcaccagtg

SEQ ID NO: 2351351 - DNA, 25 bp, Homo sapien
cccatggggtacacgatagcaccag

SEQ ID NO: 2351352 - DNA, 25 bp, Homo sapien
aggaatgtgaaggtagaaaggccac

SEQ ID NO: 2351353 - DNA, 25 bp, Homo sapien
gaatgtgaaggtagaaaggccacac

SEQ ID NO: 2351354 - DNA, 25 bp, Homo sapien
ctgaggaggaatgtgaaggtagaaa

SEQ ID NO: 2351355 - DNA, 25 bp, Homo sapien
aggaggaatgtgaaggtagaaaggc

SEQ ID NO: 2351356 - DNA, 25 bp, Homo sapien
ctgtctacttcaacggtcagccctt

SEQ ID NO: 2351357 - DNA, 25 bp, Homo sapien
tctacttcaacggtcagccctttgc

SEQ ID NO: 2351358 - DNA, 25 bp, Homo sapien
tgtctacttcaacggtcagcccttt

SEQ ID NO: 2351359 - DNA, 25 bp, Homo sapien
gtctacttcaacggtcagccctttg

SEQ ID NO: 2351360 - DNA, 25 bp, Homo sapien
ctcggtgatctgtattttctgtctg

SEQ ID NO: 2351361 - DNA, 25 bp, Homo sapien
tgagctctcggtgatctgtattttc

SEQ ID NO: 2351362 - DNA, 25 bp, Homo sapien
ttcatgacgtctggggacttcctgc

SEQ ID NO: 2351363 - DNA, 25 bp, Homo sapien
tctctcagttcatgacgtctgggga

SEQ ID NO: 2351364 - DNA, 25 bp, Homo sapien
taaaatcccttataggacatgctgg

SEQ ID NO: 2351365 - DNA, 25 bp, Homo sapien
caaagacacactactgccatggcat

SEQ ID NO: 2351366 - DNA, 25 bp, Homo sapien
tccttgccaggatacatgagggcca

SEQ ID NO: 2351367 - DNA, 25 bp, Homo sapien
gccatggcattttcccgtccataga

SEQ ID NO: 2351368 - DNA, 25 bp, Homo sapien
tttttgtcaatccaataagctttta

SEQ ID NO: 2351369 - DNA, 25 bp, Homo sapien
attcatttgtgcttggtcagctgtc

SEQ ID NO: 2351370 - DNA, 25 bp, Homo sapien
ttctcttatttctccttgtcctgta

SEQ ID NO: 2351371 - DNA, 25 bp, Homo sapien
tccttgtcctgtaaataagacagcc

SEQ ID NO: 2351372 - DNA, 25 bp, Homo sapien
tgcattgtttttagcagtgtcacat

SEQ ID NO: 2351373 - DNA, 25 bp, Homo sapien
gtgtcacattcatgatctcacttat

SEQ ID NO: 2351374 - DNA, 25 bp, Homo sapien
gaattatcatcaggaatgtagccaa

SEQ ID NO: 2351375 - DNA, 25 bp, Homo sapien
tgtatgatcaagtcctataatggtc

SEQ ID NO: 2351376 - DNA, 25 bp, Homo sapien
gtagttagggaagtaacttgtatga

SEQ ID NO: 2351377 - DNA, 25 bp, Homo sapien
caattttagcgcaaataaatggtag

SEQ ID NO: 2351378 - DNA, 25 bp, Homo sapien
ccaaagagttgagtgatgtcgtagc

SEQ ID NO: 2351379 - DNA, 25 bp, Homo sapien
gccgatactgtagcgtgggtctcca

SEQ ID NO: 2351380 - DNA, 25 bp, Homo sapien
tcaaagttgtttaatggtcatgcaa

SEQ ID NO: 2351381 - DNA, 25 bp, Homo sapien
taaagcaatgtaagacgactgccga

SEQ ID NO: 2351382 - DNA, 25 bp, Homo sapien
gagctgacaaatgctaacaaccttt

SEQ ID NO: 2351383 - DNA, 25 bp, Homo sapien
tgtgggaggagattagcttcccctt

SEQ ID NO: 2351384 - DNA, 25 bp, Homo sapien
gaaaatgacttgtctcctatagtga

SEQ ID NO: 2351385 - DNA, 25 bp, Homo sapien
gacaaatgctaacaacctttggagg

SEQ ID NO: 2351386 - DNA, 25 bp, Homo sapien
gaattgttccctgtgtgttgctgat

SEQ ID NO: 2351387 - DNA, 25 bp, Homo sapien
tcctagcatcaagtcacaagctgtg

SEQ ID NO: 2351388 - DNA, 25 bp, Homo sapien
cgaacatctgaattggctaccatgg

SEQ ID NO: 2351389 - DNA, 25 bp, Homo sapien
gtgacacagctcgtagaaagaaaat

SEQ ID NO: 2351390 - DNA, 25 bp, Homo sapien
ggaataaaatatccctgttgacttg

SEQ ID NO: 2351391 - DNA, 25 bp, Homo sapien
gatcacaataatctattcccagcct

SEQ ID NO: 2351392 - DNA, 25 bp, Homo sapien
tgaccactaagtaaatctgaagatg

SEQ ID NO: 2351393 - DNA, 25 bp, Homo sapien
taaagcacagtgtcaaggaataaaa

SEQ ID NO: 2351394 - DNA, 25 bp, Homo sapien
tgacaaccttaacagggaccactgg

SEQ ID NO: 2351395 - DNA, 25 bp, Homo sapien
ccactgggttgaatgagccagggct

SEQ ID NO: 2351396 - DNA, 25 bp, Homo sapien
cagggctgagaacttaaataccact

SEQ ID NO: 2351397 - DNA, 25 bp, Homo sapien
acaagagaatccatagtgacaacct

SEQ ID NO: 2351398 - DNA, 25 bp, Homo sapien
aagcttgagtcagatctctgatgac

SEQ ID NO: 2351399 - DNA, 25 bp, Homo sapien
tctctggaaagcttgagtcagatct

SEQ ID NO: 2351400 - DNA, 25 bp, Homo sapien
gagtcagatctctgatgacagtaaa

SEQ ID NO: 2351401 - DNA, 25 bp, Homo sapien
gatctctgatgacagtaaacagcat

SEQ ID NO: 2351402 - DNA, 25 bp, Homo sapien
gtcaacacaggcctttggagtctca

SEQ ID NO: 2351403 - DNA, 25 bp, Homo sapien
aacacaggcctttggagtctcactg

SEQ ID NO: 2351404 - DNA, 25 bp, Homo sapien
ttggagtctcactgtttctgtagaa

SEQ ID NO: 2351405 - DNA, 25 bp, Homo sapien
gagtctcactgtttctgtagaaaac

SEQ ID NO: 2351406 - DNA, 25 bp, Homo sapien
ggctcccatggtgcaacaaatgaga

SEQ ID NO: 2351407 - DNA, 25 bp, Homo sapien
ctagggccaaatgagcttctttaat

SEQ ID NO: 2351408 - DNA, 25 bp, Homo sapien
gaggccaaaacggtgtgctttcagg

SEQ ID NO: 2351409 - DNA, 25 bp, Homo sapien
taattgggcatactgcaagctggct

SEQ ID NO: 2351410 - DNA, 25 bp, Homo sapien
ctggattcatagttgcttctatgag

SEQ ID NO: 2351411 - DNA, 25 bp, Homo sapien
tagttgcttctatgagttcttctac

SEQ ID NO: 2351412 - DNA, 25 bp, Homo sapien
gattcatagttgcttctatgagttc

SEQ ID NO: 2351413 - DNA, 25 bp, Homo sapien
tgcttctatgagttcttctacatcc

SEQ ID NO: 2351414 - DNA, 25 bp, Homo sapien
gactggatgactatccttgtctcct

SEQ ID NO: 2351415 - DNA, 25 bp, Homo sapien
taggttgttgaccactccaagcaca

SEQ ID NO: 2351416 - DNA, 25 bp, Homo sapien
cacatactcctgaggaggatttatt

SEQ ID NO: 2351417 - DNA, 25 bp, Homo sapien
cactgggtcacaaagttggactgga

SEQ ID NO: 2351418 - DNA, 25 bp, Homo sapien
tcctcagcggagagaagacattgaa

SEQ ID NO: 2351419 - DNA, 25 bp, Homo sapien
caaggttcccaaatagtgcttctga

SEQ ID NO: 2351420 - DNA, 25 bp, Homo sapien
tgaaccccagggaagtgaagctact

SEQ ID NO: 2351421 - DNA, 25 bp, Homo sapien
gccaatgtggctacgtgagtcctcc

SEQ ID NO: 2351422 - DNA, 25 bp, Homo sapien
tgaggtttggacttttaatgatccc

SEQ ID NO: 2351423 - DNA, 25 bp, Homo sapien
gcaggaggtatacatacaggtttgt

SEQ ID NO: 2351424 - DNA, 25 bp, Homo sapien
ttgaaaacttctgcgcatctgcccc

SEQ ID NO: 2351425 - DNA, 25 bp, Homo sapien
ccccagaggttctacctctctaaat

SEQ ID NO: 2351426 - DNA, 25 bp, Homo sapien
cagaggttctacctctctaaatcgt

SEQ ID NO: 2351427 - DNA, 25 bp, Homo sapien
tgctccttttgtaggtactgttagg

SEQ ID NO: 2351428 - DNA, 25 bp, Homo sapien
tgtgcaccaacgtaaaggaaacttg

SEQ ID NO: 2351429 - DNA, 25 bp, Homo sapien
aaacttgggccttctggttgagata

SEQ ID NO: 2351430 - DNA, 25 bp, Homo sapien
cttggtttccttcatgttgatgtgc

SEQ ID NO: 2351431 - DNA, 25 bp, Homo sapien
cttgggccttctggttgagataaat

SEQ ID NO: 2351432 - DNA, 25 bp, Homo sapien
cagataaacttctctagtaaactat

SEQ ID NO: 2351433 - DNA, 25 bp, Homo sapien
gttcagataaacttctctagtaaac

SEQ ID NO: 2351434 - DNA, 25 bp, Homo sapien
aacttctctagtaaactatggaaat

SEQ ID NO: 2351435 - DNA, 25 bp, Homo sapien
tctctagtaaactatggaaatgatc

SEQ ID NO: 2351436 - DNA, 25 bp, Homo sapien
ccttgctgtcctcaagaataagcct

SEQ ID NO: 2351437 - DNA, 25 bp, Homo sapien
ctgtcctcaagaataagcctctctg

SEQ ID NO: 2351438 - DNA, 25 bp, Homo sapien
tgctgtcctcaagaataagcctctc

SEQ ID NO: 2351439 - DNA, 25 bp, Homo sapien
ttgctgtcctcaagaataagcctct

SEQ ID NO: 2351440 - DNA, 25 bp, Homo sapien
tgacagcagtgaaggtacctggcag

SEQ ID NO: 2351441 - DNA, 25 bp, Homo sapien
gcagggtccttgcatacaggaggca

SEQ ID NO: 2351442 - DNA, 25 bp, Homo sapien
atccaagacctgcaagaacctccat

SEQ ID NO: 2351443 - DNA, 25 bp, Homo sapien
cctgcgtagttgtggaatccctcag

SEQ ID NO: 2351444 - DNA, 25 bp, Homo sapien
tctgccagactacaaataacattcc

SEQ ID NO: 2351445 - DNA, 25 bp, Homo sapien
tcagacctcttttctgccagactac

SEQ ID NO: 2351446 - DNA, 25 bp, Homo sapien
ttctgccagactacaaataacattc

SEQ ID NO: 2351447 - DNA, 25 bp, Homo sapien
tatgaaattcctaactgcgtcctgg

SEQ ID NO: 2351448 - DNA, 25 bp, Homo sapien
taagttttgagagggcatgtccact

SEQ ID NO: 2351449 - DNA, 25 bp, Homo sapien
gcttgaagtaaaggtcgtaggtgac

SEQ ID NO: 2351450 - DNA, 25 bp, Homo sapien
tgcgtcctggattgccctgaactga

SEQ ID NO: 2351451 - DNA, 25 bp, Homo sapien
agcagggactcagccgcttgataac

SEQ ID NO: 2351452 - DNA, 25 bp, Homo sapien
tcgcactgatggtttgaagaggccc

SEQ ID NO: 2351453 - DNA, 25 bp, Homo sapien
tcagccgcttgataacattgtcgca

SEQ ID NO: 2351454 - DNA, 25 bp, Homo sapien
gcttgataacattgtcgcactgatg

SEQ ID NO: 2351455 - DNA, 25 bp, Homo sapien
taatagcgtatttgtcacagtggcc

SEQ ID NO: 2351456 - DNA, 25 bp, Homo sapien
cacagtggccctctcctgtagttgg

SEQ ID NO: 2351457 - DNA, 25 bp, Homo sapien
cttgaattaagctgattggcacaca

SEQ ID NO: 2351458 - DNA, 25 bp, Homo sapien
ctgagaggaatgtcagagcttgaat

SEQ ID NO: 2351459 - DNA, 25 bp, Homo sapien
gcttatagaaacttccggaactgta

SEQ ID NO: 2351460 - DNA, 25 bp, Homo sapien
tattcacgcttatagaaacttccgg

SEQ ID NO: 2351461 - DNA, 25 bp, Homo sapien
ccggaactgtaactgaaggatgcat

SEQ ID NO: 2351462 - DNA, 25 bp, Homo sapien
tagaaacttccggaactgtaactga

SEQ ID NO: 2351463 - DNA, 25 bp, Homo sapien
tatttatttggaggtggctgctcac

SEQ ID NO: 2351464 - DNA, 25 bp, Homo sapien
tttatttggaggtggctgctcacag

SEQ ID NO: 2351465 - DNA, 25 bp, Homo sapien
ttatttggaggtggctgctcacagt

SEQ ID NO: 2351466 - DNA, 25 bp, Homo sapien
atttggaggtggctgctcacagtgc

SEQ ID NO: 2351467 - DNA, 25 bp, Homo sapien
tcctccccagctgtgaatatggttc

SEQ ID NO: 2351468 - DNA, 25 bp, Homo sapien
cctccccagctgtgaatatggttcc

SEQ ID NO: 2351469 - DNA, 25 bp, Homo sapien
ggtttcctccccagctgtgaatatg

SEQ ID NO: 2351470 - DNA, 25 bp, Homo sapien
tttcctccccagctgtgaatatggt

SEQ ID NO: 2351471 - DNA, 25 bp, Homo sapien
cctgggcagatttaggtttcaaata

SEQ ID NO: 2351472 - DNA, 25 bp, Homo sapien
attggtcatgcttattagcctgggc

SEQ ID NO: 2351473 - DNA, 25 bp, Homo sapien
tagcctgggcagatttaggtttcaa

SEQ ID NO: 2351474 - DNA, 25 bp, Homo sapien
ttttggtaagaggaattggtcatgc

SEQ ID NO: 2351475 - DNA, 25 bp, Homo sapien
aacgctgaagttcataaaggtgaag

SEQ ID NO: 2351476 - DNA, 25 bp, Homo sapien
aaggtgaagactgtctgacagcata

SEQ ID NO: 2351477 - DNA, 25 bp, Homo sapien
catttggcagtatcgactgcagtaa

SEQ ID NO: 2351478 - DNA, 25 bp, Homo sapien
tataacgctgaagttcataaaggtg

SEQ ID NO: 2351479 - DNA, 25 bp, Homo sapien
ccagacctgctgctctttggttctt

SEQ ID NO: 2351480 - DNA, 25 bp, Homo sapien
agttctccacgggccccttctagca

SEQ ID NO: 2351481 - DNA, 25 bp, Homo sapien
gctctttggttcttagttctccacg

SEQ ID NO: 2351482 - DNA, 25 bp, Homo sapien
gttctccacgggccccttctagcat

SEQ ID NO: 2351483 - DNA, 25 bp, Homo sapien
tcagaacagcagaaaagtccgaagg

SEQ ID NO: 2351484 - DNA, 25 bp, Homo sapien
cagcagaaaagtccgaaggattgga

SEQ ID NO: 2351485 - DNA, 25 bp, Homo sapien
gaaaagtccgaaggattggagattc

SEQ ID NO: 2351486 - DNA, 25 bp, Homo sapien
gaacagcagaaaagtccgaaggatt

SEQ ID NO: 2351487 - DNA, 25 bp, Homo sapien
tcacataaggagggcagccatgcag

SEQ ID NO: 2351488 - DNA, 25 bp, Homo sapien
tcacggaggaaaggtaatgtcacat

SEQ ID NO: 2351489 - DNA, 25 bp, Homo sapien
gtcacatagagtccaagagccaaaa

SEQ ID NO: 2351490 - DNA, 25 bp, Homo sapien
cacatagagtccaagagccaaaagc

SEQ ID NO: 2351491 - DNA, 25 bp, Homo sapien
ggaaaggtaatgtcacatagagtcc

SEQ ID NO: 2351492 - DNA, 25 bp, Homo sapien
cagagtgagcatgttcaggttcaaa

SEQ ID NO: 2351493 - DNA, 25 bp, Homo sapien
tgttggattatgtttcgagaagcca

SEQ ID NO: 2351494 - DNA, 25 bp, Homo sapien
tgagctttttcagtcccataagacc

SEQ ID NO: 2351495 - DNA, 25 bp, Homo sapien
tctctcctttaatgagaacagcgac

SEQ ID NO: 2351496 - DNA, 25 bp, Homo sapien
tcttaaagctgaagacttaataaca

SEQ ID NO: 2351497 - DNA, 25 bp, Homo sapien
taacaactcggttcagagactggct

SEQ ID NO: 2351498 - DNA, 25 bp, Homo sapien
acaccagtttgtgtgataaaagctt

SEQ ID NO: 2351499 - DNA, 25 bp, Homo sapien
cagcaggaggagagcgatagtacac

SEQ ID NO: 2351500 - DNA, 25 bp, Homo sapien
tgtgaagcctgttttctaattggtt

SEQ ID NO: 2351501 - DNA, 25 bp, Homo sapien
tggtttcgtttatttagcttatctc

SEQ ID NO: 2351502 - DNA, 25 bp, Homo sapien
tgaagcctgttttctaattggtttc

SEQ ID NO: 2351503 - DNA, 25 bp, Homo sapien
tatttagcttatctctccaattttc

SEQ ID NO: 2351504 - DNA, 25 bp, Homo sapien
ttctgacttgaaacatcttagttcc

SEQ ID NO: 2351505 - DNA, 25 bp, Homo sapien
aacatcttagttccttcaaggtcat

SEQ ID NO: 2351506 - DNA, 25 bp, Homo sapien
gaaacatcttagttccttcaaggtc

SEQ ID NO: 2351507 - DNA, 25 bp, Homo sapien
ttgaaacatcttagttccttcaagg

SEQ ID NO: 2351508 - DNA, 25 bp, Homo sapien
gctgtttgaaccctagggcgagtaa

SEQ ID NO: 2351509 - DNA, 25 bp, Homo sapien
caaagcgttcaaactgcttgaggcc

SEQ ID NO: 2351510 - DNA, 25 bp, Homo sapien
ggcttcagagactcaaagcgttcaa

SEQ ID NO: 2351511 - DNA, 25 bp, Homo sapien
gaacacagccatatcataacaaggc

SEQ ID NO: 2351512 - DNA, 25 bp, Homo sapien
tttgtaggccttcatcagggatcca

SEQ ID NO: 2351513 - DNA, 25 bp, Homo sapien
ttagtcttcctgaagccgtaagaac

SEQ ID NO: 2351514 - DNA, 25 bp, Homo sapien
ggtaataaaccttgccagtagtcca

SEQ ID NO: 2351515 - DNA, 25 bp, Homo sapien
ctcagggcctggtagatttgtaggc

SEQ ID NO: 2351516 - DNA, 25 bp, Homo sapien
gctgagcactctctaatgagctttt

SEQ ID NO: 2351517 - DNA, 25 bp, Homo sapien
gattggagacactctacctatagga

SEQ ID NO: 2351518 - DNA, 25 bp, Homo sapien
tctggcgctttccatctcgatgagc

SEQ ID NO: 2351519 - DNA, 25 bp, Homo sapien
gatttcaccaacatatcactctcta

SEQ ID NO: 2351520 - DNA, 25 bp, Homo sapien
ctcttcaactgagcaaatgcgtcta

SEQ ID NO: 2351521 - DNA, 25 bp, Homo sapien
gtatttaagtattatccaagtcctc

SEQ ID NO: 2351522 - DNA, 25 bp, Homo sapien
gaaggctagatcattcaggtattta

SEQ ID NO: 2351523 - DNA, 25 bp, Homo sapien
gagcaaatgcgtctataataattaa

SEQ ID NO: 2351524 - DNA, 25 bp, Homo sapien
tcccgtttgtaagtcaatgctctat

SEQ ID NO: 2351525 - DNA, 25 bp, Homo sapien
tatatgactatatagtgagaggccc

SEQ ID NO: 2351526 - DNA, 25 bp, Homo sapien
ggtaagatgtgtgcataaagcccaa

SEQ ID NO: 2351527 - DNA, 25 bp, Homo sapien
gctcattagccttgtcagacatttg

SEQ ID NO: 2351528 - DNA, 25 bp, Homo sapien
cagtgtcttgatgcccaatcagttc

SEQ ID NO: 2351529 - DNA, 25 bp, Homo sapien
caatcagttctcagcagtctcttag

SEQ ID NO: 2351530 - DNA, 25 bp, Homo sapien
tattccaaacggatcctgttccagc

SEQ ID NO: 2351531 - DNA, 25 bp, Homo sapien
cagttctagtccacagcaagtcttg

SEQ ID NO: 2351532 - DNA, 25 bp, Homo sapien
gaattcttaccccacttgagaaata

SEQ ID NO: 2351533 - DNA, 25 bp, Homo sapien
ctcaggtaagcaaggcaattccaat

SEQ ID NO: 2351534 - DNA, 25 bp, Homo sapien
tactggtgttgatacctcaggtaag

SEQ ID NO: 2351535 - DNA, 25 bp, Homo sapien
gcattgagacagatattgggaaaac

SEQ ID NO: 2351536 - DNA, 25 bp, Homo sapien
tctttacagccagtatttctttcaa

SEQ ID NO: 2351537 - DNA, 25 bp, Homo sapien
ctttacagccagtatttctttcaac

SEQ ID NO: 2351538 - DNA, 25 bp, Homo sapien
ttattctttacagccagtatttctt

SEQ ID NO: 2351539 - DNA, 25 bp, Homo sapien
attctttacagccagtatttctttc

SEQ ID NO: 2351540 - DNA, 25 bp, Homo sapien
tgaaaaaatatatggcctctttgtt

SEQ ID NO: 2351541 - DNA, 25 bp, Homo sapien
aactttcgcatcatatccctcttgg

SEQ ID NO: 2351542 - DNA, 25 bp, Homo sapien
actgatggcctggtgtataataaac

SEQ ID NO: 2351543 - DNA, 25 bp, Homo sapien
tcacattagtgaggtcttacagatc

SEQ ID NO: 2351544 - DNA, 25 bp, Homo sapien
tattaatatttgtgattcattttca

SEQ ID NO: 2351545 - DNA, 25 bp, Homo sapien
tatttgtgattcattttcatgttta

SEQ ID NO: 2351546 - DNA, 25 bp, Homo sapien
tctaccattatattaatatttgtga

SEQ ID NO: 2351547 - DNA, 25 bp, Homo sapien
ccattatattaatatttgtgattca

SEQ ID NO: 2351548 - DNA, 25 bp, Homo sapien
ttctcatctctcagcttattcaact

SEQ ID NO: 2351549 - DNA, 25 bp, Homo sapien
tttagtttcggctgcaatgtttact

SEQ ID NO: 2351550 - DNA, 25 bp, Homo sapien
caatgtttactccaacgtttgttct

SEQ ID NO: 2351551 - DNA, 25 bp, Homo sapien
tcatctctcagcttattcaacttta

SEQ ID NO: 2351552 - DNA, 25 bp, Homo sapien
agacagttctcacagtcaggctcca

SEQ ID NO: 2351553 - DNA, 25 bp, Homo sapien
taacatgtttgaatacagacagttc

SEQ ID NO: 2351554 - DNA, 25 bp, Homo sapien
ttaacatgtttgaatacagacagtt

SEQ ID NO: 2351555 - DNA, 25 bp, Homo sapien
aacatgtttgaatacagacagttct

SEQ ID NO: 2351556 - DNA, 25 bp, Homo sapien
tacattctccccgatggattccgaa

SEQ ID NO: 2351557 - DNA, 25 bp, Homo sapien
ccgaaacccagaaggtacatttgat

SEQ ID NO: 2351558 - DNA, 25 bp, Homo sapien
caaaataccttgcatttgattgttt

SEQ ID NO: 2351559 - DNA, 25 bp, Homo sapien
aattcctggaccttagtagattaca

SEQ ID NO: 2351560 - DNA, 25 bp, Homo sapien
ctccttatttactagtgctttttgg

SEQ ID NO: 2351561 - DNA, 25 bp, Homo sapien
agatctcagcaaaccagcgagcctg

SEQ ID NO: 2351562 - DNA, 25 bp, Homo sapien
acctattgttccagagacagatatg

SEQ ID NO: 2351563 - DNA, 25 bp, Homo sapien
acagatatgtagccagccagtcaga

SEQ ID NO: 2351564 - DNA, 25 bp, Homo sapien
cagagtgctagtgctgcccagcagt

SEQ ID NO: 2351565 - DNA, 25 bp, Homo sapien
gcagacagcggcagaccttctccag

SEQ ID NO: 2351566 - DNA, 25 bp, Homo sapien
agtgcagacagcggcagaccttctc

SEQ ID NO: 2351567 - DNA, 25 bp, Homo sapien
agagtgctagtgctgcccagcagtc

SEQ ID NO: 2351568 - DNA, 25 bp, Homo sapien
tgtgcctcagttacagctgtgacac

SEQ ID NO: 2351569 - DNA, 25 bp, Homo sapien
aaatcggctccactgtgtgtactgc

SEQ ID NO: 2351570 - DNA, 25 bp, Homo sapien
cgcggaaatcggctccactgtgtgt

SEQ ID NO: 2351571 - DNA, 25 bp, Homo sapien
tgacactcatctgcctgcatagaac

SEQ ID NO: 2351572 - DNA, 25 bp, Homo sapien
ctaaaacttgtccgaaggacagtct

SEQ ID NO: 2351573 - DNA, 25 bp, Homo sapien
acttgtccgaaggacagtcttgtta

SEQ ID NO: 2351574 - DNA, 25 bp, Homo sapien
tgtccgaaggacagtcttgttattg

SEQ ID NO: 2351575 - DNA, 25 bp, Homo sapien
cgaaggacagtcttgttattgttgt

SEQ ID NO: 2351576 - DNA, 25 bp, Homo sapien
gaaagagcatcccttgaattctgca

SEQ ID NO: 2351577 - DNA, 25 bp, Homo sapien
gacgattccagtaacacaaagcccg

SEQ ID NO: 2351578 - DNA, 25 bp, Homo sapien
ttaacctcctaaatcgatgtcctgg

SEQ ID NO: 2351579 - DNA, 25 bp, Homo sapien
cagatttctttttagcgtgcgactc

SEQ ID NO: 2351580 - DNA, 25 bp, Homo sapien
gaaggacctagcaaccgataaatga

SEQ ID NO: 2351581 - DNA, 25 bp, Homo sapien
ccaaaaccacggagattgaggtcag

SEQ ID NO: 2351582 - DNA, 25 bp, Homo sapien
ttgcagacaaagacgttcagccacg

SEQ ID NO: 2351583 - DNA, 25 bp, Homo sapien
taagaactgatgaattgctcggcac

SEQ ID NO: 2351584 - DNA, 25 bp, Homo sapien
taagcaaggctgtgtactccatagc

SEQ ID NO: 2351585 - DNA, 25 bp, Homo sapien
caaagaaccagcctgcgactgaagg

SEQ ID NO: 2351586 - DNA, 25 bp, Homo sapien
gtttcacaggcaccccaactagaga

SEQ ID NO: 2351587 - DNA, 25 bp, Homo sapien
ggataagggctcatctgctaagcaa

SEQ ID NO: 2351588 - DNA, 25 bp, Homo sapien
cttttgattcgaggaggatgtcact

SEQ ID NO: 2351589 - DNA, 25 bp, Homo sapien
tttgattcgaggaggatgtcacttc

SEQ ID NO: 2351590 - DNA, 25 bp, Homo sapien
tgattcgaggaggatgtcacttctc

SEQ ID NO: 2351591 - DNA, 25 bp, Homo sapien
gattcgaggaggatgtcacttctca

SEQ ID NO: 2351592 - DNA, 25 bp, Homo sapien
gatcgtgataattaactacaaacca

SEQ ID NO: 2351593 - DNA, 25 bp, Homo sapien
gcatgttttaggatctctacggtaa

SEQ ID NO: 2351594 - DNA, 25 bp, Homo sapien
catgtttccaatttctagcaaattg

SEQ ID NO: 2351595 - DNA, 25 bp, Homo sapien
taaaacacttgagatcgtgataatt

SEQ ID NO: 2351596 - DNA, 25 bp, Homo sapien
tactgaactaatggtgacaaatcaa

SEQ ID NO: 2351597 - DNA, 25 bp, Homo sapien
aatactgaactaatggtgacaaatc

SEQ ID NO: 2351598 - DNA, 25 bp, Homo sapien
ttcatgatgatgtataaatcactag

SEQ ID NO: 2351599 - DNA, 25 bp, Homo sapien
cactagtaagattcccataatctac

SEQ ID NO: 2351600 - DNA, 25 bp, Homo sapien
atatatatcttaagccatttaaaga

SEQ ID NO: 2351601 - DNA, 25 bp, Homo sapien
atatatgcctagaatatatatatct

SEQ ID NO: 2351602 - DNA, 25 bp, Homo sapien
atcttaagccatttaaagagtagaa

SEQ ID NO: 2351603 - DNA, 25 bp, Homo sapien
taagccatttaaagagtagaaaaga

SEQ ID NO: 2351604 - DNA, 25 bp, Homo sapien
tgggaccctgaactcttagccagta

SEQ ID NO: 2351605 - DNA, 25 bp, Homo sapien
tattctaaggacgttgacttgggca

SEQ ID NO: 2351606 - DNA, 25 bp, Homo sapien
aaaattaatggcacctgaaggacct

SEQ ID NO: 2351607 - DNA, 25 bp, Homo sapien
ccagtatgtcagttgggcacaccta

SEQ ID NO: 2351608 - DNA, 25 bp, Homo sapien
cactgtagctaagggccaaggttta

SEQ ID NO: 2351609 - DNA, 25 bp, Homo sapien
gcagggtcctcccatataagttaga

SEQ ID NO: 2351610 - DNA, 25 bp, Homo sapien
tattctcattgtgcacccaggtggc

SEQ ID NO: 2351611 - DNA, 25 bp, Homo sapien
cactagcaggtaggaattcccaaag

SEQ ID NO: 2351612 - DNA, 25 bp, Homo sapien
gaatgtgttagcctatcttctcaag

SEQ ID NO: 2351613 - DNA, 25 bp, Homo sapien
taagggcaccaataaatccaccaag

SEQ ID NO: 2351614 - DNA, 25 bp, Homo sapien
tatgggcagggctttacacatcctg

SEQ ID NO: 2351615 - DNA, 25 bp, Homo sapien
tctactacagttgatgagagaacga

SEQ ID NO: 2351616 - DNA, 25 bp, Homo sapien
gatgtgtccagtataagtcccttca

SEQ ID NO: 2351617 - DNA, 25 bp, Homo sapien
cgcatccaggagtgggtcttattaa

SEQ ID NO: 2351618 - DNA, 25 bp, Homo sapien
gaaaggcattcacaagtcacaggga

SEQ ID NO: 2351619 - DNA, 25 bp, Homo sapien
tgtttagacaagtggatggcgaacc

SEQ ID NO: 2351620 - DNA, 25 bp, Homo sapien
tggagctaatccaaccatagacttg

SEQ ID NO: 2351621 - DNA, 25 bp, Homo sapien
aaccatagacttgcctttgaagtcc

SEQ ID NO: 2351622 - DNA, 25 bp, Homo sapien
tgctctctgtcctgtggagctaatc

SEQ ID NO: 2351623 - DNA, 25 bp, Homo sapien
tctgtcctgtggagctaatccaacc

SEQ ID NO: 2351624 - DNA, 25 bp, Homo sapien
ttattagtgcaactaatatgggaac

SEQ ID NO: 2351625 - DNA, 25 bp, Homo sapien
ggcttaagcgaaagcacatcccact

SEQ ID NO: 2351626 - DNA, 25 bp, Homo sapien
tatgagtagctgtttcagagcatgg

SEQ ID NO: 2351627 - DNA, 25 bp, Homo sapien
tcatcaacagcgtggttctttagcc

SEQ ID NO: 2351628 - DNA, 25 bp, Homo sapien
cctgaaatgggatagctatcatcag

SEQ ID NO: 2351629 - DNA, 25 bp, Homo sapien
atcagtctccaggtctctagatggg

SEQ ID NO: 2351630 - DNA, 25 bp, Homo sapien
gacggttgaagtgttagagaagaaa

SEQ ID NO: 2351631 - DNA, 25 bp, Homo sapien
gaaagtctcacagagtgagcagcag

SEQ ID NO: 2351632 - DNA, 25 bp, Homo sapien
tagactttcccttccatccattcaa

SEQ ID NO: 2351633 - DNA, 25 bp, Homo sapien
agccatgaaattatagactttccct

SEQ ID NO: 2351634 - DNA, 25 bp, Homo sapien
catgaaattatagactttcccttcc

SEQ ID NO: 2351635 - DNA, 25 bp, Homo sapien
aattatagactttcccttccatcca

SEQ ID NO: 2351636 - DNA, 25 bp, Homo sapien
tgtctacactggctgagcaaagcgc

SEQ ID NO: 2351637 - DNA, 25 bp, Homo sapien
gagaagcgcctttggcagctagagt

SEQ ID NO: 2351638 - DNA, 25 bp, Homo sapien
caaagcgctctgttcagaaggagaa

SEQ ID NO: 2351639 - DNA, 25 bp, Homo sapien
acatagctgacccatggacgctcgg

SEQ ID NO: 2351640 - DNA, 25 bp, Homo sapien
gtggagtaactacagttggcaacct

SEQ ID NO: 2351641 - DNA, 25 bp, Homo sapien
tctgattatatttccccgcagccat

SEQ ID NO: 2351642 - DNA, 25 bp, Homo sapien
tgtttcaccctaagcagacttcttt

SEQ ID NO: 2351643 - DNA, 25 bp, Homo sapien
ttggcaacctattccatcactcact

SEQ ID NO: 2351644 - DNA, 25 bp, Homo sapien
gaatttcactaccaagtctccgtgg

SEQ ID NO: 2351645 - DNA, 25 bp, Homo sapien
gggatccaataatccttggctcagt

SEQ ID NO: 2351646 - DNA, 25 bp, Homo sapien
ttttgtatgacacctgtagaaacag

SEQ ID NO: 2351647 - DNA, 25 bp, Homo sapien
tccgtggttctatgggatccaataa

SEQ ID NO: 2351648 - DNA, 25 bp, Homo sapien
ggatgagtgatgcataaaatggtct

SEQ ID NO: 2351649 - DNA, 25 bp, Homo sapien
tctaacaggatgagtgatgcataaa

SEQ ID NO: 2351650 - DNA, 25 bp, Homo sapien
cagggctctaacaggatgagtgatg

SEQ ID NO: 2351651 - DNA, 25 bp, Homo sapien
gcacagggctctaacaggatgagtg

SEQ ID NO: 2351652 - DNA, 25 bp, Homo sapien
gaacattgtctttggtaataatcgg

SEQ ID NO: 2351653 - DNA, 25 bp, Homo sapien
taggtgatccaaagttagagcataa

SEQ ID NO: 2351654 - DNA, 25 bp, Homo sapien
taaacaaccgtggtggtttcagcca

SEQ ID NO: 2351655 - DNA, 25 bp, Homo sapien
gaagcatccttctaatagacaatat

SEQ ID NO: 2351656 - DNA, 25 bp, Homo sapien
taaatatgctgtatggtgtactgag

SEQ ID NO: 2351657 - DNA, 25 bp, Homo sapien
tattacaatagtagacacaatcgcc

SEQ ID NO: 2351658 - DNA, 25 bp, Homo sapien
gtccagggttatagaatagcatgcc

SEQ ID NO: 2351659 - DNA, 25 bp, Homo sapien
catattgcatcaacaggtacctgga

SEQ ID NO: 2351660 - DNA, 25 bp, Homo sapien
aaatgttagtcagcttaaatcccag

SEQ ID NO: 2351661 - DNA, 25 bp, Homo sapien
ggaaaatgtagccacgcagtcttat

SEQ ID NO: 2351662 - DNA, 25 bp, Homo sapien
gtagccacgcagtcttattgctgtt

SEQ ID NO: 2351663 - DNA, 25 bp, Homo sapien
aatgttagtcagcttaaatcccagt

SEQ ID NO: 2351664 - DNA, 25 bp, Homo sapien
tggagagaagggtacacccatttgg

SEQ ID NO: 2351665 - DNA, 25 bp, Homo sapien
cacatatatgtttgaggtacttcac

SEQ ID NO: 2351666 - DNA, 25 bp, Homo sapien
ctaataggagcaaataatgacacgt

SEQ ID NO: 2351667 - DNA, 25 bp, Homo sapien
gaaagtagccccataacatgctgga

SEQ ID NO: 2351668 - DNA, 25 bp, Homo sapien
gatcttcatatttcaagatgaatct

SEQ ID NO: 2351669 - DNA, 25 bp, Homo sapien
tatgtgtgagcaggtatttgacctg

SEQ ID NO: 2351670 - DNA, 25 bp, Homo sapien
gaaaaatttggactagtctgctcag

SEQ ID NO: 2351671 - DNA, 25 bp, Homo sapien
gaaccatggatgattgatcttcata

SEQ ID NO: 2351672 - DNA, 25 bp, Homo sapien
gctctatatcattttagagtttaca

SEQ ID NO: 2351673 - DNA, 25 bp, Homo sapien
ttttacaatactatgggcagagcct

SEQ ID NO: 2351674 - DNA, 25 bp, Homo sapien
tatgggcagagccttctatttccac

SEQ ID NO: 2351675 - DNA, 25 bp, Homo sapien
taaaaacatgcatgaggggctagtt

SEQ ID NO: 2351676 - DNA, 25 bp, Homo sapien
accagcggacgtttcttctcttaca

SEQ ID NO: 2351677 - DNA, 25 bp, Homo sapien
tgtttaccagcggacgtttcttctc

SEQ ID NO: 2351678 - DNA, 25 bp, Homo sapien
ggacgtttcttctcttacatttaca

SEQ ID NO: 2351679 - DNA, 25 bp, Homo sapien
ggctgcttctgtttaccagcggacg

SEQ ID NO: 2351680 - DNA, 25 bp, Homo sapien
tctcgacaggtggagacaggtacct

SEQ ID NO: 2351681 - DNA, 25 bp, Homo sapien
tggtatcacccaaggccttactggt

SEQ ID NO: 2351682 - DNA, 25 bp, Homo sapien
tctgtaacctgcttggatacggtgg

SEQ ID NO: 2351683 - DNA, 25 bp, Homo sapien
taggttacaagacagtaggccttca

SEQ ID NO: 2351684 - DNA, 25 bp, Homo sapien
cttcctcaagtcgtattaattcatc

SEQ ID NO: 2351685 - DNA, 25 bp, Homo sapien
cctcaagtcgtattaattcatccat

SEQ ID NO: 2351686 - DNA, 25 bp, Homo sapien
ctgaacttcctcaagtcgtattaat

SEQ ID NO: 2351687 - DNA, 25 bp, Homo sapien
gaacttcctcaagtcgtattaattc

SEQ ID NO: 2351688 - DNA, 25 bp, Homo sapien
taaaggtcagaaacccataaggatg

SEQ ID NO: 2351689 - DNA, 25 bp, Homo sapien
tctggaaatatgttgcctctgagct

SEQ ID NO: 2351690 - DNA, 25 bp, Homo sapien
cctctgagctttcgtaggctatgaa

SEQ ID NO: 2351691 - DNA, 25 bp, Homo sapien
taagtcccaaggttgtctcactaag

SEQ ID NO: 2351692 - DNA, 25 bp, Homo sapien
tatcacgcagtatgcttaggtaagc

SEQ ID NO: 2351693 - DNA, 25 bp, Homo sapien
ccaggtctgccacaacttacttcaa

SEQ ID NO: 2351694 - DNA, 25 bp, Homo sapien
gatgaagaaattggcaaggtccctg

SEQ ID NO: 2351695 - DNA, 25 bp, Homo sapien
taggtaagccagagatcaatatcat

SEQ ID NO: 2351696 - DNA, 25 bp, Homo sapien
ggatttctcaagatatatgataaaa

SEQ ID NO: 2351697 - DNA, 25 bp, Homo sapien
tactgttgacatagtttctgtatca

SEQ ID NO: 2351698 - DNA, 25 bp, Homo sapien
gagcaaaactattccttccataatg

SEQ ID NO: 2351699 - DNA, 25 bp, Homo sapien
aaagaaatagtcaactactgttgac

SEQ ID NO: 2351700 - DNA, 25 bp, Homo sapien
tgatgaataagttatgtactgcagg

SEQ ID NO: 2351701 - DNA, 25 bp, Homo sapien
atgaataagttatgtactgcagggt

SEQ ID NO: 2351702 - DNA, 25 bp, Homo sapien
tgaataagttatgtactgcagggtt

SEQ ID NO: 2351703 - DNA, 25 bp, Homo sapien
gatgaataagttatgtactgcaggg

SEQ ID NO: 2351704 - DNA, 25 bp, Homo sapien
cactcctaattgtaagaaatatgaa

SEQ ID NO: 2351705 - DNA, 25 bp, Homo sapien
tatttaatagcaccactgatataca

SEQ ID NO: 2351706 - DNA, 25 bp, Homo sapien
taaagatatattcaatgtacattga

SEQ ID NO: 2351707 - DNA, 25 bp, Homo sapien
tcagcaatttgttgtaatctacctt

SEQ ID NO: 2351708 - DNA, 25 bp, Homo sapien
taacttgggaaaatagtgccacttg

SEQ ID NO: 2351709 - DNA, 25 bp, Homo sapien
agaagtgaagatagggctttcccct

SEQ ID NO: 2351710 - DNA, 25 bp, Homo sapien
tcagcaaaggcatagttacatcaaa

SEQ ID NO: 2351711 - DNA, 25 bp, Homo sapien
caaaatgatgcccaatagatgctct

SEQ ID NO: 2351712 - DNA, 25 bp, Homo sapien
tgggagaagtgaactaaaggatata

SEQ ID NO: 2351713 - DNA, 25 bp, Homo sapien
ggagaagtgaactaaaggatatagt

SEQ ID NO: 2351714 - DNA, 25 bp, Homo sapien
tttgggagaagtgaactaaaggata

SEQ ID NO: 2351715 - DNA, 25 bp, Homo sapien
gaagtgaactaaaggatatagttaa

SEQ ID NO: 2351716 - DNA, 25 bp, Homo sapien
gatagtcttgagaatcgcctaacat

SEQ ID NO: 2351717 - DNA, 25 bp, Homo sapien
caggttatcagacccattccagaca

SEQ ID NO: 2351718 - DNA, 25 bp, Homo sapien
ttcagtctgtctcaagatagtcttg

SEQ ID NO: 2351719 - DNA, 25 bp, Homo sapien
gaataacctagaatccagtctgaga

SEQ ID NO: 2351720 - DNA, 25 bp, Homo sapien
caatgcagaagttgaccattgaggg

SEQ ID NO: 2351721 - DNA, 25 bp, Homo sapien
gaagttgaccattgagggataaaga

SEQ ID NO: 2351722 - DNA, 25 bp, Homo sapien
gaagatgtacaatgcagaagttgac

SEQ ID NO: 2351723 - DNA, 25 bp, Homo sapien
gatgtacaatgcagaagttgaccat

SEQ ID NO: 2351724 - DNA, 25 bp, Homo sapien
gttcattatgtataagggactgtca

SEQ ID NO: 2351725 - DNA, 25 bp, Homo sapien
ccttcatagtctaattacattatca

SEQ ID NO: 2351726 - DNA, 25 bp, Homo sapien
gaagaattatacatgagctgtaagt

SEQ ID NO: 2351727 - DNA, 25 bp, Homo sapien
tacagtgttcattatgtataaggga

SEQ ID NO: 2351728 - DNA, 25 bp, Homo sapien
tagctactgataagaaccgattctg

SEQ ID NO: 2351729 - DNA, 25 bp, Homo sapien
gatagcacaggcacttaggattctg

SEQ ID NO: 2351730 - DNA, 25 bp, Homo sapien
gctaagcaagctaggcctttgggaa

SEQ ID NO: 2351731 - DNA, 25 bp, Homo sapien
cctttgggaacatagatctactggg

SEQ ID NO: 2351732 - DNA, 25 bp, Homo sapien
gctgtgcgatagtagcacaattaga

SEQ ID NO: 2351733 - DNA, 25 bp, Homo sapien
tcctccctatgctaacttctggtgg

SEQ ID NO: 2351734 - DNA, 25 bp, Homo sapien
catgagataagatgcaagctgtgcg

SEQ ID NO: 2351735 - DNA, 25 bp, Homo sapien
tctcatgcttaccttgctgaacagc

SEQ ID NO: 2351736 - DNA, 25 bp, Homo sapien
gtcacgccattctcccgcttcagtc

SEQ ID NO: 2351737 - DNA, 25 bp, Homo sapien
ggtcacgccattctcccgcttcagt

SEQ ID NO: 2351738 - DNA, 25 bp, Homo sapien
ggattgcaggcatgagccactgcgc

SEQ ID NO: 2351739 - DNA, 25 bp, Homo sapien
ctgggattgcaggcatgagccactg

SEQ ID NO: 2351740 - DNA, 25 bp, Homo sapien
tgtctcggagcaggaaagcaatcag

SEQ ID NO: 2351741 - DNA, 25 bp, Homo sapien
acatgcgtcaccagctgtctcggag

SEQ ID NO: 2351742 - DNA, 25 bp, Homo sapien
ggaaagcaatcaggtgaatactact

SEQ ID NO: 2351743 - DNA, 25 bp, Homo sapien
ctggttatcaggaagacatgcgtca

SEQ ID NO: 2351744 - DNA, 25 bp, Homo sapien
tcctcagccatcgactgtcacattt

SEQ ID NO: 2351745 - DNA, 25 bp, Homo sapien
catttagattccgagagcttccagt

SEQ ID NO: 2351746 - DNA, 25 bp, Homo sapien
gacaaagagacatctaatcattgca

SEQ ID NO: 2351747 - DNA, 25 bp, Homo sapien
gttcctttctcatacgtgtcacaga

SEQ ID NO: 2351748 - DNA, 25 bp, Homo sapien
gctggcgggtacgatcagtcaccca

SEQ ID NO: 2351749 - DNA, 25 bp, Homo sapien
ctttgcagatgtagtagcaactttg

SEQ ID NO: 2351750 - DNA, 25 bp, Homo sapien
tcactggcaaatttttcgattaaac

SEQ ID NO: 2351751 - DNA, 25 bp, Homo sapien
tttgttaattatgacattagccagc

SEQ ID NO: 2351752 - DNA, 25 bp, Homo sapien
ccttgagcaaaagtcaactccgtgt

SEQ ID NO: 2351753 - DNA, 25 bp, Homo sapien
tacacagctctgtcgttccaccttg

SEQ ID NO: 2351754 - DNA, 25 bp, Homo sapien
caagttcgcaatttctcatcttgcc

SEQ ID NO: 2351755 - DNA, 25 bp, Homo sapien
ctttggccgaacaagttcgcaattt

SEQ ID NO: 2351756 - DNA, 25 bp, Homo sapien
aaaagcacgcatttccaggagacat

SEQ ID NO: 2351757 - DNA, 25 bp, Homo sapien
caccagaatgcttttgcgagagcta

SEQ ID NO: 2351758 - DNA, 25 bp, Homo sapien
tttgaatgacatacgacctgctcga

SEQ ID NO: 2351759 - DNA, 25 bp, Homo sapien
taagcaactgtaccaaaaagcacgc

SEQ ID NO: 2351760 - DNA, 25 bp, Homo sapien
cataggctcacctcactggattggg

SEQ ID NO: 2351761 - DNA, 25 bp, Homo sapien
ggtaaaacctttgccaatctgagtg

SEQ ID NO: 2351762 - DNA, 25 bp, Homo sapien
aaaggttagtcaatgatggctccag

SEQ ID NO: 2351763 - DNA, 25 bp, Homo sapien
ccatatgaggtaggacagatgcctc

SEQ ID NO: 2351764 - DNA, 25 bp, Homo sapien
attccaagtatattctcctaccttc

SEQ ID NO: 2351765 - DNA, 25 bp, Homo sapien
tccaagtatattctcctaccttcat

SEQ ID NO: 2351766 - DNA, 25 bp, Homo sapien
gattccaagtatattctcctacctt

SEQ ID NO: 2351767 - DNA, 25 bp, Homo sapien
ttccaagtatattctcctaccttca

SEQ ID NO: 2351768 - DNA, 25 bp, Homo sapien
cccatccagtgacacaagtaatttg

SEQ ID NO: 2351769 - DNA, 25 bp, Homo sapien
ggtaaatccttcctgttatctgaag

SEQ ID NO: 2351770 - DNA, 25 bp, Homo sapien
taaacactcaaaattgcaccagcag

SEQ ID NO: 2351771 - DNA, 25 bp, Homo sapien
gaaactggcatattcccatttctca

SEQ ID NO: 2351772 - DNA, 25 bp, Homo sapien
ggtagagcctctcaagatagcaaga

SEQ ID NO: 2351773 - DNA, 25 bp, Homo sapien
tgcatgaatatatggctccaaagac

SEQ ID NO: 2351774 - DNA, 25 bp, Homo sapien
tctgagttgcgacaattagaggtta

SEQ ID NO: 2351775 - DNA, 25 bp, Homo sapien
tatgtaagctacctggaacagagtc

SEQ ID NO: 2351776 - DNA, 25 bp, Homo sapien
gagatatgatcctccctcgtgggtg

SEQ ID NO: 2351777 - DNA, 25 bp, Homo sapien
ttctgcaaattacaggactctccag

SEQ ID NO: 2351778 - DNA, 25 bp, Homo sapien
gaggattttggtagcatggaactca

SEQ ID NO: 2351779 - DNA, 25 bp, Homo sapien
cagagcatagtcgttcctatgtggg

SEQ ID NO: 2351780 - DNA, 25 bp, Homo sapien
aagcaaactcttctactaacaaagc

SEQ ID NO: 2351781 - DNA, 25 bp, Homo sapien
tggaggagagcctagtttgcttgtc

SEQ ID NO: 2351782 - DNA, 25 bp, Homo sapien
cctagtttgcttgtcaggactcctt

SEQ ID NO: 2351783 - DNA, 25 bp, Homo sapien
gcaaactcttctactaacaaagctg

SEQ ID NO: 2351784 - DNA, 25 bp, Homo sapien
aagatgggtcacagggtttagcaca

SEQ ID NO: 2351785 - DNA, 25 bp, Homo sapien
gcaggctgcttaatcaggttgcaca

SEQ ID NO: 2351786 - DNA, 25 bp, Homo sapien
ggcattacaggaccaggagtgtcaa

SEQ ID NO: 2351787 - DNA, 25 bp, Homo sapien
gagagtagcacactcctagcaggct

SEQ ID NO: 2351788 - DNA, 25 bp, Homo sapien
tactacttaaattatccatagggaa

SEQ ID NO: 2351789 - DNA, 25 bp, Homo sapien
cttctgcataatcattaatacgatt

SEQ ID NO: 2351790 - DNA, 25 bp, Homo sapien
cagaaaagtatctgatgcgtgcatc

SEQ ID NO: 2351791 - DNA, 25 bp, Homo sapien
ctgatgcgtgcatcttttgatttct

SEQ ID NO: 2351792 - DNA, 25 bp, Homo sapien
caagggagcagtaagtggaaagttg

SEQ ID NO: 2351793 - DNA, 25 bp, Homo sapien
cacagtgtgatcctttagcaagaac

SEQ ID NO: 2351794 - DNA, 25 bp, Homo sapien
tagattccacagtgtgatcctttag

SEQ ID NO: 2351795 - DNA, 25 bp, Homo sapien
aaagttgtcatggttgtagattcca

SEQ ID NO: 2351796 - DNA, 25 bp, Homo sapien
tcttgcaagtaatcactccaggctt

SEQ ID NO: 2351797 - DNA, 25 bp, Homo sapien
tccgtcgacttatccagcatctgag

SEQ ID NO: 2351798 - DNA, 25 bp, Homo sapien
aatgtcatcccaaagcgattctgcc

SEQ ID NO: 2351799 - DNA, 25 bp, Homo sapien
aataggtaggcttttctcttgcaag

SEQ ID NO: 2351800 - DNA, 25 bp, Homo sapien
ctttgtctaaggcaggtctccagta

SEQ ID NO: 2351801 - DNA, 25 bp, Homo sapien
cattttctgctgactccgtgtgggt

SEQ ID NO: 2351802 - DNA, 25 bp, Homo sapien
tcattactggaccactggatgagca

SEQ ID NO: 2351803 - DNA, 25 bp, Homo sapien
tggaattattcacagcacgagctct

SEQ ID NO: 2351804 - DNA, 25 bp, Homo sapien
cataaagcactagagtgaatttatc

SEQ ID NO: 2351805 - DNA, 25 bp, Homo sapien
gcttccatccctacatgagacttta

SEQ ID NO: 2351806 - DNA, 25 bp, Homo sapien
tttcacaatgtatttcatggcttcc

SEQ ID NO: 2351807 - DNA, 25 bp, Homo sapien
gaataaaaagccataaagcactaga

SEQ ID NO: 2351808 - DNA, 25 bp, Homo sapien
tctcagctgtcaaatctaaggataa

SEQ ID NO: 2351809 - DNA, 25 bp, Homo sapien
tgattacgaatatgaatccacctag

SEQ ID NO: 2351810 - DNA, 25 bp, Homo sapien
aatgtgcaaacccaaatgtgcatgt

SEQ ID NO: 2351811 - DNA, 25 bp, Homo sapien
gagctatacactaaatcttgtctcc

SEQ ID NO: 2351812 - DNA, 25 bp, Homo sapien
tcaacaggtggcgaaagaaggcata

SEQ ID NO: 2351813 - DNA, 25 bp, Homo sapien
ttgaatgctgcctacccgactggtg

SEQ ID NO: 2351814 - DNA, 25 bp, Homo sapien
tccaagagggcaagtctgatttgtc

SEQ ID NO: 2351815 - DNA, 25 bp, Homo sapien
gcttgggagtagagaaatctggacc

SEQ ID NO: 2351816 - DNA, 25 bp, Homo sapien
tcaggaggagttgatctagcccatc

SEQ ID NO: 2351817 - DNA, 25 bp, Homo sapien
cttggcggatttatggctctcagga

SEQ ID NO: 2351818 - DNA, 25 bp, Homo sapien
cattgtaccacacccttacatggaa

SEQ ID NO: 2351819 - DNA, 25 bp, Homo sapien
tcacatagttgaagcggcagagaga

SEQ ID NO: 2351820 - DNA, 25 bp, Homo sapien
tattgatccaacctaggcatttagg

SEQ ID NO: 2351821 - DNA, 25 bp, Homo sapien
tacggaaaggaggtgcaactagaca

SEQ ID NO: 2351822 - DNA, 25 bp, Homo sapien
ggcatttaggccacatacggaaagg

SEQ ID NO: 2351823 - DNA, 25 bp, Homo sapien
ccaaggtgctgttttagactaacat

SEQ ID NO: 2351824 - DNA, 25 bp, Homo sapien
ttctcatagactgatcctttatgaa

SEQ ID NO: 2351825 - DNA, 25 bp, Homo sapien
catagactgatcctttatgaataac

SEQ ID NO: 2351826 - DNA, 25 bp, Homo sapien
ctcatagactgatcctttatgaata

SEQ ID NO: 2351827 - DNA, 25 bp, Homo sapien
tagactgatcctttatgaataacca

SEQ ID NO: 2351828 - DNA, 25 bp, Homo sapien
ccttgcccactctctcttataccaa

SEQ ID NO: 2351829 - DNA, 25 bp, Homo sapien
cccttgcccactctctcttatacca

SEQ ID NO: 2351830 - DNA, 25 bp, Homo sapien
cttgcccactctctcttataccaac

SEQ ID NO: 2351831 - DNA, 25 bp, Homo sapien
ttccatgggatataaatagtacctc

SEQ ID NO: 2351832 - DNA, 25 bp, Homo sapien
aattggctggctaagtcccatttta

SEQ ID NO: 2351833 - DNA, 25 bp, Homo sapien
tttactctcttgtacccagggctca

SEQ ID NO: 2351834 - DNA, 25 bp, Homo sapien
ccattttactctcttgtacccaggg

SEQ ID NO: 2351835 - DNA, 25 bp, Homo sapien
cagcggccatgttgaaataggaaca

SEQ ID NO: 2351836 - DNA, 25 bp, Homo sapien
ggccaacctcttggatgtcccatag

SEQ ID NO: 2351837 - DNA, 25 bp, Homo sapien
tagtcaatcttatggacaaacttga

SEQ ID NO: 2351838 - DNA, 25 bp, Homo sapien
tttctgctgctgacccgctctgtag

SEQ ID NO: 2351839 - DNA, 25 bp, Homo sapien
tcatttgtattccttcagcacatac

SEQ ID NO: 2351840 - DNA, 25 bp, Homo sapien
gaagtcatttgtattccttcagcac

SEQ ID NO: 2351841 - DNA, 25 bp, Homo sapien
tcctgaagtcatttgtattccttca

SEQ ID NO: 2351842 - DNA, 25 bp, Homo sapien
aagtcatttgtattccttcagcaca

SEQ ID NO: 2351843 - DNA, 25 bp, Homo sapien
ctcttgcttttccagatttgctcca

SEQ ID NO: 2351844 - DNA, 25 bp, Homo sapien
catctcttctccactgagtctttca

SEQ ID NO: 2351845 - DNA, 25 bp, Homo sapien
gcttttccagatttgctccatctct

SEQ ID NO: 2351846 - DNA, 25 bp, Homo sapien
cttgcttttccagatttgctccatc

SEQ ID NO: 2351847 - DNA, 25 bp, Homo sapien
cctgcgcccctgccttttggtcaat

SEQ ID NO: 2351848 - DNA, 25 bp, Homo sapien
agatcatggtaaattctgtacccca

SEQ ID NO: 2351849 - DNA, 25 bp, Homo sapien
ttctgtaccccagctgagttttggg

SEQ ID NO: 2351850 - DNA, 25 bp, Homo sapien
ttagtatcggacagaggacatctgg

SEQ ID NO: 2351851 - DNA, 25 bp, Homo sapien
tatcggacagaggacatctggtacc

SEQ ID NO: 2351852 - DNA, 25 bp, Homo sapien
ctggacaaaattccggttggctaat

SEQ ID NO: 2351853 - DNA, 25 bp, Homo sapien
gacaagattgttgtggttgctgctt

SEQ ID NO: 2351854 - DNA, 25 bp, Homo sapien
tccggttggctaatgtgcagaaact

SEQ ID NO: 2351855 - DNA, 25 bp, Homo sapien
atgtgcagaaactcttgctcttgtc

SEQ ID NO: 2351856 - DNA, 25 bp, Homo sapien
tgacaattgctgattaccaggtagc

SEQ ID NO: 2351857 - DNA, 25 bp, Homo sapien
cagttgacaattgctgattaccagg

SEQ ID NO: 2351858 - DNA, 25 bp, Homo sapien
tctttcagttgacaattgctgatta

SEQ ID NO: 2351859 - DNA, 25 bp, Homo sapien
acaattgctgattaccaggtagcag

SEQ ID NO: 2351860 - DNA, 25 bp, Homo sapien
ttttttcacatagccagacttaggg

SEQ ID NO: 2351861 - DNA, 25 bp, Homo sapien
acttctaagcaggattttaccaggc

SEQ ID NO: 2351862 - DNA, 25 bp, Homo sapien
taccaggctaacatacgtcgtaact

SEQ ID NO: 2351863 - DNA, 25 bp, Homo sapien
cttgtttccatgagacacccttagg

SEQ ID NO: 2351864 - DNA, 25 bp, Homo sapien
tcttgagttgtgcagccttgaaagg

SEQ ID NO: 2351865 - DNA, 25 bp, Homo sapien
agttccagtttcttgagttgtgcag

SEQ ID NO: 2351866 - DNA, 25 bp, Homo sapien
tccagtttcttgagttgtgcagcct

SEQ ID NO: 2351867 - DNA, 25 bp, Homo sapien
agtttcttgagttgtgcagccttga

SEQ ID NO: 2351868 - DNA, 25 bp, Homo sapien
gtgtctgtccaaccattccagttga

SEQ ID NO: 2351869 - DNA, 25 bp, Homo sapien
ccaaccattccagttgaaaaaggag

SEQ ID NO: 2351870 - DNA, 25 bp, Homo sapien
tatgtgtctgtccaaccattccagt

SEQ ID NO: 2351871 - DNA, 25 bp, Homo sapien
atgctcattatgtgtctgtccaacc

SEQ ID NO: 2351872 - DNA, 25 bp, Homo sapien
catggaaatgccactctaaatgctt

SEQ ID NO: 2351873 - DNA, 25 bp, Homo sapien
tcatggaaatgccactctaaatgct

SEQ ID NO: 2351874 - DNA, 25 bp, Homo sapien
atggaaatgccactctaaatgcttc

SEQ ID NO: 2351875 - DNA, 25 bp, Homo sapien
aggtgatgccctgtcctgctttgac

SEQ ID NO: 2351876 - DNA, 25 bp, Homo sapien
tggagtcccttcattgtaattacag

SEQ ID NO: 2351877 - DNA, 25 bp, Homo sapien
tccagaagtatctgtgggcaggctt

SEQ ID NO: 2351878 - DNA, 25 bp, Homo sapien
tggtattcttgttgatggagtccct

SEQ ID NO: 2351879 - DNA, 25 bp, Homo sapien
ctccttgttgaaaagaatggcctcc

SEQ ID NO: 2351880 - DNA, 25 bp, Homo sapien
ctcccatcgccagatggtcatacat

SEQ ID NO: 2351881 - DNA, 25 bp, Homo sapien
cattctttgactggtctccttgttg

SEQ ID NO: 2351882 - DNA, 25 bp, Homo sapien
gaatggcctcccatcgccagatggt

SEQ ID NO: 2351883 - DNA, 25 bp, Homo sapien
tgcaaatcctatccagtaaaatttt

SEQ ID NO: 2351884 - DNA, 25 bp, Homo sapien
tctatctttctttgttacattaaca

SEQ ID NO: 2351885 - DNA, 25 bp, Homo sapien
tgctgcaaatcctatccagtaaaat

SEQ ID NO: 2351886 - DNA, 25 bp, Homo sapien
tctgagcatattgggcatatttaac

SEQ ID NO: 2351887 - DNA, 25 bp, Homo sapien
ttgaatattggagaagaatcatcac

SEQ ID NO: 2351888 - DNA, 25 bp, Homo sapien
gaatattggagaagaatcatcactg

SEQ ID NO: 2351889 - DNA, 25 bp, Homo sapien
tgaatattggagaagaatcatcact

SEQ ID NO: 2351890 - DNA, 25 bp, Homo sapien
cttgaatattggagaagaatcatca

SEQ ID NO: 2351891 - DNA, 25 bp, Homo sapien
gagccctgtttctccagtctgacat

SEQ ID NO: 2351892 - DNA, 25 bp, Homo sapien
gcctgattgaaaactgagccctgtt

SEQ ID NO: 2351893 - DNA, 25 bp, Homo sapien
caggcccagtataaagaagttgagg

SEQ ID NO: 2351894 - DNA, 25 bp, Homo sapien
cagcctggtgaagcaagacagcaca

SEQ ID NO: 2351895 - DNA, 25 bp, Homo sapien
agcaagcttctccagcacaacttca

SEQ ID NO: 2351896 - DNA, 25 bp, Homo sapien
gcttctccagcacaacttcactcat

SEQ ID NO: 2351897 - DNA, 25 bp, Homo sapien
ttccagcaagcttctccagcacaac

SEQ ID NO: 2351898 - DNA, 25 bp, Homo sapien
ttgccactttccagcaagcttctcc

SEQ ID NO: 2351899 - DNA, 25 bp, Homo sapien
tctgccattaccataagctccatgg

SEQ ID NO: 2351900 - DNA, 25 bp, Homo sapien
cagaaaaggctctgccattaccata

SEQ ID NO: 2351901 - DNA, 25 bp, Homo sapien
gcattattcagaaggcaccgcttac

SEQ ID NO: 2351902 - DNA, 25 bp, Homo sapien
taagctccatggcattattcagaag

SEQ ID NO: 2351903 - DNA, 25 bp, Homo sapien
tatggaacagttaatgtgagctcgc

SEQ ID NO: 2351904 - DNA, 25 bp, Homo sapien
caagtcagaatctaaaagtccaggt

SEQ ID NO: 2351905 - DNA, 25 bp, Homo sapien
gaataactcacaagccctgaagtcc

SEQ ID NO: 2351906 - DNA, 25 bp, Homo sapien
aagtccaggtgcatcttaactctga

SEQ ID NO: 2351907 - DNA, 25 bp, Homo sapien
agtaatggaggccttgctgtagtcc

SEQ ID NO: 2351908 - DNA, 25 bp, Homo sapien
taatggaggccttgctgtagtccaa

SEQ ID NO: 2351909 - DNA, 25 bp, Homo sapien
tacttgccaagagagctggtaatgc

SEQ ID NO: 2351910 - DNA, 25 bp, Homo sapien
tccaatacttgccaagagagctggt

SEQ ID NO: 2351911 - DNA, 25 bp, Homo sapien
cccctctggtggttagagcaggaaa

SEQ ID NO: 2351912 - DNA, 25 bp, Homo sapien
tagcaatggcctttacagagacaca

SEQ ID NO: 2351913 - DNA, 25 bp, Homo sapien
agcaggaaagggcatcaatttcaag

SEQ ID NO: 2351914 - DNA, 25 bp, Homo sapien
tccatgcttcttagcaatggccttt

SEQ ID NO: 2351915 - DNA, 25 bp, Homo sapien
caaaaggtgaaccagcttctcaagg

SEQ ID NO: 2351916 - DNA, 25 bp, Homo sapien
gagccctctatgaactgatcatgca

SEQ ID NO: 2351917 - DNA, 25 bp, Homo sapien
tgaagcttgcccatgtgtaggtcct

SEQ ID NO: 2351918 - DNA, 25 bp, Homo sapien
tcttcatcttacaggagagggctct

SEQ ID NO: 2351919 - DNA, 25 bp, Homo sapien
ctgaaagtactccttctgacgcatt

SEQ ID NO: 2351920 - DNA, 25 bp, Homo sapien
tggaaggcaggttgacctcttgtgt

SEQ ID NO: 2351921 - DNA, 25 bp, Homo sapien
aaagtactccttctgacgcattcat

SEQ ID NO: 2351922 - DNA, 25 bp, Homo sapien
gaaggcaggttgacctcttgtgtct

SEQ ID NO: 2351923 - DNA, 25 bp, Homo sapien
tacaggggccctcaatcactttctc

SEQ ID NO: 2351924 - DNA, 25 bp, Homo sapien
tgtcctccatcagaatgcctttcac

SEQ ID NO: 2351925 - DNA, 25 bp, Homo sapien
ctttcactgatggtcggatacaggg

SEQ ID NO: 2351926 - DNA, 25 bp, Homo sapien
tcagaatgcctttcactgatggtcg

SEQ ID NO: 2351927 - DNA, 25 bp, Homo sapien
aaactaaggcaaagataactgtagc

SEQ ID NO: 2351928 - DNA, 25 bp, Homo sapien
gctgtataggtaaaatgcttaagta

SEQ ID NO: 2351929 - DNA, 25 bp, Homo sapien
tgcttaagtaaactaaggcaaagat

SEQ ID NO: 2351930 - DNA, 25 bp, Homo sapien
ttgaagatccgttcatgtccctggc

SEQ ID NO: 2351931 - DNA, 25 bp, Homo sapien
catgatgtttggctgaagtctgctt

SEQ ID NO: 2351932 - DNA, 25 bp, Homo sapien
gcttattgctaacttggtgtcatgg

SEQ ID NO: 2351933 - DNA, 25 bp, Homo sapien
gaagtctgcttattgctaacttggt

SEQ ID NO: 2351934 - DNA, 25 bp, Homo sapien
tggctgaagtctgcttattgctaac

SEQ ID NO: 2351935 - DNA, 25 bp, Homo sapien
ccttttgggaccctgatgacctcca

SEQ ID NO: 2351936 - DNA, 25 bp, Homo sapien
cttttgggaccctgatgacctccat

SEQ ID NO: 2351937 - DNA, 25 bp, Homo sapien
caatccttttgggaccctgatgacc

SEQ ID NO: 2351938 - DNA, 25 bp, Homo sapien
atccttttgggaccctgatgacctc

SEQ ID NO: 2351939 - DNA, 25 bp, Homo sapien
tgctttaatcctctgtactgggtat

SEQ ID NO: 2351940 - DNA, 25 bp, Homo sapien
ctgtactgggtatctagggatcccc

SEQ ID NO: 2351941 - DNA, 25 bp, Homo sapien
gggtccgtaagagttcaagttctca

SEQ ID NO: 2351942 - DNA, 25 bp, Homo sapien
cagggtccgtaagagttcaagttct

SEQ ID NO: 2351943 - DNA, 25 bp, Homo sapien
ttttcccaagacagttcggctccca

SEQ ID NO: 2351944 - DNA, 25 bp, Homo sapien
tttcccaagacagttcggctcccac

SEQ ID NO: 2351945 - DNA, 25 bp, Homo sapien
tgaattgaattgagggatacccaga

SEQ ID NO: 2351946 - DNA, 25 bp, Homo sapien
tcagttgaccattagaattgctgcc

SEQ ID NO: 2351947 - DNA, 25 bp, Homo sapien
tggccttatgtgactgagccctcag

SEQ ID NO: 2351948 - DNA, 25 bp, Homo sapien
aggcctctatgtaccacagtatgga

SEQ ID NO: 2351949 - DNA, 25 bp, Homo sapien
caatgttgtaatctgtttgtaatta

SEQ ID NO: 2351950 - DNA, 25 bp, Homo sapien
taattaggaccactcgaaaaatcca

SEQ ID NO: 2351951 - DNA, 25 bp, Homo sapien
tctgtttgtaattaggaccactcga

SEQ ID NO: 2351952 - DNA, 25 bp, Homo sapien
tgtaatctgtttgtaattaggacca

SEQ ID NO: 2351953 - DNA, 25 bp, Homo sapien
ctgtttggaatgttcgtcctgctca

SEQ ID NO: 2351954 - DNA, 25 bp, Homo sapien
tgtttggaatgttcgtcctgctcat

SEQ ID NO: 2351955 - DNA, 25 bp, Homo sapien
tggaatgttcgtcctgctcatccat

SEQ ID NO: 2351956 - DNA, 25 bp, Homo sapien
tttggaatgttcgtcctgctcatcc

SEQ ID NO: 2351957 - DNA, 25 bp, Homo sapien
ctctgttataaggatctttgtggct

SEQ ID NO: 2351958 - DNA, 25 bp, Homo sapien
taaggatctttgtggctatgacctc

SEQ ID NO: 2351959 - DNA, 25 bp, Homo sapien
tgttataaggatctttgtggctatg

SEQ ID NO: 2351960 - DNA, 25 bp, Homo sapien
gatctttgtggctatgacctctgct

SEQ ID NO: 2351961 - DNA, 25 bp, Homo sapien
gggatgcccgattataatgacaacg

SEQ ID NO: 2351962 - DNA, 25 bp, Homo sapien
tcttgggtgaagtcaatgggatgcc

SEQ ID NO: 2351963 - DNA, 25 bp, Homo sapien
gacaacgtcatttttatctgcatcc

SEQ ID NO: 2351964 - DNA, 25 bp, Homo sapien
cctttagcaggctcatagatgcaca

SEQ ID NO: 2351965 - DNA, 25 bp, Homo sapien
gcattgtaagttttggccagttgca

SEQ ID NO: 2351966 - DNA, 25 bp, Homo sapien
ttccatagattcctctttctcatgc

SEQ ID NO: 2351967 - DNA, 25 bp, Homo sapien
cactgtggaagtgtgtcctttgtgt

SEQ ID NO: 2351968 - DNA, 25 bp, Homo sapien
gtgtcctttgtgtggtcaattccaa

SEQ ID NO: 2351969 - DNA, 25 bp, Homo sapien
gcccatttgctcacacacatagctg

SEQ ID NO: 2351970 - DNA, 25 bp, Homo sapien
tgttgaataatgcatcttcaaactg

SEQ ID NO: 2351971 - DNA, 25 bp, Homo sapien
aaattaaaggctattgctgcttgtt

SEQ ID NO: 2351972 - DNA, 25 bp, Homo sapien
taagtgaaaattaaaggctattgct

SEQ ID NO: 2351973 - DNA, 25 bp, Homo sapien
gcaggatggccagacctgtgttgta

SEQ ID NO: 2351974 - DNA, 25 bp, Homo sapien
tgctttccaagcagctggttttctg

SEQ ID NO: 2351975 - DNA, 25 bp, Homo sapien
ttgggcttccccattagacagcagg

SEQ ID NO: 2351976 - DNA, 25 bp, Homo sapien
caagcagctggttttctgttgggct

SEQ ID NO: 2351977 - DNA, 25 bp, Homo sapien
aaagtggcctgatctgatgtgatct

SEQ ID NO: 2351978 - DNA, 25 bp, Homo sapien
taaagatacatagcaagatacaggg

SEQ ID NO: 2351979 - DNA, 25 bp, Homo sapien
gatctgatgtgatctaggaaggtga

SEQ ID NO: 2351980 - DNA, 25 bp, Homo sapien
aagatacagggtctggacttgattc

SEQ ID NO: 2351981 - DNA, 25 bp, Homo sapien
gatgttctgaccatgcgtacactta

SEQ ID NO: 2351982 - DNA, 25 bp, Homo sapien
aacaacacaacagtatgagaaaatg

SEQ ID NO: 2351983 - DNA, 25 bp, Homo sapien
tgtgtgaacgacatggatgttctga

SEQ ID NO: 2351984 - DNA, 25 bp, Homo sapien
gacgtctatggaaaatcaacaacac

SEQ ID NO: 2351985 - DNA, 25 bp, Homo sapien
tgtttctaaaagcattccctgctga

SEQ ID NO: 2351986 - DNA, 25 bp, Homo sapien
gcattccctgctgaaatgcatatgg

SEQ ID NO: 2351987 - DNA, 25 bp, Homo sapien
tcactaaagttactcagtgctcctg

SEQ ID NO: 2351988 - DNA, 25 bp, Homo sapien
gcctggagccccttaaatcactaaa

SEQ ID NO: 2351989 - DNA, 25 bp, Homo sapien
ctccctgctcgtaaccaagggtgtc

SEQ ID NO: 2351990 - DNA, 25 bp, Homo sapien
tcgtaaccaagggtgtctactccag

SEQ ID NO: 2351991 - DNA, 25 bp, Homo sapien
cctgctcgtaaccaagggtgtctac

SEQ ID NO: 2351992 - DNA, 25 bp, Homo sapien
caagggtgtctactccagaaacgcc

SEQ ID NO: 2351993 - DNA, 25 bp, Homo sapien
gaattgcacccctgtgtcgcagtga

SEQ ID NO: 2351994 - DNA, 25 bp, Homo sapien
gagcagaattgcacccctgtgtcgc

SEQ ID NO: 2351995 - DNA, 25 bp, Homo sapien
tagggatgagcagaattgcacccct

SEQ ID NO: 2351996 - DNA, 25 bp, Homo sapien
ctagggatgagcagaattgcacccc

SEQ ID NO: 2351997 - DNA, 25 bp, Homo sapien
tccgcattccgcttgagcagctcag

SEQ ID NO: 2351998 - DNA, 25 bp, Homo sapien
taaaggacaagaagacgaagccagt

SEQ ID NO: 2351999 - DNA, 25 bp, Homo sapien
gctctgggcaaatgagagtcaaggt

SEQ ID NO: 2352000 - DNA, 25 bp, Homo sapien
gagtcaaggtatgctctctgtagag

SEQ ID NO: 2352001 - DNA, 25 bp, Homo sapien
tccctggaatcagtgatccagtgag

SEQ ID NO: 2352002 - DNA, 25 bp, Homo sapien
gagtcacttcacgtcctttggtcag

SEQ ID NO: 2352003 - DNA, 25 bp, Homo sapien
agtgagtcacttcacgtcctttggt

SEQ ID NO: 2352004 - DNA, 25 bp, Homo sapien
tggaatcagtgatccagtgagtcac

SEQ ID NO: 2352005 - DNA, 25 bp, Homo sapien
gcactgagatctccaaccacaatct

SEQ ID NO: 2352006 - DNA, 25 bp, Homo sapien
ggcagcaaagaggactaggagaata

SEQ ID NO: 2352007 - DNA, 25 bp, Homo sapien
tcttagttttggcactgagatctcc

SEQ ID NO: 2352008 - DNA, 25 bp, Homo sapien
gaagttggcataagcctgtcccagt

SEQ ID NO: 2352009 - DNA, 25 bp, Homo sapien
cattcggagatgaaggtgataagac

SEQ ID NO: 2352010 - DNA, 25 bp, Homo sapien
tatccactggacacctctgttgcat

SEQ ID NO: 2352011 - DNA, 25 bp, Homo sapien
tgttgcatgaacctcccacaggtca

SEQ ID NO: 2352012 - DNA, 25 bp, Homo sapien
catgctgtgttgaaggtctatccac

SEQ ID NO: 2352013 - DNA, 25 bp, Homo sapien
ggaagcatctataggtcctcacaca

SEQ ID NO: 2352014 - DNA, 25 bp, Homo sapien
ggcaggaagcatctataggtcctca

SEQ ID NO: 2352015 - DNA, 25 bp, Homo sapien
caggaagcatctataggtcctcaca

SEQ ID NO: 2352016 - DNA, 25 bp, Homo sapien
gaagcatctataggtcctcacacat

SEQ ID NO: 2352017 - DNA, 25 bp, Homo sapien
gcctgagtgactccctattaatcaa

SEQ ID NO: 2352018 - DNA, 25 bp, Homo sapien
aatacagtgggaatgatgcttcatg

SEQ ID NO: 2352019 - DNA, 25 bp, Homo sapien
catctttgcactggactggcctgag

SEQ ID NO: 2352020 - DNA, 25 bp, Homo sapien
taggttagaaaatctgtgcagcttc

SEQ ID NO: 2352021 - DNA, 25 bp, Homo sapien
gaccgctcttggtccatctggccag

SEQ ID NO: 2352022 - DNA, 25 bp, Homo sapien
tagtaatgaccgctcttggtccatc

SEQ ID NO: 2352023 - DNA, 25 bp, Homo sapien
taatgaccgctcttggtccatctgg

SEQ ID NO: 2352024 - DNA, 25 bp, Homo sapien
ttttagtaatgaccgctcttggtcc

SEQ ID NO: 2352025 - DNA, 25 bp, Homo sapien
cagcaaacgctgtgaagtaggaaca

SEQ ID NO: 2352026 - DNA, 25 bp, Homo sapien
cacagagtatcccactggctaagct

SEQ ID NO: 2352027 - DNA, 25 bp, Homo sapien
ttaagtcacggtcagtcccatggca

SEQ ID NO: 2352028 - DNA, 25 bp, Homo sapien
acctggccttatctacaatcttgag

SEQ ID NO: 2352029 - DNA, 25 bp, Homo sapien
gcagctgtattgtttgtcatctgcc

SEQ ID NO: 2352030 - DNA, 25 bp, Homo sapien
ctgctgtcactgaaagttatcagca

SEQ ID NO: 2352031 - DNA, 25 bp, Homo sapien
cagcatgtgtccatccatataccca

SEQ ID NO: 2352032 - DNA, 25 bp, Homo sapien
catcattccaatctcagcagctgta

SEQ ID NO: 2352033 - DNA, 25 bp, Homo sapien
tgcacaatcacataatgtaaagccc

SEQ ID NO: 2352034 - DNA, 25 bp, Homo sapien
aagcccaggagctgactgtattttg

SEQ ID NO: 2352035 - DNA, 25 bp, Homo sapien
caataaggcccgatgtgcacaatca

SEQ ID NO: 2352036 - DNA, 25 bp, Homo sapien
ttggctgagcttgagaaaggaaatg

SEQ ID NO: 2352037 - DNA, 25 bp, Homo sapien
gcctgaggctgtgagtaccatcttt

SEQ ID NO: 2352038 - DNA, 25 bp, Homo sapien
cacctgttgacaaggctgtgccaaa

SEQ ID NO: 2352039 - DNA, 25 bp, Homo sapien
tgacaatctcatggcagcttgcctg

SEQ ID NO: 2352040 - DNA, 25 bp, Homo sapien
cagtcgtgggttctcatcctggacc

SEQ ID NO: 2352041 - DNA, 25 bp, Homo sapien
ccaagagaccctctttgttctttgc

SEQ ID NO: 2352042 - DNA, 25 bp, Homo sapien
tttggaattgttttcagctccaaga

SEQ ID NO: 2352043 - DNA, 25 bp, Homo sapien
cagctccaagagaccctctttgttc

SEQ ID NO: 2352044 - DNA, 25 bp, Homo sapien
ctccaagagaccctctttgttcttt

SEQ ID NO: 2352045 - DNA, 25 bp, Homo sapien
tatttttactgattccaccagctag

SEQ ID NO: 2352046 - DNA, 25 bp, Homo sapien
cctaataatgcggtttggatggaaa

SEQ ID NO: 2352047 - DNA, 25 bp, Homo sapien
ttactgattccaccagctaggcctc

SEQ ID NO: 2352048 - DNA, 25 bp, Homo sapien
ataatgcggtttggatggaaataga

SEQ ID NO: 2352049 - DNA, 25 bp, Homo sapien
tttctgcagatctaagttcttaact

SEQ ID NO: 2352050 - DNA, 25 bp, Homo sapien
cattttcccttgttggaaaatggca

SEQ ID NO: 2352051 - DNA, 25 bp, Homo sapien
gcttccatcattttcccttgttgga

SEQ ID NO: 2352052 - DNA, 25 bp, Homo sapien
tcaatgccagatcagttttcacctt

SEQ ID NO: 2352053 - DNA, 25 bp, Homo sapien
tctcccaatctagggatgtgatctg

SEQ ID NO: 2352054 - DNA, 25 bp, Homo sapien
tcccaatctagggatgtgatctggt

SEQ ID NO: 2352055 - DNA, 25 bp, Homo sapien
ctctcccaatctagggatgtgatct

SEQ ID NO: 2352056 - DNA, 25 bp, Homo sapien
ccaatctagggatgtgatctggtgt

SEQ ID NO: 2352057 - DNA, 25 bp, Homo sapien
ctgctgtccttttgtcaggccaccg

SEQ ID NO: 2352058 - DNA, 25 bp, Homo sapien
ctgtccttttgtcaggccaccgcat

SEQ ID NO: 2352059 - DNA, 25 bp, Homo sapien
ctagcgcaggtgacttctcgttttt

SEQ ID NO: 2352060 - DNA, 25 bp, Homo sapien
gagcctagcgcaggtgacttctcgt

SEQ ID NO: 2352061 - DNA, 25 bp, Homo sapien
ggtagagcctagcgcaggtgacttc

SEQ ID NO: 2352062 - DNA, 25 bp, Homo sapien
tagagcctagcgcaggtgacttctc

SEQ ID NO: 2352063 - DNA, 25 bp, Homo sapien
tctccatcactgacaggtagtgaca

SEQ ID NO: 2352064 - DNA, 25 bp, Homo sapien
ctccatcactgacaggtagtgacaa

SEQ ID NO: 2352065 - DNA, 25 bp, Homo sapien
ccggcaggggcgtctttctttggct

SEQ ID NO: 2352066 - DNA, 25 bp, Homo sapien
ggagacaaggcaaatggtgcattcc

SEQ ID NO: 2352067 - DNA, 25 bp, Homo sapien
tccatctgtgatggagacaaggcaa

SEQ ID NO: 2352068 - DNA, 25 bp, Homo sapien
aaatggtgcattccccacatccggc

SEQ ID NO: 2352069 - DNA, 25 bp, Homo sapien
cacaaggtgcactagtttctggagc

SEQ ID NO: 2352070 - DNA, 25 bp, Homo sapien
gaatgcacaaggtgcactagtttct

SEQ ID NO: 2352071 - DNA, 25 bp, Homo sapien
aaggtgcactagtttctggagcagg

SEQ ID NO: 2352072 - DNA, 25 bp, Homo sapien
gagggaatgcacaaggtgcactagt

SEQ ID NO: 2352073 - DNA, 25 bp, Homo sapien
tttctctccgctatggccccttctg

SEQ ID NO: 2352074 - DNA, 25 bp, Homo sapien
tctccgctatggccccttctgttga

SEQ ID NO: 2352075 - DNA, 25 bp, Homo sapien
cttttctctccgctatggccccttc

SEQ ID NO: 2352076 - DNA, 25 bp, Homo sapien
gtgccttttctctccgctatggccc

SEQ ID NO: 2352077 - DNA, 25 bp, Homo sapien
aagttttcgtgaattaggttgactg

SEQ ID NO: 2352078 - DNA, 25 bp, Homo sapien
tgactgtggtctgtacattgagaag

SEQ ID NO: 2352079 - DNA, 25 bp, Homo sapien
ctggtatcaagggaatggactcttg

SEQ ID NO: 2352080 - DNA, 25 bp, Homo sapien
agaagtaagctggtatcaagggaat

SEQ ID NO: 2352081 - DNA, 25 bp, Homo sapien
tccattcttatcccacctggcttct

SEQ ID NO: 2352082 - DNA, 25 bp, Homo sapien
ctggcttctcatttcttccttccag

SEQ ID NO: 2352083 - DNA, 25 bp, Homo sapien
cttctcatttcttccttccagctcc

SEQ ID NO: 2352084 - DNA, 25 bp, Homo sapien
ctccattcttatcccacctggcttc

SEQ ID NO: 2352085 - DNA, 25 bp, Homo sapien
aggaactttgaatgtggaaactgcc

SEQ ID NO: 2352086 - DNA, 25 bp, Homo sapien
caggaactttgaatgtggaaactgc

SEQ ID NO: 2352087 - DNA, 25 bp, Homo sapien
ggaactttgaatgtggaaactgcca

SEQ ID NO: 2352088 - DNA, 25 bp, Homo sapien
taagtaaatagaagccagttggccc

SEQ ID NO: 2352089 - DNA, 25 bp, Homo sapien
taataagaacaaatggctactaagg

SEQ ID NO: 2352090 - DNA, 25 bp, Homo sapien
tactaaggaccctcctaaagctgtc

SEQ ID NO: 2352091 - DNA, 25 bp, Homo sapien
ccctcctaaagctgtcaaattcatt

SEQ ID NO: 2352092 - DNA, 25 bp, Homo sapien
ttttgaagggcgactttcttgcatg

SEQ ID NO: 2352093 - DNA, 25 bp, Homo sapien
ggaggataaccacaatggagaggct

SEQ ID NO: 2352094 - DNA, 25 bp, Homo sapien
ctgaaaggaggataaccacaatgga

SEQ ID NO: 2352095 - DNA, 25 bp, Homo sapien
cttgcatgacttggtaagatctgaa

SEQ ID NO: 2352096 - DNA, 25 bp, Homo sapien
ggattttcccacaactaagtctgaa

SEQ ID NO: 2352097 - DNA, 25 bp, Homo sapien
caaacaggattttcccacaactaag

SEQ ID NO: 2352098 - DNA, 25 bp, Homo sapien
caactaagtctgaaatgtatattct

SEQ ID NO: 2352099 - DNA, 25 bp, Homo sapien
cccacaactaagtctgaaatgtata

SEQ ID NO: 2352100 - DNA, 25 bp, Homo sapien
catgaagtaactgtctcaggaagcc

SEQ ID NO: 2352101 - DNA, 25 bp, Homo sapien
tctcaggaagccgttggtaggagca

SEQ ID NO: 2352102 - DNA, 25 bp, Homo sapien
gatgtcctgggtctgcttagctgag

SEQ ID NO: 2352103 - DNA, 25 bp, Homo sapien
ttcaagttccgttagggagatgtcc

SEQ ID NO: 2352104 - DNA, 25 bp, Homo sapien
tttctggctagaaacccctggacac

SEQ ID NO: 2352105 - DNA, 25 bp, Homo sapien
cagttgatcttttcgccctcggtgt

SEQ ID NO: 2352106 - DNA, 25 bp, Homo sapien
cagaatacaaaatgctccgtgtgga

SEQ ID NO: 2352107 - DNA, 25 bp, Homo sapien
ccctcggtgtgttggcaagtactga

SEQ ID NO: 2352108 - DNA, 25 bp, Homo sapien
tggggaccctctattacatccattt

SEQ ID NO: 2352109 - DNA, 25 bp, Homo sapien
attggggaccctctattacatccat

SEQ ID NO: 2352110 - DNA, 25 bp, Homo sapien
ttggggaccctctattacatccatt

SEQ ID NO: 2352111 - DNA, 25 bp, Homo sapien
tgttaggtgtggatgtctgcagcat

SEQ ID NO: 2352112 - DNA, 25 bp, Homo sapien
ccaatccattccagtggcacttcaa

SEQ ID NO: 2352113 - DNA, 25 bp, Homo sapien
cattccagtggcacttcaatgggag

SEQ ID NO: 2352114 - DNA, 25 bp, Homo sapien
acggccaatccattccagtggcact

SEQ ID NO: 2352115 - DNA, 25 bp, Homo sapien
tggcacttcaatgggagactggaca

SEQ ID NO: 2352116 - DNA, 25 bp, Homo sapien
ccagagagtagacaaactttttcta

SEQ ID NO: 2352117 - DNA, 25 bp, Homo sapien
gcaggcgatagagaggactgtaatt

SEQ ID NO: 2352118 - DNA, 25 bp, Homo sapien
ctgtgtgtttaaggatcttgtaggc

SEQ ID NO: 2352119 - DNA, 25 bp, Homo sapien
tgtaattgtaaagcccacttccaga

SEQ ID NO: 2352120 - DNA, 25 bp, Homo sapien
taaaacatatacgagtcgtggctgg

SEQ ID NO: 2352121 - DNA, 25 bp, Homo sapien
ctagtacgataaaacatatacgagt

SEQ ID NO: 2352122 - DNA, 25 bp, Homo sapien
tacgataaaacatatacgagtcgtg

SEQ ID NO: 2352123 - DNA, 25 bp, Homo sapien
gataaaacatatacgagtcgtggct

SEQ ID NO: 2352124 - DNA, 25 bp, Homo sapien
acttcaagccgtgcagtggtctctt

SEQ ID NO: 2352125 - DNA, 25 bp, Homo sapien
tttagtgacctcagagtcacacttc

SEQ ID NO: 2352126 - DNA, 25 bp, Homo sapien
ctgtaaaacaattggaggatttcct

SEQ ID NO: 2352127 - DNA, 25 bp, Homo sapien
ggaggatttcctgtgtttagtgacc

SEQ ID NO: 2352128 - DNA, 25 bp, Homo sapien
gatataattgatctgttggtacata

SEQ ID NO: 2352129 - DNA, 25 bp, Homo sapien
gcttcaaactgatataattgatctg

SEQ ID NO: 2352130 - DNA, 25 bp, Homo sapien
cccagagagccttctggttgcactg

SEQ ID NO: 2352131 - DNA, 25 bp, Homo sapien
tacataataaccatgaccctgtgtc

SEQ ID NO: 2352132 - DNA, 25 bp, Homo sapien
catccccccctcccttcttgatcct

SEQ ID NO: 2352133 - DNA, 25 bp, Homo sapien
cccttcttgatcctctgaattttct

SEQ ID NO: 2352134 - DNA, 25 bp, Homo sapien
tgaggacacatctgggggaattctg

SEQ ID NO: 2352135 - DNA, 25 bp, Homo sapien
ctgaattttctctgaggacacatct

SEQ ID NO: 2352136 - DNA, 25 bp, Homo sapien
taggatactttttgcagcgtcttga

SEQ ID NO: 2352137 - DNA, 25 bp, Homo sapien
atactttttgcagcgtcttgaagat

SEQ ID NO: 2352138 - DNA, 25 bp, Homo sapien
ctaggatactttttgcagcgtcttg

SEQ ID NO: 2352139 - DNA, 25 bp, Homo sapien
ggatactttttgcagcgtcttgaag

SEQ ID NO: 2352140 - DNA, 25 bp, Homo sapien
cttttgccatttggcctgaaccatt

SEQ ID NO: 2352141 - DNA, 25 bp, Homo sapien
ctcctttacctggcccgttattcat

SEQ ID NO: 2352142 - DNA, 25 bp, Homo sapien
ggcctgaaccatttctctcctttac

SEQ ID NO: 2352143 - DNA, 25 bp, Homo sapien
cctttacctggcccgttattcatat

SEQ ID NO: 2352144 - DNA, 25 bp, Homo sapien
ccctctctagttcctggatttacag

SEQ ID NO: 2352145 - DNA, 25 bp, Homo sapien
tcctggatttacagtttctaatttc

SEQ ID NO: 2352146 - DNA, 25 bp, Homo sapien
ctagttcctggatttacagtttcta

SEQ ID NO: 2352147 - DNA, 25 bp, Homo sapien
cctccctctctagttcctggattta

SEQ ID NO: 2352148 - DNA, 25 bp, Homo sapien
ccttcagtgtagacttttaaggaag

SEQ ID NO: 2352149 - DNA, 25 bp, Homo sapien
cctttctttggatatgtaagccttc

SEQ ID NO: 2352150 - DNA, 25 bp, Homo sapien
gctgcttctatgagcctttctttgg

SEQ ID NO: 2352151 - DNA, 25 bp, Homo sapien
ttaaggaagatattgagagtttctt

SEQ ID NO: 2352152 - DNA, 25 bp, Homo sapien
catcacgccatgactggacctcttg

SEQ ID NO: 2352153 - DNA, 25 bp, Homo sapien
gtgcacatgaggatggtacaagcca

SEQ ID NO: 2352154 - DNA, 25 bp, Homo sapien
cataggtttcaggagtctgtgaagc

SEQ ID NO: 2352155 - DNA, 25 bp, Homo sapien
cagagcaaagcagcagtgacgttcc

SEQ ID NO: 2352156 - DNA, 25 bp, Homo sapien
ttctgaccctgtctcctcctggtac

SEQ ID NO: 2352157 - DNA, 25 bp, Homo sapien
tctgttctgaccctgtctcctcctg

SEQ ID NO: 2352158 - DNA, 25 bp, Homo sapien
catctgttctgaccctgtctcctcc

SEQ ID NO: 2352159 - DNA, 25 bp, Homo sapien
tgttctgaccctgtctcctcctggt

SEQ ID NO: 2352160 - DNA, 25 bp, Homo sapien
ttttcgttgctgttattaataacac

SEQ ID NO: 2352161 - DNA, 25 bp, Homo sapien
gctgttattaataacacgcttagct

SEQ ID NO: 2352162 - DNA, 25 bp, Homo sapien
cgttgctgttattaataacacgctt

SEQ ID NO: 2352163 - DNA, 25 bp, Homo sapien
tgctgttattaataacacgcttagc

SEQ ID NO: 2352164 - DNA, 25 bp, Homo sapien
cacctaaaggctgatcagttccttt

SEQ ID NO: 2352165 - DNA, 25 bp, Homo sapien
aaaacacattttcacctaaaggctg

SEQ ID NO: 2352166 - DNA, 25 bp, Homo sapien
tatctcagtgatcataaagcaagga

SEQ ID NO: 2352167 - DNA, 25 bp, Homo sapien
ccatgggttatgtcaatgtcaatta

SEQ ID NO: 2352168 - DNA, 25 bp, Homo sapien
tctagagacactaggcagcagaggg

SEQ ID NO: 2352169 - DNA, 25 bp, Homo sapien
caaagatatgattggatgctgaagc

SEQ ID NO: 2352170 - DNA, 25 bp, Homo sapien
gactttctgttgagagtcaaagata

SEQ ID NO: 2352171 - DNA, 25 bp, Homo sapien
cagagggtaggttttatccctgcaa

SEQ ID NO: 2352172 - DNA, 25 bp, Homo sapien
tctaagggtaatgttgtgctgctca

SEQ ID NO: 2352173 - DNA, 25 bp, Homo sapien
catatgcccttaacgggctgggtga

SEQ ID NO: 2352174 - DNA, 25 bp, Homo sapien
tgaagtcaggagctctggtttccat

SEQ ID NO: 2352175 - DNA, 25 bp, Homo sapien
tatgcatgggagtgaatattcgacc

SEQ ID NO: 2352176 - DNA, 25 bp, Homo sapien
tgccaatggagtgaccagaatgttc

SEQ ID NO: 2352177 - DNA, 25 bp, Homo sapien
tctttgtgccatgacatgtactgtc

SEQ ID NO: 2352178 - DNA, 25 bp, Homo sapien
gcaaagctaatctctttcctactgg

SEQ ID NO: 2352179 - DNA, 25 bp, Homo sapien
gaactggttatagctagactgaaaa

SEQ ID NO: 2352180 - DNA, 25 bp, Homo sapien
catgcgcacagcagtcgcttgcaat

SEQ ID NO: 2352181 - DNA, 25 bp, Homo sapien
taggtgatggaacttgggagggagc

SEQ ID NO: 2352182 - DNA, 25 bp, Homo sapien
tccggcaattagatcatgcgcacag

SEQ ID NO: 2352183 - DNA, 25 bp, Homo sapien
gagggagcgacgtttccggcaatta

SEQ ID NO: 2352184 - DNA, 25 bp, Homo sapien
tccccgatccctgcagctgttgtaa

SEQ ID NO: 2352185 - DNA, 25 bp, Homo sapien
cctccccgatccctgcagctgttgt

SEQ ID NO: 2352186 - DNA, 25 bp, Homo sapien
cccgatccctgcagctgttgtaatc

SEQ ID NO: 2352187 - DNA, 25 bp, Homo sapien
tctatgagagcctccccgatccctg

SEQ ID NO: 2352188 - DNA, 25 bp, Homo sapien
taagctactattatgctcagctggg

SEQ ID NO: 2352189 - DNA, 25 bp, Homo sapien
ggagagcctattgttgaccaagcac

SEQ ID NO: 2352190 - DNA, 25 bp, Homo sapien
gaacctgtatgtgccgtgtctgtgt

SEQ ID NO: 2352191 - DNA, 25 bp, Homo sapien
tatcacatgggtggcataacctgct

SEQ ID NO: 2352192 - DNA, 25 bp, Homo sapien
tatcttcttgcagaagatactttat

SEQ ID NO: 2352193 - DNA, 25 bp, Homo sapien
atcttcttgcagaagatactttatg

SEQ ID NO: 2352194 - DNA, 25 bp, Homo sapien
tatgcagagggcccaaattggcaaa

SEQ ID NO: 2352195 - DNA, 25 bp, Homo sapien
gcagagggcccaaattggcaaaact

SEQ ID NO: 2352196 - DNA, 25 bp, Homo sapien
cctcgacctctcaagcttatgcaat

SEQ ID NO: 2352197 - DNA, 25 bp, Homo sapien
gacctctcaagcttatgcaatcctc

SEQ ID NO: 2352198 - DNA, 25 bp, Homo sapien
tgggatcctagatagattatataat

SEQ ID NO: 2352199 - DNA, 25 bp, Homo sapien
gacttttagtaataagatgttggga

SEQ ID NO: 2352200 - DNA, 25 bp, Homo sapien
cttccggcttgaggagagaatatca

SEQ ID NO: 2352201 - DNA, 25 bp, Homo sapien
tgtgattccgtgtttctcatggatc

SEQ ID NO: 2352202 - DNA, 25 bp, Homo sapien
tctaaactgaaacagcgacagcatg

SEQ ID NO: 2352203 - DNA, 25 bp, Homo sapien
agctattcacgggtctgcagccatc

SEQ ID NO: 2352204 - DNA, 25 bp, Homo sapien
ggttccatcaatgctggctgcctcc

SEQ ID NO: 2352205 - DNA, 25 bp, Homo sapien
ctaggataatgtagacagaggttcc

SEQ ID NO: 2352206 - DNA, 25 bp, Homo sapien
tgcctcctccaaaatgtcaatatac

SEQ ID NO: 2352207 - DNA, 25 bp, Homo sapien
gaagtaggatgatgttctgctcagg

SEQ ID NO: 2352208 - DNA, 25 bp, Homo sapien
cactttggttatatgtatgtccaag

SEQ ID NO: 2352209 - DNA, 25 bp, Homo sapien
gcttaaactctctatgcatcatttt

SEQ ID NO: 2352210 - DNA, 25 bp, Homo sapien
tccaaggtctttggagatagactgc

SEQ ID NO: 2352211 - DNA, 25 bp, Homo sapien
gacttccaggtctactctgtcagtt

SEQ ID NO: 2352212 - DNA, 25 bp, Homo sapien
agaggcaggcactgtcgggatggac

SEQ ID NO: 2352213 - DNA, 25 bp, Homo sapien
ttcagaaagcatgtaagtgaaactt

SEQ ID NO: 2352214 - DNA, 25 bp, Homo sapien
ctcttagggaaatgtgcaggcagag

SEQ ID NO: 2352215 - DNA, 25 bp, Homo sapien
cagaaagcatgtaagtgaaactttc

SEQ ID NO: 2352216 - DNA, 25 bp, Homo sapien
ggaacggtaagggtaatagcagaca

SEQ ID NO: 2352217 - DNA, 25 bp, Homo sapien
cggtaagggtaatagcagacaatgg

SEQ ID NO: 2352218 - DNA, 25 bp, Homo sapien
aacggtaagggtaatagcagacaat

SEQ ID NO: 2352219 - DNA, 25 bp, Homo sapien
tagtggaacggtaagggtaatagca

SEQ ID NO: 2352220 - DNA, 25 bp, Homo sapien
tgtgacaatctcttagcaactctga

SEQ ID NO: 2352221 - DNA, 25 bp, Homo sapien
gcctgagggcgccaattgtgtaaat

SEQ ID NO: 2352222 - DNA, 25 bp, Homo sapien
tactgacagattcagcactacttgc

SEQ ID NO: 2352223 - DNA, 25 bp, Homo sapien
ggctgtgctccacatagactggaat

SEQ ID NO: 2352224 - DNA, 25 bp, Homo sapien
tgtcagacaggtaatctacccattt

SEQ ID NO: 2352225 - DNA, 25 bp, Homo sapien
catggtgtctcatctttgccactct

SEQ ID NO: 2352226 - DNA, 25 bp, Homo sapien
ttccctcttggatcacatggtgtct

SEQ ID NO: 2352227 - DNA, 25 bp, Homo sapien
aagctgtcagacaggtaatctaccc

SEQ ID NO: 2352228 - DNA, 25 bp, Homo sapien
agagatcccgactgaaagaataacc

SEQ ID NO: 2352229 - DNA, 25 bp, Homo sapien
aataaccacaagatctcttgagaac

SEQ ID NO: 2352230 - DNA, 25 bp, Homo sapien
gatcccgactgaaagaataaccaca

SEQ ID NO: 2352231 - DNA, 25 bp, Homo sapien
gaataaccacaagatctcttgagaa

SEQ ID NO: 2352232 - DNA, 25 bp, Homo sapien
tatcttcaatgcggcttctccaaag

SEQ ID NO: 2352233 - DNA, 25 bp, Homo sapien
tgcaatatcttcaatgcggcttctc

SEQ ID NO: 2352234 - DNA, 25 bp, Homo sapien
tcttcaatgcggcttctccaaagac

SEQ ID NO: 2352235 - DNA, 25 bp, Homo sapien
caatatcttcaatgcggcttctcca

SEQ ID NO: 2352236 - DNA, 25 bp, Homo sapien
cacaggcatcgcagatgtctcatgc

SEQ ID NO: 2352237 - DNA, 25 bp, Homo sapien
gaacacaggcatcgcagatgtctca

SEQ ID NO: 2352238 - DNA, 25 bp, Homo sapien
caggcatcgcagatgtctcatgcag

SEQ ID NO: 2352239 - DNA, 25 bp, Homo sapien
aacacaggcatcgcagatgtctcat

SEQ ID NO: 2352240 - DNA, 25 bp, Homo sapien
cacagcaaggcagtggtaaggtgga

SEQ ID NO: 2352241 - DNA, 25 bp, Homo sapien
cggctctgccctaagaggctgtccc

SEQ ID NO: 2352242 - DNA, 25 bp, Homo sapien
atgtgttgccatcaaagcaatgtct

SEQ ID NO: 2352243 - DNA, 25 bp, Homo sapien
aaagcaatgtcttggcggctctgcc

SEQ ID NO: 2352244 - DNA, 25 bp, Homo sapien
gaaggaggcatgtgatgtaacccat

SEQ ID NO: 2352245 - DNA, 25 bp, Homo sapien
acatgtgaaggaggcatgtgatgta

SEQ ID NO: 2352246 - DNA, 25 bp, Homo sapien
gtgaaggaggcatgtgatgtaaccc

SEQ ID NO: 2352247 - DNA, 25 bp, Homo sapien
ctacatgtgaaggaggcatgtgatg

SEQ ID NO: 2352248 - DNA, 25 bp, Homo sapien
gattgctctggccaactgtggggtc

SEQ ID NO: 2352249 - DNA, 25 bp, Homo sapien
gtccccgatggtgtggacggagagg

SEQ ID NO: 2352250 - DNA, 25 bp, Homo sapien
agagtctgggtcagtgattgctctg

SEQ ID NO: 2352251 - DNA, 25 bp, Homo sapien
gagagtctgggtcagtgattgctct

SEQ ID NO: 2352252 - DNA, 25 bp, Homo sapien
ggcactatgctaaggactttatgta

SEQ ID NO: 2352253 - DNA, 25 bp, Homo sapien
ccctgaaatgctatcccttggaatt

SEQ ID NO: 2352254 - DNA, 25 bp, Homo sapien
tatttaaaggcaactctctgatggt

SEQ ID NO: 2352255 - DNA, 25 bp, Homo sapien
ggtgaggtatatacagacttttccc

SEQ ID NO: 2352256 - DNA, 25 bp, Homo sapien
ccattagggagtgaataacatgtca

SEQ ID NO: 2352257 - DNA, 25 bp, Homo sapien
tcagagaaacttcatgccaaatgca

SEQ ID NO: 2352258 - DNA, 25 bp, Homo sapien
taacatgtcagagaaacttcatgcc

SEQ ID NO: 2352259 - DNA, 25 bp, Homo sapien
gaaaacagaataacttgcttctttc

SEQ ID NO: 2352260 - DNA, 25 bp, Homo sapien
ccactagggtccagtcaacaagaag

SEQ ID NO: 2352261 - DNA, 25 bp, Homo sapien
tagggtccagtcaacaagaagccat

SEQ ID NO: 2352262 - DNA, 25 bp, Homo sapien
tctctctccactagggtccagtcaa

SEQ ID NO: 2352263 - DNA, 25 bp, Homo sapien
ctgttatctctctccactagggtcc

SEQ ID NO: 2352264 - DNA, 25 bp, Homo sapien
tttagctgcaatgatcttatgtggg

SEQ ID NO: 2352265 - DNA, 25 bp, Homo sapien
ctatttagctgcaatgatcttatgt

SEQ ID NO: 2352266 - DNA, 25 bp, Homo sapien
tagctgcaatgatcttatgtgggta

SEQ ID NO: 2352267 - DNA, 25 bp, Homo sapien
agctgcaatgatcttatgtgggtac

SEQ ID NO: 2352268 - DNA, 25 bp, Homo sapien
aacacgagggtagtaaaacaagatg

SEQ ID NO: 2352269 - DNA, 25 bp, Homo sapien
ttaccttcgtgcagagagtcagcaa

SEQ ID NO: 2352270 - DNA, 25 bp, Homo sapien
acaagatggccagacctccctgctt

SEQ ID NO: 2352271 - DNA, 25 bp, Homo sapien
gaaggttaccttcgtgcagagagtc

SEQ ID NO: 2352272 - DNA, 25 bp, Homo sapien
gaatactggaaggttccggaagaga

SEQ ID NO: 2352273 - DNA, 25 bp, Homo sapien
tggaatactggaaggttccggaaga

SEQ ID NO: 2352274 - DNA, 25 bp, Homo sapien
attccaaacagtccatatggctgcc

SEQ ID NO: 2352275 - DNA, 25 bp, Homo sapien
aatttttgatatctctctggcatca

SEQ ID NO: 2352276 - DNA, 25 bp, Homo sapien
caaacagtccatatggctgccatca

SEQ ID NO: 2352277 - DNA, 25 bp, Homo sapien
ggcatcattccaaacagtccatatg

SEQ ID NO: 2352278 - DNA, 25 bp, Homo sapien
tggggtatgcctgggcgcatgcctg

SEQ ID NO: 2352279 - DNA, 25 bp, Homo sapien
tgcctgggcgcatgcctggcacttc

SEQ ID NO: 2352280 - DNA, 25 bp, Homo sapien
tatgcctgggcgcatgcctggcact

SEQ ID NO: 2352281 - DNA, 25 bp, Homo sapien
gggtatgcctgggcgcatgcctggc

SEQ ID NO: 2352282 - DNA, 25 bp, Homo sapien
ctggctgttcccctatgacggtcaa

SEQ ID NO: 2352283 - DNA, 25 bp, Homo sapien
tggaggttccatggctgacaccagg

SEQ ID NO: 2352284 - DNA, 25 bp, Homo sapien
tatttgtccccatacttggccggag

SEQ ID NO: 2352285 - DNA, 25 bp, Homo sapien
ggcacaggaactaacagggcaagtc

SEQ ID NO: 2352286 - DNA, 25 bp, Homo sapien
cattcatcatggacactgcgagtca

SEQ ID NO: 2352287 - DNA, 25 bp, Homo sapien
tcaagtctctagctatgtccggttc

SEQ ID NO: 2352288 - DNA, 25 bp, Homo sapien
cagtctacgatgctgttggagccgc

SEQ ID NO: 2352289 - DNA, 25 bp, Homo sapien
cacgcattgtctgtgggacctcaag

SEQ ID NO: 2352290 - DNA, 25 bp, Homo sapien
tacctacacagacattagtgactga

SEQ ID NO: 2352291 - DNA, 25 bp, Homo sapien
acatgggagtgtgcgcgtgcacccc

SEQ ID NO: 2352292 - DNA, 25 bp, Homo sapien
gcaacaacctaccaggaatatcctg

SEQ ID NO: 2352293 - DNA, 25 bp, Homo sapien
gctatgattgtatgagacatgggag

SEQ ID NO: 2352294 - DNA, 25 bp, Homo sapien
cagctacctgaattccctctgcctg

SEQ ID NO: 2352295 - DNA, 25 bp, Homo sapien
agctacctgaattccctctgcctgc

SEQ ID NO: 2352296 - DNA, 25 bp, Homo sapien
ctacctgaattccctctgcctgcat

SEQ ID NO: 2352297 - DNA, 25 bp, Homo sapien
gctacctgaattccctctgcctgca

SEQ ID NO: 2352298 - DNA, 25 bp, Homo sapien
cactggtcagcagccttcttgggtg

SEQ ID NO: 2352299 - DNA, 25 bp, Homo sapien
gctctgaaagtgtgatgctctctct

SEQ ID NO: 2352300 - DNA, 25 bp, Homo sapien
tggacactggtcagcagccttcttg

SEQ ID NO: 2352301 - DNA, 25 bp, Homo sapien
ttcattatagacagcgccagccagc

SEQ ID NO: 2352302 - DNA, 25 bp, Homo sapien
ggtataaatctaccttgccaatatt

SEQ ID NO: 2352303 - DNA, 25 bp, Homo sapien
tacgttgcctggtaactctaggaaa

SEQ ID NO: 2352304 - DNA, 25 bp, Homo sapien
tcctaggtaacccaaggtctattga

SEQ ID NO: 2352305 - DNA, 25 bp, Homo sapien
catatagatttatgtgattcactgg

SEQ ID NO: 2352306 - DNA, 25 bp, Homo sapien
ctctctattagtctgtcatttccca

SEQ ID NO: 2352307 - DNA, 25 bp, Homo sapien
ttaacatatactaagattacacaca

SEQ ID NO: 2352308 - DNA, 25 bp, Homo sapien
cccaacactctctattagtctgtca

SEQ ID NO: 2352309 - DNA, 25 bp, Homo sapien
ggatagctccttgtcccaacactct

SEQ ID NO: 2352310 - DNA, 25 bp, Homo sapien
catgatggtgttataaaacctgtga

SEQ ID NO: 2352311 - DNA, 25 bp, Homo sapien
tgctagtgtttagactaatagtccc

SEQ ID NO: 2352312 - DNA, 25 bp, Homo sapien
taagtaatttcataggaggtaggga

SEQ ID NO: 2352313 - DNA, 25 bp, Homo sapien
ggaaaacattgctgtttgcagcctg

SEQ ID NO: 2352314 - DNA, 25 bp, Homo sapien
ttcttttgtgtaggctatttgtcat

SEQ ID NO: 2352315 - DNA, 25 bp, Homo sapien
ctcctctcatcagtgtgactgttgt

SEQ ID NO: 2352316 - DNA, 25 bp, Homo sapien
cctctcagttgagtgccccagcgat

SEQ ID NO: 2352317 - DNA, 25 bp, Homo sapien
cagcgatgggcagaatgcatgaacc

SEQ ID NO: 2352318 - DNA, 25 bp, Homo sapien
gaatgcatgaacctgaaagccactg

SEQ ID NO: 2352319 - DNA, 25 bp, Homo sapien
ctgtgtgtattgagtgcatccccac

SEQ ID NO: 2352320 - DNA, 25 bp, Homo sapien
cacattgggagatttagtagtatgg

SEQ ID NO: 2352321 - DNA, 25 bp, Homo sapien
tagtagtatggaggccagtggcaat

SEQ ID NO: 2352322 - DNA, 25 bp, Homo sapien
cagtggcaatgtttggtggagcagg

SEQ ID NO: 2352323 - DNA, 25 bp, Homo sapien
gggtagaagccagactgcaccgagc

SEQ ID NO: 2352324 - DNA, 25 bp, Homo sapien
ttatctgttttccattacaatcaca

SEQ ID NO: 2352325 - DNA, 25 bp, Homo sapien
cagaatgccagttttaggtcaacat

SEQ ID NO: 2352326 - DNA, 25 bp, Homo sapien
aatgccagttttaggtcaacatatg

SEQ ID NO: 2352327 - DNA, 25 bp, Homo sapien
atcacagaatgccagttttaggtca

SEQ ID NO: 2352328 - DNA, 25 bp, Homo sapien
tttgaggcaaacactagccccagtg

SEQ ID NO: 2352329 - DNA, 25 bp, Homo sapien
gaggcaaacactagccccagtgtga

SEQ ID NO: 2352330 - DNA, 25 bp, Homo sapien
cctgctgacctatcccggttaatag

SEQ ID NO: 2352331 - DNA, 25 bp, Homo sapien
taatagctttactgatctgtctagc

SEQ ID NO: 2352332 - DNA, 25 bp, Homo sapien
tactaaccactatactaacgaggag

SEQ ID NO: 2352333 - DNA, 25 bp, Homo sapien
gtgacaggcggggatactaaccact

SEQ ID NO: 2352334 - DNA, 25 bp, Homo sapien
caggcggggatactaaccactatac

SEQ ID NO: 2352335 - DNA, 25 bp, Homo sapien
gacaggcggggatactaaccactat

SEQ ID NO: 2352336 - DNA, 25 bp, Homo sapien
ccgacgtgattcgaacacgcagcct

SEQ ID NO: 2352337 - DNA, 25 bp, Homo sapien
cgtgattcgaacacgcagccttctg

SEQ ID NO: 2352338 - DNA, 25 bp, Homo sapien
tgaccccgacgtgattcgaacacgc

SEQ ID NO: 2352339 - DNA, 25 bp, Homo sapien
gacgtgattcgaacacgcagccttc

SEQ ID NO: 2352340 - DNA, 25 bp, Homo sapien
gatagactagtggactgatacaccc

SEQ ID NO: 2352341 - DNA, 25 bp, Homo sapien
tccctcacctggttcagaatcttgg

SEQ ID NO: 2352342 - DNA, 25 bp, Homo sapien
taatgcacagcagtaatagtccacc

SEQ ID NO: 2352343 - DNA, 25 bp, Homo sapien
gaatcttgggtgacccttggcaggt

SEQ ID NO: 2352344 - DNA, 25 bp, Homo sapien
cttggatgtagggtgtgttaatcat

SEQ ID NO: 2352345 - DNA, 25 bp, Homo sapien
gggaagccagacctctacaatcggg

SEQ ID NO: 2352346 - DNA, 25 bp, Homo sapien
gaaaagaagcgaggcttgtctgcag

SEQ ID NO: 2352347 - DNA, 25 bp, Homo sapien
caatcgggcacttaaattacccttg

SEQ ID NO: 2352348 - DNA, 25 bp, Homo sapien
cgcgaacgcttcttttgttccagaa

SEQ ID NO: 2352349 - DNA, 25 bp, Homo sapien
ttccacgccagtgtgaggacccttg

SEQ ID NO: 2352350 - DNA, 25 bp, Homo sapien
gcgccgaattccacgccagtgtgag

SEQ ID NO: 2352351 - DNA, 25 bp, Homo sapien
cactgaagctccaagagtagccgca

SEQ ID NO: 2352352 - DNA, 25 bp, Homo sapien
gggtcgatcgcctacgaacgcgccg

SEQ ID NO: 2352353 - DNA, 25 bp, Homo sapien
tagacgccgataagggacaggtcgt

SEQ ID NO: 2352354 - DNA, 25 bp, Homo sapien
ttagacgccgataagggacaggtcg

SEQ ID NO: 2352355 - DNA, 25 bp, Homo sapien
agacgccgataagggacaggtcgta

SEQ ID NO: 2352356 - DNA, 25 bp, Homo sapien
gacgccgataagggacaggtcgtac

SEQ ID NO: 2352357 - DNA, 25 bp, Homo sapien
caaaagaccccagagccgaactacg

SEQ ID NO: 2352358 - DNA, 25 bp, Homo sapien
aaaaactcgcggacacaaagccaag

SEQ ID NO: 2352359 - DNA, 25 bp, Homo sapien
aagagcgctgcggagcggaacaaaa

SEQ ID NO: 2352360 - DNA, 25 bp, Homo sapien
tacgaaccaactgcggccaagctgg

SEQ ID NO: 2352361 - DNA, 25 bp, Homo sapien
tcggggatctgcgaagccccctccc

SEQ ID NO: 2352362 - DNA, 25 bp, Homo sapien
gccgccgctcacgccggcgcgcttg

SEQ ID NO: 2352363 - DNA, 25 bp, Homo sapien
ctccccacagcctttgccgccgccg

SEQ ID NO: 2352364 - DNA, 25 bp, Homo sapien
gccgctcacgccggcgcgcttgctc

SEQ ID NO: 2352365 - DNA, 25 bp, Homo sapien
tgtcttttgtcaggaccgaggggtc

SEQ ID NO: 2352366 - DNA, 25 bp, Homo sapien
ggctcgcgctcttcgtcactggaga

SEQ ID NO: 2352367 - DNA, 25 bp, Homo sapien
ctgcaggtagagctggacgtacacg

SEQ ID NO: 2352368 - DNA, 25 bp, Homo sapien
gttgcgagccgtgaggtgctgcagg

SEQ ID NO: 2352369 - DNA, 25 bp, Homo sapien
ggacgtacacgtctttgcgctgctc

SEQ ID NO: 2352370 - DNA, 25 bp, Homo sapien
cctgccgacggctgctcggctccgg

SEQ ID NO: 2352371 - DNA, 25 bp, Homo sapien
taagtctttcgtttcctcaagcaaa

SEQ ID NO: 2352372 - DNA, 25 bp, Homo sapien
tcaaatatttgtttgcagggccggg

SEQ ID NO: 2352373 - DNA, 25 bp, Homo sapien
caggatcagacattccaaattgcaa

SEQ ID NO: 2352374 - DNA, 25 bp, Homo sapien
gggaaaacgcaatccaaactgcaat

SEQ ID NO: 2352375 - DNA, 25 bp, Homo sapien
tgccagacaccggactgaagacgtt

SEQ ID NO: 2352376 - DNA, 25 bp, Homo sapien
ttctgcctgagtagccgggaaaaca

SEQ ID NO: 2352377 - DNA, 25 bp, Homo sapien
gaagctttccgcaaaacaagatgtt

SEQ ID NO: 2352378 - DNA, 25 bp, Homo sapien
gagcagggaaacataacgggtaagc

SEQ ID NO: 2352379 - DNA, 25 bp, Homo sapien
tcatatgaataagtggcagacctgg

SEQ ID NO: 2352380 - DNA, 25 bp, Homo sapien
actgaggttcaagcatgctcttcac

SEQ ID NO: 2352381 - DNA, 25 bp, Homo sapien
tagacacttcacatatgcaatggca

SEQ ID NO: 2352382 - DNA, 25 bp, Homo sapien
tgcaatggcatgtactcctcaatct

SEQ ID NO: 2352383 - DNA, 25 bp, Homo sapien
gataggagacaggactgtaaactcc

SEQ ID NO: 2352384 - DNA, 25 bp, Homo sapien
tattaagggacttactaaagcatcc

SEQ ID NO: 2352385 - DNA, 25 bp, Homo sapien
gacttaggaaggaaatctgacagac

SEQ ID NO: 2352386 - DNA, 25 bp, Homo sapien
gagtttgatatccatggccgggtcc

SEQ ID NO: 2352387 - DNA, 25 bp, Homo sapien
ccatacaggcttacacttagataca

SEQ ID NO: 2352388 - DNA, 25 bp, Homo sapien
cagatcagcatgaaccatggaaagt

SEQ ID NO: 2352389 - DNA, 25 bp, Homo sapien
taaatgatcatgaatgctacttact

SEQ ID NO: 2352390 - DNA, 25 bp, Homo sapien
caatggcaacggaaacagatcagca

SEQ ID NO: 2352391 - DNA, 25 bp, Homo sapien
acaaaccgcacagccaagcaagtaa

SEQ ID NO: 2352392 - DNA, 25 bp, Homo sapien
tattaggccttagcaattccattaa

SEQ ID NO: 2352393 - DNA, 25 bp, Homo sapien
catgcaaactcactaccaaattggt

SEQ ID NO: 2352394 - DNA, 25 bp, Homo sapien
taagagcaactcattattggagaac

SEQ ID NO: 2352395 - DNA, 25 bp, Homo sapien
attcactccgtatttcacaagctga

SEQ ID NO: 2352396 - DNA, 25 bp, Homo sapien
ttcactccgtatttcacaagctgat

SEQ ID NO: 2352397 - DNA, 25 bp, Homo sapien
tctgttccttgttccctcagtttca

SEQ ID NO: 2352398 - DNA, 25 bp, Homo sapien
ggagtagaagatcttgattctgttc

SEQ ID NO: 2352399 - DNA, 25 bp, Homo sapien
agaaattgttggcagaggagtagaa

SEQ ID NO: 2352400 - DNA, 25 bp, Homo sapien
tcattgtcactgtatctgtcagaat

SEQ ID NO: 2352401 - DNA, 25 bp, Homo sapien
caaagttaacttgcaatttcaggtg

SEQ ID NO: 2352402 - DNA, 25 bp, Homo sapien
caggtaagtacgagaaactttgcct

SEQ ID NO: 2352403 - DNA, 25 bp, Homo sapien
tcttcatggtcactgaattttgagt

SEQ ID NO: 2352404 - DNA, 25 bp, Homo sapien
tacagaattactctaatgacacgaa

SEQ ID NO: 2352405 - DNA, 25 bp, Homo sapien
gctaaaaatagtgctgtcaaaggaa

SEQ ID NO: 2352406 - DNA, 25 bp, Homo sapien
ctggtagacaaagcttattgagata

SEQ ID NO: 2352407 - DNA, 25 bp, Homo sapien
ctttgcctctttgctaaaaatagtg

SEQ ID NO: 2352408 - DNA, 25 bp, Homo sapien
tcatattctgaactaatctgccaga

SEQ ID NO: 2352409 - DNA, 25 bp, Homo sapien
ggacctctcaggacataatggttga

SEQ ID NO: 2352410 - DNA, 25 bp, Homo sapien
tagttcggtactgcccaaaggagga

SEQ ID NO: 2352411 - DNA, 25 bp, Homo sapien
caagaggctccctaggtaggtctcc

SEQ ID NO: 2352412 - DNA, 25 bp, Homo sapien
caccaccagagggagtagttccaag

SEQ ID NO: 2352413 - DNA, 25 bp, Homo sapien
tatcgacgacctacagtggcatttc

SEQ ID NO: 2352414 - DNA, 25 bp, Homo sapien
gaagacatcagttcggatccaggta

SEQ ID NO: 2352415 - DNA, 25 bp, Homo sapien
taattttgcaatccttcagccagag

SEQ ID NO: 2352416 - DNA, 25 bp, Homo sapien
ccaagcgcttggtgggtacgactag

SEQ ID NO: 2352417 - DNA, 25 bp, Homo sapien
tggttgctaccagtcaatgaagaga

SEQ ID NO: 2352418 - DNA, 25 bp, Homo sapien
gatggtgaacatgcactatcccagg

SEQ ID NO: 2352419 - DNA, 25 bp, Homo sapien
tgtaccaggcttcctatctacgcaa

SEQ ID NO: 2352420 - DNA, 25 bp, Homo sapien
gagggagtacccaagagaccatatt

SEQ ID NO: 2352421 - DNA, 25 bp, Homo sapien
ctggaaataacattggagaaaccat

SEQ ID NO: 2352422 - DNA, 25 bp, Homo sapien
tcaagcttgagctctattttagagt

SEQ ID NO: 2352423 - DNA, 25 bp, Homo sapien
cattaaaggctaaaacatggattag

SEQ ID NO: 2352424 - DNA, 25 bp, Homo sapien
gaattaagtttattgagcgtgctgg

SEQ ID NO: 2352425 - DNA, 25 bp, Homo sapien
ggaatctgggtgtcaaccattaaag

SEQ ID NO: 2352426 - DNA, 25 bp, Homo sapien
aggttatttatacctgtacacggtg

SEQ ID NO: 2352427 - DNA, 25 bp, Homo sapien
tatctattaaaaggatcacggttcc

SEQ ID NO: 2352428 - DNA, 25 bp, Homo sapien
ccaggcatgacgcaggaagtataca

SEQ ID NO: 2352429 - DNA, 25 bp, Homo sapien
gatttacctagcactacctactgaa

SEQ ID NO: 2352430 - DNA, 25 bp, Homo sapien
gaagtatacatgagcctgggacgtc

SEQ ID NO: 2352431 - DNA, 25 bp, Homo sapien
gaccctcttgtagattccctagtta

SEQ ID NO: 2352432 - DNA, 25 bp, Homo sapien
ttcttgaccctcttgtagattccct

SEQ ID NO: 2352433 - DNA, 25 bp, Homo sapien
taatgcctgcagaggtccgcctttt

SEQ ID NO: 2352434 - DNA, 25 bp, Homo sapien
gccttttgaagatccacttgtccat

SEQ ID NO: 2352435 - DNA, 25 bp, Homo sapien
ttatagtttcagctatgggagtact

SEQ ID NO: 2352436 - DNA, 25 bp, Homo sapien
tatagtttcagctatgggagtactc

SEQ ID NO: 2352437 - DNA, 25 bp, Homo sapien
attatagtttcagctatgggagtac

SEQ ID NO: 2352438 - DNA, 25 bp, Homo sapien
taaagatttaagcaacacagcctac

SEQ ID NO: 2352439 - DNA, 25 bp, Homo sapien
tactttcttgtacaatgaattagat

SEQ ID NO: 2352440 - DNA, 25 bp, Homo sapien
tagtgcctcacatatgaagcctcat

SEQ ID NO: 2352441 - DNA, 25 bp, Homo sapien
ccaaacataacacagacacttaaaa

SEQ ID NO: 2352442 - DNA, 25 bp, Homo sapien
tggtgctcttctgggtatgtctgag

SEQ ID NO: 2352443 - DNA, 25 bp, Homo sapien
gcatgcttgaaatttccagtcaccc

SEQ ID NO: 2352444 - DNA, 25 bp, Homo sapien
gattggcagaataggagatgcatgc

SEQ ID NO: 2352445 - DNA, 25 bp, Homo sapien
tatgtctgagaattcagtgattggc

SEQ ID NO: 2352446 - DNA, 25 bp, Homo sapien
ccttaagaatatccctttctactct

SEQ ID NO: 2352447 - DNA, 25 bp, Homo sapien
tccttaagaatatccctttctactc

SEQ ID NO: 2352448 - DNA, 25 bp, Homo sapien
ctgagttctaatggccggcctgcag

SEQ ID NO: 2352449 - DNA, 25 bp, Homo sapien
actgagttctaatggccggcctgca

SEQ ID NO: 2352450 - DNA, 25 bp, Homo sapien
ccatagcttgatagaccaaaaacaa

SEQ ID NO: 2352451 - DNA, 25 bp, Homo sapien
ttggtttccatagcttgatagacca

SEQ ID NO: 2352452 - DNA, 25 bp, Homo sapien
gtttccatagcttgatagaccaaaa

SEQ ID NO: 2352453 - DNA, 25 bp, Homo sapien
aaaaactgccacaacaacaaacagc

SEQ ID NO: 2352454 - DNA, 25 bp, Homo sapien
agttggattttctagggtcaacatg

SEQ ID NO: 2352455 - DNA, 25 bp, Homo sapien
ttttctagggtcaacatgaagaaaa

SEQ ID NO: 2352456 - DNA, 25 bp, Homo sapien
ggattttctagggtcaacatgaaga

SEQ ID NO: 2352457 - DNA, 25 bp, Homo sapien
ttggattttctagggtcaacatgaa

SEQ ID NO: 2352458 - DNA, 25 bp, Homo sapien
cagttattgaaaataggagaccaag

SEQ ID NO: 2352459 - DNA, 25 bp, Homo sapien
tattgaaaataggagaccaagttga

SEQ ID NO: 2352460 - DNA, 25 bp, Homo sapien
taggagaccaagttgaacgtgccaa

SEQ ID NO: 2352461 - DNA, 25 bp, Homo sapien
aaataggagaccaagttgaacgtgc

SEQ ID NO: 2352462 - DNA, 25 bp, Homo sapien
tatgatagggctacaacaacattac

SEQ ID NO: 2352463 - DNA, 25 bp, Homo sapien
tcaaaacatgtacagctagccaaca

SEQ ID NO: 2352464 - DNA, 25 bp, Homo sapien
tccaaatgaaacataagaccagtgt

SEQ ID NO: 2352465 - DNA, 25 bp, Homo sapien
aaagtgatctcctactagtccaaag

SEQ ID NO: 2352466 - DNA, 25 bp, Homo sapien
actttattaactactgcttatgatg

SEQ ID NO: 2352467 - DNA, 25 bp, Homo sapien
tcataatgcccacctcttaagagta

SEQ ID NO: 2352468 - DNA, 25 bp, Homo sapien
ccccgtctctgccgaggcaggaaaa

SEQ ID NO: 2352469 - DNA, 25 bp, Homo sapien
gcccacctcttaagagtatacaact

SEQ ID NO: 2352470 - DNA, 25 bp, Homo sapien
caaaatcataatgccggccgggtgc

SEQ ID NO: 2352471 - DNA, 25 bp, Homo sapien
gcaaggacccactcattctgcagaa

SEQ ID NO: 2352472 - DNA, 25 bp, Homo sapien
ttctggtctcaattgcaaagtacgt

SEQ ID NO: 2352473 - DNA, 25 bp, Homo sapien
taaatatacatcttcggcttcttcc

SEQ ID NO: 2352474 - DNA, 25 bp, Homo sapien
ctacatctacaatttaatcaggaag

SEQ ID NO: 2352475 - DNA, 25 bp, Homo sapien
aagtctacatctacaatttaatcag

SEQ ID NO: 2352476 - DNA, 25 bp, Homo sapien
tattgaattatattgtaaagtctac

SEQ ID NO: 2352477 - DNA, 25 bp, Homo sapien
gaattatattgtaaagtctacatct

SEQ ID NO: 2352478 - DNA, 25 bp, Homo sapien
gaaaaccatttattgcaacgacaaa

SEQ ID NO: 2352479 - DNA, 25 bp, Homo sapien
gctatctgaaaaccatttattgcaa

SEQ ID NO: 2352480 - DNA, 25 bp, Homo sapien
tatctgaaaaccatttattgcaacg

SEQ ID NO: 2352481 - DNA, 25 bp, Homo sapien
tctgaaaaccatttattgcaacgac

SEQ ID NO: 2352482 - DNA, 25 bp, Homo sapien
ttagtacaggtggggtttcagcatg

SEQ ID NO: 2352483 - DNA, 25 bp, Homo sapien
tttagtacaggtggggtttcagcat

SEQ ID NO: 2352484 - DNA, 25 bp, Homo sapien
acaggcacctgccacagcatccggc

SEQ ID NO: 2352485 - DNA, 25 bp, Homo sapien
cacctgccacagcatccggctaatt

SEQ ID NO: 2352486 - DNA, 25 bp, Homo sapien
caggtgcgtgccacgacaccaagct

SEQ ID NO: 2352487 - DNA, 25 bp, Homo sapien
ggtgcgtgccacgacaccaagctaa

SEQ ID NO: 2352488 - DNA, 25 bp, Homo sapien
aggtgcgtgccacgacaccaagcta

SEQ ID NO: 2352489 - DNA, 25 bp, Homo sapien
acaggtgcgtgccacgacaccaagc

SEQ ID NO: 2352490 - DNA, 25 bp, Homo sapien
ggagaggctattagataccgagtca

SEQ ID NO: 2352491 - DNA, 25 bp, Homo sapien
aaaggagaggctattagataccgag

SEQ ID NO: 2352492 - DNA, 25 bp, Homo sapien
ggctattagataccgagtcagctgg

SEQ ID NO: 2352493 - DNA, 25 bp, Homo sapien
tattagataccgagtcagctggcag

SEQ ID NO: 2352494 - DNA, 25 bp, Homo sapien
catgagtgacatagcatgtggaacg

SEQ ID NO: 2352495 - DNA, 25 bp, Homo sapien
catagcatgtggaacgagtttgaga

SEQ ID NO: 2352496 - DNA, 25 bp, Homo sapien
caagatcagcatgagtgacatagca

SEQ ID NO: 2352497 - DNA, 25 bp, Homo sapien
gaattccaagatcagcatgagtgac

SEQ ID NO: 2352498 - DNA, 25 bp, Homo sapien
ttagctactcctcgcaccagggtga

SEQ ID NO: 2352499 - DNA, 25 bp, Homo sapien
cagaaaagctagagtgaacatgggc

SEQ ID NO: 2352500 - DNA, 25 bp, Homo sapien
tagagctagaggtcaaggatgcact

SEQ ID NO: 2352501 - DNA, 25 bp, Homo sapien
ttataggagccatgcgctgcacctg

SEQ ID NO: 2352502 - DNA, 25 bp, Homo sapien
caccaatgggcgacgcgtacttgca

SEQ ID NO: 2352503 - DNA, 25 bp, Homo sapien
gctcggcgctcttctccaccaatgg

SEQ ID NO: 2352504 - DNA, 25 bp, Homo sapien
gggctcggcgctcttctccaccaat

SEQ ID NO: 2352505 - DNA, 25 bp, Homo sapien
tgacgctacgggctcggcgctcttc

SEQ ID NO: 2352506 - DNA, 25 bp, Homo sapien
accaatgggcgacgcgtacttgcag

SEQ ID NO: 2352507 - DNA, 25 bp, Homo sapien
gacgctacgggctcggcgctcttct

SEQ ID NO: 2352508 - DNA, 25 bp, Homo sapien
tgcaagtacgcgtcgcccattggtg

SEQ ID NO: 2352509 - DNA, 25 bp, Homo sapien
ccattggtggagaagagcgccgagc

SEQ ID NO: 2352510 - DNA, 25 bp, Homo sapien
gaagagcgccgagcccgtagcgtca

SEQ ID NO: 2352511 - DNA, 25 bp, Homo sapien
agaagagcgccgagcccgtagcgtc

SEQ ID NO: 2352512 - DNA, 25 bp, Homo sapien
ctgcaagtacgcgtcgcccattggt

SEQ ID NO: 2352513 - DNA, 25 bp, Homo sapien
gcaagtacgcgtcgcccattggtgg

SEQ ID NO: 2352514 - DNA, 25 bp, Homo sapien
cccggaggacgtccggcctctgtga

SEQ ID NO: 2352515 - DNA, 25 bp, Homo sapien
cacatcttaggacccggaggacgtc

SEQ ID NO: 2352516 - DNA, 25 bp, Homo sapien
tgtgagccgcaacctttccaaggga

SEQ ID NO: 2352517 - DNA, 25 bp, Homo sapien
gtgcgtcacgccgacgacgcgcgaa

SEQ ID NO: 2352518 - DNA, 25 bp, Homo sapien
gagccgcaacctttccaagggagtg

SEQ ID NO: 2352519 - DNA, 25 bp, Homo sapien
cgcgcgaagggcacacatcttagga

SEQ ID NO: 2352520 - DNA, 25 bp, Homo sapien
tcacagaggccggacgtcctccggg

SEQ ID NO: 2352521 - DNA, 25 bp, Homo sapien
ttcgcgcgtcgtcggcgtgacgcac

SEQ ID NO: 2352522 - DNA, 25 bp, Homo sapien
tcccttggaaaggttgcggctcaca

SEQ ID NO: 2352523 - DNA, 25 bp, Homo sapien
gacgtcctccgggtcctaagatgtg

SEQ ID NO: 2352524 - DNA, 25 bp, Homo sapien
cactcccttggaaaggttgcggctc

SEQ ID NO: 2352525 - DNA, 25 bp, Homo sapien
cctaagatgtgtgcccttcgcgcgt

SEQ ID NO: 2352526 - DNA, 25 bp, Homo sapien
ttgcctgtcctctaaccgtcgctcc

SEQ ID NO: 2352527 - DNA, 25 bp, Homo sapien
gccgggagcagcctctttcgaaggc

SEQ ID NO: 2352528 - DNA, 25 bp, Homo sapien
gttaaccggcgccttgcctgtcctc

SEQ ID NO: 2352529 - DNA, 25 bp, Homo sapien
aggccgccgtgacctcttcaagggc

SEQ ID NO: 2352530 - DNA, 25 bp, Homo sapien
tgacctcttcaagggcgtggagacg

SEQ ID NO: 2352531 - DNA, 25 bp, Homo sapien
cagcctctttcgaaggccgccgtga

SEQ ID NO: 2352532 - DNA, 25 bp, Homo sapien
cgtctccacgcccttgaagaggtca

SEQ ID NO: 2352533 - DNA, 25 bp, Homo sapien
ggagcgacggttagaggacaggcaa

SEQ ID NO: 2352534 - DNA, 25 bp, Homo sapien
gcccttgaagaggtcacggcggcct

SEQ ID NO: 2352535 - DNA, 25 bp, Homo sapien
gaggacaggcaaggcgccggttaac

SEQ ID NO: 2352536 - DNA, 25 bp, Homo sapien
gtcacggcggccttcgaaagaggct

SEQ ID NO: 2352537 - DNA, 25 bp, Homo sapien
ggccttcgaaagaggctgctcccgg

SEQ ID NO: 2352538 - DNA, 25 bp, Homo sapien
gcagctggtgcacgatggtctcggg

SEQ ID NO: 2352539 - DNA, 25 bp, Homo sapien
tggcgcgggcgaaccccttcaacac

SEQ ID NO: 2352540 - DNA, 25 bp, Homo sapien
tctgcagctggtgcacgatggtctc

SEQ ID NO: 2352541 - DNA, 25 bp, Homo sapien
ctgcagctggtgcacgatggtctcg

SEQ ID NO: 2352542 - DNA, 25 bp, Homo sapien
atggtctcggggacctccgcagcag

SEQ ID NO: 2352543 - DNA, 25 bp, Homo sapien
ccgtggcgcacctggcgcgggcgaa

SEQ ID NO: 2352544 - DNA, 25 bp, Homo sapien
tgctgcggaggtccccgagaccatc

SEQ ID NO: 2352545 - DNA, 25 bp, Homo sapien
agctgctgcggaggtccccgagacc

SEQ ID NO: 2352546 - DNA, 25 bp, Homo sapien
gtgttgaaggggttcgcccgcgcca

SEQ ID NO: 2352547 - DNA, 25 bp, Homo sapien
gagaccatcgtgcaccagctgcaga

SEQ ID NO: 2352548 - DNA, 25 bp, Homo sapien
cgagaccatcgtgcaccagctgcag

SEQ ID NO: 2352549 - DNA, 25 bp, Homo sapien
ttcgcccgcgccaggtgcgccacgg

SEQ ID NO: 2352550 - DNA, 25 bp, Homo sapien
tcgtgtggtctacttgtgggccgcc

SEQ ID NO: 2352551 - DNA, 25 bp, Homo sapien
gcgggtgtcagatccttggccttcc

SEQ ID NO: 2352552 - DNA, 25 bp, Homo sapien
gaccctgcccaatacagtcgtgtgg

SEQ ID NO: 2352553 - DNA, 25 bp, Homo sapien
taggacggcgcccagttgcttgccc

SEQ ID NO: 2352554 - DNA, 25 bp, Homo sapien
ttttccaccataggcgggtgtcaga

SEQ ID NO: 2352555 - DNA, 25 bp, Homo sapien
acagggaaggacgagtccagcccgc

SEQ ID NO: 2352556 - DNA, 25 bp, Homo sapien
taccccagggcaagcaactgggcgc

SEQ ID NO: 2352557 - DNA, 25 bp, Homo sapien
gcccacaagtagaccacacgactgt

SEQ ID NO: 2352558 - DNA, 25 bp, Homo sapien
cacacgactgtattgggcagggtct

SEQ ID NO: 2352559 - DNA, 25 bp, Homo sapien
tatggtggaaaaggccgatacccca

SEQ ID NO: 2352560 - DNA, 25 bp, Homo sapien
gagggaaggccaaggatctgacacc

SEQ ID NO: 2352561 - DNA, 25 bp, Homo sapien
tctgacacccgcctatggtggaaaa

SEQ ID NO: 2352562 - DNA, 25 bp, Homo sapien
gcttgcagccctacataggcaatag

SEQ ID NO: 2352563 - DNA, 25 bp, Homo sapien
gccgtgagctcgcttggtcagcaaa

SEQ ID NO: 2352564 - DNA, 25 bp, Homo sapien
tgactagctctttctccgccgtgag

SEQ ID NO: 2352565 - DNA, 25 bp, Homo sapien
tatatttgtcgacgccaggtcagtc

SEQ ID NO: 2352566 - DNA, 25 bp, Homo sapien
tatctaccttgtgcctgtaaaatcg

SEQ ID NO: 2352567 - DNA, 25 bp, Homo sapien
tgtgtcccttcgtgacctccgtgtg

SEQ ID NO: 2352568 - DNA, 25 bp, Homo sapien
ggtaagagcacacttcagagtacaa

SEQ ID NO: 2352569 - DNA, 25 bp, Homo sapien
acacggaggtcacgaagggacacag

SEQ ID NO: 2352570 - DNA, 25 bp, Homo sapien
tacttagtttgctgaccaagcgagc

SEQ ID NO: 2352571 - DNA, 25 bp, Homo sapien
tcacggcggagaaagagctagtcac

SEQ ID NO: 2352572 - DNA, 25 bp, Homo sapien
aaatgactgacctggcgtcgacaaa

SEQ ID NO: 2352573 - DNA, 25 bp, Homo sapien
gagataatcacaccaaagggacgcc

SEQ ID NO: 2352574 - DNA, 25 bp, Homo sapien
ggaattattagctgtggcacaacac

SEQ ID NO: 2352575 - DNA, 25 bp, Homo sapien
gttcctctagatctggttaaatgca

SEQ ID NO: 2352576 - DNA, 25 bp, Homo sapien
tagctgtggcacaacacatacagca

SEQ ID NO: 2352577 - DNA, 25 bp, Homo sapien
tatagctgtgactatggatctggca

SEQ ID NO: 2352578 - DNA, 25 bp, Homo sapien
cacatacagcattggttcctctaga

SEQ ID NO: 2352579 - DNA, 25 bp, Homo sapien
tatggatctggcagattctttatcc

SEQ ID NO: 2352580 - DNA, 25 bp, Homo sapien
gcatttaaccagatctagaggaacc

SEQ ID NO: 2352581 - DNA, 25 bp, Homo sapien
tgttgtgccacagctaataattcct

SEQ ID NO: 2352582 - DNA, 25 bp, Homo sapien
tctagaggaaccaatgctgtatgtg

SEQ ID NO: 2352583 - DNA, 25 bp, Homo sapien
gaatctgccagatccatagtcacag

SEQ ID NO: 2352584 - DNA, 25 bp, Homo sapien
gctgtatgtgttgtgccacagctaa

SEQ ID NO: 2352585 - DNA, 25 bp, Homo sapien
ggataaagaatctgccagatccata

SEQ ID NO: 2352586 - DNA, 25 bp, Homo sapien
gtcatctaacaagctgtgtggaaac

SEQ ID NO: 2352587 - DNA, 25 bp, Homo sapien
gcatattgaagcatgactgactgtt

SEQ ID NO: 2352588 - DNA, 25 bp, Homo sapien
catgactgactgttaagttataaga

SEQ ID NO: 2352589 - DNA, 25 bp, Homo sapien
gtttgttttgcatgctggactagag

SEQ ID NO: 2352590 - DNA, 25 bp, Homo sapien
gctggactagagcatattgaagcat

SEQ ID NO: 2352591 - DNA, 25 bp, Homo sapien
tatagtcatctaacaagctgtgtgg

SEQ ID NO: 2352592 - DNA, 25 bp, Homo sapien
catgcttcaatatgctctagtccag

SEQ ID NO: 2352593 - DNA, 25 bp, Homo sapien
taacttaacagtcagtcatgcttca

SEQ ID NO: 2352594 - DNA, 25 bp, Homo sapien
ctctagtccagcatgcaaaacaaac

SEQ ID NO: 2352595 - DNA, 25 bp, Homo sapien
gatgactatatcttataacttaaca

SEQ ID NO: 2352596 - DNA, 25 bp, Homo sapien
gtttccacacagcttgttagatgac

SEQ ID NO: 2352597 - DNA, 25 bp, Homo sapien
ccacacagcttgttagatgactata

SEQ ID NO: 2352598 - DNA, 25 bp, Homo sapien
tatgaccagtaacatgagttttata

SEQ ID NO: 2352599 - DNA, 25 bp, Homo sapien
gtttatgaccagtaacatgagtttt

SEQ ID NO: 2352600 - DNA, 25 bp, Homo sapien
agtttatgaccagtaacatgagttt

SEQ ID NO: 2352601 - DNA, 25 bp, Homo sapien
gaccagtaacatgagttttatatta

SEQ ID NO: 2352602 - DNA, 25 bp, Homo sapien
accagtaacatgagttttatattaa

SEQ ID NO: 2352603 - DNA, 25 bp, Homo sapien
taaaatgcatggtgtgtcttctctt

SEQ ID NO: 2352604 - DNA, 25 bp, Homo sapien
taatataaaactcatgttactggtc

SEQ ID NO: 2352605 - DNA, 25 bp, Homo sapien
taaaactcatgttactggtcataaa

SEQ ID NO: 2352606 - DNA, 25 bp, Homo sapien
aagagaagacacaccatgcatttta

SEQ ID NO: 2352607 - DNA, 25 bp, Homo sapien
tataaaactcatgttactggtcata

SEQ ID NO: 2352608 - DNA, 25 bp, Homo sapien
ttaatataaaactcatgttactggt

SEQ ID NO: 2352609 - DNA, 25 bp, Homo sapien
aaactcatgttactggtcataaact

SEQ ID NO: 2352610 - DNA, 25 bp, Homo sapien
agtattatgcactgtgtggctttgg

SEQ ID NO: 2352611 - DNA, 25 bp, Homo sapien
taagttgtggtctgacacacactgc

SEQ ID NO: 2352612 - DNA, 25 bp, Homo sapien
tggatttagtgaaatgccgtatgca

SEQ ID NO: 2352613 - DNA, 25 bp, Homo sapien
gggtcttaagttgtggtctgacaca

SEQ ID NO: 2352614 - DNA, 25 bp, Homo sapien
cgcgaagtattatgcactgtgtggc

SEQ ID NO: 2352615 - DNA, 25 bp, Homo sapien
tttggctccgcgaagtattatgcac

SEQ ID NO: 2352616 - DNA, 25 bp, Homo sapien
cacacagtgcataatacttcgcgga

SEQ ID NO: 2352617 - DNA, 25 bp, Homo sapien
ccaaagccacacagtgcataatact

SEQ ID NO: 2352618 - DNA, 25 bp, Homo sapien
gtgcataatacttcgcggagccaaa

SEQ ID NO: 2352619 - DNA, 25 bp, Homo sapien
catacggcatttcactaaatccagg

SEQ ID NO: 2352620 - DNA, 25 bp, Homo sapien
tgtcagaccacaacttaagacccca

SEQ ID NO: 2352621 - DNA, 25 bp, Homo sapien
gcagtgtgtgtcagaccacaactta

SEQ ID NO: 2352622 - DNA, 25 bp, Homo sapien
gtttgtattgagatgacaacattga

SEQ ID NO: 2352623 - DNA, 25 bp, Homo sapien
ttgtattgagatgacaacattgaaa

SEQ ID NO: 2352624 - DNA, 25 bp, Homo sapien
tttgtattgagatgacaacattgaa

SEQ ID NO: 2352625 - DNA, 25 bp, Homo sapien
tttcaatgttgtcatctcaatacaa

SEQ ID NO: 2352626 - DNA, 25 bp, Homo sapien
tcaatgttgtcatctcaatacaaac

SEQ ID NO: 2352627 - DNA, 25 bp, Homo sapien
ttcaatgttgtcatctcaatacaaa

SEQ ID NO: 2352628 - DNA, 25 bp, Homo sapien
gaccaaggcaaagagtacatgtaga

SEQ ID NO: 2352629 - DNA, 25 bp, Homo sapien
gaggaaggtgatgtataccatccct

SEQ ID NO: 2352630 - DNA, 25 bp, Homo sapien
tgctgctcttcacttctggccggag

SEQ ID NO: 2352631 - DNA, 25 bp, Homo sapien
tctggccggagttcttcaagcttac

SEQ ID NO: 2352632 - DNA, 25 bp, Homo sapien
caagcacctatgtgttggagtgggt

SEQ ID NO: 2352633 - DNA, 25 bp, Homo sapien
gctaaaacgtgttatgcatgtctct

SEQ ID NO: 2352634 - DNA, 25 bp, Homo sapien
ctccggccagaagtgaagagcagca

SEQ ID NO: 2352635 - DNA, 25 bp, Homo sapien
tacagccagactctaaaagtgaaca

SEQ ID NO: 2352636 - DNA, 25 bp, Homo sapien
tactagaagggatggtatacatcac

SEQ ID NO: 2352637 - DNA, 25 bp, Homo sapien
tacccactccaacacataggtgctt

SEQ ID NO: 2352638 - DNA, 25 bp, Homo sapien
tagtaagcttgaagaactccggcca

SEQ ID NO: 2352639 - DNA, 25 bp, Homo sapien
gagacatgcataacacgttttagca

SEQ ID NO: 2352640 - DNA, 25 bp, Homo sapien
caggaattactgtagttaccttttg

SEQ ID NO: 2352641 - DNA, 25 bp, Homo sapien
tgtagttgctgaaatttattatgga

SEQ ID NO: 2352642 - DNA, 25 bp, Homo sapien
gttaccttttgtgtagttgctgaaa

SEQ ID NO: 2352643 - DNA, 25 bp, Homo sapien
gcctggcaggaattactgtagttac

SEQ ID NO: 2352644 - DNA, 25 bp, Homo sapien
tgttagctgtttggtgcatttaatt

SEQ ID NO: 2352645 - DNA, 25 bp, Homo sapien
ccttttgtgtagttgctgaaattta

SEQ ID NO: 2352646 - DNA, 25 bp, Homo sapien
tccataataaatttcagcaactaca

SEQ ID NO: 2352647 - DNA, 25 bp, Homo sapien
gtaactacagtaattcctgccaggc

SEQ ID NO: 2352648 - DNA, 25 bp, Homo sapien
aattaaatgcaccaaacagctaaca

SEQ ID NO: 2352649 - DNA, 25 bp, Homo sapien
tttcagcaactacacaaaaggtaac

SEQ ID NO: 2352650 - DNA, 25 bp, Homo sapien
caaaaggtaactacagtaattcctg

SEQ ID NO: 2352651 - DNA, 25 bp, Homo sapien
taaatttcagcaactacacaaaagg

SEQ ID NO: 2352652 - DNA, 25 bp, Homo sapien
taaagtcttgtatagcaatatgctt

SEQ ID NO: 2352653 - DNA, 25 bp, Homo sapien
cggattctcagttacacttaaagag

SEQ ID NO: 2352654 - DNA, 25 bp, Homo sapien
catgcagggactctgcaagtttggc

SEQ ID NO: 2352655 - DNA, 25 bp, Homo sapien
caagggcatatttaacggattctca

SEQ ID NO: 2352656 - DNA, 25 bp, Homo sapien
gatgggctccgactttccttggcta

SEQ ID NO: 2352657 - DNA, 25 bp, Homo sapien
tccgactttccttggctactccatg

SEQ ID NO: 2352658 - DNA, 25 bp, Homo sapien
catggagtagccaaggaaagtcgga

SEQ ID NO: 2352659 - DNA, 25 bp, Homo sapien
caaggaaagtcggagcccatccttt

SEQ ID NO: 2352660 - DNA, 25 bp, Homo sapien
caaacttgcagagtccctgcatgga

SEQ ID NO: 2352661 - DNA, 25 bp, Homo sapien
tgagaatccgttaaatatgcccttg

SEQ ID NO: 2352662 - DNA, 25 bp, Homo sapien
agcatattgctatacaagactttaa

SEQ ID NO: 2352663 - DNA, 25 bp, Homo sapien
ctctttaagtgtaactgagaatccg

SEQ ID NO: 2352664 - DNA, 25 bp, Homo sapien
tgagttttttagagaagggctctgg

SEQ ID NO: 2352665 - DNA, 25 bp, Homo sapien
ccgagtgtttaagactttccgagtg

SEQ ID NO: 2352666 - DNA, 25 bp, Homo sapien
taaatcgtatgcctgtgtcagcaga

SEQ ID NO: 2352667 - DNA, 25 bp, Homo sapien
tcagcagagacaggttgataaatgt

SEQ ID NO: 2352668 - DNA, 25 bp, Homo sapien
tctgggactcctttgcgtagttccg

SEQ ID NO: 2352669 - DNA, 25 bp, Homo sapien
aagaaaatggtcctacaaagtgagc

SEQ ID NO: 2352670 - DNA, 25 bp, Homo sapien
ggaactacgcaaaggagtcccagag

SEQ ID NO: 2352671 - DNA, 25 bp, Homo sapien
aaatatctagatgccatgccccgga

SEQ ID NO: 2352672 - DNA, 25 bp, Homo sapien
caagttgctcactttgtaggaccat

SEQ ID NO: 2352673 - DNA, 25 bp, Homo sapien
tctgctgacacaggcatacgattta

SEQ ID NO: 2352674 - DNA, 25 bp, Homo sapien
gacaaaaatctaagaacactcggaa

SEQ ID NO: 2352675 - DNA, 25 bp, Homo sapien
cactcggaaagtcttaaacactcgg

SEQ ID NO: 2352676 - DNA, 25 bp, Homo sapien
tggcgcacatcactatatttggctg

SEQ ID NO: 2352677 - DNA, 25 bp, Homo sapien
aattctttgctgacattgccctggc

SEQ ID NO: 2352678 - DNA, 25 bp, Homo sapien
aggttcgaattcaaacccagccagg

SEQ ID NO: 2352679 - DNA, 25 bp, Homo sapien
atacttatctctggcgcacatcact

SEQ ID NO: 2352680 - DNA, 25 bp, Homo sapien
cctatggaagctgctaaggttcgaa

SEQ ID NO: 2352681 - DNA, 25 bp, Homo sapien
ccagccaggttatgccaacactttg

SEQ ID NO: 2352682 - DNA, 25 bp, Homo sapien
ttcgaaccttagcagcttccatagg

SEQ ID NO: 2352683 - DNA, 25 bp, Homo sapien
gcaatgtcagcaaagaattcagcac

SEQ ID NO: 2352684 - DNA, 25 bp, Homo sapien
gagccagggcaatgtcagcaaagaa

SEQ ID NO: 2352685 - DNA, 25 bp, Homo sapien
cctggctgggtttgaattcgaacct

SEQ ID NO: 2352686 - DNA, 25 bp, Homo sapien
caaagtgttggcataacctggctgg

SEQ ID NO: 2352687 - DNA, 25 bp, Homo sapien
ccaaatatagtgatgtgcgccagag

SEQ ID NO: 2352688 - DNA, 25 bp, Homo sapien
aagccccgcagtgaatgttcaaagc

SEQ ID NO: 2352689 - DNA, 25 bp, Homo sapien
tgaacgtactgttgaagcactgtac

SEQ ID NO: 2352690 - DNA, 25 bp, Homo sapien
agtttgtggttcctaagccccgcag

SEQ ID NO: 2352691 - DNA, 25 bp, Homo sapien
taagccccgcagtgaatgttcaaag

SEQ ID NO: 2352692 - DNA, 25 bp, Homo sapien
ccccgcagtgaatgttcaaagccag

SEQ ID NO: 2352693 - DNA, 25 bp, Homo sapien
ttgaacgtactgttgaagcactgta

SEQ ID NO: 2352694 - DNA, 25 bp, Homo sapien
gagacagataccatacaccatgatg

SEQ ID NO: 2352695 - DNA, 25 bp, Homo sapien
ttcgcctgctttgaacgtactgttg

SEQ ID NO: 2352696 - DNA, 25 bp, Homo sapien
tggatgagacagataccatacacca

SEQ ID NO: 2352697 - DNA, 25 bp, Homo sapien
gacagataccatacaccatgatgaa

SEQ ID NO: 2352698 - DNA, 25 bp, Homo sapien
gatgagacagataccatacaccatg

SEQ ID NO: 2352699 - DNA, 25 bp, Homo sapien
gaagttcgcctgctttgaacgtact

SEQ ID NO: 2352700 - DNA, 25 bp, Homo sapien
tggtgtatggtatctgtctcatcca

SEQ ID NO: 2352701 - DNA, 25 bp, Homo sapien
agtacgttcaaagcaggcgaacttc

SEQ ID NO: 2352702 - DNA, 25 bp, Homo sapien
ttcatcatggtgtatggtatctgtc

SEQ ID NO: 2352703 - DNA, 25 bp, Homo sapien
catcatggtgtatggtatctgtctc

SEQ ID NO: 2352704 - DNA, 25 bp, Homo sapien
catggtgtatggtatctgtctcatc

SEQ ID NO: 2352705 - DNA, 25 bp, Homo sapien
caacagtacgttcaaagcaggcgaa

SEQ ID NO: 2352706 - DNA, 25 bp, Homo sapien
gtacagtgcttcaacagtacgttca

SEQ ID NO: 2352707 - DNA, 25 bp, Homo sapien
ctgcggggcttaggaaccacaaact

SEQ ID NO: 2352708 - DNA, 25 bp, Homo sapien
ggctttgaacattcactgcggggct

SEQ ID NO: 2352709 - DNA, 25 bp, Homo sapien
ctggctttgaacattcactgcgggg

SEQ ID NO: 2352710 - DNA, 25 bp, Homo sapien
tacagtgcttcaacagtacgttcaa

SEQ ID NO: 2352711 - DNA, 25 bp, Homo sapien
ctttgaacattcactgcggggctta

SEQ ID NO: 2352712 - DNA, 25 bp, Homo sapien
ctccaaaggttataaagcagtgttt

SEQ ID NO: 2352713 - DNA, 25 bp, Homo sapien
tgctaactagttcctaaaagggctg

SEQ ID NO: 2352714 - DNA, 25 bp, Homo sapien
cataaatacttgctaactagttcct

SEQ ID NO: 2352715 - DNA, 25 bp, Homo sapien
cgttttacataggatagacagcttg

SEQ ID NO: 2352716 - DNA, 25 bp, Homo sapien
tcatgggatgtcattattaggcttg

SEQ ID NO: 2352717 - DNA, 25 bp, Homo sapien
aatgtattgatcttactgttgcacc

SEQ ID NO: 2352718 - DNA, 25 bp, Homo sapien
ggtgcaacagtaagatcaatacatt

SEQ ID NO: 2352719 - DNA, 25 bp, Homo sapien
aaacactgctttataacctttggag

SEQ ID NO: 2352720 - DNA, 25 bp, Homo sapien
caagctgtctatcctatgtaaaacg

SEQ ID NO: 2352721 - DNA, 25 bp, Homo sapien
caagcctaataatgacatcccatga

SEQ ID NO: 2352722 - DNA, 25 bp, Homo sapien
tcaatacattcccaagcctaataat

SEQ ID NO: 2352723 - DNA, 25 bp, Homo sapien
cagcccttttaggaactagttagca

SEQ ID NO: 2352724 - DNA, 25 bp, Homo sapien
actggcactgtatgggatcctttat

SEQ ID NO: 2352725 - DNA, 25 bp, Homo sapien
gcactgtatgggatcctttatcttt

SEQ ID NO: 2352726 - DNA, 25 bp, Homo sapien
ctggcactgtatgggatcctttatc

SEQ ID NO: 2352727 - DNA, 25 bp, Homo sapien
actgtatgggatcctttatcttttt

SEQ ID NO: 2352728 - DNA, 25 bp, Homo sapien
cactgtatgggatcctttatctttt

SEQ ID NO: 2352729 - DNA, 25 bp, Homo sapien
ggcactgtatgggatcctttatctt

SEQ ID NO: 2352730 - DNA, 25 bp, Homo sapien
gataaaggatcccatacagtgccag

SEQ ID NO: 2352731 - DNA, 25 bp, Homo sapien
aagataaaggatcccatacagtgcc

SEQ ID NO: 2352732 - DNA, 25 bp, Homo sapien
ataaaggatcccatacagtgccagt

SEQ ID NO: 2352733 - DNA, 25 bp, Homo sapien
aaaagataaaggatcccatacagtg

SEQ ID NO: 2352734 - DNA, 25 bp, Homo sapien
aaaaagataaaggatcccatacagt

SEQ ID NO: 2352735 - DNA, 25 bp, Homo sapien
aaagataaaggatcccatacagtgc

SEQ ID NO: 2352736 - DNA, 25 bp, Homo sapien
tctctggtcctcaagagacttggat

SEQ ID NO: 2352737 - DNA, 25 bp, Homo sapien
ctctggtcctcaagagacttggatt

SEQ ID NO: 2352738 - DNA, 25 bp, Homo sapien
tctggtcctcaagagacttggattt

SEQ ID NO: 2352739 - DNA, 25 bp, Homo sapien
ctggtcctcaagagacttggattta

SEQ ID NO: 2352740 - DNA, 25 bp, Homo sapien
atccaagtctcttgaggaccagaga

SEQ ID NO: 2352741 - DNA, 25 bp, Homo sapien
taaatccaagtctcttgaggaccag

SEQ ID NO: 2352742 - DNA, 25 bp, Homo sapien
aaatccaagtctcttgaggaccaga

SEQ ID NO: 2352743 - DNA, 25 bp, Homo sapien
aatccaagtctcttgaggaccagag

SEQ ID NO: 2352744 - DNA, 25 bp, Homo sapien
tgtgcaattgtttctcaccctgctg

SEQ ID NO: 2352745 - DNA, 25 bp, Homo sapien
tagcagtgcttctctggtcctcaag

SEQ ID NO: 2352746 - DNA, 25 bp, Homo sapien
tctctggtcctcaagagacttggat

SEQ ID NO: 2352747 - DNA, 25 bp, Homo sapien
caccctgctgattctgtggtatctg

SEQ ID NO: 2352748 - DNA, 25 bp, Homo sapien
gaataaagaaaaaggtagcagtgct

SEQ ID NO: 2352749 - DNA, 25 bp, Homo sapien
ctggtcctcaagagacttggattta

SEQ ID NO: 2352750 - DNA, 25 bp, Homo sapien
gataccacagaatcagcagggtgag

SEQ ID NO: 2352751 - DNA, 25 bp, Homo sapien
ttgaggaccagagaagcactgctac

SEQ ID NO: 2352752 - DNA, 25 bp, Homo sapien
taaatccaagtctcttgaggaccag

SEQ ID NO: 2352753 - DNA, 25 bp, Homo sapien
aatccaagtctcttgaggaccagag

SEQ ID NO: 2352754 - DNA, 25 bp, Homo sapien
ttcaacacagataccacagaatcag

SEQ ID NO: 2352755 - DNA, 25 bp, Homo sapien
cagcagggtgagaaacaattgcaca

SEQ ID NO: 2352756 - DNA, 25 bp, Homo sapien
gaacaacagttttggatatgttgca

SEQ ID NO: 2352757 - DNA, 25 bp, Homo sapien
cttgaaagaaagaacaacagttttg

SEQ ID NO: 2352758 - DNA, 25 bp, Homo sapien
agaaagaacaacagttttggatatg

SEQ ID NO: 2352759 - DNA, 25 bp, Homo sapien
cagttttggatatgttgcatttttt

SEQ ID NO: 2352760 - DNA, 25 bp, Homo sapien
catttgcttttcctgtttgaaccag

SEQ ID NO: 2352761 - DNA, 25 bp, Homo sapien
tgaaagaaagaacaacagttttgga

SEQ ID NO: 2352762 - DNA, 25 bp, Homo sapien
tggttcaaacaggaaaagcaaatga

SEQ ID NO: 2352763 - DNA, 25 bp, Homo sapien
gcaacatatccaaaactgttgttct

SEQ ID NO: 2352764 - DNA, 25 bp, Homo sapien
aaaaaatgcaacatatccaaaactg

SEQ ID NO: 2352765 - DNA, 25 bp, Homo sapien
catatccaaaactgttgttctttct

SEQ ID NO: 2352766 - DNA, 25 bp, Homo sapien
tctttcaagaaaaaaacatcatcct

SEQ ID NO: 2352767 - DNA, 25 bp, Homo sapien
caaaactgttgttctttctttcaag

SEQ ID NO: 2352768 - DNA, 25 bp, Homo sapien
tgtttgcccgtatcatcatgattgg

SEQ ID NO: 2352769 - DNA, 25 bp, Homo sapien
tccacccgagatgccagagtctctg

SEQ ID NO: 2352770 - DNA, 25 bp, Homo sapien
tggtttatctatgactccgtgaagg

SEQ ID NO: 2352771 - DNA, 25 bp, Homo sapien
gaagggactgtttgcccgtatcatc

SEQ ID NO: 2352772 - DNA, 25 bp, Homo sapien
tcatgattggtaccctgactgcact

SEQ ID NO: 2352773 - DNA, 25 bp, Homo sapien
acccgagatgccagagtctctgaag

SEQ ID NO: 2352774 - DNA, 25 bp, Homo sapien
cttcagagactctggcatctcgggt

SEQ ID NO: 2352775 - DNA, 25 bp, Homo sapien
caatcatgatgatacgggcaaacag

SEQ ID NO: 2352776 - DNA, 25 bp, Homo sapien
cagagactctggcatctcgggtgga

SEQ ID NO: 2352777 - DNA, 25 bp, Homo sapien
agtgcagtcagggtaccaatcatga

SEQ ID NO: 2352778 - DNA, 25 bp, Homo sapien
gatgatacgggcaaacagtcccttc

SEQ ID NO: 2352779 - DNA, 25 bp, Homo sapien
ccttcacggagtcatagataaacca

SEQ ID NO: 2352780 - DNA, 25 bp, Homo sapien
actgtagtactcttgcttaaggcaa

SEQ ID NO: 2352781 - DNA, 25 bp, Homo sapien
tgtagtactcttgcttaaggcaaga

SEQ ID NO: 2352782 - DNA, 25 bp, Homo sapien
gtactcttgcttaaggcaagagttt

SEQ ID NO: 2352783 - DNA, 25 bp, Homo sapien
gatataattactgtagtactcttgc

SEQ ID NO: 2352784 - DNA, 25 bp, Homo sapien
tactgtagtactcttgcttaaggca

SEQ ID NO: 2352785 - DNA, 25 bp, Homo sapien
cctgatataattactgtagtactct

SEQ ID NO: 2352786 - DNA, 25 bp, Homo sapien
ttgccttaagcaagagtactacagt

SEQ ID NO: 2352787 - DNA, 25 bp, Homo sapien
tgccttaagcaagagtactacagta

SEQ ID NO: 2352788 - DNA, 25 bp, Homo sapien
tcttgccttaagcaagagtactaca

SEQ ID NO: 2352789 - DNA, 25 bp, Homo sapien
gccttaagcaagagtactacagtaa

SEQ ID NO: 2352790 - DNA, 25 bp, Homo sapien
agagtactacagtaattatatcagg

SEQ ID NO: 2352791 - DNA, 25 bp, Homo sapien
aaactcttgccttaagcaagagtac

SEQ ID NO: 2352792 - DNA, 25 bp, Homo sapien
cagaaattgtcatatgtctcaagtt

SEQ ID NO: 2352793 - DNA, 25 bp, Homo sapien
caagttttatcacacaaagttcctg

SEQ ID NO: 2352794 - DNA, 25 bp, Homo sapien
tgtctcaagttttatcacacaaagt

SEQ ID NO: 2352795 - DNA, 25 bp, Homo sapien
tattttggcaagtaaatgtcagtgt

SEQ ID NO: 2352796 - DNA, 25 bp, Homo sapien
ttatcacacaaagttcctgtatttc

SEQ ID NO: 2352797 - DNA, 25 bp, Homo sapien
aatattccagttgctattcagaaat

SEQ ID NO: 2352798 - DNA, 25 bp, Homo sapien
aactttgtgtgataaaacttgagac

SEQ ID NO: 2352799 - DNA, 25 bp, Homo sapien
tatacactgacatttacttgccaaa

SEQ ID NO: 2352800 - DNA, 25 bp, Homo sapien
tacaggaactttgtgtgataaaact

SEQ ID NO: 2352801 - DNA, 25 bp, Homo sapien
atttctgaatagcaactggaatatt

SEQ ID NO: 2352802 - DNA, 25 bp, Homo sapien
gaaatacaggaactttgtgtgataa

SEQ ID NO: 2352803 - DNA, 25 bp, Homo sapien
aacttgagacatatgacaatttctg

SEQ ID NO: 2352804 - DNA, 25 bp, Homo sapien
ccaggccatctgtacgctttacgta

SEQ ID NO: 2352805 - DNA, 25 bp, Homo sapien
cgtattacacataaggactctaggt

SEQ ID NO: 2352806 - DNA, 25 bp, Homo sapien
tgagttcactgaccttaccatgagt

SEQ ID NO: 2352807 - DNA, 25 bp, Homo sapien
gaagttaacatgcaactagctgcac

SEQ ID NO: 2352808 - DNA, 25 bp, Homo sapien
gaaatagctttgaaccgtaactcta

SEQ ID NO: 2352809 - DNA, 25 bp, Homo sapien
ggctccatagcttgaacacagcgta

SEQ ID NO: 2352810 - DNA, 25 bp, Homo sapien
ctctagtaactacagtggcaggctc

SEQ ID NO: 2352811 - DNA, 25 bp, Homo sapien
gagaattcgcatcactttaagtggg

SEQ ID NO: 2352812 - DNA, 25 bp, Homo sapien
ctatgaaaaaacaggagcaagtagt

SEQ ID NO: 2352813 - DNA, 25 bp, Homo sapien
agagcaagaccttctcaaaaataaa

SEQ ID NO: 2352814 - DNA, 25 bp, Homo sapien
agcaagaccttctcaaaaataaaat

SEQ ID NO: 2352815 - DNA, 25 bp, Homo sapien
gacagagcaagaccttctcaaaaat

SEQ ID NO: 2352816 - DNA, 25 bp, Homo sapien
acagagcaagaccttctcaaaaata

SEQ ID NO: 2352817 - DNA, 25 bp, Homo sapien
cacctggcctgatatacaatttctg

SEQ ID NO: 2352818 - DNA, 25 bp, Homo sapien
tactagtgactgctatgcgcttcat

SEQ ID NO: 2352819 - DNA, 25 bp, Homo sapien
ggacatgtcgatcccaaaaatcata

SEQ ID NO: 2352820 - DNA, 25 bp, Homo sapien
cactttatggtttcagaacaaggat

SEQ ID NO: 2352821 - DNA, 25 bp, Homo sapien
tcaactatgtgatatccaggatttt

SEQ ID NO: 2352822 - DNA, 25 bp, Homo sapien
actgtgaactacagagtcctgtaag

SEQ ID NO: 2352823 - DNA, 25 bp, Homo sapien
ttacaagatgccgatagtagctggc

SEQ ID NO: 2352824 - DNA, 25 bp, Homo sapien
ttcaggaagccacagtgttcaactg

SEQ ID NO: 2352825 - DNA, 25 bp, Homo sapien
gttcaggagttcaagaccagccttg

SEQ ID NO: 2352826 - DNA, 25 bp, Homo sapien
ctatctgtactaaaaatacaaaaat

SEQ ID NO: 2352827 - DNA, 25 bp, Homo sapien
tgggaggcagaggtgagggatcact

SEQ ID NO: 2352828 - DNA, 25 bp, Homo sapien
ccaacatggcgaaaccctatctgta

SEQ ID NO: 2352829 - DNA, 25 bp, Homo sapien
cagtggatacacagtgggcaactac

SEQ ID NO: 2352830 - DNA, 25 bp, Homo sapien
ccagggtaggtgcttcagtggatac

SEQ ID NO: 2352831 - DNA, 25 bp, Homo sapien
ttacttgtgtccactcatgggccca

SEQ ID NO: 2352832 - DNA, 25 bp, Homo sapien
taagccaaacgtctggacatcatgg

SEQ ID NO: 2352833 - DNA, 25 bp, Homo sapien
ctgtctttgggcatacgcattagca

SEQ ID NO: 2352834 - DNA, 25 bp, Homo sapien
tcttcataattgagcacacagtcca

SEQ ID NO: 2352835 - DNA, 25 bp, Homo sapien
cataggctaatcttctgattgaagc

SEQ ID NO: 2352836 - DNA, 25 bp, Homo sapien
gtacgactttatccaactttgtgtg

SEQ ID NO: 2352837 - DNA, 25 bp, Homo sapien
ggcttgtcgtcctagggtctccaga

SEQ ID NO: 2352838 - DNA, 25 bp, Homo sapien
caatatcgcagtggaaggcgctgtg

SEQ ID NO: 2352839 - DNA, 25 bp, Homo sapien
gactcagtgaagcaacgaggatgcc

SEQ ID NO: 2352840 - DNA, 25 bp, Homo sapien
ccagacatgtctgaggtgaagagcc

SEQ ID NO: 2352841 - DNA, 25 bp, Homo sapien
agcggcggcgcgcccgacgtggcgc

SEQ ID NO: 2352842 - DNA, 25 bp, Homo sapien
cggcggcgcgcccgacgtggcgcgc

SEQ ID NO: 2352843 - DNA, 25 bp, Homo sapien
ggcggcgcgcccgacgtggcgcgcg

SEQ ID NO: 2352844 - DNA, 25 bp, Homo sapien
gcggcggcgcgcccgacgtggcgcg

SEQ ID NO: 2352845 - DNA, 25 bp, Homo sapien
gcgcgcgcccgcttatgcaaataaa

SEQ ID NO: 2352846 - DNA, 25 bp, Homo sapien
tggacagcggagcagtcaaatcccg

SEQ ID NO: 2352847 - DNA, 25 bp, Homo sapien
ctggacagcggagcagtcaaatccc

SEQ ID NO: 2352848 - DNA, 25 bp, Homo sapien
cgcgcccgcttatgcaaataaacac

SEQ ID NO: 2352849 - DNA, 25 bp, Homo sapien
atagagcagtcacgtccactcgcta

SEQ ID NO: 2352850 - DNA, 25 bp, Homo sapien
ggaggaggtcttcccggcctgtggc

SEQ ID NO: 2352851 - DNA, 25 bp, Homo sapien
ccttttgcccgggatagagcagtca

SEQ ID NO: 2352852 - DNA, 25 bp, Homo sapien
tgcggcacctcaagtcttcgcgggt

SEQ ID NO: 2352853 - DNA, 25 bp, Homo sapien
agtcccggagcgccgcggtgaggcc

SEQ ID NO: 2352854 - DNA, 25 bp, Homo sapien
tcccggagcgccgcggtgaggcccg

SEQ ID NO: 2352855 - DNA, 25 bp, Homo sapien
acagtcccggagcgccgcggtgagg

SEQ ID NO: 2352856 - DNA, 25 bp, Homo sapien
cacagtcccggagcgccgcggtgag

SEQ ID NO: 2352857 - DNA, 25 bp, Homo sapien
ttggcgaggtgggcgtccacccaac

SEQ ID NO: 2352858 - DNA, 25 bp, Homo sapien
gcgaggtgggcgtccacccaacgca

SEQ ID NO: 2352859 - DNA, 25 bp, Homo sapien
ccagggacctccgaaggttggcgag

SEQ ID NO: 2352860 - DNA, 25 bp, Homo sapien
caggcgcctcccctggatctctgca

SEQ ID NO: 2352861 - DNA, 25 bp, Homo sapien
ggcactgccgggacaagactgggag

SEQ ID NO: 2352862 - DNA, 25 bp, Homo sapien
aagcctttgcgcctaggtcttagtg

SEQ ID NO: 2352863 - DNA, 25 bp, Homo sapien
gggagggcggcactgccgggacaag

SEQ ID NO: 2352864 - DNA, 25 bp, Homo sapien
gtgcagggctctgtctcgccacata

SEQ ID NO: 2352865 - DNA, 25 bp, Homo sapien
ctgaaatcagctaccaagcctccaa

SEQ ID NO: 2352866 - DNA, 25 bp, Homo sapien
tcagtccctgaaatcagctaccaag

SEQ ID NO: 2352867 - DNA, 25 bp, Homo sapien
gtccctgaaatcagctaccaagcct

SEQ ID NO: 2352868 - DNA, 25 bp, Homo sapien
gaaatcagctaccaagcctccaaag

SEQ ID NO: 2352869 - DNA, 25 bp, Homo sapien
tttgtcaggccaataaaaatatgaa

SEQ ID NO: 2352870 - DNA, 25 bp, Homo sapien
aatatttgtcaggccaataaaaata

SEQ ID NO: 2352871 - DNA, 25 bp, Homo sapien
caaaatatttgtcaggccaataaaa

SEQ ID NO: 2352872 - DNA, 25 bp, Homo sapien
tatttgtcaggccaataaaaatatg

SEQ ID NO: 2352873 - DNA, 25 bp, Homo sapien
tttctctctctgagctgtcaaccat

SEQ ID NO: 2352874 - DNA, 25 bp, Homo sapien
ctctctctgagctgtcaaccatgag

SEQ ID NO: 2352875 - DNA, 25 bp, Homo sapien
cttccctcagatctttctctctctg

SEQ ID NO: 2352876 - DNA, 25 bp, Homo sapien
ttccctcagatctttctctctctga

SEQ ID NO: 2352877 - DNA, 25 bp, Homo sapien
gaagcaaacaatttcgagcttttgc

SEQ ID NO: 2352878 - DNA, 25 bp, Homo sapien
tgttgaagcaaacaatttcgagctt

SEQ ID NO: 2352879 - DNA, 25 bp, Homo sapien
aacaatttcgagcttttgcatccat

SEQ ID NO: 2352880 - DNA, 25 bp, Homo sapien
ctatgttgaagcaaacaatttcgag

SEQ ID NO: 2352881 - DNA, 25 bp, Homo sapien
gatgtaggatgtcttgatgtccttt

SEQ ID NO: 2352882 - DNA, 25 bp, Homo sapien
ccatgatgtaggatgtcttgatgtc

SEQ ID NO: 2352883 - DNA, 25 bp, Homo sapien
catgatgtaggatgtcttgatgtcc

SEQ ID NO: 2352884 - DNA, 25 bp, Homo sapien
gtaggatgtcttgatgtccttttcc

SEQ ID NO: 2352885 - DNA, 25 bp, Homo sapien
gatacgtaggaatcattatcttttt

SEQ ID NO: 2352886 - DNA, 25 bp, Homo sapien
gaagagacaacaggaatgccatcat

SEQ ID NO: 2352887 - DNA, 25 bp, Homo sapien
tatccttcatgtagtagagcattgt

SEQ ID NO: 2352888 - DNA, 25 bp, Homo sapien
aatcagcatagctgctctttgctgt

SEQ ID NO: 2352889 - DNA, 25 bp, Homo sapien
catacgaagttattccactaactga

SEQ ID NO: 2352890 - DNA, 25 bp, Homo sapien
ccatgtatggtgacccatcctggtt

SEQ ID NO: 2352891 - DNA, 25 bp, Homo sapien
taaaagggaatgatctctaacagct

SEQ ID NO: 2352892 - DNA, 25 bp, Homo sapien
tgacaaaaacaactggcctctgtgg

SEQ ID NO: 2352893 - DNA, 25 bp, Homo sapien
cctttcaatttggagagcttctgct

SEQ ID NO: 2352894 - DNA, 25 bp, Homo sapien
cttatgcctcagccacctgggtagc

SEQ ID NO: 2352895 - DNA, 25 bp, Homo sapien
tcttatgcctcagccacctgggtag

SEQ ID NO: 2352896 - DNA, 25 bp, Homo sapien
tcatcctgatccaaccgtgtgcaaa

SEQ ID NO: 2352897 - DNA, 25 bp, Homo sapien
ggtgtttgcgaagcatcagaatgcg

SEQ ID NO: 2352898 - DNA, 25 bp, Homo sapien
tcatcagaagcccagatttgtcttg

SEQ ID NO: 2352899 - DNA, 25 bp, Homo sapien
gcggagacggtctttagcctcttca

SEQ ID NO: 2352900 - DNA, 25 bp, Homo sapien
atcttattgggacatgggacctgac

SEQ ID NO: 2352901 - DNA, 25 bp, Homo sapien
ttattgggacatgggacctgacaca

SEQ ID NO: 2352902 - DNA, 25 bp, Homo sapien
tctcaagaggtcagtagttacatct

SEQ ID NO: 2352903 - DNA, 25 bp, Homo sapien
gatgttctcaagaggtcagtagtta

SEQ ID NO: 2352904 - DNA, 25 bp, Homo sapien
gagagaaaagcaggaaagcaatggt

SEQ ID NO: 2352905 - DNA, 25 bp, Homo sapien
agaaaagcaggaaagcaatggttct

SEQ ID NO: 2352906 - DNA, 25 bp, Homo sapien
gagaaaagcaggaaagcaatggttc

SEQ ID NO: 2352907 - DNA, 25 bp, Homo sapien
agagagaaaagcaggaaagcaatgg

SEQ ID NO: 2352908 - DNA, 25 bp, Homo sapien
caattttaggccgagtggcagccac

SEQ ID NO: 2352909 - DNA, 25 bp, Homo sapien
gatgatgtggtaggtagcatgcaaa

SEQ ID NO: 2352910 - DNA, 25 bp, Homo sapien
caatggtacatatgagatgatgtgg

SEQ ID NO: 2352911 - DNA, 25 bp, Homo sapien
agaaaaagcaattttaggccgagtg

SEQ ID NO: 2352912 - DNA, 25 bp, Homo sapien
aacatcatccaagatcaagagagac

SEQ ID NO: 2352913 - DNA, 25 bp, Homo sapien
tttcaacacccaagagtcccaaaca

SEQ ID NO: 2352914 - DNA, 25 bp, Homo sapien
aaacatcatccaagatcaagagaga

SEQ ID NO: 2352915 - DNA, 25 bp, Homo sapien
actgaatctgtaacactcttgtctc

SEQ ID NO: 2352916 - DNA, 25 bp, Homo sapien
attactgaatctgtaacactcttgt

SEQ ID NO: 2352917 - DNA, 25 bp, Homo sapien
ttactgaatctgtaacactcttgtc

SEQ ID NO: 2352918 - DNA, 25 bp, Homo sapien
tactgaatctgtaacactcttgtct

SEQ ID NO: 2352919 - DNA, 25 bp, Homo sapien
tccacagggactacatatttaggac

SEQ ID NO: 2352920 - DNA, 25 bp, Homo sapien
actctccacagggactacatattta

SEQ ID NO: 2352921 - DNA, 25 bp, Homo sapien
tctccacagggactacatatttagg

SEQ ID NO: 2352922 - DNA, 25 bp, Homo sapien
atgagcttgttctggcaaatctgcc

SEQ ID NO: 2352923 - DNA, 25 bp, Homo sapien
tttttaactctaacagcagaggtca

SEQ ID NO: 2352924 - DNA, 25 bp, Homo sapien
ttttaactctaacagcagaggtcac

SEQ ID NO: 2352925 - DNA, 25 bp, Homo sapien
tttaactctaacagcagaggtcaca

SEQ ID NO: 2352926 - DNA, 25 bp, Homo sapien
aaattaacaaaactggccacgtgtg

SEQ ID NO: 2352927 - DNA, 25 bp, Homo sapien
tggacatgcatcaccctttgtaata

SEQ ID NO: 2352928 - DNA, 25 bp, Homo sapien
attaacaaaactggccacgtgtggt

SEQ ID NO: 2352929 - DNA, 25 bp, Homo sapien
gcatcaccctttgtaataactacaa

SEQ ID NO: 2352930 - DNA, 25 bp, Homo sapien
cttctgaaggatggaaagatctgtg

SEQ ID NO: 2352931 - DNA, 25 bp, Homo sapien
gctgtttgaggtagtactcccagcg

SEQ ID NO: 2352932 - DNA, 25 bp, Homo sapien
gacatggcttcatctagagcctcat

SEQ ID NO: 2352933 - DNA, 25 bp, Homo sapien
cccagcgattgggaaaatcacgtaa

SEQ ID NO: 2352934 - DNA, 25 bp, Homo sapien
tgatgaggatcattgatcccattac

SEQ ID NO: 2352935 - DNA, 25 bp, Homo sapien
acccaatgatgaggatcattgatcc

SEQ ID NO: 2352936 - DNA, 25 bp, Homo sapien
aatgatgaggatcattgatcccatt

SEQ ID NO: 2352937 - DNA, 25 bp, Homo sapien
ccaatgatgaggatcattgatccca

SEQ ID NO: 2352938 - DNA, 25 bp, Homo sapien
acgaaacgactttccattccgatca

SEQ ID NO: 2352939 - DNA, 25 bp, Homo sapien
tttccattccgatcacagaataaaa

SEQ ID NO: 2352940 - DNA, 25 bp, Homo sapien
agaaaatctacttgaagatcatgta

SEQ ID NO: 2352941 - DNA, 25 bp, Homo sapien
tcatgtaaataataacgaaacgact

SEQ ID NO: 2352942 - DNA, 25 bp, Homo sapien
tgtgataggccagaaagttgtacca

SEQ ID NO: 2352943 - DNA, 25 bp, Homo sapien
tacatacagtcttcctgatctggtg

SEQ ID NO: 2352944 - DNA, 25 bp, Homo sapien
tgatctggtgaaagagtatgcggct

SEQ ID NO: 2352945 - DNA, 25 bp, Homo sapien
cggctggtgatatctctgaaactga

SEQ ID NO: 2352946 - DNA, 25 bp, Homo sapien
tttttgctttaatccaatccaggga

SEQ ID NO: 2352947 - DNA, 25 bp, Homo sapien
tgaatcagatgagcagggcctacaa

SEQ ID NO: 2352948 - DNA, 25 bp, Homo sapien
tttgctttaatccaatccagggaaa

SEQ ID NO: 2352949 - DNA, 25 bp, Homo sapien
atcagatgagcagggcctacaagtt

SEQ ID NO: 2352950 - DNA, 25 bp, Homo sapien
tgtcgtccaagaaggtgtccattta

SEQ ID NO: 2352951 - DNA, 25 bp, Homo sapien
ctgtcgtccaagaaggtgtccattt

SEQ ID NO: 2352952 - DNA, 25 bp, Homo sapien
aactcctgaaaattctcactgactg

SEQ ID NO: 2352953 - DNA, 25 bp, Homo sapien
tccatttaaagataaaaactcctga

SEQ ID NO: 2352954 - DNA, 25 bp, Homo sapien
gacccagttgtacaatattaggaaa

SEQ ID NO: 2352955 - DNA, 25 bp, Homo sapien
cagcttagcttgctgataaacttct

SEQ ID NO: 2352956 - DNA, 25 bp, Homo sapien
aaagcattccattatcgacctcctg

SEQ ID NO: 2352957 - DNA, 25 bp, Homo sapien
agtttccggctcacagagacccagt

SEQ ID NO: 2352958 - DNA, 25 bp, Homo sapien
tagttaatcaacatgtcactttcca

SEQ ID NO: 2352959 - DNA, 25 bp, Homo sapien
aaatcagattactaacatgcaaatg

SEQ ID NO: 2352960 - DNA, 25 bp, Homo sapien
gcatttgtaagagaaatgttaccct

SEQ ID NO: 2352961 - DNA, 25 bp, Homo sapien
ctttatcaagcaacctgtcacgtgt

SEQ ID NO: 2352962 - DNA, 25 bp, Homo sapien
gcggacaactaagcgggaaagattc

SEQ ID NO: 2352963 - DNA, 25 bp, Homo sapien
gaagctattctctgaccatcctcag

SEQ ID NO: 2352964 - DNA, 25 bp, Homo sapien
cagctccacaagaagctattctctg

SEQ ID NO: 2352965 - DNA, 25 bp, Homo sapien
taagcgggaaagattcgtgatgttt

SEQ ID NO: 2352966 - DNA, 25 bp, Homo sapien
ctttaagtgagtttaatcattgtca

SEQ ID NO: 2352967 - DNA, 25 bp, Homo sapien
gctactcccaaaatcagaatttctg

SEQ ID NO: 2352968 - DNA, 25 bp, Homo sapien
cagaaaggaaccttggcaaagctac

SEQ ID NO: 2352969 - DNA, 25 bp, Homo sapien
cagaatgtgtatgccttcacataac

SEQ ID NO: 2352970 - DNA, 25 bp, Homo sapien
taaatctgtcatctgtagagaatgc

SEQ ID NO: 2352971 - DNA, 25 bp, Homo sapien
tatccactgagcaggttgctataaa

SEQ ID NO: 2352972 - DNA, 25 bp, Homo sapien
cactgagcaggttgctataaatctg

SEQ ID NO: 2352973 - DNA, 25 bp, Homo sapien
gcacaacaaagcacttcatcctcat

SEQ ID NO: 2352974 - DNA, 25 bp, Homo sapien
aaatgaattctgttgtgattacaac

SEQ ID NO: 2352975 - DNA, 25 bp, Homo sapien
tcaggttagtagatcaacaggtgag

SEQ ID NO: 2352976 - DNA, 25 bp, Homo sapien
aactctacttactctggtctcatga

SEQ ID NO: 2352977 - DNA, 25 bp, Homo sapien
tagtgttaatttacaatgaatcagg

SEQ ID NO: 2352978 - DNA, 25 bp, Homo sapien
tgtgtactagttccccagtcataga

SEQ ID NO: 2352979 - DNA, 25 bp, Homo sapien
gaagcagtcacttgacccagtggct

SEQ ID NO: 2352980 - DNA, 25 bp, Homo sapien
gcaattgacttgctctgagtgctca

SEQ ID NO: 2352981 - DNA, 25 bp, Homo sapien
tggctaagagaagatgatgactact

SEQ ID NO: 2352982 - DNA, 25 bp, Homo sapien
gaatttgtatgaccaaacatggtat

SEQ ID NO: 2352983 - DNA, 25 bp, Homo sapien
ggttccatcagctgaacaactagcc

SEQ ID NO: 2352984 - DNA, 25 bp, Homo sapien
aactagccaaaagcttatcatctgg

SEQ ID NO: 2352985 - DNA, 25 bp, Homo sapien
tatcatctggtgaaaatctgcagtg

SEQ ID NO: 2352986 - DNA, 25 bp, Homo sapien
ttgcaccatcagcagaccacgaaca

SEQ ID NO: 2352987 - DNA, 25 bp, Homo sapien
gaccacgaacaacacttcactatca

SEQ ID NO: 2352988 - DNA, 25 bp, Homo sapien
catttgctgatgtcgcatcccaaag

SEQ ID NO: 2352989 - DNA, 25 bp, Homo sapien
tctcatttgctgatgtcgcatccca

SEQ ID NO: 2352990 - DNA, 25 bp, Homo sapien
ccaataggccactagtatgaatgtc

SEQ ID NO: 2352991 - DNA, 25 bp, Homo sapien
ctgtgatggcccgtgtggatttctc

SEQ ID NO: 2352992 - DNA, 25 bp, Homo sapien
gatggcccgtgtggatttctcccaa

SEQ ID NO: 2352993 - DNA, 25 bp, Homo sapien
ggatttctcccaataggccactagt

SEQ ID NO: 2352994 - DNA, 25 bp, Homo sapien
ggagaagtcacagtactggatggtg

SEQ ID NO: 2352995 - DNA, 25 bp, Homo sapien
cacagtactgggacaaagcaaccac

SEQ ID NO: 2352996 - DNA, 25 bp, Homo sapien
ctctacacagtactgggacaaagca

SEQ ID NO: 2352997 - DNA, 25 bp, Homo sapien
gacaaagcaaccactgccaaatggt

SEQ ID NO: 2352998 - DNA, 25 bp, Homo sapien
tcacaccatgaacccaacttaaatg

SEQ ID NO: 2352999 - DNA, 25 bp, Homo sapien
ttgaacgtgagtctgtattccacaa

SEQ ID NO: 2353000 - DNA, 25 bp, Homo sapien
cctgattgtctggtcatcagaagat

SEQ ID NO: 2353001 - DNA, 25 bp, Homo sapien
tgtcaaaaatgatgatccatcagga

SEQ ID NO: 2353002 - DNA, 25 bp, Homo sapien
tgctttaacattacagcagagttct

SEQ ID NO: 2353003 - DNA, 25 bp, Homo sapien
ttgcagacgtcttatatggtcaact

SEQ ID NO: 2353004 - DNA, 25 bp, Homo sapien
ggtcaactgcaaggaccatcacttc

SEQ ID NO: 2353005 - DNA, 25 bp, Homo sapien
tttcttgaaacacaacatctacttc

SEQ ID NO: 2353006 - DNA, 25 bp, Homo sapien
cacataccaggcgatttactcccag

SEQ ID NO: 2353007 - DNA, 25 bp, Homo sapien
tcaaagcaagccatattcagaggtg

SEQ ID NO: 2353008 - DNA, 25 bp, Homo sapien
gcttgattttgacacccacagtaaa

SEQ ID NO: 2353009 - DNA, 25 bp, Homo sapien
gaagtactgtgcattaggagctcct

SEQ ID NO: 2353010 - DNA, 25 bp, Homo sapien
gaagatgtggacttaagcaacagca

SEQ ID NO: 2353011 - DNA, 25 bp, Homo sapien
cagctaacttgagcttcagtcagat

SEQ ID NO: 2353012 - DNA, 25 bp, Homo sapien
ctccaaatgcaatgtactgaagatg

SEQ ID NO: 2353013 - DNA, 25 bp, Homo sapien
gataatcaatctgacctgttcttcc

SEQ ID NO: 2353014 - DNA, 25 bp, Homo sapien
cacaatgccagacatataattagtt

SEQ ID NO: 2353015 - DNA, 25 bp, Homo sapien
aaaatagaagtgcacaatgccagac

SEQ ID NO: 2353016 - DNA, 25 bp, Homo sapien
gcacaatgccagacatataattagt

SEQ ID NO: 2353017 - DNA, 25 bp, Homo sapien
aataaaaatagaagtgcacaatgcc

SEQ ID NO: 2353018 - DNA, 25 bp, Homo sapien
tcatcggctgtgaactggatgtgcc

SEQ ID NO: 2353019 - DNA, 25 bp, Homo sapien
tggactggaagattctattgtttac

SEQ ID NO: 2353020 - DNA, 25 bp, Homo sapien
agttttcttgtgctgaaacctggac

SEQ ID NO: 2353021 - DNA, 25 bp, Homo sapien
cagcatcatcagaacttgaaataag

SEQ ID NO: 2353022 - DNA, 25 bp, Homo sapien
tgatggcctcgtagaaagatacatt

SEQ ID NO: 2353023 - DNA, 25 bp, Homo sapien
gatacatttgtccaattgccaattc

SEQ ID NO: 2353024 - DNA, 25 bp, Homo sapien
tagaaagatacatttgtccaattgc

SEQ ID NO: 2353025 - DNA, 25 bp, Homo sapien
tttcctgatggcctcgtagaaagat

SEQ ID NO: 2353026 - DNA, 25 bp, Homo sapien
taatacactggctgttctgacccct

SEQ ID NO: 2353027 - DNA, 25 bp, Homo sapien
gcataatcagctacaagacaggtct

SEQ ID NO: 2353028 - DNA, 25 bp, Homo sapien
cattaaacacagcagatgtaggtga

SEQ ID NO: 2353029 - DNA, 25 bp, Homo sapien
taagtaagtaattagcctcacagtg

SEQ ID NO: 2353030 - DNA, 25 bp, Homo sapien
ggtagcatcgtgagaaatgtcacaa

SEQ ID NO: 2353031 - DNA, 25 bp, Homo sapien
agaaagtactgtaccctggtgacag

SEQ ID NO: 2353032 - DNA, 25 bp, Homo sapien
acaagaaagtactgtaccctggtga

SEQ ID NO: 2353033 - DNA, 25 bp, Homo sapien
aaaacttggtagcatcgtgagaaat

SEQ ID NO: 2353034 - DNA, 25 bp, Homo sapien
atgcatggtttcaattgattgacct

SEQ ID NO: 2353035 - DNA, 25 bp, Homo sapien
aaagttttatgcatggtttcaattg

SEQ ID NO: 2353036 - DNA, 25 bp, Homo sapien
gcatggtttcaattgattgacctac

SEQ ID NO: 2353037 - DNA, 25 bp, Homo sapien
ccaaagttttatgcatggtttcaat

SEQ ID NO: 2353038 - DNA, 25 bp, Homo sapien
tgaagttggaaagtaggctggcaca

SEQ ID NO: 2353039 - DNA, 25 bp, Homo sapien
caaagacaggctcacgaacagttag

SEQ ID NO: 2353040 - DNA, 25 bp, Homo sapien
aactaccaagttccaagcgctgtga

SEQ ID NO: 2353041 - DNA, 25 bp, Homo sapien
gcagctaaccttgcttgagggtcag

SEQ ID NO: 2353042 - DNA, 25 bp, Homo sapien
tctccattgtcatctcccgttgcca

SEQ ID NO: 2353043 - DNA, 25 bp, Homo sapien
gttgtggcccctcaattcatgaagt

SEQ ID NO: 2353044 - DNA, 25 bp, Homo sapien
ccgttgccagcagggtactgtccac

SEQ ID NO: 2353045 - DNA, 25 bp, Homo sapien
aagtggcaaaaggagatcaaaactc

SEQ ID NO: 2353046 - DNA, 25 bp, Homo sapien
cccgtgaacaaaggtccccactgtg

SEQ ID NO: 2353047 - DNA, 25 bp, Homo sapien
ctatgcttccctggcccgtgaacaa

SEQ ID NO: 2353048 - DNA, 25 bp, Homo sapien
ccactgtgaacagtgctagcccaag

SEQ ID NO: 2353049 - DNA, 25 bp, Homo sapien
ttcaggactatgcttccctggcccg

SEQ ID NO: 2353050 - DNA, 25 bp, Homo sapien
gaaaagcaaaggtcagtcacccagc

SEQ ID NO: 2353051 - DNA, 25 bp, Homo sapien
ccttcttctgaaagcggagcacaca

SEQ ID NO: 2353052 - DNA, 25 bp, Homo sapien
ctggagaaaagcaaaggtcagtcac

SEQ ID NO: 2353053 - DNA, 25 bp, Homo sapien
ttctgaaagcggagcacacaaatga

SEQ ID NO: 2353054 - DNA, 25 bp, Homo sapien
ccagcagagataagcattttgccat

SEQ ID NO: 2353055 - DNA, 25 bp, Homo sapien
cttaatatatcctccagcagagata

SEQ ID NO: 2353056 - DNA, 25 bp, Homo sapien
tcctccagcagagataagcattttg

SEQ ID NO: 2353057 - DNA, 25 bp, Homo sapien
cctccagcagagataagcattttgc

SEQ ID NO: 2353058 - DNA, 25 bp, Homo sapien
acccaactccaaccgttgagttgtg

SEQ ID NO: 2353059 - DNA, 25 bp, Homo sapien
tgctccgcctacacccaactccaac

SEQ ID NO: 2353060 - DNA, 25 bp, Homo sapien
gcctacacccaactccaaccgttga

SEQ ID NO: 2353061 - DNA, 25 bp, Homo sapien
actggtgatggcctcactgctccgc

SEQ ID NO: 2353062 - DNA, 25 bp, Homo sapien
tgaggattccccagtgacaacgttc

SEQ ID NO: 2353063 - DNA, 25 bp, Homo sapien
ccatttgtgtagaaggtctgtgagg

SEQ ID NO: 2353064 - DNA, 25 bp, Homo sapien
catttgtgtagaaggtctgtgagga

SEQ ID NO: 2353065 - DNA, 25 bp, Homo sapien
ggattccccagtgacaacgttccac

SEQ ID NO: 2353066 - DNA, 25 bp, Homo sapien
gattatccacagtcacatatgtttt

SEQ ID NO: 2353067 - DNA, 25 bp, Homo sapien
caagattatccacagtcacatatgt

SEQ ID NO: 2353068 - DNA, 25 bp, Homo sapien
tatccacagtcacatatgttttgaa

SEQ ID NO: 2353069 - DNA, 25 bp, Homo sapien
acagtcacatatgttttgaagtcag

SEQ ID NO: 2353070 - DNA, 25 bp, Homo sapien
ttctaaagtctgtaaaatatataaa

SEQ ID NO: 2353071 - DNA, 25 bp, Homo sapien
tattctaaagtctgtaaaatatata

SEQ ID NO: 2353072 - DNA, 25 bp, Homo sapien
ttattctaaagtctgtaaaatatat

SEQ ID NO: 2353073 - DNA, 25 bp, Homo sapien
attctaaagtctgtaaaatatataa

SEQ ID NO: 2353074 - DNA, 25 bp, Homo sapien
tgtggttcaaaaagcaggccactgc

SEQ ID NO: 2353075 - DNA, 25 bp, Homo sapien
gagtccagatatggcacagggctgc

SEQ ID NO: 2353076 - DNA, 25 bp, Homo sapien
gagatgagcccctaacagtgtgtac

SEQ ID NO: 2353077 - DNA, 25 bp, Homo sapien
tcttgaccgactgcatgaactgcca

SEQ ID NO: 2353078 - DNA, 25 bp, Homo sapien
tgcctcgagtggagcggcgataaac

SEQ ID NO: 2353079 - DNA, 25 bp, Homo sapien
cagtttgatcggttgctctgaaccc

SEQ ID NO: 2353080 - DNA, 25 bp, Homo sapien
tcgaccaccctctctagttacatat

SEQ ID NO: 2353081 - DNA, 25 bp, Homo sapien
aatgcgaacgtgtgctcctcagaac

SEQ ID NO: 2353082 - DNA, 25 bp, Homo sapien
tttgtgaatcatggagatttgggca

SEQ ID NO: 2353083 - DNA, 25 bp, Homo sapien
tgcctggagctaggtgtctgccatg

SEQ ID NO: 2353084 - DNA, 25 bp, Homo sapien
tcatggagatttgggcagtacagga

SEQ ID NO: 2353085 - DNA, 25 bp, Homo sapien
gcagaagcagcagggtcgcaatttg

SEQ ID NO: 2353086 - DNA, 25 bp, Homo sapien
cagctctctgatgctatggaatgaa

SEQ ID NO: 2353087 - DNA, 25 bp, Homo sapien
tcaaggtactttatgacacccaagc

SEQ ID NO: 2353088 - DNA, 25 bp, Homo sapien
ccttcccttgaacgtgtctgcatct

SEQ ID NO: 2353089 - DNA, 25 bp, Homo sapien
cagtcatgaaaatgtggccattgtg

SEQ ID NO: 2353090 - DNA, 25 bp, Homo sapien
agtgcctgccatgcattagacacac

SEQ ID NO: 2353091 - DNA, 25 bp, Homo sapien
gttgctgcgtgcttccacatctgag

SEQ ID NO: 2353092 - DNA, 25 bp, Homo sapien
tatgtcccggtttttgattcacgac

SEQ ID NO: 2353093 - DNA, 25 bp, Homo sapien
agaccctgtgtgaggctttatgtcc

SEQ ID NO: 2353094 - DNA, 25 bp, Homo sapien
tgaacatcttgccatggccagggtg

SEQ ID NO: 2353095 - DNA, 25 bp, Homo sapien
tcattgcggatgaacatcttgccat

SEQ ID NO: 2353096 - DNA, 25 bp, Homo sapien
tggatgggccccagacagaaataac

SEQ ID NO: 2353097 - DNA, 25 bp, Homo sapien
agaaataacacttcttgatacacat

SEQ ID NO: 2353098 - DNA, 25 bp, Homo sapien
tccacctaactttgtgaggatcgca

SEQ ID NO: 2353099 - DNA, 25 bp, Homo sapien
cacctaactttgtgaggatcgcact

SEQ ID NO: 2353100 - DNA, 25 bp, Homo sapien
tggtccacctaactttgtgaggatc

SEQ ID NO: 2353101 - DNA, 25 bp, Homo sapien
acctaactttgtgaggatcgcactt

SEQ ID NO: 2353102 - DNA, 25 bp, Homo sapien
attctcttcattgcatcagtagttt

SEQ ID NO: 2353103 - DNA, 25 bp, Homo sapien
taagcttcgtgtttctgtttgatct

SEQ ID NO: 2353104 - DNA, 25 bp, Homo sapien
ttcaattctcttcattgcatcagta

SEQ ID NO: 2353105 - DNA, 25 bp, Homo sapien
caattctcttcattgcatcagtagt

SEQ ID NO: 2353106 - DNA, 25 bp, Homo sapien
ccacatcctcttgtagctgctgtgc

SEQ ID NO: 2353107 - DNA, 25 bp, Homo sapien
catcctcttgtagctgctgtgccat

SEQ ID NO: 2353108 - DNA, 25 bp, Homo sapien
acatcctcttgtagctgctgtgcca

SEQ ID NO: 2353109 - DNA, 25 bp, Homo sapien
cctcttgtagctgctgtgccatttt

SEQ ID NO: 2353110 - DNA, 25 bp, Homo sapien
catgtgaagggatgccacgggtatt

SEQ ID NO: 2353111 - DNA, 25 bp, Homo sapien
acatatgtactcctgtgcatgggac

SEQ ID NO: 2353112 - DNA, 25 bp, Homo sapien
gaccatggtgtctatacattgcctg

SEQ ID NO: 2353113 - DNA, 25 bp, Homo sapien
tgcctggtactggtgttcacgtgac

SEQ ID NO: 2353114 - DNA, 25 bp, Homo sapien
gcagtttctggtacaattaaccgga

SEQ ID NO: 2353115 - DNA, 25 bp, Homo sapien
gcttatgaaaggcacaagtggcacc

SEQ ID NO: 2353116 - DNA, 25 bp, Homo sapien
taaccggaagtgtgttggcagtgac

SEQ ID NO: 2353117 - DNA, 25 bp, Homo sapien
ggcaccaatagagtagaccagttaa

SEQ ID NO: 2353118 - DNA, 25 bp, Homo sapien
gagactcaatttgtcttagagcttc

SEQ ID NO: 2353119 - DNA, 25 bp, Homo sapien
agcttcttttacaaatatgggtgtg

SEQ ID NO: 2353120 - DNA, 25 bp, Homo sapien
ctaggattgtctcttgagactcaat

SEQ ID NO: 2353121 - DNA, 25 bp, Homo sapien
caatttgtcttagagcttcttttac

SEQ ID NO: 2353122 - DNA, 25 bp, Homo sapien
tctccagctttgtgaaccatggctg

SEQ ID NO: 2353123 - DNA, 25 bp, Homo sapien
attctccagctttgtgaaccatggc

SEQ ID NO: 2353124 - DNA, 25 bp, Homo sapien
tccagctttgtgaaccatggctggc

SEQ ID NO: 2353125 - DNA, 25 bp, Homo sapien
ttctccagctttgtgaaccatggct

SEQ ID NO: 2353126 - DNA, 25 bp, Homo sapien
acaggtcaacctggtcactcaacat

SEQ ID NO: 2353127 - DNA, 25 bp, Homo sapien
tgcacaggtcaacctggtcactcaa

SEQ ID NO: 2353128 - DNA, 25 bp, Homo sapien
cacaggtcaacctggtcactcaaca

SEQ ID NO: 2353129 - DNA, 25 bp, Homo sapien
caggtcaacctggtcactcaacata

SEQ ID NO: 2353130 - DNA, 25 bp, Homo sapien
gggccaagagacacatcatcacgct

SEQ ID NO: 2353131 - DNA, 25 bp, Homo sapien
ggaggaagcacatataattcctgct

SEQ ID NO: 2353132 - DNA, 25 bp, Homo sapien
cagttaggggccactctaccaagtc

SEQ ID NO: 2353133 - DNA, 25 bp, Homo sapien
tctccatgggccctcggtggtgttc

SEQ ID NO: 2353134 - DNA, 25 bp, Homo sapien
tgggcccagtccacatgtgagccaa

SEQ ID NO: 2353135 - DNA, 25 bp, Homo sapien
ccctggtcccagatcataatgaagc

SEQ ID NO: 2353136 - DNA, 25 bp, Homo sapien
gactcatgtggtttgcatgtcttgc

SEQ ID NO: 2353137 - DNA, 25 bp, Homo sapien
gggctgtgtgtggaccattgactca

SEQ ID NO: 2353138 - DNA, 25 bp, Homo sapien
tgagaacagctggaacgcaagtccc

SEQ ID NO: 2353139 - DNA, 25 bp, Homo sapien
cacacaagttgaggactgccgaggc

SEQ ID NO: 2353140 - DNA, 25 bp, Homo sapien
caagtctactggaggccgatcatac

SEQ ID NO: 2353141 - DNA, 25 bp, Homo sapien
tctcctgcgaggtaaacacgaagtc

SEQ ID NO: 2353142 - DNA, 25 bp, Homo sapien
ggtacttaccaactgtgctgtacag

SEQ ID NO: 2353143 - DNA, 25 bp, Homo sapien
gactgtggctgttctgttgcttaaa

SEQ ID NO: 2353144 - DNA, 25 bp, Homo sapien
aagttgctgtaagtgttgactgtgg

SEQ ID NO: 2353145 - DNA, 25 bp, Homo sapien
gatgaaactgactctcaggggccag

SEQ ID NO: 2353146 - DNA, 25 bp, Homo sapien
tgtggctcaggcaaactctgctgca

SEQ ID NO: 2353147 - DNA, 25 bp, Homo sapien
tcacggtcagactcccatcccctgt

SEQ ID NO: 2353148 - DNA, 25 bp, Homo sapien
tgcatcttcgtgctgagttctctgg

SEQ ID NO: 2353149 - DNA, 25 bp, Homo sapien
ctctgctgcatcttcgtgctgagtt

SEQ ID NO: 2353150 - DNA, 25 bp, Homo sapien
cattcctagaaacatattccactgg

SEQ ID NO: 2353151 - DNA, 25 bp, Homo sapien
tctttcccattcctagaaacatatt

SEQ ID NO: 2353152 - DNA, 25 bp, Homo sapien
gaaacatattccactggaatgcact

SEQ ID NO: 2353153 - DNA, 25 bp, Homo sapien
cctagaaacatattccactggaatg

SEQ ID NO: 2353154 - DNA, 25 bp, Homo sapien
ctgttttcacttgtgccaacgtgga

SEQ ID NO: 2353155 - DNA, 25 bp, Homo sapien
tgcactcatcttctggcacaagctg

SEQ ID NO: 2353156 - DNA, 25 bp, Homo sapien
caacgtggatgtgaatttcaatgcc

SEQ ID NO: 2353157 - DNA, 25 bp, Homo sapien
tctggcacaagctgtctgttttcac

SEQ ID NO: 2353158 - DNA, 25 bp, Homo sapien
actctgtgcggaacctgatggtggg

SEQ ID NO: 2353159 - DNA, 25 bp, Homo sapien
tcactctgtgcggaacctgatggtg

SEQ ID NO: 2353160 - DNA, 25 bp, Homo sapien
cactctgtgcggaacctgatggtgg

SEQ ID NO: 2353161 - DNA, 25 bp, Homo sapien
cagagaaagctggtacttgctgaaa

SEQ ID NO: 2353162 - DNA, 25 bp, Homo sapien
tgacttggctgaatgaagaaccacg

SEQ ID NO: 2353163 - DNA, 25 bp, Homo sapien
gagctgtagccaattattcatgtgc

SEQ ID NO: 2353164 - DNA, 25 bp, Homo sapien
cctgaggtatggagctgtatcagcc

SEQ ID NO: 2353165 - DNA, 25 bp, Homo sapien
tgtgttactgagaccattcgtgcct

SEQ ID NO: 2353166 - DNA, 25 bp, Homo sapien
cacgtggtgtgataaggagtctagc

SEQ ID NO: 2353167 - DNA, 25 bp, Homo sapien
cagacaggtaaacaagacacgtggt

SEQ ID NO: 2353168 - DNA, 25 bp, Homo sapien
tctgccggtaaaagctagaaaccag

SEQ ID NO: 2353169 - DNA, 25 bp, Homo sapien
ctccgtgaagggcctgaggggccat

SEQ ID NO: 2353170 - DNA, 25 bp, Homo sapien
atgtattactatgttaatacaagcc

SEQ ID NO: 2353171 - DNA, 25 bp, Homo sapien
ttggaaaagtctgttatgtaattca

SEQ ID NO: 2353172 - DNA, 25 bp, Homo sapien
tggaaaagtctgttatgtaattcat

SEQ ID NO: 2353173 - DNA, 25 bp, Homo sapien
ttactatgttaatacaagcctatga

SEQ ID NO: 2353174 - DNA, 25 bp, Homo sapien
caactagagccattacacagtgcat

SEQ ID NO: 2353175 - DNA, 25 bp, Homo sapien
tggtgaaacacagaacatcaaagac

SEQ ID NO: 2353176 - DNA, 25 bp, Homo sapien
tattcacagagaggtatatagatat

SEQ ID NO: 2353177 - DNA, 25 bp, Homo sapien
aatctatgtctcataagaattccac

SEQ ID NO: 2353178 - DNA, 25 bp, Homo sapien
ggaaatctgagtgtacaaagtacat

SEQ ID NO: 2353179 - DNA, 25 bp, Homo sapien
aggcaggaaatctgagtgtacaaag

SEQ ID NO: 2353180 - DNA, 25 bp, Homo sapien
caggaaatctgagtgtacaaagtac

SEQ ID NO: 2353181 - DNA, 25 bp, Homo sapien
atcaggcaggaaatctgagtgtaca

SEQ ID NO: 2353182 - DNA, 25 bp, Homo sapien
gacgatatcagctatctgtattaca

SEQ ID NO: 2353183 - DNA, 25 bp, Homo sapien
tatcagctatctgtattacaaaagc

SEQ ID NO: 2353184 - DNA, 25 bp, Homo sapien
cagctatctgtattacaaaagccat

SEQ ID NO: 2353185 - DNA, 25 bp, Homo sapien
ctgacgatatcagctatctgtatta

SEQ ID NO: 2353186 - DNA, 25 bp, Homo sapien
gctagcactgcttgtcctcgtttat

SEQ ID NO: 2353187 - DNA, 25 bp, Homo sapien
attttcaggactgctgttagtccaa

SEQ ID NO: 2353188 - DNA, 25 bp, Homo sapien
gcatttggacttggcagcacactgt

SEQ ID NO: 2353189 - DNA, 25 bp, Homo sapien
actacttgatagacctgcatttgga

SEQ ID NO: 2353190 - DNA, 25 bp, Homo sapien
tcttcatactcactgaaggtgccaa

SEQ ID NO: 2353191 - DNA, 25 bp, Homo sapien
ttcatactcactgaaggtgccaaat

SEQ ID NO: 2353192 - DNA, 25 bp, Homo sapien
catactcactgaaggtgccaaatct

SEQ ID NO: 2353193 - DNA, 25 bp, Homo sapien
tcatactcactgaaggtgccaaatc

SEQ ID NO: 2353194 - DNA, 25 bp, Homo sapien
aacacccaaatacgatgttggccct

SEQ ID NO: 2353195 - DNA, 25 bp, Homo sapien
tttcccagttgaccagtcaggtcgt

SEQ ID NO: 2353196 - DNA, 25 bp, Homo sapien
cgtttgacaaggcactgcagaagag

SEQ ID NO: 2353197 - DNA, 25 bp, Homo sapien
gcagaagagctgaatctctcacaac

SEQ ID NO: 2353198 - DNA, 25 bp, Homo sapien
gacacaaatgtccttagcttgtccc

SEQ ID NO: 2353199 - DNA, 25 bp, Homo sapien
tcagaatacatgcagtgtgggacac

SEQ ID NO: 2353200 - DNA, 25 bp, Homo sapien
tagcttgtccccagacatcctctgc

SEQ ID NO: 2353201 - DNA, 25 bp, Homo sapien
gctttcgttcatttgtagacaccct

SEQ ID NO: 2353202 - DNA, 25 bp, Homo sapien
cagatgttaggggagatgcaaagat

SEQ ID NO: 2353203 - DNA, 25 bp, Homo sapien
agatgcttcaggcatgatcctttct

SEQ ID NO: 2353204 - DNA, 25 bp, Homo sapien
tcaggcatgatcctttctcccaaga

SEQ ID NO: 2353205 - DNA, 25 bp, Homo sapien
tcaacacttagcaaacagatgttag

SEQ ID NO: 2353206 - DNA, 25 bp, Homo sapien
tatgggatcctaattctctgaatgc

SEQ ID NO: 2353207 - DNA, 25 bp, Homo sapien
ttatcagatgtctcaactgacagtc

SEQ ID NO: 2353208 - DNA, 25 bp, Homo sapien
tctctttttcctgccggataggaaa

SEQ ID NO: 2353209 - DNA, 25 bp, Homo sapien
tattttcgagccatatgggatccta

SEQ ID NO: 2353210 - DNA, 25 bp, Homo sapien
ttgtggtctctctttagacttgtca

SEQ ID NO: 2353211 - DNA, 25 bp, Homo sapien
ccttccttttgtggtctctctttag

SEQ ID NO: 2353212 - DNA, 25 bp, Homo sapien
tccttttgtggtctctctttagact

SEQ ID NO: 2353213 - DNA, 25 bp, Homo sapien
gtggtctctctttagacttgtcatg

SEQ ID NO: 2353214 - DNA, 25 bp, Homo sapien
acaagcagagctgctgcaaatatac

SEQ ID NO: 2353215 - DNA, 25 bp, Homo sapien
actacaagcagagctgctgcaaata

SEQ ID NO: 2353216 - DNA, 25 bp, Homo sapien
tacaagcagagctgctgcaaatata

SEQ ID NO: 2353217 - DNA, 25 bp, Homo sapien
caactacaagcagagctgctgcaaa

SEQ ID NO: 2353218 - DNA, 25 bp, Homo sapien
ttagcaggtagcagagatgttccgc

SEQ ID NO: 2353219 - DNA, 25 bp, Homo sapien
tgttcatgctgcaaccgatccacgc

SEQ ID NO: 2353220 - DNA, 25 bp, Homo sapien
tctttcctgatccaaagctgtgtac

SEQ ID NO: 2353221 - DNA, 25 bp, Homo sapien
gatgttccgcttcccaaaatgtctt

SEQ ID NO: 2353222 - DNA, 25 bp, Homo sapien
ttccaggtatagagaaggacgttcc

SEQ ID NO: 2353223 - DNA, 25 bp, Homo sapien
tctgtggaccacttagcaaaatctg

SEQ ID NO: 2353224 - DNA, 25 bp, Homo sapien
taagaggatgtacaaccttcaggga

SEQ ID NO: 2353225 - DNA, 25 bp, Homo sapien
taaccctctaccaagtgcaacgatg

SEQ ID NO: 2353226 - DNA, 25 bp, Homo sapien
gtccattccatgtctctcgagttct

SEQ ID NO: 2353227 - DNA, 25 bp, Homo sapien
cttttgtccattccatgtctctcga

SEQ ID NO: 2353228 - DNA, 25 bp, Homo sapien
tttgtccattccatgtctctcgagt

SEQ ID NO: 2353229 - DNA, 25 bp, Homo sapien
cattccatgtctctcgagttctcat

SEQ ID NO: 2353230 - DNA, 25 bp, Homo sapien
tctgtctagactgacagcaaggtgg

SEQ ID NO: 2353231 - DNA, 25 bp, Homo sapien
tttcagtctctgtctagactgacag

SEQ ID NO: 2353232 - DNA, 25 bp, Homo sapien
tctccatatccaagatataaagact

SEQ ID NO: 2353233 - DNA, 25 bp, Homo sapien
aaggtggaggatctctgatctccat

SEQ ID NO: 2353234 - DNA, 25 bp, Homo sapien
gcatttttgcttcccaccaacattt

SEQ ID NO: 2353235 - DNA, 25 bp, Homo sapien
ccatggaaaccatgaggcggtgctg

SEQ ID NO: 2353236 - DNA, 25 bp, Homo sapien
gggagtcttggaggcagtcactgct

SEQ ID NO: 2353237 - DNA, 25 bp, Homo sapien
aacacgagttgcagttcagcatttt

SEQ ID NO: 2353238 - DNA, 25 bp, Homo sapien
tcctttcgagcctcgtggtcctttc

SEQ ID NO: 2353239 - DNA, 25 bp, Homo sapien
cgagcctcgtggtcctttcttctca

SEQ ID NO: 2353240 - DNA, 25 bp, Homo sapien
ttcgagcctcgtggtcctttcttct

SEQ ID NO: 2353241 - DNA, 25 bp, Homo sapien
agcctcgtggtcctttcttctcagg

SEQ ID NO: 2353242 - DNA, 25 bp, Homo sapien
aaacaggtggtctacatagacacag

SEQ ID NO: 2353243 - DNA, 25 bp, Homo sapien
cttccaaaacaggtggtctacatag

SEQ ID NO: 2353244 - DNA, 25 bp, Homo sapien
caaaacaggtggtctacatagacac

SEQ ID NO: 2353245 - DNA, 25 bp, Homo sapien
tccaaaacaggtggtctacatagac

SEQ ID NO: 2353246 - DNA, 25 bp, Homo sapien
tctggtgtcaaagatcctgttagaa

SEQ ID NO: 2353247 - DNA, 25 bp, Homo sapien
ttattgatactaattcagaagacag

SEQ ID NO: 2353248 - DNA, 25 bp, Homo sapien
ctgttagaaagcgttttattgatac

SEQ ID NO: 2353249 - DNA, 25 bp, Homo sapien
tattgatactaattcagaagacagt

SEQ ID NO: 2353250 - DNA, 25 bp, Homo sapien
agctgccggtcttaagttgcttaga

SEQ ID NO: 2353251 - DNA, 25 bp, Homo sapien
gcagctgccggtcttaagttgctta

SEQ ID NO: 2353252 - DNA, 25 bp, Homo sapien
gaaaggcagctgccggtcttaagtt

SEQ ID NO: 2353253 - DNA, 25 bp, Homo sapien
aggcagctgccggtcttaagttgct

SEQ ID NO: 2353254 - DNA, 25 bp, Homo sapien
attctctggcttccgcagtaaatgc

SEQ ID NO: 2353255 - DNA, 25 bp, Homo sapien
agcattctctggcttccgcagtaaa

SEQ ID NO: 2353256 - DNA, 25 bp, Homo sapien
ctggcttccgcagtaaatgctgagt

SEQ ID NO: 2353257 - DNA, 25 bp, Homo sapien
atggtctgctgtccaagagctgtca

SEQ ID NO: 2353258 - DNA, 25 bp, Homo sapien
gaacacaacattttacttgcttaaa

SEQ ID NO: 2353259 - DNA, 25 bp, Homo sapien
ccctactgcattttgaacacaacat

SEQ ID NO: 2353260 - DNA, 25 bp, Homo sapien
taaattctccagaacagttgggcat

SEQ ID NO: 2353261 - DNA, 25 bp, Homo sapien
gcttaaattctccagaacagttggg

SEQ ID NO: 2353262 - DNA, 25 bp, Homo sapien
caaataaatgagtttcacctcctaa

SEQ ID NO: 2353263 - DNA, 25 bp, Homo sapien
actcacgctctctgagaggcaaaag

SEQ ID NO: 2353264 - DNA, 25 bp, Homo sapien
aatgagtttcacctcctaactcacg

SEQ ID NO: 2353265 - DNA, 25 bp, Homo sapien
gtcagcaggaacaacattgtcacaa

SEQ ID NO: 2353266 - DNA, 25 bp, Homo sapien
tcaatagagatctctcagctggctg

SEQ ID NO: 2353267 - DNA, 25 bp, Homo sapien
catttcatcttctgtggcaagcttt

SEQ ID NO: 2353268 - DNA, 25 bp, Homo sapien
tttagattttagtttcatttcatct

SEQ ID NO: 2353269 - DNA, 25 bp, Homo sapien
ttcatttcatcttctgtggcaagct

SEQ ID NO: 2353270 - DNA, 25 bp, Homo sapien
ttcatcttctgtggcaagcttttct

SEQ ID NO: 2353271 - DNA, 25 bp, Homo sapien
gatttcttggtgctgtacccatcat

SEQ ID NO: 2353272 - DNA, 25 bp, Homo sapien
ttcttggtgctgtacccatcatcat

SEQ ID NO: 2353273 - DNA, 25 bp, Homo sapien
tccatgatgacaggatttcttggtg

SEQ ID NO: 2353274 - DNA, 25 bp, Homo sapien
tgtttgtaggtccatgatgacagga

SEQ ID NO: 2353275 - DNA, 25 bp, Homo sapien
taagcaaacactaaagttcagaagt

SEQ ID NO: 2353276 - DNA, 25 bp, Homo sapien
gtttgatctcgtctgtgttagtaca

SEQ ID NO: 2353277 - DNA, 25 bp, Homo sapien
tgtggtcgagatcatttgaaatgca

SEQ ID NO: 2353278 - DNA, 25 bp, Homo sapien
tagttccatgtgacaatattccacg

SEQ ID NO: 2353279 - DNA, 25 bp, Homo sapien
caactgttcgtttatggataacagc

SEQ ID NO: 2353280 - DNA, 25 bp, Homo sapien
tattaaagagactgtacaactgccc

SEQ ID NO: 2353281 - DNA, 25 bp, Homo sapien
gagactgtacaactgccccttcaaa

SEQ ID NO: 2353282 - DNA, 25 bp, Homo sapien
tgaacaccccagataaagtgaactt

SEQ ID NO: 2353283 - DNA, 25 bp, Homo sapien
ttactaggcttttgattgactgtga

SEQ ID NO: 2353284 - DNA, 25 bp, Homo sapien
tctaagatgtagaatttactaggct

SEQ ID NO: 2353285 - DNA, 25 bp, Homo sapien
gacagagggtagatgtctaagatgt

SEQ ID NO: 2353286 - DNA, 25 bp, Homo sapien
gagggtagatgtctaagatgtagaa

SEQ ID NO: 2353287 - DNA, 25 bp, Homo sapien
tggccctccattaggaagcagaaga

SEQ ID NO: 2353288 - DNA, 25 bp, Homo sapien
gaaattatggccctccattaggaag

SEQ ID NO: 2353289 - DNA, 25 bp, Homo sapien
agaaattatggccctccattaggaa

SEQ ID NO: 2353290 - DNA, 25 bp, Homo sapien
gccctccattaggaagcagaagagg

SEQ ID NO: 2353291 - DNA, 25 bp, Homo sapien
taactgactcctaaacttgggagca

SEQ ID NO: 2353292 - DNA, 25 bp, Homo sapien
gataagtgtgactgggcttctctct

SEQ ID NO: 2353293 - DNA, 25 bp, Homo sapien
gagcagaaactgagcttgtgtcact

SEQ ID NO: 2353294 - DNA, 25 bp, Homo sapien
ctgactttgtattttcacgtggaga

SEQ ID NO: 2353295 - DNA, 25 bp, Homo sapien
acttcctagagactgggagggctca

SEQ ID NO: 2353296 - DNA, 25 bp, Homo sapien
tcactcttgctatgcaaggagactg

SEQ ID NO: 2353297 - DNA, 25 bp, Homo sapien
ctcttgctatgcaaggagactggtg

SEQ ID NO: 2353298 - DNA, 25 bp, Homo sapien
taagcagcaaactgttcaagaggtg

SEQ ID NO: 2353299 - DNA, 25 bp, Homo sapien
ttaacatgctttagcgggcatcctg

SEQ ID NO: 2353300 - DNA, 25 bp, Homo sapien
gattaccaaccgctcaatgccagag

SEQ ID NO: 2353301 - DNA, 25 bp, Homo sapien
gtgctcattcgggagggacctccat

SEQ ID NO: 2353302 - DNA, 25 bp, Homo sapien
tggatgtccgggcacacaggtgtca

SEQ ID NO: 2353303 - DNA, 25 bp, Homo sapien
gcatccgatggaggacacagctgaa

SEQ ID NO: 2353304 - DNA, 25 bp, Homo sapien
gatgagtccaatgtgttcccagcta

SEQ ID NO: 2353305 - DNA, 25 bp, Homo sapien
tagttctaagatctctgcaggcgga

SEQ ID NO: 2353306 - DNA, 25 bp, Homo sapien
tcacaaacatcaagggaagcagcct

SEQ ID NO: 2353307 - DNA, 25 bp, Homo sapien
tgtataatcacaataggtggaccca

SEQ ID NO: 2353308 - DNA, 25 bp, Homo sapien
cacaataggtggacccaaacatttc

SEQ ID NO: 2353309 - DNA, 25 bp, Homo sapien
ctcttcacaaaacttcatggcatat

SEQ ID NO: 2353310 - DNA, 25 bp, Homo sapien
cagcattcatgtgaagtctactgat

SEQ ID NO: 2353311 - DNA, 25 bp, Homo sapien
gagataactgactcccaatgctgag

SEQ ID NO: 2353312 - DNA, 25 bp, Homo sapien
tggaagcacccactaatagccatgc

SEQ ID NO: 2353313 - DNA, 25 bp, Homo sapien
gcagacttggttgcagccacatcca

SEQ ID NO: 2353314 - DNA, 25 bp, Homo sapien
tcaatccagctaggtagagaccctc

SEQ ID NO: 2353315 - DNA, 25 bp, Homo sapien
tagttttattgctacccttcctgtc

SEQ ID NO: 2353316 - DNA, 25 bp, Homo sapien
acccttcctgtcaatagagcatatg

SEQ ID NO: 2353317 - DNA, 25 bp, Homo sapien
tcctgtcaatagagcatatgttatt

SEQ ID NO: 2353318 - DNA, 25 bp, Homo sapien
attgctacccttcctgtcaatagag

SEQ ID NO: 2353319 - DNA, 25 bp, Homo sapien
ctttgggaagcattaactccgtgta

SEQ ID NO: 2353320 - DNA, 25 bp, Homo sapien
atctacaatcaatttgtcaccagga

SEQ ID NO: 2353321 - DNA, 25 bp, Homo sapien
ggatgtaggaaccttggcttcccca

SEQ ID NO: 2353322 - DNA, 25 bp, Homo sapien
ccatgcttgcccaggtaaaagtttg

SEQ ID NO: 2353323 - DNA, 25 bp, Homo sapien
aggtcacctttgtagaaataatcag

SEQ ID NO: 2353324 - DNA, 25 bp, Homo sapien
aataatcagaatagtagagtttgta

SEQ ID NO: 2353325 - DNA, 25 bp, Homo sapien
tcagaatagtagagtttgtaggttt

SEQ ID NO: 2353326 - DNA, 25 bp, Homo sapien
aaggtcacctttgtagaaataatca

SEQ ID NO: 2353327 - DNA, 25 bp, Homo sapien
cattctcagaaactatgcaggggga

SEQ ID NO: 2353328 - DNA, 25 bp, Homo sapien
acatgagcatcccaatcatctttcc

SEQ ID NO: 2353329 - DNA, 25 bp, Homo sapien
tgtaagccaaatagtatgcttgttc

SEQ ID NO: 2353330 - DNA, 25 bp, Homo sapien
aaatagtatgcttgttccacatgag

SEQ ID NO: 2353331 - DNA, 25 bp, Homo sapien
tacaataatgtaggcactgtaagct

SEQ ID NO: 2353332 - DNA, 25 bp, Homo sapien
aataatgtaggcactgtaagctgca

SEQ ID NO: 2353333 - DNA, 25 bp, Homo sapien
tttctgtacaataatgtaggcactg

SEQ ID NO: 2353334 - DNA, 25 bp, Homo sapien
tctgtacaataatgtaggcactgta

SEQ ID NO: 2353335 - DNA, 25 bp, Homo sapien
ccacgtgggaactctgacaaatatt

SEQ ID NO: 2353336 - DNA, 25 bp, Homo sapien
tgacccctttgtagcaacgtagtta

SEQ ID NO: 2353337 - DNA, 25 bp, Homo sapien
ggcttatagtggcaccagaaataag

SEQ ID NO: 2353338 - DNA, 25 bp, Homo sapien
gatttccctagatgataatttcacg

SEQ ID NO: 2353339 - DNA, 25 bp, Homo sapien
gttggcactcaagtagggaaatagg

SEQ ID NO: 2353340 - DNA, 25 bp, Homo sapien
tcaaggctggaatacagaggtctaa

SEQ ID NO: 2353341 - DNA, 25 bp, Homo sapien
aatggagtcccagattccacctcag

SEQ ID NO: 2353342 - DNA, 25 bp, Homo sapien
ccaactcggtagttttgaatctggg

SEQ ID NO: 2353343 - DNA, 25 bp, Homo sapien
tttaccagacactgccaattacctc

SEQ ID NO: 2353344 - DNA, 25 bp, Homo sapien
ccaaatcacttgcagtctggtgctg

SEQ ID NO: 2353345 - DNA, 25 bp, Homo sapien
agttttcccttgcacgcctttggtg

SEQ ID NO: 2353346 - DNA, 25 bp, Homo sapien
tacctctaagtagggactctccact

SEQ ID NO: 2353347 - DNA, 25 bp, Homo sapien
ttttgattaccacatgtctttcaag

SEQ ID NO: 2353348 - DNA, 25 bp, Homo sapien
caaagcttctcgagtagttaacaca

SEQ ID NO: 2353349 - DNA, 25 bp, Homo sapien
gttaacacatactccaaaatctttg

SEQ ID NO: 2353350 - DNA, 25 bp, Homo sapien
tatataagcttgtacttcctccttc

SEQ ID NO: 2353351 - DNA, 25 bp, Homo sapien
cattctccaaatgttgatcctgatt

SEQ ID NO: 2353352 - DNA, 25 bp, Homo sapien
tcaatggtcaaggcagacaaagggc

SEQ ID NO: 2353353 - DNA, 25 bp, Homo sapien
tgaaatgccggtcaagttgcctaga

SEQ ID NO: 2353354 - DNA, 25 bp, Homo sapien
gaaacagtcgcaaactgctcggtgg

SEQ ID NO: 2353355 - DNA, 25 bp, Homo sapien
ctagactctgatggaagcggtggcc

SEQ ID NO: 2353356 - DNA, 25 bp, Homo sapien
cacagaaactaggacgaaacgagcc

SEQ ID NO: 2353357 - DNA, 25 bp, Homo sapien
cagcttggtccccatattggcaggc

SEQ ID NO: 2353358 - DNA, 25 bp, Homo sapien
cagatgttagctacagagcccataa

SEQ ID NO: 2353359 - DNA, 25 bp, Homo sapien
ggctgcaaatcaagtccagcttggt

SEQ ID NO: 2353360 - DNA, 25 bp, Homo sapien
ccccttctgttgttggctgcaaatc

SEQ ID NO: 2353361 - DNA, 25 bp, Homo sapien
gatagttctatggtgtattagttcg

SEQ ID NO: 2353362 - DNA, 25 bp, Homo sapien
cttctactgatgacttgaaaagatg

SEQ ID NO: 2353363 - DNA, 25 bp, Homo sapien
ttattatggttatggaggctaaggg

SEQ ID NO: 2353364 - DNA, 25 bp, Homo sapien
cgtgagatggtgcagggaatcacat

SEQ ID NO: 2353365 - DNA, 25 bp, Homo sapien
cattccctaatttctgtcacagagt

SEQ ID NO: 2353366 - DNA, 25 bp, Homo sapien
aactccatgaggaccggaattttgt

SEQ ID NO: 2353367 - DNA, 25 bp, Homo sapien
cacagagtaagacccgttgttatac

SEQ ID NO: 2353368 - DNA, 25 bp, Homo sapien
tgttatacgtctcacctgaccatgt

SEQ ID NO: 2353369 - DNA, 25 bp, Homo sapien
tagggaagtcaacacatagtgtaaa

SEQ ID NO: 2353370 - DNA, 25 bp, Homo sapien
taagctgttgtgatctagggaagtc

SEQ ID NO: 2353371 - DNA, 25 bp, Homo sapien
gaaagtattagtacgggcattacaa

SEQ ID NO: 2353372 - DNA, 25 bp, Homo sapien
tggaaaatcatcaccctactgaact

SEQ ID NO: 2353373 - DNA, 25 bp, Homo sapien
gatctatgagtgttgaccttagcca

SEQ ID NO: 2353374 - DNA, 25 bp, Homo sapien
aatcagctagtgatacaaatctgca

SEQ ID NO: 2353375 - DNA, 25 bp, Homo sapien
catatgtcagacaacagatctatga

SEQ ID NO: 2353376 - DNA, 25 bp, Homo sapien
ttgtttacaaaagtggctcaggaga

SEQ ID NO: 2353377 - DNA, 25 bp, Homo sapien
taccgttagccaataagggaaggca

SEQ ID NO: 2353378 - DNA, 25 bp, Homo sapien
gactggtagcccgagttgaaacaaa

SEQ ID NO: 2353379 - DNA, 25 bp, Homo sapien
tagaatgacagttggtagtaccgtt

SEQ ID NO: 2353380 - DNA, 25 bp, Homo sapien
gaccactgggccctaacatagaata

SEQ ID NO: 2353381 - DNA, 25 bp, Homo sapien
tcccgggcttgagggatcttcctac

SEQ ID NO: 2353382 - DNA, 25 bp, Homo sapien
ttaaaccagccctcatttctagaat

SEQ ID NO: 2353383 - DNA, 25 bp, Homo sapien
tctcccaggtagctacaggcgtgtg

SEQ ID NO: 2353384 - DNA, 25 bp, Homo sapien
tttctagaataaacacttggtcaag

SEQ ID NO: 2353385 - DNA, 25 bp, Homo sapien
gtgattaaacccaagacatgtcatt

SEQ ID NO: 2353386 - DNA, 25 bp, Homo sapien
tctgcaactctaaaattcagggagt

SEQ ID NO: 2353387 - DNA, 25 bp, Homo sapien
cagagttcgcagctttggcaggttc

SEQ ID NO: 2353388 - DNA, 25 bp, Homo sapien
tccatttcataacgcggttttagtc

SEQ ID NO: 2353389 - DNA, 25 bp, Homo sapien
ctcacagtagcaagcataagacccc

SEQ ID NO: 2353390 - DNA, 25 bp, Homo sapien
ctgagcagcagatcatgcaactgct

SEQ ID NO: 2353391 - DNA, 25 bp, Homo sapien
ccttttttgtaccagactgatgaga

SEQ ID NO: 2353392 - DNA, 25 bp, Homo sapien
tcatgagatgcagaacctccaggag

SEQ ID NO: 2353393 - DNA, 25 bp, Homo sapien
tcaaccctagaggatgggaacctaa

SEQ ID NO: 2353394 - DNA, 25 bp, Homo sapien
taattagtgcaaatgcccttcctgg

SEQ ID NO: 2353395 - DNA, 25 bp, Homo sapien
aatgccgagattgccagctcacagg

SEQ ID NO: 2353396 - DNA, 25 bp, Homo sapien
cctggagagtctactggatatgtca

SEQ ID NO: 2353397 - DNA, 25 bp, Homo sapien
ccttgtatacaagcgacatcccaga

SEQ ID NO: 2353398 - DNA, 25 bp, Homo sapien
gcgggtggcccatggcaaaatttca

SEQ ID NO: 2353399 - DNA, 25 bp, Homo sapien
ggtcagcttgccgatttcattggaa

SEQ ID NO: 2353400 - DNA, 25 bp, Homo sapien
tcaaggaatgctaaacagtgctgcc

SEQ ID NO: 2353401 - DNA, 25 bp, Homo sapien
cagttagataactacaaacggagag

SEQ ID NO: 2353402 - DNA, 25 bp, Homo sapien
catctagggcaggtgaagctttgca

SEQ ID NO: 2353403 - DNA, 25 bp, Homo sapien
gatacgtatgctgaaaatctgaaag

SEQ ID NO: 2353404 - DNA, 25 bp, Homo sapien
gcgaaacagcagttaccgcaggcca

SEQ ID NO: 2353405 - DNA, 25 bp, Homo sapien
ttagtagttgtcactgggatcatgc

SEQ ID NO: 2353406 - DNA, 25 bp, Homo sapien
tagtgcgaccttgtttacacctccc

SEQ ID NO: 2353407 - DNA, 25 bp, Homo sapien
tctcccagagtgagcggagacagcg

SEQ ID NO: 2353408 - DNA, 25 bp, Homo sapien
acagctgtgtggtaggctactagaa

SEQ ID NO: 2353409 - DNA, 25 bp, Homo sapien
caggtatcttgtatttcatgcccat

SEQ ID NO: 2353410 - DNA, 25 bp, Homo sapien
tttcaggtatcttgtatttcatgcc

SEQ ID NO: 2353411 - DNA, 25 bp, Homo sapien
tcaggtatcttgtatttcatgccca

SEQ ID NO: 2353412 - DNA, 25 bp, Homo sapien
ttcaggtatcttgtatttcatgccc

SEQ ID NO: 2353413 - DNA, 25 bp, Homo sapien
ttccccagaggagagagcttactta

SEQ ID NO: 2353414 - DNA, 25 bp, Homo sapien
ccttccccagaggagagagcttact

SEQ ID NO: 2353415 - DNA, 25 bp, Homo sapien
tccccagaggagagagcttacttac

SEQ ID NO: 2353416 - DNA, 25 bp, Homo sapien
cttccccagaggagagagcttactt

SEQ ID NO: 2353417 - DNA, 25 bp, Homo sapien
cttcgagcacatagagggatctggg

SEQ ID NO: 2353418 - DNA, 25 bp, Homo sapien
tctcattcctcttccgcgctgcagg

SEQ ID NO: 2353419 - DNA, 25 bp, Homo sapien
cctgcttcgagcacatagagggatc

SEQ ID NO: 2353420 - DNA, 25 bp, Homo sapien
gggtccacctgcttcgagcacatag

SEQ ID NO: 2353421 - DNA, 25 bp, Homo sapien
tgggcccttctgtcggcgctccttg

SEQ ID NO: 2353422 - DNA, 25 bp, Homo sapien
ctgcaagcgcctgggcccttctgtc

SEQ ID NO: 2353423 - DNA, 25 bp, Homo sapien
aagcgcctgggcccttctgtcggcg

SEQ ID NO: 2353424 - DNA, 25 bp, Homo sapien
accctgccaacgtcggcctgccttt

SEQ ID NO: 2353425 - DNA, 25 bp, Homo sapien
aggcggcggagcagcctgcgcactt

SEQ ID NO: 2353426 - DNA, 25 bp, Homo sapien
agcctgcgcacttccaggtgcgcag

SEQ ID NO: 2353427 - DNA, 25 bp, Homo sapien
ggtgcttgaggtgggaactcgcgcc

SEQ ID NO: 2353428 - DNA, 25 bp, Homo sapien
cgggagccgccacggtgcttgaggt

SEQ ID NO: 2353429 - DNA, 25 bp, Homo sapien
cagaggagggcagcgacggcgatgg

SEQ ID NO: 2353430 - DNA, 25 bp, Homo sapien
taccgcagccgtcggttcgtgttgg

SEQ ID NO: 2353431 - DNA, 25 bp, Homo sapien
aaccagcgcgactgcgtggctaccg

SEQ ID NO: 2353432 - DNA, 25 bp, Homo sapien
tgctgcctctgctacttcaagaacc

SEQ ID NO: 2353433 - DNA, 25 bp, Homo sapien
ctgagagaggagcggggcggcggga

SEQ ID NO: 2353434 - DNA, 25 bp, Homo sapien
tgagagaggagcggggcggcgggaa

SEQ ID NO: 2353435 - DNA, 25 bp, Homo sapien
gagagaggagcggggcggcgggaag

SEQ ID NO: 2353436 - DNA, 25 bp, Homo sapien
agagaggagcggggcggcgggaagg

SEQ ID NO: 2353437 - DNA, 25 bp, Homo sapien
gctaggacaactgccaacgggcttg

SEQ ID NO: 2353438 - DNA, 25 bp, Homo sapien
caagggccagcgggctaggacaact

SEQ ID NO: 2353439 - DNA, 25 bp, Homo sapien
gcgtcgcgggggcaacggccagcgg

SEQ ID NO: 2353440 - DNA, 25 bp, Homo sapien
aggacaactgccaacgggcttggag

SEQ ID NO: 2353441 - DNA, 25 bp, Homo sapien
cgccggaagtcggagatgctaagca

SEQ ID NO: 2353442 - DNA, 25 bp, Homo sapien
tcctgtagagaaccggctgcgtgtg

SEQ ID NO: 2353443 - DNA, 25 bp, Homo sapien
caatcgcattcttcagacggtgaca

SEQ ID NO: 2353444 - DNA, 25 bp, Homo sapien
tgctaagcagcaccgaatgttaggg

SEQ ID NO: 2353445 - DNA, 25 bp, Homo sapien
ttgggcggagcgttaggacgcgcct

SEQ ID NO: 2353446 - DNA, 25 bp, Homo sapien
ctatggtttgttgggcggagcgtta

SEQ ID NO: 2353447 - DNA, 25 bp, Homo sapien
agcgttaggacgcgcctctggtcac

SEQ ID NO: 2353448 - DNA, 25 bp, Homo sapien
tttgttgggcggagcgttaggacgc

SEQ ID NO: 2353449 - DNA, 25 bp, Homo sapien
ccaaccacaccgcagccgtagttgt

SEQ ID NO: 2353450 - DNA, 25 bp, Homo sapien
cacaccgcagccgtagttgttttcc

SEQ ID NO: 2353451 - DNA, 25 bp, Homo sapien
aaccacaccgcagccgtagttgttt

SEQ ID NO: 2353452 - DNA, 25 bp, Homo sapien
caccgcagccgtagttgttttccct

SEQ ID NO: 2353453 - DNA, 25 bp, Homo sapien
gctgtaaccgattttggcgttgtaa

SEQ ID NO: 2353454 - DNA, 25 bp, Homo sapien
cattatccagcactaaggtcgtcat

SEQ ID NO: 2353455 - DNA, 25 bp, Homo sapien
acattttcatggctgtaaccgattt

SEQ ID NO: 2353456 - DNA, 25 bp, Homo sapien
gattttggcgttgtaagctccatta

SEQ ID NO: 2353457 - DNA, 25 bp, Homo sapien
agggaatccctctggctaagtcagg

SEQ ID NO: 2353458 - DNA, 25 bp, Homo sapien
cgtatatatcttgtccctcggagaa

SEQ ID NO: 2353459 - DNA, 25 bp, Homo sapien
gatgtccggagatgaaacgtagcac

SEQ ID NO: 2353460 - DNA, 25 bp, Homo sapien
cgtagcacatgaaaccactaggcgt

SEQ ID NO: 2353461 - DNA, 25 bp, Homo sapien
taatcttgtacccaggaaaatccgc

SEQ ID NO: 2353462 - DNA, 25 bp, Homo sapien
aaagcctctagatcctaagaccgtg

SEQ ID NO: 2353463 - DNA, 25 bp, Homo sapien
tagacttttggagggtcatagaacc

SEQ ID NO: 2353464 - DNA, 25 bp, Homo sapien
ttaccaactaggtcggccagtaggc

SEQ ID NO: 2353465 - DNA, 25 bp, Homo sapien
gaccggaactgacaattaggaataa

SEQ ID NO: 2353466 - DNA, 25 bp, Homo sapien
atgtaaaagagtccagaagggtctt

SEQ ID NO: 2353467 - DNA, 25 bp, Homo sapien
cagtaaaagttttaagacgtgctgt

SEQ ID NO: 2353468 - DNA, 25 bp, Homo sapien
cttttatttcatctatctggttggc

SEQ ID NO: 2353469 - DNA, 25 bp, Homo sapien
tatactgctgtatgaatttcaaacc

SEQ ID NO: 2353470 - DNA, 25 bp, Homo sapien
ggtttactacataggtatactgctg

SEQ ID NO: 2353471 - DNA, 25 bp, Homo sapien
ggtctacaatgctagaaatgaaaca

SEQ ID NO: 2353472 - DNA, 25 bp, Homo sapien
caataagtaactaaatcatggtcgt

SEQ ID NO: 2353473 - DNA, 25 bp, Homo sapien
gaacatcccaattcaccaagtagcc

SEQ ID NO: 2353474 - DNA, 25 bp, Homo sapien
ttgtctctgaacatcccaattcacc

SEQ ID NO: 2353475 - DNA, 25 bp, Homo sapien
tctgaacatcccaattcaccaagta

SEQ ID NO: 2353476 - DNA, 25 bp, Homo sapien
aacttgtctctgaacatcccaattc

SEQ ID NO: 2353477 - DNA, 25 bp, Homo sapien
ctcttaatactgcttgaaactggta

SEQ ID NO: 2353478 - DNA, 25 bp, Homo sapien
tcttgaattgaagtgaagttaaagt

SEQ ID NO: 2353479 - DNA, 25 bp, Homo sapien
catttactcttaatactgcttgaaa

SEQ ID NO: 2353480 - DNA, 25 bp, Homo sapien
taaagtatggttcagtgataataat

SEQ ID NO: 2353481 - DNA, 25 bp, Homo sapien
ccatgtttgtgccaccacactctag

SEQ ID NO: 2353482 - DNA, 25 bp, Homo sapien
ctgggcaacagagcaagaccctgac

SEQ ID NO: 2353483 - DNA, 25 bp, Homo sapien
agtgagccatgtttgtgccaccaca

SEQ ID NO: 2353484 - DNA, 25 bp, Homo sapien
gcctgggcaacagagcaagaccctg

SEQ ID NO: 2353485 - DNA, 25 bp, Homo sapien
aacaataagaattcggcctggagcc

SEQ ID NO: 2353486 - DNA, 25 bp, Homo sapien
catactgctgcttatatggacttaa

SEQ ID NO: 2353487 - DNA, 25 bp, Homo sapien
actacacctggttgagattgtgccc

SEQ ID NO: 2353488 - DNA, 25 bp, Homo sapien
cattgtacccaaccatgtcatgtaa

SEQ ID NO: 2353489 - DNA, 25 bp, Homo sapien
aacaaagacaagcaccaagacaaaa

SEQ ID NO: 2353490 - DNA, 25 bp, Homo sapien
aaagaattactacaacagcagctca

SEQ ID NO: 2353491 - DNA, 25 bp, Homo sapien
aatattcactccatagtttaaaaga

SEQ ID NO: 2353492 - DNA, 25 bp, Homo sapien
aagacaagcaccaagacaaaaatgt

SEQ ID NO: 2353493 - DNA, 25 bp, Homo sapien
tgtgtaaaggaatatccactatcaa

SEQ ID NO: 2353494 - DNA, 25 bp, Homo sapien
cataattcggaaggattatctcgga

SEQ ID NO: 2353495 - DNA, 25 bp, Homo sapien
tcaacaatgatacagcataattcgg

SEQ ID NO: 2353496 - DNA, 25 bp, Homo sapien
tacttctacaataaggaactatatg

SEQ ID NO: 2353497 - DNA, 25 bp, Homo sapien
tatcgcacatatcattctgtttaat

SEQ ID NO: 2353498 - DNA, 25 bp, Homo sapien
ttatcgcacatatcattctgtttaa

SEQ ID NO: 2353499 - DNA, 25 bp, Homo sapien
atcgcacatatcattctgtttaatc

SEQ ID NO: 2353500 - DNA, 25 bp, Homo sapien
gatctcctttagatgattggttaag

SEQ ID NO: 2353501 - DNA, 25 bp, Homo sapien
ccaaagaatcaaagctaagcatcac

SEQ ID NO: 2353502 - DNA, 25 bp, Homo sapien
gcgtgagtcacaatgactggcctta

SEQ ID NO: 2353503 - DNA, 25 bp, Homo sapien
gccccatcctcccaaagaatcaaag

SEQ ID NO: 2353504 - DNA, 25 bp, Homo sapien
agtaaggaataatcttaaattactg

SEQ ID NO: 2353505 - DNA, 25 bp, Homo sapien
catcttctttcacttgattaatcac

SEQ ID NO: 2353506 - DNA, 25 bp, Homo sapien
tccatgtctctataaaaatcctgag

SEQ ID NO: 2353507 - DNA, 25 bp, Homo sapien
catgtgtttcatccataacatgtag

SEQ ID NO: 2353508 - DNA, 25 bp, Homo sapien
atccatgtctctataaaaatcctga

SEQ ID NO: 2353509 - DNA, 25 bp, Homo sapien
ctttttaattgtactgaagtcaggc

SEQ ID NO: 2353510 - DNA, 25 bp, Homo sapien
ttaattgtactgaagtcaggcaaga

SEQ ID NO: 2353511 - DNA, 25 bp, Homo sapien
gaagtcaggcaagacatagtctatc

SEQ ID NO: 2353512 - DNA, 25 bp, Homo sapien
tcaggcaagacatagtctatcatta

SEQ ID NO: 2353513 - DNA, 25 bp, Homo sapien
catacttcacctcaataatctggcc

SEQ ID NO: 2353514 - DNA, 25 bp, Homo sapien
tgatttcagttttataaggccccaa

SEQ ID NO: 2353515 - DNA, 25 bp, Homo sapien
cagccataaggatctgtttctaaga

SEQ ID NO: 2353516 - DNA, 25 bp, Homo sapien
ccacacacagccataaggatctgtt

SEQ ID NO: 2353517 - DNA, 25 bp, Homo sapien
tatatgaggcctatgtataacaaac

SEQ ID NO: 2353518 - DNA, 25 bp, Homo sapien
tctggaaagagcctacatctctaca

SEQ ID NO: 2353519 - DNA, 25 bp, Homo sapien
agtactgtctactttcactccccta

SEQ ID NO: 2353520 - DNA, 25 bp, Homo sapien
gatatgtggctctattctattagga

SEQ ID NO: 2353521 - DNA, 25 bp, Homo sapien
gaattgaatagacaatagcttctgg

SEQ ID NO: 2353522 - DNA, 25 bp, Homo sapien
cattggccaaacgaagaatttgttc

SEQ ID NO: 2353523 - DNA, 25 bp, Homo sapien
caggtagattttgaattgaatagac

SEQ ID NO: 2353524 - DNA, 25 bp, Homo sapien
gattaaagagtatttccggaacagc

SEQ ID NO: 2353525 - DNA, 25 bp, Homo sapien
aaaacagactcaccaatttgcctga

SEQ ID NO: 2353526 - DNA, 25 bp, Homo sapien
gaataagtcagtctaccaatagctg

SEQ ID NO: 2353527 - DNA, 25 bp, Homo sapien
taaggcatgtttcaggagaatccag

SEQ ID NO: 2353528 - DNA, 25 bp, Homo sapien
catggcctgtgctagattttctcca

SEQ ID NO: 2353529 - DNA, 25 bp, Homo sapien
cctcctgtcaagacaatgttcttaa

SEQ ID NO: 2353530 - DNA, 25 bp, Homo sapien
gaatttcctcctgtcaagacaatgt

SEQ ID NO: 2353531 - DNA, 25 bp, Homo sapien
atttcctcctgtcaagacaatgttc

SEQ ID NO: 2353532 - DNA, 25 bp, Homo sapien
ttcctcctgtcaagacaatgttctt

SEQ ID NO: 2353533 - DNA, 25 bp, Homo sapien
catcataatctgttggagtaagaca

SEQ ID NO: 2353534 - DNA, 25 bp, Homo sapien
tcgaacttctgagtaaacccgatcc

SEQ ID NO: 2353535 - DNA, 25 bp, Homo sapien
taagacatcgaacttctgagtaaac

SEQ ID NO: 2353536 - DNA, 25 bp, Homo sapien
gttggagtaagacatcgaacttctg

SEQ ID NO: 2353537 - DNA, 25 bp, Homo sapien
ttctcttgttaccaccatatcttca

SEQ ID NO: 2353538 - DNA, 25 bp, Homo sapien
caaatttctcttcacagacgctatg

SEQ ID NO: 2353539 - DNA, 25 bp, Homo sapien
tcttcgtaatcttctcttgttacca

SEQ ID NO: 2353540 - DNA, 25 bp, Homo sapien
caccttcccaggcataagtaatagg

SEQ ID NO: 2353541 - DNA, 25 bp, Homo sapien
agtcacagtcacacaaaactacctt

SEQ ID NO: 2353542 - DNA, 25 bp, Homo sapien
tgtgctttcagctatgaagaattaa

SEQ ID NO: 2353543 - DNA, 25 bp, Homo sapien
tccagtgaagccgttaaatttgtgc

SEQ ID NO: 2353544 - DNA, 25 bp, Homo sapien
cattgttatggtagtctagctccta

SEQ ID NO: 2353545 - DNA, 25 bp, Homo sapien
ttcttttgtaccaccagcatcttct

SEQ ID NO: 2353546 - DNA, 25 bp, Homo sapien
gtaaccgggtatcacacaaacatgg

SEQ ID NO: 2353547 - DNA, 25 bp, Homo sapien
tttacctccattgacatcaccttga

SEQ ID NO: 2353548 - DNA, 25 bp, Homo sapien
gcactgtccacagattatatgccag

SEQ ID NO: 2353549 - DNA, 25 bp, Homo sapien
ttacgttttgccaacccttgacata

SEQ ID NO: 2353550 - DNA, 25 bp, Homo sapien
aagggaaggacaattcagtatctac

SEQ ID NO: 2353551 - DNA, 25 bp, Homo sapien
tttgccaacccttgacatacaagga

SEQ ID NO: 2353552 - DNA, 25 bp, Homo sapien
tacaccagttggctcttgagattaa

SEQ ID NO: 2353553 - DNA, 25 bp, Homo sapien
aacatatgtatagttgggcatactt

SEQ ID NO: 2353554 - DNA, 25 bp, Homo sapien
gttgggcatacttttgcggttatgc

SEQ ID NO: 2353555 - DNA, 25 bp, Homo sapien
acatatgtatagttgggcatacttt

SEQ ID NO: 2353556 - DNA, 25 bp, Homo sapien
tgggcatacttttgcggttatgcat

SEQ ID NO: 2353557 - DNA, 25 bp, Homo sapien
ttagacgggtaacttctgttacaga

SEQ ID NO: 2353558 - DNA, 25 bp, Homo sapien
ttcttgagtgattagacgggtaact

SEQ ID NO: 2353559 - DNA, 25 bp, Homo sapien
tctgttacagaaggaatttgagggt

SEQ ID NO: 2353560 - DNA, 25 bp, Homo sapien
agtctccgctctgcccacaatgtct

SEQ ID NO: 2353561 - DNA, 25 bp, Homo sapien
ttgactccgaggttccgtagacttg

SEQ ID NO: 2353562 - DNA, 25 bp, Homo sapien
ccagcgcgcgagcttatggcggttc

SEQ ID NO: 2353563 - DNA, 25 bp, Homo sapien
ttgtcagtcagaacgagcttccggg

SEQ ID NO: 2353564 - DNA, 25 bp, Homo sapien
aggcggagccagtacttctctccgc

SEQ ID NO: 2353565 - DNA, 25 bp, Homo sapien
tggctttactccatatcctccgccg

SEQ ID NO: 2353566 - DNA, 25 bp, Homo sapien
tcgtgcctggccactgactctggct

SEQ ID NO: 2353567 - DNA, 25 bp, Homo sapien
caaacgtcggagctagaaggaaagg

SEQ ID NO: 2353568 - DNA, 25 bp, Homo sapien
taataaacgcctcctggctgttcct

SEQ ID NO: 2353569 - DNA, 25 bp, Homo sapien
tcggtgccggcggccggtcacttac

SEQ ID NO: 2353570 - DNA, 25 bp, Homo sapien
gagccgccggtgagggaggtcggtc

SEQ ID NO: 2353571 - DNA, 25 bp, Homo sapien
taacccgggcgcgagtcctccattc

SEQ ID NO: 2353572 - DNA, 25 bp, Homo sapien
tgagggaggtcggtcggtgccggcg

SEQ ID NO: 2353573 - DNA, 25 bp, Homo sapien
cggccgccggcaggcccgtcaccag

SEQ ID NO: 2353574 - DNA, 25 bp, Homo sapien
gccgaccgccgatcgcccggccggc

SEQ ID NO: 2353575 - DNA, 25 bp, Homo sapien
ctttgcgcgggcgccgaccgccgat

SEQ ID NO: 2353576 - DNA, 25 bp, Homo sapien
ccggccgccggcaggcccgtcacca

SEQ ID NO: 2353577 - DNA, 25 bp, Homo sapien
ggactcggccctctcggatccgctc

SEQ ID NO: 2353578 - DNA, 25 bp, Homo sapien
gaaacccgagctctcgagccggcat

SEQ ID NO: 2353579 - DNA, 25 bp, Homo sapien
tcaaggcctctttcgaggactcggc

SEQ ID NO: 2353580 - DNA, 25 bp, Homo sapien
ggagctcgctgctcgtccagccccg

SEQ ID NO: 2353581 - DNA, 25 bp, Homo sapien
ggtcctagagtagtgtccaatgtcc

SEQ ID NO: 2353582 - DNA, 25 bp, Homo sapien
ccggtcctagagtagtgtccaatgt

SEQ ID NO: 2353583 - DNA, 25 bp, Homo sapien
cggtcctagagtagtgtccaatgtc

SEQ ID NO: 2353584 - DNA, 25 bp, Homo sapien
taaagctactgtcagagaaggacgg

SEQ ID NO: 2353585 - DNA, 25 bp, Homo sapien
ttttcagaacggagataggctactt

SEQ ID NO: 2353586 - DNA, 25 bp, Homo sapien
tgaagtcactacaggcatagcgctt

SEQ ID NO: 2353587 - DNA, 25 bp, Homo sapien
taccggattccggacctcagaactg

SEQ ID NO: 2353588 - DNA, 25 bp, Homo sapien
gatctgtctagaaagtattccacag

SEQ ID NO: 2353589 - DNA, 25 bp, Homo sapien
ctgggtatttatgaatcttagagac

SEQ ID NO: 2353590 - DNA, 25 bp, Homo sapien
tgagtagttattcccagtaacaggg

SEQ ID NO: 2353591 - DNA, 25 bp, Homo sapien
aaataggtttctgcatgtgagtaat

SEQ ID NO: 2353592 - DNA, 25 bp, Homo sapien
gcactcagagattactagaagtttt

SEQ ID NO: 2353593 - DNA, 25 bp, Homo sapien
ccagagttggccttaagatgtattc

SEQ ID NO: 2353594 - DNA, 25 bp, Homo sapien
gcttgtgggagcactcagagattac

SEQ ID NO: 2353595 - DNA, 25 bp, Homo sapien
tacatttctgcttgtgggagcactc

SEQ ID NO: 2353596 - DNA, 25 bp, Homo sapien
atacagcaagaaatgtaacaggtaa

SEQ ID NO: 2353597 - DNA, 25 bp, Homo sapien
cagcaagaaatgtaacaggtaaaat

SEQ ID NO: 2353598 - DNA, 25 bp, Homo sapien
ctagatacagcaagaaatgtaacag

SEQ ID NO: 2353599 - DNA, 25 bp, Homo sapien
agcaagaaatgtaacaggtaaaatt

SEQ ID NO: 2353600 - DNA, 25 bp, Homo sapien
cagaaagtaggatgagtattacagc

SEQ ID NO: 2353601 - DNA, 25 bp, Homo sapien
aaggaactggcaattctttcagtcc

SEQ ID NO: 2353602 - DNA, 25 bp, Homo sapien
ttacagcatctgacagcaggtagct

SEQ ID NO: 2353603 - DNA, 25 bp, Homo sapien
ttacgtgcacctggcagaaagtagg

SEQ ID NO: 2353604 - DNA, 25 bp, Homo sapien
ccaagactgtgtatctctctaccat

SEQ ID NO: 2353605 - DNA, 25 bp, Homo sapien
ggctttcaatagaaccagcatgtga

SEQ ID NO: 2353606 - DNA, 25 bp, Homo sapien
tggaaattcttagtcatgtaaggca

SEQ ID NO: 2353607 - DNA, 25 bp, Homo sapien
gtagcttcagtatgattccaagact

SEQ ID NO: 2353608 - DNA, 25 bp, Homo sapien
tttcctttaagcaccatatcactgc

SEQ ID NO: 2353609 - DNA, 25 bp, Homo sapien
tactgcctgagcaatcctaattcaa

SEQ ID NO: 2353610 - DNA, 25 bp, Homo sapien
gaagctttcttcaaactagaatgtc

SEQ ID NO: 2353611 - DNA, 25 bp, Homo sapien
gaatgtctgcatctctagggttaca

SEQ ID NO: 2353612 - DNA, 25 bp, Homo sapien
ctgcaatattgggtagttatagtta

SEQ ID NO: 2353613 - DNA, 25 bp, Homo sapien
tgcaatattgggtagttatagttac

SEQ ID NO: 2353614 - DNA, 25 bp, Homo sapien
attacagcactagtgacatcagctg

SEQ ID NO: 2353615 - DNA, 25 bp, Homo sapien
cattacagcactagtgacatcagct

SEQ ID NO: 2353616 - DNA, 25 bp, Homo sapien
cgaagccgagttaactgttggactc

SEQ ID NO: 2353617 - DNA, 25 bp, Homo sapien
cgagggtgtcgaagccgagttaact

SEQ ID NO: 2353618 - DNA, 25 bp, Homo sapien
ggtgtcgaagccgagttaactgttg

SEQ ID NO: 2353619 - DNA, 25 bp, Homo sapien
tcgagggtgtcgaagccgagttaac

SEQ ID NO: 2353620 - DNA, 25 bp, Homo sapien
gcacagggtagccactgaagtacag

SEQ ID NO: 2353621 - DNA, 25 bp, Homo sapien
gagagacatatacgtagacaatgca

SEQ ID NO: 2353622 - DNA, 25 bp, Homo sapien
tgaagtacagaatcatggcaaaagt

SEQ ID NO: 2353623 - DNA, 25 bp, Homo sapien
tgactattgtagtcatgagcacagg

SEQ ID NO: 2353624 - DNA, 25 bp, Homo sapien
tatactagataaatcactcggtctt

SEQ ID NO: 2353625 - DNA, 25 bp, Homo sapien
caccttgttcaaccaccttgttcaa

SEQ ID NO: 2353626 - DNA, 25 bp, Homo sapien
taatttcagcatagacataatccac

SEQ ID NO: 2353627 - DNA, 25 bp, Homo sapien
taagtgttgtgataactgcgatctt

SEQ ID NO: 2353628 - DNA, 25 bp, Homo sapien
ttggtttctacatcataaagtttat

SEQ ID NO: 2353629 - DNA, 25 bp, Homo sapien
ataatccttaatgtctggagatata

SEQ ID NO: 2353630 - DNA, 25 bp, Homo sapien
atccttaatgtctggagatataggg

SEQ ID NO: 2353631 - DNA, 25 bp, Homo sapien
tggtttctacatcataaagtttata

SEQ ID NO: 2353632 - DNA, 25 bp, Homo sapien
cacactgctatgcaagaatgacaat

SEQ ID NO: 2353633 - DNA, 25 bp, Homo sapien
ctcttgttcagaaggattggttgat

SEQ ID NO: 2353634 - DNA, 25 bp, Homo sapien
tcttgttcagaaggattggttgatg

SEQ ID NO: 2353635 - DNA, 25 bp, Homo sapien
tgttgacttcaaatataggtttccc

SEQ ID NO: 2353636 - DNA, 25 bp, Homo sapien
tcttgcttgttgacttcaaatatag

SEQ ID NO: 2353637 - DNA, 25 bp, Homo sapien
cttgttgacttcaaatataggtttc

SEQ ID NO: 2353638 - DNA, 25 bp, Homo sapien
tgcttgttgacttcaaatataggtt

SEQ ID NO: 2353639 - DNA, 25 bp, Homo sapien
ttacatgttcacgaacttcctcagg

SEQ ID NO: 2353640 - DNA, 25 bp, Homo sapien
ggcagttttggtagaacctttggca

SEQ ID NO: 2353641 - DNA, 25 bp, Homo sapien
caaacaaggcaaaattctctgcaca

SEQ ID NO: 2353642 - DNA, 25 bp, Homo sapien
caataagtagaacattgggcaaaac

SEQ ID NO: 2353643 - DNA, 25 bp, Homo sapien
gcattcctcagcaataagtagaaca

SEQ ID NO: 2353644 - DNA, 25 bp, Homo sapien
acaaggcaaaattctctgcacaatg

SEQ ID NO: 2353645 - DNA, 25 bp, Homo sapien
tcagggaagaatattcggaagaaat

SEQ ID NO: 2353646 - DNA, 25 bp, Homo sapien
acatactgccccttctatttataca

SEQ ID NO: 2353647 - DNA, 25 bp, Homo sapien
ctaaattataaggaacatactgccc

SEQ ID NO: 2353648 - DNA, 25 bp, Homo sapien
tggtcattcttccacatacctaaat

SEQ ID NO: 2353649 - DNA, 25 bp, Homo sapien
cacacaaatcaagtctcttacattt

SEQ ID NO: 2353650 - DNA, 25 bp, Homo sapien
aacacacaaatcaagtctcttacat

SEQ ID NO: 2353651 - DNA, 25 bp, Homo sapien
gaatgcgtggaagacaaaaacacac

SEQ ID NO: 2353652 - DNA, 25 bp, Homo sapien
tgaatgcgtggaagacaaaaacaca

SEQ ID NO: 2353653 - DNA, 25 bp, Homo sapien
agtgctctgtaaaccatgggtagaa

SEQ ID NO: 2353654 - DNA, 25 bp, Homo sapien
gggtagaacactgttctttatctca

SEQ ID NO: 2353655 - DNA, 25 bp, Homo sapien
tgaatggaaggagcttctagtgctc

SEQ ID NO: 2353656 - DNA, 25 bp, Homo sapien
gaaggagcttctagtgctctgtaaa

SEQ ID NO: 2353657 - DNA, 25 bp, Homo sapien
cataccctcacctttaagaaggcaa

SEQ ID NO: 2353658 - DNA, 25 bp, Homo sapien
tggacaaaggcagcataccctcacc

SEQ ID NO: 2353659 - DNA, 25 bp, Homo sapien
aggcagcataccctcacctttaaga

SEQ ID NO: 2353660 - DNA, 25 bp, Homo sapien
gacaaaggcagcataccctcacctt

SEQ ID NO: 2353661 - DNA, 25 bp, Homo sapien
acagccgggatgaggaactatttta

SEQ ID NO: 2353662 - DNA, 25 bp, Homo sapien
caaaatcaaacctcaaaggagtcta

SEQ ID NO: 2353663 - DNA, 25 bp, Homo sapien
cccagcccgggatgaggaacttaat

SEQ ID NO: 2353664 - DNA, 25 bp, Homo sapien
ttaataacaggagattgcaaaacac

SEQ ID NO: 2353665 - DNA, 25 bp, Homo sapien
atagctcactgtagcatcctgggct

SEQ ID NO: 2353666 - DNA, 25 bp, Homo sapien
tcctccccaactcagcctcccaagt

SEQ ID NO: 2353667 - DNA, 25 bp, Homo sapien
tgcctggttaattttatcatctttt

SEQ ID NO: 2353668 - DNA, 25 bp, Homo sapien
caagtgatcctcctccccaactcag

SEQ ID NO: 2353669 - DNA, 25 bp, Homo sapien
catgaccttggctcacagaatcctc

SEQ ID NO: 2353670 - DNA, 25 bp, Homo sapien
cctaccttggcccatgcccagctaa

SEQ ID NO: 2353671 - DNA, 25 bp, Homo sapien
tgaccttggctcacagaatcctccg

SEQ ID NO: 2353672 - DNA, 25 bp, Homo sapien
ccacctaccttggcccatgcccagc

SEQ ID NO: 2353673 - DNA, 25 bp, Homo sapien
tttgcaaaggttggaatgatgttta

SEQ ID NO: 2353674 - DNA, 25 bp, Homo sapien
tagtctataagatttgcaaaggttg

SEQ ID NO: 2353675 - DNA, 25 bp, Homo sapien
taagatttgcaaaggttggaatgat

SEQ ID NO: 2353676 - DNA, 25 bp, Homo sapien
gatgggtagtctataagatttgcaa

SEQ ID NO: 2353677 - DNA, 25 bp, Homo sapien
aagatgtttgtagacaagcattttt

SEQ ID NO: 2353678 - DNA, 25 bp, Homo sapien
agatgtttgtagacaagcattttta

SEQ ID NO: 2353679 - DNA, 25 bp, Homo sapien
ctaaaattcccatgaggaccgcagg

SEQ ID NO: 2353680 - DNA, 25 bp, Homo sapien
aattcccatgaggaccgcaggttcc

SEQ ID NO: 2353681 - DNA, 25 bp, Homo sapien
ttcccatgaggaccgcaggttcctt

SEQ ID NO: 2353682 - DNA, 25 bp, Homo sapien
aaaattcccatgaggaccgcaggtt

SEQ ID NO: 2353683 - DNA, 25 bp, Homo sapien
gataaaatagcatcaaatgacatta

SEQ ID NO: 2353684 - DNA, 25 bp, Homo sapien
ggaaaatttatttgcatgataaaat

SEQ ID NO: 2353685 - DNA, 25 bp, Homo sapien
atgataaaatagcatcaaatgacat

SEQ ID NO: 2353686 - DNA, 25 bp, Homo sapien
aatttatttgcatgataaaatagca

SEQ ID NO: 2353687 - DNA, 25 bp, Homo sapien
cacttatatgatcttgaatcactta

SEQ ID NO: 2353688 - DNA, 25 bp, Homo sapien
tgatcttgaatcacttattttacct

SEQ ID NO: 2353689 - DNA, 25 bp, Homo sapien
gatcttgaatcacttattttacctc

SEQ ID NO: 2353690 - DNA, 25 bp, Homo sapien
cttgaatcacttattttacctctct

SEQ ID NO: 2353691 - DNA, 25 bp, Homo sapien
gaatggccttctattctgaaacatc

SEQ ID NO: 2353692 - DNA, 25 bp, Homo sapien
ggtacagtcaaaatataagtcctac

SEQ ID NO: 2353693 - DNA, 25 bp, Homo sapien
tatcatcaggccagatttaaacacc

SEQ ID NO: 2353694 - DNA, 25 bp, Homo sapien
cataagaagcttatcagaaccaggt

SEQ ID NO: 2353695 - DNA, 25 bp, Homo sapien
aggcaacacttttccggccagctgc

SEQ ID NO: 2353696 - DNA, 25 bp, Homo sapien
aacacttttccggccagctgctctt

SEQ ID NO: 2353697 - DNA, 25 bp, Homo sapien
gcaacacttttccggccagctgctc

SEQ ID NO: 2353698 - DNA, 25 bp, Homo sapien
ggcaacacttttccggccagctgct

SEQ ID NO: 2353699 - DNA, 25 bp, Homo sapien
tatatatctaatgccaagaaaaaag

SEQ ID NO: 2353700 - DNA, 25 bp, Homo sapien
gaataaagcacaaaaatactcctac

SEQ ID NO: 2353701 - DNA, 25 bp, Homo sapien
agaaaaaagtaagctgaataaaatg

SEQ ID NO: 2353702 - DNA, 25 bp, Homo sapien
taatgccaagaaaaaagtaagctga

SEQ ID NO: 2353703 - DNA, 25 bp, Homo sapien
gaaacaaatgggaaggcagaccaca

SEQ ID NO: 2353704 - DNA, 25 bp, Homo sapien
aaacaaatgggaaggcagaccacat

SEQ ID NO: 2353705 - DNA, 25 bp, Homo sapien
aacaaatgggaaggcagaccacatc

SEQ ID NO: 2353706 - DNA, 25 bp, Homo sapien
tgaaacaaatgggaaggcagaccac

SEQ ID NO: 2353707 - DNA, 25 bp, Homo sapien
tactcccggagttgtttaatagcta

SEQ ID NO: 2353708 - DNA, 25 bp, Homo sapien
ggttacaatgtttcaagttagcagc

SEQ ID NO: 2353709 - DNA, 25 bp, Homo sapien
tagaataggatccagtcacagcgct

SEQ ID NO: 2353710 - DNA, 25 bp, Homo sapien
taaattcggcatatcatagcaagct

SEQ ID NO: 2353711 - DNA, 25 bp, Homo sapien
gactccaatctattaagcatttctt

SEQ ID NO: 2353712 - DNA, 25 bp, Homo sapien
ttaagcatttcttttatgacggaaa

SEQ ID NO: 2353713 - DNA, 25 bp, Homo sapien
ttcagactccaatctattaagcatt

SEQ ID NO: 2353714 - DNA, 25 bp, Homo sapien
taagcatttcttttatgacggaaat

SEQ ID NO: 2353715 - DNA, 25 bp, Homo sapien
aacctgagtttacaatgctagtggc

SEQ ID NO: 2353716 - DNA, 25 bp, Homo sapien
catgtggtcaaatttaaatccagca

SEQ ID NO: 2353717 - DNA, 25 bp, Homo sapien
tggctactgctgacaagaaattttt

SEQ ID NO: 2353718 - DNA, 25 bp, Homo sapien
gacaactataatttcactcccggac

SEQ ID NO: 2353719 - DNA, 25 bp, Homo sapien
ctgattcccaatatttgtaactttc

SEQ ID NO: 2353720 - DNA, 25 bp, Homo sapien
tgtaactttcatctcctcagaaaca

SEQ ID NO: 2353721 - DNA, 25 bp, Homo sapien
atttgtaactttcatctcctcagaa

SEQ ID NO: 2353722 - DNA, 25 bp, Homo sapien
catttgatttcctatatccaaagat

SEQ ID NO: 2353723 - DNA, 25 bp, Homo sapien
aataagttcaataaaaatgtgattt

SEQ ID NO: 2353724 - DNA, 25 bp, Homo sapien
aatgtcaataatttaaataagttca

SEQ ID NO: 2353725 - DNA, 25 bp, Homo sapien
ctgaaatagaaaaatgtcaataatt

SEQ ID NO: 2353726 - DNA, 25 bp, Homo sapien
ttcaataaaaatgtgattttgctgc

SEQ ID NO: 2353727 - DNA, 25 bp, Homo sapien
ccagtcagaaggtctgctccaatgt

SEQ ID NO: 2353728 - DNA, 25 bp, Homo sapien
gccagtcagaaggtctgctccaatg

SEQ ID NO: 2353729 - DNA, 25 bp, Homo sapien
gtttaacagtagcaacaggtgtgtg

SEQ ID NO: 2353730 - DNA, 25 bp, Homo sapien
tttaacagtagcaacaggtgtgtgc

SEQ ID NO: 2353731 - DNA, 25 bp, Homo sapien
ttcccagagtcatcttggtcactcc

SEQ ID NO: 2353732 - DNA, 25 bp, Homo sapien
ctcaaagcattgaagtttggcaaag

SEQ ID NO: 2353733 - DNA, 25 bp, Homo sapien
tgaactgcccatagttggagaacct

SEQ ID NO: 2353734 - DNA, 25 bp, Homo sapien
gagtcatcttggtcactccaactgt

SEQ ID NO: 2353735 - DNA, 25 bp, Homo sapien
tcatagtagttggtggctgtgcaaa

SEQ ID NO: 2353736 - DNA, 25 bp, Homo sapien
ttaaagaaaggattaccctgcatac

SEQ ID NO: 2353737 - DNA, 25 bp, Homo sapien
tttaaatcattgctagctgaactgc

SEQ ID NO: 2353738 - DNA, 25 bp, Homo sapien
gctgaactgctattggtcatagtag

SEQ ID NO: 2353739 - DNA, 25 bp, Homo sapien
tatatgctgcaacctcagaagtttg

SEQ ID NO: 2353740 - DNA, 25 bp, Homo sapien
gaagtccatacaactactatgctgg

SEQ ID NO: 2353741 - DNA, 25 bp, Homo sapien
tcagggaagtcacatcagagtgcct

SEQ ID NO: 2353742 - DNA, 25 bp, Homo sapien
tagaagtacttcctccaagccaact

SEQ ID NO: 2353743 - DNA, 25 bp, Homo sapien
tttgaaacaatacagcagaaacctc

SEQ ID NO: 2353744 - DNA, 25 bp, Homo sapien
catttgaaacaatacagcagaaacc

SEQ ID NO: 2353745 - DNA, 25 bp, Homo sapien
tattacatttgaaacaatacagcag

SEQ ID NO: 2353746 - DNA, 25 bp, Homo sapien
aaacaatacagcagaaacctcaaaa

SEQ ID NO: 2353747 - DNA, 25 bp, Homo sapien
taccctcttaactgaatgctgccag

SEQ ID NO: 2353748 - DNA, 25 bp, Homo sapien
tgaggtcagactatcatggcaagct

SEQ ID NO: 2353749 - DNA, 25 bp, Homo sapien
cataaggctctgtggttgaataatc

SEQ ID NO: 2353750 - DNA, 25 bp, Homo sapien
ggtgcatactcctcttgatatcagg

SEQ ID NO: 2353751 - DNA, 25 bp, Homo sapien
taacagatgcaaggtggtagagagc

SEQ ID NO: 2353752 - DNA, 25 bp, Homo sapien
tttttcgggttaagccatgcaagcc

SEQ ID NO: 2353753 - DNA, 25 bp, Homo sapien
aaaatctagcttctattccaggcgc

SEQ ID NO: 2353754 - DNA, 25 bp, Homo sapien
catatttcaaaccagcagccagagg

SEQ ID NO: 2353755 - DNA, 25 bp, Homo sapien
tacatgtgccatattggcatgctgc

SEQ ID NO: 2353756 - DNA, 25 bp, Homo sapien
tgccatattggcatgctgcacccat

SEQ ID NO: 2353757 - DNA, 25 bp, Homo sapien
atagtgctgcaataagtctatgtgt

SEQ ID NO: 2353758 - DNA, 25 bp, Homo sapien
tgctgcaataagtctatgtgtgcat

SEQ ID NO: 2353759 - DNA, 25 bp, Homo sapien
ggacgctaacatgagctccggacca

SEQ ID NO: 2353760 - DNA, 25 bp, Homo sapien
caaggtgatgctatagtaaccggca

SEQ ID NO: 2353761 - DNA, 25 bp, Homo sapien
gaccagcagcagtatccgtggccta

SEQ ID NO: 2353762 - DNA, 25 bp, Homo sapien
ggaattcagtcccttgcaaaagctg

SEQ ID NO: 2353763 - DNA, 25 bp, Homo sapien
gaatctcccacggcgttcttcactc

SEQ ID NO: 2353764 - DNA, 25 bp, Homo sapien
aaagaatctcccacggcgttcttca

SEQ ID NO: 2353765 - DNA, 25 bp, Homo sapien
caaagaatctcccacggcgttcttc

SEQ ID NO: 2353766 - DNA, 25 bp, Homo sapien
aagaatctcccacggcgttcttcac

SEQ ID NO: 2353767 - DNA, 25 bp, Homo sapien
aggaagtgcatatctggcacactcc

SEQ ID NO: 2353768 - DNA, 25 bp, Homo sapien
gcaggaagtgcatatctggcacact

SEQ ID NO: 2353769 - DNA, 25 bp, Homo sapien
tgcatatctggcacactcctgaatg

SEQ ID NO: 2353770 - DNA, 25 bp, Homo sapien
ggagcaggaagtgcatatctggcac

SEQ ID NO: 2353771 - DNA, 25 bp, Homo sapien
ctgttactttgtagtccttgcgcag

SEQ ID NO: 2353772 - DNA, 25 bp, Homo sapien
tactttgtagtccttgcgcagccat

SEQ ID NO: 2353773 - DNA, 25 bp, Homo sapien
ttactttgtagtccttgcgcagcca

SEQ ID NO: 2353774 - DNA, 25 bp, Homo sapien
gaatcccagcccactcatgatagca

SEQ ID NO: 2353775 - DNA, 25 bp, Homo sapien
gaatttccggttttccatcaacata

SEQ ID NO: 2353776 - DNA, 25 bp, Homo sapien
agattgcaccggatcccaaaggaaa

SEQ ID NO: 2353777 - DNA, 25 bp, Homo sapien
acggtgctattgttgaccatttcca

SEQ ID NO: 2353778 - DNA, 25 bp, Homo sapien
ttgtgtcataatatagccccagaaa

SEQ ID NO: 2353779 - DNA, 25 bp, Homo sapien
atggataaggcccactgtttctgga

SEQ ID NO: 2353780 - DNA, 25 bp, Homo sapien
aagatccatggataaggcccactgt

SEQ ID NO: 2353781 - DNA, 25 bp, Homo sapien
gataaggcccactgtttctggatcc

SEQ ID NO: 2353782 - DNA, 25 bp, Homo sapien
catgttcagagtcgatgttaagaag

SEQ ID NO: 2353783 - DNA, 25 bp, Homo sapien
taaacatgttcagagtcgatgttaa

SEQ ID NO: 2353784 - DNA, 25 bp, Homo sapien
tcagagtcgatgttaagaagatggc

SEQ ID NO: 2353785 - DNA, 25 bp, Homo sapien
gagtcgatgttaagaagatggcagc

SEQ ID NO: 2353786 - DNA, 25 bp, Homo sapien
catgacgcatccgtaatgcactctg

SEQ ID NO: 2353787 - DNA, 25 bp, Homo sapien
tgacacacatgacgcatccgtaatg

SEQ ID NO: 2353788 - DNA, 25 bp, Homo sapien
cacatgacgcatccgtaatgcactc

SEQ ID NO: 2353789 - DNA, 25 bp, Homo sapien
gaattctgacacacatgacgcatcc

SEQ ID NO: 2353790 - DNA, 25 bp, Homo sapien
aaaggactgcgctgtctctagcaat

SEQ ID NO: 2353791 - DNA, 25 bp, Homo sapien
atcaaaaactgtaaggaaagtatct

SEQ ID NO: 2353792 - DNA, 25 bp, Homo sapien
tcaaaaactgtaaggaaagtatctc

SEQ ID NO: 2353793 - DNA, 25 bp, Homo sapien
tatcaaaaactgtaaggaaagtatc

SEQ ID NO: 2353794 - DNA, 25 bp, Homo sapien
ggttgtggccagtcggcttctctcc

SEQ ID NO: 2353795 - DNA, 25 bp, Homo sapien
aaggtggtgcccacttactccacat

SEQ ID NO: 2353796 - DNA, 25 bp, Homo sapien
aaaagaggttgtggccagtcggctt

SEQ ID NO: 2353797 - DNA, 25 bp, Homo sapien
caaaaagaggttgtggccagtcggc

SEQ ID NO: 2353798 - DNA, 25 bp, Homo sapien
gaatgtttatcttgtctagacaaga

SEQ ID NO: 2353799 - DNA, 25 bp, Homo sapien
aattgtgactagaggcagtgagctg

SEQ ID NO: 2353800 - DNA, 25 bp, Homo sapien
ctgtgtgtgaatgtttatcttgtct

SEQ ID NO: 2353801 - DNA, 25 bp, Homo sapien
caagataattgtgactagaggcagt

SEQ ID NO: 2353802 - DNA, 25 bp, Homo sapien
gaccatccaatgtactgcaccaaca

SEQ ID NO: 2353803 - DNA, 25 bp, Homo sapien
taaaagacagaggaccatccaatgt

SEQ ID NO: 2353804 - DNA, 25 bp, Homo sapien
gacagaggaccatccaatgtactgc

SEQ ID NO: 2353805 - DNA, 25 bp, Homo sapien
atataaaagacagaggaccatccaa

SEQ ID NO: 2353806 - DNA, 25 bp, Homo sapien
gtttgagggactcagacatctcata

SEQ ID NO: 2353807 - DNA, 25 bp, Homo sapien
taaaatgggtaatgtaccaatgttg

SEQ ID NO: 2353808 - DNA, 25 bp, Homo sapien
gactcagacatctcatacatgcacg

SEQ ID NO: 2353809 - DNA, 25 bp, Homo sapien
gagggactcagacatctcatacatg

SEQ ID NO: 2353810 - DNA, 25 bp, Homo sapien
tatgcttgtctctatataggtcttc

SEQ ID NO: 2353811 - DNA, 25 bp, Homo sapien
atattgttggatgagctgctgggca

SEQ ID NO: 2353812 - DNA, 25 bp, Homo sapien
caaaacatgtaccaaataatcccaa

SEQ ID NO: 2353813 - DNA, 25 bp, Homo sapien
tgctgggcactcataggcctgcaac

SEQ ID NO: 2353814 - DNA, 25 bp, Homo sapien
gccacaatgattgcataaaccggca

SEQ ID NO: 2353815 - DNA, 25 bp, Homo sapien
taaaccggcaaagatgtgaaaaatc

SEQ ID NO: 2353816 - DNA, 25 bp, Homo sapien
ttatgaggagcaaataaaaggtcca

SEQ ID NO: 2353817 - DNA, 25 bp, Homo sapien
agacctcttcaaaataagcaggctg

SEQ ID NO: 2353818 - DNA, 25 bp, Homo sapien
tgtgtgggactgctgacaagagacc

SEQ ID NO: 2353819 - DNA, 25 bp, Homo sapien
aaataatcagccaattgtcctccaa

SEQ ID NO: 2353820 - DNA, 25 bp, Homo sapien
tgtcctccaataggtacaacgattg

SEQ ID NO: 2353821 - DNA, 25 bp, Homo sapien
ttgtggttaaaatttgtctgcttct

SEQ ID NO: 2353822 - DNA, 25 bp, Homo sapien
tgcctaagccatctatgaaatccac

SEQ ID NO: 2353823 - DNA, 25 bp, Homo sapien
aagccatctatgaaatccacagtac

SEQ ID NO: 2353824 - DNA, 25 bp, Homo sapien
tacaaaagctgcctaagccatctat

SEQ ID NO: 2353825 - DNA, 25 bp, Homo sapien
aaagctgcctaagccatctatgaaa

SEQ ID NO: 2353826 - DNA, 25 bp, Homo sapien
gaggtctttaagatccactccaatg

SEQ ID NO: 2353827 - DNA, 25 bp, Homo sapien
tgtgatggacaacactcaagtgtct

SEQ ID NO: 2353828 - DNA, 25 bp, Homo sapien
tcacttcttaatatatgctctgcag

SEQ ID NO: 2353829 - DNA, 25 bp, Homo sapien
gacctcttggcagcactgtgatgga

SEQ ID NO: 2353830 - DNA, 25 bp, Homo sapien
gggtagccgcaaactaagagctttg

SEQ ID NO: 2353831 - DNA, 25 bp, Homo sapien
tccggcctacctgataccttgcagg

SEQ ID NO: 2353832 - DNA, 25 bp, Homo sapien
tcatcctgactagtcctccagaggg

SEQ ID NO: 2353833 - DNA, 25 bp, Homo sapien
agctttggcggtaggctccggccta

SEQ ID NO: 2353834 - DNA, 25 bp, Homo sapien
gtaccagaaaggagatagccacccc

SEQ ID NO: 2353835 - DNA, 25 bp, Homo sapien
ggtatgcgaaaagccaaccaccagg

SEQ ID NO: 2353836 - DNA, 25 bp, Homo sapien
accaccaggagtaaggttgcctcca

SEQ ID NO: 2353837 - DNA, 25 bp, Homo sapien
tgaaatagcgaagccactaaatcct

SEQ ID NO: 2353838 - DNA, 25 bp, Homo sapien
atgtccaggtggttgacattaaaac

SEQ ID NO: 2353839 - DNA, 25 bp, Homo sapien
tgaggggacagaccattccagagag

SEQ ID NO: 2353840 - DNA, 25 bp, Homo sapien
tccgtttgagatccccatgagaatg

SEQ ID NO: 2353841 - DNA, 25 bp, Homo sapien
catgagaatgctggcatagcgtggg

SEQ ID NO: 2353842 - DNA, 25 bp, Homo sapien
ggttgagttctatctcctcagctaa

SEQ ID NO: 2353843 - DNA, 25 bp, Homo sapien
tttgggactcgcaaaactctcatgg

SEQ ID NO: 2353844 - DNA, 25 bp, Homo sapien
tgggaggtggctccataagacatct

SEQ ID NO: 2353845 - DNA, 25 bp, Homo sapien
aattcgtcctggtcaatgattccac

SEQ ID NO: 2353846 - DNA, 25 bp, Homo sapien
tcttcctcatcaagggtcgctcctc

SEQ ID NO: 2353847 - DNA, 25 bp, Homo sapien
ttctctcttcattctggtaggatgt

SEQ ID NO: 2353848 - DNA, 25 bp, Homo sapien
ctcttcctcatcaagggtcgctcct

SEQ ID NO: 2353849 - DNA, 25 bp, Homo sapien
tctctcttcattctggtaggatgtc

SEQ ID NO: 2353850 - DNA, 25 bp, Homo sapien
caagctgggctacaagaaaggcaat

SEQ ID NO: 2353851 - DNA, 25 bp, Homo sapien
tatgttatcaactgagcgcagctcc

SEQ ID NO: 2353852 - DNA, 25 bp, Homo sapien
cactgaccctggcagatgaccttgg

SEQ ID NO: 2353853 - DNA, 25 bp, Homo sapien
aatatttggacctctggcaagctgg

SEQ ID NO: 2353854 - DNA, 25 bp, Homo sapien
ctcaaggcacttgagatagctactc

SEQ ID NO: 2353855 - DNA, 25 bp, Homo sapien
caccaacactatccagaacaaccat

SEQ ID NO: 2353856 - DNA, 25 bp, Homo sapien
tagctactcccacaccaacactatc

SEQ ID NO: 2353857 - DNA, 25 bp, Homo sapien
tcccacaccaacactatccagaaca

SEQ ID NO: 2353858 - DNA, 25 bp, Homo sapien
tggttttacacaagtgctgccagaa

SEQ ID NO: 2353859 - DNA, 25 bp, Homo sapien
ttcccatgggttagctaatctgcag

SEQ ID NO: 2353860 - DNA, 25 bp, Homo sapien
tcttaaggagggcatagaagcgacg

SEQ ID NO: 2353861 - DNA, 25 bp, Homo sapien
gccagaatgagttgcaacaggaacc

SEQ ID NO: 2353862 - DNA, 25 bp, Homo sapien
ctttaccatagcttacaaggcccca

SEQ ID NO: 2353863 - DNA, 25 bp, Homo sapien
ggctcccattttgcctgacctcatg

SEQ ID NO: 2353864 - DNA, 25 bp, Homo sapien
cagcaatcatctcgaggtcctcaaa

SEQ ID NO: 2353865 - DNA, 25 bp, Homo sapien
gatatctgcatctttacgtccttca

SEQ ID NO: 2353866 - DNA, 25 bp, Homo sapien
caggcatggtagcagacttgtcttt

SEQ ID NO: 2353867 - DNA, 25 bp, Homo sapien
gtatctaccctttgtcttagcacag

SEQ ID NO: 2353868 - DNA, 25 bp, Homo sapien
tgttaacgcaatcaatgagtgagct

SEQ ID NO: 2353869 - DNA, 25 bp, Homo sapien
aatcctctgaccttatatattatag

SEQ ID NO: 2353870 - DNA, 25 bp, Homo sapien
tcctgggcacccgtatttctgtaca

SEQ ID NO: 2353871 - DNA, 25 bp, Homo sapien
tcctctggccgttttgtgggctcct

SEQ ID NO: 2353872 - DNA, 25 bp, Homo sapien
tccccgggactgaactagaagctgg

SEQ ID NO: 2353873 - DNA, 25 bp, Homo sapien
tgtgacaaaaccaaggagccctgca

SEQ ID NO: 2353874 - DNA, 25 bp, Homo sapien
tcagagatggactttcaaggccctg

SEQ ID NO: 2353875 - DNA, 25 bp, Homo sapien
gagagttccagtgtactgtgcatga

SEQ ID NO: 2353876 - DNA, 25 bp, Homo sapien
ccctgggaggattctggactgagtc

SEQ ID NO: 2353877 - DNA, 25 bp, Homo sapien
caatttcgcattaggataagtcggg

SEQ ID NO: 2353878 - DNA, 25 bp, Homo sapien
catggaaattgtttgcaaagatggc

SEQ ID NO: 2353879 - DNA, 25 bp, Homo sapien
gacctgagctggtctaataaattcg

SEQ ID NO: 2353880 - DNA, 25 bp, Homo sapien
tctgtttcgctagcccttggacctg

SEQ ID NO: 2353881 - DNA, 25 bp, Homo sapien
catcaatgcacaaagtctgtttcgc

SEQ ID NO: 2353882 - DNA, 25 bp, Homo sapien
caggaggatcacttgagcctgggag

SEQ ID NO: 2353883 - DNA, 25 bp, Homo sapien
agccaagctacttgggaagttgaag

SEQ ID NO: 2353884 - DNA, 25 bp, Homo sapien
tcccagccaagctacttgggaagtt

SEQ ID NO: 2353885 - DNA, 25 bp, Homo sapien
ccagccaagctacttgggaagttga

SEQ ID NO: 2353886 - DNA, 25 bp, Homo sapien
gaagcagtgttcactttgagctatg

SEQ ID NO: 2353887 - DNA, 25 bp, Homo sapien
ctccttctacgatgtcttctacctc

SEQ ID NO: 2353888 - DNA, 25 bp, Homo sapien
ccaaatttttcaattgaaatgcact

SEQ ID NO: 2353889 - DNA, 25 bp, Homo sapien
cactttctttatggtggtcttcaaa

SEQ ID NO: 2353890 - DNA, 25 bp, Homo sapien
ttttcaattgaaatgcactttcttt

SEQ ID NO: 2353891 - DNA, 25 bp, Homo sapien
gaaatgcactttctttatggtggtc

SEQ ID NO: 2353892 - DNA, 25 bp, Homo sapien
taaatgggaatgttcaatgagattc

SEQ ID NO: 2353893 - DNA, 25 bp, Homo sapien
ggtaaatgggaatgttcaatgagat

SEQ ID NO: 2353894 - DNA, 25 bp, Homo sapien
gtaggtaaatgggaatgttcaatga

SEQ ID NO: 2353895 - DNA, 25 bp, Homo sapien
aaatgggaatgttcaatgagattca

SEQ ID NO: 2353896 - DNA, 25 bp, Homo sapien
gacggcatcttcgtggctttttctg

SEQ ID NO: 2353897 - DNA, 25 bp, Homo sapien
tggctttttctgaatttactggcat

SEQ ID NO: 2353898 - DNA, 25 bp, Homo sapien
cggcatcttcgtggctttttctgaa

SEQ ID NO: 2353899 - DNA, 25 bp, Homo sapien
ctgacggcatcttcgtggctttttc

SEQ ID NO: 2353900 - DNA, 25 bp, Homo sapien
tccaggacccagtagtgagtgcttg

SEQ ID NO: 2353901 - DNA, 25 bp, Homo sapien
gaagaagctgcaagttatcactgaa

SEQ ID NO: 2353902 - DNA, 25 bp, Homo sapien
ccttctaaatgccttaaagttgtca

SEQ ID NO: 2353903 - DNA, 25 bp, Homo sapien
ccatggtcacctctagaagaagctg

SEQ ID NO: 2353904 - DNA, 25 bp, Homo sapien
tacacgagctcagatgatgactgca

SEQ ID NO: 2353905 - DNA, 25 bp, Homo sapien
tattaatatatgctccagtccctga

SEQ ID NO: 2353906 - DNA, 25 bp, Homo sapien
tctgatctcggccatacctgtggca

SEQ ID NO: 2353907 - DNA, 25 bp, Homo sapien
ggcctgagctcaaaaacagtccaga

SEQ ID NO: 2353908 - DNA, 25 bp, Homo sapien
tttagtggcaaatagagtacttgtg

SEQ ID NO: 2353909 - DNA, 25 bp, Homo sapien
gcagagattggaaccaacccaggaa

SEQ ID NO: 2353910 - DNA, 25 bp, Homo sapien
caagaccacagggtagtagatggca

SEQ ID NO: 2353911 - DNA, 25 bp, Homo sapien
gccaggcattcttcttatcacctta

SEQ ID NO: 2353912 - DNA, 25 bp, Homo sapien
ggagtgagagaggacagaggttgtg

SEQ ID NO: 2353913 - DNA, 25 bp, Homo sapien
aaggagtgagagaggacagaggttg

SEQ ID NO: 2353914 - DNA, 25 bp, Homo sapien
gtaaggagtgagagaggacagaggt

SEQ ID NO: 2353915 - DNA, 25 bp, Homo sapien
ctaggtaaggagtgagagaggacag

SEQ ID NO: 2353916 - DNA, 25 bp, Homo sapien
agctgcagtgaggactaatttgaat

SEQ ID NO: 2353917 - DNA, 25 bp, Homo sapien
tggattttctaacccctgaaactgc

SEQ ID NO: 2353918 - DNA, 25 bp, Homo sapien
ttctaacccctgaaactgcattacc

SEQ ID NO: 2353919 - DNA, 25 bp, Homo sapien
gaaaaatcctgacggcgtacagctg

SEQ ID NO: 2353920 - DNA, 25 bp, Homo sapien
cagatttcctcagtccagttgcaag

SEQ ID NO: 2353921 - DNA, 25 bp, Homo sapien
tgcaagagctcgacctgaaagcacc

SEQ ID NO: 2353922 - DNA, 25 bp, Homo sapien
tgagccactatctttgacagacatc

SEQ ID NO: 2353923 - DNA, 25 bp, Homo sapien
taatgctggtcacgagacactaaat

SEQ ID NO: 2353924 - DNA, 25 bp, Homo sapien
ttctggtcacctactctgggaggtc

SEQ ID NO: 2353925 - DNA, 25 bp, Homo sapien
tggcacttattggaagcacatacaa

SEQ ID NO: 2353926 - DNA, 25 bp, Homo sapien
tctgtacacacttctattatggcac

SEQ ID NO: 2353927 - DNA, 25 bp, Homo sapien
tgtcagctgatcacctacttctggt

SEQ ID NO: 2353928 - DNA, 25 bp, Homo sapien
cctttgtgacggttctccatggaag

SEQ ID NO: 2353929 - DNA, 25 bp, Homo sapien
gaattagcctatcaaagagtatgag

SEQ ID NO: 2353930 - DNA, 25 bp, Homo sapien
tagagtatgctttctgaaaaggtaa

SEQ ID NO: 2353931 - DNA, 25 bp, Homo sapien
gagtatgagaattaggattcctttg

SEQ ID NO: 2353932 - DNA, 25 bp, Homo sapien
ggcctccgcttgcacataacctata

SEQ ID NO: 2353933 - DNA, 25 bp, Homo sapien
ataacctataactgggcctgcaagc

SEQ ID NO: 2353934 - DNA, 25 bp, Homo sapien
tgcacataacctataactgggcctg

SEQ ID NO: 2353935 - DNA, 25 bp, Homo sapien
cgcttgcacataacctataactggg

SEQ ID NO: 2353936 - DNA, 25 bp, Homo sapien
tagagagtctcagctggcatacgcc

SEQ ID NO: 2353937 - DNA, 25 bp, Homo sapien
tgctgtattgcgagtatggttccac

SEQ ID NO: 2353938 - DNA, 25 bp, Homo sapien
cattatagtggtatccagaggctct

SEQ ID NO: 2353939 - DNA, 25 bp, Homo sapien
gttacaggcatctctgctacctcag

SEQ ID NO: 2353940 - DNA, 25 bp, Homo sapien
aagcaattagttcaagggatttcaa

SEQ ID NO: 2353941 - DNA, 25 bp, Homo sapien
gaagcaattagttcaagggatttca

SEQ ID NO: 2353942 - DNA, 25 bp, Homo sapien
ggaagcaattagttcaagggatttc

SEQ ID NO: 2353943 - DNA, 25 bp, Homo sapien
gtgaggatgtaggaggaggtaggcg

SEQ ID NO: 2353944 - DNA, 25 bp, Homo sapien
gtcttttcctacagatctttgacta

SEQ ID NO: 2353945 - DNA, 25 bp, Homo sapien
ttgactacacaacaaaggtgaggat

SEQ ID NO: 2353946 - DNA, 25 bp, Homo sapien
ggaggtaggcgcacaggaggagaaa

SEQ ID NO: 2353947 - DNA, 25 bp, Homo sapien
taatcataagttccctttagctacg

SEQ ID NO: 2353948 - DNA, 25 bp, Homo sapien
taaacactctaagctagatactcta

SEQ ID NO: 2353949 - DNA, 25 bp, Homo sapien
ctttagctacgtgtgaggttgtgaa

SEQ ID NO: 2353950 - DNA, 25 bp, Homo sapien
gaataaagttgtattcttctagatc

SEQ ID NO: 2353951 - DNA, 25 bp, Homo sapien
agctttgacaaaatggcaaaggcaa

SEQ ID NO: 2353952 - DNA, 25 bp, Homo sapien
gggcatagtggagggcgcctgtaag

SEQ ID NO: 2353953 - DNA, 25 bp, Homo sapien
aaagctttgacaaaatggcaaaggc

SEQ ID NO: 2353954 - DNA, 25 bp, Homo sapien
aaaaagctttgacaaaatggcaaag

SEQ ID NO: 2353955 - DNA, 25 bp, Homo sapien
gactgtgtcaacagctgtggcacca

SEQ ID NO: 2353956 - DNA, 25 bp, Homo sapien
gaagagtgtgctcagtaccccagga

SEQ ID NO: 2353957 - DNA, 25 bp, Homo sapien
tgaagaccaaatacaacagcactcc

SEQ ID NO: 2353958 - DNA, 25 bp, Homo sapien
tcacagagacctttcccactggtga

SEQ ID NO: 2353959 - DNA, 25 bp, Homo sapien
gaaagtagaacataaccttgcccag

SEQ ID NO: 2353960 - DNA, 25 bp, Homo sapien
gacttccttcgcagctaacatggtg

SEQ ID NO: 2353961 - DNA, 25 bp, Homo sapien
tgcacggtcttaagaattcgctagc

SEQ ID NO: 2353962 - DNA, 25 bp, Homo sapien
tagtgcacatcctattaccagagag

SEQ ID NO: 2353963 - DNA, 25 bp, Homo sapien
agccctatctccaacgtactgcagg

SEQ ID NO: 2353964 - DNA, 25 bp, Homo sapien
ctatctccaacgtactgcaggacct

SEQ ID NO: 2353965 - DNA, 25 bp, Homo sapien
tccaacgtactgcaggacctctcag

SEQ ID NO: 2353966 - DNA, 25 bp, Homo sapien
atctccaacgtactgcaggacctct

SEQ ID NO: 2353967 - DNA, 25 bp, Homo sapien
ttttacacagcatggcaagtgccca

SEQ ID NO: 2353968 - DNA, 25 bp, Homo sapien
ccaagagggcggaaactcttgttca

SEQ ID NO: 2353969 - DNA, 25 bp, Homo sapien
taccgtccccagtttgagttcataa

SEQ ID NO: 2353970 - DNA, 25 bp, Homo sapien
tatcttgagacatgaatctacccag

SEQ ID NO: 2353971 - DNA, 25 bp, Homo sapien
aatacaggataagtagacagggttg

SEQ ID NO: 2353972 - DNA, 25 bp, Homo sapien
tctggggaatgtgtagcaccaatgg

SEQ ID NO: 2353973 - DNA, 25 bp, Homo sapien
tacaggataagtagacagggttggc

SEQ ID NO: 2353974 - DNA, 25 bp, Homo sapien
ggaatgtgtagcaccaatgggatcc

SEQ ID NO: 2353975 - DNA, 25 bp, Homo sapien
cttggaatgtagcatctagtgtctt

SEQ ID NO: 2353976 - DNA, 25 bp, Homo sapien
ggaatgtagcatctagtgtcttcat

SEQ ID NO: 2353977 - DNA, 25 bp, Homo sapien
ttggaatgtagcatctagtgtcttc

SEQ ID NO: 2353978 - DNA, 25 bp, Homo sapien
tggaatgtagcatctagtgtcttca

SEQ ID NO: 2353979 - DNA, 25 bp, Homo sapien
acactcttgacactttcttcgcatg

SEQ ID NO: 2353980 - DNA, 25 bp, Homo sapien
gcatttccttagtcgacactcttga

SEQ ID NO: 2353981 - DNA, 25 bp, Homo sapien
ttacacttgtacacagcgtttttgg

SEQ ID NO: 2353982 - DNA, 25 bp, Homo sapien
tgtacatatccatcacacagttgcc

SEQ ID NO: 2353983 - DNA, 25 bp, Homo sapien
gatttttagtgaaatgtaattgctt

SEQ ID NO: 2353984 - DNA, 25 bp, Homo sapien
aaatgtaattgcttgaagtgaatac

SEQ ID NO: 2353985 - DNA, 25 bp, Homo sapien
gtgaaatgtaattgcttgaagtgaa

SEQ ID NO: 2353986 - DNA, 25 bp, Homo sapien
tttagtgaaatgtaattgcttgaag

SEQ ID NO: 2353987 - DNA, 25 bp, Homo sapien
cactgtcttcattcacggtctgatc

SEQ ID NO: 2353988 - DNA, 25 bp, Homo sapien
tgcatgactttgttgtcgaggtcac

SEQ ID NO: 2353989 - DNA, 25 bp, Homo sapien
tcgaggtcacttgtcgcaagtcacg

SEQ ID NO: 2353990 - DNA, 25 bp, Homo sapien
ggtctgatctgcatgctgcttcaca

SEQ ID NO: 2353991 - DNA, 25 bp, Homo sapien
cctgaggcatcctctgtttgttata

SEQ ID NO: 2353992 - DNA, 25 bp, Homo sapien
gtttgttatatgaatccataataaa

SEQ ID NO: 2353993 - DNA, 25 bp, Homo sapien
tatttcctgaggcatcctctgtttg

SEQ ID NO: 2353994 - DNA, 25 bp, Homo sapien
gatctggggtgagttcagttttctc

SEQ ID NO: 2353995 - DNA, 25 bp, Homo sapien
tgccatttccgtcaaaatgagaaaa

SEQ ID NO: 2353996 - DNA, 25 bp, Homo sapien
gaacctgtacatgattggttgccat

SEQ ID NO: 2353997 - DNA, 25 bp, Homo sapien
ggtagcttttttgtgaattctacaa

SEQ ID NO: 2353998 - DNA, 25 bp, Homo sapien
gaattctacaagaacctgtacatga

SEQ ID NO: 2353999 - DNA, 25 bp, Homo sapien
aaggaacatagcttcaaccgcagac

SEQ ID NO: 2354000 - DNA, 25 bp, Homo sapien
gcaatctggtcttcatggtccaaag

SEQ ID NO: 2354001 - DNA, 25 bp, Homo sapien
ttgaaaatctcagctgaacgaagga

SEQ ID NO: 2354002 - DNA, 25 bp, Homo sapien
caataggtcagaatgcccagacgga

SEQ ID NO: 2354003 - DNA, 25 bp, Homo sapien
tatcagatatacgttctaaagcctc

SEQ ID NO: 2354004 - DNA, 25 bp, Homo sapien
tgcataggcataaacagagtaactt

SEQ ID NO: 2354005 - DNA, 25 bp, Homo sapien
gaaaggtcatcttgcgagatcaggt

SEQ ID NO: 2354006 - DNA, 25 bp, Homo sapien
agcatctcagagacagttatctttg

SEQ ID NO: 2354007 - DNA, 25 bp, Homo sapien
caaggtataaatccctgacacggca

SEQ ID NO: 2354008 - DNA, 25 bp, Homo sapien
tctgatgacgtcctcaagatggact

SEQ ID NO: 2354009 - DNA, 25 bp, Homo sapien
tacaagtatgcatattacactagac

SEQ ID NO: 2354010 - DNA, 25 bp, Homo sapien
gacacggcacacaaagccacatctg

SEQ ID NO: 2354011 - DNA, 25 bp, Homo sapien
cacaagagccattggatggagaatc

SEQ ID NO: 2354012 - DNA, 25 bp, Homo sapien
tggagaatcgtggtgacagaaaaac

SEQ ID NO: 2354013 - DNA, 25 bp, Homo sapien
caaaaacctgtgatgtgacttatgg

SEQ ID NO: 2354014 - DNA, 25 bp, Homo sapien
gcccgggccaagatgctatctctaa

SEQ ID NO: 2354015 - DNA, 25 bp, Homo sapien
tgctgtaagcagagcatactcctct

SEQ ID NO: 2354016 - DNA, 25 bp, Homo sapien
gataacaattgctgtaagcagagca

SEQ ID NO: 2354017 - DNA, 25 bp, Homo sapien
caattgctgtaagcagagcatactc

SEQ ID NO: 2354018 - DNA, 25 bp, Homo sapien
gtaagcagagcatactcctcttgag

SEQ ID NO: 2354019 - DNA, 25 bp, Homo sapien
tcaggctggtgaatcttacacaact

SEQ ID NO: 2354020 - DNA, 25 bp, Homo sapien
cgtaattcagtcaggcgacccagga

SEQ ID NO: 2354021 - DNA, 25 bp, Homo sapien
tgacatcagcatctcagcgtggtga

SEQ ID NO: 2354022 - DNA, 25 bp, Homo sapien
cttttgtagcacatcaagaagtggc

SEQ ID NO: 2354023 - DNA, 25 bp, Homo sapien
tttaattaggcaaacagggcttgcc

SEQ ID NO: 2354024 - DNA, 25 bp, Homo sapien
ttagaatgcaggattccctggagcc

SEQ ID NO: 2354025 - DNA, 25 bp, Homo sapien
gagagaaaaaggagctagacccctc

SEQ ID NO: 2354026 - DNA, 25 bp, Homo sapien
gagaaagttgttctatctagcccaa

SEQ ID NO: 2354027 - DNA, 25 bp, Homo sapien
gaggaaagcgaaggtcccatcactg

SEQ ID NO: 2354028 - DNA, 25 bp, Homo sapien
gaatttgtgaatcctgcctcaagac

SEQ ID NO: 2354029 - DNA, 25 bp, Homo sapien
gactattcaccaggacttttccaga

SEQ ID NO: 2354030 - DNA, 25 bp, Homo sapien
tgacaaaagtgcgagagacagtatc

SEQ ID NO: 2354031 - DNA, 25 bp, Homo sapien
taataattgcttctgagcgtcctgg

SEQ ID NO: 2354032 - DNA, 25 bp, Homo sapien
tcagcgacagccagttcgaaagcca

SEQ ID NO: 2354033 - DNA, 25 bp, Homo sapien
gccaagtccctctgttcactgaaag

SEQ ID NO: 2354034 - DNA, 25 bp, Homo sapien
ggtgaatgaacctcgcctgtaataa

SEQ ID NO: 2354035 - DNA, 25 bp, Homo sapien
gggcgacaactcggctcaatctgtg

SEQ ID NO: 2354036 - DNA, 25 bp, Homo sapien
tctgtgcggggccaacacgcccctg

SEQ ID NO: 2354037 - DNA, 25 bp, Homo sapien
gacaactcggctcaatctgtgcggg

SEQ ID NO: 2354038 - DNA, 25 bp, Homo sapien
agcggggcgacaactcggctcaatc

SEQ ID NO: 2354039 - DNA, 25 bp, Homo sapien
tgtgggcgttctagaccctgcatgg

SEQ ID NO: 2354040 - DNA, 25 bp, Homo sapien
tattccccagttccgcacatgtggg

SEQ ID NO: 2354041 - DNA, 25 bp, Homo sapien
tctgacttccaaggcactctacaag

SEQ ID NO: 2354042 - DNA, 25 bp, Homo sapien
gaaccacgggtgactgcatagagga

SEQ ID NO: 2354043 - DNA, 25 bp, Homo sapien
taggcggaagtctctatgagtcacc

SEQ ID NO: 2354044 - DNA, 25 bp, Homo sapien
gagtcaccacttcagcaatatccag

SEQ ID NO: 2354045 - DNA, 25 bp, Homo sapien
gatgacatcacatttagtaggctgc

SEQ ID NO: 2354046 - DNA, 25 bp, Homo sapien
gaataacacagagctatatgcactg

SEQ ID NO: 2354047 - DNA, 25 bp, Homo sapien
tattaccagcgagttccatggccac

SEQ ID NO: 2354048 - DNA, 25 bp, Homo sapien
aggaagatttgccaagacacttgac

SEQ ID NO: 2354049 - DNA, 25 bp, Homo sapien
gccaatacacatcttacgtgaagaa

SEQ ID NO: 2354050 - DNA, 25 bp, Homo sapien
acggctgccgccaatacacatctta

SEQ ID NO: 2354051 - DNA, 25 bp, Homo sapien
ctgagacagtgtagctgagggaggc

SEQ ID NO: 2354052 - DNA, 25 bp, Homo sapien
gagacagtgtagctgagggaggctg

SEQ ID NO: 2354053 - DNA, 25 bp, Homo sapien
tgagacagtgtagctgagggaggct

SEQ ID NO: 2354054 - DNA, 25 bp, Homo sapien
tgggttctacgtgtgtaaagacttc

SEQ ID NO: 2354055 - DNA, 25 bp, Homo sapien
tgggtatgggttctacgtgtgtaaa

SEQ ID NO: 2354056 - DNA, 25 bp, Homo sapien
tattatgggtatgggttctacgtgt

SEQ ID NO: 2354057 - DNA, 25 bp, Homo sapien
catatattatgggtatgggttctac

SEQ ID NO: 2354058 - DNA, 25 bp, Homo sapien
atttgggtagaaaaagtcagatgcc

SEQ ID NO: 2354059 - DNA, 25 bp, Homo sapien
tttgggtagaaaaagtcagatgcca

SEQ ID NO: 2354060 - DNA, 25 bp, Homo sapien
ttgggtagaaaaagtcagatgccat

SEQ ID NO: 2354061 - DNA, 25 bp, Homo sapien
gagggtcatggccatagactggtta

SEQ ID NO: 2354062 - DNA, 25 bp, Homo sapien
ttgtttgtaagcactgaatggacct

SEQ ID NO: 2354063 - DNA, 25 bp, Homo sapien
gaaacgcaaatgatacggcttgtgt

SEQ ID NO: 2354064 - DNA, 25 bp, Homo sapien
tggaccttagcaaatccagaaaggg

SEQ ID NO: 2354065 - DNA, 25 bp, Homo sapien
gacactatttcagtaatcagtgccg

SEQ ID NO: 2354066 - DNA, 25 bp, Homo sapien
ctatttcagtaatcagtgccgctcg

SEQ ID NO: 2354067 - DNA, 25 bp, Homo sapien
tgccgctcgtagtacggtattttcc

SEQ ID NO: 2354068 - DNA, 25 bp, Homo sapien
taatcagtgccgctcgtagtacggt

SEQ ID NO: 2354069 - DNA, 25 bp, Homo sapien
ccttctaaatgggtctggagtgaag

SEQ ID NO: 2354070 - DNA, 25 bp, Homo sapien
ttatactatcatgccttctaaatgg

SEQ ID NO: 2354071 - DNA, 25 bp, Homo sapien
tctaaatgggtctggagtgaagtca

SEQ ID NO: 2354072 - DNA, 25 bp, Homo sapien
acaatagttatactatcatgccttc

SEQ ID NO: 2354073 - DNA, 25 bp, Homo sapien
tctgacaagagtttgggtataatac

SEQ ID NO: 2354074 - DNA, 25 bp, Homo sapien
ttctgacaagagtttgggtataata

SEQ ID NO: 2354075 - DNA, 25 bp, Homo sapien
cttaatatttctgacaagagtttgg

SEQ ID NO: 2354076 - DNA, 25 bp, Homo sapien
tttctgacaagagtttgggtataat

SEQ ID NO: 2354077 - DNA, 25 bp, Homo sapien
ctttccggaacttcttgcaaaatga

SEQ ID NO: 2354078 - DNA, 25 bp, Homo sapien
cggaacttcttgcaaaatgattctc

SEQ ID NO: 2354079 - DNA, 25 bp, Homo sapien
tcatgcaactggtatctttccggaa

SEQ ID NO: 2354080 - DNA, 25 bp, Homo sapien
catgcaactggtatctttccggaac

SEQ ID NO: 2354081 - DNA, 25 bp, Homo sapien
cttgtgttctaaagctcccaaaaga

SEQ ID NO: 2354082 - DNA, 25 bp, Homo sapien
catgcagaatgcttcagtaagggag

SEQ ID NO: 2354083 - DNA, 25 bp, Homo sapien
tgcagaatgcttcagtaagggaggt

SEQ ID NO: 2354084 - DNA, 25 bp, Homo sapien
cagaatgcttcagtaagggaggtat

SEQ ID NO: 2354085 - DNA, 25 bp, Homo sapien
ctcaggaattccaccaaccctggta

SEQ ID NO: 2354086 - DNA, 25 bp, Homo sapien
caccaaccctggtacttacaacctg

SEQ ID NO: 2354087 - DNA, 25 bp, Homo sapien
tcaggaattccaccaaccctggtac

SEQ ID NO: 2354088 - DNA, 25 bp, Homo sapien
caggaattccaccaaccctggtact

SEQ ID NO: 2354089 - DNA, 25 bp, Homo sapien
tcataaaatagtaagattttccgga

SEQ ID NO: 2354090 - DNA, 25 bp, Homo sapien
aacttaattatggagggtttctctg

SEQ ID NO: 2354091 - DNA, 25 bp, Homo sapien
gctatatgactttggagtagttaac

SEQ ID NO: 2354092 - DNA, 25 bp, Homo sapien
gggtagtagaaggtattgaacacat

SEQ ID NO: 2354093 - DNA, 25 bp, Homo sapien
acatctgatttgaattacagctcca

SEQ ID NO: 2354094 - DNA, 25 bp, Homo sapien
acagcaatggggtagtagaaggtat

SEQ ID NO: 2354095 - DNA, 25 bp, Homo sapien
gcttgttatgcttcccacgagctaa

SEQ ID NO: 2354096 - DNA, 25 bp, Homo sapien
gcaaaaggccaaagtacaagtgagc

SEQ ID NO: 2354097 - DNA, 25 bp, Homo sapien
gcaacaaagatccacttctcggaag

SEQ ID NO: 2354098 - DNA, 25 bp, Homo sapien
gaacctgagctaaaccatactgaaa

SEQ ID NO: 2354099 - DNA, 25 bp, Homo sapien
cctatattgaaatgaaatttctttt

SEQ ID NO: 2354100 - DNA, 25 bp, Homo sapien
gtcacctatattgaaatgaaatttc

SEQ ID NO: 2354101 - DNA, 25 bp, Homo sapien
cacctatattgaaatgaaatttctt

SEQ ID NO: 2354102 - DNA, 25 bp, Homo sapien
agtcacctatattgaaatgaaattt

SEQ ID NO: 2354103 - DNA, 25 bp, Homo sapien
taataaaccagataaccagattgac

SEQ ID NO: 2354104 - DNA, 25 bp, Homo sapien
tccactcatcgtactgacaaacatt

SEQ ID NO: 2354105 - DNA, 25 bp, Homo sapien
cagatcttcttgcatgggcaacaaa

SEQ ID NO: 2354106 - DNA, 25 bp, Homo sapien
caatcctggtccgtgtctgggagtc

SEQ ID NO: 2354107 - DNA, 25 bp, Homo sapien
agttgacataatagtactccattat

SEQ ID NO: 2354108 - DNA, 25 bp, Homo sapien
aatcagttgacataatagtactcca

SEQ ID NO: 2354109 - DNA, 25 bp, Homo sapien
tcagttgacataatagtactccatt

SEQ ID NO: 2354110 - DNA, 25 bp, Homo sapien
ttcaccatgttttgaagaacatcaa

SEQ ID NO: 2354111 - DNA, 25 bp, Homo sapien
gtagttccaggatacagtaagctat

SEQ ID NO: 2354112 - DNA, 25 bp, Homo sapien
gacgtggttgcatgtagctaaagtc

SEQ ID NO: 2354113 - DNA, 25 bp, Homo sapien
ccagtagttccaggatacagtaagc

SEQ ID NO: 2354114 - DNA, 25 bp, Homo sapien
gcccagtagttccaggatacagtaa

SEQ ID NO: 2354115 - DNA, 25 bp, Homo sapien
tgatgcagcatctttcttacagggc

SEQ ID NO: 2354116 - DNA, 25 bp, Homo sapien
cctacaccagtgaaggaagtttgcg

SEQ ID NO: 2354117 - DNA, 25 bp, Homo sapien
gaggtaagtttcatcaaccccaatg

SEQ ID NO: 2354118 - DNA, 25 bp, Homo sapien
gaagtttgcggtattgtcccgagca

SEQ ID NO: 2354119 - DNA, 25 bp, Homo sapien
tattaggcctcctgtcatttccgta

SEQ ID NO: 2354120 - DNA, 25 bp, Homo sapien
aaagcattagtccagaaccttcctg

SEQ ID NO: 2354121 - DNA, 25 bp, Homo sapien
taggcttggtggagtaattcttaat

SEQ ID NO: 2354122 - DNA, 25 bp, Homo sapien
tagccaactcatttaggaattcaga

SEQ ID NO: 2354123 - DNA, 25 bp, Homo sapien
gacacaattcgaccaatttcaagaa

SEQ ID NO: 2354124 - DNA, 25 bp, Homo sapien
cttgacacaattcgaccaatttcaa

SEQ ID NO: 2354125 - DNA, 25 bp, Homo sapien
caattcgaccaatttcaagaagaca

SEQ ID NO: 2354126 - DNA, 25 bp, Homo sapien
cacaattcgaccaatttcaagaaga

SEQ ID NO: 2354127 - DNA, 25 bp, Homo sapien
taacactggtggctcaaccccgtat

SEQ ID NO: 2354128 - DNA, 25 bp, Homo sapien
tcttcaggcccagaagtattaagca

SEQ ID NO: 2354129 - DNA, 25 bp, Homo sapien
atgccgacagcatgattttggaatg

SEQ ID NO: 2354130 - DNA, 25 bp, Homo sapien
tctcaagttttactaacactggtgg

SEQ ID NO: 2354131 - DNA, 25 bp, Homo sapien
taaaactatgagacttcaaggtatc

SEQ ID NO: 2354132 - DNA, 25 bp, Homo sapien
caaggtatcatggtcaaaagaaagt

SEQ ID NO: 2354133 - DNA, 25 bp, Homo sapien
cactagaagtgcttaaaactatgag

SEQ ID NO: 2354134 - DNA, 25 bp, Homo sapien
catcacctgtagcacactagaagtg

SEQ ID NO: 2354135 - DNA, 25 bp, Homo sapien
gaaaatcgatgagaacaactacaag

SEQ ID NO: 2354136 - DNA, 25 bp, Homo sapien
gagggtcctcagcaatatgtttaac

SEQ ID NO: 2354137 - DNA, 25 bp, Homo sapien
cgtccttcagataaatactcaatag

SEQ ID NO: 2354138 - DNA, 25 bp, Homo sapien
ccctagtcggtaccgtccttcagat

SEQ ID NO: 2354139 - DNA, 25 bp, Homo sapien
tggcaaactgtaatattcgacaggg

SEQ ID NO: 2354140 - DNA, 25 bp, Homo sapien
aaatccttgaagagtatcccagcct

SEQ ID NO: 2354141 - DNA, 25 bp, Homo sapien
tctggcaggcgaatcaggtacactt

SEQ ID NO: 2354142 - DNA, 25 bp, Homo sapien
tttggaatactaactggcacgctgg

SEQ ID NO: 2354143 - DNA, 25 bp, Homo sapien
atttagaacggactgacatagagcc

SEQ ID NO: 2354144 - DNA, 25 bp, Homo sapien
tcggtgactcagatatacaaggtgc

SEQ ID NO: 2354145 - DNA, 25 bp, Homo sapien
gactgtgttcctagacccgtggcta

SEQ ID NO: 2354146 - DNA, 25 bp, Homo sapien
aaagtgtggactcgggcagatctgc

SEQ ID NO: 2354147 - DNA, 25 bp, Homo sapien
tgagggtggtttcctgattgaagct

SEQ ID NO: 2354148 - DNA, 25 bp, Homo sapien
tgaatgctggctcttagcgacagtc

SEQ ID NO: 2354149 - DNA, 25 bp, Homo sapien
tctgggaggccctttagttgaatgc

SEQ ID NO: 2354150 - DNA, 25 bp, Homo sapien
tcttacttccagtcatgacaaaata

SEQ ID NO: 2354151 - DNA, 25 bp, Homo sapien
taatgccaagctagtcagcagcagc

SEQ ID NO: 2354152 - DNA, 25 bp, Homo sapien
tatagaacactagtcgccagcttaa

SEQ ID NO: 2354153 - DNA, 25 bp, Homo sapien
gagcaccaccgttgatattagcagg

SEQ ID NO: 2354154 - DNA, 25 bp, Homo sapien
tcaatgcccaagtcaatagtcgagt

SEQ ID NO: 2354155 - DNA, 25 bp, Homo sapien
tttggaagggtaagctatatataaa

SEQ ID NO: 2354156 - DNA, 25 bp, Homo sapien
ttattttggaagggtaagctatata

SEQ ID NO: 2354157 - DNA, 25 bp, Homo sapien
tattttggaagggtaagctatatat

SEQ ID NO: 2354158 - DNA, 25 bp, Homo sapien
ttttggaagggtaagctatatataa

SEQ ID NO: 2354159 - DNA, 25 bp, Homo sapien
gaggtcatccaatttaccaaggcat

SEQ ID NO: 2354160 - DNA, 25 bp, Homo sapien
gaatgacaaactccatatggacagt

SEQ ID NO: 2354161 - DNA, 25 bp, Homo sapien
tggatacaaatactgctggcataag

SEQ ID NO: 2354162 - DNA, 25 bp, Homo sapien
gaaagttctcccaacttcagcaatg

SEQ ID NO: 2354163 - DNA, 25 bp, Homo sapien
tttagtgcttgtagatggtttctta

SEQ ID NO: 2354164 - DNA, 25 bp, Homo sapien
agttttagtgcttgtagatggtttc

SEQ ID NO: 2354165 - DNA, 25 bp, Homo sapien
cctggagttttagtgcttgtagatg

SEQ ID NO: 2354166 - DNA, 25 bp, Homo sapien
tggagttttagtgcttgtagatggt

SEQ ID NO: 2354167 - DNA, 25 bp, Homo sapien
cattacagctgtaaggtgaccagag

SEQ ID NO: 2354168 - DNA, 25 bp, Homo sapien
tgcccacagccatggtacagatgaa

SEQ ID NO: 2354169 - DNA, 25 bp, Homo sapien
ggacatttccgtcttaggccctaca

SEQ ID NO: 2354170 - DNA, 25 bp, Homo sapien
cagagattcccgaggacttcctgga

SEQ ID NO: 2354171 - DNA, 25 bp, Homo sapien
atccagcacctgctgcgatagcagg

SEQ ID NO: 2354172 - DNA, 25 bp, Homo sapien
gctgcgatagcaggcggcgggctct

SEQ ID NO: 2354173 - DNA, 25 bp, Homo sapien
agcacctgctgcgatagcaggcggc

SEQ ID NO: 2354174 - DNA, 25 bp, Homo sapien
ctagtccacgtgggaagcactggca

SEQ ID NO: 2354175 - DNA, 25 bp, Homo sapien
ggcaggggtcgaggtgaaacactct

SEQ ID NO: 2354176 - DNA, 25 bp, Homo sapien
tcctgctttccaagaagggttgcag

SEQ ID NO: 2354177 - DNA, 25 bp, Homo sapien
tgggcaggggtcgaggtgaaacact

SEQ ID NO: 2354178 - DNA, 25 bp, Homo sapien
gaagggttgcaggtcgtgggcaggg

SEQ ID NO: 2354179 - DNA, 25 bp, Homo sapien
gagcttgcccaggagtattccgaca

SEQ ID NO: 2354180 - DNA, 25 bp, Homo sapien
ggagtccaaactgtccaggtccact

SEQ ID NO: 2354181 - DNA, 25 bp, Homo sapien
cctattggtagtgatgccaggaatc

SEQ ID NO: 2354182 - DNA, 25 bp, Homo sapien
cacctggtggcagttatccgctgaa

SEQ ID NO: 2354183 - DNA, 25 bp, Homo sapien
actgaattgtgtgccttgatctctg

SEQ ID NO: 2354184 - DNA, 25 bp, Homo sapien
actcttccaggagaatctaatagct

SEQ ID NO: 2354185 - DNA, 25 bp, Homo sapien
cttgatctctgtccttaggatgaac

SEQ ID NO: 2354186 - DNA, 25 bp, Homo sapien
tctgtccttaggatgaactcttcca

SEQ ID NO: 2354187 - DNA, 25 bp, Homo sapien
gagcagctgttagtttttactcgta

SEQ ID NO: 2354188 - DNA, 25 bp, Homo sapien
gagctgggctgcactatacgcaaac

SEQ ID NO: 2354189 - DNA, 25 bp, Homo sapien
tgggctgcactatacgcaaaccact

SEQ ID NO: 2354190 - DNA, 25 bp, Homo sapien
gcgcctcctctaggcttcggatgag

SEQ ID NO: 2354191 - DNA, 25 bp, Homo sapien
tcatcagtcacatcctccaaaggct

SEQ ID NO: 2354192 - DNA, 25 bp, Homo sapien
caaaggctgggcaacaagccaggaa

SEQ ID NO: 2354193 - DNA, 25 bp, Homo sapien
ctccaaaggctgggcaacaagccag

SEQ ID NO: 2354194 - DNA, 25 bp, Homo sapien
tttcatcagtcacatcctccaaagg

SEQ ID NO: 2354195 - DNA, 25 bp, Homo sapien
tttccatacagcaacctcacaggct

SEQ ID NO: 2354196 - DNA, 25 bp, Homo sapien
tctactaatgaggaggataatcagc

SEQ ID NO: 2354197 - DNA, 25 bp, Homo sapien
aaaattctccatgccctgaaggttg

SEQ ID NO: 2354198 - DNA, 25 bp, Homo sapien
actgctttcctgaactgtttgttgc

SEQ ID NO: 2354199 - DNA, 25 bp, Homo sapien
gctcatctctggcctttcactgagc

SEQ ID NO: 2354200 - DNA, 25 bp, Homo sapien
ctcatctctggcctttcactgagct

SEQ ID NO: 2354201 - DNA, 25 bp, Homo sapien
ccagactggccagggcgtcggctag

SEQ ID NO: 2354202 - DNA, 25 bp, Homo sapien
ctggcccgcgtcctgcccagactgg

SEQ ID NO: 2354203 - DNA, 25 bp, Homo sapien
gggcgtcggctagagcggccccctg

SEQ ID NO: 2354204 - DNA, 25 bp, Homo sapien
ctgcgcccctggacggcccggcccg

SEQ ID NO: 2354205 - DNA, 25 bp, Homo sapien
ttatcccggcgtccctttgattcca

SEQ ID NO: 2354206 - DNA, 25 bp, Homo sapien
cattatcccggcgtccctttgattc

SEQ ID NO: 2354207 - DNA, 25 bp, Homo sapien
ggtgctcattatcccggcgtccctt

SEQ ID NO: 2354208 - DNA, 25 bp, Homo sapien
tgtgtctggtgctcattatcccggc

SEQ ID NO: 2354209 - DNA, 25 bp, Homo sapien
taacttccgctgctcacatctttgt

SEQ ID NO: 2354210 - DNA, 25 bp, Homo sapien
gcagaggaaaggttataacttccgc

SEQ ID NO: 2354211 - DNA, 25 bp, Homo sapien
gatctggctgacacaactgtagtag

SEQ ID NO: 2354212 - DNA, 25 bp, Homo sapien
tagctgcccgtcgttgcagaggaaa

SEQ ID NO: 2354213 - DNA, 25 bp, Homo sapien
cttcttccaaagatttgactgaact

SEQ ID NO: 2354214 - DNA, 25 bp, Homo sapien
tccaaacacacacaacgtactaatt

SEQ ID NO: 2354215 - DNA, 25 bp, Homo sapien
tctctgtgcagatagtgccaatatc

SEQ ID NO: 2354216 - DNA, 25 bp, Homo sapien
cacacaacgtactaattctcactct

SEQ ID NO: 2354217 - DNA, 25 bp, Homo sapien
ttaggtgagtggcagcaatcaaagc

SEQ ID NO: 2354218 - DNA, 25 bp, Homo sapien
caatcaaagccatatagtgtgctta

SEQ ID NO: 2354219 - DNA, 25 bp, Homo sapien
gagtggcagcaatcaaagccatata

SEQ ID NO: 2354220 - DNA, 25 bp, Homo sapien
gagataaacatattaggtgagtggc

SEQ ID NO: 2354221 - DNA, 25 bp, Homo sapien
tttccagtgggtaagcccaattgcc

SEQ ID NO: 2354222 - DNA, 25 bp, Homo sapien
gggtaagcccaattgccacaggccc

SEQ ID NO: 2354223 - DNA, 25 bp, Homo sapien
agtgggtaagcccaattgccacagg

SEQ ID NO: 2354224 - DNA, 25 bp, Homo sapien
ttttccagtgggtaagcccaattgc

SEQ ID NO: 2354225 - DNA, 25 bp, Homo sapien
tcagtcttgcgggtgaaggatcggt

SEQ ID NO: 2354226 - DNA, 25 bp, Homo sapien
gagtgatagacagtgaggctggaca

SEQ ID NO: 2354227 - DNA, 25 bp, Homo sapien
aaaggtgtggcctggtcagtcttgc

SEQ ID NO: 2354228 - DNA, 25 bp, Homo sapien
atcggtggtacacagggatgcctgc

SEQ ID NO: 2354229 - DNA, 25 bp, Homo sapien
acagccctaggagagaaacgagagc

SEQ ID NO: 2354230 - DNA, 25 bp, Homo sapien
atacttcaccaagcacagccctagg

SEQ ID NO: 2354231 - DNA, 25 bp, Homo sapien
cctaaaggaggggacccattgcaag

SEQ ID NO: 2354232 - DNA, 25 bp, Homo sapien
gagagccctgggaatgccctaaagg

SEQ ID NO: 2354233 - DNA, 25 bp, Homo sapien
ttcccgcgtagatctttctaaacac

SEQ ID NO: 2354234 - DNA, 25 bp, Homo sapien
ttgctttcccgcgtagatctttcta

SEQ ID NO: 2354235 - DNA, 25 bp, Homo sapien
gctttcccgcgtagatctttctaaa

SEQ ID NO: 2354236 - DNA, 25 bp, Homo sapien
cccgcgtagatctttctaaacactt

SEQ ID NO: 2354237 - DNA, 25 bp, Homo sapien
gagcagtgcaattctgaatcagagc

SEQ ID NO: 2354238 - DNA, 25 bp, Homo sapien
aattctgaatgagccaagaccgcgg

SEQ ID NO: 2354239 - DNA, 25 bp, Homo sapien
ggggccaaaatctttccatgagcag

SEQ ID NO: 2354240 - DNA, 25 bp, Homo sapien
gcattgcagttagacaagctggagg

SEQ ID NO: 2354241 - DNA, 25 bp, Homo sapien
ttgggctggcccatgacgatgtata

SEQ ID NO: 2354242 - DNA, 25 bp, Homo sapien
tgacgatgtatagaaatcttcctcc

SEQ ID NO: 2354243 - DNA, 25 bp, Homo sapien
ggcccatgacgatgtatagaaatct

SEQ ID NO: 2354244 - DNA, 25 bp, Homo sapien
gctggcccatgacgatgtatagaaa

SEQ ID NO: 2354245 - DNA, 25 bp, Homo sapien
tcgctatccaaacaagcccaaaagg

SEQ ID NO: 2354246 - DNA, 25 bp, Homo sapien
cccaaaaggtacagatggcaaggag

SEQ ID NO: 2354247 - DNA, 25 bp, Homo sapien
agtttctccaccttgacttcgctat

SEQ ID NO: 2354248 - DNA, 25 bp, Homo sapien
gcaagccagcttgagtatttggcat

SEQ ID NO: 2354249 - DNA, 25 bp, Homo sapien
tctggcaagagctgcccatttgaaa

SEQ ID NO: 2354250 - DNA, 25 bp, Homo sapien
tttgaaagtcagccatttgtaaaca

SEQ ID NO: 2354251 - DNA, 25 bp, Homo sapien
aagggagcagtataccagacaccag

SEQ ID NO: 2354252 - DNA, 25 bp, Homo sapien
ctgaaaagggagcagtataccagac

SEQ ID NO: 2354253 - DNA, 25 bp, Homo sapien
caatgcaagaggtgtttgtgtccct

SEQ ID NO: 2354254 - DNA, 25 bp, Homo sapien
tgcaagaggtgtttgtgtcccttac

SEQ ID NO: 2354255 - DNA, 25 bp, Homo sapien
gaggtgtttgtgtcccttactttca

SEQ ID NO: 2354256 - DNA, 25 bp, Homo sapien
caagaggtgtttgtgtcccttactt

SEQ ID NO: 2354257 - DNA, 25 bp, Homo sapien
tggactttagcctcaaagctctgaa

SEQ ID NO: 2354258 - DNA, 25 bp, Homo sapien
gatgtttgtcataaccgaagccatt

SEQ ID NO: 2354259 - DNA, 25 bp, Homo sapien
ttatctgcattaacggcttctgaca

SEQ ID NO: 2354260 - DNA, 25 bp, Homo sapien
ttaaaccaatccatgaggctggact

SEQ ID NO: 2354261 - DNA, 25 bp, Homo sapien
ccttggtgtcttcggcagaaagaaa

SEQ ID NO: 2354262 - DNA, 25 bp, Homo sapien
tcccctcgggccgtatgcagttgtt

SEQ ID NO: 2354263 - DNA, 25 bp, Homo sapien
gctccagtcgggaggaggccagcaa

SEQ ID NO: 2354264 - DNA, 25 bp, Homo sapien
cagttgtttgtgctgtaaaaaccct

SEQ ID NO: 2354265 - DNA, 25 bp, Homo sapien
atagaaagagtcaacagaaggagaa

SEQ ID NO: 2354266 - DNA, 25 bp, Homo sapien
aatagaaagagtcaacagaaggaga

SEQ ID NO: 2354267 - DNA, 25 bp, Homo sapien
caacagaaggagaagggatccttcc

SEQ ID NO: 2354268 - DNA, 25 bp, Homo sapien
gcccctggcacactgaggattcatc

SEQ ID NO: 2354269 - DNA, 25 bp, Homo sapien
tcctgagtgagtgcccctggcacac

SEQ ID NO: 2354270 - DNA, 25 bp, Homo sapien
gaggattcatcctgcccaaatttgt

SEQ ID NO: 2354271 - DNA, 25 bp, Homo sapien
gtttgctatgtgggcaggtcacccc

SEQ ID NO: 2354272 - DNA, 25 bp, Homo sapien
agtgtaaagcacattaccttatatt

SEQ ID NO: 2354273 - DNA, 25 bp, Homo sapien
ttggtctatagtaagtgttcattaa

SEQ ID NO: 2354274 - DNA, 25 bp, Homo sapien
tctttcaatgaaagggatcatgtct

SEQ ID NO: 2354275 - DNA, 25 bp, Homo sapien
tcattccatctctgagtaaacagca

SEQ ID NO: 2354276 - DNA, 25 bp, Homo sapien
aaagaataaggtggcaccgcatggg

SEQ ID NO: 2354277 - DNA, 25 bp, Homo sapien
ggtggcaccgcatgggctattattt

SEQ ID NO: 2354278 - DNA, 25 bp, Homo sapien
tggtatcctcatcgcctttacaatc

SEQ ID NO: 2354279 - DNA, 25 bp, Homo sapien
caatcaatcacgtgtaaaagatata

SEQ ID NO: 2354280 - DNA, 25 bp, Homo sapien
tctagtgttcacaaatacgttgcga

SEQ ID NO: 2354281 - DNA, 25 bp, Homo sapien
caggtggccagctgaaatcattaag

SEQ ID NO: 2354282 - DNA, 25 bp, Homo sapien
tacgttgcgaaaataagctacagag

SEQ ID NO: 2354283 - DNA, 25 bp, Homo sapien
ccacagatcttgagaggaaagtgat

SEQ ID NO: 2354284 - DNA, 25 bp, Homo sapien
ccatgtgatacctctttgcttccca

SEQ ID NO: 2354285 - DNA, 25 bp, Homo sapien
tgtgatacctctttgcttcccatcc

SEQ ID NO: 2354286 - DNA, 25 bp, Homo sapien
catgtgatacctctttgcttcccat

SEQ ID NO: 2354287 - DNA, 25 bp, Homo sapien
tgatacctctttgcttcccatccat

SEQ ID NO: 2354288 - DNA, 25 bp, Homo sapien
tactagggcagtcgaaagggcagat

SEQ ID NO: 2354289 - DNA, 25 bp, Homo sapien
tggtggtctggtcactgcaattcag

SEQ ID NO: 2354290 - DNA, 25 bp, Homo sapien
tgataataagttcaggtgcctggcc

SEQ ID NO: 2354291 - DNA, 25 bp, Homo sapien
gcatccagacttcctttcagggact

SEQ ID NO: 2354292 - DNA, 25 bp, Homo sapien
gcaagtccactatgccccctaccat

SEQ ID NO: 2354293 - DNA, 25 bp, Homo sapien
atcagcaagtccactatgcccccta

SEQ ID NO: 2354294 - DNA, 25 bp, Homo sapien
tactcaataatcacaaggatcagca

SEQ ID NO: 2354295 - DNA, 25 bp, Homo sapien
accaccagcctcagccatgtgcatc

SEQ ID NO: 2354296 - DNA, 25 bp, Homo sapien
gatcaaactgggacacaaagacacg

SEQ ID NO: 2354297 - DNA, 25 bp, Homo sapien
gaaccaatctagtagtgcaagctgt

SEQ ID NO: 2354298 - DNA, 25 bp, Homo sapien
caaagacacggattgttaattgcac

SEQ ID NO: 2354299 - DNA, 25 bp, Homo sapien
gctgtttcaaactgggcaagatcaa

SEQ ID NO: 2354300 - DNA, 25 bp, Homo sapien
attcatagacttttgtacttatctc

SEQ ID NO: 2354301 - DNA, 25 bp, Homo sapien
tgaaattcatagacttttgtactta

SEQ ID NO: 2354302 - DNA, 25 bp, Homo sapien
aaattcatagacttttgtacttatc

SEQ ID NO: 2354303 - DNA, 25 bp, Homo sapien
gaaattcatagacttttgtacttat

SEQ ID NO: 2354304 - DNA, 25 bp, Homo sapien
ttattgaccttctgcctggtgggag

SEQ ID NO: 2354305 - DNA, 25 bp, Homo sapien
tttgcaaacgcttttcagccccatg

SEQ ID NO: 2354306 - DNA, 25 bp, Homo sapien
tgggagtgaggaatgcctgaccaca

SEQ ID NO: 2354307 - DNA, 25 bp, Homo sapien
ggcttgccacacttcgccgttgatg

SEQ ID NO: 2354308 - DNA, 25 bp, Homo sapien
tgattccagaagagcttgcctccat

SEQ ID NO: 2354309 - DNA, 25 bp, Homo sapien
agactttggtttttccattagtgat

SEQ ID NO: 2354310 - DNA, 25 bp, Homo sapien
tttttccattagtgattccagaaga

SEQ ID NO: 2354311 - DNA, 25 bp, Homo sapien
ttagtgattccagaagagcttgcct

SEQ ID NO: 2354312 - DNA, 25 bp, Homo sapien
catcactctttggcccgtcaggtag

SEQ ID NO: 2354313 - DNA, 25 bp, Homo sapien
ggcccgtcaggtagtatttgcatat

SEQ ID NO: 2354314 - DNA, 25 bp, Homo sapien
gtatttgcatatccagctggtagcc

SEQ ID NO: 2354315 - DNA, 25 bp, Homo sapien
gcatatccagctggtagccttgcaa

SEQ ID NO: 2354316 - DNA, 25 bp, Homo sapien
cgaggatcaaggaccttaaattgcc

SEQ ID NO: 2354317 - DNA, 25 bp, Homo sapien
gcctgggagacgaaaaatcagctaa

SEQ ID NO: 2354318 - DNA, 25 bp, Homo sapien
taaattgcctgggagacgaaaaatc

SEQ ID NO: 2354319 - DNA, 25 bp, Homo sapien
atattataactgaacaacgaggatc

SEQ ID NO: 2354320 - DNA, 25 bp, Homo sapien
gaatcgtcatctttgcaaggactgc

SEQ ID NO: 2354321 - DNA, 25 bp, Homo sapien
tgctggcatcatctgaagtactagt

SEQ ID NO: 2354322 - DNA, 25 bp, Homo sapien
aagtactagtcaggtttccagggtg

SEQ ID NO: 2354323 - DNA, 25 bp, Homo sapien
gactgctgacagcttctaattcatc

SEQ ID NO: 2354324 - DNA, 25 bp, Homo sapien
catctcgaaagtaaagtccatttga

SEQ ID NO: 2354325 - DNA, 25 bp, Homo sapien
gatgtagtcaattcgacactttcca

SEQ ID NO: 2354326 - DNA, 25 bp, Homo sapien
gggttggattttctgtacacaagga

SEQ ID NO: 2354327 - DNA, 25 bp, Homo sapien
ttttctgtacacaaggatgtagtca

SEQ ID NO: 2354328 - DNA, 25 bp, Homo sapien
gctattccccctgctaccatacccc

SEQ ID NO: 2354329 - DNA, 25 bp, Homo sapien
catacccccccattcagttactcca

SEQ ID NO: 2354330 - DNA, 25 bp, Homo sapien
cattcagttactccacttactcttc

SEQ ID NO: 2354331 - DNA, 25 bp, Homo sapien
ttactcttcctacacccatgccagc

SEQ ID NO: 2354332 - DNA, 25 bp, Homo sapien
gagaaatccgtgcagtcctcatggg

SEQ ID NO: 2354333 - DNA, 25 bp, Homo sapien
tcaagatgacatgatgagccaggca

SEQ ID NO: 2354334 - DNA, 25 bp, Homo sapien
agatgacatgatgagccaggcactg

SEQ ID NO: 2354335 - DNA, 25 bp, Homo sapien
ccaggcactgtggactagggagaaa

SEQ ID NO: 2354336 - DNA, 25 bp, Homo sapien
cctgagatcaaaaactaaaccctgc

SEQ ID NO: 2354337 - DNA, 25 bp, Homo sapien
tagccattgagctgtgagcagagcc

SEQ ID NO: 2354338 - DNA, 25 bp, Homo sapien
cagcttctgttatctgggtccctgg

SEQ ID NO: 2354339 - DNA, 25 bp, Homo sapien
tagcccacttgggtaggcaggagcc

SEQ ID NO: 2354340 - DNA, 25 bp, Homo sapien
ggtccctggtcgcagcaaagagcat

SEQ ID NO: 2354341 - DNA, 25 bp, Homo sapien
cccatggggcatgcaacttcacaaa

SEQ ID NO: 2354342 - DNA, 25 bp, Homo sapien
tcttccaaggacttcccatggggca

SEQ ID NO: 2354343 - DNA, 25 bp, Homo sapien
tgcaacttcacaaagataatgtcac

SEQ ID NO: 2354344 - DNA, 25 bp, Homo sapien
caaggacttcccatggggcatgcaa

SEQ ID NO: 2354345 - DNA, 25 bp, Homo sapien
cagtttgaactagcaaggaaggaaa

SEQ ID NO: 2354346 - DNA, 25 bp, Homo sapien
gcaaaaatgaagccagtcgagaaga

SEQ ID NO: 2354347 - DNA, 25 bp, Homo sapien
tgaagccagtcgagaagaaaaccca

SEQ ID NO: 2354348 - DNA, 25 bp, Homo sapien
gaagccagtcgagaagaaaacccat

SEQ ID NO: 2354349 - DNA, 25 bp, Homo sapien
aatgaagccagtcgagaagaaaacc

SEQ ID NO: 2354350 - DNA, 25 bp, Homo sapien
cttgtaacggcggggcaggtaatag

SEQ ID NO: 2354351 - DNA, 25 bp, Homo sapien
gctcatgaacttgtaacggcggggc

SEQ ID NO: 2354352 - DNA, 25 bp, Homo sapien
tgtaacggcggggcaggtaatagat

SEQ ID NO: 2354353 - DNA, 25 bp, Homo sapien
tcatgaacttgtaacggcggggcag

SEQ ID NO: 2354354 - DNA, 25 bp, Homo sapien
tgtcaggacagagcgtgctactaac

SEQ ID NO: 2354355 - DNA, 25 bp, Homo sapien
ggaggatcagcttctttactaagtc

SEQ ID NO: 2354356 - DNA, 25 bp, Homo sapien
tttagcccagccaggttgaacatat

SEQ ID NO: 2354357 - DNA, 25 bp, Homo sapien
gaatctcacagtggctctaggaccc

SEQ ID NO: 2354358 - DNA, 25 bp, Homo sapien
cagcatgacacagtggttgacaaca

SEQ ID NO: 2354359 - DNA, 25 bp, Homo sapien
gaaaacacgtggaatttggtcatgc

SEQ ID NO: 2354360 - DNA, 25 bp, Homo sapien
ttagtaaagaagttggtcctcacca

SEQ ID NO: 2354361 - DNA, 25 bp, Homo sapien
acttggctaagttaagggatgtcca

SEQ ID NO: 2354362 - DNA, 25 bp, Homo sapien
taaaatgatagcactacctcaagtg

SEQ ID NO: 2354363 - DNA, 25 bp, Homo sapien
ggcaagaccaaagggtacagcatgt

SEQ ID NO: 2354364 - DNA, 25 bp, Homo sapien
gtggtacatggaaggcaagaccaaa

SEQ ID NO: 2354365 - DNA, 25 bp, Homo sapien
gaaggcaagaccaaagggtacagca

SEQ ID NO: 2354366 - DNA, 25 bp, Homo sapien
catggaaggcaagaccaaagggtac

SEQ ID NO: 2354367 - DNA, 25 bp, Homo sapien
taggtaaccatctccgaaacctgct

SEQ ID NO: 2354368 - DNA, 25 bp, Homo sapien
tccagcctcattggcttcttaggta

SEQ ID NO: 2354369 - DNA, 25 bp, Homo sapien
catctccgaaacctgcttatttgtt

SEQ ID NO: 2354370 - DNA, 25 bp, Homo sapien
ggcttcttaggtaaccatctccgaa

SEQ ID NO: 2354371 - DNA, 25 bp, Homo sapien
ggttacagcagttatcttcccctga

SEQ ID NO: 2354372 - DNA, 25 bp, Homo sapien
tcatgcccaggaatcaaaggcgtgc

SEQ ID NO: 2354373 - DNA, 25 bp, Homo sapien
gcctgggtcactgcctttctgtgga

SEQ ID NO: 2354374 - DNA, 25 bp, Homo sapien
gggatatgaacactcacaagacttt

SEQ ID NO: 2354375 - DNA, 25 bp, Homo sapien
ttttatggaggctgtcactactgct

SEQ ID NO: 2354376 - DNA, 25 bp, Homo sapien
tttgcagttcctcacaggctcagtg

SEQ ID NO: 2354377 - DNA, 25 bp, Homo sapien
tgacagatgactcagcaagtgggct

SEQ ID NO: 2354378 - DNA, 25 bp, Homo sapien
ggcttttcctaaggcaacccagtga

SEQ ID NO: 2354379 - DNA, 25 bp, Homo sapien
actgccatttggcttaccttcgttt

SEQ ID NO: 2354380 - DNA, 25 bp, Homo sapien
tgaaaactgccatttggcttacctt

SEQ ID NO: 2354381 - DNA, 25 bp, Homo sapien
ttgaaaactgccatttggcttacct

SEQ ID NO: 2354382 - DNA, 25 bp, Homo sapien
aaaactgccatttggcttaccttcg

SEQ ID NO: 2354383 - DNA, 25 bp, Homo sapien
gaggaaaaatagtcatggaatattt

SEQ ID NO: 2354384 - DNA, 25 bp, Homo sapien
tcatggaatatttagggtcacttcc

SEQ ID NO: 2354385 - DNA, 25 bp, Homo sapien
aatagtcatggaatatttagggtca

SEQ ID NO: 2354386 - DNA, 25 bp, Homo sapien
ttagggtcacttccattcccatgct

SEQ ID NO: 2354387 - DNA, 25 bp, Homo sapien
tgaatgtgagtgtatgccagagaaa

SEQ ID NO: 2354388 - DNA, 25 bp, Homo sapien
gccagagaaaggcaaggtcaacctc

SEQ ID NO: 2354389 - DNA, 25 bp, Homo sapien
aattggcctcgagaaagagtagtcc

SEQ ID NO: 2354390 - DNA, 25 bp, Homo sapien
ttctgtagcccagggatccggtgag

SEQ ID NO: 2354391 - DNA, 25 bp, Homo sapien
tgtaaaatgtgatgcacgattctac

SEQ ID NO: 2354392 - DNA, 25 bp, Homo sapien
tgtgatgcacgattctacttcttgt

SEQ ID NO: 2354393 - DNA, 25 bp, Homo sapien
gatgcacgattctacttcttgtggc

SEQ ID NO: 2354394 - DNA, 25 bp, Homo sapien
aaaatgtgatgcacgattctacttc

SEQ ID NO: 2354395 - DNA, 25 bp, Homo sapien
taagccaaccttgcagtccaggata

SEQ ID NO: 2354396 - DNA, 25 bp, Homo sapien
tctggccttgggtattctccggaca

SEQ ID NO: 2354397 - DNA, 25 bp, Homo sapien
tccggacatgtatgcactgatcagc

SEQ ID NO: 2354398 - DNA, 25 bp, Homo sapien
cacttgctgaatacttgagggagac

SEQ ID NO: 2354399 - DNA, 25 bp, Homo sapien
cataggagccattggtaagcaaacg

SEQ ID NO: 2354400 - DNA, 25 bp, Homo sapien
ccattggtaagcaaacgattcagac

SEQ ID NO: 2354401 - DNA, 25 bp, Homo sapien
gagccattggtaagcaaacgattca

SEQ ID NO: 2354402 - DNA, 25 bp, Homo sapien
taggagccattggtaagcaaacgat

SEQ ID NO: 2354403 - DNA, 25 bp, Homo sapien
agtagatgtcggtggttttctgctc

SEQ ID NO: 2354404 - DNA, 25 bp, Homo sapien
tggtatttataccacacgccccagg

SEQ ID NO: 2354405 - DNA, 25 bp, Homo sapien
ggcccagcactcatagagtagatgt

SEQ ID NO: 2354406 - DNA, 25 bp, Homo sapien
tttctgctccatgggttcgaatgga

SEQ ID NO: 2354407 - DNA, 25 bp, Homo sapien
tataacccaatcttctctccaaagt

SEQ ID NO: 2354408 - DNA, 25 bp, Homo sapien
tgtaccagcccaaccaggcaaaata

SEQ ID NO: 2354409 - DNA, 25 bp, Homo sapien
aagagcatgccggtgtaccagccca

SEQ ID NO: 2354410 - DNA, 25 bp, Homo sapien
gatccagagtggtgacgccatacaa

SEQ ID NO: 2354411 - DNA, 25 bp, Homo sapien
gatatctgtagcttggcagacttct

SEQ ID NO: 2354412 - DNA, 25 bp, Homo sapien
ggacagtatttatcacacacaggac

SEQ ID NO: 2354413 - DNA, 25 bp, Homo sapien
gacagcctcatgaatggacagtatt

SEQ ID NO: 2354414 - DNA, 25 bp, Homo sapien
cacacacaggacacatgatgatatc

SEQ ID NO: 2354415 - DNA, 25 bp, Homo sapien
tatggatatagttatatttaggacc

SEQ ID NO: 2354416 - DNA, 25 bp, Homo sapien
tatgtgtatggatatagttatattt

SEQ ID NO: 2354417 - DNA, 25 bp, Homo sapien
tgtgtatggatatagttatatttag

SEQ ID NO: 2354418 - DNA, 25 bp, Homo sapien
tgtatggatatagttatatttagga

SEQ ID NO: 2354419 - DNA, 25 bp, Homo sapien
gctccattgtcaaaaaggtgggtta

SEQ ID NO: 2354420 - DNA, 25 bp, Homo sapien
tggctccattgtcaaaaaggtgggt

SEQ ID NO: 2354421 - DNA, 25 bp, Homo sapien
tcatagggcatatgaggaaaactca

SEQ ID NO: 2354422 - DNA, 25 bp, Homo sapien
atagggcatatgaggaaaactcaag

SEQ ID NO: 2354423 - DNA, 25 bp, Homo sapien
atgaggaaaactcaagttttatggt

SEQ ID NO: 2354424 - DNA, 25 bp, Homo sapien
ctcaagttttatggttatagaacac

SEQ ID NO: 2354425 - DNA, 25 bp, Homo sapien
taatgcccctttcaacccttgtggc

SEQ ID NO: 2354426 - DNA, 25 bp, Homo sapien
ctatccatggccatgaggaggctcc

SEQ ID NO: 2354427 - DNA, 25 bp, Homo sapien
atgccaggaataacaataatgcccc

SEQ ID NO: 2354428 - DNA, 25 bp, Homo sapien
tatccatggccatgaggaggctcct

SEQ ID NO: 2354429 - DNA, 25 bp, Homo sapien
cttggtgtgtttactggggataact

SEQ ID NO: 2354430 - DNA, 25 bp, Homo sapien
ttgcttggtgtgtttactggggata

SEQ ID NO: 2354431 - DNA, 25 bp, Homo sapien
ggatcttgcttggtgtgtttactgg

SEQ ID NO: 2354432 - DNA, 25 bp, Homo sapien
agagctttgtggatcttgcttggtg

SEQ ID NO: 2354433 - DNA, 25 bp, Homo sapien
ggccatgatggggacgcaaagccat

SEQ ID NO: 2354434 - DNA, 25 bp, Homo sapien
ggcaacgcaggactcaagcaggtgc

SEQ ID NO: 2354435 - DNA, 25 bp, Homo sapien
ctcctcctgctgctgcagcaactca

SEQ ID NO: 2354436 - DNA, 25 bp, Homo sapien
cttcctgtggtcctcctcctgctgc

SEQ ID NO: 2354437 - DNA, 25 bp, Homo sapien
tcctgctgctgcagcaactcaggaa

SEQ ID NO: 2354438 - DNA, 25 bp, Homo sapien
ctcctgctgctgcagcaactcagga

SEQ ID NO: 2354439 - DNA, 25 bp, Homo sapien
cgcatcaggtatgtcaatctgaagt

SEQ ID NO: 2354440 - DNA, 25 bp, Homo sapien
cattcaggtccacagatacagatct

SEQ ID NO: 2354441 - DNA, 25 bp, Homo sapien
agtgagggatcaacattcaggtcca

SEQ ID NO: 2354442 - DNA, 25 bp, Homo sapien
tgtcaatctgaagtgagggatcaac

SEQ ID NO: 2354443 - DNA, 25 bp, Homo sapien
attctgaaatgtgggcagtgtggtc

SEQ ID NO: 2354444 - DNA, 25 bp, Homo sapien
gaaaactctggattctgaaatgtgg

SEQ ID NO: 2354445 - DNA, 25 bp, Homo sapien
aacagaaaactctggattctgaaat

SEQ ID NO: 2354446 - DNA, 25 bp, Homo sapien
cacacaaagtcctcatgttgccttg

SEQ ID NO: 2354447 - DNA, 25 bp, Homo sapien
ataagcccagcatggtctgttcttt

SEQ ID NO: 2354448 - DNA, 25 bp, Homo sapien
aataagcccagcatggtctgttctt

SEQ ID NO: 2354449 - DNA, 25 bp, Homo sapien
taagcccagcatggtctgttctttc

SEQ ID NO: 2354450 - DNA, 25 bp, Homo sapien
agccttcgtaggagcaggcggaatc

SEQ ID NO: 2354451 - DNA, 25 bp, Homo sapien
tctctcaaggaccattgaagtcagc

SEQ ID NO: 2354452 - DNA, 25 bp, Homo sapien
tcagccttcgtaggagcaggcggaa

SEQ ID NO: 2354453 - DNA, 25 bp, Homo sapien
tgaagtcagccttcgtaggagcagg

SEQ ID NO: 2354454 - DNA, 25 bp, Homo sapien
ctgatgagattcaaccctctacttt

SEQ ID NO: 2354455 - DNA, 25 bp, Homo sapien
ttgctctttaaactgggccttatcc

SEQ ID NO: 2354456 - DNA, 25 bp, Homo sapien
cgatgttgagcatgtagtatcggag

SEQ ID NO: 2354457 - DNA, 25 bp, Homo sapien
gtaagagatccttagcagcttcgat

SEQ ID NO: 2354458 - DNA, 25 bp, Homo sapien
atttttcatagtcaatgagggcttt

SEQ ID NO: 2354459 - DNA, 25 bp, Homo sapien
actcctcctagtgtaccttagccaa

SEQ ID NO: 2354460 - DNA, 25 bp, Homo sapien
ctcctagtgtaccttagccaacttg

SEQ ID NO: 2354461 - DNA, 25 bp, Homo sapien
tcctagtgtaccttagccaacttga

SEQ ID NO: 2354462 - DNA, 25 bp, Homo sapien
tcctcctagtgtaccttagccaact

SEQ ID NO: 2354463 - DNA, 25 bp, Homo sapien
aaagggagacactgttcctcgcatg

SEQ ID NO: 2354464 - DNA, 25 bp, Homo sapien
gacactgttcctcgcatgttttatt

SEQ ID NO: 2354465 - DNA, 25 bp, Homo sapien
tgcaaaagggagacactgttcctcg

SEQ ID NO: 2354466 - DNA, 25 bp, Homo sapien
gggagacactgttcctcgcatgttt

SEQ ID NO: 2354467 - DNA, 25 bp, Homo sapien
gttgaagacaataaatcttccgctg

SEQ ID NO: 2354468 - DNA, 25 bp, Homo sapien
gaagacaataaatcttccgctggta

SEQ ID NO: 2354469 - DNA, 25 bp, Homo sapien
agacaataaatcttccgctggtaat

SEQ ID NO: 2354470 - DNA, 25 bp, Homo sapien
ttgaagacaataaatcttccgctgg

SEQ ID NO: 2354471 - DNA, 25 bp, Homo sapien
gtctgttacctgcctcaagttgctg

SEQ ID NO: 2354472 - DNA, 25 bp, Homo sapien
tctgttacctgcctcaagttgctga

SEQ ID NO: 2354473 - DNA, 25 bp, Homo sapien
ggtctgttacctgcctcaagttgct

SEQ ID NO: 2354474 - DNA, 25 bp, Homo sapien
ctgttacctgcctcaagttgctgaa

SEQ ID NO: 2354475 - DNA, 25 bp, Homo sapien
tgaaatggtttacactcccatgaac

SEQ ID NO: 2354476 - DNA, 25 bp, Homo sapien
gaaatggtttacactcccatgaaca

SEQ ID NO: 2354477 - DNA, 25 bp, Homo sapien
aaatggtttacactcccatgaacag

SEQ ID NO: 2354478 - DNA, 25 bp, Homo sapien
ttgaaatggtttacactcccatgaa

SEQ ID NO: 2354479 - DNA, 25 bp, Homo sapien
agtcataagcaattactgctcgccg

SEQ ID NO: 2354480 - DNA, 25 bp, Homo sapien
tactgctcgccgtcttttccaaaac

SEQ ID NO: 2354481 - DNA, 25 bp, Homo sapien
tatcaaatcccagtcataagcaatt

SEQ ID NO: 2354482 - DNA, 25 bp, Homo sapien
ttcttcccagtctatcaaatcccag

SEQ ID NO: 2354483 - DNA, 25 bp, Homo sapien
gaaggattgcttccatgtacctgga

SEQ ID NO: 2354484 - DNA, 25 bp, Homo sapien
cagacacactgcctttgggtaattc

SEQ ID NO: 2354485 - DNA, 25 bp, Homo sapien
tacctggagatgtcaaatgaatgct

SEQ ID NO: 2354486 - DNA, 25 bp, Homo sapien
tgcctttgggtaattctcttggaag

SEQ ID NO: 2354487 - DNA, 25 bp, Homo sapien
tatctgtaaatgcttgataaggttc

SEQ ID NO: 2354488 - DNA, 25 bp, Homo sapien
gctttccagaaattggattcatccg

SEQ ID NO: 2354489 - DNA, 25 bp, Homo sapien
tccgctctttcttggaatacttggc

SEQ ID NO: 2354490 - DNA, 25 bp, Homo sapien
tccagatgcagaaacgataagtctg

SEQ ID NO: 2354491 - DNA, 25 bp, Homo sapien
gacacccggtgaacctcttggtgga

SEQ ID NO: 2354492 - DNA, 25 bp, Homo sapien
gaagacaagacacccggtgaacctc

SEQ ID NO: 2354493 - DNA, 25 bp, Homo sapien
acaagacacccggtgaacctcttgg

SEQ ID NO: 2354494 - DNA, 25 bp, Homo sapien
acccggtgaacctcttggtggaatg

SEQ ID NO: 2354495 - DNA, 25 bp, Homo sapien
gatacagaagttgatgcacacagca

SEQ ID NO: 2354496 - DNA, 25 bp, Homo sapien
tgctgacagtcaccacccggtaaat

SEQ ID NO: 2354497 - DNA, 25 bp, Homo sapien
ggtaaatgacgatcccgaacacggc

SEQ ID NO: 2354498 - DNA, 25 bp, Homo sapien
gattaacgcccacttaaaggcagcg

SEQ ID NO: 2354499 - DNA, 25 bp, Homo sapien
gctaagagcagtggaaaatctaagt

SEQ ID NO: 2354500 - DNA, 25 bp, Homo sapien
tcattagacggttgagagataaacc

SEQ ID NO: 2354501 - DNA, 25 bp, Homo sapien
aaatctaagtttccaaactggatgc

SEQ ID NO: 2354502 - DNA, 25 bp, Homo sapien
cgggaagtttgttctgctaagagca

SEQ ID NO: 2354503 - DNA, 25 bp, Homo sapien
tcgtcagaagcagggcaactttttc

SEQ ID NO: 2354504 - DNA, 25 bp, Homo sapien
agaagcagggcaactttttcataga

SEQ ID NO: 2354505 - DNA, 25 bp, Homo sapien
tcagaagcagggcaactttttcata

SEQ ID NO: 2354506 - DNA, 25 bp, Homo sapien
aattcgtcagaagcagggcaacttt

SEQ ID NO: 2354507 - DNA, 25 bp, Homo sapien
attttcagggtgaagctgttctccc

SEQ ID NO: 2354508 - DNA, 25 bp, Homo sapien
aacattttcagggtgaagctgttct

SEQ ID NO: 2354509 - DNA, 25 bp, Homo sapien
cattttcagggtgaagctgttctcc

SEQ ID NO: 2354510 - DNA, 25 bp, Homo sapien
cactcagactctgtgcgaggctgtt

SEQ ID NO: 2354511 - DNA, 25 bp, Homo sapien
ccgaggaagaatgcgatgtaaaatg

SEQ ID NO: 2354512 - DNA, 25 bp, Homo sapien
cttccgaggaagaatgcgatgtaaa

SEQ ID NO: 2354513 - DNA, 25 bp, Homo sapien
aggaagaatgcgatgtaaaatgtgg

SEQ ID NO: 2354514 - DNA, 25 bp, Homo sapien
gaagaatgcgatgtaaaatgtggag

SEQ ID NO: 2354515 - DNA, 25 bp, Homo sapien
caagtaggcacctgggtgtcctgta

SEQ ID NO: 2354516 - DNA, 25 bp, Homo sapien
aagtaggcacctgggtgtcctgtaa

SEQ ID NO: 2354517 - DNA, 25 bp, Homo sapien
tcaagtaggcacctgggtgtcctgt

SEQ ID NO: 2354518 - DNA, 25 bp, Homo sapien
gtaggcacctgggtgtcctgtaaat

SEQ ID NO: 2354519 - DNA, 25 bp, Homo sapien
ggtctgctttagcaccattataata

SEQ ID NO: 2354520 - DNA, 25 bp, Homo sapien
tataatacccatttgcatacacaga

SEQ ID NO: 2354521 - DNA, 25 bp, Homo sapien
gctttagcaccattataatacccat

SEQ ID NO: 2354522 - DNA, 25 bp, Homo sapien
ttataatacccatttgcatacacag

SEQ ID NO: 2354523 - DNA, 25 bp, Homo sapien
catgtgaattgtgctaaatctccca

SEQ ID NO: 2354524 - DNA, 25 bp, Homo sapien
ttcatgtgaattgtgctaaatctcc

SEQ ID NO: 2354525 - DNA, 25 bp, Homo sapien
caagtatccaatatttaggggccta

SEQ ID NO: 2354526 - DNA, 25 bp, Homo sapien
tgtgaattgtgctaaatctcccaga

SEQ ID NO: 2354527 - DNA, 25 bp, Homo sapien
gtgtcatacatagctaaggacttgc

SEQ ID NO: 2354528 - DNA, 25 bp, Homo sapien
tgctcattgttgtcaacatcttatc

SEQ ID NO: 2354529 - DNA, 25 bp, Homo sapien
ggagatgtagttaatgtgtcataca

SEQ ID NO: 2354530 - DNA, 25 bp, Homo sapien
ttatcaccagccttaccatgaggat

SEQ ID NO: 2354531 - DNA, 25 bp, Homo sapien
tttcttctagtccaccaattctgaa

SEQ ID NO: 2354532 - DNA, 25 bp, Homo sapien
attcatcgaagagtccataggcatt

SEQ ID NO: 2354533 - DNA, 25 bp, Homo sapien
gctgaaggttatagtccttttccca

SEQ ID NO: 2354534 - DNA, 25 bp, Homo sapien
ccatgttcttgtcgtacttttcttc

SEQ ID NO: 2354535 - DNA, 25 bp, Homo sapien
tataattaataagataaagtagaat

SEQ ID NO: 2354536 - DNA, 25 bp, Homo sapien
ctggagatctaaaatttataattaa

SEQ ID NO: 2354537 - DNA, 25 bp, Homo sapien
ataagataaagtagaatatttccat

SEQ ID NO: 2354538 - DNA, 25 bp, Homo sapien
taataagataaagtagaatatttcc

SEQ ID NO: 2354539 - DNA, 25 bp, Homo sapien
caccatgccattcaaggatctcaat

SEQ ID NO: 2354540 - DNA, 25 bp, Homo sapien
tggctgcagaataaatccgaaactt

SEQ ID NO: 2354541 - DNA, 25 bp, Homo sapien
caaggatctcaataaattgactcca

SEQ ID NO: 2354542 - DNA, 25 bp, Homo sapien
gaataaatccgaaacttcaccatgc

SEQ ID NO: 2354543 - DNA, 25 bp, Homo sapien
gtaagcatcaagtcgaatttcaatt

SEQ ID NO: 2354544 - DNA, 25 bp, Homo sapien
gacaaatttgtaagcatcaagtcga

SEQ ID NO: 2354545 - DNA, 25 bp, Homo sapien
aagctgccacaaagatagttgtgaa

SEQ ID NO: 2354546 - DNA, 25 bp, Homo sapien
tctttggcccttgaagctaaaggtc

SEQ ID NO: 2354547 - DNA, 25 bp, Homo sapien
caaggtccatacttataagcataca

SEQ ID NO: 2354548 - DNA, 25 bp, Homo sapien
catacaccaagcgagggataaagtc

SEQ ID NO: 2354549 - DNA, 25 bp, Homo sapien
taaagtcagatgttatcgctatgac

SEQ ID NO: 2354550 - DNA, 25 bp, Homo sapien
gatgttatcgctatgacaaatgcat

SEQ ID NO: 2354551 - DNA, 25 bp, Homo sapien
ggcattcacatagccaaccatgcac

SEQ ID NO: 2354552 - DNA, 25 bp, Homo sapien
tgcagtacttaagaggagtccccga

SEQ ID NO: 2354553 - DNA, 25 bp, Homo sapien
caaagtcagaaattcgaaatacaga

SEQ ID NO: 2354554 - DNA, 25 bp, Homo sapien
aggctcagatcggttctcaaagtca

SEQ ID NO: 2354555 - DNA, 25 bp, Homo sapien
ccatagggcaccagtgaatgaggcg

SEQ ID NO: 2354556 - DNA, 25 bp, Homo sapien
gaatgaggcgggtcacggtagtccc

SEQ ID NO: 2354557 - DNA, 25 bp, Homo sapien
taatcgagcagctaggacatgccaa

SEQ ID NO: 2354558 - DNA, 25 bp, Homo sapien
aaactgcagtgtgtagccatagggc

SEQ ID NO: 2354559 - DNA, 25 bp, Homo sapien
cattcgatcccttaggtcttttggg

SEQ ID NO: 2354560 - DNA, 25 bp, Homo sapien
ccagttctgcttcatacatcatctc

SEQ ID NO: 2354561 - DNA, 25 bp, Homo sapien
tgggatcagatatgaaatgaggtgc

SEQ ID NO: 2354562 - DNA, 25 bp, Homo sapien
tcacggccactcgttgtggtgtgct

SEQ ID NO: 2354563 - DNA, 25 bp, Homo sapien
gatagcaattgtgcgctggactgca

SEQ ID NO: 2354564 - DNA, 25 bp, Homo sapien
gccggtatctgcaacatgcactgtg

SEQ ID NO: 2354565 - DNA, 25 bp, Homo sapien
taaacagaattcaggtccttggcct

SEQ ID NO: 2354566 - DNA, 25 bp, Homo sapien
gcagtgtgactccaacgccagtcct

SEQ ID NO: 2354567 - DNA, 25 bp, Homo sapien
caagtgctccctgaaatttccttgg

SEQ ID NO: 2354568 - DNA, 25 bp, Homo sapien
gaaacttaaaggctagtactggcac

SEQ ID NO: 2354569 - DNA, 25 bp, Homo sapien
cccaagtgctccctgaaatttcctt

SEQ ID NO: 2354570 - DNA, 25 bp, Homo sapien
cttaaaggctagtactggcacagca

SEQ ID NO: 2354571 - DNA, 25 bp, Homo sapien
attggcgagtctgccccaaagccac

SEQ ID NO: 2354572 - DNA, 25 bp, Homo sapien
ccatcattggcgagtctgccccaaa

SEQ ID NO: 2354573 - DNA, 25 bp, Homo sapien
tcattggcgagtctgccccaaagcc

SEQ ID NO: 2354574 - DNA, 25 bp, Homo sapien
tcttcccccatcattggcgagtctg

SEQ ID NO: 2354575 - DNA, 25 bp, Homo sapien
ctgctactccgggtggcctgacttt

SEQ ID NO: 2354576 - DNA, 25 bp, Homo sapien
ctgctcatgtaatcgtgtttccaag

SEQ ID NO: 2354577 - DNA, 25 bp, Homo sapien
tgtgcccgtgttcttttgctgctac

SEQ ID NO: 2354578 - DNA, 25 bp, Homo sapien
tgtaatcgtgtttccaagccccagt

SEQ ID NO: 2354579 - DNA, 25 bp, Homo sapien
tgagcatcaacttccacctttggga

SEQ ID NO: 2354580 - DNA, 25 bp, Homo sapien
ggcaagcctcatgaattcctgcaaa

SEQ ID NO: 2354581 - DNA, 25 bp, Homo sapien
cacaggaccttgcagccagaggtct

SEQ ID NO: 2354582 - DNA, 25 bp, Homo sapien
gtgacctctactggcagatacgctg

SEQ ID NO: 2354583 - DNA, 25 bp, Homo sapien
tgttcacaagggcagagtgacctct

SEQ ID NO: 2354584 - DNA, 25 bp, Homo sapien
caggtgtcaccagtcatcacttggg

SEQ ID NO: 2354585 - DNA, 25 bp, Homo sapien
ggtgtcaccagtcatcacttgggct

SEQ ID NO: 2354586 - DNA, 25 bp, Homo sapien
acaggtgtcaccagtcatcacttgg

SEQ ID NO: 2354587 - DNA, 25 bp, Homo sapien
tgtcaccagtcatcacttgggctga

SEQ ID NO: 2354588 - DNA, 25 bp, Homo sapien
ctcagagtcgtgtcattctgcctgg

SEQ ID NO: 2354589 - DNA, 25 bp, Homo sapien
tgttgctgccttctacatactttgt

SEQ ID NO: 2354590 - DNA, 25 bp, Homo sapien
tctgtgcctctgttgtgaaattgcc

SEQ ID NO: 2354591 - DNA, 25 bp, Homo sapien
gccttctacatactttgtctgtgcc

SEQ ID NO: 2354592 - DNA, 25 bp, Homo sapien
tattcttaagaccactctggtcccc

SEQ ID NO: 2354593 - DNA, 25 bp, Homo sapien
tgttgatgtgaccatccttccagac

SEQ ID NO: 2354594 - DNA, 25 bp, Homo sapien
cgctggcgtcacttatgggagcttt

SEQ ID NO: 2354595 - DNA, 25 bp, Homo sapien
cctggaggtttaagtcataaatcac

SEQ ID NO: 2354596 - DNA, 25 bp, Homo sapien
ccctgtgtattggaatggctgcgct

SEQ ID NO: 2354597 - DNA, 25 bp, Homo sapien
ctccagtccccgcgggacgccacgc

SEQ ID NO: 2354598 - DNA, 25 bp, Homo sapien
gacgcctccagtccccgcgggacgc

SEQ ID NO: 2354599 - DNA, 25 bp, Homo sapien
cgcctccagtccccgcgggacgcca

SEQ ID NO: 2354600 - DNA, 25 bp, Homo sapien
ctggaggacgcctccagtccccgcg

SEQ ID NO: 2354601 - DNA, 25 bp, Homo sapien
caaaagctgtgtctaatagcagtac

SEQ ID NO: 2354602 - DNA, 25 bp, Homo sapien
ggtatggattacacatagttcatgg

SEQ ID NO: 2354603 - DNA, 25 bp, Homo sapien
agaagaatagggtatggattacaca

SEQ ID NO: 2354604 - DNA, 25 bp, Homo sapien
gagacatacatcagacacccgaaag

SEQ ID NO: 2354605 - DNA, 25 bp, Homo sapien
gagacctcacaatcagaaggagaac

SEQ ID NO: 2354606 - DNA, 25 bp, Homo sapien
gacctcacaatcagaaggagaacgg

SEQ ID NO: 2354607 - DNA, 25 bp, Homo sapien
tcacaatcagaaggagaacggtatg

SEQ ID NO: 2354608 - DNA, 25 bp, Homo sapien
acaatcagaaggagaacggtatggg

SEQ ID NO: 2354609 - DNA, 25 bp, Homo sapien
tgaggcctaatggtccctttcctaa

SEQ ID NO: 2354610 - DNA, 25 bp, Homo sapien
caatggcctgaacagagctaatgtt

SEQ ID NO: 2354611 - DNA, 25 bp, Homo sapien
catcctctcggatgcttgtaaagca

SEQ ID NO: 2354612 - DNA, 25 bp, Homo sapien
ttgtcagattaagcacacagggtgc

SEQ ID NO: 2354613 - DNA, 25 bp, Homo sapien
gttttcgaaggaggacatctttcat

SEQ ID NO: 2354614 - DNA, 25 bp, Homo sapien
tgttttcgaaggaggacatctttca

SEQ ID NO: 2354615 - DNA, 25 bp, Homo sapien
ttcaatttaatgtctctggtaaaga

SEQ ID NO: 2354616 - DNA, 25 bp, Homo sapien
tccatgcagaagtttggacatttca

SEQ ID NO: 2354617 - DNA, 25 bp, Homo sapien
tgaccacaatgtttcgtcttctctt

SEQ ID NO: 2354618 - DNA, 25 bp, Homo sapien
cacattgaccacaatgtttcgtctt

SEQ ID NO: 2354619 - DNA, 25 bp, Homo sapien
cagttcctggaatttgccctgctga

SEQ ID NO: 2354620 - DNA, 25 bp, Homo sapien
ggtgattttatcctacttcccagaa

SEQ ID NO: 2354621 - DNA, 25 bp, Homo sapien
gacctcacactaggtgattttatcc

SEQ ID NO: 2354622 - DNA, 25 bp, Homo sapien
tggaatttgccctgctgacctcaca

SEQ ID NO: 2354623 - DNA, 25 bp, Homo sapien
gaagtgcagagcgtattgggattcc

SEQ ID NO: 2354624 - DNA, 25 bp, Homo sapien
ctcttcctgaacatgcacctttgtc

SEQ ID NO: 2354625 - DNA, 25 bp, Homo sapien
tgggattccctaacaccaactcttc

SEQ ID NO: 2354626 - DNA, 25 bp, Homo sapien
aactcttcctgaacatgcacctttg

SEQ ID NO: 2354627 - DNA, 25 bp, Homo sapien
ctgcaggattctaagttggatggca

SEQ ID NO: 2354628 - DNA, 25 bp, Homo sapien
cctgcaggattctaagttggatggc

SEQ ID NO: 2354629 - DNA, 25 bp, Homo sapien
tcctgcaggattctaagttggatgg

SEQ ID NO: 2354630 - DNA, 25 bp, Homo sapien
ttcctgcaggattctaagttggatg

SEQ ID NO: 2354631 - DNA, 25 bp, Homo sapien
gaagggatgcaaccgacagtaagga

SEQ ID NO: 2354632 - DNA, 25 bp, Homo sapien
gaaagcggctcacaggctatactct

SEQ ID NO: 2354633 - DNA, 25 bp, Homo sapien
gatgcccagactttctcacgtgcgg

SEQ ID NO: 2354634 - DNA, 25 bp, Homo sapien
acaggctatactctccgattcccag

SEQ ID NO: 2354635 - DNA, 25 bp, Homo sapien
gctgcagagggccagtggcccgcga

SEQ ID NO: 2354636 - DNA, 25 bp, Homo sapien
cagagggccagtggcccgcgacggc

SEQ ID NO: 2354637 - DNA, 25 bp, Homo sapien
ggctgcagagggccagtggcccgcg

SEQ ID NO: 2354638 - DNA, 25 bp, Homo sapien
tgcagagggccagtggcccgcgacg

SEQ ID NO: 2354639 - DNA, 25 bp, Homo sapien
gtaggtgttctcggtcttgtgggaa

SEQ ID NO: 2354640 - DNA, 25 bp, Homo sapien
taggtgttctcggtcttgtgggaaa

SEQ ID NO: 2354641 - DNA, 25 bp, Homo sapien
ggtaggtgttctcggtcttgtggga

SEQ ID NO: 2354642 - DNA, 25 bp, Homo sapien
tctatcaatccggtgaataatatca

SEQ ID NO: 2354643 - DNA, 25 bp, Homo sapien
tgcagttctatcaatccggtgaata

SEQ ID NO: 2354644 - DNA, 25 bp, Homo sapien
aatattaacattccccagtcgttca

SEQ ID NO: 2354645 - DNA, 25 bp, Homo sapien
cccagtcgttcagcaaatgtaagaa

SEQ ID NO: 2354646 - DNA, 25 bp, Homo sapien
ctccatttcagcagaccctcaaaaa

SEQ ID NO: 2354647 - DNA, 25 bp, Homo sapien
gaggtttaattctctccatttcagc

SEQ ID NO: 2354648 - DNA, 25 bp, Homo sapien
gtgttctgtgaggtttaattctctc

SEQ ID NO: 2354649 - DNA, 25 bp, Homo sapien
tgtgaggtttaattctctccatttc

SEQ ID NO: 2354650 - DNA, 25 bp, Homo sapien
gaactatctcgttttggtgatacac

SEQ ID NO: 2354651 - DNA, 25 bp, Homo sapien
cttgcaggtgagtcttcaaactctg

SEQ ID NO: 2354652 - DNA, 25 bp, Homo sapien
ggtgatacaccaactgattgaatga

SEQ ID NO: 2354653 - DNA, 25 bp, Homo sapien
ggcatttgtcaataacttctttgta

SEQ ID NO: 2354654 - DNA, 25 bp, Homo sapien
tttaaatcttaagatctcagcaaag

SEQ ID NO: 2354655 - DNA, 25 bp, Homo sapien
aaaagaagcaactgatcatgtggat

SEQ ID NO: 2354656 - DNA, 25 bp, Homo sapien
gcctatgatcataggattaattaaa

SEQ ID NO: 2354657 - DNA, 25 bp, Homo sapien
tctacttaacgatagtaggtggcct

SEQ ID NO: 2354658 - DNA, 25 bp, Homo sapien
aagtgtgggtagaaatccatctgca

SEQ ID NO: 2354659 - DNA, 25 bp, Homo sapien
gatatgataacgaggtgaaagccca

SEQ ID NO: 2354660 - DNA, 25 bp, Homo sapien
tctccaggatcgaggtgatagtcaa

SEQ ID NO: 2354661 - DNA, 25 bp, Homo sapien
gatctcgtgccaactgtacaaccaa

SEQ ID NO: 2354662 - DNA, 25 bp, Homo sapien
gccttcttgggtgggtatacttcca

SEQ ID NO: 2354663 - DNA, 25 bp, Homo sapien
catggcaactcagactggcagacta

SEQ ID NO: 2354664 - DNA, 25 bp, Homo sapien
ggcagactagattgtggaccacttt

SEQ ID NO: 2354665 - DNA, 25 bp, Homo sapien
gctgtagggaccgagtcaggccttc

SEQ ID NO: 2354666 - DNA, 25 bp, Homo sapien
tatgtagttttttatgagccaggag

SEQ ID NO: 2354667 - DNA, 25 bp, Homo sapien
ttttttatgagccaggagtgtgctg

SEQ ID NO: 2354668 - DNA, 25 bp, Homo sapien
tgtagttttttatgagccaggagtg

SEQ ID NO: 2354669 - DNA, 25 bp, Homo sapien
tagttttttatgagccaggagtgtg

SEQ ID NO: 2354670 - DNA, 25 bp, Homo sapien
cttggaatgtcacacaaaagagtga

SEQ ID NO: 2354671 - DNA, 25 bp, Homo sapien
catttgtaatgatttcaaactactc

SEQ ID NO: 2354672 - DNA, 25 bp, Homo sapien
caaactactctaatagtgtgttctc

SEQ ID NO: 2354673 - DNA, 25 bp, Homo sapien
gagtgaattcattggtattacagga

SEQ ID NO: 2354674 - DNA, 25 bp, Homo sapien
aggagtgaaacatatttctaactcc

SEQ ID NO: 2354675 - DNA, 25 bp, Homo sapien
acaggagtgaaacatatttctaact

SEQ ID NO: 2354676 - DNA, 25 bp, Homo sapien
tatttctaactcctttgcacatttc

SEQ ID NO: 2354677 - DNA, 25 bp, Homo sapien
taaattgaaaagtgcgtttttatca

SEQ ID NO: 2354678 - DNA, 25 bp, Homo sapien
caattaacatccatggtagttgagt

SEQ ID NO: 2354679 - DNA, 25 bp, Homo sapien
gctttcgcaaaattagcttcactgc

SEQ ID NO: 2354680 - DNA, 25 bp, Homo sapien
cagtgactggtcctagctttcgcaa

SEQ ID NO: 2354681 - DNA, 25 bp, Homo sapien
taggatacagtggatttgaccatgt

SEQ ID NO: 2354682 - DNA, 25 bp, Homo sapien
ttagactccttatcaaaaacccatc

SEQ ID NO: 2354683 - DNA, 25 bp, Homo sapien
tagactccttatcaaaaacccatcc

SEQ ID NO: 2354684 - DNA, 25 bp, Homo sapien
cttagactccttatcaaaaacccat

SEQ ID NO: 2354685 - DNA, 25 bp, Homo sapien
ttgtgtgtagatccaagagcgattc

SEQ ID NO: 2354686 - DNA, 25 bp, Homo sapien
cagacatcagcaggcgtgggtatct

SEQ ID NO: 2354687 - DNA, 25 bp, Homo sapien
tgtcccacttccatgttttacaagt

SEQ ID NO: 2354688 - DNA, 25 bp, Homo sapien
caagtataaggtatgtttccaacaa

SEQ ID NO: 2354689 - DNA, 25 bp, Homo sapien
aattacatccaagagggtctcccag

SEQ ID NO: 2354690 - DNA, 25 bp, Homo sapien
gactggctacttgcagtgtttgaga

SEQ ID NO: 2354691 - DNA, 25 bp, Homo sapien
cattttcacccaggatcaaagcaga

SEQ ID NO: 2354692 - DNA, 25 bp, Homo sapien
tctttgatgagggtctccggcaagg

SEQ ID NO: 2354693 - DNA, 25 bp, Homo sapien
tcaaactgcttcatggcaaacatga

SEQ ID NO: 2354694 - DNA, 25 bp, Homo sapien
tgcttcatggcaaacatgacttcag

SEQ ID NO: 2354695 - DNA, 25 bp, Homo sapien
tggcaaacatgacttcagaaaaact

SEQ ID NO: 2354696 - DNA, 25 bp, Homo sapien
attaaacgtttttcaaatctgctct

SEQ ID NO: 2354697 - DNA, 25 bp, Homo sapien
ggccagagcttcatctttgactaca

SEQ ID NO: 2354698 - DNA, 25 bp, Homo sapien
gaagcaattcacaatatatgacaga

SEQ ID NO: 2354699 - DNA, 25 bp, Homo sapien
tgcggtgagaaaaccagagggtact

SEQ ID NO: 2354700 - DNA, 25 bp, Homo sapien
gctttgttcagaatgagcttggcca

SEQ ID NO: 2354701 - DNA, 25 bp, Homo sapien
gtgtggttattaaaaggtagcatga

SEQ ID NO: 2354702 - DNA, 25 bp, Homo sapien
tgtggttattaaaaggtagcatgag

SEQ ID NO: 2354703 - DNA, 25 bp, Homo sapien
gcctggccaggagtgtggttattaa

SEQ ID NO: 2354704 - DNA, 25 bp, Homo sapien
agcatgaggaatcctcgtggtgagg

SEQ ID NO: 2354705 - DNA, 25 bp, Homo sapien
ctttgatcagatacacagttgctca

SEQ ID NO: 2354706 - DNA, 25 bp, Homo sapien
gatgaagttgacgaataccactaaa

SEQ ID NO: 2354707 - DNA, 25 bp, Homo sapien
cattctgttttgaatatctgtgact

SEQ ID NO: 2354708 - DNA, 25 bp, Homo sapien
ttccacaaatgtagaatgatgttgc

SEQ ID NO: 2354709 - DNA, 25 bp, Homo sapien
taatatgaggtaacaccacgagggc

SEQ ID NO: 2354710 - DNA, 25 bp, Homo sapien
cccaagattgtgaaaggtaagtagt

SEQ ID NO: 2354711 - DNA, 25 bp, Homo sapien
tggtccaatactggaaactgttcgt

SEQ ID NO: 2354712 - DNA, 25 bp, Homo sapien
tcccttggatctagtcttcttctgc

SEQ ID NO: 2354713 - DNA, 25 bp, Homo sapien
tgtcaacagtcatgaagagtgcctc

SEQ ID NO: 2354714 - DNA, 25 bp, Homo sapien
tcccaaagcttcctttgtcaacagt

SEQ ID NO: 2354715 - DNA, 25 bp, Homo sapien
cggtgacgagtggtatcaccttctc

SEQ ID NO: 2354716 - DNA, 25 bp, Homo sapien
gaagagtgcctctatgaagccggtg

SEQ ID NO: 2354717 - DNA, 25 bp, Homo sapien
agttcagaagattcttccaaactta

SEQ ID NO: 2354718 - DNA, 25 bp, Homo sapien
gaagttcagaagattcttccaaact

SEQ ID NO: 2354719 - DNA, 25 bp, Homo sapien
aagttcagaagattcttccaaactt

SEQ ID NO: 2354720 - DNA, 25 bp, Homo sapien
aataattccattaaagcctcctggg

SEQ ID NO: 2354721 - DNA, 25 bp, Homo sapien
tgcttgtaacttgggaaataattcc

SEQ ID NO: 2354722 - DNA, 25 bp, Homo sapien
taatagagatcagtcaacagcaaca

SEQ ID NO: 2354723 - DNA, 25 bp, Homo sapien
gccacacaaggctaatctctgataa

SEQ ID NO: 2354724 - DNA, 25 bp, Homo sapien
ggatccttattgtcaaaagccgaat

SEQ ID NO: 2354725 - DNA, 25 bp, Homo sapien
tggacatcaaaatggtttaggatcc

SEQ ID NO: 2354726 - DNA, 25 bp, Homo sapien
aagctggacatcaaaatggtttagg

SEQ ID NO: 2354727 - DNA, 25 bp, Homo sapien
catcaaaatggtttaggatccttat

SEQ ID NO: 2354728 - DNA, 25 bp, Homo sapien
catggagaagaccagtcagtatttt

SEQ ID NO: 2354729 - DNA, 25 bp, Homo sapien
agagaaaaccatggagaagaccagt

SEQ ID NO: 2354730 - DNA, 25 bp, Homo sapien
aagaacattaaatgtgaccaaaggt

SEQ ID NO: 2354731 - DNA, 25 bp, Homo sapien
aaaccatggagaagaccagtcagta

SEQ ID NO: 2354732 - DNA, 25 bp, Homo sapien
acagactgccgctctgagagcccat

SEQ ID NO: 2354733 - DNA, 25 bp, Homo sapien
tcagggacagcagtctgtaccacat

SEQ ID NO: 2354734 - DNA, 25 bp, Homo sapien
gttctgcctggcgtaatatagcaaa

SEQ ID NO: 2354735 - DNA, 25 bp, Homo sapien
tcctgtaacggcccatcagggacag

SEQ ID NO: 2354736 - DNA, 25 bp, Homo sapien
caccttttggaataagggtcattat

SEQ ID NO: 2354737 - DNA, 25 bp, Homo sapien
gactgaggctttgcaagttcagtaa

SEQ ID NO: 2354738 - DNA, 25 bp, Homo sapien
tgcaagttcagtaaaagggtctaaa

SEQ ID NO: 2354739 - DNA, 25 bp, Homo sapien
caaggaaacatgctgtgaatgactg

SEQ ID NO: 2354740 - DNA, 25 bp, Homo sapien
aaacttcaacagcagtcagaaatgc

SEQ ID NO: 2354741 - DNA, 25 bp, Homo sapien
taagacaaaacttcaacagcagtca

SEQ ID NO: 2354742 - DNA, 25 bp, Homo sapien
ttaagacaaaacttcaacagcagtc

SEQ ID NO: 2354743 - DNA, 25 bp, Homo sapien
cttcaacagcagtcagaaatgcaca

SEQ ID NO: 2354744 - DNA, 25 bp, Homo sapien
gaaattaatatatagcatgcctaac

SEQ ID NO: 2354745 - DNA, 25 bp, Homo sapien
ggatcccagagtgcactgaaattaa

SEQ ID NO: 2354746 - DNA, 25 bp, Homo sapien
cttatgagttcaataacaggatccc

SEQ ID NO: 2354747 - DNA, 25 bp, Homo sapien
tgcctaacaaataacgaagcggcac

SEQ ID NO: 2354748 - DNA, 25 bp, Homo sapien
gatgctcatagtagactttccaaaa

SEQ ID NO: 2354749 - DNA, 25 bp, Homo sapien
tgctcatagtagactttccaaaatt

SEQ ID NO: 2354750 - DNA, 25 bp, Homo sapien
agatgctcatagtagactttccaaa

SEQ ID NO: 2354751 - DNA, 25 bp, Homo sapien
ctcatagtagactttccaaaattgc

SEQ ID NO: 2354752 - DNA, 25 bp, Homo sapien
tttatcttaagtgttttctcaagag

SEQ ID NO: 2354753 - DNA, 25 bp, Homo sapien
cttaagtgttttctcaagagagggc

SEQ ID NO: 2354754 - DNA, 25 bp, Homo sapien
tatcttaagtgttttctcaagagag

SEQ ID NO: 2354755 - DNA, 25 bp, Homo sapien
taagtgttttctcaagagagggcat

SEQ ID NO: 2354756 - DNA, 25 bp, Homo sapien
caagtctttcctgacagtcagtttt

SEQ ID NO: 2354757 - DNA, 25 bp, Homo sapien
ctgggaatttggtcagagctctcca

SEQ ID NO: 2354758 - DNA, 25 bp, Homo sapien
ctttctgggaatttggtcagagctc

SEQ ID NO: 2354759 - DNA, 25 bp, Homo sapien
tcaatgctaactgctcatgataaag

SEQ ID NO: 2354760 - DNA, 25 bp, Homo sapien
gagtcaactgtttactgccgccttt

SEQ ID NO: 2354761 - DNA, 25 bp, Homo sapien
tctgactaaggtcactccaaagcca

SEQ ID NO: 2354762 - DNA, 25 bp, Homo sapien
ctaaatattggtatcagtccctgaa

SEQ ID NO: 2354763 - DNA, 25 bp, Homo sapien
taattaggctgtcatccctatcaga

SEQ ID NO: 2354764 - DNA, 25 bp, Homo sapien
taagatcttatccttaagccgtggg

SEQ ID NO: 2354765 - DNA, 25 bp, Homo sapien
aaagcatccataagagtgtccagca

SEQ ID NO: 2354766 - DNA, 25 bp, Homo sapien
tccatgccaaccagtattaaacgtt

SEQ ID NO: 2354767 - DNA, 25 bp, Homo sapien
tactaacaccataaatgccagctgg

SEQ ID NO: 2354768 - DNA, 25 bp, Homo sapien
tcatcatctcctgcggcaggttcct

SEQ ID NO: 2354769 - DNA, 25 bp, Homo sapien
caacttgcagatctgctgggtaata

SEQ ID NO: 2354770 - DNA, 25 bp, Homo sapien
ccttttctccgtagatcctgggttg

SEQ ID NO: 2354771 - DNA, 25 bp, Homo sapien
gcaggttcctcttcgatttcctctg

SEQ ID NO: 2354772 - DNA, 25 bp, Homo sapien
gatataaggcccgtggatttgaaaa

SEQ ID NO: 2354773 - DNA, 25 bp, Homo sapien
gattccagatataaggcccgtggat

SEQ ID NO: 2354774 - DNA, 25 bp, Homo sapien
tataactcatatagtttggattcca

SEQ ID NO: 2354775 - DNA, 25 bp, Homo sapien
actcatatagtttggattccagata

SEQ ID NO: 2354776 - DNA, 25 bp, Homo sapien
taagggaggacatgaggatgtttat

SEQ ID NO: 2354777 - DNA, 25 bp, Homo sapien
ggacatgaggatgtttatatgtcat

SEQ ID NO: 2354778 - DNA, 25 bp, Homo sapien
ccatttgatcttggtgtagcaacaa

SEQ ID NO: 2354779 - DNA, 25 bp, Homo sapien
tatgtcattatgcaatccaaggtta

SEQ ID NO: 2354780 - DNA, 25 bp, Homo sapien
tattatggttgatatccataaagga

SEQ ID NO: 2354781 - DNA, 25 bp, Homo sapien
tctgtccataactcagctgtttaaa

SEQ ID NO: 2354782 - DNA, 25 bp, Homo sapien
tgacagatttgtacatttcaaaagg

SEQ ID NO: 2354783 - DNA, 25 bp, Homo sapien
gattagattctgtccataactcagc

SEQ ID NO: 2354784 - DNA, 25 bp, Homo sapien
agatctgctcggtgggctgttttca

SEQ ID NO: 2354785 - DNA, 25 bp, Homo sapien
cactacagcattatcttctgaaatg

SEQ ID NO: 2354786 - DNA, 25 bp, Homo sapien
tcggtgggctgttttcactacagca

SEQ ID NO: 2354787 - DNA, 25 bp, Homo sapien
gaataggaaatagatctgctcggtg

SEQ ID NO: 2354788 - DNA, 25 bp, Homo sapien
ttgcacattaattctaaaatatgag

SEQ ID NO: 2354789 - DNA, 25 bp, Homo sapien
caactcaatagatttaaatggatat

SEQ ID NO: 2354790 - DNA, 25 bp, Homo sapien
taaaaggctagaagagcaactcaat

SEQ ID NO: 2354791 - DNA, 25 bp, Homo sapien
gaaattagatatttaacacagacaa

SEQ ID NO: 2354792 - DNA, 25 bp, Homo sapien
gacaatggccatgcgggtgcctgaa

SEQ ID NO: 2354793 - DNA, 25 bp, Homo sapien
gcagatttcccctgagttttactcc

SEQ ID NO: 2354794 - DNA, 25 bp, Homo sapien
caggtctaagaatatctggatctcc

SEQ ID NO: 2354795 - DNA, 25 bp, Homo sapien
gccaggaaccgcaggacaatggcca

SEQ ID NO: 2354796 - DNA, 25 bp, Homo sapien
catcaagattgggaggaacaaccct

SEQ ID NO: 2354797 - DNA, 25 bp, Homo sapien
cagacaacaggtattagagtgagag

SEQ ID NO: 2354798 - DNA, 25 bp, Homo sapien
tgtgagaagtccaccgcagacaaca

SEQ ID NO: 2354799 - DNA, 25 bp, Homo sapien
ccctgttagaaagacgcccaggagc

SEQ ID NO: 2354800 - DNA, 25 bp, Homo sapien
tgctgacgacctaaaggaagaactt

SEQ ID NO: 2354801 - DNA, 25 bp, Homo sapien
ctgtttaagataccgtgctgacgac

SEQ ID NO: 2354802 - DNA, 25 bp, Homo sapien
aaaatcttcggcaggtatgcgctga

SEQ ID NO: 2354803 - DNA, 25 bp, Homo sapien
gcttgaatgactgcagaatggcact

SEQ ID NO: 2354804 - DNA, 25 bp, Homo sapien
ggtggcatcagcctccttgtctaat

SEQ ID NO: 2354805 - DNA, 25 bp, Homo sapien
gataccttatacttctaggctcttg

SEQ ID NO: 2354806 - DNA, 25 bp, Homo sapien
gttggaagataccttatacttctag

SEQ ID NO: 2354807 - DNA, 25 bp, Homo sapien
ggctttgttctgggatcaaacttga

SEQ ID NO: 2354808 - DNA, 25 bp, Homo sapien
attcccagtccaaaaagatatcagt

SEQ ID NO: 2354809 - DNA, 25 bp, Homo sapien
ccattttgattccaagacgtcttaa

SEQ ID NO: 2354810 - DNA, 25 bp, Homo sapien
tcttctgttctaaactgatatgatt

SEQ ID NO: 2354811 - DNA, 25 bp, Homo sapien
ggggccaaactgcaccatgaaacac

SEQ ID NO: 2354812 - DNA, 25 bp, Homo sapien
tttctgctccagatactgatcagtt

SEQ ID NO: 2354813 - DNA, 25 bp, Homo sapien
gaggagtaggagaatattgactctc

SEQ ID NO: 2354814 - DNA, 25 bp, Homo sapien
ctccagatactgatcagtttcagca

SEQ ID NO: 2354815 - DNA, 25 bp, Homo sapien
gactctcagatccaagcctgctgat

SEQ ID NO: 2354816 - DNA, 25 bp, Homo sapien
tctgtaggctcgaaatctggaaggt

SEQ ID NO: 2354817 - DNA, 25 bp, Homo sapien
caaaaacattggtcaggatatcaca

SEQ ID NO: 2354818 - DNA, 25 bp, Homo sapien
tctgtttagccagcaaagggaaata

SEQ ID NO: 2354819 - DNA, 25 bp, Homo sapien
gctatgccagggtatacacatccag

SEQ ID NO: 2354820 - DNA, 25 bp, Homo sapien
ccttttctgcgcttattgtggtttt

SEQ ID NO: 2354821 - DNA, 25 bp, Homo sapien
tgccaagctctttactgacttgtgc

SEQ ID NO: 2354822 - DNA, 25 bp, Homo sapien
taatcttcctcctattgtgatagac

SEQ ID NO: 2354823 - DNA, 25 bp, Homo sapien
gaagaattgcaggtacatgaggtag

SEQ ID NO: 2354824 - DNA, 25 bp, Homo sapien
gagaagcgtaatgagtacagaactt

SEQ ID NO: 2354825 - DNA, 25 bp, Homo sapien
gaaggagaagcgtaatgagtacaga

SEQ ID NO: 2354826 - DNA, 25 bp, Homo sapien
ggaggaatggaaggagaagcgtaat

SEQ ID NO: 2354827 - DNA, 25 bp, Homo sapien
aatggaaggagaagcgtaatgagta

SEQ ID NO: 2354828 - DNA, 25 bp, Homo sapien
taacaagttttgtactgtcaccaga

SEQ ID NO: 2354829 - DNA, 25 bp, Homo sapien
tccacacaatgctttaacaagtttt

SEQ ID NO: 2354830 - DNA, 25 bp, Homo sapien
gcttgaggaagcttgtagggtccac

SEQ ID NO: 2354831 - DNA, 25 bp, Homo sapien
tgtcaccagaatatcaacctctgta

SEQ ID NO: 2354832 - DNA, 25 bp, Homo sapien
tatattttaacccactctcaaaatc

SEQ ID NO: 2354833 - DNA, 25 bp, Homo sapien
caagatgtctttgatcgaaggcgtt

SEQ ID NO: 2354834 - DNA, 25 bp, Homo sapien
tggaaagtctcaaagcgaacgtcga

SEQ ID NO: 2354835 - DNA, 25 bp, Homo sapien
cgaacgtcgaagttgatatcatcaa

SEQ ID NO: 2354836 - DNA, 25 bp, Homo sapien
taggtagttaacatccacaatttgc

SEQ ID NO: 2354837 - DNA, 25 bp, Homo sapien
ttttgatgatactcatcaggcacat

SEQ ID NO: 2354838 - DNA, 25 bp, Homo sapien
aaggcagctagctttttgatgatac

SEQ ID NO: 2354839 - DNA, 25 bp, Homo sapien
aacggtggatgatttctctatagtc

SEQ ID NO: 2354840 - DNA, 25 bp, Homo sapien
tggcattatcacttaaactcatatc

SEQ ID NO: 2354841 - DNA, 25 bp, Homo sapien
tttctgggtcatggtaatgagtaag

SEQ ID NO: 2354842 - DNA, 25 bp, Homo sapien
catgttctcaaagaagtccatttct

SEQ ID NO: 2354843 - DNA, 25 bp, Homo sapien
ttgtggtataatcctgctgaatact

SEQ ID NO: 2354844 - DNA, 25 bp, Homo sapien
taatgagtaagttgtaccaagtctt

SEQ ID NO: 2354845 - DNA, 25 bp, Homo sapien
tttctcatcaaaaattggagtcatg

SEQ ID NO: 2354846 - DNA, 25 bp, Homo sapien
aaaaattggagtcatggcataaggc

SEQ ID NO: 2354847 - DNA, 25 bp, Homo sapien
gcataaggcatgatgtaattctgaa

SEQ ID NO: 2354848 - DNA, 25 bp, Homo sapien
taaggcatgatgtaattctgaagag

SEQ ID NO: 2354849 - DNA, 25 bp, Homo sapien
gatctgtcccgtttgtaagacatga

SEQ ID NO: 2354850 - DNA, 25 bp, Homo sapien
aatacatatacgctgaccaagagag

SEQ ID NO: 2354851 - DNA, 25 bp, Homo sapien
caaatggctccaataatctctgtgg

SEQ ID NO: 2354852 - DNA, 25 bp, Homo sapien
tgtggcagcagtggttatattttca

SEQ ID NO: 2354853 - DNA, 25 bp, Homo sapien
gaatgcttctaacactattactagc

SEQ ID NO: 2354854 - DNA, 25 bp, Homo sapien
aagtggaatgcttctaacactatta

SEQ ID NO: 2354855 - DNA, 25 bp, Homo sapien
gtggaatgcttctaacactattact

SEQ ID NO: 2354856 - DNA, 25 bp, Homo sapien
ggaatgcttctaacactattactag

SEQ ID NO: 2354857 - DNA, 25 bp, Homo sapien
tatgtttaataaacaacaaaagtca

SEQ ID NO: 2354858 - DNA, 25 bp, Homo sapien
ggctctggtaactcaattgcttcaa

SEQ ID NO: 2354859 - DNA, 25 bp, Homo sapien
tggtaactcaattgcttcaattgcg

SEQ ID NO: 2354860 - DNA, 25 bp, Homo sapien
ctgacaaactcttgcatgtatattc

SEQ ID NO: 2354861 - DNA, 25 bp, Homo sapien
gacaaactcttgcatgtatattcct

SEQ ID NO: 2354862 - DNA, 25 bp, Homo sapien
catttatgtagcctggggagaatat

SEQ ID NO: 2354863 - DNA, 25 bp, Homo sapien
caggctttgtgatacactcggattc

SEQ ID NO: 2354864 - DNA, 25 bp, Homo sapien
agagacaggctttgtgatacactcg

SEQ ID NO: 2354865 - DNA, 25 bp, Homo sapien
cactcggattctttagctgatgttc

SEQ ID NO: 2354866 - DNA, 25 bp, Homo sapien
tgctggaccccgaataaatttatta

SEQ ID NO: 2354867 - DNA, 25 bp, Homo sapien
ctgctggaccccgaataaatttatt

SEQ ID NO: 2354868 - DNA, 25 bp, Homo sapien
catggcaaaagctaatggaactcga

SEQ ID NO: 2354869 - DNA, 25 bp, Homo sapien
taacttcttgtggaagggactgcat

SEQ ID NO: 2354870 - DNA, 25 bp, Homo sapien
cacaacctttgacttgacaagcttg

SEQ ID NO: 2354871 - DNA, 25 bp, Homo sapien
ggactgcattagtttaaccatggca

SEQ ID NO: 2354872 - DNA, 25 bp, Homo sapien
tggtatccacggacaagagtagtct

SEQ ID NO: 2354873 - DNA, 25 bp, Homo sapien
taggaggaagtgcacaccaagatcc

SEQ ID NO: 2354874 - DNA, 25 bp, Homo sapien
gagtgctgcgtgcaatgtctctgat

SEQ ID NO: 2354875 - DNA, 25 bp, Homo sapien
gagtagggcacacactttcagcaaa

SEQ ID NO: 2354876 - DNA, 25 bp, Homo sapien
caatctatggagtaggtactacatc

SEQ ID NO: 2354877 - DNA, 25 bp, Homo sapien
taagcctcactcatccaatctatgg

SEQ ID NO: 2354878 - DNA, 25 bp, Homo sapien
tctgagagcttactacagggtaggt

SEQ ID NO: 2354879 - DNA, 25 bp, Homo sapien
gaccaacctgtgaattaaggagctt

SEQ ID NO: 2354880 - DNA, 25 bp, Homo sapien
tgaacggtgaaagtcagcacatgga

SEQ ID NO: 2354881 - DNA, 25 bp, Homo sapien
gtgaacggtgaaagtcagcacatgg

SEQ ID NO: 2354882 - DNA, 25 bp, Homo sapien
gaacggtgaaagtcagcacatggac

SEQ ID NO: 2354883 - DNA, 25 bp, Homo sapien
gacctgcagcttattggtgaggcct

SEQ ID NO: 2354884 - DNA, 25 bp, Homo sapien
tattggtgaggccttgcagcagcat

SEQ ID NO: 2354885 - DNA, 25 bp, Homo sapien
gcagcttattggtgaggccttgcag

SEQ ID NO: 2354886 - DNA, 25 bp, Homo sapien
atctccgacctgcagcttattggtg

SEQ ID NO: 2354887 - DNA, 25 bp, Homo sapien
aacttgccgaggatttcataagagt

SEQ ID NO: 2354888 - DNA, 25 bp, Homo sapien
ttcgtgcttccatgactttggagag

SEQ ID NO: 2354889 - DNA, 25 bp, Homo sapien
gaaggatgagttttgtaacctgatc

SEQ ID NO: 2354890 - DNA, 25 bp, Homo sapien
cataagagtcgtaacttttgcttct

SEQ ID NO: 2354891 - DNA, 25 bp, Homo sapien
gggaagattttcactgatcaaacca

SEQ ID NO: 2354892 - DNA, 25 bp, Homo sapien
tcctgatttacaattaatcccactg

SEQ ID NO: 2354893 - DNA, 25 bp, Homo sapien
gattcggcgtaaagtttcatgaact

SEQ ID NO: 2354894 - DNA, 25 bp, Homo sapien
agtaatagaatggattcagctgtca

SEQ ID NO: 2354895 - DNA, 25 bp, Homo sapien
tggtagacgtggatctggtgctggg

SEQ ID NO: 2354896 - DNA, 25 bp, Homo sapien
aatatgtgcatgttggttttcctgc

SEQ ID NO: 2354897 - DNA, 25 bp, Homo sapien
ccgaagcccggactcaataaatatg

SEQ ID NO: 2354898 - DNA, 25 bp, Homo sapien
tctgtccacctcgaactggagttgg

SEQ ID NO: 2354899 - DNA, 25 bp, Homo sapien
gagacacaaaaggatccagcatttc

SEQ ID NO: 2354900 - DNA, 25 bp, Homo sapien
ggatccagcatttccaggacacatt

SEQ ID NO: 2354901 - DNA, 25 bp, Homo sapien
agcccaggcagtctatgaggagaga

SEQ ID NO: 2354902 - DNA, 25 bp, Homo sapien
ggcagtctatgaggagagacacaaa

SEQ ID NO: 2354903 - DNA, 25 bp, Homo sapien
ctttgaaagcaccgggatcagctag

SEQ ID NO: 2354904 - DNA, 25 bp, Homo sapien
gctccatctaataacacccgtgctg

SEQ ID NO: 2354905 - DNA, 25 bp, Homo sapien
aagcaccgggatcagctagttcagc

SEQ ID NO: 2354906 - DNA, 25 bp, Homo sapien
gatcagctagttcagctccatctaa

SEQ ID NO: 2354907 - DNA, 25 bp, Homo sapien
tagcgggaacctcaagacccagatg

SEQ ID NO: 2354908 - DNA, 25 bp, Homo sapien
ctatggaaggtagcgggaacctcaa

SEQ ID NO: 2354909 - DNA, 25 bp, Homo sapien
ggcactgtaaagcacctgtgatcac

SEQ ID NO: 2354910 - DNA, 25 bp, Homo sapien
tcaagacccagatgaggcactgtaa

SEQ ID NO: 2354911 - DNA, 25 bp, Homo sapien
caaggtggaagttctggcccctggc

SEQ ID NO: 2354912 - DNA, 25 bp, Homo sapien
caattgaccacaaggtggaagttct

SEQ ID NO: 2354913 - DNA, 25 bp, Homo sapien
cttgaaacaattgaccacaaggtgg

SEQ ID NO: 2354914 - DNA, 25 bp, Homo sapien
tggcggccccgagctttgcatagtc

SEQ ID NO: 2354915 - DNA, 25 bp, Homo sapien
cataggccagtagaacttggagctg

SEQ ID NO: 2354916 - DNA, 25 bp, Homo sapien
ctttcttgacaagtatggtcacaca

SEQ ID NO: 2354917 - DNA, 25 bp, Homo sapien
tcagttatctggtaagacttgactt

SEQ ID NO: 2354918 - DNA, 25 bp, Homo sapien
tcttgaagtatcataaatgtcctcc

SEQ ID NO: 2354919 - DNA, 25 bp, Homo sapien
gaccctggcaggttcgctttgtgca

SEQ ID NO: 2354920 - DNA, 25 bp, Homo sapien
tcgatttctgggaccaacagctttc

SEQ ID NO: 2354921 - DNA, 25 bp, Homo sapien
tgcagagactgccaacttggatact

SEQ ID NO: 2354922 - DNA, 25 bp, Homo sapien
ggatactttccgcatgacctcatcg

SEQ ID NO: 2354923 - DNA, 25 bp, Homo sapien
ttgagcgagcatgaattccaagttt

SEQ ID NO: 2354924 - DNA, 25 bp, Homo sapien
cagttgagcgagcatgaattccaag

SEQ ID NO: 2354925 - DNA, 25 bp, Homo sapien
gttgagcgagcatgaattccaagtt

SEQ ID NO: 2354926 - DNA, 25 bp, Homo sapien
ttcagttgagcgagcatgaattcca

SEQ ID NO: 2354927 - DNA, 25 bp, Homo sapien
ctgagggaacgtgtcaaagagatag

SEQ ID NO: 2354928 - DNA, 25 bp, Homo sapien
ctctctcccggtctcatgttcgtaa

SEQ ID NO: 2354929 - DNA, 25 bp, Homo sapien
gataggcgatcatttccaaggtgga

SEQ ID NO: 2354930 - DNA, 25 bp, Homo sapien
atttccaaggtggactctctcccgg

SEQ ID NO: 2354931 - DNA, 25 bp, Homo sapien
aacattccgcagttctcatggagca

SEQ ID NO: 2354932 - DNA, 25 bp, Homo sapien
catctttttgcacgtggcagagtca

SEQ ID NO: 2354933 - DNA, 25 bp, Homo sapien
tagggacttgattgtcatggatgcc

SEQ ID NO: 2354934 - DNA, 25 bp, Homo sapien
aaacagccaatcttttttctcgagg

SEQ ID NO: 2354935 - DNA, 25 bp, Homo sapien
tccttttcaatcacaggaaggacag

SEQ ID NO: 2354936 - DNA, 25 bp, Homo sapien
cagggcagcaagttgtctatttaag

SEQ ID NO: 2354937 - DNA, 25 bp, Homo sapien
gatcagggcagcaagttgtctattt

SEQ ID NO: 2354938 - DNA, 25 bp, Homo sapien
acagatcagggcagcaagttgtcta

SEQ ID NO: 2354939 - DNA, 25 bp, Homo sapien
ctcagcgggtttggtaaactgaata

SEQ ID NO: 2354940 - DNA, 25 bp, Homo sapien
taaacagaaggcgatctgcagcttt

SEQ ID NO: 2354941 - DNA, 25 bp, Homo sapien
gattttactcaaagtctcagcgggt

SEQ ID NO: 2354942 - DNA, 25 bp, Homo sapien
ttatcagtgtaagaaaactaaacag

SEQ ID NO: 2354943 - DNA, 25 bp, Homo sapien
tgtggatgtctcaggtgagaatgca

SEQ ID NO: 2354944 - DNA, 25 bp, Homo sapien
gaggcaaagagtaatccaaaaatct

SEQ ID NO: 2354945 - DNA, 25 bp, Homo sapien
gagccacacccagttgtgtggatgt

SEQ ID NO: 2354946 - DNA, 25 bp, Homo sapien
gtaatccaaaaatctgggctgctgt

SEQ ID NO: 2354947 - DNA, 25 bp, Homo sapien
ggaacttgattgctacaggttctgg

SEQ ID NO: 2354948 - DNA, 25 bp, Homo sapien
gctaggaacttgattgctacaggtt

SEQ ID NO: 2354949 - DNA, 25 bp, Homo sapien
cttgattgctacaggttctgggagg

SEQ ID NO: 2354950 - DNA, 25 bp, Homo sapien
actggctaggaacttgattgctaca

SEQ ID NO: 2354951 - DNA, 25 bp, Homo sapien
cctagagactgatccaagaatttgg

SEQ ID NO: 2354952 - DNA, 25 bp, Homo sapien
tttggaatgcaattgatggcaagag

SEQ ID NO: 2354953 - DNA, 25 bp, Homo sapien
tctcctagagactgatccaagaatt

SEQ ID NO: 2354954 - DNA, 25 bp, Homo sapien
aatttggaatgcaattgatggcaag

SEQ ID NO: 2354955 - DNA, 25 bp, Homo sapien
cagtgtggtgattttggcttagtgc

SEQ ID NO: 2354956 - DNA, 25 bp, Homo sapien
gtgtggtgattttggcttagtgcaa

SEQ ID NO: 2354957 - DNA, 25 bp, Homo sapien
tgtggtgattttggcttagtgcaac

SEQ ID NO: 2354958 - DNA, 25 bp, Homo sapien
agtgtggtgattttggcttagtgca

SEQ ID NO: 2354959 - DNA, 25 bp, Homo sapien
ggctgcgaacaacaaattcttaaca

SEQ ID NO: 2354960 - DNA, 25 bp, Homo sapien
caagactttggctgcgaacaacaaa

SEQ ID NO: 2354961 - DNA, 25 bp, Homo sapien
aatacaagactttggctgcgaacaa

SEQ ID NO: 2354962 - DNA, 25 bp, Homo sapien
gactttggctgcgaacaacaaattc

SEQ ID NO: 2354963 - DNA, 25 bp, Homo sapien
ttctcggcgaataagcagcttccag

SEQ ID NO: 2354964 - DNA, 25 bp, Homo sapien
cagttttgcaatccgggacagcttc

SEQ ID NO: 2354965 - DNA, 25 bp, Homo sapien
gggtttctcggcgaataagcagctt

SEQ ID NO: 2354966 - DNA, 25 bp, Homo sapien
ttctcttctccgtcagactccgcct

SEQ ID NO: 2354967 - DNA, 25 bp, Homo sapien
cggctttaccttgtctatcccaaga

SEQ ID NO: 2354968 - DNA, 25 bp, Homo sapien
gaataggtgctgttgagttcccgaa

SEQ ID NO: 2354969 - DNA, 25 bp, Homo sapien
tatcccaagatccattgctacggcg

SEQ ID NO: 2354970 - DNA, 25 bp, Homo sapien
gatcattgggagatacggctttacc

SEQ ID NO: 2354971 - DNA, 25 bp, Homo sapien
aaatatgcctatttgttaattatct

SEQ ID NO: 2354972 - DNA, 25 bp, Homo sapien
caaatatgcctatttgttaattatc

SEQ ID NO: 2354973 - DNA, 25 bp, Homo sapien
tctttgactatttaatctatgttga

SEQ ID NO: 2354974 - DNA, 25 bp, Homo sapien
ccaaggttgtaggactgtaaaagct

SEQ ID NO: 2354975 - DNA, 25 bp, Homo sapien
tgttgaatccctagtgcctggcaga

SEQ ID NO: 2354976 - DNA, 25 bp, Homo sapien
ttgaaccaaagcacacctgaacctg

SEQ ID NO: 2354977 - DNA, 25 bp, Homo sapien
taaatgttgactgggttgaaccaaa

SEQ ID NO: 2354978 - DNA, 25 bp, Homo sapien
gtaattctatgatttcctgggatag

SEQ ID NO: 2354979 - DNA, 25 bp, Homo sapien
ggcaaaggctaatgagaagctctca

SEQ ID NO: 2354980 - DNA, 25 bp, Homo sapien
ggctaatgagaagctctcaagccca

SEQ ID NO: 2354981 - DNA, 25 bp, Homo sapien
tgggatagattcttcagcaaaggat

SEQ ID NO: 2354982 - DNA, 25 bp, Homo sapien
tcaaacccttgatcctccctaagtg

SEQ ID NO: 2354983 - DNA, 25 bp, Homo sapien
catgcacacttagtagttatcaagt

SEQ ID NO: 2354984 - DNA, 25 bp, Homo sapien
aagtgtaagtgtgacacaaacatgc

SEQ ID NO: 2354985 - DNA, 25 bp, Homo sapien
ctgaagtcccagctataaagtcccc

SEQ ID NO: 2354986 - DNA, 25 bp, Homo sapien
tcttggcagcaatatcaggattagt

SEQ ID NO: 2354987 - DNA, 25 bp, Homo sapien
ggacgcaggaactctatctttctct

SEQ ID NO: 2354988 - DNA, 25 bp, Homo sapien
ttgtctcttggccttatatcctgga

SEQ ID NO: 2354989 - DNA, 25 bp, Homo sapien
ttactccaccattgctaaatctttc

SEQ ID NO: 2354990 - DNA, 25 bp, Homo sapien
tggccttatatcctggacgcaggaa

SEQ ID NO: 2354991 - DNA, 25 bp, Homo sapien
ccagacaacctactgtaatttcaga

SEQ ID NO: 2354992 - DNA, 25 bp, Homo sapien
tatatattatacaatctatccaaag

SEQ ID NO: 2354993 - DNA, 25 bp, Homo sapien
aatttgccgggcatagtgttgtgtg

SEQ ID NO: 2354994 - DNA, 25 bp, Homo sapien
tgttgtgtgcctaggaggcacaact

SEQ ID NO: 2354995 - DNA, 25 bp, Homo sapien
gaacagtttgaggacagtttaagtc

SEQ ID NO: 2354996 - DNA, 25 bp, Homo sapien
tggccgaacgttagaaaatgttatc

SEQ ID NO: 2354997 - DNA, 25 bp, Homo sapien
tctggcaccaaatgtaagacactga

SEQ ID NO: 2354998 - DNA, 25 bp, Homo sapien
tgtattaatgtggttttggccgaac

SEQ ID NO: 2354999 - DNA, 25 bp, Homo sapien
aatacctgagatgcactttaaactg

SEQ ID NO: 2355000 - DNA, 25 bp, Homo sapien
ggcagggaccgtatcttatttactg

SEQ ID NO: 2355001 - DNA, 25 bp, Homo sapien
tctggcctatgattgtgttgtgtct

SEQ ID NO: 2355002 - DNA, 25 bp, Homo sapien
tccgttgcatctagtgtggtgcacc

SEQ ID NO: 2355003 - DNA, 25 bp, Homo sapien
acccgtgggactctcacccttcttg

SEQ ID NO: 2355004 - DNA, 25 bp, Homo sapien
tcacatttatgttcattctccgggc

SEQ ID NO: 2355005 - DNA, 25 bp, Homo sapien
ggttccctgcaggtctcagaaacat

SEQ ID NO: 2355006 - DNA, 25 bp, Homo sapien
tcattctccgggcttatattcattc

SEQ ID NO: 2355007 - DNA, 25 bp, Homo sapien
cactgtatggacgtgaacccagggt

SEQ ID NO: 2355008 - DNA, 25 bp, Homo sapien
tggttcagaagcttgactcataaac

SEQ ID NO: 2355009 - DNA, 25 bp, Homo sapien
caaggtcacctgctagcttgtaagg

SEQ ID NO: 2355010 - DNA, 25 bp, Homo sapien
gcttgtaaggtaggaatagggctca

SEQ ID NO: 2355011 - DNA, 25 bp, Homo sapien
tagtttttgcttctcaaaatcaccc

SEQ ID NO: 2355012 - DNA, 25 bp, Homo sapien
gtgcccttagtttttgcttctcaaa

SEQ ID NO: 2355013 - DNA, 25 bp, Homo sapien
cttcagtaaattttagtgcccttag

SEQ ID NO: 2355014 - DNA, 25 bp, Homo sapien
gtttttgcttctcaaaatcacccat

SEQ ID NO: 2355015 - DNA, 25 bp, Homo sapien
cgtccgcagagcctgggttcgagtt

SEQ ID NO: 2355016 - DNA, 25 bp, Homo sapien
gtcagtcgcaggttcgccgaggttt

SEQ ID NO: 2355017 - DNA, 25 bp, Homo sapien
gagttctttacccttatcatgaagt

SEQ ID NO: 2355018 - DNA, 25 bp, Homo sapien
ttcttgcggaggctggcaacgcgtc

SEQ ID NO: 2355019 - DNA, 25 bp, Homo sapien
ggatgctcaggccaccgttcccggc

SEQ ID NO: 2355020 - DNA, 25 bp, Homo sapien
gaccgtgagtcgaaagcgacgacgc

SEQ ID NO: 2355021 - DNA, 25 bp, Homo sapien
gttcccggcgcgcagtcgcagctga

SEQ ID NO: 2355022 - DNA, 25 bp, Homo sapien
cctggagtccgacgtggaagttgct

SEQ ID NO: 2355023 - DNA, 25 bp, Homo sapien
cgactcgcattttcagttgtcagat

SEQ ID NO: 2355024 - DNA, 25 bp, Homo sapien
gcccgactcgcattttcagttgtca

SEQ ID NO: 2355025 - DNA, 25 bp, Homo sapien
cgaggcccgactcgcattttcagtt

SEQ ID NO: 2355026 - DNA, 25 bp, Homo sapien
aggcccgactcgcattttcagttgt

SEQ ID NO: 2355027 - DNA, 25 bp, Homo sapien
tggcagcgcggtaccattcctatta

SEQ ID NO: 2355028 - DNA, 25 bp, Homo sapien
gccacagcgaagacaaaaacctctg

SEQ ID NO: 2355029 - DNA, 25 bp, Homo sapien
aggtgcaaggctgctccgcattggc

SEQ ID NO: 2355030 - DNA, 25 bp, Homo sapien
ttacttccaacagtcgaccctcgag

SEQ ID NO: 2355031 - DNA, 25 bp, Homo sapien
aaaacatacatgctcaacctttaaa

SEQ ID NO: 2355032 - DNA, 25 bp, Homo sapien
acatgctcaacctttaaaaatttct

SEQ ID NO: 2355033 - DNA, 25 bp, Homo sapien
acatacatgctcaacctttaaaaat

SEQ ID NO: 2355034 - DNA, 25 bp, Homo sapien
cacatcctataggtgtgcttccttc

SEQ ID NO: 2355035 - DNA, 25 bp, Homo sapien
gaatggatgaaaatctctaccataa

SEQ ID NO: 2355036 - DNA, 25 bp, Homo sapien
gggatcaccgagatacagggtatta

SEQ ID NO: 2355037 - DNA, 25 bp, Homo sapien
ctaagagagtattaacagtagtgac

SEQ ID NO: 2355038 - DNA, 25 bp, Homo sapien
aaaaggcagtccataagcttctgtt

SEQ ID NO: 2355039 - DNA, 25 bp, Homo sapien
ccttgtattcttcaattttagtgta

SEQ ID NO: 2355040 - DNA, 25 bp, Homo sapien
catgtcattgttgtgcagaggccat

SEQ ID NO: 2355041 - DNA, 25 bp, Homo sapien
tgctaatcttccttgtattcttcaa

SEQ ID NO: 2355042 - DNA, 25 bp, Homo sapien
cttcaatttgcatgtcattgttgtg

SEQ ID NO: 2355043 - DNA, 25 bp, Homo sapien
ctcttcttctctcctgaagagggat

SEQ ID NO: 2355044 - DNA, 25 bp, Homo sapien
gtttgtgcatgctaaagaccatggt

SEQ ID NO: 2355045 - DNA, 25 bp, Homo sapien
ttcttctctcctgaagagggatgaa

SEQ ID NO: 2355046 - DNA, 25 bp, Homo sapien
gtgcatgctaaagaccatggtgatt

SEQ ID NO: 2355047 - DNA, 25 bp, Homo sapien
gaggagaataaggatttcaatcttt

SEQ ID NO: 2355048 - DNA, 25 bp, Homo sapien
ggatttcaatctttgactgcgaaca

SEQ ID NO: 2355049 - DNA, 25 bp, Homo sapien
taaggatttcaatctttgactgcga

SEQ ID NO: 2355050 - DNA, 25 bp, Homo sapien
gagaataaggatttcaatctttgac

SEQ ID NO: 2355051 - DNA, 25 bp, Homo sapien
aaaaggtgaaaaattgatataatct

SEQ ID NO: 2355052 - DNA, 25 bp, Homo sapien
aaaggtgaaaaattgatataatctg

SEQ ID NO: 2355053 - DNA, 25 bp, Homo sapien
aattgatataatctgaagagatacc

SEQ ID NO: 2355054 - DNA, 25 bp, Homo sapien
actaaactggccctacacgccttgg

SEQ ID NO: 2355055 - DNA, 25 bp, Homo sapien
tctaaaatcggaagaggtcaggcct

SEQ ID NO: 2355056 - DNA, 25 bp, Homo sapien
tcggaagaggtcaggcctgttcaag

SEQ ID NO: 2355057 - DNA, 25 bp, Homo sapien
cacgccttggtgtctaaaatcggaa

SEQ ID NO: 2355058 - DNA, 25 bp, Homo sapien
agcatccacttgtacacggtggaaa

SEQ ID NO: 2355059 - DNA, 25 bp, Homo sapien
catccacttgtacacggtggaaata

SEQ ID NO: 2355060 - DNA, 25 bp, Homo sapien
gcagcatccacttgtacacggtgga

SEQ ID NO: 2355061 - DNA, 25 bp, Homo sapien
cagcatccacttgtacacggtggaa

SEQ ID NO: 2355062 - DNA, 25 bp, Homo sapien
ggaagacacttcaaccctttataga

SEQ ID NO: 2355063 - DNA, 25 bp, Homo sapien
caaccctttatagagatgtttcatt

SEQ ID NO: 2355064 - DNA, 25 bp, Homo sapien
tcattaatatcagaacggtaaattc

SEQ ID NO: 2355065 - DNA, 25 bp, Homo sapien
cggtaaattcaacggtaggctatca

SEQ ID NO: 2355066 - DNA, 25 bp, Homo sapien
tatttacccgcaaacacaatgtgtt

SEQ ID NO: 2355067 - DNA, 25 bp, Homo sapien
gaacacgcagacagtgagaaacact

SEQ ID NO: 2355068 - DNA, 25 bp, Homo sapien
gaaatcactcttcggctcatggtct

SEQ ID NO: 2355069 - DNA, 25 bp, Homo sapien
gagaaacactcattaggccaaagga

SEQ ID NO: 2355070 - DNA, 25 bp, Homo sapien
ataaattgacaattctgttccttag

SEQ ID NO: 2355071 - DNA, 25 bp, Homo sapien
taataaattgacaattctgttcctt

SEQ ID NO: 2355072 - DNA, 25 bp, Homo sapien
taaattgacaattctgttccttagc

SEQ ID NO: 2355073 - DNA, 25 bp, Homo sapien
cattaataaattgacaattctgttc

SEQ ID NO: 2355074 - DNA, 25 bp, Homo sapien
tgaatgttgcctcagaacctcaaaa

SEQ ID NO: 2355075 - DNA, 25 bp, Homo sapien
ctggcgagtactgaagatctccagt

SEQ ID NO: 2355076 - DNA, 25 bp, Homo sapien
ttgaatgttgcctcagaacctcaaa

SEQ ID NO: 2355077 - DNA, 25 bp, Homo sapien
ctgaagatctccagttgaatgttgc

SEQ ID NO: 2355078 - DNA, 25 bp, Homo sapien
catgaggacgatggttgattaaagc

SEQ ID NO: 2355079 - DNA, 25 bp, Homo sapien
ttctccaattatagacaggctcctc

SEQ ID NO: 2355080 - DNA, 25 bp, Homo sapien
cgatggttgattaaagccaggtaat

SEQ ID NO: 2355081 - DNA, 25 bp, Homo sapien
tttcctttgacatgaggacgatggt

SEQ ID NO: 2355082 - DNA, 25 bp, Homo sapien
cccttgaccccaggaatttgaagct

SEQ ID NO: 2355083 - DNA, 25 bp, Homo sapien
ttgaccccaggaatttgaagcttca

SEQ ID NO: 2355084 - DNA, 25 bp, Homo sapien
ccccaggaatttgaagcttcagtga

SEQ ID NO: 2355085 - DNA, 25 bp, Homo sapien
gaccccaggaatttgaagcttcagt

SEQ ID NO: 2355086 - DNA, 25 bp, Homo sapien
aagagtgggttgtaccagctggttt

SEQ ID NO: 2355087 - DNA, 25 bp, Homo sapien
caaaatagaagtccgcagcactgtt

SEQ ID NO: 2355088 - DNA, 25 bp, Homo sapien
agttatgttctgcagagattgatga

SEQ ID NO: 2355089 - DNA, 25 bp, Homo sapien
cagctggttttcagttatgttctgc

SEQ ID NO: 2355090 - DNA, 25 bp, Homo sapien
ccccacttcttccgtaatttctgag

SEQ ID NO: 2355091 - DNA, 25 bp, Homo sapien
ccacttcttccgtaatttctgagtg

SEQ ID NO: 2355092 - DNA, 25 bp, Homo sapien
cccacttcttccgtaatttctgagt

SEQ ID NO: 2355093 - DNA, 25 bp, Homo sapien
gagagtctttggagaatggcctcac

SEQ ID NO: 2355094 - DNA, 25 bp, Homo sapien
tttccccaggaaataggatggagag

SEQ ID NO: 2355095 - DNA, 25 bp, Homo sapien
gaatagaagatctctttccccagga

SEQ ID NO: 2355096 - DNA, 25 bp, Homo sapien
aaataggatggagagagtctttgga

SEQ ID NO: 2355097 - DNA, 25 bp, Homo sapien
ctgagatattcttgatcaggttgaa

SEQ ID NO: 2355098 - DNA, 25 bp, Homo sapien
ttagcaatcatggtgatttagctca

SEQ ID NO: 2355099 - DNA, 25 bp, Homo sapien
agcaatcatggtgatttagctcatg

SEQ ID NO: 2355100 - DNA, 25 bp, Homo sapien
caatcatggtgatttagctcatggt

SEQ ID NO: 2355101 - DNA, 25 bp, Homo sapien
acaagttagtatagattacatactc

SEQ ID NO: 2355102 - DNA, 25 bp, Homo sapien
gtatagattacatactctttgataa

SEQ ID NO: 2355103 - DNA, 25 bp, Homo sapien
taaaacttgtagagatttccgatgc

SEQ ID NO: 2355104 - DNA, 25 bp, Homo sapien
ttccgatgccagtaaaccatgaaat

SEQ ID NO: 2355105 - DNA, 25 bp, Homo sapien
ttgtgtcactgcacctgagcatagg

SEQ ID NO: 2355106 - DNA, 25 bp, Homo sapien
tttgtgtcactgcacctgagcatag

SEQ ID NO: 2355107 - DNA, 25 bp, Homo sapien
aatgggtaactcctccttagtacag

SEQ ID NO: 2355108 - DNA, 25 bp, Homo sapien
aatgatgttatgatttgtgaacgcc

SEQ ID NO: 2355109 - DNA, 25 bp, Homo sapien
tttgaaatgtacagcactctactat

SEQ ID NO: 2355110 - DNA, 25 bp, Homo sapien
tgctgtgcaatagaatgcacaaaaa

SEQ ID NO: 2355111 - DNA, 25 bp, Homo sapien
tgaaataattcagtcaagctagtta

SEQ ID NO: 2355112 - DNA, 25 bp, Homo sapien
agaaacctggatgctacagattcat

SEQ ID NO: 2355113 - DNA, 25 bp, Homo sapien
tgactggagtaagttgggactgccc

SEQ ID NO: 2355114 - DNA, 25 bp, Homo sapien
aacctggatgctacagattcatctt

SEQ ID NO: 2355115 - DNA, 25 bp, Homo sapien
ctttattcatgactggagtaagttg

SEQ ID NO: 2355116 - DNA, 25 bp, Homo sapien
tgtccaggggcgacaatacccatca

SEQ ID NO: 2355117 - DNA, 25 bp, Homo sapien
ccacgatggtcgtggcccagacata

SEQ ID NO: 2355118 - DNA, 25 bp, Homo sapien
gacatagaaggggacccactgtcct

SEQ ID NO: 2355119 - DNA, 25 bp, Homo sapien
tacccatcacaggatgagctttgct

SEQ ID NO: 2355120 - DNA, 25 bp, Homo sapien
ttcttagggtcaaagttgcattcgc

SEQ ID NO: 2355121 - DNA, 25 bp, Homo sapien
cagctcattcttgccgatgccatct

SEQ ID NO: 2355122 - DNA, 25 bp, Homo sapien
ccatcttgccattgttggtctatga

SEQ ID NO: 2355123 - DNA, 25 bp, Homo sapien
gaaactattcaagaagccagatatt

SEQ ID NO: 2355124 - DNA, 25 bp, Homo sapien
caggagtccttttgcaccatggaca

SEQ ID NO: 2355125 - DNA, 25 bp, Homo sapien
tgtagcctgcacgatgagattctgg

SEQ ID NO: 2355126 - DNA, 25 bp, Homo sapien
ctgcagctgctatttgtagcctgca

SEQ ID NO: 2355127 - DNA, 25 bp, Homo sapien
gcaccatggacatgtaaaggccagc

SEQ ID NO: 2355128 - DNA, 25 bp, Homo sapien
cttccctccacgactagttgacaga

SEQ ID NO: 2355129 - DNA, 25 bp, Homo sapien
ccacgactagttgacagaaacccca

SEQ ID NO: 2355130 - DNA, 25 bp, Homo sapien
tgcaggtcggtgtgacaagcagttg

SEQ ID NO: 2355131 - DNA, 25 bp, Homo sapien
caggcgagagatggtgcaggtcggt

SEQ ID NO: 2355132 - DNA, 25 bp, Homo sapien
cctctttcttagtgggttctggcat

SEQ ID NO: 2355133 - DNA, 25 bp, Homo sapien
gggtagttgacttcaacattcatgt

SEQ ID NO: 2355134 - DNA, 25 bp, Homo sapien
cttcagtctgggtagttgacttcaa

SEQ ID NO: 2355135 - DNA, 25 bp, Homo sapien
cattcatgtttgattcggggatact

SEQ ID NO: 2355136 - DNA, 25 bp, Homo sapien
cagtctgggtagttgacttcaacat

SEQ ID NO: 2355137 - DNA, 25 bp, Homo sapien
tattccaaattaaagttagtgtgta

SEQ ID NO: 2355138 - DNA, 25 bp, Homo sapien
ctgtattccaaattaaagttagtgt

SEQ ID NO: 2355139 - DNA, 25 bp, Homo sapien
aattacacgggtccaccaccacgct

SEQ ID NO: 2355140 - DNA, 25 bp, Homo sapien
agtaaatatatgacacactaataca

SEQ ID NO: 2355141 - DNA, 25 bp, Homo sapien
agaaatccataaccgtcccctggca

SEQ ID NO: 2355142 - DNA, 25 bp, Homo sapien
acagtagatggggacttttcttctc

SEQ ID NO: 2355143 - DNA, 25 bp, Homo sapien
taaatatagttgactggcaggctgt

SEQ ID NO: 2355144 - DNA, 25 bp, Homo sapien
tctccttgctgccaagaaatccata

SEQ ID NO: 2355145 - DNA, 25 bp, Homo sapien
atttggttaggtctacactccccag

SEQ ID NO: 2355146 - DNA, 25 bp, Homo sapien
attattatttggttaggtctacact

SEQ ID NO: 2355147 - DNA, 25 bp, Homo sapien
tccccaggttcgcattcaaagccgt

SEQ ID NO: 2355148 - DNA, 25 bp, Homo sapien
ggttcgcattcaaagccgttgttca

SEQ ID NO: 2355149 - DNA, 25 bp, Homo sapien
gagcatagcatttcccgtgccaaat

SEQ ID NO: 2355150 - DNA, 25 bp, Homo sapien
gcagtctggctatgaagtctgacaa

SEQ ID NO: 2355151 - DNA, 25 bp, Homo sapien
tctggttattacagagcagtctggc

SEQ ID NO: 2355152 - DNA, 25 bp, Homo sapien
tccaagtaggtaaaggcatccacat

SEQ ID NO: 2355153 - DNA, 25 bp, Homo sapien
ggggctggggctggcacttcatttt

SEQ ID NO: 2355154 - DNA, 25 bp, Homo sapien
gtggggctggggctggcacttcatt

SEQ ID NO: 2355155 - DNA, 25 bp, Homo sapien
ggggtggggctggggctggcacttc

SEQ ID NO: 2355156 - DNA, 25 bp, Homo sapien
gggtggggctggggctggcacttca

SEQ ID NO: 2355157 - DNA, 25 bp, Homo sapien
taggttaaagctcacagctcacagc

SEQ ID NO: 2355158 - DNA, 25 bp, Homo sapien
cagggtagagatggatccactcccc

SEQ ID NO: 2355159 - DNA, 25 bp, Homo sapien
tttgcagcccaaacgtgtgtgagtg

SEQ ID NO: 2355160 - DNA, 25 bp, Homo sapien
ccaaatcatgctgggatggaccctc

SEQ ID NO: 2355161 - DNA, 25 bp, Homo sapien
ctctgtactcatttcctgttgccag

SEQ ID NO: 2355162 - DNA, 25 bp, Homo sapien
ggatctctgtactcatttcctgttg

SEQ ID NO: 2355163 - DNA, 25 bp, Homo sapien
tcactggatctctgtactcatttcc

SEQ ID NO: 2355164 - DNA, 25 bp, Homo sapien
aagggtctcactggatctctgtact

SEQ ID NO: 2355165 - DNA, 25 bp, Homo sapien
ctgtgtagaaagtacaagcatattt

SEQ ID NO: 2355166 - DNA, 25 bp, Homo sapien
gtgtagaaagtacaagcatattttt

SEQ ID NO: 2355167 - DNA, 25 bp, Homo sapien
tgtgtagaaagtacaagcatatttt

SEQ ID NO: 2355168 - DNA, 25 bp, Homo sapien
tggtgtagttccggcctccttctct

SEQ ID NO: 2355169 - DNA, 25 bp, Homo sapien
ctggtgtagttccggcctccttctc

SEQ ID NO: 2355170 - DNA, 25 bp, Homo sapien
tttgctggtgtagttccggcctcct

SEQ ID NO: 2355171 - DNA, 25 bp, Homo sapien
cttttgctggtgtagttccggcctc

SEQ ID NO: 2355172 - DNA, 25 bp, Homo sapien
cattatactgattgggacttgcaga

SEQ ID NO: 2355173 - DNA, 25 bp, Homo sapien
tttgctggcatctcaacaagtgctt

SEQ ID NO: 2355174 - DNA, 25 bp, Homo sapien
tagcatgcatgtcgaaacttggaaa

SEQ ID NO: 2355175 - DNA, 25 bp, Homo sapien
tgtaatggaaacttagcaatgcacc

SEQ ID NO: 2355176 - DNA, 25 bp, Homo sapien
cctggccggcaatctgttttttaag

SEQ ID NO: 2355177 - DNA, 25 bp, Homo sapien
taagactatttggaggacatgcaca

SEQ ID NO: 2355178 - DNA, 25 bp, Homo sapien
gaatgcagcgcttcagagtatcatg

SEQ ID NO: 2355179 - DNA, 25 bp, Homo sapien
gtctagatcacccaacagtagtgtc

SEQ ID NO: 2355180 - DNA, 25 bp, Homo sapien
tttttctcctgaactaatatgcatg

SEQ ID NO: 2355181 - DNA, 25 bp, Homo sapien
gcattcacattccacaacattgtgc

SEQ ID NO: 2355182 - DNA, 25 bp, Homo sapien
catgcattcacattccacaacattg

SEQ ID NO: 2355183 - DNA, 25 bp, Homo sapien
ctcccaaacttagttcattttgaat

SEQ ID NO: 2355184 - DNA, 25 bp, Homo sapien
cttaattggcagaggttcagtgggc

SEQ ID NO: 2355185 - DNA, 25 bp, Homo sapien
ttcagtgggctggagctttgtgctt

SEQ ID NO: 2355186 - DNA, 25 bp, Homo sapien
acgtcggtattgtttcctgttagca

SEQ ID NO: 2355187 - DNA, 25 bp, Homo sapien
tgctataagaaaaagaacgtcggta

SEQ ID NO: 2355188 - DNA, 25 bp, Homo sapien
aaaagtcaaggagaaaagacttcat

SEQ ID NO: 2355189 - DNA, 25 bp, Homo sapien
caagaaataggagtaaaaagtcaag

SEQ ID NO: 2355190 - DNA, 25 bp, Homo sapien
aaggcgctaggcggggagacttcct

SEQ ID NO: 2355191 - DNA, 25 bp, Homo sapien
cgctaggcggggagacttcctcttc

SEQ ID NO: 2355192 - DNA, 25 bp, Homo sapien
ggcaaggcgctaggcggggagactt

SEQ ID NO: 2355193 - DNA, 25 bp, Homo sapien
aggcaaggcgctaggcggggagact

SEQ ID NO: 2355194 - DNA, 25 bp, Homo sapien
tcagtagagctccaagtatgaaagc

SEQ ID NO: 2355195 - DNA, 25 bp, Homo sapien
agtgctgacttcaaccttcttggat

SEQ ID NO: 2355196 - DNA, 25 bp, Homo sapien
caagttggcttggatggaaaatcag

SEQ ID NO: 2355197 - DNA, 25 bp, Homo sapien
tctcctctggtgataggaaggaaaa

SEQ ID NO: 2355198 - DNA, 25 bp, Homo sapien
tctctccagggcccgactacccaaa

SEQ ID NO: 2355199 - DNA, 25 bp, Homo sapien
tttctctccagggcccgactaccca

SEQ ID NO: 2355200 - DNA, 25 bp, Homo sapien
ctgaatcttttctctccagggcccg

SEQ ID NO: 2355201 - DNA, 25 bp, Homo sapien
atcttttctctccagggcccgacta

SEQ ID NO: 2355202 - DNA, 25 bp, Homo sapien
caatacagcttcaagaaatgagctc

SEQ ID NO: 2355203 - DNA, 25 bp, Homo sapien
tcttgtaagaggaaacgtaatgaaa

SEQ ID NO: 2355204 - DNA, 25 bp, Homo sapien
taaaaatgatagaacaaacctgtgg

SEQ ID NO: 2355205 - DNA, 25 bp, Homo sapien
ccttgaatgcgtgtgtatcatgcaa

SEQ ID NO: 2355206 - DNA, 25 bp, Homo sapien
caggctcttcttaggcagtcttacc

SEQ ID NO: 2355207 - DNA, 25 bp, Homo sapien
tctcaccaacgctgtagcttttctt

SEQ ID NO: 2355208 - DNA, 25 bp, Homo sapien
taacaggtaaacaatggtggccagt

SEQ ID NO: 2355209 - DNA, 25 bp, Homo sapien
aaaaggattatttcagggccaggct

SEQ ID NO: 2355210 - DNA, 25 bp, Homo sapien
atggacagctgggagttggcattct

SEQ ID NO: 2355211 - DNA, 25 bp, Homo sapien
caggaggagtttcgacaagggtcca

SEQ ID NO: 2355212 - DNA, 25 bp, Homo sapien
gacagctgggagttggcattctgct

SEQ ID NO: 2355213 - DNA, 25 bp, Homo sapien
agatggacagctgggagttggcatt

SEQ ID NO: 2355214 - DNA, 25 bp, Homo sapien
tttaacaagcgtcatttgttttgct

SEQ ID NO: 2355215 - DNA, 25 bp, Homo sapien
agaagcataagggattcagcttgct

SEQ ID NO: 2355216 - DNA, 25 bp, Homo sapien
ctagaagaagcataagggattcagc

SEQ ID NO: 2355217 - DNA, 25 bp, Homo sapien
gaagaagcataagggattcagcttg

SEQ ID NO: 2355218 - DNA, 25 bp, Homo sapien
ccttgactttggctatgaaggtgat

SEQ ID NO: 2355219 - DNA, 25 bp, Homo sapien
tctcagaagatcttcagccttgact

SEQ ID NO: 2355220 - DNA, 25 bp, Homo sapien
ctgaaggtgcttcccggctttgctg

SEQ ID NO: 2355221 - DNA, 25 bp, Homo sapien
tgatagtgggttttctcagaagatc

SEQ ID NO: 2355222 - DNA, 25 bp, Homo sapien
taggtgacctcgcatctgtaatttc

SEQ ID NO: 2355223 - DNA, 25 bp, Homo sapien
gcatctgtaatttcctgcaaagtta

SEQ ID NO: 2355224 - DNA, 25 bp, Homo sapien
gccttgatgatctgcatctcaaatg

SEQ ID NO: 2355225 - DNA, 25 bp, Homo sapien
cagctgtcaaacttatccttatagg

SEQ ID NO: 2355226 - DNA, 25 bp, Homo sapien
caatgtttggagtagtcccagtaga

SEQ ID NO: 2355227 - DNA, 25 bp, Homo sapien
gatgtcaatgtttggagtagtccca

SEQ ID NO: 2355228 - DNA, 25 bp, Homo sapien
tgtcaatgtttggagtagtcccagt

SEQ ID NO: 2355229 - DNA, 25 bp, Homo sapien
ctgatgtcaatgtttggagtagtcc

SEQ ID NO: 2355230 - DNA, 25 bp, Homo sapien
agaccactaaagtcaagttctcctg

SEQ ID NO: 2355231 - DNA, 25 bp, Homo sapien
actaaagtcaagttctcctgcatcc

SEQ ID NO: 2355232 - DNA, 25 bp, Homo sapien
ctaaagtcaagttctcctgcatcct

SEQ ID NO: 2355233 - DNA, 25 bp, Homo sapien
gaccactaaagtcaagttctcctgc

SEQ ID NO: 2355234 - DNA, 25 bp, Homo sapien
ttctaccaaatcatatgtgcagtct

SEQ ID NO: 2355235 - DNA, 25 bp, Homo sapien
cagttttcatatctcttcgtcccca

SEQ ID NO: 2355236 - DNA, 25 bp, Homo sapien
gacttccaggccacaatgtctcact

SEQ ID NO: 2355237 - DNA, 25 bp, Homo sapien
taggtctgcctcttacaatgtgtat

SEQ ID NO: 2355238 - DNA, 25 bp, Homo sapien
gagactccagtccatgtttttacca

SEQ ID NO: 2355239 - DNA, 25 bp, Homo sapien
tttcctcccacaaaagtgtatctat

SEQ ID NO: 2355240 - DNA, 25 bp, Homo sapien
tttgccacctactgtgaaccaagct

SEQ ID NO: 2355241 - DNA, 25 bp, Homo sapien
tgttgtctccttatgaatataaact

SEQ ID NO: 2355242 - DNA, 25 bp, Homo sapien
caagcctcgggatagacctgtataa

SEQ ID NO: 2355243 - DNA, 25 bp, Homo sapien
caggaagatctttcgttgtacagag

SEQ ID NO: 2355244 - DNA, 25 bp, Homo sapien
taccatggtggctgcacatgaccct

SEQ ID NO: 2355245 - DNA, 25 bp, Homo sapien
tataacaggatgctgcccaaaagat

SEQ ID NO: 2355246 - DNA, 25 bp, Homo sapien
gaaggcgatcttctcgtactcactg

SEQ ID NO: 2355247 - DNA, 25 bp, Homo sapien
cgcgcaggtcggtgattccatactg

SEQ ID NO: 2355248 - DNA, 25 bp, Homo sapien
ttgagtcgcttgagcatgccgcgca

SEQ ID NO: 2355249 - DNA, 25 bp, Homo sapien
tctgcgcatgcgcttgagtcgcttg

SEQ ID NO: 2355250 - DNA, 25 bp, Homo sapien
caacaaacctcactctgcctccttt

SEQ ID NO: 2355251 - DNA, 25 bp, Homo sapien
tgcctcctttgtcaacctgatatgc

SEQ ID NO: 2355252 - DNA, 25 bp, Homo sapien
ttggtactgggtcgaatttcttgac

SEQ ID NO: 2355253 - DNA, 25 bp, Homo sapien
tgtcaacctgatatgcaggatcaag

SEQ ID NO: 2355254 - DNA, 25 bp, Homo sapien
tcaccggctgtcacataatactctg

SEQ ID NO: 2355255 - DNA, 25 bp, Homo sapien
ggcatcctttgtgttcaaagatgta

SEQ ID NO: 2355256 - DNA, 25 bp, Homo sapien
cagttattgataaacaggattctct

SEQ ID NO: 2355257 - DNA, 25 bp, Homo sapien
cttacgaagagctcagtggaacatt

SEQ ID NO: 2355258 - DNA, 25 bp, Homo sapien
tcactttgatcattatccctgggag

SEQ ID NO: 2355259 - DNA, 25 bp, Homo sapien
gagaagaagccaacagctcctggtg

SEQ ID NO: 2355260 - DNA, 25 bp, Homo sapien
gggagaagaagccaacagctcctgg

SEQ ID NO: 2355261 - DNA, 25 bp, Homo sapien
agaagccaacagctcctggtgacca

SEQ ID NO: 2355262 - DNA, 25 bp, Homo sapien
tgtttggtcaccataattggaggct

SEQ ID NO: 2355263 - DNA, 25 bp, Homo sapien
taagcagttgtatcttccagctgtt

SEQ ID NO: 2355264 - DNA, 25 bp, Homo sapien
ctctctccccacaataagcagttgt

SEQ ID NO: 2355265 - DNA, 25 bp, Homo sapien
tcatcttcagacacctcacattcta

SEQ ID NO: 2355266 - DNA, 25 bp, Homo sapien
ctttgttgctccctctatgatcaag

SEQ ID NO: 2355267 - DNA, 25 bp, Homo sapien
cggtatcttgattttggaccaggga

SEQ ID NO: 2355268 - DNA, 25 bp, Homo sapien
cactaagtttagcagatgattgtcc

SEQ ID NO: 2355269 - DNA, 25 bp, Homo sapien
gattgtcctcctgttgtcattactg

SEQ ID NO: 2355270 - DNA, 25 bp, Homo sapien
acagtctgatcagtcagaggtgtca

SEQ ID NO: 2355271 - DNA, 25 bp, Homo sapien
gatttacagtctgatcagtcagagg

SEQ ID NO: 2355272 - DNA, 25 bp, Homo sapien
tccaagatttacagtctgatcagtc

SEQ ID NO: 2355273 - DNA, 25 bp, Homo sapien
caagatttacagtctgatcagtcag

SEQ ID NO: 2355274 - DNA, 25 bp, Homo sapien
cttgtgaaccacctttagacggtca

SEQ ID NO: 2355275 - DNA, 25 bp, Homo sapien
tgaaccacctttagacggtcactct

SEQ ID NO: 2355276 - DNA, 25 bp, Homo sapien
cacctttagacggtcactctcctga

SEQ ID NO: 2355277 - DNA, 25 bp, Homo sapien
ttagacggtcactctcctgaacagg

SEQ ID NO: 2355278 - DNA, 25 bp, Homo sapien
tgagggcattggctatcactaactt

SEQ ID NO: 2355279 - DNA, 25 bp, Homo sapien
ggtgcaaatacataatcaccttcat

SEQ ID NO: 2355280 - DNA, 25 bp, Homo sapien
gcagagtaacattgtaggcatcagg

SEQ ID NO: 2355281 - DNA, 25 bp, Homo sapien
gcattggctatcactaacttgtgga

SEQ ID NO: 2355282 - DNA, 25 bp, Homo sapien
tccccggctccacatggctttagga

SEQ ID NO: 2355283 - DNA, 25 bp, Homo sapien
gctttaggaggtggttctccgctga

SEQ ID NO: 2355284 - DNA, 25 bp, Homo sapien
ttctccgctgatggggatctcaaga

SEQ ID NO: 2355285 - DNA, 25 bp, Homo sapien
gatctcaagacgaagcttgtttcct

SEQ ID NO: 2355286 - DNA, 25 bp, Homo sapien
taaccttgatgcttgcatgtgcctc

SEQ ID NO: 2355287 - DNA, 25 bp, Homo sapien
attctgttcttatccggccactgcc

SEQ ID NO: 2355288 - DNA, 25 bp, Homo sapien
gatgtggtaaacaccagagtcatct

SEQ ID NO: 2355289 - DNA, 25 bp, Homo sapien
gctatatcaatgaccagagtgctgc

SEQ ID NO: 2355290 - DNA, 25 bp, Homo sapien
gcctccgtcgtaggcaggaggctcc

SEQ ID NO: 2355291 - DNA, 25 bp, Homo sapien
acagtcggtgccactggaggatcag

SEQ ID NO: 2355292 - DNA, 25 bp, Homo sapien
ctaggattggagagcctccgtcgta

SEQ ID NO: 2355293 - DNA, 25 bp, Homo sapien
aggaggctcccagttcatgatacac

SEQ ID NO: 2355294 - DNA, 25 bp, Homo sapien
aagatgcggacctcataggccacac

SEQ ID NO: 2355295 - DNA, 25 bp, Homo sapien
cctggagggcatactgggcttggag

SEQ ID NO: 2355296 - DNA, 25 bp, Homo sapien
tcatccacctggagctttgtttctt

SEQ ID NO: 2355297 - DNA, 25 bp, Homo sapien
gagatgccaatggcattgactgcaa

SEQ ID NO: 2355298 - DNA, 25 bp, Homo sapien
tcaaagcaatactctagcacatagc

SEQ ID NO: 2355299 - DNA, 25 bp, Homo sapien
agtccacagtcagaagagtaggagg

SEQ ID NO: 2355300 - DNA, 25 bp, Homo sapien
tcgtgtcagtgacagagtccacagt

SEQ ID NO: 2355301 - DNA, 25 bp, Homo sapien
gcgccacctcatcgtgacagtcgtg

SEQ ID NO: 2355302 - DNA, 25 bp, Homo sapien
caaagagatttgtcctcagagcagt

SEQ ID NO: 2355303 - DNA, 25 bp, Homo sapien
gaataatatcgtatcagcagtcagc

SEQ ID NO: 2355304 - DNA, 25 bp, Homo sapien
gactgtggcttctgacctgaggcac

SEQ ID NO: 2355305 - DNA, 25 bp, Homo sapien
tcagagcagtgacggaagagaccaa

SEQ ID NO: 2355306 - DNA, 25 bp, Homo sapien
tcatcagactgttttgctgatgtac

SEQ ID NO: 2355307 - DNA, 25 bp, Homo sapien
ttcatcagactgttttgctgatgta

SEQ ID NO: 2355308 - DNA, 25 bp, Homo sapien
ttggcagacctgtgatggtgaactt

SEQ ID NO: 2355309 - DNA, 25 bp, Homo sapien
gtgatggtgaacttcgtcttgtcaa

SEQ ID NO: 2355310 - DNA, 25 bp, Homo sapien
gttggcagacctgtgatggtgaact

SEQ ID NO: 2355311 - DNA, 25 bp, Homo sapien
ggtgaacttcgtcttgtcaatcaga

SEQ ID NO: 2355312 - DNA, 25 bp, Homo sapien
ctatgatttccttcacgagaatggg

SEQ ID NO: 2355313 - DNA, 25 bp, Homo sapien
ccttcacgagaatgggctgagaata

SEQ ID NO: 2355314 - DNA, 25 bp, Homo sapien
gctgcattaacagccttcacacgca

SEQ ID NO: 2355315 - DNA, 25 bp, Homo sapien
agaatagtacttgggctcgctggca

SEQ ID NO: 2355316 - DNA, 25 bp, Homo sapien
tataggtttgcttcaggtgtcttgg

SEQ ID NO: 2355317 - DNA, 25 bp, Homo sapien
tcttggaatgcgaatctttggaggt

SEQ ID NO: 2355318 - DNA, 25 bp, Homo sapien
ctggaaaggtataaccagattgaca

SEQ ID NO: 2355319 - DNA, 25 bp, Homo sapien
gcttctccaactctgcggatatagg

SEQ ID NO: 2355320 - DNA, 25 bp, Homo sapien
ctgccttgttgccacttctggtttt

SEQ ID NO: 2355321 - DNA, 25 bp, Homo sapien
ccttgttgccacttctggttttatt

SEQ ID NO: 2355322 - DNA, 25 bp, Homo sapien
tgccttgttgccacttctggtttta

SEQ ID NO: 2355323 - DNA, 25 bp, Homo sapien
gccttgttgccacttctggttttat

SEQ ID NO: 2355324 - DNA, 25 bp, Homo sapien
cagtctcagagttgcgaatgtttat

SEQ ID NO: 2355325 - DNA, 25 bp, Homo sapien
gatgcggtctccacgaatttgtcca

SEQ ID NO: 2355326 - DNA, 25 bp, Homo sapien
gcagatcatatttcccagagtggct

SEQ ID NO: 2355327 - DNA, 25 bp, Homo sapien
tgtccactttgacttgcagatcata

SEQ ID NO: 2355328 - DNA, 25 bp, Homo sapien
gacatcctcaatcttcacaatttgg

SEQ ID NO: 2355329 - DNA, 25 bp, Homo sapien
gagtccatgtgagagcgacattttc

SEQ ID NO: 2355330 - DNA, 25 bp, Homo sapien
catgtgagagcgacattttctcccc

SEQ ID NO: 2355331 - DNA, 25 bp, Homo sapien
tgaatggtatagcctgtgatagcag

SEQ ID NO: 2355332 - DNA, 25 bp, Homo sapien
ccttttgctactgatgaaccagaga

SEQ ID NO: 2355333 - DNA, 25 bp, Homo sapien
cttttgctactgatgaaccagagaa

SEQ ID NO: 2355334 - DNA, 25 bp, Homo sapien
tttgctactgatgaaccagagaaag

SEQ ID NO: 2355335 - DNA, 25 bp, Homo sapien
ttttgctactgatgaaccagagaaa

SEQ ID NO: 2355336 - DNA, 25 bp, Homo sapien
atcacttctccatagccccagttgg

SEQ ID NO: 2355337 - DNA, 25 bp, Homo sapien
tgtggtcttaagtagcaatgctggg

SEQ ID NO: 2355338 - DNA, 25 bp, Homo sapien
agtgattgtggtcacgtgtggtcct

SEQ ID NO: 2355339 - DNA, 25 bp, Homo sapien
cgtgtggtccttatacatgtggtct

SEQ ID NO: 2355340 - DNA, 25 bp, Homo sapien
tgataatgctcaatgacagtaaacc

SEQ ID NO: 2355341 - DNA, 25 bp, Homo sapien
gaccaattcagtaatggtggcactg

SEQ ID NO: 2355342 - DNA, 25 bp, Homo sapien
cctggcgatcactgcactctcttta

SEQ ID NO: 2355343 - DNA, 25 bp, Homo sapien
actctctttagtcatggtggcatcc

SEQ ID NO: 2355344 - DNA, 25 bp, Homo sapien
taggtgttaaccaaaggctgagtaa

SEQ ID NO: 2355345 - DNA, 25 bp, Homo sapien
cacactgcagtttagggtggcattg

SEQ ID NO: 2355346 - DNA, 25 bp, Homo sapien
cattgtaaccagctatggcataggt

SEQ ID NO: 2355347 - DNA, 25 bp, Homo sapien
gctgagtaaacatgggtgcctctga

SEQ ID NO: 2355348 - DNA, 25 bp, Homo sapien
cagggactttaactgatgtgataga

SEQ ID NO: 2355349 - DNA, 25 bp, Homo sapien
tacaagacagggactttaactgatg

SEQ ID NO: 2355350 - DNA, 25 bp, Homo sapien
aactgatgtgatagaagaacatggt

SEQ ID NO: 2355351 - DNA, 25 bp, Homo sapien
ctgatgtgatagaagaacatggtac

SEQ ID NO: 2355352 - DNA, 25 bp, Homo sapien
gacgacttccctatttctgatcaag

SEQ ID NO: 2355353 - DNA, 25 bp, Homo sapien
ttaacctatcgcagacagtgtagtg

SEQ ID NO: 2355354 - DNA, 25 bp, Homo sapien
actttctgtcttgcacccagggata

SEQ ID NO: 2355355 - DNA, 25 bp, Homo sapien
tcttcaactggatatgatagctccc

SEQ ID NO: 2355356 - DNA, 25 bp, Homo sapien
tattaatagaccatcaaagccagtg

SEQ ID NO: 2355357 - DNA, 25 bp, Homo sapien
tgaagaaacttaggtcaaaacatat

SEQ ID NO: 2355358 - DNA, 25 bp, Homo sapien
agaaacttaggtcaaaacatatctg

SEQ ID NO: 2355359 - DNA, 25 bp, Homo sapien
tctgtaattggcatattaatagacc

SEQ ID NO: 2355360 - DNA, 25 bp, Homo sapien
agcagtaagtgcctccatcataggg

SEQ ID NO: 2355361 - DNA, 25 bp, Homo sapien
gaacatcctgtatcttggatcatcc

SEQ ID NO: 2355362 - DNA, 25 bp, Homo sapien
ggcttgcgaatttccagggtacaga

SEQ ID NO: 2355363 - DNA, 25 bp, Homo sapien
aaggtcattgactgctttgcagcag

SEQ ID NO: 2355364 - DNA, 25 bp, Homo sapien
gcagtttagaaaccagatgacttgc

SEQ ID NO: 2355365 - DNA, 25 bp, Homo sapien
gtaagggttatctcaatagtaaggc

SEQ ID NO: 2355366 - DNA, 25 bp, Homo sapien
caaaagcatcaacaatactttggaa

SEQ ID NO: 2355367 - DNA, 25 bp, Homo sapien
tactttggaactaataaggctagca

SEQ ID NO: 2355368 - DNA, 25 bp, Homo sapien
ttgtccaggggtatttactccttga

SEQ ID NO: 2355369 - DNA, 25 bp, Homo sapien
ctccaggaagactggttgtccaggg

SEQ ID NO: 2355370 - DNA, 25 bp, Homo sapien
ccaggggtatttactccttgatata

SEQ ID NO: 2355371 - DNA, 25 bp, Homo sapien
aggaagactggttgtccaggggtat

SEQ ID NO: 2355372 - DNA, 25 bp, Homo sapien
aagtagaatatccagtgggatataa

SEQ ID NO: 2355373 - DNA, 25 bp, Homo sapien
cataagcactgtatgccatgagctg

SEQ ID NO: 2355374 - DNA, 25 bp, Homo sapien
aagtcaagctttacatgcaaggtgc

SEQ ID NO: 2355375 - DNA, 25 bp, Homo sapien
cttaatatccttgaataatttggcc

SEQ ID NO: 2355376 - DNA, 25 bp, Homo sapien
aagagcttccaaaccattagcttaa

SEQ ID NO: 2355377 - DNA, 25 bp, Homo sapien
acaatagacaaagtgttagtgtaca

SEQ ID NO: 2355378 - DNA, 25 bp, Homo sapien
agaaaaacatagacaatagacaaag

SEQ ID NO: 2355379 - DNA, 25 bp, Homo sapien
atatatatatcgtgtttttcaacaa

SEQ ID NO: 2355380 - DNA, 25 bp, Homo sapien
gttcccagtagaaccacagcagttt

SEQ ID NO: 2355381 - DNA, 25 bp, Homo sapien
aattcagaatgcttgggtatcaccc

SEQ ID NO: 2355382 - DNA, 25 bp, Homo sapien
cacagagagtttcgattcaagcaca

SEQ ID NO: 2355383 - DNA, 25 bp, Homo sapien
ccacaggcttggtatggcttatgac

SEQ ID NO: 2355384 - DNA, 25 bp, Homo sapien
gaggtacgccttgcaagaggagtct

SEQ ID NO: 2355385 - DNA, 25 bp, Homo sapien
gtctcgcagatacgaatcaattatg

SEQ ID NO: 2355386 - DNA, 25 bp, Homo sapien
gattgcttgagtgtaagtctcgcag

SEQ ID NO: 2355387 - DNA, 25 bp, Homo sapien
aatcaattatgtttggaggtacgcc

SEQ ID NO: 2355388 - DNA, 25 bp, Homo sapien
tcaaccagatttcaaagcagcagag

SEQ ID NO: 2355389 - DNA, 25 bp, Homo sapien
ttctcatttcaaccagatttcaaag

SEQ ID NO: 2355390 - DNA, 25 bp, Homo sapien
gcagagtgcagagagacagtagcca

SEQ ID NO: 2355391 - DNA, 25 bp, Homo sapien
tctcttcaacattaggaggaaagaa

SEQ ID NO: 2355392 - DNA, 25 bp, Homo sapien
aaaatctactagatcaagagaaaga

SEQ ID NO: 2355393 - DNA, 25 bp, Homo sapien
acagatcctggtgtgaagcaggcct

SEQ ID NO: 2355394 - DNA, 25 bp, Homo sapien
tcaacaactccgctttggttagaaa

SEQ ID NO: 2355395 - DNA, 25 bp, Homo sapien
gaagcaggcctgtatgacatcaaca

SEQ ID NO: 2355396 - DNA, 25 bp, Homo sapien
aattcagcagggaggttttacagtc

SEQ ID NO: 2355397 - DNA, 25 bp, Homo sapien
tataagcagcctaactagcttggcc

SEQ ID NO: 2355398 - DNA, 25 bp, Homo sapien
gctgctgcactatggctaagaccca

SEQ ID NO: 2355399 - DNA, 25 bp, Homo sapien
tatttgagttaagcagccagctcgg

SEQ ID NO: 2355400 - DNA, 25 bp, Homo sapien
gcaagggggaacaggctggcttgcc

SEQ ID NO: 2355401 - DNA, 25 bp, Homo sapien
cctgcaagggggaacaggctggctt

SEQ ID NO: 2355402 - DNA, 25 bp, Homo sapien
caggagtgtcctccccctgcaaggg

SEQ ID NO: 2355403 - DNA, 25 bp, Homo sapien
ggaataaagggcaggagtgtcctcc

SEQ ID NO: 2355404 - DNA, 25 bp, Homo sapien
gtcgggcccgcacggcggaggtcga

SEQ ID NO: 2355405 - DNA, 25 bp, Homo sapien
gggtcctgcgactgccgggctggac

SEQ ID NO: 2355406 - DNA, 25 bp, Homo sapien
ggaggtcgaggtcaggccggcctgc

SEQ ID NO: 2355407 - DNA, 25 bp, Homo sapien
actgccgggctggactcaccggtcg

SEQ ID NO: 2355408 - DNA, 25 bp, Homo sapien
gccgccgccaccgagcgcagcccgc

SEQ ID NO: 2355409 - DNA, 25 bp, Homo sapien
cgccgccgccaccgagcgcagcccg

SEQ ID NO: 2355410 - DNA, 25 bp, Homo sapien
ccgccgccaccgagcgcagcccgcg

SEQ ID NO: 2355411 - DNA, 25 bp, Homo sapien
ccgccgccgccaccgagcgcagccc

SEQ ID NO: 2355412 - DNA, 25 bp, Homo sapien
ctcagccagcgcggcgcggacccgg

SEQ ID NO: 2355413 - DNA, 25 bp, Homo sapien
tgagcacgagcgtggtgaccacgtt

SEQ ID NO: 2355414 - DNA, 25 bp, Homo sapien
tgtagcggtgctcctccagtcgccg

SEQ ID NO: 2355415 - DNA, 25 bp, Homo sapien
tgaccacgttgacggcgagccccag

SEQ ID NO: 2355416 - DNA, 25 bp, Homo sapien
catccagagcgggatccactggagc

SEQ ID NO: 2355417 - DNA, 25 bp, Homo sapien
ggctcgggcgatcggccagccctac

SEQ ID NO: 2355418 - DNA, 25 bp, Homo sapien
agcgcatctggggcccggctcgggc

SEQ ID NO: 2355419 - DNA, 25 bp, Homo sapien
tcagccgcgcgtgggtccgcccttc

SEQ ID NO: 2355420 - DNA, 25 bp, Homo sapien
cccggctcgggcgatcggccagccc

SEQ ID NO: 2355421 - DNA, 25 bp, Homo sapien
catctaaatcgaaaaaccttatgtg

SEQ ID NO: 2355422 - DNA, 25 bp, Homo sapien
gcatcatgcttaaaaacgtatcaaa

SEQ ID NO: 2355423 - DNA, 25 bp, Homo sapien
gcctatatgagtagataagcccaag

SEQ ID NO: 2355424 - DNA, 25 bp, Homo sapien
gcactcagtattaaagcctatatga

SEQ ID NO: 2355425 - DNA, 25 bp, Homo sapien
ggtcttggctcagtttaggaaccag

SEQ ID NO: 2355426 - DNA, 25 bp, Homo sapien
tcagtttaggaaccagcatttgaga

SEQ ID NO: 2355427 - DNA, 25 bp, Homo sapien
cactgctttcgacccagacctttgg

SEQ ID NO: 2355428 - DNA, 25 bp, Homo sapien
gcatttgagaagagcacatccattt

SEQ ID NO: 2355429 - DNA, 25 bp, Homo sapien
tcctgcaactgctctaacccaataa

SEQ ID NO: 2355430 - DNA, 25 bp, Homo sapien
gcctaagatgtgcttatgacattgt

SEQ ID NO: 2355431 - DNA, 25 bp, Homo sapien
taacccaataagtgcctaagatgtg

SEQ ID NO: 2355432 - DNA, 25 bp, Homo sapien
gactgattgctccattcctgcaact

SEQ ID NO: 2355433 - DNA, 25 bp, Homo sapien
caagagattctacgatttttaaaag

SEQ ID NO: 2355434 - DNA, 25 bp, Homo sapien
cacaagagattctacgatttttaaa

SEQ ID NO: 2355435 - DNA, 25 bp, Homo sapien
atggagtttctaatagactgctaac

SEQ ID NO: 2355436 - DNA, 25 bp, Homo sapien
gagattctacgatttttaaaagaga

SEQ ID NO: 2355437 - DNA, 25 bp, Homo sapien
gctaaatacgtagatgatgaaaatc

SEQ ID NO: 2355438 - DNA, 25 bp, Homo sapien
tctgtaggagctaaatacgtagatg

SEQ ID NO: 2355439 - DNA, 25 bp, Homo sapien
tgtaggagctaaatacgtagatgat

SEQ ID NO: 2355440 - DNA, 25 bp, Homo sapien
ggagctaaatacgtagatgatgaaa

SEQ ID NO: 2355441 - DNA, 25 bp, Homo sapien
cataaaaggtatgtccagtatggtg

SEQ ID NO: 2355442 - DNA, 25 bp, Homo sapien
ataaaaggtatgtccagtatggtgc

SEQ ID NO: 2355443 - DNA, 25 bp, Homo sapien
gggaacaagagtttgttcttctggc

SEQ ID NO: 2355444 - DNA, 25 bp, Homo sapien
ttgttcttctggcttgtttcccatc

SEQ ID NO: 2355445 - DNA, 25 bp, Homo sapien
gtttcccatcaatagcatccagtga

SEQ ID NO: 2355446 - DNA, 25 bp, Homo sapien
cttgtttcccatcaatagcatccag

SEQ ID NO: 2355447 - DNA, 25 bp, Homo sapien
gaaagagagtcacagccatggtcaa

SEQ ID NO: 2355448 - DNA, 25 bp, Homo sapien
gataagttcctaagcgagcggcaat

SEQ ID NO: 2355449 - DNA, 25 bp, Homo sapien
gaaacataagtctgccaatgagcgc

SEQ ID NO: 2355450 - DNA, 25 bp, Homo sapien
ttccaaatctcaacatgcctgaaac

SEQ ID NO: 2355451 - DNA, 25 bp, Homo sapien
gagcggcaattgaagctcccactgc

SEQ ID NO: 2355452 - DNA, 25 bp, Homo sapien
acatgcagagtacctaaaagactta

SEQ ID NO: 2355453 - DNA, 25 bp, Homo sapien
cctaaaagacttaaggtgtagcatt

SEQ ID NO: 2355454 - DNA, 25 bp, Homo sapien
tgagtactccgacgaattaatttaa

SEQ ID NO: 2355455 - DNA, 25 bp, Homo sapien
tagcatttatgagtactccgacgaa

SEQ ID NO: 2355456 - DNA, 25 bp, Homo sapien
aaggcgggtcccctttctgtgcaca

SEQ ID NO: 2355457 - DNA, 25 bp, Homo sapien
aaaggaccttagactccacactgca

SEQ ID NO: 2355458 - DNA, 25 bp, Homo sapien
tgatgctggtgactgttgtcaaggc

SEQ ID NO: 2355459 - DNA, 25 bp, Homo sapien
catgaagattcgaccaaaaaaggac

SEQ ID NO: 2355460 - DNA, 25 bp, Homo sapien
cagaggcagataatactatctaatg

SEQ ID NO: 2355461 - DNA, 25 bp, Homo sapien
attatctcaccaattgcctaccaca

SEQ ID NO: 2355462 - DNA, 25 bp, Homo sapien
taccacagttgagagtctcacaatt

SEQ ID NO: 2355463 - DNA, 25 bp, Homo sapien
ctctaagaaagaggcaacagaggca

SEQ ID NO: 2355464 - DNA, 25 bp, Homo sapien
ggcaaatttaaatactcccaggtca

SEQ ID NO: 2355465 - DNA, 25 bp, Homo sapien
tatgctccacgaataggctcactga

SEQ ID NO: 2355466 - DNA, 25 bp, Homo sapien
aaccaatcagcatcagtccctctag

SEQ ID NO: 2355467 - DNA, 25 bp, Homo sapien
tatttaagatgctgatcataccctc

SEQ ID NO: 2355468 - DNA, 25 bp, Homo sapien
tgtgctcacacataggtaacggtat

SEQ ID NO: 2355469 - DNA, 25 bp, Homo sapien
cattattgaattatcagttgactac

SEQ ID NO: 2355470 - DNA, 25 bp, Homo sapien
agttacagaacaacatgtgctcaca

SEQ ID NO: 2355471 - DNA, 25 bp, Homo sapien
tgtaaaaatctctgtaggcttagtt

SEQ ID NO: 2355472 - DNA, 25 bp, Homo sapien
gacaatcactaaagctatctgaatt

SEQ ID NO: 2355473 - DNA, 25 bp, Homo sapien
tgcagacaacacaaagacaatcact

SEQ ID NO: 2355474 - DNA, 25 bp, Homo sapien
cacattgttgctcctccaaatgcag

SEQ ID NO: 2355475 - DNA, 25 bp, Homo sapien
caaatgcagacaacacaaagacaat

SEQ ID NO: 2355476 - DNA, 25 bp, Homo sapien
tactcaagcataggaggaaatgcca

SEQ ID NO: 2355477 - DNA, 25 bp, Homo sapien
ggacttacgttgtggtaacaggaca

SEQ ID NO: 2355478 - DNA, 25 bp, Homo sapien
gaatttatgacagtggcctcctaag

SEQ ID NO: 2355479 - DNA, 25 bp, Homo sapien
gaaactactgaggtcaccaagcagg

SEQ ID NO: 2355480 - DNA, 25 bp, Homo sapien
catgcccaaagtctatttcggagcc

SEQ ID NO: 2355481 - DNA, 25 bp, Homo sapien
tacgggcacaacctgaacagttact

SEQ ID NO: 2355482 - DNA, 25 bp, Homo sapien
caaaaaacgcatagcatccctctgt

SEQ ID NO: 2355483 - DNA, 25 bp, Homo sapien
gggcctatagtagcatatccttgat

SEQ ID NO: 2355484 - DNA, 25 bp, Homo sapien
agtaacaatgaattgccagaagcta

SEQ ID NO: 2355485 - DNA, 25 bp, Homo sapien
acaatgaattgccagaagctagagg

SEQ ID NO: 2355486 - DNA, 25 bp, Homo sapien
caatgaattgccagaagctagaggc

SEQ ID NO: 2355487 - DNA, 25 bp, Homo sapien
taacaatgaattgccagaagctaga

SEQ ID NO: 2355488 - DNA, 25 bp, Homo sapien
ccaggattaaatctctagcaatata

SEQ ID NO: 2355489 - DNA, 25 bp, Homo sapien
gaaagggagacaccatgatttgcat

SEQ ID NO: 2355490 - DNA, 25 bp, Homo sapien
tgcaagcaaaacatctgtgtagtta

SEQ ID NO: 2355491 - DNA, 25 bp, Homo sapien
gcttctaaaaagtagcatcacagga

SEQ ID NO: 2355492 - DNA, 25 bp, Homo sapien
tagccaagtacagtagtgagggggg

SEQ ID NO: 2355493 - DNA, 25 bp, Homo sapien
gactagccaagtacagtagtgaggg

SEQ ID NO: 2355494 - DNA, 25 bp, Homo sapien
gccaagtacagtagtgaggggggaa

SEQ ID NO: 2355495 - DNA, 25 bp, Homo sapien
taactgactaccattggaccagcct

SEQ ID NO: 2355496 - DNA, 25 bp, Homo sapien
caccaccatggaggataacatggaa

SEQ ID NO: 2355497 - DNA, 25 bp, Homo sapien
tactccacctagaaatccaagaact

SEQ ID NO: 2355498 - DNA, 25 bp, Homo sapien
tgccaacaccaccatggaggataac

SEQ ID NO: 2355499 - DNA, 25 bp, Homo sapien
tccaagaactggaaggatcttcaat

SEQ ID NO: 2355500 - DNA, 25 bp, Homo sapien
gccaccgcatctggtcaaaaatatt

SEQ ID NO: 2355501 - DNA, 25 bp, Homo sapien
ttagttcaaggcacaaaatgcagga

SEQ ID NO: 2355502 - DNA, 25 bp, Homo sapien
ggatttacaaaagcatggccaccat

SEQ ID NO: 2355503 - DNA, 25 bp, Homo sapien
tatgtgaaaccattgacctctggcc

SEQ ID NO: 2355504 - DNA, 25 bp, Homo sapien
cttttactacatcgaaggcagtcca

SEQ ID NO: 2355505 - DNA, 25 bp, Homo sapien
gattccagtttgatattcacacacg

SEQ ID NO: 2355506 - DNA, 25 bp, Homo sapien
gagacataatacagtgccacagatg

SEQ ID NO: 2355507 - DNA, 25 bp, Homo sapien
tatgtgaattagtatcctctcggca

SEQ ID NO: 2355508 - DNA, 25 bp, Homo sapien
tatagatcattattgccagtataat

SEQ ID NO: 2355509 - DNA, 25 bp, Homo sapien
cattaggatataaagacaaggatgc

SEQ ID NO: 2355510 - DNA, 25 bp, Homo sapien
taattagtcctatgtggagtccagg

SEQ ID NO: 2355511 - DNA, 25 bp, Homo sapien
gtccaggtgacaagacactggtgcc

SEQ ID NO: 2355512 - DNA, 25 bp, Homo sapien
tatagttcacttttggtcatgtgag

SEQ ID NO: 2355513 - DNA, 25 bp, Homo sapien
gacagtgtcttgaagatatagttca

SEQ ID NO: 2355514 - DNA, 25 bp, Homo sapien
gacctggccccaaaaagacagtgtc

SEQ ID NO: 2355515 - DNA, 25 bp, Homo sapien
cattgccatccatagaacaacatat

SEQ ID NO: 2355516 - DNA, 25 bp, Homo sapien
ctctctcaagcactatattctgtat

SEQ ID NO: 2355517 - DNA, 25 bp, Homo sapien
tctctctcaagcactatattctgta

SEQ ID NO: 2355518 - DNA, 25 bp, Homo sapien
ttagatggctaacgtgtctctctca

SEQ ID NO: 2355519 - DNA, 25 bp, Homo sapien
gatggctaacgtgtctctctcaagc

SEQ ID NO: 2355520 - DNA, 25 bp, Homo sapien
caggtgtaaaccaggccaattactc

SEQ ID NO: 2355521 - DNA, 25 bp, Homo sapien
gtttaccagtctccatcacaggtgt

SEQ ID NO: 2355522 - DNA, 25 bp, Homo sapien
taacacctggtattttaattcagca

SEQ ID NO: 2355523 - DNA, 25 bp, Homo sapien
tactcgttacgacagatgattgatt

SEQ ID NO: 2355524 - DNA, 25 bp, Homo sapien
cttgatgacatgcagtcttgaatat

SEQ ID NO: 2355525 - DNA, 25 bp, Homo sapien
tatatttagatgaaggtgtcttgaa

SEQ ID NO: 2355526 - DNA, 25 bp, Homo sapien
ttgaaatttgcaggcacaaagcact

SEQ ID NO: 2355527 - DNA, 25 bp, Homo sapien
caaagcactaaagtatatcaccata

SEQ ID NO: 2355528 - DNA, 25 bp, Homo sapien
tcatagattcccctaacttcatctc

SEQ ID NO: 2355529 - DNA, 25 bp, Homo sapien
gggatttccttcactcatagattcc

SEQ ID NO: 2355530 - DNA, 25 bp, Homo sapien
tttccttgggctattagtcagtcaa

SEQ ID NO: 2355531 - DNA, 25 bp, Homo sapien
ggctattagtcagtcaatatgcttg

SEQ ID NO: 2355532 - DNA, 25 bp, Homo sapien
taagccatgcacttaagcagtattg

SEQ ID NO: 2355533 - DNA, 25 bp, Homo sapien
tcaaagtaagcaccctcaagatggc

SEQ ID NO: 2355534 - DNA, 25 bp, Homo sapien
aaaaccctgtgtctgataagtctca

SEQ ID NO: 2355535 - DNA, 25 bp, Homo sapien
gacacaatgaaatctacagggttta

SEQ ID NO: 2355536 - DNA, 25 bp, Homo sapien
tttctgaactggtacaacaaattcc

SEQ ID NO: 2355537 - DNA, 25 bp, Homo sapien
tctgaagatttggatccccagagat

SEQ ID NO: 2355538 - DNA, 25 bp, Homo sapien
taccaatagttagttagaggcaaaa

SEQ ID NO: 2355539 - DNA, 25 bp, Homo sapien
cacctcaaatgagtcagtgtgtact

SEQ ID NO: 2355540 - DNA, 25 bp, Homo sapien
caattataacgttagctaagaagca

SEQ ID NO: 2355541 - DNA, 25 bp, Homo sapien
aaatagttatgagttagttagcaac

SEQ ID NO: 2355542 - DNA, 25 bp, Homo sapien
cctgtttcattgtaagacctccctt

SEQ ID NO: 2355543 - DNA, 25 bp, Homo sapien
tccctttctgttaagtcaaatctaa

SEQ ID NO: 2355544 - DNA, 25 bp, Homo sapien
atccatgttattctgatgactcttt

SEQ ID NO: 2355545 - DNA, 25 bp, Homo sapien
catgttattctgatgactctttgaa

SEQ ID NO: 2355546 - DNA, 25 bp, Homo sapien
gactctttgaagaaagaacttgaac

SEQ ID NO: 2355547 - DNA, 25 bp, Homo sapien
tcaatccatgttattctgatgactc

SEQ ID NO: 2355548 - DNA, 25 bp, Homo sapien
caaatgtttaatatctccttccatg

SEQ ID NO: 2355549 - DNA, 25 bp, Homo sapien
agatagcaagtgttcggaagtctct

SEQ ID NO: 2355550 - DNA, 25 bp, Homo sapien
acaaatgtttaatatctccttccat

SEQ ID NO: 2355551 - DNA, 25 bp, Homo sapien
gagatagcaagtgttcggaagtctc

SEQ ID NO: 2355552 - DNA, 25 bp, Homo sapien
tttgctgaaataggtataacactta

SEQ ID NO: 2355553 - DNA, 25 bp, Homo sapien
ttttatttgctgaaataggtataac

SEQ ID NO: 2355554 - DNA, 25 bp, Homo sapien
tatttgctgaaataggtataacact

SEQ ID NO: 2355555 - DNA, 25 bp, Homo sapien
tgctgaaataggtataacacttaaa

SEQ ID NO: 2355556 - DNA, 25 bp, Homo sapien
tccctctagtgaattcatggcacac

SEQ ID NO: 2355557 - DNA, 25 bp, Homo sapien
cccattgtgggcaaagtatactaca

SEQ ID NO: 2355558 - DNA, 25 bp, Homo sapien
tactgatgtgggacttccagtcttt

SEQ ID NO: 2355559 - DNA, 25 bp, Homo sapien
tctacttactggtgcacaaaatgaa

SEQ ID NO: 2355560 - DNA, 25 bp, Homo sapien
ttatacacacacatgttattttaaa

SEQ ID NO: 2355561 - DNA, 25 bp, Homo sapien
aaaaattatacacacacatgttatt

SEQ ID NO: 2355562 - DNA, 25 bp, Homo sapien
aattatacacacacatgttatttta

SEQ ID NO: 2355563 - DNA, 25 bp, Homo sapien
aaaaaattatacacacacatgttat

SEQ ID NO: 2355564 - DNA, 25 bp, Homo sapien
agtgagctgaaatcgtactactgta

SEQ ID NO: 2355565 - DNA, 25 bp, Homo sapien
agctgaaatcgtactactgtactcc

SEQ ID NO: 2355566 - DNA, 25 bp, Homo sapien
ctccagcctgggcgacagcgagacc

SEQ ID NO: 2355567 - DNA, 25 bp, Homo sapien
actccagcctgggcgacagcgagac

SEQ ID NO: 2355568 - DNA, 25 bp, Homo sapien
caatctagaattgttcagagccaga

SEQ ID NO: 2355569 - DNA, 25 bp, Homo sapien
tttaatatatatggccgagcacagt

SEQ ID NO: 2355570 - DNA, 25 bp, Homo sapien
tagcaaattgtagtctgtacccctc

SEQ ID NO: 2355571 - DNA, 25 bp, Homo sapien
tgtacccctcttgttcaggcagaaa

SEQ ID NO: 2355572 - DNA, 25 bp, Homo sapien
tactattctaggatcggcacggtgg

SEQ ID NO: 2355573 - DNA, 25 bp, Homo sapien
gcttctctcaaaactagtaaccaga

SEQ ID NO: 2355574 - DNA, 25 bp, Homo sapien
catttcttagtatttactggtataa

SEQ ID NO: 2355575 - DNA, 25 bp, Homo sapien
aagagactagaaatgtataccaagg

SEQ ID NO: 2355576 - DNA, 25 bp, Homo sapien
tgtctttccaatattgttgaaccaa

SEQ ID NO: 2355577 - DNA, 25 bp, Homo sapien
tctttccaatattgttgaaccaacc

SEQ ID NO: 2355578 - DNA, 25 bp, Homo sapien
ctttccaatattgttgaaccaacct

SEQ ID NO: 2355579 - DNA, 25 bp, Homo sapien
atatttacttgaatatgtgggaaca

SEQ ID NO: 2355580 - DNA, 25 bp, Homo sapien
tactgtgacattaacccagggagac

SEQ ID NO: 2355581 - DNA, 25 bp, Homo sapien
tacgagagcctatgactttgagact

SEQ ID NO: 2355582 - DNA, 25 bp, Homo sapien
gcatctaaatatggtgtcctccgga

SEQ ID NO: 2355583 - DNA, 25 bp, Homo sapien
tgtcaatacagggaagactgcagtc

SEQ ID NO: 2355584 - DNA, 25 bp, Homo sapien
accaggcctcaagtgtactcgcaac

SEQ ID NO: 2355585 - DNA, 25 bp, Homo sapien
cactgcgcctagctgcaattttcga

SEQ ID NO: 2355586 - DNA, 25 bp, Homo sapien
gctccggcggccaaagcaccctggg

SEQ ID NO: 2355587 - DNA, 25 bp, Homo sapien
tagctgcaattttcgattataaaca

SEQ ID NO: 2355588 - DNA, 25 bp, Homo sapien
taataaatgcgccataaatggtggc

SEQ ID NO: 2355589 - DNA, 25 bp, Homo sapien
gtcagccacgttgcattttcccaaa

SEQ ID NO: 2355590 - DNA, 25 bp, Homo sapien
cacaattggtgccagttggaatcct

SEQ ID NO: 2355591 - DNA, 25 bp, Homo sapien
tgctcctggcctctaagatttcgac

SEQ ID NO: 2355592 - DNA, 25 bp, Homo sapien
gcttcacagattagagatggtgcag

SEQ ID NO: 2355593 - DNA, 25 bp, Homo sapien
ccaagttcctggattaggtactcaa

SEQ ID NO: 2355594 - DNA, 25 bp, Homo sapien
gccatacttgaaagcaattggaaaa

SEQ ID NO: 2355595 - DNA, 25 bp, Homo sapien
ggtgaaggcaagctgccatacttga

SEQ ID NO: 2355596 - DNA, 25 bp, Homo sapien
ggatgctgggcttacaaaacatcac

SEQ ID NO: 2355597 - DNA, 25 bp, Homo sapien
gagggatgctgggcttacaaaacat

SEQ ID NO: 2355598 - DNA, 25 bp, Homo sapien
gggatgctgggcttacaaaacatca

SEQ ID NO: 2355599 - DNA, 25 bp, Homo sapien
agggatgctgggcttacaaaacatc

SEQ ID NO: 2355600 - DNA, 25 bp, Homo sapien
gagatgattatattgctcttagcta

SEQ ID NO: 2355601 - DNA, 25 bp, Homo sapien
ttgctcttagctaaaaaagtgacac

SEQ ID NO: 2355602 - DNA, 25 bp, Homo sapien
caatactcctgcttcgaccttccac

SEQ ID NO: 2355603 - DNA, 25 bp, Homo sapien
tcctagtctagtcattagggtgaga

SEQ ID NO: 2355604 - DNA, 25 bp, Homo sapien
tgagcagtcagatggtcagaaccat

SEQ ID NO: 2355605 - DNA, 25 bp, Homo sapien
caatcataggctattcatagactca

SEQ ID NO: 2355606 - DNA, 25 bp, Homo sapien
cctaattaggagcttgataatggga

SEQ ID NO: 2355607 - DNA, 25 bp, Homo sapien
tcagtagaatcattagaacagagga

SEQ ID NO: 2355608 - DNA, 25 bp, Homo sapien
cagattcagcagtcacttgagtgcc

SEQ ID NO: 2355609 - DNA, 25 bp, Homo sapien
cttgagtgcctttactgtgtatcag

SEQ ID NO: 2355610 - DNA, 25 bp, Homo sapien
gaggattgagtttactgttactcag

SEQ ID NO: 2355611 - DNA, 25 bp, Homo sapien
atacagaagaatgttgctttatggg

SEQ ID NO: 2355612 - DNA, 25 bp, Homo sapien
tgatgcttagcagtttggcccgaag

SEQ ID NO: 2355613 - DNA, 25 bp, Homo sapien
taggagaagcctatgccagctggga

SEQ ID NO: 2355614 - DNA, 25 bp, Homo sapien
gaaaacttgtgtgttgagcagctct

SEQ ID NO: 2355615 - DNA, 25 bp, Homo sapien
gaagctagtcccaatcgaatcagag

SEQ ID NO: 2355616 - DNA, 25 bp, Homo sapien
aaggtcatatggctcttagaaagtt

SEQ ID NO: 2355617 - DNA, 25 bp, Homo sapien
tagaaagtttgatgcacttatattc

SEQ ID NO: 2355618 - DNA, 25 bp, Homo sapien
cttatattctttcatcaacgtgaga

SEQ ID NO: 2355619 - DNA, 25 bp, Homo sapien
tattctttcatcaacgtgagaatta

SEQ ID NO: 2355620 - DNA, 25 bp, Homo sapien
aacactctgctctctactggagtca

SEQ ID NO: 2355621 - DNA, 25 bp, Homo sapien
gttcctggcaggtaaaagtcttatg

SEQ ID NO: 2355622 - DNA, 25 bp, Homo sapien
ccctgactcaaaggagcagccatta

SEQ ID NO: 2355623 - DNA, 25 bp, Homo sapien
ttagaacagggtccagtgagaaacc

SEQ ID NO: 2355624 - DNA, 25 bp, Homo sapien
tctttaccaacctgacttgggtgtg

SEQ ID NO: 2355625 - DNA, 25 bp, Homo sapien
aaatgaaacgtacaccaagttgact

SEQ ID NO: 2355626 - DNA, 25 bp, Homo sapien
tctgcctccaatcaaggtgactatt

SEQ ID NO: 2355627 - DNA, 25 bp, Homo sapien
caagttgacttataccaagaaggac

SEQ ID NO: 2355628 - DNA, 25 bp, Homo sapien
gatatcaggctaaaaccaagtagct

SEQ ID NO: 2355629 - DNA, 25 bp, Homo sapien
tctttcaatcgctaggagttctccc

SEQ ID NO: 2355630 - DNA, 25 bp, Homo sapien
tcacgcttccttgagtgagcacagt

SEQ ID NO: 2355631 - DNA, 25 bp, Homo sapien
tgttgtcccactcacaccagtagct

SEQ ID NO: 2355632 - DNA, 25 bp, Homo sapien
attgaagttttggacccattgtgta

SEQ ID NO: 2355633 - DNA, 25 bp, Homo sapien
tgtgtactagcaacattgattatgt

SEQ ID NO: 2355634 - DNA, 25 bp, Homo sapien
tggacccattgtgtactagcaacat

SEQ ID NO: 2355635 - DNA, 25 bp, Homo sapien
gttttggacccattgtgtactagca

SEQ ID NO: 2355636 - DNA, 25 bp, Homo sapien
cactagacattagttgacagagctg

SEQ ID NO: 2355637 - DNA, 25 bp, Homo sapien
tatgatcctattaacagaagtggga

SEQ ID NO: 2355638 - DNA, 25 bp, Homo sapien
tgccctggaggttgcttgctcctca

SEQ ID NO: 2355639 - DNA, 25 bp, Homo sapien
ccctcaagggtccatttgaataaga

SEQ ID NO: 2355640 - DNA, 25 bp, Homo sapien
taaggcatctcagctcctgaatggg

SEQ ID NO: 2355641 - DNA, 25 bp, Homo sapien
gagtagctaccctttttcttgagaa

SEQ ID NO: 2355642 - DNA, 25 bp, Homo sapien
tgttgtacgccaaacactgtactgg

SEQ ID NO: 2355643 - DNA, 25 bp, Homo sapien
cgcgtatgaacctggacagcccatt

SEQ ID NO: 2355644 - DNA, 25 bp, Homo sapien
tgccaagagagtatcgaaaccgttt

SEQ ID NO: 2355645 - DNA, 25 bp, Homo sapien
catgagctgcaggaatggtaaattc

SEQ ID NO: 2355646 - DNA, 25 bp, Homo sapien
gaaaccgtttccttcatatgcatga

SEQ ID NO: 2355647 - DNA, 25 bp, Homo sapien
taccaacttgggacataagtccatt

SEQ ID NO: 2355648 - DNA, 25 bp, Homo sapien
tacaagccactttaatgggccctta

SEQ ID NO: 2355649 - DNA, 25 bp, Homo sapien
tagtttagtgacctttgccttgaaa

SEQ ID NO: 2355650 - DNA, 25 bp, Homo sapien
aaagtattggcctacctacaagcca

SEQ ID NO: 2355651 - DNA, 25 bp, Homo sapien
gcatcttacagcttggttagagaca

SEQ ID NO: 2355652 - DNA, 25 bp, Homo sapien
caattttgatgggagtacagacttc

SEQ ID NO: 2355653 - DNA, 25 bp, Homo sapien
ccctccacttgaagtgtactgttta

SEQ ID NO: 2355654 - DNA, 25 bp, Homo sapien
tgatgagttctctccgtcatgtgta

SEQ ID NO: 2355655 - DNA, 25 bp, Homo sapien
ccgtcatgtgtagtaataatgtgag

SEQ ID NO: 2355656 - DNA, 25 bp, Homo sapien
tataagagtaatcacaaaggtctgg

SEQ ID NO: 2355657 - DNA, 25 bp, Homo sapien
caaatataggtaagtagtacacgca

SEQ ID NO: 2355658 - DNA, 25 bp, Homo sapien
gattcgtaccaacgtttctcatgtg

SEQ ID NO: 2355659 - DNA, 25 bp, Homo sapien
gatgttgagtccactacggttttaa

SEQ ID NO: 2355660 - DNA, 25 bp, Homo sapien
gctgataacagaagagcagctcgtc

SEQ ID NO: 2355661 - DNA, 25 bp, Homo sapien
gactatgagactatttgtgggtcgg

SEQ ID NO: 2355662 - DNA, 25 bp, Homo sapien
tgtgggtcgggaattcaccagacgc

SEQ ID NO: 2355663 - DNA, 25 bp, Homo sapien
tcacacagagctggtacgcagtcag

SEQ ID NO: 2355664 - DNA, 25 bp, Homo sapien
taatgactgcagataggacacctcc

SEQ ID NO: 2355665 - DNA, 25 bp, Homo sapien
gcagccattggtgaaagaggtcagc

SEQ ID NO: 2355666 - DNA, 25 bp, Homo sapien
cagccatcagagcacatagtatgag

SEQ ID NO: 2355667 - DNA, 25 bp, Homo sapien
ggagtaagacctggtatcagcctta

SEQ ID NO: 2355668 - DNA, 25 bp, Homo sapien
gacaggtctggaacacatgctaata

SEQ ID NO: 2355669 - DNA, 25 bp, Homo sapien
gaatcctactatgatcccaacctgg

SEQ ID NO: 2355670 - DNA, 25 bp, Homo sapien
tactgttcaccccatagatgcgtaa

SEQ ID NO: 2355671 - DNA, 25 bp, Homo sapien
tatattccataagcggatgtcctgt

SEQ ID NO: 2355672 - DNA, 25 bp, Homo sapien
taatggctgcaggttagttatttcc

SEQ ID NO: 2355673 - DNA, 25 bp, Homo sapien
tgcagttgccttttgatgtagtagg

SEQ ID NO: 2355674 - DNA, 25 bp, Homo sapien
tgtagtaggatgtgggcaaatgcca

SEQ ID NO: 2355675 - DNA, 25 bp, Homo sapien
tccttcccggagataattgctgtta

SEQ ID NO: 2355676 - DNA, 25 bp, Homo sapien
gataagttctgtgaccaagcatgca

SEQ ID NO: 2355677 - DNA, 25 bp, Homo sapien
tgtgtatccctttaccagccttgca

SEQ ID NO: 2355678 - DNA, 25 bp, Homo sapien
gatgtgcgaattcctggctcgctga

SEQ ID NO: 2355679 - DNA, 25 bp, Homo sapien
ggaccaagcagatttaccttagctg

SEQ ID NO: 2355680 - DNA, 25 bp, Homo sapien
tcacgcttagatttatgattgcccc

SEQ ID NO: 2355681 - DNA, 25 bp, Homo sapien
caggcacgtggcacaaaagctgttc

SEQ ID NO: 2355682 - DNA, 25 bp, Homo sapien
gttcagacaccccactagcagatgt

SEQ ID NO: 2355683 - DNA, 25 bp, Homo sapien
ggcaaagcctgtttgtggaacttga

SEQ ID NO: 2355684 - DNA, 25 bp, Homo sapien
gatggaattaaccacactcagagct

SEQ ID NO: 2355685 - DNA, 25 bp, Homo sapien
cagtaagacgttcccatgcaaaagt

SEQ ID NO: 2355686 - DNA, 25 bp, Homo sapien
gacccagagctcagtttcggatgtg

SEQ ID NO: 2355687 - DNA, 25 bp, Homo sapien
gctgctgccatagcccagtaagacg

SEQ ID NO: 2355688 - DNA, 25 bp, Homo sapien
tccaggtgtggtgagactcctttcc

SEQ ID NO: 2355689 - DNA, 25 bp, Homo sapien
gaggaagaacagacgcagtgtcagc

SEQ ID NO: 2355690 - DNA, 25 bp, Homo sapien
tggaggccaacacctctcagagcat

SEQ ID NO: 2355691 - DNA, 25 bp, Homo sapien
tcagagttgtctttgtggaggccaa

SEQ ID NO: 2355692 - DNA, 25 bp, Homo sapien
cgagatcagacaagatcgggtgcgt

SEQ ID NO: 2355693 - DNA, 25 bp, Homo sapien
gtgcgttcagggtggtatggccgta

SEQ ID NO: 2355694 - DNA, 25 bp, Homo sapien
gttcagggtggtatggccgtagacg

SEQ ID NO: 2355695 - DNA, 25 bp, Homo sapien
gcgttcagggtggtatggccgtaga

SEQ ID NO: 2355696 - DNA, 25 bp, Homo sapien
tgctgagcccataacctgcgtcttc

SEQ ID NO: 2355697 - DNA, 25 bp, Homo sapien
aaaactgcacccacatccttagaga

SEQ ID NO: 2355698 - DNA, 25 bp, Homo sapien
ggtaattcctggcataaaactgcac

SEQ ID NO: 2355699 - DNA, 25 bp, Homo sapien
cacttgaccagtgtactgctgagcc

SEQ ID NO: 2355700 - DNA, 25 bp, Homo sapien
atgtggcgatgtaataaggtctgag

SEQ ID NO: 2355701 - DNA, 25 bp, Homo sapien
cagatgggtaatgtggcgatgtaat

SEQ ID NO: 2355702 - DNA, 25 bp, Homo sapien
taatgtggcgatgtaataaggtctg

SEQ ID NO: 2355703 - DNA, 25 bp, Homo sapien
ggtaatgtggcgatgtaataaggtc

SEQ ID NO: 2355704 - DNA, 25 bp, Homo sapien
gaaagtcctttcagaatcggtaaga

SEQ ID NO: 2355705 - DNA, 25 bp, Homo sapien
ggaactgtagcttattcacctggat

SEQ ID NO: 2355706 - DNA, 25 bp, Homo sapien
tcacctggatctaacacgatgtatg

SEQ ID NO: 2355707 - DNA, 25 bp, Homo sapien
gctaccccattccaagcatggtgag

SEQ ID NO: 2355708 - DNA, 25 bp, Homo sapien
tgagatcgtgtcttgtagagaggca

SEQ ID NO: 2355709 - DNA, 25 bp, Homo sapien
ggatcctgagtgtgcttagaagctt

SEQ ID NO: 2355710 - DNA, 25 bp, Homo sapien
caaggtaccaattaaagtatgcctc

SEQ ID NO: 2355711 - DNA, 25 bp, Homo sapien
tagagaggcaattttaggatcctga

SEQ ID NO: 2355712 - DNA, 25 bp, Homo sapien
accttgtgggatgtgtagccaatcc

SEQ ID NO: 2355713 - DNA, 25 bp, Homo sapien
cctgcccctggatgaaaattcaggt

SEQ ID NO: 2355714 - DNA, 25 bp, Homo sapien
tggtcacttcacactacagaacaga

SEQ ID NO: 2355715 - DNA, 25 bp, Homo sapien
catgttgaataagcacaccttgtgg

SEQ ID NO: 2355716 - DNA, 25 bp, Homo sapien
gcagagacagacctatacctgcctg

SEQ ID NO: 2355717 - DNA, 25 bp, Homo sapien
cgtccgtcgccggagctgcaatgag

SEQ ID NO: 2355718 - DNA, 25 bp, Homo sapien
gggcccctgaatggcggctcgctga

SEQ ID NO: 2355719 - DNA, 25 bp, Homo sapien
tgatgctgttcaagctcctgcagag

SEQ ID NO: 2355720 - DNA, 25 bp, Homo sapien
cgccgcgccgagggcgtgggctccc

SEQ ID NO: 2355721 - DNA, 25 bp, Homo sapien
ccgcgccgagggcgtgggctcccgg

SEQ ID NO: 2355722 - DNA, 25 bp, Homo sapien
ttaaggagatcagatgaaattgggc

SEQ ID NO: 2355723 - DNA, 25 bp, Homo sapien
ctttaaggagatcagatgaaattgg

SEQ ID NO: 2355724 - DNA, 25 bp, Homo sapien
tagctttaaggagatcagatgaaat

SEQ ID NO: 2355725 - DNA, 25 bp, Homo sapien
gctttaaggagatcagatgaaattg

SEQ ID NO: 2355726 - DNA, 25 bp, Homo sapien
gctgcatccctccactatggtaggg

SEQ ID NO: 2355727 - DNA, 25 bp, Homo sapien
cctgtcatttagtttccttcccacg

SEQ ID NO: 2355728 - DNA, 25 bp, Homo sapien
gcatccctccactatggtagggcct

SEQ ID NO: 2355729 - DNA, 25 bp, Homo sapien
agtgctgcatccctccactatggta

SEQ ID NO: 2355730 - DNA, 25 bp, Homo sapien
ccgggcgcgtacactcacggacggt

SEQ ID NO: 2355731 - DNA, 25 bp, Homo sapien
tgcccgggcttgttgcgaaacgagt

SEQ ID NO: 2355732 - DNA, 25 bp, Homo sapien
acgagtgaagtcacaaagcggcccg

SEQ ID NO: 2355733 - DNA, 25 bp, Homo sapien
gctccaagcggacgcgactacggag

SEQ ID NO: 2355734 - DNA, 25 bp, Homo sapien
gccgacggagtgctgcgcccagcgg

SEQ ID NO: 2355735 - DNA, 25 bp, Homo sapien
ccgccgccgacggagtgctgcgccc

SEQ ID NO: 2355736 - DNA, 25 bp, Homo sapien
ccgccgacggagtgctgcgcccagc

SEQ ID NO: 2355737 - DNA, 25 bp, Homo sapien
cgccgccgacggagtgctgcgccca

SEQ ID NO: 2355738 - DNA, 25 bp, Homo sapien
agagcacggcgaccacgtaggagat

SEQ ID NO: 2355739 - DNA, 25 bp, Homo sapien
gcgaccacgtaggagataatgaagg

SEQ ID NO: 2355740 - DNA, 25 bp, Homo sapien
taatgaaggcggctgacgaccaggt

SEQ ID NO: 2355741 - DNA, 25 bp, Homo sapien
aagccattcccctcaggaagcacag

SEQ ID NO: 2355742 - DNA, 25 bp, Homo sapien
ctgctcctggggccctgacgcccac

SEQ ID NO: 2355743 - DNA, 25 bp, Homo sapien
gctcctggggccctgacgcccaccc

SEQ ID NO: 2355744 - DNA, 25 bp, Homo sapien
tggtccctgtgcctgctcctggggc

SEQ ID NO: 2355745 - DNA, 25 bp, Homo sapien
tcctggggccctgacgcccaccctg

SEQ ID NO: 2355746 - DNA, 25 bp, Homo sapien
aatccagtgctccggctgctcaggt

SEQ ID NO: 2355747 - DNA, 25 bp, Homo sapien
caatccagtgctccggctgctcagg

SEQ ID NO: 2355748 - DNA, 25 bp, Homo sapien
gcaatccagtgctccggctgctcag

SEQ ID NO: 2355749 - DNA, 25 bp, Homo sapien
ctgtggatgtagaccaaagccgtta

SEQ ID NO: 2355750 - DNA, 25 bp, Homo sapien
gggtccactatgtcttcttggcata

SEQ ID NO: 2355751 - DNA, 25 bp, Homo sapien
atgggtccactatgtcttcttggca

SEQ ID NO: 2355752 - DNA, 25 bp, Homo sapien
caaagccgttacaagagtatgggtc

SEQ ID NO: 2355753 - DNA, 25 bp, Homo sapien
gatatgtcattaacatcatgtcaga

SEQ ID NO: 2355754 - DNA, 25 bp, Homo sapien
tataatcactgcactgtaaaaactg

SEQ ID NO: 2355755 - DNA, 25 bp, Homo sapien
tacgtgattttatgcacacagccct

SEQ ID NO: 2355756 - DNA, 25 bp, Homo sapien
tgtagattagaaatactacgaggtt

SEQ ID NO: 2355757 - DNA, 25 bp, Homo sapien
agcctggccgacagagtgaggcttc

SEQ ID NO: 2355758 - DNA, 25 bp, Homo sapien
agccaagatcgtgccactgcactcc

SEQ ID NO: 2355759 - DNA, 25 bp, Homo sapien
gcttcatctcaaaaaataaataaaa

SEQ ID NO: 2355760 - DNA, 25 bp, Homo sapien
ctggccgacagagtgaggcttcatc

SEQ ID NO: 2355761 - DNA, 25 bp, Homo sapien
catcaatgcctgaatatcaatggcc

SEQ ID NO: 2355762 - DNA, 25 bp, Homo sapien
atatcaatggcccacattcctacac

SEQ ID NO: 2355763 - DNA, 25 bp, Homo sapien
aatgcctgaatatcaatggcccaca

SEQ ID NO: 2355764 - DNA, 25 bp, Homo sapien
ctgaatatcaatggcccacattcct

SEQ ID NO: 2355765 - DNA, 25 bp, Homo sapien
gaataattctgaacctcagacagcc

SEQ ID NO: 2355766 - DNA, 25 bp, Homo sapien
ggcatcggagcaaacacagaggaga

SEQ ID NO: 2355767 - DNA, 25 bp, Homo sapien
tcttgttacacaggtctgagaataa

SEQ ID NO: 2355768 - DNA, 25 bp, Homo sapien
cagccacatgccaggcatcggagca

SEQ ID NO: 2355769 - DNA, 25 bp, Homo sapien
ataaaaatctgaggccggtcacggt

SEQ ID NO: 2355770 - DNA, 25 bp, Homo sapien
taaaaatctgaggccggtcacggtg

SEQ ID NO: 2355771 - DNA, 25 bp, Homo sapien
gcagagaagtttatcataaatccaa

SEQ ID NO: 2355772 - DNA, 25 bp, Homo sapien
agagaagtttatcataaatccaaaa

SEQ ID NO: 2355773 - DNA, 25 bp, Homo sapien
cagagaagtttatcataaatccaaa

SEQ ID NO: 2355774 - DNA, 25 bp, Homo sapien
tgcagagaagtttatcataaatcca

SEQ ID NO: 2355775 - DNA, 25 bp, Homo sapien
caggtttgattttgcttctgtacta

SEQ ID NO: 2355776 - DNA, 25 bp, Homo sapien
tgtatcttgtatacatcgtggctgc

SEQ ID NO: 2355777 - DNA, 25 bp, Homo sapien
aaaacaggagtgctgaaatagcagg

SEQ ID NO: 2355778 - DNA, 25 bp, Homo sapien
ccaagcactaaagacaccaagttaa

SEQ ID NO: 2355779 - DNA, 25 bp, Homo sapien
aatggctataatggcataagtgtgc

SEQ ID NO: 2355780 - DNA, 25 bp, Homo sapien
ggctataatggcataagtgtgcctc

SEQ ID NO: 2355781 - DNA, 25 bp, Homo sapien
gctctcttcagacacatacactcca

SEQ ID NO: 2355782 - DNA, 25 bp, Homo sapien
tacactccaccactcctcataactg

SEQ ID NO: 2355783 - DNA, 25 bp, Homo sapien
aaagaaatgtcaccgggagcctcct

SEQ ID NO: 2355784 - DNA, 25 bp, Homo sapien
gacttcaattcaaagctcgcctctg

SEQ ID NO: 2355785 - DNA, 25 bp, Homo sapien
tagaactatgcatcgtgtacttggt

SEQ ID NO: 2355786 - DNA, 25 bp, Homo sapien
cacagtagctgaagtagctctccca

SEQ ID NO: 2355787 - DNA, 25 bp, Homo sapien
tgacagctgcgcaagaaacggcaga

SEQ ID NO: 2355788 - DNA, 25 bp, Homo sapien
accatccgtatgtggcatgtcgaga

SEQ ID NO: 2355789 - DNA, 25 bp, Homo sapien
catgtcgagagactgttccactggg

SEQ ID NO: 2355790 - DNA, 25 bp, Homo sapien
tgatggactgtaggagcgtgtacac

SEQ ID NO: 2355791 - DNA, 25 bp, Homo sapien
taacaaggcacaaatgtgaaaaagg

SEQ ID NO: 2355792 - DNA, 25 bp, Homo sapien
ttattcctttaacaaggcacaaatg

SEQ ID NO: 2355793 - DNA, 25 bp, Homo sapien
caagtgtcactgaatgttttattcc

SEQ ID NO: 2355794 - DNA, 25 bp, Homo sapien
ttaacaagtgtcactgaatgtttta

SEQ ID NO: 2355795 - DNA, 25 bp, Homo sapien
gctatagattcgcacttgccaatgc

SEQ ID NO: 2355796 - DNA, 25 bp, Homo sapien
ctgaactttagtcaagcccctgaaa

SEQ ID NO: 2355797 - DNA, 25 bp, Homo sapien
catggccagtactcaataagaatcc

SEQ ID NO: 2355798 - DNA, 25 bp, Homo sapien
caagctttgctaagacacggtgaca

SEQ ID NO: 2355799 - DNA, 25 bp, Homo sapien
ttatttattcttagctccatcttca

SEQ ID NO: 2355800 - DNA, 25 bp, Homo sapien
tcagtgcaccaggtaccattctggt

SEQ ID NO: 2355801 - DNA, 25 bp, Homo sapien
ttcagtgcaccaggtaccattctgg

SEQ ID NO: 2355802 - DNA, 25 bp, Homo sapien
actccagcttggttatggaaattag

SEQ ID NO: 2355803 - DNA, 25 bp, Homo sapien
ctccagcttggttatggaaattagt

SEQ ID NO: 2355804 - DNA, 25 bp, Homo sapien
tccagcttggttatggaaattagtg

SEQ ID NO: 2355805 - DNA, 25 bp, Homo sapien
cctataaggcgtctagatgaaccac

SEQ ID NO: 2355806 - DNA, 25 bp, Homo sapien
tgaggtctaccatacagcacaagtc

SEQ ID NO: 2355807 - DNA, 25 bp, Homo sapien
gctttaccgttcgaaagtctgcagg

SEQ ID NO: 2355808 - DNA, 25 bp, Homo sapien
tactacaggtatctaacaggatggg

SEQ ID NO: 2355809 - DNA, 25 bp, Homo sapien
gcctcaagtgatccacccgccttgg

SEQ ID NO: 2355810 - DNA, 25 bp, Homo sapien
caggctagttttgaactctagcctc

SEQ ID NO: 2355811 - DNA, 25 bp, Homo sapien
gctagttttgaactctagcctcaag

SEQ ID NO: 2355812 - DNA, 25 bp, Homo sapien
gccaggctagttttgaactctagcc

SEQ ID NO: 2355813 - DNA, 25 bp, Homo sapien
aaagactcactttaatgtacatact

SEQ ID NO: 2355814 - DNA, 25 bp, Homo sapien
agaatttagccgaaaaagactcact

SEQ ID NO: 2355815 - DNA, 25 bp, Homo sapien
tagccgaaaaagactcactttaatg

SEQ ID NO: 2355816 - DNA, 25 bp, Homo sapien
acagaatttagccgaaaaagactca

SEQ ID NO: 2355817 - DNA, 25 bp, Homo sapien
actgtccattcacagatcgcactca

SEQ ID NO: 2355818 - DNA, 25 bp, Homo sapien
ctggaaatcttggatgaaagttagg

SEQ ID NO: 2355819 - DNA, 25 bp, Homo sapien
tcacagatcgcactcactacgtgat

SEQ ID NO: 2355820 - DNA, 25 bp, Homo sapien
aataaaaccaaaggccactgtccat

SEQ ID NO: 2355821 - DNA, 25 bp, Homo sapien
aatcccagcgttgacaatgacattt

SEQ ID NO: 2355822 - DNA, 25 bp, Homo sapien
acaatcccagcgttgacaatgacat

SEQ ID NO: 2355823 - DNA, 25 bp, Homo sapien
aagaagttaaacaatcccagcgttg

SEQ ID NO: 2355824 - DNA, 25 bp, Homo sapien
gaagttaaacaatcccagcgttgac

SEQ ID NO: 2355825 - DNA, 25 bp, Homo sapien
tctgtggatatccttagggtgacac

SEQ ID NO: 2355826 - DNA, 25 bp, Homo sapien
gatttctgtggatatccttagggtg

SEQ ID NO: 2355827 - DNA, 25 bp, Homo sapien
tttctgtggatatccttagggtgac

SEQ ID NO: 2355828 - DNA, 25 bp, Homo sapien
ctgtggatatccttagggtgacact

SEQ ID NO: 2355829 - DNA, 25 bp, Homo sapien
tggcctgcgacattcactgagtgag

SEQ ID NO: 2355830 - DNA, 25 bp, Homo sapien
cgaatgggcaattagcagcaagagc

SEQ ID NO: 2355831 - DNA, 25 bp, Homo sapien
gcagatgcatcccaataatcagggt

SEQ ID NO: 2355832 - DNA, 25 bp, Homo sapien
caaaaggtgcgacctcatgagcagg

SEQ ID NO: 2355833 - DNA, 25 bp, Homo sapien
ctgaacccagaagttcttcttggct

SEQ ID NO: 2355834 - DNA, 25 bp, Homo sapien
tgaacccagaagttcttcttggctg

SEQ ID NO: 2355835 - DNA, 25 bp, Homo sapien
tcttgcttaacacaaagggcttgac

SEQ ID NO: 2355836 - DNA, 25 bp, Homo sapien
catgatttgggtgaaaagatggagt

SEQ ID NO: 2355837 - DNA, 25 bp, Homo sapien
gccacaggcatgaagagaaggagca

SEQ ID NO: 2355838 - DNA, 25 bp, Homo sapien
ttatagtgttgtgggacatccagcc

SEQ ID NO: 2355839 - DNA, 25 bp, Homo sapien
tccgaagctgtctacatgggctgct

SEQ ID NO: 2355840 - DNA, 25 bp, Homo sapien
ggccacacatgggtttatgctctag

SEQ ID NO: 2355841 - DNA, 25 bp, Homo sapien
tgagggctgatctcacttggccaca

SEQ ID NO: 2355842 - DNA, 25 bp, Homo sapien
tagttaatgaggagctaccccgaac

SEQ ID NO: 2355843 - DNA, 25 bp, Homo sapien
catttatgatgcgtcttaaagaaag

SEQ ID NO: 2355844 - DNA, 25 bp, Homo sapien
tttatgatgcgtcttaaagaaagca

SEQ ID NO: 2355845 - DNA, 25 bp, Homo sapien
aaaccatttatgatgcgtcttaaag

SEQ ID NO: 2355846 - DNA, 25 bp, Homo sapien
accatttatgatgcgtcttaaagaa

SEQ ID NO: 2355847 - DNA, 25 bp, Homo sapien
gaagcatgaaactccatcgtgagga

SEQ ID NO: 2355848 - DNA, 25 bp, Homo sapien
acaaaagtctgctcgaagtgaggca

SEQ ID NO: 2355849 - DNA, 25 bp, Homo sapien
tgaggagcgccgagaacaaaagtct

SEQ ID NO: 2355850 - DNA, 25 bp, Homo sapien
tcaaggagctcccaatctaattgtg

SEQ ID NO: 2355851 - DNA, 25 bp, Homo sapien
tagaggtcgcatggaatctgctgaa

SEQ ID NO: 2355852 - DNA, 25 bp, Homo sapien
accatttggtctagcccgtgtaaca

SEQ ID NO: 2355853 - DNA, 25 bp, Homo sapien
gccttctcagtttgccaagacaggt

SEQ ID NO: 2355854 - DNA, 25 bp, Homo sapien
tggtgatgccgaaacaactgaaatg

SEQ ID NO: 2355855 - DNA, 25 bp, Homo sapien
taaatctacttcatagtagtagcca

SEQ ID NO: 2355856 - DNA, 25 bp, Homo sapien
gtagtagccaagtgatattttctaa

SEQ ID NO: 2355857 - DNA, 25 bp, Homo sapien
cttcatagtagtagccaagtgatat

SEQ ID NO: 2355858 - DNA, 25 bp, Homo sapien
tctacttcatagtagtagccaagtg

SEQ ID NO: 2355859 - DNA, 25 bp, Homo sapien
ccaaagtgactgagttccacactga

SEQ ID NO: 2355860 - DNA, 25 bp, Homo sapien
catagcccatcctagtgccgttaat

SEQ ID NO: 2355861 - DNA, 25 bp, Homo sapien
ttccacactgatggggttgaaatcc

SEQ ID NO: 2355862 - DNA, 25 bp, Homo sapien
ctgtgttcgtcaggcccacctttta

SEQ ID NO: 2355863 - DNA, 25 bp, Homo sapien
tataatagatggtgcaaactgtaac

SEQ ID NO: 2355864 - DNA, 25 bp, Homo sapien
cgactataatagatggtgcaaactg

SEQ ID NO: 2355865 - DNA, 25 bp, Homo sapien
agtcatgttttgcatcgactataat

SEQ ID NO: 2355866 - DNA, 25 bp, Homo sapien
ttgcatcgactataatagatggtgc

SEQ ID NO: 2355867 - DNA, 25 bp, Homo sapien
gaggcgttctggaatgcagccgtca

SEQ ID NO: 2355868 - DNA, 25 bp, Homo sapien
catcacactaagtgaggccctctgc

SEQ ID NO: 2355869 - DNA, 25 bp, Homo sapien
gcctctgagtttgatgcaagttcaa

SEQ ID NO: 2355870 - DNA, 25 bp, Homo sapien
ggcctgttggatcaaagcctctgag

SEQ ID NO: 2355871 - DNA, 25 bp, Homo sapien
caagctgtcccgttgtttccataag

SEQ ID NO: 2355872 - DNA, 25 bp, Homo sapien
cccactgcctttgctcatggagact

SEQ ID NO: 2355873 - DNA, 25 bp, Homo sapien
ggaactgtgcaaaggctctttccca

SEQ ID NO: 2355874 - DNA, 25 bp, Homo sapien
tcagataatgtgaacaccactcagt

SEQ ID NO: 2355875 - DNA, 25 bp, Homo sapien
tgaaggcagtgtccggttctcacac

SEQ ID NO: 2355876 - DNA, 25 bp, Homo sapien
agtgtccggttctcacacttccaca

SEQ ID NO: 2355877 - DNA, 25 bp, Homo sapien
ctgaaggcagtgtccggttctcaca

SEQ ID NO: 2355878 - DNA, 25 bp, Homo sapien
tgcaaccactgggataatagggccc

SEQ ID NO: 2355879 - DNA, 25 bp, Homo sapien
ttaccaaagtgggagcttgcgggca

SEQ ID NO: 2355880 - DNA, 25 bp, Homo sapien
catgtggtgtgaagagtgccctgaa

SEQ ID NO: 2355881 - DNA, 25 bp, Homo sapien
caagctcagcagagggttaccaaag

SEQ ID NO: 2355882 - DNA, 25 bp, Homo sapien
tgggtgtttggctttgtacacactg

SEQ ID NO: 2355883 - DNA, 25 bp, Homo sapien
gccaaactcattgagaattgtctga

SEQ ID NO: 2355884 - DNA, 25 bp, Homo sapien
tacacactggtgaagacatcatcca

SEQ ID NO: 2355885 - DNA, 25 bp, Homo sapien
cctgtagctgacaattgggtgtttg

SEQ ID NO: 2355886 - DNA, 25 bp, Homo sapien
cactttcattgcaaatgagttcact

SEQ ID NO: 2355887 - DNA, 25 bp, Homo sapien
ttttgtacatggtaagaaataggag

SEQ ID NO: 2355888 - DNA, 25 bp, Homo sapien
ctgtgttctctattcagctccattg

SEQ ID NO: 2355889 - DNA, 25 bp, Homo sapien
tgaagaggccgtactttccccagtg

SEQ ID NO: 2355890 - DNA, 25 bp, Homo sapien
caatgggatggcttaaacagacagg

SEQ ID NO: 2355891 - DNA, 25 bp, Homo sapien
gacaaggaatattgctaccagcagc

SEQ ID NO: 2355892 - DNA, 25 bp, Homo sapien
gaaattgtcctctttccaacaggta

SEQ ID NO: 2355893 - DNA, 25 bp, Homo sapien
tttattcacaaggactgtgtccctg

SEQ ID NO: 2355894 - DNA, 25 bp, Homo sapien
caacaaccacagtgagcttgggcat

SEQ ID NO: 2355895 - DNA, 25 bp, Homo sapien
gacaacaaccacagtgagcttgggc

SEQ ID NO: 2355896 - DNA, 25 bp, Homo sapien
acaacaaccacagtgagcttgggca

SEQ ID NO: 2355897 - DNA, 25 bp, Homo sapien
ccagtttggccatggagactccggc

SEQ ID NO: 2355898 - DNA, 25 bp, Homo sapien
taaaagtcttcggagcagccaaact

SEQ ID NO: 2355899 - DNA, 25 bp, Homo sapien
tagatgtgtttgactcttgcccagt

SEQ ID NO: 2355900 - DNA, 25 bp, Homo sapien
caaactcggcgttcacaacatagat

SEQ ID NO: 2355901 - DNA, 25 bp, Homo sapien
gaaggtcgtttcagtgtggttcata

SEQ ID NO: 2355902 - DNA, 25 bp, Homo sapien
tgagtaaccatcgttgccatcaact

SEQ ID NO: 2355903 - DNA, 25 bp, Homo sapien
caaaacattatgcagcacttgacta

SEQ ID NO: 2355904 - DNA, 25 bp, Homo sapien
aaggtgcagtcaaatatggttttat

SEQ ID NO: 2355905 - DNA, 25 bp, Homo sapien
aattgaaagtacctcaaccaatcag

SEQ ID NO: 2355906 - DNA, 25 bp, Homo sapien
attgaaagtacctcaaccaatcaga

SEQ ID NO: 2355907 - DNA, 25 bp, Homo sapien
tacatcatggtacagtcagaagcat

SEQ ID NO: 2355908 - DNA, 25 bp, Homo sapien
tctaagacagctgtatcacattttt

SEQ ID NO: 2355909 - DNA, 25 bp, Homo sapien
tataaaattatggttctgcttgtca

SEQ ID NO: 2355910 - DNA, 25 bp, Homo sapien
ttcctcttgtaaagtacagatagga

SEQ ID NO: 2355911 - DNA, 25 bp, Homo sapien
aggagaccacaagctgttgttttgg

SEQ ID NO: 2355912 - DNA, 25 bp, Homo sapien
ctgtgtgtaattggaggagaccaca

SEQ ID NO: 2355913 - DNA, 25 bp, Homo sapien
tttctgtaccttagattcacaaact

SEQ ID NO: 2355914 - DNA, 25 bp, Homo sapien
agctgttgttttgggtgactgaagt

SEQ ID NO: 2355915 - DNA, 25 bp, Homo sapien
ccgttggatctggactgtcctggca

SEQ ID NO: 2355916 - DNA, 25 bp, Homo sapien
catgggttctgtagccgttggatct

SEQ ID NO: 2355917 - DNA, 25 bp, Homo sapien
cctcatgggttctgtagccgttgga

SEQ ID NO: 2355918 - DNA, 25 bp, Homo sapien
tctgtagccgttggatctggactgt

SEQ ID NO: 2355919 - DNA, 25 bp, Homo sapien
gattgtatcccatgtttcagctgcg

SEQ ID NO: 2355920 - DNA, 25 bp, Homo sapien
tgatgtttacattaccagtgacaac

SEQ ID NO: 2355921 - DNA, 25 bp, Homo sapien
tttggccagtattcatataagaagc

SEQ ID NO: 2355922 - DNA, 25 bp, Homo sapien
ggttggtgtagactgcaaaaatgga

SEQ ID NO: 2355923 - DNA, 25 bp, Homo sapien
aaatatatgctagcccaacacttta

SEQ ID NO: 2355924 - DNA, 25 bp, Homo sapien
aggttttaaaccatcctctcatggg

SEQ ID NO: 2355925 - DNA, 25 bp, Homo sapien
tctcatgggacttgctgaattttca

SEQ ID NO: 2355926 - DNA, 25 bp, Homo sapien
ctttggttcattggacaggaataca

SEQ ID NO: 2355927 - DNA, 25 bp, Homo sapien
cattaataagcatgggtttacatcc

SEQ ID NO: 2355928 - DNA, 25 bp, Homo sapien
aatctgtcagagtcagttcagagag

SEQ ID NO: 2355929 - DNA, 25 bp, Homo sapien
tctcattcttggcacttctataggg

SEQ ID NO: 2355930 - DNA, 25 bp, Homo sapien
cagagagattctactgtacactgtg

SEQ ID NO: 2355931 - DNA, 25 bp, Homo sapien
tctcaaattataatgagcacggtaa

SEQ ID NO: 2355932 - DNA, 25 bp, Homo sapien
gcctggcctagcagaatattattaa

SEQ ID NO: 2355933 - DNA, 25 bp, Homo sapien
taatgagcacggtaatttggaagtg

SEQ ID NO: 2355934 - DNA, 25 bp, Homo sapien
tcactaaagtgatagttattataaa

SEQ ID NO: 2355935 - DNA, 25 bp, Homo sapien
ccgaagacgtactcttcagtgtgcg

SEQ ID NO: 2355936 - DNA, 25 bp, Homo sapien
ttcagtgtgcggaaggatccccaac

SEQ ID NO: 2355937 - DNA, 25 bp, Homo sapien
ggtagacccgaagacgtactcttca

SEQ ID NO: 2355938 - DNA, 25 bp, Homo sapien
atccccaacgggatgccctcccgcg

SEQ ID NO: 2355939 - DNA, 25 bp, Homo sapien
cacggcactttgctacgaccgaggt

SEQ ID NO: 2355940 - DNA, 25 bp, Homo sapien
catcgctagatactgtgaactccgc

SEQ ID NO: 2355941 - DNA, 25 bp, Homo sapien
caggctcgagcgtcaagtcactgca

SEQ ID NO: 2355942 - DNA, 25 bp, Homo sapien
caccacttaaaaatgcgacagggca

SEQ ID NO: 2355943 - DNA, 25 bp, Homo sapien
gaaagaactacacttccgagtcaga

SEQ ID NO: 2355944 - DNA, 25 bp, Homo sapien
tggaagttaagcaggcctctacggg

SEQ ID NO: 2355945 - DNA, 25 bp, Homo sapien
tatcagtgttcgagtgcaagtccca

SEQ ID NO: 2355946 - DNA, 25 bp, Homo sapien
agtacataacccacctagtgccagg

SEQ ID NO: 2355947 - DNA, 25 bp, Homo sapien
gacagacttctgattaaacacagcc

SEQ ID NO: 2355948 - DNA, 25 bp, Homo sapien
atccgagacagacttctgattaaac

SEQ ID NO: 2355949 - DNA, 25 bp, Homo sapien
cagacttctgattaaacacagccat

SEQ ID NO: 2355950 - DNA, 25 bp, Homo sapien
cgagacagacttctgattaaacaca

SEQ ID NO: 2355951 - DNA, 25 bp, Homo sapien
caccacatagagtagttctctcaga

SEQ ID NO: 2355952 - DNA, 25 bp, Homo sapien
ttgttgttctccgccatagaaagct

SEQ ID NO: 2355953 - DNA, 25 bp, Homo sapien
gcatggagtctgcaccacatagagt

SEQ ID NO: 2355954 - DNA, 25 bp, Homo sapien
tcagagttacaaagagcacgccaat

SEQ ID NO: 2355955 - DNA, 25 bp, Homo sapien
caaatatgcatgtcccgtgtataac

SEQ ID NO: 2355956 - DNA, 25 bp, Homo sapien
gcagtttccagtatcccggtgcaga

SEQ ID NO: 2355957 - DNA, 25 bp, Homo sapien
taatctacggcttaaatccaaacgc

SEQ ID NO: 2355958 - DNA, 25 bp, Homo sapien
caaacgctagtttggctcaagctac

SEQ ID NO: 2355959 - DNA, 25 bp, Homo sapien
atcatacctcctctacagccttctc

SEQ ID NO: 2355960 - DNA, 25 bp, Homo sapien
tcatcatacctcctctacagccttc

SEQ ID NO: 2355961 - DNA, 25 bp, Homo sapien
catcatacctcctctacagccttct

SEQ ID NO: 2355962 - DNA, 25 bp, Homo sapien
gtgatctgcccatcatggactctca

SEQ ID NO: 2355963 - DNA, 25 bp, Homo sapien
taagtgatctgcccatcatggactc

SEQ ID NO: 2355964 - DNA, 25 bp, Homo sapien
gatctgcccatcatggactctcaga

SEQ ID NO: 2355965 - DNA, 25 bp, Homo sapien
aagtgatctgcccatcatggactct

SEQ ID NO: 2355966 - DNA, 25 bp, Homo sapien
taaaacatcactgagagagactgta

SEQ ID NO: 2355967 - DNA, 25 bp, Homo sapien
catcactgagagagactgtaaattc

SEQ ID NO: 2355968 - DNA, 25 bp, Homo sapien
ttcaactggtaagttcaatttctca

SEQ ID NO: 2355969 - DNA, 25 bp, Homo sapien
ctcatggagcaagtatttccatgtc

SEQ ID NO: 2355970 - DNA, 25 bp, Homo sapien
tcataaatcttcctaacgtcctcat

SEQ ID NO: 2355971 - DNA, 25 bp, Homo sapien
tcaatcagatctaacatattactgt

SEQ ID NO: 2355972 - DNA, 25 bp, Homo sapien
tactgttcttcaagaaatcatcata

SEQ ID NO: 2355973 - DNA, 25 bp, Homo sapien
aatcatcataaatcttcctaacgtc

SEQ ID NO: 2355974 - DNA, 25 bp, Homo sapien
gagatactgtgttataattttcaca

SEQ ID NO: 2355975 - DNA, 25 bp, Homo sapien
ggagatactgtgttataattttcac

SEQ ID NO: 2355976 - DNA, 25 bp, Homo sapien
tatccaacatatgccaaatgaacag

SEQ ID NO: 2355977 - DNA, 25 bp, Homo sapien
caagtaataagtagctttcaggtag

SEQ ID NO: 2355978 - DNA, 25 bp, Homo sapien
aatcaggcatttgggactaatttct

SEQ ID NO: 2355979 - DNA, 25 bp, Homo sapien
ttttgatctaataagaagctatccg

SEQ ID NO: 2355980 - DNA, 25 bp, Homo sapien
ggtcctaaaaagtgtgcaggcatca

SEQ ID NO: 2355981 - DNA, 25 bp, Homo sapien
tatgagctttctcaagggtggcctt

SEQ ID NO: 2355982 - DNA, 25 bp, Homo sapien
ctgccaggtagatcagaaggtccta

SEQ ID NO: 2355983 - DNA, 25 bp, Homo sapien
agccgcaggctccaactaaggacca

SEQ ID NO: 2355984 - DNA, 25 bp, Homo sapien
tcttctggaccgtgatgggaatccc

SEQ ID NO: 2355985 - DNA, 25 bp, Homo sapien
ggaccagctccatgctaagagggac

SEQ ID NO: 2355986 - DNA, 25 bp, Homo sapien
ctgaaggtggctgtatagttgaccc

SEQ ID NO: 2355987 - DNA, 25 bp, Homo sapien
caatctgaagtttagggaccagctc

SEQ ID NO: 2355988 - DNA, 25 bp, Homo sapien
aaaatctagctctgtatttggtaac

SEQ ID NO: 2355989 - DNA, 25 bp, Homo sapien
gttctgaagcgggtggctttcccat

SEQ ID NO: 2355990 - DNA, 25 bp, Homo sapien
cttcaatgttctgaagcgggtggct

SEQ ID NO: 2355991 - DNA, 25 bp, Homo sapien
agatgcctggacttcggaggtttgc

SEQ ID NO: 2355992 - DNA, 25 bp, Homo sapien
cacaggaggaactagctcataaaac

SEQ ID NO: 2355993 - DNA, 25 bp, Homo sapien
tgaattgatctaccaaagggttggg

SEQ ID NO: 2355994 - DNA, 25 bp, Homo sapien
cacccatcctgcagtttgagagtaa

SEQ ID NO: 2355995 - DNA, 25 bp, Homo sapien
tgaattgtcagcttacacaggagga

SEQ ID NO: 2355996 - DNA, 25 bp, Homo sapien
tcattatcacggttgtatttacttg

SEQ ID NO: 2355997 - DNA, 25 bp, Homo sapien
tatttacttgttggtgatgttggta

SEQ ID NO: 2355998 - DNA, 25 bp, Homo sapien
gtttcatcacctactgcatactgtt

SEQ ID NO: 2355999 - DNA, 25 bp, Homo sapien
tgttggtatagaaagatcagtttca

SEQ ID NO: 2356000 - DNA, 25 bp, Homo sapien
tcagtacatgtgaggtaaagattgg

SEQ ID NO: 2356001 - DNA, 25 bp, Homo sapien
gcaaatgcttcctattaaaaggtgc

SEQ ID NO: 2356002 - DNA, 25 bp, Homo sapien
tattatgtagatgacgtctcatagg

SEQ ID NO: 2356003 - DNA, 25 bp, Homo sapien
tggccacccttagaaacaatagatg

SEQ ID NO: 2356004 - DNA, 25 bp, Homo sapien
tgtgttaacttactggaacaggtga

SEQ ID NO: 2356005 - DNA, 25 bp, Homo sapien
catgggacatatagaagaatctacc

SEQ ID NO: 2356006 - DNA, 25 bp, Homo sapien
agtgcaatctatttaacatgggaca

SEQ ID NO: 2356007 - DNA, 25 bp, Homo sapien
tacaagtatttgagggcactgataa

SEQ ID NO: 2356008 - DNA, 25 bp, Homo sapien
catggctgcaattggaaatctatcc

SEQ ID NO: 2356009 - DNA, 25 bp, Homo sapien
aagtatagttatgatgtccaagagc

SEQ ID NO: 2356010 - DNA, 25 bp, Homo sapien
gcaagggcctaaattgaaaacatcc

SEQ ID NO: 2356011 - DNA, 25 bp, Homo sapien
ggttccctggaaaagcagtccacat

SEQ ID NO: 2356012 - DNA, 25 bp, Homo sapien
agataattttccttgctagcagctg

SEQ ID NO: 2356013 - DNA, 25 bp, Homo sapien
aaaagataattttccttgctagcag

SEQ ID NO: 2356014 - DNA, 25 bp, Homo sapien
aaagataattttccttgctagcagc

SEQ ID NO: 2356015 - DNA, 25 bp, Homo sapien
tgaaaagataattttccttgctagc

SEQ ID NO: 2356016 - DNA, 25 bp, Homo sapien
gccacagccaggtcattctttgaat

SEQ ID NO: 2356017 - DNA, 25 bp, Homo sapien
catgtttcaaatcagtgaaggcttc

SEQ ID NO: 2356018 - DNA, 25 bp, Homo sapien
agccacagccaggtcattctttgaa

SEQ ID NO: 2356019 - DNA, 25 bp, Homo sapien
atttgtttctctcgagcagcatgtt

SEQ ID NO: 2356020 - DNA, 25 bp, Homo sapien
gatccactgtgcaaggagtcttaat

SEQ ID NO: 2356021 - DNA, 25 bp, Homo sapien
ggctagcactatacagaacatatgt

SEQ ID NO: 2356022 - DNA, 25 bp, Homo sapien
cagagaatttatcagggctagcact

SEQ ID NO: 2356023 - DNA, 25 bp, Homo sapien
cagaaacgttttgacactggaaaca

SEQ ID NO: 2356024 - DNA, 25 bp, Homo sapien
aaattagacaatccctttacatgtg

SEQ ID NO: 2356025 - DNA, 25 bp, Homo sapien
tctccaagaatctcatctaatttgt

SEQ ID NO: 2356026 - DNA, 25 bp, Homo sapien
ttgttctaataaaagacgtggccac

SEQ ID NO: 2356027 - DNA, 25 bp, Homo sapien
tttccctccaagctctattgttcta

SEQ ID NO: 2356028 - DNA, 25 bp, Homo sapien
tcactgacagtatttgaccccctgc

SEQ ID NO: 2356029 - DNA, 25 bp, Homo sapien
tttatcactgacagtatttgacccc

SEQ ID NO: 2356030 - DNA, 25 bp, Homo sapien
actgacagtatttgaccccctgcaa

SEQ ID NO: 2356031 - DNA, 25 bp, Homo sapien
tgacagtatttgaccccctgcaatg

SEQ ID NO: 2356032 - DNA, 25 bp, Homo sapien
ctgatgtcagtggtgctaagagcta

SEQ ID NO: 2356033 - DNA, 25 bp, Homo sapien
attgctttgcaaaaaggatccctgc

SEQ ID NO: 2356034 - DNA, 25 bp, Homo sapien
taagagctacaacaccttcttgaga

SEQ ID NO: 2356035 - DNA, 25 bp, Homo sapien
aaatccaaatcctgagcaacttcct

SEQ ID NO: 2356036 - DNA, 25 bp, Homo sapien
gcttcttcgtccaaaagaactaata

SEQ ID NO: 2356037 - DNA, 25 bp, Homo sapien
ggtaggagcattagctgcttcttcg

SEQ ID NO: 2356038 - DNA, 25 bp, Homo sapien
gccacagtatgcagtaccatggttt

SEQ ID NO: 2356039 - DNA, 25 bp, Homo sapien
aagaatagacgttccatgatgatgg

SEQ ID NO: 2356040 - DNA, 25 bp, Homo sapien
tttttctcttgcattgacacacaga

SEQ ID NO: 2356041 - DNA, 25 bp, Homo sapien
tgacacacagatgcgttctcttagg

SEQ ID NO: 2356042 - DNA, 25 bp, Homo sapien
ttatcgaattattcacctgtgtggg

SEQ ID NO: 2356043 - DNA, 25 bp, Homo sapien
ggttttatcgaattattcacctgtg

SEQ ID NO: 2356044 - DNA, 25 bp, Homo sapien
tagatagaactagagcctttatttc

SEQ ID NO: 2356045 - DNA, 25 bp, Homo sapien
agaactagagcctttatttctctca

SEQ ID NO: 2356046 - DNA, 25 bp, Homo sapien
tgtaaatcccagggttcattttcca

SEQ ID NO: 2356047 - DNA, 25 bp, Homo sapien
cagtagatagaactagagcctttat

SEQ ID NO: 2356048 - DNA, 25 bp, Homo sapien
taaattaacattattccaattatcc

SEQ ID NO: 2356049 - DNA, 25 bp, Homo sapien
aattatccttgcttatcatgtagtc

SEQ ID NO: 2356050 - DNA, 25 bp, Homo sapien
tttataagtacaagcaaattgggat

SEQ ID NO: 2356051 - DNA, 25 bp, Homo sapien
catgtagtcatctttataagtacaa

SEQ ID NO: 2356052 - DNA, 25 bp, Homo sapien
acatttccaaaactcgttccaattg

SEQ ID NO: 2356053 - DNA, 25 bp, Homo sapien
catttccaaaactcgttccaattgt

SEQ ID NO: 2356054 - DNA, 25 bp, Homo sapien
gcatttttatgttgaggtggttcat

SEQ ID NO: 2356055 - DNA, 25 bp, Homo sapien
tttgctactttagctagtttgccgt

SEQ ID NO: 2356056 - DNA, 25 bp, Homo sapien
agctagtttgccgtacaatctattc

SEQ ID NO: 2356057 - DNA, 25 bp, Homo sapien
gccgtacaatctattctgtgaatca

SEQ ID NO: 2356058 - DNA, 25 bp, Homo sapien
cataatttacaccttgatctcttaa

SEQ ID NO: 2356059 - DNA, 25 bp, Homo sapien
ccttacatacactgtagaccaaaat

SEQ ID NO: 2356060 - DNA, 25 bp, Homo sapien
taacatactaaccttacatacactg

SEQ ID NO: 2356061 - DNA, 25 bp, Homo sapien
taagcatgtctttggtgaatggttt

SEQ ID NO: 2356062 - DNA, 25 bp, Homo sapien
aagaccatggctcaattacacctgc

SEQ ID NO: 2356063 - DNA, 25 bp, Homo sapien
ttaattgccaatgggaggagaagcc

SEQ ID NO: 2356064 - DNA, 25 bp, Homo sapien
tatgctgggaagagtctaccgacct

SEQ ID NO: 2356065 - DNA, 25 bp, Homo sapien
ccttcagtgctcagatgtatgctgg

SEQ ID NO: 2356066 - DNA, 25 bp, Homo sapien
aatatgcattaggacgactgacgat

SEQ ID NO: 2356067 - DNA, 25 bp, Homo sapien
tacatgccaggtagttcttccatcc

SEQ ID NO: 2356068 - DNA, 25 bp, Homo sapien
tctcctataaatttgcatctaaggt

SEQ ID NO: 2356069 - DNA, 25 bp, Homo sapien
caatgtgacttgtcgtttatttcaa

SEQ ID NO: 2356070 - DNA, 25 bp, Homo sapien
tattatccttttgtaaatgcagaga

SEQ ID NO: 2356071 - DNA, 25 bp, Homo sapien
tcatccttgagtgaaataacttgag

SEQ ID NO: 2356072 - DNA, 25 bp, Homo sapien
gacaggcatatgtactttaatcacc

SEQ ID NO: 2356073 - DNA, 25 bp, Homo sapien
gcctgatgtcctgtggtcttcctta

SEQ ID NO: 2356074 - DNA, 25 bp, Homo sapien
tgaaagaggccttccataaaagacg

SEQ ID NO: 2356075 - DNA, 25 bp, Homo sapien
tctaagagcagagttggaatgacgg

SEQ ID NO: 2356076 - DNA, 25 bp, Homo sapien
taggcaaaactaattcacagcagaa

SEQ ID NO: 2356077 - DNA, 25 bp, Homo sapien
gcaatgtcttgtatcttgaaaggac

SEQ ID NO: 2356078 - DNA, 25 bp, Homo sapien
agccttgccggcatctgttgatttt

SEQ ID NO: 2356079 - DNA, 25 bp, Homo sapien
cagccttgccggcatctgttgattt

SEQ ID NO: 2356080 - DNA, 25 bp, Homo sapien
cttttggatgcataccagtaatagg

SEQ ID NO: 2356081 - DNA, 25 bp, Homo sapien
tattatgaatagcattgtgatgaac

SEQ ID NO: 2356082 - DNA, 25 bp, Homo sapien
tggatgctctgaagccccaaatagt

SEQ ID NO: 2356083 - DNA, 25 bp, Homo sapien
gattgtgtgcttcagaaattcagca

SEQ ID NO: 2356084 - DNA, 25 bp, Homo sapien
atcctctgagattgtgtgcttcaga

SEQ ID NO: 2356085 - DNA, 25 bp, Homo sapien
tctggatgctctgaagccccaaata

SEQ ID NO: 2356086 - DNA, 25 bp, Homo sapien
tagaaactcctctagaattttgtca

SEQ ID NO: 2356087 - DNA, 25 bp, Homo sapien
aactcctctagaattttgtcaaaca

SEQ ID NO: 2356088 - DNA, 25 bp, Homo sapien
ctattagaaactcctctagaatttt

SEQ ID NO: 2356089 - DNA, 25 bp, Homo sapien
gaaactcctctagaattttgtcaaa

SEQ ID NO: 2356090 - DNA, 25 bp, Homo sapien
ttattcctgtccgaatgggcatttc

SEQ ID NO: 2356091 - DNA, 25 bp, Homo sapien
attcctgtccgaatgggcatttcag

SEQ ID NO: 2356092 - DNA, 25 bp, Homo sapien
tcctgtccgaatgggcatttcagga

SEQ ID NO: 2356093 - DNA, 25 bp, Homo sapien
ctgtccgaatgggcatttcaggatc

SEQ ID NO: 2356094 - DNA, 25 bp, Homo sapien
gaactcttgcatggattttcagccc

SEQ ID NO: 2356095 - DNA, 25 bp, Homo sapien
taatcacaatccacatgtagggaac

SEQ ID NO: 2356096 - DNA, 25 bp, Homo sapien
aaggtccagatccatgagaatccaa

SEQ ID NO: 2356097 - DNA, 25 bp, Homo sapien
cattagtggagtggtccaggaatcc

SEQ ID NO: 2356098 - DNA, 25 bp, Homo sapien
gatgagcaattactggaatatctga

SEQ ID NO: 2356099 - DNA, 25 bp, Homo sapien
ggcacttgatgagcaattactggaa

SEQ ID NO: 2356100 - DNA, 25 bp, Homo sapien
tagtgggcacttgatgagcaattac

SEQ ID NO: 2356101 - DNA, 25 bp, Homo sapien
ttagctactagtgggcacttgatga

SEQ ID NO: 2356102 - DNA, 25 bp, Homo sapien
aataggaacagctccagtctacagc

SEQ ID NO: 2356103 - DNA, 25 bp, Homo sapien
ggtgcacgcaccgtgcgcgagccga

SEQ ID NO: 2356104 - DNA, 25 bp, Homo sapien
tcagtgggtgcacgcaccgtgcgcg

SEQ ID NO: 2356105 - DNA, 25 bp, Homo sapien
aacgggggaagagccaagatggccg

SEQ ID NO: 2356106 - DNA, 25 bp, Homo sapien
tataagtgcacattatagacccact

SEQ ID NO: 2356107 - DNA, 25 bp, Homo sapien
gaagatccaatctacgggttcccga

SEQ ID NO: 2356108 - DNA, 25 bp, Homo sapien
tatttgaacccatgcctattaagag

SEQ ID NO: 2356109 - DNA, 25 bp, Homo sapien
cacaaacagcgagattggctacagc

SEQ ID NO: 2356110 - DNA, 25 bp, Homo sapien
gaaaccaaacaagtcatgtacttct

SEQ ID NO: 2356111 - DNA, 25 bp, Homo sapien
caaaagtctgaatttatgccagcat

SEQ ID NO: 2356112 - DNA, 25 bp, Homo sapien
gcgagccagccataggaaagacctt

SEQ ID NO: 2356113 - DNA, 25 bp, Homo sapien
tgtacttctaaaatggcgagccagc

SEQ ID NO: 2356114 - DNA, 25 bp, Homo sapien
cagcagcctgtacattctgataatg

SEQ ID NO: 2356115 - DNA, 25 bp, Homo sapien
gataatgaaagtacgaagcagaagc

SEQ ID NO: 2356116 - DNA, 25 bp, Homo sapien
ggatactgggcaataacaaatatac

SEQ ID NO: 2356117 - DNA, 25 bp, Homo sapien
gaagcagaagctttagaatagcctt

SEQ ID NO: 2356118 - DNA, 25 bp, Homo sapien
gaaagcaacaggagtattcagagcc

SEQ ID NO: 2356119 - DNA, 25 bp, Homo sapien
tgaagctttgcacggctcagaattt

SEQ ID NO: 2356120 - DNA, 25 bp, Homo sapien
tcatgaagctttgcacggctcagaa

SEQ ID NO: 2356121 - DNA, 25 bp, Homo sapien
catgaagctttgcacggctcagaat

SEQ ID NO: 2356122 - DNA, 25 bp, Homo sapien
aagctttgcacggctcagaatttac

SEQ ID NO: 2356123 - DNA, 25 bp, Homo sapien
ttccacatactcatgagggcaccag

SEQ ID NO: 2356124 - DNA, 25 bp, Homo sapien
attgcactgttgtgtgagagaagca

SEQ ID NO: 2356125 - DNA, 25 bp, Homo sapien
acatactcatgagggcaccagcaaa

SEQ ID NO: 2356126 - DNA, 25 bp, Homo sapien
gagagaagcaacgatctcatcttcc

SEQ ID NO: 2356127 - DNA, 25 bp, Homo sapien
gccctttgcttgagaagtaaatgaa

SEQ ID NO: 2356128 - DNA, 25 bp, Homo sapien
caaagaactatacgctcctgggtgc

SEQ ID NO: 2356129 - DNA, 25 bp, Homo sapien
aatgaacataggaacgcagatgcag

SEQ ID NO: 2356130 - DNA, 25 bp, Homo sapien
catttgttcatggtgttgtctctga

SEQ ID NO: 2356131 - DNA, 25 bp, Homo sapien
tcctaataaccggagctgaattacc

SEQ ID NO: 2356132 - DNA, 25 bp, Homo sapien
aaacatgaccttccacaatccttag

SEQ ID NO: 2356133 - DNA, 25 bp, Homo sapien
tgcccaaaatgcactgatgtaaagt

SEQ ID NO: 2356134 - DNA, 25 bp, Homo sapien
aaccaaatgttactgctcaactgaa

SEQ ID NO: 2356135 - DNA, 25 bp, Homo sapien
ctttaagtgcatatggtacaggata

SEQ ID NO: 2356136 - DNA, 25 bp, Homo sapien
aagaaacctctcacagataagacag

SEQ ID NO: 2356137 - DNA, 25 bp, Homo sapien
cccagcccttattattttagtatct

SEQ ID NO: 2356138 - DNA, 25 bp, Homo sapien
aaataaccaattcctatctggaaca

SEQ ID NO: 2356139 - DNA, 25 bp, Homo sapien
aagtttatgcccctcccttgcaaag

SEQ ID NO: 2356140 - DNA, 25 bp, Homo sapien
gacttgttgaagctataatcagact

SEQ ID NO: 2356141 - DNA, 25 bp, Homo sapien
ctgtttggctctcctcagaagaaag

SEQ ID NO: 2356142 - DNA, 25 bp, Homo sapien
gaccataaagtccagatctggtagg

SEQ ID NO: 2356143 - DNA, 25 bp, Homo sapien
cgcgggaaaaaagatcttataggca

SEQ ID NO: 2356144 - DNA, 25 bp, Homo sapien
cagacatctcaaagagcagtagctc

SEQ ID NO: 2356145 - DNA, 25 bp, Homo sapien
agcatggagaataaacgcgggaaaa

SEQ ID NO: 2356146 - DNA, 25 bp, Homo sapien
gcaatcactgatctcatttgggaaa

SEQ ID NO: 2356147 - DNA, 25 bp, Homo sapien
agcctgtccacccttgagaatcctt

SEQ ID NO: 2356148 - DNA, 25 bp, Homo sapien
cctctccttggaacgtcaatgtttg

SEQ ID NO: 2356149 - DNA, 25 bp, Homo sapien
tgtgtagatgaaaccatctcatgct

SEQ ID NO: 2356150 - DNA, 25 bp, Homo sapien
ccagctatgccaatgtggtgctatt

SEQ ID NO: 2356151 - DNA, 25 bp, Homo sapien
tagctcaactggtaaggcgtaagac

SEQ ID NO: 2356152 - DNA, 25 bp, Homo sapien
gagtgaagagtgacatgccaccgca

SEQ ID NO: 2356153 - DNA, 25 bp, Homo sapien
gcaaaagtactaagggcctgtccac

SEQ ID NO: 2356154 - DNA, 25 bp, Homo sapien
gcaccttgcaaaaatggtcctggag

SEQ ID NO: 2356155 - DNA, 25 bp, Homo sapien
taatgacttagttctgcacatcaca

SEQ ID NO: 2356156 - DNA, 25 bp, Homo sapien
ggtctcacagggcttctattctaag

SEQ ID NO: 2356157 - DNA, 25 bp, Homo sapien
tattgagcacctgcaataacctgca

SEQ ID NO: 2356158 - DNA, 25 bp, Homo sapien
gctctagacactgggactataacag

SEQ ID NO: 2356159 - DNA, 25 bp, Homo sapien
catgtgtaagaaaacctgccgatcc

SEQ ID NO: 2356160 - DNA, 25 bp, Homo sapien
caagtagaaccggaaaacatgtgta

SEQ ID NO: 2356161 - DNA, 25 bp, Homo sapien
caagttattctatacaaatgcccag

SEQ ID NO: 2356162 - DNA, 25 bp, Homo sapien
tgccgatccctatgggccttggcca

SEQ ID NO: 2356163 - DNA, 25 bp, Homo sapien
tgtacgtgggactgacaggaataac

SEQ ID NO: 2356164 - DNA, 25 bp, Homo sapien
gcacattactaaatgttagcgagct

SEQ ID NO: 2356165 - DNA, 25 bp, Homo sapien
aataacaccgcatcacctcatgtgg

SEQ ID NO: 2356166 - DNA, 25 bp, Homo sapien
ttagcgagcttcagcttgtacgtgg

SEQ ID NO: 2356167 - DNA, 25 bp, Homo sapien
gaggcagtttagcagagtggttaac

SEQ ID NO: 2356168 - DNA, 25 bp, Homo sapien
gaatcagaaggaataggtccaaatt

SEQ ID NO: 2356169 - DNA, 25 bp, Homo sapien
gacagtagtacttatccctgagaga

SEQ ID NO: 2356170 - DNA, 25 bp, Homo sapien
tggttaactggtgagctccagaatc

SEQ ID NO: 2356171 - DNA, 25 bp, Homo sapien
tttccctccaaactagcatctaccc

SEQ ID NO: 2356172 - DNA, 25 bp, Homo sapien
tccctccaaactagcatctaccccc

SEQ ID NO: 2356173 - DNA, 25 bp, Homo sapien
gcctttccctccaaactagcatcta

SEQ ID NO: 2356174 - DNA, 25 bp, Homo sapien
cctttccctccaaactagcatctac

SEQ ID NO: 2356175 - DNA, 25 bp, Homo sapien
ggtcccagcttgtggtaatactcac

SEQ ID NO: 2356176 - DNA, 25 bp, Homo sapien
gctcctagacttctataaataccat

SEQ ID NO: 2356177 - DNA, 25 bp, Homo sapien
attgaatactgtgctcctagacttc

SEQ ID NO: 2356178 - DNA, 25 bp, Homo sapien
accattacaaatgggtcccagcttg

SEQ ID NO: 2356179 - DNA, 25 bp, Homo sapien
aagggctgatatctgagccctcttt

SEQ ID NO: 2356180 - DNA, 25 bp, Homo sapien
aaagggctgatatctgagccctctt

SEQ ID NO: 2356181 - DNA, 25 bp, Homo sapien
agggctgatatctgagccctctttc

SEQ ID NO: 2356182 - DNA, 25 bp, Homo sapien
gggctgatatctgagccctctttcc

SEQ ID NO: 2356183 - DNA, 25 bp, Homo sapien
gagacatctaaatcatcctccacca

SEQ ID NO: 2356184 - DNA, 25 bp, Homo sapien
agacatctaaatcatcctccaccat

SEQ ID NO: 2356185 - DNA, 25 bp, Homo sapien
caaagttgatactgagacatctaaa

SEQ ID NO: 2356186 - DNA, 25 bp, Homo sapien
agagatatcaaagttgatactgaga

SEQ ID NO: 2356187 - DNA, 25 bp, Homo sapien
aagaagcagccacataaacaaggag

SEQ ID NO: 2356188 - DNA, 25 bp, Homo sapien
ggttttgaagtcacatcccaaagtg

SEQ ID NO: 2356189 - DNA, 25 bp, Homo sapien
aaagtgctgagtagatcgcatgacc

SEQ ID NO: 2356190 - DNA, 25 bp, Homo sapien
gagtacacgtttctcaaaatgtgca

SEQ ID NO: 2356191 - DNA, 25 bp, Homo sapien
taattaggagcaagaccatggcagg

SEQ ID NO: 2356192 - DNA, 25 bp, Homo sapien
taagtatgtggcatgcttgactagc

SEQ ID NO: 2356193 - DNA, 25 bp, Homo sapien
tgagtaaggttctcaatcagccgac

SEQ ID NO: 2356194 - DNA, 25 bp, Homo sapien
ccatggcaggttgacggttgagtaa

SEQ ID NO: 2356195 - DNA, 25 bp, Homo sapien
ttctcagtaaactatcgcagggaca

SEQ ID NO: 2356196 - DNA, 25 bp, Homo sapien
attctcagtaaactatcgcagggac

SEQ ID NO: 2356197 - DNA, 25 bp, Homo sapien
ctcagtaaactatcgcagggacaga

SEQ ID NO: 2356198 - DNA, 25 bp, Homo sapien
cagtaaactatcgcagggacagaaa

SEQ ID NO: 2356199 - DNA, 25 bp, Homo sapien
cattaccctaggaggttatagggca

SEQ ID NO: 2356200 - DNA, 25 bp, Homo sapien
tcaatatcagaagactagcttgtgt

SEQ ID NO: 2356201 - DNA, 25 bp, Homo sapien
gcaatcatcagtggtatattccctt

SEQ ID NO: 2356202 - DNA, 25 bp, Homo sapien
caagttggcttgactggccatctga

SEQ ID NO: 2356203 - DNA, 25 bp, Homo sapien
ttctcccaatactcacaagcatgct

SEQ ID NO: 2356204 - DNA, 25 bp, Homo sapien
tctgccagatggagcccatttttgt

SEQ ID NO: 2356205 - DNA, 25 bp, Homo sapien
tacctgacttagtgccatctgaaaa

SEQ ID NO: 2356206 - DNA, 25 bp, Homo sapien
ttttgtatcaatccgagaagggcct

SEQ ID NO: 2356207 - DNA, 25 bp, Homo sapien
taagaagcagtgttgccagatgcag

SEQ ID NO: 2356208 - DNA, 25 bp, Homo sapien
tactctaagatgcactaagctttcc

SEQ ID NO: 2356209 - DNA, 25 bp, Homo sapien
taaaatcccatgtcaagtactgggc

SEQ ID NO: 2356210 - DNA, 25 bp, Homo sapien
tctaggcaggaagattctactcaag

SEQ ID NO: 2356211 - DNA, 25 bp, Homo sapien
ttgctgtagctgcaatttccaagcc

SEQ ID NO: 2356212 - DNA, 25 bp, Homo sapien
tgctgtagctgcaatttccaagccc

SEQ ID NO: 2356213 - DNA, 25 bp, Homo sapien
gacaacccatggtggcaaaaaatcg

SEQ ID NO: 2356214 - DNA, 25 bp, Homo sapien
cacagtgaaaatagccacaaggtct

SEQ ID NO: 2356215 - DNA, 25 bp, Homo sapien
aaatcgttttcgcattgagctgccg

SEQ ID NO: 2356216 - DNA, 25 bp, Homo sapien
cattgttctcgataacagcctgcaa

SEQ ID NO: 2356217 - DNA, 25 bp, Homo sapien
caccaggatatgcagtaggatctgg

SEQ ID NO: 2356218 - DNA, 25 bp, Homo sapien
ctgtatacaccaggatatgcagtag

SEQ ID NO: 2356219 - DNA, 25 bp, Homo sapien
ttcctcttcctgcaaacctcaagtg

SEQ ID NO: 2356220 - DNA, 25 bp, Homo sapien
ttcctgcaaacctcaagtgcttcat

SEQ ID NO: 2356221 - DNA, 25 bp, Homo sapien
caaagctaggttctcttgcctccaa

SEQ ID NO: 2356222 - DNA, 25 bp, Homo sapien
tccaagaagtgtgtagcatagggag

SEQ ID NO: 2356223 - DNA, 25 bp, Homo sapien
aacaaagctaggttctcttgcctcc

SEQ ID NO: 2356224 - DNA, 25 bp, Homo sapien
gtgtgtagcatagggagatgcttcc

SEQ ID NO: 2356225 - DNA, 25 bp, Homo sapien
tcatagggaagataggagagcctat

SEQ ID NO: 2356226 - DNA, 25 bp, Homo sapien
tagggaagataggagagcctatcag

SEQ ID NO: 2356227 - DNA, 25 bp, Homo sapien
gaagataggagagcctatcagccag

SEQ ID NO: 2356228 - DNA, 25 bp, Homo sapien
gggaagataggagagcctatcagcc

SEQ ID NO: 2356229 - DNA, 25 bp, Homo sapien
tcttcagttcgtgtgtggagacagg

SEQ ID NO: 2356230 - DNA, 25 bp, Homo sapien
caccagctctgccacggctggaccg

SEQ ID NO: 2356231 - DNA, 25 bp, Homo sapien
gctgtgcctgctcaccttcaccagc

SEQ ID NO: 2356232 - DNA, 25 bp, Homo sapien
tctcttctacctggcgctgtgcctg

SEQ ID NO: 2356233 - DNA, 25 bp, Homo sapien
tgctgtcagtgcaccgacttctcgt

SEQ ID NO: 2356234 - DNA, 25 bp, Homo sapien
ccctttaggtaaatctggctgctgc

SEQ ID NO: 2356235 - DNA, 25 bp, Homo sapien
tgagggctcaattcataagacgtct

SEQ ID NO: 2356236 - DNA, 25 bp, Homo sapien
tccctagtcaagtaagtggctccag

SEQ ID NO: 2356237 - DNA, 25 bp, Homo sapien
gcaatgggaaaaatcagcagtcttc

SEQ ID NO: 2356238 - DNA, 25 bp, Homo sapien
ccaacccaattatttaagtgctgct

SEQ ID NO: 2356239 - DNA, 25 bp, Homo sapien
cctgcgcaatggaataaagtcctca

SEQ ID NO: 2356240 - DNA, 25 bp, Homo sapien
tcagagcagatagagcctgcgcaat

SEQ ID NO: 2356241 - DNA, 25 bp, Homo sapien
agggcaggaactgcctgtcgccacc

SEQ ID NO: 2356242 - DNA, 25 bp, Homo sapien
tttctccagcgtctttcttgccttc

SEQ ID NO: 2356243 - DNA, 25 bp, Homo sapien
acagtcatctggagtacaatcaggg

SEQ ID NO: 2356244 - DNA, 25 bp, Homo sapien
ccagagggcaggaactgcctgtcgc

SEQ ID NO: 2356245 - DNA, 25 bp, Homo sapien
ttaggagccatctatgcaccatgca

SEQ ID NO: 2356246 - DNA, 25 bp, Homo sapien
tcacttgccatgaccgctagggcct

SEQ ID NO: 2356247 - DNA, 25 bp, Homo sapien
tgatgacctgaacacttaggagcca

SEQ ID NO: 2356248 - DNA, 25 bp, Homo sapien
gaacagagacaagagtccacgaggc

SEQ ID NO: 2356249 - DNA, 25 bp, Homo sapien
ccagggacgctaaatttaatcccag

SEQ ID NO: 2356250 - DNA, 25 bp, Homo sapien
cgctaaatttaatcccagacacaat

SEQ ID NO: 2356251 - DNA, 25 bp, Homo sapien
taaatttaatcccagacacaatctg

SEQ ID NO: 2356252 - DNA, 25 bp, Homo sapien
gggacgctaaatttaatcccagaca

SEQ ID NO: 2356253 - DNA, 25 bp, Homo sapien
tcacagacgaaccatcgagttgaac

SEQ ID NO: 2356254 - DNA, 25 bp, Homo sapien
cacagacgaaccatcgagttgaaca

SEQ ID NO: 2356255 - DNA, 25 bp, Homo sapien
cagacgaaccatcgagttgaacatt

SEQ ID NO: 2356256 - DNA, 25 bp, Homo sapien
agacgaaccatcgagttgaacattt

SEQ ID NO: 2356257 - DNA, 25 bp, Homo sapien
ccactgtcgctatcctgtcctggat

SEQ ID NO: 2356258 - DNA, 25 bp, Homo sapien
gccactgtcgctatcctgtcctgga

SEQ ID NO: 2356259 - DNA, 25 bp, Homo sapien
aactgttaccccgagagttctctgg

SEQ ID NO: 2356260 - DNA, 25 bp, Homo sapien
ctgccactgtcgctatcctgtcctg

SEQ ID NO: 2356261 - DNA, 25 bp, Homo sapien
ccagagccactatatgaactgtgta

SEQ ID NO: 2356262 - DNA, 25 bp, Homo sapien
tctattcgagatgctggatatcccc

SEQ ID NO: 2356263 - DNA, 25 bp, Homo sapien
ctgtgtacaactggggtcaaagtca

SEQ ID NO: 2356264 - DNA, 25 bp, Homo sapien
ggtggtgtcatagtaatagaaccca

SEQ ID NO: 2356265 - DNA, 25 bp, Homo sapien
gcttaagttctaggtaattccataa

SEQ ID NO: 2356266 - DNA, 25 bp, Homo sapien
agttagaatcattagcctttctgtc

SEQ ID NO: 2356267 - DNA, 25 bp, Homo sapien
aattccataattctttaggcttcac

SEQ ID NO: 2356268 - DNA, 25 bp, Homo sapien
tacagtagttacttggctagagatc

SEQ ID NO: 2356269 - DNA, 25 bp, Homo sapien
caacttgggtatccaactgcttctc

SEQ ID NO: 2356270 - DNA, 25 bp, Homo sapien
gataacttcccggtcaacactacca

SEQ ID NO: 2356271 - DNA, 25 bp, Homo sapien
gtcaacactaccattccaaagctca

SEQ ID NO: 2356272 - DNA, 25 bp, Homo sapien
ggttctgtttatagaactgctgata

SEQ ID NO: 2356273 - DNA, 25 bp, Homo sapien
ctagactccaatgtggtagttcctc

SEQ ID NO: 2356274 - DNA, 25 bp, Homo sapien
aggcactagactccaatgtggtagt

SEQ ID NO: 2356275 - DNA, 25 bp, Homo sapien
gaattccgccaatgtaaatttccat

SEQ ID NO: 2356276 - DNA, 25 bp, Homo sapien
cctctgcccaagagtgaactatgaa

SEQ ID NO: 2356277 - DNA, 25 bp, Homo sapien
taaggtcttactcctggcatcttgt

SEQ ID NO: 2356278 - DNA, 25 bp, Homo sapien
ggtcttactcctggcatcttgttat

SEQ ID NO: 2356279 - DNA, 25 bp, Homo sapien
ataaataaggtcttactcctggcat

SEQ ID NO: 2356280 - DNA, 25 bp, Homo sapien
aataaggtcttactcctggcatctt

SEQ ID NO: 2356281 - DNA, 25 bp, Homo sapien
tttgatacaagtgtgcaacacataa

SEQ ID NO: 2356282 - DNA, 25 bp, Homo sapien
tacaagtgtgcaacacataataatt

SEQ ID NO: 2356283 - DNA, 25 bp, Homo sapien
gttttgatacaagtgtgcaacacat

SEQ ID NO: 2356284 - DNA, 25 bp, Homo sapien
gatacaagtgtgcaacacataataa

SEQ ID NO: 2356285 - DNA, 25 bp, Homo sapien
ggatcacatatgacttccaggccag

SEQ ID NO: 2356286 - DNA, 25 bp, Homo sapien
catacttccacatggtttggcaggg

SEQ ID NO: 2356287 - DNA, 25 bp, Homo sapien
tggcagggaacatgtgactagctct

SEQ ID NO: 2356288 - DNA, 25 bp, Homo sapien
gcagcccaaaactaagacacgtgat

SEQ ID NO: 2356289 - DNA, 25 bp, Homo sapien
taaaagagtaagtcagcctgcaagc

SEQ ID NO: 2356290 - DNA, 25 bp, Homo sapien
gataactgtatccatcgtaaaagag

SEQ ID NO: 2356291 - DNA, 25 bp, Homo sapien
tccatcgtaaaagagtaagtcagcc

SEQ ID NO: 2356292 - DNA, 25 bp, Homo sapien
taagtcagcctgcaagctgcagcag

SEQ ID NO: 2356293 - DNA, 25 bp, Homo sapien
atcgagaagacagatttcaagaaga

SEQ ID NO: 2356294 - DNA, 25 bp, Homo sapien
tgagtccagaatttaaggaaggggc

SEQ ID NO: 2356295 - DNA, 25 bp, Homo sapien
tggagctcaaatccaaccccaatct

SEQ ID NO: 2356296 - DNA, 25 bp, Homo sapien
tctgctccaaacagaacatcatgga

SEQ ID NO: 2356297 - DNA, 25 bp, Homo sapien
ctgttatgtaagcaatgttgtaata

SEQ ID NO: 2356298 - DNA, 25 bp, Homo sapien
atgtaagcaatgttgtaatagaaac

SEQ ID NO: 2356299 - DNA, 25 bp, Homo sapien
ttatgtaagcaatgttgtaatagaa

SEQ ID NO: 2356300 - DNA, 25 bp, Homo sapien
gtaagcaatgttgtaatagaaacat

SEQ ID NO: 2356301 - DNA, 25 bp, Homo sapien
agtactgggaacaaatgcctgtcta

SEQ ID NO: 2356302 - DNA, 25 bp, Homo sapien
tattgtctctgttactgttgctgtc

SEQ ID NO: 2356303 - DNA, 25 bp, Homo sapien
ttttctatttgcaaaactcagtgct

SEQ ID NO: 2356304 - DNA, 25 bp, Homo sapien
gcctgtctaagtgttgtattgtctc

SEQ ID NO: 2356305 - DNA, 25 bp, Homo sapien
caatggagtaatcaacacactgacc

SEQ ID NO: 2356306 - DNA, 25 bp, Homo sapien
cattgcccacggactgcttcttggt

SEQ ID NO: 2356307 - DNA, 25 bp, Homo sapien
ttgggggtgcccttgcatgaagcca

SEQ ID NO: 2356308 - DNA, 25 bp, Homo sapien
ctgcttcttggtctggctgctgaat

SEQ ID NO: 2356309 - DNA, 25 bp, Homo sapien
tgaaaaggaccctcgaatcacattc

SEQ ID NO: 2356310 - DNA, 25 bp, Homo sapien
gggtttcctggcatccagaaatgac

SEQ ID NO: 2356311 - DNA, 25 bp, Homo sapien
cattccaagggtttcctggcatcca

SEQ ID NO: 2356312 - DNA, 25 bp, Homo sapien
tcgaatcacattccaagggtttcct

SEQ ID NO: 2356313 - DNA, 25 bp, Homo sapien
gggaagatgaatgtggcccatgggc

SEQ ID NO: 2356314 - DNA, 25 bp, Homo sapien
ccatgggctgtttcttacagaaata

SEQ ID NO: 2356315 - DNA, 25 bp, Homo sapien
catgggctgtttcttacagaaatac

SEQ ID NO: 2356316 - DNA, 25 bp, Homo sapien
ctctccaaggggaagatgaatgtgg

SEQ ID NO: 2356317 - DNA, 25 bp, Homo sapien
cagacagccttatcaacagcgtttt

SEQ ID NO: 2356318 - DNA, 25 bp, Homo sapien
gttaggcttgtctgctcacgctccc

SEQ ID NO: 2356319 - DNA, 25 bp, Homo sapien
aatactgcccctgaatttgccttcc

SEQ ID NO: 2356320 - DNA, 25 bp, Homo sapien
catggttcctttcaatcaggaggct

SEQ ID NO: 2356321 - DNA, 25 bp, Homo sapien
tctgtattgtagcagcttccctaac

SEQ ID NO: 2356322 - DNA, 25 bp, Homo sapien
cagtctttgagatagcactctggcc

SEQ ID NO: 2356323 - DNA, 25 bp, Homo sapien
taacctatttccttgagtcgtcgtg

SEQ ID NO: 2356324 - DNA, 25 bp, Homo sapien
taagcatggactctttaactcaatg

SEQ ID NO: 2356325 - DNA, 25 bp, Homo sapien
cttcaaagcctctgaatcatcattt

SEQ ID NO: 2356326 - DNA, 25 bp, Homo sapien
aaagcctctgaatcatcatttggag

SEQ ID NO: 2356327 - DNA, 25 bp, Homo sapien
tcaaagcctctgaatcatcatttgg

SEQ ID NO: 2356328 - DNA, 25 bp, Homo sapien
agcctctgaatcatcatttggagcc

SEQ ID NO: 2356329 - DNA, 25 bp, Homo sapien
tcatatatgctttgcagagaactca

SEQ ID NO: 2356330 - DNA, 25 bp, Homo sapien
cagatgttgactaaaggcttggttg

SEQ ID NO: 2356331 - DNA, 25 bp, Homo sapien
cctttacaagatggagaaacaacaa

SEQ ID NO: 2356332 - DNA, 25 bp, Homo sapien
aaagccatggacagaatgtggtctg

SEQ ID NO: 2356333 - DNA, 25 bp, Homo sapien
aagagcattggacagttagaactta

SEQ ID NO: 2356334 - DNA, 25 bp, Homo sapien
tagaacttaacatagttcttggaac

SEQ ID NO: 2356335 - DNA, 25 bp, Homo sapien
gaacttaacatagttcttggaacat

SEQ ID NO: 2356336 - DNA, 25 bp, Homo sapien
tggacagttagaacttaacatagtt

SEQ ID NO: 2356337 - DNA, 25 bp, Homo sapien
cagtatggccttagtagtcacgcag

SEQ ID NO: 2356338 - DNA, 25 bp, Homo sapien
ccataatagacagaggcagggtttc

SEQ ID NO: 2356339 - DNA, 25 bp, Homo sapien
tcccagatccaggagtaaggcactg

SEQ ID NO: 2356340 - DNA, 25 bp, Homo sapien
tacagcagcttataggttcaccaga

SEQ ID NO: 2356341 - DNA, 25 bp, Homo sapien
ggcttcttagtacctcctgatattt

SEQ ID NO: 2356342 - DNA, 25 bp, Homo sapien
agcactcaacaggtgactagataga

SEQ ID NO: 2356343 - DNA, 25 bp, Homo sapien
ggggcttcttagtacctcctgatat

SEQ ID NO: 2356344 - DNA, 25 bp, Homo sapien
tcttagtacctcctgatattttcca

SEQ ID NO: 2356345 - DNA, 25 bp, Homo sapien
gaaacatccccaagttttagcatgg

SEQ ID NO: 2356346 - DNA, 25 bp, Homo sapien
gctgaagactcctcacctgtatgtg

SEQ ID NO: 2356347 - DNA, 25 bp, Homo sapien
tgttgtgcctaatgagctctgccag

SEQ ID NO: 2356348 - DNA, 25 bp, Homo sapien
tagcatggatgatgggacattctcc

SEQ ID NO: 2356349 - DNA, 25 bp, Homo sapien
ttgataacacactcagggtctatgt

SEQ ID NO: 2356350 - DNA, 25 bp, Homo sapien
gcaggaaagacttgataacacactc

SEQ ID NO: 2356351 - DNA, 25 bp, Homo sapien
aacacactcagggtctatgtgggct

SEQ ID NO: 2356352 - DNA, 25 bp, Homo sapien
cagggtctatgtgggctgttctgaa

SEQ ID NO: 2356353 - DNA, 25 bp, Homo sapien
caatgagacagtagaggaattctgc

SEQ ID NO: 2356354 - DNA, 25 bp, Homo sapien
tatatatatgcctggaccgatgtca

SEQ ID NO: 2356355 - DNA, 25 bp, Homo sapien
tatacagtaggaaagacacatacac

SEQ ID NO: 2356356 - DNA, 25 bp, Homo sapien
taaccgaccctgtgatcatgagcaa

SEQ ID NO: 2356357 - DNA, 25 bp, Homo sapien
tcacctagctagaaagcagcgaggc

SEQ ID NO: 2356358 - DNA, 25 bp, Homo sapien
tccctgggcagttatgtgtactact

SEQ ID NO: 2356359 - DNA, 25 bp, Homo sapien
gaagccaagtctgcctagcgtcaaa

SEQ ID NO: 2356360 - DNA, 25 bp, Homo sapien
catagtccattgcatggccaagagc

SEQ ID NO: 2356361 - DNA, 25 bp, Homo sapien
aacccggcccttggcagtatgcatg

SEQ ID NO: 2356362 - DNA, 25 bp, Homo sapien
tctgtcccgttgcatcctgtgtgat

SEQ ID NO: 2356363 - DNA, 25 bp, Homo sapien
aggacaaaacaaaccctccagcgtg

SEQ ID NO: 2356364 - DNA, 25 bp, Homo sapien
gcagtcagcgggtgttcttctcgaa

SEQ ID NO: 2356365 - DNA, 25 bp, Homo sapien
ttgctgtccatagggagccaatctg

SEQ ID NO: 2356366 - DNA, 25 bp, Homo sapien
tgctgtccatagggagccaatctgg

SEQ ID NO: 2356367 - DNA, 25 bp, Homo sapien
gctgaatgaagccaggtggcccgat

SEQ ID NO: 2356368 - DNA, 25 bp, Homo sapien
gtcaaggtggtgcaccctgactgag

SEQ ID NO: 2356369 - DNA, 25 bp, Homo sapien
tctggcgttcgctgagcgccagcca

SEQ ID NO: 2356370 - DNA, 25 bp, Homo sapien
cccgataagaattttcctctggaga

SEQ ID NO: 2356371 - DNA, 25 bp, Homo sapien
gcagttgaccccgacttaatgggac

SEQ ID NO: 2356372 - DNA, 25 bp, Homo sapien
ggccagctctccagcgggctgcttc

SEQ ID NO: 2356373 - DNA, 25 bp, Homo sapien
taatgggaccactacgtgggtgtcc

SEQ ID NO: 2356374 - DNA, 25 bp, Homo sapien
ggcgtcccggctgagcagttgaccc

SEQ ID NO: 2356375 - DNA, 25 bp, Homo sapien
taagtagaatagagggacaggtgct

SEQ ID NO: 2356376 - DNA, 25 bp, Homo sapien
tctgcctgttcttaaggagctcaca

SEQ ID NO: 2356377 - DNA, 25 bp, Homo sapien
taaacactggcatgagcacaagagc

SEQ ID NO: 2356378 - DNA, 25 bp, Homo sapien
caagagcgaccaaaatgcagcctgt

SEQ ID NO: 2356379 - DNA, 25 bp, Homo sapien
gaatctagaccttctcgtttaaaga

SEQ ID NO: 2356380 - DNA, 25 bp, Homo sapien
ggagaatgatgtaaacctgacccac

SEQ ID NO: 2356381 - DNA, 25 bp, Homo sapien
aggagaatgatgtaaacctgaccca

SEQ ID NO: 2356382 - DNA, 25 bp, Homo sapien
tgaatctagaccttctcgtttaaag

SEQ ID NO: 2356383 - DNA, 25 bp, Homo sapien
gaaattacatgccaaactggagggt

SEQ ID NO: 2356384 - DNA, 25 bp, Homo sapien
agcctttattgccttccccgagatg

SEQ ID NO: 2356385 - DNA, 25 bp, Homo sapien
cagcaaagatgtggtgagcgtatat

SEQ ID NO: 2356386 - DNA, 25 bp, Homo sapien
cccgagatgcccacttggagtaata

SEQ ID NO: 2356387 - DNA, 25 bp, Homo sapien
tgccaagtcgggaatgagaaccatt

SEQ ID NO: 2356388 - DNA, 25 bp, Homo sapien
ttatcacttcacatgaattaagtca

SEQ ID NO: 2356389 - DNA, 25 bp, Homo sapien
tgttctaagctattgcccgggaagg

SEQ ID NO: 2356390 - DNA, 25 bp, Homo sapien
ccatactgatcttagagaggaggaa

SEQ ID NO: 2356391 - DNA, 25 bp, Homo sapien
gaaacaagctatattgaagacaact

SEQ ID NO: 2356392 - DNA, 25 bp, Homo sapien
gcattggccaaagtattgcgcttat

SEQ ID NO: 2356393 - DNA, 25 bp, Homo sapien
gaagaagttggtgcattggccaaag

SEQ ID NO: 2356394 - DNA, 25 bp, Homo sapien
aatcaaaatggtgccatatcactga

SEQ ID NO: 2356395 - DNA, 25 bp, Homo sapien
tccactgcggtcctggaaaacccag

SEQ ID NO: 2356396 - DNA, 25 bp, Homo sapien
taaaaagccagagacctcactcccg

SEQ ID NO: 2356397 - DNA, 25 bp, Homo sapien
tgggcaggaaactctctgactttgg

SEQ ID NO: 2356398 - DNA, 25 bp, Homo sapien
gagccagcatgtccactgcggtcct

SEQ ID NO: 2356399 - DNA, 25 bp, Homo sapien
ttcccaaagtccaagctcagcccga

SEQ ID NO: 2356400 - DNA, 25 bp, Homo sapien
aagctcagcccgactccttgcggtg

SEQ ID NO: 2356401 - DNA, 25 bp, Homo sapien
ctgaggtcagtcgtgtgtccccatt

SEQ ID NO: 2356402 - DNA, 25 bp, Homo sapien
agtgactgaggtcagtcgtgtgtcc

SEQ ID NO: 2356403 - DNA, 25 bp, Homo sapien
tttagaaaagaagcgtggagtccat

SEQ ID NO: 2356404 - DNA, 25 bp, Homo sapien
tctttgagccgcaagaaaaagcgct

SEQ ID NO: 2356405 - DNA, 25 bp, Homo sapien
tgtagtattcaaggatcagggcagt

SEQ ID NO: 2356406 - DNA, 25 bp, Homo sapien
gggcagtattcaaacagaggtccat

SEQ ID NO: 2356407 - DNA, 25 bp, Homo sapien
acttttgtaggatttgttacactct

SEQ ID NO: 2356408 - DNA, 25 bp, Homo sapien
cttttgtaggatttgttacactcta

SEQ ID NO: 2356409 - DNA, 25 bp, Homo sapien
ggagtttgcacctcaacactgtcat

SEQ ID NO: 2356410 - DNA, 25 bp, Homo sapien
cccactcaagtaaacctggagtttg

SEQ ID NO: 2356411 - DNA, 25 bp, Homo sapien
agccttccaagaaccgaggcgttct

SEQ ID NO: 2356412 - DNA, 25 bp, Homo sapien
ttccaagaaccgaggcgttctcctc

SEQ ID NO: 2356413 - DNA, 25 bp, Homo sapien
cggtgaccctagaaattggagcaaa

SEQ ID NO: 2356414 - DNA, 25 bp, Homo sapien
tcctcggtgaccctagaaattggag

SEQ ID NO: 2356415 - DNA, 25 bp, Homo sapien
aattacgattgaagtttagaaacat

SEQ ID NO: 2356416 - DNA, 25 bp, Homo sapien
aattggagcaaattacgattgaagt

SEQ ID NO: 2356417 - DNA, 25 bp, Homo sapien
ctcccggctgaataaacaggcggcg

SEQ ID NO: 2356418 - DNA, 25 bp, Homo sapien
tctccattcagctgggtttgttgtt

SEQ ID NO: 2356419 - DNA, 25 bp, Homo sapien
tcagctgggtttgttgttgcagtgc

SEQ ID NO: 2356420 - DNA, 25 bp, Homo sapien
gcgcgtgccggactcccggctgaat

SEQ ID NO: 2356421 - DNA, 25 bp, Homo sapien
tccgccttttcaatgggacacccag

SEQ ID NO: 2356422 - DNA, 25 bp, Homo sapien
ctggccagaagtgagagagtgctgg

SEQ ID NO: 2356423 - DNA, 25 bp, Homo sapien
gagtgcgtccgccttttcaatggga

SEQ ID NO: 2356424 - DNA, 25 bp, Homo sapien
ggctgccggagtgcgtccgcctttt

SEQ ID NO: 2356425 - DNA, 25 bp, Homo sapien
caaggagtcgcggaatcagagcgat

SEQ ID NO: 2356426 - DNA, 25 bp, Homo sapien
aagtcagtgctgaacgcgctctgcc

SEQ ID NO: 2356427 - DNA, 25 bp, Homo sapien
aatccccgggagacttcttagagtg

SEQ ID NO: 2356428 - DNA, 25 bp, Homo sapien
aatatgaagcgggagccctgacgga

SEQ ID NO: 2356429 - DNA, 25 bp, Homo sapien
gcggctgcggccgtggcaaagaaac

SEQ ID NO: 2356430 - DNA, 25 bp, Homo sapien
ctgctgcgcgctctgcgctgccgct

SEQ ID NO: 2356431 - DNA, 25 bp, Homo sapien
tgcggccgtggcaaagaaacaggct

SEQ ID NO: 2356432 - DNA, 25 bp, Homo sapien
gccgctctccatcttggcagagctt

SEQ ID NO: 2356433 - DNA, 25 bp, Homo sapien
ggttgaccaacttgacgcggttgcg

SEQ ID NO: 2356434 - DNA, 25 bp, Homo sapien
tgcagcgcatcagttcgggcgaaga

SEQ ID NO: 2356435 - DNA, 25 bp, Homo sapien
tactcatcttcttgttggccgcgcc

SEQ ID NO: 2356436 - DNA, 25 bp, Homo sapien
aaccagttggtgaagtcgagaagct

SEQ ID NO: 2356437 - DNA, 25 bp, Homo sapien
aagtccattcgcaccagggcctgac

SEQ ID NO: 2356438 - DNA, 25 bp, Homo sapien
aaagtccattcgcaccagggcctga

SEQ ID NO: 2356439 - DNA, 25 bp, Homo sapien
ttccaaagtccattcgcaccagggc

SEQ ID NO: 2356440 - DNA, 25 bp, Homo sapien
ccaaagtccattcgcaccagggcct

SEQ ID NO: 2356441 - DNA, 25 bp, Homo sapien
tcaggcatgcctcgcttagttggcg

SEQ ID NO: 2356442 - DNA, 25 bp, Homo sapien
taaagatgcaggttgtgcgatcacc

SEQ ID NO: 2356443 - DNA, 25 bp, Homo sapien
tgaaagccatgtctctcaggcatgc

SEQ ID NO: 2356444 - DNA, 25 bp, Homo sapien
ttcacaaaagattggaagcattcta

SEQ ID NO: 2356445 - DNA, 25 bp, Homo sapien
aatcgagtgtgtccccttcaaatgc

SEQ ID NO: 2356446 - DNA, 25 bp, Homo sapien
catatttatcccaaccggatttcac

SEQ ID NO: 2356447 - DNA, 25 bp, Homo sapien
tctgaaaaagaaagacctccacttc

SEQ ID NO: 2356448 - DNA, 25 bp, Homo sapien
tcaaatgccatttatgcctgtggtc

SEQ ID NO: 2356449 - DNA, 25 bp, Homo sapien
tagccttgccagtcagaagtcttaa

SEQ ID NO: 2356450 - DNA, 25 bp, Homo sapien
actgtggtcagtgcaaggcatagcc

SEQ ID NO: 2356451 - DNA, 25 bp, Homo sapien
gacttcactcggtgagacttcactg

SEQ ID NO: 2356452 - DNA, 25 bp, Homo sapien
tatgggtgtcttcaggccaacctcc

SEQ ID NO: 2356453 - DNA, 25 bp, Homo sapien
cttctgcttcttagtggcctctcac

SEQ ID NO: 2356454 - DNA, 25 bp, Homo sapien
gcttctgcttcttagtggcctctca

SEQ ID NO: 2356455 - DNA, 25 bp, Homo sapien
ctagcttctgcttcttagtggcctc

SEQ ID NO: 2356456 - DNA, 25 bp, Homo sapien
tagcttctgcttcttagtggcctct

SEQ ID NO: 2356457 - DNA, 25 bp, Homo sapien
gttacagaatatgattgaccaagag

SEQ ID NO: 2356458 - DNA, 25 bp, Homo sapien
ccaaggttacagaatatgattgacc

SEQ ID NO: 2356459 - DNA, 25 bp, Homo sapien
acagaatatgattgaccaagagtca

SEQ ID NO: 2356460 - DNA, 25 bp, Homo sapien
tatgattgaccaagagtcaacaacc

SEQ ID NO: 2356461 - DNA, 25 bp, Homo sapien
gagttcacattaggaaggcgagaaa

SEQ ID NO: 2356462 - DNA, 25 bp, Homo sapien
gtaagagttcacattaggaaggcga

SEQ ID NO: 2356463 - DNA, 25 bp, Homo sapien
gggacaggattcctcgtggagagca

SEQ ID NO: 2356464 - DNA, 25 bp, Homo sapien
attcctcgtggagagcagggagtaa

SEQ ID NO: 2356465 - DNA, 25 bp, Homo sapien
cagttccttttatgctacttttctg

SEQ ID NO: 2356466 - DNA, 25 bp, Homo sapien
ccagttccttttatgctacttttct

SEQ ID NO: 2356467 - DNA, 25 bp, Homo sapien
gcagcctgaaggcatgtggttagag

SEQ ID NO: 2356468 - DNA, 25 bp, Homo sapien
caggggacagaaactgagtgggtgg

SEQ ID NO: 2356469 - DNA, 25 bp, Homo sapien
cagcctgaaggcatgtggttagagt

SEQ ID NO: 2356470 - DNA, 25 bp, Homo sapien
acagaaactgagtgggtggggcatc

SEQ ID NO: 2356471 - DNA, 25 bp, Homo sapien
agactctgggtgctggtcactgtcc

SEQ ID NO: 2356472 - DNA, 25 bp, Homo sapien
gcacccatgactttcggggggctgc

SEQ ID NO: 2356473 - DNA, 25 bp, Homo sapien
ggcttctttcatggttatcagagac

SEQ ID NO: 2356474 - DNA, 25 bp, Homo sapien
acagaacgtcagggcttctttcatg

SEQ ID NO: 2356475 - DNA, 25 bp, Homo sapien
gcacgtggaatttgtagagcgctaa

SEQ ID NO: 2356476 - DNA, 25 bp, Homo sapien
tgttatgcagctcaggcacgtggaa

SEQ ID NO: 2356477 - DNA, 25 bp, Homo sapien
gattatcggttgatgctgcgacaca

SEQ ID NO: 2356478 - DNA, 25 bp, Homo sapien
tacagataattgtcaccgtgcacat

SEQ ID NO: 2356479 - DNA, 25 bp, Homo sapien
ttattggcttccatttagtgtctgt

SEQ ID NO: 2356480 - DNA, 25 bp, Homo sapien
tcaggaggtagctcaaacatgaata

SEQ ID NO: 2356481 - DNA, 25 bp, Homo sapien
tccttcattttgactagtcagtctt

SEQ ID NO: 2356482 - DNA, 25 bp, Homo sapien
cattttgactagtcagtctttcata

SEQ ID NO: 2356483 - DNA, 25 bp, Homo sapien
gtctttcataatacatccacttaaa

SEQ ID NO: 2356484 - DNA, 25 bp, Homo sapien
ctgtggagtaactgccttttgcttc

SEQ ID NO: 2356485 - DNA, 25 bp, Homo sapien
tgtggagtaactgccttttgcttct

SEQ ID NO: 2356486 - DNA, 25 bp, Homo sapien
gtggagtaactgccttttgcttctt

SEQ ID NO: 2356487 - DNA, 25 bp, Homo sapien
tggagtaactgccttttgcttcttc

SEQ ID NO: 2356488 - DNA, 25 bp, Homo sapien
aaattactcaaagggctaattcctg

SEQ ID NO: 2356489 - DNA, 25 bp, Homo sapien
gatagagaaattactcaaagggcta

SEQ ID NO: 2356490 - DNA, 25 bp, Homo sapien
ttggatagagaaattactcaaaggg

SEQ ID NO: 2356491 - DNA, 25 bp, Homo sapien
gagaaattactcaaagggctaattc

SEQ ID NO: 2356492 - DNA, 25 bp, Homo sapien
gaagtttagcgccaatgctgatgtg

SEQ ID NO: 2356493 - DNA, 25 bp, Homo sapien
ggcagtcaatgcgtccctctgaagt

SEQ ID NO: 2356494 - DNA, 25 bp, Homo sapien
tgtgatttatttcaggcgatggccc

SEQ ID NO: 2356495 - DNA, 25 bp, Homo sapien
gatggccctccgtgtatgtgtaaaa

SEQ ID NO: 2356496 - DNA, 25 bp, Homo sapien
ctggatgacctggtctgacacccat

SEQ ID NO: 2356497 - DNA, 25 bp, Homo sapien
cctggatgacctggtctgacaccca

SEQ ID NO: 2356498 - DNA, 25 bp, Homo sapien
cttgggtaaccatggagctatttct

SEQ ID NO: 2356499 - DNA, 25 bp, Homo sapien
tgggtaaccatggagctatttcttt

SEQ ID NO: 2356500 - DNA, 25 bp, Homo sapien
ggtaaccatggagctatttctttca

SEQ ID NO: 2356501 - DNA, 25 bp, Homo sapien
taaccatggagctatttctttcatg

SEQ ID NO: 2356502 - DNA, 25 bp, Homo sapien
gccgccccaactcttcctggaaatc

SEQ ID NO: 2356503 - DNA, 25 bp, Homo sapien
tcctggaaatcagatgctgctgcca

SEQ ID NO: 2356504 - DNA, 25 bp, Homo sapien
cagatgctgctgccaccacagccat

SEQ ID NO: 2356505 - DNA, 25 bp, Homo sapien
ctggccgccccaactcttcctggaa

SEQ ID NO: 2356506 - DNA, 25 bp, Homo sapien
ttttaatttgagcggaggaggtcga

SEQ ID NO: 2356507 - DNA, 25 bp, Homo sapien
ctgctaggatccaaagtggatgtct

SEQ ID NO: 2356508 - DNA, 25 bp, Homo sapien
tgctaggatccaaagtggatgtctc

SEQ ID NO: 2356509 - DNA, 25 bp, Homo sapien
gtttaacgggctctgctaggatcca

SEQ ID NO: 2356510 - DNA, 25 bp, Homo sapien
catcccccaggtttaacgggctctg

SEQ ID NO: 2356511 - DNA, 25 bp, Homo sapien
gcaacttgcaatctcctgttcttca

SEQ ID NO: 2356512 - DNA, 25 bp, Homo sapien
caggtcatacgaggacagctcttca

SEQ ID NO: 2356513 - DNA, 25 bp, Homo sapien
gagggatgttgtctaagaaagcctt

SEQ ID NO: 2356514 - DNA, 25 bp, Homo sapien
tcttgtaatgctagaactgctttgg

SEQ ID NO: 2356515 - DNA, 25 bp, Homo sapien
atggatacacaggcaagacacactg

SEQ ID NO: 2356516 - DNA, 25 bp, Homo sapien
gtatggatacacaggcaagacacac

SEQ ID NO: 2356517 - DNA, 25 bp, Homo sapien
gtggggatggcatgtatggatacac

SEQ ID NO: 2356518 - DNA, 25 bp, Homo sapien
atgtatggatacacaggcaagacac

SEQ ID NO: 2356519 - DNA, 25 bp, Homo sapien
gattgcccgccaaagtttgggccag

SEQ ID NO: 2356520 - DNA, 25 bp, Homo sapien
gccattcatcatcagctcaccgatt

SEQ ID NO: 2356521 - DNA, 25 bp, Homo sapien
ccacaaaggagcctgagcaatcaca

SEQ ID NO: 2356522 - DNA, 25 bp, Homo sapien
gattctgcgggcaagattgcccgcc

SEQ ID NO: 2356523 - DNA, 25 bp, Homo sapien
agcatgctcttgatcacttcccaca

SEQ ID NO: 2356524 - DNA, 25 bp, Homo sapien
tagcatgctcttgatcacttcccac

SEQ ID NO: 2356525 - DNA, 25 bp, Homo sapien
atgctcttgatcacttcccacactg

SEQ ID NO: 2356526 - DNA, 25 bp, Homo sapien
ctctagcatgctcttgatcacttcc

SEQ ID NO: 2356527 - DNA, 25 bp, Homo sapien
agcccaccggtgttggcctactaag

SEQ ID NO: 2356528 - DNA, 25 bp, Homo sapien
atgatgatagcgtggtcactgggca

SEQ ID NO: 2356529 - DNA, 25 bp, Homo sapien
tactaagtcaggtaatgaagctctc

SEQ ID NO: 2356530 - DNA, 25 bp, Homo sapien
ggaggatcacactcctgtaggatac

SEQ ID NO: 2356531 - DNA, 25 bp, Homo sapien
gggtcactagcattgcaaggcaggt

SEQ ID NO: 2356532 - DNA, 25 bp, Homo sapien
gcccacaccgaccacgataaattct

SEQ ID NO: 2356533 - DNA, 25 bp, Homo sapien
caaacatttgccaactggctgaatt

SEQ ID NO: 2356534 - DNA, 25 bp, Homo sapien
ttaggtaacctcttcactctaggat

SEQ ID NO: 2356535 - DNA, 25 bp, Homo sapien
tataaacaacccatccaggttctag

SEQ ID NO: 2356536 - DNA, 25 bp, Homo sapien
gagccaccatcaagaaagatctcca

SEQ ID NO: 2356537 - DNA, 25 bp, Homo sapien
gagatggccctattgtgagcagagc

SEQ ID NO: 2356538 - DNA, 25 bp, Homo sapien
ctgtagccagagatacagagatggc

SEQ ID NO: 2356539 - DNA, 25 bp, Homo sapien
ccctttctgcttaagttgcccaagt

SEQ ID NO: 2356540 - DNA, 25 bp, Homo sapien
tagtcatcccaagcagtatctatac

SEQ ID NO: 2356541 - DNA, 25 bp, Homo sapien
gcagtatctatacccttccccaaaa

SEQ ID NO: 2356542 - DNA, 25 bp, Homo sapien
ccaagtcgttttccgtggccagcag

SEQ ID NO: 2356543 - DNA, 25 bp, Homo sapien
caattaagacaacatcaagtgatta

SEQ ID NO: 2356544 - DNA, 25 bp, Homo sapien
tcaagtgattagtaacttaatcctg

SEQ ID NO: 2356545 - DNA, 25 bp, Homo sapien
catcaagtgattagtaacttaatcc

SEQ ID NO: 2356546 - DNA, 25 bp, Homo sapien
atctgcctttcaattaagacaacat

SEQ ID NO: 2356547 - DNA, 25 bp, Homo sapien
ggtaattgtccaagcattatcttca

SEQ ID NO: 2356548 - DNA, 25 bp, Homo sapien
tttaggaggtaattgtccaagcatt

SEQ ID NO: 2356549 - DNA, 25 bp, Homo sapien
ggaggtaattgtccaagcattatct

SEQ ID NO: 2356550 - DNA, 25 bp, Homo sapien
ataatttaggaggtaattgtccaag

SEQ ID NO: 2356551 - DNA, 25 bp, Homo sapien
tgcccagaaggcagaagggactagt

SEQ ID NO: 2356552 - DNA, 25 bp, Homo sapien
ctgcccagaaggcagaagggactag

SEQ ID NO: 2356553 - DNA, 25 bp, Homo sapien
ggtcactagaacattcaaactgatt

SEQ ID NO: 2356554 - DNA, 25 bp, Homo sapien
gcctggtcactagaacattcaaact

SEQ ID NO: 2356555 - DNA, 25 bp, Homo sapien
gattcaaagaggataatctttcaga

SEQ ID NO: 2356556 - DNA, 25 bp, Homo sapien
aacattcaaactgattcaaagagga

SEQ ID NO: 2356557 - DNA, 25 bp, Homo sapien
cttgatccaagtaaaaccagtgatt

SEQ ID NO: 2356558 - DNA, 25 bp, Homo sapien
ccagtgattctgcaagtagtctatg

SEQ ID NO: 2356559 - DNA, 25 bp, Homo sapien
cttctcagatggcttgatccaagta

SEQ ID NO: 2356560 - DNA, 25 bp, Homo sapien
tagtctatggattcaggcagctctg

SEQ ID NO: 2356561 - DNA, 25 bp, Homo sapien
gtggtgaaataagtggcagaaatac

SEQ ID NO: 2356562 - DNA, 25 bp, Homo sapien
gatattaacaaagtatctgtggtga

SEQ ID NO: 2356563 - DNA, 25 bp, Homo sapien
tactatgtgagatgaagctgaacag

SEQ ID NO: 2356564 - DNA, 25 bp, Homo sapien
acagtaccatcatttattattgtcc

SEQ ID NO: 2356565 - DNA, 25 bp, Homo sapien
tactttctctgggttgcctgcaggc

SEQ ID NO: 2356566 - DNA, 25 bp, Homo sapien
gctcactttatgttccaaaccttgg

SEQ ID NO: 2356567 - DNA, 25 bp, Homo sapien
gcagccgtgctgctaggatgaacaa

SEQ ID NO: 2356568 - DNA, 25 bp, Homo sapien
ggatgctgagagaagcgccatttct

SEQ ID NO: 2356569 - DNA, 25 bp, Homo sapien
aaatatcaggcaatatttgcattca

SEQ ID NO: 2356570 - DNA, 25 bp, Homo sapien
atatcaggcaatatttgcattcaag

SEQ ID NO: 2356571 - DNA, 25 bp, Homo sapien
gaaaatatcaggcaatatttgcatt

SEQ ID NO: 2356572 - DNA, 25 bp, Homo sapien
tatcaggcaatatttgcattcaagg

SEQ ID NO: 2356573 - DNA, 25 bp, Homo sapien
ggagtattcatcatggtttccgctc

SEQ ID NO: 2356574 - DNA, 25 bp, Homo sapien
tcttgtctggagtgttacatggaat

SEQ ID NO: 2356575 - DNA, 25 bp, Homo sapien
gtattcatcatggtttccgctctcc

SEQ ID NO: 2356576 - DNA, 25 bp, Homo sapien
tctggagtgttacatggaataaata

SEQ ID NO: 2356577 - DNA, 25 bp, Homo sapien
ccactttggtttgcttatgcggata

SEQ ID NO: 2356578 - DNA, 25 bp, Homo sapien
gccactcaggatccaactttacaga

SEQ ID NO: 2356579 - DNA, 25 bp, Homo sapien
tctagtcagcaaacggtcatttcac

SEQ ID NO: 2356580 - DNA, 25 bp, Homo sapien
cagctaacagtttgcaaacctggga

SEQ ID NO: 2356581 - DNA, 25 bp, Homo sapien
taaattcatgtatggttggatggat

SEQ ID NO: 2356582 - DNA, 25 bp, Homo sapien
cttgcctcttaatgtacatcaactt

SEQ ID NO: 2356583 - DNA, 25 bp, Homo sapien
ttaaagacttccattgtggtgaata

SEQ ID NO: 2356584 - DNA, 25 bp, Homo sapien
tcttctttagatgatatgccctggg

SEQ ID NO: 2356585 - DNA, 25 bp, Homo sapien
ttcagtctggtacatttcttcagtc

SEQ ID NO: 2356586 - DNA, 25 bp, Homo sapien
cttcagtctggtacatttcttcagt

SEQ ID NO: 2356587 - DNA, 25 bp, Homo sapien
tgtctgactgcctcctaaactctgt

SEQ ID NO: 2356588 - DNA, 25 bp, Homo sapien
gactgcctcctaaactctgtcccac

SEQ ID NO: 2356589 - DNA, 25 bp, Homo sapien
gtctgactgcctcctaaactctgtc

SEQ ID NO: 2356590 - DNA, 25 bp, Homo sapien
gtgtctgactgcctcctaaactctg

SEQ ID NO: 2356591 - DNA, 25 bp, Homo sapien
tctggcctgacgtggtagagtcaca

SEQ ID NO: 2356592 - DNA, 25 bp, Homo sapien
tcacagcatctgaagatttgatttg

SEQ ID NO: 2356593 - DNA, 25 bp, Homo sapien
gacgtggtagagtcacagcatctga

SEQ ID NO: 2356594 - DNA, 25 bp, Homo sapien
tagagtcacagcatctgaagatttg

SEQ ID NO: 2356595 - DNA, 25 bp, Homo sapien
cctggattcggctgaaacaaaagct

SEQ ID NO: 2356596 - DNA, 25 bp, Homo sapien
gatagccgactagcctctttgcttg

SEQ ID NO: 2356597 - DNA, 25 bp, Homo sapien
tacatctgcaataaatcctggagga

SEQ ID NO: 2356598 - DNA, 25 bp, Homo sapien
ccagagcttggagtcgatagccgac

SEQ ID NO: 2356599 - DNA, 25 bp, Homo sapien
tcaatgaactggaaactattgacat

SEQ ID NO: 2356600 - DNA, 25 bp, Homo sapien
caatgaactggaaactattgacatt

SEQ ID NO: 2356601 - DNA, 25 bp, Homo sapien
tgaatctcctcgagaaaactaaaga

SEQ ID NO: 2356602 - DNA, 25 bp, Homo sapien
ctttcattttttgcacccgtgtgtt

SEQ ID NO: 2356603 - DNA, 25 bp, Homo sapien
gatggtacaactgcacgaagatcca

SEQ ID NO: 2356604 - DNA, 25 bp, Homo sapien
ggcactgaggacatatgctttgcta

SEQ ID NO: 2356605 - DNA, 25 bp, Homo sapien
caagccttcgtgaagcatctgaata

SEQ ID NO: 2356606 - DNA, 25 bp, Homo sapien
ttttgaattaggatgccacttgctg

SEQ ID NO: 2356607 - DNA, 25 bp, Homo sapien
aatcacagcttgttggcccgtcttt

SEQ ID NO: 2356608 - DNA, 25 bp, Homo sapien
gataactgagctggtcccactaaag

SEQ ID NO: 2356609 - DNA, 25 bp, Homo sapien
agtaggaaagtagccggcacagcat

SEQ ID NO: 2356610 - DNA, 25 bp, Homo sapien
cctctcatgaaggttttgagtagga

SEQ ID NO: 2356611 - DNA, 25 bp, Homo sapien
tgtaagtagtggcaagcctctcatg

SEQ ID NO: 2356612 - DNA, 25 bp, Homo sapien
gagatgtgtctgtgatctgtacggt

SEQ ID NO: 2356613 - DNA, 25 bp, Homo sapien
ttatttccagaaccacaaggagcat

SEQ ID NO: 2356614 - DNA, 25 bp, Homo sapien
cttatttccagaaccacaaggagca

SEQ ID NO: 2356615 - DNA, 25 bp, Homo sapien
tgactccatcgagcttatagaactg

SEQ ID NO: 2356616 - DNA, 25 bp, Homo sapien
ttatccctttatgactccatcgagc

SEQ ID NO: 2356617 - DNA, 25 bp, Homo sapien
tatagaactggctactaccaccttg

SEQ ID NO: 2356618 - DNA, 25 bp, Homo sapien
accttgattcagaccacgtcgctgg

SEQ ID NO: 2356619 - DNA, 25 bp, Homo sapien
ttggtggtgtatgccgacaattcat

SEQ ID NO: 2356620 - DNA, 25 bp, Homo sapien
gtaatatcaggccataatgtttgca

SEQ ID NO: 2356621 - DNA, 25 bp, Homo sapien
cataatcatgttgatttccatagat

SEQ ID NO: 2356622 - DNA, 25 bp, Homo sapien
tttgcattgtgggtgttaaaacata

SEQ ID NO: 2356623 - DNA, 25 bp, Homo sapien
agccctggtgagtcaatgttgacat

SEQ ID NO: 2356624 - DNA, 25 bp, Homo sapien
tgatgttctacagggaatattgtca

SEQ ID NO: 2356625 - DNA, 25 bp, Homo sapien
tgcagaaactgatgttctacaggga

SEQ ID NO: 2356626 - DNA, 25 bp, Homo sapien
cagggaatattgtcataacttgaac

SEQ ID NO: 2356627 - DNA, 25 bp, Homo sapien
caggccatgttcaaaattagttgag

SEQ ID NO: 2356628 - DNA, 25 bp, Homo sapien
ttagttgaggtaataagggtgtatg

SEQ ID NO: 2356629 - DNA, 25 bp, Homo sapien
agggtgtatggtcaagtttctcttc

SEQ ID NO: 2356630 - DNA, 25 bp, Homo sapien
tcatactatgcaggccatgttcaaa

SEQ ID NO: 2356631 - DNA, 25 bp, Homo sapien
atttctagtggtttctccataggtg

SEQ ID NO: 2356632 - DNA, 25 bp, Homo sapien
ctagtggtttctccataggtgtttc

SEQ ID NO: 2356633 - DNA, 25 bp, Homo sapien
tattctatttctagtggtttctcca

SEQ ID NO: 2356634 - DNA, 25 bp, Homo sapien
ttattctatttctagtggtttctcc

SEQ ID NO: 2356635 - DNA, 25 bp, Homo sapien
gaatagctgatcaactgggtctcca

SEQ ID NO: 2356636 - DNA, 25 bp, Homo sapien
ttgtagagctctggtcgctagcacc

SEQ ID NO: 2356637 - DNA, 25 bp, Homo sapien
gcaggtttcctgcttcatcctgcac

SEQ ID NO: 2356638 - DNA, 25 bp, Homo sapien
tgggtctccacacaaaagagagtta

SEQ ID NO: 2356639 - DNA, 25 bp, Homo sapien
tgctgactggcaggtgccacgtgcc

SEQ ID NO: 2356640 - DNA, 25 bp, Homo sapien
gctgactggcaggtgccacgtgccc

SEQ ID NO: 2356641 - DNA, 25 bp, Homo sapien
tgctttacgtactttaattagagtc

SEQ ID NO: 2356642 - DNA, 25 bp, Homo sapien
ctgctttacgtactttaattagagt

SEQ ID NO: 2356643 - DNA, 25 bp, Homo sapien
tctgctttacgtactttaattagag

SEQ ID NO: 2356644 - DNA, 25 bp, Homo sapien
cttctgctttacgtactttaattag

SEQ ID NO: 2356645 - DNA, 25 bp, Homo sapien
gcagagtggtacatcttaggatgct

SEQ ID NO: 2356646 - DNA, 25 bp, Homo sapien
cagagtggtacatcttaggatgctg

SEQ ID NO: 2356647 - DNA, 25 bp, Homo sapien
agcagagtggtacatcttaggatgc

SEQ ID NO: 2356648 - DNA, 25 bp, Homo sapien
ctatagaagatgacagacgttttga

SEQ ID NO: 2356649 - DNA, 25 bp, Homo sapien
agatgacagacgttttgacaggtgc

SEQ ID NO: 2356650 - DNA, 25 bp, Homo sapien
ttttgacaggtgcaatatgctttga

SEQ ID NO: 2356651 - DNA, 25 bp, Homo sapien
gacagacgttttgacaggtgcaata

SEQ ID NO: 2356652 - DNA, 25 bp, Homo sapien
ctttcagatggaggagttggctaga

SEQ ID NO: 2356653 - DNA, 25 bp, Homo sapien
ctgtccttgacaatgaaagagacct

SEQ ID NO: 2356654 - DNA, 25 bp, Homo sapien
aaagagaccttcctattgtctggtc

SEQ ID NO: 2356655 - DNA, 25 bp, Homo sapien
ccaggcaatctttagcatggagctc

SEQ ID NO: 2356656 - DNA, 25 bp, Homo sapien
gcttcatcaagcccagttcacggga

SEQ ID NO: 2356657 - DNA, 25 bp, Homo sapien
tcgcttcatcaagcccagttcacgg

SEQ ID NO: 2356658 - DNA, 25 bp, Homo sapien
ttcatcaagcccagttcacgggagt

SEQ ID NO: 2356659 - DNA, 25 bp, Homo sapien
ctcgcttcatcaagcccagttcacg

SEQ ID NO: 2356660 - DNA, 25 bp, Homo sapien
gaagaagacagaggtgatatggcga

SEQ ID NO: 2356661 - DNA, 25 bp, Homo sapien
ctgcagaagaagacagaggtgatat

SEQ ID NO: 2356662 - DNA, 25 bp, Homo sapien
cagaagaagacagaggtgatatggc

SEQ ID NO: 2356663 - DNA, 25 bp, Homo sapien
gaagacagaggtgatatggcgacat

SEQ ID NO: 2356664 - DNA, 25 bp, Homo sapien
agaagtgaagtggttacccagaggg

SEQ ID NO: 2356665 - DNA, 25 bp, Homo sapien
tgaacaagacacagccctagaactc

SEQ ID NO: 2356666 - DNA, 25 bp, Homo sapien
gatatcagtaattgctccatgaaca

SEQ ID NO: 2356667 - DNA, 25 bp, Homo sapien
gagtgcctgagctatgacaaatgcc

SEQ ID NO: 2356668 - DNA, 25 bp, Homo sapien
tttgagacaaaacttgtttgccacc

SEQ ID NO: 2356669 - DNA, 25 bp, Homo sapien
gatgtcatgaccttcaaccttagta

SEQ ID NO: 2356670 - DNA, 25 bp, Homo sapien
gctgtttgcttagccgtacttgcta

SEQ ID NO: 2356671 - DNA, 25 bp, Homo sapien
tcatcgagaatactggctgtttgct

SEQ ID NO: 2356672 - DNA, 25 bp, Homo sapien
ccaaagaactttgtcccaaggcagc

SEQ ID NO: 2356673 - DNA, 25 bp, Homo sapien
gttctaattctccataggagttcat

SEQ ID NO: 2356674 - DNA, 25 bp, Homo sapien
tcttccttgttctaattctccatag

SEQ ID NO: 2356675 - DNA, 25 bp, Homo sapien
tattgcatagaaccaactcttcctt

SEQ ID NO: 2356676 - DNA, 25 bp, Homo sapien
ttgcatagaaccaactcttccttgt

SEQ ID NO: 2356677 - DNA, 25 bp, Homo sapien
gcacagctctgactctcttgacata

SEQ ID NO: 2356678 - DNA, 25 bp, Homo sapien
gaagttggccgagcgatttctttgg

SEQ ID NO: 2356679 - DNA, 25 bp, Homo sapien
tggtggttggcgcagcaacaattgc

SEQ ID NO: 2356680 - DNA, 25 bp, Homo sapien
caacaattgctgaagccgtggaagc

SEQ ID NO: 2356681 - DNA, 25 bp, Homo sapien
aggcctcactaacggtaattatctt

SEQ ID NO: 2356682 - DNA, 25 bp, Homo sapien
cactaacggtaattatcttttggct

SEQ ID NO: 2356683 - DNA, 25 bp, Homo sapien
cctcactaacggtaattatcttttg

SEQ ID NO: 2356684 - DNA, 25 bp, Homo sapien
taaggcctcactaacggtaattatc

SEQ ID NO: 2356685 - DNA, 25 bp, Homo sapien
tggttactaaccctcgagtgcctac

SEQ ID NO: 2356686 - DNA, 25 bp, Homo sapien
aagccagctgtcctttgtagatccc

SEQ ID NO: 2356687 - DNA, 25 bp, Homo sapien
gagtgcctacagctcccgatttgtg

SEQ ID NO: 2356688 - DNA, 25 bp, Homo sapien
gtttccgttccagtctcagaggcaa

SEQ ID NO: 2356689 - DNA, 25 bp, Homo sapien
tagtttcttcctagtctcgatggtc

SEQ ID NO: 2356690 - DNA, 25 bp, Homo sapien
catgattttgcagcgcctggtaccg

SEQ ID NO: 2356691 - DNA, 25 bp, Homo sapien
agtgattttgcttgttagttgatgt

SEQ ID NO: 2356692 - DNA, 25 bp, Homo sapien
tgatgttagctagtgattttgcttg

SEQ ID NO: 2356693 - DNA, 25 bp, Homo sapien
cacagcagtaagacattggtctgcg

SEQ ID NO: 2356694 - DNA, 25 bp, Homo sapien
ggtctgcgagatggaccatcttcct

SEQ ID NO: 2356695 - DNA, 25 bp, Homo sapien
aatacagtgtacagggatgtacagc

SEQ ID NO: 2356696 - DNA, 25 bp, Homo sapien
ttcctgaatacagtgtacagggatg

SEQ ID NO: 2356697 - DNA, 25 bp, Homo sapien
gggtcagtgctttcctctaattgta

SEQ ID NO: 2356698 - DNA, 25 bp, Homo sapien
ttctaccctccagcgggtcctgagg

SEQ ID NO: 2356699 - DNA, 25 bp, Homo sapien
gggcaggaccctcactcctaccatc

SEQ ID NO: 2356700 - DNA, 25 bp, Homo sapien
ggaccctcactcctaccatcaggaa

SEQ ID NO: 2356701 - DNA, 25 bp, Homo sapien
aactggatctgagatgtgacggtgg

SEQ ID NO: 2356702 - DNA, 25 bp, Homo sapien
ctttaacaccaattggacgtcccat

SEQ ID NO: 2356703 - DNA, 25 bp, Homo sapien
cctgctccctttaacaccaattgga

SEQ ID NO: 2356704 - DNA, 25 bp, Homo sapien
ttggacgtcccatactgggaactgg

SEQ ID NO: 2356705 - DNA, 25 bp, Homo sapien
atgccttcctgagtttaacactcac

SEQ ID NO: 2356706 - DNA, 25 bp, Homo sapien
catgccttcctgagtttaacactca

SEQ ID NO: 2356707 - DNA, 25 bp, Homo sapien
tcatgccttcctgagtttaacactc

SEQ ID NO: 2356708 - DNA, 25 bp, Homo sapien
taaagttgggacaatacagggtcac

SEQ ID NO: 2356709 - DNA, 25 bp, Homo sapien
tctgaacaggtttagaacaagtggc

SEQ ID NO: 2356710 - DNA, 25 bp, Homo sapien
tggtctaaggcatggagcactctct

SEQ ID NO: 2356711 - DNA, 25 bp, Homo sapien
cacagagctgtcgaaactaatgtca

SEQ ID NO: 2356712 - DNA, 25 bp, Homo sapien
gcattgacagcgagcagatggtccc

SEQ ID NO: 2356713 - DNA, 25 bp, Homo sapien
gcaggtgatgcattgacagcgagca

SEQ ID NO: 2356714 - DNA, 25 bp, Homo sapien
acggcccagacgagcaggtgatgca

SEQ ID NO: 2356715 - DNA, 25 bp, Homo sapien
gagacgcacacgctccttaatcccc

SEQ ID NO: 2356716 - DNA, 25 bp, Homo sapien
actgcggagcgcttggaaccacgct

SEQ ID NO: 2356717 - DNA, 25 bp, Homo sapien
cccattgtggttgcccggcgactgc

SEQ ID NO: 2356718 - DNA, 25 bp, Homo sapien
gccggaccgtttgctctctgctgct

SEQ ID NO: 2356719 - DNA, 25 bp, Homo sapien
ctcacggcaaggcagccccattgtg

SEQ ID NO: 2356720 - DNA, 25 bp, Homo sapien
cccggaagaacaggtgccattcata

SEQ ID NO: 2356721 - DNA, 25 bp, Homo sapien
tattctgatgtcgaaggcttcccca

SEQ ID NO: 2356722 - DNA, 25 bp, Homo sapien
tgcttggagtcgtgcacaggccaca

SEQ ID NO: 2356723 - DNA, 25 bp, Homo sapien
cattttgataaacatcgggatcccc

SEQ ID NO: 2356724 - DNA, 25 bp, Homo sapien
ggtggtgattcaggtcccgttggat

SEQ ID NO: 2356725 - DNA, 25 bp, Homo sapien
ttccaggggttatggcaggttctga

SEQ ID NO: 2356726 - DNA, 25 bp, Homo sapien
cccgttggatcagggtggtcccatt

SEQ ID NO: 2356727 - DNA, 25 bp, Homo sapien
attccaggggttatggcaggttctg

SEQ ID NO: 2356728 - DNA, 25 bp, Homo sapien
gccctgaaggtagccatcttccagc

SEQ ID NO: 2356729 - DNA, 25 bp, Homo sapien
caggaagccctgaaggtagccatct

SEQ ID NO: 2356730 - DNA, 25 bp, Homo sapien
ggaagccctgaaggtagccatcttc

SEQ ID NO: 2356731 - DNA, 25 bp, Homo sapien
aagccctgaaggtagccatcttcca

SEQ ID NO: 2356732 - DNA, 25 bp, Homo sapien
ttcaggcagccaaagggaccctcca

SEQ ID NO: 2356733 - DNA, 25 bp, Homo sapien
catgataccagatctggcgttgttc

SEQ ID NO: 2356734 - DNA, 25 bp, Homo sapien
ggccacgagcagacaaaactcggca

SEQ ID NO: 2356735 - DNA, 25 bp, Homo sapien
gctgtccacgatgatcatgcccatg

SEQ ID NO: 2356736 - DNA, 25 bp, Homo sapien
tattcgtctttagcagagagacctg

SEQ ID NO: 2356737 - DNA, 25 bp, Homo sapien
caggcaatgtccaggcttttttcat

SEQ ID NO: 2356738 - DNA, 25 bp, Homo sapien
caagtggctgtgctgcagacaggca

SEQ ID NO: 2356739 - DNA, 25 bp, Homo sapien
gctgccttgccctgattcttcaagt

SEQ ID NO: 2356740 - DNA, 25 bp, Homo sapien
tgatagtcatcagaaaccccagtac

SEQ ID NO: 2356741 - DNA, 25 bp, Homo sapien
caggatcagggtgcgcatgtcatgt

SEQ ID NO: 2356742 - DNA, 25 bp, Homo sapien
gagttcctgatgttccggaccatat

SEQ ID NO: 2356743 - DNA, 25 bp, Homo sapien
gattcccgtgacaggtctttccagg

SEQ ID NO: 2356744 - DNA, 25 bp, Homo sapien
tgtcactttgaggaatgcctgtggc

SEQ ID NO: 2356745 - DNA, 25 bp, Homo sapien
tgcctgtggccgctccagcatttgc

SEQ ID NO: 2356746 - DNA, 25 bp, Homo sapien
cctccacgttagtcaagtgggactt

SEQ ID NO: 2356747 - DNA, 25 bp, Homo sapien
cttctttgtcactttgaggaatgcc

SEQ ID NO: 2356748 - DNA, 25 bp, Homo sapien
agtttggctcccctgtgtaatttct

SEQ ID NO: 2356749 - DNA, 25 bp, Homo sapien
tggctcccctgtgtaatttcttctg

SEQ ID NO: 2356750 - DNA, 25 bp, Homo sapien
acctgttgagtctagcagagtagcc

SEQ ID NO: 2356751 - DNA, 25 bp, Homo sapien
cataatcctgtaacaatgggacttg

SEQ ID NO: 2356752 - DNA, 25 bp, Homo sapien
caaggttgctgcgtttgttccctgg

SEQ ID NO: 2356753 - DNA, 25 bp, Homo sapien
tgaagttgatttggtccagcctgac

SEQ ID NO: 2356754 - DNA, 25 bp, Homo sapien
tgcccagggtttagctgtgcttggt

SEQ ID NO: 2356755 - DNA, 25 bp, Homo sapien
gacccagggcattgtgacagatcag

SEQ ID NO: 2356756 - DNA, 25 bp, Homo sapien
tctgctaatagggtggtattgttca

SEQ ID NO: 2356757 - DNA, 25 bp, Homo sapien
gtgtgtttatgtggcaacgggtatc

SEQ ID NO: 2356758 - DNA, 25 bp, Homo sapien
cagcccagacctgtggatgattgtg

SEQ ID NO: 2356759 - DNA, 25 bp, Homo sapien
ggatgattgtgttaatccaacacca

SEQ ID NO: 2356760 - DNA, 25 bp, Homo sapien
tttgtttgcatcgcttcttgcctct

SEQ ID NO: 2356761 - DNA, 25 bp, Homo sapien
atgggggcgactgttttgtttgcat

SEQ ID NO: 2356762 - DNA, 25 bp, Homo sapien
tcatgggggcgactgttttgtttgc

SEQ ID NO: 2356763 - DNA, 25 bp, Homo sapien
tgttttgtttgcatcgcttcttgcc

SEQ ID NO: 2356764 - DNA, 25 bp, Homo sapien
aattccccgttgtctccgtgatccg

SEQ ID NO: 2356765 - DNA, 25 bp, Homo sapien
tcaaggactgaaccgtagggtgaac

SEQ ID NO: 2356766 - DNA, 25 bp, Homo sapien
gatgtgacctctttgaagactcgac

SEQ ID NO: 2356767 - DNA, 25 bp, Homo sapien
gacacttctgtaatggttacggcgg

SEQ ID NO: 2356768 - DNA, 25 bp, Homo sapien
tttatactgccagaatgaattcctg

SEQ ID NO: 2356769 - DNA, 25 bp, Homo sapien
gcacaatggacgagagcaaccagaa

SEQ ID NO: 2356770 - DNA, 25 bp, Homo sapien
tctgagctgagacccatgaggacca

SEQ ID NO: 2356771 - DNA, 25 bp, Homo sapien
gaaagaccacagtagctgttgaaga

SEQ ID NO: 2356772 - DNA, 25 bp, Homo sapien
tgcaccatgtgacaccacactagca

SEQ ID NO: 2356773 - DNA, 25 bp, Homo sapien
aaaaatcccagtcttggattcgctg

SEQ ID NO: 2356774 - DNA, 25 bp, Homo sapien
actctccattgtacactcaaggtgg

SEQ ID NO: 2356775 - DNA, 25 bp, Homo sapien
actgagccatgttgcaccatgtgac

SEQ ID NO: 2356776 - DNA, 25 bp, Homo sapien
aattactcagaggatgtgtggtcgg

SEQ ID NO: 2356777 - DNA, 25 bp, Homo sapien
cacgaggtggcagtagaacataagc

SEQ ID NO: 2356778 - DNA, 25 bp, Homo sapien
caagatgcatgttcacagaatgccc

SEQ ID NO: 2356779 - DNA, 25 bp, Homo sapien
gaagtgagactagctcgggtcatga

SEQ ID NO: 2356780 - DNA, 25 bp, Homo sapien
catctatctgtcaggcaccgtacta

SEQ ID NO: 2356781 - DNA, 25 bp, Homo sapien
aagaaagtcatctatctgtcaggca

SEQ ID NO: 2356782 - DNA, 25 bp, Homo sapien
aagtcatctatctgtcaggcaccgt

SEQ ID NO: 2356783 - DNA, 25 bp, Homo sapien
ctatctgtcaggcaccgtactagaa

SEQ ID NO: 2356784 - DNA, 25 bp, Homo sapien
aaatttgacccagttgttaattatg

SEQ ID NO: 2356785 - DNA, 25 bp, Homo sapien
atttgacccagttgttaattatgca

SEQ ID NO: 2356786 - DNA, 25 bp, Homo sapien
aatttgacccagttgttaattatgc

SEQ ID NO: 2356787 - DNA, 25 bp, Homo sapien
tttgacccagttgttaattatgcaa

SEQ ID NO: 2356788 - DNA, 25 bp, Homo sapien
tgtaataaatgtatgtgcttgcact

SEQ ID NO: 2356789 - DNA, 25 bp, Homo sapien
gattttagcaaagatgtaataaatg

SEQ ID NO: 2356790 - DNA, 25 bp, Homo sapien
taaatgtatgtgcttgcacttggca

SEQ ID NO: 2356791 - DNA, 25 bp, Homo sapien
ttgcacttggcataaatgtaaattg

SEQ ID NO: 2356792 - DNA, 25 bp, Homo sapien
tgtaggggactgacttccaactgct

SEQ ID NO: 2356793 - DNA, 25 bp, Homo sapien
ggtagcagatcctgctggtactcca

SEQ ID NO: 2356794 - DNA, 25 bp, Homo sapien
gagtatgtcttttattgatggtagc

SEQ ID NO: 2356795 - DNA, 25 bp, Homo sapien
tttttgcactgtagctttctcccaa

SEQ ID NO: 2356796 - DNA, 25 bp, Homo sapien
cccgtatggtgtggcctggacaaca

SEQ ID NO: 2356797 - DNA, 25 bp, Homo sapien
aacactgcttgagggatactcctgg

SEQ ID NO: 2356798 - DNA, 25 bp, Homo sapien
acctgtcaagggtctaggcctggcc

SEQ ID NO: 2356799 - DNA, 25 bp, Homo sapien
gatcaaactggtaccgtgttgccca

SEQ ID NO: 2356800 - DNA, 25 bp, Homo sapien
cactctgtacgaagaaacctttagg

SEQ ID NO: 2356801 - DNA, 25 bp, Homo sapien
ggtttaagcagttggctcccttcga

SEQ ID NO: 2356802 - DNA, 25 bp, Homo sapien
agcaggctggctacataacttgggc

SEQ ID NO: 2356803 - DNA, 25 bp, Homo sapien
ttaaaaatacatagggaggcagctt

SEQ ID NO: 2356804 - DNA, 25 bp, Homo sapien
tgttgttacactgagaggtggccat

SEQ ID NO: 2356805 - DNA, 25 bp, Homo sapien
tttgttgttacactgagaggtggcc

SEQ ID NO: 2356806 - DNA, 25 bp, Homo sapien
gggctctttgttgttacactgagag

SEQ ID NO: 2356807 - DNA, 25 bp, Homo sapien
tctttgttgttacactgagaggtgg

SEQ ID NO: 2356808 - DNA, 25 bp, Homo sapien
taagttccagatctaaagccacccc

SEQ ID NO: 2356809 - DNA, 25 bp, Homo sapien
gatgctcccacaattttgcacataa

SEQ ID NO: 2356810 - DNA, 25 bp, Homo sapien
ccttgaggacagaagaatatagcct

SEQ ID NO: 2356811 - DNA, 25 bp, Homo sapien
aaagccatgaaagccgaggtcacat

SEQ ID NO: 2356812 - DNA, 25 bp, Homo sapien
accaggagataggtgagacctgcct

SEQ ID NO: 2356813 - DNA, 25 bp, Homo sapien
gataaactcccagtgaattctttct

SEQ ID NO: 2356814 - DNA, 25 bp, Homo sapien
agtttgataaactcccagtgaattc

SEQ ID NO: 2356815 - DNA, 25 bp, Homo sapien
tcctttttcctagatcgaaccagga

SEQ ID NO: 2356816 - DNA, 25 bp, Homo sapien
gaaattttgtacaaccaatccaaga

SEQ ID NO: 2356817 - DNA, 25 bp, Homo sapien
ttttgtacaaccaatccaagacaaa

SEQ ID NO: 2356818 - DNA, 25 bp, Homo sapien
tgtacaaccaatccaagacaaaaaa

SEQ ID NO: 2356819 - DNA, 25 bp, Homo sapien
aattttgtacaaccaatccaagaca

SEQ ID NO: 2356820 - DNA, 25 bp, Homo sapien
gggttcggtgtgctgatgtacttca

SEQ ID NO: 2356821 - DNA, 25 bp, Homo sapien
tgtgatgacacctcggtgagcttgc

SEQ ID NO: 2356822 - DNA, 25 bp, Homo sapien
cataggggctactggtaagacctcc

SEQ ID NO: 2356823 - DNA, 25 bp, Homo sapien
gagcttgcttgagggttcggtgtgc

SEQ ID NO: 2356824 - DNA, 25 bp, Homo sapien
gtccactgttgtacctaagccctaa

SEQ ID NO: 2356825 - DNA, 25 bp, Homo sapien
gaatgatccagacccaatttggcac

SEQ ID NO: 2356826 - DNA, 25 bp, Homo sapien
cataaggtggtggatatgtaactac

SEQ ID NO: 2356827 - DNA, 25 bp, Homo sapien
ctgttgctcataatgccgaggctga

SEQ ID NO: 2356828 - DNA, 25 bp, Homo sapien
caatcatctcaatggaacgtcaggg

SEQ ID NO: 2356829 - DNA, 25 bp, Homo sapien
ccagtgccgtggaggatacagttac

SEQ ID NO: 2356830 - DNA, 25 bp, Homo sapien
tacatttgccatacctgagatagag

SEQ ID NO: 2356831 - DNA, 25 bp, Homo sapien
tcaattggtcatagatcagcagatc

SEQ ID NO: 2356832 - DNA, 25 bp, Homo sapien
tccgggcacttgactccaaggttga

SEQ ID NO: 2356833 - DNA, 25 bp, Homo sapien
ggcactcggtcctaattgtaagaag

SEQ ID NO: 2356834 - DNA, 25 bp, Homo sapien
tcatggtgtaaccatccgggcactt

SEQ ID NO: 2356835 - DNA, 25 bp, Homo sapien
agagcgcaggatcggcactcggtcc

SEQ ID NO: 2356836 - DNA, 25 bp, Homo sapien
gttggattcatagttccatcacgtt

SEQ ID NO: 2356837 - DNA, 25 bp, Homo sapien
gtttgggcttattgtcttagagcaa

SEQ ID NO: 2356838 - DNA, 25 bp, Homo sapien
gcttattgtcttagagcaagagaaa

SEQ ID NO: 2356839 - DNA, 25 bp, Homo sapien
attgtgagttacctaagtttgggct

SEQ ID NO: 2356840 - DNA, 25 bp, Homo sapien
aaggtgttacaagtcctgattatgc

SEQ ID NO: 2356841 - DNA, 25 bp, Homo sapien
caatcatcgtattagaatctaacct

SEQ ID NO: 2356842 - DNA, 25 bp, Homo sapien
tatgcagagacattaatcacgtatc

SEQ ID NO: 2356843 - DNA, 25 bp, Homo sapien
cgtatcatacgaacttcaatcatcg

SEQ ID NO: 2356844 - DNA, 25 bp, Homo sapien
agcggccaggacaacaccgaggttg

SEQ ID NO: 2356845 - DNA, 25 bp, Homo sapien
cgaggttggagatagtccttcctac

SEQ ID NO: 2356846 - DNA, 25 bp, Homo sapien
tcctacaaatatggcggcatccggg

SEQ ID NO: 2356847 - DNA, 25 bp, Homo sapien
gtatgttctgacctcaaaggtgtac

SEQ ID NO: 2356848 - DNA, 25 bp, Homo sapien
tgggatgaagttctagctgctggcc

SEQ ID NO: 2356849 - DNA, 25 bp, Homo sapien
tgccaagtcttatcacctaggttag

SEQ ID NO: 2356850 - DNA, 25 bp, Homo sapien
ggttgtagatgtggaccttgcctca

SEQ ID NO: 2356851 - DNA, 25 bp, Homo sapien
gtcacttgccccaaccagtaaatgg

SEQ ID NO: 2356852 - DNA, 25 bp, Homo sapien
ctctgaggcagatttgacttccatc

SEQ ID NO: 2356853 - DNA, 25 bp, Homo sapien
cctgcctctgaggcagatttgactt

SEQ ID NO: 2356854 - DNA, 25 bp, Homo sapien
gcctctgaggcagatttgacttcca

SEQ ID NO: 2356855 - DNA, 25 bp, Homo sapien
tgcctctgaggcagatttgacttcc

SEQ ID NO: 2356856 - DNA, 25 bp, Homo sapien
gggtgaccccgctccacctgggcac

SEQ ID NO: 2356857 - DNA, 25 bp, Homo sapien
ggtgaccccgctccacctgggcact

SEQ ID NO: 2356858 - DNA, 25 bp, Homo sapien
agggtgaccccgctccacctgggca

SEQ ID NO: 2356859 - DNA, 25 bp, Homo sapien
caggagcaggttccatttccttcca

SEQ ID NO: 2356860 - DNA, 25 bp, Homo sapien
ggcaggagcaggttccatttccttc

SEQ ID NO: 2356861 - DNA, 25 bp, Homo sapien
atgccttcagcacaactgcctctgc

SEQ ID NO: 2356862 - DNA, 25 bp, Homo sapien
ttggcaggagcaggttccatttcct

SEQ ID NO: 2356863 - DNA, 25 bp, Homo sapien
tcgtcagcacaggtttcacaggctg

SEQ ID NO: 2356864 - DNA, 25 bp, Homo sapien
tgaacagctgggtccaaataagttg

SEQ ID NO: 2356865 - DNA, 25 bp, Homo sapien
gctgggtccaaataagttgtcgtca

SEQ ID NO: 2356866 - DNA, 25 bp, Homo sapien
tccaaataagttgtcgtcagcacag

SEQ ID NO: 2356867 - DNA, 25 bp, Homo sapien
tcctggctgtgtggtattggcccat

SEQ ID NO: 2356868 - DNA, 25 bp, Homo sapien
cttgtcactaagattgccctcctgg

SEQ ID NO: 2356869 - DNA, 25 bp, Homo sapien
gaagcctctgacactgcattgcagg

SEQ ID NO: 2356870 - DNA, 25 bp, Homo sapien
tatactggattgactgcctggcact

SEQ ID NO: 2356871 - DNA, 25 bp, Homo sapien
tccactgttgcacaccccatgcaca

SEQ ID NO: 2356872 - DNA, 25 bp, Homo sapien
acacttggggccagtgtacgcagag

SEQ ID NO: 2356873 - DNA, 25 bp, Homo sapien
tagcactcacaggttccatcgccat

SEQ ID NO: 2356874 - DNA, 25 bp, Homo sapien
tacgcagagtagcactcacaggttc

SEQ ID NO: 2356875 - DNA, 25 bp, Homo sapien
ggccagtgtacgcagagtagcactc

SEQ ID NO: 2356876 - DNA, 25 bp, Homo sapien
gattcaggggatgtgtccagctctc

SEQ ID NO: 2356877 - DNA, 25 bp, Homo sapien
agctctccagatgaccagctcttca

SEQ ID NO: 2356878 - DNA, 25 bp, Homo sapien
taggtgccaaaggaatctgttagcc

SEQ ID NO: 2356879 - DNA, 25 bp, Homo sapien
gaatctgttagccagtgggcgctgc

SEQ ID NO: 2356880 - DNA, 25 bp, Homo sapien
agcaaggctgcacattcagggatgg

SEQ ID NO: 2356881 - DNA, 25 bp, Homo sapien
ggtcgcagtatttgccatcgcctcg

SEQ ID NO: 2356882 - DNA, 25 bp, Homo sapien
cgcctcggtaattgggaaggcattt

SEQ ID NO: 2356883 - DNA, 25 bp, Homo sapien
catcttcagtggaaggcgaacatct

SEQ ID NO: 2356884 - DNA, 25 bp, Homo sapien
tgttttcatcttcagtggaaggcga

SEQ ID NO: 2356885 - DNA, 25 bp, Homo sapien
tacgtacaatgagcatgagggtggc

SEQ ID NO: 2356886 - DNA, 25 bp, Homo sapien
tgagcatgagggtggcagatttttc

SEQ ID NO: 2356887 - DNA, 25 bp, Homo sapien
cttcttggcatgtacaactgtgccg

SEQ ID NO: 2356888 - DNA, 25 bp, Homo sapien
tgccgatttggtcccaggtacgtac

SEQ ID NO: 2356889 - DNA, 25 bp, Homo sapien
aagttaatttggcaggggtccacag

SEQ ID NO: 2356890 - DNA, 25 bp, Homo sapien
ggtccacaggcaagcacacttggcc

SEQ ID NO: 2356891 - DNA, 25 bp, Homo sapien
gtccaggcccatcatatttgcacac

SEQ ID NO: 2356892 - DNA, 25 bp, Homo sapien
gcacactgtagactttgtagggcag

SEQ ID NO: 2356893 - DNA, 25 bp, Homo sapien
taatgctccttacactcgcagtgag

SEQ ID NO: 2356894 - DNA, 25 bp, Homo sapien
tgcgacggtggtgcaatttgcattc

SEQ ID NO: 2356895 - DNA, 25 bp, Homo sapien
tttgcattcctatgacacgggttat

SEQ ID NO: 2356896 - DNA, 25 bp, Homo sapien
cactccaggtacgaaattctggtaa

SEQ ID NO: 2356897 - DNA, 25 bp, Homo sapien
tgtttccataacacgttaagccatc

SEQ ID NO: 2356898 - DNA, 25 bp, Homo sapien
taggagtgagatgaaagaggtcagc

SEQ ID NO: 2356899 - DNA, 25 bp, Homo sapien
cccacgtaacctttctggcaaatgc

SEQ ID NO: 2356900 - DNA, 25 bp, Homo sapien
tctgagtcgctccataatgtttcca

SEQ ID NO: 2356901 - DNA, 25 bp, Homo sapien
gattctaatagacaaggctcgcctg

SEQ ID NO: 2356902 - DNA, 25 bp, Homo sapien
tggaaatctgtacccatagctgcgt

SEQ ID NO: 2356903 - DNA, 25 bp, Homo sapien
gctcgcctgtccctttctgaatcat

SEQ ID NO: 2356904 - DNA, 25 bp, Homo sapien
gaatcattgtatcttgcagatgccc

SEQ ID NO: 2356905 - DNA, 25 bp, Homo sapien
accgtgaagggtcccagcttactca

SEQ ID NO: 2356906 - DNA, 25 bp, Homo sapien
agtcccttgtctgtaggtaacagca

SEQ ID NO: 2356907 - DNA, 25 bp, Homo sapien
gtaacagcaccgtgaagggtcccag

SEQ ID NO: 2356908 - DNA, 25 bp, Homo sapien
ttgaatcctttcagtcccttgtctg

SEQ ID NO: 2356909 - DNA, 25 bp, Homo sapien
gtggagtttcacaaagtattgagca

SEQ ID NO: 2356910 - DNA, 25 bp, Homo sapien
tattcgatgttcatctgaccagcaa

SEQ ID NO: 2356911 - DNA, 25 bp, Homo sapien
ccagcaattatgtggagtttcacaa

SEQ ID NO: 2356912 - DNA, 25 bp, Homo sapien
cccgactttccagtcaaggtgtaga

SEQ ID NO: 2356913 - DNA, 25 bp, Homo sapien
cattgttgctctcaaatgtgggttc

SEQ ID NO: 2356914 - DNA, 25 bp, Homo sapien
gcagaagcccattggaagcaatgat

SEQ ID NO: 2356915 - DNA, 25 bp, Homo sapien
tgatgtccccttgtataatttttac

SEQ ID NO: 2356916 - DNA, 25 bp, Homo sapien
tggctctgtcaaggatgtgcagaag

SEQ ID NO: 2356917 - DNA, 25 bp, Homo sapien
gttgtagcattgtcattatggtttg

SEQ ID NO: 2356918 - DNA, 25 bp, Homo sapien
aagatctgaacttgctgtaccttgg

SEQ ID NO: 2356919 - DNA, 25 bp, Homo sapien
aaagatctgaacttgctgtaccttg

SEQ ID NO: 2356920 - DNA, 25 bp, Homo sapien
ctgtaccttggttgtagcattgtca

SEQ ID NO: 2356921 - DNA, 25 bp, Homo sapien
aactccatcctcatctaaggcatgt

SEQ ID NO: 2356922 - DNA, 25 bp, Homo sapien
tctaaggcatgtcccaaattggttt

SEQ ID NO: 2356923 - DNA, 25 bp, Homo sapien
aaaggaggtaatcgagagtgccgtc

SEQ ID NO: 2356924 - DNA, 25 bp, Homo sapien
gagtgccgtccttcatgttattcaa

SEQ ID NO: 2356925 - DNA, 25 bp, Homo sapien
ttagacacagactgaggcagtgctg

SEQ ID NO: 2356926 - DNA, 25 bp, Homo sapien
gctgctgacacgatgccatcagagc

SEQ ID NO: 2356927 - DNA, 25 bp, Homo sapien
ctgctgacacgatgccatcagagca

SEQ ID NO: 2356928 - DNA, 25 bp, Homo sapien
tagacacagactgaggcagtgctgc

SEQ ID NO: 2356929 - DNA, 25 bp, Homo sapien
gacaatgtggtatctgacgagttcc

SEQ ID NO: 2356930 - DNA, 25 bp, Homo sapien
tggtatctgacgagttccagaagct

SEQ ID NO: 2356931 - DNA, 25 bp, Homo sapien
aatgggacaatgtggtatctgacga

SEQ ID NO: 2356932 - DNA, 25 bp, Homo sapien
caatgtggtatctgacgagttccag

SEQ ID NO: 2356933 - DNA, 25 bp, Homo sapien
tatgagctggttggccatgctcctg

SEQ ID NO: 2356934 - DNA, 25 bp, Homo sapien
ttgtcggtggtgttgaactgtatga

SEQ ID NO: 2356935 - DNA, 25 bp, Homo sapien
attgtcggtggtgttgaactgtatg

SEQ ID NO: 2356936 - DNA, 25 bp, Homo sapien
tggttggccatgctcctgatgtgag

SEQ ID NO: 2356937 - DNA, 25 bp, Homo sapien
gtgatctcaatttcttccattgcca

SEQ ID NO: 2356938 - DNA, 25 bp, Homo sapien
ggcagaatcgggacaatggagggag

SEQ ID NO: 2356939 - DNA, 25 bp, Homo sapien
ctcctgtcagtgtgtaaattcggcc

SEQ ID NO: 2356940 - DNA, 25 bp, Homo sapien
catcgatggggcagaatcgggacaa

SEQ ID NO: 2356941 - DNA, 25 bp, Homo sapien
gggacattgcagttattgacctgtg

SEQ ID NO: 2356942 - DNA, 25 bp, Homo sapien
aggggacattgcagttattgacctg

SEQ ID NO: 2356943 - DNA, 25 bp, Homo sapien
ggggacattgcagttattgacctgt

SEQ ID NO: 2356944 - DNA, 25 bp, Homo sapien
acaccgactccaccgtgggagaagg

SEQ ID NO: 2356945 - DNA, 25 bp, Homo sapien
cccacaccgactccaccgtgggaga

SEQ ID NO: 2356946 - DNA, 25 bp, Homo sapien
tgggagaaggagtgaagtcagcgct

SEQ ID NO: 2356947 - DNA, 25 bp, Homo sapien
gagaaggagtgaagtcagcgctggg

SEQ ID NO: 2356948 - DNA, 25 bp, Homo sapien
ggctcagagttagcaggacatctgc

SEQ ID NO: 2356949 - DNA, 25 bp, Homo sapien
gctcagagttagcaggacatctgct

SEQ ID NO: 2356950 - DNA, 25 bp, Homo sapien
ctcagagttagcaggacatctgctc

SEQ ID NO: 2356951 - DNA, 25 bp, Homo sapien
agtggcattgcagtaccgggcacag

SEQ ID NO: 2356952 - DNA, 25 bp, Homo sapien
cacagtggcattgcagtaccgggca

SEQ ID NO: 2356953 - DNA, 25 bp, Homo sapien
ggcattgcagtaccgggcacagccg

SEQ ID NO: 2356954 - DNA, 25 bp, Homo sapien
ttcacagtggcattgcagtaccggg

SEQ ID NO: 2356955 - DNA, 25 bp, Homo sapien
acctgtgaccacgtggaccctagga

SEQ ID NO: 2356956 - DNA, 25 bp, Homo sapien
aggaagacaacagcaagcacgggcc

SEQ ID NO: 2356957 - DNA, 25 bp, Homo sapien
tggaccctaggacccaagagcatgg

SEQ ID NO: 2356958 - DNA, 25 bp, Homo sapien
tactggcctagactgggcctcggcc

SEQ ID NO: 2356959 - DNA, 25 bp, Homo sapien
ggttgcagtcaggtccatagaagcc

SEQ ID NO: 2356960 - DNA, 25 bp, Homo sapien
cactggttgcagtcaggtccataga

SEQ ID NO: 2356961 - DNA, 25 bp, Homo sapien
gcagtcaggtccatagaagcctttg

SEQ ID NO: 2356962 - DNA, 25 bp, Homo sapien
tggacactggttgcagtcaggtcca

SEQ ID NO: 2356963 - DNA, 25 bp, Homo sapien
ccgaggtccgtatttattgggatca

SEQ ID NO: 2356964 - DNA, 25 bp, Homo sapien
ctcacaaatgcatgtcccgttgccg

SEQ ID NO: 2356965 - DNA, 25 bp, Homo sapien
gcatgtcccgttgccgccgaggcta

SEQ ID NO: 2356966 - DNA, 25 bp, Homo sapien
caccgaggtccgtatttattgggat

SEQ ID NO: 2356967 - DNA, 25 bp, Homo sapien
catgttccgtgaacgcacaggcatt

SEQ ID NO: 2356968 - DNA, 25 bp, Homo sapien
ggccccatcgctgtctatcctgtta

SEQ ID NO: 2356969 - DNA, 25 bp, Homo sapien
ttatcacagagtctcccggcagagc

SEQ ID NO: 2356970 - DNA, 25 bp, Homo sapien
gtgacagaactgcacgtagggccca

SEQ ID NO: 2356971 - DNA, 25 bp, Homo sapien
tagtcctgtgcaagggtccatctca

SEQ ID NO: 2356972 - DNA, 25 bp, Homo sapien
attgcggctacagcctcctggagtt

SEQ ID NO: 2356973 - DNA, 25 bp, Homo sapien
ggagttagtcctgtgcaagggtcca

SEQ ID NO: 2356974 - DNA, 25 bp, Homo sapien
tgcggctacagcctcctggagttag

SEQ ID NO: 2356975 - DNA, 25 bp, Homo sapien
aacaggatgcgttgtcgtggcagcc

SEQ ID NO: 2356976 - DNA, 25 bp, Homo sapien
cattccctgtccaaccctgctgaca

SEQ ID NO: 2356977 - DNA, 25 bp, Homo sapien
ggcagttgttgatctccgagcagtc

SEQ ID NO: 2356978 - DNA, 25 bp, Homo sapien
gggtgcccgtgccagttttgatgca

SEQ ID NO: 2356979 - DNA, 25 bp, Homo sapien
cactgagaaacgtactatggaaact

SEQ ID NO: 2356980 - DNA, 25 bp, Homo sapien
gattctagagttattagtctccata

SEQ ID NO: 2356981 - DNA, 25 bp, Homo sapien
gcttgatacacttcagattctagag

SEQ ID NO: 2356982 - DNA, 25 bp, Homo sapien
aaactgaagctgcttggctgtccca

SEQ ID NO: 2356983 - DNA, 25 bp, Homo sapien
agttattggttcacagtcaatccca

SEQ ID NO: 2356984 - DNA, 25 bp, Homo sapien
catttcccggtttgttccaagcatg

SEQ ID NO: 2356985 - DNA, 25 bp, Homo sapien
ctcgaaatcctttcttgcactcaca

SEQ ID NO: 2356986 - DNA, 25 bp, Homo sapien
gtcaatcccatttcctcgaaatcct

SEQ ID NO: 2356987 - DNA, 25 bp, Homo sapien
atctccttcatagccctcttgacaa

SEQ ID NO: 2356988 - DNA, 25 bp, Homo sapien
agctccagacaccagacgaagtaga

SEQ ID NO: 2356989 - DNA, 25 bp, Homo sapien
tcttgacaaacacagctccagacac

SEQ ID NO: 2356990 - DNA, 25 bp, Homo sapien
caccagacgaagtagattgacagct

SEQ ID NO: 2356991 - DNA, 25 bp, Homo sapien
cagctatcagagctatcagctggat

SEQ ID NO: 2356992 - DNA, 25 bp, Homo sapien
tgctgatttagtgtggcccatgctg

SEQ ID NO: 2356993 - DNA, 25 bp, Homo sapien
ctgaactatatacatagaaatggta

SEQ ID NO: 2356994 - DNA, 25 bp, Homo sapien
tatttgggctctgcacttgacagct

SEQ ID NO: 2356995 - DNA, 25 bp, Homo sapien
ttaaatatagctgcttcggagagaa

SEQ ID NO: 2356996 - DNA, 25 bp, Homo sapien
atttatccatcggttaaatatagct

SEQ ID NO: 2356997 - DNA, 25 bp, Homo sapien
tttatccatcggttaaatatagctg

SEQ ID NO: 2356998 - DNA, 25 bp, Homo sapien
tgtgacaaccagaagcttttctcat

SEQ ID NO: 2356999 - DNA, 25 bp, Homo sapien
acagtgtgggttgtagagaagcatt

SEQ ID NO: 2357000 - DNA, 25 bp, Homo sapien
ctggtccatgtcctcagtagcttgt

SEQ ID NO: 2357001 - DNA, 25 bp, Homo sapien
tcagtagcttgttgggaaggcacga

SEQ ID NO: 2357002 - DNA, 25 bp, Homo sapien
tgcagatctgccactctgtatgtgc

SEQ ID NO: 2357003 - DNA, 25 bp, Homo sapien
cagggtctgcagatctgccactctg

SEQ ID NO: 2357004 - DNA, 25 bp, Homo sapien
gaaggaagttgccctgcaaagatgt

SEQ ID NO: 2357005 - DNA, 25 bp, Homo sapien
aggaagttgccctgcaaagatgttg

SEQ ID NO: 2357006 - DNA, 25 bp, Homo sapien
gatgtgtatcactccatttgtggct

SEQ ID NO: 2357007 - DNA, 25 bp, Homo sapien
cttgttgatgatgtgtatcactcca

SEQ ID NO: 2357008 - DNA, 25 bp, Homo sapien
tccatttgtggctgcgttgtcccca

SEQ ID NO: 2357009 - DNA, 25 bp, Homo sapien
ttgtccccatcgacaatggaggccc

SEQ ID NO: 2357010 - DNA, 25 bp, Homo sapien
tagccccggaagatggaatagtcag

SEQ ID NO: 2357011 - DNA, 25 bp, Homo sapien
ttagacgtctttgtgggaccagcac

SEQ ID NO: 2357012 - DNA, 25 bp, Homo sapien
tgttccagccgcatgagcaggtttg

SEQ ID NO: 2357013 - DNA, 25 bp, Homo sapien
gaatagtcaggcatctgttccagcc

SEQ ID NO: 2357014 - DNA, 25 bp, Homo sapien
tctccctgatgtaattctcgatggc

SEQ ID NO: 2357015 - DNA, 25 bp, Homo sapien
gagcaaacactgtgtaggcatcggc

SEQ ID NO: 2357016 - DNA, 25 bp, Homo sapien
gcatcggcagcctcaattgcattcg

SEQ ID NO: 2357017 - DNA, 25 bp, Homo sapien
cgatggcattgttgtttggagcaaa

SEQ ID NO: 2357018 - DNA, 25 bp, Homo sapien
gaccacatgataccggaggacgtcc

SEQ ID NO: 2357019 - DNA, 25 bp, Homo sapien
tgcatgccattgtgcaggtcattct

SEQ ID NO: 2357020 - DNA, 25 bp, Homo sapien
gagaaacccagcatggtctcacgat

SEQ ID NO: 2357021 - DNA, 25 bp, Homo sapien
tcctccaggaccacatgataccgga

SEQ ID NO: 2357022 - DNA, 25 bp, Homo sapien
gaacttttcccaagccatggatcac

SEQ ID NO: 2357023 - DNA, 25 bp, Homo sapien
ccttatcagtggctacattggtgta

SEQ ID NO: 2357024 - DNA, 25 bp, Homo sapien
aagccatggatcactcccttatcag

SEQ ID NO: 2357025 - DNA, 25 bp, Homo sapien
tacattggtgtagtttattggagcc

SEQ ID NO: 2357026 - DNA, 25 bp, Homo sapien
tttagttccgaatgggcaggtcagc

SEQ ID NO: 2357027 - DNA, 25 bp, Homo sapien
agatttagttccgaatgggcaggtc

SEQ ID NO: 2357028 - DNA, 25 bp, Homo sapien
tagagatttagttccgaatgggcag

SEQ ID NO: 2357029 - DNA, 25 bp, Homo sapien
gttccgaatgggcaggtcagctctg

SEQ ID NO: 2357030 - DNA, 25 bp, Homo sapien
ctgacaagatttcttgctgcggtcc

SEQ ID NO: 2357031 - DNA, 25 bp, Homo sapien
tgagaaagttagttgcaacttcaac

SEQ ID NO: 2357032 - DNA, 25 bp, Homo sapien
acttcaactataaaaggaaatcagg

SEQ ID NO: 2357033 - DNA, 25 bp, Homo sapien
tatatccaggctggatatggttttg

SEQ ID NO: 2357034 - DNA, 25 bp, Homo sapien
cccatgaaataggaggtatagatgc

SEQ ID NO: 2357035 - DNA, 25 bp, Homo sapien
taggaggtatagatgcatctcctct

SEQ ID NO: 2357036 - DNA, 25 bp, Homo sapien
taaacagggttcgtcttcccatgaa

SEQ ID NO: 2357037 - DNA, 25 bp, Homo sapien
attttggctggcacccaataaacag

SEQ ID NO: 2357038 - DNA, 25 bp, Homo sapien
gacttcttgtgcacctgtttcttcg

SEQ ID NO: 2357039 - DNA, 25 bp, Homo sapien
tcttcgacctcacatggagtgggtg

SEQ ID NO: 2357040 - DNA, 25 bp, Homo sapien
gaaggacaaagcttgacaacgcact

SEQ ID NO: 2357041 - DNA, 25 bp, Homo sapien
gcctcggtgtagaaatcctgctgtg

SEQ ID NO: 2357042 - DNA, 25 bp, Homo sapien
cagtggatgccgtacttgccctcgg

SEQ ID NO: 2357043 - DNA, 25 bp, Homo sapien
agaagccggcacagcattctctcgt

SEQ ID NO: 2357044 - DNA, 25 bp, Homo sapien
cagatgccattaccaaagcagacat

SEQ ID NO: 2357045 - DNA, 25 bp, Homo sapien
cattcactccatccaaacagatgcc

SEQ ID NO: 2357046 - DNA, 25 bp, Homo sapien
cctctgtggagaggacggtgctcac

SEQ ID NO: 2357047 - DNA, 25 bp, Homo sapien
gttggtttcagcagcccaagatcct

SEQ ID NO: 2357048 - DNA, 25 bp, Homo sapien
ctttccctgcatattcctggttggt

SEQ ID NO: 2357049 - DNA, 25 bp, Homo sapien
tcactctttccctgcatattcctgg

SEQ ID NO: 2357050 - DNA, 25 bp, Homo sapien
aactatcaagcaatgtccacaatgg

SEQ ID NO: 2357051 - DNA, 25 bp, Homo sapien
tgcctctcatcaggtgtagccttgg

SEQ ID NO: 2357052 - DNA, 25 bp, Homo sapien
aatataaaaacgcatttgggctggg

SEQ ID NO: 2357053 - DNA, 25 bp, Homo sapien
catgtacctaaggttcctgtgtgga

SEQ ID NO: 2357054 - DNA, 25 bp, Homo sapien
aatcgtcagattctaacccatgttc

SEQ ID NO: 2357055 - DNA, 25 bp, Homo sapien
caataactcatttgtcatttactag

SEQ ID NO: 2357056 - DNA, 25 bp, Homo sapien
tgggaaaatcacctgcaaatcgtca

SEQ ID NO: 2357057 - DNA, 25 bp, Homo sapien
gggtcttgaatcacaaaaagggcag

SEQ ID NO: 2357058 - DNA, 25 bp, Homo sapien
ggttgcatctcccatggacacaaga

SEQ ID NO: 2357059 - DNA, 25 bp, Homo sapien
ggtccttggttgcatctcccatgga

SEQ ID NO: 2357060 - DNA, 25 bp, Homo sapien
attgtcacaatgcactcctcgccag

SEQ ID NO: 2357061 - DNA, 25 bp, Homo sapien
gtcacaggagccatctcccaagggt

SEQ ID NO: 2357062 - DNA, 25 bp, Homo sapien
agcaaagcttagagcagattataaa

SEQ ID NO: 2357063 - DNA, 25 bp, Homo sapien
gcagattataaatactggaggcctc

SEQ ID NO: 2357064 - DNA, 25 bp, Homo sapien
gcaaagcttagagcagattataaat

SEQ ID NO: 2357065 - DNA, 25 bp, Homo sapien
gattataaatactggaggcctcact

SEQ ID NO: 2357066 - DNA, 25 bp, Homo sapien
cattaaaaggcaactgcattccctt

SEQ ID NO: 2357067 - DNA, 25 bp, Homo sapien
gcctggagctttgggcaaagacgcc

SEQ ID NO: 2357068 - DNA, 25 bp, Homo sapien
cctgaccccttgttgctgaccatta

SEQ ID NO: 2357069 - DNA, 25 bp, Homo sapien
ttgcctggagctttgggcaaagacg

SEQ ID NO: 2357070 - DNA, 25 bp, Homo sapien
ttggcgctggtatggcatgtcccat

SEQ ID NO: 2357071 - DNA, 25 bp, Homo sapien
gctggtatggcatgtcccattgcag

SEQ ID NO: 2357072 - DNA, 25 bp, Homo sapien
gcgctggtatggcatgtcccattgc

SEQ ID NO: 2357073 - DNA, 25 bp, Homo sapien
ctggtatggcatgtcccattgcagt

SEQ ID NO: 2357074 - DNA, 25 bp, Homo sapien
cccgtttccttggaatcctgctgca

SEQ ID NO: 2357075 - DNA, 25 bp, Homo sapien
ccttggaatcctgctgcacacttgc

SEQ ID NO: 2357076 - DNA, 25 bp, Homo sapien
gcagatggtcccgtttccttggaat

SEQ ID NO: 2357077 - DNA, 25 bp, Homo sapien
tggtcccgtttccttggaatcctgc

SEQ ID NO: 2357078 - DNA, 25 bp, Homo sapien
tagcctgtgcaagccttgccagccc

SEQ ID NO: 2357079 - DNA, 25 bp, Homo sapien
ccagcaaattccttccttcgcttgc

SEQ ID NO: 2357080 - DNA, 25 bp, Homo sapien
ctctcaatagcctgtgcaagccttg

SEQ ID NO: 2357081 - DNA, 25 bp, Homo sapien
ccccagcaaattccttccttcgctt

SEQ ID NO: 2357082 - DNA, 25 bp, Homo sapien
cccattcagactgcaggaacaagaa

SEQ ID NO: 2357083 - DNA, 25 bp, Homo sapien
gcccattcagactgcaggaacaaga

SEQ ID NO: 2357084 - DNA, 25 bp, Homo sapien
ccattcagactgcaggaacaagaac

SEQ ID NO: 2357085 - DNA, 25 bp, Homo sapien
ggcatgatcattgtccagtgctgcc

SEQ ID NO: 2357086 - DNA, 25 bp, Homo sapien
tccagtgctgccacaatctggacca

SEQ ID NO: 2357087 - DNA, 25 bp, Homo sapien
gtgctgccacaatctggaccaaagc

SEQ ID NO: 2357088 - DNA, 25 bp, Homo sapien
tggcatgatcattgtccagtgctgc

SEQ ID NO: 2357089 - DNA, 25 bp, Homo sapien
ctctgggagaatccccagggtaaga

SEQ ID NO: 2357090 - DNA, 25 bp, Homo sapien
gtgagtctacttggccctctgggag

SEQ ID NO: 2357091 - DNA, 25 bp, Homo sapien
ggatgaaggtgagtctacttggccc

SEQ ID NO: 2357092 - DNA, 25 bp, Homo sapien
gccctctgggagaatccccagggta

SEQ ID NO: 2357093 - DNA, 25 bp, Homo sapien
ggcacacaatgccatcacccgtgta

SEQ ID NO: 2357094 - DNA, 25 bp, Homo sapien
agcctgctttgcacgtgcacactcg

SEQ ID NO: 2357095 - DNA, 25 bp, Homo sapien
ttgctgatctcacaggcattgattg

SEQ ID NO: 2357096 - DNA, 25 bp, Homo sapien
cagagcaacctccattgctgatctc

SEQ ID NO: 2357097 - DNA, 25 bp, Homo sapien
cctgtctgtgtgcactccgcattct

SEQ ID NO: 2357098 - DNA, 25 bp, Homo sapien
catggttctccaaacacgggttgat

SEQ ID NO: 2357099 - DNA, 25 bp, Homo sapien
agccaccatggttctccaaacacgg

SEQ ID NO: 2357100 - DNA, 25 bp, Homo sapien
gtgcactccgcattcttgtcacagc

SEQ ID NO: 2357101 - DNA, 25 bp, Homo sapien
cgtcttgttctcaaagttcaactcc

SEQ ID NO: 2357102 - DNA, 25 bp, Homo sapien
cacaatgggccccaatatcagtgca

SEQ ID NO: 2357103 - DNA, 25 bp, Homo sapien
ctcctcagctaacgtcttgttctca

SEQ ID NO: 2357104 - DNA, 25 bp, Homo sapien
tgggccccaatatcagtgcaaacct

SEQ ID NO: 2357105 - DNA, 25 bp, Homo sapien
ccaggagtagaagcacatggggtca

SEQ ID NO: 2357106 - DNA, 25 bp, Homo sapien
caggagtagaagcacatggggtcat

SEQ ID NO: 2357107 - DNA, 25 bp, Homo sapien
gtccaggagtagaagcacatggggt

SEQ ID NO: 2357108 - DNA, 25 bp, Homo sapien
tccaggagtagaagcacatggggtc

SEQ ID NO: 2357109 - DNA, 25 bp, Homo sapien
catctccagtgtatgctggcaaaca

SEQ ID NO: 2357110 - DNA, 25 bp, Homo sapien
acattgatgagtgtgcagacctttc

SEQ ID NO: 2357111 - DNA, 25 bp, Homo sapien
ttccatctccagtgtatgctggcaa

SEQ ID NO: 2357112 - DNA, 25 bp, Homo sapien
atgagtgtgcagacctttccatctc

SEQ ID NO: 2357113 - DNA, 25 bp, Homo sapien
gtacaagtcctttctacttgcccag

SEQ ID NO: 2357114 - DNA, 25 bp, Homo sapien
atgctgccgcggcaggtaaatccat

SEQ ID NO: 2357115 - DNA, 25 bp, Homo sapien
atccatctccaatgtagtttggctt

SEQ ID NO: 2357116 - DNA, 25 bp, Homo sapien
tagtttggcttgcaagtacaagtcc

SEQ ID NO: 2357117 - DNA, 25 bp, Homo sapien
gcaaacaaagagtagtttcacttaa

SEQ ID NO: 2357118 - DNA, 25 bp, Homo sapien
aacaaagagtagtttcacttaatgc

SEQ ID NO: 2357119 - DNA, 25 bp, Homo sapien
ctgcaaacaaagagtagtttcactt

SEQ ID NO: 2357120 - DNA, 25 bp, Homo sapien
caaacaaagagtagtttcacttaat

SEQ ID NO: 2357121 - DNA, 25 bp, Homo sapien
gcaactggaagaaatactgggaagt

SEQ ID NO: 2357122 - DNA, 25 bp, Homo sapien
tgcaactggaagaaatactgggaag

SEQ ID NO: 2357123 - DNA, 25 bp, Homo sapien
ctgcaactggaagaaatactgggaa

SEQ ID NO: 2357124 - DNA, 25 bp, Homo sapien
caactggaagaaatactgggaagtt

SEQ ID NO: 2357125 - DNA, 25 bp, Homo sapien
catcaaaggctgcagataaaggtgc

SEQ ID NO: 2357126 - DNA, 25 bp, Homo sapien
ggcctgggccgaccagatctttcac

SEQ ID NO: 2357127 - DNA, 25 bp, Homo sapien
gccgaccagatctttcacgaaatgc

SEQ ID NO: 2357128 - DNA, 25 bp, Homo sapien
ctcatcaaaggctgcagataaaggt

SEQ ID NO: 2357129 - DNA, 25 bp, Homo sapien
gaccacatggtaccgaagaacctgg

SEQ ID NO: 2357130 - DNA, 25 bp, Homo sapien
ctgagagacggagatgactattggc

SEQ ID NO: 2357131 - DNA, 25 bp, Homo sapien
ctggtggcaggcgaccacatggtac

SEQ ID NO: 2357132 - DNA, 25 bp, Homo sapien
tctccttggagggaagtagcatttg

SEQ ID NO: 2357133 - DNA, 25 bp, Homo sapien
aatttttgggagatagcaatttgtc

SEQ ID NO: 2357134 - DNA, 25 bp, Homo sapien
tttttgggagatagcaatttgtcta

SEQ ID NO: 2357135 - DNA, 25 bp, Homo sapien
tgggagtgataagcaaatttttggg

SEQ ID NO: 2357136 - DNA, 25 bp, Homo sapien
tccagagttgtctttgggagtgata

SEQ ID NO: 2357137 - DNA, 25 bp, Homo sapien
tgtagccattgtttgttgccaaagt

SEQ ID NO: 2357138 - DNA, 25 bp, Homo sapien
ctgtattaagttgctaaatttgatg

SEQ ID NO: 2357139 - DNA, 25 bp, Homo sapien
ttgttgccaaagtcgtaagattttg

SEQ ID NO: 2357140 - DNA, 25 bp, Homo sapien
gccattgtttgttgccaaagtcgta

SEQ ID NO: 2357141 - DNA, 25 bp, Homo sapien
tgtcttggttgaacaggaagtcctg

SEQ ID NO: 2357142 - DNA, 25 bp, Homo sapien
gggatcggtgatgacactcagcaaa

SEQ ID NO: 2357143 - DNA, 25 bp, Homo sapien
cttggcatctcgtatcacatgaaac

SEQ ID NO: 2357144 - DNA, 25 bp, Homo sapien
caggtagggcatggagggcttggtc

SEQ ID NO: 2357145 - DNA, 25 bp, Homo sapien
ggagtgatggcaccacgtgactgcc

SEQ ID NO: 2357146 - DNA, 25 bp, Homo sapien
tgtaggagtgatggcaccacgtgac

SEQ ID NO: 2357147 - DNA, 25 bp, Homo sapien
acactcagctctgaaccttgcaggg

SEQ ID NO: 2357148 - DNA, 25 bp, Homo sapien
cagctctgaaccttgcagggtcttc

SEQ ID NO: 2357149 - DNA, 25 bp, Homo sapien
tcagctctgaaccttgcagggtctt

SEQ ID NO: 2357150 - DNA, 25 bp, Homo sapien
actcagctctgaaccttgcagggtc

SEQ ID NO: 2357151 - DNA, 25 bp, Homo sapien
tgcaggtttggccattcagaaagag

SEQ ID NO: 2357152 - DNA, 25 bp, Homo sapien
atcaatcagcagacagtcaatgccg

SEQ ID NO: 2357153 - DNA, 25 bp, Homo sapien
cagacagtcaatgccgtaggccaca

SEQ ID NO: 2357154 - DNA, 25 bp, Homo sapien
catcgaaagtagtaaaggtgtcaca

SEQ ID NO: 2357155 - DNA, 25 bp, Homo sapien
ggagtattgacacagctcccacact

SEQ ID NO: 2357156 - DNA, 25 bp, Homo sapien
gctgggagtattgacacagctccca

SEQ ID NO: 2357157 - DNA, 25 bp, Homo sapien
tgggagtattgacacagctcccaca

SEQ ID NO: 2357158 - DNA, 25 bp, Homo sapien
agctgggagtattgacacagctccc

SEQ ID NO: 2357159 - DNA, 25 bp, Homo sapien
cgaagtagcccttgcagcacctggg

SEQ ID NO: 2357160 - DNA, 25 bp, Homo sapien
gtctcgcccgaagtagcccttgcag

SEQ ID NO: 2357161 - DNA, 25 bp, Homo sapien
tgacagtctcgcccgaagtagccct

SEQ ID NO: 2357162 - DNA, 25 bp, Homo sapien
cacctggggatctgtatcaccaggc

SEQ ID NO: 2357163 - DNA, 25 bp, Homo sapien
gatcaaggcagacaccccggttatt

SEQ ID NO: 2357164 - DNA, 25 bp, Homo sapien
tccggtggccgagtactgatcaagg

SEQ ID NO: 2357165 - DNA, 25 bp, Homo sapien
tgttgcatttacactctccggtggc

SEQ ID NO: 2357166 - DNA, 25 bp, Homo sapien
cgccgtcccattgaagccggtgttg

SEQ ID NO: 2357167 - DNA, 25 bp, Homo sapien
gcagacaatcaggcccgaatctccc

SEQ ID NO: 2357168 - DNA, 25 bp, Homo sapien
acaatcaggcccgaatctccccggc

SEQ ID NO: 2357169 - DNA, 25 bp, Homo sapien
atcaggcccgaatctccccggccag

SEQ ID NO: 2357170 - DNA, 25 bp, Homo sapien
aggcccgaatctccccggccagcac

SEQ ID NO: 2357171 - DNA, 25 bp, Homo sapien
ctgtccgtggtctgagcagccacag

SEQ ID NO: 2357172 - DNA, 25 bp, Homo sapien
tgagtgtcacacgaggggcctgtcc

SEQ ID NO: 2357173 - DNA, 25 bp, Homo sapien
agcccgtgatgccatcatcgcactg

SEQ ID NO: 2357174 - DNA, 25 bp, Homo sapien
ctgtccaccccgtttcacagaggca

SEQ ID NO: 2357175 - DNA, 25 bp, Homo sapien
gcagctgaccactcccatgactgac

SEQ ID NO: 2357176 - DNA, 25 bp, Homo sapien
tgccagcagctgaccactcccatga

SEQ ID NO: 2357177 - DNA, 25 bp, Homo sapien
ccagcagctgaccactcccatgact

SEQ ID NO: 2357178 - DNA, 25 bp, Homo sapien
agcagctgaccactcccatgactga

SEQ ID NO: 2357179 - DNA, 25 bp, Homo sapien
ttcaaaaccatgctcgctgaccctg

SEQ ID NO: 2357180 - DNA, 25 bp, Homo sapien
cacctagtaaggatcgagctatggc

SEQ ID NO: 2357181 - DNA, 25 bp, Homo sapien
tctgcgtacactgggaacttcaaaa

SEQ ID NO: 2357182 - DNA, 25 bp, Homo sapien
atgatgagtgtgataatggcagctg

SEQ ID NO: 2357183 - DNA, 25 bp, Homo sapien
tcacacgtgttgttctccttacagg

SEQ ID NO: 2357184 - DNA, 25 bp, Homo sapien
tgtgcatgtgattccgtcaccttca

SEQ ID NO: 2357185 - DNA, 25 bp, Homo sapien
tcataatccaggttacactcacacg

SEQ ID NO: 2357186 - DNA, 25 bp, Homo sapien
ctccttacaggtggcatgagcagaa

SEQ ID NO: 2357187 - DNA, 25 bp, Homo sapien
tgacaccctccgttaaggccgtctg

SEQ ID NO: 2357188 - DNA, 25 bp, Homo sapien
accttcgtgcccttctgggagcatc

SEQ ID NO: 2357189 - DNA, 25 bp, Homo sapien
tgtcatcttacaggtggcgtgctcg

SEQ ID NO: 2357190 - DNA, 25 bp, Homo sapien
ccctttgtatcccttctggcagctg

SEQ ID NO: 2357191 - DNA, 25 bp, Homo sapien
cacatttggcgtctgcatggcactg

SEQ ID NO: 2357192 - DNA, 25 bp, Homo sapien
agttcagcccatctccgacatagtg

SEQ ID NO: 2357193 - DNA, 25 bp, Homo sapien
tgtaagcagcggtcaatgggcagct

SEQ ID NO: 2357194 - DNA, 25 bp, Homo sapien
cctggaagtggaggtcgacacattt

SEQ ID NO: 2357195 - DNA, 25 bp, Homo sapien
cgtagatggaacaccccaacagtgg

SEQ ID NO: 2357196 - DNA, 25 bp, Homo sapien
ttatactggcccagtggggagcgta

SEQ ID NO: 2357197 - DNA, 25 bp, Homo sapien
tgtcaaaggtcagcttatactggcc

SEQ ID NO: 2357198 - DNA, 25 bp, Homo sapien
gggagcgtagatggaacaccccaac

SEQ ID NO: 2357199 - DNA, 25 bp, Homo sapien
ctggttgtaggttgccatggtcgca

SEQ ID NO: 2357200 - DNA, 25 bp, Homo sapien
cgcagcttcgttggcacaggcctct

SEQ ID NO: 2357201 - DNA, 25 bp, Homo sapien
catggtcgcagcttcgttggcacag

SEQ ID NO: 2357202 - DNA, 25 bp, Homo sapien
ttgtaggttgccatggtcgcagctt

SEQ ID NO: 2357203 - DNA, 25 bp, Homo sapien
taggctcgtgggtattgctgtcttt

SEQ ID NO: 2357204 - DNA, 25 bp, Homo sapien
gctgtgagggatgcacttccagtct

SEQ ID NO: 2357205 - DNA, 25 bp, Homo sapien
tgtgggttcggggagatccacccta

SEQ ID NO: 2357206 - DNA, 25 bp, Homo sapien
gaaagcttgtgcagtctcttttttc

SEQ ID NO: 2357207 - DNA, 25 bp, Homo sapien
actttgcctattgcacctctgtgcc

SEQ ID NO: 2357208 - DNA, 25 bp, Homo sapien
tgtctgattcccctattaggccata

SEQ ID NO: 2357209 - DNA, 25 bp, Homo sapien
gattgattgagccactgggtgaaca

SEQ ID NO: 2357210 - DNA, 25 bp, Homo sapien
gccatgggtcagctgcaagttcatg

SEQ ID NO: 2357211 - DNA, 25 bp, Homo sapien
taggcaacccgcccggtctccagcc

SEQ ID NO: 2357212 - DNA, 25 bp, Homo sapien
gtaggcaacccgcccggtctccagc

SEQ ID NO: 2357213 - DNA, 25 bp, Homo sapien
gcaacccgcccggtctccagccagc

SEQ ID NO: 2357214 - DNA, 25 bp, Homo sapien
aggcaacccgcccggtctccagcca

SEQ ID NO: 2357215 - DNA, 25 bp, Homo sapien
cactcttgttgggtctaggtccata

SEQ ID NO: 2357216 - DNA, 25 bp, Homo sapien
atttcactcttgttgggtctaggtc

SEQ ID NO: 2357217 - DNA, 25 bp, Homo sapien
tgttgggtctaggtccatagtccac

SEQ ID NO: 2357218 - DNA, 25 bp, Homo sapien
taggtccatagtccactatcccaac

SEQ ID NO: 2357219 - DNA, 25 bp, Homo sapien
gcagcaggttcccactgcatgagaa

SEQ ID NO: 2357220 - DNA, 25 bp, Homo sapien
cagcaggttcccactgcatgagaag

SEQ ID NO: 2357221 - DNA, 25 bp, Homo sapien
caggttcccactgcatgagaagcca

SEQ ID NO: 2357222 - DNA, 25 bp, Homo sapien
cccaccttgcaggtgcagttcacat

SEQ ID NO: 2357223 - DNA, 25 bp, Homo sapien
tgctgtgtcttctgcctgcgccgtg

SEQ ID NO: 2357224 - DNA, 25 bp, Homo sapien
cctgcgccgtgggagagtttgagga

SEQ ID NO: 2357225 - DNA, 25 bp, Homo sapien
tgtcttctgcctgcgccgtgggaga

SEQ ID NO: 2357226 - DNA, 25 bp, Homo sapien
attcatggtgtgagccaactcagcc

SEQ ID NO: 2357227 - DNA, 25 bp, Homo sapien
agctgttggaataggccagcacttc

SEQ ID NO: 2357228 - DNA, 25 bp, Homo sapien
ctgagctgttggaataggccagcac

SEQ ID NO: 2357229 - DNA, 25 bp, Homo sapien
gagctgttggaataggccagcactt

SEQ ID NO: 2357230 - DNA, 25 bp, Homo sapien
tgagctgttggaataggccagcact

SEQ ID NO: 2357231 - DNA, 25 bp, Homo sapien
gtcagtcaggtgttctagaaatgca

SEQ ID NO: 2357232 - DNA, 25 bp, Homo sapien
gggtgccgcggatggacaggtcagt

SEQ ID NO: 2357233 - DNA, 25 bp, Homo sapien
gacaggtcagtcaggtgttctagaa

SEQ ID NO: 2357234 - DNA, 25 bp, Homo sapien
gatggacaggtcagtcaggtgttct

SEQ ID NO: 2357235 - DNA, 25 bp, Homo sapien
gaggtggtgctcgatgtcccgccca

SEQ ID NO: 2357236 - DNA, 25 bp, Homo sapien
aaaacatgctgacattggcgaggtg

SEQ ID NO: 2357237 - DNA, 25 bp, Homo sapien
cagcctcgtttgcagggtggtgcca

SEQ ID NO: 2357238 - DNA, 25 bp, Homo sapien
caaggtcattgtagaaaaacatgct

SEQ ID NO: 2357239 - DNA, 25 bp, Homo sapien
tgatcccattggaggcaaagatgtc

SEQ ID NO: 2357240 - DNA, 25 bp, Homo sapien
caaagatgtcccactgcagaatggc

SEQ ID NO: 2357241 - DNA, 25 bp, Homo sapien
taaaggcctggaaatgacatgaatg

SEQ ID NO: 2357242 - DNA, 25 bp, Homo sapien
gcagaatggctcttccatcaacaaa

SEQ ID NO: 2357243 - DNA, 25 bp, Homo sapien
gtttatccgaaagtaggagtaagca

SEQ ID NO: 2357244 - DNA, 25 bp, Homo sapien
ccgaaagtaggagtaagcagccaag

SEQ ID NO: 2357245 - DNA, 25 bp, Homo sapien
aaaatgctggaagccgattgttctc

SEQ ID NO: 2357246 - DNA, 25 bp, Homo sapien
gccgattgttctccggtttatccga

SEQ ID NO: 2357247 - DNA, 25 bp, Homo sapien
cagccaccgactgaagcagcccagg

SEQ ID NO: 2357248 - DNA, 25 bp, Homo sapien
ccgactgaagcagcccaggtccagg

SEQ ID NO: 2357249 - DNA, 25 bp, Homo sapien
ctggcgcagccaccgactgaagcag

SEQ ID NO: 2357250 - DNA, 25 bp, Homo sapien
tctggcgcagccaccgactgaagca

SEQ ID NO: 2357251 - DNA, 25 bp, Homo sapien
actgctgttcctcttaagagcaggg

SEQ ID NO: 2357252 - DNA, 25 bp, Homo sapien
tggccgcccctgctactgtgtgaca

SEQ ID NO: 2357253 - DNA, 25 bp, Homo sapien
ccatccaagcagcagtaagcgtggg

SEQ ID NO: 2357254 - DNA, 25 bp, Homo sapien
ttaagagcagggaccccatccaagc

SEQ ID NO: 2357255 - DNA, 25 bp, Homo sapien
aagagctgcaacattaatgtcctct

SEQ ID NO: 2357256 - DNA, 25 bp, Homo sapien
catacaaggggttcgagatattctc

SEQ ID NO: 2357257 - DNA, 25 bp, Homo sapien
caaggggttcgagatattctcaggc

SEQ ID NO: 2357258 - DNA, 25 bp, Homo sapien
ctgaggttgtgctctcatacaaggg

SEQ ID NO: 2357259 - DNA, 25 bp, Homo sapien
tcctagttgaatctttctggtggcc

SEQ ID NO: 2357260 - DNA, 25 bp, Homo sapien
gggcattctgtgtgttgagtcctag

SEQ ID NO: 2357261 - DNA, 25 bp, Homo sapien
tagggccacctgttttagtctctcc

SEQ ID NO: 2357262 - DNA, 25 bp, Homo sapien
cactgtgaacacgtatgtgctgggc

SEQ ID NO: 2357263 - DNA, 25 bp, Homo sapien
ggggtcattgccctcaagctgccgt

SEQ ID NO: 2357264 - DNA, 25 bp, Homo sapien
gtcattgccctcaagctgccgttct

SEQ ID NO: 2357265 - DNA, 25 bp, Homo sapien
tcctcaaggggtcattgccctcaag

SEQ ID NO: 2357266 - DNA, 25 bp, Homo sapien
tgtcctcaaggggtcattgccctca

SEQ ID NO: 2357267 - DNA, 25 bp, Homo sapien
gacggaggcttacaatctaacaggg

SEQ ID NO: 2357268 - DNA, 25 bp, Homo sapien
tctgagtgcttaaaggactttacgt

SEQ ID NO: 2357269 - DNA, 25 bp, Homo sapien
ggaagaaagatcacagttacccatc

SEQ ID NO: 2357270 - DNA, 25 bp, Homo sapien
catcatgtagggcagaatggagcag

SEQ ID NO: 2357271 - DNA, 25 bp, Homo sapien
tccatttgcctagggcctgctctgt

SEQ ID NO: 2357272 - DNA, 25 bp, Homo sapien
atgggtcccactgacccggcactcc

SEQ ID NO: 2357273 - DNA, 25 bp, Homo sapien
ctggggtggccaacagctgtagcct

SEQ ID NO: 2357274 - DNA, 25 bp, Homo sapien
aacaaggagcctggaccatgagagg

SEQ ID NO: 2357275 - DNA, 25 bp, Homo sapien
taagtgcactgtattccctctgagc

SEQ ID NO: 2357276 - DNA, 25 bp, Homo sapien
tgttggcggcaatggcaagattccc

SEQ ID NO: 2357277 - DNA, 25 bp, Homo sapien
ccaagacaagctgtgggctgtattt

SEQ ID NO: 2357278 - DNA, 25 bp, Homo sapien
gcttgctagcccctgctctaatgga

SEQ ID NO: 2357279 - DNA, 25 bp, Homo sapien
gatttgggcatattacagactacaa

SEQ ID NO: 2357280 - DNA, 25 bp, Homo sapien
gacactgctagtgcgttcaagaaag

SEQ ID NO: 2357281 - DNA, 25 bp, Homo sapien
ctaagacgaaatttggccagacaca

SEQ ID NO: 2357282 - DNA, 25 bp, Homo sapien
gactgggctaaatactggaactgaa

SEQ ID NO: 2357283 - DNA, 25 bp, Homo sapien
catgactcaactgggatctggcaca

SEQ ID NO: 2357284 - DNA, 25 bp, Homo sapien
catattggtacaagggaaatgaatc

SEQ ID NO: 2357285 - DNA, 25 bp, Homo sapien
gcccagcctatcatgactcaactgg

SEQ ID NO: 2357286 - DNA, 25 bp, Homo sapien
aatgcatattggtacaagggaaatg

SEQ ID NO: 2357287 - DNA, 25 bp, Homo sapien
tctaggtgttttcgccatcagggtg

SEQ ID NO: 2357288 - DNA, 25 bp, Homo sapien
tatgaacacagtaaggcacagtagt

SEQ ID NO: 2357289 - DNA, 25 bp, Homo sapien
taactataatggtgaaggtgaccct

SEQ ID NO: 2357290 - DNA, 25 bp, Homo sapien
tgtgttgcgcccagaactgctcggt

SEQ ID NO: 2357291 - DNA, 25 bp, Homo sapien
catctacatggcgtctctgagctgc

SEQ ID NO: 2357292 - DNA, 25 bp, Homo sapien
aacctacttcctaaggcgcctgtcg

SEQ ID NO: 2357293 - DNA, 25 bp, Homo sapien
tcgcgcttcgctgacatctacatgg

SEQ ID NO: 2357294 - DNA, 25 bp, Homo sapien
tatgacgtcagccacactttctacc

SEQ ID NO: 2357295 - DNA, 25 bp, Homo sapien
taaaagtatgtcttagcttacattc

SEQ ID NO: 2357296 - DNA, 25 bp, Homo sapien
taggtgcacagcttatacttaaaag

SEQ ID NO: 2357297 - DNA, 25 bp, Homo sapien
gggatttaggagtgtgatttgtatt

SEQ ID NO: 2357298 - DNA, 25 bp, Homo sapien
agtcaccacgcccgggcgtctttgt

SEQ ID NO: 2357299 - DNA, 25 bp, Homo sapien
ttgagagggattcagatctcaaagc

SEQ ID NO: 2357300 - DNA, 25 bp, Homo sapien
tgagagggattcagatctcaaagct

SEQ ID NO: 2357301 - DNA, 25 bp, Homo sapien
gagctgttactatgcaagaggaatg

SEQ ID NO: 2357302 - DNA, 25 bp, Homo sapien
tggagctgttactatgcaagaggaa

SEQ ID NO: 2357303 - DNA, 25 bp, Homo sapien
taaactaggtgcaatgtgggaactt

SEQ ID NO: 2357304 - DNA, 25 bp, Homo sapien
tgggttttcagtaggctcagtcaca

SEQ ID NO: 2357305 - DNA, 25 bp, Homo sapien
aaaaaaggccatggtcgttatctca

SEQ ID NO: 2357306 - DNA, 25 bp, Homo sapien
tacatgtgccttcataatgacctgg

SEQ ID NO: 2357307 - DNA, 25 bp, Homo sapien
tctgtgggataagcagacgaaaagc

SEQ ID NO: 2357308 - DNA, 25 bp, Homo sapien
tttttcctataggttgttcaccaca

SEQ ID NO: 2357309 - DNA, 25 bp, Homo sapien
ttcctataggttgttcaccacattt

SEQ ID NO: 2357310 - DNA, 25 bp, Homo sapien
gcagacgaaaagctggaagctgctg

SEQ ID NO: 2357311 - DNA, 25 bp, Homo sapien
cagcctttgggacctcggtttgtca

SEQ ID NO: 2357312 - DNA, 25 bp, Homo sapien
tttgggacctcggtttgtcagatcc

SEQ ID NO: 2357313 - DNA, 25 bp, Homo sapien
ccatccttcgcaccctcctgtcttt

SEQ ID NO: 2357314 - DNA, 25 bp, Homo sapien
cctcggtttgtcagatccatccttc

SEQ ID NO: 2357315 - DNA, 25 bp, Homo sapien
tccaggcagatgtaactctggtcag

SEQ ID NO: 2357316 - DNA, 25 bp, Homo sapien
gctgattggtgtttatgcatagaca

SEQ ID NO: 2357317 - DNA, 25 bp, Homo sapien
tctggtcagtattcagctacagcat

SEQ ID NO: 2357318 - DNA, 25 bp, Homo sapien
tagacagagacagaatattccaggc

SEQ ID NO: 2357319 - DNA, 25 bp, Homo sapien
agtcccagaaggcaggacgaaggtg

SEQ ID NO: 2357320 - DNA, 25 bp, Homo sapien
gctggggtcgtacctcatcattcca

SEQ ID NO: 2357321 - DNA, 25 bp, Homo sapien
caggacgaaggtgcggcggagctgg

SEQ ID NO: 2357322 - DNA, 25 bp, Homo sapien
tccatcccatgtggcctgcgcgcca

SEQ ID NO: 2357323 - DNA, 25 bp, Homo sapien
catttggctttagtggaaccacagg

SEQ ID NO: 2357324 - DNA, 25 bp, Homo sapien
agcttgggaagtccttgctgcccgg

SEQ ID NO: 2357325 - DNA, 25 bp, Homo sapien
gagcctagcaggtttgagagaagac

SEQ ID NO: 2357326 - DNA, 25 bp, Homo sapien
acctgtgcaccgagccgttagcgtg

SEQ ID NO: 2357327 - DNA, 25 bp, Homo sapien
tggacttggcacctcagacaatttc

SEQ ID NO: 2357328 - DNA, 25 bp, Homo sapien
tgcagataaattacacagggctaga

SEQ ID NO: 2357329 - DNA, 25 bp, Homo sapien
tattggcctcaaggtatgagccagc

SEQ ID NO: 2357330 - DNA, 25 bp, Homo sapien
gatccggagccggagatattggcct

SEQ ID NO: 2357331 - DNA, 25 bp, Homo sapien
caacttggtcgtcaagaacagggta

SEQ ID NO: 2357332 - DNA, 25 bp, Homo sapien
tattggtgcccagagaatctctgag

SEQ ID NO: 2357333 - DNA, 25 bp, Homo sapien
tctgaggatgggttctgtgtttgcc

SEQ ID NO: 2357334 - DNA, 25 bp, Homo sapien
gaacagggtaattcacaagtgtctt

SEQ ID NO: 2357335 - DNA, 25 bp, Homo sapien
ggaataggagaaggtagaatctgca

SEQ ID NO: 2357336 - DNA, 25 bp, Homo sapien
tagaatctgcaagggccagtaatct

SEQ ID NO: 2357337 - DNA, 25 bp, Homo sapien
agaaggtagaatctgcaagggccag

SEQ ID NO: 2357338 - DNA, 25 bp, Homo sapien
tctgcaagggccagtaatctatctt

SEQ ID NO: 2357339 - DNA, 25 bp, Homo sapien
aaattgtctgtcgtagttgaatgta

SEQ ID NO: 2357340 - DNA, 25 bp, Homo sapien
taggcgtagatgtagatttgcatag

SEQ ID NO: 2357341 - DNA, 25 bp, Homo sapien
tttgcatagtagatgttgaagtcct

SEQ ID NO: 2357342 - DNA, 25 bp, Homo sapien
ccttggtcccattgtcatgtttcca

SEQ ID NO: 2357343 - DNA, 25 bp, Homo sapien
gagctgtccaggtgcggtgaccgat

SEQ ID NO: 2357344 - DNA, 25 bp, Homo sapien
ccaatcggagctgtccaggtgcggt

SEQ ID NO: 2357345 - DNA, 25 bp, Homo sapien
ccaggtgcggtgaccgatgcccgaa

SEQ ID NO: 2357346 - DNA, 25 bp, Homo sapien
gtgaccgatgcccgaagcgtggctc

SEQ ID NO: 2357347 - DNA, 25 bp, Homo sapien
gcgcggtccgcccactacaccgcaa

SEQ ID NO: 2357348 - DNA, 25 bp, Homo sapien
aagtccccttcgatcgcaggagccg

SEQ ID NO: 2357349 - DNA, 25 bp, Homo sapien
gcgtgcggccggtgagtctcaagtc

SEQ ID NO: 2357350 - DNA, 25 bp, Homo sapien
cactacaccgcaagcaggtcgggcc

SEQ ID NO: 2357351 - DNA, 25 bp, Homo sapien
agcaggacgcagcagaggcccagca

SEQ ID NO: 2357352 - DNA, 25 bp, Homo sapien
ggcccagcacccacagggccctcat

SEQ ID NO: 2357353 - DNA, 25 bp, Homo sapien
cgaaggtcagcaggacgcagcagag

SEQ ID NO: 2357354 - DNA, 25 bp, Homo sapien
gtcagcaggacgcagcagaggccca

SEQ ID NO: 2357355 - DNA, 25 bp, Homo sapien
taagaaccgaactccagcaaaactg

SEQ ID NO: 2357356 - DNA, 25 bp, Homo sapien
aaacttcggccttcgttagcacagg

SEQ ID NO: 2357357 - DNA, 25 bp, Homo sapien
ggatttatgcaacctctggcgaggg

SEQ ID NO: 2357358 - DNA, 25 bp, Homo sapien
tcctgaaatacggaggcagtcacca

SEQ ID NO: 2357359 - DNA, 25 bp, Homo sapien
ttcatcatccgtccttgatccttct

SEQ ID NO: 2357360 - DNA, 25 bp, Homo sapien
actgtcaataagtcccaagaggcca

SEQ ID NO: 2357361 - DNA, 25 bp, Homo sapien
tagactttatctggacctttggaga

SEQ ID NO: 2357362 - DNA, 25 bp, Homo sapien
tatgtatgcacacaactcaccgggt

SEQ ID NO: 2357363 - DNA, 25 bp, Homo sapien
gtaactcacaaggttcacacggctt

SEQ ID NO: 2357364 - DNA, 25 bp, Homo sapien
gataagtttcatcattctgttaact

SEQ ID NO: 2357365 - DNA, 25 bp, Homo sapien
tctaagttctcttatttgtgatgca

SEQ ID NO: 2357366 - DNA, 25 bp, Homo sapien
ctctaagttctcttatttgtgatgc

SEQ ID NO: 2357367 - DNA, 25 bp, Homo sapien
caatgaattgatgataagtttcatc

SEQ ID NO: 2357368 - DNA, 25 bp, Homo sapien
aagcatcagaagcatttgaaatcag

SEQ ID NO: 2357369 - DNA, 25 bp, Homo sapien
tttgaaatcagttctctcaggaaaa

SEQ ID NO: 2357370 - DNA, 25 bp, Homo sapien
tattagccttatcttatctaaagca

SEQ ID NO: 2357371 - DNA, 25 bp, Homo sapien
cagaaagagcattttcatcagtcag

SEQ ID NO: 2357372 - DNA, 25 bp, Homo sapien
aaaaactcgcttgtcccagatttgg

SEQ ID NO: 2357373 - DNA, 25 bp, Homo sapien
taaaaactcgcttgtcccagatttg

SEQ ID NO: 2357374 - DNA, 25 bp, Homo sapien
tgtttaaaaactcgcttgtcccaga

SEQ ID NO: 2357375 - DNA, 25 bp, Homo sapien
gaaggcggaatagaaaccgacacca

SEQ ID NO: 2357376 - DNA, 25 bp, Homo sapien
taaatgacgtattttattccacagc

SEQ ID NO: 2357377 - DNA, 25 bp, Homo sapien
aacttgtaactatccttaaatgacg

SEQ ID NO: 2357378 - DNA, 25 bp, Homo sapien
gaatattttcaagaggaatatttcc

SEQ ID NO: 2357379 - DNA, 25 bp, Homo sapien
cctggttgctaccactcatcttgaa

SEQ ID NO: 2357380 - DNA, 25 bp, Homo sapien
ggccgtggcagtggataagactaca

SEQ ID NO: 2357381 - DNA, 25 bp, Homo sapien
tgcatggtcatggaaactaggtcct

SEQ ID NO: 2357382 - DNA, 25 bp, Homo sapien
cagagttgggacatgtgacagacca

SEQ ID NO: 2357383 - DNA, 25 bp, Homo sapien
catggacaatgagaaaagggctgaa

SEQ ID NO: 2357384 - DNA, 25 bp, Homo sapien
attcaaggtaatcagatgcttcttc

SEQ ID NO: 2357385 - DNA, 25 bp, Homo sapien
tgaatattttttgacgagattttta

SEQ ID NO: 2357386 - DNA, 25 bp, Homo sapien
ccaattcaaggtaatcagatgcttc

SEQ ID NO: 2357387 - DNA, 25 bp, Homo sapien
tcaaggtaatcagatgcttcttctt

SEQ ID NO: 2357388 - DNA, 25 bp, Homo sapien
tttgtctacagaatatgatataaca

SEQ ID NO: 2357389 - DNA, 25 bp, Homo sapien
ttttgtctacagaatatgatataac

SEQ ID NO: 2357390 - DNA, 25 bp, Homo sapien
ttgtctacagaatatgatataacat

SEQ ID NO: 2357391 - DNA, 25 bp, Homo sapien
tgtctacagaatatgatataacatt

SEQ ID NO: 2357392 - DNA, 25 bp, Homo sapien
ttcctccatgggctcctcaacagtt

SEQ ID NO: 2357393 - DNA, 25 bp, Homo sapien
agcttcatcatcagattcttctttc

SEQ ID NO: 2357394 - DNA, 25 bp, Homo sapien
ccatgggctcctcaacagtttcagt

SEQ ID NO: 2357395 - DNA, 25 bp, Homo sapien
ctccatgggctcctcaacagtttca

SEQ ID NO: 2357396 - DNA, 25 bp, Homo sapien
tgaaaatgatttgtagaaagctttg

SEQ ID NO: 2357397 - DNA, 25 bp, Homo sapien
gatggtctctgccatattggtttga

SEQ ID NO: 2357398 - DNA, 25 bp, Homo sapien
tcccagtcccagacagttttttcaa

SEQ ID NO: 2357399 - DNA, 25 bp, Homo sapien
tgatatcattcataagttcccagtc

SEQ ID NO: 2357400 - DNA, 25 bp, Homo sapien
tattcgtcaaacagaccacgtggag

SEQ ID NO: 2357401 - DNA, 25 bp, Homo sapien
ttttaaacgcagcatgtactactta

SEQ ID NO: 2357402 - DNA, 25 bp, Homo sapien
aaattttaaacgcagcatgtactac

SEQ ID NO: 2357403 - DNA, 25 bp, Homo sapien
ttcaaattttaaacgcagcatgtac

SEQ ID NO: 2357404 - DNA, 25 bp, Homo sapien
ttaaacgcagcatgtactacttaaa

SEQ ID NO: 2357405 - DNA, 25 bp, Homo sapien
gtgatgaatacacggcgcacataga

SEQ ID NO: 2357406 - DNA, 25 bp, Homo sapien
tgtgatgaatacacggcgcacatag

SEQ ID NO: 2357407 - DNA, 25 bp, Homo sapien
catcatatcatggaagtcgtctgtg

SEQ ID NO: 2357408 - DNA, 25 bp, Homo sapien
gaggtatttaggcatcatatcatgg

SEQ ID NO: 2357409 - DNA, 25 bp, Homo sapien
gtttatgttgctgaagagtctcgcg

SEQ ID NO: 2357410 - DNA, 25 bp, Homo sapien
gagtctcgcgggaaacattcaaggg

SEQ ID NO: 2357411 - DNA, 25 bp, Homo sapien
cgggaaacattcaaggggagatcat

SEQ ID NO: 2357412 - DNA, 25 bp, Homo sapien
gctgaagagtctcgcgggaaacatt

SEQ ID NO: 2357413 - DNA, 25 bp, Homo sapien
atgtccagcgttttacgaacaagct

SEQ ID NO: 2357414 - DNA, 25 bp, Homo sapien
catgtccagcgttttacgaacaagc

SEQ ID NO: 2357415 - DNA, 25 bp, Homo sapien
aacattctggaacctcttcccatca

SEQ ID NO: 2357416 - DNA, 25 bp, Homo sapien
cattctggaacctcttcccatcaaa

SEQ ID NO: 2357417 - DNA, 25 bp, Homo sapien
caacattctggaacctcttcccatc

SEQ ID NO: 2357418 - DNA, 25 bp, Homo sapien
attctggaacctcttcccatcaaat

SEQ ID NO: 2357419 - DNA, 25 bp, Homo sapien
gcagtattgtcgaaagttttaagct

SEQ ID NO: 2357420 - DNA, 25 bp, Homo sapien
taaatgctgatactaatatttccac

SEQ ID NO: 2357421 - DNA, 25 bp, Homo sapien
gataatctgaattttctagtcagaa

SEQ ID NO: 2357422 - DNA, 25 bp, Homo sapien
ttctaatggttacaaagtaaccagc

SEQ ID NO: 2357423 - DNA, 25 bp, Homo sapien
cttaagatcataaacacagaagcag

SEQ ID NO: 2357424 - DNA, 25 bp, Homo sapien
ttaagatcataaacacagaagcagg

SEQ ID NO: 2357425 - DNA, 25 bp, Homo sapien
actgtctaagactttatcacttaag

SEQ ID NO: 2357426 - DNA, 25 bp, Homo sapien
aagactttatcacttaagatcataa

SEQ ID NO: 2357427 - DNA, 25 bp, Homo sapien
ttctgtcaggcgctgagacaccaca

SEQ ID NO: 2357428 - DNA, 25 bp, Homo sapien
cggagattctgtcaggcgctgagac

SEQ ID NO: 2357429 - DNA, 25 bp, Homo sapien
tttgtagagatgtccttgcccgttt

SEQ ID NO: 2357430 - DNA, 25 bp, Homo sapien
atgtccttgcccgtttggtacgctt

SEQ ID NO: 2357431 - DNA, 25 bp, Homo sapien
tttgttggatgcaaggtaacttcct

SEQ ID NO: 2357432 - DNA, 25 bp, Homo sapien
aatggcccttgtactattgcaatgg

SEQ ID NO: 2357433 - DNA, 25 bp, Homo sapien
cctgagtgacaacaggagtgagtca

SEQ ID NO: 2357434 - DNA, 25 bp, Homo sapien
catcagtgcatggacatagtaagtc

SEQ ID NO: 2357435 - DNA, 25 bp, Homo sapien
tttacctaagggacttgactatgtg

SEQ ID NO: 2357436 - DNA, 25 bp, Homo sapien
tgcagagtcaatcaacctcggattg

SEQ ID NO: 2357437 - DNA, 25 bp, Homo sapien
caaatacggcacgactttacctaag

SEQ ID NO: 2357438 - DNA, 25 bp, Homo sapien
tccctcatacacctaaggacgactg

SEQ ID NO: 2357439 - DNA, 25 bp, Homo sapien
caataaatacagtccgccctccgta

SEQ ID NO: 2357440 - DNA, 25 bp, Homo sapien
caccacaggtttgaacttatatgct

SEQ ID NO: 2357441 - DNA, 25 bp, Homo sapien
ccctccgtatgtgcaggttcagcaa

SEQ ID NO: 2357442 - DNA, 25 bp, Homo sapien
caaaatgtactattgacacttgaac

SEQ ID NO: 2357443 - DNA, 25 bp, Homo sapien
cttaattcgtcgaagcatgtctctg

SEQ ID NO: 2357444 - DNA, 25 bp, Homo sapien
gatcagcgggtgtctgggattaatt

SEQ ID NO: 2357445 - DNA, 25 bp, Homo sapien
catgtctctgatcagcgggtgtctg

SEQ ID NO: 2357446 - DNA, 25 bp, Homo sapien
aatgttttcttctgactcgcatagt

SEQ ID NO: 2357447 - DNA, 25 bp, Homo sapien
ctgaaatgcaagaagatgcactaga

SEQ ID NO: 2357448 - DNA, 25 bp, Homo sapien
gcaagaagatgcactagattaatat

SEQ ID NO: 2357449 - DNA, 25 bp, Homo sapien
gaagatgcactagattaatattaaa

SEQ ID NO: 2357450 - DNA, 25 bp, Homo sapien
gaaatgcaagaagatgcactagatt

SEQ ID NO: 2357451 - DNA, 25 bp, Homo sapien
aatgttcaaactgaggcgaagcatt

SEQ ID NO: 2357452 - DNA, 25 bp, Homo sapien
atgttcaaactgaggcgaagcattc

SEQ ID NO: 2357453 - DNA, 25 bp, Homo sapien
cagtgcctgacactacagggattca

SEQ ID NO: 2357454 - DNA, 25 bp, Homo sapien
acttagtttctagtgcagtgcctga

SEQ ID NO: 2357455 - DNA, 25 bp, Homo sapien
tgaacagccaagctaacaaaaggag

SEQ ID NO: 2357456 - DNA, 25 bp, Homo sapien
catgagaggcctattctgaaagaac

SEQ ID NO: 2357457 - DNA, 25 bp, Homo sapien
ttcaggttcttcttcgggctcttct

SEQ ID NO: 2357458 - DNA, 25 bp, Homo sapien
ggttcttcttcgggctcttcttcca

SEQ ID NO: 2357459 - DNA, 25 bp, Homo sapien
ttctgttgtgtcttctgctgtctct

SEQ ID NO: 2357460 - DNA, 25 bp, Homo sapien
tgtctcttcaggttcttcttcgggc

SEQ ID NO: 2357461 - DNA, 25 bp, Homo sapien
ttcatctgttcccacatccatttct

SEQ ID NO: 2357462 - DNA, 25 bp, Homo sapien
ttcttcttcatctgttcccacatcc

SEQ ID NO: 2357463 - DNA, 25 bp, Homo sapien
ttcttcatctgttcccacatccatt

SEQ ID NO: 2357464 - DNA, 25 bp, Homo sapien
tcttcatctgttcccacatccattt

SEQ ID NO: 2357465 - DNA, 25 bp, Homo sapien
acagtcttaactttgccagaactaa

SEQ ID NO: 2357466 - DNA, 25 bp, Homo sapien
cagtctgacttctgtaagttacaca

SEQ ID NO: 2357467 - DNA, 25 bp, Homo sapien
aacaatttaaatgctcagtctgact

SEQ ID NO: 2357468 - DNA, 25 bp, Homo sapien
taaaactctgtcctaactttgccag

SEQ ID NO: 2357469 - DNA, 25 bp, Homo sapien
ttacaattcatctttttcagctgta

SEQ ID NO: 2357470 - DNA, 25 bp, Homo sapien
caattcatctttttcagctgtagat

SEQ ID NO: 2357471 - DNA, 25 bp, Homo sapien
acaattcatctttttcagctgtaga

SEQ ID NO: 2357472 - DNA, 25 bp, Homo sapien
attcatctttttcagctgtagattc

SEQ ID NO: 2357473 - DNA, 25 bp, Homo sapien
tctctcccaaaaagaaatgatgtaa

SEQ ID NO: 2357474 - DNA, 25 bp, Homo sapien
ctttttcctgtgacccataatccca

SEQ ID NO: 2357475 - DNA, 25 bp, Homo sapien
cacacaggatccaaatggtgagagt

SEQ ID NO: 2357476 - DNA, 25 bp, Homo sapien
aatgatgtaaatttcacattccctc

SEQ ID NO: 2357477 - DNA, 25 bp, Homo sapien
attttacatcaagaatagtcagtta

SEQ ID NO: 2357478 - DNA, 25 bp, Homo sapien
gtttttcaacagtcccaagctcctg

SEQ ID NO: 2357479 - DNA, 25 bp, Homo sapien
gattaagctccaccctatgaaaggg

SEQ ID NO: 2357480 - DNA, 25 bp, Homo sapien
taatctagcccacattcaaaaagga

SEQ ID NO: 2357481 - DNA, 25 bp, Homo sapien
tatctttagtcttctgccgtccatg

SEQ ID NO: 2357482 - DNA, 25 bp, Homo sapien
tgagctgccattctaccacaaaggg

SEQ ID NO: 2357483 - DNA, 25 bp, Homo sapien
tcagaagacgtacgctcaagtaggg

SEQ ID NO: 2357484 - DNA, 25 bp, Homo sapien
aatggtaatgcatagtggccccaaa

SEQ ID NO: 2357485 - DNA, 25 bp, Homo sapien
gctaccatggtacgtcagttaagaa

SEQ ID NO: 2357486 - DNA, 25 bp, Homo sapien
ctaattcaatgtgatctgatggctt

SEQ ID NO: 2357487 - DNA, 25 bp, Homo sapien
tgagctgtttatcaaaaactgaagg

SEQ ID NO: 2357488 - DNA, 25 bp, Homo sapien
aaactgaaggagtatgatgctttcc

SEQ ID NO: 2357489 - DNA, 25 bp, Homo sapien
aggattctgaggagctaaagtgtca

SEQ ID NO: 2357490 - DNA, 25 bp, Homo sapien
cgaagggtgtgccttcatagacccc

SEQ ID NO: 2357491 - DNA, 25 bp, Homo sapien
taaaggcagtactatattatcccct

SEQ ID NO: 2357492 - DNA, 25 bp, Homo sapien
ggccaagatagaccagttgcaacct

SEQ ID NO: 2357493 - DNA, 25 bp, Homo sapien
ctttctcaggtgttgatcgaagggt

SEQ ID NO: 2357494 - DNA, 25 bp, Homo sapien
tttgcgtgaagaaaagacctgtccc

SEQ ID NO: 2357495 - DNA, 25 bp, Homo sapien
agaaaagacctgtcccttagagcca

SEQ ID NO: 2357496 - DNA, 25 bp, Homo sapien
gaagaaaagacctgtcccttagagc

SEQ ID NO: 2357497 - DNA, 25 bp, Homo sapien
cgtgaagaaaagacctgtcccttag

SEQ ID NO: 2357498 - DNA, 25 bp, Homo sapien
cgtggagaactcaaaacggagcttt

SEQ ID NO: 2357499 - DNA, 25 bp, Homo sapien
taatgctaactgcaagaggaggtgc

SEQ ID NO: 2357500 - DNA, 25 bp, Homo sapien
cctgaaattccaccaaagcgtggag

SEQ ID NO: 2357501 - DNA, 25 bp, Homo sapien
gctcagtggatgtttagccgatacg

SEQ ID NO: 2357502 - DNA, 25 bp, Homo sapien
aaaatccaaatgcctattagctgat

SEQ ID NO: 2357503 - DNA, 25 bp, Homo sapien
tattctacctgaaagaacacagagg

SEQ ID NO: 2357504 - DNA, 25 bp, Homo sapien
aaaagaagactaatagttatctatg

SEQ ID NO: 2357505 - DNA, 25 bp, Homo sapien
gaaaacattattctacctgaaagaa

SEQ ID NO: 2357506 - DNA, 25 bp, Homo sapien
ctgctacaggtgcttttagttgtcc

SEQ ID NO: 2357507 - DNA, 25 bp, Homo sapien
ggagaccatgatgactgcctagact

SEQ ID NO: 2357508 - DNA, 25 bp, Homo sapien
gcctagacttgtgctcagtgctgtg

SEQ ID NO: 2357509 - DNA, 25 bp, Homo sapien
ctacaggtgcttttagttgtccagc

SEQ ID NO: 2357510 - DNA, 25 bp, Homo sapien
aaaactggatcacaagtctttcggt

SEQ ID NO: 2357511 - DNA, 25 bp, Homo sapien
caagtctttcggtcggagaactgga

SEQ ID NO: 2357512 - DNA, 25 bp, Homo sapien
tcacaagtctttcggtcggagaact

SEQ ID NO: 2357513 - DNA, 25 bp, Homo sapien
tggatcacaagtctttcggtcggag

SEQ ID NO: 2357514 - DNA, 25 bp, Homo sapien
tgttgaaagcagtgtgctttattaa

SEQ ID NO: 2357515 - DNA, 25 bp, Homo sapien
ttgaaagcagtgtgctttattaaca

SEQ ID NO: 2357516 - DNA, 25 bp, Homo sapien
tgtgttgaaagcagtgtgctttatt

SEQ ID NO: 2357517 - DNA, 25 bp, Homo sapien
aaagcagtgtgctttattaacattt

SEQ ID NO: 2357518 - DNA, 25 bp, Homo sapien
ataggagttcacgtacacatttctc

SEQ ID NO: 2357519 - DNA, 25 bp, Homo sapien
gttaacatctacataaatagacatt

SEQ ID NO: 2357520 - DNA, 25 bp, Homo sapien
catctacataaatagacatttgtgt

SEQ ID NO: 2357521 - DNA, 25 bp, Homo sapien
tgaataggagttcacgtacacattt

SEQ ID NO: 2357522 - DNA, 25 bp, Homo sapien
ggctccatttgtatttgcacttatg

SEQ ID NO: 2357523 - DNA, 25 bp, Homo sapien
taattgtcactacaattttgaaggt

SEQ ID NO: 2357524 - DNA, 25 bp, Homo sapien
aacatcagttaattgtcactacaat

SEQ ID NO: 2357525 - DNA, 25 bp, Homo sapien
tcagatgagaaacaggttgagaaga

SEQ ID NO: 2357526 - DNA, 25 bp, Homo sapien
tgaaaatgttcgcagccagtctcct

SEQ ID NO: 2357527 - DNA, 25 bp, Homo sapien
tgttcgcagccagtctcctggccat

SEQ ID NO: 2357528 - DNA, 25 bp, Homo sapien
aaaatgttcgcagccagtctcctgg

SEQ ID NO: 2357529 - DNA, 25 bp, Homo sapien
tctcctggccatgtgcgcaggggca

SEQ ID NO: 2357530 - DNA, 25 bp, Homo sapien
tgatgtaggacagcccaatcacgct

SEQ ID NO: 2357531 - DNA, 25 bp, Homo sapien
cgcgtactggccgtcacgtgatgta

SEQ ID NO: 2357532 - DNA, 25 bp, Homo sapien
ccgtcacgtgatgtaggacagccca

SEQ ID NO: 2357533 - DNA, 25 bp, Homo sapien
ggagccaaatcccacgcgtactggc

SEQ ID NO: 2357534 - DNA, 25 bp, Homo sapien
ggcagtacccagacagtggctggac

SEQ ID NO: 2357535 - DNA, 25 bp, Homo sapien
gctggcagtacccagacagtggctg

SEQ ID NO: 2357536 - DNA, 25 bp, Homo sapien
tcctccaggcttctaccgtccccca

SEQ ID NO: 2357537 - DNA, 25 bp, Homo sapien
gagacctgggcccgatggctggcag

SEQ ID NO: 2357538 - DNA, 25 bp, Homo sapien
taacaccaattctcggcatgtcaga

SEQ ID NO: 2357539 - DNA, 25 bp, Homo sapien
actactctcttaaggattacctggg

SEQ ID NO: 2357540 - DNA, 25 bp, Homo sapien
gtcaggccgacatatcacagctttg

SEQ ID NO: 2357541 - DNA, 25 bp, Homo sapien
gaatcagattccagacatgccaact

SEQ ID NO: 2357542 - DNA, 25 bp, Homo sapien
catgagaatcgcttaaactcgggaa

SEQ ID NO: 2357543 - DNA, 25 bp, Homo sapien
agtgaacggtgatcgcaccactgta

SEQ ID NO: 2357544 - DNA, 25 bp, Homo sapien
tgagaatcgcttaaactcgggaagc

SEQ ID NO: 2357545 - DNA, 25 bp, Homo sapien
gaggttgcagtgaacggtgatcgca

SEQ ID NO: 2357546 - DNA, 25 bp, Homo sapien
tacaacattcttattccttggcaga

SEQ ID NO: 2357547 - DNA, 25 bp, Homo sapien
ggcagaagcaagcattacatctaca

SEQ ID NO: 2357548 - DNA, 25 bp, Homo sapien
gtttgtttacctcaacagctgccta

SEQ ID NO: 2357549 - DNA, 25 bp, Homo sapien
tgaggaatacactatcttcgagcat

SEQ ID NO: 2357550 - DNA, 25 bp, Homo sapien
tatgcttagaagcatacctggcaca

SEQ ID NO: 2357551 - DNA, 25 bp, Homo sapien
taactaaggctacacataagggaaa

SEQ ID NO: 2357552 - DNA, 25 bp, Homo sapien
tatgtagacagggactagaagttaa

SEQ ID NO: 2357553 - DNA, 25 bp, Homo sapien
tagtagctctatgcaataaattgtt

SEQ ID NO: 2357554 - DNA, 25 bp, Homo sapien
gcttcagccatcagttgttgaaatg

SEQ ID NO: 2357555 - DNA, 25 bp, Homo sapien
tggaaacgtataaaaagcttgagct

SEQ ID NO: 2357556 - DNA, 25 bp, Homo sapien
catcagttgttgaaatggaaacgta

SEQ ID NO: 2357557 - DNA, 25 bp, Homo sapien
actgccatattaggagcttcagcca

SEQ ID NO: 2357558 - DNA, 25 bp, Homo sapien
aatgacaatgtccagattgaaggtc

SEQ ID NO: 2357559 - DNA, 25 bp, Homo sapien
aaatatcggggagagtcttggtcag

SEQ ID NO: 2357560 - DNA, 25 bp, Homo sapien
agcttctgaaacaccattaaaacgg

SEQ ID NO: 2357561 - DNA, 25 bp, Homo sapien
ccagattgaaggtcaaaatatcggg

SEQ ID NO: 2357562 - DNA, 25 bp, Homo sapien
caactgttaagtaaagctgatcccc

SEQ ID NO: 2357563 - DNA, 25 bp, Homo sapien
gctgacaccatttaccaccaaaagg

SEQ ID NO: 2357564 - DNA, 25 bp, Homo sapien
aaaatgctatttgcaaggacaactg

SEQ ID NO: 2357565 - DNA, 25 bp, Homo sapien
taacacaacctcatgaagctgacac

SEQ ID NO: 2357566 - DNA, 25 bp, Homo sapien
atggtttccaggtccagggtaatga

SEQ ID NO: 2357567 - DNA, 25 bp, Homo sapien
gtttccaggtccagggtaatgatgc

SEQ ID NO: 2357568 - DNA, 25 bp, Homo sapien
atgatgccctttgtaagcagccatt

SEQ ID NO: 2357569 - DNA, 25 bp, Homo sapien
gatgccctttgtaagcagccattag

SEQ ID NO: 2357570 - DNA, 25 bp, Homo sapien
aatcaatttcctgagcgtatactgc

SEQ ID NO: 2357571 - DNA, 25 bp, Homo sapien
cacacgtaaacatacagcactagac

SEQ ID NO: 2357572 - DNA, 25 bp, Homo sapien
gaaggcaatgcaacagtagttacgc

SEQ ID NO: 2357573 - DNA, 25 bp, Homo sapien
tactgcatacactgatctattaggc

SEQ ID NO: 2357574 - DNA, 25 bp, Homo sapien
tacttccctggtagagtgtgatcat

SEQ ID NO: 2357575 - DNA, 25 bp, Homo sapien
ttccctggtagagtgtgatcatcca

SEQ ID NO: 2357576 - DNA, 25 bp, Homo sapien
accatacttccctggtagagtgtga

SEQ ID NO: 2357577 - DNA, 25 bp, Homo sapien
ccctggtagagtgtgatcatccata

SEQ ID NO: 2357578 - DNA, 25 bp, Homo sapien
tccattaaacactgctattcgtggc

SEQ ID NO: 2357579 - DNA, 25 bp, Homo sapien
aatttctgtactagaatacgtcctc

SEQ ID NO: 2357580 - DNA, 25 bp, Homo sapien
aacactgctattcgtggctgatatt

SEQ ID NO: 2357581 - DNA, 25 bp, Homo sapien
taatttctgtactagaatacgtcct

SEQ ID NO: 2357582 - DNA, 25 bp, Homo sapien
tatggggctgaagcccaaattccaa

SEQ ID NO: 2357583 - DNA, 25 bp, Homo sapien
gtgtctggaatcttatggggctgaa

SEQ ID NO: 2357584 - DNA, 25 bp, Homo sapien
tctgtgtctggaatcttatggggct

SEQ ID NO: 2357585 - DNA, 25 bp, Homo sapien
agtttctgtgtctggaatcttatgg

SEQ ID NO: 2357586 - DNA, 25 bp, Homo sapien
tgtttcacaacagtacgagggctaa

SEQ ID NO: 2357587 - DNA, 25 bp, Homo sapien
taagacaacagtattgaatgccagt

SEQ ID NO: 2357588 - DNA, 25 bp, Homo sapien
gggcaactggttttcctaatcagga

SEQ ID NO: 2357589 - DNA, 25 bp, Homo sapien
cgagggctaaaccatttgaatttga

SEQ ID NO: 2357590 - DNA, 25 bp, Homo sapien
aagctgtaggtcaaatgtatattgc

SEQ ID NO: 2357591 - DNA, 25 bp, Homo sapien
cttgggcaagctgtaggtcaaatgt

SEQ ID NO: 2357592 - DNA, 25 bp, Homo sapien
ggcaagctgtaggtcaaatgtatat

SEQ ID NO: 2357593 - DNA, 25 bp, Homo sapien
tgggcaagctgtaggtcaaatgtat

SEQ ID NO: 2357594 - DNA, 25 bp, Homo sapien
gtgaattatctgcagaagtgccaga

SEQ ID NO: 2357595 - DNA, 25 bp, Homo sapien
tggattttctccgtaagcaccacca

SEQ ID NO: 2357596 - DNA, 25 bp, Homo sapien
tctccgtaagcaccaccatatgctg

SEQ ID NO: 2357597 - DNA, 25 bp, Homo sapien
gcatggattttctccgtaagcacca

SEQ ID NO: 2357598 - DNA, 25 bp, Homo sapien
ttttctccgtaagcaccaccatatg

SEQ ID NO: 2357599 - DNA, 25 bp, Homo sapien
taaatgactgggtcatccactgccc

SEQ ID NO: 2357600 - DNA, 25 bp, Homo sapien
ccacagtgattactaaaggaaggaa

SEQ ID NO: 2357601 - DNA, 25 bp, Homo sapien
actgcccattaggaatgccactgaa

SEQ ID NO: 2357602 - DNA, 25 bp, Homo sapien
tcttgtgttccacagtgattactaa

SEQ ID NO: 2357603 - DNA, 25 bp, Homo sapien
actacttaggttcatacggttcaca

SEQ ID NO: 2357604 - DNA, 25 bp, Homo sapien
gctctgtcaggtaagggccagtttt

SEQ ID NO: 2357605 - DNA, 25 bp, Homo sapien
aaaggtctactgcattctctggaac

SEQ ID NO: 2357606 - DNA, 25 bp, Homo sapien
gagtgtgcatatagctcagggaacc

SEQ ID NO: 2357607 - DNA, 25 bp, Homo sapien
tcttttattgtaaaagccatcagac

SEQ ID NO: 2357608 - DNA, 25 bp, Homo sapien
tgtaaaagccatcagactttcaaat

SEQ ID NO: 2357609 - DNA, 25 bp, Homo sapien
ttttattgtaaaagccatcagactt

SEQ ID NO: 2357610 - DNA, 25 bp, Homo sapien
tattgtaaaagccatcagactttca

SEQ ID NO: 2357611 - DNA, 25 bp, Homo sapien
tcacaacgacttatgggaaagctgg

SEQ ID NO: 2357612 - DNA, 25 bp, Homo sapien
gatattcggagcattttctgcagga

SEQ ID NO: 2357613 - DNA, 25 bp, Homo sapien
gaagatctccttaacaggttgccaa

SEQ ID NO: 2357614 - DNA, 25 bp, Homo sapien
aaagctggtttgttcctgaccctgc

SEQ ID NO: 2357615 - DNA, 25 bp, Homo sapien
cctgtatgctctcgatgattctgtg

SEQ ID NO: 2357616 - DNA, 25 bp, Homo sapien
gatttatagtcatgttgggttcaac

SEQ ID NO: 2357617 - DNA, 25 bp, Homo sapien
tatgcacaaaagagtgccacaggga

SEQ ID NO: 2357618 - DNA, 25 bp, Homo sapien
gggttcaacattaggtcaaatatca

SEQ ID NO: 2357619 - DNA, 25 bp, Homo sapien
aatttgctgagcatgttagcacatt

SEQ ID NO: 2357620 - DNA, 25 bp, Homo sapien
tttgctgagcatgttagcacattcc

SEQ ID NO: 2357621 - DNA, 25 bp, Homo sapien
gctgagcatgttagcacattcctgt

SEQ ID NO: 2357622 - DNA, 25 bp, Homo sapien
gagcatgttagcacattcctgtaat

SEQ ID NO: 2357623 - DNA, 25 bp, Homo sapien
atgcggcaccgactgggattagcag

SEQ ID NO: 2357624 - DNA, 25 bp, Homo sapien
tgcggcaccgactgggattagcaga

SEQ ID NO: 2357625 - DNA, 25 bp, Homo sapien
ccgcgcttcgcctcctcgtggcccg

SEQ ID NO: 2357626 - DNA, 25 bp, Homo sapien
gccgcgcttcgcctcctcgtggccc

SEQ ID NO: 2357627 - DNA, 25 bp, Homo sapien
cccgccgcgcttcgcctcctcgtgg

SEQ ID NO: 2357628 - DNA, 25 bp, Homo sapien
ttctgctttattgagaccggttaga

SEQ ID NO: 2357629 - DNA, 25 bp, Homo sapien
tgagaccggttagacccccatagtg

SEQ ID NO: 2357630 - DNA, 25 bp, Homo sapien
cgccaagtcctcaccactggcagcc

SEQ ID NO: 2357631 - DNA, 25 bp, Homo sapien
gggcctcacaatgctttgcagcagt

SEQ ID NO: 2357632 - DNA, 25 bp, Homo sapien
gctgcaatcagtacacgtttcccct

SEQ ID NO: 2357633 - DNA, 25 bp, Homo sapien
ggctgcaatcagtacacgtttcccc

SEQ ID NO: 2357634 - DNA, 25 bp, Homo sapien
gtccttagtaaacaaagcactcgca

SEQ ID NO: 2357635 - DNA, 25 bp, Homo sapien
tgggtgcaggcgacaaaatggctaa

SEQ ID NO: 2357636 - DNA, 25 bp, Homo sapien
agcagaggacagactccgctcatgg

SEQ ID NO: 2357637 - DNA, 25 bp, Homo sapien
gactgagaacctgtgctctagaact

SEQ ID NO: 2357638 - DNA, 25 bp, Homo sapien
gcccccaggcagtaggcagtgacct

SEQ ID NO: 2357639 - DNA, 25 bp, Homo sapien
ccccaggcagtaggcagtgacctga

SEQ ID NO: 2357640 - DNA, 25 bp, Homo sapien
cacatcaccacgcaggttacattcg

SEQ ID NO: 2357641 - DNA, 25 bp, Homo sapien
atcaccacgcaggttacattcgtct

SEQ ID NO: 2357642 - DNA, 25 bp, Homo sapien
gatcctatattggtatgaggaatgg

SEQ ID NO: 2357643 - DNA, 25 bp, Homo sapien
acagttatgctcagatgaacactgg

SEQ ID NO: 2357644 - DNA, 25 bp, Homo sapien
cctcagaggtcaaggagctgatcct

SEQ ID NO: 2357645 - DNA, 25 bp, Homo sapien
gtacagttatgctcagatgaacact

SEQ ID NO: 2357646 - DNA, 25 bp, Homo sapien
ctgatgagatgaccagagccctctg

SEQ ID NO: 2357647 - DNA, 25 bp, Homo sapien
gagtgggatcatcagcagttcccct

SEQ ID NO: 2357648 - DNA, 25 bp, Homo sapien
ttgtgacagtagcaggaaggctgat

SEQ ID NO: 2357649 - DNA, 25 bp, Homo sapien
cctctgcttttattcctggagtggg

SEQ ID NO: 2357650 - DNA, 25 bp, Homo sapien
ccagtccgaactggtagcattccag

SEQ ID NO: 2357651 - DNA, 25 bp, Homo sapien
cagaaacttcccagtccgaactggt

SEQ ID NO: 2357652 - DNA, 25 bp, Homo sapien
gaactggtagcattccagcggaacc

SEQ ID NO: 2357653 - DNA, 25 bp, Homo sapien
gcattccagcggaacccttttcggc

SEQ ID NO: 2357654 - DNA, 25 bp, Homo sapien
taaatcagaggtgtcagattgcccc

SEQ ID NO: 2357655 - DNA, 25 bp, Homo sapien
agaaagtaaatcagaggtgtcagat

SEQ ID NO: 2357656 - DNA, 25 bp, Homo sapien
agtaaatcagaggtgtcagattgcc

SEQ ID NO: 2357657 - DNA, 25 bp, Homo sapien
aatcagaggtgtcagattgccccac

SEQ ID NO: 2357658 - DNA, 25 bp, Homo sapien
caaagtttgccttcgactcaacgtg

SEQ ID NO: 2357659 - DNA, 25 bp, Homo sapien
cagggccagccacgatttgaacgct

SEQ ID NO: 2357660 - DNA, 25 bp, Homo sapien
gatcttagaagcagccgaagcagcg

SEQ ID NO: 2357661 - DNA, 25 bp, Homo sapien
ttccgaagtcaacgcaagcaaaggg

SEQ ID NO: 2357662 - DNA, 25 bp, Homo sapien
gaaactcgcctccagttgaggaggc

SEQ ID NO: 2357663 - DNA, 25 bp, Homo sapien
tagacgtgcagctcatccgcgatgc

SEQ ID NO: 2357664 - DNA, 25 bp, Homo sapien
ccgtgttgtagacgtgcagctcatc

SEQ ID NO: 2357665 - DNA, 25 bp, Homo sapien
ccgtgaaggaagaaactcgcctcca

SEQ ID NO: 2357666 - DNA, 25 bp, Homo sapien
cgggcggtgacagctgtcagggccg

SEQ ID NO: 2357667 - DNA, 25 bp, Homo sapien
agcaggcggggccgacgagccgccg

SEQ ID NO: 2357668 - DNA, 25 bp, Homo sapien
tgacagctgtcagggccgcggccgc

SEQ ID NO: 2357669 - DNA, 25 bp, Homo sapien
gctccagcaggcggggccgacgagc

SEQ ID NO: 2357670 - DNA, 25 bp, Homo sapien
tgtatttgaggcgagagtgccagaa

SEQ ID NO: 2357671 - DNA, 25 bp, Homo sapien
gcgagagtgccagaaggcctctcgt

SEQ ID NO: 2357672 - DNA, 25 bp, Homo sapien
caaacaccgggttgtatttgaggcg

SEQ ID NO: 2357673 - DNA, 25 bp, Homo sapien
tgccagaaggcctctcgttttccct

SEQ ID NO: 2357674 - DNA, 25 bp, Homo sapien
tggagggatatctcctctaacagct

SEQ ID NO: 2357675 - DNA, 25 bp, Homo sapien
gtaactcatataactcattgctgta

SEQ ID NO: 2357676 - DNA, 25 bp, Homo sapien
cagcacagcctggagggatatctcc

SEQ ID NO: 2357677 - DNA, 25 bp, Homo sapien
tctggtaccatcacagacaaatcca

SEQ ID NO: 2357678 - DNA, 25 bp, Homo sapien
gaatcttcgctttcgtttgccaggc

SEQ ID NO: 2357679 - DNA, 25 bp, Homo sapien
catttgttaccatataaagagaagc

SEQ ID NO: 2357680 - DNA, 25 bp, Homo sapien
taaagagaagctatgtccaagccga

SEQ ID NO: 2357681 - DNA, 25 bp, Homo sapien
agccgaggacaaggaggtaaaccag

SEQ ID NO: 2357682 - DNA, 25 bp, Homo sapien
gcacactacgtgacttctgaggctg

SEQ ID NO: 2357683 - DNA, 25 bp, Homo sapien
ccttcagcgttgcagttgaggcatc

SEQ ID NO: 2357684 - DNA, 25 bp, Homo sapien
catctgggtggccatatgcagctat

SEQ ID NO: 2357685 - DNA, 25 bp, Homo sapien
tcttggaatcctgagccaccatgta

SEQ ID NO: 2357686 - DNA, 25 bp, Homo sapien
aaaagttcatatagtacagaaaggc

SEQ ID NO: 2357687 - DNA, 25 bp, Homo sapien
aaggcattaggagagcagaaacccc

SEQ ID NO: 2357688 - DNA, 25 bp, Homo sapien
tatagtacagaaaggcattaggaga

SEQ ID NO: 2357689 - DNA, 25 bp, Homo sapien
ggcattaggagagcagaaaccccaa

SEQ ID NO: 2357690 - DNA, 25 bp, Homo sapien
cacacattccaccaaaaacatacat

SEQ ID NO: 2357691 - DNA, 25 bp, Homo sapien
gtcactggaatgctccaacccacaa

SEQ ID NO: 2357692 - DNA, 25 bp, Homo sapien
ctaagtcaagctgccataggtcatc

SEQ ID NO: 2357693 - DNA, 25 bp, Homo sapien
ggcacaacccctttagtcactggaa

SEQ ID NO: 2357694 - DNA, 25 bp, Homo sapien
aaatctttggctgcactgcacatgt

SEQ ID NO: 2357695 - DNA, 25 bp, Homo sapien
cacttaatgttagtacagttagccc

SEQ ID NO: 2357696 - DNA, 25 bp, Homo sapien
tagcaacttgatctaacaagagtaa

SEQ ID NO: 2357697 - DNA, 25 bp, Homo sapien
cagcttacataaactgccaatcaga

SEQ ID NO: 2357698 - DNA, 25 bp, Homo sapien
tatgaaggcttcgtggaagtggcac

SEQ ID NO: 2357699 - DNA, 25 bp, Homo sapien
gaagtggcactgtccctttagtttc

SEQ ID NO: 2357700 - DNA, 25 bp, Homo sapien
tgtttcctataacactggctgtatg

SEQ ID NO: 2357701 - DNA, 25 bp, Homo sapien
tgtatgaaggcttcgtggaagtggc

SEQ ID NO: 2357702 - DNA, 25 bp, Homo sapien
tcccccttatgtgggacccatccac

SEQ ID NO: 2357703 - DNA, 25 bp, Homo sapien
cacaatcatgaggtgaagtctcagt

SEQ ID NO: 2357704 - DNA, 25 bp, Homo sapien
gataccaaagatccttgcagcaaac

SEQ ID NO: 2357705 - DNA, 25 bp, Homo sapien
tctgatactagggtggtccactctg

SEQ ID NO: 2357706 - DNA, 25 bp, Homo sapien
ccgattgcaacagcacagtggccag

SEQ ID NO: 2357707 - DNA, 25 bp, Homo sapien
tccaaaaatacaatcgagtgccgat

SEQ ID NO: 2357708 - DNA, 25 bp, Homo sapien
tgtgtggaccagagctttgaaaaca

SEQ ID NO: 2357709 - DNA, 25 bp, Homo sapien
gaaagtttactcagataaacacagc

SEQ ID NO: 2357710 - DNA, 25 bp, Homo sapien
tcatctgcttaccaagacagggaaa

SEQ ID NO: 2357711 - DNA, 25 bp, Homo sapien
ccagtgtataaatggtttgctgata

SEQ ID NO: 2357712 - DNA, 25 bp, Homo sapien
tgatcagctgtacttgagatggtgc

SEQ ID NO: 2357713 - DNA, 25 bp, Homo sapien
gatagccctcaactgtagacacttc

SEQ ID NO: 2357714 - DNA, 25 bp, Homo sapien
tgtactcaactgcaaaagatagccc

SEQ ID NO: 2357715 - DNA, 25 bp, Homo sapien
tcccacttgacatgaaaggagttgg

SEQ ID NO: 2357716 - DNA, 25 bp, Homo sapien
taggaacgatgttattactgccttg

SEQ ID NO: 2357717 - DNA, 25 bp, Homo sapien
aacgatgttattactgccttgtctg

SEQ ID NO: 2357718 - DNA, 25 bp, Homo sapien
ggaacgatgttattactgccttgtc

SEQ ID NO: 2357719 - DNA, 25 bp, Homo sapien
cgatgttattactgccttgtctgtg

SEQ ID NO: 2357720 - DNA, 25 bp, Homo sapien
tagaatccgtcagtgctttaaagtc

SEQ ID NO: 2357721 - DNA, 25 bp, Homo sapien
tattatgattagaagcatttgatgc

SEQ ID NO: 2357722 - DNA, 25 bp, Homo sapien
gattagaagcatttgatgccaaaga

SEQ ID NO: 2357723 - DNA, 25 bp, Homo sapien
ccaaagatggatataaaatggcatt

SEQ ID NO: 2357724 - DNA, 25 bp, Homo sapien
tatccgactgcccattagaaatctt

SEQ ID NO: 2357725 - DNA, 25 bp, Homo sapien
tctactatagttcttcctgatggag

SEQ ID NO: 2357726 - DNA, 25 bp, Homo sapien
tagactccaggcctaagtatccgac

SEQ ID NO: 2357727 - DNA, 25 bp, Homo sapien
tctaaccaggttgaatatggcagtt

SEQ ID NO: 2357728 - DNA, 25 bp, Homo sapien
gaattactgttcttacatccaggca

SEQ ID NO: 2357729 - DNA, 25 bp, Homo sapien
tagaacacctacatttgctgaagtg

SEQ ID NO: 2357730 - DNA, 25 bp, Homo sapien
gctggaaacagtactggatacagat

SEQ ID NO: 2357731 - DNA, 25 bp, Homo sapien
caactgccccatttgtactggatga

SEQ ID NO: 2357732 - DNA, 25 bp, Homo sapien
catgtgtctctacacggctgatctt

SEQ ID NO: 2357733 - DNA, 25 bp, Homo sapien
tctacacggctgatcttcgttgcag

SEQ ID NO: 2357734 - DNA, 25 bp, Homo sapien
gatcttcgttgcaggcagtgcatat

SEQ ID NO: 2357735 - DNA, 25 bp, Homo sapien
acacggctgatcttcgttgcaggca

SEQ ID NO: 2357736 - DNA, 25 bp, Homo sapien
ccatcttcttataaatgagacactg

SEQ ID NO: 2357737 - DNA, 25 bp, Homo sapien
agccatcttcttataaatgagacac

SEQ ID NO: 2357738 - DNA, 25 bp, Homo sapien
ttttaaagccatcttcttataaatg

SEQ ID NO: 2357739 - DNA, 25 bp, Homo sapien
ttaaagccatcttcttataaatgag

SEQ ID NO: 2357740 - DNA, 25 bp, Homo sapien
cagggatgccaattcaaacacagga

SEQ ID NO: 2357741 - DNA, 25 bp, Homo sapien
taagtccatgcagtgatctacaagt

SEQ ID NO: 2357742 - DNA, 25 bp, Homo sapien
taacagattaggtcaactgacagtg

SEQ ID NO: 2357743 - DNA, 25 bp, Homo sapien
gctctgtactatcaacctagctgga

SEQ ID NO: 2357744 - DNA, 25 bp, Homo sapien
cattgtcgttctcccgctttcactg

SEQ ID NO: 2357745 - DNA, 25 bp, Homo sapien
taaaaattcccacatcacaccattg

SEQ ID NO: 2357746 - DNA, 25 bp, Homo sapien
attcccacatcacaccattgtcgtt

SEQ ID NO: 2357747 - DNA, 25 bp, Homo sapien
tgtcgttctcccgctttcactgtgg

SEQ ID NO: 2357748 - DNA, 25 bp, Homo sapien
ttttggcagcaaataaaactggctc

SEQ ID NO: 2357749 - DNA, 25 bp, Homo sapien
tcccttttggcagcaaataaaactg

SEQ ID NO: 2357750 - DNA, 25 bp, Homo sapien
ttggcagcaaataaaactggctcac

SEQ ID NO: 2357751 - DNA, 25 bp, Homo sapien
tttgcttcccttttggcagcaaata

SEQ ID NO: 2357752 - DNA, 25 bp, Homo sapien
tcctgtgcctggaacaagatcttgt

SEQ ID NO: 2357753 - DNA, 25 bp, Homo sapien
cattgattgcagcaaccctgaatct

SEQ ID NO: 2357754 - DNA, 25 bp, Homo sapien
aattcactgattttgctgaaaggac

SEQ ID NO: 2357755 - DNA, 25 bp, Homo sapien
ggacctatcccacaaccattgattg

SEQ ID NO: 2357756 - DNA, 25 bp, Homo sapien
tcctgaacacaatggcaggcctgga

SEQ ID NO: 2357757 - DNA, 25 bp, Homo sapien
tatctgtgctgtgcggatagccaag

SEQ ID NO: 2357758 - DNA, 25 bp, Homo sapien
gaagccaccgaacttgtgtagctgg

SEQ ID NO: 2357759 - DNA, 25 bp, Homo sapien
tcctcatgaacacaagttgacttgg

SEQ ID NO: 2357760 - DNA, 25 bp, Homo sapien
tcaatttaaaggtgctttcttattg

SEQ ID NO: 2357761 - DNA, 25 bp, Homo sapien
caatttaaaggtgctttcttattgt

SEQ ID NO: 2357762 - DNA, 25 bp, Homo sapien
ggatctataattcagcaaatacatt

SEQ ID NO: 2357763 - DNA, 25 bp, Homo sapien
aatcatcatcacaatagcttcagta

SEQ ID NO: 2357764 - DNA, 25 bp, Homo sapien
aatcttcataaccagttactaataa

SEQ ID NO: 2357765 - DNA, 25 bp, Homo sapien
cagagaatactcttttaaatgacaa

SEQ ID NO: 2357766 - DNA, 25 bp, Homo sapien
ggatgactgggttacacagccctta

SEQ ID NO: 2357767 - DNA, 25 bp, Homo sapien
gaaggagtactcaaaggtaggacat

SEQ ID NO: 2357768 - DNA, 25 bp, Homo sapien
tacaacagccagttaccagaatcat

SEQ ID NO: 2357769 - DNA, 25 bp, Homo sapien
taagacagcatagtatacaacagcc

SEQ ID NO: 2357770 - DNA, 25 bp, Homo sapien
tttaatttcttaagctctgtgctaa

SEQ ID NO: 2357771 - DNA, 25 bp, Homo sapien
ctcttttttaatttcttaagctctg

SEQ ID NO: 2357772 - DNA, 25 bp, Homo sapien
ttttaatttcttaagctctgtgcta

SEQ ID NO: 2357773 - DNA, 25 bp, Homo sapien
ttttttaatttcttaagctctgtgc

SEQ ID NO: 2357774 - DNA, 25 bp, Homo sapien
tgtgcccctgcagttattgaagctc

SEQ ID NO: 2357775 - DNA, 25 bp, Homo sapien
taaaacaagttacctgtagcagagt

SEQ ID NO: 2357776 - DNA, 25 bp, Homo sapien
gcctggtaagaatcaagaaaactca

SEQ ID NO: 2357777 - DNA, 25 bp, Homo sapien
cagatttaaataggcagtggaacca

SEQ ID NO: 2357778 - DNA, 25 bp, Homo sapien
gatacagcctactgctacacaaagg

SEQ ID NO: 2357779 - DNA, 25 bp, Homo sapien
tatgagagccagagttgcagaacac

SEQ ID NO: 2357780 - DNA, 25 bp, Homo sapien
cagaatgaagctctcaccaagggca

SEQ ID NO: 2357781 - DNA, 25 bp, Homo sapien
tatttgaactgcttacctgactggg

SEQ ID NO: 2357782 - DNA, 25 bp, Homo sapien
ccatttcaatggagcagcaggtcag

SEQ ID NO: 2357783 - DNA, 25 bp, Homo sapien
ttcaggtgtgacaagggttacttac

SEQ ID NO: 2357784 - DNA, 25 bp, Homo sapien
tatgagaaaacgactcccaactgcc

SEQ ID NO: 2357785 - DNA, 25 bp, Homo sapien
tatttcaaacaatacaggcagcctt

SEQ ID NO: 2357786 - DNA, 25 bp, Homo sapien
tcccacagggtcaagatccaatgag

SEQ ID NO: 2357787 - DNA, 25 bp, Homo sapien
taccaaggttatcaatgtcagtgcc

SEQ ID NO: 2357788 - DNA, 25 bp, Homo sapien
cattgctcaataacaggtgccttgc

SEQ ID NO: 2357789 - DNA, 25 bp, Homo sapien
gagtatggactattcctcacggaag

SEQ ID NO: 2357790 - DNA, 25 bp, Homo sapien
ttgaggtgttaattctgacttgaga

SEQ ID NO: 2357791 - DNA, 25 bp, Homo sapien
tgagagtctgtatgattctggaaca

SEQ ID NO: 2357792 - DNA, 25 bp, Homo sapien
tattaatagctgtaatgtagcttcc

SEQ ID NO: 2357793 - DNA, 25 bp, Homo sapien
gcttcctgatgcttgactaattgag

SEQ ID NO: 2357794 - DNA, 25 bp, Homo sapien
tacaggtgaattccagttgatgact

SEQ ID NO: 2357795 - DNA, 25 bp, Homo sapien
gaaaatcagggtttagcaggagagc

SEQ ID NO: 2357796 - DNA, 25 bp, Homo sapien
gacattgtctattttggaacttcta

SEQ ID NO: 2357797 - DNA, 25 bp, Homo sapien
gaaagttcgcaagcaggagcaaaag

SEQ ID NO: 2357798 - DNA, 25 bp, Homo sapien
tctttatacatagatcttcctgacc

SEQ ID NO: 2357799 - DNA, 25 bp, Homo sapien
atagatcttcctgacccctcctcct

SEQ ID NO: 2357800 - DNA, 25 bp, Homo sapien
tttatacatagatcttcctgacccc

SEQ ID NO: 2357801 - DNA, 25 bp, Homo sapien
tatacatagatcttcctgacccctc

SEQ ID NO: 2357802 - DNA, 25 bp, Homo sapien
tgaacggcttccaggtcagcatgaa

SEQ ID NO: 2357803 - DNA, 25 bp, Homo sapien
ctggactgagcacccgtgggagcat

SEQ ID NO: 2357804 - DNA, 25 bp, Homo sapien
ccaaaggcaccagttgcctggactg

SEQ ID NO: 2357805 - DNA, 25 bp, Homo sapien
tcagcatgaagaggctccaggtgca

SEQ ID NO: 2357806 - DNA, 25 bp, Homo sapien
taacttgaaatacgaaataattcta

SEQ ID NO: 2357807 - DNA, 25 bp, Homo sapien
gaaggagccagtgagagataattga

SEQ ID NO: 2357808 - DNA, 25 bp, Homo sapien
tacttttttagagattcctgatgtg

SEQ ID NO: 2357809 - DNA, 25 bp, Homo sapien
tagagattcctgatgtggttggctg

SEQ ID NO: 2357810 - DNA, 25 bp, Homo sapien
ccccactgatcgtttctgtctgctg

SEQ ID NO: 2357811 - DNA, 25 bp, Homo sapien
atcttcttgagtggaccctggtcca

SEQ ID NO: 2357812 - DNA, 25 bp, Homo sapien
catcttcttgagtggaccctggtcc

SEQ ID NO: 2357813 - DNA, 25 bp, Homo sapien
cccatcgcagaggtctggtgttgaa

SEQ ID NO: 2357814 - DNA, 25 bp, Homo sapien
gatgctcacagcaacgacttctggc

SEQ ID NO: 2357815 - DNA, 25 bp, Homo sapien
tggtgttgaagactcaactctgaac

SEQ ID NO: 2357816 - DNA, 25 bp, Homo sapien
gacttctggcaaaactgcctagctt

SEQ ID NO: 2357817 - DNA, 25 bp, Homo sapien
gactagaagtcactcgccttcctta

SEQ ID NO: 2357818 - DNA, 25 bp, Homo sapien
ggactagaagtcactcgccttcctt

SEQ ID NO: 2357819 - DNA, 25 bp, Homo sapien
caggactagaagtcactcgccttcc

SEQ ID NO: 2357820 - DNA, 25 bp, Homo sapien
tccaggactagaagtcactcgcctt

SEQ ID NO: 2357821 - DNA, 25 bp, Homo sapien
gacaccattcatttcaccatgcagc

SEQ ID NO: 2357822 - DNA, 25 bp, Homo sapien
gatgctgggtataaactgtgaagtg

SEQ ID NO: 2357823 - DNA, 25 bp, Homo sapien
ctcctgtgatgtgccaagtcctgag

SEQ ID NO: 2357824 - DNA, 25 bp, Homo sapien
cagatatttattaggctcctgtgat

SEQ ID NO: 2357825 - DNA, 25 bp, Homo sapien
aagaaattcagcctgtcctcccttt

SEQ ID NO: 2357826 - DNA, 25 bp, Homo sapien
tccctttcggacaccctggttgcaa

SEQ ID NO: 2357827 - DNA, 25 bp, Homo sapien
tgaccagcaggggataagaaattca

SEQ ID NO: 2357828 - DNA, 25 bp, Homo sapien
cagtgcacacgttagtgattcctga

SEQ ID NO: 2357829 - DNA, 25 bp, Homo sapien
agccagctggtgttgatgccacctt

SEQ ID NO: 2357830 - DNA, 25 bp, Homo sapien
gtgttgatgccacctttgacctgca

SEQ ID NO: 2357831 - DNA, 25 bp, Homo sapien
ggaggacatgccatgagcagccagc

SEQ ID NO: 2357832 - DNA, 25 bp, Homo sapien
gcatggcatctacctgcatacattt

SEQ ID NO: 2357833 - DNA, 25 bp, Homo sapien
cagaggagaatcctgatgcttaggg

SEQ ID NO: 2357834 - DNA, 25 bp, Homo sapien
gccaggcatcctgctaagtccttta

SEQ ID NO: 2357835 - DNA, 25 bp, Homo sapien
gcttgatactgaaatccaggtttcc

SEQ ID NO: 2357836 - DNA, 25 bp, Homo sapien
aagtatgcttatctcatgtttttcc

SEQ ID NO: 2357837 - DNA, 25 bp, Homo sapien
cgcgggtcggagaacgcggtgggcg

SEQ ID NO: 2357838 - DNA, 25 bp, Homo sapien
ggcgctcggtgacaacagcgaagtc

SEQ ID NO: 2357839 - DNA, 25 bp, Homo sapien
cggagccgaaggacgcctggcggag

SEQ ID NO: 2357840 - DNA, 25 bp, Homo sapien
ccctgtgggaactgacggagccgaa

SEQ ID NO: 2357841 - DNA, 25 bp, Homo sapien
atcgccgttcttgcctttcgtctgc

SEQ ID NO: 2357842 - DNA, 25 bp, Homo sapien
gtctgcagctccgttggggcggccg

SEQ ID NO: 2357843 - DNA, 25 bp, Homo sapien
tgcagctccgttggggcggccgccg

SEQ ID NO: 2357844 - DNA, 25 bp, Homo sapien
ccatcgccgttcttgcctttcgtct

SEQ ID NO: 2357845 - DNA, 25 bp, Homo sapien
gtttctaccagcaaagtaatgctca

SEQ ID NO: 2357846 - DNA, 25 bp, Homo sapien
ggcattaacagattaattccttctt

SEQ ID NO: 2357847 - DNA, 25 bp, Homo sapien
caaagtaatgctcagagctagaaag

SEQ ID NO: 2357848 - DNA, 25 bp, Homo sapien
tatacatgtagactagtttctacca

SEQ ID NO: 2357849 - DNA, 25 bp, Homo sapien
tttgtaggattccagtgagtcaggg

SEQ ID NO: 2357850 - DNA, 25 bp, Homo sapien
ctgcctgagatgtcccatttgtagg

SEQ ID NO: 2357851 - DNA, 25 bp, Homo sapien
ggcagagaggtagataaaagaagtt

SEQ ID NO: 2357852 - DNA, 25 bp, Homo sapien
gcagagaggtagataaaagaagttt

SEQ ID NO: 2357853 - DNA, 25 bp, Homo sapien
caggagggaggatggcttgatgcca

SEQ ID NO: 2357854 - DNA, 25 bp, Homo sapien
ggcccaggagggaggatggcttgat

SEQ ID NO: 2357855 - DNA, 25 bp, Homo sapien
gaccagcctggccatcataagaaga

SEQ ID NO: 2357856 - DNA, 25 bp, Homo sapien
cccaggagggaggatggcttgatgc

SEQ ID NO: 2357857 - DNA, 25 bp, Homo sapien
ggggagcttcttccttctttcttgc

SEQ ID NO: 2357858 - DNA, 25 bp, Homo sapien
ctttcttgcctattaaactttctgc

SEQ ID NO: 2357859 - DNA, 25 bp, Homo sapien
tttcttgcctattaaactttctgct

SEQ ID NO: 2357860 - DNA, 25 bp, Homo sapien
tcttccttctttcttgcctattaaa

SEQ ID NO: 2357861 - DNA, 25 bp, Homo sapien
cataaatgtaaaggtagcgcccatg

SEQ ID NO: 2357862 - DNA, 25 bp, Homo sapien
tttgcatgtggataacctgctgtct

SEQ ID NO: 2357863 - DNA, 25 bp, Homo sapien
tatactgtcactacacctagactga

SEQ ID NO: 2357864 - DNA, 25 bp, Homo sapien
gatgtatcttgccaaccttgtcaaa

SEQ ID NO: 2357865 - DNA, 25 bp, Homo sapien
gcaaagttttaccagggtgatgatc

SEQ ID NO: 2357866 - DNA, 25 bp, Homo sapien
catgtggacctactgaagatgacca

SEQ ID NO: 2357867 - DNA, 25 bp, Homo sapien
gaccatctatataggcctgaagcag

SEQ ID NO: 2357868 - DNA, 25 bp, Homo sapien
tggccgtgctggtgaatcctgctgg

SEQ ID NO: 2357869 - DNA, 25 bp, Homo sapien
tatgtcaggtatttgttgattacca

SEQ ID NO: 2357870 - DNA, 25 bp, Homo sapien
tgattaccatttaatctagcctcag

SEQ ID NO: 2357871 - DNA, 25 bp, Homo sapien
tacccactgataggattaattgtac

SEQ ID NO: 2357872 - DNA, 25 bp, Homo sapien
tctagcctcagtactgacagaagga

SEQ ID NO: 2357873 - DNA, 25 bp, Homo sapien
caagcacaaaataaggaacacacag

SEQ ID NO: 2357874 - DNA, 25 bp, Homo sapien
ctgtttgatcaagttcaagcacaaa

SEQ ID NO: 2357875 - DNA, 25 bp, Homo sapien
aagttcaagcacaaaataaggaaca

SEQ ID NO: 2357876 - DNA, 25 bp, Homo sapien
gtttgatcaagttcaagcacaaaat

SEQ ID NO: 2357877 - DNA, 25 bp, Homo sapien
caccatggtcctagaaagaagcttt

SEQ ID NO: 2357878 - DNA, 25 bp, Homo sapien
taatagaaatgatggtgctggccac

SEQ ID NO: 2357879 - DNA, 25 bp, Homo sapien
tgagtcaccaacaggcctagattag

SEQ ID NO: 2357880 - DNA, 25 bp, Homo sapien
gcagaagctgtcaatgcccaggact

SEQ ID NO: 2357881 - DNA, 25 bp, Homo sapien
gaaggaatagaagggtcaccgtaga

SEQ ID NO: 2357882 - DNA, 25 bp, Homo sapien
ccaccgggacaaaagtcaattcata

SEQ ID NO: 2357883 - DNA, 25 bp, Homo sapien
cacaggcttcagaattacatgggcc

SEQ ID NO: 2357884 - DNA, 25 bp, Homo sapien
tcaccgtagaggagccagacaacat

SEQ ID NO: 2357885 - DNA, 25 bp, Homo sapien
cccaaaagtttgtgaggccgaggca

SEQ ID NO: 2357886 - DNA, 25 bp, Homo sapien
tgagaccagcctgaccaacacggtg

SEQ ID NO: 2357887 - DNA, 25 bp, Homo sapien
ggtggatcacctgacatcaggagtt

SEQ ID NO: 2357888 - DNA, 25 bp, Homo sapien
tgaaaacctgtctctactaaaaaca

SEQ ID NO: 2357889 - DNA, 25 bp, Homo sapien
ccaatccagttaggcagtacacagg

SEQ ID NO: 2357890 - DNA, 25 bp, Homo sapien
cagttaggcagtacacaggccctca

SEQ ID NO: 2357891 - DNA, 25 bp, Homo sapien
cacaggccctcaactctaaaggaaa

SEQ ID NO: 2357892 - DNA, 25 bp, Homo sapien
tcactccattaccaatccagttagg

SEQ ID NO: 2357893 - DNA, 25 bp, Homo sapien
tccacagggatagccaagatgtgtg

SEQ ID NO: 2357894 - DNA, 25 bp, Homo sapien
gaagacacctgaagtatagatacaa

SEQ ID NO: 2357895 - DNA, 25 bp, Homo sapien
tgtaaatcaacaggccctgtgagtg

SEQ ID NO: 2357896 - DNA, 25 bp, Homo sapien
tggcatggtggcagattgtacaacc

SEQ ID NO: 2357897 - DNA, 25 bp, Homo sapien
tgctctccgcgttcgccgccacccg

SEQ ID NO: 2357898 - DNA, 25 bp, Homo sapien
cgtgctctccgcgttcgccgccacc

SEQ ID NO: 2357899 - DNA, 25 bp, Homo sapien
gtgctctccgcgttcgccgccaccc

SEQ ID NO: 2357900 - DNA, 25 bp, Homo sapien
ccttgtactctcgtagcgtgcccga

SEQ ID NO: 2357901 - DNA, 25 bp, Homo sapien
accttgtactctcgtagcgtgcccg

SEQ ID NO: 2357902 - DNA, 25 bp, Homo sapien
taccttgtactctcgtagcgtgccc

SEQ ID NO: 2357903 - DNA, 25 bp, Homo sapien
cttgtactctcgtagcgtgcccgag

SEQ ID NO: 2357904 - DNA, 25 bp, Homo sapien
gcggtagaggggcggcgtgtggcat

SEQ ID NO: 2357905 - DNA, 25 bp, Homo sapien
tgggggtgggcaggcagcgacccac

SEQ ID NO: 2357906 - DNA, 25 bp, Homo sapien
gtgtggcatttgggggtgggcaggc

SEQ ID NO: 2357907 - DNA, 25 bp, Homo sapien
cggtagaggggcggcgtgtggcatt

SEQ ID NO: 2357908 - DNA, 25 bp, Homo sapien
gagtcatagcgcagccagatcctga

SEQ ID NO: 2357909 - DNA, 25 bp, Homo sapien
tcatgatctgaatggagtgggctcg

SEQ ID NO: 2357910 - DNA, 25 bp, Homo sapien
gtgggctcgggcgcggtgccgggca

SEQ ID NO: 2357911 - DNA, 25 bp, Homo sapien
cggtgccgggcacccatgtctcggt

SEQ ID NO: 2357912 - DNA, 25 bp, Homo sapien
gtggcttgtgctgacggcgcaggac

SEQ ID NO: 2357913 - DNA, 25 bp, Homo sapien
cccggtggggcagcgggaacttgat

SEQ ID NO: 2357914 - DNA, 25 bp, Homo sapien
ggcttgtgctgacggcgcaggaccc

SEQ ID NO: 2357915 - DNA, 25 bp, Homo sapien
agcgtggcttgtgctgacggcgcag

SEQ ID NO: 2357916 - DNA, 25 bp, Homo sapien
ttttgtgtgggactggctcagtttg

SEQ ID NO: 2357917 - DNA, 25 bp, Homo sapien
gtgggactggctcagtttgtccagc

SEQ ID NO: 2357918 - DNA, 25 bp, Homo sapien
gggactggctcagtttgtccagcca

SEQ ID NO: 2357919 - DNA, 25 bp, Homo sapien
gattttgtgtgggactggctcagtt

SEQ ID NO: 2357920 - DNA, 25 bp, Homo sapien
gaacattatacataagacaggtggg

SEQ ID NO: 2357921 - DNA, 25 bp, Homo sapien
aaagaaagataccatcacatctagg

SEQ ID NO: 2357922 - DNA, 25 bp, Homo sapien
taggaacacctatcatgatatcaac

SEQ ID NO: 2357923 - DNA, 25 bp, Homo sapien
caggtcatggaaggttctacgggat

SEQ ID NO: 2357924 - DNA, 25 bp, Homo sapien
agtcttgcgttgaataagcccattg

SEQ ID NO: 2357925 - DNA, 25 bp, Homo sapien
gtggaagcagttgcaggccttcaag

SEQ ID NO: 2357926 - DNA, 25 bp, Homo sapien
cattgtagtggaagcagttgcaggc

SEQ ID NO: 2357927 - DNA, 25 bp, Homo sapien
tgaataagcccattgtagtggaagc

SEQ ID NO: 2357928 - DNA, 25 bp, Homo sapien
ttgccgtgggctgccggctccacgc

SEQ ID NO: 2357929 - DNA, 25 bp, Homo sapien
cgtgggctgccggctccacgcccac

SEQ ID NO: 2357930 - DNA, 25 bp, Homo sapien
gccgtgggctgccggctccacgccc

SEQ ID NO: 2357931 - DNA, 25 bp, Homo sapien
ctttgccgtgggctgccggctccac

SEQ ID NO: 2357932 - DNA, 25 bp, Homo sapien
gggcggtacttgctcttgaggatcc

SEQ ID NO: 2357933 - DNA, 25 bp, Homo sapien
gcgctggcctgcagaaggctgccac

SEQ ID NO: 2357934 - DNA, 25 bp, Homo sapien
ctgcagaaggctgccacgcgcaggt

SEQ ID NO: 2357935 - DNA, 25 bp, Homo sapien
ctcttgaggatcctgtgtctgatgc

SEQ ID NO: 2357936 - DNA, 25 bp, Homo sapien
cattatggagggtcactagctttac

SEQ ID NO: 2357937 - DNA, 25 bp, Homo sapien
gaacccagcaatggagcctaagaag

SEQ ID NO: 2357938 - DNA, 25 bp, Homo sapien
aaaattaactgtcactccatgggac

SEQ ID NO: 2357939 - DNA, 25 bp, Homo sapien
gcaccgtatgctagccaagttgaca

SEQ ID NO: 2357940 - DNA, 25 bp, Homo sapien
ctaattgggtgacaccacatcctct

SEQ ID NO: 2357941 - DNA, 25 bp, Homo sapien
gaccacctttcgctctgctgcaaat

SEQ ID NO: 2357942 - DNA, 25 bp, Homo sapien
ctgtttcctaatggctacgagaagc

SEQ ID NO: 2357943 - DNA, 25 bp, Homo sapien
taatggctacgagaagccacgccct

SEQ ID NO: 2357944 - DNA, 25 bp, Homo sapien
tgcaaatgccggagtgaagaaaact

SEQ ID NO: 2357945 - DNA, 25 bp, Homo sapien
gctttgtctggtttcacccgacgca

SEQ ID NO: 2357946 - DNA, 25 bp, Homo sapien
tggtttcacccgacgcagagcttac

SEQ ID NO: 2357947 - DNA, 25 bp, Homo sapien
aggcgcaatgctgtcgtccccgccg

SEQ ID NO: 2357948 - DNA, 25 bp, Homo sapien
catccctgggctcgcggctttgtct

SEQ ID NO: 2357949 - DNA, 25 bp, Homo sapien
gctcagacacgccttaaaatatctt

SEQ ID NO: 2357950 - DNA, 25 bp, Homo sapien
cgaaaccgcacacgccacgaagctg

SEQ ID NO: 2357951 - DNA, 25 bp, Homo sapien
ccgtctgctcagacacgccttaaaa

SEQ ID NO: 2357952 - DNA, 25 bp, Homo sapien
gaagctttgtgtgaccgggtcgaaa

SEQ ID NO: 2357953 - DNA, 25 bp, Homo sapien
tcgtcgccgccccatttaatagtct

SEQ ID NO: 2357954 - DNA, 25 bp, Homo sapien
aagctcaaggagctactcaaaagca

SEQ ID NO: 2357955 - DNA, 25 bp, Homo sapien
caaacccaggcaatgtggtcgacgc

SEQ ID NO: 2357956 - DNA, 25 bp, Homo sapien
cactgtcctgtactgcctgagagag

SEQ ID NO: 2357957 - DNA, 25 bp, Homo sapien
agaagcttaatacacgtttatctca

SEQ ID NO: 2357958 - DNA, 25 bp, Homo sapien
aatacacgtttatctcaactttcac

SEQ ID NO: 2357959 - DNA, 25 bp, Homo sapien
acacgtttatctcaactttcacaaa

SEQ ID NO: 2357960 - DNA, 25 bp, Homo sapien
gcttaatacacgtttatctcaactt

SEQ ID NO: 2357961 - DNA, 25 bp, Homo sapien
ggctagaactcacaatcaagcttgg

SEQ ID NO: 2357962 - DNA, 25 bp, Homo sapien
ctgtgtggcacaaaagcagagcgga

SEQ ID NO: 2357963 - DNA, 25 bp, Homo sapien
gcaggcaccgcgtgccctctgttga

SEQ ID NO: 2357964 - DNA, 25 bp, Homo sapien
agcttggagtctgaccccggcaaat

SEQ ID NO: 2357965 - DNA, 25 bp, Homo sapien
ggcagatcggtttccgcggccaatt

SEQ ID NO: 2357966 - DNA, 25 bp, Homo sapien
aattccgagagcgttccttccaggg

SEQ ID NO: 2357967 - DNA, 25 bp, Homo sapien
tgtttcacaaacacaacgggcagat

SEQ ID NO: 2357968 - DNA, 25 bp, Homo sapien
tttccgcggccaattccgagagcgt

SEQ ID NO: 2357969 - DNA, 25 bp, Homo sapien
gctagcccacgagcgtttttcgtca

SEQ ID NO: 2357970 - DNA, 25 bp, Homo sapien
gtgaccacgctgagctcaacgagct

SEQ ID NO: 2357971 - DNA, 25 bp, Homo sapien
gctgcgtcccgtttggagggtcaca

SEQ ID NO: 2357972 - DNA, 25 bp, Homo sapien
caacttcgattaacacatgcgctag

SEQ ID NO: 2357973 - DNA, 25 bp, Homo sapien
aagtcaccccaagagcttcctggtt

SEQ ID NO: 2357974 - DNA, 25 bp, Homo sapien
atttgctgtttgaagtctagatcca

SEQ ID NO: 2357975 - DNA, 25 bp, Homo sapien
tattaatataatagaccgttatctc

SEQ ID NO: 2357976 - DNA, 25 bp, Homo sapien
gaagtctagatccattccctataac

SEQ ID NO: 2357977 - DNA, 25 bp, Homo sapien
cattccctataaccatttgtcaaaa

SEQ ID NO: 2357978 - DNA, 25 bp, Homo sapien
ctcactaaatgtcgtgacctgcagt

SEQ ID NO: 2357979 - DNA, 25 bp, Homo sapien
cactaaatgtcgtgacctgcagtcc

SEQ ID NO: 2357980 - DNA, 25 bp, Homo sapien
aaatgtcgtgacctgcagtcccagc

SEQ ID NO: 2357981 - DNA, 25 bp, Homo sapien
ctaaatgtcgtgacctgcagtccca

SEQ ID NO: 2357982 - DNA, 25 bp, Homo sapien
caacttcttccagcaggattctttc

SEQ ID NO: 2357983 - DNA, 25 bp, Homo sapien
aacttcttccagcaggattctttct

SEQ ID NO: 2357984 - DNA, 25 bp, Homo sapien
tcccttgtcttctatagtacactca

SEQ ID NO: 2357985 - DNA, 25 bp, Homo sapien
ctttctcccttgtcttctatagtac

SEQ ID NO: 2357986 - DNA, 25 bp, Homo sapien
cccatttcgttctggatgcagatct

SEQ ID NO: 2357987 - DNA, 25 bp, Homo sapien
ccctggagggcattgaataccaagc

SEQ ID NO: 2357988 - DNA, 25 bp, Homo sapien
cattgaataccaagctaaggagctc

SEQ ID NO: 2357989 - DNA, 25 bp, Homo sapien
ggccagcgagtagcaatcaggaaga

SEQ ID NO: 2357990 - DNA, 25 bp, Homo sapien
tcacatccggtgaatacagagagct

SEQ ID NO: 2357991 - DNA, 25 bp, Homo sapien
ataaaaaatacaggtctgcctgctc

SEQ ID NO: 2357992 - DNA, 25 bp, Homo sapien
tgaaggaaacagctttgaattgcac

SEQ ID NO: 2357993 - DNA, 25 bp, Homo sapien
cgggaatactactgcagttgaccct

SEQ ID NO: 2357994 - DNA, 25 bp, Homo sapien
cgggggagcctccaatatccgtgct

SEQ ID NO: 2357995 - DNA, 25 bp, Homo sapien
ggagcctccaatatccgtgctaacc

SEQ ID NO: 2357996 - DNA, 25 bp, Homo sapien
tccaatatccgtgctaacccctgca

SEQ ID NO: 2357997 - DNA, 25 bp, Homo sapien
tgggatcgggggagcctccaatatc

SEQ ID NO: 2357998 - DNA, 25 bp, Homo sapien
ctcccagcgtgtggaaagtggcggc

SEQ ID NO: 2357999 - DNA, 25 bp, Homo sapien
tcccagcgtgtggaaagtggcggca

SEQ ID NO: 2358000 - DNA, 25 bp, Homo sapien
aaagtggcggcagttagagccgagg

SEQ ID NO: 2358001 - DNA, 25 bp, Homo sapien
gaaagtggcggcagttagagccgag

SEQ ID NO: 2358002 - DNA, 25 bp, Homo sapien
cacgggtatctctgaggtaacggcc

SEQ ID NO: 2358003 - DNA, 25 bp, Homo sapien
aacatgccggccacgggtatctctg

SEQ ID NO: 2358004 - DNA, 25 bp, Homo sapien
gcgtactcgctaccggggatgatca

SEQ ID NO: 2358005 - DNA, 25 bp, Homo sapien
gggatgatcacgagctgctcctctc

SEQ ID NO: 2358006 - DNA, 25 bp, Homo sapien
cagcgctccctccgccgccgcctac

SEQ ID NO: 2358007 - DNA, 25 bp, Homo sapien
ccgcggccctcactgacacatccat

SEQ ID NO: 2358008 - DNA, 25 bp, Homo sapien
ctgaggtcgtcggagcagcccgcgg

SEQ ID NO: 2358009 - DNA, 25 bp, Homo sapien
cccgcggccctcactgacacatcca

SEQ ID NO: 2358010 - DNA, 25 bp, Homo sapien
tcgtcggagcagcccgcggccctca

SEQ ID NO: 2358011 - DNA, 25 bp, Homo sapien
gagctttgggtctacgtcggcctcc

SEQ ID NO: 2358012 - DNA, 25 bp, Homo sapien
ggagctttgggtctacgtcggcctc

SEQ ID NO: 2358013 - DNA, 25 bp, Homo sapien
ccaggagctttgggtctacgtcggc

SEQ ID NO: 2358014 - DNA, 25 bp, Homo sapien
caggagctttgggtctacgtcggcc

SEQ ID NO: 2358015 - DNA, 25 bp, Homo sapien
tcagaagccataacaagaaaccggg

SEQ ID NO: 2358016 - DNA, 25 bp, Homo sapien
cgaaagtaggtttgcaacaatccca

SEQ ID NO: 2358017 - DNA, 25 bp, Homo sapien
taaggagttgttcgccgagctcacg

SEQ ID NO: 2358018 - DNA, 25 bp, Homo sapien
tcggctcacgccatcaaagaggacg

SEQ ID NO: 2358019 - DNA, 25 bp, Homo sapien
tgtttttccactcctgtaaagtcaa

SEQ ID NO: 2358020 - DNA, 25 bp, Homo sapien
gtcaaagatataactccctgtttcc

SEQ ID NO: 2358021 - DNA, 25 bp, Homo sapien
caaaagctgccacaatgtttttcca

SEQ ID NO: 2358022 - DNA, 25 bp, Homo sapien
tcctgccatggcaactggaatcatt

SEQ ID NO: 2358023 - DNA, 25 bp, Homo sapien
tattaatagtcttaaagggcattca

SEQ ID NO: 2358024 - DNA, 25 bp, Homo sapien
caagagatacaatatgtgcttcagt

SEQ ID NO: 2358025 - DNA, 25 bp, Homo sapien
cacaaaaaggatgctatactaagaa

SEQ ID NO: 2358026 - DNA, 25 bp, Homo sapien
ggcattcaataaaacgttcccataa

SEQ ID NO: 2358027 - DNA, 25 bp, Homo sapien
aaaaggtctagcacaagaggctggt

SEQ ID NO: 2358028 - DNA, 25 bp, Homo sapien
tctgacagtctgcacaaaaggtcta

SEQ ID NO: 2358029 - DNA, 25 bp, Homo sapien
gaacacctggaaaccagcaacagtg

SEQ ID NO: 2358030 - DNA, 25 bp, Homo sapien
ggtaaacacagccagtagtcatcaa

SEQ ID NO: 2358031 - DNA, 25 bp, Homo sapien
ggtcagcggaagaagaaggttcttg

SEQ ID NO: 2358032 - DNA, 25 bp, Homo sapien
ctcttgcctactatcagatgtaggg

SEQ ID NO: 2358033 - DNA, 25 bp, Homo sapien
cggtggagcaatgtgaaggaggaag

SEQ ID NO: 2358034 - DNA, 25 bp, Homo sapien
aagaaggttcttgggatgtggaagg

SEQ ID NO: 2358035 - DNA, 25 bp, Homo sapien
tagtagcttttgaagtctgccctcc

SEQ ID NO: 2358036 - DNA, 25 bp, Homo sapien
ttttagtagcttttgaagtctgccc

SEQ ID NO: 2358037 - DNA, 25 bp, Homo sapien
tagcttttgaagtctgccctcctga

SEQ ID NO: 2358038 - DNA, 25 bp, Homo sapien
gcttttgaagtctgccctcctgata

SEQ ID NO: 2358039 - DNA, 25 bp, Homo sapien
agtcataggacttgggaagatcttc

SEQ ID NO: 2358040 - DNA, 25 bp, Homo sapien
caatgatgataaggtcatagtcata

SEQ ID NO: 2358041 - DNA, 25 bp, Homo sapien
catagtcataggacttgggaagatc

SEQ ID NO: 2358042 - DNA, 25 bp, Homo sapien
taaggtcatagtcataggacttggg

SEQ ID NO: 2358043 - DNA, 25 bp, Homo sapien
ttagcagctgccagacctcctgagc

SEQ ID NO: 2358044 - DNA, 25 bp, Homo sapien
cttagcagctgccagacctcctgag

SEQ ID NO: 2358045 - DNA, 25 bp, Homo sapien
tagcagctgccagacctcctgagcc

SEQ ID NO: 2358046 - DNA, 25 bp, Homo sapien
gcagctgccagacctcctgagccac

SEQ ID NO: 2358047 - DNA, 25 bp, Homo sapien
atcaccttcttgccatattgggctg

SEQ ID NO: 2358048 - DNA, 25 bp, Homo sapien
accttcttgccatattgggctgcct

SEQ ID NO: 2358049 - DNA, 25 bp, Homo sapien
tcaccttcttgccatattgggctgc

SEQ ID NO: 2358050 - DNA, 25 bp, Homo sapien
ggggtgggagtgacaaagtccagga

SEQ ID NO: 2358051 - DNA, 25 bp, Homo sapien
tgcagggcttgtcctaacaaagctg

SEQ ID NO: 2358052 - DNA, 25 bp, Homo sapien
cataatttcgagagtcttgcagggc

SEQ ID NO: 2358053 - DNA, 25 bp, Homo sapien
catcagttttttaggtatgcaaccc

SEQ ID NO: 2358054 - DNA, 25 bp, Homo sapien
cacattcacacatgttcctccgaga

SEQ ID NO: 2358055 - DNA, 25 bp, Homo sapien
tagacgacttttttctcccgcagag

SEQ ID NO: 2358056 - DNA, 25 bp, Homo sapien
cgcagagctactcggtagccccaat

SEQ ID NO: 2358057 - DNA, 25 bp, Homo sapien
tcctgtgaggaccaataaattgccc

SEQ ID NO: 2358058 - DNA, 25 bp, Homo sapien
gccccaattcaaagagccaatgtga

SEQ ID NO: 2358059 - DNA, 25 bp, Homo sapien
tgatgcagtattctttgtcaccagg

SEQ ID NO: 2358060 - DNA, 25 bp, Homo sapien
gctgatgcagtattctttgtcacca

SEQ ID NO: 2358061 - DNA, 25 bp, Homo sapien
cagggatgcccaagtaacgtggtct

SEQ ID NO: 2358062 - DNA, 25 bp, Homo sapien
tttcaccagtggcaatgagaaatct

SEQ ID NO: 2358063 - DNA, 25 bp, Homo sapien
aaacatctccttgcttgacttgttt

SEQ ID NO: 2358064 - DNA, 25 bp, Homo sapien
caaaacatctccttgcttgacttgt

SEQ ID NO: 2358065 - DNA, 25 bp, Homo sapien
gcaaaacatctccttgcttgacttg

SEQ ID NO: 2358066 - DNA, 25 bp, Homo sapien
cagcaaaacatctccttgcttgact

SEQ ID NO: 2358067 - DNA, 25 bp, Homo sapien
ggcagtaaggcaaggagaaaagatc

SEQ ID NO: 2358068 - DNA, 25 bp, Homo sapien
cttacccgggcagtaaggcaaggag

SEQ ID NO: 2358069 - DNA, 25 bp, Homo sapien
gtaaggcaaggagaaaagatcatca

SEQ ID NO: 2358070 - DNA, 25 bp, Homo sapien
cagtaaggcaaggagaaaagatcat

SEQ ID NO: 2358071 - DNA, 25 bp, Homo sapien
taagaagaatggacctaaccataac

SEQ ID NO: 2358072 - DNA, 25 bp, Homo sapien
caataccagcaagaaatccagcgca

SEQ ID NO: 2358073 - DNA, 25 bp, Homo sapien
caaagcgacataggatgctccaaca

SEQ ID NO: 2358074 - DNA, 25 bp, Homo sapien
taacagtgacgtctaaaccaatacc

SEQ ID NO: 2358075 - DNA, 25 bp, Homo sapien
gtgttcaccaattttgttggccatg

SEQ ID NO: 2358076 - DNA, 25 bp, Homo sapien
tgttggccatgtcctggtcaaatcc

SEQ ID NO: 2358077 - DNA, 25 bp, Homo sapien
tttaattggtacgaactgtcttata

SEQ ID NO: 2358078 - DNA, 25 bp, Homo sapien
cgaactgtcttataaacttgatgcc

SEQ ID NO: 2358079 - DNA, 25 bp, Homo sapien
aacgggccaggatgacaatggcggc

SEQ ID NO: 2358080 - DNA, 25 bp, Homo sapien
ggcggctttgtggaatagaaaggcg

SEQ ID NO: 2358081 - DNA, 25 bp, Homo sapien
cgggccaggatgacaatggcggctt

SEQ ID NO: 2358082 - DNA, 25 bp, Homo sapien
ggctttgtggaatagaaaggcggga

SEQ ID NO: 2358083 - DNA, 25 bp, Homo sapien
tctgagtcggcctggtgtccctgct

SEQ ID NO: 2358084 - DNA, 25 bp, Homo sapien
tgagctactactctgagtcggcctg

SEQ ID NO: 2358085 - DNA, 25 bp, Homo sapien
tttcctcactattggtggactgagc

SEQ ID NO: 2358086 - DNA, 25 bp, Homo sapien
ctattggtggactgagctactactc

SEQ ID NO: 2358087 - DNA, 25 bp, Homo sapien
gccaatttttcttgtgcaagcatct

SEQ ID NO: 2358088 - DNA, 25 bp, Homo sapien
gagctccaccttatcctccaatata

SEQ ID NO: 2358089 - DNA, 25 bp, Homo sapien
gcatagatgtaaggcacattggtct

SEQ ID NO: 2358090 - DNA, 25 bp, Homo sapien
tcctgcctggattgcaactggggtg

SEQ ID NO: 2358091 - DNA, 25 bp, Homo sapien
aatatatcgccaatggcatagatgt

SEQ ID NO: 2358092 - DNA, 25 bp, Homo sapien
accacctcaccgatctcattttttg

SEQ ID NO: 2358093 - DNA, 25 bp, Homo sapien
ccacctcaccgatctcattttttgt

SEQ ID NO: 2358094 - DNA, 25 bp, Homo sapien
ttactttaaagtacaactccattca

SEQ ID NO: 2358095 - DNA, 25 bp, Homo sapien
acgcaccacctcaccgatctcattt

SEQ ID NO: 2358096 - DNA, 25 bp, Homo sapien
tcagaaaggccacaagcaccatatt

SEQ ID NO: 2358097 - DNA, 25 bp, Homo sapien
tccaaaggagtaaatacagtggttg

SEQ ID NO: 2358098 - DNA, 25 bp, Homo sapien
gcaccatattccaaaggagtaaata

SEQ ID NO: 2358099 - DNA, 25 bp, Homo sapien
cctcagaaaggccacaagcaccata

SEQ ID NO: 2358100 - DNA, 25 bp, Homo sapien
ggaatcgtccattccaatggccaaa

SEQ ID NO: 2358101 - DNA, 25 bp, Homo sapien
tgttgttatctcttgacggaatcgt

SEQ ID NO: 2358102 - DNA, 25 bp, Homo sapien
tccaatggccaaaagtaactatggt

SEQ ID NO: 2358103 - DNA, 25 bp, Homo sapien
tgacggaatcgtccattccaatggc

SEQ ID NO: 2358104 - DNA, 25 bp, Homo sapien
gctgaggatcaaacgtgcattgctc

SEQ ID NO: 2358105 - DNA, 25 bp, Homo sapien
tctgtgggaggactactaaaaagca

SEQ ID NO: 2358106 - DNA, 25 bp, Homo sapien
gctgagacaactggcacgcgaaata

SEQ ID NO: 2358107 - DNA, 25 bp, Homo sapien
tgactaagtgtagggccctgtgcca

SEQ ID NO: 2358108 - DNA, 25 bp, Homo sapien
gagtcaatattaaagagagtgtgtg

SEQ ID NO: 2358109 - DNA, 25 bp, Homo sapien
tgaggtatagagtttgctcacaggc

SEQ ID NO: 2358110 - DNA, 25 bp, Homo sapien
caggctttcacaggtttctgctaaa

SEQ ID NO: 2358111 - DNA, 25 bp, Homo sapien
gtgttagctaagttaaaaagatcag

SEQ ID NO: 2358112 - DNA, 25 bp, Homo sapien
tttggacccagtacgtgaaagccca

SEQ ID NO: 2358113 - DNA, 25 bp, Homo sapien
ggtcagtccacatttgagcgcagct

SEQ ID NO: 2358114 - DNA, 25 bp, Homo sapien
gattccaattgtgctgtccagctgc

SEQ ID NO: 2358115 - DNA, 25 bp, Homo sapien
gctgcaaagccttgtgtaacttctc

SEQ ID NO: 2358116 - DNA, 25 bp, Homo sapien
caaatctcattcactgataccataa

SEQ ID NO: 2358117 - DNA, 25 bp, Homo sapien
tcaaatctcattcactgataccata

SEQ ID NO: 2358118 - DNA, 25 bp, Homo sapien
aaatctcattcactgataccataag

SEQ ID NO: 2358119 - DNA, 25 bp, Homo sapien
tgccaaatatggtaggacagtctgt

SEQ ID NO: 2358120 - DNA, 25 bp, Homo sapien
gaccaggctgggttaccatgggcaa

SEQ ID NO: 2358121 - DNA, 25 bp, Homo sapien
taagttagtcaacaggcagggacac

SEQ ID NO: 2358122 - DNA, 25 bp, Homo sapien
ttggctgagtgagattacaacccag

SEQ ID NO: 2358123 - DNA, 25 bp, Homo sapien
ctgcttgggtcaattgacagatttc

SEQ ID NO: 2358124 - DNA, 25 bp, Homo sapien
tgacagatttcattcgtacacaact

SEQ ID NO: 2358125 - DNA, 25 bp, Homo sapien
tgcttgggtcaattgacagatttca

SEQ ID NO: 2358126 - DNA, 25 bp, Homo sapien
ttcattcgtacacaactgttttaga

SEQ ID NO: 2358127 - DNA, 25 bp, Homo sapien
tgacaggaaccctatctcaaataaa

SEQ ID NO: 2358128 - DNA, 25 bp, Homo sapien
caggaacatcgcttgagcttgaaag

SEQ ID NO: 2358129 - DNA, 25 bp, Homo sapien
aggaaccctatctcaaataaatgaa

SEQ ID NO: 2358130 - DNA, 25 bp, Homo sapien
aacatcgcttgagcttgaaaggtca

SEQ ID NO: 2358131 - DNA, 25 bp, Homo sapien
atatattagctggaaacagtggcat

SEQ ID NO: 2358132 - DNA, 25 bp, Homo sapien
tatatattagctggaaacagtggca

SEQ ID NO: 2358133 - DNA, 25 bp, Homo sapien
tatatatattagctggaaacagtgg

SEQ ID NO: 2358134 - DNA, 25 bp, Homo sapien
tatatatatattagctggaaacagt

SEQ ID NO: 2358135 - DNA, 25 bp, Homo sapien
tggtcacagacaatgttgtgaatac

SEQ ID NO: 2358136 - DNA, 25 bp, Homo sapien
gagcgcttggtcacagacaatgttg

SEQ ID NO: 2358137 - DNA, 25 bp, Homo sapien
cccagagcgcttggtcacagacaat

SEQ ID NO: 2358138 - DNA, 25 bp, Homo sapien
tgccccagagcgcttggtcacagac

SEQ ID NO: 2358139 - DNA, 25 bp, Homo sapien
taagcacaggacacgcaggtgccaa

SEQ ID NO: 2358140 - DNA, 25 bp, Homo sapien
tgatgtccacaagcacgtgttcaaa

SEQ ID NO: 2358141 - DNA, 25 bp, Homo sapien
tctttcccgggacaagcctacatag

SEQ ID NO: 2358142 - DNA, 25 bp, Homo sapien
gatagaatcctcagccagtacattg

SEQ ID NO: 2358143 - DNA, 25 bp, Homo sapien
tttctttacacagccaaatgagatg

SEQ ID NO: 2358144 - DNA, 25 bp, Homo sapien
atgaggacgtgaggcagagccctgt

SEQ ID NO: 2358145 - DNA, 25 bp, Homo sapien
tgtgggggacggtcaggggctctgc

SEQ ID NO: 2358146 - DNA, 25 bp, Homo sapien
cagccaaatgagatgaggacgtgag

SEQ ID NO: 2358147 - DNA, 25 bp, Homo sapien
gacaagtctataagatataatcctt

SEQ ID NO: 2358148 - DNA, 25 bp, Homo sapien
gatagaacattccactccactaaga

SEQ ID NO: 2358149 - DNA, 25 bp, Homo sapien
gagaatcacaacatgattaggcctg

SEQ ID NO: 2358150 - DNA, 25 bp, Homo sapien
tacagaatctgaacaagacaagtct

SEQ ID NO: 2358151 - DNA, 25 bp, Homo sapien
tctgccatacaatgggtgcatgagg

SEQ ID NO: 2358152 - DNA, 25 bp, Homo sapien
gctgatcttcactgttttccgaagt

SEQ ID NO: 2358153 - DNA, 25 bp, Homo sapien
cgaaatgtttgatatgctgatcttc

SEQ ID NO: 2358154 - DNA, 25 bp, Homo sapien
tactggcactcttaaatctgccata

SEQ ID NO: 2358155 - DNA, 25 bp, Homo sapien
cagttctgctctccgcagtggggga

SEQ ID NO: 2358156 - DNA, 25 bp, Homo sapien
gctgcgaagcccacgggcatctgct

SEQ ID NO: 2358157 - DNA, 25 bp, Homo sapien
gaaggtcttccgtttagatccaggc

SEQ ID NO: 2358158 - DNA, 25 bp, Homo sapien
caagagctgcgaagcccacgggcat

SEQ ID NO: 2358159 - DNA, 25 bp, Homo sapien
ccacagtggatgcagggaatagctc

SEQ ID NO: 2358160 - DNA, 25 bp, Homo sapien
tgcctctagacaagacgcagaccag

SEQ ID NO: 2358161 - DNA, 25 bp, Homo sapien
cctggaacgcatgcctgtagggctg

SEQ ID NO: 2358162 - DNA, 25 bp, Homo sapien
tagctcttcatgactatgtccctgg

SEQ ID NO: 2358163 - DNA, 25 bp, Homo sapien
agaaaaattctgagggacactggct

SEQ ID NO: 2358164 - DNA, 25 bp, Homo sapien
gaaaaattctgagggacactggctt

SEQ ID NO: 2358165 - DNA, 25 bp, Homo sapien
aaaaattctgagggacactggcttt

SEQ ID NO: 2358166 - DNA, 25 bp, Homo sapien
aaaattctgagggacactggctttg

SEQ ID NO: 2358167 - DNA, 25 bp, Homo sapien
accctcttcacccttggtgggagct

SEQ ID NO: 2358168 - DNA, 25 bp, Homo sapien
tctcctgacagaggccgggatgctg

SEQ ID NO: 2358169 - DNA, 25 bp, Homo sapien
ggatgagctgagcacactcactctt

SEQ ID NO: 2358170 - DNA, 25 bp, Homo sapien
taaatcgggtaactctctcctctcc

SEQ ID NO: 2358171 - DNA, 25 bp, Homo sapien
ggaagggatacaggtctgcagggac

SEQ ID NO: 2358172 - DNA, 25 bp, Homo sapien
gggacaatgcgaggcctctttccat

SEQ ID NO: 2358173 - DNA, 25 bp, Homo sapien
gtctgcagggacaatgcgaggcctc

SEQ ID NO: 2358174 - DNA, 25 bp, Homo sapien
gtggccggaagggatacaggtctgc

SEQ ID NO: 2358175 - DNA, 25 bp, Homo sapien
gatactgggcaaaacatggaagcag

SEQ ID NO: 2358176 - DNA, 25 bp, Homo sapien
tcaacagttgtctcaagtaggtact

SEQ ID NO: 2358177 - DNA, 25 bp, Homo sapien
tcagataggctatgctacagtgaca

SEQ ID NO: 2358178 - DNA, 25 bp, Homo sapien
gaccttaaagattgggcagttccat

SEQ ID NO: 2358179 - DNA, 25 bp, Homo sapien
acttcccaaggcctgttgccttctc

SEQ ID NO: 2358180 - DNA, 25 bp, Homo sapien
ctccccacttcccaaggcctgttgc

SEQ ID NO: 2358181 - DNA, 25 bp, Homo sapien
tccccacttcccaaggcctgttgcc

SEQ ID NO: 2358182 - DNA, 25 bp, Homo sapien
cccacttcccaaggcctgttgcctt

SEQ ID NO: 2358183 - DNA, 25 bp, Homo sapien
ctgctaagcatgtcctgaaccaagg

SEQ ID NO: 2358184 - DNA, 25 bp, Homo sapien
tgctaagcatgtcctgaaccaaggt

SEQ ID NO: 2358185 - DNA, 25 bp, Homo sapien
taagcatgtcctgaaccaaggtcat

SEQ ID NO: 2358186 - DNA, 25 bp, Homo sapien
gctaagcatgtcctgaaccaaggtc

SEQ ID NO: 2358187 - DNA, 25 bp, Homo sapien
tgcaaggacatgagaagaaatgtga

SEQ ID NO: 2358188 - DNA, 25 bp, Homo sapien
aaatgagctgcaggtatgcaaggac

SEQ ID NO: 2358189 - DNA, 25 bp, Homo sapien
gcaggtatgcaaggacatgagaaga

SEQ ID NO: 2358190 - DNA, 25 bp, Homo sapien
aggaaatcaaatgagctgcaggtat

SEQ ID NO: 2358191 - DNA, 25 bp, Homo sapien
tctgggtactagaaatgcctgaatc

SEQ ID NO: 2358192 - DNA, 25 bp, Homo sapien
tgccagaagcaaaggtgtaacaact

SEQ ID NO: 2358193 - DNA, 25 bp, Homo sapien
cctggtggcaattgggagagtaaac

SEQ ID NO: 2358194 - DNA, 25 bp, Homo sapien
tgagtcctcacctaatggcttagag

SEQ ID NO: 2358195 - DNA, 25 bp, Homo sapien
aatgctcatcaggtacacagtcttc

SEQ ID NO: 2358196 - DNA, 25 bp, Homo sapien
aatcctttaaatgctcatcaggtac

SEQ ID NO: 2358197 - DNA, 25 bp, Homo sapien
gctcatcaggtacacagtcttcctc

SEQ ID NO: 2358198 - DNA, 25 bp, Homo sapien
ttaaatgctcatcaggtacacagtc

SEQ ID NO: 2358199 - DNA, 25 bp, Homo sapien
cttcaaaggaagctccgacttcact

SEQ ID NO: 2358200 - DNA, 25 bp, Homo sapien
gagcttcccacggagatgctactgc

SEQ ID NO: 2358201 - DNA, 25 bp, Homo sapien
tcaaaggaagctccgacttcactgc

SEQ ID NO: 2358202 - DNA, 25 bp, Homo sapien
ttatcattagtattcctgagcttcc

SEQ ID NO: 2358203 - DNA, 25 bp, Homo sapien
ttcagcatccttgaagggagagagg

SEQ ID NO: 2358204 - DNA, 25 bp, Homo sapien
tcttctgccaacatcagccaggggc

SEQ ID NO: 2358205 - DNA, 25 bp, Homo sapien
tggcgctgccatttgcatctctctg

SEQ ID NO: 2358206 - DNA, 25 bp, Homo sapien
tcctccaaggactggcgctgccatt

SEQ ID NO: 2358207 - DNA, 25 bp, Homo sapien
gctccaacgatctatatattccggg

SEQ ID NO: 2358208 - DNA, 25 bp, Homo sapien
gacgaagaaaatcgcctcggtgctg

SEQ ID NO: 2358209 - DNA, 25 bp, Homo sapien
gatatggtcgcgtccagctgttgcc

SEQ ID NO: 2358210 - DNA, 25 bp, Homo sapien
ttttaccaaatgcaactcgcggccc

SEQ ID NO: 2358211 - DNA, 25 bp, Homo sapien
gctgagatgcgtggacccgctggct

SEQ ID NO: 2358212 - DNA, 25 bp, Homo sapien
tggaaggtgccggagttggtctgga

SEQ ID NO: 2358213 - DNA, 25 bp, Homo sapien
ccggagttggtctggaagtgctgag

SEQ ID NO: 2358214 - DNA, 25 bp, Homo sapien
ctgagatgcgtggacccgctggctg

SEQ ID NO: 2358215 - DNA, 25 bp, Homo sapien
ggctcagagggaggatcggagtcgc

SEQ ID NO: 2358216 - DNA, 25 bp, Homo sapien
cgccgcgcggaccggagcccgggag

SEQ ID NO: 2358217 - DNA, 25 bp, Homo sapien
gctcagagggaggatcggagtcgct

SEQ ID NO: 2358218 - DNA, 25 bp, Homo sapien
ctcagagggaggatcggagtcgctt

SEQ ID NO: 2358219 - DNA, 25 bp, Homo sapien
tccggcagattctgttcatcctcat

SEQ ID NO: 2358220 - DNA, 25 bp, Homo sapien
aagatgaccaggataaaggatccca

SEQ ID NO: 2358221 - DNA, 25 bp, Homo sapien
caagcaagtggccagcaccatccgg

SEQ ID NO: 2358222 - DNA, 25 bp, Homo sapien
tgaccaggataaaggatcccaagca

SEQ ID NO: 2358223 - DNA, 25 bp, Homo sapien
gggatgcaaacggacggtcagccca

SEQ ID NO: 2358224 - DNA, 25 bp, Homo sapien
gacccaggagctcggagtttccagc

SEQ ID NO: 2358225 - DNA, 25 bp, Homo sapien
tccaaaactgcagtggtcaaggcgt

SEQ ID NO: 2358226 - DNA, 25 bp, Homo sapien
agccgcaaggtcactgcggacccgg

SEQ ID NO: 2358227 - DNA, 25 bp, Homo sapien
taacaggtacacagaagctcaagcg

SEQ ID NO: 2358228 - DNA, 25 bp, Homo sapien
cgcattcctgctgaaggctgacact

SEQ ID NO: 2358229 - DNA, 25 bp, Homo sapien
catccgtgttctgggcattcgtaca

SEQ ID NO: 2358230 - DNA, 25 bp, Homo sapien
tagagtctagaccaaatcaccggcc

SEQ ID NO: 2358231 - DNA, 25 bp, Homo sapien
cacatgtaggtatctggaacccctg

SEQ ID NO: 2358232 - DNA, 25 bp, Homo sapien
caatccgtgccatgctgtggtccct

SEQ ID NO: 2358233 - DNA, 25 bp, Homo sapien
gccagaggcctccaaatttttagct

SEQ ID NO: 2358234 - DNA, 25 bp, Homo sapien
taatgggccccagattagaatcaga

SEQ ID NO: 2358235 - DNA, 25 bp, Homo sapien
aatctttcaatacattcaaccgagg

SEQ ID NO: 2358236 - DNA, 25 bp, Homo sapien
caacctgatcaagtgaaagtgcaag

SEQ ID NO: 2358237 - DNA, 25 bp, Homo sapien
tcaaccgaggcaaagaaatcccagg

SEQ ID NO: 2358238 - DNA, 25 bp, Homo sapien
aatgcattttaggttcaacctgatc

SEQ ID NO: 2358239 - DNA, 25 bp, Homo sapien
tagctgggagacattcctggagccc

SEQ ID NO: 2358240 - DNA, 25 bp, Homo sapien
gcctctataagcacaaaattccctc

SEQ ID NO: 2358241 - DNA, 25 bp, Homo sapien
aggagccagacggtgccactacatt

SEQ ID NO: 2358242 - DNA, 25 bp, Homo sapien
tataaactactaccattagctggga

SEQ ID NO: 2358243 - DNA, 25 bp, Homo sapien
gaagtcagggtgtacataaaagaga

SEQ ID NO: 2358244 - DNA, 25 bp, Homo sapien
gggaagtcagggtgtacataaaaga

SEQ ID NO: 2358245 - DNA, 25 bp, Homo sapien
ggaagtcagggtgtacataaaagag

SEQ ID NO: 2358246 - DNA, 25 bp, Homo sapien
ttgctttccttcccaggcaagcacc

SEQ ID NO: 2358247 - DNA, 25 bp, Homo sapien
ctcaaggtagtgactgggccccaac

SEQ ID NO: 2358248 - DNA, 25 bp, Homo sapien
tcaaggtagtgactgggccccaaca

SEQ ID NO: 2358249 - DNA, 25 bp, Homo sapien
caaggtagtgactgggccccaacat

SEQ ID NO: 2358250 - DNA, 25 bp, Homo sapien
gaacacttgctgtaggacaggcacc

SEQ ID NO: 2358251 - DNA, 25 bp, Homo sapien
catgctagggtgcttggtctctgcc

SEQ ID NO: 2358252 - DNA, 25 bp, Homo sapien
tgatcccggccacaccaatgagatt

SEQ ID NO: 2358253 - DNA, 25 bp, Homo sapien
tctcaaactgggcatgtgatcccgg

SEQ ID NO: 2358254 - DNA, 25 bp, Homo sapien
atctaagcaagcagaaccacgttgg

SEQ ID NO: 2358255 - DNA, 25 bp, Homo sapien
gcagaaccacgttggagttctgtga

SEQ ID NO: 2358256 - DNA, 25 bp, Homo sapien
gctcaaaggaccaaaatcttgtctc

SEQ ID NO: 2358257 - DNA, 25 bp, Homo sapien
aaaatcttgtctcatcgatctaagc

SEQ ID NO: 2358258 - DNA, 25 bp, Homo sapien
gaataagtacacgtggagcttgtgg

SEQ ID NO: 2358259 - DNA, 25 bp, Homo sapien
tacacgtggagcttgtggagcagaa

SEQ ID NO: 2358260 - DNA, 25 bp, Homo sapien
gggcgtactgaggaataagtacacg

SEQ ID NO: 2358261 - DNA, 25 bp, Homo sapien
ctgaggaataagtacacgtggagct

SEQ ID NO: 2358262 - DNA, 25 bp, Homo sapien
aacagcagaccttcgcagacagtag

SEQ ID NO: 2358263 - DNA, 25 bp, Homo sapien
gaccctctacttgcagaagctacag

SEQ ID NO: 2358264 - DNA, 25 bp, Homo sapien
cagactgtagagtcaagcaggccca

SEQ ID NO: 2358265 - DNA, 25 bp, Homo sapien
caggtaagaagagccacagtcctcc

SEQ ID NO: 2358266 - DNA, 25 bp, Homo sapien
gctgggtgtcagatggccagttcac

SEQ ID NO: 2358267 - DNA, 25 bp, Homo sapien
acacagacattgaacaaccctgaag

SEQ ID NO: 2358268 - DNA, 25 bp, Homo sapien
ctgcagagaaagtctaaaccgattg

SEQ ID NO: 2358269 - DNA, 25 bp, Homo sapien
caaccctgaagttggagctgggtgt

SEQ ID NO: 2358270 - DNA, 25 bp, Homo sapien
tatacatctgctggagaacacagac

SEQ ID NO: 2358271 - DNA, 25 bp, Homo sapien
ggagaacacagactaatgatcatat

SEQ ID NO: 2358272 - DNA, 25 bp, Homo sapien
cgtgactggtatacatctgctggag

SEQ ID NO: 2358273 - DNA, 25 bp, Homo sapien
aagcaggaagactgcccgtgactgg

SEQ ID NO: 2358274 - DNA, 25 bp, Homo sapien
tctgtcaaactctctcatgcatgca

SEQ ID NO: 2358275 - DNA, 25 bp, Homo sapien
tgcatgggctgtgaagcccaggatt

SEQ ID NO: 2358276 - DNA, 25 bp, Homo sapien
cacatctgtcaaactctctcatgca

SEQ ID NO: 2358277 - DNA, 25 bp, Homo sapien
ggattaagttctggctggtgaaccc

SEQ ID NO: 2358278 - DNA, 25 bp, Homo sapien
catctttcagagtacactggcccag

SEQ ID NO: 2358279 - DNA, 25 bp, Homo sapien
tcatcaggctccaagtagaagctgc

SEQ ID NO: 2358280 - DNA, 25 bp, Homo sapien
tatctcctatacacaccagagggtg

SEQ ID NO: 2358281 - DNA, 25 bp, Homo sapien
cctgcttgaggtagaatctggtctg

SEQ ID NO: 2358282 - DNA, 25 bp, Homo sapien
gcatgacacggtatgtgtccatttt

SEQ ID NO: 2358283 - DNA, 25 bp, Homo sapien
gtgcagttgggtaatacctgagaac

SEQ ID NO: 2358284 - DNA, 25 bp, Homo sapien
taatattggtgcagttgggtaatac

SEQ ID NO: 2358285 - DNA, 25 bp, Homo sapien
aacacttcggcaccaactgcatgac

SEQ ID NO: 2358286 - DNA, 25 bp, Homo sapien
tgtacttcattcaccaacgaaccct

SEQ ID NO: 2358287 - DNA, 25 bp, Homo sapien
agccactggattagaagccacaaaa

SEQ ID NO: 2358288 - DNA, 25 bp, Homo sapien
cacaaaatgtacttcattcaccaac

SEQ ID NO: 2358289 - DNA, 25 bp, Homo sapien
gccactggattagaagccacaaaat

SEQ ID NO: 2358290 - DNA, 25 bp, Homo sapien
atcggcacggcatctcttcagaggg

SEQ ID NO: 2358291 - DNA, 25 bp, Homo sapien
tcctgcctttgcttcgtggtgcagg

SEQ ID NO: 2358292 - DNA, 25 bp, Homo sapien
caggctctgtctctcatcggcacgg

SEQ ID NO: 2358293 - DNA, 25 bp, Homo sapien
cctttgcttcgtggtgcaggctctg

SEQ ID NO: 2358294 - DNA, 25 bp, Homo sapien
ctaatacgcctacgacattgttctg

SEQ ID NO: 2358295 - DNA, 25 bp, Homo sapien
ttctgagaagcgctggaacccatcc

SEQ ID NO: 2358296 - DNA, 25 bp, Homo sapien
gagctaatacgcctacgacattgtt

SEQ ID NO: 2358297 - DNA, 25 bp, Homo sapien
gctggaacccatcctcggcagtcag

SEQ ID NO: 2358298 - DNA, 25 bp, Homo sapien
tctgctatccgaggcatcagtgatg

SEQ ID NO: 2358299 - DNA, 25 bp, Homo sapien
gggcacttcaaggaactccattcag

SEQ ID NO: 2358300 - DNA, 25 bp, Homo sapien
gaggcatgggccttattccaagttt

SEQ ID NO: 2358301 - DNA, 25 bp, Homo sapien
ctccattcaggagtcaggatgtcat

SEQ ID NO: 2358302 - DNA, 25 bp, Homo sapien
ctaaaggcctctggcccattattag

SEQ ID NO: 2358303 - DNA, 25 bp, Homo sapien
acagtgcctaaaggcctctggccca

SEQ ID NO: 2358304 - DNA, 25 bp, Homo sapien
ttcaacagtgcctaaaggcctctgg

SEQ ID NO: 2358305 - DNA, 25 bp, Homo sapien
gtgcctaaaggcctctggcccatta

SEQ ID NO: 2358306 - DNA, 25 bp, Homo sapien
ggtgcctccgtgcatccaaattttc

SEQ ID NO: 2358307 - DNA, 25 bp, Homo sapien
gggaacaaaattaagcctgcagcaa

SEQ ID NO: 2358308 - DNA, 25 bp, Homo sapien
tcttacaagaataccaggcagattg

SEQ ID NO: 2358309 - DNA, 25 bp, Homo sapien
tctaggatcaaggtgtcaagcaggg

SEQ ID NO: 2358310 - DNA, 25 bp, Homo sapien
tgaggctgctcttcacactctggaa

SEQ ID NO: 2358311 - DNA, 25 bp, Homo sapien
tcttcacactctggaattccagatg

SEQ ID NO: 2358312 - DNA, 25 bp, Homo sapien
ctctggaattccagatggcacctcc

SEQ ID NO: 2358313 - DNA, 25 bp, Homo sapien
tggcacctccagttgggttctgtcc

SEQ ID NO: 2358314 - DNA, 25 bp, Homo sapien
ttttaagtctgcactcccactgccc

SEQ ID NO: 2358315 - DNA, 25 bp, Homo sapien
tttaagtctgcactcccactgccct

SEQ ID NO: 2358316 - DNA, 25 bp, Homo sapien
tttttaagtctgcactcccactgcc

SEQ ID NO: 2358317 - DNA, 25 bp, Homo sapien
taagtctgcactcccactgccctgc

SEQ ID NO: 2358318 - DNA, 25 bp, Homo sapien
ctagagaaatgagtagtgccccggg

SEQ ID NO: 2358319 - DNA, 25 bp, Homo sapien
taccacagtaaaccagagctagaga

SEQ ID NO: 2358320 - DNA, 25 bp, Homo sapien
tgagtagtgccccgggggtctgcat

SEQ ID NO: 2358321 - DNA, 25 bp, Homo sapien
gagctagagaaatgagtagtgcccc

SEQ ID NO: 2358322 - DNA, 25 bp, Homo sapien
tctggcacagccaatgatcaggctg

SEQ ID NO: 2358323 - DNA, 25 bp, Homo sapien
atgatcaggctgccaaacaccgctc

SEQ ID NO: 2358324 - DNA, 25 bp, Homo sapien
gtttctggcacagccaatgatcagg

SEQ ID NO: 2358325 - DNA, 25 bp, Homo sapien
cttgagagacaggtttctggcacag

SEQ ID NO: 2358326 - DNA, 25 bp, Homo sapien
ccagaatggcatagaagaagagctg

SEQ ID NO: 2358327 - DNA, 25 bp, Homo sapien
aaagcccagaatggcatagaagaag

SEQ ID NO: 2358328 - DNA, 25 bp, Homo sapien
tcagacagggcaaagcccagaatgg

SEQ ID NO: 2358329 - DNA, 25 bp, Homo sapien
gaatggcatagaagaagagctgctg

SEQ ID NO: 2358330 - DNA, 25 bp, Homo sapien
aggatgaggaaggcaaccatcaaac

SEQ ID NO: 2358331 - DNA, 25 bp, Homo sapien
gaggaaggcaaccatcaaacagaag

SEQ ID NO: 2358332 - DNA, 25 bp, Homo sapien
ggaaggcaaccatcaaacagaagag

SEQ ID NO: 2358333 - DNA, 25 bp, Homo sapien
gatgaggaaggcaaccatcaaacag

SEQ ID NO: 2358334 - DNA, 25 bp, Homo sapien
tatccagtacgatcctcagtgggaa

SEQ ID NO: 2358335 - DNA, 25 bp, Homo sapien
gccaaagcgaccttagatccaaagt

SEQ ID NO: 2358336 - DNA, 25 bp, Homo sapien
tcttgactcagaggcgggaacttct

SEQ ID NO: 2358337 - DNA, 25 bp, Homo sapien
ttcccaggtcgcttttgaggcaaaa

SEQ ID NO: 2358338 - DNA, 25 bp, Homo sapien
acaaaaccaactgtgaaggctttgc

SEQ ID NO: 2358339 - DNA, 25 bp, Homo sapien
aaagccttcaacaaaaccaactgtg

SEQ ID NO: 2358340 - DNA, 25 bp, Homo sapien
ggctttgccgaaacagttctcagaa

SEQ ID NO: 2358341 - DNA, 25 bp, Homo sapien
tcccatcttggcaaaccccactcaa

SEQ ID NO: 2358342 - DNA, 25 bp, Homo sapien
actttgatcagttccgacgccagca

SEQ ID NO: 2358343 - DNA, 25 bp, Homo sapien
caactaggaatgaagctaagacata

SEQ ID NO: 2358344 - DNA, 25 bp, Homo sapien
cacagctgtgcctcctaaattaaac

SEQ ID NO: 2358345 - DNA, 25 bp, Homo sapien
taaattaaacacacgcactctccat

SEQ ID NO: 2358346 - DNA, 25 bp, Homo sapien
caagtggctaagtagcagcagcagt

SEQ ID NO: 2358347 - DNA, 25 bp, Homo sapien
tatgtggcatgtaagatcctgagag

SEQ ID NO: 2358348 - DNA, 25 bp, Homo sapien
tgcacccatgtccattcctttaggc

SEQ ID NO: 2358349 - DNA, 25 bp, Homo sapien
gggcccattggacagataaagaaac

SEQ ID NO: 2358350 - DNA, 25 bp, Homo sapien
aagggagaaaaaccaacctgcatgt

SEQ ID NO: 2358351 - DNA, 25 bp, Homo sapien
caacctgcatgtaatcatattcacc

SEQ ID NO: 2358352 - DNA, 25 bp, Homo sapien
gaaaaaccaacctgcatgtaatcat

SEQ ID NO: 2358353 - DNA, 25 bp, Homo sapien
tgtaatcatattcacccaggctcac

SEQ ID NO: 2358354 - DNA, 25 bp, Homo sapien
gagagtcgaattttccgggcacaga

SEQ ID NO: 2358355 - DNA, 25 bp, Homo sapien
gcagggaaacaagatacgactcacc

SEQ ID NO: 2358356 - DNA, 25 bp, Homo sapien
tcattagcctgtagttcagcctgcc

SEQ ID NO: 2358357 - DNA, 25 bp, Homo sapien
caccaagcaggaactaggccaaaca

SEQ ID NO: 2358358 - DNA, 25 bp, Homo sapien
ggcctgtcctcatgctaattcaaaa

SEQ ID NO: 2358359 - DNA, 25 bp, Homo sapien
ggtttgtcagacctaaatcctgtgc

SEQ ID NO: 2358360 - DNA, 25 bp, Homo sapien
caggcctgtgttgagtactttgcaa

SEQ ID NO: 2358361 - DNA, 25 bp, Homo sapien
tctcttaagaattaggagcagtggc

SEQ ID NO: 2358362 - DNA, 25 bp, Homo sapien
ggtcgtctgccgaaaagacatgcta

SEQ ID NO: 2358363 - DNA, 25 bp, Homo sapien
tcaactcactggtcaacaagaaaaa

SEQ ID NO: 2358364 - DNA, 25 bp, Homo sapien
caatccttgaactgcaaaaaacagc

SEQ ID NO: 2358365 - DNA, 25 bp, Homo sapien
gcattgtttataggcttgacgctct

SEQ ID NO: 2358366 - DNA, 25 bp, Homo sapien
tcaagacagggacagaggcaaatca

SEQ ID NO: 2358367 - DNA, 25 bp, Homo sapien
gatagatactgcaagttgtccccag

SEQ ID NO: 2358368 - DNA, 25 bp, Homo sapien
tcatgaatcagggtctacagcacga

SEQ ID NO: 2358369 - DNA, 25 bp, Homo sapien
tatactgacagagtggcatccggct

SEQ ID NO: 2358370 - DNA, 25 bp, Homo sapien
ttgatgccagcaaccaagataaagc

SEQ ID NO: 2358371 - DNA, 25 bp, Homo sapien
atggccaagtacaaaaccacaaagg

SEQ ID NO: 2358372 - DNA, 25 bp, Homo sapien
cacaaaggaatccatgacgctggga

SEQ ID NO: 2358373 - DNA, 25 bp, Homo sapien
catgacgctgggaacacctgatcat

SEQ ID NO: 2358374 - DNA, 25 bp, Homo sapien
ccctggtggtccttgacatgtaatc

SEQ ID NO: 2358375 - DNA, 25 bp, Homo sapien
gctgaggcaccaatctaagacaaga

SEQ ID NO: 2358376 - DNA, 25 bp, Homo sapien
tagtgtgttggatacctcagggacg

SEQ ID NO: 2358377 - DNA, 25 bp, Homo sapien
tgtggcccaatagctcgaggttcct

SEQ ID NO: 2358378 - DNA, 25 bp, Homo sapien
gaaaaaaagtatacagtgacttcag

SEQ ID NO: 2358379 - DNA, 25 bp, Homo sapien
aggaatctgttagttaccggggcag

SEQ ID NO: 2358380 - DNA, 25 bp, Homo sapien
tgactgtcgtcaggtctcatgatgc

SEQ ID NO: 2358381 - DNA, 25 bp, Homo sapien
acttcagtgactgtcgtcaggtctc

SEQ ID NO: 2358382 - DNA, 25 bp, Homo sapien
cgaaatgattgatcaagtccatggg

SEQ ID NO: 2358383 - DNA, 25 bp, Homo sapien
tccacaagggaaggccgaaatgatt

SEQ ID NO: 2358384 - DNA, 25 bp, Homo sapien
agcccaacatgtggccagctctgca

SEQ ID NO: 2358385 - DNA, 25 bp, Homo sapien
agtccatgggtcacaacacctgatg

SEQ ID NO: 2358386 - DNA, 25 bp, Homo sapien
ggatcccagagtttcagcttccaga

SEQ ID NO: 2358387 - DNA, 25 bp, Homo sapien
gagagaccctagagagttctccagc

SEQ ID NO: 2358388 - DNA, 25 bp, Homo sapien
tgaatgcgtgtgtcgaaatccccaa

SEQ ID NO: 2358389 - DNA, 25 bp, Homo sapien
gagagcctcactaacaaccaactag

SEQ ID NO: 2358390 - DNA, 25 bp, Homo sapien
tatttgcaagagtggtcgaagacct

SEQ ID NO: 2358391 - DNA, 25 bp, Homo sapien
agcatgtaccaaccgcccaagggta

SEQ ID NO: 2358392 - DNA, 25 bp, Homo sapien
tcacagcaagtttgggctcatgccc

SEQ ID NO: 2358393 - DNA, 25 bp, Homo sapien
ccaagggtacacacgtggctggtcc

SEQ ID NO: 2358394 - DNA, 25 bp, Homo sapien
gtgaggaagtgtctcttagccaaac

SEQ ID NO: 2358395 - DNA, 25 bp, Homo sapien
gaagtgtctcttagccaaacagcac

SEQ ID NO: 2358396 - DNA, 25 bp, Homo sapien
taaagtggcccaacgacatcttctt

SEQ ID NO: 2358397 - DNA, 25 bp, Homo sapien
gaataagaaggagttcgctgtccct

SEQ ID NO: 2358398 - DNA, 25 bp, Homo sapien
gcatcgacatcacccaaaagcctgt

SEQ ID NO: 2358399 - DNA, 25 bp, Homo sapien
catacagtgttaggccttctgagta

SEQ ID NO: 2358400 - DNA, 25 bp, Homo sapien
cttctgagtagaggtatggtccctg

SEQ ID NO: 2358401 - DNA, 25 bp, Homo sapien
tagaaaggcagactctcaacccatc

SEQ ID NO: 2358402 - DNA, 25 bp, Homo sapien
aatacaaaaaacagaaaagatccag

SEQ ID NO: 2358403 - DNA, 25 bp, Homo sapien
aaaaacagaaaagatccagaggaag

SEQ ID NO: 2358404 - DNA, 25 bp, Homo sapien
caaaaaacagaaaagatccagagga

SEQ ID NO: 2358405 - DNA, 25 bp, Homo sapien
tacaaaaaacagaaaagatccagag

SEQ ID NO: 2358406 - DNA, 25 bp, Homo sapien
caaagtgcacttcgtatgtgaagcc

SEQ ID NO: 2358407 - DNA, 25 bp, Homo sapien
tgctaggcatcctgctaggctcggc

SEQ ID NO: 2358408 - DNA, 25 bp, Homo sapien
gacagccgagtaaagatctagagga

SEQ ID NO: 2358409 - DNA, 25 bp, Homo sapien
caatggtaactaagacactgcccta

SEQ ID NO: 2358410 - DNA, 25 bp, Homo sapien
ctgagattgtaagagacactggtct

SEQ ID NO: 2358411 - DNA, 25 bp, Homo sapien
tgctgatcaatccaataggtctgct

SEQ ID NO: 2358412 - DNA, 25 bp, Homo sapien
cactggtctcgaagtgaactgtcca

SEQ ID NO: 2358413 - DNA, 25 bp, Homo sapien
agagctatgatgcactcagccacag

SEQ ID NO: 2358414 - DNA, 25 bp, Homo sapien
cagacacgtcaagaccactaactgt

SEQ ID NO: 2358415 - DNA, 25 bp, Homo sapien
ggttttgtaggttgtcagacacgtc

SEQ ID NO: 2358416 - DNA, 25 bp, Homo sapien
caccagagagatcaaaccccaggat

SEQ ID NO: 2358417 - DNA, 25 bp, Homo sapien
tgtagaaatgttgcagaccgtggag

SEQ ID NO: 2358418 - DNA, 25 bp, Homo sapien
tagcaataaagatctaaaactgaca

SEQ ID NO: 2358419 - DNA, 25 bp, Homo sapien
tgaatagcaataaagatctaaaact

SEQ ID NO: 2358420 - DNA, 25 bp, Homo sapien
tgttgaatagcaataaagatctaaa

SEQ ID NO: 2358421 - DNA, 25 bp, Homo sapien
ctatgttgaatagcaataaagatct

SEQ ID NO: 2358422 - DNA, 25 bp, Homo sapien
gaactagtgaactcaaatgattcac

SEQ ID NO: 2358423 - DNA, 25 bp, Homo sapien
gcccggcctctacagtcatttttaa

SEQ ID NO: 2358424 - DNA, 25 bp, Homo sapien
ccacgccggctcatttctttgtatt

SEQ ID NO: 2358425 - DNA, 25 bp, Homo sapien
ccacgcccggcctctacagtcattt

SEQ ID NO: 2358426 - DNA, 25 bp, Homo sapien
tgaacaagtaacaggctcatatata

SEQ ID NO: 2358427 - DNA, 25 bp, Homo sapien
cttgaacaagtaacaggctcatata

SEQ ID NO: 2358428 - DNA, 25 bp, Homo sapien
ttgaacaagtaacaggctcatatat

SEQ ID NO: 2358429 - DNA, 25 bp, Homo sapien
gtgggtggttgaccaaatgcagcct

SEQ ID NO: 2358430 - DNA, 25 bp, Homo sapien
ctaaatggaagtgggtggttgacca

SEQ ID NO: 2358431 - DNA, 25 bp, Homo sapien
tgaagagtccgttgctcttttccaa

SEQ ID NO: 2358432 - DNA, 25 bp, Homo sapien
tcccagctcttgctctccagttcag

SEQ ID NO: 2358433 - DNA, 25 bp, Homo sapien
ttccatctgtgggatacaagctggt

SEQ ID NO: 2358434 - DNA, 25 bp, Homo sapien
catctgtgggatacaagctggttgg

SEQ ID NO: 2358435 - DNA, 25 bp, Homo sapien
ggatacaagctggttgggtgtagtg

SEQ ID NO: 2358436 - DNA, 25 bp, Homo sapien
gggatacaagctggttgggtgtagt

SEQ ID NO: 2358437 - DNA, 25 bp, Homo sapien
tatgtaaatacttgagccgggcagg

SEQ ID NO: 2358438 - DNA, 25 bp, Homo sapien
tgaccttaggtcaaacatcaccggg

SEQ ID NO: 2358439 - DNA, 25 bp, Homo sapien
catgtcacgtgtttcgagcagggcc

SEQ ID NO: 2358440 - DNA, 25 bp, Homo sapien
catgcctaggattgctgggagccac

SEQ ID NO: 2358441 - DNA, 25 bp, Homo sapien
tgcgccccgcctgccatatgcttct

SEQ ID NO: 2358442 - DNA, 25 bp, Homo sapien
tgccaccacgagaccctaagtttca

SEQ ID NO: 2358443 - DNA, 25 bp, Homo sapien
gtctgttgccaccacgagaccctaa

SEQ ID NO: 2358444 - DNA, 25 bp, Homo sapien
ctgttgtctgttgccaccacgagac

SEQ ID NO: 2358445 - DNA, 25 bp, Homo sapien
tctccggacttgctaacaggctggg

SEQ ID NO: 2358446 - DNA, 25 bp, Homo sapien
ccaagtccagatgggtctctgctcc

SEQ ID NO: 2358447 - DNA, 25 bp, Homo sapien
gattcatctgctccacactctgaga

SEQ ID NO: 2358448 - DNA, 25 bp, Homo sapien
taatactcggttgacttcggacact

SEQ ID NO: 2358449 - DNA, 25 bp, Homo sapien
ggagatgctggattgttaattcagg

SEQ ID NO: 2358450 - DNA, 25 bp, Homo sapien
ggaccctgagtaggaacttgcctct

SEQ ID NO: 2358451 - DNA, 25 bp, Homo sapien
ccctgtgacccctctcagtgctgct

SEQ ID NO: 2358452 - DNA, 25 bp, Homo sapien
ggtctgaagacatagaactgaaata

SEQ ID NO: 2358453 - DNA, 25 bp, Homo sapien
tctcccacgatacataaatgaagct

SEQ ID NO: 2358454 - DNA, 25 bp, Homo sapien
taaaattaaactcaagccgctcgtg

SEQ ID NO: 2358455 - DNA, 25 bp, Homo sapien
tatgatttcttggacccaggaacag

SEQ ID NO: 2358456 - DNA, 25 bp, Homo sapien
tttcaagtggacactccattcccag

SEQ ID NO: 2358457 - DNA, 25 bp, Homo sapien
ccagacgactcaggaggggcccagt

SEQ ID NO: 2358458 - DNA, 25 bp, Homo sapien
agaaggagccagacgactcaggagg

SEQ ID NO: 2358459 - DNA, 25 bp, Homo sapien
ggccagcactttatctctccccaag

SEQ ID NO: 2358460 - DNA, 25 bp, Homo sapien
gagccagacgactcaggaggggccc

SEQ ID NO: 2358461 - DNA, 25 bp, Homo sapien
gaaagtgaaggctcatcagaaatga

SEQ ID NO: 2358462 - DNA, 25 bp, Homo sapien
cggcagcagatgtccacaccaaagg

SEQ ID NO: 2358463 - DNA, 25 bp, Homo sapien
gcagatgtccacaccaaagggattc

SEQ ID NO: 2358464 - DNA, 25 bp, Homo sapien
gcttcgggaccccttccggcagcag

SEQ ID NO: 2358465 - DNA, 25 bp, Homo sapien
tgtccacaccaaagggattcctccg

SEQ ID NO: 2358466 - DNA, 25 bp, Homo sapien
gaatgcttagcactaaacctaggca

SEQ ID NO: 2358467 - DNA, 25 bp, Homo sapien
tgacggagaaagcaaccactgaagg

SEQ ID NO: 2358468 - DNA, 25 bp, Homo sapien
aaccctgggcaggtctgaatgctta

SEQ ID NO: 2358469 - DNA, 25 bp, Homo sapien
gatgctacatagaaaaagggtgacg

SEQ ID NO: 2358470 - DNA, 25 bp, Homo sapien
cagcttggctggtagggaaatacaa

SEQ ID NO: 2358471 - DNA, 25 bp, Homo sapien
tacaagaaactgcaactgagcccaa

SEQ ID NO: 2358472 - DNA, 25 bp, Homo sapien
gataacatcattccgggctcagcag

SEQ ID NO: 2358473 - DNA, 25 bp, Homo sapien
tgagcccaatcaggtgcaaagtttg

SEQ ID NO: 2358474 - DNA, 25 bp, Homo sapien
cagcctccggagaagctgggactgt

SEQ ID NO: 2358475 - DNA, 25 bp, Homo sapien
cccgccaccacgcccatagaatttt

SEQ ID NO: 2358476 - DNA, 25 bp, Homo sapien
ccgccaccacgcccatagaattttt

SEQ ID NO: 2358477 - DNA, 25 bp, Homo sapien
cctccggagaagctgggactgtagg

SEQ ID NO: 2358478 - DNA, 25 bp, Homo sapien
tataggcatcgaacccacaaacctc

SEQ ID NO: 2358479 - DNA, 25 bp, Homo sapien
gctactggctggatgtctagcacta

SEQ ID NO: 2358480 - DNA, 25 bp, Homo sapien
ccaaatggagtagatgagggacaat

SEQ ID NO: 2358481 - DNA, 25 bp, Homo sapien
ttggcatctcggattggcccacatg

SEQ ID NO: 2358482 - DNA, 25 bp, Homo sapien
ctaggggagtgaagccctggtcacc

SEQ ID NO: 2358483 - DNA, 25 bp, Homo sapien
gggagtgaagccctggtcacctccc

SEQ ID NO: 2358484 - DNA, 25 bp, Homo sapien
aggggagtgaagccctggtcacctc

SEQ ID NO: 2358485 - DNA, 25 bp, Homo sapien
ggagtgaagccctggtcacctcccc

SEQ ID NO: 2358486 - DNA, 25 bp, Homo sapien
aggaaaccgtccaccctgatggcca

SEQ ID NO: 2358487 - DNA, 25 bp, Homo sapien
cagcatgaatcggagacttgggaca

SEQ ID NO: 2358488 - DNA, 25 bp, Homo sapien
cttgggacaaaagcgccatactctt

SEQ ID NO: 2358489 - DNA, 25 bp, Homo sapien
ggaaacatcgggcatcagcatgaat

SEQ ID NO: 2358490 - DNA, 25 bp, Homo sapien
gacaccccaattagagcacaaactt

SEQ ID NO: 2358491 - DNA, 25 bp, Homo sapien
gctttcctagcagatttcaagtcta

SEQ ID NO: 2358492 - DNA, 25 bp, Homo sapien
gatagatagtgaaagtgatgaccac

SEQ ID NO: 2358493 - DNA, 25 bp, Homo sapien
tcagtttactggcttgacaccccaa

SEQ ID NO: 2358494 - DNA, 25 bp, Homo sapien
tgaacccctgcactaaaagatggtg

SEQ ID NO: 2358495 - DNA, 25 bp, Homo sapien
cattgtccaagtgatcttagcctcc

SEQ ID NO: 2358496 - DNA, 25 bp, Homo sapien
tccggcagacgatggagttccattg

SEQ ID NO: 2358497 - DNA, 25 bp, Homo sapien
aacagccttcacttggtgccagaca

SEQ ID NO: 2358498 - DNA, 25 bp, Homo sapien
tatagaatgacaaagcttccgggct

SEQ ID NO: 2358499 - DNA, 25 bp, Homo sapien
tcagacctaggatgaaggctcaccg

SEQ ID NO: 2358500 - DNA, 25 bp, Homo sapien
gagatcttcaagtggccccatcaga

SEQ ID NO: 2358501 - DNA, 25 bp, Homo sapien
catctgcaaaaaccatgggcttagc

SEQ ID NO: 2358502 - DNA, 25 bp, Homo sapien
gagattctgaactgagattaactgt

SEQ ID NO: 2358503 - DNA, 25 bp, Homo sapien
aaacctatggagagccgaggctgag

SEQ ID NO: 2358504 - DNA, 25 bp, Homo sapien
aggaaaacctatggagagccgaggc

SEQ ID NO: 2358505 - DNA, 25 bp, Homo sapien
tatggagagccgaggctgagattct

SEQ ID NO: 2358506 - DNA, 25 bp, Homo sapien
tgcttctgaactcccctagtatctg

SEQ ID NO: 2358507 - DNA, 25 bp, Homo sapien
tttcccccatgaccgtgaataattg

SEQ ID NO: 2358508 - DNA, 25 bp, Homo sapien
gaataattggatgtcagctgcttct

SEQ ID NO: 2358509 - DNA, 25 bp, Homo sapien
tgaactcccctagtatctgccagtt

SEQ ID NO: 2358510 - DNA, 25 bp, Homo sapien
aggctatggatgagcataaggtttg

SEQ ID NO: 2358511 - DNA, 25 bp, Homo sapien
tggatgagcataaggtttggagatt

SEQ ID NO: 2358512 - DNA, 25 bp, Homo sapien
agcccatttcttggtactgttaaag

SEQ ID NO: 2358513 - DNA, 25 bp, Homo sapien
cataaggtttggagattatctgtgg

SEQ ID NO: 2358514 - DNA, 25 bp, Homo sapien
aataagctcattttgccacttgctc

SEQ ID NO: 2358515 - DNA, 25 bp, Homo sapien
tatttcaagattatctaggcctgaa

SEQ ID NO: 2358516 - DNA, 25 bp, Homo sapien
aaaatgacgctttactctgggtaag

SEQ ID NO: 2358517 - DNA, 25 bp, Homo sapien
caatgttctatgctagtctctgaca

SEQ ID NO: 2358518 - DNA, 25 bp, Homo sapien
tatcacttcttcctccctggtttag

SEQ ID NO: 2358519 - DNA, 25 bp, Homo sapien
tttagttacaccattaatatcctgg

SEQ ID NO: 2358520 - DNA, 25 bp, Homo sapien
cctggtttagttacaccattaatat

SEQ ID NO: 2358521 - DNA, 25 bp, Homo sapien
atcacttcttcctccctggtttagt

SEQ ID NO: 2358522 - DNA, 25 bp, Homo sapien
tctaggctcgacgttcaggtttagc

SEQ ID NO: 2358523 - DNA, 25 bp, Homo sapien
gagcactttagactgcttcagcagg

SEQ ID NO: 2358524 - DNA, 25 bp, Homo sapien
tggacaatcatgaactgaacactgg

SEQ ID NO: 2358525 - DNA, 25 bp, Homo sapien
taattgacccttggctattgctctg

SEQ ID NO: 2358526 - DNA, 25 bp, Homo sapien
ccaaatcaggcacggtactttacag

SEQ ID NO: 2358527 - DNA, 25 bp, Homo sapien
gacctcgaccgtacatcagcaataa

SEQ ID NO: 2358528 - DNA, 25 bp, Homo sapien
catttttagaggctaagggcctgac

SEQ ID NO: 2358529 - DNA, 25 bp, Homo sapien
tgaactcaagacctctggctctcgg

SEQ ID NO: 2358530 - DNA, 25 bp, Homo sapien
gccccaatcctgtaaagtattatag

SEQ ID NO: 2358531 - DNA, 25 bp, Homo sapien
taagagggaatgttggtcagaatga

SEQ ID NO: 2358532 - DNA, 25 bp, Homo sapien
ggttcggtgaatgctgcttttaagg

SEQ ID NO: 2358533 - DNA, 25 bp, Homo sapien
catgatttcatgtgctctgccccaa

SEQ ID NO: 2358534 - DNA, 25 bp, Homo sapien
cgtgcacccacgtagatccaatttg

SEQ ID NO: 2358535 - DNA, 25 bp, Homo sapien
gaagaaagccttcccttaaggcaga

SEQ ID NO: 2358536 - DNA, 25 bp, Homo sapien
caaagctttccagagagatgaggcc

SEQ ID NO: 2358537 - DNA, 25 bp, Homo sapien
taaactgaaccaactgagatcctgt

SEQ ID NO: 2358538 - DNA, 25 bp, Homo sapien
acgagtgggcgcctcctgcagagca

SEQ ID NO: 2358539 - DNA, 25 bp, Homo sapien
acatttcccagcttagaagaggctc

SEQ ID NO: 2358540 - DNA, 25 bp, Homo sapien
aacgtcagcgatagcttcagtgtac

SEQ ID NO: 2358541 - DNA, 25 bp, Homo sapien
tagaagaggctccttaacgtcagcg

SEQ ID NO: 2358542 - DNA, 25 bp, Homo sapien
gaaggccaggcaacatttgcgatag

SEQ ID NO: 2358543 - DNA, 25 bp, Homo sapien
cctttggagcttggtcatcacctag

SEQ ID NO: 2358544 - DNA, 25 bp, Homo sapien
tctgcacttgcctggtcctgagggt

SEQ ID NO: 2358545 - DNA, 25 bp, Homo sapien
tcctgaaaatgtggagagtctcact

SEQ ID NO: 2358546 - DNA, 25 bp, Homo sapien
ccggcaattacatcttcttaagggt

SEQ ID NO: 2358547 - DNA, 25 bp, Homo sapien
ctgcttgtaagacaaccggcaatta

SEQ ID NO: 2358548 - DNA, 25 bp, Homo sapien
taagacaaccggcaattacatcttc

SEQ ID NO: 2358549 - DNA, 25 bp, Homo sapien
gacaaccggcaattacatcttctta

SEQ ID NO: 2358550 - DNA, 25 bp, Homo sapien
tgctcttgcggctgtttggctcctg

SEQ ID NO: 2358551 - DNA, 25 bp, Homo sapien
tccagcggaactggatctgccaggt

SEQ ID NO: 2358552 - DNA, 25 bp, Homo sapien
tctgccaggtgctcttgcggctgtt

SEQ ID NO: 2358553 - DNA, 25 bp, Homo sapien
aatgttggaaaacggcgaagccatc

SEQ ID NO: 2358554 - DNA, 25 bp, Homo sapien
cactgatgaactcttccttcattaa

SEQ ID NO: 2358555 - DNA, 25 bp, Homo sapien
gggaattagtaacactcagttgatg

SEQ ID NO: 2358556 - DNA, 25 bp, Homo sapien
gcttctttggatgagaccagcactg

SEQ ID NO: 2358557 - DNA, 25 bp, Homo sapien
tagtaacactcagttgatgtcagag

SEQ ID NO: 2358558 - DNA, 25 bp, Homo sapien
gataaactcctagaagtgccagatc

SEQ ID NO: 2358559 - DNA, 25 bp, Homo sapien
caaaactatcttcggatgttgccaa

SEQ ID NO: 2358560 - DNA, 25 bp, Homo sapien
tcaacccactagaggacagtagcag

SEQ ID NO: 2358561 - DNA, 25 bp, Homo sapien
ccccagctctgacaatcaaaactat

SEQ ID NO: 2358562 - DNA, 25 bp, Homo sapien
cacacacagaatgagtggctggtct

SEQ ID NO: 2358563 - DNA, 25 bp, Homo sapien
catggtacccagcacagaataagca

SEQ ID NO: 2358564 - DNA, 25 bp, Homo sapien
caaagatgtctaccttgcatgctgc

SEQ ID NO: 2358565 - DNA, 25 bp, Homo sapien
aagccagttggcttccatcaggaaa

SEQ ID NO: 2358566 - DNA, 25 bp, Homo sapien
gccacgtggaaaagtacgaacttga

SEQ ID NO: 2358567 - DNA, 25 bp, Homo sapien
tagattgacctatgtgaccaacaga

SEQ ID NO: 2358568 - DNA, 25 bp, Homo sapien
tgtgagggcaccaccttgaaagctc

SEQ ID NO: 2358569 - DNA, 25 bp, Homo sapien
caattattgcagaaagaggatacac

SEQ ID NO: 2358570 - DNA, 25 bp, Homo sapien
tgcttaaagggaatggtccaaatgg

SEQ ID NO: 2358571 - DNA, 25 bp, Homo sapien
cttgctaacctaccgaaccacgatg

SEQ ID NO: 2358572 - DNA, 25 bp, Homo sapien
cacgatgaccatcccttcaggagat

SEQ ID NO: 2358573 - DNA, 25 bp, Homo sapien
aactctggttggactaagtgaattc

SEQ ID NO: 2358574 - DNA, 25 bp, Homo sapien
gcccaggcttagcatgtcattttaa

SEQ ID NO: 2358575 - DNA, 25 bp, Homo sapien
aagattctgtctatgccctttctaa

SEQ ID NO: 2358576 - DNA, 25 bp, Homo sapien
aagccctatgcaaccactaatctag

SEQ ID NO: 2358577 - DNA, 25 bp, Homo sapien
aatcatcgctgtaacctaattttag

SEQ ID NO: 2358578 - DNA, 25 bp, Homo sapien
tggaaatggagctcaactaggctga

SEQ ID NO: 2358579 - DNA, 25 bp, Homo sapien
catgtctcagcaagggaataggcag

SEQ ID NO: 2358580 - DNA, 25 bp, Homo sapien
cagtagtcctacaggcaagtgttca

SEQ ID NO: 2358581 - DNA, 25 bp, Homo sapien
gagtatttgaatccctggtcgccaa

SEQ ID NO: 2358582 - DNA, 25 bp, Homo sapien
tcttgaaggtggtaggcagtcaaac

SEQ ID NO: 2358583 - DNA, 25 bp, Homo sapien
ttagctatttttgccggtcacgcca

SEQ ID NO: 2358584 - DNA, 25 bp, Homo sapien
gaaaacatcactcggcaaattgcaa

SEQ ID NO: 2358585 - DNA, 25 bp, Homo sapien
cctgtgagaatcttatgaggccact

SEQ ID NO: 2358586 - DNA, 25 bp, Homo sapien
tgattcccacgtcaaagctcaggac

SEQ ID NO: 2358587 - DNA, 25 bp, Homo sapien
caagccagttgggaaggcaacacca

SEQ ID NO: 2358588 - DNA, 25 bp, Homo sapien
caaatttagtctcagggcaagccag

SEQ ID NO: 2358589 - DNA, 25 bp, Homo sapien
tgtgaaaggccacacgtgttcctgc

SEQ ID NO: 2358590 - DNA, 25 bp, Homo sapien
tggcgagttaacatacctaggaggc

SEQ ID NO: 2358591 - DNA, 25 bp, Homo sapien
tcaggatggtgagtaaaaagtgttt

SEQ ID NO: 2358592 - DNA, 25 bp, Homo sapien
taccctcagaacgactgctcagcaa

SEQ ID NO: 2358593 - DNA, 25 bp, Homo sapien
taatgttgcattgtgtaccctcaga

SEQ ID NO: 2358594 - DNA, 25 bp, Homo sapien
tcagtcaccacacgtgagctaccat

SEQ ID NO: 2358595 - DNA, 25 bp, Homo sapien
agtcaccacacgtgagctaccatac

SEQ ID NO: 2358596 - DNA, 25 bp, Homo sapien
gctcagtcaccacacgtgagctacc

SEQ ID NO: 2358597 - DNA, 25 bp, Homo sapien
cagtcaccacacgtgagctaccata

SEQ ID NO: 2358598 - DNA, 25 bp, Homo sapien
taccttccggacttgctatatatta

SEQ ID NO: 2358599 - DNA, 25 bp, Homo sapien
gcttatctgtttattacccggctcc

SEQ ID NO: 2358600 - DNA, 25 bp, Homo sapien
ccccatctagagtgtgagcaccaca

SEQ ID NO: 2358601 - DNA, 25 bp, Homo sapien
tttcccatctaaggcacagttggtg

SEQ ID NO: 2358602 - DNA, 25 bp, Homo sapien
gatgctcgatccaaaagaggtcctg

SEQ ID NO: 2358603 - DNA, 25 bp, Homo sapien
tcctggactaaaagcagactctacg

SEQ ID NO: 2358604 - DNA, 25 bp, Homo sapien
cacagttgctctagggaagaagaaa

SEQ ID NO: 2358605 - DNA, 25 bp, Homo sapien
gctaatagctggtgaactactctca

SEQ ID NO: 2358606 - DNA, 25 bp, Homo sapien
gcaggtaaggctttgcactccactt

SEQ ID NO: 2358607 - DNA, 25 bp, Homo sapien
gcctcagtgatagggacttgaacaa

SEQ ID NO: 2358608 - DNA, 25 bp, Homo sapien
cactatggtgggaaaaacaagctca

SEQ ID NO: 2358609 - DNA, 25 bp, Homo sapien
catggtcctctactagcaggtaagg

SEQ ID NO: 2358610 - DNA, 25 bp, Homo sapien
caagtcaagggttcgcatccaggtc

SEQ ID NO: 2358611 - DNA, 25 bp, Homo sapien
catccaggtcacgagtgggctcttc

SEQ ID NO: 2358612 - DNA, 25 bp, Homo sapien
aacattaggtcttgagttctagccc

SEQ ID NO: 2358613 - DNA, 25 bp, Homo sapien
tcgggtctggatcggaacattaggt

SEQ ID NO: 2358614 - DNA, 25 bp, Homo sapien
ccatagctttggatctaaaggcgga

SEQ ID NO: 2358615 - DNA, 25 bp, Homo sapien
taaaggcggaaaagtgcctggacac

SEQ ID NO: 2358616 - DNA, 25 bp, Homo sapien
gattgttacgtagaagcagctggga

SEQ ID NO: 2358617 - DNA, 25 bp, Homo sapien
agtggtgcctgtaactgtcccctgg

SEQ ID NO: 2358618 - DNA, 25 bp, Homo sapien
caccagagacttaagggctcagaga

SEQ ID NO: 2358619 - DNA, 25 bp, Homo sapien
taggaaggacagtagtcacacccca

SEQ ID NO: 2358620 - DNA, 25 bp, Homo sapien
ttaaaggctctatgctgaaggcacc

SEQ ID NO: 2358621 - DNA, 25 bp, Homo sapien
ccagggacgctgtacaataggaagg

SEQ ID NO: 2358622 - DNA, 25 bp, Homo sapien
aacaggaagaccatcgtggagtgct

SEQ ID NO: 2358623 - DNA, 25 bp, Homo sapien
ggcccattctcaatcatagtgaaag

SEQ ID NO: 2358624 - DNA, 25 bp, Homo sapien
tagagggacaagcacgtctaaatcc

SEQ ID NO: 2358625 - DNA, 25 bp, Homo sapien
ctctttcaagaaggacggcccattc

SEQ ID NO: 2358626 - DNA, 25 bp, Homo sapien
gaataggaaaactctgacctttgca

SEQ ID NO: 2358627 - DNA, 25 bp, Homo sapien
catgacttcttagccgatgtattca

SEQ ID NO: 2358628 - DNA, 25 bp, Homo sapien
caggatttggacaaggtatggcaca

SEQ ID NO: 2358629 - DNA, 25 bp, Homo sapien
tctgaaaaagaacgcctggatagga

SEQ ID NO: 2358630 - DNA, 25 bp, Homo sapien
ccttgttcactaccttgaggagatt

SEQ ID NO: 2358631 - DNA, 25 bp, Homo sapien
aacacatgaatgagaacgtggaaaa

SEQ ID NO: 2358632 - DNA, 25 bp, Homo sapien
aaaacgatttgtggagcactccttg

SEQ ID NO: 2358633 - DNA, 25 bp, Homo sapien
gaacgtggaaaacgatttgtggagc

SEQ ID NO: 2358634 - DNA, 25 bp, Homo sapien
tccttagtgcctgggtattgttttg

SEQ ID NO: 2358635 - DNA, 25 bp, Homo sapien
aactggtggccatgtattcttttct

SEQ ID NO: 2358636 - DNA, 25 bp, Homo sapien
tcttccagggtagccaactggtggc

SEQ ID NO: 2358637 - DNA, 25 bp, Homo sapien
ctgagattttgccacaaaggctcaa

SEQ ID NO: 2358638 - DNA, 25 bp, Homo sapien
cctgagaatgcagctgtatccgtga

SEQ ID NO: 2358639 - DNA, 25 bp, Homo sapien
gagaatgcagctgtatccgtgaaat

SEQ ID NO: 2358640 - DNA, 25 bp, Homo sapien
tgagaatgcagctgtatccgtgaaa

SEQ ID NO: 2358641 - DNA, 25 bp, Homo sapien
agaatgcagctgtatccgtgaaatc

SEQ ID NO: 2358642 - DNA, 25 bp, Homo sapien
tacagctgcgtttggtgctctgagc

SEQ ID NO: 2358643 - DNA, 25 bp, Homo sapien
tgccagctgcaggacgtaattagaa

SEQ ID NO: 2358644 - DNA, 25 bp, Homo sapien
cagtgttcgttgaaaggctcctccc

SEQ ID NO: 2358645 - DNA, 25 bp, Homo sapien
tcttggtgccgtaccgcttgtggaa

SEQ ID NO: 2358646 - DNA, 25 bp, Homo sapien
gcaaagtatactcggtggaacccta

SEQ ID NO: 2358647 - DNA, 25 bp, Homo sapien
tgttcaacgctctatcttcagggcc

SEQ ID NO: 2358648 - DNA, 25 bp, Homo sapien
aatttccccggtgagatgttgcagc

SEQ ID NO: 2358649 - DNA, 25 bp, Homo sapien
tataaagtggcctgctccgaatgtg

SEQ ID NO: 2358650 - DNA, 25 bp, Homo sapien
ggatagaattgtagtccgtggcagt

SEQ ID NO: 2358651 - DNA, 25 bp, Homo sapien
attgtagtccgtggcagtatccagg

SEQ ID NO: 2358652 - DNA, 25 bp, Homo sapien
tagaattgtagtccgtggcagtatc

SEQ ID NO: 2358653 - DNA, 25 bp, Homo sapien
gtccacaccacccaagacttcctcc

SEQ ID NO: 2358654 - DNA, 25 bp, Homo sapien
tgagcatccttttgagcctgaggag

SEQ ID NO: 2358655 - DNA, 25 bp, Homo sapien
ggcttgcacaactgaccaaagacgg

SEQ ID NO: 2358656 - DNA, 25 bp, Homo sapien
gagatgggacgcctgcctgtacttt

SEQ ID NO: 2358657 - DNA, 25 bp, Homo sapien
gaatgtccttgcaaatactgccctg

SEQ ID NO: 2358658 - DNA, 25 bp, Homo sapien
ctgagataccacaggtcagcagacc

SEQ ID NO: 2358659 - DNA, 25 bp, Homo sapien
gaacgtcccctctgagataccacag

SEQ ID NO: 2358660 - DNA, 25 bp, Homo sapien
aggaggaggaacgtcccctctgaga

SEQ ID NO: 2358661 - DNA, 25 bp, Homo sapien
ccctctgagataccacaggtcagca

SEQ ID NO: 2358662 - DNA, 25 bp, Homo sapien
tgaataggcaggagggtgcagccca

SEQ ID NO: 2358663 - DNA, 25 bp, Homo sapien
ctgaataggcaggagggtgcagccc

SEQ ID NO: 2358664 - DNA, 25 bp, Homo sapien
gaataggcaggagggtgcagcccac

SEQ ID NO: 2358665 - DNA, 25 bp, Homo sapien
cagccaagcatttgtgggacccgca

SEQ ID NO: 2358666 - DNA, 25 bp, Homo sapien
tagtagcctggattaatcgacccct

SEQ ID NO: 2358667 - DNA, 25 bp, Homo sapien
ctttgccaccaggagaaccagtgca

SEQ ID NO: 2358668 - DNA, 25 bp, Homo sapien
gggacccgcacactttgctctggag

SEQ ID NO: 2358669 - DNA, 25 bp, Homo sapien
gattgcacagaatggcgcagctgag

SEQ ID NO: 2358670 - DNA, 25 bp, Homo sapien
taagaaagtagtatgggcagctcct

SEQ ID NO: 2358671 - DNA, 25 bp, Homo sapien
tatcagccaagggttaagcggattc

SEQ ID NO: 2358672 - DNA, 25 bp, Homo sapien
cagtacagcaagatacagggagcgt

SEQ ID NO: 2358673 - DNA, 25 bp, Homo sapien
acaggctcctcaggttctgcagctt

SEQ ID NO: 2358674 - DNA, 25 bp, Homo sapien
gacctggcccaggcaatgttctggg

SEQ ID NO: 2358675 - DNA, 25 bp, Homo sapien
cctgacctggcccaggcaatgttct

SEQ ID NO: 2358676 - DNA, 25 bp, Homo sapien
cctggcccaggcaatgttctgggcc

SEQ ID NO: 2358677 - DNA, 25 bp, Homo sapien
gacttgtgtctctggtgaataagaa

SEQ ID NO: 2358678 - DNA, 25 bp, Homo sapien
atttggatcctgctgccgctgatgg

SEQ ID NO: 2358679 - DNA, 25 bp, Homo sapien
gaatagtacaacagaagatcatcct

SEQ ID NO: 2358680 - DNA, 25 bp, Homo sapien
tgttctccaaagcacgcaaatgtct

SEQ ID NO: 2358681 - DNA, 25 bp, Homo sapien
gaaattcgcccattgtacctgctga

SEQ ID NO: 2358682 - DNA, 25 bp, Homo sapien
tgcaatttctatcaacgtctgctct

SEQ ID NO: 2358683 - DNA, 25 bp, Homo sapien
tcactcataggggtaagggaagcag

SEQ ID NO: 2358684 - DNA, 25 bp, Homo sapien
tctgctctttgtctgaaattcgccc

SEQ ID NO: 2358685 - DNA, 25 bp, Homo sapien
tggccacggagaatccacaggtcgt

SEQ ID NO: 2358686 - DNA, 25 bp, Homo sapien
gatggcgtcaacagaaactgcgagg

SEQ ID NO: 2358687 - DNA, 25 bp, Homo sapien
cacgtcgtcgtgagctatttctgca

SEQ ID NO: 2358688 - DNA, 25 bp, Homo sapien
tatttctgcaggagcgagtggtagt

SEQ ID NO: 2358689 - DNA, 25 bp, Homo sapien
gctaacataggcttctgacttctgg

SEQ ID NO: 2358690 - DNA, 25 bp, Homo sapien
cagcaggtggttctgactccaggga

SEQ ID NO: 2358691 - DNA, 25 bp, Homo sapien
gatcacacaccaaattccgcgggtt

SEQ ID NO: 2358692 - DNA, 25 bp, Homo sapien
tcttgcacaagaagagactcctgcc

SEQ ID NO: 2358693 - DNA, 25 bp, Homo sapien
tgtgaagtccctaacatccaggttt

SEQ ID NO: 2358694 - DNA, 25 bp, Homo sapien
tatcctgatggtgagtattgccagc

SEQ ID NO: 2358695 - DNA, 25 bp, Homo sapien
gtttatgaccctccaaatgtaccaa

SEQ ID NO: 2358696 - DNA, 25 bp, Homo sapien
ggttgtacagctgcaaaatgaccaa

SEQ ID NO: 2358697 - DNA, 25 bp, Homo sapien
tggtgggttacctcaattattgttc

SEQ ID NO: 2358698 - DNA, 25 bp, Homo sapien
tgctcttttaaagaagcccgttgac

SEQ ID NO: 2358699 - DNA, 25 bp, Homo sapien
aaattcaatctctcaagaccgttag

SEQ ID NO: 2358700 - DNA, 25 bp, Homo sapien
caggcttatttctacgtgggaccca

SEQ ID NO: 2358701 - DNA, 25 bp, Homo sapien
aaaaggagcattgacagtatcttca

SEQ ID NO: 2358702 - DNA, 25 bp, Homo sapien
caaaaggagcattgacagtatcttc

SEQ ID NO: 2358703 - DNA, 25 bp, Homo sapien
aaaggagcattgacagtatcttcat

SEQ ID NO: 2358704 - DNA, 25 bp, Homo sapien
gctagtcccttgacagcataataaa

SEQ ID NO: 2358705 - DNA, 25 bp, Homo sapien
ttcaaaggctagtcccttgacagca

SEQ ID NO: 2358706 - DNA, 25 bp, Homo sapien
attcttcaaaggctagtcccttgac

SEQ ID NO: 2358707 - DNA, 25 bp, Homo sapien
cgccctacggtattcttcaaaggct

SEQ ID NO: 2358708 - DNA, 25 bp, Homo sapien
gtttagcagtggatagtcatatacc

SEQ ID NO: 2358709 - DNA, 25 bp, Homo sapien
agtttagcagtggatagtcatatac

SEQ ID NO: 2358710 - DNA, 25 bp, Homo sapien
gagtttagcagtggatagtcatata

SEQ ID NO: 2358711 - DNA, 25 bp, Homo sapien
gcttgcattatgtagttaaatactc

SEQ ID NO: 2358712 - DNA, 25 bp, Homo sapien
gaaaatgcttgcattatgtagttaa

SEQ ID NO: 2358713 - DNA, 25 bp, Homo sapien
tactcttgccgctttcaatttctga

SEQ ID NO: 2358714 - DNA, 25 bp, Homo sapien
agttaaatactcttgccgctttcaa

SEQ ID NO: 2358715 - DNA, 25 bp, Homo sapien
gtctgggaagcatcgcctctagcca

SEQ ID NO: 2358716 - DNA, 25 bp, Homo sapien
cactctgtgatcactggtctcttac

SEQ ID NO: 2358717 - DNA, 25 bp, Homo sapien
tcatgagtcccatgtagactggcca

SEQ ID NO: 2358718 - DNA, 25 bp, Homo sapien
ggtctcttaccaggaaggaatcctg

SEQ ID NO: 2358719 - DNA, 25 bp, Homo sapien
gactctgaagccctagctcttaact

SEQ ID NO: 2358720 - DNA, 25 bp, Homo sapien
gccctagctcttaactgctctcatt

SEQ ID NO: 2358721 - DNA, 25 bp, Homo sapien
tgtgtcgacacttcttgacagttaa

SEQ ID NO: 2358722 - DNA, 25 bp, Homo sapien
tgctctcattatcattagtgtgtcg

SEQ ID NO: 2358723 - DNA, 25 bp, Homo sapien
tgtatgacatagtatatttcattgg

SEQ ID NO: 2358724 - DNA, 25 bp, Homo sapien
tagtatatttcattggtaagaggag

SEQ ID NO: 2358725 - DNA, 25 bp, Homo sapien
tttgtgattgtatgacatagtatat

SEQ ID NO: 2358726 - DNA, 25 bp, Homo sapien
gtgtaataatagtgatgaataatga

SEQ ID NO: 2358727 - DNA, 25 bp, Homo sapien
gccgcgctccggaacaggtgaccat

SEQ ID NO: 2358728 - DNA, 25 bp, Homo sapien
gaggggaagtctcggcttcggccgc

SEQ ID NO: 2358729 - DNA, 25 bp, Homo sapien
aggggaagtctcggcttcggccgcg

SEQ ID NO: 2358730 - DNA, 25 bp, Homo sapien
gcccccttgccgtcatccagcgccc

SEQ ID NO: 2358731 - DNA, 25 bp, Homo sapien
cagcgcccccgttcccgacagctgt

SEQ ID NO: 2358732 - DNA, 25 bp, Homo sapien
tccagcgcccccgttcccgacagct

SEQ ID NO: 2358733 - DNA, 25 bp, Homo sapien
ttgccgtcatccagcgcccccgttc

SEQ ID NO: 2358734 - DNA, 25 bp, Homo sapien
ttatacactctcataactctcaggc

SEQ ID NO: 2358735 - DNA, 25 bp, Homo sapien
tatacactctcataactctcaggct

SEQ ID NO: 2358736 - DNA, 25 bp, Homo sapien
ccaagccacttgcttcacatttgaa

SEQ ID NO: 2358737 - DNA, 25 bp, Homo sapien
agccacttgcttcacatttgaagtt

SEQ ID NO: 2358738 - DNA, 25 bp, Homo sapien
tggaagatggcgaggagttcaatct

SEQ ID NO: 2358739 - DNA, 25 bp, Homo sapien
agatggcgaggagttcaatcttggt

SEQ ID NO: 2358740 - DNA, 25 bp, Homo sapien
gaagatggcgaggagttcaatcttg

SEQ ID NO: 2358741 - DNA, 25 bp, Homo sapien
ctggaagatggcgaggagttcaatc

SEQ ID NO: 2358742 - DNA, 25 bp, Homo sapien
ctcctgaggaatcccgggtgggcga

SEQ ID NO: 2358743 - DNA, 25 bp, Homo sapien
tgggcgacgaacaactcgggctagc

SEQ ID NO: 2358744 - DNA, 25 bp, Homo sapien
tcgcttcccgccgtcagcagctcct

SEQ ID NO: 2358745 - DNA, 25 bp, Homo sapien
tcgggctagccttgggcttgccatg

SEQ ID NO: 2358746 - DNA, 25 bp, Homo sapien
ccgaactgtttgaagagtggaggtc

SEQ ID NO: 2358747 - DNA, 25 bp, Homo sapien
ttgaagagtggaggtctttctggac

SEQ ID NO: 2358748 - DNA, 25 bp, Homo sapien
tggaggtctttctggacttaggttg

SEQ ID NO: 2358749 - DNA, 25 bp, Homo sapien
agggactcctctctatccgaactgt

SEQ ID NO: 2358750 - DNA, 25 bp, Homo sapien
cttagcttttcatttgcccgtgcca

SEQ ID NO: 2358751 - DNA, 25 bp, Homo sapien
tgttttcaatattgaaacgaccagg

SEQ ID NO: 2358752 - DNA, 25 bp, Homo sapien
tttcatttgcccgtgccatctgtgg

SEQ ID NO: 2358753 - DNA, 25 bp, Homo sapien
atttgcccgtgccatctgtgggaga

SEQ ID NO: 2358754 - DNA, 25 bp, Homo sapien
gactgattcatctcaaacaaagcca

SEQ ID NO: 2358755 - DNA, 25 bp, Homo sapien
tccacttcttttgaatccgactgat

SEQ ID NO: 2358756 - DNA, 25 bp, Homo sapien
ctgattctgaactgttctctgaact

SEQ ID NO: 2358757 - DNA, 25 bp, Homo sapien
tgattctgaactgttctctgaactg

SEQ ID NO: 2358758 - DNA, 25 bp, Homo sapien
gttatctatggtgacttcagatggg

SEQ ID NO: 2358759 - DNA, 25 bp, Homo sapien
gaattgggaagcttaatgttatcta

SEQ ID NO: 2358760 - DNA, 25 bp, Homo sapien
tccaccttcagaattgggaagctta

SEQ ID NO: 2358761 - DNA, 25 bp, Homo sapien
tcagatgggatgctgtcatcttcgt

SEQ ID NO: 2358762 - DNA, 25 bp, Homo sapien
tggactgtccaaaacttcaatcttg

SEQ ID NO: 2358763 - DNA, 25 bp, Homo sapien
ggactgtccaaaacttcaatcttgc

SEQ ID NO: 2358764 - DNA, 25 bp, Homo sapien
gctggactgtccaaaacttcaatct

SEQ ID NO: 2358765 - DNA, 25 bp, Homo sapien
ttgctggactgtccaaaacttcaat

SEQ ID NO: 2358766 - DNA, 25 bp, Homo sapien
gcccatcggacaaggcagccttaga

SEQ ID NO: 2358767 - DNA, 25 bp, Homo sapien
gaccatacctatgggacatcaggca

SEQ ID NO: 2358768 - DNA, 25 bp, Homo sapien
aaagcacactttccttgctgtagag

SEQ ID NO: 2358769 - DNA, 25 bp, Homo sapien
tttataacaaatagccaagtctggc

SEQ ID NO: 2358770 - DNA, 25 bp, Homo sapien
ataagctagtttccagccgggcacg

SEQ ID NO: 2358771 - DNA, 25 bp, Homo sapien
gcaggtcaagaagggtggaacacga

SEQ ID NO: 2358772 - DNA, 25 bp, Homo sapien
aaataaagataagctagtttccagc

SEQ ID NO: 2358773 - DNA, 25 bp, Homo sapien
tttggcaggtcaagaagggtggaac

SEQ ID NO: 2358774 - DNA, 25 bp, Homo sapien
taggacacagacattggcagagact

SEQ ID NO: 2358775 - DNA, 25 bp, Homo sapien
acagcacagtactggcaccaaaaga

SEQ ID NO: 2358776 - DNA, 25 bp, Homo sapien
agagatatacaggccaacagaacag

SEQ ID NO: 2358777 - DNA, 25 bp, Homo sapien
agtactggcaccaaaagagatatac

SEQ ID NO: 2358778 - DNA, 25 bp, Homo sapien
tcaatggcctaatcgatcaagtggg

SEQ ID NO: 2358779 - DNA, 25 bp, Homo sapien
taatcgatcaagtgggagaaaggat

SEQ ID NO: 2358780 - DNA, 25 bp, Homo sapien
cagaaggcagataataacaaattcc

SEQ ID NO: 2358781 - DNA, 25 bp, Homo sapien
gaaggcagataataacaaattcctc

SEQ ID NO: 2358782 - DNA, 25 bp, Homo sapien
tatctactcacgataccatgtgaca

SEQ ID NO: 2358783 - DNA, 25 bp, Homo sapien
agctcgtgttgcaagtatctactca

SEQ ID NO: 2358784 - DNA, 25 bp, Homo sapien
tcctgttgctattgcgatgagctcg

SEQ ID NO: 2358785 - DNA, 25 bp, Homo sapien
gtaataactttgtggtcacctcctg

SEQ ID NO: 2358786 - DNA, 25 bp, Homo sapien
gaaaacccgaaaacattagcagaca

SEQ ID NO: 2358787 - DNA, 25 bp, Homo sapien
tacacatttagcgagtgagtcacag

SEQ ID NO: 2358788 - DNA, 25 bp, Homo sapien
tgccaataactcatcacggctgtgt

SEQ ID NO: 2358789 - DNA, 25 bp, Homo sapien
cagatagtccttaaattctcaggcc

SEQ ID NO: 2358790 - DNA, 25 bp, Homo sapien
catatacagcgtgcataagcaggac

SEQ ID NO: 2358791 - DNA, 25 bp, Homo sapien
cgaagtgggacagcctaagatttca

SEQ ID NO: 2358792 - DNA, 25 bp, Homo sapien
tcctgcctggaaccgtctatgatag

SEQ ID NO: 2358793 - DNA, 25 bp, Homo sapien
aattcacatcccaggcgagacgaag

SEQ ID NO: 2358794 - DNA, 25 bp, Homo sapien
tggacaaccaaagcacaacagtgat

SEQ ID NO: 2358795 - DNA, 25 bp, Homo sapien
cagaaagggctcagtaagtaccagc

SEQ ID NO: 2358796 - DNA, 25 bp, Homo sapien
tatcacggtcatggatacaggcaga

SEQ ID NO: 2358797 - DNA, 25 bp, Homo sapien
cagagccatagaaagacggtacgcc

SEQ ID NO: 2358798 - DNA, 25 bp, Homo sapien
gaaatagcctacagatgatatctga

SEQ ID NO: 2358799 - DNA, 25 bp, Homo sapien
aaatctgggctaagagtaggatatg

SEQ ID NO: 2358800 - DNA, 25 bp, Homo sapien
taggaaagtaagactgactcaacca

SEQ ID NO: 2358801 - DNA, 25 bp, Homo sapien
gctagagctagggtaaggaaacaaa

SEQ ID NO: 2358802 - DNA, 25 bp, Homo sapien
gccttgtagtgcatcctctggagca

SEQ ID NO: 2358803 - DNA, 25 bp, Homo sapien
ctctggagcagaggaacggtgtgtc

SEQ ID NO: 2358804 - DNA, 25 bp, Homo sapien
gagcagaggaacggtgtgtcctcac

SEQ ID NO: 2358805 - DNA, 25 bp, Homo sapien
gcctctagttttaagatggtgcctt

SEQ ID NO: 2358806 - DNA, 25 bp, Homo sapien
gaaatgtgatccagctgtatgtaca

SEQ ID NO: 2358807 - DNA, 25 bp, Homo sapien
gatgttgccaggtaaaaccacgccc

SEQ ID NO: 2358808 - DNA, 25 bp, Homo sapien
ggttgcatctaacttggagaggcgc

SEQ ID NO: 2358809 - DNA, 25 bp, Homo sapien
tattgactcactagggattccctca

SEQ ID NO: 2358810 - DNA, 25 bp, Homo sapien
cctctttggacaagaagtctatagc

SEQ ID NO: 2358811 - DNA, 25 bp, Homo sapien
gatgactgggtcaagaattctcagg

SEQ ID NO: 2358812 - DNA, 25 bp, Homo sapien
caagctgaagttggcactaattggc

SEQ ID NO: 2358813 - DNA, 25 bp, Homo sapien
tctatagccacctccgcaaagaggg

SEQ ID NO: 2358814 - DNA, 25 bp, Homo sapien
aatttctagaattgccaggcgctgc

SEQ ID NO: 2358815 - DNA, 25 bp, Homo sapien
gaaccgagagaggacacgttgcact

SEQ ID NO: 2358816 - DNA, 25 bp, Homo sapien
taatggcactcaaagctgatggctg

SEQ ID NO: 2358817 - DNA, 25 bp, Homo sapien
tactgtagcacaagaaccgagctct

SEQ ID NO: 2358818 - DNA, 25 bp, Homo sapien
tagcagattgagacagccataacag

SEQ ID NO: 2358819 - DNA, 25 bp, Homo sapien
ggcagcatgtaagcggtacctttca

SEQ ID NO: 2358820 - DNA, 25 bp, Homo sapien
tcagaaaagaaacggtcgtgccaag

SEQ ID NO: 2358821 - DNA, 25 bp, Homo sapien
tcagacatggacttagcttgcaagg

SEQ ID NO: 2358822 - DNA, 25 bp, Homo sapien
gctgagagcttgtggtgtttactgg

SEQ ID NO: 2358823 - DNA, 25 bp, Homo sapien
tttcctagggtaatgtcattgaaga

SEQ ID NO: 2358824 - DNA, 25 bp, Homo sapien
tcctagggtaatgtcattgaagagt

SEQ ID NO: 2358825 - DNA, 25 bp, Homo sapien
tgagagcttgtggtgtttactggac

SEQ ID NO: 2358826 - DNA, 25 bp, Homo sapien
ctattgttcttagacgtagtctgca

SEQ ID NO: 2358827 - DNA, 25 bp, Homo sapien
cattcacacggtactttctgaaaag

SEQ ID NO: 2358828 - DNA, 25 bp, Homo sapien
gttcttagacgtagtctgcagaagg

SEQ ID NO: 2358829 - DNA, 25 bp, Homo sapien
attctactactcttcattcacacgg

SEQ ID NO: 2358830 - DNA, 25 bp, Homo sapien
tcaagacgttctgtgcgagaggaga

SEQ ID NO: 2358831 - DNA, 25 bp, Homo sapien
tctgtcgccaccgtaggagttccta

SEQ ID NO: 2358832 - DNA, 25 bp, Homo sapien
gatcctcgaggataacgctgaccag

SEQ ID NO: 2358833 - DNA, 25 bp, Homo sapien
aatttcgccctgctctctctagacg

SEQ ID NO: 2358834 - DNA, 25 bp, Homo sapien
aaagcgagtcctccgccgtggccga

SEQ ID NO: 2358835 - DNA, 25 bp, Homo sapien
tgggaaagcgagtcctccgccgtgg

SEQ ID NO: 2358836 - DNA, 25 bp, Homo sapien
gagtcctccgccgtggccgaaggcg

SEQ ID NO: 2358837 - DNA, 25 bp, Homo sapien
agtcctccgccgtggccgaaggcgg

SEQ ID NO: 2358838 - DNA, 25 bp, Homo sapien
tcacagcacgtgacttccggccccg

SEQ ID NO: 2358839 - DNA, 25 bp, Homo sapien
agcccgtgcggcgacgacggcctca

SEQ ID NO: 2358840 - DNA, 25 bp, Homo sapien
ccccagctactgtcacagcacgtga

SEQ ID NO: 2358841 - DNA, 25 bp, Homo sapien
acgacggcctcaccccagctactgt

SEQ ID NO: 2358842 - DNA, 25 bp, Homo sapien
gtcgtcaacgcggtcaaactcccag

SEQ ID NO: 2358843 - DNA, 25 bp, Homo sapien
tctgcgagccgtcgtcaacgcggtc

SEQ ID NO: 2358844 - DNA, 25 bp, Homo sapien
gagccgtcgtcaacgcggtcaaact

SEQ ID NO: 2358845 - DNA, 25 bp, Homo sapien
tcgtcaacgcggtcaaactcccagt

SEQ ID NO: 2358846 - DNA, 25 bp, Homo sapien
cagcccagaacagcggcgggccgaa

SEQ ID NO: 2358847 - DNA, 25 bp, Homo sapien
gggccgaaggagcgtccacccgcag

SEQ ID NO: 2358848 - DNA, 25 bp, Homo sapien
ctgcgcagccgtccctctcgcagga

SEQ ID NO: 2358849 - DNA, 25 bp, Homo sapien
gccgaaggagcgtccacccgcagcc

SEQ ID NO: 2358850 - DNA, 25 bp, Homo sapien
gtaacgctggagagcgcgtccctcg

SEQ ID NO: 2358851 - DNA, 25 bp, Homo sapien
gtccctcgcacaccccaagggctct

SEQ ID NO: 2358852 - DNA, 25 bp, Homo sapien
accccgaaagtaacgctggagagcg

SEQ ID NO: 2358853 - DNA, 25 bp, Homo sapien
gaaagtaacgctggagagcgcgtcc

SEQ ID NO: 2358854 - DNA, 25 bp, Homo sapien
acgccgagccctgaacgggcagcct

SEQ ID NO: 2358855 - DNA, 25 bp, Homo sapien
gccgagccctgaacgggcagcctga

SEQ ID NO: 2358856 - DNA, 25 bp, Homo sapien
ccgagccctgaacgggcagcctgac

SEQ ID NO: 2358857 - DNA, 25 bp, Homo sapien
cgccgagccctgaacgggcagcctg

SEQ ID NO: 2358858 - DNA, 25 bp, Homo sapien
ctccccaggagagtctccgcctcac

SEQ ID NO: 2358859 - DNA, 25 bp, Homo sapien
aaccgaaacaggaacccagacatca

SEQ ID NO: 2358860 - DNA, 25 bp, Homo sapien
tatagcaacgcgatgggaaagacac

SEQ ID NO: 2358861 - DNA, 25 bp, Homo sapien
cagagctgaacgctcagaatctggc

SEQ ID NO: 2358862 - DNA, 25 bp, Homo sapien
gaatctggcgaaatccccaagaggc

SEQ ID NO: 2358863 - DNA, 25 bp, Homo sapien
ggcattagtctctcttcgtaaatca

SEQ ID NO: 2358864 - DNA, 25 bp, Homo sapien
aaacctaattcatctaacattgtag

SEQ ID NO: 2358865 - DNA, 25 bp, Homo sapien
gtaaatcaagcaaaattcatccgga

SEQ ID NO: 2358866 - DNA, 25 bp, Homo sapien
tctctgagagacttgtaaaacctaa

SEQ ID NO: 2358867 - DNA, 25 bp, Homo sapien
ggtatactcctcaagaaatttccca

SEQ ID NO: 2358868 - DNA, 25 bp, Homo sapien
gagtcatccagagcgtcctcaattc

SEQ ID NO: 2358869 - DNA, 25 bp, Homo sapien
tcttctcagttgagaggtatactcc

SEQ ID NO: 2358870 - DNA, 25 bp, Homo sapien
cataattcttaagttggacttcggc

SEQ ID NO: 2358871 - DNA, 25 bp, Homo sapien
aaacttgtgttagatcctgtactca

SEQ ID NO: 2358872 - DNA, 25 bp, Homo sapien
caatctcattagacaacacgtaagg

SEQ ID NO: 2358873 - DNA, 25 bp, Homo sapien
aatggcccaacatgacacaatcacg

SEQ ID NO: 2358874 - DNA, 25 bp, Homo sapien
gaggctagctttattcgacttaaac

SEQ ID NO: 2358875 - DNA, 25 bp, Homo sapien
aaagagaggactgttcataaggcaa

SEQ ID NO: 2358876 - DNA, 25 bp, Homo sapien
tgttttcagtctttatgagttccaa

SEQ ID NO: 2358877 - DNA, 25 bp, Homo sapien
gagaggactgttcataaggcaaaag

SEQ ID NO: 2358878 - DNA, 25 bp, Homo sapien
tatgagttccaaaagagaggactgt

SEQ ID NO: 2358879 - DNA, 25 bp, Homo sapien
ctagtttcatgagtaaaaacaaaat

SEQ ID NO: 2358880 - DNA, 25 bp, Homo sapien
taaattgttacagataactaaaaca

SEQ ID NO: 2358881 - DNA, 25 bp, Homo sapien
attgttacagataactaaaacattt

SEQ ID NO: 2358882 - DNA, 25 bp, Homo sapien
caattttttagatttaggattctgt

SEQ ID NO: 2358883 - DNA, 25 bp, Homo sapien
tttcacaacaaagtgcagcataaac

SEQ ID NO: 2358884 - DNA, 25 bp, Homo sapien
ttaagacaagaattcaaataattac

SEQ ID NO: 2358885 - DNA, 25 bp, Homo sapien
aacacatacttgcttctaaatgatg

SEQ ID NO: 2358886 - DNA, 25 bp, Homo sapien
tattgcacactgtacatatataaac

SEQ ID NO: 2358887 - DNA, 25 bp, Homo sapien
tatataaacacatacttgcttctaa

SEQ ID NO: 2358888 - DNA, 25 bp, Homo sapien
gaccattgtaaaatttagtttcagc

SEQ ID NO: 2358889 - DNA, 25 bp, Homo sapien
aacaagagaccattgtaaaatttag

SEQ ID NO: 2358890 - DNA, 25 bp, Homo sapien
ccataaaacaagagaccattgtaaa

SEQ ID NO: 2358891 - DNA, 25 bp, Homo sapien
tccataaaacaagagaccattgtaa

SEQ ID NO: 2358892 - DNA, 25 bp, Homo sapien
tgaaataaatctccccatttgaatt

SEQ ID NO: 2358893 - DNA, 25 bp, Homo sapien
aaatctccccatttgaatttggcaa

SEQ ID NO: 2358894 - DNA, 25 bp, Homo sapien
aataaatctccccatttgaatttgg

SEQ ID NO: 2358895 - DNA, 25 bp, Homo sapien
tctccccatttgaatttggcaatca

SEQ ID NO: 2358896 - DNA, 25 bp, Homo sapien
tactccagggtcgttcctatctctt

SEQ ID NO: 2358897 - DNA, 25 bp, Homo sapien
ttcctatctctttgttcccactgca

SEQ ID NO: 2358898 - DNA, 25 bp, Homo sapien
ctcctgtactccagggtcgttccta

SEQ ID NO: 2358899 - DNA, 25 bp, Homo sapien
cgttcctatctctttgttcccactg

SEQ ID NO: 2358900 - DNA, 25 bp, Homo sapien
tcatagcacctcgtaacaaagcaag

SEQ ID NO: 2358901 - DNA, 25 bp, Homo sapien
atcaccacttcatagcacctcgtaa

SEQ ID NO: 2358902 - DNA, 25 bp, Homo sapien
ccaactggtggactacgttcatcac

SEQ ID NO: 2358903 - DNA, 25 bp, Homo sapien
gttactgatatagagggcagccaac

SEQ ID NO: 2358904 - DNA, 25 bp, Homo sapien
cctttttgtcatagtttattcttat

SEQ ID NO: 2358905 - DNA, 25 bp, Homo sapien
catacaggagcagatgatcttggaa

SEQ ID NO: 2358906 - DNA, 25 bp, Homo sapien
caaatacatacaggagcagatgatc

SEQ ID NO: 2358907 - DNA, 25 bp, Homo sapien
atttcaaatacatacaggagcagat

SEQ ID NO: 2358908 - DNA, 25 bp, Homo sapien
aaaatgaactccagttgtctctata

SEQ ID NO: 2358909 - DNA, 25 bp, Homo sapien
tgaactccagttgtctctataattt

SEQ ID NO: 2358910 - DNA, 25 bp, Homo sapien
tgaaaatgaactccagttgtctcta

SEQ ID NO: 2358911 - DNA, 25 bp, Homo sapien
aatgaactccagttgtctctataat

SEQ ID NO: 2358912 - DNA, 25 bp, Homo sapien
cttttgtacatagtccagtggtctt

SEQ ID NO: 2358913 - DNA, 25 bp, Homo sapien
ggtctttcagtgtgatatgattatc

SEQ ID NO: 2358914 - DNA, 25 bp, Homo sapien
gcagttctcccaagtgctcatacat

SEQ ID NO: 2358915 - DNA, 25 bp, Homo sapien
catagtccagtggtctttcagtgtg

SEQ ID NO: 2358916 - DNA, 25 bp, Homo sapien
catccagtaattgcccttctagctt

SEQ ID NO: 2358917 - DNA, 25 bp, Homo sapien
aaggattgtgatggacagatttcag

SEQ ID NO: 2358918 - DNA, 25 bp, Homo sapien
tgaaggattgtgatggacagatttc

SEQ ID NO: 2358919 - DNA, 25 bp, Homo sapien
ggaatatcattccatccagtaattg

SEQ ID NO: 2358920 - DNA, 25 bp, Homo sapien
ctgttggaaaaatgacgatgaaaga

SEQ ID NO: 2358921 - DNA, 25 bp, Homo sapien
aaaatgacgatgaaagacttgcttg

SEQ ID NO: 2358922 - DNA, 25 bp, Homo sapien
aaaaatgacgatgaaagacttgctt

SEQ ID NO: 2358923 - DNA, 25 bp, Homo sapien
tggaaaaatgacgatgaaagacttg

SEQ ID NO: 2358924 - DNA, 25 bp, Homo sapien
aacttactggcttctacatgagcac

SEQ ID NO: 2358925 - DNA, 25 bp, Homo sapien
cctcataaaccaacctgtgctaggt

SEQ ID NO: 2358926 - DNA, 25 bp, Homo sapien
gaaaaatctgttgctaagtgtggcc

SEQ ID NO: 2358927 - DNA, 25 bp, Homo sapien
ctctatcagtgattttagccagatc

SEQ ID NO: 2358928 - DNA, 25 bp, Homo sapien
tgacacagatactcctccattgaga

SEQ ID NO: 2358929 - DNA, 25 bp, Homo sapien
tgaccgaatactatgtgcaaattcc

SEQ ID NO: 2358930 - DNA, 25 bp, Homo sapien
attttttgacacagatactcctcca

SEQ ID NO: 2358931 - DNA, 25 bp, Homo sapien
catttgcaaaaattgaccgaatact

SEQ ID NO: 2358932 - DNA, 25 bp, Homo sapien
gagtccacaaattccaacatacttg

SEQ ID NO: 2358933 - DNA, 25 bp, Homo sapien
ctgaaagtgcaatacaaagagtcca

SEQ ID NO: 2358934 - DNA, 25 bp, Homo sapien
gcaatacaaagagtccacaaattcc

SEQ ID NO: 2358935 - DNA, 25 bp, Homo sapien
tacttgtctctctggtcaatttcag

SEQ ID NO: 2358936 - DNA, 25 bp, Homo sapien
caaatgtccaataaagacttataaa

SEQ ID NO: 2358937 - DNA, 25 bp, Homo sapien
ttggtaagtgattgagctttctgtt

SEQ ID NO: 2358938 - DNA, 25 bp, Homo sapien
taatattagcagttagagtgatggc

SEQ ID NO: 2358939 - DNA, 25 bp, Homo sapien
tagcagttagagtgatggctggtac

SEQ ID NO: 2358940 - DNA, 25 bp, Homo sapien
tattagcagttagagtgatggctgg

SEQ ID NO: 2358941 - DNA, 25 bp, Homo sapien
tctctgctctttagacaaaatagat

SEQ ID NO: 2358942 - DNA, 25 bp, Homo sapien
tctattggtgagatcttcagcaaat

SEQ ID NO: 2358943 - DNA, 25 bp, Homo sapien
cattacatctattggtgagatcttc

SEQ ID NO: 2358944 - DNA, 25 bp, Homo sapien
caaagacgtagtaagactgtacatc

SEQ ID NO: 2358945 - DNA, 25 bp, Homo sapien
tccagggcccatattagctcattcc

SEQ ID NO: 2358946 - DNA, 25 bp, Homo sapien
gggtacttgaagttcagaactccag

SEQ ID NO: 2358947 - DNA, 25 bp, Homo sapien
aatctaaattgtgagggagagggta

SEQ ID NO: 2358948 - DNA, 25 bp, Homo sapien
cagataaccattaatttgtgaaggg

SEQ ID NO: 2358949 - DNA, 25 bp, Homo sapien
gaagttcaacaagcctgcacaatgc

SEQ ID NO: 2358950 - DNA, 25 bp, Homo sapien
tgcacaatgccttaactgaggtttt

SEQ ID NO: 2358951 - DNA, 25 bp, Homo sapien
taatactatatgcatacaagaagcc

SEQ ID NO: 2358952 - DNA, 25 bp, Homo sapien
tgcatggacatgtagagattcattg

SEQ ID NO: 2358953 - DNA, 25 bp, Homo sapien
cagtagtttcctctgaggtggacag

SEQ ID NO: 2358954 - DNA, 25 bp, Homo sapien
cataaaattcaggacagtagtttcc

SEQ ID NO: 2358955 - DNA, 25 bp, Homo sapien
aattcaggacagtagtttcctctga

SEQ ID NO: 2358956 - DNA, 25 bp, Homo sapien
gacaggttgagatgcaattaggaaa

SEQ ID NO: 2358957 - DNA, 25 bp, Homo sapien
gaaacaacccgaagtctatccacta

SEQ ID NO: 2358958 - DNA, 25 bp, Homo sapien
aaactcctgcacaagtacaccaaga

SEQ ID NO: 2358959 - DNA, 25 bp, Homo sapien
gatgtgctactcatcccaacatgga

SEQ ID NO: 2358960 - DNA, 25 bp, Homo sapien
gaaacacatacaaggatggcaacat

SEQ ID NO: 2358961 - DNA, 25 bp, Homo sapien
tgaatcagccacaaccatgcttctc

SEQ ID NO: 2358962 - DNA, 25 bp, Homo sapien
gaaactgaatcagccacaaccatgc

SEQ ID NO: 2358963 - DNA, 25 bp, Homo sapien
tatatgtgaaactgaatcagccaca

SEQ ID NO: 2358964 - DNA, 25 bp, Homo sapien
ctgtgttatatgtgaaactgaatca

SEQ ID NO: 2358965 - DNA, 25 bp, Homo sapien
tcagccaaaactagagcagagagca

SEQ ID NO: 2358966 - DNA, 25 bp, Homo sapien
caaagaaacaataagtcgccgttgc

SEQ ID NO: 2358967 - DNA, 25 bp, Homo sapien
tgccaacacttagtgccaaagaaac

SEQ ID NO: 2358968 - DNA, 25 bp, Homo sapien
ggtccatttagagtgttttcagcca

SEQ ID NO: 2358969 - DNA, 25 bp, Homo sapien
cgttctctaagttcactaataagat

SEQ ID NO: 2358970 - DNA, 25 bp, Homo sapien
taagttcactaataagatccagttt

SEQ ID NO: 2358971 - DNA, 25 bp, Homo sapien
ttctctaagttcactaataagatcc

SEQ ID NO: 2358972 - DNA, 25 bp, Homo sapien
tctaagttcactaataagatccagt

SEQ ID NO: 2358973 - DNA, 25 bp, Homo sapien
cagctcgatgccagtataaaaaaca

SEQ ID NO: 2358974 - DNA, 25 bp, Homo sapien
tcgatgccagtataaaaaacaacag

SEQ ID NO: 2358975 - DNA, 25 bp, Homo sapien
gggaagacagctcgatgccagtata

SEQ ID NO: 2358976 - DNA, 25 bp, Homo sapien
aataaattgggaagacagctcgatg

SEQ ID NO: 2358977 - DNA, 25 bp, Homo sapien
tagcaggtacacagtcgcgcaaagc

SEQ ID NO: 2358978 - DNA, 25 bp, Homo sapien
agtcgcgcaaagcactgaacatgta

SEQ ID NO: 2358979 - DNA, 25 bp, Homo sapien
cagaagtatctcataggactctaaa

SEQ ID NO: 2358980 - DNA, 25 bp, Homo sapien
gccttgcatgcatcatagcaggtac

SEQ ID NO: 2358981 - DNA, 25 bp, Homo sapien
tttgaaagggtttcggtcatccagc

SEQ ID NO: 2358982 - DNA, 25 bp, Homo sapien
cccgaatgtcaatgaaacgattgaa

SEQ ID NO: 2358983 - DNA, 25 bp, Homo sapien
taaatgagtatgcacagaaagtcgc

SEQ ID NO: 2358984 - DNA, 25 bp, Homo sapien
gaaaaaccgaattggattcagagag

SEQ ID NO: 2358985 - DNA, 25 bp, Homo sapien
cccagtcatgaagggctacagttgt

SEQ ID NO: 2358986 - DNA, 25 bp, Homo sapien
ccaaagtctgactgggaagatgtgc

SEQ ID NO: 2358987 - DNA, 25 bp, Homo sapien
tctcactataagtggcccagtcatg

SEQ ID NO: 2358988 - DNA, 25 bp, Homo sapien
tgtgcctctgtcataaccagtccat

SEQ ID NO: 2358989 - DNA, 25 bp, Homo sapien
tagaggtatcgggacacaaatatat

SEQ ID NO: 2358990 - DNA, 25 bp, Homo sapien
gtatcgggacacaaatatatgaatg

SEQ ID NO: 2358991 - DNA, 25 bp, Homo sapien
gattatagaggtatcgggacacaaa

SEQ ID NO: 2358992 - DNA, 25 bp, Homo sapien
ttgttgagattatagaggtatcggg

SEQ ID NO: 2358993 - DNA, 25 bp, Homo sapien
gttgtattcataattcccgtgccat

SEQ ID NO: 2358994 - DNA, 25 bp, Homo sapien
tgaattagcaatatgccgaatatta

SEQ ID NO: 2358995 - DNA, 25 bp, Homo sapien
gccatgtgttcgaattgaattagca

SEQ ID NO: 2358996 - DNA, 25 bp, Homo sapien
gcttgttattgcttgttcgttcaat

SEQ ID NO: 2358997 - DNA, 25 bp, Homo sapien
tattctatgagaaaaccacgttcca

SEQ ID NO: 2358998 - DNA, 25 bp, Homo sapien
aactagtagtgtatgtttaccgcaa

SEQ ID NO: 2358999 - DNA, 25 bp, Homo sapien
gatggctctgagatggtaatctacc

SEQ ID NO: 2359000 - DNA, 25 bp, Homo sapien
agtaaactttcagggatcacagatc

SEQ ID NO: 2359001 - DNA, 25 bp, Homo sapien
ccaccacgccaagcggtgaatgccc

SEQ ID NO: 2359002 - DNA, 25 bp, Homo sapien
accacgccaagcggtgaatgcccat

SEQ ID NO: 2359003 - DNA, 25 bp, Homo sapien
gccaccacgccaagcggtgaatgcc

SEQ ID NO: 2359004 - DNA, 25 bp, Homo sapien
cacgccaagcggtgaatgcccattt

SEQ ID NO: 2359005 - DNA, 25 bp, Homo sapien
catcaacagacatcagtaatctaca

SEQ ID NO: 2359006 - DNA, 25 bp, Homo sapien
tctatccttctatgctcatttcatc

SEQ ID NO: 2359007 - DNA, 25 bp, Homo sapien
cattagtgtaattaactgatgaaca

SEQ ID NO: 2359008 - DNA, 25 bp, Homo sapien
tctatatccctgtgattactgtgaa

SEQ ID NO: 2359009 - DNA, 25 bp, Homo sapien
agcccttgactcagaaaatcctaag

SEQ ID NO: 2359010 - DNA, 25 bp, Homo sapien
tatgttcctccatcagtaagattac

SEQ ID NO: 2359011 - DNA, 25 bp, Homo sapien
tctcatgataggactaagggctgta

SEQ ID NO: 2359012 - DNA, 25 bp, Homo sapien
tcccatgctagacatggtccttgtc

SEQ ID NO: 2359013 - DNA, 25 bp, Homo sapien
tatttgtactacctataaagtacta

SEQ ID NO: 2359014 - DNA, 25 bp, Homo sapien
tgtactacctataaagtactattta

SEQ ID NO: 2359015 - DNA, 25 bp, Homo sapien
tatctatttgtactacctataaagt

SEQ ID NO: 2359016 - DNA, 25 bp, Homo sapien
tcacagttatctatttgtactacct

SEQ ID NO: 2359017 - DNA, 25 bp, Homo sapien
taatttccctgaaaaatcgaatatc

SEQ ID NO: 2359018 - DNA, 25 bp, Homo sapien
cgaatatctttaatcaatctggatt

SEQ ID NO: 2359019 - DNA, 25 bp, Homo sapien
gttcatcatacataaattggctaaa

SEQ ID NO: 2359020 - DNA, 25 bp, Homo sapien
tgttcatcatacataaattggctaa

SEQ ID NO: 2359021 - DNA, 25 bp, Homo sapien
tcagtgatatagcttggctttgtcc

SEQ ID NO: 2359022 - DNA, 25 bp, Homo sapien
ctgatggttgtaagggcttcccgct

SEQ ID NO: 2359023 - DNA, 25 bp, Homo sapien
tgatggttgtaagggcttcccgctt

SEQ ID NO: 2359024 - DNA, 25 bp, Homo sapien
gtgcctcagtgatatagcttggctt

SEQ ID NO: 2359025 - DNA, 25 bp, Homo sapien
tgatcaaggtagctctgtccctcag

SEQ ID NO: 2359026 - DNA, 25 bp, Homo sapien
tgtccctcaggtgttactccaagtt

SEQ ID NO: 2359027 - DNA, 25 bp, Homo sapien
gagttgcctgaattgatcaaggtag

SEQ ID NO: 2359028 - DNA, 25 bp, Homo sapien
ttctgatgcctcgattgaatttttc

SEQ ID NO: 2359029 - DNA, 25 bp, Homo sapien
tactccagaatgaaatgcttataac

SEQ ID NO: 2359030 - DNA, 25 bp, Homo sapien
tgtggcataacagatgcttagtaaa

SEQ ID NO: 2359031 - DNA, 25 bp, Homo sapien
cactagtaaacctaaagtctcctga

SEQ ID NO: 2359032 - DNA, 25 bp, Homo sapien
tcctccaagttcttgtactaaaaca

SEQ ID NO: 2359033 - DNA, 25 bp, Homo sapien
gatccatgagtacagcctttgtctt

SEQ ID NO: 2359034 - DNA, 25 bp, Homo sapien
agagttcaagatccatgagtacagc

SEQ ID NO: 2359035 - DNA, 25 bp, Homo sapien
tcaagatccatgagtacagcctttg

SEQ ID NO: 2359036 - DNA, 25 bp, Homo sapien
tcttcccccacctagagttcaagat

SEQ ID NO: 2359037 - DNA, 25 bp, Homo sapien
tagctgtgatcacatggcgtccgcc

SEQ ID NO: 2359038 - DNA, 25 bp, Homo sapien
tactgttcagatagcatgccctgcc

SEQ ID NO: 2359039 - DNA, 25 bp, Homo sapien
aaaatcctgacatcgatcttgcacc

SEQ ID NO: 2359040 - DNA, 25 bp, Homo sapien
aaaatgctgtaatggctttccaccc

SEQ ID NO: 2359041 - DNA, 25 bp, Homo sapien
tgcaatatgcaatggcctcctgatt

SEQ ID NO: 2359042 - DNA, 25 bp, Homo sapien
tatgtccaactcaagctcaggatct

SEQ ID NO: 2359043 - DNA, 25 bp, Homo sapien
tataatatctacagagctgctagtg

SEQ ID NO: 2359044 - DNA, 25 bp, Homo sapien
tccgccacatacacaattggaagtg

SEQ ID NO: 2359045 - DNA, 25 bp, Homo sapien
caccagatcttatcattcgtacata

SEQ ID NO: 2359046 - DNA, 25 bp, Homo sapien
tgctacaatgaagaccaccagatct

SEQ ID NO: 2359047 - DNA, 25 bp, Homo sapien
gcattgctgctacaatgaagaccac

SEQ ID NO: 2359048 - DNA, 25 bp, Homo sapien
cattcgtacatagcccatagcatta

SEQ ID NO: 2359049 - DNA, 25 bp, Homo sapien
tcttcaaaatttacaatatcttcaa

SEQ ID NO: 2359050 - DNA, 25 bp, Homo sapien
ttcaaaatttacaatatcttcaaga

SEQ ID NO: 2359051 - DNA, 25 bp, Homo sapien
cttcaaaatttacaatatcttcaag

SEQ ID NO: 2359052 - DNA, 25 bp, Homo sapien
tctggcaaagagcttaagctatcta

SEQ ID NO: 2359053 - DNA, 25 bp, Homo sapien
caatctggatcttccaactagcagt

SEQ ID NO: 2359054 - DNA, 25 bp, Homo sapien
gcagtcagctttaccctagagatct

SEQ ID NO: 2359055 - DNA, 25 bp, Homo sapien
caacactttcggagtgaatggcatc

SEQ ID NO: 2359056 - DNA, 25 bp, Homo sapien
gaacaattatatagaaatttcggag

SEQ ID NO: 2359057 - DNA, 25 bp, Homo sapien
attctggagcaaaaacgtctacaag

SEQ ID NO: 2359058 - DNA, 25 bp, Homo sapien
tgtgccttcggcagaatttcgtgtg

SEQ ID NO: 2359059 - DNA, 25 bp, Homo sapien
tctttggccttcgaaattctggagc

SEQ ID NO: 2359060 - DNA, 25 bp, Homo sapien
aagccatcatcagtaaaggcagctc

SEQ ID NO: 2359061 - DNA, 25 bp, Homo sapien
tttttccttgcaactaatggaatgc

SEQ ID NO: 2359062 - DNA, 25 bp, Homo sapien
catggcaaagccatcatcagtaaag

SEQ ID NO: 2359063 - DNA, 25 bp, Homo sapien
ctaatggaatgctctacaaagttga

SEQ ID NO: 2359064 - DNA, 25 bp, Homo sapien
aagtgaatcaaactcccgatactga

SEQ ID NO: 2359065 - DNA, 25 bp, Homo sapien
ctggaaccagtgaagtgaatcaaac

SEQ ID NO: 2359066 - DNA, 25 bp, Homo sapien
caaactcccgatactgatccaaaag

SEQ ID NO: 2359067 - DNA, 25 bp, Homo sapien
tggaaccagtgaagtgaatcaaact

SEQ ID NO: 2359068 - DNA, 25 bp, Homo sapien
tgcttagcaactgctcttatctcct

SEQ ID NO: 2359069 - DNA, 25 bp, Homo sapien
gactggctgactgtacattctgttg

SEQ ID NO: 2359070 - DNA, 25 bp, Homo sapien
gagtgagattcatggtttgtaagag

SEQ ID NO: 2359071 - DNA, 25 bp, Homo sapien
gacatccagtcgcttctgagtgaga

SEQ ID NO: 2359072 - DNA, 25 bp, Homo sapien
agtcaaagcagatgtgactcttagg

SEQ ID NO: 2359073 - DNA, 25 bp, Homo sapien
gtcatggatatcaaatggtaagtca

SEQ ID NO: 2359074 - DNA, 25 bp, Homo sapien
taagaagtcatggatatcaaatggt

SEQ ID NO: 2359075 - DNA, 25 bp, Homo sapien
gatgtgactcttaggctcctctcta

SEQ ID NO: 2359076 - DNA, 25 bp, Homo sapien
tcagtgagaaatacagcaattcaaa

SEQ ID NO: 2359077 - DNA, 25 bp, Homo sapien
ctgctcagtgagaaatacagcaatt

SEQ ID NO: 2359078 - DNA, 25 bp, Homo sapien
gctcagtgagaaatacagcaattca

SEQ ID NO: 2359079 - DNA, 25 bp, Homo sapien
gtgagaaatacagcaattcaaattc

SEQ ID NO: 2359080 - DNA, 25 bp, Homo sapien
ttcagccgcagtcttgtctgctctg

SEQ ID NO: 2359081 - DNA, 25 bp, Homo sapien
gccgcagtcttgtctgctctgaaga

SEQ ID NO: 2359082 - DNA, 25 bp, Homo sapien
gcagtcttgtctgctctgaagaaaa

SEQ ID NO: 2359083 - DNA, 25 bp, Homo sapien
tttcttcagccgcagtcttgtctgc

SEQ ID NO: 2359084 - DNA, 25 bp, Homo sapien
taaagggttaccaagtgtgaaatgc

SEQ ID NO: 2359085 - DNA, 25 bp, Homo sapien
tcagtcaacatctagtcatcagcag

SEQ ID NO: 2359086 - DNA, 25 bp, Homo sapien
gaaggcaggatgctatttactacaa

SEQ ID NO: 2359087 - DNA, 25 bp, Homo sapien
caaagaagctagatgtctgaccaga

SEQ ID NO: 2359088 - DNA, 25 bp, Homo sapien
caggatcagcagacacagtgctgtc

SEQ ID NO: 2359089 - DNA, 25 bp, Homo sapien
aacaggatcagcagacacagtgctg

SEQ ID NO: 2359090 - DNA, 25 bp, Homo sapien
gtgctgtcagacaggtctccattgc

SEQ ID NO: 2359091 - DNA, 25 bp, Homo sapien
gatcagcagacacagtgctgtcaga

SEQ ID NO: 2359092 - DNA, 25 bp, Homo sapien
tgtgcctcacctctagtatcaaagc

SEQ ID NO: 2359093 - DNA, 25 bp, Homo sapien
gcttgctgggcacaaaatttactca

SEQ ID NO: 2359094 - DNA, 25 bp, Homo sapien
gaagcttcaaacaggactctatggc

SEQ ID NO: 2359095 - DNA, 25 bp, Homo sapien
tcatatgtgcagtgaataccatccg

SEQ ID NO: 2359096 - DNA, 25 bp, Homo sapien
tcttgggctggcaagttaccctgac

SEQ ID NO: 2359097 - DNA, 25 bp, Homo sapien
tccagggagtcagcatgtgaactct

SEQ ID NO: 2359098 - DNA, 25 bp, Homo sapien
cagggcattgtacacccattctaaa

SEQ ID NO: 2359099 - DNA, 25 bp, Homo sapien
tcttctcaactgtaggtatccaggg

SEQ ID NO: 2359100 - DNA, 25 bp, Homo sapien
tgaatcggtacagtgtgtttaactg

SEQ ID NO: 2359101 - DNA, 25 bp, Homo sapien
tcctccctatcaaactagtataatg

SEQ ID NO: 2359102 - DNA, 25 bp, Homo sapien
gcttggtataaagttcctatttcca

SEQ ID NO: 2359103 - DNA, 25 bp, Homo sapien
tttaaggtcctcctaggtatgagta

SEQ ID NO: 2359104 - DNA, 25 bp, Homo sapien
gatgagcactgctttgaggcccaag

SEQ ID NO: 2359105 - DNA, 25 bp, Homo sapien
gctttaagtgcctgtcgttctgaaa

SEQ ID NO: 2359106 - DNA, 25 bp, Homo sapien
ttctttgtgcagttaggtgatgagc

SEQ ID NO: 2359107 - DNA, 25 bp, Homo sapien
tagagatgcgcgatacaggtctagt

SEQ ID NO: 2359108 - DNA, 25 bp, Homo sapien
gaaaataagcgtttagcaaggatgt

SEQ ID NO: 2359109 - DNA, 25 bp, Homo sapien
aatggaaaataagcgtttagcaagg

SEQ ID NO: 2359110 - DNA, 25 bp, Homo sapien
tttaatggaaaataagcgtttagca

SEQ ID NO: 2359111 - DNA, 25 bp, Homo sapien
taagcgtttagcaaggatgtgaaga

SEQ ID NO: 2359112 - DNA, 25 bp, Homo sapien
gctgcagctgtcgtgtttgttcaac

SEQ ID NO: 2359113 - DNA, 25 bp, Homo sapien
aactctggctattcccctaggcgta

SEQ ID NO: 2359114 - DNA, 25 bp, Homo sapien
tctgcacaaaatgacaacggccatt

SEQ ID NO: 2359115 - DNA, 25 bp, Homo sapien
ttcaagtgttaagtgcccttctagc

SEQ ID NO: 2359116 - DNA, 25 bp, Homo sapien
taggcagtcgcgatcaagttgaatc

SEQ ID NO: 2359117 - DNA, 25 bp, Homo sapien
tcaacctggaaggtaagcgtccacc

SEQ ID NO: 2359118 - DNA, 25 bp, Homo sapien
taattatcagccaccggcatctcag

SEQ ID NO: 2359119 - DNA, 25 bp, Homo sapien
gaaaaactagcttttgtggagccaa

SEQ ID NO: 2359120 - DNA, 25 bp, Homo sapien
cattacattcggagcatttgccagt

SEQ ID NO: 2359121 - DNA, 25 bp, Homo sapien
tccccttgagctttgggtacagcct

SEQ ID NO: 2359122 - DNA, 25 bp, Homo sapien
gaatcatagttggtcttgcaccctg

SEQ ID NO: 2359123 - DNA, 25 bp, Homo sapien
caaatggtattcctaggagagaccc

SEQ ID NO: 2359124 - DNA, 25 bp, Homo sapien
gggcaggtgacaggctgtgttgtaa

SEQ ID NO: 2359125 - DNA, 25 bp, Homo sapien
caggtgacaggctgtgttgtaagca

SEQ ID NO: 2359126 - DNA, 25 bp, Homo sapien
gcaggtgacaggctgtgttgtaagc

SEQ ID NO: 2359127 - DNA, 25 bp, Homo sapien
ggcaggtgacaggctgtgttgtaag

SEQ ID NO: 2359128 - DNA, 25 bp, Homo sapien
gggctcctgaactagtgcgacccgt

SEQ ID NO: 2359129 - DNA, 25 bp, Homo sapien
gggtactgaatgtgactaggcaaca

SEQ ID NO: 2359130 - DNA, 25 bp, Homo sapien
catctccagccaaatagttggtata

SEQ ID NO: 2359131 - DNA, 25 bp, Homo sapien
tgaccgccagctttgtgataaacac

SEQ ID NO: 2359132 - DNA, 25 bp, Homo sapien
cgtggcctgcctcgcatgagacgct

SEQ ID NO: 2359133 - DNA, 25 bp, Homo sapien
tgagttccttggtgcttccccactg

SEQ ID NO: 2359134 - DNA, 25 bp, Homo sapien
agccgcgttcttgccacacccctca

SEQ ID NO: 2359135 - DNA, 25 bp, Homo sapien
tccagcaggcatccccccgtggcct

SEQ ID NO: 2359136 - DNA, 25 bp, Homo sapien
gggttccctcagcaacgggactggc

SEQ ID NO: 2359137 - DNA, 25 bp, Homo sapien
agcaacgggactggcacccagagcc

SEQ ID NO: 2359138 - DNA, 25 bp, Homo sapien
ctcagcaacgggactggcacccaga

SEQ ID NO: 2359139 - DNA, 25 bp, Homo sapien
gttccctcagcaacgggactggcac

SEQ ID NO: 2359140 - DNA, 25 bp, Homo sapien
tgagtctggccgtgaggaattagat

SEQ ID NO: 2359141 - DNA, 25 bp, Homo sapien
aaatatggtgtgagcatgattccac

SEQ ID NO: 2359142 - DNA, 25 bp, Homo sapien
tactgttctcgcaatcaggatgaag

SEQ ID NO: 2359143 - DNA, 25 bp, Homo sapien
gaactgaatggcaggcggtataaaa

SEQ ID NO: 2359144 - DNA, 25 bp, Homo sapien
ttgaaaatgatttgctgaaataagc

SEQ ID NO: 2359145 - DNA, 25 bp, Homo sapien
cttctccagtgttcactttgttctt

SEQ ID NO: 2359146 - DNA, 25 bp, Homo sapien
gaaaatgatttgctgaaataagcat

SEQ ID NO: 2359147 - DNA, 25 bp, Homo sapien
tctccagtgttcactttgttcttcc

SEQ ID NO: 2359148 - DNA, 25 bp, Homo sapien
gcaagaacattctttacgggctctt

SEQ ID NO: 2359149 - DNA, 25 bp, Homo sapien
aattctgccgttgtttccgctacca

SEQ ID NO: 2359150 - DNA, 25 bp, Homo sapien
tccatattgcttcctaattctgccg

SEQ ID NO: 2359151 - DNA, 25 bp, Homo sapien
gtttccgctaccactcaatgcaaga

SEQ ID NO: 2359152 - DNA, 25 bp, Homo sapien
ggtagatgacaagctgcctagtgca

SEQ ID NO: 2359153 - DNA, 25 bp, Homo sapien
tagttaaggcaattcaccagaaccc

SEQ ID NO: 2359154 - DNA, 25 bp, Homo sapien
tttgactggccaagattcatcctgc

SEQ ID NO: 2359155 - DNA, 25 bp, Homo sapien
tgaagtatttatccctcgacagaaa

SEQ ID NO: 2359156 - DNA, 25 bp, Homo sapien
ttctctggctctagggctgtgaata

SEQ ID NO: 2359157 - DNA, 25 bp, Homo sapien
gctaccaaaataccaacacgtttgc

SEQ ID NO: 2359158 - DNA, 25 bp, Homo sapien
gctctagggctgtgaatatctccca

SEQ ID NO: 2359159 - DNA, 25 bp, Homo sapien
ataccaacacgtttgccactttcct

SEQ ID NO: 2359160 - DNA, 25 bp, Homo sapien
caggctggccgggaaacaaatgtgc

SEQ ID NO: 2359161 - DNA, 25 bp, Homo sapien
tgccagctgccaaccatagggaagt

SEQ ID NO: 2359162 - DNA, 25 bp, Homo sapien
ccgtgaagatcatggagggctccct

SEQ ID NO: 2359163 - DNA, 25 bp, Homo sapien
ttatgtcagcttcaacggaggccca

SEQ ID NO: 2359164 - DNA, 25 bp, Homo sapien
taagaacaaaggacaatcatggttt

SEQ ID NO: 2359165 - DNA, 25 bp, Homo sapien
ggtaagaacaaaggacaatcatggt

SEQ ID NO: 2359166 - DNA, 25 bp, Homo sapien
tctacctggagctgaagcctatcct

SEQ ID NO: 2359167 - DNA, 25 bp, Homo sapien
tacctggagctgaagcctatcctca

SEQ ID NO: 2359168 - DNA, 25 bp, Homo sapien
tagatcacaccacttagctgtcatt

SEQ ID NO: 2359169 - DNA, 25 bp, Homo sapien
tcagttagatcacaccacttagctg

SEQ ID NO: 2359170 - DNA, 25 bp, Homo sapien
tgtcagttagatcacaccacttagc

SEQ ID NO: 2359171 - DNA, 25 bp, Homo sapien
gttagatcacaccacttagctgtca

SEQ ID NO: 2359172 - DNA, 25 bp, Homo sapien
cccatacgcactgcctggcaaaagt

SEQ ID NO: 2359173 - DNA, 25 bp, Homo sapien
actgcctggcaaaagttcttcccca

SEQ ID NO: 2359174 - DNA, 25 bp, Homo sapien
aagccaaaaccgaaatccccagctg

SEQ ID NO: 2359175 - DNA, 25 bp, Homo sapien
tgctttaacagaaggccaacgcagc

SEQ ID NO: 2359176 - DNA, 25 bp, Homo sapien
agtggacgcccaataaatgctattg

SEQ ID NO: 2359177 - DNA, 25 bp, Homo sapien
gctattgactgaatgttgtgcaggt

SEQ ID NO: 2359178 - DNA, 25 bp, Homo sapien
aatgctattgactgaatgttgtgca

SEQ ID NO: 2359179 - DNA, 25 bp, Homo sapien
accctgcacagtggacgcccaataa

SEQ ID NO: 2359180 - DNA, 25 bp, Homo sapien
cgcgaggggccaggaaccgagtggg

SEQ ID NO: 2359181 - DNA, 25 bp, Homo sapien
gcaccccgagcgggaggctgacggg

SEQ ID NO: 2359182 - DNA, 25 bp, Homo sapien
cagacgaagggcggcgcaccccgag

SEQ ID NO: 2359183 - DNA, 25 bp, Homo sapien
gctgccgggcggaaaccacccggca

SEQ ID NO: 2359184 - DNA, 25 bp, Homo sapien
ggtggcggtggagttcccgcagccc

SEQ ID NO: 2359185 - DNA, 25 bp, Homo sapien
tggcggtggagttcccgcagcccat

SEQ ID NO: 2359186 - DNA, 25 bp, Homo sapien
gtggcggtggagttcccgcagccca

SEQ ID NO: 2359187 - DNA, 25 bp, Homo sapien
gacacagatgcgtttttgcagctct

SEQ ID NO: 2359188 - DNA, 25 bp, Homo sapien
tgcagcgccttggttccgaggagat

SEQ ID NO: 2359189 - DNA, 25 bp, Homo sapien
ccactgcccgaaaagtcctgtcttg

SEQ ID NO: 2359190 - DNA, 25 bp, Homo sapien
ccggtcttcggcatcaaggcagaca

SEQ ID NO: 2359191 - DNA, 25 bp, Homo sapien
ttcctccacgctattcttcaaaccc

SEQ ID NO: 2359192 - DNA, 25 bp, Homo sapien
cctccacgctattcttcaaacccaa

SEQ ID NO: 2359193 - DNA, 25 bp, Homo sapien
caaataaagttccacttcctccacg

SEQ ID NO: 2359194 - DNA, 25 bp, Homo sapien
tcctccacgctattcttcaaaccca

SEQ ID NO: 2359195 - DNA, 25 bp, Homo sapien
tgagtgatgagtgacaggagcctct

SEQ ID NO: 2359196 - DNA, 25 bp, Homo sapien
tctcaggaaagtattatatgcagtt

SEQ ID NO: 2359197 - DNA, 25 bp, Homo sapien
tcatctcaccttggctctgtttagc

SEQ ID NO: 2359198 - DNA, 25 bp, Homo sapien
gaagtctcagttaattaaaaatgca

SEQ ID NO: 2359199 - DNA, 25 bp, Homo sapien
gggtgacctagtacaatccacagga

SEQ ID NO: 2359200 - DNA, 25 bp, Homo sapien
ccttgattgcaccaagctatgggca

SEQ ID NO: 2359201 - DNA, 25 bp, Homo sapien
cccaagggagatgcatggtgccacc

SEQ ID NO: 2359202 - DNA, 25 bp, Homo sapien
ggagtcggatccctatgccagtatt

SEQ ID NO: 2359203 - DNA, 25 bp, Homo sapien
gcctgctgtcatgttggtatcttac

SEQ ID NO: 2359204 - DNA, 25 bp, Homo sapien
taatgatcatgtgagtcagtcctcc

SEQ ID NO: 2359205 - DNA, 25 bp, Homo sapien
acaggacttggttccaactcctaca

SEQ ID NO: 2359206 - DNA, 25 bp, Homo sapien
cacccatgtgacaaaaacagctcat

SEQ ID NO: 2359207 - DNA, 25 bp, Homo sapien
ggctcatgggccttcagctatagac

SEQ ID NO: 2359208 - DNA, 25 bp, Homo sapien
actgcaccgggcctcaaattccaat

SEQ ID NO: 2359209 - DNA, 25 bp, Homo sapien
caccgggcctcaaattccaatctta

SEQ ID NO: 2359210 - DNA, 25 bp, Homo sapien
tgcaccgggcctcaaattccaatct

SEQ ID NO: 2359211 - DNA, 25 bp, Homo sapien
gcaccgggcctcaaattccaatctt

SEQ ID NO: 2359212 - DNA, 25 bp, Homo sapien
acatctttggctgctcctgcagggc

SEQ ID NO: 2359213 - DNA, 25 bp, Homo sapien
cacactgtattttggtccctagtag

SEQ ID NO: 2359214 - DNA, 25 bp, Homo sapien
gtgaactacttcaggacagatacat

SEQ ID NO: 2359215 - DNA, 25 bp, Homo sapien
tggtccctagtagacagtgaactac

SEQ ID NO: 2359216 - DNA, 25 bp, Homo sapien
ctacttcaggacagatacatcattt

SEQ ID NO: 2359217 - DNA, 25 bp, Homo sapien
tttggccatatggtaaggtggggct

SEQ ID NO: 2359218 - DNA, 25 bp, Homo sapien
gtaaggtggggctgatgatactgat

SEQ ID NO: 2359219 - DNA, 25 bp, Homo sapien
ccatatggtaaggtggggctgatga

SEQ ID NO: 2359220 - DNA, 25 bp, Homo sapien
tccgtggggaatcacccctcttctg

SEQ ID NO: 2359221 - DNA, 25 bp, Homo sapien
tcaagacttctttaagaacacgaaa

SEQ ID NO: 2359222 - DNA, 25 bp, Homo sapien
cattgtttacattgagtagctatgg

SEQ ID NO: 2359223 - DNA, 25 bp, Homo sapien
tctcagtaagattcactttacatgt

SEQ ID NO: 2359224 - DNA, 25 bp, Homo sapien
caaattgccaatgggttttatgtca

SEQ ID NO: 2359225 - DNA, 25 bp, Homo sapien
taatggaaccatgtcatgatcaagg

SEQ ID NO: 2359226 - DNA, 25 bp, Homo sapien
tctgggttgtataaaatagctatcc

SEQ ID NO: 2359227 - DNA, 25 bp, Homo sapien
tatgagatagcagccagccatttga

SEQ ID NO: 2359228 - DNA, 25 bp, Homo sapien
tagctatcccaagtgacctaaagat

SEQ ID NO: 2359229 - DNA, 25 bp, Homo sapien
taagggatcaggtgccataaaccaa

SEQ ID NO: 2359230 - DNA, 25 bp, Homo sapien
cacaattcaggaagcaatgcccaga

SEQ ID NO: 2359231 - DNA, 25 bp, Homo sapien
gtgaattctaccagtttgcctccca

SEQ ID NO: 2359232 - DNA, 25 bp, Homo sapien
gagtcaaacgttggtgccgacgcag

SEQ ID NO: 2359233 - DNA, 25 bp, Homo sapien
caggagctctccaatttttatcatc

SEQ ID NO: 2359234 - DNA, 25 bp, Homo sapien
gagctctccaatttttatcatccca

SEQ ID NO: 2359235 - DNA, 25 bp, Homo sapien
tatcatcccactcaagaaaagtcag

SEQ ID NO: 2359236 - DNA, 25 bp, Homo sapien
cggccaggagctctccaatttttat

SEQ ID NO: 2359237 - DNA, 25 bp, Homo sapien
tgtcatcttctgttacggattcttc

SEQ ID NO: 2359238 - DNA, 25 bp, Homo sapien
atcttctgttacggattcttctgtt

SEQ ID NO: 2359239 - DNA, 25 bp, Homo sapien
tgttaaatccatgaggtatggccaa

SEQ ID NO: 2359240 - DNA, 25 bp, Homo sapien
gtcatccagttagggagaagagcac

SEQ ID NO: 2359241 - DNA, 25 bp, Homo sapien
gcacacccaaaggtcataggatgaa

SEQ ID NO: 2359242 - DNA, 25 bp, Homo sapien
taggatgaaaattagcacacgccac

SEQ ID NO: 2359243 - DNA, 25 bp, Homo sapien
attgacagcttcagatggtaggcca

SEQ ID NO: 2359244 - DNA, 25 bp, Homo sapien
gatggtaggccaacatatactcctc

SEQ ID NO: 2359245 - DNA, 25 bp, Homo sapien
cttcagatggtaggccaacatatac

SEQ ID NO: 2359246 - DNA, 25 bp, Homo sapien
cagcttcagatggtaggccaacata

SEQ ID NO: 2359247 - DNA, 25 bp, Homo sapien
ccgtctttgtttgactggacaccat

SEQ ID NO: 2359248 - DNA, 25 bp, Homo sapien
tccgaaccgtctttgtttgactgga

SEQ ID NO: 2359249 - DNA, 25 bp, Homo sapien
cgaaccgtctttgtttgactggaca

SEQ ID NO: 2359250 - DNA, 25 bp, Homo sapien
gaaccgtctttgtttgactggacac

SEQ ID NO: 2359251 - DNA, 25 bp, Homo sapien
tcaagtcctaggccctcaaagattt

SEQ ID NO: 2359252 - DNA, 25 bp, Homo sapien
tttctcaagtcctaggccctcaaag

SEQ ID NO: 2359253 - DNA, 25 bp, Homo sapien
catttctcaagtcctaggccctcaa

SEQ ID NO: 2359254 - DNA, 25 bp, Homo sapien
tctcaagtcctaggccctcaaagat

SEQ ID NO: 2359255 - DNA, 25 bp, Homo sapien
tagagacagctaaacatcgcatgtt

SEQ ID NO: 2359256 - DNA, 25 bp, Homo sapien
tcagataattcaaaggaggctacag

SEQ ID NO: 2359257 - DNA, 25 bp, Homo sapien
tgctcaccaggattatgctaaagtg

SEQ ID NO: 2359258 - DNA, 25 bp, Homo sapien
cgataaatttacagccatgaacagt

SEQ ID NO: 2359259 - DNA, 25 bp, Homo sapien
tagtctgcacatctaagtgggcata

SEQ ID NO: 2359260 - DNA, 25 bp, Homo sapien
taagcaatgcccaaacctagctgca

SEQ ID NO: 2359261 - DNA, 25 bp, Homo sapien
gcccctctgtgctggaagtagtctg

SEQ ID NO: 2359262 - DNA, 25 bp, Homo sapien
gagactgttcggtcacaattccatc

SEQ ID NO: 2359263 - DNA, 25 bp, Homo sapien
ccacaacaatatgtacccagggttt

SEQ ID NO: 2359264 - DNA, 25 bp, Homo sapien
gaaagttccataaacaagtgtactg

SEQ ID NO: 2359265 - DNA, 25 bp, Homo sapien
tgtgcacattacaacgtcccacgga

SEQ ID NO: 2359266 - DNA, 25 bp, Homo sapien
acttgtctttcgtaggtggccacag

SEQ ID NO: 2359267 - DNA, 25 bp, Homo sapien
tggaaagagatagttgtaagaatcc

SEQ ID NO: 2359268 - DNA, 25 bp, Homo sapien
ggaaatgttgtcaaaatgcagcggc

SEQ ID NO: 2359269 - DNA, 25 bp, Homo sapien
tgggcaacaacagcctccatgacag

SEQ ID NO: 2359270 - DNA, 25 bp, Homo sapien
gtatcagtgaaaagacatgacctcc

SEQ ID NO: 2359271 - DNA, 25 bp, Homo sapien
gcaatactaagtagatacacaagtc

SEQ ID NO: 2359272 - DNA, 25 bp, Homo sapien
tgtagttgcacatgcctttcacgaa

SEQ ID NO: 2359273 - DNA, 25 bp, Homo sapien
ctaaccatccatcgcaagtccttga

SEQ ID NO: 2359274 - DNA, 25 bp, Homo sapien
gatgtagaatgagcaacccaaacag

SEQ ID NO: 2359275 - DNA, 25 bp, Homo sapien
tgggaagtcttccttcgtccaccat

SEQ ID NO: 2359276 - DNA, 25 bp, Homo sapien
cctgattctgtgttaaaaggtgaat

SEQ ID NO: 2359277 - DNA, 25 bp, Homo sapien
ggccaaagcgtgcaggcttggtctc

SEQ ID NO: 2359278 - DNA, 25 bp, Homo sapien
gtctgggccaaagcgtgcaggcttg

SEQ ID NO: 2359279 - DNA, 25 bp, Homo sapien
gatggtctgggccaaagcgtgcagg

SEQ ID NO: 2359280 - DNA, 25 bp, Homo sapien
tggtggttgttcactcccgcgagcc

SEQ ID NO: 2359281 - DNA, 25 bp, Homo sapien
actcccgcgagcctgaccctgtgtt

SEQ ID NO: 2359282 - DNA, 25 bp, Homo sapien
ggcttcccccaacaagccggagata

SEQ ID NO: 2359283 - DNA, 25 bp, Homo sapien
ccccaacaagccggagataaatggt

SEQ ID NO: 2359284 - DNA, 25 bp, Homo sapien
tctaccgcagtttccttaggtgtca

SEQ ID NO: 2359285 - DNA, 25 bp, Homo sapien
ttccttaggtgtcatggctgcctca

SEQ ID NO: 2359286 - DNA, 25 bp, Homo sapien
atggctgcctcactccaaggcaagg

SEQ ID NO: 2359287 - DNA, 25 bp, Homo sapien
gggaacatgagctttctaccgcagt

SEQ ID NO: 2359288 - DNA, 25 bp, Homo sapien
aaaactctgttcagctaataaccag

SEQ ID NO: 2359289 - DNA, 25 bp, Homo sapien
ttctgttcggtaacaatggcagctc

SEQ ID NO: 2359290 - DNA, 25 bp, Homo sapien
tggcagctctgaaagcgtgtatttt

SEQ ID NO: 2359291 - DNA, 25 bp, Homo sapien
ctgaagaaggtaattgaaagggtgc

SEQ ID NO: 2359292 - DNA, 25 bp, Homo sapien
taatcttcacgacactctcttcact

SEQ ID NO: 2359293 - DNA, 25 bp, Homo sapien
ttcacgacactctcttcacttaaat

SEQ ID NO: 2359294 - DNA, 25 bp, Homo sapien
caaataatcttcacgacactctctt

SEQ ID NO: 2359295 - DNA, 25 bp, Homo sapien
tacaaataatcttcacgacactctc

SEQ ID NO: 2359296 - DNA, 25 bp, Homo sapien
gaccccagtacactttccaagtgcc

SEQ ID NO: 2359297 - DNA, 25 bp, Homo sapien
tttccaagtgccagtaggccccatc

SEQ ID NO: 2359298 - DNA, 25 bp, Homo sapien
ctaagaccccagtacactttccaag

SEQ ID NO: 2359299 - DNA, 25 bp, Homo sapien
ctttccaagtgccagtaggccccat

SEQ ID NO: 2359300 - DNA, 25 bp, Homo sapien
agatttgtatagggttttgttgttg

SEQ ID NO: 2359301 - DNA, 25 bp, Homo sapien
gatttgagctagcaaggctgggact

SEQ ID NO: 2359302 - DNA, 25 bp, Homo sapien
tggagactttctggcaccccttgaa

SEQ ID NO: 2359303 - DNA, 25 bp, Homo sapien
gtccattaacaggaggtagccacgg

SEQ ID NO: 2359304 - DNA, 25 bp, Homo sapien
tcagcaggatagtaaagagggcatt

SEQ ID NO: 2359305 - DNA, 25 bp, Homo sapien
gcattcagctcttcgtctgtggaat

SEQ ID NO: 2359306 - DNA, 25 bp, Homo sapien
ggtcgcattcagctcttcgtctgtg

SEQ ID NO: 2359307 - DNA, 25 bp, Homo sapien
ttctggggccaactgtctatataat

SEQ ID NO: 2359308 - DNA, 25 bp, Homo sapien
ctggtcgcattcagctcttcgtctg

SEQ ID NO: 2359309 - DNA, 25 bp, Homo sapien
gaatggcagccagagactgcgctgt

SEQ ID NO: 2359310 - DNA, 25 bp, Homo sapien
taacatcctagaggcaacaagcagt

SEQ ID NO: 2359311 - DNA, 25 bp, Homo sapien
ccttagcaccaccaagtcttgagga

SEQ ID NO: 2359312 - DNA, 25 bp, Homo sapien
gatgtgattagcctctgcaatagca

SEQ ID NO: 2359313 - DNA, 25 bp, Homo sapien
gggtgaagtatcgagttcatagaag

SEQ ID NO: 2359314 - DNA, 25 bp, Homo sapien
caggtattctatttttgaggttcca

SEQ ID NO: 2359315 - DNA, 25 bp, Homo sapien
tataccaattttgcattcttcttca

SEQ ID NO: 2359316 - DNA, 25 bp, Homo sapien
tcatagaagccctcaacaggtattc

SEQ ID NO: 2359317 - DNA, 25 bp, Homo sapien
gtattgagaaatacacctcccaggt

SEQ ID NO: 2359318 - DNA, 25 bp, Homo sapien
agtgcattcgcctcggtattgagaa

SEQ ID NO: 2359319 - DNA, 25 bp, Homo sapien
ctcctatagatgagcctgtgatggc

SEQ ID NO: 2359320 - DNA, 25 bp, Homo sapien
cacatacccgttggctcctatagat

SEQ ID NO: 2359321 - DNA, 25 bp, Homo sapien
cagagaaacacagggtactagtctt

SEQ ID NO: 2359322 - DNA, 25 bp, Homo sapien
gcagagaaacacagggtactagtct

SEQ ID NO: 2359323 - DNA, 25 bp, Homo sapien
ggcagagaaacacagggtactagtc

SEQ ID NO: 2359324 - DNA, 25 bp, Homo sapien
gagaaacacagggtactagtctttc

SEQ ID NO: 2359325 - DNA, 25 bp, Homo sapien
tgcagcaatgctccagggcaatttc

SEQ ID NO: 2359326 - DNA, 25 bp, Homo sapien
ccacttggaaaggaaggattgctcc

SEQ ID NO: 2359327 - DNA, 25 bp, Homo sapien
gggcaatttctctcaataactcaga

SEQ ID NO: 2359328 - DNA, 25 bp, Homo sapien
ggattgctcctgtgagcagacgttt

SEQ ID NO: 2359329 - DNA, 25 bp, Homo sapien
ttcacttggttgtccagtgaccagg

SEQ ID NO: 2359330 - DNA, 25 bp, Homo sapien
gctttcacttggttgtccagtgacc

SEQ ID NO: 2359331 - DNA, 25 bp, Homo sapien
acttggttgtccagtgaccaggaac

SEQ ID NO: 2359332 - DNA, 25 bp, Homo sapien
actctgctttcacttggttgtccag

SEQ ID NO: 2359333 - DNA, 25 bp, Homo sapien
tctttcactcccaaaaccagaggaa

SEQ ID NO: 2359334 - DNA, 25 bp, Homo sapien
tgtgtgttgcaaagtccatggctgc

SEQ ID NO: 2359335 - DNA, 25 bp, Homo sapien
gatgttcttataagtcccgccttgg

SEQ ID NO: 2359336 - DNA, 25 bp, Homo sapien
cttgtgatcatgttcccagggactt

SEQ ID NO: 2359337 - DNA, 25 bp, Homo sapien
gatgaaggtcaagtattagaggctg

SEQ ID NO: 2359338 - DNA, 25 bp, Homo sapien
tatgcccaaggagcaaaatttgtcc

SEQ ID NO: 2359339 - DNA, 25 bp, Homo sapien
cattcattgcaaaggtggtgtctag

SEQ ID NO: 2359340 - DNA, 25 bp, Homo sapien
aaatttgtccgtggccaccaagcca

SEQ ID NO: 2359341 - DNA, 25 bp, Homo sapien
cagcagacattaaggaaggcactcc

SEQ ID NO: 2359342 - DNA, 25 bp, Homo sapien
cagcggagtagctaggcttgcagta

SEQ ID NO: 2359343 - DNA, 25 bp, Homo sapien
gtagcccctggtgagcatcggtgcc

SEQ ID NO: 2359344 - DNA, 25 bp, Homo sapien
ggtgccccatcgtggctgactgtgt

SEQ ID NO: 2359345 - DNA, 25 bp, Homo sapien
ctttgctttctgagcgggactccca

SEQ ID NO: 2359346 - DNA, 25 bp, Homo sapien
tttgctttctgagcgggactcccag

SEQ ID NO: 2359347 - DNA, 25 bp, Homo sapien
tctgagcgggactcccagaagaaca

SEQ ID NO: 2359348 - DNA, 25 bp, Homo sapien
ggactcccagaagaacatgttccat

SEQ ID NO: 2359349 - DNA, 25 bp, Homo sapien
agagtcttatgcctctttgcaacca

SEQ ID NO: 2359350 - DNA, 25 bp, Homo sapien
cactgaacttgctaataactgtaca

SEQ ID NO: 2359351 - DNA, 25 bp, Homo sapien
ttgaagagtcttatgcctctttgca

SEQ ID NO: 2359352 - DNA, 25 bp, Homo sapien
tgtgaggtcactgaacttgctaata

SEQ ID NO: 2359353 - DNA, 25 bp, Homo sapien
tatttgagaggagaacctactttaa

SEQ ID NO: 2359354 - DNA, 25 bp, Homo sapien
ccgatagcatgaggcaaagaaggac

SEQ ID NO: 2359355 - DNA, 25 bp, Homo sapien
gccacgtttgccgatagcatgaggc

SEQ ID NO: 2359356 - DNA, 25 bp, Homo sapien
aaaatatttgagaggagaacctact

SEQ ID NO: 2359357 - DNA, 25 bp, Homo sapien
ttagcataacatcagtgtaagtgat

SEQ ID NO: 2359358 - DNA, 25 bp, Homo sapien
gccaggaactcttttagcataacat

SEQ ID NO: 2359359 - DNA, 25 bp, Homo sapien
tcttttagcataacatcagtgtaag

SEQ ID NO: 2359360 - DNA, 25 bp, Homo sapien
taacatcagtgtaagtgatagaaat

SEQ ID NO: 2359361 - DNA, 25 bp, Homo sapien
aatacaagcaaaacagaaagatgac

SEQ ID NO: 2359362 - DNA, 25 bp, Homo sapien
ttaaatacaagcaaaacagaaagat

SEQ ID NO: 2359363 - DNA, 25 bp, Homo sapien
taaatacaagcaaaacagaaagatg

SEQ ID NO: 2359364 - DNA, 25 bp, Homo sapien
aaatacaagcaaaacagaaagatga

SEQ ID NO: 2359365 - DNA, 25 bp, Homo sapien
tgccctccaaggatcgacacagtct

SEQ ID NO: 2359366 - DNA, 25 bp, Homo sapien
tcagtggtggacagtatggtttctc

SEQ ID NO: 2359367 - DNA, 25 bp, Homo sapien
gccaggtgccatctttgtgatcaga

SEQ ID NO: 2359368 - DNA, 25 bp, Homo sapien
tgtattcccgcaagctctctgcctg

SEQ ID NO: 2359369 - DNA, 25 bp, Homo sapien
cacactgaagtctccgtatccctct

SEQ ID NO: 2359370 - DNA, 25 bp, Homo sapien
cgtatccctctgctttattaattct

SEQ ID NO: 2359371 - DNA, 25 bp, Homo sapien
ccgtatccctctgctttattaattc

SEQ ID NO: 2359372 - DNA, 25 bp, Homo sapien
cactgaagtctccgtatccctctgc

SEQ ID NO: 2359373 - DNA, 25 bp, Homo sapien
ctctccctcctgtaccctgggctcc

SEQ ID NO: 2359374 - DNA, 25 bp, Homo sapien
ctccctcctgtaccctgggctccat

SEQ ID NO: 2359375 - DNA, 25 bp, Homo sapien
tctccctcctgtaccctgggctcca

SEQ ID NO: 2359376 - DNA, 25 bp, Homo sapien
gagggaaacctgcaggagctgcagt

SEQ ID NO: 2359377 - DNA, 25 bp, Homo sapien
ctggggagggaaacctgcaggagct

SEQ ID NO: 2359378 - DNA, 25 bp, Homo sapien
tggggagggaaacctgcaggagctg

SEQ ID NO: 2359379 - DNA, 25 bp, Homo sapien
ggaaacctgcaggagctgcagtcat

SEQ ID NO: 2359380 - DNA, 25 bp, Homo sapien
gacacagacacactagaggacgctt

SEQ ID NO: 2359381 - DNA, 25 bp, Homo sapien
agacacagacacactagaggacgct

SEQ ID NO: 2359382 - DNA, 25 bp, Homo sapien
ttcttctaaatacacccgacacagt

SEQ ID NO: 2359383 - DNA, 25 bp, Homo sapien
cttctaaatacacccgacacagttt

SEQ ID NO: 2359384 - DNA, 25 bp, Homo sapien
gatggattcatgaattcttctaaat

SEQ ID NO: 2359385 - DNA, 25 bp, Homo sapien
aattcttctaaatacacccgacaca

SEQ ID NO: 2359386 - DNA, 25 bp, Homo sapien
taccaggtctttatcgtgcttacag

SEQ ID NO: 2359387 - DNA, 25 bp, Homo sapien
tccaaaaggaagtatctcttgatca

SEQ ID NO: 2359388 - DNA, 25 bp, Homo sapien
ggtctttatcgtgcttacagagaag

SEQ ID NO: 2359389 - DNA, 25 bp, Homo sapien
gatcatttggttcattaccaggtct

SEQ ID NO: 2359390 - DNA, 25 bp, Homo sapien
tgcagctccactaagcccattgcac

SEQ ID NO: 2359391 - DNA, 25 bp, Homo sapien
gaagtgccctttttccatcgccttc

SEQ ID NO: 2359392 - DNA, 25 bp, Homo sapien
ggcccacagaccatcgcccatgctg

SEQ ID NO: 2359393 - DNA, 25 bp, Homo sapien
cacattccagtggagcttatccata

SEQ ID NO: 2359394 - DNA, 25 bp, Homo sapien
tcatctacaatttccagcatcagtt

SEQ ID NO: 2359395 - DNA, 25 bp, Homo sapien
tacatacaccacaccctttaatgca

SEQ ID NO: 2359396 - DNA, 25 bp, Homo sapien
tgatgtggagccaaggcttttcttt

SEQ ID NO: 2359397 - DNA, 25 bp, Homo sapien
caccactcttttgatgtggagccaa

SEQ ID NO: 2359398 - DNA, 25 bp, Homo sapien
tccttgtctagtgactgtttagggt

SEQ ID NO: 2359399 - DNA, 25 bp, Homo sapien
cttgtctagtgactgtttagggttc

SEQ ID NO: 2359400 - DNA, 25 bp, Homo sapien
attccttgtctagtgactgtttagg

SEQ ID NO: 2359401 - DNA, 25 bp, Homo sapien
gtctagtgactgtttagggttccaa

SEQ ID NO: 2359402 - DNA, 25 bp, Homo sapien
tgacatagagcgtctaagaatgtgc

SEQ ID NO: 2359403 - DNA, 25 bp, Homo sapien
gtctaagaatgtgcggttgctccag

SEQ ID NO: 2359404 - DNA, 25 bp, Homo sapien
agagcgtctaagaatgtgcggttgc

SEQ ID NO: 2359405 - DNA, 25 bp, Homo sapien
ttccatgacatagagcgtctaagaa

SEQ ID NO: 2359406 - DNA, 25 bp, Homo sapien
tcttcctgtccaacaaagacaccat

SEQ ID NO: 2359407 - DNA, 25 bp, Homo sapien
ttcttcctgtccaacaaagacacca

SEQ ID NO: 2359408 - DNA, 25 bp, Homo sapien
tgccatggtgatccgggcagagcct

SEQ ID NO: 2359409 - DNA, 25 bp, Homo sapien
ggcaggagtggtgacctaatgccat

SEQ ID NO: 2359410 - DNA, 25 bp, Homo sapien
gagtggtgacctaatgccatggtga

SEQ ID NO: 2359411 - DNA, 25 bp, Homo sapien
ggcagagcctttcatccactgagct

SEQ ID NO: 2359412 - DNA, 25 bp, Homo sapien
ctggcagtaggccttaatgtttcta

SEQ ID NO: 2359413 - DNA, 25 bp, Homo sapien
gcagtaggccttaatgtttctacca

SEQ ID NO: 2359414 - DNA, 25 bp, Homo sapien
tcactggcagtaggccttaatgttt

SEQ ID NO: 2359415 - DNA, 25 bp, Homo sapien
ctggcccatgacagcatctgttaac

SEQ ID NO: 2359416 - DNA, 25 bp, Homo sapien
ggagcacctattgtgtactgggccc

SEQ ID NO: 2359417 - DNA, 25 bp, Homo sapien
gaagctgccccatgtagtcagacta

SEQ ID NO: 2359418 - DNA, 25 bp, Homo sapien
agtcagactacagatacctccccag

SEQ ID NO: 2359419 - DNA, 25 bp, Homo sapien
catttcagagtgttgccacgtgggc

SEQ ID NO: 2359420 - DNA, 25 bp, Homo sapien
agaagccactggatcgtcaatatgc

SEQ ID NO: 2359421 - DNA, 25 bp, Homo sapien
ggctccctggtgatcacgaaaagtt

SEQ ID NO: 2359422 - DNA, 25 bp, Homo sapien
tgcttgacacaaactcggaactttt

SEQ ID NO: 2359423 - DNA, 25 bp, Homo sapien
tcccagtcacaagaaagaagccact

SEQ ID NO: 2359424 - DNA, 25 bp, Homo sapien
cagtggccatctgggaagcattcag

SEQ ID NO: 2359425 - DNA, 25 bp, Homo sapien
ctgtgtttaggccagtggccatctg

SEQ ID NO: 2359426 - DNA, 25 bp, Homo sapien
tcagagccttgaggccactgagaaa

SEQ ID NO: 2359427 - DNA, 25 bp, Homo sapien
tctgggaagcattcagagccttgag

SEQ ID NO: 2359428 - DNA, 25 bp, Homo sapien
tttggcatcattagaagcacctcct

SEQ ID NO: 2359429 - DNA, 25 bp, Homo sapien
ctttggcatcattagaagcacctcc

SEQ ID NO: 2359430 - DNA, 25 bp, Homo sapien
cttttgacatcacttctctgagaga

SEQ ID NO: 2359431 - DNA, 25 bp, Homo sapien
aactaactatgactcccaactcagc

SEQ ID NO: 2359432 - DNA, 25 bp, Homo sapien
ctcccaggagttccctcatgcagcc

SEQ ID NO: 2359433 - DNA, 25 bp, Homo sapien
atgcagcccctatctgaaggactct

SEQ ID NO: 2359434 - DNA, 25 bp, Homo sapien
tgagacaagtggtaggggaattaaa

SEQ ID NO: 2359435 - DNA, 25 bp, Homo sapien
tgatttaatagaccccaacacgacg

SEQ ID NO: 2359436 - DNA, 25 bp, Homo sapien
caggtacctatttggaatgcactca

SEQ ID NO: 2359437 - DNA, 25 bp, Homo sapien
gtttctatgtcactttgggcaccca

SEQ ID NO: 2359438 - DNA, 25 bp, Homo sapien
gatggaaaggatgctaacgcagaca

SEQ ID NO: 2359439 - DNA, 25 bp, Homo sapien
aagagctgagttctagaattttacc

SEQ ID NO: 2359440 - DNA, 25 bp, Homo sapien
catataatgcttacgcacaaagcca

SEQ ID NO: 2359441 - DNA, 25 bp, Homo sapien
caagatagttaaaaaacctcagtgg

SEQ ID NO: 2359442 - DNA, 25 bp, Homo sapien
tggacaacctaagtcatttgacaag

SEQ ID NO: 2359443 - DNA, 25 bp, Homo sapien
tcctctccagcttcactcacctctg

SEQ ID NO: 2359444 - DNA, 25 bp, Homo sapien
cagcttcactcacctctgccctggt

SEQ ID NO: 2359445 - DNA, 25 bp, Homo sapien
cctggtgagtctgagcctgagactc

SEQ ID NO: 2359446 - DNA, 25 bp, Homo sapien
ttcactcacctctgccctggtgagt

SEQ ID NO: 2359447 - DNA, 25 bp, Homo sapien
gtggagagaggctgaaactttggga

SEQ ID NO: 2359448 - DNA, 25 bp, Homo sapien
tggagagaggctgaaactttgggaa

SEQ ID NO: 2359449 - DNA, 25 bp, Homo sapien
ggagagaggctgaaactttgggaac

SEQ ID NO: 2359450 - DNA, 25 bp, Homo sapien
gcccaacaaaatgccagaaggctgt

SEQ ID NO: 2359451 - DNA, 25 bp, Homo sapien
ctgccaaggaggagcgactgtcttt

SEQ ID NO: 2359452 - DNA, 25 bp, Homo sapien
caagtaggtcacattgagttgccca

SEQ ID NO: 2359453 - DNA, 25 bp, Homo sapien
tatgcctgctggacagtcatcgtgg

SEQ ID NO: 2359454 - DNA, 25 bp, Homo sapien
ctccaagctctttcagcaattcaga

SEQ ID NO: 2359455 - DNA, 25 bp, Homo sapien
ggagagaatccagagtagaaaggct

SEQ ID NO: 2359456 - DNA, 25 bp, Homo sapien
gtacataatcatgtccttttgtttc

SEQ ID NO: 2359457 - DNA, 25 bp, Homo sapien
catctggcgttcctcacacagctga

SEQ ID NO: 2359458 - DNA, 25 bp, Homo sapien
gcttgggagctaccagagatactgc

SEQ ID NO: 2359459 - DNA, 25 bp, Homo sapien
caaaggaaaggcgagctgaagcaga

SEQ ID NO: 2359460 - DNA, 25 bp, Homo sapien
gatgctttctggtgactgcggccac

SEQ ID NO: 2359461 - DNA, 25 bp, Homo sapien
gaagcagaagccaagtcgcagagtg

SEQ ID NO: 2359462 - DNA, 25 bp, Homo sapien
tactgccttcgataattccaaaagc

SEQ ID NO: 2359463 - DNA, 25 bp, Homo sapien
cagaggaagatccatcaagactttc

SEQ ID NO: 2359464 - DNA, 25 bp, Homo sapien
gactttcaagtgtgcaggaattact

SEQ ID NO: 2359465 - DNA, 25 bp, Homo sapien
caaaagcagtattatgacacctctc

SEQ ID NO: 2359466 - DNA, 25 bp, Homo sapien
ctgcttggatgaagtgaggtaggat

SEQ ID NO: 2359467 - DNA, 25 bp, Homo sapien
ctggggctgaggaaatcaaagaagc

SEQ ID NO: 2359468 - DNA, 25 bp, Homo sapien
ggatgaagtgaggtaggattttgcc

SEQ ID NO: 2359469 - DNA, 25 bp, Homo sapien
aatcaaagaagcctgcttggatgaa

SEQ ID NO: 2359470 - DNA, 25 bp, Homo sapien
ctctgctctgcttccacacttaggg

SEQ ID NO: 2359471 - DNA, 25 bp, Homo sapien
ggattttagagatctccccgctacg

SEQ ID NO: 2359472 - DNA, 25 bp, Homo sapien
tgcttgaaggctgacaagacctggg

SEQ ID NO: 2359473 - DNA, 25 bp, Homo sapien
tctgagatgcactgagcgatttggc

SEQ ID NO: 2359474 - DNA, 25 bp, Homo sapien
tgagtcgttctcacataagtgagcc

SEQ ID NO: 2359475 - DNA, 25 bp, Homo sapien
tcgttctcacataagtgagccttac

SEQ ID NO: 2359476 - DNA, 25 bp, Homo sapien
tcagagctgagtcgttctcacataa

SEQ ID NO: 2359477 - DNA, 25 bp, Homo sapien
gagctgagtcgttctcacataagtg

SEQ ID NO: 2359478 - DNA, 25 bp, Homo sapien
tctaatccttctgctactgccttca

SEQ ID NO: 2359479 - DNA, 25 bp, Homo sapien
tttctaatccttctgctactgcctt

SEQ ID NO: 2359480 - DNA, 25 bp, Homo sapien
ttctaatccttctgctactgccttc

SEQ ID NO: 2359481 - DNA, 25 bp, Homo sapien
gctcagccctcaaagcatctggata

SEQ ID NO: 2359482 - DNA, 25 bp, Homo sapien
catcagagggattgcctgcatctct

SEQ ID NO: 2359483 - DNA, 25 bp, Homo sapien
tcatctgtgaccgtagaggggcagc

SEQ ID NO: 2359484 - DNA, 25 bp, Homo sapien
ctggatacatcagagggattgcctg

SEQ ID NO: 2359485 - DNA, 25 bp, Homo sapien
gaggagtgtacattctcccgcaaag

SEQ ID NO: 2359486 - DNA, 25 bp, Homo sapien
gagtgtacattctcccgcaaagctg

SEQ ID NO: 2359487 - DNA, 25 bp, Homo sapien
attctcccgcaaagctgcttcactg

SEQ ID NO: 2359488 - DNA, 25 bp, Homo sapien
gtggtggaggagtgtacattctccc

SEQ ID NO: 2359489 - DNA, 25 bp, Homo sapien
tcgatcgctctctgtctgaggaaga

SEQ ID NO: 2359490 - DNA, 25 bp, Homo sapien
tcgctctctgtctgaggaagatctc

SEQ ID NO: 2359491 - DNA, 25 bp, Homo sapien
cttcgatcgctctctgtctgaggaa

SEQ ID NO: 2359492 - DNA, 25 bp, Homo sapien
tctctgtctgaggaagatctctcat

SEQ ID NO: 2359493 - DNA, 25 bp, Homo sapien
ggctattggtttctggccgcatggc

SEQ ID NO: 2359494 - DNA, 25 bp, Homo sapien
tagaaaccgtaacgatgatttgtaa

SEQ ID NO: 2359495 - DNA, 25 bp, Homo sapien
ctcttcttctgggatttagaaaccg

SEQ ID NO: 2359496 - DNA, 25 bp, Homo sapien
tttgtaaatcttgagtgacgttggc

SEQ ID NO: 2359497 - DNA, 25 bp, Homo sapien
tcagcaaaatgggcaggctcatgaa

SEQ ID NO: 2359498 - DNA, 25 bp, Homo sapien
aaaatgggcaggctcatgaaggctc

SEQ ID NO: 2359499 - DNA, 25 bp, Homo sapien
aaatgggcaggctcatgaaggctcc

SEQ ID NO: 2359500 - DNA, 25 bp, Homo sapien
gcaaaatgggcaggctcatgaaggc

SEQ ID NO: 2359501 - DNA, 25 bp, Homo sapien
caagctaccgctgtatgcttctgtt

SEQ ID NO: 2359502 - DNA, 25 bp, Homo sapien
gaaattttgttcaagctaccgctgt

SEQ ID NO: 2359503 - DNA, 25 bp, Homo sapien
gaggagcttgtacttccggtctctc

SEQ ID NO: 2359504 - DNA, 25 bp, Homo sapien
tctagacggcggcaactcagataag

SEQ ID NO: 2359505 - DNA, 25 bp, Homo sapien
ggaaactggatatccagtgaggaga

SEQ ID NO: 2359506 - DNA, 25 bp, Homo sapien
ctggaaactggatatccagtgagga

SEQ ID NO: 2359507 - DNA, 25 bp, Homo sapien
gaaactggatatccagtgaggagag

SEQ ID NO: 2359508 - DNA, 25 bp, Homo sapien
aactggatatccagtgaggagagga

SEQ ID NO: 2359509 - DNA, 25 bp, Homo sapien
tctgcctgagagcatctgaataagc

SEQ ID NO: 2359510 - DNA, 25 bp, Homo sapien
ccagagtggctgtctaaacacccag

SEQ ID NO: 2359511 - DNA, 25 bp, Homo sapien
tgatagctgatagcgggagatgcca

SEQ ID NO: 2359512 - DNA, 25 bp, Homo sapien
catccagggcaaaggtattgagctc

SEQ ID NO: 2359513 - DNA, 25 bp, Homo sapien
ctaccagtggatggaacctcaggcc

SEQ ID NO: 2359514 - DNA, 25 bp, Homo sapien
ccctccctgcatgggaagtctttgg

SEQ ID NO: 2359515 - DNA, 25 bp, Homo sapien
aggccagtttgcttcccaccacaca

SEQ ID NO: 2359516 - DNA, 25 bp, Homo sapien
aaaggggtatctccattccaaagca

SEQ ID NO: 2359517 - DNA, 25 bp, Homo sapien
caaggcggacttggctgctagacta

SEQ ID NO: 2359518 - DNA, 25 bp, Homo sapien
tcagcagagaaatcacggcaggcaa

SEQ ID NO: 2359519 - DNA, 25 bp, Homo sapien
tcaagatgtccataacagaggtcac

SEQ ID NO: 2359520 - DNA, 25 bp, Homo sapien
tttgtccaaccagcaaaagagggat

SEQ ID NO: 2359521 - DNA, 25 bp, Homo sapien
gtggctttgattccggagaactgtt

SEQ ID NO: 2359522 - DNA, 25 bp, Homo sapien
tgatagtggctttgattccggagaa

SEQ ID NO: 2359523 - DNA, 25 bp, Homo sapien
ctttgattccggagaactgtttgag

SEQ ID NO: 2359524 - DNA, 25 bp, Homo sapien
tagtggctttgattccggagaactg

SEQ ID NO: 2359525 - DNA, 25 bp, Homo sapien
gacagcctcacacatgtgattctgg

SEQ ID NO: 2359526 - DNA, 25 bp, Homo sapien
tggctgggcactgtaccaaaccagg

SEQ ID NO: 2359527 - DNA, 25 bp, Homo sapien
caaacctggaggacaacgctgtgtc

SEQ ID NO: 2359528 - DNA, 25 bp, Homo sapien
gaggacaacgctgtgtccgtggcct

SEQ ID NO: 2359529 - DNA, 25 bp, Homo sapien
tctagaaacctagcacatgtgcctt

SEQ ID NO: 2359530 - DNA, 25 bp, Homo sapien
tgagaactccttgtacttgaactgg

SEQ ID NO: 2359531 - DNA, 25 bp, Homo sapien
gcctgaagtgcccagtaccagcatg

SEQ ID NO: 2359532 - DNA, 25 bp, Homo sapien
taccagcatgaggaggacattattc

SEQ ID NO: 2359533 - DNA, 25 bp, Homo sapien
gaagttctcggttccactggtgctc

SEQ ID NO: 2359534 - DNA, 25 bp, Homo sapien
tctgctgtcatttgctgtcctgcaa

SEQ ID NO: 2359535 - DNA, 25 bp, Homo sapien
cacagatggacacgtttctccagaa

SEQ ID NO: 2359536 - DNA, 25 bp, Homo sapien
tgggattgtccttcgctgggacaga

SEQ ID NO: 2359537 - DNA, 25 bp, Homo sapien
aagaccatatacgattttcccatga

SEQ ID NO: 2359538 - DNA, 25 bp, Homo sapien
tcaagaccatatacgattttcccat

SEQ ID NO: 2359539 - DNA, 25 bp, Homo sapien
caagaccatatacgattttcccatg

SEQ ID NO: 2359540 - DNA, 25 bp, Homo sapien
gaccatatacgattttcccatgaaa

SEQ ID NO: 2359541 - DNA, 25 bp, Homo sapien
ccaagaatgtatccctaaagctaga

SEQ ID NO: 2359542 - DNA, 25 bp, Homo sapien
cctccaagaatgtatccctaaagct

SEQ ID NO: 2359543 - DNA, 25 bp, Homo sapien
taaagctagaaagtgactccctcat

SEQ ID NO: 2359544 - DNA, 25 bp, Homo sapien
ccctaaagctagaaagtgactccct

SEQ ID NO: 2359545 - DNA, 25 bp, Homo sapien
taggggcatatgtcacacccacacc

SEQ ID NO: 2359546 - DNA, 25 bp, Homo sapien
gaaagatgctgcaaacagcagagac

SEQ ID NO: 2359547 - DNA, 25 bp, Homo sapien
ccatctcatggtcaaccaacacaag

SEQ ID NO: 2359548 - DNA, 25 bp, Homo sapien
tggcaggccatctcatggtcaacca

SEQ ID NO: 2359549 - DNA, 25 bp, Homo sapien
tggaccgtcaccacctttccacagt

SEQ ID NO: 2359550 - DNA, 25 bp, Homo sapien
ctctctatgcgttagttcatcaggg

SEQ ID NO: 2359551 - DNA, 25 bp, Homo sapien
ccctctgtccgtaaaaaattgctct

SEQ ID NO: 2359552 - DNA, 25 bp, Homo sapien
aaaaattgctctctctatgcgttag

SEQ ID NO: 2359553 - DNA, 25 bp, Homo sapien
caagtgcggcccagtccgtgtggga

SEQ ID NO: 2359554 - DNA, 25 bp, Homo sapien
tgtgggaggtggatgcgaacagtac

SEQ ID NO: 2359555 - DNA, 25 bp, Homo sapien
acgaccgaggtacccaggaatagat

SEQ ID NO: 2359556 - DNA, 25 bp, Homo sapien
cgaacagtacgagggcggcagtaca

SEQ ID NO: 2359557 - DNA, 25 bp, Homo sapien
acttgttcctctctggggggcccag

SEQ ID NO: 2359558 - DNA, 25 bp, Homo sapien
tctggggggcccagccagctcaaga

SEQ ID NO: 2359559 - DNA, 25 bp, Homo sapien
tggggggcccagccagctcaagagg

SEQ ID NO: 2359560 - DNA, 25 bp, Homo sapien
tcacaaaggaacttgttcctctctg

SEQ ID NO: 2359561 - DNA, 25 bp, Homo sapien
tggccaccaactcttaatgaaagct

SEQ ID NO: 2359562 - DNA, 25 bp, Homo sapien
tcttaatgaaagcttcatccgtggg

SEQ ID NO: 2359563 - DNA, 25 bp, Homo sapien
atccatcggagaggttccagcactg

SEQ ID NO: 2359564 - DNA, 25 bp, Homo sapien
catccatcggagaggttccagcact

SEQ ID NO: 2359565 - DNA, 25 bp, Homo sapien
gatgagtgtaggagtgctgtttgga

SEQ ID NO: 2359566 - DNA, 25 bp, Homo sapien
ctgagatggatgagtgtaggagtgc

SEQ ID NO: 2359567 - DNA, 25 bp, Homo sapien
taggagtgctgtttggaagtaggcc

SEQ ID NO: 2359568 - DNA, 25 bp, Homo sapien
gatggatgagtgtaggagtgctgtt

SEQ ID NO: 2359569 - DNA, 25 bp, Homo sapien
gccttagtctggaaagacttaaata

SEQ ID NO: 2359570 - DNA, 25 bp, Homo sapien
gaaagacttaaatagcttcctatat

SEQ ID NO: 2359571 - DNA, 25 bp, Homo sapien
tattcatggccttagtctggaaaga

SEQ ID NO: 2359572 - DNA, 25 bp, Homo sapien
atataagcagctagtaatttttctt

SEQ ID NO: 2359573 - DNA, 25 bp, Homo sapien
ttgaacgggtagtgtagcctcccag

SEQ ID NO: 2359574 - DNA, 25 bp, Homo sapien
agccagttccctacctcggctttag

SEQ ID NO: 2359575 - DNA, 25 bp, Homo sapien
gttgttgaacgggtagtgtagcctc

SEQ ID NO: 2359576 - DNA, 25 bp, Homo sapien
tccctacctcggctttagttgacat

SEQ ID NO: 2359577 - DNA, 25 bp, Homo sapien
tcttgtactggcttctgtgggtagg

SEQ ID NO: 2359578 - DNA, 25 bp, Homo sapien
ctggaagggaatttgggaactagct

SEQ ID NO: 2359579 - DNA, 25 bp, Homo sapien
gggtagagaacaaagagcatctggc

SEQ ID NO: 2359580 - DNA, 25 bp, Homo sapien
tgggaactagctcctttttctcttc

SEQ ID NO: 2359581 - DNA, 25 bp, Homo sapien
tggacgagtggtttgagtcttccct

SEQ ID NO: 2359582 - DNA, 25 bp, Homo sapien
ctctgtcgatgttggaccctatagc

SEQ ID NO: 2359583 - DNA, 25 bp, Homo sapien
tcttcccttggatggcacagactgt

SEQ ID NO: 2359584 - DNA, 25 bp, Homo sapien
gggtcagcctttagagctaactgtc

SEQ ID NO: 2359585 - DNA, 25 bp, Homo sapien
cacagatggatctgaatgcagaggg

SEQ ID NO: 2359586 - DNA, 25 bp, Homo sapien
ggtcctcatgctctagctgccattt

SEQ ID NO: 2359587 - DNA, 25 bp, Homo sapien
caggtcctcatgctctagctgccat

SEQ ID NO: 2359588 - DNA, 25 bp, Homo sapien
tggatctgaatgcagaggggccaca

SEQ ID NO: 2359589 - DNA, 25 bp, Homo sapien
ttttcatatccatacagaaagaggg

SEQ ID NO: 2359590 - DNA, 25 bp, Homo sapien
gatggtagccttgtctttggaaagc

SEQ ID NO: 2359591 - DNA, 25 bp, Homo sapien
cttgacaacttgaggcttggaagac

SEQ ID NO: 2359592 - DNA, 25 bp, Homo sapien
tttgctcttgatggtagccttgtct

SEQ ID NO: 2359593 - DNA, 25 bp, Homo sapien
aaagtgagggtggatcagaacatgc

SEQ ID NO: 2359594 - DNA, 25 bp, Homo sapien
gcacggcccagtcattgtaaagata

SEQ ID NO: 2359595 - DNA, 25 bp, Homo sapien
aggtgcctgagacccttactgagtc

SEQ ID NO: 2359596 - DNA, 25 bp, Homo sapien
tgcagaacaagttgcagcacggccc

SEQ ID NO: 2359597 - DNA, 25 bp, Homo sapien
tgtcactgataagctccctgtctct

SEQ ID NO: 2359598 - DNA, 25 bp, Homo sapien
tatcaatgttggcatccagatccag

SEQ ID NO: 2359599 - DNA, 25 bp, Homo sapien
gagagccacttcctatgttcattgc

SEQ ID NO: 2359600 - DNA, 25 bp, Homo sapien
ccagatccagatatgaaagtgtagt

SEQ ID NO: 2359601 - DNA, 25 bp, Homo sapien
gactgtgacacttctgatgatgtta

SEQ ID NO: 2359602 - DNA, 25 bp, Homo sapien
gatgggaattaaagcttttctgtgg

SEQ ID NO: 2359603 - DNA, 25 bp, Homo sapien
ctctggatgggaattaaagcttttc

SEQ ID NO: 2359604 - DNA, 25 bp, Homo sapien
ggcagccatcacttgacactcagtg

SEQ ID NO: 2359605 - DNA, 25 bp, Homo sapien
tggttccaaaaaggcacatcaagtg

SEQ ID NO: 2359606 - DNA, 25 bp, Homo sapien
gacactggtgcttggttccaaaaag

SEQ ID NO: 2359607 - DNA, 25 bp, Homo sapien
ggttatcctcattgcttttacagct

SEQ ID NO: 2359608 - DNA, 25 bp, Homo sapien
ggttctgcctaacacaggatcaagt

SEQ ID NO: 2359609 - DNA, 25 bp, Homo sapien
gtagaagttctgtatcgttttcttg

SEQ ID NO: 2359610 - DNA, 25 bp, Homo sapien
cgttttcttgaagattcctccctct

SEQ ID NO: 2359611 - DNA, 25 bp, Homo sapien
tttgccctcatccaaatgatctgag

SEQ ID NO: 2359612 - DNA, 25 bp, Homo sapien
cctggaggctttataagttcaaagt

SEQ ID NO: 2359613 - DNA, 25 bp, Homo sapien
actaaaagcttgaacagccttggca

SEQ ID NO: 2359614 - DNA, 25 bp, Homo sapien
gaactaaaagcttgaacagccttgg

SEQ ID NO: 2359615 - DNA, 25 bp, Homo sapien
ggcagcaaagcaggcatgaaggcac

SEQ ID NO: 2359616 - DNA, 25 bp, Homo sapien
ttgaactaaaagcttgaacagcctt

SEQ ID NO: 2359617 - DNA, 25 bp, Homo sapien
ccactgggaaggagcgttctgattg

SEQ ID NO: 2359618 - DNA, 25 bp, Homo sapien
ccgaggagcccacacgctgtttaca

SEQ ID NO: 2359619 - DNA, 25 bp, Homo sapien
gaaggagcgttctgattgccaaaca

SEQ ID NO: 2359620 - DNA, 25 bp, Homo sapien
gaggagcccacacgctgtttacatt

SEQ ID NO: 2359621 - DNA, 25 bp, Homo sapien
ttgctgagtcctggcagtaagttcc

SEQ ID NO: 2359622 - DNA, 25 bp, Homo sapien
tcttcagctctcacgaggcagatgg

SEQ ID NO: 2359623 - DNA, 25 bp, Homo sapien
tccaagatgtgagctcggcttattc

SEQ ID NO: 2359624 - DNA, 25 bp, Homo sapien
ggtatccagtgaagcacgcgttcaa

SEQ ID NO: 2359625 - DNA, 25 bp, Homo sapien
gtggttgtcgaagctgtgggactgc

SEQ ID NO: 2359626 - DNA, 25 bp, Homo sapien
aggtggttgtcgaagctgtgggact

SEQ ID NO: 2359627 - DNA, 25 bp, Homo sapien
ggtggttgtcgaagctgtgggactg

SEQ ID NO: 2359628 - DNA, 25 bp, Homo sapien
tggttgtcgaagctgtgggactgcg

SEQ ID NO: 2359629 - DNA, 25 bp, Homo sapien
cacaaaggcccaaagctcgttcact

SEQ ID NO: 2359630 - DNA, 25 bp, Homo sapien
gcccaaagctcgttcactttgtggg

SEQ ID NO: 2359631 - DNA, 25 bp, Homo sapien
aaggcccaaagctcgttcactttgt

SEQ ID NO: 2359632 - DNA, 25 bp, Homo sapien
tttcacaaaggcccaaagctcgttc

SEQ ID NO: 2359633 - DNA, 25 bp, Homo sapien
tccctcaggaaatgcatttcctcgg

SEQ ID NO: 2359634 - DNA, 25 bp, Homo sapien
tcaggaaatgcatttcctcggtgtg

SEQ ID NO: 2359635 - DNA, 25 bp, Homo sapien
cggtgtgcagaatgctcggatcctg

SEQ ID NO: 2359636 - DNA, 25 bp, Homo sapien
cctcggtgtgcagaatgctcggatc

SEQ ID NO: 2359637 - DNA, 25 bp, Homo sapien
gtggtactttacccaccgtgctctc

SEQ ID NO: 2359638 - DNA, 25 bp, Homo sapien
gatcacttttctcacttgattgttc

SEQ ID NO: 2359639 - DNA, 25 bp, Homo sapien
cacttttctcacttgattgttcgtc

SEQ ID NO: 2359640 - DNA, 25 bp, Homo sapien
tttacccaccgtgctctccacccac

SEQ ID NO: 2359641 - DNA, 25 bp, Homo sapien
gcatcagtgtctggttcagtcacac

SEQ ID NO: 2359642 - DNA, 25 bp, Homo sapien
cttgaggggcatcagtgtctggttc

SEQ ID NO: 2359643 - DNA, 25 bp, Homo sapien
ctgcattttaatctcccatttcttg

SEQ ID NO: 2359644 - DNA, 25 bp, Homo sapien
tttcttgaggggcatcagtgtctgg

SEQ ID NO: 2359645 - DNA, 25 bp, Homo sapien
ctgtgaataagtcagtggctttctg

SEQ ID NO: 2359646 - DNA, 25 bp, Homo sapien
gaataagtcagtggctttctggagt

SEQ ID NO: 2359647 - DNA, 25 bp, Homo sapien
atttagggtttcaatagcagccact

SEQ ID NO: 2359648 - DNA, 25 bp, Homo sapien
tttagggtttcaatagcagccactt

SEQ ID NO: 2359649 - DNA, 25 bp, Homo sapien
tgtcacagtctcgaatggcagcatt

SEQ ID NO: 2359650 - DNA, 25 bp, Homo sapien
tctgtgtgctttccctcgccacttg

SEQ ID NO: 2359651 - DNA, 25 bp, Homo sapien
gctctgtcacagtctcgaatggcag

SEQ ID NO: 2359652 - DNA, 25 bp, Homo sapien
tttccctcgccacttgtaaggctga

SEQ ID NO: 2359653 - DNA, 25 bp, Homo sapien
ttcctctgggaaaattagcaggcat

SEQ ID NO: 2359654 - DNA, 25 bp, Homo sapien
gaaagccacccagaaaagagccata

SEQ ID NO: 2359655 - DNA, 25 bp, Homo sapien
tctgggaaaattagcaggcattccc

SEQ ID NO: 2359656 - DNA, 25 bp, Homo sapien
aggcattcctctgggaaaattagca

SEQ ID NO: 2359657 - DNA, 25 bp, Homo sapien
tggaaggccaccagaacttctggat

SEQ ID NO: 2359658 - DNA, 25 bp, Homo sapien
cagaacttctggatcctgcatggct

SEQ ID NO: 2359659 - DNA, 25 bp, Homo sapien
aaggccaccagaacttctggatcct

SEQ ID NO: 2359660 - DNA, 25 bp, Homo sapien
agaacttctggatcctgcatggctg

SEQ ID NO: 2359661 - DNA, 25 bp, Homo sapien
ctatctgcactacgtcaacccagac

SEQ ID NO: 2359662 - DNA, 25 bp, Homo sapien
tctgcactacgtcaacccagacctg

SEQ ID NO: 2359663 - DNA, 25 bp, Homo sapien
tacgtcaacccagacctgactttca

SEQ ID NO: 2359664 - DNA, 25 bp, Homo sapien
gattttgatgcatccccctcctatc

SEQ ID NO: 2359665 - DNA, 25 bp, Homo sapien
aagcagcagcggctgatgcctctta

SEQ ID NO: 2359666 - DNA, 25 bp, Homo sapien
atgtcaccgcgggcacaggagagaa

SEQ ID NO: 2359667 - DNA, 25 bp, Homo sapien
agcagcagcggctgatgcctcttag

SEQ ID NO: 2359668 - DNA, 25 bp, Homo sapien
ggcaggagatgtcaccgcgggcaca

SEQ ID NO: 2359669 - DNA, 25 bp, Homo sapien
acctattaggtgggcaatacatatt

SEQ ID NO: 2359670 - DNA, 25 bp, Homo sapien
gcacctattaggtgggcaatacata

SEQ ID NO: 2359671 - DNA, 25 bp, Homo sapien
ctggcacctattaggtgggcaatac

SEQ ID NO: 2359672 - DNA, 25 bp, Homo sapien
ggcacctattaggtgggcaatacat

SEQ ID NO: 2359673 - DNA, 25 bp, Homo sapien
ggtcacaggcagtgccggttgtaaa

SEQ ID NO: 2359674 - DNA, 25 bp, Homo sapien
tcgcaggagttttgtgggtcacagg

SEQ ID NO: 2359675 - DNA, 25 bp, Homo sapien
ggcagtgccggttgtaaagaacaca

SEQ ID NO: 2359676 - DNA, 25 bp, Homo sapien
caggcagtgccggttgtaaagaaca

SEQ ID NO: 2359677 - DNA, 25 bp, Homo sapien
aatccctgtaatccctgtgtgtcgt

SEQ ID NO: 2359678 - DNA, 25 bp, Homo sapien
gacttgcagggtcaaagcacaaatg

SEQ ID NO: 2359679 - DNA, 25 bp, Homo sapien
cactgtggataaccctggatgcatg

SEQ ID NO: 2359680 - DNA, 25 bp, Homo sapien
tataaacactgttctatacctgggc

SEQ ID NO: 2359681 - DNA, 25 bp, Homo sapien
gtggcggctttgctaccacagccag

SEQ ID NO: 2359682 - DNA, 25 bp, Homo sapien
tgtcccctggcattgtggcggcttt

SEQ ID NO: 2359683 - DNA, 25 bp, Homo sapien
cattgggcattgctagcggtaccac

SEQ ID NO: 2359684 - DNA, 25 bp, Homo sapien
ccaaaattggaccatagagccaggg

SEQ ID NO: 2359685 - DNA, 25 bp, Homo sapien
caggaagcataaggcatgtaggcag

SEQ ID NO: 2359686 - DNA, 25 bp, Homo sapien
aggaagcataaggcatgtaggcagg

SEQ ID NO: 2359687 - DNA, 25 bp, Homo sapien
ccaggaagcataaggcatgtaggca

SEQ ID NO: 2359688 - DNA, 25 bp, Homo sapien
cccaggaagcataaggcatgtaggc

SEQ ID NO: 2359689 - DNA, 25 bp, Homo sapien
tttcctgtgcaactccttcacagag

SEQ ID NO: 2359690 - DNA, 25 bp, Homo sapien
ccaagtttggtgtccaaggtgattt

SEQ ID NO: 2359691 - DNA, 25 bp, Homo sapien
gatttgggctttttgcatgcatcca

SEQ ID NO: 2359692 - DNA, 25 bp, Homo sapien
cattactggttctatcagttcagca

SEQ ID NO: 2359693 - DNA, 25 bp, Homo sapien
tcctgctggtcatctccaaaggcat

SEQ ID NO: 2359694 - DNA, 25 bp, Homo sapien
cgtcctgctggtcatctccaaaggc

SEQ ID NO: 2359695 - DNA, 25 bp, Homo sapien
cccgtcctgctggtcatctccaaag

SEQ ID NO: 2359696 - DNA, 25 bp, Homo sapien
gtcctgctggtcatctccaaaggca

SEQ ID NO: 2359697 - DNA, 25 bp, Homo sapien
tggaaatgttctgtagggatttact

SEQ ID NO: 2359698 - DNA, 25 bp, Homo sapien
caaatgtgaatgatcgactgactgc

SEQ ID NO: 2359699 - DNA, 25 bp, Homo sapien
gcttcttcagatgatggggagcact

SEQ ID NO: 2359700 - DNA, 25 bp, Homo sapien
ctgctgtcttgagtacaaatgtgaa

SEQ ID NO: 2359701 - DNA, 25 bp, Homo sapien
ggtaaatgtcaaggcacaatcagtt

SEQ ID NO: 2359702 - DNA, 25 bp, Homo sapien
aaatgtcaaggcacaatcagttttc

SEQ ID NO: 2359703 - DNA, 25 bp, Homo sapien
gtcaaggcacaatcagttttcagga

SEQ ID NO: 2359704 - DNA, 25 bp, Homo sapien
tttacaggtaaatgtcaaggcacaa

SEQ ID NO: 2359705 - DNA, 25 bp, Homo sapien
tggtcctctccttacttctgtgggc

SEQ ID NO: 2359706 - DNA, 25 bp, Homo sapien
cctgatggacaaagcaggagattca

SEQ ID NO: 2359707 - DNA, 25 bp, Homo sapien
ccttgcaccgtcttagtttacacat

SEQ ID NO: 2359708 - DNA, 25 bp, Homo sapien
ttaggacctgatggacaaagcagga

SEQ ID NO: 2359709 - DNA, 25 bp, Homo sapien
ctggtacctgaagccccgcttagct

SEQ ID NO: 2359710 - DNA, 25 bp, Homo sapien
ttaggcatctgcattgtttgcaggg

SEQ ID NO: 2359711 - DNA, 25 bp, Homo sapien
gagggatgaattagctggtacctga

SEQ ID NO: 2359712 - DNA, 25 bp, Homo sapien
ctctgattctaggtgtggtgttgac

SEQ ID NO: 2359713 - DNA, 25 bp, Homo sapien
tgagtctgtttagtagtttccatca

SEQ ID NO: 2359714 - DNA, 25 bp, Homo sapien
gagtctgtttagtagtttccatcat

SEQ ID NO: 2359715 - DNA, 25 bp, Homo sapien
tgacaagatgccactccaaccatgg

SEQ ID NO: 2359716 - DNA, 25 bp, Homo sapien
gccaccactggtagacgtgtagata

SEQ ID NO: 2359717 - DNA, 25 bp, Homo sapien
gaactcagttcaagatggccaccac

SEQ ID NO: 2359718 - DNA, 25 bp, Homo sapien
taaggagacagtttgggctctcccc

SEQ ID NO: 2359719 - DNA, 25 bp, Homo sapien
tgtgccctgagaacactattgtgtt

SEQ ID NO: 2359720 - DNA, 25 bp, Homo sapien
gtgtggagccatacaatcctgtgcc

SEQ ID NO: 2359721 - DNA, 25 bp, Homo sapien
ggttgctggcgtcccacatggagaa

SEQ ID NO: 2359722 - DNA, 25 bp, Homo sapien
tctttatttgagaggcagtctgtgg

SEQ ID NO: 2359723 - DNA, 25 bp, Homo sapien
caagattgtgccattgctttccagc

SEQ ID NO: 2359724 - DNA, 25 bp, Homo sapien
ccagcctgggcaaccaagtgagacc

SEQ ID NO: 2359725 - DNA, 25 bp, Homo sapien
gccaagattgtgccattgctttcca

SEQ ID NO: 2359726 - DNA, 25 bp, Homo sapien
ttccagcctgggcaaccaagtgaga

SEQ ID NO: 2359727 - DNA, 25 bp, Homo sapien
aaatgacagtttgctgggtgaccaa

SEQ ID NO: 2359728 - DNA, 25 bp, Homo sapien
ggagagaataaaccgcccacagact

SEQ ID NO: 2359729 - DNA, 25 bp, Homo sapien
agcagatgccttataaatggagccc

SEQ ID NO: 2359730 - DNA, 25 bp, Homo sapien
gaaaagcttatacagacgctcaggc

SEQ ID NO: 2359731 - DNA, 25 bp, Homo sapien
attgctccatgtgttggccctggca

SEQ ID NO: 2359732 - DNA, 25 bp, Homo sapien
gaatccattggcgaacacacttttc

SEQ ID NO: 2359733 - DNA, 25 bp, Homo sapien
taggttcctattgtcattcattgcc

SEQ ID NO: 2359734 - DNA, 25 bp, Homo sapien
ttgcatttgcaacattggcactgag

SEQ ID NO: 2359735 - DNA, 25 bp, Homo sapien
gaggaggtttcctccgcaatgccgg

SEQ ID NO: 2359736 - DNA, 25 bp, Homo sapien
aggtttcctccgcaatgccgggcat

SEQ ID NO: 2359737 - DNA, 25 bp, Homo sapien
gtgtttctttgtagatgtgagaatt

SEQ ID NO: 2359738 - DNA, 25 bp, Homo sapien
agatgtgagaattgaggaaaactgg

SEQ ID NO: 2359739 - DNA, 25 bp, Homo sapien
gcctcagagcctgttgatacaactc

SEQ ID NO: 2359740 - DNA, 25 bp, Homo sapien
gagcctgttgatacaactcttggct

SEQ ID NO: 2359741 - DNA, 25 bp, Homo sapien
tggcttcagtgcctcgcctcagagc

SEQ ID NO: 2359742 - DNA, 25 bp, Homo sapien
agtgcctcgcctcagagcctgttga

SEQ ID NO: 2359743 - DNA, 25 bp, Homo sapien
cgtgctccgggttatgtgtagactg

SEQ ID NO: 2359744 - DNA, 25 bp, Homo sapien
gaatctgatattgtctgtgttagcg

SEQ ID NO: 2359745 - DNA, 25 bp, Homo sapien
taccagaggctttttcgtgctccgg

SEQ ID NO: 2359746 - DNA, 25 bp, Homo sapien
tgtagactgtgaagtaacccatcca

SEQ ID NO: 2359747 - DNA, 25 bp, Homo sapien
agttgtaattttgtgctcgctaacc

SEQ ID NO: 2359748 - DNA, 25 bp, Homo sapien
cctgcagtgctatcaaagatgagca

SEQ ID NO: 2359749 - DNA, 25 bp, Homo sapien
gatcaaatcagggttattcacatag

SEQ ID NO: 2359750 - DNA, 25 bp, Homo sapien
cagggttattcacatagcaaacata

SEQ ID NO: 2359751 - DNA, 25 bp, Homo sapien
tgttgggactcacattgttcatctg

SEQ ID NO: 2359752 - DNA, 25 bp, Homo sapien
gtaaactcttggctcgaattccaga

SEQ ID NO: 2359753 - DNA, 25 bp, Homo sapien
tctatggataatgtaggctgttggg

SEQ ID NO: 2359754 - DNA, 25 bp, Homo sapien
aacagaggcccaaatggaagccaaa

SEQ ID NO: 2359755 - DNA, 25 bp, Homo sapien
ctctttgtctagaggctctgggtca

SEQ ID NO: 2359756 - DNA, 25 bp, Homo sapien
cactttcctaagtaacttgtggagc

SEQ ID NO: 2359757 - DNA, 25 bp, Homo sapien
ctctgggtcatgctcggataagaac

SEQ ID NO: 2359758 - DNA, 25 bp, Homo sapien
taagaactcttctcctagatccaac

SEQ ID NO: 2359759 - DNA, 25 bp, Homo sapien
caactcctgccaacttgacaccgct

SEQ ID NO: 2359760 - DNA, 25 bp, Homo sapien
aactcctgccaacttgacaccgctc

SEQ ID NO: 2359761 - DNA, 25 bp, Homo sapien
aattcccgtcgtccagattgggtca

SEQ ID NO: 2359762 - DNA, 25 bp, Homo sapien
tccagattgggtcacttcttcatct

SEQ ID NO: 2359763 - DNA, 25 bp, Homo sapien
catgcagggcttctgttcattccca

SEQ ID NO: 2359764 - DNA, 25 bp, Homo sapien
tgttcattcccatgaattcccgtcg

SEQ ID NO: 2359765 - DNA, 25 bp, Homo sapien
tgcccgcctctagtgacatagtcac

SEQ ID NO: 2359766 - DNA, 25 bp, Homo sapien
caggtgcccgcctctagtgacatag

SEQ ID NO: 2359767 - DNA, 25 bp, Homo sapien
aggtgcccgcctctagtgacatagt

SEQ ID NO: 2359768 - DNA, 25 bp, Homo sapien
ggtgcccgcctctagtgacatagtc

SEQ ID NO: 2359769 - DNA, 25 bp, Homo sapien
tgaaatctggccagtgagggaagcc

SEQ ID NO: 2359770 - DNA, 25 bp, Homo sapien
taagcctttcattctctgatctcaa

SEQ ID NO: 2359771 - DNA, 25 bp, Homo sapien
cgaggctcccaagccaggacgacat

SEQ ID NO: 2359772 - DNA, 25 bp, Homo sapien
tgtcctggaatcaggtaattctgct

SEQ ID NO: 2359773 - DNA, 25 bp, Homo sapien
aaagcattaataaacagcattgtag

SEQ ID NO: 2359774 - DNA, 25 bp, Homo sapien
atgctggtttatttgaagctctgat

SEQ ID NO: 2359775 - DNA, 25 bp, Homo sapien
gcattaataaacagcattgtagaat

SEQ ID NO: 2359776 - DNA, 25 bp, Homo sapien
ctggtttatttgaagctctgatgct

SEQ ID NO: 2359777 - DNA, 25 bp, Homo sapien
aattgtgtcctcaaagtccatgtca

SEQ ID NO: 2359778 - DNA, 25 bp, Homo sapien
gatgactaatcacataaatgaatga

SEQ ID NO: 2359779 - DNA, 25 bp, Homo sapien
ttcttgttgggacaaaattgtgtcc

SEQ ID NO: 2359780 - DNA, 25 bp, Homo sapien
tggttgctggtacatcgccagctgc

SEQ ID NO: 2359781 - DNA, 25 bp, Homo sapien
gatgattacgcagtctctctagctt

SEQ ID NO: 2359782 - DNA, 25 bp, Homo sapien
ctaaaagatgattacgcagtctctc

SEQ ID NO: 2359783 - DNA, 25 bp, Homo sapien
aaaagatgattacgcagtctctcta

SEQ ID NO: 2359784 - DNA, 25 bp, Homo sapien
aagatgattacgcagtctctctagc

SEQ ID NO: 2359785 - DNA, 25 bp, Homo sapien
ttagcctctctatgttctgaggcca

SEQ ID NO: 2359786 - DNA, 25 bp, Homo sapien
tagcctctctatgttctgaggccaa

SEQ ID NO: 2359787 - DNA, 25 bp, Homo sapien
agcctctctatgttctgaggccaaa

SEQ ID NO: 2359788 - DNA, 25 bp, Homo sapien
ggctgtttgctaagttcaccaattt

SEQ ID NO: 2359789 - DNA, 25 bp, Homo sapien
gcttcatccaaacgttcctgtaatg

SEQ ID NO: 2359790 - DNA, 25 bp, Homo sapien
tctgcttcatccaaacgttcctgta

SEQ ID NO: 2359791 - DNA, 25 bp, Homo sapien
tccttctaggctgtttgctaagttc

SEQ ID NO: 2359792 - DNA, 25 bp, Homo sapien
tcgtgacgctgattttttggcatgt

SEQ ID NO: 2359793 - DNA, 25 bp, Homo sapien
cttcgtgacgctgattttttggcat

SEQ ID NO: 2359794 - DNA, 25 bp, Homo sapien
acttcgtgacgctgattttttggca

SEQ ID NO: 2359795 - DNA, 25 bp, Homo sapien
cacttcgtgacgctgattttttggc

SEQ ID NO: 2359796 - DNA, 25 bp, Homo sapien
actgccctgattgtcatgaaacagc

SEQ ID NO: 2359797 - DNA, 25 bp, Homo sapien
gccctgattgtcatgaaacagctgc

SEQ ID NO: 2359798 - DNA, 25 bp, Homo sapien
cactgccctgattgtcatgaaacag

SEQ ID NO: 2359799 - DNA, 25 bp, Homo sapien
tgccctgattgtcatgaaacagctg

SEQ ID NO: 2359800 - DNA, 25 bp, Homo sapien
tcaacacaactccagcgctgttgtc

SEQ ID NO: 2359801 - DNA, 25 bp, Homo sapien
ctcgtcttctacctgacctggattc

SEQ ID NO: 2359802 - DNA, 25 bp, Homo sapien
caaggtctttcaacacaactccagc

SEQ ID NO: 2359803 - DNA, 25 bp, Homo sapien
ctctcgtcttctacctgacctggat

SEQ ID NO: 2359804 - DNA, 25 bp, Homo sapien
tagaatgtgcatacccctgggagca

SEQ ID NO: 2359805 - DNA, 25 bp, Homo sapien
catactgtggtgacagtcggacggc

SEQ ID NO: 2359806 - DNA, 25 bp, Homo sapien
gaaagccctcctcattcttgtgtga

SEQ ID NO: 2359807 - DNA, 25 bp, Homo sapien
gacttctaacttcaccgaggcagcc

SEQ ID NO: 2359808 - DNA, 25 bp, Homo sapien
atctccccgactggcttccacggtg

SEQ ID NO: 2359809 - DNA, 25 bp, Homo sapien
cctaagccatctccccgactggctt

SEQ ID NO: 2359810 - DNA, 25 bp, Homo sapien
ctggcttccacggtgcccaagatca

SEQ ID NO: 2359811 - DNA, 25 bp, Homo sapien
gactggcttccacggtgcccaagat

SEQ ID NO: 2359812 - DNA, 25 bp, Homo sapien
ttctcccttgcaaatgtccctggtg

SEQ ID NO: 2359813 - DNA, 25 bp, Homo sapien
cagttccgtgtcttcattgtctgag

SEQ ID NO: 2359814 - DNA, 25 bp, Homo sapien
tggcacctacttgctggactggctg

SEQ ID NO: 2359815 - DNA, 25 bp, Homo sapien
tttctcagtatgctccagttccgtg

SEQ ID NO: 2359816 - DNA, 25 bp, Homo sapien
tgtgtccttgggcccacagagaatg

SEQ ID NO: 2359817 - DNA, 25 bp, Homo sapien
tatgtctatttttagctgtgtgtcc

SEQ ID NO: 2359818 - DNA, 25 bp, Homo sapien
cagcagttgtgaaatcctcggcaga

SEQ ID NO: 2359819 - DNA, 25 bp, Homo sapien
gatccaagtgatattgtatgtctat

SEQ ID NO: 2359820 - DNA, 25 bp, Homo sapien
tgtgcttccgtggtcaaggccttct

SEQ ID NO: 2359821 - DNA, 25 bp, Homo sapien
tcctggtgattgttgatcttggtca

SEQ ID NO: 2359822 - DNA, 25 bp, Homo sapien
gttgcacagcaagtcaaacaaggac

SEQ ID NO: 2359823 - DNA, 25 bp, Homo sapien
cgcttctcggctggtttgcattgca

SEQ ID NO: 2359824 - DNA, 25 bp, Homo sapien
aatgaagtgtcttagaaagtccctg

SEQ ID NO: 2359825 - DNA, 25 bp, Homo sapien
gtcttagaaagtccctggcatgcaa

SEQ ID NO: 2359826 - DNA, 25 bp, Homo sapien
ccgtgccccaatgtccctgaaatga

SEQ ID NO: 2359827 - DNA, 25 bp, Homo sapien
ccaatgtccctgaaatgaagtgtct

SEQ ID NO: 2359828 - DNA, 25 bp, Homo sapien
tcttggggcaaacttccacaagtac

SEQ ID NO: 2359829 - DNA, 25 bp, Homo sapien
ttcttggggcaaacttccacaagta

SEQ ID NO: 2359830 - DNA, 25 bp, Homo sapien
ctagttcttggggcaaacttccaca

SEQ ID NO: 2359831 - DNA, 25 bp, Homo sapien
agttcttggggcaaacttccacaag

SEQ ID NO: 2359832 - DNA, 25 bp, Homo sapien
ttacctctccaatcactcctttctg

SEQ ID NO: 2359833 - DNA, 25 bp, Homo sapien
tctttacctctccaatcactccttt

SEQ ID NO: 2359834 - DNA, 25 bp, Homo sapien
tttacctctccaatcactcctttct

SEQ ID NO: 2359835 - DNA, 25 bp, Homo sapien
ttctttacctctccaatcactcctt

SEQ ID NO: 2359836 - DNA, 25 bp, Homo sapien
gaatcctataaactatgggctggcc

SEQ ID NO: 2359837 - DNA, 25 bp, Homo sapien
caaagtatccaagggttgagaccat

SEQ ID NO: 2359838 - DNA, 25 bp, Homo sapien
tatgtaacgggatgttaaatttgac

SEQ ID NO: 2359839 - DNA, 25 bp, Homo sapien
ccttgttgtacattctcttgccacc

SEQ ID NO: 2359840 - DNA, 25 bp, Homo sapien
agaaaagggattttcagggctggcg

SEQ ID NO: 2359841 - DNA, 25 bp, Homo sapien
tcacagaaaagggattttcagggct

SEQ ID NO: 2359842 - DNA, 25 bp, Homo sapien
aagggattttcagggctggcggtgg

SEQ ID NO: 2359843 - DNA, 25 bp, Homo sapien
acagaaaagggattttcagggctgg

SEQ ID NO: 2359844 - DNA, 25 bp, Homo sapien
tacatggacattgtcaacctgatgg

SEQ ID NO: 2359845 - DNA, 25 bp, Homo sapien
agatctttgggttttcttgtgcaat

SEQ ID NO: 2359846 - DNA, 25 bp, Homo sapien
tgtcgacctcttttaagggctgtga

SEQ ID NO: 2359847 - DNA, 25 bp, Homo sapien
aactttgggctctttgtcgacctct

SEQ ID NO: 2359848 - DNA, 25 bp, Homo sapien
caaaaaattcgtgaggagagctgtc

SEQ ID NO: 2359849 - DNA, 25 bp, Homo sapien
tctccggaggtcaccaaggaatgca

SEQ ID NO: 2359850 - DNA, 25 bp, Homo sapien
cctgtcggcaaggagcgtgcatact

SEQ ID NO: 2359851 - DNA, 25 bp, Homo sapien
gaatgcacaggtttcgactaccaga

SEQ ID NO: 2359852 - DNA, 25 bp, Homo sapien
gaaaggaatccgctgcttgagggct

SEQ ID NO: 2359853 - DNA, 25 bp, Homo sapien
tccctcatggtgtgcgtgtcgtttc

SEQ ID NO: 2359854 - DNA, 25 bp, Homo sapien
ttgaaccggttaaagctcatagctg

SEQ ID NO: 2359855 - DNA, 25 bp, Homo sapien
taactatgcaaagcatccaggcggt

SEQ ID NO: 2359856 - DNA, 25 bp, Homo sapien
tcaaagacctctcggatgggatcca

SEQ ID NO: 2359857 - DNA, 25 bp, Homo sapien
tggagtctgacatctacaccgaggt

SEQ ID NO: 2359858 - DNA, 25 bp, Homo sapien
taaatgaattgcgtgtgcagggcgc

SEQ ID NO: 2359859 - DNA, 25 bp, Homo sapien
gacttcacgtccctggagaacacgg

SEQ ID NO: 2359860 - DNA, 25 bp, Homo sapien
ctgtaaggaagccggcaggctccgg

SEQ ID NO: 2359861 - DNA, 25 bp, Homo sapien
tctttctgcattaggaaccgctgaa

SEQ ID NO: 2359862 - DNA, 25 bp, Homo sapien
ctgcattaggaaccgctgaatgggc

SEQ ID NO: 2359863 - DNA, 25 bp, Homo sapien
cattaggaaccgctgaatgggcaga

SEQ ID NO: 2359864 - DNA, 25 bp, Homo sapien
ccacggccgggctccttcgtgcttc

SEQ ID NO: 2359865 - DNA, 25 bp, Homo sapien
tcgtgcttcccgaccggcccctagc

SEQ ID NO: 2359866 - DNA, 25 bp, Homo sapien
gcgtcgagcagaaggtgggtacccc

SEQ ID NO: 2359867 - DNA, 25 bp, Homo sapien
aggtccggcgcagccaccaggactt

SEQ ID NO: 2359868 - DNA, 25 bp, Homo sapien
ggcggccgctttctcgggctggtgc

SEQ ID NO: 2359869 - DNA, 25 bp, Homo sapien
gcggccgctttctcgggctggtgcg

SEQ ID NO: 2359870 - DNA, 25 bp, Homo sapien
cggcggccgctttctcgggctggtg

SEQ ID NO: 2359871 - DNA, 25 bp, Homo sapien
tcggcagggcgctcaactttctctt

SEQ ID NO: 2359872 - DNA, 25 bp, Homo sapien
gtcctgctcgcgcaggctcggcagg

SEQ ID NO: 2359873 - DNA, 25 bp, Homo sapien
aggcgcacggcaagggcggccaccg

SEQ ID NO: 2359874 - DNA, 25 bp, Homo sapien
cagaaccaggcgcacggcaagggcg

SEQ ID NO: 2359875 - DNA, 25 bp, Homo sapien
tgctgcctccgcagcacccatccca

SEQ ID NO: 2359876 - DNA, 25 bp, Homo sapien
acaaaagtaggggtgacaacgctga

SEQ ID NO: 2359877 - DNA, 25 bp, Homo sapien
gtaggggtgacaacgctgatctgcc

SEQ ID NO: 2359878 - DNA, 25 bp, Homo sapien
gggtgacaacgctgatctgcctctt

SEQ ID NO: 2359879 - DNA, 25 bp, Homo sapien
gaagatgcacttctatgactgccca

SEQ ID NO: 2359880 - DNA, 25 bp, Homo sapien
gaaaatcgttgaaatctggacacag

SEQ ID NO: 2359881 - DNA, 25 bp, Homo sapien
tgggagccccacgaaataatgatga

SEQ ID NO: 2359882 - DNA, 25 bp, Homo sapien
catcctagcctgtggtttgtgagcc

SEQ ID NO: 2359883 - DNA, 25 bp, Homo sapien
caaactataaagaatggcccccatc

SEQ ID NO: 2359884 - DNA, 25 bp, Homo sapien
ccatccctaacacgtactcaatttg

SEQ ID NO: 2359885 - DNA, 25 bp, Homo sapien
tctccagagtcaaactataaagaat

SEQ ID NO: 2359886 - DNA, 25 bp, Homo sapien
tactcaatttgcagggcatccaggc

SEQ ID NO: 2359887 - DNA, 25 bp, Homo sapien
ttcatttattgattgcgacagagca

SEQ ID NO: 2359888 - DNA, 25 bp, Homo sapien
gtagtatcaaaatgtgcccacatga

SEQ ID NO: 2359889 - DNA, 25 bp, Homo sapien
attcctcaaccaagaggtgccccag

SEQ ID NO: 2359890 - DNA, 25 bp, Homo sapien
caatatctggaggtaggcagctcct

SEQ ID NO: 2359891 - DNA, 25 bp, Homo sapien
cctgcgtgatactccaaagccatgg

SEQ ID NO: 2359892 - DNA, 25 bp, Homo sapien
gctgctgggtcctgcgtgatactcc

SEQ ID NO: 2359893 - DNA, 25 bp, Homo sapien
gggtcctgcgtgatactccaaagcc

SEQ ID NO: 2359894 - DNA, 25 bp, Homo sapien
gctgggtcctgcgtgatactccaaa

SEQ ID NO: 2359895 - DNA, 25 bp, Homo sapien
caggacagctcggttgcaggctgct

SEQ ID NO: 2359896 - DNA, 25 bp, Homo sapien
accaccaggtggagcaagtaggcca

SEQ ID NO: 2359897 - DNA, 25 bp, Homo sapien
atagggtaggagaaagcgccagcat

SEQ ID NO: 2359898 - DNA, 25 bp, Homo sapien
gcgccagcatgggactgattcataa

SEQ ID NO: 2359899 - DNA, 25 bp, Homo sapien
gttggcagggacaatcactgattag

SEQ ID NO: 2359900 - DNA, 25 bp, Homo sapien
ctctgacgaactttgactataactt

SEQ ID NO: 2359901 - DNA, 25 bp, Homo sapien
taggagggaagttaactctgacgaa

SEQ ID NO: 2359902 - DNA, 25 bp, Homo sapien
tgggagtgcgggaagttagttggca

SEQ ID NO: 2359903 - DNA, 25 bp, Homo sapien
gcacgggacgattagctccttggag

SEQ ID NO: 2359904 - DNA, 25 bp, Homo sapien
tgcacgggacgattagctccttgga

SEQ ID NO: 2359905 - DNA, 25 bp, Homo sapien
ctgcacgggacgattagctccttgg

SEQ ID NO: 2359906 - DNA, 25 bp, Homo sapien
tcgaaaactcaccagcccaacaaac

SEQ ID NO: 2359907 - DNA, 25 bp, Homo sapien
agtgaccccgggtcagggctctctg

SEQ ID NO: 2359908 - DNA, 25 bp, Homo sapien
cacgtagacaagaggagaacggcga

SEQ ID NO: 2359909 - DNA, 25 bp, Homo sapien
cagcacagtcacctcgaaaactcac

SEQ ID NO: 2359910 - DNA, 25 bp, Homo sapien
cagtggtgccacctacagtagcagc

SEQ ID NO: 2359911 - DNA, 25 bp, Homo sapien
cctgagggttcagcgttcgagccca

SEQ ID NO: 2359912 - DNA, 25 bp, Homo sapien
aacttaagtcgtttgagtgccactc

SEQ ID NO: 2359913 - DNA, 25 bp, Homo sapien
aactcattatccgttggcaggtaag

SEQ ID NO: 2359914 - DNA, 25 bp, Homo sapien
aatcaggcaacttccactggctgtc

SEQ ID NO: 2359915 - DNA, 25 bp, Homo sapien
gggccctcaacctctcacaaaatgg

SEQ ID NO: 2359916 - DNA, 25 bp, Homo sapien
tgactgggtatcttcggccctgggc

SEQ ID NO: 2359917 - DNA, 25 bp, Homo sapien
cacaaaatggcattgaagctgcttc

SEQ ID NO: 2359918 - DNA, 25 bp, Homo sapien
gactgaagatgactccaagcaaagc

SEQ ID NO: 2359919 - DNA, 25 bp, Homo sapien
gaggatttaatcactggtcaaaggt

SEQ ID NO: 2359920 - DNA, 25 bp, Homo sapien
caagcaaagcctccaacacgatagc

SEQ ID NO: 2359921 - DNA, 25 bp, Homo sapien
cagaaaagactgaagatgactccaa

SEQ ID NO: 2359922 - DNA, 25 bp, Homo sapien
tgagcccaccacttttgcaagcaga

SEQ ID NO: 2359923 - DNA, 25 bp, Homo sapien
taaacaaccgtcttcaatcctgcca

SEQ ID NO: 2359924 - DNA, 25 bp, Homo sapien
tgcaagcagaaaaccactagagtcc

SEQ ID NO: 2359925 - DNA, 25 bp, Homo sapien
gaaatgtatccttgctgagcccacc

SEQ ID NO: 2359926 - DNA, 25 bp, Homo sapien
tttgcgtcacttaagtgtgggtaaa

SEQ ID NO: 2359927 - DNA, 25 bp, Homo sapien
tgcgtcacttaagtgtgggtaaaaa

SEQ ID NO: 2359928 - DNA, 25 bp, Homo sapien
ttgcgtcacttaagtgtgggtaaaa

SEQ ID NO: 2359929 - DNA, 25 bp, Homo sapien
gtcactgagcgaagccatgctttcg

SEQ ID NO: 2359930 - DNA, 25 bp, Homo sapien
gagcattcatagtcactgagcgaag

SEQ ID NO: 2359931 - DNA, 25 bp, Homo sapien
gaatcgcttggctggtcctctccca

SEQ ID NO: 2359932 - DNA, 25 bp, Homo sapien
actgcttctcgccattgaagggcat

SEQ ID NO: 2359933 - DNA, 25 bp, Homo sapien
gaaagttctcatttacagcaatctc

SEQ ID NO: 2359934 - DNA, 25 bp, Homo sapien
gggagagcctcttgtttcaattgaa

SEQ ID NO: 2359935 - DNA, 25 bp, Homo sapien
tctcatgagcaagagtcaagtttga

SEQ ID NO: 2359936 - DNA, 25 bp, Homo sapien
tcaaatgttacaacccttggagggc

SEQ ID NO: 2359937 - DNA, 25 bp, Homo sapien
tagttctgaatccaagacgtcccag

SEQ ID NO: 2359938 - DNA, 25 bp, Homo sapien
aggcctggtgaacaatgtgcttcac

SEQ ID NO: 2359939 - DNA, 25 bp, Homo sapien
tgatggcatgttcaaactcaggagg

SEQ ID NO: 2359940 - DNA, 25 bp, Homo sapien
ctcaggagggtcagcatttagttct

SEQ ID NO: 2359941 - DNA, 25 bp, Homo sapien
gatatcattatctcgcacgggagca

SEQ ID NO: 2359942 - DNA, 25 bp, Homo sapien
ccacgatgttgccagtagcctttaa

SEQ ID NO: 2359943 - DNA, 25 bp, Homo sapien
tcacagatttggttgcgaagccggt

SEQ ID NO: 2359944 - DNA, 25 bp, Homo sapien
ctgatgacatagttggccaggcctt

SEQ ID NO: 2359945 - DNA, 25 bp, Homo sapien
agttgttattctgtgttccctgatg

SEQ ID NO: 2359946 - DNA, 25 bp, Homo sapien
tgatgcccaacttcccttctgaatg

SEQ ID NO: 2359947 - DNA, 25 bp, Homo sapien
gaatgaactcaaagatactctagga

SEQ ID NO: 2359948 - DNA, 25 bp, Homo sapien
gaaatgcaaacagcaaaagtgctaa

SEQ ID NO: 2359949 - DNA, 25 bp, Homo sapien
gacccctgaattggactgtgacatg

SEQ ID NO: 2359950 - DNA, 25 bp, Homo sapien
ggttgtctgatcaaggacccctgaa

SEQ ID NO: 2359951 - DNA, 25 bp, Homo sapien
ttgtcggaggctctattaagaccct

SEQ ID NO: 2359952 - DNA, 25 bp, Homo sapien
tttcatcattgcatcttcagggccc

SEQ ID NO: 2359953 - DNA, 25 bp, Homo sapien
ccagtgggcgctcaacaaatgacca

SEQ ID NO: 2359954 - DNA, 25 bp, Homo sapien
gagtctattaacctgcccaagattg

SEQ ID NO: 2359955 - DNA, 25 bp, Homo sapien
caaggaagttatcgtctatgtagcc

SEQ ID NO: 2359956 - DNA, 25 bp, Homo sapien
tacgacaactagaagcaaggatcct

SEQ ID NO: 2359957 - DNA, 25 bp, Homo sapien
ctgagactcataattgtaaaattgg

SEQ ID NO: 2359958 - DNA, 25 bp, Homo sapien
gagactcataattgtaaaattggcc

SEQ ID NO: 2359959 - DNA, 25 bp, Homo sapien
tgtaaaattggccatgtccatttgc

SEQ ID NO: 2359960 - DNA, 25 bp, Homo sapien
catgtccatttgcatgaggtccagg

SEQ ID NO: 2359961 - DNA, 25 bp, Homo sapien
tcatattccaccaactggcgttgaa

SEQ ID NO: 2359962 - DNA, 25 bp, Homo sapien
caccaactggcgttgaaggtgcggt

SEQ ID NO: 2359963 - DNA, 25 bp, Homo sapien
atattccaccaactggcgttgaagg

SEQ ID NO: 2359964 - DNA, 25 bp, Homo sapien
tccaccaactggcgttgaaggtgcg

SEQ ID NO: 2359965 - DNA, 25 bp, Homo sapien
aataaacaactgtaagtttgtgatg

SEQ ID NO: 2359966 - DNA, 25 bp, Homo sapien
ttctttagtgatactatatatgaag

SEQ ID NO: 2359967 - DNA, 25 bp, Homo sapien
aaattctttagtgatactatatatg

SEQ ID NO: 2359968 - DNA, 25 bp, Homo sapien
caactgtaagtttgtgatgtcaatt

SEQ ID NO: 2359969 - DNA, 25 bp, Homo sapien
gagtgccccacgtcagtttctttca

SEQ ID NO: 2359970 - DNA, 25 bp, Homo sapien
taacaatgctctatgtgacctgcct

SEQ ID NO: 2359971 - DNA, 25 bp, Homo sapien
cattcacccggttgtacgaggccaa

SEQ ID NO: 2359972 - DNA, 25 bp, Homo sapien
tctgatgagtttccaccgcacatgg

SEQ ID NO: 2359973 - DNA, 25 bp, Homo sapien
cgtgacaatggagccttgctatccc

SEQ ID NO: 2359974 - DNA, 25 bp, Homo sapien
tcctatccagatttgtgacattctt

SEQ ID NO: 2359975 - DNA, 25 bp, Homo sapien
ttttcctttgattctgcaaacttcc

SEQ ID NO: 2359976 - DNA, 25 bp, Homo sapien
acaatggagccttgctatcccttgg

SEQ ID NO: 2359977 - DNA, 25 bp, Homo sapien
ttcagggatggcctacgtttacagc

SEQ ID NO: 2359978 - DNA, 25 bp, Homo sapien
agcagagtcacgtgcccagcagagc

SEQ ID NO: 2359979 - DNA, 25 bp, Homo sapien
ctggccgagcagagtcacgtgccca

SEQ ID NO: 2359980 - DNA, 25 bp, Homo sapien
tcccgggatctgagtggtgagagtg

SEQ ID NO: 2359981 - DNA, 25 bp, Homo sapien
agaggccccatcttcccgaccaggg

SEQ ID NO: 2359982 - DNA, 25 bp, Homo sapien
tctctgagaaaccatttcctctggt

SEQ ID NO: 2359983 - DNA, 25 bp, Homo sapien
cttttgtgagtctcaattcagaggc

SEQ ID NO: 2359984 - DNA, 25 bp, Homo sapien
cccttcttttggtgctggctttctc

SEQ ID NO: 2359985 - DNA, 25 bp, Homo sapien
cgtgcttctaccccaattttcagtt

SEQ ID NO: 2359986 - DNA, 25 bp, Homo sapien
gtgcttctaccccaattttcagttg

SEQ ID NO: 2359987 - DNA, 25 bp, Homo sapien
tctggttccaaaagcaaggtcagcc

SEQ ID NO: 2359988 - DNA, 25 bp, Homo sapien
gaatgaccggtaaagcagaaggagc

SEQ ID NO: 2359989 - DNA, 25 bp, Homo sapien
caatcctggctgactttagaatcac

SEQ ID NO: 2359990 - DNA, 25 bp, Homo sapien
ttagggatcggcagagacttcactc

SEQ ID NO: 2359991 - DNA, 25 bp, Homo sapien
taaaagacatccaactgagagagcg

SEQ ID NO: 2359992 - DNA, 25 bp, Homo sapien
tgagagagcgcgagtggaaatcatc

SEQ ID NO: 2359993 - DNA, 25 bp, Homo sapien
cttggacccagcacttgagcaggga

SEQ ID NO: 2359994 - DNA, 25 bp, Homo sapien
cctgaacacaggtgcagagtagaga

SEQ ID NO: 2359995 - DNA, 25 bp, Homo sapien
gactagctgaaatcagactgattcc

SEQ ID NO: 2359996 - DNA, 25 bp, Homo sapien
cacacagagttgcttcaaaagatgc

SEQ ID NO: 2359997 - DNA, 25 bp, Homo sapien
tattagcagagttcccttgctagca

SEQ ID NO: 2359998 - DNA, 25 bp, Homo sapien
actacaatataggttactaggtgcc

SEQ ID NO: 2359999 - DNA, 25 bp, Homo sapien
caagggctcgcttctgcaagtggaa

SEQ ID NO: 2360000 - DNA, 25 bp, Homo sapien
cagtatgatccctggtatttggcaa

SEQ ID NO: 2360001 - DNA, 25 bp, Homo sapien
ccaatgctttaaaggagatgttatc

SEQ ID NO: 2360002 - DNA, 25 bp, Homo sapien
gaatctcagcagatctccttaaaga

SEQ ID NO: 2360003 - DNA, 25 bp, Homo sapien
taatttgaccttaaagactatgacc

SEQ ID NO: 2360004 - DNA, 25 bp, Homo sapien
ctgataatcccactgtaacagtttc

SEQ ID NO: 2360005 - DNA, 25 bp, Homo sapien
ttctgataatcccactgtaacagtt

SEQ ID NO: 2360006 - DNA, 25 bp, Homo sapien
gataatcccactgtaacagtttcaa

SEQ ID NO: 2360007 - DNA, 25 bp, Homo sapien
aatcccactgtaacagtttcaagta

SEQ ID NO: 2360008 - DNA, 25 bp, Homo sapien
ccttcaagtagaacagctgaaatcc

SEQ ID NO: 2360009 - DNA, 25 bp, Homo sapien
tgttgttggtaattagggacaggca

SEQ ID NO: 2360010 - DNA, 25 bp, Homo sapien
ttctgttagttcctgaagacgtgct

SEQ ID NO: 2360011 - DNA, 25 bp, Homo sapien
tgtaatagcacccaccatgttgttg

SEQ ID NO: 2360012 - DNA, 25 bp, Homo sapien
agcacttctgaagacttcgtagcaa

SEQ ID NO: 2360013 - DNA, 25 bp, Homo sapien
ctgaagacttcgtagcaaggtggat

SEQ ID NO: 2360014 - DNA, 25 bp, Homo sapien
gacttcgtagcaaggtggatttgtg

SEQ ID NO: 2360015 - DNA, 25 bp, Homo sapien
gcaaggtggatttgtgaagtcagta

SEQ ID NO: 2360016 - DNA, 25 bp, Homo sapien
cgtgcccagcctgaatggctattat

SEQ ID NO: 2360017 - DNA, 25 bp, Homo sapien
gcaaggttgtagagaaaagagagca

SEQ ID NO: 2360018 - DNA, 25 bp, Homo sapien
tgcccagcctgaatggctattatta

SEQ ID NO: 2360019 - DNA, 25 bp, Homo sapien
cgccatcttgggcagactagtcttg

SEQ ID NO: 2360020 - DNA, 25 bp, Homo sapien
tcttaggctaaagggaaactggcta

SEQ ID NO: 2360021 - DNA, 25 bp, Homo sapien
gaaacaccattatggacataggcct

SEQ ID NO: 2360022 - DNA, 25 bp, Homo sapien
tcgacaagcaaaaaacgacctcatt

SEQ ID NO: 2360023 - DNA, 25 bp, Homo sapien
caaacatttcgtgatgaattaccca

SEQ ID NO: 2360024 - DNA, 25 bp, Homo sapien
ccaatagaattcaggacttccttca

SEQ ID NO: 2360025 - DNA, 25 bp, Homo sapien
taccaatagaattcaggacttcctt

SEQ ID NO: 2360026 - DNA, 25 bp, Homo sapien
ctgaataccaatagaattcaggact

SEQ ID NO: 2360027 - DNA, 25 bp, Homo sapien
aataccaatagaattcaggacttcc

SEQ ID NO: 2360028 - DNA, 25 bp, Homo sapien
cagggtcttgttaacctcaacacaa

SEQ ID NO: 2360029 - DNA, 25 bp, Homo sapien
agggtcttgttaacctcaacacaag

SEQ ID NO: 2360030 - DNA, 25 bp, Homo sapien
tcagcatttaaagtgggtaaacctc

SEQ ID NO: 2360031 - DNA, 25 bp, Homo sapien
aatcaaggaccagataggattgtcc

SEQ ID NO: 2360032 - DNA, 25 bp, Homo sapien
gacctataagattagcttgaatctc

SEQ ID NO: 2360033 - DNA, 25 bp, Homo sapien
caatgcttgaaaattgacctataag

SEQ ID NO: 2360034 - DNA, 25 bp, Homo sapien
cacaatgtttgcatattgagagcct

SEQ ID NO: 2360035 - DNA, 25 bp, Homo sapien
tgctgaatgacagctaggcctcctg

SEQ ID NO: 2360036 - DNA, 25 bp, Homo sapien
caaagtagccttctcatgtaaagct

SEQ ID NO: 2360037 - DNA, 25 bp, Homo sapien
gagcagctttcgaagtatatttgca

SEQ ID NO: 2360038 - DNA, 25 bp, Homo sapien
tagttagtaggaggtgaagcatcta

SEQ ID NO: 2360039 - DNA, 25 bp, Homo sapien
ttagttagtaggaggtgaagcatct

SEQ ID NO: 2360040 - DNA, 25 bp, Homo sapien
agttagtaggaggtgaagcatctac

SEQ ID NO: 2360041 - DNA, 25 bp, Homo sapien
tcaatggaagtggactggataccaa

SEQ ID NO: 2360042 - DNA, 25 bp, Homo sapien
gatgtttacgtcttctgagggtcta

SEQ ID NO: 2360043 - DNA, 25 bp, Homo sapien
gagaatgtgctggatctctaatgcc

SEQ ID NO: 2360044 - DNA, 25 bp, Homo sapien
gatttgggctaatactgcaccacag

SEQ ID NO: 2360045 - DNA, 25 bp, Homo sapien
tagggctcaattgagtccttagcaa

SEQ ID NO: 2360046 - DNA, 25 bp, Homo sapien
taaagtctcagtggcaactagtgcc

SEQ ID NO: 2360047 - DNA, 25 bp, Homo sapien
tcccgcagcactccaagaagagtaa

SEQ ID NO: 2360048 - DNA, 25 bp, Homo sapien
tcgacctcaccaaattactagggct

SEQ ID NO: 2360049 - DNA, 25 bp, Homo sapien
aaatccagacttgaaacattgagat

SEQ ID NO: 2360050 - DNA, 25 bp, Homo sapien
aaaatcctagtaaatgtagttgcct

SEQ ID NO: 2360051 - DNA, 25 bp, Homo sapien
attgagattgactttgccactaaaa

SEQ ID NO: 2360052 - DNA, 25 bp, Homo sapien
cattacaaaatgagaccatgttagg

SEQ ID NO: 2360053 - DNA, 25 bp, Homo sapien
acatcaaggacaataaccgcagcct

SEQ ID NO: 2360054 - DNA, 25 bp, Homo sapien
tctgccaatgacaatattgggctta

SEQ ID NO: 2360055 - DNA, 25 bp, Homo sapien
gcagccttctgcatacccttgggtt

SEQ ID NO: 2360056 - DNA, 25 bp, Homo sapien
tagcctttgacgttgacatcaagga

SEQ ID NO: 2360057 - DNA, 25 bp, Homo sapien
ccccgccgtgcgtgttagctagaga

SEQ ID NO: 2360058 - DNA, 25 bp, Homo sapien
gctagagacgcggtagaaaggttcc

SEQ ID NO: 2360059 - DNA, 25 bp, Homo sapien
aaagtacgccctctggtgtagctcg

SEQ ID NO: 2360060 - DNA, 25 bp, Homo sapien
aggtctggcgcagggaatcctaagc

SEQ ID NO: 2360061 - DNA, 25 bp, Homo sapien
tctacagtcgggatcggcgccgcca

SEQ ID NO: 2360062 - DNA, 25 bp, Homo sapien
caaactcctccgctagcacgtccat

SEQ ID NO: 2360063 - DNA, 25 bp, Homo sapien
tgctccggagtcaggttcccaaact

SEQ ID NO: 2360064 - DNA, 25 bp, Homo sapien
ttcccaaactcctccgctagcacgt

SEQ ID NO: 2360065 - DNA, 25 bp, Homo sapien
gctggaagagctccaaccctagagc

SEQ ID NO: 2360066 - DNA, 25 bp, Homo sapien
ggatcagccttcactcgcgcacgcg

SEQ ID NO: 2360067 - DNA, 25 bp, Homo sapien
ggaagagctccaaccctagagccag

SEQ ID NO: 2360068 - DNA, 25 bp, Homo sapien
ttcactcgcgcacgcggaggccggc

SEQ ID NO: 2360069 - DNA, 25 bp, Homo sapien
aaatgctggaagcagcctccatttt

SEQ ID NO: 2360070 - DNA, 25 bp, Homo sapien
ctttaaaaatgctggaagcagcctc

SEQ ID NO: 2360071 - DNA, 25 bp, Homo sapien
taaaaatgctggaagcagcctccat

SEQ ID NO: 2360072 - DNA, 25 bp, Homo sapien
tttaaaaatgctggaagcagcctcc

SEQ ID NO: 2360073 - DNA, 25 bp, Homo sapien
tatttcctgcagactctgtggaggc

SEQ ID NO: 2360074 - DNA, 25 bp, Homo sapien
tcttaagatgtggtttatgtctcac

SEQ ID NO: 2360075 - DNA, 25 bp, Homo sapien
ccttgattgagccacgctctctgca

SEQ ID NO: 2360076 - DNA, 25 bp, Homo sapien
cagctcctcttgactggtcgctatt

SEQ ID NO: 2360077 - DNA, 25 bp, Homo sapien
aaatgaatctatatgctgtttcaca

SEQ ID NO: 2360078 - DNA, 25 bp, Homo sapien
tatgctgtttcacaaggcctttcac

SEQ ID NO: 2360079 - DNA, 25 bp, Homo sapien
cacatagggtcagcgtcacttgtaa

SEQ ID NO: 2360080 - DNA, 25 bp, Homo sapien
taccacatagggtcagcgtcacttg

SEQ ID NO: 2360081 - DNA, 25 bp, Homo sapien
ttaagtaccacatagggtcagcgtc

SEQ ID NO: 2360082 - DNA, 25 bp, Homo sapien
aagtaccacatagggtcagcgtcac

SEQ ID NO: 2360083 - DNA, 25 bp, Homo sapien
aagctttcttcaacatcaggaagcc

SEQ ID NO: 2360084 - DNA, 25 bp, Homo sapien
gaagctttcttcaacatcaggaagc

SEQ ID NO: 2360085 - DNA, 25 bp, Homo sapien
gaagcccaacatagatattaagata

SEQ ID NO: 2360086 - DNA, 25 bp, Homo sapien
tcaggaagcccaacatagatattaa

SEQ ID NO: 2360087 - DNA, 25 bp, Homo sapien
tcatgaggggacactggtctagtta

SEQ ID NO: 2360088 - DNA, 25 bp, Homo sapien
ctcatgaggggacactggtctagtt

SEQ ID NO: 2360089 - DNA, 25 bp, Homo sapien
catgaggggacactggtctagttac

SEQ ID NO: 2360090 - DNA, 25 bp, Homo sapien
ggtcctgaccacttcaaagtgctcc

SEQ ID NO: 2360091 - DNA, 25 bp, Homo sapien
ctgacagttactgctcctctctgca

SEQ ID NO: 2360092 - DNA, 25 bp, Homo sapien
aagagaatcaggaatctgacagtta

SEQ ID NO: 2360093 - DNA, 25 bp, Homo sapien
ctctgcaacagggtcctgaccactt

SEQ ID NO: 2360094 - DNA, 25 bp, Homo sapien
ggatgatcctctggctgcctcgggt

SEQ ID NO: 2360095 - DNA, 25 bp, Homo sapien
taggtaaggcattgcggatgatcct

SEQ ID NO: 2360096 - DNA, 25 bp, Homo sapien
ggctgcctcgggtatattcaatatc

SEQ ID NO: 2360097 - DNA, 25 bp, Homo sapien
ctgccgataggtaaggcattgcgga

SEQ ID NO: 2360098 - DNA, 25 bp, Homo sapien
ttcgttcagtttggcaaattctgct

SEQ ID NO: 2360099 - DNA, 25 bp, Homo sapien
ctgctggcgtttttcctgtaagaac

SEQ ID NO: 2360100 - DNA, 25 bp, Homo sapien
tggatctaagggacattcgttcagt

SEQ ID NO: 2360101 - DNA, 25 bp, Homo sapien
ttgaactacgtagcattatgggcat

SEQ ID NO: 2360102 - DNA, 25 bp, Homo sapien
tccacgatgatcctgttcttagaca

SEQ ID NO: 2360103 - DNA, 25 bp, Homo sapien
agacagctgctcttggataagaata

SEQ ID NO: 2360104 - DNA, 25 bp, Homo sapien
tggtaactgaagctccaacagcccc

SEQ ID NO: 2360105 - DNA, 25 bp, Homo sapien
ccttttctatcagcctccacgatga

SEQ ID NO: 2360106 - DNA, 25 bp, Homo sapien
caataagggtcaactgatcaacaac

SEQ ID NO: 2360107 - DNA, 25 bp, Homo sapien
tacaagttggttaaactgcatcccc

SEQ ID NO: 2360108 - DNA, 25 bp, Homo sapien
cttagtttcaagctagtaacatgca

SEQ ID NO: 2360109 - DNA, 25 bp, Homo sapien
cacaaggtcctttctaataagtact

SEQ ID NO: 2360110 - DNA, 25 bp, Homo sapien
aatatgatgacaatgggtatatctt

SEQ ID NO: 2360111 - DNA, 25 bp, Homo sapien
gacaaagtattatgcctcaaataaa

SEQ ID NO: 2360112 - DNA, 25 bp, Homo sapien
tgacaaagtattatgcctcaaataa

SEQ ID NO: 2360113 - DNA, 25 bp, Homo sapien
tgacaatgggtatatcttctgacaa

SEQ ID NO: 2360114 - DNA, 25 bp, Homo sapien
aatacatcatatgactgacaactta

SEQ ID NO: 2360115 - DNA, 25 bp, Homo sapien
tattccaagaattccttaccctcca

SEQ ID NO: 2360116 - DNA, 25 bp, Homo sapien
gactgacaacttacatcacaaatct

SEQ ID NO: 2360117 - DNA, 25 bp, Homo sapien
gaattccttaccctccaaatctcta

SEQ ID NO: 2360118 - DNA, 25 bp, Homo sapien
tcctggtcactctcaacacccatgg

SEQ ID NO: 2360119 - DNA, 25 bp, Homo sapien
gctttctggcactcttccagactgg

SEQ ID NO: 2360120 - DNA, 25 bp, Homo sapien
ccagactgggcccaaatgcagccat

SEQ ID NO: 2360121 - DNA, 25 bp, Homo sapien
tcacgtgctcctctgttccaatcat

SEQ ID NO: 2360122 - DNA, 25 bp, Homo sapien
agggactgatcctgggttttccttg

SEQ ID NO: 2360123 - DNA, 25 bp, Homo sapien
actgatcctgggttttccttgctgt

SEQ ID NO: 2360124 - DNA, 25 bp, Homo sapien
aaggctctgcagcagtaaaagggac

SEQ ID NO: 2360125 - DNA, 25 bp, Homo sapien
gactgatcctgggttttccttgctg

SEQ ID NO: 2360126 - DNA, 25 bp, Homo sapien
taaccaagtaagagtgttgacaact

SEQ ID NO: 2360127 - DNA, 25 bp, Homo sapien
ctctgtgggataaggaaatattcta

SEQ ID NO: 2360128 - DNA, 25 bp, Homo sapien
gaaatcacccgtcttagtgcgtcgt

SEQ ID NO: 2360129 - DNA, 25 bp, Homo sapien
gaatcttagacaataagctcagcaa

SEQ ID NO: 2360130 - DNA, 25 bp, Homo sapien
aatggtggaagccaggagctctctt

SEQ ID NO: 2360131 - DNA, 25 bp, Homo sapien
gaatggtggaagccaggagctctct

SEQ ID NO: 2360132 - DNA, 25 bp, Homo sapien
agaatggtggaagccaggagctctc

SEQ ID NO: 2360133 - DNA, 25 bp, Homo sapien
tgggacatgggtcagaatggtggaa

SEQ ID NO: 2360134 - DNA, 25 bp, Homo sapien
tgcattcaggtggttactctcgact

SEQ ID NO: 2360135 - DNA, 25 bp, Homo sapien
cacggatggaacacatgataactca

SEQ ID NO: 2360136 - DNA, 25 bp, Homo sapien
ccctgaaggtagtgtttgcaaccct

SEQ ID NO: 2360137 - DNA, 25 bp, Homo sapien
tgggtgacaacgcaaatcatctagc

SEQ ID NO: 2360138 - DNA, 25 bp, Homo sapien
tttaatactacattagaggaaagag

SEQ ID NO: 2360139 - DNA, 25 bp, Homo sapien
gacacagaattgttgcctatttcag

SEQ ID NO: 2360140 - DNA, 25 bp, Homo sapien
gactaacaaacgaacccagaatgct

SEQ ID NO: 2360141 - DNA, 25 bp, Homo sapien
cagaactccggagatcttttaatac

SEQ ID NO: 2360142 - DNA, 25 bp, Homo sapien
gccagaataactcttcgcaccatca

SEQ ID NO: 2360143 - DNA, 25 bp, Homo sapien
cagtatagatacatttggctcggaa

SEQ ID NO: 2360144 - DNA, 25 bp, Homo sapien
tgtcctgccaattccagtcgcttgt

SEQ ID NO: 2360145 - DNA, 25 bp, Homo sapien
accataataatctctgtcgtcaact

SEQ ID NO: 2360146 - DNA, 25 bp, Homo sapien
cggaagaggtccagcaaatcctctg

SEQ ID NO: 2360147 - DNA, 25 bp, Homo sapien
attccaggaaaaggtgcaatgccag

SEQ ID NO: 2360148 - DNA, 25 bp, Homo sapien
ttccaggaaaaggtgcaatgccaga

SEQ ID NO: 2360149 - DNA, 25 bp, Homo sapien
cctggtcggcaatctttttcatttc

SEQ ID NO: 2360150 - DNA, 25 bp, Homo sapien
ggtcttggcgcatgtgtttgacaac

SEQ ID NO: 2360151 - DNA, 25 bp, Homo sapien
gaaatagcattcaccatgccattgg

SEQ ID NO: 2360152 - DNA, 25 bp, Homo sapien
gctctttgcttaggaatcacctggt

SEQ ID NO: 2360153 - DNA, 25 bp, Homo sapien
agagatttccatgggaagtcataag

SEQ ID NO: 2360154 - DNA, 25 bp, Homo sapien
tccatgggaagtcataagctaactg

SEQ ID NO: 2360155 - DNA, 25 bp, Homo sapien
tgggaagtcataagctaactgataa

SEQ ID NO: 2360156 - DNA, 25 bp, Homo sapien
gatttccatgggaagtcataagcta

SEQ ID NO: 2360157 - DNA, 25 bp, Homo sapien
gcacttgggttacaccctggcggtc

SEQ ID NO: 2360158 - DNA, 25 bp, Homo sapien
gatatatatgacaagcgagacagca

SEQ ID NO: 2360159 - DNA, 25 bp, Homo sapien
cgagacagcacttgggttacaccct

SEQ ID NO: 2360160 - DNA, 25 bp, Homo sapien
gggaagagattcttgtcatcatgcc

SEQ ID NO: 2360161 - DNA, 25 bp, Homo sapien
cttcaggagtgtccgaaggacacag

SEQ ID NO: 2360162 - DNA, 25 bp, Homo sapien
tctccttcaggagtgtccgaaggac

SEQ ID NO: 2360163 - DNA, 25 bp, Homo sapien
caggagtgtccgaaggacacagcat

SEQ ID NO: 2360164 - DNA, 25 bp, Homo sapien
gcattccccactgagatggctggag

SEQ ID NO: 2360165 - DNA, 25 bp, Homo sapien
agaaacacatttgggtaagagagct

SEQ ID NO: 2360166 - DNA, 25 bp, Homo sapien
tgtgtgtcataagggccaagttttt

SEQ ID NO: 2360167 - DNA, 25 bp, Homo sapien
ggctaatttaacaatgggtccatct

SEQ ID NO: 2360168 - DNA, 25 bp, Homo sapien
attcacatcttctactcccaagtta

SEQ ID NO: 2360169 - DNA, 25 bp, Homo sapien
ctgctcttctcatgagtcgaaatgt

SEQ ID NO: 2360170 - DNA, 25 bp, Homo sapien
gaagaaatatagacacatcgatctg

SEQ ID NO: 2360171 - DNA, 25 bp, Homo sapien
tggtctcgaatgacacctaagatgt

SEQ ID NO: 2360172 - DNA, 25 bp, Homo sapien
catgagtcgaaatgtattcactagc

SEQ ID NO: 2360173 - DNA, 25 bp, Homo sapien
tggactgaccatcccaagaagcctg

SEQ ID NO: 2360174 - DNA, 25 bp, Homo sapien
tatgcccaacccctggctgaagaga

SEQ ID NO: 2360175 - DNA, 25 bp, Homo sapien
gagggtgctggactgaccatcccaa

SEQ ID NO: 2360176 - DNA, 25 bp, Homo sapien
gggtctgactgacctcatttgggtc

SEQ ID NO: 2360177 - DNA, 25 bp, Homo sapien
ttgggccagctcttccatatgttta

SEQ ID NO: 2360178 - DNA, 25 bp, Homo sapien
atgtttatttgtgactgctggcttc

SEQ ID NO: 2360179 - DNA, 25 bp, Homo sapien
ttatttgtgactgctggcttctgtt

SEQ ID NO: 2360180 - DNA, 25 bp, Homo sapien
gtacccttgggccagctcttccata

SEQ ID NO: 2360181 - DNA, 25 bp, Homo sapien
tattaattgtgtgttcgtacagtgc

SEQ ID NO: 2360182 - DNA, 25 bp, Homo sapien
tcacatctaaatattcaaccagact

SEQ ID NO: 2360183 - DNA, 25 bp, Homo sapien
acagtgcaatgttacaatcattttc

SEQ ID NO: 2360184 - DNA, 25 bp, Homo sapien
tgtgtgttcgtacagtgcaatgtta

SEQ ID NO: 2360185 - DNA, 25 bp, Homo sapien
cccatggcacactgataagtgtttc

SEQ ID NO: 2360186 - DNA, 25 bp, Homo sapien
tgtttctcggtgactggttatggtg

SEQ ID NO: 2360187 - DNA, 25 bp, Homo sapien
tatgggataagtccagcacacacgc

SEQ ID NO: 2360188 - DNA, 25 bp, Homo sapien
gcacacacgccgagaagagtgaagg

SEQ ID NO: 2360189 - DNA, 25 bp, Homo sapien
tccaagtatttagaaccaactttca

SEQ ID NO: 2360190 - DNA, 25 bp, Homo sapien
cagtgcctggttgggaacatataat

SEQ ID NO: 2360191 - DNA, 25 bp, Homo sapien
gccttgcagagttccataggcaact

SEQ ID NO: 2360192 - DNA, 25 bp, Homo sapien
tgcagagttccataggcaactccct

SEQ ID NO: 2360193 - DNA, 25 bp, Homo sapien
taggcaactccctgggcttggtaac

SEQ ID NO: 2360194 - DNA, 25 bp, Homo sapien
caccaagccttgcagagttccatag

SEQ ID NO: 2360195 - DNA, 25 bp, Homo sapien
gagtggcattagcgatgaagtgatt

SEQ ID NO: 2360196 - DNA, 25 bp, Homo sapien
agggttcaggcaatgtcccaccagg

SEQ ID NO: 2360197 - DNA, 25 bp, Homo sapien
caagggttcaggcaatgtcccacca

SEQ ID NO: 2360198 - DNA, 25 bp, Homo sapien
gacaagggttcaggcaatgtcccac

SEQ ID NO: 2360199 - DNA, 25 bp, Homo sapien
gagacaagggttcaggcaatgtccc

SEQ ID NO: 2360200 - DNA, 25 bp, Homo sapien
gagtatcaattctgtttcgctggtt

SEQ ID NO: 2360201 - DNA, 25 bp, Homo sapien
gatatgctagtagatacatgagagt

SEQ ID NO: 2360202 - DNA, 25 bp, Homo sapien
tttcgctggttgtatcctatagtac

SEQ ID NO: 2360203 - DNA, 25 bp, Homo sapien
ttgtggatatgctagtagatacatg

SEQ ID NO: 2360204 - DNA, 25 bp, Homo sapien
tcatagccactatagctcatcacag

SEQ ID NO: 2360205 - DNA, 25 bp, Homo sapien
tcttcaatatcatagccactatagc

SEQ ID NO: 2360206 - DNA, 25 bp, Homo sapien
actgttgcattctgtccagctggca

SEQ ID NO: 2360207 - DNA, 25 bp, Homo sapien
ctatagctcatcacagcaactgttg

SEQ ID NO: 2360208 - DNA, 25 bp, Homo sapien
taggtttccttgtagcagcatccaa

SEQ ID NO: 2360209 - DNA, 25 bp, Homo sapien
tttttatatacaaggcaacgcccaa

SEQ ID NO: 2360210 - DNA, 25 bp, Homo sapien
gggccccatcactttatcaaaagtc

SEQ ID NO: 2360211 - DNA, 25 bp, Homo sapien
gcatctaagatttcatgtcgccaga

SEQ ID NO: 2360212 - DNA, 25 bp, Homo sapien
tggtacattacttccttccaaagga

SEQ ID NO: 2360213 - DNA, 25 bp, Homo sapien
ctgagtcactgtgggcatggactta

SEQ ID NO: 2360214 - DNA, 25 bp, Homo sapien
gcatggacttatttacaagcacttg

SEQ ID NO: 2360215 - DNA, 25 bp, Homo sapien
gggtacatctttgtactgtggttgc

SEQ ID NO: 2360216 - DNA, 25 bp, Homo sapien
gggtgtgattcccacaaagacaggg

SEQ ID NO: 2360217 - DNA, 25 bp, Homo sapien
gaggagcctgtttgggaccactgta

SEQ ID NO: 2360218 - DNA, 25 bp, Homo sapien
tacagtggcagctagaaagggacac

SEQ ID NO: 2360219 - DNA, 25 bp, Homo sapien
gagcagtgtcacaacatcaagggaa

SEQ ID NO: 2360220 - DNA, 25 bp, Homo sapien
cactgtcgttcacacttttacttaa

SEQ ID NO: 2360221 - DNA, 25 bp, Homo sapien
tcaagtttcactctatttatccaag

SEQ ID NO: 2360222 - DNA, 25 bp, Homo sapien
aagagagtaacatggccagagtagt

SEQ ID NO: 2360223 - DNA, 25 bp, Homo sapien
caggcaccactgtcgttcacacttt

SEQ ID NO: 2360224 - DNA, 25 bp, Homo sapien
tttttcaatatatgagtctgttgct

SEQ ID NO: 2360225 - DNA, 25 bp, Homo sapien
atttctggacgccttgtctgtctca

SEQ ID NO: 2360226 - DNA, 25 bp, Homo sapien
ctccaatttctggacgccttgtctg

SEQ ID NO: 2360227 - DNA, 25 bp, Homo sapien
tttcaatatatgagtctgttgctcc

SEQ ID NO: 2360228 - DNA, 25 bp, Homo sapien
ttcgtcaatccgagggctttcttta

SEQ ID NO: 2360229 - DNA, 25 bp, Homo sapien
tcgtcaatccgagggctttctttaa

SEQ ID NO: 2360230 - DNA, 25 bp, Homo sapien
tttcttcaagtgccctctttttgtg

SEQ ID NO: 2360231 - DNA, 25 bp, Homo sapien
ttcttcaagtgccctctttttgtgg

SEQ ID NO: 2360232 - DNA, 25 bp, Homo sapien
aggttccaagtgcactaactgtaaa

SEQ ID NO: 2360233 - DNA, 25 bp, Homo sapien
tgtgaaggttccaagtgcactaact

SEQ ID NO: 2360234 - DNA, 25 bp, Homo sapien
gttccaagtgcactaactgtaaaca

SEQ ID NO: 2360235 - DNA, 25 bp, Homo sapien
gaaggttccaagtgcactaactgta

SEQ ID NO: 2360236 - DNA, 25 bp, Homo sapien
tagggcccacactaagcgctgggtt

SEQ ID NO: 2360237 - DNA, 25 bp, Homo sapien
aggcctgatgcagtcccccttaggg

SEQ ID NO: 2360238 - DNA, 25 bp, Homo sapien
actcctttaggcctgatgcagtccc

SEQ ID NO: 2360239 - DNA, 25 bp, Homo sapien
actaagcgctgggttattgtgtggc

SEQ ID NO: 2360240 - DNA, 25 bp, Homo sapien
ttgaaacccttacaatgcttttgca

SEQ ID NO: 2360241 - DNA, 25 bp, Homo sapien
cacaaagggctgattaattgaaacc

SEQ ID NO: 2360242 - DNA, 25 bp, Homo sapien
gcatagtctgaagcgcacaaagggc

SEQ ID NO: 2360243 - DNA, 25 bp, Homo sapien
gcagttgaatggtttgatgtgataa

SEQ ID NO: 2360244 - DNA, 25 bp, Homo sapien
ctgctttggcaatatctgaaccaag

SEQ ID NO: 2360245 - DNA, 25 bp, Homo sapien
cataagcagctttcggatttttttc

SEQ ID NO: 2360246 - DNA, 25 bp, Homo sapien
ttggcaatatctgaaccaagggcac

SEQ ID NO: 2360247 - DNA, 25 bp, Homo sapien
cttccattataggaactgctttggc

SEQ ID NO: 2360248 - DNA, 25 bp, Homo sapien
tgggggacgatcaagccacaaacac

SEQ ID NO: 2360249 - DNA, 25 bp, Homo sapien
gtcttcctgggggacgatcaagcca

SEQ ID NO: 2360250 - DNA, 25 bp, Homo sapien
ttcctgggggacgatcaagccacaa

SEQ ID NO: 2360251 - DNA, 25 bp, Homo sapien
cctgggggacgatcaagccacaaac

SEQ ID NO: 2360252 - DNA, 25 bp, Homo sapien
tgatgatgtccggacagatgccaga

SEQ ID NO: 2360253 - DNA, 25 bp, Homo sapien
ttcatgatgatgtccggacagatgc

SEQ ID NO: 2360254 - DNA, 25 bp, Homo sapien
tgatgtccggacagatgccagaatc

SEQ ID NO: 2360255 - DNA, 25 bp, Homo sapien
cgtcattcgtgatgggaagccgtgt

SEQ ID NO: 2360256 - DNA, 25 bp, Homo sapien
tccccaagtagttataaccatggcg

SEQ ID NO: 2360257 - DNA, 25 bp, Homo sapien
gcctccaaacgcagtgccgtagtgg

SEQ ID NO: 2360258 - DNA, 25 bp, Homo sapien
tgtgatgccggatgtaacatagtct

SEQ ID NO: 2360259 - DNA, 25 bp, Homo sapien
ggcgaacgaggtcctcacacacatc

SEQ ID NO: 2360260 - DNA, 25 bp, Homo sapien
ccctgggtcatacgggaagaagaag

SEQ ID NO: 2360261 - DNA, 25 bp, Homo sapien
caagcttgcctgaaggtatacttaa

SEQ ID NO: 2360262 - DNA, 25 bp, Homo sapien
tgtgtcagaccgcattcgaagccgt

SEQ ID NO: 2360263 - DNA, 25 bp, Homo sapien
tcttaccagtacaaacagcactcct

SEQ ID NO: 2360264 - DNA, 25 bp, Homo sapien
gggccaaaatagatgtatgcttcta

SEQ ID NO: 2360265 - DNA, 25 bp, Homo sapien
ttatctagcaccatgtgtttcagct

SEQ ID NO: 2360266 - DNA, 25 bp, Homo sapien
gtttcagcttctgatagtacacggg

SEQ ID NO: 2360267 - DNA, 25 bp, Homo sapien
cccgggcccgggcatgcattttatc

SEQ ID NO: 2360268 - DNA, 25 bp, Homo sapien
gcataagcacacctatcccaaagag

SEQ ID NO: 2360269 - DNA, 25 bp, Homo sapien
caataactggacagggaccttggac

SEQ ID NO: 2360270 - DNA, 25 bp, Homo sapien
taaacaaacaaagaggtagcatcac

SEQ ID NO: 2360271 - DNA, 25 bp, Homo sapien
tggacacgctgcttagcctcatttg

SEQ ID NO: 2360272 - DNA, 25 bp, Homo sapien
ctttgaaacaagttattagacaaat

SEQ ID NO: 2360273 - DNA, 25 bp, Homo sapien
ttgaaacaagttattagacaaatgt

SEQ ID NO: 2360274 - DNA, 25 bp, Homo sapien
aagttattagacaaatgtgttatta

SEQ ID NO: 2360275 - DNA, 25 bp, Homo sapien
acaagttattagacaaatgtgttat

SEQ ID NO: 2360276 - DNA, 25 bp, Homo sapien
tcacgagaccgtccttcagtgggtt

SEQ ID NO: 2360277 - DNA, 25 bp, Homo sapien
gcatactggctccataaccgattaa

SEQ ID NO: 2360278 - DNA, 25 bp, Homo sapien
gtctctctagcaaaagcatactggc

SEQ ID NO: 2360279 - DNA, 25 bp, Homo sapien
agtcacgttccatttccccgagacg

SEQ ID NO: 2360280 - DNA, 25 bp, Homo sapien
ctacaactgtagaagggtccctggg

SEQ ID NO: 2360281 - DNA, 25 bp, Homo sapien
caagttttgtaagtgtatggagccc

SEQ ID NO: 2360282 - DNA, 25 bp, Homo sapien
gcaacaagggtataagtaggccact

SEQ ID NO: 2360283 - DNA, 25 bp, Homo sapien
tcagcaagcgttagacagacagcaa

SEQ ID NO: 2360284 - DNA, 25 bp, Homo sapien
catagactgtagttcctggaagagc

SEQ ID NO: 2360285 - DNA, 25 bp, Homo sapien
agacacgtggcaggatgacttgcag

SEQ ID NO: 2360286 - DNA, 25 bp, Homo sapien
gatgatgttcatagactgtagttcc

SEQ ID NO: 2360287 - DNA, 25 bp, Homo sapien
cttgcaggcatacggaatacggagg

SEQ ID NO: 2360288 - DNA, 25 bp, Homo sapien
tctctcccatggctcgaggctcaat

SEQ ID NO: 2360289 - DNA, 25 bp, Homo sapien
ttttagagagagaatacgcaaggga

SEQ ID NO: 2360290 - DNA, 25 bp, Homo sapien
gccttgcagtccacatggtcagcat

SEQ ID NO: 2360291 - DNA, 25 bp, Homo sapien
tcacaggaggagacgtagtcctaaa

SEQ ID NO: 2360292 - DNA, 25 bp, Homo sapien
taatagcaattgagtccataggaga

SEQ ID NO: 2360293 - DNA, 25 bp, Homo sapien
gcttgacaaggtaggaacaaattca

SEQ ID NO: 2360294 - DNA, 25 bp, Homo sapien
cataggagaagacgacattcttgct

SEQ ID NO: 2360295 - DNA, 25 bp, Homo sapien
cgaatagtattgcatggtacaatca

SEQ ID NO: 2360296 - DNA, 25 bp, Homo sapien
tgctacacgatgtgagataatcagg

SEQ ID NO: 2360297 - DNA, 25 bp, Homo sapien
gcctgaccctctgagtgttcactga

SEQ ID NO: 2360298 - DNA, 25 bp, Homo sapien
cacactgcagggcaaatggatttgg

SEQ ID NO: 2360299 - DNA, 25 bp, Homo sapien
taaaaagcccacaaagtacagtatg

SEQ ID NO: 2360300 - DNA, 25 bp, Homo sapien
cctcagaaagattagactggcttgg

SEQ ID NO: 2360301 - DNA, 25 bp, Homo sapien
caaactcgtaggctgaaatgacctt

SEQ ID NO: 2360302 - DNA, 25 bp, Homo sapien
taaaagatacaaccattcaagggca

SEQ ID NO: 2360303 - DNA, 25 bp, Homo sapien
taaggatgtctcgacttgaaaaccc

SEQ ID NO: 2360304 - DNA, 25 bp, Homo sapien
ggattatttacaacctgggctacta

SEQ ID NO: 2360305 - DNA, 25 bp, Homo sapien
tcccttgacacgtgcggattccaat

SEQ ID NO: 2360306 - DNA, 25 bp, Homo sapien
catatcaatgaccatcccacaattt

SEQ ID NO: 2360307 - DNA, 25 bp, Homo sapien
cgagtcttaacacggagcaggcaag

SEQ ID NO: 2360308 - DNA, 25 bp, Homo sapien
aacccttgcctgatgaagttgtaca

SEQ ID NO: 2360309 - DNA, 25 bp, Homo sapien
aactctcttcgaaaggaaactcagg

SEQ ID NO: 2360310 - DNA, 25 bp, Homo sapien
tatgggttctgcacttggtcctagt

SEQ ID NO: 2360311 - DNA, 25 bp, Homo sapien
tcattgttaaacagggcagctttca

SEQ ID NO: 2360312 - DNA, 25 bp, Homo sapien
atggttgttccagggaagtgtgctc

SEQ ID NO: 2360313 - DNA, 25 bp, Homo sapien
ctaaaatggttgttccagggaagtg

SEQ ID NO: 2360314 - DNA, 25 bp, Homo sapien
ggttgttccagggaagtgtgctcac

SEQ ID NO: 2360315 - DNA, 25 bp, Homo sapien
aaatggttgttccagggaagtgtgc

SEQ ID NO: 2360316 - DNA, 25 bp, Homo sapien
gtggccttccaagcactcacttagg

SEQ ID NO: 2360317 - DNA, 25 bp, Homo sapien
gataggaagagaaaccgtggccttc

SEQ ID NO: 2360318 - DNA, 25 bp, Homo sapien
gacagcagactgacatgaccagttg

SEQ ID NO: 2360319 - DNA, 25 bp, Homo sapien
gcgatgctgtcccatcccttcaagg

SEQ ID NO: 2360320 - DNA, 25 bp, Homo sapien
cagtccctcaattatccagaagcag

SEQ ID NO: 2360321 - DNA, 25 bp, Homo sapien
gaagcagattggctatcagtttcct

SEQ ID NO: 2360322 - DNA, 25 bp, Homo sapien
gaccaacaaatgattgacagcagct

SEQ ID NO: 2360323 - DNA, 25 bp, Homo sapien
catgattagggtacattactggcat

SEQ ID NO: 2360324 - DNA, 25 bp, Homo sapien
gacccagccctattgctgtcatatt

SEQ ID NO: 2360325 - DNA, 25 bp, Homo sapien
ttcaagcccatttgctcccacaggg

SEQ ID NO: 2360326 - DNA, 25 bp, Homo sapien
caaggcagaattttcagcgttgggg

SEQ ID NO: 2360327 - DNA, 25 bp, Homo sapien
caaagagagttgtcgatgctgagat

SEQ ID NO: 2360328 - DNA, 25 bp, Homo sapien
cctaattgccaatgactgtttctgt

SEQ ID NO: 2360329 - DNA, 25 bp, Homo sapien
gactttttcctttgcacataagcca

SEQ ID NO: 2360330 - DNA, 25 bp, Homo sapien
tttctgtggacacgagggtctgcta

SEQ ID NO: 2360331 - DNA, 25 bp, Homo sapien
gtgtaaggcctgcatttttccaggg

SEQ ID NO: 2360332 - DNA, 25 bp, Homo sapien
ccaaagcctccattatgcgggtggt

SEQ ID NO: 2360333 - DNA, 25 bp, Homo sapien
tctctagctgccctcatcccgccct

SEQ ID NO: 2360334 - DNA, 25 bp, Homo sapien
gccctcctgatcctcgtccatttcc

SEQ ID NO: 2360335 - DNA, 25 bp, Homo sapien
tgtggggtctgctcactttgcctct

SEQ ID NO: 2360336 - DNA, 25 bp, Homo sapien
ctggcgtaccatgtttgggtccttg

SEQ ID NO: 2360337 - DNA, 25 bp, Homo sapien
ctggtctaaactctgcattgctgaa

SEQ ID NO: 2360338 - DNA, 25 bp, Homo sapien
cttctggtctaaactctgcattgct

SEQ ID NO: 2360339 - DNA, 25 bp, Homo sapien
tatttacaggttgcttctggtctaa

SEQ ID NO: 2360340 - DNA, 25 bp, Homo sapien
aggttgcttctggtctaaactctgc

SEQ ID NO: 2360341 - DNA, 25 bp, Homo sapien
ctagacctgctgtaaaagggatgac

SEQ ID NO: 2360342 - DNA, 25 bp, Homo sapien
gacctgctgtaaaagggatgactca

SEQ ID NO: 2360343 - DNA, 25 bp, Homo sapien
tagacctgctgtaaaagggatgact

SEQ ID NO: 2360344 - DNA, 25 bp, Homo sapien
cctgctgtaaaagggatgactcagc

SEQ ID NO: 2360345 - DNA, 25 bp, Homo sapien
aaaaactcctttgaactcacattat

SEQ ID NO: 2360346 - DNA, 25 bp, Homo sapien
taatcctctttaaaagtcaacctca

SEQ ID NO: 2360347 - DNA, 25 bp, Homo sapien
tgtataatcactaccataataaaaa

SEQ ID NO: 2360348 - DNA, 25 bp, Homo sapien
ctcactagggaacaatttatacaca

SEQ ID NO: 2360349 - DNA, 25 bp, Homo sapien
gggattgttactctgtgttactgtc

SEQ ID NO: 2360350 - DNA, 25 bp, Homo sapien
ctgggattgttactctgtgttactg

SEQ ID NO: 2360351 - DNA, 25 bp, Homo sapien
ctgtgttactgtcctatttgccagt

SEQ ID NO: 2360352 - DNA, 25 bp, Homo sapien
ggattgttactctgtgttactgtcc

SEQ ID NO: 2360353 - DNA, 25 bp, Homo sapien
tggccaaacatctcctaattactgt

SEQ ID NO: 2360354 - DNA, 25 bp, Homo sapien
cttctcctttgagccgcttggccaa

SEQ ID NO: 2360355 - DNA, 25 bp, Homo sapien
catctcctaattactgttacagtgt

SEQ ID NO: 2360356 - DNA, 25 bp, Homo sapien
gagccgcttggccaaacatctccta

SEQ ID NO: 2360357 - DNA, 25 bp, Homo sapien
tgttccccaatcctgtcaaagcaat

SEQ ID NO: 2360358 - DNA, 25 bp, Homo sapien
gttccccaatcctgtcaaagcaatt

SEQ ID NO: 2360359 - DNA, 25 bp, Homo sapien
ttttctgggcatacaatgttcccca

SEQ ID NO: 2360360 - DNA, 25 bp, Homo sapien
tgggcatacaatgttccccaatcct

SEQ ID NO: 2360361 - DNA, 25 bp, Homo sapien
caggcagacccacaaaggtgtggag

SEQ ID NO: 2360362 - DNA, 25 bp, Homo sapien
ggcagacccacaaaggtgtggagtt

SEQ ID NO: 2360363 - DNA, 25 bp, Homo sapien
ccaggcagacccacaaaggtgtgga

SEQ ID NO: 2360364 - DNA, 25 bp, Homo sapien
agacccacaaaggtgtggagttggc

SEQ ID NO: 2360365 - DNA, 25 bp, Homo sapien
tggcacgagttctcgggcatgacca

SEQ ID NO: 2360366 - DNA, 25 bp, Homo sapien
ggatggcacgagttctcgggcatga

SEQ ID NO: 2360367 - DNA, 25 bp, Homo sapien
ggcacgagttctcgggcatgaccat

SEQ ID NO: 2360368 - DNA, 25 bp, Homo sapien
ctgggatggcacgagttctcgggca

SEQ ID NO: 2360369 - DNA, 25 bp, Homo sapien
tcgtggtgcgcctggcagcaatgac

SEQ ID NO: 2360370 - DNA, 25 bp, Homo sapien
gatctgactgttcgcgttcgccttt

SEQ ID NO: 2360371 - DNA, 25 bp, Homo sapien
agcggaattcgaagtcagatctgac

SEQ ID NO: 2360372 - DNA, 25 bp, Homo sapien
tgtagccttagcttctctgccactg

SEQ ID NO: 2360373 - DNA, 25 bp, Homo sapien
gggacactcagtaatccagccgggc

SEQ ID NO: 2360374 - DNA, 25 bp, Homo sapien
aaatgtttgcggatgtttcatggga

SEQ ID NO: 2360375 - DNA, 25 bp, Homo sapien
agccaaacccgtcaaaatgtttgcg

SEQ ID NO: 2360376 - DNA, 25 bp, Homo sapien
caatgtcattgataggccagccggc

SEQ ID NO: 2360377 - DNA, 25 bp, Homo sapien
gctcttcccatggacagcacaggcg

SEQ ID NO: 2360378 - DNA, 25 bp, Homo sapien
tggacagcacaggcgccccccaaaa

SEQ ID NO: 2360379 - DNA, 25 bp, Homo sapien
aggcgccccccaaaagtcctgatgt

SEQ ID NO: 2360380 - DNA, 25 bp, Homo sapien
tcctgatgtttggggatcccctgtg

SEQ ID NO: 2360381 - DNA, 25 bp, Homo sapien
tccatgtcgggttcctccagtaacc

SEQ ID NO: 2360382 - DNA, 25 bp, Homo sapien
tggaatccatgtcgggttcctccag

SEQ ID NO: 2360383 - DNA, 25 bp, Homo sapien
aatccatgtcgggttcctccagtaa

SEQ ID NO: 2360384 - DNA, 25 bp, Homo sapien
ctgtggaatccatgtcgggttcctc

SEQ ID NO: 2360385 - DNA, 25 bp, Homo sapien
gcgagccagcgcatctttacgtaac

SEQ ID NO: 2360386 - DNA, 25 bp, Homo sapien
ttgtgtccagggcaagcgaaagcgc

SEQ ID NO: 2360387 - DNA, 25 bp, Homo sapien
tgcaagctctgcgttattctttggg

SEQ ID NO: 2360388 - DNA, 25 bp, Homo sapien
catcgcctcgaattgaaaacttctg

SEQ ID NO: 2360389 - DNA, 25 bp, Homo sapien
cagctgcgcgtctctaccagccgga

SEQ ID NO: 2360390 - DNA, 25 bp, Homo sapien
gcgtctctaccagccggagcctcgg

SEQ ID NO: 2360391 - DNA, 25 bp, Homo sapien
agctgcgcgtctctaccagccggag

SEQ ID NO: 2360392 - DNA, 25 bp, Homo sapien
tctaccagccggagcctcggtcccc

SEQ ID NO: 2360393 - DNA, 25 bp, Homo sapien
ccaaaatgaaaatagccgggttgca

SEQ ID NO: 2360394 - DNA, 25 bp, Homo sapien
gctcaaggaaaggacgtgcatgctc

SEQ ID NO: 2360395 - DNA, 25 bp, Homo sapien
caacgccgagtttagcgggccagtc

SEQ ID NO: 2360396 - DNA, 25 bp, Homo sapien
tactggaggaagaaccgagataccg

SEQ ID NO: 2360397 - DNA, 25 bp, Homo sapien
cccctggcaagagcagtccggtgtc

SEQ ID NO: 2360398 - DNA, 25 bp, Homo sapien
ttctggggcaatgccccgatgaccc

SEQ ID NO: 2360399 - DNA, 25 bp, Homo sapien
cagggaccgaggaaagaccttctgg

SEQ ID NO: 2360400 - DNA, 25 bp, Homo sapien
aagagcagtccggtgtccgggccac

SEQ ID NO: 2360401 - DNA, 25 bp, Homo sapien
gcgtgggccgctcgaaaatacttgg

SEQ ID NO: 2360402 - DNA, 25 bp, Homo sapien
catcgagtataggaaggagaacttc

SEQ ID NO: 2360403 - DNA, 25 bp, Homo sapien
agggcgcagcgcttgagatgaaaaa

SEQ ID NO: 2360404 - DNA, 25 bp, Homo sapien
tttaccgccagtagagacctcagcg

SEQ ID NO: 2360405 - DNA, 25 bp, Homo sapien
gatcgcgcgcgatcttatacaaaag

SEQ ID NO: 2360406 - DNA, 25 bp, Homo sapien
cagaatcgaactgctccatggagcg

SEQ ID NO: 2360407 - DNA, 25 bp, Homo sapien
gagcaccagttgcatcgagaacaga

SEQ ID NO: 2360408 - DNA, 25 bp, Homo sapien
cacttgctgtgagtcggttgttcca

SEQ ID NO: 2360409 - DNA, 25 bp, Homo sapien
agaaggtgcgtcgactgcccctgcg

SEQ ID NO: 2360410 - DNA, 25 bp, Homo sapien
gctttgctttgtcgggctcggcagc

SEQ ID NO: 2360411 - DNA, 25 bp, Homo sapien
ctgcgcgcgcctgtcgcctttgcct

SEQ ID NO: 2360412 - DNA, 25 bp, Homo sapien
cagcgagagcgcctagggcccagga

SEQ ID NO: 2360413 - DNA, 25 bp, Homo sapien
tcagcacccacttttgcgcggcgtg

SEQ ID NO: 2360414 - DNA, 25 bp, Homo sapien
acaaacacgtagctgccggtggccc

SEQ ID NO: 2360415 - DNA, 25 bp, Homo sapien
cccatcgttctcgaatttccggata

SEQ ID NO: 2360416 - DNA, 25 bp, Homo sapien
agtaactgagcaacgatcacccggg

SEQ ID NO: 2360417 - DNA, 25 bp, Homo sapien
ttccagcagtctccatggtgacgcg

SEQ ID NO: 2360418 - DNA, 25 bp, Homo sapien
tcttcctcgcactgggccctttgtt

SEQ ID NO: 2360419 - DNA, 25 bp, Homo sapien
ggaggccccgtgcaaactcctctct

SEQ ID NO: 2360420 - DNA, 25 bp, Homo sapien
ggccctttgttgtcggcctctgcct

SEQ ID NO: 2360421 - DNA, 25 bp, Homo sapien
ttgcgccaggtctgttttccaccac

SEQ ID NO: 2360422 - DNA, 25 bp, Homo sapien
tggcgcctaacctccggacgggtga

SEQ ID NO: 2360423 - DNA, 25 bp, Homo sapien
ccagctggcgcctaacctccggacg

SEQ ID NO: 2360424 - DNA, 25 bp, Homo sapien
gggcgcactgcccagctggcgccta

SEQ ID NO: 2360425 - DNA, 25 bp, Homo sapien
gcactgcccagctggcgcctaacct

SEQ ID NO: 2360426 - DNA, 25 bp, Homo sapien
aaagccagaacctttcacgttggtg

SEQ ID NO: 2360427 - DNA, 25 bp, Homo sapien
acctttcacgttggtgagcctgtgg

SEQ ID NO: 2360428 - DNA, 25 bp, Homo sapien
agaacctttcacgttggtgagcctg

SEQ ID NO: 2360429 - DNA, 25 bp, Homo sapien
agccagaacctttcacgttggtgag

SEQ ID NO: 2360430 - DNA, 25 bp, Homo sapien
ggatacagccccataaagtctagtg

SEQ ID NO: 2360431 - DNA, 25 bp, Homo sapien
gttccctaaattggcactggataca

SEQ ID NO: 2360432 - DNA, 25 bp, Homo sapien
ccataaagtctagtgtcttttagta

SEQ ID NO: 2360433 - DNA, 25 bp, Homo sapien
agcatttcagtgttccctaaattgg

SEQ ID NO: 2360434 - DNA, 25 bp, Homo sapien
tgggctctcaggaacctgtggagta

SEQ ID NO: 2360435 - DNA, 25 bp, Homo sapien
gagtgtccggcatcccaacttgtga

SEQ ID NO: 2360436 - DNA, 25 bp, Homo sapien
caagtgacctgcagaacacgtagga

SEQ ID NO: 2360437 - DNA, 25 bp, Homo sapien
caacttgtgatgtcaccactttata

SEQ ID NO: 2360438 - DNA, 25 bp, Homo sapien
gccagtgtcataactaaaccctgac

SEQ ID NO: 2360439 - DNA, 25 bp, Homo sapien
tgggattcaaatccacctaaagcca

SEQ ID NO: 2360440 - DNA, 25 bp, Homo sapien
tcaaatccacctaaagccagtgtca

SEQ ID NO: 2360441 - DNA, 25 bp, Homo sapien
tccacctaaagccagtgtcataact

SEQ ID NO: 2360442 - DNA, 25 bp, Homo sapien
cacaggtgttgcctccacaaagaca

SEQ ID NO: 2360443 - DNA, 25 bp, Homo sapien
gatttaaattcaagcccacaggtgt

SEQ ID NO: 2360444 - DNA, 25 bp, Homo sapien
aaattcaagcccacaggtgttgcct

SEQ ID NO: 2360445 - DNA, 25 bp, Homo sapien
aggatttaaattcaagcccacaggt

SEQ ID NO: 2360446 - DNA, 25 bp, Homo sapien
tttcccagcggcgctcaaggctcag

SEQ ID NO: 2360447 - DNA, 25 bp, Homo sapien
gcgagctctggactgacggcgctcc

SEQ ID NO: 2360448 - DNA, 25 bp, Homo sapien
tgcccagtacatgcggggcgagctc

SEQ ID NO: 2360449 - DNA, 25 bp, Homo sapien
gctcagccggcctctgtgcgaggct

SEQ ID NO: 2360450 - DNA, 25 bp, Homo sapien
gcgacacacaggagtttggagaagc

SEQ ID NO: 2360451 - DNA, 25 bp, Homo sapien
cacacaggagtttggagaagcccag

SEQ ID NO: 2360452 - DNA, 25 bp, Homo sapien
tggctccctgccggtggcagtggcg

SEQ ID NO: 2360453 - DNA, 25 bp, Homo sapien
gtggcagtggcgacacacaggagtt

SEQ ID NO: 2360454 - DNA, 25 bp, Homo sapien
tgtcgcctcccgcaccagggtgggc

SEQ ID NO: 2360455 - DNA, 25 bp, Homo sapien
cagtggaacggcgccgtcgaggcct

SEQ ID NO: 2360456 - DNA, 25 bp, Homo sapien
tggaacggcgccgtcgaggcctggt

SEQ ID NO: 2360457 - DNA, 25 bp, Homo sapien
aacggcgccgtcgaggcctggtcct

SEQ ID NO: 2360458 - DNA, 25 bp, Homo sapien
atgtgaagttattttctcgggtaca

SEQ ID NO: 2360459 - DNA, 25 bp, Homo sapien
tatgcctctgcactttggactgaag

SEQ ID NO: 2360460 - DNA, 25 bp, Homo sapien
tagaggaagatctttatgcctctgc

SEQ ID NO: 2360461 - DNA, 25 bp, Homo sapien
tctcgggtacatataatgaggttga

SEQ ID NO: 2360462 - DNA, 25 bp, Homo sapien
taaggaccaagcttgtgctaagtgc

SEQ ID NO: 2360463 - DNA, 25 bp, Homo sapien
tcctgggctgtgaagcatcccttcc

SEQ ID NO: 2360464 - DNA, 25 bp, Homo sapien
tgcctacagccgtgagcagaggctc

SEQ ID NO: 2360465 - DNA, 25 bp, Homo sapien
tgctaagtgcccaacgggatttgcc

SEQ ID NO: 2360466 - DNA, 25 bp, Homo sapien
ttcctcacggcagcacctgtcctcc

SEQ ID NO: 2360467 - DNA, 25 bp, Homo sapien
agtgcccacccgcaagagtttgagt

SEQ ID NO: 2360468 - DNA, 25 bp, Homo sapien
tgtcctccacactgtgcaatcccac

SEQ ID NO: 2360469 - DNA, 25 bp, Homo sapien
tattaaccaggtaagccaagagagc

SEQ ID NO: 2360470 - DNA, 25 bp, Homo sapien
cgtggcaacattcccgagagaagct

SEQ ID NO: 2360471 - DNA, 25 bp, Homo sapien
ttctctgaaaacttcgtggcaacat

SEQ ID NO: 2360472 - DNA, 25 bp, Homo sapien
cccctgtgattgatgggacattctc

SEQ ID NO: 2360473 - DNA, 25 bp, Homo sapien
caaggtccttagaagggcctgttct

SEQ ID NO: 2360474 - DNA, 25 bp, Homo sapien
cagacttggccaactgaaccactgg

SEQ ID NO: 2360475 - DNA, 25 bp, Homo sapien
taaaaccagacttggccaactgaac

SEQ ID NO: 2360476 - DNA, 25 bp, Homo sapien
ttgtaaaaccagacttggccaactg

SEQ ID NO: 2360477 - DNA, 25 bp, Homo sapien
cagtttgtaaaaccagacttggcca

SEQ ID NO: 2360478 - DNA, 25 bp, Homo sapien
tctggagtatttgtagcaccaactg

SEQ ID NO: 2360479 - DNA, 25 bp, Homo sapien
catgaattctggagtatttgtagca

SEQ ID NO: 2360480 - DNA, 25 bp, Homo sapien
tggtcagattccatgaattctggag

SEQ ID NO: 2360481 - DNA, 25 bp, Homo sapien
ttgtagcaccaactgaggattatct

SEQ ID NO: 2360482 - DNA, 25 bp, Homo sapien
ttttgcatggagttccatgtgcacc

SEQ ID NO: 2360483 - DNA, 25 bp, Homo sapien
tggagttccatgtgcaccattgctg

SEQ ID NO: 2360484 - DNA, 25 bp, Homo sapien
gtttggatgcaaaatggctctttga

SEQ ID NO: 2360485 - DNA, 25 bp, Homo sapien
ctgatgagactgctgagtagtttgg

SEQ ID NO: 2360486 - DNA, 25 bp, Homo sapien
agatgtgtggctggaataacgtttg

SEQ ID NO: 2360487 - DNA, 25 bp, Homo sapien
tgtgtggctggaataacgtttgttt

SEQ ID NO: 2360488 - DNA, 25 bp, Homo sapien
tttgttttcactttcgttgagacat

SEQ ID NO: 2360489 - DNA, 25 bp, Homo sapien
ttcactttcgttgagacatctttca

SEQ ID NO: 2360490 - DNA, 25 bp, Homo sapien
agatttaacacatacccaaacacaa

SEQ ID NO: 2360491 - DNA, 25 bp, Homo sapien
ctacacctggccgaaatgatcttat

SEQ ID NO: 2360492 - DNA, 25 bp, Homo sapien
cctggccgaaatgatcttatatgta

SEQ ID NO: 2360493 - DNA, 25 bp, Homo sapien
aagatttaacacatacccaaacaca

SEQ ID NO: 2360494 - DNA, 25 bp, Homo sapien
tcatttcccctcatttgcctcgttt

SEQ ID NO: 2360495 - DNA, 25 bp, Homo sapien
tgccaaacgtttcatttcccctcat

SEQ ID NO: 2360496 - DNA, 25 bp, Homo sapien
catggggctgccaaacgtttcattt

SEQ ID NO: 2360497 - DNA, 25 bp, Homo sapien
gctgccaaacgtttcatttcccctc

SEQ ID NO: 2360498 - DNA, 25 bp, Homo sapien
tcctaggcaagagctgtgaaatgca

SEQ ID NO: 2360499 - DNA, 25 bp, Homo sapien
agcaccaagtgtggggtatgagcct

SEQ ID NO: 2360500 - DNA, 25 bp, Homo sapien
ttaagtcctaggcaagagctgtgaa

SEQ ID NO: 2360501 - DNA, 25 bp, Homo sapien
tccaggatgctatagcagcaccaag

SEQ ID NO: 2360502 - DNA, 25 bp, Homo sapien
attgcagagtagcaggagtggagtg

SEQ ID NO: 2360503 - DNA, 25 bp, Homo sapien
cattgcagagtagcaggagtggagt

SEQ ID NO: 2360504 - DNA, 25 bp, Homo sapien
ttgcagagtagcaggagtggagtgg

SEQ ID NO: 2360505 - DNA, 25 bp, Homo sapien
gagtggggcttggatgctctattat

SEQ ID NO: 2360506 - DNA, 25 bp, Homo sapien
ctccatctgtagctgaggtcatccg

SEQ ID NO: 2360507 - DNA, 25 bp, Homo sapien
ccatctgtagctgaggtcatccgga

SEQ ID NO: 2360508 - DNA, 25 bp, Homo sapien
aggtcatccggagggacacagtcac

SEQ ID NO: 2360509 - DNA, 25 bp, Homo sapien
gggacacagtcacatctagtggcat

SEQ ID NO: 2360510 - DNA, 25 bp, Homo sapien
ctccaccgtgttccacgcatcaagg

SEQ ID NO: 2360511 - DNA, 25 bp, Homo sapien
tgttccacgcatcaaggcgcaactc

SEQ ID NO: 2360512 - DNA, 25 bp, Homo sapien
cgatccatcaccttcctaccgcagg

SEQ ID NO: 2360513 - DNA, 25 bp, Homo sapien
catcaaggcgcaactcacatttctc

SEQ ID NO: 2360514 - DNA, 25 bp, Homo sapien
gagggatgcagaccccctctgcaat

SEQ ID NO: 2360515 - DNA, 25 bp, Homo sapien
tatcattcttctcgcagaaatccag

SEQ ID NO: 2360516 - DNA, 25 bp, Homo sapien
ggcagcattgacaggttgggtatca

SEQ ID NO: 2360517 - DNA, 25 bp, Homo sapien
tccaggtaatgcatatagagggcac

SEQ ID NO: 2360518 - DNA, 25 bp, Homo sapien
acactcggtgtgcagtgagttggcc

SEQ ID NO: 2360519 - DNA, 25 bp, Homo sapien
agagggactcctcagttacccgagg

SEQ ID NO: 2360520 - DNA, 25 bp, Homo sapien
gaagcttccaacacaataacagagc

SEQ ID NO: 2360521 - DNA, 25 bp, Homo sapien
ctaagaatcagggtgtaacactcgg

SEQ ID NO: 2360522 - DNA, 25 bp, Homo sapien
tgccacttccaacctgtgaccaagt

SEQ ID NO: 2360523 - DNA, 25 bp, Homo sapien
tgtgaccaagttctaccctctatct

SEQ ID NO: 2360524 - DNA, 25 bp, Homo sapien
gattgccttgtatgtgccacttcca

SEQ ID NO: 2360525 - DNA, 25 bp, Homo sapien
ccatctctacgcatcccaggaccat

SEQ ID NO: 2360526 - DNA, 25 bp, Homo sapien
cacaccagagctcgcctttcccaaa

SEQ ID NO: 2360527 - DNA, 25 bp, Homo sapien
accagagctcgcctttcccaaacca

SEQ ID NO: 2360528 - DNA, 25 bp, Homo sapien
accacaccagagctcgcctttccca

SEQ ID NO: 2360529 - DNA, 25 bp, Homo sapien
ctgaccacaccagagctcgcctttc

SEQ ID NO: 2360530 - DNA, 25 bp, Homo sapien
cagagcccatccagccacgcagcat

SEQ ID NO: 2360531 - DNA, 25 bp, Homo sapien
cttctaccttaaactctctctccct

SEQ ID NO: 2360532 - DNA, 25 bp, Homo sapien
gaggcaataacgtgtacaatcagtg

SEQ ID NO: 2360533 - DNA, 25 bp, Homo sapien
cagtcttgttgcctcaccagtggaa

SEQ ID NO: 2360534 - DNA, 25 bp, Homo sapien
gattctacgcactgtgatcttgagg

SEQ ID NO: 2360535 - DNA, 25 bp, Homo sapien
gggcctgggaattcacggatcaatt

SEQ ID NO: 2360536 - DNA, 25 bp, Homo sapien
caaagaccccaatccacatctgttg

SEQ ID NO: 2360537 - DNA, 25 bp, Homo sapien
aggatgataattgctgttgcccagg

SEQ ID NO: 2360538 - DNA, 25 bp, Homo sapien
cacaccagttcacaagaaatccgtg

SEQ ID NO: 2360539 - DNA, 25 bp, Homo sapien
gcatctctcaaggtgaaaacataac

SEQ ID NO: 2360540 - DNA, 25 bp, Homo sapien
gtggttaactgaggaaactgctgcc

SEQ ID NO: 2360541 - DNA, 25 bp, Homo sapien
ctcgggtcccgagtcttctggtggt

SEQ ID NO: 2360542 - DNA, 25 bp, Homo sapien
aactgaggaaactgctgccttatga

SEQ ID NO: 2360543 - DNA, 25 bp, Homo sapien
cctcgggtcccgagtcttctggtgg

SEQ ID NO: 2360544 - DNA, 25 bp, Homo sapien
tcgtcttgggcttttggacaacctc

SEQ ID NO: 2360545 - DNA, 25 bp, Homo sapien
agcagcagagccaactcgtcttggg

SEQ ID NO: 2360546 - DNA, 25 bp, Homo sapien
gaggcccatagatgtgcgctctgca

SEQ ID NO: 2360547 - DNA, 25 bp, Homo sapien
ctcaggataaagagccaagggtgtg

SEQ ID NO: 2360548 - DNA, 25 bp, Homo sapien
ctacttctcaactgtcataactgcc

SEQ ID NO: 2360549 - DNA, 25 bp, Homo sapien
tttgtgctgagcgaagtctgccttc

SEQ ID NO: 2360550 - DNA, 25 bp, Homo sapien
tgtgccttccgtgtcttctactact

SEQ ID NO: 2360551 - DNA, 25 bp, Homo sapien
ctgagcgaagtctgccttctgtgcc

SEQ ID NO: 2360552 - DNA, 25 bp, Homo sapien
gcttagtgggcatctcgaatctatc

SEQ ID NO: 2360553 - DNA, 25 bp, Homo sapien
aatctatctgaatgccttctgggat

SEQ ID NO: 2360554 - DNA, 25 bp, Homo sapien
tccgtgatatttctgcttagtgggc

SEQ ID NO: 2360555 - DNA, 25 bp, Homo sapien
gaagaattcagaccctccgaaggca

SEQ ID NO: 2360556 - DNA, 25 bp, Homo sapien
gtggacctcgctttcagaaacaccg

SEQ ID NO: 2360557 - DNA, 25 bp, Homo sapien
aatgttaggtcatccgtggacctcg

SEQ ID NO: 2360558 - DNA, 25 bp, Homo sapien
tagagtcgattttcacagtcccgtg

SEQ ID NO: 2360559 - DNA, 25 bp, Homo sapien
cagtcccgtggcaatacaaatgtta

SEQ ID NO: 2360560 - DNA, 25 bp, Homo sapien
catcataatattgggagctttcttt

SEQ ID NO: 2360561 - DNA, 25 bp, Homo sapien
ggctggcagatttagatctttgaca

SEQ ID NO: 2360562 - DNA, 25 bp, Homo sapien
tttcttgcccgtctcactcacccag

SEQ ID NO: 2360563 - DNA, 25 bp, Homo sapien
tggcagcagtgttccgagtttggac

SEQ ID NO: 2360564 - DNA, 25 bp, Homo sapien
tggaccggggtgaatatgccactgt

SEQ ID NO: 2360565 - DNA, 25 bp, Homo sapien
caaagttggctcttattacagtgtc

SEQ ID NO: 2360566 - DNA, 25 bp, Homo sapien
tcttattacagtgtccagtattctc

SEQ ID NO: 2360567 - DNA, 25 bp, Homo sapien
agttggctcttattacagtgtccag

SEQ ID NO: 2360568 - DNA, 25 bp, Homo sapien
ctcatcaaagttggctcttattaca

SEQ ID NO: 2360569 - DNA, 25 bp, Homo sapien
gtggggcggcattccttgccaaaag

SEQ ID NO: 2360570 - DNA, 25 bp, Homo sapien
gggcggcattccttgccaaaagtgc

SEQ ID NO: 2360571 - DNA, 25 bp, Homo sapien
caaaagtgcagaaggaaactttgaa

SEQ ID NO: 2360572 - DNA, 25 bp, Homo sapien
ggcattccttgccaaaagtgcagaa

SEQ ID NO: 2360573 - DNA, 25 bp, Homo sapien
gccgacaatgttcaccaccgtggag

SEQ ID NO: 2360574 - DNA, 25 bp, Homo sapien
tagaggatggagtcacacacgccga

SEQ ID NO: 2360575 - DNA, 25 bp, Homo sapien
agtgggcatcagcaccccggagata

SEQ ID NO: 2360576 - DNA, 25 bp, Homo sapien
caccccggagatagctttgtagagg

SEQ ID NO: 2360577 - DNA, 25 bp, Homo sapien
tagaggaactatgagggagactgct

SEQ ID NO: 2360578 - DNA, 25 bp, Homo sapien
aaggctcggagcacaggttctcgcc

SEQ ID NO: 2360579 - DNA, 25 bp, Homo sapien
gagactgctgcaacctaaggctcgg

SEQ ID NO: 2360580 - DNA, 25 bp, Homo sapien
cacaaaggtgtggacggagtagagg

SEQ ID NO: 2360581 - DNA, 25 bp, Homo sapien
ggatgccagggtctgtcctccactt

SEQ ID NO: 2360582 - DNA, 25 bp, Homo sapien
cacttctagggacacacttttcctc

SEQ ID NO: 2360583 - DNA, 25 bp, Homo sapien
tgccaagtctacagctccagcttca

SEQ ID NO: 2360584 - DNA, 25 bp, Homo sapien
ttcctccctcttgtgcggctggctg

SEQ ID NO: 2360585 - DNA, 25 bp, Homo sapien
caaactgctcgccatttggtgggaa

SEQ ID NO: 2360586 - DNA, 25 bp, Homo sapien
gtcgtggagagccacttttagccac

SEQ ID NO: 2360587 - DNA, 25 bp, Homo sapien
tgatgtttcgcaagttttctgggag

SEQ ID NO: 2360588 - DNA, 25 bp, Homo sapien
gcttggcaaactttcgaatcacctg

SEQ ID NO: 2360589 - DNA, 25 bp, Homo sapien
tttagccactcatccagttgcttgg

SEQ ID NO: 2360590 - DNA, 25 bp, Homo sapien
ctggcagagatgatttagtgatgtt

SEQ ID NO: 2360591 - DNA, 25 bp, Homo sapien
atgtttgccgtctcagaatttggga

SEQ ID NO: 2360592 - DNA, 25 bp, Homo sapien
atttagtgatgtttgccgtctcaga

SEQ ID NO: 2360593 - DNA, 25 bp, Homo sapien
gtgatgtttgccgtctcagaatttg

SEQ ID NO: 2360594 - DNA, 25 bp, Homo sapien
cagaaccaacagcaccttaaaggag

SEQ ID NO: 2360595 - DNA, 25 bp, Homo sapien
tgtgttatactttctggttcctggt

SEQ ID NO: 2360596 - DNA, 25 bp, Homo sapien
ggtatatgtgggtgttgtgttatac

SEQ ID NO: 2360597 - DNA, 25 bp, Homo sapien
ccagaaccaacagcaccttaaagga

SEQ ID NO: 2360598 - DNA, 25 bp, Homo sapien
cagaacaatgcccaggtgtagcctc

SEQ ID NO: 2360599 - DNA, 25 bp, Homo sapien
tcctgaatcccattaatctgtcagg

SEQ ID NO: 2360600 - DNA, 25 bp, Homo sapien
aggtgtagcctctgtagcagcctgc

SEQ ID NO: 2360601 - DNA, 25 bp, Homo sapien
gaatcccattaatctgtcaggctct

SEQ ID NO: 2360602 - DNA, 25 bp, Homo sapien
gtgtttctttgttaggccaatattc

SEQ ID NO: 2360603 - DNA, 25 bp, Homo sapien
ggcagtgtttctttgttaggccaat

SEQ ID NO: 2360604 - DNA, 25 bp, Homo sapien
cagtgtttctttgttaggccaatat

SEQ ID NO: 2360605 - DNA, 25 bp, Homo sapien
gtttctttgttaggccaatattcac

SEQ ID NO: 2360606 - DNA, 25 bp, Homo sapien
aggtgagtcttcagttggacgttgt

SEQ ID NO: 2360607 - DNA, 25 bp, Homo sapien
gagcctggacgtgaatcttaggtct

SEQ ID NO: 2360608 - DNA, 25 bp, Homo sapien
cctggacgtgaatcttaggtctaag

SEQ ID NO: 2360609 - DNA, 25 bp, Homo sapien
cagttggacgttgtttagtctgact

SEQ ID NO: 2360610 - DNA, 25 bp, Homo sapien
cagagtgcatagtgcagggaactca

SEQ ID NO: 2360611 - DNA, 25 bp, Homo sapien
tagtgcttacctcttaaagaagggc

SEQ ID NO: 2360612 - DNA, 25 bp, Homo sapien
tctctaaccatcatgtttagggcct

SEQ ID NO: 2360613 - DNA, 25 bp, Homo sapien
gcaccctgcctagaacatgcttttt

SEQ ID NO: 2360614 - DNA, 25 bp, Homo sapien
catggaacccttattagtgaactta

SEQ ID NO: 2360615 - DNA, 25 bp, Homo sapien
taaaatacacgaagacattgtcaag

SEQ ID NO: 2360616 - DNA, 25 bp, Homo sapien
tgcaagttggaacaatacttggaac

SEQ ID NO: 2360617 - DNA, 25 bp, Homo sapien
ttgtcaagtctcctaatgcatgtaa

SEQ ID NO: 2360618 - DNA, 25 bp, Homo sapien
ttggaacgtgatgtctgcactgtgg

SEQ ID NO: 2360619 - DNA, 25 bp, Homo sapien
gaacgtgatgtctgcactgtggatc

SEQ ID NO: 2360620 - DNA, 25 bp, Homo sapien
aacgtgatgtctgcactgtggatca

SEQ ID NO: 2360621 - DNA, 25 bp, Homo sapien
tggaacgtgatgtctgcactgtgga

SEQ ID NO: 2360622 - DNA, 25 bp, Homo sapien
tcttccatggtgtaaagggtttgct

SEQ ID NO: 2360623 - DNA, 25 bp, Homo sapien
catcgcgagagtcttccatggtgta

SEQ ID NO: 2360624 - DNA, 25 bp, Homo sapien
attgggtgatgagtttccggtgctc

SEQ ID NO: 2360625 - DNA, 25 bp, Homo sapien
gctgttcaggtccacgttcctccag

SEQ ID NO: 2360626 - DNA, 25 bp, Homo sapien
gaccgtgcatgtattggatttgaca

SEQ ID NO: 2360627 - DNA, 25 bp, Homo sapien
tgaagctgggactagacgtgagacc

SEQ ID NO: 2360628 - DNA, 25 bp, Homo sapien
taggttcaccaactctctaagcctg

SEQ ID NO: 2360629 - DNA, 25 bp, Homo sapien
tgtggagattaaatgggaccgtgca

SEQ ID NO: 2360630 - DNA, 25 bp, Homo sapien
acattttcgtccctcatgaaaggag

SEQ ID NO: 2360631 - DNA, 25 bp, Homo sapien
tttccttatgagtctggttcacatt

SEQ ID NO: 2360632 - DNA, 25 bp, Homo sapien
agagcctggtcctttaagcaagcaa

SEQ ID NO: 2360633 - DNA, 25 bp, Homo sapien
aggctcagagcctggtcctttaagc

SEQ ID NO: 2360634 - DNA, 25 bp, Homo sapien
ctgcagttgtatttaacaagagcta

SEQ ID NO: 2360635 - DNA, 25 bp, Homo sapien
cagttgtatttaacaagagctacgt

SEQ ID NO: 2360636 - DNA, 25 bp, Homo sapien
aaaggagaaccccacacgcatcact

SEQ ID NO: 2360637 - DNA, 25 bp, Homo sapien
ccccacacgcatcactgcagttgta

SEQ ID NO: 2360638 - DNA, 25 bp, Homo sapien
cttcacaacacagcggtcaaccatg

SEQ ID NO: 2360639 - DNA, 25 bp, Homo sapien
aatgtaggactcgatgggagactgc

SEQ ID NO: 2360640 - DNA, 25 bp, Homo sapien
ccatggtatccagccactcaatgta

SEQ ID NO: 2360641 - DNA, 25 bp, Homo sapien
cacagcggtcaaccatggtatccag

SEQ ID NO: 2360642 - DNA, 25 bp, Homo sapien
gaccacatcaagaggaactgctggg

SEQ ID NO: 2360643 - DNA, 25 bp, Homo sapien
gtgcaaggtcatgtcccggatcacc

SEQ ID NO: 2360644 - DNA, 25 bp, Homo sapien
ccttgtgccgaaacaggaccacatc

SEQ ID NO: 2360645 - DNA, 25 bp, Homo sapien
aactgctgggccactttcttcaagg

SEQ ID NO: 2360646 - DNA, 25 bp, Homo sapien
ctttgggcagagatttcaagccctg

SEQ ID NO: 2360647 - DNA, 25 bp, Homo sapien
tgaagacttgaggtggggatatctc

SEQ ID NO: 2360648 - DNA, 25 bp, Homo sapien
cagagatttcaagccctgttatact

SEQ ID NO: 2360649 - DNA, 25 bp, Homo sapien
tgggcagagatttcaagccctgtta

SEQ ID NO: 2360650 - DNA, 25 bp, Homo sapien
ccctgcccaagtgagtgagctttga

SEQ ID NO: 2360651 - DNA, 25 bp, Homo sapien
catggcctcttgttctgggagccgc

SEQ ID NO: 2360652 - DNA, 25 bp, Homo sapien
cctgactacagggaaagcaattcct

SEQ ID NO: 2360653 - DNA, 25 bp, Homo sapien
gacattgcgaacattaaggtcctgc

SEQ ID NO: 2360654 - DNA, 25 bp, Homo sapien
taaacagttcattgccagagtgtcg

SEQ ID NO: 2360655 - DNA, 25 bp, Homo sapien
tcgcagcgatgaggatagtgaatat

SEQ ID NO: 2360656 - DNA, 25 bp, Homo sapien
ggatagtgaatatcgatgaagacag

SEQ ID NO: 2360657 - DNA, 25 bp, Homo sapien
attaagattattgggcagtaaacag

SEQ ID NO: 2360658 - DNA, 25 bp, Homo sapien
tgtgagcaccgctcactctcttcgg

SEQ ID NO: 2360659 - DNA, 25 bp, Homo sapien
gagcaccgctcactctcttcggcat

SEQ ID NO: 2360660 - DNA, 25 bp, Homo sapien
ctcatgtgagcaccgctcactctct

SEQ ID NO: 2360661 - DNA, 25 bp, Homo sapien
atgtgagcaccgctcactctcttcg

SEQ ID NO: 2360662 - DNA, 25 bp, Homo sapien
caggtagagcacgtagtcatcaaac

SEQ ID NO: 2360663 - DNA, 25 bp, Homo sapien
tcccttcatggctcgcatgagctca

SEQ ID NO: 2360664 - DNA, 25 bp, Homo sapien
tcattggcccgctcctgacagtgca

SEQ ID NO: 2360665 - DNA, 25 bp, Homo sapien
cagtgcagagattctaacaggtaga

SEQ ID NO: 2360666 - DNA, 25 bp, Homo sapien
ctgtcaagatgatctcttctcggac

SEQ ID NO: 2360667 - DNA, 25 bp, Homo sapien
gaaggggttggtgcggcagcctctg

SEQ ID NO: 2360668 - DNA, 25 bp, Homo sapien
tgtcaagatgatctcttctcggact

SEQ ID NO: 2360669 - DNA, 25 bp, Homo sapien
tggcactggtgaaggggttggtgcg

SEQ ID NO: 2360670 - DNA, 25 bp, Homo sapien
gaaggattgctaacaggggaagagg

SEQ ID NO: 2360671 - DNA, 25 bp, Homo sapien
tactcaggggaaggattgctaacag

SEQ ID NO: 2360672 - DNA, 25 bp, Homo sapien
ctgtagtgctgaggccagtgtactc

SEQ ID NO: 2360673 - DNA, 25 bp, Homo sapien
aggtggcacttccacagatgtggca

SEQ ID NO: 2360674 - DNA, 25 bp, Homo sapien
gaatacctgtacgtcattcacaaat

SEQ ID NO: 2360675 - DNA, 25 bp, Homo sapien
caggaagatacccaggttttggcat

SEQ ID NO: 2360676 - DNA, 25 bp, Homo sapien
ctcactgtatcactaaggctagaat

SEQ ID NO: 2360677 - DNA, 25 bp, Homo sapien
ggtgtgagccaagatgtctggcttt

SEQ ID NO: 2360678 - DNA, 25 bp, Homo sapien
gagccttctaagcaggaactacaac

SEQ ID NO: 2360679 - DNA, 25 bp, Homo sapien
tgttcagtgaacaaagtcattcttt

SEQ ID NO: 2360680 - DNA, 25 bp, Homo sapien
tttttctgagccttctaagcaggaa

SEQ ID NO: 2360681 - DNA, 25 bp, Homo sapien
tctaagcaggaactacaacaaccca

SEQ ID NO: 2360682 - DNA, 25 bp, Homo sapien
taatatctatcttgcaggactgttg

SEQ ID NO: 2360683 - DNA, 25 bp, Homo sapien
atgtcagagagtttggcacgtggta

SEQ ID NO: 2360684 - DNA, 25 bp, Homo sapien
gctataagatcttgggcaagcctgt

SEQ ID NO: 2360685 - DNA, 25 bp, Homo sapien
ggttctgccaggtactagctataag

SEQ ID NO: 2360686 - DNA, 25 bp, Homo sapien
ctgtgtatgttagagaccacgtgta

SEQ ID NO: 2360687 - DNA, 25 bp, Homo sapien
gacccagcagccgtcgtcactgtgt

SEQ ID NO: 2360688 - DNA, 25 bp, Homo sapien
gagaccacgtgtaagactgcattgc

SEQ ID NO: 2360689 - DNA, 25 bp, Homo sapien
ggcacatgagtgttcctcatacagg

SEQ ID NO: 2360690 - DNA, 25 bp, Homo sapien
gggatgaaatctagccctgagccaa

SEQ ID NO: 2360691 - DNA, 25 bp, Homo sapien
agctcccatagttatagcttcccgt

SEQ ID NO: 2360692 - DNA, 25 bp, Homo sapien
gctcccatagttatagcttcccgtg

SEQ ID NO: 2360693 - DNA, 25 bp, Homo sapien
cccatagttatagcttcccgtgtat

SEQ ID NO: 2360694 - DNA, 25 bp, Homo sapien
tcccatagttatagcttcccgtgta

SEQ ID NO: 2360695 - DNA, 25 bp, Homo sapien
ctcctgtggtaaggggcatagtgga

SEQ ID NO: 2360696 - DNA, 25 bp, Homo sapien
atagctgtgtcatgagggagggccg

SEQ ID NO: 2360697 - DNA, 25 bp, Homo sapien
ccagagatagctgtgtcatgaggga

SEQ ID NO: 2360698 - DNA, 25 bp, Homo sapien
tggtaaggggcatagtggagtggcc

SEQ ID NO: 2360699 - DNA, 25 bp, Homo sapien
aagggcagcagacatgcagccaatt

SEQ ID NO: 2360700 - DNA, 25 bp, Homo sapien
gcagcagacatgcagccaattagat

SEQ ID NO: 2360701 - DNA, 25 bp, Homo sapien
ctgcccgaaaaagggcagcagacat

SEQ ID NO: 2360702 - DNA, 25 bp, Homo sapien
gggcagcagacatgcagccaattag

SEQ ID NO: 2360703 - DNA, 25 bp, Homo sapien
aaggagacccaaggcccagggtgag

SEQ ID NO: 2360704 - DNA, 25 bp, Homo sapien
atgggaaaggagacccaaggcccag

SEQ ID NO: 2360705 - DNA, 25 bp, Homo sapien
agtggtgatgggaaaggagacccaa

SEQ ID NO: 2360706 - DNA, 25 bp, Homo sapien
ctgcaccaggagagtggtgatggga

SEQ ID NO: 2360707 - DNA, 25 bp, Homo sapien
aaaatgatgttgagagaccagtcct

SEQ ID NO: 2360708 - DNA, 25 bp, Homo sapien
cagtcctgacaagactccatgaggg

SEQ ID NO: 2360709 - DNA, 25 bp, Homo sapien
tgatgttgagagaccagtcctgaca

SEQ ID NO: 2360710 - DNA, 25 bp, Homo sapien
tgagagaccagtcctgacaagactc

SEQ ID NO: 2360711 - DNA, 25 bp, Homo sapien
agagatggggcacattttagaggca

SEQ ID NO: 2360712 - DNA, 25 bp, Homo sapien
atctaagctggatatgataaaggcc

SEQ ID NO: 2360713 - DNA, 25 bp, Homo sapien
ctcctctagcagcagtgtagggggt

SEQ ID NO: 2360714 - DNA, 25 bp, Homo sapien
ctgtcttcatctaagctggatatga

SEQ ID NO: 2360715 - DNA, 25 bp, Homo sapien
gattaggagtaagagaagtgcttct

SEQ ID NO: 2360716 - DNA, 25 bp, Homo sapien
caaataagcccgttagtaggatcag

SEQ ID NO: 2360717 - DNA, 25 bp, Homo sapien
caggtgttagtagctacaagaagag

SEQ ID NO: 2360718 - DNA, 25 bp, Homo sapien
ttttctgttaccaagacagctatgc

SEQ ID NO: 2360719 - DNA, 25 bp, Homo sapien
tgttgaggggaaagaaattccacaa

SEQ ID NO: 2360720 - DNA, 25 bp, Homo sapien
ttgttgaggggaaagaaattccaca

SEQ ID NO: 2360721 - DNA, 25 bp, Homo sapien
tcatttagcccatcctgtagaggcc

SEQ ID NO: 2360722 - DNA, 25 bp, Homo sapien
gaggcctctccgttgatgtaagcaa

SEQ ID NO: 2360723 - DNA, 25 bp, Homo sapien
caaacaaggttccatccgggaagtg

SEQ ID NO: 2360724 - DNA, 25 bp, Homo sapien
ctcgcagaatgcacagacgggcttg

SEQ ID NO: 2360725 - DNA, 25 bp, Homo sapien
cagtagcttactagaagtggttgcc

SEQ ID NO: 2360726 - DNA, 25 bp, Homo sapien
ggcctgcccgagatagtgctctaca

SEQ ID NO: 2360727 - DNA, 25 bp, Homo sapien
caggaaatagggatggtaccaccag

SEQ ID NO: 2360728 - DNA, 25 bp, Homo sapien
tacccatagggtaataggtccacca

SEQ ID NO: 2360729 - DNA, 25 bp, Homo sapien
gagtgtgaaaccattcatatcttgc

SEQ ID NO: 2360730 - DNA, 25 bp, Homo sapien
tgagtgtgaaaccattcatatcttg

SEQ ID NO: 2360731 - DNA, 25 bp, Homo sapien
tgtgaaaccattcatatcttgcaca

SEQ ID NO: 2360732 - DNA, 25 bp, Homo sapien
atttgagtgtgaaaccattcatatc

SEQ ID NO: 2360733 - DNA, 25 bp, Homo sapien
ctgctcatagtctccatttcttcac

SEQ ID NO: 2360734 - DNA, 25 bp, Homo sapien
gacagaataaattgcgtctaccgcc

SEQ ID NO: 2360735 - DNA, 25 bp, Homo sapien
gggcagtgcctacatctgaatttca

SEQ ID NO: 2360736 - DNA, 25 bp, Homo sapien
tttatctcaacttttgggcagtgcc

SEQ ID NO: 2360737 - DNA, 25 bp, Homo sapien
gtctaccgccaaagaactgccagct

SEQ ID NO: 2360738 - DNA, 25 bp, Homo sapien
actggccgacggtcgcggaaactgc

SEQ ID NO: 2360739 - DNA, 25 bp, Homo sapien
gagggtctaagcgtctgcttcggtt

SEQ ID NO: 2360740 - DNA, 25 bp, Homo sapien
cggttttgttcgttatgtcgctgac

SEQ ID NO: 2360741 - DNA, 25 bp, Homo sapien
tcctgcttcagtctcggctggctgg

SEQ ID NO: 2360742 - DNA, 25 bp, Homo sapien
aagaattcccgccaagggcatgctg

SEQ ID NO: 2360743 - DNA, 25 bp, Homo sapien
taatttactggcgtgccgaatggca

SEQ ID NO: 2360744 - DNA, 25 bp, Homo sapien
tcatccagccggaaagaattcccgc

SEQ ID NO: 2360745 - DNA, 25 bp, Homo sapien
tggcatgctgggattggtagtcatc

SEQ ID NO: 2360746 - DNA, 25 bp, Homo sapien
tgcctccaggtaaacgcctcgcgcc

SEQ ID NO: 2360747 - DNA, 25 bp, Homo sapien
tgcgggggagccgcggccgctctgc

SEQ ID NO: 2360748 - DNA, 25 bp, Homo sapien
ggccgcaggtgcgggggagccgcgg

SEQ ID NO: 2360749 - DNA, 25 bp, Homo sapien
cgcggccgctctgcgcgcccaagcc

SEQ ID NO: 2360750 - DNA, 25 bp, Homo sapien
caggtgcgggggagccgcggccgct

SEQ ID NO: 2360751 - DNA, 25 bp, Homo sapien
tcgatagcccctgcttcgccggccc

SEQ ID NO: 2360752 - DNA, 25 bp, Homo sapien
tgcttcgccggcccggacgatgtag

SEQ ID NO: 2360753 - DNA, 25 bp, Homo sapien
tgtaatccctcaggacccgctcgat

SEQ ID NO: 2360754 - DNA, 25 bp, Homo sapien
tgtagagggcgcgctcctcatccat

SEQ ID NO: 2360755 - DNA, 25 bp, Homo sapien
catctgttgattcaaatttgaaagt

SEQ ID NO: 2360756 - DNA, 25 bp, Homo sapien
tatcttcatctgttgattcaaattt

SEQ ID NO: 2360757 - DNA, 25 bp, Homo sapien
tcatctgttgattcaaatttgaaag

SEQ ID NO: 2360758 - DNA, 25 bp, Homo sapien
tcttcatctgttgattcaaatttga

SEQ ID NO: 2360759 - DNA, 25 bp, Homo sapien
caactgaagtaaaggtacagcaacc

SEQ ID NO: 2360760 - DNA, 25 bp, Homo sapien
tggaaccatgttccgccaccaggat

SEQ ID NO: 2360761 - DNA, 25 bp, Homo sapien
gtggccccggtattctcagcagtgt

SEQ ID NO: 2360762 - DNA, 25 bp, Homo sapien
gctgacattccatcactcctgtgaa

SEQ ID NO: 2360763 - DNA, 25 bp, Homo sapien
tgtcaatttctacaaggaagccacc

SEQ ID NO: 2360764 - DNA, 25 bp, Homo sapien
gaatccactggcaaatccagggaca

SEQ ID NO: 2360765 - DNA, 25 bp, Homo sapien
tacctaagtgtcacagcaccatttg

SEQ ID NO: 2360766 - DNA, 25 bp, Homo sapien
tgtatacagcaagaggtaagaatcc

SEQ ID NO: 2360767 - DNA, 25 bp, Homo sapien
taatgtcaaagctttatgttctcca

SEQ ID NO: 2360768 - DNA, 25 bp, Homo sapien
actggcaagcatgatcttctgtttt

SEQ ID NO: 2360769 - DNA, 25 bp, Homo sapien
tgtcaacgctataactagtttaatg

SEQ ID NO: 2360770 - DNA, 25 bp, Homo sapien
tctgttttctgtcaacgctataact

SEQ ID NO: 2360771 - DNA, 25 bp, Homo sapien
ttgacttctccttcactgccatgtg

SEQ ID NO: 2360772 - DNA, 25 bp, Homo sapien
cttgacttctccttcactgccatgt

SEQ ID NO: 2360773 - DNA, 25 bp, Homo sapien
tcctgctgcccacagaatgctgctg

SEQ ID NO: 2360774 - DNA, 25 bp, Homo sapien
ctgctgcccacagaatgctgctgaa

SEQ ID NO: 2360775 - DNA, 25 bp, Homo sapien
gctgctgaaatgggcccaatttccc

SEQ ID NO: 2360776 - DNA, 25 bp, Homo sapien
tgctgaaatgggcccaatttcccct

SEQ ID NO: 2360777 - DNA, 25 bp, Homo sapien
tgcggagtacttccaggcaggacac

SEQ ID NO: 2360778 - DNA, 25 bp, Homo sapien
tctgcgttagcagcggtagtccctg

SEQ ID NO: 2360779 - DNA, 25 bp, Homo sapien
caggaggttacagagctttgcagca

SEQ ID NO: 2360780 - DNA, 25 bp, Homo sapien
gaagagcaagcgcaagtcaaagcac

SEQ ID NO: 2360781 - DNA, 25 bp, Homo sapien
gcatcttacaaaatagtagtccatt

SEQ ID NO: 2360782 - DNA, 25 bp, Homo sapien
caatggttaagaagtatatcctggg

SEQ ID NO: 2360783 - DNA, 25 bp, Homo sapien
cttgcaggaaactctagggatgtcc

SEQ ID NO: 2360784 - DNA, 25 bp, Homo sapien
ccatttttacacctattctgatagg

SEQ ID NO: 2360785 - DNA, 25 bp, Homo sapien
ccataaatatccgttagatgagtgc

SEQ ID NO: 2360786 - DNA, 25 bp, Homo sapien
gagagaaaagaagtccctaaggatg

SEQ ID NO: 2360787 - DNA, 25 bp, Homo sapien
tatggccatacaattgataaagccc

SEQ ID NO: 2360788 - DNA, 25 bp, Homo sapien
caagcaggcttggttgtgatagtga

SEQ ID NO: 2360789 - DNA, 25 bp, Homo sapien
gaagttcctgttcaagccctttgct

SEQ ID NO: 2360790 - DNA, 25 bp, Homo sapien
aagttcctgttcaagccctttgctt

SEQ ID NO: 2360791 - DNA, 25 bp, Homo sapien
agttcctgttcaagccctttgcttt

SEQ ID NO: 2360792 - DNA, 25 bp, Homo sapien
tgcatactccaggtttcagctaaag

SEQ ID NO: 2360793 - DNA, 25 bp, Homo sapien
cagggacaccaatacttgttagagt

SEQ ID NO: 2360794 - DNA, 25 bp, Homo sapien
tctggttcctcacctacaggtaggt

SEQ ID NO: 2360795 - DNA, 25 bp, Homo sapien
tctacaggtatacaccctagagagg

SEQ ID NO: 2360796 - DNA, 25 bp, Homo sapien
taaacaatgacgaaggacagctgcc

SEQ ID NO: 2360797 - DNA, 25 bp, Homo sapien
cagttggacctacgattagtaaaca

SEQ ID NO: 2360798 - DNA, 25 bp, Homo sapien
ttacacggaactgatgagaatcact

SEQ ID NO: 2360799 - DNA, 25 bp, Homo sapien
gacagctgccattacacggaactga

SEQ ID NO: 2360800 - DNA, 25 bp, Homo sapien
tcttttaacagctagatctcgagtg

SEQ ID NO: 2360801 - DNA, 25 bp, Homo sapien
cagcaagagcggcagcaagaaagag

SEQ ID NO: 2360802 - DNA, 25 bp, Homo sapien
gatctcgagtgatcacagagtgaga

SEQ ID NO: 2360803 - DNA, 25 bp, Homo sapien
cttgtatcttactggcttctggtga

SEQ ID NO: 2360804 - DNA, 25 bp, Homo sapien
tgagaacatccaaacaagagactgg

SEQ ID NO: 2360805 - DNA, 25 bp, Homo sapien
ctgtttcttcatgggttaacggaca

SEQ ID NO: 2360806 - DNA, 25 bp, Homo sapien
cagctgttttattactgggcagttc

SEQ ID NO: 2360807 - DNA, 25 bp, Homo sapien
tctagagtcgttgcctcttgggctg

SEQ ID NO: 2360808 - DNA, 25 bp, Homo sapien
gaactggagttagaccctctctata

SEQ ID NO: 2360809 - DNA, 25 bp, Homo sapien
gaaattttcggatgtttcgatgggc

SEQ ID NO: 2360810 - DNA, 25 bp, Homo sapien
tcggttaataagctgagaactggag

SEQ ID NO: 2360811 - DNA, 25 bp, Homo sapien
tttcgatgggctcgggaacattcgg

SEQ ID NO: 2360812 - DNA, 25 bp, Homo sapien
tcttgcctaaatcattattcatgct

SEQ ID NO: 2360813 - DNA, 25 bp, Homo sapien
tcatttactgtgcttcaccaactcc

SEQ ID NO: 2360814 - DNA, 25 bp, Homo sapien
ttaggtgtacctggatcccttgtgg

SEQ ID NO: 2360815 - DNA, 25 bp, Homo sapien
tcctagtcaagggagaatgtcttaa

SEQ ID NO: 2360816 - DNA, 25 bp, Homo sapien
gatttgtcacatccctcaacggtgg

SEQ ID NO: 2360817 - DNA, 25 bp, Homo sapien
gagccaacttcaggtcgatttgtca

SEQ ID NO: 2360818 - DNA, 25 bp, Homo sapien
gcagcaatttgcttgactccaaggt

SEQ ID NO: 2360819 - DNA, 25 bp, Homo sapien
tcatgaggcgcaccagcttatttct

SEQ ID NO: 2360820 - DNA, 25 bp, Homo sapien
gcccctggccgccaacagtcctgca

SEQ ID NO: 2360821 - DNA, 25 bp, Homo sapien
gccagtgtatttcagcagactatcc

SEQ ID NO: 2360822 - DNA, 25 bp, Homo sapien
atagccagtgtatttcagcagacta

SEQ ID NO: 2360823 - DNA, 25 bp, Homo sapien
ccagtgtatttcagcagactatcca

SEQ ID NO: 2360824 - DNA, 25 bp, Homo sapien
caaaggcacagccatagttaggtga

SEQ ID NO: 2360825 - DNA, 25 bp, Homo sapien
ggcacagccatagttaggtgaaaag

SEQ ID NO: 2360826 - DNA, 25 bp, Homo sapien
acagccatagttaggtgaaaagaaa

SEQ ID NO: 2360827 - DNA, 25 bp, Homo sapien
ctcaaaggcacagccatagttaggt

SEQ ID NO: 2360828 - DNA, 25 bp, Homo sapien
tctgggtatatacgcaagagagcag

SEQ ID NO: 2360829 - DNA, 25 bp, Homo sapien
gacttgacagatatcggtagacaca

SEQ ID NO: 2360830 - DNA, 25 bp, Homo sapien
taccatgtgatacaacacttctggg

SEQ ID NO: 2360831 - DNA, 25 bp, Homo sapien
ctatgtaaaatatggcaggctggca

SEQ ID NO: 2360832 - DNA, 25 bp, Homo sapien
tcaggccttagaagaaagtataagg

SEQ ID NO: 2360833 - DNA, 25 bp, Homo sapien
tattaactatgtagatcatgcttat

SEQ ID NO: 2360834 - DNA, 25 bp, Homo sapien
gaaaatcaggccttagaagaaagta

SEQ ID NO: 2360835 - DNA, 25 bp, Homo sapien
agggaaggtagatgtattaactatg

SEQ ID NO: 2360836 - DNA, 25 bp, Homo sapien
agatcaactggaaaacggtgcccag

SEQ ID NO: 2360837 - DNA, 25 bp, Homo sapien
gatcacagtatcttgtaccagccaa

SEQ ID NO: 2360838 - DNA, 25 bp, Homo sapien
cgtctttgagactttcggttgggca

SEQ ID NO: 2360839 - DNA, 25 bp, Homo sapien
tggtagccagcttgcaacccgtctt

SEQ ID NO: 2360840 - DNA, 25 bp, Homo sapien
cattggttcctctaaatgaccagtg

SEQ ID NO: 2360841 - DNA, 25 bp, Homo sapien
gtcatttcatctatggggtttggca

SEQ ID NO: 2360842 - DNA, 25 bp, Homo sapien
ggtttggcattggttcctctaaatg

SEQ ID NO: 2360843 - DNA, 25 bp, Homo sapien
tctatggggtttggcattggttcct

SEQ ID NO: 2360844 - DNA, 25 bp, Homo sapien
gaatgcacatccagaagcggcacat

SEQ ID NO: 2360845 - DNA, 25 bp, Homo sapien
gctgttctatggtaactctcagtga

SEQ ID NO: 2360846 - DNA, 25 bp, Homo sapien
gggccaccctattccaatcaacatg

SEQ ID NO: 2360847 - DNA, 25 bp, Homo sapien
cacatgtagaaaaaccatggtagcc

SEQ ID NO: 2360848 - DNA, 25 bp, Homo sapien
aatgcatctttaagtggcagctgcc

SEQ ID NO: 2360849 - DNA, 25 bp, Homo sapien
agtgactcagccaagtatgaaagga

SEQ ID NO: 2360850 - DNA, 25 bp, Homo sapien
tccaagatgactagttgctgattag

SEQ ID NO: 2360851 - DNA, 25 bp, Homo sapien
gcttaaagaagatagtgactcaatg

SEQ ID NO: 2360852 - DNA, 25 bp, Homo sapien
ttccattccaatggctccttctttt

SEQ ID NO: 2360853 - DNA, 25 bp, Homo sapien
ccttcttttgactgagggatactag

SEQ ID NO: 2360854 - DNA, 25 bp, Homo sapien
catggttggctctctggcttttcca

SEQ ID NO: 2360855 - DNA, 25 bp, Homo sapien
tgagggatactagcctttacacagt

SEQ ID NO: 2360856 - DNA, 25 bp, Homo sapien
ctaagcctctgctgtgcccttaatc

SEQ ID NO: 2360857 - DNA, 25 bp, Homo sapien
tacttccggataagtaggcatcttc

SEQ ID NO: 2360858 - DNA, 25 bp, Homo sapien
gggtacttccggataagtaggcatc

SEQ ID NO: 2360859 - DNA, 25 bp, Homo sapien
ggcatctgctgggtacttccggata

SEQ ID NO: 2360860 - DNA, 25 bp, Homo sapien
tgctgggtacttccggataagtagg

SEQ ID NO: 2360861 - DNA, 25 bp, Homo sapien
tcctggtgcaggtccttcacatctg

SEQ ID NO: 2360862 - DNA, 25 bp, Homo sapien
accatcctggtgcaggtccttcaca

SEQ ID NO: 2360863 - DNA, 25 bp, Homo sapien
catcctggtgcaggtccttcacatc

SEQ ID NO: 2360864 - DNA, 25 bp, Homo sapien
ggtgcaggtccttcacatctgctct

SEQ ID NO: 2360865 - DNA, 25 bp, Homo sapien
agtgctttggcacgggccactgttg

SEQ ID NO: 2360866 - DNA, 25 bp, Homo sapien
ggtaagtgctttggcacgggccact

SEQ ID NO: 2360867 - DNA, 25 bp, Homo sapien
tggtaagtgctttggcacgggccac

SEQ ID NO: 2360868 - DNA, 25 bp, Homo sapien
taagtgctttggcacgggccactgt

SEQ ID NO: 2360869 - DNA, 25 bp, Homo sapien
taacgactcaaaaatcattcccttg

SEQ ID NO: 2360870 - DNA, 25 bp, Homo sapien
tgacacatggaattaatgacagggt

SEQ ID NO: 2360871 - DNA, 25 bp, Homo sapien
tatacgagtttcagcttcccgcttg

SEQ ID NO: 2360872 - DNA, 25 bp, Homo sapien
tctgtgtactacagggcagtattga

SEQ ID NO: 2360873 - DNA, 25 bp, Homo sapien
tggaacgaaacatcatttagaaatt

SEQ ID NO: 2360874 - DNA, 25 bp, Homo sapien
ctggaacgaaacatcatttagaaat

SEQ ID NO: 2360875 - DNA, 25 bp, Homo sapien
ggcgggcttctcatctgatcaggca

SEQ ID NO: 2360876 - DNA, 25 bp, Homo sapien
gataaagagcccattctaggcactg

SEQ ID NO: 2360877 - DNA, 25 bp, Homo sapien
ctgtgacagtatcatggcgggcttc

SEQ ID NO: 2360878 - DNA, 25 bp, Homo sapien
gagataagcctccaagaatgttcaa

SEQ ID NO: 2360879 - DNA, 25 bp, Homo sapien
gacggacctgtgctctaattctgga

SEQ ID NO: 2360880 - DNA, 25 bp, Homo sapien
tagctgtaagaacatgaactcactg

SEQ ID NO: 2360881 - DNA, 25 bp, Homo sapien
ggatcgaccagtcactagctgtaag

SEQ ID NO: 2360882 - DNA, 25 bp, Homo sapien
ggaacacatacctcacactaagttg

SEQ ID NO: 2360883 - DNA, 25 bp, Homo sapien
cctagttctgattgtgctaaaggac

SEQ ID NO: 2360884 - DNA, 25 bp, Homo sapien
ggactttgtgatgttggacactaca

SEQ ID NO: 2360885 - DNA, 25 bp, Homo sapien
cactcctgagactaaaactactgca

SEQ ID NO: 2360886 - DNA, 25 bp, Homo sapien
taaactgctgggtggatataccatc

SEQ ID NO: 2360887 - DNA, 25 bp, Homo sapien
gccccatgaactgcttaaaacttat

SEQ ID NO: 2360888 - DNA, 25 bp, Homo sapien
aaggtcagcagtgtacttaagagtg

SEQ ID NO: 2360889 - DNA, 25 bp, Homo sapien
cttaagagtggccttgaagagcccc

SEQ ID NO: 2360890 - DNA, 25 bp, Homo sapien
taagcaaaaacccacatggcagcag

SEQ ID NO: 2360891 - DNA, 25 bp, Homo sapien
tatatctactccacaagttacagcc

SEQ ID NO: 2360892 - DNA, 25 bp, Homo sapien
gcaactgccgcttttcagctaatcc

SEQ ID NO: 2360893 - DNA, 25 bp, Homo sapien
taatctcttcaaagctccgcaactg

SEQ ID NO: 2360894 - DNA, 25 bp, Homo sapien
cagtttaattatgggattgacagcc

SEQ ID NO: 2360895 - DNA, 25 bp, Homo sapien
caatggaataaatctgtcggttttg

SEQ ID NO: 2360896 - DNA, 25 bp, Homo sapien
gattttgcctcagtctctagtgata

SEQ ID NO: 2360897 - DNA, 25 bp, Homo sapien
gatatgcatacacttcattcaatgg

SEQ ID NO: 2360898 - DNA, 25 bp, Homo sapien
agtggttggagcatacaattaaatg

SEQ ID NO: 2360899 - DNA, 25 bp, Homo sapien
aaaaagtattcaccagcatcacaca

SEQ ID NO: 2360900 - DNA, 25 bp, Homo sapien
aaaaaaagtattcaccagcatcaca

SEQ ID NO: 2360901 - DNA, 25 bp, Homo sapien
gaaaaaaaagtattcaccagcatca

SEQ ID NO: 2360902 - DNA, 25 bp, Homo sapien
aaaagtattcaccagcatcacacac

SEQ ID NO: 2360903 - DNA, 25 bp, Homo sapien
tagccactgatgagctaggcccact

SEQ ID NO: 2360904 - DNA, 25 bp, Homo sapien
tctaagaagtcgcttgcccaaggct

SEQ ID NO: 2360905 - DNA, 25 bp, Homo sapien
cgggttagacctcagaatgcacact

SEQ ID NO: 2360906 - DNA, 25 bp, Homo sapien
gtaaccccgtctaactgcagctctg

SEQ ID NO: 2360907 - DNA, 25 bp, Homo sapien
aaacaaagcttagtgcccagtgcag

SEQ ID NO: 2360908 - DNA, 25 bp, Homo sapien
tggtccctggcctatcctaacggat

SEQ ID NO: 2360909 - DNA, 25 bp, Homo sapien
tagtctacgggccatactgttgtac

SEQ ID NO: 2360910 - DNA, 25 bp, Homo sapien
tattttaggacacacgcctccgtac

SEQ ID NO: 2360911 - DNA, 25 bp, Homo sapien
cgtgtgatccaaaagtgccctgtgc

SEQ ID NO: 2360912 - DNA, 25 bp, Homo sapien
tggcacttccaaagcgtagtccgga

SEQ ID NO: 2360913 - DNA, 25 bp, Homo sapien
ggatccaagtggctcgactgtcgag

SEQ ID NO: 2360914 - DNA, 25 bp, Homo sapien
tgatctcttgcagaacctaggctgg

SEQ ID NO: 2360915 - DNA, 25 bp, Homo sapien
gtatcaaatgtaaagtggcctcttt

SEQ ID NO: 2360916 - DNA, 25 bp, Homo sapien
agacactgtgaatgagattggctga

SEQ ID NO: 2360917 - DNA, 25 bp, Homo sapien
cagctggcactagaggctgatgacc

SEQ ID NO: 2360918 - DNA, 25 bp, Homo sapien
tccggagcttaacatattccagaca

SEQ ID NO: 2360919 - DNA, 25 bp, Homo sapien
gagaaccaggccctgcgatggagct

SEQ ID NO: 2360920 - DNA, 25 bp, Homo sapien
agagaagaccacttctcaaccagca

SEQ ID NO: 2360921 - DNA, 25 bp, Homo sapien
caaccagcatgaatgggctgatgcc

SEQ ID NO: 2360922 - DNA, 25 bp, Homo sapien
ctgtgaatgagaaccaggccctgcg

SEQ ID NO: 2360923 - DNA, 25 bp, Homo sapien
ccttgagaccactgaattgcaatga

SEQ ID NO: 2360924 - DNA, 25 bp, Homo sapien
tctgcatgcatagtgggtacccaac

SEQ ID NO: 2360925 - DNA, 25 bp, Homo sapien
cactgaattgcaatgatggtataat

SEQ ID NO: 2360926 - DNA, 25 bp, Homo sapien
ggcacatcaccaaaggcccttgaga

SEQ ID NO: 2360927 - DNA, 25 bp, Homo sapien
tgggggacagagtgaaacccagaaa

SEQ ID NO: 2360928 - DNA, 25 bp, Homo sapien
gcagcagtgagcagtgatcgcatca

SEQ ID NO: 2360929 - DNA, 25 bp, Homo sapien
ctgcagcagtgagcagtgatcgcat

SEQ ID NO: 2360930 - DNA, 25 bp, Homo sapien
gggacagagtgaaacccagaaagaa

SEQ ID NO: 2360931 - DNA, 25 bp, Homo sapien
taccaggcagaaggtcccaaaggaa

SEQ ID NO: 2360932 - DNA, 25 bp, Homo sapien
catgtttagagtaggatgctgcctt

SEQ ID NO: 2360933 - DNA, 25 bp, Homo sapien
tagtctgtggtactggtggtctaca

SEQ ID NO: 2360934 - DNA, 25 bp, Homo sapien
tctggtgcccatggttcggaaacgt

SEQ ID NO: 2360935 - DNA, 25 bp, Homo sapien
cctcgccccacatggatatcctcct

SEQ ID NO: 2360936 - DNA, 25 bp, Homo sapien
cactctcctgcactgacttcctctt

SEQ ID NO: 2360937 - DNA, 25 bp, Homo sapien
tctgaaattccataccaccctcgcc

SEQ ID NO: 2360938 - DNA, 25 bp, Homo sapien
tttggtactgcaggaggaggccact

SEQ ID NO: 2360939 - DNA, 25 bp, Homo sapien
gagctccttgagagtaaaaacccgc

SEQ ID NO: 2360940 - DNA, 25 bp, Homo sapien
gagccgcggattgtacattagaaag

SEQ ID NO: 2360941 - DNA, 25 bp, Homo sapien
tgaagtcctatgcaaacgtgagatg

SEQ ID NO: 2360942 - DNA, 25 bp, Homo sapien
tgttcagtatcgaaagagccgcgga

SEQ ID NO: 2360943 - DNA, 25 bp, Homo sapien
tctccagcactttcttcgtccaggg

SEQ ID NO: 2360944 - DNA, 25 bp, Homo sapien
ttgacgtcggcggtgcccgcgttcc

SEQ ID NO: 2360945 - DNA, 25 bp, Homo sapien
tccgcgccgagtaacggtcttcgga

SEQ ID NO: 2360946 - DNA, 25 bp, Homo sapien
tgggacggtcgccagtttctccagc

SEQ ID NO: 2360947 - DNA, 25 bp, Homo sapien
agttccgacgcgcacgcgcgctcgt

SEQ ID NO: 2360948 - DNA, 25 bp, Homo sapien
gtggagctggaagactgtggcggcg

SEQ ID NO: 2360949 - DNA, 25 bp, Homo sapien
agtcgcggctccagaggcgtcctct

SEQ ID NO: 2360950 - DNA, 25 bp, Homo sapien
gggtcgcggccagcgctagggctgg

SEQ ID NO: 2360951 - DNA, 25 bp, Homo sapien
acagcaaataatcacatatagcaaa

SEQ ID NO: 2360952 - DNA, 25 bp, Homo sapien
taaacaatagcatacagcaaataat

SEQ ID NO: 2360953 - DNA, 25 bp, Homo sapien
acaatagcatacagcaaataatcac

SEQ ID NO: 2360954 - DNA, 25 bp, Homo sapien
ctaaacaatagcatacagcaaataa

SEQ ID NO: 2360955 - DNA, 25 bp, Homo sapien
tgttggtgttgtatcgatattcctg

SEQ ID NO: 2360956 - DNA, 25 bp, Homo sapien
tgtatcgatattcctggggaacccc

SEQ ID NO: 2360957 - DNA, 25 bp, Homo sapien
ttggtgttgtatcgatattcctggg

SEQ ID NO: 2360958 - DNA, 25 bp, Homo sapien
gttgtatcgatattcctggggaacc

SEQ ID NO: 2360959 - DNA, 25 bp, Homo sapien
ctccagcctgggcgacagagcaaga

SEQ ID NO: 2360960 - DNA, 25 bp, Homo sapien
tggagatcaagccactgcactccag

SEQ ID NO: 2360961 - DNA, 25 bp, Homo sapien
tgggagacggatgttgcagtgagtg

SEQ ID NO: 2360962 - DNA, 25 bp, Homo sapien
cactccagcctgggcgacagagcaa

SEQ ID NO: 2360963 - DNA, 25 bp, Homo sapien
cctgccagtccaaccacactcccac

SEQ ID NO: 2360964 - DNA, 25 bp, Homo sapien
tctccctgccagtccaaccacactc

SEQ ID NO: 2360965 - DNA, 25 bp, Homo sapien
tgccagtccaaccacactcccactc

SEQ ID NO: 2360966 - DNA, 25 bp, Homo sapien
tccctgccagtccaaccacactccc

SEQ ID NO: 2360967 - DNA, 25 bp, Homo sapien
catttctagatataactcaaaggaa

SEQ ID NO: 2360968 - DNA, 25 bp, Homo sapien
cagaatactggttaatttaattgta

SEQ ID NO: 2360969 - DNA, 25 bp, Homo sapien
aatcattctaccacacacgtgttat

SEQ ID NO: 2360970 - DNA, 25 bp, Homo sapien
aggtgttccctagacagaatggtta

SEQ ID NO: 2360971 - DNA, 25 bp, Homo sapien
ggttcatcattaaggtatgatggga

SEQ ID NO: 2360972 - DNA, 25 bp, Homo sapien
ttctggtggttcatcattaaggtat

SEQ ID NO: 2360973 - DNA, 25 bp, Homo sapien
ggtatgatgggatttcttgttgatt

SEQ ID NO: 2360974 - DNA, 25 bp, Homo sapien
cattaaggtatgatgggatttcttg

SEQ ID NO: 2360975 - DNA, 25 bp, Homo sapien
tacgtaagtccaactaagagcacca

SEQ ID NO: 2360976 - DNA, 25 bp, Homo sapien
tttgaggctacaacagataactgcc

SEQ ID NO: 2360977 - DNA, 25 bp, Homo sapien
gggaaaatctcactgactagtcaaa

SEQ ID NO: 2360978 - DNA, 25 bp, Homo sapien
aattctgtaatcgaggtcactagcc

SEQ ID NO: 2360979 - DNA, 25 bp, Homo sapien
aagagagtgtgtgctttaagtatct

SEQ ID NO: 2360980 - DNA, 25 bp, Homo sapien
caaacttaggaataaaatgactagc

SEQ ID NO: 2360981 - DNA, 25 bp, Homo sapien
gaaaaattaagctctaagtcatgag

SEQ ID NO: 2360982 - DNA, 25 bp, Homo sapien
gagccacatatattagcatgtaagc

SEQ ID NO: 2360983 - DNA, 25 bp, Homo sapien
gttgatttgataaggccaaccacac

SEQ ID NO: 2360984 - DNA, 25 bp, Homo sapien
tagttttcaaggtatggtctgggac

SEQ ID NO: 2360985 - DNA, 25 bp, Homo sapien
gacttcctcacaacaggaggttgat

SEQ ID NO: 2360986 - DNA, 25 bp, Homo sapien
tacagatgccgaagaccatttcagg

SEQ ID NO: 2360987 - DNA, 25 bp, Homo sapien
agtcacacgggacaacatgcctggc

SEQ ID NO: 2360988 - DNA, 25 bp, Homo sapien
tcccatggaaggcacagttgtaaca

SEQ ID NO: 2360989 - DNA, 25 bp, Homo sapien
ttgtttacaacagcagacccaacag

SEQ ID NO: 2360990 - DNA, 25 bp, Homo sapien
tggtggcaccaacagctccctttgt

SEQ ID NO: 2360991 - DNA, 25 bp, Homo sapien
cctggaacttaagtatgagaaacct

SEQ ID NO: 2360992 - DNA, 25 bp, Homo sapien
tcttcagttacaaccgagtaagtgt

SEQ ID NO: 2360993 - DNA, 25 bp, Homo sapien
gctgtggagcgcaagtgtatctcta

SEQ ID NO: 2360994 - DNA, 25 bp, Homo sapien
cactggcattacagtgctgtggagc

SEQ ID NO: 2360995 - DNA, 25 bp, Homo sapien
tgagacaaaacgtaccaggtggctt

SEQ ID NO: 2360996 - DNA, 25 bp, Homo sapien
gctgaataacagatgcctccaggtg

SEQ ID NO: 2360997 - DNA, 25 bp, Homo sapien
tgatgaagcatgaacccaggctgag

SEQ ID NO: 2360998 - DNA, 25 bp, Homo sapien
tattaggcacatcaaaggtacggct

SEQ ID NO: 2360999 - DNA, 25 bp, Homo sapien
gtgctttattaacaaattcatgtgt

SEQ ID NO: 2361000 - DNA, 25 bp, Homo sapien
ttctttagatctttatgaaacattc

SEQ ID NO: 2361001 - DNA, 25 bp, Homo sapien
tctttagatctttatgaaacattcc

SEQ ID NO: 2361002 - DNA, 25 bp, Homo sapien
ctttagatctttatgaaacattcca

SEQ ID NO: 2361003 - DNA, 25 bp, Homo sapien
aagcaagaagttggtcccaggaaga

SEQ ID NO: 2361004 - DNA, 25 bp, Homo sapien
ggagactagtcaatacgcagcaaaa

SEQ ID NO: 2361005 - DNA, 25 bp, Homo sapien
tatgttcatacgactgtgctgcagc

SEQ ID NO: 2361006 - DNA, 25 bp, Homo sapien
gaggcagcacaggtccatctaagga

SEQ ID NO: 2361007 - DNA, 25 bp, Homo sapien
gaactgactcactttcagctgtgaa

SEQ ID NO: 2361008 - DNA, 25 bp, Homo sapien
gaattggcataagagaagtcacccc

SEQ ID NO: 2361009 - DNA, 25 bp, Homo sapien
aaatgcacagccaaacaattgactg

SEQ ID NO: 2361010 - DNA, 25 bp, Homo sapien
tctgaagatccaggtctgcctgtaa

SEQ ID NO: 2361011 - DNA, 25 bp, Homo sapien
gacttttgacagctgcacctaatgt

SEQ ID NO: 2361012 - DNA, 25 bp, Homo sapien
tactattaaagaccaagagaaccag

SEQ ID NO: 2361013 - DNA, 25 bp, Homo sapien
tccaggagcaaggtttcaccagctt

SEQ ID NO: 2361014 - DNA, 25 bp, Homo sapien
tcaagttaatagagcagtttccaga

SEQ ID NO: 2361015 - DNA, 25 bp, Homo sapien
tacaagaactaggtgccgatgagac

SEQ ID NO: 2361016 - DNA, 25 bp, Homo sapien
gaatgagtccatttaagtcccagga

SEQ ID NO: 2361017 - DNA, 25 bp, Homo sapien
tattttggaacgctgcccggaagca

SEQ ID NO: 2361018 - DNA, 25 bp, Homo sapien
tcccaggacggtggaaactagctag

SEQ ID NO: 2361019 - DNA, 25 bp, Homo sapien
caaatttgtaagtgtatgtgttctg

SEQ ID NO: 2361020 - DNA, 25 bp, Homo sapien
aatttgtaagtgtatgtgttctgaa

SEQ ID NO: 2361021 - DNA, 25 bp, Homo sapien
tttgtaagtgtatgtgttctgaaag

SEQ ID NO: 2361022 - DNA, 25 bp, Homo sapien
aaatttgtaagtgtatgtgttctga

SEQ ID NO: 2361023 - DNA, 25 bp, Homo sapien
ggatgaactgaatatctggatgagg

SEQ ID NO: 2361024 - DNA, 25 bp, Homo sapien
agttggaaagaatcccaagtggatg

SEQ ID NO: 2361025 - DNA, 25 bp, Homo sapien
gcagggaactgacaagatcacattt

SEQ ID NO: 2361026 - DNA, 25 bp, Homo sapien
gaaagaatcccaagtggatgaactg

SEQ ID NO: 2361027 - DNA, 25 bp, Homo sapien
gtaccgcatccacttgttcactcag

SEQ ID NO: 2361028 - DNA, 25 bp, Homo sapien
taaagcagaacaccgttcagttcct

SEQ ID NO: 2361029 - DNA, 25 bp, Homo sapien
caagttcctttacctgcgtctgttt

SEQ ID NO: 2361030 - DNA, 25 bp, Homo sapien
cgtttgatctttgcagtcacccagg

SEQ ID NO: 2361031 - DNA, 25 bp, Homo sapien
taatccaaattggtattgtagcctc

SEQ ID NO: 2361032 - DNA, 25 bp, Homo sapien
cacaattagtatagacccatcgata

SEQ ID NO: 2361033 - DNA, 25 bp, Homo sapien
gacccaaacttgtggaagtatcatg

SEQ ID NO: 2361034 - DNA, 25 bp, Homo sapien
tgtagcctctgttaacacagacagt

SEQ ID NO: 2361035 - DNA, 25 bp, Homo sapien
caggaggaatactgttgcagctgaa

SEQ ID NO: 2361036 - DNA, 25 bp, Homo sapien
gaagtatcagaaagccttgcctgca

SEQ ID NO: 2361037 - DNA, 25 bp, Homo sapien
tatttgcaatcaagctttacctagt

SEQ ID NO: 2361038 - DNA, 25 bp, Homo sapien
tgagtctaaaacaattaaagtggcc

SEQ ID NO: 2361039 - DNA, 25 bp, Homo sapien
aggatcgtttaagcctaggaatttg

SEQ ID NO: 2361040 - DNA, 25 bp, Homo sapien
gcttgagattgggagttcgaatcca

SEQ ID NO: 2361041 - DNA, 25 bp, Homo sapien
ttgggagttcgaatccagccttggc

SEQ ID NO: 2361042 - DNA, 25 bp, Homo sapien
agattgggagttcgaatccagcctt

SEQ ID NO: 2361043 - DNA, 25 bp, Homo sapien
gatgctaccgataggtcaagaggag

SEQ ID NO: 2361044 - DNA, 25 bp, Homo sapien
tttttggaatcactcatagtaccaa

SEQ ID NO: 2361045 - DNA, 25 bp, Homo sapien
agagtgttttacttacgtcagatgc

SEQ ID NO: 2361046 - DNA, 25 bp, Homo sapien
catagtaccaaattcagtgcttttt

SEQ ID NO: 2361047 - DNA, 25 bp, Homo sapien
aggtttccgtgacgaatctcctggg

SEQ ID NO: 2361048 - DNA, 25 bp, Homo sapien
tggggcgaggtttccgtgacgaatc

SEQ ID NO: 2361049 - DNA, 25 bp, Homo sapien
gcgaggtttccgtgacgaatctcct

SEQ ID NO: 2361050 - DNA, 25 bp, Homo sapien
tggtggggcgaggtttccgtgacga

SEQ ID NO: 2361051 - DNA, 25 bp, Homo sapien
ggggagcgcgccctccaatgaggag

SEQ ID NO: 2361052 - DNA, 25 bp, Homo sapien
cggcggcagagtcacccgggcagcc

SEQ ID NO: 2361053 - DNA, 25 bp, Homo sapien
tgccggtggtcacgaggggagcgcg

SEQ ID NO: 2361054 - DNA, 25 bp, Homo sapien
gtcaccggccggcaaccgtccagcg

SEQ ID NO: 2361055 - DNA, 25 bp, Homo sapien
tctgctcactggttgaaaactgggc

SEQ ID NO: 2361056 - DNA, 25 bp, Homo sapien
caattctagatcatttcacgttgaa

SEQ ID NO: 2361057 - DNA, 25 bp, Homo sapien
tcatttttctagagctaaactagag

SEQ ID NO: 2361058 - DNA, 25 bp, Homo sapien
tcccgtgtagttgggaccacctgca

SEQ ID NO: 2361059 - DNA, 25 bp, Homo sapien
gttatgagaacttaaccactctgga

SEQ ID NO: 2361060 - DNA, 25 bp, Homo sapien
taaataccagtgcaatggaggcagt

SEQ ID NO: 2361061 - DNA, 25 bp, Homo sapien
tctgatagcccttggtttgcaccta

SEQ ID NO: 2361062 - DNA, 25 bp, Homo sapien
agagcctggctttgtatcctgcctc

SEQ ID NO: 2361063 - DNA, 25 bp, Homo sapien
gactgttcttttagcgtggtatcca

SEQ ID NO: 2361064 - DNA, 25 bp, Homo sapien
caatcttgctagtagtaaaagctcg

SEQ ID NO: 2361065 - DNA, 25 bp, Homo sapien
tagtaaaagctcgtagaaaatatta

SEQ ID NO: 2361066 - DNA, 25 bp, Homo sapien
atattaaaagactgttcttttagcg

SEQ ID NO: 2361067 - DNA, 25 bp, Homo sapien
cctgaagacaggtcagggtcatcag

SEQ ID NO: 2361068 - DNA, 25 bp, Homo sapien
tttcctgaagacaggtcagggtcat

SEQ ID NO: 2361069 - DNA, 25 bp, Homo sapien
tgatctaacaggatttttcctgaag

SEQ ID NO: 2361070 - DNA, 25 bp, Homo sapien
ctgatctaacaggatttttcctgaa

SEQ ID NO: 2361071 - DNA, 25 bp, Homo sapien
ctcatccattaactcggcaccagaa

SEQ ID NO: 2361072 - DNA, 25 bp, Homo sapien
attacaaagccctcatccattaact

SEQ ID NO: 2361073 - DNA, 25 bp, Homo sapien
catccattaactcggcaccagaagg

SEQ ID NO: 2361074 - DNA, 25 bp, Homo sapien
gcattacaaagccctcatccattaa

SEQ ID NO: 2361075 - DNA, 25 bp, Homo sapien
tgcatgaaatatagtgaattgtgaa

SEQ ID NO: 2361076 - DNA, 25 bp, Homo sapien
tttacaggtgttttatagttatcac

SEQ ID NO: 2361077 - DNA, 25 bp, Homo sapien
tcacattgtagatattcaatatcca

SEQ ID NO: 2361078 - DNA, 25 bp, Homo sapien
gaatatataggtatcatggtattgt

SEQ ID NO: 2361079 - DNA, 25 bp, Homo sapien
aatacctctgcttcctgtaaccttc

SEQ ID NO: 2361080 - DNA, 25 bp, Homo sapien
tatcttggtgggatagcccataccc

SEQ ID NO: 2361081 - DNA, 25 bp, Homo sapien
taacttcttactgaagttggatatc

SEQ ID NO: 2361082 - DNA, 25 bp, Homo sapien
actgaagttggatatcttggtggga

SEQ ID NO: 2361083 - DNA, 25 bp, Homo sapien
ggatagcccatacccacagggctgg

SEQ ID NO: 2361084 - DNA, 25 bp, Homo sapien
ttaaatggcaaatatggaaaaaata

SEQ ID NO: 2361085 - DNA, 25 bp, Homo sapien
taaatggcaaatatggaaaaaatac

SEQ ID NO: 2361086 - DNA, 25 bp, Homo sapien
ttgtcacctggtcaggttcctggac

SEQ ID NO: 2361087 - DNA, 25 bp, Homo sapien
gtcacctggtcaggttcctggacca

SEQ ID NO: 2361088 - DNA, 25 bp, Homo sapien
tcacctggtcaggttcctggaccat

SEQ ID NO: 2361089 - DNA, 25 bp, Homo sapien
tgtcacctggtcaggttcctggacc

SEQ ID NO: 2361090 - DNA, 25 bp, Homo sapien
ctgcaattgtaatgtgaccccttaa

SEQ ID NO: 2361091 - DNA, 25 bp, Homo sapien
tgcaattgtaatgtgaccccttaat

SEQ ID NO: 2361092 - DNA, 25 bp, Homo sapien
gaccccttaatttgaagcacttgaa

SEQ ID NO: 2361093 - DNA, 25 bp, Homo sapien
gtaatgtgaccccttaatttgaagc

SEQ ID NO: 2361094 - DNA, 25 bp, Homo sapien
cagaattgttcttagagatttgctt

SEQ ID NO: 2361095 - DNA, 25 bp, Homo sapien
acagaattgttcttagagatttgct

SEQ ID NO: 2361096 - DNA, 25 bp, Homo sapien
gagacaccagttggaggaggtggta

SEQ ID NO: 2361097 - DNA, 25 bp, Homo sapien
tcaatgagcagccaggaattggaca

SEQ ID NO: 2361098 - DNA, 25 bp, Homo sapien
gtggtattgagtggccctcaatgag

SEQ ID NO: 2361099 - DNA, 25 bp, Homo sapien
aggaggtggtattgagtggccctca

SEQ ID NO: 2361100 - DNA, 25 bp, Homo sapien
cggtggaatttgaagatagatcacc

SEQ ID NO: 2361101 - DNA, 25 bp, Homo sapien
gatttcggtggaatttgaagataga

SEQ ID NO: 2361102 - DNA, 25 bp, Homo sapien
ttgatttcggtggaatttgaagata

SEQ ID NO: 2361103 - DNA, 25 bp, Homo sapien
tttcggtggaatttgaagatagatc

SEQ ID NO: 2361104 - DNA, 25 bp, Homo sapien
cctaactcatcagcccctacatcag

SEQ ID NO: 2361105 - DNA, 25 bp, Homo sapien
ctctcctaactcatcagcccctaca

SEQ ID NO: 2361106 - DNA, 25 bp, Homo sapien
tctggttcttcatgctgtctctttc

SEQ ID NO: 2361107 - DNA, 25 bp, Homo sapien
gtctctttctgctggctttcttctg

SEQ ID NO: 2361108 - DNA, 25 bp, Homo sapien
ggttttggccagatatcatctgtga

SEQ ID NO: 2361109 - DNA, 25 bp, Homo sapien
tggttttggccagatatcatctgtg

SEQ ID NO: 2361110 - DNA, 25 bp, Homo sapien
aatggttttggccagatatcatctg

SEQ ID NO: 2361111 - DNA, 25 bp, Homo sapien
ttttggccagatatcatctgtgatg

SEQ ID NO: 2361112 - DNA, 25 bp, Homo sapien
tcacccccttcttcatcaatatctt

SEQ ID NO: 2361113 - DNA, 25 bp, Homo sapien
tcctcacccccttcttcatcaatat

SEQ ID NO: 2361114 - DNA, 25 bp, Homo sapien
atcaatatcttctaatccttcctca

SEQ ID NO: 2361115 - DNA, 25 bp, Homo sapien
aatatcttctaatccttcctcatct

SEQ ID NO: 2361116 - DNA, 25 bp, Homo sapien
tattcagatagtaagcaataaaaat

SEQ ID NO: 2361117 - DNA, 25 bp, Homo sapien
ttattcagatagtaagcaataaaaa

SEQ ID NO: 2361118 - DNA, 25 bp, Homo sapien
aaacagcaaggatatctgtcaaatg

SEQ ID NO: 2361119 - DNA, 25 bp, Homo sapien
acagcaaggatatctgtcaaatgtc

SEQ ID NO: 2361120 - DNA, 25 bp, Homo sapien
agcaaggatatctgtcaaatgtcac

SEQ ID NO: 2361121 - DNA, 25 bp, Homo sapien
ctttgctgacgttttataaccccat

SEQ ID NO: 2361122 - DNA, 25 bp, Homo sapien
gagtagggaaagttactgctaacca

SEQ ID NO: 2361123 - DNA, 25 bp, Homo sapien
ccagagagtagggaaagttactgct

SEQ ID NO: 2361124 - DNA, 25 bp, Homo sapien
tataccagagagtagggaaagttac

SEQ ID NO: 2361125 - DNA, 25 bp, Homo sapien
gagctttataccagagagtagggaa

SEQ ID NO: 2361126 - DNA, 25 bp, Homo sapien
catggttgattcagaagcgtggctt

SEQ ID NO: 2361127 - DNA, 25 bp, Homo sapien
gattcagaagcgtggctttgccatg

SEQ ID NO: 2361128 - DNA, 25 bp, Homo sapien
atgctggctccatggttgattcaga

SEQ ID NO: 2361129 - DNA, 25 bp, Homo sapien
tgctgtctgtattgcggagacaact

SEQ ID NO: 2361130 - DNA, 25 bp, Homo sapien
gactctttcaccaggttgacttggg

SEQ ID NO: 2361131 - DNA, 25 bp, Homo sapien
gctgcttttccaatcgcgtatcctg

SEQ ID NO: 2361132 - DNA, 25 bp, Homo sapien
gcgtatcctgaagtcgctcattcaa

SEQ ID NO: 2361133 - DNA, 25 bp, Homo sapien
tgagcttagggcttgttcccaaggc

SEQ ID NO: 2361134 - DNA, 25 bp, Homo sapien
tagccgctgctaccaactgttagta

SEQ ID NO: 2361135 - DNA, 25 bp, Homo sapien
gccgccgctggaatatacagagcag

SEQ ID NO: 2361136 - DNA, 25 bp, Homo sapien
tgttagtactttcggctgcctcccg

SEQ ID NO: 2361137 - DNA, 25 bp, Homo sapien
cacggtgttcgtgggactgagacca

SEQ ID NO: 2361138 - DNA, 25 bp, Homo sapien
tacttggtgcacttggcgaagcgca

SEQ ID NO: 2361139 - DNA, 25 bp, Homo sapien
ccgccggcgctgctcatgttgtaga

SEQ ID NO: 2361140 - DNA, 25 bp, Homo sapien
tcaaagctgttgtgccggctgtgca

SEQ ID NO: 2361141 - DNA, 25 bp, Homo sapien
catggcgctctggatctcgtacttg

SEQ ID NO: 2361142 - DNA, 25 bp, Homo sapien
cagggcccgagctcgggcctgggcc

SEQ ID NO: 2361143 - DNA, 25 bp, Homo sapien
ggagcccgagcctgacccagggcca

SEQ ID NO: 2361144 - DNA, 25 bp, Homo sapien
cggagcccgagcctgacccagggcc

SEQ ID NO: 2361145 - DNA, 25 bp, Homo sapien
gcccgagcctgacccagggccactg

SEQ ID NO: 2361146 - DNA, 25 bp, Homo sapien
tggtgatggtggtggttggcggcgg

SEQ ID NO: 2361147 - DNA, 25 bp, Homo sapien
ctcgtggagcgcatggtggtggtga

SEQ ID NO: 2361148 - DNA, 25 bp, Homo sapien
atggtggtggttggcggcggctgcc

SEQ ID NO: 2361149 - DNA, 25 bp, Homo sapien
tcgtggagcgcatggtggtggtgat

SEQ ID NO: 2361150 - DNA, 25 bp, Homo sapien
gagtcgttgttgaccgtgtgctcca

SEQ ID NO: 2361151 - DNA, 25 bp, Homo sapien
cagatcaggtgctggtagggctgca

SEQ ID NO: 2361152 - DNA, 25 bp, Homo sapien
cagatctccgagtcgttgttgaccg

SEQ ID NO: 2361153 - DNA, 25 bp, Homo sapien
gcaggagaccccagatctccgagtc

SEQ ID NO: 2361154 - DNA, 25 bp, Homo sapien
ttgcggagagcggaacgcgcctcct

SEQ ID NO: 2361155 - DNA, 25 bp, Homo sapien
tgcactgcgtgccccccgagggagt

SEQ ID NO: 2361156 - DNA, 25 bp, Homo sapien
accattcagccggtacggccgccag

SEQ ID NO: 2361157 - DNA, 25 bp, Homo sapien
aagtgggagcactggattgcggaga

SEQ ID NO: 2361158 - DNA, 25 bp, Homo sapien
tttgaagtgtctagctccggctttc

SEQ ID NO: 2361159 - DNA, 25 bp, Homo sapien
tccggctttcgcagacgggcagcac

SEQ ID NO: 2361160 - DNA, 25 bp, Homo sapien
cgccagcgcgagctctcgaaaacaa

SEQ ID NO: 2361161 - DNA, 25 bp, Homo sapien
gagctctcgaaaacaagcgccccgg

SEQ ID NO: 2361162 - DNA, 25 bp, Homo sapien
tactgcccacgaccaacttcaggtg

SEQ ID NO: 2361163 - DNA, 25 bp, Homo sapien
ggccatactgcccacgaccaacttc

SEQ ID NO: 2361164 - DNA, 25 bp, Homo sapien
ggtcacaaaagatttagagccccca

SEQ ID NO: 2361165 - DNA, 25 bp, Homo sapien
tttagagcccccaagaaggccatac

SEQ ID NO: 2361166 - DNA, 25 bp, Homo sapien
cagtttcattcaactggcaggtgag

SEQ ID NO: 2361167 - DNA, 25 bp, Homo sapien
ttcaactggcaggtgagtttggtcc

SEQ ID NO: 2361168 - DNA, 25 bp, Homo sapien
ccttttcagtttcattcaactggca

SEQ ID NO: 2361169 - DNA, 25 bp, Homo sapien
tcattcaactggcaggtgagtttgg

SEQ ID NO: 2361170 - DNA, 25 bp, Homo sapien
ttagctagaaaagggctccatcctg

SEQ ID NO: 2361171 - DNA, 25 bp, Homo sapien
tctccaagggttgcatcgatgcttc

SEQ ID NO: 2361172 - DNA, 25 bp, Homo sapien
tctctaaaataggatgggtggccac

SEQ ID NO: 2361173 - DNA, 25 bp, Homo sapien
gggtggccacttaatcgattctcca

SEQ ID NO: 2361174 - DNA, 25 bp, Homo sapien
tgcagaatttgtctggagtattgcc

SEQ ID NO: 2361175 - DNA, 25 bp, Homo sapien
gaatttgtctggagtattgccagga

SEQ ID NO: 2361176 - DNA, 25 bp, Homo sapien
agtattgccaggatttatgagaaag

SEQ ID NO: 2361177 - DNA, 25 bp, Homo sapien
ggagatagtgcagaatttgtctgga

SEQ ID NO: 2361178 - DNA, 25 bp, Homo sapien
tatggtgacagacatactgctgctc

SEQ ID NO: 2361179 - DNA, 25 bp, Homo sapien
gaataagcactagacatatggtgac

SEQ ID NO: 2361180 - DNA, 25 bp, Homo sapien
tctgggccctttccatcaacacgaa

SEQ ID NO: 2361181 - DNA, 25 bp, Homo sapien
gcatgccatgcaggctttcgaataa

SEQ ID NO: 2361182 - DNA, 25 bp, Homo sapien
tccctacaaacacaggcttcctcaa

SEQ ID NO: 2361183 - DNA, 25 bp, Homo sapien
tcagatgtccctacaaacacaggct

SEQ ID NO: 2361184 - DNA, 25 bp, Homo sapien
cagagccgttggcattcatcaacac

SEQ ID NO: 2361185 - DNA, 25 bp, Homo sapien
tacaaacacaggcttcctcaaaggc

SEQ ID NO: 2361186 - DNA, 25 bp, Homo sapien
ccagagaacgcccattctcataaga

SEQ ID NO: 2361187 - DNA, 25 bp, Homo sapien
gggtgcacgtagctgttgggcccca

SEQ ID NO: 2361188 - DNA, 25 bp, Homo sapien
tctcataagactgcccaacttgagt

SEQ ID NO: 2361189 - DNA, 25 bp, Homo sapien
cataagccatcatactggcagagct

SEQ ID NO: 2361190 - DNA, 25 bp, Homo sapien
aacaccaggcttcaggaaacaaacg

SEQ ID NO: 2361191 - DNA, 25 bp, Homo sapien
tcctctttccgctggaagacacctg

SEQ ID NO: 2361192 - DNA, 25 bp, Homo sapien
ggcccacggccatggttaaattgct

SEQ ID NO: 2361193 - DNA, 25 bp, Homo sapien
gaaaaatgactctatctcagtgagg

SEQ ID NO: 2361194 - DNA, 25 bp, Homo sapien
aagtgcccatgcagtgccctggaat

SEQ ID NO: 2361195 - DNA, 25 bp, Homo sapien
ccctggaattcaagagccacaatgg

SEQ ID NO: 2361196 - DNA, 25 bp, Homo sapien
aattcaagagccacaatgggaaata

SEQ ID NO: 2361197 - DNA, 25 bp, Homo sapien
gaacagcatgagagccaagtgccca

SEQ ID NO: 2361198 - DNA, 25 bp, Homo sapien
gttggtccacaggtattcaattgac

SEQ ID NO: 2361199 - DNA, 25 bp, Homo sapien
tgactgggccagtcatagagctgca

SEQ ID NO: 2361200 - DNA, 25 bp, Homo sapien
gccactgtcactatcctggaaatag

SEQ ID NO: 2361201 - DNA, 25 bp, Homo sapien
cagcaggacagactcaaaagccact

SEQ ID NO: 2361202 - DNA, 25 bp, Homo sapien
gacatggcagcgcagagggctcata

SEQ ID NO: 2361203 - DNA, 25 bp, Homo sapien
atcagacatggcagcgcagagggct

SEQ ID NO: 2361204 - DNA, 25 bp, Homo sapien
gcgcagagggctcatagtcctcctg

SEQ ID NO: 2361205 - DNA, 25 bp, Homo sapien
tggcagcgcagagggctcatagtcc

SEQ ID NO: 2361206 - DNA, 25 bp, Homo sapien
tctggatgctgagtcactcgcaggc

SEQ ID NO: 2361207 - DNA, 25 bp, Homo sapien
tgaaatcctcacatccttagaacat

SEQ ID NO: 2361208 - DNA, 25 bp, Homo sapien
cctcacatccttagaacattccaga

SEQ ID NO: 2361209 - DNA, 25 bp, Homo sapien
gcatatgttgccatgtgaaatcctc

SEQ ID NO: 2361210 - DNA, 25 bp, Homo sapien
ggatactgtgcccacaagggccaca

SEQ ID NO: 2361211 - DNA, 25 bp, Homo sapien
ggatctggcaggttatagcaagcag

SEQ ID NO: 2361212 - DNA, 25 bp, Homo sapien
caggttatagcaagcaggataacca

SEQ ID NO: 2361213 - DNA, 25 bp, Homo sapien
cctctggatactgtgcccacaaggg

SEQ ID NO: 2361214 - DNA, 25 bp, Homo sapien
gcgtccttgcatcgcatcttcagcg

SEQ ID NO: 2361215 - DNA, 25 bp, Homo sapien
ccatcagcataattgctaagaagga

SEQ ID NO: 2361216 - DNA, 25 bp, Homo sapien
gacgttaaattgaatggctccaaga

SEQ ID NO: 2361217 - DNA, 25 bp, Homo sapien
agaaggatttggtgctaacgcgtcc

SEQ ID NO: 2361218 - DNA, 25 bp, Homo sapien
tgaaaggaggaaagttatttgagcc

SEQ ID NO: 2361219 - DNA, 25 bp, Homo sapien
caatcttctctacttgtcagacaca

SEQ ID NO: 2361220 - DNA, 25 bp, Homo sapien
taataggacccgaattactctgaaa

SEQ ID NO: 2361221 - DNA, 25 bp, Homo sapien
ttcctaacattttggagcctggtga

SEQ ID NO: 2361222 - DNA, 25 bp, Homo sapien
tctggattctcaggtaaccatcaac

SEQ ID NO: 2361223 - DNA, 25 bp, Homo sapien
tgcttgaaacatcccagttgcaggc

SEQ ID NO: 2361224 - DNA, 25 bp, Homo sapien
cagttgcaggcaagaacacgtttca

SEQ ID NO: 2361225 - DNA, 25 bp, Homo sapien
tacagcgctgggaagcactgcagct

SEQ ID NO: 2361226 - DNA, 25 bp, Homo sapien
cagagctcaggctctgaatggggcc

SEQ ID NO: 2361227 - DNA, 25 bp, Homo sapien
gagctcaggctctgaatggggcccc

SEQ ID NO: 2361228 - DNA, 25 bp, Homo sapien
agagctcaggctctgaatggggccc

SEQ ID NO: 2361229 - DNA, 25 bp, Homo sapien
tcagagctcaggctctgaatggggc

SEQ ID NO: 2361230 - DNA, 25 bp, Homo sapien
cactttatgggcaacagacagacct

SEQ ID NO: 2361231 - DNA, 25 bp, Homo sapien
cagagagacccgcaaaggagaacaa

SEQ ID NO: 2361232 - DNA, 25 bp, Homo sapien
gctcttagagatcaacacatgccag

SEQ ID NO: 2361233 - DNA, 25 bp, Homo sapien
gactaaccagagaaaccagtgacct

SEQ ID NO: 2361234 - DNA, 25 bp, Homo sapien
ccatacagattcacctttggagttg

SEQ ID NO: 2361235 - DNA, 25 bp, Homo sapien
cattacatgcacctctctggagggc

SEQ ID NO: 2361236 - DNA, 25 bp, Homo sapien
tggagggctcagtactgcgtaacgc

SEQ ID NO: 2361237 - DNA, 25 bp, Homo sapien
ctcagaaaacactgccttcaacatt

SEQ ID NO: 2361238 - DNA, 25 bp, Homo sapien
actgtgactgccttgctctggaact

SEQ ID NO: 2361239 - DNA, 25 bp, Homo sapien
actgccttgctctggaacttctcca

SEQ ID NO: 2361240 - DNA, 25 bp, Homo sapien
atcactgtgactgccttgctctgga

SEQ ID NO: 2361241 - DNA, 25 bp, Homo sapien
gtgccagctgctccaagctcttcat

SEQ ID NO: 2361242 - DNA, 25 bp, Homo sapien
tcaccctgagagtgaacggcagact

SEQ ID NO: 2361243 - DNA, 25 bp, Homo sapien
cagccagacaggatgcacacttaaa

SEQ ID NO: 2361244 - DNA, 25 bp, Homo sapien
gcagactcagtactgggagagccaa

SEQ ID NO: 2361245 - DNA, 25 bp, Homo sapien
tgagttgagttaatgctgcagccag

SEQ ID NO: 2361246 - DNA, 25 bp, Homo sapien
tgtttgccaacctgtgagttagaag

SEQ ID NO: 2361247 - DNA, 25 bp, Homo sapien
ggtagctactagaaggtctctcagg

SEQ ID NO: 2361248 - DNA, 25 bp, Homo sapien
gaaagaatactctagttaggccttg

SEQ ID NO: 2361249 - DNA, 25 bp, Homo sapien
gaaaaggcactcaggctaatgtttg

SEQ ID NO: 2361250 - DNA, 25 bp, Homo sapien
ttctgcttccaggatgtgcctcaga

SEQ ID NO: 2361251 - DNA, 25 bp, Homo sapien
cttctgcttccaggatgtgcctcag

SEQ ID NO: 2361252 - DNA, 25 bp, Homo sapien
aagtcctcttggacttaatggacat

SEQ ID NO: 2361253 - DNA, 25 bp, Homo sapien
cagagccctcaaagtcctcttggac

SEQ ID NO: 2361254 - DNA, 25 bp, Homo sapien
ttcagagccctcaaagtcctcttgg

SEQ ID NO: 2361255 - DNA, 25 bp, Homo sapien
tcttcagagccctcaaagtcctctt

SEQ ID NO: 2361256 - DNA, 25 bp, Homo sapien
cttcagctcctactaggaagctcac

SEQ ID NO: 2361257 - DNA, 25 bp, Homo sapien
gccaaatttgcagcccatgtgtaaa

SEQ ID NO: 2361258 - DNA, 25 bp, Homo sapien
aaagagttcactgcaaaaagtgcca

SEQ ID NO: 2361259 - DNA, 25 bp, Homo sapien
taatcatgacccactccaacatgtg

SEQ ID NO: 2361260 - DNA, 25 bp, Homo sapien
gcaaaaagtgccatataatcatgac

SEQ ID NO: 2361261 - DNA, 25 bp, Homo sapien
tgccatataatcatgacccactcca

SEQ ID NO: 2361262 - DNA, 25 bp, Homo sapien
tggcttgtttgaccgctgtgggtct

SEQ ID NO: 2361263 - DNA, 25 bp, Homo sapien
ggtctctgtgaagattcaggctgtc

SEQ ID NO: 2361264 - DNA, 25 bp, Homo sapien
gctccgactggctgaacatgggcag

SEQ ID NO: 2361265 - DNA, 25 bp, Homo sapien
tcaattcggcgatgctgcctacgcg

SEQ ID NO: 2361266 - DNA, 25 bp, Homo sapien
tgtctattacggacattagtccttt

SEQ ID NO: 2361267 - DNA, 25 bp, Homo sapien
catttcaggccttgcatttaagtct

SEQ ID NO: 2361268 - DNA, 25 bp, Homo sapien
tgattactgatgttaagcacttaaa

SEQ ID NO: 2361269 - DNA, 25 bp, Homo sapien
tgagttccttgtctattacggacat

SEQ ID NO: 2361270 - DNA, 25 bp, Homo sapien
caggtgatgcattgcacgggacacc

SEQ ID NO: 2361271 - DNA, 25 bp, Homo sapien
ccattgccgtggtgcttggcattga

SEQ ID NO: 2361272 - DNA, 25 bp, Homo sapien
ttgactttggaaggctccacgttgg

SEQ ID NO: 2361273 - DNA, 25 bp, Homo sapien
aatagcaaagggtgtacagggcctc

SEQ ID NO: 2361274 - DNA, 25 bp, Homo sapien
taggtgcttctggttatcccgggcc

SEQ ID NO: 2361275 - DNA, 25 bp, Homo sapien
gaataatgatagtcaaggagatgat

SEQ ID NO: 2361276 - DNA, 25 bp, Homo sapien
tgactttgtcagaataatgatagtc

SEQ ID NO: 2361277 - DNA, 25 bp, Homo sapien
ttgtcagaataatgatagtcaagga

SEQ ID NO: 2361278 - DNA, 25 bp, Homo sapien
tcagaataatgatagtcaaggagat

SEQ ID NO: 2361279 - DNA, 25 bp, Homo sapien
caaggagctgagatctacatgggtg

SEQ ID NO: 2361280 - DNA, 25 bp, Homo sapien
tagcagttcgcccagtcatcaggaa

SEQ ID NO: 2361281 - DNA, 25 bp, Homo sapien
aggaacttatctcctgtccaggtga

SEQ ID NO: 2361282 - DNA, 25 bp, Homo sapien
ggcccagcaggacagtatcagatat

SEQ ID NO: 2361283 - DNA, 25 bp, Homo sapien
tatctcatcttctcgctctagcatg

SEQ ID NO: 2361284 - DNA, 25 bp, Homo sapien
cattcatccagcaactctgagtttc

SEQ ID NO: 2361285 - DNA, 25 bp, Homo sapien
tccagagccattagccctgggctgg

SEQ ID NO: 2361286 - DNA, 25 bp, Homo sapien
gagattccaggtctacagaaaacag

SEQ ID NO: 2361287 - DNA, 25 bp, Homo sapien
tcagataccatgtctactgggcaaa

SEQ ID NO: 2361288 - DNA, 25 bp, Homo sapien
taacatgtgaaaaccagctgcgtgc

SEQ ID NO: 2361289 - DNA, 25 bp, Homo sapien
gcgtgctggcagctgtcaatatcac

SEQ ID NO: 2361290 - DNA, 25 bp, Homo sapien
gcaaatgaccaaatttactgccggg

SEQ ID NO: 2361291 - DNA, 25 bp, Homo sapien
ctggttctatacctggtgatactgc

SEQ ID NO: 2361292 - DNA, 25 bp, Homo sapien
ttctatacctggtgatactgcagag

SEQ ID NO: 2361293 - DNA, 25 bp, Homo sapien
ggttctatacctggtgatactgcag

SEQ ID NO: 2361294 - DNA, 25 bp, Homo sapien
tctatacctggtgatactgcagagg

SEQ ID NO: 2361295 - DNA, 25 bp, Homo sapien
ctgtgcaatgggctaaacagaaatt

SEQ ID NO: 2361296 - DNA, 25 bp, Homo sapien
ccctcctgtatccttccagcataca

SEQ ID NO: 2361297 - DNA, 25 bp, Homo sapien
aacaagtaggaaacaaggcctgtgc

SEQ ID NO: 2361298 - DNA, 25 bp, Homo sapien
tgcatggggcttgccccagtgtaac

SEQ ID NO: 2361299 - DNA, 25 bp, Homo sapien
tttccttcaagtcctgcagccacag

SEQ ID NO: 2361300 - DNA, 25 bp, Homo sapien
tcagcgaacaaagatgccaacaatg

SEQ ID NO: 2361301 - DNA, 25 bp, Homo sapien
atttccttcaagtcctgcagccaca

SEQ ID NO: 2361302 - DNA, 25 bp, Homo sapien
aacaaagatgccaacaatgtcaggg

SEQ ID NO: 2361303 - DNA, 25 bp, Homo sapien
gagcctttggagacatccggaccgc

SEQ ID NO: 2361304 - DNA, 25 bp, Homo sapien
ctttggagacatccggaccgcaccg

SEQ ID NO: 2361305 - DNA, 25 bp, Homo sapien
gcctggggataatgtgactaggaaa

SEQ ID NO: 2361306 - DNA, 25 bp, Homo sapien
gagacatccggaccgcaccggtgac

SEQ ID NO: 2361307 - DNA, 25 bp, Homo sapien
gcgcgttagggcctccccggaggca

SEQ ID NO: 2361308 - DNA, 25 bp, Homo sapien
cgcgttagggcctccccggaggcag

SEQ ID NO: 2361309 - DNA, 25 bp, Homo sapien
gaggcaggggctgccggcttggccc

SEQ ID NO: 2361310 - DNA, 25 bp, Homo sapien
gccccaccccctgctcgcggggatc

SEQ ID NO: 2361311 - DNA, 25 bp, Homo sapien
ctgagctggcgcggctcgcagtcca

SEQ ID NO: 2361312 - DNA, 25 bp, Homo sapien
ggccgcctggcggacgtcgtcgctg

SEQ ID NO: 2361313 - DNA, 25 bp, Homo sapien
gacgtcgtcgctgtccatggagaag

SEQ ID NO: 2361314 - DNA, 25 bp, Homo sapien
cggatccactccatcagcggcggca

SEQ ID NO: 2361315 - DNA, 25 bp, Homo sapien
ggagtgagcctgcacgcagaatgtg

SEQ ID NO: 2361316 - DNA, 25 bp, Homo sapien
gggagtgagcctgcacgcagaatgt

SEQ ID NO: 2361317 - DNA, 25 bp, Homo sapien
cacgcagaatgtgccccgcccaccc

SEQ ID NO: 2361318 - DNA, 25 bp, Homo sapien
cagggccgtggcatggagtgtgatg

SEQ ID NO: 2361319 - DNA, 25 bp, Homo sapien
ccacagggccgtggcatggagtgtg

SEQ ID NO: 2361320 - DNA, 25 bp, Homo sapien
ggccgtggcatggagtgtgatgtct

SEQ ID NO: 2361321 - DNA, 25 bp, Homo sapien
accacagggccgtggcatggagtgt

SEQ ID NO: 2361322 - DNA, 25 bp, Homo sapien
taattaaggaccaagtcgccagcct

SEQ ID NO: 2361323 - DNA, 25 bp, Homo sapien
tggatactcaggacaccactgaagg

SEQ ID NO: 2361324 - DNA, 25 bp, Homo sapien
cggtaatacaacagcaagtgagtca

SEQ ID NO: 2361325 - DNA, 25 bp, Homo sapien
gagttgaaatgcatgcggacacagc

SEQ ID NO: 2361326 - DNA, 25 bp, Homo sapien
ccttgctcatatggaagattcctga

SEQ ID NO: 2361327 - DNA, 25 bp, Homo sapien
ggtttgggttacactatggctccat

SEQ ID NO: 2361328 - DNA, 25 bp, Homo sapien
gataaatatgagaggatgcagcccc

SEQ ID NO: 2361329 - DNA, 25 bp, Homo sapien
tgaagcccaccattggaaggtgcag

SEQ ID NO: 2361330 - DNA, 25 bp, Homo sapien
ggcccccaggaaggctgccatccct

SEQ ID NO: 2361331 - DNA, 25 bp, Homo sapien
ccagtggggaaagcctggcccccag

SEQ ID NO: 2361332 - DNA, 25 bp, Homo sapien
gaaggctgccatccctgtccagcat

SEQ ID NO: 2361333 - DNA, 25 bp, Homo sapien
caggaaggctgccatccctgtccag

SEQ ID NO: 2361334 - DNA, 25 bp, Homo sapien
ctgcacctggcttgtgtcttaactc

SEQ ID NO: 2361335 - DNA, 25 bp, Homo sapien
cctggcttgtgtcttaactcagaag

SEQ ID NO: 2361336 - DNA, 25 bp, Homo sapien
cttgtgtcttaactcagaagatagg

SEQ ID NO: 2361337 - DNA, 25 bp, Homo sapien
gccttacttaccccagtagctgaga

SEQ ID NO: 2361338 - DNA, 25 bp, Homo sapien
taaacttggcttcgatggccaccgc

SEQ ID NO: 2361339 - DNA, 25 bp, Homo sapien
caggtcctgcttaaacttggcttcg

SEQ ID NO: 2361340 - DNA, 25 bp, Homo sapien
agatgcacaaaagcagtcgtcggcc

SEQ ID NO: 2361341 - DNA, 25 bp, Homo sapien
tgttcgtccacagttcagcatccgg

SEQ ID NO: 2361342 - DNA, 25 bp, Homo sapien
tgttcgctcatggtgttgatcccat

SEQ ID NO: 2361343 - DNA, 25 bp, Homo sapien
ctgttcgctcatggtgttgatccca

SEQ ID NO: 2361344 - DNA, 25 bp, Homo sapien
tcgctcatggtgttgatcccatcgg

SEQ ID NO: 2361345 - DNA, 25 bp, Homo sapien
tcatggtgttgatcccatcgggccc

SEQ ID NO: 2361346 - DNA, 25 bp, Homo sapien
ccccacggacgcaggcatacatcag

SEQ ID NO: 2361347 - DNA, 25 bp, Homo sapien
ccacattcaggtcagctccggcatc

SEQ ID NO: 2361348 - DNA, 25 bp, Homo sapien
tgaaccatcgcctcgtccccacgga

SEQ ID NO: 2361349 - DNA, 25 bp, Homo sapien
ctcgtccccacggacgcaggcatac

SEQ ID NO: 2361350 - DNA, 25 bp, Homo sapien
acagcaaaagtcagagccgtccaat

SEQ ID NO: 2361351 - DNA, 25 bp, Homo sapien
tacaggaatatgtccatgcaacaca

SEQ ID NO: 2361352 - DNA, 25 bp, Homo sapien
tcagagccgtccaatggcgggtctc

SEQ ID NO: 2361353 - DNA, 25 bp, Homo sapien
cggatggatatttatgaggagtact

SEQ ID NO: 2361354 - DNA, 25 bp, Homo sapien
tcagatgtggatagggaaatacgtt

SEQ ID NO: 2361355 - DNA, 25 bp, Homo sapien
tgtggatagggaaatacgttaatac

SEQ ID NO: 2361356 - DNA, 25 bp, Homo sapien
cagatgtggatagggaaatacgtta

SEQ ID NO: 2361357 - DNA, 25 bp, Homo sapien
gatgtggatagggaaatacgttaat

SEQ ID NO: 2361358 - DNA, 25 bp, Homo sapien
ctcgccatgctccactgagccttcc

SEQ ID NO: 2361359 - DNA, 25 bp, Homo sapien
tcctcgccatgctccactgagcctt

SEQ ID NO: 2361360 - DNA, 25 bp, Homo sapien
tctcctcgccatgctccactgagcc

SEQ ID NO: 2361361 - DNA, 25 bp, Homo sapien
gccatgctccactgagccttccacc

SEQ ID NO: 2361362 - DNA, 25 bp, Homo sapien
cacgctccaacagcaaactaaccag

SEQ ID NO: 2361363 - DNA, 25 bp, Homo sapien
ggttgtagaaattccattcctgtac

SEQ ID NO: 2361364 - DNA, 25 bp, Homo sapien
gggttgtagaaattccattcctgta

SEQ ID NO: 2361365 - DNA, 25 bp, Homo sapien
atggttcctatcaggggatcggcac

SEQ ID NO: 2361366 - DNA, 25 bp, Homo sapien
ctgtgtccgtgggctgcagcctggc

SEQ ID NO: 2361367 - DNA, 25 bp, Homo sapien
gcctggctgaaagagttcatatcac

SEQ ID NO: 2361368 - DNA, 25 bp, Homo sapien
cagcctggctgaaagagttcatatc

SEQ ID NO: 2361369 - DNA, 25 bp, Homo sapien
ctgcagcctggctgaaagagttcat

SEQ ID NO: 2361370 - DNA, 25 bp, Homo sapien
aatcataaacccagagaggatgaca

SEQ ID NO: 2361371 - DNA, 25 bp, Homo sapien
gtcaatcataaacccagagaggatg

SEQ ID NO: 2361372 - DNA, 25 bp, Homo sapien
caatcataaacccagagaggatgac

SEQ ID NO: 2361373 - DNA, 25 bp, Homo sapien
ctgtcaatcataaacccagagagga

SEQ ID NO: 2361374 - DNA, 25 bp, Homo sapien
gcgctgtgatacatggcctccctca

SEQ ID NO: 2361375 - DNA, 25 bp, Homo sapien
tgtgacatccacgtagccatgctca

SEQ ID NO: 2361376 - DNA, 25 bp, Homo sapien
ccttctctggctgggcgagcagttt

SEQ ID NO: 2361377 - DNA, 25 bp, Homo sapien
aggtcagtcccctcggccagaatct

SEQ ID NO: 2361378 - DNA, 25 bp, Homo sapien
tttaacaagcactggatgagaggcc

SEQ ID NO: 2361379 - DNA, 25 bp, Homo sapien
gtgctgctggaaggcgatccgcaaa

SEQ ID NO: 2361380 - DNA, 25 bp, Homo sapien
tccagccacgtgtgcagagtccacg

SEQ ID NO: 2361381 - DNA, 25 bp, Homo sapien
ggcaggccttgggtaacgagctcct

SEQ ID NO: 2361382 - DNA, 25 bp, Homo sapien
ggtggtgtcattcgtatcaggtgac

SEQ ID NO: 2361383 - DNA, 25 bp, Homo sapien
caggagggcccttttgagtgtgagg

SEQ ID NO: 2361384 - DNA, 25 bp, Homo sapien
ctgggacccaatacgattctgaact

SEQ ID NO: 2361385 - DNA, 25 bp, Homo sapien
cccaatacgattctgaactccagga

SEQ ID NO: 2361386 - DNA, 25 bp, Homo sapien
tgaccctcatcgttcacgttgacct

SEQ ID NO: 2361387 - DNA, 25 bp, Homo sapien
tgtccttgaccctcatcgttcacgt

SEQ ID NO: 2361388 - DNA, 25 bp, Homo sapien
ttcacgttgacctcttcccactttg

SEQ ID NO: 2361389 - DNA, 25 bp, Homo sapien
ccttgaccctcatcgttcacgttga

SEQ ID NO: 2361390 - DNA, 25 bp, Homo sapien
ttagcccttttgatcctgtgactgt

SEQ ID NO: 2361391 - DNA, 25 bp, Homo sapien
tagcccttttgatcctgtgactgtg

SEQ ID NO: 2361392 - DNA, 25 bp, Homo sapien
gttctccattaacgagacaaacgct

SEQ ID NO: 2361393 - DNA, 25 bp, Homo sapien
gactgtgttctccattaacgagaca

SEQ ID NO: 2361394 - DNA, 25 bp, Homo sapien
ccaagcgcgaggtctgtttccgttt

SEQ ID NO: 2361395 - DNA, 25 bp, Homo sapien
gcgcgaggtctgtttccgtttgatt

SEQ ID NO: 2361396 - DNA, 25 bp, Homo sapien
ggtagggcccgtagcagtgtgtgaa

SEQ ID NO: 2361397 - DNA, 25 bp, Homo sapien
aagcgcgaggtctgtttccgtttga

SEQ ID NO: 2361398 - DNA, 25 bp, Homo sapien
gaaagaacctagtgcctgatggaaa

SEQ ID NO: 2361399 - DNA, 25 bp, Homo sapien
gctgggactgcagaacgacaaaatt

SEQ ID NO: 2361400 - DNA, 25 bp, Homo sapien
aaattacagcttccgggcacacctg

SEQ ID NO: 2361401 - DNA, 25 bp, Homo sapien
ggcacacctgtgttcaagttccagc

SEQ ID NO: 2361402 - DNA, 25 bp, Homo sapien
ttctttattgttaagaaaatgagga

SEQ ID NO: 2361403 - DNA, 25 bp, Homo sapien
tctttattgttaagaaaatgaggat

SEQ ID NO: 2361404 - DNA, 25 bp, Homo sapien
gagaggctgtaaataacagcacttt

SEQ ID NO: 2361405 - DNA, 25 bp, Homo sapien
cactttgtgagcataaaatggtctt

SEQ ID NO: 2361406 - DNA, 25 bp, Homo sapien
gcactttgtgagcataaaatggtct

SEQ ID NO: 2361407 - DNA, 25 bp, Homo sapien
tgccatcatttgtcggcttgctgga

SEQ ID NO: 2361408 - DNA, 25 bp, Homo sapien
gaaagatggagtatttcacataacc

SEQ ID NO: 2361409 - DNA, 25 bp, Homo sapien
cataaccaatctctatgcaggtgcc

SEQ ID NO: 2361410 - DNA, 25 bp, Homo sapien
caggtgccatcatttgtcggcttgc

SEQ ID NO: 2361411 - DNA, 25 bp, Homo sapien
ctttgggctcttgtgaccatctgct

SEQ ID NO: 2361412 - DNA, 25 bp, Homo sapien
gtgaccatctgcttgtcgcagagat

SEQ ID NO: 2361413 - DNA, 25 bp, Homo sapien
cggctttgggctcttgtgaccatct

SEQ ID NO: 2361414 - DNA, 25 bp, Homo sapien
atctgcttgtcgcagagatggtggt

SEQ ID NO: 2361415 - DNA, 25 bp, Homo sapien
ttaatgagcagtgactctgggccac

SEQ ID NO: 2361416 - DNA, 25 bp, Homo sapien
tttaatgagcagtgactctgggcca

SEQ ID NO: 2361417 - DNA, 25 bp, Homo sapien
atctcattgtttttaatgagcagtg

SEQ ID NO: 2361418 - DNA, 25 bp, Homo sapien
taatgagcagtgactctgggccacc

SEQ ID NO: 2361419 - DNA, 25 bp, Homo sapien
gataactgaccgagatcctggctct

SEQ ID NO: 2361420 - DNA, 25 bp, Homo sapien
gaaacaagactcctagacaggcggg

SEQ ID NO: 2361421 - DNA, 25 bp, Homo sapien
taaaaccatcagaggagtagtccag

SEQ ID NO: 2361422 - DNA, 25 bp, Homo sapien
tgacccgagtttacagaagtgccac

SEQ ID NO: 2361423 - DNA, 25 bp, Homo sapien
aatacagaaatccataactggttgt

SEQ ID NO: 2361424 - DNA, 25 bp, Homo sapien
gaatacagaaatccataactggttg

SEQ ID NO: 2361425 - DNA, 25 bp, Homo sapien
gagaaggaatacagaaatccataac

SEQ ID NO: 2361426 - DNA, 25 bp, Homo sapien
agtggagaaggaatacagaaatcca

SEQ ID NO: 2361427 - DNA, 25 bp, Homo sapien
gatgcttttcgcacagataatctca

SEQ ID NO: 2361428 - DNA, 25 bp, Homo sapien
tccagctggaaaaacttagcagcag

SEQ ID NO: 2361429 - DNA, 25 bp, Homo sapien
acacagttgtcggtattgatgcttt

SEQ ID NO: 2361430 - DNA, 25 bp, Homo sapien
gtgtcgctgcaaagcctccagctgg

SEQ ID NO: 2361431 - DNA, 25 bp, Homo sapien
ctggattggacagccactgttctag

SEQ ID NO: 2361432 - DNA, 25 bp, Homo sapien
gaacaattctggaagggcggttctc

SEQ ID NO: 2361433 - DNA, 25 bp, Homo sapien
ggaagggcggttctcacccctgagc

SEQ ID NO: 2361434 - DNA, 25 bp, Homo sapien
tgctggattggacagccactgttct

SEQ ID NO: 2361435 - DNA, 25 bp, Homo sapien
gacatttggaacgtggctcttagca

SEQ ID NO: 2361436 - DNA, 25 bp, Homo sapien
tctcaagagacaccctgaaagggcc

SEQ ID NO: 2361437 - DNA, 25 bp, Homo sapien
tacagaggtaacgttgcggaggtcc

SEQ ID NO: 2361438 - DNA, 25 bp, Homo sapien
tctaaacgcctgtatttcctggagt

SEQ ID NO: 2361439 - DNA, 25 bp, Homo sapien
tgagaaagtagccttcgcaatatgc

SEQ ID NO: 2361440 - DNA, 25 bp, Homo sapien
cgttttcaatgaggaccatcatgtt

SEQ ID NO: 2361441 - DNA, 25 bp, Homo sapien
cgtcctctgtaagtcctggagcaca

SEQ ID NO: 2361442 - DNA, 25 bp, Homo sapien
tggatggactgaattctgatggcca

SEQ ID NO: 2361443 - DNA, 25 bp, Homo sapien
tatggcagagccaacgaaaccctgt

SEQ ID NO: 2361444 - DNA, 25 bp, Homo sapien
tagtaaattctctgacgtgctgccc

SEQ ID NO: 2361445 - DNA, 25 bp, Homo sapien
tgtgtatcagcctcgcagaagagcc

SEQ ID NO: 2361446 - DNA, 25 bp, Homo sapien
aacatttcacaggttcgggcccatg

SEQ ID NO: 2361447 - DNA, 25 bp, Homo sapien
cagaagcctcattgggagttaccac

SEQ ID NO: 2361448 - DNA, 25 bp, Homo sapien
tgtacaaatcaatgcctggaggccc

SEQ ID NO: 2361449 - DNA, 25 bp, Homo sapien
tggaggccctgaactagcattagac

SEQ ID NO: 2361450 - DNA, 25 bp, Homo sapien
gaaacatccacgcagcatctctgag

SEQ ID NO: 2361451 - DNA, 25 bp, Homo sapien
tacagtcggatagcactttttgcca

SEQ ID NO: 2361452 - DNA, 25 bp, Homo sapien
tatatgtaagaccaatggccatggg

SEQ ID NO: 2361453 - DNA, 25 bp, Homo sapien
cagaaggtgcgcaatagatgtctcc

SEQ ID NO: 2361454 - DNA, 25 bp, Homo sapien
tccaaaagcagaatcgcagaacggg

SEQ ID NO: 2361455 - DNA, 25 bp, Homo sapien
taaatgaaccagagttgcttgctgc

SEQ ID NO: 2361456 - DNA, 25 bp, Homo sapien
taagcagccacattatgcagctgac

SEQ ID NO: 2361457 - DNA, 25 bp, Homo sapien
taagttattccaaaaggctctgcct

SEQ ID NO: 2361458 - DNA, 25 bp, Homo sapien
ttgactcatacaggacatgacctga

SEQ ID NO: 2361459 - DNA, 25 bp, Homo sapien
tgacagtcacatagtcacattccct

SEQ ID NO: 2361460 - DNA, 25 bp, Homo sapien
tgcctctgggatgaaatgtgacaac

SEQ ID NO: 2361461 - DNA, 25 bp, Homo sapien
ggcatctccgatgcagcacacagag

SEQ ID NO: 2361462 - DNA, 25 bp, Homo sapien
cctcccgaagagctcagagcaggag

SEQ ID NO: 2361463 - DNA, 25 bp, Homo sapien
ggagggaccacgaccgcactgctgc

SEQ ID NO: 2361464 - DNA, 25 bp, Homo sapien
ggtcctcaagtcaagggcgtgtcac

SEQ ID NO: 2361465 - DNA, 25 bp, Homo sapien
ggcgtgtcacgctagaaaccaggct

SEQ ID NO: 2361466 - DNA, 25 bp, Homo sapien
tgcatagggagggaccacgaccgca

SEQ ID NO: 2361467 - DNA, 25 bp, Homo sapien
tggtgtctctttggccacgccgcag

SEQ ID NO: 2361468 - DNA, 25 bp, Homo sapien
gcggacccaggccacgcacgtcacc

SEQ ID NO: 2361469 - DNA, 25 bp, Homo sapien
ccgcagcggacccaggccacgcacg

SEQ ID NO: 2361470 - DNA, 25 bp, Homo sapien
gtctctttggccacgccgcagcgga

SEQ ID NO: 2361471 - DNA, 25 bp, Homo sapien
ggaccctgaacaatgcctggcctac

SEQ ID NO: 2361472 - DNA, 25 bp, Homo sapien
ctgaacaatgcctggcctacagaaa

SEQ ID NO: 2361473 - DNA, 25 bp, Homo sapien
tatcccaggaccctgaacaatgcct

SEQ ID NO: 2361474 - DNA, 25 bp, Homo sapien
accctgaacaatgcctggcctacag

SEQ ID NO: 2361475 - DNA, 25 bp, Homo sapien
cctcagcaatgaggcgttttacttc

SEQ ID NO: 2361476 - DNA, 25 bp, Homo sapien
gcaatgaggcgttttacttcttctt

SEQ ID NO: 2361477 - DNA, 25 bp, Homo sapien
ttgcctcagcaatgaggcgttttac

SEQ ID NO: 2361478 - DNA, 25 bp, Homo sapien
tctcctttgcctcagcaatgaggcg

SEQ ID NO: 2361479 - DNA, 25 bp, Homo sapien
tctaagtcgtactcagccagctcat

SEQ ID NO: 2361480 - DNA, 25 bp, Homo sapien
tcatcaagcgtcctgtcatcctctg

SEQ ID NO: 2361481 - DNA, 25 bp, Homo sapien
gctcatcatcatcaagcgtcctgtc

SEQ ID NO: 2361482 - DNA, 25 bp, Homo sapien
ggtgcgtgcactctgcatgccatct

SEQ ID NO: 2361483 - DNA, 25 bp, Homo sapien
cattcttggacttagatgcaatcat

SEQ ID NO: 2361484 - DNA, 25 bp, Homo sapien
tccattcttggacttagatgcaatc

SEQ ID NO: 2361485 - DNA, 25 bp, Homo sapien
tcttggacttagatgcaatcatcta

SEQ ID NO: 2361486 - DNA, 25 bp, Homo sapien
ttcttggacttagatgcaatcatct

SEQ ID NO: 2361487 - DNA, 25 bp, Homo sapien
gagagattcaccaagagtctcagca

SEQ ID NO: 2361488 - DNA, 25 bp, Homo sapien
ccgtagaccgtaagacccaagagag

SEQ ID NO: 2361489 - DNA, 25 bp, Homo sapien
tcttgatcattactcccgtagaccg

SEQ ID NO: 2361490 - DNA, 25 bp, Homo sapien
gtaaggatcttgatcattactcccg

SEQ ID NO: 2361491 - DNA, 25 bp, Homo sapien
agtgagaggaaaaaaatgtcattga

SEQ ID NO: 2361492 - DNA, 25 bp, Homo sapien
ctaagtgagaggaaaaaaatgtcat

SEQ ID NO: 2361493 - DNA, 25 bp, Homo sapien
taagtgagaggaaaaaaatgtcatt

SEQ ID NO: 2361494 - DNA, 25 bp, Homo sapien
aagtgagaggaaaaaaatgtcattg

SEQ ID NO: 2361495 - DNA, 25 bp, Homo sapien
atgcacctctaaattgcactggtcc

SEQ ID NO: 2361496 - DNA, 25 bp, Homo sapien
acctctaaattgcactggtcctgtt

SEQ ID NO: 2361497 - DNA, 25 bp, Homo sapien
cacaaactataagattatcactggg

SEQ ID NO: 2361498 - DNA, 25 bp, Homo sapien
gtcctgttcagctcggccacaaact

SEQ ID NO: 2361499 - DNA, 25 bp, Homo sapien
tctgggctaggatcaaaattcagcc

SEQ ID NO: 2361500 - DNA, 25 bp, Homo sapien
catggtgtacataaaaagagtcttc

SEQ ID NO: 2361501 - DNA, 25 bp, Homo sapien
cagtagaatcatctgggctaggatc

SEQ ID NO: 2361502 - DNA, 25 bp, Homo sapien
tcagaggatatgcagacaagagtat

SEQ ID NO: 2361503 - DNA, 25 bp, Homo sapien
gggtcatgtttcctacagcaatgta

SEQ ID NO: 2361504 - DNA, 25 bp, Homo sapien
tgtgaagactggctctaaagagtcc

SEQ ID NO: 2361505 - DNA, 25 bp, Homo sapien
tgaaagtttacttccgagtgtgaag

SEQ ID NO: 2361506 - DNA, 25 bp, Homo sapien
gagtccactatatcaaggtcccaca

SEQ ID NO: 2361507 - DNA, 25 bp, Homo sapien
aggagaatcccaggatctcttgagc

SEQ ID NO: 2361508 - DNA, 25 bp, Homo sapien
cagcatcggtatgcccttctgctga

SEQ ID NO: 2361509 - DNA, 25 bp, Homo sapien
tcaaggacagcatcggtatgccctt

SEQ ID NO: 2361510 - DNA, 25 bp, Homo sapien
aaggtcaaggacagcatcggtatgc

SEQ ID NO: 2361511 - DNA, 25 bp, Homo sapien
ccatgaaaggtcaaggacagcatcg

SEQ ID NO: 2361512 - DNA, 25 bp, Homo sapien
agttggcaagttcatatttcctggc

SEQ ID NO: 2361513 - DNA, 25 bp, Homo sapien
gggacaaatgaatcatcctcatgaa

SEQ ID NO: 2361514 - DNA, 25 bp, Homo sapien
caacaatgtgctactggcataagga

SEQ ID NO: 2361515 - DNA, 25 bp, Homo sapien
tagtcactggtttttgacaagggta

SEQ ID NO: 2361516 - DNA, 25 bp, Homo sapien
tctgtgtgtacagcgaggctagctg

SEQ ID NO: 2361517 - DNA, 25 bp, Homo sapien
tgtcagctgatgcacttgctaaaac

SEQ ID NO: 2361518 - DNA, 25 bp, Homo sapien
acagtgttgtcagctgatgcacttg

SEQ ID NO: 2361519 - DNA, 25 bp, Homo sapien
tccccaaggacatatcccacagaat

SEQ ID NO: 2361520 - DNA, 25 bp, Homo sapien
cagaaatcagagtctgtgcttcaaa

SEQ ID NO: 2361521 - DNA, 25 bp, Homo sapien
agccagaaatcagagtctgtgcttc

SEQ ID NO: 2361522 - DNA, 25 bp, Homo sapien
aaatcagagtctgtgcttcaaatgg

SEQ ID NO: 2361523 - DNA, 25 bp, Homo sapien
gtgcttcaaatggatgaaactgcag

SEQ ID NO: 2361524 - DNA, 25 bp, Homo sapien
ggcactggtgcctctaacgttacag

SEQ ID NO: 2361525 - DNA, 25 bp, Homo sapien
gaagaatcctctctatgtccaaaag

SEQ ID NO: 2361526 - DNA, 25 bp, Homo sapien
caggttactcatgtcttaggcacac

SEQ ID NO: 2361527 - DNA, 25 bp, Homo sapien
tgatcttaacacttgaaggcactgg

SEQ ID NO: 2361528 - DNA, 25 bp, Homo sapien
gccacattcgatggctttcatctgg

SEQ ID NO: 2361529 - DNA, 25 bp, Homo sapien
cttcggcagtcatacaaagccactg

SEQ ID NO: 2361530 - DNA, 25 bp, Homo sapien
tatctgcccactgaatcgccacatt

SEQ ID NO: 2361531 - DNA, 25 bp, Homo sapien
caaggtgaaaagtgattccaagtca

SEQ ID NO: 2361532 - DNA, 25 bp, Homo sapien
gcttttcagataattctctctacta

SEQ ID NO: 2361533 - DNA, 25 bp, Homo sapien
cagataattctctctactatggaat

SEQ ID NO: 2361534 - DNA, 25 bp, Homo sapien
aaaagcttttcagataattctctct

SEQ ID NO: 2361535 - DNA, 25 bp, Homo sapien
tttcagataattctctctactatgg

SEQ ID NO: 2361536 - DNA, 25 bp, Homo sapien
aataccacacatctacaatcatctg

SEQ ID NO: 2361537 - DNA, 25 bp, Homo sapien
caaaacagagatgtagaccaataga

SEQ ID NO: 2361538 - DNA, 25 bp, Homo sapien
tacaccaataatagacaaacagcca

SEQ ID NO: 2361539 - DNA, 25 bp, Homo sapien
aacagagatgtagaccaatagaaca

SEQ ID NO: 2361540 - DNA, 25 bp, Homo sapien
catcattgtgtgcattaagtgtaaa

SEQ ID NO: 2361541 - DNA, 25 bp, Homo sapien
tatacaaagccgtcatctgtactgg

SEQ ID NO: 2361542 - DNA, 25 bp, Homo sapien
ctgaacgtgcatccaaattatatac

SEQ ID NO: 2361543 - DNA, 25 bp, Homo sapien
aaaattggcttatctgaacgtgcat

SEQ ID NO: 2361544 - DNA, 25 bp, Homo sapien
ggcctatctcctaagatgtcccaga

SEQ ID NO: 2361545 - DNA, 25 bp, Homo sapien
tcccagatcttcacgtatttgtcag

SEQ ID NO: 2361546 - DNA, 25 bp, Homo sapien
tcagctgaagcagtcacgagacagc

SEQ ID NO: 2361547 - DNA, 25 bp, Homo sapien
tagaatgaactagacttggcctatc

SEQ ID NO: 2361548 - DNA, 25 bp, Homo sapien
ctgtgcttatatcccagacccgaag

SEQ ID NO: 2361549 - DNA, 25 bp, Homo sapien
atcagggcaacatgaagaacagaag

SEQ ID NO: 2361550 - DNA, 25 bp, Homo sapien
agggcaacatgaagaacagaagaga

SEQ ID NO: 2361551 - DNA, 25 bp, Homo sapien
tcagggcaacatgaagaacagaaga

SEQ ID NO: 2361552 - DNA, 25 bp, Homo sapien
ttcttgcactcccaagaacaagcct

SEQ ID NO: 2361553 - DNA, 25 bp, Homo sapien
aagggccactaatagatgaatttct

SEQ ID NO: 2361554 - DNA, 25 bp, Homo sapien
tgccaaaagggccactaatagatga

SEQ ID NO: 2361555 - DNA, 25 bp, Homo sapien
gctcctgctgccaaaagggccacta

SEQ ID NO: 2361556 - DNA, 25 bp, Homo sapien
aagaccggatatttgtggtgccacc

SEQ ID NO: 2361557 - DNA, 25 bp, Homo sapien
tggtgccaccgcagttgcagaaagg

SEQ ID NO: 2361558 - DNA, 25 bp, Homo sapien
gaaatgcaacaagagccttacaaac

SEQ ID NO: 2361559 - DNA, 25 bp, Homo sapien
catggttgctgccacgcatggaaca

SEQ ID NO: 2361560 - DNA, 25 bp, Homo sapien
cagttaggaatgaaagtggagtctc

SEQ ID NO: 2361561 - DNA, 25 bp, Homo sapien
tgtcccttgttaggtggagagcaaa

SEQ ID NO: 2361562 - DNA, 25 bp, Homo sapien
tctggcaagttagggttgggtctca

SEQ ID NO: 2361563 - DNA, 25 bp, Homo sapien
tgttttggtgaacccacgttgctac

SEQ ID NO: 2361564 - DNA, 25 bp, Homo sapien
ttttaggcagacctatatgactaca

SEQ ID NO: 2361565 - DNA, 25 bp, Homo sapien
gactttaaatctattagaggtctcc

SEQ ID NO: 2361566 - DNA, 25 bp, Homo sapien
cctgagaatggaaagtcctgggaag

SEQ ID NO: 2361567 - DNA, 25 bp, Homo sapien
tactaatttttagtgatctgggcct

SEQ ID NO: 2361568 - DNA, 25 bp, Homo sapien
cctgctgaagcagtgaattcaactt

SEQ ID NO: 2361569 - DNA, 25 bp, Homo sapien
gaattcaacttatcttgtgtatcag

SEQ ID NO: 2361570 - DNA, 25 bp, Homo sapien
aaacctgctgaagcagtgaattcaa

SEQ ID NO: 2361571 - DNA, 25 bp, Homo sapien
ggtttttcactgtgtaactctatga

SEQ ID NO: 2361572 - DNA, 25 bp, Homo sapien
tctaagctgttaagctcagcattcc

SEQ ID NO: 2361573 - DNA, 25 bp, Homo sapien
gtgtccagccccactacttggcagg

SEQ ID NO: 2361574 - DNA, 25 bp, Homo sapien
tcagcactgttttgggggccaccaa

SEQ ID NO: 2361575 - DNA, 25 bp, Homo sapien
taagtcctgtggtgcatcttaggtg

SEQ ID NO: 2361576 - DNA, 25 bp, Homo sapien
actctatccaatttgccggtctgtg

SEQ ID NO: 2361577 - DNA, 25 bp, Homo sapien
tgactctatccaatttgccggtctg

SEQ ID NO: 2361578 - DNA, 25 bp, Homo sapien
gactctatccaatttgccggtctgt

SEQ ID NO: 2361579 - DNA, 25 bp, Homo sapien
tcttgtgctgctacatacttgctga

SEQ ID NO: 2361580 - DNA, 25 bp, Homo sapien
cagcacatcttgtgctgctacatac

SEQ ID NO: 2361581 - DNA, 25 bp, Homo sapien
cacatcttgtgctgctacatacttg

SEQ ID NO: 2361582 - DNA, 25 bp, Homo sapien
tgcagcacatcttgtgctgctacat

SEQ ID NO: 2361583 - DNA, 25 bp, Homo sapien
agggaataatcttttatgtttcatt

SEQ ID NO: 2361584 - DNA, 25 bp, Homo sapien
ataatcttttatgtttcatttacct

SEQ ID NO: 2361585 - DNA, 25 bp, Homo sapien
gaataatcttttatgtttcatttac

SEQ ID NO: 2361586 - DNA, 25 bp, Homo sapien
gaagggaataatcttttatgtttca

SEQ ID NO: 2361587 - DNA, 25 bp, Homo sapien
gagagcccaaataatgcctgctgga

SEQ ID NO: 2361588 - DNA, 25 bp, Homo sapien
tccagtaaacatccagccattcaga

SEQ ID NO: 2361589 - DNA, 25 bp, Homo sapien
ctttgtaggtttagacatggctccc

SEQ ID NO: 2361590 - DNA, 25 bp, Homo sapien
tgtctcctgatgagtacatgtggac

SEQ ID NO: 2361591 - DNA, 25 bp, Homo sapien
gcctctgcccaagaaattagctttg

SEQ ID NO: 2361592 - DNA, 25 bp, Homo sapien
tttgatggaagcctgagcaagtcac

SEQ ID NO: 2361593 - DNA, 25 bp, Homo sapien
ctggcctctgcccaagaaattagct

SEQ ID NO: 2361594 - DNA, 25 bp, Homo sapien
agctttgatggaagcctgagcaagt

SEQ ID NO: 2361595 - DNA, 25 bp, Homo sapien
gccacttggaagtttagggtagatc

SEQ ID NO: 2361596 - DNA, 25 bp, Homo sapien
taagtttaaagcaggacctgcctta

SEQ ID NO: 2361597 - DNA, 25 bp, Homo sapien
cacttggaagtttagggtagatctt

SEQ ID NO: 2361598 - DNA, 25 bp, Homo sapien
ttaaagcaggacctgccttaactgc

SEQ ID NO: 2361599 - DNA, 25 bp, Homo sapien
cacagttttctgtccgcagtgccag

SEQ ID NO: 2361600 - DNA, 25 bp, Homo sapien
taagtcagattgtgcctgtctccac

SEQ ID NO: 2361601 - DNA, 25 bp, Homo sapien
tatggatggcttcagtagcctccca

SEQ ID NO: 2361602 - DNA, 25 bp, Homo sapien
gcagtgccagagcaatccatttcaa

SEQ ID NO: 2361603 - DNA, 25 bp, Homo sapien
ttgtggctcaaacaacgggagagac

SEQ ID NO: 2361604 - DNA, 25 bp, Homo sapien
gaaggcagtcatgagcaagcctgga

SEQ ID NO: 2361605 - DNA, 25 bp, Homo sapien
taacatcctgtctaggcagctcagg

SEQ ID NO: 2361606 - DNA, 25 bp, Homo sapien
tgagatgctaaacagccaaggagcc

SEQ ID NO: 2361607 - DNA, 25 bp, Homo sapien
tgcaggtcagaagaactacaggtgt

SEQ ID NO: 2361608 - DNA, 25 bp, Homo sapien
tgtgttccatgtagccaagccaagg

SEQ ID NO: 2361609 - DNA, 25 bp, Homo sapien
tgacaagtctttcacccagaaggct

SEQ ID NO: 2361610 - DNA, 25 bp, Homo sapien
caagacgtcgttcctcaggtggtga

SEQ ID NO: 2361611 - DNA, 25 bp, Homo sapien
ggacatagcggcagccatgggccaa

SEQ ID NO: 2361612 - DNA, 25 bp, Homo sapien
aattcttacacagagttcaaagccc

SEQ ID NO: 2361613 - DNA, 25 bp, Homo sapien
taaaaggtgttcctgaacacccaga

SEQ ID NO: 2361614 - DNA, 25 bp, Homo sapien
acccagatgtgcatctctgtaactg

SEQ ID NO: 2361615 - DNA, 25 bp, Homo sapien
tactatggtggtgctgttgcattcc

SEQ ID NO: 2361616 - DNA, 25 bp, Homo sapien
tgaagagttcaagctgtgatcatac

SEQ ID NO: 2361617 - DNA, 25 bp, Homo sapien
gacatacttaaagcccaaggcagcc

SEQ ID NO: 2361618 - DNA, 25 bp, Homo sapien
gaatccaaattacaccaacacctgg

SEQ ID NO: 2361619 - DNA, 25 bp, Homo sapien
gatcctctgcccttaatggacattc

SEQ ID NO: 2361620 - DNA, 25 bp, Homo sapien
tgctaggcccaagtgggaaaatcat

SEQ ID NO: 2361621 - DNA, 25 bp, Homo sapien
tctattgggaatgatgcttgcgaaa

SEQ ID NO: 2361622 - DNA, 25 bp, Homo sapien
tactgtgtgataggtgatgaagaca

SEQ ID NO: 2361623 - DNA, 25 bp, Homo sapien
ttcttaagagggcaaatggaacctc

SEQ ID NO: 2361624 - DNA, 25 bp, Homo sapien
tatcaagatatagcagaagaggagc

SEQ ID NO: 2361625 - DNA, 25 bp, Homo sapien
gagcttccaaatagactcaacggga

SEQ ID NO: 2361626 - DNA, 25 bp, Homo sapien
tgtgtggacctgagagagatctgtc

SEQ ID NO: 2361627 - DNA, 25 bp, Homo sapien
ctcatgagcctaggaggtagaggca

SEQ ID NO: 2361628 - DNA, 25 bp, Homo sapien
cagcttgcagctactgagcaagacc

SEQ ID NO: 2361629 - DNA, 25 bp, Homo sapien
gcactccagcttgcagctactgagc

SEQ ID NO: 2361630 - DNA, 25 bp, Homo sapien
agatctcatgagcctaggaggtaga

SEQ ID NO: 2361631 - DNA, 25 bp, Homo sapien
tgtgggatactcattacctttggtt

SEQ ID NO: 2361632 - DNA, 25 bp, Homo sapien
tttgagaaggcctaggagtcaacct

SEQ ID NO: 2361633 - DNA, 25 bp, Homo sapien
ggctgctgaggtcatcacgttttag

SEQ ID NO: 2361634 - DNA, 25 bp, Homo sapien
tgagcctctcgcattaaactctggt

SEQ ID NO: 2361635 - DNA, 25 bp, Homo sapien
gccttcttccgggattgcttcttag

SEQ ID NO: 2361636 - DNA, 25 bp, Homo sapien
ggttgcataggtcagttagaaacac

SEQ ID NO: 2361637 - DNA, 25 bp, Homo sapien
gtttattatattttatgcgaagaaa

SEQ ID NO: 2361638 - DNA, 25 bp, Homo sapien
gagcttagtatcttgattcttgcct

SEQ ID NO: 2361639 - DNA, 25 bp, Homo sapien
caagagatgagtcgttcgccaagag

SEQ ID NO: 2361640 - DNA, 25 bp, Homo sapien
ggaaagcacacaaatcactcaagag

SEQ ID NO: 2361641 - DNA, 25 bp, Homo sapien
cagaagttaggttcctggacaggct

SEQ ID NO: 2361642 - DNA, 25 bp, Homo sapien
tggtaggcaaagacgtaggatctcc

SEQ ID NO: 2361643 - DNA, 25 bp, Homo sapien
tctccactttgctgaggcgcttgtc

SEQ ID NO: 2361644 - DNA, 25 bp, Homo sapien
cagcggcacgggcaagtactgccat

SEQ ID NO: 2361645 - DNA, 25 bp, Homo sapien
cttggactccccgtcgctgttgcat

SEQ ID NO: 2361646 - DNA, 25 bp, Homo sapien
cgcagcgagtatggcaaggccagcc

SEQ ID NO: 2361647 - DNA, 25 bp, Homo sapien
gaatgcaaaccaccttcgaagagga

SEQ ID NO: 2361648 - DNA, 25 bp, Homo sapien
caggcacgtaaccaataagggcagg

SEQ ID NO: 2361649 - DNA, 25 bp, Homo sapien
taagcacctataagttgcaggcacg

SEQ ID NO: 2361650 - DNA, 25 bp, Homo sapien
tgtgtaccaagccacggattccctg

SEQ ID NO: 2361651 - DNA, 25 bp, Homo sapien
atttcaaccacagttgtctttaact

SEQ ID NO: 2361652 - DNA, 25 bp, Homo sapien
caaccacagttgtctttaacttctc

SEQ ID NO: 2361653 - DNA, 25 bp, Homo sapien
cacagttgtctttaacttctccctc

SEQ ID NO: 2361654 - DNA, 25 bp, Homo sapien
ccacagttgtctttaacttctccct

SEQ ID NO: 2361655 - DNA, 25 bp, Homo sapien
tcactgtgaagtatccagaaaaggc

SEQ ID NO: 2361656 - DNA, 25 bp, Homo sapien
cagaaaaggcagtcttcaagttgac

SEQ ID NO: 2361657 - DNA, 25 bp, Homo sapien
tcttcaatccactgtgctatttctg

SEQ ID NO: 2361658 - DNA, 25 bp, Homo sapien
tcaagttgacttccacttctcattt

SEQ ID NO: 2361659 - DNA, 25 bp, Homo sapien
aaacattccatgaaaaccgactgcc

SEQ ID NO: 2361660 - DNA, 25 bp, Homo sapien
caacatggacttgcaaaacattcca

SEQ ID NO: 2361661 - DNA, 25 bp, Homo sapien
catatttctcagtagcaactttttc

SEQ ID NO: 2361662 - DNA, 25 bp, Homo sapien
tattttccagtcaacatggacttgc

SEQ ID NO: 2361663 - DNA, 25 bp, Homo sapien
tgcaccaactgtcactctatgttct

SEQ ID NO: 2361664 - DNA, 25 bp, Homo sapien
caaatgcaccaactgtcactctatg

SEQ ID NO: 2361665 - DNA, 25 bp, Homo sapien
ttttgtaggattcctcaacagcaca

SEQ ID NO: 2361666 - DNA, 25 bp, Homo sapien
tccttttgtaggattcctcaacagc

SEQ ID NO: 2361667 - DNA, 25 bp, Homo sapien
ttgtcaacttgagtcttgattttca

SEQ ID NO: 2361668 - DNA, 25 bp, Homo sapien
tcttgattttcatatgagacatcat

SEQ ID NO: 2361669 - DNA, 25 bp, Homo sapien
gagtcttgattttcatatgagacat

SEQ ID NO: 2361670 - DNA, 25 bp, Homo sapien
tgtcaacttgagtcttgattttcat

SEQ ID NO: 2361671 - DNA, 25 bp, Homo sapien
ctttgattttggcaatgagtatgca

SEQ ID NO: 2361672 - DNA, 25 bp, Homo sapien
tttgattttggcaatgagtatgcat

SEQ ID NO: 2361673 - DNA, 25 bp, Homo sapien
ccctgtccttccgtgcaggccccgc

SEQ ID NO: 2361674 - DNA, 25 bp, Homo sapien
caacaggaacaggagatgggagctc

SEQ ID NO: 2361675 - DNA, 25 bp, Homo sapien
gggaggcgcccctgtccttccgtgc

SEQ ID NO: 2361676 - DNA, 25 bp, Homo sapien
acaacaggaacaggagatgggagct

SEQ ID NO: 2361677 - DNA, 25 bp, Homo sapien
tactcggattcctggtagcaccgcc

SEQ ID NO: 2361678 - DNA, 25 bp, Homo sapien
tggactccggattccgcgaaaaggc

SEQ ID NO: 2361679 - DNA, 25 bp, Homo sapien
gagattgagagctcggcaggatcca

SEQ ID NO: 2361680 - DNA, 25 bp, Homo sapien
gaagctgccgcgatgaagaagctgt

SEQ ID NO: 2361681 - DNA, 25 bp, Homo sapien
tggattggccgccaccacgttgtcc

SEQ ID NO: 2361682 - DNA, 25 bp, Homo sapien
tgcgttgtctctgccgcggtctggc

SEQ ID NO: 2361683 - DNA, 25 bp, Homo sapien
gtctggcggaccacctggattggcc

SEQ ID NO: 2361684 - DNA, 25 bp, Homo sapien
gcgtctctgatgctgggagcctggc

SEQ ID NO: 2361685 - DNA, 25 bp, Homo sapien
tggccccgtccctcccgcggtcagc

SEQ ID NO: 2361686 - DNA, 25 bp, Homo sapien
ggtggagccggcgggatgcggctgg

SEQ ID NO: 2361687 - DNA, 25 bp, Homo sapien
tgcggctggcgggccgcatatggag

SEQ ID NO: 2361688 - DNA, 25 bp, Homo sapien
atgcggctggcgggccgcatatgga

SEQ ID NO: 2361689 - DNA, 25 bp, Homo sapien
tggagccggcgggatgcggctggcg

SEQ ID NO: 2361690 - DNA, 25 bp, Homo sapien
ggaccgtgcacactgttcagtcagg

SEQ ID NO: 2361691 - DNA, 25 bp, Homo sapien
actgggtttggcgtctctgctgttc

SEQ ID NO: 2361692 - DNA, 25 bp, Homo sapien
ggacagccccgaagacgagaatggt

SEQ ID NO: 2361693 - DNA, 25 bp, Homo sapien
gagatctgcacactccaggagccat

SEQ ID NO: 2361694 - DNA, 25 bp, Homo sapien
ctcttccgctgaaatctttgtacgc

SEQ ID NO: 2361695 - DNA, 25 bp, Homo sapien
tcttccgctgaaatctttgtacgcc

SEQ ID NO: 2361696 - DNA, 25 bp, Homo sapien
cttccgctgaaatctttgtacgcca

SEQ ID NO: 2361697 - DNA, 25 bp, Homo sapien
ttccgctgaaatctttgtacgccat

SEQ ID NO: 2361698 - DNA, 25 bp, Homo sapien
tccccagctgccgattgagcctgat

SEQ ID NO: 2361699 - DNA, 25 bp, Homo sapien
gcagaagggacacaagacaccttcc

SEQ ID NO: 2361700 - DNA, 25 bp, Homo sapien
tccttaatgtgcgaaaccagcctcc

SEQ ID NO: 2361701 - DNA, 25 bp, Homo sapien
cacattcacactccaaggacattgg

SEQ ID NO: 2361702 - DNA, 25 bp, Homo sapien
tcagcactgtttggccgattctgat

SEQ ID NO: 2361703 - DNA, 25 bp, Homo sapien
ttgtgagccatgtcaacatccaagg

SEQ ID NO: 2361704 - DNA, 25 bp, Homo sapien
tgcgaagttgaatctctcagcactg

SEQ ID NO: 2361705 - DNA, 25 bp, Homo sapien
atcctcccacatcggacgctcctga

SEQ ID NO: 2361706 - DNA, 25 bp, Homo sapien
tagtggcggccagaggtgaaaccag

SEQ ID NO: 2361707 - DNA, 25 bp, Homo sapien
agtggcggccagaggtgaaaccagg

SEQ ID NO: 2361708 - DNA, 25 bp, Homo sapien
caaggtggtaaaaggagatgtctcc

SEQ ID NO: 2361709 - DNA, 25 bp, Homo sapien
acaatccagaatccatcctctgtgg

SEQ ID NO: 2361710 - DNA, 25 bp, Homo sapien
tggctcttcaggaaaaactttcgtg

SEQ ID NO: 2361711 - DNA, 25 bp, Homo sapien
tatagatgtgggatccatctccaag

SEQ ID NO: 2361712 - DNA, 25 bp, Homo sapien
aatagcaactggaagtgaactgagg

SEQ ID NO: 2361713 - DNA, 25 bp, Homo sapien
atagcaactggaagtgaactgaggg

SEQ ID NO: 2361714 - DNA, 25 bp, Homo sapien
taatagcaactggaagtgaactgag

SEQ ID NO: 2361715 - DNA, 25 bp, Homo sapien
cactctgcaggtcatcagaaatgac

SEQ ID NO: 2361716 - DNA, 25 bp, Homo sapien
ttccaaaactcgctctgatgtacca

SEQ ID NO: 2361717 - DNA, 25 bp, Homo sapien
caccactagaccaagtatattccaa

SEQ ID NO: 2361718 - DNA, 25 bp, Homo sapien
tttcaccactagaccaagtatattc

SEQ ID NO: 2361719 - DNA, 25 bp, Homo sapien
ttcaccactagaccaagtatattcc

SEQ ID NO: 2361720 - DNA, 25 bp, Homo sapien
tatgcctgaggttgcggaaaaggaa

SEQ ID NO: 2361721 - DNA, 25 bp, Homo sapien
cagaccctagactggagattgggac

SEQ ID NO: 2361722 - DNA, 25 bp, Homo sapien
cagatcatttggaccttacaactcc

SEQ ID NO: 2361723 - DNA, 25 bp, Homo sapien
gaaacaagatgagattatgcctgag

SEQ ID NO: 2361724 - DNA, 25 bp, Homo sapien
tgcccggccgcgaagacgccttcca

SEQ ID NO: 2361725 - DNA, 25 bp, Homo sapien
cgtcgctgcccggccgcgaagacgc

SEQ ID NO: 2361726 - DNA, 25 bp, Homo sapien
tcgctgcccggccgcgaagacgcct

SEQ ID NO: 2361727 - DNA, 25 bp, Homo sapien
cggccgcgaagacgccttccaccgc

SEQ ID NO: 2361728 - DNA, 25 bp, Homo sapien
gctcttcttccggcggcaggtgtac

SEQ ID NO: 2361729 - DNA, 25 bp, Homo sapien
gaggggagcctctgacgctgtacct

SEQ ID NO: 2361730 - DNA, 25 bp, Homo sapien
agtactggccccttcgatgcaagtt

SEQ ID NO: 2361731 - DNA, 25 bp, Homo sapien
gggttccgactcacggctgaagacc

SEQ ID NO: 2361732 - DNA, 25 bp, Homo sapien
aagaatggctccctcgcatccacag

SEQ ID NO: 2361733 - DNA, 25 bp, Homo sapien
gaggaaatggatacctgagcaggac

SEQ ID NO: 2361734 - DNA, 25 bp, Homo sapien
tcctaagatactgcagaccctgtgt

SEQ ID NO: 2361735 - DNA, 25 bp, Homo sapien
ggagacaacatcctaagatactgca

SEQ ID NO: 2361736 - DNA, 25 bp, Homo sapien
tgagggccctcaaatggaccctgag

SEQ ID NO: 2361737 - DNA, 25 bp, Homo sapien
tatttccaacggttaatgtctccat

SEQ ID NO: 2361738 - DNA, 25 bp, Homo sapien
acagtgttatttccaacggttaatg

SEQ ID NO: 2361739 - DNA, 25 bp, Homo sapien
aggtttcacagcctctcctgcaact

SEQ ID NO: 2361740 - DNA, 25 bp, Homo sapien
tctgaggacagtgttatttccaacg

SEQ ID NO: 2361741 - DNA, 25 bp, Homo sapien
ttcccccaactctacagttgctgca

SEQ ID NO: 2361742 - DNA, 25 bp, Homo sapien
ctgcacttgtacagcagcatcaggg

SEQ ID NO: 2361743 - DNA, 25 bp, Homo sapien
tttggatcacatccaaagtggaact

SEQ ID NO: 2361744 - DNA, 25 bp, Homo sapien
ggatcacatccaaagtggaactttc

SEQ ID NO: 2361745 - DNA, 25 bp, Homo sapien
tggtcactggcatcaacttggtctg

SEQ ID NO: 2361746 - DNA, 25 bp, Homo sapien
gagcagacagcatgaacaagtgaaa

SEQ ID NO: 2361747 - DNA, 25 bp, Homo sapien
aagctttaaaagtctggtcactggc

SEQ ID NO: 2361748 - DNA, 25 bp, Homo sapien
gtctgttgagaatttagcactgcac

SEQ ID NO: 2361749 - DNA, 25 bp, Homo sapien
gcccattttccactggttgtcttca

SEQ ID NO: 2361750 - DNA, 25 bp, Homo sapien
catcagccttctgcccattttccac

SEQ ID NO: 2361751 - DNA, 25 bp, Homo sapien
ccattttccactggttgtcttcacc

SEQ ID NO: 2361752 - DNA, 25 bp, Homo sapien
attttccactggttgtcttcaccca

SEQ ID NO: 2361753 - DNA, 25 bp, Homo sapien
gcagacaagagtgccaatttcgggc

SEQ ID NO: 2361754 - DNA, 25 bp, Homo sapien
caagagtgccaatttcgggcctgca

SEQ ID NO: 2361755 - DNA, 25 bp, Homo sapien
gagtgccaatttcgggcctgcattt

SEQ ID NO: 2361756 - DNA, 25 bp, Homo sapien
gacaagagtgccaatttcgggcctg

SEQ ID NO: 2361757 - DNA, 25 bp, Homo sapien
ctttggttgcaaaaacttcaggctc

SEQ ID NO: 2361758 - DNA, 25 bp, Homo sapien
actttggggccctcgacatattcca

SEQ ID NO: 2361759 - DNA, 25 bp, Homo sapien
tgggctcctcgcatagcctatccat

SEQ ID NO: 2361760 - DNA, 25 bp, Homo sapien
gcatagcctatccattgtccacatt

SEQ ID NO: 2361761 - DNA, 25 bp, Homo sapien
tctttctgatactgtccccttgaga

SEQ ID NO: 2361762 - DNA, 25 bp, Homo sapien
ttattaatagtggagaccagccctg

SEQ ID NO: 2361763 - DNA, 25 bp, Homo sapien
gaaggtttattaatagtggagacca

SEQ ID NO: 2361764 - DNA, 25 bp, Homo sapien
gctggaagatagatgggagtctttc

SEQ ID NO: 2361765 - DNA, 25 bp, Homo sapien
ggcacttagaagtcagctctcctac

SEQ ID NO: 2361766 - DNA, 25 bp, Homo sapien
ctttatcagggatgtcaagatcatt

SEQ ID NO: 2361767 - DNA, 25 bp, Homo sapien
gcacttagaagtcagctctcctact

SEQ ID NO: 2361768 - DNA, 25 bp, Homo sapien
gggatgtcaagatcattggcattta

SEQ ID NO: 2361769 - DNA, 25 bp, Homo sapien
cagcaaccaccaggcattatttctt

SEQ ID NO: 2361770 - DNA, 25 bp, Homo sapien
tccactgaaacattccgatatcccg

SEQ ID NO: 2361771 - DNA, 25 bp, Homo sapien
ggcatggcaccacccctaaatggct

SEQ ID NO: 2361772 - DNA, 25 bp, Homo sapien
aatatcagtgtaccccaaaatcgcc

SEQ ID NO: 2361773 - DNA, 25 bp, Homo sapien
ggttgactgtgcttttgatattcat

SEQ ID NO: 2361774 - DNA, 25 bp, Homo sapien
ctgactggttgactgtgcttttgat

SEQ ID NO: 2361775 - DNA, 25 bp, Homo sapien
gactggttgactgtgcttttgatat

SEQ ID NO: 2361776 - DNA, 25 bp, Homo sapien
ctggttgactgtgcttttgatattc

SEQ ID NO: 2361777 - DNA, 25 bp, Homo sapien
gatagattttcctagtgcgctttca

SEQ ID NO: 2361778 - DNA, 25 bp, Homo sapien
tgcgctttcaatgggttttaatcgg

SEQ ID NO: 2361779 - DNA, 25 bp, Homo sapien
cctagtgcgctttcaatgggtttta

SEQ ID NO: 2361780 - DNA, 25 bp, Homo sapien
cacttcttgatgatagattttccta

SEQ ID NO: 2361781 - DNA, 25 bp, Homo sapien
cattgtggctgaccttagattttag

SEQ ID NO: 2361782 - DNA, 25 bp, Homo sapien
aggaagttatcccactctcttaggc

SEQ ID NO: 2361783 - DNA, 25 bp, Homo sapien
tcccagggcttcatatggtgggtcc

SEQ ID NO: 2361784 - DNA, 25 bp, Homo sapien
tatagaactgcttgagaatggtccc

SEQ ID NO: 2361785 - DNA, 25 bp, Homo sapien
ctggacgccagatcccgacggcgtg

SEQ ID NO: 2361786 - DNA, 25 bp, Homo sapien
tcaaagtcagagtagattaaaagca

SEQ ID NO: 2361787 - DNA, 25 bp, Homo sapien
gacggcgtggtcatcagcaatcaga

SEQ ID NO: 2361788 - DNA, 25 bp, Homo sapien
aacacagcaagttctacagccagag

SEQ ID NO: 2361789 - DNA, 25 bp, Homo sapien
cagtgaggaggaataggcaaagagg

SEQ ID NO: 2361790 - DNA, 25 bp, Homo sapien
tccagtgaggaggaataggcaaaga

SEQ ID NO: 2361791 - DNA, 25 bp, Homo sapien
agtgaggaggaataggcaaagaggc

SEQ ID NO: 2361792 - DNA, 25 bp, Homo sapien
tggatcccggggcagaatgtccaag

SEQ ID NO: 2361793 - DNA, 25 bp, Homo sapien
acttcttgaacagttcgtggatccc

SEQ ID NO: 2361794 - DNA, 25 bp, Homo sapien
ggcaccattgctgtgcttggctaac

SEQ ID NO: 2361795 - DNA, 25 bp, Homo sapien
tcttgaacagttcgtggatcccggg

SEQ ID NO: 2361796 - DNA, 25 bp, Homo sapien
tttcccagccatttgtaagccaatg

SEQ ID NO: 2361797 - DNA, 25 bp, Homo sapien
agccatttgtaagccaatgtctcca

SEQ ID NO: 2361798 - DNA, 25 bp, Homo sapien
tctgctataagcacccttgtcactc

SEQ ID NO: 2361799 - DNA, 25 bp, Homo sapien
aaggcagacctctgctataagcacc

SEQ ID NO: 2361800 - DNA, 25 bp, Homo sapien
ggtgccaatttcctccagcataaga

SEQ ID NO: 2361801 - DNA, 25 bp, Homo sapien
cagcataagacctgatactcgaagg

SEQ ID NO: 2361802 - DNA, 25 bp, Homo sapien
taagacctgatactcgaaggttttc

SEQ ID NO: 2361803 - DNA, 25 bp, Homo sapien
gacctgatactcgaaggttttctgc

SEQ ID NO: 2361804 - DNA, 25 bp, Homo sapien
ccctggctcattggactagagagca

SEQ ID NO: 2361805 - DNA, 25 bp, Homo sapien
tctcaccctggctcattggactaga

SEQ ID NO: 2361806 - DNA, 25 bp, Homo sapien
tctaagtctctcaccctggctcatt

SEQ ID NO: 2361807 - DNA, 25 bp, Homo sapien
ggctcattggactagagagcatcat

SEQ ID NO: 2361808 - DNA, 25 bp, Homo sapien
tgagtatttattcagggccccggga

SEQ ID NO: 2361809 - DNA, 25 bp, Homo sapien
taaagagaaacgaatgctgatgtac

SEQ ID NO: 2361810 - DNA, 25 bp, Homo sapien
gatgtactggatacttctgactcag

SEQ ID NO: 2361811 - DNA, 25 bp, Homo sapien
aaaatctgctttcattgcgggcaag

SEQ ID NO: 2361812 - DNA, 25 bp, Homo sapien
tgctggagacagtgttcgcaccctg

SEQ ID NO: 2361813 - DNA, 25 bp, Homo sapien
ccaaaaaagggctggagccttgttg

SEQ ID NO: 2361814 - DNA, 25 bp, Homo sapien
gcctctctgaccgtagctgctggag

SEQ ID NO: 2361815 - DNA, 25 bp, Homo sapien
tcaaactggttccacaagaggtcaa

SEQ ID NO: 2361816 - DNA, 25 bp, Homo sapien
tcctctgtgtctgttggttgccacg

SEQ ID NO: 2361817 - DNA, 25 bp, Homo sapien
tctgtgtctgttggttgccacgtac

SEQ ID NO: 2361818 - DNA, 25 bp, Homo sapien
accagttcctctgtgtctgttggtt

SEQ ID NO: 2361819 - DNA, 25 bp, Homo sapien
tgtctgttggttgccacgtacttcc

SEQ ID NO: 2361820 - DNA, 25 bp, Homo sapien
actgccatagtgacaccacatattg

SEQ ID NO: 2361821 - DNA, 25 bp, Homo sapien
ccacatattgcagcaaaaatatctg

SEQ ID NO: 2361822 - DNA, 25 bp, Homo sapien
cttctgcaagaagagccgtgggagc

SEQ ID NO: 2361823 - DNA, 25 bp, Homo sapien
ctccctcgggtgtggcttctgcaag

SEQ ID NO: 2361824 - DNA, 25 bp, Homo sapien
cttgttccaggggatcaatgacagt

SEQ ID NO: 2361825 - DNA, 25 bp, Homo sapien
tgttccaggggatcaatgacagtca

SEQ ID NO: 2361826 - DNA, 25 bp, Homo sapien
ccaggggatcaatgacagtcagatg

SEQ ID NO: 2361827 - DNA, 25 bp, Homo sapien
ttccaggggatcaatgacagtcaga

SEQ ID NO: 2361828 - DNA, 25 bp, Homo sapien
ggcatagccggtgccaggccggctg

SEQ ID NO: 2361829 - DNA, 25 bp, Homo sapien
cccggggagccgggcatagccggtg

SEQ ID NO: 2361830 - DNA, 25 bp, Homo sapien
ccggggagccgggcatagccggtgc

SEQ ID NO: 2361831 - DNA, 25 bp, Homo sapien
tagccggtgccaggccggctgagca

SEQ ID NO: 2361832 - DNA, 25 bp, Homo sapien
gatagtgtgcgccttgaattgcagc

SEQ ID NO: 2361833 - DNA, 25 bp, Homo sapien
ggctcaaggggcatcctctgcgcct

SEQ ID NO: 2361834 - DNA, 25 bp, Homo sapien
ccagcgggaaagtgggatagtgtgc

SEQ ID NO: 2361835 - DNA, 25 bp, Homo sapien
ccttgaattgcagcagcggcgacag

SEQ ID NO: 2361836 - DNA, 25 bp, Homo sapien
gatttcctttctcgccaccaaggct

SEQ ID NO: 2361837 - DNA, 25 bp, Homo sapien
ctctctgcgactcccgcgtcccgct

SEQ ID NO: 2361838 - DNA, 25 bp, Homo sapien
gaagggtctccgccacttgcaaact

SEQ ID NO: 2361839 - DNA, 25 bp, Homo sapien
gccagctgagctcagcaggcgcccg

SEQ ID NO: 2361840 - DNA, 25 bp, Homo sapien
ctcctgatgtcctggtgatacagca

SEQ ID NO: 2361841 - DNA, 25 bp, Homo sapien
ctgggtgcatgcagcactcccagac

SEQ ID NO: 2361842 - DNA, 25 bp, Homo sapien
cagcagctgggtgcatgcagcactc

SEQ ID NO: 2361843 - DNA, 25 bp, Homo sapien
gatgtcctggtgatacagcagctgg

SEQ ID NO: 2361844 - DNA, 25 bp, Homo sapien
actcggaaggtgcacggcacaagca

SEQ ID NO: 2361845 - DNA, 25 bp, Homo sapien
gctcagagctggcaccaactgctga

SEQ ID NO: 2361846 - DNA, 25 bp, Homo sapien
aactgctgaatcaacactcggaagg

SEQ ID NO: 2361847 - DNA, 25 bp, Homo sapien
tgcacggcacaagcacagttcagtc

SEQ ID NO: 2361848 - DNA, 25 bp, Homo sapien
gagtttgttcagcagccgtcctaag

SEQ ID NO: 2361849 - DNA, 25 bp, Homo sapien
catctgcgagtttgttcagcagccg

SEQ ID NO: 2361850 - DNA, 25 bp, Homo sapien
gtgcttttaacatctgcgagtttgt

SEQ ID NO: 2361851 - DNA, 25 bp, Homo sapien
gccgtcctaagtagaagcttctggc

SEQ ID NO: 2361852 - DNA, 25 bp, Homo sapien
atcacagcagcccaaggcttcagga

SEQ ID NO: 2361853 - DNA, 25 bp, Homo sapien
cagtgatcacagcagcccaaggctt

SEQ ID NO: 2361854 - DNA, 25 bp, Homo sapien
tgatcacagcagcccaaggcttcag

SEQ ID NO: 2361855 - DNA, 25 bp, Homo sapien
agtgatcacagcagcccaaggcttc

SEQ ID NO: 2361856 - DNA, 25 bp, Homo sapien
gccaccaagaggggaagttcgtcat

SEQ ID NO: 2361857 - DNA, 25 bp, Homo sapien
tgccaccaagaggggaagttcgtca

SEQ ID NO: 2361858 - DNA, 25 bp, Homo sapien
ctgccaccaagaggggaagttcgtc

SEQ ID NO: 2361859 - DNA, 25 bp, Homo sapien
ctgggatggccccggttaattcctg

SEQ ID NO: 2361860 - DNA, 25 bp, Homo sapien
ccttgcgaattttgatgtctgggag

SEQ ID NO: 2361861 - DNA, 25 bp, Homo sapien
gtcttactcaagttgtagctgttgc

SEQ ID NO: 2361862 - DNA, 25 bp, Homo sapien
ggtttgggcagtggagaacacacaa

SEQ ID NO: 2361863 - DNA, 25 bp, Homo sapien
gagttgtgttttggtcttactcaag

SEQ ID NO: 2361864 - DNA, 25 bp, Homo sapien
ggtgcagagattcatgcatgctgaa

SEQ ID NO: 2361865 - DNA, 25 bp, Homo sapien
gaagacatcacttggacaccatcgt

SEQ ID NO: 2361866 - DNA, 25 bp, Homo sapien
caccatcgtaccacagagaaggtgc

SEQ ID NO: 2361867 - DNA, 25 bp, Homo sapien
tcatgcatgctgaacatgtgcacag

SEQ ID NO: 2361868 - DNA, 25 bp, Homo sapien
gcagagtgtttacccaagaggcaga

SEQ ID NO: 2361869 - DNA, 25 bp, Homo sapien
gctggttctgggcagagtgtttacc

SEQ ID NO: 2361870 - DNA, 25 bp, Homo sapien
agataatggacggttctgctggttc

SEQ ID NO: 2361871 - DNA, 25 bp, Homo sapien
taatggacggttctgctggttctgg

SEQ ID NO: 2361872 - DNA, 25 bp, Homo sapien
tttgatgaaagggacccaaggtgca

SEQ ID NO: 2361873 - DNA, 25 bp, Homo sapien
cagtctcccttgtacagtggtttga

SEQ ID NO: 2361874 - DNA, 25 bp, Homo sapien
caagagggacttctgaagggacttc

SEQ ID NO: 2361875 - DNA, 25 bp, Homo sapien
ccactgaggtacatgtcaacgaaat

SEQ ID NO: 2361876 - DNA, 25 bp, Homo sapien
gaggctctggtgttgagctgccaac

SEQ ID NO: 2361877 - DNA, 25 bp, Homo sapien
tgaggctctggtgttgagctgccaa

SEQ ID NO: 2361878 - DNA, 25 bp, Homo sapien
ccccatggaggggataaggctattt

SEQ ID NO: 2361879 - DNA, 25 bp, Homo sapien
tttgatacataggagggtcccaaga

SEQ ID NO: 2361880 - DNA, 25 bp, Homo sapien
ggaggcaggggctcgcccagaggaa

SEQ ID NO: 2361881 - DNA, 25 bp, Homo sapien
ccacagcatcctgccggtgctagga

SEQ ID NO: 2361882 - DNA, 25 bp, Homo sapien
gaaggtgagcttctttgggccaaca

SEQ ID NO: 2361883 - DNA, 25 bp, Homo sapien
gaaaggatggagcttaccagccctc

SEQ ID NO: 2361884 - DNA, 25 bp, Homo sapien
tttctgagggttaccagcagctgca

SEQ ID NO: 2361885 - DNA, 25 bp, Homo sapien
ggcctttctacctcatgggaacaga

SEQ ID NO: 2361886 - DNA, 25 bp, Homo sapien
atggaacacttgggggtcctcagtc

SEQ ID NO: 2361887 - DNA, 25 bp, Homo sapien
ctttccttagggatggaacacttgg

SEQ ID NO: 2361888 - DNA, 25 bp, Homo sapien
gatggaacacttgggggtcctcagt

SEQ ID NO: 2361889 - DNA, 25 bp, Homo sapien
agctttccttagggatggaacactt

SEQ ID NO: 2361890 - DNA, 25 bp, Homo sapien
tgggatcattccggactggctctct

SEQ ID NO: 2361891 - DNA, 25 bp, Homo sapien
agtgggatcattccggactggctct

SEQ ID NO: 2361892 - DNA, 25 bp, Homo sapien
gatcattccggactggctctctggg

SEQ ID NO: 2361893 - DNA, 25 bp, Homo sapien
attccggactggctctctggggctt

SEQ ID NO: 2361894 - DNA, 25 bp, Homo sapien
tcccagcagtcaggtagagtgccag

SEQ ID NO: 2361895 - DNA, 25 bp, Homo sapien
ccagatgcatgtcacccaagaagga

SEQ ID NO: 2361896 - DNA, 25 bp, Homo sapien
gtaaagaagcgcacaggtttccggc

SEQ ID NO: 2361897 - DNA, 25 bp, Homo sapien
gggtccgtacctgcgagcaatgctt

SEQ ID NO: 2361898 - DNA, 25 bp, Homo sapien
gacctgtgtaaactacggtaagtga

SEQ ID NO: 2361899 - DNA, 25 bp, Homo sapien
gagtcctgcatcactgcatcaagca

SEQ ID NO: 2361900 - DNA, 25 bp, Homo sapien
tggtatagaagaatgctcacaagct

SEQ ID NO: 2361901 - DNA, 25 bp, Homo sapien
caaaatgagtttagcgtcaggccgg

SEQ ID NO: 2361902 - DNA, 25 bp, Homo sapien
ctcccaccagaccaggcatcaggct

SEQ ID NO: 2361903 - DNA, 25 bp, Homo sapien
tgttcctgcaagaaacatgatctta

SEQ ID NO: 2361904 - DNA, 25 bp, Homo sapien
ttttaaatggtgctctgtccccttc

SEQ ID NO: 2361905 - DNA, 25 bp, Homo sapien
ggcttttaaatggtgctctgtcccc

SEQ ID NO: 2361906 - DNA, 25 bp, Homo sapien
tcaaggaaggacacatgacccattt

SEQ ID NO: 2361907 - DNA, 25 bp, Homo sapien
aaggacacatgacccatttgttgca

SEQ ID NO: 2361908 - DNA, 25 bp, Homo sapien
agcagccagtgtttgcttcaaggaa

SEQ ID NO: 2361909 - DNA, 25 bp, Homo sapien
ggacacatgacccatttgttgcatt

SEQ ID NO: 2361910 - DNA, 25 bp, Homo sapien
ccttggcaaggtcaatcatattgtc

SEQ ID NO: 2361911 - DNA, 25 bp, Homo sapien
cttggcaaggtcaatcatattgtcc

SEQ ID NO: 2361912 - DNA, 25 bp, Homo sapien
accttggcaaggtcaatcatattgt

SEQ ID NO: 2361913 - DNA, 25 bp, Homo sapien
tggcaaggtcaatcatattgtccat

SEQ ID NO: 2361914 - DNA, 25 bp, Homo sapien
tcgaagggcccgactctgggtgtca

SEQ ID NO: 2361915 - DNA, 25 bp, Homo sapien
tcctggcaacggaagatggtcatct

SEQ ID NO: 2361916 - DNA, 25 bp, Homo sapien
atccaggtagcagccgatgtacttg

SEQ ID NO: 2361917 - DNA, 25 bp, Homo sapien
gtagtcaaaaaaggacactcctcga

SEQ ID NO: 2361918 - DNA, 25 bp, Homo sapien
tcgctcacgttcgtcgcctggatct

SEQ ID NO: 2361919 - DNA, 25 bp, Homo sapien
ttgtggccgcagtagcactcggcgc

SEQ ID NO: 2361920 - DNA, 25 bp, Homo sapien
tcgctcgcccttgcactccatgtcg

SEQ ID NO: 2361921 - DNA, 25 bp, Homo sapien
ttgcactccatgtcgcactctgcct

SEQ ID NO: 2361922 - DNA, 25 bp, Homo sapien
cctgggccagctgcagccggtagac

SEQ ID NO: 2361923 - DNA, 25 bp, Homo sapien
gactcctgggccagctgcagccggt

SEQ ID NO: 2361924 - DNA, 25 bp, Homo sapien
ctgcgggccgactcctgggccagct

SEQ ID NO: 2361925 - DNA, 25 bp, Homo sapien
tcctgggccagctgcagccggtaga

SEQ ID NO: 2361926 - DNA, 25 bp, Homo sapien
gcatgcaggaccattcaaaggagct

SEQ ID NO: 2361927 - DNA, 25 bp, Homo sapien
tggaaccagacgcagctcagtggga

SEQ ID NO: 2361928 - DNA, 25 bp, Homo sapien
catcatcattagagacagtctgctc

SEQ ID NO: 2361929 - DNA, 25 bp, Homo sapien
gaatgagggatacagctggaaccag

SEQ ID NO: 2361930 - DNA, 25 bp, Homo sapien
tcagcatggcagctgtcacgggtaa

SEQ ID NO: 2361931 - DNA, 25 bp, Homo sapien
gttgtcgggcctgcggaagcagccc

SEQ ID NO: 2361932 - DNA, 25 bp, Homo sapien
aagtccacgcatttgtccacagaca

SEQ ID NO: 2361933 - DNA, 25 bp, Homo sapien
gaagcagccccggaacactgcactt

SEQ ID NO: 2361934 - DNA, 25 bp, Homo sapien
tgtgtctggtacacaatgaagtaac

SEQ ID NO: 2361935 - DNA, 25 bp, Homo sapien
caggcggtgcctgcaagagctgcca

SEQ ID NO: 2361936 - DNA, 25 bp, Homo sapien
aactcctccgcgctgcacttctggg

SEQ ID NO: 2361937 - DNA, 25 bp, Homo sapien
cctctctgtcatggagcgggaatcg

SEQ ID NO: 2361938 - DNA, 25 bp, Homo sapien
gcaatgagctgcttggacttgcctg

SEQ ID NO: 2361939 - DNA, 25 bp, Homo sapien
gagctgcttggacttgcctggcagg

SEQ ID NO: 2361940 - DNA, 25 bp, Homo sapien
atgagctgcttggacttgcctggca

SEQ ID NO: 2361941 - DNA, 25 bp, Homo sapien
aatgagctgcttggacttgcctggc

SEQ ID NO: 2361942 - DNA, 25 bp, Homo sapien
aggtggcgagcccacgtgttgccag

SEQ ID NO: 2361943 - DNA, 25 bp, Homo sapien
agagggagccatcgaagtagtagct

SEQ ID NO: 2361944 - DNA, 25 bp, Homo sapien
gaagcctgtggccaattcaatgagg

SEQ ID NO: 2361945 - DNA, 25 bp, Homo sapien
cgaagtagtagctgccagtgtagaa

SEQ ID NO: 2361946 - DNA, 25 bp, Homo sapien
gggtaccaagcatgcagtgagtctc

SEQ ID NO: 2361947 - DNA, 25 bp, Homo sapien
tgagtctcaaaaagtgtgcctggga

SEQ ID NO: 2361948 - DNA, 25 bp, Homo sapien
gagtattcccataccctccaagtgg

SEQ ID NO: 2361949 - DNA, 25 bp, Homo sapien
tcaaggaggagtattcccataccct

SEQ ID NO: 2361950 - DNA, 25 bp, Homo sapien
ctggtggagtggacccttttccaga

SEQ ID NO: 2361951 - DNA, 25 bp, Homo sapien
actggtggagtggacccttttccag

SEQ ID NO: 2361952 - DNA, 25 bp, Homo sapien
cttcccgcagccagaggtgaggaac

SEQ ID NO: 2361953 - DNA, 25 bp, Homo sapien
cgcagccagaggtgaggaacaggac

SEQ ID NO: 2361954 - DNA, 25 bp, Homo sapien
gccagaggtgaggaacaggactggt

SEQ ID NO: 2361955 - DNA, 25 bp, Homo sapien
cagaggtgaggaacaggactggtga

SEQ ID NO: 2361956 - DNA, 25 bp, Homo sapien
ggccgctttcgtgcgtcttgatgca

SEQ ID NO: 2361957 - DNA, 25 bp, Homo sapien
cgatctctttctggccgctttcgtg

SEQ ID NO: 2361958 - DNA, 25 bp, Homo sapien
ggatggcggcgtcgaaggcctcgat

SEQ ID NO: 2361959 - DNA, 25 bp, Homo sapien
atggtccgtccgctgcgccagtggt

SEQ ID NO: 2361960 - DNA, 25 bp, Homo sapien
gcaaagcctatgtggccgccgtact

SEQ ID NO: 2361961 - DNA, 25 bp, Homo sapien
caaagcctatgtggccgccgtactt

SEQ ID NO: 2361962 - DNA, 25 bp, Homo sapien
cagcaaagcctatgtggccgccgta

SEQ ID NO: 2361963 - DNA, 25 bp, Homo sapien
aagcctatgtggccgccgtacttgc

SEQ ID NO: 2361964 - DNA, 25 bp, Homo sapien
tcgagcgaaataagatttgcaaaga

SEQ ID NO: 2361965 - DNA, 25 bp, Homo sapien
cagatgctgtgcaaatcgagcgaaa

SEQ ID NO: 2361966 - DNA, 25 bp, Homo sapien
ctcctacagatgctgtgcaaatcga

SEQ ID NO: 2361967 - DNA, 25 bp, Homo sapien
gatttgcaaagatcctggtacggct

SEQ ID NO: 2361968 - DNA, 25 bp, Homo sapien
cagcacaacacggtaacacaattaa

SEQ ID NO: 2361969 - DNA, 25 bp, Homo sapien
catgcttgcagtccttgttactcag

SEQ ID NO: 2361970 - DNA, 25 bp, Homo sapien
ttagagctctaaacacaccccgata

SEQ ID NO: 2361971 - DNA, 25 bp, Homo sapien
taactgtaataatacaggccaggtg

SEQ ID NO: 2361972 - DNA, 25 bp, Homo sapien
agtccagtgtgtgagtggcccacca

SEQ ID NO: 2361973 - DNA, 25 bp, Homo sapien
gggtcatactcgagcttccggagcc

SEQ ID NO: 2361974 - DNA, 25 bp, Homo sapien
gagccctgagcgcttgaagttgcca

SEQ ID NO: 2361975 - DNA, 25 bp, Homo sapien
gagggctgcatccaccatcttgatg

SEQ ID NO: 2361976 - DNA, 25 bp, Homo sapien
gaaggtggcctgagttaaacatcgg

SEQ ID NO: 2361977 - DNA, 25 bp, Homo sapien
gggcagcccaaatcctacagatgag

SEQ ID NO: 2361978 - DNA, 25 bp, Homo sapien
tggcatgtgaccatcctcgtgggct

SEQ ID NO: 2361979 - DNA, 25 bp, Homo sapien
gaacactcttgctgtctcacctgga

SEQ ID NO: 2361980 - DNA, 25 bp, Homo sapien
tttacacgggtgcaattccatacac

SEQ ID NO: 2361981 - DNA, 25 bp, Homo sapien
tacaaataagatggtcataccggca

SEQ ID NO: 2361982 - DNA, 25 bp, Homo sapien
gaggcacgtaattctccctgagcag

SEQ ID NO: 2361983 - DNA, 25 bp, Homo sapien
aaaacatagaaaggcaggagaacac

SEQ ID NO: 2361984 - DNA, 25 bp, Homo sapien
tctggaagcccaggtaattacggta

SEQ ID NO: 2361985 - DNA, 25 bp, Homo sapien
gagccatggatgcacggataatatc

SEQ ID NO: 2361986 - DNA, 25 bp, Homo sapien
gggccagtagttatcaagaggtcca

SEQ ID NO: 2361987 - DNA, 25 bp, Homo sapien
gcctgtacttgggaagctttgggaa

SEQ ID NO: 2361988 - DNA, 25 bp, Homo sapien
cctctggctttcatgatttctgttg

SEQ ID NO: 2361989 - DNA, 25 bp, Homo sapien
catggccttgtgttactgtctactg

SEQ ID NO: 2361990 - DNA, 25 bp, Homo sapien
gatctactagcaaggaactccctca

SEQ ID NO: 2361991 - DNA, 25 bp, Homo sapien
ttcagcctgaatgtatccctttagc

SEQ ID NO: 2361992 - DNA, 25 bp, Homo sapien
tgcagatgctgtgcgaagcactcag

SEQ ID NO: 2361993 - DNA, 25 bp, Homo sapien
tgagtcccagatcctcctcgacctc

SEQ ID NO: 2361994 - DNA, 25 bp, Homo sapien
tcctcgacctcctctcgggactcac

SEQ ID NO: 2361995 - DNA, 25 bp, Homo sapien
ctgcagatgctgtgcgaagcactca

SEQ ID NO: 2361996 - DNA, 25 bp, Homo sapien
ccagccagagagcccgacatgatgt

SEQ ID NO: 2361997 - DNA, 25 bp, Homo sapien
cagccagagagcccgacatgatgtc

SEQ ID NO: 2361998 - DNA, 25 bp, Homo sapien
caggggacacgaatccactcaattc

SEQ ID NO: 2361999 - DNA, 25 bp, Homo sapien
gggtgggggcgatgcaccaacaggg

SEQ ID NO: 2362000 - DNA, 25 bp, Homo sapien
accaacaggggacacgaatccactc

SEQ ID NO: 2362001 - DNA, 25 bp, Homo sapien
caacaggggacacgaatccactcaa

SEQ ID NO: 2362002 - DNA, 25 bp, Homo sapien
cctggagaatgggcttcccctgggt

SEQ ID NO: 2362003 - DNA, 25 bp, Homo sapien
tgggcctggagaatgggcttcccct

SEQ ID NO: 2362004 - DNA, 25 bp, Homo sapien
ggcctggagaatgggcttcccctgg

SEQ ID NO: 2362005 - DNA, 25 bp, Homo sapien
tggagaatgggcttcccctgggttc

SEQ ID NO: 2362006 - DNA, 25 bp, Homo sapien
ctttcaggaagaggttagtggtagc

SEQ ID NO: 2362007 - DNA, 25 bp, Homo sapien
ccagtttccctgatgggctcttacg

SEQ ID NO: 2362008 - DNA, 25 bp, Homo sapien
tttgcagagcgaggaatgtttccag

SEQ ID NO: 2362009 - DNA, 25 bp, Homo sapien
ggccctgataaagcccctgcatttg

SEQ ID NO: 2362010 - DNA, 25 bp, Homo sapien
ggctacaatgtgttcatagcttggg

SEQ ID NO: 2362011 - DNA, 25 bp, Homo sapien
tcctgagcaagctgtaagcatcccc

SEQ ID NO: 2362012 - DNA, 25 bp, Homo sapien
accagccaccctttggctacaatgt

SEQ ID NO: 2362013 - DNA, 25 bp, Homo sapien
ctgccttcttgaccacatcctgagc

SEQ ID NO: 2362014 - DNA, 25 bp, Homo sapien
tatgccgtctgtgcctaataagcag

SEQ ID NO: 2362015 - DNA, 25 bp, Homo sapien
catgttcatagagtgaccagcgggc

SEQ ID NO: 2362016 - DNA, 25 bp, Homo sapien
gaacagggtgggatctcatactcca

SEQ ID NO: 2362017 - DNA, 25 bp, Homo sapien
ggagtctctaagtaccccaagtcag

SEQ ID NO: 2362018 - DNA, 25 bp, Homo sapien
aggcaactgccattctcttttcccc

SEQ ID NO: 2362019 - DNA, 25 bp, Homo sapien
tactaagtaaatttccagactccag

SEQ ID NO: 2362020 - DNA, 25 bp, Homo sapien
gtaattcccatcaaatatactaagt

SEQ ID NO: 2362021 - DNA, 25 bp, Homo sapien
gactccaggcccctaaacatggatt

SEQ ID NO: 2362022 - DNA, 25 bp, Homo sapien
ccagggccagcgcccccacttctcc

SEQ ID NO: 2362023 - DNA, 25 bp, Homo sapien
cagggccagcgcccccacttctccc

SEQ ID NO: 2362024 - DNA, 25 bp, Homo sapien
gcccagggccagcgcccccacttct

SEQ ID NO: 2362025 - DNA, 25 bp, Homo sapien
aggcccagggccagcgcccccactt

SEQ ID NO: 2362026 - DNA, 25 bp, Homo sapien
gaatgtggaaatgtatggaccagga

SEQ ID NO: 2362027 - DNA, 25 bp, Homo sapien
catctttttggcgtgtgtgattcac

SEQ ID NO: 2362028 - DNA, 25 bp, Homo sapien
cgtcctgaaggaatgcatctgagca

SEQ ID NO: 2362029 - DNA, 25 bp, Homo sapien
gctgaatgctaggtaacttcttggg

SEQ ID NO: 2362030 - DNA, 25 bp, Homo sapien
cagaaagcagggaatgctggaagct

SEQ ID NO: 2362031 - DNA, 25 bp, Homo sapien
gctggaagcttccttgtgtgcacac

SEQ ID NO: 2362032 - DNA, 25 bp, Homo sapien
tgtgtgcacacacgtcccgcatagg

SEQ ID NO: 2362033 - DNA, 25 bp, Homo sapien
tcccgcatagggctcagttttgatg

SEQ ID NO: 2362034 - DNA, 25 bp, Homo sapien
tctttcttcagaatattgcaaaggc

SEQ ID NO: 2362035 - DNA, 25 bp, Homo sapien
aaggctctggctttatctcctctct

SEQ ID NO: 2362036 - DNA, 25 bp, Homo sapien
ttgcaaaggctctggctttatctcc

SEQ ID NO: 2362037 - DNA, 25 bp, Homo sapien
ctcctctctgggaataaatccactt

SEQ ID NO: 2362038 - DNA, 25 bp, Homo sapien
accaaaccccccacacatcatacac

SEQ ID NO: 2362039 - DNA, 25 bp, Homo sapien
ccaaaccccccacacatcatacaca

SEQ ID NO: 2362040 - DNA, 25 bp, Homo sapien
acacaccaaaccccccacacatcat

SEQ ID NO: 2362041 - DNA, 25 bp, Homo sapien
acaccaaaccccccacacatcatac

SEQ ID NO: 2362042 - DNA, 25 bp, Homo sapien
cacaggccacgtgagggaggcctct

SEQ ID NO: 2362043 - DNA, 25 bp, Homo sapien
gggcacctcctcgtgttccagaagt

SEQ ID NO: 2362044 - DNA, 25 bp, Homo sapien
cagttgccagggtcttctcgaagga

SEQ ID NO: 2362045 - DNA, 25 bp, Homo sapien
tgggccctgggtaattctactcctg

SEQ ID NO: 2362046 - DNA, 25 bp, Homo sapien
ttgcacacggcatccattggaaccg

SEQ ID NO: 2362047 - DNA, 25 bp, Homo sapien
cgactccaaaggatcttccggccat

SEQ ID NO: 2362048 - DNA, 25 bp, Homo sapien
catttccaagtagagcttgcttccc

SEQ ID NO: 2362049 - DNA, 25 bp, Homo sapien
agggcatgggatgtccttgcacacg

SEQ ID NO: 2362050 - DNA, 25 bp, Homo sapien
ggaaggggcatcacctttgcatcgc

SEQ ID NO: 2362051 - DNA, 25 bp, Homo sapien
tgactagagtagtggtttgcaaact

SEQ ID NO: 2362052 - DNA, 25 bp, Homo sapien
cctttgcatcgcctccttgccagac

SEQ ID NO: 2362053 - DNA, 25 bp, Homo sapien
tggggccccagagttctgtggaagg

SEQ ID NO: 2362054 - DNA, 25 bp, Homo sapien
tgctgtgtggttgctgtgtggcatg

SEQ ID NO: 2362055 - DNA, 25 bp, Homo sapien
tgtgtggcatgtggcagcccactct

SEQ ID NO: 2362056 - DNA, 25 bp, Homo sapien
tggtgggtgatgctcggagcttccc

SEQ ID NO: 2362057 - DNA, 25 bp, Homo sapien
cactggagctggtgtccagaaccca

SEQ ID NO: 2362058 - DNA, 25 bp, Homo sapien
tccacgatcttcttcccacggtggg

SEQ ID NO: 2362059 - DNA, 25 bp, Homo sapien
aataaccccaacatggtccacgatc

SEQ ID NO: 2362060 - DNA, 25 bp, Homo sapien
aatgtagggacatgaaataacccca

SEQ ID NO: 2362061 - DNA, 25 bp, Homo sapien
gggcacaatgtagggacatgaaata

SEQ ID NO: 2362062 - DNA, 25 bp, Homo sapien
aagcggacattcttgcgctcctgca

SEQ ID NO: 2362063 - DNA, 25 bp, Homo sapien
gggctcctatggaagcggacattct

SEQ ID NO: 2362064 - DNA, 25 bp, Homo sapien
agtgtttgttctaagctggggctcc

SEQ ID NO: 2362065 - DNA, 25 bp, Homo sapien
cctatggaagcggacattcttgcgc

SEQ ID NO: 2362066 - DNA, 25 bp, Homo sapien
taagcgtgaatcaggtaagccactg

SEQ ID NO: 2362067 - DNA, 25 bp, Homo sapien
ccttgctgtcaggaatagtcctgct

SEQ ID NO: 2362068 - DNA, 25 bp, Homo sapien
tagtcctgctcagtcctttaggctt

SEQ ID NO: 2362069 - DNA, 25 bp, Homo sapien
taggctttcgtatgaatcctaagcg

SEQ ID NO: 2362070 - DNA, 25 bp, Homo sapien
ccagagcttttggagcatcctctca

SEQ ID NO: 2362071 - DNA, 25 bp, Homo sapien
ccttgagataggtgctgttgcccca

SEQ ID NO: 2362072 - DNA, 25 bp, Homo sapien
tcaaatagcttagggaacttgctgg

SEQ ID NO: 2362073 - DNA, 25 bp, Homo sapien
gattcttattacactccaggcacca

SEQ ID NO: 2362074 - DNA, 25 bp, Homo sapien
acatcggatgccagatccagcacca

SEQ ID NO: 2362075 - DNA, 25 bp, Homo sapien
gccagatccagcaccacggatagca

SEQ ID NO: 2362076 - DNA, 25 bp, Homo sapien
ggatgccagatccagcaccacggat

SEQ ID NO: 2362077 - DNA, 25 bp, Homo sapien
ggacacatcggatgccagatccagc

SEQ ID NO: 2362078 - DNA, 25 bp, Homo sapien
ttgcttccaatcttgtacacggggg

SEQ ID NO: 2362079 - DNA, 25 bp, Homo sapien
tccaatcttgtacacgggggaaaga

SEQ ID NO: 2362080 - DNA, 25 bp, Homo sapien
tgtacacgggggaaagatgaagaac

SEQ ID NO: 2362081 - DNA, 25 bp, Homo sapien
ttgtacacgggggaaagatgaagaa

SEQ ID NO: 2362082 - DNA, 25 bp, Homo sapien
gcacttcccgttcctgttggcctca

SEQ ID NO: 2362083 - DNA, 25 bp, Homo sapien
ttgcacttcccgttcctgttggcct

SEQ ID NO: 2362084 - DNA, 25 bp, Homo sapien
tgcacaagctgatcatagcaatgtt

SEQ ID NO: 2362085 - DNA, 25 bp, Homo sapien
acaagctgatcatagcaatgttcct

SEQ ID NO: 2362086 - DNA, 25 bp, Homo sapien
tctcctgtgccagatggtgccgaca

SEQ ID NO: 2362087 - DNA, 25 bp, Homo sapien
tgtgccagatggtgccgacacagag

SEQ ID NO: 2362088 - DNA, 25 bp, Homo sapien
cagatggtgccgacacagagccaag

SEQ ID NO: 2362089 - DNA, 25 bp, Homo sapien
cttctctcctgtgccagatggtgcc

SEQ ID NO: 2362090 - DNA, 25 bp, Homo sapien
tgactcaaagaggaacttccgtgaa

SEQ ID NO: 2362091 - DNA, 25 bp, Homo sapien
agaggaacttccgtgaagatgtcac

SEQ ID NO: 2362092 - DNA, 25 bp, Homo sapien
aggaacttccgtgaagatgtcacag

SEQ ID NO: 2362093 - DNA, 25 bp, Homo sapien
ctcaaagaggaacttccgtgaagat

SEQ ID NO: 2362094 - DNA, 25 bp, Homo sapien
tctgctgtggctacccttgcacccg

SEQ ID NO: 2362095 - DNA, 25 bp, Homo sapien
tgctgtggctacccttgcacccggg

SEQ ID NO: 2362096 - DNA, 25 bp, Homo sapien
gctgtggctacccttgcacccgggg

SEQ ID NO: 2362097 - DNA, 25 bp, Homo sapien
tgtggctacccttgcacccggggcc

SEQ ID NO: 2362098 - DNA, 25 bp, Homo sapien
tgcccaaagtccctgagtatgaatc

SEQ ID NO: 2362099 - DNA, 25 bp, Homo sapien
aagaatggacgttcacctccagggc

SEQ ID NO: 2362100 - DNA, 25 bp, Homo sapien
ggacatgtgctcaccttggagttga

SEQ ID NO: 2362101 - DNA, 25 bp, Homo sapien
ctgattgactgactatgcctgggac

SEQ ID NO: 2362102 - DNA, 25 bp, Homo sapien
acagtgtgggataagtctctaatgg

SEQ ID NO: 2362103 - DNA, 25 bp, Homo sapien
cccttgagaccatagcagcatggca

SEQ ID NO: 2362104 - DNA, 25 bp, Homo sapien
tttgctttcagaccactgtagacag

SEQ ID NO: 2362105 - DNA, 25 bp, Homo sapien
gatctctctatgaaagtgggaagat

SEQ ID NO: 2362106 - DNA, 25 bp, Homo sapien
ttgggactgtggtgggtaaagtggc

SEQ ID NO: 2362107 - DNA, 25 bp, Homo sapien
ggcttcacactggcatacagtggac

SEQ ID NO: 2362108 - DNA, 25 bp, Homo sapien
tgggactgtggtgggtaaagtggcc

SEQ ID NO: 2362109 - DNA, 25 bp, Homo sapien
ctgtggtgggtaaagtggccctttg

SEQ ID NO: 2362110 - DNA, 25 bp, Homo sapien
cacagtttttccaacagcagtgttt

SEQ ID NO: 2362111 - DNA, 25 bp, Homo sapien
tcacagtttttccaacagcagtgtt

SEQ ID NO: 2362112 - DNA, 25 bp, Homo sapien
gggcacactaggtggcgggcccgga

SEQ ID NO: 2362113 - DNA, 25 bp, Homo sapien
tcctcgggtctcttcgtcccggagc

SEQ ID NO: 2362114 - DNA, 25 bp, Homo sapien
aggtgctggaaacccgatgggcgtg

SEQ ID NO: 2362115 - DNA, 25 bp, Homo sapien
ccggagccgctgtcgtgtgcctcat

SEQ ID NO: 2362116 - DNA, 25 bp, Homo sapien
cctcgtcgcggcggattggctttcc

SEQ ID NO: 2362117 - DNA, 25 bp, Homo sapien
gttgcttgcgtttgtctcgttcacg

SEQ ID NO: 2362118 - DNA, 25 bp, Homo sapien
cgtagcagccaataagcagcgggag

SEQ ID NO: 2362119 - DNA, 25 bp, Homo sapien
acttgtccttccctcgcatttccgg

SEQ ID NO: 2362120 - DNA, 25 bp, Homo sapien
gagagggccctttgcgcatgtccac

SEQ ID NO: 2362121 - DNA, 25 bp, Homo sapien
gggccctttgcgcatgtccacaggc

SEQ ID NO: 2362122 - DNA, 25 bp, Homo sapien
tttgcgcatgtccacaggcggctga

SEQ ID NO: 2362123 - DNA, 25 bp, Homo sapien
actcaggagagggccctttgcgcat

SEQ ID NO: 2362124 - DNA, 25 bp, Homo sapien
ctgaagccattggtatgagcatcat

SEQ ID NO: 2362125 - DNA, 25 bp, Homo sapien
ggctccagaccgagacccatttcgg

SEQ ID NO: 2362126 - DNA, 25 bp, Homo sapien
agaggaagcggctccagaccgagac

SEQ ID NO: 2362127 - DNA, 25 bp, Homo sapien
gctcagcagcgtcacccagaggaag

SEQ ID NO: 2362128 - DNA, 25 bp, Homo sapien
agacccatttcggttcagtcaccgc

SEQ ID NO: 2362129 - DNA, 25 bp, Homo sapien
gtgatgctgagctccgtggacgggc

SEQ ID NO: 2362130 - DNA, 25 bp, Homo sapien
gctcctgagcaggtagaggcctttg

SEQ ID NO: 2362131 - DNA, 25 bp, Homo sapien
acttggtggcggcatgctgcgccct

SEQ ID NO: 2362132 - DNA, 25 bp, Homo sapien
agaggccttggtcttggccaccagc

SEQ ID NO: 2362133 - DNA, 25 bp, Homo sapien
gagcttgttgcagccgcatcgtgtg

SEQ ID NO: 2362134 - DNA, 25 bp, Homo sapien
gccgtgtggtggtatgcagtcacta

SEQ ID NO: 2362135 - DNA, 25 bp, Homo sapien
catcgtgtgtactcaacatgcccgg

SEQ ID NO: 2362136 - DNA, 25 bp, Homo sapien
cactctcttgtattctgggaggcac

SEQ ID NO: 2362137 - DNA, 25 bp, Homo sapien
tccacaagaggcagtgtccgatcgc

SEQ ID NO: 2362138 - DNA, 25 bp, Homo sapien
ctggtgtacaagtagtccgcctgga

SEQ ID NO: 2362139 - DNA, 25 bp, Homo sapien
tccgatcgcggttgaccagtgcttt

SEQ ID NO: 2362140 - DNA, 25 bp, Homo sapien
ggtccatcttgagggcgtgcatgaa

SEQ ID NO: 2362141 - DNA, 25 bp, Homo sapien
ctccatgaccctgcgcagagctgag

SEQ ID NO: 2362142 - DNA, 25 bp, Homo sapien
gatgtgatggtagtaggtctcctcc

SEQ ID NO: 2362143 - DNA, 25 bp, Homo sapien
tgaccctgcgcagagctgagttccc

SEQ ID NO: 2362144 - DNA, 25 bp, Homo sapien
ctgtgtggtagatgtgatggtagta

SEQ ID NO: 2362145 - DNA, 25 bp, Homo sapien
tctcagtacacttggcgatgaagcg

SEQ ID NO: 2362146 - DNA, 25 bp, Homo sapien
tataatgggctaaggctgcaaactc

SEQ ID NO: 2362147 - DNA, 25 bp, Homo sapien
ttcatgagcagacgggaggtcctcc

SEQ ID NO: 2362148 - DNA, 25 bp, Homo sapien
gaggtcctcccgttgccatcaatga

SEQ ID NO: 2362149 - DNA, 25 bp, Homo sapien
aggaagtgactaggtttctagaaat

SEQ ID NO: 2362150 - DNA, 25 bp, Homo sapien
ttctccttttgctttaggaagtgac

SEQ ID NO: 2362151 - DNA, 25 bp, Homo sapien
gtgactaggtttctagaaatgctgt

SEQ ID NO: 2362152 - DNA, 25 bp, Homo sapien
tctccttttgctttaggaagtgact

SEQ ID NO: 2362153 - DNA, 25 bp, Homo sapien
tgcagcacgatacaggtggaatgac

SEQ ID NO: 2362154 - DNA, 25 bp, Homo sapien
cagctgctggcactaaagtttgcaa

SEQ ID NO: 2362155 - DNA, 25 bp, Homo sapien
gacaagcccagagaatttcagacga

SEQ ID NO: 2362156 - DNA, 25 bp, Homo sapien
gagagaaacgcggatacacaaagaa

SEQ ID NO: 2362157 - DNA, 25 bp, Homo sapien
ggaaacccggccatattacatagag

SEQ ID NO: 2362158 - DNA, 25 bp, Homo sapien
gacctccgtggtgtgcttataaaac

SEQ ID NO: 2362159 - DNA, 25 bp, Homo sapien
cacaagttgcgagaaaaataaggcc

SEQ ID NO: 2362160 - DNA, 25 bp, Homo sapien
cattggatgacagcttggaaacccg

SEQ ID NO: 2362161 - DNA, 25 bp, Homo sapien
agccatctgtggttgcgagcacgca

SEQ ID NO: 2362162 - DNA, 25 bp, Homo sapien
tatctcaggacaccacatcctgggc

SEQ ID NO: 2362163 - DNA, 25 bp, Homo sapien
tcaatatgagggagcactgaaaggc

SEQ ID NO: 2362164 - DNA, 25 bp, Homo sapien
tgtttagacaacacaggtcactagt

SEQ ID NO: 2362165 - DNA, 25 bp, Homo sapien
tgtctaaagccgaggagccatctgt

SEQ ID NO: 2362166 - DNA, 25 bp, Homo sapien
ccgggccagagtgaagtaaggcatt

SEQ ID NO: 2362167 - DNA, 25 bp, Homo sapien
taagtcaagagcctttcagtgctcc

SEQ ID NO: 2362168 - DNA, 25 bp, Homo sapien
taattcacagaatggcctcttgtgg

SEQ ID NO: 2362169 - DNA, 25 bp, Homo sapien
tgaggcacagaagcgaaacgagaac

SEQ ID NO: 2362170 - DNA, 25 bp, Homo sapien
aatgccttacttcactctggcccgg

SEQ ID NO: 2362171 - DNA, 25 bp, Homo sapien
gctgcgtgctcgcaaccacagatgg

SEQ ID NO: 2362172 - DNA, 25 bp, Homo sapien
cagatggctcctcggctttagacag

SEQ ID NO: 2362173 - DNA, 25 bp, Homo sapien
ccttgtacgtgctgcagaagtagaa

SEQ ID NO: 2362174 - DNA, 25 bp, Homo sapien
tgcactgtaacttcagataaccctt

SEQ ID NO: 2362175 - DNA, 25 bp, Homo sapien
ccaagttcagcacaccttgtacgtg

SEQ ID NO: 2362176 - DNA, 25 bp, Homo sapien
ataaatccagcaaataaaccaagag

SEQ ID NO: 2362177 - DNA, 25 bp, Homo sapien
tctccttcccgagtgctgctatgca

SEQ ID NO: 2362178 - DNA, 25 bp, Homo sapien
gacagatggaccagtataaatccag

SEQ ID NO: 2362179 - DNA, 25 bp, Homo sapien
cacgtacaaggtgtgctgaacttgg

SEQ ID NO: 2362180 - DNA, 25 bp, Homo sapien
gttacagtgcatagcagcactcggg

SEQ ID NO: 2362181 - DNA, 25 bp, Homo sapien
gctggatttatactggtccatctgt

SEQ ID NO: 2362182 - DNA, 25 bp, Homo sapien
tgcatagcagcactcgggaaggaga

SEQ ID NO: 2362183 - DNA, 25 bp, Homo sapien
tctacttctgcagcacgtacaaggt

SEQ ID NO: 2362184 - DNA, 25 bp, Homo sapien
gaagggttatctgaagttacagtgc

SEQ ID NO: 2362185 - DNA, 25 bp, Homo sapien
ctctgtaaaacggcaagaataaaag

SEQ ID NO: 2362186 - DNA, 25 bp, Homo sapien
tgacaccagccttgtccccatgagc

SEQ ID NO: 2362187 - DNA, 25 bp, Homo sapien
accatgattcgaggcatgacccagc

SEQ ID NO: 2362188 - DNA, 25 bp, Homo sapien
agagaaaaaccatgattcgaggcat

SEQ ID NO: 2362189 - DNA, 25 bp, Homo sapien
atggggccaccggagcgagtcactt

SEQ ID NO: 2362190 - DNA, 25 bp, Homo sapien
agccatgctctgaaacttgttaatg

SEQ ID NO: 2362191 - DNA, 25 bp, Homo sapien
gctgggtcatgcctcgaatcatggt

SEQ ID NO: 2362192 - DNA, 25 bp, Homo sapien
cttttattcttgccgttttacagag

SEQ ID NO: 2362193 - DNA, 25 bp, Homo sapien
cattaacaagtttcagagcatggct

SEQ ID NO: 2362194 - DNA, 25 bp, Homo sapien
catgcctcgaatcatggtttttctc

SEQ ID NO: 2362195 - DNA, 25 bp, Homo sapien
ttaagtgactcgctccggtggcccc

SEQ ID NO: 2362196 - DNA, 25 bp, Homo sapien
cggtggccccattaacaagtttcag

SEQ ID NO: 2362197 - DNA, 25 bp, Homo sapien
gcacaggaagttgattacataccta

SEQ ID NO: 2362198 - DNA, 25 bp, Homo sapien
gaatagagggagccaagtttctcaa

SEQ ID NO: 2362199 - DNA, 25 bp, Homo sapien
aaggtcagagaagggcgtgacacag

SEQ ID NO: 2362200 - DNA, 25 bp, Homo sapien
ggaagttgattacatacctacaggg

SEQ ID NO: 2362201 - DNA, 25 bp, Homo sapien
gcagcctagatctggaagcctgagt

SEQ ID NO: 2362202 - DNA, 25 bp, Homo sapien
aagggtgtccatgcagggccgtgcc

SEQ ID NO: 2362203 - DNA, 25 bp, Homo sapien
tccacccggcccctgtaggtatgta

SEQ ID NO: 2362204 - DNA, 25 bp, Homo sapien
taggtatgtaatcaacttcctgtgc

SEQ ID NO: 2362205 - DNA, 25 bp, Homo sapien
ccggcccctgtaggtatgtaatcaa

SEQ ID NO: 2362206 - DNA, 25 bp, Homo sapien
ttgagaaacttggctccctctattc

SEQ ID NO: 2362207 - DNA, 25 bp, Homo sapien
ggcacggccctgcatggacaccctt

SEQ ID NO: 2362208 - DNA, 25 bp, Homo sapien
actcaggcttccagatctaggctgc

SEQ ID NO: 2362209 - DNA, 25 bp, Homo sapien
gaaacatccataccaaactgagcca

SEQ ID NO: 2362210 - DNA, 25 bp, Homo sapien
cactaggctaagtgaggctcttctt

SEQ ID NO: 2362211 - DNA, 25 bp, Homo sapien
cattgacacgagctaatcgggtttc

SEQ ID NO: 2362212 - DNA, 25 bp, Homo sapien
gaagagatctctcccatcaaacaat

SEQ ID NO: 2362213 - DNA, 25 bp, Homo sapien
gccaaaatagctaccagaggtgcca

SEQ ID NO: 2362214 - DNA, 25 bp, Homo sapien
taagaaaatgtaatccctgtaggct

SEQ ID NO: 2362215 - DNA, 25 bp, Homo sapien
caagcctacagggattacattttct

SEQ ID NO: 2362216 - DNA, 25 bp, Homo sapien
taaagaagagcctcacttagcctag

SEQ ID NO: 2362217 - DNA, 25 bp, Homo sapien
gattagctcgtgtcaatgagcagag

SEQ ID NO: 2362218 - DNA, 25 bp, Homo sapien
agaaaactgaaacccgattagctcg

SEQ ID NO: 2362219 - DNA, 25 bp, Homo sapien
tggcacctctggtagctattttggc

SEQ ID NO: 2362220 - DNA, 25 bp, Homo sapien
tagtgagtggaacatgaacacccca

SEQ ID NO: 2362221 - DNA, 25 bp, Homo sapien
tgtccccagactgtaaccagatgct

SEQ ID NO: 2362222 - DNA, 25 bp, Homo sapien
aaggtggcagcataaacacagtctg

SEQ ID NO: 2362223 - DNA, 25 bp, Homo sapien
cagcaaatgggttaggctccaagcc

SEQ ID NO: 2362224 - DNA, 25 bp, Homo sapien
accagatgctcctacttgagaccaa

SEQ ID NO: 2362225 - DNA, 25 bp, Homo sapien
cctacttgagaccaaacagcaaatg

SEQ ID NO: 2362226 - DNA, 25 bp, Homo sapien
accacctaaggtggcagcataaaca

SEQ ID NO: 2362227 - DNA, 25 bp, Homo sapien
ggcttggagcctaacccatttgctg

SEQ ID NO: 2362228 - DNA, 25 bp, Homo sapien
cagactgtgtttatgctgccacctt

SEQ ID NO: 2362229 - DNA, 25 bp, Homo sapien
tgtttatgctgccaccttaggtggt

SEQ ID NO: 2362230 - DNA, 25 bp, Homo sapien
tttggtctcaagtaggagcatctgg

SEQ ID NO: 2362231 - DNA, 25 bp, Homo sapien
catttgctgtttggtctcaagtagg

SEQ ID NO: 2362232 - DNA, 25 bp, Homo sapien
gcatctggttacagtctggggacag

SEQ ID NO: 2362233 - DNA, 25 bp, Homo sapien
gagaggccgtcttctcccaggtaga

SEQ ID NO: 2362234 - DNA, 25 bp, Homo sapien
gagtctctacagtcacctacgaagt

SEQ ID NO: 2362235 - DNA, 25 bp, Homo sapien
gcttctgagaagaccttagctttca

SEQ ID NO: 2362236 - DNA, 25 bp, Homo sapien
tactatggcgtcctactgacaggag

SEQ ID NO: 2362237 - DNA, 25 bp, Homo sapien
tacagcattcacatgtgcggcacat

SEQ ID NO: 2362238 - DNA, 25 bp, Homo sapien
ggacacaaagtggaaggcactcgaa

SEQ ID NO: 2362239 - DNA, 25 bp, Homo sapien
tgaaagctaaggtcttctcagaagc

SEQ ID NO: 2362240 - DNA, 25 bp, Homo sapien
cacatgtgaatgctgtaaaggcaga

SEQ ID NO: 2362241 - DNA, 25 bp, Homo sapien
gttacagagagctgttggactcccc

SEQ ID NO: 2362242 - DNA, 25 bp, Homo sapien
cgtaggtgactgtagagactctgga

SEQ ID NO: 2362243 - DNA, 25 bp, Homo sapien
cagtagcccctacatggctgaggga

SEQ ID NO: 2362244 - DNA, 25 bp, Homo sapien
ttctacctgggagaagacggcctct

SEQ ID NO: 2362245 - DNA, 25 bp, Homo sapien
cgatcctatgataaagaattccaga

SEQ ID NO: 2362246 - DNA, 25 bp, Homo sapien
tactttcagttgtcgatcctatgat

SEQ ID NO: 2362247 - DNA, 25 bp, Homo sapien
ctaatagcgcggttatgtacagata

SEQ ID NO: 2362248 - DNA, 25 bp, Homo sapien
tggccaagaggtaccgactccataa

SEQ ID NO: 2362249 - DNA, 25 bp, Homo sapien
gactccataaggcaactgtccaggg

SEQ ID NO: 2362250 - DNA, 25 bp, Homo sapien
gggcagtttctaatagcgcggttat

SEQ ID NO: 2362251 - DNA, 25 bp, Homo sapien
tatctgtacataaccgcgctattag

SEQ ID NO: 2362252 - DNA, 25 bp, Homo sapien
tcataggatcgacaactgaaagtaa

SEQ ID NO: 2362253 - DNA, 25 bp, Homo sapien
gcccctggacagttgccttatggag

SEQ ID NO: 2362254 - DNA, 25 bp, Homo sapien
tctggaattctttatcataggatcg

SEQ ID NO: 2362255 - DNA, 25 bp, Homo sapien
ttatggagtcggtacctcttggcca

SEQ ID NO: 2362256 - DNA, 25 bp, Homo sapien
gcgctattagaaactgcccctggac

SEQ ID NO: 2362257 - DNA, 25 bp, Homo sapien
tgtaacggatccataagtctgggac

SEQ ID NO: 2362258 - DNA, 25 bp, Homo sapien
tcatggcagtcgctacaaaggctcc

SEQ ID NO: 2362259 - DNA, 25 bp, Homo sapien
cagggcgcgctcaaagatcaactga

SEQ ID NO: 2362260 - DNA, 25 bp, Homo sapien
tagggccgtatgcaacaaactcctg

SEQ ID NO: 2362261 - DNA, 25 bp, Homo sapien
tctgggacaaggcagttctcgacca

SEQ ID NO: 2362262 - DNA, 25 bp, Homo sapien
tcaactgaatgcgagcaggatcgcc

SEQ ID NO: 2362263 - DNA, 25 bp, Homo sapien
tcccagacttatggatccgttacag

SEQ ID NO: 2362264 - DNA, 25 bp, Homo sapien
tggtcgagaactgccttgtcccaga

SEQ ID NO: 2362265 - DNA, 25 bp, Homo sapien
ctttggaccagatgagaagactctt

SEQ ID NO: 2362266 - DNA, 25 bp, Homo sapien
ggagcctttgtagcgactgccatga

SEQ ID NO: 2362267 - DNA, 25 bp, Homo sapien
cagttgatctttgagcgcgccctgg

SEQ ID NO: 2362268 - DNA, 25 bp, Homo sapien
ggagtttgttgcatacggccctact

SEQ ID NO: 2362269 - DNA, 25 bp, Homo sapien
acattaaccttttgctggcttgacg

SEQ ID NO: 2362270 - DNA, 25 bp, Homo sapien
ggaagaattagttacccagacacac

SEQ ID NO: 2362271 - DNA, 25 bp, Homo sapien
cacacagactccatatgtagaaagg

SEQ ID NO: 2362272 - DNA, 25 bp, Homo sapien
aatgatcgaagttttgggaagcaca

SEQ ID NO: 2362273 - DNA, 25 bp, Homo sapien
tgagggtggcaagctaagtaaacat

SEQ ID NO: 2362274 - DNA, 25 bp, Homo sapien
ggcctccatttccagtaacgaggaa

SEQ ID NO: 2362275 - DNA, 25 bp, Homo sapien
tgtgcttcccaaaacttcgatcatt

SEQ ID NO: 2362276 - DNA, 25 bp, Homo sapien
taatatacgtcaagccagcaaaagg

SEQ ID NO: 2362277 - DNA, 25 bp, Homo sapien
cccctttctacatatggagtctgtg

SEQ ID NO: 2362278 - DNA, 25 bp, Homo sapien
gaaatggaggccctgaaacatcccc

SEQ ID NO: 2362279 - DNA, 25 bp, Homo sapien
ttcctcgttactggaaatggaggcc

SEQ ID NO: 2362280 - DNA, 25 bp, Homo sapien
taatgtttacttagcttgccaccct

SEQ ID NO: 2362281 - DNA, 25 bp, Homo sapien
ttaccatagagtgggatcgccaact

SEQ ID NO: 2362282 - DNA, 25 bp, Homo sapien
ttaaaaaccatagagggctggctgt

SEQ ID NO: 2362283 - DNA, 25 bp, Homo sapien
tttaccaaggacctcatccaaagag

SEQ ID NO: 2362284 - DNA, 25 bp, Homo sapien
actgtcgccggaaaagactgtggac

SEQ ID NO: 2362285 - DNA, 25 bp, Homo sapien
tggtgggaaaggtctaactacatgt

SEQ ID NO: 2362286 - DNA, 25 bp, Homo sapien
caaggagagtaagaacaccagcttt

SEQ ID NO: 2362287 - DNA, 25 bp, Homo sapien
tctctttggatgaggtccttggtaa

SEQ ID NO: 2362288 - DNA, 25 bp, Homo sapien
ggtaaagctggtgttcttactctcc

SEQ ID NO: 2362289 - DNA, 25 bp, Homo sapien
tggcgatcccactctatggtaagag

SEQ ID NO: 2362290 - DNA, 25 bp, Homo sapien
aagtccacagtcttttccggcgaca

SEQ ID NO: 2362291 - DNA, 25 bp, Homo sapien
ttttccggcgacagttggcgatccc

SEQ ID NO: 2362292 - DNA, 25 bp, Homo sapien
caacatgtagttagacctttcccac

SEQ ID NO: 2362293 - DNA, 25 bp, Homo sapien
tatatacaagggacggtaaagagac

SEQ ID NO: 2362294 - DNA, 25 bp, Homo sapien
agatgtcaataccagcaggcgaggg

SEQ ID NO: 2362295 - DNA, 25 bp, Homo sapien
cagcattgtctgatgtggtccccaa

SEQ ID NO: 2362296 - DNA, 25 bp, Homo sapien
gactgcagcagtggttagatgaatc

SEQ ID NO: 2362297 - DNA, 25 bp, Homo sapien
cattgttccaaggtcaatttcctgg

SEQ ID NO: 2362298 - DNA, 25 bp, Homo sapien
tacttcacttgcactggtaagatgt

SEQ ID NO: 2362299 - DNA, 25 bp, Homo sapien
taccgtcccttgtatatagtataat

SEQ ID NO: 2362300 - DNA, 25 bp, Homo sapien
acatcttaccagtgcaagtgaagta

SEQ ID NO: 2362301 - DNA, 25 bp, Homo sapien
agtgaagtatagaagactcacctcc

SEQ ID NO: 2362302 - DNA, 25 bp, Homo sapien
ggaaattgaccttggaacaatggga

SEQ ID NO: 2362303 - DNA, 25 bp, Homo sapien
ccctcgcctgctggtattgacatct

SEQ ID NO: 2362304 - DNA, 25 bp, Homo sapien
tagattcatctaaccactgctgcag

SEQ ID NO: 2362305 - DNA, 25 bp, Homo sapien
tgaagggagtacacaagacttctct

SEQ ID NO: 2362306 - DNA, 25 bp, Homo sapien
aagggagtacacaagacttctctgt

SEQ ID NO: 2362307 - DNA, 25 bp, Homo sapien
gggagtacacaagacttctctgtac

SEQ ID NO: 2362308 - DNA, 25 bp, Homo sapien
ggagtacacaagacttctctgtact

SEQ ID NO: 2362309 - DNA, 25 bp, Homo sapien
gtgaagggagtacacaagacttctc

SEQ ID NO: 2362310 - DNA, 25 bp, Homo sapien
gaagggagtacacaagacttctctg

SEQ ID NO: 2362311 - DNA, 25 bp, Homo sapien
agtacagagaagtcttgtgtactcc

SEQ ID NO: 2362312 - DNA, 25 bp, Homo sapien
tacagagaagtcttgtgtactccct

SEQ ID NO: 2362313 - DNA, 25 bp, Homo sapien
cagagaagtcttgtgtactcccttc

SEQ ID NO: 2362314 - DNA, 25 bp, Homo sapien
gagaagtcttgtgtactcccttcac

SEQ ID NO: 2362315 - DNA, 25 bp, Homo sapien
agagaagtcttgtgtactcccttca

SEQ ID NO: 2362316 - DNA, 25 bp, Homo sapien
gtacagagaagtcttgtgtactccc

SEQ ID NO: 2362317 - DNA, 25 bp, Homo sapien
aaaaatgtgcaagccttgtttctgt

SEQ ID NO: 2362318 - DNA, 25 bp, Homo sapien
aaagatttcactcatcttctggcgg

SEQ ID NO: 2362319 - DNA, 25 bp, Homo sapien
cttctggcgggccatcctcaccttg

SEQ ID NO: 2362320 - DNA, 25 bp, Homo sapien
ctgtttctaaaagcagcctgactgc

SEQ ID NO: 2362321 - DNA, 25 bp, Homo sapien
gaaagatttcactcatcttctggcg

SEQ ID NO: 2362322 - DNA, 25 bp, Homo sapien
gtaaaaaatgtgcaagccttgtttc

SEQ ID NO: 2362323 - DNA, 25 bp, Homo sapien
gcagtcaggctgcttttagaaacag

SEQ ID NO: 2362324 - DNA, 25 bp, Homo sapien
caaggtgaggatggcccgccagaag

SEQ ID NO: 2362325 - DNA, 25 bp, Homo sapien
ccgccagaagatgagtgaaatcttt

SEQ ID NO: 2362326 - DNA, 25 bp, Homo sapien
gaaacaaggcttgcacattttttac

SEQ ID NO: 2362327 - DNA, 25 bp, Homo sapien
acagaaacaaggcttgcacattttt

SEQ ID NO: 2362328 - DNA, 25 bp, Homo sapien
cgccagaagatgagtgaaatctttc

SEQ ID NO: 2362329 - DNA, 25 bp, Homo sapien
gcagcaggttggtatctgttgatgc

SEQ ID NO: 2362330 - DNA, 25 bp, Homo sapien
agtttctagctcataccaggtcttc

SEQ ID NO: 2362331 - DNA, 25 bp, Homo sapien
cacatgtgaggtacactgtaagacc

SEQ ID NO: 2362332 - DNA, 25 bp, Homo sapien
gctgagtgacaggtacataaagttt

SEQ ID NO: 2362333 - DNA, 25 bp, Homo sapien
tagaaatccctattagagaaacaag

SEQ ID NO: 2362334 - DNA, 25 bp, Homo sapien
tcataacgtcctttagcacatgtga

SEQ ID NO: 2362335 - DNA, 25 bp, Homo sapien
cacatgtgctaaaggacgttatgaa

SEQ ID NO: 2362336 - DNA, 25 bp, Homo sapien
gcatcaacagataccaacctgctgc

SEQ ID NO: 2362337 - DNA, 25 bp, Homo sapien
ggtcttacagtgtacctcacatgtg

SEQ ID NO: 2362338 - DNA, 25 bp, Homo sapien
gaagacctggtatgagctagaaact

SEQ ID NO: 2362339 - DNA, 25 bp, Homo sapien
taaaactttatgtacctgtcactca

SEQ ID NO: 2362340 - DNA, 25 bp, Homo sapien
tgtacctgtcactcagcatcaacag

SEQ ID NO: 2362341 - DNA, 25 bp, Homo sapien
gcatctggtgagaaactcttgtaca

SEQ ID NO: 2362342 - DNA, 25 bp, Homo sapien
ggtgagaaactcttgtacatgatgt

SEQ ID NO: 2362343 - DNA, 25 bp, Homo sapien
gagaaactcttgtacatgatgtgaa

SEQ ID NO: 2362344 - DNA, 25 bp, Homo sapien
tgcatctggtgagaaactcttgtac

SEQ ID NO: 2362345 - DNA, 25 bp, Homo sapien
tctggtgagaaactcttgtacatga

SEQ ID NO: 2362346 - DNA, 25 bp, Homo sapien
aactcttgtacatgatgtgaactgc

SEQ ID NO: 2362347 - DNA, 25 bp, Homo sapien
catgtacaagagtttctcaccagat

SEQ ID NO: 2362348 - DNA, 25 bp, Homo sapien
gtacaagagtttctcaccagatgca

SEQ ID NO: 2362349 - DNA, 25 bp, Homo sapien
catcatgtacaagagtttctcacca

SEQ ID NO: 2362350 - DNA, 25 bp, Homo sapien
ttcacatcatgtacaagagtttctc

SEQ ID NO: 2362351 - DNA, 25 bp, Homo sapien
gcagttcacatcatgtacaagagtt

SEQ ID NO: 2362352 - DNA, 25 bp, Homo sapien
cacatcatgtacaagagtttctcac

SEQ ID NO: 2362353 - DNA, 25 bp, Homo sapien
aaaagagaatgcgggccgggcgtag

SEQ ID NO: 2362354 - DNA, 25 bp, Homo sapien
cactatgaataacttaaaggaaatc

SEQ ID NO: 2362355 - DNA, 25 bp, Homo sapien
gtgtaaatcccactatgaataactt

SEQ ID NO: 2362356 - DNA, 25 bp, Homo sapien
cattttaagtgtaaatcccactatg

SEQ ID NO: 2362357 - DNA, 25 bp, Homo sapien
aatcccactatgaataacttaaagg

SEQ ID NO: 2362358 - DNA, 25 bp, Homo sapien
tccagtgtggcatctagtccacatt

SEQ ID NO: 2362359 - DNA, 25 bp, Homo sapien
aatgtggactagatgccacactgga

SEQ ID NO: 2362360 - DNA, 25 bp, Homo sapien
gatttcctttaagttattcatagtg

SEQ ID NO: 2362361 - DNA, 25 bp, Homo sapien
ctacgcccggcccgcattctctttt

SEQ ID NO: 2362362 - DNA, 25 bp, Homo sapien
catagtgggatttacacttaaaatg

SEQ ID NO: 2362363 - DNA, 25 bp, Homo sapien
cctttaagttattcatagtgggatt

SEQ ID NO: 2362364 - DNA, 25 bp, Homo sapien
aagttattcatagtgggatttacac

SEQ ID NO: 2362365 - DNA, 25 bp, Homo sapien
cctgtgtccccgagtatagacctca

SEQ ID NO: 2362366 - DNA, 25 bp, Homo sapien
agtatagacctcatgcacaggtttc

SEQ ID NO: 2362367 - DNA, 25 bp, Homo sapien
tgtccccgagtatagacctcatgca

SEQ ID NO: 2362368 - DNA, 25 bp, Homo sapien
cgagtatagacctcatgcacaggtt

SEQ ID NO: 2362369 - DNA, 25 bp, Homo sapien
cccgagtatagacctcatgcacagg

SEQ ID NO: 2362370 - DNA, 25 bp, Homo sapien
tgtgtccccgagtatagacctcatg

SEQ ID NO: 2362371 - DNA, 25 bp, Homo sapien
tgaggtctatactcggggacacagg

SEQ ID NO: 2362372 - DNA, 25 bp, Homo sapien
cctgtgcatgaggtctatactcggg

SEQ ID NO: 2362373 - DNA, 25 bp, Homo sapien
gaaacctgtgcatgaggtctatact

SEQ ID NO: 2362374 - DNA, 25 bp, Homo sapien
acctgtgcatgaggtctatactcgg

SEQ ID NO: 2362375 - DNA, 25 bp, Homo sapien
aaacctgtgcatgaggtctatactc

SEQ ID NO: 2362376 - DNA, 25 bp, Homo sapien
aacctgtgcatgaggtctatactcg

SEQ ID NO: 2362377 - DNA, 25 bp, Homo sapien
taagcactcaaatccgacaggagct

SEQ ID NO: 2362378 - DNA, 25 bp, Homo sapien
tccgcggaggaagccatggcgtact

SEQ ID NO: 2362379 - DNA, 25 bp, Homo sapien
tttatcgccgccgaggactagggag

SEQ ID NO: 2362380 - DNA, 25 bp, Homo sapien
caatgggcaggcagtaagcactcaa

SEQ ID NO: 2362381 - DNA, 25 bp, Homo sapien
catggtcttgtatgtcgcagcggcc

SEQ ID NO: 2362382 - DNA, 25 bp, Homo sapien
cacgaaaagcgggtttgcagccttg

SEQ ID NO: 2362383 - DNA, 25 bp, Homo sapien
gactgcggccgaaacctcggcttca

SEQ ID NO: 2362384 - DNA, 25 bp, Homo sapien
caaggctgcaaacccgcttttcgtg

SEQ ID NO: 2362385 - DNA, 25 bp, Homo sapien
tgtggccgctgcgacatacaagacc

SEQ ID NO: 2362386 - DNA, 25 bp, Homo sapien
tcattagaagcgcaagatggcgact

SEQ ID NO: 2362387 - DNA, 25 bp, Homo sapien
gatttgagtgcttactgcctgccca

SEQ ID NO: 2362388 - DNA, 25 bp, Homo sapien
gatgagtacgccatggcttcctccg

SEQ ID NO: 2362389 - DNA, 25 bp, Homo sapien
tgtccctagacgaatggtaccggct

SEQ ID NO: 2362390 - DNA, 25 bp, Homo sapien
taagtccgtccaaggtcgctaagga

SEQ ID NO: 2362391 - DNA, 25 bp, Homo sapien
tgtcaaggcgctctactagacccgg

SEQ ID NO: 2362392 - DNA, 25 bp, Homo sapien
gaatggtgaaatcgatccttccccg

SEQ ID NO: 2362393 - DNA, 25 bp, Homo sapien
gctccgcagcagcagagccgatgcc

SEQ ID NO: 2362394 - DNA, 25 bp, Homo sapien
tcttgtgatagagtcgggccggggc

SEQ ID NO: 2362395 - DNA, 25 bp, Homo sapien
tccgcagcagcagagccgatgccgc

SEQ ID NO: 2362396 - DNA, 25 bp, Homo sapien
gatgccgcccgcctcagacggaaag

SEQ ID NO: 2362397 - DNA, 25 bp, Homo sapien
acagaaacggtctcctcgtgctggg

SEQ ID NO: 2362398 - DNA, 25 bp, Homo sapien
ttaaaattgggacgcacgaagtcgc

SEQ ID NO: 2362399 - DNA, 25 bp, Homo sapien
ttcagagaggcgcagtgactagccc

SEQ ID NO: 2362400 - DNA, 25 bp, Homo sapien
tacgcatgttggttacaagcctgac

SEQ ID NO: 2362401 - DNA, 25 bp, Homo sapien
tctcgagtgggagtctcacgtctgg

SEQ ID NO: 2362402 - DNA, 25 bp, Homo sapien
tctttagttgtttctcgagtgggag

SEQ ID NO: 2362403 - DNA, 25 bp, Homo sapien
cacgttgatttatggcattctttag

SEQ ID NO: 2362404 - DNA, 25 bp, Homo sapien
ggccttttgtgccacgttgatttat

SEQ ID NO: 2362405 - DNA, 25 bp, Homo sapien
acatccattcgaactggcacacaga

SEQ ID NO: 2362406 - DNA, 25 bp, Homo sapien
ccatctgactaaggattttgactcc

SEQ ID NO: 2362407 - DNA, 25 bp, Homo sapien
tagtagtaagcacgccgatcttcca

SEQ ID NO: 2362408 - DNA, 25 bp, Homo sapien
cagaaggccttaataaccttgaggt

SEQ ID NO: 2362409 - DNA, 25 bp, Homo sapien
tgttacacagggaacaatgctatgg

SEQ ID NO: 2362410 - DNA, 25 bp, Homo sapien
gccattaccgtatttcacagcctgt

SEQ ID NO: 2362411 - DNA, 25 bp, Homo sapien
catcaccagacttgggctcaaacag

SEQ ID NO: 2362412 - DNA, 25 bp, Homo sapien
tgctgaaaggctgctagtccaagtt

SEQ ID NO: 2362413 - DNA, 25 bp, Homo sapien
ctacaatacttcacagatttgagat

SEQ ID NO: 2362414 - DNA, 25 bp, Homo sapien
tcctctacaatacttcacagatttg

SEQ ID NO: 2362415 - DNA, 25 bp, Homo sapien
acaatacttcacagatttgagatac

SEQ ID NO: 2362416 - DNA, 25 bp, Homo sapien
gtctcctctacaatacttcacagat

SEQ ID NO: 2362417 - DNA, 25 bp, Homo sapien
gaaaggtctacactcatgtcaatga

SEQ ID NO: 2362418 - DNA, 25 bp, Homo sapien
ctgagtagaaaggtctacactcatg

SEQ ID NO: 2362419 - DNA, 25 bp, Homo sapien
tctacactcatgtcaatgagaacca

SEQ ID NO: 2362420 - DNA, 25 bp, Homo sapien
tagaaaggtctacactcatgtcaat

SEQ ID NO: 2362421 - DNA, 25 bp, Homo sapien
cactctctattggtactggtctctg

SEQ ID NO: 2362422 - DNA, 25 bp, Homo sapien
tgagagggttaagataaatcatgtt

SEQ ID NO: 2362423 - DNA, 25 bp, Homo sapien
tttgatggtaagctcctcggtcagc

SEQ ID NO: 2362424 - DNA, 25 bp, Homo sapien
acctggcaggcaatcactaaatacc

SEQ ID NO: 2362425 - DNA, 25 bp, Homo sapien
cccacgtttctaggattttcataat

SEQ ID NO: 2362426 - DNA, 25 bp, Homo sapien
ttagatgtcttgtcaagggacccca

SEQ ID NO: 2362427 - DNA, 25 bp, Homo sapien
tttagatgtcttgtcaagggacccc

SEQ ID NO: 2362428 - DNA, 25 bp, Homo sapien
cgtttctaggattttcataatgatc

SEQ ID NO: 2362429 - DNA, 25 bp, Homo sapien
ctgtaatttcattacgtcaccacat

SEQ ID NO: 2362430 - DNA, 25 bp, Homo sapien
gtaatttcattacgtcaccacatgc

SEQ ID NO: 2362431 - DNA, 25 bp, Homo sapien
aatttcattacgtcaccacatgctg

SEQ ID NO: 2362432 - DNA, 25 bp, Homo sapien
ttcattacgtcaccacatgctggag

SEQ ID NO: 2362433 - DNA, 25 bp, Homo sapien
ttcctttgatcagtaaaattcacaa

SEQ ID NO: 2362434 - DNA, 25 bp, Homo sapien
aactctttagttggctgaagtcaga

SEQ ID NO: 2362435 - DNA, 25 bp, Homo sapien
ccaaatgttttaaacctagcatcca

SEQ ID NO: 2362436 - DNA, 25 bp, Homo sapien
aattgcggaaccacagccaaatgtt

SEQ ID NO: 2362437 - DNA, 25 bp, Homo sapien
gttttaaacctagcatccacaatct

SEQ ID NO: 2362438 - DNA, 25 bp, Homo sapien
atgagctggaggcaattgcggaacc

SEQ ID NO: 2362439 - DNA, 25 bp, Homo sapien
tcttcactgtgtttgggacctttga

SEQ ID NO: 2362440 - DNA, 25 bp, Homo sapien
atgagtgccttgctggttggctttt

SEQ ID NO: 2362441 - DNA, 25 bp, Homo sapien
aaagatgagtgccttgctggttggc

SEQ ID NO: 2362442 - DNA, 25 bp, Homo sapien
tgtgtttgggacctttgacctctgc

SEQ ID NO: 2362443 - DNA, 25 bp, Homo sapien
ggagcagtgcagtttcacgggagga

SEQ ID NO: 2362444 - DNA, 25 bp, Homo sapien
agctccttggcgatatctgtgtttt

SEQ ID NO: 2362445 - DNA, 25 bp, Homo sapien
tgtttttgatagtcaaggcttcctc

SEQ ID NO: 2362446 - DNA, 25 bp, Homo sapien
cagtgcagtttcacgggaggaaggc

SEQ ID NO: 2362447 - DNA, 25 bp, Homo sapien
actggtatggagagcagagacttac

SEQ ID NO: 2362448 - DNA, 25 bp, Homo sapien
tctgagggttacaaacgtgggctcc

SEQ ID NO: 2362449 - DNA, 25 bp, Homo sapien
gaaattacgcccatgaagtgctcag

SEQ ID NO: 2362450 - DNA, 25 bp, Homo sapien
gcaggttataaggacagactcatga

SEQ ID NO: 2362451 - DNA, 25 bp, Homo sapien
caggaaacaggattatggcgaaagc

SEQ ID NO: 2362452 - DNA, 25 bp, Homo sapien
gaaacaggattatggcgaaagctga

SEQ ID NO: 2362453 - DNA, 25 bp, Homo sapien
tggcgaaagctgagttttctcctct

SEQ ID NO: 2362454 - DNA, 25 bp, Homo sapien
gattatggcgaaagctgagttttct

SEQ ID NO: 2362455 - DNA, 25 bp, Homo sapien
ggaaaaagcattagatttaatacag

SEQ ID NO: 2362456 - DNA, 25 bp, Homo sapien
caagtcttaaggcatctgggctttt

SEQ ID NO: 2362457 - DNA, 25 bp, Homo sapien
actggaaagccaagtacaagtctta

SEQ ID NO: 2362458 - DNA, 25 bp, Homo sapien
gggacattgtacaactgggcttagt

SEQ ID NO: 2362459 - DNA, 25 bp, Homo sapien
cctccatcgatgcattaaggctaat

SEQ ID NO: 2362460 - DNA, 25 bp, Homo sapien
aggctaatgtttctcattccttctt

SEQ ID NO: 2362461 - DNA, 25 bp, Homo sapien
tttggttagtaaacctccatcgatg

SEQ ID NO: 2362462 - DNA, 25 bp, Homo sapien
caagaggcctgactctctgctgatt

SEQ ID NO: 2362463 - DNA, 25 bp, Homo sapien
ggaaagaacttaggtctgaccaggc

SEQ ID NO: 2362464 - DNA, 25 bp, Homo sapien
tggagtaaccaagccagaaagctgg

SEQ ID NO: 2362465 - DNA, 25 bp, Homo sapien
tgagttactcctgcgggtgatcctg

SEQ ID NO: 2362466 - DNA, 25 bp, Homo sapien
aatgagttagtgtgtctgccccggc

SEQ ID NO: 2362467 - DNA, 25 bp, Homo sapien
agggcggccttgattgcatcttcag

SEQ ID NO: 2362468 - DNA, 25 bp, Homo sapien
cagccagggcggccttgattgcatc

SEQ ID NO: 2362469 - DNA, 25 bp, Homo sapien
agccagggcggccttgattgcatct

SEQ ID NO: 2362470 - DNA, 25 bp, Homo sapien
ccagggcggccttgattgcatcttc

SEQ ID NO: 2362471 - DNA, 25 bp, Homo sapien
tcagttctgaggtcatacacacaat

SEQ ID NO: 2362472 - DNA, 25 bp, Homo sapien
tagatacttatgcacttcacgggct

SEQ ID NO: 2362473 - DNA, 25 bp, Homo sapien
caagtattgtgcgtatctcatagct

SEQ ID NO: 2362474 - DNA, 25 bp, Homo sapien
catgagagtcataacgtgaacagca

SEQ ID NO: 2362475 - DNA, 25 bp, Homo sapien
gacagctaaatcaaagtgcgcacac

SEQ ID NO: 2362476 - DNA, 25 bp, Homo sapien
tttcggtgcccacgcacagtagctg

SEQ ID NO: 2362477 - DNA, 25 bp, Homo sapien
gacaggacaccctgagagagacagg

SEQ ID NO: 2362478 - DNA, 25 bp, Homo sapien
agacaggatttagggcaggctgctc

SEQ ID NO: 2362479 - DNA, 25 bp, Homo sapien
cacccccgatgtggcccttccccat

SEQ ID NO: 2362480 - DNA, 25 bp, Homo sapien
ctgccacccccgatgtggcccttcc

SEQ ID NO: 2362481 - DNA, 25 bp, Homo sapien
gtgctgccacccccgatgtggccct

SEQ ID NO: 2362482 - DNA, 25 bp, Homo sapien
tgccacccccgatgtggcccttccc

SEQ ID NO: 2362483 - DNA, 25 bp, Homo sapien
cagcctaggtggtgtcaactgatcc

SEQ ID NO: 2362484 - DNA, 25 bp, Homo sapien
gttgagccagaataccagcctaggt

SEQ ID NO: 2362485 - DNA, 25 bp, Homo sapien
taagcatagggtgaccagtcgtccc

SEQ ID NO: 2362486 - DNA, 25 bp, Homo sapien
tcagccccagtaaaccaggttggcc

SEQ ID NO: 2362487 - DNA, 25 bp, Homo sapien
catggcacccggtaaatatgtggca

SEQ ID NO: 2362488 - DNA, 25 bp, Homo sapien
ttgaacatcctttttgtctgacccc

SEQ ID NO: 2362489 - DNA, 25 bp, Homo sapien
ttttgaatctatccccttgttgcac

SEQ ID NO: 2362490 - DNA, 25 bp, Homo sapien
ctgagacgataggtgtgcatcatca

SEQ ID NO: 2362491 - DNA, 25 bp, Homo sapien
tgccttccaggaacagagaactgcc

SEQ ID NO: 2362492 - DNA, 25 bp, Homo sapien
tgacagcctacctgaagaactgggc

SEQ ID NO: 2362493 - DNA, 25 bp, Homo sapien
gagagtcctccagataaagtacccc

SEQ ID NO: 2362494 - DNA, 25 bp, Homo sapien
gcccgagtttacacagccgctaagt

SEQ ID NO: 2362495 - DNA, 25 bp, Homo sapien
catatagtaattgctgatgtgctgg

SEQ ID NO: 2362496 - DNA, 25 bp, Homo sapien
gatgtgctggagctcaccgttcagc

SEQ ID NO: 2362497 - DNA, 25 bp, Homo sapien
cattatttcatgtgcctggacttga

SEQ ID NO: 2362498 - DNA, 25 bp, Homo sapien
tgctgctaagctactcctttttcct

SEQ ID NO: 2362499 - DNA, 25 bp, Homo sapien
ttgcttcaatcttggaaggcaactt

SEQ ID NO: 2362500 - DNA, 25 bp, Homo sapien
ccattgggaccacgaagggaattct

SEQ ID NO: 2362501 - DNA, 25 bp, Homo sapien
cagatttgtcaaccagcgataggcc

SEQ ID NO: 2362502 - DNA, 25 bp, Homo sapien
gaaacgtctgtatgcagggagccag

SEQ ID NO: 2362503 - DNA, 25 bp, Homo sapien
taattctgattgtgtcgtgcccaag

SEQ ID NO: 2362504 - DNA, 25 bp, Homo sapien
ctggaagtcaaagccaagtcagtct

SEQ ID NO: 2362505 - DNA, 25 bp, Homo sapien
tttgttcccctgatgcgttagagca

SEQ ID NO: 2362506 - DNA, 25 bp, Homo sapien
tcaatggactcctgcccagtttcag

SEQ ID NO: 2362507 - DNA, 25 bp, Homo sapien
agacctcaatgagcttgtgccactg

SEQ ID NO: 2362508 - DNA, 25 bp, Homo sapien
taccctatgagtggaagaaccagag

SEQ ID NO: 2362509 - DNA, 25 bp, Homo sapien
aactgaagtgcaacaatgaagcagc

SEQ ID NO: 2362510 - DNA, 25 bp, Homo sapien
catggtcagcgttccctggtgggca

SEQ ID NO: 2362511 - DNA, 25 bp, Homo sapien
ggtgataccagagcaatacagctac

SEQ ID NO: 2362512 - DNA, 25 bp, Homo sapien
tagacctgttagatagcccttcact

SEQ ID NO: 2362513 - DNA, 25 bp, Homo sapien
gaaatcatgagaactgggagcactg

SEQ ID NO: 2362514 - DNA, 25 bp, Homo sapien
tgttgaggcatgataccacctagct

SEQ ID NO: 2362515 - DNA, 25 bp, Homo sapien
tagctgattgagcatgctgcagacc

SEQ ID NO: 2362516 - DNA, 25 bp, Homo sapien
caaaatagtcatgcttgggaaaatg

SEQ ID NO: 2362517 - DNA, 25 bp, Homo sapien
cactgggctgtaggattttgatgga

SEQ ID NO: 2362518 - DNA, 25 bp, Homo sapien
tacatgtgtcggaaggaaatagatc

SEQ ID NO: 2362519 - DNA, 25 bp, Homo sapien
gatcagttgtctaaatcaaaatagt

SEQ ID NO: 2362520 - DNA, 25 bp, Homo sapien
gtcatttttgggtgtttcttgcaga

SEQ ID NO: 2362521 - DNA, 25 bp, Homo sapien
ttggtcatttttgggtgtttcttgc

SEQ ID NO: 2362522 - DNA, 25 bp, Homo sapien
gtacacagcaaaatgaagtctccca

SEQ ID NO: 2362523 - DNA, 25 bp, Homo sapien
tagtacacagcaaaatgaagtctcc

SEQ ID NO: 2362524 - DNA, 25 bp, Homo sapien
tttacaacttaggaaacaggctcag

SEQ ID NO: 2362525 - DNA, 25 bp, Homo sapien
taatgacaggcctgtgagcatggcc

SEQ ID NO: 2362526 - DNA, 25 bp, Homo sapien
tgtatccgcacagtaagccatgagt

SEQ ID NO: 2362527 - DNA, 25 bp, Homo sapien
caaccctgaagagggcagagagcca

SEQ ID NO: 2362528 - DNA, 25 bp, Homo sapien
ctttcacacataatgatatcttggg

SEQ ID NO: 2362529 - DNA, 25 bp, Homo sapien
ttttgaatcactataatgtagtttt

SEQ ID NO: 2362530 - DNA, 25 bp, Homo sapien
tgaatcactataatgtagtttttat

SEQ ID NO: 2362531 - DNA, 25 bp, Homo sapien
atcactataatgtagtttttatctc

SEQ ID NO: 2362532 - DNA, 25 bp, Homo sapien
cactataatgtagtttttatctctt

SEQ ID NO: 2362533 - DNA, 25 bp, Homo sapien
tctgaatataaaatgattgggcagg

SEQ ID NO: 2362534 - DNA, 25 bp, Homo sapien
tataaaatgattgggcagggacagt

SEQ ID NO: 2362535 - DNA, 25 bp, Homo sapien
gaatataaaatgattgggcagggac

SEQ ID NO: 2362536 - DNA, 25 bp, Homo sapien
attgggcagggacagtgcctcacac

SEQ ID NO: 2362537 - DNA, 25 bp, Homo sapien
cggcccgcaggcctgacagggctct

SEQ ID NO: 2362538 - DNA, 25 bp, Homo sapien
gggctctgacagtggtttttaccat

SEQ ID NO: 2362539 - DNA, 25 bp, Homo sapien
gcaggcagcctttgtgcgtttcctt

SEQ ID NO: 2362540 - DNA, 25 bp, Homo sapien
ggcagcctttgtgcgtttccttggc

SEQ ID NO: 2362541 - DNA, 25 bp, Homo sapien
tgccctggcagatgatggtttccac

SEQ ID NO: 2362542 - DNA, 25 bp, Homo sapien
ccctggcagatgatggtttccaccc

SEQ ID NO: 2362543 - DNA, 25 bp, Homo sapien
tggcagatgatggtttccaccccac

SEQ ID NO: 2362544 - DNA, 25 bp, Homo sapien
gaatgtgtgccctggcagatgatgg

SEQ ID NO: 2362545 - DNA, 25 bp, Homo sapien
tgccaagtgtatgggccgtgaaaag

SEQ ID NO: 2362546 - DNA, 25 bp, Homo sapien
aactgccaagtgtatgggccgtgaa

SEQ ID NO: 2362547 - DNA, 25 bp, Homo sapien
tcaactgccaagtgtatgggccgtg

SEQ ID NO: 2362548 - DNA, 25 bp, Homo sapien
ctgccaagtgtatgggccgtgaaaa

SEQ ID NO: 2362549 - DNA, 25 bp, Homo sapien
gccagtgtcctgacatgtcgtggga

SEQ ID NO: 2362550 - DNA, 25 bp, Homo sapien
aatagattgtctgatgcctggagca

SEQ ID NO: 2362551 - DNA, 25 bp, Homo sapien
tagattgtctgatgcctggagcacc

SEQ ID NO: 2362552 - DNA, 25 bp, Homo sapien
cctgacatgtcgtgggatgcccatt

SEQ ID NO: 2362553 - DNA, 25 bp, Homo sapien
tttaatgcgctattgtcattaaata

SEQ ID NO: 2362554 - DNA, 25 bp, Homo sapien
tcctttaatgcgctattgtcattaa

SEQ ID NO: 2362555 - DNA, 25 bp, Homo sapien
ctcatcctttaatgcgctattgtca

SEQ ID NO: 2362556 - DNA, 25 bp, Homo sapien
aaggtagccattgaaaaagctgttt

SEQ ID NO: 2362557 - DNA, 25 bp, Homo sapien
tttcccacatattcaggttgtgcat

SEQ ID NO: 2362558 - DNA, 25 bp, Homo sapien
atattcaggttgtgcatgtattaaa

SEQ ID NO: 2362559 - DNA, 25 bp, Homo sapien
ccacatattcaggttgtgcatgtat

SEQ ID NO: 2362560 - DNA, 25 bp, Homo sapien
tcccacatattcaggttgtgcatgt

SEQ ID NO: 2362561 - DNA, 25 bp, Homo sapien
ggggggaattcttctaatttcatca

SEQ ID NO: 2362562 - DNA, 25 bp, Homo sapien
gggggaattcttctaatttcatcat

SEQ ID NO: 2362563 - DNA, 25 bp, Homo sapien
ccatggctgctttttggcggtatca

SEQ ID NO: 2362564 - DNA, 25 bp, Homo sapien
catggctgctttttggcggtatcat

SEQ ID NO: 2362565 - DNA, 25 bp, Homo sapien
ggccttgggatctttcgtagcatat

SEQ ID NO: 2362566 - DNA, 25 bp, Homo sapien
gatctttcgtagcatattccatggc

SEQ ID NO: 2362567 - DNA, 25 bp, Homo sapien
tctcccagcagagttatgcagtttt

SEQ ID NO: 2362568 - DNA, 25 bp, Homo sapien
tctcagctgaccacatttgggatag

SEQ ID NO: 2362569 - DNA, 25 bp, Homo sapien
gcaattgctgtaggttcaagaacaa

SEQ ID NO: 2362570 - DNA, 25 bp, Homo sapien
aaagtgaggtggcattgcttctggc

SEQ ID NO: 2362571 - DNA, 25 bp, Homo sapien
ggagaggggaagagtagtacatgga

SEQ ID NO: 2362572 - DNA, 25 bp, Homo sapien
taaaaagtccattgagataactcac

SEQ ID NO: 2362573 - DNA, 25 bp, Homo sapien
ctgactgtaaaaagtccattgagat

SEQ ID NO: 2362574 - DNA, 25 bp, Homo sapien
gtaactgactgtaaaaagtccattg

SEQ ID NO: 2362575 - DNA, 25 bp, Homo sapien
gtctaacttttctgctgggaaaggc

SEQ ID NO: 2362576 - DNA, 25 bp, Homo sapien
gctgggaaaggcaacagctgatggg

SEQ ID NO: 2362577 - DNA, 25 bp, Homo sapien
aaaggcaacagctgatgggggatat

SEQ ID NO: 2362578 - DNA, 25 bp, Homo sapien
tttctgctgggaaaggcaacagctg

SEQ ID NO: 2362579 - DNA, 25 bp, Homo sapien
ctgtattttcagctggctgcaatgg

SEQ ID NO: 2362580 - DNA, 25 bp, Homo sapien
ccgagatcctaccactgcattctag

SEQ ID NO: 2362581 - DNA, 25 bp, Homo sapien
cgagatcctaccactgcattctagc

SEQ ID NO: 2362582 - DNA, 25 bp, Homo sapien
tttcagctggctgcaatggctcacg

SEQ ID NO: 2362583 - DNA, 25 bp, Homo sapien
gactaatgcactcttatctgagggc

SEQ ID NO: 2362584 - DNA, 25 bp, Homo sapien
ctctaaacacgcaactcagcgaggg

SEQ ID NO: 2362585 - DNA, 25 bp, Homo sapien
tagaaggttgatgaatttccctacc

SEQ ID NO: 2362586 - DNA, 25 bp, Homo sapien
tgagggcagtccattctagaaggtt

SEQ ID NO: 2362587 - DNA, 25 bp, Homo sapien
gaagtttgcactgtaacatatgcca

SEQ ID NO: 2362588 - DNA, 25 bp, Homo sapien
gcattctgtcaggtgtcgggacacc

SEQ ID NO: 2362589 - DNA, 25 bp, Homo sapien
ggacacctgggcaaagacgaattca

SEQ ID NO: 2362590 - DNA, 25 bp, Homo sapien
tttgtatgcaaccttagctgatggg

SEQ ID NO: 2362591 - DNA, 25 bp, Homo sapien
tataagagggatctgtagtcgctgc

SEQ ID NO: 2362592 - DNA, 25 bp, Homo sapien
caaactatggcatgtggccccgtga

SEQ ID NO: 2362593 - DNA, 25 bp, Homo sapien
aaaggagatttcagcggcttccccg

SEQ ID NO: 2362594 - DNA, 25 bp, Homo sapien
gctgcgccaggcttgaatcaaaggt

SEQ ID NO: 2362595 - DNA, 25 bp, Homo sapien
tgagctgactctgtgcccgaatggt

SEQ ID NO: 2362596 - DNA, 25 bp, Homo sapien
ggaagggcccacctgcattgttgag

SEQ ID NO: 2362597 - DNA, 25 bp, Homo sapien
tgagacacatcgtcctgctgagagc

SEQ ID NO: 2362598 - DNA, 25 bp, Homo sapien
gatgagtagtcccacgctgttgttg

SEQ ID NO: 2362599 - DNA, 25 bp, Homo sapien
cagttgttgcagtcctgtatggtcc

SEQ ID NO: 2362600 - DNA, 25 bp, Homo sapien
catgctcctggctctagttgaaggc

SEQ ID NO: 2362601 - DNA, 25 bp, Homo sapien
cattgtaggactgctggaaactcac

SEQ ID NO: 2362602 - DNA, 25 bp, Homo sapien
gttgaaggccgtgagcagaagtccc

SEQ ID NO: 2362603 - DNA, 25 bp, Homo sapien
tgtatgaggcaatgggctaggccca

SEQ ID NO: 2362604 - DNA, 25 bp, Homo sapien
ctcttaacgggcaagtgggcagtca

SEQ ID NO: 2362605 - DNA, 25 bp, Homo sapien
ttctggcaggagtgaagcctaagcc

SEQ ID NO: 2362606 - DNA, 25 bp, Homo sapien
tgagtgtcacggtaacagtatggtc

SEQ ID NO: 2362607 - DNA, 25 bp, Homo sapien
cattgttggtgatgttgctgagttt

SEQ ID NO: 2362608 - DNA, 25 bp, Homo sapien
tgctgagtttgaaggccttagacat

SEQ ID NO: 2362609 - DNA, 25 bp, Homo sapien
ttctggacagcagaggaaacttcca

SEQ ID NO: 2362610 - DNA, 25 bp, Homo sapien
acagcagaggaaacttccattgttg

SEQ ID NO: 2362611 - DNA, 25 bp, Homo sapien
gacagtgcgatgtctcaaccacaag

SEQ ID NO: 2362612 - DNA, 25 bp, Homo sapien
aattgaggtttatgaacccacaggg

SEQ ID NO: 2362613 - DNA, 25 bp, Homo sapien
ctccctgaacccctgtgtgtacgtg

SEQ ID NO: 2362614 - DNA, 25 bp, Homo sapien
tgttgatagtataccaggcattcag

SEQ ID NO: 2362615 - DNA, 25 bp, Homo sapien
aaggggcttagatcctggtagagca

SEQ ID NO: 2362616 - DNA, 25 bp, Homo sapien
ggaggaagatgcattagctccagct

SEQ ID NO: 2362617 - DNA, 25 bp, Homo sapien
gaggaagatgcattagctccagctt

SEQ ID NO: 2362618 - DNA, 25 bp, Homo sapien
cttctgccctcgtgaaggggcttag

SEQ ID NO: 2362619 - DNA, 25 bp, Homo sapien
cagggaggcgcttgtcctgattctt

SEQ ID NO: 2362620 - DNA, 25 bp, Homo sapien
ctgctgtcctataccacagctgata

SEQ ID NO: 2362621 - DNA, 25 bp, Homo sapien
caccaggccaaaagcttccggagct

SEQ ID NO: 2362622 - DNA, 25 bp, Homo sapien
gctgatagcctcatgtagctaatta

SEQ ID NO: 2362623 - DNA, 25 bp, Homo sapien
tcaaaagaacgcctcagggctctgg

SEQ ID NO: 2362624 - DNA, 25 bp, Homo sapien
caagctcagctcgtaggtagcagtg

SEQ ID NO: 2362625 - DNA, 25 bp, Homo sapien
tgagaggcgtcatctgctgtgcaac

SEQ ID NO: 2362626 - DNA, 25 bp, Homo sapien
tgcacttagcacattgcgtgagcgt

SEQ ID NO: 2362627 - DNA, 25 bp, Homo sapien
tccagaactggggtactcagtcact

SEQ ID NO: 2362628 - DNA, 25 bp, Homo sapien
gaccccaggcatcagtgaccaggac

SEQ ID NO: 2362629 - DNA, 25 bp, Homo sapien
aggaccccaggcatcagtgaccagg

SEQ ID NO: 2362630 - DNA, 25 bp, Homo sapien
ctcagtcactacactatagctttta

SEQ ID NO: 2362631 - DNA, 25 bp, Homo sapien
gagagaccagacaactgcagtgcgg

SEQ ID NO: 2362632 - DNA, 25 bp, Homo sapien
tcctgaggggaagctcctgattctg

SEQ ID NO: 2362633 - DNA, 25 bp, Homo sapien
tgcggggacacaggatgctatttcc

SEQ ID NO: 2362634 - DNA, 25 bp, Homo sapien
cctgattctggagcgtcttgtttcc

SEQ ID NO: 2362635 - DNA, 25 bp, Homo sapien
aaggaagggttgaggcacaacatca

SEQ ID NO: 2362636 - DNA, 25 bp, Homo sapien
gaagcggtccgcgtagacctttatg

SEQ ID NO: 2362637 - DNA, 25 bp, Homo sapien
gaggccggcagccacgtcggtggtg

SEQ ID NO: 2362638 - DNA, 25 bp, Homo sapien
ggtggacagcccgatgactcctgct

SEQ ID NO: 2362639 - DNA, 25 bp, Homo sapien
tgcaggactgagtggtagcgctcat

SEQ ID NO: 2362640 - DNA, 25 bp, Homo sapien
gcctcctgtgggttgttggggtcag

SEQ ID NO: 2362641 - DNA, 25 bp, Homo sapien
tcctgtgggttgttggggtcagaaa

SEQ ID NO: 2362642 - DNA, 25 bp, Homo sapien
ctgtgggttgttggggtcagaaagg

SEQ ID NO: 2362643 - DNA, 25 bp, Homo sapien
cctcctgtgggttgttggggtcaga

SEQ ID NO: 2362644 - DNA, 25 bp, Homo sapien
acaggcccaggttttcagcgttggg

SEQ ID NO: 2362645 - DNA, 25 bp, Homo sapien
gttttcagcgttgggagaatggaca

SEQ ID NO: 2362646 - DNA, 25 bp, Homo sapien
tagcccgagattaggaacaggccca

SEQ ID NO: 2362647 - DNA, 25 bp, Homo sapien
tcatggaagaggttgtagcccgaga

SEQ ID NO: 2362648 - DNA, 25 bp, Homo sapien
ctgggggtcagcttccgaaatccca

SEQ ID NO: 2362649 - DNA, 25 bp, Homo sapien
taatctgggaacatatccagctctc

SEQ ID NO: 2362650 - DNA, 25 bp, Homo sapien
ccgtaatctgggaacatatccagct

SEQ ID NO: 2362651 - DNA, 25 bp, Homo sapien
gtcagcttccgaaatcccagaactg

SEQ ID NO: 2362652 - DNA, 25 bp, Homo sapien
tctggacaggtctgctaactcgtca

SEQ ID NO: 2362653 - DNA, 25 bp, Homo sapien
tggacaggtctgctaactcgtcagg

SEQ ID NO: 2362654 - DNA, 25 bp, Homo sapien
gacaggtctgctaactcgtcaggcc

SEQ ID NO: 2362655 - DNA, 25 bp, Homo sapien
aggtctgctaactcgtcaggcccca

SEQ ID NO: 2362656 - DNA, 25 bp, Homo sapien
ctttcagtcagccactgtagatagt

SEQ ID NO: 2362657 - DNA, 25 bp, Homo sapien
agaattaggcttgtgtggaaccagc

SEQ ID NO: 2362658 - DNA, 25 bp, Homo sapien
actccactttccgctggaagaactt

SEQ ID NO: 2362659 - DNA, 25 bp, Homo sapien
agactccactttccgctggaagaac

SEQ ID NO: 2362660 - DNA, 25 bp, Homo sapien
gactccactttccgctggaagaact

SEQ ID NO: 2362661 - DNA, 25 bp, Homo sapien
aagactccactttccgctggaagaa

SEQ ID NO: 2362662 - DNA, 25 bp, Homo sapien
gacaatcacgtctgcgccttctctt

SEQ ID NO: 2362663 - DNA, 25 bp, Homo sapien
agcccataccccagtgcagttgaca

SEQ ID NO: 2362664 - DNA, 25 bp, Homo sapien
cataccccagtgcagttgacaatca

SEQ ID NO: 2362665 - DNA, 25 bp, Homo sapien
gcagttgacaatcacgtctgcgcct

SEQ ID NO: 2362666 - DNA, 25 bp, Homo sapien
ggaattgtagatgcctctctctggg

SEQ ID NO: 2362667 - DNA, 25 bp, Homo sapien
tacggggaattgtagatgcctctct

SEQ ID NO: 2362668 - DNA, 25 bp, Homo sapien
tgatgtacggggaattgtagatgcc

SEQ ID NO: 2362669 - DNA, 25 bp, Homo sapien
cctgggatgatgtacggggaattgt

SEQ ID NO: 2362670 - DNA, 25 bp, Homo sapien
aacaacgaactcttccatcaccact

SEQ ID NO: 2362671 - DNA, 25 bp, Homo sapien
attaccatcaaccttgtcacctctg

SEQ ID NO: 2362672 - DNA, 25 bp, Homo sapien
catcaacaccaacaacgaactcttc

SEQ ID NO: 2362673 - DNA, 25 bp, Homo sapien
tcactacctcaattgccactgtcat

SEQ ID NO: 2362674 - DNA, 25 bp, Homo sapien
tagttcactccagtttcccaactgg

SEQ ID NO: 2362675 - DNA, 25 bp, Homo sapien
agccttcccaaatggtgttgtggtc

SEQ ID NO: 2362676 - DNA, 25 bp, Homo sapien
ggatattgtttagttcactccagtt

SEQ ID NO: 2362677 - DNA, 25 bp, Homo sapien
cttcccaaatggtgttgtggtcctg

SEQ ID NO: 2362678 - DNA, 25 bp, Homo sapien
tttgaaggtccagtgcgaagctgtt

SEQ ID NO: 2362679 - DNA, 25 bp, Homo sapien
ggaagccagttcgttcaccaataat

SEQ ID NO: 2362680 - DNA, 25 bp, Homo sapien
tactggccggaagccagttcgttca

SEQ ID NO: 2362681 - DNA, 25 bp, Homo sapien
tgttctctttctagccgaatctggg

SEQ ID NO: 2362682 - DNA, 25 bp, Homo sapien
ctccatggccatagttgtggatgac

SEQ ID NO: 2362683 - DNA, 25 bp, Homo sapien
caggattctcccaaagagcttggct

SEQ ID NO: 2362684 - DNA, 25 bp, Homo sapien
atccccagtggatggtgagcccgta

SEQ ID NO: 2362685 - DNA, 25 bp, Homo sapien
ggatggtggcattctggacaatttc

SEQ ID NO: 2362686 - DNA, 25 bp, Homo sapien
ctccagggcacatccccagtggatg

SEQ ID NO: 2362687 - DNA, 25 bp, Homo sapien
tccaggcactgactttgtggctttc

SEQ ID NO: 2362688 - DNA, 25 bp, Homo sapien
tctttataatgccagacccagagaa

SEQ ID NO: 2362689 - DNA, 25 bp, Homo sapien
gaagcaatggcttatgaaggagcac

SEQ ID NO: 2362690 - DNA, 25 bp, Homo sapien
gctctgggcagttggcctctttgat

SEQ ID NO: 2362691 - DNA, 25 bp, Homo sapien
tgggttaaacaacatcagatagttg

SEQ ID NO: 2362692 - DNA, 25 bp, Homo sapien
tgtgtcatggcattcatgggtgctc

SEQ ID NO: 2362693 - DNA, 25 bp, Homo sapien
tctgggcaaaagagttccatagcca

SEQ ID NO: 2362694 - DNA, 25 bp, Homo sapien
catagccagataggtttagcaagca

SEQ ID NO: 2362695 - DNA, 25 bp, Homo sapien
aggcaatcgccaccttaaagaggat

SEQ ID NO: 2362696 - DNA, 25 bp, Homo sapien
tagcaactgaaaacggagctcccat

SEQ ID NO: 2362697 - DNA, 25 bp, Homo sapien
cctgaaagtgcaaggtatgatgtgc

SEQ ID NO: 2362698 - DNA, 25 bp, Homo sapien
ccagtggctgcctgaaagtgcaagg

SEQ ID NO: 2362699 - DNA, 25 bp, Homo sapien
cagcttcccggtgctgaaaaccgga

SEQ ID NO: 2362700 - DNA, 25 bp, Homo sapien
gctttgtctcgtgggctggtcccca

SEQ ID NO: 2362701 - DNA, 25 bp, Homo sapien
gaggacttattccagctaaggcagc

SEQ ID NO: 2362702 - DNA, 25 bp, Homo sapien
catgtaagggccatgagaagggctc

SEQ ID NO: 2362703 - DNA, 25 bp, Homo sapien
cactgtataattggttttcccaaca

SEQ ID NO: 2362704 - DNA, 25 bp, Homo sapien
tactatacccgcaatggatggtttc

SEQ ID NO: 2362705 - DNA, 25 bp, Homo sapien
gaaagcctagcatttaagggcgcag

SEQ ID NO: 2362706 - DNA, 25 bp, Homo sapien
taatacattggagcttgagtaccac

SEQ ID NO: 2362707 - DNA, 25 bp, Homo sapien
tttgaatccataatcgaaaaggtac

SEQ ID NO: 2362708 - DNA, 25 bp, Homo sapien
tcgaaaaggtaccaggttgtccagc

SEQ ID NO: 2362709 - DNA, 25 bp, Homo sapien
aatccataatcgaaaaggtaccagg

SEQ ID NO: 2362710 - DNA, 25 bp, Homo sapien
cataatcgaaaaggtaccaggttgt

SEQ ID NO: 2362711 - DNA, 25 bp, Homo sapien
cctgaactttgtccactcagactca

SEQ ID NO: 2362712 - DNA, 25 bp, Homo sapien
cctctagctgatttgatggtgctca

SEQ ID NO: 2362713 - DNA, 25 bp, Homo sapien
gactcacacagcaatctcctcttga

SEQ ID NO: 2362714 - DNA, 25 bp, Homo sapien
ttcacacatcgagggcagatcttcc

SEQ ID NO: 2362715 - DNA, 25 bp, Homo sapien
ggattgcttgaagccggagttcgag

SEQ ID NO: 2362716 - DNA, 25 bp, Homo sapien
tgggttacatagcaagactctgtct

SEQ ID NO: 2362717 - DNA, 25 bp, Homo sapien
ccagcctgggttacatagcaagact

SEQ ID NO: 2362718 - DNA, 25 bp, Homo sapien
gattgcttgaagccggagttcgaga

SEQ ID NO: 2362719 - DNA, 25 bp, Homo sapien
aacacttcaaatatgcagagcttgc

SEQ ID NO: 2362720 - DNA, 25 bp, Homo sapien
caacacactctgagtaagtcactag

SEQ ID NO: 2362721 - DNA, 25 bp, Homo sapien
tcagcgctgggtcttagtgtccggt

SEQ ID NO: 2362722 - DNA, 25 bp, Homo sapien
tggcccagaggatggaccctagttt

SEQ ID NO: 2362723 - DNA, 25 bp, Homo sapien
caacagccgaaagtcgggtcaggcc

SEQ ID NO: 2362724 - DNA, 25 bp, Homo sapien
tacagatggcacacttctaggatgg

SEQ ID NO: 2362725 - DNA, 25 bp, Homo sapien
taggtcgcagaggaaggaactttaa

SEQ ID NO: 2362726 - DNA, 25 bp, Homo sapien
gagagcaatagctgacggaccacgt

SEQ ID NO: 2362727 - DNA, 25 bp, Homo sapien
aggcctgaaaccgtctcctccgcta

SEQ ID NO: 2362728 - DNA, 25 bp, Homo sapien
gccgccgccggaccgagggatacga

SEQ ID NO: 2362729 - DNA, 25 bp, Homo sapien
agggatacgacggttcccgagacag

SEQ ID NO: 2362730 - DNA, 25 bp, Homo sapien
tgcagccgcaccggaggcctgaaac

SEQ ID NO: 2362731 - DNA, 25 bp, Homo sapien
cgccgcctcggcccgggagctcagc

SEQ ID NO: 2362732 - DNA, 25 bp, Homo sapien
ccgcctcggcccgggagctcagcat

SEQ ID NO: 2362733 - DNA, 25 bp, Homo sapien
gccgcctcggcccgggagctcagca

SEQ ID NO: 2362734 - DNA, 25 bp, Homo sapien
caggaagcgctggatggccctgtcg

SEQ ID NO: 2362735 - DNA, 25 bp, Homo sapien
ggatggccctgtcggccgcggtcat

SEQ ID NO: 2362736 - DNA, 25 bp, Homo sapien
tgacggccgccccggtccgcaggaa

SEQ ID NO: 2362737 - DNA, 25 bp, Homo sapien
gaagcgctggatggccctgtcggcc

SEQ ID NO: 2362738 - DNA, 25 bp, Homo sapien
ggacaatccataagacctacctcat

SEQ ID NO: 2362739 - DNA, 25 bp, Homo sapien
aatccataagacctacctcataggg

SEQ ID NO: 2362740 - DNA, 25 bp, Homo sapien
tcaatcctggctttgctatttcatt

SEQ ID NO: 2362741 - DNA, 25 bp, Homo sapien
tggcatcacttcaccttctaagcct

SEQ ID NO: 2362742 - DNA, 25 bp, Homo sapien
tacaatggtataaaagagctgaata

SEQ ID NO: 2362743 - DNA, 25 bp, Homo sapien
tcttttagaatattagacagggaag

SEQ ID NO: 2362744 - DNA, 25 bp, Homo sapien
gaacgctggttatgcttttgctaca

SEQ ID NO: 2362745 - DNA, 25 bp, Homo sapien
gacaaaccatctatgtgtatatagc

SEQ ID NO: 2362746 - DNA, 25 bp, Homo sapien
gcagcaattccacctataactcccc

SEQ ID NO: 2362747 - DNA, 25 bp, Homo sapien
tctgtaatgggaccccaaataacat

SEQ ID NO: 2362748 - DNA, 25 bp, Homo sapien
gcaattccacctataactccccagt

SEQ ID NO: 2362749 - DNA, 25 bp, Homo sapien
tctttctgtaatgggaccccaaata

SEQ ID NO: 2362750 - DNA, 25 bp, Homo sapien
ccttgtagcagggagttcatgaagc

SEQ ID NO: 2362751 - DNA, 25 bp, Homo sapien
ccttctgatccctggagtactggga

SEQ ID NO: 2362752 - DNA, 25 bp, Homo sapien
ctttcagaaggtgcaagagtgttaa

SEQ ID NO: 2362753 - DNA, 25 bp, Homo sapien
tgaggggggctccttctgatccctg

SEQ ID NO: 2362754 - DNA, 25 bp, Homo sapien
tttcccatctaagtgctagccaacc

SEQ ID NO: 2362755 - DNA, 25 bp, Homo sapien
catctaagtgctagccaaccactac

SEQ ID NO: 2362756 - DNA, 25 bp, Homo sapien
accactacccggcttagcttccgag

SEQ ID NO: 2362757 - DNA, 25 bp, Homo sapien
taagtgctagccaaccactacccgg

SEQ ID NO: 2362758 - DNA, 25 bp, Homo sapien
cctggccacatcttaggctttgtgg

SEQ ID NO: 2362759 - DNA, 25 bp, Homo sapien
cagtcatgtaacacagctgcttttc

SEQ ID NO: 2362760 - DNA, 25 bp, Homo sapien
tcttctctggcgcatggccactgct

SEQ ID NO: 2362761 - DNA, 25 bp, Homo sapien
gcttttcttctctggcgcatggcca

SEQ ID NO: 2362762 - DNA, 25 bp, Homo sapien
gacatccaacaagcagcttgcatct

SEQ ID NO: 2362763 - DNA, 25 bp, Homo sapien
acaagcagcttgcatctaagacctc

SEQ ID NO: 2362764 - DNA, 25 bp, Homo sapien
tgccatctgtacattcttaagacat

SEQ ID NO: 2362765 - DNA, 25 bp, Homo sapien
tacattcttaagacatccaacaagc

SEQ ID NO: 2362766 - DNA, 25 bp, Homo sapien
ttttgggaggtccaagatgccgcct

SEQ ID NO: 2362767 - DNA, 25 bp, Homo sapien
acagttttgggaggtccaagatgcc

SEQ ID NO: 2362768 - DNA, 25 bp, Homo sapien
agacaacgcctacacgaagctggac

SEQ ID NO: 2362769 - DNA, 25 bp, Homo sapien
tcccatttctctggatagtggcggc

SEQ ID NO: 2362770 - DNA, 25 bp, Homo sapien
cgctcatcttccaatgacgaggtaa

SEQ ID NO: 2362771 - DNA, 25 bp, Homo sapien
aacaaatgtgtgacccgaggctggc

SEQ ID NO: 2362772 - DNA, 25 bp, Homo sapien
cgaggctggcggtctcgctcatctt

SEQ ID NO: 2362773 - DNA, 25 bp, Homo sapien
tgacatggaataattcgtgagcatc

SEQ ID NO: 2362774 - DNA, 25 bp, Homo sapien
tgtgcggcaggtaatttgtttggga

SEQ ID NO: 2362775 - DNA, 25 bp, Homo sapien
ctcttgtgcggcaggtaatttgttt

SEQ ID NO: 2362776 - DNA, 25 bp, Homo sapien
tgcggcaggtaatttgtttgggagt

SEQ ID NO: 2362777 - DNA, 25 bp, Homo sapien
cttgtgcggcaggtaatttgtttgg

SEQ ID NO: 2362778 - DNA, 25 bp, Homo sapien
gagacttccagtgattggatgtagg

SEQ ID NO: 2362779 - DNA, 25 bp, Homo sapien
tactagtgagtcttccatgaaaagg

SEQ ID NO: 2362780 - DNA, 25 bp, Homo sapien
gacttccagtgattggatgtagggt

SEQ ID NO: 2362781 - DNA, 25 bp, Homo sapien
cacagtgtttgcagaccatattact

SEQ ID NO: 2362782 - DNA, 25 bp, Homo sapien
tcatggttgacaagggtagggtgat

SEQ ID NO: 2362783 - DNA, 25 bp, Homo sapien
ctttagggggcaatgaaaatgttat

SEQ ID NO: 2362784 - DNA, 25 bp, Homo sapien
tgactgatcccggagtcagtaatgg

SEQ ID NO: 2362785 - DNA, 25 bp, Homo sapien
aaatgttataaagttgactgatccc

SEQ ID NO: 2362786 - DNA, 25 bp, Homo sapien
ctggctggtgcagctattatggaaa

SEQ ID NO: 2362787 - DNA, 25 bp, Homo sapien
ctattatggaaaattgtacggagga

SEQ ID NO: 2362788 - DNA, 25 bp, Homo sapien
agctattatggaaaattgtacggag

SEQ ID NO: 2362789 - DNA, 25 bp, Homo sapien
attatggaaaattgtacggaggagg

SEQ ID NO: 2362790 - DNA, 25 bp, Homo sapien
cggctggaatacttagtgaaaggct

SEQ ID NO: 2362791 - DNA, 25 bp, Homo sapien
tacttagtgaaaggctatcaaaggt

SEQ ID NO: 2362792 - DNA, 25 bp, Homo sapien
ccatgtggcggctggaatacttagt

SEQ ID NO: 2362793 - DNA, 25 bp, Homo sapien
tgaaaggctatcaaaggtatcaaat

SEQ ID NO: 2362794 - DNA, 25 bp, Homo sapien
cacaacatcccgcactgattctgat

SEQ ID NO: 2362795 - DNA, 25 bp, Homo sapien
aacatcccgcactgattctgatgag

SEQ ID NO: 2362796 - DNA, 25 bp, Homo sapien
ttgtcacacacaacatcccgcactg

SEQ ID NO: 2362797 - DNA, 25 bp, Homo sapien
tcccgcactgattctgatgagatga

SEQ ID NO: 2362798 - DNA, 25 bp, Homo sapien
tatagcggcacacaattggcacttg

SEQ ID NO: 2362799 - DNA, 25 bp, Homo sapien
agcaatgcctaaaataggacagctt

SEQ ID NO: 2362800 - DNA, 25 bp, Homo sapien
gaccacagtggtgttatagcggcac

SEQ ID NO: 2362801 - DNA, 25 bp, Homo sapien
acagctttggagtgctgcagaccac

SEQ ID NO: 2362802 - DNA, 25 bp, Homo sapien
tggtcctctggtgttccaccttttc

SEQ ID NO: 2362803 - DNA, 25 bp, Homo sapien
cgttcaacgttcccttggcttcaat

SEQ ID NO: 2362804 - DNA, 25 bp, Homo sapien
aacaaagccaacagggtgtgtagtg

SEQ ID NO: 2362805 - DNA, 25 bp, Homo sapien
aagagaaatcgggagaaccgagttg

SEQ ID NO: 2362806 - DNA, 25 bp, Homo sapien
gcaggatacacggagtcctcaaaac

SEQ ID NO: 2362807 - DNA, 25 bp, Homo sapien
ccgagttgtttcaggggcaggatac

SEQ ID NO: 2362808 - DNA, 25 bp, Homo sapien
gactaggtttatgtccaaggaggtg

SEQ ID NO: 2362809 - DNA, 25 bp, Homo sapien
ttgaactgcacgtgctcatgccgct

SEQ ID NO: 2362810 - DNA, 25 bp, Homo sapien
tcatgccgcttcagaggcgtgccgt

SEQ ID NO: 2362811 - DNA, 25 bp, Homo sapien
agctcagccgctgtaggtggatgca

SEQ ID NO: 2362812 - DNA, 25 bp, Homo sapien
ggagcaggcgccattcataaaaatc

SEQ ID NO: 2362813 - DNA, 25 bp, Homo sapien
aggcgccattcataaaaatctgtgt

SEQ ID NO: 2362814 - DNA, 25 bp, Homo sapien
gcatcggcgctgacagcgttggcaa

SEQ ID NO: 2362815 - DNA, 25 bp, Homo sapien
gctgacagcgttggcaataaagatg

SEQ ID NO: 2362816 - DNA, 25 bp, Homo sapien
tctccatggtggacgacaactgcca

SEQ ID NO: 2362817 - DNA, 25 bp, Homo sapien
tgccatcagccggaagaggtatgtg

SEQ ID NO: 2362818 - DNA, 25 bp, Homo sapien
caaagtgtccagagtgcatgtctcc

SEQ ID NO: 2362819 - DNA, 25 bp, Homo sapien
gcatcctggaaaggacgcgctcgta

SEQ ID NO: 2362820 - DNA, 25 bp, Homo sapien
gaaaacggtggcttcaagaatctga

SEQ ID NO: 2362821 - DNA, 25 bp, Homo sapien
gacagtgcagacagtgccatcagct

SEQ ID NO: 2362822 - DNA, 25 bp, Homo sapien
tcttagaacacaccagaaggctgga

SEQ ID NO: 2362823 - DNA, 25 bp, Homo sapien
tagacaaaggtacctcccctctgag

SEQ ID NO: 2362824 - DNA, 25 bp, Homo sapien
gacggaccgtacagttcaagctgcc

SEQ ID NO: 2362825 - DNA, 25 bp, Homo sapien
gggcatttgttccaccagacttggg

SEQ ID NO: 2362826 - DNA, 25 bp, Homo sapien
tgaaagtaaccgtccacagtggatc

SEQ ID NO: 2362827 - DNA, 25 bp, Homo sapien
caggtgtcaactcagggcagggatt

SEQ ID NO: 2362828 - DNA, 25 bp, Homo sapien
gctgaggaggcagcgaacgcgcgcc

SEQ ID NO: 2362829 - DNA, 25 bp, Homo sapien
ctgtggcggtcagcaattggcgcca

SEQ ID NO: 2362830 - DNA, 25 bp, Homo sapien
cggtcagcaattggcgccaagcggc

SEQ ID NO: 2362831 - DNA, 25 bp, Homo sapien
aaccggcgaggctagccctggctgt

SEQ ID NO: 2362832 - DNA, 25 bp, Homo sapien
cagccacgccggtcccctggacggc

SEQ ID NO: 2362833 - DNA, 25 bp, Homo sapien
gagtagagcgtcttctggccgatca

SEQ ID NO: 2362834 - DNA, 25 bp, Homo sapien
ggagaaaaaggagtagagcgtcttc

SEQ ID NO: 2362835 - DNA, 25 bp, Homo sapien
aaggagtagagcgtcttctggccga

SEQ ID NO: 2362836 - DNA, 25 bp, Homo sapien
tagccccggcccaagccgcgcctca

SEQ ID NO: 2362837 - DNA, 25 bp, Homo sapien
agccccggcccaagccgcgcctcac

SEQ ID NO: 2362838 - DNA, 25 bp, Homo sapien
ctagccccggcccaagccgcgcctc

SEQ ID NO: 2362839 - DNA, 25 bp, Homo sapien
gcggcggctattttgaacacgtgga

SEQ ID NO: 2362840 - DNA, 25 bp, Homo sapien
tgggccccgagacgcgttcccattg

SEQ ID NO: 2362841 - DNA, 25 bp, Homo sapien
gcggattggcgccatgggccccgag

SEQ ID NO: 2362842 - DNA, 25 bp, Homo sapien
attggctggccctttagcatggcgg

SEQ ID NO: 2362843 - DNA, 25 bp, Homo sapien
tgggaattaggttctaaactggagc

SEQ ID NO: 2362844 - DNA, 25 bp, Homo sapien
gcaaaagcggacagtaagagcccag

SEQ ID NO: 2362845 - DNA, 25 bp, Homo sapien
gagcgtcgcggtgactgggaaccct

SEQ ID NO: 2362846 - DNA, 25 bp, Homo sapien
cttcccgaggagcgtcgcggtgact

SEQ ID NO: 2362847 - DNA, 25 bp, Homo sapien
ccccacggcccaaggcagaagacgc

SEQ ID NO: 2362848 - DNA, 25 bp, Homo sapien
cccacggcccaaggcagaagacgcc

SEQ ID NO: 2362849 - DNA, 25 bp, Homo sapien
ccacggcccaaggcagaagacgccc

SEQ ID NO: 2362850 - DNA, 25 bp, Homo sapien
ctgcaagtggtccccgcagaggcgg

SEQ ID NO: 2362851 - DNA, 25 bp, Homo sapien
ttgcgggccgcgagtctgagcaggg

SEQ ID NO: 2362852 - DNA, 25 bp, Homo sapien
tctggatccggtccaactgctcggc

SEQ ID NO: 2362853 - DNA, 25 bp, Homo sapien
cgaactccccgctgaggtgcttctt

SEQ ID NO: 2362854 - DNA, 25 bp, Homo sapien
gctcggcactcagcggcgaggaggg

SEQ ID NO: 2362855 - DNA, 25 bp, Homo sapien
taaaatcagattctcattggaaacc

SEQ ID NO: 2362856 - DNA, 25 bp, Homo sapien
aagaaagcttctagtgcaagttatt

SEQ ID NO: 2362857 - DNA, 25 bp, Homo sapien
agttctttgtcatgttatgtccaaa

SEQ ID NO: 2362858 - DNA, 25 bp, Homo sapien
caagttatttggaacatcattagtt

SEQ ID NO: 2362859 - DNA, 25 bp, Homo sapien
ggtgtgggggtggataaacagtgta

SEQ ID NO: 2362860 - DNA, 25 bp, Homo sapien
ggataaacagtgtaatgctttcttt

SEQ ID NO: 2362861 - DNA, 25 bp, Homo sapien
ttttatgtcacacatctgggtccag

SEQ ID NO: 2362862 - DNA, 25 bp, Homo sapien
tgggtccaggtgaagacttggtgtg

SEQ ID NO: 2362863 - DNA, 25 bp, Homo sapien
cccgtgagcttgattaggtccatga

SEQ ID NO: 2362864 - DNA, 25 bp, Homo sapien
ttgaacactaaagcagagcccgtga

SEQ ID NO: 2362865 - DNA, 25 bp, Homo sapien
gattaggtccatgatatggatcctg

SEQ ID NO: 2362866 - DNA, 25 bp, Homo sapien
cagagcccgtgagcttgattaggtc

SEQ ID NO: 2362867 - DNA, 25 bp, Homo sapien
caggatgaacaaaatcctctatgtc

SEQ ID NO: 2362868 - DNA, 25 bp, Homo sapien
gtctgtagacaactctttataaatg

SEQ ID NO: 2362869 - DNA, 25 bp, Homo sapien
atggccaggatgaacaaaatcctct

SEQ ID NO: 2362870 - DNA, 25 bp, Homo sapien
caaaatcctctatgtctgtagacaa

SEQ ID NO: 2362871 - DNA, 25 bp, Homo sapien
cgaaccgtgaggacagcgttgagaa

SEQ ID NO: 2362872 - DNA, 25 bp, Homo sapien
cttgatgggcacgaaccgtgaggac

SEQ ID NO: 2362873 - DNA, 25 bp, Homo sapien
gcacgaaccgtgaggacagcgttga

SEQ ID NO: 2362874 - DNA, 25 bp, Homo sapien
ttgatgggcacgaaccgtgaggaca

SEQ ID NO: 2362875 - DNA, 25 bp, Homo sapien
cagcctcgctccttatgagagttgg

SEQ ID NO: 2362876 - DNA, 25 bp, Homo sapien
ggacacaactgcatcagtgaactgc

SEQ ID NO: 2362877 - DNA, 25 bp, Homo sapien
aaggccattcgagttctgatttagc

SEQ ID NO: 2362878 - DNA, 25 bp, Homo sapien
tctgagcataagagccccagagcaa

SEQ ID NO: 2362879 - DNA, 25 bp, Homo sapien
taccctcagtagctgtaccacagag

SEQ ID NO: 2362880 - DNA, 25 bp, Homo sapien
caataccgcccagcttatgaagtta

SEQ ID NO: 2362881 - DNA, 25 bp, Homo sapien
ctccaggcaagatcaggtgagggcc

SEQ ID NO: 2362882 - DNA, 25 bp, Homo sapien
tcagcctagggatcggagtgcaaag

SEQ ID NO: 2362883 - DNA, 25 bp, Homo sapien
cttccagtcaatgggcttcttgcca

SEQ ID NO: 2362884 - DNA, 25 bp, Homo sapien
aaagaaccctctatacactgacaaa

SEQ ID NO: 2362885 - DNA, 25 bp, Homo sapien
gagggatgagccgtctgtagtacat

SEQ ID NO: 2362886 - DNA, 25 bp, Homo sapien
gatgagccgtctgtagtacatggtg

SEQ ID NO: 2362887 - DNA, 25 bp, Homo sapien
tctgcatattttaggccgaagccat

SEQ ID NO: 2362888 - DNA, 25 bp, Homo sapien
ggcaaatacgttaacagcagcttct

SEQ ID NO: 2362889 - DNA, 25 bp, Homo sapien
tggaacttcgtaactggcaaatacg

SEQ ID NO: 2362890 - DNA, 25 bp, Homo sapien
tgtggttggatacagctgccattcc

SEQ ID NO: 2362891 - DNA, 25 bp, Homo sapien
gtctcttatctgataaagctcacag

SEQ ID NO: 2362892 - DNA, 25 bp, Homo sapien
ccagcttacttctctcggtctctta

SEQ ID NO: 2362893 - DNA, 25 bp, Homo sapien
tctctcggtctcttatctgataaag

SEQ ID NO: 2362894 - DNA, 25 bp, Homo sapien
caagacccagcttacttctctcggt

SEQ ID NO: 2362895 - DNA, 25 bp, Homo sapien
caaacctcgcgtagagccaactcta

SEQ ID NO: 2362896 - DNA, 25 bp, Homo sapien
ggtgcagacccaataaagaccgtct

SEQ ID NO: 2362897 - DNA, 25 bp, Homo sapien
tatctgcatgagtacttcttaaaaa

SEQ ID NO: 2362898 - DNA, 25 bp, Homo sapien
tttattaacaaacctcgcgtagagc

SEQ ID NO: 2362899 - DNA, 25 bp, Homo sapien
ctcctgcagacggtggttgctatgg

SEQ ID NO: 2362900 - DNA, 25 bp, Homo sapien
ctggcagccggtgctccacggtgct

SEQ ID NO: 2362901 - DNA, 25 bp, Homo sapien
cggtgctcggagttggggcgctgct

SEQ ID NO: 2362902 - DNA, 25 bp, Homo sapien
gcccagcgctcaccgcagccagggg

SEQ ID NO: 2362903 - DNA, 25 bp, Homo sapien
cacagggcttggcagaacgtagcca

SEQ ID NO: 2362904 - DNA, 25 bp, Homo sapien
ggcacgccatgttccccgaagaaat

SEQ ID NO: 2362905 - DNA, 25 bp, Homo sapien
tctcggagtctagaaacactggctg

SEQ ID NO: 2362906 - DNA, 25 bp, Homo sapien
gaaatgccttcctcaggccgttagt

SEQ ID NO: 2362907 - DNA, 25 bp, Homo sapien
ctgcgggccagtgcgtcatcaggga

SEQ ID NO: 2362908 - DNA, 25 bp, Homo sapien
gccagtgcgtcatcagggagtcttc

SEQ ID NO: 2362909 - DNA, 25 bp, Homo sapien
tgggctgcgggccagtgcgtcatca

SEQ ID NO: 2362910 - DNA, 25 bp, Homo sapien
gggccagtgcgtcatcagggagtct

SEQ ID NO: 2362911 - DNA, 25 bp, Homo sapien
agatcatcctgacagcccccactac

SEQ ID NO: 2362912 - DNA, 25 bp, Homo sapien
acagatcatcctgacagcccccact

SEQ ID NO: 2362913 - DNA, 25 bp, Homo sapien
cagatcatcctgacagcccccacta

SEQ ID NO: 2362914 - DNA, 25 bp, Homo sapien
ccacagatcatcctgacagccccca

SEQ ID NO: 2362915 - DNA, 25 bp, Homo sapien
atcctcctcccgtgaaagccagctt

SEQ ID NO: 2362916 - DNA, 25 bp, Homo sapien
gggcaaatcgaccatgcatcctcct

SEQ ID NO: 2362917 - DNA, 25 bp, Homo sapien
atgcatcctcctcccgtgaaagcca

SEQ ID NO: 2362918 - DNA, 25 bp, Homo sapien
cagagggcaaatcgaccatgcatcc

SEQ ID NO: 2362919 - DNA, 25 bp, Homo sapien
gagttgcctagtttctaaagaatca

SEQ ID NO: 2362920 - DNA, 25 bp, Homo sapien
aatttttggagggtcatggacccag

SEQ ID NO: 2362921 - DNA, 25 bp, Homo sapien
tgagttgcctagtttctaaagaatc

SEQ ID NO: 2362922 - DNA, 25 bp, Homo sapien
gctgagttgcctagtttctaaagaa

SEQ ID NO: 2362923 - DNA, 25 bp, Homo sapien
ggttccagatgcctgttttccaata

SEQ ID NO: 2362924 - DNA, 25 bp, Homo sapien
gctgacccagccgttgctgcctttt

SEQ ID NO: 2362925 - DNA, 25 bp, Homo sapien
ggctcctcagtgttgaatgctcttg

SEQ ID NO: 2362926 - DNA, 25 bp, Homo sapien
ttgttcccaccgcactgacagtgag

SEQ ID NO: 2362927 - DNA, 25 bp, Homo sapien
aattccaaaagctgtcagagatctc

SEQ ID NO: 2362928 - DNA, 25 bp, Homo sapien
tggacgtttccagtacaacatttgc

SEQ ID NO: 2362929 - DNA, 25 bp, Homo sapien
aataactgacttccttgtgttacca

SEQ ID NO: 2362930 - DNA, 25 bp, Homo sapien
gacgtttccagtacaacatttgcta

SEQ ID NO: 2362931 - DNA, 25 bp, Homo sapien
tccccaccgtgcattcagggttaca

SEQ ID NO: 2362932 - DNA, 25 bp, Homo sapien
tccttgtttgctgagggcctgaatc

SEQ ID NO: 2362933 - DNA, 25 bp, Homo sapien
cattcagggttacattttccaggtt

SEQ ID NO: 2362934 - DNA, 25 bp, Homo sapien
ccgcttttctcttgccatgtcctcc

SEQ ID NO: 2362935 - DNA, 25 bp, Homo sapien
tgcacggctgttgaacccctgctgg

SEQ ID NO: 2362936 - DNA, 25 bp, Homo sapien
acggctgttgaacccctgctggctg

SEQ ID NO: 2362937 - DNA, 25 bp, Homo sapien
gcacaggcatctgcacggctgttga

SEQ ID NO: 2362938 - DNA, 25 bp, Homo sapien
gcatctgcacggctgttgaacccct

SEQ ID NO: 2362939 - DNA, 25 bp, Homo sapien
gatgtggtgaatctgccatcccaag

SEQ ID NO: 2362940 - DNA, 25 bp, Homo sapien
cctgaatggttccagatcggcccct

SEQ ID NO: 2362941 - DNA, 25 bp, Homo sapien
gagccgtttttccacctccaatgga

SEQ ID NO: 2362942 - DNA, 25 bp, Homo sapien
gtggcacaattgtaactgacagcag

SEQ ID NO: 2362943 - DNA, 25 bp, Homo sapien
taccctattggattggtggaatcag

SEQ ID NO: 2362944 - DNA, 25 bp, Homo sapien
cctattggattggtggaatcagagc

SEQ ID NO: 2362945 - DNA, 25 bp, Homo sapien
accctattggattggtggaatcaga

SEQ ID NO: 2362946 - DNA, 25 bp, Homo sapien
ctaccctattggattggtggaatca

SEQ ID NO: 2362947 - DNA, 25 bp, Homo sapien
cgtcactggggatgcagccaccagc

SEQ ID NO: 2362948 - DNA, 25 bp, Homo sapien
actggggatgcagccaccagctcca

SEQ ID NO: 2362949 - DNA, 25 bp, Homo sapien
ctggggatgcagccaccagctccat

SEQ ID NO: 2362950 - DNA, 25 bp, Homo sapien
tcactggggatgcagccaccagctc

SEQ ID NO: 2362951 - DNA, 25 bp, Homo sapien
gcccaacaagcctcgggagactgtt

SEQ ID NO: 2362952 - DNA, 25 bp, Homo sapien
ttacaactagcatagaagcccaaca

SEQ ID NO: 2362953 - DNA, 25 bp, Homo sapien
ggaagggcgccatcatccccagtgt

SEQ ID NO: 2362954 - DNA, 25 bp, Homo sapien
cctggtatgcaatgagggcttacaa

SEQ ID NO: 2362955 - DNA, 25 bp, Homo sapien
caagatagacaaagaagcaagacca

SEQ ID NO: 2362956 - DNA, 25 bp, Homo sapien
aggtcagacaggagaaaatcagaca

SEQ ID NO: 2362957 - DNA, 25 bp, Homo sapien
accaggaaaaggtcagacaggagaa

SEQ ID NO: 2362958 - DNA, 25 bp, Homo sapien
gagaaaatcagacaagatagacaaa

SEQ ID NO: 2362959 - DNA, 25 bp, Homo sapien
tcttggtgatcggcttggagtccgt

SEQ ID NO: 2362960 - DNA, 25 bp, Homo sapien
cttggtgatcggcttggagtccgtc

SEQ ID NO: 2362961 - DNA, 25 bp, Homo sapien
ttggtgatcggcttggagtccgtca

SEQ ID NO: 2362962 - DNA, 25 bp, Homo sapien
tggtgatcggcttggagtccgtcat

SEQ ID NO: 2362963 - DNA, 25 bp, Homo sapien
cagaccttgtgtcccagtcccgttg

SEQ ID NO: 2362964 - DNA, 25 bp, Homo sapien
ggtgtctcccctgagttatcagagg

SEQ ID NO: 2362965 - DNA, 25 bp, Homo sapien
tagggagtttctccgccgaccggca

SEQ ID NO: 2362966 - DNA, 25 bp, Homo sapien
tgtcttgggcagagtgtggccctcc

SEQ ID NO: 2362967 - DNA, 25 bp, Homo sapien
caacagagtcctcgtcggaggagta

SEQ ID NO: 2362968 - DNA, 25 bp, Homo sapien
cacgagatgagccagcaacagagtc

SEQ ID NO: 2362969 - DNA, 25 bp, Homo sapien
ggaggagtagtcatcaaaagagccc

SEQ ID NO: 2362970 - DNA, 25 bp, Homo sapien
ccttccgggtagactcacgagatga

SEQ ID NO: 2362971 - DNA, 25 bp, Homo sapien
gtggggacgcgggtctcagcttcac

SEQ ID NO: 2362972 - DNA, 25 bp, Homo sapien
agtggggacgcgggtctcagcttca

SEQ ID NO: 2362973 - DNA, 25 bp, Homo sapien
gaaagtcagtttcatggcatcgagc

SEQ ID NO: 2362974 - DNA, 25 bp, Homo sapien
aaagtcagtttcatggcatcgagcc

SEQ ID NO: 2362975 - DNA, 25 bp, Homo sapien
agaaagtcagtttcatggcatcgag

SEQ ID NO: 2362976 - DNA, 25 bp, Homo sapien
gcaaaagagtcaatgggtaaccagc

SEQ ID NO: 2362977 - DNA, 25 bp, Homo sapien
caatgggtaaccagcaaacaccagg

SEQ ID NO: 2362978 - DNA, 25 bp, Homo sapien
taccacggatcccaaagatgccaaa

SEQ ID NO: 2362979 - DNA, 25 bp, Homo sapien
ggtattactaccctgcctgtatgtg

SEQ ID NO: 2362980 - DNA, 25 bp, Homo sapien
ctacacccaaaactgcttgggtgtt

SEQ ID NO: 2362981 - DNA, 25 bp, Homo sapien
acacccaaaactgcttgggtgttga

SEQ ID NO: 2362982 - DNA, 25 bp, Homo sapien
tacacccaaaactgcttgggtgttg

SEQ ID NO: 2362983 - DNA, 25 bp, Homo sapien
cacccaaaactgcttgggtgttgac

SEQ ID NO: 2362984 - DNA, 25 bp, Homo sapien
gtcgcgacccggaggccgagatgca

SEQ ID NO: 2362985 - DNA, 25 bp, Homo sapien
gcaggccaatcccaccgggctcccg

SEQ ID NO: 2362986 - DNA, 25 bp, Homo sapien
cttaaccgcctgaagccgacccgag

SEQ ID NO: 2362987 - DNA, 25 bp, Homo sapien
gtgcagagcatgcaccccttaaccg

SEQ ID NO: 2362988 - DNA, 25 bp, Homo sapien
agatcttgcacttggcaggactcat

SEQ ID NO: 2362989 - DNA, 25 bp, Homo sapien
tttacttcgcgatcagggaaacaga

SEQ ID NO: 2362990 - DNA, 25 bp, Homo sapien
ggtccagcttcttgtgttcccgtcc

SEQ ID NO: 2362991 - DNA, 25 bp, Homo sapien
agcgggagaagccacggtaaagtct

SEQ ID NO: 2362992 - DNA, 25 bp, Homo sapien
cccaaagcgtgtgacaaactcagcg

SEQ ID NO: 2362993 - DNA, 25 bp, Homo sapien
tcttcaccaggtggagtcccgacat

SEQ ID NO: 2362994 - DNA, 25 bp, Homo sapien
atggagcgcatgcacttcacggcgg

SEQ ID NO: 2362995 - DNA, 25 bp, Homo sapien
tcgttgcggaacatctcataggccc

SEQ ID NO: 2362996 - DNA, 25 bp, Homo sapien
ctgcgttggccttaaggtcctcggg

SEQ ID NO: 2362997 - DNA, 25 bp, Homo sapien
ggcaatcccgttgttggcaataagc

SEQ ID NO: 2362998 - DNA, 25 bp, Homo sapien
ttccaccacattgggcaggctgatc

SEQ ID NO: 2362999 - DNA, 25 bp, Homo sapien
tcaaaactcctggcctcaagtgatt

SEQ ID NO: 2363000 - DNA, 25 bp, Homo sapien
catgcccggcaaatttttgggaggt

SEQ ID NO: 2363001 - DNA, 25 bp, Homo sapien
ggttccaccacattgggcaggctga

SEQ ID NO: 2363002 - DNA, 25 bp, Homo sapien
ttggcaatgtccacaatcagctcca

SEQ ID NO: 2363003 - DNA, 25 bp, Homo sapien
gggacgtaatgatccgccatcttga

SEQ ID NO: 2363004 - DNA, 25 bp, Homo sapien
cagctccacgttggcatagttgttg

SEQ ID NO: 2363005 - DNA, 25 bp, Homo sapien
tagttgttgttattgggccctcctg

SEQ ID NO: 2363006 - DNA, 25 bp, Homo sapien
ttgcacagcagctccggaagtttag

SEQ ID NO: 2363007 - DNA, 25 bp, Homo sapien
cacagcagctccggaagtttagggt

SEQ ID NO: 2363008 - DNA, 25 bp, Homo sapien
acagcagctccggaagtttagggtt

SEQ ID NO: 2363009 - DNA, 25 bp, Homo sapien
tgcacagcagctccggaagtttagg

SEQ ID NO: 2363010 - DNA, 25 bp, Homo sapien
tcagacccaccggtaaggagaagca

SEQ ID NO: 2363011 - DNA, 25 bp, Homo sapien
tacatgatagtaaatgattccccta

SEQ ID NO: 2363012 - DNA, 25 bp, Homo sapien
gaatatcatgtattgatccgcactg

SEQ ID NO: 2363013 - DNA, 25 bp, Homo sapien
cacaaggacatggacataattacat

SEQ ID NO: 2363014 - DNA, 25 bp, Homo sapien
tggaggcgatcttatctcctaaggc

SEQ ID NO: 2363015 - DNA, 25 bp, Homo sapien
ggacctgtagcgtctgggcgacaac

SEQ ID NO: 2363016 - DNA, 25 bp, Homo sapien
gcgacaacggtggaggcgatcttat

SEQ ID NO: 2363017 - DNA, 25 bp, Homo sapien
tccagggcagggttgggacctgtag

SEQ ID NO: 2363018 - DNA, 25 bp, Homo sapien
atctacgtctttcacgcaacccttg

SEQ ID NO: 2363019 - DNA, 25 bp, Homo sapien
tgctgcagatcatcttctgtccact

SEQ ID NO: 2363020 - DNA, 25 bp, Homo sapien
cccttgtcataaacatcttctggga

SEQ ID NO: 2363021 - DNA, 25 bp, Homo sapien
tcttctgggacactgattctttttc

SEQ ID NO: 2363022 - DNA, 25 bp, Homo sapien
cactctcagccttccggattccctt

SEQ ID NO: 2363023 - DNA, 25 bp, Homo sapien
aaggatcgggaagtcctccgcactc

SEQ ID NO: 2363024 - DNA, 25 bp, Homo sapien
ccttcagaagctttgatcatcaatg

SEQ ID NO: 2363025 - DNA, 25 bp, Homo sapien
atcgggaagtcctccgcactctcag

SEQ ID NO: 2363026 - DNA, 25 bp, Homo sapien
ctgtcgggggaagcagagcagcctg

SEQ ID NO: 2363027 - DNA, 25 bp, Homo sapien
gtcgggggaagcagagcagcctgat

SEQ ID NO: 2363028 - DNA, 25 bp, Homo sapien
tgtcgggggaagcagagcagcctga

SEQ ID NO: 2363029 - DNA, 25 bp, Homo sapien
gcattcccatactggtcagcgagga

SEQ ID NO: 2363030 - DNA, 25 bp, Homo sapien
aaagatgggcgagcctgggatctca

SEQ ID NO: 2363031 - DNA, 25 bp, Homo sapien
tcgcgaccaaacagagacacagcat

SEQ ID NO: 2363032 - DNA, 25 bp, Homo sapien
gaggatctgaacttccaggtgacgg

SEQ ID NO: 2363033 - DNA, 25 bp, Homo sapien
tgggcggccggcagattaacatcag

SEQ ID NO: 2363034 - DNA, 25 bp, Homo sapien
tcctgactatagaggtattccactg

SEQ ID NO: 2363035 - DNA, 25 bp, Homo sapien
tcacatagcccacggtcttggccag

SEQ ID NO: 2363036 - DNA, 25 bp, Homo sapien
ggaagctgccatcctgactatagag

SEQ ID NO: 2363037 - DNA, 25 bp, Homo sapien
ggatatccttcagccggtgcagtgg

SEQ ID NO: 2363038 - DNA, 25 bp, Homo sapien
cgctggtgattctggcggcaatgac

SEQ ID NO: 2363039 - DNA, 25 bp, Homo sapien
tcgtctgggttttcgctggtgattc

SEQ ID NO: 2363040 - DNA, 25 bp, Homo sapien
gactctccatacagaagccggatat

SEQ ID NO: 2363041 - DNA, 25 bp, Homo sapien
gaaatcattactccagatatatttt

SEQ ID NO: 2363042 - DNA, 25 bp, Homo sapien
agtccggacagaaaatgcaaaatgg

SEQ ID NO: 2363043 - DNA, 25 bp, Homo sapien
ctggagtccggacagaaaatgcaaa

SEQ ID NO: 2363044 - DNA, 25 bp, Homo sapien
tgcaaaatggaagaaatcattactc

SEQ ID NO: 2363045 - DNA, 25 bp, Homo sapien
aggagaagcagtgcccaaattggga

SEQ ID NO: 2363046 - DNA, 25 bp, Homo sapien
gtagcggccacgctgaagtaacccc

SEQ ID NO: 2363047 - DNA, 25 bp, Homo sapien
ccacacgttcttgctgctccggaaa

SEQ ID NO: 2363048 - DNA, 25 bp, Homo sapien
ttgggaatccgcaaactcgtgcagg

SEQ ID NO: 2363049 - DNA, 25 bp, Homo sapien
catcaacagagttgctgcaatgatg

SEQ ID NO: 2363050 - DNA, 25 bp, Homo sapien
ttttccaaattcatgcatacatcaa

SEQ ID NO: 2363051 - DNA, 25 bp, Homo sapien
tccaaattcatgcatacatcaacag

SEQ ID NO: 2363052 - DNA, 25 bp, Homo sapien
caacagagttgctgcaatgatgtga

SEQ ID NO: 2363053 - DNA, 25 bp, Homo sapien
ggtagtcctaaagtcgcctcggatg

SEQ ID NO: 2363054 - DNA, 25 bp, Homo sapien
ttaatgaggtattccacggtagtcc

SEQ ID NO: 2363055 - DNA, 25 bp, Homo sapien
aaccacccggtgtcgatgtcgttgt

SEQ ID NO: 2363056 - DNA, 25 bp, Homo sapien
tcagcaatgaggtagtccaaccacc

SEQ ID NO: 2363057 - DNA, 25 bp, Homo sapien
ctttccagggagtgtaagaaatctg

SEQ ID NO: 2363058 - DNA, 25 bp, Homo sapien
tgaacatcgcatcggccacgttcaa

SEQ ID NO: 2363059 - DNA, 25 bp, Homo sapien
gaaatctgtcatgcacgttctgaac

SEQ ID NO: 2363060 - DNA, 25 bp, Homo sapien
caagcatgatatccggtttctccgc

SEQ ID NO: 2363061 - DNA, 25 bp, Homo sapien
attaattccacatctacgaggttca

SEQ ID NO: 2363062 - DNA, 25 bp, Homo sapien
tcagtagtgaatccgctgggaggac

SEQ ID NO: 2363063 - DNA, 25 bp, Homo sapien
ccacatctacgaggttcagtagtga

SEQ ID NO: 2363064 - DNA, 25 bp, Homo sapien
cgaggttcagtagtgaatccgctgg

SEQ ID NO: 2363065 - DNA, 25 bp, Homo sapien
atcattcagccggtgggcatcaatc

SEQ ID NO: 2363066 - DNA, 25 bp, Homo sapien
tcatgtaggtggtgtagctgttccc

SEQ ID NO: 2363067 - DNA, 25 bp, Homo sapien
gagaacgaacatggtcagagactgc

SEQ ID NO: 2363068 - DNA, 25 bp, Homo sapien
tcaatctcgatgtggcagccattca

SEQ ID NO: 2363069 - DNA, 25 bp, Homo sapien
tgtaggatcgttctccttctcaaac

SEQ ID NO: 2363070 - DNA, 25 bp, Homo sapien
catcctccactgtgtactgtgtcag

SEQ ID NO: 2363071 - DNA, 25 bp, Homo sapien
aaacacacacgtcttattgccgatg

SEQ ID NO: 2363072 - DNA, 25 bp, Homo sapien
gggatctcaggactgtaggatcgtt

SEQ ID NO: 2363073 - DNA, 25 bp, Homo sapien
tttagaagggtcatcgagctccagc

SEQ ID NO: 2363074 - DNA, 25 bp, Homo sapien
tcctgaacgttcagggtcatgatca

SEQ ID NO: 2363075 - DNA, 25 bp, Homo sapien
ttccagcacggcacctggacgcttg

SEQ ID NO: 2363076 - DNA, 25 bp, Homo sapien
tgatgtacttcacccggcctctttc

SEQ ID NO: 2363077 - DNA, 25 bp, Homo sapien
cagagcacttgggccgtggagccac

SEQ ID NO: 2363078 - DNA, 25 bp, Homo sapien
cagtttctctccgaggatgggcagt

SEQ ID NO: 2363079 - DNA, 25 bp, Homo sapien
tttccaggacgctgtggaagacctg

SEQ ID NO: 2363080 - DNA, 25 bp, Homo sapien
gacaaaagccactcatgacgttggt

SEQ ID NO: 2363081 - DNA, 25 bp, Homo sapien
ctttatgctaaaaacgggctctggc

SEQ ID NO: 2363082 - DNA, 25 bp, Homo sapien
agcggggaccacagcatcagccccc

SEQ ID NO: 2363083 - DNA, 25 bp, Homo sapien
gggaccacagcatcagcccccagcc

SEQ ID NO: 2363084 - DNA, 25 bp, Homo sapien
ctgaagcggggaccacagcatcagc

SEQ ID NO: 2363085 - DNA, 25 bp, Homo sapien
ggggaccacagcatcagcccccagc

SEQ ID NO: 2363086 - DNA, 25 bp, Homo sapien
gcagtgacgggtgccggagggtcat

SEQ ID NO: 2363087 - DNA, 25 bp, Homo sapien
cctgcggacagacttctccacaggg

SEQ ID NO: 2363088 - DNA, 25 bp, Homo sapien
cggagggtcatcatgagcttctgca

SEQ ID NO: 2363089 - DNA, 25 bp, Homo sapien
gcagcggcagtgacgggtgccggag

SEQ ID NO: 2363090 - DNA, 25 bp, Homo sapien
gtgttgatgaagaagacctctcgat

SEQ ID NO: 2363091 - DNA, 25 bp, Homo sapien
tctcgatcagccttccgctgcaggg

SEQ ID NO: 2363092 - DNA, 25 bp, Homo sapien
tgatgaagaagacctctcgatcagc

SEQ ID NO: 2363093 - DNA, 25 bp, Homo sapien
tgaagaagacctctcgatcagcctt

SEQ ID NO: 2363094 - DNA, 25 bp, Homo sapien
caaatccaagaatgctttgattcct

SEQ ID NO: 2363095 - DNA, 25 bp, Homo sapien
tcaaatccaagaatgctttgattcc

SEQ ID NO: 2363096 - DNA, 25 bp, Homo sapien
ctgtgagtttctggcacatgggaaa

SEQ ID NO: 2363097 - DNA, 25 bp, Homo sapien
tacttacacaatacaggacagggct

SEQ ID NO: 2363098 - DNA, 25 bp, Homo sapien
caagatgctaaaagactctgataca

SEQ ID NO: 2363099 - DNA, 25 bp, Homo sapien
tgggcttaaggttagcagtctatgt

SEQ ID NO: 2363100 - DNA, 25 bp, Homo sapien
ggagctccttgaaaaggaggccagt

SEQ ID NO: 2363101 - DNA, 25 bp, Homo sapien
agttgtggggaagtagacgcttcat

SEQ ID NO: 2363102 - DNA, 25 bp, Homo sapien
ttctcaggagatgcgccactgagtt

SEQ ID NO: 2363103 - DNA, 25 bp, Homo sapien
tcaagtttctcaggagatgcgccac

SEQ ID NO: 2363104 - DNA, 25 bp, Homo sapien
ctgaacacaggagtcaagtttctca

SEQ ID NO: 2363105 - DNA, 25 bp, Homo sapien
atatagccgcggatcccgctgcggt

SEQ ID NO: 2363106 - DNA, 25 bp, Homo sapien
tgttttcatatagccgcggatcccg

SEQ ID NO: 2363107 - DNA, 25 bp, Homo sapien
cactgttttcatatagccgcggatc

SEQ ID NO: 2363108 - DNA, 25 bp, Homo sapien
atagccgcggatcccgctgcggtat

SEQ ID NO: 2363109 - DNA, 25 bp, Homo sapien
caagtatcttctcaggagatccaac

SEQ ID NO: 2363110 - DNA, 25 bp, Homo sapien
agtatcttctcaggagatccaacac

SEQ ID NO: 2363111 - DNA, 25 bp, Homo sapien
gcaagtatcttctcaggagatccaa

SEQ ID NO: 2363112 - DNA, 25 bp, Homo sapien
aagtatcttctcaggagatccaaca

SEQ ID NO: 2363113 - DNA, 25 bp, Homo sapien
accatcccactggtgttggcatcag

SEQ ID NO: 2363114 - DNA, 25 bp, Homo sapien
tcacgccccccaccatcccactggt

SEQ ID NO: 2363115 - DNA, 25 bp, Homo sapien
tgggggagacaaaacaccacacaga

SEQ ID NO: 2363116 - DNA, 25 bp, Homo sapien
cacacagaggtaaagctcaggctcc

SEQ ID NO: 2363117 - DNA, 25 bp, Homo sapien
ttggccacctgtgcgtgggagaaga

SEQ ID NO: 2363118 - DNA, 25 bp, Homo sapien
gctccctgaggtttatcacacactt

SEQ ID NO: 2363119 - DNA, 25 bp, Homo sapien
tgcagtccagcacctgggacatgtc

SEQ ID NO: 2363120 - DNA, 25 bp, Homo sapien
gaactgctccctgaggtttatcaca

SEQ ID NO: 2363121 - DNA, 25 bp, Homo sapien
aggggacagaaaaagaagccaaatg

SEQ ID NO: 2363122 - DNA, 25 bp, Homo sapien
cagaaaaagaagccaaatggctttt

SEQ ID NO: 2363123 - DNA, 25 bp, Homo sapien
gacagaaaaagaagccaaatggctt

SEQ ID NO: 2363124 - DNA, 25 bp, Homo sapien
gggacagaaaaagaagccaaatggc

SEQ ID NO: 2363125 - DNA, 25 bp, Homo sapien
gcagtgctcgcttttgctcagctga

SEQ ID NO: 2363126 - DNA, 25 bp, Homo sapien
tctgagggccactttgcagtgctcg

SEQ ID NO: 2363127 - DNA, 25 bp, Homo sapien
tcagctgagtgagctcgttgaggat

SEQ ID NO: 2363128 - DNA, 25 bp, Homo sapien
aggatggagatcagctcgtccgaca

SEQ ID NO: 2363129 - DNA, 25 bp, Homo sapien
tggactccacctggttatgccgcag

SEQ ID NO: 2363130 - DNA, 25 bp, Homo sapien
ttctcggggcagaactggtggccgt

SEQ ID NO: 2363131 - DNA, 25 bp, Homo sapien
ccacctggttatgccgcagctcgta

SEQ ID NO: 2363132 - DNA, 25 bp, Homo sapien
ctggttatgccgcagctcgtaggag

SEQ ID NO: 2363133 - DNA, 25 bp, Homo sapien
ctgggacaggtctcccatcaggcac

SEQ ID NO: 2363134 - DNA, 25 bp, Homo sapien
ctcccatcaggcactgagggggtac

SEQ ID NO: 2363135 - DNA, 25 bp, Homo sapien
ggtctcccatcaggcactgaggggg

SEQ ID NO: 2363136 - DNA, 25 bp, Homo sapien
tgggacaggtctcccatcaggcact

SEQ ID NO: 2363137 - DNA, 25 bp, Homo sapien
agctggtgaagaactccgggatgac

SEQ ID NO: 2363138 - DNA, 25 bp, Homo sapien
tacagcgtgcgccaacatcgtggct

SEQ ID NO: 2363139 - DNA, 25 bp, Homo sapien
ccgtgcccagccagtgagtaagttt

SEQ ID NO: 2363140 - DNA, 25 bp, Homo sapien
cactaaaagcgatcagtgccctgca

SEQ ID NO: 2363141 - DNA, 25 bp, Homo sapien
tagaagaaagtaggcaggacgtcga

SEQ ID NO: 2363142 - DNA, 25 bp, Homo sapien
gtttgcgtgatagaagaaagtaggc

SEQ ID NO: 2363143 - DNA, 25 bp, Homo sapien
aaggacgccatgcacacgactttgt

SEQ ID NO: 2363144 - DNA, 25 bp, Homo sapien
cgaagatggttgtttccgaaagtat

SEQ ID NO: 2363145 - DNA, 25 bp, Homo sapien
gtgaacactagaactggcatggtca

SEQ ID NO: 2363146 - DNA, 25 bp, Homo sapien
tgaagagaaaaggataggatcacat

SEQ ID NO: 2363147 - DNA, 25 bp, Homo sapien
gcatggtagcggcagtgaacactag

SEQ ID NO: 2363148 - DNA, 25 bp, Homo sapien
attcaccaaggcatgtggcctaggg

SEQ ID NO: 2363149 - DNA, 25 bp, Homo sapien
aattctaccacgcaggtgccgtccg

SEQ ID NO: 2363150 - DNA, 25 bp, Homo sapien
tttgggtgggaggacggcagcatga

SEQ ID NO: 2363151 - DNA, 25 bp, Homo sapien
gtgccgtccgggagctgccggtgct

SEQ ID NO: 2363152 - DNA, 25 bp, Homo sapien
tgctgcaggctgtttaactcatagg

SEQ ID NO: 2363153 - DNA, 25 bp, Homo sapien
aacagaaacacaggccgtccctggg

SEQ ID NO: 2363154 - DNA, 25 bp, Homo sapien
agagacaggacgacagaggtcagga

SEQ ID NO: 2363155 - DNA, 25 bp, Homo sapien
cagaaacacaggccgtccctgggtg

SEQ ID NO: 2363156 - DNA, 25 bp, Homo sapien
gagacaggacgacagaggtcaggaa

SEQ ID NO: 2363157 - DNA, 25 bp, Homo sapien
catgactcttcccaatggcttgggt

SEQ ID NO: 2363158 - DNA, 25 bp, Homo sapien
tgtgccttatctcatgactcttccc

SEQ ID NO: 2363159 - DNA, 25 bp, Homo sapien
tgccaggcactgtctaaaatgctac

SEQ ID NO: 2363160 - DNA, 25 bp, Homo sapien
aatgctacatgtgccttatctcatg

SEQ ID NO: 2363161 - DNA, 25 bp, Homo sapien
catggctcccatgcgctggcacagt

SEQ ID NO: 2363162 - DNA, 25 bp, Homo sapien
tgaaggctaccatggctcccatgcg

SEQ ID NO: 2363163 - DNA, 25 bp, Homo sapien
tggtgaagtcctcgaatctcctgaa

SEQ ID NO: 2363164 - DNA, 25 bp, Homo sapien
ggagaagccgctgtccatgaagagc

SEQ ID NO: 2363165 - DNA, 25 bp, Homo sapien
gttggcgaagcaagagatgacttca

SEQ ID NO: 2363166 - DNA, 25 bp, Homo sapien
ttggcgaagcaagagatgacttcat

SEQ ID NO: 2363167 - DNA, 25 bp, Homo sapien
cctcgctgaagaggggggtgtcttt

SEQ ID NO: 2363168 - DNA, 25 bp, Homo sapien
ggagtatagggaggtgcgggcctcg

SEQ ID NO: 2363169 - DNA, 25 bp, Homo sapien
cctcggagtatagggaggtgcgggc

SEQ ID NO: 2363170 - DNA, 25 bp, Homo sapien
cttgcagtcatcctcggagtatagg

SEQ ID NO: 2363171 - DNA, 25 bp, Homo sapien
cattcagaatgtggatgggctcttc

SEQ ID NO: 2363172 - DNA, 25 bp, Homo sapien
cttggactgtacgaatgtccgtaaa

SEQ ID NO: 2363173 - DNA, 25 bp, Homo sapien
tgtccgtaaaatcggcaccagtgcc

SEQ ID NO: 2363174 - DNA, 25 bp, Homo sapien
tacgaatgtccgtaaaatcggcacc

SEQ ID NO: 2363175 - DNA, 25 bp, Homo sapien
gcaatcaagaatgtgattcgtcgga

SEQ ID NO: 2363176 - DNA, 25 bp, Homo sapien
aagaatgtgattcgtcggagtccat

SEQ ID NO: 2363177 - DNA, 25 bp, Homo sapien
tcaagaatgtgattcgtcggagtcc

SEQ ID NO: 2363178 - DNA, 25 bp, Homo sapien
tgattcgtcggagtccataatccac

SEQ ID NO: 2363179 - DNA, 25 bp, Homo sapien
ttgctctgaatgtgaaaaacttggg

SEQ ID NO: 2363180 - DNA, 25 bp, Homo sapien
catctcttgctctgaatgtgaaaaa

SEQ ID NO: 2363181 - DNA, 25 bp, Homo sapien
gctctgaatgtgaaaaacttgggaa

SEQ ID NO: 2363182 - DNA, 25 bp, Homo sapien
tgaatgtgaaaaacttgggaaattc

SEQ ID NO: 2363183 - DNA, 25 bp, Homo sapien
tggtccccgaaaagaaagcaactga

SEQ ID NO: 2363184 - DNA, 25 bp, Homo sapien
cacagcctgtggcaattctcatgaa

SEQ ID NO: 2363185 - DNA, 25 bp, Homo sapien
acagcctgtggcaattctcatgaag

SEQ ID NO: 2363186 - DNA, 25 bp, Homo sapien
gtcacagcctgtggcaattctcatg

SEQ ID NO: 2363187 - DNA, 25 bp, Homo sapien
tcacagcctgtggcaattctcatga

SEQ ID NO: 2363188 - DNA, 25 bp, Homo sapien
gttacgcatccggttaagttccagc

SEQ ID NO: 2363189 - DNA, 25 bp, Homo sapien
gatgatggcgcggatgaagaaccta

SEQ ID NO: 2363190 - DNA, 25 bp, Homo sapien
catcttgtggttggcacagggcacg

SEQ ID NO: 2363191 - DNA, 25 bp, Homo sapien
cagggcaggttccaagtgacggtaa

SEQ ID NO: 2363192 - DNA, 25 bp, Homo sapien
gaaaacgatcactcagtcagcaaat

SEQ ID NO: 2363193 - DNA, 25 bp, Homo sapien
tgcacccggccatggattacttttc

SEQ ID NO: 2363194 - DNA, 25 bp, Homo sapien
gctgaagtacaagggctccatctca

SEQ ID NO: 2363195 - DNA, 25 bp, Homo sapien
aagaaacagatccaagtgccaccag

SEQ ID NO: 2363196 - DNA, 25 bp, Homo sapien
ttattgaacgccacctccagctcgt

SEQ ID NO: 2363197 - DNA, 25 bp, Homo sapien
cagtcggtgcgcacgctggtgttat

SEQ ID NO: 2363198 - DNA, 25 bp, Homo sapien
gaagatgtggttgcagtcggtgcgc

SEQ ID NO: 2363199 - DNA, 25 bp, Homo sapien
ccatgatgacagtgggcacgaagtt

SEQ ID NO: 2363200 - DNA, 25 bp, Homo sapien
tcagcctgtagcacacggagtttcc

SEQ ID NO: 2363201 - DNA, 25 bp, Homo sapien
tctggcggatgttgatcttgacctc

SEQ ID NO: 2363202 - DNA, 25 bp, Homo sapien
tgccgtagcgcataaccatgtagcg

SEQ ID NO: 2363203 - DNA, 25 bp, Homo sapien
aggtagtagcccgactcattggtga

SEQ ID NO: 2363204 - DNA, 25 bp, Homo sapien
cccttgcttgttgccgaaggagtga

SEQ ID NO: 2363205 - DNA, 25 bp, Homo sapien
tctgggcctggaatcgcttggcctg

SEQ ID NO: 2363206 - DNA, 25 bp, Homo sapien
catagatgtaggtggttcccagggt

SEQ ID NO: 2363207 - DNA, 25 bp, Homo sapien
acgtagggagtattgatcagcatcc

SEQ ID NO: 2363208 - DNA, 25 bp, Homo sapien
ctggggagccccacagtttaaagag

SEQ ID NO: 2363209 - DNA, 25 bp, Homo sapien
tggggagccccacagtttaaagaga

SEQ ID NO: 2363210 - DNA, 25 bp, Homo sapien
gggagccccacagtttaaagagagc

SEQ ID NO: 2363211 - DNA, 25 bp, Homo sapien
ggaagtcggttcatctccaccagct

SEQ ID NO: 2363212 - DNA, 25 bp, Homo sapien
ttccaccaggaagtcggttcatctc

SEQ ID NO: 2363213 - DNA, 25 bp, Homo sapien
tgtcaggatgtctttgggatacttg

SEQ ID NO: 2363214 - DNA, 25 bp, Homo sapien
ctgagagtccaacactaattcagtg

SEQ ID NO: 2363215 - DNA, 25 bp, Homo sapien
caatacgggcgccactgttggctgc

SEQ ID NO: 2363216 - DNA, 25 bp, Homo sapien
tctccagggccaaaggatccaatgc

SEQ ID NO: 2363217 - DNA, 25 bp, Homo sapien
aattttgggaatgccctctgcccgg

SEQ ID NO: 2363218 - DNA, 25 bp, Homo sapien
gatgcccgcaggtacagaaggtcct

SEQ ID NO: 2363219 - DNA, 25 bp, Homo sapien
cctgccccgccagtttcacgacgta

SEQ ID NO: 2363220 - DNA, 25 bp, Homo sapien
ctgccccgccagtttcacgacgtac

SEQ ID NO: 2363221 - DNA, 25 bp, Homo sapien
aatacagtagtagctgagcagaatc

SEQ ID NO: 2363222 - DNA, 25 bp, Homo sapien
ttatacactacatgtacatctgtgc

SEQ ID NO: 2363223 - DNA, 25 bp, Homo sapien
ttttcacctcttgcaggtgctagca

SEQ ID NO: 2363224 - DNA, 25 bp, Homo sapien
ggtgctagcactcccactgaaaata

SEQ ID NO: 2363225 - DNA, 25 bp, Homo sapien
taatgtgaacatcgtagggatggat

SEQ ID NO: 2363226 - DNA, 25 bp, Homo sapien
taaataccgtattaataacagccat

SEQ ID NO: 2363227 - DNA, 25 bp, Homo sapien
tgagctaagctctcctctaaggact

SEQ ID NO: 2363228 - DNA, 25 bp, Homo sapien
tcaagatacactgtttaaccactat

SEQ ID NO: 2363229 - DNA, 25 bp, Homo sapien
tttagtgaggctacgaatccagttc

SEQ ID NO: 2363230 - DNA, 25 bp, Homo sapien
tagtgaggctacgaatccagttccc

SEQ ID NO: 2363231 - DNA, 25 bp, Homo sapien
aaaatactttagtgaggctacgaat

SEQ ID NO: 2363232 - DNA, 25 bp, Homo sapien
ggctacgaatccagttccctgcact

SEQ ID NO: 2363233 - DNA, 25 bp, Homo sapien
gagtcaggtacaggtatttaaatcc

SEQ ID NO: 2363234 - DNA, 25 bp, Homo sapien
tctcctccttcctcgatgtgtttac

SEQ ID NO: 2363235 - DNA, 25 bp, Homo sapien
cctcgatgtgtttacagtggacgga

SEQ ID NO: 2363236 - DNA, 25 bp, Homo sapien
tgtgtttacagtggacggagttcag

SEQ ID NO: 2363237 - DNA, 25 bp, Homo sapien
aagaaaggtacacgccacagacggt

SEQ ID NO: 2363238 - DNA, 25 bp, Homo sapien
gaaagtgctgacttactgagcgcag

SEQ ID NO: 2363239 - DNA, 25 bp, Homo sapien
ttctggatgtgtccctaaccttggc

SEQ ID NO: 2363240 - DNA, 25 bp, Homo sapien
taggaccacgattcacaatgccaaa

SEQ ID NO: 2363241 - DNA, 25 bp, Homo sapien
agagaggactccccagcaatcatgc

SEQ ID NO: 2363242 - DNA, 25 bp, Homo sapien
caagctaatggtgacgatctcttcg

SEQ ID NO: 2363243 - DNA, 25 bp, Homo sapien
tcagattctccacgcccaagccatc

SEQ ID NO: 2363244 - DNA, 25 bp, Homo sapien
catccttcccgatgatatccgtgat

SEQ ID NO: 2363245 - DNA, 25 bp, Homo sapien
tggtaccgtgcccttcttctaggaa

SEQ ID NO: 2363246 - DNA, 25 bp, Homo sapien
tgctggcagaccacgtgcatgcaga

SEQ ID NO: 2363247 - DNA, 25 bp, Homo sapien
tcgactggtaaaggaggaaagcctc

SEQ ID NO: 2363248 - DNA, 25 bp, Homo sapien
cacttggatctctcaggttgccttg

SEQ ID NO: 2363249 - DNA, 25 bp, Homo sapien
gaagttatgttttgaccaatggcaa

SEQ ID NO: 2363250 - DNA, 25 bp, Homo sapien
gcctgggcattcatgggccattgca

SEQ ID NO: 2363251 - DNA, 25 bp, Homo sapien
tttggagccaaaccacagtagaggc

SEQ ID NO: 2363252 - DNA, 25 bp, Homo sapien
gcaaaagcctattcttcaggccact

SEQ ID NO: 2363253 - DNA, 25 bp, Homo sapien
tggagagtggcgagggacccacccc

SEQ ID NO: 2363254 - DNA, 25 bp, Homo sapien
ctggagagtggcgagggacccaccc

SEQ ID NO: 2363255 - DNA, 25 bp, Homo sapien
gtggagagaggaccccctctgaatt

SEQ ID NO: 2363256 - DNA, 25 bp, Homo sapien
tgtggagagaggaccccctctgaat

SEQ ID NO: 2363257 - DNA, 25 bp, Homo sapien
ctgtggagagaggaccccctctgaa

SEQ ID NO: 2363258 - DNA, 25 bp, Homo sapien
ttgagagcacttgctcctgtgagga

SEQ ID NO: 2363259 - DNA, 25 bp, Homo sapien
tgagagcacttgctcctgtgaggat

SEQ ID NO: 2363260 - DNA, 25 bp, Homo sapien
attctccacctggatcactcgctgg

SEQ ID NO: 2363261 - DNA, 25 bp, Homo sapien
aggatgatgtgggaattctccacct

SEQ ID NO: 2363262 - DNA, 25 bp, Homo sapien
taaggacccagatagctgcaaattg

SEQ ID NO: 2363263 - DNA, 25 bp, Homo sapien
tatcagtaggaatgaaactggcttc

SEQ ID NO: 2363264 - DNA, 25 bp, Homo sapien
caccagagaccaatgggaatgttaa

SEQ ID NO: 2363265 - DNA, 25 bp, Homo sapien
taatacagggagttagatcgaccag

SEQ ID NO: 2363266 - DNA, 25 bp, Homo sapien
gacacaacatggttagcaatgtcct

SEQ ID NO: 2363267 - DNA, 25 bp, Homo sapien
ggttagcaatgtcctgcacggtgca

SEQ ID NO: 2363268 - DNA, 25 bp, Homo sapien
tagcaatgtcctgcacggtgcaggg

SEQ ID NO: 2363269 - DNA, 25 bp, Homo sapien
atggttagcaatgtcctgcacggtg

SEQ ID NO: 2363270 - DNA, 25 bp, Homo sapien
cactccaggatggtataaaccccct

SEQ ID NO: 2363271 - DNA, 25 bp, Homo sapien
cctcaaagtcatctggcacggtgat

SEQ ID NO: 2363272 - DNA, 25 bp, Homo sapien
gacaccattgtaatgcatgatctga

SEQ ID NO: 2363273 - DNA, 25 bp, Homo sapien
tgatctgaacgccacccagctggtt

SEQ ID NO: 2363274 - DNA, 25 bp, Homo sapien
gaggtgacagggacagaattagcca

SEQ ID NO: 2363275 - DNA, 25 bp, Homo sapien
gtcttccaggttctaagctgcaggg

SEQ ID NO: 2363276 - DNA, 25 bp, Homo sapien
ttagccaatgagcttaataagagtc

SEQ ID NO: 2363277 - DNA, 25 bp, Homo sapien
taataagagtcttccaggttctaag

SEQ ID NO: 2363278 - DNA, 25 bp, Homo sapien
ttctctgtcaatggggtcagtgggt

SEQ ID NO: 2363279 - DNA, 25 bp, Homo sapien
ctctggatgggaggaattcaatttc

SEQ ID NO: 2363280 - DNA, 25 bp, Homo sapien
cttcctgcaagcatccaccgggggt

SEQ ID NO: 2363281 - DNA, 25 bp, Homo sapien
atgatagggacagggctgtgattat

SEQ ID NO: 2363282 - DNA, 25 bp, Homo sapien
tcaaagaatccgctctgccacgttc

SEQ ID NO: 2363283 - DNA, 25 bp, Homo sapien
gtcaccacggtctgcgcccagggtg

SEQ ID NO: 2363284 - DNA, 25 bp, Homo sapien
cttgaaactgccgtggtcaaagaat

SEQ ID NO: 2363285 - DNA, 25 bp, Homo sapien
ttgctcgtcctgtcaccacggtctg

SEQ ID NO: 2363286 - DNA, 25 bp, Homo sapien
cttggcctcagaatccaggttggca

SEQ ID NO: 2363287 - DNA, 25 bp, Homo sapien
acagcaatcactcccacgggaatcc

SEQ ID NO: 2363288 - DNA, 25 bp, Homo sapien
gcctcagaatccaggttggcagggt

SEQ ID NO: 2363289 - DNA, 25 bp, Homo sapien
tgccacctccacagtccgtgtctcc

SEQ ID NO: 2363290 - DNA, 25 bp, Homo sapien
atgccaccggagaaccccctccagt

SEQ ID NO: 2363291 - DNA, 25 bp, Homo sapien
ggttgaagtccttgacggcctgggc

SEQ ID NO: 2363292 - DNA, 25 bp, Homo sapien
tgagtctgggaaccacacctgtcct

SEQ ID NO: 2363293 - DNA, 25 bp, Homo sapien
cctgggcggttttgtaggctgagtc

SEQ ID NO: 2363294 - DNA, 25 bp, Homo sapien
tagtggggcacctgaacaatatttt

SEQ ID NO: 2363295 - DNA, 25 bp, Homo sapien
cacagctaagatgatgatgggcaca

SEQ ID NO: 2363296 - DNA, 25 bp, Homo sapien
tgatgggcacagactaggacattag

SEQ ID NO: 2363297 - DNA, 25 bp, Homo sapien
taggacattagcatcaccacccaga

SEQ ID NO: 2363298 - DNA, 25 bp, Homo sapien
agtcacactgatccttccccaatgt

SEQ ID NO: 2363299 - DNA, 25 bp, Homo sapien
ggcaacatggcccttatcttccacc

SEQ ID NO: 2363300 - DNA, 25 bp, Homo sapien
atggcccttatcttccaccaagaca

SEQ ID NO: 2363301 - DNA, 25 bp, Homo sapien
gtcacactgatccttccccaatgtg

SEQ ID NO: 2363302 - DNA, 25 bp, Homo sapien
gccgtccacgatgtaggctccaaac

SEQ ID NO: 2363303 - DNA, 25 bp, Homo sapien
tttgtattgtctaaggccgtccacg

SEQ ID NO: 2363304 - DNA, 25 bp, Homo sapien
tacatttctatgcacagcgggttga

SEQ ID NO: 2363305 - DNA, 25 bp, Homo sapien
ggttgatggtggcatctatgaccac

SEQ ID NO: 2363306 - DNA, 25 bp, Homo sapien
gactttatcagatctttctttcgga

SEQ ID NO: 2363307 - DNA, 25 bp, Homo sapien
tctttctttcggaacttaatctcca

SEQ ID NO: 2363308 - DNA, 25 bp, Homo sapien
taagctggatcgatccttctcatgg

SEQ ID NO: 2363309 - DNA, 25 bp, Homo sapien
ccatgagcttcttgtaagctggatc

SEQ ID NO: 2363310 - DNA, 25 bp, Homo sapien
tccttgtcggagagatcaggttccc

SEQ ID NO: 2363311 - DNA, 25 bp, Homo sapien
aggtcctcgcgagcctttagccggc

SEQ ID NO: 2363312 - DNA, 25 bp, Homo sapien
ctccaggtcctttcggtccttgtcg

SEQ ID NO: 2363313 - DNA, 25 bp, Homo sapien
gagcagcaggtcctcgcgagccttt

SEQ ID NO: 2363314 - DNA, 25 bp, Homo sapien
catccggccgggtgtgtcatggaag

SEQ ID NO: 2363315 - DNA, 25 bp, Homo sapien
tggaagtcggcgaactgcaccgcca

SEQ ID NO: 2363316 - DNA, 25 bp, Homo sapien
cgggtgtgtcatggaagtcggcgaa

SEQ ID NO: 2363317 - DNA, 25 bp, Homo sapien
tccagcatccggccgggtgtgtcat

SEQ ID NO: 2363318 - DNA, 25 bp, Homo sapien
agggtgggctctttgcaccctacac

SEQ ID NO: 2363319 - DNA, 25 bp, Homo sapien
aacagggtgggctctttgcacccta

SEQ ID NO: 2363320 - DNA, 25 bp, Homo sapien
aaacagggtgggctctttgcaccct

SEQ ID NO: 2363321 - DNA, 25 bp, Homo sapien
ggaaaacagggtgggctctttgcac

SEQ ID NO: 2363322 - DNA, 25 bp, Homo sapien
ggcgcagacgccaatacaggaaggt

SEQ ID NO: 2363323 - DNA, 25 bp, Homo sapien
gtgcgtgcggtcttccactccagga

SEQ ID NO: 2363324 - DNA, 25 bp, Homo sapien
tggatatgcacgtgactcagctccc

SEQ ID NO: 2363325 - DNA, 25 bp, Homo sapien
acgaaccagcgacgcagcatggact

SEQ ID NO: 2363326 - DNA, 25 bp, Homo sapien
cctggttgttgtcccacaagtaggc

SEQ ID NO: 2363327 - DNA, 25 bp, Homo sapien
tacgtgatgttctcacggatggtgg

SEQ ID NO: 2363328 - DNA, 25 bp, Homo sapien
gtcttgaggacagagtcgtgcttca

SEQ ID NO: 2363329 - DNA, 25 bp, Homo sapien
tgcttcaggtacgtgatgttctcac

SEQ ID NO: 2363330 - DNA, 25 bp, Homo sapien
ggctgatgtgctggctcaggtatat

SEQ ID NO: 2363331 - DNA, 25 bp, Homo sapien
gatgtgctggctcaggtatatcaca

SEQ ID NO: 2363332 - DNA, 25 bp, Homo sapien
agctgggctgatgtgctggctcagg

SEQ ID NO: 2363333 - DNA, 25 bp, Homo sapien
tgtgctggctcaggtatatcacaca

SEQ ID NO: 2363334 - DNA, 25 bp, Homo sapien
gtccatggtagacagcaggtgaacg

SEQ ID NO: 2363335 - DNA, 25 bp, Homo sapien
ccatggtagacagcaggtgaacgac

SEQ ID NO: 2363336 - DNA, 25 bp, Homo sapien
tccatggtagacagcaggtgaacga

SEQ ID NO: 2363337 - DNA, 25 bp, Homo sapien
agtaactcaagtggccctccaaggg

SEQ ID NO: 2363338 - DNA, 25 bp, Homo sapien
tagtgattcactagcgccatttggg

SEQ ID NO: 2363339 - DNA, 25 bp, Homo sapien
ttaagacgggtgtcagctcggaacc

SEQ ID NO: 2363340 - DNA, 25 bp, Homo sapien
aagaaaccagaggatcacagggccc

SEQ ID NO: 2363341 - DNA, 25 bp, Homo sapien
gaactacagacacacgtcaccacag

SEQ ID NO: 2363342 - DNA, 25 bp, Homo sapien
actacagacacacgtcaccacagct

SEQ ID NO: 2363343 - DNA, 25 bp, Homo sapien
tacagacacacgtcaccacagctgg

SEQ ID NO: 2363344 - DNA, 25 bp, Homo sapien
ggaactacagacacacgtcaccaca

SEQ ID NO: 2363345 - DNA, 25 bp, Homo sapien
tactaactgcgtttcatggctgcca

SEQ ID NO: 2363346 - DNA, 25 bp, Homo sapien
taatccattgaaacaggtccgcaca

SEQ ID NO: 2363347 - DNA, 25 bp, Homo sapien
caaaggccttttcgcaacaatcatg

SEQ ID NO: 2363348 - DNA, 25 bp, Homo sapien
caatcatggtgcttgtgaaggacaa

SEQ ID NO: 2363349 - DNA, 25 bp, Homo sapien
tgcttgttcctaagaaataggctcc

SEQ ID NO: 2363350 - DNA, 25 bp, Homo sapien
gcttgttcctaagaaataggctcca

SEQ ID NO: 2363351 - DNA, 25 bp, Homo sapien
tgttcctaagaaataggctccaaga

SEQ ID NO: 2363352 - DNA, 25 bp, Homo sapien
cttgcttgttcctaagaaataggct

SEQ ID NO: 2363353 - DNA, 25 bp, Homo sapien
cctgtcgtacaatttacccttgcag

SEQ ID NO: 2363354 - DNA, 25 bp, Homo sapien
tcgtacaatttacccttgcaggaca

SEQ ID NO: 2363355 - DNA, 25 bp, Homo sapien
gtcctgtcgtacaatttacccttgc

SEQ ID NO: 2363356 - DNA, 25 bp, Homo sapien
tgtcgtacaatttacccttgcagga

SEQ ID NO: 2363357 - DNA, 25 bp, Homo sapien
gccaaggaaatcaaccttccagggc

SEQ ID NO: 2363358 - DNA, 25 bp, Homo sapien
gaaatcaaccttccagggctcaggc

SEQ ID NO: 2363359 - DNA, 25 bp, Homo sapien
ccaaggaaatcaaccttccagggct

SEQ ID NO: 2363360 - DNA, 25 bp, Homo sapien
atcaaccttccagggctcaggcaag

SEQ ID NO: 2363361 - DNA, 25 bp, Homo sapien
tcactgggcaggcaccaggcatgac

SEQ ID NO: 2363362 - DNA, 25 bp, Homo sapien
agggccagagctggttcggtcactg

SEQ ID NO: 2363363 - DNA, 25 bp, Homo sapien
gcaccaggcatgaccttcctgagca

SEQ ID NO: 2363364 - DNA, 25 bp, Homo sapien
gagctggttcggtcactgggcaggc

SEQ ID NO: 2363365 - DNA, 25 bp, Homo sapien
gtgcagacggatgtgtttcctcctc

SEQ ID NO: 2363366 - DNA, 25 bp, Homo sapien
cggatgtgtttcctcctcacgtctt

SEQ ID NO: 2363367 - DNA, 25 bp, Homo sapien
tgtgtttcctcctcacgtcttcttt

SEQ ID NO: 2363368 - DNA, 25 bp, Homo sapien
gatgtgtttcctcctcacgtcttct

SEQ ID NO: 2363369 - DNA, 25 bp, Homo sapien
cttgcggaggttgtcgacaaaggca

SEQ ID NO: 2363370 - DNA, 25 bp, Homo sapien
cagattcgctggtgtacgcgtccaa

SEQ ID NO: 2363371 - DNA, 25 bp, Homo sapien
tatatgaggttctcgctgaaacgct

SEQ ID NO: 2363372 - DNA, 25 bp, Homo sapien
atagcacaaaatcctgaaccccgac

SEQ ID NO: 2363373 - DNA, 25 bp, Homo sapien
gattccgagctcctggtatggattc

SEQ ID NO: 2363374 - DNA, 25 bp, Homo sapien
ggtggcagttcaaagaaattgaccc

SEQ ID NO: 2363375 - DNA, 25 bp, Homo sapien
agctcctggtatggattcacagaca

SEQ ID NO: 2363376 - DNA, 25 bp, Homo sapien
aattgaccccttgataaagttccat

SEQ ID NO: 2363377 - DNA, 25 bp, Homo sapien
taatgtgtaactaaccagtaatctc

SEQ ID NO: 2363378 - DNA, 25 bp, Homo sapien
ggccaatcaggcatagtgacaaaca

SEQ ID NO: 2363379 - DNA, 25 bp, Homo sapien
ctgtgaaatggctctagaaactctg

SEQ ID NO: 2363380 - DNA, 25 bp, Homo sapien
aacgtactcaagtttgtgaaaactg

SEQ ID NO: 2363381 - DNA, 25 bp, Homo sapien
tgactgggtcattgggcaggtcact

SEQ ID NO: 2363382 - DNA, 25 bp, Homo sapien
cagcagtctgtcacgggctatttgt

SEQ ID NO: 2363383 - DNA, 25 bp, Homo sapien
tttagttcagcacacatcattcggt

SEQ ID NO: 2363384 - DNA, 25 bp, Homo sapien
gcaggtcactgcaaaatactcgaga

SEQ ID NO: 2363385 - DNA, 25 bp, Homo sapien
tagtgacctccctggaactcccttc

SEQ ID NO: 2363386 - DNA, 25 bp, Homo sapien
ctccctggaactcccttcgattggt

SEQ ID NO: 2363387 - DNA, 25 bp, Homo sapien
aactcccttcgattggtccccagag

SEQ ID NO: 2363388 - DNA, 25 bp, Homo sapien
cgattggtccccagagatcgcttac

SEQ ID NO: 2363389 - DNA, 25 bp, Homo sapien
aatacaaagtgtcattcactgtcat

SEQ ID NO: 2363390 - DNA, 25 bp, Homo sapien
cttggaatacaaagtgtcattcact

SEQ ID NO: 2363391 - DNA, 25 bp, Homo sapien
tggaatacaaagtgtcattcactgt

SEQ ID NO: 2363392 - DNA, 25 bp, Homo sapien
gaatacaaagtgtcattcactgtca

SEQ ID NO: 2363393 - DNA, 25 bp, Homo sapien
tggagttgtcattccggagcgttct

SEQ ID NO: 2363394 - DNA, 25 bp, Homo sapien
tatatccatgtatttcccaaatctg

SEQ ID NO: 2363395 - DNA, 25 bp, Homo sapien
ttgtcattccggagcgttctggcat

SEQ ID NO: 2363396 - DNA, 25 bp, Homo sapien
aatctgctggagttgtcattccgga

SEQ ID NO: 2363397 - DNA, 25 bp, Homo sapien
tcaagtaactgatgatatgcccacc

SEQ ID NO: 2363398 - DNA, 25 bp, Homo sapien
tcgagtcccaggtaagacaggcgct

SEQ ID NO: 2363399 - DNA, 25 bp, Homo sapien
tcgggacttctctatcaagtaactg

SEQ ID NO: 2363400 - DNA, 25 bp, Homo sapien
cgctcgccttcgttttggtagacaa

SEQ ID NO: 2363401 - DNA, 25 bp, Homo sapien
aatctgggcattgtaggacgctagt

SEQ ID NO: 2363402 - DNA, 25 bp, Homo sapien
gggcattgtaggacgctagtgcagg

SEQ ID NO: 2363403 - DNA, 25 bp, Homo sapien
ctgggcattgtaggacgctagtgca

SEQ ID NO: 2363404 - DNA, 25 bp, Homo sapien
tctgggcattgtaggacgctagtgc

SEQ ID NO: 2363405 - DNA, 25 bp, Homo sapien
aacagttttccagtcattcttgtca

SEQ ID NO: 2363406 - DNA, 25 bp, Homo sapien
tcattcttgtcactaatggatgact

SEQ ID NO: 2363407 - DNA, 25 bp, Homo sapien
agtcattcttgtcactaatggatga

SEQ ID NO: 2363408 - DNA, 25 bp, Homo sapien
attcttgtcactaatggatgactct

SEQ ID NO: 2363409 - DNA, 25 bp, Homo sapien
attctatggcacctaaattgttgag

SEQ ID NO: 2363410 - DNA, 25 bp, Homo sapien
cctaaattgttgagactggacttac

SEQ ID NO: 2363411 - DNA, 25 bp, Homo sapien
gcacctggcttcaaatacagctgtt

SEQ ID NO: 2363412 - DNA, 25 bp, Homo sapien
tgaaagactgatagtttaacaatca

SEQ ID NO: 2363413 - DNA, 25 bp, Homo sapien
tcatgggtgtctgggatagtggcac

SEQ ID NO: 2363414 - DNA, 25 bp, Homo sapien
tggctatccacttgatctcatgggt

SEQ ID NO: 2363415 - DNA, 25 bp, Homo sapien
tggtcgtcttcttcaaaaccaatgt

SEQ ID NO: 2363416 - DNA, 25 bp, Homo sapien
acagccttggtcgtcttcttcaaaa

SEQ ID NO: 2363417 - DNA, 25 bp, Homo sapien
cttctgtcctctccaaaagaggagc

SEQ ID NO: 2363418 - DNA, 25 bp, Homo sapien
cccatccccctccttctgtcctctc

SEQ ID NO: 2363419 - DNA, 25 bp, Homo sapien
ccacccatccccctccttctgtcct

SEQ ID NO: 2363420 - DNA, 25 bp, Homo sapien
ctgtcctctccaaaagaggagcatc

SEQ ID NO: 2363421 - DNA, 25 bp, Homo sapien
cagaaggactgatgggtggaccccc

SEQ ID NO: 2363422 - DNA, 25 bp, Homo sapien
ccagaaggactgatgggtggacccc

SEQ ID NO: 2363423 - DNA, 25 bp, Homo sapien
cagagagttctagtgtcaacgggca

SEQ ID NO: 2363424 - DNA, 25 bp, Homo sapien
gttctagtgtcaacgggcagatcac

SEQ ID NO: 2363425 - DNA, 25 bp, Homo sapien
ctagcgtagacagagagttctagtg

SEQ ID NO: 2363426 - DNA, 25 bp, Homo sapien
tagacagagagttctagtgtcaacg

SEQ ID NO: 2363427 - DNA, 25 bp, Homo sapien
tgttgaccagccaagtaaacgttcg

SEQ ID NO: 2363428 - DNA, 25 bp, Homo sapien
gttcgtccataaacagcctttgcca

SEQ ID NO: 2363429 - DNA, 25 bp, Homo sapien
ggaattgattttgttgaccagccaa

SEQ ID NO: 2363430 - DNA, 25 bp, Homo sapien
cttgttaactaaggaggaattgatt

SEQ ID NO: 2363431 - DNA, 25 bp, Homo sapien
aagggatccaaaatgcgttgaccaa

SEQ ID NO: 2363432 - DNA, 25 bp, Homo sapien
agggatccaaaatgcgttgaccaac

SEQ ID NO: 2363433 - DNA, 25 bp, Homo sapien
agatgtccagtaatccaattacagt

SEQ ID NO: 2363434 - DNA, 25 bp, Homo sapien
cccatagatgtccagtaatccaatt

SEQ ID NO: 2363435 - DNA, 25 bp, Homo sapien
catagatgtccagtaatccaattac

SEQ ID NO: 2363436 - DNA, 25 bp, Homo sapien
tagatgtccagtaatccaattacag

SEQ ID NO: 2363437 - DNA, 25 bp, Homo sapien
caattaacagttgctggagtttctc

SEQ ID NO: 2363438 - DNA, 25 bp, Homo sapien
tcctctcaattaacagttgctggag

SEQ ID NO: 2363439 - DNA, 25 bp, Homo sapien
ctgcttttagagtcctctcaattaa

SEQ ID NO: 2363440 - DNA, 25 bp, Homo sapien
tttagagtcctctcaattaacagtt

SEQ ID NO: 2363441 - DNA, 25 bp, Homo sapien
agaatagatatgattcctttatgtc

SEQ ID NO: 2363442 - DNA, 25 bp, Homo sapien
gaatagatatgattcctttatgtct

SEQ ID NO: 2363443 - DNA, 25 bp, Homo sapien
cagaatagatatgattcctttatgt

SEQ ID NO: 2363444 - DNA, 25 bp, Homo sapien
ccaggaaactcaagtctgtagcagg

SEQ ID NO: 2363445 - DNA, 25 bp, Homo sapien
ctcaagtctgtagcaggaccaggcc

SEQ ID NO: 2363446 - DNA, 25 bp, Homo sapien
tgtagcaggaccaggccgaatgcat

SEQ ID NO: 2363447 - DNA, 25 bp, Homo sapien
gaccaggccgaatgcattcttcatc

SEQ ID NO: 2363448 - DNA, 25 bp, Homo sapien
ggagtcggaactccatccagccaat

SEQ ID NO: 2363449 - DNA, 25 bp, Homo sapien
tctcctgcatagtggaggagtcgga

SEQ ID NO: 2363450 - DNA, 25 bp, Homo sapien
ccttggtgcagtatgtgacctctcc

SEQ ID NO: 2363451 - DNA, 25 bp, Homo sapien
gccaatcctctttcggccctttgga

SEQ ID NO: 2363452 - DNA, 25 bp, Homo sapien
ttctttcagatgtctgtaaagaaga

SEQ ID NO: 2363453 - DNA, 25 bp, Homo sapien
ttcagatgtctgtaaagaagatcat

SEQ ID NO: 2363454 - DNA, 25 bp, Homo sapien
tcagatgtctgtaaagaagatcatt

SEQ ID NO: 2363455 - DNA, 25 bp, Homo sapien
ctttcagatgtctgtaaagaagatc

SEQ ID NO: 2363456 - DNA, 25 bp, Homo sapien
gagaaatgagtaccacgttcgctgt

SEQ ID NO: 2363457 - DNA, 25 bp, Homo sapien
cagggctgtcaggacggctcacaga

SEQ ID NO: 2363458 - DNA, 25 bp, Homo sapien
ggacggctcacagagtgtgcatgaa

SEQ ID NO: 2363459 - DNA, 25 bp, Homo sapien
ccacgttcgctgtttcagaaatcac

SEQ ID NO: 2363460 - DNA, 25 bp, Homo sapien
ctccggttttctaactcggccagca

SEQ ID NO: 2363461 - DNA, 25 bp, Homo sapien
caggataatgttcttggacttgcac

SEQ ID NO: 2363462 - DNA, 25 bp, Homo sapien
cctcaggataatgttcttggacttg

SEQ ID NO: 2363463 - DNA, 25 bp, Homo sapien
cggttttctaactcggccagcagga

SEQ ID NO: 2363464 - DNA, 25 bp, Homo sapien
cctctggtgagatccaattttgcat

SEQ ID NO: 2363465 - DNA, 25 bp, Homo sapien
ggtgagatccaattttgcatgggtg

SEQ ID NO: 2363466 - DNA, 25 bp, Homo sapien
tccaattttgcatgggtgtttttcc

SEQ ID NO: 2363467 - DNA, 25 bp, Homo sapien
gagatccaattttgcatgggtgttt

SEQ ID NO: 2363468 - DNA, 25 bp, Homo sapien
tgctcagactgtttttaaactgagt

SEQ ID NO: 2363469 - DNA, 25 bp, Homo sapien
ctcagactgtttttaaactgagtcc

SEQ ID NO: 2363470 - DNA, 25 bp, Homo sapien
gctcagactgtttttaaactgagtc

SEQ ID NO: 2363471 - DNA, 25 bp, Homo sapien
tcagactgtttttaaactgagtccc

SEQ ID NO: 2363472 - DNA, 25 bp, Homo sapien
gttctttcctgtcgttgggcttgat

SEQ ID NO: 2363473 - DNA, 25 bp, Homo sapien
ggttctttcctgtcgttgggcttga

SEQ ID NO: 2363474 - DNA, 25 bp, Homo sapien
tgatgcaacggatgtaggagggctc

SEQ ID NO: 2363475 - DNA, 25 bp, Homo sapien
ttgggcttgatgcaacggatgtagg

SEQ ID NO: 2363476 - DNA, 25 bp, Homo sapien
tatttgatctgatgccttatgagga

SEQ ID NO: 2363477 - DNA, 25 bp, Homo sapien
gccccaggtatttgatctgatgcct

SEQ ID NO: 2363478 - DNA, 25 bp, Homo sapien
caagaaatgctcgtatttccttcgg

SEQ ID NO: 2363479 - DNA, 25 bp, Homo sapien
ttcggtatgcaaaaccagcccgtct

SEQ ID NO: 2363480 - DNA, 25 bp, Homo sapien
tgtattcctcgggtttgtagccgat

SEQ ID NO: 2363481 - DNA, 25 bp, Homo sapien
ggtttgtagccgatgtacttgatca

SEQ ID NO: 2363482 - DNA, 25 bp, Homo sapien
ctctgctggaggcccgtgccagtgc

SEQ ID NO: 2363483 - DNA, 25 bp, Homo sapien
tgtacttgatcagccgttccacgcc

SEQ ID NO: 2363484 - DNA, 25 bp, Homo sapien
gagttctggggaaacgaatgaatat

SEQ ID NO: 2363485 - DNA, 25 bp, Homo sapien
ggcatcttcggtagcaaacagagtt

SEQ ID NO: 2363486 - DNA, 25 bp, Homo sapien
cttcggtagcaaacagagttctggg

SEQ ID NO: 2363487 - DNA, 25 bp, Homo sapien
aattcaaaggcatcttcggtagcaa

SEQ ID NO: 2363488 - DNA, 25 bp, Homo sapien
cctaggcagcgtttgtaagtggctt

SEQ ID NO: 2363489 - DNA, 25 bp, Homo sapien
gcagcgtttgtaagtggcttggatt

SEQ ID NO: 2363490 - DNA, 25 bp, Homo sapien
tccttcctaggcagcgtttgtaagt

SEQ ID NO: 2363491 - DNA, 25 bp, Homo sapien
cagcgtttgtaagtggcttggattc

SEQ ID NO: 2363492 - DNA, 25 bp, Homo sapien
gagcacaatcgtatggaaatacaga

SEQ ID NO: 2363493 - DNA, 25 bp, Homo sapien
ttcaacaaacatctggacgcccacc

SEQ ID NO: 2363494 - DNA, 25 bp, Homo sapien
cactgctggcattagaaggtgagca

SEQ ID NO: 2363495 - DNA, 25 bp, Homo sapien
gaaagagttcactgctggcattaga

SEQ ID NO: 2363496 - DNA, 25 bp, Homo sapien
tttctgataatccgcacggcccact

SEQ ID NO: 2363497 - DNA, 25 bp, Homo sapien
tctgataatccgcacggcccacttt

SEQ ID NO: 2363498 - DNA, 25 bp, Homo sapien
ttggattgccttccgagccagggcc

SEQ ID NO: 2363499 - DNA, 25 bp, Homo sapien
cctttggattgccttccgagccagg

SEQ ID NO: 2363500 - DNA, 25 bp, Homo sapien
acagtctttggaaggtgataccgga

SEQ ID NO: 2363501 - DNA, 25 bp, Homo sapien
caagatgtaattcttccgcacaaac

SEQ ID NO: 2363502 - DNA, 25 bp, Homo sapien
tcttccgcacaaacacgataaattc

SEQ ID NO: 2363503 - DNA, 25 bp, Homo sapien
aattcctcgttgtcaggacagaggg

SEQ ID NO: 2363504 - DNA, 25 bp, Homo sapien
gctaacctgatcctctcccaacttt

SEQ ID NO: 2363505 - DNA, 25 bp, Homo sapien
ggctgtggcgatcaaaatgaagctt

SEQ ID NO: 2363506 - DNA, 25 bp, Homo sapien
gggctgtggcgatcaaaatgaagct

SEQ ID NO: 2363507 - DNA, 25 bp, Homo sapien
ttatattttatagtcacagcagcta

SEQ ID NO: 2363508 - DNA, 25 bp, Homo sapien
gctcagctgtgatcccgcggcagta

SEQ ID NO: 2363509 - DNA, 25 bp, Homo sapien
cattgctttccgctcagctgtgatc

SEQ ID NO: 2363510 - DNA, 25 bp, Homo sapien
gtgatcccgcggcagtacttctgca

SEQ ID NO: 2363511 - DNA, 25 bp, Homo sapien
gcggcagtacttctgcaccaggttc

SEQ ID NO: 2363512 - DNA, 25 bp, Homo sapien
aagtataaaaatggtagccacaggc

SEQ ID NO: 2363513 - DNA, 25 bp, Homo sapien
ggtaatacacaattgaaagtataaa

SEQ ID NO: 2363514 - DNA, 25 bp, Homo sapien
ctggtaatacacaattgaaagtata

SEQ ID NO: 2363515 - DNA, 25 bp, Homo sapien
gaaagtataaaaatggtagccacag

SEQ ID NO: 2363516 - DNA, 25 bp, Homo sapien
ctatccgactgttgacaaagggttg

SEQ ID NO: 2363517 - DNA, 25 bp, Homo sapien
gactgttgacaaagggttgatttaa

SEQ ID NO: 2363518 - DNA, 25 bp, Homo sapien
ccttcccctgaagatttcacttgta

SEQ ID NO: 2363519 - DNA, 25 bp, Homo sapien
taaactttctgtgtagccgtctttc

SEQ ID NO: 2363520 - DNA, 25 bp, Homo sapien
tagctgaagcactttcggattaatg

SEQ ID NO: 2363521 - DNA, 25 bp, Homo sapien
gctaattagctgaagcactttcgga

SEQ ID NO: 2363522 - DNA, 25 bp, Homo sapien
ctcatggctaattagctgaagcact

SEQ ID NO: 2363523 - DNA, 25 bp, Homo sapien
gcactttcggattaatgtctccttc

SEQ ID NO: 2363524 - DNA, 25 bp, Homo sapien
gcccaggatctcacggctgctacgt

SEQ ID NO: 2363525 - DNA, 25 bp, Homo sapien
tacgttcaaagcaagtgtcagtgcc

SEQ ID NO: 2363526 - DNA, 25 bp, Homo sapien
ctggcacacacgatcaccagggctt

SEQ ID NO: 2363527 - DNA, 25 bp, Homo sapien
gatcagaggcaccaagagcttaagt

SEQ ID NO: 2363528 - DNA, 25 bp, Homo sapien
ttggatccctagctctgcctacctg

SEQ ID NO: 2363529 - DNA, 25 bp, Homo sapien
aagtcaaggctatggctgcctgcct

SEQ ID NO: 2363530 - DNA, 25 bp, Homo sapien
ggaagtcaaggctatggctgcctgc

SEQ ID NO: 2363531 - DNA, 25 bp, Homo sapien
gcctacctgcgttgccctctgagga

SEQ ID NO: 2363532 - DNA, 25 bp, Homo sapien
aatgagttgccgctgccgtgctttg

SEQ ID NO: 2363533 - DNA, 25 bp, Homo sapien
cgctgccgtgctttgaagccttttc

SEQ ID NO: 2363534 - DNA, 25 bp, Homo sapien
ttctgtcatatttaatgaccgggac

SEQ ID NO: 2363535 - DNA, 25 bp, Homo sapien
tcatatttaatgaccgggacaccat

SEQ ID NO: 2363536 - DNA, 25 bp, Homo sapien
gctgagtactctattttctgcttga

SEQ ID NO: 2363537 - DNA, 25 bp, Homo sapien
tgagagctgagtactctattttctg

SEQ ID NO: 2363538 - DNA, 25 bp, Homo sapien
gagctgagtactctattttctgctt

SEQ ID NO: 2363539 - DNA, 25 bp, Homo sapien
gagagctgagtactctattttctgc

SEQ ID NO: 2363540 - DNA, 25 bp, Homo sapien
tgttttaaagattgcccacttctta

SEQ ID NO: 2363541 - DNA, 25 bp, Homo sapien
attgttttaaagattgcccacttct

SEQ ID NO: 2363542 - DNA, 25 bp, Homo sapien
taagacagatccagagttaggagcc

SEQ ID NO: 2363543 - DNA, 25 bp, Homo sapien
ggtttatgggcaccctacacttgtg

SEQ ID NO: 2363544 - DNA, 25 bp, Homo sapien
tttatgccagaataagggtgcagtc

SEQ ID NO: 2363545 - DNA, 25 bp, Homo sapien
gatcaccgtggaagcagactattgc

SEQ ID NO: 2363546 - DNA, 25 bp, Homo sapien
tcactcagattgctagtggagacac

SEQ ID NO: 2363547 - DNA, 25 bp, Homo sapien
tgcttgctgtcctctggtgaaacat

SEQ ID NO: 2363548 - DNA, 25 bp, Homo sapien
gaatgactaagattccatcactcag

SEQ ID NO: 2363549 - DNA, 25 bp, Homo sapien
tctggtgaaacatgaatgactaaga

SEQ ID NO: 2363550 - DNA, 25 bp, Homo sapien
caatagagaagtttcacggtggtca

SEQ ID NO: 2363551 - DNA, 25 bp, Homo sapien
tcagtattcacagcttaaagaaaca

SEQ ID NO: 2363552 - DNA, 25 bp, Homo sapien
gaggagacaaggcataatttcagta

SEQ ID NO: 2363553 - DNA, 25 bp, Homo sapien
cggtggtcaacttaacattttggca

SEQ ID NO: 2363554 - DNA, 25 bp, Homo sapien
cacgtgtccacactgcaaaacggca

SEQ ID NO: 2363555 - DNA, 25 bp, Homo sapien
tgttctccttcttaaccagcatgac

SEQ ID NO: 2363556 - DNA, 25 bp, Homo sapien
gtgtccacactgcaaaacggcatcc

SEQ ID NO: 2363557 - DNA, 25 bp, Homo sapien
ccagcatgacgagtttagtaactgc

SEQ ID NO: 2363558 - DNA, 25 bp, Homo sapien
cagtgtcgaaaactattgtgccttc

SEQ ID NO: 2363559 - DNA, 25 bp, Homo sapien
tgtcgaaaactattgtgccttcttt

SEQ ID NO: 2363560 - DNA, 25 bp, Homo sapien
tccagtccagtgtcgaaaactattg

SEQ ID NO: 2363561 - DNA, 25 bp, Homo sapien
ttccagtccagtgtcgaaaactatt

SEQ ID NO: 2363562 - DNA, 25 bp, Homo sapien
acggcttacttccctcccagagacg

SEQ ID NO: 2363563 - DNA, 25 bp, Homo sapien
ggcttacttccctcccagagacggc

SEQ ID NO: 2363564 - DNA, 25 bp, Homo sapien
gcttacttccctcccagagacggcc

SEQ ID NO: 2363565 - DNA, 25 bp, Homo sapien
ttacttccctcccagagacggccac

SEQ ID NO: 2363566 - DNA, 25 bp, Homo sapien
caaaaatggcgatggtagaggtcag

SEQ ID NO: 2363567 - DNA, 25 bp, Homo sapien
gaggtagctaactggatccaatccc

SEQ ID NO: 2363568 - DNA, 25 bp, Homo sapien
ggtcagacgtcatcctctatcagga

SEQ ID NO: 2363569 - DNA, 25 bp, Homo sapien
tgtgatctgttagtgctgcgggcct

SEQ ID NO: 2363570 - DNA, 25 bp, Homo sapien
tctaatgacacgttggactgcgcac

SEQ ID NO: 2363571 - DNA, 25 bp, Homo sapien
tagaattgcgccttcgggtgacctg

SEQ ID NO: 2363572 - DNA, 25 bp, Homo sapien
gactgcgcactgaacatagatcctg

SEQ ID NO: 2363573 - DNA, 25 bp, Homo sapien
tcctgtcgagggtgtttagaattgc

SEQ ID NO: 2363574 - DNA, 25 bp, Homo sapien
actcagactgggaccgcatagacac

SEQ ID NO: 2363575 - DNA, 25 bp, Homo sapien
gctcagggcagaaggcgggacccac

SEQ ID NO: 2363576 - DNA, 25 bp, Homo sapien
gcatagacacgccagtgcacctgac

SEQ ID NO: 2363577 - DNA, 25 bp, Homo sapien
ggacaggatgtcctcctctcacggg

SEQ ID NO: 2363578 - DNA, 25 bp, Homo sapien
cagtcacaagcgtggcaggctcgct

SEQ ID NO: 2363579 - DNA, 25 bp, Homo sapien
tcagtaaataaacgcttgcaaaggt

SEQ ID NO: 2363580 - DNA, 25 bp, Homo sapien
caaaggtgagattatacggagcccc

SEQ ID NO: 2363581 - DNA, 25 bp, Homo sapien
cagtggtggccgcatacatcagtaa

SEQ ID NO: 2363582 - DNA, 25 bp, Homo sapien
tacaacagcgattcaggacccaagt

SEQ ID NO: 2363583 - DNA, 25 bp, Homo sapien
tgtatgttgtacaaacgttggcgac

SEQ ID NO: 2363584 - DNA, 25 bp, Homo sapien
gagcgtgtgctgtctttagggccct

SEQ ID NO: 2363585 - DNA, 25 bp, Homo sapien
gctcttttcaggcatgcccggcata

SEQ ID NO: 2363586 - DNA, 25 bp, Homo sapien
tagaaagtcgaagtgaatgttggcc

SEQ ID NO: 2363587 - DNA, 25 bp, Homo sapien
ttttagaaagtcgaagtgaatgttg

SEQ ID NO: 2363588 - DNA, 25 bp, Homo sapien
agaaagtcgaagtgaatgttggcca

SEQ ID NO: 2363589 - DNA, 25 bp, Homo sapien
ttagaaagtcgaagtgaatgttggc

SEQ ID NO: 2363590 - DNA, 25 bp, Homo sapien
ccaaaggtattaacatgggcagcct

SEQ ID NO: 2363591 - DNA, 25 bp, Homo sapien
gaacaggagtgagtcgtgactgaca

SEQ ID NO: 2363592 - DNA, 25 bp, Homo sapien
gaatgtcaaaatcgtgtattgggca

SEQ ID NO: 2363593 - DNA, 25 bp, Homo sapien
tttgtacttactgccctgcctgtga

SEQ ID NO: 2363594 - DNA, 25 bp, Homo sapien
aggacgggtgttctcagtgacctac

SEQ ID NO: 2363595 - DNA, 25 bp, Homo sapien
tgggcgcagcgcctatgtaggacgg

SEQ ID NO: 2363596 - DNA, 25 bp, Homo sapien
tatgtaggacgggtgttctcagtga

SEQ ID NO: 2363597 - DNA, 25 bp, Homo sapien
cagcgcctatgtaggacgggtgttc

SEQ ID NO: 2363598 - DNA, 25 bp, Homo sapien
ctgtgacaggcatagctcataaact

SEQ ID NO: 2363599 - DNA, 25 bp, Homo sapien
tgtgacaggcatagctcataaacta

SEQ ID NO: 2363600 - DNA, 25 bp, Homo sapien
tgacaggcatagctcataaactacc

SEQ ID NO: 2363601 - DNA, 25 bp, Homo sapien
gacaggcatagctcataaactaccc

SEQ ID NO: 2363602 - DNA, 25 bp, Homo sapien
tccatggcagtaagtgtccagctct

SEQ ID NO: 2363603 - DNA, 25 bp, Homo sapien
ccagtgcaactttgggtgcaaggct

SEQ ID NO: 2363604 - DNA, 25 bp, Homo sapien
cactgggaccccatatgtctgcgta

SEQ ID NO: 2363605 - DNA, 25 bp, Homo sapien
gttgttctcctgattgacccgactc

SEQ ID NO: 2363606 - DNA, 25 bp, Homo sapien
gagcgcgtgcggaggatccacatca

SEQ ID NO: 2363607 - DNA, 25 bp, Homo sapien
acatcaagcgccctgatgaccgggc

SEQ ID NO: 2363608 - DNA, 25 bp, Homo sapien
ggacctgacaatgcgctcctggagg

SEQ ID NO: 2363609 - DNA, 25 bp, Homo sapien
agcaggcaagagaccgagccgccct

SEQ ID NO: 2363610 - DNA, 25 bp, Homo sapien
taacttccattgaggccagaggtga

SEQ ID NO: 2363611 - DNA, 25 bp, Homo sapien
tggcgcctgggtacctatctgtaac

SEQ ID NO: 2363612 - DNA, 25 bp, Homo sapien
ggaaagaaatcgagagagcccagca

SEQ ID NO: 2363613 - DNA, 25 bp, Homo sapien
gaggttaggatacctgcgccacgga

SEQ ID NO: 2363614 - DNA, 25 bp, Homo sapien
agaaccccgccaggaagcaagcatc

SEQ ID NO: 2363615 - DNA, 25 bp, Homo sapien
tcgctttcagaaccccgccaggaag

SEQ ID NO: 2363616 - DNA, 25 bp, Homo sapien
ggtgttcgctttcagaaccccgcca

SEQ ID NO: 2363617 - DNA, 25 bp, Homo sapien
tcttgccccgcggtgttcgctttca

SEQ ID NO: 2363618 - DNA, 25 bp, Homo sapien
ccaaaacacccgagttctgccagac

SEQ ID NO: 2363619 - DNA, 25 bp, Homo sapien
tattcgccggaggtccccgcacttg

SEQ ID NO: 2363620 - DNA, 25 bp, Homo sapien
attcgccggaggtccccgcacttgg

SEQ ID NO: 2363621 - DNA, 25 bp, Homo sapien
tgtctcagcccaaaacacccgagtt

SEQ ID NO: 2363622 - DNA, 25 bp, Homo sapien
gaacagtattcgaactccagtttag

SEQ ID NO: 2363623 - DNA, 25 bp, Homo sapien
ctcggaggactgacgacccagttct

SEQ ID NO: 2363624 - DNA, 25 bp, Homo sapien
ggtcacacagcgagcgaacagtatt

SEQ ID NO: 2363625 - DNA, 25 bp, Homo sapien
gcattagtccgtttataaaggccta

SEQ ID NO: 2363626 - DNA, 25 bp, Homo sapien
tactaaaacgtattcacaccctctg

SEQ ID NO: 2363627 - DNA, 25 bp, Homo sapien
cgtattcacaccctctgtgaaacct

SEQ ID NO: 2363628 - DNA, 25 bp, Homo sapien
gaaacctgctaattactccatttac

SEQ ID NO: 2363629 - DNA, 25 bp, Homo sapien
tctgtgaaacctgctaattactcca

SEQ ID NO: 2363630 - DNA, 25 bp, Homo sapien
agctcactataacttctgctcccag

SEQ ID NO: 2363631 - DNA, 25 bp, Homo sapien
gccaccataccctatctcagttggg

SEQ ID NO: 2363632 - DNA, 25 bp, Homo sapien
tgataatggaaaaacgtttatgcct

SEQ ID NO: 2363633 - DNA, 25 bp, Homo sapien
gtgccaccataccctatctcagttg

SEQ ID NO: 2363634 - DNA, 25 bp, Homo sapien
cacaggactcgtggctgagaacagc

SEQ ID NO: 2363635 - DNA, 25 bp, Homo sapien
gccaggtaatcattagtgatcttgc

SEQ ID NO: 2363636 - DNA, 25 bp, Homo sapien
cattagtgatcttgcacaggactcg

SEQ ID NO: 2363637 - DNA, 25 bp, Homo sapien
gcttctcacttcagaaaagcttgtt

SEQ ID NO: 2363638 - DNA, 25 bp, Homo sapien
gaaaactccggacatgggcctggat

SEQ ID NO: 2363639 - DNA, 25 bp, Homo sapien
gatgaaccatgctctcgaggtctga

SEQ ID NO: 2363640 - DNA, 25 bp, Homo sapien
ttcttctcgtgcctgacgggctcta

SEQ ID NO: 2363641 - DNA, 25 bp, Homo sapien
gatatctctctgcagtcgactccga

SEQ ID NO: 2363642 - DNA, 25 bp, Homo sapien
gtttcctggcaatcttgaaaataca

SEQ ID NO: 2363643 - DNA, 25 bp, Homo sapien
ttcttttagtggactcagggtcatc

SEQ ID NO: 2363644 - DNA, 25 bp, Homo sapien
ctttgattctgaataggaacagcag

SEQ ID NO: 2363645 - DNA, 25 bp, Homo sapien
gcacttcttttagtggactcagggt

SEQ ID NO: 2363646 - DNA, 25 bp, Homo sapien
gatgctgcgacacaacttctcaaat

SEQ ID NO: 2363647 - DNA, 25 bp, Homo sapien
gctcaggatgctgcgacacaacttc

SEQ ID NO: 2363648 - DNA, 25 bp, Homo sapien
caggatgctgcgacacaacttctca

SEQ ID NO: 2363649 - DNA, 25 bp, Homo sapien
ctgctcaggatgctgcgacacaact

SEQ ID NO: 2363650 - DNA, 25 bp, Homo sapien
tagaacaagccagggacacatacca

SEQ ID NO: 2363651 - DNA, 25 bp, Homo sapien
tgttcttgatctgttgaatccaaag

SEQ ID NO: 2363652 - DNA, 25 bp, Homo sapien
gagggtgaggtccttagaacaagcc

SEQ ID NO: 2363653 - DNA, 25 bp, Homo sapien
gcttgagaaaatcacagcagtacca

SEQ ID NO: 2363654 - DNA, 25 bp, Homo sapien
tgacaagcatcgtgaggtacagggt

SEQ ID NO: 2363655 - DNA, 25 bp, Homo sapien
ccgaagaattttccacgttgaagtg

SEQ ID NO: 2363656 - DNA, 25 bp, Homo sapien
tacagggtgatgagtcgggagtcct

SEQ ID NO: 2363657 - DNA, 25 bp, Homo sapien
cacgttgaagtgtctgtgaaggtga

SEQ ID NO: 2363658 - DNA, 25 bp, Homo sapien
tgatggtcagcaccaagggcatcct

SEQ ID NO: 2363659 - DNA, 25 bp, Homo sapien
gaatgtaatcacttggaggctaagg

SEQ ID NO: 2363660 - DNA, 25 bp, Homo sapien
catttgtatggtctcagggccttcc

SEQ ID NO: 2363661 - DNA, 25 bp, Homo sapien
gctgaatggattgtggatactgcga

SEQ ID NO: 2363662 - DNA, 25 bp, Homo sapien
gcgacatctatttaatgcctgtttt

SEQ ID NO: 2363663 - DNA, 25 bp, Homo sapien
agctagagacccagaccaagcaagg

SEQ ID NO: 2363664 - DNA, 25 bp, Homo sapien
ttttatatctatgagcgacatctat

SEQ ID NO: 2363665 - DNA, 25 bp, Homo sapien
caggaaagctagagacccagaccaa

SEQ ID NO: 2363666 - DNA, 25 bp, Homo sapien
gagatgtcccattatatttgcacaa

SEQ ID NO: 2363667 - DNA, 25 bp, Homo sapien
cagaataaaatccatgctggttgag

SEQ ID NO: 2363668 - DNA, 25 bp, Homo sapien
ttcatcgctggtcgaagactttcac

SEQ ID NO: 2363669 - DNA, 25 bp, Homo sapien
acaaatgtggttcatcgctggtcga

SEQ ID NO: 2363670 - DNA, 25 bp, Homo sapien
ggacaccaggtatgctgaatgcaaa

SEQ ID NO: 2363671 - DNA, 25 bp, Homo sapien
gacaccaggtatgctgaatgcaaat

SEQ ID NO: 2363672 - DNA, 25 bp, Homo sapien
ggtgttggagagtggagaagttgca

SEQ ID NO: 2363673 - DNA, 25 bp, Homo sapien
ttggagagtggagaagttgcacact

SEQ ID NO: 2363674 - DNA, 25 bp, Homo sapien
tccctagaggtatgatctggcacaa

SEQ ID NO: 2363675 - DNA, 25 bp, Homo sapien
aaaagactggattacccttgcagcc

SEQ ID NO: 2363676 - DNA, 25 bp, Homo sapien
tgtagagcattcaagggatcccagc

SEQ ID NO: 2363677 - DNA, 25 bp, Homo sapien
tctggcacaacaaggtacaaagtgg

SEQ ID NO: 2363678 - DNA, 25 bp, Homo sapien
accagcttctgccaacggaccacct

SEQ ID NO: 2363679 - DNA, 25 bp, Homo sapien
ctagcgagacaactgccagtcatac

SEQ ID NO: 2363680 - DNA, 25 bp, Homo sapien
ggagcatatgaaaccaaatcaggaa

SEQ ID NO: 2363681 - DNA, 25 bp, Homo sapien
ggttgttgtgaggagcatatgaaac

SEQ ID NO: 2363682 - DNA, 25 bp, Homo sapien
gaagccgtttaattatggtatgaag

SEQ ID NO: 2363683 - DNA, 25 bp, Homo sapien
attatggtatgaagtagaaggttcc

SEQ ID NO: 2363684 - DNA, 25 bp, Homo sapien
ttatggtatgaagtagaaggttcct

SEQ ID NO: 2363685 - DNA, 25 bp, Homo sapien
ttagaagccgtttaattatggtatg

SEQ ID NO: 2363686 - DNA, 25 bp, Homo sapien
cagctaatacaaataatgccagact

SEQ ID NO: 2363687 - DNA, 25 bp, Homo sapien
tatggttagaaattctttaataata

SEQ ID NO: 2363688 - DNA, 25 bp, Homo sapien
atacaaataatgccagacttaaaat

SEQ ID NO: 2363689 - DNA, 25 bp, Homo sapien
caaataatgccagacttaaaattta

SEQ ID NO: 2363690 - DNA, 25 bp, Homo sapien
agcaaaaaagtaaactgagtgcttc

SEQ ID NO: 2363691 - DNA, 25 bp, Homo sapien
ttggtcagaggatgatatcaacttt

SEQ ID NO: 2363692 - DNA, 25 bp, Homo sapien
aagaatgttttaattggtcagagga

SEQ ID NO: 2363693 - DNA, 25 bp, Homo sapien
tcagaggatgatatcaactttatat

SEQ ID NO: 2363694 - DNA, 25 bp, Homo sapien
ctgttaaagtgcctttggatagaca

SEQ ID NO: 2363695 - DNA, 25 bp, Homo sapien
agtgcctttggatagacaaggacgg

SEQ ID NO: 2363696 - DNA, 25 bp, Homo sapien
gttaaagtgcctttggatagacaag

SEQ ID NO: 2363697 - DNA, 25 bp, Homo sapien
taaagtgcctttggatagacaagga

SEQ ID NO: 2363698 - DNA, 25 bp, Homo sapien
gatcacactgcaataatattcaggg

SEQ ID NO: 2363699 - DNA, 25 bp, Homo sapien
ttgagcagtcacaaatgtgctcact

SEQ ID NO: 2363700 - DNA, 25 bp, Homo sapien
gaacatgccaacacctcagctatgg

SEQ ID NO: 2363701 - DNA, 25 bp, Homo sapien
gggcaagtctatacctaataccagt

SEQ ID NO: 2363702 - DNA, 25 bp, Homo sapien
tatcaacggcatccaaaaaacaagg

SEQ ID NO: 2363703 - DNA, 25 bp, Homo sapien
tactagttacatgtggccgctgagc

SEQ ID NO: 2363704 - DNA, 25 bp, Homo sapien
tgtttccatcggacagacctgctct

SEQ ID NO: 2363705 - DNA, 25 bp, Homo sapien
tggagaagctcaatcacggctcgct

SEQ ID NO: 2363706 - DNA, 25 bp, Homo sapien
tgtgtccaacatgtgaggcaagtac

SEQ ID NO: 2363707 - DNA, 25 bp, Homo sapien
gagagctcagagtacaaccagggag

SEQ ID NO: 2363708 - DNA, 25 bp, Homo sapien
ggttacatgactaagtgcctgggca

SEQ ID NO: 2363709 - DNA, 25 bp, Homo sapien
gatgcacagtccctgctaacagaga

SEQ ID NO: 2363710 - DNA, 25 bp, Homo sapien
cttgattgtttaacagggccagaca

SEQ ID NO: 2363711 - DNA, 25 bp, Homo sapien
tctgggtgacaaagtctataagtgc

SEQ ID NO: 2363712 - DNA, 25 bp, Homo sapien
tgcactgcttacttgattgtttaac

SEQ ID NO: 2363713 - DNA, 25 bp, Homo sapien
tgttgcatttaagtacctctgggtg

SEQ ID NO: 2363714 - DNA, 25 bp, Homo sapien
tgagccacagacctaaatgctagtt

SEQ ID NO: 2363715 - DNA, 25 bp, Homo sapien
gaaaacacaggagtaaagctttgag

SEQ ID NO: 2363716 - DNA, 25 bp, Homo sapien
cacctggagatcacttgtctgaaaa

SEQ ID NO: 2363717 - DNA, 25 bp, Homo sapien
gaggttatcacactaaaagcacaag

SEQ ID NO: 2363718 - DNA, 25 bp, Homo sapien
tgaggaacggccgaatcagattgtc

SEQ ID NO: 2363719 - DNA, 25 bp, Homo sapien
gccgaatcagattgtctgagaactg

SEQ ID NO: 2363720 - DNA, 25 bp, Homo sapien
atgtggatgaggaacggccgaatca

SEQ ID NO: 2363721 - DNA, 25 bp, Homo sapien
gtcactgtgctgagatgagtcacca

SEQ ID NO: 2363722 - DNA, 25 bp, Homo sapien
ggcatccttctaaactttcacatac

SEQ ID NO: 2363723 - DNA, 25 bp, Homo sapien
ttagacaaagcgtatggcatccttc

SEQ ID NO: 2363724 - DNA, 25 bp, Homo sapien
gaatttacgaagcatgtcatgggat

SEQ ID NO: 2363725 - DNA, 25 bp, Homo sapien
cacggcatcgatcttggtctcttaa

SEQ ID NO: 2363726 - DNA, 25 bp, Homo sapien
ctgagacacatacttccgacagtag

SEQ ID NO: 2363727 - DNA, 25 bp, Homo sapien
tccgacagtagcacagcgtctgggt

SEQ ID NO: 2363728 - DNA, 25 bp, Homo sapien
cctcctctaacactctggggctgag

SEQ ID NO: 2363729 - DNA, 25 bp, Homo sapien
tgagcaaactcacgaacccatctgt

SEQ ID NO: 2363730 - DNA, 25 bp, Homo sapien
tcttcactgggagcacattctgagg

SEQ ID NO: 2363731 - DNA, 25 bp, Homo sapien
gatcaagtgcattgactcgttaagg

SEQ ID NO: 2363732 - DNA, 25 bp, Homo sapien
tagcttcttgctcaggatgtcacag

SEQ ID NO: 2363733 - DNA, 25 bp, Homo sapien
tgtcacagaagaagatccggatcag

SEQ ID NO: 2363734 - DNA, 25 bp, Homo sapien
tcagcgaggtctggtagaggacaca

SEQ ID NO: 2363735 - DNA, 25 bp, Homo sapien
gagaatattccggactgatgccgac

SEQ ID NO: 2363736 - DNA, 25 bp, Homo sapien
gacttctgcagagtcgacccgttta

SEQ ID NO: 2363737 - DNA, 25 bp, Homo sapien
tgtgagtatctgcagccgaatctgt

SEQ ID NO: 2363738 - DNA, 25 bp, Homo sapien
cgcgaacagtcacagaacagcatca

SEQ ID NO: 2363739 - DNA, 25 bp, Homo sapien
catggccaagagttgcttggactct

SEQ ID NO: 2363740 - DNA, 25 bp, Homo sapien
ggcccgagctcacagataaatgccc

SEQ ID NO: 2363741 - DNA, 25 bp, Homo sapien
ccacagtttgggaagcaggtcatca

SEQ ID NO: 2363742 - DNA, 25 bp, Homo sapien
gcttactagacaataaacgaggttg

SEQ ID NO: 2363743 - DNA, 25 bp, Homo sapien
tactgttgaagctgataatgggcac

SEQ ID NO: 2363744 - DNA, 25 bp, Homo sapien
tattcatgtctgcatatcaaggaac

SEQ ID NO: 2363745 - DNA, 25 bp, Homo sapien
gatcctctccggctaaagtcttcca

SEQ ID NO: 2363746 - DNA, 25 bp, Homo sapien
aagaattcaggaaagaggagatagt

SEQ ID NO: 2363747 - DNA, 25 bp, Homo sapien
caattccatcccagatcatcttaaa

SEQ ID NO: 2363748 - DNA, 25 bp, Homo sapien
catcccagatcatcttaaacacaaa

SEQ ID NO: 2363749 - DNA, 25 bp, Homo sapien
tgaccagctcttccagtttgaatga

SEQ ID NO: 2363750 - DNA, 25 bp, Homo sapien
gtacagcaccataagccacccgtgg

SEQ ID NO: 2363751 - DNA, 25 bp, Homo sapien
cacccgtggacagactggaacagct

SEQ ID NO: 2363752 - DNA, 25 bp, Homo sapien
tccaaggtctcacccttggcgttct

SEQ ID NO: 2363753 - DNA, 25 bp, Homo sapien
gacagactggaacagctccaaggtc

SEQ ID NO: 2363754 - DNA, 25 bp, Homo sapien
tcaagagtctgatgggaacatgacc

SEQ ID NO: 2363755 - DNA, 25 bp, Homo sapien
gctctagtgccacagcttcagcagt

SEQ ID NO: 2363756 - DNA, 25 bp, Homo sapien
ccatgtgggccacatgcagggtgct

SEQ ID NO: 2363757 - DNA, 25 bp, Homo sapien
gttgccataaagcttgaactcattg

SEQ ID NO: 2363758 - DNA, 25 bp, Homo sapien
tgtactgcaggatcaactgtgcccg

SEQ ID NO: 2363759 - DNA, 25 bp, Homo sapien
tcttggaagagcacgctaggtttga

SEQ ID NO: 2363760 - DNA, 25 bp, Homo sapien
tgacatgtgggatgtactgcaggat

SEQ ID NO: 2363761 - DNA, 25 bp, Homo sapien
tgtgcccgttttctgtccctgtcga

SEQ ID NO: 2363762 - DNA, 25 bp, Homo sapien
tccagcatcctggaccggcggatgg

SEQ ID NO: 2363763 - DNA, 25 bp, Homo sapien
tctccttggtaaccatggttcgaaa

SEQ ID NO: 2363764 - DNA, 25 bp, Homo sapien
ccatggttcgaaacagtagaactct

SEQ ID NO: 2363765 - DNA, 25 bp, Homo sapien
ccggcggatggtgatgtgagtgaca

SEQ ID NO: 2363766 - DNA, 25 bp, Homo sapien
tccagtaaggagtgacacaaacaag

SEQ ID NO: 2363767 - DNA, 25 bp, Homo sapien
ctccagtaaggagtgacacaaacaa

SEQ ID NO: 2363768 - DNA, 25 bp, Homo sapien
aaggagtgacacaaacaaggtacga

SEQ ID NO: 2363769 - DNA, 25 bp, Homo sapien
agtaaggagtgacacaaacaaggta

SEQ ID NO: 2363770 - DNA, 25 bp, Homo sapien
agcagctctcggcattgatcaccag

SEQ ID NO: 2363771 - DNA, 25 bp, Homo sapien
agctctcggcattgatcaccagtgg

SEQ ID NO: 2363772 - DNA, 25 bp, Homo sapien
ctagcagctctcggcattgatcacc

SEQ ID NO: 2363773 - DNA, 25 bp, Homo sapien
gtggccaggggcactcaaacaagct

SEQ ID NO: 2363774 - DNA, 25 bp, Homo sapien
tccactgttcagcacacactgcctt

SEQ ID NO: 2363775 - DNA, 25 bp, Homo sapien
tgagaggcccaatcaccaggtgaaa

SEQ ID NO: 2363776 - DNA, 25 bp, Homo sapien
tggtcccctcatcacaaagcaaacg

SEQ ID NO: 2363777 - DNA, 25 bp, Homo sapien
tgcttcgcaggttagacaggctgtc

SEQ ID NO: 2363778 - DNA, 25 bp, Homo sapien
caaacgagcagtatgccagtgtggc

SEQ ID NO: 2363779 - DNA, 25 bp, Homo sapien
cccttcatggcgtgctgggagagct

SEQ ID NO: 2363780 - DNA, 25 bp, Homo sapien
ttgacaaacttcacacggatgaccc

SEQ ID NO: 2363781 - DNA, 25 bp, Homo sapien
gagtgctgggtcaaaaactctcttg

SEQ ID NO: 2363782 - DNA, 25 bp, Homo sapien
gagctgcctaagctgctcgtagccg

SEQ ID NO: 2363783 - DNA, 25 bp, Homo sapien
ctgcaaggcaaaaagacggggagag

SEQ ID NO: 2363784 - DNA, 25 bp, Homo sapien
aagtgccttgcaaggagcaagccca

SEQ ID NO: 2363785 - DNA, 25 bp, Homo sapien
tcaagtgccttgcaaggagcaagcc

SEQ ID NO: 2363786 - DNA, 25 bp, Homo sapien
gcaaggcaaaaagacggggagaggc

SEQ ID NO: 2363787 - DNA, 25 bp, Homo sapien
gggtacagcctctcatccccactgg

SEQ ID NO: 2363788 - DNA, 25 bp, Homo sapien
tccccacaaactcgaagagctgcag

SEQ ID NO: 2363789 - DNA, 25 bp, Homo sapien
ggtaattctcatggatgtaggatgt

SEQ ID NO: 2363790 - DNA, 25 bp, Homo sapien
tgggtgaggggtacagcctctcatc

SEQ ID NO: 2363791 - DNA, 25 bp, Homo sapien
gtgacagtttacatggccaagcctg

SEQ ID NO: 2363792 - DNA, 25 bp, Homo sapien
cctgtcctcgcttgtatcctagtga

SEQ ID NO: 2363793 - DNA, 25 bp, Homo sapien
atggccaagcctgatcacatatgtg

SEQ ID NO: 2363794 - DNA, 25 bp, Homo sapien
agaagcccatggtaccgttaacatt

SEQ ID NO: 2363795 - DNA, 25 bp, Homo sapien
tgaggtttttatagaactcggagtc

SEQ ID NO: 2363796 - DNA, 25 bp, Homo sapien
gaagaaggatgcaaatggcacgtcc

SEQ ID NO: 2363797 - DNA, 25 bp, Homo sapien
gaaggcagttcatccaccgagctat

SEQ ID NO: 2363798 - DNA, 25 bp, Homo sapien
caccgagctatagaagacgctgtgg

SEQ ID NO: 2363799 - DNA, 25 bp, Homo sapien
taagacagcgtcaggcccaggtcag

SEQ ID NO: 2363800 - DNA, 25 bp, Homo sapien
tcctcgtcgtaagacagcgtcaggc

SEQ ID NO: 2363801 - DNA, 25 bp, Homo sapien
ctgacccatgacgtcctcgtcgtaa

SEQ ID NO: 2363802 - DNA, 25 bp, Homo sapien
tgacgtcctcgtcgtaagacagcgt

SEQ ID NO: 2363803 - DNA, 25 bp, Homo sapien
ccctgcccgtgagctattctgtaga

SEQ ID NO: 2363804 - DNA, 25 bp, Homo sapien
ccttaagaatcagccagcctgaggt

SEQ ID NO: 2363805 - DNA, 25 bp, Homo sapien
tagagaacgatcctgcgagacagca

SEQ ID NO: 2363806 - DNA, 25 bp, Homo sapien
gaacacttccgtggatcacctaaaa

SEQ ID NO: 2363807 - DNA, 25 bp, Homo sapien
ggaaataaagcttcccggagatgag

SEQ ID NO: 2363808 - DNA, 25 bp, Homo sapien
gatggcacatgcttgggaaccatcc

SEQ ID NO: 2363809 - DNA, 25 bp, Homo sapien
gggcccagcacaaacatccatgata

SEQ ID NO: 2363810 - DNA, 25 bp, Homo sapien
tgaaatatcaacaagcagaccctgc

SEQ ID NO: 2363811 - DNA, 25 bp, Homo sapien
ccaggaatcagttcatggcaaacaa

SEQ ID NO: 2363812 - DNA, 25 bp, Homo sapien
caggaatcagttcatggcaaacaag

SEQ ID NO: 2363813 - DNA, 25 bp, Homo sapien
tccaggaatcagttcatggcaaaca

SEQ ID NO: 2363814 - DNA, 25 bp, Homo sapien
caactgggaagtcagagcaacttac

SEQ ID NO: 2363815 - DNA, 25 bp, Homo sapien
ccaacaggcttgctagcatcgctaa

SEQ ID NO: 2363816 - DNA, 25 bp, Homo sapien
taatgctatggcaaggcggacctgc

SEQ ID NO: 2363817 - DNA, 25 bp, Homo sapien
gatgctttaaacacgcagctgggct

SEQ ID NO: 2363818 - DNA, 25 bp, Homo sapien
caggagttgagaacattcggatcca

SEQ ID NO: 2363819 - DNA, 25 bp, Homo sapien
gatcaatctcagcattgtcgccaga

SEQ ID NO: 2363820 - DNA, 25 bp, Homo sapien
gtttgataatggaacggaatccgct

SEQ ID NO: 2363821 - DNA, 25 bp, Homo sapien
tgagtgtgcattcgaaaatgtgcca

SEQ ID NO: 2363822 - DNA, 25 bp, Homo sapien
gaaaccaccgtagtagactgtgtgc

SEQ ID NO: 2363823 - DNA, 25 bp, Homo sapien
tagctctctcatccggtgtgaagtc

SEQ ID NO: 2363824 - DNA, 25 bp, Homo sapien
gagccagatgatgactctgtgactt

SEQ ID NO: 2363825 - DNA, 25 bp, Homo sapien
gaagtcggaggccagaatatcccag

SEQ ID NO: 2363826 - DNA, 25 bp, Homo sapien
gcagcacctgcacaatgatgagaca

SEQ ID NO: 2363827 - DNA, 25 bp, Homo sapien
ttatccaaaggcacaaacacacctg

SEQ ID NO: 2363828 - DNA, 25 bp, Homo sapien
tggtcacatccactcctgggcaagg

SEQ ID NO: 2363829 - DNA, 25 bp, Homo sapien
taagagaagcatggtcgtggtcaca

SEQ ID NO: 2363830 - DNA, 25 bp, Homo sapien
cactctacggatgctgtgtgtcggg

SEQ ID NO: 2363831 - DNA, 25 bp, Homo sapien
ggtctgcccgctgcaaattcaggtg

SEQ ID NO: 2363832 - DNA, 25 bp, Homo sapien
cactgtgacgagcattccctgaatg

SEQ ID NO: 2363833 - DNA, 25 bp, Homo sapien
tctgtgcatcccaatttaggccggc

SEQ ID NO: 2363834 - DNA, 25 bp, Homo sapien
ctgatcgtccgacacctccacgcag

SEQ ID NO: 2363835 - DNA, 25 bp, Homo sapien
cttgaggtaggcgaatcccaggagc

SEQ ID NO: 2363836 - DNA, 25 bp, Homo sapien
acctccacgcagcggatggagaatg

SEQ ID NO: 2363837 - DNA, 25 bp, Homo sapien
gatggagaatggaggcttgaggtag

SEQ ID NO: 2363838 - DNA, 25 bp, Homo sapien
ggctgagtccgtgggcagtctctct

SEQ ID NO: 2363839 - DNA, 25 bp, Homo sapien
agaaaggggctgccgagagagggct

SEQ ID NO: 2363840 - DNA, 25 bp, Homo sapien
agagggctgagtccgtgggcagtct

SEQ ID NO: 2363841 - DNA, 25 bp, Homo sapien
agggctgagtccgtgggcagtctct

SEQ ID NO: 2363842 - DNA, 25 bp, Homo sapien
tcccatgctgcctcagatctggagc

SEQ ID NO: 2363843 - DNA, 25 bp, Homo sapien
taggagtagcattcgagtctgcgcc

SEQ ID NO: 2363844 - DNA, 25 bp, Homo sapien
ctggtgaggccagacgccactaaaa

SEQ ID NO: 2363845 - DNA, 25 bp, Homo sapien
ctcagatctggagccctggtgaggc

SEQ ID NO: 2363846 - DNA, 25 bp, Homo sapien
tgcatcatgagaggcagctacaccc

SEQ ID NO: 2363847 - DNA, 25 bp, Homo sapien
aaatgaagcagcgagcctggacgtg

SEQ ID NO: 2363848 - DNA, 25 bp, Homo sapien
tacaaggtggcatcacgggctcaaa

SEQ ID NO: 2363849 - DNA, 25 bp, Homo sapien
acagagctccgtaaccctgaaggct

SEQ ID NO: 2363850 - DNA, 25 bp, Homo sapien
cttgggccaactttcccttaagcat

SEQ ID NO: 2363851 - DNA, 25 bp, Homo sapien
gccaactttcccttaagcatggagg

SEQ ID NO: 2363852 - DNA, 25 bp, Homo sapien
tttcccttaagcatggaggccgagg

SEQ ID NO: 2363853 - DNA, 25 bp, Homo sapien
ccttaagcatggaggccgaggactg

SEQ ID NO: 2363854 - DNA, 25 bp, Homo sapien
cctgcactaagtaagcttttggaaa

SEQ ID NO: 2363855 - DNA, 25 bp, Homo sapien
ccagacacaagacgactggcttcca

SEQ ID NO: 2363856 - DNA, 25 bp, Homo sapien
gggccttccggttcacagcgaatta

SEQ ID NO: 2363857 - DNA, 25 bp, Homo sapien
gaattactggttaaccaattgacaa

SEQ ID NO: 2363858 - DNA, 25 bp, Homo sapien
taggagagttcaaagcccgtgttca

SEQ ID NO: 2363859 - DNA, 25 bp, Homo sapien
cccgcttgcggatggtgaagaagcc

SEQ ID NO: 2363860 - DNA, 25 bp, Homo sapien
cggaggacgctcttcttgctgtagt

SEQ ID NO: 2363861 - DNA, 25 bp, Homo sapien
tgttcatgctgatggcgtagcgcag

SEQ ID NO: 2363862 - DNA, 25 bp, Homo sapien
ctgtgccttgggcatcacctggaga

SEQ ID NO: 2363863 - DNA, 25 bp, Homo sapien
tctaggggccaatgtcacctggcat

SEQ ID NO: 2363864 - DNA, 25 bp, Homo sapien
tgtagtgctgtcgtgggcgtctaaa

SEQ ID NO: 2363865 - DNA, 25 bp, Homo sapien
tctcatggctatagagagggtctag

SEQ ID NO: 2363866 - DNA, 25 bp, Homo sapien
gagaggatctcacgcacagtaggct

SEQ ID NO: 2363867 - DNA, 25 bp, Homo sapien
tcgaatccggcatcaaccttggtgg

SEQ ID NO: 2363868 - DNA, 25 bp, Homo sapien
aataggtccgggaagactctctggc

SEQ ID NO: 2363869 - DNA, 25 bp, Homo sapien
catcaagagccatcaaggtgtcagt

SEQ ID NO: 2363870 - DNA, 25 bp, Homo sapien
agcagaagacttcggcagcagaatg

SEQ ID NO: 2363871 - DNA, 25 bp, Homo sapien
gtctataagctgacacagaccccat

SEQ ID NO: 2363872 - DNA, 25 bp, Homo sapien
tttctctgtcgttgctggtgggctc

SEQ ID NO: 2363873 - DNA, 25 bp, Homo sapien
ggctctctcggtggaaggtctataa

SEQ ID NO: 2363874 - DNA, 25 bp, Homo sapien
taccagtagcttaccccatgtggca

SEQ ID NO: 2363875 - DNA, 25 bp, Homo sapien
tctgttgccaagatcgctgtgccca

SEQ ID NO: 2363876 - DNA, 25 bp, Homo sapien
tgagggccgacttacccaagattgt

SEQ ID NO: 2363877 - DNA, 25 bp, Homo sapien
cagccgaccagcgttatggagaaat

SEQ ID NO: 2363878 - DNA, 25 bp, Homo sapien
tgtgcaccgttttccctgtcggagg

SEQ ID NO: 2363879 - DNA, 25 bp, Homo sapien
agagtccagcgtgcatgtagaagcc

SEQ ID NO: 2363880 - DNA, 25 bp, Homo sapien
tggaagcctggagaatgtgcaccgt

SEQ ID NO: 2363881 - DNA, 25 bp, Homo sapien
agccatcagggagccccgaagtctg

SEQ ID NO: 2363882 - DNA, 25 bp, Homo sapien
cagacatatgttgctaagggtcgtt

SEQ ID NO: 2363883 - DNA, 25 bp, Homo sapien
aatttatggcttcacctcgattaca

SEQ ID NO: 2363884 - DNA, 25 bp, Homo sapien
cctcgattacacactgtcaaaacag

SEQ ID NO: 2363885 - DNA, 25 bp, Homo sapien
ttgggcccaaagtctcttgccgcat

SEQ ID NO: 2363886 - DNA, 25 bp, Homo sapien
gcaatcaagtgggtcagggcttctt

SEQ ID NO: 2363887 - DNA, 25 bp, Homo sapien
cagtgagggcgtgactggcaatcaa

SEQ ID NO: 2363888 - DNA, 25 bp, Homo sapien
cacagttggcagtgagggcgtgact

SEQ ID NO: 2363889 - DNA, 25 bp, Homo sapien
gcgtgactggcaatcaagtgggtca

SEQ ID NO: 2363890 - DNA, 25 bp, Homo sapien
ctttaagaatccagatgcatttcaa

SEQ ID NO: 2363891 - DNA, 25 bp, Homo sapien
tttaagaatccagatgcatttcaag

SEQ ID NO: 2363892 - DNA, 25 bp, Homo sapien
ggctctgatagatcctgctgtctca

SEQ ID NO: 2363893 - DNA, 25 bp, Homo sapien
agtgccctgagccaagtgttccaca

SEQ ID NO: 2363894 - DNA, 25 bp, Homo sapien
ttcatcgagtaatttccacagcccg

SEQ ID NO: 2363895 - DNA, 25 bp, Homo sapien
tacctgggctgtggcgaacaatgcc

SEQ ID NO: 2363896 - DNA, 25 bp, Homo sapien
ggtcaggtcccgtcaagcagcctgg

SEQ ID NO: 2363897 - DNA, 25 bp, Homo sapien
aggctcctgtatccccgtttccaga

SEQ ID NO: 2363898 - DNA, 25 bp, Homo sapien
gaagggcaactcgaacacctgccgt

SEQ ID NO: 2363899 - DNA, 25 bp, Homo sapien
ccgtgaatcgtggtgtcgtcgccat

SEQ ID NO: 2363900 - DNA, 25 bp, Homo sapien
gcccctccgcgccgaagccggagca

SEQ ID NO: 2363901 - DNA, 25 bp, Homo sapien
cgcccctccgcgccgaagccggagc

SEQ ID NO: 2363902 - DNA, 25 bp, Homo sapien
gtacgcctcgttttgcacacttaaa

SEQ ID NO: 2363903 - DNA, 25 bp, Homo sapien
cagtacgcctcgttttgcacactta

SEQ ID NO: 2363904 - DNA, 25 bp, Homo sapien
cgcctcgttttgcacacttaaatga

SEQ ID NO: 2363905 - DNA, 25 bp, Homo sapien
tacgcctcgttttgcacacttaaat

SEQ ID NO: 2363906 - DNA, 25 bp, Homo sapien
cttgccatgtaccacggcatgttct

SEQ ID NO: 2363907 - DNA, 25 bp, Homo sapien
atgactttccccggagcagacacca

SEQ ID NO: 2363908 - DNA, 25 bp, Homo sapien
gacaccagtaggacttctgacaaca

SEQ ID NO: 2363909 - DNA, 25 bp, Homo sapien
cggcatgttctccatgaaggatgac

SEQ ID NO: 2363910 - DNA, 25 bp, Homo sapien
caggcccgcttgataccaatgttgg

SEQ ID NO: 2363911 - DNA, 25 bp, Homo sapien
ccaatgttgggtaagctgaggtcca

SEQ ID NO: 2363912 - DNA, 25 bp, Homo sapien
ggttgaagccggaggaatgttctca

SEQ ID NO: 2363913 - DNA, 25 bp, Homo sapien
aatgttctcaagttcaaggatacag

SEQ ID NO: 2363914 - DNA, 25 bp, Homo sapien
cagctgccctctctgtaggctctta

SEQ ID NO: 2363915 - DNA, 25 bp, Homo sapien
agctgccctctctgtaggctcttag

SEQ ID NO: 2363916 - DNA, 25 bp, Homo sapien
gttgaagaaacagtgagctgtggtc

SEQ ID NO: 2363917 - DNA, 25 bp, Homo sapien
cactgtactccaggctgcataacag

SEQ ID NO: 2363918 - DNA, 25 bp, Homo sapien
tgtactccaggctgcataacagagt

SEQ ID NO: 2363919 - DNA, 25 bp, Homo sapien
ggaggttgaagaaacagtgagctgt

SEQ ID NO: 2363920 - DNA, 25 bp, Homo sapien
agcaaacacaagtgggtgagaggga

SEQ ID NO: 2363921 - DNA, 25 bp, Homo sapien
acaagcaaacacaagtgggtgagag

SEQ ID NO: 2363922 - DNA, 25 bp, Homo sapien
aacacaagtgggtgagagggacttt

SEQ ID NO: 2363923 - DNA, 25 bp, Homo sapien
aacaagcaaacacaagtgggtgaga

SEQ ID NO: 2363924 - DNA, 25 bp, Homo sapien
aggcgctcggtgacagcacagtcgt

SEQ ID NO: 2363925 - DNA, 25 bp, Homo sapien
caggtataagtaaagaaaggccagc

SEQ ID NO: 2363926 - DNA, 25 bp, Homo sapien
tgcttccggcagatggacaggtata

SEQ ID NO: 2363927 - DNA, 25 bp, Homo sapien
agcacagtcgtcaggcaagcctgca

SEQ ID NO: 2363928 - DNA, 25 bp, Homo sapien
ccttcagcgggtttgggatctcctc

SEQ ID NO: 2363929 - DNA, 25 bp, Homo sapien
tcctcgcacacagtcaggagggctg

SEQ ID NO: 2363930 - DNA, 25 bp, Homo sapien
tgttgacgcaatccccgtccttcag

SEQ ID NO: 2363931 - DNA, 25 bp, Homo sapien
actacgatatccaggctcggcaggg

SEQ ID NO: 2363932 - DNA, 25 bp, Homo sapien
gttcatctttactgtggcagtgagg

SEQ ID NO: 2363933 - DNA, 25 bp, Homo sapien
gatgttcatctttactgtggcagtg

SEQ ID NO: 2363934 - DNA, 25 bp, Homo sapien
cacagatgttcatctttactgtggc

SEQ ID NO: 2363935 - DNA, 25 bp, Homo sapien
cagatgttcatctttactgtggcag

SEQ ID NO: 2363936 - DNA, 25 bp, Homo sapien
ggggttcccgtgaatcattctctcc

SEQ ID NO: 2363937 - DNA, 25 bp, Homo sapien
tgacagcattgtccactccggaggg

SEQ ID NO: 2363938 - DNA, 25 bp, Homo sapien
gaggggttcccgtgaatcattctct

SEQ ID NO: 2363939 - DNA, 25 bp, Homo sapien
cggaggggttcccgtgaatcattct

SEQ ID NO: 2363940 - DNA, 25 bp, Homo sapien
gaaatcttcccttgatggtatcgga

SEQ ID NO: 2363941 - DNA, 25 bp, Homo sapien
taaggatgaaatcttcccttgatgg

SEQ ID NO: 2363942 - DNA, 25 bp, Homo sapien
tcttcccttgatggtatcggagggc

SEQ ID NO: 2363943 - DNA, 25 bp, Homo sapien
ccttgatggtatcggagggctcctc

SEQ ID NO: 2363944 - DNA, 25 bp, Homo sapien
tacgggcacagccatgcatgacttt

SEQ ID NO: 2363945 - DNA, 25 bp, Homo sapien
gatatctctgcaatttaagagctga

SEQ ID NO: 2363946 - DNA, 25 bp, Homo sapien
gctgagagtctacgggcacagccat

SEQ ID NO: 2363947 - DNA, 25 bp, Homo sapien
gcagctagtgcactgtgagggccac

SEQ ID NO: 2363948 - DNA, 25 bp, Homo sapien
catgggattaacgtggagtctggcc

SEQ ID NO: 2363949 - DNA, 25 bp, Homo sapien
tttacagagaggcaccacgcatggt

SEQ ID NO: 2363950 - DNA, 25 bp, Homo sapien
aaggatgaatgaactcggccagcaa

SEQ ID NO: 2363951 - DNA, 25 bp, Homo sapien
gctggactcaaacctaggcctgtgg

SEQ ID NO: 2363952 - DNA, 25 bp, Homo sapien
ggctcaagctgacatttcttgccat

SEQ ID NO: 2363953 - DNA, 25 bp, Homo sapien
gcataaatccctcctaaagccacaa

SEQ ID NO: 2363954 - DNA, 25 bp, Homo sapien
agccgtcttcgagggctcaagctga

SEQ ID NO: 2363955 - DNA, 25 bp, Homo sapien
caatcccaactgtccttgtagtgag

SEQ ID NO: 2363956 - DNA, 25 bp, Homo sapien
ctggcacatagacgtgtcccaggca

SEQ ID NO: 2363957 - DNA, 25 bp, Homo sapien
tctaaaaccagatgtagagtcagtc

SEQ ID NO: 2363958 - DNA, 25 bp, Homo sapien
gactctctagcatgaccccgtggtc

SEQ ID NO: 2363959 - DNA, 25 bp, Homo sapien
caatggtgcccggacgagcagccct

SEQ ID NO: 2363960 - DNA, 25 bp, Homo sapien
tttagaaagaccaagcaacaggccc

SEQ ID NO: 2363961 - DNA, 25 bp, Homo sapien
ttttctggcatgacgtggacactga

SEQ ID NO: 2363962 - DNA, 25 bp, Homo sapien
cacgcacgggctcgtaaatgcaggg

SEQ ID NO: 2363963 - DNA, 25 bp, Homo sapien
tcaactgggacctacaacatgctag

SEQ ID NO: 2363964 - DNA, 25 bp, Homo sapien
ccctggtattgcgagggactttggt

SEQ ID NO: 2363965 - DNA, 25 bp, Homo sapien
ccacaagggccctggtattgcgagg

SEQ ID NO: 2363966 - DNA, 25 bp, Homo sapien
actttggtgttggtcagcaggatct

SEQ ID NO: 2363967 - DNA, 25 bp, Homo sapien
cgagggactttggtgttggtcagca

SEQ ID NO: 2363968 - DNA, 25 bp, Homo sapien
acgcgctcacactccagggagatgg

SEQ ID NO: 2363969 - DNA, 25 bp, Homo sapien
ttccagcacgaggtactgctccggg

SEQ ID NO: 2363970 - DNA, 25 bp, Homo sapien
ccatctctcccagcacgcgctcaca

SEQ ID NO: 2363971 - DNA, 25 bp, Homo sapien
gagatggcatctattgaggtcagga

SEQ ID NO: 2363972 - DNA, 25 bp, Homo sapien
ggtgctggttcatgtcaatgagctc

SEQ ID NO: 2363973 - DNA, 25 bp, Homo sapien
cagcttgctgtgaagtccgcgggcc

SEQ ID NO: 2363974 - DNA, 25 bp, Homo sapien
gtggcccacgccgagggcattcaga

SEQ ID NO: 2363975 - DNA, 25 bp, Homo sapien
cttgctgtgaagtccgcgggccctg

SEQ ID NO: 2363976 - DNA, 25 bp, Homo sapien
agggcctgcttcgtggcctccactt

SEQ ID NO: 2363977 - DNA, 25 bp, Homo sapien
ccgatgctggtttccaagcagtcaa

SEQ ID NO: 2363978 - DNA, 25 bp, Homo sapien
ccgggggcaccgatgctggtttcca

SEQ ID NO: 2363979 - DNA, 25 bp, Homo sapien
ctggtcagggcctgcttcgtggcct

SEQ ID NO: 2363980 - DNA, 25 bp, Homo sapien
gaaggccacaccaagtgctgagtga

SEQ ID NO: 2363981 - DNA, 25 bp, Homo sapien
tcaggtacagatcggaagaaagtgc

SEQ ID NO: 2363982 - DNA, 25 bp, Homo sapien
ccgctaggtagaagggaaggccaca

SEQ ID NO: 2363983 - DNA, 25 bp, Homo sapien
gcacctgagcattggacccaggcgg

SEQ ID NO: 2363984 - DNA, 25 bp, Homo sapien
ggccatctgggaaaagccacctcat

SEQ ID NO: 2363985 - DNA, 25 bp, Homo sapien
tccgcagcagcagcctagagttgtg

SEQ ID NO: 2363986 - DNA, 25 bp, Homo sapien
ggcatttcggaaagcaccaagctga

SEQ ID NO: 2363987 - DNA, 25 bp, Homo sapien
ggcacccgggccagaacatttgagt

SEQ ID NO: 2363988 - DNA, 25 bp, Homo sapien
ctttcaaaaccttcagtgtgccggg

SEQ ID NO: 2363989 - DNA, 25 bp, Homo sapien
cagagcgctgagactcgttctgcat

SEQ ID NO: 2363990 - DNA, 25 bp, Homo sapien
tcaatttgtctgtcgtagttaggca

SEQ ID NO: 2363991 - DNA, 25 bp, Homo sapien
tagttaggcaacaacaaagccgacg

SEQ ID NO: 2363992 - DNA, 25 bp, Homo sapien
ccagacctggcgtgtgaggcattac

SEQ ID NO: 2363993 - DNA, 25 bp, Homo sapien
cagacctggcgtgtgaggcattacg

SEQ ID NO: 2363994 - DNA, 25 bp, Homo sapien
tgccagacctggcgtgtgaggcatt

SEQ ID NO: 2363995 - DNA, 25 bp, Homo sapien
ccgtgccagacctggcgtgtgaggc

SEQ ID NO: 2363996 - DNA, 25 bp, Homo sapien
tgtgctttctggtcctgaatggcag

SEQ ID NO: 2363997 - DNA, 25 bp, Homo sapien
cctcctcccggcagacgtagagaaa

SEQ ID NO: 2363998 - DNA, 25 bp, Homo sapien
tcttcgggtgggatgcaactgcctt

SEQ ID NO: 2363999 - DNA, 25 bp, Homo sapien
gaaaatctatccgtttaaagcacat

SEQ ID NO: 2364000 - DNA, 25 bp, Homo sapien
cacctaagggacctcccagagccat

SEQ ID NO: 2364001 - DNA, 25 bp, Homo sapien
ctgcaaacagggcacctaagggacc

SEQ ID NO: 2364002 - DNA, 25 bp, Homo sapien
cagggcacctaagggacctcccaga

SEQ ID NO: 2364003 - DNA, 25 bp, Homo sapien
gcaaacagggcacctaagggacctc

SEQ ID NO: 2364004 - DNA, 25 bp, Homo sapien
gcaaccaaaaccaaatacagaaata

SEQ ID NO: 2364005 - DNA, 25 bp, Homo sapien
caaaaccaaatacagaaataagttg

SEQ ID NO: 2364006 - DNA, 25 bp, Homo sapien
caggcaaccaaaaccaaatacagaa

SEQ ID NO: 2364007 - DNA, 25 bp, Homo sapien
aaccaaatacagaaataagttgcat

SEQ ID NO: 2364008 - DNA, 25 bp, Homo sapien
cagatctccctgatagtggaaccat

SEQ ID NO: 2364009 - DNA, 25 bp, Homo sapien
ccagatctccctgatagtggaacca

SEQ ID NO: 2364010 - DNA, 25 bp, Homo sapien
tttctttccgggcacctgatctagg

SEQ ID NO: 2364011 - DNA, 25 bp, Homo sapien
gcacctgatctaggctttctggtga

SEQ ID NO: 2364012 - DNA, 25 bp, Homo sapien
tctggtgaagacaatttgattgatc

SEQ ID NO: 2364013 - DNA, 25 bp, Homo sapien
tgctgctggtaccaccgtctgctct

SEQ ID NO: 2364014 - DNA, 25 bp, Homo sapien
ctactggacgctccttgaaggccaa

SEQ ID NO: 2364015 - DNA, 25 bp, Homo sapien
actggacgctccttgaaggccaatg

SEQ ID NO: 2364016 - DNA, 25 bp, Homo sapien
tggacgctccttgaaggccaatgtt

SEQ ID NO: 2364017 - DNA, 25 bp, Homo sapien
gacgctccttgaaggccaatgttct

SEQ ID NO: 2364018 - DNA, 25 bp, Homo sapien
tgagggattgaatgattaatcgtca

SEQ ID NO: 2364019 - DNA, 25 bp, Homo sapien
tgatgagggattgaatgattaatcg

SEQ ID NO: 2364020 - DNA, 25 bp, Homo sapien
gagggattgaatgattaatcgtcat

SEQ ID NO: 2364021 - DNA, 25 bp, Homo sapien
gatgagggattgaatgattaatcgt

SEQ ID NO: 2364022 - DNA, 25 bp, Homo sapien
cattagtcccccagtgtcgggctgc

SEQ ID NO: 2364023 - DNA, 25 bp, Homo sapien
caggatggattttgatcaagagcag

SEQ ID NO: 2364024 - DNA, 25 bp, Homo sapien
aggaatggggaagcctatttccaag

SEQ ID NO: 2364025 - DNA, 25 bp, Homo sapien
gcctatttccaagtcattagtcccc

SEQ ID NO: 2364026 - DNA, 25 bp, Homo sapien
tcttatacattgagtatcatggtat

SEQ ID NO: 2364027 - DNA, 25 bp, Homo sapien
tatcatggtatttgaccaaagggac

SEQ ID NO: 2364028 - DNA, 25 bp, Homo sapien
tatacattgagtatcatggtatttg

SEQ ID NO: 2364029 - DNA, 25 bp, Homo sapien
cttatacattgagtatcatggtatt

SEQ ID NO: 2364030 - DNA, 25 bp, Homo sapien
tcattgctgtgatctaggccagagc

SEQ ID NO: 2364031 - DNA, 25 bp, Homo sapien
ttgctgtgatctaggccagagcccg

SEQ ID NO: 2364032 - DNA, 25 bp, Homo sapien
tgatctaggccagagcccggaggga

SEQ ID NO: 2364033 - DNA, 25 bp, Homo sapien
tgctgtgatctaggccagagcccgg

SEQ ID NO: 2364034 - DNA, 25 bp, Homo sapien
gaaatgtgttatgcctccagctgct

SEQ ID NO: 2364035 - DNA, 25 bp, Homo sapien
aaatgtgttatgcctccagctgctt

SEQ ID NO: 2364036 - DNA, 25 bp, Homo sapien
ctggaaatgtgttatgcctccagct

SEQ ID NO: 2364037 - DNA, 25 bp, Homo sapien
ggaaatgtgttatgcctccagctgc

SEQ ID NO: 2364038 - DNA, 25 bp, Homo sapien
ttgcaaagaacagcggcgagaatgc

SEQ ID NO: 2364039 - DNA, 25 bp, Homo sapien
aagaacagcggcgagaatgcaccgg

SEQ ID NO: 2364040 - DNA, 25 bp, Homo sapien
gttgcaaagaacagcggcgagaatg

SEQ ID NO: 2364041 - DNA, 25 bp, Homo sapien
aacagcggcgagaatgcaccggccc

SEQ ID NO: 2364042 - DNA, 25 bp, Homo sapien
gccccggctcctcgccggacataca

SEQ ID NO: 2364043 - DNA, 25 bp, Homo sapien
ggctcctcgccggacatacaccggc

SEQ ID NO: 2364044 - DNA, 25 bp, Homo sapien
cggctcctcgccggacatacaccgg

SEQ ID NO: 2364045 - DNA, 25 bp, Homo sapien
cccggctcctcgccggacatacacc

SEQ ID NO: 2364046 - DNA, 25 bp, Homo sapien
gattgtctccttcgggggttgcacg

SEQ ID NO: 2364047 - DNA, 25 bp, Homo sapien
gaggtctccgttcagcaggggtcac

SEQ ID NO: 2364048 - DNA, 25 bp, Homo sapien
ttcgccccgaggtggagggattgtc

SEQ ID NO: 2364049 - DNA, 25 bp, Homo sapien
gctcaggcgacgcatcttcgccggg

SEQ ID NO: 2364050 - DNA, 25 bp, Homo sapien
gggtcgatgcctctctccgggtggg

SEQ ID NO: 2364051 - DNA, 25 bp, Homo sapien
ggcgctgtcggtgagggctatcctg

SEQ ID NO: 2364052 - DNA, 25 bp, Homo sapien
ctcgacgggtcgcagccatgcagga

SEQ ID NO: 2364053 - DNA, 25 bp, Homo sapien
aggctgcctgacgaagccctccttg

SEQ ID NO: 2364054 - DNA, 25 bp, Homo sapien
cgagggctctaaggtctagccccat

SEQ ID NO: 2364055 - DNA, 25 bp, Homo sapien
gaacgtggtttgaacgagggctcta

SEQ ID NO: 2364056 - DNA, 25 bp, Homo sapien
tggtttgaacgagggctctaaggtc

SEQ ID NO: 2364057 - DNA, 25 bp, Homo sapien
tgaacgagggctctaaggtctagcc

SEQ ID NO: 2364058 - DNA, 25 bp, Homo sapien
aatatgctcgttgaaatcctcttaa

SEQ ID NO: 2364059 - DNA, 25 bp, Homo sapien
tcctcttaaacaccagaaggagcag

SEQ ID NO: 2364060 - DNA, 25 bp, Homo sapien
gaaatcctcttaaacaccagaagga

SEQ ID NO: 2364061 - DNA, 25 bp, Homo sapien
agcagggggcaatcaggagttccag

SEQ ID NO: 2364062 - DNA, 25 bp, Homo sapien
cctttgcagggaagcgtgccagtac

SEQ ID NO: 2364063 - DNA, 25 bp, Homo sapien
gaagggacctagacgaatcccagag

SEQ ID NO: 2364064 - DNA, 25 bp, Homo sapien
accagcacccgacactggcaataat

SEQ ID NO: 2364065 - DNA, 25 bp, Homo sapien
tttcctagaaatgtgatcacagcag

SEQ ID NO: 2364066 - DNA, 25 bp, Homo sapien
tatgagctgcttcgctgccttcctc

SEQ ID NO: 2364067 - DNA, 25 bp, Homo sapien
gcctgattgaattacggttcatgaa

SEQ ID NO: 2364068 - DNA, 25 bp, Homo sapien
cgagcccagaggaatcgccgcctga

SEQ ID NO: 2364069 - DNA, 25 bp, Homo sapien
tgaatatgagctgcttcgctgcctt

SEQ ID NO: 2364070 - DNA, 25 bp, Homo sapien
caggtgtggctcgaaaggtgcagac

SEQ ID NO: 2364071 - DNA, 25 bp, Homo sapien
ggtgtggctcgaaaggtgcagacag

SEQ ID NO: 2364072 - DNA, 25 bp, Homo sapien
ccaggtgtggctcgaaaggtgcaga

SEQ ID NO: 2364073 - DNA, 25 bp, Homo sapien
cgccaggtgtggctcgaaaggtgca

SEQ ID NO: 2364074 - DNA, 25 bp, Homo sapien
tgctggcgcccaatgtcctttacat

SEQ ID NO: 2364075 - DNA, 25 bp, Homo sapien
gggtgggctgctggcgcccaatgtc

SEQ ID NO: 2364076 - DNA, 25 bp, Homo sapien
atcttgggtggcattcatcggcaga

SEQ ID NO: 2364077 - DNA, 25 bp, Homo sapien
ttgggtggcattcatcggcagagcc

SEQ ID NO: 2364078 - DNA, 25 bp, Homo sapien
ccgccacgattgagggacagaatgt

SEQ ID NO: 2364079 - DNA, 25 bp, Homo sapien
gaaagctttagagtcggccacatcc

SEQ ID NO: 2364080 - DNA, 25 bp, Homo sapien
tgagcaccttaagctgcaaacctgg

SEQ ID NO: 2364081 - DNA, 25 bp, Homo sapien
cacaaagggcaactctacagacaga

SEQ ID NO: 2364082 - DNA, 25 bp, Homo sapien
ctgtaaccccactgccttgccctgg

SEQ ID NO: 2364083 - DNA, 25 bp, Homo sapien
tgtaaccccactgccttgccctggg

SEQ ID NO: 2364084 - DNA, 25 bp, Homo sapien
taaccccactgccttgccctgggaa

SEQ ID NO: 2364085 - DNA, 25 bp, Homo sapien
accccactgccttgccctgggaaga

SEQ ID NO: 2364086 - DNA, 25 bp, Homo sapien
tgcatggtccccgggtacctgagtt

SEQ ID NO: 2364087 - DNA, 25 bp, Homo sapien
ctgcatggtccccgggtacctgagt

SEQ ID NO: 2364088 - DNA, 25 bp, Homo sapien
atgggctcaggggtgaagcaatttg

SEQ ID NO: 2364089 - DNA, 25 bp, Homo sapien
tgatgggctcaggggtgaagcaatt

SEQ ID NO: 2364090 - DNA, 25 bp, Homo sapien
tgggctcaggggtgaagcaatttgc

SEQ ID NO: 2364091 - DNA, 25 bp, Homo sapien
gatgggctcaggggtgaagcaattt

SEQ ID NO: 2364092 - DNA, 25 bp, Homo sapien
tgcgtgagaaggttgtgtccacaga

SEQ ID NO: 2364093 - DNA, 25 bp, Homo sapien
aatgaccactgaaagcggcccttgc

SEQ ID NO: 2364094 - DNA, 25 bp, Homo sapien
tccaaggccagacatacagtagatg

SEQ ID NO: 2364095 - DNA, 25 bp, Homo sapien
gagtaacaaacgtcctcttactgtg

SEQ ID NO: 2364096 - DNA, 25 bp, Homo sapien
ttgaatcagcgacgggcccgattgc

SEQ ID NO: 2364097 - DNA, 25 bp, Homo sapien
cgagattgaatcagcgacgggcccg

SEQ ID NO: 2364098 - DNA, 25 bp, Homo sapien
ggcccgattgcctggtgacggttac

SEQ ID NO: 2364099 - DNA, 25 bp, Homo sapien
gattgcctggtgacggttacaaatg

SEQ ID NO: 2364100 - DNA, 25 bp, Homo sapien
gcgtcctttcaaaatcagcccagcg

SEQ ID NO: 2364101 - DNA, 25 bp, Homo sapien
ctttcaaaatcagcccagcgcagaa

SEQ ID NO: 2364102 - DNA, 25 bp, Homo sapien
gatgggcgtcctttcaaaatcagcc

SEQ ID NO: 2364103 - DNA, 25 bp, Homo sapien
cccagaggatgggcgtcctttcaaa

SEQ ID NO: 2364104 - DNA, 25 bp, Homo sapien
tccctccatgtcatccggccacagg

SEQ ID NO: 2364105 - DNA, 25 bp, Homo sapien
tgtcatccggccacaggcactgtga

SEQ ID NO: 2364106 - DNA, 25 bp, Homo sapien
taacccctcctatggtcagggagct

SEQ ID NO: 2364107 - DNA, 25 bp, Homo sapien
tagaggggcgtcgtgtctctaaccc

SEQ ID NO: 2364108 - DNA, 25 bp, Homo sapien
gggagatctgagaatcgatactgaa

SEQ ID NO: 2364109 - DNA, 25 bp, Homo sapien
gagaatcgatactgaacagcttcag

SEQ ID NO: 2364110 - DNA, 25 bp, Homo sapien
ttcagtactacgatgtcataatggg

SEQ ID NO: 2364111 - DNA, 25 bp, Homo sapien
actgaacagcttcagtactacgatg

SEQ ID NO: 2364112 - DNA, 25 bp, Homo sapien
ggtccttgtggtagctgcctaagtg

SEQ ID NO: 2364113 - DNA, 25 bp, Homo sapien
cgctatcaacaggtaagtaggaaaa

SEQ ID NO: 2364114 - DNA, 25 bp, Homo sapien
gctgcctaagtggtacccgttgtta

SEQ ID NO: 2364115 - DNA, 25 bp, Homo sapien
gcattgtttatggtcgctatcaaca

SEQ ID NO: 2364116 - DNA, 25 bp, Homo sapien
gatgtcagtcgccatgggaactgac

SEQ ID NO: 2364117 - DNA, 25 bp, Homo sapien
caactgcgatgtgcctccgtcagca

SEQ ID NO: 2364118 - DNA, 25 bp, Homo sapien
tacagcctgagagcatagtgatgtc

SEQ ID NO: 2364119 - DNA, 25 bp, Homo sapien
gggtacagcctgagagcatagtgat

SEQ ID NO: 2364120 - DNA, 25 bp, Homo sapien
ccccagctgtcgatgtgtcctttca

SEQ ID NO: 2364121 - DNA, 25 bp, Homo sapien
cagctgtcgatgtgtcctttcatag

SEQ ID NO: 2364122 - DNA, 25 bp, Homo sapien
ctgacatgggggctgataagacgcc

SEQ ID NO: 2364123 - DNA, 25 bp, Homo sapien
ttatctcggagacacccgaggaaaa

SEQ ID NO: 2364124 - DNA, 25 bp, Homo sapien
gtggggtgcgctctgcgactgggtc

SEQ ID NO: 2364125 - DNA, 25 bp, Homo sapien
cagtggggtgcgctctgcgactggg

SEQ ID NO: 2364126 - DNA, 25 bp, Homo sapien
ccccagtggggtgcgctctgcgact

SEQ ID NO: 2364127 - DNA, 25 bp, Homo sapien
gtccccagtggggtgcgctctgcga

SEQ ID NO: 2364128 - DNA, 25 bp, Homo sapien
ggcaggccaggtgttggcccggggc

SEQ ID NO: 2364129 - DNA, 25 bp, Homo sapien
caggccaggtgttggcccggggcgt

SEQ ID NO: 2364130 - DNA, 25 bp, Homo sapien
ccaggtgttggcccggggcgttctg

SEQ ID NO: 2364131 - DNA, 25 bp, Homo sapien
caggtgttggcccggggcgttctgg

SEQ ID NO: 2364132 - DNA, 25 bp, Homo sapien
aactgtggctctttctggttccctg

SEQ ID NO: 2364133 - DNA, 25 bp, Homo sapien
ctggccatttctcagcatacagcca

SEQ ID NO: 2364134 - DNA, 25 bp, Homo sapien
cagacctcatcacaagctactctga

SEQ ID NO: 2364135 - DNA, 25 bp, Homo sapien
catttctcagcatacagccagacct

SEQ ID NO: 2364136 - DNA, 25 bp, Homo sapien
cttttcccagtcacctaggacaggc

SEQ ID NO: 2364137 - DNA, 25 bp, Homo sapien
tttcccagtcacctaggacaggcca

SEQ ID NO: 2364138 - DNA, 25 bp, Homo sapien
cagtcacctaggacaggccacgaca

SEQ ID NO: 2364139 - DNA, 25 bp, Homo sapien
gtcacctaggacaggccacgacagc

SEQ ID NO: 2364140 - DNA, 25 bp, Homo sapien
taggcagtagctccagcctgtcggc

SEQ ID NO: 2364141 - DNA, 25 bp, Homo sapien
tcacttaggcagtagctccagcctg

SEQ ID NO: 2364142 - DNA, 25 bp, Homo sapien
ggcagtagctccagcctgtcggcgt

SEQ ID NO: 2364143 - DNA, 25 bp, Homo sapien
cttaggcagtagctccagcctgtcg

SEQ ID NO: 2364144 - DNA, 25 bp, Homo sapien
gctcccaggcctttgagaggttgca

SEQ ID NO: 2364145 - DNA, 25 bp, Homo sapien
aaggccaaagaatcccgctcccagg

SEQ ID NO: 2364146 - DNA, 25 bp, Homo sapien
gctgccaccaccgaaggtgcttgga

SEQ ID NO: 2364147 - DNA, 25 bp, Homo sapien
gaaagcgtcccatggatggcggctc

SEQ ID NO: 2364148 - DNA, 25 bp, Homo sapien
acaccctcgcaggctctctccttct

SEQ ID NO: 2364149 - DNA, 25 bp, Homo sapien
tacaccctcgcaggctctctccttc

SEQ ID NO: 2364150 - DNA, 25 bp, Homo sapien
caccctcgcaggctctctccttctc

SEQ ID NO: 2364151 - DNA, 25 bp, Homo sapien
accctcgcaggctctctccttctct

SEQ ID NO: 2364152 - DNA, 25 bp, Homo sapien
gaaaccgcggccttgacaatggcca

SEQ ID NO: 2364153 - DNA, 25 bp, Homo sapien
ggtgacagcttggtccgcttgccct

SEQ ID NO: 2364154 - DNA, 25 bp, Homo sapien
ttgagcacacttttggcgggcccag

SEQ ID NO: 2364155 - DNA, 25 bp, Homo sapien
catagccattgactgtgcggctgag

SEQ ID NO: 2364156 - DNA, 25 bp, Homo sapien
gcccggcagggggatgacggaggcg

SEQ ID NO: 2364157 - DNA, 25 bp, Homo sapien
gcactgggtagggcgcaatgcccac

SEQ ID NO: 2364158 - DNA, 25 bp, Homo sapien
ggggatgacggaggcggcagtggcg

SEQ ID NO: 2364159 - DNA, 25 bp, Homo sapien
tggagcaggcgcctcaggtggcttg

SEQ ID NO: 2364160 - DNA, 25 bp, Homo sapien
caaagtactggcctacggtgaagct

SEQ ID NO: 2364161 - DNA, 25 bp, Homo sapien
gccggatgtcgttgatgagatactc

SEQ ID NO: 2364162 - DNA, 25 bp, Homo sapien
tctgcggccacagcaggtaatccag

SEQ ID NO: 2364163 - DNA, 25 bp, Homo sapien
tgtcaccagcacactgttccacggg

SEQ ID NO: 2364164 - DNA, 25 bp, Homo sapien
gtccgcatgtccgtatgtccgcagg

SEQ ID NO: 2364165 - DNA, 25 bp, Homo sapien
ctgtccgcatgtccgtatgtccgca

SEQ ID NO: 2364166 - DNA, 25 bp, Homo sapien
gcatgtccgtatgtccgcagggcag

SEQ ID NO: 2364167 - DNA, 25 bp, Homo sapien
tccgcatgtccgtatgtccgcaggg

SEQ ID NO: 2364168 - DNA, 25 bp, Homo sapien
ctgttctgcggcctgcctcccggct

SEQ ID NO: 2364169 - DNA, 25 bp, Homo sapien
cgcccaccctgttctgcggcctgcc

SEQ ID NO: 2364170 - DNA, 25 bp, Homo sapien
gcccaccctgttctgcggcctgcct

SEQ ID NO: 2364171 - DNA, 25 bp, Homo sapien
tgcggcctgcctcccggctctgcgc

SEQ ID NO: 2364172 - DNA, 25 bp, Homo sapien
cacttagtgcttgaccaggccttgg

SEQ ID NO: 2364173 - DNA, 25 bp, Homo sapien
ggatctaagattgcaggcccactgt

SEQ ID NO: 2364174 - DNA, 25 bp, Homo sapien
agagatacagtaccgcttccagagc

SEQ ID NO: 2364175 - DNA, 25 bp, Homo sapien
tgtgcgaacaggaaaatgacgcccc

SEQ ID NO: 2364176 - DNA, 25 bp, Homo sapien
cacacgtggagtcagtgggatacta

SEQ ID NO: 2364177 - DNA, 25 bp, Homo sapien
gtcgctgtttggatggcaagttcag

SEQ ID NO: 2364178 - DNA, 25 bp, Homo sapien
ttgctctcacctatcgcgctggctg

SEQ ID NO: 2364179 - DNA, 25 bp, Homo sapien
tagggcaaagttaggagtcgctgtt

SEQ ID NO: 2364180 - DNA, 25 bp, Homo sapien
tgtgcgggagctcatgaaccagtgt

SEQ ID NO: 2364181 - DNA, 25 bp, Homo sapien
tcataatctcaggaaccgtgtgcgg

SEQ ID NO: 2364182 - DNA, 25 bp, Homo sapien
taatgtcgtagtcggcagtcagtcc

SEQ ID NO: 2364183 - DNA, 25 bp, Homo sapien
tgccatgtgttagacgccgtgctca

SEQ ID NO: 2364184 - DNA, 25 bp, Homo sapien
caggaggttcatcgtctctgaagac

SEQ ID NO: 2364185 - DNA, 25 bp, Homo sapien
gcagtctaactttgtgatgtcctcc

SEQ ID NO: 2364186 - DNA, 25 bp, Homo sapien
tgtttgcatacctcctgtgacagga

SEQ ID NO: 2364187 - DNA, 25 bp, Homo sapien
ccaccgagggcaaagcataatttcc

SEQ ID NO: 2364188 - DNA, 25 bp, Homo sapien
gataaggatcatggatatcccatgg

SEQ ID NO: 2364189 - DNA, 25 bp, Homo sapien
aacattatgtcagcttttactactc

SEQ ID NO: 2364190 - DNA, 25 bp, Homo sapien
taattttagaatggcttggcacaga

SEQ ID NO: 2364191 - DNA, 25 bp, Homo sapien
ttggcacagagtaaacattatgtca

SEQ ID NO: 2364192 - DNA, 25 bp, Homo sapien
gctatagggcacaaacaattgacca

SEQ ID NO: 2364193 - DNA, 25 bp, Homo sapien
taagatccaagaaaacgcctcactg

SEQ ID NO: 2364194 - DNA, 25 bp, Homo sapien
gagatgaacccttcagctgctaaga

SEQ ID NO: 2364195 - DNA, 25 bp, Homo sapien
tttaaaattatgcagggcccctatg

SEQ ID NO: 2364196 - DNA, 25 bp, Homo sapien
tggaatttcacgacagcacagactg

SEQ ID NO: 2364197 - DNA, 25 bp, Homo sapien
tcagcgtggtaaaaaccgattaaca

SEQ ID NO: 2364198 - DNA, 25 bp, Homo sapien
tgttgccaacgaggaacacagctct

SEQ ID NO: 2364199 - DNA, 25 bp, Homo sapien
gactttataccttcatttcagcgtg

SEQ ID NO: 2364200 - DNA, 25 bp, Homo sapien
ccgtgaggaggagttctaatttgca

SEQ ID NO: 2364201 - DNA, 25 bp, Homo sapien
ctcaagtgatccgtgtgaggcaggt

SEQ ID NO: 2364202 - DNA, 25 bp, Homo sapien
catcctatgggctagtttgaactca

SEQ ID NO: 2364203 - DNA, 25 bp, Homo sapien
tcatgctgttctctaccagctacag

SEQ ID NO: 2364204 - DNA, 25 bp, Homo sapien
gagtcccactcgatggaggttctgg

SEQ ID NO: 2364205 - DNA, 25 bp, Homo sapien
ggcttccacgatgatgtcatttgct

SEQ ID NO: 2364206 - DNA, 25 bp, Homo sapien
gggcacaggtcaaggatgagtccca

SEQ ID NO: 2364207 - DNA, 25 bp, Homo sapien
gatgtcatttgctgggtcacagcac

SEQ ID NO: 2364208 - DNA, 25 bp, Homo sapien
tttttagccttcaggaacacctgct

SEQ ID NO: 2364209 - DNA, 25 bp, Homo sapien
attttgaaactgctggcagacttcg

SEQ ID NO: 2364210 - DNA, 25 bp, Homo sapien
cagacttcggagatgcatttgcaag

SEQ ID NO: 2364211 - DNA, 25 bp, Homo sapien
ctggtgggtcccactcttgatccca

SEQ ID NO: 2364212 - DNA, 25 bp, Homo sapien
attttgattgactgttgagagctgg

SEQ ID NO: 2364213 - DNA, 25 bp, Homo sapien
ctaatatagcaggtgagttatcatt

SEQ ID NO: 2364214 - DNA, 25 bp, Homo sapien
gctggattctagtggaatgtgattt

SEQ ID NO: 2364215 - DNA, 25 bp, Homo sapien
agcaggtgagttatcattttgattg

SEQ ID NO: 2364216 - DNA, 25 bp, Homo sapien
gggagcggctcacttgggccctccg

SEQ ID NO: 2364217 - DNA, 25 bp, Homo sapien
ctgggagcggctcacttgggccctc

SEQ ID NO: 2364218 - DNA, 25 bp, Homo sapien
gcggctcacttgggccctccgggac

SEQ ID NO: 2364219 - DNA, 25 bp, Homo sapien
tgggagcggctcacttgggccctcc

SEQ ID NO: 2364220 - DNA, 25 bp, Homo sapien
gaatgtgccctattgcaaatggaga

SEQ ID NO: 2364221 - DNA, 25 bp, Homo sapien
gagtgtgtggtctgtgtaaatggag

SEQ ID NO: 2364222 - DNA, 25 bp, Homo sapien
cgtagaggctcaagagctctgctta

SEQ ID NO: 2364223 - DNA, 25 bp, Homo sapien
ttctagggtctcaatactctagagg

SEQ ID NO: 2364224 - DNA, 25 bp, Homo sapien
tccctgacactacgggaagctaagg

SEQ ID NO: 2364225 - DNA, 25 bp, Homo sapien
gaagtacagtgacccaacaatccaa

SEQ ID NO: 2364226 - DNA, 25 bp, Homo sapien
cagagagggtttgcaactcatggag

SEQ ID NO: 2364227 - DNA, 25 bp, Homo sapien
tccaaaagccaataggtgggtccca

SEQ ID NO: 2364228 - DNA, 25 bp, Homo sapien
gttactgaaccttgattgtcctgtt

SEQ ID NO: 2364229 - DNA, 25 bp, Homo sapien
cagttactgaaccttgattgtcctg

SEQ ID NO: 2364230 - DNA, 25 bp, Homo sapien
agttactgaaccttgattgtcctgt

SEQ ID NO: 2364231 - DNA, 25 bp, Homo sapien
tactgaaccttgattgtcctgttcc

SEQ ID NO: 2364232 - DNA, 25 bp, Homo sapien
ggtgtaattcccagacgcgctacag

SEQ ID NO: 2364233 - DNA, 25 bp, Homo sapien
ccttcagcgcgtagggagcctgtgt

SEQ ID NO: 2364234 - DNA, 25 bp, Homo sapien
ccgtcgtggccagcgggagataaat

SEQ ID NO: 2364235 - DNA, 25 bp, Homo sapien
ggagataaatagcaaacgtcgctgc

SEQ ID NO: 2364236 - DNA, 25 bp, Homo sapien
tgaacatgcacgtgcaacaaatggg

SEQ ID NO: 2364237 - DNA, 25 bp, Homo sapien
cgctcccgtaaagccgccagtggat

SEQ ID NO: 2364238 - DNA, 25 bp, Homo sapien
cccggattggccacccacaaggtgg

SEQ ID NO: 2364239 - DNA, 25 bp, Homo sapien
tcagtctttgcaccaagagttaaaa

SEQ ID NO: 2364240 - DNA, 25 bp, Homo sapien
taacgtgtgacctcggtctcgagac

SEQ ID NO: 2364241 - DNA, 25 bp, Homo sapien
tgctaacgtgtgacctcggtctcga

SEQ ID NO: 2364242 - DNA, 25 bp, Homo sapien
cctcggtctcgagaccgtggcaagc

SEQ ID NO: 2364243 - DNA, 25 bp, Homo sapien
tgtgacctcggtctcgagaccgtgg

SEQ ID NO: 2364244 - DNA, 25 bp, Homo sapien
gccggctgaatgagcgaaaaggcct

SEQ ID NO: 2364245 - DNA, 25 bp, Homo sapien
tcaagtgtagggtcgatgcagtgcc

SEQ ID NO: 2364246 - DNA, 25 bp, Homo sapien
aaaaggcctggtgcacgccaagaat

SEQ ID NO: 2364247 - DNA, 25 bp, Homo sapien
gggcaaacactctgcgtctatggtc

SEQ ID NO: 2364248 - DNA, 25 bp, Homo sapien
tgtagggatacagctggagccttga

SEQ ID NO: 2364249 - DNA, 25 bp, Homo sapien
ggaattgcctgagcaatgtagggat

SEQ ID NO: 2364250 - DNA, 25 bp, Homo sapien
atgtagggatacagctggagccttg

SEQ ID NO: 2364251 - DNA, 25 bp, Homo sapien
ttgcctgagcaatgtagggatacag

SEQ ID NO: 2364252 - DNA, 25 bp, Homo sapien
ccagtaggacggcagcgtcgggagc

SEQ ID NO: 2364253 - DNA, 25 bp, Homo sapien
aggacggcagcgtcgggagcgccat

SEQ ID NO: 2364254 - DNA, 25 bp, Homo sapien
taggacggcagcgtcgggagcgcca

SEQ ID NO: 2364255 - DNA, 25 bp, Homo sapien
agtaggacggcagcgtcgggagcgc

SEQ ID NO: 2364256 - DNA, 25 bp, Homo sapien
tagctgctgattcaggcgctgctgg

SEQ ID NO: 2364257 - DNA, 25 bp, Homo sapien
tgctagctgctgattcaggcgctgc

SEQ ID NO: 2364258 - DNA, 25 bp, Homo sapien
gctgctgattcaggcgctgctggct

SEQ ID NO: 2364259 - DNA, 25 bp, Homo sapien
ctagctgctgattcaggcgctgctg

SEQ ID NO: 2364260 - DNA, 25 bp, Homo sapien
attctgcctgtttggagctgcagat

SEQ ID NO: 2364261 - DNA, 25 bp, Homo sapien
gctgcagatgtcagacatcctgaag

SEQ ID NO: 2364262 - DNA, 25 bp, Homo sapien
ctgcctgtttggagctgcagatgtc

SEQ ID NO: 2364263 - DNA, 25 bp, Homo sapien
gcctgtttggagctgcagatgtcag

SEQ ID NO: 2364264 - DNA, 25 bp, Homo sapien
tctttcctgcaagttcatgctcagc

SEQ ID NO: 2364265 - DNA, 25 bp, Homo sapien
tctttggctgatttcagcttcccgt

SEQ ID NO: 2364266 - DNA, 25 bp, Homo sapien
tgcctgagcttttcccgtcgggcct

SEQ ID NO: 2364267 - DNA, 25 bp, Homo sapien
atcttctcccgctgataggcatgca

SEQ ID NO: 2364268 - DNA, 25 bp, Homo sapien
gtgttcgtacaaaagttgttcagca

SEQ ID NO: 2364269 - DNA, 25 bp, Homo sapien
tccagtgttcgtacaaaagttgttc

SEQ ID NO: 2364270 - DNA, 25 bp, Homo sapien
ccagtgttcgtacaaaagttgttca

SEQ ID NO: 2364271 - DNA, 25 bp, Homo sapien
cagtgttcgtacaaaagttgttcag

SEQ ID NO: 2364272 - DNA, 25 bp, Homo sapien
tcaacccggtacaagatacgtgttc

SEQ ID NO: 2364273 - DNA, 25 bp, Homo sapien
tctgcctggcgctcttttcaggtgg

SEQ ID NO: 2364274 - DNA, 25 bp, Homo sapien
aatgagccgctcagcgcagcctgtg

SEQ ID NO: 2364275 - DNA, 25 bp, Homo sapien
tttgttcaacaaccgaatgagccgc

SEQ ID NO: 2364276 - DNA, 25 bp, Homo sapien
tgtgaatgcatgtcaatcagaagac

SEQ ID NO: 2364277 - DNA, 25 bp, Homo sapien
tcaccagacagatgggcactgtggg

SEQ ID NO: 2364278 - DNA, 25 bp, Homo sapien
cgggaacgtggccatgacttcgctt

SEQ ID NO: 2364279 - DNA, 25 bp, Homo sapien
tgggctggacgctgaaatggaaata

SEQ ID NO: 2364280 - DNA, 25 bp, Homo sapien
ccaagagtttacgacatgcttctgg

SEQ ID NO: 2364281 - DNA, 25 bp, Homo sapien
caagagtttacgacatgcttctggt

SEQ ID NO: 2364282 - DNA, 25 bp, Homo sapien
tcccaagagtttacgacatgcttct

SEQ ID NO: 2364283 - DNA, 25 bp, Homo sapien
agagtttacgacatgcttctggtga

SEQ ID NO: 2364284 - DNA, 25 bp, Homo sapien
atattcattttcataccgtttgttc

SEQ ID NO: 2364285 - DNA, 25 bp, Homo sapien
tttcataccgtttgttctcttgctc

SEQ ID NO: 2364286 - DNA, 25 bp, Homo sapien
ttcatcctttctagcgcctcccttc

SEQ ID NO: 2364287 - DNA, 25 bp, Homo sapien
tcccttcgggccctttcatattcat

SEQ ID NO: 2364288 - DNA, 25 bp, Homo sapien
tggaattcaggcacgcaaacgagga

SEQ ID NO: 2364289 - DNA, 25 bp, Homo sapien
tgctccccacggagagctgggtgct

SEQ ID NO: 2364290 - DNA, 25 bp, Homo sapien
taagaaggttctccaacagcaggcc

SEQ ID NO: 2364291 - DNA, 25 bp, Homo sapien
taagagaacagctactggctccatg

SEQ ID NO: 2364292 - DNA, 25 bp, Homo sapien
ccaccgctgcttcaacagattctcc

SEQ ID NO: 2364293 - DNA, 25 bp, Homo sapien
cctgctccttctttagtttggtcgc

SEQ ID NO: 2364294 - DNA, 25 bp, Homo sapien
tcctgctccttctttagtttggtcg

SEQ ID NO: 2364295 - DNA, 25 bp, Homo sapien
ctcctgctccttctttagtttggtc

SEQ ID NO: 2364296 - DNA, 25 bp, Homo sapien
gccttctgccggaaggcttccatct

SEQ ID NO: 2364297 - DNA, 25 bp, Homo sapien
tgccttctgccggaaggcttccatc

SEQ ID NO: 2364298 - DNA, 25 bp, Homo sapien
gagttgagcgttatactgatgtctc

SEQ ID NO: 2364299 - DNA, 25 bp, Homo sapien
tctgctgagttgagcgttatactga

SEQ ID NO: 2364300 - DNA, 25 bp, Homo sapien
cctcttggatctgctgtgtgcgtct

SEQ ID NO: 2364301 - DNA, 25 bp, Homo sapien
tcctcttggatctgctgtgtgcgtc

SEQ ID NO: 2364302 - DNA, 25 bp, Homo sapien
ggccacatcggccatgacctgctcc

SEQ ID NO: 2364303 - DNA, 25 bp, Homo sapien
tccaggccacatcggccatgacctg

SEQ ID NO: 2364304 - DNA, 25 bp, Homo sapien
tcctccttctcgaggagggcctgca

SEQ ID NO: 2364305 - DNA, 25 bp, Homo sapien
tcgtcctccttctcgaggagggcct

SEQ ID NO: 2364306 - DNA, 25 bp, Homo sapien
tcgctcatcagtctgtcccgtgcgc

SEQ ID NO: 2364307 - DNA, 25 bp, Homo sapien
tcatcagtctgtcccgtgcgctgcg

SEQ ID NO: 2364308 - DNA, 25 bp, Homo sapien
gctcatcagtctgtcccgtgcgctg

SEQ ID NO: 2364309 - DNA, 25 bp, Homo sapien
ctcgctcatcagtctgtcccgtgcg

SEQ ID NO: 2364310 - DNA, 25 bp, Homo sapien
ggccccagagccgtgtgacatctga

SEQ ID NO: 2364311 - DNA, 25 bp, Homo sapien
cactctcaacagttaggctgcaggg

SEQ ID NO: 2364312 - DNA, 25 bp, Homo sapien
gaaaaccacctgacactctcaacag

SEQ ID NO: 2364313 - DNA, 25 bp, Homo sapien
cccagagccgtgtgacatctgaact

SEQ ID NO: 2364314 - DNA, 25 bp, Homo sapien
agaaatgtttccctcgcaacccaag

SEQ ID NO: 2364315 - DNA, 25 bp, Homo sapien
ggatttgctctcacgatgtcggcca

SEQ ID NO: 2364316 - DNA, 25 bp, Homo sapien
tgaggttgaccctaacagatcctgg

SEQ ID NO: 2364317 - DNA, 25 bp, Homo sapien
cagatcctggttctacaagccttgg

SEQ ID NO: 2364318 - DNA, 25 bp, Homo sapien
gatttcgaataagttgctccctgtg

SEQ ID NO: 2364319 - DNA, 25 bp, Homo sapien
tgtgcccgtcggttctgctcaatct

SEQ ID NO: 2364320 - DNA, 25 bp, Homo sapien
tgtttcagggattcctcttgtgccc

SEQ ID NO: 2364321 - DNA, 25 bp, Homo sapien
tggccgatttcagcttttcactctc

SEQ ID NO: 2364322 - DNA, 25 bp, Homo sapien
catatgcgtggcgtgtacctcgtga

SEQ ID NO: 2364323 - DNA, 25 bp, Homo sapien
cagcaatgcacgtgccaaggaacgg

SEQ ID NO: 2364324 - DNA, 25 bp, Homo sapien
catggcatgtacctcgtagaaagct

SEQ ID NO: 2364325 - DNA, 25 bp, Homo sapien
tacctcgtgaaaagctcggcctgtg

SEQ ID NO: 2364326 - DNA, 25 bp, Homo sapien
tcctgctggtctgcttcccatgcct

SEQ ID NO: 2364327 - DNA, 25 bp, Homo sapien
tgctcgacccgccgggcctcctcct

SEQ ID NO: 2364328 - DNA, 25 bp, Homo sapien
gtctgcttcccatgcctgcagccgg

SEQ ID NO: 2364329 - DNA, 25 bp, Homo sapien
gcttcccatgcctgcagccggcgct

SEQ ID NO: 2364330 - DNA, 25 bp, Homo sapien
tgctcagccatagtctccgcctcct

SEQ ID NO: 2364331 - DNA, 25 bp, Homo sapien
ggtagccctgctcagccatagtctc

SEQ ID NO: 2364332 - DNA, 25 bp, Homo sapien
cctgctcagccatagtctccgcctc

SEQ ID NO: 2364333 - DNA, 25 bp, Homo sapien
ggccggtagccctgctcagccatag

SEQ ID NO: 2364334 - DNA, 25 bp, Homo sapien
gtgctgtgcagacaggtccgggaac

SEQ ID NO: 2364335 - DNA, 25 bp, Homo sapien
tgctgtgcagacaggtccgggaaca

SEQ ID NO: 2364336 - DNA, 25 bp, Homo sapien
gcagacaggtccgggaacaaagaca

SEQ ID NO: 2364337 - DNA, 25 bp, Homo sapien
gtgcagacaggtccgggaacaaaga

SEQ ID NO: 2364338 - DNA, 25 bp, Homo sapien
catatgatctgtgaaaccctgaccc

SEQ ID NO: 2364339 - DNA, 25 bp, Homo sapien
aaaacataagagtgatcagatcagc

SEQ ID NO: 2364340 - DNA, 25 bp, Homo sapien
gatcagcagtatctgcagcatgagg

SEQ ID NO: 2364341 - DNA, 25 bp, Homo sapien
ttggttttgagtactagccctaaga

SEQ ID NO: 2364342 - DNA, 25 bp, Homo sapien
tccaagcaatttttggatgtccgta

SEQ ID NO: 2364343 - DNA, 25 bp, Homo sapien
ttccaagcaatttttggatgtccgt

SEQ ID NO: 2364344 - DNA, 25 bp, Homo sapien
caagcaatttttggatgtccgtaag

SEQ ID NO: 2364345 - DNA, 25 bp, Homo sapien
ccaagcaatttttggatgtccgtaa

SEQ ID NO: 2364346 - DNA, 25 bp, Homo sapien
gcatcccttgttctctgtacttatg

SEQ ID NO: 2364347 - DNA, 25 bp, Homo sapien
gttctctgtacttatggtacccatg

SEQ ID NO: 2364348 - DNA, 25 bp, Homo sapien
cccttgttctctgtacttatggtac

SEQ ID NO: 2364349 - DNA, 25 bp, Homo sapien
ctggcggctgggatcagaagcctca

SEQ ID NO: 2364350 - DNA, 25 bp, Homo sapien
tgcagcagcgctgtaaacacgtgcc

SEQ ID NO: 2364351 - DNA, 25 bp, Homo sapien
gaaaggcatgaaagggactctcacg

SEQ ID NO: 2364352 - DNA, 25 bp, Homo sapien
cgtgcccatcaaagacccttgcttg

SEQ ID NO: 2364353 - DNA, 25 bp, Homo sapien
tatattacaagactatgcagcagcg

SEQ ID NO: 2364354 - DNA, 25 bp, Homo sapien
cgtccatggacgtcagagtgttccg

SEQ ID NO: 2364355 - DNA, 25 bp, Homo sapien
catacatgttgggatcagtcactca

SEQ ID NO: 2364356 - DNA, 25 bp, Homo sapien
gaatgtagacctgtatcacgctgat

SEQ ID NO: 2364357 - DNA, 25 bp, Homo sapien
cattcccaatgtgtcctacgtgtca

SEQ ID NO: 2364358 - DNA, 25 bp, Homo sapien
aggattttatttcaccattactgga

SEQ ID NO: 2364359 - DNA, 25 bp, Homo sapien
tgtcgaagcaggattttatttcacc

SEQ ID NO: 2364360 - DNA, 25 bp, Homo sapien
tcgaagcaggattttatttcaccat

SEQ ID NO: 2364361 - DNA, 25 bp, Homo sapien
attttatttcaccattactggacat

SEQ ID NO: 2364362 - DNA, 25 bp, Homo sapien
cagaaaatccgtaacaaagccagga

SEQ ID NO: 2364363 - DNA, 25 bp, Homo sapien
tcaatcagaaaatccgtaacaaagc

SEQ ID NO: 2364364 - DNA, 25 bp, Homo sapien
tcagaaaatccgtaacaaagccagg

SEQ ID NO: 2364365 - DNA, 25 bp, Homo sapien
aatcagaaaatccgtaacaaagcca

SEQ ID NO: 2364366 - DNA, 25 bp, Homo sapien
tcatcaagaactgctaaggccagtg

SEQ ID NO: 2364367 - DNA, 25 bp, Homo sapien
tccctagagagaacgtgtgctaagc

SEQ ID NO: 2364368 - DNA, 25 bp, Homo sapien
aaaaccacgcatgtatcctttgagg

SEQ ID NO: 2364369 - DNA, 25 bp, Homo sapien
tcatccatgtgtccgattcgagcgt

SEQ ID NO: 2364370 - DNA, 25 bp, Homo sapien
ccatgtgcaggtgagctgtgtcctc

SEQ ID NO: 2364371 - DNA, 25 bp, Homo sapien
gttggcaaccaatttgaacactttc

SEQ ID NO: 2364372 - DNA, 25 bp, Homo sapien
cagaccctggcctagggccggtgat

SEQ ID NO: 2364373 - DNA, 25 bp, Homo sapien
tcaagagacaagaaacctagatgtt

SEQ ID NO: 2364374 - DNA, 25 bp, Homo sapien
gatgtatcgtatcgcagtcatctga

SEQ ID NO: 2364375 - DNA, 25 bp, Homo sapien
ccatcacctcatgagtacttaaaaa

SEQ ID NO: 2364376 - DNA, 25 bp, Homo sapien
gctttctcacatgagttgcttcaca

SEQ ID NO: 2364377 - DNA, 25 bp, Homo sapien
taaggaaagatgtatcgtatcgcag

SEQ ID NO: 2364378 - DNA, 25 bp, Homo sapien
gtacgacatcgccaaggctgccaag

SEQ ID NO: 2364379 - DNA, 25 bp, Homo sapien
acaacaactgacaagggcagggcac

SEQ ID NO: 2364380 - DNA, 25 bp, Homo sapien
cacagacgttcagctggtcacgcag

SEQ ID NO: 2364381 - DNA, 25 bp, Homo sapien
caaattcagacgcagaactcttcag

SEQ ID NO: 2364382 - DNA, 25 bp, Homo sapien
gagtgtgtgaagcacccctttgaga

SEQ ID NO: 2364383 - DNA, 25 bp, Homo sapien
catctcttacgctgtgggctgcaaa

SEQ ID NO: 2364384 - DNA, 25 bp, Homo sapien
tgaggacttcccttcgtttactgac

SEQ ID NO: 2364385 - DNA, 25 bp, Homo sapien
tgcagtcagagtgcaagaagaccct

SEQ ID NO: 2364386 - DNA, 25 bp, Homo sapien
aaggatctgattaggaagtggccac

SEQ ID NO: 2364387 - DNA, 25 bp, Homo sapien
attttcactagagagttgtcccctg

SEQ ID NO: 2364388 - DNA, 25 bp, Homo sapien
catgttacaaactcatgagggtccc

SEQ ID NO: 2364389 - DNA, 25 bp, Homo sapien
tgtcccctgtcccaaatgagatttg

SEQ ID NO: 2364390 - DNA, 25 bp, Homo sapien
gatcgtgtgtttagcagtgctgcca

SEQ ID NO: 2364391 - DNA, 25 bp, Homo sapien
caggcatgaaatattggaggtagca

SEQ ID NO: 2364392 - DNA, 25 bp, Homo sapien
tcagaacatagtccccttcgaagga

SEQ ID NO: 2364393 - DNA, 25 bp, Homo sapien
tttcgtcaccctagaagatcgtgtg

SEQ ID NO: 2364394 - DNA, 25 bp, Homo sapien
cacttgagcccaccatgagagatcg

SEQ ID NO: 2364395 - DNA, 25 bp, Homo sapien
attatccgggtgtgttgatgtgcac

SEQ ID NO: 2364396 - DNA, 25 bp, Homo sapien
aattatccgggtgtgttgatgtgca

SEQ ID NO: 2364397 - DNA, 25 bp, Homo sapien
acaggcatggtcatagcgtactgca

SEQ ID NO: 2364398 - DNA, 25 bp, Homo sapien
ccagtctgtagtacaatagctattt

SEQ ID NO: 2364399 - DNA, 25 bp, Homo sapien
ctatttacaggcatggtcatagcgt

SEQ ID NO: 2364400 - DNA, 25 bp, Homo sapien
agtctgtagtacaatagctatttac

SEQ ID NO: 2364401 - DNA, 25 bp, Homo sapien
tcctaaggacttagctggcacagcc

SEQ ID NO: 2364402 - DNA, 25 bp, Homo sapien
gggcataggctttgaaatccacgtc

SEQ ID NO: 2364403 - DNA, 25 bp, Homo sapien
tgaccacaacctgggaaagccgtgg

SEQ ID NO: 2364404 - DNA, 25 bp, Homo sapien
catacacagcgtttgggtaagtcaa

SEQ ID NO: 2364405 - DNA, 25 bp, Homo sapien
gatcagcccgactatgacagcgtgg

SEQ ID NO: 2364406 - DNA, 25 bp, Homo sapien
gatagacaatgtggagctcatactg

SEQ ID NO: 2364407 - DNA, 25 bp, Homo sapien
gacagcgtggcatcagacgaagaca

SEQ ID NO: 2364408 - DNA, 25 bp, Homo sapien
ccagcacagcgttgagagtcaagac

SEQ ID NO: 2364409 - DNA, 25 bp, Homo sapien
ttttaaagtcagtgaatagtgagca

SEQ ID NO: 2364410 - DNA, 25 bp, Homo sapien
cagagcgcctcgtggaaatacagta

SEQ ID NO: 2364411 - DNA, 25 bp, Homo sapien
tgataaactgctcaggtgtctcagg

SEQ ID NO: 2364412 - DNA, 25 bp, Homo sapien
tgtctcaggagacgtctttgtactc

SEQ ID NO: 2364413 - DNA, 25 bp, Homo sapien
ttttcagcaactccattcgagcgtg

SEQ ID NO: 2364414 - DNA, 25 bp, Homo sapien
gagactgttatctttaggagcacaa

SEQ ID NO: 2364415 - DNA, 25 bp, Homo sapien
tcagctgccctaggacatcattctt

SEQ ID NO: 2364416 - DNA, 25 bp, Homo sapien
cgtgagaacagggaatcttgaaacc

SEQ ID NO: 2364417 - DNA, 25 bp, Homo sapien
gcgtgagccactgcacccggccagg

SEQ ID NO: 2364418 - DNA, 25 bp, Homo sapien
cctcctagtgttgggattgcaagcg

SEQ ID NO: 2364419 - DNA, 25 bp, Homo sapien
gcaagcgtgagccactgcacccggc

SEQ ID NO: 2364420 - DNA, 25 bp, Homo sapien
aagcgtgagccactgcacccggcca

SEQ ID NO: 2364421 - DNA, 25 bp, Homo sapien
ctgagatcattgtgcaagaagtggc

SEQ ID NO: 2364422 - DNA, 25 bp, Homo sapien
caaaaactttgtccagtgatcatga

SEQ ID NO: 2364423 - DNA, 25 bp, Homo sapien
taatgcatctttgtagagctccttc

SEQ ID NO: 2364424 - DNA, 25 bp, Homo sapien
gctcccaggattcgtctttgattga

SEQ ID NO: 2364425 - DNA, 25 bp, Homo sapien
gggtgacaactgagccccggaccaa

SEQ ID NO: 2364426 - DNA, 25 bp, Homo sapien
gatgcttccacgacgggtcaaaagc

SEQ ID NO: 2364427 - DNA, 25 bp, Homo sapien
gtggttcggtccacaactgggcctc

SEQ ID NO: 2364428 - DNA, 25 bp, Homo sapien
ttggagcaggacagatgcttccacg

SEQ ID NO: 2364429 - DNA, 25 bp, Homo sapien
ctccagctcacaccgagaaactcag

SEQ ID NO: 2364430 - DNA, 25 bp, Homo sapien
caaagatctccacgcggaaagttcc

SEQ ID NO: 2364431 - DNA, 25 bp, Homo sapien
tccagctcacaccgagaaactcagt

SEQ ID NO: 2364432 - DNA, 25 bp, Homo sapien
ccaaagatctccacgcggaaagttc

SEQ ID NO: 2364433 - DNA, 25 bp, Homo sapien
tagggcgtgttacgctgccggccgg

SEQ ID NO: 2364434 - DNA, 25 bp, Homo sapien
tgccggccggctgagccggtcgggt

SEQ ID NO: 2364435 - DNA, 25 bp, Homo sapien
gcgctgacagctcgcggacagactt

SEQ ID NO: 2364436 - DNA, 25 bp, Homo sapien
aggccggcgagcaagcgagcgtagg

SEQ ID NO: 2364437 - DNA, 25 bp, Homo sapien
gaggccgtaacctggtcctcgtcgc

SEQ ID NO: 2364438 - DNA, 25 bp, Homo sapien
gcgaggaggccgtaacctggtcctc

SEQ ID NO: 2364439 - DNA, 25 bp, Homo sapien
tcctcgtcgcccgccccaagtctcg

SEQ ID NO: 2364440 - DNA, 25 bp, Homo sapien
tcgtcgcccgccccaagtctcggcc

SEQ ID NO: 2364441 - DNA, 25 bp, Homo sapien
agtcgtttttccagactaggaggtg

SEQ ID NO: 2364442 - DNA, 25 bp, Homo sapien
tcgagctgccggtagtcgtttttcc

SEQ ID NO: 2364443 - DNA, 25 bp, Homo sapien
gtggtcgcccgcgtcgcaggccgag

SEQ ID NO: 2364444 - DNA, 25 bp, Homo sapien
tttttccagactaggaggtgcaggg

SEQ ID NO: 2364445 - DNA, 25 bp, Homo sapien
aaggaaacagcaagatgcaataatg

SEQ ID NO: 2364446 - DNA, 25 bp, Homo sapien
gagtaagactcgagcagattccaaa

SEQ ID NO: 2364447 - DNA, 25 bp, Homo sapien
catctgctttatgtcggagtaagac

SEQ ID NO: 2364448 - DNA, 25 bp, Homo sapien
taatgttcgacctcgtgggtccaca

SEQ ID NO: 2364449 - DNA, 25 bp, Homo sapien
tgtacaccatctcaggatcgccagt

SEQ ID NO: 2364450 - DNA, 25 bp, Homo sapien
ttggagaactgtgtacaccatctca

SEQ ID NO: 2364451 - DNA, 25 bp, Homo sapien
gtgttgtggtagtctcgatgttgga

SEQ ID NO: 2364452 - DNA, 25 bp, Homo sapien
tctcaggatcgccagtgctcacagc

SEQ ID NO: 2364453 - DNA, 25 bp, Homo sapien
ctcgagaattttttggagcagctca

SEQ ID NO: 2364454 - DNA, 25 bp, Homo sapien
tcatctgcacatagaaatccggagc

SEQ ID NO: 2364455 - DNA, 25 bp, Homo sapien
agtttggcaccacttttccagatgc

SEQ ID NO: 2364456 - DNA, 25 bp, Homo sapien
cgacagacatcatttgggcatattc

SEQ ID NO: 2364457 - DNA, 25 bp, Homo sapien
gatatcgacgcgcagtttggcacca

SEQ ID NO: 2364458 - DNA, 25 bp, Homo sapien
gttttcaaatcccagcaatgtgata

SEQ ID NO: 2364459 - DNA, 25 bp, Homo sapien
tgacagggcttgtgagccgccgctc

SEQ ID NO: 2364460 - DNA, 25 bp, Homo sapien
tcaagtccagagtgaggcgctccat

SEQ ID NO: 2364461 - DNA, 25 bp, Homo sapien
catttcttgggaaaggtcgaagcgt

SEQ ID NO: 2364462 - DNA, 25 bp, Homo sapien
tcgaagcgttcggtggtgaccactt

SEQ ID NO: 2364463 - DNA, 25 bp, Homo sapien
agacattaaaatttagagtctaaat

SEQ ID NO: 2364464 - DNA, 25 bp, Homo sapien
ggcagcatggggattagacattaaa

SEQ ID NO: 2364465 - DNA, 25 bp, Homo sapien
gaaaaagcccaatccatccataatt

SEQ ID NO: 2364466 - DNA, 25 bp, Homo sapien
ttaatacatacatgtcactcaagat

SEQ ID NO: 2364467 - DNA, 25 bp, Homo sapien
agttagcttgagaactctgaaaacc

SEQ ID NO: 2364468 - DNA, 25 bp, Homo sapien
cagttgcaaaagagttagcttgaga

SEQ ID NO: 2364469 - DNA, 25 bp, Homo sapien
gcaaaagagttagcttgagaactct

SEQ ID NO: 2364470 - DNA, 25 bp, Homo sapien
ctgtcagttgcaaaagagttagctt

SEQ ID NO: 2364471 - DNA, 25 bp, Homo sapien
ccaaaaattcatcagggcagggtat

SEQ ID NO: 2364472 - DNA, 25 bp, Homo sapien
aagacggcgctatgcttttctccca

SEQ ID NO: 2364473 - DNA, 25 bp, Homo sapien
taggacagcacaacccgtggatgga

SEQ ID NO: 2364474 - DNA, 25 bp, Homo sapien
tccgaagatgatagaacacctggct

SEQ ID NO: 2364475 - DNA, 25 bp, Homo sapien
cactgagtggttgggatgtcatgca

SEQ ID NO: 2364476 - DNA, 25 bp, Homo sapien
tccttttaaagtagcccagcattcc

SEQ ID NO: 2364477 - DNA, 25 bp, Homo sapien
ggccaggaactcatcactgtggtga

SEQ ID NO: 2364478 - DNA, 25 bp, Homo sapien
aatagctgagtcacatgtttgggca

SEQ ID NO: 2364479 - DNA, 25 bp, Homo sapien
ttaactggggacatgcatgtcaatg

SEQ ID NO: 2364480 - DNA, 25 bp, Homo sapien
cttaactggggacatgcatgtcaat

SEQ ID NO: 2364481 - DNA, 25 bp, Homo sapien
ccaggtcagagcatttatctgggtc

SEQ ID NO: 2364482 - DNA, 25 bp, Homo sapien
cttgccacaaggtggtaaccaggtc

SEQ ID NO: 2364483 - DNA, 25 bp, Homo sapien
ggcatagaaagcctccaatcttggc

SEQ ID NO: 2364484 - DNA, 25 bp, Homo sapien
ggacagcagtcccaaagaagtgact

SEQ ID NO: 2364485 - DNA, 25 bp, Homo sapien
tgaaggacacttggaaatcatggtc

SEQ ID NO: 2364486 - DNA, 25 bp, Homo sapien
ccacaggaggcggttagcaatgaca

SEQ ID NO: 2364487 - DNA, 25 bp, Homo sapien
ccccagcttaagttagtgaaggaca

SEQ ID NO: 2364488 - DNA, 25 bp, Homo sapien
tcatggtcctattgtccacaggagg

SEQ ID NO: 2364489 - DNA, 25 bp, Homo sapien
tcgtaaccattaacaacttctgctt

SEQ ID NO: 2364490 - DNA, 25 bp, Homo sapien
ctttgcttcgtaaccattaacaact

SEQ ID NO: 2364491 - DNA, 25 bp, Homo sapien
tcctccagccccagaatccggattt

SEQ ID NO: 2364492 - DNA, 25 bp, Homo sapien
ccagccccagaatccggatttagtt

SEQ ID NO: 2364493 - DNA, 25 bp, Homo sapien
tccatggcacagatgcatgaaaaaa

SEQ ID NO: 2364494 - DNA, 25 bp, Homo sapien
gactagcttgtcattcctaccagaa

SEQ ID NO: 2364495 - DNA, 25 bp, Homo sapien
ttagcatagctacagacctcctcag

SEQ ID NO: 2364496 - DNA, 25 bp, Homo sapien
ctcctcagggcatgctatcccattt

SEQ ID NO: 2364497 - DNA, 25 bp, Homo sapien
gaattctctctatatgccacgtgag

SEQ ID NO: 2364498 - DNA, 25 bp, Homo sapien
tcttgctgagcatgacgtaagcctt

SEQ ID NO: 2364499 - DNA, 25 bp, Homo sapien
gatgactggatcaacaatcgtctcc

SEQ ID NO: 2364500 - DNA, 25 bp, Homo sapien
gacttatgagctgtagagaaaacca

SEQ ID NO: 2364501 - DNA, 25 bp, Homo sapien
gctactatgactggttaattttcgt

SEQ ID NO: 2364502 - DNA, 25 bp, Homo sapien
caggcatgtgctactatgactggtt

SEQ ID NO: 2364503 - DNA, 25 bp, Homo sapien
gcatgtgctactatgactggttaat

SEQ ID NO: 2364504 - DNA, 25 bp, Homo sapien
atgtgctactatgactggttaattt

SEQ ID NO: 2364505 - DNA, 25 bp, Homo sapien
ttttttcctcctcggtcagatgttc

SEQ ID NO: 2364506 - DNA, 25 bp, Homo sapien
tcctcggtcagatgttctgtgcgta

SEQ ID NO: 2364507 - DNA, 25 bp, Homo sapien
cagatgttctgtgcgtattttggtg

SEQ ID NO: 2364508 - DNA, 25 bp, Homo sapien
ttctgtgcgtattttggtgatcaca

SEQ ID NO: 2364509 - DNA, 25 bp, Homo sapien
ctgatgtcaggagttcgagaccagc

SEQ ID NO: 2364510 - DNA, 25 bp, Homo sapien
acctgatgtcaggagttcgagacca

SEQ ID NO: 2364511 - DNA, 25 bp, Homo sapien
cgaggtgggtgaggatcacctgatg

SEQ ID NO: 2364512 - DNA, 25 bp, Homo sapien
aggtgggtgaggatcacctgatgtc

SEQ ID NO: 2364513 - DNA, 25 bp, Homo sapien
ccaccgtgctcagccaggaaatttt

SEQ ID NO: 2364514 - DNA, 25 bp, Homo sapien
agctcaccaaaacctccgcctgcca

SEQ ID NO: 2364515 - DNA, 25 bp, Homo sapien
cagctcaccaaaacctccgcctgcc

SEQ ID NO: 2364516 - DNA, 25 bp, Homo sapien
ccgtgctcagccaggaaattttttt

SEQ ID NO: 2364517 - DNA, 25 bp, Homo sapien
caccaaattggtgttccacagttcc

SEQ ID NO: 2364518 - DNA, 25 bp, Homo sapien
ttgtgcaccaaattggtgttccaca

SEQ ID NO: 2364519 - DNA, 25 bp, Homo sapien
tgtgcaccaaattggtgttccacag

SEQ ID NO: 2364520 - DNA, 25 bp, Homo sapien
tgcaccaaattggtgttccacagtt

SEQ ID NO: 2364521 - DNA, 25 bp, Homo sapien
tgttcacaagtgaaggcctgtggca

SEQ ID NO: 2364522 - DNA, 25 bp, Homo sapien
tctgaggtggacgtgttaaccagct

SEQ ID NO: 2364523 - DNA, 25 bp, Homo sapien
gcagggacatccactgtaccaagtt

SEQ ID NO: 2364524 - DNA, 25 bp, Homo sapien
gaggcccctcgtttataatggataa

SEQ ID NO: 2364525 - DNA, 25 bp, Homo sapien
taatcgtcagctctttcggccttcc

SEQ ID NO: 2364526 - DNA, 25 bp, Homo sapien
ttctgtgttctaatcgtcagctctt

SEQ ID NO: 2364527 - DNA, 25 bp, Homo sapien
ctgtggggttgtttgcagtagcaca

SEQ ID NO: 2364528 - DNA, 25 bp, Homo sapien
cagtagcacattccgtggtgaggtc

SEQ ID NO: 2364529 - DNA, 25 bp, Homo sapien
tgcagaattcaaccaagaaaagact

SEQ ID NO: 2364530 - DNA, 25 bp, Homo sapien
ttcagacctattaaaggtcaaatgt

SEQ ID NO: 2364531 - DNA, 25 bp, Homo sapien
tgggaaaaggagattattgctatgc

SEQ ID NO: 2364532 - DNA, 25 bp, Homo sapien
taggctagacaacagcagctttact

SEQ ID NO: 2364533 - DNA, 25 bp, Homo sapien
tcagtcttgcaaaatgagcactcgt

SEQ ID NO: 2364534 - DNA, 25 bp, Homo sapien
gcactcgttcgagccattaggtcaa

SEQ ID NO: 2364535 - DNA, 25 bp, Homo sapien
cttcacacatccacaacattgcttt

SEQ ID NO: 2364536 - DNA, 25 bp, Homo sapien
taggtcaatgatgggaatgacctgc

SEQ ID NO: 2364537 - DNA, 25 bp, Homo sapien
ccgtgcatttaagacatgaaacaag

SEQ ID NO: 2364538 - DNA, 25 bp, Homo sapien
attttgagatacagattcttcggca

SEQ ID NO: 2364539 - DNA, 25 bp, Homo sapien
gtaatccgtgcatttaagacatgaa

SEQ ID NO: 2364540 - DNA, 25 bp, Homo sapien
agattcttcggcagtgctacagcca

SEQ ID NO: 2364541 - DNA, 25 bp, Homo sapien
gggtacacatctaggaattgctagg

SEQ ID NO: 2364542 - DNA, 25 bp, Homo sapien
tccagccaagagtgcacgagtgttc

SEQ ID NO: 2364543 - DNA, 25 bp, Homo sapien
gcataactttctttagggtacacat

SEQ ID NO: 2364544 - DNA, 25 bp, Homo sapien
tattcaaggaactataccaatctcc

SEQ ID NO: 2364545 - DNA, 25 bp, Homo sapien
attatctcgtaatcttcatcttgca

SEQ ID NO: 2364546 - DNA, 25 bp, Homo sapien
ttcaaacacagattgatcaacctca

SEQ ID NO: 2364547 - DNA, 25 bp, Homo sapien
aactgcattatctcgtaatcttcat

SEQ ID NO: 2364548 - DNA, 25 bp, Homo sapien
acagattgatcaacctcaaagtttg

SEQ ID NO: 2364549 - DNA, 25 bp, Homo sapien
gcgtcataggtgtttgtctggctga

SEQ ID NO: 2364550 - DNA, 25 bp, Homo sapien
tgtctggctgatccctccattcgaa

SEQ ID NO: 2364551 - DNA, 25 bp, Homo sapien
gtgtttgtctggctgatccctccat

SEQ ID NO: 2364552 - DNA, 25 bp, Homo sapien
gctgatccctccattcgaagctggt

SEQ ID NO: 2364553 - DNA, 25 bp, Homo sapien
tcattatcaaaacggcttgtctcgc

SEQ ID NO: 2364554 - DNA, 25 bp, Homo sapien
aacggcttgtctcgctcagggcgct

SEQ ID NO: 2364555 - DNA, 25 bp, Homo sapien
ggctagctgcaagtcattatcaaaa

SEQ ID NO: 2364556 - DNA, 25 bp, Homo sapien
gctccatggctagctgcaagtcatt

SEQ ID NO: 2364557 - DNA, 25 bp, Homo sapien
tcaaggaccttagggagcagagcag

SEQ ID NO: 2364558 - DNA, 25 bp, Homo sapien
ttaaggctaaggcaacatccatggc

SEQ ID NO: 2364559 - DNA, 25 bp, Homo sapien
tccttcagggacaggattagctgcc

SEQ ID NO: 2364560 - DNA, 25 bp, Homo sapien
cctgtgggaatgaatacacgggcca

SEQ ID NO: 2364561 - DNA, 25 bp, Homo sapien
aatgcgctggttgcaaagtggtgtc

SEQ ID NO: 2364562 - DNA, 25 bp, Homo sapien
cctgagttagcctagaatgcgctgg

SEQ ID NO: 2364563 - DNA, 25 bp, Homo sapien
tgagtctttctagcccacggtctga

SEQ ID NO: 2364564 - DNA, 25 bp, Homo sapien
cagaagtgcatgtccactgtgcggg

SEQ ID NO: 2364565 - DNA, 25 bp, Homo sapien
gcagatttgtgagttagttgcttct

SEQ ID NO: 2364566 - DNA, 25 bp, Homo sapien
cttgagtaatcagttgtagttccca

SEQ ID NO: 2364567 - DNA, 25 bp, Homo sapien
tctttgctcaaaaggccctgtcaag

SEQ ID NO: 2364568 - DNA, 25 bp, Homo sapien
tcctgtatcaccagggctcaacttg

SEQ ID NO: 2364569 - DNA, 25 bp, Homo sapien
tttttagctactgggtgtgaggcct

SEQ ID NO: 2364570 - DNA, 25 bp, Homo sapien
tgatttttagctactgggtgtgagg

SEQ ID NO: 2364571 - DNA, 25 bp, Homo sapien
atttttagctactgggtgtgaggcc

SEQ ID NO: 2364572 - DNA, 25 bp, Homo sapien
gttgatttttagctactgggtgtga

SEQ ID NO: 2364573 - DNA, 25 bp, Homo sapien
cctgttttccctgttggcgctctcc

SEQ ID NO: 2364574 - DNA, 25 bp, Homo sapien
ctgccaccacttcacaggcttccat

SEQ ID NO: 2364575 - DNA, 25 bp, Homo sapien
catcaaagtggtgcccattggttac

SEQ ID NO: 2364576 - DNA, 25 bp, Homo sapien
aagtggtgcccattggttacattca

SEQ ID NO: 2364577 - DNA, 25 bp, Homo sapien
ctgtgacatcatcaaagtggtgccc

SEQ ID NO: 2364578 - DNA, 25 bp, Homo sapien
catcatcaaagtggtgcccattggt

SEQ ID NO: 2364579 - DNA, 25 bp, Homo sapien
gctgcttacatggatgggcttcaaa

SEQ ID NO: 2364580 - DNA, 25 bp, Homo sapien
taagaagatgctgcttacatggatg

SEQ ID NO: 2364581 - DNA, 25 bp, Homo sapien
gatgctgcttacatggatgggcttc

SEQ ID NO: 2364582 - DNA, 25 bp, Homo sapien
cagaagccatctgataagaagatgc

SEQ ID NO: 2364583 - DNA, 25 bp, Homo sapien
gggctctagaccgctcccagagtcg

SEQ ID NO: 2364584 - DNA, 25 bp, Homo sapien
gcccgggctctagaccgctcccaga

SEQ ID NO: 2364585 - DNA, 25 bp, Homo sapien
gaggcgcccgggctctagaccgctc

SEQ ID NO: 2364586 - DNA, 25 bp, Homo sapien
gctctagaccgctcccagagtcgag

SEQ ID NO: 2364587 - DNA, 25 bp, Homo sapien
caatttgggagagaaaccgtgctgc

SEQ ID NO: 2364588 - DNA, 25 bp, Homo sapien
gaacaatgaaaaccaggacgtgcgt

SEQ ID NO: 2364589 - DNA, 25 bp, Homo sapien
ttccacttgcgaggtgctgcatcag

SEQ ID NO: 2364590 - DNA, 25 bp, Homo sapien
tggatccgctcgaatcccagaaggg

SEQ ID NO: 2364591 - DNA, 25 bp, Homo sapien
caacgtaggcatgaaaagtataatt

SEQ ID NO: 2364592 - DNA, 25 bp, Homo sapien
tctggtgtaacagtaatcatctgag

SEQ ID NO: 2364593 - DNA, 25 bp, Homo sapien
tttacatggcatacaaaatgctgtg

SEQ ID NO: 2364594 - DNA, 25 bp, Homo sapien
tactggcaacaaaagtcctgggtaa

SEQ ID NO: 2364595 - DNA, 25 bp, Homo sapien
tgtaatagttgcattggctccaagg

SEQ ID NO: 2364596 - DNA, 25 bp, Homo sapien
gaacttgtaatagttgcattggctc

SEQ ID NO: 2364597 - DNA, 25 bp, Homo sapien
atcactgagaacttgtaatagttgc

SEQ ID NO: 2364598 - DNA, 25 bp, Homo sapien
tcaaacgtgattaaattatagttct

SEQ ID NO: 2364599 - DNA, 25 bp, Homo sapien
aataatgtgcccaagactcacagct

SEQ ID NO: 2364600 - DNA, 25 bp, Homo sapien
tttctgctacccatcaaaaagaaag

SEQ ID NO: 2364601 - DNA, 25 bp, Homo sapien
gagggagaaattggctttctgctac

SEQ ID NO: 2364602 - DNA, 25 bp, Homo sapien
actcacagctatttagagggagaaa

SEQ ID NO: 2364603 - DNA, 25 bp, Homo sapien
agaaggctcaacattcgtttggctg

SEQ ID NO: 2364604 - DNA, 25 bp, Homo sapien
aaggctcaacattcgtttggctgtc

SEQ ID NO: 2364605 - DNA, 25 bp, Homo sapien
ccaagaaggctcaacattcgtttgg

SEQ ID NO: 2364606 - DNA, 25 bp, Homo sapien
ggctcaacattcgtttggctgtctg

SEQ ID NO: 2364607 - DNA, 25 bp, Homo sapien
taaattacaggtttacttccaatca

SEQ ID NO: 2364608 - DNA, 25 bp, Homo sapien
caatcaccaaaccctgacgaaaagt

SEQ ID NO: 2364609 - DNA, 25 bp, Homo sapien
attacaggtttacttccaatcacca

SEQ ID NO: 2364610 - DNA, 25 bp, Homo sapien
tacaggtttacttccaatcaccaaa

SEQ ID NO: 2364611 - DNA, 25 bp, Homo sapien
ttattaaaaaacgagctaaatatgc

SEQ ID NO: 2364612 - DNA, 25 bp, Homo sapien
aaaacgagctaaatatgctcttttc

SEQ ID NO: 2364613 - DNA, 25 bp, Homo sapien
tcacttggtacctcaagttttatta

SEQ ID NO: 2364614 - DNA, 25 bp, Homo sapien
gaagaaactcacttggtacctcaag

SEQ ID NO: 2364615 - DNA, 25 bp, Homo sapien
ttattttgatggggaatgacagaat

SEQ ID NO: 2364616 - DNA, 25 bp, Homo sapien
gattgatcatatcttaaatctacaa

SEQ ID NO: 2364617 - DNA, 25 bp, Homo sapien
ttcttgattgatcatatcttaaatc

SEQ ID NO: 2364618 - DNA, 25 bp, Homo sapien
tttgatggggaatgacagaataata

SEQ ID NO: 2364619 - DNA, 25 bp, Homo sapien
ggttactttcctgcttcacactcta

SEQ ID NO: 2364620 - DNA, 25 bp, Homo sapien
gagaagccttctctggccctttatc

SEQ ID NO: 2364621 - DNA, 25 bp, Homo sapien
tgtacacccttgtatccctagggcc

SEQ ID NO: 2364622 - DNA, 25 bp, Homo sapien
tagcacagtgcataacccatggagg

SEQ ID NO: 2364623 - DNA, 25 bp, Homo sapien
aaatccagatatcttgagctgctca

SEQ ID NO: 2364624 - DNA, 25 bp, Homo sapien
caactctcttaatgagctgatcctt

SEQ ID NO: 2364625 - DNA, 25 bp, Homo sapien
aatgttcaactctcttaatgagctg

SEQ ID NO: 2364626 - DNA, 25 bp, Homo sapien
actctcttaatgagctgatcctttt

SEQ ID NO: 2364627 - DNA, 25 bp, Homo sapien
tcttcaaatgttcaactctcttaat

SEQ ID NO: 2364628 - DNA, 25 bp, Homo sapien
caactcgaagttgccttgctatttt

SEQ ID NO: 2364629 - DNA, 25 bp, Homo sapien
tttcaactcgaagttgccttgctat

SEQ ID NO: 2364630 - DNA, 25 bp, Homo sapien
tcaactcgaagttgccttgctattt

SEQ ID NO: 2364631 - DNA, 25 bp, Homo sapien
aactcgaagttgccttgctatttta

SEQ ID NO: 2364632 - DNA, 25 bp, Homo sapien
tgcaatctttgcactgcatgaaata

SEQ ID NO: 2364633 - DNA, 25 bp, Homo sapien
tgcagcttggcgcatgcttttcagc

SEQ ID NO: 2364634 - DNA, 25 bp, Homo sapien
tactctttgcaatctttgcactgca

SEQ ID NO: 2364635 - DNA, 25 bp, Homo sapien
gcttggcgcatgcttttcagctggt

SEQ ID NO: 2364636 - DNA, 25 bp, Homo sapien
ttttcagttaccatatataaattaa

SEQ ID NO: 2364637 - DNA, 25 bp, Homo sapien
atcagaatggcccatagctggctct

SEQ ID NO: 2364638 - DNA, 25 bp, Homo sapien
gcccatagctggctctgaaactact

SEQ ID NO: 2364639 - DNA, 25 bp, Homo sapien
aagatcagaatggcccatagctggc

SEQ ID NO: 2364640 - DNA, 25 bp, Homo sapien
gaatggcccatagctggctctgaaa

SEQ ID NO: 2364641 - DNA, 25 bp, Homo sapien
ttcaatcaactggttaatttctgtg

SEQ ID NO: 2364642 - DNA, 25 bp, Homo sapien
gagagtttgccttcaatgggctcat

SEQ ID NO: 2364643 - DNA, 25 bp, Homo sapien
tcttttcaatcaactggttaatttc

SEQ ID NO: 2364644 - DNA, 25 bp, Homo sapien
tgttgcctatacagtgagagtttgc

SEQ ID NO: 2364645 - DNA, 25 bp, Homo sapien
tctctctaggctggctaacttctcc

SEQ ID NO: 2364646 - DNA, 25 bp, Homo sapien
taaaacttcagtaccatcaaattca

SEQ ID NO: 2364647 - DNA, 25 bp, Homo sapien
caaattcacgggtctgatttctctt

SEQ ID NO: 2364648 - DNA, 25 bp, Homo sapien
cttttttacgggaaatgatagatgc

SEQ ID NO: 2364649 - DNA, 25 bp, Homo sapien
taggagtttcaggctgcagtaagcc

SEQ ID NO: 2364650 - DNA, 25 bp, Homo sapien
gcctaggagtttcaggctgcagtaa

SEQ ID NO: 2364651 - DNA, 25 bp, Homo sapien
ctgggtgacagagtgagatcctgtc

SEQ ID NO: 2364652 - DNA, 25 bp, Homo sapien
atgatcacaccaccgcactccagcc

SEQ ID NO: 2364653 - DNA, 25 bp, Homo sapien
tcaggcaagtcagcttaaaacctct

SEQ ID NO: 2364654 - DNA, 25 bp, Homo sapien
aactattgatgactctacagccaga

SEQ ID NO: 2364655 - DNA, 25 bp, Homo sapien
gcacagtgcccctatctaccaagat

SEQ ID NO: 2364656 - DNA, 25 bp, Homo sapien
ggttctactacttactagcaatggg

SEQ ID NO: 2364657 - DNA, 25 bp, Homo sapien
ctttgcaagcagacctttctaggga

SEQ ID NO: 2364658 - DNA, 25 bp, Homo sapien
caagcaggagctcgacataaagcac

SEQ ID NO: 2364659 - DNA, 25 bp, Homo sapien
tcatatactttaggcaaggtgagcc

SEQ ID NO: 2364660 - DNA, 25 bp, Homo sapien
tcttatcagtgaatggcaggaatcc

SEQ ID NO: 2364661 - DNA, 25 bp, Homo sapien
aaatcctgctagtccaacatccatg

SEQ ID NO: 2364662 - DNA, 25 bp, Homo sapien
cttcaaatcctgctagtccaacatc

SEQ ID NO: 2364663 - DNA, 25 bp, Homo sapien
catagacaactacaggaattggccc

SEQ ID NO: 2364664 - DNA, 25 bp, Homo sapien
tcaaatcctgctagtccaacatcca

SEQ ID NO: 2364665 - DNA, 25 bp, Homo sapien
gaatattttcatgacgttgcttaag

SEQ ID NO: 2364666 - DNA, 25 bp, Homo sapien
ttcagtcctctgcaaaagaccgaat

SEQ ID NO: 2364667 - DNA, 25 bp, Homo sapien
actcttgcttcgaagtttattgaca

SEQ ID NO: 2364668 - DNA, 25 bp, Homo sapien
tttaagttcagctattatctgatgc

SEQ ID NO: 2364669 - DNA, 25 bp, Homo sapien
ctagctcttcttgggtgtaactata

SEQ ID NO: 2364670 - DNA, 25 bp, Homo sapien
cagacatatcatccaatgttcgtcc

SEQ ID NO: 2364671 - DNA, 25 bp, Homo sapien
cactcttcagtgcagatactctttc

SEQ ID NO: 2364672 - DNA, 25 bp, Homo sapien
gggtgtaactatatccagatatacc

SEQ ID NO: 2364673 - DNA, 25 bp, Homo sapien
cgcaactgtcgtagctcttttataa

SEQ ID NO: 2364674 - DNA, 25 bp, Homo sapien
atatttttgacgcaactgtcgtagc

SEQ ID NO: 2364675 - DNA, 25 bp, Homo sapien
cagataccaatgaatacagtttttt

SEQ ID NO: 2364676 - DNA, 25 bp, Homo sapien
gtagctcttttataactgaggcaag

SEQ ID NO: 2364677 - DNA, 25 bp, Homo sapien
gagtagctggaaaacagaccgcaaa

SEQ ID NO: 2364678 - DNA, 25 bp, Homo sapien
taaacaatattagacacctctgagg

SEQ ID NO: 2364679 - DNA, 25 bp, Homo sapien
caaaacatggtactgaaatctggac

SEQ ID NO: 2364680 - DNA, 25 bp, Homo sapien
taaatgataaactgatagccgaccc

SEQ ID NO: 2364681 - DNA, 25 bp, Homo sapien
gggaaaatgattgaataagtgaaaa

SEQ ID NO: 2364682 - DNA, 25 bp, Homo sapien
aaaagggaaaatgattgaataagtg

SEQ ID NO: 2364683 - DNA, 25 bp, Homo sapien
tataaaaagggaaaatgattgaata

SEQ ID NO: 2364684 - DNA, 25 bp, Homo sapien
aagggaaaatgattgaataagtgaa

SEQ ID NO: 2364685 - DNA, 25 bp, Homo sapien
gaccgattgctttcgaggcctgctg

SEQ ID NO: 2364686 - DNA, 25 bp, Homo sapien
ctgttctaatttggaccgattgctt

SEQ ID NO: 2364687 - DNA, 25 bp, Homo sapien
aatttggaccgattgctttcgaggc

SEQ ID NO: 2364688 - DNA, 25 bp, Homo sapien
gattgctttcgaggcctgctgcaca

SEQ ID NO: 2364689 - DNA, 25 bp, Homo sapien
gaagacattcttcacggagtcttct

SEQ ID NO: 2364690 - DNA, 25 bp, Homo sapien
cattcttcacggagtcttctaactt

SEQ ID NO: 2364691 - DNA, 25 bp, Homo sapien
acattcttcacggagtcttctaact

SEQ ID NO: 2364692 - DNA, 25 bp, Homo sapien
agacattcttcacggagtcttctaa

SEQ ID NO: 2364693 - DNA, 25 bp, Homo sapien
tcagaagagatatatgccttcatct

SEQ ID NO: 2364694 - DNA, 25 bp, Homo sapien
tatatgccttcatctcatcagtagc

SEQ ID NO: 2364695 - DNA, 25 bp, Homo sapien
cacgacgaagttgaacttctaggtt

SEQ ID NO: 2364696 - DNA, 25 bp, Homo sapien
tcatctcatcagtagcacgacgaag

SEQ ID NO: 2364697 - DNA, 25 bp, Homo sapien
gctaaatttgtataattctatctta

SEQ ID NO: 2364698 - DNA, 25 bp, Homo sapien
tatgctaaatttgtataattctatc

SEQ ID NO: 2364699 - DNA, 25 bp, Homo sapien
tggtgaaaatattaagtatctcaat

SEQ ID NO: 2364700 - DNA, 25 bp, Homo sapien
tttattggtgaaaatattaagtatc

SEQ ID NO: 2364701 - DNA, 25 bp, Homo sapien
caatgcaatctagaataaacgtgag

SEQ ID NO: 2364702 - DNA, 25 bp, Homo sapien
agtacgccacaagctgggattgcaa

SEQ ID NO: 2364703 - DNA, 25 bp, Homo sapien
tgtacatgccactcaaaatctcaat

SEQ ID NO: 2364704 - DNA, 25 bp, Homo sapien
aacgtgagtgctacattttatctga

SEQ ID NO: 2364705 - DNA, 25 bp, Homo sapien
ttcagcagtatttttggtatactgt

SEQ ID NO: 2364706 - DNA, 25 bp, Homo sapien
ccaaggttttcttgttcagcagtat

SEQ ID NO: 2364707 - DNA, 25 bp, Homo sapien
tttcttgttcagcagtatttttggt

SEQ ID NO: 2364708 - DNA, 25 bp, Homo sapien
tgttcagcagtatttttggtatact

SEQ ID NO: 2364709 - DNA, 25 bp, Homo sapien
caaatcacgccacatttttgcttgt

SEQ ID NO: 2364710 - DNA, 25 bp, Homo sapien
gcttgtttcatatttggaccatgac

SEQ ID NO: 2364711 - DNA, 25 bp, Homo sapien
tcttacattccattaattgttccaa

SEQ ID NO: 2364712 - DNA, 25 bp, Homo sapien
tggaccatgactttctcgtataact

SEQ ID NO: 2364713 - DNA, 25 bp, Homo sapien
tcacagtattagccggtcctcccca

SEQ ID NO: 2364714 - DNA, 25 bp, Homo sapien
taggaactgctgaacgtcagataaa

SEQ ID NO: 2364715 - DNA, 25 bp, Homo sapien
tagctagtggtatcaagtaaaaccc

SEQ ID NO: 2364716 - DNA, 25 bp, Homo sapien
gacgccagtgatgtctaaactatgg

SEQ ID NO: 2364717 - DNA, 25 bp, Homo sapien
tacattatgagattaggcttatagc

SEQ ID NO: 2364718 - DNA, 25 bp, Homo sapien
aagaataaattttgacacaagacaa

SEQ ID NO: 2364719 - DNA, 25 bp, Homo sapien
aaagaataaattttgacacaagaca

SEQ ID NO: 2364720 - DNA, 25 bp, Homo sapien
aattttgacacaagacaactataca

SEQ ID NO: 2364721 - DNA, 25 bp, Homo sapien
ataacggttcccacaactatcagat

SEQ ID NO: 2364722 - DNA, 25 bp, Homo sapien
cggttcccacaactatcagattatt

SEQ ID NO: 2364723 - DNA, 25 bp, Homo sapien
ggttcccacaactatcagattattg

SEQ ID NO: 2364724 - DNA, 25 bp, Homo sapien
aacggttcccacaactatcagatta

SEQ ID NO: 2364725 - DNA, 25 bp, Homo sapien
tttgagtcttgtgctacatttaata

SEQ ID NO: 2364726 - DNA, 25 bp, Homo sapien
ttcactttgagtcttgtgctacatt

SEQ ID NO: 2364727 - DNA, 25 bp, Homo sapien
gtcttgtgctacatttaatatgtga

SEQ ID NO: 2364728 - DNA, 25 bp, Homo sapien
atcttcaagtaccttgtccaaatga

SEQ ID NO: 2364729 - DNA, 25 bp, Homo sapien
tatttgggccatcacatgaaagaca

SEQ ID NO: 2364730 - DNA, 25 bp, Homo sapien
tagctagccagagtatcaatcctga

SEQ ID NO: 2364731 - DNA, 25 bp, Homo sapien
gccagctgtcaaagactgtcaaggt

SEQ ID NO: 2364732 - DNA, 25 bp, Homo sapien
tacagtcagtcccatgcaacggttg

SEQ ID NO: 2364733 - DNA, 25 bp, Homo sapien
cagcaggacttctattgtcatctgg

SEQ ID NO: 2364734 - DNA, 25 bp, Homo sapien
gacacaattggaagctaatcttggc

SEQ ID NO: 2364735 - DNA, 25 bp, Homo sapien
taatgatagttaaaacatccatctc

SEQ ID NO: 2364736 - DNA, 25 bp, Homo sapien
aacatccatctccatgggctaaatg

SEQ ID NO: 2364737 - DNA, 25 bp, Homo sapien
gaatccttgagaacaagctatcctt

SEQ ID NO: 2364738 - DNA, 25 bp, Homo sapien
ccttgtggctaacacatgattaata

SEQ ID NO: 2364739 - DNA, 25 bp, Homo sapien
caaatcaagcaagaaggaatccttg

SEQ ID NO: 2364740 - DNA, 25 bp, Homo sapien
aaatctctcgactatcttttcaaaa

SEQ ID NO: 2364741 - DNA, 25 bp, Homo sapien
gcttgtctttgacaatttgatagaa

SEQ ID NO: 2364742 - DNA, 25 bp, Homo sapien
cttgtctttgacaatttgatagaag

SEQ ID NO: 2364743 - DNA, 25 bp, Homo sapien
ctttgacaatttgatagaagatatg

SEQ ID NO: 2364744 - DNA, 25 bp, Homo sapien
tgtctttgacaatttgatagaagat

SEQ ID NO: 2364745 - DNA, 25 bp, Homo sapien
cccataagagctcctgattagcatc

SEQ ID NO: 2364746 - DNA, 25 bp, Homo sapien
caggctcccataagagctcctgatt

SEQ ID NO: 2364747 - DNA, 25 bp, Homo sapien
gctcctgattagcatctgggtctcc

SEQ ID NO: 2364748 - DNA, 25 bp, Homo sapien
tgctttccaggctcccataagagct

SEQ ID NO: 2364749 - DNA, 25 bp, Homo sapien
cactgccctttcacgcagagagact

SEQ ID NO: 2364750 - DNA, 25 bp, Homo sapien
gaacagctgctgaaccttcaggacc

SEQ ID NO: 2364751 - DNA, 25 bp, Homo sapien
ccagcggattgaagtggcttatgcc

SEQ ID NO: 2364752 - DNA, 25 bp, Homo sapien
tctatgagggcccacggctcggcat

SEQ ID NO: 2364753 - DNA, 25 bp, Homo sapien
tcataaggacaaggagttgacagtg

SEQ ID NO: 2364754 - DNA, 25 bp, Homo sapien
gagatgcagggagacggctccagct

SEQ ID NO: 2364755 - DNA, 25 bp, Homo sapien
ggggttggattcagaccaaggtgac

SEQ ID NO: 2364756 - DNA, 25 bp, Homo sapien
tgaccaggaccttgacaatgggcag

SEQ ID NO: 2364757 - DNA, 25 bp, Homo sapien
cgggggggatctggcacacactccc

SEQ ID NO: 2364758 - DNA, 25 bp, Homo sapien
tgaggaaaaaaggaatgtaagtgtc

SEQ ID NO: 2364759 - DNA, 25 bp, Homo sapien
cttgaggaaaaaaggaatgtaagtg

SEQ ID NO: 2364760 - DNA, 25 bp, Homo sapien
tcccatgttgaagacagtgaaggct

SEQ ID NO: 2364761 - DNA, 25 bp, Homo sapien
tgttcccatgttgaagacagtgaag

SEQ ID NO: 2364762 - DNA, 25 bp, Homo sapien
gctgttcccatgttgaagacagtga

SEQ ID NO: 2364763 - DNA, 25 bp, Homo sapien
ttcccatgttgaagacagtgaaggc

SEQ ID NO: 2364764 - DNA, 25 bp, Homo sapien
ctgctgacgataatgggagaaaggc

SEQ ID NO: 2364765 - DNA, 25 bp, Homo sapien
ttccctgctgacgataatgggagaa

SEQ ID NO: 2364766 - DNA, 25 bp, Homo sapien
ccctgctgacgataatgggagaaag

SEQ ID NO: 2364767 - DNA, 25 bp, Homo sapien
gctgacgataatgggagaaaggcat

SEQ ID NO: 2364768 - DNA, 25 bp, Homo sapien
cagggagcattctgagaccacagaa

SEQ ID NO: 2364769 - DNA, 25 bp, Homo sapien
acagaacagcctctaagaggattct

SEQ ID NO: 2364770 - DNA, 25 bp, Homo sapien
tcaaacatctgacatggcaacttgg

SEQ ID NO: 2364771 - DNA, 25 bp, Homo sapien
gaacagcctctaagaggattctctg

SEQ ID NO: 2364772 - DNA, 25 bp, Homo sapien
tctgcagatgccgtgttgattggag

SEQ ID NO: 2364773 - DNA, 25 bp, Homo sapien
ccctctgcagatgccgtgttgattg

SEQ ID NO: 2364774 - DNA, 25 bp, Homo sapien
ccgtgttgattggaggccctctgca

SEQ ID NO: 2364775 - DNA, 25 bp, Homo sapien
cagatgccgtgttgattggaggccc

SEQ ID NO: 2364776 - DNA, 25 bp, Homo sapien
cctctgtctctttcaggaccgatag

SEQ ID NO: 2364777 - DNA, 25 bp, Homo sapien
tctgtctctttcaggaccgatagaa

SEQ ID NO: 2364778 - DNA, 25 bp, Homo sapien
gtctctttcaggaccgatagaagca

SEQ ID NO: 2364779 - DNA, 25 bp, Homo sapien
tgtctctttcaggaccgatagaagc

SEQ ID NO: 2364780 - DNA, 25 bp, Homo sapien
tttccaaggagtggacgttggcatg

SEQ ID NO: 2364781 - DNA, 25 bp, Homo sapien
tttgattgatacttggaaaagaacc

SEQ ID NO: 2364782 - DNA, 25 bp, Homo sapien
tccaaggagtggacgttggcatgta

SEQ ID NO: 2364783 - DNA, 25 bp, Homo sapien
ttgattgatacttggaaaagaacca

SEQ ID NO: 2364784 - DNA, 25 bp, Homo sapien
ccgcggcggctgctctaatagcatt

SEQ ID NO: 2364785 - DNA, 25 bp, Homo sapien
gccgcggcatgtggacgccgctcat

SEQ ID NO: 2364786 - DNA, 25 bp, Homo sapien
tctcttgaggcgatcagaggccccg

SEQ ID NO: 2364787 - DNA, 25 bp, Homo sapien
taatagcatttatcggccgctgcct

SEQ ID NO: 2364788 - DNA, 25 bp, Homo sapien
gctcagccccgtactctcgttgacg

SEQ ID NO: 2364789 - DNA, 25 bp, Homo sapien
accgtcttggtgtgcgcgttctcca

SEQ ID NO: 2364790 - DNA, 25 bp, Homo sapien
tactctcgttgacgccgaagtggcc

SEQ ID NO: 2364791 - DNA, 25 bp, Homo sapien
tctctccttaagcttcttgacctgt

SEQ ID NO: 2364792 - DNA, 25 bp, Homo sapien
aggtccagggaaggcgaggcgagga

SEQ ID NO: 2364793 - DNA, 25 bp, Homo sapien
tggagagaagcctccgagccttgcg

SEQ ID NO: 2364794 - DNA, 25 bp, Homo sapien
ccgagaagcgaagaggtccagggaa

SEQ ID NO: 2364795 - DNA, 25 bp, Homo sapien
cttgcgcgccgaaaaggtcgagggc

SEQ ID NO: 2364796 - DNA, 25 bp, Homo sapien
ttcaaactgctcaatcacaagttcc

SEQ ID NO: 2364797 - DNA, 25 bp, Homo sapien
aactgctcaatcacaagttccagca

SEQ ID NO: 2364798 - DNA, 25 bp, Homo sapien
gtcttcaaactgctcaatcacaagt

SEQ ID NO: 2364799 - DNA, 25 bp, Homo sapien
caaactgctcaatcacaagttccag

SEQ ID NO: 2364800 - DNA, 25 bp, Homo sapien
aaagatatacatgctgccagtaata

SEQ ID NO: 2364801 - DNA, 25 bp, Homo sapien
agatatacatgctgccagtaataaa

SEQ ID NO: 2364802 - DNA, 25 bp, Homo sapien
aagatatacatgctgccagtaataa

SEQ ID NO: 2364803 - DNA, 25 bp, Homo sapien
tagagacacagcttgcaactccaaa

SEQ ID NO: 2364804 - DNA, 25 bp, Homo sapien
gcaactccaaatatgttttcaccca

SEQ ID NO: 2364805 - DNA, 25 bp, Homo sapien
gatttatctatggaatactttcagc

SEQ ID NO: 2364806 - DNA, 25 bp, Homo sapien
tgttttcacccaatggacatcattt

SEQ ID NO: 2364807 - DNA, 25 bp, Homo sapien
gccatcacagccgtcatcattcttg

SEQ ID NO: 2364808 - DNA, 25 bp, Homo sapien
taaaggtcagtgaccaaatttggtc

SEQ ID NO: 2364809 - DNA, 25 bp, Homo sapien
tgtcaccgtcaggaacaactgtcac

SEQ ID NO: 2364810 - DNA, 25 bp, Homo sapien
aaatttggtcaacaagggtgccatc

SEQ ID NO: 2364811 - DNA, 25 bp, Homo sapien
tcagttaagcaaccatacgatgtgt

SEQ ID NO: 2364812 - DNA, 25 bp, Homo sapien
tctcagcagtattatcctccaggta

SEQ ID NO: 2364813 - DNA, 25 bp, Homo sapien
tgatttagacagatgggagaccaac

SEQ ID NO: 2364814 - DNA, 25 bp, Homo sapien
gatccctacaggtcacaagcatagc

SEQ ID NO: 2364815 - DNA, 25 bp, Homo sapien
aaagcatgaattagaactcgttccc

SEQ ID NO: 2364816 - DNA, 25 bp, Homo sapien
taaacatttcgagaatgatacagag

SEQ ID NO: 2364817 - DNA, 25 bp, Homo sapien
cagagaattaccaataaacgttacg

SEQ ID NO: 2364818 - DNA, 25 bp, Homo sapien
cttctgatccagatataaagctatg

SEQ ID NO: 2364819 - DNA, 25 bp, Homo sapien
gttctacaaaggctgtaattgtttc

SEQ ID NO: 2364820 - DNA, 25 bp, Homo sapien
tgcattggctactaatatgagtaaa

SEQ ID NO: 2364821 - DNA, 25 bp, Homo sapien
tgccatacacccacaattgcattgg

SEQ ID NO: 2364822 - DNA, 25 bp, Homo sapien
tctacaaaggctgtaattgtttctt

SEQ ID NO: 2364823 - DNA, 25 bp, Homo sapien
gggtgattatatccgtcaaatacct

SEQ ID NO: 2364824 - DNA, 25 bp, Homo sapien
gtcctcaaaggggtgattatatccg

SEQ ID NO: 2364825 - DNA, 25 bp, Homo sapien
ttcagtcctcaaaggggtgattata

SEQ ID NO: 2364826 - DNA, 25 bp, Homo sapien
caaaggggtgattatatccgtcaaa

SEQ ID NO: 2364827 - DNA, 25 bp, Homo sapien
aaataaaagactatgcccctcatac

SEQ ID NO: 2364828 - DNA, 25 bp, Homo sapien
taccattcagtatactaaagactta

SEQ ID NO: 2364829 - DNA, 25 bp, Homo sapien
tttcagaaggccacaaccctctatt

SEQ ID NO: 2364830 - DNA, 25 bp, Homo sapien
aaccctctattgctgctcataccat

SEQ ID NO: 2364831 - DNA, 25 bp, Homo sapien
gaatggctggactctcatcatagca

SEQ ID NO: 2364832 - DNA, 25 bp, Homo sapien
catgcttagattgtgtttgggcaca

SEQ ID NO: 2364833 - DNA, 25 bp, Homo sapien
gaactatccctccagttgtaaagac

SEQ ID NO: 2364834 - DNA, 25 bp, Homo sapien
caaggtttgtgaggataagaagtca

SEQ ID NO: 2364835 - DNA, 25 bp, Homo sapien
tacaatatcaccaggaactatgtct

SEQ ID NO: 2364836 - DNA, 25 bp, Homo sapien
caggctcatattccttaagggcttc

SEQ ID NO: 2364837 - DNA, 25 bp, Homo sapien
taagggcttcgatggcattttcagc

SEQ ID NO: 2364838 - DNA, 25 bp, Homo sapien
ttctgtcctgtcgatacactttgcc

SEQ ID NO: 2364839 - DNA, 25 bp, Homo sapien
tcaattggcaacagtttcttagaca

SEQ ID NO: 2364840 - DNA, 25 bp, Homo sapien
agccacgacgcctggatcatatata

SEQ ID NO: 2364841 - DNA, 25 bp, Homo sapien
cctggatcatatatactggctaata

SEQ ID NO: 2364842 - DNA, 25 bp, Homo sapien
ttgtgaccttcaattggcaacagtt

SEQ ID NO: 2364843 - DNA, 25 bp, Homo sapien
tgtgtgcccacagagcatcctgtcc

SEQ ID NO: 2364844 - DNA, 25 bp, Homo sapien
caatctgggtaccaaagagaactac

SEQ ID NO: 2364845 - DNA, 25 bp, Homo sapien
taactcccagattaggctggcatcc

SEQ ID NO: 2364846 - DNA, 25 bp, Homo sapien
ccaagttgaagaacatcacgaagct

SEQ ID NO: 2364847 - DNA, 25 bp, Homo sapien
aaactaccattattcaagccgggca

SEQ ID NO: 2364848 - DNA, 25 bp, Homo sapien
tgcaaacgtttataagccatgatac

SEQ ID NO: 2364849 - DNA, 25 bp, Homo sapien
gccacgttttagaactccatgcaaa

SEQ ID NO: 2364850 - DNA, 25 bp, Homo sapien
gcacaagagttcaagtaagagttca

SEQ ID NO: 2364851 - DNA, 25 bp, Homo sapien
tgatcacggtgaactacagccttga

SEQ ID NO: 2364852 - DNA, 25 bp, Homo sapien
tgcaatagctagagtcatggatcct

SEQ ID NO: 2364853 - DNA, 25 bp, Homo sapien
tatcaggcacaccaactcgaagcta

SEQ ID NO: 2364854 - DNA, 25 bp, Homo sapien
ccaacacttgggaaatatgctacct

SEQ ID NO: 2364855 - DNA, 25 bp, Homo sapien
aaaaggcggctgaaatgagcaactt

SEQ ID NO: 2364856 - DNA, 25 bp, Homo sapien
gttgtatatgccatgattcattcca

SEQ ID NO: 2364857 - DNA, 25 bp, Homo sapien
tgaggcttaaggaaacctaactaca

SEQ ID NO: 2364858 - DNA, 25 bp, Homo sapien
gcaaagtgatcaacctatcttggag

SEQ ID NO: 2364859 - DNA, 25 bp, Homo sapien
gtagatttgatggaagttaacctta

SEQ ID NO: 2364860 - DNA, 25 bp, Homo sapien
gaagttaaccttatatcagcaggaa

SEQ ID NO: 2364861 - DNA, 25 bp, Homo sapien
ctgtgagaattgactggtcaactct

SEQ ID NO: 2364862 - DNA, 25 bp, Homo sapien
caactcttagtgtggtagatttgat

SEQ ID NO: 2364863 - DNA, 25 bp, Homo sapien
aaggttggcaaaaggcccaattcat

SEQ ID NO: 2364864 - DNA, 25 bp, Homo sapien
gatcgcatggtaaataaagaactac

SEQ ID NO: 2364865 - DNA, 25 bp, Homo sapien
caagtgtactggaaagatcgcatgg

SEQ ID NO: 2364866 - DNA, 25 bp, Homo sapien
ttcattcaaaggaggtaagctggga

SEQ ID NO: 2364867 - DNA, 25 bp, Homo sapien
gttgtgagacagaaaaaacagatct

SEQ ID NO: 2364868 - DNA, 25 bp, Homo sapien
ctaagcgggttgtgagacagaaaaa

SEQ ID NO: 2364869 - DNA, 25 bp, Homo sapien
ggttgtgagacagaaaaaacagatc

SEQ ID NO: 2364870 - DNA, 25 bp, Homo sapien
gcgggttgtgagacagaaaaaacag

SEQ ID NO: 2364871 - DNA, 25 bp, Homo sapien
agctcgtgggtcagggacgggatca

SEQ ID NO: 2364872 - DNA, 25 bp, Homo sapien
tcagtgtgcttgatgacagagacag

SEQ ID NO: 2364873 - DNA, 25 bp, Homo sapien
tctttttatcttggttgacagctcg

SEQ ID NO: 2364874 - DNA, 25 bp, Homo sapien
gacgggatcagtgtgcttgatgaca

SEQ ID NO: 2364875 - DNA, 25 bp, Homo sapien
cagataacagaagtacaaccaaggg

SEQ ID NO: 2364876 - DNA, 25 bp, Homo sapien
tagtaaatagcacctctgatccagg

SEQ ID NO: 2364877 - DNA, 25 bp, Homo sapien
gacgggaggcttcgaacaatggcat

SEQ ID NO: 2364878 - DNA, 25 bp, Homo sapien
catgaaccgggtcattgaagtgccc

SEQ ID NO: 2364879 - DNA, 25 bp, Homo sapien
gctatacatacagcccacagaaatg

SEQ ID NO: 2364880 - DNA, 25 bp, Homo sapien
atattagaaattaagctcaggctat

SEQ ID NO: 2364881 - DNA, 25 bp, Homo sapien
aagttttgatggcatgaaggcatat

SEQ ID NO: 2364882 - DNA, 25 bp, Homo sapien
tgaacaaagaaccacgacacggaat

SEQ ID NO: 2364883 - DNA, 25 bp, Homo sapien
cattagctaaatctaaatgtactta

SEQ ID NO: 2364884 - DNA, 25 bp, Homo sapien
tgagtctataccaaagcccaaaata

SEQ ID NO: 2364885 - DNA, 25 bp, Homo sapien
cagaatctgaatctacattagctaa

SEQ ID NO: 2364886 - DNA, 25 bp, Homo sapien
aaccatttaggatatgcaggatgaa

SEQ ID NO: 2364887 - DNA, 25 bp, Homo sapien
gcttaggacaaaggcaaacaacctc

SEQ ID NO: 2364888 - DNA, 25 bp, Homo sapien
ttgttagcttaggacaaaggcaaac

SEQ ID NO: 2364889 - DNA, 25 bp, Homo sapien
cacaaataaactacctttgttagct

SEQ ID NO: 2364890 - DNA, 25 bp, Homo sapien
gggagagcgcatcagagtatttaaa

SEQ ID NO: 2364891 - DNA, 25 bp, Homo sapien
taggtgcataagttgatccagttat

SEQ ID NO: 2364892 - DNA, 25 bp, Homo sapien
agggaacaagtatcaccttccactc

SEQ ID NO: 2364893 - DNA, 25 bp, Homo sapien
aacaagtatcaccttccactctgtc

SEQ ID NO: 2364894 - DNA, 25 bp, Homo sapien
acttctccaataggtgcataagttg

SEQ ID NO: 2364895 - DNA, 25 bp, Homo sapien
gaccatcatactggtgacaattcac

SEQ ID NO: 2364896 - DNA, 25 bp, Homo sapien
tctaccagaccatcatactggtgac

SEQ ID NO: 2364897 - DNA, 25 bp, Homo sapien
aagagcacaaattgttgctaattct

SEQ ID NO: 2364898 - DNA, 25 bp, Homo sapien
gagcacaaattgttgctaattctac

SEQ ID NO: 2364899 - DNA, 25 bp, Homo sapien
tgagttgcaggcatttgcacgttct

SEQ ID NO: 2364900 - DNA, 25 bp, Homo sapien
tacattcatcttctctactaggcaa

SEQ ID NO: 2364901 - DNA, 25 bp, Homo sapien
tactaggcaagtgagagcagtctct

SEQ ID NO: 2364902 - DNA, 25 bp, Homo sapien
tagaaagacccttcaattcggtatc

SEQ ID NO: 2364903 - DNA, 25 bp, Homo sapien
tactgtaagtttgaggagataaggt

SEQ ID NO: 2364904 - DNA, 25 bp, Homo sapien
gacagtgcagacactaagtatatat

SEQ ID NO: 2364905 - DNA, 25 bp, Homo sapien
tatatagtacgactgataagcagca

SEQ ID NO: 2364906 - DNA, 25 bp, Homo sapien
tttctaagagagtaggacagtgcag

SEQ ID NO: 2364907 - DNA, 25 bp, Homo sapien
aaaccgacattgactttctgtcacg

SEQ ID NO: 2364908 - DNA, 25 bp, Homo sapien
tggtgtacagtaaaccgacattgac

SEQ ID NO: 2364909 - DNA, 25 bp, Homo sapien
cctgcttggtttatttggtgtacag

SEQ ID NO: 2364910 - DNA, 25 bp, Homo sapien
tctgtcacgtgaaaactctagagtg

SEQ ID NO: 2364911 - DNA, 25 bp, Homo sapien
aatgtgggtgcacctgtcaatgaca

SEQ ID NO: 2364912 - DNA, 25 bp, Homo sapien
ggtcataggaaccttagtacttcca

SEQ ID NO: 2364913 - DNA, 25 bp, Homo sapien
gacatgatcttctgtttgactccag

SEQ ID NO: 2364914 - DNA, 25 bp, Homo sapien
tctgtttgactccagaggtcatagg

SEQ ID NO: 2364915 - DNA, 25 bp, Homo sapien
gccaggcatcgcagtgtgtcgctgc

SEQ ID NO: 2364916 - DNA, 25 bp, Homo sapien
atttaataaagttggcagagtcctc

SEQ ID NO: 2364917 - DNA, 25 bp, Homo sapien
catcgcagtgtgtcgctgccactac

SEQ ID NO: 2364918 - DNA, 25 bp, Homo sapien
ctcagtgggttgtcatgagtggcca

SEQ ID NO: 2364919 - DNA, 25 bp, Homo sapien
aactcccggcctgtgaaagcttttg

SEQ ID NO: 2364920 - DNA, 25 bp, Homo sapien
ggaggccacctcgattctcggagga

SEQ ID NO: 2364921 - DNA, 25 bp, Homo sapien
ccacgcagccaacgaaggtcagatt

SEQ ID NO: 2364922 - DNA, 25 bp, Homo sapien
caactcgagcaaaacagcgggcgtt

SEQ ID NO: 2364923 - DNA, 25 bp, Homo sapien
tccccgacgttggacgagatgaggt

SEQ ID NO: 2364924 - DNA, 25 bp, Homo sapien
agcaggagcatcgttcacgccatcg

SEQ ID NO: 2364925 - DNA, 25 bp, Homo sapien
cggttttagccaccgcagtgccaga

SEQ ID NO: 2364926 - DNA, 25 bp, Homo sapien
agaagttgtcatccgccaggaccat

SEQ ID NO: 2364927 - DNA, 25 bp, Homo sapien
tccagatcaggagggttgaacccca

SEQ ID NO: 2364928 - DNA, 25 bp, Homo sapien
caatagccaagtaacggaaaaagag

SEQ ID NO: 2364929 - DNA, 25 bp, Homo sapien
gaaaaagagccacccgctgatcaat

SEQ ID NO: 2364930 - DNA, 25 bp, Homo sapien
tcaaagcctcgggaaatccaagggc

SEQ ID NO: 2364931 - DNA, 25 bp, Homo sapien
gatgaggcactacgcatgtccggat

SEQ ID NO: 2364932 - DNA, 25 bp, Homo sapien
acaagggtcaacatgcaggtgtgca

SEQ ID NO: 2364933 - DNA, 25 bp, Homo sapien
ttgagggactagattacaccaggac

SEQ ID NO: 2364934 - DNA, 25 bp, Homo sapien
gagttcagacgaggcaaatatcccc

SEQ ID NO: 2364935 - DNA, 25 bp, Homo sapien
aaggacactcttggaccaccgtcag

SEQ ID NO: 2364936 - DNA, 25 bp, Homo sapien
gctggtagaaggacactcttggacc

SEQ ID NO: 2364937 - DNA, 25 bp, Homo sapien
ttggaccaccgtcagcagcaatgaa

SEQ ID NO: 2364938 - DNA, 25 bp, Homo sapien
gcagcaatgaaccaccatgcagcag

SEQ ID NO: 2364939 - DNA, 25 bp, Homo sapien
aacagagagcgccattgtcatcggg

SEQ ID NO: 2364940 - DNA, 25 bp, Homo sapien
caatccacgccttcaaagtccgggt

SEQ ID NO: 2364941 - DNA, 25 bp, Homo sapien
atagttactagaacagagagcgcca

SEQ ID NO: 2364942 - DNA, 25 bp, Homo sapien
tgagggcgttacacatttctatagt

SEQ ID NO: 2364943 - DNA, 25 bp, Homo sapien
tcgcctcagcctgccgtgaaggtgc

SEQ ID NO: 2364944 - DNA, 25 bp, Homo sapien
ctcagcctgccgtgaaggtgcacta

SEQ ID NO: 2364945 - DNA, 25 bp, Homo sapien
cagcctgccgtgaaggtgcactaac

SEQ ID NO: 2364946 - DNA, 25 bp, Homo sapien
gcctcagcctgccgtgaaggtgcac

SEQ ID NO: 2364947 - DNA, 25 bp, Homo sapien
tggactacacttcagtaaggcggct

SEQ ID NO: 2364948 - DNA, 25 bp, Homo sapien
aaagctgttcccaattgccctggag

SEQ ID NO: 2364949 - DNA, 25 bp, Homo sapien
taaggcggctgttaatgtggcacca

SEQ ID NO: 2364950 - DNA, 25 bp, Homo sapien
tcacgggcttaactggatggtacca

SEQ ID NO: 2364951 - DNA, 25 bp, Homo sapien
tggcaagggttcgacatagaggatc

SEQ ID NO: 2364952 - DNA, 25 bp, Homo sapien
cagcaaggactggttttcggacaag

SEQ ID NO: 2364953 - DNA, 25 bp, Homo sapien
agcccacgagccagatgttctccca

SEQ ID NO: 2364954 - DNA, 25 bp, Homo sapien
ggttcgacatagaggatcaggaagt

SEQ ID NO: 2364955 - DNA, 25 bp, Homo sapien
cactgggtcacgttcagcggtgtga

SEQ ID NO: 2364956 - DNA, 25 bp, Homo sapien
gccactgggtcacgttcagcggtgt

SEQ ID NO: 2364957 - DNA, 25 bp, Homo sapien
atcagccactgggtcacgttcagcg

SEQ ID NO: 2364958 - DNA, 25 bp, Homo sapien
tgggtcacgttcagcggtgtgatct

SEQ ID NO: 2364959 - DNA, 25 bp, Homo sapien
ccatcggtgcatgccgagaacgagc

SEQ ID NO: 2364960 - DNA, 25 bp, Homo sapien
cacaaacggccaggaaatcccatcg

SEQ ID NO: 2364961 - DNA, 25 bp, Homo sapien
gaaatcccatcggtgcatgccgaga

SEQ ID NO: 2364962 - DNA, 25 bp, Homo sapien
cggccaggaaatcccatcggtgcat

SEQ ID NO: 2364963 - DNA, 25 bp, Homo sapien
tcaagaccagaacatatcgctaaag

SEQ ID NO: 2364964 - DNA, 25 bp, Homo sapien
aagttagtgtctgtgctatagaccc

SEQ ID NO: 2364965 - DNA, 25 bp, Homo sapien
tatcgctaaagttagtgtctgtgct

SEQ ID NO: 2364966 - DNA, 25 bp, Homo sapien
tgtctgtgctatagacccagatcac

SEQ ID NO: 2364967 - DNA, 25 bp, Homo sapien
tctgcacaagcgagtacaggcatac

SEQ ID NO: 2364968 - DNA, 25 bp, Homo sapien
taaaactagatgacgtgccactgaa

SEQ ID NO: 2364969 - DNA, 25 bp, Homo sapien
caatactgactgaggtagcaagact

SEQ ID NO: 2364970 - DNA, 25 bp, Homo sapien
tatgtgaagggacataaacccagtc

SEQ ID NO: 2364971 - DNA, 25 bp, Homo sapien
gtctgttagtcccaggtaagccact

SEQ ID NO: 2364972 - DNA, 25 bp, Homo sapien
cacttacgagttaaagacaagacag

SEQ ID NO: 2364973 - DNA, 25 bp, Homo sapien
aagttggacatgtctgttagtccca

SEQ ID NO: 2364974 - DNA, 25 bp, Homo sapien
gtaagccacttacgagttaaagaca

SEQ ID NO: 2364975 - DNA, 25 bp, Homo sapien
ggagccttcttcccctcaagcagag

SEQ ID NO: 2364976 - DNA, 25 bp, Homo sapien
ttcttcccctcaagcagagtacaac

SEQ ID NO: 2364977 - DNA, 25 bp, Homo sapien
agccttcttcccctcaagcagagta

SEQ ID NO: 2364978 - DNA, 25 bp, Homo sapien
agcagagtacaactaaagttctgag

SEQ ID NO: 2364979 - DNA, 25 bp, Homo sapien
atgttctctataccaggccagcaga

SEQ ID NO: 2364980 - DNA, 25 bp, Homo sapien
tggtgagactcatctcgaacatgcg

SEQ ID NO: 2364981 - DNA, 25 bp, Homo sapien
caaacattgatcgtagtaacggtgg

SEQ ID NO: 2364982 - DNA, 25 bp, Homo sapien
tagttgatggatgttggaaggcatt

SEQ ID NO: 2364983 - DNA, 25 bp, Homo sapien
cagcctgtggaggtctatgaaagcc

SEQ ID NO: 2364984 - DNA, 25 bp, Homo sapien
tgttttcacccagcaaagccttcag

SEQ ID NO: 2364985 - DNA, 25 bp, Homo sapien
gaagaatatagtcgaggcctcacac

SEQ ID NO: 2364986 - DNA, 25 bp, Homo sapien
tcaaaacagcagtgggcctaaccca

SEQ ID NO: 2364987 - DNA, 25 bp, Homo sapien
ggaagtcggccagatgccctgcttg

SEQ ID NO: 2364988 - DNA, 25 bp, Homo sapien
tctgcagagtggtgtcccagttagg

SEQ ID NO: 2364989 - DNA, 25 bp, Homo sapien
tggcaacaagcgacactgatggctg

SEQ ID NO: 2364990 - DNA, 25 bp, Homo sapien
gcttcctccagaatggatcatctgc

SEQ ID NO: 2364991 - DNA, 25 bp, Homo sapien
cagtggctagatgcttggtagacac

SEQ ID NO: 2364992 - DNA, 25 bp, Homo sapien
gactcctcgtgtcgtctggctacag

SEQ ID NO: 2364993 - DNA, 25 bp, Homo sapien
cacacagggtagcatctagaagcac

SEQ ID NO: 2364994 - DNA, 25 bp, Homo sapien
aatttggtggttacagtcacagggc

SEQ ID NO: 2364995 - DNA, 25 bp, Homo sapien
catttctgcaaaatggtttaggaag

SEQ ID NO: 2364996 - DNA, 25 bp, Homo sapien
atttctgcaaaatggtttaggaagc

SEQ ID NO: 2364997 - DNA, 25 bp, Homo sapien
ttctgcaaaatggtttaggaagcgg

SEQ ID NO: 2364998 - DNA, 25 bp, Homo sapien
tttctgcaaaatggtttaggaagcg

SEQ ID NO: 2364999 - DNA, 25 bp, Homo sapien
aaatgtggcgacttggctgacggct

SEQ ID NO: 2365000 - DNA, 25 bp, Homo sapien
tgttgctaaaaacgcacatgcacgc

SEQ ID NO: 2365001 - DNA, 25 bp, Homo sapien
taaataagcaaactgtacagggcca

SEQ ID NO: 2365002 - DNA, 25 bp, Homo sapien
gatctggctacttacaaccgaaggc

SEQ ID NO: 2365003 - DNA, 25 bp, Homo sapien
atatttgtattgcaccaacatctgt

SEQ ID NO: 2365004 - DNA, 25 bp, Homo sapien
tttgtattgcaccaacatctgtcta

SEQ ID NO: 2365005 - DNA, 25 bp, Homo sapien
atttaatacagtgcgaaatagctgt

SEQ ID NO: 2365006 - DNA, 25 bp, Homo sapien
gtattgcaccaacatctgtctactg

SEQ ID NO: 2365007 - DNA, 25 bp, Homo sapien
aaaccatgtctgtgcgacgctcatt

SEQ ID NO: 2365008 - DNA, 25 bp, Homo sapien
ctcattgttaccagcacagaaagaa

SEQ ID NO: 2365009 - DNA, 25 bp, Homo sapien
gtctaaagtcaaacatgcgcagtga

SEQ ID NO: 2365010 - DNA, 25 bp, Homo sapien
gatctctatttacagtctaaagtca

SEQ ID NO: 2365011 - DNA, 25 bp, Homo sapien
agcgccaaatattcatcctcactgc

SEQ ID NO: 2365012 - DNA, 25 bp, Homo sapien
ttcttccacatccgtcattgctgct

SEQ ID NO: 2365013 - DNA, 25 bp, Homo sapien
gcccacgatcccctcccgcaagata

SEQ ID NO: 2365014 - DNA, 25 bp, Homo sapien
gctgctgctaccagcgccaaatatt

SEQ ID NO: 2365015 - DNA, 25 bp, Homo sapien
tggagatgcagtcacttattgtcca

SEQ ID NO: 2365016 - DNA, 25 bp, Homo sapien
ccttctgggactggacagctttgct

SEQ ID NO: 2365017 - DNA, 25 bp, Homo sapien
gatgcagtcacttattgtccaggtg

SEQ ID NO: 2365018 - DNA, 25 bp, Homo sapien
cagtcacttattgtccaggtgaggc

SEQ ID NO: 2365019 - DNA, 25 bp, Homo sapien
ggccgcgcaagcagcctccgatgag

SEQ ID NO: 2365020 - DNA, 25 bp, Homo sapien
cttggcctccaagcaggaaaaggag

SEQ ID NO: 2365021 - DNA, 25 bp, Homo sapien
gagggcactgagaagcggggccggg

SEQ ID NO: 2365022 - DNA, 25 bp, Homo sapien
gatgagcgagtcgagctcgaagtcc

SEQ ID NO: 2365023 - DNA, 25 bp, Homo sapien
tctctcttgttagtggtggacttgc

SEQ ID NO: 2365024 - DNA, 25 bp, Homo sapien
tattgtaatttgaccccgctgttca

SEQ ID NO: 2365025 - DNA, 25 bp, Homo sapien
gacttgctttgtgaagagacagttc

SEQ ID NO: 2365026 - DNA, 25 bp, Homo sapien
cagttcatgaacaagagtctttcag

SEQ ID NO: 2365027 - DNA, 25 bp, Homo sapien
caagatgccggtgagggttcgatcc

SEQ ID NO: 2365028 - DNA, 25 bp, Homo sapien
ggaagcgctccgctgtacctggatc

SEQ ID NO: 2365029 - DNA, 25 bp, Homo sapien
tcactagagagcgaagccaagggct

SEQ ID NO: 2365030 - DNA, 25 bp, Homo sapien
aaaccgtgtgtgtgccgagagaagc

SEQ ID NO: 2365031 - DNA, 25 bp, Homo sapien
gccctgagtgccatgatctctctag

SEQ ID NO: 2365032 - DNA, 25 bp, Homo sapien
cagaccaggtaactgttggcaacag

SEQ ID NO: 2365033 - DNA, 25 bp, Homo sapien
tagaagactctttatgcagaccagg

SEQ ID NO: 2365034 - DNA, 25 bp, Homo sapien
tgttccagtgaggaatagaagactc

SEQ ID NO: 2365035 - DNA, 25 bp, Homo sapien
tgaagcccactccatagatgtgctt

SEQ ID NO: 2365036 - DNA, 25 bp, Homo sapien
taccacttcgttgatggcagaatgg

SEQ ID NO: 2365037 - DNA, 25 bp, Homo sapien
cccactccatagatgtgcttgtgaa

SEQ ID NO: 2365038 - DNA, 25 bp, Homo sapien
cgggttaccacttcgttgatggcag

SEQ ID NO: 2365039 - DNA, 25 bp, Homo sapien
gtatgggacattccttattcctttg

SEQ ID NO: 2365040 - DNA, 25 bp, Homo sapien
atgggacattccttattcctttggc

SEQ ID NO: 2365041 - DNA, 25 bp, Homo sapien
cagtatgggacattccttattcctt

SEQ ID NO: 2365042 - DNA, 25 bp, Homo sapien
tcagtatgggacattccttattcct

SEQ ID NO: 2365043 - DNA, 25 bp, Homo sapien
tctcatcgacattgtctgtagattt

SEQ ID NO: 2365044 - DNA, 25 bp, Homo sapien
tagttctcatcgacattgtctgtag

SEQ ID NO: 2365045 - DNA, 25 bp, Homo sapien
agtgattagttctcatcgacattgt

SEQ ID NO: 2365046 - DNA, 25 bp, Homo sapien
tgattagttctcatcgacattgtct

SEQ ID NO: 2365047 - DNA, 25 bp, Homo sapien
tacaggtcaaacgtctgcacgcaaa

SEQ ID NO: 2365048 - DNA, 25 bp, Homo sapien
tactcaggtatccaagcttagacag

SEQ ID NO: 2365049 - DNA, 25 bp, Homo sapien
tgcgtcacaggagggaaatatacat

SEQ ID NO: 2365050 - DNA, 25 bp, Homo sapien
cacatttgcaaatcgcgagggtcac

SEQ ID NO: 2365051 - DNA, 25 bp, Homo sapien
ctccgcggcgccgagaccgcgagcc

SEQ ID NO: 2365052 - DNA, 25 bp, Homo sapien
gcggcgccgagaccgcgagccgtgt

SEQ ID NO: 2365053 - DNA, 25 bp, Homo sapien
ccgagaccgcgagccgtgtgcggga

SEQ ID NO: 2365054 - DNA, 25 bp, Homo sapien
cctggccgggcatctccgcggcgcc

SEQ ID NO: 2365055 - DNA, 25 bp, Homo sapien
ggcggctctgcagaagagctacgct

SEQ ID NO: 2365056 - DNA, 25 bp, Homo sapien
aagagctacgctccgtccagtcgga

SEQ ID NO: 2365057 - DNA, 25 bp, Homo sapien
tctgcagaagagctacgctccgtcc

SEQ ID NO: 2365058 - DNA, 25 bp, Homo sapien
acagcgggcggctctgcagaagagc

SEQ ID NO: 2365059 - DNA, 25 bp, Homo sapien
aattctggtaacaagagtatccagc

SEQ ID NO: 2365060 - DNA, 25 bp, Homo sapien
ctggtaacaagagtatccagctgat

SEQ ID NO: 2365061 - DNA, 25 bp, Homo sapien
acctttggaattctggtaacaagag

SEQ ID NO: 2365062 - DNA, 25 bp, Homo sapien
tggaattctggtaacaagagtatcc

SEQ ID NO: 2365063 - DNA, 25 bp, Homo sapien
tcttgcagcttagctatgtgtgagt

SEQ ID NO: 2365064 - DNA, 25 bp, Homo sapien
attgatttagagaggtggattgttt

SEQ ID NO: 2365065 - DNA, 25 bp, Homo sapien
gttttccataactcttgcagcttag

SEQ ID NO: 2365066 - DNA, 25 bp, Homo sapien
gagttcactttgtatccatctttga

SEQ ID NO: 2365067 - DNA, 25 bp, Homo sapien
tactgcatatgccttgtcatctgca

SEQ ID NO: 2365068 - DNA, 25 bp, Homo sapien
tgaagttgggtttctattttcaaga

SEQ ID NO: 2365069 - DNA, 25 bp, Homo sapien
gactcctagacaattatactgcata

SEQ ID NO: 2365070 - DNA, 25 bp, Homo sapien
ggcattaagcttcccctcagtaaag

SEQ ID NO: 2365071 - DNA, 25 bp, Homo sapien
tgctgtgcgcctctcagtgtgggca

SEQ ID NO: 2365072 - DNA, 25 bp, Homo sapien
ttgctgtgcgcctctcagtgtgggc

SEQ ID NO: 2365073 - DNA, 25 bp, Homo sapien
aacgcttctggcctgtggtgaggtc

SEQ ID NO: 2365074 - DNA, 25 bp, Homo sapien
tatagattttagcaatgctgcacag

SEQ ID NO: 2365075 - DNA, 25 bp, Homo sapien
gtgcatgtactgcctcttcattaac

SEQ ID NO: 2365076 - DNA, 25 bp, Homo sapien
catcttcagatagtttgcattatag

SEQ ID NO: 2365077 - DNA, 25 bp, Homo sapien
gcttttgtgagctgtgctgaagtac

SEQ ID NO: 2365078 - DNA, 25 bp, Homo sapien
ctggcttttgtgagctgtgctgaag

SEQ ID NO: 2365079 - DNA, 25 bp, Homo sapien
ggcttttgtgagctgtgctgaagta

SEQ ID NO: 2365080 - DNA, 25 bp, Homo sapien
tggcttttgtgagctgtgctgaagt

SEQ ID NO: 2365081 - DNA, 25 bp, Homo sapien
tccagttgatgtcgccatgtagtgc

SEQ ID NO: 2365082 - DNA, 25 bp, Homo sapien
taacgggagctaaggcggcttctgt

SEQ ID NO: 2365083 - DNA, 25 bp, Homo sapien
gctgcgatatcagaagaccccgagt

SEQ ID NO: 2365084 - DNA, 25 bp, Homo sapien
ggccgccaaagggaatgctgtatga

SEQ ID NO: 2365085 - DNA, 25 bp, Homo sapien
aactgagatgcatttcccccctttt

SEQ ID NO: 2365086 - DNA, 25 bp, Homo sapien
actgagatgcatttcccccctttta

SEQ ID NO: 2365087 - DNA, 25 bp, Homo sapien
gtttgcatgaacagtttccttggtc

SEQ ID NO: 2365088 - DNA, 25 bp, Homo sapien
tttagatgcatatccagtttttatc

SEQ ID NO: 2365089 - DNA, 25 bp, Homo sapien
gacttacatcttgttttagatgcat

SEQ ID NO: 2365090 - DNA, 25 bp, Homo sapien
ttctaaaaatcttcagtgacttaca

SEQ ID NO: 2365091 - DNA, 25 bp, Homo sapien
tcaagttaacatcagatgttctccc

SEQ ID NO: 2365092 - DNA, 25 bp, Homo sapien
catgtgtgattcagaatcatctgaa

SEQ ID NO: 2365093 - DNA, 25 bp, Homo sapien
catcagatgttctccctgttcttca

SEQ ID NO: 2365094 - DNA, 25 bp, Homo sapien
tgttcttcaattgacattgattgca

SEQ ID NO: 2365095 - DNA, 25 bp, Homo sapien
gaattcaatacacgagacaagactg

SEQ ID NO: 2365096 - DNA, 25 bp, Homo sapien
taaacatacaggacacaactcacaa

SEQ ID NO: 2365097 - DNA, 25 bp, Homo sapien
ttggtacatggaactacatcagacc

SEQ ID NO: 2365098 - DNA, 25 bp, Homo sapien
cctcacctttggcacgaattcaata

SEQ ID NO: 2365099 - DNA, 25 bp, Homo sapien
aagtggacgagatgacctttcagag

SEQ ID NO: 2365100 - DNA, 25 bp, Homo sapien
ggaaccaagtgaaactacggatata

SEQ ID NO: 2365101 - DNA, 25 bp, Homo sapien
tgtccacaacacagtaattggtcac

SEQ ID NO: 2365102 - DNA, 25 bp, Homo sapien
tgctccaagcttcctgtaaactata

SEQ ID NO: 2365103 - DNA, 25 bp, Homo sapien
cacgtttgaggctctgtactccagc

SEQ ID NO: 2365104 - DNA, 25 bp, Homo sapien
catataatgccttggaaacgtgagt

SEQ ID NO: 2365105 - DNA, 25 bp, Homo sapien
ggagatatggccagcttagccctgt

SEQ ID NO: 2365106 - DNA, 25 bp, Homo sapien
tggacattcttatctcgggacacac

SEQ ID NO: 2365107 - DNA, 25 bp, Homo sapien
ggatttttggcagatcacttcccct

SEQ ID NO: 2365108 - DNA, 25 bp, Homo sapien
tggagttcccattagttaataatgg

SEQ ID NO: 2365109 - DNA, 25 bp, Homo sapien
ataatgggatttttggcagatcact

SEQ ID NO: 2365110 - DNA, 25 bp, Homo sapien
tctggagttcccattagttaataat

SEQ ID NO: 2365111 - DNA, 25 bp, Homo sapien
tacacagccgtgtgcatttgtcaaa

SEQ ID NO: 2365112 - DNA, 25 bp, Homo sapien
caaaggctgactttatagggcatga

SEQ ID NO: 2365113 - DNA, 25 bp, Homo sapien
tattctccaactagcaaccagcgtg

SEQ ID NO: 2365114 - DNA, 25 bp, Homo sapien
tagtgtggcagtgcttacacagccg

SEQ ID NO: 2365115 - DNA, 25 bp, Homo sapien
cacagtactttatagaattaggtca

SEQ ID NO: 2365116 - DNA, 25 bp, Homo sapien
tcttgagtcttggagataatccaca

SEQ ID NO: 2365117 - DNA, 25 bp, Homo sapien
gattgtgtggtcattcatacagtta

SEQ ID NO: 2365118 - DNA, 25 bp, Homo sapien
tcaatccatatcagaaggaatcccc

SEQ ID NO: 2365119 - DNA, 25 bp, Homo sapien
tgtctatcccgatttgtcaaagtgt

SEQ ID NO: 2365120 - DNA, 25 bp, Homo sapien
gaatttgggcgggaacatgtttcaa

SEQ ID NO: 2365121 - DNA, 25 bp, Homo sapien
tagctcctactaacagtggtggttg

SEQ ID NO: 2365122 - DNA, 25 bp, Homo sapien
aggaagtaaccgaattcccatgctt

SEQ ID NO: 2365123 - DNA, 25 bp, Homo sapien
gaataaaccaccctcctcgctcctg

SEQ ID NO: 2365124 - DNA, 25 bp, Homo sapien
tcctcgctcctgaaataacatctag

SEQ ID NO: 2365125 - DNA, 25 bp, Homo sapien
cctcctcgctcctgaaataacatct

SEQ ID NO: 2365126 - DNA, 25 bp, Homo sapien
accctcctcgctcctgaaataacat

SEQ ID NO: 2365127 - DNA, 25 bp, Homo sapien
gaagctggcctctcgaatgcagaac

SEQ ID NO: 2365128 - DNA, 25 bp, Homo sapien
gcgagcagaatttcgtacccgttta

SEQ ID NO: 2365129 - DNA, 25 bp, Homo sapien
gaagtagcgagcagaatttcgtacc

SEQ ID NO: 2365130 - DNA, 25 bp, Homo sapien
gtggaagctggcctctcgaatgcag

SEQ ID NO: 2365131 - DNA, 25 bp, Homo sapien
cagaggccatccaaggggtaaaaag

SEQ ID NO: 2365132 - DNA, 25 bp, Homo sapien
gctggcctaggtctcgtatcccggc

SEQ ID NO: 2365133 - DNA, 25 bp, Homo sapien
acacgcacgcccgagccagggaagg

SEQ ID NO: 2365134 - DNA, 25 bp, Homo sapien
tagcagcccgacctgtcacgagaca

SEQ ID NO: 2365135 - DNA, 25 bp, Homo sapien
gccgagggcgaggaattgggaaatc

SEQ ID NO: 2365136 - DNA, 25 bp, Homo sapien
ttaagtgggcgggtcgccgaggagc

SEQ ID NO: 2365137 - DNA, 25 bp, Homo sapien
gtgactgagcggagcccggtgacag

SEQ ID NO: 2365138 - DNA, 25 bp, Homo sapien
tgcagttgcggcgaccaaggcctgg

SEQ ID NO: 2365139 - DNA, 25 bp, Homo sapien
tgcccggatgttgcccgcgcttttc

SEQ ID NO: 2365140 - DNA, 25 bp, Homo sapien
cttttcaaagcttcgcgatctcgtc

SEQ ID NO: 2365141 - DNA, 25 bp, Homo sapien
tgcgggcctccgtacggcaatttct

SEQ ID NO: 2365142 - DNA, 25 bp, Homo sapien
tgccatccgccctaaaaagcaggct

SEQ ID NO: 2365143 - DNA, 25 bp, Homo sapien
tattaacgtctgcttttctctctgc

SEQ ID NO: 2365144 - DNA, 25 bp, Homo sapien
tttctctctgctaaatgggaagaca

SEQ ID NO: 2365145 - DNA, 25 bp, Homo sapien
aatgggaagacaacaaaggccgctc

SEQ ID NO: 2365146 - DNA, 25 bp, Homo sapien
gggaagacaacaaaggccgctccac

SEQ ID NO: 2365147 - DNA, 25 bp, Homo sapien
cagcatcccgagtttgtggcccgat

SEQ ID NO: 2365148 - DNA, 25 bp, Homo sapien
cgtcctcagtcattgcgcaaaaagg

SEQ ID NO: 2365149 - DNA, 25 bp, Homo sapien
aagtcacacgagatgggtcctcatc

SEQ ID NO: 2365150 - DNA, 25 bp, Homo sapien
catcctcccctcagaagttaacagg

SEQ ID NO: 2365151 - DNA, 25 bp, Homo sapien
gaaaacacactagtctgatcccgta

SEQ ID NO: 2365152 - DNA, 25 bp, Homo sapien
cagaacacatttagggctggaaaac

SEQ ID NO: 2365153 - DNA, 25 bp, Homo sapien
cacactagtctgatcccgtacgaca

SEQ ID NO: 2365154 - DNA, 25 bp, Homo sapien
ctggaaaacacactagtctgatccc

SEQ ID NO: 2365155 - DNA, 25 bp, Homo sapien
gaactcgtcactaattcgtgataga

SEQ ID NO: 2365156 - DNA, 25 bp, Homo sapien
cactaattcgtgatagagcttgaac

SEQ ID NO: 2365157 - DNA, 25 bp, Homo sapien
gggtctagccagaactcgtcactaa

SEQ ID NO: 2365158 - DNA, 25 bp, Homo sapien
ttttttagatgggtctagccagaac

SEQ ID NO: 2365159 - DNA, 25 bp, Homo sapien
tccatatgctgaccgagaagaattc

SEQ ID NO: 2365160 - DNA, 25 bp, Homo sapien
agagaacaggacacatccatatgct

SEQ ID NO: 2365161 - DNA, 25 bp, Homo sapien
tatgctgaccgagaagaattcacac

SEQ ID NO: 2365162 - DNA, 25 bp, Homo sapien
gagaacaggacacatccatatgctg

SEQ ID NO: 2365163 - DNA, 25 bp, Homo sapien
cagtgttgtgtcaagttcattttca

SEQ ID NO: 2365164 - DNA, 25 bp, Homo sapien
tgcagtgttgtgtcaagttcatttt

SEQ ID NO: 2365165 - DNA, 25 bp, Homo sapien
agtgttgtgtcaagttcattttcac

SEQ ID NO: 2365166 - DNA, 25 bp, Homo sapien
tatcagatctggtgaatattctgca

SEQ ID NO: 2365167 - DNA, 25 bp, Homo sapien
tatttctttcaagggaattcagaca

SEQ ID NO: 2365168 - DNA, 25 bp, Homo sapien
tagaagaattgaataactactttgc

SEQ ID NO: 2365169 - DNA, 25 bp, Homo sapien
gacatctaaagatgggcaaaattga

SEQ ID NO: 2365170 - DNA, 25 bp, Homo sapien
gcaatacttgactttccatgcctgg

SEQ ID NO: 2365171 - DNA, 25 bp, Homo sapien
cgtccacattgtgagaacatgcaat

SEQ ID NO: 2365172 - DNA, 25 bp, Homo sapien
gaacatgcaatacttgactttccat

SEQ ID NO: 2365173 - DNA, 25 bp, Homo sapien
gagatcaactttttagcgtccacat

SEQ ID NO: 2365174 - DNA, 25 bp, Homo sapien
caaacattcttgtcaaaaataactt

SEQ ID NO: 2365175 - DNA, 25 bp, Homo sapien
gtacaaacattcttgtcaaaaataa

SEQ ID NO: 2365176 - DNA, 25 bp, Homo sapien
aacatatattatgagttcttttaat

SEQ ID NO: 2365177 - DNA, 25 bp, Homo sapien
aaacattcttgtcaaaaataacttg

SEQ ID NO: 2365178 - DNA, 25 bp, Homo sapien
cctcttgacttgatgtaaaaagaac

SEQ ID NO: 2365179 - DNA, 25 bp, Homo sapien
gaggcaaaaattcagtggagtaaca

SEQ ID NO: 2365180 - DNA, 25 bp, Homo sapien
aaattcagtggagtaacagcaagag

SEQ ID NO: 2365181 - DNA, 25 bp, Homo sapien
gagtaacagcaagagtaacttcctc

SEQ ID NO: 2365182 - DNA, 25 bp, Homo sapien
aacaaacatctcactgtgtacagca

SEQ ID NO: 2365183 - DNA, 25 bp, Homo sapien
ccaacaaacatctcactgtgtacag

SEQ ID NO: 2365184 - DNA, 25 bp, Homo sapien
atttgaaagaagtcaaactcatctg

SEQ ID NO: 2365185 - DNA, 25 bp, Homo sapien
aatttgaaagaagtcaaactcatct

SEQ ID NO: 2365186 - DNA, 25 bp, Homo sapien
ggatataggagcatgtgtagcttct

SEQ ID NO: 2365187 - DNA, 25 bp, Homo sapien
taaatggatataggagcatgtgtag

SEQ ID NO: 2365188 - DNA, 25 bp, Homo sapien
aataaatggatataggagcatgtgt

SEQ ID NO: 2365189 - DNA, 25 bp, Homo sapien
aatggatataggagcatgtgtagct

SEQ ID NO: 2365190 - DNA, 25 bp, Homo sapien
tatcatcaatactcaaagccagagg

SEQ ID NO: 2365191 - DNA, 25 bp, Homo sapien
gtggtgaagatgctctactttgttc

SEQ ID NO: 2365192 - DNA, 25 bp, Homo sapien
tactttgttcatcagctaatgtggc

SEQ ID NO: 2365193 - DNA, 25 bp, Homo sapien
taaagttagcttccactaacatatc

SEQ ID NO: 2365194 - DNA, 25 bp, Homo sapien
gtttgtgagagtctccttaggataa

SEQ ID NO: 2365195 - DNA, 25 bp, Homo sapien
acagttttccaatgcagatatgttt

SEQ ID NO: 2365196 - DNA, 25 bp, Homo sapien
tttgtgagagtctccttaggataaa

SEQ ID NO: 2365197 - DNA, 25 bp, Homo sapien
ttccaatgcagatatgtttgtgaga

SEQ ID NO: 2365198 - DNA, 25 bp, Homo sapien
gcagcaggaagatgattcctgttgt

SEQ ID NO: 2365199 - DNA, 25 bp, Homo sapien
agcaggaagatgattcctgttgttg

SEQ ID NO: 2365200 - DNA, 25 bp, Homo sapien
gcaggaagatgattcctgttgttgc

SEQ ID NO: 2365201 - DNA, 25 bp, Homo sapien
cagcaggaagatgattcctgttgtt

SEQ ID NO: 2365202 - DNA, 25 bp, Homo sapien
ccagactgtcgaaagggtggttgaa

SEQ ID NO: 2365203 - DNA, 25 bp, Homo sapien
tcactgtcacttgctcttgccagac

SEQ ID NO: 2365204 - DNA, 25 bp, Homo sapien
gaaactgctccaaagaacatgcaag

SEQ ID NO: 2365205 - DNA, 25 bp, Homo sapien
tcacttgctcttgccagactgtcga

SEQ ID NO: 2365206 - DNA, 25 bp, Homo sapien
taaacatgcaaactcgtgcttgagg

SEQ ID NO: 2365207 - DNA, 25 bp, Homo sapien
gaagtcctggacaacctcttttaga

SEQ ID NO: 2365208 - DNA, 25 bp, Homo sapien
ttaaaagctctagggtgaacgtgca

SEQ ID NO: 2365209 - DNA, 25 bp, Homo sapien
cgtgcattgaattgaagaactctaa

SEQ ID NO: 2365210 - DNA, 25 bp, Homo sapien
cagataatacagaaatatttggcat

SEQ ID NO: 2365211 - DNA, 25 bp, Homo sapien
atcacttccattaaattctttcctg

SEQ ID NO: 2365212 - DNA, 25 bp, Homo sapien
atacagaaatatttggcatcacttc

SEQ ID NO: 2365213 - DNA, 25 bp, Homo sapien
ccattaaattctttcctgcagcaca

SEQ ID NO: 2365214 - DNA, 25 bp, Homo sapien
agtctaaagtacaactgcttgccag

SEQ ID NO: 2365215 - DNA, 25 bp, Homo sapien
gcaaatccactcagccacctttatg

SEQ ID NO: 2365216 - DNA, 25 bp, Homo sapien
tattgtgggtagctatgactcatta

SEQ ID NO: 2365217 - DNA, 25 bp, Homo sapien
gactcattactaagctacaagagcc

SEQ ID NO: 2365218 - DNA, 25 bp, Homo sapien
caactaaaacgtgtccatgtcagaa

SEQ ID NO: 2365219 - DNA, 25 bp, Homo sapien
taatagtccaatgctgcatccaggc

SEQ ID NO: 2365220 - DNA, 25 bp, Homo sapien
tagtaactaaatgagacaccagccc

SEQ ID NO: 2365221 - DNA, 25 bp, Homo sapien
tcagcaaagagacctacagagttac

SEQ ID NO: 2365222 - DNA, 25 bp, Homo sapien
tgtgcactctaaacatatcagaacc

SEQ ID NO: 2365223 - DNA, 25 bp, Homo sapien
gcactctaaacatatcagaacctta

SEQ ID NO: 2365224 - DNA, 25 bp, Homo sapien
ttaaaatgtgcactctaaacatatc

SEQ ID NO: 2365225 - DNA, 25 bp, Homo sapien
aatgtgcactctaaacatatcagaa

SEQ ID NO: 2365226 - DNA, 25 bp, Homo sapien
tcctactctcagtggtcagaggctg

SEQ ID NO: 2365227 - DNA, 25 bp, Homo sapien
tcagaggctgtgttggacccatagt

SEQ ID NO: 2365228 - DNA, 25 bp, Homo sapien
gctggagtgctgcttaacaagtatc

SEQ ID NO: 2365229 - DNA, 25 bp, Homo sapien
taattcctggtaagagcagtgctcg

SEQ ID NO: 2365230 - DNA, 25 bp, Homo sapien
tccatttgagcatgagggactcgcc

SEQ ID NO: 2365231 - DNA, 25 bp, Homo sapien
tctagctgcgtttgggtctaagggc

SEQ ID NO: 2365232 - DNA, 25 bp, Homo sapien
caatataaaaggcaagctggtagct

SEQ ID NO: 2365233 - DNA, 25 bp, Homo sapien
tgataaggtcctaagcagccagagt

SEQ ID NO: 2365234 - DNA, 25 bp, Homo sapien
tacccagctaggtggtattacagtc

SEQ ID NO: 2365235 - DNA, 25 bp, Homo sapien
tgcggcttcgggaaggacttccgta

SEQ ID NO: 2365236 - DNA, 25 bp, Homo sapien
tgttctcggtcctctcgtacgggcg

SEQ ID NO: 2365237 - DNA, 25 bp, Homo sapien
gcgactacggactggtgacggccgg

SEQ ID NO: 2365238 - DNA, 25 bp, Homo sapien
tgcggctgaggagagagccggctcc

SEQ ID NO: 2365239 - DNA, 25 bp, Homo sapien
caaaagggacatgacaccatctgtg

SEQ ID NO: 2365240 - DNA, 25 bp, Homo sapien
cacaggaccctcaggtaaacgaatt

SEQ ID NO: 2365241 - DNA, 25 bp, Homo sapien
cattccaaagggtagaagcgaaagc

SEQ ID NO: 2365242 - DNA, 25 bp, Homo sapien
tgtccttgggaaacttagaatctag

SEQ ID NO: 2365243 - DNA, 25 bp, Homo sapien
tgtgttgagttgatagttggcagca

SEQ ID NO: 2365244 - DNA, 25 bp, Homo sapien
aagtgaactagaaaaagactgctgt

SEQ ID NO: 2365245 - DNA, 25 bp, Homo sapien
gatgacagtaattaggataacggaa

SEQ ID NO: 2365246 - DNA, 25 bp, Homo sapien
tctgttgtttgtgaaccccattcac

SEQ ID NO: 2365247 - DNA, 25 bp, Homo sapien
agtcccagcgaggcccgcgacatgg

SEQ ID NO: 2365248 - DNA, 25 bp, Homo sapien
agcgaggcccgcgacatggacagcg

SEQ ID NO: 2365249 - DNA, 25 bp, Homo sapien
aggcccgcgacatggacagcgcgtt

SEQ ID NO: 2365250 - DNA, 25 bp, Homo sapien
cgcgacatggacagcgcgttgcccg

SEQ ID NO: 2365251 - DNA, 25 bp, Homo sapien
gggtggcatcggtctgggcgctcac

SEQ ID NO: 2365252 - DNA, 25 bp, Homo sapien
ctgcctcggtggagttgaggccctc

SEQ ID NO: 2365253 - DNA, 25 bp, Homo sapien
gagttgaggccctctgtcgtcaccg

SEQ ID NO: 2365254 - DNA, 25 bp, Homo sapien
accaccaggagcggcgggagacctc

SEQ ID NO: 2365255 - DNA, 25 bp, Homo sapien
ggagggccctggagccctgggagtc

SEQ ID NO: 2365256 - DNA, 25 bp, Homo sapien
gagggccctggagccctgggagtcc

SEQ ID NO: 2365257 - DNA, 25 bp, Homo sapien
aggagggccctggagccctgggagt

SEQ ID NO: 2365258 - DNA, 25 bp, Homo sapien
ggaggagggccctggagccctggga

SEQ ID NO: 2365259 - DNA, 25 bp, Homo sapien
tccaggagctggcacatggtaccca

SEQ ID NO: 2365260 - DNA, 25 bp, Homo sapien
gactccaggagctggcacatggtac

SEQ ID NO: 2365261 - DNA, 25 bp, Homo sapien
gggctgtccccttgaggttggatca

SEQ ID NO: 2365262 - DNA, 25 bp, Homo sapien
ccccttgaggttggatcactgtgga

SEQ ID NO: 2365263 - DNA, 25 bp, Homo sapien
ttcagtaaccgcagttaagtcctag

SEQ ID NO: 2365264 - DNA, 25 bp, Homo sapien
ttcaggcattgaatacttggctttc

SEQ ID NO: 2365265 - DNA, 25 bp, Homo sapien
tcttcttaagaagggataggctggg

SEQ ID NO: 2365266 - DNA, 25 bp, Homo sapien
tagagttcaagatctcagctgatga

SEQ ID NO: 2365267 - DNA, 25 bp, Homo sapien
gctgctttaaagctgaactcatatt

SEQ ID NO: 2365268 - DNA, 25 bp, Homo sapien
ctgctgctttaaagctgaactcata

SEQ ID NO: 2365269 - DNA, 25 bp, Homo sapien
tgctgctttaaagctgaactcatat

SEQ ID NO: 2365270 - DNA, 25 bp, Homo sapien
ggataagtcacagacacagagaaca

SEQ ID NO: 2365271 - DNA, 25 bp, Homo sapien
ctggggataagtcacagacacagag

SEQ ID NO: 2365272 - DNA, 25 bp, Homo sapien
aagtcacagacacagagaacagcaa

SEQ ID NO: 2365273 - DNA, 25 bp, Homo sapien
taagtcacagacacagagaacagca

SEQ ID NO: 2365274 - DNA, 25 bp, Homo sapien
agacactgaaatccacggagctgca

SEQ ID NO: 2365275 - DNA, 25 bp, Homo sapien
cagtcgggatcacagcagcagttga

SEQ ID NO: 2365276 - DNA, 25 bp, Homo sapien
aagacactgaaatccacggagctgc

SEQ ID NO: 2365277 - DNA, 25 bp, Homo sapien
gctgcagtcgggatcacagcagcag

SEQ ID NO: 2365278 - DNA, 25 bp, Homo sapien
aaaattcaatgaatagatgactgct

SEQ ID NO: 2365279 - DNA, 25 bp, Homo sapien
tttttgactacaaaactggctgtcg

SEQ ID NO: 2365280 - DNA, 25 bp, Homo sapien
ttgactacaaaactggctgtcgccc

SEQ ID NO: 2365281 - DNA, 25 bp, Homo sapien
gaatagatgactgctttttgactac

SEQ ID NO: 2365282 - DNA, 25 bp, Homo sapien
taatctggtcaacaagttcaaatac

SEQ ID NO: 2365283 - DNA, 25 bp, Homo sapien
tttgtaatatgaatgcagaaaatag

SEQ ID NO: 2365284 - DNA, 25 bp, Homo sapien
cagaaaatagatggattaatctggt

SEQ ID NO: 2365285 - DNA, 25 bp, Homo sapien
gatggattaatctggtcaacaagtt

SEQ ID NO: 2365286 - DNA, 25 bp, Homo sapien
gctggtgttacgacagagaacctga

SEQ ID NO: 2365287 - DNA, 25 bp, Homo sapien
agctctctccggatggctatgggaa

SEQ ID NO: 2365288 - DNA, 25 bp, Homo sapien
gccaccgtgaaagtcctggagtaaa

SEQ ID NO: 2365289 - DNA, 25 bp, Homo sapien
tatcaacctgtaaggagaagctctc

SEQ ID NO: 2365290 - DNA, 25 bp, Homo sapien
gattaataaaggataatgcaggttt

SEQ ID NO: 2365291 - DNA, 25 bp, Homo sapien
ctggattaataaaggataatgcagg

SEQ ID NO: 2365292 - DNA, 25 bp, Homo sapien
ttaataaaggataatgcaggtttat

SEQ ID NO: 2365293 - DNA, 25 bp, Homo sapien
ggattaataaaggataatgcaggtt

SEQ ID NO: 2365294 - DNA, 25 bp, Homo sapien
tggttgtgaaggaaacatatgattc

SEQ ID NO: 2365295 - DNA, 25 bp, Homo sapien
tttagcagcagtaggaatatccagt

SEQ ID NO: 2365296 - DNA, 25 bp, Homo sapien
cagatgttttcatcaatgtatcaaa

SEQ ID NO: 2365297 - DNA, 25 bp, Homo sapien
gattcagcattcaatgtaaaaccat

SEQ ID NO: 2365298 - DNA, 25 bp, Homo sapien
tttgtgatgggatgaaaagaatcaa

SEQ ID NO: 2365299 - DNA, 25 bp, Homo sapien
aaaagaatcaatcaagttcaggctc

SEQ ID NO: 2365300 - DNA, 25 bp, Homo sapien
gggatgaaaagaatcaatcaagttc

SEQ ID NO: 2365301 - DNA, 25 bp, Homo sapien
gatgggatgaaaagaatcaatcaag

SEQ ID NO: 2365302 - DNA, 25 bp, Homo sapien
tgtaggtcacacgttcactctgatg

SEQ ID NO: 2365303 - DNA, 25 bp, Homo sapien
agaatgatggtttcctacaaaggac

SEQ ID NO: 2365304 - DNA, 25 bp, Homo sapien
tgggataacgggtgcagaacatgca

SEQ ID NO: 2365305 - DNA, 25 bp, Homo sapien
tcataggttcgttggccacttaaat

SEQ ID NO: 2365306 - DNA, 25 bp, Homo sapien
ctgaagtctgcagaggaaccccata

SEQ ID NO: 2365307 - DNA, 25 bp, Homo sapien
ttattatcagtgcacagagatgatg

SEQ ID NO: 2365308 - DNA, 25 bp, Homo sapien
atgtcagggacgaaggaaatctcag

SEQ ID NO: 2365309 - DNA, 25 bp, Homo sapien
ctgcagggttattatcagtgcacag

SEQ ID NO: 2365310 - DNA, 25 bp, Homo sapien
tgtcagggacgaaggaaatctcaga

SEQ ID NO: 2365311 - DNA, 25 bp, Homo sapien
attgaactacgtgacctttgaggcc

SEQ ID NO: 2365312 - DNA, 25 bp, Homo sapien
gtgagcctgaacaagaaactgtaca

SEQ ID NO: 2365313 - DNA, 25 bp, Homo sapien
tacaagtgctcaagcagtgactgca

SEQ ID NO: 2365314 - DNA, 25 bp, Homo sapien
ggccctgggtgagaaattgaactac

SEQ ID NO: 2365315 - DNA, 25 bp, Homo sapien
aagataatgagtaaatccccctcca

SEQ ID NO: 2365316 - DNA, 25 bp, Homo sapien
ctccaattcttgtcctgccccccag

SEQ ID NO: 2365317 - DNA, 25 bp, Homo sapien
aattcttgtcctgccccccagctac

SEQ ID NO: 2365318 - DNA, 25 bp, Homo sapien
taatgagtaaatccccctccaattc

SEQ ID NO: 2365319 - DNA, 25 bp, Homo sapien
acaggtgtgaaccagtacgcctggc

SEQ ID NO: 2365320 - DNA, 25 bp, Homo sapien
tacaggtgtgaaccagtacgcctgg

SEQ ID NO: 2365321 - DNA, 25 bp, Homo sapien
taagttacaacacagatatacaatt

SEQ ID NO: 2365322 - DNA, 25 bp, Homo sapien
acacagatatacaattttgttgttg

SEQ ID NO: 2365323 - DNA, 25 bp, Homo sapien
gttacaacacagatatacaattttg

SEQ ID NO: 2365324 - DNA, 25 bp, Homo sapien
caacacagatatacaattttgttgt

SEQ ID NO: 2365325 - DNA, 25 bp, Homo sapien
gcacttaacagcctggttcaccaga

SEQ ID NO: 2365326 - DNA, 25 bp, Homo sapien
ctggtgcacttaacagcctggttca

SEQ ID NO: 2365327 - DNA, 25 bp, Homo sapien
gaatttccgggctgctgtaaaaagc

SEQ ID NO: 2365328 - DNA, 25 bp, Homo sapien
cctcagaatttccgggctgctgtaa

SEQ ID NO: 2365329 - DNA, 25 bp, Homo sapien
ctaatgagtaagttccacttcaaaa

SEQ ID NO: 2365330 - DNA, 25 bp, Homo sapien
ccatgctccagggtcattattgtat

SEQ ID NO: 2365331 - DNA, 25 bp, Homo sapien
ccacatggtctcacggccataagca

SEQ ID NO: 2365332 - DNA, 25 bp, Homo sapien
tccacatggtctcacggccataagc

SEQ ID NO: 2365333 - DNA, 25 bp, Homo sapien
atgctccagggtcattattgtatat

SEQ ID NO: 2365334 - DNA, 25 bp, Homo sapien
tcattgctttttcagatctcgagtt

SEQ ID NO: 2365335 - DNA, 25 bp, Homo sapien
tcagatctcgagttgaagagtatat

SEQ ID NO: 2365336 - DNA, 25 bp, Homo sapien
tttcagatctcgagttgaagagtat

SEQ ID NO: 2365337 - DNA, 25 bp, Homo sapien
gctttttcagatctcgagttgaaga

SEQ ID NO: 2365338 - DNA, 25 bp, Homo sapien
gaagggcaatgctagtcactgtgag

SEQ ID NO: 2365339 - DNA, 25 bp, Homo sapien
tctgcataacatgccgcaccaaggg

SEQ ID NO: 2365340 - DNA, 25 bp, Homo sapien
taaaggtagctgagcctcctcgtac

SEQ ID NO: 2365341 - DNA, 25 bp, Homo sapien
gaagacctgcgagtcaaaacctctc

SEQ ID NO: 2365342 - DNA, 25 bp, Homo sapien
gaagacctggagtgttgaagatgct

SEQ ID NO: 2365343 - DNA, 25 bp, Homo sapien
cagtgtcctcccgtcgggtgagcgt

SEQ ID NO: 2365344 - DNA, 25 bp, Homo sapien
cgagagtcggctgcagcacatcagt

SEQ ID NO: 2365345 - DNA, 25 bp, Homo sapien
aagtgtccagcgttgacgagagtcg

SEQ ID NO: 2365346 - DNA, 25 bp, Homo sapien
tcaagaacaacattcacgcaaaggc

SEQ ID NO: 2365347 - DNA, 25 bp, Homo sapien
agcgtcctcggagggcgtccagtta

SEQ ID NO: 2365348 - DNA, 25 bp, Homo sapien
gacaagctctcaaagccaaactcgg

SEQ ID NO: 2365349 - DNA, 25 bp, Homo sapien
caagaggcttaagtctgccacagac

SEQ ID NO: 2365350 - DNA, 25 bp, Homo sapien
ttaccccggcgcaacaagaggctta

SEQ ID NO: 2365351 - DNA, 25 bp, Homo sapien
gtgggaccactacgctgctaactgt

SEQ ID NO: 2365352 - DNA, 25 bp, Homo sapien
ttgctgcagtgggaccactacgctg

SEQ ID NO: 2365353 - DNA, 25 bp, Homo sapien
tccccagaacgaatgagagatcagc

SEQ ID NO: 2365354 - DNA, 25 bp, Homo sapien
ctgcatctgtgtatgtgaggctgta

SEQ ID NO: 2365355 - DNA, 25 bp, Homo sapien
aatgggagccccacgacataaccag

SEQ ID NO: 2365356 - DNA, 25 bp, Homo sapien
atgggagccccacgacataaccagg

SEQ ID NO: 2365357 - DNA, 25 bp, Homo sapien
actgcctagtgctagagcagcctgg

SEQ ID NO: 2365358 - DNA, 25 bp, Homo sapien
gagcagcctggttctcaggtaagaa

SEQ ID NO: 2365359 - DNA, 25 bp, Homo sapien
taagggacaactgcctagtgctaga

SEQ ID NO: 2365360 - DNA, 25 bp, Homo sapien
ttcacagacagttaagggacaactg

SEQ ID NO: 2365361 - DNA, 25 bp, Homo sapien
agtaagctgtccatatctatttgtg

SEQ ID NO: 2365362 - DNA, 25 bp, Homo sapien
tagtaagctgtccatatctatttgt

SEQ ID NO: 2365363 - DNA, 25 bp, Homo sapien
ctatgaagaatagtaagctgtccat

SEQ ID NO: 2365364 - DNA, 25 bp, Homo sapien
gaagaatagtaagctgtccatatct

SEQ ID NO: 2365365 - DNA, 25 bp, Homo sapien
ccctccagtgctaagcagtcttgct

SEQ ID NO: 2365366 - DNA, 25 bp, Homo sapien
tagtttacagccagattgcatagtg

SEQ ID NO: 2365367 - DNA, 25 bp, Homo sapien
ccagtgctaagcagtcttgctcagt

SEQ ID NO: 2365368 - DNA, 25 bp, Homo sapien
catagtgtaaccaaataatactggg

SEQ ID NO: 2365369 - DNA, 25 bp, Homo sapien
ttctgatcagcacaagttcaaacag

SEQ ID NO: 2365370 - DNA, 25 bp, Homo sapien
taacagttttgctactattcatgca

SEQ ID NO: 2365371 - DNA, 25 bp, Homo sapien
tgcatgatgatatactatatgtggc

SEQ ID NO: 2365372 - DNA, 25 bp, Homo sapien
cagctgatgcagagatttgattaaa

SEQ ID NO: 2365373 - DNA, 25 bp, Homo sapien
tacccctactgatgtcttgtggaaa

SEQ ID NO: 2365374 - DNA, 25 bp, Homo sapien
aaaataatgatccaatgaccctggg

SEQ ID NO: 2365375 - DNA, 25 bp, Homo sapien
tatttttataacaagctgcgcagcg

SEQ ID NO: 2365376 - DNA, 25 bp, Homo sapien
tgatggtacccgcatgtggtcccag

SEQ ID NO: 2365377 - DNA, 25 bp, Homo sapien
gggccacgtaatctgggaagccctg

SEQ ID NO: 2365378 - DNA, 25 bp, Homo sapien
tacaggctaagatggagagcacgcc

SEQ ID NO: 2365379 - DNA, 25 bp, Homo sapien
gagtcaagacttcgcagtggaacgg

SEQ ID NO: 2365380 - DNA, 25 bp, Homo sapien
tcagtatccaagattcagcccgcgc

SEQ ID NO: 2365381 - DNA, 25 bp, Homo sapien
tttggtggctgcgaaaaaagcactg

SEQ ID NO: 2365382 - DNA, 25 bp, Homo sapien
ggattcagcagggatccgtatttag

SEQ ID NO: 2365383 - DNA, 25 bp, Homo sapien
tctataaccaaagcccctgggagct

SEQ ID NO: 2365384 - DNA, 25 bp, Homo sapien
cgtatttagtccacttcacttctat

SEQ ID NO: 2365385 - DNA, 25 bp, Homo sapien
attgactattttggcctgtggattc

SEQ ID NO: 2365386 - DNA, 25 bp, Homo sapien
aaggaggatgaaattagatttgcag

SEQ ID NO: 2365387 - DNA, 25 bp, Homo sapien
aggatgaaattagatttgcagttac

SEQ ID NO: 2365388 - DNA, 25 bp, Homo sapien
aggaggatgaaattagatttgcagt

SEQ ID NO: 2365389 - DNA, 25 bp, Homo sapien
ctcaggaaaggaggatgaaattaga

SEQ ID NO: 2365390 - DNA, 25 bp, Homo sapien
accctccagtgtgctcccagaatga

SEQ ID NO: 2365391 - DNA, 25 bp, Homo sapien
taattggccattaacttggatgaga

SEQ ID NO: 2365392 - DNA, 25 bp, Homo sapien
taggtcctggagcactaattggcca

SEQ ID NO: 2365393 - DNA, 25 bp, Homo sapien
taataaacagagagatgcaaggccc

SEQ ID NO: 2365394 - DNA, 25 bp, Homo sapien
tccacaaaagtaaccgcagtggaaa

SEQ ID NO: 2365395 - DNA, 25 bp, Homo sapien
gcctggcattgatggctggtggagc

SEQ ID NO: 2365396 - DNA, 25 bp, Homo sapien
agtggaaataagaatcgtcctttca

SEQ ID NO: 2365397 - DNA, 25 bp, Homo sapien
gaagaagttaaagggcagcctggca

SEQ ID NO: 2365398 - DNA, 25 bp, Homo sapien
taaaatgcagtatcccctagggact

SEQ ID NO: 2365399 - DNA, 25 bp, Homo sapien
gcagtgtgctggtttggaggcaacc

SEQ ID NO: 2365400 - DNA, 25 bp, Homo sapien
ctagggacttctagccccacgtgca

SEQ ID NO: 2365401 - DNA, 25 bp, Homo sapien
ggcaacctcaaaggttagaagtata

SEQ ID NO: 2365402 - DNA, 25 bp, Homo sapien
ataccagcctgccagtcggagagca

SEQ ID NO: 2365403 - DNA, 25 bp, Homo sapien
aaatagcttcgtctcagtttcccca

SEQ ID NO: 2365404 - DNA, 25 bp, Homo sapien
aggtggctccattgttttctgccac

SEQ ID NO: 2365405 - DNA, 25 bp, Homo sapien
tcggagagcaagctagctacagtgc

SEQ ID NO: 2365406 - DNA, 25 bp, Homo sapien
tcacgtgtatattaaggaactgatg

SEQ ID NO: 2365407 - DNA, 25 bp, Homo sapien
taaggaactgatgcatctgagcatt

SEQ ID NO: 2365408 - DNA, 25 bp, Homo sapien
gttttcaaatttcacgtgtatatta

SEQ ID NO: 2365409 - DNA, 25 bp, Homo sapien
ttaaggaactgatgcatctgagcat

SEQ ID NO: 2365410 - DNA, 25 bp, Homo sapien
catccctggcgaggctcaaagtaaa

SEQ ID NO: 2365411 - DNA, 25 bp, Homo sapien
cagtgaagcctatctgattgtagca

SEQ ID NO: 2365412 - DNA, 25 bp, Homo sapien
cgttcagaacggcaactcttaaggt

SEQ ID NO: 2365413 - DNA, 25 bp, Homo sapien
gatgaatgtacaattggccgccaag

SEQ ID NO: 2365414 - DNA, 25 bp, Homo sapien
tacctacaggttgaaaggatcaaag

SEQ ID NO: 2365415 - DNA, 25 bp, Homo sapien
tacggtgatggcctggaatttccaa

SEQ ID NO: 2365416 - DNA, 25 bp, Homo sapien
ttatggtaaccccaacactgtcacc

SEQ ID NO: 2365417 - DNA, 25 bp, Homo sapien
ggcaggttaattttcagaggccaga

SEQ ID NO: 2365418 - DNA, 25 bp, Homo sapien
cccttgacttcaggggcatgttgag

SEQ ID NO: 2365419 - DNA, 25 bp, Homo sapien
ttcaggggcatgttgaggaaactgt

SEQ ID NO: 2365420 - DNA, 25 bp, Homo sapien
agagccatcggggaatgtgaggcag

SEQ ID NO: 2365421 - DNA, 25 bp, Homo sapien
gcaggagtccgggatacccagagct

SEQ ID NO: 2365422 - DNA, 25 bp, Homo sapien
tcctgttgcctcatagacactgaga

SEQ ID NO: 2365423 - DNA, 25 bp, Homo sapien
tttcctgttgcctcatagacactga

SEQ ID NO: 2365424 - DNA, 25 bp, Homo sapien
ttcctgttgcctcatagacactgag

SEQ ID NO: 2365425 - DNA, 25 bp, Homo sapien
cgggtgttttgggaccgggctgcag

SEQ ID NO: 2365426 - DNA, 25 bp, Homo sapien
tccgttggttactgccaaccagacc

SEQ ID NO: 2365427 - DNA, 25 bp, Homo sapien
ggaccgggctgcagtactgattccg

SEQ ID NO: 2365428 - DNA, 25 bp, Homo sapien
ttccggtattcacacatgggcccgt

SEQ ID NO: 2365429 - DNA, 25 bp, Homo sapien
cccctccagtttccaggttgtgatg

SEQ ID NO: 2365430 - DNA, 25 bp, Homo sapien
cctccagtttccaggttgtgatgtc

SEQ ID NO: 2365431 - DNA, 25 bp, Homo sapien
ctgcccactggcccctccagtttcc

SEQ ID NO: 2365432 - DNA, 25 bp, Homo sapien
ccctccagtttccaggttgtgatgt

SEQ ID NO: 2365433 - DNA, 25 bp, Homo sapien
cgatcctgaaggcagttgtgggcat

SEQ ID NO: 2365434 - DNA, 25 bp, Homo sapien
ttggcattggagaaggaggaccctg

SEQ ID NO: 2365435 - DNA, 25 bp, Homo sapien
agggacacagtcaggttggcattgg

SEQ ID NO: 2365436 - DNA, 25 bp, Homo sapien
gaggtcgctgcacagcagggacaca

SEQ ID NO: 2365437 - DNA, 25 bp, Homo sapien
ccagcaacacatgagaattctggga

SEQ ID NO: 2365438 - DNA, 25 bp, Homo sapien
gattggcccccatgtttcagttacc

SEQ ID NO: 2365439 - DNA, 25 bp, Homo sapien
gaatcacatgggaaagattggcccc

SEQ ID NO: 2365440 - DNA, 25 bp, Homo sapien
tacctcccccgggtgcctccagcaa

SEQ ID NO: 2365441 - DNA, 25 bp, Homo sapien
gatagatctggacaaatgtcttttt

SEQ ID NO: 2365442 - DNA, 25 bp, Homo sapien
atttttcagatccagaggcaacagg

SEQ ID NO: 2365443 - DNA, 25 bp, Homo sapien
gcagatggcagcaagatgatagatc

SEQ ID NO: 2365444 - DNA, 25 bp, Homo sapien
ggcagcaagatgatagatctggaca

SEQ ID NO: 2365445 - DNA, 25 bp, Homo sapien
gacttgctgaagtgttcctttggga

SEQ ID NO: 2365446 - DNA, 25 bp, Homo sapien
aaaagtatggacataggtccctgct

SEQ ID NO: 2365447 - DNA, 25 bp, Homo sapien
gagcagtagcagtatttcagtaaac

SEQ ID NO: 2365448 - DNA, 25 bp, Homo sapien
accgtggagcagaggcaagtaccca

SEQ ID NO: 2365449 - DNA, 25 bp, Homo sapien
tcaactgtagccgttgataactgcc

SEQ ID NO: 2365450 - DNA, 25 bp, Homo sapien
actgtagccgttgataactgccttg

SEQ ID NO: 2365451 - DNA, 25 bp, Homo sapien
tagccgttgataactgccttggagg

SEQ ID NO: 2365452 - DNA, 25 bp, Homo sapien
ccgttgataactgccttggaggaac

SEQ ID NO: 2365453 - DNA, 25 bp, Homo sapien
gatgaccgtgtacaataccgtgtgg

SEQ ID NO: 2365454 - DNA, 25 bp, Homo sapien
tttaggacataaagagagccctagg

SEQ ID NO: 2365455 - DNA, 25 bp, Homo sapien
tacagttgcatcaggcctgaacccg

SEQ ID NO: 2365456 - DNA, 25 bp, Homo sapien
caatactgttctatacgagtgaccg

SEQ ID NO: 2365457 - DNA, 25 bp, Homo sapien
gaaatagatgtcgttttgacactgc

SEQ ID NO: 2365458 - DNA, 25 bp, Homo sapien
gacactgcctagtcgggacttgtaa

SEQ ID NO: 2365459 - DNA, 25 bp, Homo sapien
gaagccaaatgccacgagacctgta

SEQ ID NO: 2365460 - DNA, 25 bp, Homo sapien
ccagattttaaagcctgcagagaaa

SEQ ID NO: 2365461 - DNA, 25 bp, Homo sapien
ccatcaaaaagcctgcataatgtct

SEQ ID NO: 2365462 - DNA, 25 bp, Homo sapien
tgatgccatgaatatgagaacagcc

SEQ ID NO: 2365463 - DNA, 25 bp, Homo sapien
gagaacagcctataacatatcgaga

SEQ ID NO: 2365464 - DNA, 25 bp, Homo sapien
gagatcctctagaacactcaagatg

SEQ ID NO: 2365465 - DNA, 25 bp, Homo sapien
tctaagacttgtgaggtgcctggca

SEQ ID NO: 2365466 - DNA, 25 bp, Homo sapien
taacaagcgttcatgtctcaagagg

SEQ ID NO: 2365467 - DNA, 25 bp, Homo sapien
gatttcaaatccacatagccgggag

SEQ ID NO: 2365468 - DNA, 25 bp, Homo sapien
tgagcgtgcatctgaagaggaagcc

SEQ ID NO: 2365469 - DNA, 25 bp, Homo sapien
gatatgtgcccagtatgtgccaggg

SEQ ID NO: 2365470 - DNA, 25 bp, Homo sapien
tactgaatatgaacgagggctgtgg

SEQ ID NO: 2365471 - DNA, 25 bp, Homo sapien
tccagccctgatgatgttgcaagag

SEQ ID NO: 2365472 - DNA, 25 bp, Homo sapien
ggcactcgtattgtgggcagagaca

SEQ ID NO: 2365473 - DNA, 25 bp, Homo sapien
gagaataaagttcatccccagcctt

SEQ ID NO: 2365474 - DNA, 25 bp, Homo sapien
taccaaaaactcagaggatctggcc

SEQ ID NO: 2365475 - DNA, 25 bp, Homo sapien
cccagccttctagaacagagttcca

SEQ ID NO: 2365476 - DNA, 25 bp, Homo sapien
ggcctagggccaaatgtaacccaca

SEQ ID NO: 2365477 - DNA, 25 bp, Homo sapien
gctgcctgaaattggtaagcttgaa

SEQ ID NO: 2365478 - DNA, 25 bp, Homo sapien
tggaatgaaggaataaatagctggg

SEQ ID NO: 2365479 - DNA, 25 bp, Homo sapien
ctctctgccagggtgacagttgaac

SEQ ID NO: 2365480 - DNA, 25 bp, Homo sapien
tgggatgcttcaggcacagcaaggc

SEQ ID NO: 2365481 - DNA, 25 bp, Homo sapien
cacaaattggagagcagcggcatga

SEQ ID NO: 2365482 - DNA, 25 bp, Homo sapien
ggcatgatcactgttcaccgcatcc

SEQ ID NO: 2365483 - DNA, 25 bp, Homo sapien
atgatccgtcaacctaggcctccga

SEQ ID NO: 2365484 - DNA, 25 bp, Homo sapien
cctgcttcggcttcgtaagtagctg

SEQ ID NO: 2365485 - DNA, 25 bp, Homo sapien
tagaaaatcaaaatctctctcttcc

SEQ ID NO: 2365486 - DNA, 25 bp, Homo sapien
cccctatagcttcctgtcccctcca

SEQ ID NO: 2365487 - DNA, 25 bp, Homo sapien
tatagcttcctgtcccctccataga

SEQ ID NO: 2365488 - DNA, 25 bp, Homo sapien
ctgtcccctccatagaaaatcaaaa

SEQ ID NO: 2365489 - DNA, 25 bp, Homo sapien
tcctcacttggcaatgaggccgtgg

SEQ ID NO: 2365490 - DNA, 25 bp, Homo sapien
tcggaggagtggtagctcagggcgt

SEQ ID NO: 2365491 - DNA, 25 bp, Homo sapien
gacctgttgactccgtggtgagcat

SEQ ID NO: 2365492 - DNA, 25 bp, Homo sapien
caagacaaactcttgatgttcctca

SEQ ID NO: 2365493 - DNA, 25 bp, Homo sapien
gaacttggggcaggtgctggccgaa

SEQ ID NO: 2365494 - DNA, 25 bp, Homo sapien
cagtcctcagagtccgtggtgtaag

SEQ ID NO: 2365495 - DNA, 25 bp, Homo sapien
gagaggggaagtccgctgggagaac

SEQ ID NO: 2365496 - DNA, 25 bp, Homo sapien
gtgctggccgaatgcctccagtcct

SEQ ID NO: 2365497 - DNA, 25 bp, Homo sapien
tatattacatacagggttcgggcca

SEQ ID NO: 2365498 - DNA, 25 bp, Homo sapien
gccacacagtccagatcaaacgaat

SEQ ID NO: 2365499 - DNA, 25 bp, Homo sapien
tatgaacagctacatgtcaggcctt

SEQ ID NO: 2365500 - DNA, 25 bp, Homo sapien
atataacaaatttagcccggcatgg

SEQ ID NO: 2365501 - DNA, 25 bp, Homo sapien
tgcaactgcgcttccgacggtgccg

SEQ ID NO: 2365502 - DNA, 25 bp, Homo sapien
aacgggcgcctttgtgactcgcaca

SEQ ID NO: 2365503 - DNA, 25 bp, Homo sapien
gactgcttgtccgtggctgctccgg

SEQ ID NO: 2365504 - DNA, 25 bp, Homo sapien
gccgcttgtccgacggctgctgcaa

SEQ ID NO: 2365505 - DNA, 25 bp, Homo sapien
gctggtaatgtaggaacctctggat

SEQ ID NO: 2365506 - DNA, 25 bp, Homo sapien
aacctctggattttccctgatgttt

SEQ ID NO: 2365507 - DNA, 25 bp, Homo sapien
tgaaaatggttctcaggttaatggg

SEQ ID NO: 2365508 - DNA, 25 bp, Homo sapien
tgggtgataggaaaatagtggctgg

SEQ ID NO: 2365509 - DNA, 25 bp, Homo sapien
gaaggaaccgcactttgcctccact

SEQ ID NO: 2365510 - DNA, 25 bp, Homo sapien
tccactcagacactgtacccagaga

SEQ ID NO: 2365511 - DNA, 25 bp, Homo sapien
cttgaaggaaccgcactttgcctcc

SEQ ID NO: 2365512 - DNA, 25 bp, Homo sapien
caaagccagtgagccttcctctctc

SEQ ID NO: 2365513 - DNA, 25 bp, Homo sapien
gggagtgtcggagtcttttctcctg

SEQ ID NO: 2365514 - DNA, 25 bp, Homo sapien
tctccgaaggttcctggggagtgtc

SEQ ID NO: 2365515 - DNA, 25 bp, Homo sapien
aaagacttccggctttccaccatct

SEQ ID NO: 2365516 - DNA, 25 bp, Homo sapien
tactgactcgcaatcttctgctggt

SEQ ID NO: 2365517 - DNA, 25 bp, Homo sapien
taaatactgtataggtgtttcactc

SEQ ID NO: 2365518 - DNA, 25 bp, Homo sapien
gtgtctgtcttgcaggcaaggccag

SEQ ID NO: 2365519 - DNA, 25 bp, Homo sapien
ctctaaagaacctaaacttggcctg

SEQ ID NO: 2365520 - DNA, 25 bp, Homo sapien
tactccctgaatgttgtaagccagg

SEQ ID NO: 2365521 - DNA, 25 bp, Homo sapien
taacttgacggagcactccaggcac

SEQ ID NO: 2365522 - DNA, 25 bp, Homo sapien
taagtttaacttgacggagcactcc

SEQ ID NO: 2365523 - DNA, 25 bp, Homo sapien
cctaagtttaacttgacggagcact

SEQ ID NO: 2365524 - DNA, 25 bp, Homo sapien
agtttaacttgacggagcactccag

SEQ ID NO: 2365525 - DNA, 25 bp, Homo sapien
catgagactcaacagtagggtgatc

SEQ ID NO: 2365526 - DNA, 25 bp, Homo sapien
cactccgattcatgttcctcgagga

SEQ ID NO: 2365527 - DNA, 25 bp, Homo sapien
gagtcgcagctccatgtagttcttc

SEQ ID NO: 2365528 - DNA, 25 bp, Homo sapien
gttcagccaacagcactttcaggga

SEQ ID NO: 2365529 - DNA, 25 bp, Homo sapien
tgaagcaggagaattggttgagcct

SEQ ID NO: 2365530 - DNA, 25 bp, Homo sapien
attaggtgggcgtgggggtgcctgc

SEQ ID NO: 2365531 - DNA, 25 bp, Homo sapien
ataaataaactacctgtttcagccg

SEQ ID NO: 2365532 - DNA, 25 bp, Homo sapien
aaccaagatcatgccgctacactcc

SEQ ID NO: 2365533 - DNA, 25 bp, Homo sapien
agtgataaataggaggtctccaagc

SEQ ID NO: 2365534 - DNA, 25 bp, Homo sapien
gagctgagacctaagtgataaatag

SEQ ID NO: 2365535 - DNA, 25 bp, Homo sapien
taagtgataaataggaggtctccaa

SEQ ID NO: 2365536 - DNA, 25 bp, Homo sapien
tgagctgagacctaagtgataaata

SEQ ID NO: 2365537 - DNA, 25 bp, Homo sapien
agaaggtgaagatgagagcaaccag

SEQ ID NO: 2365538 - DNA, 25 bp, Homo sapien
ggagagaggtctttctctaataatg

SEQ ID NO: 2365539 - DNA, 25 bp, Homo sapien
tctttctctaataatgggggatgtg

SEQ ID NO: 2365540 - DNA, 25 bp, Homo sapien
agagaggtctttctctaataatggg

SEQ ID NO: 2365541 - DNA, 25 bp, Homo sapien
catttttgcgaaaatctgtttttgg

SEQ ID NO: 2365542 - DNA, 25 bp, Homo sapien
tgcgaaaatctgtttttggtttgcg

SEQ ID NO: 2365543 - DNA, 25 bp, Homo sapien
cgaaaatctgtttttggtttgcgat

SEQ ID NO: 2365544 - DNA, 25 bp, Homo sapien
ctcctgcatttttgcgaaaatctgt

SEQ ID NO: 2365545 - DNA, 25 bp, Homo sapien
caaaatgtgaatctgtttctgcagt

SEQ ID NO: 2365546 - DNA, 25 bp, Homo sapien
ttccaaaatgtgaatctgtttctgc

SEQ ID NO: 2365547 - DNA, 25 bp, Homo sapien
tctgcagtttccgggggttattggc

SEQ ID NO: 2365548 - DNA, 25 bp, Homo sapien
aacgggtttccaaaatgtgaatctg

SEQ ID NO: 2365549 - DNA, 25 bp, Homo sapien
ggctgggcagacatcatttttgttc

SEQ ID NO: 2365550 - DNA, 25 bp, Homo sapien
ggtatgttctgctaatggctgggca

SEQ ID NO: 2365551 - DNA, 25 bp, Homo sapien
tttttgttctgagcaaacgtgggca

SEQ ID NO: 2365552 - DNA, 25 bp, Homo sapien
ctgagcaaacgtgggcagagctgtt

SEQ ID NO: 2365553 - DNA, 25 bp, Homo sapien
caaatcgtaggtcttcaatctcctt

SEQ ID NO: 2365554 - DNA, 25 bp, Homo sapien
gagcttggcattagtggtcagcatc

SEQ ID NO: 2365555 - DNA, 25 bp, Homo sapien
ttgtcataagcagccttctcaaatc

SEQ ID NO: 2365556 - DNA, 25 bp, Homo sapien
cttccggagcttggcattagtggtc

SEQ ID NO: 2365557 - DNA, 25 bp, Homo sapien
ttctccatcaacaggcagtgctgga

SEQ ID NO: 2365558 - DNA, 25 bp, Homo sapien
tcttctccatcaacaggcagtgctg

SEQ ID NO: 2365559 - DNA, 25 bp, Homo sapien
tttcttctccatcaacaggcagtgc

SEQ ID NO: 2365560 - DNA, 25 bp, Homo sapien
ttttcttctccatcaacaggcagtg

SEQ ID NO: 2365561 - DNA, 25 bp, Homo sapien
taggcctgagaagattgctcaatgg

SEQ ID NO: 2365562 - DNA, 25 bp, Homo sapien
ggcctgagaagattgctcaatggcc

SEQ ID NO: 2365563 - DNA, 25 bp, Homo sapien
cctgagaagattgctcaatggccaa

SEQ ID NO: 2365564 - DNA, 25 bp, Homo sapien
ataggcctgagaagattgctcaatg

SEQ ID NO: 2365565 - DNA, 25 bp, Homo sapien
tcatgggcatagagacgctccagct

SEQ ID NO: 2365566 - DNA, 25 bp, Homo sapien
tggcctgctcctcgaattcattgcg

SEQ ID NO: 2365567 - DNA, 25 bp, Homo sapien
cgatcattcagcttgacgagcagga

SEQ ID NO: 2365568 - DNA, 25 bp, Homo sapien
tccaggttgtactgagaggtgtcct

SEQ ID NO: 2365569 - DNA, 25 bp, Homo sapien
catacgtgaaccgagcaaaattctt

SEQ ID NO: 2365570 - DNA, 25 bp, Homo sapien
caatgagctggtttaggttcccact

SEQ ID NO: 2365571 - DNA, 25 bp, Homo sapien
gggtcctcttgtgcatcatctccat

SEQ ID NO: 2365572 - DNA, 25 bp, Homo sapien
tgttgagctccgtgacatacgtgaa

SEQ ID NO: 2365573 - DNA, 25 bp, Homo sapien
tcatcgtgggacaatttctgctggg

SEQ ID NO: 2365574 - DNA, 25 bp, Homo sapien
agctgtctcaggacagagtggttgt

SEQ ID NO: 2365575 - DNA, 25 bp, Homo sapien
acagagtggttgtcatcgtgggaca

SEQ ID NO: 2365576 - DNA, 25 bp, Homo sapien
aatttctgctgggatcgcaagagga

SEQ ID NO: 2365577 - DNA, 25 bp, Homo sapien
gatgtcagtgactttccccgtctcc

SEQ ID NO: 2365578 - DNA, 25 bp, Homo sapien
tcccctaactgcaccaggatcttgg

SEQ ID NO: 2365579 - DNA, 25 bp, Homo sapien
caaaatactgcggaaggttgatgtc

SEQ ID NO: 2365580 - DNA, 25 bp, Homo sapien
tgagttcttcaatagatccaaggtc

SEQ ID NO: 2365581 - DNA, 25 bp, Homo sapien
caggatgcgcctgtaggtctccaac

SEQ ID NO: 2365582 - DNA, 25 bp, Homo sapien
cactggggggatgactttgatgggt

SEQ ID NO: 2365583 - DNA, 25 bp, Homo sapien
ccccagaaagggttgatgaagggtg

SEQ ID NO: 2365584 - DNA, 25 bp, Homo sapien
catcatccaacctgtcgctgaaggg

SEQ ID NO: 2365585 - DNA, 25 bp, Homo sapien
cactcctgctgcgtttcagtctcct

SEQ ID NO: 2365586 - DNA, 25 bp, Homo sapien
tcactcctgctgcgtttcagtctcc

SEQ ID NO: 2365587 - DNA, 25 bp, Homo sapien
tccttcaggatataattgtcgagaa

SEQ ID NO: 2365588 - DNA, 25 bp, Homo sapien
ttccttactccgattctccttcagg

SEQ ID NO: 2365589 - DNA, 25 bp, Homo sapien
tataattgtcgagaaccagctgccg

SEQ ID NO: 2365590 - DNA, 25 bp, Homo sapien
agctgccgaaggctgctgtggtcca

SEQ ID NO: 2365591 - DNA, 25 bp, Homo sapien
cggttatgttgcaaaggtggcccca

SEQ ID NO: 2365592 - DNA, 25 bp, Homo sapien
tattctttcggttatgttgcaaagg

SEQ ID NO: 2365593 - DNA, 25 bp, Homo sapien
tgttgcaaaggtggccccatgcatg

SEQ ID NO: 2365594 - DNA, 25 bp, Homo sapien
catttattctttcggttatgttgca

SEQ ID NO: 2365595 - DNA, 25 bp, Homo sapien
gggccttgatggactcacatggttc

SEQ ID NO: 2365596 - DNA, 25 bp, Homo sapien
ttacatctggtggaccgcatctgca

SEQ ID NO: 2365597 - DNA, 25 bp, Homo sapien
tacccaaagcccttagtaatgtgtg

SEQ ID NO: 2365598 - DNA, 25 bp, Homo sapien
ctctgcatatctgggggtggcctgt

SEQ ID NO: 2365599 - DNA, 25 bp, Homo sapien
agagacagagagagaagtgaggaga

SEQ ID NO: 2365600 - DNA, 25 bp, Homo sapien
gagacagagagagaagtgaggagag

SEQ ID NO: 2365601 - DNA, 25 bp, Homo sapien
ggcttaaccagcagtatgactggga

SEQ ID NO: 2365602 - DNA, 25 bp, Homo sapien
tgcaggcttaaccagcagtatgact

SEQ ID NO: 2365603 - DNA, 25 bp, Homo sapien
ttctgcaggcttaaccagcagtatg

SEQ ID NO: 2365604 - DNA, 25 bp, Homo sapien
accagcagtatgactgggagacctc

SEQ ID NO: 2365605 - DNA, 25 bp, Homo sapien
ggacgctcagcgattgggccagata

SEQ ID NO: 2365606 - DNA, 25 bp, Homo sapien
tttggagaaatgcagcgcggacgct

SEQ ID NO: 2365607 - DNA, 25 bp, Homo sapien
gattgggccagatacatttcaaaca

SEQ ID NO: 2365608 - DNA, 25 bp, Homo sapien
agattccgcgcccttggttcgccag

SEQ ID NO: 2365609 - DNA, 25 bp, Homo sapien
ctttgatcttatcccagtgaaactc

SEQ ID NO: 2365610 - DNA, 25 bp, Homo sapien
gacttgtcattgctgcctttgaaga

SEQ ID NO: 2365611 - DNA, 25 bp, Homo sapien
ggagccacaagccataaattcaggt

SEQ ID NO: 2365612 - DNA, 25 bp, Homo sapien
gagtgtgagagtgacatcatgtgac

SEQ ID NO: 2365613 - DNA, 25 bp, Homo sapien
atgctgggaaactgaagctgcgagt

SEQ ID NO: 2365614 - DNA, 25 bp, Homo sapien
aagaggatgtcacttcccagaagcc

SEQ ID NO: 2365615 - DNA, 25 bp, Homo sapien
gaacaagctcaggtcacatgcccat

SEQ ID NO: 2365616 - DNA, 25 bp, Homo sapien
tagggattatcctgattggctcaga

SEQ ID NO: 2365617 - DNA, 25 bp, Homo sapien
tctttgctaccttccttctgcctgg

SEQ ID NO: 2365618 - DNA, 25 bp, Homo sapien
ttgactttctactatacaggctgaa

SEQ ID NO: 2365619 - DNA, 25 bp, Homo sapien
catggtggatactgaccacttgaca

SEQ ID NO: 2365620 - DNA, 25 bp, Homo sapien
caggagagtgagaactcaggataag

SEQ ID NO: 2365621 - DNA, 25 bp, Homo sapien
gaagaatgtcaaagcctcagatggc

SEQ ID NO: 2365622 - DNA, 25 bp, Homo sapien
aatatggtctttcctagagaagaat

SEQ ID NO: 2365623 - DNA, 25 bp, Homo sapien
tctttcctagagaagaatgtcaaag

SEQ ID NO: 2365624 - DNA, 25 bp, Homo sapien
ctggaacttggaaatatggtctttc

SEQ ID NO: 2365625 - DNA, 25 bp, Homo sapien
acagggactggccataaccagtcca

SEQ ID NO: 2365626 - DNA, 25 bp, Homo sapien
tccctcttgacagctgtcatcatat

SEQ ID NO: 2365627 - DNA, 25 bp, Homo sapien
catcatatccggcacacaggaggaa

SEQ ID NO: 2365628 - DNA, 25 bp, Homo sapien
gcaagatgagccctttaagctgcca

SEQ ID NO: 2365629 - DNA, 25 bp, Homo sapien
ttttttatcactcggaaggcagccc

SEQ ID NO: 2365630 - DNA, 25 bp, Homo sapien
aaatcaatgttatctcaggcccagg

SEQ ID NO: 2365631 - DNA, 25 bp, Homo sapien
tcttctcacaaggacggcgcagtgt

SEQ ID NO: 2365632 - DNA, 25 bp, Homo sapien
tagtagcggagccatgctgtcaacg

SEQ ID NO: 2365633 - DNA, 25 bp, Homo sapien
tccatagggccagcgatgaatgtgg

SEQ ID NO: 2365634 - DNA, 25 bp, Homo sapien
tctgcgctgcgtccatagggccagc

SEQ ID NO: 2365635 - DNA, 25 bp, Homo sapien
tttccacgagagtgatgggaggtct

SEQ ID NO: 2365636 - DNA, 25 bp, Homo sapien
actttctgaatctcagggagttttt

SEQ ID NO: 2365637 - DNA, 25 bp, Homo sapien
agggatgctggcgctatcaggaggc

SEQ ID NO: 2365638 - DNA, 25 bp, Homo sapien
ggaggtgggagcagccattggcctg

SEQ ID NO: 2365639 - DNA, 25 bp, Homo sapien
ggagcagccattggcctggagctca

SEQ ID NO: 2365640 - DNA, 25 bp, Homo sapien
gctatcaggaggcagcagaggtctg

SEQ ID NO: 2365641 - DNA, 25 bp, Homo sapien
ggcattgggaatggcggatcggggg

SEQ ID NO: 2365642 - DNA, 25 bp, Homo sapien
aggtggcccctgacgcacaggagac

SEQ ID NO: 2365643 - DNA, 25 bp, Homo sapien
tctttgctggccctgatgcacaggt

SEQ ID NO: 2365644 - DNA, 25 bp, Homo sapien
ggtctttgctggccctgatgcacag

SEQ ID NO: 2365645 - DNA, 25 bp, Homo sapien
ctgtctcaccctgcaggcgagggga

SEQ ID NO: 2365646 - DNA, 25 bp, Homo sapien
ctctgtctcaccctgcaggcgaggg

SEQ ID NO: 2365647 - DNA, 25 bp, Homo sapien
gtctcaccctgcaggcgaggggagg

SEQ ID NO: 2365648 - DNA, 25 bp, Homo sapien
cctctgtctcaccctgcaggcgagg

SEQ ID NO: 2365649 - DNA, 25 bp, Homo sapien
tcctttgatgcaaatatctgatgtc

SEQ ID NO: 2365650 - DNA, 25 bp, Homo sapien
gattcctttgatgcaaatatctgat

SEQ ID NO: 2365651 - DNA, 25 bp, Homo sapien
ccactctgattcctttgatgcaaat

SEQ ID NO: 2365652 - DNA, 25 bp, Homo sapien
tctgattcctttgatgcaaatatct

SEQ ID NO: 2365653 - DNA, 25 bp, Homo sapien
ggaaggagcaggttgcagcatcttg

SEQ ID NO: 2365654 - DNA, 25 bp, Homo sapien
gcaggttgcagcatcttgggggctg

SEQ ID NO: 2365655 - DNA, 25 bp, Homo sapien
aggagcaggttgcagcatcttgggg

SEQ ID NO: 2365656 - DNA, 25 bp, Homo sapien
ttgcagcatcttgggggctgtccag

SEQ ID NO: 2365657 - DNA, 25 bp, Homo sapien
cccacagatattggtgagaaagtcc

SEQ ID NO: 2365658 - DNA, 25 bp, Homo sapien
gagtcccacagatattggtgagaaa

SEQ ID NO: 2365659 - DNA, 25 bp, Homo sapien
gtgagaaagtccttgtcctcgaaga

SEQ ID NO: 2365660 - DNA, 25 bp, Homo sapien
ctggagtcccacagatattggtgag

SEQ ID NO: 2365661 - DNA, 25 bp, Homo sapien
ttaggatgccaacaaatctgtagcc

SEQ ID NO: 2365662 - DNA, 25 bp, Homo sapien
cgatggagcctctatcccttgggag

SEQ ID NO: 2365663 - DNA, 25 bp, Homo sapien
ggaaaaatgcatagacggccttagg

SEQ ID NO: 2365664 - DNA, 25 bp, Homo sapien
taacatcacattggtctaagcaggg

SEQ ID NO: 2365665 - DNA, 25 bp, Homo sapien
ctcttgcggccacagattcgggcca

SEQ ID NO: 2365666 - DNA, 25 bp, Homo sapien
tctgagcatccaggaggaaggttca

SEQ ID NO: 2365667 - DNA, 25 bp, Homo sapien
gcggccacagattcgggccacattc

SEQ ID NO: 2365668 - DNA, 25 bp, Homo sapien
agtcagagccaatcccctcttgcgg

SEQ ID NO: 2365669 - DNA, 25 bp, Homo sapien
gcgccactgagtcgtgggaaatgtc

SEQ ID NO: 2365670 - DNA, 25 bp, Homo sapien
cgctccatcgccagatatgcttggg

SEQ ID NO: 2365671 - DNA, 25 bp, Homo sapien
atatgcttgggatccgagggtcgca

SEQ ID NO: 2365672 - DNA, 25 bp, Homo sapien
ccactgagtcgtgggaaatgtcacc

SEQ ID NO: 2365673 - DNA, 25 bp, Homo sapien
tcaatatccgggctggactcccccc

SEQ ID NO: 2365674 - DNA, 25 bp, Homo sapien
aatatccgggctggactccccccag

SEQ ID NO: 2365675 - DNA, 25 bp, Homo sapien
cgcccgggccctgagcgccgcggcc

SEQ ID NO: 2365676 - DNA, 25 bp, Homo sapien
gccggccgcccgggccctgagcgcc

SEQ ID NO: 2365677 - DNA, 25 bp, Homo sapien
gtttggcttttctcaatggctgcac

SEQ ID NO: 2365678 - DNA, 25 bp, Homo sapien
tcgagacgcgcacacacaagagttt

SEQ ID NO: 2365679 - DNA, 25 bp, Homo sapien
ctatcgagacgcgcacacacaagag

SEQ ID NO: 2365680 - DNA, 25 bp, Homo sapien
gagtttggcttttctcaatggctgc

SEQ ID NO: 2365681 - DNA, 25 bp, Homo sapien
gagtcgccgtagatcaaatcgcttc

SEQ ID NO: 2365682 - DNA, 25 bp, Homo sapien
ctggagtcgccgtagatcaaatcgc

SEQ ID NO: 2365683 - DNA, 25 bp, Homo sapien
cgtagatcaaatcgcttccaatatt

SEQ ID NO: 2365684 - DNA, 25 bp, Homo sapien
gtcgccgtagatcaaatcgcttcca

SEQ ID NO: 2365685 - DNA, 25 bp, Homo sapien
tccccaatgcgcccagggcgcgccc

SEQ ID NO: 2365686 - DNA, 25 bp, Homo sapien
ccccaatgcgcccagggcgcgcccg

SEQ ID NO: 2365687 - DNA, 25 bp, Homo sapien
ctccccaatgcgcccagggcgcgcc

SEQ ID NO: 2365688 - DNA, 25 bp, Homo sapien
ggtggcggcgcgtccgggctgcgca

SEQ ID NO: 2365689 - DNA, 25 bp, Homo sapien
cccgggtggcggcgcgtccgggctg

SEQ ID NO: 2365690 - DNA, 25 bp, Homo sapien
gctgcgcagccaggcgggcggcgaa

SEQ ID NO: 2365691 - DNA, 25 bp, Homo sapien
tgcgcagccaggcgggcggcgaagg

SEQ ID NO: 2365692 - DNA, 25 bp, Homo sapien
ctctgcgccgctcccggctctccac

SEQ ID NO: 2365693 - DNA, 25 bp, Homo sapien
ctgctctgcgccgctcccggctctc

SEQ ID NO: 2365694 - DNA, 25 bp, Homo sapien
tgctctgcgccgctcccggctctcc

SEQ ID NO: 2365695 - DNA, 25 bp, Homo sapien
tgcgccgctcccggctctccaccgc

SEQ ID NO: 2365696 - DNA, 25 bp, Homo sapien
tggggaacgcggcagatggagggcc

SEQ ID NO: 2365697 - DNA, 25 bp, Homo sapien
agggccaaaatgtttgcacgcggcc

SEQ ID NO: 2365698 - DNA, 25 bp, Homo sapien
gccaaaatgtttgcacgcggccacg

SEQ ID NO: 2365699 - DNA, 25 bp, Homo sapien
aaaatgtttgcacgcggccacggct

SEQ ID NO: 2365700 - DNA, 25 bp, Homo sapien
aaaagtgtgtcgtaggagtcactgg

SEQ ID NO: 2365701 - DNA, 25 bp, Homo sapien
aaataaaagtgtgtcgtaggagtca

SEQ ID NO: 2365702 - DNA, 25 bp, Homo sapien
gagaggatcccaggccaaagtgctt

SEQ ID NO: 2365703 - DNA, 25 bp, Homo sapien
tcactggcattatgtacaagagagg

SEQ ID NO: 2365704 - DNA, 25 bp, Homo sapien
ctggatctcagaaaaagccggcaga

SEQ ID NO: 2365705 - DNA, 25 bp, Homo sapien
ggcagaagttctcctttctggctat

SEQ ID NO: 2365706 - DNA, 25 bp, Homo sapien
atctcagaaaaagccggcagaagtt

SEQ ID NO: 2365707 - DNA, 25 bp, Homo sapien
ggatctcagaaaaagccggcagaag

SEQ ID NO: 2365708 - DNA, 25 bp, Homo sapien
taacccaccgagacacttatttgct

SEQ ID NO: 2365709 - DNA, 25 bp, Homo sapien
tgtcaagttcgaagatagaatcctc

SEQ ID NO: 2365710 - DNA, 25 bp, Homo sapien
gttccctctggtcaaaatagcaccg

SEQ ID NO: 2365711 - DNA, 25 bp, Homo sapien
tcacgtttgaaatcccatctgccgg

SEQ ID NO: 2365712 - DNA, 25 bp, Homo sapien
cgtacagcaaagttgggcacagcca

SEQ ID NO: 2365713 - DNA, 25 bp, Homo sapien
ctttacaataactcgtacagcaaag

SEQ ID NO: 2365714 - DNA, 25 bp, Homo sapien
caataactcgtacagcaaagttggg

SEQ ID NO: 2365715 - DNA, 25 bp, Homo sapien
taactcgtacagcaaagttgggcac

SEQ ID NO: 2365716 - DNA, 25 bp, Homo sapien
gctaaacactttcatgttcaaagtg

SEQ ID NO: 2365717 - DNA, 25 bp, Homo sapien
tgtgtgccccacactgtgctaaaca

SEQ ID NO: 2365718 - DNA, 25 bp, Homo sapien
agcaactgtgtgccccacactgtgc

SEQ ID NO: 2365719 - DNA, 25 bp, Homo sapien
tgtgctaaacactttcatgttcaaa

SEQ ID NO: 2365720 - DNA, 25 bp, Homo sapien
ttttaatggcaaatgcatatcctgg

SEQ ID NO: 2365721 - DNA, 25 bp, Homo sapien
cgtctctgggcagacgaccagctca

SEQ ID NO: 2365722 - DNA, 25 bp, Homo sapien
cagagtcttaagcaccgttgggccc

SEQ ID NO: 2365723 - DNA, 25 bp, Homo sapien
ccaaagaggccgaaggattgatttc

SEQ ID NO: 2365724 - DNA, 25 bp, Homo sapien
tggtgatgacaatccacagagggag

SEQ ID NO: 2365725 - DNA, 25 bp, Homo sapien
gggaggccggtgttcatcagtaacc

SEQ ID NO: 2365726 - DNA, 25 bp, Homo sapien
gacacctgctatggtaagtgctgta

SEQ ID NO: 2365727 - DNA, 25 bp, Homo sapien
tattgagtaagctccaaggatctgg

SEQ ID NO: 2365728 - DNA, 25 bp, Homo sapien
ttatgaggccaatctgcacatacag

SEQ ID NO: 2365729 - DNA, 25 bp, Homo sapien
tgaggccaatctgcacatacagcag

SEQ ID NO: 2365730 - DNA, 25 bp, Homo sapien
ttagacctttatgaggccaatctgc

SEQ ID NO: 2365731 - DNA, 25 bp, Homo sapien
aggccaatctgcacatacagcagct

SEQ ID NO: 2365732 - DNA, 25 bp, Homo sapien
cagtatacactaagcatggcagacc

SEQ ID NO: 2365733 - DNA, 25 bp, Homo sapien
gcaatgttcatagtacaagccccgg

SEQ ID NO: 2365734 - DNA, 25 bp, Homo sapien
ttccgcaaggattaagtgagcaccc

SEQ ID NO: 2365735 - DNA, 25 bp, Homo sapien
caataaaatgctcgtggaccctcaa

SEQ ID NO: 2365736 - DNA, 25 bp, Homo sapien
ccaggaaaacacatggctagtcatt

SEQ ID NO: 2365737 - DNA, 25 bp, Homo sapien
caggaaaacacatggctagtcattc

SEQ ID NO: 2365738 - DNA, 25 bp, Homo sapien
cccaggaaaacacatggctagtcat

SEQ ID NO: 2365739 - DNA, 25 bp, Homo sapien
gcaagaatgcggaccagactctggt

SEQ ID NO: 2365740 - DNA, 25 bp, Homo sapien
gcctctgagcccttgctcgaggagg

SEQ ID NO: 2365741 - DNA, 25 bp, Homo sapien
ctcgaggaggctcggacttgcacaa

SEQ ID NO: 2365742 - DNA, 25 bp, Homo sapien
cgagccacttgttgagcccctggca

SEQ ID NO: 2365743 - DNA, 25 bp, Homo sapien
tgccctgcctgcaaacccgagtctc

SEQ ID NO: 2365744 - DNA, 25 bp, Homo sapien
caaacccgagtctcacctcatacct

SEQ ID NO: 2365745 - DNA, 25 bp, Homo sapien
gcctgcaaacccgagtctcacctca

SEQ ID NO: 2365746 - DNA, 25 bp, Homo sapien
gccctgcctgcaaacccgagtctca

SEQ ID NO: 2365747 - DNA, 25 bp, Homo sapien
ccaggatccctgcaggtccaatcct

SEQ ID NO: 2365748 - DNA, 25 bp, Homo sapien
gggctacacatgaggatggtggctt

SEQ ID NO: 2365749 - DNA, 25 bp, Homo sapien
atcctgttctcccatgtgagggcta

SEQ ID NO: 2365750 - DNA, 25 bp, Homo sapien
tgtgagggctacacatgaggatggt

SEQ ID NO: 2365751 - DNA, 25 bp, Homo sapien
tcagcagcaccaccggcaaataaaa

SEQ ID NO: 2365752 - DNA, 25 bp, Homo sapien
aaaataaaagcgaaaggctgcgata

SEQ ID NO: 2365753 - DNA, 25 bp, Homo sapien
ggctgcgataaagccgttcccttcc

SEQ ID NO: 2365754 - DNA, 25 bp, Homo sapien
ccggcaaataaaaagcgaatgtgca

SEQ ID NO: 2365755 - DNA, 25 bp, Homo sapien
gtgtctctgaagctcaatgggctgc

SEQ ID NO: 2365756 - DNA, 25 bp, Homo sapien
caatctgactcttggtgttccatga

SEQ ID NO: 2365757 - DNA, 25 bp, Homo sapien
ccaggtggggccaatctgactcttg

SEQ ID NO: 2365758 - DNA, 25 bp, Homo sapien
ctcctctggtaaccaggaacggact

SEQ ID NO: 2365759 - DNA, 25 bp, Homo sapien
caatctcagggcaggctaccctgta

SEQ ID NO: 2365760 - DNA, 25 bp, Homo sapien
tggccctctagagaaaaggtttgcc

SEQ ID NO: 2365761 - DNA, 25 bp, Homo sapien
taccctgtaagggacaccatagatg

SEQ ID NO: 2365762 - DNA, 25 bp, Homo sapien
tgataggagcccagattaggagatg

SEQ ID NO: 2365763 - DNA, 25 bp, Homo sapien
tttgcaattctccatgtttaaaaaa

SEQ ID NO: 2365764 - DNA, 25 bp, Homo sapien
ttcaatatcatgatggagcaaggcc

SEQ ID NO: 2365765 - DNA, 25 bp, Homo sapien
acttcaatatcatgatggagcaagg

SEQ ID NO: 2365766 - DNA, 25 bp, Homo sapien
tctccaggctattcccttttgcaat

SEQ ID NO: 2365767 - DNA, 25 bp, Homo sapien
ttgcaaatcaaagtggaccccgaca

SEQ ID NO: 2365768 - DNA, 25 bp, Homo sapien
gcctgggagccaacacggttcagaa

SEQ ID NO: 2365769 - DNA, 25 bp, Homo sapien
gaaggagacgtgatttgacccacaa

SEQ ID NO: 2365770 - DNA, 25 bp, Homo sapien
ttctaagtaatagccggtgatcccc

SEQ ID NO: 2365771 - DNA, 25 bp, Homo sapien
cttgccctactctccagacatgtcc

SEQ ID NO: 2365772 - DNA, 25 bp, Homo sapien
tgccctactctccagacatgtccct

SEQ ID NO: 2365773 - DNA, 25 bp, Homo sapien
tactctccagacatgtccctgtcat

SEQ ID NO: 2365774 - DNA, 25 bp, Homo sapien
ccctactctccagacatgtccctgt

SEQ ID NO: 2365775 - DNA, 25 bp, Homo sapien
cattgggacaaatgctttccagtcc

SEQ ID NO: 2365776 - DNA, 25 bp, Homo sapien
caaagtttggtggtccacatagaac

SEQ ID NO: 2365777 - DNA, 25 bp, Homo sapien
tatttttccggcactgcattgggac

SEQ ID NO: 2365778 - DNA, 25 bp, Homo sapien
taaggcagcgggcatttctggcttt

SEQ ID NO: 2365779 - DNA, 25 bp, Homo sapien
cctagggtgttcagtgcagttgcat

SEQ ID NO: 2365780 - DNA, 25 bp, Homo sapien
gcaggcgcccaatagctttcataca

SEQ ID NO: 2365781 - DNA, 25 bp, Homo sapien
gtctaggagcaacagtccaggtgtg

SEQ ID NO: 2365782 - DNA, 25 bp, Homo sapien
taccacaagttacaagtgcctaggg

SEQ ID NO: 2365783 - DNA, 25 bp, Homo sapien
cctcagctttgggcatctggtggca

SEQ ID NO: 2365784 - DNA, 25 bp, Homo sapien
tcagctttgggcatctggtggcagg

SEQ ID NO: 2365785 - DNA, 25 bp, Homo sapien
cagctttgggcatctggtggcaggg

SEQ ID NO: 2365786 - DNA, 25 bp, Homo sapien
ctcagctttgggcatctggtggcag

SEQ ID NO: 2365787 - DNA, 25 bp, Homo sapien
ctgacataattgaaaactgtttttc

SEQ ID NO: 2365788 - DNA, 25 bp, Homo sapien
tgacataattgaaaactgtttttct

SEQ ID NO: 2365789 - DNA, 25 bp, Homo sapien
gacataattgaaaactgtttttcta

SEQ ID NO: 2365790 - DNA, 25 bp, Homo sapien
actgtttttctattatccgttccat

SEQ ID NO: 2365791 - DNA, 25 bp, Homo sapien
aatggcatataggatcatagcctcc

SEQ ID NO: 2365792 - DNA, 25 bp, Homo sapien
tagtcccttacgacacagaggccct

SEQ ID NO: 2365793 - DNA, 25 bp, Homo sapien
tcttccctacccagagagctaaaca

SEQ ID NO: 2365794 - DNA, 25 bp, Homo sapien
ttacccgcataaatagcccctagtc

SEQ ID NO: 2365795 - DNA, 25 bp, Homo sapien
taagtgcattttagccttcaaggag

SEQ ID NO: 2365796 - DNA, 25 bp, Homo sapien
atttcctcggagaaaagtaagtgca

SEQ ID NO: 2365797 - DNA, 25 bp, Homo sapien
gagtcccagatgaatagaaatggaa

SEQ ID NO: 2365798 - DNA, 25 bp, Homo sapien
tactgaggaattggtaaatttcctc

SEQ ID NO: 2365799 - DNA, 25 bp, Homo sapien
tcctgcccagcggaagagcaataaa

SEQ ID NO: 2365800 - DNA, 25 bp, Homo sapien
agctgctggcttgcctaatagactc

SEQ ID NO: 2365801 - DNA, 25 bp, Homo sapien
ctaatagactccacagccgagaggg

SEQ ID NO: 2365802 - DNA, 25 bp, Homo sapien
taaatttctcatcaaacagccgatg

SEQ ID NO: 2365803 - DNA, 25 bp, Homo sapien
gatgaatggatttgcccaacgccag

SEQ ID NO: 2365804 - DNA, 25 bp, Homo sapien
tgttcatacctgcaattacctggag

SEQ ID NO: 2365805 - DNA, 25 bp, Homo sapien
gccgccgggctgtatgtaaaagaga

SEQ ID NO: 2365806 - DNA, 25 bp, Homo sapien
cagttgccaattccaagcggagcca

SEQ ID NO: 2365807 - DNA, 25 bp, Homo sapien
ttcattcctggatcccgaacaaggg

SEQ ID NO: 2365808 - DNA, 25 bp, Homo sapien
tccatgaggataattgatcagctgc

SEQ ID NO: 2365809 - DNA, 25 bp, Homo sapien
tgcggccggcgttacaattacaata

SEQ ID NO: 2365810 - DNA, 25 bp, Homo sapien
cccagctggccctagagggtcttca

SEQ ID NO: 2365811 - DNA, 25 bp, Homo sapien
tgcactttgggcctcagatctgctg

SEQ ID NO: 2365812 - DNA, 25 bp, Homo sapien
taggttgtcagccaacataccagca

SEQ ID NO: 2365813 - DNA, 25 bp, Homo sapien
aatgagaggaacgtggaccagtgac

SEQ ID NO: 2365814 - DNA, 25 bp, Homo sapien
tttttaagcgatggaacagtcaggg

SEQ ID NO: 2365815 - DNA, 25 bp, Homo sapien
tagggttacccgagagtctgccatg

SEQ ID NO: 2365816 - DNA, 25 bp, Homo sapien
ccccgcggaggctagtttgtaagca

SEQ ID NO: 2365817 - DNA, 25 bp, Homo sapien
agtgtccaagtagccgttccctgtc

SEQ ID NO: 2365818 - DNA, 25 bp, Homo sapien
tctgaagacactgagccaagtgacg

SEQ ID NO: 2365819 - DNA, 25 bp, Homo sapien
ggatgagtgtccctgacctatggat

SEQ ID NO: 2365820 - DNA, 25 bp, Homo sapien
tagctttgaaatagaggcaagggcc

SEQ ID NO: 2365821 - DNA, 25 bp, Homo sapien
gctgaaaccaattcttgccgaagca

SEQ ID NO: 2365822 - DNA, 25 bp, Homo sapien
tccctctaagagacgaaatgcatgg

SEQ ID NO: 2365823 - DNA, 25 bp, Homo sapien
agctcagaagcgacggaattaagct

SEQ ID NO: 2365824 - DNA, 25 bp, Homo sapien
cagaagcgacggaattaagctcctt

SEQ ID NO: 2365825 - DNA, 25 bp, Homo sapien
attcccggcggagttcaattaaatg

SEQ ID NO: 2365826 - DNA, 25 bp, Homo sapien
tcagaagcgacggaattaagctcct

SEQ ID NO: 2365827 - DNA, 25 bp, Homo sapien
tcggcttggaagctttttaatacag

SEQ ID NO: 2365828 - DNA, 25 bp, Homo sapien
agctttttaatacaggagccaccat

SEQ ID NO: 2365829 - DNA, 25 bp, Homo sapien
ctcggcttggaagctttttaataca

SEQ ID NO: 2365830 - DNA, 25 bp, Homo sapien
ggaagctttttaatacaggagccac

SEQ ID NO: 2365831 - DNA, 25 bp, Homo sapien
gccccattctggcaatgaccctagg

SEQ ID NO: 2365832 - DNA, 25 bp, Homo sapien
acaaggtggatgttacaagaaccca

SEQ ID NO: 2365833 - DNA, 25 bp, Homo sapien
gagaggacacccacatctagaaaga

SEQ ID NO: 2365834 - DNA, 25 bp, Homo sapien
tgcctctgagctaggccaagagtgg

SEQ ID NO: 2365835 - DNA, 25 bp, Homo sapien
tgatggcccaggtagccctggcagg

SEQ ID NO: 2365836 - DNA, 25 bp, Homo sapien
atggcccaggtagccctggcaggtg

SEQ ID NO: 2365837 - DNA, 25 bp, Homo sapien
cctgatggcccaggtagccctggca

SEQ ID NO: 2365838 - DNA, 25 bp, Homo sapien
tcctgatggcccaggtagccctggc

SEQ ID NO: 2365839 - DNA, 25 bp, Homo sapien
cggtgatactcattaactcgggagt

SEQ ID NO: 2365840 - DNA, 25 bp, Homo sapien
gggctgacactgatctcaggctaga

SEQ ID NO: 2365841 - DNA, 25 bp, Homo sapien
actggtctgggttgttagcttgagt

SEQ ID NO: 2365842 - DNA, 25 bp, Homo sapien
actcgggagtttgtatttagaactg

SEQ ID NO: 2365843 - DNA, 25 bp, Homo sapien
ttcacgggggtcacacgacacacga

SEQ ID NO: 2365844 - DNA, 25 bp, Homo sapien
tcgttcacgggggtcacacgacaca

SEQ ID NO: 2365845 - DNA, 25 bp, Homo sapien
cacgggggtcacacgacacacgaga

SEQ ID NO: 2365846 - DNA, 25 bp, Homo sapien
gttcacgggggtcacacgacacacg

SEQ ID NO: 2365847 - DNA, 25 bp, Homo sapien
tttagcagtaaatccacaatttctc

SEQ ID NO: 2365848 - DNA, 25 bp, Homo sapien
ttttcctcgaagcatccatgcaccg

SEQ ID NO: 2365849 - DNA, 25 bp, Homo sapien
tgttaaaattgtataagccagggct

SEQ ID NO: 2365850 - DNA, 25 bp, Homo sapien
tgcaccgaagcacaaagatcatttt

SEQ ID NO: 2365851 - DNA, 25 bp, Homo sapien
aatataatcgctcagttccaaaagg

SEQ ID NO: 2365852 - DNA, 25 bp, Homo sapien
ctcggtggcaactaatataatcgct

SEQ ID NO: 2365853 - DNA, 25 bp, Homo sapien
tccgctcggtggcaactaatataat

SEQ ID NO: 2365854 - DNA, 25 bp, Homo sapien
taatataatcgctcagttccaaaag

SEQ ID NO: 2365855 - DNA, 25 bp, Homo sapien
ccacccaggctctggctgaggggag

SEQ ID NO: 2365856 - DNA, 25 bp, Homo sapien
acccaggctctggctgaggggaggg

SEQ ID NO: 2365857 - DNA, 25 bp, Homo sapien
cacccaggctctggctgaggggagg

SEQ ID NO: 2365858 - DNA, 25 bp, Homo sapien
cccaggctctggctgaggggagggt

SEQ ID NO: 2365859 - DNA, 25 bp, Homo sapien
aggagcgatgagaacccctggaagc

SEQ ID NO: 2365860 - DNA, 25 bp, Homo sapien
agacttgctcagatgtaccagaggg

SEQ ID NO: 2365861 - DNA, 25 bp, Homo sapien
cgatgggccgtggagaggagcgatg

SEQ ID NO: 2365862 - DNA, 25 bp, Homo sapien
tgaagcagggccgagacttgctcag

SEQ ID NO: 2365863 - DNA, 25 bp, Homo sapien
gacttctcttactaagggccaccac

SEQ ID NO: 2365864 - DNA, 25 bp, Homo sapien
ctcctgacttctcttactaagggcc

SEQ ID NO: 2365865 - DNA, 25 bp, Homo sapien
attaattgcttgtaaacactcagaa

SEQ ID NO: 2365866 - DNA, 25 bp, Homo sapien
ctgacttctcttactaagggccacc

SEQ ID NO: 2365867 - DNA, 25 bp, Homo sapien
cacatgtgtactggctgaacgtccg

SEQ ID NO: 2365868 - DNA, 25 bp, Homo sapien
cactgggaaaactcacgtggctgga

SEQ ID NO: 2365869 - DNA, 25 bp, Homo sapien
tacctctgtgtcctaacgcctggaa

SEQ ID NO: 2365870 - DNA, 25 bp, Homo sapien
tccgccccaaaaggatacctctgtg

SEQ ID NO: 2365871 - DNA, 25 bp, Homo sapien
cagctgtgccatcagctcttgccat

SEQ ID NO: 2365872 - DNA, 25 bp, Homo sapien
tatcactgatgagagcggagacatt

SEQ ID NO: 2365873 - DNA, 25 bp, Homo sapien
gagacattataagcaaaaaggcggc

SEQ ID NO: 2365874 - DNA, 25 bp, Homo sapien
tgagggtgataatgaccccagctgc

SEQ ID NO: 2365875 - DNA, 25 bp, Homo sapien
catgagtacgttatggccggcagtg

SEQ ID NO: 2365876 - DNA, 25 bp, Homo sapien
taaaaacaggagtgtgcgcgtccca

SEQ ID NO: 2365877 - DNA, 25 bp, Homo sapien
caatcttgggaccttgagtggcccc

SEQ ID NO: 2365878 - DNA, 25 bp, Homo sapien
tacgagtgcgataaaggaatcagcc

SEQ ID NO: 2365879 - DNA, 25 bp, Homo sapien
tagtatgatttagtccgaggcctgg

SEQ ID NO: 2365880 - DNA, 25 bp, Homo sapien
tgtccttgctgaacccgagagtctc

SEQ ID NO: 2365881 - DNA, 25 bp, Homo sapien
cttgctgaacccgagagtctccaag

SEQ ID NO: 2365882 - DNA, 25 bp, Homo sapien
tgctgaacccgagagtctccaaggg

SEQ ID NO: 2365883 - DNA, 25 bp, Homo sapien
atgttgtccttgctgaacccgagag

SEQ ID NO: 2365884 - DNA, 25 bp, Homo sapien
cgcaggggtgtgagcgggacttcat

SEQ ID NO: 2365885 - DNA, 25 bp, Homo sapien
gaagccttccagccgacacatgcgg

SEQ ID NO: 2365886 - DNA, 25 bp, Homo sapien
ccccacgcaggggtgtgagcgggac

SEQ ID NO: 2365887 - DNA, 25 bp, Homo sapien
agccgacacatgcggctgcccagag

SEQ ID NO: 2365888 - DNA, 25 bp, Homo sapien
ttccctatctggcaggaattcatgg

SEQ ID NO: 2365889 - DNA, 25 bp, Homo sapien
ccctatctggcaggaattcatggag

SEQ ID NO: 2365890 - DNA, 25 bp, Homo sapien
cttccctatctggcaggaattcatg

SEQ ID NO: 2365891 - DNA, 25 bp, Homo sapien
cctatctggcaggaattcatggagc

SEQ ID NO: 2365892 - DNA, 25 bp, Homo sapien
cgtaagccacgatgcccagctagtt

SEQ ID NO: 2365893 - DNA, 25 bp, Homo sapien
actgcgcctggtccttgtttgtttg

SEQ ID NO: 2365894 - DNA, 25 bp, Homo sapien
ccactgcgcctggtccttgtttgtt

SEQ ID NO: 2365895 - DNA, 25 bp, Homo sapien
tgtttatttttgagacggagtctcg

SEQ ID NO: 2365896 - DNA, 25 bp, Homo sapien
cctgttcgcagggattaggtattga

SEQ ID NO: 2365897 - DNA, 25 bp, Homo sapien
gttcgcagggattaggtattgacat

SEQ ID NO: 2365898 - DNA, 25 bp, Homo sapien
tgttcgcagggattaggtattgaca

SEQ ID NO: 2365899 - DNA, 25 bp, Homo sapien
ctgttcgcagggattaggtattgac

SEQ ID NO: 2365900 - DNA, 25 bp, Homo sapien
cctgctatctccagggtatgggtat

SEQ ID NO: 2365901 - DNA, 25 bp, Homo sapien
tgctctacgagggagcaggcttgtc

SEQ ID NO: 2365902 - DNA, 25 bp, Homo sapien
gcaggcttgtccaggcacttgttca

SEQ ID NO: 2365903 - DNA, 25 bp, Homo sapien
gggagcacctgctatctccagggta

SEQ ID NO: 2365904 - DNA, 25 bp, Homo sapien
tccacgaagtgtggaggtctcgccg

SEQ ID NO: 2365905 - DNA, 25 bp, Homo sapien
tcttccacgaagtgtggaggtctcg

SEQ ID NO: 2365906 - DNA, 25 bp, Homo sapien
tctaggctgcgtgccgcctcaaaca

SEQ ID NO: 2365907 - DNA, 25 bp, Homo sapien
tgtcgtctaggctgcgtgccgcctc

SEQ ID NO: 2365908 - DNA, 25 bp, Homo sapien
tagacgctccgagaaggccttatca

SEQ ID NO: 2365909 - DNA, 25 bp, Homo sapien
gacgctccgagaaggccttatcagt

SEQ ID NO: 2365910 - DNA, 25 bp, Homo sapien
tgtagacgctccgagaaggccttat

SEQ ID NO: 2365911 - DNA, 25 bp, Homo sapien
ttattgtagacgctccgagaaggcc

SEQ ID NO: 2365912 - DNA, 25 bp, Homo sapien
ggcaggcgacgtcccctctctctgc

SEQ ID NO: 2365913 - DNA, 25 bp, Homo sapien
ggcggcttccctcggtcagcgtggg

SEQ ID NO: 2365914 - DNA, 25 bp, Homo sapien
cagcaaggtttctgtcaggagggct

SEQ ID NO: 2365915 - DNA, 25 bp, Homo sapien
ttgtttttccgcctcatttctctgc

SEQ ID NO: 2365916 - DNA, 25 bp, Homo sapien
ccttgcctggggcccccgagtcgag

SEQ ID NO: 2365917 - DNA, 25 bp, Homo sapien
ctggggcccccgagtcgagccccat

SEQ ID NO: 2365918 - DNA, 25 bp, Homo sapien
gcggagagacgaggcctgcttgtgc

SEQ ID NO: 2365919 - DNA, 25 bp, Homo sapien
ctgcggagagacgaggcctgcttgt

SEQ ID NO: 2365920 - DNA, 25 bp, Homo sapien
cagtctggccgccaaagtgatctgt

SEQ ID NO: 2365921 - DNA, 25 bp, Homo sapien
gtctggccgccaaagtgatctgtac

SEQ ID NO: 2365922 - DNA, 25 bp, Homo sapien
tctggccgccaaagtgatctgtact

SEQ ID NO: 2365923 - DNA, 25 bp, Homo sapien
ggccgccaaagtgatctgtacttct

SEQ ID NO: 2365924 - DNA, 25 bp, Homo sapien
ctcgtcgtacttccgccgcagctct

SEQ ID NO: 2365925 - DNA, 25 bp, Homo sapien
ttggatgctgcctcctcgtcgtact

SEQ ID NO: 2365926 - DNA, 25 bp, Homo sapien
tacttccgccgcagctctagcagct

SEQ ID NO: 2365927 - DNA, 25 bp, Homo sapien
ggatgctgcctcctcgtcgtacttc

SEQ ID NO: 2365928 - DNA, 25 bp, Homo sapien
caggttggtcatgatcaggccgact

SEQ ID NO: 2365929 - DNA, 25 bp, Homo sapien
tccaggttggtcatgatcaggccga

SEQ ID NO: 2365930 - DNA, 25 bp, Homo sapien
ccaggttggtcatgatcaggccgac

SEQ ID NO: 2365931 - DNA, 25 bp, Homo sapien
ctccaggttggtcatgatcaggccg

SEQ ID NO: 2365932 - DNA, 25 bp, Homo sapien
ggagcaatgaaaacatctaacacaa

SEQ ID NO: 2365933 - DNA, 25 bp, Homo sapien
gagcaatgaaaacatctaacacaaa

SEQ ID NO: 2365934 - DNA, 25 bp, Homo sapien
ctttttgaaatggggagcaatgaaa

SEQ ID NO: 2365935 - DNA, 25 bp, Homo sapien
ggatggagctgttgacagaggccag

SEQ ID NO: 2365936 - DNA, 25 bp, Homo sapien
caggcggatggagctgttgacagag

SEQ ID NO: 2365937 - DNA, 25 bp, Homo sapien
agactttccacctcccgctgggcag

SEQ ID NO: 2365938 - DNA, 25 bp, Homo sapien
cagctgttcccggagactttccacc

SEQ ID NO: 2365939 - DNA, 25 bp, Homo sapien
cccgagcacagagtgaagttcacct

SEQ ID NO: 2365940 - DNA, 25 bp, Homo sapien
tatggcctcggacttggccgtgagc

SEQ ID NO: 2365941 - DNA, 25 bp, Homo sapien
tccaggtcggcgatctggttggcgg

SEQ ID NO: 2365942 - DNA, 25 bp, Homo sapien
cgatctggttggcggatgcctcctc

SEQ ID NO: 2365943 - DNA, 25 bp, Homo sapien
cagctccgttttaatttcctcatag

SEQ ID NO: 2365944 - DNA, 25 bp, Homo sapien
catagtcagactgggcctggagctt

SEQ ID NO: 2365945 - DNA, 25 bp, Homo sapien
cctcatagtcagactgggcctggag

SEQ ID NO: 2365946 - DNA, 25 bp, Homo sapien
ttttaatttcctcatagtcagactg

SEQ ID NO: 2365947 - DNA, 25 bp, Homo sapien
gtgctggaggccagcttcatggctt

SEQ ID NO: 2365948 - DNA, 25 bp, Homo sapien
ggccagcttcatggctttcaggatg

SEQ ID NO: 2365949 - DNA, 25 bp, Homo sapien
ctggaggccagcttcatggctttca

SEQ ID NO: 2365950 - DNA, 25 bp, Homo sapien
gaggccagcttcatggctttcagga

SEQ ID NO: 2365951 - DNA, 25 bp, Homo sapien
agaaggcctcctttgcaataagcag

SEQ ID NO: 2365952 - DNA, 25 bp, Homo sapien
cctttgcaataagcagtgagtcttc

SEQ ID NO: 2365953 - DNA, 25 bp, Homo sapien
gggaagaaggcctcctttgcaataa

SEQ ID NO: 2365954 - DNA, 25 bp, Homo sapien
tctccagaaggaatttctgcgtggg

SEQ ID NO: 2365955 - DNA, 25 bp, Homo sapien
gaatcgtcctctgatgggtcttcct

SEQ ID NO: 2365956 - DNA, 25 bp, Homo sapien
aatccttgatggaatcgtcctctga

SEQ ID NO: 2365957 - DNA, 25 bp, Homo sapien
tgatggaatcgtcctctgatgggtc

SEQ ID NO: 2365958 - DNA, 25 bp, Homo sapien
gaggggtaggactgctccgtgccca

SEQ ID NO: 2365959 - DNA, 25 bp, Homo sapien
ggctgggagacagggggtcttctgg

SEQ ID NO: 2365960 - DNA, 25 bp, Homo sapien
ctgcccggggctgggagacaggggg

SEQ ID NO: 2365961 - DNA, 25 bp, Homo sapien
ctgggagacagggggtcttctggcc

SEQ ID NO: 2365962 - DNA, 25 bp, Homo sapien
gggctgggagacagggggtcttctg

SEQ ID NO: 2365963 - DNA, 25 bp, Homo sapien
acagcgagaaagtccgagtgccgtc

SEQ ID NO: 2365964 - DNA, 25 bp, Homo sapien
tgcccgatgttgtgtttcagcagct

SEQ ID NO: 2365965 - DNA, 25 bp, Homo sapien
aaggcgatctctgccgtgtccagct

SEQ ID NO: 2365966 - DNA, 25 bp, Homo sapien
agtacattctgctcatccgacagga

SEQ ID NO: 2365967 - DNA, 25 bp, Homo sapien
cttggcctgctctagaatgctcttg

SEQ ID NO: 2365968 - DNA, 25 bp, Homo sapien
tctgcgactcgatctccttcttggc

SEQ ID NO: 2365969 - DNA, 25 bp, Homo sapien
cctgtctcaggcgtgcggattctcg

SEQ ID NO: 2365970 - DNA, 25 bp, Homo sapien
ttcttggcctgctctagaatgctct

SEQ ID NO: 2365971 - DNA, 25 bp, Homo sapien
ggattcaggacacctgctcggagca

SEQ ID NO: 2365972 - DNA, 25 bp, Homo sapien
gattgggaaacatctcggctcctgg

SEQ ID NO: 2365973 - DNA, 25 bp, Homo sapien
tcctggcggcaactggagggattca

SEQ ID NO: 2365974 - DNA, 25 bp, Homo sapien
ggagggccattgattgggaaacatc

SEQ ID NO: 2365975 - DNA, 25 bp, Homo sapien
tcttgctactggaactgaccaagag

SEQ ID NO: 2365976 - DNA, 25 bp, Homo sapien
agccctggctagttatttctcatgg

SEQ ID NO: 2365977 - DNA, 25 bp, Homo sapien
gtttactgcataattacatccttct

SEQ ID NO: 2365978 - DNA, 25 bp, Homo sapien
gaaatctgtgtctagaccacagtag

SEQ ID NO: 2365979 - DNA, 25 bp, Homo sapien
gggccccgttctggctcgcggtggc

SEQ ID NO: 2365980 - DNA, 25 bp, Homo sapien
tcttgatggcgtcctccgaggtgct

SEQ ID NO: 2365981 - DNA, 25 bp, Homo sapien
ggtcgtgccgttggcgatgctcagc

SEQ ID NO: 2365982 - DNA, 25 bp, Homo sapien
tgcgcctgcatctcacggcgtgcct

SEQ ID NO: 2365983 - DNA, 25 bp, Homo sapien
cggcgtcgccgatctcggacttgac

SEQ ID NO: 2365984 - DNA, 25 bp, Homo sapien
gcccagtggtggtcgaagtagccgg

SEQ ID NO: 2365985 - DNA, 25 bp, Homo sapien
aggccgcggtcggaggcccagtggt

SEQ ID NO: 2365986 - DNA, 25 bp, Homo sapien
agcgagggcgacacggaggcgtagg

SEQ ID NO: 2365987 - DNA, 25 bp, Homo sapien
cgccgcctcgtcctcggggggcaca

SEQ ID NO: 2365988 - DNA, 25 bp, Homo sapien
cccctgccgccgcctcgtcctcggg

SEQ ID NO: 2365989 - DNA, 25 bp, Homo sapien
cctgccgccgcctcgtcctcggggg

SEQ ID NO: 2365990 - DNA, 25 bp, Homo sapien
cgcctcgtcctcggggggcacaggg

SEQ ID NO: 2365991 - DNA, 25 bp, Homo sapien
cggtacatgtacagctcgtactgct

SEQ ID NO: 2365992 - DNA, 25 bp, Homo sapien
tccagcgtgtctacctcacggtaca

SEQ ID NO: 2365993 - DNA, 25 bp, Homo sapien
tctccttgacctggcgggtgagctc

SEQ ID NO: 2365994 - DNA, 25 bp, Homo sapien
tgggcttcagggtgcgcggcacgta

SEQ ID NO: 2365995 - DNA, 25 bp, Homo sapien
gctcccgccccttctgcgtcagctt

SEQ ID NO: 2365996 - DNA, 25 bp, Homo sapien
ctgcatgcggatgaagggctcccgc

SEQ ID NO: 2365997 - DNA, 25 bp, Homo sapien
gcatgcggatgaagggctcccgccc

SEQ ID NO: 2365998 - DNA, 25 bp, Homo sapien
gcggatgaagggctcccgccccttc

SEQ ID NO: 2365999 - DNA, 25 bp, Homo sapien
cactgcctggccgagctggtcagag

SEQ ID NO: 2366000 - DNA, 25 bp, Homo sapien
ggaggcaccaggctgctggcccact

SEQ ID NO: 2366001 - DNA, 25 bp, Homo sapien
tggcccactgcctggccgagctggt

SEQ ID NO: 2366002 - DNA, 25 bp, Homo sapien
aggctgctggcccactgcctggccg

SEQ ID NO: 2366003 - DNA, 25 bp, Homo sapien
tacagagacctggttggactctctc

SEQ ID NO: 2366004 - DNA, 25 bp, Homo sapien
acctggccgatgcttagtaattaca

SEQ ID NO: 2366005 - DNA, 25 bp, Homo sapien
ctggccgatgcttagtaattacaaa

SEQ ID NO: 2366006 - DNA, 25 bp, Homo sapien
actttacagtacagagacctggttg

SEQ ID NO: 2366007 - DNA, 25 bp, Homo sapien
gagctggagcggccctctggctgct

SEQ ID NO: 2366008 - DNA, 25 bp, Homo sapien
agtacgtgtccagctcgggggacat

SEQ ID NO: 2366009 - DNA, 25 bp, Homo sapien
cagggacaggctcaacggctcctgg

SEQ ID NO: 2366010 - DNA, 25 bp, Homo sapien
tgagtacatcttcccgctcaacgag

SEQ ID NO: 2366011 - DNA, 25 bp, Homo sapien
cacgttatgggggtcattgagccac

SEQ ID NO: 2366012 - DNA, 25 bp, Homo sapien
tgtgtcagacccaggatgctttccc

SEQ ID NO: 2366013 - DNA, 25 bp, Homo sapien
tgcatgcggacaaaaggctcccgcc

SEQ ID NO: 2366014 - DNA, 25 bp, Homo sapien
gcaggtcagacacggagccctgtgt

SEQ ID NO: 2366015 - DNA, 25 bp, Homo sapien
tgttggtcttgaggttgagctggaa

SEQ ID NO: 2366016 - DNA, 25 bp, Homo sapien
ctgatgaggccatagcgacgtttca

SEQ ID NO: 2366017 - DNA, 25 bp, Homo sapien
ctcactgtctgagccggtgctgatg

SEQ ID NO: 2366018 - DNA, 25 bp, Homo sapien
ggttccagctgataggccttccgca

SEQ ID NO: 2366019 - DNA, 25 bp, Homo sapien
aggtctggctcatcctgggtcccct

SEQ ID NO: 2366020 - DNA, 25 bp, Homo sapien
ttccttcacggttggcttctggtcc

SEQ ID NO: 2366021 - DNA, 25 bp, Homo sapien
gcctggcggtaggattccaggaccc

SEQ ID NO: 2366022 - DNA, 25 bp, Homo sapien
ccggagggtcgggatgctcctcttt

SEQ ID NO: 2366023 - DNA, 25 bp, Homo sapien
cgggtgaagtcgctccccggcctca

SEQ ID NO: 2366024 - DNA, 25 bp, Homo sapien
agggcgagttcagtgacacctccag

SEQ ID NO: 2366025 - DNA, 25 bp, Homo sapien
cctcactctcctgttggggatgaag

SEQ ID NO: 2366026 - DNA, 25 bp, Homo sapien
ccgggagccacttttgggagtccat

SEQ ID NO: 2366027 - DNA, 25 bp, Homo sapien
tctactcggtaaatgatgttgttca

SEQ ID NO: 2366028 - DNA, 25 bp, Homo sapien
tcatgccgccgctgcaagttggggt

SEQ ID NO: 2366029 - DNA, 25 bp, Homo sapien
ggtgcaaggctccagccatgtcagc

SEQ ID NO: 2366030 - DNA, 25 bp, Homo sapien
gctggcactcggcactttggcaggg

SEQ ID NO: 2366031 - DNA, 25 bp, Homo sapien
tagttaccagggtatgtcccttgcc

SEQ ID NO: 2366032 - DNA, 25 bp, Homo sapien
ggcaatggcatttgacccacctgct

SEQ ID NO: 2366033 - DNA, 25 bp, Homo sapien
acattttgatggttgagttcctccc

SEQ ID NO: 2366034 - DNA, 25 bp, Homo sapien
cgtaaacggcataacattgctgtcc

SEQ ID NO: 2366035 - DNA, 25 bp, Homo sapien
gaaacacatcctcaacggcgtcgag

SEQ ID NO: 2366036 - DNA, 25 bp, Homo sapien
gaacatgctgcgatgaacttggcct

SEQ ID NO: 2366037 - DNA, 25 bp, Homo sapien
cacgggtccgctagctttaagtaca

SEQ ID NO: 2366038 - DNA, 25 bp, Homo sapien
tctcatataggacggttgggccacg

SEQ ID NO: 2366039 - DNA, 25 bp, Homo sapien
catactgagtttggcgcacactcca

SEQ ID NO: 2366040 - DNA, 25 bp, Homo sapien
tacgctgccataggctctcagggaa

SEQ ID NO: 2366041 - DNA, 25 bp, Homo sapien
tttactgccagagagcgaccatgtg

SEQ ID NO: 2366042 - DNA, 25 bp, Homo sapien
caataaagagctcttcattggccag

SEQ ID NO: 2366043 - DNA, 25 bp, Homo sapien
taggtttacagactctcaaggtacg

SEQ ID NO: 2366044 - DNA, 25 bp, Homo sapien
tcaaggtacgttggccctggtctcc

SEQ ID NO: 2366045 - DNA, 25 bp, Homo sapien
ccaaagcacaaggtgggatcaggct

SEQ ID NO: 2366046 - DNA, 25 bp, Homo sapien
ccgtgtcctggcagactcagctggt

SEQ ID NO: 2366047 - DNA, 25 bp, Homo sapien
ggcctttaggaccatgtgacccaga

SEQ ID NO: 2366048 - DNA, 25 bp, Homo sapien
gggaacgtcacgtgcaacactaagg

SEQ ID NO: 2366049 - DNA, 25 bp, Homo sapien
tctgagtgggcctttaggaccatgt

SEQ ID NO: 2366050 - DNA, 25 bp, Homo sapien
gcaacactaaggagaatccagggcc

SEQ ID NO: 2366051 - DNA, 25 bp, Homo sapien
cagccaggaggaagcctgtaccctg

SEQ ID NO: 2366052 - DNA, 25 bp, Homo sapien
agccaggaggaagcctgtaccctgc

SEQ ID NO: 2366053 - DNA, 25 bp, Homo sapien
aggagtggagctgcccaagatcatg

SEQ ID NO: 2366054 - DNA, 25 bp, Homo sapien
ccaagatcatgggaacccatctctt

SEQ ID NO: 2366055 - DNA, 25 bp, Homo sapien
aagggccagtgcttcttatcagacc

SEQ ID NO: 2366056 - DNA, 25 bp, Homo sapien
tccgcatccaataagatgttggcca

SEQ ID NO: 2366057 - DNA, 25 bp, Homo sapien
aacagtatgatcaaatccgcatcca

SEQ ID NO: 2366058 - DNA, 25 bp, Homo sapien
tcaccaatcaatcgttcagtagccg

SEQ ID NO: 2366059 - DNA, 25 bp, Homo sapien
gttggctcattgctaattctaagtc

SEQ ID NO: 2366060 - DNA, 25 bp, Homo sapien
gctgagtcattaaagtaggctggca

SEQ ID NO: 2366061 - DNA, 25 bp, Homo sapien
agttctagcatctttttggtagcct

SEQ ID NO: 2366062 - DNA, 25 bp, Homo sapien
tctttgtcacaaccataggggacat

SEQ ID NO: 2366063 - DNA, 25 bp, Homo sapien
tgcttgcacttgagctcagcaatgc

SEQ ID NO: 2366064 - DNA, 25 bp, Homo sapien
cagcaatgcaacggctgtccatttg

SEQ ID NO: 2366065 - DNA, 25 bp, Homo sapien
gcacttgagctcagcaatgcaacgg

SEQ ID NO: 2366066 - DNA, 25 bp, Homo sapien
ttgcacttgagctcagcaatgcaac

SEQ ID NO: 2366067 - DNA, 25 bp, Homo sapien
agtattatgcttaacaaggactgtt

SEQ ID NO: 2366068 - DNA, 25 bp, Homo sapien
tagtattatgcttaacaaggactgt

SEQ ID NO: 2366069 - DNA, 25 bp, Homo sapien
ttcagtgtgaggagcactgtcacag

SEQ ID NO: 2366070 - DNA, 25 bp, Homo sapien
cacaggaagtatgcccgtgagttca

SEQ ID NO: 2366071 - DNA, 25 bp, Homo sapien
caagcaggctgttatccttgctcac

SEQ ID NO: 2366072 - DNA, 25 bp, Homo sapien
gttatccttgctcacggcacgctcg

SEQ ID NO: 2366073 - DNA, 25 bp, Homo sapien
cactgaggatgtcactagcatcagt

SEQ ID NO: 2366074 - DNA, 25 bp, Homo sapien
ctgaggatgtcactagcatcagtgt

SEQ ID NO: 2366075 - DNA, 25 bp, Homo sapien
gacactgaggatgtcactagcatca

SEQ ID NO: 2366076 - DNA, 25 bp, Homo sapien
agacactgaggatgtcactagcatc

SEQ ID NO: 2366077 - DNA, 25 bp, Homo sapien
cttgtcattcattagtgatagtaat

SEQ ID NO: 2366078 - DNA, 25 bp, Homo sapien
gaccatacgctcaatgtccttcttg

SEQ ID NO: 2366079 - DNA, 25 bp, Homo sapien
ggaccatacgctcaatgtccttctt

SEQ ID NO: 2366080 - DNA, 25 bp, Homo sapien
tgtcatctgattcttatggagccag

SEQ ID NO: 2366081 - DNA, 25 bp, Homo sapien
tggaccatacgctcaatgtccttct

SEQ ID NO: 2366082 - DNA, 25 bp, Homo sapien
agggactcccccaggtgagcctcct

SEQ ID NO: 2366083 - DNA, 25 bp, Homo sapien
ccccaggtgagcctcctggcggtcc

SEQ ID NO: 2366084 - DNA, 25 bp, Homo sapien
ggtgagcctcctggcggtcctcctg

SEQ ID NO: 2366085 - DNA, 25 bp, Homo sapien
gactcccccaggtgagcctcctggc

SEQ ID NO: 2366086 - DNA, 25 bp, Homo sapien
gctttgagcaggtgaaatttagaaa

SEQ ID NO: 2366087 - DNA, 25 bp, Homo sapien
ggccccaggcaatacctcttcgttg

SEQ ID NO: 2366088 - DNA, 25 bp, Homo sapien
catctcggagctttgggttgaggat

SEQ ID NO: 2366089 - DNA, 25 bp, Homo sapien
aggattcacagtgaggcaccatgtc

SEQ ID NO: 2366090 - DNA, 25 bp, Homo sapien
tgtttgcatctattgggttgactgg

SEQ ID NO: 2366091 - DNA, 25 bp, Homo sapien
ctgaaacaggagactgggatggtcc

SEQ ID NO: 2366092 - DNA, 25 bp, Homo sapien
ccctggggttggacgtttgcagcac

SEQ ID NO: 2366093 - DNA, 25 bp, Homo sapien
tttgcatctattgggttgactggaa

SEQ ID NO: 2366094 - DNA, 25 bp, Homo sapien
tcaagatgttctctggggctaaccc

SEQ ID NO: 2366095 - DNA, 25 bp, Homo sapien
tccatccagtcggagttcaagatgt

SEQ ID NO: 2366096 - DNA, 25 bp, Homo sapien
cgtgaggccgaagtcgaagtggaca

SEQ ID NO: 2366097 - DNA, 25 bp, Homo sapien
tgctggtagaagcacctgattttcc

SEQ ID NO: 2366098 - DNA, 25 bp, Homo sapien
caaatgacttgggctctctgagctt

SEQ ID NO: 2366099 - DNA, 25 bp, Homo sapien
aaatgacttgggctctctgagcttc

SEQ ID NO: 2366100 - DNA, 25 bp, Homo sapien
gcaaagaaccttcctcttggattcc

SEQ ID NO: 2366101 - DNA, 25 bp, Homo sapien
gggacagcttaatggctagcttctc

SEQ ID NO: 2366102 - DNA, 25 bp, Homo sapien
tccaggttggatgcctctcagccac

SEQ ID NO: 2366103 - DNA, 25 bp, Homo sapien
caccatcgagtagccatcaacgttg

SEQ ID NO: 2366104 - DNA, 25 bp, Homo sapien
acttggtggcagccgctttgcgcgg

SEQ ID NO: 2366105 - DNA, 25 bp, Homo sapien
tggtaacgcgcggtggcagccactt

SEQ ID NO: 2366106 - DNA, 25 bp, Homo sapien
cgtgacccgggatcaacgtggggca

SEQ ID NO: 2366107 - DNA, 25 bp, Homo sapien
tcaacgtggggcacgcgagctcctg

SEQ ID NO: 2366108 - DNA, 25 bp, Homo sapien
ttcacttccaatcccggtaattaga

SEQ ID NO: 2366109 - DNA, 25 bp, Homo sapien
attagagtccctaatagctccgcag

SEQ ID NO: 2366110 - DNA, 25 bp, Homo sapien
gaagtgactcagtagcctgaggccc

SEQ ID NO: 2366111 - DNA, 25 bp, Homo sapien
cgcagaggacgtacaacccagttac

SEQ ID NO: 2366112 - DNA, 25 bp, Homo sapien
gcccagatttgagagtgccgctgcc

SEQ ID NO: 2366113 - DNA, 25 bp, Homo sapien
acggctcttcccactcggcaggtca

SEQ ID NO: 2366114 - DNA, 25 bp, Homo sapien
gtgccgctgccacgaacacagcgag

SEQ ID NO: 2366115 - DNA, 25 bp, Homo sapien
acacagcgaggtcgtcgtcgccact

SEQ ID NO: 2366116 - DNA, 25 bp, Homo sapien
ccagatttctcggaggcccaaactg

SEQ ID NO: 2366117 - DNA, 25 bp, Homo sapien
atccccgccagagtccagttttttg

SEQ ID NO: 2366118 - DNA, 25 bp, Homo sapien
tttccttcctcgcttagtcgcttct

SEQ ID NO: 2366119 - DNA, 25 bp, Homo sapien
tcgcttagtcgcttcttgcccacat

SEQ ID NO: 2366120 - DNA, 25 bp, Homo sapien
ccgccagcgcttgacagttgcggga

SEQ ID NO: 2366121 - DNA, 25 bp, Homo sapien
aatggccagcgcctcatcatttccg

SEQ ID NO: 2366122 - DNA, 25 bp, Homo sapien
acccgggctcggaaaatggccagcg

SEQ ID NO: 2366123 - DNA, 25 bp, Homo sapien
ggaaactttgcagcggccgccgtcg

SEQ ID NO: 2366124 - DNA, 25 bp, Homo sapien
gacaggagctctgggcccggccggc

SEQ ID NO: 2366125 - DNA, 25 bp, Homo sapien
aggagctctgggcccggccggccca

SEQ ID NO: 2366126 - DNA, 25 bp, Homo sapien
ggagctctgggcccggccggcccat

SEQ ID NO: 2366127 - DNA, 25 bp, Homo sapien
ctgagagacaggagctctgggcccg

SEQ ID NO: 2366128 - DNA, 25 bp, Homo sapien
ggggaagagaaacaggagaatgagg

SEQ ID NO: 2366129 - DNA, 25 bp, Homo sapien
ctacatcattgtggctgggaatggg

SEQ ID NO: 2366130 - DNA, 25 bp, Homo sapien
gaagagaaacaggagaatgaggaaa

SEQ ID NO: 2366131 - DNA, 25 bp, Homo sapien
tgggaatggggaagagaaacaggag

SEQ ID NO: 2366132 - DNA, 25 bp, Homo sapien
caggtgctcattacacactggctca

SEQ ID NO: 2366133 - DNA, 25 bp, Homo sapien
ccttatagctaaggaagtgcccaga

SEQ ID NO: 2366134 - DNA, 25 bp, Homo sapien
ccagtgctatgtatgcaagagatgc

SEQ ID NO: 2366135 - DNA, 25 bp, Homo sapien
ggttcccatgactctaggaagtagg

SEQ ID NO: 2366136 - DNA, 25 bp, Homo sapien
tcccaggaaacctggcaattaagtg

SEQ ID NO: 2366137 - DNA, 25 bp, Homo sapien
tctggactcgccgaggcaggcgtct

SEQ ID NO: 2366138 - DNA, 25 bp, Homo sapien
tctgccagacggcagcggcttcctg

SEQ ID NO: 2366139 - DNA, 25 bp, Homo sapien
gccctgcctcgtcaaagatgctgaa

SEQ ID NO: 2366140 - DNA, 25 bp, Homo sapien
cctggtagagggatgcttgtcaccc

SEQ ID NO: 2366141 - DNA, 25 bp, Homo sapien
ttgagcagatgtccagtggtggcct

SEQ ID NO: 2366142 - DNA, 25 bp, Homo sapien
aagggcagatcccatgtcagaggtc

SEQ ID NO: 2366143 - DNA, 25 bp, Homo sapien
cctccttgagatgacaccagtgtgt

SEQ ID NO: 2366144 - DNA, 25 bp, Homo sapien
ccacgggaagcagggggcgaaggca

SEQ ID NO: 2366145 - DNA, 25 bp, Homo sapien
ggcggcctgctgccctttcacagca

SEQ ID NO: 2366146 - DNA, 25 bp, Homo sapien
attcaagttgccagacgcagagatg

SEQ ID NO: 2366147 - DNA, 25 bp, Homo sapien
tcaagttgccagacgcagagatgcc

SEQ ID NO: 2366148 - DNA, 25 bp, Homo sapien
gtttaagcagtccttccaagtatct

SEQ ID NO: 2366149 - DNA, 25 bp, Homo sapien
ggctgctccgggcaggaagttgcca

SEQ ID NO: 2366150 - DNA, 25 bp, Homo sapien
agcccagagcagtcagctgtagccc

SEQ ID NO: 2366151 - DNA, 25 bp, Homo sapien
gagctggaacaaaagatcttctcag

SEQ ID NO: 2366152 - DNA, 25 bp, Homo sapien
tgtagcccaagctatggaagggact

SEQ ID NO: 2366153 - DNA, 25 bp, Homo sapien
gcatgtggccatgtcccgctgggca

SEQ ID NO: 2366154 - DNA, 25 bp, Homo sapien
tctgcatgtggccatgtcccgctgg

SEQ ID NO: 2366155 - DNA, 25 bp, Homo sapien
cctccacaggcaccgtctctgcatg

SEQ ID NO: 2366156 - DNA, 25 bp, Homo sapien
tccacaggcaccgtctctgcatgtg

SEQ ID NO: 2366157 - DNA, 25 bp, Homo sapien
acaaggagtaagcaggtgggcaagc

SEQ ID NO: 2366158 - DNA, 25 bp, Homo sapien
ggggcgacaaggagtaagcaggtgg

SEQ ID NO: 2366159 - DNA, 25 bp, Homo sapien
gtgggggggcgacaaggagtaagca

SEQ ID NO: 2366160 - DNA, 25 bp, Homo sapien
aaggagtaagcaggtgggcaagcag

SEQ ID NO: 2366161 - DNA, 25 bp, Homo sapien
cggagacccaggtggtgcggccggg

SEQ ID NO: 2366162 - DNA, 25 bp, Homo sapien
gcggagacccaggtggtgcggccgg

SEQ ID NO: 2366163 - DNA, 25 bp, Homo sapien
ggcggagacccaggtggtgcggccg

SEQ ID NO: 2366164 - DNA, 25 bp, Homo sapien
cggggaggctgagggcgcggaagag

SEQ ID NO: 2366165 - DNA, 25 bp, Homo sapien
cgccgccggggaggctgagggcgcg

SEQ ID NO: 2366166 - DNA, 25 bp, Homo sapien
gcgcggaagagggcgaggagggctg

SEQ ID NO: 2366167 - DNA, 25 bp, Homo sapien
cgccggggaggctgagggcgcggaa

SEQ ID NO: 2366168 - DNA, 25 bp, Homo sapien
tacggcgtgcaactcacagaactcg

SEQ ID NO: 2366169 - DNA, 25 bp, Homo sapien
ctacggcgtgcaactcacagaactc

SEQ ID NO: 2366170 - DNA, 25 bp, Homo sapien
gtgaactgcagcgacaccagctcgg

SEQ ID NO: 2366171 - DNA, 25 bp, Homo sapien
tgctgcggatgctcccgggcgaaca

SEQ ID NO: 2366172 - DNA, 25 bp, Homo sapien
gcggcagaagtagcgctggaagagg

SEQ ID NO: 2366173 - DNA, 25 bp, Homo sapien
cgaacagccagtactggcgggccag

SEQ ID NO: 2366174 - DNA, 25 bp, Homo sapien
cacggcctgtgtcccggtagtcgcg

SEQ ID NO: 2366175 - DNA, 25 bp, Homo sapien
tcagagctgcgggccttgggcaggc

SEQ ID NO: 2366176 - DNA, 25 bp, Homo sapien
ggcccggcgcccgtccgtcgcgcac

SEQ ID NO: 2366177 - DNA, 25 bp, Homo sapien
gcccacggcctgtgtcccggtagtc

SEQ ID NO: 2366178 - DNA, 25 bp, Homo sapien
cggcagcggtgtgggccgctggcag

SEQ ID NO: 2366179 - DNA, 25 bp, Homo sapien
gtgtgggccgctggcagctccccgg

SEQ ID NO: 2366180 - DNA, 25 bp, Homo sapien
agcggtgtgggccgctggcagctcc

SEQ ID NO: 2366181 - DNA, 25 bp, Homo sapien
gggcggcagcggtgtgggccgctgg

SEQ ID NO: 2366182 - DNA, 25 bp, Homo sapien
cttcagcgcctcgggtggcggctcc

SEQ ID NO: 2366183 - DNA, 25 bp, Homo sapien
cttgggtgggtcgaagagctccagc

SEQ ID NO: 2366184 - DNA, 25 bp, Homo sapien
gcgctgccagcgtgccccgctgtcc

SEQ ID NO: 2366185 - DNA, 25 bp, Homo sapien
ctgtccatggaggcctcgtcggcca

SEQ ID NO: 2366186 - DNA, 25 bp, Homo sapien
gtgaaggcaaaaaggtgtccctgga

SEQ ID NO: 2366187 - DNA, 25 bp, Homo sapien
ggatctcagagtgacctgctaccag

SEQ ID NO: 2366188 - DNA, 25 bp, Homo sapien
tctgaaggttttgagccctctggaa

SEQ ID NO: 2366189 - DNA, 25 bp, Homo sapien
gagtcagagttttcaaggatctcag

SEQ ID NO: 2366190 - DNA, 25 bp, Homo sapien
cacacacggaaacacagagcttcag

SEQ ID NO: 2366191 - DNA, 25 bp, Homo sapien
acacacggaaacacagagcttcaga

SEQ ID NO: 2366192 - DNA, 25 bp, Homo sapien
gcttcagatgtgtctcatacttcac

SEQ ID NO: 2366193 - DNA, 25 bp, Homo sapien
tgtctcatacttcacgcacttccag

SEQ ID NO: 2366194 - DNA, 25 bp, Homo sapien
aggtgaggctcacctgtgggctgag

SEQ ID NO: 2366195 - DNA, 25 bp, Homo sapien
ggaggtgctacaccatcaccctgct

SEQ ID NO: 2366196 - DNA, 25 bp, Homo sapien
ctggaggtgctacaccatcaccctg

SEQ ID NO: 2366197 - DNA, 25 bp, Homo sapien
acaggcccgcggtcacacagcaggt

SEQ ID NO: 2366198 - DNA, 25 bp, Homo sapien
gtgcccctggaggtgctacaccatc

SEQ ID NO: 2366199 - DNA, 25 bp, Homo sapien
tccaacctaccttgtctgagggagg

SEQ ID NO: 2366200 - DNA, 25 bp, Homo sapien
gaggaatgggagcaagcaggccttg

SEQ ID NO: 2366201 - DNA, 25 bp, Homo sapien
ctcaaggtgggtcatagaatctaga

SEQ ID NO: 2366202 - DNA, 25 bp, Homo sapien
ctgagggaggcaggttgtaagttcc

SEQ ID NO: 2366203 - DNA, 25 bp, Homo sapien
cctcttctagcgcaatcagtttcct

SEQ ID NO: 2366204 - DNA, 25 bp, Homo sapien
tcggagacctcttctagcgcaatca

SEQ ID NO: 2366205 - DNA, 25 bp, Homo sapien
ggatttccagcagcgccaatggggc

SEQ ID NO: 2366206 - DNA, 25 bp, Homo sapien
tagcgcaatcagtttccttttccat

SEQ ID NO: 2366207 - DNA, 25 bp, Homo sapien
gaggccctcggcaagttaaagacag

SEQ ID NO: 2366208 - DNA, 25 bp, Homo sapien
ggtggcccttaatcgccccgatgta

SEQ ID NO: 2366209 - DNA, 25 bp, Homo sapien
ccttccaggtggttccctagagaga

SEQ ID NO: 2366210 - DNA, 25 bp, Homo sapien
aagacagtttcctagattacatggg

SEQ ID NO: 2366211 - DNA, 25 bp, Homo sapien
gaaaaaagcaggtgaccaaatagta

SEQ ID NO: 2366212 - DNA, 25 bp, Homo sapien
atgccaggcccgcaaaggctgaagc

SEQ ID NO: 2366213 - DNA, 25 bp, Homo sapien
ctgaagcttttgtccacaagctcct

SEQ ID NO: 2366214 - DNA, 25 bp, Homo sapien
tgaccaaatagtatgaggaatgcca

SEQ ID NO: 2366215 - DNA, 25 bp, Homo sapien
tgcttcagtcgaaacctcagcctgg

SEQ ID NO: 2366216 - DNA, 25 bp, Homo sapien
tatgggtgtcctatgccagaggctc

SEQ ID NO: 2366217 - DNA, 25 bp, Homo sapien
gcgtgtgggcacatgggcgcaggac

SEQ ID NO: 2366218 - DNA, 25 bp, Homo sapien
catgggcgcaggacaacccctgctt

SEQ ID NO: 2366219 - DNA, 25 bp, Homo sapien
ggggcctctgcgctcttgcccattt

SEQ ID NO: 2366220 - DNA, 25 bp, Homo sapien
tacgagaccaagttggggtactcaa

SEQ ID NO: 2366221 - DNA, 25 bp, Homo sapien
ccaggcctgagtttgtctatagtct

SEQ ID NO: 2366222 - DNA, 25 bp, Homo sapien
tggggtactcaaggcttgttcctga

SEQ ID NO: 2366223 - DNA, 25 bp, Homo sapien
caggagtcccccttttagagagagt

SEQ ID NO: 2366224 - DNA, 25 bp, Homo sapien
gcaagctgcttgtagcttgggcctt

SEQ ID NO: 2366225 - DNA, 25 bp, Homo sapien
atgctggagcaagctgcttgtagct

SEQ ID NO: 2366226 - DNA, 25 bp, Homo sapien
gagcaagctgcttgtagcttgggcc

SEQ ID NO: 2366227 - DNA, 25 bp, Homo sapien
caccaccggacctcctggatgctgg

SEQ ID NO: 2366228 - DNA, 25 bp, Homo sapien
cacaaaggtgtaaaggttgtcaggc

SEQ ID NO: 2366229 - DNA, 25 bp, Homo sapien
acaaaggtgtaaaggttgtcaggca

SEQ ID NO: 2366230 - DNA, 25 bp, Homo sapien
caaaggtgtaaaggttgtcaggcat

SEQ ID NO: 2366231 - DNA, 25 bp, Homo sapien
cccagggtgtgaaaagccttgtcac

SEQ ID NO: 2366232 - DNA, 25 bp, Homo sapien
agggaacagggttgggtctgctgta

SEQ ID NO: 2366233 - DNA, 25 bp, Homo sapien
tgtattgccccagggtgtgaaaagc

SEQ ID NO: 2366234 - DNA, 25 bp, Homo sapien
gtatgtatttgtattgccccagggt

SEQ ID NO: 2366235 - DNA, 25 bp, Homo sapien
cctcggcctgtgcactccgagagct

SEQ ID NO: 2366236 - DNA, 25 bp, Homo sapien
ctgtgcactccgagagctcagccat

SEQ ID NO: 2366237 - DNA, 25 bp, Homo sapien
tgtgcactccgagagctcagccatc

SEQ ID NO: 2366238 - DNA, 25 bp, Homo sapien
ggcctgtgcactccgagagctcagc

SEQ ID NO: 2366239 - DNA, 25 bp, Homo sapien
tgaggttaaggatctgggcaggtca

SEQ ID NO: 2366240 - DNA, 25 bp, Homo sapien
caggtcaggggtggtagcagcaaag

SEQ ID NO: 2366241 - DNA, 25 bp, Homo sapien
caaaggtggtgccagggacgagggc

SEQ ID NO: 2366242 - DNA, 25 bp, Homo sapien
ggttaaggatctgggcaggtcaggg

SEQ ID NO: 2366243 - DNA, 25 bp, Homo sapien
ggctgagggaatatgcatctctgct

SEQ ID NO: 2366244 - DNA, 25 bp, Homo sapien
ctgagggaatatgcatctctgcttc

SEQ ID NO: 2366245 - DNA, 25 bp, Homo sapien
gggctgagggaatatgcatctctgc

SEQ ID NO: 2366246 - DNA, 25 bp, Homo sapien
gctgagggaatatgcatctctgctt

SEQ ID NO: 2366247 - DNA, 25 bp, Homo sapien
cttggttaagggaatctgtgctgcc

SEQ ID NO: 2366248 - DNA, 25 bp, Homo sapien
ttggttaagggaatctgtgctgccc

SEQ ID NO: 2366249 - DNA, 25 bp, Homo sapien
aatggcctagctattggtttaccca

SEQ ID NO: 2366250 - DNA, 25 bp, Homo sapien
tgggttccagcgtacccagaagaca

SEQ ID NO: 2366251 - DNA, 25 bp, Homo sapien
gaagacaatggcctagctattggtt

SEQ ID NO: 2366252 - DNA, 25 bp, Homo sapien
tccagcgtacccagaagacaatggc

SEQ ID NO: 2366253 - DNA, 25 bp, Homo sapien
ggctaccttatgtcctgggctgagt

SEQ ID NO: 2366254 - DNA, 25 bp, Homo sapien
atggtggtcgcagggggctacctta

SEQ ID NO: 2366255 - DNA, 25 bp, Homo sapien
ggtcgcagggggctaccttatgtcc

SEQ ID NO: 2366256 - DNA, 25 bp, Homo sapien
cagggggctaccttatgtcctgggc

SEQ ID NO: 2366257 - DNA, 25 bp, Homo sapien
ggaaatggtccgtcttctggcaggc

SEQ ID NO: 2366258 - DNA, 25 bp, Homo sapien
aggaacactccatgagcatcagggc

SEQ ID NO: 2366259 - DNA, 25 bp, Homo sapien
gaaccaggggtagcaggacaggaaa

SEQ ID NO: 2366260 - DNA, 25 bp, Homo sapien
aatggtccgtcttctggcaggccgg

SEQ ID NO: 2366261 - DNA, 25 bp, Homo sapien
ggagacgactaccacgtagctggag

SEQ ID NO: 2366262 - DNA, 25 bp, Homo sapien
gcatgtccacgaccgagggaaagtg

SEQ ID NO: 2366263 - DNA, 25 bp, Homo sapien
cgctctgtcagcgacaggcgcaggt

SEQ ID NO: 2366264 - DNA, 25 bp, Homo sapien
tggagagccggacatcacaggcggc

SEQ ID NO: 2366265 - DNA, 25 bp, Homo sapien
tcagcaaagggcagtagggtcagac

SEQ ID NO: 2366266 - DNA, 25 bp, Homo sapien
ttcagcaaagggcagtagggtcaga

SEQ ID NO: 2366267 - DNA, 25 bp, Homo sapien
ccttcagcaaagggcagtagggtca

SEQ ID NO: 2366268 - DNA, 25 bp, Homo sapien
ccccttcagcaaagggcagtagggt

SEQ ID NO: 2366269 - DNA, 25 bp, Homo sapien
tgggtctgcagcaagcctctaccct

SEQ ID NO: 2366270 - DNA, 25 bp, Homo sapien
gaggcaagtgctgacaggacacaga

SEQ ID NO: 2366271 - DNA, 25 bp, Homo sapien
caagatacctgtacccctgggtctg

SEQ ID NO: 2366272 - DNA, 25 bp, Homo sapien
gagagaccacaccatcagtcttgag

SEQ ID NO: 2366273 - DNA, 25 bp, Homo sapien
agaaagggaagaggaccgtgttgca

SEQ ID NO: 2366274 - DNA, 25 bp, Homo sapien
gggacagccagaagaactaaggtgg

SEQ ID NO: 2366275 - DNA, 25 bp, Homo sapien
gaagggactctgaatcccagtgagg

SEQ ID NO: 2366276 - DNA, 25 bp, Homo sapien
gaaggcccaactctgaaccccagtg

SEQ ID NO: 2366277 - DNA, 25 bp, Homo sapien
gaaggcaccaggtggaagatctgct

SEQ ID NO: 2366278 - DNA, 25 bp, Homo sapien
atctgctcggggggtgaggatcgcc

SEQ ID NO: 2366279 - DNA, 25 bp, Homo sapien
agatctgctcggggggtgaggatcg

SEQ ID NO: 2366280 - DNA, 25 bp, Homo sapien
ggcgaaggcaccaggtggaagatct

SEQ ID NO: 2366281 - DNA, 25 bp, Homo sapien
ggctccgggaggatgagtccatttc

SEQ ID NO: 2366282 - DNA, 25 bp, Homo sapien
cgggctcgattcacaggctcatgct

SEQ ID NO: 2366283 - DNA, 25 bp, Homo sapien
cgtagtccgagtcccgggctcgatt

SEQ ID NO: 2366284 - DNA, 25 bp, Homo sapien
agtccatttcgtagtccgagtcccg

SEQ ID NO: 2366285 - DNA, 25 bp, Homo sapien
gatgaaacctacaggagggcccttc

SEQ ID NO: 2366286 - DNA, 25 bp, Homo sapien
cctgccatgtggactgacggtagat

SEQ ID NO: 2366287 - DNA, 25 bp, Homo sapien
gagctagcggcatcctctaacaaga

SEQ ID NO: 2366288 - DNA, 25 bp, Homo sapien
cgtagaaagtctgtcatccgctgtg

SEQ ID NO: 2366289 - DNA, 25 bp, Homo sapien
tcctagaagccactgctgtgagcct

SEQ ID NO: 2366290 - DNA, 25 bp, Homo sapien
gctgaaggatttactagaaagggcc

SEQ ID NO: 2366291 - DNA, 25 bp, Homo sapien
actgaatggctctgctggcacccaa

SEQ ID NO: 2366292 - DNA, 25 bp, Homo sapien
ttagttatggcaccagattcccagc

SEQ ID NO: 2366293 - DNA, 25 bp, Homo sapien
tccagcccggttgacaagagaaact

SEQ ID NO: 2366294 - DNA, 25 bp, Homo sapien
cagcccggttgacaagagaaactcc

SEQ ID NO: 2366295 - DNA, 25 bp, Homo sapien
ccagcccggttgacaagagaaactc

SEQ ID NO: 2366296 - DNA, 25 bp, Homo sapien
taaaaatagtgttctctggcccaag

SEQ ID NO: 2366297 - DNA, 25 bp, Homo sapien
gctgctaagaaatgagtgcccctgg

SEQ ID NO: 2366298 - DNA, 25 bp, Homo sapien
gagccatgggagttttctgtcagca

SEQ ID NO: 2366299 - DNA, 25 bp, Homo sapien
tactgggtacctttcctgtgcggag

SEQ ID NO: 2366300 - DNA, 25 bp, Homo sapien
gcattattcaagaataagttacttg

SEQ ID NO: 2366301 - DNA, 25 bp, Homo sapien
aaaatttgcattattcaagaataag

SEQ ID NO: 2366302 - DNA, 25 bp, Homo sapien
tattcaagaataagttacttgtaca

SEQ ID NO: 2366303 - DNA, 25 bp, Homo sapien
gaataagttacttgtacagtacata

SEQ ID NO: 2366304 - DNA, 25 bp, Homo sapien
tacttggaccgagtagaggcattta

SEQ ID NO: 2366305 - DNA, 25 bp, Homo sapien
cacttgcagtggaagatacttggac

SEQ ID NO: 2366306 - DNA, 25 bp, Homo sapien
tgatttcttgtaacatccaatagga

SEQ ID NO: 2366307 - DNA, 25 bp, Homo sapien
gctgtttcagagtcccgcaggtacc

SEQ ID NO: 2366308 - DNA, 25 bp, Homo sapien
caaagtccatttatgtgtgggcaaa

SEQ ID NO: 2366309 - DNA, 25 bp, Homo sapien
taattgctgtctgtatggaggcagg

SEQ ID NO: 2366310 - DNA, 25 bp, Homo sapien
cattagagccggttctttcatgcca

SEQ ID NO: 2366311 - DNA, 25 bp, Homo sapien
gattccctttgtggtgcttaagacc

SEQ ID NO: 2366312 - DNA, 25 bp, Homo sapien
ttacagatgtgagccaccacacact

SEQ ID NO: 2366313 - DNA, 25 bp, Homo sapien
gtggcgtgatttcagctcatggcaa

SEQ ID NO: 2366314 - DNA, 25 bp, Homo sapien
ctcatggcaacctccctgtcccggg

SEQ ID NO: 2366315 - DNA, 25 bp, Homo sapien
tgtcccgggttcaagcaattctccc

SEQ ID NO: 2366316 - DNA, 25 bp, Homo sapien
tcaacattgaatcccaatgcaaagg

SEQ ID NO: 2366317 - DNA, 25 bp, Homo sapien
aatcaacattgaatcccaatgcaaa

SEQ ID NO: 2366318 - DNA, 25 bp, Homo sapien
taggaaatcaacattgaatcccaat

SEQ ID NO: 2366319 - DNA, 25 bp, Homo sapien
ggaaatcaacattgaatcccaatgc

SEQ ID NO: 2366320 - DNA, 25 bp, Homo sapien
cagcaactgtaccagtggcagcagc

SEQ ID NO: 2366321 - DNA, 25 bp, Homo sapien
cttagtaacacggagcacaagaggg

SEQ ID NO: 2366322 - DNA, 25 bp, Homo sapien
gacaaaattgaaccaagtgctaagg

SEQ ID NO: 2366323 - DNA, 25 bp, Homo sapien
agcaagccgaatagccccagcattt

SEQ ID NO: 2366324 - DNA, 25 bp, Homo sapien
tttctgaacatagaaaacagattga

SEQ ID NO: 2366325 - DNA, 25 bp, Homo sapien
ttctgaacatagaaaacagattgat

SEQ ID NO: 2366326 - DNA, 25 bp, Homo sapien
gtttctgaacatagaaaacagattg

SEQ ID NO: 2366327 - DNA, 25 bp, Homo sapien
gaactctcctgcagggaataaagaa

SEQ ID NO: 2366328 - DNA, 25 bp, Homo sapien
ttcaagatcagaggcagaactctcc

SEQ ID NO: 2366329 - DNA, 25 bp, Homo sapien
caatgaaacatcacctagcttctca

SEQ ID NO: 2366330 - DNA, 25 bp, Homo sapien
cacctagcttctcaaaagctgaaaa

SEQ ID NO: 2366331 - DNA, 25 bp, Homo sapien
gaacagagctgttaccccttctagt

SEQ ID NO: 2366332 - DNA, 25 bp, Homo sapien
gctggtattattccaactgaagctg

SEQ ID NO: 2366333 - DNA, 25 bp, Homo sapien
tgctagtcctgcatcgaacagagct

SEQ ID NO: 2366334 - DNA, 25 bp, Homo sapien
gaagctgttgccatgcctattccag

SEQ ID NO: 2366335 - DNA, 25 bp, Homo sapien
aaaggcccagcgacatcctcgaaat

SEQ ID NO: 2366336 - DNA, 25 bp, Homo sapien
gcctccaaggatgtccccaaaggcc

SEQ ID NO: 2366337 - DNA, 25 bp, Homo sapien
gggttccatatccagtggcctagaa

SEQ ID NO: 2366338 - DNA, 25 bp, Homo sapien
tagaatttgtatcccacaacccacc

SEQ ID NO: 2366339 - DNA, 25 bp, Homo sapien
actatgcctaaacgcatgtcttcag

SEQ ID NO: 2366340 - DNA, 25 bp, Homo sapien
cagctcctgtctctactatgcctaa

SEQ ID NO: 2366341 - DNA, 25 bp, Homo sapien
tcctgtctctactatgcctaaacgc

SEQ ID NO: 2366342 - DNA, 25 bp, Homo sapien
tgtctctactatgcctaaacgcatg

SEQ ID NO: 2366343 - DNA, 25 bp, Homo sapien
cttttaagatggagtctcgctctgt

SEQ ID NO: 2366344 - DNA, 25 bp, Homo sapien
tttcttttaagatggagtctcgctc

SEQ ID NO: 2366345 - DNA, 25 bp, Homo sapien
ctgcgcccggctgaaactctttttt

SEQ ID NO: 2366346 - DNA, 25 bp, Homo sapien
cgcccagacttgagtgcagtggtgt

SEQ ID NO: 2366347 - DNA, 25 bp, Homo sapien
cttttctaatagtcacgttgtattc

SEQ ID NO: 2366348 - DNA, 25 bp, Homo sapien
taatagtcacgttgtattcttgcat

SEQ ID NO: 2366349 - DNA, 25 bp, Homo sapien
cagaaacaggtaacacttttctaat

SEQ ID NO: 2366350 - DNA, 25 bp, Homo sapien
cttcagaaacaggtaacacttttct

SEQ ID NO: 2366351 - DNA, 25 bp, Homo sapien
catttagggctttttaggactgatc

SEQ ID NO: 2366352 - DNA, 25 bp, Homo sapien
tcatattttccgctgcatttagggc

SEQ ID NO: 2366353 - DNA, 25 bp, Homo sapien
tacatgctatactggctttggtgaa

SEQ ID NO: 2366354 - DNA, 25 bp, Homo sapien
gggactgtatgtgcacatcactatg

SEQ ID NO: 2366355 - DNA, 25 bp, Homo sapien
aagaacattttcatagtcagtgttt

SEQ ID NO: 2366356 - DNA, 25 bp, Homo sapien
acattttcatagtcagtgttttacc

SEQ ID NO: 2366357 - DNA, 25 bp, Homo sapien
tttcatagtcagtgttttacctagt

SEQ ID NO: 2366358 - DNA, 25 bp, Homo sapien
attttcatagtcagtgttttaccta

SEQ ID NO: 2366359 - DNA, 25 bp, Homo sapien
tttagggctccaaatgtgaagtaca

SEQ ID NO: 2366360 - DNA, 25 bp, Homo sapien
aagtacaagtgaaaaatggaggtat

SEQ ID NO: 2366361 - DNA, 25 bp, Homo sapien
gctccaaatgtgaagtacaagtgaa

SEQ ID NO: 2366362 - DNA, 25 bp, Homo sapien
tagggctccaaatgtgaagtacaag

SEQ ID NO: 2366363 - DNA, 25 bp, Homo sapien
tatgtaattcggtatctgaaggagg

SEQ ID NO: 2366364 - DNA, 25 bp, Homo sapien
taaaattcgtactgcaaactctgag

SEQ ID NO: 2366365 - DNA, 25 bp, Homo sapien
tctgaaccaaagatgtacggacgtt

SEQ ID NO: 2366366 - DNA, 25 bp, Homo sapien
cctaccaataacaacagatagctgt

SEQ ID NO: 2366367 - DNA, 25 bp, Homo sapien
aagaagtactggagtgttgcagctc

SEQ ID NO: 2366368 - DNA, 25 bp, Homo sapien
ttccagtctttaccagaaatgcccc

SEQ ID NO: 2366369 - DNA, 25 bp, Homo sapien
gaaaataatttaatgctatccagca

SEQ ID NO: 2366370 - DNA, 25 bp, Homo sapien
tttagaagtactggaggctaggcat

SEQ ID NO: 2366371 - DNA, 25 bp, Homo sapien
tagagtatggaactcacttgcccac

SEQ ID NO: 2366372 - DNA, 25 bp, Homo sapien
tacatgttagtcttccagagggaag

SEQ ID NO: 2366373 - DNA, 25 bp, Homo sapien
tgcagctccctattttggcagatag

SEQ ID NO: 2366374 - DNA, 25 bp, Homo sapien
cagtccatgttggtaggctgcaaag

SEQ ID NO: 2366375 - DNA, 25 bp, Homo sapien
catgatctcggcttactgcaacctc

SEQ ID NO: 2366376 - DNA, 25 bp, Homo sapien
caggctggagtgcagcggcatgatc

SEQ ID NO: 2366377 - DNA, 25 bp, Homo sapien
gcccaccaccgtgcctggctaattt

SEQ ID NO: 2366378 - DNA, 25 bp, Homo sapien
aagacagagtttgtctcttgtcgcc

SEQ ID NO: 2366379 - DNA, 25 bp, Homo sapien
agacgtgcactaccgtgcctgacta

SEQ ID NO: 2366380 - DNA, 25 bp, Homo sapien
ctgtgttcaggtgattcagcctccc

SEQ ID NO: 2366381 - DNA, 25 bp, Homo sapien
tacagacgtgcactaccgtgcctga

SEQ ID NO: 2366382 - DNA, 25 bp, Homo sapien
cctcctgtgttcaggtgattcagcc

SEQ ID NO: 2366383 - DNA, 25 bp, Homo sapien
tagggggatggccgatgttggcagg

SEQ ID NO: 2366384 - DNA, 25 bp, Homo sapien
catagttagggggatggccgatgtt

SEQ ID NO: 2366385 - DNA, 25 bp, Homo sapien
agttagggggatggccgatgttggc

SEQ ID NO: 2366386 - DNA, 25 bp, Homo sapien
agggggatggccgatgttggcagga

SEQ ID NO: 2366387 - DNA, 25 bp, Homo sapien
gtggacattgggggagcagggttgt

SEQ ID NO: 2366388 - DNA, 25 bp, Homo sapien
tggatggggatcacggtggacattg

SEQ ID NO: 2366389 - DNA, 25 bp, Homo sapien
cagggttgtggggtgcccccagcac

SEQ ID NO: 2366390 - DNA, 25 bp, Homo sapien
ctgtggatggggatcacggtggaca

SEQ ID NO: 2366391 - DNA, 25 bp, Homo sapien
tgggccctgatcaggtcgccaacca

SEQ ID NO: 2366392 - DNA, 25 bp, Homo sapien
gacttcacggagtaggccaatgcta

SEQ ID NO: 2366393 - DNA, 25 bp, Homo sapien
gacatggtcgggcacggagttctcg

SEQ ID NO: 2366394 - DNA, 25 bp, Homo sapien
cataggcctgggccctgatcaggtc

SEQ ID NO: 2366395 - DNA, 25 bp, Homo sapien
gagcagaatggtcgtaatgatgcgc

SEQ ID NO: 2366396 - DNA, 25 bp, Homo sapien
ggtcgtaatgatgcgcacaatcagg

SEQ ID NO: 2366397 - DNA, 25 bp, Homo sapien
aatgatgcgcacaatcagggcccag

SEQ ID NO: 2366398 - DNA, 25 bp, Homo sapien
cagaatggtcgtaatgatgcgcaca

SEQ ID NO: 2366399 - DNA, 25 bp, Homo sapien
ctagataatgcctcctgatctgttg

SEQ ID NO: 2366400 - DNA, 25 bp, Homo sapien
ggcctagataatgcctcctgatctg

SEQ ID NO: 2366401 - DNA, 25 bp, Homo sapien
gataatgcctcctgatctgttgata

SEQ ID NO: 2366402 - DNA, 25 bp, Homo sapien
aatgcctcctgatctgttgatagac

SEQ ID NO: 2366403 - DNA, 25 bp, Homo sapien
gcaacatcacaccctgcagttcttt

SEQ ID NO: 2366404 - DNA, 25 bp, Homo sapien
caacatcacaccctgcagttctttt

SEQ ID NO: 2366405 - DNA, 25 bp, Homo sapien
aaaaaactgagatactggccgggcg

SEQ ID NO: 2366406 - DNA, 25 bp, Homo sapien
gagaccgtcctgcctaacatgggga

SEQ ID NO: 2366407 - DNA, 25 bp, Homo sapien
ggtggctcgtgcctgtaatcccagc

SEQ ID NO: 2366408 - DNA, 25 bp, Homo sapien
tcgagaccgtcctgcctaacatggg

SEQ ID NO: 2366409 - DNA, 25 bp, Homo sapien
tagattgtgaaacacattagtggat

SEQ ID NO: 2366410 - DNA, 25 bp, Homo sapien
taagaagtgttaggatgcattgcat

SEQ ID NO: 2366411 - DNA, 25 bp, Homo sapien
caatctgcagatcatgaccccttag

SEQ ID NO: 2366412 - DNA, 25 bp, Homo sapien
tagttaatgtgctcataatggtgac

SEQ ID NO: 2366413 - DNA, 25 bp, Homo sapien
taatgtatgtggttctgtacttacg

SEQ ID NO: 2366414 - DNA, 25 bp, Homo sapien
tatggaatacagtcacggacagtac

SEQ ID NO: 2366415 - DNA, 25 bp, Homo sapien
tttggcttgctaaaataggaggtct

SEQ ID NO: 2366416 - DNA, 25 bp, Homo sapien
tgtacttacgtggtgtgaaatctac

SEQ ID NO: 2366417 - DNA, 25 bp, Homo sapien
aactctaagctttgagagattaggg

SEQ ID NO: 2366418 - DNA, 25 bp, Homo sapien
ctttgagagattaggggacttgccc

SEQ ID NO: 2366419 - DNA, 25 bp, Homo sapien
tgcagcctcaatctatggggccaag

SEQ ID NO: 2366420 - DNA, 25 bp, Homo sapien
aatggaaggcaaaaactctaagctt

SEQ ID NO: 2366421 - DNA, 25 bp, Homo sapien
ggcacgcaagtccatttcccttgtg

SEQ ID NO: 2366422 - DNA, 25 bp, Homo sapien
tactgtgccttctttaggcctaggc

SEQ ID NO: 2366423 - DNA, 25 bp, Homo sapien
tgaccggcgtcctccttaaataggc

SEQ ID NO: 2366424 - DNA, 25 bp, Homo sapien
tccatccgtgttgtaggcactactg

SEQ ID NO: 2366425 - DNA, 25 bp, Homo sapien
cggcgcgcgggtggtggccgatccg

SEQ ID NO: 2366426 - DNA, 25 bp, Homo sapien
ctctccggcgcgcgggtggtggccg

SEQ ID NO: 2366427 - DNA, 25 bp, Homo sapien
tccggcgcgcgggtggtggccgatc

SEQ ID NO: 2366428 - DNA, 25 bp, Homo sapien
cgcgcgggtggtggccgatccgcat

SEQ ID NO: 2366429 - DNA, 25 bp, Homo sapien
gtggcctccggcagcgttccaccct

SEQ ID NO: 2366430 - DNA, 25 bp, Homo sapien
gctcccgaactcccctgaaatcgtg

SEQ ID NO: 2366431 - DNA, 25 bp, Homo sapien
ctccatgtggcctccggcagcgttc

SEQ ID NO: 2366432 - DNA, 25 bp, Homo sapien
cgaactcccctgaaatcgtggggct

SEQ ID NO: 2366433 - DNA, 25 bp, Homo sapien
gaggacggggtggagacaagtgggc

SEQ ID NO: 2366434 - DNA, 25 bp, Homo sapien
tccggaatcatcagggtctgtcggg

SEQ ID NO: 2366435 - DNA, 25 bp, Homo sapien
gctgtggtggcgttttccggaacat

SEQ ID NO: 2366436 - DNA, 25 bp, Homo sapien
tggtggcgttttccggaacatgtcc

SEQ ID NO: 2366437 - DNA, 25 bp, Homo sapien
cgggctcctccggaatcatcagggt

SEQ ID NO: 2366438 - DNA, 25 bp, Homo sapien
ctccctcctcggtggtcgcggcgac

SEQ ID NO: 2366439 - DNA, 25 bp, Homo sapien
gtggtcgcggcgacctccggcggcg

SEQ ID NO: 2366440 - DNA, 25 bp, Homo sapien
gcccgcggctgccaatgtccgcaag

SEQ ID NO: 2366441 - DNA, 25 bp, Homo sapien
ggcggcagcggccttctagcgtcgc

SEQ ID NO: 2366442 - DNA, 25 bp, Homo sapien
cccggcgcctcggcgcgcccgccct

SEQ ID NO: 2366443 - DNA, 25 bp, Homo sapien
tccgctcccacccggcgcctcggcg

SEQ ID NO: 2366444 - DNA, 25 bp, Homo sapien
gctcccacccggcgcctcggcgcgc

SEQ ID NO: 2366445 - DNA, 25 bp, Homo sapien
ctccgctcccacccggcgcctcggc

SEQ ID NO: 2366446 - DNA, 25 bp, Homo sapien
cccgaagggcagacccgccttgagg

SEQ ID NO: 2366447 - DNA, 25 bp, Homo sapien
ccagaggctgagaccgacacgccct

SEQ ID NO: 2366448 - DNA, 25 bp, Homo sapien
ctgaaggaatacagtaggagaagaa

SEQ ID NO: 2366449 - DNA, 25 bp, Homo sapien
tgaggaaggcggatccgggtaggga

SEQ ID NO: 2366450 - DNA, 25 bp, Homo sapien
tacacgtagcaagacacattctccg

SEQ ID NO: 2366451 - DNA, 25 bp, Homo sapien
ggtccaaggtctaaagttcgcacat

SEQ ID NO: 2366452 - DNA, 25 bp, Homo sapien
tcggctctgtctctaccgagggaga

SEQ ID NO: 2366453 - DNA, 25 bp, Homo sapien
tcgcacattgttttgaggtcggctc

SEQ ID NO: 2366454 - DNA, 25 bp, Homo sapien
agacggagtctcctaggctagagtg

SEQ ID NO: 2366455 - DNA, 25 bp, Homo sapien
gagacggagtctcctaggctagagt

SEQ ID NO: 2366456 - DNA, 25 bp, Homo sapien
tgagacggagtctcctaggctagag

SEQ ID NO: 2366457 - DNA, 25 bp, Homo sapien
taagagtgcagactctgctagtgcc

SEQ ID NO: 2366458 - DNA, 25 bp, Homo sapien
ttggaaaagtcgcttctggaacaag

SEQ ID NO: 2366459 - DNA, 25 bp, Homo sapien
aactggatattctggagggatcggc

SEQ ID NO: 2366460 - DNA, 25 bp, Homo sapien
tatccaggctctaaggtgttctctc

SEQ ID NO: 2366461 - DNA, 25 bp, Homo sapien
gttttggtacttggcacggagctgc

SEQ ID NO: 2366462 - DNA, 25 bp, Homo sapien
tgaaaaactcactggaatcatctgg

SEQ ID NO: 2366463 - DNA, 25 bp, Homo sapien
tcacagacatttacgaccatagggt

SEQ ID NO: 2366464 - DNA, 25 bp, Homo sapien
tctggaagcttaggaggacatgaaa

SEQ ID NO: 2366465 - DNA, 25 bp, Homo sapien
tgtgatcccttctatccagtggccc

SEQ ID NO: 2366466 - DNA, 25 bp, Homo sapien
aaacagatttttcagtacaggtggg

SEQ ID NO: 2366467 - DNA, 25 bp, Homo sapien
tacaggtgggataaatgctctgaaa

SEQ ID NO: 2366468 - DNA, 25 bp, Homo sapien
gaagtagtttacaaagctcgctcac

SEQ ID NO: 2366469 - DNA, 25 bp, Homo sapien
tacacttgtggactggcgcagtgcc

SEQ ID NO: 2366470 - DNA, 25 bp, Homo sapien
taatacacttgtggactggcgcagt

SEQ ID NO: 2366471 - DNA, 25 bp, Homo sapien
aatacacttgtggactggcgcagtg

SEQ ID NO: 2366472 - DNA, 25 bp, Homo sapien
ataatacacttgtggactggcgcag

SEQ ID NO: 2366473 - DNA, 25 bp, Homo sapien
tgcagtgagccaacatctcaccact

SEQ ID NO: 2366474 - DNA, 25 bp, Homo sapien
gaggatcacatgagtctgggaggca

SEQ ID NO: 2366475 - DNA, 25 bp, Homo sapien
gagccaacatctcaccactgcactg

SEQ ID NO: 2366476 - DNA, 25 bp, Homo sapien
tcacatgagtctgggaggcagaagc

SEQ ID NO: 2366477 - DNA, 25 bp, Homo sapien
tgcagtgtgtgcagatatcttccat

SEQ ID NO: 2366478 - DNA, 25 bp, Homo sapien
gagccattgtggctgagaactggca

SEQ ID NO: 2366479 - DNA, 25 bp, Homo sapien
tccctatatatggaacaggcttctc

SEQ ID NO: 2366480 - DNA, 25 bp, Homo sapien
gaactggcagttaggaacgagactg

SEQ ID NO: 2366481 - DNA, 25 bp, Homo sapien
tcagcgaatctactgggaaaacaag

SEQ ID NO: 2366482 - DNA, 25 bp, Homo sapien
gatagttcggatagagaaggacaca

SEQ ID NO: 2366483 - DNA, 25 bp, Homo sapien
gtttgggtgactgcggaaatgacac

SEQ ID NO: 2366484 - DNA, 25 bp, Homo sapien
catatttactaacaagccagctgga

SEQ ID NO: 2366485 - DNA, 25 bp, Homo sapien
aatccaattcttaggagcaacctgg

SEQ ID NO: 2366486 - DNA, 25 bp, Homo sapien
taaatccaattcttaggagcaacct

SEQ ID NO: 2366487 - DNA, 25 bp, Homo sapien
aaatccaattcttaggagcaacctg

SEQ ID NO: 2366488 - DNA, 25 bp, Homo sapien
atccaattcttaggagcaacctgga

SEQ ID NO: 2366489 - DNA, 25 bp, Homo sapien
tgggtaactgttactagttatagct

SEQ ID NO: 2366490 - DNA, 25 bp, Homo sapien
tcttattcaaccactttcacagcca

SEQ ID NO: 2366491 - DNA, 25 bp, Homo sapien
tgctttctggctaccatttctgttc

SEQ ID NO: 2366492 - DNA, 25 bp, Homo sapien
gaagaagtggactagatcctttcct

SEQ ID NO: 2366493 - DNA, 25 bp, Homo sapien
cagactgcactgtgggacttaacca

SEQ ID NO: 2366494 - DNA, 25 bp, Homo sapien
taagccgggtaaagagcagaaccca

SEQ ID NO: 2366495 - DNA, 25 bp, Homo sapien
cagaaaggtgtatcagatgctggcc

SEQ ID NO: 2366496 - DNA, 25 bp, Homo sapien
taaccagtgttacagaagagcagtg

SEQ ID NO: 2366497 - DNA, 25 bp, Homo sapien
atgggacccattagatgggatctaa

SEQ ID NO: 2366498 - DNA, 25 bp, Homo sapien
cccattagatgggatctaactatca

SEQ ID NO: 2366499 - DNA, 25 bp, Homo sapien
ggacccattagatgggatctaacta

SEQ ID NO: 2366500 - DNA, 25 bp, Homo sapien
tagatgggatctaactatcatatat

SEQ ID NO: 2366501 - DNA, 25 bp, Homo sapien
tacctagtacatagcacagggcctg

SEQ ID NO: 2366502 - DNA, 25 bp, Homo sapien
tcttggcagttagcttcaggctttt

SEQ ID NO: 2366503 - DNA, 25 bp, Homo sapien
tttgggtccacacaatgcaaacatt

SEQ ID NO: 2366504 - DNA, 25 bp, Homo sapien
tgtgaacaggtgaaggtgcatttct

SEQ ID NO: 2366505 - DNA, 25 bp, Homo sapien
ttaggacgaggcctctggagcaagc

SEQ ID NO: 2366506 - DNA, 25 bp, Homo sapien
cgcgactgtgcgaaaacctgcagct

SEQ ID NO: 2366507 - DNA, 25 bp, Homo sapien
tgcagctcagcctaagtgtggcacc

SEQ ID NO: 2366508 - DNA, 25 bp, Homo sapien
caagcagaggttaactcgcgactgt

SEQ ID NO: 2366509 - DNA, 25 bp, Homo sapien
tattttgatatggatatgatttgat

SEQ ID NO: 2366510 - DNA, 25 bp, Homo sapien
atattttgatatggatatgatttga

SEQ ID NO: 2366511 - DNA, 25 bp, Homo sapien
ttttgatatggatatgatttgatat

SEQ ID NO: 2366512 - DNA, 25 bp, Homo sapien
tatattttgatatggatatgatttg

SEQ ID NO: 2366513 - DNA, 25 bp, Homo sapien
accgctctgtaggtgctgcctccaa

SEQ ID NO: 2366514 - DNA, 25 bp, Homo sapien
atcaccgctctgtaggtgctgcctc

SEQ ID NO: 2366515 - DNA, 25 bp, Homo sapien
ccaaggtgtgtccatcggtgggacc

SEQ ID NO: 2366516 - DNA, 25 bp, Homo sapien
tccatcggtgggacccctggtgcct

SEQ ID NO: 2366517 - DNA, 25 bp, Homo sapien
gagaaggaatgagaactccgcccat

SEQ ID NO: 2366518 - DNA, 25 bp, Homo sapien
cctggagaaggaatgagaactccgc

SEQ ID NO: 2366519 - DNA, 25 bp, Homo sapien
tggagaaggaatgagaactccgccc

SEQ ID NO: 2366520 - DNA, 25 bp, Homo sapien
ctgcagcgactctccctggagaagg

SEQ ID NO: 2366521 - DNA, 25 bp, Homo sapien
gcaaaatatgcaaaagtggaataca

SEQ ID NO: 2366522 - DNA, 25 bp, Homo sapien
aaatatgcaaaagtggaatacattg

SEQ ID NO: 2366523 - DNA, 25 bp, Homo sapien
aggaagcaaaatatgcaaaagtgga

SEQ ID NO: 2366524 - DNA, 25 bp, Homo sapien
ctataggaagcaaaatatgcaaaag

SEQ ID NO: 2366525 - DNA, 25 bp, Homo sapien
agggcccattttcaccaccttccat

SEQ ID NO: 2366526 - DNA, 25 bp, Homo sapien
catcaaggcctttaatatagttcca

SEQ ID NO: 2366527 - DNA, 25 bp, Homo sapien
tatagttccagaagggatacgattc

SEQ ID NO: 2366528 - DNA, 25 bp, Homo sapien
tcataaatctcatccagggcccatt

SEQ ID NO: 2366529 - DNA, 25 bp, Homo sapien
tatgaattgaacattgaacacctag

SEQ ID NO: 2366530 - DNA, 25 bp, Homo sapien
tcatatatgaattgaacattgaaca

SEQ ID NO: 2366531 - DNA, 25 bp, Homo sapien
tatatgaattgaacattgaacacct

SEQ ID NO: 2366532 - DNA, 25 bp, Homo sapien
tgaattgaacattgaacacctaggg

SEQ ID NO: 2366533 - DNA, 25 bp, Homo sapien
gagcccaggctcatagcttgctgcc

SEQ ID NO: 2366534 - DNA, 25 bp, Homo sapien
tgaaaactcttataaggctgggcgc

SEQ ID NO: 2366535 - DNA, 25 bp, Homo sapien
aaaaaatgcttattcctggcgtcct

SEQ ID NO: 2366536 - DNA, 25 bp, Homo sapien
tatccaggactagagttataggctg

SEQ ID NO: 2366537 - DNA, 25 bp, Homo sapien
acatcaaactgtttccggtccaggg

SEQ ID NO: 2366538 - DNA, 25 bp, Homo sapien
gcagtctgaagaccttttgcccgaa

SEQ ID NO: 2366539 - DNA, 25 bp, Homo sapien
cactcgctcactggtcaacagagag

SEQ ID NO: 2366540 - DNA, 25 bp, Homo sapien
aaatgagtccacaggcacggaggtc

SEQ ID NO: 2366541 - DNA, 25 bp, Homo sapien
aagtggcagagctgtactggctgag

SEQ ID NO: 2366542 - DNA, 25 bp, Homo sapien
tggcagagctgtactggctgagaca

SEQ ID NO: 2366543 - DNA, 25 bp, Homo sapien
gcagagctgtactggctgagacaag

SEQ ID NO: 2366544 - DNA, 25 bp, Homo sapien
cagagctgtactggctgagacaaga

SEQ ID NO: 2366545 - DNA, 25 bp, Homo sapien
tgtttcagacaccagtcgatgtaac

SEQ ID NO: 2366546 - DNA, 25 bp, Homo sapien
tcagacaccagtcgatgtaacgtac

SEQ ID NO: 2366547 - DNA, 25 bp, Homo sapien
cgtcaatagtgagaagtacagaagc

SEQ ID NO: 2366548 - DNA, 25 bp, Homo sapien
cctaaagaaaacgtcaatagtgaga

SEQ ID NO: 2366549 - DNA, 25 bp, Homo sapien
acagcttgtagatcctagggtctgg

SEQ ID NO: 2366550 - DNA, 25 bp, Homo sapien
agaaagatggactcagagggctgca

SEQ ID NO: 2366551 - DNA, 25 bp, Homo sapien
tgttccaaggtcatcaagaaagatg

SEQ ID NO: 2366552 - DNA, 25 bp, Homo sapien
aagcacagcttgtagatcctagggt

SEQ ID NO: 2366553 - DNA, 25 bp, Homo sapien
caaaggtcttaagcctgccattcac

SEQ ID NO: 2366554 - DNA, 25 bp, Homo sapien
cccacttaaggcagcatcactggat

SEQ ID NO: 2366555 - DNA, 25 bp, Homo sapien
aaccctaaggaaagctagagctaca

SEQ ID NO: 2366556 - DNA, 25 bp, Homo sapien
catggcttctcgtgctttacagcag

SEQ ID NO: 2366557 - DNA, 25 bp, Homo sapien
tgggagggtaaggtgggtagatcgc

SEQ ID NO: 2366558 - DNA, 25 bp, Homo sapien
aatctttcggaatttccatcgtctt

SEQ ID NO: 2366559 - DNA, 25 bp, Homo sapien
gtctttttcacaggccgagtgtttg

SEQ ID NO: 2366560 - DNA, 25 bp, Homo sapien
ggaacacctactctcaatgtaaaac

SEQ ID NO: 2366561 - DNA, 25 bp, Homo sapien
taagtctttgaggtacttctgcaag

SEQ ID NO: 2366562 - DNA, 25 bp, Homo sapien
tacgccccggtcagcaatgcaaatt

SEQ ID NO: 2366563 - DNA, 25 bp, Homo sapien
cgccccggtcagcaatgcaaattct

SEQ ID NO: 2366564 - DNA, 25 bp, Homo sapien
ccccggtcagcaatgcaaattcttt

SEQ ID NO: 2366565 - DNA, 25 bp, Homo sapien
actacgccccggtcagcaatgcaaa

SEQ ID NO: 2366566 - DNA, 25 bp, Homo sapien
aaaagtgtcctctaaagcacacaag

SEQ ID NO: 2366567 - DNA, 25 bp, Homo sapien
aaagtgtcctctaaagcacacaagg

SEQ ID NO: 2366568 - DNA, 25 bp, Homo sapien
cacccctggcccaaaagtgtcctct

SEQ ID NO: 2366569 - DNA, 25 bp, Homo sapien
agatggactctccctctgtcgtcca

SEQ ID NO: 2366570 - DNA, 25 bp, Homo sapien
gagatggactctccctctgtcgtcc

SEQ ID NO: 2366571 - DNA, 25 bp, Homo sapien
tgagatggactctccctctgtcgtc

SEQ ID NO: 2366572 - DNA, 25 bp, Homo sapien
ggtgtccaattttgtccttcctgcc

SEQ ID NO: 2366573 - DNA, 25 bp, Homo sapien
ttatcaagcacaaacgcagccatgg

SEQ ID NO: 2366574 - DNA, 25 bp, Homo sapien
tgcctactaggagtgactgagtccc

SEQ ID NO: 2366575 - DNA, 25 bp, Homo sapien
tcaggtccaggatcacatgccacta

SEQ ID NO: 2366576 - DNA, 25 bp, Homo sapien
ctgccatgcagtgcaagaaaagtac

SEQ ID NO: 2366577 - DNA, 25 bp, Homo sapien
tctgccatgcagtgcaagaaaagta

SEQ ID NO: 2366578 - DNA, 25 bp, Homo sapien
atctgccatgcagtgcaagaaaagt

SEQ ID NO: 2366579 - DNA, 25 bp, Homo sapien
gaactagatcacgattagccagcct

SEQ ID NO: 2366580 - DNA, 25 bp, Homo sapien
tagccagcctgatgtagtaagttgg

SEQ ID NO: 2366581 - DNA, 25 bp, Homo sapien
agttggatttgactgcccgtgatca

SEQ ID NO: 2366582 - DNA, 25 bp, Homo sapien
gaactccctctctatggcatgggca

SEQ ID NO: 2366583 - DNA, 25 bp, Homo sapien
gacaggtactccagcatttgcaagg

SEQ ID NO: 2366584 - DNA, 25 bp, Homo sapien
tcttcacagagatcaagaacgttag

SEQ ID NO: 2366585 - DNA, 25 bp, Homo sapien
ggtactccagcatttgcaagggctt

SEQ ID NO: 2366586 - DNA, 25 bp, Homo sapien
tcaagaacgttagggacaggtactc

SEQ ID NO: 2366587 - DNA, 25 bp, Homo sapien
aaagcaggcatatacttatcttgca

SEQ ID NO: 2366588 - DNA, 25 bp, Homo sapien
tgtagcttgaaagtgcaatagcaaa

SEQ ID NO: 2366589 - DNA, 25 bp, Homo sapien
tctaccaattatccctaaagcaggc

SEQ ID NO: 2366590 - DNA, 25 bp, Homo sapien
ttggaatttgtgttagcatatgggc

SEQ ID NO: 2366591 - DNA, 25 bp, Homo sapien
tatatggctcgtctgtggctgggct

SEQ ID NO: 2366592 - DNA, 25 bp, Homo sapien
ctgtgaattttgcacaggactgtgt

SEQ ID NO: 2366593 - DNA, 25 bp, Homo sapien
cttcccatagtcttcaagtcccaca

SEQ ID NO: 2366594 - DNA, 25 bp, Homo sapien
ctgtgttcatggcagtgtatatggc

SEQ ID NO: 2366595 - DNA, 25 bp, Homo sapien
acttggtgtgcaatttcagcaacct

SEQ ID NO: 2366596 - DNA, 25 bp, Homo sapien
tagaacttggtgtgcaatttcagca

SEQ ID NO: 2366597 - DNA, 25 bp, Homo sapien
gattagaacttggtgtgcaatttca

SEQ ID NO: 2366598 - DNA, 25 bp, Homo sapien
aataggattagaacttggtgtgcaa

SEQ ID NO: 2366599 - DNA, 25 bp, Homo sapien
cccaggttcgtacctggcgtggaat

SEQ ID NO: 2366600 - DNA, 25 bp, Homo sapien
gaagctcgatactgcttaacccagg

SEQ ID NO: 2366601 - DNA, 25 bp, Homo sapien
gatggtgctagtttcggaagctcga

SEQ ID NO: 2366602 - DNA, 25 bp, Homo sapien
agccattcgatcagcctctccatgg

SEQ ID NO: 2366603 - DNA, 25 bp, Homo sapien
tggattctgcgtggtctgtttgccc

SEQ ID NO: 2366604 - DNA, 25 bp, Homo sapien
ctgaaaagtcgcaggaggaatagag

SEQ ID NO: 2366605 - DNA, 25 bp, Homo sapien
gagacagcactaagaaaactgccgg

SEQ ID NO: 2366606 - DNA, 25 bp, Homo sapien
aactgccggctagggtggattctgc

SEQ ID NO: 2366607 - DNA, 25 bp, Homo sapien
tctcagcacgggaaaactggatggc

SEQ ID NO: 2366608 - DNA, 25 bp, Homo sapien
gaaagttcccagtcaaggacagcaa

SEQ ID NO: 2366609 - DNA, 25 bp, Homo sapien
tggatgaaacaccaggttgtcgagc

SEQ ID NO: 2366610 - DNA, 25 bp, Homo sapien
tggatggcaggtaatgagccaggca

SEQ ID NO: 2366611 - DNA, 25 bp, Homo sapien
tgtgagtgatcgcttgtagactccc

SEQ ID NO: 2366612 - DNA, 25 bp, Homo sapien
gaaaaagccatatagaagttccagt

SEQ ID NO: 2366613 - DNA, 25 bp, Homo sapien
ccctgtaggattgcagccacacgga

SEQ ID NO: 2366614 - DNA, 25 bp, Homo sapien
ttccagttctcagtgggagggagcc

SEQ ID NO: 2366615 - DNA, 25 bp, Homo sapien
gaaatcccacgccaggttagacaca

SEQ ID NO: 2366616 - DNA, 25 bp, Homo sapien
gcccacgtgtggtaggaccttgtta

SEQ ID NO: 2366617 - DNA, 25 bp, Homo sapien
cggaacccttctttgactgcgaaat

SEQ ID NO: 2366618 - DNA, 25 bp, Homo sapien
tctggaacggagctataactcctgc

SEQ ID NO: 2366619 - DNA, 25 bp, Homo sapien
tgaagtgcttcagccggtgatacag

SEQ ID NO: 2366620 - DNA, 25 bp, Homo sapien
cagggtacacacgttgctccatgaa

SEQ ID NO: 2366621 - DNA, 25 bp, Homo sapien
tgctccatgaagtgcttcagccggt

SEQ ID NO: 2366622 - DNA, 25 bp, Homo sapien
cacgttgctccatgaagtgcttcag

SEQ ID NO: 2366623 - DNA, 25 bp, Homo sapien
taaggccaagcattccactgcctgg

SEQ ID NO: 2366624 - DNA, 25 bp, Homo sapien
gaaactgagtcatgaagagctggct

SEQ ID NO: 2366625 - DNA, 25 bp, Homo sapien
caaagatcattcaactcggagctcc

SEQ ID NO: 2366626 - DNA, 25 bp, Homo sapien
gggtcttaccacctcaccatggctg

SEQ ID NO: 2366627 - DNA, 25 bp, Homo sapien
cacattggtcagtcctgctccgtat

SEQ ID NO: 2366628 - DNA, 25 bp, Homo sapien
ttttctcgggatcagcctctaaggg

SEQ ID NO: 2366629 - DNA, 25 bp, Homo sapien
cgtgcccatgagctcacacagatgt

SEQ ID NO: 2366630 - DNA, 25 bp, Homo sapien
gcatacagggacgtgcccatgagct

SEQ ID NO: 2366631 - DNA, 25 bp, Homo sapien
catagcaaaacaggagcgggctttc

SEQ ID NO: 2366632 - DNA, 25 bp, Homo sapien
gagccttctgcgcttcggtgccata

SEQ ID NO: 2366633 - DNA, 25 bp, Homo sapien
gcagctccatgttgcccgtgtcagg

SEQ ID NO: 2366634 - DNA, 25 bp, Homo sapien
agcagaggaatcagccagcgagcct

SEQ ID NO: 2366635 - DNA, 25 bp, Homo sapien
tgtggggccgacaacaacagggcca

SEQ ID NO: 2366636 - DNA, 25 bp, Homo sapien
attccagtcagagacgccagcagac

SEQ ID NO: 2366637 - DNA, 25 bp, Homo sapien
tccagtcagagacgccagcagacag

SEQ ID NO: 2366638 - DNA, 25 bp, Homo sapien
acagcccgtgttccctgtggggccg

SEQ ID NO: 2366639 - DNA, 25 bp, Homo sapien
ccaccatttgtgaccgtttatgaca

SEQ ID NO: 2366640 - DNA, 25 bp, Homo sapien
accgtttatgacatagaagctgtcc

SEQ ID NO: 2366641 - DNA, 25 bp, Homo sapien
catttgtgaccgtttatgacataga

SEQ ID NO: 2366642 - DNA, 25 bp, Homo sapien
ctgtgatccaccatttgtgaccgtt

SEQ ID NO: 2366643 - DNA, 25 bp, Homo sapien
taaacacacagagttggcaacgagg

SEQ ID NO: 2366644 - DNA, 25 bp, Homo sapien
cagaggccggatgatttttatccct

SEQ ID NO: 2366645 - DNA, 25 bp, Homo sapien
gactgctgccggtgtcttggtgcat

SEQ ID NO: 2366646 - DNA, 25 bp, Homo sapien
tcttccagtccatacaccgtcagag

SEQ ID NO: 2366647 - DNA, 25 bp, Homo sapien
cacacccaggggtgacccgcccctg

SEQ ID NO: 2366648 - DNA, 25 bp, Homo sapien
ggtgacccgcccctggaggtctcac

SEQ ID NO: 2366649 - DNA, 25 bp, Homo sapien
tgtttcctggggaccagacccacac

SEQ ID NO: 2366650 - DNA, 25 bp, Homo sapien
cagtggtgtttcctggggaccagac

SEQ ID NO: 2366651 - DNA, 25 bp, Homo sapien
atttagccttcttactgggacatgg

SEQ ID NO: 2366652 - DNA, 25 bp, Homo sapien
ctggcaatgtccctgccctttattt

SEQ ID NO: 2366653 - DNA, 25 bp, Homo sapien
ttatttagccttcttactgggacat

SEQ ID NO: 2366654 - DNA, 25 bp, Homo sapien
tgtccctgccctttatttagccttc

SEQ ID NO: 2366655 - DNA, 25 bp, Homo sapien
ctgaaagacccaaacgatcactgtg

SEQ ID NO: 2366656 - DNA, 25 bp, Homo sapien
caaacgatcactgtgagcaatagcc

SEQ ID NO: 2366657 - DNA, 25 bp, Homo sapien
cactgtgagcaatagccatagtcat

SEQ ID NO: 2366658 - DNA, 25 bp, Homo sapien
tgagcaatagccatagtcattttcc

SEQ ID NO: 2366659 - DNA, 25 bp, Homo sapien
gagaacccgatcagcctcatgcagt

SEQ ID NO: 2366660 - DNA, 25 bp, Homo sapien
tctgccctgggcgatctcaaagcct

SEQ ID NO: 2366661 - DNA, 25 bp, Homo sapien
ttctctttgggcacacgcacgtgct

SEQ ID NO: 2366662 - DNA, 25 bp, Homo sapien
tcatgcagtgatggatcctgccggg

SEQ ID NO: 2366663 - DNA, 25 bp, Homo sapien
gccattgcacccagactgattttta

SEQ ID NO: 2366664 - DNA, 25 bp, Homo sapien
gcttcacctgctaggactgcactca

SEQ ID NO: 2366665 - DNA, 25 bp, Homo sapien
gcaacttcttggcaaggacatcacc

SEQ ID NO: 2366666 - DNA, 25 bp, Homo sapien
gctagcagcatgacctttacacctt

SEQ ID NO: 2366667 - DNA, 25 bp, Homo sapien
cagggtttgcgtcacctttctgaaa

SEQ ID NO: 2366668 - DNA, 25 bp, Homo sapien
taactcaaaagggtgtaaatcacag

SEQ ID NO: 2366669 - DNA, 25 bp, Homo sapien
gaagcagctgtcttttaacctaggt

SEQ ID NO: 2366670 - DNA, 25 bp, Homo sapien
taaatcacaggtttgctcggtaata

SEQ ID NO: 2366671 - DNA, 25 bp, Homo sapien
taaagtctcactgtatgccatcttg

SEQ ID NO: 2366672 - DNA, 25 bp, Homo sapien
ggagacttctgtctgactcattcag

SEQ ID NO: 2366673 - DNA, 25 bp, Homo sapien
tcaataagcactgtggtgaacctcc

SEQ ID NO: 2366674 - DNA, 25 bp, Homo sapien
tcttcagtggaggtgccatgttcat

SEQ ID NO: 2366675 - DNA, 25 bp, Homo sapien
cagggtgcctgtaacaaattgcttc

SEQ ID NO: 2366676 - DNA, 25 bp, Homo sapien
gtcacaaggcatcagaaaaggttct

SEQ ID NO: 2366677 - DNA, 25 bp, Homo sapien
gagcagttatagatctgagccagca

SEQ ID NO: 2366678 - DNA, 25 bp, Homo sapien
catgtccagggagtaggtctgacac

SEQ ID NO: 2366679 - DNA, 25 bp, Homo sapien
ctgggggtggccacgagaggcgggg

SEQ ID NO: 2366680 - DNA, 25 bp, Homo sapien
agatgtgcggctgaggacatgctgg

SEQ ID NO: 2366681 - DNA, 25 bp, Homo sapien
gatgtccgccagcactgtgccctgc

SEQ ID NO: 2366682 - DNA, 25 bp, Homo sapien
atctccacgcgcgactgcgcgatgt

SEQ ID NO: 2366683 - DNA, 25 bp, Homo sapien
tcccaaaagccaagcgggacttcac

SEQ ID NO: 2366684 - DNA, 25 bp, Homo sapien
agcagccgtgcctgctcaatctcca

SEQ ID NO: 2366685 - DNA, 25 bp, Homo sapien
catgagcatgggttggtccctgatg

SEQ ID NO: 2366686 - DNA, 25 bp, Homo sapien
tatctagcacgccagcgtcaaagaa

SEQ ID NO: 2366687 - DNA, 25 bp, Homo sapien
tccctgatggttgagggtcttgggt

SEQ ID NO: 2366688 - DNA, 25 bp, Homo sapien
tgagcatgagcatgggttggtccct

SEQ ID NO: 2366689 - DNA, 25 bp, Homo sapien
gattgtttgagtctgggaagttggg

SEQ ID NO: 2366690 - DNA, 25 bp, Homo sapien
gtggcagagtgaggcccccccgtcc

SEQ ID NO: 2366691 - DNA, 25 bp, Homo sapien
gtctgggaagttgggggctgtggta

SEQ ID NO: 2366692 - DNA, 25 bp, Homo sapien
aagttgggggctgtggtaagctgag

SEQ ID NO: 2366693 - DNA, 25 bp, Homo sapien
ggacggggcgaccattttaatcatg

SEQ ID NO: 2366694 - DNA, 25 bp, Homo sapien
tgaatcgcacgatcaatcactcggg

SEQ ID NO: 2366695 - DNA, 25 bp, Homo sapien
tcaatcactcgggaggccatggacg

SEQ ID NO: 2366696 - DNA, 25 bp, Homo sapien
tcatggctatatccaaggctgcagc

SEQ ID NO: 2366697 - DNA, 25 bp, Homo sapien
tggttcaaataagccaactgtctgg

SEQ ID NO: 2366698 - DNA, 25 bp, Homo sapien
ctgggctctgggcttatgaaaaccc

SEQ ID NO: 2366699 - DNA, 25 bp, Homo sapien
gctacttgcaagctcagtgacctgg

SEQ ID NO: 2366700 - DNA, 25 bp, Homo sapien
gggtacgatggcacctcccaccttg

SEQ ID NO: 2366701 - DNA, 25 bp, Homo sapien
gcctgctcttgatggcccataacaa

SEQ ID NO: 2366702 - DNA, 25 bp, Homo sapien
aggaatgatagcctgctcttgatgg

SEQ ID NO: 2366703 - DNA, 25 bp, Homo sapien
tgatggcccataacaaccatcttcc

SEQ ID NO: 2366704 - DNA, 25 bp, Homo sapien
accatcttcccggacttccctgtgg

SEQ ID NO: 2366705 - DNA, 25 bp, Homo sapien
gccgtcggcaaagcgcagggctcgg

SEQ ID NO: 2366706 - DNA, 25 bp, Homo sapien
agaactgagccagtgggtagtcgct

SEQ ID NO: 2366707 - DNA, 25 bp, Homo sapien
gaagaactgagccagtgggtagtcg

SEQ ID NO: 2366708 - DNA, 25 bp, Homo sapien
ctcgtcagggccgtcggcaaagcgc

SEQ ID NO: 2366709 - DNA, 25 bp, Homo sapien
gaaagattgagtccaccctgactgt

SEQ ID NO: 2366710 - DNA, 25 bp, Homo sapien
caaacaccggatctttcgaggcaca

SEQ ID NO: 2366711 - DNA, 25 bp, Homo sapien
taaatgcggtgcttcagctctagct

SEQ ID NO: 2366712 - DNA, 25 bp, Homo sapien
tcgaggcacatcagtgacagatctg

SEQ ID NO: 2366713 - DNA, 25 bp, Homo sapien
tccaggcttcttgcagagacgtctt

SEQ ID NO: 2366714 - DNA, 25 bp, Homo sapien
ctggcctgaaacagactccaggctt

SEQ ID NO: 2366715 - DNA, 25 bp, Homo sapien
ctgaagaccagctttccagactctg

SEQ ID NO: 2366716 - DNA, 25 bp, Homo sapien
agtgaagtgaccgtgcctgcccagc

SEQ ID NO: 2366717 - DNA, 25 bp, Homo sapien
taaatgattgttctgtgctgtgtgt

SEQ ID NO: 2366718 - DNA, 25 bp, Homo sapien
caggcgcccaggtcctgggtctcta

SEQ ID NO: 2366719 - DNA, 25 bp, Homo sapien
agatgccagtggctttacaatgtgg

SEQ ID NO: 2366720 - DNA, 25 bp, Homo sapien
caatgtgggttgcattccattttcc

SEQ ID NO: 2366721 - DNA, 25 bp, Homo sapien
tgcacatgtgccttcgagggattcc

SEQ ID NO: 2366722 - DNA, 25 bp, Homo sapien
taaccaagatctttcagcctggaag

SEQ ID NO: 2366723 - DNA, 25 bp, Homo sapien
cccggcagcctcctaagtcttaata

SEQ ID NO: 2366724 - DNA, 25 bp, Homo sapien
tgagaactgcatggaaactcagttg

SEQ ID NO: 2366725 - DNA, 25 bp, Homo sapien
tgcctctaccattcctcgggatggg

SEQ ID NO: 2366726 - DNA, 25 bp, Homo sapien
tttgaccccaatgtgaacaggcccg

SEQ ID NO: 2366727 - DNA, 25 bp, Homo sapien
tccaggtgaagagaccggccgtaaa

SEQ ID NO: 2366728 - DNA, 25 bp, Homo sapien
ggccgtaaacccaaaagcgagatca

SEQ ID NO: 2366729 - DNA, 25 bp, Homo sapien
ctggttgcagaagacctcgggctgc

SEQ ID NO: 2366730 - DNA, 25 bp, Homo sapien
gcagaagacctcgggctgctggttg

SEQ ID NO: 2366731 - DNA, 25 bp, Homo sapien
gaagacctcgggctgctggttgggg

SEQ ID NO: 2366732 - DNA, 25 bp, Homo sapien
tggttgcagaagacctcgggctgct

SEQ ID NO: 2366733 - DNA, 25 bp, Homo sapien
atgccaggcagagacttagtggtga

SEQ ID NO: 2366734 - DNA, 25 bp, Homo sapien
gccaggcagagacttagtggtgatt

SEQ ID NO: 2366735 - DNA, 25 bp, Homo sapien
caggcagagacttagtggtgattgt

SEQ ID NO: 2366736 - DNA, 25 bp, Homo sapien
gattgtggtggtcgaggggctcagg

SEQ ID NO: 2366737 - DNA, 25 bp, Homo sapien
aacacacgtaaacgctcttgggcgg

SEQ ID NO: 2366738 - DNA, 25 bp, Homo sapien
ataacacacgtaaacgctcttgggc

SEQ ID NO: 2366739 - DNA, 25 bp, Homo sapien
ggtggggggatgtcctagctcccac

SEQ ID NO: 2366740 - DNA, 25 bp, Homo sapien
tggggggatgtcctagctcccactt

SEQ ID NO: 2366741 - DNA, 25 bp, Homo sapien
tagggtgggaatcaccctagagccc

SEQ ID NO: 2366742 - DNA, 25 bp, Homo sapien
ccaacgccatgacgatggcagggtg

SEQ ID NO: 2366743 - DNA, 25 bp, Homo sapien
tgctcctgattttgtcacatgggac

SEQ ID NO: 2366744 - DNA, 25 bp, Homo sapien
tctgcagtctctgcgccaagcatgg

SEQ ID NO: 2366745 - DNA, 25 bp, Homo sapien
ctgctgacggcatcgtgccattcat

SEQ ID NO: 2366746 - DNA, 25 bp, Homo sapien
gatgacctctccagtggacggattg

SEQ ID NO: 2366747 - DNA, 25 bp, Homo sapien
tgttttcctgctgacggcatcgtgc

SEQ ID NO: 2366748 - DNA, 25 bp, Homo sapien
ccccttcagctacctgacagatgac

SEQ ID NO: 2366749 - DNA, 25 bp, Homo sapien
aggtaggtccggtcccgctcgatca

SEQ ID NO: 2366750 - DNA, 25 bp, Homo sapien
tccatgcggcgccaaggtgagccca

SEQ ID NO: 2366751 - DNA, 25 bp, Homo sapien
agccggcccctgtgtgatgcgtcca

SEQ ID NO: 2366752 - DNA, 25 bp, Homo sapien
ggtcccgctcgatcagatcggccag

SEQ ID NO: 2366753 - DNA, 25 bp, Homo sapien
gccctttaggctagaacctgaatga

SEQ ID NO: 2366754 - DNA, 25 bp, Homo sapien
caggtgcaagcgctgatgctcaaag

SEQ ID NO: 2366755 - DNA, 25 bp, Homo sapien
gccatcaagcatgggagcccaggct

SEQ ID NO: 2366756 - DNA, 25 bp, Homo sapien
gaaacatcagccagagatgagccct

SEQ ID NO: 2366757 - DNA, 25 bp, Homo sapien
taggagatgacatagggcttgccat

SEQ ID NO: 2366758 - DNA, 25 bp, Homo sapien
gcttgccattgtccagggtctccaa

SEQ ID NO: 2366759 - DNA, 25 bp, Homo sapien
cggagacatttgaggaccatgtcca

SEQ ID NO: 2366760 - DNA, 25 bp, Homo sapien
ggagacatttgaggaccatgtccaa

SEQ ID NO: 2366761 - DNA, 25 bp, Homo sapien
tgtgggctaccaggtcccaatgtaa

SEQ ID NO: 2366762 - DNA, 25 bp, Homo sapien
gctggaatcaggcatggaggtacaa

SEQ ID NO: 2366763 - DNA, 25 bp, Homo sapien
agaaccaaggccagccactcagggt

SEQ ID NO: 2366764 - DNA, 25 bp, Homo sapien
cctccctcaggaatatggcattaca

SEQ ID NO: 2366765 - DNA, 25 bp, Homo sapien
ccccacaggttcatggcgtgtgtag

SEQ ID NO: 2366766 - DNA, 25 bp, Homo sapien
tagctgaagaagtctccgtcaatgg

SEQ ID NO: 2366767 - DNA, 25 bp, Homo sapien
cttatcagcccagccggcataatac

SEQ ID NO: 2366768 - DNA, 25 bp, Homo sapien
gatggttttcccgtggtacttatca

SEQ ID NO: 2366769 - DNA, 25 bp, Homo sapien
cttgcatcaggagcgggaaattcca

SEQ ID NO: 2366770 - DNA, 25 bp, Homo sapien
gggcccagcttccatgcttgcatca

SEQ ID NO: 2366771 - DNA, 25 bp, Homo sapien
cacaaccacgtttccagttgccaag

SEQ ID NO: 2366772 - DNA, 25 bp, Homo sapien
cttccatgcttgcatcaggagcggg

SEQ ID NO: 2366773 - DNA, 25 bp, Homo sapien
ttggccacatagagggcggtgaggg

SEQ ID NO: 2366774 - DNA, 25 bp, Homo sapien
cttgatcaggttggccacatagagg

SEQ ID NO: 2366775 - DNA, 25 bp, Homo sapien
ggggtgtctgctcagctaccttcat

SEQ ID NO: 2366776 - DNA, 25 bp, Homo sapien
ctccttgatcaggttggccacatag

SEQ ID NO: 2366777 - DNA, 25 bp, Homo sapien
ctgtgagcaaacagccaggggacat

SEQ ID NO: 2366778 - DNA, 25 bp, Homo sapien
acagccaggggacattgggagtcac

SEQ ID NO: 2366779 - DNA, 25 bp, Homo sapien
ccaggggacattgggagtcaccctc

SEQ ID NO: 2366780 - DNA, 25 bp, Homo sapien
agccaggggacattgggagtcaccc

SEQ ID NO: 2366781 - DNA, 25 bp, Homo sapien
ccgtggggccaaatccaggcacaat

SEQ ID NO: 2366782 - DNA, 25 bp, Homo sapien
tccaggcacaatgttgaccacacca

SEQ ID NO: 2366783 - DNA, 25 bp, Homo sapien
gtgaatgccactttgtccacatcct

SEQ ID NO: 2366784 - DNA, 25 bp, Homo sapien
gcctgtgaatgccactttgtccaca

SEQ ID NO: 2366785 - DNA, 25 bp, Homo sapien
cttgagcatgtcgtccactgaggac

SEQ ID NO: 2366786 - DNA, 25 bp, Homo sapien
tgagcatgtcgtccactgaggacag

SEQ ID NO: 2366787 - DNA, 25 bp, Homo sapien
ttgagcatgtcgtccactgaggaca

SEQ ID NO: 2366788 - DNA, 25 bp, Homo sapien
cctggtacctacagggtcgtcctgg

SEQ ID NO: 2366789 - DNA, 25 bp, Homo sapien
ggcctccgcttgacacccgggagct

SEQ ID NO: 2366790 - DNA, 25 bp, Homo sapien
gaccacgaagggctcaaccctgccc

SEQ ID NO: 2366791 - DNA, 25 bp, Homo sapien
ctacagggtcgtcctggaggaaaag

SEQ ID NO: 2366792 - DNA, 25 bp, Homo sapien
tctcttgaggttgctgctcccagca

SEQ ID NO: 2366793 - DNA, 25 bp, Homo sapien
cagcaacctggattacgcggccaat

SEQ ID NO: 2366794 - DNA, 25 bp, Homo sapien
tccaaggtcactctcttgaggttgc

SEQ ID NO: 2366795 - DNA, 25 bp, Homo sapien
agcagcaacctggattacgcggcca

SEQ ID NO: 2366796 - DNA, 25 bp, Homo sapien
aggccttctccagctggaaactcac

SEQ ID NO: 2366797 - DNA, 25 bp, Homo sapien
cttcaaggccaggccttctccagct

SEQ ID NO: 2366798 - DNA, 25 bp, Homo sapien
caaggccaggccttctccagctgga

SEQ ID NO: 2366799 - DNA, 25 bp, Homo sapien
gccaggccttctccagctggaaact

SEQ ID NO: 2366800 - DNA, 25 bp, Homo sapien
gacaaagggcgtgatggcggcaagt

SEQ ID NO: 2366801 - DNA, 25 bp, Homo sapien
tgagtcagatagcaggggcgtggcc

SEQ ID NO: 2366802 - DNA, 25 bp, Homo sapien
gagcccactgccaaccaggacaaag

SEQ ID NO: 2366803 - DNA, 25 bp, Homo sapien
cactgtaagggttgatgcctgctgg

SEQ ID NO: 2366804 - DNA, 25 bp, Homo sapien
tcttgctatcaaaggggttcccgac

SEQ ID NO: 2366805 - DNA, 25 bp, Homo sapien
atgtcctcctgcacgaaggtccggg

SEQ ID NO: 2366806 - DNA, 25 bp, Homo sapien
acttggcccgggcaacgctccgctc

SEQ ID NO: 2366807 - DNA, 25 bp, Homo sapien
aacagggcgaagtgggcctgttcca

SEQ ID NO: 2366808 - DNA, 25 bp, Homo sapien
tagccgaggatcttcttaaactgag

SEQ ID NO: 2366809 - DNA, 25 bp, Homo sapien
cttccccgtgttgatgtagccgagg

SEQ ID NO: 2366810 - DNA, 25 bp, Homo sapien
tccttggcgatggtcatgccatcct

SEQ ID NO: 2366811 - DNA, 25 bp, Homo sapien
gaagtaaccacggtcagcagcaatg

SEQ ID NO: 2366812 - DNA, 25 bp, Homo sapien
cccgtacgtggaattgttggctctc

SEQ ID NO: 2366813 - DNA, 25 bp, Homo sapien
gcctgggacaggtaattggccttgt

SEQ ID NO: 2366814 - DNA, 25 bp, Homo sapien
ggatctgcatcactggcccgaagat

SEQ ID NO: 2366815 - DNA, 25 bp, Homo sapien
cacagtgcccgcctggagggcctgg

SEQ ID NO: 2366816 - DNA, 25 bp, Homo sapien
tgggctccaaacacatcatagcagt

SEQ ID NO: 2366817 - DNA, 25 bp, Homo sapien
gttttcacttcagtgtatgcctgca

SEQ ID NO: 2366818 - DNA, 25 bp, Homo sapien
agtgtatgcctgcagcccgtactcg

SEQ ID NO: 2366819 - DNA, 25 bp, Homo sapien
cccgacatcttgtagccaccaaagg

SEQ ID NO: 2366820 - DNA, 25 bp, Homo sapien
ccctgagcccccagcaggtcccaca

SEQ ID NO: 2366821 - DNA, 25 bp, Homo sapien
gagcccccagcaggtcccacactca

SEQ ID NO: 2366822 - DNA, 25 bp, Homo sapien
ctgagcccccagcaggtcccacact

SEQ ID NO: 2366823 - DNA, 25 bp, Homo sapien
tcaagccccaacaggccctgagccc

SEQ ID NO: 2366824 - DNA, 25 bp, Homo sapien
taggagctgactaagtgtgagcaga

SEQ ID NO: 2366825 - DNA, 25 bp, Homo sapien
gacagagaagccgttagatcttcct

SEQ ID NO: 2366826 - DNA, 25 bp, Homo sapien
tgatctgtaggtcccctcagctagg

SEQ ID NO: 2366827 - DNA, 25 bp, Homo sapien
aagccgttagatcttcctgcttccc

SEQ ID NO: 2366828 - DNA, 25 bp, Homo sapien
tgagttcttctgaggcactttgact

SEQ ID NO: 2366829 - DNA, 25 bp, Homo sapien
tcttagcccagaatacaaagcaggg

SEQ ID NO: 2366830 - DNA, 25 bp, Homo sapien
ctttccatcaatggctgagggagga

SEQ ID NO: 2366831 - DNA, 25 bp, Homo sapien
agcagggtgtagcagttgccttaat

SEQ ID NO: 2366832 - DNA, 25 bp, Homo sapien
ttttcagatattcagcacgcaagga

SEQ ID NO: 2366833 - DNA, 25 bp, Homo sapien
ccttcctttggttattgagatggac

SEQ ID NO: 2366834 - DNA, 25 bp, Homo sapien
ttgagatggacaaagagttacccag

SEQ ID NO: 2366835 - DNA, 25 bp, Homo sapien
ttattgagatggacaaagagttacc

SEQ ID NO: 2366836 - DNA, 25 bp, Homo sapien
atgcccaccttcctttggttattga

SEQ ID NO: 2366837 - DNA, 25 bp, Homo sapien
ggcctgatcaagtttttactgagaa

SEQ ID NO: 2366838 - DNA, 25 bp, Homo sapien
tctattatgaaattggcccatgtca

SEQ ID NO: 2366839 - DNA, 25 bp, Homo sapien
gactcaagaggtctggttactgaag

SEQ ID NO: 2366840 - DNA, 25 bp, Homo sapien
gcctttgccaggtatcttgactaga

SEQ ID NO: 2366841 - DNA, 25 bp, Homo sapien
cattaatcattagttatccggaggc

SEQ ID NO: 2366842 - DNA, 25 bp, Homo sapien
tccctgtctatctctgccttggctg

SEQ ID NO: 2366843 - DNA, 25 bp, Homo sapien
gagcaatttggttgcatttagtaaa

SEQ ID NO: 2366844 - DNA, 25 bp, Homo sapien
taagtgagcaatttggttgcattta

SEQ ID NO: 2366845 - DNA, 25 bp, Homo sapien
cccagcaatcgaccttctctctata

SEQ ID NO: 2366846 - DNA, 25 bp, Homo sapien
gggcaccccaccattagaagtcact

SEQ ID NO: 2366847 - DNA, 25 bp, Homo sapien
tccttcacagaataagccaaatgag

SEQ ID NO: 2366848 - DNA, 25 bp, Homo sapien
agctcagaagttgtgtggtttgtcc

SEQ ID NO: 2366849 - DNA, 25 bp, Homo sapien
tggtttgtccaagttcccctgacca

SEQ ID NO: 2366850 - DNA, 25 bp, Homo sapien
ctgaccagctctgggaccctgtttt

SEQ ID NO: 2366851 - DNA, 25 bp, Homo sapien
cttgagaaggctccaagtacagttc

SEQ ID NO: 2366852 - DNA, 25 bp, Homo sapien
ggcatgtagtgggtgcacagttaat

SEQ ID NO: 2366853 - DNA, 25 bp, Homo sapien
gggtgcacagttaatacttcttggg

SEQ ID NO: 2366854 - DNA, 25 bp, Homo sapien
attgttaagaagctcttgagaaggc

SEQ ID NO: 2366855 - DNA, 25 bp, Homo sapien
tactcctggcatggaagatacagta

SEQ ID NO: 2366856 - DNA, 25 bp, Homo sapien
taagtaagccatatcgccaggcatc

SEQ ID NO: 2366857 - DNA, 25 bp, Homo sapien
tcaggtgctgtctcataagtaagcc

SEQ ID NO: 2366858 - DNA, 25 bp, Homo sapien
taaatatccgtactatcagagaggt

SEQ ID NO: 2366859 - DNA, 25 bp, Homo sapien
gagcctcaacccttggacctgtcta

SEQ ID NO: 2366860 - DNA, 25 bp, Homo sapien
tactgagacatctagagcctactgt

SEQ ID NO: 2366861 - DNA, 25 bp, Homo sapien
tctgtaaaattggatggactgccaa

SEQ ID NO: 2366862 - DNA, 25 bp, Homo sapien
gaatgcccatgggttgtgaccaact

SEQ ID NO: 2366863 - DNA, 25 bp, Homo sapien
gataattttgggtcgcatccctggg

SEQ ID NO: 2366864 - DNA, 25 bp, Homo sapien
ggaaaactggatgcgtatagccaac

SEQ ID NO: 2366865 - DNA, 25 bp, Homo sapien
cacggctctacagttaggagaacaa

SEQ ID NO: 2366866 - DNA, 25 bp, Homo sapien
ggcattgttgaaatccacggctcta

SEQ ID NO: 2366867 - DNA, 25 bp, Homo sapien
tggcattatctagggaggaaaggac

SEQ ID NO: 2366868 - DNA, 25 bp, Homo sapien
tatgaatggcgggatactatccagt

SEQ ID NO: 2366869 - DNA, 25 bp, Homo sapien
tccagtgatagcaatagtaagcaac

SEQ ID NO: 2366870 - DNA, 25 bp, Homo sapien
ttgacatggagcaggctttagcccg

SEQ ID NO: 2366871 - DNA, 25 bp, Homo sapien
gattcctaagtggaggagaactgtg

SEQ ID NO: 2366872 - DNA, 25 bp, Homo sapien
gagaactgtgccttactgacctaaa

SEQ ID NO: 2366873 - DNA, 25 bp, Homo sapien
tgaccagaagaggtgtgcagtttcc

SEQ ID NO: 2366874 - DNA, 25 bp, Homo sapien
gtgcctatgctctccccagcggaaa

SEQ ID NO: 2366875 - DNA, 25 bp, Homo sapien
aagccgaagccgaagcagagctcgg

SEQ ID NO: 2366876 - DNA, 25 bp, Homo sapien
ggtcctaaagaagagcctgcgcctc

SEQ ID NO: 2366877 - DNA, 25 bp, Homo sapien
gacttgcaggcgtccgcctgggcct

SEQ ID NO: 2366878 - DNA, 25 bp, Homo sapien
gccgcttagacctgggctcgccagg

SEQ ID NO: 2366879 - DNA, 25 bp, Homo sapien
ccccgcgcggccgagggagcaaagg

SEQ ID NO: 2366880 - DNA, 25 bp, Homo sapien
gcccctgggcctcgtggcgacgggc

SEQ ID NO: 2366881 - DNA, 25 bp, Homo sapien
ttcggcgggcggctctaggctggcg

SEQ ID NO: 2366882 - DNA, 25 bp, Homo sapien
aaagggctcggcactcgggcccctg

SEQ ID NO: 2366883 - DNA, 25 bp, Homo sapien
gtagtagtagtagggctctcttcgt

SEQ ID NO: 2366884 - DNA, 25 bp, Homo sapien
ggggagtgatcgaaacgtgtagtag

SEQ ID NO: 2366885 - DNA, 25 bp, Homo sapien
tagtagtagtagtagggctctcttc

SEQ ID NO: 2366886 - DNA, 25 bp, Homo sapien
cttggggagtgatcgaaacgtgtag

SEQ ID NO: 2366887 - DNA, 25 bp, Homo sapien
ggctgatttcaaacaaatcgggagg

SEQ ID NO: 2366888 - DNA, 25 bp, Homo sapien
gatggataaattccaactctccaag

SEQ ID NO: 2366889 - DNA, 25 bp, Homo sapien
tctccaagttctgtagaccatccgg

SEQ ID NO: 2366890 - DNA, 25 bp, Homo sapien
gaccatccggaagcaaatgctggcg

SEQ ID NO: 2366891 - DNA, 25 bp, Homo sapien
cacggaaaagtgaggacaacctatt

SEQ ID NO: 2366892 - DNA, 25 bp, Homo sapien
gaatacacggaaaagtgaggacaac

SEQ ID NO: 2366893 - DNA, 25 bp, Homo sapien
tacacggaaaagtgaggacaaccta

SEQ ID NO: 2366894 - DNA, 25 bp, Homo sapien
ggagaatacacggaaaagtgaggac

SEQ ID NO: 2366895 - DNA, 25 bp, Homo sapien
gtaattttcgaacacacatttgctt

SEQ ID NO: 2366896 - DNA, 25 bp, Homo sapien
ggtttaagtgcagttaagtcacagg

SEQ ID NO: 2366897 - DNA, 25 bp, Homo sapien
tgcagttaagtcacaggaactgtta

SEQ ID NO: 2366898 - DNA, 25 bp, Homo sapien
taattttcgaacacacatttgcttt

SEQ ID NO: 2366899 - DNA, 25 bp, Homo sapien
cagcttctgagtccaattgatactg

SEQ ID NO: 2366900 - DNA, 25 bp, Homo sapien
tctgagtccaattgatactgtattc

SEQ ID NO: 2366901 - DNA, 25 bp, Homo sapien
gagtccaattgatactgtattcttc

SEQ ID NO: 2366902 - DNA, 25 bp, Homo sapien
gcttctgagtccaattgatactgta

SEQ ID NO: 2366903 - DNA, 25 bp, Homo sapien
tctagcttttggacgatcaagaaga

SEQ ID NO: 2366904 - DNA, 25 bp, Homo sapien
caaaccgttcttgagtagatttctt

SEQ ID NO: 2366905 - DNA, 25 bp, Homo sapien
atttctagcttttggacgatcaaga

SEQ ID NO: 2366906 - DNA, 25 bp, Homo sapien
gaagaattttcagcgcaaaccgttc

SEQ ID NO: 2366907 - DNA, 25 bp, Homo sapien
taatctgaactatgtttgggtgtgt

SEQ ID NO: 2366908 - DNA, 25 bp, Homo sapien
tcatggggaaactggacactgttag

SEQ ID NO: 2366909 - DNA, 25 bp, Homo sapien
acttcaataatctgaactatgtttg

SEQ ID NO: 2366910 - DNA, 25 bp, Homo sapien
ctagggctggactcatggggaaact

SEQ ID NO: 2366911 - DNA, 25 bp, Homo sapien
gcttctctgtaaagtgccggtgctg

SEQ ID NO: 2366912 - DNA, 25 bp, Homo sapien
tgcttctctgtaaagtgccggtgct

SEQ ID NO: 2366913 - DNA, 25 bp, Homo sapien
ttctctgtaaagtgccggtgctggc

SEQ ID NO: 2366914 - DNA, 25 bp, Homo sapien
ctctgtaaagtgccggtgctggctg

SEQ ID NO: 2366915 - DNA, 25 bp, Homo sapien
acaagtgacagtgccgcagagccaa

SEQ ID NO: 2366916 - DNA, 25 bp, Homo sapien
tgcgcaatgtttaacaagtgacagt

SEQ ID NO: 2366917 - DNA, 25 bp, Homo sapien
gcaatgtttaacaagtgacagtgcc

SEQ ID NO: 2366918 - DNA, 25 bp, Homo sapien
tgtttaacaagtgacagtgccgcag

SEQ ID NO: 2366919 - DNA, 25 bp, Homo sapien
gggtgctacataataaggggtgaac

SEQ ID NO: 2366920 - DNA, 25 bp, Homo sapien
ggtgaactggggtgtcatcaagtca

SEQ ID NO: 2366921 - DNA, 25 bp, Homo sapien
gctacataataaggggtgaactggg

SEQ ID NO: 2366922 - DNA, 25 bp, Homo sapien
ctggggtgtcatcaagtcaccttgg

SEQ ID NO: 2366923 - DNA, 25 bp, Homo sapien
tgttgtaagtgtagggcgtcggtga

SEQ ID NO: 2366924 - DNA, 25 bp, Homo sapien
gatttctccttctgatgccttcttt

SEQ ID NO: 2366925 - DNA, 25 bp, Homo sapien
tgatgccttctttgcgcctccagta

SEQ ID NO: 2366926 - DNA, 25 bp, Homo sapien
cgtcggtgaggtaggtatgatgcca

SEQ ID NO: 2366927 - DNA, 25 bp, Homo sapien
gcacaggccacttcataaaggccca

SEQ ID NO: 2366928 - DNA, 25 bp, Homo sapien
caggccacttcataaaggcccaaag

SEQ ID NO: 2366929 - DNA, 25 bp, Homo sapien
gccacttcataaaggcccaaagcag

SEQ ID NO: 2366930 - DNA, 25 bp, Homo sapien
ggccacttcataaaggcccaaagca

SEQ ID NO: 2366931 - DNA, 25 bp, Homo sapien
taaaaaggagggtatccgcacagca

SEQ ID NO: 2366932 - DNA, 25 bp, Homo sapien
tctgggaactcaaaactgcctgtca

SEQ ID NO: 2366933 - DNA, 25 bp, Homo sapien
taatcacccctagggaccacaagtc

SEQ ID NO: 2366934 - DNA, 25 bp, Homo sapien
tatcctttgggatagtccggctgtg

SEQ ID NO: 2366935 - DNA, 25 bp, Homo sapien
cttcatcccattatagaggaagaaa

SEQ ID NO: 2366936 - DNA, 25 bp, Homo sapien
ggacattgaggttttggtcaaatag

SEQ ID NO: 2366937 - DNA, 25 bp, Homo sapien
aggacattgaggttttggtcaaata

SEQ ID NO: 2366938 - DNA, 25 bp, Homo sapien
ccagggcctcggtggaattgagcca

SEQ ID NO: 2366939 - DNA, 25 bp, Homo sapien
tggtccagcactccctcgatggtga

SEQ ID NO: 2366940 - DNA, 25 bp, Homo sapien
tctctcctccggtttgaccttcagg

SEQ ID NO: 2366941 - DNA, 25 bp, Homo sapien
actccctcgatggtgagtctctcct

SEQ ID NO: 2366942 - DNA, 25 bp, Homo sapien
ttgtccatcatcagctgagcagaag

SEQ ID NO: 2366943 - DNA, 25 bp, Homo sapien
cttgtccatcatcagctgagcagaa

SEQ ID NO: 2366944 - DNA, 25 bp, Homo sapien
tcatcagctgagcagaaggcagcac

SEQ ID NO: 2366945 - DNA, 25 bp, Homo sapien
ccatcatcagctgagcagaaggcag

SEQ ID NO: 2366946 - DNA, 25 bp, Homo sapien
caacaaagtaaacatcattcaaaac

SEQ ID NO: 2366947 - DNA, 25 bp, Homo sapien
cagccaacaaagtaaacatcattca

SEQ ID NO: 2366948 - DNA, 25 bp, Homo sapien
tcagccaacaaagtaaacatcattc

SEQ ID NO: 2366949 - DNA, 25 bp, Homo sapien
gccaacaaagtaaacatcattcaaa

SEQ ID NO: 2366950 - DNA, 25 bp, Homo sapien
tacgggcagacgaaatcatcagaag

SEQ ID NO: 2366951 - DNA, 25 bp, Homo sapien
tgtgtatcccagaaaacgatcagga

SEQ ID NO: 2366952 - DNA, 25 bp, Homo sapien
cagtgtataatctcactacgggcag

SEQ ID NO: 2366953 - DNA, 25 bp, Homo sapien
aaatagctgtcatggagtctggaac

SEQ ID NO: 2366954 - DNA, 25 bp, Homo sapien
tttgaggctgactttcagatcctgg

SEQ ID NO: 2366955 - DNA, 25 bp, Homo sapien
tgttggccaactgttccgcgtgagc

SEQ ID NO: 2366956 - DNA, 25 bp, Homo sapien
tgagcctgctggattcctgcaacca

SEQ ID NO: 2366957 - DNA, 25 bp, Homo sapien
cagatcctggattctcatgttggcc

SEQ ID NO: 2366958 - DNA, 25 bp, Homo sapien
gcaacattggaatcctcggctccat

SEQ ID NO: 2366959 - DNA, 25 bp, Homo sapien
catggtcgtggatatagacactgtc

SEQ ID NO: 2366960 - DNA, 25 bp, Homo sapien
gggagaatacactgagcaatcacat

SEQ ID NO: 2366961 - DNA, 25 bp, Homo sapien
gcaatcacatctcggagtttttcca

SEQ ID NO: 2366962 - DNA, 25 bp, Homo sapien
ggtaaggatgaagaggaatttgcat

SEQ ID NO: 2366963 - DNA, 25 bp, Homo sapien
ttggtaaggatgaagaggaatttgc

SEQ ID NO: 2366964 - DNA, 25 bp, Homo sapien
taaggatgaagaggaatttgcattt

SEQ ID NO: 2366965 - DNA, 25 bp, Homo sapien
ctattggtaaggatgaagaggaatt

SEQ ID NO: 2366966 - DNA, 25 bp, Homo sapien
tttgcattcccggttatacttccaa

SEQ ID NO: 2366967 - DNA, 25 bp, Homo sapien
gcattcccggttatacttccaagcc

SEQ ID NO: 2366968 - DNA, 25 bp, Homo sapien
cttaggagtttgcattcccggttat

SEQ ID NO: 2366969 - DNA, 25 bp, Homo sapien
taggagtttgcattcccggttatac

SEQ ID NO: 2366970 - DNA, 25 bp, Homo sapien
gccaagcagatcagcgggatcagca

SEQ ID NO: 2366971 - DNA, 25 bp, Homo sapien
taaccagcagtagatttggcaaact

SEQ ID NO: 2366972 - DNA, 25 bp, Homo sapien
cctggtgaatagtcctggtatctga

SEQ ID NO: 2366973 - DNA, 25 bp, Homo sapien
tcagcagggtggactcgctggcact

SEQ ID NO: 2366974 - DNA, 25 bp, Homo sapien
gaaaatgaatgatctgctgctacac

SEQ ID NO: 2366975 - DNA, 25 bp, Homo sapien
tcgcaagagtattcaccacagccct

SEQ ID NO: 2366976 - DNA, 25 bp, Homo sapien
gactgtgattacctttgaatggagg

SEQ ID NO: 2366977 - DNA, 25 bp, Homo sapien
tacatgatctaggtgctggttacag

SEQ ID NO: 2366978 - DNA, 25 bp, Homo sapien
tacagctgacaaaagactcatatcc

SEQ ID NO: 2366979 - DNA, 25 bp, Homo sapien
tcttgacagagacccaataaggtcc

SEQ ID NO: 2366980 - DNA, 25 bp, Homo sapien
ttcaggtagcaattgtacagttcca

SEQ ID NO: 2366981 - DNA, 25 bp, Homo sapien
tacagttccactaacctggcagtaa

SEQ ID NO: 2366982 - DNA, 25 bp, Homo sapien
atttctgccagttttagtcgatcta

SEQ ID NO: 2366983 - DNA, 25 bp, Homo sapien
gccagttttagtcgatctactttat

SEQ ID NO: 2366984 - DNA, 25 bp, Homo sapien
tctactttatctgtgaatccacgac

SEQ ID NO: 2366985 - DNA, 25 bp, Homo sapien
tagtcgatctactttatctgtgaat

SEQ ID NO: 2366986 - DNA, 25 bp, Homo sapien
ggattcgtgggacgtggtttgctct

SEQ ID NO: 2366987 - DNA, 25 bp, Homo sapien
tgggattcgtgggacgtggtttgct

SEQ ID NO: 2366988 - DNA, 25 bp, Homo sapien
attgggattcgtgggacgtggtttg

SEQ ID NO: 2366989 - DNA, 25 bp, Homo sapien
gattcgtgggacgtggtttgctctt

SEQ ID NO: 2366990 - DNA, 25 bp, Homo sapien
taaaaaaacaaagtctgaagctgtc

SEQ ID NO: 2366991 - DNA, 25 bp, Homo sapien
cattaaagaataatttttcaaattg

SEQ ID NO: 2366992 - DNA, 25 bp, Homo sapien
aaaaaaacaaagtctgaagctgtca

SEQ ID NO: 2366993 - DNA, 25 bp, Homo sapien
cataaaattactttatacattaaag

SEQ ID NO: 2366994 - DNA, 25 bp, Homo sapien
taatagtatgtctctagaactgagc

SEQ ID NO: 2366995 - DNA, 25 bp, Homo sapien
tactattattaagtcctgcacccta

SEQ ID NO: 2366996 - DNA, 25 bp, Homo sapien
taaaacaatattgcttgacagcatc

SEQ ID NO: 2366997 - DNA, 25 bp, Homo sapien
tacacagtcctaaagtaatagtatg

SEQ ID NO: 2366998 - DNA, 25 bp, Homo sapien
ccagagtccttgattcaactgttta

SEQ ID NO: 2366999 - DNA, 25 bp, Homo sapien
caactgtttactaatcagaaaggtc

SEQ ID NO: 2367000 - DNA, 25 bp, Homo sapien
tcagaaaggtcggtatagtcggtcc

SEQ ID NO: 2367001 - DNA, 25 bp, Homo sapien
cggtcctttttctactgctggcaag

SEQ ID NO: 2367002 - DNA, 25 bp, Homo sapien
caagctcaagtgtgcctcctgtgag

SEQ ID NO: 2367003 - DNA, 25 bp, Homo sapien
aagtgtgcctcctgtgagttccagc

SEQ ID NO: 2367004 - DNA, 25 bp, Homo sapien
cccaagctcaagtgtgcctcctgtg

SEQ ID NO: 2367005 - DNA, 25 bp, Homo sapien
gctcaagtgtgcctcctgtgagttc

SEQ ID NO: 2367006 - DNA, 25 bp, Homo sapien
atataaagaataggccaggcttggt

SEQ ID NO: 2367007 - DNA, 25 bp, Homo sapien
aacatataaagaataggccaggctt

SEQ ID NO: 2367008 - DNA, 25 bp, Homo sapien
gaagctccggttaaacatataaaga

SEQ ID NO: 2367009 - DNA, 25 bp, Homo sapien
agaataaacccaaggccgggcacag

SEQ ID NO: 2367010 - DNA, 25 bp, Homo sapien
gtgactgaaacacgggcaactgatg

SEQ ID NO: 2367011 - DNA, 25 bp, Homo sapien
cagagtcaaagggagtatcactttg

SEQ ID NO: 2367012 - DNA, 25 bp, Homo sapien
actttggataccttttccatcgcac

SEQ ID NO: 2367013 - DNA, 25 bp, Homo sapien
ttgaagtgactgaaacacgggcaac

SEQ ID NO: 2367014 - DNA, 25 bp, Homo sapien
tactgctggactaggaatacacaaa

SEQ ID NO: 2367015 - DNA, 25 bp, Homo sapien
catgctgagtcccttgggagctact

SEQ ID NO: 2367016 - DNA, 25 bp, Homo sapien
aaatttcgagtagcaaacctgacag

SEQ ID NO: 2367017 - DNA, 25 bp, Homo sapien
caaaactccacttcgaagaccaagc

SEQ ID NO: 2367018 - DNA, 25 bp, Homo sapien
cttagataacagcatgagagcagat

SEQ ID NO: 2367019 - DNA, 25 bp, Homo sapien
tatgagatacgactacagaaaggaa

SEQ ID NO: 2367020 - DNA, 25 bp, Homo sapien
tatcacagattttagggtgtttccc

SEQ ID NO: 2367021 - DNA, 25 bp, Homo sapien
ccaaaataggcagcgcaaattaggt

SEQ ID NO: 2367022 - DNA, 25 bp, Homo sapien
caagtagaaggcctgtagtgatcca

SEQ ID NO: 2367023 - DNA, 25 bp, Homo sapien
gattctgggcctatgtccatcagca

SEQ ID NO: 2367024 - DNA, 25 bp, Homo sapien
gaaaggcgattcttgccccaggagg

SEQ ID NO: 2367025 - DNA, 25 bp, Homo sapien
catgaaggtcctggtactagcccca

SEQ ID NO: 2367026 - DNA, 25 bp, Homo sapien
gttgacagaaacaaaagaacctgac

SEQ ID NO: 2367027 - DNA, 25 bp, Homo sapien
agatgttgacagaaacaaaagaacc

SEQ ID NO: 2367028 - DNA, 25 bp, Homo sapien
tgttgacagaaacaaaagaacctga

SEQ ID NO: 2367029 - DNA, 25 bp, Homo sapien
ctgcacagatgttgacagaaacaaa

SEQ ID NO: 2367030 - DNA, 25 bp, Homo sapien
tgttcaaaccgtcttgaagagtcca

SEQ ID NO: 2367031 - DNA, 25 bp, Homo sapien
gatgtgccatggtgtataacacatg

SEQ ID NO: 2367032 - DNA, 25 bp, Homo sapien
gagtccatgggctcaatgctgtaag

SEQ ID NO: 2367033 - DNA, 25 bp, Homo sapien
tccttaatcaggaggatgtgcccct

SEQ ID NO: 2367034 - DNA, 25 bp, Homo sapien
ctagtagacaccacaggagactcac

SEQ ID NO: 2367035 - DNA, 25 bp, Homo sapien
cagggtgatgcccaacgatcatgtg

SEQ ID NO: 2367036 - DNA, 25 bp, Homo sapien
aaaggcctggcccatattctgtcca

SEQ ID NO: 2367037 - DNA, 25 bp, Homo sapien
gaaccgctggttgttgaccacgaca

SEQ ID NO: 2367038 - DNA, 25 bp, Homo sapien
ttattcccctagtgaagctgttggc

SEQ ID NO: 2367039 - DNA, 25 bp, Homo sapien
aacagctgccgcaaaaccgcttgag

SEQ ID NO: 2367040 - DNA, 25 bp, Homo sapien
aggcaggcccctttgtgttctcgaa

SEQ ID NO: 2367041 - DNA, 25 bp, Homo sapien
tttacaaaagcaggccgagtggtcg

SEQ ID NO: 2367042 - DNA, 25 bp, Homo sapien
cgagtggtcgtgctgaatacccagg

SEQ ID NO: 2367043 - DNA, 25 bp, Homo sapien
gaattgtaacactcttgtgaggctg

SEQ ID NO: 2367044 - DNA, 25 bp, Homo sapien
gaacaccgaacatattgtgacccag

SEQ ID NO: 2367045 - DNA, 25 bp, Homo sapien
gacccaggactggtagaaatgccac

SEQ ID NO: 2367046 - DNA, 25 bp, Homo sapien
tctgggagatcacaggaacgactag

SEQ ID NO: 2367047 - DNA, 25 bp, Homo sapien
ttgtatgttggagattgatttttgg

SEQ ID NO: 2367048 - DNA, 25 bp, Homo sapien
ggagattgatttttggtaagcctgt

SEQ ID NO: 2367049 - DNA, 25 bp, Homo sapien
atcattgtatgttggagattgattt

SEQ ID NO: 2367050 - DNA, 25 bp, Homo sapien
ttgatttttggtaagcctgtaatac

SEQ ID NO: 2367051 - DNA, 25 bp, Homo sapien
aacatgagccatctccctgagggac

SEQ ID NO: 2367052 - DNA, 25 bp, Homo sapien
tccaacatgagccatctccctgagg

SEQ ID NO: 2367053 - DNA, 25 bp, Homo sapien
agtactcatataggcatccatgctc

SEQ ID NO: 2367054 - DNA, 25 bp, Homo sapien
cttcatcaggaatgtcagtactcat

SEQ ID NO: 2367055 - DNA, 25 bp, Homo sapien
tgcacagtaagtgccattgtgcaca

SEQ ID NO: 2367056 - DNA, 25 bp, Homo sapien
gcacagtaagtgccattgtgcacat

SEQ ID NO: 2367057 - DNA, 25 bp, Homo sapien
cacagtaagtgccattgtgcacatc

SEQ ID NO: 2367058 - DNA, 25 bp, Homo sapien
ctgtgcaggcggaattcaggcagac

SEQ ID NO: 2367059 - DNA, 25 bp, Homo sapien
ctccacttcctgcagtaacacagtc

SEQ ID NO: 2367060 - DNA, 25 bp, Homo sapien
cagggggggcatgcccttcattaca

SEQ ID NO: 2367061 - DNA, 25 bp, Homo sapien
gcccttcattacagtggcagtgccc

SEQ ID NO: 2367062 - DNA, 25 bp, Homo sapien
tgagtcagagccactaaagctatct

SEQ ID NO: 2367063 - DNA, 25 bp, Homo sapien
gataatatcatcatgtctacagcat

SEQ ID NO: 2367064 - DNA, 25 bp, Homo sapien
tcttcacgtctggaatgagtcatat

SEQ ID NO: 2367065 - DNA, 25 bp, Homo sapien
tcattcccactcagtacttgaggag

SEQ ID NO: 2367066 - DNA, 25 bp, Homo sapien
caaagatgcatgttaatggttcaaa

SEQ ID NO: 2367067 - DNA, 25 bp, Homo sapien
actgtcctcacataataggtagttg

SEQ ID NO: 2367068 - DNA, 25 bp, Homo sapien
aaacttctcctttgatgaatgcaca

SEQ ID NO: 2367069 - DNA, 25 bp, Homo sapien
tcccagagttagtaataaattcagg

SEQ ID NO: 2367070 - DNA, 25 bp, Homo sapien
tttcctcatgtacaagatggaggtt

SEQ ID NO: 2367071 - DNA, 25 bp, Homo sapien
taaagtattgctttaacacagtgcc

SEQ ID NO: 2367072 - DNA, 25 bp, Homo sapien
gagggatgcaggtcccaccacttac

SEQ ID NO: 2367073 - DNA, 25 bp, Homo sapien
tagctagctctagagcaaactcttc

SEQ ID NO: 2367074 - DNA, 25 bp, Homo sapien
ttgaaagcattgcttgtagggcagg

SEQ ID NO: 2367075 - DNA, 25 bp, Homo sapien
ttctgattgaagtgctcccttgaaa

SEQ ID NO: 2367076 - DNA, 25 bp, Homo sapien
gattgaagtgctcccttgaaagcat

SEQ ID NO: 2367077 - DNA, 25 bp, Homo sapien
tgtatgtcttgctaagttgttgtta

SEQ ID NO: 2367078 - DNA, 25 bp, Homo sapien
gttcactgttgcatacagaaatgct

SEQ ID NO: 2367079 - DNA, 25 bp, Homo sapien
ggtttggttgctatagctctgcagt

SEQ ID NO: 2367080 - DNA, 25 bp, Homo sapien
gctggtttggttgctatagctctgc

SEQ ID NO: 2367081 - DNA, 25 bp, Homo sapien
tgttgcatacagaaatgcttctgat

SEQ ID NO: 2367082 - DNA, 25 bp, Homo sapien
tgatgattagtgaacagtcaccttt

SEQ ID NO: 2367083 - DNA, 25 bp, Homo sapien
tctgatgattagtgaacagtcacct

SEQ ID NO: 2367084 - DNA, 25 bp, Homo sapien
ctgatgattagtgaacagtcacctt

SEQ ID NO: 2367085 - DNA, 25 bp, Homo sapien
ttaggaggaatttccatcagacatt

SEQ ID NO: 2367086 - DNA, 25 bp, Homo sapien
taggaggaatttccatcagacattc

SEQ ID NO: 2367087 - DNA, 25 bp, Homo sapien
gtttcatatccaagctgtggccaag

SEQ ID NO: 2367088 - DNA, 25 bp, Homo sapien
gtaggccatatagtcatgtttcata

SEQ ID NO: 2367089 - DNA, 25 bp, Homo sapien
gttgctgaagcccatatctatagta

SEQ ID NO: 2367090 - DNA, 25 bp, Homo sapien
tgcataatacaaaggttctggccat

SEQ ID NO: 2367091 - DNA, 25 bp, Homo sapien
ggctctaacggcaacatctcagggt

SEQ ID NO: 2367092 - DNA, 25 bp, Homo sapien
tcggcgtgatgcagatacccagaca

SEQ ID NO: 2367093 - DNA, 25 bp, Homo sapien
caactgtggagtatatggctggacg

SEQ ID NO: 2367094 - DNA, 25 bp, Homo sapien
ccaactaaagcaggaggctcggcgt

SEQ ID NO: 2367095 - DNA, 25 bp, Homo sapien
tccgggtacttctacattgcaaaag

SEQ ID NO: 2367096 - DNA, 25 bp, Homo sapien
taaaagtacctccatgcattccaga

SEQ ID NO: 2367097 - DNA, 25 bp, Homo sapien
gacgtgtgtggaggaacctgatact

SEQ ID NO: 2367098 - DNA, 25 bp, Homo sapien
catggccctttatgttctccaggta

SEQ ID NO: 2367099 - DNA, 25 bp, Homo sapien
taaggctggagggtaaattctattc

SEQ ID NO: 2367100 - DNA, 25 bp, Homo sapien
tcatcaaagctggaagtagaaattc

SEQ ID NO: 2367101 - DNA, 25 bp, Homo sapien
gttgattcaaatagcttagcctgtc

SEQ ID NO: 2367102 - DNA, 25 bp, Homo sapien
catctcagttcttaggttcttttaa

SEQ ID NO: 2367103 - DNA, 25 bp, Homo sapien
ggtcccattacagaagcaatactct

SEQ ID NO: 2367104 - DNA, 25 bp, Homo sapien
tcttcttatgattatgccctgtgta

SEQ ID NO: 2367105 - DNA, 25 bp, Homo sapien
ggattgtcccacctactcttttctg

SEQ ID NO: 2367106 - DNA, 25 bp, Homo sapien
gagggcagccttttatgtacagcta

SEQ ID NO: 2367107 - DNA, 25 bp, Homo sapien
ttttctccaatcttgtcttctcact

SEQ ID NO: 2367108 - DNA, 25 bp, Homo sapien
agtattttccatcttggttccattt

SEQ ID NO: 2367109 - DNA, 25 bp, Homo sapien
aatatcctgaagagtattttccatc

SEQ ID NO: 2367110 - DNA, 25 bp, Homo sapien
tccaatcttgtcttctcactttatt

SEQ ID NO: 2367111 - DNA, 25 bp, Homo sapien
tgtggcacattgaaggagttcaccc

SEQ ID NO: 2367112 - DNA, 25 bp, Homo sapien
ggtgtggcacattgaaggagttcac

SEQ ID NO: 2367113 - DNA, 25 bp, Homo sapien
caggtgtggcacattgaaggagttc

SEQ ID NO: 2367114 - DNA, 25 bp, Homo sapien
tgcaggtgtggcacattgaaggagt

SEQ ID NO: 2367115 - DNA, 25 bp, Homo sapien
cagctgccaggttaagagagcagtg

SEQ ID NO: 2367116 - DNA, 25 bp, Homo sapien
agcagctgccaggttaagagagcag

SEQ ID NO: 2367117 - DNA, 25 bp, Homo sapien
gctgccaggttaagagagcagtggg

SEQ ID NO: 2367118 - DNA, 25 bp, Homo sapien
tgccaggttaagagagcagtggggg

SEQ ID NO: 2367119 - DNA, 25 bp, Homo sapien
tgcataatacttcgtggagtcaaat

SEQ ID NO: 2367120 - DNA, 25 bp, Homo sapien
aatgcataatacttcgtggagtcaa

SEQ ID NO: 2367121 - DNA, 25 bp, Homo sapien
cgtggagtcaaattcacaactgtac

SEQ ID NO: 2367122 - DNA, 25 bp, Homo sapien
tcgtggagtcaaattcacaactgta

SEQ ID NO: 2367123 - DNA, 25 bp, Homo sapien
acttcatcatggcatatgctatctg

SEQ ID NO: 2367124 - DNA, 25 bp, Homo sapien
caaacttcatcatggcatatgctat

SEQ ID NO: 2367125 - DNA, 25 bp, Homo sapien
catcatggcatatgctatctgtctc

SEQ ID NO: 2367126 - DNA, 25 bp, Homo sapien
tcatggcatatgctatctgtctcat

SEQ ID NO: 2367127 - DNA, 25 bp, Homo sapien
gcacaaaacactccaggtatgtaac

SEQ ID NO: 2367128 - DNA, 25 bp, Homo sapien
cagggcttccgaaccacaaacttgt

SEQ ID NO: 2367129 - DNA, 25 bp, Homo sapien
attgcacaaaacactccaggtatgt

SEQ ID NO: 2367130 - DNA, 25 bp, Homo sapien
acactccaggtatgtaacctgctac

SEQ ID NO: 2367131 - DNA, 25 bp, Homo sapien
caagtctctggaggacttgagaagc

SEQ ID NO: 2367132 - DNA, 25 bp, Homo sapien
gtctctggaggacttgagaagcact

SEQ ID NO: 2367133 - DNA, 25 bp, Homo sapien
tctggaggacttgagaagcactgct

SEQ ID NO: 2367134 - DNA, 25 bp, Homo sapien
aaatccaagtctctggaggacttga

SEQ ID NO: 2367135 - DNA, 25 bp, Homo sapien
cagtcataatgatacagacaaacat

SEQ ID NO: 2367136 - DNA, 25 bp, Homo sapien
taatgatacagacaaacattccctt

SEQ ID NO: 2367137 - DNA, 25 bp, Homo sapien
tgatacagacaaacattcccttcca

SEQ ID NO: 2367138 - DNA, 25 bp, Homo sapien
acagacaaacattcccttccataca

SEQ ID NO: 2367139 - DNA, 25 bp, Homo sapien
taaactactgtagtgcagtcagagt

SEQ ID NO: 2367140 - DNA, 25 bp, Homo sapien
tgatctgtcactgagttaacccaag

SEQ ID NO: 2367141 - DNA, 25 bp, Homo sapien
gatcaacaagcagtttcagtccaca

SEQ ID NO: 2367142 - DNA, 25 bp, Homo sapien
ccttttgtacgttcttcaacactga

SEQ ID NO: 2367143 - DNA, 25 bp, Homo sapien
ctcttgacttaagtgaaagtactct

SEQ ID NO: 2367144 - DNA, 25 bp, Homo sapien
tgaaactcttgacttaagtgaaagt

SEQ ID NO: 2367145 - DNA, 25 bp, Homo sapien
gaaactcttgacttaagtgaaagta

SEQ ID NO: 2367146 - DNA, 25 bp, Homo sapien
aactcttgacttaagtgaaagtact

SEQ ID NO: 2367147 - DNA, 25 bp, Homo sapien
tcgccatgctgcacaaagagaaatt

SEQ ID NO: 2367148 - DNA, 25 bp, Homo sapien
catcgccatgctgcacaaagagaaa

SEQ ID NO: 2367149 - DNA, 25 bp, Homo sapien
gccatgctgcacaaagagaaattcc

SEQ ID NO: 2367150 - DNA, 25 bp, Homo sapien
ccatcgccatgctgcacaaagagaa

SEQ ID NO: 2367151 - DNA, 25 bp, Homo sapien
gagcttggatggtcatggcctttac

SEQ ID NO: 2367152 - DNA, 25 bp, Homo sapien
gggagcttggatggtcatggccttt

SEQ ID NO: 2367153 - DNA, 25 bp, Homo sapien
ggagcttggatggtcatggccttta

SEQ ID NO: 2367154 - DNA, 25 bp, Homo sapien
tggtggcgccaagtcccttgtggca

SEQ ID NO: 2367155 - DNA, 25 bp, Homo sapien
taaagacagatagagaggaaagcac

SEQ ID NO: 2367156 - DNA, 25 bp, Homo sapien
gcagagaggaatcagttggacctca

SEQ ID NO: 2367157 - DNA, 25 bp, Homo sapien
tagagaggaaagcaccagccgtggt

SEQ ID NO: 2367158 - DNA, 25 bp, Homo sapien
tattcactctaagcatagcaggagc

SEQ ID NO: 2367159 - DNA, 25 bp, Homo sapien
tgccattgggttttattgggcccac

SEQ ID NO: 2367160 - DNA, 25 bp, Homo sapien
caggagcttgcctagaggtgagttc

SEQ ID NO: 2367161 - DNA, 25 bp, Homo sapien
tagacaaagcataggtcaggacatg

SEQ ID NO: 2367162 - DNA, 25 bp, Homo sapien
cacacgcctcggcctccgaaagtgt

SEQ ID NO: 2367163 - DNA, 25 bp, Homo sapien
tgagccaccgcgcccagcctttttt

SEQ ID NO: 2367164 - DNA, 25 bp, Homo sapien
gaaagtgttgggattacaggtgtga

SEQ ID NO: 2367165 - DNA, 25 bp, Homo sapien
gacaccccaggaggctcccatctgt

SEQ ID NO: 2367166 - DNA, 25 bp, Homo sapien
acaccccaggaggctcccatctgtc

SEQ ID NO: 2367167 - DNA, 25 bp, Homo sapien
cgctcacgtggacaccccaggaggc

SEQ ID NO: 2367168 - DNA, 25 bp, Homo sapien
gcgcgctcacgtggacaccccagga

SEQ ID NO: 2367169 - DNA, 25 bp, Homo sapien
ctgcagagggaggtaggtaagcgat

SEQ ID NO: 2367170 - DNA, 25 bp, Homo sapien
taggtaagcgatagtggagaacgcc

SEQ ID NO: 2367171 - DNA, 25 bp, Homo sapien
ggagaacgccccgagtcagcggtca

SEQ ID NO: 2367172 - DNA, 25 bp, Homo sapien
cccgagtcagcggtcacgtgactgg

SEQ ID NO: 2367173 - DNA, 25 bp, Homo sapien
agcggggagagaaatgcggcgcggg

SEQ ID NO: 2367174 - DNA, 25 bp, Homo sapien
aagcagcggggagagaaatgcggcg

SEQ ID NO: 2367175 - DNA, 25 bp, Homo sapien
gcagcggggagagaaatgcggcgcg

SEQ ID NO: 2367176 - DNA, 25 bp, Homo sapien
atgcggcgcggggcacagcggcagc

SEQ ID NO: 2367177 - DNA, 25 bp, Homo sapien
cttgtagaaagtgaccgtatccagg

SEQ ID NO: 2367178 - DNA, 25 bp, Homo sapien
ttgtagaaagtgaccgtatccaggg

SEQ ID NO: 2367179 - DNA, 25 bp, Homo sapien
tctcccacttgggactcgagggttg

SEQ ID NO: 2367180 - DNA, 25 bp, Homo sapien
tgcatctttgcaagggtggatgcaa

SEQ ID NO: 2367181 - DNA, 25 bp, Homo sapien
gggcacccagttccctcggctgcat

SEQ ID NO: 2367182 - DNA, 25 bp, Homo sapien
agggttggatctcgccaggcaccgc

SEQ ID NO: 2367183 - DNA, 25 bp, Homo sapien
caagtgccaaatccacgacagggaa

SEQ ID NO: 2367184 - DNA, 25 bp, Homo sapien
cgacagggaacgcttgaaaatagga

SEQ ID NO: 2367185 - DNA, 25 bp, Homo sapien
gaaaataggagacttcaaccactgg

SEQ ID NO: 2367186 - DNA, 25 bp, Homo sapien
ttccccacaatgagtacaaaacctg

SEQ ID NO: 2367187 - DNA, 25 bp, Homo sapien
aacaaggctgcagacatactaaggc

SEQ ID NO: 2367188 - DNA, 25 bp, Homo sapien
gctagataggccagagtttgaaccc

SEQ ID NO: 2367189 - DNA, 25 bp, Homo sapien
tacctacaaaggagttggcatcatg

SEQ ID NO: 2367190 - DNA, 25 bp, Homo sapien
cagataagctagtgagaggccaggc

SEQ ID NO: 2367191 - DNA, 25 bp, Homo sapien
ggcgtatagagctgagcaagtgggt

SEQ ID NO: 2367192 - DNA, 25 bp, Homo sapien
gggcgtatagagctgagcaagtggg

SEQ ID NO: 2367193 - DNA, 25 bp, Homo sapien
ctgagggcgtatagagctgagcaag

SEQ ID NO: 2367194 - DNA, 25 bp, Homo sapien
gagggcgtatagagctgagcaagtg

SEQ ID NO: 2367195 - DNA, 25 bp, Homo sapien
agatcatcgctggaagccgagtttt

SEQ ID NO: 2367196 - DNA, 25 bp, Homo sapien
ctctgccaccaagagatcatcgctg

SEQ ID NO: 2367197 - DNA, 25 bp, Homo sapien
tctgccaccaagagatcatcgctgg

SEQ ID NO: 2367198 - DNA, 25 bp, Homo sapien
ggaagccgagttttcagcaagacgc

SEQ ID NO: 2367199 - DNA, 25 bp, Homo sapien
gaagtcctccccttggtctaagatc

SEQ ID NO: 2367200 - DNA, 25 bp, Homo sapien
gtcgtatacaggcaggcaaccaggc

SEQ ID NO: 2367201 - DNA, 25 bp, Homo sapien
aggcatacctaggtagaccccttgc

SEQ ID NO: 2367202 - DNA, 25 bp, Homo sapien
cacacttgagaggttatcttgcccc

SEQ ID NO: 2367203 - DNA, 25 bp, Homo sapien
ccctggaaaatcacagacagccttt

SEQ ID NO: 2367204 - DNA, 25 bp, Homo sapien
aaccctggaaaatcacagacagcct

SEQ ID NO: 2367205 - DNA, 25 bp, Homo sapien
ccaaaccctggaaaatcacagacag

SEQ ID NO: 2367206 - DNA, 25 bp, Homo sapien
ccaccaaaccctggaaaatcacaga

SEQ ID NO: 2367207 - DNA, 25 bp, Homo sapien
catgttagcatcaatgtccaggcat

SEQ ID NO: 2367208 - DNA, 25 bp, Homo sapien
catcccaagcatggtcatgttagca

SEQ ID NO: 2367209 - DNA, 25 bp, Homo sapien
catactcagggctcagaatcgtggg

SEQ ID NO: 2367210 - DNA, 25 bp, Homo sapien
ttatattccacaagggactcacagc

SEQ ID NO: 2367211 - DNA, 25 bp, Homo sapien
agtaagtgctccagctatccccaga

SEQ ID NO: 2367212 - DNA, 25 bp, Homo sapien
tgctccagctatccccagaccagct

SEQ ID NO: 2367213 - DNA, 25 bp, Homo sapien
ctgagtaagtgctccagctatcccc

SEQ ID NO: 2367214 - DNA, 25 bp, Homo sapien
ggtgtcatttcaccagccacctgag

SEQ ID NO: 2367215 - DNA, 25 bp, Homo sapien
aaagaggaaagcaggtcatagacga

SEQ ID NO: 2367216 - DNA, 25 bp, Homo sapien
tgggaaagtggagtctataccagct

SEQ ID NO: 2367217 - DNA, 25 bp, Homo sapien
taacaaaggtatgccagtttccaca

SEQ ID NO: 2367218 - DNA, 25 bp, Homo sapien
tataccagcttagattcaaagagga

SEQ ID NO: 2367219 - DNA, 25 bp, Homo sapien
tgtatgagccccaaagagtcagttt

SEQ ID NO: 2367220 - DNA, 25 bp, Homo sapien
gatcttggttcaccagtctcggcct

SEQ ID NO: 2367221 - DNA, 25 bp, Homo sapien
ggtacttgggtatacctcactgcca

SEQ ID NO: 2367222 - DNA, 25 bp, Homo sapien
tatgaattaactccatcccaaggtt

SEQ ID NO: 2367223 - DNA, 25 bp, Homo sapien
ggaaaccctcatgtactataaattg

SEQ ID NO: 2367224 - DNA, 25 bp, Homo sapien
tatcgactgaccatgatcaatctag

SEQ ID NO: 2367225 - DNA, 25 bp, Homo sapien
aaagatatctgggacctctactggc

SEQ ID NO: 2367226 - DNA, 25 bp, Homo sapien
cagtgggctagccttggtcctcagg

SEQ ID NO: 2367227 - DNA, 25 bp, Homo sapien
gctgggaatatctgtgtacgcaaag

SEQ ID NO: 2367228 - DNA, 25 bp, Homo sapien
caatggaggattggtcttgaagacc

SEQ ID NO: 2367229 - DNA, 25 bp, Homo sapien
gaggaaattaagcatccaatggagg

SEQ ID NO: 2367230 - DNA, 25 bp, Homo sapien
ctgctccagtgaaatgtggtacttt

SEQ ID NO: 2367231 - DNA, 25 bp, Homo sapien
tatataaaccagaagcgggaccctc

SEQ ID NO: 2367232 - DNA, 25 bp, Homo sapien
ggaccctcatctgggtttgaccact

SEQ ID NO: 2367233 - DNA, 25 bp, Homo sapien
cgggaccctcatctgggtttgacca

SEQ ID NO: 2367234 - DNA, 25 bp, Homo sapien
ttattgtatataaaccagaagcggg

SEQ ID NO: 2367235 - DNA, 25 bp, Homo sapien
tccgtccgtctttaatttctccaga

SEQ ID NO: 2367236 - DNA, 25 bp, Homo sapien
gaatgcagttgaattagcgcccgtg

SEQ ID NO: 2367237 - DNA, 25 bp, Homo sapien
aacagctcgccgaggtgtcccatgg

SEQ ID NO: 2367238 - DNA, 25 bp, Homo sapien
gtttaaaagccgcatcgaatgcagt

SEQ ID NO: 2367239 - DNA, 25 bp, Homo sapien
cacactattgaggagcacgtcacca

SEQ ID NO: 2367240 - DNA, 25 bp, Homo sapien
tagcaagtgcccttagaccaaagct

SEQ ID NO: 2367241 - DNA, 25 bp, Homo sapien
tccaagggtataagaaacagtccat

SEQ ID NO: 2367242 - DNA, 25 bp, Homo sapien
taagcgttcatagcctgggatgccg

SEQ ID NO: 2367243 - DNA, 25 bp, Homo sapien
atggaatcttaactccgtcccaggc

SEQ ID NO: 2367244 - DNA, 25 bp, Homo sapien
gatggaatcttaactccgtcccagg

SEQ ID NO: 2367245 - DNA, 25 bp, Homo sapien
tggaatcttaactccgtcccaggct

SEQ ID NO: 2367246 - DNA, 25 bp, Homo sapien
ggaatcttaactccgtcccaggctg

SEQ ID NO: 2367247 - DNA, 25 bp, Homo sapien
tttatcagcataattacagattaat

SEQ ID NO: 2367248 - DNA, 25 bp, Homo sapien
gaatttatcagcataattacagatt

SEQ ID NO: 2367249 - DNA, 25 bp, Homo sapien
tcagaatttatcagcataattacag

SEQ ID NO: 2367250 - DNA, 25 bp, Homo sapien
cctttcagaatttatcagcataatt

SEQ ID NO: 2367251 - DNA, 25 bp, Homo sapien
caagatgtaaccattcggagaaaac

SEQ ID NO: 2367252 - DNA, 25 bp, Homo sapien
taaatacataactagaactggtatg

SEQ ID NO: 2367253 - DNA, 25 bp, Homo sapien
gatgaatggtacatgggatctcatt

SEQ ID NO: 2367254 - DNA, 25 bp, Homo sapien
tccttactggcatcttaataggatt

SEQ ID NO: 2367255 - DNA, 25 bp, Homo sapien
taaattgaagcaaattcattacaga

SEQ ID NO: 2367256 - DNA, 25 bp, Homo sapien
tgttaaactgcaggatgagtaggat

SEQ ID NO: 2367257 - DNA, 25 bp, Homo sapien
aattacatatactgaagctgggtgc

SEQ ID NO: 2367258 - DNA, 25 bp, Homo sapien
gaagcaaattcattacagatgttaa

SEQ ID NO: 2367259 - DNA, 25 bp, Homo sapien
gagaccgggtttctccatgttcgtg

SEQ ID NO: 2367260 - DNA, 25 bp, Homo sapien
agaccgggtttctccatgttcgtga

SEQ ID NO: 2367261 - DNA, 25 bp, Homo sapien
gaccgggtttctccatgttcgtgag

SEQ ID NO: 2367262 - DNA, 25 bp, Homo sapien
ccgggtttctccatgttcgtgaggc

SEQ ID NO: 2367263 - DNA, 25 bp, Homo sapien
ttcatttgctttggggttttagcta

SEQ ID NO: 2367264 - DNA, 25 bp, Homo sapien
ggattacagacgtccatcaccaccc

SEQ ID NO: 2367265 - DNA, 25 bp, Homo sapien
tttagctaaacaataaaatgattct

SEQ ID NO: 2367266 - DNA, 25 bp, Homo sapien
tgggattacagacgtccatcaccac

SEQ ID NO: 2367267 - DNA, 25 bp, Homo sapien
tagttgagataacccgctatcttgg

SEQ ID NO: 2367268 - DNA, 25 bp, Homo sapien
cagtctgtaactgaacaagtagttg

SEQ ID NO: 2367269 - DNA, 25 bp, Homo sapien
gataacccgctatcttgggaccagt

SEQ ID NO: 2367270 - DNA, 25 bp, Homo sapien
tgaacaagtagttgagataacccgc

SEQ ID NO: 2367271 - DNA, 25 bp, Homo sapien
cgggaaggacaatagaggcaataaa

SEQ ID NO: 2367272 - DNA, 25 bp, Homo sapien
gcttcgggaaggacaatagaggcaa

SEQ ID NO: 2367273 - DNA, 25 bp, Homo sapien
cttcgggaaggacaatagaggcaat

SEQ ID NO: 2367274 - DNA, 25 bp, Homo sapien
ttcgggaaggacaatagaggcaata

SEQ ID NO: 2367275 - DNA, 25 bp, Homo sapien
aatagataatttgggcagggtggca

SEQ ID NO: 2367276 - DNA, 25 bp, Homo sapien
cagggtggcagatactatattaata

SEQ ID NO: 2367277 - DNA, 25 bp, Homo sapien
ggcagggtggcagatactatattaa

SEQ ID NO: 2367278 - DNA, 25 bp, Homo sapien
ataacaatagataatttgggcaggg

SEQ ID NO: 2367279 - DNA, 25 bp, Homo sapien
tctagctggttcttcaggacggaga

SEQ ID NO: 2367280 - DNA, 25 bp, Homo sapien
cggctctctcgaacttttttggcag

SEQ ID NO: 2367281 - DNA, 25 bp, Homo sapien
agaaacagcagcctgacgctcagtt

SEQ ID NO: 2367282 - DNA, 25 bp, Homo sapien
tgcgattaatcacagccaagtctag

SEQ ID NO: 2367283 - DNA, 25 bp, Homo sapien
aattaactgaatctggatttctggt

SEQ ID NO: 2367284 - DNA, 25 bp, Homo sapien
taaattaactgaatctggatttctg

SEQ ID NO: 2367285 - DNA, 25 bp, Homo sapien
aaattaactgaatctggatttctgg

SEQ ID NO: 2367286 - DNA, 25 bp, Homo sapien
gataacaccgttgtcgctcccaggg

SEQ ID NO: 2367287 - DNA, 25 bp, Homo sapien
cttctgcgcgtcgattggctccctg

SEQ ID NO: 2367288 - DNA, 25 bp, Homo sapien
cagctgtcggcccattggataacac

SEQ ID NO: 2367289 - DNA, 25 bp, Homo sapien
acttccgcccatcgcggaggagcgc

SEQ ID NO: 2367290 - DNA, 25 bp, Homo sapien
acgagaggagaaacgctgagttgac

SEQ ID NO: 2367291 - DNA, 25 bp, Homo sapien
gaaacgctgagttgacacactagct

SEQ ID NO: 2367292 - DNA, 25 bp, Homo sapien
gcactgaacaacggccctcagagct

SEQ ID NO: 2367293 - DNA, 25 bp, Homo sapien
acggagcctcctctgtcagaccccg

SEQ ID NO: 2367294 - DNA, 25 bp, Homo sapien
gcttcgaggccgcattaggccactc

SEQ ID NO: 2367295 - DNA, 25 bp, Homo sapien
gatgctggacccttcctaaactgga

SEQ ID NO: 2367296 - DNA, 25 bp, Homo sapien
gactcgggtccttcggcttcgaggc

SEQ ID NO: 2367297 - DNA, 25 bp, Homo sapien
acgaaagcggaaggccacctgagtt

SEQ ID NO: 2367298 - DNA, 25 bp, Homo sapien
agaggtgaaagtcttggtccccact

SEQ ID NO: 2367299 - DNA, 25 bp, Homo sapien
taagaggtgaaagtcttggtcccca

SEQ ID NO: 2367300 - DNA, 25 bp, Homo sapien
tcttttaatcccgactacaatccta

SEQ ID NO: 2367301 - DNA, 25 bp, Homo sapien
tcccgactacaatcctaagaggtga

SEQ ID NO: 2367302 - DNA, 25 bp, Homo sapien
accacaaaggaagacatgaactttc

SEQ ID NO: 2367303 - DNA, 25 bp, Homo sapien
ctgaaaaccacaaaggaagacatga

SEQ ID NO: 2367304 - DNA, 25 bp, Homo sapien
aaaaccacaaaggaagacatgaact

SEQ ID NO: 2367305 - DNA, 25 bp, Homo sapien
ccacaaaggaagacatgaactttct

SEQ ID NO: 2367306 - DNA, 25 bp, Homo sapien
gtcgagtttcctggtcatctagaaa

SEQ ID NO: 2367307 - DNA, 25 bp, Homo sapien
cagttgtcacacagtcgagtttcct

SEQ ID NO: 2367308 - DNA, 25 bp, Homo sapien
gtttcctggtcatctagaaattcag

SEQ ID NO: 2367309 - DNA, 25 bp, Homo sapien
cagtcgagtttcctggtcatctaga

SEQ ID NO: 2367310 - DNA, 25 bp, Homo sapien
ctttctcacttagtttagtggttca

SEQ ID NO: 2367311 - DNA, 25 bp, Homo sapien
tagtggttcaaagatcatatctaag

SEQ ID NO: 2367312 - DNA, 25 bp, Homo sapien
atgaaatcctgaaccctttcctcca

SEQ ID NO: 2367313 - DNA, 25 bp, Homo sapien
gctggatgcttcctgactacaggaa

SEQ ID NO: 2367314 - DNA, 25 bp, Homo sapien
gccatgtgagtctccatgtcagatt

SEQ ID NO: 2367315 - DNA, 25 bp, Homo sapien
caggtaggacacataccaatgttcc

SEQ ID NO: 2367316 - DNA, 25 bp, Homo sapien
gacagtggatctcatggatggtaaa

SEQ ID NO: 2367317 - DNA, 25 bp, Homo sapien
aatggttccttacaggtaggacaca

SEQ ID NO: 2367318 - DNA, 25 bp, Homo sapien
ctcatgcttctttaacagcctcttc

SEQ ID NO: 2367319 - DNA, 25 bp, Homo sapien
ctccaacttcttgttacatttgcag

SEQ ID NO: 2367320 - DNA, 25 bp, Homo sapien
gcttctttaacagcctcttctccaa

SEQ ID NO: 2367321 - DNA, 25 bp, Homo sapien
acttcttgttacatttgcaggtcac

SEQ ID NO: 2367322 - DNA, 25 bp, Homo sapien
tgtagtaccacctatgcaggtagat

SEQ ID NO: 2367323 - DNA, 25 bp, Homo sapien
gatttcagacgtgcgtatccacgcc

SEQ ID NO: 2367324 - DNA, 25 bp, Homo sapien
tcattcaacgttggccagttttggc

SEQ ID NO: 2367325 - DNA, 25 bp, Homo sapien
cagttttggccagatgccatagctc

SEQ ID NO: 2367326 - DNA, 25 bp, Homo sapien
gtatataccttggtgaatttttaca

SEQ ID NO: 2367327 - DNA, 25 bp, Homo sapien
tgaaatgcacaaatctttaagtata

SEQ ID NO: 2367328 - DNA, 25 bp, Homo sapien
tataccttggtgaatttttacatat

SEQ ID NO: 2367329 - DNA, 25 bp, Homo sapien
atgaaatgcacaaatctttaagtat

SEQ ID NO: 2367330 - DNA, 25 bp, Homo sapien
cggcctccaattcagtcttaagtac

SEQ ID NO: 2367331 - DNA, 25 bp, Homo sapien
ccggcctccaattcagtcttaagta

SEQ ID NO: 2367332 - DNA, 25 bp, Homo sapien
cccggcctccaattcagtcttaagt

SEQ ID NO: 2367333 - DNA, 25 bp, Homo sapien
ggaaagttctaaatcacagtgctgg

SEQ ID NO: 2367334 - DNA, 25 bp, Homo sapien
tcacaaggacattgcgaccacagtt

SEQ ID NO: 2367335 - DNA, 25 bp, Homo sapien
gcaagccgcaaagggcactcagtct

SEQ ID NO: 2367336 - DNA, 25 bp, Homo sapien
cagttgccacatagttccgtccggg

SEQ ID NO: 2367337 - DNA, 25 bp, Homo sapien
gaggcttggccttcattttgcagac

SEQ ID NO: 2367338 - DNA, 25 bp, Homo sapien
agagacctgggaccgccatgagact

SEQ ID NO: 2367339 - DNA, 25 bp, Homo sapien
catgagactggtcggcctcacatac

SEQ ID NO: 2367340 - DNA, 25 bp, Homo sapien
acttagggccaacatgaagtccaag

SEQ ID NO: 2367341 - DNA, 25 bp, Homo sapien
tgatggtcaatcagcagttcctctg

SEQ ID NO: 2367342 - DNA, 25 bp, Homo sapien
ggcaacatgatctcgtcagctgcac

SEQ ID NO: 2367343 - DNA, 25 bp, Homo sapien
aaattcacaaggcaacatgatctcg

SEQ ID NO: 2367344 - DNA, 25 bp, Homo sapien
tgggtagagctcctcacaaaattca

SEQ ID NO: 2367345 - DNA, 25 bp, Homo sapien
taaaagtcctcaagtaattcataac

SEQ ID NO: 2367346 - DNA, 25 bp, Homo sapien
agtcctcaagtaattcataacacac

SEQ ID NO: 2367347 - DNA, 25 bp, Homo sapien
aagtcctcaagtaattcataacaca

SEQ ID NO: 2367348 - DNA, 25 bp, Homo sapien
aaagtcctcaagtaattcataacac

SEQ ID NO: 2367349 - DNA, 25 bp, Homo sapien
ggaagagctgccagtattgagtgaa

SEQ ID NO: 2367350 - DNA, 25 bp, Homo sapien
gaagagctgccagtattgagtgaag

SEQ ID NO: 2367351 - DNA, 25 bp, Homo sapien
aaggcacgtgaagggttacagcttg

SEQ ID NO: 2367352 - DNA, 25 bp, Homo sapien
tgaaggtaaggcacgtgaagggtta

SEQ ID NO: 2367353 - DNA, 25 bp, Homo sapien
gaagatgacatcaggttcctccacc

SEQ ID NO: 2367354 - DNA, 25 bp, Homo sapien
tccacagggtgtgaattgctcaggc

SEQ ID NO: 2367355 - DNA, 25 bp, Homo sapien
caaagagtctaactggttacttgca

SEQ ID NO: 2367356 - DNA, 25 bp, Homo sapien
tcttccagctgtaccccacagaatt

SEQ ID NO: 2367357 - DNA, 25 bp, Homo sapien
tgcaatagtgagaacggggaaaaga

SEQ ID NO: 2367358 - DNA, 25 bp, Homo sapien
gtgcaatagtgagaacggggaaaag

SEQ ID NO: 2367359 - DNA, 25 bp, Homo sapien
actattcaagtgcaatagtgagaac

SEQ ID NO: 2367360 - DNA, 25 bp, Homo sapien
attcaagtgcaatagtgagaacggg

SEQ ID NO: 2367361 - DNA, 25 bp, Homo sapien
ggaatcccctctgtcacatggttgg

SEQ ID NO: 2367362 - DNA, 25 bp, Homo sapien
acatggttggttgcagtggctgggc

SEQ ID NO: 2367363 - DNA, 25 bp, Homo sapien
tccagtctaggaatcccctctgtca

SEQ ID NO: 2367364 - DNA, 25 bp, Homo sapien
gtggctgggcgttggtcacactggt

SEQ ID NO: 2367365 - DNA, 25 bp, Homo sapien
tatctcatggatgtccgcaaagcca

SEQ ID NO: 2367366 - DNA, 25 bp, Homo sapien
catggatgtccgcaaagccattacc

SEQ ID NO: 2367367 - DNA, 25 bp, Homo sapien
tctcatggatgtccgcaaagccatt

SEQ ID NO: 2367368 - DNA, 25 bp, Homo sapien
tgtatctcatggatgtccgcaaagc

SEQ ID NO: 2367369 - DNA, 25 bp, Homo sapien
ggcctgatgttgatctcgatagctg

SEQ ID NO: 2367370 - DNA, 25 bp, Homo sapien
cgatagctggttataggtagctgtc

SEQ ID NO: 2367371 - DNA, 25 bp, Homo sapien
ttagtatcatccaggtaaccagaag

SEQ ID NO: 2367372 - DNA, 25 bp, Homo sapien
aggaggtgggcccattagctgtttc

SEQ ID NO: 2367373 - DNA, 25 bp, Homo sapien
gctgtctcgattccgcccctggatg

SEQ ID NO: 2367374 - DNA, 25 bp, Homo sapien
tcactgaaacgtgcccaggggctat

SEQ ID NO: 2367375 - DNA, 25 bp, Homo sapien
gaaagagggcacaatgttttctggg

SEQ ID NO: 2367376 - DNA, 25 bp, Homo sapien
ctagctccgtatctccctgaaggcc

SEQ ID NO: 2367377 - DNA, 25 bp, Homo sapien
gaaaacaattagaaactagctcctg

SEQ ID NO: 2367378 - DNA, 25 bp, Homo sapien
gagtcaggtgacaatacagggaaaa

SEQ ID NO: 2367379 - DNA, 25 bp, Homo sapien
gaagcagtcctatgctagcagacaa

SEQ ID NO: 2367380 - DNA, 25 bp, Homo sapien
gcaagggtaaccaggcctttgccca

SEQ ID NO: 2367381 - DNA, 25 bp, Homo sapien
cagttctgctgcggtagttggcagc

SEQ ID NO: 2367382 - DNA, 25 bp, Homo sapien
tgcagttctgctgcggtagttggca

SEQ ID NO: 2367383 - DNA, 25 bp, Homo sapien
tttgcagttctgctgcggtagttgg

SEQ ID NO: 2367384 - DNA, 25 bp, Homo sapien
ttgcagttctgctgcggtagttggc

SEQ ID NO: 2367385 - DNA, 25 bp, Homo sapien
atccccagctccctgttgcttggaa

SEQ ID NO: 2367386 - DNA, 25 bp, Homo sapien
ccagctccctgttgcttggaaggct

SEQ ID NO: 2367387 - DNA, 25 bp, Homo sapien
ctccctgttgcttggaaggctttgc

SEQ ID NO: 2367388 - DNA, 25 bp, Homo sapien
cccagctccctgttgcttggaaggc

SEQ ID NO: 2367389 - DNA, 25 bp, Homo sapien
caatcgagtgtggacagacgcagta

SEQ ID NO: 2367390 - DNA, 25 bp, Homo sapien
taaggctgaagcgttcctcaaccgc

SEQ ID NO: 2367391 - DNA, 25 bp, Homo sapien
gaaccgatgtaaagtctctggagac

SEQ ID NO: 2367392 - DNA, 25 bp, Homo sapien
cgacaataagtcaaaagggagccct

SEQ ID NO: 2367393 - DNA, 25 bp, Homo sapien
catgctgtgtaaaggaagctcacta

SEQ ID NO: 2367394 - DNA, 25 bp, Homo sapien
tatggttgcatttaacaaacttttc

SEQ ID NO: 2367395 - DNA, 25 bp, Homo sapien
gtgtgctgtaaagttacttgatgta

SEQ ID NO: 2367396 - DNA, 25 bp, Homo sapien
tctgatgctatttacaccatgctgt

SEQ ID NO: 2367397 - DNA, 25 bp, Homo sapien
cattgaggtccagacagatccaaac

SEQ ID NO: 2367398 - DNA, 25 bp, Homo sapien
tatctgctgctaacgtggctgcttc

SEQ ID NO: 2367399 - DNA, 25 bp, Homo sapien
gcttctccgagagcacattgaggtc

SEQ ID NO: 2367400 - DNA, 25 bp, Homo sapien
gatgacaagctgtaaggtatctgct

SEQ ID NO: 2367401 - DNA, 25 bp, Homo sapien
gaataagtttcagcgcataggccgt

SEQ ID NO: 2367402 - DNA, 25 bp, Homo sapien
gaatagttctggcatctgagggcct

SEQ ID NO: 2367403 - DNA, 25 bp, Homo sapien
tccaaccagaattcgcaagcagtgt

SEQ ID NO: 2367404 - DNA, 25 bp, Homo sapien
tctatgagagcccatgttccaggac

SEQ ID NO: 2367405 - DNA, 25 bp, Homo sapien
gcagtaagccaggaccgcgccactg

SEQ ID NO: 2367406 - DNA, 25 bp, Homo sapien
cagtaagccaggaccgcgccactgc

SEQ ID NO: 2367407 - DNA, 25 bp, Homo sapien
gttgcagtaagccaggaccgcgcca

SEQ ID NO: 2367408 - DNA, 25 bp, Homo sapien
gaggttgcagtaagccaggaccgcg

SEQ ID NO: 2367409 - DNA, 25 bp, Homo sapien
tgggaagtgcttgttaattactaca

SEQ ID NO: 2367410 - DNA, 25 bp, Homo sapien
tactacaaaagagaagactatgagc

SEQ ID NO: 2367411 - DNA, 25 bp, Homo sapien
gattttgatcatagtccacctaacc

SEQ ID NO: 2367412 - DNA, 25 bp, Homo sapien
tagagcagtggtctcacatgatttt

SEQ ID NO: 2367413 - DNA, 25 bp, Homo sapien
ccttagtgcttgtaggttcatcctc

SEQ ID NO: 2367414 - DNA, 25 bp, Homo sapien
tccccaaggatataactggacccta

SEQ ID NO: 2367415 - DNA, 25 bp, Homo sapien
agggtagtgccttggattcagcaga

SEQ ID NO: 2367416 - DNA, 25 bp, Homo sapien
ggaaccattaataaacctcagagag

SEQ ID NO: 2367417 - DNA, 25 bp, Homo sapien
tggttagggctcttctacaatgtat

SEQ ID NO: 2367418 - DNA, 25 bp, Homo sapien
ccaccgccatcaggcattgcctctt

SEQ ID NO: 2367419 - DNA, 25 bp, Homo sapien
tcatctagatgaccaaattcatttc

SEQ ID NO: 2367420 - DNA, 25 bp, Homo sapien
tccagataataataacaccctcatt

SEQ ID NO: 2367421 - DNA, 25 bp, Homo sapien
ttaaatgagaattgatcaggtcttc

SEQ ID NO: 2367422 - DNA, 25 bp, Homo sapien
tgagaattgatcaggtcttctcttg

SEQ ID NO: 2367423 - DNA, 25 bp, Homo sapien
aatgagaattgatcaggtcttctct

SEQ ID NO: 2367424 - DNA, 25 bp, Homo sapien
taaatgagaattgatcaggtcttct

SEQ ID NO: 2367425 - DNA, 25 bp, Homo sapien
tcacttttaggtattcacacaagaa

SEQ ID NO: 2367426 - DNA, 25 bp, Homo sapien
caatggactctaatcagcaataaaa

SEQ ID NO: 2367427 - DNA, 25 bp, Homo sapien
caacataaacgtccatcagtaagtg

SEQ ID NO: 2367428 - DNA, 25 bp, Homo sapien
gctttgacattaaggttcgtaacag

SEQ ID NO: 2367429 - DNA, 25 bp, Homo sapien
tcagacggcgttgctgcttaaaacc

SEQ ID NO: 2367430 - DNA, 25 bp, Homo sapien
tctttgggtgaaagcgtagtactcc

SEQ ID NO: 2367431 - DNA, 25 bp, Homo sapien
tgagtccttgccagctaatagtagc

SEQ ID NO: 2367432 - DNA, 25 bp, Homo sapien
tgtggtgcaccagaccagaagtgca

SEQ ID NO: 2367433 - DNA, 25 bp, Homo sapien
tgtactcccacgaactctctaatag

SEQ ID NO: 2367434 - DNA, 25 bp, Homo sapien
ggacattgagtaaaaggtcacttgt

SEQ ID NO: 2367435 - DNA, 25 bp, Homo sapien
ctctacatgcgccttttactgttct

SEQ ID NO: 2367436 - DNA, 25 bp, Homo sapien
taactgtgatttgtttaggacattg

SEQ ID NO: 2367437 - DNA, 25 bp, Homo sapien
cttcgaccgagcgcgcagcttcggg

SEQ ID NO: 2367438 - DNA, 25 bp, Homo sapien
tcgtcctcttcgaccgagcgcgcag

SEQ ID NO: 2367439 - DNA, 25 bp, Homo sapien
cctcttcgaccgagcgcgcagcttc

SEQ ID NO: 2367440 - DNA, 25 bp, Homo sapien
cagccgaatcaaccccagcgatcaa

SEQ ID NO: 2367441 - DNA, 25 bp, Homo sapien
gtcagctcagcttgattataccaaa

SEQ ID NO: 2367442 - DNA, 25 bp, Homo sapien
ttggaacaccatctgtattcctcca

SEQ ID NO: 2367443 - DNA, 25 bp, Homo sapien
ccaagagtaaccatatattagtttt

SEQ ID NO: 2367444 - DNA, 25 bp, Homo sapien
ccccagatttccaagagtaaccata

SEQ ID NO: 2367445 - DNA, 25 bp, Homo sapien
caagcgcccttcacatcgaggatgg

SEQ ID NO: 2367446 - DNA, 25 bp, Homo sapien
ccttgcgaggactgtggaatgccca

SEQ ID NO: 2367447 - DNA, 25 bp, Homo sapien
gaataccgcctgaatgccttgcgag

SEQ ID NO: 2367448 - DNA, 25 bp, Homo sapien
gaatcagagcaatgcctatgcccgg

SEQ ID NO: 2367449 - DNA, 25 bp, Homo sapien
cagctccttggttcttatgaaattc

SEQ ID NO: 2367450 - DNA, 25 bp, Homo sapien
tttccatagagttgatgttctgttt

SEQ ID NO: 2367451 - DNA, 25 bp, Homo sapien
gttttaacctggtaatggtggctgc

SEQ ID NO: 2367452 - DNA, 25 bp, Homo sapien
tttaacctggtaatggtggctgcca

SEQ ID NO: 2367453 - DNA, 25 bp, Homo sapien
aggcccaacaggctttcaggcttgt

SEQ ID NO: 2367454 - DNA, 25 bp, Homo sapien
gcaaaaggcccaacaggctttcagg

SEQ ID NO: 2367455 - DNA, 25 bp, Homo sapien
ggcccaacaggctttcaggcttgtc

SEQ ID NO: 2367456 - DNA, 25 bp, Homo sapien
gcccaacaggctttcaggcttgtct

SEQ ID NO: 2367457 - DNA, 25 bp, Homo sapien
gaaaccagacaaacaggagtatata

SEQ ID NO: 2367458 - DNA, 25 bp, Homo sapien
gactaatctgtagtggttacctggg

SEQ ID NO: 2367459 - DNA, 25 bp, Homo sapien
gaatgaaccgttggtactcacaaca

SEQ ID NO: 2367460 - DNA, 25 bp, Homo sapien
ctcacaacatggatttatgcagagt

SEQ ID NO: 2367461 - DNA, 25 bp, Homo sapien
tattgacagagaagctgattgactt

SEQ ID NO: 2367462 - DNA, 25 bp, Homo sapien
gaatagcttacttgtgagaattcca

SEQ ID NO: 2367463 - DNA, 25 bp, Homo sapien
tacaaactgcggttgggaacaagca

SEQ ID NO: 2367464 - DNA, 25 bp, Homo sapien
caagcaggcatcgtatataagagta

SEQ ID NO: 2367465 - DNA, 25 bp, Homo sapien
cagcacttccgttatgaactcttaa

SEQ ID NO: 2367466 - DNA, 25 bp, Homo sapien
caatctagtcaccaaaaagaggagg

SEQ ID NO: 2367467 - DNA, 25 bp, Homo sapien
tattgtgtctcatttgggcctgttc

SEQ ID NO: 2367468 - DNA, 25 bp, Homo sapien
tgttctataacaagcaaggtgtgtc

SEQ ID NO: 2367469 - DNA, 25 bp, Homo sapien
agtgatctctatgctctgcccaggg

SEQ ID NO: 2367470 - DNA, 25 bp, Homo sapien
gaacaagtgtgcagcgcctattctg

SEQ ID NO: 2367471 - DNA, 25 bp, Homo sapien
tctaccaagtgcttatgaacaagtg

SEQ ID NO: 2367472 - DNA, 25 bp, Homo sapien
gcttactgggtactagacttttcag

SEQ ID NO: 2367473 - DNA, 25 bp, Homo sapien
aattccattcgtcagagcaaacaca

SEQ ID NO: 2367474 - DNA, 25 bp, Homo sapien
tcttaagacatttagaacaccaatt

SEQ ID NO: 2367475 - DNA, 25 bp, Homo sapien
aacacagatcgcaggtagccctgga

SEQ ID NO: 2367476 - DNA, 25 bp, Homo sapien
tggtaaaatttgtgagtccacagct

SEQ ID NO: 2367477 - DNA, 25 bp, Homo sapien
gcaaacacagatcgcaggtagccct

SEQ ID NO: 2367478 - DNA, 25 bp, Homo sapien
ggataaattccattcgtcagagcaa

SEQ ID NO: 2367479 - DNA, 25 bp, Homo sapien
aattggtgttctaaatgtcttaaga

SEQ ID NO: 2367480 - DNA, 25 bp, Homo sapien
agggctacctgcgatctgtgtttgc

SEQ ID NO: 2367481 - DNA, 25 bp, Homo sapien
tccagggctacctgcgatctgtgtt

SEQ ID NO: 2367482 - DNA, 25 bp, Homo sapien
agctgtggactcacaaattttacca

SEQ ID NO: 2367483 - DNA, 25 bp, Homo sapien
tgctctgacgaatggaatttatcct

SEQ ID NO: 2367484 - DNA, 25 bp, Homo sapien
tgtgtttgctctgacgaatggaatt

SEQ ID NO: 2367485 - DNA, 25 bp, Homo sapien
ctgcttcccgtcagcggaggaccga

SEQ ID NO: 2367486 - DNA, 25 bp, Homo sapien
ggaggcgccacgcacagtgtccaaa

SEQ ID NO: 2367487 - DNA, 25 bp, Homo sapien
ccgctgggctcggtcacatcgggct

SEQ ID NO: 2367488 - DNA, 25 bp, Homo sapien
gcacagtgtccaaagcatccttgct

SEQ ID NO: 2367489 - DNA, 25 bp, Homo sapien
gattaaataacgagatgcggctccc

SEQ ID NO: 2367490 - DNA, 25 bp, Homo sapien
tctagtggctgcagatacagtcagt

SEQ ID NO: 2367491 - DNA, 25 bp, Homo sapien
gagcctccccaagtgagcagggtta

SEQ ID NO: 2367492 - DNA, 25 bp, Homo sapien
cacagtgagccagaacgactagacc

SEQ ID NO: 2367493 - DNA, 25 bp, Homo sapien
cagtgttgtcaaagagcgtcacata

SEQ ID NO: 2367494 - DNA, 25 bp, Homo sapien
tctctaaattcagtgctcctcgcga

SEQ ID NO: 2367495 - DNA, 25 bp, Homo sapien
gatgctggcataaaagtctgtctcc

SEQ ID NO: 2367496 - DNA, 25 bp, Homo sapien
actgggctgcattttagggcatctg

SEQ ID NO: 2367497 - DNA, 25 bp, Homo sapien
ccagttggtacacgcagcttttaca

SEQ ID NO: 2367498 - DNA, 25 bp, Homo sapien
tctggtggtcccacagtcagatccc

SEQ ID NO: 2367499 - DNA, 25 bp, Homo sapien
gttgaaggctagactggcagttcca

SEQ ID NO: 2367500 - DNA, 25 bp, Homo sapien
tttctacagtcaccaggttgaaggc

SEQ ID NO: 2367501 - DNA, 25 bp, Homo sapien
ctgcttatctgttccctgactgtca

SEQ ID NO: 2367502 - DNA, 25 bp, Homo sapien
caaacgtcagtgagtgactgctcaa

SEQ ID NO: 2367503 - DNA, 25 bp, Homo sapien
caggcccagatggattcccaatgga

SEQ ID NO: 2367504 - DNA, 25 bp, Homo sapien
gaactaccgcacagaaaatcaccag

SEQ ID NO: 2367505 - DNA, 25 bp, Homo sapien
aacagaaagtccacccgaagtgtga

SEQ ID NO: 2367506 - DNA, 25 bp, Homo sapien
cctcttgtcaacagtaggttttctg

SEQ ID NO: 2367507 - DNA, 25 bp, Homo sapien
ctcctcttgtcaacagtaggttttc

SEQ ID NO: 2367508 - DNA, 25 bp, Homo sapien
tcctcttgtcaacagtaggttttct

SEQ ID NO: 2367509 - DNA, 25 bp, Homo sapien
ctcttgtcaacagtaggttttctgc

SEQ ID NO: 2367510 - DNA, 25 bp, Homo sapien
ggagtaggagtaagaatgagatttc

SEQ ID NO: 2367511 - DNA, 25 bp, Homo sapien
tagtgtgcaagggagtaggagtaag

SEQ ID NO: 2367512 - DNA, 25 bp, Homo sapien
cctacagaatggagatagtgtgcaa

SEQ ID NO: 2367513 - DNA, 25 bp, Homo sapien
tagaaatggctacctacagaatgga

SEQ ID NO: 2367514 - DNA, 25 bp, Homo sapien
catacaggtcatagtaatcaccagt

SEQ ID NO: 2367515 - DNA, 25 bp, Homo sapien
gaatcttgatgtgggtgacagctcc

SEQ ID NO: 2367516 - DNA, 25 bp, Homo sapien
ttgcccgtgatgttccatgtaatac

SEQ ID NO: 2367517 - DNA, 25 bp, Homo sapien
tcagaggtaggatctgcacagttca

SEQ ID NO: 2367518 - DNA, 25 bp, Homo sapien
atcaccagtgcgcacagaaagaaca

SEQ ID NO: 2367519 - DNA, 25 bp, Homo sapien
gtcatcaccagtgcgcacagaaaga

SEQ ID NO: 2367520 - DNA, 25 bp, Homo sapien
tcaccagtgcgcacagaaagaacaa

SEQ ID NO: 2367521 - DNA, 25 bp, Homo sapien
tttgtcatcaccagtgcgcacagaa

SEQ ID NO: 2367522 - DNA, 25 bp, Homo sapien
tcttataatgttccacaagatctgt

SEQ ID NO: 2367523 - DNA, 25 bp, Homo sapien
cttcttataatgttccacaagatct

SEQ ID NO: 2367524 - DNA, 25 bp, Homo sapien
gtttccaccataggattcttcttat

SEQ ID NO: 2367525 - DNA, 25 bp, Homo sapien
ttataatgttccacaagatctgtca

SEQ ID NO: 2367526 - DNA, 25 bp, Homo sapien
cagcagcatttatacgagtcgtgtt

SEQ ID NO: 2367527 - DNA, 25 bp, Homo sapien
gcatttatacgagtcgtgttaaggg

SEQ ID NO: 2367528 - DNA, 25 bp, Homo sapien
tgcttagttctcgaactctgctttc

SEQ ID NO: 2367529 - DNA, 25 bp, Homo sapien
tagttctcgaactctgctttctatt

SEQ ID NO: 2367530 - DNA, 25 bp, Homo sapien
ttgcagggtcatggatgaagctgga

SEQ ID NO: 2367531 - DNA, 25 bp, Homo sapien
gctggaaaccatcattctcagcaaa

SEQ ID NO: 2367532 - DNA, 25 bp, Homo sapien
gaagctggaaaccatcattctcagc

SEQ ID NO: 2367533 - DNA, 25 bp, Homo sapien
taaaaaaagaatgagttcatgtcct

SEQ ID NO: 2367534 - DNA, 25 bp, Homo sapien
ggttgcaatgtccagtctcagccca

SEQ ID NO: 2367535 - DNA, 25 bp, Homo sapien
caggcctataggactcaacagggag

SEQ ID NO: 2367536 - DNA, 25 bp, Homo sapien
gaagaaagcccgagagacagtccat

SEQ ID NO: 2367537 - DNA, 25 bp, Homo sapien
ccacggtgccttgcagtcggttgca

SEQ ID NO: 2367538 - DNA, 25 bp, Homo sapien
gctggtctcgcactcaaggactcca

SEQ ID NO: 2367539 - DNA, 25 bp, Homo sapien
aatcacctcttccaggcggacttgg

SEQ ID NO: 2367540 - DNA, 25 bp, Homo sapien
tgcgctttccttatcctgcagtaag

SEQ ID NO: 2367541 - DNA, 25 bp, Homo sapien
tcaggtgggtgctaactgccagcag

SEQ ID NO: 2367542 - DNA, 25 bp, Homo sapien
gccagactaaattcagagttccaga

SEQ ID NO: 2367543 - DNA, 25 bp, Homo sapien
taccatatggagaccttcttcaggc

SEQ ID NO: 2367544 - DNA, 25 bp, Homo sapien
aattcatcttacctaccgtgatggg

SEQ ID NO: 2367545 - DNA, 25 bp, Homo sapien
cttcaggcttcatctacggactaga

SEQ ID NO: 2367546 - DNA, 25 bp, Homo sapien
agagaagtttgcactcctgttgttg

SEQ ID NO: 2367547 - DNA, 25 bp, Homo sapien
cctcttttcggctgtagagaagttt

SEQ ID NO: 2367548 - DNA, 25 bp, Homo sapien
aagtttgcactcctgttgttgtagt

SEQ ID NO: 2367549 - DNA, 25 bp, Homo sapien
gaagtttgcactcctgttgttgtag

SEQ ID NO: 2367550 - DNA, 25 bp, Homo sapien
ggcaggatgtttttatatctatttt

SEQ ID NO: 2367551 - DNA, 25 bp, Homo sapien
gggcaggatgtttttatatctattt

SEQ ID NO: 2367552 - DNA, 25 bp, Homo sapien
caggatgtttttatatctatttttg

SEQ ID NO: 2367553 - DNA, 25 bp, Homo sapien
agggcaggatgtttttatatctatt

SEQ ID NO: 2367554 - DNA, 25 bp, Homo sapien
tgtaatctgaaacaggctcattggg

SEQ ID NO: 2367555 - DNA, 25 bp, Homo sapien
gaaacaggctcattgggatcaccat

SEQ ID NO: 2367556 - DNA, 25 bp, Homo sapien
tatttgcattgatgtaatctgaaac

SEQ ID NO: 2367557 - DNA, 25 bp, Homo sapien
cattgggatcaccatcgtgtaggac

SEQ ID NO: 2367558 - DNA, 25 bp, Homo sapien
ttcttggaacaccatccgccaaaag

SEQ ID NO: 2367559 - DNA, 25 bp, Homo sapien
aagtcattcaccgtgttttgcaggc

SEQ ID NO: 2367560 - DNA, 25 bp, Homo sapien
tcactcgggagttttcttggaacac

SEQ ID NO: 2367561 - DNA, 25 bp, Homo sapien
ctttcgttgtcatgacaatcactcg

SEQ ID NO: 2367562 - DNA, 25 bp, Homo sapien
ggcgctttctttgacgttcctaaca

SEQ ID NO: 2367563 - DNA, 25 bp, Homo sapien
cacgcatgacgccatattcttttag

SEQ ID NO: 2367564 - DNA, 25 bp, Homo sapien
ttctcttagcgtatagtcatgagcg

SEQ ID NO: 2367565 - DNA, 25 bp, Homo sapien
cgtatagtcatgagcggcgctttct

SEQ ID NO: 2367566 - DNA, 25 bp, Homo sapien
gatggccttgcctcaagcttccgag

SEQ ID NO: 2367567 - DNA, 25 bp, Homo sapien
tcagctcatctaccggcatctgtgg

SEQ ID NO: 2367568 - DNA, 25 bp, Homo sapien
gagcaaaactgatccatccacgacg

SEQ ID NO: 2367569 - DNA, 25 bp, Homo sapien
tcaccgcctcaactgggaacttggc

SEQ ID NO: 2367570 - DNA, 25 bp, Homo sapien
ggcccttgggtatctctaaacctca

SEQ ID NO: 2367571 - DNA, 25 bp, Homo sapien
gatttaggctccaattccaggcact

SEQ ID NO: 2367572 - DNA, 25 bp, Homo sapien
gcacattatggctattttgaggata

SEQ ID NO: 2367573 - DNA, 25 bp, Homo sapien
tcagtgagctcgctgaaatactcag

SEQ ID NO: 2367574 - DNA, 25 bp, Homo sapien
agggtcgctgggcacgccgtggtcc

SEQ ID NO: 2367575 - DNA, 25 bp, Homo sapien
cagggtcgctgggcacgccgtggtc

SEQ ID NO: 2367576 - DNA, 25 bp, Homo sapien
ccagggtcgctgggcacgccgtggt

SEQ ID NO: 2367577 - DNA, 25 bp, Homo sapien
caaaatgtccctcaatgcagttgct

SEQ ID NO: 2367578 - DNA, 25 bp, Homo sapien
gcagttgctctatgcctcaaacaga

SEQ ID NO: 2367579 - DNA, 25 bp, Homo sapien
ggagaaatatgccttgggatcaaaa

SEQ ID NO: 2367580 - DNA, 25 bp, Homo sapien
taatgcacaacttctggtggactca

SEQ ID NO: 2367581 - DNA, 25 bp, Homo sapien
atatcaatcacaatgaacgtccctg

SEQ ID NO: 2367582 - DNA, 25 bp, Homo sapien
gaatatcaatcacaatgaacgtccc

SEQ ID NO: 2367583 - DNA, 25 bp, Homo sapien
aatatcaatcacaatgaacgtccct

SEQ ID NO: 2367584 - DNA, 25 bp, Homo sapien
tggttttgggaacgtcaatatcgca

SEQ ID NO: 2367585 - DNA, 25 bp, Homo sapien
ggatggttttgggaacgtcaatatc

SEQ ID NO: 2367586 - DNA, 25 bp, Homo sapien
ggaacgtcaatatcgcagtcaacac

SEQ ID NO: 2367587 - DNA, 25 bp, Homo sapien
tttgggaacgtcaatatcgcagtca

SEQ ID NO: 2367588 - DNA, 25 bp, Homo sapien
gccagttcccagattgattcaaacc

SEQ ID NO: 2367589 - DNA, 25 bp, Homo sapien
gcttcgtttgcactttcccctggat

SEQ ID NO: 2367590 - DNA, 25 bp, Homo sapien
acatggcgaaactgtgacactacaa

SEQ ID NO: 2367591 - DNA, 25 bp, Homo sapien
gcatggagccacaaatttgtagtcc

SEQ ID NO: 2367592 - DNA, 25 bp, Homo sapien
tactgaagtgtagagacgctacctg

SEQ ID NO: 2367593 - DNA, 25 bp, Homo sapien
gattataggcctgacccattacaga

SEQ ID NO: 2367594 - DNA, 25 bp, Homo sapien
cgctacctgtgttgtatgtatttcc

SEQ ID NO: 2367595 - DNA, 25 bp, Homo sapien
tatgattcactcagagagaacactg

SEQ ID NO: 2367596 - DNA, 25 bp, Homo sapien
aacttatcccgccgggcactgtggc

SEQ ID NO: 2367597 - DNA, 25 bp, Homo sapien
ctcccgatagctacaggaacatgcc

SEQ ID NO: 2367598 - DNA, 25 bp, Homo sapien
aaacttatcccgccgggcactgtgg

SEQ ID NO: 2367599 - DNA, 25 bp, Homo sapien
aaaacttatcccgccgggcactgtg

SEQ ID NO: 2367600 - DNA, 25 bp, Homo sapien
ctttatttttggttctgatgatacc

SEQ ID NO: 2367601 - DNA, 25 bp, Homo sapien
aaactttatttttggttctgatgat

SEQ ID NO: 2367602 - DNA, 25 bp, Homo sapien
actttatttttggttctgatgatac

SEQ ID NO: 2367603 - DNA, 25 bp, Homo sapien
aactttatttttggttctgatgata

SEQ ID NO: 2367604 - DNA, 25 bp, Homo sapien
cagggtggcgttggagtacaaggcg

SEQ ID NO: 2367605 - DNA, 25 bp, Homo sapien
tctccactcgtctggtccgctagag

SEQ ID NO: 2367606 - DNA, 25 bp, Homo sapien
agggctctgatctccactcgtctgg

SEQ ID NO: 2367607 - DNA, 25 bp, Homo sapien
tacaaggcgggagagggctctgatc

SEQ ID NO: 2367608 - DNA, 25 bp, Homo sapien
gcaatgggtggtttagggcctagga

SEQ ID NO: 2367609 - DNA, 25 bp, Homo sapien
tgacatcagagcagtccaggagagt

SEQ ID NO: 2367610 - DNA, 25 bp, Homo sapien
tgtgaagggcaatgggtggtttagg

SEQ ID NO: 2367611 - DNA, 25 bp, Homo sapien
gagatgacatcagagcagtccagga

SEQ ID NO: 2367612 - DNA, 25 bp, Homo sapien
gcatcaggcccacgttttcatagac

SEQ ID NO: 2367613 - DNA, 25 bp, Homo sapien
tgctgttgcatcaggcccacgtttt

SEQ ID NO: 2367614 - DNA, 25 bp, Homo sapien
tagactctagcactgtcttctctca

SEQ ID NO: 2367615 - DNA, 25 bp, Homo sapien
ttttcatagactctagcactgtctt

SEQ ID NO: 2367616 - DNA, 25 bp, Homo sapien
tgtgctgaagttttggcaggttttc

SEQ ID NO: 2367617 - DNA, 25 bp, Homo sapien
gctcagggctagcagaaatcattca

SEQ ID NO: 2367618 - DNA, 25 bp, Homo sapien
gaactataattggtcaacggctgga

SEQ ID NO: 2367619 - DNA, 25 bp, Homo sapien
tggttccaaaaataggctcagggct

SEQ ID NO: 2367620 - DNA, 25 bp, Homo sapien
aagagtcacgtttcccaagtctggg

SEQ ID NO: 2367621 - DNA, 25 bp, Homo sapien
cctagggactatgataactctggcc

SEQ ID NO: 2367622 - DNA, 25 bp, Homo sapien
tacaagtttgactagaagacagcag

SEQ ID NO: 2367623 - DNA, 25 bp, Homo sapien
gataagccgtagcaacctagggact

SEQ ID NO: 2367624 - DNA, 25 bp, Homo sapien
agcagtgacacttccctaataaggg

SEQ ID NO: 2367625 - DNA, 25 bp, Homo sapien
tctcatgtaaagtaaactcgtctga

SEQ ID NO: 2367626 - DNA, 25 bp, Homo sapien
ttccatctcatgtaaagtaaactcg

SEQ ID NO: 2367627 - DNA, 25 bp, Homo sapien
ccatctcatgtaaagtaaactcgtc

SEQ ID NO: 2367628 - DNA, 25 bp, Homo sapien
tcatgtaaagtaaactcgtctgaga

SEQ ID NO: 2367629 - DNA, 25 bp, Homo sapien
gatgaccataagtttcagaagggcc

SEQ ID NO: 2367630 - DNA, 25 bp, Homo sapien
taacaaaggcatcctgacatcaggg

SEQ ID NO: 2367631 - DNA, 25 bp, Homo sapien
gcaacctagaagtagatggcatcca

SEQ ID NO: 2367632 - DNA, 25 bp, Homo sapien
cacacactggacatgaagcgccttt

SEQ ID NO: 2367633 - DNA, 25 bp, Homo sapien
tactctggtacaatacttcatatac

SEQ ID NO: 2367634 - DNA, 25 bp, Homo sapien
catatactgcaggaaaattaattgt

SEQ ID NO: 2367635 - DNA, 25 bp, Homo sapien
ttgtaggtctagtcatcagcttaat

SEQ ID NO: 2367636 - DNA, 25 bp, Homo sapien
tgatgacatcctaaaacgtattcct

SEQ ID NO: 2367637 - DNA, 25 bp, Homo sapien
gggagacaattaacatccactaatg

SEQ ID NO: 2367638 - DNA, 25 bp, Homo sapien
tttgcaactagcaaagcagttgcgc

SEQ ID NO: 2367639 - DNA, 25 bp, Homo sapien
gcagttgcgctaacacccataaata

SEQ ID NO: 2367640 - DNA, 25 bp, Homo sapien
tataggtggggagacaattaacatc

SEQ ID NO: 2367641 - DNA, 25 bp, Homo sapien
gttcccatacagtttacaaatacac

SEQ ID NO: 2367642 - DNA, 25 bp, Homo sapien
agttcccatacagtttacaaataca

SEQ ID NO: 2367643 - DNA, 25 bp, Homo sapien
cccatacagtttacaaatacacttt

SEQ ID NO: 2367644 - DNA, 25 bp, Homo sapien
ttagttcccatacagtttacaaata

SEQ ID NO: 2367645 - DNA, 25 bp, Homo sapien
taattaagactggtctcacatggca

SEQ ID NO: 2367646 - DNA, 25 bp, Homo sapien
aattaagactggtctcacatggcag

SEQ ID NO: 2367647 - DNA, 25 bp, Homo sapien
gataattaagactggtctcacatgg

SEQ ID NO: 2367648 - DNA, 25 bp, Homo sapien
caggataattaagactggtctcaca

SEQ ID NO: 2367649 - DNA, 25 bp, Homo sapien
tctttcagagataacagaggctccc

SEQ ID NO: 2367650 - DNA, 25 bp, Homo sapien
cagagataacagaggctccccattg

SEQ ID NO: 2367651 - DNA, 25 bp, Homo sapien
gctccccattgtggtggtagcagag

SEQ ID NO: 2367652 - DNA, 25 bp, Homo sapien
cttgtctttcagagataacagaggc

SEQ ID NO: 2367653 - DNA, 25 bp, Homo sapien
cgaccccagcaacaggctatgtcaa

SEQ ID NO: 2367654 - DNA, 25 bp, Homo sapien
ggacacaatacgaccccagcaacag

SEQ ID NO: 2367655 - DNA, 25 bp, Homo sapien
aatacgaccccagcaacaggctatg

SEQ ID NO: 2367656 - DNA, 25 bp, Homo sapien
ttccggacacaatacgaccccagca

SEQ ID NO: 2367657 - DNA, 25 bp, Homo sapien
taaatcctttaagatcctcaaatcc

SEQ ID NO: 2367658 - DNA, 25 bp, Homo sapien
aatcctggaagatgctcaactcttg

SEQ ID NO: 2367659 - DNA, 25 bp, Homo sapien
taagatcctcaaatcctggaagatg

SEQ ID NO: 2367660 - DNA, 25 bp, Homo sapien
tcttctggtctcttaggttctatta

SEQ ID NO: 2367661 - DNA, 25 bp, Homo sapien
gaaggtcttatagatgtgagacaac

SEQ ID NO: 2367662 - DNA, 25 bp, Homo sapien
gattccttccgagcagaaggtctta

SEQ ID NO: 2367663 - DNA, 25 bp, Homo sapien
tcagatgttgtggctgtagatcaag

SEQ ID NO: 2367664 - DNA, 25 bp, Homo sapien
tacttgtaacagcagctccaaatat

SEQ ID NO: 2367665 - DNA, 25 bp, Homo sapien
tcctctgaactagcaaatgtacagc

SEQ ID NO: 2367666 - DNA, 25 bp, Homo sapien
ttcctctgaactagcaaatgtacag

SEQ ID NO: 2367667 - DNA, 25 bp, Homo sapien
caattacaccttgcttgattctttt

SEQ ID NO: 2367668 - DNA, 25 bp, Homo sapien
agttgttgggatcaattacaccttg

SEQ ID NO: 2367669 - DNA, 25 bp, Homo sapien
cagttcggcagcgtggaggtttttc

SEQ ID NO: 2367670 - DNA, 25 bp, Homo sapien
cccaataattgcgaagtgagtgtct

SEQ ID NO: 2367671 - DNA, 25 bp, Homo sapien
agatgttctcgcttcagctcagagg

SEQ ID NO: 2367672 - DNA, 25 bp, Homo sapien
gatctgacccttgagccagcacaat

SEQ ID NO: 2367673 - DNA, 25 bp, Homo sapien
agcagccactttggggggccttgcc

SEQ ID NO: 2367674 - DNA, 25 bp, Homo sapien
atagcacgggtcctgcgcgggtctc

SEQ ID NO: 2367675 - DNA, 25 bp, Homo sapien
ccggttctagcgcatcctcccgctc

SEQ ID NO: 2367676 - DNA, 25 bp, Homo sapien
gttcccctctcggagactcgcagga

SEQ ID NO: 2367677 - DNA, 25 bp, Homo sapien
tgcacactgaattgacaacgtctgt

SEQ ID NO: 2367678 - DNA, 25 bp, Homo sapien
tactgatgtccctaacacctttctt

SEQ ID NO: 2367679 - DNA, 25 bp, Homo sapien
tatattcaggaagctatagcccaca

SEQ ID NO: 2367680 - DNA, 25 bp, Homo sapien
taagcacattacttcctattccgaa

SEQ ID NO: 2367681 - DNA, 25 bp, Homo sapien
tagttgcagcctgtgatgaactggg

SEQ ID NO: 2367682 - DNA, 25 bp, Homo sapien
gatgaactgggcttgcgattgaagc

SEQ ID NO: 2367683 - DNA, 25 bp, Homo sapien
aattgctctgcagaatagcaacagg

SEQ ID NO: 2367684 - DNA, 25 bp, Homo sapien
gattgaagcaggatctggtgcactg

SEQ ID NO: 2367685 - DNA, 25 bp, Homo sapien
gggttgacatgaaagctgaggtcag

SEQ ID NO: 2367686 - DNA, 25 bp, Homo sapien
gaggggttgacatgaaagctgaggt

SEQ ID NO: 2367687 - DNA, 25 bp, Homo sapien
tgggaggggttgacatgaaagctga

SEQ ID NO: 2367688 - DNA, 25 bp, Homo sapien
ctttgggaggggttgacatgaaagc

SEQ ID NO: 2367689 - DNA, 25 bp, Homo sapien
ccctacacttctggatttcatatga

SEQ ID NO: 2367690 - DNA, 25 bp, Homo sapien
aactggattctacagtacttcatgc

SEQ ID NO: 2367691 - DNA, 25 bp, Homo sapien
atccacgagctctcatcttccattg

SEQ ID NO: 2367692 - DNA, 25 bp, Homo sapien
tgagtggggagcaactggattctac

SEQ ID NO: 2367693 - DNA, 25 bp, Homo sapien
tctcttgactccccacatatatgct

SEQ ID NO: 2367694 - DNA, 25 bp, Homo sapien
tcccatgatcaatatctcttgactc

SEQ ID NO: 2367695 - DNA, 25 bp, Homo sapien
atatatgctccccacgaccagctgg

SEQ ID NO: 2367696 - DNA, 25 bp, Homo sapien
tgactccccacatatatgctcccca

SEQ ID NO: 2367697 - DNA, 25 bp, Homo sapien
cgccatgcagttcagtgtaggttcc

SEQ ID NO: 2367698 - DNA, 25 bp, Homo sapien
tgggtgatgccagataagacgggtg

SEQ ID NO: 2367699 - DNA, 25 bp, Homo sapien
taggttccacgccagcatccacttg

SEQ ID NO: 2367700 - DNA, 25 bp, Homo sapien
agctgtgtctgagacccgaatgcca

SEQ ID NO: 2367701 - DNA, 25 bp, Homo sapien
gagaaaactcggaccagccagtgag

SEQ ID NO: 2367702 - DNA, 25 bp, Homo sapien
tcctccacatggatgaaggttttag

SEQ ID NO: 2367703 - DNA, 25 bp, Homo sapien
ctgccagaagcggagaaaactcgga

SEQ ID NO: 2367704 - DNA, 25 bp, Homo sapien
tcagtggacaagggacagtggctcc

SEQ ID NO: 2367705 - DNA, 25 bp, Homo sapien
tgacttggtttaaaagctcagcgga

SEQ ID NO: 2367706 - DNA, 25 bp, Homo sapien
aagacgctaagtcccaatgacttgg

SEQ ID NO: 2367707 - DNA, 25 bp, Homo sapien
tggtttaaaagctcagcggaggtgc

SEQ ID NO: 2367708 - DNA, 25 bp, Homo sapien
cttccctgccgggtagaaagacgct

SEQ ID NO: 2367709 - DNA, 25 bp, Homo sapien
ctccatgaagaagcacatggacatc

SEQ ID NO: 2367710 - DNA, 25 bp, Homo sapien
ttcatcctctccctgataattcatc

SEQ ID NO: 2367711 - DNA, 25 bp, Homo sapien
gaagcacatggacatccatgggcct

SEQ ID NO: 2367712 - DNA, 25 bp, Homo sapien
tccatgggccttaattcatcctctc

SEQ ID NO: 2367713 - DNA, 25 bp, Homo sapien
ggtaatgttgatattgacaaaggct

SEQ ID NO: 2367714 - DNA, 25 bp, Homo sapien
caggttagaaagatcaggctgcaga

SEQ ID NO: 2367715 - DNA, 25 bp, Homo sapien
gattaatcaggttagaaagatcagg

SEQ ID NO: 2367716 - DNA, 25 bp, Homo sapien
gacaaaggcttaatgtgattaatca

SEQ ID NO: 2367717 - DNA, 25 bp, Homo sapien
tgctcttccaccagcggcccaaacc

SEQ ID NO: 2367718 - DNA, 25 bp, Homo sapien
gcccaaacccttgcctgcaatgcag

SEQ ID NO: 2367719 - DNA, 25 bp, Homo sapien
aatattgaataagcctgccgctcca

SEQ ID NO: 2367720 - DNA, 25 bp, Homo sapien
aaatattgaataagcctgccgctcc

SEQ ID NO: 2367721 - DNA, 25 bp, Homo sapien
tcagataacgaaccagggccgagca

SEQ ID NO: 2367722 - DNA, 25 bp, Homo sapien
tgtattgtcaatctccggcatccgc

SEQ ID NO: 2367723 - DNA, 25 bp, Homo sapien
caaatgggtttataagtgtattgtc

SEQ ID NO: 2367724 - DNA, 25 bp, Homo sapien
cggcatccgcagagcatgctcagaa

SEQ ID NO: 2367725 - DNA, 25 bp, Homo sapien
cggtcactggggtacatccaacggt

SEQ ID NO: 2367726 - DNA, 25 bp, Homo sapien
gtacatccaacggttagaactgttg

SEQ ID NO: 2367727 - DNA, 25 bp, Homo sapien
caacggttagaactgttgctgaaca

SEQ ID NO: 2367728 - DNA, 25 bp, Homo sapien
cactggggtacatccaacggttaga

SEQ ID NO: 2367729 - DNA, 25 bp, Homo sapien
cctaggataattgcctccatctgca

SEQ ID NO: 2367730 - DNA, 25 bp, Homo sapien
catagctgggggtctccgagaggcc

SEQ ID NO: 2367731 - DNA, 25 bp, Homo sapien
gaggccccgcctaggataattgcct

SEQ ID NO: 2367732 - DNA, 25 bp, Homo sapien
tccgagaggccccgcctaggataat

SEQ ID NO: 2367733 - DNA, 25 bp, Homo sapien
accattgccggtgttactgtgcaca

SEQ ID NO: 2367734 - DNA, 25 bp, Homo sapien
tgtgcacaggaaatgcaagcatctg

SEQ ID NO: 2367735 - DNA, 25 bp, Homo sapien
gccggtgttactgtgcacaggaaat

SEQ ID NO: 2367736 - DNA, 25 bp, Homo sapien
tactgtgcacaggaaatgcaagcat

SEQ ID NO: 2367737 - DNA, 25 bp, Homo sapien
gcaatcaccctgttgatgatttctt

SEQ ID NO: 2367738 - DNA, 25 bp, Homo sapien
ccattttctcagctcgagcaatcac

SEQ ID NO: 2367739 - DNA, 25 bp, Homo sapien
tttctcagctcgagcaatcaccctg

SEQ ID NO: 2367740 - DNA, 25 bp, Homo sapien
gctcgagcaatcaccctgttgatga

SEQ ID NO: 2367741 - DNA, 25 bp, Homo sapien
tgcctctggcgatgctaccagcaag

SEQ ID NO: 2367742 - DNA, 25 bp, Homo sapien
gcgatgctaccagcaagggctggct

SEQ ID NO: 2367743 - DNA, 25 bp, Homo sapien
aatagcattgggtttgcctctggcg

SEQ ID NO: 2367744 - DNA, 25 bp, Homo sapien
cagccagaatcttccgggactgtcc

SEQ ID NO: 2367745 - DNA, 25 bp, Homo sapien
atcttgatgcgtgtcgaggaaaagg

SEQ ID NO: 2367746 - DNA, 25 bp, Homo sapien
gatgcgtgtcgaggaaaaggttaat

SEQ ID NO: 2367747 - DNA, 25 bp, Homo sapien
gtactgctgcaacatcttgatgcgt

SEQ ID NO: 2367748 - DNA, 25 bp, Homo sapien
tactgctgcaacatcttgatgcgtg

SEQ ID NO: 2367749 - DNA, 25 bp, Homo sapien
agtatgcagcggttcaccccatctc

SEQ ID NO: 2367750 - DNA, 25 bp, Homo sapien
tcatgttttctaggcggtccaccag

SEQ ID NO: 2367751 - DNA, 25 bp, Homo sapien
tgttctccacacagtatgcagcggt

SEQ ID NO: 2367752 - DNA, 25 bp, Homo sapien
tcctcacatactacacaggcagagc

SEQ ID NO: 2367753 - DNA, 25 bp, Homo sapien
aacacagccaacacactcagatgag

SEQ ID NO: 2367754 - DNA, 25 bp, Homo sapien
tcatgggaggcatggcaacgtagcc

SEQ ID NO: 2367755 - DNA, 25 bp, Homo sapien
gaacttgagtcattcccaagcactg

SEQ ID NO: 2367756 - DNA, 25 bp, Homo sapien
gaattctttaagagtccctgtggga

SEQ ID NO: 2367757 - DNA, 25 bp, Homo sapien
tgttggtctccactccgcacttggt

SEQ ID NO: 2367758 - DNA, 25 bp, Homo sapien
tccactccgcacttggtgcagacgt

SEQ ID NO: 2367759 - DNA, 25 bp, Homo sapien
tgcaggcggttgttggtctccactc

SEQ ID NO: 2367760 - DNA, 25 bp, Homo sapien
ccacacagaatgcaggcggttgttg

SEQ ID NO: 2367761 - DNA, 25 bp, Homo sapien
aaagggcttcagtttacccatgaag

SEQ ID NO: 2367762 - DNA, 25 bp, Homo sapien
actacagagccctgcacaattcata

SEQ ID NO: 2367763 - DNA, 25 bp, Homo sapien
aagggcttcagtttacccatgaaga

SEQ ID NO: 2367764 - DNA, 25 bp, Homo sapien
cagagccctgcacaattcatattta

SEQ ID NO: 2367765 - DNA, 25 bp, Homo sapien
tgtggcagccaagcgctgttgctct

SEQ ID NO: 2367766 - DNA, 25 bp, Homo sapien
agacagggattgaagatgtggcagc

SEQ ID NO: 2367767 - DNA, 25 bp, Homo sapien
agatgtggcagccaagcgctgttgc

SEQ ID NO: 2367768 - DNA, 25 bp, Homo sapien
gagagacagggattgaagatgtggc

SEQ ID NO: 2367769 - DNA, 25 bp, Homo sapien
tttgaagaaccacgctccagaacgc

SEQ ID NO: 2367770 - DNA, 25 bp, Homo sapien
cccgggcagggtgcttgggctcagg

SEQ ID NO: 2367771 - DNA, 25 bp, Homo sapien
aagcctttgaagaaccacgctccag

SEQ ID NO: 2367772 - DNA, 25 bp, Homo sapien
gaagaaccacgctccagaacgcttc

SEQ ID NO: 2367773 - DNA, 25 bp, Homo sapien
tgtacactagatatgccaccaggga

SEQ ID NO: 2367774 - DNA, 25 bp, Homo sapien
gaagctgaccatgcaacaactgggt

SEQ ID NO: 2367775 - DNA, 25 bp, Homo sapien
tgcaagggctttatctggtcagtcc

SEQ ID NO: 2367776 - DNA, 25 bp, Homo sapien
taggagtcctagacccaagtgcaga

SEQ ID NO: 2367777 - DNA, 25 bp, Homo sapien
cgggcccctcctatcttcactgtca

SEQ ID NO: 2367778 - DNA, 25 bp, Homo sapien
cccgggcccctcctatcttcactgt

SEQ ID NO: 2367779 - DNA, 25 bp, Homo sapien
ccgggcccctcctatcttcactgtc

SEQ ID NO: 2367780 - DNA, 25 bp, Homo sapien
acccgggcccctcctatcttcactg

SEQ ID NO: 2367781 - DNA, 25 bp, Homo sapien
ccagctctctgaatctcggctagat

SEQ ID NO: 2367782 - DNA, 25 bp, Homo sapien
ccatagtttcctcgcccgggagcag

SEQ ID NO: 2367783 - DNA, 25 bp, Homo sapien
ctgcgcacgggaggcccatagtttc

SEQ ID NO: 2367784 - DNA, 25 bp, Homo sapien
tgagctcattcgtgcctcggaggcc

SEQ ID NO: 2367785 - DNA, 25 bp, Homo sapien
tggactgagttggcccgtctcaaac

SEQ ID NO: 2367786 - DNA, 25 bp, Homo sapien
ctggactgagttggcccgtctcaaa

SEQ ID NO: 2367787 - DNA, 25 bp, Homo sapien
cctggactgagttggcccgtctcaa

SEQ ID NO: 2367788 - DNA, 25 bp, Homo sapien
atctggaaagcgtcctgctggccca

SEQ ID NO: 2367789 - DNA, 25 bp, Homo sapien
tggcttctgatctggaaagcgtcct

SEQ ID NO: 2367790 - DNA, 25 bp, Homo sapien
tctgatctggaaagcgtcctgctgg

SEQ ID NO: 2367791 - DNA, 25 bp, Homo sapien
gcttctgatctggaaagcgtcctgc

SEQ ID NO: 2367792 - DNA, 25 bp, Homo sapien
agtggtcccagggtcgctcggagcc

SEQ ID NO: 2367793 - DNA, 25 bp, Homo sapien
tggctcattcggtcctctctggctc

SEQ ID NO: 2367794 - DNA, 25 bp, Homo sapien
cagatgcttgggaatagggtccgga

SEQ ID NO: 2367795 - DNA, 25 bp, Homo sapien
gaggggtggctcattcggtcctctc

SEQ ID NO: 2367796 - DNA, 25 bp, Homo sapien
ttgcttcatccgaatcgtagctgtt

SEQ ID NO: 2367797 - DNA, 25 bp, Homo sapien
ttcatccgaatcgtagctgttggct

SEQ ID NO: 2367798 - DNA, 25 bp, Homo sapien
cttcatccgaatcgtagctgttggc

SEQ ID NO: 2367799 - DNA, 25 bp, Homo sapien
gcttcatccgaatcgtagctgttgg

SEQ ID NO: 2367800 - DNA, 25 bp, Homo sapien
cttggccttaatgatggtgcactgc

SEQ ID NO: 2367801 - DNA, 25 bp, Homo sapien
gagctgttgtcctggtcgtagagaa

SEQ ID NO: 2367802 - DNA, 25 bp, Homo sapien
ccttaatgatggtgcactgcaggga

SEQ ID NO: 2367803 - DNA, 25 bp, Homo sapien
ggctgaattccagggcacccagggt

SEQ ID NO: 2367804 - DNA, 25 bp, Homo sapien
gaggtgcagcttaacgtagggatca

SEQ ID NO: 2367805 - DNA, 25 bp, Homo sapien
tcagccaagccgtttgaatccatgg

SEQ ID NO: 2367806 - DNA, 25 bp, Homo sapien
ttaacgtagggatcagccaagccgt

SEQ ID NO: 2367807 - DNA, 25 bp, Homo sapien
gccaagccgtttgaatccatgggct

SEQ ID NO: 2367808 - DNA, 25 bp, Homo sapien
gtttgcagagaagcccaggccatat

SEQ ID NO: 2367809 - DNA, 25 bp, Homo sapien
tgcagagaagcccaggccatatggt

SEQ ID NO: 2367810 - DNA, 25 bp, Homo sapien
cagagaagcccaggccatatggtac

SEQ ID NO: 2367811 - DNA, 25 bp, Homo sapien
ccggtttgcagagaagcccaggcca

SEQ ID NO: 2367812 - DNA, 25 bp, Homo sapien
cctttgcatgtcctcatcggtgatg

SEQ ID NO: 2367813 - DNA, 25 bp, Homo sapien
cgtgatacacgagggtctcattcca

SEQ ID NO: 2367814 - DNA, 25 bp, Homo sapien
ggtattccgcagagtttttgtacga

SEQ ID NO: 2367815 - DNA, 25 bp, Homo sapien
cctcatcggtgatgccgtgatacac

SEQ ID NO: 2367816 - DNA, 25 bp, Homo sapien
cgctccaggcagatgttgaaattct

SEQ ID NO: 2367817 - DNA, 25 bp, Homo sapien
tcgctccaggcagatgttgaaattc

SEQ ID NO: 2367818 - DNA, 25 bp, Homo sapien
aaattcattgtggccaaatttgtcc

SEQ ID NO: 2367819 - DNA, 25 bp, Homo sapien
tcattgtggccaaatttgtcctcat

SEQ ID NO: 2367820 - DNA, 25 bp, Homo sapien
ccatgcctcgggctgacccggtggt

SEQ ID NO: 2367821 - DNA, 25 bp, Homo sapien
acccggtggtcccagcacgtttcat

SEQ ID NO: 2367822 - DNA, 25 bp, Homo sapien
tcttcctcataaagggccatgcctc

SEQ ID NO: 2367823 - DNA, 25 bp, Homo sapien
ataaagggccatgcctcgggctgac

SEQ ID NO: 2367824 - DNA, 25 bp, Homo sapien
tgtgtgctgtacatgagggagacca

SEQ ID NO: 2367825 - DNA, 25 bp, Homo sapien
tagccattagcgtccatggcagcca

SEQ ID NO: 2367826 - DNA, 25 bp, Homo sapien
cttgacgaatgggtctgagtagcca

SEQ ID NO: 2367827 - DNA, 25 bp, Homo sapien
gcgtatgatgcccacaatgaggcct

SEQ ID NO: 2367828 - DNA, 25 bp, Homo sapien
cattgaattcgggattcaaggtttt

SEQ ID NO: 2367829 - DNA, 25 bp, Homo sapien
aatttgagtcttgtgtttggccttc

SEQ ID NO: 2367830 - DNA, 25 bp, Homo sapien
tttaatttgagtcttgtgtttggcc

SEQ ID NO: 2367831 - DNA, 25 bp, Homo sapien
tctttcccatgtccggtttcagcca

SEQ ID NO: 2367832 - DNA, 25 bp, Homo sapien
gacttctttgccaggtcactgtgtt

SEQ ID NO: 2367833 - DNA, 25 bp, Homo sapien
tccagtgacttctttgccaggtcac

SEQ ID NO: 2367834 - DNA, 25 bp, Homo sapien
atcattggacttgccgatgtcatag

SEQ ID NO: 2367835 - DNA, 25 bp, Homo sapien
taatcattggacttgccgatgtcat

SEQ ID NO: 2367836 - DNA, 25 bp, Homo sapien
ggtgccagcgctctatcttcttgtc

SEQ ID NO: 2367837 - DNA, 25 bp, Homo sapien
ccagtgttttaagcgctctcccttg

SEQ ID NO: 2367838 - DNA, 25 bp, Homo sapien
attctgtagctggtgccagcgctct

SEQ ID NO: 2367839 - DNA, 25 bp, Homo sapien
tatttttcagacactcgtaccagtg

SEQ ID NO: 2367840 - DNA, 25 bp, Homo sapien
caagcccctggtgaattctgtgcat

SEQ ID NO: 2367841 - DNA, 25 bp, Homo sapien
ggtcagttaagaagcgtgggcccaa

SEQ ID NO: 2367842 - DNA, 25 bp, Homo sapien
gagagaatctactatcatggaaggg

SEQ ID NO: 2367843 - DNA, 25 bp, Homo sapien
tcaaggctaggagggtctaaaaaca

SEQ ID NO: 2367844 - DNA, 25 bp, Homo sapien
gagagtcctctatggggcatctaca

SEQ ID NO: 2367845 - DNA, 25 bp, Homo sapien
gatgctgccatgcactcagggcagt

SEQ ID NO: 2367846 - DNA, 25 bp, Homo sapien
ggagcccacggatgagagagtcctc

SEQ ID NO: 2367847 - DNA, 25 bp, Homo sapien
ggcatctacacagcttgagggatgc

SEQ ID NO: 2367848 - DNA, 25 bp, Homo sapien
atggccctggtcttctaaatgcctc

SEQ ID NO: 2367849 - DNA, 25 bp, Homo sapien
gccctggtcttctaaatgcctccgt

SEQ ID NO: 2367850 - DNA, 25 bp, Homo sapien
ggtcttctaaatgcctccgtgccca

SEQ ID NO: 2367851 - DNA, 25 bp, Homo sapien
cctggtcttctaaatgcctccgtgc

SEQ ID NO: 2367852 - DNA, 25 bp, Homo sapien
gagtcctcccatgaattgtgcaggg

SEQ ID NO: 2367853 - DNA, 25 bp, Homo sapien
gattctcccaggaagcttagtaacg

SEQ ID NO: 2367854 - DNA, 25 bp, Homo sapien
gaaaatcgaacctttctcacagggc

SEQ ID NO: 2367855 - DNA, 25 bp, Homo sapien
cttagtaacgagagtgcaggagaca

SEQ ID NO: 2367856 - DNA, 25 bp, Homo sapien
ccagactaggggcactgtgagcttg

SEQ ID NO: 2367857 - DNA, 25 bp, Homo sapien
ctaggggcactgtgagcttgctgca

SEQ ID NO: 2367858 - DNA, 25 bp, Homo sapien
tgcatgctgattccagcgcctacac

SEQ ID NO: 2367859 - DNA, 25 bp, Homo sapien
agcgcctacaccagcatcaggcttg

SEQ ID NO: 2367860 - DNA, 25 bp, Homo sapien
atttttggctacatcatcacaaaga

SEQ ID NO: 2367861 - DNA, 25 bp, Homo sapien
gttgtgcatgcaccggaggacgtgt

SEQ ID NO: 2367862 - DNA, 25 bp, Homo sapien
ctgggtggttgtgcatgcaccggag

SEQ ID NO: 2367863 - DNA, 25 bp, Homo sapien
accggaggacgtgtgtgtattctag

SEQ ID NO: 2367864 - DNA, 25 bp, Homo sapien
cactttcagctccaacgtcctgttt

SEQ ID NO: 2367865 - DNA, 25 bp, Homo sapien
tgccagttcaagagcattttccccg

SEQ ID NO: 2367866 - DNA, 25 bp, Homo sapien
gttttcaaccaatgccagttcaaga

SEQ ID NO: 2367867 - DNA, 25 bp, Homo sapien
tcaagagcattttccccgatgcaag

SEQ ID NO: 2367868 - DNA, 25 bp, Homo sapien
tgtcctttagccagcaacaagcagc

SEQ ID NO: 2367869 - DNA, 25 bp, Homo sapien
cttttgcaaatcagacactcccctg

SEQ ID NO: 2367870 - DNA, 25 bp, Homo sapien
tgctgactgagcttggactgctgtt

SEQ ID NO: 2367871 - DNA, 25 bp, Homo sapien
gagagagtggcaacagaactgcctc

SEQ ID NO: 2367872 - DNA, 25 bp, Homo sapien
gatttgcatgcggaaacacgtgtct

SEQ ID NO: 2367873 - DNA, 25 bp, Homo sapien
tagtcttcaatgaacttgtccagag

SEQ ID NO: 2367874 - DNA, 25 bp, Homo sapien
tcggaagcacctttccttcaggaac

SEQ ID NO: 2367875 - DNA, 25 bp, Homo sapien
gacacacacacagggtaggagctac

SEQ ID NO: 2367876 - DNA, 25 bp, Homo sapien
tgcaccctgggttctaggtttttgc

SEQ ID NO: 2367877 - DNA, 25 bp, Homo sapien
ggatgtaggatttcaccccagaatc

SEQ ID NO: 2367878 - DNA, 25 bp, Homo sapien
tcaatctcaactcttgcacattcag

SEQ ID NO: 2367879 - DNA, 25 bp, Homo sapien
gatctcagctctctgtactcacatt

SEQ ID NO: 2367880 - DNA, 25 bp, Homo sapien
gaggaagacaaccaggtcagcgtca

SEQ ID NO: 2367881 - DNA, 25 bp, Homo sapien
tcagcgtcagatcggcctctgaggg

SEQ ID NO: 2367882 - DNA, 25 bp, Homo sapien
tctccccggcgatttaactgatcct

SEQ ID NO: 2367883 - DNA, 25 bp, Homo sapien
gagcctggacctcaaacttcacgga

SEQ ID NO: 2367884 - DNA, 25 bp, Homo sapien
gaactcagtacgaagctgagcgcac

SEQ ID NO: 2367885 - DNA, 25 bp, Homo sapien
caaaggcaggcagcacatcgaactc

SEQ ID NO: 2367886 - DNA, 25 bp, Homo sapien
aaggcaggcagcacatcgaactcca

SEQ ID NO: 2367887 - DNA, 25 bp, Homo sapien
ctccccgagctggagcgaactcagt

SEQ ID NO: 2367888 - DNA, 25 bp, Homo sapien
ttcttgccccgggacagatcctaag

SEQ ID NO: 2367889 - DNA, 25 bp, Homo sapien
tgctttagagagatgccctgttggg

SEQ ID NO: 2367890 - DNA, 25 bp, Homo sapien
gatcatgaccgtattcattcttgcc

SEQ ID NO: 2367891 - DNA, 25 bp, Homo sapien
tctctcctgtgatagatcatgaccg

SEQ ID NO: 2367892 - DNA, 25 bp, Homo sapien
actgacacctcgaatccttggctgg

SEQ ID NO: 2367893 - DNA, 25 bp, Homo sapien
tcatggctgccctaggactaaagga

SEQ ID NO: 2367894 - DNA, 25 bp, Homo sapien
gaggtgccttcatatacagctggga

SEQ ID NO: 2367895 - DNA, 25 bp, Homo sapien
aaactattccgtgtccctctgtgag

SEQ ID NO: 2367896 - DNA, 25 bp, Homo sapien
gttaggtttatagccgccagtcaac

SEQ ID NO: 2367897 - DNA, 25 bp, Homo sapien
gggttaggtttatagccgccagtca

SEQ ID NO: 2367898 - DNA, 25 bp, Homo sapien
taggtttatagccgccagtcaactg

SEQ ID NO: 2367899 - DNA, 25 bp, Homo sapien
ggtttatagccgccagtcaactgac

SEQ ID NO: 2367900 - DNA, 25 bp, Homo sapien
tctttctgcaggtcggtgcactcct

SEQ ID NO: 2367901 - DNA, 25 bp, Homo sapien
cctctttctgcaggtcggtgcactc

SEQ ID NO: 2367902 - DNA, 25 bp, Homo sapien
tctgcaggtcggtgcactcctcgat

SEQ ID NO: 2367903 - DNA, 25 bp, Homo sapien
tcgccctctttctgcaggtcggtgc

SEQ ID NO: 2367904 - DNA, 25 bp, Homo sapien
ccagtgcttgactaggcggatgagg

SEQ ID NO: 2367905 - DNA, 25 bp, Homo sapien
gcttgactaggcggatgaggctctt

SEQ ID NO: 2367906 - DNA, 25 bp, Homo sapien
gcgctgcttcaggaagtctctctgt

SEQ ID NO: 2367907 - DNA, 25 bp, Homo sapien
ggcgctgcttcaggaagtctctctg

SEQ ID NO: 2367908 - DNA, 25 bp, Homo sapien
gttgcttacttaaggccagccagcc

SEQ ID NO: 2367909 - DNA, 25 bp, Homo sapien
caggaccaactatatgccgtgttac

SEQ ID NO: 2367910 - DNA, 25 bp, Homo sapien
tatgtgtactcctatggtggctaaa

SEQ ID NO: 2367911 - DNA, 25 bp, Homo sapien
ccgtgttactctagctatggcatgc

SEQ ID NO: 2367912 - DNA, 25 bp, Homo sapien
gatagagcagggtctaacatacatt

SEQ ID NO: 2367913 - DNA, 25 bp, Homo sapien
tagttaattggaaggtagattagaa

SEQ ID NO: 2367914 - DNA, 25 bp, Homo sapien
ggtagattagaaggaactattcaga

SEQ ID NO: 2367915 - DNA, 25 bp, Homo sapien
cagaagagagtatagagatatgaaa

SEQ ID NO: 2367916 - DNA, 25 bp, Homo sapien
ttatgactaattccaagaccgtccg

SEQ ID NO: 2367917 - DNA, 25 bp, Homo sapien
tccagggcatactgaggtggcagct

SEQ ID NO: 2367918 - DNA, 25 bp, Homo sapien
cagagttgctggtagtttatgacta

SEQ ID NO: 2367919 - DNA, 25 bp, Homo sapien
caagcatagaccgtcaggagctcca

SEQ ID NO: 2367920 - DNA, 25 bp, Homo sapien
ctgggtttcgtgagctgccttctca

SEQ ID NO: 2367921 - DNA, 25 bp, Homo sapien
taaaataattggcatagtgcctgcc

SEQ ID NO: 2367922 - DNA, 25 bp, Homo sapien
tacaacaagctttcaatacctggga

SEQ ID NO: 2367923 - DNA, 25 bp, Homo sapien
tccaaggcactgtacctgtatccag

SEQ ID NO: 2367924 - DNA, 25 bp, Homo sapien
caatgatgggcaacaggagattctc

SEQ ID NO: 2367925 - DNA, 25 bp, Homo sapien
tttagagagggacaggtgagaagct

SEQ ID NO: 2367926 - DNA, 25 bp, Homo sapien
ctctgtctagggagtccagatgctc

SEQ ID NO: 2367927 - DNA, 25 bp, Homo sapien
agcagcatttagagagggacaggtg

SEQ ID NO: 2367928 - DNA, 25 bp, Homo sapien
ctcctgggagagcaaaatagcagca

SEQ ID NO: 2367929 - DNA, 25 bp, Homo sapien
ctccaccacccaagtttcctgtagg

SEQ ID NO: 2367930 - DNA, 25 bp, Homo sapien
gtccgccgggtccaggatcacaggc

SEQ ID NO: 2367931 - DNA, 25 bp, Homo sapien
tgcctccaaccctttgggtctccac

SEQ ID NO: 2367932 - DNA, 25 bp, Homo sapien
ctgtagggtccgccgggtccaggat

SEQ ID NO: 2367933 - DNA, 25 bp, Homo sapien
cccaattcttaaagcatgggtaatt

SEQ ID NO: 2367934 - DNA, 25 bp, Homo sapien
cttcatggagaggggcagggatgaa

SEQ ID NO: 2367935 - DNA, 25 bp, Homo sapien
ttctggacaagggatgtgaaaattc

SEQ ID NO: 2367936 - DNA, 25 bp, Homo sapien
cagcctgtcactatatgaatataaa

SEQ ID NO: 2367937 - DNA, 25 bp, Homo sapien
aatatggagcacagcctgtcactat

SEQ ID NO: 2367938 - DNA, 25 bp, Homo sapien
tctggacaagggatgtgaaaattcc

SEQ ID NO: 2367939 - DNA, 25 bp, Homo sapien
tagacactagggactccaacaggga

SEQ ID NO: 2367940 - DNA, 25 bp, Homo sapien
tgagcccgaagcagacagtcaataa

SEQ ID NO: 2367941 - DNA, 25 bp, Homo sapien
ttctatcaaaagacaccggcactcg

SEQ ID NO: 2367942 - DNA, 25 bp, Homo sapien
gcttaggacagaacctgagcccgaa

SEQ ID NO: 2367943 - DNA, 25 bp, Homo sapien
tttgaggaaggactaacaagcccca

SEQ ID NO: 2367944 - DNA, 25 bp, Homo sapien
tttacggtagacactgtgacatgcc

SEQ ID NO: 2367945 - DNA, 25 bp, Homo sapien
acttcagccgtcagcccttttaggg

SEQ ID NO: 2367946 - DNA, 25 bp, Homo sapien
gagttggctgaaactggcattcgct

SEQ ID NO: 2367947 - DNA, 25 bp, Homo sapien
ctcctgggatcgtcggtctcatcgt

SEQ ID NO: 2367948 - DNA, 25 bp, Homo sapien
ggtctcatcgtctgcactgttgctt

SEQ ID NO: 2367949 - DNA, 25 bp, Homo sapien
gtcggtctcatcgtctgcactgttg

SEQ ID NO: 2367950 - DNA, 25 bp, Homo sapien
gggatcgtcggtctcatcgtctgca

SEQ ID NO: 2367951 - DNA, 25 bp, Homo sapien
tactcatgtgttccaatgtaaccat

SEQ ID NO: 2367952 - DNA, 25 bp, Homo sapien
aatgagggtactcatgtgttccaat

SEQ ID NO: 2367953 - DNA, 25 bp, Homo sapien
gggtactcatgtgttccaatgtaac

SEQ ID NO: 2367954 - DNA, 25 bp, Homo sapien
tgagggtactcatgtgttccaatgt

SEQ ID NO: 2367955 - DNA, 25 bp, Homo sapien
ttagacattaccctcccatcaggtg

SEQ ID NO: 2367956 - DNA, 25 bp, Homo sapien
cacctgaaaatgaaggaactggtcc

SEQ ID NO: 2367957 - DNA, 25 bp, Homo sapien
gggttctgtcctggattatacacca

SEQ ID NO: 2367958 - DNA, 25 bp, Homo sapien
gaactggtccagataacactggagc

SEQ ID NO: 2367959 - DNA, 25 bp, Homo sapien
tccctaagcaacctggaaactatag

SEQ ID NO: 2367960 - DNA, 25 bp, Homo sapien
tctgttgcaaattcaccgcatgttc

SEQ ID NO: 2367961 - DNA, 25 bp, Homo sapien
ccttctgccaaccagtgtgaggttt

SEQ ID NO: 2367962 - DNA, 25 bp, Homo sapien
gaaactataggataatgaggctcct

SEQ ID NO: 2367963 - DNA, 25 bp, Homo sapien
gcttgaggaattgcacaataggctg

SEQ ID NO: 2367964 - DNA, 25 bp, Homo sapien
cctgtggagcttaattaaatggaca

SEQ ID NO: 2367965 - DNA, 25 bp, Homo sapien
gctggcagtttagggtttgcatccc

SEQ ID NO: 2367966 - DNA, 25 bp, Homo sapien
gacttgcctgggattgtacagcaaa

SEQ ID NO: 2367967 - DNA, 25 bp, Homo sapien
gggaagcagggctctggcgcggcct

SEQ ID NO: 2367968 - DNA, 25 bp, Homo sapien
cgcggccttcggatttctggtttcg

SEQ ID NO: 2367969 - DNA, 25 bp, Homo sapien
tcggtcccgcgcgtggcgtgaaacg

SEQ ID NO: 2367970 - DNA, 25 bp, Homo sapien
ggctctccgaaccacgcccagctgg

SEQ ID NO: 2367971 - DNA, 25 bp, Homo sapien
cggccggggtgctgtacaagtccat

SEQ ID NO: 2367972 - DNA, 25 bp, Homo sapien
cgcagcggccggggtgctgtacaag

SEQ ID NO: 2367973 - DNA, 25 bp, Homo sapien
cagcggccggggtgctgtacaagtc

SEQ ID NO: 2367974 - DNA, 25 bp, Homo sapien
ctgtccagcgcagcggccggggtgc

SEQ ID NO: 2367975 - DNA, 25 bp, Homo sapien
ttctctacgaactccttccgcggct

SEQ ID NO: 2367976 - DNA, 25 bp, Homo sapien
gcgccgcgccttctctacgaactcc

SEQ ID NO: 2367977 - DNA, 25 bp, Homo sapien
gcgccttctctacgaactccttccg

SEQ ID NO: 2367978 - DNA, 25 bp, Homo sapien
gacagttttcagcacccgcggggca

SEQ ID NO: 2367979 - DNA, 25 bp, Homo sapien
tccacatagctcttgaagcagtcga

SEQ ID NO: 2367980 - DNA, 25 bp, Homo sapien
gccacccttgagagctgtgccccgg

SEQ ID NO: 2367981 - DNA, 25 bp, Homo sapien
tctggtccacatagctcttgaagca

SEQ ID NO: 2367982 - DNA, 25 bp, Homo sapien
cacagccacccttgagagctgtgcc

SEQ ID NO: 2367983 - DNA, 25 bp, Homo sapien
gatctacggatgtcaggcggaactg

SEQ ID NO: 2367984 - DNA, 25 bp, Homo sapien
gaaacgtgagtctcagaccagggac

SEQ ID NO: 2367985 - DNA, 25 bp, Homo sapien
ggcacgctctgctcaggaaacgtga

SEQ ID NO: 2367986 - DNA, 25 bp, Homo sapien
ggattccagcgatgcccgcatctca

SEQ ID NO: 2367987 - DNA, 25 bp, Homo sapien
tactgctagccacatgtccacttgg

SEQ ID NO: 2367988 - DNA, 25 bp, Homo sapien
tgtgggagggccaagcatcttgaca

SEQ ID NO: 2367989 - DNA, 25 bp, Homo sapien
gagcagtaaccgctccaggcagtgg

SEQ ID NO: 2367990 - DNA, 25 bp, Homo sapien
gcagaattctggtttcgtccccagg

SEQ ID NO: 2367991 - DNA, 25 bp, Homo sapien
tcttctgacaactctataagattac

SEQ ID NO: 2367992 - DNA, 25 bp, Homo sapien
ctggcccactagacacacttctaag

SEQ ID NO: 2367993 - DNA, 25 bp, Homo sapien
tcttactcagacagattgtagtggc

SEQ ID NO: 2367994 - DNA, 25 bp, Homo sapien
tatccccattagtattatcctcatt

SEQ ID NO: 2367995 - DNA, 25 bp, Homo sapien
gaagagcggcactccagaatgcagt

SEQ ID NO: 2367996 - DNA, 25 bp, Homo sapien
ccttaattaagaggtgtcacggaga

SEQ ID NO: 2367997 - DNA, 25 bp, Homo sapien
aaaaagccctgatcctttagcagtg

SEQ ID NO: 2367998 - DNA, 25 bp, Homo sapien
aaatggccaggcagtccctagagca

SEQ ID NO: 2367999 - DNA, 25 bp, Homo sapien
gagggtagagtagacttgtggcttg

SEQ ID NO: 2368000 - DNA, 25 bp, Homo sapien
gcttgggtttgacgccggagccggc

SEQ ID NO: 2368001 - DNA, 25 bp, Homo sapien
ctgttgaggagggtagagtagactt

SEQ ID NO: 2368002 - DNA, 25 bp, Homo sapien
ttgtggcttgggtttgacgccggag

SEQ ID NO: 2368003 - DNA, 25 bp, Homo sapien
attaggttcttcaacttggctgggc

SEQ ID NO: 2368004 - DNA, 25 bp, Homo sapien
caagattaggttcttcaacttggct

SEQ ID NO: 2368005 - DNA, 25 bp, Homo sapien
agattaggttcttcaacttggctgg

SEQ ID NO: 2368006 - DNA, 25 bp, Homo sapien
aagcaggccgcatgctcgccccctt

SEQ ID NO: 2368007 - DNA, 25 bp, Homo sapien
tcagtaacaagacagctaacccaag

SEQ ID NO: 2368008 - DNA, 25 bp, Homo sapien
gaatggccactaaatgtaagacaac

SEQ ID NO: 2368009 - DNA, 25 bp, Homo sapien
cagtttcacgactatgaaagcacaa

SEQ ID NO: 2368010 - DNA, 25 bp, Homo sapien
cagactggaagactattggaagaat

SEQ ID NO: 2368011 - DNA, 25 bp, Homo sapien
atcaggcccaggacagttcggaggc

SEQ ID NO: 2368012 - DNA, 25 bp, Homo sapien
ccttcggctaggctgaaagcatcct

SEQ ID NO: 2368013 - DNA, 25 bp, Homo sapien
tggtcagcaattccagggcatagac

SEQ ID NO: 2368014 - DNA, 25 bp, Homo sapien
agggtcctcgaagccatagttgaca

SEQ ID NO: 2368015 - DNA, 25 bp, Homo sapien
ggagagcagatggtgggctattagg

SEQ ID NO: 2368016 - DNA, 25 bp, Homo sapien
cagatggtgggctattaggaagtac

SEQ ID NO: 2368017 - DNA, 25 bp, Homo sapien
ggccccgggacaggagagcagatgg

SEQ ID NO: 2368018 - DNA, 25 bp, Homo sapien
gccccgggacaggagagcagatggt

SEQ ID NO: 2368019 - DNA, 25 bp, Homo sapien
cggccccttccaagactgcactggg

SEQ ID NO: 2368020 - DNA, 25 bp, Homo sapien
agaaagcatgggtggtcatagcagg

SEQ ID NO: 2368021 - DNA, 25 bp, Homo sapien
ggccccttccaagactgcactgggt

SEQ ID NO: 2368022 - DNA, 25 bp, Homo sapien
tgcctcctgggctagcaaatcccag

SEQ ID NO: 2368023 - DNA, 25 bp, Homo sapien
taaagcctgttccacaccatatggc

SEQ ID NO: 2368024 - DNA, 25 bp, Homo sapien
aaagcctgttccacaccatatggca

SEQ ID NO: 2368025 - DNA, 25 bp, Homo sapien
caaagtgcaaaacccaagggtcctg

SEQ ID NO: 2368026 - DNA, 25 bp, Homo sapien
ttaaagcctgttccacaccatatgg

SEQ ID NO: 2368027 - DNA, 25 bp, Homo sapien
tggcccaaacctgagcatccagcac

SEQ ID NO: 2368028 - DNA, 25 bp, Homo sapien
gtggcccaaacctgagcatccagca

SEQ ID NO: 2368029 - DNA, 25 bp, Homo sapien
gcccaaacctgagcatccagcacgt

SEQ ID NO: 2368030 - DNA, 25 bp, Homo sapien
ggcccaaacctgagcatccagcacg

SEQ ID NO: 2368031 - DNA, 25 bp, Homo sapien
ggtacacagcattgaggctcttgct

SEQ ID NO: 2368032 - DNA, 25 bp, Homo sapien
aggtccaaggccattcccggcacag

SEQ ID NO: 2368033 - DNA, 25 bp, Homo sapien
ccctgctcttgggtacacagcattg

SEQ ID NO: 2368034 - DNA, 25 bp, Homo sapien
ttcccggcacagaggggacgatgct

SEQ ID NO: 2368035 - DNA, 25 bp, Homo sapien
ttcaggtggtcctggatgaagcggt

SEQ ID NO: 2368036 - DNA, 25 bp, Homo sapien
gactcttgaggccttgtgaacacag

SEQ ID NO: 2368037 - DNA, 25 bp, Homo sapien
gaggcagcgcaagatgatgtcaatg

SEQ ID NO: 2368038 - DNA, 25 bp, Homo sapien
agttctcatggaggcagcgcaagat

SEQ ID NO: 2368039 - DNA, 25 bp, Homo sapien
gcccctggtccttgtagtccgtgaa

SEQ ID NO: 2368040 - DNA, 25 bp, Homo sapien
gctgcgctcgcatctcatcaaggat

SEQ ID NO: 2368041 - DNA, 25 bp, Homo sapien
gctaacatccgtccagctcttcagg

SEQ ID NO: 2368042 - DNA, 25 bp, Homo sapien
gccaccaggattctagctgcgctcg

SEQ ID NO: 2368043 - DNA, 25 bp, Homo sapien
atttggtttggtgccagaactgagc

SEQ ID NO: 2368044 - DNA, 25 bp, Homo sapien
gcgaagcaggccttatgctcgccct

SEQ ID NO: 2368045 - DNA, 25 bp, Homo sapien
cctcgagtagacctggggatttggt

SEQ ID NO: 2368046 - DNA, 25 bp, Homo sapien
ccactggtgaggagcctcgagtaga

SEQ ID NO: 2368047 - DNA, 25 bp, Homo sapien
cttcagcttgacagggcgaatgttc

SEQ ID NO: 2368048 - DNA, 25 bp, Homo sapien
acagggcgaatgttcatgaagttcc

SEQ ID NO: 2368049 - DNA, 25 bp, Homo sapien
gcttgacagggcgaatgttcatgaa

SEQ ID NO: 2368050 - DNA, 25 bp, Homo sapien
ttcagcttgacagggcgaatgttca

SEQ ID NO: 2368051 - DNA, 25 bp, Homo sapien
tgaccgtccagtagacacagagctg

SEQ ID NO: 2368052 - DNA, 25 bp, Homo sapien
tgatgctgttgcacgagccccagca

SEQ ID NO: 2368053 - DNA, 25 bp, Homo sapien
tgttgaaacaatcctgcctgcagcc

SEQ ID NO: 2368054 - DNA, 25 bp, Homo sapien
tcctcagtgctatagttgaccgtcc

SEQ ID NO: 2368055 - DNA, 25 bp, Homo sapien
cgtctctactcagaaagcaggcctg

SEQ ID NO: 2368056 - DNA, 25 bp, Homo sapien
agctcccagctaccgtggcccacgt

SEQ ID NO: 2368057 - DNA, 25 bp, Homo sapien
gctgcacagatgtcccgtctctact

SEQ ID NO: 2368058 - DNA, 25 bp, Homo sapien
cccacgttccaggtgggatcagcgg

SEQ ID NO: 2368059 - DNA, 25 bp, Homo sapien
ggcggttgggctggagaaattcact

SEQ ID NO: 2368060 - DNA, 25 bp, Homo sapien
tcaaaaatgaacagatggtatcaac

SEQ ID NO: 2368061 - DNA, 25 bp, Homo sapien
ggtatcaacggccttgttcacctgg

SEQ ID NO: 2368062 - DNA, 25 bp, Homo sapien
tgaacagatggtatcaacggccttg

SEQ ID NO: 2368063 - DNA, 25 bp, Homo sapien
caccttgatcactttgatgggagaa

SEQ ID NO: 2368064 - DNA, 25 bp, Homo sapien
tcactttgatgggagaattccggaa

SEQ ID NO: 2368065 - DNA, 25 bp, Homo sapien
ttgatgggagaattccggaagcagt

SEQ ID NO: 2368066 - DNA, 25 bp, Homo sapien
cttgaccaccttgatcactttgatg

SEQ ID NO: 2368067 - DNA, 25 bp, Homo sapien
atctgagcggcctcgcagagctgtg

SEQ ID NO: 2368068 - DNA, 25 bp, Homo sapien
agctgtgcctttggctgaagagcca

SEQ ID NO: 2368069 - DNA, 25 bp, Homo sapien
cacgaggtcggcatctgagcggcct

SEQ ID NO: 2368070 - DNA, 25 bp, Homo sapien
cctcgcagagctgtgcctttggctg

SEQ ID NO: 2368071 - DNA, 25 bp, Homo sapien
gatgatctcggcccgcttgttgccc

SEQ ID NO: 2368072 - DNA, 25 bp, Homo sapien
gctcggatctcggagatgatctcgg

SEQ ID NO: 2368073 - DNA, 25 bp, Homo sapien
cggcccgcttgttgccctgctcagt

SEQ ID NO: 2368074 - DNA, 25 bp, Homo sapien
gggctcggatctcggagatgatctc

SEQ ID NO: 2368075 - DNA, 25 bp, Homo sapien
cgtctgggatgtcagtgagaagctc

SEQ ID NO: 2368076 - DNA, 25 bp, Homo sapien
gattctcccatttggagacttcaaa

SEQ ID NO: 2368077 - DNA, 25 bp, Homo sapien
ggcagcacatcaaagtccacactct

SEQ ID NO: 2368078 - DNA, 25 bp, Homo sapien
ctagggcgtcaaaggctggcagcac

SEQ ID NO: 2368079 - DNA, 25 bp, Homo sapien
aaaccattcaaagctgggaatgtgc

SEQ ID NO: 2368080 - DNA, 25 bp, Homo sapien
agagtagatgcatgtattgaatgaa

SEQ ID NO: 2368081 - DNA, 25 bp, Homo sapien
caaaccattcaaagctgggaatgtg

SEQ ID NO: 2368082 - DNA, 25 bp, Homo sapien
cacaaaccattcaaagctgggaatg

SEQ ID NO: 2368083 - DNA, 25 bp, Homo sapien
atgaggtcgacgtagacttgagagc

SEQ ID NO: 2368084 - DNA, 25 bp, Homo sapien
ctgtgaagcaggtggagtactcgcc

SEQ ID NO: 2368085 - DNA, 25 bp, Homo sapien
ctgtggatgaggtcgacgtagactt

SEQ ID NO: 2368086 - DNA, 25 bp, Homo sapien
tactcgcccgcattgctgtagctgt

SEQ ID NO: 2368087 - DNA, 25 bp, Homo sapien
aggctcttcagcttggtagggcgag

SEQ ID NO: 2368088 - DNA, 25 bp, Homo sapien
tcttcagcttggtagggcgagagat

SEQ ID NO: 2368089 - DNA, 25 bp, Homo sapien
tagggcgagagatgatgaagtcccg

SEQ ID NO: 2368090 - DNA, 25 bp, Homo sapien
ggtagggcgagagatgatgaagtcc

SEQ ID NO: 2368091 - DNA, 25 bp, Homo sapien
ggagcctctccccttggagatcttg

SEQ ID NO: 2368092 - DNA, 25 bp, Homo sapien
gcctctccccttggagatcttggta

SEQ ID NO: 2368093 - DNA, 25 bp, Homo sapien
ctctccccttggagatcttggtaca

SEQ ID NO: 2368094 - DNA, 25 bp, Homo sapien
gagcctctccccttggagatcttgg

SEQ ID NO: 2368095 - DNA, 25 bp, Homo sapien
gctggcggtactgggtgaccagctc

SEQ ID NO: 2368096 - DNA, 25 bp, Homo sapien
cgtgcggaagccctcagccatgttg

SEQ ID NO: 2368097 - DNA, 25 bp, Homo sapien
gctccaggaccgtgcggaagccctc

SEQ ID NO: 2368098 - DNA, 25 bp, Homo sapien
tggcggtactgggtgaccagctcca

SEQ ID NO: 2368099 - DNA, 25 bp, Homo sapien
gaagtctccaacagtcttgtccttg

SEQ ID NO: 2368100 - DNA, 25 bp, Homo sapien
ctgctgtttcaggaagtctccaaca

SEQ ID NO: 2368101 - DNA, 25 bp, Homo sapien
cttgtccttggcgttgtagttgatg

SEQ ID NO: 2368102 - DNA, 25 bp, Homo sapien
tgtccttggcgttgtagttgatggt

SEQ ID NO: 2368103 - DNA, 25 bp, Homo sapien
gaaggaatccgttctaggaagagtg

SEQ ID NO: 2368104 - DNA, 25 bp, Homo sapien
aggaatccgttctaggaagagtgtt

SEQ ID NO: 2368105 - DNA, 25 bp, Homo sapien
ctaggaaggaatccgttctaggaag

SEQ ID NO: 2368106 - DNA, 25 bp, Homo sapien
gaaattctggaacattgggggtaga

SEQ ID NO: 2368107 - DNA, 25 bp, Homo sapien
cagggctcagagattcctcagtgct

SEQ ID NO: 2368108 - DNA, 25 bp, Homo sapien
tactaatcaaccacggtgctaccgc

SEQ ID NO: 2368109 - DNA, 25 bp, Homo sapien
gctcctatacactacagggcaggta

SEQ ID NO: 2368110 - DNA, 25 bp, Homo sapien
gggacagtcttattcctggcaacat

SEQ ID NO: 2368111 - DNA, 25 bp, Homo sapien
gttgcctgtcgggtcagccggatcc

SEQ ID NO: 2368112 - DNA, 25 bp, Homo sapien
gcccaggttgcctgtcgggtcagcc

SEQ ID NO: 2368113 - DNA, 25 bp, Homo sapien
cctgtcgggtcagccggatccagga

SEQ ID NO: 2368114 - DNA, 25 bp, Homo sapien
cccaggttgcctgtcgggtcagccg

SEQ ID NO: 2368115 - DNA, 25 bp, Homo sapien
gatggggatgccattccgtcccatg

SEQ ID NO: 2368116 - DNA, 25 bp, Homo sapien
tggggatgccattccgtcccatgca

SEQ ID NO: 2368117 - DNA, 25 bp, Homo sapien
ggatgccattccgtcccatgcagca

SEQ ID NO: 2368118 - DNA, 25 bp, Homo sapien
cattccgtcccatgcagcacagggc

SEQ ID NO: 2368119 - DNA, 25 bp, Homo sapien
tcctttggcaccacagatctctcac

SEQ ID NO: 2368120 - DNA, 25 bp, Homo sapien
ttcctttggcaccacagatctctca

SEQ ID NO: 2368121 - DNA, 25 bp, Homo sapien
cttcctttggcaccacagatctctc

SEQ ID NO: 2368122 - DNA, 25 bp, Homo sapien
tttccgtatccagtgcagacattgc

SEQ ID NO: 2368123 - DNA, 25 bp, Homo sapien
tgctagcaaccgagctcagagggct

SEQ ID NO: 2368124 - DNA, 25 bp, Homo sapien
tgagcacggttgtttggccactggc

SEQ ID NO: 2368125 - DNA, 25 bp, Homo sapien
caattaggtgtccaacaagagggtc

SEQ ID NO: 2368126 - DNA, 25 bp, Homo sapien
ggagagtcaggctgtctaaggcact

SEQ ID NO: 2368127 - DNA, 25 bp, Homo sapien
cattcctagcaggtaagttttaaca

SEQ ID NO: 2368128 - DNA, 25 bp, Homo sapien
ctagcaggtaagttttaacagtggt

SEQ ID NO: 2368129 - DNA, 25 bp, Homo sapien
tggagagtcaggctgtctaaggcac

SEQ ID NO: 2368130 - DNA, 25 bp, Homo sapien
aatatggcacaggtattagaagccc

SEQ ID NO: 2368131 - DNA, 25 bp, Homo sapien
gattaccaggcagtatcgatgaggt

SEQ ID NO: 2368132 - DNA, 25 bp, Homo sapien
aaggtgcccttagcgttggttcagc

SEQ ID NO: 2368133 - DNA, 25 bp, Homo sapien
caggttctaggtgaatcagaggagc

SEQ ID NO: 2368134 - DNA, 25 bp, Homo sapien
ctggacaacttggcagagcaggtct

SEQ ID NO: 2368135 - DNA, 25 bp, Homo sapien
ggaaagagccacctaactgcattgg

SEQ ID NO: 2368136 - DNA, 25 bp, Homo sapien
cagtcaagtctttccatccgagggt

SEQ ID NO: 2368137 - DNA, 25 bp, Homo sapien
gaatggaaggtacccaactgcgacc

SEQ ID NO: 2368138 - DNA, 25 bp, Homo sapien
tattggctaagactaggccctgctc

SEQ ID NO: 2368139 - DNA, 25 bp, Homo sapien
aatgcttcaacctatatctcctaag

SEQ ID NO: 2368140 - DNA, 25 bp, Homo sapien
tgcatgttgcatgatttatgtccct

SEQ ID NO: 2368141 - DNA, 25 bp, Homo sapien
caagaatattgtgttacagaagcac

SEQ ID NO: 2368142 - DNA, 25 bp, Homo sapien
cctgaaccatttgaatgcatgttgc

SEQ ID NO: 2368143 - DNA, 25 bp, Homo sapien
tgccggcaagacagtgaatggtagg

SEQ ID NO: 2368144 - DNA, 25 bp, Homo sapien
ccggcaagacagtgaatggtaggat

SEQ ID NO: 2368145 - DNA, 25 bp, Homo sapien
gctgccggcaagacagtgaatggta

SEQ ID NO: 2368146 - DNA, 25 bp, Homo sapien
ggctgccggcaagacagtgaatggt

SEQ ID NO: 2368147 - DNA, 25 bp, Homo sapien
agcaggcaccgaggacagctgggac

SEQ ID NO: 2368148 - DNA, 25 bp, Homo sapien
caggcaccgaggacagctgggactc

SEQ ID NO: 2368149 - DNA, 25 bp, Homo sapien
tgagcaggcaccgaggacagctggg

SEQ ID NO: 2368150 - DNA, 25 bp, Homo sapien
ctgagcaggcaccgaggacagctgg

SEQ ID NO: 2368151 - DNA, 25 bp, Homo sapien
tgtctgacattcttcgtagggcttc

SEQ ID NO: 2368152 - DNA, 25 bp, Homo sapien
gaactgttcgggttcctgcaggacg

SEQ ID NO: 2368153 - DNA, 25 bp, Homo sapien
gtattcctggataaaccaacccagc

SEQ ID NO: 2368154 - DNA, 25 bp, Homo sapien
ggtgttcaccatctcgtcgatcagt

SEQ ID NO: 2368155 - DNA, 25 bp, Homo sapien
ggtgaacccatcaagggacttctgg

SEQ ID NO: 2368156 - DNA, 25 bp, Homo sapien
ccccagttttatcgaggatgtcacg

SEQ ID NO: 2368157 - DNA, 25 bp, Homo sapien
gactgttttccgtccataggagcca

SEQ ID NO: 2368158 - DNA, 25 bp, Homo sapien
gacaagggtaccatcggagttgcct

SEQ ID NO: 2368159 - DNA, 25 bp, Homo sapien
tctggcacccgcttctttggctttt

SEQ ID NO: 2368160 - DNA, 25 bp, Homo sapien
gagctgtctggcacccgcttctttg

SEQ ID NO: 2368161 - DNA, 25 bp, Homo sapien
ctagaggttgcacagagctgtctgg

SEQ ID NO: 2368162 - DNA, 25 bp, Homo sapien
tctttggcttttctctcctgacacc

SEQ ID NO: 2368163 - DNA, 25 bp, Homo sapien
gctgaacttttaggacacctggaca

SEQ ID NO: 2368164 - DNA, 25 bp, Homo sapien
ctttgttacagggtagggcatcctc

SEQ ID NO: 2368165 - DNA, 25 bp, Homo sapien
tgcaagcatgatctgcggaccagca

SEQ ID NO: 2368166 - DNA, 25 bp, Homo sapien
tctcgttcaaataaggccaatgctg

SEQ ID NO: 2368167 - DNA, 25 bp, Homo sapien
gcagactgcaaactcaccaggactg

SEQ ID NO: 2368168 - DNA, 25 bp, Homo sapien
ttttgagctctcgatagatccaggg

SEQ ID NO: 2368169 - DNA, 25 bp, Homo sapien
tgtcttatccaaggatcttttgagc

SEQ ID NO: 2368170 - DNA, 25 bp, Homo sapien
caggacggttgtcaaaaaacttctg

SEQ ID NO: 2368171 - DNA, 25 bp, Homo sapien
gcatacggagacagcgagggtaaat

SEQ ID NO: 2368172 - DNA, 25 bp, Homo sapien
gcagctccagggcatacggagacag

SEQ ID NO: 2368173 - DNA, 25 bp, Homo sapien
gctccagggcatacggagacagcga

SEQ ID NO: 2368174 - DNA, 25 bp, Homo sapien
catacggagacagcgagggtaaatc

SEQ ID NO: 2368175 - DNA, 25 bp, Homo sapien
atccaatagatacacagcttctcct

SEQ ID NO: 2368176 - DNA, 25 bp, Homo sapien
tgaccatccaatagatacacagctt

SEQ ID NO: 2368177 - DNA, 25 bp, Homo sapien
gaccatccaatagatacacagcttc

SEQ ID NO: 2368178 - DNA, 25 bp, Homo sapien
ccatccaatagatacacagcttctc

SEQ ID NO: 2368179 - DNA, 25 bp, Homo sapien
ttccaaagaggtatgcctggcatgc

SEQ ID NO: 2368180 - DNA, 25 bp, Homo sapien
cactggcttgatagggcaaggctga

SEQ ID NO: 2368181 - DNA, 25 bp, Homo sapien
gcaaggctgagatctcattccaaag

SEQ ID NO: 2368182 - DNA, 25 bp, Homo sapien
cattcttctggtccagcactggctt

SEQ ID NO: 2368183 - DNA, 25 bp, Homo sapien
tcttagctccttccttctataaggg

SEQ ID NO: 2368184 - DNA, 25 bp, Homo sapien
aaaaaagtcagttgagctgcttgtg

SEQ ID NO: 2368185 - DNA, 25 bp, Homo sapien
ttgtctacgacatcaagcccctctg

SEQ ID NO: 2368186 - DNA, 25 bp, Homo sapien
gggaatccggcaacttgaatttgga

SEQ ID NO: 2368187 - DNA, 25 bp, Homo sapien
tattggttgggtcaactggatccaa

SEQ ID NO: 2368188 - DNA, 25 bp, Homo sapien
ggttgggtcaactggatccaagatt

SEQ ID NO: 2368189 - DNA, 25 bp, Homo sapien
attattggttgggtcaactggatcc

SEQ ID NO: 2368190 - DNA, 25 bp, Homo sapien
gggtcaactggatccaagattactg

SEQ ID NO: 2368191 - DNA, 25 bp, Homo sapien
gcaggtaactcattatccaggttgg

SEQ ID NO: 2368192 - DNA, 25 bp, Homo sapien
gagaagtcaaccaggtttgagcttc

SEQ ID NO: 2368193 - DNA, 25 bp, Homo sapien
attccaagatggtgcaggtaactca

SEQ ID NO: 2368194 - DNA, 25 bp, Homo sapien
tccaggttgggagaagtcaaccagg

SEQ ID NO: 2368195 - DNA, 25 bp, Homo sapien
gtgcttataaggacaagggtactta

SEQ ID NO: 2368196 - DNA, 25 bp, Homo sapien
gccactgtgcttataaggacaaggg

SEQ ID NO: 2368197 - DNA, 25 bp, Homo sapien
gagccactgtgcttataaggacaag

SEQ ID NO: 2368198 - DNA, 25 bp, Homo sapien
actgtgcttataaggacaagggtac

SEQ ID NO: 2368199 - DNA, 25 bp, Homo sapien
tctgctctaggaagcatttgttggg

SEQ ID NO: 2368200 - DNA, 25 bp, Homo sapien
cttgatgaacttatccagaaggtgg

SEQ ID NO: 2368201 - DNA, 25 bp, Homo sapien
ggatcttggctgttgattgtcggaa

SEQ ID NO: 2368202 - DNA, 25 bp, Homo sapien
aatgtacggatgatgttaacagcac

SEQ ID NO: 2368203 - DNA, 25 bp, Homo sapien
tcttcagagctgtgcctttggcggt

SEQ ID NO: 2368204 - DNA, 25 bp, Homo sapien
ttaagtgagttatggaacacgacga

SEQ ID NO: 2368205 - DNA, 25 bp, Homo sapien
gagctgtgcctttggcggttgatcc

SEQ ID NO: 2368206 - DNA, 25 bp, Homo sapien
acacgacgagatcggcatcagagcc

SEQ ID NO: 2368207 - DNA, 25 bp, Homo sapien
aggctttcagctgttcatggatttc

SEQ ID NO: 2368208 - DNA, 25 bp, Homo sapien
gctttcagctgttcatggatttcct

SEQ ID NO: 2368209 - DNA, 25 bp, Homo sapien
ccaaaaggctttcagctgttcatgg

SEQ ID NO: 2368210 - DNA, 25 bp, Homo sapien
tcagctgttcatggatttccttgac

SEQ ID NO: 2368211 - DNA, 25 bp, Homo sapien
caaagctgacactttcgttgaggac

SEQ ID NO: 2368212 - DNA, 25 bp, Homo sapien
caggaagcacatcaaagctgacact

SEQ ID NO: 2368213 - DNA, 25 bp, Homo sapien
agctgacactttcgttgaggacttt

SEQ ID NO: 2368214 - DNA, 25 bp, Homo sapien
aggaagcacatcaaagctgacactt

SEQ ID NO: 2368215 - DNA, 25 bp, Homo sapien
ggtgtggagccagaactcagctgac

SEQ ID NO: 2368216 - DNA, 25 bp, Homo sapien
gggctgggtgtggagccagaactca

SEQ ID NO: 2368217 - DNA, 25 bp, Homo sapien
ctgggtgtggagccagaactcagct

SEQ ID NO: 2368218 - DNA, 25 bp, Homo sapien
ctgcataaacctcggggctgggtgt

SEQ ID NO: 2368219 - DNA, 25 bp, Homo sapien
gaggtccgaggatttatacagatca

SEQ ID NO: 2368220 - DNA, 25 bp, Homo sapien
cgggaggtccgaggatttatacaga

SEQ ID NO: 2368221 - DNA, 25 bp, Homo sapien
ggtccgaggatttatacagatcaat

SEQ ID NO: 2368222 - DNA, 25 bp, Homo sapien
ccgggaggtccgaggatttatacag

SEQ ID NO: 2368223 - DNA, 25 bp, Homo sapien
tgggccgggagcgaatgaagtttcg

SEQ ID NO: 2368224 - DNA, 25 bp, Homo sapien
gcttcaccaggcgaattaaatcctt

SEQ ID NO: 2368225 - DNA, 25 bp, Homo sapien
ccagtgcttcaccaggcgaattaaa

SEQ ID NO: 2368226 - DNA, 25 bp, Homo sapien
ttggtgggccgggagcgaatgaagt

SEQ ID NO: 2368227 - DNA, 25 bp, Homo sapien
aaagttgtaattgaccttccagaag

SEQ ID NO: 2368228 - DNA, 25 bp, Homo sapien
aaccttctgcagtgtcaaaatccgg

SEQ ID NO: 2368229 - DNA, 25 bp, Homo sapien
agagctgctgatattgtgtgaccag

SEQ ID NO: 2368230 - DNA, 25 bp, Homo sapien
cagctccaggactgtccggaaacct

SEQ ID NO: 2368231 - DNA, 25 bp, Homo sapien
ttttctgcaactggctcagtagaaa

SEQ ID NO: 2368232 - DNA, 25 bp, Homo sapien
ttctgcaactggctcagtagaaact

SEQ ID NO: 2368233 - DNA, 25 bp, Homo sapien
gttttctgcaactggctcagtagaa

SEQ ID NO: 2368234 - DNA, 25 bp, Homo sapien
tttctgcaactggctcagtagaaac

SEQ ID NO: 2368235 - DNA, 25 bp, Homo sapien
gatagcgttaattcttagggacaca

SEQ ID NO: 2368236 - DNA, 25 bp, Homo sapien
taaatcggcccgtgaatgatagcgt

SEQ ID NO: 2368237 - DNA, 25 bp, Homo sapien
tcagggacgtggtatcttgaacctt

SEQ ID NO: 2368238 - DNA, 25 bp, Homo sapien
gctggtggccctaagcagatggata

SEQ ID NO: 2368239 - DNA, 25 bp, Homo sapien
ttcggctgggtccaagatcacaggc

SEQ ID NO: 2368240 - DNA, 25 bp, Homo sapien
gttcggctgggtccaagatcacagg

SEQ ID NO: 2368241 - DNA, 25 bp, Homo sapien
gggttcggctgggtccaagatcaca

SEQ ID NO: 2368242 - DNA, 25 bp, Homo sapien
ggttcggctgggtccaagatcacag

SEQ ID NO: 2368243 - DNA, 25 bp, Homo sapien
gtggtattgggtttccagtcccatc

SEQ ID NO: 2368244 - DNA, 25 bp, Homo sapien
atgccaacaccaacggtcccctcca

SEQ ID NO: 2368245 - DNA, 25 bp, Homo sapien
tggtattgggtttccagtcccatcc

SEQ ID NO: 2368246 - DNA, 25 bp, Homo sapien
gaagatgccaacaccaacggtcccc

SEQ ID NO: 2368247 - DNA, 25 bp, Homo sapien
ttaatttcaggttgctacagtagga

SEQ ID NO: 2368248 - DNA, 25 bp, Homo sapien
tttgattcaagcctgttacagggct

SEQ ID NO: 2368249 - DNA, 25 bp, Homo sapien
ctgtgagctgggtttcctttatttg

SEQ ID NO: 2368250 - DNA, 25 bp, Homo sapien
ttcaagcctgttacagggctatttc

SEQ ID NO: 2368251 - DNA, 25 bp, Homo sapien
gctttcagggccataagtactcaaa

SEQ ID NO: 2368252 - DNA, 25 bp, Homo sapien
tcacaactgggtggcatctactggg

SEQ ID NO: 2368253 - DNA, 25 bp, Homo sapien
taacagctaaagagggtggagccaa

SEQ ID NO: 2368254 - DNA, 25 bp, Homo sapien
caaagaactgtctagccccaaatgt

SEQ ID NO: 2368255 - DNA, 25 bp, Homo sapien
tagtgcaagggttctcacctagggc

SEQ ID NO: 2368256 - DNA, 25 bp, Homo sapien
gaaaaacatacgtgggagagcaatg

SEQ ID NO: 2368257 - DNA, 25 bp, Homo sapien
tagagctaaccccacggttggcttg

SEQ ID NO: 2368258 - DNA, 25 bp, Homo sapien
tgtatctgggaaggtaactattgcc

SEQ ID NO: 2368259 - DNA, 25 bp, Homo sapien
ttattcaggattctatggcttctgg

SEQ ID NO: 2368260 - DNA, 25 bp, Homo sapien
tctcattgacaataggatggatcct

SEQ ID NO: 2368261 - DNA, 25 bp, Homo sapien
tgagaacatctcattgacaatagga

SEQ ID NO: 2368262 - DNA, 25 bp, Homo sapien
gatggatcctagctccacaacttcc

SEQ ID NO: 2368263 - DNA, 25 bp, Homo sapien
tgagtgactctttctcacggtgagc

SEQ ID NO: 2368264 - DNA, 25 bp, Homo sapien
tgatttggcaagaggatactcctgg

SEQ ID NO: 2368265 - DNA, 25 bp, Homo sapien
ccgagagcaagatcacagagttatg

SEQ ID NO: 2368266 - DNA, 25 bp, Homo sapien
gatgagttggaagcaccgagagcaa

SEQ ID NO: 2368267 - DNA, 25 bp, Homo sapien
caaagagtatgtagggtggcaagca

SEQ ID NO: 2368268 - DNA, 25 bp, Homo sapien
aatcaagatgcgctaccttcctagt

SEQ ID NO: 2368269 - DNA, 25 bp, Homo sapien
gacactcctatcaggaaactctaga

SEQ ID NO: 2368270 - DNA, 25 bp, Homo sapien
ggcttggccaactccttccttgaaa

SEQ ID NO: 2368271 - DNA, 25 bp, Homo sapien
aagctcagctggaggagcctcgggt

SEQ ID NO: 2368272 - DNA, 25 bp, Homo sapien
gggtcagagcagccgaagccctcca

SEQ ID NO: 2368273 - DNA, 25 bp, Homo sapien
ctgctgcaatctgaccaagctcagc

SEQ ID NO: 2368274 - DNA, 25 bp, Homo sapien
ctgcaatctgaccaagctcagctgg

SEQ ID NO: 2368275 - DNA, 25 bp, Homo sapien
gaataccgtacaaatgtacaccaag

SEQ ID NO: 2368276 - DNA, 25 bp, Homo sapien
attttgaatggtaggctccgttggt

SEQ ID NO: 2368277 - DNA, 25 bp, Homo sapien
ctccgttggtggtccagaacacata

SEQ ID NO: 2368278 - DNA, 25 bp, Homo sapien
aatgtcacctctttgaataccgtac

SEQ ID NO: 2368279 - DNA, 25 bp, Homo sapien
gcacataactacggcttttaaagaa

SEQ ID NO: 2368280 - DNA, 25 bp, Homo sapien
cactggcacataactacggctttta

SEQ ID NO: 2368281 - DNA, 25 bp, Homo sapien
tggcacataactacggcttttaaag

SEQ ID NO: 2368282 - DNA, 25 bp, Homo sapien
actggcacataactacggcttttaa

SEQ ID NO: 2368283 - DNA, 25 bp, Homo sapien
tgtcagttgatttattggtagatcc

SEQ ID NO: 2368284 - DNA, 25 bp, Homo sapien
ctgcagactgatggactctccttca

SEQ ID NO: 2368285 - DNA, 25 bp, Homo sapien
ttattggtagatccaaaactctctt

SEQ ID NO: 2368286 - DNA, 25 bp, Homo sapien
caataaccattgagatgtcagttga

SEQ ID NO: 2368287 - DNA, 25 bp, Homo sapien
tcattctagctctatcttagcatgg

SEQ ID NO: 2368288 - DNA, 25 bp, Homo sapien
cattctagctctatcttagcatggg

SEQ ID NO: 2368289 - DNA, 25 bp, Homo sapien
ctagctctatcttagcatgggttac

SEQ ID NO: 2368290 - DNA, 25 bp, Homo sapien
ttctagctctatcttagcatgggtt

SEQ ID NO: 2368291 - DNA, 25 bp, Homo sapien
ttccgcgcgtggacagactgcccgg

SEQ ID NO: 2368292 - DNA, 25 bp, Homo sapien
cgcctctcttcgtctccggctccgg

SEQ ID NO: 2368293 - DNA, 25 bp, Homo sapien
cgccgcgccgagctttccgcgcgtg

SEQ ID NO: 2368294 - DNA, 25 bp, Homo sapien
agctttccgcgcgtggacagactgc

SEQ ID NO: 2368295 - DNA, 25 bp, Homo sapien
ccgttaaaggaatgtgggatggcca

SEQ ID NO: 2368296 - DNA, 25 bp, Homo sapien
gaaacagctctaaagtccttggccc

SEQ ID NO: 2368297 - DNA, 25 bp, Homo sapien
caagtgtctctcttatgccggagga

SEQ ID NO: 2368298 - DNA, 25 bp, Homo sapien
cttctccgataaagggtgctgccct

SEQ ID NO: 2368299 - DNA, 25 bp, Homo sapien
gcccaccgtggcctggccgtgacat

SEQ ID NO: 2368300 - DNA, 25 bp, Homo sapien
agcccaccgtggcctggccgtgaca

SEQ ID NO: 2368301 - DNA, 25 bp, Homo sapien
cagcccaccgtggcctggccgtgac

SEQ ID NO: 2368302 - DNA, 25 bp, Homo sapien
ctgcggtgggaagcccagaccattc

SEQ ID NO: 2368303 - DNA, 25 bp, Homo sapien
gtgggaagcccagaccattcacagg

SEQ ID NO: 2368304 - DNA, 25 bp, Homo sapien
ggaagcccagaccattcacaggcat

SEQ ID NO: 2368305 - DNA, 25 bp, Homo sapien
ggtgggaagcccagaccattcacag

SEQ ID NO: 2368306 - DNA, 25 bp, Homo sapien
ctgtgtcctggcgaaactggtgcat

SEQ ID NO: 2368307 - DNA, 25 bp, Homo sapien
ttcagcacgttctcaatgtggtggc

SEQ ID NO: 2368308 - DNA, 25 bp, Homo sapien
tggtggcacacggtggccgtgtagg

SEQ ID NO: 2368309 - DNA, 25 bp, Homo sapien
aggaccacggaaccgcgagcgtcct

SEQ ID NO: 2368310 - DNA, 25 bp, Homo sapien
ccatcagtgatggtggtcaatgcct

SEQ ID NO: 2368311 - DNA, 25 bp, Homo sapien
tagttcatgctctcggatctgccac

SEQ ID NO: 2368312 - DNA, 25 bp, Homo sapien
tgtacatccggtccttgctcagctg

SEQ ID NO: 2368313 - DNA, 25 bp, Homo sapien
caatgcctggagttacggaaacata

SEQ ID NO: 2368314 - DNA, 25 bp, Homo sapien
ctgctctcacagccctgccctctac

SEQ ID NO: 2368315 - DNA, 25 bp, Homo sapien
ttctgctctcacagccctgccctct

SEQ ID NO: 2368316 - DNA, 25 bp, Homo sapien
tctgctctcacagccctgccctcta

SEQ ID NO: 2368317 - DNA, 25 bp, Homo sapien
gctctcacagccctgccctctaccc

SEQ ID NO: 2368318 - DNA, 25 bp, Homo sapien
gtgagggggcacggctgaacaaacc

SEQ ID NO: 2368319 - DNA, 25 bp, Homo sapien
agggggcacggctgaacaaaccgca

SEQ ID NO: 2368320 - DNA, 25 bp, Homo sapien
gggcacggctgaacaaaccgcagcc

SEQ ID NO: 2368321 - DNA, 25 bp, Homo sapien
ggggcacggctgaacaaaccgcagc

SEQ ID NO: 2368322 - DNA, 25 bp, Homo sapien
ctggagggcttcaaagggaacctca

SEQ ID NO: 2368323 - DNA, 25 bp, Homo sapien
tggagggcttcaaagggaacctcac

SEQ ID NO: 2368324 - DNA, 25 bp, Homo sapien
ccttcggccttgggcttcccatatg

SEQ ID NO: 2368325 - DNA, 25 bp, Homo sapien
gcttcccatatgtggcaatctttgt

SEQ ID NO: 2368326 - DNA, 25 bp, Homo sapien
gccttgggcttcccatatgtggcaa

SEQ ID NO: 2368327 - DNA, 25 bp, Homo sapien
cttgggcttcccatatgtggcaatc

SEQ ID NO: 2368328 - DNA, 25 bp, Homo sapien
ccagcccagccaccagctgagcata

SEQ ID NO: 2368329 - DNA, 25 bp, Homo sapien
aagaccctgatggctcctgggccca

SEQ ID NO: 2368330 - DNA, 25 bp, Homo sapien
cagcccagccaccagctgagcatac

SEQ ID NO: 2368331 - DNA, 25 bp, Homo sapien
cccaagaccctgatggctcctgggc

SEQ ID NO: 2368332 - DNA, 25 bp, Homo sapien
gcctcctttgattgcctcgtccttt

SEQ ID NO: 2368333 - DNA, 25 bp, Homo sapien
tcctttgttctgcatctcagggtgc

SEQ ID NO: 2368334 - DNA, 25 bp, Homo sapien
cccgtcaccggcctgccactgctgt

SEQ ID NO: 2368335 - DNA, 25 bp, Homo sapien
aaggcccagtcggtcatcgggacaa

SEQ ID NO: 2368336 - DNA, 25 bp, Homo sapien
cacttctattagttgcccaggccct

SEQ ID NO: 2368337 - DNA, 25 bp, Homo sapien
cctggcaaattagagacaggccttg

SEQ ID NO: 2368338 - DNA, 25 bp, Homo sapien
gaaacttgggcaagatcacctggca

SEQ ID NO: 2368339 - DNA, 25 bp, Homo sapien
caggagctgagttatgctggcccca

SEQ ID NO: 2368340 - DNA, 25 bp, Homo sapien
tgtcagctggaggactgcacaagct

SEQ ID NO: 2368341 - DNA, 25 bp, Homo sapien
gcttcttccagctgaactggagaaa

SEQ ID NO: 2368342 - DNA, 25 bp, Homo sapien
tgtttggcagaaaaattccaggctt

SEQ ID NO: 2368343 - DNA, 25 bp, Homo sapien
cacagctgccagtgactgcttcatg

SEQ ID NO: 2368344 - DNA, 25 bp, Homo sapien
gcagatgtccatatcgtaggccgtc

SEQ ID NO: 2368345 - DNA, 25 bp, Homo sapien
tgcccggcgccgacgacgggtcgta

SEQ ID NO: 2368346 - DNA, 25 bp, Homo sapien
acgggtcgtagaagttgcgccgcac

SEQ ID NO: 2368347 - DNA, 25 bp, Homo sapien
gcttctcgtaggcgttctggatggt

SEQ ID NO: 2368348 - DNA, 25 bp, Homo sapien
tagcagaagcctagcgatgagaggt

SEQ ID NO: 2368349 - DNA, 25 bp, Homo sapien
gatgaggtagcagaagcctagcgat

SEQ ID NO: 2368350 - DNA, 25 bp, Homo sapien
gcctagcgatgagaggtcgagccac

SEQ ID NO: 2368351 - DNA, 25 bp, Homo sapien
cagaagcctagcgatgagaggtcga

SEQ ID NO: 2368352 - DNA, 25 bp, Homo sapien
ctgcgacttagggatggagcccacg

SEQ ID NO: 2368353 - DNA, 25 bp, Homo sapien
gccacgactgcgacttagggatgga

SEQ ID NO: 2368354 - DNA, 25 bp, Homo sapien
cgccggcgcgtctggcggttcatct

SEQ ID NO: 2368355 - DNA, 25 bp, Homo sapien
gcgcgtctggcggttcatctgcgac

SEQ ID NO: 2368356 - DNA, 25 bp, Homo sapien
cagcaggcactgctggcaggagcag

SEQ ID NO: 2368357 - DNA, 25 bp, Homo sapien
agggctggcccgagctggcgcccac

SEQ ID NO: 2368358 - DNA, 25 bp, Homo sapien
gagcagggctggcccgagctggcgc

SEQ ID NO: 2368359 - DNA, 25 bp, Homo sapien
agcagggctggcccgagctggcgcc

SEQ ID NO: 2368360 - DNA, 25 bp, Homo sapien
agagcgcggcgcctgtgaaggtggc

SEQ ID NO: 2368361 - DNA, 25 bp, Homo sapien
ttgcggcgctgcgaggccaggatgg

SEQ ID NO: 2368362 - DNA, 25 bp, Homo sapien
gggcgcacggcaagcgcgcctggag

SEQ ID NO: 2368363 - DNA, 25 bp, Homo sapien
ggcaagcgcgcctggaggccctcca

SEQ ID NO: 2368364 - DNA, 25 bp, Homo sapien
gaggcgcgcgcgctcacgctggtgg

SEQ ID NO: 2368365 - DNA, 25 bp, Homo sapien
cggcgggatggaggcgcgcgcgctc

SEQ ID NO: 2368366 - DNA, 25 bp, Homo sapien
ccggcgggatggaggcgcgcgcgct

SEQ ID NO: 2368367 - DNA, 25 bp, Homo sapien
cgcgcgcgctcacgctggtggtgcg

SEQ ID NO: 2368368 - DNA, 25 bp, Homo sapien
aacatatgcagaaatgatgcaaaac

SEQ ID NO: 2368369 - DNA, 25 bp, Homo sapien
cacctcgcaacctattaaacatatg

SEQ ID NO: 2368370 - DNA, 25 bp, Homo sapien
aattcatttcacctcgcaacctatt

SEQ ID NO: 2368371 - DNA, 25 bp, Homo sapien
taaacatatgcagaaatgatgcaaa

SEQ ID NO: 2368372 - DNA, 25 bp, Homo sapien
tagagctcaagcacactctatagct

SEQ ID NO: 2368373 - DNA, 25 bp, Homo sapien
catgtggctggagacaacagagctc

SEQ ID NO: 2368374 - DNA, 25 bp, Homo sapien
caggagaaatgatgtcggctgtggg

SEQ ID NO: 2368375 - DNA, 25 bp, Homo sapien
ggacatgtttaatgatccgcacccc

SEQ ID NO: 2368376 - DNA, 25 bp, Homo sapien
cataggctgcacttgggcctcagct

SEQ ID NO: 2368377 - DNA, 25 bp, Homo sapien
caacaggctccacgggtcttgagag

SEQ ID NO: 2368378 - DNA, 25 bp, Homo sapien
gtctcagcaatggaaagctttaggc

SEQ ID NO: 2368379 - DNA, 25 bp, Homo sapien
cagtgggtagacctgtctgcctggc

SEQ ID NO: 2368380 - DNA, 25 bp, Homo sapien
cacctcagcctcctgtgtagctggg

SEQ ID NO: 2368381 - DNA, 25 bp, Homo sapien
gactacaggcacgcaccaccgcacc

SEQ ID NO: 2368382 - DNA, 25 bp, Homo sapien
gctcactgcaacctgggctcaaggg

SEQ ID NO: 2368383 - DNA, 25 bp, Homo sapien
tcctcccacctcagcctcctgtgta

SEQ ID NO: 2368384 - DNA, 25 bp, Homo sapien
gacatctggattgagccccttgagg

SEQ ID NO: 2368385 - DNA, 25 bp, Homo sapien
tccattggacaagagtcggtggctc

SEQ ID NO: 2368386 - DNA, 25 bp, Homo sapien
cacttggtggctgctcggctataca

SEQ ID NO: 2368387 - DNA, 25 bp, Homo sapien
caggatagtatcacgtggccaggac

SEQ ID NO: 2368388 - DNA, 25 bp, Homo sapien
cattcaagttcttcaccgggagtgc

SEQ ID NO: 2368389 - DNA, 25 bp, Homo sapien
caagttcttcaccgggagtgcgggg

SEQ ID NO: 2368390 - DNA, 25 bp, Homo sapien
ccattcaagttcttcaccgggagtg

SEQ ID NO: 2368391 - DNA, 25 bp, Homo sapien
ttcaagttcttcaccgggagtgcgg

SEQ ID NO: 2368392 - DNA, 25 bp, Homo sapien
cgctcttgctcacgggcggcgggtg

SEQ ID NO: 2368393 - DNA, 25 bp, Homo sapien
ccgcgcacagcagtatcccggtcat

SEQ ID NO: 2368394 - DNA, 25 bp, Homo sapien
ccccgggcacgccaggcacgggctt

SEQ ID NO: 2368395 - DNA, 25 bp, Homo sapien
ttcttcttggtcttgcggcacaccc

SEQ ID NO: 2368396 - DNA, 25 bp, Homo sapien
tgcatgtatcttcgaaccacatcct

SEQ ID NO: 2368397 - DNA, 25 bp, Homo sapien
cttctgcatgtatcttcgaaccaca

SEQ ID NO: 2368398 - DNA, 25 bp, Homo sapien
tatcttcgaaccacatcctcgggat

SEQ ID NO: 2368399 - DNA, 25 bp, Homo sapien
caccttctgcatgtatcttcgaacc

SEQ ID NO: 2368400 - DNA, 25 bp, Homo sapien
taagggcttaactatcaaaagcaaa

SEQ ID NO: 2368401 - DNA, 25 bp, Homo sapien
aaatatgggtgaaaatgacacaaaa

SEQ ID NO: 2368402 - DNA, 25 bp, Homo sapien
gccccttcccatatattgaattctg

SEQ ID NO: 2368403 - DNA, 25 bp, Homo sapien
ccaggtgaattaagggcttaactat

SEQ ID NO: 2368404 - DNA, 25 bp, Homo sapien
gctgtgaccagtcgctccatgcaga

SEQ ID NO: 2368405 - DNA, 25 bp, Homo sapien
cagtcgctccatgcagatggtgcag

SEQ ID NO: 2368406 - DNA, 25 bp, Homo sapien
cttgtgccgaagcacgccctcgtag

SEQ ID NO: 2368407 - DNA, 25 bp, Homo sapien
cgccctcgtagcctgatgctgtgac

SEQ ID NO: 2368408 - DNA, 25 bp, Homo sapien
tctccccgtagatggccttgcaggt

SEQ ID NO: 2368409 - DNA, 25 bp, Homo sapien
tgcggatggtctgggtatcagggaa

SEQ ID NO: 2368410 - DNA, 25 bp, Homo sapien
ggaagccgggcagcgagtgggggat

SEQ ID NO: 2368411 - DNA, 25 bp, Homo sapien
ccaggcggctgcgtacccgtcttct

SEQ ID NO: 2368412 - DNA, 25 bp, Homo sapien
tggatgcctgtggggatgtcataga

SEQ ID NO: 2368413 - DNA, 25 bp, Homo sapien
ggatgcctgtggggatgtcatagac

SEQ ID NO: 2368414 - DNA, 25 bp, Homo sapien
ctggatgcctgtggggatgtcatag

SEQ ID NO: 2368415 - DNA, 25 bp, Homo sapien
gatagcagtggcgagggaatcctct

SEQ ID NO: 2368416 - DNA, 25 bp, Homo sapien
ctcttgcggtgaacttcttcccggg

SEQ ID NO: 2368417 - DNA, 25 bp, Homo sapien
cggcctttctcgttgttgggtagat

SEQ ID NO: 2368418 - DNA, 25 bp, Homo sapien
tctcgttgttgggtagatagcagtg

SEQ ID NO: 2368419 - DNA, 25 bp, Homo sapien
tactgttcgggtgctgcttttggga

SEQ ID NO: 2368420 - DNA, 25 bp, Homo sapien
tgggaggaatgtgagagcagggatt

SEQ ID NO: 2368421 - DNA, 25 bp, Homo sapien
cctcagtggctcaggaaacgagata

SEQ ID NO: 2368422 - DNA, 25 bp, Homo sapien
tgcctgtgcctatctcccatgccct

SEQ ID NO: 2368423 - DNA, 25 bp, Homo sapien
tcagccagcacgttgtctaggtagc

SEQ ID NO: 2368424 - DNA, 25 bp, Homo sapien
agtcttctctcccaggccgtgatga

SEQ ID NO: 2368425 - DNA, 25 bp, Homo sapien
tggcccgtgaggttggatccaaact

SEQ ID NO: 2368426 - DNA, 25 bp, Homo sapien
caagccttggctgcagcctcggata

SEQ ID NO: 2368427 - DNA, 25 bp, Homo sapien
gaaaagagcaatcgctggcatccct

SEQ ID NO: 2368428 - DNA, 25 bp, Homo sapien
gacacacctggcgaaggaggcattt

SEQ ID NO: 2368429 - DNA, 25 bp, Homo sapien
tgtgcgtgcatgagttcaacaggac

SEQ ID NO: 2368430 - DNA, 25 bp, Homo sapien
tccagtttgcagacaaggctgtaca

SEQ ID NO: 2368431 - DNA, 25 bp, Homo sapien
aaatgtttgggaacatgtgactggc

SEQ ID NO: 2368432 - DNA, 25 bp, Homo sapien
ctccaaggactcgtttccggtgttg

SEQ ID NO: 2368433 - DNA, 25 bp, Homo sapien
tctgagaatgaaccacggagtacaa

SEQ ID NO: 2368434 - DNA, 25 bp, Homo sapien
taggtcagtgcaccctcaaacttct

SEQ ID NO: 2368435 - DNA, 25 bp, Homo sapien
ggatttccctgaaagcagacgtcag

SEQ ID NO: 2368436 - DNA, 25 bp, Homo sapien
gcatgttcacttaggtttcccagag

SEQ ID NO: 2368437 - DNA, 25 bp, Homo sapien
catgagaattctccattaggctgag

SEQ ID NO: 2368438 - DNA, 25 bp, Homo sapien
cctctctagggataagcatgttcac

SEQ ID NO: 2368439 - DNA, 25 bp, Homo sapien
ggcggtgcacccttgtctccgccgc

SEQ ID NO: 2368440 - DNA, 25 bp, Homo sapien
ccctccccacctggcggtgcaccct

SEQ ID NO: 2368441 - DNA, 25 bp, Homo sapien
cacgcccatcaggacgggggcccct

SEQ ID NO: 2368442 - DNA, 25 bp, Homo sapien
tccgccgcccgtgcgctctggcgcg

SEQ ID NO: 2368443 - DNA, 25 bp, Homo sapien
tctgtggagcgtggtgtggaagcct

SEQ ID NO: 2368444 - DNA, 25 bp, Homo sapien
gcaaccgaccacacaacattccatc

SEQ ID NO: 2368445 - DNA, 25 bp, Homo sapien
acaacattccatcgcctagctgccg

SEQ ID NO: 2368446 - DNA, 25 bp, Homo sapien
tttgcacaagcttaggagaccctgg

SEQ ID NO: 2368447 - DNA, 25 bp, Homo sapien
agtcggaaatattcctcccagggca

SEQ ID NO: 2368448 - DNA, 25 bp, Homo sapien
gccagtcggaaatattcctcccagg

SEQ ID NO: 2368449 - DNA, 25 bp, Homo sapien
caaagccagtcggaaatattcctcc

SEQ ID NO: 2368450 - DNA, 25 bp, Homo sapien
ttgcaaagccagtcggaaatattcc

SEQ ID NO: 2368451 - DNA, 25 bp, Homo sapien
cagattctaggaccctggtgtggct

SEQ ID NO: 2368452 - DNA, 25 bp, Homo sapien
aaggaatctttcaacacagaggagg

SEQ ID NO: 2368453 - DNA, 25 bp, Homo sapien
tgaacaaattgtcctgagcacctac

SEQ ID NO: 2368454 - DNA, 25 bp, Homo sapien
caagccacgtggacatctccaggga

SEQ ID NO: 2368455 - DNA, 25 bp, Homo sapien
agacgcagtactggtgggacatgat

SEQ ID NO: 2368456 - DNA, 25 bp, Homo sapien
cgcagtactggtgggacatgatcct

SEQ ID NO: 2368457 - DNA, 25 bp, Homo sapien
agtactggtgggacatgatcctcag

SEQ ID NO: 2368458 - DNA, 25 bp, Homo sapien
ctccaggagacgcagtactggtggg

SEQ ID NO: 2368459 - DNA, 25 bp, Homo sapien
cacctcgttacagtagtgggggctc

SEQ ID NO: 2368460 - DNA, 25 bp, Homo sapien
cctcgttacagtagtgggggctcac

SEQ ID NO: 2368461 - DNA, 25 bp, Homo sapien
acctcgttacagtagtgggggctca

SEQ ID NO: 2368462 - DNA, 25 bp, Homo sapien
tgttcccaacgctgtttcagggctg

SEQ ID NO: 2368463 - DNA, 25 bp, Homo sapien
gtcaaagcggatgaacgatcccttt

SEQ ID NO: 2368464 - DNA, 25 bp, Homo sapien
ttagctcccgctccttttgttccag

SEQ ID NO: 2368465 - DNA, 25 bp, Homo sapien
tccagctgttcccaacgctgtttca

SEQ ID NO: 2368466 - DNA, 25 bp, Homo sapien
tggcggggagttcggcacctccatc

SEQ ID NO: 2368467 - DNA, 25 bp, Homo sapien
tacggtggggagaagacgaccttca

SEQ ID NO: 2368468 - DNA, 25 bp, Homo sapien
ctgacattcgctcgcaaaaccaggg

SEQ ID NO: 2368469 - DNA, 25 bp, Homo sapien
cctgccctgacattcgctcgcaaaa

SEQ ID NO: 2368470 - DNA, 25 bp, Homo sapien
ctgggtccacagacgcagcgcctcc

SEQ ID NO: 2368471 - DNA, 25 bp, Homo sapien
cgcgcagggctccaggcgcttaagc

SEQ ID NO: 2368472 - DNA, 25 bp, Homo sapien
ccaggcgcttaagccggcgctgcag

SEQ ID NO: 2368473 - DNA, 25 bp, Homo sapien
ttcccgccgtagctcctggagctgg

SEQ ID NO: 2368474 - DNA, 25 bp, Homo sapien
cactgcagcgtacgctccctggcag

SEQ ID NO: 2368475 - DNA, 25 bp, Homo sapien
ccaccagctccggaacctcttggaa

SEQ ID NO: 2368476 - DNA, 25 bp, Homo sapien
tgtgcgagcacctcgtccggccagg

SEQ ID NO: 2368477 - DNA, 25 bp, Homo sapien
ccgcgagctgctcgcgctccctgag

SEQ ID NO: 2368478 - DNA, 25 bp, Homo sapien
tgatgctggcacactagctggaaca

SEQ ID NO: 2368479 - DNA, 25 bp, Homo sapien
gtgctctagctgtccctccgtgtcc

SEQ ID NO: 2368480 - DNA, 25 bp, Homo sapien
tcttctccgctgctgtgttctgaat

SEQ ID NO: 2368481 - DNA, 25 bp, Homo sapien
agctgtccctccgtgtcctcgatgt

SEQ ID NO: 2368482 - DNA, 25 bp, Homo sapien
ggctggaggtgccataaagaggggt

SEQ ID NO: 2368483 - DNA, 25 bp, Homo sapien
ctggaggtgccataaagaggggtcc

SEQ ID NO: 2368484 - DNA, 25 bp, Homo sapien
tgcccgacaatcgagccacggctgg

SEQ ID NO: 2368485 - DNA, 25 bp, Homo sapien
gatgcacccaggaatccatcctaga

SEQ ID NO: 2368486 - DNA, 25 bp, Homo sapien
aatccatcctagaccgggtgcctgc

SEQ ID NO: 2368487 - DNA, 25 bp, Homo sapien
caagggctctgaccgtagagggcca

SEQ ID NO: 2368488 - DNA, 25 bp, Homo sapien
caggtgttgacacgtgtgggctgtt

SEQ ID NO: 2368489 - DNA, 25 bp, Homo sapien
tgttgacacgtgtgggctgttggat

SEQ ID NO: 2368490 - DNA, 25 bp, Homo sapien
ggtgttgacacgtgtgggctgttgg

SEQ ID NO: 2368491 - DNA, 25 bp, Homo sapien
ttacaggtgttgacacgtgtgggct

SEQ ID NO: 2368492 - DNA, 25 bp, Homo sapien
gttactgaattctggcagccgcagg

SEQ ID NO: 2368493 - DNA, 25 bp, Homo sapien
ggagcctttctccttgacgggcaga

SEQ ID NO: 2368494 - DNA, 25 bp, Homo sapien
tctgctagtctcatgtgccacaagg

SEQ ID NO: 2368495 - DNA, 25 bp, Homo sapien
tgccacaaggtaacaggccaggctt

SEQ ID NO: 2368496 - DNA, 25 bp, Homo sapien
tcaccgtatcaacagctgagaagga

SEQ ID NO: 2368497 - DNA, 25 bp, Homo sapien
tgtgacctactcttatctccgtggg

SEQ ID NO: 2368498 - DNA, 25 bp, Homo sapien
tgaacttacaaccatctgtgggctc

SEQ ID NO: 2368499 - DNA, 25 bp, Homo sapien
actagaacttgagggtgaacttaca

SEQ ID NO: 2368500 - DNA, 25 bp, Homo sapien
cagagaggtcctgcatgaacagctt

SEQ ID NO: 2368501 - DNA, 25 bp, Homo sapien
gagaggtcctgcatgaacagcttca

SEQ ID NO: 2368502 - DNA, 25 bp, Homo sapien
agaggtcctgcatgaacagcttcac

SEQ ID NO: 2368503 - DNA, 25 bp, Homo sapien
agagaggtcctgcatgaacagcttc

SEQ ID NO: 2368504 - DNA, 25 bp, Homo sapien
tcccactggacatggttgcagctgg

SEQ ID NO: 2368505 - DNA, 25 bp, Homo sapien
ctcccactggacatggttgcagctg

SEQ ID NO: 2368506 - DNA, 25 bp, Homo sapien
gcaggagttcgccagcaaagccagg

SEQ ID NO: 2368507 - DNA, 25 bp, Homo sapien
aggtcatggctgcaccggtcagagc

SEQ ID NO: 2368508 - DNA, 25 bp, Homo sapien
caggcaggccaagacttgagttggc

SEQ ID NO: 2368509 - DNA, 25 bp, Homo sapien
ctcagggtttggcaatggaattttt

SEQ ID NO: 2368510 - DNA, 25 bp, Homo sapien
gaaaaggagcactgtatggccacag

SEQ ID NO: 2368511 - DNA, 25 bp, Homo sapien
cctgcaggagccatcatctgtgaaa

SEQ ID NO: 2368512 - DNA, 25 bp, Homo sapien
ttagggtgggcatcagcagacgttc

SEQ ID NO: 2368513 - DNA, 25 bp, Homo sapien
tgggagtgatcccaacagctgagct

SEQ ID NO: 2368514 - DNA, 25 bp, Homo sapien
atctgaccggcgaggcccagagcga

SEQ ID NO: 2368515 - DNA, 25 bp, Homo sapien
gatgatcgtgactcggacgaagaag

SEQ ID NO: 2368516 - DNA, 25 bp, Homo sapien
cagattagggtaacgctgaggcaca

SEQ ID NO: 2368517 - DNA, 25 bp, Homo sapien
gggcttcacgcagcttccttaacga

SEQ ID NO: 2368518 - DNA, 25 bp, Homo sapien
catctccaataagtgggacctgtgt

SEQ ID NO: 2368519 - DNA, 25 bp, Homo sapien
gggggcggggccgagcagcttcagc

SEQ ID NO: 2368520 - DNA, 25 bp, Homo sapien
gccgcatctccaatagatgggacct

SEQ ID NO: 2368521 - DNA, 25 bp, Homo sapien
atgggacctggtgctgggggcgggg

SEQ ID NO: 2368522 - DNA, 25 bp, Homo sapien
ccgcatctccaatagatgggacctg

SEQ ID NO: 2368523 - DNA, 25 bp, Homo sapien
cctgcagggaccgtaagaagaagcg

SEQ ID NO: 2368524 - DNA, 25 bp, Homo sapien
tacaagcgagacctgtatcctgagg

SEQ ID NO: 2368525 - DNA, 25 bp, Homo sapien
gaagaagcggtttgtgggacagtca

SEQ ID NO: 2368526 - DNA, 25 bp, Homo sapien
agattaagacagagagcggccgcta

SEQ ID NO: 2368527 - DNA, 25 bp, Homo sapien
tttcctttaatgctccaacaacctg

SEQ ID NO: 2368528 - DNA, 25 bp, Homo sapien
ctgacaagagggtcgggtgaggaga

SEQ ID NO: 2368529 - DNA, 25 bp, Homo sapien
caagagggtcgggtgaggagacagg

SEQ ID NO: 2368530 - DNA, 25 bp, Homo sapien
aacaacctgacaagagggtcgggtg

SEQ ID NO: 2368531 - DNA, 25 bp, Homo sapien
gggacattggagaggttgcttaacc

SEQ ID NO: 2368532 - DNA, 25 bp, Homo sapien
agttcagaccaagggcttctcacgg

SEQ ID NO: 2368533 - DNA, 25 bp, Homo sapien
ccacatccgtagaaggcaagtaaat

SEQ ID NO: 2368534 - DNA, 25 bp, Homo sapien
aaatttggcccaaccttgcactggc

SEQ ID NO: 2368535 - DNA, 25 bp, Homo sapien
tcaggtgcgtgtgtactaggccgcc

SEQ ID NO: 2368536 - DNA, 25 bp, Homo sapien
caggaggtccctaaacatggagagg

SEQ ID NO: 2368537 - DNA, 25 bp, Homo sapien
gtccctaaacatggagagggtcctc

SEQ ID NO: 2368538 - DNA, 25 bp, Homo sapien
gccactcactcaggtgcgtgtgtac

SEQ ID NO: 2368539 - DNA, 25 bp, Homo sapien
gcactgcggacgcggcccggaccat

SEQ ID NO: 2368540 - DNA, 25 bp, Homo sapien
gctacgtgtgaacggcccgcgaatc

SEQ ID NO: 2368541 - DNA, 25 bp, Homo sapien
tgaacggcccgcgaatccagaaacc

SEQ ID NO: 2368542 - DNA, 25 bp, Homo sapien
ggcccgcgaatccagaaacccagaa

SEQ ID NO: 2368543 - DNA, 25 bp, Homo sapien
tcccggggcaccgcgcgcggacgga

SEQ ID NO: 2368544 - DNA, 25 bp, Homo sapien
cggcagcctaggccgtcccggggca

SEQ ID NO: 2368545 - DNA, 25 bp, Homo sapien
cgtcccggggcaccgcgcgcggacg

SEQ ID NO: 2368546 - DNA, 25 bp, Homo sapien
ccgggatccccgtcaatctgcagcc

SEQ ID NO: 2368547 - DNA, 25 bp, Homo sapien
atccccgtcaatctgcagcccggaa

SEQ ID NO: 2368548 - DNA, 25 bp, Homo sapien
cccgtcaatctgcagcccggaatgc

SEQ ID NO: 2368549 - DNA, 25 bp, Homo sapien
gggatccccgtcaatctgcagcccg

SEQ ID NO: 2368550 - DNA, 25 bp, Homo sapien
tgagcatcttggctcgtaggcatcg

SEQ ID NO: 2368551 - DNA, 25 bp, Homo sapien
tcttggctcgtaggcatcgggatcc

SEQ ID NO: 2368552 - DNA, 25 bp, Homo sapien
caccaggtctggacccgtcggtgag

SEQ ID NO: 2368553 - DNA, 25 bp, Homo sapien
gctcgtaggcatcgggatcctcagg

SEQ ID NO: 2368554 - DNA, 25 bp, Homo sapien
ctaaaacggtggaagtgaaatctga

SEQ ID NO: 2368555 - DNA, 25 bp, Homo sapien
acggtggaagtgaaatctgagtcca

SEQ ID NO: 2368556 - DNA, 25 bp, Homo sapien
taaaacggtggaagtgaaatctgag

SEQ ID NO: 2368557 - DNA, 25 bp, Homo sapien
aaacggtggaagtgaaatctgagtc

SEQ ID NO: 2368558 - DNA, 25 bp, Homo sapien
gtccattttacggatcacaaaactg

SEQ ID NO: 2368559 - DNA, 25 bp, Homo sapien
tgaagtagcttcgaatttgtccatt

SEQ ID NO: 2368560 - DNA, 25 bp, Homo sapien
tcaacagcactgtgaagtagcttcg

SEQ ID NO: 2368561 - DNA, 25 bp, Homo sapien
caaagagctttacaagcattgtttc

SEQ ID NO: 2368562 - DNA, 25 bp, Homo sapien
aggtcagagtagcacccctgagcca

SEQ ID NO: 2368563 - DNA, 25 bp, Homo sapien
tgagaggaggtcagagtagcacccc

SEQ ID NO: 2368564 - DNA, 25 bp, Homo sapien
tgtgagaggaggtcagagtagcacc

SEQ ID NO: 2368565 - DNA, 25 bp, Homo sapien
gaggaggtcagagtagcacccctga

SEQ ID NO: 2368566 - DNA, 25 bp, Homo sapien
ctggtgacagcaggtgtgctctgcc

SEQ ID NO: 2368567 - DNA, 25 bp, Homo sapien
gtgacagcaggtgtgctctgccggc

SEQ ID NO: 2368568 - DNA, 25 bp, Homo sapien
tggtgacagcaggtgtgctctgccg

SEQ ID NO: 2368569 - DNA, 25 bp, Homo sapien
gacagcaggtgtgctctgccggcca

SEQ ID NO: 2368570 - DNA, 25 bp, Homo sapien
tgacggccagctccacgggggtctt

SEQ ID NO: 2368571 - DNA, 25 bp, Homo sapien
cactgacggccagctccacgggggt

SEQ ID NO: 2368572 - DNA, 25 bp, Homo sapien
cccactgacggccagctccacgggg

SEQ ID NO: 2368573 - DNA, 25 bp, Homo sapien
cggccagctccacgggggtcttcat

SEQ ID NO: 2368574 - DNA, 25 bp, Homo sapien
tccacatatgacgtcctggccttga

SEQ ID NO: 2368575 - DNA, 25 bp, Homo sapien
ttgcccacgcctctggttctgttag

SEQ ID NO: 2368576 - DNA, 25 bp, Homo sapien
tgccaaacagagtctcatccacata

SEQ ID NO: 2368577 - DNA, 25 bp, Homo sapien
cacccagggcggatcgaagtccggt

SEQ ID NO: 2368578 - DNA, 25 bp, Homo sapien
ttgttcttcttccttggtgtgaggg

SEQ ID NO: 2368579 - DNA, 25 bp, Homo sapien
ggtgctgccccttgagggggtggtc

SEQ ID NO: 2368580 - DNA, 25 bp, Homo sapien
gctgccccttgagggggtggtctca

SEQ ID NO: 2368581 - DNA, 25 bp, Homo sapien
ttcttcttccttggtgtgagggtgg

SEQ ID NO: 2368582 - DNA, 25 bp, Homo sapien
tttccacatgagtaaactggctcag

SEQ ID NO: 2368583 - DNA, 25 bp, Homo sapien
tactgtgcgaagcactgcagacccc

SEQ ID NO: 2368584 - DNA, 25 bp, Homo sapien
ccagagctgtaactggaatccaggt

SEQ ID NO: 2368585 - DNA, 25 bp, Homo sapien
cctaggtaggaataattggtcctat

SEQ ID NO: 2368586 - DNA, 25 bp, Homo sapien
tgtcatttcaaggatcgaacacatt

SEQ ID NO: 2368587 - DNA, 25 bp, Homo sapien
gatcttatgcctcagctgactcctc

SEQ ID NO: 2368588 - DNA, 25 bp, Homo sapien
catgagctaccccatgtggccaaaa

SEQ ID NO: 2368589 - DNA, 25 bp, Homo sapien
cagatgcccagtttgtgacatttgg

SEQ ID NO: 2368590 - DNA, 25 bp, Homo sapien
gcctcccgggagctgggagtacagg

SEQ ID NO: 2368591 - DNA, 25 bp, Homo sapien
caccacacttggctaatttttgcat

SEQ ID NO: 2368592 - DNA, 25 bp, Homo sapien
cgcacaccaccacacttggctaatt

SEQ ID NO: 2368593 - DNA, 25 bp, Homo sapien
caccaccacacttggctaatttttg

SEQ ID NO: 2368594 - DNA, 25 bp, Homo sapien
gcaaatggaagataaacgccatgag

SEQ ID NO: 2368595 - DNA, 25 bp, Homo sapien
taggtggtggcgtccacaagagagc

SEQ ID NO: 2368596 - DNA, 25 bp, Homo sapien
caagagagcacggagctttgcggca

SEQ ID NO: 2368597 - DNA, 25 bp, Homo sapien
tcgggagccaaacagcgactcatca

SEQ ID NO: 2368598 - DNA, 25 bp, Homo sapien
ggccccgaagctggcgccttcagat

SEQ ID NO: 2368599 - DNA, 25 bp, Homo sapien
cctccctggggcggggcgagtggct

SEQ ID NO: 2368600 - DNA, 25 bp, Homo sapien
tccctggggcggggcgagtggctac

SEQ ID NO: 2368601 - DNA, 25 bp, Homo sapien
tgcctccctggggcggggcgagtgg

SEQ ID NO: 2368602 - DNA, 25 bp, Homo sapien
gtgcctccctggggcggggcgagtg

SEQ ID NO: 2368603 - DNA, 25 bp, Homo sapien
taacccacccatagataacttctgg

SEQ ID NO: 2368604 - DNA, 25 bp, Homo sapien
gagtgtaacccacccatagataact

SEQ ID NO: 2368605 - DNA, 25 bp, Homo sapien
gggcgtgaagagtgtaacccaccca

SEQ ID NO: 2368606 - DNA, 25 bp, Homo sapien
tgaagagtgtaacccacccatagat

SEQ ID NO: 2368607 - DNA, 25 bp, Homo sapien
ctgaggcccatttgtgtggggggca

SEQ ID NO: 2368608 - DNA, 25 bp, Homo sapien
tcaccagggggctccggaaggtcac

SEQ ID NO: 2368609 - DNA, 25 bp, Homo sapien
ctaactgagcgagccctggaagtca

SEQ ID NO: 2368610 - DNA, 25 bp, Homo sapien
acccctgacgtggaaggcctgagat

SEQ ID NO: 2368611 - DNA, 25 bp, Homo sapien
tccggaaggtcacccctgacgtgga

SEQ ID NO: 2368612 - DNA, 25 bp, Homo sapien
tctgggtggccccacctcgtcgtgg

SEQ ID NO: 2368613 - DNA, 25 bp, Homo sapien
ttctgggtggccccacctcgtcgtg

SEQ ID NO: 2368614 - DNA, 25 bp, Homo sapien
gccccacctcgtcgtggggtagatg

SEQ ID NO: 2368615 - DNA, 25 bp, Homo sapien
ccacctcgtcgtggggtagatggca

SEQ ID NO: 2368616 - DNA, 25 bp, Homo sapien
cccctgggttggcactaatttggag

SEQ ID NO: 2368617 - DNA, 25 bp, Homo sapien
caaatccgcaatcgggagaaaaagg

SEQ ID NO: 2368618 - DNA, 25 bp, Homo sapien
ggccccataggcaaccctgatgaaa

SEQ ID NO: 2368619 - DNA, 25 bp, Homo sapien
agattgtcaggataaagggaggcac

SEQ ID NO: 2368620 - DNA, 25 bp, Homo sapien
tcacgccgtttattcgcacttggca

SEQ ID NO: 2368621 - DNA, 25 bp, Homo sapien
cagcaagacaatggatgatgtggga

SEQ ID NO: 2368622 - DNA, 25 bp, Homo sapien
ttattcgcacttggcagcaagacaa

SEQ ID NO: 2368623 - DNA, 25 bp, Homo sapien
gccgtttattcgcacttggcagcaa

SEQ ID NO: 2368624 - DNA, 25 bp, Homo sapien
tgttcactcacaaatctcccagttg

SEQ ID NO: 2368625 - DNA, 25 bp, Homo sapien
tgccgttgtgttccccaggcttcac

SEQ ID NO: 2368626 - DNA, 25 bp, Homo sapien
tctagggcttgcagacttagctgga

SEQ ID NO: 2368627 - DNA, 25 bp, Homo sapien
gctggaaactaatcctgagcaggaa

SEQ ID NO: 2368628 - DNA, 25 bp, Homo sapien
tgtcagcccagagattatggttcct

SEQ ID NO: 2368629 - DNA, 25 bp, Homo sapien
gatggacacatcactcaccagggca

SEQ ID NO: 2368630 - DNA, 25 bp, Homo sapien
tttgaagccacattgaagggaacgc

SEQ ID NO: 2368631 - DNA, 25 bp, Homo sapien
aggctgcccctaaccctgttctggg

SEQ ID NO: 2368632 - DNA, 25 bp, Homo sapien
acacaggtcttcgagtaaattttgg

SEQ ID NO: 2368633 - DNA, 25 bp, Homo sapien
cgagtaaattttggttctaagagag

SEQ ID NO: 2368634 - DNA, 25 bp, Homo sapien
cccaggccggaagccggactgcgga

SEQ ID NO: 2368635 - DNA, 25 bp, Homo sapien
taagagaggttactacctattctga

SEQ ID NO: 2368636 - DNA, 25 bp, Homo sapien
cagggcaggaattttaaacggagat

SEQ ID NO: 2368637 - DNA, 25 bp, Homo sapien
tgtcgtcagagtcagatgcatttcc

SEQ ID NO: 2368638 - DNA, 25 bp, Homo sapien
tcatgtaacgttgcgtttccagccg

SEQ ID NO: 2368639 - DNA, 25 bp, Homo sapien
caatcctagttccacgggctttatc

SEQ ID NO: 2368640 - DNA, 25 bp, Homo sapien
gagagttcctacataccccctattc

SEQ ID NO: 2368641 - DNA, 25 bp, Homo sapien
cataagggataagggttcacgcttg

SEQ ID NO: 2368642 - DNA, 25 bp, Homo sapien
acagcctgccccaccgtcaacctcc

SEQ ID NO: 2368643 - DNA, 25 bp, Homo sapien
ttacataagggataagggttcacgc

SEQ ID NO: 2368644 - DNA, 25 bp, Homo sapien
tccacaacctgcagggagccggcct

SEQ ID NO: 2368645 - DNA, 25 bp, Homo sapien
tttcgctccacaacctgcagggagc

SEQ ID NO: 2368646 - DNA, 25 bp, Homo sapien
caacctgcagggagccggcctccat

SEQ ID NO: 2368647 - DNA, 25 bp, Homo sapien
ctttcgctccacaacctgcagggag

SEQ ID NO: 2368648 - DNA, 25 bp, Homo sapien
ctttccattggtgaaaggtcaaaat

SEQ ID NO: 2368649 - DNA, 25 bp, Homo sapien
gcggaacaataaattgaatggtgaa

SEQ ID NO: 2368650 - DNA, 25 bp, Homo sapien
caactgagcggaacaataaattgaa

SEQ ID NO: 2368651 - DNA, 25 bp, Homo sapien
aaatggcggtgcttctgattggtca

SEQ ID NO: 2368652 - DNA, 25 bp, Homo sapien
tgattggccaactatcacgtccttc

SEQ ID NO: 2368653 - DNA, 25 bp, Homo sapien
tcacagcgtcctactggctaactgg

SEQ ID NO: 2368654 - DNA, 25 bp, Homo sapien
aactatcacgtccttccgcaggtct

SEQ ID NO: 2368655 - DNA, 25 bp, Homo sapien
taccgtgatgaactctgattggcca

SEQ ID NO: 2368656 - DNA, 25 bp, Homo sapien
gtccgcaccgcgcagcctagcccgc

SEQ ID NO: 2368657 - DNA, 25 bp, Homo sapien
gagcccgaagctgttgcagccgccg

SEQ ID NO: 2368658 - DNA, 25 bp, Homo sapien
cgccaaaaccccgagcccgaagctg

SEQ ID NO: 2368659 - DNA, 25 bp, Homo sapien
agctctcctatccaccgcctaccgt

SEQ ID NO: 2368660 - DNA, 25 bp, Homo sapien
gaactgcttgagcctagcagttcaa

SEQ ID NO: 2368661 - DNA, 25 bp, Homo sapien
gaccagcctgggcaatgtagcaaga

SEQ ID NO: 2368662 - DNA, 25 bp, Homo sapien
agaactgcttgagcctagcagttca

SEQ ID NO: 2368663 - DNA, 25 bp, Homo sapien
tgggcaatgtagcaagactccatct

SEQ ID NO: 2368664 - DNA, 25 bp, Homo sapien
ctgtggccctcaggatatgatatcc

SEQ ID NO: 2368665 - DNA, 25 bp, Homo sapien
tccagggcttgaaatagtctctggt

SEQ ID NO: 2368666 - DNA, 25 bp, Homo sapien
agggcttgaaatagtctctggtttg

SEQ ID NO: 2368667 - DNA, 25 bp, Homo sapien
tgtggccctcaggatatgatatcca

SEQ ID NO: 2368668 - DNA, 25 bp, Homo sapien
ttggcccaggccgttggagggagcc

SEQ ID NO: 2368669 - DNA, 25 bp, Homo sapien
caggatgagcggcacgtcgtcatcc

SEQ ID NO: 2368670 - DNA, 25 bp, Homo sapien
cctcatccaaggtcaggatgagcgg

SEQ ID NO: 2368671 - DNA, 25 bp, Homo sapien
ggcacgtcgtcatccaaactcacag

SEQ ID NO: 2368672 - DNA, 25 bp, Homo sapien
ggattctagactgacttgccagcaa

SEQ ID NO: 2368673 - DNA, 25 bp, Homo sapien
actggtcaagcaagaaggcactaga

SEQ ID NO: 2368674 - DNA, 25 bp, Homo sapien
gatgaatggatctcagggcctagta

SEQ ID NO: 2368675 - DNA, 25 bp, Homo sapien
ggcactagaacacgcaaggcttcgt

SEQ ID NO: 2368676 - DNA, 25 bp, Homo sapien
tctggcccaccttgactgagcctgg

SEQ ID NO: 2368677 - DNA, 25 bp, Homo sapien
tcctcctggctacggcggccctgcg

SEQ ID NO: 2368678 - DNA, 25 bp, Homo sapien
ttctctggtgccagccggcgaggat

SEQ ID NO: 2368679 - DNA, 25 bp, Homo sapien
agcctggtgccaactcgccctggct

SEQ ID NO: 2368680 - DNA, 25 bp, Homo sapien
ttcactctttggcaagtatgctggg

SEQ ID NO: 2368681 - DNA, 25 bp, Homo sapien
gctgtgcaagccccttgggcttctt

SEQ ID NO: 2368682 - DNA, 25 bp, Homo sapien
tgtgcaagccccttgggcttcttca

SEQ ID NO: 2368683 - DNA, 25 bp, Homo sapien
aaaagctgtgcaagccccttgggct

SEQ ID NO: 2368684 - DNA, 25 bp, Homo sapien
gaggattcactctagccaagggcaa

SEQ ID NO: 2368685 - DNA, 25 bp, Homo sapien
tctcaagattgacgtcactccaggt

SEQ ID NO: 2368686 - DNA, 25 bp, Homo sapien
gtcatttgaaacctccccgcagagg

SEQ ID NO: 2368687 - DNA, 25 bp, Homo sapien
tctcagaggaaacgtgaactcagcc

SEQ ID NO: 2368688 - DNA, 25 bp, Homo sapien
cctgacccaggcacatcctctcccc

SEQ ID NO: 2368689 - DNA, 25 bp, Homo sapien
acatcctctccccaggcatacctga

SEQ ID NO: 2368690 - DNA, 25 bp, Homo sapien
gacccaggcacatcctctccccagg

SEQ ID NO: 2368691 - DNA, 25 bp, Homo sapien
aggcacatcctctccccaggcatac

SEQ ID NO: 2368692 - DNA, 25 bp, Homo sapien
tgttctaagtcctaaatgtgcggcc

SEQ ID NO: 2368693 - DNA, 25 bp, Homo sapien
agatgatattgaaagtaacggcccc

SEQ ID NO: 2368694 - DNA, 25 bp, Homo sapien
aaagtgctttggataccgcctgaca

SEQ ID NO: 2368695 - DNA, 25 bp, Homo sapien
cagtatggctctaggagtgcaggca

SEQ ID NO: 2368696 - DNA, 25 bp, Homo sapien
acaagtgaaaggcagcgcagccggc

SEQ ID NO: 2368697 - DNA, 25 bp, Homo sapien
agcacaggtcgctctgcccaagctg

SEQ ID NO: 2368698 - DNA, 25 bp, Homo sapien
cagcactaagcacaggtcgctctgc

SEQ ID NO: 2368699 - DNA, 25 bp, Homo sapien
gacatcatgcttgtcgacgaccacc

SEQ ID NO: 2368700 - DNA, 25 bp, Homo sapien
tgggggtgtaggccaggcggaaagc

SEQ ID NO: 2368701 - DNA, 25 bp, Homo sapien
ccctccactgtttccgcaaggctgg

SEQ ID NO: 2368702 - DNA, 25 bp, Homo sapien
ctccactgtttccgcaaggctgggg

SEQ ID NO: 2368703 - DNA, 25 bp, Homo sapien
ctgggggtgtaggccaggcggaaag

SEQ ID NO: 2368704 - DNA, 25 bp, Homo sapien
tattgacacacgttagtaaaggctc

SEQ ID NO: 2368705 - DNA, 25 bp, Homo sapien
aatactcacaaagcactcggagccc

SEQ ID NO: 2368706 - DNA, 25 bp, Homo sapien
cagcgcctaccagaatgacaacgag

SEQ ID NO: 2368707 - DNA, 25 bp, Homo sapien
gcatgagatgctacgccgaaagaaa

SEQ ID NO: 2368708 - DNA, 25 bp, Homo sapien
aggcatggattgccatgccctgcta

SEQ ID NO: 2368709 - DNA, 25 bp, Homo sapien
tgtgagacgaaacagaaccctggac

SEQ ID NO: 2368710 - DNA, 25 bp, Homo sapien
ctcgcacatcctctgtgagacgaaa

SEQ ID NO: 2368711 - DNA, 25 bp, Homo sapien
gacacccaagttcactccagctgtg

SEQ ID NO: 2368712 - DNA, 25 bp, Homo sapien
gagatcgctttggataaaagggccc

SEQ ID NO: 2368713 - DNA, 25 bp, Homo sapien
cagcccggctgcgtaaaccactggg

SEQ ID NO: 2368714 - DNA, 25 bp, Homo sapien
cctgggccagagatcgctttggata

SEQ ID NO: 2368715 - DNA, 25 bp, Homo sapien
gggcagcccggctgcgtaaaccact

SEQ ID NO: 2368716 - DNA, 25 bp, Homo sapien
cagcatgcagcagcgtcctggtggt

SEQ ID NO: 2368717 - DNA, 25 bp, Homo sapien
agacgctccctcgaaacagctggct

SEQ ID NO: 2368718 - DNA, 25 bp, Homo sapien
ggctgctttgcacgccacatcggaa

SEQ ID NO: 2368719 - DNA, 25 bp, Homo sapien
tcctggtggtgccagataaatagaa

SEQ ID NO: 2368720 - DNA, 25 bp, Homo sapien
gaagacaggacgacctcaccacggg

SEQ ID NO: 2368721 - DNA, 25 bp, Homo sapien
tgagaagacaggacgacctcaccac

SEQ ID NO: 2368722 - DNA, 25 bp, Homo sapien
cttgagaagacaggacgacctcacc

SEQ ID NO: 2368723 - DNA, 25 bp, Homo sapien
ccagaaggccggcagctagcccttg

SEQ ID NO: 2368724 - DNA, 25 bp, Homo sapien
ggaactggggcacgtcgcaggggcc

SEQ ID NO: 2368725 - DNA, 25 bp, Homo sapien
caggccagctggaaaggcaggaact

SEQ ID NO: 2368726 - DNA, 25 bp, Homo sapien
cagaacgggttcttccaggccagct

SEQ ID NO: 2368727 - DNA, 25 bp, Homo sapien
gttcttgcccagagcagaacgggtt

SEQ ID NO: 2368728 - DNA, 25 bp, Homo sapien
gactggcactcgcatctttggagta

SEQ ID NO: 2368729 - DNA, 25 bp, Homo sapien
gtcaatgactggcactcgcatcttt

SEQ ID NO: 2368730 - DNA, 25 bp, Homo sapien
ggcactcgcatctttggagtaccag

SEQ ID NO: 2368731 - DNA, 25 bp, Homo sapien
tcgcatctttggagtaccaggcaca

SEQ ID NO: 2368732 - DNA, 25 bp, Homo sapien
gaaccagagccagcgtgtagaggcc

SEQ ID NO: 2368733 - DNA, 25 bp, Homo sapien
tgtagaggccatcaccgcaggtggc

SEQ ID NO: 2368734 - DNA, 25 bp, Homo sapien
tatgggaagcgctgctgcgtagctc

SEQ ID NO: 2368735 - DNA, 25 bp, Homo sapien
gatgagaaccatccaggaaccagag

SEQ ID NO: 2368736 - DNA, 25 bp, Homo sapien
tattctaagaccaacaactggcctg

SEQ ID NO: 2368737 - DNA, 25 bp, Homo sapien
tacaggtatatggtgacttcaaggg

SEQ ID NO: 2368738 - DNA, 25 bp, Homo sapien
tagagaagaggttcaccagccagtg

SEQ ID NO: 2368739 - DNA, 25 bp, Homo sapien
tcaccacgtggcctcaaaaagaggc

SEQ ID NO: 2368740 - DNA, 25 bp, Homo sapien
tgcacctggccggaaagaattcttc

SEQ ID NO: 2368741 - DNA, 25 bp, Homo sapien
atgcaccaacacacaggcgtgcacc

SEQ ID NO: 2368742 - DNA, 25 bp, Homo sapien
cctggccggaaagaattcttctatt

SEQ ID NO: 2368743 - DNA, 25 bp, Homo sapien
cacctggccggaaagaattcttcta

SEQ ID NO: 2368744 - DNA, 25 bp, Homo sapien
tacatattaaccttcttcagtacat

SEQ ID NO: 2368745 - DNA, 25 bp, Homo sapien
tacatccgtgtagaatgttggtccg

SEQ ID NO: 2368746 - DNA, 25 bp, Homo sapien
taatgtataccgttcaccaggaaag

SEQ ID NO: 2368747 - DNA, 25 bp, Homo sapien
gcctcataaaatgggctagaaaata

SEQ ID NO: 2368748 - DNA, 25 bp, Homo sapien
aaaaagattccacatcaaggcacag

SEQ ID NO: 2368749 - DNA, 25 bp, Homo sapien
caatacctcgatgtcttggttactg

SEQ ID NO: 2368750 - DNA, 25 bp, Homo sapien
agatttcacatcaggctaaggtggg

SEQ ID NO: 2368751 - DNA, 25 bp, Homo sapien
aatcaggcagtgttaatcctccaac

SEQ ID NO: 2368752 - DNA, 25 bp, Homo sapien
taagagcaaaaagacaccgtttggc

SEQ ID NO: 2368753 - DNA, 25 bp, Homo sapien
caactggatttgtcccctggtgcag

SEQ ID NO: 2368754 - DNA, 25 bp, Homo sapien
aatgaaatcagtcgccctacaaggg

SEQ ID NO: 2368755 - DNA, 25 bp, Homo sapien
aaagcctggcagtcccttcatatgc

SEQ ID NO: 2368756 - DNA, 25 bp, Homo sapien
gagagagattcacttggcacccagg

SEQ ID NO: 2368757 - DNA, 25 bp, Homo sapien
gaggagagagattcacttggcaccc

SEQ ID NO: 2368758 - DNA, 25 bp, Homo sapien
gaagaggagagagattcacttggca

SEQ ID NO: 2368759 - DNA, 25 bp, Homo sapien
ggagagagattcacttggcacccag

SEQ ID NO: 2368760 - DNA, 25 bp, Homo sapien
gaggtagattgctgcctcttggtaa

SEQ ID NO: 2368761 - DNA, 25 bp, Homo sapien
tcgtggatggcatagctgccgccat

SEQ ID NO: 2368762 - DNA, 25 bp, Homo sapien
catctcccagttgtgtgcggggctg

SEQ ID NO: 2368763 - DNA, 25 bp, Homo sapien
tgcctcttggtaattcatctcccag

SEQ ID NO: 2368764 - DNA, 25 bp, Homo sapien
gctgcttcacataagaaagattagg

SEQ ID NO: 2368765 - DNA, 25 bp, Homo sapien
caagctcttactcaatgcaaaccag

SEQ ID NO: 2368766 - DNA, 25 bp, Homo sapien
tctgatagtgacaagattggcaaga

SEQ ID NO: 2368767 - DNA, 25 bp, Homo sapien
aaaacaaatacttgcagtggagagc

SEQ ID NO: 2368768 - DNA, 25 bp, Homo sapien
gtgattgtgtgcaaagaggtaggcc

SEQ ID NO: 2368769 - DNA, 25 bp, Homo sapien
gtgggtgaagaacttgtcgttgttc

SEQ ID NO: 2368770 - DNA, 25 bp, Homo sapien
aggtaggccgccagcgccttggcat

SEQ ID NO: 2368771 - DNA, 25 bp, Homo sapien
ggtgaagaacttgtcgttgttctcg

SEQ ID NO: 2368772 - DNA, 25 bp, Homo sapien
gaggcccagccagcgtaacttcatg

SEQ ID NO: 2368773 - DNA, 25 bp, Homo sapien
cccagccagcgtaacttcatgcaga

SEQ ID NO: 2368774 - DNA, 25 bp, Homo sapien
ggcccagccagcgtaacttcatgca

SEQ ID NO: 2368775 - DNA, 25 bp, Homo sapien
gagttcaaacactaccaccatcagg

SEQ ID NO: 2368776 - DNA, 25 bp, Homo sapien
gcagcccagccgtcatcctgcatac

SEQ ID NO: 2368777 - DNA, 25 bp, Homo sapien
gcatggagcaccgtcagcccctgca

SEQ ID NO: 2368778 - DNA, 25 bp, Homo sapien
gtggcaggcatggagcaccgtcagc

SEQ ID NO: 2368779 - DNA, 25 bp, Homo sapien
ggcaggcatggagcaccgtcagccc

SEQ ID NO: 2368780 - DNA, 25 bp, Homo sapien
accacgatggcctcgacaaactgca

SEQ ID NO: 2368781 - DNA, 25 bp, Homo sapien
gcaataccgacagtccaccaggaaa

SEQ ID NO: 2368782 - DNA, 25 bp, Homo sapien
aaaatgcagcgcagtgctcgggtca

SEQ ID NO: 2368783 - DNA, 25 bp, Homo sapien
cacatgggacatctgccgtaccaac

SEQ ID NO: 2368784 - DNA, 25 bp, Homo sapien
cagggactggaagatctgccgcagg

SEQ ID NO: 2368785 - DNA, 25 bp, Homo sapien
gatgtccatgaagggcggcagggac

SEQ ID NO: 2368786 - DNA, 25 bp, Homo sapien
ggactggaagatctgccgcaggttg

SEQ ID NO: 2368787 - DNA, 25 bp, Homo sapien
ggatgtccatgaagggcggcaggga

SEQ ID NO: 2368788 - DNA, 25 bp, Homo sapien
gacaaacagactgacgatgctgttc

SEQ ID NO: 2368789 - DNA, 25 bp, Homo sapien
gaaggacaaacagactgacgatgct

SEQ ID NO: 2368790 - DNA, 25 bp, Homo sapien
cagaaggacaaacagactgacgatg

SEQ ID NO: 2368791 - DNA, 25 bp, Homo sapien
aacagactgacgatgctgttctcca

SEQ ID NO: 2368792 - DNA, 25 bp, Homo sapien
tacagctcgatggagaggtacacga

SEQ ID NO: 2368793 - DNA, 25 bp, Homo sapien
cacgatgaagaagacgcaggaccag

SEQ ID NO: 2368794 - DNA, 25 bp, Homo sapien
ccgggagtaggagggcatcatcaca

SEQ ID NO: 2368795 - DNA, 25 bp, Homo sapien
gatgaaatacagctcgatggagagg

SEQ ID NO: 2368796 - DNA, 25 bp, Homo sapien
taaacacaggactcgatcggaagcc

SEQ ID NO: 2368797 - DNA, 25 bp, Homo sapien
gatctgtgatggctgggacactcct

SEQ ID NO: 2368798 - DNA, 25 bp, Homo sapien
taacagcctggtgtcggatgtgatc

SEQ ID NO: 2368799 - DNA, 25 bp, Homo sapien
gcacgtgagtgcaactgaacagagt

SEQ ID NO: 2368800 - DNA, 25 bp, Homo sapien
taggcatgctggatagcggttcgct

SEQ ID NO: 2368801 - DNA, 25 bp, Homo sapien
ttcgcttgtgcagtagcaaagactt

SEQ ID NO: 2368802 - DNA, 25 bp, Homo sapien
caaagacttgaacttgcgtttctca

SEQ ID NO: 2368803 - DNA, 25 bp, Homo sapien
gaaggtgtcgaacaccacagccaga

SEQ ID NO: 2368804 - DNA, 25 bp, Homo sapien
tcatccggggcttgtagaagcgcat

SEQ ID NO: 2368805 - DNA, 25 bp, Homo sapien
ggtaagatagcgctccctggcactc

SEQ ID NO: 2368806 - DNA, 25 bp, Homo sapien
ggtgtgttgttctgattcagggcct

SEQ ID NO: 2368807 - DNA, 25 bp, Homo sapien
ggcttgtagaagcgcatgaggcctt

SEQ ID NO: 2368808 - DNA, 25 bp, Homo sapien
ccacttcaaagcagcaacttcgtag

SEQ ID NO: 2368809 - DNA, 25 bp, Homo sapien
cgtagatatcgtaaaagtcctttag

SEQ ID NO: 2368810 - DNA, 25 bp, Homo sapien
tcaaagcagcaacttcgtagatatc

SEQ ID NO: 2368811 - DNA, 25 bp, Homo sapien
gcagcaacttcgtagatatcgtaaa

SEQ ID NO: 2368812 - DNA, 25 bp, Homo sapien
ccgtcctgggaagctcatcaaacca

SEQ ID NO: 2368813 - DNA, 25 bp, Homo sapien
tgggaagctcatcaaaccagtgctc

SEQ ID NO: 2368814 - DNA, 25 bp, Homo sapien
gctcatcaaaccagtgctctctgtt

SEQ ID NO: 2368815 - DNA, 25 bp, Homo sapien
aggagcgccgtcctgggaagctcat

SEQ ID NO: 2368816 - DNA, 25 bp, Homo sapien
tgaagaaaagacaagttaaaatgta

SEQ ID NO: 2368817 - DNA, 25 bp, Homo sapien
tactggaaggccttggacttcacaa

SEQ ID NO: 2368818 - DNA, 25 bp, Homo sapien
gaaatactggaaggccttggacttc

SEQ ID NO: 2368819 - DNA, 25 bp, Homo sapien
actggaaggccttggacttcacaag

SEQ ID NO: 2368820 - DNA, 25 bp, Homo sapien
aatactggaaggccttggacttcac

SEQ ID NO: 2368821 - DNA, 25 bp, Homo sapien
gatgcgtgtggtaatgttctcttca

SEQ ID NO: 2368822 - DNA, 25 bp, Homo sapien
cttttatacatgctgggaattcccc

SEQ ID NO: 2368823 - DNA, 25 bp, Homo sapien
tcaagagacatatcgaccagtcaac

SEQ ID NO: 2368824 - DNA, 25 bp, Homo sapien
tagacagaactaccaaattccagga

SEQ ID NO: 2368825 - DNA, 25 bp, Homo sapien
gccaggtggcagaaaaaagtgcata

SEQ ID NO: 2368826 - DNA, 25 bp, Homo sapien
tacatattacggtctccagggcata

SEQ ID NO: 2368827 - DNA, 25 bp, Homo sapien
ccatgcccaggcctaatttacataa

SEQ ID NO: 2368828 - DNA, 25 bp, Homo sapien
ccagggcatattgttaactgcaaaa

SEQ ID NO: 2368829 - DNA, 25 bp, Homo sapien
acgaggatccagaccccgttgactg

SEQ ID NO: 2368830 - DNA, 25 bp, Homo sapien
ctttcagcataaatgtctccacgag

SEQ ID NO: 2368831 - DNA, 25 bp, Homo sapien
tcagcataaatgtctccacgaggat

SEQ ID NO: 2368832 - DNA, 25 bp, Homo sapien
cataaatgtctccacgaggatccag

SEQ ID NO: 2368833 - DNA, 25 bp, Homo sapien
tagttagaaagacgaggtaactcca

SEQ ID NO: 2368834 - DNA, 25 bp, Homo sapien
agttagaaagacgaggtaactccag

SEQ ID NO: 2368835 - DNA, 25 bp, Homo sapien
ccaggccggcaaccttcaggaacag

SEQ ID NO: 2368836 - DNA, 25 bp, Homo sapien
tccggaagacaagtactccacaggg

SEQ ID NO: 2368837 - DNA, 25 bp, Homo sapien
aagttccatccggaagacaagtact

SEQ ID NO: 2368838 - DNA, 25 bp, Homo sapien
gttccatccggaagacaagtactcc

SEQ ID NO: 2368839 - DNA, 25 bp, Homo sapien
cccaggaaggcgaacactgtcacgg

SEQ ID NO: 2368840 - DNA, 25 bp, Homo sapien
caggaccacgatgaaatagaagggc

SEQ ID NO: 2368841 - DNA, 25 bp, Homo sapien
gcaggaccacgatgaaatagaaggg

SEQ ID NO: 2368842 - DNA, 25 bp, Homo sapien
ccaggaaggcgaacactgtcacgga

SEQ ID NO: 2368843 - DNA, 25 bp, Homo sapien
cagcacgttgcggtagcgctccttc

SEQ ID NO: 2368844 - DNA, 25 bp, Homo sapien
gtccagcacgttgcggtagcgctcc

SEQ ID NO: 2368845 - DNA, 25 bp, Homo sapien
cacgttgcggtagcgctccttcaac

SEQ ID NO: 2368846 - DNA, 25 bp, Homo sapien
ctggccatccggggcagcagctcga

SEQ ID NO: 2368847 - DNA, 25 bp, Homo sapien
tcaggacgctatgaacaaatgcccc

SEQ ID NO: 2368848 - DNA, 25 bp, Homo sapien
tggtaagcgagttgacagctccctg

SEQ ID NO: 2368849 - DNA, 25 bp, Homo sapien
ccctcgattgcagtcctttgtggaa

SEQ ID NO: 2368850 - DNA, 25 bp, Homo sapien
tgaaaaacagctcaagtcaggacgc

SEQ ID NO: 2368851 - DNA, 25 bp, Homo sapien
caggagggaacggctcctctgcagc

SEQ ID NO: 2368852 - DNA, 25 bp, Homo sapien
tgcccctggtcggttcaccaactgg

SEQ ID NO: 2368853 - DNA, 25 bp, Homo sapien
tcctcggacccgtggggctgactgc

SEQ ID NO: 2368854 - DNA, 25 bp, Homo sapien
ggtcggttcaccaactggaaagtgc

SEQ ID NO: 2368855 - DNA, 25 bp, Homo sapien
gacgatcccgcagaagaactccatg

SEQ ID NO: 2368856 - DNA, 25 bp, Homo sapien
catgcccacgatggcgaaggagtag

SEQ ID NO: 2368857 - DNA, 25 bp, Homo sapien
cagcagttggggaagacgatcccgc

SEQ ID NO: 2368858 - DNA, 25 bp, Homo sapien
ccacgatggcgaaggagtagtaaaa

SEQ ID NO: 2368859 - DNA, 25 bp, Homo sapien
cacggtgtggttgcgccagcggtag

SEQ ID NO: 2368860 - DNA, 25 bp, Homo sapien
gataatagtagccttcctccaccac

SEQ ID NO: 2368861 - DNA, 25 bp, Homo sapien
cacggtcctgttgcccacggtgtgg

SEQ ID NO: 2368862 - DNA, 25 bp, Homo sapien
ttgcgccagcggtaggcatctgcca

SEQ ID NO: 2368863 - DNA, 25 bp, Homo sapien
acaactgtgagctcaaacagggtca

SEQ ID NO: 2368864 - DNA, 25 bp, Homo sapien
gacaactgtgagctcaaacagggtc

SEQ ID NO: 2368865 - DNA, 25 bp, Homo sapien
tgacaactgtgagctcaaacagggt

SEQ ID NO: 2368866 - DNA, 25 bp, Homo sapien
tcgcagaccccaccgtgatttgtgg

SEQ ID NO: 2368867 - DNA, 25 bp, Homo sapien
gctcttcgcagaccccaccgtgatt

SEQ ID NO: 2368868 - DNA, 25 bp, Homo sapien
ccatggccccggctcttcgcagacc

SEQ ID NO: 2368869 - DNA, 25 bp, Homo sapien
caggtccccgtctacacaggctgct

SEQ ID NO: 2368870 - DNA, 25 bp, Homo sapien
taaaaggtcatgaagtagaggcggc

SEQ ID NO: 2368871 - DNA, 25 bp, Homo sapien
tgtaaaaggtcatgaagtagaggcg

SEQ ID NO: 2368872 - DNA, 25 bp, Homo sapien
cacaatgtaaaaggtcatgaagtag

SEQ ID NO: 2368873 - DNA, 25 bp, Homo sapien
aggtcatgaagtagaggcggctcca

SEQ ID NO: 2368874 - DNA, 25 bp, Homo sapien
aggtgtccgtggctgcgcagcccac

SEQ ID NO: 2368875 - DNA, 25 bp, Homo sapien
caaagagcgttctgtggtccgggac

SEQ ID NO: 2368876 - DNA, 25 bp, Homo sapien
gcccaacagagtccggccagatggg

SEQ ID NO: 2368877 - DNA, 25 bp, Homo sapien
ggtgggtaggtgtccgtggctgcgc

SEQ ID NO: 2368878 - DNA, 25 bp, Homo sapien
ttccgagtcctggttcttgcggctg

SEQ ID NO: 2368879 - DNA, 25 bp, Homo sapien
aaggcgacaatgatcgtcatcacca

SEQ ID NO: 2368880 - DNA, 25 bp, Homo sapien
tcggaagacgaaggcctcgaggata

SEQ ID NO: 2368881 - DNA, 25 bp, Homo sapien
tcttgcggctgtagttcattcggaa

SEQ ID NO: 2368882 - DNA, 25 bp, Homo sapien
tctctctaaaccgacactgcattgg

SEQ ID NO: 2368883 - DNA, 25 bp, Homo sapien
cagttgcagcaggaatacgattcgc

SEQ ID NO: 2368884 - DNA, 25 bp, Homo sapien
ttacagggccagagggtttcaggaa

SEQ ID NO: 2368885 - DNA, 25 bp, Homo sapien
tcaagaaccgtagtgtgaacctatt

SEQ ID NO: 2368886 - DNA, 25 bp, Homo sapien
tggtgacatccgaggaggccccccg

SEQ ID NO: 2368887 - DNA, 25 bp, Homo sapien
ttctttggagatttccttctcaagg

SEQ ID NO: 2368888 - DNA, 25 bp, Homo sapien
ccaggacggcaaccagctcttcttt

SEQ ID NO: 2368889 - DNA, 25 bp, Homo sapien
ccttctcaagggtgatgccaccatc

SEQ ID NO: 2368890 - DNA, 25 bp, Homo sapien
aggctcaggtcgctcttggtccttg

SEQ ID NO: 2368891 - DNA, 25 bp, Homo sapien
gtcgctcttggtccttgatcgccgt

SEQ ID NO: 2368892 - DNA, 25 bp, Homo sapien
tcaggtcgctcttggtccttgatcg

SEQ ID NO: 2368893 - DNA, 25 bp, Homo sapien
ttggtccttgatcgccgtcccagaa

SEQ ID NO: 2368894 - DNA, 25 bp, Homo sapien
gctgcttgggtaggctgagtgggga

SEQ ID NO: 2368895 - DNA, 25 bp, Homo sapien
gcccaggtgacagagcgataccatc

SEQ ID NO: 2368896 - DNA, 25 bp, Homo sapien
gtagttccagctgcttgggtaggct

SEQ ID NO: 2368897 - DNA, 25 bp, Homo sapien
cccaggtgacagagcgataccatct

SEQ ID NO: 2368898 - DNA, 25 bp, Homo sapien
gacttttagagcttcgagatggcct

SEQ ID NO: 2368899 - DNA, 25 bp, Homo sapien
tccttccaaccacacctgaatgggt

SEQ ID NO: 2368900 - DNA, 25 bp, Homo sapien
ggcttcaagctattagaatgccaga

SEQ ID NO: 2368901 - DNA, 25 bp, Homo sapien
gcccatggtctggaaggcaccgtgc

SEQ ID NO: 2368902 - DNA, 25 bp, Homo sapien
tccctggcatgctcctcataccact

SEQ ID NO: 2368903 - DNA, 25 bp, Homo sapien
gctgagttgtcgctgctgctcttgc

SEQ ID NO: 2368904 - DNA, 25 bp, Homo sapien
gctcttgctccctggcatgctcctc

SEQ ID NO: 2368905 - DNA, 25 bp, Homo sapien
gctgctgagttgtcgctgctgctct

SEQ ID NO: 2368906 - DNA, 25 bp, Homo sapien
caacaagggttaagccagagaaggc

SEQ ID NO: 2368907 - DNA, 25 bp, Homo sapien
gatggacacattaactcgctctgga

SEQ ID NO: 2368908 - DNA, 25 bp, Homo sapien
tgcacacgtgtgaaggacctggtat

SEQ ID NO: 2368909 - DNA, 25 bp, Homo sapien
tcatacagggctcctacagggtacc

SEQ ID NO: 2368910 - DNA, 25 bp, Homo sapien
tgcctgactgccttatgctggtaaa

SEQ ID NO: 2368911 - DNA, 25 bp, Homo sapien
cagcgggtgctattcgtggcaacac

SEQ ID NO: 2368912 - DNA, 25 bp, Homo sapien
ttgcttccaaaacgatgccagcccg

SEQ ID NO: 2368913 - DNA, 25 bp, Homo sapien
aatgaccccgccttatgttgccgaa

SEQ ID NO: 2368914 - DNA, 25 bp, Homo sapien
cctgaaaagcatgtgactgaagccg

SEQ ID NO: 2368915 - DNA, 25 bp, Homo sapien
actgaagccgcttagtgctgtggcc

SEQ ID NO: 2368916 - DNA, 25 bp, Homo sapien
tcgtggccctcctcactgaatttgg

SEQ ID NO: 2368917 - DNA, 25 bp, Homo sapien
cccagggaccggagcatttctgcaa

SEQ ID NO: 2368918 - DNA, 25 bp, Homo sapien
ggccaatacaggtcgaactcctgac

SEQ ID NO: 2368919 - DNA, 25 bp, Homo sapien
ttatcatcccgtttcacaggtgagg

SEQ ID NO: 2368920 - DNA, 25 bp, Homo sapien
ccctgactgcagttggaccaagaaa

SEQ ID NO: 2368921 - DNA, 25 bp, Homo sapien
ggtgaacatcttgcggtccctgggt

SEQ ID NO: 2368922 - DNA, 25 bp, Homo sapien
cagccggccgtgcttgatgtgtaca

SEQ ID NO: 2368923 - DNA, 25 bp, Homo sapien
tcaatgaatgtaccaaccgaagggt

SEQ ID NO: 2368924 - DNA, 25 bp, Homo sapien
gaagactgtagcagaggatcacaca

SEQ ID NO: 2368925 - DNA, 25 bp, Homo sapien
tcaagtaccgacgtgtgccacaaca

SEQ ID NO: 2368926 - DNA, 25 bp, Homo sapien
tgtccacgaggcacattcagagaga

SEQ ID NO: 2368927 - DNA, 25 bp, Homo sapien
ccgcacaatgctgcgccccgcagcc

SEQ ID NO: 2368928 - DNA, 25 bp, Homo sapien
accgcacaatgctgcgccccgcagc

SEQ ID NO: 2368929 - DNA, 25 bp, Homo sapien
gaccgcacaatgctgcgccccgcag

SEQ ID NO: 2368930 - DNA, 25 bp, Homo sapien
tcaggaacggcccgaccagcagggc

SEQ ID NO: 2368931 - DNA, 25 bp, Homo sapien
ctcaggaacggcccgaccagcaggg

SEQ ID NO: 2368932 - DNA, 25 bp, Homo sapien
agcgcccgcgtcagcgcccgggcca

SEQ ID NO: 2368933 - DNA, 25 bp, Homo sapien
gcgccagcgcccgcgtcagcgcccg

SEQ ID NO: 2368934 - DNA, 25 bp, Homo sapien
ccagtctcgcggatggcgttggtga

SEQ ID NO: 2368935 - DNA, 25 bp, Homo sapien
cgtcagggtggcgtccgtccaccat

SEQ ID NO: 2368936 - DNA, 25 bp, Homo sapien
agacgtccaggagcaccgagcggct

SEQ ID NO: 2368937 - DNA, 25 bp, Homo sapien
accataagcagctggcccgccgaga

SEQ ID NO: 2368938 - DNA, 25 bp, Homo sapien
tgaaagaaggtaccgagcacagtgg

SEQ ID NO: 2368939 - DNA, 25 bp, Homo sapien
ggttggaggatacagcttccccagg

SEQ ID NO: 2368940 - DNA, 25 bp, Homo sapien
actttaagcaacctcgtcgataagg

SEQ ID NO: 2368941 - DNA, 25 bp, Homo sapien
ggtgttggcccaaagtcaagatatg

SEQ ID NO: 2368942 - DNA, 25 bp, Homo sapien
cttccgcagtctagtatggccttgg

SEQ ID NO: 2368943 - DNA, 25 bp, Homo sapien
aagaggccacattggaaaaagtcag

SEQ ID NO: 2368944 - DNA, 25 bp, Homo sapien
aagtcagaccactgatatgagcagg

SEQ ID NO: 2368945 - DNA, 25 bp, Homo sapien
tgctctccattatgtgggatgcccc

SEQ ID NO: 2368946 - DNA, 25 bp, Homo sapien
gactctgtctacacgaaataattta

SEQ ID NO: 2368947 - DNA, 25 bp, Homo sapien
ataatttaaaagttacaggtgcagt

SEQ ID NO: 2368948 - DNA, 25 bp, Homo sapien
gcaagactctgtctacacgaaataa

SEQ ID NO: 2368949 - DNA, 25 bp, Homo sapien
agttacaggtgcagtggggtgtgcc

SEQ ID NO: 2368950 - DNA, 25 bp, Homo sapien
agcagccccacggatccatgagaat

SEQ ID NO: 2368951 - DNA, 25 bp, Homo sapien
agcactgctgcccaatactagcgga

SEQ ID NO: 2368952 - DNA, 25 bp, Homo sapien
tatatatgcaggttacctgaaggcc

SEQ ID NO: 2368953 - DNA, 25 bp, Homo sapien
cacaccaggtctgtagagctgcagc

SEQ ID NO: 2368954 - DNA, 25 bp, Homo sapien
ggctgcataggcctgcaagctgtca

SEQ ID NO: 2368955 - DNA, 25 bp, Homo sapien
cataggcctgcaagctgtcattgta

SEQ ID NO: 2368956 - DNA, 25 bp, Homo sapien
tgcaagctgtcattgtattggccac

SEQ ID NO: 2368957 - DNA, 25 bp, Homo sapien
acaccggctgcataggcctgcaagc

SEQ ID NO: 2368958 - DNA, 25 bp, Homo sapien
gaatgccgtggcagtttcacccaga

SEQ ID NO: 2368959 - DNA, 25 bp, Homo sapien
gacatattaccacccacaagaaggc

SEQ ID NO: 2368960 - DNA, 25 bp, Homo sapien
cagcagggcacactagttaggagcg

SEQ ID NO: 2368961 - DNA, 25 bp, Homo sapien
tggtcatccccgtgagtgagtggca

SEQ ID NO: 2368962 - DNA, 25 bp, Homo sapien
catccactctaggttggcctccagg

SEQ ID NO: 2368963 - DNA, 25 bp, Homo sapien
agtaattcaccaccgtgttcatcca

SEQ ID NO: 2368964 - DNA, 25 bp, Homo sapien
cagtagccgacttcatactcgaagg

SEQ ID NO: 2368965 - DNA, 25 bp, Homo sapien
tgttcatccagtgcatgtagatgag

SEQ ID NO: 2368966 - DNA, 25 bp, Homo sapien
tgtcctccaggcctttcagctgcag

SEQ ID NO: 2368967 - DNA, 25 bp, Homo sapien
gggaagctcacacggccttcgtagc

SEQ ID NO: 2368968 - DNA, 25 bp, Homo sapien
caagggtttgatggtgaacttccca

SEQ ID NO: 2368969 - DNA, 25 bp, Homo sapien
ccagctgggaagctcacacggcctt

SEQ ID NO: 2368970 - DNA, 25 bp, Homo sapien
tgttccaggtgttgtgggcaaccag

SEQ ID NO: 2368971 - DNA, 25 bp, Homo sapien
cttcttgatgacacgcagcatgtgc

SEQ ID NO: 2368972 - DNA, 25 bp, Homo sapien
gagcagcttgatgagggcagaacag

SEQ ID NO: 2368973 - DNA, 25 bp, Homo sapien
gcatgtgctggtagttgttccaggt

SEQ ID NO: 2368974 - DNA, 25 bp, Homo sapien
taaaacaagatgaactggctaggcg

SEQ ID NO: 2368975 - DNA, 25 bp, Homo sapien
gatgcatcagtgagcctagccaaga

SEQ ID NO: 2368976 - DNA, 25 bp, Homo sapien
acctagctgacccatagaggcagga

SEQ ID NO: 2368977 - DNA, 25 bp, Homo sapien
gaactcttggaatatccctgcagtg

SEQ ID NO: 2368978 - DNA, 25 bp, Homo sapien
caatgaataaggctggacacttccc

SEQ ID NO: 2368979 - DNA, 25 bp, Homo sapien
catttggccatgaaggaggtactgc

SEQ ID NO: 2368980 - DNA, 25 bp, Homo sapien
tcctcatagcaaatggtggagccta

SEQ ID NO: 2368981 - DNA, 25 bp, Homo sapien
gcttcgaattcccaaggcgctggga

SEQ ID NO: 2368982 - DNA, 25 bp, Homo sapien
ctgtgcaggcagagcgagccaggga

SEQ ID NO: 2368983 - DNA, 25 bp, Homo sapien
gtgcaggcagagcgagccagggatg

SEQ ID NO: 2368984 - DNA, 25 bp, Homo sapien
tgtgcaggcagagcgagccagggat

SEQ ID NO: 2368985 - DNA, 25 bp, Homo sapien
tgttgccgggaaccagcgggtagtc

SEQ ID NO: 2368986 - DNA, 25 bp, Homo sapien
gaggagaagaccagcttgttgccgg

SEQ ID NO: 2368987 - DNA, 25 bp, Homo sapien
caggatgtagaagtcgtcgcaggag

SEQ ID NO: 2368988 - DNA, 25 bp, Homo sapien
tgtagaagtcgtcgcaggagaagat

SEQ ID NO: 2368989 - DNA, 25 bp, Homo sapien
tcttgaagatgtctgcccaggtggc

SEQ ID NO: 2368990 - DNA, 25 bp, Homo sapien
gggccgcacatacttccacagggct

SEQ ID NO: 2368991 - DNA, 25 bp, Homo sapien
ttgttgccaatggtggtctccagtg

SEQ ID NO: 2368992 - DNA, 25 bp, Homo sapien
gcggttggccacgatgttgcgtacc

SEQ ID NO: 2368993 - DNA, 25 bp, Homo sapien
ccacccgggatgaacgccttgtagt

SEQ ID NO: 2368994 - DNA, 25 bp, Homo sapien
tctgctccaggatggtaagcacccg

SEQ ID NO: 2368995 - DNA, 25 bp, Homo sapien
gaacgccttgtagtccacgatcatc

SEQ ID NO: 2368996 - DNA, 25 bp, Homo sapien
cacgatcatccactggttgttatac

SEQ ID NO: 2368997 - DNA, 25 bp, Homo sapien
agctggcccagtaggtcttctggta

SEQ ID NO: 2368998 - DNA, 25 bp, Homo sapien
agtaggtcttctggtagagctccga

SEQ ID NO: 2368999 - DNA, 25 bp, Homo sapien
ggcccagtaggtcttctggtagagc

SEQ ID NO: 2369000 - DNA, 25 bp, Homo sapien
cccagtaggtcttctggtagagctc

SEQ ID NO: 2369001 - DNA, 25 bp, Homo sapien
ggcaaggagtgaggtggatgccctg

SEQ ID NO: 2369002 - DNA, 25 bp, Homo sapien
gggcaaggagtgaggtggatgccct

SEQ ID NO: 2369003 - DNA, 25 bp, Homo sapien
gccctggagggtgacggggagcgga

SEQ ID NO: 2369004 - DNA, 25 bp, Homo sapien
gacggggagcggagtgagaaggcac

SEQ ID NO: 2369005 - DNA, 25 bp, Homo sapien
ggcattgaacacagtctcgaaggac

SEQ ID NO: 2369006 - DNA, 25 bp, Homo sapien
gctcccgtcataagaaaaccagtcc

SEQ ID NO: 2369007 - DNA, 25 bp, Homo sapien
tggttccgccggaagatctgggccc

SEQ ID NO: 2369008 - DNA, 25 bp, Homo sapien
tccatgtcttgtaccagtgactggt

SEQ ID NO: 2369009 - DNA, 25 bp, Homo sapien
acagagggtcatggaggaagtcatt

SEQ ID NO: 2369010 - DNA, 25 bp, Homo sapien
gttgcaggctttgcacagtgacaga

SEQ ID NO: 2369011 - DNA, 25 bp, Homo sapien
agatagcattctccccattgggctg

SEQ ID NO: 2369012 - DNA, 25 bp, Homo sapien
ttcacatcgatacccccatgggagc

SEQ ID NO: 2369013 - DNA, 25 bp, Homo sapien
ctgaagggcgaggtgctccactgga

SEQ ID NO: 2369014 - DNA, 25 bp, Homo sapien
acctggtcccacgtgggaccgctgg

SEQ ID NO: 2369015 - DNA, 25 bp, Homo sapien
ttccagaggtctggctggcccatgt

SEQ ID NO: 2369016 - DNA, 25 bp, Homo sapien
catgaaaccttgacaggcgcgaact

SEQ ID NO: 2369017 - DNA, 25 bp, Homo sapien
ttaatggtggcacagcctgcggtct

SEQ ID NO: 2369018 - DNA, 25 bp, Homo sapien
ctggagttagaagtccggtggcctt

SEQ ID NO: 2369019 - DNA, 25 bp, Homo sapien
cccactctaggaggagatgactcag

SEQ ID NO: 2369020 - DNA, 25 bp, Homo sapien
ggtcagttctgagccccatcaggtt

SEQ ID NO: 2369021 - DNA, 25 bp, Homo sapien
agaggagaaaaagcgctgaccccac

SEQ ID NO: 2369022 - DNA, 25 bp, Homo sapien
gaagacggatgggtgggtggaaggc

SEQ ID NO: 2369023 - DNA, 25 bp, Homo sapien
tgggggatggcgcagaacccaaacc

SEQ ID NO: 2369024 - DNA, 25 bp, Homo sapien
aatagagtgaaactcccactcagaa

SEQ ID NO: 2369025 - DNA, 25 bp, Homo sapien
aatggctggatgagtaaatgggtgg

SEQ ID NO: 2369026 - DNA, 25 bp, Homo sapien
tagataagaacttcgtaagccatgc

SEQ ID NO: 2369027 - DNA, 25 bp, Homo sapien
aagccatgctgtggtatacagacca

SEQ ID NO: 2369028 - DNA, 25 bp, Homo sapien
ggtggatggatgagtcaatggctgg

SEQ ID NO: 2369029 - DNA, 25 bp, Homo sapien
cagggaaacgctgctcacaccatta

SEQ ID NO: 2369030 - DNA, 25 bp, Homo sapien
atgaatctgcacagacccgtgtgtg

SEQ ID NO: 2369031 - DNA, 25 bp, Homo sapien
gagaggagtccatagctagctaata

SEQ ID NO: 2369032 - DNA, 25 bp, Homo sapien
gtatccccgggacctcataacagtg

SEQ ID NO: 2369033 - DNA, 25 bp, Homo sapien
tcatttattttgtttactatctagt

SEQ ID NO: 2369034 - DNA, 25 bp, Homo sapien
ttcatttattttgtttactatctag

SEQ ID NO: 2369035 - DNA, 25 bp, Homo sapien
catttattttgtttactatctagtc

SEQ ID NO: 2369036 - DNA, 25 bp, Homo sapien
tattttctccacgggtttaccagca

SEQ ID NO: 2369037 - DNA, 25 bp, Homo sapien
caaccttgctttattttctccacgg

SEQ ID NO: 2369038 - DNA, 25 bp, Homo sapien
ccaaccttgctttattttctccacg

SEQ ID NO: 2369039 - DNA, 25 bp, Homo sapien
gcctgactccagctagtcttgcatg

SEQ ID NO: 2369040 - DNA, 25 bp, Homo sapien
gcaggtggctaaacaagagggactt

SEQ ID NO: 2369041 - DNA, 25 bp, Homo sapien
ggacaaaggctgcctccgctgaagg

SEQ ID NO: 2369042 - DNA, 25 bp, Homo sapien
ccaacttcattctgatatgaagtcc

SEQ ID NO: 2369043 - DNA, 25 bp, Homo sapien
tatcaggagcccactatgcagaggc

SEQ ID NO: 2369044 - DNA, 25 bp, Homo sapien
caaccagggttgaggaaccatctca

SEQ ID NO: 2369045 - DNA, 25 bp, Homo sapien
gacaaataggttgcccaagtgagga

SEQ ID NO: 2369046 - DNA, 25 bp, Homo sapien
tcgtcgtatgtttggctgagcacct

SEQ ID NO: 2369047 - DNA, 25 bp, Homo sapien
ctcagatgatgcctcagaatccttc

SEQ ID NO: 2369048 - DNA, 25 bp, Homo sapien
taactaggctggactctttctgggt

SEQ ID NO: 2369049 - DNA, 25 bp, Homo sapien
tcagaggtgagtctgtaactaggct

SEQ ID NO: 2369050 - DNA, 25 bp, Homo sapien
actcattctatcagtgttagcactc

SEQ ID NO: 2369051 - DNA, 25 bp, Homo sapien
tgcttggcacctaacactttctcaa

SEQ ID NO: 2369052 - DNA, 25 bp, Homo sapien
taagtgcagctagaaaagacaccgg

SEQ ID NO: 2369053 - DNA, 25 bp, Homo sapien
gaaatgtctttacaccaggtgccca

SEQ ID NO: 2369054 - DNA, 25 bp, Homo sapien
gaatagagctagtggtcaccccagg

SEQ ID NO: 2369055 - DNA, 25 bp, Homo sapien
tactgtaaaccacgtgctgctgagg

SEQ ID NO: 2369056 - DNA, 25 bp, Homo sapien
gataaggccggtgcaaacctgagct

SEQ ID NO: 2369057 - DNA, 25 bp, Homo sapien
tgactctgtttgcaggtagctcagg

SEQ ID NO: 2369058 - DNA, 25 bp, Homo sapien
gaaggccacgcttccatcgtgaaag

SEQ ID NO: 2369059 - DNA, 25 bp, Homo sapien
caccgactcgtagccattggttgag

SEQ ID NO: 2369060 - DNA, 25 bp, Homo sapien
tggccaaggccctagcgaagaacaa

SEQ ID NO: 2369061 - DNA, 25 bp, Homo sapien
gatgaagccttcgagctggccaagg

SEQ ID NO: 2369062 - DNA, 25 bp, Homo sapien
cagtagagggtacgcagtcctgcct

SEQ ID NO: 2369063 - DNA, 25 bp, Homo sapien
tgagcgcctcaagaatgaaggtgcc

SEQ ID NO: 2369064 - DNA, 25 bp, Homo sapien
ttgtctgctcctcgggtaagtgatc

SEQ ID NO: 2369065 - DNA, 25 bp, Homo sapien
tctgctcctcgggtaagtgatctgc

SEQ ID NO: 2369066 - DNA, 25 bp, Homo sapien
ctcctcgggtaagtgatctgcttcc

SEQ ID NO: 2369067 - DNA, 25 bp, Homo sapien
ttttgtctgctcctcgggtaagtga

SEQ ID NO: 2369068 - DNA, 25 bp, Homo sapien
agttgcagctccaaatccatctccc

SEQ ID NO: 2369069 - DNA, 25 bp, Homo sapien
cagttgcagctccaaatccatctcc

SEQ ID NO: 2369070 - DNA, 25 bp, Homo sapien
tctccccccccccatattcaatcat

SEQ ID NO: 2369071 - DNA, 25 bp, Homo sapien
atccatctccccccccccatattca

SEQ ID NO: 2369072 - DNA, 25 bp, Homo sapien
gaaagtggagggtgtgcagaaacac

SEQ ID NO: 2369073 - DNA, 25 bp, Homo sapien
aagtggagggtgtgcagaaacacca

SEQ ID NO: 2369074 - DNA, 25 bp, Homo sapien
tggagggtgtgcagaaacaccagtc

SEQ ID NO: 2369075 - DNA, 25 bp, Homo sapien
tggagaaagtggagggtgtgcagaa

SEQ ID NO: 2369076 - DNA, 25 bp, Homo sapien
ctgcccaactatcccagaccagcgt

SEQ ID NO: 2369077 - DNA, 25 bp, Homo sapien
ttcaggcagcttccggcaaccttgg

SEQ ID NO: 2369078 - DNA, 25 bp, Homo sapien
agagcaaccctcaccgctttcccgg

SEQ ID NO: 2369079 - DNA, 25 bp, Homo sapien
tctttccaggaaccggctctgtcca

SEQ ID NO: 2369080 - DNA, 25 bp, Homo sapien
gtcacttttgtcactgggccttacc

SEQ ID NO: 2369081 - DNA, 25 bp, Homo sapien
gggccttacctgtcacatctatgag

SEQ ID NO: 2369082 - DNA, 25 bp, Homo sapien
acacacctcttgtcccgtatggcag

SEQ ID NO: 2369083 - DNA, 25 bp, Homo sapien
catctatgagttgaggtaaggacca

SEQ ID NO: 2369084 - DNA, 25 bp, Homo sapien
gaaaaagccccaagttgccaacagc

SEQ ID NO: 2369085 - DNA, 25 bp, Homo sapien
aagccccaagttgccaacagcctta

SEQ ID NO: 2369086 - DNA, 25 bp, Homo sapien
gccaacagccttatcaaccccagac

SEQ ID NO: 2369087 - DNA, 25 bp, Homo sapien
atgaaaaagccccaagttgccaaca

SEQ ID NO: 2369088 - DNA, 25 bp, Homo sapien
aaccgcgatgctatactttctctaa

SEQ ID NO: 2369089 - DNA, 25 bp, Homo sapien
tggcatctgtgctattaaccgcgat

SEQ ID NO: 2369090 - DNA, 25 bp, Homo sapien
tataaacagtgaacctgaggtccag

SEQ ID NO: 2369091 - DNA, 25 bp, Homo sapien
tgcaccactgtatccggctgatatt

SEQ ID NO: 2369092 - DNA, 25 bp, Homo sapien
caacagaggtgtgaccacgtgaaag

SEQ ID NO: 2369093 - DNA, 25 bp, Homo sapien
aggtgtgaccacgtgaaagggctcc

SEQ ID NO: 2369094 - DNA, 25 bp, Homo sapien
ctctccaacagaggtgtgaccacgt

SEQ ID NO: 2369095 - DNA, 25 bp, Homo sapien
gaccacgtgaaagggctcctgcttg

SEQ ID NO: 2369096 - DNA, 25 bp, Homo sapien
acttgaggaagacaggcatgcccgc

SEQ ID NO: 2369097 - DNA, 25 bp, Homo sapien
tgaggaagacaggcatgcccgccac

SEQ ID NO: 2369098 - DNA, 25 bp, Homo sapien
cttgaggaagacaggcatgcccgcc

SEQ ID NO: 2369099 - DNA, 25 bp, Homo sapien
ttgaggaagacaggcatgcccgcca

SEQ ID NO: 2369100 - DNA, 25 bp, Homo sapien
tcctggcagaaatgcccaatgcccc

SEQ ID NO: 2369101 - DNA, 25 bp, Homo sapien
gaaggagccgctgggctgcacattc

SEQ ID NO: 2369102 - DNA, 25 bp, Homo sapien
gagccgctgggctgcacattctcac

SEQ ID NO: 2369103 - DNA, 25 bp, Homo sapien
ccaatgccccgaatcttgaaggagc

SEQ ID NO: 2369104 - DNA, 25 bp, Homo sapien
caggtgtctgcatcccttcttggcc

SEQ ID NO: 2369105 - DNA, 25 bp, Homo sapien
aggtgtctgcatcccttcttggcca

SEQ ID NO: 2369106 - DNA, 25 bp, Homo sapien
ggtgtctgcatcccttcttggccat

SEQ ID NO: 2369107 - DNA, 25 bp, Homo sapien
agcacgatggtggcaggaatgccca

SEQ ID NO: 2369108 - DNA, 25 bp, Homo sapien
cccagcttcctagcagcataggcag

SEQ ID NO: 2369109 - DNA, 25 bp, Homo sapien
gctctcggggagcacgatggtggca

SEQ ID NO: 2369110 - DNA, 25 bp, Homo sapien
ctttccagtcagctgaacctcggcc

SEQ ID NO: 2369111 - DNA, 25 bp, Homo sapien
tcttgcgccctcagattggcctcgt

SEQ ID NO: 2369112 - DNA, 25 bp, Homo sapien
ccagccgtccctcttggccaactct

SEQ ID NO: 2369113 - DNA, 25 bp, Homo sapien
ttctcccagccgtccctcttggcca

SEQ ID NO: 2369114 - DNA, 25 bp, Homo sapien
ttggccaactcttgcgccctcagat

SEQ ID NO: 2369115 - DNA, 25 bp, Homo sapien
cctggtggggtcctcagcactgctt

SEQ ID NO: 2369116 - DNA, 25 bp, Homo sapien
cagcttgccggctgtgatggccgca

SEQ ID NO: 2369117 - DNA, 25 bp, Homo sapien
tgtctggaagtgtgaccagcttgcc

SEQ ID NO: 2369118 - DNA, 25 bp, Homo sapien
ggccgcattgaagcagtgtgcccca

SEQ ID NO: 2369119 - DNA, 25 bp, Homo sapien
cccgagcggccaccgtcttggcacc

SEQ ID NO: 2369120 - DNA, 25 bp, Homo sapien
ggcccgagcggccaccgtcttggca

SEQ ID NO: 2369121 - DNA, 25 bp, Homo sapien
gcccgagcggccaccgtcttggcac

SEQ ID NO: 2369122 - DNA, 25 bp, Homo sapien
gggcccgagcggccaccgtcttggc

SEQ ID NO: 2369123 - DNA, 25 bp, Homo sapien
cacttcagagtgaatcttgcacacc

SEQ ID NO: 2369124 - DNA, 25 bp, Homo sapien
tgcacagcgctcacagcctcggtgt

SEQ ID NO: 2369125 - DNA, 25 bp, Homo sapien
gagtgaatcttgcacacctgcatgc

SEQ ID NO: 2369126 - DNA, 25 bp, Homo sapien
tcggtgtcctccaccacttcagagt

SEQ ID NO: 2369127 - DNA, 25 bp, Homo sapien
cagggacttcgtgggtctctgagcc

SEQ ID NO: 2369128 - DNA, 25 bp, Homo sapien
gcacagtaactgcacacctagccag

SEQ ID NO: 2369129 - DNA, 25 bp, Homo sapien
catctactcgacgtgcacttagtgc

SEQ ID NO: 2369130 - DNA, 25 bp, Homo sapien
cactcttgctagaggatgcagggac

SEQ ID NO: 2369131 - DNA, 25 bp, Homo sapien
acacgattaccacaactgaagtcag

SEQ ID NO: 2369132 - DNA, 25 bp, Homo sapien
tgatgttgttgcctccacacacgat

SEQ ID NO: 2369133 - DNA, 25 bp, Homo sapien
aggcaggctccaccagcatacgctc

SEQ ID NO: 2369134 - DNA, 25 bp, Homo sapien
ccgcaggaggcctgagtagatggct

SEQ ID NO: 2369135 - DNA, 25 bp, Homo sapien
cagaaagtgtttattggccggagtt

SEQ ID NO: 2369136 - DNA, 25 bp, Homo sapien
ccactgccatctgccagcactgagt

SEQ ID NO: 2369137 - DNA, 25 bp, Homo sapien
catccagacacaggactgtccatgg

SEQ ID NO: 2369138 - DNA, 25 bp, Homo sapien
cggagttgtcggagagccaaaagaa

SEQ ID NO: 2369139 - DNA, 25 bp, Homo sapien
ggtgtgtctcctgtgagctcactga

SEQ ID NO: 2369140 - DNA, 25 bp, Homo sapien
catggaaagataggatccatagcat

SEQ ID NO: 2369141 - DNA, 25 bp, Homo sapien
gataggatccatagcattcgcaaac

SEQ ID NO: 2369142 - DNA, 25 bp, Homo sapien
tacagaagtggcaacaggattgtgg

SEQ ID NO: 2369143 - DNA, 25 bp, Homo sapien
tctatggtgccctaactgtaacgga

SEQ ID NO: 2369144 - DNA, 25 bp, Homo sapien
cagaagggctcacttagaacttgca

SEQ ID NO: 2369145 - DNA, 25 bp, Homo sapien
tatcagggtaggtattattggcccc

SEQ ID NO: 2369146 - DNA, 25 bp, Homo sapien
aaggtggacctcatctctggcgggt

SEQ ID NO: 2369147 - DNA, 25 bp, Homo sapien
ggccaatcttgaggctcaaggtcag

SEQ ID NO: 2369148 - DNA, 25 bp, Homo sapien
ggtggccaatcttgaggctcaaggt

SEQ ID NO: 2369149 - DNA, 25 bp, Homo sapien
cctggtggccaatcttgaggctcaa

SEQ ID NO: 2369150 - DNA, 25 bp, Homo sapien
tggtggccaatcttgaggctcaagg

SEQ ID NO: 2369151 - DNA, 25 bp, Homo sapien
tggactcgctggttttcccgccgta

SEQ ID NO: 2369152 - DNA, 25 bp, Homo sapien
agctgttgcttaaactgcctccaag

SEQ ID NO: 2369153 - DNA, 25 bp, Homo sapien
cgtacaaagcgggtgcctggtacaa

SEQ ID NO: 2369154 - DNA, 25 bp, Homo sapien
gaaggcaggatatcccgaaggttct

SEQ ID NO: 2369155 - DNA, 25 bp, Homo sapien
cggccgccatatgggcggaggcggc

SEQ ID NO: 2369156 - DNA, 25 bp, Homo sapien
cgggggcagcggccttcgctggttt

SEQ ID NO: 2369157 - DNA, 25 bp, Homo sapien
ggccgccatatgggcggaggcggcg

SEQ ID NO: 2369158 - DNA, 25 bp, Homo sapien
ctcacggaatttgttcccgaagtgg

SEQ ID NO: 2369159 - DNA, 25 bp, Homo sapien
gcatcggggtacagggagctcaccc

SEQ ID NO: 2369160 - DNA, 25 bp, Homo sapien
gctgtctgtgaataccataggagga

SEQ ID NO: 2369161 - DNA, 25 bp, Homo sapien
cttttcgcaggttccctaaagcctg

SEQ ID NO: 2369162 - DNA, 25 bp, Homo sapien
gctaatggtggagttgccttgcact

SEQ ID NO: 2369163 - DNA, 25 bp, Homo sapien
gaccagaaggacttgtaatgcctct

SEQ ID NO: 2369164 - DNA, 25 bp, Homo sapien
gggacatcttttagaccagaaggac

SEQ ID NO: 2369165 - DNA, 25 bp, Homo sapien
cccaagagcgcccaagaagtgatgc

SEQ ID NO: 2369166 - DNA, 25 bp, Homo sapien
cagactgcgacttaattaactcatc

SEQ ID NO: 2369167 - DNA, 25 bp, Homo sapien
tttacagactgcgacttaattaact

SEQ ID NO: 2369168 - DNA, 25 bp, Homo sapien
aactggttttacagactgcgactta

SEQ ID NO: 2369169 - DNA, 25 bp, Homo sapien
ctggttttacagactgcgacttaat

SEQ ID NO: 2369170 - DNA, 25 bp, Homo sapien
ttgcaatcctttggggatatcaagg

SEQ ID NO: 2369171 - DNA, 25 bp, Homo sapien
gtcttccacattgcaatcctttggg

SEQ ID NO: 2369172 - DNA, 25 bp, Homo sapien
ctcgtcttccacattgcaatccttt

SEQ ID NO: 2369173 - DNA, 25 bp, Homo sapien
cattgcaatcctttggggatatcaa

SEQ ID NO: 2369174 - DNA, 25 bp, Homo sapien
tgtgaaagcgccgtttcagctgcag

SEQ ID NO: 2369175 - DNA, 25 bp, Homo sapien
ttgtttgtgaaagcgccgtttcagc

SEQ ID NO: 2369176 - DNA, 25 bp, Homo sapien
gtcttgtttgtgaaagcgccgtttc

SEQ ID NO: 2369177 - DNA, 25 bp, Homo sapien
aagcgccgtttcagctgcagcccgg

SEQ ID NO: 2369178 - DNA, 25 bp, Homo sapien
ccgggatgctcggtgtcccgagaac

SEQ ID NO: 2369179 - DNA, 25 bp, Homo sapien
tcagagggctggagaattttcacaa

SEQ ID NO: 2369180 - DNA, 25 bp, Homo sapien
caagaagtaggctttgcagtatcgc

SEQ ID NO: 2369181 - DNA, 25 bp, Homo sapien
gcagtatcgcatccccaccaaaggg

SEQ ID NO: 2369182 - DNA, 25 bp, Homo sapien
tcattgctgccgagggactcttttt

SEQ ID NO: 2369183 - DNA, 25 bp, Homo sapien
ttcatcattgctgccgagggactct

SEQ ID NO: 2369184 - DNA, 25 bp, Homo sapien
catcttcatcattgctgccgaggga

SEQ ID NO: 2369185 - DNA, 25 bp, Homo sapien
tgccgagggactctttttgctggct

SEQ ID NO: 2369186 - DNA, 25 bp, Homo sapien
gagttgcccgcctgaatgttggcca

SEQ ID NO: 2369187 - DNA, 25 bp, Homo sapien
tctccagaaccgcattagcagcaat

SEQ ID NO: 2369188 - DNA, 25 bp, Homo sapien
gttggccatttgtaatcgcaaagca

SEQ ID NO: 2369189 - DNA, 25 bp, Homo sapien
tagcagcaatttcccgaggtgagcg

SEQ ID NO: 2369190 - DNA, 25 bp, Homo sapien
attgtctgcttctcacttttcacac

SEQ ID NO: 2369191 - DNA, 25 bp, Homo sapien
agccctgatcattgtctgcttctca

SEQ ID NO: 2369192 - DNA, 25 bp, Homo sapien
gatcattgtctgcttctcacttttc

SEQ ID NO: 2369193 - DNA, 25 bp, Homo sapien
tcattgtctgcttctcacttttcac

SEQ ID NO: 2369194 - DNA, 25 bp, Homo sapien
ttccctccaccattatccagcccat

SEQ ID NO: 2369195 - DNA, 25 bp, Homo sapien
ctccaccattatccagcccatccca

SEQ ID NO: 2369196 - DNA, 25 bp, Homo sapien
ccttccctccaccattatccagccc

SEQ ID NO: 2369197 - DNA, 25 bp, Homo sapien
caccattatccagcccatcccacag

SEQ ID NO: 2369198 - DNA, 25 bp, Homo sapien
cccaggcatggctgtctccaatcat

SEQ ID NO: 2369199 - DNA, 25 bp, Homo sapien
ctcccaggcatggctgtctccaatc

SEQ ID NO: 2369200 - DNA, 25 bp, Homo sapien
tcccaggcatggctgtctccaatca

SEQ ID NO: 2369201 - DNA, 25 bp, Homo sapien
cgctgccctcactggtgagtggtgc

SEQ ID NO: 2369202 - DNA, 25 bp, Homo sapien
tcgctgccctcactggtgagtggtg

SEQ ID NO: 2369203 - DNA, 25 bp, Homo sapien
ggctcgctgccctcactggtgagtg

SEQ ID NO: 2369204 - DNA, 25 bp, Homo sapien
tgccctcactggtgagtggtgcaga

SEQ ID NO: 2369205 - DNA, 25 bp, Homo sapien
cattctgtgctgaggatactgacat

SEQ ID NO: 2369206 - DNA, 25 bp, Homo sapien
attctgtgctgaggatactgacatg

SEQ ID NO: 2369207 - DNA, 25 bp, Homo sapien
gacaaatatggcctaatcttttcaa

SEQ ID NO: 2369208 - DNA, 25 bp, Homo sapien
tttctcccacttatgcagctcatga

SEQ ID NO: 2369209 - DNA, 25 bp, Homo sapien
tggaggcgataaagccctaccaatc

SEQ ID NO: 2369210 - DNA, 25 bp, Homo sapien
tgcaaatatgccttctgagtcctgt

SEQ ID NO: 2369211 - DNA, 25 bp, Homo sapien
ttggggccccatggcttgagggttg

SEQ ID NO: 2369212 - DNA, 25 bp, Homo sapien
gggcaggactggactttgatgggcc

SEQ ID NO: 2369213 - DNA, 25 bp, Homo sapien
gggacagtcatcagctttgcctcct

SEQ ID NO: 2369214 - DNA, 25 bp, Homo sapien
gatgggccagcggttggggccccat

SEQ ID NO: 2369215 - DNA, 25 bp, Homo sapien
cattccccgctaaggaaatgatgga

SEQ ID NO: 2369216 - DNA, 25 bp, Homo sapien
taccaggggaaatagatcaagggac

SEQ ID NO: 2369217 - DNA, 25 bp, Homo sapien
tgttgaaatcactaccaggggaaat

SEQ ID NO: 2369218 - DNA, 25 bp, Homo sapien
ctccattccccgctaaggaaatgat

SEQ ID NO: 2369219 - DNA, 25 bp, Homo sapien
ctgtacccaccacatcaaccactct

SEQ ID NO: 2369220 - DNA, 25 bp, Homo sapien
gaagccattgggctgattcaccagc

SEQ ID NO: 2369221 - DNA, 25 bp, Homo sapien
gagcacacggctgtcacaacatttg

SEQ ID NO: 2369222 - DNA, 25 bp, Homo sapien
aatgcagtcagttgtctgagcctga

SEQ ID NO: 2369223 - DNA, 25 bp, Homo sapien
gaaacctggaaatgcagtcagttgt

SEQ ID NO: 2369224 - DNA, 25 bp, Homo sapien
ctagcaggtgctgggtaacaggaag

SEQ ID NO: 2369225 - DNA, 25 bp, Homo sapien
aggtgctgggtaacaggaagctctt

SEQ ID NO: 2369226 - DNA, 25 bp, Homo sapien
gggtaacaggaagctcttgttatca

SEQ ID NO: 2369227 - DNA, 25 bp, Homo sapien
ggtaacaggaagctcttgttatcac

SEQ ID NO: 2369228 - DNA, 25 bp, Homo sapien
gccaccctctcctatggtcctcttg

SEQ ID NO: 2369229 - DNA, 25 bp, Homo sapien
ctctcctatggtcctcttgctgctc

SEQ ID NO: 2369230 - DNA, 25 bp, Homo sapien
atgccaccctctcctatggtcctct

SEQ ID NO: 2369231 - DNA, 25 bp, Homo sapien
accctctcctatggtcctcttgctg

SEQ ID NO: 2369232 - DNA, 25 bp, Homo sapien
aatactgagcgaccatgagcctggg

SEQ ID NO: 2369233 - DNA, 25 bp, Homo sapien
cagctgaggcatcaagtaccttgag

SEQ ID NO: 2369234 - DNA, 25 bp, Homo sapien
gtaccttgagtaccctagcttggct

SEQ ID NO: 2369235 - DNA, 25 bp, Homo sapien
acagttgctagcttggaccaaagca

SEQ ID NO: 2369236 - DNA, 25 bp, Homo sapien
cttgtccttgggaccagcatacaca

SEQ ID NO: 2369237 - DNA, 25 bp, Homo sapien
tgtccttgggaccagcatacacact

SEQ ID NO: 2369238 - DNA, 25 bp, Homo sapien
ttgtccttgggaccagcatacacac

SEQ ID NO: 2369239 - DNA, 25 bp, Homo sapien
tcttgtccttgggaccagcatacac

SEQ ID NO: 2369240 - DNA, 25 bp, Homo sapien
atgcatcaggaatgtgggtgcccat

SEQ ID NO: 2369241 - DNA, 25 bp, Homo sapien
attttccagcctctgaaaaatgcat

SEQ ID NO: 2369242 - DNA, 25 bp, Homo sapien
ccggaatcattttccagcctctgaa

SEQ ID NO: 2369243 - DNA, 25 bp, Homo sapien
aaaaatgcatcaggaatgtgggtgc

SEQ ID NO: 2369244 - DNA, 25 bp, Homo sapien
gggacagattgccagacagggagcc

SEQ ID NO: 2369245 - DNA, 25 bp, Homo sapien
ggatgtatccgtggggacagattgc

SEQ ID NO: 2369246 - DNA, 25 bp, Homo sapien
ctgtagaggatgtatccgtggggac

SEQ ID NO: 2369247 - DNA, 25 bp, Homo sapien
tccgtggggacagattgccagacag

SEQ ID NO: 2369248 - DNA, 25 bp, Homo sapien
cctgcttcactgatttccggtgttt

SEQ ID NO: 2369249 - DNA, 25 bp, Homo sapien
tgtttactgggcctgatgggcgtca

SEQ ID NO: 2369250 - DNA, 25 bp, Homo sapien
tgatttccggtgtttactgggcctg

SEQ ID NO: 2369251 - DNA, 25 bp, Homo sapien
tgatgggcgtcacattgcccacagc

SEQ ID NO: 2369252 - DNA, 25 bp, Homo sapien
gagccggactcgtaatctcctttga

SEQ ID NO: 2369253 - DNA, 25 bp, Homo sapien
ttgacaccaaaaagagttggcctca

SEQ ID NO: 2369254 - DNA, 25 bp, Homo sapien
tcaactttgagagccggactcgtaa

SEQ ID NO: 2369255 - DNA, 25 bp, Homo sapien
gactcgtaatctcctttgacaccaa

SEQ ID NO: 2369256 - DNA, 25 bp, Homo sapien
gggttgttaatcctgttaccgctgc

SEQ ID NO: 2369257 - DNA, 25 bp, Homo sapien
gcctggtggggcactgaaagccact

SEQ ID NO: 2369258 - DNA, 25 bp, Homo sapien
gggcggtgtaaactgtcagttgtct

SEQ ID NO: 2369259 - DNA, 25 bp, Homo sapien
ttaatcctgttaccgctgcctggcg

SEQ ID NO: 2369260 - DNA, 25 bp, Homo sapien
ttttctgcccagtataaccaataac

SEQ ID NO: 2369261 - DNA, 25 bp, Homo sapien
ttgctgccccttcaagtaaaagcca

SEQ ID NO: 2369262 - DNA, 25 bp, Homo sapien
gtataaccaataacttgctgcccct

SEQ ID NO: 2369263 - DNA, 25 bp, Homo sapien
tgctctgcactgttttaaggggtag

SEQ ID NO: 2369264 - DNA, 25 bp, Homo sapien
tgggcagtaactgcactgcttgttc

SEQ ID NO: 2369265 - DNA, 25 bp, Homo sapien
gtgggcagtaactgcactgcttgtt

SEQ ID NO: 2369266 - DNA, 25 bp, Homo sapien
taactgccccggagcttatctgtga

SEQ ID NO: 2369267 - DNA, 25 bp, Homo sapien
ctaactgccccggagcttatctgtg

SEQ ID NO: 2369268 - DNA, 25 bp, Homo sapien
ctgccccggagcttatctgtgaaag

SEQ ID NO: 2369269 - DNA, 25 bp, Homo sapien
aactgccccggagcttatctgtgaa

SEQ ID NO: 2369270 - DNA, 25 bp, Homo sapien
aagtccagtcccatgcggcttgcat

SEQ ID NO: 2369271 - DNA, 25 bp, Homo sapien
caagaaggaatttgacaagaagtcc

SEQ ID NO: 2369272 - DNA, 25 bp, Homo sapien
agtcccatgcggcttgcatcatggg

SEQ ID NO: 2369273 - DNA, 25 bp, Homo sapien
atcaagaaggaatttgacaagaagt

SEQ ID NO: 2369274 - DNA, 25 bp, Homo sapien
agaccctgcacgtgcccacacgttc

SEQ ID NO: 2369275 - DNA, 25 bp, Homo sapien
attggccgccgtgtggattggaaat

SEQ ID NO: 2369276 - DNA, 25 bp, Homo sapien
ccgtgtggattggaaatggtgccca

SEQ ID NO: 2369277 - DNA, 25 bp, Homo sapien
gctctgccggcctgctcagattggc

SEQ ID NO: 2369278 - DNA, 25 bp, Homo sapien
agggcagcagagagcccctgaaggt

SEQ ID NO: 2369279 - DNA, 25 bp, Homo sapien
gcagagagcccctgaaggtccaaga

SEQ ID NO: 2369280 - DNA, 25 bp, Homo sapien
cccctgaaggtccaagagcaggaga

SEQ ID NO: 2369281 - DNA, 25 bp, Homo sapien
cctgaaggtccaagagcaggagagc

SEQ ID NO: 2369282 - DNA, 25 bp, Homo sapien
agataagactccctggcctcgagga

SEQ ID NO: 2369283 - DNA, 25 bp, Homo sapien
gcctcgaggagctggtagtcaaatg

SEQ ID NO: 2369284 - DNA, 25 bp, Homo sapien
cattgaccaggcatcataggttttc

SEQ ID NO: 2369285 - DNA, 25 bp, Homo sapien
tatcaaatgccatcagtgccggacc

SEQ ID NO: 2369286 - DNA, 25 bp, Homo sapien
ctttggtgaacagagccgagcttgg

SEQ ID NO: 2369287 - DNA, 25 bp, Homo sapien
agtgtgagcagagcacgcaggcttt

SEQ ID NO: 2369288 - DNA, 25 bp, Homo sapien
agaaactcgggtcgctctgtgtgcc

SEQ ID NO: 2369289 - DNA, 25 bp, Homo sapien
ccgcagcgtctaggaaaggattagt

SEQ ID NO: 2369290 - DNA, 25 bp, Homo sapien
acctctaggtcattccacagactta

SEQ ID NO: 2369291 - DNA, 25 bp, Homo sapien
tttcgtccccagaaacttgagctgg

SEQ ID NO: 2369292 - DNA, 25 bp, Homo sapien
catcctccgctggtttgcactgggc

SEQ ID NO: 2369293 - DNA, 25 bp, Homo sapien
gcagcatgctatcacttctcaggaa

SEQ ID NO: 2369294 - DNA, 25 bp, Homo sapien
acgtggcgtctccaccaagggtcca

SEQ ID NO: 2369295 - DNA, 25 bp, Homo sapien
tagcgggcgcctggaaggctggtag

SEQ ID NO: 2369296 - DNA, 25 bp, Homo sapien
ggagggccctggcatctctactata

SEQ ID NO: 2369297 - DNA, 25 bp, Homo sapien
tctctactataggatacacacagtc

SEQ ID NO: 2369298 - DNA, 25 bp, Homo sapien
gagggaaactgtcccggattgccat

SEQ ID NO: 2369299 - DNA, 25 bp, Homo sapien
cctccagaggtgttgaaggcctcag

SEQ ID NO: 2369300 - DNA, 25 bp, Homo sapien
gacttgactgtagcagcccttcctc

SEQ ID NO: 2369301 - DNA, 25 bp, Homo sapien
tccagaggtgttgaaggcctcagca

SEQ ID NO: 2369302 - DNA, 25 bp, Homo sapien
gctggctaatgtgctccaagcccca

SEQ ID NO: 2369303 - DNA, 25 bp, Homo sapien
gagcatctaacaggtgctggacact

SEQ ID NO: 2369304 - DNA, 25 bp, Homo sapien
gggctcagaaaagctggctaatgtg

SEQ ID NO: 2369305 - DNA, 25 bp, Homo sapien
cactgtgtgagcgttaactcagttc

SEQ ID NO: 2369306 - DNA, 25 bp, Homo sapien
tcacggcatcgagaagctttcaggg

SEQ ID NO: 2369307 - DNA, 25 bp, Homo sapien
tcgagaagctttcagggccgcggca

SEQ ID NO: 2369308 - DNA, 25 bp, Homo sapien
cacggcatcgagaagctttcagggc

SEQ ID NO: 2369309 - DNA, 25 bp, Homo sapien
gcatcgagaagctttcagggccgcg

SEQ ID NO: 2369310 - DNA, 25 bp, Homo sapien
catagtggtgcaggttactgttccc

SEQ ID NO: 2369311 - DNA, 25 bp, Homo sapien
tgcgatctctcgagccatagtggtg

SEQ ID NO: 2369312 - DNA, 25 bp, Homo sapien
tctgggggtctgacatgcgatctct

SEQ ID NO: 2369313 - DNA, 25 bp, Homo sapien
gacgttcgttttgctggactcctgc

SEQ ID NO: 2369314 - DNA, 25 bp, Homo sapien
ggaccccaaggaaacgctattgaga

SEQ ID NO: 2369315 - DNA, 25 bp, Homo sapien
gatttgcccaggttcacccagttgg

SEQ ID NO: 2369316 - DNA, 25 bp, Homo sapien
caggagcctactttttgcatgccaa

SEQ ID NO: 2369317 - DNA, 25 bp, Homo sapien
gttccatctgaaacgcaggccctga

SEQ ID NO: 2369318 - DNA, 25 bp, Homo sapien
tgatgattgcaggatccatagtatc

SEQ ID NO: 2369319 - DNA, 25 bp, Homo sapien
gagagtgtgcaccaaccctgggttg

SEQ ID NO: 2369320 - DNA, 25 bp, Homo sapien
tacatatattggagatgcatgctga

SEQ ID NO: 2369321 - DNA, 25 bp, Homo sapien
ccatagtatctgaatgatgagtccc

SEQ ID NO: 2369322 - DNA, 25 bp, Homo sapien
gccaggaacctggattcaacgacat

SEQ ID NO: 2369323 - DNA, 25 bp, Homo sapien
ctgcttggcaccaatatagatcctt

SEQ ID NO: 2369324 - DNA, 25 bp, Homo sapien
tttcacagataagcacattactcac

SEQ ID NO: 2369325 - DNA, 25 bp, Homo sapien
ggcaccaatatagatccttttcaca

SEQ ID NO: 2369326 - DNA, 25 bp, Homo sapien
gatccttttcacagataagcacatt

SEQ ID NO: 2369327 - DNA, 25 bp, Homo sapien
gggtggaactgaccagaatgcagta

SEQ ID NO: 2369328 - DNA, 25 bp, Homo sapien
ctgaccagaatgcagtaccccaggc

SEQ ID NO: 2369329 - DNA, 25 bp, Homo sapien
cccaggccagaaatcgtgcctccat

SEQ ID NO: 2369330 - DNA, 25 bp, Homo sapien
gaactgaccagaatgcagtacccca

SEQ ID NO: 2369331 - DNA, 25 bp, Homo sapien
cccaggagttcaccccatagtggct

SEQ ID NO: 2369332 - DNA, 25 bp, Homo sapien
ctagatttggtgttgacgtggagca

SEQ ID NO: 2369333 - DNA, 25 bp, Homo sapien
cctgcctcatcactaacttggtttc

SEQ ID NO: 2369334 - DNA, 25 bp, Homo sapien
ctcctgcctcatcactaacttggtt

SEQ ID NO: 2369335 - DNA, 25 bp, Homo sapien
tcctgcctcatcactaacttggttt

SEQ ID NO: 2369336 - DNA, 25 bp, Homo sapien
gaccagtaagcagaagccggtgttg

SEQ ID NO: 2369337 - DNA, 25 bp, Homo sapien
caaactgctatgtcacgaatctcaa

SEQ ID NO: 2369338 - DNA, 25 bp, Homo sapien
ctgatagtcacaaactgctatgtca

SEQ ID NO: 2369339 - DNA, 25 bp, Homo sapien
gtgttggtggctatgggctgctgct

SEQ ID NO: 2369340 - DNA, 25 bp, Homo sapien
accatgtagatgtgtctggatgttg

SEQ ID NO: 2369341 - DNA, 25 bp, Homo sapien
gatgccctctggaaaccatgtagat

SEQ ID NO: 2369342 - DNA, 25 bp, Homo sapien
tgccctctggaaaccatgtagatgt

SEQ ID NO: 2369343 - DNA, 25 bp, Homo sapien
tctggaaaccatgtagatgtgtctg

SEQ ID NO: 2369344 - DNA, 25 bp, Homo sapien
catcatttcccagtggctggcgggc

SEQ ID NO: 2369345 - DNA, 25 bp, Homo sapien
ctgccatcatttcccagtggctggc

SEQ ID NO: 2369346 - DNA, 25 bp, Homo sapien
tcagaagccgccttccctatccatc

SEQ ID NO: 2369347 - DNA, 25 bp, Homo sapien
tcatttcccagtggctggcgggctc

SEQ ID NO: 2369348 - DNA, 25 bp, Homo sapien
tttgggctccgtggaaaatggcacc

SEQ ID NO: 2369349 - DNA, 25 bp, Homo sapien
tccagagtgggcgacaaaagctcag

SEQ ID NO: 2369350 - DNA, 25 bp, Homo sapien
gactaactggtcgagcaatcccaaa

SEQ ID NO: 2369351 - DNA, 25 bp, Homo sapien
tcctttgagatttcgcaggctcggg

SEQ ID NO: 2369352 - DNA, 25 bp, Homo sapien
tgctcaagccaagagaagtgccact

SEQ ID NO: 2369353 - DNA, 25 bp, Homo sapien
cacttgctcagaggacatactcggg

SEQ ID NO: 2369354 - DNA, 25 bp, Homo sapien
gacctgaattctggcctgggccctg

SEQ ID NO: 2369355 - DNA, 25 bp, Homo sapien
aaaggcgccagtgtgattttccacg

SEQ ID NO: 2369356 - DNA, 25 bp, Homo sapien
tgggcgagagttcacaacaggtgtc

SEQ ID NO: 2369357 - DNA, 25 bp, Homo sapien
tctgcaaaaatcaggctcaggcagc

SEQ ID NO: 2369358 - DNA, 25 bp, Homo sapien
tgtgggcaacgtctgtccatccctg

SEQ ID NO: 2369359 - DNA, 25 bp, Homo sapien
catttcctcttgcagtggccgtgac

SEQ ID NO: 2369360 - DNA, 25 bp, Homo sapien
gatttcgggtacagatgcagcagcc

SEQ ID NO: 2369361 - DNA, 25 bp, Homo sapien
gcagcagcctacagaactctccttg

SEQ ID NO: 2369362 - DNA, 25 bp, Homo sapien
gagactgtactcagggtattcaacc

SEQ ID NO: 2369363 - DNA, 25 bp, Homo sapien
gctgtggtcatgagtgagactgtac

SEQ ID NO: 2369364 - DNA, 25 bp, Homo sapien
cagctgtggactcggacgcctggca

SEQ ID NO: 2369365 - DNA, 25 bp, Homo sapien
tgactcggggagcagtagctggctg

SEQ ID NO: 2369366 - DNA, 25 bp, Homo sapien
ctgtggactcggacgcctggcactg

SEQ ID NO: 2369367 - DNA, 25 bp, Homo sapien
gtgcccagctgtggactcggacgcc

SEQ ID NO: 2369368 - DNA, 25 bp, Homo sapien
gaacgtcaacaactgaagaacagga

SEQ ID NO: 2369369 - DNA, 25 bp, Homo sapien
tgaagaacaggatctgtttcccacc

SEQ ID NO: 2369370 - DNA, 25 bp, Homo sapien
ctgtctccatctgaagaacgtcaac

SEQ ID NO: 2369371 - DNA, 25 bp, Homo sapien
gaagaacgtcaacaactgaagaaca

SEQ ID NO: 2369372 - DNA, 25 bp, Homo sapien
gtggccttcaggctctcacataaac

SEQ ID NO: 2369373 - DNA, 25 bp, Homo sapien
tggtttgtcttcaccgcccaaactg

SEQ ID NO: 2369374 - DNA, 25 bp, Homo sapien
ggccttcaggctctcacataaactg

SEQ ID NO: 2369375 - DNA, 25 bp, Homo sapien
accgcccaaactgggcaggtgagag

SEQ ID NO: 2369376 - DNA, 25 bp, Homo sapien
tctcttcctttatcgccgctctcat

SEQ ID NO: 2369377 - DNA, 25 bp, Homo sapien
ctctcttcctttatcgccgctctca

SEQ ID NO: 2369378 - DNA, 25 bp, Homo sapien
tctctcttcctttatcgccgctctc

SEQ ID NO: 2369379 - DNA, 25 bp, Homo sapien
cagtcctgggaactgtgtacagcca

SEQ ID NO: 2369380 - DNA, 25 bp, Homo sapien
ccaaagctctttggtgaatgtccca

SEQ ID NO: 2369381 - DNA, 25 bp, Homo sapien
gatccaagaggattagagcaacgtg

SEQ ID NO: 2369382 - DNA, 25 bp, Homo sapien
gaatgtcccaactccttagcaaggc

SEQ ID NO: 2369383 - DNA, 25 bp, Homo sapien
taacaaatatcaccaagggaccagc

SEQ ID NO: 2369384 - DNA, 25 bp, Homo sapien
ccttggctggttctgaattctgggt

SEQ ID NO: 2369385 - DNA, 25 bp, Homo sapien
cataaccacttttatgagcagtgaa

SEQ ID NO: 2369386 - DNA, 25 bp, Homo sapien
ggaccagcagggacattagcaacct

SEQ ID NO: 2369387 - DNA, 25 bp, Homo sapien
tggatccaggcggtgtggtccttca

SEQ ID NO: 2369388 - DNA, 25 bp, Homo sapien
ggatccaggcggtgtggtccttcat

SEQ ID NO: 2369389 - DNA, 25 bp, Homo sapien
cacgacctctaggagggacttcaga

SEQ ID NO: 2369390 - DNA, 25 bp, Homo sapien
taactcgggagtcatggtaagggca

SEQ ID NO: 2369391 - DNA, 25 bp, Homo sapien
ggacggcaccaaaggcatcagtgtg

SEQ ID NO: 2369392 - DNA, 25 bp, Homo sapien
gctacctaaatattgggacggcacc

SEQ ID NO: 2369393 - DNA, 25 bp, Homo sapien
ccacaccccgggcttcaacacatgc

SEQ ID NO: 2369394 - DNA, 25 bp, Homo sapien
aacacatgcaagcttccgggtcttc

SEQ ID NO: 2369395 - DNA, 25 bp, Homo sapien
cccgggcttcaacacatgcaagctt

SEQ ID NO: 2369396 - DNA, 25 bp, Homo sapien
gcttcaacacatgcaagcttccggg

SEQ ID NO: 2369397 - DNA, 25 bp, Homo sapien
gccagggcgcaaacccagatctttt

SEQ ID NO: 2369398 - DNA, 25 bp, Homo sapien
tcccgatggaagattgtcaggcaca

SEQ ID NO: 2369399 - DNA, 25 bp, Homo sapien
taaagcacctagaacgcaggactct

SEQ ID NO: 2369400 - DNA, 25 bp, Homo sapien
taacgtgcctccaataatgctggtg

SEQ ID NO: 2369401 - DNA, 25 bp, Homo sapien
tgggacatctcacattgacacagcc

SEQ ID NO: 2369402 - DNA, 25 bp, Homo sapien
tcctgggacatctcacattgacaca

SEQ ID NO: 2369403 - DNA, 25 bp, Homo sapien
ggacatctcacattgacacagccca

SEQ ID NO: 2369404 - DNA, 25 bp, Homo sapien
ggtcctcctgggacatctcacattg

SEQ ID NO: 2369405 - DNA, 25 bp, Homo sapien
tactgggtagagcaggaagaagctc

SEQ ID NO: 2369406 - DNA, 25 bp, Homo sapien
ctcagatgtaagtcattcaccaagg

SEQ ID NO: 2369407 - DNA, 25 bp, Homo sapien
tcaccaaggacagtgagccccaaga

SEQ ID NO: 2369408 - DNA, 25 bp, Homo sapien
agccccaagatgacatctgcttgat

SEQ ID NO: 2369409 - DNA, 25 bp, Homo sapien
gacagctgaacgctgtcttacaaac

SEQ ID NO: 2369410 - DNA, 25 bp, Homo sapien
gctgacagctgaacgctgtcttaca

SEQ ID NO: 2369411 - DNA, 25 bp, Homo sapien
ctgacagctgaacgctgtcttacaa

SEQ ID NO: 2369412 - DNA, 25 bp, Homo sapien
gtgctgacagctgaacgctgtctta

SEQ ID NO: 2369413 - DNA, 25 bp, Homo sapien
tgtgcacacgtttcttacacgaagg

SEQ ID NO: 2369414 - DNA, 25 bp, Homo sapien
tacacgaaggcgaataaacaccacc

SEQ ID NO: 2369415 - DNA, 25 bp, Homo sapien
ggccccaagacgtccaaatacatca

SEQ ID NO: 2369416 - DNA, 25 bp, Homo sapien
tggcctctggtaacagacggcccca

SEQ ID NO: 2369417 - DNA, 25 bp, Homo sapien
tcctccagagaactgctcttcagtt

SEQ ID NO: 2369418 - DNA, 25 bp, Homo sapien
tgagcacctcgccagcaagagcctt

SEQ ID NO: 2369419 - DNA, 25 bp, Homo sapien
cttgtgtcaggggtctcgggtcttc

SEQ ID NO: 2369420 - DNA, 25 bp, Homo sapien
tctgcactgtctaaaagcagctcct

SEQ ID NO: 2369421 - DNA, 25 bp, Homo sapien
agttctccgactggttctctgtaca

SEQ ID NO: 2369422 - DNA, 25 bp, Homo sapien
taaagaaagctgcatgcgagcaggc

SEQ ID NO: 2369423 - DNA, 25 bp, Homo sapien
ttggaagtatctcctatcctagggc

SEQ ID NO: 2369424 - DNA, 25 bp, Homo sapien
gggatctgaactcaattctgggaca

SEQ ID NO: 2369425 - DNA, 25 bp, Homo sapien
gacctgtgagctgaccttctcataa

SEQ ID NO: 2369426 - DNA, 25 bp, Homo sapien
caagagaagttggtgtgtccctctg

SEQ ID NO: 2369427 - DNA, 25 bp, Homo sapien
gaggatcctaactggagactgaatc

SEQ ID NO: 2369428 - DNA, 25 bp, Homo sapien
catacaaataccttgatgaggatcc

SEQ ID NO: 2369429 - DNA, 25 bp, Homo sapien
tcactctgatacatgaagttgtctt

SEQ ID NO: 2369430 - DNA, 25 bp, Homo sapien
cacttcactctgatacatgaagttg

SEQ ID NO: 2369431 - DNA, 25 bp, Homo sapien
ctccacttcactctgatacatgaag

SEQ ID NO: 2369432 - DNA, 25 bp, Homo sapien
ctctgatacatgaagttgtctttct

SEQ ID NO: 2369433 - DNA, 25 bp, Homo sapien
ccttcccagattgggtgacttccct

SEQ ID NO: 2369434 - DNA, 25 bp, Homo sapien
ttcccagattgggtgacttcccttc

SEQ ID NO: 2369435 - DNA, 25 bp, Homo sapien
tcccagattgggtgacttcccttcc

SEQ ID NO: 2369436 - DNA, 25 bp, Homo sapien
tccttcccagattgggtgacttccc

SEQ ID NO: 2369437 - DNA, 25 bp, Homo sapien
ctggctctcggtgagtaggatggtt

SEQ ID NO: 2369438 - DNA, 25 bp, Homo sapien
agaaaagcacattgctatgtgtgga

SEQ ID NO: 2369439 - DNA, 25 bp, Homo sapien
tctagaaaagcacattgctatgtgt

SEQ ID NO: 2369440 - DNA, 25 bp, Homo sapien
gagtaggatggttttctctagaaaa

SEQ ID NO: 2369441 - DNA, 25 bp, Homo sapien
gttactggtggttcttgacttcttg

SEQ ID NO: 2369442 - DNA, 25 bp, Homo sapien
tggtaacatccctcacggggagtgg

SEQ ID NO: 2369443 - DNA, 25 bp, Homo sapien
ttcaaagttactggtggttcttgac

SEQ ID NO: 2369444 - DNA, 25 bp, Homo sapien
ttcttggtaacatccctcacgggga

SEQ ID NO: 2369445 - DNA, 25 bp, Homo sapien
taattatggctggaccacatggcat

SEQ ID NO: 2369446 - DNA, 25 bp, Homo sapien
gaaaggaaacttagttgtgacaaca

SEQ ID NO: 2369447 - DNA, 25 bp, Homo sapien
agagatgtactagtccgttttcaca

SEQ ID NO: 2369448 - DNA, 25 bp, Homo sapien
gtgcctctagagatgtactagtccg

SEQ ID NO: 2369449 - DNA, 25 bp, Homo sapien
catctcttccgcatatttgctgttc

SEQ ID NO: 2369450 - DNA, 25 bp, Homo sapien
ctcttccgcatatttgctgttccct

SEQ ID NO: 2369451 - DNA, 25 bp, Homo sapien
cccatctcttccgcatatttgctgt

SEQ ID NO: 2369452 - DNA, 25 bp, Homo sapien
tctcttccgcatatttgctgttccc

SEQ ID NO: 2369453 - DNA, 25 bp, Homo sapien
gaaatgacctcagaagaccaaggag

SEQ ID NO: 2369454 - DNA, 25 bp, Homo sapien
gcttttgtcagctccactggtgtta

SEQ ID NO: 2369455 - DNA, 25 bp, Homo sapien
tgttaagagcatgtttgcccaatgt

SEQ ID NO: 2369456 - DNA, 25 bp, Homo sapien
gggtatttcacatgatcccagcttt

SEQ ID NO: 2369457 - DNA, 25 bp, Homo sapien
ttttttgttgtcagtcgggctgata

SEQ ID NO: 2369458 - DNA, 25 bp, Homo sapien
cagcatgtcctcaggcaaaccaaac

SEQ ID NO: 2369459 - DNA, 25 bp, Homo sapien
aaacccgatggtgctatgttcatgg

SEQ ID NO: 2369460 - DNA, 25 bp, Homo sapien
tgtcagtcgggctgataccacgtag

SEQ ID NO: 2369461 - DNA, 25 bp, Homo sapien
gcagcggtgaaactgcaaatgaaca

SEQ ID NO: 2369462 - DNA, 25 bp, Homo sapien
aggtgaggattgtaatcccttggaa

SEQ ID NO: 2369463 - DNA, 25 bp, Homo sapien
ctagcaggatgtgatcaggtccaaa

SEQ ID NO: 2369464 - DNA, 25 bp, Homo sapien
ggaaatgcctgcagcggtgaaactg

SEQ ID NO: 2369465 - DNA, 25 bp, Homo sapien
cattgggtgggttcgtctacttttg

SEQ ID NO: 2369466 - DNA, 25 bp, Homo sapien
cctacttcctggacgttcaaactgc

SEQ ID NO: 2369467 - DNA, 25 bp, Homo sapien
tcctacttcctggacgttcaaactg

SEQ ID NO: 2369468 - DNA, 25 bp, Homo sapien
ctacttcctggacgttcaaactgct

SEQ ID NO: 2369469 - DNA, 25 bp, Homo sapien
ctcctacttcctggacgttcaaact

SEQ ID NO: 2369470 - DNA, 25 bp, Homo sapien
caatggatttggtaggtggatttcc

SEQ ID NO: 2369471 - DNA, 25 bp, Homo sapien
gactgtagccttgtaaccaatatga

SEQ ID NO: 2369472 - DNA, 25 bp, Homo sapien
gatttggtaggtggatttcctggcc

SEQ ID NO: 2369473 - DNA, 25 bp, Homo sapien
aatatgagcagaaggcaatggattt

SEQ ID NO: 2369474 - DNA, 25 bp, Homo sapien
tagccagggccttggtgttctacat

SEQ ID NO: 2369475 - DNA, 25 bp, Homo sapien
ccagtgtagtatccaggagcaggta

SEQ ID NO: 2369476 - DNA, 25 bp, Homo sapien
tgaaggtagccttcctttagccagg

SEQ ID NO: 2369477 - DNA, 25 bp, Homo sapien
taactctttgccagtggttgtccag

SEQ ID NO: 2369478 - DNA, 25 bp, Homo sapien
caccagcgctgtgcaccaaagtttc

SEQ ID NO: 2369479 - DNA, 25 bp, Homo sapien
ctctgtgcattggatgggaggattt

SEQ ID NO: 2369480 - DNA, 25 bp, Homo sapien
tgtggctttattccatgaatccacc

SEQ ID NO: 2369481 - DNA, 25 bp, Homo sapien
tattccatgaatccaccagcgctgt

SEQ ID NO: 2369482 - DNA, 25 bp, Homo sapien
tcacctgtggccgtggaccttgggc

SEQ ID NO: 2369483 - DNA, 25 bp, Homo sapien
tgccttgtgccctctggatcgtact

SEQ ID NO: 2369484 - DNA, 25 bp, Homo sapien
ggttgcagctgcctacaccccgaag

SEQ ID NO: 2369485 - DNA, 25 bp, Homo sapien
tctggatcgtactcacctgtggccg

SEQ ID NO: 2369486 - DNA, 25 bp, Homo sapien
gaaactctcttctcgtctgactcag

SEQ ID NO: 2369487 - DNA, 25 bp, Homo sapien
tctagatacttgagattgcaggcaa

SEQ ID NO: 2369488 - DNA, 25 bp, Homo sapien
cattccttgactatgatgggcctcc

SEQ ID NO: 2369489 - DNA, 25 bp, Homo sapien
tggatagtgccaaccaacgatggaa

SEQ ID NO: 2369490 - DNA, 25 bp, Homo sapien
cgaccagtgtctatgtttctaacca

SEQ ID NO: 2369491 - DNA, 25 bp, Homo sapien
gaccagtgtctatgtttctaaccac

SEQ ID NO: 2369492 - DNA, 25 bp, Homo sapien
gcacccgaccagtgtctatgtttct

SEQ ID NO: 2369493 - DNA, 25 bp, Homo sapien
cccgaccagtgtctatgtttctaac

SEQ ID NO: 2369494 - DNA, 25 bp, Homo sapien
tcctgtgttgaaagcagataacata

SEQ ID NO: 2369495 - DNA, 25 bp, Homo sapien
agcagataacatagagcaaggtctc

SEQ ID NO: 2369496 - DNA, 25 bp, Homo sapien
taacatagagcaaggtctcgggttg

SEQ ID NO: 2369497 - DNA, 25 bp, Homo sapien
gataacatagagcaaggtctcgggt

SEQ ID NO: 2369498 - DNA, 25 bp, Homo sapien
tattggatgttcagcctgcagaggc

SEQ ID NO: 2369499 - DNA, 25 bp, Homo sapien
atagagggtagggttctgaacacac

SEQ ID NO: 2369500 - DNA, 25 bp, Homo sapien
tccaggatactcataagccctagag

SEQ ID NO: 2369501 - DNA, 25 bp, Homo sapien
tggacagtacttagaccagcccaag

SEQ ID NO: 2369502 - DNA, 25 bp, Homo sapien
agggtctcttgtccatcataatcag

SEQ ID NO: 2369503 - DNA, 25 bp, Homo sapien
tcctggtagcatctggccagggtct

SEQ ID NO: 2369504 - DNA, 25 bp, Homo sapien
atttttcaggaactaggtgggatct

SEQ ID NO: 2369505 - DNA, 25 bp, Homo sapien
ggtctcttgtccatcataatcagca

SEQ ID NO: 2369506 - DNA, 25 bp, Homo sapien
taagggtgggtatcagtccctgagc

SEQ ID NO: 2369507 - DNA, 25 bp, Homo sapien
gtagatgctcactcgatatttgtag

SEQ ID NO: 2369508 - DNA, 25 bp, Homo sapien
gcctccagaatagcttgtgccacag

SEQ ID NO: 2369509 - DNA, 25 bp, Homo sapien
gaaaggatctgacctaaacaggtgg

SEQ ID NO: 2369510 - DNA, 25 bp, Homo sapien
cctgctcatcccatgtccccgcttt

SEQ ID NO: 2369511 - DNA, 25 bp, Homo sapien
cgtggcagttggaggctctccctgc

SEQ ID NO: 2369512 - DNA, 25 bp, Homo sapien
ctccgtggcagttggaggctctccc

SEQ ID NO: 2369513 - DNA, 25 bp, Homo sapien
atgtccccgctttccttttcactag

SEQ ID NO: 2369514 - DNA, 25 bp, Homo sapien
cctggctgatgactgcacttgaccg

SEQ ID NO: 2369515 - DNA, 25 bp, Homo sapien
tgcacttgaccgaggtatgggcctg

SEQ ID NO: 2369516 - DNA, 25 bp, Homo sapien
ggctgatgactgcacttgaccgagg

SEQ ID NO: 2369517 - DNA, 25 bp, Homo sapien
gatgactgcacttgaccgaggtatg

SEQ ID NO: 2369518 - DNA, 25 bp, Homo sapien
gctggatttgtaccaccgatgtggg

SEQ ID NO: 2369519 - DNA, 25 bp, Homo sapien
cctccttagggtgtgaaagagtcac

SEQ ID NO: 2369520 - DNA, 25 bp, Homo sapien
cctaagagccgggttattgagtcct

SEQ ID NO: 2369521 - DNA, 25 bp, Homo sapien
gaattagattacctgggcatttggc

SEQ ID NO: 2369522 - DNA, 25 bp, Homo sapien
gagaagggttaagtatccatccagc

SEQ ID NO: 2369523 - DNA, 25 bp, Homo sapien
aactggattcctcccaagtgctgaa

SEQ ID NO: 2369524 - DNA, 25 bp, Homo sapien
ggattccacattgggattccaaggc

SEQ ID NO: 2369525 - DNA, 25 bp, Homo sapien
tctgtgatctgaggattccgcatcc

SEQ ID NO: 2369526 - DNA, 25 bp, Homo sapien
tctatcctagaggtgcaagttcaag

SEQ ID NO: 2369527 - DNA, 25 bp, Homo sapien
ttgggaaagttgctggctcactgct

SEQ ID NO: 2369528 - DNA, 25 bp, Homo sapien
gatggaaagactgtcctaggtcaca

SEQ ID NO: 2369529 - DNA, 25 bp, Homo sapien
gaactccagctgtggcttagatagc

SEQ ID NO: 2369530 - DNA, 25 bp, Homo sapien
cagagccctccacattcaatgagtt

SEQ ID NO: 2369531 - DNA, 25 bp, Homo sapien
tctggaatctgtacttataggttgg

SEQ ID NO: 2369532 - DNA, 25 bp, Homo sapien
tataggttggttcagttcaagacgc

SEQ ID NO: 2369533 - DNA, 25 bp, Homo sapien
gagttgactttccactaattccaag

SEQ ID NO: 2369534 - DNA, 25 bp, Homo sapien
actggaactgcgtctgaggctttgg

SEQ ID NO: 2369535 - DNA, 25 bp, Homo sapien
agccagctgggtgtcagcgtaatga

SEQ ID NO: 2369536 - DNA, 25 bp, Homo sapien
acctgtgtccctccacgcctgggtc

SEQ ID NO: 2369537 - DNA, 25 bp, Homo sapien
gtgtcagcgtaatgaaccagtgaac

SEQ ID NO: 2369538 - DNA, 25 bp, Homo sapien
cgtgttggccttctggctagcagga

SEQ ID NO: 2369539 - DNA, 25 bp, Homo sapien
cttctttgccaaaaggcaagaggct

SEQ ID NO: 2369540 - DNA, 25 bp, Homo sapien
cgagtcacttccaagggtggagaag

SEQ ID NO: 2369541 - DNA, 25 bp, Homo sapien
ctttgaagtcggtagtgacgccgtg

SEQ ID NO: 2369542 - DNA, 25 bp, Homo sapien
cagatgtgctcattggaggacaggg

SEQ ID NO: 2369543 - DNA, 25 bp, Homo sapien
aggacagggttctacatgtcgaggt

SEQ ID NO: 2369544 - DNA, 25 bp, Homo sapien
tctacatgtcgaggttgctgtagca

SEQ ID NO: 2369545 - DNA, 25 bp, Homo sapien
cagggttctacatgtcgaggttgct

SEQ ID NO: 2369546 - DNA, 25 bp, Homo sapien
atggaatgattcatgtcatctctgt

SEQ ID NO: 2369547 - DNA, 25 bp, Homo sapien
ttaggggatggaatgattcatgtca

SEQ ID NO: 2369548 - DNA, 25 bp, Homo sapien
ggatggaatgattcatgtcatctct

SEQ ID NO: 2369549 - DNA, 25 bp, Homo sapien
ggggatggaatgattcatgtcatct

SEQ ID NO: 2369550 - DNA, 25 bp, Homo sapien
ggtgaaaaatgtggccgttcattca

SEQ ID NO: 2369551 - DNA, 25 bp, Homo sapien
tctggatgttttcaaacatctgcat

SEQ ID NO: 2369552 - DNA, 25 bp, Homo sapien
aaaggtgaaaaatgtggccgttcat

SEQ ID NO: 2369553 - DNA, 25 bp, Homo sapien
gaaaaatgtggccgttcattcatct

SEQ ID NO: 2369554 - DNA, 25 bp, Homo sapien
cagggaacattccaaccgagggctc

SEQ ID NO: 2369555 - DNA, 25 bp, Homo sapien
ctcccagtgacagggaacattccaa

SEQ ID NO: 2369556 - DNA, 25 bp, Homo sapien
acattccaaccgagggctctctgtc

SEQ ID NO: 2369557 - DNA, 25 bp, Homo sapien
cagtgacagggaacattccaaccga

SEQ ID NO: 2369558 - DNA, 25 bp, Homo sapien
tgaagccaatccaaactccttgaat

SEQ ID NO: 2369559 - DNA, 25 bp, Homo sapien
cggcacgtctgctgccggatggact

SEQ ID NO: 2369560 - DNA, 25 bp, Homo sapien
tggactggagaccagatgcctgcaa

SEQ ID NO: 2369561 - DNA, 25 bp, Homo sapien
caaaggcctgaacaatatcactcca

SEQ ID NO: 2369562 - DNA, 25 bp, Homo sapien
agtcctttcagcagcgagtctcgag

SEQ ID NO: 2369563 - DNA, 25 bp, Homo sapien
tcagggcactgataggcgttatctc

SEQ ID NO: 2369564 - DNA, 25 bp, Homo sapien
tcagtaaagaatatcccgtggtccc

SEQ ID NO: 2369565 - DNA, 25 bp, Homo sapien
ccaggagcaccgtgaggcaaaaagt

SEQ ID NO: 2369566 - DNA, 25 bp, Homo sapien
catggctggctgaaagttgttcttt

SEQ ID NO: 2369567 - DNA, 25 bp, Homo sapien
ttataggagcctgccatcatgccag

SEQ ID NO: 2369568 - DNA, 25 bp, Homo sapien
accatggctggctgaaagttgttct

SEQ ID NO: 2369569 - DNA, 25 bp, Homo sapien
taaaattatctttctagtcttctat

SEQ ID NO: 2369570 - DNA, 25 bp, Homo sapien
ctttaatcctgaaagctgcgctcag

SEQ ID NO: 2369571 - DNA, 25 bp, Homo sapien
taggtgcgccctagtaggcagcagt

SEQ ID NO: 2369572 - DNA, 25 bp, Homo sapien
cagtagccgctattctgggtaagca

SEQ ID NO: 2369573 - DNA, 25 bp, Homo sapien
agtatttagggagagcaagcgcaca

SEQ ID NO: 2369574 - DNA, 25 bp, Homo sapien
ttttgcgctccaaagaagaggtggg

SEQ ID NO: 2369575 - DNA, 25 bp, Homo sapien
tccaagtcctataggtgcagcggct

SEQ ID NO: 2369576 - DNA, 25 bp, Homo sapien
cttgacagacgttggaagaagacct

SEQ ID NO: 2369577 - DNA, 25 bp, Homo sapien
gatagtcgctatcgcctggttgcct

SEQ ID NO: 2369578 - DNA, 25 bp, Homo sapien
cctcattcctccggagaaagccggg

SEQ ID NO: 2369579 - DNA, 25 bp, Homo sapien
cattcctccggagaaagccgggttg

SEQ ID NO: 2369580 - DNA, 25 bp, Homo sapien
ctcattcctccggagaaagccgggt

SEQ ID NO: 2369581 - DNA, 25 bp, Homo sapien
taaaaataatagtcgtcgtgattac

SEQ ID NO: 2369582 - DNA, 25 bp, Homo sapien
aatagtcgtcgtgattacaaaacaa

SEQ ID NO: 2369583 - DNA, 25 bp, Homo sapien
aaaatagagtgcctcgtgcctcggc

SEQ ID NO: 2369584 - DNA, 25 bp, Homo sapien
caaaacaaaatagagtgcctcgtgc

SEQ ID NO: 2369585 - DNA, 25 bp, Homo sapien
tgcttagaaattgtgcccattgatc

SEQ ID NO: 2369586 - DNA, 25 bp, Homo sapien
gcttagaaattgtgcccattgatca

SEQ ID NO: 2369587 - DNA, 25 bp, Homo sapien
ctgcttagaaattgtgcccattgat

SEQ ID NO: 2369588 - DNA, 25 bp, Homo sapien
ttagaaattgtgcccattgatcaga

SEQ ID NO: 2369589 - DNA, 25 bp, Homo sapien
cgttttgcaactcaacctagtgggt

SEQ ID NO: 2369590 - DNA, 25 bp, Homo sapien
cctagtgggtttccagcggtgcgca

SEQ ID NO: 2369591 - DNA, 25 bp, Homo sapien
ggcgtctacgcggtacgttttgcaa

SEQ ID NO: 2369592 - DNA, 25 bp, Homo sapien
aagtttgcgagcatccaccactgcg

SEQ ID NO: 2369593 - DNA, 25 bp, Homo sapien
attttgctgccgttccagtccttac

SEQ ID NO: 2369594 - DNA, 25 bp, Homo sapien
gagccaggccatgcttcggaaagcc

SEQ ID NO: 2369595 - DNA, 25 bp, Homo sapien
tccagtccttacaggaccgggcctg

SEQ ID NO: 2369596 - DNA, 25 bp, Homo sapien
ctggagccaggccatgcttcggaaa

SEQ ID NO: 2369597 - DNA, 25 bp, Homo sapien
gaaaggacgcgggttgtgctctctg

SEQ ID NO: 2369598 - DNA, 25 bp, Homo sapien
ttaacagcttgggaaacgaaagcga

SEQ ID NO: 2369599 - DNA, 25 bp, Homo sapien
tgcgttcttggcatctgggagcaaa

SEQ ID NO: 2369600 - DNA, 25 bp, Homo sapien
tgggagcaaacacgagcctcggatt

SEQ ID NO: 2369601 - DNA, 25 bp, Homo sapien
tataacagagccagatttaactcgg

SEQ ID NO: 2369602 - DNA, 25 bp, Homo sapien
tattctgttcgtggtgcgggcttcg

SEQ ID NO: 2369603 - DNA, 25 bp, Homo sapien
gaaagcgacagttctccgaaaggag

SEQ ID NO: 2369604 - DNA, 25 bp, Homo sapien
cagaatcctttgaatgccggtccag

SEQ ID NO: 2369605 - DNA, 25 bp, Homo sapien
ggacgattgtcatctaaagcacaca

SEQ ID NO: 2369606 - DNA, 25 bp, Homo sapien
gatgggaccctcacctttctaggct

SEQ ID NO: 2369607 - DNA, 25 bp, Homo sapien
ctaacatgaatgaggagagcagcga

SEQ ID NO: 2369608 - DNA, 25 bp, Homo sapien
ggtactccatggtctcccagatggg

SEQ ID NO: 2369609 - DNA, 25 bp, Homo sapien
tctcttgcagggttacagacctgga

SEQ ID NO: 2369610 - DNA, 25 bp, Homo sapien
aaaatagtctgctctgtcgacagcg

SEQ ID NO: 2369611 - DNA, 25 bp, Homo sapien
gactctggccctttgagcgagctta

SEQ ID NO: 2369612 - DNA, 25 bp, Homo sapien
ccaacgagcccttcaattgagggag

SEQ ID NO: 2369613 - DNA, 25 bp, Homo sapien
gcccaagtccgaaagcctgatcaga

SEQ ID NO: 2369614 - DNA, 25 bp, Homo sapien
atcagatcgaattctctccagtggg

SEQ ID NO: 2369615 - DNA, 25 bp, Homo sapien
gagtcctgtagtgtcctctctcaag

SEQ ID NO: 2369616 - DNA, 25 bp, Homo sapien
tcccacccatgtatagcagagctct

SEQ ID NO: 2369617 - DNA, 25 bp, Homo sapien
tgcggaaacaatcgtcaggaacttt

SEQ ID NO: 2369618 - DNA, 25 bp, Homo sapien
gcttccggacccttctgttaggatg

SEQ ID NO: 2369619 - DNA, 25 bp, Homo sapien
ttttccactggaaacttcagtcagt

SEQ ID NO: 2369620 - DNA, 25 bp, Homo sapien
caggaaattcaaggtccctgcggaa

SEQ ID NO: 2369621 - DNA, 25 bp, Homo sapien
ctaaggaggctccagaaagtcaaga

SEQ ID NO: 2369622 - DNA, 25 bp, Homo sapien
gactgcgcagccaattgcacgaatg

SEQ ID NO: 2369623 - DNA, 25 bp, Homo sapien
gaaacgcttttcaggcctcagactg

SEQ ID NO: 2369624 - DNA, 25 bp, Homo sapien
tcaagaacgattggcagaaacgctt

SEQ ID NO: 2369625 - DNA, 25 bp, Homo sapien
ttcgattaagatacaccataggctc

SEQ ID NO: 2369626 - DNA, 25 bp, Homo sapien
agatgtttgggccacgggtttcgat

SEQ ID NO: 2369627 - DNA, 25 bp, Homo sapien
ataggctctacacgatcggccctgg

SEQ ID NO: 2369628 - DNA, 25 bp, Homo sapien
gccacgggtttcgattaagatacac

SEQ ID NO: 2369629 - DNA, 25 bp, Homo sapien
ttttcactccattagcccttgcaga

SEQ ID NO: 2369630 - DNA, 25 bp, Homo sapien
gaaaaaagttgcctggactgatgtg

SEQ ID NO: 2369631 - DNA, 25 bp, Homo sapien
tatgcagataggtgtagttaacagg

SEQ ID NO: 2369632 - DNA, 25 bp, Homo sapien
ttaacaggtgtgaagagattaagtg

SEQ ID NO: 2369633 - DNA, 25 bp, Homo sapien
agacctctgtcggcacctgaggcct

SEQ ID NO: 2369634 - DNA, 25 bp, Homo sapien
gccaaagacctctgtcggcacctga

SEQ ID NO: 2369635 - DNA, 25 bp, Homo sapien
cgccaaagacctctgtcggcacctg

SEQ ID NO: 2369636 - DNA, 25 bp, Homo sapien
caaagacctctgtcggcacctgagg

SEQ ID NO: 2369637 - DNA, 25 bp, Homo sapien
tgaaggcgcgggagagtagggaaag

SEQ ID NO: 2369638 - DNA, 25 bp, Homo sapien
ctgaaggcgcgggagagtagggaaa

SEQ ID NO: 2369639 - DNA, 25 bp, Homo sapien
gcagcctccacgtgtactcgggaac

SEQ ID NO: 2369640 - DNA, 25 bp, Homo sapien
gctgggaatcccttaaacgctctac

SEQ ID NO: 2369641 - DNA, 25 bp, Homo sapien
tgtactcgggaactgctgggaatcc

SEQ ID NO: 2369642 - DNA, 25 bp, Homo sapien
gaactgctgggaatcccttaaacgc

SEQ ID NO: 2369643 - DNA, 25 bp, Homo sapien
ggaagagcctgaaacaccgggaagc

SEQ ID NO: 2369644 - DNA, 25 bp, Homo sapien
ttgcaagtgtggcagccagcgctgc

SEQ ID NO: 2369645 - DNA, 25 bp, Homo sapien
ccagagcaaacaggcggtgggaaga

SEQ ID NO: 2369646 - DNA, 25 bp, Homo sapien
cttgaggcggcaggactcctccggc

SEQ ID NO: 2369647 - DNA, 25 bp, Homo sapien
tgctatttccaacctgctaagggtg

SEQ ID NO: 2369648 - DNA, 25 bp, Homo sapien
tccaaatatagactcgggtggccca

SEQ ID NO: 2369649 - DNA, 25 bp, Homo sapien
tgttcgtgcccagcatggatcttgc

SEQ ID NO: 2369650 - DNA, 25 bp, Homo sapien
ggaagtaactgtgcctccaatactg

SEQ ID NO: 2369651 - DNA, 25 bp, Homo sapien
gactggttcatctgatctcctggaa

SEQ ID NO: 2369652 - DNA, 25 bp, Homo sapien
gaagtacacataatcaggatttaga

SEQ ID NO: 2369653 - DNA, 25 bp, Homo sapien
gatttagagtcaactcccctgtcct

SEQ ID NO: 2369654 - DNA, 25 bp, Homo sapien
tggagtccgccaggtctgtgaaccc

SEQ ID NO: 2369655 - DNA, 25 bp, Homo sapien
caccctggtatctatggagcagcag

SEQ ID NO: 2369656 - DNA, 25 bp, Homo sapien
tgtcaccctggtatctatggagcag

SEQ ID NO: 2369657 - DNA, 25 bp, Homo sapien
ggagctgtcaccctggtatctatgg

SEQ ID NO: 2369658 - DNA, 25 bp, Homo sapien
gctgtcaccctggtatctatggagc

SEQ ID NO: 2369659 - DNA, 25 bp, Homo sapien
gctctggtcctgttcctagctgaga

SEQ ID NO: 2369660 - DNA, 25 bp, Homo sapien
tagctgagaccccattgatgtcagc

SEQ ID NO: 2369661 - DNA, 25 bp, Homo sapien
atgctctggtcctgttcctagctga

SEQ ID NO: 2369662 - DNA, 25 bp, Homo sapien
tctggtcctgttcctagctgagacc

SEQ ID NO: 2369663 - DNA, 25 bp, Homo sapien
cagttcccataaatcctagcaggtc

SEQ ID NO: 2369664 - DNA, 25 bp, Homo sapien
cataaatcctagcaggtcttcattc

SEQ ID NO: 2369665 - DNA, 25 bp, Homo sapien
taagatccggatgtggggccaagat

SEQ ID NO: 2369666 - DNA, 25 bp, Homo sapien
aaaattctcggttaagatccggatg

SEQ ID NO: 2369667 - DNA, 25 bp, Homo sapien
tgaactacatggtggcagacggcat

SEQ ID NO: 2369668 - DNA, 25 bp, Homo sapien
cagtccctcggctgttcataggaaa

SEQ ID NO: 2369669 - DNA, 25 bp, Homo sapien
tccagaccaaagcaggccaactggt

SEQ ID NO: 2369670 - DNA, 25 bp, Homo sapien
cagacggcatggaaaggtagacttg

SEQ ID NO: 2369671 - DNA, 25 bp, Homo sapien
gtgatcctatcctcatggagggaag

SEQ ID NO: 2369672 - DNA, 25 bp, Homo sapien
agaggcttcctaggggcccatgctg

SEQ ID NO: 2369673 - DNA, 25 bp, Homo sapien
gggtgatcctatcctcatggaggga

SEQ ID NO: 2369674 - DNA, 25 bp, Homo sapien
gaagaggcttcctaggggcccatgc

SEQ ID NO: 2369675 - DNA, 25 bp, Homo sapien
taaacttccttgattatggcaaatt

SEQ ID NO: 2369676 - DNA, 25 bp, Homo sapien
ccttgattatggcaaatttaactaa

SEQ ID NO: 2369677 - DNA, 25 bp, Homo sapien
acttaaacttccttgattatggcaa

SEQ ID NO: 2369678 - DNA, 25 bp, Homo sapien
ttaactaaaaacaggtcgcactggc

SEQ ID NO: 2369679 - DNA, 25 bp, Homo sapien
ttctctttgttcactctatttcgca

SEQ ID NO: 2369680 - DNA, 25 bp, Homo sapien
tctatttcgcaatcccccatctatt

SEQ ID NO: 2369681 - DNA, 25 bp, Homo sapien
atttgcaatgtttcaaagtccctcc

SEQ ID NO: 2369682 - DNA, 25 bp, Homo sapien
cccattctatgattaattcttcatg

SEQ ID NO: 2369683 - DNA, 25 bp, Homo sapien
tacagagatcgtggcgcggcctcct

SEQ ID NO: 2369684 - DNA, 25 bp, Homo sapien
acaatgagtacagagatcgtggcgc

SEQ ID NO: 2369685 - DNA, 25 bp, Homo sapien
cttcgagggttaagggcagcgccat

SEQ ID NO: 2369686 - DNA, 25 bp, Homo sapien
tccgggagcagtccttcgagggtta

SEQ ID NO: 2369687 - DNA, 25 bp, Homo sapien
ggagtccgcgttctctctttgttgt

SEQ ID NO: 2369688 - DNA, 25 bp, Homo sapien
ttgacagaggttgaattcccgacag

SEQ ID NO: 2369689 - DNA, 25 bp, Homo sapien
gaaaactgtctggagtccgcgttct

SEQ ID NO: 2369690 - DNA, 25 bp, Homo sapien
cagaggttgaattcccgacagtttt

SEQ ID NO: 2369691 - DNA, 25 bp, Homo sapien
gacctaagggtgtaacgatgagcac

SEQ ID NO: 2369692 - DNA, 25 bp, Homo sapien
gcgcagacctaagggtgtaacgatg

SEQ ID NO: 2369693 - DNA, 25 bp, Homo sapien
ccgcaggcgcagacctaagggtgta

SEQ ID NO: 2369694 - DNA, 25 bp, Homo sapien
caggcgcagacctaagggtgtaacg

SEQ ID NO: 2369695 - DNA, 25 bp, Homo sapien
tatgcgctccggcacagcccgtggc

SEQ ID NO: 2369696 - DNA, 25 bp, Homo sapien
tgcgctccggcacagcccgtggccc

SEQ ID NO: 2369697 - DNA, 25 bp, Homo sapien
ctatgcgctccggcacagcccgtgg

SEQ ID NO: 2369698 - DNA, 25 bp, Homo sapien
ctccggcacagcccgtggcccccac

SEQ ID NO: 2369699 - DNA, 25 bp, Homo sapien
ttgtttgccacggataatttacgcg

SEQ ID NO: 2369700 - DNA, 25 bp, Homo sapien
aaatctgtcggctcgtgggcatgga

SEQ ID NO: 2369701 - DNA, 25 bp, Homo sapien
tgcactcggaacaatttgcccgtag

SEQ ID NO: 2369702 - DNA, 25 bp, Homo sapien
gcccgtagaattacatgcacataga

SEQ ID NO: 2369703 - DNA, 25 bp, Homo sapien
aggcggtttccgcagggagaaggca

SEQ ID NO: 2369704 - DNA, 25 bp, Homo sapien
ccttccgccttctgctttccgtgcg

SEQ ID NO: 2369705 - DNA, 25 bp, Homo sapien
agggagcaggcggtttccgcaggga

SEQ ID NO: 2369706 - DNA, 25 bp, Homo sapien
ttctgctttccgtgcggcgcaggga

SEQ ID NO: 2369707 - DNA, 25 bp, Homo sapien
tgagcgcggcacagcgctgtgcaaa

SEQ ID NO: 2369708 - DNA, 25 bp, Homo sapien
ggaagattcttgcaggtacccgggc

SEQ ID NO: 2369709 - DNA, 25 bp, Homo sapien
ctgtgcaaactgatgcagcaacctg

SEQ ID NO: 2369710 - DNA, 25 bp, Homo sapien
aaatcgggcgtctgtggcaattccc

SEQ ID NO: 2369711 - DNA, 25 bp, Homo sapien
ccagagattctattgcatcccaagg

SEQ ID NO: 2369712 - DNA, 25 bp, Homo sapien
ccccacgggaggcaacatccagaga

SEQ ID NO: 2369713 - DNA, 25 bp, Homo sapien
tatcctcattagaacctgtttccca

SEQ ID NO: 2369714 - DNA, 25 bp, Homo sapien
attaaactggggacacttcggagcg

SEQ ID NO: 2369715 - DNA, 25 bp, Homo sapien
ccaacaactttggtatgggtgggtg

SEQ ID NO: 2369716 - DNA, 25 bp, Homo sapien
ctcaaggatagaggctggttctaca

SEQ ID NO: 2369717 - DNA, 25 bp, Homo sapien
gtccacataatccagctggactgga

SEQ ID NO: 2369718 - DNA, 25 bp, Homo sapien
ggttctacactaacaaagtccagtg

SEQ ID NO: 2369719 - DNA, 25 bp, Homo sapien
gcagaacccgaaagactgccctgtt

SEQ ID NO: 2369720 - DNA, 25 bp, Homo sapien
taagagcgtgggcagaacccgaaag

SEQ ID NO: 2369721 - DNA, 25 bp, Homo sapien
ttatcgcttcttatgactgagttgt

SEQ ID NO: 2369722 - DNA, 25 bp, Homo sapien
atgactgagttgtaagagcgtgggc

SEQ ID NO: 2369723 - DNA, 25 bp, Homo sapien
cagacagacagacgccgcggtgccg

SEQ ID NO: 2369724 - DNA, 25 bp, Homo sapien
cagaggacccgcgagtaggcgctca

SEQ ID NO: 2369725 - DNA, 25 bp, Homo sapien
gcctagagttcactcggggcagcag

SEQ ID NO: 2369726 - DNA, 25 bp, Homo sapien
tgcgcccgggtctgcgaatcaaagg

SEQ ID NO: 2369727 - DNA, 25 bp, Homo sapien
ccgcgatgctagcatgcgtattggg

SEQ ID NO: 2369728 - DNA, 25 bp, Homo sapien
acagctcgacctgggactcctggct

SEQ ID NO: 2369729 - DNA, 25 bp, Homo sapien
cgatccgcattttctctttcccaca

SEQ ID NO: 2369730 - DNA, 25 bp, Homo sapien
tgggctccatcccaccgcgatgcta

SEQ ID NO: 2369731 - DNA, 25 bp, Homo sapien
tgcttgatggagcagttcgcgccgt

SEQ ID NO: 2369732 - DNA, 25 bp, Homo sapien
ccctcggatccgttcgctataggca

SEQ ID NO: 2369733 - DNA, 25 bp, Homo sapien
taggcaggtgaacggctggtatttt

SEQ ID NO: 2369734 - DNA, 25 bp, Homo sapien
aaccaggtaagtcattgcctccacc

SEQ ID NO: 2369735 - DNA, 25 bp, Homo sapien
gcgccgatagcttatcgggtccact

SEQ ID NO: 2369736 - DNA, 25 bp, Homo sapien
ctgggccgcgccgatagcttatcgg

SEQ ID NO: 2369737 - DNA, 25 bp, Homo sapien
cttctgtcctgagcggccgctggca

SEQ ID NO: 2369738 - DNA, 25 bp, Homo sapien
cgcttctgtcctgagcggccgctgg

SEQ ID NO: 2369739 - DNA, 25 bp, Homo sapien
aggcggaatgcaggccggtgtgtga

SEQ ID NO: 2369740 - DNA, 25 bp, Homo sapien
gtgaggtgattgtaaccagaaacgc

SEQ ID NO: 2369741 - DNA, 25 bp, Homo sapien
gggaggcggaatgcaggccggtgtg

SEQ ID NO: 2369742 - DNA, 25 bp, Homo sapien
ccggtgtgtgaggtgattgtaacca

SEQ ID NO: 2369743 - DNA, 25 bp, Homo sapien
atgtataaaggaatccacaccactg

SEQ ID NO: 2369744 - DNA, 25 bp, Homo sapien
gactacttcagagatattgaataca

SEQ ID NO: 2369745 - DNA, 25 bp, Homo sapien
ccccagtcattttacaacgactact

SEQ ID NO: 2369746 - DNA, 25 bp, Homo sapien
tgaatacatgtataaaggaatccac

SEQ ID NO: 2369747 - DNA, 25 bp, Homo sapien
cattgtctgaatttgttcatccttg

SEQ ID NO: 2369748 - DNA, 25 bp, Homo sapien
gcagtcatcatgagtgtggggcatt

SEQ ID NO: 2369749 - DNA, 25 bp, Homo sapien
ccctttcctcgaagcttggcttttg

SEQ ID NO: 2369750 - DNA, 25 bp, Homo sapien
tgaacctcaggagcacgtctcactt

SEQ ID NO: 2369751 - DNA, 25 bp, Homo sapien
catggtcagctgcaagcgttgtcca

SEQ ID NO: 2369752 - DNA, 25 bp, Homo sapien
taaagtgtagccatggtcagctgca

SEQ ID NO: 2369753 - DNA, 25 bp, Homo sapien
tgcaagcgttgtccactgtgcaggg

SEQ ID NO: 2369754 - DNA, 25 bp, Homo sapien
tgacaagacagcaggtaaagtgtag

SEQ ID NO: 2369755 - DNA, 25 bp, Homo sapien
cccataaaataggcaagtgagaggg

SEQ ID NO: 2369756 - DNA, 25 bp, Homo sapien
tatgacccataaaataggcaagtga

SEQ ID NO: 2369757 - DNA, 25 bp, Homo sapien
ctgtatgacccataaaataggcaag

SEQ ID NO: 2369758 - DNA, 25 bp, Homo sapien
gacccataaaataggcaagtgagag

SEQ ID NO: 2369759 - DNA, 25 bp, Homo sapien
atggtattggaagaacaccaataat

SEQ ID NO: 2369760 - DNA, 25 bp, Homo sapien
tggaagaacaccaataatttgttta

SEQ ID NO: 2369761 - DNA, 25 bp, Homo sapien
gtattggaagaacaccaataatttg

SEQ ID NO: 2369762 - DNA, 25 bp, Homo sapien
attggaagaacaccaataatttgtt

SEQ ID NO: 2369763 - DNA, 25 bp, Homo sapien
ggctgcatctagacctgacacatcc

SEQ ID NO: 2369764 - DNA, 25 bp, Homo sapien
ttgccttcaactggatttccttttc

SEQ ID NO: 2369765 - DNA, 25 bp, Homo sapien
cttgccttcaactggatttcctttt

SEQ ID NO: 2369766 - DNA, 25 bp, Homo sapien
tggctgcatctagacctgacacatc

SEQ ID NO: 2369767 - DNA, 25 bp, Homo sapien
gataatccatgaggcacccatctgg

SEQ ID NO: 2369768 - DNA, 25 bp, Homo sapien
aaatagtgtgttcccctttgacgag

SEQ ID NO: 2369769 - DNA, 25 bp, Homo sapien
tgtggacccgtcaatcaaggcaggg

SEQ ID NO: 2369770 - DNA, 25 bp, Homo sapien
gaattcttccacctaagagctaggg

SEQ ID NO: 2369771 - DNA, 25 bp, Homo sapien
catccaagccattcccgccaagtgt

SEQ ID NO: 2369772 - DNA, 25 bp, Homo sapien
ttccatccaagccattcccgccaag

SEQ ID NO: 2369773 - DNA, 25 bp, Homo sapien
atccaagccattcccgccaagtgtc

SEQ ID NO: 2369774 - DNA, 25 bp, Homo sapien
ggctttccatccaagccattcccgc

SEQ ID NO: 2369775 - DNA, 25 bp, Homo sapien
cttttcgaatttttgcttgtgagca

SEQ ID NO: 2369776 - DNA, 25 bp, Homo sapien
tttcatcggcttttcgaatttttgc

SEQ ID NO: 2369777 - DNA, 25 bp, Homo sapien
tctcctggttgcctttcagagacag

SEQ ID NO: 2369778 - DNA, 25 bp, Homo sapien
tgcaagcactaaggggctttcatcg

SEQ ID NO: 2369779 - DNA, 25 bp, Homo sapien
gtcttggagttgacctgaggtttct

SEQ ID NO: 2369780 - DNA, 25 bp, Homo sapien
ggagctccttgttgccaaatgcagg

SEQ ID NO: 2369781 - DNA, 25 bp, Homo sapien
ggtagtgagcacaggtcaccctcta

SEQ ID NO: 2369782 - DNA, 25 bp, Homo sapien
accctctatctctgggtgggagctc

SEQ ID NO: 2369783 - DNA, 25 bp, Homo sapien
tttgtgctttcccggtggcaaaatg

SEQ ID NO: 2369784 - DNA, 25 bp, Homo sapien
gtgctttcccggtggcaaaatggga

SEQ ID NO: 2369785 - DNA, 25 bp, Homo sapien
ttgtgctttcccggtggcaaaatgg

SEQ ID NO: 2369786 - DNA, 25 bp, Homo sapien
tgtgctttcccggtggcaaaatggg

SEQ ID NO: 2369787 - DNA, 25 bp, Homo sapien
ttttacatcatgtatgcagacagtg

SEQ ID NO: 2369788 - DNA, 25 bp, Homo sapien
gccaagttcccctgagaagatgctg

SEQ ID NO: 2369789 - DNA, 25 bp, Homo sapien
gctgctccctggtcaccttttacat

SEQ ID NO: 2369790 - DNA, 25 bp, Homo sapien
cagacagtgccaagttcccctgaga

SEQ ID NO: 2369791 - DNA, 25 bp, Homo sapien
agcattgagccgtaagcacctttta

SEQ ID NO: 2369792 - DNA, 25 bp, Homo sapien
gcattgagccgtaagcaccttttaa

SEQ ID NO: 2369793 - DNA, 25 bp, Homo sapien
tagcattgagccgtaagcacctttt

SEQ ID NO: 2369794 - DNA, 25 bp, Homo sapien
attgagccgtaagcaccttttaatt

SEQ ID NO: 2369795 - DNA, 25 bp, Homo sapien
tacacctctgaggttggtgtagaaa

SEQ ID NO: 2369796 - DNA, 25 bp, Homo sapien
atacacctctgaggttggtgtagaa

SEQ ID NO: 2369797 - DNA, 25 bp, Homo sapien
tccagggagaatgcacctaaacaac

SEQ ID NO: 2369798 - DNA, 25 bp, Homo sapien
gaggcttcttcacgacataaatacg

SEQ ID NO: 2369799 - DNA, 25 bp, Homo sapien
taaacaaccaaacctgagcttcgtc

SEQ ID NO: 2369800 - DNA, 25 bp, Homo sapien
tagaaatacctgtagccactaagga

SEQ ID NO: 2369801 - DNA, 25 bp, Homo sapien
agagccatcttagccaatgcacgaa

SEQ ID NO: 2369802 - DNA, 25 bp, Homo sapien
aaatgtggaggagagccatcttagc

SEQ ID NO: 2369803 - DNA, 25 bp, Homo sapien
ggagagccatcttagccaatgcacg

SEQ ID NO: 2369804 - DNA, 25 bp, Homo sapien
tggaggagagccatcttagccaatg

SEQ ID NO: 2369805 - DNA, 25 bp, Homo sapien
gttattgttgggagtcctgtgggtg

SEQ ID NO: 2369806 - DNA, 25 bp, Homo sapien
atcaaatgctgaatcctcttcacag

SEQ ID NO: 2369807 - DNA, 25 bp, Homo sapien
cactaggcttaaaccataattcatg

SEQ ID NO: 2369808 - DNA, 25 bp, Homo sapien
atctgtcttcctcacaacactaggc

SEQ ID NO: 2369809 - DNA, 25 bp, Homo sapien
ctcacaacactaggcttaaaccata

SEQ ID NO: 2369810 - DNA, 25 bp, Homo sapien
ggcttaaaccataattcatgttcta

SEQ ID NO: 2369811 - DNA, 25 bp, Homo sapien
ctcaaagcatagttcatctggagtt

SEQ ID NO: 2369812 - DNA, 25 bp, Homo sapien
cagtaacgtagatgatatcaccttt

SEQ ID NO: 2369813 - DNA, 25 bp, Homo sapien
agtaacgtagatgatatcacctttc

SEQ ID NO: 2369814 - DNA, 25 bp, Homo sapien
attctgcctgctcggccacatagtt

SEQ ID NO: 2369815 - DNA, 25 bp, Homo sapien
ctttccaccaatttgcatcattcat

SEQ ID NO: 2369816 - DNA, 25 bp, Homo sapien
gcctttccaccaatttgcatcattc

SEQ ID NO: 2369817 - DNA, 25 bp, Homo sapien
ggattctgcctgctcggccacatag

SEQ ID NO: 2369818 - DNA, 25 bp, Homo sapien
cttgacacatagtgttccaggtatc

SEQ ID NO: 2369819 - DNA, 25 bp, Homo sapien
tatccttatctttgtggcaagctgc

SEQ ID NO: 2369820 - DNA, 25 bp, Homo sapien
ggtccttcaagtcctaattctgcat

SEQ ID NO: 2369821 - DNA, 25 bp, Homo sapien
ttagatgatgtctctgcccagtgac

SEQ ID NO: 2369822 - DNA, 25 bp, Homo sapien
gcttttacgtcttcttgactttgct

SEQ ID NO: 2369823 - DNA, 25 bp, Homo sapien
tcttcttgactttgctcattctgtt

SEQ ID NO: 2369824 - DNA, 25 bp, Homo sapien
gatgcaccttgcttttacgtcttct

SEQ ID NO: 2369825 - DNA, 25 bp, Homo sapien
gtcagatgcaccttgcttttacgtc

SEQ ID NO: 2369826 - DNA, 25 bp, Homo sapien
gaaggatgaggtccctggtaattca

SEQ ID NO: 2369827 - DNA, 25 bp, Homo sapien
caagctgttcttggatgacggtgaa

SEQ ID NO: 2369828 - DNA, 25 bp, Homo sapien
tttcactaggcctcacgggcattgg

SEQ ID NO: 2369829 - DNA, 25 bp, Homo sapien
gggcattggcacgtccccagagatt

SEQ ID NO: 2369830 - DNA, 25 bp, Homo sapien
tcaaaagccggttgagctgagctag

SEQ ID NO: 2369831 - DNA, 25 bp, Homo sapien
ccggttgagctgagctagtgaagac

SEQ ID NO: 2369832 - DNA, 25 bp, Homo sapien
cattccagcggataaggagacacct

SEQ ID NO: 2369833 - DNA, 25 bp, Homo sapien
tgaagacacgcctcagctctctatt

SEQ ID NO: 2369834 - DNA, 25 bp, Homo sapien
tattatatctaagctctgtagcagg

SEQ ID NO: 2369835 - DNA, 25 bp, Homo sapien
gagccgctgtaggtctcttcttgca

SEQ ID NO: 2369836 - DNA, 25 bp, Homo sapien
ttgccctcaaatcagtgacccaagg

SEQ ID NO: 2369837 - DNA, 25 bp, Homo sapien
cagaggctgcggtttgactttttaa

SEQ ID NO: 2369838 - DNA, 25 bp, Homo sapien
cagaaacgtcggttgcattgagcta

SEQ ID NO: 2369839 - DNA, 25 bp, Homo sapien
catccagcggttggttagcggcttg

SEQ ID NO: 2369840 - DNA, 25 bp, Homo sapien
gactccctcgagagaatgtgctaga

SEQ ID NO: 2369841 - DNA, 25 bp, Homo sapien
ttgtcgcccaaactctgcgcggaga

SEQ ID NO: 2369842 - DNA, 25 bp, Homo sapien
ggctgcgctacagcccctactccat

SEQ ID NO: 2369843 - DNA, 25 bp, Homo sapien
cgccaccccttcctcaatctgaaca

SEQ ID NO: 2369844 - DNA, 25 bp, Homo sapien
ctactccatcccggtgccggtcccg

SEQ ID NO: 2369845 - DNA, 25 bp, Homo sapien
gtcccggacggcagcagtctgctca

SEQ ID NO: 2369846 - DNA, 25 bp, Homo sapien
agggcaggctctttcaacgtctcta

SEQ ID NO: 2369847 - DNA, 25 bp, Homo sapien
accaggccgcttttgtttgttcgca

SEQ ID NO: 2369848 - DNA, 25 bp, Homo sapien
tgtttaacccgaatgcagtggccac

SEQ ID NO: 2369849 - DNA, 25 bp, Homo sapien
gaaaaagaccgcagatagccggcag

SEQ ID NO: 2369850 - DNA, 25 bp, Homo sapien
ggcagcagattttcacgtcttctat

SEQ ID NO: 2369851 - DNA, 25 bp, Homo sapien
gattttcacgtcttctatttgcctg

SEQ ID NO: 2369852 - DNA, 25 bp, Homo sapien
ccagagaagcaagatcaccaccctg

SEQ ID NO: 2369853 - DNA, 25 bp, Homo sapien
gagaagcaagatcaccaccctgtgt

SEQ ID NO: 2369854 - DNA, 25 bp, Homo sapien
caggttcccgatccaggaaggccgg

SEQ ID NO: 2369855 - DNA, 25 bp, Homo sapien
cactcgcctggaggatttttagtat

SEQ ID NO: 2369856 - DNA, 25 bp, Homo sapien
cagagggcaggttcccgatccagga

SEQ ID NO: 2369857 - DNA, 25 bp, Homo sapien
ggtcctctccactcgcctggaggat

SEQ ID NO: 2369858 - DNA, 25 bp, Homo sapien
gaccttatgggacgctctgggctgt

SEQ ID NO: 2369859 - DNA, 25 bp, Homo sapien
tctgggctgtcgctcactcccaact

SEQ ID NO: 2369860 - DNA, 25 bp, Homo sapien
gaaacatggccaaaaggaccttatg

SEQ ID NO: 2369861 - DNA, 25 bp, Homo sapien
atcttcctttcccaagcgaaaggag

SEQ ID NO: 2369862 - DNA, 25 bp, Homo sapien
aatccgaggccgtgagctgcttctc

SEQ ID NO: 2369863 - DNA, 25 bp, Homo sapien
cagcgaggcctggatccgcaccgag

SEQ ID NO: 2369864 - DNA, 25 bp, Homo sapien
ttctccggttccgtgctcagcgagg

SEQ ID NO: 2369865 - DNA, 25 bp, Homo sapien
cttgggtgagagtagaatccgaggc

SEQ ID NO: 2369866 - DNA, 25 bp, Homo sapien
gtttggggcaagatccgagccctgt

SEQ ID NO: 2369867 - DNA, 25 bp, Homo sapien
gacagcctgtccgagacctctttgc

SEQ ID NO: 2369868 - DNA, 25 bp, Homo sapien
tcgggaccttgtcgcgaccgagagc

SEQ ID NO: 2369869 - DNA, 25 bp, Homo sapien
tctcctgcgggcctgtgcagcgttt

SEQ ID NO: 2369870 - DNA, 25 bp, Homo sapien
ggtctcctgagtagcaacttagtct

SEQ ID NO: 2369871 - DNA, 25 bp, Homo sapien
tctttgcatgcaatacaggctgttc

SEQ ID NO: 2369872 - DNA, 25 bp, Homo sapien
tctgactggaatcaggcgccttaac

SEQ ID NO: 2369873 - DNA, 25 bp, Homo sapien
cacctatgcccttattctgactgga

SEQ ID NO: 2369874 - DNA, 25 bp, Homo sapien
tttgcaaagctggtgggaagtaacc

SEQ ID NO: 2369875 - DNA, 25 bp, Homo sapien
aaatcgcaggcgtctttgcaaagct

SEQ ID NO: 2369876 - DNA, 25 bp, Homo sapien
tgtagaccaaaggaaatcgcaggcg

SEQ ID NO: 2369877 - DNA, 25 bp, Homo sapien
tgcaaagctggtgggaagtaaccca

SEQ ID NO: 2369878 - DNA, 25 bp, Homo sapien
tgcgagattcttccgtttcgtcgag

SEQ ID NO: 2369879 - DNA, 25 bp, Homo sapien
gatcagccgaacgaagtctaggaca

SEQ ID NO: 2369880 - DNA, 25 bp, Homo sapien
cttgtctccttcatcgatcagccga

SEQ ID NO: 2369881 - DNA, 25 bp, Homo sapien
cgaggtccgcatcgattgtattgac

SEQ ID NO: 2369882 - DNA, 25 bp, Homo sapien
aacattttgagtggaacccagcacg

SEQ ID NO: 2369883 - DNA, 25 bp, Homo sapien
attttgagtggaacccagcacgcag

SEQ ID NO: 2369884 - DNA, 25 bp, Homo sapien
gaaacattttgagtggaacccagca

SEQ ID NO: 2369885 - DNA, 25 bp, Homo sapien
cctgaaacattttgagtggaaccca

SEQ ID NO: 2369886 - DNA, 25 bp, Homo sapien
catctcctcctctgcgcatgaaggt

SEQ ID NO: 2369887 - DNA, 25 bp, Homo sapien
catgaaggtgggtaaacatccgcgg

SEQ ID NO: 2369888 - DNA, 25 bp, Homo sapien
cctctgcgcatgaaggtgggtaaac

SEQ ID NO: 2369889 - DNA, 25 bp, Homo sapien
gatatccccagtgtttcatctcctc

SEQ ID NO: 2369890 - DNA, 25 bp, Homo sapien
acctgcatggcagagtcccaccaag

SEQ ID NO: 2369891 - DNA, 25 bp, Homo sapien
gaccatggaagttggtgtgctccat

SEQ ID NO: 2369892 - DNA, 25 bp, Homo sapien
accaagctgtaggtcccacttaggg

SEQ ID NO: 2369893 - DNA, 25 bp, Homo sapien
ttgtcctcgcctacacacgcagcct

SEQ ID NO: 2369894 - DNA, 25 bp, Homo sapien
cctctggtccacttgaagattcctg

SEQ ID NO: 2369895 - DNA, 25 bp, Homo sapien
cctgcttcaaaactaaccctgatgg

SEQ ID NO: 2369896 - DNA, 25 bp, Homo sapien
agtcggcaccaagggtcatttctgg

SEQ ID NO: 2369897 - DNA, 25 bp, Homo sapien
tgatggcttccagacaagtcggcac

SEQ ID NO: 2369898 - DNA, 25 bp, Homo sapien
agctgagtgcggctttcatcagcct

SEQ ID NO: 2369899 - DNA, 25 bp, Homo sapien
caagttcctggcgtgggtgtcaaac

SEQ ID NO: 2369900 - DNA, 25 bp, Homo sapien
gggcccagctgagtgcggctttcat

SEQ ID NO: 2369901 - DNA, 25 bp, Homo sapien
tagaaagtcagggactccaagttcc

SEQ ID NO: 2369902 - DNA, 25 bp, Homo sapien
tgccgatttctcatgagaatcctcc

SEQ ID NO: 2369903 - DNA, 25 bp, Homo sapien
actgtgccgatttctcatgagaatc

SEQ ID NO: 2369904 - DNA, 25 bp, Homo sapien
ttctcatgagaatcctcctctgtcc

SEQ ID NO: 2369905 - DNA, 25 bp, Homo sapien
caaaactgtgccgatttctcatgag

SEQ ID NO: 2369906 - DNA, 25 bp, Homo sapien
gtgtgtccattctgggtgggcccca

SEQ ID NO: 2369907 - DNA, 25 bp, Homo sapien
agtctgcccccaagtgtgtccattc

SEQ ID NO: 2369908 - DNA, 25 bp, Homo sapien
gctccagatgcaaggtgggctccag

SEQ ID NO: 2369909 - DNA, 25 bp, Homo sapien
ggtctgacagcttagctccagatgc

SEQ ID NO: 2369910 - DNA, 25 bp, Homo sapien
caacatggtcaaatgccctctctat

SEQ ID NO: 2369911 - DNA, 25 bp, Homo sapien
caataagccaagttcgttccactgc

SEQ ID NO: 2369912 - DNA, 25 bp, Homo sapien
cttcaataagccaagttcgttccac

SEQ ID NO: 2369913 - DNA, 25 bp, Homo sapien
tggtcaaatgccctctctataaaaa

SEQ ID NO: 2369914 - DNA, 25 bp, Homo sapien
atccagccttaccacttacaagcaa

SEQ ID NO: 2369915 - DNA, 25 bp, Homo sapien
atgactcaagggaagttatgtaatc

SEQ ID NO: 2369916 - DNA, 25 bp, Homo sapien
cagccttaccacttacaagcaaata

SEQ ID NO: 2369917 - DNA, 25 bp, Homo sapien
gaagttatgtaatctctcagtgcct

SEQ ID NO: 2369918 - DNA, 25 bp, Homo sapien
gggtggctgagaaactaacctcatc

SEQ ID NO: 2369919 - DNA, 25 bp, Homo sapien
taattattgttattcagagcacttg

SEQ ID NO: 2369920 - DNA, 25 bp, Homo sapien
cagttggatcattccctgtgtgtct

SEQ ID NO: 2369921 - DNA, 25 bp, Homo sapien
acttagatcttagaagggtggctga

SEQ ID NO: 2369922 - DNA, 25 bp, Homo sapien
tttgccctacttgaacaaccaataa

SEQ ID NO: 2369923 - DNA, 25 bp, Homo sapien
cctttgccctacttgaacaaccaat

SEQ ID NO: 2369924 - DNA, 25 bp, Homo sapien
ctttgccctacttgaacaaccaata

SEQ ID NO: 2369925 - DNA, 25 bp, Homo sapien
tcctttgccctacttgaacaaccaa

SEQ ID NO: 2369926 - DNA, 25 bp, Homo sapien
tgcactccagactgggcgacagagt

SEQ ID NO: 2369927 - DNA, 25 bp, Homo sapien
ctccagactgggcgacagagtgaga

SEQ ID NO: 2369928 - DNA, 25 bp, Homo sapien
gcagtgaccgtgatcacaccattgc

SEQ ID NO: 2369929 - DNA, 25 bp, Homo sapien
cactccagactgggcgacagagtga

SEQ ID NO: 2369930 - DNA, 25 bp, Homo sapien
tgcagcgagccaagatcacaccact

SEQ ID NO: 2369931 - DNA, 25 bp, Homo sapien
agaatcaattgaaccagggagtcgg

SEQ ID NO: 2369932 - DNA, 25 bp, Homo sapien
gcactccagcctggtgacagaggga

SEQ ID NO: 2369933 - DNA, 25 bp, Homo sapien
tcaattgaaccagggagtcggaggt

SEQ ID NO: 2369934 - DNA, 25 bp, Homo sapien
gacagaacggacagcgtccaaagtg

SEQ ID NO: 2369935 - DNA, 25 bp, Homo sapien
cgttcttcgaactcggtagattttg

SEQ ID NO: 2369936 - DNA, 25 bp, Homo sapien
caggcccgttcttcgaactcggtag

SEQ ID NO: 2369937 - DNA, 25 bp, Homo sapien
cagcgtccaaagtgccttgggccag

SEQ ID NO: 2369938 - DNA, 25 bp, Homo sapien
cactttcttgccgaggtctccagta

SEQ ID NO: 2369939 - DNA, 25 bp, Homo sapien
gttcctgggtcatctgtctttgcat

SEQ ID NO: 2369940 - DNA, 25 bp, Homo sapien
cagtaacacccttgcaatgccaatt

SEQ ID NO: 2369941 - DNA, 25 bp, Homo sapien
tgtctttgcattcactttcttgccg

SEQ ID NO: 2369942 - DNA, 25 bp, Homo sapien
acaaagcgagcaagagtgactccca

SEQ ID NO: 2369943 - DNA, 25 bp, Homo sapien
gactcccagacggattatacctaaa

SEQ ID NO: 2369944 - DNA, 25 bp, Homo sapien
tgagatcagagacacaagttttgcc

SEQ ID NO: 2369945 - DNA, 25 bp, Homo sapien
aggactccatcccataaactcggtg

SEQ ID NO: 2369946 - DNA, 25 bp, Homo sapien
gattctatctaatattgtcagcagc

SEQ ID NO: 2369947 - DNA, 25 bp, Homo sapien
ctaatattgtcagcagcccttgtcc

SEQ ID NO: 2369948 - DNA, 25 bp, Homo sapien
gttcacatcatcaaaatggccacta

SEQ ID NO: 2369949 - DNA, 25 bp, Homo sapien
tctgttttaaaatctagttcacatc

SEQ ID NO: 2369950 - DNA, 25 bp, Homo sapien
atcttttatcccctggatggaattg

SEQ ID NO: 2369951 - DNA, 25 bp, Homo sapien
ggagaaggcaagcacggtagctcat

SEQ ID NO: 2369952 - DNA, 25 bp, Homo sapien
aggagaaggcaagcacggtagctca

SEQ ID NO: 2369953 - DNA, 25 bp, Homo sapien
ggaattgctgcacctaaaattaaca

SEQ ID NO: 2369954 - DNA, 25 bp, Homo sapien
caggaacaggctctcatttgtagct

SEQ ID NO: 2369955 - DNA, 25 bp, Homo sapien
caaaggctttgacttacgctggaca

SEQ ID NO: 2369956 - DNA, 25 bp, Homo sapien
agaggagagttaggcctcaggatca

SEQ ID NO: 2369957 - DNA, 25 bp, Homo sapien
catctctcaaggttatcgtagggaa

SEQ ID NO: 2369958 - DNA, 25 bp, Homo sapien
gcgtgacaagggttctttctagggc

SEQ ID NO: 2369959 - DNA, 25 bp, Homo sapien
agccctggagaacgtctggcccttc

SEQ ID NO: 2369960 - DNA, 25 bp, Homo sapien
ggcatcttggagaccgcccacctct

SEQ ID NO: 2369961 - DNA, 25 bp, Homo sapien
agcagctaggacaggaggcgtgaca

SEQ ID NO: 2369962 - DNA, 25 bp, Homo sapien
agttgattgatggtacaagttgcta

SEQ ID NO: 2369963 - DNA, 25 bp, Homo sapien
tgtcaacatgtcctcaaatgccagt

SEQ ID NO: 2369964 - DNA, 25 bp, Homo sapien
tactgaataatctcctgccctcttg

SEQ ID NO: 2369965 - DNA, 25 bp, Homo sapien
ccttcagtggattgtatccaaacag

SEQ ID NO: 2369966 - DNA, 25 bp, Homo sapien
ccagggcacagggttagccctgata

SEQ ID NO: 2369967 - DNA, 25 bp, Homo sapien
aatgccctttcagcagaggggagcg

SEQ ID NO: 2369968 - DNA, 25 bp, Homo sapien
gataacctgagatcaaagcagcctg

SEQ ID NO: 2369969 - DNA, 25 bp, Homo sapien
aagacaagcgatgcgggcagcttca

SEQ ID NO: 2369970 - DNA, 25 bp, Homo sapien
tgttctgtgctaaacccaaaatgca

SEQ ID NO: 2369971 - DNA, 25 bp, Homo sapien
gcattccctactcttctctagttgt

SEQ ID NO: 2369972 - DNA, 25 bp, Homo sapien
aaactcacagtcctcctctttatca

SEQ ID NO: 2369973 - DNA, 25 bp, Homo sapien
aatgttaaactcacagtcctcctct

SEQ ID NO: 2369974 - DNA, 25 bp, Homo sapien
ggtacatttcaaaacgcttattgac

SEQ ID NO: 2369975 - DNA, 25 bp, Homo sapien
tttgttcctcatccttgtcagacag

SEQ ID NO: 2369976 - DNA, 25 bp, Homo sapien
agttccaagactacagcaaactgga

SEQ ID NO: 2369977 - DNA, 25 bp, Homo sapien
gacacacaccgcaaagaaaaggagt

SEQ ID NO: 2369978 - DNA, 25 bp, Homo sapien
ccctcactcggggaaacatatgaag

SEQ ID NO: 2369979 - DNA, 25 bp, Homo sapien
acatatgaagctttgtctcccagca

SEQ ID NO: 2369980 - DNA, 25 bp, Homo sapien
atatgaagctttgtctcccagcagc

SEQ ID NO: 2369981 - DNA, 25 bp, Homo sapien
cactcggggaaacatatgaagcttt

SEQ ID NO: 2369982 - DNA, 25 bp, Homo sapien
gaggcgccgcgttgctttgcccctt

SEQ ID NO: 2369983 - DNA, 25 bp, Homo sapien
catgacgttcgcagggccaggaatt

SEQ ID NO: 2369984 - DNA, 25 bp, Homo sapien
tgaattcgccgtgaaaccagatccc

SEQ ID NO: 2369985 - DNA, 25 bp, Homo sapien
ccaggaattcaggaggcgccgcgtt

SEQ ID NO: 2369986 - DNA, 25 bp, Homo sapien
acaagaagtcaataagagccaagtc

SEQ ID NO: 2369987 - DNA, 25 bp, Homo sapien
tcctaagcaggacaagaagtcaata

SEQ ID NO: 2369988 - DNA, 25 bp, Homo sapien
aggttttcctaagcaggacaagaag

SEQ ID NO: 2369989 - DNA, 25 bp, Homo sapien
gcaggacaagaagtcaataagagcc

SEQ ID NO: 2369990 - DNA, 25 bp, Homo sapien
tcaatctctttggttggtgttccac

SEQ ID NO: 2369991 - DNA, 25 bp, Homo sapien
ctcaatctctttggttggtgttcca

SEQ ID NO: 2369992 - DNA, 25 bp, Homo sapien
ttcctcaatctctttggttggtgtt

SEQ ID NO: 2369993 - DNA, 25 bp, Homo sapien
cctcaatctctttggttggtgttcc

SEQ ID NO: 2369994 - DNA, 25 bp, Homo sapien
aatcggatccgaaagctgcattcct

SEQ ID NO: 2369995 - DNA, 25 bp, Homo sapien
tggccacatctctctaatcggatcc

SEQ ID NO: 2369996 - DNA, 25 bp, Homo sapien
ggttgctgcgaattcctccagctta

SEQ ID NO: 2369997 - DNA, 25 bp, Homo sapien
ttcagttccccccaggttgctgcga

SEQ ID NO: 2369998 - DNA, 25 bp, Homo sapien
tggctcatgaatgcaaaccaaggcc

SEQ ID NO: 2369999 - DNA, 25 bp, Homo sapien
cacagataactgagacttgaaccca

SEQ ID NO: 2370000 - DNA, 25 bp, Homo sapien
tcactttatctacatgcatgtcttc

SEQ ID NO: 2370001 - DNA, 25 bp, Homo sapien
gcaatggaggcgtcttgtagctaga

SEQ ID NO: 2370002 - DNA, 25 bp, Homo sapien
tttccaccaatgtactggtaaaaca

SEQ ID NO: 2370003 - DNA, 25 bp, Homo sapien
ccaccaatgtactggtaaaacaatc

SEQ ID NO: 2370004 - DNA, 25 bp, Homo sapien
ttctttccaccaatgtactggtaaa

SEQ ID NO: 2370005 - DNA, 25 bp, Homo sapien
tctttccaccaatgtactggtaaaa

SEQ ID NO: 2370006 - DNA, 25 bp, Homo sapien
tgccggaggtcaaggtcgtgctctt

SEQ ID NO: 2370007 - DNA, 25 bp, Homo sapien
taaagaggcttctgccggaggtcaa

SEQ ID NO: 2370008 - DNA, 25 bp, Homo sapien
cttctgccggaggtcaaggtcgtgc

SEQ ID NO: 2370009 - DNA, 25 bp, Homo sapien
ggtcaaggtcgtgctctttctctct

SEQ ID NO: 2370010 - DNA, 25 bp, Homo sapien
gaggataccagaactcattgagctc

SEQ ID NO: 2370011 - DNA, 25 bp, Homo sapien
tggtgcctaaatcctgttgcttcct

SEQ ID NO: 2370012 - DNA, 25 bp, Homo sapien
catccatccacataagtcaacactg

SEQ ID NO: 2370013 - DNA, 25 bp, Homo sapien
taaacctaagcaataaattggtgcc

SEQ ID NO: 2370014 - DNA, 25 bp, Homo sapien
ctttgccaaaccttgtgattttttg

SEQ ID NO: 2370015 - DNA, 25 bp, Homo sapien
gtgtctttgccaaaccttgtgattt

SEQ ID NO: 2370016 - DNA, 25 bp, Homo sapien
cagccggtgtctcagtgtctttgcc

SEQ ID NO: 2370017 - DNA, 25 bp, Homo sapien
ggccaccgtagaagacagcctgggt

SEQ ID NO: 2370018 - DNA, 25 bp, Homo sapien
cagttccccacacctggagttgagc

SEQ ID NO: 2370019 - DNA, 25 bp, Homo sapien
caaataccggctgtgcttgcaacac

SEQ ID NO: 2370020 - DNA, 25 bp, Homo sapien
gaagccaaaggtttacttgagctac

SEQ ID NO: 2370021 - DNA, 25 bp, Homo sapien
gccctaagtgactgtagcttacaga

SEQ ID NO: 2370022 - DNA, 25 bp, Homo sapien
ggctgaggttttcaatccaggctct

SEQ ID NO: 2370023 - DNA, 25 bp, Homo sapien
ccgggagccctaagtgactgtagct

SEQ ID NO: 2370024 - DNA, 25 bp, Homo sapien
tgactgtagcttacagacaatccaa

SEQ ID NO: 2370025 - DNA, 25 bp, Homo sapien
tgtttacaaagctattaacgtactg

SEQ ID NO: 2370026 - DNA, 25 bp, Homo sapien
gctattaacgtactgtatttgtaaa

SEQ ID NO: 2370027 - DNA, 25 bp, Homo sapien
tacattgttttgcagggatgggagc

SEQ ID NO: 2370028 - DNA, 25 bp, Homo sapien
gggagtcatgtggtacgcattttct

SEQ ID NO: 2370029 - DNA, 25 bp, Homo sapien
tcttccttgttgggtaatagctgcc

SEQ ID NO: 2370030 - DNA, 25 bp, Homo sapien
gggtaatagctgccatccctgagct

SEQ ID NO: 2370031 - DNA, 25 bp, Homo sapien
ggcatcaacatccccgaccacagtt

SEQ ID NO: 2370032 - DNA, 25 bp, Homo sapien
catctctccattggagccatcccca

SEQ ID NO: 2370033 - DNA, 25 bp, Homo sapien
ctccattggagccatccccaagacc

SEQ ID NO: 2370034 - DNA, 25 bp, Homo sapien
aacatccccgaccacagttagctga

SEQ ID NO: 2370035 - DNA, 25 bp, Homo sapien
cttgggctcgttccataatagcagc

SEQ ID NO: 2370036 - DNA, 25 bp, Homo sapien
aacattggaagcttgggctcgttcc

SEQ ID NO: 2370037 - DNA, 25 bp, Homo sapien
ggtccccaacattggaagcttgggc

SEQ ID NO: 2370038 - DNA, 25 bp, Homo sapien
cctggcccgactttccatcccgcat

SEQ ID NO: 2370039 - DNA, 25 bp, Homo sapien
cagcccagtgtgtttagggctttga

SEQ ID NO: 2370040 - DNA, 25 bp, Homo sapien
tacggcctgcatccaaaacttcctt

SEQ ID NO: 2370041 - DNA, 25 bp, Homo sapien
tgctaagatgcctaaaattacggcc

SEQ ID NO: 2370042 - DNA, 25 bp, Homo sapien
cctaaagccgtagtgttgtacaaca

SEQ ID NO: 2370043 - DNA, 25 bp, Homo sapien
acattgaatttctataagattcccc

SEQ ID NO: 2370044 - DNA, 25 bp, Homo sapien
tcagaagggatcaggcatagctttc

SEQ ID NO: 2370045 - DNA, 25 bp, Homo sapien
tggaccggtccagtaaatctccctg

SEQ ID NO: 2370046 - DNA, 25 bp, Homo sapien
cacggcatcccttcgtgtagtagat

SEQ ID NO: 2370047 - DNA, 25 bp, Homo sapien
atgacctttcctcgccttcagccat
